United States Patent Application Publication US 2007/0042382 A1 - sequence listing, part 8

SEQ ID NO: 15976 - DNA, 201 bp, Homo sapiens
tcatttgtggcccctgattcttgctgtccatgatgtttctcctgaatccttcttgtgacattgttcttcctacttaatccatgaatcgtattaattcattyattcactcactgccttgtaaggtagtgattctagacacttgttctagttataggtacttgaatacactggtgatcaaaaaagagacactccaaccatccc

SEQ ID NO: 15977 - DNA, 201 bp, Homo sapiens
tcatgttggagtcaaataacacacttgtctattataagtaaggagtgatctgtggatttgagttgtttcttaagaatagttcagtatcctcttgttattgrtattagtttactcttctatctgtgaaacacaatagggcctggaattaaatttaaatctggaaagtgtgtaaaacataagcaaactccagagcttctttta

SEQ ID NO: 15978 - DNA, 201 bp, Homo sapiens
caatctgatcatcaccaacatttctagccttagtttggtctcctctgcctgaatttccagtcactgccttcacactttacatcccctcaacttgtcttgtrcgtcacacagttttctcccctctcctttgtgtctagttttccctaaccatcatttgtggcccctgattcttgctgtccatgatgtttctcctgaatcctt

SEQ ID NO: 15979 - DNA, 201 bp, Homo sapiens
aatctgaaaatttcaaagtaacgatgaaaattatgatttgtaaattaatatctaacaattaaaacctctctttaaaagtgatattagtatgtttttaatcyaacatctagtaaaaataagaaaaagtacagcaaaatataagaggtgcttgtctctactttttgcataagtacataatttgaacatataggatatcaagag

SEQ ID NO: 15980 - DNA, 201 bp, Homo sapiens
ctagaccacacaacaatattagctccagtagaattttctaaagctgtgtatttttcttcctgatctaaaattcaagtgttagtctgcatcatcatcagagkcaaagaagaacattacagaaatgtaagaaagaatcagatctcctttgttaagaaaactgattccggacaccaaaagactcattgctttgggttataaacc

SEQ ID NO: 15981 - DNA, 201 bp, Homo sapiens
ccagcttgatcaggcctgtgcacacctcagtttgatatttaaatttttggacaatctgatcatcaccaacatttctagccttagtttggtctcctctgccygaatttccagtcactgccttcacactttacatcccctcaacttgtcttgtgcgtcacacagttttctcccctctcctttgtgtctagttttccctaacca

SEQ ID NO: 15982 - DNA, 201 bp, Homo sapiens
tacaattgtgatacaatgatttaaaatcagattacatttatttatgagagtattattgatattgctgtttttaacaacatgcactggtgggtcactgtagycaaaggaaaatactaaattcaatccgtgattgaagccattaagatcaaagctgacttcctggagtttgactgaagtgtgtctgccatgcgggtaagagcg

SEQ ID NO: 15983 - DNA, 201 bp, Homo sapiens
cctgcttctgttgtagcatggaatttttccaccaaaattctatgccgtggttccttttactcctctctgaagaccagcagatcaatgaaaaagtcatgctytcttagaaagagccctataagctgtgatggcaggggaatcccagcacctagcatcccaggctcaacctgattcttaggacctgattcttagattgtgaac

SEQ ID NO: 15984 - DNA, 201 bp, Homo sapiens
tatttccttctcttcagaaaccgtgatgactttctgcacccagcttgatcaggcctgtgcacacctcagtttgatatttaaatttttggacaatctgatcrtcaccaacatttctagccttagtttggtctcctctgcctgaatttccagtcactgccttcacactttacatcccctcaacttgtcttgtgcgtcacacag

SEQ ID NO: 15985 - DNA, 201 bp, Homo sapiens
tgtttgttaaaaaaggaagaaattatttcaaaatatatggtctttataaacacataaacttctagaaacatttataactgaaaatgtgttgtttttacaaygtatcattttctagtagcagtaagttatgctgtagctcaactattcttaaaaccttcctggcaacgtttctctaggaaattgagatccttaaaattttta

SEQ ID NO: 15986 - DNA, 201 bp, Homo sapiens
aaataccccgttgttttcagtgtatgatactacctgttgtctttaatgcaaagaaaaaaacatttggttgctttatacccaaaaaaattaataacccatgyttctaaaccatttaaaatcaatcaatcaatctctttttcccaggcatatcttcttatttgatttggcagtgatcgtatgtaagagaaaaggtgataacta

SEQ ID NO: 15987 - DNA, 201 bp, Homo sapiens; identical to SEQ ID NO: 2543

SEQ ID NO: 15988 - DNA, 201 bp, Homo sapiens
agcccccctgtattatacttaatttacatatttatttgtgtgctagtggattagaacactgtttattttattcctccatttcgatcatttactctattagrcttctaagagcagttaaaccaatcttctcacctacaatggacataaaaccccagtttaattggggtgttatgaaaacaaaatactctgtttgtagaatcc

SEQ ID NO: 15989 - DNA, 201 bp, Homo sapiens
gttgtcttagggtgcccttcacctactctgcgtgtgtgtggcgcgacaaagggaatttgatcaagctcttctataataacgaaggggagggacgaaacgakgtgatggggtaatttgcctttagtctcttcttttgctttgcgtcttgtactcatgttttcctaaaagaggaaccatgacatacatgaggactcgaggaag

SEQ ID NO: 15990 - DNA, 201 bp, Homo sapiens
tactcgaagaaaacactggggaaatgctccagaacataagtctgggcaaatattttttgtgtaagatctcaaaagcacaggcagccaaagcaaagatagasaaataggattatataaaggcaaaatgtttctacacagcaaagataacaatcaacaaagtgaagagacaactcacagaatgagaaaaaatatttgcaaact

SEQ ID NO: 15991 - DNA, 201 bp, Homo sapiens
tgcagtccttatcaaaatatcagtgatattcttcacagaaatagaaaaatgttctaaattttatctggaaccccaaatgaccttgaatagctaaagcaatyctgagcaacaactacaaagctggaggcatcacagtatctgacttccaaatatactacaaaaatatagtaaccaaatcagcatggcatggaaacaaacatg

SEQ ID NO: 15992 - DNA, 201 bp, Homo sapiens
taaaatgtttacttggacttggtggtattaacactttttaatgttaataatgacattttttgtaaagttcatgtagacttcatgcatcattgttttctcarttctaaaacttgtttggcttattttcaggtttaccaaagatgcaggtcattaggaactattctggaacaccacccccagctctgcatgaaggaccccctt

SEQ ID NO: 15993 - DNA, 201 bp, Homo sapiens
gtggggggttggggagggagagcatcaggaataataggtaatggaagctgagcttaatacccaggtgatggtttgatctgtgcagcaaaccaccatggcasatgtttacttatgtaacaaacctgcacatcttgcacgtttactctggaacttaaaagttgaagaaaaataaaataggaggggagggcaaagagtgattgt

SEQ ID NO: 15994 - DNA, 201 bp, Homo sapiens
aaattcttagactttttgtacttgtctgatttatccagggttttagacaactttccagtttatattaagaataggctaaaacgtaaaccatcagaacttawcagccacatggaaatttcattaaaataggctcactggagccatgtaatagaattagtccagattcaatacatttatattactttcctctaaatgtaatca

SEQ ID NO: 15995 - DNA, 201 bp, Homo sapiens
agatagtttaactgttaagaaattgtttttacatatttatggaaatattctataggtctttatataacatgttagtatttatatgtttacctgtataactrtaataaaatataatgcttacaatggtttataatacttagaggaaattatgcataatatatatattcccctctctatcctcctaccggtccctccatccaa

SEQ ID NO: 15996 - DNA, 201 bp, Homo sapiens
ttaaataactaggttaaggttatcctccatgaactagtgtaatagcaaggaatagcactaacattttaatttctcatacttttaataccttttttcctggyttttacagattaagaaaatcaaaacgatatatttaatgccttcttatttgcaaattttcttagaatgttacagtagataatttcactttagaactaaaga

SEQ ID NO: 15997 - DNA, 201 bp, Homo sapiens
cactgagttaaatgcaatgcctcgcgcttgctgcactctttctctaccatgtgcacagattctctctctctaccacacagctactaccaggagatggggggaggggtggcatccatgattcaagactgtctttcctatcctcttcagtgctgctttcagtgatgaagttaaaaccaggtactgtgagtgctcacttgattt

SEQ ID NO: 15998 - DNA, 201 bp, Homo sapiens
ccaattttcagagtatgtcatttctagtaatgactaattgatttctttttggaggggaggggcagactttctattgttttaagtctcattctgagctagtrggtctttatatatattcaatgtgttttttatcaaggtactcataattctttaaaaaaattttttagttttaatttttgtgggtacataggtatacatatt

SEQ ID NO: 15999 - DNA, 201 bp, Homo sapiens
tgttgtaatattaatagatgacatccaggaaagtcttgggttttgcaatattttcatctagccatttcacagaatagagaatttatccttattctaaaggrtataattatttaaagaataaaccatagagttcttataattccaagataataagaatagaaggcacttttgaaatttccttgaataaatcctaatttcttg

SEQ ID NO: 16000 - DNA, 201 bp, Homo sapiens
agtatgatttgtaaggccaagggctggatatggtcttgcattttgtacactgagtaaagatttctgctagtagaggttgaaatgcaactgctgtcttctcrctgtgggatctcaccagggtttacatctgccctggaggggtactttcttctagtttgtataaaatattcatcatctcactaggctagtgttggtgaccct

SEQ ID NO: 16001 - DNA, 201 bp, Homo sapiens
ccctccttgcttttgcctttagttgaggtactcatcactgggattattgaaattgtcttctaggtgttttcttgccatcagttttgaatcgtttcaagctmatcttcaacataatcttccaaaaatgtagatctgatcattttactcatgggtttatcaccaggggaaggtatctgagttaccagtggcgaatctgtacag

SEQ ID NO: 16002 - DNA, 201 bp, Homo sapiens
tttgtgatgggtgtttaggccttagcaagtgcaggatgcactggtcctggcaagtggagccatgctgggctttgtgggtgggctttttgggttttgtgggyacagcttggactcgtgttgcaggtgaggcttaggaaggggtttgacatttttagtcatttggggtggaatagcatttgctgcttttactgtatttcagtc

SEQ ID NO: 16003 - DNA, 201 bp, Homo sapiens
aacctctattcttcaggccacgtggtgttacttatgaacatagtgaccttgggagcattttctgaaaatactcttccccctccttgttttgattctggaayagtttcctttttcctcacaattctaccttccttcaacagttgcatttacagataatatccttcaccgtttgtttctttatgcatcactagtgtgtgtata

SEQ ID NO: 16004 - DNA, 201 bp, Homo sapiens
gaaaatactggcataaaaacctctattcttcaggccacgtggtgttacttatgaacatagtgaccttgggagcattttctgaaaatactcttccccctccytgttttgattctggaacagtttcctttttcctcacaattctaccttccttcaacagttgcatttacagataatatccttcaccgtttgtttctttatgca

SEQ ID NO: 16005 - DNA, 201 bp, Homo sapiens
ctattattgtagtagttatgttttagaagataaagtatatatctattaaatatttagaagaaaatcctgaaaaagaagtaatgaacctagtgagctacttsgaacatttatcatcaataaactgttccttacttagaacgtcagatatggagtggacttcctttgccatatctatggttatgctggttgaataccattcca

SEQ ID NO: 16006 - DNA, 201 bp, Homo sapiens
tactgaactggagtccagagacccaggctaaagccaagactctggccgtgttcaatgatgcttttgcctaccaatgatcagtaaaggcttattaatatatraaatgatgaaatggtgttctgtgtgatttggggaccatccctgaacctctctgtgttttagttagctcatttggaaaataagagggtttgaataaacatt

SEQ ID NO: 16007 - DNA, 201 bp, Homo sapiens
ccatctcttttgtttttcagtctattccaatctggcatttgttcccatcaccacattacaattacttttatcaacatcactcatgaaatttatattctgtwtactgggacacttctctaccctcatcttaatcagctgtttgccagttttctactcagttcacgtctccctgcttcttgaaaccttcttcctctgctgctt

SEQ ID NO: 16008 - DNA, 201 bp, Homo sapiens
ggagtttgactgaagtgtgtctgccatgcgggtaagagcgcagtcctcatggctactgctcgctgccaggttggacggagcattggtgggtaaagggtgcrgcctggggcttgggttggcccagagccttagggttgaagcaaaccatggagaagttctctttgactagtaaaaacatactaacaagtgtttcatctattt

SEQ ID NO: 16009 - DNA, 201 bp, Homo sapiens
aatttttttgtagagatggggtctcagtgcattccccaggctggtctcttaactcctgggctcaagtaatcctactgccttggcctcccaaagtgctgggragattcaattttcatatgtcaattaaatttacagaatttgcaaatccaattgcaggaaatgggtagatgagctttaactttttttctccttctaattgct

SEQ ID NO: 16010 - DNA, 201 bp, Homo sapiens
gtttcaaagtgagtcagggtaggcccggctcagtggctcatatctgtaatcccagcactttgggaggccgaggcggggggatcacttgaggtcagaagttsgagaccagcctggccaacatactgaaaccctgtctctactaaaaatacaaaaattagccaggcgtgttggcgggcacctgtcatcccagctacttgggag

SEQ ID NO: 16011 - DNA, 201 bp, Homo sapiens
tgattattctcccaatgaaaattcaaatgctgtctggattggagcctctttgcacacattcctcaaaggatttttaacataaagtcctaggcaacatacaytcacaatttgaaatcattaaatcaatccagaaacaaaccaccttatgccaagatcagcagaaacaataaaatatataattaaatccacaaatatagcaga

SEQ ID NO: 16012 - DNA, 201 bp, Homo sapiens
tgaagttttgttttagggatagtctagcacaaagtaggcatttaataaattactgttgaatgaatgaacaaaggagtgaaaaagcaaatgcaagtccctasctgtatatagaacattagcaatggtagatactaattaaatcagcctgtagaatcatattgaatgatatttgctgacccaagaagtggctagaaggagaaa

SEQ ID NO: 16013 - DNA, 201 bp, Homo sapiens
tgaggtgggaggatcacttgagcacatgagatcagattgaggctgcagtgaactgagattgcaccactgcactccagcctgggtgacagagcaagaaagamcctgtctcaaaataataataataataataatgataataataataataataataataaataatttatttttaattttgggggtacatagtaggtgtatata

SEQ ID NO: 16014 - DNA, 201 bp, Homo sapiens
gaatattaagcattgaatgtaccatgtactgttttctgtttacatcctcttgaataaggcataaaaatgagcacttgaagttttgttttagggatagtctmgcacaaagtaggcatttaataaattactgttgaatgaatgaacaaaggagtgaaaaagcaaatgcaagtccctagctgtatatagaacattagcaatggt

SEQ ID NO: 16015 - DNA, 201 bp, Homo sapiens
ttctggaagaatcattattttcaacatcattatagttctattgtcagaatatgttttttaatattaagaaaatatatagaagaggcaaattttacttagtrgaatttatataactaagtagtctaaaaggttttagaagaaataaaccacagctacaaattagacgcattgtgcaggtttcccctttcccactgaactgag

SEQ ID NO: 16016 - DNA, 201 bp, Homo sapiens
tgcagagtattgtgaagagtaagtgaactcagatgggcaagatacctagcacagcaccagagatgtagtggacagttggtaatcatgtgagattctttccmttctcctgtcccacaccatcctctgatcttctcatggtatagggctttcctcacagttcttttgggaactcttagaactctataacttcgcttgtctatg

SEQ ID NO: 16017 - DNA, 201 bp, Homo sapiens
attttcttccattctgtaggttgtctctttactctgttgagagtttcttttgctgtgcagaagctctttagttaattagatcccatttgtcaatttttgcktttgtatttctctctatagacatttgtacagggcacaaaggcatagagataaatcatatgaagttcccacttttagggggcgaagagaaaatggagttga

SEQ ID NO: 16018 - DNA, 201 bp, Homo sapiens
atagtgctgtagtgaacatatgtgtacgtgtgtctttatactagaacagtttatattcctttgggtgtatatcctgcaatgggattgctgggtcaaatggyatttctgtctttaggtctttgaggcatcaccacactgtcttccacaaatgttgaactaatttacactcccaccaacagtgtataagtgtttctttttctc

SEQ ID NO: 16019 - DNA, 201 bp, Homo sapiens
gtgaatgaaactcaatccctgaccctgtgttgcttttagtctatacagtacgggttttacttcatattttcccttataaaacagtggatgggaagggagcygtttgggttagagtgaatgggcatggctaaagtttggtaggtgggtaatgcttttctggatacatagttaattttgctcatgtgtacattataccactaa

SEQ ID NO: 16020 - DNA, 201 bp, Homo sapiens
aggcagttactaaagctttccatgcattatctcatctaattgtccaacaccgtgaggcaggcactgttatttatccccatgtggtggatactctctgaagmtaagaggggtttagtaacttacaccaacaagtggtttgtggtagagccaaacttagaataagaacattaagagcgaactgaattcttgtcagcgaggcta

SEQ ID NO: 16021 - DNA, 201 bp, Homo sapiens
ccttcttgcagtttcttgaagactatgctgttaaatgtctctgtgctgttgcatatacctttttgtctgcttgaagttccctttttcatttgtctacttgwagattcagttcaagagtcatctttgtattgtcttccctgacttttctcccaggtgtggctgagcacatgctgctttgtgccacagtgtctggtagaatgc

SEQ ID NO: 16022 - DNA, 201 bp, Homo sapiens
ttgaactccatttacttaccctttgtaagtattggtttcttcccttatgctatggtttggccctgtgtgcccacccaaatctcatcctgaattgtaatccycacgtgtcaagggaggggccaggcaggaggggattggatcatgggatttcctccacgctgttctcatgatagtgagtgagttctcatgagaactgatggt

SEQ ID NO: 16023 - DNA, 201 bp, Homo sapiens
ttctgtttttaatgaggacataaaatttgctaaacataattaaggcctaatttactctgaatatgtgtttattgtaacatatctgcttttgaaactattayttataagcacaattagaaaaatgcttaaaatttatgtgagttttctgcataactttgttttaaattatttaaaatttgtgtgacttttatacatatcttg

SEQ ID NO: 16024 - DNA, 201 bp, Homo sapiens
atcttggagacagaggtcttcaagagggagttggatggtttcatgtcactcatttctttaaaagccctaaataaatgactaaaaccatacaaacatagccraaaaaatagagtaacaaaaacaacagaaagaatatattcttctatctttagttcttaaatttcctttttattcttttaaatatttagctcaggaatgcta

SEQ ID NO: 16025 - DNA, 201 bp, Homo sapiens
attaaaaacagaagttgccgactaaggctaataaaagggcagcagtaatttttgtctactgtcactgttgtttctctagattgtcatatctttaaaaactyggtaagacaaatctgttagtgtttgattttagatttcttgtttataatctaaaaatcagacccagaatctgatttacctttttggttctaatctagttat

SEQ ID NO: 16026 - DNA, 201 bp, Homo sapiens
tggagaagtctatgaggacttaatgaaggcagaggaagcacatcagcccgtaggacttttacttgtttttaaagttactctgaatattttattaggaaagrctaattaacataataatttatgtaacatctgctgggattttttttaacctttgcttgcttataactatataattatgacttgttactgcatttggagaca

SEQ ID NO: 16027 - DNA, 201 bp, Homo sapiens
gataggatgattgggttagtggtaatatgcaaagacagagctgatctcgagcctttgctcttatatgctaggcttttttttttatgggtttcgtttggctrtataatcttcagatgagtgaaggaatgtctgcagagaaggaaattgaatttcatgtcctagagcaggcaggttccttggactgtatgacaggcatgtcag

SEQ ID NO: 16028 - DNA, 201 bp, Homo sapiens
ttaagaagtttgggaacctaaagacatcaaatcaagaatattaagcattgaatgtaccatgtactgttttctgtttacatcctcttgaataaggcataaaratgagcacttgaagttttgttttagggatagtctagcacaaagtaggcatttaataaattactgttgaatgaatgaacaaaggagtgaaaaagcaaatgc

SEQ ID NO: 16029 - DNA, 201 bp, Homo sapiens
ctgctccttatatctataaagtttaacaaggattctttaccaaaatcactgctgatttttcctaatagccttaggcttttgggaagaagcagcagaaaaaytagaatttattggctgccagatgataaagtacagtttcttggggagatagcaatttagaattttagcaaagttactatgaagtataatgatgaaagggag

SEQ ID NO: 16030 - DNA, 201 bp, Homo sapiens
gccataaaacaaacagttaatttgtggatatgagagacttgatggccaggtgtgatggttcatgcctgtaatcccagcactttgggaggctgaggtgggcrattcacctgaggtcaggagttcgagatcagcctggccaacatagtgataccccatctctactagaaatacaaaaattagccgggtgtggtggcacatgcc

SEQ ID NO: 16031 - DNA, 201 bp, Homo sapiens
caaaactggaaatctggtttgagaactgaaatcaaacttctctttgctgtttcaaggattcctctatagatcaaacagtgaatctttcgggtagttttttwaaaaaactctatttccttcctaatatacatgtaaatatgcacacagaggtttacagacataccaagatatacgtatctatatacgtaagtagagggaaag

SEQ ID NO: 16032 - DNA, 201 bp, Homo sapiens
atgtctatgcagatattgggagggtagaagtatctttttggagaattgctcagagttgaagttgagggcttctataaataagggttatattatatatggtwaaataaaatctgagcaggcatcagaatattccattgttttatttccttcttctttgaagttcatcatgtaggaaagccctgataatgtctgcttccagct

SEQ ID NO: 16033 - DNA, 201 bp, Homo sapiens
agaataatataggtaaatcctgaagtttgattttgcctatggttcaaattttgctgcttatccattattaaatctgtagtactcctttttgataagtcatrgagaataaaagaaaataactcctgcagcatccatgacaatgcatgaagaacagcaagccttgtgtatctccacaggatggcttcttcccagtgtctttag

SEQ ID NO: 16034 - DNA, 201 bp, Homo sapiens
taaagaaattgaagcatcttgagttgaaagaaaaataagaaaatctctatggatgtaaagatcattcccagttcaaaagctaaggatgggcagcaaggtcrtgtcctggaaaatgtaaactctgtcaaatttgtaaccaagatccaggcatcctccctgctggaagtaacttacattctgttgaaacaagcaggctgagca

SEQ ID NO: 16035 - DNA, 201 bp, Homo sapiens
atttataagagaaaattggaaagaattacattgacctctgtgagtagcagatatgcggagctatgacaggtactatacttcatcagaaactaaaaacagtstcaagtaccatttgtgctttatcaacttttgtttaccacgaaaaagcataagtttgtttttctgccattttgaaagaaaataagtgcaggaaagtagaaa

SEQ ID NO: 16036 - DNA, 201 bp, Homo sapiens
gatcagagagatctggatccagattcttggctttgttacctcctctctgtgtggtcataacacaggcaaagcacttcaagctcagtgcttgcttggcacgraatagctggcaaagagccagcagtgatggaaattcttactcttactggtaggaagcagtatgggcatcaagtttgaaaacatgactttcagtccaagctg

SEQ ID NO: 16037 - DNA, 201 bp, Homo sapiens
aatttaaatgctgcagatttgtgtagagttctaataccaaagacagaagtaaatgttttccatatactttgtcttgcctgtatgcagccctcgtgtaatayggtgaattagagtggtatttcactttgtattattttgtaaatatgtcaatataataaatagtgactaaattgatttctaagagttggagtctttttattg

SEQ ID NO: 16038 - DNA, 201 bp, Homo sapiens
tctggatccagattcttggctttgttacctcctctctgtgtggtcataacacaggcaaagcacttcaagctcagtgcttgcttggcacgaaatagctggcmaagagccagcagtgatggaaattcttactcttactggtaggaagcagtatgggcatcaagtttgaaaacatgactttcagtccaagctgctgtgcaaatc

SEQ ID NO: 16039 - DNA, 201 bp, Homo sapiens
aaatgtaatacaattttatagaaggtagtcaagaaagtcctctccaagggagtgacaattaggtgggacctgaagcgagtaaaggaacacaggaatgtcamtgtttggaaaaaagaatattcctggtggagggaataccaagtgcaaagctcctgaggtcattaagtggcaggcatactggaggaacagcagggtcagtgt

SEQ ID NO: 16040 - DNA, 201 bp, Homo sapiens
tgcttgcttggcacgaaatagctggcaaagagccagcagtgatggaaattcttactcttactggtaggaagcagtatgggcatcaagtttgaaaacatgaytttcagtccaagctgctgtgcaaatctttggacaatttaataagcctcagttttctaatctgtaaaatggagatgaaaatactcaccctacccacataca

SEQ ID NO: 16041 - DNA, 201 bp, Homo sapiens
tgatcttcagttcaaaaataagtatattttttcatgctgatttagtgtttgtttttatttatgataggttaaagaggtaaacattaatcatatttagttayacatttaacatgttcctcttattatataatacagttaaataaaatgcagttggccagtgaatatctaagaaatttggtgtctgtatatgttagattttag

SEQ ID NO: 16042 - DNA, 201 bp, Homo sapiens
agcagtcttgtaggaatgcattcattaaatcagtgcactttatcagaagatttattttttagccaggctggctacaattatggatcatgccagatgctcartggagggaggaagtgagatgaagtaggctaaagagaaataatcttggtcagattgaagaaggataagcactcttaattgtcaatatcaaatgaaaggaga

SEQ ID NO: 16043 - DNA, 201 bp, Homo sapiens
ggattctgtgtggttgagagttgctgtattctataaaaggggaaatcctggctcatcagtatctcaagcttttcctacagtctctcaaattgcgtgtaacrtctcggagcatatcattttagctttctaggtgtacccctgatttgtatccatctttaacttatcctagtctaattttctgccctcttttgccatcaaaaa

SEQ ID NO: 16044 - DNA, 201 bp, Homo sapiens
tctggaagaaattgtggattatattttccttgaacgtttggtagaattcactagtgaaaccatctgggcttgatgttttcttttggaaggttattaattaytaattcgacttctttagctgatacaggtctgttggtattatctatttctcctgtgtgagtttgtgtctttcaaggaattggcctgtttcacctaagttat

SEQ ID NO: 16045 - DNA, 201 bp, Homo sapiens
tgttttgtagcaagtaaaaagtgacctaaatgctttctagcatattgaagcaccaactttttatgtattgaatttaaagcagtgatttacactgctaacastgtaacatttacaacatttacaacattacatttacaacattacaacatttacaggctaacagcaaaacatttacaagtttctatagagaactttaggaag

SEQ ID NO: 16046 - DNA, 201 bp, Homo sapiens
tgaagcaccaaaggtttataggaaacttactcaggatgtgtgtttaagagtcaggatttaaatccaagtagcctgattccagagctgtcagttataatgcycacccaggagcattatgccttaggttgagcataatgtggagaatttgactcataggtttcacgataaattggaacagccaaactattgggaagggcggag

SEQ ID NO: 16047 - DNA, 201 bp, Homo sapiens
tccaggaagaatcatcttctttgaacccccacagtggaaagctccccgctctgtaggggtacgttttatcctaggattatctgtcacaactgaacaggcamaagactcccccaaaaatgcatttttccgtgtctgattttatcagtctggaataaccccatggggggagagggtgaaaaaacttggtgcagacagtgtggg

SEQ ID NO: 16048 - DNA, 201 bp, Homo sapiens
ttctttctggtgcatgggggtggggggagatattaagtattccccaagagcaatggtcagtttagtaattcgtctttgtatttttcttccttccttccccrtttttaatctgctcctcaggatcacttcaccaactaaatcctgcattcaggattttgtctaaacttctactttctgggaaactcaggctaagacagacta

SEQ ID NO: 16049 - DNA, 201 bp, Homo sapiens
tctcatgatagtgagtgagttctcatgagaactgatggtttcataaggcagtatttcttgctcttgctctctgtctcacttgtcaccatgtaagatgtacstgcttcaccttctgccatgattgtaagtttcctgaggcctccccagccatgtggaactgtgagcaaattaaacctcttttctgtataaattccccagtct

SEQ ID NO: 16050 - DNA, 201 bp, Homo sapiens
ttggccctgtgtgcccacccaaatctcatcctgaattgtaatccccacgtgtcaagggaggggccaggcaggaggggattggatcatgggatttcctccaygctgttctcatgatagtgagtgagttctcatgagaactgatggtttcataaggcagtatttcttgctcttgctctctgtctcacttgtcaccatgtaaga

SEQ ID NO: 16051 - DNA, 201 bp, Homo sapiens
gtgagataatgttgattcttaccacagtacctgagcaaagtgagaacttactattttaatctaaggtgatatagtgaaaaatcaggtttttttttttttttgaaagacgtgggcttatttagtatttttattgttttcatgatctggagtacacgtggatgggaacgttaaggagcaccaaactttaaaataatacgcaag

SEQ ID NO: 16052 - DNA, 201 bp, Homo sapiens
gttttggaaaatttaaatgctgcagatttgtgtagagttctaataccaaagacagaagtaaatgttttccatatactttgtcttgcctgtatgcagccctygtgtaatacggtgaattagagtggtatttcactttgtattattttgtaaatatgtcaatataataaatagtgactaaattgatttctaagagttggagtc

SEQ ID NO: 16053 - DNA, 201 bp, Homo sapiens
tattgcctctttctgctcctcttgggctctcttccttgtctttattttctggcttctttattcttccctttcttcttttttctctttgtccttttcccccragtttctctgtgtttttatcaataagacctttcaaaatcagtaaaacttttgaacacaagaaaggatctttaacagcttgagttcaaaaggtagccatgt

SEQ ID NO: 16054 - DNA, 201 bp, Homo sapiens; identical to SEQ ID NO: 2546

SEQ ID NO: 16055 - DNA, 201 bp, Homo sapiens
ctaaggaaacaggttttgatggagttttcaatgcatggctttatggactcaagaatcaaatgttttctgaacaatgtgaagaaagttttgtttctagatccttatatgttcctgtgtctccttttctgtagaaaagctctgcaatttttaatcagtaacacaaaaatgcctccatggaaatgtccataattctcagcgtgc

SEQ ID NO: 16056 - DNA, 201 bp, Homo sapiens
tccttcttttgcctgcttcagacatagaagcgtctggtccattgatttcaggacgtgtggaacactagcatgtactgaacagatcatatttgaagccatcygttccttacctgtgacctcattggatttgcttcattcattcattcattcatttattcattcattcattcattcatccctttatcctgaaaatattttcag

SEQ ID NO: 16057 - DNA, 201 bp, Homo sapiens
cactatgttgaataggagtggtgagagagggcatccttgtcttgtgccagtttgcaaagggaatgcttccagttttttcgcattcagtatgatcttggctstgggtttgtcacagatagctcttactcaaacaaccccatcaaaaagtgggcaaaggacatgaacagacacttctcaaaagaagacatttatgcagccaaa

SEQ ID NO: 16058 - DNA, 201 bp, Homo sapiens
tgagtctcataggaagtaaacttgaaaagagattgaaaaggagaaaaaagtgtatttgggtataatgattaatgattttgaaagacatgctttattttccrgaaatggaaaaatgataatcaggtattttttgtttctggttttgtttttaggtttcctcttcccaatatttaatgtgaagagtcccactggcacatatgg

SEQ ID NO: 16059 - DNA, 201 bp, Homo sapiens
agaagaaaagagaggagaatcaaatagatgcaataaaaatgataaaggggatatcaccatcgatcccacagaaatacaaactaccttcagagaatactatraacacctctatgtaaataaactagaaaatctagaagaaatggataaattcctggacagatactccctcccaagactaaactaggaagatgttgaatccct

SEQ ID NO: 16060 - DNA, 201 bp, Homo sapiens
ggtaatgcctaggttttcttctagggcttttatggttttaggtctaatgtttaagtctttaatccatcttgaattgattcttgtataaggtgtaaggaagrgatccagtttcagctttctacatatggctagccagttttcccagcaccatttattaaatagggaatcctttccccattgcttgttttttgtcaggtttgt

SEQ ID NO: 16061 - DNA, 201 bp, Homo sapiens
atatatcttcttctcagcaccacatcacacttattccaaaattgaccacattgttggaagtaaaacactcctcagcaaatgtaaaagaacagaaatcacarcaaactgtctctcagaccacagtgcaatcaaattagaactcaggattaagaaactcactcaaaaccgcacaactacatggaaactgaacaacctgctcct

SEQ ID NO: 16062 - DNA, 201 bp, Homo sapiens
tttctcccattttgtgggttgcctgttcactctgatggtagtttcttttgccgtgcagaagctctttagtttaattaggtcccatttgtcaattttggctwttgttgccattgctttggtgttttagacatgaagtccttgcccatgcctatgtcctgaatggtaatgcctaggttttcttctagggcttttatggtttta

SEQ ID NO: 16063 - DNA, 201 bp, Homo sapiens
aataataatgggaaactttaacaccccattgtcaatattagacagatgaacgagacagaagattaataaggatatccaggacttgaactcagcaatgcacyaagccgacctaatagacatctacagaactctccaccacaaatcaacagaatatatcttcttctcagcaccacatcacacttattccaaaattgaccacat

SEQ ID NO: 16064 - DNA, 201 bp, Homo sapiens
tgagggagaatccctcccatgctcctctcccagtttctactggcaatccttggcatggcttggtttatagatgcaccgctccagtctctgctggtcttcasgtcaccttctgtgtgtatcattgtcccttcttttctcttatggacacctgtcattggatttagggcccacccaaatacagcttgatctcattatgagatc

SEQ ID NO: 16065 - DNA, 201 bp, Homo sapiens
gtgtctttatagtagcatgatttataatcctttgggtatatacccagtagtgggattgctgggtcaaatggtatttctagttctagatccttgaggaattrccacactgtcttccacaatggttgaagtagtttacagttccaccaacagtgtaaaagtgttcctatttctccacatactctccagcacttgtttcctgac

SEQ ID NO: 16066 - DNA, 201 bp, Homo sapiens
catgaaatagcctcagaaggggctaaataagagaagtcagagtctaaggttcacaggagacacagcagatattagagtgctaagttgaaactggaaaagcrtgggaatatgggtgagtttgaaaacaaagtgtagatcagcatgttcctttcagtgtggtgacaaatagtgtagcaattcttcaaagattgacaaaggcta

SEQ ID NO: 16067 - DNA, 201 bp, Homo sapiens
tgtgtctttatagtagcatgatttataatcctttgggtatatacccagtagtgggattgctgggtcaaatggtatttctagttctagatccttgaggaatygccacactgtcttccacaatggttgaagtagtttacagttccaccaacagtgtaaaagtgttcctatttctccacatactctccagcacttgtttcctga

SEQ ID NO: 16068 - DNA, 201 bp, Homo sapiens
aggagaccaagagatgtgacaactacatataacatgtggtcttggattgaatcctagaacaggggttgggaagatacatacacacacacacacacacacamgtatgtatatatatgtgtgtgtgtatagtaacatattttgtatatgttataaaatatgtgtgtatatatgttgctataaaagatgtgatacaattggcaa

SEQ ID NO: 16069 - DNA, 201 bp, Homo sapiens
tcttaatctgatatcactttattttttttaaataagtgttttggggaagaagtgaatacaatttcattactcttagaatctttagcctaagcaacactggratatctagaggtatttgaaaacagaatttgcgtcggtttaatataactttatatttttccttgaaagcagaaactgaaaggggaacaggtaatgctctgg

SEQ ID NO: 16070 - DNA, 201 bp, Homo sapiens
ttgtacttcagtgtgaactgaagagatcacagtttcatacacaaggtttttcatacatgtaatctcttgagttaccctcttacacttcaataattacatayggattcctagtcccaaggacactgagcatataagtcgttgtgctggagattctcagaagaatgggtgtcctctggggacttggtcacagacctaaaaagg

SEQ ID NO: 16071 - DNA, 201 bp, Homo sapiens
aattactactctgaaactgaggtttagtattgtttcttttcatttgctacatctgactgaagacaggatgttctccatctgtgaataacaatagggggtaactcatattattaatggcctgagtaacaaggacagctattaggtaggtgtcatgtacatccagacagcagggagagattatcatttgcttaatcttccata

SEQ ID NO: 16072 - DNA, 201 bp, Homo sapiens
gtagagggtgtgagggagagggaaaaattcattgtgattttgaagttcccagtttggaagatggagtaaatgaatcagatatgtcaggaaacacatggaarttgagttttgtatatgctgcatttgagatgcctgaggagcagttaggaatgcatatctggagaacaaagaggtccaggctagggggaaagtgaggtcttc

SEQ ID NO: 16073 - DNA, 201 bp, Homo sapiens
aatccaagttactcaggaggctgaggcaggagaatcgctttaacctgggaggcggaggttgcagtgagccaagatcatgcaactgtactccagccttggtkacaaagcaagactctgtctcaaaaaaaaaaaaaaaaaaaaaaaaaaggaagacatttaaggaaggagtgatgtaagacactggaaaacatttgtactttt

SEQ ID NO: 16074 - DNA, 201 bp, Homo sapiens
aaatttgtaaatcggagagaggttgtgtatttataataaaatattccattttcttatttaggagcttgctatgcggcttttaatttattgaatgcgttgtygggcacggtggctcacacctgtaatgccagcactttgggaggctgaggtgggcagatcacctgaggtcaggagtttgagaccagcctggccaatatggtg

SEQ ID NO: 16075 - DNA, 201 bp, Homo sapiens
aaatgaggccagccatcttttgtttgctttcatttcctttaaagattatataagtagttatcaatattttctccaaatacttgtatttttgttttttgttkaaaataaatatcaggttcctatctaaattttacatttaaatgcagaatataagcctcatgaaggcagcaattttgtcgattttattccttatcgttggct

SEQ ID NO: 16076 - DNA, 201 bp, Homo sapiens
cacagacaggaggaatctagagaggaagtgtggttacaggggctttgctgagctgtggtgggctccacccagtccgaacttcctggaggctttgtttataytgtgaggggaaaactgcctactcaagcctccctcccccaccaagctggagcatcccaggtcgacttcagactgctgtgctggcaaggagaatttcaagcc

SEQ ID NO: 16077 - DNA, 201 bp, Homo sapiens
agctgattaaatttaatgtatttaggtcaaaaggaaaaaatgtatcataatcagacatagtcctcagcaaaggctgaaaagggcaaaagcaagatgaagggaaaaaatgatgaatcaagctaatttccataatcctgttttattagtactggcccatgggtggtacagcacacacaaaccacaaatagtgtcaaattcctc

SEQ ID NO: 16078 - DNA, 201 bp, Homo sapiens
aatgttttccatatactttgtcttgcctgtatgcagccctcgtgtaatacggtgaattagagtggtatttcactttgtattattttgtaaatatgtcaatrtaataaatagtgactaaattgatttctaagagttggagtctttttattgaatgatccctgtattagtcagggttcccctgaaaatggatggcactggatt

SEQ ID NO: 16079 - DNA, 201 bp, Homo sapiens
taggtatacatgtgccatggtggtttgcttcaccaatcaacccatcatctacactaggtacttctcctaatgcaatccctccccttgccccccacccctcracaggccctgatgtgtgatgttcccctccctgtgcccatctgttctcactgttcagctcacatttataagtgagaacatgccatgtttgtttatctgttc

SEQ ID NO: 16080 - DNA, 201 bp, Homo sapiens
gggaggaatgacaattaggaagagaaaccttaaaaatagttgatcagtctggctctacaaattaaaaggaagaaaactttattttttctttcttttttttwaaaaaattatactttaagttctgggatacatgtgcagaatgtgcaggtttgttacataggtatacatgtgccatggtggtttgcttcaccaatcaaccca

SEQ ID NO: 16081 - DNA, 201 bp, Homo sapiens
atacgaaaggaaatatatatatatatgtgtggtagcctttattagatgtttgcagataatagggaggaatgacaattaggaagagaaaccttaaaaatagktgatcagtctggctctacaaattaaaaggaagaaaactttattttttctttcttttttttaaaaaaattatactttaagttctgggatacatgtgcagaa

SEQ ID NO: 16082 - DNA, 201 bp, Homo sapiens
ttaagattaaaggtaaaatgaaaataaaatgaaaattcactattgaaacaaaaatttgcttttttttttttttttttctgagtgtttttctagttcaagtrtgctgggtgttagcagccaaattaaaactgaatagatatgacagtgacccttttataacacatttgtttaaggccagatgatacagatgatgacaaatgc

SEQ ID NO: 16083 - DNA, 201 bp, Homo sapiens
atttttccatggaccgagtactgggggaatggtttgggggtgaaaccgttccacttcagatcatcagacattagattcttacaaggagtgcacaacctagwtccctcgcttgcacagttcacagtaggcttcatgcttctatgagaatcgaatgcccttgctgatctgactctaggcagagctcaggcagtaatgctcact

SEQ ID NO: 16084 - DNA, 201 bp, Homo sapiens
aagggactcagtaaatatttttgttaagatttaaataagtagtataatgttaaacagtttacaagtattttaggactattatcagctaagcactaaatcartcatcgagaattattccatgtttttatgcagagtttaaatacaaggaatgtactcttttagataaatagatcctaaagcatgttttctaatcaagaaatg

SEQ ID NO: 16085 - DNA, 201 bp, Homo sapiens
cattggcttaagggtaagatgtagtttatccaagttacatatggaggtcattgagtcttcatttgcttacaataaattgtaaatatgatggatgagaaatmtgtaaggagaattggttaattccagtgggtgatatattaatagtcaatttacttgtctacacaaacaacagtgaggcagaactcttggcctttgactgtt

SEQ ID NO: 16086 - DNA, 201 bp, Homo sapiens
aggtgttaacattactgtgattgggcaggcaggtatcacttgcacgctgaaggaacattctcaaagttttttggagttcagactctaaggggaggcaggaraagatgaggggtattctaggaggagacagtctagggctggctggatgtggcctgatgagagtcacctcctgactgggattatgtaacttgggaagtgaag

SEQ ID NO: 16087 - DNA, 201 bp, Homo sapiens
aggaatcattatgcagcagagcccccctgtattatacttaatttacatatttatttgtgtgctagtggattagaacactgtttattttattcctccatttygatcatttactctattaggcttctaagagcagttaaaccaatcttctcacctacaatggacataaaaccccagtttaattggggtgttatgaaaacaaaa

SEQ ID NO: 16088 - DNA, 201 bp, Homo sapiens
cagtgtaatagaaagaatccccgattggaaccacagaggtcatgagcaacacccacccaccctcactcctgctattttatagatagatcaattaacagatwatttttccctcaaatgccactatactggatggtctcagacttcgtatccagtcagacccagaagacttcctctacagagtaatttgcccaaagccacagg

SEQ ID NO: 16089 - DNA, 201 bp, Homo sapiens
ttccactaattccattttatttcctttctggattttttactaaaatccagtaggctatttgtagctattgcatttactgcataatagaaaatgaccttatrtgatatcctttgttgtagtgaaacccttgtggaagatgaagaagatctctatgactgtgtttatggggaagatgaaggtggagaagtctatgaggactta

SEQ ID NO: 16090 - DNA, 201 bp, Homo sapiens
tgcctttgaccacatagtgatggttcaggaatggggttagtcactcagttgggaccaataagacatttgcaagggtagttttatttttctctcttcctgayacagaagagtgtagatgtgagtctacacaaggagctataaccatctgggtaccacatggagtttcaaaatggacccagttcagagggaatagagttgaag

SEQ ID NO: 16091 - DNA, 201 bp, Homo sapiens
ggtctcaaactcctttttttttttttttagcaatattaacagatggaacttttatttatttatttatttatttatttatttatttatttatttatttatttttgagacagtgtctcactctgttgcccaggctggagtgcagtggcatgatcacagctcactgcagcctcaacatcctgggctcaagtgatcctttcacct

SEQ ID NO: 16092 - DNA, 201 bp, Homo sapiens
gtattccaaaattgaaaaaaaaaattcaaaatttgaaacatttctggcctaagcatttcagatcagggatactcagcctatattccaactttgatcttagrctttttcatttttgactgtctgctgggcaattctccttgactgttcttctgtaacttcaaacatagcatgtttgagactcaatgtctttcttgtgttctg

SEQ ID NO: 16093 - DNA, 201 bp, Homo sapiens
tggtctcaaactcctttttttttttttttagcaatattaacagatggaacttttatttatttatttatttatttatttatttatttatttatttatttatttttgagacagtgtctcactctgttgcccaggctggagtgcagtggcatgatcacagctcactgcagcctcaacatcctgggctcaagtgatcctttcacc

SEQ ID NO: 16094 - DNA, 201 bp, Homo sapiens
ctggtctcaaactcctttttttttttttttagcaatattaacagatggaacttttatttatttatttatttatttatttatttatttatttatttatttatttttgagacagtgtctcactctgttgcccaggctggagtgcagtggcatgatcacagctcactgcagcctcaacatcctgggctcaagtgatcctttcac

SEQ ID NO: 16095 - DNA, 201 bp, Homo sapiens
aataacacattttactcaatttaagtaataagactaggagaaacttcggtatcgtttgtatcagtgacattatgtatacgtgtgtgtgtgtgtgtgtgtgkattccagagacctcacaaaattttgctttatattttaaaaaaatgaatagcaatattggtcactaagtagaatttaattctataccttgtctgcgcaaaa

SEQ ID NO: 16096 - DNA, 201 bp, Homo sapiens
tggtatttaaagttgattaaagaaactctttatgtagaaaaaagatgggaaactaaaaatttggggagataattagactaaggataaagtgagggaaaaargaaggaaggtcagggagagagttagtagttttcagattgatggttgggggaaaaatattgaagtatcaaaggacaaagcaataccagtactattcctaaa

SEQ ID NO: 16097 - DNA, 201 bp, Homo sapiens
gctggtctcaaactcctttttttttttttttagcaatattaacagatggaacttttatttatttatttatttatttatttatttatttatttatttatttatttttgagacagtgtctcactctgttgcccaggctggagtgcagtggcatgatcacagctcactgcagcctcaacatcctgggctcaagtgatcctttca

SEQ ID NO: 16098 - DNA, 201 bp, Homo sapiens
tatgaccagttagaataatattattcttataaaagcaagatgttcaggcaaagggagagccttgaaaataggaagaaataaagatgtagtagaattttaaattacttttctttttttcttgagcaacctggacaatctatttaaactaagcaggcagtttgatgtgaaatgtcttctgctagggaacaaaatgatcaactc

SEQ ID NO: 16099 - DNA, 201 bp, Homo sapiens
aagggagcaattttttcagttaatgtatattcataggtaaatatgttggtggttgacacttggccccagggaaagggaatttaaaggaaaaattttatctrttttcaaaaaatgaagacacatagttagcctcctcctatgaaacattggtggctttgaataatagttatacatttgcttgattttaaactgataaatgta

SEQ ID NO: 16100 - DNA, 201 bp, Homo sapiens
taggcatgcgccaccacacctggctaattttgtatttttagtagacacggggtttctccatgttggtcaggctggtctcaaactcctttttttttttttttagcaatattaacagatggaacttttatttatttatttatttatttatttatttatttatttatttatttatttttgagacagtgtctcactctgttgccc

SEQ ID NO: 16101 - DNA, 201 bp, Homo sapiens
tgtcataataactaatatatactgagtatttactatatatgctttgtactgtacatgttttgttttatttcttcaacatttatataagaaaagtggtggtgactgttgttattttttatgggtgaagaaacaaagaaacagagcatgcaactagtgagtggtaaagccagaattccaagttatgccatctgtacattgcta

SEQ ID NO: 16102 - DNA, 201 bp, Homo sapiens
tacttttccagattcgagggtatctagtttgtttcatcactctttaaaaagaagcccaaggtatcttaaaggatgaaacagcgcctcggtgctgctcttcrtcatagaacctcacctcatgccatggcttggaaagctctgcaggcccaggcgtgtcctcttatactcagaaaacaacccttcaaggtcatcaattccatt

SEQ ID NO: 16103 - DNA, 201 bp, Homo sapiens
atgtcataataactaatatatactgagtatttactatatatgctttgtactgtacatgttttgttttatttcttcaacatttatataagaaaagtggtggtgactgttgttattttttatgggtgaagaaacaaagaaacagagcatgcaactagtgagtggtaaagccagaattccaagttatgccatctgtacattgct

SEQ ID NO: 16104 - DNA, 201 bp, Homo sapiens
atgacgaagtctatagtggagccaaacaaaaaggactgcaggaacactaaggggtaagctaaaaatcctgcctgagagaattaagaaaggcttctcagagragataacatttgagctgggtcctcaagaatgaacaggaattctccagtgggaaaggtcactatgaatgcaatgattagaactacttagtaagcgtacaaa

SEQ ID NO: 16105 - DNA, 201 bp, Homo sapiens
gatgtcataataactaatatatactgagtatttactatatatgctttgtactgtacatgttttgttttatttcttcaacatttatataagaaaagtggtggtgactgttgttattttttatgggtgaagaaacaaagaaacagagcatgcaactagtgagtggtaaagccagaattccaagttatgccatctgtacattgc

SEQ ID NO: 16106 - DNA, 201 bp, Homo sapiens
cagtctttttgcttgtggcattagactcatgcaagtttataagtagtgtgtgttaagcctttccctttgtagagctgatttggggacacggttttacacatatacatatacatatacatatacatatacatatacatatacatatacatatacgtatacgtatacatatgactgtcctcatgaagattttttctgtagggc

SEQ ID NO: 16107 - DNA, 201 bp, Homo sapiens
gcagagagaaaaatatgctttcattgtctaaaaactaaaaattagctcaaaaaggacagtagtagtttttttttttattttttatagttttagagatgggrtcttgctctgtcacccaggatggagtgcagcgatgccatcataacccattgcagccttgaactcctgggctgaagtgatcctccaaagtgctgggattac

SEQ ID NO: 16108 - DNA, 201 bp, Homo sapiens
tccattctcagagctcaaacaccatgccgggagaaccactgctctcttcagagctgccagacagggacattttagtctgcaaacgtttctgctgccttttrttcagctatgccctgcccccagaggtggagtctacagaggcagacaggcttgttgagctgaggtgggctccacccaggtcgagcttcccggccactttgt

SEQ ID NO: 16109 - DNA, 201 bp, Homo sapiens
tcttatattttacagatttaataaagcagagagaaaaatatgctttcattgtctaaaaactaaaaattagctcaaaaaggacagtagtagtttttttttttattttttatagttttagagatggggtcttgctctgtcacccaggatggagtgcagcgatgccatcataacccattgcagccttgaactcctgggctgaag

SEQ ID NO: 16110 - DNA, 201 bp, Homo sapiens
gtatcaccagcagaggctgcagaacagcaaattttgtagaacagcaaatattgatgcctgatccttcctctgtaggcttcatctcagaggggcatctggcwgtatgaggtatcagtcagcccctactaggagatgtctcccagttaggctacatgggggtcagggacccacttgaggaggcagtctgtccattctcagagc

SEQ ID NO: 16111 - DNA, 201 bp, Homo sapiens
aagcacacataaatagacacatatatatttatttatatatatatatagacccatataaatatttctgtatgtatgtgtgtgtgtgtatatatatatatataattttgtacggatactatattctcaataaaatgttttttaaaaactacatgttcatagcagaagttttgcagtgttaatggactatggtgctgggagaaa

SEQ ID NO: 16112 - DNA, 201 bp, Homo sapiens
gaagcacacataaatagacacatatatatttatttatatatatatatagacccatataaatatttctgtatgtatgtgtgtgtgtgtatatatatatatataattttgtacggatactatattctcaataaaatgttttttaaaaactacatgttcatagcagaagttttgcagtgttaatggactatggtgctgggagaa

SEQ ID NO: 16113 - DNA, 201 bp, Homo sapiens
acaaacttcacttctaagtgtgccatctagcttcataaggtatacttcaggaagaagcacacataaatagacacatatatatttatttatatatatatatwgacccatataaatatttctgtatgtatgtgtgtgtgtgtatatatatatatataattttgtacggatactatattctcaataaaatgttttttaaaaact

SEQ ID NO: 16114 - DNA, 201 bp, Homo sapiens
atctgcattatatagttaaatttcacatgtagatggcttagcaaaaccaaaaaccaaaaaacaacaacaacaaaaaagaaaccccacacatacaacaacamcaccaaaaaattagcatcaactttccaaatgagattagaattattttgtaattaaaatagtatacagggagggaatcttttctccagagataattttttt

SEQ ID NO: 16115 - DNA, 201 bp, Homo sapiens
tataaagcacattttaactagattctatcctacctctttcagtagatccccttgggctactccttcaacttggcctcagtttgttcaactctgatattctyctgattctaaaatgccacttattggtagatgtaatatgtatacattgcattttgtaaagtaatgttttgctttgatgattcttagttgtgtaatcctctc

SEQ ID NO: 16116 - DNA, 201 bp, Homo sapiens
ttagttttaaaatagcgatgacatagatttacttatttttaattctttgccttcaaaactgcaatgggttgttgacaaatttctgtcacttctcaccaatwagattctatagggaacgggagagaagaaagaggttgtatccatggccatgtcccttctccagaatatggaattacatgttctaaaaactgttctaaaagc

SEQ ID NO: 16117 - DNA, 201 bp, Homo sapiens
tcttctaggtgttttcttgccatcagttttgaatcgtttcaagctcatcttcaacataatcttccaaaaatgtagatctgatcattttactcatgggtttrtcaccaggggaaggtatctgagttaccagtggcgaatctgtacaggtctacaggaatctcaattcttgcctcctcagaagaaagaattcgactgaggggc

SEQ ID NO: 16118 - DNA, 201 bp, Homo sapiens
cagccatcgtttctctttccttctgtggccttggatctcctttgagaaaccacactttcctctttcttaattacagagtttggatggtttcatcaattatrtcccatgcctttgaccacatagtgatggttcaggaatggggttagtcactcagttgggaccaataagacatttgcaagggtagttttatttttctctctt

SEQ ID NO: 16119 - DNA, 201 bp, Homo sapiens
ttttaagagattctgacaacttgaatcaagccactaaaactttttttttgtaattgtgaagggaaagcaaacaattcattgaaaattttatatttgttatmgtttggttttgttcatcaattattcattcattcgttaaacagatatatattaaacacctaacacatacaaggcactgttctggttctgggatatagcaat

SEQ ID NO: 16120 - DNA, 201 bp, Homo sapiens
caccctagctccggcccctttcactctatattcagcacaacaggccaaaaagacctttttaaaccatcagattatgtcctccttttggccaaggcctccartgacctcccatatcagtcagagtaaaaactgtcccataaagatcttcatcatctgaccccactagctttccatctttcctccttttccccccattactca

SEQ ID NO: 16121 - DNA, 201 bp, Homo sapiens
cagatatatattaaacacctaacacatacaaggcactgttctggttctgggatatagcaattaagaagacaaagttcctgcctttatggagtttacatttyaatggggaaactcaggcaagtctggtttggaggagtttcatatttttatatagagtggtcaggtaagatctccctcgtaaagcaactcaaaaggagagaa

SEQ ID NO: 16122 - DNA, 201 bp, Homo sapiens
tattagatttatcacattatagagagaaaaccaataataatggtttatttgtaaaaatgttttctttagtatgtcttagttttaatttgatgaaagtagtrctaaaccatatcttccaaataggaactggtcaaacataccactgatccgactgagaaggcaaatctgaaactggctcttgatgccatgaaggtagggcag

SEQ ID NO: 16123 - DNA, 201 bp, Homo sapiens
aaagactcccatatttctgtctgtagtacacacctatcccctggactccacacttattggatgactaataggcctctcagatttaacacagtcaaaaagtraccacactctggtcttcccacagttgtctctcacctgggttattgcaagagccttatgtctggttttcctgcctccaccctagctccggcccctttcact

SEQ ID NO: 16124 - DNA, 201 bp, Homo sapiens
agttagttataacatattgctgacatttttatattcttctctcttcatttatgatgtccacataatttacagttcttgaacaactgatcaactgcaattgyacatcttcattagtaagtgatgctgggcttcccttttttatttagttacttcaggatctttaccagctactctaaagcatttttattctgagcctgatgg

SEQ ID NO: 16125 - DNA, 201 bp, Homo sapiens
aaaatcactattttaaagtctcatatggaataattaaagcaaggatgatcaaggaatactaatcccattgtgaaaaattattgggaaataggacagccacwtggtaccacatcttcacccctgggttacttactgctataaaggggggacatgtacctttacagtagagagatgtggcagtaaccatcttaactaaatgat

SEQ ID NO: 16126 - DNA, 201 bp, Homo sapiens
ttgctaagttaccattttcagtgaatgccctgctatccttccagtgcccaaggcagagagaggtacagttataattctgaggtcttctcttttctctcccmctgcgtccccacacacagtcaatcaattaccaaatatttcttttccatgtaatctcctggagttcttcccatctctccttctactatcctagtctaaatc

SEQ ID NO: 16127 - DNA, 201 bp, Homo sapiens
aggagcgattcagagttttgtagtgaactttagcagtttgaccttcaaatgtttccttttttaagcgtcaatattgctaacattaaagtggtaacaggagkctgcaccttgaaaagccactcatgccttgtctgttgtggtagctacctggttatgaaacattttctaatccagagagctttggcctgatttataatttta

SEQ ID NO: 16128 - DNA, 201 bp, Homo sapiens
ataattaaggcctaatttactctgaatatgtgtttattgtaacatatctgcttttgaaactattatttataagcacaattagaaaaatgcttaaaatttaygtgagttttctgcataactttgttttaaattatttaaaatttgtgtgacttttatacatatcttggagacagaggtcttcaagagggagttggatggttt

SEQ ID NO: 16129 - DNA, 201 bp, Homo sapiens
agcatagtaggcattcagtaaatgttctttgaaataagtccatttgttggaatgtcttgaaaatattttttgagggtggttgtattttctttcttgagacwcactggcacatgtgtctgtttcaagtcagcaaggctgttccaatttttgtcttaggagttttactttctgtatgcttttttgcctcatttgggagtttac

SEQ ID NO: 16130 - DNA, 201 bp, Homo sapiens
gtgagggagctctctagggcctcttttacaagggcaggaattctgcacatggggctccacccttgtggcctaattgcctctcaaaggctccacctctttcrttcatgtccctacaaaggacatgaactcatcatttttatggctgcatagtattccatggtgtatatgtgccacattttcttaatccagtctatcattgtt

SEQ ID NO: 16131 - DNA, 201 bp, Homo sapiens
acatggggctccacccttgtggcctaattgcctctcaaaggctccacctctttcattcatgtccctacaaaggacatgaactcatcatttttatggctgcrtagtattccatggtgtatatgtgccacattttcttaatccagtctatcattgttggacatttgggttggttccaagtctttgctattgtgattggaaatc

SEQ ID NO: 16132 - DNA, 201 bp, Homo sapiens
ggcgaggagctgcgatcctttggaggagaagaggccctctggtttttagaattttcagctttactgctctggtgtctcctcatctttgtggtttttatctmcctttggtctttgatgatggtgacctacaaatggggttttggtgtggatgtcctttttgttgatgttgatgctattcctttctgtttgttagttttccct

SEQ ID NO: 16133 - DNA, 201 bp, Homo sapiens
tcattctccatccagctttgttccattgctggcgaggagctgcgatcctttggaggagaagaggccctctggtttttagaattttcagctttactgctctrgtgtctcctcatctttgtggtttttatctacctttggtctttgatgatggtgacctacaaatggggttttggtgtggatgtcctttttgttgatgttgat

SEQ ID NO: 16134 - DNA, 201 bp, Homo sapiens
gaatgtgtcaaaatattcttggtttctttggcctctttcatcatttacccacagcccctccccattcccctaccttcattgacctcggcttggtttgcaayaatccaggtttacatttttgaaacattaaatactctgagagagttaaagacttgtctgtgttgtgttcagatttgtagggacctcctgagctccacagtc

SEQ ID NO: 16135 - DNA, 201 bp, Homo sapiens
actttaaagtagttttttctaattctgtgaagaaagtcattggtagctggatggggatggcattgaatctataaattaccttgggcagtatggccattttyacgatattgattcttcctatccatgagcatggaatgttcttccatttgtttgtgtcttcttttatttcgttgagcagtggtttgtagttctccttgaaga

SEQ ID NO: 16136 - DNA, 201 bp, Homo sapiens
tcataatggaattttctgaaaatataaaacacagataaaaggagaataaatgaacatttcctcaattaatattacaggtgaatgtaacctaaaatgtactycctggtgtgttatgatactgataaacttctgtttagggtaacatgattttagtatcataatatggtattatgggtgacgttttccacacaactttttaat

SEQ ID NO: 16137 - DNA, 201 bp, Homo sapiens
gtaggacttttacttgtttttaaagttactctgaatattttattaggaaagactaattaacataataatttatgtaacatctgctgggattttttttaacstttgcttgcttataactatataattatgacttgttactgcatttggagacatatgcatgacctttcagagttcaaaacaaccatagggaatcttttgtct

SEQ ID NO: 16138 - DNA, 201 bp, Homo sapiens
tatatagaagaggcaaattttacttagtagaatttatataactaagtagtctaaaaggttttagaagaaataaaccacagctacaaattagacgcattgtrcaggtttcccctttcccactgaactgagaatggtacggtctgcctccagtcacttgggttacagggcgatattacacttcagctgatgtctttgaaagct

SEQ ID NO: 16139 - DNA, 201 bp, Homo sapiens
gctttttagagtaagtatgctttaaaagtataaaaaatggtaacattttaatgtaataaggtagttgtcttgagtaaatatctctactaatatttgttttyattttcatgtgattatgaaaaactctgacatgtgcattttatattttagaaccaaccagttttgctttttggacgacctcagggagatggtgaaattcga

SEQ ID NO: 16140 - DNA, 201 bp, Homo sapiens
tgtgtctcattttcctcatctgtaatgtggggatagtaattggacctaccataaaggatcatagcaaggattaaataaaacactcagagcagtgtctagcwcatattaaggattcaataagtattagtatttttgcagtttaatgataaaaaccacaattacttttgcaccaacctaatagagtcctattctccaaaatct

SEQ ID NO: 16141 - DNA, 201 bp, Homo sapiens
agacttatttgtcatgtagacctgagctttttagagtaagtatgctttaaaagtataaaaaatggtaacattttaatgtaataaggtagttgtcttgagtwaatatctctactaatatttgtttttattttcatgtgattatgaaaaactctgacatgtgcattttatattttagaaccaaccagttttgctttttggacg

SEQ ID NO: 16142 - DNA, 201 bp, Homo sapiens
ttttatttaaccagaaacacacgactattagtagagtgtaactatccttttaatattgctaatttgtttgttaattcctcctgcataagtttgacttgggyattttgtctgatgtaagaccaagcacaattactaatgtgagcaaaagttaatgagcaaaattgtcaagttatatattaagggcatagttagctgtacaac

SEQ ID NO: 16143 - DNA, 201 bp, Homo sapiens
tgttttttaaagcattcttattcttttctcttctgagcttaatcagtgtatggttcctaccacactcctttatattttgcactcaggtagcattgtagtgygtttatatataaaggtctggctagtggtatagtcccaaataccatacttatttacttgtatctcactgcctgctgaaaacaaaccattatagagcacttg

SEQ ID NO: 16144 - DNA, 201 bp, Homo sapiens
tgttcctccactgggcagtgtgcttcatgagggcagtgtctgtatcattttgccgtacacctgttatggtggttggcacgtagtagatgctcaaaaaataytaattgccgaaccgtctcgtaatttggacccttccggttgagtctttcttttcatagctaatttcccctttaagaatatatactaattaaaatcaattga

SEQ ID NO: 16145 - DNA, 201 bp, Homo sapiens
gtgcagaaaacatcactgggattttgataagatacatttatttttatatttatagtgttaatcacacatctctgccctttattaaaatggaatttctgaaygttagtgattttcagtcaattcttttttcctctagcgtgtacagtaagtgttcataaacacttaaaaataatttagttatcagcctctgggaaaatagct

SEQ ID NO: 16146 - DNA, 201 bp, Homo sapiens
caaaaggtcctgatttgaatggaaaattatatgttcatctagttttagagcatttcttatacaaccacggtctcttcctctacccctctagtatgatttcrgttcccatttatgtcttttgtgtggaacacctgtttctacaaaggaagaaagaaacaactatgccagtccatacactttcatcagctaaaaaattcatct

SEQ ID NO: 16147 - DNA, 201 bp, Homo sapiens
tagtgattttcagtcaattcttttttcctctagcgtgtacagtaagtgttcataaacacttaaaaataatttagttatcagcctctgggaaaatagctcaytattttaaataattaactcagagcttttcgtccttgaggtcctagctcaagaaagccagcctggactttatagaccaaattagcgcgcgcccccccgccc

SEQ ID NO: 16148 - DNA, 201 bp, Homo sapiens
aaaaacaattcagaatgacattggcagcctgtttagtgaaattttttccctcctgaaggacctccaagagtgtcctttaaaagaggtaaaaaaaaaaaaaatgagttttgatatgatgaccatgtgtacttgtttacccagaacagttcaatttataccatttgttctggcatagttattagtcactacccatttactctc

SEQ ID NO: 16149 - DNA, 201 bp, Homo sapiens
atgtgaggacttatttctgggctctctactattctgttggtctatatacctgtttgtatgccagtgccgcatgattttgattattgtggctttgcaataarttttggaaacaagtcagtaagtatgagacttccagctttgttccttttcaagattgttttgactattcagaatcccttgagattccataagaattttaga

SEQ ID NO: 16150 - DNA, 201 bp, Homo sapiens
caccaaggttagtaaaaacctcatatcatcacataaagtgcactaaatcattggatttgaggttggtctatgtcatagttacagtctgcaatttcatccaygcataggggattgacagctgctccacccattagtattaatgaattaccaacgtacatcccacacacatccaccaagaaaccaaagaaagccctcctacac

SEQ ID NO: 16151 - DNA, 201 bp, Homo sapiens
tgcaaatacttttcttgtgtctgttggcttttcactctgttgatattgtctgtgaggcacaaaagtttttaattttgacaaagtcccatttatcaatctcraagaaataattgctgaatctattgtcataaagtttttccccattttcttgtaaaagttttatagttttaactgttatgtttgggtatttgaaacattttt

SEQ ID NO: 16152 - DNA, 201 bp, Homo sapiens
tcttttcctgatcacttcctctttgctggtttttttcttttattgcatgtcctcacaaacttcatcagaataatgccaaaaacagtgtgttcatctttccrtccatccttccttccttccatctgcccatccaatcaataaactaatttgtgtatacagtgtattcacctatattcccattattcatggccatgctgtaca

SEQ ID NO: 16153 - DNA, 201 bp, Homo sapiens
ggaactgtagtagcactatgtagcgttacaggcccagttgagttttgtggtcatattgaaaattagacgatcggtaatgtccatgcttaacttcttagatagagtcacaaaatatgtggcaagttagacttgatcagggtgtttgtttttctagaaaagcacaatggaagaagagaaggtaaggggatttacagggaagtg

SEQ ID NO: 16154 - DNA, 201 bp, Homo sapiens
tgtacataggattagacatttctattttaataacacatgaatgggccaaataaaaaaggaaaacttagaaatgaagtaagtgattgacaataatcaagaarcaatattatagataaaataaaacaagtatttagcatttgcaaagtactttcatgcatattaattctttgatccttgtaacaacctagtgagggatgtgtg

SEQ ID NO: 16155 - DNA, 201 bp, Homo sapiens
gttcaggtgaaagtgatatgagagtctatgttccttgcggcttagcaagtttactgaaatataaagagtggtaggattgtacataggattagacatttctrttttaataacacatgaatgggccaaataaaaaaggaaaacttagaaatgaagtaagtgattgacaataatcaagaaacaatattatagataaaataaaac

SEQ ID NO: 16156 - DNA, 201 bp, Homo sapiens
tacacctcttcctccttaccagttaaaaaaaaggatgatctgagacctttggagaggtatagaggaggagttatgatgagaagagaaggagaattcttctygtaccttaatgtttgtaaatcggtttcatggttgtctcttctgtgcctttcgaaactgccaatcatcttattataatggccactcataatttgaattatg

SEQ ID NO: 16157 - DNA, 201 bp, Homo sapiens
tccctacatgtatacatgcattatatatatgtattcacgtgatgatactcgttcccccatattttccaaaatgaggtcatagaacaggtgctgagttttgwtctgcttccttttttttttaatttaataatgacattctttgcccaaaggagtaataaaacctatttttatctaaaatctctggagaacaaaacattttac

SEQ ID NO: 16158 - DNA, 201 bp, Homo sapiens
tagactgagacattattatttttttagaatgaagaaccttcccattacttaaaatactttgtttttaaatggaactacattgcttagaatagtttaaaagrtgttttgttttttatgttcatgtatagtatataatctgttgcatgaatattttacttacatattttatgggatatgtgttttcagtagatatatttttat

SEQ ID NO: 16159 - DNA, 201 bp, Homo sapiens
gaaggcctaaaaacaatttgcaagtactgtgttgatgatttagttattagcacattttccaaaagcatgtagagaaaatatcaaatttgcatgcagtggtraggggtgcataaaggtaacttcctcctgacgtgtggctacaaagtatactatggatatactttgcggctacactgtaccacgttttcacttctcatatcc

SEQ ID NO: 16160 - DNA, 201 bp, Homo sapiens
ataattgaaaattatgcaccactaccaccactaccacaaatagttttgtataagatatgtctgttaagttcagagaccacaaagtccctattgtgatgcartaacctcggttaactgagcatatcttctccatgtcctggtgaggatagctatttcagaagatcatttataggaccatttacaaaaatacagtatcaatca

SEQ ID NO: 16161 - DNA, 201 bp, Homo sapiens
aatcttggaataagattacacaccaccacaccctcattttttgttttacattgattgttgtaccatgtttagttgttaaccactgcatctgctgaatatcyagcttcacaaagatacaccattaaaaggaacttagtgggatctaatgttaaaactacacagtaatttgagctagtaattcatgcagtatcagatgctgaa

SEQ ID NO: 16162 - DNA, 201 bp, Homo sapiens
taattaaggcctaatttactctgaatatgtgtttattgtaacatatctgcttttgaaactattatttataagcacaattagaaaaatgcttaaaatttatrtgagttttctgcataactttgttttaaattatttaaaatttgtgtgacttttatacatatcttggagacagaggtcttcaagagggagttggatggtttc

SEQ ID NO: 16163 - DNA, 201 bp, Homo sapiens
ggcagctaggactggttgaaaagatcaccctagccgcacttgaatcttgagtcattaaatactcttcagaaaaaaggaagtgggttttagtataatttatkgttgaacattagtctttctaatttttatttttataaatgctttgaggaacatctgtgcatgaacatacttttccatatggctgattattatttaacaatg

SEQ ID NO: 16164 - DNA, 201 bp, Homo sapiens
ttgcttgaactcaggaggcagaggttgcggtgagctgagatcgcaccattgcactccagcctgggcaacaagagcaaaactccatctctcaaaaaaaaaawaatatatatatatatatatatgccttaaaaatatatatatatatgccttaaaactactttttactttatggttcattttcatggagtggtttattttttc

SEQ ID NO: 16165 - DNA, 201 bp, Homo sapiens
cctgtctctactaaaaatacaaaaaattagctgggcatggtggtgggtgtctgtaatcccagctacttgggaggctgaggcaagagaattgcttgaactcrggaggcagaggttgcggtgagctgagatcgcaccattgcactccagcctgggcaacaagagcaaaactccatctctcaaaaaaaaaaaaatatatatata

SEQ ID NO: 16166 - DNA, 201 bp, Homo sapiens
tcccatgtaacaaatctgcacatatacctcctgaatctaaaatatgagttgaaattacaaaaaataggtagaatatctgagtaaaaatttctcagaagacrtacagatggctaatatttatacgaaaaaatgttcagcatcactaataatcacagaaaagcaaattaaaaccacaatgaaccatcatctcactccagttac

SEQ ID NO: 16167 - DNA, 201 bp, Homo sapiens
ggcggatcacctgaggtcaggagttcaagaccagcctgggcaacatggtgaaaccctgtctctactaaaaatacaaaaaattagctgggcatggtggtggrtgtctgtaatcccagctacttgggaggctgaggcaagagaattgcttgaactcaggaggcagaggttgcggtgagctgagatcgcaccattgcactccag

SEQ ID NO: 16168 - DNA, 201 bp, Homo sapiens
ggtttgtttgggtaacagccatcttaatggttttaaagcaatatctcatcgtgggtttgatttgcattttcttaatgactaatgatgttgaatattgtctytgtgtgtttgctggccatttgtatattctctttggaaaaatgcctattcaaatgctttgcccatttttgaatcaagttgttttttgtctttgtgttgtag

SEQ ID NO: 16169 - DNA, 201 bp, Homo sapiens
tagccttcacagtatgggcttgtttgtacctatctttcttccaaaggctttccagttccaaaaggacttgggtgttgtgatctaggctgtatctgcattargaggcaccccaaacccagtaatgctgtggttcttgtagagttgtagaggcaccgccttgatggtctttgataagatctggaagcattctctggaccacca

SEQ ID NO: 16170 - DNA, 201 bp, Homo sapiens
aggctgcagtgaaccgagatcatgccactgcactgcagcctaggcaacagagcgagactctgactctgtctcaaaaaaaaaagtgtgtgtgtgtgtgtgtrtatatatatatatacgtatatatatatatgtgtgtatatatatgtgtgtatatatatacacacacacatacatacacacacacattaatgctataaatat

SEQ ID NO: 16171 - DNA, 201 bp, Homo sapiens
ttttggtaggggagatcatattcagaaccttaaaattctctgtcatctgggagattttatgataaaacattgaggaatatgttagaaaatcaaatatctgktgcaggaagttaaagagaaagtaagccatttatttctacccaacagtgatagctctaaagaggaagagacaggaagatgggaggagcctctgaagttttc

SEQ ID NO: 16172 - DNA, 201 bp, Homo sapiens
ggaggctgcagtgaaccgagatcatgccactgcactgcagcctaggcaacagagcgagactctgactctgtctcaaaaaaaaaagtgtgtgtgtgtgtgtrtgtatatatatatatacgtatatatatatatgtgtgtatatatatgtgtgtatatatatacacacacacatacatacacacacacattaatgctataaat

SEQ ID NO: 16173 - DNA, 201 bp, Homo sapiens
caagatttatttaaataatgcattttttttggtaggggagatcatattcagaaccttaaaattctctgtcatctgggagattttatgataaaacattgagraatatgttagaaaatcaaatatctggtgcaggaagttaaagagaaagtaagccatttatttctacccaacagtgatagctctaaagaggaagagacagga

SEQ ID NO: 16174 - DNA, 201 bp, Homo sapiens
tgttgtggtcctttttcttccattattttattactatgtaagctacattctgccataatgactaaaagtttgtgtcaatcacagaatactttcagtgggcyatgaatttggaattccatctgacgtgattattgatttgatggtgcaagtggtttcagtaaagtatgcatgtgcacatgcccttaagagttgtggccaaat

SEQ ID NO: 16175 - DNA, 201 bp, Homo sapiens
gcggaggctgcagtgaaccgagatcatgccactgcactgcagcctaggcaacagagcgagactctgactctgtctcaaaaaaaaaagtgtgtgtgtgtgtrtgtgtatatatatatatacgtatatatatatatgtgtgtatatatatgtgtgtatatatatacacacacacatacatacacacacacattaatgctataa

SEQ ID NO: 16176 - DNA, 201 bp, Homo sapiens
gggcggattgccagagctcaggagttcgagaccagcctgggcaacatggtgaaaccctgtctctactaaaatacaaaaaaattagctgggtgtggtagtgsacgccaatagtcccagctactcgagaggctgaggcaggagatttgcttgaacctggaagagggaggttgcagtgagctgagattgtgccactgcactcca

SEQ ID NO: 16177 - DNA, 201 bp, Homo sapiens
tatcctctactatatatcaggaactttctttctttgaatagctattaatttagtctgtattattattataacaacagtaatttctaatgctattgaatgartgggctatctgcattttcattattacttctttcaaacaatgaattatcaattgagctgtaaaaatgtactctgttcaatctttgcatttcaggattcctt

SEQ ID NO: 16178 - DNA, 201 bp, Homo sapiens
aggcggaggctgcagtgaaccgagatcatgccactgcactgcagcctaggcaacagagcgagactctgactctgtctcaaaaaaaaaagtgtgtgtgtgtrtgtgtgtatatatatatatacgtatatatatatatgtgtgtatatatatgtgtgtatatatatacacacacacatacatacacacacacattaatgctat

SEQ ID NO: 16179 - DNA, 201 bp, Homo sapiens
attttgtggctgggcacagtcgctcattcctgtaatcctagcactttgggaggccgaggcgggcggattgccagagctcaggagttcgagaccagcctggrcaacatggtgaaaccctgtctctactaaaatacaaaaaaattagctgggtgtggtagtggacgccaatagtcccagctactcgagaggctgaggcaggag

SEQ ID NO: 16180 - DNA, 201 bp, Homo sapiens
tctctgtgacctctgaagctcctggtacagtgcattccacaacatactcaagttttgtcataaataataaatcattgatgattctctttttcttctttcarctgatttttggactcattgatttgtctggggaactttgaacataaccactgaacagagatattaagttgatggcagtgggatttttagaagaaacaagtg

SEQ ID NO: 16181 - DNA, 201 bp, Homo sapiens
cattcctcagtttctctgtttgaagaacataaggacatttctcacggcctgttgtgagacgtttggaatgaggaaaagtgaacttttcgaggcatttgacytgtttgatgttcgtgactttggaaaggtaattatacttcatttttaacactactttttaactggaaagcatttaagcaaattgtttcaaatcttgaagta

SEQ ID NO: 16182 - DNA, 201 bp, Homo sapiens
atgatcagaactcaggataggtaatgcacctggttttcattttgagttttgtaattaaggtttttgtaaatcatattgttgcaaatatatctagcgttaarcctatagataaaaatctagaaaacttatcgagatgttacaatggctttgtatttgatttcaaaaatgtcttttgtactagttaggtgctttggcttattt

SEQ ID NO: 16183 - DNA, 201 bp, Homo sapiens
tctgaaactggctcttgatgccatgaaggtagggcagattcatcagtaatttgtttgtattttttattcttgcctaaagacaatggaattcaaattgcatwcacacacacacacacacacacacacacacacacatatacacacatatatatacacaaacatatatatatacacataaataaaatattatgacatgcctat

SEQ ID NO: 16184 - DNA, 201 bp, Homo sapiens
gcccaccaccacgcctggccaatttttgtatttttagtagagatggggtttcaccatgttggccaggctggtctcgagcttgacctcaggtagtccgctcrtctcaacctctcaaagtgctggaattacaggcatgagccaccgcgcctggacgtgactgatttttctactagatctaagcttcacgatggcaggggccac

SEQ ID NO: 16185 - DNA, 201 bp, Homo sapiens
aattatttataagagaaaattggaaagaattacattgacctctgtgagtagcagatatgcggagctatgacaggtactatacttcatcagaaactaaaaasagtgtcaagtaccatttgtgctttatcaacttttgtttaccacgaaaaagcataagtttgtttttctgccattttgaaagaaaataagtgcaggaaagta

SEQ ID NO: 16186 - DNA, 201 bp, Homo sapiens
cagaaactagagaacccgtttctaacctggaggcctccatgatgtaaggaatgatcagaactcaggataggtaatgcacctggttttcattttgagttttktaattaaggtttttgtaaatcatattgttgcaaatatatctagcgttaaacctatagataaaaatctagaaaacttatcgagatgttacaatggctttgt

SEQ ID NO: 16187 - DNA, 201 bp, Homo sapiens
tttttacttactactatactttagtggcgaaatcacttgaaatgcttgatgatttgaaaccacagattcacaaagtgagaatattttatagtgggtgattkggaactttaataacatgacttttatttaatgaagtaaaagtaacttttaaggaataaaagaatagaatttttatggatttattatacttaatagattctg

SEQ ID NO: 16188 - DNA, 201 bp, Homo sapiens
tcttttgtttcttggtttccaaataccccttgtatacatcttatccttttaaatattatttttgtgactgtttttcttttctttcctttttttttttttttgagtcggagttttgctcttgtcactcaagctggagtgtaatggcgcgatctcgattcactgcaacctctgcctcccaggttcaagcgattctcccgcctc

SEQ ID NO: 16189 - DNA, 201 bp, Homo sapiens
caaagaagacatgtactttatggcttgaatcctaaaatatgtgactcccccactgggaatgtgttttaattgtttttgagaacatagtttttaagcacctmtttttggttccttcctaatcttcagagtctacacacttagctctggagaagcaagttatgtgtttaggaaataatagcttattttgctgagtgttactga

SEQ ID NO: 16190 - DNA, 201 bp, Homo sapiens
aactgtagtagcactatgtagcgttacaggcccagttgagttttgtggtcatattgaaaattagacgatcggtaatgtccatgcttaacttcttagatagagtcacaaaatatgtggcaagttagacttgatcagggtgtttgtttttctagaaaagcacaatggaagaagagaaggtaaggggatttacagggaagtgat

SEQ ID NO: 16191 - DNA, 201 bp, Homo sapiens
tggtaagagaccatggtaattttgacactatccccagctcaccagttggtaattggtattattaaacgtagctacaaaataaggtgttacacttttacacygttggtgggactgtaaactagttcaaccattgtggaagtcagtgtggtgattcctcagggatctagaactagaaataccatttgacccagcaatcccatt

SEQ ID NO: 16192 - DNA, 201 bp, Homo sapiens
gaactgtagtagcactatgtagcgttacaggcccagttgagttttgtggtcatattgaaaattagacgatcggtaatgtccatgcttaacttcttagatagagtcacaaaatatgtggcaagttagacttgatcagggtgtttgtttttctagaaaagcacaatggaagaagagaaggtaaggggatttacagggaagtga

SEQ ID NO: 16193 - DNA, 201 bp, Homo sapiens
gacacagatggccttggttgagcccaggcataagtagattttataaaaccccagatgaatctaatgtgagccattgatttgattatctaattggtaagagwccatggtaattttgacactatccccagctcaccagttggtaattggtattattaaacgtagctacaaaataaggtgttacacttttacactgttggtggg

SEQ ID NO: 16194 - DNA, 201 bp, Homo sapiens
gggaactgtagtagcactatgtagcgttacaggcccagttgagttttgtggtcatattgaaaattagacgatcggtaatgtccatgcttaacttcttagatagagtcacaaaatatgtggcaagttagacttgatcagggtgtttgtttttctagaaaagcacaatggaagaagagaaggtaaggggatttacagggaagt

SEQ ID NO: 16195 - DNA, 201 bp, Homo sapiens
gattcattatttccttcattcctcacagccacataatgttaaaagtagaactataattgagattctgtgacaactagcccagtgccattttttactaaatrctactgcctcctattctttctagacaaaaagacattattagttgtcatttcctttcagcagcctataaacttgaagattttctggtatagtattagaatg

SEQ ID NO: 16196 - DNA, 201 bp, Homo sapiens
agacttcctatatggtagctggctcccaagagtgtaaaagtggaaactgctggaccttcttaagcctaaacaccagagctggtgcagaattacttttgccrcttttttttggttaaagcaagacatggccagcccagatacaagaggaaggggaccataccaatcaaataccaggaggtgtggttcaccaggataccaaaa

SEQ ID NO: 16197 - DNA, 201 bp, Homo sapiens
cttcagtggttccttatcttcctcacagcatggtgatcgcagggtacttagacttcctatatggtagctggctcccaagagtgtaaaagtggaaactgctrgaccttcttaagcctaaacaccagagctggtgcagaattacttttgccgcttttttttggttaaagcaagacatggccagcccagatacaagaggaaggg

SEQ ID NO: 16198 - DNA, 201 bp, Homo sapiens
cagatttttctcatatgtaaaggggaaataatattagtaccttcctcttagagctgtgacaattaagtgaaatactgagtatggcactttcagcatggtayctaagacttcaaaaccatttgataaatgtgattagctcttatattaaaagtaaaatgaaagttttagagcatccatagacatgtaacttttctgtacatc

SEQ ID NO: 16199 - DNA, 201 bp, Homo sapiens
ccttttatcatgttggagtcaaataacacacttgtctattataagtaaggagtgatctgtggatttgagttgtttcttaagaatagttcagtatcctcttrttattggtattagtttactcttctatctgtgaaacacaatagggcctggaattaaatttaaatctggaaagtgtgtaaaacataagcaaactccagagct

SEQ ID NO: 16200 - DNA, 201 bp, Homo sapiens
ggcattaaatttaagccactacctgcttcacggcaataaaggagtaatgaggaaagaaagagaaggagagatctttttaaattttatctgtattaaacatrttcatgcataatagcacttttaatctccaacggtagccctgtgtggtggtatagactgagggttctacagtggcacagatctggatttgtgtcctgcctc

SEQ ID NO: 16201 - DNA, 201 bp, Homo sapiens
gagagagatcaatcttacatttatcgaaaatatttttatattttttttctggtgtatttgtttctatataaagttttaaatttaccaggagtcaaagttayagacattttatttatgatctgttttactgcttttatgcttagaaaattttccctcctctgacttattaaacacctacttataattttattgtttaatttt

SEQ ID NO: 16202 - DNA, 201 bp, Homo sapiens
gggttcaacatgctatgacctgaaactggaacaagtgagaataaactgggaaagaaaaaaacatggagtggggaaagaagtgagtaaattgaaggtgaatyagatgatccgtgggaatactttttagatgccaaggaattttcatttcagttgtaggagagatttccctgatacatcatggcatttctgaagctttcctgt

SEQ ID NO: 16203 - DNA, 201 bp, Homo sapiens
tggtttatcggattagagaactgaggaaacagaacctaacacagcatgttttgtggggacagaattgaagaaaggtgccatccttaaaggaaaggtcaggrtaagaatgtgggagagccagatgatacagctcttaaggcattaaatttaagccactacctgcttcacggcaataaaggagtaatgaggaaagaaagagaa

SEQ ID NO: 16204 - DNA, 201 bp, Homo sapiens
acctgttgtgcaagaaaaggaggctctagtctacctttatttacaaccatcagctaccgagtatcaaagataggaatggatccatggtgaaattttcaggmattcttgaaaatgtgtttatttctttcttgtctttattagatgtgccctgtctccttcatttctttatttccatggcccctgctactagaagcattgtaa

SEQ ID NO: 16205 - DNA, 201 bp, Homo sapiens
gaacattgtgccttccctgaacacttgatgagattatgtccttttggtttgtgcttccgtagcgtttgcaatttttctaatgtaaaacacataatgctttrtaatatttgcctgtataattttccttttccctgttagactctaagtttttgaggataagggaaaaactgccttgtttattatgttgttcacattccaagc

SEQ ID NO: 16206 - DNA, 201 bp, Homo sapiens
tcatagttcattagcggtatgaaatggtaaggacctgcctaggaggcttcctttttttactctcagatcggggtttgctgggtagcccttataaggggcartgtctttagggggaagaagaatctctgtatcattccatcagtagcctgtaccttctgaaagctggaagccatggcatcttctcctcaccctcattccttc

SEQ ID NO: 16207 - DNA, 201 bp, Homo sapiens
gcttggttttagcagattaaaatgtacatctattattgtgtgcaacaagtttcagacagttttcatccttgggcatactgtgcctaggttttccacctctyctaccttgtcctttttccatttgtaggatcctctgtttgatagttctctggtatccaaaatggttgatgtggagaagtgaacctaaaataggaactggag

SEQ ID NO: 16208 - DNA, 201 bp, Homo sapiens
aaaaattgagacagtattcttttgtgcatgttttttgagcttccctaatgttttaactttatagtttttttataaaaacaatttgtcatattttaaaatgyaattttaatcactcggaggaaggggactaggtacatttgtattcatgtcgtgtggggatataagtttgttgacagtctcattttgcaaaatggatttaat

SEQ ID NO: 16209 - DNA, 201 bp, Homo sapiens
catgtacattgtccccacagctggttaattcagagaaaatagaacatctttctctcagtaaatccagcagaatcccaaggagagctttaattggcctagcmtagaccatgtgctcttctctgaagcaatcactgcagccagagtgctctgttgattggccagcctggcttctgtgctcacttctcaggtgggaagtgggat

SEQ ID NO: 16210 - DNA, 201 bp, Homo sapiens
aatcatgtggcatgtaagtctgcttattacattcttctagctataatatgtttggtgaaagagcttatcaaaccatttttttttcattatattcattttcratccaaagttaccaaggattcaaaaatctagagaaagtttatgggggttacagaagacccagagatattttcaaagcctttccaatagaatactatgcat

SEQ ID NO: 16211 - DNA, 201 bp, Homo sapiens
ggatcaggctgggacagagtgtttctagtattggcctgcaagacactggctctgccctcagcagggatggctgtgtgcagtcaggtatgtaaaactagttrgctcccacccttgaccttgtcatatgaccgatcatatgaaagtgtatttgtgagctataattattgaggtatctgccttatctcccttgctagactgata

SEQ ID NO: 16212 - DNA, 201 bp, Homo sapiens
tttattttgttaataagacaaactatgcaacttggaaacaaatttgaatgttggatgattagtttatgtcttaacatttgaggatgtgcatggatataaarggcaggcagttccactctccttttccctgaacttgagttgacttcttcacattcactatggcaacctcaatgatcaacacatacaggagctctgaagtgc

SEQ ID NO: 16213 - DNA, 201 bp, Homo sapiens
agtggacagttggtaatcatgtgagattctttcccttctcctgtcccacaccatcctctgatcttctcatggtatagggctttcctcacagttcttttgggaactcttagaactctataacttcgcttgtctatggcaaacttttcttctctgttgtagtcatctttgtgcagatgttttatttagattcattgaatataa

SEQ ID NO: 16214 - DNA, 201 bp, Homo sapiens
tgtacatctcacatcccattctggagtggaccttcggaaagttcctctggctccaagaagcaagtttatcattgcatacatatttagctactttaaatccmtttttttttagagggaaagaaagataaggcaatggtaatgaggcaagaaataactgccaagtgcttatagaattgagtttggttcctgccccccctcccc

SEQ ID NO: 16215 - DNA, 201 bp, Homo sapiens
ggtttgccagaaccagtctaaatgcaggttttcattacagaacactaatgaccctcaagagaagtttaaatcatgtttattctcttacaatttttttttttacaatatcaggaagtacttcagaatttctcatgtgaagcacttactatgaagaccttattttctctcattcatgtatgtttttcattttttggatgcagt

SEQ ID NO: 16216 - DNA, 201 bp, Homo sapiens
tccttcctggcagcttccagaacatgccaggctcctttatacctctgcacctttcatcatagtgttctttactggctcgggatctgttctctgctgaggtstgctagggaacatctatttatcttttaagactcagattgaaagcagctatgcccttttcctgtgccaccccccatcctatactgtaggattgtccaatct

SEQ ID NO: 16217 - DNA, 201 bp, Homo sapiens
aagcaattcttctgcctcagcctcctcctgagtagctgggattacaggcacataccaccactcctagctaattttgtatttttagtagagatgggatttcrccatgttggctaggctggtcttgaactgctgacctcaggtgatctgcccacctcggcctcccaaagtgttgagattacaggcatgagccactgcgcctgg

SEQ ID NO: 16218 - DNA, 201 bp, Homo sapiens
tataattatgacttgttactgcatttggagacatatgcatgacctttcagagttcaaaacaaccatagggaatcttttgtctagtcttttcatttcgctartaaggaaacaaagtctgagagagaaatgaagtgccacccagttaaataatggcagggtggtagtagaatagaattttagggaatcatgaaattatactct

SEQ ID NO: 16219 - DNA, 201 bp, Homo sapiens
catgatctcagctcaccgcaacctccacttcctgggtttaagcaattcttctgcctcagcctcctcctgagtagctgggattacaggcacataccaccackcctagctaattttgtatttttagtagagatgggatttcaccatgttggctaggctggtcttgaactgctgacctcaggtgatctgcccacctcggcctcc

SEQ ID NO: 16220 - DNA, 201 bp, Homo sapiens
cagttaattttttatttttagtagagacagggtttcactgtggtagccaggatggtctcgaactcctgacctcatgatccacctgccttggtgtcccaacktgctgggactacaggtgtgaaccactgtgcccagtcgatattcttttttaacccataccagtggtgacttacacctataaatttttatagcttccccatt

SEQ ID NO: 16221 - DNA, 201 bp, Homo sapiens
gtactcccagcaacttgggaggctgacgtggaaggatctcttgagcccgcagggtcaagtctgcagtgagccatgatcatgccactgcactccagcctggrcagcaaagcaagaccctgtctcaaaacaaacaaacaaacaaaaataaacaaaaagaaaaaagattgttcataagtaattgttgaaaaataaatgaattat

SEQ ID NO: 16222 - DNA, 201 bp, Homo sapiens
acctcccaggttcacaccattctcctgcctcagcctcccaagtagctgggactacaggtgcccgccaccatgcctggctaattttttttttttttttttgkatttttagtagagatagggtttcactgtgttggccaggatggtctcgatctcctgatctcgtgatctgcccgcctcagcctcccaaagtgctgggattac

SEQ ID NO: 16223 - DNA, 201 bp, Homo sapiens
caaaatggatttatttatgtgtgtgcatggctcaaggtatttctctcctgtctttctttttttaggttgaatttatgtatatatatatatatatatatatatataaagttttgttataagttcggggcacatgtgcaggtttgttacataggtaaacgtgtgtcatgggggtttattgtgcagattatttcatcacccagg

SEQ ID NO: 16224 - DNA, 201 bp, Homo sapiens
acagtttattatttctcataatgctatgggtgataaggtggttcttctgcttcagttgatggttggggtggtgggagcagctgtaaggtctcgaatgcccrtgtccacaggattggcagttagtgttagcctctgtctaggaactcagcagaggctttctgcacgttgacctcttcagtggttccttatcttcctcacagc

SEQ ID NO: 16225 - DNA, 201 bp, Homo sapiens
ctctctttttgtcaagtaaactatatccattcttctaggtgcaatacttcatctgaggttaagctgaaatgaaataacaatgaaaaaccgtcagagaacawtgctgaatactcttcccaacctagtgcatcagtggcacaccccacactcactggggtcattttgcccattagggctgagctacttatctacatcctttga

SEQ ID NO: 16226 - DNA, 201 bp, Homo sapiens
acaaaatggatttatttatgtgtgtgcatggctcaaggtatttctctcctgtctttctttttttaggttgaatttatgtatatatatatatatatatatatatataaagttttgttataagttcggggcacatgtgcaggtttgttacataggtaaacgtgtgtcatgggggtttattgtgcagattatttcatcacccag

SEQ ID NO: 16227 - DNA, 201 bp, Homo sapiens
tataaattaccatgggcagtatggccattttcacaatattgattcttcctacccagttttgtgattattatataacagtttattatttctcataatgctakgggtgataaggtggttcttctgcttcagttgatggttggggtggtgggagcagctgtaaggtctcgaatgcccgtgtccacaggattggcagttagtgtt

SEQ ID NO: 16228 - DNA, 201 bp, Homo sapiens
atgaattcagcctcgttagaattttcccttgttggtttgtgttcattccacaagactacatctgataaacctgtatgtattattagttactctttattttyttaaagtcaagatattatctagattaatatttaggggaaagcagaaggctaaaagtaaataaactttgaaactatggtcttgtgttaatctcttcatggc

SEQ ID NO: 16229 - DNA, 201 bp, Homo sapiens
cacaaaatggatttatttatgtgtgtgcatggctcaaggtatttctctcctgtctttctttttttaggttgaatttatgtatatatatatatatatatatwtatataaagttttgttataagttcggggcacatgtgcaggtttgttacataggtaaacgtgtgtcatgggggtttattgtgcagattatttcatcaccca

SEQ ID NO: 16230 - DNA, 201 bp, Homo sapiens
gggttgtttgtttttttcttgtaaatttgtttgagttcattgtagattctggatattagccctttgtcagatgagtagattgcaaaaattttctcccatgytgtaggttgcctgttcactctgatggtagtttcttttgctgtgcagaagctctttagtttaattagatcccatttgtcaattttggctttcattgccatt

SEQ ID NO: 16231 - DNA, 201 bp, Homo sapiens
ccacgcctggcctcggtgcatgttcttcttgaacatcctgcttattggaggcacaaacagccacctgcctgggaattgggaaggggtgtgtgggagcaggrgccaccttgagcagtggtcaggtgtgagaacacccctcctatttttacacaggcatcgtcctttgtacagagtgggggaaggccaagagaccatcttgaa

SEQ ID NO: 16232 - DNA, 201 bp, Homo sapiens
atccaacctccttagtatgcaagagctcatggtcttgtgctgcttcatctctcaaagctcttctccactttgtactcctgaccttcttgcagtttcttgaagactatgctgttaaatgtctctgtgctgttgcatatacctttttgtctgcttgaagttccctttttcatttgtctacttgaagattcagttcaagagtca

SEQ ID NO: 16233 - DNA, 201 bp, Homo sapiens
gagcctggggtaaggcactgaagtactgaaaccctcttggtgaggtacaatcccatggcttgccagagtgaggaaatgagatcgtgtctttttttttttttaagatggagaaaattataccatgtttgcaatacaaatggggttgatctagtatagatcaccacatattttctaattttcaaatacagtggattgttttta

SEQ ID NO: 16234 - DNA, 201 bp, Homo sapiens
ggggttgtttgtttttttcttgtaaatttgtttgagttcattgtagattctggatattagccctttgtcagatgagtagattgcaaaaattttctcccatkttgtaggttgcctgttcactctgatggtagtttcttttgctgtgcagaagctctttagtttaattagatcccatttgtcaattttggctttcattgccat

SEQ ID NO: 16235 - DNA, 201 bp, Homo sapiens
cacctcagcctcccaaagtgctaggattacaggcatgagccaccacgcctggcctcggtgcatgttcttcttgaacatcctgcttattggaggcacaaacagccacctgcctgggaattgggaaggggtgtgtgggagcaggagccaccttgagcagtggtcaggtgtgagaacacccctcctatttttacacaggcatcg

SEQ ID NO: 16236 - DNA, 201 bp, Homo sapiens
ttttgatttgcatttctctgatggcaagtgatgatgagcattttttcatgtgtctttcagctgcataaatgtcttttgagaagtgtctgttcatatccttygcccactttttcatggggttgtttgtttttttcttgtaaatttgtttgagttcattgtagattctggatattagccctttgtcagatgagtagattgcaa

SEQ ID NO: 16237 - DNA, 201 bp, Homo sapiens
ccacctcagcctcccaaagtgctaggattacaggcatgagccaccacgcctggcctcggtgcatgttcttcttgaacatcctgcttattggaggcacaaacagccacctgcctgggaattgggaaggggtgtgtgggagcaggagccaccttgagcagtggtcaggtgtgagaacacccctcctatttttacacaggcatc

SEQ ID NO: 16238 - DNA, 201 bp, Homo sapiens
acaatggttgaactagtttacagtcccaccaacagtgtaaaagtgttcctatttctccacatcctctccagcacctgttgtttcctgactttttaatgatygccattctaactggtgtgagatggtatctcgttgtggttttgatttgcatttctctgatggcaagtgatgatgagcattttttcatgtgtctttcagctg

SEQ ID NO: 16239 - DNA, 201 bp, Homo sapiens
cccacctcagcctcccaaagtgctaggattacaggcatgagccaccacgcctggcctcggtgcatgttcttcttgaacatcctgcttattggaggcacaaacagccacctgcctgggaattgggaaggggtgtgtgggagcaggagccaccttgagcagtggtcaggtgtgagaacacccctcctatttttacacaggcat

SEQ ID NO: 16240 - DNA, 201 bp, Homo sapiens
ccaacacactgggcttgttttagccttgtgacctttacacctgctattctttctgcctgtttgactgatccctcagcgttcaagtttttgcttagatttcyctacagagaggccttctctgactatcctgtctaaaattgccaccacccccttacattgctgtgtttttacagcatttgccaatgcctgagacagtcttgg

SEQ ID NO: 16241 - DNA, 201 bp, Homo sapiens
aggaatcgccacactgacttccacaatggttgaactagtttacagtcccaccaacagtgtaaaagtgttcctatttctccacatcctctccagcacctgtygtttcctgactttttaatgattgccattctaactggtgtgagatggtatctcgttgtggttttgatttgcatttctctgatggcaagtgatgatgagcat

SEQ ID NO: 16242 - DNA, 201 bp, Homo sapiens
gcccacctcagcctcccaaagtgctaggattacaggcatgagccaccacgcctggcctcggtgcatgttcttcttgaacatcctgcttattggaggcacaaacagccacctgcctgggaattgggaaggggtgtgtgggagcaggagccaccttgagcagtggtcaggtgtgagaacacccctcctatttttacacaggca

SEQ ID NO: 16243 - DNA, 201 bp, Homo sapiens
gataagtgtgggttggagctattcgggatgttttagtaggcggtgtttgttctgaacagagaatctttttgggctctattatttaatagtcaagagaggcmaaaggtccttgcagccgattatcttctgctgattgagtgacttgtacagattacaaataaatatatgcgtgatcgttactcctcaaggaactgatgacat

SEQ ID NO: 16244 - DNA, 201 bp, Homo sapiens
gtgtctttatagcagcatgatttataattctttgggtatatacccagtaatgggattgctgggtcaaatggtatttctagttctagatccctgaggaatcrccacactgacttccacaatggttgaactagtttacagtcccaccaacagtgtaaaagtgttcctatttctccacatcctctccagcacctgttgtttcct

SEQ ID NO: 16245 - DNA, 201 bp, Homo sapiens
tgggtggttgagacagccccctcagttggtctcctggccccttctctgttccctatgtcctctaccccagtctgcccttcactttgctttaaaaaggcagwtttgaccctgtgattgtcctttccacactttctcaatggtccttcctagcttctggaatataagccacccttctaaagcagatttgcagaaccctttgtc

SEQ ID NO: 16246 - DNA, 201 bp, Homo sapiens
cctttgtaagtttgtagataatgtgttgtccatacatatgtgtgtatatatatctttatgtgtatgtgcacatatatttatatgtactatatatgtgtgtrtatatatatatctttatgtgtatatatgccgtgtgtgtgtatctttatatgtgtgtgtatctatatgtgtgtgtatatatatcttcatatatatgtatat

SEQ ID NO: 16247 - DNA, 201 bp, Homo sapiens
ttccagttcctgtaggtgcagtgttagattgttaatttgagaacttttaaactttttgatgtaggcatttagtgctataaactttcctcttaaaactactytcattatatcccaagtattttggtatgttgtaattctgtttcattaatttcaaagattttttgatttccaccttcattttgttgtttaccttaaaatcat

SEQ ID NO: 16248 - DNA, 201 bp, Homo sapiens
ttcctgatagcttctggctattagagctttgtcggatgcatagtttgcgaatatattcttcttgattcatttaagttcctgatagattctggttattagamctttgtcggatgcatagtttgcgaatatattcttccattctgtagtttgtttactctgttgatagtttctcctactgtgcagaagctctttaggttaatt

SEQ ID NO: 16249 - DNA, 201 bp, Homo sapiens
tgcctataccatgttacatttctcccaactgtatttgtgagttttaggtgcctcttatccttgccaacatttggtgtggtcattcttttttttttttttttaaatacagggtcttcctctgttgcccaggctggagtgtgtggtactacaatcgtagctcactgtagcctcaaactcctgggctcaagccatcttcccatc

SEQ ID NO: 16250 - DNA, 201 bp, Homo sapiens
gctgagctggtggctgcagcatttttatgggatgttccctatttgtgtgggaagacaaccctgaaggtgaatttgtgtggagagaaaacacagaagggcascaacacagcataagcacaagtcaggggaggctgtgacatcagatgggcgctgaatgcttgtggctgggaggacaggcaaggcccaaaggagtagctctct

SEQ ID NO: 16251 - DNA, 201 bp, Homo sapiens
cagctgggtgagagagatgagaccaagaagaggacagagacatgaatggttactacagaggaagaaggtttgagaaataaaactgagtagagagagagttwtgtgagatgaagaatgtgcaaagacattgagatctcagtgatgtctctaacaaaaatctattctgaacgatgatgtaggacccttaataacattagtact

SEQ ID NO: 16252 - DNA, 201 bp, Homo sapiens
agcagtttttaagattctattatatgtggagtaccatttatgaggatacaaaatacaaataagaggatgtcctcaagttggatacagatagtgaaacaaartttacaaataattacacaataacatgacgaagtctatagtggagccaaacaaaaaggactgcaggaacactaaggggtaagctaaaaatcctgcctgaga

SEQ ID NO: 16253 - DNA, 201 bp, Homo sapiens
ctgagttaggaactagagagaaatgtaatacaattttatagaaggtagtcaagaaagtcctctccaagggagtgacaattaggtgggacctgaagcgagtraaggaacacaggaatgtcactgtttggaaaaaagaatattcctggtggagggaataccaagtgcaaagctcctgaggtcattaagtggcaggcatactgg

SEQ ID NO: 16254 - DNA, 201 bp, Homo sapiens
gaagaatgtaaaatgatcccatagttggcatggttctaaaggaaatagtgtaggagaatagtttagagtcaagcagagatggttgaaatgctagctttgcrccatttgttagctatgtgagcttggggaatttacttaaatattctgagcttttgtttattcattttgtaaattagacgattattatgaggatacagtgag

SEQ ID NO: 16255 - DNA, 201 bp, Homo sapiens
atgttgattcttaccacagtacctgagcaaagtgagaacttactattttaatctaaggtgatatagtgaaaaatcaggtttttttttttttttgaaagacrtgggcttatttagtatttttattgttttcatgatctggagtacacgtggatgggaacgttaaggagcaccaaactttaaaataatacgcaagtatggcat

SEQ ID NO: 16256 - DNA, 201 bp, Homo sapiens
atatctatatacgaagaatgagaacatatgggcacagggaggggaacatcacacaccggggcctgtcgggggttggagggcaaggggagggataacattakgagaaatacctaacgtagatgacgggttgatgggtgcaggaaaccaccatggcacatgtatacctatgtaacaaacctgcacttgcttcacatgtatccc

SEQ ID NO: 16257 - DNA, 201 bp, Homo sapiens
tttagggagtaattttgctgcaaagagaacagaaaaatgggatagtggctactaggggaaaagaaatcaatatatgggttaattaattaattaattaattwatttattttttagacagagtcttgctccgtcacccaggctggagtgcagtggtgagatcttggctcactgcaacctctgcctcctgggttcaaccaattc

SEQ ID NO: 16258 - DNA, 201 bp, Homo sapiens
agagtagtttatttgtcctgtcggaaaatttttgtacagaaggatgttaaactcggttcagagcctctttctctttcagaatgttaaaacaaaacaaaaaaccaaactgctttcaacttaaaagggagaggacagagccctctccctgacacatttcagcactaatcctctatgacgcagagcctcagctacttagcaacc

SEQ ID NO: 16259 - DNA, 201 bp, Homo sapiens
aagagtagtttatttgtcctgtcggaaaatttttgtacagaaggatgttaaactcggttcagagcctctttctctttcagaatgttaaaacaaaacaaaaaaccaaactgctttcaacttaaaagggagaggacagagccctctccctgacacatttcagcactaatcctctatgacgcagagcctcagctacttagcaac

SEQ ID NO: 16260 - DNA, 201 bp, Homo sapiens
gtatagaaatgttaaaaaatcaatagaaaagcgcaatttcatagcagtttcacctcctagatagtcaccattgttgacagttcggtgcatgttcttctttkttttttttttttttttttttttgagagggagtcttgctatgttgcccaggctggagtgcagtggcgtgatctcggctcactgcaacctccgcctcctggg

SEQ ID NO: 16261 - DNA, 201 bp, Homo sapiens
gaagagtagtttatttgtcctgtcggaaaatttttgtacagaaggatgttaaactcggttcagagcctctttctctttcagaatgttaaaacaaaacaaaaaaccaaactgctttcaacttaaaagggagaggacagagccctctccctgacacatttcagcactaatcctctatgacgcagagcctcagctacttagcaa

SEQ ID NO: 16262 - DNA, 201 bp, Homo sapiens
taacaagggcagggaataatggatgctggtgaggatatggagaaaatggaaccctcatatactgttggtgggaatgtaaatggtaaaactaatatagaaaactgtttggagattcctcaaaaaattaaatattgaattattatataacctagcacttatattactgactatatatccaaaatagtggaaataaatatattg

SEQ ID NO: 16263 - DNA, 201 bp, Homo sapiens
ggaagagtagtttatttgtcctgtcggaaaatttttgtacagaaggatgttaaactcggttcagagcctctttctctttcagaatgttaaaacaaaacaaaaaaccaaactgctttcaacttaaaagggagaggacagagccctctccctgacacatttcagcactaatcctctatgacgcagagcctcagctacttagca

SEQ ID NO: 16264 - DNA, 201 bp, Homo sapiens
gctaaattctaccaaacatttaaagaactgataccaattcaactctaactcttcaaaaaaaaaaaaaactgaagaggaagaaatactttcaaacttattcyacaaagctaacatcaccctaataccaaaaccagacaagcacacaacagaaagtagactacaggccaatatcactgataaacacagatacaaaagtcctca

SEQ ID NO: 16265 - DNA, 201 bp, Homo sapiens
agtggaagagtagtttatttgtcctgtcggaaaatttttgtacagaaggatgttaaactcggttcagagcctctttctctttcagaatgttaaaacaaaacaaaaaaccaaactgctttcaacttaaaagggagaggacagagccctctccctgacacatttcagcactaatcctctatgacgcagagcctcagctactta

SEQ ID NO: 16266 - DNA, 201 bp, Homo sapiens
ttggatcattagtgcaactttatataaaaacagctttgagatggatggtaaactgtgcatagtttaagtgtacaatttgataagtttgaacacacacataygtacatacatatatataagtgaaactatcactataatcaggataataaacatatccaatatcatccctaaaagtttttgtgccccttggtaatccctcca

SEQ ID NO: 16267 - DNA, 201 bp, Homo sapiens
attataagtataggccaacaaattgggaaaactagaagaaacagataaatgcctggacacatacaacctgacaagattaagccacgaagaaatagaaaacytcagcaaaccaataaggagcaacaagattgaagccgtaataaaaagtctctcattaaagaaaagcccaggacctgatggcttcactgctaaattctacca

SEQ ID NO: 16268 - DNA, 201 bp, Homo sapiens
ggctggagtgcagtggctggatctcagctcaccgcaacctccgcctcatgggttcaagcgattctcctacctcagcctcccgagcagctgggactacaggygcgtgccaccacgcccggccaattttttgtatttttagtagagacgggttttcaccgtgttagccaggatggtctcgatctcctgacctcgtgatccgcc

SEQ ID NO: 16269 - DNA, 201 bp, Homo sapiens
tctctgtacccctgacaacagatcatgctgaaattggaagtgctgacagtaagaaataaattgccaaagataaccctaacaaatgaccaaaaaaaaaaaaatacattccattatatcataaactcacaacccattccacaaaaaaccatatgagttgaagaaacactatactttgtaagttgattatggctgaatagaggt

SEQ ID NO: 16270 - DNA, 201 bp, Homo sapiens
aaagagaaaagaagcaaataacatataaaggaactccagttggtctggcaacagacttctcaacagaaaacatacattttcaaagtgctgccaggggaatmaaaaaaaaaacccaacccccaccccacccctgctgccatccaagagtattgtttcaacaacgctatccttcacatatgaaagagagataatctttgccag

SEQ ID NO: 16271 - DNA, 201 bp, Homo sapiens
tcactcttagcggtactaaattcagatttgaaaggaaattttgtttcaggtcccccttttaaaaacacttctgtattgttttgggaaactccagcattctrcatacctacatgtagctttagttttatttaaccagaaacacacgactattagtagagtgtaactatccttttaatattgctaatttgtttgttaattcct

SEQ ID NO: 16272 - DNA, 201 bp, Homo sapiens
tgttcacttcattcatatttgtcatttctgtgttcaataatagcccatgttcatgagcagtttctaagcattagcatttcttagcccatatgtatcccgtrtttctactaaagatggaaatgttagtgttaaaaccttgagaaatatgtcagcaaagcttcccaggacattgtataaaatatctttgttttgagacttaat

SEQ ID NO: 16273 - DNA, 201 bp, Homo sapiens
gaactccctgtggctgctaactcacacgtccacagagctgcatacagacgtgtcaggctctaagagttctacagattgtccaatacagtgcttgctttttktttgtttgtttgttttttgagggcttttgaggctgtttttagaatatattactgggagttattaccttcctcctggaatttgcctagtattggtgagctc

SEQ ID NO: 16274 - DNA, 201 bp, Homo sapiens
atggtgtatagggggtgggggttgaagagaggttggttaatgggcacaagcatacagttagatagaaggagtaagttctaatgttcaatagcaaagtagartgagtatagttaataatgcattacatttttcaaaatagctagaagagaggacttgaaatgttccaacacatagaaattataaatgtttgaggtggtggtt

SEQ ID NO: 16275 - DNA, 201 bp, Homo sapiens
tgtgacttagaatgccttaaccgtctgggagtgcagcccactaggtgtcagccttattttacccagctcctattcaagatggcgttgctctggttcactcrtctgtgacagacctacttgctccaggtatttaaggaaccctaagaaagcatgactaaaaagagtgagcaagtgtgaggctggaacaagatgaaactggag

SEQ ID NO: 16276 - DNA, 201 bp, Homo sapiens
cctaaatgtttacctgtcaacagataaatgggtaaagaaaacatggtgtgtatacacacacacacacacacacacacacacacacacacacacacacacactggagtactatttagccatacaaaagaataaaatcctgtcatttacaacaacatggttggttctggagatcattatgttaagtgcaataactcaggcaca

SEQ ID NO: 16277 - DNA, 201 bp, Homo sapiens
ttggtctatgtgtctgtttttatgccagtgccatgctgatttggctactatagatttgtattatattttgaagtcaggtagtgtgatatctccagctttaktccatttgtccaggattgctttggctttgtgttatgttcaggtgcttttataaactgtgattgaacagttgtgcatgtgaactttgtgctaagtgtcact

SEQ ID NO: 16278 - DNA, 201 bp, Homo sapiens
acctaaatgtttacctgtcaacagataaatgggtaaagaaaacatggtgtgtatacacacacacacacacacacacacacacacacacacacacacacacactggagtactatttagccatacaaaagaataaaatcctgtcatttacaacaacatggttggttctggagatcattatgttaagtgcaataactcaggcac

SEQ ID NO: 16279 - DNA, 201 bp, Homo sapiens
tattaactataaaaggcccccaggagctgattcatacctaacttatttctactactcctgcaatagcagagatctggtaattttccacatgtactgaattmtttcttgccactataccttgggtcatgctcttgtttctgaacaaaatgacttgacttctctatttactctacttctatatctggttaattcctatttatc

SEQ ID NO: 16280 - DNA, 201 bp, Homo sapiens
ttatgatgcctttttgaaaatcaatgatacagaaactccagagctaggctgcctaggtttgaatgcagtcttcactatttaccagctctgtgaccttgctsaagtcacttaaaccctctgtaccttaacttctttaaaatggaaataataagacccacttcatagggttgtcatgaggcttaaacgagttaatatatacta

SEQ ID NO: 16281 - DNA, 201 bp, Homo sapiens
gcctggtgatgtctgtttttgctttcctcatggttcttggcctcattgcagagaggcaaggctgctgaacaagtggatgctaggccgatgagtttgtatcwtgcaggttgtcattaaatcctttaatgagacttatgaaatgattttatgaaacaacttgacgtatttaacatgcttatagtgcctagcacatgtacttaa

SEQ ID NO: 16282 - DNA, 201 bp, Homo sapiens
gaaatgtccttgtcttctgtaaataaatgctatcagattaaattactggcctggcacagtggctcatgcctgtaatcccaacactttgggaggctggggcragtggatgatttgaggtcaggagtttgaaaccagcctggccaacatggtgaaaccccatctctactaaaaatacaaagattagccaggcatggtggtatg

SEQ ID NO: 16283 - DNA, 201 bp, Homo sapiens
tctactaaaaatacaaagattagccaggcatggtggtatgtgcctgtaatcccagctactcgggagactgaggcagaagaattacttgagcccgggaggcrgaggttgcagtgagcagagatccagagatcgcgccattgcactccagcctgggcagcagagtgagatgccgtcccaaaaagaaaaaaaaaaaaaaagatt

SEQ ID NO: 16284 - DNA, 201 bp, Homo sapiens
atactgacttggtgttaagtgtacaagaatgaacaagatgtgttttccctcacacaactccctatgtcctggagcaaaggtaatggtgaagatttgagatyagggagatacagagggtatacttaaaagaggcatagactttagatatgtgagcatcaggaaatgatgtctaacctggaatccaggatatgagcagggatc

SEQ ID NO: 16285 - DNA, 201 bp, Homo sapiens
agcttcttgttagaattcttgacatttactcacctgcataaaatagggctgaaaggggctttgcaaatgatgtagttcagacttctcattttgcaggtgttatcacagaggtaagttgatgttttcaagattgatcatttgtagacaggataatggcctccctaagatgtccatatcttaaccttgaaactgatgaatatg

SEQ ID NO: 16286 - DNA, 201 bp, Homo sapiens
gcacgaggatctcttgaggccaggaactggaggctgtagtgggctatgattgcatcactgccctccaccctgggtgatagagcaagactttgtctcaaaawaaaaaaaagtgtgtaattatgtcttattcactaaatagtgcatgatcttatgtgcatgagaaactcatagtttctagaacctgttttctggttctcagac

SEQ ID NO: 16287 - DNA, 201 bp, Homo sapiens
aaggttttaatttggctgttatttaatttgtgataatgttatgtaaatttaacatgctctgagaatgcccaggcatagggtatagaagtagagtgtgttgrttaagagtttgggcccatggatcagagagatctggatccagattcttggctttgttacctcctctctgtgtggtcataacacaggcaaagcacttcaagc

SEQ ID NO: 16288 - DNA, 201 bp, Homo sapiens
aaattaaacttaatttttataagccagctgcggtggctcacacttgtaatcccagtactttgggatcctcccaaggtaggaggattgcttgaagccaggakttcaaggccagcctggtaacatagttgtcaccctgtgattgcctggggccagcattgcagatggtaaagaatttaccaagacaatcgtaggtaaagaaag

SEQ ID NO: 16289 - DNA, 201 bp, Homo sapiens
tctgtcaatgtctattaggtccaatttgtcaagtgttaagtttaagtccataatttctttgttaggtttctgcctcgatgatctgtctaatgctgtcagtkgagtgttgacatctttcactattattttgtgcctgtcttttcgtgggtctctaaaaacttgttttatgaatctggatgctccagtgttaggtgtatatat

SEQ ID NO: 16290 - DNA, 201 bp, Homo sapiens
ctgagactagtttaaatcttttaactacagaacaaatttgaagccattaaaaaaacaggggttctggtttactttttaatagttctgactttcccaagacwatatcctttgcagaggactccctgcaataatatttagaagtgactttctctattattttcagtaggggtatatgactgtgaacataatatttttgtctta

SEQ ID NO: 16291 - DNA, 201 bp, Homo sapiens
tctgcatctatattcatcagggatatcagcttgaagttttgtttcgttttgtttttttttgcccattgtttctctgccaggttttggtattaggatgatgytggctttgtagagtcagttagggaggagtccttcctctttgattttttgggaacagcttcagcaggactggtaccagtttttctttgtacatcaggaaga

SEQ ID NO: 16292 - DNA, 201 bp, Homo sapiens
taggagctttgttgcctctggctagaaattgcctcacttgtgtcctgagactagtttaaatcttttaactacagaacaaatttgaagccattaaaaaaacrggggttctggtttactttttaatagttctgactttcccaagacaatatcctttgcagaggactccctgcaataatatttagaagtgactttctctattat

SEQ ID NO: 16293 - DNA, 201 bp, Homo sapiens
aaactaactttttgatgtgcttctagagttggtttgctagtattttgttaaggatttctgcatctatattcatcagggatatcagcttgaagttttgtttygttttgtttttttttgcccattgtttctctgccaggttttggtattaggatgatgctggctttgtagagtcagttagggaggagtccttcctctttgatt

SEQ ID NO: 16294 - DNA, 201 bp, Homo sapiens
attttaaaaatttctccaatttgctttcacctgagaaccctgcaagtctgctggatatgactttgaggcccttaggaaggctggaaaaaaacctcatttcwtccatttaacttgtgaatgaaaacaacagaaagaaccctgagagaaatccatggctaatgtgtgcttagcacagccaagtgtgctctgaatgaaaccaag

SEQ ID NO: 16295 - DNA, 201 bp, Homo sapiens
cagatagttgtaggtgtgcagctttatttattggttctgtattctgtttcattggtctatgtgtcactttttgtatcagtaccatgctgttttggttactrtagccttgtagtgtagtttcaagttgggtaatgtgatgcctttggctttgttccttttgcttaagattgctttggctatttgggctcttttttggttcca

SEQ ID NO: 16296 - DNA, 201 bp, Homo sapiens
tttttgtgccttggctaccaacaaatctagagcaaaattttcctttcattcacaatgactcttgttacagcttttctagtgcagctatccatcttgctcarcatagcttcaatgctgattttaatgatcctagcagtcttttacaaatccatgttgaaagtagttggagtaaaaaccaaaattacattttaaaaatttctc

SEQ ID NO: 16297 - DNA, 201 bp, Homo sapiens
attgcttttgagaacttgaccatgaattatttgccaggtcccatgttgagaagagtatttcctaggttttcttctaggatttttacagtttgaggtcttasatttaagtcttcaatccatctcgagttgatttttgtatatggtgataggtaggagtccagttccattctcctgtgtatggctagccagtaatgccagtac

SEQ ID NO: 16298 - DNA, 201 bp, Homo sapiens
tttaggccttaccttacttgacctttctctttcatttaacactgctaatcatcctccttgatgctatccttcacaacccatcatgcgcccatgccatcttytggaaatctgattgactttcctggtttagctacaacccacaccccaggtagataaaggtccatctgtgcatgaaacttctctcctgaagtatgaatttta

SEQ ID NO: 16299 - DNA, 201 bp, Homo sapiens
caagattttgagagaccagtaacaccgaatgctcatagttcattagcggtatgaaatggtaaggacctgcctaggaggcttcctttttttactctcagatyggggtttgctgggtagcccttataaggggcaatgtctttagggggaagaagaatctctgtatcattccatcagtagcctgtaccttctgaaagctggaag

SEQ ID NO: 16300 - DNA, 201 bp, Homo sapiens
tcaagggagggaggtgattggatcatgggggcattttccccatgctgttctcatgatagtgaataagttctcaggagatctgatggttttataaggcagtyttccctgctctggcttgctctcttgcctgcctccatgtaagaattgcctcttttgccttctgccatgattgtaagtttcctgaggcctccccatccatgt

SEQ ID NO: 16301 - DNA, 201 bp, Homo sapiens
acctctgagaggcagatgattttctttcagcacttaggtctgaagtaacttaaatgaaaggaactaactgggtcaaaacatattgactttgtataacaatwtttgatgcaaatgatatccaattgatttcaggagaggacattgataaagtaattcttaatataatttatgatcttatttatactacagttctatgtagaa

SEQ ID NO: 16302 - DNA, 201 bp, Homo sapiens
agaacctctgctagggcagtacagaagggaaatgtggggttggagctcccacacagagtccccactgccactgcctagtggagctgtgagaagagggccayggtcctccagattccacaatggtaggtccacccacagtttgcactgtgcctggaaaacccgcagacactcattgccagcctgtgagagcagccaggaggg

SEQ ID NO: 16303 - DNA, 201 bp, Homo sapiens
gaccattttggcagcagacaacttacatatttagtgagggttaagtgcgcagcctgattgttgctcgttcactcatgggtttgtttttttgtttttgtttyttctcctcttcctaggcccttcccaacagaagaaagcattaatgatgaagacatctacaaaggccttcctgatttaatagagtatgttgaaaatttcaag

SEQ ID NO: 16304 - DNA, 201 bp, Homo sapiens
ttatcagagttttttaggtaatgaaaacgggcacacgtgtgacacaaataggagttagcaggatactcttcgtaatatttttttccttgtgtctattatasgattttccattatatatttctgtggcatctctccatcaggattctcattgtgcatgaatctatctatgcacaagagtgtcaactctgccagcagtatctg

SEQ ID NO: 16305 - DNA, 201 bp, Homo sapiens
aattagccttcatagtgttttttgaagggaaatgaaaggtcctcttgcctagaatttcttctgaccgaccttggcccagtttttgaaattctaacaattcwcatttacccccttgaatgaagaaagactctttgagatgcatatgccatcactactgcgaatatctaagatttctcgactgtgtaataagtgcctggcaca

SEQ ID NO: 16306 - DNA, 201 bp, Homo sapiens
ctcggtaatgtggaggtttaaatacgcctgctcatacttcagcagatggctagtgaattgaaccaccttcctcatatatatatatataaatatatatatayacacacacacacacgcacacatacatttttaatctcaacagtgtaattctaagacaaaagtctatagatgattagtgaacatttagagttgtgatagaaa

SEQ ID NO: 16307 - DNA, 201 bp, Homo sapiens
cagccttgcatcccagggatgaaactgacttgatcgtgatggacaagctttttcatgtgctgctggattcagtttgccactatttttttttttttttttttgagacggagtcttgctctgttgcccaggttggagtgcagtggcatgatcttggctcactgcaagctccgcctccagggttcacgccattctcctgcctaa

SEQ ID NO: 16308 - DNA, 201 bp, Homo sapiens
catctgcaaacagagacaatttgacttcctctcttcctatttgaatgccctttatttctttatctttcctgattgccctgtccaggacttccaatattgckttgaataggagtggtgagagagggcatccttgtcttgtgctgattttcaaagggaatgcttccaggttttgcccattcagtatgatattggctgtgggtt

SEQ ID NO: 16309 - DNA, 201 bp, Homo sapiens
tgctcagaaaaatcacagctgtcatgaaatggagtctttcaatagcctgtttgatccggaaacatgcgaaagtatttcatgcatgacaaaggattagtaartattaaatagtattcttgttttgttattgcctagtgaggatcaagctctctcatttttctctggttatgtttaatatgtatttgatacttcttggcattc

SEQ ID NO: 16310 - DNA, 201 bp, Homo sapiens
tacagattaaaagcaatctcactgtattgtacttgaaattgagaattatgtttccattttattgtatctagtaaaacctgaaactcttgaaaaactttttwaaaaaaatcagcaaactcgtaaaatagcatcagttactgtattttctcaaatataaacaaggcgctatactgaatcgatcacaaatttttctaagtgggt

SEQ ID NO: 16311 - DNA, 201 bp, Homo sapiens
gtgagaaggggatgctagtactcacacatttacttatttatttattattttttgagacagggtttcaccctccatgcctaggctggagtgcagtggtgcartcttggctcactgcaacctccttctctctgactgaagcaatccttccacctcagcctcccgagtagctgggactacaggtgcatgccaccacagccagct

SEQ ID NO: 16312 - DNA, 201 bp, Homo sapiens
ctagggtacatgtgcacaacgtgcaggtttgttacgtatgtatacatgtgccatgttggtttgctgcacccattaattcatgatttacattaggtttttcwcctaatgctatccctcccccattccctcaccccagatgggccccagtgtgtgatgttccccacccttcgtccaagtgttctcattgttcaattcccacct

SEQ ID NO: 16313 - DNA, 201 bp, Homo sapiens
gacagtcctagtggctgggagaaccctttcctgtccactcttgcctatctaactagctgtaacaggtttaaaacttgatagtggatccctgttgtttataagagaataacatctaaactcttttacaagccgcacaagattcttcatgatcaggcctctgcctacctttctaaccttatttctcactttcctactcccata

SEQ ID NO: 16314 - DNA, 201 bp, Homo sapiens
tggtggagtgcccctggaaactcatactctgccattttgtctcttactgtgtactcccaggaaattgcttatctctggtgcctgcattcagttaacacttyagtgcaacaggtgtggaccatcaggaagtggcttttcccttgcatcagctgccaagttatcacttttagagaggcagtgtgataattgccaaaccttcac

SEQ ID NO: 16315 - DNA, 201 bp, Homo sapiens
tggagacatttctattttggtaatgtttcttgttttgttcaccctgccaggagctaaatggttacaaatgccctatttttttttttttttttttttttttkgagatggagtctcgctcttttgcccaggctggagtacagtgacacaatctcggctcaatgcagcctccaccttccaggttcaagtgattctcctgcctca

SEQ ID NO: 16316 - DNA, 201 bp, Homo sapiens
ctgacagtcctagtggctgggagaaccctttcctgtccactcttgcctatctaactagctgtaacaggtttaaaacttgatagtggatccctgttgtttataagagaataacatctaaactcttttacaagccgcacaagattcttcatgatcaggcctctgcctacctttctaaccttatttctcactttcctactccca

SEQ ID NO: 16317 - DNA, 201 bp, Homo sapiens
gaaaaggaggtgagggataaaagactgcaaattgggtttagtgtatactgctcgggtgatgggtgcaccaaaatctcagatcaccactaaataacttactyatgtaaccaaataccacctgttcccacagaacctatgtaaataaaaaattgaaaaacaaaacaatacatggtttctgagttagatcttggtttggattcc

SEQ ID NO: 16318 - DNA, 201 bp, Homo sapiens
taagaatgatacagtggacttgggactcaggggaaagtgtgaaaaggaggtgagggataaaagactgcaaattgggtttagtgtatactgctcgggtgatkggtgcaccaaaatctcagatcaccactaaataacttactcatgtaaccaaataccacctgttcccacagaacctatgtaaataaaaaattgaaaaacaaa

SEQ ID NO: 16319 - DNA, 201 bp, Homo sapiens
tgaggatgcaaatgaataagaatgatacagtggacttgggactcaggggaaagtgtgaaaaggaggtgagggataaaagactgcaaattgggtttagtgtrtactgctcgggtgatgggtgcaccaaaatctcagatcaccactaaataacttactcatgtaaccaaataccacctgttcccacagaacctatgtaaataa

SEQ ID NO: 16320 - DNA, 201 bp, Homo sapiens
tcttagaattgagctctttcctcagtagtaattcacttcaaactccaccaacatcaacaaaaattagaacagtttgaaacgctttctacacttttttttttaatcacacaggaaagaggagtgagtttagtaacttgaactcatttaagagtcagcagaggccttcaggttagatatgactctcactcttcagggttgtta

SEQ ID NO: 16321 - DNA, 201 bp, Homo sapiens
tgatggttagtaggtttttttccatttttttaaactttattttggtataacttacatataataaaatgcatctatttaaagttttcacatgtatatttttwaaaaaatatgtgccactgcagttagggtatgtgtgtattttgcttaggtggatctgagtcttttagacactgaaagcaaattttaacttttgttttttta

SEQ ID NO: 16322 - DNA, 201 bp, Homo sapiens
ttttgccatgttggccaggctggtctcgagctcctgacctcaggtgatctgcccacctcggcctcctgaagtgttgggattacagacatgagccaccgcayctggcctccagttttctaattaagaccttttaacctcatcacttctaggacaaagccaagatctctttggcatgccatggacatcccagctcccctcttc

SEQ ID NO: 16323 - DNA, 201 bp, Homo sapiens
cagattgaggctgcagtgaactgagattgcaccactgcactccagcctgggtgacagagcaagaaagaccctgtctcaaaataataataataataataatrataataataataataataataataaataatttatttttaattttgggggtacatagtaggtgtatatatttatggggtacatgagctattttggtacagg

SEQ ID NO: 16324 - DNA, 201 bp, Homo sapiens
tcagattgaggctgcagtgaactgagattgcaccactgcactccagcctgggtgacagagcaagaaagaccctgtctcaaaataataataataataataatgataataataataataataataataaataatttatttttaattttgggggtacatagtaggtgtatatatttatggggtacatgagctattttggtacag

SEQ ID NO: 16325 - DNA, 201 bp, Homo sapiens
atcagattgaggctgcagtgaactgagattgcaccactgcactccagcctgggtgacagagcaagaaagaccctgtctcaaaataataataataataataatgataataataataataataataataaataatttatttttaattttgggggtacatagtaggtgtatatatttatggggtacatgagctattttggtaca

SEQ ID NO: 16326 - DNA, 201 bp, Homo sapiens
gatcagattgaggctgcagtgaactgagattgcaccactgcactccagcctgggtgacagagcaagaaagaccctgtctcaaaataataataataataataatgataataataataataataataataaataatttatttttaattttgggggtacatagtaggtgtatatatttatggggtacatgagctattttggtac

SEQ ID NO: 16327 - DNA, 201 bp, Homo sapiens
atgagagagttgtccttgttgaaaggagatgtggtgaagatttacacaaagatgagtgcaaatggctggtggagaggagaagtaaatggcagggtaagttrgccctctcgatgtgctggtgcatgtgaaagaaggggactgagcagttgtttgcacccattgtggcaccagggagaagcctctatactgtattacagcttt

SEQ ID NO: 16328 - DNA, 201 bp, Homo sapiens
actttctgtgatgatggaaattttttgataactgtgtagttcattacagtggccacatgtgtgtggctactgaacacttaaaatgtggctagtgcaactgyagaactgggatttttgtttttaaaatttaaattaatttaaatagcctcatgtggctagtgggtactatactggagaatacagctttccagaatctttcag

SEQ ID NO: 16329 - DNA, 201 bp, Homo sapiens
aagtaaatggcagggtaagttggccctctcgatgtgctggtgcatgtgaaagaaggggactgagcagttgtttgcacccattgtggcaccagggagaagcytctatactgtattacagctttcagcccacaggcctctgccctctggaaactggtgctgtgttttgctgataccagggactcgctgaaaatatttgaaatg

SEQ ID NO: 16330 - DNA, 201 bp, Homo sapiens
catttgcttaatcttccatatacctatggaaaatttagcattaaattggtcatccttattgtatttatgtgctcaggagttcatgtgtttgagaacaaaartatccttatcaaaaatatgttggattcttttttccaaaggaacttgtggagtactacaagcatcattctctcaaggaagggttcagaaccttagatacaa

SEQ ID NO: 16331 - DNA, 201 bp, Homo sapiens
aaattggtcatccttattgtatttatgtgctcaggagttcatgtgtttgagaacaaaagtatccttatcaaaaatatgttggattcttttttccaaaggarcttgtggagtactacaagcatcattctctcaaggaagggttcagaaccttagatacaactctgcagtttccatacaaggagccagaacattcagctggac

SEQ ID NO: 16332 - DNA, 201 bp, Homo sapiens
atttggaggtttttgggcattgttatatgccctgaaaatagcctgctacatggcaagtgacacacacacacacacacacacacacacacacacacacacamtctacacaggagaacttggaacaaaagtcctggatgcaaatcctggctctgccatcaagaattgtgggccataaggagataatttactgtagtcattaag

SEQ ID NO: 16333 - DNA, 201 bp, Homo sapiens
acagaaatgtaatggcgtgaagaatgaggaatactccaggtagaggaaaaagatgaatgactatgcaatttattgtccaaatcagatttttttttttttttaaagaaagggacactagcaataattgtggtaggacatcagggcttgaaccaggaccatctgtggaaaccaggccagtggtctttgtacagaaattctgtt

SEQ ID NO: 16334 - DNA, 201 bp, Homo sapiens
tcgtgacagaataactggctgtaggaacatctcactgaggattattatttttgtaagttgacactggagctttagcaacttgaccaagttttttactctawtttttaattctttcattctctgattttagttgacctcttttagctgtttccagaatcatctagaagatcttttgtattagtcatgagctggaggccaggt

SEQ ID NO: 16335 - DNA, 201 bp, Homo sapiens
gttcgtgacagaataactggctgtaggaacatctcactgaggattattatttttgtaagttgacactggagctttagcaacttgaccaagttttttactckattttttaattctttcattctctgattttagttgacctcttttagctgtttccagaatcatctagaagatcttttgtattagtcatgagctggaggccag

SEQ ID NO: 16336 - DNA, 201 bp, Homo sapiens
catccatgtaagacatgacttgctcttcctcaccttccgccatgattatgaggcctccccagccacttggaactgtaagtccattaaactcttcttcctgyataaattacccagtctcaggtatttctttatcagcagcatgaaaatgggctaatacaaacacacaggcttgtaaaagtagattacttttaagtaaacact

SEQ ID NO: 16337 - DNA, 201 bp, Homo sapiens
cttgaattcccacatgttgtgggagtgacctggtgggaggtaattgaatcatgagggcaggtctttcctgtgctgttctcatgtgagtgaataagtctcaygagatctgatggttttataaaggagagtttccctccggaagctttttttgcctgctgccatccatgtaagacatgacttgctcttcctcaccttccgcca

SEQ ID NO: 16338 - DNA, 201 bp, Homo sapiens
aaaacagtttaagtctgaaaagtggtataaatggaacggaacatgacattcctgtagccatttttttaatacagattatatccctgattaataacaaaattgccagtctttttaaatataaaattacaacaaccatatagaatcacacacctccaacctctgctgatcttgatcttagtacatgaggcttgggttgcgatt

SEQ ID NO: 16339 - DNA, 201 bp, Homo sapiens
aaaataacttgtggacactattttcttgtataattgaaaattatgcaccactaccaccactaccacaaatagttttgtataagatatgtctgttaagttcmgagaccacaaagtccctattgtgatgcaataacctcggttaactgagcatatcttctccatgtcctggtgaggatagctatttcagaagatcatttatag

SEQ ID NO: 16340 - DNA, 201 bp, Homo sapiens
tttcgctttctttgcttggtgttttgctggcctttgttggaagtcttatggagcagtttaagtgagcagaagatgagctaaaggaatggaaggaggagacrtaaggaacttgcagaattaaataccctgccgagatacttgtccattcagcagcttcagttgcttagcactggacctgatcctgtggaggatgcagaagca

SEQ ID NO: 16341 - DNA, 201 bp, Homo sapiens
tagaaaatgatagtcataggtgtgttttctgtatgtgctacaaatttcacaaagctttcattcttcataggaaactaacgtaaacacgcacacacacacamaaacaaacaaacaaaaaacacttggtatttactttcttttaaacttccaagtcatgtagtccctgcctggctgttctgtgtcattactacatcatggcac

SEQ ID NO: 16342 - DNA, 201 bp, Homo sapiens
ctccgaaagtgagacccatctaggagccatattccacattggtgcaagtttaagtcttctaaaacatacaacacctttaaagaaatgccatcaccaatgayagaattcagctatcactgtcaaattgtttcctaactactttttatatttaagtcccactgtctttcttcatgagtctctattatgcttgtacagagaggc

SEQ ID NO: 16343 - DNA, 201 bp, Homo sapiens
aaaaattggaacactagagaaaaatactatcagtgctgtggggtcataattatcatttttattaaaaattcctactttaccagagcattttttccaaaccraggacctctgggtatgatctaatttgcatggctttaatatattaacagttcacttcaggggaactacctaattagcttgcctgtggccatttctgaccat

SEQ ID NO: 16344 - DNA, 201 bp, Homo sapiens
gctttatgagggagggatgtagtcagtcttatttatggtagcattcacagtgcaaagccaatatcaatgcatgaatgatctgtaaatatttgctgaataartgaatgaacccatagaacaaagaaggaaaattaggttcttgcaaagtgcccttaatcatttttacttttacgctgttatcttctcctttagatatccttt

SEQ ID NO: 16345 - DNA, 201 bp, Homo sapiens
ttgaagtacttacattccttggaattcaagatatccaaggattaatgagtgctataagtcaaattgtaattaaagattcaaatccaaaggtgctggcagcrttgcctgcttttagcagatctgaatattgaaagctgggttcaaatgtaggttgtcatttacctgccatcctcctagaagtcactttacttctctgaccct

SEQ ID NO: 16346 - DNA, 201 bp, Homo sapiens
ttgataaaagccattctaaatggggtaagatgatatctcactgtggttttgattttcatttccctgatggttattgatattgagaatttttcatatacctkttgacgactaatatgtcttttttgagaaatgtctactcagatctttagctcatttttaaattagattatttgtttcttcttagttgtttgagcaccttct

SEQ ID NO: 16347 - DNA, 201 bp, Homo sapiens
actgtcataggtggtcagagaggaaaggacattgcaggcagcacagagagctaggataatttccttttttatatttttatttttattgatatataatagawgtgcatacttttggagtacctgcaataatttgatacactgatatagtcacatcagggttcattgggatatctaccaccttatgtatttatcttttcttta

SEQ ID NO: 16348 - DNA, 201 bp, Homo sapiens
accatagacaggagatgacctgctaagtgcttgagctaagcattctgtcagtgggggaggctgtagtggataattgtaatgccagtggtaggaggagcagrcttgaaactgaggcagtctggttaaaaaatgatgcagacctttactagagcaactgtaaaagaggcccagagtttgagagatttgggatgtttaagaatt

SEQ ID NO: 16349 - DNA, 201 bp, Homo sapiens
tttcttagccgtccttttctatagtgctcattatttcctgagatagccagaaagggaaaattaagagaacataggccataacatttgaaattcttaaaaartaaaaactgattcttatttgtaggccatgatttaatacatgtggaattttcttataaagtcccctttatactacattgacctaactgctgttaaattgtt

SEQ ID NO: 16350 - DNA, 201 bp, Homo sapiens
ctgttttatgtttataattaatagaactttaatcataatatgtgttctgtgaatcccagagaatattttgctacaatctttgcatggaatcctgtgttttsctctccctatggtagctgtgtggaacttcagttgacctctgtggtagtgtcatgctagatcagaagtaatacgtccaaagtgatatgaaccactgtggtg

SEQ ID NO: 16351 - DNA, 201 bp, Homo sapiens
taagacattaataaaaataaatattcagagagtcttacatacttaagataccagttgatatacataatgttaatttaataatttggaataaaaactaacamccattcaatagaagaaagttggttaaatgagttttcagaacttcataaaatggagaactctgcagccatttaaatattttagaagaaaaatggaatgaaa

SEQ ID NO: 16352 - DNA, 201 bp, Homo sapiens
tttacatttgtcttcaatccatctcgagctgatttttgtatatcatataaggaaggggttcaccttcagtcctgcatatggctagccagttatcccagcaycatttatcaaatgtttagctgccacttacaagtgagaacgtgttatttgcttttcctttcctgtgttaattcacgtatgataatggcctgcagctccatc

SEQ ID NO: 16353 - DNA, 201 bp, Homo sapiens
ctttaaattttactgcttaatgaaattatagattttttttttaattatagggcaagttaagtgaagataaatagaggggaatttgaagaggaggggatagwttgagggagtttagaaaatggtattgcttttgattctgggatatattgtttatcggggtccatgagtagtgctgaatgttctattctgggcttaaaattt

SEQ ID NO: 16354 - DNA, 201 bp, Homo sapiens
attctgggcttaaaatttattttcctgcatttgctacatccatctcctcaaaaattctgatataggcaggtagaaaccaagaactgaggaaaacacaggcrgttcataaatgggtcaacttcatttctagcaatatggcaactagagacaaagcctggaactgcagcacaatgcaaacttgggtatatccccgattccagg

SEQ ID NO: 16355 - DNA, 201 bp, Homo sapiens
cccattaatagcatggaatgcatatatcagatatttggacatgagacaaactatctgtactcctattcgtaggaatttttaaagtaaccctctctatagamtgtactttatttcttatttttaacattaatatacctgctttgtctttgttcattttctatttgaccattagcagctacaagttttctttctttgtttgaa

SEQ ID NO: 16356 - DNA, 201 bp, Homo sapiens; identical to SEQ ID NO: 2551

SEQ ID NO: 16357 - DNA, 201 bp, Homo sapiens
aaagcagagagaaaaatatgctttcattgtctaaaaactaaaaattagctcaaaaaggacagtagtagtttttttttttattttttatagttttagagatkgggtcttgctctgtcacccaggatggagtgcagcgatgccatcataacccattgcagccttgaactcctgggctgaagtgatcctccaaagtgctgggat

SEQ ID NO: 16358 - DNA, 201 bp, Homo sapiens
attggtattaaaatacatgcatagaaatgagatatcagaatacatatataaatataatatcctgggaatatatagtactagttgggtttgcatgttaccaygtgagttatctgatattttttacatgttctgattattttctgttctataacaaaagcatggaaaatgctgagttacttttcaaagtgtaggaatccactg

SEQ ID NO: 16359 - DNA, 201 bp, Homo sapiens
tatagtattttttttaatggtctgggtgcacatctactttctgcaatctttcataagctccttaataactggagcttcatcttttcatatttatacccatrgtatctggaacatagcaggtgatcaggaaatatatattgaactgaattggaagcgcaactttataaaagggaacactggtttgtggtgtgaaaattcttt

SEQ ID NO: 16360 - DNA, 201 bp, Homo sapiens
ctaatggctttcatgatcttttgcttatctttaccaataaacatagtcaactgtgatagttgagaggttttttttttggtgaaattattagtgtttgttaytgcaataaagaagcaaagaaaaactcccaatattgaaaacatatattgtggggtttattcaaatccaagaaagagtgaactgtaggtttgtgttgtagct

SEQ ID NO: 16361 - DNA, 201 bp, Homo sapiens
tttgattttcccaaaggaaaaggtggacattgaattattttggataatgtgaaaaagagtgaaacagagaatagctcatttcggagctgagttcagaaaayaggcaattgtagaaaaggtgaatcctattagacgactgagatcatagcacattcctctcagacattttaaaaggaccctctgtgccattctctgtgctag

SEQ ID NO: 16362 - DNA, 201 bp, Homo sapiens
attagagcagaactaaaggaaatagagacacacaaaacccttcaaaaaatcagtgagtccaggagctggttttctgaaaagatcaacaaaatagatagacygctagcaagactaataaagaagaaaagagaggagaatcaaatagatgcaataaaaatgataaaggggatatcaccatcgatcccacagaaatacaaacta

SEQ ID NO: 16363 - DNA, 201 bp, Homo sapiens
tatccatgagcatggaatgttcttccatttgtttgtgtcctctttgattttgttgagcagtggtttgtagttctccttgaagacatccttcacatcccttktaagttggattcctaggtattttattctctttgtagcaattgtgaatgggcgttcactcatgatttggctctctgtttgtctgtaattggtgtataggaa

SEQ ID NO: 16364 - DNA, 201 bp, Homo sapiens
gtctgggacatgtagtgataattctttgctgttatatcgtgctttacaagtagtttccaaagcatttttggataatgcccaatctgattcttaaagagtcyggtgaggtagctaagaaggtattattccttttaaaaaatgagaaaatagtagagagattaagtattttttcatttccttagcaaatgacagaagctgagc

SEQ ID NO: 16365 - DNA, 201 bp, Homo sapiens
aattaccagaggaaattttattcattctgcaaatatttatcgtgcacttgccttgttgccagacactgttggaagccctgggcaaataacaatgagggagmcattgcaattgaatttaagtattattatttctaaatataataatattctgttaatatataatggattaagtttcaggactgaactcttgatatttctatt

SEQ ID NO: 16366 - DNA, 201 bp, Homo sapiens
tagaataatataggtaaatcctgaagtttgattttgcctatggttcaaattttgctgcttatccattattaaatctgtagtactcctttttgataagtcayggagaataaaagaaaataactcctgcagcatccatgacaatgcatgaagaacagcaagccttgtgtatctccacaggatggcttcttcccagtgtcttta

SEQ ID NO: 16367 - DNA, 201 bp, Homo sapiens
tcaaggtgcatctaaaataaatcccttttcctaatctcctattatttttcctctttagaattccatagcatatttcttggacagctgtgtagcctttaaamaattgtggtaaaatatatatagcattggccgggtgtggtggctcacacatgtaatcccagcactttgggaggccgaggcgggcagatcacctgaggtcag

SEQ ID NO: 16368 - DNA, 201 bp, Homo sapiens
ctggcatgatttcatagctcacaactcccacaaagggaaactattgcttagacagtttgcacgttaacaggccaccaagtaactgtactagatacgtgatstttttgctttatatcttaatattccttcattatgttgactttaagactggaggtagtttgagtcacccctaaataacatccttgtaacattgttagtgca

SEQ ID NO: 16369 - DNA, 201 bp, Homo sapiens
taggaatgagatttgggactgcaaactggggaactatcctaaaatctgtatgcagaacaagagatagatgtcagggtccctgccttttcccatggtagtcyggacaaattgccctttcctgcagtggcaggagacactggagttagaaggtatattatgtggaaaaggtgaaccatgtagggcctagatttggaaagatca

SEQ ID NO: 16370 - DNA, 201 bp, Homo sapiens
tcaaagaaatgatacagaaatttctcagaaccgaaggacatgtggctccaaattgaagatacttctgaaaggcaaggacaatataaaaaacacattatcaygaaattttgcagtatatagagaatacagaaagaatttgaaggtttctagggagaaaaaaatcaggcaacatacaaagaattagaaatggtattgaatgga

SEQ ID NO: 16371 - DNA, 201 bp, Homo sapiens
gtacagttaaattattattgactatagtctgcctgttgtacaaatactaggtcttattctttttaactttttttttttttttaaactgggccccatctctrggttgctttgagctagctgtcttctggctaacaaaatagttgagtgctactttctttcaccaaaggcagcgacatgcaccactttcattagcaggttaat

SEQ ID NO: 16372 - DNA, 201 bp, Homo sapiens
atttatttatgttttatatatatcttatacacaaagcctgaaggtaattttatgtaatattttaaattttgtgcatgaagcaaagtttcgactgcattttkactataatctgcattttagtggaaacatgctgactctcagaaagtttcagattttggaggtttctgaatttcagattttaagattagagatgctcaacgt

SEQ ID NO: 16373 - DNA, 201 bp, Homo sapiens
aataccacagagattggttaacttataaagaagatatatttatttgtctcatggttctaaaagttgggcagtccaaaatcgaggggctgcatctggtgagrgccttctcattgcataataacatggcaggagatatcacaaagcgaggaagcagtgggagagacagagagagagtagtggatgaactcattctttttatca

SEQ ID NO: 16374 - DNA, 201 bp, Homo sapiens
gctcactgaaaagttatttaaagataatcatattctaattttgcaacaaaatcctgaaaattctaatttataaatctctaagttttatattgctcgaatcrtaatcttcattgtaaattgtttgcaggtttagatagagttttggtttgtgtttaaatgatacagcagattttaaatatacctttctttcctctttttttc

SEQ ID NO: 16375 - DNA, 201 bp, Homo sapiens
gtgcagatttgcagagcacagaaattaaggtatttactagagttgggggtaaagaaggataaaacatttaattcattgaaattaatttcactgtgaacatwtgactcaaagaaggcagactaaaggtgtctggttgtgggaattaacagaattcgagttagtctatccatttatgtttccttgttagatttttctcttccc

SEQ ID NO: 16376 - DNA, 201 bp, Homo sapiens
taacaaacattagcaaaggatgtaattatgaaaagaaaaacaaggagctggaaaaaaaatctcaatatcagaaaagtgcttttatcaagtttagtaaatarctataaaaattgctgaagaggcagctgaactaatctgaagctacccctccattttgtttctgttcatttgttgagcaaatttatattgagtccttacaat

SEQ ID NO: 16377 - DNA, 201 bp, Homo sapiens
taagtttcttataactttggtcagaagaacactgatatagtttggctgtgtccccacccaaatctcatcttgaattcccacatgttgtgggagtgacctgktgggaggtaattgaatcatgagggcaggtctttcctgtgctgttctcatgtgagtgaataagtctcacgagatctgatggttttataaaggagagtttcc

SEQ ID NO: 16378 - DNA, 201 bp, Homo sapiens
tgactggtttggtgctacttaccttcacatgccaggggtctttctttacagaaccgatgtgttgatggtgaatcatgatgcactgttcttgcacagaggtrgccctgacatttatttcatgaaagagttttcctattttgggatcttgtggggatattcatgaacataatagcctacccaggaaaaaagttagatatggtg

SEQ ID NO: 16379 - DNA, 201 bp, Homo sapiens
gttctcatctcttgcgtgggttcttgcagcagtggcctctgctctggcccatgcaggactctaccagtagattttgattatttccttctcttcagaaaccrtgatgactttctgcacccagcttgatcaggcctgtgcacacctcagtttgatatttaaatttttggacaatctgatcatcaccaacatttctagccttag

SEQ ID NO: 16380 - DNA, 201 bp, Homo sapiens
taagatgttaatgttggaaaaaatatttgaaggtctttacttactttgccaaatacctttttattgtttttgcagttatttctatagtatttgttaagtgygctgtacattaaggaaataatcatacaccatttatggtgtttccaactttatgaacattttagtaagagatattttagagtgtctacattcagaggctta

SEQ ID NO: 16381 - DNA, 201 bp, Homo sapiens
gtttcaagcgaatacaatgtggaaatagattagaattaactgagatcatggtaattttttgacattttattttacataaatttgtacccaaatgctacagrctcaacttactagtaaagttttcttaagtaattaacactattatgtaatgggccttcccactctagtaaacagtactagtggctttattacctgttgaaa

SEQ ID NO: 16382 - DNA, 201 bp, Homo sapiens
ctgattaaatttaatgtatttaggtcaaaaggaaaaaatgtatcataatcagacatagtcctcagcaaaggctgaaaagggcaaaagcaagatgaagggaraaaatgatgaatcaagctaatttccataatcctgttttattagtactggcccatgggtggtacagcacacacaaaccacaaatagtgtcaaattcctcag

SEQ ID NO: 16383 - DNA, 201 bp, Homo sapiens
atgcctgtgccatgctgactgtactatccaaggacaaagaaatgggtgctgatacagtaatgctcttttctttctggaaatgtgatcttccttgttgaacrtgttaaatattttattcattctgtgttcttcttttcattgggagttagtgttgatttctcagactcttaggttgtgtctaattatagtgctgattccacc

SEQ ID NO: 16384 - DNA, 201 bp, Homo sapiens
atttctaagtcaaaagaagatgtcaaactgaaattagaggtgcctatttatttttagtttatgacataaagcaaaataaacctaaaagcaatgtattcctstttatgatcagtgaagcagtacatttcccattattttaaatataatttcatgtcaattttataaaatatttaaacagctctataaaatagtaatatggta

SEQ ID NO: 16385 - DNA, 201 bp, Homo sapiens
ttttttgcccattgtttctctgccaggttttggtattaggatgatgctggctttgtagagtcagttagggaggagtccttcctctttgattttttgggaayagcttcagcaggactggtaccagtttttctttgtacatcaggaagaatttggctgtgaatccacctgtttttttttgttggtaggtttcttattactgat

SEQ ID NO: 16386 - DNA, 201 bp, Homo sapiens
cttatgagaaagctgaagttcagagagattatgaataacttgcgtagatagtaagaagtgcaggacgagtgagatacgttagataatgtatatgtagattwaaaatgtttactagttagctgggcagggtggctcatgcctgtagttctagctacctgagaagttgaggccaaggagtatgcacttgagcccgagagtttg

SEQ ID NO: 16387 - DNA, 201 bp, Homo sapiens
tgtcctctctgcatgtcctttagggtcatcatttactgtgatattagcatcagtatgaaaataatttgaagcttcatattgtgcagtcctaaactgatacyacatgtagcatacttattttgtaattcaggggatatttgaaggtatgatttcttagaatgaggatgatgatgccccttctgttgggacccactgatacac

SEQ ID NO: 16388 - DNA, 201 bp, Homo sapiens
gaccagaacagttgggaaagtttgagaggtggcacgtaggccgatataaacagagtgcatgatcacaacagtatataagtctagaaacctaggttaagtcstgtttttttgtacatcatgtttttttttttgttttgttttttgttttttgttttttttttcctgaagaggagttcgaggacttcatgctttcaaagaact

SEQ ID NO: 16389 - DNA, 201 bp, Homo sapiens
tggtaaattactgtatttttgaacgaatgacttaaaaaattacccattagaaatgagttgtggcctggacaataatcaaaacagaaatattggcttttaawttgctgagaatagggaggttttggtttagtgaactgatgacaagattacagctaaggaacaacccttctccatttatgtcctctctgcatgtcctttagg

SEQ ID NO: 16390 - DNA, 201 bp, Homo sapiens
ttgttgtatcagtcactgtattatccatgtattttgaattttattaaatttcaggtagagatatatagccagctcttaaatttaacagcgtgtggcttatwtgcctgtttaatatcccttttccttttctttgttcagtgtagcactgaggtcaggggagaaggggcaggtgattttcaaatcagaagcccttcactgttt

SEQ ID NO: 16391 - DNA, 201 bp, Homo sapiens
taacataagaaatataagctacaaccttaattccaagggccttaaaatgcagcagaggagataagacctactaattatagtaatattaacaatgtaacttyctgtttgagacccatgatccagagctctctacaatctgtagaagtaagaaactggttgaaatagttatccttctaatgaactgcagtaattgatgacaca

SEQ ID NO: 16392 - DNA, 201 bp, Homo sapiens
tagcccctctactttctgtttgcttctgttttcatggaaatttgtgcaagtgaagcaattatttaaatcatcacattgtctgctcaatgttggactttgtrgtagatgctgggtattcaaatgtgaatgaaactcaatccctgaccctgtgttgcttttagtctatacagtacgggttttacttcatattttcccttataa

SEQ ID NO: 16393 - DNA, 201 bp, Homo sapiens
tggttgaaatagttatccttctaatgaactgcagtaattgatgacacagctagcatgtcaggatgtgtccccaattcattttgactgatagctgtagacaracatactcattaagtcacggatcattagagttaatggtgtttttttggagctcctcataatatatcattccatgtgccagaaaaactaagtgtgggcaaa

SEQ ID NO: 16394 - DNA, 201 bp, Homo sapiens
cattagagttaatggtgtttttttggagctcctcataatatatcattccatgtgccagaaaaactaagtgtgggcaaagaagaaacaaacttgtgagcaamagtgtattttcttaagcacaactccgtctatgaactggaaaggtccttgtgctgggatgtgcaattgtgtcaggattttggacttatgaggttgctcact

SEQ ID NO: 16395 - DNA, 201 bp, Homo sapiens
cactcacaatagagaggggtggattggatgggacaaaactaggcgtgagcaggactggtactgaagtcattcaacagaagataaggccagagaaaggaggygaatagagggatagagaggaacaaaaaagattaaagtgataattatgagttgggatggctgggactttgcaaccttttagatacagagaaagagtggaaa

SEQ ID NO: 16396 - DNA, 201 bp, Homo sapiens
atacagcacaaatcatattggagtagatattacatatgataataattaaaagacccacaagacagagagagagtacacccaattgtgattgtaattgttaygaaaggcctaggattgtagttcttaaacaggaagatgtattttgctggaggctggacaaagcacatcatagttgagggaactgaataaaccatagttgag

SEQ ID NO: 16397 - DNA, 201 bp, Homo sapiens
ttcttttttcttttttttttttttttgagacggagtctcactctgtcacccaggctggagtgcagtgacaccatctcagctcactgcaagctccgcctccygggttcactccattctcctgcctcagccttctgagtagctgggactacaggcacctgccaccatgaccggctaattttgtttttgtattttcagtagaga

SEQ ID NO: 16398 - DNA, 201 bp, Homo sapiens; identical to SEQ ID NO: 2540

SEQ ID NO: 16399 - DNA, 201 bp, Homo sapiens
cctagatattgttagacatggtgactgatctgaccattttggcagcagacaacttacatatttagtgagggttaagtgcgcagcctgattgttgctcgttsactcatgggtttgtttttttgtttttgttttttctcctcttcctaggcccttcccaacagaagaaagcattaatgatgaagacatctacaaaggccttcc

SEQ ID NO: 16400 - DNA, 201 bp, Homo sapiens
ggaccagaggaggttcttcataaaatgaaaacttggagggaggtggcaagtggatgcacaaataatgaatgacagacacagctgagacatgataaaagcaygcacaggggctctccacatctctgcaagacgtaccagcttgagctttcacctgcagaacttccttggatggtaatgaggctgctccacagtgttatagtt

SEQ ID NO: 16401 - DNA, 201 bp, Homo sapiens
ttgtggttcctatgcaacgtgttttaaagtaccaccttctcctccaggtatgtaacttaaaacagtttatttattgtccatttattcactcaacaaaataytaatgaagcatcaactacattgcagatattccatgtgttgggcccaatccccttaaaattttgaattattattatagttaagtgggaaataacagaacag

SEQ ID NO: 16402 - DNA, 201 bp, Homo sapiens
gcccgcctcggcctcccaaagtgctgggattacaggcgtgagccaccgcgcccggccaagaaaataattttcatacacaaaatagttctcttttattcatrtttagagttaaagtactacaagatttgtttttttaaattgaagatactttctgttatttacagagaaggattgttaaggaaacaaacgcactcatttatt

SEQ ID NO: 16403 - DNA, 201 bp, Homo sapiens
aaaccagtgttaattttctctttcattttttttaagttacctttattaaggtaatgttttttatgtttctgagttctgtttctgggacattgattcttttytttaattaattttctttctgttcttattaagataccacatggtttatggtgatttcataagatagtttaactgttaagaaattgtttttacatatttatg

SEQ ID NO: 16404 - DNA, 201 bp, Homo sapiens
aatgatgaactcctatgcattttatctagcttttcaactattaagtgaagcttggtttaagcaaatctttagatggtagcattgtgccagtactgttcccrttttatcacatgctatacgttagtctagttcagcagagcattatgctacattcccttctcagtgagttatagatcttgaagttttcacacactatgttct

SEQ ID NO: 16405 - DNA, 201 bp, Homo sapiens
acagcatttgccagagtttccctaaatattcttaatatcgttgtgttgttctatgtttaatatttaatatgccaagggttctcagggaacatatggtcacmgttttttttcccccaatggtgtctgtaaagaaacaggataaacatttcaccatagcatcaactttccaaatagatatgaaggcactgtttttagctactg

SEQ ID NO: 16406 - DNA, 201 bp, Homo sapiens
tttctggtagcgtagcagaaagctggttcatcacttctgagttagttcaatggtagagcaggctgacaccagccactggctctagaagcacttctttctarcaggccacttgtgtgaccagggagcttctgctattataagtttgcataaatatcctgtcaatacatagagcaggatgctgaaactgtaactacagtgtgt

SEQ ID NO: 16407 - DNA, 201 bp, Homo sapiens
caaactgactctcctatgtagttagcataggatattaccagcaccctagaatctcactttggtccctccctcaggcctcaaaggtacttctatcttgaccktcaacgctaagattagtttttctgatttcttttttttaagtgtacgtaaatagaatcacacataatgcactcttttgtgtctggcatcttgtgttcaata

SEQ ID NO: 16408 - DNA, 201 bp, Homo sapiens
aaggtcgcagtattggtgtaatattatctaagtggatgctaatatgcataaaagagttctctttcaagaagcttccagaacaacatgatgcaggtaggttrtctataatgttaggcagtgaatgaagagtccgggagatgataaccacctcaacgttcccatttaaatgtcactgttactgggccctttttaattctattc

SEQ ID NO: 16409 - DNA, 201 bp, Homo sapiens
gccccttgttgattcttgtaacaattttttacattagtttttaaaagatgcaagagatacatctctgtttatatatacgtatgttatatatgtaacatatrtaacatatatatcatatatgttatatatttatatgtgacatatctgtttatatatacatatatggtatatatgtaacattttttctttgatttattttta

SEQ ID NO: 16410 - DNA, 201 bp, Homo sapiens
gtccaaaatcttagaagtctacctgtgttctattgtactgtggctgagctggcatacaaaccacaagacacagttcttcctactcttccctcccctttccrcaggcagaggagccttaccccatggccagcatcacaggcccacagggagtactacgggactaccaccaatgttttcttaagggccaagggctcttcagac

SEQ ID NO: 16411 - DNA, 201 bp, Homo sapiens
ttgaatgcagttgaattttttaaaagctattttaaggagttaactatttgaatcaatatatagtttttaaatatcatgcagttctgaaaaactaccttcagattattttgcagtgttggcttttggataactgcagtagtgacagaaatacaatagatatttgttgtccaagtattatttaaaaatgaggcagcatacact

SEQ ID NO: 16412 - DNA, 201 bp, Homo sapiens
ggaaacatggagagaaaggacaaccaagtcatccactgggcacttctggattgttctgacatcctaattatgtccctaggctgcaagctcttccctccatkcctgcttcctcttccatttctgcccctttcttatctacagacctgtttctacagggaacagatatttcagtctttgggaatttatccctattccctagcc

SEQ ID NO: 16413 - DNA, 201 bp, Homo sapiens
gttcagcagacttagttaaatagtgtcttcagcatgtgtttctctccctccaattcctttccttaccatgggatcagtttccttgtgatattctcaactcygaaagtgagacccatctaggagccatattccacattggtgcaagtttaagtcttctaaaacatacaacacctttaaagaaatgccatcaccaatgataga

SEQ ID NO: 16414 - DNA, 201 bp, Homo sapiens
gggaatgttggatttgaggggactttgaaataatgaggtagaaccatttagttggacggatgagtccgggactcgtgtgaattttgggttgagcacatacrtttcacagtaattggcccatgaggtgatagttgacattatgacagtggttgtgatagaatttgtagagtatgtaaaatcaggggaaaaaagaggactagg

SEQ ID NO: 16415 - DNA, 201 bp, Homo sapiens
cttctcaccaagatatggtagaacctgattctttccagattttgtattgagtaacaacgtgggttttggcttacctacatgtagactggtttttgttgccraattttttttttctatcattaaaggtattctcttgtttctttcacacacacacacacacacacacacacacacacagtcataagactataatttaggatt

SEQ ID NO: 16416 - DNA, 201 bp, Homo sapiens
agaaccatttagttggacggatgagtccgggactcgtgtgaattttgggttgagcacatacatttcacagtaattggcccatgaggtgatagttgacattrtgacagtggttgtgatagaatttgtagagtatgtaaaatcaggggaaaaaagaggactagggtgaaaacttaaggaacaataactttctaagaagcagat

SEQ ID NO: 16417 - DNA, 201 bp, Homo sapiens
cactccagcctgggcagcagagtgagatgccgtcccaaaaagaaaaaaaaaaaaaaagattaaattactgacacacatcatccctaattaagaatttgtgsatcaaatgttttttggccaaccatgactgagtggagtactgtgggggcattgcaaaagtgcttatataatataagcaaagaacattggtggtagccgaga

SEQ ID NO: 16418 - DNA, 201 bp, Homo sapiens
ttatggaatctttcataacaatagggatcaatgtcagtgtaatggtggtggatagaattcagattcatctttgaaaagaaaatatctcatattgtgtctcrtgattttttggtgtctagttggtcttcttacagtttgaaatttttgatggaaatggagcccagacatattagatttatcacattatagagagaaaaccaa

SEQ ID NO: 16419 - DNA, 201 bp, Homo sapiens
ggcttctaagagcagttaaaccaatcttctcacctacaatggacataaaaccccagtttaattggggtgttatgaaaacaaaatactctgtttgtagaatyctttgaagtgtcagatacaaagtcatgttgctgtgttggttgcttttcttttttaggtgggctggtttccatccacatatgtggaagaggatgaataaat

SEQ ID NO: 16420 - DNA, 201 bp, Homo sapiens
gaggattacaaggggagtcctagtttagataagttggttggaaaaagtccttttaagtcatttgaactgagacctagcagataagaagcagccagccacaygaagatctaggggaaagtgacccaggcagaagccgtagcaggtgaaatgctcagagttgggcaagaaccaggtgtattcaagaagctgaaaggtaagagt

SEQ ID NO: 16421 - DNA, 201 bp, Homo sapiens
gctgaattgggattttattgtgactgcagtgggaagctattaaaaggtttctatcagggagtattacaacagactgattgacatttcaagaagaccctgtragcaggcagcccagccagcaagctgttgaagtggtttcaagagaggatgcagccctggattaatctgtgggcagtgcaaatagagatgagtgaatttaag

SEQ ID NO: 16422 - DNA, 201 bp, Homo sapiens
ataatgagacccttcgtgaaattaaacagtttcagctatctatagagaatttggtatgtaattatctttccatccagcttcccctcacccccacatcaacsacattctaggagttgttgttgaagaaaacatagtttaccttcaagtttctactgttggaggttgttgccagtccctttgtttggcagtgttcatgtgggt

SEQ ID NO: 16423 - DNA, 201 bp, Homo sapiens
aattgggcagcccccagaaccagaataggtccacagcgattctggggctgccacatgggaggataacatttatggtcagaaaagggaaagtaacagaaaakggaagtgaggtacagaatcagctggattggatatagctcagcgtttgccttatttgaacacagtttgaacagctggccacctgagattggctgaaactct

SEQ ID NO: 16424 - DNA, 201 bp, Homo sapiens
taaagatgctccatgacttagatggggttatgtcctgagaaacccataagttaaaagcattgtaagtcaagactgggtgttttgtagacatgatgggatgsaaaaccaaaaaacactatatccaaaaaatgctggcatcacagttacattgtagagtattggttgtttaccctcatgatcacttggctgactgggaggttt

SEQ ID NO: 16425 - DNA, 201 bp, Homo sapiens
ttattgcaaccacagctgcagtagacagttccatacaagcttccaagaacttcatgggtacatctggagagcacctcacctggggccacattctctacctktcctgtcttactcttcctcctctgggcttctttctggtgcatgggggtggggggagatattaagtattccccaagagcaatggtcagtttagtaattcgt

SEQ ID NO: 16426 - DNA, 201 bp, Homo sapiens
tttaacctctcacagcctcagtttcctcatctgtaaaataggaatgatatttatttcaaattctaggtaatatgtatcagcagagagctagccaaatagtrcaatagcagctacagctatgtgatattgaacaataggtgatacctattattattgctattattattaataataattgcatttgggattctagtatactta

SEQ ID NO: 16427 - DNA, 201 bp, Homo sapiens; identical to SEQ ID NO: 2541

SEQ ID NO: 16428 - DNA, 201 bp, Homo sapiens; identical to SEQ ID NO: 2544

SEQ ID NO: 16429 - DNA, 201 bp, Homo sapiens
ttattctgttttaactcgcttatttgaatcttggctaaaatgcttcgtgtatttaaggaatgctttaagggcttgatttctttaagtggcttttagttccrctgaggaggaagctcaacaaagaggtagaaaataaatcaaccctgtttcaaaaggaatggcattctgagacgtaataaccaagaacaggtcattataggt

SEQ ID NO: 16430 - DNA, 201 bp, Homo sapiens
agggtaaaaatcatgagcccttttctcagagcaggtttgattgaggaagacccaggatacctcacagagagtgatggagatggggaaggaaaaagagagakaggggtttacagaaaacaaacgctgcctagggaatgtgactgagaacataagtgatctgtgcaataacgcacaacccagaaaccctctgagcctggagaa

SEQ ID NO: 16431 - DNA, 201 bp, Homo sapiens
ctgattagggggatctttttcacaggagacctgttttctcaaacctccaaccattgatgtatatgttaccctcttcctggttttccctttcacccccgttstgtcagctaaatccttccttatcatcaaggcacaatactgggttgccttttctgacgtcttctcagaaccaaaaaggcttctatcataacacccatcata

SEQ ID NO: 16432 - DNA, 201 bp, Homo sapiens
gagaaacagttctagtggacaaaaagcacagatttccaaagtcttggttaaaaacaaagacttgagtggcatgtagattttattccaatctcagtcacttrtttgtgaaatgactttgtacggattacttaacccctctcaatctattttctcatctgtaaaatgggataaaagtagctacctcatgatactggtcaagct

SEQ ID NO: 16433 - DNA, 201 bp, Homo sapiens
actcctaggttgtgagttccatgaaattagggaccatttgtttgtcagtttcctgttcttggctcagtacctggcacagggtgactgctcccatgaatggycattgagtgattatttaatgaatccttcacattggccttaatgttggttagatgagaatgctagatattttttaatcctaggatgaaaaaattataatat

SEQ ID NO: 16434 - DNA, 201 bp, Homo sapiens
tttcctccttattgggtctaaatgtggaatcatgtactggttgatcctttgaagccatgtgtttttttaggcatgtttacagtggccccttttatgttaayttgctgattttcatactcaaagaagacatgtactttatggcttgaatcctaaaatatgtgactcccccactgggaatgtgttttaattgtttttgagaac

SEQ ID NO: 16435 - DNA, 201 bp, Homo sapiens
cattactcagttcctaggagagcagttttgctattttaagccaggtaacaaaaatgtgtcccaaattcccaacggtatgagtattcatgtatgtttaggcrtcaccataagttattactcctaggttgtgagttccatgaaattagggaccatttgtttgtcagtttcctgttcttggctcagtacctggcacagggtgac

SEQ ID NO: 16436 - DNA, 201 bp, Homo sapiens
tcgctgattatcgttccatgtgtggagatagcacaatttgtttacccgttaacctgttgatggactttcaggttgccactagtttttggctattgcaaatraagcttctatgaacattcaaatataattctttgtatggacataatgcttttatttttcttagatactaatgccaagaggggaatatatagatcatatgta

SEQ ID NO: 16437 - DNA, 201 bp, Homo sapiens
aatcaggataataaacatatccaatatcatccctaaaagtttttgtgccccttggtaatccctccatcatgctccttcctgttgctttgttccgccttgcrcaacaaccctcagcaaccactgttctgctttcagactggagatgagtttgtatttttttagaatttgatgtgcatcacatagcatatattgttttttgta

SEQ ID NO: 16438 - DNA, 201 bp, Homo sapiens
aaaacttgtttggcttattttcaggtttaccaaagatgcaggtcattaggaactattctggaacaccacccccagctctgcatgaaggaccccctttacasctccaggccggggataccgttgaacttctgaaaggagatgcacacagtctgttttggcaggtactgttgttgcaggaaaggggtcctgatgcagacccca

SEQ ID NO: 16439 - DNA, 201 bp, Homo sapiens
tcaattctaaaacttgtttggcttattttcaggtttaccaaagatgcaggtcattaggaactattctggaacaccacccccagctctgcatgaaggacccyctttacagctccaggccggggataccgttgaacttctgaaaggagatgcacacagtctgttttggcaggtactgttgttgcaggaaaggggtcctgatgc

SEQ ID NO: 16440 - DNA, 201 bp, Homo sapiens
gcaaagatgcctcacaaatgcagttagatgtctttcaattatgtgttgtattagaaaggaaagtttaagaaagtcagcaatgcttttgatctctacttccygataggttaatatatgattttattaaatcattttattttgataattctaactgcagaaatgtccagaaaatgatatacgaagttgttgtctagcagaaat

SEQ ID NO: 16441 - DNA, 201 bp, Homo sapiens
gctgtgagaactttgattctgagaagttggacactatacagtagaagtacttttttttttgttttgtggtttccagaacccaggggtgtgcttggagagcrttatcgatgaaccagaagctctcaagtcacgtttttcagttcccagcagcacccaggctgtttgtcccctcttgcaaccagctcacagcatctgcttatt

SEQ ID NO: 16442 - DNA, 201 bp, Homo sapiens
agaatctcagagagaaccaggtgctgtgagaactttgattctgagaagttggacactatacagtagaagtacttttttttttgttttgtggtttccagaayccaggggtgtgcttggagagcattatcgatgaaccagaagctctcaagtcacgtttttcagttcccagcagcacccaggctgtttgtcccctcttgcaac

SEQ ID NO: 16443 - DNA, 201 bp, Homo sapiens
tactgggcaatgtgatacatacacagaaaggatgagcctcctcagtgatgaaatcagccagtgcccaagaggaaagtaataggcagaaaggatagagttgrtgaaaaaattgattcttttccattaaactgtacgtgatgtgttttttatgaagcaggcatcagctgaaggagaaatattttttcaactaaaaaagagatt

SEQ ID NO: 16444 - DNA, 201 bp, Homo sapiens
gacttttgacaggtatataatgggaaaaggaaaggaaatcaggaaaactaaggaaagttaatgaggggaagagagaaagtgagtgtagctgttcctttttrgccttttaatactgtgccttgtgacagctggtctcaagcacatggtttaatgctctgttctggagtcaggagtgcctacatttctctgggaagcaggaac

SEQ ID NO: 16445 - DNA, 201 bp, Homo sapiens
agcactgactgtcattaaaaaccaaaaatacttaagtgccattactaataatagcaggtaacattacttcaccacttaccgagtgactctcagaaagtgamtaaacctgtctatctgtctgttctttagcttcctcatctctaaaatagaccaaataaaagaacctacctcctagggttcttgtgagggctagctgaatta

SEQ ID NO: 16446 - DNA, 201 bp, Homo sapiens
ggacatttttaaacagaggttaaaaacctatcagaggcatattttctaaggggagaagaaaacctatattaaattaatactaaatgactgttcgaaatatraacatctgtaaatctaatttattctccgttcttgatctcatttgtgaagtgtgatgccttctgtggcagtagattgtgttaagaattttattgatgattg

SEQ ID NO: 16447 - DNA, 201 bp, Homo sapiens
ctttgtattgtcttccctgacttttctcccaggtgtggctgagcacatgctgctttgtgccacagtgtctggtagaatgcagcatttcttgctgttttgcrgttttttttccttatccgtctcccttccaggctttggcttgattgaggatgccataggctagttcctttatatatggcactagaaatggacacagggagt

SEQ ID NO: 16448 - DNA, 201 bp, Homo sapiens
tgacttagatatctgcctcctgcttccatgttctgtaagagcaaatattcttcaatgagtgctgctcctttagactgtctctcttggcctcctcttcagcygctggtgtctcacatgttaagcctatttattgcagtctttgagttaagttaatcaccagccctgaattacttgggtgtagtcagatgagcagaataatgt

SEQ ID NO: 16449 - DNA, 201 bp, Homo sapiens
cttattttatacctattgaaagagctctttagatggacagattttctcatatggtactcttgtgtatatgtatttgtatgtgaaaagatatatctatataygaagaatgagaacatatgggcacagggaggggaacatcacacaccggggcctgtcgggggttggagggcaaggggagggataacattaggagaaatacct

SEQ ID NO: 16450 - DNA, 201 bp, Homo sapiens
gttgggaattacgtgtcaacatatgtatttgggggtacataaacatttagtctatagcaatgggtttattagtagaaattatatatgagttttaaggagtragaatagtagttcagattattttttcccttgggttggtggatgagctgaatattcagacatcagtaagtatatgccaggaagaaggtaaagtatgttaat

SEQ ID NO: 16451 - DNA, 201 bp, Homo sapiens
atagatatagacacaaagttctgattgcataaatgcatgtatataaatgtacatataaaatttttaaatattatatactatttttgtgcagatttattacrtatagcagtgtcttaaaaacaattagtgaattgtttaataaacatataaaaagatctaggattacacaatacatacaagaaagcaaaacaaattgggaaa

SEQ ID NO: 16452 - DNA, 201 bp, Homo sapiens
aacgaaatttctgttattttttagtctgattagtttgtggattatttgctttttggtaattttatagcccctctactttctgtttgcttctgttttcatgraaatttgtgcaagtgaagcaattatttaaatcatcacattgtctgctcaatgttggactttgtggtagatgctgggtattcaaatgtgaatgaaactcaa

SEQ ID NO: 16453 - DNA, 201 bp, Homo sapiens
tggggaatttgccttagcagtctggatcccacaaacctttgccaggctttctgcctggacagtcctttcagaagctctggcaagctcgtctccctctaccragggggtaccttgaagagcactgttgatactttttttcttcttcttgcagtaatttcatatgggcagaattttgcaccgtttaatataccactttcttat

SEQ ID NO: 16454 - DNA, 201 bp, Homo sapiens
taagaaagaacaggcatggaagtggggagagccatacgtatttaaaagtgaggtaaattattttatacccccataaacatgcatggtgattgctacctctmggtaccccttcagagttgtctcaactctggaaattcctttgaggggtttggcagacttttctattatggtgggagctgcagttagctactctcacacatc

SEQ ID NO: 16455 - DNA, 201 bp, Homo sapiens
ttatgaaagactgtgttaaatggtgattcaaatgtgttggattttgcttctaaaggtatgtagagtttagtatgatttatttgccaaaattatggcctagraaatgtcgtgctattgatggaatccgcattgaacacaagaggaaattgctagggaaggatgcgtgtgaggaaaggaaatcctcaggctgatttattgttc

SEQ ID NO: 16456 - DNA, 201 bp, Homo sapiens
acttacaagagaagtgctgttgtatttatgtttgtaagaacatacgtggctgggtgcagtggctcacgcctgtaatcccagcactttgggaggtcaaggcsggcggatcacgaggtcaggagatggagaccatcctggctaacacggtgaaaccccatctctactaaaaatacaagcaaaaaaaaaatagctgggggtggt

SEQ ID NO: 16457 - DNA, 201 bp, Homo sapiens
gtcattatgttagtataattatttttcatccattatgcaatgccttctttccacagtttaattaccaaagattttttatgtatgtgatccttttgttgtgwgtaaaaggtattcacagttaaaggattccaaatacacgaacttgatgataaaccaaggggaacatgagaaatagagtagctttgctggaaaataatctgg

SEQ ID NO: 16458 - DNA, 201 bp, Homo sapiens
catgttttttggggactttgtgacaagtttcctctccggagaccaattatttgtctgcagaaaacgttcagttgttttctatttagcattgtgagatttgycctgtcattatgttagtataattatttttcatccattatgcaatgccttctttccacagtttaattaccaaagattttttatgtatgtgatccttttgtt

SEQ ID NO: 16459 - DNA, 201 bp, Homo sapiens
caaattttgtagaacagcaaatattgatgcctgatccttcctctgtaggcttcatctcagaggggcatctggctgtatgaggtatcagtcagcccctactrggagatgtctcccagttaggctacatgggggtcagggacccacttgaggaggcagtctgtccattctcagagctcaaacaccatgccgggagaaccactg

SEQ ID NO: 16460 - DNA, 201 bp, Homo sapiens
gcttactgaacagcctcagggtgcctggttaatgctcacatatccagcaccctccctgtgttcctttgtaaatctagtaagaaaaccagccagctagctgscacttaaaaatcactgttttctaagtaagtaggggagagcataaaccagacaactggtacccaccctccatcagagaaaatttcttaattctatatccat

SEQ ID NO: 16461 - DNA, 201 bp, Homo sapiens
tctttcatattatcagacatgagtctgtaactcattatgcttccaatttttgtgccttggctaccaacaaatctagagcaaaattttcctttcattcacartgactcttgttacagcttttctagtgcagctatccatcttgctcaacatagcttcaatgctgattttaatgatcctagcagtcttttacaaatccatgtt

SEQ ID NO: 16462 - DNA, 201 bp, Homo sapiens
ggtgattcctcagggatctagaactagaaataccatttgacccagcaatcccattactgggtatatacccaaaagattataaatcatgctgctataaaggyacatgcacacgtatgtttattgcggcattattcacaatagcaaagacttggaaccaacccaaatgtccaacaatgatagactggattaagaaaatgtggc

SEQ ID NO: 16463 - DNA, 201 bp, Homo sapiens
cctttgggaatcactttattaggtttacttcttttcatgtctctatcttcatcctagattgaaagaactgtaaggccagaggccatgtattttttgtcccrgtacaatgcttggtactcatcaggcatttaataaacacttattgaataaaagaatgtctgaagcagctgaataatagtataagacaactttcagattgta

SEQ ID NO: 16464 - DNA, 201 bp, Homo sapiens
accaaaattctatgccgtggttccttttactcctctctgaagaccagcagatcaatgaaaaagtcatgctctcttagaaagagccctataagctgtgatgkcaggggaatcccagcacctagcatcccaggctcaacctgattcttaggacctgattcttagattgtgaacttgtatcaggaaaggtccagatgttaattt

SEQ ID NO: 16465 - DNA, 201 bp, Homo sapiens
gttctgagacatgactgggaaaactgaaatgagccagctggccattggcggtccacacctctccatgaaaagtatctgcagagcgcctctgccggagcacrgaggactttctggcggaattcctgtagcttgtgtgaggatcaaacctaagcagagtttaatgaaattctactttggagtgatttgtttatcttctgtgag

SEQ ID NO: 16466 - DNA, 201 bp, Homo sapiens
atgctcacccaggagcattatgccttaggttgagcataatgtggagaatttgactcataggtttcacgataaattggaacagccaaactattgggaagggyggagtaaaggtggacttcaggaacaagtggaaccaggaattcaaatagcattctctctgtctgtcttttttctctacttttttctcagtaggtctgcttc

SEQ ID NO: 16467 - DNA, 201 bp, Homo sapiens
agactattaaaggaaccaggtcctttaatccctggtgattcctcttcatttagaacagatcttgtgttagtgagtacctttccctaaaatgggggtctgaytctttgctctatatctttgtcatgaaaatctgccaattccctgtccaggagccagtggatttgggacagaggaggaagactcaaccaacctccagtggat

SEQ ID NO: 16468 - DNA, 201 bp, Homo sapiens
tcttcagctcatcctgagactttgagatcaagtaaaactgactttcaccctaccctgcccccagccacctgtgtgcaggaaagttgctcagcctctcagarccttcatgttttgatctgtaaaatggccctgatgaggatccctactgcatggaattgtggtgaagagtgtgaattgaattctgagggaaaagcaaccagt

SEQ ID NO: 16469 - DNA, 201 bp, Homo sapiens
ctcatcttgttaaataatcacaaaattatgatggagcagtttatcctgttttagcaaatgagaaaattcaggaccagaaatgtaagtaacttgcctgaacsacacagctcatcacagaacagggattccgtacccatgccccttcagtgcaccatgtcgtaggacatccttttccattcttttctttagagagtttgttgt

SEQ ID NO: 16470 - DNA, 201 bp, Homo sapiens
tcctgcccaagggcttgtgcatatggtagttactcaataaatacttatgaaatggatgaatgactctgccttgtagatttgttctgagaagtaaatgtgaraaagtatatgaagagcctagtgatgtatctggtacattagagatgtgaaataaatgcctcttttgaccattttaattttttgtttctccaaatctgtaat

SEQ ID NO: 16471 - DNA, 201 bp, Homo sapiens
tttaaaggtttaaaaagtgatatattttcacttttttgaaaaagtgcaatttgaggcattcctgttctcatcaccaagatttaagagatattaacactttktcatatttgtgtcatatcatttttgaatttttttttttttttgagacagagtcttgttatgttgtgcaggctggtcttgaactcctggcccaaggcaatt

SEQ ID NO: 16472 - DNA, 201 bp, Homo sapiens
ctccttccctcttttccggaatttgcgtctgtgtgattcctaggtaatcattactgaaagcatgatcagcattttatggtttaaaaaaaaaaaactgcackgggtgcatttccactaaacgtatagagaatatatctgagggaacacagtagagctccatgtggatactgattgattagtattgggcccgtggagactgct

SEQ ID NO: 16473 - DNA, 201 bp, Homo sapiens
gagaagtgaagtaacttgtccaaagtcatccaagtactcaattttcaagtcattattcaagtatagattcatcaacttttaaagctcatgatcttttgttwatacatcacattgcctttctgttaggccagaggtcctcaacccctgggccacagacaagtaccaggtccatggcctgttaggaaccaggccacacagcag

SEQ ID NO: 16474 - DNA, 201 bp, Homo sapiens
tggtcagaaggaatggctcatgttttagcaacctgaacttctggaaggaggtagaagatgattaattggtgtgaaggtttctcaaaatcaagatcatacaracttcatggagttaccttttatcatgttggagtcaaataacacacttgtctattataagtaaggagtgatctgtggatttgagttgtttcttaagaatag

SEQ ID NO: 16475 - DNA, 201 bp, Homo sapiens
ttgtatttttccaatacttggtacagtgcaatgtaggttataatatacttagatgaggacactgccatctaagtagaagttcagacaatgaagtattatcyctttttttttcctgcagggtaagggagtaacattatgggagaaagttctgagaaattctgttgtggtcctttttcttccattattttattactatgtaag

SEQ ID NO: 16476 - DNA, 201 bp, Homo sapiens
gaagaggaggggatagattgagggagtttagaaaatggtattgcttttgattctgggatatattgtttatcggggtccatgagtagtgctgaatgttctaytctgggcttaaaatttattttcctgcatttgctacatccatctcctcaaaaattctgatataggcaggtagaaaccaagaactgaggaaaacacaggcgg

SEQ ID NO: 16477 - DNA, 201 bp, Homo sapiens
ccttttcttttcattccctttagtcccttgtctgcggtgactcaattcaagatcacatacactcattacactcatacacacactgcttaaaatctgaaatyatgtgctttatccagagctctggacttagttggttcttggatatattgagtcttctgggcctggctttgctacttgtctctgcacattccctcagtttca

SEQ ID NO: 16478 - DNA, 201 bp, Homo sapiens
tccaaattataaatcatcatgactcaccagattaatattgattaatattgtttcctttgcctggaatgccttttcttttcattccctttagtcccttgtcygcggtgactcaattcaagatcacatacactcattacactcatacacacactgcttaaaatctgaaattatgtgctttatccagagctctggacttagttg

SEQ ID NO: 16479 - DNA, 201 bp, Homo sapiens
atgtaattaaaatgtttcccctggcataatattagaaattactatattattttttgacatcatgacagtatctgtaactttgttcgtttccgtactgtatrtaaagaattttccataactgtttcaatcgtcagtttatgattaactcactctttggaaatgtttcctactgagctgtctgttggcacattgacagtgcag

SEQ ID NO: 16480 - DNA, 201 bp, Homo sapiens
ccttcaggttagatatgactctcactcttcagggttgttaaatactgaaaaaagctcctgaaagagggagatttcttttctaagactgctgaggtctggtsgggggagagggggggaatgggggacgttgagggtttatgttttgaaaaaccatttactttcttacttttgaaaaaagatgaatctctttctggctttctg

SEQ ID NO: 16481 - DNA, 201 bp, Homo sapiens
caaatcacatatctatttgagattgaagcagcagtttgaactcaggtctagctgattgtccactactgtaccatagtgcaaacattcacatagcacataaygtgtactttgcatatattgagggaatcagcgcatcaatcccaacatgtggatactattatttttcccatttataggtcctagcttgtgggtaatggaact

SEQ ID NO: 16482 - DNA, 201 bp, Homo sapiens
tggccatgaatcacaggtgaggtggacacttctctaagctgttggccctgaaaaacaccagagatatttctggttttatttttcttttatccttccgcctrttcctcctgcacctttaaaaaaatcttccttgatttttctttattttcaccctctcttttggggaaatgaaaaatgaaaatgaattggggaaatgaaaaa

SEQ ID NO: 16483 - DNA, 201 bp, Homo sapiens
ttgttaattctcaaaatgggcatttttggttaacaattcttgtatttttccaatacttggtacagtgcaatgtaggttataatatacttagatgaggacastgccatctaagtagaagttcagacaatgaagtattatctctttttttttcctgcagggtaagggagtaacattatgggagaaagttctgagaaattctgt

SEQ ID NO: 16484 - DNA, 201 bp, Homo sapiens
ccaagggcactgaaagccaatcagtttttcacaacaaagaaagagacaggaagtagtcaagccaaacacaaaatgttgaagatcttggtgcgtataagtgrcttgcaaagtgtggtgtttgagatcactctgaaggtcatgcaggagtcctagaaccatgcctaatgtatgcttagaggcatttagctttagaaagataat

SEQ ID NO: 16485 - DNA, 201 bp, Homo sapiens
ttcaggggaactacctaattagcttgcctgtggccatttctgaccatatttgctttttacctacccacagtaatacctggagttctcagaggtgctctggkcattattcataaaatctatgaaatgtgaaaagtaagtgagcatgttgatgtttgcccatgatgaaatctctcttggccggtggacctttttatttggttg

SEQ ID NO: 16486 - DNA, 201 bp, Homo sapiens
gtggacctctcttagttgggagcagtttcacctgtaaatgaataagtgactgtgaggttgtccattgtgaccagtattgctgcacctagacccatgttcarttgaagctgctgttctctcaaaaatgaaatcgtgaactgaggccttcattgcacattcaaagaaatacaaagagaaggaatggatctgtatttcaaatat

SEQ ID NO: 16487 - DNA, 201 bp, Homo sapiens
aggacaaagcaataccagtactattcctaaagttaatattcacctacatttcaaatattttacattgaaaaattgtagatgacaaaagcttataggataawgccttaaatttttagtattcccaattaatttataggaaggagacaatatatatttccaatattataatcccagggttgtagagattttgagactaaatct

SEQ ID NO: 16488 - DNA, 201 bp, Homo sapiens
atcaaaaccacaataagataccatctcacaccagttagaatggcagtcattaaaaagtcaggaaacaacaggtgctggagaggatgtggagaaataggaasacttttacactgttggtgggactgttaactagttcaaccattgtggaagtcagtgtggcgattcctcagggatctagaactagaaataccatttgaccca

SEQ ID NO: 16489 - DNA, 201 bp, Homo sapiens
agtgggtgaaggatatcaacagacacttctcaaaagaagacatttatgcagccaaaaaacacatgaaaaaatgctcatcatcactggccatcagagaaatrcaaatcaaaaccacaataagataccatctcacaccagttagaatggcagtcattaaaaagtcaggaaacaacaggtgctggagaggatgtggagaaatag

SEQ ID NO: 16490 - DNA, 201 bp, Homo sapiens
actaaagagcttctgcacagcaaaagaaaccaccatcagagtgaacagacaacctacagaatgggagaaaatttttgcaacctactcatctgacaaaggtstgatatccagaatctacaatgaactcaaacaaatttacaagataaaaacaaacaaccccatcaaaaagtgggtgaaggatatcaacagacacttctcaaa

SEQ ID NO: 16491 - DNA, 201 bp, Homo sapiens
aactaaagagcttctgcacagcaaaagaaaccaccatcagagtgaacagacaacctacagaatgggagaaaatttttgcaacctactcatctgacaaaggkgtgatatccagaatctacaatgaactcaaacaaatttacaagataaaaacaaacaaccccatcaaaaagtgggtgaaggatatcaacagacacttctcaa

SEQ ID NO: 16492 - DNA, 201 bp, Homo sapiens
atctctaatcttagtgtgccttctttttctacccttttctttattgtctaggacttggcacaatatgtgaatgaagtgaaaagagataatgagacccttcrtgaaattaaacagtttcagctatctatagagaatttggtatgtaattatctttccatccagcttcccctcacccccacatcaacgacattctaggagttg

SEQ ID NO: 16493 - DNA, 201 bp, Homo sapiens
aatggcaacaaaagccaaaattgacaaatgggatctaattaaactaaagagcttctgcacagcaaaagaaaccaccatcagagtgaacagacaacctacaraatgggagaaaatttttgcaacctactcatctgacaaaggtgtgatatccagaatctacaatgaactcaaacaaatttacaagataaaaacaaacaaccc

SEQ ID NO: 16494 - DNA, 201 bp, Homo sapiens
ttgtttcatggtaagtctcctggctttcctactcatttataaatttagtttcagatattgtcatagccaatatgagccctcaaaaccttatctgctattartatatccagaacattcagaaaggattactttggattattttctcatttacaatttgaaacaacaacagaaaaagtcagttgcttaggttcttaataactt

SEQ ID NO: 16495 - DNA, 201 bp, Homo sapiens
agaagaacctctctgaaatgagacaaacacatggaaattaaacaacatgctcctaaatgaccaaagggtcaatgaataaattaagaaagaaatttttaaarttcatgagacaaattaaagtggaaatatgacataccaaaatctgtgggatacagcaacagcagtactgagagggaagtttatagcagtaaatacctacat

SEQ ID NO: 16496 - DNA, 201 bp, Homo sapiens
gtgggatacagcaacagcagtactgagagggaagtttatagcagtaaatacctacatcaaaaaatataaagacttcaaatgaactaatgcacctcaaggarctagaaaagcaagaacaaactaaacccagccttaaaaatgaaaagttggttttctgaaaagataaacaatattgacaaacctttaaatagactaccaaaa

SEQ ID NO: 16497 - DNA, 201 bp, Homo sapiens
ccctggttctctctccggtcttaacccatggtcattttgtgatctagaaggcaccagccttctcgggcatcaggctgcctgccagcttggaaagctgtacmaaaggaaggggggataagaaggtggtttctaagattcctttaatctctggaaagctgtgatttaactgtcttgaggtccaaaaagtgatggaggataaaa

SEQ ID NO: 16498 - DNA, 201 bp, Homo sapiens
atatggggaagccactctacctggggtgggggaaggccctggttctctctccggtcttaacccatggtcattttgtgatctagaaggcaccagccttctcrggcatcaggctgcctgccagcttggaaagctgtacaaaaggaaggggggataagaaggtggtttctaagattcctttaatctctggaaagctgtgattta

SEQ ID NO: 16499 - DNA, 201 bp, Homo sapiens
catatggggaagccactctacctggggtgggggaaggccctggttctctctccggtcttaacccatggtcattttgtgatctagaaggcaccagccttctygggcatcaggctgcctgccagcttggaaagctgtacaaaaggaaggggggataagaaggtggtttctaagattcctttaatctctggaaagctgtgattt

SEQ ID NO: 16500 - DNA, 201 bp, Homo sapiens
agaaacaaccaaacaaatgcagaatttaggacattttgtaagacaaccagcctggactcttcaaaaagtcaatgtcattaaagaagaataaaggcaaaagkatttttagattaaaagatactgactaaaagataaaactgccaaatgcagtgggtaaaacatgactggatcctagtactaaaagtgggcaattgaggaaat

SEQ ID NO: 16501 - DNA, 201 bp, Homo sapiens
tctacattgtgtgaaggtctattagcactcaccgaccttctcatgaaatgtcatttctcatttgggactgaaataactcatctcacaataagctgtagagrtttttcctcttccattgcctcagttaacaccactagtccattattcctagcaactttggagaagtcggtgtttattttttcaaataaaaagggaagccat

SEQ ID NO: 16502 - DNA, 201 bp, Homo sapiens
ttagaaaatctacattgtgtgaaggtctattagcactcaccgaccttctcatgaaatgtcatttctcatttgggactgaaataactcatctcacaataagytgtagaggtttttcctcttccattgcctcagttaacaccactagtccattattcctagcaactttggagaagtcggtgtttattttttcaaataaaaagg

SEQ ID NO: 16503 - DNA, 201 bp, Homo sapiens
gatgatctgagacctttggagaggtatagaggaggagttatgatgagaagagaaggagaattcttcttgtaccttaatgtttgtaaatcggtttcatggtygtctcttctgtgcctttcgaaactgccaatcatcttattataatggccactcataatttgaattatgccagaccctcaaattcagggccgatctttcaat

SEQ ID NO: 16504 - DNA, 201 bp, Homo sapiens
acaaataaaaattattcttttattaaatttctaggagatgtaagatttagctcacctaattttaaaagagagatatagagaagatatggtgaaagggacaraaatagggaactccagtaagagagaagcttgatattattatattccttacacctcttcctccttaccagttaaaaaaaaggatgatctgagacctttgga

SEQ ID NO: 16505 - DNA, 201 bp, Homo sapiens
ctttctttcaccaaaggcagcgacatgcaccactttcattagcaggttaattaacttaggaaaatagatgatccaggctaactttgacctctgcacttccmaggtattcagttttttagtgcaaagactaaaaacacaaaaggaggagtaaagatgctgcttgtcttccttttgtatgtccagggactaatgcaggtgttg

SEQ ID NO: 16506 - DNA, 201 bp, Homo sapiens
atagccaatatgagccctcaaaaccttatctgctattaatatatccagaacattcagaaaggattactttggattattttctcatttacaatttgaaacarcaacagaaaaagtcagttgcttaggttcttaataactttttcttgtatattaaagacttttctttaccagctgcttggtaatttttgtttccacagtgct

SEQ ID NO: 16507 - DNA, 201 bp, Homo sapiens
agtgagccgagatcgcgccactgctgtccagcctgggcgacagagcgagactctgactcaaaaaaaaaaaaaaaaagctgacaagaaaactggtgttgaasccaattccatcagattccagaatctttgattttagtgttgtgctctatgacttccaatcttaaatacttagttaaaaagtcaagcagtaagatgttaatg

SEQ ID NO: 16508 - DNA, 201 bp, Homo sapiens
aactgcagaaatgtccagaaaatgatatacgaagttgttgtctagcagaaattaagcagacagaagaaaaatatacagaaactttggagtcaatagaaaargtaagtcatcaggtattatttttgatgcccaaatactgcctaatatagttaatatattagactcactgtttcttctgaaggtgtgtatgtgtattataat

SEQ ID NO: 16509 - DNA, 201 bp, Homo sapiens
aattagaagaaaattgtgttaatcgagatgacaaaaatggtggtataggtggtcagattctgagtaaattttaaacatagaaccaaccggattggatgatsaattaagtaaaggatgtgaaaaaaagagaggagtcaaggatgactgtaggttttggcatgagaaactgcatgaatggtgaagattacaggggtggggaag

SEQ ID NO: 16510 - DNA, 201 bp, Homo sapiens
tcaggagtctgttggaacaagtgaaatttgtgatacctattagactttgaatgggatttgttgagaaaggtgttaggtatatgaatcaggcattaaggggraagactgaattgacaaatagattgggccattatcatcacacaatggcattaaggccctgggactaagtgagatcaccctagtgaatgcatgttagggaag

SEQ ID NO: 16511 - DNA, 201 bp, Homo sapiens
gattcaagttctcagacctctaggacttgctttggtttatacatccccacccccatgcacgcatgtacacatacactgataaatgtatataagcttttatkcacagacctgcttgtattacctgaacagttctttgtgttttgattctattgtgttctgtgttgctgagtagcagttggtaagcaatggcatgtcatcctt

SEQ ID NO: 16512 - DNA, 201 bp, Homo sapiens
acatacactgataaatgtatataagcttttatgcacagacctgcttgtattacctgaacagttctttgtgttttgattctattgtgttctgtgttgctgartagcagttggtaagcaatggcatgtcatccttgtccctgattttggccgaatgaggacattcttgttgatttataacatgcacaatatcagctgaaggtt

SEQ ID NO: 16513 - DNA, 201 bp, Homo sapiens
tagagatttcttgtcttttttccctttcagattggttatttacgggcagtactgcagtggagtggagtcagccatctctagtttagactacatttctaagwcaaaagaagatgtcaaactgaaattagaggtgcctatttatttttagtttatgacataaagcaaaataaacctaaaagcaatgtattcctctttatgatc

SEQ ID NO: 16514 - DNA, 201 bp, Homo sapiens
gactacatttctaagtcaaaagaagatgtcaaactgaaattagaggtgcctatttatttttagtttatgacataaagcaaaataaacctaaaagcaatgtrttcctctttatgatcagtgaagcagtacatttcccattattttaaatataatttcatgtcaattttataaaatatttaaacagctctataaaatagtaat

SEQ ID NO: 16515 - DNA, 201 bp, Homo sapiens
acatggacggagctggaagccattatcctcagcaaactaatgcaggaacagaaaaccaaacaccacatgttctcactcataagtgggagctgaacaatgaraacacatggacacagggaggggaacaacacacactggggtctgtaagcagggtgggggaaaggagagcatcaggaaaaatagctaatgcatgctgcactt

SEQ ID NO: 16516 - DNA, 201 bp, Homo sapiens
ttaacactgctaatcatcctccttgatgctatccttcacaacccatcatgcgcccatgccatcttttggaaatctgattgactttcctggtttagctacarcccacaccccaggtagataaaggtccatctgtgcatgaaacttctctcctgaagtatgaattttaaattaccatcttctccttacatatcccctcccatg

SEQ ID NO: 16517 - DNA, 201 bp, Homo sapiens
atgatcaacacatacaggagctctgaagtgcatgccaaaactttccaacgttaataatgaataggtatgaactccactatgcaagcttctctgaacgagtmactgcaaagctaatgtaattttagggtgtcgtttccttctcacagtacaccaccgcgaaggtctaatcccagacagcaatctttatggacatttgctttt

SEQ ID NO: 16518 - DNA, 201 bp, Homo sapiens
tttagtcacgatgatagggtaccttcaaaaactgtactggtaattacttttctgtggcccctgttgagataggcagtcttactggacattgatgtgtttartctgaatagaacttcagataagagacaaagcaaattgtgcaataatgtatgaattgagagccacttgtattgaaaaacaaaataggacagaattttatat

SEQ ID NO: 16519 - DNA, 201 bp, Homo sapiens
aagaaatctttctttcattaccaatttcatttcttatctgacattaagcacaggattgtcattaattataaaacatggcccctttccgcaaagaatttatrttcttcctaggaaaggaatagatatagacacaaagttctgattgcataaatgcatgtatataaatgtacatataaaatttttaaatattatatactattt

SEQ ID NO: 16520 - DNA, 201 bp, Homo sapiens
tggtgtaatattatctaagtggatgctaatatgcataaaagagttctctttcaagaagcttccagaacaacatgatgcaggtaggttgtctataatgttargcagtgaatgaagagtccgggagatgataaccacctcaacgttcccatttaaatgtcactgttactgggccctttttaattctattccaggacgtgtacc

SEQ ID NO: 16521 - DNA, 201 bp, Homo sapiens
ggctcacccctttcctgcattctttatgcctgacagtttctcaagtcgtgcctgtccttttaaatcaagcgatctgttcttccctttgatgtcgtcctccyggccaccagcctacatcctcattacctgataacttagatgatttaaagcctcactggttggcttcttgccgtcattttctccccagcttcagtctgttaa

SEQ ID NO: 16522 - DNA, 201 bp, Homo sapiens
ggccaccagcctacatcctcattacctgataacttagatgatttaaagcctcactggttggcttcttgccgtcattttctccccagcttcagtctgttaayggccatgaaaatctcactaaagcccttctacagcaaggcacatgcctaaatgggaacccaaaacatctccctctttcccattgccccctctgccctgttc

SEQ ID NO: 16523 - DNA, 201 bp, Homo sapiens
cctacatcctcattacctgataacttagatgatttaaagcctcactggttggcttcttgccgtcattttctccccagcttcagtctgttaacggccatgaraatctcactaaagcccttctacagcaaggcacatgcctaaatgggaacccaaaacatctccctctttcccattgccccctctgccctgttctctgtggct

SEQ ID NO: 16524 - DNA, 201 bp, Homo sapiens
gggaggcacctgcctgatgagctcctcacgtgtggcccgcctgctcctcgcatctttctgtgcttcctgtctgcaggtcctgggcactcccatttgccccyaccatgtgtcctgccctctcacatggcccctgtggccaccctccctgcctgcagcttctgggctctgaccgcggccctgccctttccccttggcaggagg

SEQ ID NO: 16525 - DNA, 201 bp, Homo sapiens
gtgtgaaacacagtgcaaagccgagaactcactcattcttatactagctgtgctcaatcttgttcccagtggttctcaggagatgccacaagtggggaagwtgactgacatttaggcaggtcatttaaatactgtaaaaactctgtagcagctgtgaaaactcagcaaaagctctcattggaagcaaggggacagattagg

SEQ ID NO: 16526 - DNA, 201 bp, Homo sapiens
gcttcagtctgttaacggccatgaaaatctcactaaagcccttctacagcaaggcacatgcctaaatgggaacccaaaacatctccctctttcccattgcmccctctgccctgttctctgtggcttttgaagccttcctcagcactgatgccacctgaactccagcagtgctcatgcctgcccccgactctggccaccgat

SEQ ID NO: 16527 - DNA, 201 bp, Homo sapiens
tttggtgcatgaatatttgatggtgttgtctggggtctcccaggtgctctgctgccctggcaagttagggagcctctgatggagtggaccatggctctgckcactgagtgatcttggaaaaatctctgcatctcttgaggcctcagtttgtcatctgtaaagtgagagcattgtactagatgatctctgaggcctttccct

SEQ ID NO: 16528 - DNA, 201 bp, Homo sapiens
tgtgacaaatgatgtcatttgtcatagacatgctagcccccggcagaataatgaatggtttcaaaggcaggatgcaggttgaaaacatcagtttctgtctsttctagtgcttttttttttttttttttaatttcaggactagccacatgtaagttactaggtttacaaaagccagccaaggctaaagggtgttgccctgct

SEQ ID NO: 16529 - DNA, 201 bp, Homo sapiens
cttcctggtggagcatggccagacattgagcatctggggtgccccctaagtgaggtgggttggtaagttagtcagcctctgaactctgtgcccatagctgwaagagtaacatcgacaggagaacatgagaaatgtcattggaaaggaactctttaccagtctttggtcagtaggtagtgtggagggaggaaggaaatctac

SEQ ID NO: 16530 - DNA, 201 bp, Homo sapiens; identical to SEQ ID NO: 2574

SEQ ID NO: 16531 - DNA, 201 bp, Homo sapiens
tgcgttggcctcccaaagtgctgggattacagatgtgagccaccgtgcccagcctccataacactttattagtatctttattgttgctcatgtcatatggrtaattatgaacagactcctgcctcctcctgtgtttctggggacaataagaagtctttctttgtatggcccgtaggctgctttgtccacacaatgtcttgc

SEQ ID NO: 16532 - DNA, 201 bp, Homo sapiens
gctgcagcctctaaccaatctgattaccttcctccactggggctttaaatcaagggtggtggctgagaaattaaattgctctccctggcggcttcctttgrcaagggcctggctgtctggaaggggccaatatgtgtatgtgggagtgaggagtaagggcatgggcgtggtggggagtgggccagctcagccatgcccact

SEQ ID NO: 16533 - DNA, 201 bp, Homo sapiens
agatgtgagccaccgtgcccagcctccataacactttattagtatctttattgttgctcatgtcatatggataattatgaacagactcctgcctcctcctrtgtttctggggacaataagaagtctttctttgtatggcccgtaggctgctttgtccacacaatgtcttgcacatggttgtgctcatacatggttgttgaa

SEQ ID NO: 16534 - DNA, 201 bp, Homo sapiens
atgtcttgttatccagttttgtggcccctggacaccaacacagtattcattggatggtgaagaacggtgggaaaagcctggtccatttggtgtgcacaaarcatcttcctgacctcttactgtaaaagccatgacagtttgctccctatgttgtacaagagaaaggataaaagccttttgcctccagtgttacagagagag

SEQ ID NO: 16535 - DNA, 201 bp, Homo sapiens
gcccatgcccctccttctggcatttctctctcagtccagctagtggctctaattccaagcctttgttctgagggtgcagtgggtgagggccagggtgggcrtgcacgagtgcatgtgtcctggcaggtgggagctcatgtagtagcctgttggccacacatggtcatttccttccaccatatgtgtctttcaggtcctgag

SEQ ID NO: 16536 - DNA, 201 bp, Homo sapiens
tacaaagcactggtctaaatactggggatacatcagggaacaaaacaatccaaatccctgccctcatggaacttacattgtttacagtgtaaaaataaaayagataaatcatatacatagtgcattagatggtgatacagtacaaggggacggggtcggttttggtaggagggcctgatggtgtacttttatatggggtag

SEQ ID NO: 16537 - DNA, 201 bp, Homo sapiens
ctaggaaatgggatgctttcagggcctttttcctaacccggtgtatagagtgtcccagtaggatgaatgacagcctcagggctctgtctgtaccttgttcrccctgagcagcttcagcctcttccaggaggcacaacagaattctcagagccatccctcaagtctctctgagtacaagtggaagcctcatctttaggctaa

SEQ ID NO: 16538 - DNA, 201 bp, Homo sapiens
catgattatttgaaggcttttggcttgagcagctggtaggatggcattgtaattaactaagctgtggagaatggtgagaagagcaggtctgtgttttattrgggaggggggaaggatcaggaactcaggtttaaacgtgaagttggaggtggctactagacatccatagaggatcttttgtaggcaggtagaaaaatgact

SEQ ID NO: 16539 - DNA, 201 bp, Homo sapiens
tattcactgtatcattcttcttattttgatctctaaaaatcatgtgtctctctttgaagtataaaggacaaagagatagaagcatataggaaagaacccaycccatctttaggaagaacagagcccactggcataacaggacagagtggcaagaaaggttgggctgtggaaccagacgggctcttgtttgaatcccagccc

SEQ ID NO: 16540 - DNA, 201 bp, Homo sapiens
tgaggagtgggaagacttaaataagtaaagaggaagagggcttcctagtgtggttgtgcaggttgtacataaacaactctaaacagcaccataaatgtcayaatccatgtgtatggccccaagatggaaagacactccaggagggaaaaaaagcatggaaaaaaacaaggagatagagttacataatacatggaaagttta

SEQ ID NO: 16541 - DNA, 201 bp, Homo sapiens
cttaggacggggcctgatgtagtgtgaacagtcaatacatgttgattcccctcctcatccttccattctcttatcacatcatgaaatccaaatataggagsaagtacatattgatgcacaatgtatacagatagatgtgtgcaggctggcccaagacctagttgttttatacagacacaccccccttgcctatgcccgtgt

SEQ ID NO: 16542 - DNA, 201 bp, Homo sapiens
aggagtgggaagacttaaataagtaaagaggaagagggcttcctagtgtggttgtgcaggttgtacataaacaactctaaacagcaccataaatgtcacamtccatgtgtatggccccaagatggaaagacactccaggagggaaaaaaagcatggaaaaaaacaaggagatagagttacataatacatggaaagtttatt

SEQ ID NO: 16543 - DNA, 201 bp, Homo sapiens
gatgatgtgcagtagagctgtcatctgtcttgttctttctttgtgccctttgaaacatggcggtggtggctttggcgctggtggcaggggaagccttaacrgccccggagctgaagcctctctgttggtcctcagaccaggtacagtgcaggggcccccaggaaccccctcgttctggggtccacacttatgtgatgtatt

SEQ ID NO: 16544 - DNA, 201 bp, Homo sapiens
acactccaggagggaaaaaaagcatggaaaaaaacaaggagatagagttacataatacatggaaagtttatttggctgatgctagtcaaatatccatctasttatttaggaaatatttatcgtctggcatcattgagatcacactgaacagagtggaagattcatttaggaaagcagtgacaaaaatgtgtgggctgttgc

SEQ ID NO: 16545 - DNA, 201 bp, Homo sapiens
atgttttctacaagcatatatgttgtttatgcagtggctgaagagaagactgttctccacagctgcatacatcaagttaagggaacgtttataatgtaaasctggaaaattccattagggaactttattgacttttgaggaggaagggaaggggattttttcatttgtttatttttcttcttggatttattttaagtgtgg

SEQ ID NO: 16546 - DNA, 201 bp, Homo sapiens
aatatttatttaccacttacaatgttacaggtactgcaggggttaccagtaactgattcaagaaggagagctgttcacagagcaagatgtttcacagaagrgaaagctattgaactaggtcttataggaagagttatcaattgacagaatatgaaaatggggcatcttgggaagaggaaatggtacctgtatctggaaaat

SEQ ID NO: 16547 - DNA, 201 bp, Homo sapiens
ttacaggtactgcaggggttaccagtaactgattcaagaaggagagctgttcacagagcaagatgtttcacagaagagaaagctattgaactaggtcttayaggaagagttatcaattgacagaatatgaaaatggggcatcttgggaagaggaaatggtacctgtatctggaaaatgtaatgcattatcaaaggaccgtg

SEQ ID NO: 16548 - DNA, 201 bp, Homo sapiens
tttagtgtcatgtcttttccacccacctctgctttctctttctaaccgtctcccaccccatgttattggcatttagttcatattcattttagtattaaagkgaagtaattatttctgtattgtgaaattggcatttgagatcattggaaatattctttaatgctgtaagctagagttttaaaaaataggattagttaagtc

SEQ ID NO: 16549 - DNA, 201 bp, Homo sapiens
cttaatagaggtacttgctcagatgctctctctctgttgcttgattcactctttcccttagtcatggccctgtccaaacccagtgaatcttatccttcttrtccacagggaatttgccaaagagagagagagagtggagaaccgaagggctttcatgaagctgcggcgccagcagcagattgagcgtgagctgaatggcta

SEQ ID NO: 16550 - DNA, 201 bp, Homo sapiens
tggcaagattgtcaagcaagggggtagatgcaaaagacccaggcccagaatttgcccttggcattggccccattttctcctccagcccaggtttctgatgygcctgtcatttgctttttgtagatcctgacgggtgaggactggaatgaggtgatgtacaatgggatccgctcccagggtggggtcagctcaggcatgtgg

SEQ ID NO: 16551 - DNA, 201 bp, Homo sapiens
cagccagagggtgaggagggagggggagtggaggaggctttccagtgagtcatccctcctgcatgttaggagttttggttaaaagatttacagagagagakagtgagagagagagagtgagagagagagagcgtgagagaaagaaagagagcaagaaagcgagagagagagcacgagagcacacaagtgagcgtgagcgag

SEQ ID NO: 16552 - DNA, 201 bp, Homo sapiens
ccgcctcataaagctcctgcgtcagggctataccatacgcattttgctgtggacctttgtgcagtcctttaaggtaagaggtaccagcaaatcctctctgrgggttgtcatatcagacagtacagccaggcaacactggcatcattacccaagtcccttcacctctgggaagctgaagctagtagaacgggtgtttgttag

SEQ ID NO: 16553 - DNA, 201 bp, Homo sapiens
tatagattaatatctacatatattttgtgcattcatgacatacctaactttgatatttctaggttacacagttctgtaagttttttcaaattgttgcaaaygtccaaattttttttccaatatatttattgaaaataatctgcatataagtggacccatgcagttcaaacatgtgttgttcaaggatcagttgtatgtact

SEQ ID NO: 16554 - DNA, 201 bp, Homo sapiens
ctgggtgactgctgttttgtccacatttagctgggtgagccccagagctgaaggagtttattttcggtgtaggaagaaaagctttttggatttgcctgtcrgttccttttatttttttcaaagactccaaagttgatatggctttttccccctgccttgcttcagaggcccaaagatgtagacaatgagtctctgcatgac

SEQ ID NO: 16555 - DNA, 201 bp, Homo sapiens
gatgtagacaatgagtctctgcatgacatttaattcgcctacggtgctgttttgaatgttacagatgaaccaactatgaattggctgtatgtctgtatttrtatgaatatgtgagacaaggggactagatgaactagagagaagcattcttgggaagaataagaagacaccagcgaagagatggtggtgggcatggcagat

SEQ ID NO: 16556 - DNA, 201 bp, Homo sapiens
atcgtgccactgcactccagcctgggtgacagagcaagactccatctcaaaaagaaagaaaaaagaaaccatctggttgagtcctttgtccttcagtagaygaagtgtcctcatccatattttatagacaatacaattgaaatccagagatgtttcattatttgaagaagaagttggaatctgattctgctagcctgtgaa

SEQ ID NO: 16557 - DNA, 201 bp, Homo sapiens
aaatatttgctgagtaaacaccaaatatatacctacagctgctgaaaattcatttatgttacactttaagttgttctccagagcatctggttaatctggcyctaaagtactacaaaaattatcagtttttaaattcatagatacatgataacaagtaaaataaatggatttcagtttattagatgagggttcattcatata

SEQ ID NO: 16558 - DNA, 201 bp, Homo sapiens
catagataagcagaatgagatatagtgaataaatttaataactgccaactagttagcatttatggagctccttaatggcttaaagcatgactgtatcacaygagttttttttactacaaccctatgaaattagtgttatcagccatctttcaatttcaatgaggaaaccaagatgccgagagactgagtgacctattgtgc

SEQ ID NO: 16559 - DNA, 201 bp, Homo sapiens
gtttatttcctgagccactgaacacagggtatactaatggccacctctgtgtcctacaaataaatagggacatctgggcaggttaatatgatgtgtttccyctgcacagtctcgtggagctgtacagaggtgtacatatgataaatataagtaaaaaattgacagctgagacccagactttgagtaaaagtttcttaaaca

SEQ ID NO: 16560 - DNA, 201 bp, Homo sapiens
ggtgctgtcagcattatcagagcgtttcctagcaatgcccatcagcaaagaggctgtgttttctgaaccttctccaaagaggctgccctctcccctcttcratatgcacccccatccctgagagaagtgatttcctcttgttatttggaaatcagggagagagtttcccaatctttgtctggggctctacagggaccacag

SEQ ID NO: 16561 - DNA, 201 bp, Homo sapiens
  misc_feature (1)...(201): n = A,T,C or G, or insertion/deletion polymorphism (see Tables 1-2)
aagtgcagtaaagtacagtaaaatgaggtatgcctgtagaactaatctcgtgtcttagatgtgtgaaaaaaagaaaagaacactaaagccaggttagaganttctgctttctgctgtgcctttcatggacttttgaaccttgggaagttactcagcctctctcagggcctttcaccatttacaaggtgaggccatggactc

SEQ ID NO: 16562 - DNA, 201 bp, Homo sapiens
ctttcccttataatgatgatgctgcctccagtttttagaactttctggaaacttctgagaagtgactgtctaaagggggatgatgggagaaggggagttgyccatgggttcccatcgtgcttgctggagcaatgggtgttggcagatttcttcagaaggagtttgtcagcagtggggtggggctgggaagaaagccacagt

SEQ ID NO: 16563 - DNA, 201 bp, Homo sapiens
acagtcatctttgggcagtttgtactgagagggaggggaggccgagtgtaaaggatcggtgccttaattttagcaaggctctgagccccttggaaggcaarctttatttctacatagattgaaagtattattattattacatccttacgctgtatcagcgccaaacactggagtcctcaatactgtatttatttctctggg

SEQ ID NO: 16564 - DNA, 201 bp, Homo sapiens
cttgggattaaagatgtgagccactgcgcccagcctgaatttagttgttattcagtaatccatataatttgggaatgattgttcaaatggcacagactctsacaggggttcaatctaccattgtgtcagtgtagcagatgagatttttgtcaaggggcttgctgaaatccagggtaccatatctttagcattttcctagtc

SEQ ID NO: 16565 - DNA, 201 bp, Homo sapiens
catttgctgagtcccagcctgtgccaggcactgagctaagcttgtcccatgcactgtttgatcatcctgctttctcgttgctcacacactgtgtactgacstacggctgaattctcctgggattgacaatgagcttactggttatcactgtagagtcttctgtttggaatcaagacatttgctcaggttttaaggcctctg

SEQ ID NO: 16566 - DNA, 201 bp, Homo sapiens
gggaaaaccaaggtatgaaggaataggttaggacttaatggtgcataaactcagagccagcagtcattcttccatccctggtcttggcatttggaagatgwgatccactatgttgtaagctctaaggggcaggaaatacaagatgatgtatttatgtaaatataatgtactatgttgtaatcatatgtgcatgcaggaatg

SEQ ID NO: 16567 - DNA, 201 bp, Homo sapiens
ttgcatcatggcagcaacacccctggtccctctggggtggatggggtgcagcacaccttggtgaggggtttacactaaatactgctgaccccaggacagcratttctcatacatttttattccaaagtattcctgaaaggtacttttgcttcctcatgtttccacaacaaccccctctagagcaaggatataaataagaaa

SEQ ID NO: 16568 - DNA, 201 bp, Homo sapiens
catttataagaacactcaggtctccttccttaagcccaccgtccctgcagggaggtgggcagagttttggcaaaggttgggttcagggcttcgttattccrctgccctgacaacacccgctttctgggccacatggagacagagtgtttgctgactataaatgtccagagctgtgccttctgtactttgaggtctcaagaa

SEQ ID NO: 16569 - DNA, 201 bp, Homo sapiens
tgggatcaacattcccaccaccttcctccctgtcacctgggtgctggcttctggaaggctcagccctgcaggtccatagcaggactttcctggctgtgccrtacaaagtacctgacgatgagattgcttggaagggcatggggaggagccagtgacagatgtggtgggatccatagaaagggctgctgtggagcctctgcg

SEQ ID NO: 16570 - DNA, 201 bp, Homo sapiens
ggcttcgttattccgctgccctgacaacacccgctttctgggccacatggagacagagtgtttgctgactataaatgtccagagctgtgccttctgtactytgaggtctcaagaaaagtctggtgagtggctggatctatgaaaccttcctcttttatctttttctttccaatgaagagggattcttttgtgtgatttcat

SEQ ID NO: 16571 - DNA, 201 bp, Homo sapiens
acagccttggcatttctggggatctgcacatgaggcacattcccctgctttgggggaccctgctccccaaccaaagtcagctgccttgtagggaggtcacrtaaccactacacagattacattcatgaacctcacagaaccctcatgtttcatgtgtttcatgtctagtgaagtgacttgggcaaacaggtgggcagggac

SEQ ID NO: 16572 - DNA, 201 bp, Homo sapiens
gcctctttctagttaatcttttctcttcatcctcagcctctagtaactgctgattttttgttcttatagttttgccttttctagaatgtcataaatgggawgaggagtctacagcctttttggcttcttgcactttgcataatgcttttgagattcatccatgttgctgcatatatctgtagttcatttctctttatttct

SEQ ID NO: 16573 - DNA, 201 bp, Homo sapiens
aattggcatttgagatcattggaaatattctttaatgctgtaagctagagttttaaaaaataggattagttaagtcatattttttaaaagcgaaaaaaatyacccagaagctattgaagatgatgagataatgagatgaagaagttgagatggactgtgtgtctcttgagtcaatgtcgataacctttggaacctgtccta

SEQ ID NO: 16574 - DNA, 201 bp, Homo sapiens
gattctaagtagtcatctcacagcttataattgatcgtcagcacagatggtttaatagaaaaataactagcaattctgctcccatctcctcccccacctcrgaatttaccatggcccgtgcatcagtcagttacacaggctctctggcggctgacgccaaagcttcccattgccatttgctgttgtagcagggcatggggt

SEQ ID NO: 16575 - DNA, 201 bp, Homo sapiens
tcattttgatgctcgacagacagctgatattttataaaactttatgattgcctcttcatcaagcactgtaattgtaggtttgtcttctttgcaagtatggrgaactgggtattttcttttaaatacttgtcatcctaggaggcggattgcctatgcctgtcatgcaaatcaacttttcaggcatcataggcagaactagga

SEQ ID NO: 16576 - DNA, 201 bp, Homo sapiens
ttaatgctgtaagctagagttttaaaaaataggattagttaagtcatattttttaaaagcgaaaaaaattacccagaagctattgaagatgatgagataaygagatgaagaagttgagatggactgtgtgtctcttgagtcaatgtcgataacctttggaacctgtcctaagtgagaacctcgattgccctactgcaaatg

SEQ ID NO: 16577 - DNA, 201 bp, Homo sapiens
ataggaggattttgtttcctgacactccagtttaaaagtcacctcaagaatgactacatctgatttttgtgcccagacaaggacactaaggatgatcaatrcccatggacttttgaggtgcctactactatatcatagctgccttgaaaatggagtttgggagggagtaaggagggacagagtggcagccacatggaggga

SEQ ID NO: 16578 - DNA, 201 bp, Homo sapiens
ttactaggattctggggggaaattaattcaagagagcaaattatatcctttatccaggtgtgtgggaggagcaggaaatattgggccctcccgcagaagaygcatgtctatgagcatgacctctgagaaccttttcagatgctacaggatagaaaggtctccgagataaggacttgagctaagcagaaggcagaagcttgg

SEQ ID NO: 16579 - DNA, 201 bp, Homo sapiens
tcctaaaaaataccatagtctttttgagtttggagaatattattactgttgtcaattactttttattagcaccctgtatgatataggtactatcttaggtkggtttccctggaagtcagctctgcaaaagagaattgcaagcagaacgtctttcgaagtgtgctttgggaagatacacctgaggatgcaaaaaagccaaag

SEQ ID NO: 16580 - DNA, 201 bp, Homo sapiens
tgaaagattatcccttagttcttccttaagacaaatgtagcctggggaaagggaaacctttgtggttattttggtaaattttttaattgatttcatttttmctatggcagcttgcagttatacttttattaatgtgcttgtttacttgaggtctatcttccctactagactaggtaagtttcaaaaggttggcaacctcat

SEQ ID NO: 16581 - DNA, 201 bp, Homo sapiens
aggttaagggatttacccgatgtcacagaacaaagaagaaagaggtaaggccagggttttcctattagcctatgatgtctcacagagataacctgtccagktagatacccagttttggctggagaaggcatcacagaccttgggtaattgatggcccaccagtttgcacccctttccattaatgtggaccgatcatgccct

SEQ ID NO: 16582 - DNA, 201 bp, Homo sapiens
cttctaagagacatcagtgagtctctctctgagtggttgcgtgtccctctttagatgaaaccctttataagcataactgtgccagtgtgtgagagaatttctggcccagagtgggcatagttcctgcagcctggtttcttataaattcactggaaacagagtttgtctgaagactgcataggaaatgaaagtaaacgcctg

SEQ ID NO: 16583 - DNA, 201 bp, Homo sapiens
gggaagatcctcccttaagctttcccctctgtttttccaactcctgaaacttacatccttctgcaggcttcaggactcagtgtaggtgtgtctgatgcccrgtcatcctagagaaggggttgtgggaggggctgtacctgttgctatggcagcaaccagttgagatcatgaacccatttgattcagaggcaattgcaaggt

SEQ ID NO: 16584 - DNA, 201 bp, Homo sapiens
ttttctactgctctctgattggatcctccataggaacgctttggggtaaatatgttcgattatctttgaagtaaacgatacaaggaatgagttggaggagygagaaagtatggttgggaggggaggggctcacgcactgagaaaagagtggtcagtttttatttatatccaagggatcaaaattaggagtcaccaagcctt

SEQ ID NO: 16585 - DNA, 201 bp, Homo sapiens
gccaccaaaggcagcccactgtggccttagcattcccacctctttctctctccttggaatgtcttcctctgttgattggccatctgaatccaccttccacttcatgtctgggtgaaagtagagtctcaggaagccttacatgacatctctatccttgctcctatcttcattaaatggcagtgtttgcaggtctgatttcag

SEQ ID NO: 16586 - DNA, 201 bp, Homo sapiens
tacttccatacccaataagtggagtaccttttggcagtcacttggcttttgaaccttggttcttctgtaaaatgaggggtttgtgcaagatgctgtgattycttccagctctagaatctgcaagatgataaaggttagagtactcatattagactgagtgggaaatagtgatttgttagtaagaggggagaggggaacatc

SEQ ID NO: 16587 - DNA, 201 bp, Homo sapiens
cctcccctcttgttttcagagccctttctggtgcttgccactctttaaagaatacaaatctctcatcagcaagccctgtagaaggggcaaaggggtgatgyactttagctcatcaccactgggcacgttctctttaatcctctcttaaattcacctgctttggctgatctgcatacagtgggagtggtgtcagatcaacac

SEQ ID NO: 16588 - DNA, 201 bp, Homo sapiens
gacagacccatgggtgccctacaggtgagagcagtaagaggaagagaaggaaacggtgagaaactgggagatgtggtggctgggatgccaagaacgatgasctctgaggagagggggaggtcagtggtgtcaaatgctgcagagtggtcaagtaggagggtaaaaaaagggaccatcaggggttcagtggtagtcttagag

SEQ ID NO: 16589 - DNA, 201 bp, Homo sapiens
ggagtcatgtctacgatttgccttgattaacaggtttcctattcttttcccgtttgtccattttgttttgtttttcttctcctgttttctgtattttgttygtttttgctctctgggaatgcctattctcctctcctatctttctgcatccttctccccacttccttctcctttccctgccaccccactgccccgctaacc

SEQ ID NO: 16590 - DNA, 201 bp, Homo sapiens
ttctctttcatgaagagaaagcacttcagaaacttatggggctctgtagtcatcaccaagaacatttgctttcattgtactgttaagtaggagtgctcatyagcagagattctggtcaaccaaatgctgggttagtgtagagtatgctacttgatctaaattcaggaaaacatgcccagggcgtaggacttccatactaca

SEQ ID NO: 16591 - DNA, 201 bp, Homo sapiens
tgcccaattttgtgtgcagaggcttagaacccacattaccaaatgctataaaaccagtggttgtttgcgtgaccttggaaaagtatctgacctttctgtaytgtcttctcatgtgctaagcaagagtgtgagaatattccaactcagtatattatggtgaggctgatgctgtgttcttcattacgtacatgggagattttg

SEQ ID NO: 16592 - DNA, 201 bp, Homo sapiens
aaggaagaccaggatcagaggcaggtttgggattaactaactggaaggactttggtgttgaggagtttcagtctcaggacaagcagtgaagcagctgatgmtctttgcttagccttctacatggagtgagttgtggggaaaagttgtttgcaacatgtatttctctaatggccagggaggggttatttcactattatttct

SEQ ID NO: 16593 - DNA, 201 bp, Homo sapiens
gagtttcagtctcaggacaagcagtgaagcagctgatgatctttgcttagccttctacatggagtgagttgtggggaaaagttgtttgcaacatgtatttytctaatggccagggaggggttatttcactattatttctctccaacttttctatcaaatacacttgtggagtttctgtagtgtgaattgtcttacttcaat

SEQ ID NO: 16594 - DNA, 201 bp, Homo sapiens
gcttagccttctacatggagtgagttgtggggaaaagttgtttgcaacatgtatttctctaatggccagggaggggttatttcactattatttctctccarcttttctatcaaatacacttgtggagtttctgtagtgtgaattgtcttacttcaatctgtaagttcaatctatattcatgaagtaggagggcacccctaa

SEQ ID NO: 16595 - DNA, 201 bp, Homo sapiens
aacattaaaaatgattatatataaattacaaattttttatggtaaaggacaccataagtaatgtcaacaaatgattaatacactgagaaaaatgacacgtraaaaaaattctaatataagtatatataaagagcctctataaatttataagaaaaagacaacatatagaaatatggacaaaggaagagagtaagcgattca

SEQ ID NO: 16596 - DNA, 201 bp, Homo sapiens
tatgctttccgcatctgttgtgactacttaagatgctccaagctgctatggtggaaggggttttatggacttcattggcttttggcaagaagaggcaactkaaagtctggatgctttctgagagtcttcccaactcctcagaaatcttttggtctataaacaatgactgtggctgtcttttaagttgccttttcacagctg

SEQ ID NO: 16597 - DNA, 201 bp, Homo sapiens
gtaaaggacaccataagtaatgtcaacaaatgattaatacactgagaaaaatgacacgtaaaaaaaattctaatataagtatatataaagagcctctatamatttataagaaaaagacaacatatagaaatatggacaaaggaagagagtaagcgattcaaaggaaaggcaaaccatatggccaataaacacctgaaatga

SEQ ID NO: 16598 - DNA, 201 bp, Homo sapiens
gaaaagtaggggaaaggtaatttatttcagtgtttacagagggtttgcgtgtaattagcagtttatttctgtgacacagctggcctcctcagcttggaacytgactttgaaatgctcttaaagagacccatacctaggcaatctgaggggtgctggggacttgggaagagagtgaagaaaaatgtcatgccctgtctttgg

SEQ ID NO: 16599 - DNA, 201 bp, Homo sapiens
aggaagagagtaagcgattcaaaggaaaggcaaaccatatggccaataaacacctgaaatgatgctaaaactcagaaaaatgcaaattaaagcaataaatyggaccaattctttatccatcagattggctaacatgagtaggaagattagtggaatgttgcctacctgtggttctgtgcatctgtgtgggtctactttaat

SEQ ID NO: 16600 - DNA, 201 bp, Homo sapiens
atgcaaattaaagcaataaatcggaccaattctttatccatcagattggctaacatgagtaggaagattagtggaatgttgcctacctgtggttctgtgcrtctgtgtgggtctactttaatgagtttagatctaggtgcttgtcctggaggcacattcacagtgtgttttttaaataagaaaagcaagttacagagtaat

SEQ ID NO: 16601 - DNA, 201 bp, Homo sapiens
tctctgaatatatcttaagttgcctgataccagaggtgtcctctcacagtgtgctcccccagcatcgtgctctgagcataggtggtgttcagcaagaagaraggtgcctggagtgtgtttaggattccagaggagtgcctgggccgtattcccagaaggagagggcgttgttgcagtatggctgggtggtgagataggcct

SEQ ID NO: 16602 - DNA, 201 bp, Homo sapiens
gcctgtctccctgggtagcacatccccaaagaatcctctgagcattgatctttgattgtgccccttccgtgctacccagcaggaccttctcccctaaagargggtcactttgtattgaggatctccttcttatattgcatttgcttagagggtgcatggcctcagaccacattttggggctgatgggaagaagttggggca

SEQ ID NO: 16603 - DNA, 201 bp, Homo sapiens
ccatcagtgctcttggtacactgtcaatgagctgtaatattttgaaaggaatctttttttttttttctgagcaggtctcaacagtgggcttaaaatattcrggaaaccatgctgtaaagagatgtgctgtcacataggctttgctgttccatttatagagcacaggcagagtagatttagcataatttttaagggccctag

SEQ ID NO: 16604 - DNA, 201 bp, Homo sapiens
taatattttgaaaggaatctttttttttttttctgagcaggtctcaacagtgggcttaaaatattcaggaaaccatgctgtaaagagatgtgctgtcacayaggctttgctgttccatttatagagcacaggcagagtagatttagcataatttttaagggccctaggatttttggaatggtcagtgagcattggtgtcac

SEQ ID NO: 16605 - DNA, 201 bp, Homo sapiens
gaataggcaagtgggttattgtgagtgacagaaacctaacttggactagtttgagcaaggaggtacttttcagggaaatgatgtttcacaaaactgccacrctgcaggcagaattagaaaataggccttgggaattgcagaaatagggctccaggtccaccagaattatttcctcttttcattccctcttggccctgtaag

SEQ ID NO: 16606 - DNA, 201 bp, Homo sapiens
taacttggactagtttgagcaaggaggtacttttcagggaaatgatgtttcacaaaactgccacactgcaggcagaattagaaaataggccttgggaattrcagaaatagggctccaggtccaccagaattatttcctcttttcattccctcttggccctgtaagattggctttatttttctctctcactgtagccagttt

SEQ ID NO: 16607 - DNA, 201 bp, Homo sapiens
ttatttctgtattcttcgtctggcatcctttggggaacctcttcttgaggttaaggtgagatgaaggcttcctttggagacacgttcaggccaagcttcaygctctgaggagttgtttcaggaagaaagagagaggagctatgtgtatgttctcccagtgtgaatagggactaatgtgaaacatatgccattgcctttaat

SEQ ID NO: 16608 - DNA, 201 bp, Homo sapiens
tcttatctgttatatattgtctgtggtcttagaagaaagtctgtgctccagtttggccataaattaactcagagccatatgtattgagcaatataccccaycaagctgtaaaacaaatgaacaaatggaaaacaacaaaagaaactccaaaccaaccaaccaatcagaaacaggtcactgccccatgacagttttgaagtg

SEQ ID NO: 16609 - DNA, 201 bp, Homo sapiens
aaacaggtcactgccccatgacagttttgaagtgtgtgtgaaagaggagaaagagctttaagactgtccattctggagggcagcaagatgttgttgcttcrggtagcataagagggaacagattctcttctacaatgccatgtttgtggttcttggaaaagcacagcaaaacctttcaaggcaaactgtttcatcattctg

SEQ ID NO: 16610 - DNA, 201 bp, Homo sapiens
attttcttacagttctggaagtcagaagtctaaaatcactttcactaggctaaaatccagggttgtgcttcccatctctcctccccagaggctttagttcrtttctttgcctctcccagcttctagagctacattcttgtgttctttggcccttgggcccttcctctatcttcagagtcagatgcagaataacttgcttct

SEQ ID NO: 16611 - DNA, 201 bp, Homo sapiens
ttttcttacagttctggaagtcagaagtctaaaatcactttcactaggctaaaatccagggttgtgcttcccatctctcctccccagaggctttagttcgkttctttgcctctcccagcttctagagctacattcttgtgttctttggcccttgggcccttcctctatcttcagagtcagatgcagaataacttgcttctg

SEQ ID NO: 16612 - DNA, 201 bp, Homo sapiens
ccctctccccctttgcatttcttcgggtgaaggggggtacctagcatggaatgtatcccccaccccttcctggtgccaatttgcccctttgctgaagcacmctcttcggtgcatctaaggggcaagcttggtgccgtggagacccgtttgggcactagtgtttttcaaggtaagacttttggttttttatttttcctatgt

SEQ ID NO: 16613 - DNA, 201 bp, Homo sapiens
tatcatctgatttctactgcgttgggtctacattcagtttcagaacatgtgttcccatcccaggtggtaggtccttgcagtcataaccagcttagaagccrgcccttaatctcatgagcaccacctcacctcttagcaggaaattctctcctgggacaacttcttggtggggctgggtagtggtggtatggcccagctcgg

SEQ ID NO: 16614 - DNA, 201 bp, Homo sapiens
tcttgggccagcaatgtaagaaaggaggactgcattttcttaacttgattaagaattatagagagaagatgggaaaagtaactattcagccattaaataarcattttccaagcactgtttaaggcccacgtatgaggcacggagatctggaagatatgtaagatgtttaacatgcagtctttacctttgtgtgcacatagt

SEQ ID NO: 16615 - DNA, 201 bp, Homo sapiens
gcagcttcagacaagggtggaaaaatcaggagacagagatccatcatcacggggtctaaaggagccttggagtattcagagaggctcatcctatttaataytaaatgactaactccagtaactaactctagaaaatgtttcttccctgcccaccctcatctctaggaagactggctgttttgctattaagtctggtggggc

SEQ ID NO: 16616 - DNA, 201 bp, Homo sapiens
ttgcctgataccagaggtgtcctctcacagtgtgctcccccagcatcgtgctctgagcataggtggtgttcagcaagaagaaaggtgcctggagtgtgttyaggattccagaggagtgcctgggccgtattcccagaaggagagggcgttgttgcagtatggctgggtggtgagataggcctcctgcctgccccctcagtg

SEQ ID NO: 16617 - DNA, 201 bp, Homo sapiens
tctccacagagatattcctgagggatagcaagagtggggagctaacctgtttctttgcactgaatgagcaatgcttgtgcctttcctcttttcttgtatcygtacatttccagaggagccagtttatagagggtatagagtaacccaagaatacaggtttgggagtaagggagctggcttttattccaagtgctgccactg

SEQ ID NO: 16618 - DNA, 201 bp, Homo sapiens
ggtgtgtggtgagaatggtggccatactcccttggggtgctgtcaccaggaccagtcttgagcccagttcagccctccttgtttagtagcatatgtctcaraacatgatatgcacggccacttccacccactgctttcacttccggccccttttcttaggagttttggtctcataatggctctagaagcagaggaactgaa

SEQ ID NO: 16619 - DNA, 201 bp, Homo sapiens
ggctaaatggaaatagaacctgtacaagtcaaatgtttctggagcatctgccatctacagggcacttggaggaaacataaagacattcaagacacaatccrtgtattcaaagaatgcacagtccagccaacaatgttttaaagcttccagtagtttcctaaaaaataccatagtctttttgagtttggagaatattattac

SEQ ID NO: 16620 - DNA, 201 bp, Homo sapiens
ggaggtcgaggctgcagtgagccatggtcatgccattgcactccagcctgggtgagagagcgagacgaccttgtttcaaaaaaaaaaaaaaaaaaaaaaaraaaaaaaaaaagcgcccagctcttcccaaagtctggaaaagcaggcttcctggcccctaggggctatgtcaaatctgtgttccacagtggatggcaaggc

SEQ ID NO: 16621 - DNA, 201 bp, Homo sapiens
catcttggctttattcgggaggccaattatgtgtatgctagccttgtgggtgccctagaaactccagcaaaggccagtgacagtgttgtgagccttctgcycctcattatccacagaggcaggagcctatcagagcctccaaccttgaatttttgtgtgagttctgcttctgttctcctactccaggtatgtcccctcacc

SEQ ID NO: 16622 - DNA, 201 bp, Homo sapiens
gaggtcgaggctgcagtgagccatggtcatgccattgcactccagcctgggtgagagagcgagacgaccttgtttcaaaaaaaaaaaaaaaaaaaaaaaamaaaaaaaaaagcgcccagctcttcccaaagtctggaaaagcaggcttcctggcccctaggggctatgtcaaatctgtgttccacagtggatggcaaggct

SEQ ID NO: 16623 - DNA, 201 bp, Homo sapiens
aaaagacacagtaaataagtaattattatatggggtgataagtattgtaataacctgcaaataataagagatttaaaagtatacaaccaactccttgctcrtggcaagtaaaatatttagatgataggaatataaataataatgacctattcatttatttttctttctttgccaagaattgcctgaagggaactgagctta

SEQ ID NO: 16624 - DNA, 201 bp, Homo sapiens
aggtcgaggctgcagtgagccatggtcatgccattgcactccagcctgggtgagagagcgagacgaccttgtttcaaaaaaaaaaaaaaaaaaaaaaaaawaaaaaaaaagcgcccagctcttcccaaagtctggaaaagcaggcttcctggcccctaggggctatgtcaaatctgtgttccacagtggatggcaaggctt

SEQ ID NO: 16625 - DNA, 201 bp, Homo sapiens
gtcaggactgaggctttacagtctctggttgacacagctgaggaaggcagaaccctcaggctggggtgtgagagtttcaagcttagccttgaccagtcttkccatctagagaaccagggtcactttcaggcccaaatgccacggggctggtgctgtcagcattatcagagcgtttcctagcaatgcccatcagcaaagagg

SEQ ID NO: 16626 - DNA, 201 bp, Homo sapiens
ggtcgaggctgcagtgagccatggtcatgccattgcactccagcctgggtgagagagcgagacgaccttgtttcaaaaaaaaaaaaaaaaaaaaaaaaaamaaaaaaaagcgcccagctcttcccaaagtctggaaaagcaggcttcctggcccctaggggctatgtcaaatctgtgttccacagtggatggcaaggcttc

SEQ ID NO: 16627 - DNA, 201 bp, Homo sapiens
cctgcttcttgttcttgagggtgtcaaatattgtagaagtgaacaacataccagcccacaatgattatgttgcagttaagtggtatggtggaattcagtgyagggcataagggagtgactgactctgggaaggttttttagtgaaggtaacattcagtcagggattgagtggaggcttttcaggtggaaaaggtaggaaag

SEQ ID NO: 16628 - DNA, 201 bp, Homo sapiens
tgagcatctgggttattctggcatgtccccaggtggggctgaccaaagcattcactcaacagagtaggtgtcctccaaggctaaggtggactgtgctattaaaaaaaaaaaaagatttttctttatattgtgtgatgtgggagagatggagaaggagaggtaaaagagagggtgtaaggtactggaactgctatgggggga

SEQ ID NO: 16629 - DNA, 201 bp, Homo sapiens
taggaaagaatgtggcatagaattgcaagaagctggatgtggctgtgtgacttggtatacaggtaggcagatgctgtgagagacagatgagctagagaggstaggttgggtcagtcatggtaggggattggcatgggcaaattcccatttcaaggtattaagcaggggagagacagggcaagatgtgttggttagaaatga

SEQ ID NO: 16630 - DNA, 201 bp, Homo sapiens
attaagcaggggagagacagggcaagatgtgttggttagaaatgacaactcttccctgctctgaagaatgaaaccagctgtgcctgggaatcacttgcccsactttacaagatctccctggcaacagaatggctgttgtacaactagccagggaatttgctgtgacagtcttccaaccttatctgacatccagagcaggga

SEQ ID NO: 16631 - DNA, 201 bp, Homo sapiens
gggaatggcagaattggaacctgagagttagagtccatgagagagaggagaagcaaaatgagaaatatggagtctgagtgggaaggaaccccacatctgtygtctgatacaggcacctactcaagggaggaattcggcatcagtgtccctcacagatggttgcctgacacagtgatttctataaataacaattatatggca

SEQ ID NO: 16632 - DNA, 201 bp, Homo sapiens
tgagttagagattaaagacaaagggcccaggggcaaaggaaataattttgtttcctaatcatacagtgacattacaagttagcatttctgtagtttccctkgctgagaactgcctagaatttagtgataatttcctgactcacaaattgtgaaacctaggcctaagcctttctcctcttcttaaatatttattgagcacct

SEQ ID NO: 16633 - DNA, 201 bp, Homo sapiens
agtgtaactgatagatttagcaaatgaaaatataagacatccagttaaatttgaattttaggtttcagataaacaatgaatattccatgcattgtacaaayattgcactaaaaattatttatctgaaattcaaacttaactgggtgtcctgcattttggctggcaaccctgaacctatgaccactgtttcagggtattttc

SEQ ID NO: 16634 - DNA, 201 bp, Homo sapiens
tattttcaggcatagacttgtacagtgaatgtgcctgtgaaaagatattatagacctggattgacaaggaggctaggaaagaaccccaagttcaaagggartgcaaggttggagaattctttgggcgactaacttggggagagatgatttggttctcattgcccagagcattgcctctgtcttctgttctgctgtgccact

SEQ ID NO: 16635 - DNA, 201 bp, Homo sapiens
aattctttgggcgactaacttggggagagatgatttggttctcattgcccagagcattgcctctgtcttctgttctgctgtgccactgtgctatggccacratgagaaagacttgtgctgcatcatcaggattgtatcaatctccattctcttcctatttgctgacacctaaaagtaaaaacattcaaggtagggttgagc

SEQ ID NO: 16636 - DNA, 201 bp, Homo sapiens
aggatgtggttagggcagtgatggaggtggacacgttatgggagcacagaatagggctattttcctttattgtctttttcctctaagaattccattgttgrccaggtatggtggctcacacctgtaatcccagcactttgggaggccgaggcaggcggatcatgaggtcaggagttcgagaccagcctggacagcatggtg

SEQ ID NO: 16637 - DNA, 201 bp, Homo sapiens
agatcgtgccattgcactccagcctggatgacagagcaagactctgtctcaaaaaaaaaaaaagaatcccattgtccctgcttactttctaacaggtgaayggggagccggctgtcattcctgcctcaaggagtattggaactgtgggagttaggaagctgccagtggccaatgtgcatcaattaaagacccagttggtag

SEQ ID NO: 16638 - DNA, 201 bp, Homo sapiens
cattcctgcctcaaggagtattggaactgtgggagttaggaagctgccagtggccaatgtgcatcaattaaagacccagttggtagccctcctgcactggrggacagaaaagaacacttggaggcccaggacagcacaaggccacaggctgcatggccctggctgcagtgtggttgggagaatttggggagcaggtagttt

SEQ ID NO: 16639 - DNA, 201 bp, Homo sapiens
ttctctttatctcgctctttctctttttctatttctgtcatatttttcagttctattttctatgttgcttctcgttcttttttctctttagtccttccctrcttattagaaattatatgaccccctccttaatgtctttccttggccttggaagatagagtcaaaaggagtgtggaagactccactgccccaagtcccccc

SEQ ID NO: 16640 - DNA, 201 bp, Homo sapiens
ttctttatgagtaggatttctttctgcttcttatttttaggtagtatgaacgtagactcagagaatcttaaagttgacaggaatctctattggttgtttarataacctttaccccatgtaggatccctctttacttcctaatgatgctctacaggtagctcccggatacttggagttttgggaagggtgccagcacatgaa

SEQ ID NO: 16641 - DNA, 201 bp, Homo sapiens
ataacctttaccccatgtaggatccctctttacttcctaatgatgctctacaggtagctcccggatacttggagttttgggaagggtgccagcacatgaakccgtccgcttggctgttggcagcactaattgtgtcagttaccgcttgcgattctgttgtcctggtctgtatgatttgtacctaatgattgtatatctgct

SEQ ID NO: 16642 - DNA, 201 bp, Homo sapiens
agatgttctcagtcctggtctcacctattcaataaacttaaagtttctgctatgagttaagtgctctgttaattttggtggggaaagcacaaacagacctrttgttaaggcacactctcaaactttgtctggaagaccttttggaatacttcacctatatctcatagttttattatttctggtttctcaatacttactcat

SEQ ID NO: 16643 - DNA, 201 bp, Homo sapiens
atgaaccatgacattttgccttcctgagaggaatctttgatgtttaaattatctggggatgtttaacaaaggaatgtgggaaatgcaaaactttttacaarggggaaagatgcccacacagggtgaagtgtacaaagcttcaacctggtaataaactctcaatttcttccttgaacacagctgcacctctcctcagacacc

SEQ ID NO: 16644 - DNA, 201 bp, Homo sapiens
tgctgtgccttctcagaggagtgcgaaatgtgtctctgagaagaacacagccatttgttctgttaggatgcttctttcagactgtaattagagtgctgtgkggggtgtagatggaggagaaagaagaatatgaaatgctcttacttccctgtggctcattcttcctgcaccacggggctttgaacccactgaaatattgtg

SEQ ID NO: 16645 - DNA, 201 bp, Homo sapiens
aggagaaagaagaatatgaaatgctcttacttccctgtggctcattcttcctgcaccacggggctttgaacccactgaaatattgtgactgaaacatacastgttatatgcagagacagagagaaagcagcatgtacacctctgagttcatgccttgatagtatctgtgtgctacaatgaggtggcgcagactggcggaga

SEQ ID NO: 16646 - DNA, 201 bp, Homo sapiens
atcttcattttcttccagaggaacaagtgatttcttaaataaaaactacacgtatgacagtatcttttctctattcctaatagaaaacatagcacaaaagygaggtcacagaggaaaaatttggagtttgatttagtgcttagttgcttgagccttattcttctgtaggagctttggaatgacactataacacttactgtg

SEQ ID NO: 16647 - DNA, 201 bp, Homo sapiens
atcttgttggctttgataatggcttaaatcactcttgtatgtatggatttgggagcagtactttggcctagtccatgtgtaaattatattttaactaatgrggactaaagtgttgaggcgtttcttgactccagggctttgttattcagtactcttttcatttcaaatggcaattttaaaatcagttaaatcttgcccctg

SEQ ID NO: 16648 - DNA, 201 bp, Homo sapiens
tagtcttttaagaaatatgtgtcatcctgtcatattatcacaatcaccaagtctctgagaaaccatacactattgagggcaaagaaaatattgtcaaaaawtgatggccaaatggttggcttattccagcaaatactacagagaacagggaagacaggtgaatttgcctccaggtgacactgtgttatagatagatgttcc

SEQ ID NO: 16649 - DNA, 201 bp, Homo sapiens
ctcagttttcttgcaggctatggtgaaatagcaggagccgcctgggtgtcttgaaatttagcctgagagaatggggtgattaattcttatgtgtcactgcrttgacaaagccattcacctgtggctgcttccgacacacctccagctgcacaggtaacagccttctgtgatgagggggatggaccagacatcctgaatgca

SEQ ID NO: 16650 - DNA, 201 bp, Homo sapiens
gaggagaagcaaaatgagaaatatggagtctgagtgggaaggaaccccacatctgttgtctgatacaggcacctactcaagggaggaattcggcatcagtrtccctcacagatggttgcctgacacagtgatttctataaataacaattatatggcactacgggaagtggatgaggctacttacaaatggagctgaccagc

SEQ ID NO: 16651 - DNA, 201 bp, Homo sapiens
agttagcatttctgtagtttcccttgctgagaactgcctagaatttagtgataatttcctgactcacaaattgtgaaacctaggcctaagcctttctcctyttcttaaatatttattgagcacctacagtataggtgcaaagcttagctctaggctctgtaaaggatacagattttaacaaacagtttctgccttcaaggg

SEQ ID NO: 16652 - DNA, 201 bp, Homo sapiens
ctgatgtagacttattgagcatgtcttccattgatgctgtcttgggttctggagatacaaagacttacaagccatggttccttgctttcaacctgtttttrttaaggaataggagtgtttcctgtggccacagaataaacgaaactaactgtcctggggcttcttcaggaaaccagtggggctaaccagacttacatagtg

SEQ ID NO: 16653 - DNA, 201 bp, Homo sapiens
tgaggagtggagtgctcagggagagctccaaggacaaggacaaacactgataaggaattgaaggatgagaggattcaataatgtggagaggtttggggagrcttcctcttgagaggataacgtgagaagagccttgggagcaagtgtggagggtctgttcagggcaatagggagaaaagtttggatgccttgtctttttac

SEQ ID NO: 16654 - DNA, 201 bp, Homo sapiens
acactgcattattgtttgcctttctatctttcactttggtttctatcacatttgatggctacttttcacatgatacattttaaatcatttatttacccatccatccatccatccatccatccatccatccatccatccatccacccatccatttattcaacaaatattcaagaaataaccattgattacatactatatatt

SEQ ID NO: 16655 - DNA, 201 bp, Homo sapiens
cagggctgtatataattaggtgctaaacagagtagacagaacagaagaactgtgcagagttgattggaggtcagaagtcctgcattctggttctacttccrtacccaataagtggagtaccttttggcagtcacttggcttttgaaccttggttcttctgtaaaatgaggggtttgtgcaagatgctgtgattccttccag

SEQ ID NO: 16656 - DNA, 201 bp, Homo sapiens
cactgcattattgtttgcctttctatctttcactttggtttctatcacatttgatggctacttttcacatgatacattttaaatcatttatttacccatccatccatccatccatccatccatccatccatccatccatccacccatccatttattcaacaaatattcaagaaataaccattgattacatactatatatta

SEQ ID NO: 16657 - DNA, 201 bp, Homo sapiens
ttagagtactcatattagactgagtgggaaatagtgatttgttagtaagaggggagaggggaacatcaggaaaagcaataaatgatggcgaccagaaggaytgattcctgacaaccataggacaaagtggagaatcagagagggactggttgaagagcggttaccttggtattatccagcatgttctttctggaataggat

SEQ ID NO: 16658 - DNA, 201 bp, Homo sapiens
actgcattattgtttgcctttctatctttcactttggtttctatcacatttgatggctacttttcacatgatacattttaaatcatttatttacccatccatccatccatccatccatccatccatccatccatccatccacccatccatttattcaacaaatattcaagaaataaccattgattacatactatatattat

SEQ ID NO: 16659 - DNA, 201 bp, Homo sapiens
ttcagtcatgcacaaaagtagagagaataaaatattaaaccctatgtaacccacatcagccccagcagttacaagaagaccttaaagtctttagaggatcyggcatctccctgttgggcttctgtgtcagagttcagaaagggagaggggagggacaggataaatatcacatgacatcaatgttggaattactaggattta

SEQ ID NO: 16660 - DNA, 201 bp, Homo sapiens
ctgcattattgtttgcctttctatctttcactttggtttctatcacatttgatggctacttttcacatgatacattttaaatcatttatttacccatccatccatccatccatccatccatccatccatccatccatccacccatccatttattcaacaaatattcaagaaataaccattgattacatactatatattatg

SEQ ID NO: 16661 - DNA, 201 bp, Homo sapiens
ttctggactgaggcactgcttcatcctcagtgacaatcactgacattcttggcagcggggagatggtggctgcatcaagtccagaggattctgaatgaccwgaatgtgtgggaagccttgcttactcataacggcccctggctaagtcagatgctgcctccagagattgtttgtgtggggagacttagtatgtttattaaa

SEQ ID NO: 16662 - DNA, 201 bp, Homo sapiens
tcttggcagcggggagatggtggctgcatcaagtccagaggattctgaatgacctgaatgtgtgggaagccttgcttactcataacggcccctggctaagycagatgctgcctccagagattgtttgtgtggggagacttagtatgtttattaaatatactcagggctccaagttacagtgaaacgccctgctcctgggcc

SEQ ID NO: 16663 - DNA, 201 bp, Homo sapiens
ccagcagttcttaatcaaaagtaatcttgtcccccagaacatttggcaatttttgattgttgcatctggagaagtactagtggcctctaatgggtagaggmcaggaatgctgctaaggcacacacaggagagcccccaccaaacagaactgtctctccacaggtgctggcagtgctgcagtggaggaagccctgcctaggc

SEQ ID NO: 16664 - DNA, 201 bp, Homo sapiens
cttcaggaaaggttgtgctaattccaacctcacccacagtgaatgagattgcactcatctttgccaactctgggtatttcagttagtaagaatgtctcttkaacttctcctaaacacagtttaattatgatatatttcgaacatttgtatagaaaacaagagacacccacgtacccactaccaagattaaatacataataa

SEQ ID NO: 16665 - DNA, 201 bp, Homo sapiens
caggggatcggcaggtgaggaagatggagagcagccagtgtgccagtctagggaagggctgggtggggagggtgttgggagatgggaggagcatcagtgcyccatgtaagaggacactgaccaaagagaagcactctcctatgatgcctgactgatagtaggtgttgcatgagtggtgtgggatggaggggctggcgtctt

SEQ ID NO: 16666 - DNA, 201 bp, Homo sapiens
agtttaggaatacacatttccaacttttattaggtacagtagttcccccttatctgcaggggataagacccccagtggatgcctcaaactgtggatagtaycaaatcttataaatgctatatttttcctacacatacatacctatgataaagtttaatttataaattagacacaggaagagatgaataataactattaata

SEQ ID NO: 16667 - DNA, 201 bp, Homo sapiens
catgaagccgtccgcttggctgttggcagcactaattgtgtcagttaccgcttgcgattctgttgtcctggtctgtatgatttgtacctaatgattgtatrtctgcttccgagggccatagggcatgcactttccatacagttctttttctgagattgaagacacgtcaaatagtgaaggaagttcaggtaccttctttaa

SEQ ID NO: 16668 - DNA, 201 bp, Homo sapiens
gtaagaattttggtggatggtgatgtcatgaaccaagccagccccttgttactttcaaatttctgaaattcagaaagtagaaaggaggcatcccagggctygaattcagttatcctggccctcactggccctggtcactcttcattttgactctttccttcccttcccccatagcacctttagtagaacccaatgaacctg

SEQ ID NO: 16669 - DNA, 201 bp, Homo sapiens
ccatggtacctcttctgcagattggccttctgctcttctttgccatcctgatgtttgctatcattggtttggagttctacagtggcaagttacatcgagcrtgcttcatgaacaattcaggtagggtcgttcttttctgtcttctccttttcccttctcccctctgttaactggggtaatttcagggcacttggaggctca

SEQ ID NO: 16670 - DNA, 201 bp, Homo sapiens
gaagaagtcccaaggaccagcttacacccagcaagcccagggatgaagtgtgacccagaaagccctggaggacactctgcagttctcaccagctgtgggargcagcaggaaggaggggagggaggcaaggttgatgagtgcagtcactcctcatttgagatgtaaaggttgtcttgaggccatgccactcaaattagccag

SEQ ID NO: 16671 - DNA, 201 bp, Homo sapiens
catgccactcaaattagccaggcacctctaggaattgcagcactggccctgcagtggctggtgtcacatggagggctttgagagtgatgcatttcaattawatgtgtagactcacctaagtgatgtgataaatgcattgaaagcctgaaaggagaagtgttgcatttgaggatacaggcgtgattgttggtcctctttagc

SEQ ID NO: 16672 - DNA, 201 bp, Homo sapiens
agctatgataacttctttttaattggcagaacaccttgcttgtcaggcttttcatggagaggagagagtagagggagagggaaactatttcctgaactcayagtaaaggcttttcccctctgtttacattcatacataagtatagattcattcactaactcattcattcaccaaataatttttaagtggctactatgtgcc

SEQ ID NO: 16673 - DNA, 201 bp, Homo sapiens
ggaggtgaaaagtggttggattctgcatatatttttaagtagagctcatgggattcttcgatggattgaatatgagtttgggagaaagcagcaagaagagyggagttgccattaactaagctggggaagaacacaggtaaagtatgttgggaggaagaggagaattgagtttggatgtgttaaatttgccatgctcatttg

SEQ ID NO: 16674 - DNA, 201 bp, Homo sapiens
gactataacatagccatggaatttgagctggataaagagcaaagaggtggcggagaaaccgtgaaaagggaggagagaacgtggattatagaccgtttttraaatgtgactcttagggccgggcgcggtggctcactcctgtaatcccagcactttgggaggccgaggcgggcggatcactaggtcaggagatcgagacca

SEQ ID NO: 16675 - DNA, 201 bp, Homo sapiens
ccagagggagtgaagaaagcttcgaaatccctgggtggtttggtttgggactttatttgtctcctggcattgcattcactcagggtgatacagggaaagamattatggcaaggtgctttctaagtcagaccgttctcctgggcctggagctctcatttgaaggcagttaaactcgtgcattcttgtgcttgtgcatgagtg

SEQ ID NO: 16676 - DNA, 201 bp, Homo sapiens
catacatcaagttaagggaacgtttataatgtaaagctggaaaattccattagggaactttattgacttttgaggaggaagggaaggggattttttcattkgtttatttttcttcttggatttattttaagtgtgggcagagcagtggataaaaaaaataaatggaaagatacccacattgcaacttttctgttctttcca

SEQ ID NO: 16677 - DNA, 201 bp, Homo sapiens
agaaatgtaggagaggaccaggacacctgtgcgtgtgtgtctttctgtgtgtgacacctgcactccaacccaggactctcaccctctccatttccactgcyctacagcacgttacttgactagctcgattcacatgagcaggtgagcgctcctggattggattctaagtagtcatctcacagcttataattgatcgtcagc

SEQ ID NO: 16678 - DNA, 201 bp, Homo sapiens
gttgcatgagtggtgtgggatggaggggctggcgtcttctgggcagcattctttgcagggagggccctggtttcccttagctgctccacagtagaggtctsggctgtgaaggttctcctggggccagaatcttgattggagtacttagcatggctgtcccgtgttcctgaaggaagagtctctggggaaaatagagtgcaa

SEQ ID NO: 16679 - DNA, 201 bp, Homo sapiens
catggctgtcccgtgttcctgaaggaagagtctctggggaaaatagagtgcaagtcttacatgaaaggagcttgcgagaactgccactctgtcacagaagytgggggggatgctgtagagagagaatgagtgattctccctctcacaggcaaccctcctctcttgcacctcctgctgagacagacacgtgcacaccacgag

SEQ ID NO: 16680 - DNA, 201 bp, Homo sapiens
aatgtaggagaggaccaggacacctgtgcgtgtgtgtctttctgtgtgtgacacctgcactccaacccaggactctcaccctctccatttccactgctctrcagcacgttacttgactagctcgattcacatgagcaggtgagcgctcctggattggattctaagtagtcatctcacagcttataattgatcgtcagcaca

SEQ ID NO: 16681 - DNA, 201 bp, Homo sapiens
acctgccagttggagtatggtgctgtgtatagcaaaggagaaagcttgcaaaaggctctcgggagtgtgtgtgaggagctcgttgaggtccatgtgcaagrgggaaaggattatgcaccacttagcatagagctagtgctctggtcacatgacaaagaaagatggcagaataacaatggattgagggttcgagggtgaccc

SEQ ID NO: 16682 - DNA, 201 bp, Homo sapiens
acaagctccaagcttgcatacagagttgccaatgaggcttttgtgccgtgcttttaaatatgaacacacagctagggatcatcagcatttgaggaaaatgmccaacacaaaagaacaaaaaacaaaatcatgaattataaaaaggtaattgagggaatatgaacaatgcagggagtagaagacaaatttaaaagctgtatc

SEQ ID NO: 16683 - DNA, 201 bp, Homo sapiens
aagcttgcatacagagttgccaatgaggcttttgtgccgtgcttttaaatatgaacacacagctagggatcatcagcatttgaggaaaatgcccaacacawaagaacaaaaaacaaaatcatgaattataaaaaggtaattgagggaatatgaacaatgcagggagtagaagacaaatttaaaagctgtatctgctattag

SEQ ID NO: 16684 - DNA, 201 bp, Homo sapiens
tttgcatgggaaggcagagaagctcaaaagggaaagaattaaaataataaaaataataaaacagtgatcatgaagcaaaggatacatctgaagaggctgtkagcccttcttgtcaccctctgtgtgttgggagtgtcaaagctgcttgctcctggctgacctgggcagagcctgcgggattgccgtcaggggttggaatgc

SEQ ID NO: 16685 - DNA, 201 bp, Homo sapiens
  misc_feature (1)...(201): n = A,T,C or G, or insertion/deletion polymorphism (see Tables 1-2)
ctgaattatcagttaacatctttctagcatgtgccagcagaggggaaggagggtggcagagaaagagcatctaggatggttctgtttcattcacagcaganaatccttgaagcagctggcacatattgtgtggatgacagagaatttggtgctattgagcttaatgatctttaatataaacatgtcaggatatccagctga

SEQ ID NO: 16686 - DNA, 201 bp, Homo sapiens
gccagccccttgttactttcaaatttctgaaattcagaaagtagaaaggaggcatcccagggcttgaattcagttatcctggccctcactggccctggtcrctcttcattttgactctttccttcccttcccccatagcacctttagtagaacccaatgaacctgaagccaagcacaggagaatttgtccttccggtgtgc

SEQ ID NO: 16687 - DNA, 201 bp, Homo sapiens
ggccacctctgtgtcctacaaataaatagggacatctgggcaggttaatatgatgtgtttcctctgcacagtctcgtggagctgtacagaggtgtacataygataaatataagtaaaaaattgacagctgagacccagactttgagtaaaagtttcttaaacatactgaaatatctttggactctagcaaatatcataaat

SEQ ID NO: 16688 - DNA, 201 bp, Homo sapiens
ctggtcactcttcattttgactctttccttcccttcccccatagcacctttagtagaacccaatgaacctgaagccaagcacaggagaatttgtccttccrgtgtgcctttccctacaccttctgcctgattgtaagcaggtggctgtacccaaggacaccagctctattttggcaggagggccaggtgtgacacgaacag

SEQ ID NO: 16689 - DNA, 201 bp, Homo sapiens
ttaattatttatagtttaattaaaaattaagctaaagaaggcaagccagtgaattcatggtttctcatcacttggaaaaggatttctccccacatccatcattactgatttacttcttcatcgaggacctgggattttgagatgtgagatcaattttaaggatgttctggctcctaggagcgaccttgacactttttatca

SEQ ID NO: 16690 - DNA, 201 bp, Homo sapiens
gctggcagatataaagacccaagtcttcgcggtggaatttcttagatggacttgcaggggctggcgttataaagcatgtcatcgtaaccccgtcctcgtctttgtttatttttttttaaagttcttttgttttcattttcccctccttcccaccccttcccccaaccaataaatcaccaaactgttacctagcgggccggt

SEQ ID NO: 16691 - DNA, 201 bp, Homo sapiens
ggatggtaaagaagagggacttctctggcagcgctgagatcaacgcaaaattacagtgtcccactctggccccaaatccaaactgtcctatgtctgcatcytcctccagtaccaaggccagttccctgcctcatatctccttgccttgaccctcacctctaaaactgaaatgttatcccaaagtggcaataagcatgcgca

SEQ ID NO: 16692 - DNA, 201 bp, Homo sapiens
ctggcagatataaagacccaagtcttcgcggtggaatttcttagatggacttgcaggggctggcgttataaagcatgtcatcgtaaccccgtcctcgtctttgtttatttttttttaaagttcttttgttttcattttcccctccttcccaccccttcccccaaccaataaatcaccaaactgttacctagcgggccggtg

SEQ ID NO: 16693 - DNA, 201 bp, Homo sapiens
gtggttgccatgaagggtgatggtctttgaggccgtggcgactcggagctccctttgacctttctaagtcatgtctttgtccagtctgccaggttgagggkcactagcttgactggtgggtgggtgttatttgccgtctaggctcttcactttggggatgtagcagagccattgctttggggtgtgaagttttgctgtcgg

SEQ ID NO: 16694 - DNA, 201 bp, Homo sapiens
agtgtttacagagggtttgcgtgtaattagcagtttatttctgtgacacagctggcctcctcagcttggaacctgactttgaaatgctcttaaagagaccyatacctaggcaatctgaggggtgctggggacttgggaagagagtgaagaaaaatgtcatgccctgtctttggtgatgatgcttgaccaaggacagccact

SEQ ID NO: 16695 - DNA, 201 bp, Homo sapiens
gtgtgagagtgctttgtgcatcaagatgtgccttacgaatttaaggtattataaaaatcctttaaagttatgaacattcatgttaggaagatttctattaytgagatttacaatacaggtttttcacgtatcatttttaaacatgttttgacagatacagtcaatggtatccctcagaagaaaggtagaacgtatattcaa

SEQ ID NO: 16696 - DNA, 201 bp, Homo sapiens
tggatgtgaggggatgggtgaagacacgtgcagaaaaggaagtgctcattgtggaggaggtgaacataattggaggaattcgctttggcctttttggctgaaaaaaatatttatgaaattgctgtacacccccgctcccccccccgaccccaagcagagttagacacctatagaattccaggcaccgatgaaaagaccttt

SEQ ID NO: 16697 - DNA, 201 bp, Homo sapiens
taacttgtccaaggacatgcagtccatttttggcagaggcagagaagaaatgggaagtgagctgacatgaattaagttcttcctattgccaggacctttaytaggtatcttacccagatttctccttgtctaatatgctccctcctcaactcccctggggttccaccttccacgagtctccctgcctctcaggaaagcttc

SEQ ID NO: 16698 - DNA, 201 bp, Homo sapiens
cctcccaaagtgctgggattacaggcgtgagccaccgcacctggcccaattcactgcttttaacatttgttgatgccaagaaagtgctactggaaggctghtataggtttaagaacacaatgattggtcattctttttctttcctacccagattggaaattccaagtttgctctgtcatcacatctggttaatgcagacac

SEQ ID NO: 16699 - DNA, 201 bp, Homo sapiens
ttctaaaacaaagcctgctgctgaggaaaactacaaagggtggtacagatttaaaaggaggcagatagcctgctgcaggcaggaccacagtcttatcaccycactacacagctataaagacacacaggttctgaggtggcatgtcctgcagcaactgtgtaaggcagggcttcttatccctgttttacagataaggtaata

SEQ ID NO: 16700 - DNA, 201 bp, Homo sapiens
ggtaagaaattggagggaggtgaagggaggatgaggagaaggaccaggtccatttggagtcatggtcaaggtcttctggagagagactgcatcattgctgmtggtaccagtgagtgaggaggaaactgaaaagagttcagcctcacaggaaggctggaaattagtgcaggagggatgggcaggtgagtaggaggctgggga

SEQ ID NO: 16701 - DNA, 201 bp, Homo sapiens
gtaagaaattggagggaggtgaagggaggatgaggagaaggaccaggtccatttggagtcatggtcaaggtcttctggagagagactgcatcattgctgawggtaccagtgagtgaggaggaaactgaaaagagttcagcctcacaggaaggctggaaattagtgcaggagggatgggcaggtgagtaggaggctggggag

SEQ ID NO: 16702 - DNA, 201 bp, Homo sapiens
agtgagtgaggaggaaactgaaaagagttcagcctcacaggaaggctggaaattagtgcaggagggatgggcaggtgagtaggaggctggggaggtcacasaggacaagatgagagagtccattaacctagagaacataccatttgtgtctgtagggggtactcctgtgttctggactaggaggagttgtgtttcactatg

SEQ ID NO: 16703 - DNA, 201 bp, Homo sapiens
cgaagaatggaaactttcccatccctgggagtaaaaccttacatcagtgatacccaatcctgcttattgatgccccaggggtgtcttgaaattcttcaaakgaaattaattgtaattcacttcaatttttaaaatccacagatatgctgcatagcacaatgcttctgggcagggtggcccaggggaggtggactgaaagtt

SEQ ID NO: 16704 - DNA, 201 bp, Homo sapiens
aaatgtcagccaaggaatactgtcatactgttccttacaagtggagtgactcccgcgttggtgacaagagggcatggatgacagagtctgagacattactrtgactggtcttacttggtgctggtcagctcggacaacttctgcagggggagcctagcagatttcatgtgctaggcacaacaagcagggctggcagccata

SEQ ID NO: 16705 - DNA, 201 bp, Homo sapiens
gtgtgcgggggaaagaggcaattgtcgtatgcttccatagaaggagatgaaggagcgaagaatggaaactttcccatccctgggagtaaaaccttacatcrgtgatacccaatcctgcttattgatgccccaggggtgtcttgaaattcttcaaaggaaattaattgtaattcacttcaatttttaaaatccacagatatg

SEQ ID NO: 16706 - DNA, 201 bp, Homo sapiens
tgtggtagcatgctgttctagttttcctatttcactggctgtcccattccagtctctgttgctggttcttgctcctctgctatacccctgatgtaggtgtkccccagggctggcttctgggccctcttctcttctctgtctatgctcactcccaggatctcacccatttttgtaggtttacataaatccacatgtaaatga

SEQ ID NO: 16707 - DNA, 201 bp, Homo sapiens
cttccccactcactgctctgtgaattttcctttccctaggagtggtcagcagaggctttggacagatgcttctgcagagatgaatggcctggcttttttgytagcctatgttggctgctccaaccctctcctggcctgagccgaagatctctcctcgagatggagccttgagtccagcagttcttaatcaaaagtaatctt

SEQ ID NO: 16708 - DNA, 201 bp, Homo sapiens
ctaaagtcaaaagatcataagtcaaaccatcataagcccaggactgtctatatttataacacaggagtttatagcagatgctactcttcccctagagagcyagttgttaaatgtttaccagcacaccactggaacaaactaatctaggttttaaaaaattctctttgcctatgctctgtgaagaatgaattacagggaggc

SEQ ID NO: 16709 - DNA, 201 bp, Homo sapiens
tctttgcaggaacatggatggagctggaggccattatcctcagcaaaccaacacaggaacagacgaccaaatactgcatgttctcacttataggtgggggmtaaatgatgagaacacatggacatatagagaggaacaacacactggagtcttttggagggtgaagggtgggggaaggaagaggaccaagaaaaaagcagc

SEQ ID NO: 16710 - DNA, 201 bp, Homo sapiens
tttatcaggacacaatctgatcaacccattgtaagtgaaaaatatcatcagtcaaaactgcatttaacaccatctaaacccttcctaaagtcaaaagatcrtaagtcaaaccatcataagcccaggactgtctatatttataacacaggagtttatagcagatgctactcttcccctagagagctagttgttaaatgttta

SEQ ID NO: 16711 - DNA, 201 bp, Homo sapiens
tggcagatataaagacccaagtcttcgcggtggaatttcttagatggacttgcaggggctggcgttataaagcatgtcatcgtaaccccgtcctcgtctttgtttatttttttttaaagttcttttgttttcattttcccctccttcccaccccttcccccaaccaataaatcaccaaactgttacctagcgggccggtgc

SEQ ID NO: 16712 - DNA, 201 bp, Homo sapiens
atatatttgtacagctgtacaatgtgtgttttaagctaagcattattgccaaagagtctaagttaaattttttctaagtttataaggtaaagttacagtaygtgaagattaatttattgaaataaaaatgtttttaataaattcagtgtagcttaagtgtccagtgttgataaagtctacagtgccatacagtaatgtcct

SEQ ID NO: 16713 - DNA, 201 bp, Homo sapiens
ggtgaggaagctggggtcctgagagcctgggtgactgctggtgctttatgtgaaggtcagtggactgtggtgagtgacaaggtaggaggaaccagtcctgsaagtcccacccacttctgtctcatgtgccctgcagctatgctgacttagtaggggtgatcacattcaaacaacagtctcaccggcattcacaccgcattc

SEQ ID NO: 16714 - DNA, 201 bp, Homo sapiens
ggcagatataaagacccaagtcttcgcggtggaatttcttagatggacttgcaggggctggcgttataaagcatgtcatcgtaaccccgtcctcgtctttrtttatttttttttaaagttcttttgttttcattttcccctccttcccaccccttcccccaaccaataaatcaccaaactgttacctagcgggccggtgcc

SEQ ID NO: 16715 - DNA, 201 bp, Homo sapiens
aatgtcagtgccctcctggggtatccagagttaattagatttgactgcttgggtgggattttttaaatgctactatttgtctctttggggccctctagctkcttcttctctttccattcttctctgctgctgcctcacttgccacctccattctccctgagagacaagtagtatttgggttttgaaaaacagcattgagaa

SEQ ID NO: 16716 - DNA, 201 bp, Homo sapiens
gggtgactttcaatgattgagaaaagtctttgttggttctagggaaagattgttgtgaaaagggaaggtgagcatatttaagtgcattgagcttcatatcraatctatggacactcagagtaatcctttgtcatacctcaggtattttatcttataagtacgtctatggatatcttcgctttgggagatttttgaactgct

SEQ ID NO: 16717 - DNA, 201 bp, Homo sapiens
gggtggggcttgggaatgctatgcccagctaggctccagccacgctccagccacgtgaggcttcagagagaggccctgcctggcacctgtgccaagcatgttttttttttttttttttttgcctgtgggtggttgatttgaatcactgttgcaactctgcataatcttgaggctatatttttgtgtgtgtgctgcattttg

SEQ ID NO: 16718 - DNA, 201 bp, Homo sapiens
tgtctgcaggcttgtcaagtatctctctccttgtgtttacaactttcgttatcatatcccatatatttgccccataatgtccaccattcaaataaccttawtcctgtcccagtctctttctgcccttcttgaaattgaaccatgacttagtgaggaggcttctgtgaagcctattgcttaataaacttgagctatggtggt

SEQ ID NO: 16719 - DNA, 201 bp, Homo sapiens
gtataaagaaaaaaccccctgaaatttagaataatgctattgatgggagttttccatttattcacatcttcagcacatttttattgagtggccattgtgakgttcactctcagcaaggcccatccctcagtcaccagtagtcaaggggtgaaaccagctcacagcttccaggaatcggtgctcactgctagggtgaaatgg

SEQ ID NO: 16720 - DNA, 201 bp, Homo sapiens
ctccctcccagcatcagtaggagaaaccttcagccctgttgccataggtgctaggtcagagttgcttcccaggtgtcacacagggactcaggctgaggaayactccattgtctgccaatgctaccttttcaacaagtacccgtgcagtcgccctggaagaagggaaaggctgcagagggagcactgtcagttaaatgcttt

SEQ ID NO: 16721 - DNA, 201 bp, Homo sapiens
ctcctcagaaaccagggctgacatggcattccttccaccacccagccagagccttctcagaccctggcccaactcccaggagcaaagcccctcaccgagtsgggggagtgacctctagctgaattctcaaacaaagctgtggtgtcccctgagccctcctgccgaggcgtgtgcctgccaccatgtatgttttctacaagc

SEQ ID NO: 16722 - DNA, 201 bp, Homo sapiens
ttcttttcccgtttgtccattttgttttgtttttcttctcctgttttctgtattttgttcgtttttgctctctgggaatgcctattctcctctcctatctktctgcatccttctccccacttccttctcctttccctgccaccccactgccccgctaacccaccccatcccaactcaccaccctccatgagcagtggccgc

SEQ ID NO: 16723 - DNA, 201 bp, Homo sapiens
ggtggggcttgggaatgctatgcccagctaggctccagccacgctccagccacgtgaggcttcagagagaggccctgcctggcacctgtgccaagcatgttttttttttttttttttttgcctgtgggtggttgatttgaatcactgttgcaactctgcataatcttgaggctatatttttgtgtgtgtgctgcattttgt

SEQ ID NO: 16724 - DNA, 201 bp, Homo sapiens
tcttaggtaactgaaacatccttgtagctcctcagccatgctctaacttagtataggtaaatcttctaacactctgatacctgtatacctatatacctatacacacacacacacacacacacacatatacatctatacatatgtacatatctgtgtatatatacacccatatatgcatacatacacacacattttcacaca

SEQ ID NO: 16725 - DNA, 201 bp, Homo sapiens
agagccctgagaattgaggaattcggagacttaatttagctccaccactgatagactaaatattctaatggaaagtgaatttatgaaactgtgtgattcartctgtccatatgccccataggtacatgtggctttgtaataaggcctctttcagcctcattttctcatacataaaatgaggataatagtagctaccttatg

SEQ ID NO: 16726 - DNA, 201 bp, Homo sapiens
tgagacaatacaaggaatggtttttaatactgttcaacatggttttttatgtgatattttgtgtttctacaactgtgtggcttcttgtgagtgagttaccygacaagcagtgttaagtggtgtgtttccttttagaggaggcagagtggtggcctgtgggatggcatatatgggcaagaaggaagcctacagcaaaacagc

SEQ ID NO: 16727 - DNA, 201 bp, Homo sapiens
cttaggtaactgaaacatccttgtagctcctcagccatgctctaacttagtataggtaaatcttctaacactctgatacctgtatacctatatacctatacacacacacacacacacacacacatatacatctatacatatgtacatatctgtgtatatatacacccatatatgcatacatacacacacattttcacacat

SEQ ID NO: 16728 - DNA, 201 bp, Homo sapiens
atgggcaagaaggaagcctacagcaaaacagctatcagtgctcatatgcaaagaaatatcttcaatcagataaggaaatcatgcagaaattcctttaaacrtggaattgttaggagaaaggaaaattcctttaaacaagaaatttttaggagagaggaaaactcataacaaatgttttcacccatgacataggaagaatgg

SEQ ID NO: 16729 - DNA, 201 bp, Homo sapiens
gaatcacctggagggcttgttaaaatacagattactaccccccactcccagagtttctggttcagtaggtctgaagtagggctggagaatttttgttggtyacaatttcccaggtgatattcatgctgctggtcttggacatcatgctttgagaaccattgctgtacatggttttgttatctgcctggcaatgcctttcta

SEQ ID NO: 16730 - DNA, 201 bp, Homo sapiens
caagcccagtggatcccgtcaggttaagagtatctggaagtactagacagtggtttaataacaagcctactgtgccagttctgcattcttttcccttggakgcctctaaacaactgggcagactttgtctccatcctcttttctcaccaccatttaaacctcttcctacattgccatcaaccaagaggttttcaactcctc

SEQ ID NO: 16731 - DNA, 201 bp, Homo sapiens
taagaccatattcttactgcgagtagggaaaatttttaaaaagtccatggctgcttaatatttaaacaaactgttcactgtgtaaactagggtgtttttcygccaaatggggaaactgagcagaaataggtttacaatctagtgttgctcttccatatggctgaatgtgacaaatgatgtcatttgtcatagacatgctag

SEQ ID NO: 16732 - DNA, 201 bp, Homo sapiens
gataggcattcttgttttctgtctttcatagttagaaggattaaggtgtggagaggttaactcatttccctgagatcgcacagtaagagctggaggcctgratcagaactcgtgctcttaatcactgaagctaaatagtctttccataagactttttttcttccttctcaaagttattgggtttacacttttaaaaataaa

SEQ ID NO: 16733 - DNA, 201 bp, Homo sapiens
gtcctgacttaatagcaattgaaacaaatgtaacagattaaacttattttttaaaagtcagaggccctgtgactttatttaattttttgatcttatgtttmaatgactaagctaagtaaaatgacactagaaaattgaaaatagaggaggtggcaaaaggtgttctagacaaatgccaaccaaaagtaagtgaacataaca

SEQ ID NO: 16734 - DNA, 201 bp, Homo sapiens
ggaggtggcaaaaggtgttctagacaaatgccaaccaaaagtaagtgaacataacattaaaaaaattcaaggtgaaaatatcaaaggaaacaatagtgacyatttcactgtgataaaaagaaaataattgaaggacatttaaaacttatgcaccgtcagaataaatgtctgttaaaaacgtaaaggtaactattaggtaag

SEQ ID NO: 16735 - DNA, 201 bp, Homo sapiens
tgaaggacatttaaaacttatgcaccgtcagaataaatgtctgttaaaaacgtaaaggtaactattaggtaaggagatttccaactggttttgaacaaaaygcaacaaaaatttaggggtcttcataaaaaagttcagtatcattttgggcacttaggttgatttacaaagcaggtcctcagaggcttaaacatttataaa

SEQ ID NO: 16736 - DNA, 201 bp, Homo sapiens
cccagtggccaccctctgtaggtgggagcacttgtggtgacatgcctacatttagagtggtcatattctcttctgagggctgggggccgtggtttcttttycttttctttttttttttttttttttttgagatggagttttgctcttgttgcccaggctggagtgcagtggcacgatctcggctcactgcaccctccacct

SEQ ID NO: 16737 - DNA, 201 bp, Homo sapiens
gtaaattggaatgcaaatctgtgccttcctgggacccatagtctagtggaagagagtgacaagaagcaattgcaatacatcaccgcactaatgctctgttkaatgtattctgggagtatggaagaaggagaaggtgactgtgtttgggaaaaaaaaatcacagagaggtgatatttatttaagctggatgttgaaggtggg

SEQ ID NO: 16738 - DNA, 201 bp, Homo sapiens
tccctctgagcccactgcctggtgctgactcagcccaagtgcttacctgctcaccagtcaggagttgaacatatagatgaagttgaacgaatgtctgaggycaggaataggaaaaatgtctcagctcaatgtggtttgcgcatgacaaaaagagtaactggtgatatttctaagaccttggtacattcccactatgggaca

SEQ ID NO: 16739 - DNA, 201 bp, Homo sapiens
tgcatgctgtaacaccaaccctgccatccctctggctggtatctattcagctaagtgactattccctgactgtgcttcctccccatttccttctattttcygttactcgttgactaggctcaccctaaacttcactcacccagttgacattagtatctcctccactacatagcttctcaccaagggcttgaaggcaggggt

SEQ ID NO: 16740 - DNA, 201 bp, Homo sapiens
cttgctggcaggccacggaggcagaagaagatatgggtgacttcaggctggtgcttcggggactcctggtgttacagaccaccacctggctccccattccyacccctctgcatttcccacagtttcctatgcccaccagaaggcaaaaacagaggaggaaataagtgtaatatttgcctttgttacggccatttcagaaaa

SEQ ID NO: 16741 - DNA, 201 bp, Homo sapiens
ggggtttagaatatgctccccaaaatatgtcaccttggcgtactcaatgttttaagctaaaggaatttgaaaaacaacgtgtgcaggaaagactctctggycttcccctgaaagagctcatagaacgctcatgtgagaggtgccctcccatccctggaggaaaggagcatcgtgatccctgaagacagagggacactgaca

SEQ ID NO: 16742 - DNA, 201 bp, Homo sapiens
tcccctgaaagagctcatagaacgctcatgtgagaggtgccctcccatccctggaggaaaggagcatcgtgatccctgaagacagagggacactgacaggkatatgaacaaatggacctcgcaaagtctcccctagtttactgtacttagcccacaccattttgtcttattgtatttttccataattttccactcttcatc

SEQ ID NO: 16743 - DNA, 201 bp, Homo sapiens
gacaagaaaatacaggatagtaaagagtggaagattaacctggggtgatgtcacagactgtgactgggtggatggtccaggaaggctctgcaaaggtagcrtgtgagctgagatctgaaagccaggaagcaaccactatgggaggatggggaagaacattcctagtacagggaacaacattcccagtacagggaacaacta

SEQ ID NO: 16744 - DNA, 201 bp, Homo sapiens
gcagcaaaacagaagtaaattgatgctcatctcccagattagttgagaacggcctaattagctaatgaacagttccagtcctatgttctgaaaggctctgyttctgggcaagccgcagtgcttagcagcagctgctaaaccatgtggacatgctaacaccaagcagaggagcacatgttatgttttgacctgcaaagactc

SEQ ID NO: 16745 - DNA, 201 bp, Homo sapiens
ttaacctggggtgatgtcacagactgtgactgggtggatggtccaggaaggctctgcaaaggtagcatgtgagctgagatctgaaagccaggaagcaaccrctatgggaggatggggaagaacattcctagtacagggaacaacattcccagtacagggaacaactagcttaatgccctaaggcagaagcaagattggtat

SEQ ID NO: 16746 - DNA, 201 bp, Homo sapiens
gtttggtgtggtgggaggagctacgggaggtgggcaggagccacctggtcagggaacacttcggagctcagggtgaggactgtggacttcattgcaaggtrtgagacatgcactggaggcttccgtgcagcggagggatgcctactcagtggtgtgctggagcgggctcatgggagcttctgagagcctcttggcacgtct

SEQ ID NO: 16747 - DNA, 201 bp, Homo sapiens
gtttctgggacttttggctgcttgttcaggttccagttgtcactgcagtgactgaccaactccatgcatgtaaaacccgacagcacttcacctcatgaagktgtacctcccacctcttaccctggagcttccctattgacaccaactcacgagatgcacaggactctcctgggcaactggaaggtggagaggaaattaact

SEQ ID NO: 16748 - DNA, 201 bp, Homo sapiens
ccctggaaatggctgagtttccctgtggcttggagcagagggaaaaagtggaaatgatacctgtgttaagtaacatcaagcacccaggtccactggcatgyctgttaataaaaaaattttttaatgttttcattcatgtatcgtttcaactgaatcacatgtaccctaaaacttaaagtataataaaaataaataaataaa

SEQ ID NO: 16749 - DNA, 201 bp, Homo sapiens
accaaggaccttcatcacctgttgaacatagagagacttcagctggggagaactgaagacctttacagaaacctcaggacatttttattcaaacccatccrtggagttccctcaggaggaaggagcttgggttcagctcctagttgaatcaagtaactctccgccttcatctgtttaattcatttacacttagagtagtat

SEQ ID NO: 16750 - DNA, 201 bp, Homo sapiens
tgcagctgcagcctgagttttccccaggctgctctatttgtgcctgtagcttgatttttcaggctgtctttcattttgaaagaattttaccaaagacaagytttagctgtctgcccaactagtttttccttttctcctccctcaactggatcataacttatgactctgaggctgagtcctgggatagttggatgtagaggg

SEQ ID NO: 16751 - DNA, 201 bp, Homo sapiens
agcccactgtgtacatgcccgaaaagaggaggaaacctttctgtgggagcccactgattacaccaagaacaaaggctgctatgttgggccttacttgcttrtctgtgcagctgcagcctgagttttccccaggctgctctatttgtgcctgtagcttgatttttcaggctgtctttcattttgaaagaattttaccaaaga

SEQ ID NO: 16752 - DNA, 201 bp, Homo sapiens
cagtggctcacgcctgtaatcccagcactttgggaggccgaggcgggcggatcacgaggtcaggagatcgagaccatcctggctaacacggtgaaaccccstctctactaaaaatacaaaaaattagccgggcgtggtggcgggcgcctgtagacccagctactcgggaggctgaggcaggagaatggcatcaacttggga

SEQ ID NO: 16753 - DNA, 201 bp, Homo sapiens
cttaggcaagcacaaagcacagcttctcttgttcgggttactgtggttatgttttgggtaggtcccccacctccctgtgcaagttcccatggagcccactrtgtacatgcccgaaaagaggaggaaacctttctgtgggagcccactgattacaccaagaacaaaggctgctatgttgggccttacttgcttgtctgtgca

SEQ ID NO: 16754 - DNA, 201 bp, Homo sapiens
gcactttgccttggctgagcagcaaggttgggccctgagggtgggaagggaggtagacagtgatgggcatgggatcctttgctgtctggggctaaactccsaacctccaaatcaactttcccaataaagcttaatatctattagggtaagcatatttttggcttttctctgggctgaaaggtgacctcatcttatgggaaa

SEQ ID NO: 16755 - DNA, 201 bp, Homo sapiens
tttgtgtaattccccttatctgtgcagctgcgggcatgtccttaggcaagcacaaagcacagcttctcttgttcgggttactgtggttatgttttgggtargtcccccacctccctgtgcaagttcccatggagcccactgtgtacatgcccgaaaagaggaggaaacctttctgtgggagcccactgattacaccaagaa

SEQ ID NO: 16756 - DNA, 201 bp, Homo sapiens
tcaggctgtggcttcagagggtggaagccccaagtcttggcagcttccacatggtgttgagtctgaggtgcacagaagtcaagaattgaggtttgggaacytccacctagatttcagaagttgtatggaaatgcctggattcccaggcagaagtttgctgcaggggcagggccctcatggagaacctctgctagggcagtg

SEQ ID NO: 16757 - DNA, 201 bp, Homo sapiens
aaatgaaaccactgccaacacagaattgccaatcttgcttccaatttctctgttagtttcagaacatttagggttgaagaggtttttcttgatgtctaacycaaattcctccttcctaaagcaaagactttacaggaaccttggcaaggtttccctatgggtagcaaagctctctgaaacatggactctgaagattaatag

SEQ ID NO: 16758 - DNA, 201 bp, Homo sapiens
gaaactcccctcatctctgtagctgtttgtgtaattccccttatctgtgcagctgcgggcatgtccttaggcaagcacaaagcacagcttctcttgttcgkgttactgtggttatgttttgggtaggtcccccacctccctgtgcaagttcccatggagcccactgtgtacatgcccgaaaagaggaggaaacctttctgt

SEQ ID NO: 16759 - DNA, 201 bp, Homo sapiens
tccaggtggtggtgatggttggtgtgtgctgctcttgggccccagtggtgggtttgtgattctggttctgctgcaggacagtgacactcaccaagctgtgytgggtgtagttgtctcagggaggtgcctgctttcaaaccaaagttcctttgatggggaggactgaccccaggaagactgattgcgtatcaatattactct

SEQ ID NO: 16760 - DNA, 201 bp, Homo sapiens
tacctacctcacagggttgcctttattttttgctgtgttctgtgcctatcatctggttggctgggggctttgggcaagtcattttcttcctctacaaccarggatggggaagcagcttctctctgacctcatcacttcctactctcttgcctacttctcttcagccacactttctataactgtgaaaggggaaagagaagc

SEQ ID NO: 16761 - DNA, 201 bp, Homo sapiens
cagcaggaaacagagagatggagttattaattgtcagtccatgagcccaccctctcaaggtcctaattagcatgctgacagcttcggttttatccagagcyagggcaaggctctggggacactgtggctcagctaggggcatccggcacagagtggagagccctggtgcctttctgggtggggtggaggggcgcttgcaag

SEQ ID NO: 16762 - DNA, 201 bp, Homo sapiens
catccagcatcatgtctgctgcatagtatatactaattaggagaatttgatgaacaaatggagaagttttcctcccaggagcatgcttacaaaggaaacatttttttttttttttttgccttgcctaggtagcacatagcccacctttaagtttttttttttttttttttgagacggaattaagtttttaaatgattttta

SEQ ID NO: 16763 - DNA, 201 bp, Homo sapiens
tattccagcaaccctatcaatggatgttcccagttgctttgcagttaccagctgtgctgtagtaagcctcccctacatgcctttaggatgtgcactttcayttctgtagggtcaagtcctagaagtgggactgtggacaagtctttcccacgctatgccctcactctccggaggactggcacttctctcaacacccctcct

SEQ ID NO: 16764 - DNA, 201 bp, Homo sapiens
tgattagatcacgttggtcaattttggcttttgttgccattgcttttggtgttttagtcgtgaagtctttgctcatgcctgtgtcctgaatggtattgccyaggttttcttatggggtttttatggtttggggtcttacgtttaagtctttcatccatcttgagttaatttttgtataaggtgtaaggaaggggtccagtt

SEQ ID NO: 16765 - DNA, 201 bp, Homo sapiens
ctgccctgagaggtagctctttgagaacaattgagtactcctgggaaggaggaagcagctcaaataaaaagatctttagatccctttcttttagaattctytattggagctaagagaccagggaattttatttgattattctgataatagttttcccaagcttttcagggtgtagggctgagagtacagagaggtttctag

SEQ ID NO: 16766 - DNA, 201 bp, Homo sapiens
gctaacaataacaattctacatctagaaaactctaaagacttcacgaaaagtttcctggaactgatgaacaacttcagtgaagtttcaggatacaaaatcmatataaaattcagtagcatttctatacatcagtagtgttcaaactgagagccaaatcaagaacacaatcccctttacaatggccacaaaaaataaatacc

SEQ ID NO: 16767 - DNA, 201 bp, Homo sapiens
taaaattcagtagcatttctatacatcagtagtgttcaaactgagagccaaatcaagaacacaatcccctttacaatggccacaaaaaataaatacctagsaatacatctgccaaggagatgaaagatctctaccaacaagaaaaactataaaacactgctgaaagaaatcatagatgacacaaaaaactggaaaaatatt

SEQ ID NO: 16768 - DNA, 201 bp, Homo sapiens
gtttcaaaggcaggatgcaggttgaaaacatcagtttctgtctcttctagtgcttttttttttttttttttaatttcaggactagccacatgtaagttacwaggtttacaaaagccagccaaggctaaagggtgttgccctgctggggtgggaattgctagtggcatgactgtccctcattacctctggatttgacattgc

SEQ ID NO: 16769 - DNA, 201 bp, Homo sapiens
tctggatttgacattgcttttcaggagtggccggagtggatacccttcgatgagtccactctctccccaggatatattccagttggcttgtatggaccccrccgatgacggacagttccaagaacggcagtctctggtgaatgcatgagttatatgacctcaaaactacttccttggtttcctgatccctctcactaattt

SEQ ID NO: 16770 - DNA, 201 bp, Homo sapiens
actccaattcaccttacttccctgtatgcaagagccgtatgtgaggggacctacaggttatcctccctcagaggagccaggtttggggctggaggagcaayctaaaattaaggatgacagaattgggtaaggagaagtatcgggaatgaaacacgacttggatttgtgtcactgtacaatctcttatgggaatctagtcag

SEQ ID NO: 16771 - DNA, 201 bp, Homo sapiens
ccccagcccctcattcatttcttctttcctagacatgacagagaaactggcaggacttacagtgggtgctggactccctcagattcagtctgcagctctatttttttttaaacgtcttgctctgttgcccaggctggagtgcagtggcatgatcacagctcactgtaacctcgaattcctgggctcaaacagtccttccac

SEQ ID NO: 16772 - DNA, 201 bp, Homo sapiens
tacacatgggcaggcccagcacagacatccaggaagggccaggctgtgcttttgcctgtgtctcataaagcacagtcctcttctcactggtgcttctgctyctcatccccacaggagaagacagaaccttatttcattgggatcttttgctttgaagctgggatcaaaattgtggccctggggttcatcttccataagggc

SEQ ID NO: 16773 - DNA, 201 bp, Homo sapiens
tgattttagaggtggttccataggaaagagaagcttatatatttgtttttctacttcagtttaaaattgggataattatctagatagaccctcattcaaamacacacacacacacacacacacacacacacacacacacacacacacacacacacccttatattagcaagtcctcacagagaatatctcagtcagctgttt

SEQ ID NO: 16774 - DNA, 201 bp, Homo sapiens
tttaggattgtattagagacccactgtaaggactgaactttaaccaccagttccacttcaacctaaacagtgctacctggagttatttcctgtgtttgaatttttttttttttgagacagagtttcactctgcagcacaggctagagtgcagtggtgtgatctcggctcactgcaagctctgcctcccgggttcacaccat

SEQ ID NO: 16775 - DNA, 201 bp, Homo sapiens
tcttttgctttgaagctgggatcaaaattgtggccctggggttcatcttccataagggctcttacctccgcaatggctggaatgtcatggacttcatcgtsgtcctcagtgggtaagtccattttctctctctgtctgtgtgtgtgtatgaagggggttggtatcatgaggtggctgggggcagggaacctggggtggaaa

SEQ ID NO: 16776 - DNA, 201 bp, Homo sapiens
tacttcagtttaaaattgggataattatctagatagaccctcattcaaacacacacacacacacacacacacacacacacacacacacacacacacacacacacccttatattagcaagtcctcacagagaatatctcagtcagctgtttactttctacatagcatggatatctaaatgtatacattgtgctaacacttca

SEQ ID NO: 16777 - DNA, 201 bp, Homo sapiens
cttaattcccttctgctggtgccaccttccccccaaaaagttatgcagccatatttatgatagagttcctgagccatattgttaaccaagatcctatattstgtgtagcataaatagaaacagaatagattgcattgtttgacatatgtgtctctagtggcaccttgcaaacttacctgcttacaaaataggtaatttgct

SEQ ID NO: 16778 - DNA, 201 bp, Homo sapiens
cgttctcctgggcctggagctctcatttgaaggcagttaaactcgtgcattcttgtgcttgtgcatgagtgtatgtggaagagggaggtggggtgaaaatycccaggtatgttttcaaagcagaggtggatatggcataaatgcgaactctatagatttacaagaattgagaattaaaggaactgtttacatttccattct

SEQ ID NO: 16779 - DNA, 201 bp, Homo sapiens
cttcagtttaaaattgggataattatctagatagaccctcattcaaacacacacacacacacacacacacacacacacacacacacacacacacacacacacccttatattagcaagtcctcacagagaatatctcagtcagctgtttactttctacatagcatggatatctaaatgtatacattgtgctaacacttcaag

SEQ ID NO: 16780 - DNA, 201 bp, Homo sapiens
ctccagacagactccaggtagggaatgcatgctgtctctttctctgtgtctgtctccccatctcctagaggacagagtgccagcgacctctggacaggggyagggctccagccaaggtgcccctgagccagggtcaacatagaatttcctgccccgtgaagggctggcaccagctagcatccccttggctccacatgagtc

SEQ ID NO: 16781 - DNA, 201 bp, Homo sapiens
tcctgcccacttccatcccacatcccctcttcagatgagtgcagccagctctttaacgtgttagcttcttcctccctgctcttctgttgtccttttcttagtctccctaatccttccctgttttcattttacattctgttctgaaatacaagacttggggagtttgaggtagatgccacagagggtagtacgtggtgttgt

SEQ ID NO: 16782 - DNA, 201 bp, Homo sapiens
agctagacagccattctcatcctggaaacgctggttttaagggagaggccagtcttcttgtgtttgctgcacccatcctgacttggaaggaaggtctttgktgactccatgaatggcacccaggggtccagtcttcaagttccattgctttctctggcctgtggctcatgactaattccaccccaaccttgtctcagactg

SEQ ID NO: 16783 - DNA, 201 bp, Homo sapiens
ttttgagatcctcagaggcctagggttagcgtataccaagaatcctggtgagaggcgttgccatgccttggggtgaattcttccccactagctctctcacycagcctacaagtccttctctcatagatcccagagcaatgggcaccgtccaggaggtacaggagaggactttatgatgcaggaaagaaggaagaagtgggt

SEQ ID NO: 16784 - DNA, 201 bp, Homo sapiens
cagagggtagtacgtggtgttgtggttgtggtgtgtatgagagactcattctgaccaagaccttcttagaactttgtctattagactctgacctccagtccttcttctccaataagcaaattcaagtttggggtgggatctccctactgggaatctgatcaggtcaaagtttgactagctagtactgcaaataaaggagga

SEQ ID NO: 16785 - DNA, 201 bp, Homo sapiens
cctgcctgaattgccacactgatgcttctggtgccacctcttagaaactagagggctagggagctgggtgatgcagtttgtagggcctcacatctcagggmacagagaagggtggaaagtaggtgagggaggggcaggtaagtggagaataaccagtgtggatgggtattatttgggaagacagggaggagcgaggaacga

SEQ ID NO: 16786 - DNA, 201 bp, Homo sapiens
agagggtagtacgtggtgttgtggttgtggtgtgtatgagagactcattctgaccaagaccttcttagaactttgtctattagactctgacctccagtccttcttctccaataagcaaattcaagtttggggtgggatctccctactgggaatctgatcaggtcaaagtttgactagctagtactgcaaataaaggaggag

SEQ ID NO: 16787 - DNA, 201 bp, Homo sapiens
atgaccaaaccatgattgtcaggcttggaagactgggctttatcctgcagacaaggggggctacagcagttgtttccacagaggagatccattatgaaaastgtctggagaaatggtttgggcagaggtatgtgagtagagggaggcaaggaatgaccagaacactgttgtgaccaccggtgagaatggagagcgctgggt

SEQ ID NO: 16788 - DNA, 201 bp, Homo sapiens
attattactgcaactcatgaatgaccgtcagaggtttctgagcctacagggctggggcaggggtgtctcctgaccatttcaatcttctgccacagcctggrccacacagacagctttagcatcagaagagatggccacacccagagctgggcccccagtatccacaaaggaaagttcagcttaggaagaagaaatggggag

SEQ ID NO: 16789 - DNA, 201 bp, Homo sapiens
cttggtatgcagggcttctcatgagccactctgcacattgcgccagctttccttgaccactgtaatcactgtctctccagctgcttcagtggctgctgatscctgaaggcaccatcctcttccaggcctccgtgcctttgcacttgctgcttttccacctagaatgagtctggctttaagattgtactcagaggtcacttc

SEQ ID NO: 16790 - DNA, 201 bp, Homo sapiens
tgtgcatctttctttggccatttctggaaagatgtccataacatctctttcacgctgcagagtattcctcagcatgactgaaccacagtttattccagcarccctatcaatggatgttcccagttgctttgcagttaccagctgtgctgtagtaagcctcccctacatgcctttaggatgtgcactttcatttctgtaggg

SEQ ID NO: 16791 - DNA, 201 bp, Homo sapiens
gccatgtaataggctgcaaaaagtagcagctctgcttcccatctcacttggggcatggggagaggaggattgggtttagggaggaagggtacaggtgtgargggcacaggtatgaggtgcataggtatgagagactcaagtgtggggggcacaggtatgggggcataagtatgagggacacaggtgtgaagggcacaggta

SEQ ID NO: 16792 - DNA, 201 bp, Homo sapiens
agccaaaggcgttttcctcttggatgtgaggggatgggtgaagacacgtgcagaaaaggaagtgctcattgtggaggaggtgaacataattggaggaattygctttggcctttttggctgaaaaaaatatttatgaaattgctgtacacccccgctcccccccccgaccccaagcagagttagacacctatagaattccag

SEQ ID NO: 16793 - DNA, 201 bp, Homo sapiens
gattgtgagagtagcctaatagagtagttttgtttggttttcttacttgacccaggggtgttattttcttggcctaagtgttcctgaatcccgctgaacadgtaaattcagcccataaatccatgtcacacacaatcctgagttttgatttctcagggttttgctttttctcattcactcagagacagaagcttccttgtt

SEQ ID NO: 16794 - DNA, 201 bp, Homo sapiens
agggaggaagggtacaggtgtgaagggcacaggtatgaggtgcataggtatgagagactcaagtgtggggggcacaggtatgggggcataagtatgagggrcacaggtgtgaagggcacaggtatgagggacacaggtatgagggtcagggcatgagggagacaggtgtgaggggccaggtgtgatgggcacaggtatgag

SEQ ID NO: 16795 - DNA, 201 bp, Homo sapiens
tagcgccagctgctcaatttgttttccctctttttcagaagagatattttttcttcttttatggtgcccccaagtggttgtttctgtgtattgcagccgcrgtctcactgggatgctttccgctgtgtagctggaggggctggggcagcctggtggtcagcactcacatcacaagaaaggaaagcgaagccaggaggagaa

SEQ ID NO: 16796 - DNA, 201 bp, Homo sapiens
cttagtgcttcagccagagggtgaggagggagggggagtggaggaggctttccagtgagtcatccctcctgcatgttaggagttttggttaaaagatttasagagagagagagtgagagagagagagtgagagagagagagcgtgagagaaagaaagagagcaagaaagcgagagagagagcacgagagcacacaagtgag

SEQ ID NO: 16797 - DNA, 201 bp, Homo sapiens
acagtgctgggagcaagggctgggggagatctgttgtcccagttcttcccttctaaggcaggccttgggggaggactctcccccaagactctgcagcctgktgctcaagccggatcggcccgttctgtgcttccttttgtggcaccatcagagtctcctccctgtttggaggctcaggtgaatcagtcccctctctcccac

SEQ ID NO: 16798 - DNA, 201 bp, Homo sapiens
acttttctttgtaattattctttatttgtttgatccatgtccatttttcttttttttacagctccagaatttgcaatatgaaaatagagattatttaaacaaaggaaagtagcataactggaaactttgaattattctattaatacttgactacatatggaagaatattattgaaaaatatgatccagtgatggggtggtt

SEQ ID NO: 16799 - DNA, 201 bp, Homo sapiens
ggaagaatatttttggggcagtgtgaagcaggcgctgtgagcagggctttgaggcaggaatgggcatgacacgtttgtttatgtacctcatactatggtaygtgaggagatagtgttggaaagataggttgaattctgattgccttgaattgtcaggctaaggtgtctggccattttataggcagtggggagccaccgaag

SEQ ID NO: 16800 - DNA, 201 bp, Homo sapiens
tattgtgtactaagttttataactttagcaagtgggcatgtcacaatgttttactaatactttaatatagttctctccagcttaaaacatttttcatacayatgatctcatctgagcctcacaatgacctcatgaattagctgttattatttataatttacaggagagaaaaatgagctccgaagttagaggtggtactag

SEQ ID NO: 16801 - DNA, 201 bp, Homo sapiens
atcctcctggatattgagggcatggtgccaggaacacttggcctctgatcaaattcaatttgaggatggtaagcatagcatttccataggcttagtgtcaytgtatagtttcttctcttgataaacaatttagaattaccctattgctgtcctgaagggcagcatgggttttagaaagagccgcagattggaagtcagatg

SEQ ID NO: 16802 - DNA, 201 bp, Homo sapiens
gtatgccgccagcctgctgaggcagaaccacaaaggaaaggggtgaggtgacagcatgagagtgaagttcatgaagctttctggcctgcaaggttatacartctagtataatctagtgtaaaaagctacatgatttatgtcatcacccatcttgttcattatagtatcctcagtgcctaaaacagtgcctggcacctggaa

SEQ ID NO: 16803 - DNA, 201 bp, Homo sapiens
ctctgccccacttcagggctgcccaggatctgcatgcactttgtagagatggaaatttttcctcccttctgtctcctgcctttcagcttctcctgacttaygttctttagacaggatccctttggctctaggacaggggcagcctggtcctttcccagggcttggatttactgtagtgggaaatcaggcagggttctctgt

SEQ ID NO: 16804 - DNA, 201 bp, Homo sapiens
ccctgctcacgtgtgtgtacactgctcaggtgtgtgtgcattttgctcgggtgtgtgtgccctgctcagctgtgtgtgccctgcacagatgtgtgaacatygctcaggtgtgtgtgccctgctcaggtgtgtgtacactgctcaggtgtgtgtgcattttgctcgggtgtgtgtgccctgctcagctgtgtgtgccctgca

SEQ ID NO: 16805 - DNA, 201 bp, Homo sapiens
catttttcttggaagctacatctgcatagggagataattttattttcttatggcactttcctctgcagtggataccatactctttttaaaaatgctaatgygatttaaaatgtgatgttacattctatacgattcctcgttttcattttcttttttgctcatctaatagatcttctctggcagttggctgttctgagtgcc

SEQ ID NO: 16806 - DNA, 201 bp, Homo sapiens
acggacacacaaacacacacacatacatacaagcacagatattttgcactggagtgcaagcttcttgaaagcagggcctttgtcttaccttcagggtccaraacagtgcctagtgtgcagttgactcacaataagtgtttgctgaaagaatgatgaagtaaacatattgaggggaattgatatccattctaatcagctaag

SEQ ID NO: 16807 - DNA, 201 bp, Homo sapiens
tgtgtgtacactgctcaggtgtgtgtgcattttgctcgggtgtgtgtgccctgctcagctgtgtgtgccctgcacagatgtgtgaacattgctcaggtgtrtgtgccctgctcaggtgtgtgtacactgctcaggtgtgtgtgcattttgctcgggtgtgtgtgccctgctcagctgtgtgtgccctgcacagatgtgtga

SEQ ID NO: 16808 - DNA, 201 bp, Homo sapiens
gagggtagtacgtggtgttgtggttgtggtgtgtatgagagactcattctgaccaagaccttcttagaactttgtctattagactctgacctccagtccttcttctccaataagcaaattcaagtttggggtgggatctccctactgggaatctgatcaggtcaaagtttgactagctagtactgcaaataaaggaggagg

SEQ ID NO: 16809 - DNA, 201 bp, Homo sapiens
cctgttggctttgcttttgatatgaagtgtgggtaatgtttcatgtggaaaccaggccatgacttgttgtggggaccatttataattgggatgaagcctgraaaatgagttggagtgaaggaatttgacagaaatgaaatgacttgaggatagagacaaaaatatcctcaatgtgatagttttgtctgttggtttgcatgt

SEQ ID NO: 16810 - DNA, 201 bp, Homo sapiens
tgtacactgctcaggtgtgtgtgcattttgctcgggtgtgtgtgccctgctcagctgtgtgtgccctgcacagatgtgtgaacattgctcaggtgtgtgtrccctgctcaggtgtgtgtacactgctcaggtgtgtgtgcattttgctcgggtgtgtgtgccctgctcagctgtgtgtgccctgcacagatgtgtgaacat

SEQ ID NO: 16811 - DNA, 201 bp, Homo sapiens
aatgtattggtatagaactgatacacattacttctagtcacatcccattgacaaggaacagccatgtggctcagcctagttgcaggtgagactgggagatytaatccctaattgggcagctgccttctagcaacaaccttgccctgtgggaaggagagcatcaattttggaggacagtaatgatctcttcattatctatgt

SEQ ID NO: 16812 - DNA, 201 bp, Homo sapiens
gctaatgcgactgagaactaaattttaaattttactgacttaattttagttaagtttaaatagccacatatggctagtggctactgtacaggatggcacargcagagggaatacatgatgagtcagaaagcttaagctcccctttggttctgtcatttgttagccttgtaactgggcagggtctccttggcttggtatgca

SEQ ID NO: 16813 - DNA, 201 bp, Homo sapiens
tcaggtgtgtgtgcattttgctcgggtgtgtgtgccctgctcagctgtgtgtgccctgcacagatgtgtgaacattgctcaggtgtgtgtgccctgctcasgtgtgtgtacactgctcaggtgtgtgtgcattttgctcgggtgtgtgtgccctgctcagctgtgtgtgccctgcacagatgtgtgaacattgctcaggtg

SEQ ID NO: 16814 - DNA, 201 bp, Homo sapiens
ttttactccccatctttccacttctgatatggtttggttgtgtccctacccaaatctcaacttgttgtatctcccacaattcccacatgttgtgggagggrcccggggtggggggggcagtaattgaatcatgggggctggactttcccatgctattctcatgatagtgaataagtctcatgagatctgctgggtttatca

SEQ ID NO: 16815 - DNA, 201 bp, Homo sapiens
tgctcaggtgtgtgtgccctgctcaggtgtgtgtacactgctcaggtgtgtgtgcattttgctcgggtgtgtgtgccctgctcagctgtgtgtgccctgcwcagatgtgtgaacattgctcaggtgtgtgtgccctgctcaggtgtgtgtacactgctcaggtgtgtgtgcattttgctcgggtgtgtgtgccctgctcag

SEQ ID NO: 16816 - DNA, 201 bp, Homo sapiens
tgtgggaggggcccggggtggggggggcagtaattgaatcatgggggctggactttcccatgctattctcatgatagtgaataagtctcatgagatctgcygggtttatcaggggtttccacttttgcttcttcctcatttttctcttcctgctgccatgtaagaagtatgtttcacctcctgccattattctgaggcctc

SEQ ID NO: 16817 - DNA, 201 bp, Homo sapiens
caggtgtgtgtgcattttgctcgggtgtgtgtgccctgctcagctgtgtgtgccctgcacagatgtgtgaacattgctcaggtgtgtgtgccctgctcagrtgtgtgtacactgctcaggtgtgtgtgcattttgctcgggtgtgtgtgccctgctcagctgtgtgtgccctgcacagatgtgtgaacattgctcaggtgt

SEQ ID NO: 16818 - DNA, 201 bp, Homo sapiens
ttccagctgtggctgaaaggagccaatgtacagctcaggctgtggcttcagagggtggaagccccaagtcttggcagcttccacatggtgttgagtctgaggtgcacagaagtcaagaattgaggtttgggaacctccacctagatttcagaagttgtatggaaatgcctggattcccaggcagaagtttgctgcaggggc

SEQ ID NO: 16819 - DNA, 201 bp, Homo sapiens
tgctcgggtgtgtgtgccctgctcagctgtgtgtgccctgcacagatgtgtgaacattgctcaggtgtgtgtgccctgctcaggtgtgtgtacactgctcrggtgtgtgtgcattttgctcgggtgtgtgtgccctgctcagctgtgtgtgccctgcacagatgtgtgaacattgctcaggtgtgtgtgcactgctcaggt

SEQ ID NO: 16820 - DNA, 201 bp, Homo sapiens
gcttaggaagggaggtgggaaggaggaattctggaacaactcatgcaggtggcacaggatggagatatttgaactgtcatctatccagttaaggacacaayaatgcagtcatctgaacatcaagtatctgactcaataactaataattgccctttccttctggtacagtgaatggtttgataatctctagggcttctttca

SEQ ID NO: 16821 - DNA, 201 bp, Homo sapiens
gcaacacctttgttttggccaatttttcccatttggaatggctgtattcccccaatacctgtacctccattgtatctgggaagtaactagcttgattttgrttttacaggctcataggtggaagggacttgccttgcctcagataagactttggactgtggacttttgggttaatgctgaaatgaactaagactttggggg

SEQ ID NO: 16822 - DNA, 201 bp, Homo sapiens
aaatctcacaagatctgatgggtttatcggggtttccacttttgcttcttccttatttttctcttgccgccgccatgttaagaagtgcctttcacctcccrtcatgattctgaggcctccccagccatgtggaactgtaagtctaattaaacctctttttgtttccagtttcaggtatgtctttatcagcagcatgaaaat

SEQ ID NO: 16823 - DNA, 201 bp, Homo sapiens
gctttgggggaccctgctccccaaccaaagtcagctgccttgtagggaggtcacataaccactacacagattacattcatgaacctcacagaaccctcatrtttcatgtgtttcatgtctagtgaagtgacttgggcaaacaggtgggcagggacagcatctctggagaaatgtaggagaggaccaggacacctgtgcgtg

SEQ ID NO: 16824 - DNA, 201 bp, Homo sapiens
ataaaactttttgataactgatagtgccaatcttcccctccatttgtctttaaaactggctaatcttagccattataatttcatatgaattagaactaacttgtcaaaatcttcaggttttgtttggaaatgcagtggatttattgactacttttggggaaaattaacattttcacaatgttgaatcttaccaatatttct

SEQ ID NO: 16825 - DNA, 201 bp, Homo sapiens
taaaactttttgataactgatagtgccaatcttcccctccatttgtctttaaaactggctaatcttagccattataatttcatatgaattagaactaacttgtcaaaatcttcaggttttgtttggaaatgcagtggatttattgactacttttggggaaaattaacattttcacaatgttgaatcttaccaatatttctc

SEQ ID NO: 16826 - DNA, 201 bp, Homo sapiens
attctaggtactttataaatattaattaatttatccatgtaataattgattgaagctggtaccattattaccattattgtccccatttttgcacttggggkatagagagtttaagtcacttgcccaagatcataatgtcaaccacctcttaatgagcctccctgcctctgcccctccctgctagactctgtttccccaact

SEQ ID NO: 16827 - DNA, 201 bp, Homo sapiens
tgcaccctgacctcttggttccttagccccttctgtttggtgactttgccttcttgcttcctgctgacagctcacctccatggtctgcctggacattgtcrtaactgcattactccataatctcggtttcaagcatcccactgtgtgatcaccccctcttttctctccactccctctagtgctcagttcccaagattcttt

SEQ ID NO: 16828 - DNA, 201 bp, Homo sapiens
gttgccaccatctacaaactcccaagtcacttgcttcattccaggaagaatgggttagccctgggtttactgcctctcttccccacgtcttcagctgctgkcagttcttagtgatttcagtatccatgtagatgacccttcctgcaccctgacctcttggttccttagccccttctgtttggtgactttgccttcttgctt

SEQ ID NO: 16829 - DNA, 201 bp, Homo sapiens
caaagtggtttcatggtcatttcctcattttggccaggtcccttcattctcttgcatttaatcctctccgaagtctttttctgatttctctggccatcgcrttcctcctcactctcaggttgggatgggtttttgtgttgatttgttcttttcaggatacatatagctttaattgattttgtagtgataaatgaacacatg

SEQ ID NO: 16830 - DNA, 201 bp, Homo sapiens
attaatatagccatacgacattggggctgacccagtgtcacagcagcatatatgatggcagtacatttagttaaatatttgataaatcattcttttggaartgaatatagtatgaggaagctgggttgacccagtgcccttggcagcaaatgtgttggccttgggaatggtgtgacgggcaggccttcctgggcttttgtg

SEQ ID NO: 16831 - DNA, 201 bp, Homo sapiens
gtatgagaatctgaatcatttagaaatgttatgattctatctagaagaaaagtgttgtataagtcactacagaagaacaacaaaaaaagaaaagtattgtratgtgtatataataagtttgtgtaaattcttggtcctgctcagctctatatgtggcagaatccatttgaaatttcttgtctagtccatttatttttgttt

SEQ ID NO: 16832 - DNA, 201 bp, Homo sapiens
aaactttagtgttctttggcctataagttgagggtgtgcatggtttagaaagcgcatttatgtacattgcttcatcttgtcctcataatgccatagaaaasaccttgctagcctcattttacagatgaagaaaccgaggatcagagagggcacatgaattgctagcaggcactagatccaggacttgagaccacatctcct

SEQ ID NO: 16833 - DNA, 201 bp, Homo sapiens
tgaatgactatgatagtacccctgtgagatagtttaaaagaagtgttgggccgggcgcagtggctcacgcctgtaatcccagcactttgggaggccgaggygggcggatcacgaggtcaggagatcgagaccatcctggctaacacggtgaaaccccctctctactaaaaatacaaaaaattagccgggcgtggtggcggg

SEQ ID NO: 16834 - DNA, 201 bp, Homo sapiens
ggtaaagaaggcatgtcactttaactgtcagcatagcatggtttgatgtgtagagagtggatcagagttccagctgatttcttccttaaatggcttgtttkttcactcattcactcaccaattcattaattcagtgaaactagtattgtgttggtgaaggcagaaggcaatgctgggaccgagaaatgtggacgttattat

SEQ ID NO: 16835 - DNA, 201 bp, Homo sapiens
gactatgatagtacccctgtgagatagtttaaaagaagtgttgggccgggcgcagtggctcacgcctgtaatcccagcactttgggaggccgaggcgggcrgatcacgaggtcaggagatcgagaccatcctggctaacacggtgaaaccccctctctactaaaaatacaaaaaattagccgggcgtggtggcgggcgcct

SEQ ID NO: 16836 - DNA, 201 bp, Homo sapiens
tgtaacccatctcagcttggctttcctttatgaaacttcatttatgaagtgaaggtaaaacctgctgtagctacctccaccaggtttcatgacaagcaaakaggatagtgatgatgttgataatgacagctcccatttaaccaggagctcatgtcttattttaaatgcagaaggcttcatattctatattggcacttgcac

SEQ ID NO: 16837 - DNA, 201 bp, Homo sapiens
ggcgtggtggcgggcgcctgtagacccagctactcgggaggctgaggcaggagaatggcatcaacttgggaggcggagcttgcagtgagccgagattgcaycactgcactccagcctgggcgacagagcaagactccatctcaaaaaaaaaaaaaaaaaaaaaagtgttgttcaatccattttatagatgatagtttctaa

SEQ ID NO: 16838 - DNA, 201 bp, Homo sapiens
ttattttaaatgcagaaggcttcatattctatattggcacttgcacatattattttaaatatagaaatgtaaggcaatagtgatattatctccattttacrgatgaggaaaccaaaacttaaagaggcaaagtcacttgctcaaggtcaaatagttactaaggggagagattggccctttaattctattatcaacaattct

SEQ ID NO: 16839 - DNA, 201 bp, Homo sapiens
tcaaaggaaaataaccaacatcccaagaaatctataagaaagctttttcttttaagttcagacccagatggtgtcttctctccggtgtgatatgtcatccmagagggaatcctgtgtggctttgtcctggggcctcctatgtctatgtccccagtgcagacccagaacaccagaatggaagcaacgggatccctctgtgtg

SEQ ID NO: 16840 - DNA, 201 bp, Homo sapiens
gaaacctattgcaaattttaaaactatggtaaatttaaaattttccattagttataattttgcctcaagagagaagtttactacatatcgcacataggatrtatcttatttcctatcagcagcatatctaattttatcaaaattagtcaaatcctgctacagtcattacccataagaacaacaaagaagttccaagagtaa

SEQ ID NO: 16841 - DNA, 201 bp, Homo sapiens
agtggacattaaaacttacccattaggctgggcatggtggctcatgcctataatcccagcactttgggaggccaaggctggtggatcacttgaagccaggwgtttgagaacagcctggccaacatggcaaaaccatatttctacttaaaaaaaaaaaaaaattaagccttgtgtgggtggcgtgtgcctgtggtcccagct

SEQ ID NO: 16842 - DNA, 201 bp, Homo sapiens
gccaccctctgtaggtgggagcacttgtggtgacatgcctacatttagagtggtcatattctcttctgagggctgggggccgtggtttctttttcttttctttttttttttttttttttttgagatggagttttgctcttgttgcccaggctggagtgcagtggcacgatctcggctcactgcaccctccacctccaagat

SEQ ID NO: 16843 - DNA, 201 bp, Homo sapiens
ttctctcttgctccttgaacaggccagtgtgtcctgaacagtgctcctggcttccctccacttggtgaggtagagacccaggctccttctatctggtagcyctgctgtcctctatgatctcgtggtttatgtcccttcaagagaagtggaaagagagagtaagaataaggcatactccttaaatgtattggtatagaactg

SEQ ID NO: 16844 - DNA, 201 bp, Homo sapiens
cctataatcccagcactttgggaggccaaggctggtggatcacttgaagccaggagtttgagaacagcctggccaacatggcaaaaccatatttctacttaaaaaaaaaaaaaaattaagccttgtgtgggtggcgtgtgcctgtggtcccagctactcaggaggctgagacatgagaatcgcttgagtttgggaggtggt

SEQ ID NO: 16845 - DNA, 201 bp, Homo sapiens
ccaccctctgtaggtgggagcacttgtggtgacatgcctacatttagagtggtcatattctcttctgagggctgggggccgtggtttctttttcttttctttttttttttttttttttttgagatggagttttgctcttgttgcccaggctggagtgcagtggcacgatctcggctcactgcaccctccacctccaagatt

SEQ ID NO: 16846 - DNA, 201 bp, Homo sapiens
cactgtgttgcccaggcttgtcttgaactcctgggctcaagcagtcctctcacctcagccccacaaagtgctgggattacaggtgtgagccaccatgcccsgcttgacttgacttaaattatcttagattcaaaataaatagttttggtttcttggactattacacacatactttgtgcaaaatcgcagtgtgctctgcag

SEQ ID NO: 16847 - DNA, 201 bp, Homo sapiens
tggccaggctggtcttgaactcctaacctcaggcgatccacccaccttggcctcccaaagtgctgggattacaggtgtgagccaccacacctggcctgtgrtttctttttaaaaatcagattgtagctactttctgtccagaggggattcatcacaacatctagcctagtgagggtttgtttctcttttttctgtccagtg

SEQ ID NO: 16848 - DNA, 201 bp, Homo sapiens
tgcatttctaataagatccctgctgatgctgatgctgctgatgggtgcgtgtgtcgggaggggaccacactttgggaaccactgttcactagggtttcagkttcctgagtaagagcttaaagaatgaacatgcaaatggccaataagcacaggaactgatgttcatctgctatggactgaatgttcctgtccacaaattca

SEQ ID NO: 16849 - DNA, 201 bp, Homo sapiens
tcacaggagggcatcccactgaatctcactaacttggaacagccaagaacctgggccagaaatacagtgaatgggtgagcagggcagccaggaaacaaggaaacagtgctgttgaacatcaagtcctgtcgattccacctttgttaactctctactctggtctgtgctgtcgtcctgcccctggtagattcaggagtactg

SEQ ID NO: 16850 - DNA, 201 bp, Homo sapiens
catcaagtcctgtcgattccacctttgttaactctctactctggtctgtgctgtcgtcctgcccctggtagattcaggagtactgcaacatcctcccttgrtttcccacccaccctacatgctgctaccaagagttctttctgaatgcaaatgtcactttatctctctcctctctaaacccctttagtagttcctgttgct

SEQ ID NO: 16851 - DNA, 201 bp, Homo sapiens
gtacagcaacctttttgaattgttatgaaggaaaaacagcatgtaaagtacttagtccgatgcttggttgtttttctccttgatgtctggttcctcacctwcaggagcctgtcacttgctatcacttatagtttaaccaaaacattagattgtgaatctaacaatagaagcctgcaacttcttgtctaccgagaaagtgta

SEQ ID NO: 16852 - DNA, 201 bp, Homo sapiens
tttgccttaattttctatctgaggcttcttagagcctcctggttagaggtaggtatactttcccctctgttcccataacactttttttttcttttttttctttttttttttttgagtcagggtctcattctgtcacccaggctggagtgcagtggtgcgatctcagctcaccgcaacctctgcctcccgggctcaagcgat

SEQ ID NO: 16853 - DNA, 201 bp, Homo sapiens
tgtctggttcctcaccttcaggagcctgtcacttgctatcacttatagtttaaccaaaacattagattgtgaatctaacaatagaagcctgcaacttcttrtctaccgagaaagtgtacaagaactgctaactcatgcccccatgcctagcaacatggctttctcaactttgaaaggattagagtcatccgttggtcttag

SEQ ID NO: 16854 - DNA, 201 bp, Homo sapiens
ccatttttacgatattgattcttcctatccatgaagatggaatgttttttccatttgttcgtgtactttcttatttccttgagcagtggtttgtagttctccttgaagaggtccttcacatcccttgttagctgtattcctaggtatcttattctttttgtagcgattgtgaattgggagttcattcatgattcggctctc

SEQ ID NO: 16855 - DNA, 201 bp, Homo sapiens
tcattgtggaggaggtgaacataattggaggaattcgctttggcctttttggctgaaaaaaatatttatgaaattgctgtacacccccgctcccccccccsaccccaagcagagttagacacctatagaattccaggcaccgatgaaaagacctttaaaattaatcgcacataacttctcattgaaggtgcaggtgagaag

SEQ ID NO: 16856 - DNA, 201 bp, Homo sapiens
gtcaggtggtcaggtctaactgcatccccctcctgtcactccatctcaacaattccccaacccagtcctaccccatctcaacccttcctcaacccaacctstctccatctcaagtcctccccatttcagccactatccgtctcaagcccttcctatgtcaacccttatcaattaaactcctcctcatctgaacccttccct

SEQ ID NO: 16857 - DNA, 201 bp, Homo sapiens
attcaaacccatccatggagttccctcaggaggaaggagcttgggttcagctcctagttgaatcaagtaactctccgccttcatctgtttaattcatttayacttagagtagtatttcttttgcagaaagggatgcatggctaaaaatgtactactgcttccattaatgaaaattaatttagcttaataagatgagtctga

SEQ ID NO: 16858 - DNA, 201 bp, Homo sapiens
agaggggatgagggtggctctggctttggcggttgggtgtgtcttttggactgggtgtggtgccctatagaaaggctggagcttgggacaggtctgtgtgracacctcgattcatcactgcatggttggtagttgaaaccatagacatgggtcagattgtcccagtgaaatggcagagaagagggcaaggacagactccaa

SEQ ID NO: 16859 - DNA, 201 bp, Homo sapiens
ggaaaatatggagggcctgggatggaggctgagagggagctggcaggaggggtgggggcagattggttgagaccattagcagggaaatgagggagaaagartttccagaagggaatggttaccaggttcaaatgtgagggaggaattcactgctggcatttgtttgagaagccctgacctttttctgttcccttgctagaa

SEQ ID NO: 16860 - DNA, 201 bp, Homo sapiens
taaatttagaaattactgttaaataacattatatagatttcgtagattacaaattttgaaaaaattgaacagcaataaaatacattttaaattcaaacaayatatggacataccttggagatattgcaggtttgatttcagaccactgcaataaagtgaatgacaataaagtaaatcacacaaatttttgtttcccagtgc

SEQ ID NO: 16861 - DNA, 201 bp, Homo sapiens
agaaattactgttaaataacattatatagatttcgtagattacaaattttgaaaaaattgaacagcaataaaatacattttaaattcaaacaacatatggrcataccttggagatattgcaggtttgatttcagaccactgcaataaagtgaatgacaataaagtaaatcacacaaatttttgtttcccagtgcatataaa

SEQ ID NO: 16862 - DNA, 201 bp, Homo sapiens
agagaacaatagattattggtttttctatatcattttgatcttgaaatcaatttagaaatattgtccatttagcctgttaacaataggttagagttataayacaggacagcctggcaagatgcaaggaacaaaggctctggcatgacatagttctgtatttgaagtctgcttctggctttgtgacactgagcaagttattt

SEQ ID NO: 16863 - DNA, 201 bp, Homo sapiens
cagattcagtgcctggcaaaggcccctttcctggctgctggacagctgtctgtgtcctcacatggtagaaggggtgagggagctctctggtgtctcttttrtaaggacactaatcccatataagagcagagtcctcatgacctaataccttctaaaggctgaacctccaaatatcacattggggattaggtttcaacatat

SEQ ID NO: 16864 - DNA, 201 bp, Homo sapiens
ggctgtgaacaaaatgctggctgatatatatggtcttctttttctctctgtattcttttttgaattctcattccagttctggttttaaatgtaccttcagyaaatagatcctctttatttcccttctagttcattacttacttcccatgccttcctacttatataatcaaaatctcatgatagttctatgttgtttttgtt

SEQ ID NO: 16865 - DNA, 201 bp, Homo sapiens
ctcagaagaagaaaggaaaatgtgagaaagtttggaatctcttagagacttgttgaatggctttgacaaaaatgctgatagtgataggaacaataaggtcyaggctgtggttgtctcaggtggagatgaggaacttgttgggaactggagcagaggtggctcttgttatgtttttgcaaagagactggtggcctattgccc

SEQ ID NO: 16866 - DNA, 201 bp, Homo sapiens
ctgatagtgataggaacaataaggtccaggctgtggttgtctcaggtggagatgaggaacttgttgggaactggagcagaggtggctcttgttatgttttygcaaagagactggtggcctattgcccctgccctagagatttgtggaactttgaacttgagagagatgatttagggtgtctggtggaggaaatttcttagc

SEQ ID NO: 16867 - DNA, 201 bp, Homo sapiens
cagtggttggcaaactatagcccttgggacaaatcaggtttaccacctgtttttgtatagcccatgaaataatggcttctatgttcttaaatggttgaggaaagaaaacaaaagatgaatgatgtttcatgacgtggaattacatggaattcaaatttcagcgtccataaacaaagcttaaccagaaccatcgtgttcatt

SEQ ID NO: 16868 - DNA, 201 bp, Homo sapiens
cctagagatttgtggaactttgaacttgagagagatgatttagggtgtctggtggaggaaatttcttagcagcaaagcattcaaaaggtgagttgggtgcygttaaaagcattctattttaaaagggaaacagagcataaaagttcagaaaattggcaacctgacaatgcagtagagaagaaaaacccattttttgaggag

SEQ ID NO: 16869 - DNA, 201 bp, Homo sapiens
ccaaatttcaggctctacttcaaacaagtgtattatccacattttaaatatggggaagctgaagctaaagaagattaaatcacttgcccaaggtcaccacmggtgagcttgaacaagtggtccgaatccaaagtttaagtgatttctacaccgcactgtctatggactttgctgtttcatgagtgagctccccaccctaag

SEQ ID NO: 16870 - DNA, 201 bp, Homo sapiens
ggccaagcctgctaggtaaggaaccctctcctggtgcaagtggagggaagcatgggctccctggggcatagcactgcccaggcagctggaagatgacctargctcaggaaggatgccagcctggacaatgggatagagctggcctgggatggtgacacggtgattccatactcaggaggctggacagctgcctctgctgag

SEQ ID NO: 16871 - DNA, 201 bp, Homo sapiens
ggtgtttcctttgcagcttgcttgctttatgaatgattttgttgaaagaatttaaaagccttttccttcctttggagaaaccataacttatttggataaaytgctccagaatgggattcccctgtcttttctgtttgtatcttttctgccttttaccaatccatgccatgatgttctgttgtgtgggaaccagtctaagac

SEQ ID NO: 16872 - DNA, 201 bp, Homo sapiens
aatggatggtcataacccttcattgactcttgagtactgtgttgggacagcttttgcagtcggaggcctggctctggtttcctttaccaagctacattttytccattgcattccaggtcttgaagaagattctgaagttacacggaaggcttggatagctgtatttcattcctgttcatatgtaaaatgtctatttggtgt

SEQ ID NO: 16873 - DNA, 201 bp, Homo sapiens
catgctagcccccggcagaataatgaatggtttcaaaggcaggatgcaggttgaaaacatcagtttctgtctcttctagtgcttttttttttttttttttaatttcaggactagccacatgtaagttactaggtttacaaaagccagccaaggctaaagggtgttgccctgctggggtgggaattgctagtggcatgactg

SEQ ID NO: 16874 - DNA, 201 bp, Homo sapiens
gatggagaacacctggttaccattcgctttataggtctcccttgtctttgaagactattattacatacttgcttgcatgaggcaatgggactgttgcctarcttgtggaagagtggcattccctatctacaaaacctctcagtatttgagacttcttaatgtgtcctggtctttagaagctgagttaggaaaaataagttg

SEQ ID NO: 16875 - DNA, 201 bp, Homo sapiens
caatgattaatgactatatttttataaaactttttgataactgatagtgccaatcttcccctccatttgtctttaaaactggctaatcttagccattatartttcatatgaattagaactaacttgtcaaaatcttcaggttttgtttggaaatgcagtggatttattgactacttttggggaaaattaacattttcacaa

SEQ ID NO: 16876 - DNA, 201 bp, Homo sapiens
ttggtcacaattcaaagacattctaacaggccactaaagtcacttccctgaccccaaaatgagtttattagcataaatggtgaaattcctggctgggtgcrgtggctcacgcctgtaatcccagtactttgggaggccaaggcgggcagatcatgaggtcaggagatcgagaccatcctgggtaacacggtgaaaccccgt

SEQ ID NO: 16877 - DNA, 201 bp, Homo sapiens
tataaaactttttgataactgatagtgccaatcttcccctccatttgtctttaaaactggctaatcttagccattataatttcatatgaattagaactaayttgtcaaaatcttcaggttttgtttggaaatgcagtggatttattgactacttttggggaaaattaacattttcacaatgttgaatcttaccaatatttc

SEQ ID NO: 16878 - DNA, 201 bp, Homo sapiens
gtggaaatgcccagcagggtaccaggtatgcaaggagagaggtctgtcctggagataaagactgggagtcatttgcatccaagtgatagttgggcacttcrtttcagtaaggccttttagggagtgagtgtggattgaaaataaaagtggggaaaggcaagtatgaaactttaggaaatgtggcttttaaagggaagtgga

SEQ ID NO: 16879 - DNA, 201 bp, Homo sapiens
cttgggaaagtacccctgccatacacaccagaaaccgctcagccaaatggtcacataggctaaggtgggggtcccagacactctttcctttgggcaatgccctacctgtttttagggtgtcatttcctaaatataaaatagctttttctggtacgatctccatctgcccaagatgttcttaggtctttttgttaggtagcc

SEQ ID NO: 16880 - DNA, 201 bp, Homo sapiens
acttgctaacatgatatcaagaaaaaagcttgcacactctccaattggtatactggctccatgccagttacatagttttgggtttttccttgtttttcatgtacaaggatacctcagagaatggttgtttggctccagaccactgcagtgaaacaaatatctcaagaaagtcacataaattctttggttttccagtgcata

SEQ ID NO: 16881 - DNA, 201 bp, Homo sapiens
ttgggaaagtacccctgccatacacaccagaaaccgctcagccaaatggtcacataggctaaggtgggggtcccagacactctttcctttgggcaatgccctacctgtttttagggtgtcatttcctaaatataaaatagctttttctggtacgatctccatctgcccaagatgttcttaggtctttttgttaggtagccc

SEQ ID NO: 16882 - DNA, 201 bp, Homo sapiens
agtggatgttgtgttagcaggtatgaaaaccacattaatctttgtttccatcagtgctcttggtacactgtcaatgagctgtaatattttgaaaggaatctttttttttttttctgagcaggtctcaacagtgggcttaaaatattcaggaaaccatgctgtaaagagatgtgctgtcacataggctttgctgttccattt

SEQ ID NO: 16883 - DNA, 201 bp, Homo sapiens
tgggaaagtacccctgccatacacaccagaaaccgctcagccaaatggtcacataggctaaggtgggggtcccagacactctttcctttgggcaatgccctacctgtttttagggtgtcatttcctaaatataaaatagctttttctggtacgatctccatctgcccaagatgttcttaggtctttttgttaggtagccca

SEQ ID NO: 16884 - DNA, 201 bp, Homo sapiens
gggaaagtacccctgccatacacaccagaaaccgctcagccaaatggtcacataggctaaggtgggggtcccagacactctttcctttgggcaatgccctacctgtttttagggtgtcatttcctaaatataaaatagctttttctggtacgatctccatctgcccaagatgttcttaggtctttttgttaggtagcccac

SEQ ID NO: 16885 - DNA, 201 bp, Homo sapiens
tcctttattgtctttttcctctaagaattccattgttgaccaggtatggtggctcacacctgtaatcccagcactttgggaggccgaggcaggcggatcaygaggtcaggagttcgagaccagcctggacagcatggtgaaaccctgtctctactaaaaatacaaaaatcagccaggtttggtggcatatgcctgtaatcc

SEQ ID NO: 16886 - DNA, 201 bp, Homo sapiens
tgaggcaagagaatcgcttgaactcaggaagcggaggttgcagtgagctgagatcgtgccattgcactccagcctggatgacagagcaagactctgtctcaaaaaaaaaaaaagaatcccattgtccctgcttactttctaacaggtgaacggggagccggctgtcattcctgcctcaaggagtattggaactgtgggagt

SEQ ID NO: 16887 - DNA, 201 bp, Homo sapiens
ccgccaccgtgcccggctaattttttgtatttttagtagagacggggtttcaccatgttagccaggatggtctcaatctcctgacctcatgatccgcccgygtaggcctcccaaagtgctgggattacaggcgtgagccgctgcacctggcctgaatttcttttaagctttttgctatatatatatatatatatatatata

SEQ ID NO: 16888 - DNA, 201 bp, Homo sapiens
tgtgcaccttacctttattacaagaaccagccaaacaatgattccttcttttttgtggttctctatctccacacctatccttgaagtttctctttatctckctctttctctttttctatttctgtcatatttttcagttctattttctatgttgcttctcgttcttttttctctttagtccttccctacttattagaaatt

SEQ ID NO: 16889 - DNA, 201 bp, Homo sapiens
cttccccaacagagactgagaactgggtctgagatagagtgaatgggaagatgaactttatcccagctcttgaaggatttacagcctagcagagctgggcytaatttcctttaggaaaggagcacattctaataaatttaatctatcagaggcagacggcagcatggatgaaaccaatgagggaatgaaactaatcctccc

SEQ ID NO: 16890 - DNA, 201 bp, Homo sapiens
ctgtgacacttgctttctttctgatgctggtgcctgtgacaggctctgaactctgctctctctctgttgccctgagctgaagttgtccctgagggattttmatcttgcagaataatttggcatttacagataatttaccaaaccatttgtttccatatagaggaagtcatgctcgctgaagaaaataaaaatgctggaaca

SEQ ID NO: 16891 - DNA, 201 bp, Homo sapiens
ggaatcactatggcagctatagccttatgaagtacatttcttaagtaataagacttgaaagttgaaattgctccttaatccatgggctacagaatggatgytgtgttatcaggcatgaaaacaacattaatttccttgtgcatgttcatgagagctcttggatgaccaagtgcattatcagtattttgaaaggaatctttt

SEQ ID NO: 16892 - DNA, 201 bp, Homo sapiens
aacagtgggcttaaaatattaaggaaaccatgctgtaaacagatgttctgtcatccaggctttgttgtttcatttatagagcacaagcagagtagatttarcataactcctaagggccctaggatttttggaatggccaatgaacattggctttaacttaaagtcaccagttgcattaacctcctaacaagagagttagcc

SEQ ID NO: 16893 - DNA, 201 bp, Homo sapiens
attggctttaacttaaagtcaccagttgcattaacctcctaacaagagagttagcctgttctttgagtctttgaagccaaacgtcgtcttctctacttacrattttctcgtctctagttatgaaagtcctagatggcagcttcttgcaatatgaagctgtttcatctacattgaaaatctgttgtttagtgtacccgtctt

SEQ ID NO: 16894 - DNA, 201 bp, Homo sapiens
tcaataatagctcaatattttcatctaattcataaactcaaaggttttggaagttcattctgtagaagattaaacattgacattattgtgggtgctattgraaactgagttaaaagtttagtactagcaataagcttatttttggagtgataatatacatacaattttgatgaaacatgatgttattgtataaacaaagtt

SEQ ID NO: 16895 - DNA, 201 bp, Homo sapiens
ataagaaaagaagtagtaggcaaatagaatgagtaaaaaagaaaaagtaacaagaaaatttagcaagttcatcaaaaagcaagaaagcagagaaaggaagygattttaaagtgaggcaagcagaatgtgtgaaagtagaagtaagtcctgacttaatagcaattgaaacaaatgtaacagattaaacttattttttaaaag

SEQ ID NO: 16896 - DNA, 201 bp, Homo sapiens
ctcatgtgacagctgctttcccttccacgctgccttggaccctggagtctagagaagcaatttgctcctcactattgcttccagaccattactcccctctyctgtcctaaaaatgccagctgtggcgtgcatgtcatcagataataccacctactacccctcgttgccaccatctacaaactcccaagtcacttgcttcat

SEQ ID NO: 16897 - DNA, 201 bp, Homo sapiens
tattcaccttcccttgaccaagaaattgggtttcttttccctcagcctgcacttactcttctattaagaccagaaaataaaataattttccgttgagtcamaaactcatcatcttgtttggtgttctgctgcctctgaacaaaagtgaatgccagccttcccttgctgggtgtcagagtctgcctcccttgaaaagaggcc

SEQ ID NO: 16898 - DNA, 201 bp, Homo sapiens
tggaaaaacctactctatgctgtcttcaaggctatctctaggtaggcctgtccctaaaccctcctccgaagttggtgtgaattcctgtgcttaaccacatrcaagatctagcaaaacacttcttcttttctaaccctaactcttcagctccagctccagcctattccctctggatcttgttctaggttgtctggtggttct

SEQ ID NO: 16899 - DNA, 201 bp, Homo sapiens
atccatgcctttaaccatgatggcacagtgcctttcattctaactctcaaagtacttctctcaacaacctattgagatgccatggtaagagcactggtgtkggggtttggagacttgggtctaattcccagggtgacctaattagtggtgtgaccttgagtaagtcacctcatcatgacttcgaaagacaagtaggaggga

SEQ ID NO: 16900 - DNA, 201 bp, Homo sapiens
taaataaatggttgtcacgagtctttggagaaggatttattattgtggccatagattggagtggtccttgaggatgttaattatgttgctgcttgttgcartttatgacatggcttctatgtggggtaattggatctaggggagctatccttttccatggaaaaaggccagtttggtctcaggtttatagccctaaggaaa

SEQ ID NO: 16901 - DNA, 201 bp, Homo sapiens
ggaaggtttcccccaaggaagcatttcccaatgtggaaaaacctactctatgctgtcttcaaggctatctctaggtaggcctgtccctaaaccctcctccraagttggtgtgaattcctgtgcttaaccacatacaagatctagcaaaacacttcttcttttctaaccctaactcttcagctccagctccagcctattccc

SEQ ID NO: 16902 - DNA, 201 bp, Homo sapiens
caggattccaatgaggaagcctgactccagagcttaggtttctgaccgtgatgctacactgccttcctaatttatgtatctagtggctgcatggtctgaattttttttttttttttactcctgatgcatcttaattaacaaaagtgaaagggtgtatctgttggtctggatgtcaaaatccatccaagggaatataaaact

SEQ ID NO: 16903 - DNA, 201 bp, Homo sapiens
aatagaagaggctgctccttgggtgagaagacaaatagacttttgagttccctttaaaggctagacacttggataactaggaagggttcttagtaaaagcraatgccttttatgagactgtgcagtttacaaagccctttgatgtctgctacctcatttcattcttttaacaagtaagttagaggacattgcagagataag

SEQ ID NO: 16904 - DNA, 201 bp, Homo sapiens
tgagtgcatgaaagtcttcaggaagagtgtagcaagaaggaagacagggcccagggctaaggaatttggactttaccctacgagaagtggggagccaatawtgtattttaagcaggggcatgaggcaactggtgaggcctgcaggactaaagggagtgccagagatgtctgacaaggttgctgccctcaatgaactaattg

SEQ ID NO: 16905 - DNA, 201 bp, Homo sapiens
gctactccctggaggcttaggcaagaggattgttgaagcccaggagtttgaggccagcctggacaactagtgtctctctgtccctatctctctgtctacaraaaaaaaaagtgcaacctctctgaatatctgaatcaatacccctttactctttgtacagcagcctctgactgaataaataagtactttttgtatagtggc

SEQ ID NO: 16906 - DNA, 201 bp, Homo sapiens
aaactcagtctcaaaaaacaaagaaaaacaaaaaaaataaagtcatagctagcaatgttttatttgagagtcaccacctaaagggtaaagcctttgagtgsatgaaagtcttcaggaagagtgtagcaagaaggaagacagggcccagggctaaggaatttggactttaccctacgagaagtggggagccaataatgtatt

SEQ ID NO: 16907 - DNA, 201 bp, Homo sapiens
agattgcagaggttcccagtccctgtctgcagttactcacatctttgctcctgaagtctagtatgtttcatttgtatttctgtagttggagttatttctcktcttacttactgttgataaactcatgtagaggcagaaatttcttggaggtgtactgtttctgcagctttgcaggtatgctttccgcatctgttgtgacta

SEQ ID NO: 16908 - DNA, 201 bp, Homo sapiens
ttgtctctactaaaaaatacaaaattagctgggcatggtggtgcatgcctgtaatcctggtcactcgggaggctgaggcaggagaattgcttgaacctggraggtggaggtttcagtgagccaagatcgtgccactgcactccagcctgggtgacagagcaagactccatctcaaaaagaaagaaaaaagaaaccatctgg

SEQ ID NO: 16909 - DNA, 201 bp, Homo sapiens
gctaacacggtgaaaccccgtctctactaaaaatataaaaaaatagccgggcgcagtggcgggcgcctgtagtcccagctactcaggaggctgaggcaggrgaatggtgtgaacccgggaggtggagcttgcagtgagccgagatagcgccactgcagtccggcctgggtgaaagagcgagactccgtctcaagaaaaaaa

SEQ ID NO: 16910 - DNA, 201 bp, Homo sapiens
ggcaggagaatggtgtgaacccgggaggtggagcttgcagtgagccgagatagcgccactgcagtccggcctgggtgaaagagcgagactccgtctcaagraaaaaagaaagaaagaaagaaagaaatgtactcttgaatctgctggacaaattcagtctgtggagtaagttgagaaacctgtctcactgcatagaagtag

SEQ ID NO: 16911 - DNA, 201 bp, Homo sapiens
ccactcttcactgccttccaccttgagccccattgtctgtccacaagaggaaacaggattttgtgcactgatgaggcagcagagtagtggagtcaattacaaaaaaaaaaaaaaaatatatatatatatatatattgtatttgactgatgagtacagctttggtttatcatctgcactggaatatctttgatgttttggga

SEQ ID NO: 16912 - DNA, 201 bp, Homo sapiens
tccaccttgagccccattgtctgtccacaagaggaaacaggattttgtgcactgatgaggcagcagagtagtggagtcaattacaaaaaaaaaaaaaaaatatatatatatatatatattgtatttgactgatgagtacagctttggtttatcatctgcactggaatatctttgatgttttgggaaatcacaacactcaaa

SEQ ID NO: 16913 - DNA, 201 bp, Homo sapiens
aattgagtcacagatttaaatgccttttaaagtgatgaaaatgaaacccaagagttgctttgttccagggcatgtgattgatactgagcaaggaaaaggcsatcctacaaccaatgctatctaaagggaccttctcttaaaatgtgtggggatcaccttgagaccactttcattaccaggaagtggcattgtagatgaaga

SEQ ID NO: 16914 - DNA, 201 bp, Homo sapiens
acggacttttcatgaggcatgcatgtgtgaacactgtaattagtatttccaagagagaaaagcaaccccctcccccgcccccgccaacaccccaacactgyacctacccggagactttgctcgtgacacatttttttttccccataggagagaatgttaaagtagggccatctcttagatgaaagtcctagaggctttggg

SEQ ID NO: 16915 - DNA, 201 bp, Homo sapiens
cagttcttagtgatttcagtatccatgtagatgacccttcctgcaccctgacctcttggttccttagccccttctgtttggtgactttgccttcttgcttyctgctgacagctcacctccatggtctgcctggacattgtcgtaactgcattactccataatctcggtttcaagcatcccactgtgtgatcaccccctctt

SEQ ID NO: 16916 - DNA, 201 bp, Homo sapiens
ttgatgccaagaaagtgctactggaaggctgctataggtttaagaacacaatgattggtcattctttttctttcctacccagattggaaattccaagtttkctctgtcatcacatctggttaatgcagacactcgaatcactgtgtgttctagtactcagaacttaaaagtcatcatatcggatatgggagactcactgac

SEQ ID NO: 16917 - DNA, 201 bp, Homo sapiens
cctcaatgaactgggtggatcagcctgacacagaggcagcagttggggagcattctaagttaagagttaaaaattgtagctcttgacagatctggtctcargctcacctgacttgctaaattagtgattcatgcagtaagatcattcagattccaaaaagggaggcatcagtatggggagagcatcttttcacctttgcac

SEQ ID NO: 16918 - DNA, 201 bp, Homo sapiens
actgggaatataagtaagaatgacaggtaaacaattaccgtaggaaatggtaaatgcaaatcctaggagtacagagaagctgtggtagcacggagtccctstgtctggggagggcttcccagggcaggggttactgaaggatctgaagatgtgaggaggtgcttgcttgggtgatgcccatccaaggaagaccaggatcag

SEQ ID NO: 16919 - DNA, 201 bp, Homo sapiens
gtgttggcttctttctgtttgtatccaggagggtgggaggccccaggagagcagacatctggggcttctttctgttgcactgccaatgcctatccacagaygaccttatgtgaaggtgctaggctgtgaattcctttgttttatttcaggaaacattgattaaacatctattttggatattcaaagacaaaaaatgaccaa

SEQ ID NO: 16920 - DNA, 201 bp, Homo sapiens
tatagaaatacttctgtgctgttgacgaatagtcagcccttagcaggcactcatatattttcttccactgcctcgctcaccctaactaacccagtacctakggcattctcaagatctagaaatggaacagttactgtgtgacatagcaggaggtctcctgttctgactggttagtgcccttgccataccagatcaatattt

SEQ ID NO: 16921 - DNA, 201 bp, Homo sapiens
gtgtatgtgtgtgtgtgtgtttgtgtgtagaaggggttcaagaagaaggaaagacaagttctaggcagaatagatggcatgggaaaacacccagaggccaragataatttggcaattgagagaattagaaaccgagattatgggtggtttttagagcgcagtaatatcatggatggaggtatggggagagattagattagc

SEQ ID NO: 16922 - DNA, 201 bp, Homo sapiens
acttacaatcatggtggaaagtgaaggagaagccagcatgtcttatgtggctgcaacaggaggaagagagagagcaaagggggaagggctacacactttcraacaaccagatttcatgagaattcactatcacaagaatagcaagggggaagtctgcccccatggtccaaccttctcccaccaggtgccctcccccaacat

SEQ ID NO: 16923 - DNA, 201 bp, Homo sapiens
tggcagggccacatctggaggcctcccattctgtgaaacaccccagcagtgtgttaattgatttattttgagtgcagtttgtttggatgtgggtagactattgatgctgtggcactttggaagctcacgtttccaagccagagatacttcatttgtgtctgaatgagaaaaatctcaagatacatgccgttccatccctga

SEQ ID NO: 16924 - DNA, 201 bp, Homo sapiens
tcagtagccccatgcgattcagagggcaggtactacttttgccatttttgcatgtaaggatataaacccaaccaggactgaggtgcaagcctcctggtgtygtttccaccctgataactcatttattctgaggcccttcggcaccatctgtagagtctggatatattcttgcctcttggaactgtagaatcatcatgaaat

SEQ ID NO: 16925 - DNA, 201 bp, Homo sapiens
cctgacaacttgctttccaggtaaaatagcatcatttttctaggctggcttcttctatgctcactagcagggctgacctcagatgtctggggcagtcttargtaccttaccagactgtggtgttctttggggggacttccaggactgggagaggatgtggcaggggccattgttctggagtctcccaatatctgtgaggtc

SEQ ID NO: 16926 - DNA, 201 bp, Homo sapiens
atggcattcatgttttccagtactagttttagatatgttcctaaacaaaacacaacaaaatggaggaaaagaaagagagatacgtactgagcctactttcktgatcaacacttctatacttatttgttttcatgtctcattccccttcatgactttgaatttcttaagggcaggaatccctttctttctgagcactaacca

SEQ ID NO: 16927 - DNA, 201 bp, Homo sapiens
cgtgctctgagcataggtggtgttcagcaagaagaaaggtgcctggagtgtgtttaggattccagaggagtgcctgggccgtattcccagaaggagagggrgttgttgcagtatggctgggtggtgagataggcctcctgcctgccccctcagtgggatggtgcttgtcagtgtgaagtaaaccctggagcacctgaggga

SEQ ID NO: 16928 - DNA, 201 bp, Homo sapiens
cctttattttaaatttttctaacaaggaaaatgttacattttctagatttccatttttttggtcttccctttctttgtcttctatcctccccacttctcayaaaacatacacaggccagaggggtcagcccctgtccgcccacatctggatgtgacccaggaaggctgacaatgccctctctcctccaggaagaatgtcca

SEQ ID NO: 16929 - DNA, 201 bp, Homo sapiens
tctttatattgtgtgatgtgggagagatggagaaggagaggtaaaagagagggtgtaaggtactggaactgctatggggggaaagggaggagggaattgayaggggacattaaaatttgaattacaggacttggtgattatctggagaagtagagaaaggaaagagaagggaggactcccaggtacttgactacagcagca

SEQ ID NO: 16930 - DNA, 201 bp, Homo sapiens
cacacagtttcttaataactgtagctttataataaaagtcatgtggtgatgtaatttttctaaatttgttctctattttcaggtttgtcttggttattttkttttcttctcagcatttatgtatacatttagcctttaaaaaacatgagggctaggagtgctgaccacctcctgggcaaaaatccacatataacttttgag

SEQ ID NO: 16931 - DNA, 201 bp, Homo sapiens
cccatctctactaaaaaaattacgaaaattagctgggtgtggtggtgcacacccgtagtcccagctactcgggaggctgaggcaggagaattgcctgaacyggggaggcagaggttgcagtgagctgagatcgcaccactgctctccagcctggtgacagagcaagactccatctcaaaaaaacaaaacaaaacaaacaaa

SEQ ID NO: 16932 - DNA, 201 bp, Homo sapiens
gcctgccacatggtgagagcaggaagcaagagagtggggagggaggtaccaggctcttaaaaattctagacagaactaatagagcaagaatggagaactcrtcatcattaggatggcaccaggcatcaagctattcatgggagatccactcccatgacccagacacctcccattaggccccaccttcaaccctagagatcc

SEQ ID NO: 16933 - DNA, 201 bp, Homo sapiens
aaaacaattctgtggtgccaggtgagatgaactctccacctcttcctgagggctttgtcttcatgcatgggacaaagcagtgtaattaacatgcccccccmccccgccttaaaacctaatattcattcatctcttactttggttattatttaaaaagaaaacatttgtcaattacttcacactgacaagcaccatcccact

SEQ ID NO: 16934 - DNA, 201 bp, Homo sapiens
cactgagggggcaggcaggaggtccatctcaccacccagctgtattgcaacaacgccctctccatctgggaatacggcccaggcactcctctggaatcctraacacactccaggcacctctcttcttactgaacaccacctatgcttggagcaccatgtgagaggacacctctggtatcaggcagcttcagatgtattcag

SEQ ID NO: 16935 - DNA, 201 bp, Homo sapiens
gatagggcctgaaggcttgaatggtcctacaagactttctcaaaagtcgtcaccctgggacctgaaacattagagctctttccagagtaagtctattctcrgccagaggtctccaacagaggctgtccatgtgtactggtttcaagttctgcttacctcccaagtgttgttttttctgaccctgacctaattcctcccagg

SEQ ID NO: 16936 - DNA, 201 bp, Homo sapiens
cagaggaatttcatttataaagttccttattgctgagcctctgtgtgttccagttatgagtcacatgtgtcaacaccgtggaaatgaaatttgtaccccctggacccatgcagattgatttgattctgggctaaatggaaatagaacctgtacaagtcaaatgtttctggagcatctgccatctacagggcacttggagga

SEQ ID NO: 16937 - DNA, 201 bp, Homo sapiens
tttacagaaacctcaggacatttttattcaaacccatccatggagttccctcaggaggaaggagcttgggttcagctcctagttgaatcaagtaactctcygccttcatctgtttaattcatttacacttagagtagtatttcttttgcagaaagggatgcatggctaaaaatgtactactgcttccattaatgaaaatta

SEQ ID NO: 16938 - DNA, 201 bp, Homo sapiens
tatttttggactctggttgactgagggtaatggaaagtgaaactgtggataaggtggggactactgtattatctaacacattgcttttcagagtgaatgtrtcatttccactctgcatatcatatgcagcactcccatttctatatatcttcaacatcacttgagatgttcagaattattaaagtgtgccaatctgatggg

SEQ ID NO: 16939 - DNA, 201 bp, Homo sapiens
aattccatgaaatatgaaattgttaccagtaagaaatataagcatagtaagtaggtcctctattcagctcagttgtcaaccaaatttatgttgctgatgcygaattttgatatagccccttacagtgctgtgattaccttaagtggatggaggaggctgaatatgaggaggggaaagggagggggagatttcagtcaaaga

SEQ ID NO: 16940 - DNA, 201 bp, Homo sapiens
atggaaagtgaaactgtggataaggtggggactactgtattatctaacacattgcttttcagagtgaatgtgtcatttccactctgcatatcatatgcagmactcccatttctatatatcttcaacatcacttgagatgttcagaattattaaagtgtgccaatctgatgggtgtgaaatggaatccaattattgcattaa

SEQ ID NO: 16941 - DNA, 201 bp, Homo sapiens
acatcaggaccctcttagggaatgccatgcccccctatgacctcctggaggatagtattgcagagaactgaggaagaggctggcatcttaaaagtcaggakcataatcactggtactggagatcctcgaaaaacctgcagagaagctgtttgctttctggaatgttgatcccagcttacaagcattacagacaagtaatta

SEQ ID NO: 16942 - DNA, 201 bp, Homo sapiens
gtggcaagtcaacagcctactctgaatgtgtttcatttttcttggaagctacatctgcatagggagataattttattttcttatggcactttcctctgcartggataccatactctttttaaaaatgctaatgtgatttaaaatgtgatgttacattctatacgattcctcgttttcattttcttttttgctcatctaata

SEQ ID NO: 16943 - DNA, 201 bp, Homo sapiens
ttctttggactggaagaaaaattataacctgtttgcttttagggtcattgtattcatctacaatagtatatggtttgttacagattccagggcattttccrtatatatattttattttttttcctactataactttaaaagacattatttcccccattatttcaattaataaacaaaggcttattgatgatttaactagaa

SEQ ID NO: 16944 - DNA, 201 bp, Homo sapiens
agggggtgttcaagagtcagtgcaggtgctgagcttggctgagtcagttgtcctctctgtgctctctttcccatccctcacatcttcccttcttagtggcwcttcagatgtccctggctttgtgaattgccttcacaggcccctgatttccatatgaactcacaggactttgctcctgctcctcctccagacctgctgctt

SEQ ID NO: 16945 - DNA, 201 bp, Homo sapiens
gtatattggtggttgatttgtggcaaagatgcaagttcaatttagagggggaaaggaaagtcttttaataaattttgctatatccactgtatattcatatwaaaaaagtgaatctacagctgggtgtggtggctcatgcctgtaatcccactttgggaggctgaggtgggcgaatcacttgaggtcaggagttcgagacca

SEQ ID NO: 16946 - DNA, 201 bp, Homo sapiens
gctcatgtcttattttaaatgcagaaggcttcatattctatattggcacttgcacatattattttaaatatagaaatgtaaggcaatagtgatattatctycattttacagatgaggaaaccaaaacttaaagaggcaaagtcacttgctcaaggtcaaatagttactaaggggagagattggccctttaattctattatc

SEQ ID NO: 16947 - DNA, 201 bp, Homo sapiens
catttgaaacagtgctctgcacatagtagattttcaacaatagtacctgctactattttatagtttattgatgaggaaagggaagcatataatgaacaaayatattctctgggttactctagcccccacaaaaaacttgccctagctgggatgaagttgttgtccttgtattttcaatctgttgctacttgtgctggatta

SEQ ID NO: 16948 - DNA, 201 bp, Homo sapiens
ctctcaggcatggaaaggcatgagagcacttccccatctttctcacccaactttcatgcccattgcccctgcttgtgggcagattttcctttttgctgccyggtctgagggataaggtgggttaaggaggagggttaaagtgagtgcttgatcttcctgctactgtattcaaaccatcaccctgttggtcacctggatccc

SEQ ID NO: 16949 - DNA, 201 bp, Homo sapiens
aggtcctatgtaaaaatgtcttctcctgaaggtggtagagttatttagaatctatgaggtgaacagctagagttcagaagttgtctaacagtctacacgtrttcagtaacatagactttatcaaaagatgcactctcctcctctctaaacctcaccagtattccttcccttccagtgttgatttgtattatccttgatgca

SEQ ID NO: 16950 - DNA, 201 bp, Homo sapiens
gacaagaagcaattgcaatacatcaccgcactaatgctctgttgaatgtattctgggagtatggaagaaggagaaggtgactgtgtttgggaaaaaaaaawcacagagaggtgatatttatttaagctggatgttgaaggtgggtaggagattgccaaggagaacatgggaaagggcattcagtcagggaaagtggaggaa

SEQ ID NO: 16951 - DNA, 201 bp, Homo sapiens
  misc_feature (1)...(201): n = A,T,C or G, or insertion/deletion polymorphism (see Tables 1-2)
gaaatttagaaacccaaaccttgcatacatatgtagcatctagagtagaggctcatccatgcttaactccaattcaccttacttccctgtatgcaagagcngtatgtgaggggacctacaggttatcctccctcagaggagccaggtttggggctggaggagcaacctaaaattaaggatgacagaattgggtaaggagaa

SEQ ID NO: 16952 - DNA, 201 bp, Homo sapiens
gaaagtgtcttacttcccctttgccatgattctaagtttcctgaggcctccccagccacgctgaactgtgagtcagttaaaactctttcccttataaattwcccagtcccgagcagttctttatagcagtatgaaatcggactaatacagtggcatgccttttaatttcttgatttatggaatacctttaaagtaatgtta

SEQ ID NO: 16953 - DNA, 201 bp, Homo sapiens
gaacctcaatatcgctctccccacctccctccctctttctccaacctttggatgcgtctctgctggcagatataaagacccaagtcttcgcggtggaattycttagatggacttgcaggggctggcgttataaagcatgtcatcgtaaccccgtcctcgtctttgtttatttttttttaaagttcttttgttttcattttc

SEQ ID NO: 16954 - DNA, 201 bp, Homo sapiens
gagggctgtgacctgggctgtgtcagtgggaccagaggaggggacagatacaaaaaatacttaggggtctttaaacttgggggatgagagggaagaatccmagatgaatcccaagtgtaggggagggtggcttttttcaccctggatgaggagcagtctggtatggagaggggatgagggtggctctggctttggcggttg

SEQ ID NO: 16955 - DNA, 201 bp, Homo sapiens
agtcccatttttaaattcagctctggctagactgcctctgcagtgtttttgaaatgggtgctaccttagaagagcaaaaaggagtagtctcagatacaatygtccagaataactagggtttaatctaaagagtgagttaccaggaaatgagagaaggagtgaggacataggcctggagaagcgaataattccagaagcaag

SEQ ID NO: 16956 - DNA, 201 bp, Homo sapiens
  misc_feature (1)...(201): n = A,T,C or G, or insertion/deletion polymorphism (see Tables 1-2)
gcaacctaaaattaaggatgacagaattgggtaaggagaagtatcgggaatgaaacacgacttggatttgtgtcactgtacaatctcttatgggaatctantcaggactctcagagtcaaccagatctatccctgcctctggttatgagcctagggtttatgtgggtcctaatgtcaactcttactgatgaagaaattgag

SEQ ID NO: 16957 - DNA, 201 bp, Homo sapiens
tgggctgttactgcaagtgtaatgagaagctagggagctataagcaaattggtctgacttacaccctagaaatttcactccactgtgtaaagaatggattrcacagaatatgtgcaggctggaggccttgtagggagctgttggagagtggaaatgcccagcagggtaccaggtatgcaaggagagaggtctgtcctggag

SEQ ID NO: 16958 - DNA, 201 bp, Homo sapiens
tggatctgtgacttgcctgaaagagttatttgagaaggtttttataaactcaaacagatcctttaaactagatatttcccagactgcccaaaaaagggccsctgtcccccaataccacacaacactatgagaaagtagaattttattgcttgggtttttcttttcctcatactttgaaagatctctttggccagctttcca

SEQ ID NO: 16959 - DNA, 201 bp, Homo sapiens
ctgtccatgtgtactggtttcaagttctgcttacctcccaagtgttgttttttctgaccctgacctaattcctcccaggccaggctggccagcaccttctkaaattgctctcaggcagctggaaggcctggctggcaggagccctgggtttttcaccctcagccccagggctctttgaaggcctactctccaagaacaaac

SEQ ID NO: 16960 - DNA, 201 bp, Homo sapiens
cttttgctcctgccctcagggagacaagacatgcttgtgttcagtggatgccttgaggaagtgttatggtccctttgagcattatggacccattgctgtgkggtataaaggcagtggcggtgttctctctgaggtagccaagaaaggcttcatagagaaaccttgtagacatagaatttcaccagggggagaaggagatca

SEQ ID NO: 16961 - DNA, 201 bp, Homo sapiens
tttcagtctctctgaatatatcttaagttgcctgataccagaggtgtcctctcacagtgtgctcccccagcatcgtgctctgagcataggtggtgttcagyaagaagaaaggtgcctggagtgtgtttaggattccagaggagtgcctgggccgtattcccagaaggagagggcgttgttgcagtatggctgggtggtgag

SEQ ID NO: 16962 - DNA, 201 bp, Homo sapiens
attactgcaactcatgaatgaccgtcagaggtttctgagcctacagggctggggcaggggtgtctcctgaccatttcaatcttctgccacagcctggaccwcacagacagctttagcatcagaagagatggccacacccagagctgggcccccagtatccacaaaggaaagttcagcttaggaagaagaaatggggagaga

SEQ ID NO: 16963 - DNA, 201 bp, Homo sapiens
cttgggtaattggatgatctacagaacgtatatgaggacttgttgggtgatgcccaagtgctatgtctttgtctgcagcactttctactttgcgtggtctrtaaaagacagctacagaatacagtgtggtctgtctttggctttgaagttggacatgctgaatattattaattattccttgcaatacagcaaaaagttctg

SEQ ID NO: 16964 - DNA, 201 bp, Homo sapiens
tgtcagggctgatcaatcaggtttgtgagcaactgacattgagggctggactctggagtagatagagtttactcaggaaagcctctcactagaggcttccygggagaatgctgtctggcctgtaggcaatagtccttgatgccattccttttccagtttggtgatacttgactctgagttttctttaaggcagctgggaca

SEQ ID NO: 16965 - DNA, 201 bp, Homo sapiens
ctaacatgccatgtctctcctgctatacagggcacaggttccctaagtgagagctccatcccctctgtctctgacaccagcaccccaagaagaagtcgtcrgcagctcccacccgtcccgccaaagccccggcccctcctttcctacagctccctgattcgacacgcgggcagcatctctccacctgctgatggaagcgag

SEQ ID NO: 16966 - DNA, 201 bp, Homo sapiens
ggctttttttttttttttgtaggcaactcttatattttggatgcaggcagcatcacctgtgaataatgataactttgttttttcctttataatccatatgscttttctttctttttctttacttattacattaaccagtacttcaagtccaatactgaatagaaagagtttcagtgggtgtcctagactgatacttcactt

SEQ ID NO: 16967 - DNA, 201 bp, Homo sapiens
cagtttatttcagggttccaaatgagaacattagtattatgctaagtaacttctcttttatatcctgctccagaagtgtaggggttggtggcagaatcccrcagtggacagaggcccagaagccaactggacagaaggtctagcaaggagagctgaccctgataaatctagtcccagctgctggtgtggttgatgatagag

SEQ ID NO: 16968 - DNA, 201 bp, Homo sapiens
gaaggaagacagggcccagggctaaggaatttggactttaccctacgagaagtggggagccaataatgtattttaagcaggggcatgaggcaactggtgargcctgcaggactaaagggagtgccagagatgtctgacaaggttgctgccctcaatgaactaattggggtaggcgagataaatgtctcttggaaagtaatg

SEQ ID NO: 16969 - DNA, 201 bp, Homo sapiens
gaaagctcttctggtggctggtggggctgtggcacctactagatcactgtgttatttccagatcctgtgtttggtgtaaatggtacctggtttgtttcctrtctttaaattacagtattcttaggagtgctgttcttttgaactgcacctgttggactcttcttaattcccgaagaatctgggccattgttttttaagctt

SEQ ID NO: 16970 - DNA, 201 bp, Homo sapiens
ttttccagctgcctccagtgggaggggatggctccctgctctgttgtctcccagtactctcctgtggtgcactccacatcccgccttgtattcgagccctytgtgggtatgttttcccttctcctcttttgaactgtaagtttttagaggctatgactgtgtctaatttatctctgagccccagaatccctgagaacaatg

SEQ ID NO: 16971 - DNA, 201 bp, Homo sapiens
  misc_feature (1)...(201): n = A,T,C or G, or insertion/deletion polymorphism (see Tables 1-2)
ttggaggtactatgagctggggaacattagacaaagcagagatcactgtaggctgaaagaggcacattataccactaatgaattaattacatgctaatgtngaacagagcctgccacatagtaagatcccaaaaaattagtgttaggattaatgctattactgctaattatagcaaatatgtattgtatttgggctatacg

SEQ ID NO: 16972 - DNA, 201 bp, Homo sapiens
taatccccttcagtctcttttcaacaggacaaccagagacattctttgcaaacttaagttgtgggactcctctgctgcaactgaccaatcgtttcccaatsacaccaagtaaaactcaaatctttatagggtatctatggccctacatgatggccctccacttccccactgcctgctaccactctgaccttttttccatgt

SEQ ID NO: 16973 - DNA, 201 bp, Homo sapiens
ataatggactgtaggggccagagtggaggcagggaaagagtctgctctcagagtaaagtaggtgagaggtaatgggggtttagactagggtgggggaagtsaaggagatgagtaatcccattcagtcggtagtttggagagagagccaataggatgagctcatggattaaatgtggcaggggtgaggatgaataaaaggga

SEQ ID NO: 16974 - DNA, 201 bp, Homo sapiens
tagtaagggaagagcccttggttggctagagttccagtgaagggctcccaggcagcctcttccttgccttgtggggtgtgccagggttgtgtgttgaagcrggggacctccctcctgcacggccatcatgttgcctttgcctttcgtaacaaatgcctggcccctggatccctcttctgtgagtgaaagagaaaaattccc

SEQ ID NO: 16975 - DNA, 201 bp, Homo sapiens
catctgtggtgtggagaaaatgaactgacgtgagtggtccctgttagaaaactcaacagttcctctggaatgcctgggcctgctctcccaagcctgccacrgaggacacagcttggggagggctcttgtgcacttggctctcccttgcttctcaattcccacttcctattgaattctcatcacctctgatactctttgccc

SEQ ID NO: 16976 - DNA, 201 bp, Homo sapiens
tttctaatatagtcacaacaaaactgagggatctgtacaaataataaacgcaagggcagagacaagcttttggaaaaatattaatagcaacaaggtatgtytatgagaaaaaccattattattccaaactttcaaaggcgccttggaaaaagggacctttgcagaagaatcggaagttcgaaaggaggagtaacttgctgg

SEQ ID NO: 16977 - DNA, 201 bp, Homo sapiens
ttattattattacatccttacgctgtatcagcgccaaacactggagtcctcaatactgtatttatttctctgggcttttggaggggtggggaagaaacggsacatttaggttgctaagtgattgtgcttgcttctaaaaataatgagattccccagtggctcgttctcctgtgttttgcttagagttagaggatgccaagg

SEQ ID NO: 16978 - DNA, 201 bp, Homo sapiens
cctcccacctgcatccccttagggcccactactttgggaaattgcaggaaaaactgggcctccccctgcttggattgaagagcctcgcctaggcagtcagmctcagtggttgccatggtgatggtgggtggttggtggggtggtgatgcagcgtttggcctgtgcagctgaggtcctcaatgcaggctgcttggagcccag

SEQ ID NO: 16979 - DNA, 201 bp, Homo sapiens
tttttttttttttttgagacggaattaagtttttaaatgatttttatatgtgttatttcatgtcctcataacaagttgttgtgcaaccatatatattatamctctcaagtcaagtattatgttatgaatgccttgtacaagtgttgagggaaccgagttggaatgtgaataactaacccagtgtggtctatcttctgccag

SEQ ID NO: 16980 - DNA, 201 bp, Homo sapiens
taaattaaaccattgtttagtagggtctgaagctagctttcccccagcagctgggatcttagggaatgtttaacgaggcctctggctccctggcctatggrttgagctcaaactcatcccgttactcctcatagggcatgcaggatcccaccagacttgggagagaagggctattttgttgatgcacttggagggatgcta

SEQ ID NO: 16981 - DNA, 201 bp, Homo sapiens
gagacagagcctgactccactatttagagtcttgttttccaccatttgtgtgttttataaatgacaactatttgaattgaatgcaaatatctcaggggatsaacagagaagaaagagaaatgcaaatgtatttgttcattttattcctaaaaataaaaagagaaacatactgtcactattaggagtaaacatttccaagag

SEQ ID NO: 16982 - DNA, 201 bp, Homo sapiens
tctccccacatccatcattactgatttacttcttcatcgaggacctgggattttgagatgtgagatcaattttaaggatgttctggctcctaggagcgacsttgacactttttatcatatccagagaaagtgtttggcgtaatgactcccacgaggcctcacttcaatgaaaactatttttctaaagttagatatggagga

SEQ ID NO: 16983 - DNA, 201 bp, Homo sapiens
tatcttcaatcagataaggaaatcatgcagaaattcctttaaacgtggaattgttaggagaaaggaaaattcctttaaacaagaaatttttaggagagagraaaactcataacaaatgttttcacccatgacataggaagaatggcataggttccttctaggtgtaagaagaaaagaggaacctgtcttccatcctgtgat

SEQ ID NO: 16984 - DNA, 201 bp, Homo sapiens
ctcacctttgatcctctgttctgaggaattcttgatagcctaggactaatctatagttctcagaggggccagttgtcttgttgcctcctgttctcgcctcygcctgcctgtctccctggctctgagtctctggtgatatgtactggctcaccgtcaggtgttgggggatggggaggcggctgtgcagctgccgccgagctg

SEQ ID NO: 16985 - DNA, 201 bp, Homo sapiens
acctttgcacatggctccagaatttccactggttcaaaagaatccccagcaaccccagtctcaggagataattgctcttaacagcgcaccacactgggcaycccagcacttatggacagcagaggaatgtaagggtgaatgcatgtttttttttctgcaaatgactgtcactcattcatcttggagcccacctgacaactt

SEQ ID NO: 16986 - DNA, 201 bp, Homo sapiens
gtcaacacaatcacagtattttatagcccacacggaccttggactctggcatgccatgtaataggctgcaaaaagtagcagctctgcttcccatctcactkggggcatggggagaggaggattgggtttagggaggaagggtacaggtgtgaagggcacaggtatgaggtgcataggtatgagagactcaagtgtgggggg

SEQ ID NO: 16987 - DNA, 201 bp, Homo sapiens
ttagaaaagccttaattcatttcatctgacagctcagagccagaagttgccaggtctactcatttgcaggttgtgttgtcaacacaatcacagtattttayagcccacacggaccttggactctggcatgccatgtaataggctgcaaaaagtagcagctctgcttcccatctcacttggggcatggggagaggaggattg

SEQ ID NO: 16988 - DNA, 201 bp, Homo sapiens
atgcgagaggtctgcagcttgaacgagaaagtacttgtgcccagtcctaccttccagggcaggcactgggcttcttggatctgctgagcaggtgtctgaawttgcatgagacgtttccagctgtgaggagtgaccaggtgagccccacactgttgtgaacacttttgttaggaaccaggacaggggatgacatggaagagg

SEQ ID NO: 16989 - DNA, 201 bp, Homo sapiens
ttcagataacctggggtagggcttgaaaatttgcatttctaataagatccctgctgatgctgatgctgctgatgggtgcgtgtgtcgggaggggaccacaytttgggaaccactgttcactagggtttcaggttcctgagtaagagcttaaagaatgaacatgcaaatggccaataagcacaggaactgatgttcatctgc

SEQ ID NO: 16990 - DNA, 201 bp, Homo sapiens
gggtcagagcaagagatatacacttgagaaacattaatttattaatggtgttttgaatcatgagatggactgatgtcccttagtcttgaagaaggcatagmcagagaagaggaccaacgacttagctctgagaaactacaacttaatgtctattagcactgcagtaggtctattactaaggccctgagaacttgatcatct

SEQ ID NO: 16991 - DNA, 201 bp, Homo sapiens
agatagaattcgtgagttgtcagtatcttctcccccacatgacttgtctttttcactttgtttatggtgctttttgtcatacagagttattaattttagtrtggtaaaatgtatctgcatttttttgatgatttttgttcatcttctctcattaaaaaattccttccacatactgagataaaaaagaagtcatttatattt

SEQ ID NO: 16992 - DNA, 201 bp, Homo sapiens
aagggcaagcctctcccacagatacagtataatactaacttccaagaacataacatgtcatatggtcacaggtataaaaacataaaatggattttcccgartgatggccaaatttatccccacagggaggcagcatcttttctacttaagaagtacctttcggaagtgcttttcaagttaatccaatcgcaaaaacattga

SEQ ID NO: 16993 - DNA, 201 bp, Homo sapiens
atagcaaaatgctatgtgtaagtttgaatgtgcatgaagataggtgggaagaaaacacatcgggccataagcacttaccacagcaggatgggaatgggggragggtgggggcaagtaactttttctatatacatctttgtatgcagttgtatacatattgcctttgtaatttaatgtacaaagacaaaataagtacctaga

SEQ ID NO: 16994 - DNA, 201 bp, Homo sapiens
tcttattctgccatctttctagtactgaatccttgaatgacttttacaaagagaataaaataggaaagcataaaatagtccctgggaaatacacacagtcytctaagacttgaaactagatgttcctaatggagaggttagtaagagtgccggacacagcacaggggaagatttgaggaaggaagtgggtgagaaacagca

SEQ ID NO: 16995 - DNA, 201 bp, Homo sapiens
gtagcatctggagtcaattcagacatagagaataataatatgtctaaaattaaagacagagatttcaaatttgagatattttccctgtaaattttagaagrttagagtttcccaaatttagatttttttttttttttaaagaactgcctttaaaccaagtttcatgccctgcttgagtaggccatgactttgtctatggca

SEQ ID NO: 16996 - DNA, 201 bp, Homo sapiens
gtttggaaacatttttgattgtcacagctgagtgggggaagtatatctggtgtctagtggctacaggccagggatgctgctgaatatcctacagtgcaagsgcatcccctatgacaaagaattatgtgactcagaaatgccaataatgctgagcttaagacacccttctctacatgtcttttcttatctgcaacatggagg

SEQ ID NO: 16997 - DNA, 201 bp, Homo sapiens
gtctagtggctacaggccagggatgctgctgaatatcctacagtgcaagggcatcccctatgacaaagaattatgtgactcagaaatgccaataatgctgmgcttaagacacccttctctacatgtcttttcttatctgcaacatggaggggttagaagaagaggttgatgtgtgtggctagattaggttattacccatct

SEQ ID NO: 16998 - DNA, 201 bp, Homo sapiens
tatcaatgggttaatggattaagaaaatatggtgtgtatacacaatgaaatactttcagccttagaaagaagaaaattgtcatttgtgacaacatgggtgwacctggagcatattatgctaagtgaaataaacaggcaccgaaatgccaatatcatatgagctcacttatatgtggaacccaagaaagttgaactcagaca

SEQ ID NO: 16999 - DNA, 201 bp, Homo sapiens
ccaggctgatctcaaactcctggctttgggtgatcctcccatctcggcttcccaaagtgctgggattacaggcgtgaactgccacatctggccttgatttrttttctaataggttcctagggcactgtggcaacaatgccttttcccctgagaggtatataaccaaggagaggacatttggggaccttctatgattgattt

SEQ ID NO: 17000 - DNA, 201 bp, Homo sapiens
atctctaccatctcaacatcattctgtgagctgggtctttcagccccagtgagctggtgactgtcttcaggttttagatgcacgcgtgcgtgtgtgtgcgsgcgcacttgaggtattgcttcttttaacacaaaaagctgaagtttcaaagcaggtggggtgtgggttaaacaccgttctaaatggcaggcctgctgttca

SEQ ID NO: 17001 - DNA, 201 bp, Homo sapiens
aaactctggagagtctgctttgaaggaaatcttcacataaaaggtcctatgtaaaaatgtcttctcctgaaggtggtagagttatttagaatctatgaggygaacagctagagttcagaagttgtctaacagtctacacgtattcagtaacatagactttatcaaaagatgcactctcctcctctctaaacctcaccagta

SEQ ID NO: 17002 - DNA, 201 bp, Homo sapiens
tagctaactgaggctggcctaccagggagctcagggttgggacattttggatagacttagccattcattgaaaaacaagtaaatggtgtaaaaccatgctmattatgcataaattatgggcaatagcataccctttgaattttgagagttttgaagggttgaaataatttttgaattagcactcagttcttgatctgactc

SEQ ID NO: 17003 - DNA, 201 bp, Homo sapiens
gcctctgcgttgctcaaaggcagaggtcactgctcacatcctggagtacatggatggtggcctacggaaagatggtgctgcctctgaccatggaccacttsgtagccttgacatcgtgcatggcagagcacttgctccgctgcatgttttgtgaagctgggtcaggttctgctatgggagtcatgagctggggagccacac

SEQ ID NO: 17004 - DNA, 201 bp, Homo sapiens
ttgactcagctttgagtgtcttggcctctctttccatcccccaacctggggcttctcttcaggcatggggtgaagggatcaaaaccctgagggccaccccsactccatgatttctttctgcactgtctgctctctgtcctgtgctttcctgatttggaatcacttccctcgctttttctcaggctgagatccctcccagct

SEQ ID NO: 17005 - DNA, 201 bp, Homo sapiens
aaaaagcaaaaggaaacaagtaaaatcaatatattttatttaatccaatgcaccaaaaatattatcatttcaacacaaaacaaaattattgagaaagtatyttacatttttttgcactaagtctttgaatgctgtgtataatttacccttccagcacatctcagtttggactggcacagtgtcaggcgctcagcagctgca

SEQ ID NO: 17006 - DNA, 201 bp, Homo sapiens
taacaaaggacattgagaaaaaaaatcctttggttgttccaagtgtacagaacatcagataaaaataacatcaattttccacagagaaaccaaatatgtcrtttaaatgcttccagaattaaacatttgatgtgtatgttgggtgaggaggcaacaggattggatagggtggtgggaagtctgagttttggtctcccctct

SEQ ID NO: 17007 - DNA, 201 bp, Homo sapiens
  misc_feature (1)...(201): n = A,T,C or G, or insertion/deletion polymorphism (see Tables 1-2)
attagaggtggtccttattttggtttgctccatactgggcagccagaaccatctagaacaccagccaggacttgctccccaagggtgctcctctgttgcgntgcctgcctctctgcccaatctctctccacacagtggaggctctgagtctttcctactttgagccctcatctccaccagcatctatgcgtagctctgctg

SEQ ID NO: 17008 - DNA, 201 bp, Homo sapiens
cctccatctcaacccctccccaacttcaacccctcccccacctcaactcctctccaacttcaacccttcccccacctcaactcctctaccattgcaactcytcccccatctcaactcctcctccatctcaacccctcccccacctcaacctctccccatctcaactcctctctcatctcagcccctcccccagctgccatc

SEQ ID NO: 17009 - DNA, 201 bp, Homo sapiens
aaagtggctaagataatgggttttgaagtcagggtgacctaggattgatcttttgctatgtcacccaccacctatgtgaccatcagggaagttacttagtycctttcagtcttgcttctcttcctgtaaaatggggtttataatagcacttgccacatgggcttattttgagaaataaggaaagtgaatctggttagcatg

SEQ ID NO: 17010 - DNA, 201 bp, Homo sapiens
ttccccatctcaactgctctctacctcaactcctcctccatctcaacccctccccaacttcaacccctcccccacctcaactcctctccaacttcaacccytcccccacctcaactcctctaccattgcaactcctcccccatctcaactcctcctccatctcaacccctcccccacctcaacctctccccatctcaactc

SEQ ID NO: 17011 - DNA, 201 bp, Homo sapiens
tttgagaaataaggaaagtgaatctggttagcatggagccttgcacattgtaagtatttaatacctaggacaaataatattataaacagcatcacctatayttttctttgtaattattctttatttgtttgatccatgtccatttttcttttttttacagctccagaatttgcaatatgaaaatagagattatttaaacaa

SEQ ID NO: 17012 - DNA, 201 bp, Homo sapiens
  misc_feature (1)...(201): n = A,T,C or G, or insertion/deletion polymorphism (see Tables 1-2)
tttaaccatctttctcttcctctttttctctcgaagcctgtagcagggagggaatgaaggcatgcagggttggcgtgtgagtgaggaagagggcttgtccncctttcccctctgtccctgcccccgcctctcctggggacctccttgcagaccctctgcagctgtgctcacatcccactactcagcctcactgctgttcta

SEQ ID NO: 17013 - DNA, 201 bp, Homo sapiens
acattgaaagaaaataaaaatgctgatttactaattaactccatgcatcttgtgtactgcccccctccccaccccccaaaacatcctaaacattcatgctscaggctgctgctccatgcctccaataaactagctcttcaaagagatctcttttgtattcttcccttttccagctgcctccagtgggaggggatggctccc

SEQ ID NO: 17014 - DNA, 201 bp, Homo sapiens
tgtcctccttctcttctcttctgcttttagctcctttaaccatctttctcttcctctttttctctcgaagcctgtagcagggagggaatgaaggcatgcasggttggcgtgtgagtgaggaagagggcttgtccccctttcccctctgtccctgcccccgcctctcctggggacctccttgcagaccctctgcagctgtgc

SEQ ID NO: 17015 - DNA, 201 bp, Homo sapiens
tctgacaacaggaaaatacagttactgtccctctgagactggaaagggattttcagatggtcttcagactggtttccaatcagagttatgactaattgctrattttccacatttccatttgtggatccttaataggacagtggaactcggggcactggaaggagaatgcccaccaaattcccatatgaagaaattcccata

SEQ ID NO: 17016 - DNA, 201 bp, Homo sapiens
cacatttccatttgtggatccttaataggacagtggaactcggggcactggaaggagaatgcccaccaaattcccatatgaagaaattcccatatgaagtmatgcaataccgcatgactacagtattctggtcatgaactttttctgaggatcctcctggatattgagggcatggtgccaggaacacttggcctctgatca

SEQ ID NO: 17017 - DNA, 201 bp, Homo sapiens
ttcttcccttctaaggcaggccttgggggaggactctcccccaagactctgcagcctggtgctcaagccggatcggcccgttctgtgcttccttttgtggyaccatcagagtctcctccctgtttggaggctcaggtgaatcagtcccctctctcccaccctgcccttgcgctgggctgcctccactctgctcccatggcc

SEQ ID NO: 17018 - DNA, 201 bp, Homo sapiens
atgagagtctgtcttcctgctagcactgctgcccttaggccaagtctcttcacaaagccatttatgccattatgtttgcccctttcctttttggctgcacyctccaagaattatcccttttaactcacataggtgctgaaactccctaaggtattccacattaattcccaacctatgcatttatgattcctgtctccttgg

SEQ ID NO: 17019 - DNA, 201 bp, Homo sapiens
gttttagcccataactcaccatggagggcccttccaggagacgtcgggcagggctttcctacagcggaaccgggaggccgccccgtgagggcagaagctcycgccaggagccagcaccaccagcagagtgtggaacccccagaggtcctagcctcctccacggggcctcccaggtgctaagtggggagatggggagagggt

SEQ ID NO: 17020 - DNA, 201 bp, Homo sapiens
ccctctacttggaaatgcctggccgtgttcgtggagcctgggaggtgcggaggagcggcgacgcggccatggcgctaggcgcgcaaaggccccgacacctyactagggcggcggcgggcccgtggcaccgctcccggcaccgaacagggcacagcactggggacacctctctgcagggacccaagacgcgcgtgcgtgtgc

SEQ ID NO: 17021 - DNA, 201 bp, Homo sapiens
ttcgcttggatcgacttcttattttgagattttgggcattgcggtttacgcaggaacctcaatatcgctctccccacctccctccctctttctccaacctytggatgcgtctctgctggcagatataaagacccaagtcttcgcggtggaatttcttagatggacttgcaggggctggcgttataaagcatgtcatcgtaa

SEQ ID NO: 17022 - DNA, 201 bp, Homo sapiens
agccctcattatcccgggctgtaacctgagagggaagggagatgagggggagaggaggaggaaagacctttgaccttgaatcaagggccgttgagtgtgtwcaagcagatgccccgaaagcaaggagagcaggggagtgaagacgtggtaagcctgtggatggctgccccagcaggccctggggacttggaactcctccca

SEQ ID NO: 17023 - DNA, 201 bp, Homo sapiens
atctctcccatacatctctccccttttagcctgttgttactaatgccatagtttgaatgtcatttttatttctcccccattccatatgattccctgggggyctctcccctgcagaaccaacaaaggacgggacatcaagaccatcaagtctctgcgggtgctccgagttctaaggccactgaaaaccatcaagcgcttgcc

SEQ ID NO: 17024 - DNA, 201 bp, Homo sapiens
aatttgggaagagcgttccagcagggctctgggaagggagcaacctgagttaaggcatgtgagccatccatggctagaatgcagaatatagaatacagttrctttaaccagaataacctggggctcatgaaaactcattactgctttcgtcaggaattttagaatcaagatctctttttatgttttttggttctttgtaat

SEQ ID NO: 17025 - DNA, 201 bp, Homo sapiens
cccatcttctctctttagccatggctggcctgcctttggagaatttgttctgggaatattcctttttctcacacggatatcgaagttcttttcatctgcckgagctaaaggtcttagtttcaaaggaaaataaccaacatcccaagaaatctataagaaagctttttcttttaagttcagacccagatggtgtcttctctc

SEQ ID NO: 17026 - DNA, 201 bp, Homo sapiens
catcttgcagcaatcagatcctacatcaccatgaactgtcacattgcgggatgcaagacctccatgactgaaagatatttattatatcaaggaccaaaacrttcttgttagcactaaattttaggatgatgagagaatgtagaccttctctgagatttctgtattgagaagcaacttgtactaatcagtttccttggtttg

SEQ ID NO: 17027 - DNA, 201 bp, Homo sapiens
cttggcttgactgggatcagcttatgtctactggatagaatcttattttagaaaaacaccttgactttgtgactcaggcatcctctctgtctgctgaggcrggggacacattttataagatgtgcttcatccatagagattccagacagtcctgagtaaccccatccatgtaaagagccagccatctgtagtcagatgtcc

SEQ ID NO: 17028 - DNA, 201 bp, Homo sapiens
tagctgcctgtcagggatgttggggattcctgcatggggacagaaggtagggtgatcatgaagtctcttccatcttccagagtctaattttaataagttakcaaaggcttggtgcagactctatgctcaaaaatgagagtgacttgaggtatgtggtttgatgtacatggatcctaggtgggtaaagcagtttgggcaggt

SEQ ID NO: 17029 - DNA, 201 bp, Homo sapiens
gtgccttcatcatcagcctcatccctacaacaatgtttatatgtacagatcaagaagtcattatctcaaactgacaggcatcagaggtttgccgaagcccraggtgcagaggttgtagttaggcttgggatcagctgtatacatcaacggaccacagcagcatgtgggagactacaggagggaatgcacagtgcctggcac

SEQ ID NO: 17030 - DNA, 201 bp, Homo sapiens
ctgtggtacttcaggtgagggtagaggatgaagcttgcagagagcaggggactatgtggaggagaggctccatttttcaggagactgggaaacattggatkgaacacatgatatgtgagctgggaggtgcagagaggccagggaggagagggagcctgagacaaaaaagggcaggcctctttccgtgggggaatggaattg

SEQ ID NO: 17031 - DNA, 201 bp, Homo sapiens
gagaggctgtccttcatcacacagtctaaaatagacacctggtcactgtgccatatcacctatgcagttgaccaccaacccccacaagaatgttggtgccytgagatcagtgatttgactgcctcgttcactccatatccccagtgctgagggcaatgctgacatatgggccctcagtaattatttgtgaatgaatattta

SEQ ID NO: 17032 - DNA, 201 bp, Homo sapiens
atctcccaaacatatcccaagtccaaacacttctccatccccactgctaccaatctcttccaagccactatcctttggaccattgcaatggcctgctaacytgtctttgcatctttgtttccctagaataagagaatgtgatctattgacacaacaggcagggacaatatgaactctttttgctggctcataaagccctat

SEQ ID NO: 17033 - DNA, 201 bp, Homo sapiens
aatggcaccactatttctccagttgtccgagccaaatattctcattatcttttatttctctccatttttcctcacttctgatcagtggtaagccctgtcaytaacatctcccaaacatatcccaagtccaaacacttctccatccccactgctaccaatctcttccaagccactatcctttggaccattgcaatggcctgc

SEQ ID NO: 17034 - DNA, 201 bp, Homo sapiens
ggctgggctttgtctgattcccagccccctccccacccctactcccttcacatgccgccctctacatagattgggttgccccaatgcttcctttcataatyaattctcattttcctttctttaagccagccactctgcccgtatccccaccaaccaggagacaccgcactgtcttcctgtagggaagtcaaggctccatga

SEQ ID NO: 17035 - DNA, 201 bp, Homo sapiens
ctttattttgctttatttttcatcatagcccttattgtttccccaacggacacacaaacacacacacatacatacaagcacagatattttgcactggagtrcaagcttcttgaaagcagggcctttgtcttaccttcagggtccaaaacagtgcctagtgtgcagttgactcacaataagtgtttgctgaaagaatgatga

SEQ ID NO: 17036 - DNA, 201 bp, Homo sapiens
tgccgccctctacatagattgggttgccccaatgcttcctttcataattaattctcattttcctttctttaagccagccactctgcccgtatccccaccarccaggagacaccgcactgtcttcctgtagggaagtcaaggctccatgaggggatttatcagttcagaagttcccagggccaaaaccctgtgtacagatag

SEQ ID NO: 17037 - DNA, 201 bp, Homo sapiens
gagaacttcctgatcaccctatttaaatagcattcccccattgtcactctctttccctctttattttgctttatttttcatcatagcccttattgtttccycaacggacacacaaacacacacacatacatacaagcacagatattttgcactggagtgcaagcttcttgaaagcagggcctttgtcttaccttcagggtc

SEQ ID NO: 17038 - DNA, 201 bp, Homo sapiens
cagcaccccctcattagaaacgaaggagcatctctaagcagatattcttcctgctgctgttcgcatcctcccacagcaaccccggctgggcttctccctckctcctctctgcatcccgctcccctgctccactctcacagagtgatcccaggccatccattgcctgagttgaacgtatctagctagggtggaggtttcggg

SEQ ID NO: 17039 - DNA, 201 bp, Homo sapiens
ggcaagaagtagtgtgtctggcttggagactctatgccagagttgggcaataggatattccccccacacctccatcgccttggttgtctcagcaggggagmacatgcttcgtgtggaaatgaatatggcttacagtaggaaggtcaaatatgtttgcagccctgagataatgaagctcatcacaatgaacctgtggacatt

SEQ ID NO: 17040 - DNA, 201 bp, Homo sapiens
gcaatcaggagaggcatgtacaggctccatccactgcactgaccgcctgctgcatctggtccctggtaccaggcctttaccttctgttactgtggactgaycacccctcaagttccatgtggagtctgttgcccatgtagagaaaaatgagcccctttgtttattctgtctccatttttttttcttacaattttctctgga

SEQ ID NO: 17041 - DNA, 201 bp, Homo sapiens
ctcatctctggaaagcagggagcagctagaagatgtgttcttataaggtgaagatgggccagattaaggggaacagcaatgaatgactttaaaatgtgtcrgttatccaagagatcctccctgccacctcccagagcagtgggtacttcttaggagcttcctttattgtatcttgagctccaaatttgtaggactagatag

SEQ ID NO: 17042 - DNA, 201 bp, Homo sapiens
tttacacttttaaaaataaaatttaaaatatctacatcaaaacctgtttcctttatatgtttctaatgctgattttataccagtattgtacctaaggacayatttggatttacaatcagaaaaaatatcttcaggagcaataatgatgcagaattttcccagaaagcttttgataaaaacagataggatacttaaaatgat

SEQ ID NO: 17043 - DNA, 201 bp, Homo sapiens
catcattataatctccttattttcaccctcaactttgttgtccctctgctgctttgttataccttgtctggcaagacttcagccctgctaaatcccacttkcccctattcttcatgtacatatgggcaggtgaccatagctatagaaaaagtcacaaccacgccgattgacctcactgtgaattgatgactgccacctcca

SEQ ID NO: 17044 - DNA, 201 bp, Homo sapiens
ggtgaaggtcctctgctagggatattaggggcattttacctgtgggaaatgtttactggtgtggacgagaatggagaattaggatgcaccacttggcttcyggaaaccagacagagcactcaaaagaaattaaggagtgggcctaaaaagttaaaggaactgcctctcctttctgctaactttggattgtttttgcatgga

SEQ ID NO: 17045 - DNA, 201 bp, Homo sapiens
tcacttgcttcattccaggaagaatgggttagccctgggtttactgcctctcttccccacgtcttcagctgctggcagttcttagtgatttcagtatccaygtagatgacccttcctgcaccctgacctcttggttccttagccccttctgtttggtgactttgccttcttgcttcctgctgacagctcacctccatggtc

SEQ ID NO: 17046 - DNA, 201 bp, Homo sapiens
aacttctaacagctttctatacttccactgtgaaaaaggctgggtgcagaacaacctgcataatcatatgccttaccatttctctttttatcttaccttcrtgtctttttatcatataattttaccaccattctataaggacctccctccaggcctggagagctttctgttcctcaatatgcatccctgagaatggatgga

SEQ ID NO: 17047 - DNA, 201 bp, Homo sapiens
tctcttctggggcttcctcatccttagcaagtatatgtttttggtgtttggggcataggaggctggatataaggatcatgactaataagaaaggacttacrtaagaaaaaataggaatggataagagaaagatattcatagaggtgaagccaaccagcagagatccagtgagaattggtaacagtgactcagaaaaatggt

SEQ ID NO: 17048 - DNA, 201 bp, Homo sapiens
gatttccgactacactttaagtgcaaacatggctatccatgaagaaacacagaagaagcactgttaaaaagcaaagtgcctgagtgctagttatatttgtstcactaatataccctgtgacctcagagagaaaaccactccgatctcagaacctctatttcctcatctttgaaatgagaagaatgccacctgcccttccta

SEQ ID NO: 17049 - DNA, 201 bp, Homo sapiens
tcccctggggatgtggaactcacaataagtgctgtgctgaaactggcttgtcccagctcttgagtgtcctctctgtatgtctcttctagactccatgttcrgtgatatcaagatggtagcttgaaattggccatggagagagtatttataccccagaaatttgcaaatgctacacattggggcttttcccccgaagttaaa

SEQ ID NO: 17050 - DNA, 201 bp, Homo sapiens
tttgtggtgtctccgtcctttgagtacaccattatggccatgatcgccttgaatactgttgtgctgatgatgaaggtgagaggagagaggcacaagagccractgagccccagcgatggttccctcccagggcaagtgggaagacaccccaacatcccagcccatcactgctttacctacttttccatcattgaatccttt

SEQ ID NO: 17051 - DNA, 201 bp, Homo sapiens
gtgaagactacgtctttggggggaacccagagtgatcaaagagataaggaaagtttgcccttttcaattaataaggacaaaagggacttaaggataaaacrtgttctttaagataggtcactgtggttgtggatgagacttcctgggtgtatagctctctccctccatataatactgctcagcaaaccttcatgggagaaa

SEQ ID NO: 17052 - DNA, 201 bp, Homo sapiens
ccaaaggaagcagtgactgcacattaatcttggaggcaaaaaaagtggacgaagtcctgcttcatgcaaagaagacccatttaccactgagccagacaggycatccagtgcccctgttctgtggaagagaacgaaggattaaaattaaatttagccgtcaagtagcccattaactgtggatttaggaggccagctgaaaag

SEQ ID NO: 17053 - DNA, 201 bp, Homo sapiens
gctatagctgtgagactactgactcccaaggggcctggcctctggccatcagaagtctctgagccaacctaacatctcgctgtcttgtttatcctcttcckgtgtcttcctcacttcacttggtattcagaactcctccttaggagagcagccaagggaagctactctccttcctggggatcccaggcaaagccatctctg

SEQ ID NO: 17054 - DNA, 201 bp, Homo sapiens
acagcgttttgagtccaggatccagtcacacgcaaaacaaatgaatttgttaagacttatccagctgtctgtaactgcaaggggcatggcagtgggaggarggagggagacagtactgtcttattttctcagaaccagcacttcccatcctttgggaatcagggcccagatgagtctggaactgacctcagtgttggttca

SEQ ID NO: 17055 - DNA, 201 bp, Homo sapiens
tggaaagacatgcatgaaggtgtccatgccatcctctgaggctgttacatctcttggatttagacatccaaaaacatgagactgaagggagaaaaggagayaggtcttcctgtagggtctggggtgaggggtggaaatgggtaaaggaggctgaggaatgcctcccctcagactgtggactcttctatacccccccaggag

SEQ ID NO: 17056 - DNA, 201 bp, Homo sapiens
gaagttggctttcagaaacagagtctgtagacatgcagtgtttccagtgtgttaccgtggtcacagctactgaaggtgaaatgtacataacaagtacttaygtagcacatacttattgtgtgcaaggtactgatctaagagctttatgcatataaactaacttaattttcacaacagcccagtggagcagaatggtattat

SEQ ID NO: 17057 - DNA, 201 bp, Homo sapiens
aaggaaatgaacaaatggcaggtgtgcaggccacgtcgtgctgctcaaattagccatgttgctaaggaaacaagtcaaccattcaaaggaaggagcattgrgtaaaggagataaatcaataagtgaacctatttttatcatttccctaatgattgtcttgaaactgctagactagaaagagagttggagcaacacaggtcc

SEQ ID NO: 17058 - DNA, 201 bp, Homo sapiens
tgaaaaggcttctgttgaattttgaaaaagatcatgcagaagatgataagcatggtttcacaaaatgtaatataattctgcaattctttgcctaaaggctytcagtggtttgctgttttctgcagcagaatacaagatccctcctgacctgaccacatgcagcctgccctccagctatactggactacttgtggttccttg

SEQ ID NO: 17059 - DNA, 201 bp, Homo sapiens
atgaacacatgctcatttgaacactcagaaaatggttagaggagtaaagaagaaagtgaaaataaccctgctaccgagagaagactcatcatccttccagyaagacagaattttttcttgttctctcccttctctttttttttgtttttgttttttttgagacggagtcttgctgtgttgcccaggctggaatgcagtcgc

SEQ ID NO: 17060 - DNA, 201 bp, Homo sapiens
cacgatgacacgggctggtgcatttgcattcagatcctctgttcactagaaatggaagggaccttggaggtccttgagtccagcttctttccagagtcccygcaaggggcagtaacttgccactgactacacactaggttattccaggaccagacctctcactcctagtccagcgctccttccaccacaccatgctgccca

SEQ ID NO: 17061 - DNA, 201 bp, Homo sapiens
gttcctatagcaccagtatttcatggcctgcatcttaggaataccactctcaacgctctcaacttctgttgtcttttgtcagtgacttgtatgcgtgttgycagttctctttctggatccatcgcccaagcatgttttcaggaaagggtatggattccttggccaccattgctgctgggttcccatctttaatttgcagga

SEQ ID NO: 17062 - DNA, 201 bp, Homo sapiens
ttaggctggctcagggctcctttcctttttgtttcatttactctaatatgcggtttaatttctaatccatggccaaaggcctcaggtgcctgatgtgtcargcagctttgggctatgatcttcctgttctcaggcaacaccaggccttaggactgaggggcagaaattagctggaggtggtgcgttggtgactcaatggct

SEQ ID NO: 17063 - DNA, 201 bp, Homo sapiens
ttgctgggggacaagctaatgacagaccccatggggattcacacggaaaagaagagattacaaacactgtgtctgtgctgcgtggcagccagggaagaagraagggcaggcacaggcccattttcttccctcctctttcctaagggacttctgatacgagaggaagaggtggggagtagaggggagaggatgaaggatgct

SEQ ID NO: 17064 - DNA, 201 bp, Homo sapiens
cacctgcacccacagcagtccctgctgacagctcttccttcccacctcatctccaggtgtcacctcccattttcccctctgcacaggaggaatgacaggtrctggagcatgacacagtgcctcagggctgaggctgcacaacttctcagctctcggtgctgacaggagggaagtgggtgctgaggtgtcagtcagctggct

SEQ ID NO: 17065 - DNA, 201 bp, Homo sapiens
tgaatgatttaatttttttatttctaatagaatgttgctaatgtataggaatgttagtttttattcgttgatgttatatccagcaatcgtgtaaaagtttrttagttaaaatcatgttggtagatttttttttagattatataggtagaaaactgtattaactacaaacaagtgttattgtatttgtttctttctaattca

SEQ ID NO: 17066 - DNA, 201 bp, Homo sapiens
gacctctgacctcctaaactttagtgttctttggcctataagttgagggtgtgcatggtttagaaagcgcatttatgtacattgcttcatcttgtcctcawaatgccatagaaaagaccttgctagcctcattttacagatgaagaaaccgaggatcagagagggcacatgaattgctagcaggcactagatccaggactt

SEQ ID NO: 17067 - DNA, 201 bp, Homo sapiens
cattcactcagggtgatacagggaaagaaattatggcaaggtgctttctaagtcagaccgttctcctgggcctggagctctcatttgaaggcagttaaackcgtgcattcttgtgcttgtgcatgagtgtatgtggaagagggaggtggggtgaaaatccccaggtatgttttcaaagcagaggtggatatggcataaatg

SEQ ID NO: 17068 - DNA, 201 bp, Homo sapiens
cttccaggaaaatgttgggtaatgacagtaatagaaggctgtcttattttgttccttatttaaagtttaacaatgaagacagatgttccttataatgttayggtgaatactctttataaaggaagtaaagaatgattgttaaactaatgtcaataatagctcaatattttcatctaattcataaactcaaaggttttggaa

SEQ ID NO: 17069 - DNA, 201 bp, Homo sapiens
gggagatctaatccctaattgggcagctgccttctagcaacaaccttgccctgtgggaaggagagcatcaattttggaggacagtaatgatctcttcattrtctatgtgagtataaattgtcagatgcataggagatatataataaatgttttcttctaattattagtaacatccattgagtcaagaaatatttgctatgt

SEQ ID NO: 17070 - DNA, 201 bp, Homo sapiens
atttttaaagtcaaatgtcacatattaaaatattagagaatactctgtaagaaatgttgtcttataacactgattctcagacttatgcctacatcagaatygtctggaaagcttaaaacgagattgttgggccccactccctgtgtttctaattcagataacctggggtagggcttgaaaatttgcatttctaataagatc

SEQ ID NO: 17071 - DNA, 201 bp, Homo sapiens
ctgcaacctggcttaattctgttaaattagaaagggctagttcctcgctctgcagctccataacctgagagagacgtaggtggctctgatgattccacaagggtgcctgtcacttacattccctgcagtgttgaactaattaaaccagcagtgcttcacccagtgctgcaaagaagcaactgcacaaatgcagcaccaccg

SEQ ID NO: 17072 - DNA, 201 bp, Homo sapiens
caacctggcttaattctgttaaattagaaagggctagttcctcgctctgcagctccataacctgagagagacgtaggtggctctgatgattccacaagggwgcctgtcacttacattccctgcagtgttgaactaattaaaccagcagtgcttcacccagtgctgcaaagaagcaactgcacaaatgcagcaccaccgtgg

SEQ ID NO: 17073 - DNA, 201 bp, Homo sapiens
aacctggcttaattctgttaaattagaaagggctagttcctcgctctgcagctccataacctgagagagacgtaggtggctctgatgattccacaagggtrcctgtcacttacattccctgcagtgttgaactaattaaaccagcagtgcttcacccagtgctgcaaagaagcaactgcacaaatgcagcaccaccgtggg

SEQ ID NO: 17074 - DNA, 201 bp, Homo sapiens
acctggcttaattctgttaaattagaaagggctagttcctcgctctgcagctccataacctgagagagacgtaggtggctctgatgattccacaagggtgyctgtcacttacattccctgcagtgttgaactaattaaaccagcagtgcttcacccagtgctgcaaagaagcaactgcacaaatgcagcaccaccgtgggg

SEQ ID NO: 17075 - DNA, 201 bp, Homo sapiens
ctggcttaattctgttaaattagaaagggctagttcctcgctctgcagctccataacctgagagagacgtaggtggctctgatgattccacaagggtgccwgtcacttacattccctgcagtgttgaactaattaaaccagcagtgcttcacccagtgctgcaaagaagcaactgcacaaatgcagcaccaccgtggggct

SEQ ID NO: 17076 - DNA, 201 bp, Homo sapiens
tggcttaattctgttaaattagaaagggctagttcctcgctctgcagctccataacctgagagagacgtaggtggctctgatgattccacaagggtgcctrtcacttacattccctgcagtgttgaactaattaaaccagcagtgcttcacccagtgctgcaaagaagcaactgcacaaatgcagcaccaccgtggggcta

SEQ ID NO: 17077 - DNA, 201 bp, Homo sapiens
tgagcttgacaacatttgatcagaagaaaaaactgggaataaatgtgctctactctgtgcaatcagctttctatctgtccatctatcctcctttcattgartgggtcccatgtgtaaggcctagcggtgagcagtaggagggacagcagtagagttaaatagggaagagatggaagatcactgggaatgtggtttcacttt

SEQ ID NO: 17078 - DNA, 201 bp, Homo sapiens
atctatcctcctttcattgaatgggtcccatgtgtaaggcctagcggtgagcagtaggagggacagcagtagagttaaatagggaagagatggaagatcaytgggaatgtggtttcactttgccctaatgcagcagctgttgacacactacatgctggtgtaactagccattgaactgttgttgccacctctcttgatcaa

SEQ ID NO: 17079 - DNA, 201 bp, Homo sapiens
tggaagatcactgggaatgtggtttcactttgccctaatgcagcagctgttgacacactacatgctggtgtaactagccattgaactgttgttgccacctstcttgatcaagctttgaagataagcatgagaaacaattagtgtatttcatattttttttatttttgttgtcatgcttatttttgtcctcttcaagatagc

SEQ ID NO: 17080 - DNA, 201 bp, Homo sapiens
ggtagtcagccagctgaggctatttataaaatgtccatgttggcctggatatcactactggttaacatttgtcaaactctaaactctgtagtctagtaaarcagaggatcaggagccagtttcagagggaaaaccaacctttccatttactaatttcttttctatccttagcctgcacaaagaaggttgagaagtcagaat

SEQ ID NO: 17081 - DNA, 201 bp, Homo sapiens
ctgtagtctagtaaaacagaggatcaggagccagtttcagagggaaaaccaacctttccatttactaatttcttttctatccttagcctgcacaaagaagrttgagaagtcagaattttagttatgaactgtgtgcaactacaacaaatagagtcagtagtaaataaatggttgtcacgagtctttggagaaggatttatt

SEQ ID NO: 17082 - DNA, 201 bp, Homo sapiens
tttcagagggaaaaccaacctttccatttactaatttcttttctatccttagcctgcacaaagaaggttgagaagtcagaattttagttatgaactgtgtrcaactacaacaaatagagtcagtagtaaataaatggttgtcacgagtctttggagaaggatttattattgtggccatagattggagtggtccttgaggat

SEQ ID NO: 17083 - DNA, 201 bp, Homo sapiens
caactcggagcgcaacaaagtgggtacacaggggccatgtgccagcctctgtagtgctctggtgctcaccccatcccagcactggaggtgaaccgagatgrtagcaaggtttctggggaatgagcaagggttggaaattgtccactcctgttcctcagggcgaagtatgaaccattcccagacaagccccttcttagccca

SEQ ID NO: 17084 - DNA, 201 bp, Homo sapiens
taggtggttcagtaattcccccatatcatgctgctaatagttagttggtggggtcaggattccaatgaggaagcctgactccagagcttaggtttctgacygtgatgctacactgccttcctaatttatgtatctagtggctgcatggtctgaattttttttttttttttactcctgatgcatcttaattaacaaaagtga

SEQ ID NO: 17085 - DNA, 201 bp, Homo sapiens
ggtggcttataaacaacagaaatttatttctcaacattctggagactgggaagtccatgatcaaagcagattcagtgcctggcaaaggcccctttcctggytgctggacagctgtctgtgtcctcacatggtagaaggggtgagggagctctctggtgtctcttttgtaaggacactaatcccatataagagcagagtcct

SEQ ID NO: 17086 - DNA, 201 bp, Homo sapiens
caggggatggggatccttgcccttctttttcgtctgtgcatttgacctctacccttttcttcctttctcactgagatgtctttcaattttttttttttttkgcctgctgtttcttttttctctttcacacagaggttggtcctgatgaacatgccagtagctgaggacatgacggtccacttcacctccacacttatggct

SEQ ID NO: 17087 - DNA, 201 bp, Homo sapiens
ggcttaattctgttaaattagaaagggctagttcctcgctctgcagctccataacctgagagagacgtaggtggctctgatgattccacaagggtgcctgtcacttacattccctgcagtgttgaactaattaaaccagcagtgcttcacccagtgctgcaaagaagcaactgcacaaatgcagcaccaccgtggggctag

SEQ ID NO: 17088 - DNA, 201 bp, Homo sapiens
  misc_feature (1)...(201): n = A,T,C or G, or insertion/deletion polymorphism (see Tables 1-2)
cctcagtatttgtgagaattgtgattcatctctcagcccaggattcacaagtcagagcagttcaccctcatttacctagcttgcagccgtcccagcaagancatgccttttgctgaaccaccagcttggtgcctaaggaataactatcagatctgtatgaaaacattcatagactctgttttactccttactacagcccta

SEQ ID NO: 17089 - DNA, 201 bp, Homo sapiens
agttttgtccaagtgaccccagttgccatctttacttgcccagccctgccctttttcccattcaccgtcctcctcttctgagcatggaacagagcctgccwtggtagatctaggggatttgaatttgtgctaataaccatgactttcttgcagagggcgtgcatcgacttcgccatcagcgccaaacctctcacccgctac

SEQ ID NO: 17090 - DNA, 201 bp, Homo sapiens
agcaagatcatgccttttgctgaaccaccagcttggtgcctaaggaataactatcagatctgtatgaaaacattcatagactctgttttactccttactayagccctatctctagtcatggcattttgacccataataggagaccccctcaacagaaacgatcagcggagaaaaggcagggctgctaatgcaaacctttag

SEQ ID NO: 17091 - DNA, 201 bp, Homo sapiens
ttagacccacaatagatgcccaacaaatgcaagatgagtgagaggtgaaaagcagggttctgtgcaaacctgtccatggagctgggcagggcgggaggtayggaaatcatgagcccagcttacgccttatcgtccatgttcactcatactttgcccagggtgtgtttactgctcctgagcccaggtagcaggtgtaaaaat

SEQ ID NO: 17092 - DNA, 201 bp, Homo sapiens
acattttcttgaatctaagatgccattgattatatactctatcaaaaattgaataattctgttattaaatttaagcattattaaatgttgggggaaaagcyactgctttctatgcattatgtattcatatattctgagttacaaaaccttccactgtaaagaaaggtatattgtagaattgaggaaatagaaaatgaagga

SEQ ID NO: 17093 - DNA, 201 bp, Homo sapiens
gaagctttgtgaatgattcatggcccatatgctggggcagcatgatgtggtgtatgggtgtgtggcagcagcacctcattacaaaggtcaagcttctcccragcttggtgcaggggctgtgcaggccacctccaggggcagagcacgttgcacctgatctttctctcatgttctctcaaagagagagtgttggagcttctt

SEQ ID NO: 17094 - DNA, 201 bp, Homo sapiens
tctgggatgttcttcccacattgtttcctctgacctactccagcttcactttttagctcatctgccacttccacagtgaagcttccttccctgacctttcrcttatcataattgagacctatttaatgtatgtctctttcattaagtatcgcaaggacagccatgatcaccatcttctctactgtaatgccagggcctgct

SEQ ID NO: 17095 - DNA, 201 bp, Homo sapiens
atgggtgtgtggcagcagcacctcattacaaaggtcaagcttctcccaagcttggtgcaggggctgtgcaggccacctccaggggcagagcacgttgcacstgatctttctctcatgttctctcaaagagagagtgttggagcttcttccagaaaagcaaggttctctatgggtgtatgacttccagaccagtgattctgg

SEQ ID NO: 17096 - DNA, 201 bp, Homo sapiens
cattcattcatttatttttgagacagagtctttctctgctgcccagactggagtgcagtggcatgatcgtgattcactgcagcctctatctcctggggttrtgattctcccacctcagcctcccaagtagcagggactacagacacatgccaccatgcccagcttatttttatttattttcatagagattcgtagagatag

SEQ ID NO: 17097 - DNA, 201 bp, Homo sapiens
aattgattttcttcctcttccagcttctggcagccccaggcattccttggcttatagccacgtcactgtaatctctgcctctgtgatcatattgcctcttyttcaatgtctgtgcagttttataaggccacttgtcattggatttagggtcattctgataagccaggatgatctcttatttgaacatccttaacttaataa

SEQ ID NO: 17098 - DNA, 201 bp, Homo sapiens
ctcagagtaatcctttgtcatacctcaggtattttatcttataagtacgtctatggatatcttcgctttgggagatttttgaactgcttgagaaaaggtamcttgaaaatgcaaggttatggcattgataagagtagaatgatgataatggaataaatgtggttctctcttgacttgtaatgttattacatttgatgataa

SEQ ID NO: 17099 - DNA, 201 bp, Homo sapiens; identical to SEQ ID NO: 2572

SEQ ID NO: 17100 - DNA, 201 bp, Homo sapiens
aaaaggattttctggaggttagttttctaaaagaaaattctactacattttaaatatgaattagtatatgaagatatagtttttacatagtattacagaastatattgggtaatgttgcaaatgtccctaaaataaataatatgtgctgtattagaagaggcctgtatgagaatctgaatcatttagaaatgttatgattc

SEQ ID NO: 17101 - DNA, 201 bp, Homo sapiens
gcagtgagccatggtcatgccattgcactccagcctgggtgagagagcgagacgaccttgtttcaaaaaaaaaaaaaaaaaaaaaaaaaaaaaaaaaaagygcccagctcttcccaaagtctggaaaagcaggcttcctggcccctaggggctatgtcaaatctgtgttccacagtggatggcaaggcttcattttatcct

SEQ ID NO: 17102 - DNA, 201 bp, Homo sapiens
gtgagccatggtcatgccattgcactccagcctgggtgagagagcgagacgaccttgtttcaaaaaaaaaaaaaaaaaaaaaaaaaaaaaaaaaaagcgcycagctcttcccaaagtctggaaaagcaggcttcctggcccctaggggctatgtcaaatctgtgttccacagtggatggcaaggcttcattttatccttat

SEQ ID NO: 17103 - DNA, 201 bp, Homo sapiens
taaggatctatttctcaggatctctggtattttgacttggcctaaaagaaggtcagatgttagttcttcctgtatatggtgacaccaaatcaccacatatrgtcatggctgtcttatagagtcttatacttacacagtcttgactggctgagatttatgccctaagatacatcactgtgaacaactcatggagttcctggc

SEQ ID NO: 17104 - DNA, 201 bp, Homo sapiens
gctgcagtgagccatggtcatgccattgcactccagcctgggtgagagagcgagacgaccttgtttcaaaaaaaaaaaaaaaaaaaaaaaaaaaaaaaaakagcgcccagctcttcccaaagtctggaaaagcaggcttcctggcccctaggggctatgtcaaatctgtgttccacagtggatggcaaggcttcattttat

SEQ ID NO: 17105 - DNA, 201 bp, Homo sapiens
tatgaagatatagtttttacatagtattacagaactatattgggtaatgttgcaaatgtccctaaaataaataatatgtgctgtattagaagaggcctgtwtgagaatctgaatcatttagaaatgttatgattctatctagaagaaaagtgttgtataagtcactacagaagaacaacaaaaaaagaaaagtattgtaat

SEQ ID NO: 17106 - DNA, 201 bp, Homo sapiens
gggtgtaaggtactggaactgctatggggggaaagggaggagggaattgacaggggacattaaaatttgaattacaggacttggtgattatctggagaagkagagaaaggaaagagaagggaggactcccaggtacttgactacagcagcagggtagagtaagatggagaattctggaagaaaaatggatttgagatgggt

SEQ ID NO: 17107 - DNA, 201 bp, Homo sapiens
tcacattttatgagacattttacaaggttgaagaagtacttctggaggagtatacggctgttctggtgtggggtctgggaactaatggctgagaggaggtrgagaaactggtctgtttgactgcatgagagaagacttccagtagatgttaatctctctgcaaataagggttgctacatggttgttgaagaagcagattca

SEQ ID NO: 17108 - DNA, 201 bp, Homo sapiens
gatgtcatttgtcatagacatgctagcccccggcagaataatgaatggtttcaaaggcaggatgcaggttgaaaacatcagtttctgtctcttctagtgcttttttttttttttttttaatttcaggactagccacatgtaagttactaggtttacaaaagccagccaaggctaaagggtgttgccctgctggggtgggaa

SEQ ID NO: 17109 - DNA, 201 bp, Homo sapiens
tttactgatgaaacaagaaaaatctgtcatttttttttttttttttttactggagagcagccaggaacttaccaaataaatagaaaataaatggtaaaatrtgtggcccaattgagtcccaattaaagtgagaccagtgcatcctagtgtgtggaattgtccttagattttaacattagagtcaatttttgaacctgatag

SEQ ID NO: 17110 - DNA, 201 bp, Homo sapiens
ccaaaagcaaaatactctctggaaagtggatttggccatttcagtgtgatccctttctttgggtaaggggaacaaggcctgcccactctgctcctgcctgrgccacccttcctcgttctgtctcctccgctctccccatcctcctaccccagagcctgtttgcactctcccccttgtccatcctgctccacctcatccttt

SEQ ID NO: 17111 - DNA, 201 bp, Homo sapiens
acctgttcacttcttttggccattttttaattaggttgcttgttttattatttagttgtagatgatttttaaattttttgctattatagataatgcttcartgaacaacattgtatgtgaaaatattgccctcactttgggtctatacttataataatttcctaaagctactaaatcaaagagagtgaacatcttcaccat

SEQ ID NO: 17112 - DNA, 201 bp, Homo sapiens
catccatgttgctgcatatatctgtagttcatttctctttatttctgcctagtattcagttgtatggatgatcacaatttgtttattcaccaatcgagggwcatttcagttgttttcagtttggggcaattatgaatgtagctgtgataaataactattcattgctgggtcaaatggtaagtatatgtataactctgtaag

SEQ ID NO: 17113 - DNA, 201 bp, Homo sapiens
aagtcaggaggaggcagcctgggcctggtggggcacttctctgatgtcaacagggtctgcccaccctgccatctttagtgtggcttcctgcatcgccgatygaccaagtggcagacctgagggcaaaaggaagcctgatattggagtcagccccctttggaagaactttccctacagcccacctagtaacttctgatgata

SEQ ID NO: 17114 - DNA, 201 bp, Homo sapiens
ataatgtggctagaacaaaactcctgatcctcttctgatcctgtctggcccctcatttttccttatctcagtaaatggcaccactatttctccagttgtcygagccaaatattctcattatcttttatttctctccatttttcctcacttctgatcagtggtaagccctgtcaataacatctcccaaacatatcccaagtc

SEQ ID NO: 17115 - DNA, 201 bp, Homo sapiens
ttgcttcatccctctcccattttcaaataaatacaatgttacagatgcattttgtatgctcattctttgttccttgctccggaagtcatcactcctctgarattgatatttcattaccatgtgcatttttgtaattttactacatgtgcatttatgaaaaagcatgtatatgaattttttgagttttaaagttttatttac

SEQ ID NO: 17116 - DNA, 201 bp, Homo sapiens
tttgttttgcaagacctctcaaagctttgctgcaacctacttttctagcctcaattcaacgattcctctgccttagcctggccacacggctcactgttccyggatttcccaggtaatcacttctttggctagaaataaccaacccccacagccacttccacccactgctgtatttgactggggaactctgactcatccttc

SEQ ID NO: 17117 - DNA, 201 bp, Homo sapiens
tagcatctgacattcatgggtgagaagcctaaccctgtaagaaaccacttattagcattgcgaatttggataagttactctgagcctgcttcctcctctgyaaaatgggatagcaatagctctctcatatacaaaaccctagcccagggtctggcatggagtagcccttagctcttattagctgcctatatccttcgataa

SEQ ID NO: 17118 - DNA, 201 bp, Homo sapiens
agaagaggtgagatttgaacagggctttgaaaggtagctggaacttatataagcccaggggtgtcatagagtgggttttgggggagaagttttaggaatarcaggatgatccccaactttgaggcaggccctaatttatttgtgggataaaaacgatattgaatatgagagtggtgggaacatcattggtttagttaggtc

SEQ ID NO: 17119 - DNA, 201 bp, Homo sapiens
tgatttcttaaataaaaactacacgtatgacagtatcttttctctattcctaatagaaaacatagcacaaaagtgaggtcacagaggaaaaatttggagtwtgatttagtgcttagttgcttgagccttattcttctgtaggagctttggaatgacactataacacttactgtgactgccaacacacaaaaaccctctcta

SEQ ID NO: 17120 - DNA, 201 bp, Homo sapiens
gcaataagcatgcgcagtatggaattttgtgccacatggcttcatggcagagttttttggtggctaacttaccaggcttttgcatgaaacataataaaacrccaggaggcttaaatactgggaaatgacatttcatcagaaaatgaatgacctttctaggaacttacaaacaagtgagaccccaatcatttcactttgatt

SEQ ID NO: 17121 - DNA, 201 bp, Homo sapiens
gggaagtgatttgagaatattcctgaagcatttttcgcaggatgtccctggagtcaaatctgactcagtttctggcttcttgcctccatctctcccatacrtctctccccttttagcctgttgttactaatgccatagtttgaatgtcatttttatttctcccccattccatatgattccctgggggcctctcccctgcag

SEQ ID NO: 17122 - DNA, 201 bp, Homo sapiens
tgttctgtccccatagagttctgcagcactctgtagatgtgacagaggaagaccgaggcccaagccgcagcaaccgcatggagatgtctatcttttatgtrgtctactttgtggtcttccccttcttctttgtcaatatctttgtggctctcatcatcatcaccttccaggagcaaggggataagatgatggaggagtgca

SEQ ID NO: 17123 - DNA, 201 bp, Homo sapiens
gtcaatatctttgtggctctcatcatcatcaccttccaggagcaaggggataagatgatggaggagtgcagcctggagaagaatgaggtaatgacaattgrtctaaagtggggagcagcagaggctccagaaaggattcttgggccagcaatgtaagaaaggaggactgcattttcttaacttgattaagaattatagaga

SEQ ID NO: 17124 - DNA, 201 bp, Homo sapiens
ccccagaagagacagaaggagaagacaccacatgtcgatgtgggagccacgcagcagccacctgtatgtgtgtaccagtttgcgtgtttgtgagtggttaygtgtgggcgtgggacaatgtgtcattgtccttgccatagacaaagtggcactgggtgtgcatgtcagtgtgtggcttggtgtgtgtgtgtgtgttccgtt

SEQ ID NO: 17125 - DNA, 201 bp, Homo sapiens
cattttgtatgctcattctttgttccttgctccggaagtcatcactcctctgagattgatatttcattaccatgtgcatttttgtaattttactacatgtrcatttatgaaaaagcatgtatatgaattttttgagttttaaagttttatttacgtgatacatagaatgtgtccttttgcagcaaaatgaacatttgtttt

SEQ ID NO: 17126 - DNA, 201 bp, Homo sapiens
tgaaggtggagctggcaggacttgttaatgggttgaatgtggggtaggagagatgggaagatcaaggagggctcttcagctacattaatctgttaatagcrgtgccatctaccaagataggggagccgagagaaggggcaggatggttgagcaaggtcaagagttgagctggaggcatgttaaattggagtggcctaattg

SEQ ID NO: 17127 - DNA, 201 bp, Homo sapiens
ttgtgtctccacccaaatctcatcttgaattgtaatctccacagtccccacatgtcaagggggagatcaggtggaggtaattgaatcatgggggtggtttmccccatgctgttctcatgatagtgagtgagttctcacgagatctgatggttttataaggggctcttccccattggctcagcacttctccttcctgctgcc

SEQ ID NO: 17128 - DNA, 201 bp, Homo sapiens
  misc_feature (1)...(201): n = A,T,C or G, or insertion/deletion polymorphism (see Tables 1-2)
gctcccccccccgaccccaagcagagttagacacctatagaattccaggcaccgatgaaaagacctttaaaattaatcgcacataacttctcattgaaggngcaggtgagaaggctgaggcgcagagaaggaggtgggcgtggggcacccttctgaggaccccacctcagccgctcataccccagccacactgtcctcctt

SEQ ID NO: 17129 - DNA, 201 bp, Homo sapiens
cactgtaattgtgactggtattgtagatactgtaagtgttactgtaattgtaattggtatccaggatcactcatgctctggaataaactggtccccccccygcctcaaacaaccccatctggactgccctgttcttatgtccttgcatgagtctgggatcctgtaatataggtgatgcttggaattggatactagtatctg

SEQ ID NO: 17130 - DNA, 201 bp, Homo sapiens
tctctggcagcgctgagatcaacgcaaaattacagtgtcccactctggccccaaatccaaactgtcctatgtctgcatcctcctccagtaccaaggccagwtccctgcctcatatctccttgccttgaccctcacctctaaaactgaaatgttatcccaaagtggcaataagcatgcgcagtatggaattttgtgccacat

SEQ ID NO: 17131 - DNA, 201 bp, Homo sapiens
atctagtataatctagtgtaaaaagctacatgatttatgtcatcacccatcttgttcattatagtatcctcagtgcctaaaacagtgcctggcacctggargggactcaaagatacttctctaatgatttgaatgaattttgtgctatggattatggtactgtctgaaaggagcgacatacacttaataatttctgaaagc

SEQ ID NO: 17132 - DNA, 201 bp, Homo sapiens
ggagatgacagctccctgtgtgttattgctcctgaagaccttccagtgggacaagatatggaggtggaagacagtgatattgatggttctgaccctgtgcmggcctaggctagtgtgtgtgtttgtgtcttcgcttttaacaaaagattttaaaaagtaaaaaagtaaaaagtaagaataaaaaaagcttatagaataagg

SEQ ID NO: 17133 - DNA, 201 bp, Homo sapiens
tttaatcttaaattcagtagacccataaattaaaaatactggatctcagtagccagagggtcattctgtcttagagcccctggacacagtccccctaatayggaccaggcctcatctgaatgttccatgccccctcagctgcgaattcccatgttttctgggccagttatctgacctcttcctgcgagggcagtgcagcag

SEQ ID NO: 17134 - DNA, 201 bp, Homo sapiens
aatgaaatggtgggatctagtttaatttttatcaagagaccttcctgaagccaagggccctggaaatggctgagtttccctgtggcttggagcagagggaraaagtggaaatgatacctgtgttaagtaacatcaagcacccaggtccactggcatgtctgttaataaaaaaattttttaatgttttcattcatgtatcgt

SEQ ID NO: 17135 - DNA, 201 bp, Homo sapiens
ctcccctcttgttttcagagccctttctggtgcttgccactctttaaagaatacaaatctctcatcagcaagccctgtagaaggggcaaaggggtgatgcrctttagctcatcaccactgggcacgttctctttaatcctctcttaaattcacctgctttggctgatctgcatacagtgggagtggtgtcagatcaacaca

SEQ ID NO: 17136 - DNA, 201 bp, Homo sapiens
actctttaaagaatacaaatctctcatcagcaagccctgtagaaggggcaaaggggtgatgcactttagctcatcaccactgggcacgttctctttaatcytctcttaaattcacctgctttggctgatctgcatacagtgggagtggtgtcagatcaacacactggccttttcccaaagcaaagcgggatcccagcctgg

SEQ ID NO: 17137 - DNA, 201 bp, Homo sapiens
ggtcagctgcctccatcctggccccccagagcatctgcctccccagcaccctgggctgcagttgcagagggccttctttttaatgtttttctaataatcayttttttcaaaccctaaaacaacactttgttattgcatgatagttgcaaaaatataaaaataatttttaagaataactcatttctaccccctcactccccc

SEQ ID NO: 17138 - DNA, 201 bp, Homo sapiens
ctcttcttgctttagattgttgacttgctagatgtcatcaagtacaaagagattagtcacagatgtattttgatggtggtggtcgtggtgggatttacctmcttggtttcagtgaatgttctggatgatacaagtaggggtaaatgagctgatctctgtttcataaggatgttaatgtttgttagttcgctcattcattca

SEQ ID NO: 17139 - DNA, 201 bp, Homo sapiens
tgcctccccagcaccctgggctgcagttgcagagggccttctttttaatgtttttctaataatcacttttttcaaaccctaaaacaacactttgttattgcatgatagttgcaaaaatataaaaataatttttaagaataactcatttctaccccctcactccccccacaggttatcatcactattattaataacattttt

SEQ ID NO: 17140 - DNA, 201 bp, Homo sapiens
gaggagagtttttatttccccatcccccactgagagctgttgatggtgtgctgggcgctagaatgccccctcttctcctcttcctcctcctctcactgtgrctggcattgcctctctaggtcacagtgggcagtatctttgaagtggtctgggcaatcttcagacctggtacgtcttttggaatcagtgtcttgcgagccc

SEQ ID NO: 17141 - DNA, 201 bp, Homo sapiens
gaataacattccaggtgaagctggtctgtcaggcaagggcaagcatctgaaaagcgtacaggagcaaggcaggtgtgagttattagcagccaacagttacrtagcagctgggggatgagacatgggccagaatgccacagagcctgccacgtccttactggtgacagccgcgcagggaggaaggcaggagtagggtgggag

SEQ ID NO: 17142 - DNA, 201 bp, Homo sapiens
tctcccttgccctgtgcactcctgagtcacagacagcctgcaagggtcccttagcacccttgcttcccacctacacatgggcaggcccagcacagacatcyaggaagggccaggctgtgcttttgcctgtgtctcataaagcacagtcctcttctcactggtgcttctgctcctcatccccacaggagaagacagaacctt

SEQ ID NO: 17143 - DNA, 201 bp, Homo sapiens
ctctaatgggtagaggacaggaatgctgctaaggcacacacaggagagcccccaccaaacagaactgtctctccacaggtgctggcagtgctgcagtggargaagccctgcctaggccagccctgatctaaccagcaggtgctgctgacagcctctggagcaggtgttccccagagaccctttgcttctgaaaggaccatg

SEQ ID NO: 17144 - DNA, 201 bp, Homo sapiens
agtttttgttgccaaggaatgttggggtgctggggggtttggccactggctaagccatagagtgaataaaccctgttaatctggagctttactggtgaacsatcagagctagccagccttacagaaggactgatttgtaatcacaaataaacacagagctagctatacaaatatcattgcaattcacttttcagctcatag

SEQ ID NO: 17145 - DNA, 201 bp, Homo sapiens
caaggaggagaactttgctcattatctgaataagtgtttgtctggtagcagctttaacagagactctgggctgggttcgataattgtgagtgttgattacrggggctgcttttggtctcccagcggttctttgaaaaaccattaatttgatcattttgggtggagagtttaagggaaccaattgcagttggctgcattgtg

SEQ ID NO: 17146 - DNA, 201 bp, Homo sapiens
actaggcttaatacctgggtgatgaaataatctgtacaacaaacccctctgacatgaatttacctatataacaaacctgcacatgtacccttgaacttaawataaaagttaagctgttgttaatggatgaatcaactatacagtgatagcttccatgactgataagaggctatattctgtggactggaatatttgaatggg

SEQ ID NO: 17147 - DNA, 201 bp, Homo sapiens
ttttaggatgggatcacaatatttttgatatccattttgaaaaagttactggtgaatgtgagtcactaaaaataaggaagtaattgaagaaagagaagaaygtgatactcatggaaacaagggattcgatggaggagagaaagaagaggaattgattcccagggcgatgaacggaagtctaggatgacagaagcctagaga

SEQ ID NO: 17148 - DNA, 201 bp, Homo sapiens
aataaaactaatgtattccccaatgtgtgttattattttcaaaagagctcatggttttgccaaaactatatacagtcatgtgccacataatgacatttcastcaatgactgatgtatatgcaacagtggtcccacaggatttagtggagctgaaaaattcctgtggcttagtgatgtcatagtcatcttaacatcatagtg

SEQ ID NO: 17149 - DNA, 201 bp, Homo sapiens
tggttaacagctattcactttctgtctcattgagattttgctttatgttcctctatgagcatggtgaggcataacatccatctcgcagttgatgaaaaacyaccattctctttatgaagttcctctcattttgtggtatctacagagaatgctttgggttctgagatccatgagactagggaatgtggcttccatctttgc

SEQ ID NO: 17150 - DNA, 201 bp, Homo sapiens
gatttaatgttccagtctgctactaagctccgaagtgtacatattcacttagatatcccttaggtgtcttaagcttaggatgccccaaacagaattcattstttaacttcttttcctcatcactaaacacactctctattctttctatattctctggttttcttttactctttctgtgattcttttatcacatttgttatc

SEQ ID NO: 17151 - DNA, 201 bp, Homo sapiens
atatacacacacacacacgacatatattgtgtatgtgtgtgtatatatatgaatttacagtatatataagtgtaaagtgtcatttcaaatcattgaaaacraatcattcagtgaattgtgtgactggctagttacttggcaggacaaaaattgagttggagccccatcttatatcttatatcaaaataaattgcaggtgga

SEQ ID NO: 17152 - DNA, 201 bp, Homo sapiens
agttgcaaatgttttggagaactttggttccatttactgacatgaataatagaagaagaaaaaagctcttattctgagagaaaggtttgtttaattttagrcttagaaagtttgaagttcaagaggcctggacaagtagataggatcatccaatatctgtgtcttaagaaaagagggaggaaagatatgatacactatcag

SEQ ID NO: 17153 - DNA, 201 bp, Homo sapiens
tatatctgcttctctctgcaggaagagaggaggaggaaaagaggaggaggcacagctgatggctgctacccaaggccttgctccgaaacatcatgggtgaytgggagtctaagaatattaattggagacagtgggaacaggggtaatttcacgtacccagtagggacatgctgtgctaagagcgtgtgagaaaatagcgtg

SEQ ID NO: 17154 - DNA, 201 bp, Homo sapiens
cttgcagaataatttggcatttacagataatttaccaaaccatttgtttccatatagaggaagtcatgctcgctgaagaaaataaaaatgctggaacatcmgccttagaaggtaaggaaatgttctgatgccttattccagttgcatttgcccctcttaggcgatggcaatctctgttattcaaaaggagagaaagaaatg

SEQ ID NO: 17155 - DNA, 201 bp, Homo sapiens
cattgtgcttgagaacccattgcaagccaggctgtcttcctgctccgtttctcctccctttcctccctcccacccgccctttcttatagctcagctttacycttttcaatgaatttcactgtagcccaagcgacagtgtgtgctgtgtcactcttaccaccatggtatagaatgtaaaatccccattattgggcactcgtt

SEQ ID NO: 17156 - DNA, 201 bp, Homo sapiens
actcttttcaatgaatttcactgtagcccaagcgacagtgtgtgctgtgtcactcttaccaccatggtatagaatgtaaaatccccattattgggcactcrttagaactataaggctcttctccccagcaaagtgtcccagagctgtgcgaggcttatacaaaagaaggaagcattgagaagtgcagaatgtgaaagccaa

SEQ ID NO: 17157 - DNA, 201 bp, Homo sapiens
cagcggaaccgggaggccgccccgtgagggcagaagctcccgccaggagccagcaccaccagcagagtgtggaacccccagaggtcctagcctcctccacrgggcctcccaggtgctaagtggggagatggggagagggttctgccctctacttggaaatgcctggccgtgttcgtggagcctgggaggtgcggaggagcg

SEQ ID NO: 17158 - DNA, 201 bp, Homo sapiens
cccaggggtgtcatagagtgggttttgggggagaagttttaggaataacaggatgatccccaactttgaggcaggccctaatttatttgtgggataaaaasgatattgaatatgagagtggtgggaacatcattggtttagttaggtctggttagatcatggaggacctcacagcagagggaattaaggcaggagagttac

SEQ ID NO: 17159 - DNA, 201 bp, Homo sapiens
tctcttaatccaaagctcacgtgctttgtcctacactctgctgcccctcggaaaatgcacagagcaaaggtcctattagaagaaggcaaactcgggccagrgctcctgggcagccagggggcagataaggacataatgccagggagctccatgtaaacacgtgaaagagggaaatgggccacaaggtatcctttcacaaac

SEQ ID NO: 17160 - DNA, 201 bp, Homo sapiens
tgtaaatagtgctgcaatgaacatatgtatgcctgtgtttttatcgtagaacaatttatattcctttgggtatatatacagattgctccttcaggccaggytctaggggaaatatgacaatgacttgatcaggtttgctaggtcaaatggtagttctgttttaaattctttgagaaatctccaaactgctttccacagtgg

SEQ ID NO: 17161 - DNA, 201 bp, Homo sapiens
atgagctggccctgaagtacctgaatatcgccttcaccatggtgttttccctggaatgtgtcctgaaggtcatcgcttttggctttttggtatgttgctgmatccttcccagcactgggcttgtctctttctgttgggtgccttcccagtctttgttgaaggggaggtggttactgctattccagaaatcacccacctaga

SEQ ID NO: 17162 - DNA, 201 bp, Homo sapiens
ctgatggagggagagagagtttgtctgcctcttcctcccatttccctttgtatctttattccacttcctttgctcctgtcagtagaaaggggaacaggcawtgtctttgccaaactgcccctataacattagacagttttgtcttgtctacagccataccaccatgaatgtgcctgatcttgtctgatcttggaagctaag

SEQ ID NO: 17163 - DNA, 201 bp, Homo sapiens
atgactgtccctcattacctctggatttgacattgcttttcaggagtggccggagtggatacccttcgatgagtccactctctccccaggatatattccarttggcttgtatggaccccgccgatgacggacagttccaagaacggcagtctctggtgaatgcatgagttatatgacctcaaaactacttccttggtttcc

SEQ ID NO: 17164 - DNA, 201 bp, Homo sapiens
gagaagatgctttgtgttcagagaccaggcacaaatgtttttggtttcacaaaaccaaaagtggatgctaaggaccatccactgtcttgcctgcctgcctrtttacaaataaaaatcatgcaaactgcacagacacaatgcgggttgatagagttgtgtgtttatgggcacggccatcttggaggctgtgtccctctctgg

SEQ ID NO: 17165 - DNA, 201 bp, Homo sapiens
ttaggaatgtaattaaggaaaagggtggaaatcgaatctagattacaatgatttatttaaaaaaaaaaaaaaaaggacctggggatgctatttattcacaygaaacatgggatttagggctaagaatccaacccaagtttttcaggtgtggcagatgtattccatttgcagaagtatccaccctctcctgggagtgatgat

SEQ ID NO: 17166 - DNA, 201 bp, Homo sapiens
tcgaatgctccctggcccggaccacaggatattttgcagtctcattcttccttacttctccctcttaggcacacctctggcccgagccagtatcaaaagtkcaaaggtagacggggtctcttatttccggcacaaggaaaggcttctgcgcatctccattcgccacatggttaaatcccaggtgttttactggattgtgct

SEQ ID NO: 17167 - DNA, 201 bp, Homo sapiens
tacataaatccacatgtaaatgactcccacatttatagattcagccttcatctctcctctgagctcctgaggctgaaatccagctgttcccttgacatctyaactcaggtgtctaatgagagtcttcaactgaacaggtccaaggaacttttgacttatgccatcctccagtctattcctcctcatgtcttcctttcccca

SEQ ID NO: 17168 - DNA, 201 bp, Homo sapiens
caaacaatgaatgttggtgaaaatgtagagagaaggaaattcttatgtattgttggtagaatgtaaattgatacagccattatggaaaatagtatggcggktctttaaaagctaaaaacaggactaccatatgatccagtagtcccacttctgggtatatatccaaaggagatgaatcaatattttgaagagatatccaca

SEQ ID NO: 17169 - DNA, 201 bp, Homo sapiens
gtcagaacttgaaaccacctttattccttctggctcagtgttttttctcttattattcaatataactcaattccctcataaccatgaagcattgtgttttygtgacttatggttcattgacttccaaacatcattttgtctgaaatatttcatatacacaaaagaatatatatatattacatatggtttgttccatatatg

SEQ ID NO: 17170 - DNA, 201 bp, Homo sapiens
tatatttccctatgcaatatatcgctaaatgttatatgaattgtaaaatacagtgtatgtttttatagaggttggttcattcacttcactttcgctgctgwgcagaattctacacagcagaagtgtaagtgtattgcaagttatcccctctccacttctagaattttgctaatgcaagtgacattgctatgaagattctgg

SEQ ID NO: 17171 - DNA, 201 bp, Homo sapiens
cagccaacatcatactgaatgggcaaaagctggaagcattcctcttgagaactgatacaagacaaggatgcccactctcaccacttctactgaacatactrctggaagtcctacctggaataatcaggtaagagaaagaaatgaaaggtattcaaataggaaaagaagtcaaactatctctctttgctaacaataacaatt

SEQ ID NO: 17172 - DNA, 201 bp, Homo sapiens
gcactcatggacataaagatggcaacaatagacactgggtactactggaggtggtagagggttgaaaaactgttgggcactatagtcactacctgggcaasaggatcattcatatcccacacttcagcatcacacaatatactcatgtaacaaatctgcacatgtaccctctgaatctaaaataaaagttgaaataaagaa

SEQ ID NO: 17173 - DNA, 201 bp, Homo sapiens
catcagagctagaccctgtctctaataaataaattaataaataagaatctagaccttcctctctctgtgtagattaaaattaatttgagaatatctttgcraattcaggcgagacaaatgtttcttggacagaatacaatataaaaagcataaacaatgaaatcaaaacaattaataagttgggctttgtcaaaataaaca

SEQ ID NO: 17174 - DNA, 201 bp, Homo sapiens
tcccatcccattttaattgcatccctggaaaggacagcgagtggaaaggccaggctagtccttctgtgtattgagtcacgtttggtgcgttagcccacgcygagcctctaaacttccttccgctcacttcgagtctctcctcaggagctccccctgctccattttccctcatattttggctcttctttcccatctccacca

SEQ ID NO: 17175 - DNA, 201 bp, Homo sapiens
agtccttctgtgtattgagtcacgtttggtgcgttagcccacgccgagcctctaaacttccttccgctcacttcgagtctctcctcaggagctccccctgstccattttccctcatattttggctcttctttcccatctccaccatcccatttctgtgagctttgggccttctccttggttccacttgaccgtcccaaagc

SEQ ID NO: 17176 - DNA, 201 bp, Homo sapiens
tttggaggtggaatgaatatataaaataaaggccttgataataggttatctgtattatgatacattctcagaaaagtcagtaatataacagctacttggarcacctactataccttgcacattctatcatttaatcctcacaacaaccttttgagataggtatgatcattattcctaattttatgaatgaggaaactaaga

SEQ ID NO: 17177 - DNA, 201 bp, Homo sapiens
gagatttcctcctcccacgtgagggtgtggtcttgactactcctggctccacacaggctgtcccttagggcagggggcaggagctcaagaagctggaggayagaatttctcccctgagaacaggaaagagaggaggcacgaggaaaccacagtctgtctgctttaccctgatggacttctgttcagggagtttgggtgaat

SEQ ID NO: 17178 - DNA, 201 bp, Homo sapiens
ttagttacatctcctcaaaagatgtaacagcagagaaagagtggaaagatgaagtctatttatcctattaccaatcagtagttggtttgaaaaggctcaayggagttaggaggagatttttggcacatctgtaaccttcagtcacttatgacttgtgtgacttttgttgatagttgaaagtcagactgtattttatagggc

SEQ ID NO: 17179 - DNA, 201 bp, Homo sapiens
ttaatcattatactttaacattctggattccaccaacttcaaggttaaaaaccgaaacaggaaacatattccagttccttcattatctcccttacattaaktgtcatgcttttcttcccctgtgtctactcaaacaaataaatgagatctcaatattgagaagagaaagaaaaaagaccagtcattccctgagctcctaaa

SEQ ID NO: 17180 - DNA, 201 bp, Homo sapiens
gacactttttatcatatccagagaaagtgtttggcgtaatgactcccacgaggcctcacttcaatgaaaactatttttctaaagttagatatggaggatamatctaaaaccttagtgagaattttctgagtctcaggtgattttggatttagaattggaaacacaacatgcttttaaaaccttttttttttagaggattgc

SEQ ID NO: 17181 - DNA, 201 bp, Homo sapiens
ctgagcccgtaagatggggattccccacacctgcaatgtggcagtcaccttgccctgggactagagcagcccatcttgcccttcgaatgctccctggcccrgaccacaggatattttgcagtctcattcttccttacttctccctcttaggcacacctctggcccgagccagtatcaaaagtgcaaaggtagacggggtct

SEQ ID NO: 17182 - DNA, 201 bp, Homo sapiens
ccctttggcctttggaactctctcccaaagtctacattgtctgactcaggcctgccaggaaggccctttctggaaacttctggacagttggagagccacayacccatgacggaaggctggttcacttttattgagtttggtgagcctcaacctagcccagggggcctcaaggaacacagaaaataacatcttaatttctat

SEQ ID NO: 17183 - DNA, 201 bp, Homo sapiens; identical to SEQ ID NO: 2580

SEQ ID NO: 17184 - DNA, 201 bp, Homo sapiens
acgaggggggtggatgagaaaggggtgaggttgttcaaagggtacaacattttagttagacaggaggaatgtgttttagagatctgttgcacagcatgttrctatagttaataatagcagattgcgtatttcaaaattgcgaaaacagtagattttaaatgttctcaccacaaataggtatatgaggtgatggatatgtta

SEQ ID NO: 17185 - DNA, 201 bp, Homo sapiens
atctctgttcttcctaatgcttgtttctcagctctacttccaggattggttcatctattttttctcactcttttgctttgatcccttggtatctcctccaktgttccaagtaattcatttccctcccgcagcataggcagggtggccgagaaaaagccctgcagttagttgagctgccttcctttgatagcaatccagtga

SEQ ID NO: 17186 - DNA, 201 bp, Homo sapiens
gccatactcccttggggtgctgtcaccaggaccagtcttgagcccagttcagccctccttgtttagtagcatatgtctcagaacatgatatgcacggccasttccacccactgctttcacttccggccccttttcttaggagttttggtctcataatggctctagaagcagaggaactgaaggctagagtgggcaaaagta

SEQ ID NO: 17187 - DNA, 201 bp, Homo sapiens
gttgagtaaaaaacaataggaactggatgagatttataacatattatgacttatatgttaagttaaaaacatacctaccaaacttttcctatttgatttgratatttgaatatttaagtttgtatgttaaatatgtcagagatggtacccatgctaggcagggggttgaagggggaaaaagccctgtagcatctggagtca

SEQ ID NO: 17188 - DNA, 201 bp, Homo sapiens
tcaagtgccatgctgaattcatgtttacagcttcttggcttgggctcttgaaatctagaagtctttgggactgaaagcgaagaatttgtcttggttcaaaygctgtctgctcaatcccattattgccttccagcacgtgcccttggacactctcgtatcttgttgtctggttgtagagcagattttcacatgctgggagac

SEQ ID NO: 17189 - DNA, 201 bp, Homo sapiens
aatggataggatttagagggctagcttctgttttggcctttattgacaacctaagtctccttaaatcctttctggaacaagtcaagggataaagcataaayaactttaatactgctgaactctatgaccttcaggaaggtgtttaccttctctggggctgtgtttgcttctctgaaaaatgggagaaatggttccccaggc

SEQ ID NO: 17190 - DNA, 201 bp, Homo sapiens
aaaggtagcagcactgcaggcacaagaaaccctgtccttccttctggctttctgtagaggaggtccacattgcccatcaaagtgtagtcaacccccatcayagagcctaggaatcaacacttcattggagagggaattctcccacccactttcagttgcattttaattttagcctctcttcaagttgtaaatagtctcata

SEQ ID NO: 17191 - DNA, 201 bp, Homo sapiens
ggcctttattgacaacctaagtctccttaaatcctttctggaacaagtcaagggataaagcataaacaactttaatactgctgaactctatgaccttcagkaaggtgtttaccttctctggggctgtgtttgcttctctgaaaaatgggagaaatggttccccaggctcgtaagaacactgaaaatatagaaacattgaag

SEQ ID NO: 17192 - DNA, 201 bp, Homo sapiens
ctggcagcgctgagatcaacgcaaaattacagtgtcccactctggccccaaatccaaactgtcctatgtctgcatcctcctccagtaccaaggccagttcsctgcctcatatctccttgccttgaccctcacctctaaaactgaaatgttatcccaaagtggcaataagcatgcgcagtatggaattttgtgccacatggc

SEQ ID NO: 17193 - DNA, 201 bp, Homo sapiens
ccagaccctgttctaagcacttgggatatggcagtgagccaaacagtcaaccagctcaccaaagctcttctcttgtaaagctctctagttggctaaggcarcgataaacaaaataataaatgagtaacttataagacaatgataaggtggtaaatatgatgggaaaactgatcaagttaggggtatgggatatagaatgtg

SEQ ID NO: 17194 - DNA, 201 bp, Homo sapiens
ctatgtctgcatcctcctccagtaccaaggccagttccctgcctcatatctccttgccttgaccctcacctctaaaactgaaatgttatcccaaagtggcrataagcatgcgcagtatggaattttgtgccacatggcttcatggcagagttttttggtggctaacttaccaggcttttgcatgaaacataataaaacgcc

SEQ ID NO: 17195 - DNA, 201 bp, Homo sapiens
ttatggggccttgtaagggctatgggcttcactctgagtgacacaagaaccatgggagggttttgagcagaggactgacgtgctggccgcattgagaataraccatagaaggataaggctggaagcagagggactagtagtgccgccatctagggaggagataatggtgagaacaggtgttttcctaagccttgagctgtc

SEQ ID NO: 17196 - DNA, 201 bp, Homo sapiens
tcctcctccagtaccaaggccagttccctgcctcatatctccttgccttgaccctcacctctaaaactgaaatgttatcccaaagtggcaataagcatgcrcagtatggaattttgtgccacatggcttcatggcagagttttttggtggctaacttaccaggcttttgcatgaaacataataaaacgccaggaggcttaa

SEQ ID NO: 17197 - DNA, 201 bp, Homo sapiens
aggaaggagcccgcccagccttggccaccccacacaggtcaggtggcagggtatgctgctcgctggggctctgcttttcaaatacttgcagaattccaagscttccctttcttccagttggcaaagccagctctctcctccttctaagaaaaaagacgcactgcgacgtcaaagtgtgcttcctggcccttccctttacaa

SEQ ID NO: 17198 - DNA, 201 bp, Homo sapiens
taactttctgacttggagatattgtgactagatcccagcatagaacttcggctatgtgacagcctcctgcagtcaggcagtctggctgccttgggcctgcyggctgccttcccaactgtgttgccacctggagctgctgctggagtgtcccagccttgctgtgtctgcagccttttccagaccctttctgaaatgtctctt

SEQ ID NO: 17199 - DNA, 201 bp, Homo sapiens
gcagcaccacacaccttccatctgtcctggggggtccccagatctgctcaccccaaagcccagacactgtgcacagcaaaagtgacttgactgtctggctragataattaaagttgctatgaggtattttaacaagttcctaatttttaaatgatgccctccaaacacgtgctataaaatgacttaaaaaccctttatgtc

SEQ ID NO: 17200 - DNA, 201 bp, Homo sapiens
cccctgagaacaggaaagagaggaggcacgaggaaaccacagtctgtctgctttaccctgatggacttctgttcagggagtttgggtgaattccacatttkgatcacaatagttgtcgcctgcctttcttttccctcatagctttcaagacccctttcatgtccctctgtctccaggaaagatgatttatttttttcttgg

SEQ ID NO: 17201 - DNA, 201 bp, Homo sapiens
gacttgtgagaataggtcctgatacccaaaatgtggttggggaaggagggtgcatgtgaaagcctccttttcatctgaagagtggaggggttgaccttggmtccaggcagtgctgtgtctgggagttcatcattactcagtctctgtggataaagatctctgagtgttccctcttttgaatgttcacagtgattacattct

SEQ ID NO: 17202 - DNA, 201 bp, Homo sapiens
ctggctgactacaaatctggggttcccacaaccatcaccccactccccactggttcagtaatttgttagaatgactcacagaactttggcaaaaccatackgtattataaaggatacaactcaggaacagcccaatggaagaggtatatagggcagggtatggtggtggggagcacagagcttcatgtcctctctgggaac

SEQ ID NO: 17203 - DNA, 201 bp, Homo sapiens
ggaataggttaggacttaatggtgcataaactcagagccagcagtcattcttccatccctggtcttggcatttggaagatgagatccactatgttgtaagstctaaggggcaggaaatacaagatgatgtatttatgtaaatataatgtactatgttgtaatcatatgtgcatgcaggaatgaatgactgaataagtgaag

SEQ ID NO: 17204 - DNA, 201 bp, Homo sapiens
gcccgactttctccatcctattggcctggacttcattttagctcctgcataaatgtttccttttggatgggatttgggtctgttggatgatacatgtggayatatataaatatatgcatgtggatatatgtgtgttcaatctcatagattctacattaatgacatacagaccttctaagatgtgactcaatggatagaaac

SEQ ID NO: 17205 - DNA, 201 bp, Homo sapiens
ccctcccagctcactgatgtgtttaccaacccagatgcctcctgaaccccaacatgctgaaccccaacatttagcatgcccatcattacataggcatgctygattaaaccatcggccattggcaattaaactaatctctagtgcccctcctccctagaagtgggagtagggggaggctgaaagttctagcctccagtcctg

SEQ ID NO: 17206 - DNA, 201 bp, Homo sapiens
gctggggtgggaattgctagtggcatgactgtccctcattacctctggatttgacattgcttttcaggagtggccggagtggatacccttcgatgagtccmctctctccccaggatatattccagttggcttgtatggaccccgccgatgacggacagttccaagaacggcagtctctggtgaatgcatgagttatatgac

SEQ ID NO: 17207 - DNA, 201 bp, Homo sapiens
atggtgacaggtaccatggaactaaaagaccagattaggtgtaggaggaactatgtacaggcagaatgacttcaaaagagcttgcgttctacgttatgctyggaccttgctgcatgggtcccctttgctgcactagagcagtggaggataattattcttgcatatcagcccaaaagcacagtatccagcagctctctgggt

SEQ ID NO: 17208 - DNA, 201 bp, Homo sapiens
tgctggaacatccgccttagaaggtaaggaaatgttctgatgccttattccagttgcatttgcccctcttaggcgatggcaatctctgttattcaaaaggrgagaaagaaatgaaagatggtgttctgggattggaaatgagagtctttctgtcataaaatccctcatgctttaaaatgaagggaattgagtcacagattt

SEQ ID NO: 17209 - DNA, 201 bp, Homo sapiens
aaggggaacaggcaatgtctttgccaaactgcccctataacattagacagttttgtcttgtctacagccataccaccatgaatgtgcctgatcttgtctgrtcttggaagctaagcagggttgggtctgctaaatacttgggtgggagaaaatttcatcaatgtctttggctcagcagttaatttgcaaattttaacttca

SEQ ID NO: 17210 - DNA, 201 bp, Homo sapiens
gccatcctacaaccaatgctatctaaagggaccttctcttaaaatgtgtggggatcaccttgagaccactttcattaccaggaagtggcattgtagatgawgagccaggacagatggatacggagtgcctgtttacctcctgcatttagataggctctagcatggcttccagagctcttgtgttgcaggaaggtgctggtg

SEQ ID NO: 17211 - DNA, 201 bp, Homo sapiens
atttgcaaattttaacttcaacatggcctgcaagggtttgggaggggggaatgtcaggacagtgtttgcagaccaaattccacttaagggctgaaaccttrgatagccaggtttatgctgggtcttagagaatcccatgactagtagcagagaccccataaaagatggagacgcagtggatggggtagcagaacccaaaac

SEQ ID NO: 17212 - DNA, 201 bp, Homo sapiens
acatatacatacaactgagaccttaaagctgcaagtctctcttttgaaagccattcttgaggaggctgaattgtccactggacgtgagaagcaatgagatrgaaccaagtcccacaagcttggctgtgtgtttatttccaggagccagaggttagtgaattaaaaagcgtgcagccctctaaccatggcatctaccttcct

SEQ ID NO: 17213 - DNA, 201 bp, Homo sapiens
tcctccttgcggctgtcagcccaccgcctgaactctgattcaggtgaggaggtcttcagtgtccagctctttcatcaggcagtgggctcctgccctgatgsacttactctccaaggactgtagataaccagaaaagaattcagagacaagggctgaagaaagtgaaggatgctccttaccaaagggaattcctgtatctga

SEQ ID NO: 17214 - DNA, 201 bp, Homo sapiens
agggacatccctggagccctttctcctcctctcctttcatccccaactaaacacaaatggtgccattttcacatgcctcatgatttctgaagatttcaacrtgttcctcttgcagttagcaacaagacggatggggaagccagtcccttgaaggaggcagagatcagagaggatgaggaggaggtggagaagaagaagcag

SEQ ID NO: 17215 - DNA, 201 bp, Homo sapiens
gtgtatgtgggagtgaggagtaagggcatgggcgtggtggggagtgggccagctcagccatgcccactgcccgcaggatccggagggcctgccactacatygtgaacctgcgctactttgagatgtgcatcctcctggtgattgcagccagcagcatcgccctggcggcagaggaccccgtcctgaccaactcggagcgca

SEQ ID NO: 17216 - DNA, 201 bp, Homo sapiens
tcctggagactccagttgatttgaagccctttccagaaatgcaacatgcagggtgatgccaaagaatgcccccgctggaaatctgctccccagtcgccccsagcagagctcctgagcgccttgcagctccagctcacgtgacctgagtggcagaacgggggaagcaggagtagggagcgtcaggagggagaagtcagaggc

SEQ ID NO: 17217 - DNA, 201 bp, Homo sapiens
caggatgtccctggagtcaaatctgactcagtttctggcttcttgcctccatctctcccatacatctctccccttttagcctgttgttactaatgccatartttgaatgtcatttttatttctcccccattccatatgattccctgggggcctctcccctgcagaaccaacaaaggacgggacatcaagaccatcaagtct

SEQ ID NO: 17218 - DNA, 201 bp, Homo sapiens
ggattagtctcagggttcaaatatccagaatatcaaggtttctcttaggaatagttaactgagtaaaagaaaacctgcttgttattctattttgggatttyccccccctataaaaatagaactgtatttaaaagttaaatctagactgggcatggtggctcatgccttcattcccagagctttgggaggccaaggtgggag

SEQ ID NO: 17219 - DNA, 201 bp, Homo sapiens
tggatattcaaagacaaaaaatgaccaacttatttctcaattaaaatggcaaatgcaatatagtgttatcattgctatggggagtggttgggaaatataakgtattataggggcacaggggcacataggagggtgcctatattagtctgttttcacactgctataaagacatactgagaatgggtaatttatgaagaaaag

SEQ ID NO: 17220 - DNA, 201 bp, Homo sapiens
tcaggaaacattgattaaacatctattttggatattcaaagacaaaaaatgaccaacttatttctcaattaaaatggcaaatgcaatatagtgttatcatkgctatggggagtggttgggaaatataaggtattataggggcacaggggcacataggagggtgcctatattagtctgttttcacactgctataaagacata

SEQ ID NO: 17221 - DNA, 201 bp, Homo sapiens
tgcctatgatcctactcaggaagctgaggtggaaggatcgcttgagcctgggaggtcgaggctgcagtgagccatggtcatgccattgcactccagcctgrgtgagagagcgagacgaccttgtttcaaaaaaaaaaaaaaaaaaaaaaaaaaaaaaaaaaagcgcccagctcttcccaaagtctggaaaagcaggcttcc

SEQ ID NO: 17222 - DNA, 201 bp, Homo sapiens
tttcaaagtggtttcatggtcatttcctcattttggccaggtcccttcattctcttgcatttaatcctctccgaagtctttttctgatttctctggccatygcattcctcctcactctcaggttgggatgggtttttgtgttgatttgttcttttcaggatacatatagctttaattgattttgtagtgataaatgaacac

SEQ ID NO: 17223 - DNA, 201 bp, Homo sapiens
tctagactttagggccttgggtagcaccagccatcaagacctcatgaattctcagccacccagatacctggccagtcactgggagtttgactcatcagcayctgggccaagagccattccgctgcctggagcatcttccggtggtgttggctacaccttcctgagctagcctgtgtccccacaaacctcacatatctgccc

SEQ ID NO: 17224 - DNA, 201 bp, Homo sapiens
gagagagcacttcctgttcctctcaggcatggaaaggcatgagagcacttccccatctttctcacccaactttcatgcccattgcccctgcttgtgggcakattttcctttttgctgcctggtctgagggataaggtgggttaaggaggagggttaaagtgagtgcttgatcttcctgctactgtattcaaaccatcaccc

SEQ ID NO: 17225 - DNA, 201 bp, Homo sapiens
gctgggggataggtgggggatcagaattgccaagggtgtcctcatgaggaggcctccatccagcctcaacaagccttaaacacctcattcaggtgccgtarcaagccttaaacacctctgggtagggtttgaatctgtaaatgaatcagaggtaaatgaatcttaaaacctactggccttaagaattggaaggccccttgc

SEQ ID NO: 17226 - DNA, 201 bp, Homo sapiens
ctgggggataggtgggggatcagaattgccaagggtgtcctcatgaggaggcctccatccagcctcaacaagccttaaacacctcattcaggtgccgtagsaagccttaaacacctctgggtagggtttgaatctgtaaatgaatcagaggtaaatgaatcttaaaacctactggccttaagaattggaaggccccttgct

SEQ ID NO: 17227 - DNA, 201 bp, Homo sapiens
ctcagcctcctggctgggtggcagcaggtgcctatgtttcacttggagctctaggtcctcattctttcccctgctccccaacctttgcctcttgcctgggkgctgagaagacagctttcatttttctggctgtaagatcctagtggtgactgtcctatctgtcttttgttctgccctagaaggtagtaatagtatgggtag

SEQ ID NO: 17228 - DNA, 201 bp, Homo sapiens
tggatgacttgttctcatcatcctcttccaagagtatgactggatttcctagtctgcaggaaacccgttataggcatttaattgcccagtgatgtgtgggktatgctgtacattgtatccttttcctaaaatgtgggtgtggtcagaggaatcataccttggctttgaggtagaaacaccatccaactggtgtgactcagg

SEQ ID NO: 17229 - DNA, 201 bp, Homo sapiens
atcacctcaaatacttatcatttatttgtggtaagaacatttgctatctactctcagtaattgtcaaatatacaatacattgatattaattagtcaccatsctatataatagacctccagaatttatcctgtttaactgcaatttttaccatttggctaacatctctccatttccccttcccactccagcacctggtaacc

SEQ ID NO: 17230 - DNA, 201 bp, Homo sapiens
gaactgatgaacaacttcagtgaagtttcaggatacaaaatccatataaaattcagtagcatttctatacatcagtagtgttcaaactgagagccaaatcragaacacaatcccctttacaatggccacaaaaaataaatacctagcaatacatctgccaaggagatgaaagatctctaccaacaagaaaaactataaaac

SEQ ID NO: 17231 - DNA, 201 bp, Homo sapiens
tctcaggtgctcctagagattctggctgatggcaggtttttcctccccagaaaaagggaaaggtcttgttccatcctcaaaagcagaagagacttacaaagctcattgctgttttgtgccaccagtggtagaaatatcaccagtgtagcagaagaattccagtgcttgaagctattttaaaaggaaagggcagaaagaagc

SEQ ID NO: 17232 - DNA, 201 bp, Homo sapiens
ggagtgccacaggtgaggcctggcaggagattatgctgtcatgccttggggagaagggctgtgagcctgacaccaccgcaccatcagggcagaacgagaaygaacgctgcggcaccgatctggcctacgtgtactttgtctccttcatcttcttctgctccttcttggtgagcaacattgtgcttttgccttgctatgtgg

SEQ ID NO: 17233 - DNA, 201 bp, Homo sapiens
gtggcagtcaccttgccctgggactagagcagcccatcttgcccttcgaatgctccctggcccggaccacaggatattttgcagtctcattcttccttacytctccctcttaggcacacctctggcccgagccagtatcaaaagtgcaaaggtagacggggtctcttatttccggcacaaggaaaggcttctgcgcatctc

SEQ ID NO: 17234 - DNA, 201 bp, Homo sapiens
gattcctcttgattgtggcccatagaagaggctctggtatcaagccagtcaccaaggacttctgtatcctcctttcccctctctttccttctgtgacaggrttttccctttgtgggctggtctcatcatccagtcctcacctcagattatttgggctcagtcccaagagaactttccaataatctttttctgccaatggtt

SEQ ID NO: 17235 - DNA, 201 bp, Homo sapiens
tatctcatgactgtttccagctttcattctttaggtaaacagatcattgttgatgaatcaacaagatagcataacgttatacctttgggtaccataaagcyttcacttcctttcttaaggaggctcaatgatcaggagttttgatcattgaaatcctgggcaggaagttctcagggcaatggagacctcaaatagaccaga

SEQ ID NO: 17236 - DNA, 201 bp, Homo sapiens
tgctttgtaattcacagtgtaattcattctagttagttagagtttggttggctttctttataaggtgggtgaggaagactaacaaaagtaatgtgagccartgtcttcaaaaggggggctgaaaccagttgcaaaaaatgtcagtctatagccactcccaacccacctacttcccaatctcactaaggcaaaatgaaagga

SEQ ID NO: 17237 - DNA, 201 bp, Homo sapiens
atcaacaagatagcataacgttatacctttgggtaccataaagccttcacttcctttcttaaggaggctcaatgatcaggagttttgatcattgaaatccygggcaggaagttctcagggcaatggagacctcaaatagaccagaagaagagcttataggtcagctccagattagactgccactgggtgtgagtgagggtc

SEQ ID NO: 17238 - DNA, 201 bp, Homo sapiens
aagaccagtgtgatcgctctcttcacatgcacacactcatgtatgtgtgtatatgcacatgtacacacacacacacacacacacacacacacacaggtccmccttagtctgtatagttaatcagagggacctctcctttctctatagaatgcagaaatatttttaacccagcaaaagaattctggcttcttttcactggag

SEQ ID NO: 17239 - DNA, 201 bp, Homo sapiens
agaattctggcttcttttcactggagatggagaagcctcattttagcaaaagagcctcatcgtcccatatgtaatgtatggagtatgatcctagtgatccyaccctcccagctcctggatggtctggtcagaatgactatgaaagctataggacagaaggggtgagaaacaaggaattagggcaagaggtgagagtaggta

SEQ ID NO: 17240 - DNA, 201 bp, Homo sapiens
aattgggattagtagaacagaaaggcagaaccatgggacgcaggtgtatttttgcattttccatagtttcatagagaagacatgctgttttacgttttctrccctgaaaacatctagaggttgggacagactagaagctcaatatgagaaactcatgaaaagaacactaggcagtaagtcacagacatggaagctccatgt

SEQ ID NO: 17241 - DNA, 201 bp, Homo sapiens
tatgtgaggccaagcctgctaggtaaggaaccctctcctggtgcaagtggagggaagcatgggctccctggggcatagcactgcccaggcagctggaagaygacctaggctcaggaaggatgccagcctggacaatgggatagagctggcctgggatggtgacacggtgattccatactcaggaggctggacagctgcctc

SEQ ID NO: 17242 - DNA, 201 bp, Homo sapiens
ttacaattctgtaaagcagagacctggtatgggcctccccaggctaaaattaaggtgtgggcagactgtgttcctttctggaggctctcagggagaacgtrtttcctgctccttctggctgttggcagaagtcaagtcttgtggctgtagggtcgcagtttccttcccttgctggctgtaacctaagggctctttcatgct

SEQ ID NO: 17243 - DNA, 201 bp, Homo sapiens
tcctctccgggagtgccagtctccaggaacctccacatgttcagctatccagaagctctccgaaccctgtccttttggattgttatggagtcttcattacwtaggcatgattgattaagccattggtcattggtgatcaacttaaccttcagcccctcacccctccccaggggttgtgggggtagggctgaaagttccaac

SEQ ID NO: 17244 - DNA, 201 bp, Homo sapiens
acgtctttggggggaacccagagtgatcaaagagataaggaaagtttgcccttttcaattaataaggacaaaagggacttaaggataaaacatgttctttmagataggtcactgtggttgtggatgagacttcctgggtgtatagctctctccctccatataatactgctcagcaaaccttcatgggagaaaggatgttgt

SEQ ID NO: 17245 - DNA, 201 bp, Homo sapiens
tatcctcagtatcgtcaccatcactaggtgggcatgcaagccccctgaggacagatcaggggatctatgcactctgcatcctcagatcctggcaccatggsggccctcaatatacattggatgaatgggtgactgatagcacagacctgttccagagagtgggtaacaaagcttagaggttcctcactctctcccattatc

SEQ ID NO: 17246 - DNA, 201 bp, Homo sapiens
tgtttgtgagtggttacgtgtgggcgtgggacaatgtgtcattgtccttgccatagacaaagtggcactgggtgtgcatgtcagtgtgtggcttggtgtgygtgtgtgtgttccgttcacatgatctgtggatatgccctctgcacctctcaacatttgcttatatcagcgtgtgtctacctttgtgaactgtgtgttttt

SEQ ID NO: 17247 - DNA, 201 bp, Homo sapiens
aattagaaacccagtggatcgaaggttaaaatggtcaaacaagggataagttatgtgcctgtattatccatgttaattttattttccccacagcaaactcygtagtcattggaattctttccttcttcttccctctttttacccagaaaaatgcccccatgttccagcgcatggagccttcatctctgcctcaggagatca

SEQ ID NO: 17248 - DNA, 201 bp, Homo sapiens
gtgcgcccacaggcacaggctcagggaggaggtaacttcccctccgcccagcgagccctctcccatgtgctctcctgcacttgtcatgttcatgatttccygctgccccatgaatgctcctctaggcccctgggctgaaatgctcgatcgcagttttgagtatgagctgctggtggtctctgcacttagccttctctggct

SEQ ID NO: 17249 - DNA, 201 bp, Homo sapiens
ttactgcagttgtgtaaattatcagtgatagtagcttggactagcaggatagagatggagacagatggtcagatgtgagaaatttggtagataagactggrtaggatttggtgattgatttgctacttggactaaaggggaaggaggaagcaaaggattctgggtgaagcctttgggtgcatgttggtacatttcctgaca

SEQ ID NO: 17250 - DNA, 201 bp, Homo sapiens; identical to SEQ ID NO: 2577

SEQ ID NO: 17251 - DNA, 201 bp, Homo sapiens
acctcaggtgatctgcctgcagcagcctcccaaagtgctgggattacaggtgtgagccactgcgcctggccagagccaagttttttaagggatggcttcaygtctgagttttggcctttcacactgacttgctatggctggtagcaaggtgatgaggctcttttaatcttcatagatatccagataatacagcttggatca

SEQ ID NO: 17252 - DNA, 201 bp, Homo sapiens; identical to SEQ ID NO: 2579

SEQ ID NO: 17253 - DNA, 201 bp, Homo sapiens
gaggtcatatttgcagcctgggtcaggggaaagggtacatgggcttaatagaggtacttgctcagatgctctctctctgttgcttgattcactctttcccytagtcatggccctgtccaaacccagtgaatcttatccttcttgtccacagggaatttgccaaagagagagagagagtggagaaccgaagggctttcatga

SEQ ID NO: 17254 - DNA, 201 bp, Homo sapiens
agccgagagaaggggcaggatggttgagcaaggtcaagagttgagctggaggcatgttaaattggagtggcctaattgatgtctatgagatagcccagttmgagatgtcataagaagtaagtagctggacatctgagtctggagctgggtcagagcaagagatatacacttgagaaacattaatttattaatggtgttttg

SEQ ID NO: 17255 - DNA, 201 bp, Homo sapiens
tctgctctctcctgctgcttctcagtgtttggacaaaaacacctgccagttggagtatggtgctgtgtatagcaaaggagaaagcttgcaaaaggctctcrggagtgtgtgtgaggagctcgttgaggtccatgtgcaagagggaaaggattatgcaccacttagcatagagctagtgctctggtcacatgacaaagaaag

SEQ ID NO: 17256 - DNA, 201 bp, Homo sapiens
ttgcggcctgtagaatgtgctgactcttctgtagaatgagctatagtgaggaggctctctttcatttctgctctggttttagaggcaactatgtagatcaygagaaaaacaagatggaggtgaagggccgggaatggaagcgccatgaattccactacgacaacattatctgggccctgctgaccctcttcaccgtctcca

SEQ ID NO: 17257 - DNA, 201 bp, Homo sapiens
tgtgttataatccccagtgcaacagagttgagaggtgggacccttaagaggtgattaggtcatgacagctctgccctcgtgaatggattaatgccattatwgtgggagtgggttcttgataaaaggatgaattcatcccactttcccatgctctgttgcataggctttgccattacacccttctgccatgagatgatgcag

SEQ ID NO: 17258 - DNA, 201 bp, Homo sapiens
taaggtggtggacagaactgtacagcctcaggcttctcaaccaaagatccaggtccattctgctgtctgcctccagtagatgtttgacacgaactccatartctcaatttcaacctcatacttcatggtttctttgtctcttccctgggttttccccatggcgataagagatcagaaaatgtgctctctctttgtgtctga

SEQ ID NO: 17259 - DNA, 201 bp, Homo sapiens
gtctatccagagccccactgtttctcatgagctatactttaccactctcgccaaggccaccatcatctggatacaacctggaagatctccctgcttccacmcttaatccccttcagtctcttttcaacaggacaaccagagacattctttgcaaacttaagttgtgggactcctctgctgcaactgaccaatcgtttccca

SEQ ID NO: 17260 - DNA, 201 bp, Homo sapiens
cgggggcactgcctagtggaattttgagaagagggccactgtcctccagaccccagaatggtagatccattggcagcttgcactgtgcacctggaaaagcygcagacactcaacaccagcccatgaaagcagccaggaggaaggctgtacttcacaaagccacaggggtggggctgcccaagaccatgggaacctaccttt

SEQ ID NO: 17261 - DNA, 201 bp, Homo sapiens
acctggaaccggaagaggttagataaagggaggttagacgggggtttgttggcctatcctaccagaaatcaagctacatcgtcattctgggggccttataragatgacataccccattcttcatagtctaatttacactgattatagtggagtcaaatgaagagaaactggtggcagtgtgcaggagttgctcctagttca

SEQ ID NO: 17262 - DNA, 201 bp, Homo sapiens
taattgtgagtgttgattacgggggctgcttttggtctcccagcggttctttgaaaaaccattaatttgatcattttgggtggagagtttaagggaaccamttgcagttggctgcattgtgtttgcctggctcccttttgagtgttttgagacttggggaaataaaaaagtaaaagaaactactaccaacaaagatgcctt

SEQ ID NO: 17263 - DNA, 201 bp, Homo sapiens
gatactgagcaaggaaaaggccatcctacaaccaatgctatctaaagggaccttctcttaaaatgtgtggggatcaccttgagaccactttcattaccagkaagtggcattgtagatgaagagccaggacagatggatacggagtgcctgtttacctcctgcatttagataggctctagcatggcttccagagctcttgtg

SEQ ID NO: 17264 - DNA, 201 bp, Homo sapiens
aagaaacacagaagaagcactgttaaaaagcaaagtgcctgagtgctagttatatttgtctcactaatataccctgtgacctcagagagaaaaccactccratctcagaacctctatttcctcatctttgaaatgagaagaatgccacctgcccttcctatcccacaagggctattgtgaggcgtacacaaggtctcattc

SEQ ID NO: 17265 - DNA, 201 bp, Homo sapiens
atgtagctggcgttttagcacccttctccccctccttcattcccgtgcagataataaatgtttattgttgttctattgtggccccaagtgagctgtggacrtggtggggaagcagcaggctgaccccggagggtttgctaatcagagagagtgtaaaacctgtttcagaatctgtcatttacatggggcagcaaatgacag

SEQ ID NO: 17266 - DNA, 201 bp, Homo sapiens
ttgtatcttttgccttattttttgactatttgaaatgcagtatctcaaagtattttgtcatacttggcattttagatgttcgtccattccagggactcagygcactgaggcagggaagacagtggtccagttggtgggctccctgtgtcctgcagggctgtggggggatggcagtgctcccagcttggaatccccccacac

SEQ ID NO: 17267 - DNA, 201 bp, Homo sapiens
gaacatgggatatttttcaatccctgcctctaggatccatgagaagaataaatgagttgaaagaatgccaaaggcctggcctagtgtctggctcatgtagraattcaatgatgctagttgtgaggctgggttggagtatacttctgcagtgctctgagagtctcttgtgttttattccaaggatagaataaaataatccat

SEQ ID NO: 17268 - DNA, 201 bp, Homo sapiens
gatggacttctgttcagggagtttgggtgaattccacatttggatcacaatagttgtcgcctgcctttcttttccctcatagctttcaagacccctttcawgtccctctgtctccaggaaagatgatttatttttttcttggcccaaggctcccccaggggccccaagtccaaacactttctttgctgttccttcaggagt

SEQ ID NO: 17269 - DNA, 201 bp, Homo sapiens
acaaaagaaatgattttatgtgattcagtctaatggtaatagttacaaaggattgacttcttcgcaaataaaatggttgaaatagtacccaaaactagcasattgggcaaaaattacaaagaaatatctaagtggttgcatagtaaccacaaaaatgaacacacttattttcagagttcaaaccgtggtagatttgagagt

SEQ ID NO: 17270 - DNA, 201 bp, Homo sapiens
aaataattaaatctaaacaatactgtgtggattcaaatttttctcagctactcacaagctgctatccattttaccaagcctcctgcatgtattactatgtmtaatcctcatatcaactcatatataaactagattttatgattatggctctaaaaacaaggagactaaacctcggaaatatcatttaacctgtacaagacc

SEQ ID NO: 17271 - DNA, 201 bp, Homo sapiens
gcaaataacagctacattttcacgctgttttcctcattttctcaagataaaagccaagatctttttgtgatatccagcaccctggacaatcaccccctcaygtgtctttcatcttcctcccatttttatgttttccatcctctccactctggacaagcaggtttcatgcccaagcctaaacacgccatttgcattgtcatc

SEQ ID NO: 17272 - DNA, 201 bp, Homo sapiens
ttgttttaatgttgattttatatctcatgaccttactgaatttgttaatcagttctaatagttttttggtggagtatttaggtttttccaaatataagatmatggaatgtgcaaacaagtataattggacttcttcctttccaatttggatgccttgtgtttctttctcttgtctgatggctctagctgggacttccagtt

SEQ ID NO: 17273 - DNA, 201 bp, Homo sapiens
tataaggtggttatagaaaatgaatgtaaaatcacttcattaagtgtaacaaaacaaaataatatgaggaattgttatactgtttaagcatttgaaaaackataaaggagtatagaaattttgttaccactactatgattagtttctcatttggtttttcactttaagaattggaataaaagttgaaatcttgattaaaaa

SEQ ID NO: 17274 - DNA, 201 bp, Homo sapiens
aaagacctacactaaggaaaacagctgttccgggggtgtcccagtcacctcgattgtgctcagcttcccttttcttacacaaggaaacaccacatatttaytaaatgggtcgccagcacttaaatagattctggatttttataagtaggtttcaattttagaacacaataattttcatttaatagaaaagaggcacagaca

SEQ ID NO: 17275 - DNA, 201 bp, Homo sapiens
ttatgtcaagggcggctcgatggtgtggatgaaagaactattgggaatggctactgaaagatcaaaggcaagtggaacctcaaaattctggaagtagaacragtcagatacaatataagaagtacttcaaaggcaagaaaataagaataataaaaatacctttagttgtcaaatgtaaaatttgtgccagttttgtcacat

SEQ ID NO: 17276 - DNA, 201 bp, Homo sapiens
ttctgtctgctcagtcttacccctttcaccctggtgttggcctccatcagctgtgtctggattctgacagtctctcctgtttgtcccctccagtcttgcaygctgctcacagattagccaggatgcagcaatgtcagcgtcacagcaaataacagctacattttcacgctgttttcctcattttctcaagataaaagccaa

SEQ ID NO: 17277 - DNA, 201 bp, Homo sapiens
ggtgttatgtcaagggcggctcgatggtgtggatgaaagaactattgggaatggctactgaaagatcaaaggcaagtggaacctcaaaattctggaagtakaacgagtcagatacaatataagaagtacttcaaaggcaagaaaataagaataataaaaatacctttagttgtcaaatgtaaaatttgtgccagttttgtc

SEQ ID NO: 17278 - DNA, 201 bp, Homo sapiens
gagaattcaaacaatgaaactttagtcatttattaaatatttattatttatacactgttggatttacttattttccaaagtttcctaaagcacacattcayagaatattagtttaattaggaaatataataagaatgtaaagacactaattaaaattagtatagacacgatgaaggtaatttgaaatgcttaagtaattcc

SEQ ID NO: 17279 - DNA, 201 bp, Homo sapiens
ttgatttaatatggtaatgcacaattccaactaacgtacattcaacagatcatgaaattgggttattaaaatgaatatttttgtcattaaataaaaattcygtccaaatgaagaaaacaaataaccatgaaaatagtaacaaaaacacttctgaatctgcataagaactatatttccttatttttaaagaaggtctaacac

SEQ ID NO: 17280 - DNA, 201 bp, Homo sapiens
ttttgatagatattgcattgaatctgtagatagttttgagtagtatggacattttaataatactgagtctttcaattcatgaacatggaatagctttccaktttttatgtcctcttcaatttcttgcatcaatgtttcatagttttcattgtagagatctttcacttctttggttaagtttattcctaggtatttatgttg

SEQ ID NO: 17281 - DNA, 201 bp, Homo sapiens
ctttaagaggacaagtcgggtgtatcatttgaggtcaggagtttgagaccagcctggccaatatggtgaaaccccgtctctactaaaaatacaaaaaaatrttagccaggtgtggtggcatgcacctgtaatcccagttacttgggagactgaggcagtagaatcacttgaacctgggaagccgaggttgcagtgagccaa

SEQ ID NO: 17282 - DNA, 201 bp, Homo sapiens
ctagaggtagttactatcctattactgtacttagttggctatgctggcatgtcattatgggtaaaagtttgatggatttatttgtgagttatttggttatraaaatctagagattgaagtttttcattagaaaataacacacataacaagtctatgatcattttgcatttctgtaatcacagaatagttctgcaatatttc

SEQ ID NO: 17283 - DNA, 201 bp, Homo sapiens
acagaaatggggagtggctgcaaataagaacaggctttcattttgtgatggtgaaaatgttctataattagatattggtgatggttgtactatttagtgartgtaatatgaataccaaattgtacattttaaactggtgaactttatggtatgtaaaatgtgtatctcttatttccaacaaatgaattttatttttaattt

SEQ ID NO: 17284 - DNA, 201 bp, Homo sapiens
taatacccatttatcttataaagaaaataaagaaataataaaagcatttgctaaccatgttagatgctatagtaaatgtaaaaataaagggtctgttaatmtattaactgagcttaatatatgatgtgatataacagcagccttcaaatatgcggagggctataacagagatcatgatgaacagacttttattctggctta

SEQ ID NO: 17285 - DNA, 201 bp, Homo sapiens
aaagcatttattatacttcacctctcagaggcatttaacgctattgacaacttccttcttttcaaaaccctgtcctcccctaattttcatgaaacatgaarctaccttctagttctcttatttatctcagccatctggctcctctttctctattcccttgttacctattggtgttggtatgtattccattctagaactttg

SEQ ID NO: 17286 - DNA, 201 bp, Homo sapiens
taatgtgtcatgagatagaagtttcaggaagttacttaaattaatgttgaattcttgtgacccatgtttcaaatttaatccaatggcaaaggtcatccctytctgaagagctcctttagttactgaggtgaatttaggagtctgagataattctggaagaagccagtataatattttatctgcctctgtactcctttatct

SEQ ID NO: 17287 - DNA, 201 bp, Homo sapiens
tcaggtcttgcatgtgcaaaggggagccggaagaggagaaatctattatacatgcaacactgaactggagaacacggcttggggcctctgggacagttcargtccctgagctgccccctacttcccagacagctgctcctgcagtttgggcacatagtcgtcccactcagcctggtaacgctttctggccactggggccac

SEQ ID NO: 17288 - DNA, 201 bp, Homo sapiens
catggaaaatggttaccaactagagctgcagggtatcagggaatgtgacaaggcagcaaaatgtttctacacatgtctgttttttcaggcattatctttcwtgagactatcaagtgtgtatttaaggagccattcaacttacttcagtgcatttgcttgcaaagggtgcaatgtgatgtttcctactggtagggtcgtatt

SEQ ID NO: 17289 - DNA, 201 bp, Homo sapiens
cctaaatttgtccccactcaagagatttgttctgaaagttgtcaatcattaatttgtaagaaaaaagttttttttttaacataattcctgatcttaatttygattactctaagcaaatttttttatcaatatgaagaaaatattttacaggatatctcatttactcaaaacggtcattggtaagggggaaattatttttcc

SEQ ID NO: 17290 - DNA, 201 bp, Homo sapiens
atgtttaaaaagagaatatgggtaaggaagcatctttctcagttgttcttaacccttgtttccatcataatcaccatcagagctttaagaaaataccagtrcacagatcacgttaccccacaaacctactaaatcagattttccagcgctggagcccagaaatagtcacctttaatctaattcccagtcaggattaataca

SEQ ID NO: 17291 - DNA, 201 bp, Homo sapiens
ggcttgtcgctgcccagagtgcttactccataaatacttaataatttaatatgatttgttagatttattgtctgtggaccatatagcagatttctagcataaaaaaagtgcaattctcttatttttattgtgcactttattattatcatgcattgctaagaaaggaaagccatacatatctgttttagctgacccttattt

SEQ ID NO: 17292 - DNA, 201 bp, Homo sapiens
aatcagtaataaacacctgagcagaacaggaaaatccatctcaaggagttaaggtggacttggaaagtgtcaatgaaatattttatctcaaaattggtacygattgcaccttggaacgcagtagaatttactcactcagaccccatgaaaccctgaatgtggccctcagttcagaatgaatgaataccaggcattcccaac

SEQ ID NO: 17293 - DNA, 201 bp, Homo sapiens
ataagacaaggaacactttgggtcattttaggagcctattgcaataagaacttcttccctaaaaatgttcactgcaatccacctatatattcacattcatstatcccatccatttttatatatgccggcagtataaatacccctttaaaggagataaaattatttctattttatatatgaggaaactcaagtttggataat

SEQ ID NO: 17294 - DNA, 201 bp, Homo sapiens
ttttccattaattaacaggattgactacagcaaagatgcccagtgttccactttcaagtgaccccttacctactcacaccactgcattctcacccgcaagcacctttgaaagagaaaatgacttctcagagaccacaacttctcttagtccagacaatacttccacccaagtatccccggactctttggataatgctagtg

SEQ ID NO: 17295 - DNA, 201 bp, Homo sapiens
ccagttggttaaactactggatgcttcatcagaaagcacccactaagcatcactcaccatgaagttcgttgggtactctatacaatgaacaaaggagataycacataatttttaaaaaacttaaaagattcacaggtgagaattttgtagtaacaattaagtattaactattagaaaaatttaagaagttttaacaaaatg

SEQ ID NO: 17296 - DNA, 201 bp, Homo sapiens
taggaatatacagcatggaaaatggttaccaactagagctgcagggtatcagggaatgtgacaaggcagcaaaatgtttctacacatgtctgttttttcargcattatctttcttgagactatcaagtgtgtatttaaggagccattcaacttacttcagtgcatttgcttgcaaagggtgcaatgtgatgtttcctactg

SEQ ID NO: 17297 - DNA, 201 bp, Homo sapiens
ctcccattttccattaattaacaggattgactacagcaaagatgcccagtgttccactttcaagtgaccccttacctactcacaccactgcattctcaccsgcaagcacctttgaaagagaaaatgacttctcagagaccacaacttctcttagtccagacaatacttccacccaagtatccccggactctttggataatg

SEQ ID NO: 17298 - DNA, 201 bp, Homo sapiens
atattaggattattttttctatttgtaaagaacattattggtattttgatagatattgcattgaatctgtagatagttttgagtagtatggacattttaayaatactgagtctttcaattcatgaacatggaatagctttccattttttatgtcctcttcaatttcttgcatcaatgtttcatagttttcattgtagagat

SEQ ID NO: 17299 - DNA, 201 bp, Homo sapiens
tggtgttatgtcaagggcggctcgatggtgtggatgaaagaactattgggaatggctactgaaagatcaaaggcaagtggaacctcaaaattctggaagtrgaacgagtcagatacaatataagaagtacttcaaaggcaagaaaataagaataataaaaatacctttagttgtcaaatgtaaaatttgtgccagttttgt

SEQ ID NO: 17300 - DNA, 201 bp, Homo sapiens
acacaaaagttgttaacttaaatatcagggaatgtcatttagaaaattctacagttatcagtacaacttgtctttaaattatttgcacagtttctaagtawgtgattttattcaagtgcagaaattgcaggaaattagtatctgtgaaatatagatcgactgaagtaattaatgcatgttgttagggagtggagagagaaa

SEQ ID NO: 17301 - DNA, 201 bp, Homo sapiens
ttgaaataaaagattttcccttttctaagaataaaagatggtgttatgtcaagggcggctcgatggtgtggatgaaagaactattgggaatggctactgaragatcaaaggcaagtggaacctcaaaattctggaagtagaacgagtcagatacaatataagaagtacttcaaaggcaagaaaataagaataataaaaata

SEQ ID NO: 17302 - DNA, 201 bp, Homo sapiens
cagttatcagtacaacttgtctttaaattatttgcacagtttctaagtatgtgattttattcaagtgcagaaattgcaggaaattagtatctgtgaaatayagatcgactgaagtaattaatgcatgttgttagggagtggagagagaaaagaagggaagcaagatctccaaggacaatcaggaggggaaatttgttctag

SEQ ID NO: 17303 - DNA, 201 bp, Homo sapiens
gtaggtctcaactggagacataaacataggagtcattgcattcagatggagcttaaagctaagggactgcatgtgacagtgtaaataaacatgtagagagkagcagatgactggtttctgagccttgggaaacttcatatttggaagagacacaaggaggagctaggaaaagatagtgagaagaggtagccagtgaaaaaa

SEQ ID NO: 17304 - DNA, 201 bp, Homo sapiens
atgtaaaaatctggtatgtaataaatattttaaaagagtaattgtgacgcttattagaatccaagtatggaaagccgtgaatgaaagggaaatgaatagtytgaggaagattgcatatcatcaactaagaattatatcaaggaatgaatagttttccctcaatttatacaatgtttagtttaaataacttgaaataaatct

SEQ ID NO: 17305 - DNA, 201 bp, Homo sapiens
gtggttcttctcacagtaggacaggaagataggtgtccaactattgcatatgtggacaattacattgtcctcctaattttagtcctgtgcctcatcccttycctgtactgagcctgactttattctcagtctctcactgctttcatttaattttccttttgtcttctcctccctggtagtattttttcaagaagatatttt

SEQ ID NO: 17306 - DNA, 201 bp, Homo sapiens
caggctggagtacagtggcaccatcacatctcactacagcctcaacacacactcatgggcgtagcctcccaagtagctgggactataggtgtgcaccaccytacccggataatttttgtattttaagtagagacgaggttttgcatgtttcccagactggattgcttggttcaagcgatccagctgcctctccctcccaaa

SEQ ID NO: 17307 - DNA, 201 bp, Homo sapiens
gatgggaaagagccaaattagggggtcagaaatccagagttatgtttgggctgttattgatgtctgattttcattaggtggtagagaggtcaagaaatccrttggagataagaggctgaggcccattcagtaggtctcaactggagacataaacataggagtcattgcattcagatggagcttaaagctaagggactgcat

SEQ ID NO: 17308 - DNA, 201 bp, Homo sapiens
actgatgtaatgatctcactttcctaccttaggtgtttcatcagtacagacgcctcaccttcccacgcacgcagactcgcagacgccctctgctggaactsacacgcagacattcagcggctccgccgccaatgcaaaactcaaccctaccccaggcagcaatgctatctcaggtttgcgggtcctttagacttgtgcaaa

SEQ ID NO: 17309 - DNA, 201 bp, Homo sapiens
acaatactagtgagcatacagaatttaaaacactcattatctcactgtctactgatcgtattttgtacatgtaacttcataatatacacatttatatgcayttaacacgtattatcaacattctgagtacacagttttcaaaatacagttttaaaactgtatttttaatatatcactatatcacacacacctttctatgtt

SEQ ID NO: 17310 - DNA, 201 bp, Homo sapiens
aatgttgggtgaataaaaatgaacatgggcccatgtagccgctggggccagtttggtgtaatcttgggagcatagttctaagtttagaattagacttctgyagaagtaatgcaattaaaaaaaaaaagaagaagaaagaaatgtgctatgactagttcactcatgaaatgttcaaatgagatgctatttaagagaacaaat

SEQ ID NO: 17311 - DNA, 201 bp, Homo sapiens
tacagacccagtttccccattgacaaccaccctcagccttgcacaccacagctctgctgccttacctgcacgcacctccaacaccaccatcacagcgaacrcctcaggtctgactatgctgctctagtagtgtcttcagttatagataatgaaatggaaactcaaaactttaatgtagctcttttattttgtgccagatat

SEQ ID NO: 17312 - DNA, 201 bp, Homo sapiens
aattaagagaagtggctgcatggaaaagacaaagacattttagagaatgactttttttccccatgagcactgggatgggaaagagccaaattagggggtcrgaaatccagagttatgtttgggctgttattgatgtctgattttcattaggtggtagagaggtcaagaaatccgttggagataagaggctgaggcccattc

SEQ ID NO: 17313 - DNA, 201 bp, Homo sapiens
acaatattgtatactgctctttctagagttactaacattaccaattgatctgagcctatggaggaaggagacctagtactctactttgggctttctctacyggttaacattgtaaatagaattatttaagcctgtatgtactttgttgtcagcaacttctaggtctttctatctttgccacttctagttcttcctctctta

SEQ ID NO: 17314 - DNA, 201 bp, Homo sapiens
tactgaatttgtttattaatgataatattgagaaatttttgacaaaacttataaatgtaattctaaattttgttttgttttgattttgagacggagtctcrctctgttgcccaggctggagtgcagtggcgtgatctcggctcactgcaacctctgactcctgggttcaagcaattctcctgcctcggcctcccaagtagc

SEQ ID NO: 17315 - DNA, 201 bp, Homo sapiens
ctgattatgaagctgcataggtttccagttgtctgcccctaaatgcatctttcccataagccctggtatttttggtacagttctgtagaatgcatgtgtcrtggtatagcagaagtgcttgaagatttgtttctctgccttatctttagtaattgtgtttatgttggctatctggctattgcccttgcgtgacagacacaa

SEQ ID NO: 17316 - DNA, 201 bp, Homo sapiens
ctgataaaagtaacttgaagaaactttagtgcaaatgttggattcagacaatcgctacttttaaagtacttaaagaagtcagtctttgaaatcttgcccgkattccattccagtttcatcattggagacttccaatgatgaaaaattggggaagaattaccttccaaagcctcagtttcctcgtgtgtaaaatggaaataa

SEQ ID NO: 17317 - DNA, 201 bp, Homo sapiens
ctcttcatgttcttataattatttgagaatcataggaaatgaattgtctttttgctgtttttgatactttttaagcatatgctttttatttcaatgaagckcaatttatctatttttacttcttttgcttatgtttttggtgtcgtatatgaaagtccattgccaagtcatgcagatttatccatatgttttgttctaaaa

SEQ ID NO: 17318 - DNA, 201 bp, Homo sapiens
ataaatttatatttgttgtaaagatatttttatcagtcagcagaaattgttgacactaaacaaaggtgctttggaggtatattatcaatcataattttacscaagttaaggaaagaatgagggcttctgatccctgagtaattaatgccccacatatatcaagaaacaggtggttaataactacgttttagaaaacaagaa

SEQ ID NO: 17319 - DNA, 201 bp, Homo sapiens
ccaagtatccccggactctttggataatgctagtgcttttaataccacaggttggcacacaaaagttgttaacttaaatatcagggaatgtcatttagaarattctacagttatcagtacaacttgtctttaaattatttgcacagtttctaagtatgtgattttattcaagtgcagaaattgcaggaaattagtatctgt

SEQ ID NO: 17320 - DNA, 201 bp, Homo sapiens
cattttcaattctaatggaatgtatgtgtgaaattatagactgtactgcatttgtaattggtagacacctgcaagctcaaatcaaagccatgttcagaacrtgcatgcatgtatcactgcagaaatacagactctgcctgcaaatgtgagactaatctcacatcattgaactgatgaccccagggatcttgacagaaaata

SEQ ID NO: 17321 - DNA, 201 bp, Homo sapiens
ctgtttaacaatgccatttatcttcgtttgaaaaacaagcatatataataccatcacagaaattttgtttagggtacatcaaagtattttgagtaccttamtgatgaagtttattggatatagtaagcagttaaataaatggtcagtgccttcctacagcaagtacaagactgtgtatttaatcttccatttgtttccctg

SEQ ID NO: 17322 - DNA, 201 bp, Homo sapiens
cagagccaatgtttgatctgaacaacttgattctaggatcattttggctgggaattttctgagagctgtgtgtgtgtgtgtgtgtgtgtgtgtgtgtgtgwgagtgtgtgtgtataaacatgagaccatattagtatatacacaaatgtcaatatatattttaaactggaatgttttaatagagtggcttatatgatagaa

SEQ ID NO: 17323 - DNA, 201 bp, Homo sapiens
gacatagagttgggaatgatagacactgggaaatacaagagcgatgatggagggaggaagacaagggttgggaaactacctatattgggaactgtgcctayttgctgggcgtcgaattcaattttactgcaaacctcagcatcctgcaatatacctttgtaacaaacttgcacatataaccctggaatccaaaataaaagt

SEQ ID NO: 17324 - DNA, 201 bp, Homo sapiens
tagtttttcctccaacgtaaggatctcatatcacgctttcattctgaactaaccattccctctctgcagttgatgtaactgtgccatgtgaccattgtacmcatgtgggagggaggagctgaattacgcctgacccctggccagagcaagagctactggccaaaggggagattgagcatctgtgttgtacttcccacgtct

SEQ ID NO: 17325 - DNA, 201 bp, Homo sapiens
tacagtgcttgctccttggctcttctcctaaagctgttatcatcagatctgtttgatttctcctttgcacttactcatgcttaaaagaatccagcaattayttatcaatcacttcttatacacaagactctttgctacagctatttctctttcttctcctcctcttcctcatcttattatgtgattcatgctgatgttgat

SEQ ID NO: 17326 - DNA, 201 bp, Homo sapiens
atttctggcatttctgattattgtgacatcaatagccctgcttgttgttctctacaaaatctatgatctacataagaaaagatcctggtaagagttgattwtaaatttttaaataataatggtattagtaatggtgcaaacgcatatccatatggcagtgatggaaccagttaaatgaaatatgtgaactagagagaagac

SEQ ID NO: 17327 - DNA, 201 bp, Homo sapiens
cataaagtgaaaaacattaaataattcaccaaagtatctagatttttttttgtttttgaagtgcaagggaagtaacttgacctttgttaaacactttgatmatggaaaacacataaggttctcatcttattccaggaagtgtagacactagataatcttttcatagtcatccaaaaagcatattaagtgaaccaggtaaat

SEQ ID NO: 17328 - DNA, 201 bp, Homo sapiens
tggcatttctgattattgtgacatcaatagccctgcttgttgttctctacaaaatctatgatctacataagaaaagatcctggtaagagttgattttaaawttttaaataataatggtattagtaatggtgcaaacgcatatccatatggcagtgatggaaccagttaaatgaaatatgtgaactagagagaagacagcat

SEQ ID NO: 17329 - DNA, 201 bp, Homo sapiens
ccatacccaccattaccaggataatctttgtaaaaggcagaacttacctttgtccattcctcttttaaaagctcctattggtagaaaatatactgaacccrtgatttgataccaagtatgttttggctcaacttttatgaaaacaaatatttaattagaatataccaacatttatgagttttccttaaagataaattttgg

SEQ ID NO: 17330 - DNA, 201 bp, Homo sapiens
ttccacagatgtttcaatctgataaatattaaatagagaattataaatgtgaaattagaaaataaatgtgtgcgtgaaatattgcatcgatatattcattygaaatatttctttatttcaggtaatatgatatttgataataaagaaattaaattagaaaaccttgaacccgaacatgagtataagtgtgactcagaaata

SEQ ID NO: 17331 - DNA, 201 bp, Homo sapiens
acaaataaattctatggtgcttaactctatagtatttaaagattcaatatttatttcctctaaaaatgagtcaagtgtctgaaaggaaaaagccacctaamtgaaacttcagtttctactatacagggtatttattataaaactgtaattacaatgcaattatattgaagtataaatgatcatcattcatttatttaagaa

SEQ ID NO: 17332 - DNA, 201 bp, Homo sapiens
ttttagtatggttttattggtttgaattaaacattaatattattttctaaatttactaataatgttgtggacttgtttaataataaccagtgaaaagaatrtgtgtggtttttagtacaaagtgggtcagagggatctaggagtgtcaaaagaaaaagaaaggagggagatgtctggggaagttaatgtgtttctttggtc

SEQ ID NO: 17333 - DNA, 201 bp, Homo sapiens
ttactttgttaaaggaatttactctaaaacaaattaaatgagcccagatgcatttctttaaattttattttgaattcatcatttgtcaaaatatggttatmaataatgcatgcttataatatgaagaatgctttatccatgtcttatttttcatattacataacattcttattcttttaacaggtccaggagagcctcaga

SEQ ID NO: 17334 - DNA, 201 bp, Homo sapiens
tatcaaggaatgaatagttttccctcaatttatacaatgtttagtttaaataacttgaaataaatctttgattcactttattattttaaaaacaagcgaaygtcaaatcaaacgaggactcctagagcaaagatgccaataggaaattatctttgctaaagagtttttctttcaccttttaatataacgaattaattagct

SEQ ID NO: 17335 - DNA, 201 bp, Homo sapiens
tagttttccctcaatttatacaatgtttagtttaaataacttgaaataaatctttgattcactttattattttaaaaacaagcgaatgtcaaatcaaacgmggactcctagagcaaagatgccaataggaaattatctttgctaaagagtttttctttcaccttttaatataacgaattaattagcttttattcttctatt

SEQ ID NO: 17336 - DNA, 201 bp, Homo sapiens
ttcaaatcttgcttttaattattaatacgagggtgagtggtattgtttattaagtaattttagtctgactgcacctcagttaagtcatctgtaaaatggaracaatgataatacctcacagacttataaccacaaaagtaatacaaataaagcacttaaacaagtccctggcccatgctatgcatttggtgattgtaagtg

SEQ ID NO: 17337 - DNA, 201 bp, Homo sapiens
tttgagaatcataggaaatgaattgtctttttgctgtttttgatactttttaagcatatgctttttatttcaatgaagcgcaatttatctatttttacttmttttgcttatgtttttggtgtcgtatatgaaagtccattgccaagtcatgcagatttatccatatgttttgttctaaaaattttatagcattggctctta

SEQ ID NO: 17338 - DNA, 201 bp, Homo sapiens
ctgaaatccaaaatattcacttactagagcagaaaaaaattagctgtgcatttatgctgatcacagtgtagataattaatctttaagaaagtaggtttttmtgtttatagttgataaagtgttagtggcaagaactttttctgttattgaatattatcatcagattactcgtgctttccattttattcctttaaaaaaatc

SEQ ID NO: 17339 - DNA, 201 bp, Homo sapiens
gattgatatatgtatactagtaatcactggtatggattgacaatttcagtgaaaggaatttcagatagagataagacaaggaacactttgggtcattttargagcctattgcaataagaacttcttccctaaaaatgttcactgcaatccacctatatattcacattcatgtatcccatccatttttatatatgccggcag

SEQ ID NO: 17340 - DNA, 201 bp, Homo sapiens
tttgcaactgtgtaaggcagtcatttccagtaagaattgctagaacaaacattaagcatttcacagtgaaaagggtcataggtatattttcatcctttgcrtatagaagaaatagcaatctattattctcagtttttgacttaaaaggtattgttgcttccctttctttccctcccctactcaagtttttgcccatggatc

SEQ ID NO: 17341 - DNA, 201 bp, Homo sapiens
acttgatcaggatgaatgatctttttaaagtgttgttgaattcagtttgctagtattttgttgaggatttttgcatcagtattcatcagggatattgaccrgtagttttcttttttttgatgtgtctttgtctggttttggtatcagagtaatactggccttgcagaatgagtttggaagaattcctttctcttccatttt

SEQ ID NO: 17342 - DNA, 201 bp, Homo sapiens
ccacaaacccagatgataaatccagttgacccatgttaatgcaccatgtttatcctgcatgtgaatccccatattatttgacttcaaccatttccttctcraaacaccctctactctttattcttgtttgctacagttttcctcttacttggaaaatttgattacctatgctggctctctccttaatattcactgaacttc

SEQ ID NO: 17343 - DNA, 201 bp, Homo sapiens
aaagcacagataattacgaaaaaaatgatatggaggcacctaatgtgttttttctttttcatgttttttggggatatttggttagttgatttgatattttkgcatttgcattaatgtagttttatttattctggaaaaataacactcaatgttctattttcttttagatgaaaaatatgcaaacatcactgtggattactt

SEQ ID NO: 17344 - DNA, 201 bp, Homo sapiens
gtctatctgtatctttatttacaactgttcaaagatattacaaaagcaacattattacttaacttccaaagtgacaataacacacatttataaaagcctgkgaattttttaatgataaaataagtgagtttttattcttttaacaaatttgatcttttaaaaagtcataaaacagctttggttgtatgtaagccactccct

SEQ ID NO: 17345 - DNA, 201 bp, Homo sapiens
tgatgtggactgtaattgtgctcatgaaagacacaatgtatacatacctccttgagacggaatgataaggataacgtagaatgtttaccatgatttatcartctctcctatataagaaaaatatttcttgtcctgaagtggtaactttggtgaagtcttttgcttgctcttttacagactaattaacaagttttctatgcc

SEQ ID NO: 17346 - DNA, 201 bp, Homo sapiens
tatatgtgttttatgggttataagcttatccagggcaagggtcatgcttttatcatgtttgaacctagtctccaacagcataccagcaaaacaatgtatgwttcttgaacctaagtgaactaaattaacttgtttcaagttccaaggaatgaggtgcttgcatgagaaggggcatatcaacctaattttagatatgtaaga

SEQ ID NO: 17347 - DNA, 201 bp, Homo sapiens
attgtacacaagttgaaaaagcagatactactatttgtttaaaatggaaaaatattgaaacctttacttgtgatacacagaatattacctacagatttcartgtggtaagaatataacattgaccagagaatttttttttgtggcacaatgttgttctagatattatttaatcttactctctgccctttctctcttcctcc

SEQ ID NO: 17348 - DNA, 201 bp, Homo sapiens
gcaacattcctgcctctgtaaactagacacagcagcacatttacccaacctgctctgactgtgacaaccagaaatgtctccaggcattgccaaatgtcaamtgagggcaaaattgcctaccctagccaccttaactgaaaactacaaacttcattgaaataatttctttatggctcccagcagtaacactgtgctattcta

SEQ ID NO: 17349 - DNA, 201 bp, Homo sapiens
cttactaaactctatgtatttctactttccaatgacccatgttcttattttctgaatttacttattgatgctttaggtatgataaaggtatgtaatggctraggaaacataaatgaagcataagacatcagttgagagttttgacggaaaggaagtggtgatatgaaggaaacagataaaccaaagaaaaaggaaaaggtc

SEQ ID NO: 17350 - DNA, 201 bp, Homo sapiens
tatttatggtaaaaatttctacataatagaaaatttggaaaatgtcaagaaatagaaggaaaaagaaattgcttagagcccatgctaacattttgtttttyttcctctatcttttgatcacatgctgtgtatgaaatttcatgttcaattttttcccaagtaaaccttgattattctagacaatttgaaaaatatagaaat

SEQ ID NO: 17351 - DNA, 201 bp, Homo sapiens
ctttaccaggctctcttgcagcaactggtgagctcatgtaggctatcactgggtctctgcttatttgccagtgcctgcaggtcctcagtacctgtttgctraacaaacgaatggtctgtcagcttaacccaactctgtatgtagaaggcacttaataattcttaaaaacaattttgattctgtccttttattgttatttat

SEQ ID NO: 17352 - DNA, 201 bp, Homo sapiens
aaaaagcaaggtatgaactttttagcctacaatatttctatctttattctagcaagcacatttacctggcacatttgttaacatctagggcttataaacaygtaaaatctaaaagtttaaaaaccgttatcctggattctctctcttcttcagatatagtcatagaattttaaggacaaagcataaaagcatcttaattgg

SEQ ID NO: 17353 - DNA, 201 bp, Homo sapiens
tttgcattctttatttcagagatttttcaggcttctccagattctacagtctaaatagtttgtaaatccacacacttctactttgccagggatttcttagkgtaaaaatatcctgaagtctcacctgccttcaatccttactgtgtccatacccaccattaccaggataatctttgtaaaaggcagaacttacctttgtcc

SEQ ID NO: 17354 - DNA, 201 bp, Homo sapiens
atgtgccaagagttgaagaacagcttggcccttccaagaattgaggaagctggtttggtagaagtattgagggacccagtaaggtgtaaggctggagaaayagtcaggggcgtatcaataaagactttttatgctattttgaggaggtttgttgtcctcttatagtgatggaaagctgttcatcttcagaagagcatcttc

SEQ ID NO: 17355 - DNA, 201 bp, Homo sapiens
ccattcatagtaccttcaattgattgatttcttaacagacaatcagcaaaattatcagtttttattagagattttagtagagaccgagcttaaacaaatawattctatggtgcttaactctatagtatttaaagattcaatatttatttcctctaaaaatgagtcaagtgtctgaaaggaaaaagccacctaactgaaact

SEQ ID NO: 17356 - DNA, 201 bp, Homo sapiens
ggttttaattggtggaaagaaaaaaaaaagggtgaagtgactgttgggagaagatgattaagataaatgggagttcacagatgacagacgatgggcatcakagggcagggaggaaggcactgatgggttagatgtaagagactgggttgtatctgaggatacaaataaccattcaggaataaaaatctggggaatgtggat

SEQ ID NO: 17357 - DNA, 201 bp, Homo sapiens
aataatatgatggggtctagaaacctttatatcaactttgctgaatgatttataccatagcaaataaatggatatacataaatttattttgaaaactcaastttatcttcagttgctcacataaatattgagagcaaacatttttctaaaagacatttgtagactccctgagatatatgcttatttgtggaaaaacatata

SEQ ID NO: 17358 - DNA, 201 bp, Homo sapiens
tactttgaaactgcccagagaaattcacaatcacaaaatgatggatctgaagcaattcctctaactcacaatttttcctgttaatgagtaattgaatgttyagcaaatgacatatctctgcatgtgttttcaatagggtttcaaagaacccaggaaatacattgctgcacaaggtaatttctttgataatccaatattctt

SEQ ID NO: 17359 - DNA, 201 bp, Homo sapiens
caatacttgcacaaacaatgaggtgcataaccttacagaatgtaaaaatgcgtctgtttccatatctcataattcatgtactgctcctgataagacattamtattagatgtgccaccaggtaaatatcaatttatttcttttaataaatttataaaaacagtacacttttgtgtgtggtgttctccagtggtcacaggagc

SEQ ID NO: 17360 - DNA, 201 bp, Homo sapiens
gcacagactagggagcatgtctggcaacatgttggcaaataattaaattggcacattcaggataaaatgagaacatggaaaaacagaatatgattctcttyccagccctggaaagacatcccaagtgtacgtattgtttatattatgttattagtatatctttaccagcaaagggcaggtcatcatcattcaatatgctca

SEQ ID NO: 17361 - DNA, 201 bp, Homo sapiens
tatttgctatcctctcaccagtgacaattaaccagtatagaaatatagatgtttctacattgttcatatacttgaacatatatttctttatgtagatactmacacataaactagttatatatttgtgggttatatatactagtcaatctatctatctgatctatctatctatctatctatctatctatctatcagttctcc

SEQ ID NO: 17362 - DNA, 201 bp, Homo sapiens
tgatttcagatcccaaaagggcatggctgaatgtttagcctttcagagttggggaatccatttcttcctgtggaaggattagtctttaggtgaatagataygtatcgaagggaaattaagagagcataagaaaaccccactttacctgccatctatccatggaagcagcaataagaccacctgagagctatggtacaatta

SEQ ID NO: 17363 - DNA, 201 bp, Homo sapiens
tctcaccagtgacaattaaccagtatagaaatatagatgtttctacattgttcatatacttgaacatatatttctttatgtagatactcacacataaactagttatatatttgtgggttatatatactagtcaatctatctatctgatctatctatctatctatctatctatctatctatcagttctccatgtttgtctat

SEQ ID NO: 17364 - DNA, 201 bp, Homo sapiens
caacctattgcaccatttggtagcgcctgtgtgcttaaccgcatgagctgcgcctcttcctttcctataaagactcagaataagaaaaacagaagtacacsgaagagaagaaaccacaagagcagtaaagacactgctgttagcttttagctgtgcaaacagcagtcttatgagaacaacacattgaaaacctcttctatt

SEQ ID NO: 17365 - DNA, 201 bp, Homo sapiens
cattgttcatatacttgaacatatatttctttatgtagatactcacacataaactagttatatatttgtgggttatatatactagtcaatctatctatctgatctatctatctatctatctatctatctatctatcagttctccatgtttgtctatttggcgttcccatgaacttcagaccttcgcctgtgttctcttttc

SEQ ID NO: 17366 - DNA, 201 bp, Homo sapiens
atgcaaaggtaatgctctgttgaaccattttgtagcttatgttttgttttgatacatattttaaaatattgtttaagacaatacttgaacagattgggattgtgtgtgtgtgtgtgtgtgtgtgtgtgtgtattggttaaataactggtttatttttaaactgaaattaaaccttccatttctttgagaaatttaaaaagt

SEQ ID NO: 17367 - DNA, 201 bp, Homo sapiens
tgcaaaggtaatgctctgttgaaccattttgtagcttatgttttgttttgatacatattttaaaatattgtttaagacaatacttgaacagattgggattgtgtgtgtgtgtgtgtgtgtgtgtgtgtgtattggttaaataactggtttatttttaaactgaaattaaaccttccatttctttgagaaatttaaaaagta

SEQ ID NO: 17368 - DNA, 201 bp, Homo sapiens
ttgggacaagttttgaatcctaactctattactaattcctcttcactagactgagattctggtatgtggtattcaataagtgacttgacttctttaagccttggtttctttttcagtgagatttacagcttagactagtttctgaatcttgaccctgtggacaatctagttggagaactgagatgacctgggcattgtagg

SEQ ID NO: 17369 - DNA, 201 bp, Homo sapiens
gagctatgaaggcacaatggaagcttgcctggcaatcagtgccagaacagacagctagtctgatgaattctgctacacatcacagggctactagttttttkttttttgttttttttttttttgtcatacattactgcaagttccctgaggaagtttactgatctgtagttttacgagaaatgcacgtcatggaggtggcgt

SEQ ID NO: 17370 - DNA, 201 bp, Homo sapiens
gaaggcacaatggaagcttgcctggcaatcagtgccagaacagacagctagtctgatgaattctgctacacatcacagggctactagttttttgttttttkttttttttttttttgtcatacattactgcaagttccctgaggaagtttactgatctgtagttttacgagaaatgcacgtcatggaggtggcgtgggggag

SEQ ID NO: 17371 - DNA, 201 bp, Homo sapiens
ttttggagaagttagtaaaaccgaatctgacatcatcacctagcagttcatgcagctagcaagtggtttgttcttagggtaacagaggaggaaattgttcytcgtctgataagacaacagtggagagtatgcatttatttatttacttttacatttttgattcgtttttacagagaaaaacttctacagagataacaatta

SEQ ID NO: 17372 - DNA, 201 bp, Homo sapiens
tttctgtatcttcttgtcaggggttgaaaagtttcagttacatgattgtacacaagttgaaaaagcagatactactatttgtttaaaatggaaaaatattraaacctttacttgtgatacacagaatattacctacagatttcagtgtggtaagaatataacattgaccagagaatttttttttgtggcacaatgttgttc

SEQ ID NO: 17373 - DNA, 201 bp, Homo sapiens; identical to SEQ ID NO: 2706

SEQ ID NO: 17374 - DNA, 201 bp, Homo sapiens; identical to SEQ ID NO: 2705

SEQ ID NO: 17375 - DNA, 201 bp, Homo sapiens
gcttcttggagatggtgttttaaatcttccaaaatcttcatcagcaccccaaaacttcctcctcaaagtaacaacataccttgctacagataattattggkgttatcaatgttttataaattataaatttaaaaatcactatcttaagatctatatataacatattaagtaaaacttatattcttacaagacttcctccag

SEQ ID NO: 17376 - DNA, 201 bp, Homo sapiens
aatcaatatattaatataaatagcacatattgtatgaaaaacaaccagatattataaaacaaagatttaataggaatagtgtcacttttttgcatttttasaaatcttttaaatgtctgtctgaataatagatagctggattctcatatatgctttaatattctctatctgttgtaatattatataccatatagtttctgg

SEQ ID NO: 17377 - DNA, 201 bp, Homo sapiens
cctgcacaattgcactgcaggcaagactgaacttatgaccaccacttctgtgtaattttgaatttcttagacctgaaccctgctgagtacacctgcttccytctattccttgctgaagttcattcttttcagtgcgttaatggagccaaaccaagctggtggtggtaacaatttgaataataatagtctttaactttttat

SEQ ID NO: 17378 - DNA, 201 bp, Homo sapiens
aaaaatccaggtatcctaatctggagggttaccctttggatctgaatgggattggagtcagtacaaggggtggggagtgtttttagaacatcccggcagcmtttttttttttttttttttttttttgagacggagtctcgctctgtcgcccaggctggagtgcagtggtgcaatcgcggctcactgcaagctccgcctccc

SEQ ID NO: 17379 - DNA, 201 bp, Homo sapiens
tattttcatcctttgcatatagaagaaatagcaatctattattctcagtttttgacttaaaaggtattgttgcttccctttctttccctcccctactcaaktttttgcccatggatccagatacctacaagggcctaatacagggaaagtgcactgtgtatgagctatgaaggcacaatggaagcttgcctggcaatcagt

SEQ ID NO: 17380 - DNA, 201 bp, Homo sapiens
cttaaacataaacctaatttttagcataattgtggaatataaagaggttttgtctatgtgggttatatatatttattgtaaaataaactagatagaatttwaaaatatttaattatttattaaataataataaatcaatatattaatataaatagcacatattgtatgaaaaacaaccagatattataaaacaaagattta

SEQ ID NO: 17381 - DNA, 201 bp, Homo sapiens
tgattttaaagatttgtgataaaacaagacaccattgatgaaatacatagaaaaaggaagacaaaatagcttgggacacattaataacttacacaaaaaawtttaaaaattaaatcttctaatagatttgatatataatataccccagaaatatttacattatattttcaaagtctagagcatttcttccatagactccaa

SEQ ID NO: 17382 - DNA, 201 bp, Homo sapiens
ctctgtatatccaagagttcagttattttaaattttggctcccacaaataagtaacaacatatgaagtttgtatttctgtgtctggcttatttcacttaaygtaagtcctccaggtccatccatgttgttgcaaatgactagatcttacccctttttatggctgaataatacttcattgtatatatgtactacattttgtt

SEQ ID NO: 17383 - DNA, 201 bp, Homo sapiens
gaaaataacagctgcatgttacattccccacccacaattctgtttgccaggcaaccacttttaaccatttctatttttgggtctccttatagtttccttcatatatatatatatatatataaacaatattgtatactgctctttctagagttactaacattaccaattgatctgagcctatggaggaaggagacctagtac

SEQ ID NO: 17384 - DNA, 201 bp, Homo sapiens
tttgaaatgtataataaattattgttgaatagtcaccctgttgtgctatcaaatacaaggtcttattcattttatctaattatatttttgtacacattaaycatcaccatttccacccctgccatacccttccaatcctttggtaaccatcattctactctgtatatccaagagttcagttattttaaattttggctccca

SEQ ID NO: 17385 - DNA, 201 bp, Homo sapiens
acataacaaaatggcaggagtaagtctttatttatcagtaataacattgaatatcagtagactaaactctctaaacaaaatacatagagtggctgaatagatattaataaaacaagacccaacaatctgttgcttacaagaaacattcttcacctgtaaagacacaaatagacttaaaataagagatggaaaattatattc

SEQ ID NO: 17386 - DNA, 201 bp, Homo sapiens
atttgacccagcaaaatcacatatatgcatatacccaagagaagcatcaactagaaacatttgcaagaatgtgcattgcattcagcattgtcaaaatagcaaaaaaaaaaaaaaaaaaaaagtgaaatacatatcaatgaaagaatggaaacaccgtaaatatgtatcaataggggaataggaagacaaaatgtggacatg

SEQ ID NO: 17387 - DNA, 201 bp, Homo sapiens
cataacaaaatggcaggagtaagtctttatttatcagtaataacattgaatatcagtagactaaactctctaaacaaaatacatagagtggctgaatagatattaataaaacaagacccaacaatctgttgcttacaagaaacattcttcacctgtaaagacacaaatagacttaaaataagagatggaaaattatattct

SEQ ID NO: 17388 - DNA, 201 bp, Homo sapiens
agagatgctcagatgaaaacaatgagtgagtaaagctgccatacgaaacattcaagatataatttatgtgatttaaaaaaaacatgaaaatgtacaatgcktgtgattacagatacatagatagcagtgtagaaacataaaaacaaattgttaaccaggtaaaaagaaattatttacagtggaaaataaagtacagtggaa

SEQ ID NO: 17389 - DNA, 201 bp, Homo sapiens
gttcggactgtctgaggaaatcgacagtgtgtgtttaatgaccaaaccaacatggctttgaagaatatatatatatttttttttttgctttttttttttcrttgcccaggctggagttcaatggcatgatctcagctcactgcaacctacgcttcccaggttcaaggaattctcctgcctcggacttccgagtagctggga

SEQ ID NO: 17390 - DNA, 201 bp, Homo sapiens
gagggggccagtgctcattttgaggacacgatagttcggactgtctgaggaaatcgacagtgtgtgtttaatgaccaaaccaacatggctttgaagaatayatatatatttttttttttgctttttttttttcgttgcccaggctggagttcaatggcatgatctcagctcactgcaacctacgcttcccaggttcaagga

SEQ ID NO: 17391 - DNA, 201 bp, Homo sapiens
ccccaggtgggatttcttgtgtaggccccatgcagtggagggacagagggggccagtgctcattttgaggacacgatagttcggactgtctgaggaaatcsacagtgtgtgtttaatgaccaaaccaacatggctttgaagaatatatatatatttttttttttgctttttttttttcgttgcccaggctggagttcaatg

SEQ ID NO: 17392 - DNA, 201 bp, Homo sapiens
actatttcaaatctagcactttcctcgtgtgtgcctgtgagcaatttactaaactcttttaggtcccagtttcattccctataaaaaaggataaataatgytaactcattggcttactgggatgcttaaaagaaaaaaaatacatatatattatataaagaggtgtgcatagtgtctgctacataacatttcagtaaactg

SEQ ID NO: 17393 - DNA, 201 bp, Homo sapiens
tttttgtcaaagttgtcaaagtcaagaagtcattattgagaccctgagggtaaggcaggagccaagtgagaacaagcagatgtcaaagatggtgaaaaacyagaacagccaggtcccccaggcatatacagagaagttttgcaatggcaggtccccgtggttgtctgacccagacttccaccttgaggtaactggggtaac

SEQ ID NO: 17394 - DNA, 201 bp, Homo sapiens
aactggggtaactataacgatattttcatcctgatctcttcatgcagttatatgtttccaagaacagataaactgtgaacttaatacaagtgtctcctttmcttggattctcaccatctgggtggtaaacatgacagaaacattcaagtatgttcaatgtagtacatggtaacaaatgctttagcacagactagggagcat

SEQ ID NO: 17395 - DNA, 201 bp, Homo sapiens
ttgtttaaaatggaaaaatattgaaacctttacttgtgatacacagaatattacctacagatttcagtgtggtaagaatataacattgaccagagaatttwtttttgtggcacaatgttgttctagatattatttaatcttactctctgccctttctctcttcctccctgcctctcttgttctccctctgtttgtcttttt

SEQ ID NO: 17396 - DNA, 201 bp, Homo sapiens
gcctaagagttcaagaccggcctgggcaacatggcaaatcccatctctacaaaaaatacaaaaattagctgggtatagtgcctgtggtcccagctacttgrgaggctgaggtgaaaagattgtttgagtcgaggaaatggacgctgcagtgagccatggtcacaccactgcactccagcattctagcctgggcaacagagc

SEQ ID NO: 17397 - DNA, 201 bp, Homo sapiens
acaggtccaggagagcctcagattattttttgtagaagtgaagctgcacatcaaggagtaattacctggaatccccctcaaagatcatttcataattttaycctctgttatataaaagagacaggtaatttgtgtagaatttaatttcatcagaaaagagaaatcaagaatttgaaagtactagaaatttttattgagcca

SEQ ID NO: 17398 - DNA, 201 bp, Homo sapiens
tagtctaataattgtttaagatctagaaaaaaaaaatcaagaatagtggtatttttcatgaagtaataaaaactcgttttggtgaattctgtaatagcttmtcatgaaggtcaaacacaacctttagattggtttggttttctatatctttactcttttgtctgattttatatgtcttaactatacagcaccgattattgt

SEQ ID NO: 17399 - DNA, 201 bp, Homo sapiens
taatacttactgaataaatgagtgatttattcttcagggttttgatattgttttttaatttatgtactatcataacttccttatttataacccccaagctracacttaaaatactttatactatatccaagtattgtcaagtaatttacatatgcatctattaaattattaataacaaatctttcttcattttgatagctc

SEQ ID NO: 17400 - DNA, 201 bp, Homo sapiens
cagggttttgatattgttttttaatttatgtactatcataacttccttatttataacccccaagctaacacttaaaatactttatactatatccaagtatygtcaagtaatttacatatgcatctattaaattattaataacaaatctttcttcattttgatagctccaagccaggtctggaacatgactgtctccatgac

SEQ ID NO: 17401 - DNA, 201 bp, Homo sapiens
aatataaagcccagaagagatctgaagtacaagattgaaaagtcattgatttataggtaaatgtttgtatgtgagtgagatttctcagatgaaatgtgtaygaggaggaaagaagctaaaggattgagtacacggtgtaaatttaatgaaatgtgtatgcccacctgaaagacacatgtaactagtattgaatctttaata

SEQ ID NO: 17402 - DNA, 201 bp, Homo sapiens
gagaaattcacaatcacaaaatgatggatctgaagcaattcctctaactcacaatttttcctgttaatgagtaattgaatgttcagcaaatgacatatctytgcatgtgttttcaatagggtttcaaagaacccaggaaatacattgctgcacaaggtaatttctttgataatccaatattctttttgaaaaatttttata

SEQ ID NO: 17403 - DNA, 201 bp, Homo sapiens
agtttgataaaaaattggcttaaattaaaaattaaaatacttaataattttttaaaatgtagaacaagtgtgcagaatactggccgtcaatggaagagggyactcgggcttttggagatgttgttgtaaagatcaaccagcacaaaagatgtccagattacatcattcagaaattgaacattgtaaatgtgagtttgcttt

SEQ ID NO: 17404 - DNA, 201 bp, Homo sapiens
ctcgtttgttcttttttcccctttccttttctcttctctattttctttcctattcttttagcttttctacttttacatgataattcacattaaattattadaagtctaaataagagcctaaagtttactagcactttgttgtgacagttcatgaagagcctttccctaaatgctcatgaatttcttaattttctttccttc

SEQ ID NO: 17405 - DNA, 201 bp, Homo sapiens
aactggtttatttttaaactgaaattaaaccttccatttctttgagaaatttaaaaagtagttgttatcaatgtggcagatattaggtagaatctaatatygtgaaaattaaactgcacataaatagatataaatccttttgtcagtgtgtgtatatctctgtgtgtaattttgatctcaggcttggcaggtttccttaaa

SEQ ID NO: 17406 - DNA, 201 bp, Homo sapiens
cacatactattttatagtaattacttgcatattttgtagaaaaggcagctgtgttttctacaaatatttcacaaatgttagtattgctctatgccaaggarcagaagacaaatttgtggaaaagatacatgtggcccctccccaggtgggatttcttgtgtaggccccatgcagtggagggacagagggggccagtgctca

SEQ ID NO: 17407 - DNA, 201 bp, Homo sapiens
cagtttctaagtatgtgattttattcaagtgcagaaattgcaggaaattagtatctgtgaaatatagatcgactgaagtaattaatgcatgttgttagggrgtggagagagaaaagaagggaagcaagatctccaaggacaatcaggaggggaaatttgttctagtatcctctgatctatacacactcgccatgattctcc

SEQ ID NO: 17408 - DNA, 201 bp, Homo sapiens
agagaatgtgtcttctattaaataataacaaataagaataccttttattttgtgatggtctttactatttactgagagacaagtattgttcaagttgccgkttttttttaattagctgacatatttcctgcttttatttgagttagaattcctgtaccaaacattttaaaaagagaaaaaaaattaaagaaagagaaaagg

SEQ ID NO: 17409 - DNA, 201 bp, Homo sapiens
agacgaggttttgcatgtttcccagactggattgcttggttcaagcgatccagctgcctctccctcccaaagttctgggattacaggtgtgaaccattgcrcctggccacaaccaatctcatcaggtcttttttttctatcagtgaagattcagcacagtggcttctatctatgattttggtaatgtttaataatgtttgc

SEQ ID NO: 17410 - DNA, 201 bp, Homo sapiens
ctcactttataatgaaaggagatttaaaattagggattatatggtacacgaaaaatttatatacacagattacaagtactagtttttttagtgaagaaaakacaactatatattttctctttttatctgttgtcctattttacaattgtagcaattaatctgccaaactctttaatcaataaaatatggtatttaacaacc

SEQ ID NO: 17411 - DNA, 201 bp, Homo sapiens
aatataaaatggtgctgataattctaattacatagtttatagaaaagatacatgaccaagcttgaagcaagaatgattgataaggaattaggtaggttctktataaggaaaggtgatttcagatcccaaaagggcatggctgaatgtttagcctttcagagttggggaatccatttcttcctgtggaaggattagtcttta

SEQ ID NO: 17412 - DNA, 201 bp, Homo sapiens
tcctttcatgtactgtgtggtccaccatactacctaatctgctatatactcacaaaactatttacttcttttgaaaaaaatgtattattagatttaaatawatgtatttatatttcccttcactttttaaagttttcactttatttttatactatgttttaagcttccctaatatcccactgctgaatcccaccgacatgg

SEQ ID NO: 17413 - DNA, 201 bp, Homo sapiens
gcgagagagggcatccttgtcttgtggcggttttcaatgggaatacttccagcttttactcatttagtatgatggtagctgtgggtttatcatatgtggcrctcattattttgaggtatgtttcttcaatacctagattatcaagagatttcaacatgaatggatgttgaatttgatcaaaaatcttttctgcagctattg

SEQ ID NO: 17414 - DNA, 201 bp, Homo sapiens
ttacactgtaaaactatatatgtttcttagaatatgatttatgtacaataactaaagtgtcctgctgataacatattgtttaaattgaatctttatgatartgctttatacttctcattgtttggtaaactatttgattgccctctttttagtgaataattctactaggtattacttttctactgatgcagaagtgaaaac

SEQ ID NO: 17415 - DNA, 201 bp, Homo sapiens
ggaagagggcactcgggcttttggagatgttgttgtaaagatcaaccagcacaaaagatgtccagattacatcattcagaaattgaacattgtaaatgtgrgtttgctttttacataatttttgttttgatacttttttataaaaatataattatggaatattaaaagtgagaaaataaaatatatcaggaaaaattattt

SEQ ID NO: 17416 - DNA, 201 bp, Homo sapiens
gagagtgagcatgattcagatgaatcctctgatgatgacagtgattcagaggaaccaagcaaatacatcaatgcatcttttataatggtaggtacttaaaytgccaaaacccaagatccaaacattttaaaataatatctatgttattagggccattcattaagcgattttataaaagaataatgagcttggtcataacta

SEQ ID NO: 17417 - DNA, 201 bp, Homo sapiens; identical to SEQ ID NO: 2695

SEQ ID NO: 17418 - DNA, 201 bp, Homo sapiens
attcacatatttattttgtccttctcccattttccattaattaacaggattgactacagcaaagatgcccagtgttccactttcaagtgaccccttacctrctcacaccactgcattctcacccgcaagcacctttgaaagagaaaatgacttctcagagaccacaacttctcttagtccagacaatacttccacccaagt

SEQ ID NO: 17419 - DNA, 201 bp, Homo sapiens
tttcacacttagtaccaatttcttattcattattggagcaaaaagtaaagagaagaatcaaggtgataagtttaaaatcttctcaatgtaaaatagtgtgyggggaaagtgtcaaatcatcctactttggtctttgtgcatttaggaaaaataaaagcaattagcattgcacacacatatgtaattgaatctcttcagatt

SEQ ID NO: 17420 - DNA, 201 bp, Homo sapiens
cacattgtgatttaatctgcatatctatttttagggtcaaggttattttagcatttgtagcactactagtaatttacttgcagccaaattatgattaagaygcatttttacttagctcatgagtttttaataaacaccttctgtaaaagaattctcatgcttaaaatttcatatgaagaggaaaggctgtaaggacaagtt

SEQ ID NO: 17421 - DNA, 201 bp, Homo sapiens
tctatctgtatctttatttacaactgttcaaagatattacaaaagcaacattattacttaacttccaaagtgacaataacacacatttataaaagcctgakaattttttaatgataaaataagtgagtttttattcttttaacaaatttgatcttttaaaaagtcataaaacagctttggttgtatgtaagccactccctc

SEQ ID NO: 17422 - DNA, 201 bp, Homo sapiens
aagttgaaatcttgattaaaaaaacaagaaatgattcacaaattattttacaaattgaaatactgaaatacagaatgttcaaccactgtcaacatgaactyctattctgtaattaatctattctataaacatctgtatttgctaaagagcaacagatcaaggaaaagaaaaaataatccttgccatccatagagccatgat

SEQ ID NO: 17423 - DNA, 201 bp, Homo sapiens
tttgggacaagttttgaatcctaactctattactaattcctcttcactagactgagattctggtatgtggtattcaataagtgacttgacttctttaagcyttggtttctttttcagtgagatttacagcttagactagtttctgaatcttgaccctgtggacaatctagttggagaactgagatgacctgggcattgtag

SEQ ID NO: 17424 - DNA, 201 bp, Homo sapiens
cacttttccttacattgaatagaaacaagaaggccccaaaggagtattttttttttttttttttttttttgctaaatgatatgatgccctcgtccgtttaraaagctcatgagctgtgtcacatagagggcctgagaaaaagcagcctttgtgaattgggagccatttgccccaaagtggagcagaaactgttgggcattt

SEQ ID NO: 17425 - DNA, 201 bp, Homo sapiens
aaaaatctacttatttcacagaaatccctaaggcaatacaattgcattagatgctggttggatctttagctgcagtcctcatgctgtacattggatctctmgacttgctcctcttacatatttgctactttgtatcctttgacctacatcttcccatttcctcccatcttgtccctggtaaccagttttttttttatatat

SEQ ID NO: 17426 - DNA, 201 bp, Homo sapiens
ctttttcttataacctatccattgaagaacctgggcttttgacctgtagagttttctacaggctggcttctgctgattgcaccctcatatcaggctatcaraggcacaaaatgtctgattgtttcttttcccaagttagcagctgttgatgcttaatggctatacctattaattcactggggctagcaaatagggatattc

SEQ ID NO: 17427 - DNA, 201 bp, Homo sapiens
gttttgtggtgggtggatggctgcattttagtccaacttacatgcttttcttccccagtctacccaccagatgtgatagctggtcaaactcagaccgttcrttggaacaggcttcatttgatgatgtttttgttgactgcctgcagccgctcccctccagtcatttggtccacccctcatgccatggcagtggagctcagg

SEQ ID NO: 17428 - DNA, 201 bp, Homo sapiens
ctacctcagcaactggaagtctctgtgcttaggatcaccactaagggagggatctcctccatgagtcctatataccgtgggaagggattgtcatccctctktggaagtcagatcacttgggcgccttgtgacctccactctctgatgggctcaagaaaatgaagattttgtgttttgtccagcttttctcgtcatagtggg

SEQ ID NO: 17429 - DNA, 201 bp, Homo sapiens
ccagggtttactatttacatttacagatgacaggactgaggtttgcagaagttgagttactcaagtactgtgtgctcaaagtcacacagaaagtagaatcrgaattcaaattcaggtctcctgactttcaattcagtgcctccccctgcccatttttgtactccatttctctaagttactgttatggatacttgtttgcat

SEQ ID NO: 17430 - DNA, 201 bp, Homo sapiens
tggaaaggtaagtgttgggtcctaagattcaggcgccaagaaaacccgggctcctcttcactctttgtgcccatgtgaggtcatgccaatggaccaaaacratggggctgggttagaattaccttgatgtgtgcagcttggtaaaaagccacatcagtagtgtgtacttgtgtacatatgtgcttgtcccttgttcaggct

SEQ ID NO: 17431 - DNA, 201 bp, Homo sapiens
tctttgctattgtgaataatgctgcaataaacatacgtgtgcatgtgtctttatagcagcatgatttatagtcctttgggtatatacccagtaatgggatsactgggtcaaatggtatttctagttctagatccctgaggaatcgccacactgacttccacaatggttgaactagtttacagtcccaccaacagtgtaaaa

SEQ ID NO: 17432 - DNA, 201 bp, Homo sapiens
ctttgctattgtgaataatgctgcaataaacatacgtgtgcatgtgtctttatagcagcatgatttatagtcctttgggtatatacccagtaatgggatcrctgggtcaaatggtatttctagttctagatccctgaggaatcgccacactgacttccacaatggttgaactagtttacagtcccaccaacagtgtaaaag

SEQ ID NO: 17433 - DNA, 201 bp, Homo sapiens
cagcgtaaggaatgagtgcatgggaaacaactgaggactttcctcctcttttgctgaggtaactcctacttgttttctacttttaatatcgttccaaaaayctgatatgagactggagaaaagctggtaagaagggtgggagcaataagtataaaaggagcattagtcagttttggtagacaaacaacccccaaatctcat

SEQ ID NO: 17434 - DNA, 201 bp, Homo sapiens
gcaaccttggccacctggaggatggtgcaggtaagagcggagttggggctcccatgtgctaaggggtatcccaggactggagggttactgcagaaaaacarttcaagatgccaagcctgcctccttgagggtgttttggcaggctaatttatatcagaactgttcctaccaaatacaatactggaaattgccctcttttac

SEQ ID NO: 17435 - DNA, 201 bp, Homo sapiens
atgacatccaatataaataaggaacatgttttgaaagcggaatatttgaaaatggacttcataaccacttttacgttgaagtacaacaaacttaacctgaytcacgtgcatgttatttcactgcaaacatttgagcaggtgtctgtaatcagtactgcttcggctcagccaaaccatatcttgtcattttcttaatttctt

SEQ ID NO: 17436 - DNA, 201 bp, Homo sapiens; identical to SEQ ID NO: 2752

SEQ ID NO: 17437 - DNA, 201 bp, Homo sapiens
taatttcttcgttggaaactcgctttgataattgacactaaaatcaactgctctccctgacaccatgtataacatgaccttcgtgattacttgcatgagawggtaactgccctacgcctgcctgccccagcaggcatctcttttgccaccacctcccttttctccatagctgagtctcccagatgccctgggtgctgggtc

SEQ ID NO: 17438 - DNA, 201 bp, Homo sapiens
gcttggctgcagcccagggagtaaggaatggagcaaatgaggtcagagtggtgatgtgagtagaggccttactttagcctttggcttttcgtctgagtaarggaggaagacaccagagggttctgagaacagaactgacatgatttgatgtgaattgtaacaggatcactctggcagctgcctgcaagctgtaggggccag

SEQ ID NO: 17439 - DNA, 201 bp, Homo sapiens
tagaaccggtaagattttctgatggattggttattctatgcaagagaaagaaaggagtcgagaattccagtgtcttggcctgagcagctggaaggatagasttgccatgtactgagatgtggaagccccaactacccccatgggctccattctgggaagatgtcttgtgaacagtctgcatttaattgttttgaaaatttg

SEQ ID NO: 17440 - DNA, 201 bp, Homo sapiens
ctgtcagcagatttggttccttctcaaggctgtgagggaaggatgtgttccaggcttctctccttgacttgtagatggccatcttctctctgtgtcttttyacgatgtcttccttctatgcatctctgtgttccaatttcccctttttatgaagacaccagtcatatttgattatgaccccactttaacttgctaaagact

SEQ ID NO: 17441 - DNA, 201 bp, Homo sapiens
agttcatgtgttggaaacttaatccctaatgcaacagtgttgggaggtgggacctttaagagatggttaggtcatgaagtcagccctcatgaatgggtttmtgtcagtgtcaagggagtgggtttgttatcaagagagtgggtttgttctaaaagtaagttcagctctctcttgctcttgcgtgcactcgcttgcccttct

SEQ ID NO: 17442 - DNA, 201 bp, Homo sapiens
ttttttcagtactgtcagtttctttatttcaatgtaaatgtttaatccaggaagaatttatttttattatatgtggaatgagatagagattcattaattamttcaacaagatttactgagtccctgttaggcaccaggcactgttgggacatttgagaaagactttcttcagtattaaacgtcagattatattatgtccga

SEQ ID NO: 17443 - DNA, 201 bp, Homo sapiens
caggggcactgatagctttaggccaatcctgccatgccccaccccccactccatctccagcctttataacaagcaaaacccacatattttcagatgctccygagaggaattataccatccctggttgaaaaacactgtgacttagggggtgaatgcttaagagtctcccatctttaaaaaatcccttgaccccagagcttt

SEQ ID NO: 17444 - DNA, 201 bp, Homo sapiens
gtggtggcagagtgaggtcaaggttcgtttttgtccatctggatctccatccgatgaccctgcaaggctgtcctgtccccatggctctccagcgccccctstgccatagatgaagtgcccatgtatgtgagggtctgagtttcctttctgctttctatcccttggagcctacttgtccagcttgcaccagtgccacactct

SEQ ID NO: 17445 - DNA, 201 bp, Homo sapiens
gcgtgcactcgcttgcccttctgccttctgctatggggtgacacagcaagcagatcctcaccagatgctgagcagatgctggtgctatgcctttggacttsccagtctccagaaccatgagcaaaataaactaatattgttataaattatccaatctcagatattctgttatggcaaaagaaaatggactaagatacctgc

SEQ ID NO: 17446 - DNA, 201 bp, Homo sapiens
cctctgtgggcagggcatagctgaacaaaaggcagcagaaacttctgcagacttaaaacgtccctgtctgacagctctgaagagagcagtggttctcccarcacagcatttgagctctgagaactgacagactacctcctcaagtgggtccctgaaccctgtgtagcctaactgggagacacctcccagtagggactgaca

SEQ ID NO: 17447 - DNA, 201 bp, Homo sapiens
aaatgtaaaagaacagaaatcataacaaactgtctctcagaccacagtgcaatcaaactagaactcaggattgagaaactcattaaaaatcacaaaactamatggaaactgaacaaactgcttctgaatgactactgggtaaataacaaaatgaaggcagaaataaagatgttctttgaaaccaatgagaagaaagacaca

SEQ ID NO: 17448 - DNA, 201 bp, Homo sapiens
accagtttactatattagtctgttcccacactactataaatatactacccaaggctgcgtaattcataaacaaaagaggtttgattgactcacagttctgygtggctggggaagccacaagaaacttacaataatggcggaaggcaaaggagaagcaggcacctctttgtaaggcagcaggagagagaagagagagtgaag

SEQ ID NO: 17449 - DNA, 201 bp, Homo sapiens
gcaatcagaacaatcagaatctgagcaccaaaatcctggcgctctaggcgctcttggccaggacagtatgaagcacgtccatgggtcaggaggggaagagscccacacaattccttttggcagattcagtcaaaaagtgtcattgctgaaatgacagcagtattgaaggatcaaaacgtagagctccaaatgcagataggt

SEQ ID NO: 17450 - DNA, 201 bp, Homo sapiens
tctcatcccctgagccccttccctggactaggccttatgttcctgtttgcctcagttgatgccagaagcccaggtttcccactttcaaaccccacagcaaracttgagctccttctcttatgtttagtggctctactcccatccagtgccacgtttttgcaacaggaatttactgaatcaatttttctctccctcttgggt

SEQ ID NO: 17451 - DNA, 201 bp, Homo sapiens
tatttaattgacaaataaagattgcacatattcaaggtgtgaatgcatatgcatcagaacatgatgatttgatatgcatatgcattatgtactgattattrcaatcaaactaattaacacatccatggccacccatgctgtacattggatcccccagacttgttcacttatcactgaaagtttgtaccttttgaccaacat

SEQ ID NO: 17452 - DNA, 201 bp, Homo sapiens
ctctcctatgttttcttctaaaagttttatagttttagctcttatgtttagatctttgatcttttttgagttaatttttgtatgtggtataaagttagagkccaacgtcattcttttgcttgtggacattcagttttcccagcaccatttgttggaaagtctagactatcctttccatgtcgaatggtcctggcgctctca

SEQ ID NO: 17453 - DNA, 201 bp, Homo sapiens
aatgaaaccaagttgaaattgagagtgttcttttcctctccaagtacctggggataagtcagcaggcagatgccctctggggtcttaacttctcccacgckgagacaggagcttaagtaaacactggtgccctgtggtctctgatggagcagcttctattgactcaaggttatgtgctggccgggggctcggaggtggttt

SEQ ID NO: 17454 - DNA, 201 bp, Homo sapiens; identical to SEQ ID NO: 2751

SEQ ID NO: 17455 - DNA, 201 bp, Homo sapiens; identical to SEQ ID NO: 2753

SEQ ID NO: 17456 - DNA, 201 bp, Homo sapiens
aggagaacagaccctgtcttatgaggttcagaggaaatagccattaattctggtcagaaacaattaaacaacaacagaactttctgtgatgttggagatartggctattgaacccttgaaatttggctaatgtgactgaggaactacattttaaattgtatttaattttaataaatgtacatatatgtctaaatgggcacg

SEQ ID NO: 17457 - DNA, 201 bp, Homo sapiens
aatccttaagacaccgagacaagcggcttagtttgaatttggtaagttcaacattcaggttcttttaagcatcaattttaccaaaaacagcttgatctatrtatattcccttgaaatctttaagattcagcactctgagtctctgaggaatcttccagtctcccctgaagacttgaacttgcttgggaactacaggacttg

SEQ ID NO: 17458 - DNA, 201 bp, Homo sapiens
ctgggactacaggcgcccactacctcgcccggctaattttttgtatttttattagagacggggtttcactgtgttagccaggatggtctcgatctcctgaygacaaattatttttctaatatcataatgaactcatggatttaagtgtatttgatggatttcaagctactataattattacacaatcatgcatcattcaat

SEQ ID NO: 17459 - DNA, 201 bp, Homo sapiens
tcctgcatctataaaaatgatgatatgttttttattttttagtctgttactatggtgaattacactgcttgattttaaatgttgaaccaacctcgaacttmtgggataaacttcagttggttgtaacatattattcttttcatatatttctggatttgctttgctgatagtttggctgaagatatttgtctctgtccatga

SEQ ID NO: 17460 - DNA, 201 bp, Homo sapiens
gatctctagacttgctcctcttacatatttgctactttgtatcctttgacctacatcttcccatttcctcccatcttgtccctggtaaccagttttttttwtatatatttataaatataccacagtacatttgaccttttccccccacgtacaaaacagatcattcagtatttgtctttctgtgtctggcctgtttcactt

SEQ ID NO: 17461 - DNA, 201 bp, Homo sapiens
gacgttactgaatagtcctggtgacaatacggatccttgtatcattcctgatctcagatagaaagcttctaatatttcaccgttacaatgtggtttgctgyggaatattgtagatatcattcattagattaaagtcattcacatattttctactttgctaactgttattttctaaagtcatgaatagatgtatttctttta

SEQ ID NO: 17462 - DNA, 201 bp, Homo sapiens
ttcttttttatttaactgatgacatccaatataaataaggaacatgttttgaaagcggaatatttgaaaatggacttcataaccacttttacgttgaagtrcaacaaacttaacctgactcacgtgcatgttatttcactgcaaacatttgagcaggtgtctgtaatcagtactgcttcggctcagccaaaccatatcttg

SEQ ID NO: 17463 - DNA, 201 bp, Homo sapiens
actacaggacttggtgttctataagggccttattggttctaatggttcagacacttgctcaacttggtatagctacttaaggcatcactttatgcttaaarcatttgcataaactcataaccctctgtcttccagtgtcagatcttggagacttatcgcctatactaaaacgataagtccagaggcagaacttgagctaga

SEQ ID NO: 17464 - DNA, 201 bp, Homo sapiens
tccacctgggcctctctggccttcagaagctgtttggtgaaagccaattcaagcccattcattgtggtttttcagtaacctcttctttactgctttgctgrgccacctcatctttctgccatgagccaaccaaccttagcattttgctcttctttcttacatcagtctgtatctctcagatacacagacagacacaaaaac

SEQ ID NO: 17465 - DNA, 201 bp, Homo sapiens
tgattttcatctgtgttataactgtttgtattgtgcaaactatatttaagtgcatttgggatgccttcacgagaactttaataagtatagttgatcttgtyagggtttaatctctgaagtatcacaggcctgtcagattcgtgaagcaaattcctttttgagtgaattttggcaaactgttcccatggtgaataatggtat

SEQ ID NO: 17466 - DNA, 201 bp, Homo sapiens
aaagaggtttaattgactcacaattcagcgtggctggggaagcctcaagaaacttacaatcatggtggaaggggaaggaaacacatcctttttcacatggyggcaggaaagagaagtgcagaatgaaatggggaaagccccttataaaactatcagatctcttgagaacttactatcatgagaacagcatgagggtaacta

SEQ ID NO: 17467 - DNA, 201 bp, Homo sapiens
tatgagtcatatttttatgcttctttgcatatttagtaatttcttgggtgttttcattgtaaatattatattgttgagtgtctgcttttgtctttccttaragtgttgaatttttgttttggccagcaattcattaccttgctgatgaacttgatcattccaagccttctttttaagctttcttagggcaagtctagagca

SEQ ID NO: 17468 - DNA, 201 bp, Homo sapiens
atggattggttattctatgcaagagaaagaaaggagtcgagaattccagtgtcttggcctgagcagctggaaggatagagttgccatgtactgagatgtgraagccccaactacccccatgggctccattctgggaagatgtcttgtgaacagtctgcatttaattgttttgaaaatttgcttttggagttatagactttt

SEQ ID NO: 17469 - DNA, 201 bp, Homo sapiens
atggcccaggaggccctggcattcctgatggcccagggggcaatgctggcggcccaggagaggcgggtgccacgggcggcagaggtccccggggcgcaggrgcagcaagggcctcggggccgagaggaggcgccccgcggggtccgcatggcggtgccgcttctgcgcaggatggaaggtgcccctgcggggccaggaggc

SEQ ID NO: 17470 - DNA, 201 bp, Homo sapiens
aggttccggtggttgcatagaaaaggtttctgtaaaggaagacctagagaaaccaccccagagggccggaaagtgtaaggtcaggaaagaagtggctgggwtggaataggaagggctggggcaccttgctgccccagattgtcatgataataggagtcaggagacttacaggcactgtggccttgcaaatacagctgacaa

SEQ ID NO: 17471 - DNA, 201 bp, Homo sapiens
tacgccagatctctttcccaggaatttgcaattggaactcagaggtagcctgttagtgtttgtcagttgctgttagtgccaagagatcaatctgggggccrtagagtgttgatcttctactgtgtgcatagaaaagccaagaaagctggttttcaaagagagatttaagcagattcataaagagaattagagtctgggggt

SEQ ID NO: 17472 - DNA, 201 bp, Homo sapiens
gtaaatataaactgagcaagattctgctacatgacaggtactggggtacatgttttttgtcctcaacaaactcacagtgtggaaggaccaaagttctttawgtttatttttacttcattccctggggtttcccatctggagggcactttgctaactttgctagcccacgatcacagcgagttcatccaggagtctcccaga

SEQ ID NO: 17473 - DNA, 201 bp, Homo sapiens
atgttttttgtcctcaacaaactcacagtgtggaaggaccaaagttctttaagtttatttttacttcattccctggggtttcccatctggagggcactttrctaactttgctagcccacgatcacagcgagttcatccaggagtctcccagaatatactcccatcatgtattctctgtgcctcttgggtctattctttcct

SEQ ID NO: 17474 - DNA, 201 bp, Homo sapiens
atatttgtgataatccatgttcatattgaatctcccctgggagatccttgaaaccagggactgtgtgtaagtcattgcttttacttcctagcacggaatcyatcacaaggtacttctccaataaatgtctgcttttctagagaatttacttcactccttagaatctcaagtgagagctgtgtatcagttagctcctgctag

SEQ ID NO: 17475 - DNA, 201 bp, Homo sapiens
tatttgtgataatccatgttcatattgaatctcccctgggagatccttgaaaccagggactgtgtgtaagtcattgcttttacttcctagcacggaatccrtcacaaggtacttctccaataaatgtctgcttttctagagaatttacttcactccttagaatctcaagtgagagctgtgtatcagttagctcctgctagg

SEQ ID NO: 17476 - DNA, 201 bp, Homo sapiens
ataatccatgttcatattgaatctcccctgggagatccttgaaaccagggactgtgtgtaagtcattgcttttacttcctagcacggaatccatcacaagrtacttctccaataaatgtctgcttttctagagaatttacttcactccttagaatctcaagtgagagctgtgtatcagttagctcctgctaggtaacaaac

SEQ ID NO: 17477 - DNA, 201 bp, Homo sapiens
ccatttctctgtggcatgatactgaacaggcagcttcagccgtgaggatattttggccggaggaaaatgtagcttaagaaaagtcccagctggttcaagtracttaagcccagctattcatgaaatattatctgacagctcccccttctcctcaagtggctggggagtgagtcacaattgccccagaaacctgtgttctca

SEQ ID NO: 17478 - DNA, 201 bp, Homo sapiens
tcttgtgcagagtctctcatgtggttgcagtcagatggtggctgggtctagggtcatcttaaagactttgtcattcacatgtctggtgtctcgactgagargacaaaaacagctggagtctggaacagctggggctgtttcacacacaagtgttgtttgcacaagagatgtccaagagcttctctttattctctccaagca

SEQ ID NO: 17479 - DNA, 201 bp, Homo sapiens
aactttcctaccaaaaatgctaataatttctgacctaatgtcagaaacacagtgaagtggggaagctgtgagaagtgcactgtggagtcctcagcagataygcatggtacatgtcaccaagggtggcatctggtttgagtgccacactctccccaaaacaactgcacagcttctgcccttcctctcccctctgcagccttg

SEQ ID NO: 17480 - DNA, 201 bp, Homo sapiens
cacttaagtggtagctgttattttattatttaaaaagatagctttgccacaaaccagatatgtgacattgagtaagtcaggccatgtaggtggctgggctktggttttctcatataaaatgtgaaatttagagctatagtcccttctacttctaaagttcactgagcctttgaatcccctcttaagcattagttcactgga

SEQ ID NO: 17481 - DNA, 201 bp, Homo sapiens
agcatccagaagtcctcaattttattaggatatctttaattctttttattatttaaaaaggtaaacatgtgatgtgtttgttgtagaaaatgagaaaagarcaaagatgtaaaaagaaaaataattgagacaataattattttaatttaagcttatatcattagaaactttttccatgtaaatacctgattttaaaaaatg

SEQ ID NO: 17482 - DNA, 201 bp, Homo sapiens
atgtcagaaacacagtgaagtggggaagctgtgagaagtgcactgtggagtcctcagcagatacgcatggtacatgtcaccaagggtggcatctggtttgwgtgccacactctccccaaaacaactgcacagcttctgcccttcctctcccctctgcagccttgctctccatcaaggcccaatgcaagcaccccctactct

SEQ ID NO: 17483 - DNA, 201 bp, Homo sapiens
gcagttgtttattcgcctcagtctcacttcctggcttattttaaagcattcaaagggtttgaacaatcttttgagttgtttggcgtgctgcaaaaaatatrgtctgttctctaatatgaaagaattttacactgtgcttcctggcctggaagtgtgtgggagagtgaggaaaacagggagaaactagtctcaagggacggg

SEQ ID NO: 17484 - DNA, 201 bp, Homo sapiens
tatcattattagcccatttcacatttgaggaaactgaggcttagagaggttaaatcacagcaagtaaaaggtgatgctcagatatgaagccaagcagtctrgctccagagcccatgctcttggttggtgtgacgcagtctattattataagcagtgcctccagtgagatgtccggtgagaactaagatccagcaggtgggg

SEQ ID NO: 17485 - DNA, 201 bp, Homo sapiens
cctggaagtgtgtgggagagtgaggaaaacagggagaaactagtctcaagggacgggacctcttgtgctgattaacattctcttaacaaggcacttaatcwattatataattcagtgcacttaatctatgaagcagtattcacggggctttcttttgtttctcaaggccagggatgctgtcttgtacatctttgcactctc

SEQ ID NO: 17486 - DNA, 201 bp, Homo sapiens
ccttctttttcttttcagaaacagagctgtcagtcagtgctgaattagtgcctacctcatcatggaacatctcaagtgaactcaacaaaggtacacagtgkgggcacacaggggaggcgaggaaagaggtgtggaactgtttttaatcctggcatgaccttctttgaaatcaactgtttttcagatcactgcaaggaggtg

SEQ ID NO: 17487 - DNA, 201 bp, Homo sapiens
aacactgccattgtattgtattgtattgtattgtattgtattgtattgtattgtattgtattgtattgtattgtattgtattgtattgtattgtattgtawcatagatggcgatacttgttcagttaaccaaatggtcaactttgcaaaaatagcagaagtggacatctcatgatgatttaatacaggacacaaaaatcaa

SEQ ID NO: 17488 - DNA, 201 bp, Homo sapiens
tctagggacctagcctttttttttggttttattttgtttcattctcctttccttatatatttccttctgaaataaaaaaaagtatctttcattagatatasttatggatctattgttttagactaggcctgctcagtggctggaaacgattttattaagaaggctttatagagaagctttggtttatctcatgaaatatct

SEQ ID NO: 17489 - DNA, 201 bp, Homo sapiens
ctagggaaaatataaattctgtactctggctgaaacaaccaattgtacaagagcaggatggaagaatatttagcctggcaataatatgtgtgacaagagtyagattttggttacaaatgtcaccagtctacaatgtgacatgtccacactgagaaaatagtaatgatgggcatgaagagttctaaaaaagttctaatcatc

SEQ ID NO: 17490 - DNA, 201 bp, Homo sapiens
gactgttggtgcctgcacttgtgggtgttatgtgagggacacatggagaccagtttgctgtagtctcttctctcactggcctgccccggtgccatgatctkaggataccacagctgaaagggaactcagaggtcatcaagcctgacccctttcattttggcaatgaggaaacaaaggactaaagaggtgaaggaaattgct

SEQ ID NO: 17491 - DNA, 201 bp, Homo sapiens
gctcatcaaggtggaaaaccaagtggcacatacttgtggagaaagtttgaaaggagtaggggttaagggagtggtagggattgaggaaaagcctaataacrtggtaataggagataacagactacaaaacccctgtgaaaccaggaataaaagagccccatgcttcacaaatacaagattgaatgagtttcatgtttaatg

SEQ ID NO: 17492 - DNA, 201 bp, Homo sapiens
cttctcaatcagcattttactttatccaaaaggagtatatgatgagaaatcaagagtgactgtccaggaaaatggagatgtggcagatggagctgcagacmacgtggggagagccctggccacaggaaatgactgtggttggtagaggggaaagtatgggacagttaaggagttgccacctgcccctggtggaggcaaatg

SEQ ID NO: 17493 - DNA, 201 bp, Homo sapiens
ctcttctgaaaagcatcagtcatgtgggaggctaggattttggcatgtgcctcttttgataccaagacccaggccctaaacctaattgtgactggctcctyggctgactggctgggttgccatggcaatggactgctcaactctttatatctcagtttctctcacctgtcaaaatgggaatataacacttggccccacctt

SEQ ID NO: 17494 - DNA, 201 bp, Homo sapiens
aaatgcctatgaagttcacaataacacatgaagtgctgaggggaatacaaaaaatgtaaaaaggaggaaatagagtctcaattcccagagaggtcataaamtaacttttttcttgcagtttgctttttctggttcattaagcctcagtacagaccatgcctgcactgtatttaaaaagctcattctcaatgatgacttcca

SEQ ID NO: 17495 - DNA, 201 bp, Homo sapiens
gtggtggctaatttcttaatgctgctctcccatcctagtgatgggcagagaggatgagaaagccagctctggggagacaactgttgttccaaagtgaggastcaccactacctgccatctcgcagactcttgtctagtgcccccttgaggccatgcttgttgttagccctgactcgggtgccccggcacctgccgtaaacc

SEQ ID NO: 17496 - DNA, 201 bp, Homo sapiens
ctctgaactgcggtttacccatcctaattgtgcaaaagcaatggtgggtgaaactgctcaaacaaattcagacaatggcaccaacggtaccaaactagtgstcactgtacattccactgccatatacttgtagttgaaaagaaaaaaaaagccaattgcacttaagaatatcttccatggagcagtaaaaattattaattg

SEQ ID NO: 17497 - DNA, 201 bp, Homo sapiens
catagctagccctaggctctgaagagtgtcctgagacctcatctgggtcccaaaatcggtgggcagtgctgtctccgcgagacaatgaccagcatgaggaratacctttaaccattcatctttttaaaaagataagtttgctaagcaaataaaaccagttagccttgaaagttcagtattaatgaatgttaatgcatatct

SEQ ID NO: 17498 - DNA, 201 bp, Homo sapiens
cctgtcatccagttgttctgcagctgcccatatagaaacacaaactgtctcagaagaagcagacccaaccccaaaggcccagattatgaatccaaagcccrgggaggtgaagtgatggtctgacacacatcgctagagagtggcagaactgctacttgagtctagtgtgaattccctctggactggacacctttgctggga

SEQ ID NO: 17499 - DNA, 201 bp, Homo sapiens
atttattagccagcaagcataaaaatcatcgtaaatctcttttctttaggctccaagtaattccttctttctgtccttgagccccatgaaccatccttgcmtaaaaaattcaggataagacaagcataatattctgatatcagggttggccagtcttccagctgcatcaggtggtagacttactgggtgggacacacaaga

SEQ ID NO: 17500 - DNA, 201 bp, Homo sapiens
gacacctttgctgggatgcccaggtgttctcgttctgcttactaagtaagcagctacagatggccaacaaatttgaaacttcttcttcgtcagtgaaaagktaaaaccaaattccctgtttgtggcaaggctcctttgttcagtaaacacaaagatctatttacatttcttttgttctctctggaaacacactgcttgggt

SEQ ID NO: 17501 - DNA, 201 bp, Homo sapiens
acctgtttggtcctagtctttatagttgattactctaggtaggtctttttaggactgaaaataggtcacacatatcacagtggtcccagtgttagagagakgataaaattctattacaaagtagttttgtcatgcttttggtctaaatgagtaatacaactagcatgtccagtgtcatttttgctgtactctggaaaactt

SEQ ID NO: 17502 - DNA, 201 bp, Homo sapiens
cagttttcagttgctccagccatgtttcatgcattcagtaagccctgtgtgactagtggctatcaatcagacagtgcagattatagaacatttccatcatygcagaaagttctggtggataacactgctagacagtagtatacactgaggatgcagtgatgaccagaacattcccatccctgcccttatggggctgatagc

SEQ ID NO: 17503 - DNA, 201 bp, Homo sapiens
ggagacagtgttccaatagagaggtattctgtcttctcttttcttttttctcttctctctcctccccccaaatcgaggttgtaagtgatgtgagagacctrctgtgaactgctgtcaccagatcctgctatgatttctctttgttcttagttctggagtcatcaaggctacatggagacacgtaccttccactgatatgtt

SEQ ID NO: 17504 - DNA, 201 bp, Homo sapiens
gctacagctaaatgatatttctgtttccaatagtattgtaaactatagagtaagaattttcttgttgttgttgggagagtttgtttttcttcttagtgtgkattatctcccaccccactcctccaacccgttctttaaaaaacaaaacaaaaccaacaaacaaaaacttgcattgaagcaacacccagaaggagtgagcag

SEQ ID NO: 17505 - DNA, 201 bp, Homo sapiens
atagtattgtaaactatagagtaagaattttcttgttgttgttgggagagtttgtttttcttcttagtgtgtattatctcccaccccactcctccaacccrttctttaaaaaacaaaacaaaaccaacaaacaaaaacttgcattgaagcaacacccagaaggagtgagcaggcctaggctggagtcttatcctgacatgg

SEQ ID NO: 17506 - DNA, 201 bp, Homo sapiens
tgcaaggaggtgggggccaaaataaatccccagcttactttgtgatcatttaacattgaattacttgggattctattatttctggagagtttctttccccmcctcgttcctttttcttcttcctctaaaatgttccacatggtaaaaatgcttcaagatgtgaaatagggtcatttctgacctttctgacactacatctag

SEQ ID NO: 17507 - DNA, 201 bp, Homo sapiens
tatatggagtctttgcacatgcaaggggaaatagaaaatcagatcacaggtaggtagcaccaatgaaattatatttgtcccttgaataactatttttctcrccaaaagttttattgagctcctctcttgacaaaggattaagctcagcatggaggttgggagcaggaccataaaaaagcatgagacatgatctctgtgctc

SEQ ID NO: 17508 - DNA, 201 bp, Homo sapiens; identical to SEQ ID NO: 2754

SEQ ID NO: 17509 - DNA, 201 bp, Homo sapiens; identical to SEQ ID NO: 2759

SEQ ID NO: 17510 - DNA, 201 bp, Homo sapiens
gctggagtcttatcctgacatggtagaatcctgttactgtctcttcgtagattcatttaaattgttttgactgattcatgcaatctctcagtccattgatsaagtcaaaagaaaaagtatcactaaaaactcacaggactggtgcaggtagaatattctttatctatggaaaattcattatcctatctagaaggatgtctt

SEQ ID NO: 17511 - DNA, 201 bp, Homo sapiens
acccaggaggcagaggttgcaatgagctgagatcatgccattgcagtccagcctggccaacagagcaagactctatctccaaaaaaaaaaaaaacaaacaytattatagccatcctcgtgagtgtgaaatggtatctcattgtggttttgatttgcattttcctaatgactcatgatgttgagcatcttttcatgtgcata

SEQ ID NO: 17512 - DNA, 201 bp, Homo sapiens
gatacttctcctgactcagaaattgtaaaatgttttgctagagtagccagtggtgagagaccgctactgctgtatgttgctcagggctaacctgttaagarctggtctcgtcgctcagagagaaccatgatgctgatgccagtttcttgtttatgtaaaaacatttaaaaatgggcaagatactctctaagtacaagatag

SEQ ID NO: 17513 - DNA, 201 bp, Homo sapiens
aaccatgatgctgatgccagtttcttgtttatgtaaaaacatttaaaaatgggcaagatactctctaagtacaagatagttattattgagatatgttcatraataaattaatgagagaggaacttgagataaaggaaatggaggagagaaattgcatttttcctgcataattactctcttgttttagaacacaagtagtcc

SEQ ID NO: 17514 - DNA, 201 bp, Homo sapiens
ttctgagccctaattaagaaccttgagggcagagccatggtttacacttgctttttttcttctttcttaactttacctggtatgccatgtttataatcacwgctaaattaaaatagtaaatatttaaactgagttttcccttcagtctaccttgtagtagaaaaattaaatacttctatgttacttaaaactgcacactca

SEQ ID NO: 17515 - DNA, 201 bp, Homo sapiens
tttagagctctggcctctggtctgttctgttcaacctctatactgatggcttggttagacaaagatgacgtgcatgttgatcagattaatagaagacacartgtttggaagttttgtgagcctgtggatgacttaatctgaaaccagatgtctcaaacagcttgaacaattccaaaccagaggatatttgctagggaaaat

SEQ ID NO: 17516 - DNA, 201 bp, Homo sapiens
gatgtttttctgctgtgtataaagtgggctagaaggatcctcactcttccacactctgtcctcctcccaaaagaatttcctatttgttcaaggtgcaggaytgacagcccaggagaccttgtgtctccacctgggcaggtcagaccatggcctatgtgggtggcttgcagcatgtctgtggaaagtgggcacagaccacct

SEQ ID NO: 17517 - DNA, 201 bp, Homo sapiens
gacagcccaggagaccttgtgtctccacctgggcaggtcagaccatggcctatgtgggtggcttgcagcatgtctgtggaaagtgggcacagaccaccttwgagggacaaaggggcggttgtctgagggcccctttaggagctcaccttcctttgccctactatttcctgttttgttttgcgttttgggatggggggggtt

SEQ ID NO: 17518 - DNA, 201 bp, Homo sapiens
ttatctgagccagtagacgctgctttcatgaggttattgtgttcctacaatgcacacagcctcacctcactaatcctcataacaaaatgaagtgggtgttrtcctttttttaaagctaagaggaagcagtttgattgctttttctgatgagaacatttatatccattaaaagcaaattcagaaatgtataatgaaaacaaa

SEQ ID NO: 17519 - DNA, 201 bp, Homo sapiens
gattttgttattttatctgagccctggtgtagatggtttatttatttattatgataggagaaaattgctgtattattatgattacaatgttgtaattttgyattagttttatgtcatttatatgatttaatgagtattcttaaagaattaaaaagcatttgcatgcttttgacctcttgttttaacctgtttttgaatctt

SEQ ID NO: 17520 - DNA, 201 bp, Homo sapiens
tgtggatttgaatcccagctgtgttgtggactagctctgagcttcagtctcttcctcttaaaatgggaataatagggtagttgcaaagtgtcattgttaaytaggccctgggctaagttctttactcctgtgattttatgaaatcctcaaacagccctgtgaggtgtgtcttgttaatatctgtattttatagatgaggag

SEQ ID NO: 17521 - DNA, 201 bp, Homo sapiens
gccttaatcattcatgcaataagcaaatgtcccccctgtaggctgttctccagatctgggatacagacatgggtaaagcttggagcttgtgtataagtagyggggtcagtcgcctgccagttcactggagagatgccatgcttggagggtggactgactgtaaggccctcccagttgtcagactctaggcttctagtgtgc

SEQ ID NO: 17522 - DNA, 201 bp, Homo sapiens
cttgaggacagggaatgtctttaatctcgggatttctaacacctaacatagactcaggtgtgtaacagttgctcaataagtacttgttgaatgaatgaatkaataaataaataggattcaattttcaaagtatctgttgttgaacaactttcagaagtttttttttttttttacagaaatgagattagatatgcatcttca

SEQ ID NO: 17523 - DNA, 201 bp, Homo sapiens
tgtctgtgcttagatagtatctggcacatacagattgctcacttaatggtgaatgaatgaataaagaagaaaaagtgatgaaagaagaaaaactacagtcrtctcttggtatctgtggcacattcgttccaggaccctgatggatgccaaaatccttggatgctcaagtctctgatataaaatggcatagtgtttgcatct

SEQ ID NO: 17524 - DNA, 201 bp, Homo sapiens
gtccagatgtgccaatatttgtcttatatgatacaaattaattgtccagaagaggaagaaacctttgtagacactcactaatgcaaaccagttcctttgartattgatggaaggaaaaacactaaaaaatgaaacagatcattttcactgggagagtgtagttgttgaattcacattctacttttaggacaaatctgtagc

SEQ ID NO: 17525 - DNA, 201 bp, Homo sapiens
ccttttgtagagctgaaagcagccccctgcaactttcctatgtatttattctcatcctgccctcctgagcacccagccttagaagtctgctccctctttcrcacaacagcctttctgatcttcaaagagggctattgtgtccatttctccacttctcccctcttcggtctgtcatcttggaaaagctcagagaggtgtttt

SEQ ID NO: 17526 - DNA, 201 bp, Homo sapiens
acatgtgctgggcaaaggggagaacacctgtatatgaaaaatgatttgtaatgattttgtaaataatcctataatccttccttgggttaagggttggtggrtgataagtgtttttctttaggttttgctgctggaaagatccagggaagatggaagacaagtagactggcatcttacctaaaagcagtggcacagcaggtg

SEQ ID NO: 17527 - DNA, 201 bp, Homo sapiens
atctaattaaaattatgtaaaaaaagaccaccatcactcatgtataaagatgacagggaaaaattacaatgaatagactgtgggtgattattcccctcatwgccctatttttctgttttccaaatcttttttaatggtcatggagtaatattcttggaataaaataataagcatatgcaaacaattataagctcatttggt

SEQ ID NO: 17528 - DNA, 201 bp, Homo sapiens
atcaaatatggctgttgtaaattctgggaattggcttggctaggattatatgcatatgcccagacagtgcttagagaaagtgaaaaaaaagacaaaagttkgtttgggcaagacctggcttctcatcctccatgtcttttctttcatgtcacaggcatctaacaattagaattactaattatttattcattcactcacaga

SEQ ID NO: 17529 - DNA, 201 bp, Homo sapiens
tctttgccccccttataggattctcctaaataagaggggtaggatagggatctttaaagatgattgaatacattaggggcaatgacttctatttaccgcakgctgggatgtcacacagatcagacttaaagttttcatccaaggtgaagcaccagggagcttccttttgattccctgggttgcggcagtaggaatggcctc

SEQ ID NO: 17530 - DNA, 201 bp, Homo sapiens
agagcaggattctttcccatgaacaggaccatggaaagcctggagttgggggaggcctagggagtcaacaatacaaaggaggcagtaggttcatggagagygctgtgtgggggcacagtgaggaattgctacggggagcctaaagcagcattgtccagtggaaccacatacgtcatcttcagtttttaagagctacatttt

SEQ ID NO: 17531 - DNA, 201 bp, Homo sapiens
cagagtgtattttacacttaccacacatctcagtttgagcccaccacattcaaatgctcaaaagcaggcacgtgtggctagttgctaccatactggaccaygtaggtctaatggtaacaatggcactgcagcctccttgacccagcaacactcactctcctccaccccacttcattttcctgcatacacttaacacctgcc

SEQ ID NO: 17532 - DNA, 201 bp, Homo sapiens
ccttccttcctcagtatctctcctcacatggtctcccatccagatttgctttaagcctgccactctggaagggacaccagagatcatttaaataaaacacrttatagaactggttaataggctacctctatgtctctgcaaatattccaagcatagtttggtgagtataatcaaagaccaaaacaatgtttgatcctcatg

SEQ ID NO: 17533 - DNA, 201 bp, Homo sapiens
atgtgtacagaatatatgctacatattaaccttaattatctgtggtttgtggatgtagatgattttaattcccttctttgtgcttctattcttcaaaattrccacaacaagtattatttttaaaagggtggaatgagaatgccctggggtatcttataagaatgtgatgaaagtctaaatttaaattataaattaaatcat

SEQ ID NO: 17534 - DNA, 201 bp, Homo sapiens
ctaatcaagactatgtgaaacgtacgtccatcagttcagagttgagctcttgtcatataggagcaaattaccaacttctcaaaaactgccaggggtgggarggggttctttccttctgcatcccaagtgctggatgcctctgccttccaacactactcgaaaatagctttgtcaaacaaagcatgaacactaggagtttct

SEQ ID NO: 17535 - DNA, 201 bp, Homo sapiens
ttaaaaatcactgatacttaattggtattgagaacagaggaacttaatgcaggagccaccactaagtgaagagcagttaaaaaatgctaagaagtcacctkcaaaattctaatctaattaaaattatgtaaaaaaagaccaccatcactcatgtataaagatgacagggaaaaattacaatgaatagactgtgggtgatta

SEQ ID NO: 17536 - DNA, 201 bp, Homo sapiens
tcattccttcttcaagagcagattttcttttctgctttcaaaattccatgcttctaagtggcgttgacccttggtgctttaaaacgtcttaaaaatcactratacttaattggtattgagaacagaggaacttaatgcaggagccaccactaagtgaagagcagttaaaaaatgctaagaagtcacctgcaaaattctaat

SEQ ID NO: 17537 - DNA, 201 bp, Homo sapiens
cctaggaatagaatagagtatgcatgtcttcggcttccctaggtgctgtggaattgctctccaacggccttatgccagtgcgagctccttcctacaggatrtaagttcccgttgctctttaccctttctaactcttgatattggaagtatttttagattttgcttattcaacaggtatgagaaactatcacagtttggatg

SEQ ID NO: 17538 - DNA, 201 bp, Homo sapiens
ggaatgaaggatagaagccagtctgccctagccttattcttttttccccttggccaattcaaaagtcagagactctagggttcttatttatccaaatgaaygtgcccttcagggtttaaactctctgcttccatctctcttcacttgctgagccgctaaaattctcctgagtgtttggattgagaagaagaggctcctgtg

SEQ ID NO: 17539 - DNA, 201 bp, Homo sapiens
gcagtggctaacacctgtaatcccagcatttttggaggctgaggctgaaggatcacttgagctcaggagtttgagaccagccttggcaacatagtgacacytcatctctacaaaaaataaaaaaagttggcggggtgtggggtgggcgcctgtggtcccagctactccagagactgagttgggaaggtcacttgagcccag

SEQ ID NO: 17540 - DNA, 201 bp, Homo sapiens
ttttggttctttttaaattcacttggaattaaaaaaaatcaataatggcaaaaacgtctggtagtggatttctgcttgatttcatcaagcctgtatattcycctataatggtaaggagtttgaaatcgtggttatcatcctggaaattttttgtccccaaagggacaaacctacatttgtgaagacagaatgatttagaat

SEQ ID NO: 17541 - DNA, 201 bp, Homo sapiens
tcagatagtggaggcctgtggtactttctaaaattattctttttgcttaaactactataaactgcttttttggatttaattactaggcttagatgaatgtrccatgcatcttattttggttctttttaaattcacttggaattaaaaaaaatcaataatggcaaaaacgtctggtagtggatttctgcttgatttcatcaa

SEQ ID NO: 17542 - DNA, 201 bp, Homo sapiens
acttggtgtggccaccttattaataaaaaagaactgatggaagcaaaaaggcgtcttcatttttaactccagaagcataacacaaatgctttccagtcttwctttgtgtggagagcagaccaagtgactgcaataagatcctgttacacatttgaaaaaaagacttttgcagagtggaggtaactcagtttgaatccttct

SEQ ID NO: 17543 - DNA, 201 bp, Homo sapiens
gaggtggctaagtgacatctcatcaagagcagagataaaaacaaaactcatggaaaaggtacttcctgagctccctttttgtttcctaagtgatttaaaayaataaaggccaaatcgaagagaaaacttaagaaccgatatagctgatacctggacttacggattgatttatttctgtgaacactctgggaaaatggccac

SEQ ID NO: 17544 - DNA, 201 bp, Homo sapiens
ggagaggagcaagaggtgttggggctgtatgtgctggctccgtgccttggtgttgtgggtttctagagggttttaactttgtagtaaagacgggacttggrggaattctccctgtggtgggacaggagttttctccacagccttcacaaagtattccccgcaagaactactcatccttcacggtctacttctatcgtagca

SEQ ID NO: 17545 - DNA, 201 bp, Homo sapiens
gcagccaattttggcattcttgcaggttgtcccactgtctgagcaagagaatcttgattgggatttttttttttttcttttttggagacagagtctcgctytgttgccaggctggagtacagtggcgcagtctcggctcactgcaacctccacctcccaggttcaagcaattctcccacctcagccttccaagtagctggg

SEQ ID NO: 17546 - DNA, 201 bp, Homo sapiens
aatatatggagcattgaaatagatagcagccaattttggcattcttgcaggttgtcccactgtctgagcaagagaatcttgattgggatttttttttttttcttttttggagacagagtctcgctctgttgccaggctggagtacagtggcgcagtctcggctcactgcaacctccacctcccaggttcaagcaattctcc

SEQ ID NO: 17547 - DNA, 201 bp, Homo sapiens
gtatctgaaagtggttttatagctgtacaaagttgcaagcacagattctgttaaaattgtgtagacttttttttgtaggacatttatttaattctaatttyaggtgaccaatttcatcaattttttttaactggtggcggggggaactttaaaaaaaaaatcaaaatcactgtgtatttgctgaaaagggtctctttatta

SEQ ID NO: 17548 - DNA, 201 bp, Homo sapiens
tatagaaaaaatataccctcctcatatggctgttataggggaaaaagacacaatatgcaaagcacatagtacggaggcaaagtatctggcacatagtatgkttcaatagataaataattttcccatagaaactgcaaatttatatatgagacaaaaaacatttcaagtatatgttcttgagggcagggagatgtaaggttt

SEQ ID NO: 17549 - DNA, 201 bp, Homo sapiens
cccccttctcacctgaaaggaacttgcattagcccagctctacctttctctctctctctctgccccagcaccatattgtagacaccaaaggagttgcagcmgcagaaactgtgcctggatggcaacatgcctacagcatcatcaggatccaatcaggaaagcagaacaaattctggactatttaacacagagaatttaaca

SEQ ID NO: 17550 - DNA, 201 bp, Homo sapiens
attcctattttcttctatgttttttactatgaaaagctattggattttctcaagtgctctttgtgtgtccatttagatgatcgtggtgggtttttttttttgtcctttattatattaatgtgatatatcacattaattgatttttgcatgttaaaccaagcttgtattagaataattcctacttggccatggtatataatt

SEQ ID NO: 17551 - DNA, 201 bp, Homo sapiens
tattcctattttcttctatgttttttactatgaaaagctattggattttctcaagtgctctttgtgtgtccatttagatgatcgtggtgggtttttttttttgtcctttattatattaatgtgatatatcacattaattgatttttgcatgttaaaccaagcttgtattagaataattcctacttggccatggtatataat

SEQ ID NO: 17552 - DNA, 201 bp, Homo sapiens
ctaagcttttgggaaagagacttaatctctggacctaattcttcaactataaaatggagataatgctacctaccttgaggggttcctggtacaaggtaggygtatagtaagctttcatctctctctctttctctgtctctctctgtctctctcctctttctctttcctctgtgtgtgtctgtctctttctctgtctcctct

SEQ ID NO: 17553 - DNA, 201 bp, Homo sapiens
tgcgtactctttactctcattacatatattccctgtgtattttttgtatgtaggcccagggccaggacctttctctctttttttaataacagttttattaagatacagttaaccataaaattcactgttttaaagtgtgcgactcagtctttttactatattcacaaaattttgcaactctcactactatcttattttaga

SEQ ID NO: 17554 - DNA, 201 bp, Homo sapiens
ccatcttaacttgaaaaccaaattagctgagatgctcgtgagcttccaatctcatacaggcattctaataacaagtattcacttactgtggacccaagaayggccagatggcttgtgaagaacatcagcctcagcaatcacacagatttccaccttagatggccttttgcagcctttggaggatggattggaagagtggaa

SEQ ID NO: 17555 - DNA, 201 bp, Homo sapiens
ataatgaaaatagatgtttggtaatattgggaatgatagtttgttgtgcaagaatattttgcattcaaactgagagaagaatttgacacattggttaatttatcttttctcctgctgaagtggctctgccactgtagtttctcctaggctctaagaagagtccatctcctccactggcagtgtcacaatacacaaaacttt

SEQ ID NO: 17556 - DNA, 201 bp, Homo sapiens
taaaaacaaccaaagcattcttagaggtgcaaggccgccctatcatgaaaacctcagtaaattgaagacagtaaaaaatcactcattcttttgattagcartcttctgtattcttgcaaatactgtactagtgcagtcctatcatttcaaatgtgtgtttaaataggaataaaatatattacacacataattttccctcaa

SEQ ID NO: 17557 - DNA, 201 bp, Homo sapiens
tatagatttaaggcttctctgtgagtcgttggccctctgggttgacatgccttgattggctccctttcaaaactgaccttaaaggtcaagtatgttaacaygtactttttgatgcccactttcagaccggtctttagaaagcagagtttgtgagataacttcaggatcacatatttaacctgtaatctcttgaccacagcc

SEQ ID NO: 17558 - DNA, 201 bp, Homo sapiens
tctctgtgagtcgttggccctctgggttgacatgccttgattggctccctttcaaaactgaccttaaaggtcaagtatgttaacacgtactttttgatgcycactttcagaccggtctttagaaagcagagtttgtgagataacttcaggatcacatatttaacctgtaatctcttgaccacagccagcctgaggtgaagt

SEQ ID NO: 17559 - DNA, 201 bp, Homo sapiens
ttataatctgttcttaaagtttctatgtctctgatcttctgtctacattggaataattctgcatcttttacttggatccttaattttataatgtagccccrtttttattaaaagccagggctaattttaccttgagagatctgtttgcccctcccaagggagaagaacgctgcctctgaagtgggaagcttcacactcagc

SEQ ID NO: 17560 - DNA, 201 bp, Homo sapiens
gaacgttacagtgaattggatggtggagggggtaaaggaggaagaagtatagcactgttttatatagtttgaagctttctggaagagttatttttatactrcagagattttcaagatgtgctttcatttccagtctctatacattttcaacaacaaagtaaagaacaatagtgacccaaaacttatagctaagtcatgttc

SEQ ID NO: 17561 - DNA, 201 bp, Homo sapiens
gaatgaaggatagaagccagtctgccctagccttattcttttttccccttggccaattcaaaagtcagagactctagggttcttatttatccaaatgaacrtgcccttcagggtttaaactctctgcttccatctctcttcacttgctgagccgctaaaattctcctgagtgtttggattgagaagaagaggctcctgtgg

SEQ ID NO: 17562 - DNA, 201 bp, Homo sapiens
acgtatgaattgcttactcacaaatgagtaccataacatttgctgaccgggattggcaagataccttaccaaatgactatgttagtaaatacagtcatgcrttacttaacgaaggggatacattctgagaaatgtccttaggtgatttcgtcacggtgcaaacattatggtgtacaattacacacacagtacagactacta

SEQ ID NO: 17563 - DNA, 201 bp, Homo sapiens
atacttgctgttttcgataacctcagcccaagacttaatgtcaaggtgggggccctattaaagatgccatgaatcatcttgtctttgtttgaagatttccrtgttggcaagtgggcagatagatgtaggtttcccaaccagatgtactggtagctgagatgggggcattcagctgaagtacattcctatcattatttggca

SEQ ID NO: 17564 - DNA, 201 bp, Homo sapiens
ttattttctattaactcaatgcaccttttctttgtaattcttgtcaattttccctccagccacctgcgcggtctctggcttgctctcaggctgtgagtaarttctttgtatacttgctgttttcgataacctcagcccaagacttaatgtcaaggtgggggccctattaaagatgccatgaatcatcttgtctttgtttga

SEQ ID NO: 17565 - DNA, 201 bp, Homo sapiens
aatgtgtgtgtgtgtgtgtgtgtgtgtgtgtgtgtgtgtgtgtgtgtgtgtgtgtttgagaaatcagcagctgtggttcttgctttcactcctcatggtgwggaggtggcctacccctcacatctgttttcagcccctgttcctcaataccagagttattttctattaactcaatgcaccttttctttgtaattcttgtca

SEQ ID NO: 17566 - DNA, 201 bp, Homo sapiens
tgtttttagccatttatttaacagacatttattgagcatatacattgtgcaaagccctctgcaggggactaagggtttaaggatgaatatgatggtttctrtatgaaagaggattttatccaatatcatgggtttacctatgccctgatgctaatgacccctatatatctttaatccaactcttctccttttgccttcatt

SEQ ID NO: 17567 - DNA, 201 bp, Homo sapiens
atagtgagacgttgtttctacaaacaatacaacaattagctggacacggtggcgtgttcctgtagtcccagctacttgggaggctggagtaggaggatcarttgagcccaggaggttgaggctgcagtgaaccgtgattgtgccactgcactttagcctgggtgacagaaacgagattccgtctcttaaaaaataagtatg

SEQ ID NO: 17568 - DNA, 201 bp, Homo sapiens
tggccaacatagtgagacgttgtttctacaaacaatacaacaattagctggacacggtggcgtgttcctgtagtcccagctacttgggaggctggagtagraggatcagttgagcccaggaggttgaggctgcagtgaaccgtgattgtgccactgcactttagcctgggtgacagaaacgagattccgtctcttaaaaaa

SEQ ID NO: 17569 - DNA, 201 bp, Homo sapiens
agcccttgctcactcattttaaaatgatgtcactcatccctttcagagctgttaagaaaacatcatgcaaaccatctggtacagtgccagacacagagaargccttctggaactggaatccacacacaccttaccaattactttttgagtaggtcaattgccagcatgtctccagagcaaaaagattagatgatcctcctt

SEQ ID NO: 17570 - DNA, 201 bp, Homo sapiens
ctttttgtttctatgatgagcacatgggacttaggcttactcttaaaatggatttttccaaaaccaagagttattacatttcttcctctgagacaaagtawtcaggcctcctcctcttctagcactcagtctggaaaatgtggttagtctttccatgtgggagctcttgtgctttgtgcattggttccaagatggcaagtg

SEQ ID NO: 17571 - DNA, 201 bp, Homo sapiens
tcagggtgacaaggggaagctcccagggcccagggttctggctagctcggggacgagcctcagaatagtccctgggggtgatgtgttctccaagctctgaytggctgctctgggaggggagaggacagagaagagtcaagcacgggtttggaggttctatctataaagttccttttcatttttttttttccttcaaggtag

SEQ ID NO: 17572 - DNA, 201 bp, Homo sapiens
tatgttttaaaacatttttctgttaatttcatacatttgatcagaaagccacagttcataaacccctgtgatgtggcagctgtcactgtttatatatagargatgacttcttgttcatccctgggaggccaacacaaaaattactgatgggggcaactttcactacctgttttttcatttagtagaaggtttgcaaagcag

SEQ ID NO: 17573 - DNA, 201 bp, Homo sapiens
tgaacccgggaggcggagcttgcagtgagcccagatggcgccactgcactccagcctgggcagcagagtgagactccgtctcaaaaataaaaaaaaaaaawaaaataaaataaaataaaataaaataaaaaagctgaagttctaacttacactgggaaagaaagtcccaagcttggactgagagttgcatggaagtttgat

SEQ ID NO: 17574 - DNA, 201 bp, Homo sapiens
aatggcgtgaacccgggaggcggagcttgcagtgagcccagatggcgccactgcactccagcctgggcagcagagtgagactccgtctcaaaaataaaaaaaaaaaataaaataaaataaaataaaataaaataaaaaagctgaagttctaacttacactgggaaagaaagtcccaagcttggactgagagttgcatggaa

SEQ ID NO: 17575 - DNA, 201 bp, Homo sapiens
caggagaatggcgtgaacccgggaggcggagcttgcagtgagcccagatggcgccactgcactccagcctgggcagcagagtgagactccgtctcaaaaataaaaaaaaaaaataaaataaaataaaataaaataaaataaaaaagctgaagttctaacttacactgggaaagaaagtcccaagcttggactgagagttgc

SEQ ID NO: 17576 - DNA, 201 bp, Homo sapiens
caaagcaaaatatacatgcagcatgattccatttatatgaagttctgaaacaggcaaaattaacctatggtaatagaaattagaaccttagttgcttcaargtggggtgggagggagtggttgggagcagggaccaactacaaaagattgtgggggtactttctgggttgttgatgttctatcaagatagggacatttgtt

SEQ ID NO: 17577 - DNA, 201 bp, Homo sapiens
tctggagacttgggggaaagggtgggaggtgggtgagggataaaagactactaattgggttcaatgtttactgcttaggtgatgggtgcaccaaaatatcycaaatcaccactaaagcacttactcatgtaaccaaataccacctgttcccccaaaaggtatggaaataattttttaagtggcgtttccttctagctcaac

SEQ ID NO: 17578 - DNA, 201 bp, Homo sapiens
cctggatggaaatggggactgttattcaaagtgaagtaacacaggaatggaaaactaaaccttgtatgttctcactcataagtgggagctaagctatgagratgcaaaggcataagaatgatacaatggactctggagacttgggggaaagggtgggaggtgggtgagggataaaagactactaattgggttcaatgttta

SEQ ID NO: 17579 - DNA, 201 bp, Homo sapiens
tgcaaattatcaagccctactttgaagtactaaatcaagggatccacgggagatgctaggggtgaagttcatcctcttaatttagacagcattttttttttcagctaatagctcaaatgctaaagaggaaatcctggggatgagacccagaaatttgtgttttagcaagcctcacatgattctgatatactctaaagatca

SEQ ID NO: 17580 - DNA, 201 bp, Homo sapiens
cagctcttttaaggtaaggtgggcctgatgtgtcacctgtactgtttattgcccttatccttaaataattttcttcctttaaaaacaaaacaaaacaaaamaaaaaactagctcttgcaatatctaaacatatttatttattgtagaaaatctagaaagtaaaatgaagccaaaattatgttactgctaacagatactgtt

SEQ ID NO: 17581 - DNA, 201 bp, Homo sapiens
agactgggaagaaaaagaggcttaatggacttacagttccacatggctgggagcgcctcacaatcatgacggaaggcaaggaggagcaagtcacatcttaygtggatggcagcaggcacagagagagcttatgcagggaaactcccccttatagaaccatcagatctcatgagacttagtcactatcacaagaacagcatg

SEQ ID NO: 17582 - DNA, 201 bp, Homo sapiens
attaacactattaaataaaggcagatgatgaattacaaatacatctgatgatattattattcaacctttcatcttgtccataagaatgtcataagtcactygagtcatttgatcaaatgttttgctaaagtttaaatgtgcttagtctgtcactaataatctcatcaaaatgaaagagatttaattttatacaacctatag

SEQ ID NO: 17583 - DNA, 201 bp, Homo sapiens
tttttcttcttttagtacagcagaaattgaaccttctcagaggagcctggaaactctaaattcccttctctgtttcttttcctttgcttctccttcccttkcccctacatcccctgccaggtatgactctggaaaacagcattctgtaagcttgcttgggtaagggagagaagctgtggtatgtgctactgtgggagcagg

SEQ ID NO: 17584 - DNA, 201 bp, Homo sapiens
agtcaaaatcagaaacagaaagtaccatggtggttgtcagggctgggggaaggggggaaatggggagttattcaatgggcatagagttttagttttgcagmatgaaaaagttctggagattggttgcacaacaagaataaatatatgtaacattattgaaatgtaaaattaaaaatggttaagatggtaaattttacggta

SEQ ID NO: 17585 - DNA, 201 bp, Homo sapiens
agccttaaactcctgaaccagagaagtagaaatggcttaaatatttgaatgggttggggaggggaaaggaaacaacaaaaacaaatgctaactttttttttcttacacttctaagggacttggctccgatcaaatttgagttattcaattgtttgttttggttcttactgagtgcctttcctggaaaaagcacaaaggact

SEQ ID NO: 17586 - DNA, 201 bp, Homo sapiens
gatccctggggtagggtctcagaagcatgctttgaggctttgaggagctaatctggttttgcaaatttgctacaaacaaccccacaatggatgattcataratgaataatagaattgagtttagctgaggcttggatatgtatcctacctcttaatgactggcaatacataattcttagtgtgttagcaatattttaagct

SEQ ID NO: 17587 - DNA, 201 bp, Homo sapiens
ggaacccactgtagtaactgaaatgttataatggtgggcatttacagaggctctgttatcagtgaggcactttacatatgcatattcagcctttacagtamccctgtgagatacgtattattattgctgttttgaggatgagaatactgagatgcaaaaagattaaagtatctgtagccagtgagtatctgagctggggtt

SEQ ID NO: 17588 - DNA, 201 bp, Homo sapiens
taaccaaggcctgcaggccaaatttggcctgaggcctgtttttataaataaagttttgttggaacacattcacccacatgcatttacatatcatctgtgaytgcttccatgctaccatgtcagagttgagtggttgtaacagagaccatgtgggctgcaaaggtgaaaatatttactagctagccctttacagaagaattt

SEQ ID NO: 17589 - DNA, 201 bp, Homo sapiens
ttgtatggtagctacagtcaggcactgcataatcatctttcagtcagcgttagaactgcatataaatggtggtccaatagggttataatggagctgaaaarctcctagagaggctgtagttattgtaatgttgtagtacagtgtattactcatgtgtttgtggtgatgctggtgtaaacaaacctgccctgccagtcctgt

SEQ ID NO: 17590 - DNA, 201 bp, Homo sapiens
agtatcctctgatttctgggctgtgatatactaagactgaccatcaaagactgtttcccaacaagagaaccttgtgcagtaagttcctcaggcaagaagcragataattgggacaggattgaatagatctcaggcagagaaacttgggggacagatcaatgtaggtaatgaactggttgacccaaggcctctctgtctatc

SEQ ID NO: 17591 - DNA, 201 bp, Homo sapiens
aaatagatttttcttttctacaacatggtcaggctacaggtgttctaaacttttctactctgcttcccttttaaacataaatcccaatttcagaccatctstctgtgaatgtctatgactgtatgctttcagaaaaagccaggtcacatcttgaatgctttgctgcttggaaatttcttctgccagatatccaaaccatct

SEQ ID NO: 17592 - DNA, 201 bp, Homo sapiens
ttccaagttgtctagccctgaatctcttatgtgcattggggaattacatagcggtagaaggcacgcatcatttctttacttaactatgtgtccagaaccaktgttgagttctggagatgaacagacacacttcagcctttaatgaactgctaggcaggagggggaaacacacatgtaatctaaataatgtaatgtaatgcc

SEQ ID NO: 17593 - DNA, 201 bp, Homo sapiens
gtgtcacagtacctcctacccagcactggttgccaaagtaaaagaaagtggtaacaatagggcataaggtggtggagaagaggctgggtagaccttggccrtattcttgctttgcaccttacactgctataaagaactacccgagactgggtaatttataaacacaaaagaggtttaattgactcagacttctgcatggct

SEQ ID NO: 17594 - DNA, 201 bp, Homo sapiens
tgagcagctttaatagtggtcagcgcatacatttaaattgagaaaggaggtttcccaggtgactttcaccgtatttcattggccagaaatgtgtcatgtgkgtctctctggctgcaaggaggctgtggatgtgagttttattttccagtcactgtagatgaagaaggcagaaaaggggtaggaaaaaggaggaatgagtga

SEQ ID NO: 17595 - DNA, 201 bp, Homo sapiens
tctttatttttccatcatatcatcgccatctgataaactgatatattgatgtactgatatattgacttatttatttgggaatgtgagctccaccaggacargtgtttctgtctgatttggttattgctgtatacctagtgcctagaacatagttgctataatttacttggatgttccgccacgtactggctgtgtggtaat

SEQ ID NO: 17596 - DNA, 201 bp, Homo sapiens
gctggtctctggagatacaaagatgcgtggacacttttcagttcatagtaataactgagtttcttgaggggagggactgaaatttattcatgtctctccarcactgtacctggcatattgaactgtggcagaggctgctacttgttcttcccaatattattattattagtggtagttgtagtaatagtattaatagtagtt

SEQ ID NO: 17597 - DNA, 201 bp, Homo sapiens
tcactccctctcctcttctgggtctttgttcagattataccatctcagtgaggccctaactatctccttcctttctttctttatttttccatcatatcatmgccatctgataaactgatatattgatgtactgatatattgacttatttatttgggaatgtgagctccaccaggacaggtgtttctgtctgatttggttat

SEQ ID NO: 17598 - DNA, 201 bp, Homo sapiens
ttttactctattcccctggcacatagtaggtgttcaggaaatattagctactattctcctctccaagatgcagctgttcctctccagctgtcctgtccttkctgctcctccttgaacttgccaggctactcctgcttcagcactttggagaccacagaccagcagggatcactccctctcctcttctgggtctttgttcag

SEQ ID NO: 17599 - DNA, 201 bp, Homo sapiens
tgttttcattactttaagtaatagggcttttgtctttattatgtaatttccctagcaataatatgttttaaaacatttttctgttaatttcatacatttgrtcagaaagccacagttcataaacccctgtgatgtggcagctgtcactgtttatatatagaggatgacttcttgttcatccctgggaggccaacacaaaaa

SEQ ID NO: 17600 - DNA, 201 bp, Homo sapiens
cccaggttcaagcgattctcctgcctcagcctcctgagtagctgggattacaggtgcatgccaccaggcagggctaatttttgtatttttagtagagacgrggtttcatcatgttggtcaggctggtctcgaactcctgaccttgtgatccacctgcctcggcctcccaaagtgctggtattacaggtgtgagccactgtg

SEQ ID NO: 17601 - DNA, 201 bp, Homo sapiens
tttacattcccccaacagtgtattagcattccgttttctctgcatccttgccagcatctgttattttttgactttttttgttttttttgagatggagtctygctatgtcagccaggctggatttcagtggcaccatttcagctcactgcaacctccgcctcccaggttcaagcgattctcctgcctcagcctcctgagtag

SEQ ID NO: 17602 - DNA, 201 bp, Homo sapiens
agccgagtccctagtgtggagaggccccctccttcaggaccccagatgtggggcaattgtgagcctagggctagagcatggctcaggttgactgacctccttgcactactggggaatgtagcctgcctgtccttttaagttacagcagactcttacttttccaaacaggcgcctttggttgaggtgatttacctggctatg

SEQ ID NO: 17603 - DNA, 201 bp, Homo sapiens
aagaccatagagttcacacagtagcctggaggatgggcagggtagggattcaactcttttgacatcccagcttctagctagctgatttacatatattatascattttatataatatcacatttaatccttactacttagtgctactataaaagtagtgaaagcaaatggatgggggttaatattgctacacattcacctag

SEQ ID NO: 17604 - DNA, 201 bp, Homo sapiens
cagccgagtccctagtgtggagaggccccctccttcaggaccccagatgtggggcaattgtgagcctagggctagagcatggctcaggttgactgacctccttgcactactggggaatgtagcctgcctgtccttttaagttacagcagactcttacttttccaaacaggcgcctttggttgaggtgatttacctggctat

SEQ ID NO: 17605 - DNA, 201 bp, Homo sapiens
cgttgcataatatgcaaatagttaaaaccactgtactatatacttaaaaatgattaagatagtaaattttgttgtgtttttttaccacgatttaaaaaaaatcctttgtatgcctaacttacatccctttttctttggcttaagtatattttaaggaagtgttgtccttccaatagtcttcgaatgctgttttatgataac

SEQ ID NO: 17606 - DNA, 201 bp, Homo sapiens
tcagccgagtccctagtgtggagaggccccctccttcaggaccccagatgtggggcaattgtgagcctagggctagagcatggctcaggttgactgacctccttgcactactggggaatgtagcctgcctgtccttttaagttacagcagactcttacttttccaaacaggcgcctttggttgaggtgatttacctggcta

SEQ ID NO: 17607 - DNA, 201 bp, Homo sapiens
cactgtcaagaaccttttcgttgcataatatgcaaatagttaaaaccactgtactatatacttaaaaatgattaagatagtaaattttgttgtgtttttttaccacgatttaaaaaaaatcctttgtatgcctaacttacatccctttttctttggcttaagtatattttaaggaagtgttgtccttccaatagtcttcga

SEQ ID NO: 17608 - DNA, 201 bp, Homo sapiens
taaccctccattcccagcagatatttatgttgctagggaaataaaagccagaaagactcagttctgattgaagaatcaatttaggaggttgatatggtttrgctctgtgtccccacccaaatctcatcttgaattgtactctcataatttccatgtgttgagggacccagtgggagataattgaatcgtggggacggtttc

SEQ ID NO: 17609 - DNA, 201 bp, Homo sapiens
caaagaggaaatttcatacttttccatccaaattgcaagagagaacaagatccatcattgttcacaaacttcactgtcaagaaccttttcgttgcataatrtgcaaatagttaaaaccactgtactatatacttaaaaatgattaagatagtaaattttgttgtgtttttttaccacgatttaaaaaaaatcctttgtatg

SEQ ID NO: 17610 - DNA, 201 bp, Homo sapiens
taaggctgaataatattacattgtatgcacatgcacattttgtttatccattcatctgtcaatatacatttgggttgcttctaccttttggttgttataaatgctgccatgagtatgggtgtgcatatttgagtccctactttcaattcttttgtgtatatattcccaaaagcaattccagaagtggaattcctagattac

SEQ ID NO: 17611 - DNA, 201 bp, Homo sapiens
attaaggctcttggatgtatacagtccattcacgtggcgtttaacttttaaggtgttagagaaatgtaggtctgccactaaagagaggcaacatcagaggrggacccacacacgtacaaagtcttcataatgtccctctgcagtttttaaacatttgaactttaaacttttaaacttcaataaattatgttgaaggtttga

SEQ ID NO: 17612 - DNA, 201 bp, Homo sapiens
tgtttgttttaccagtcaaataattcattaatgacaatatatgcctaagtatttggtttcaatggttaggctcaaactgataaaaagacaagtatgtctcrtgttctacacatattatattcttttccaagcaatgggatataagatttcaaaaatatacttcaaagtgttagcactcataattattgggctcatatgaaa

SEQ ID NO: 17613 - DNA, 201 bp, Homo sapiens
agcactttgggaggctgaggcaggagaatcacttgagtccaggagtttgagaccactctgggcaacacagaaagaccctgtctctttaaaaaataataatwattattattttatatatatataaagtaagattacctttatactatgtgtataatgtgtgtataaaaaataaattttgtgtttagatttaggtcccatccc

SEQ ID NO: 17614 - DNA, 201 bp, Homo sapiens
gctactcagggggctgaggcaggtgaatcgcttgaacccgggaggcggacgttgcagtgagccgagatcgcaccattgcactccagcctggtgacagagcragactccgtctcaaaaaaaaaaaaaaaaaaagcagggatttcaaaagcatcacatttggcaaaacttcagtgttattcccttcctttcagatcaccctca

SEQ ID NO: 17615 - DNA, 201 bp, Homo sapiens
caacattctaatttccagccgattttctctgtaatgcattggaggtgtccattaccctttaaaatgactagtaagaataatgtccattgttccaaagtgaytttcttaaaatagtatgattcccaccagatattagtcttcattgaaagagaacttcggactcttaaggagaatgatgaaaaacaattatatatataatgt

SEQ ID NO: 17616 - DNA, 201 bp, Homo sapiens
tgtgaactgtgataccaaattgtttgatttttaaaaggaaattaatcatgtgatctggactaagtggttggtttcaaaaatctcaagtatttaacttgatrtaactaatatgtgcatttcacttttaaacagttattccaaagtattaaaaatcttcaacattctaatttccagccgattttctctgtaatgcattggagg

SEQ ID NO: 17617 - DNA, 201 bp, Homo sapiens
tacatgaatgggagcctcacggggggttgaagaggctgatctgatctgtggttcctcaattcagaggacatgagcttttgaaaataggcctttctaggtgrattggcctgcatgtcatagtttacacatactgagagctgatcatatatcaataattgttctaagttccattgtgggtgagtgctattgtgatgtgctatt

SEQ ID NO: 17618 - DNA, 201 bp, Homo sapiens
gataggaatgtaaaatggtgcagctgctatggaaaacagaatggaagttcctaaaaaaaattaaaaatagaattaccatctgatgcagcaatcccatttctgagtatttaatccaaaagaattgaagtcggggtctcaaaatatttgtacacccatgttcactgcagcattattcatgatagccgtttaaggcagaagcaa

SEQ ID NO: 17619 - DNA, 201 bp, Homo sapiens
gagctgggtctgatgtttggagggtgctgtcttctttcacaaccacacctaacctgtaatacattttctgtggtatccagctttgttttctctaaagtggrtagaagctgaaagacacaagtaaagcactgtaaatggggaattcttttagatacgtataatgcccccccatgtgtttatccttgtcttagagttaacaca

SEQ ID NO: 17620 - DNA, 201 bp, Homo sapiens
actgcttgcttttcctttgcggaaaaccacctcatgcccattctgtctaggtggagctgacccttacctaaatcagggtggccacatgaccaagccagccyagttagtgtatttgggtatccaaccgtgccccaaagtcactggacttgtcagttacataagcctataaacacctttacccctcaaccctcatttttcttt

SEQ ID NO: 17621 - DNA, 201 bp, Homo sapiens
gagtatgtctctgcccataacagcttacaacctagtttgcttgcattaattaatcaactaattattaattaatgaatgattttattcctttattctacttrtatgagcatccagaagtcctcaattttattaggatatctttaattctttttattatttaaaaaggtaaacatgtgatgtgtttgttgtagaaaatgagaa

SEQ ID NO: 17622 - DNA, 201 bp, Homo sapiens
ttgagccaggcagcatgcagtccgctgccatagagaggaggtaagcagggtggtttgttgtcttgtccacccatcactttgccttgtaagtatagacaagwcactaactgctctgcatgtctcctttgtatccccagccctgatcacacatagtacccagcacatagtaatcacttaacacattgtggctatttactttat

SEQ ID NO: 17623 - DNA, 201 bp, Homo sapiens
ctgtgtgccaggcactgtgctgggcactggactacaacagaggggaaagataggcatcgttcctgacctcactgcgcttaacaaagagaaagctctaagaraaagttttcaaagcattacccttctctgtatatttaagaggaaagctttaatgttataggatgccttctaaatatgtattttataacacagtgggtagaa

SEQ ID NO: 17624 - DNA, 201 bp, Homo sapiens
atcacagactatcagagtccggaggactttcaaaagcatgcaggccacaaactccatttacaggtgaacacatccagcccagcaagggaagggaacttgcycaaggtcaaacaattagtagggtttatttgttctggtcttcctctacctgaaattcagctctatttgaacaagtgaaacaagcccttctatgaaagcaaa

SEQ ID NO: 17625 - DNA, 201 bp, Homo sapiens
ttcaggtgccgcgacaaccctattcggtaggtcctatttttatccttcccccatgtcacagatgaggcattcttagaacaaaccaagcatccagataataygaagagggagcagttctcatttacatggggagtgtataagtcacagccctgcacagagggaacagtgtatggtttggaaagaaaaaaaatctcagtttgg

SEQ ID NO: 17626 - DNA, 201 bp, Homo sapiens
gcctgaaaagctcagactcggagcgtccaggagctgagatgcctgtgctggacagcccctgattggagaggagttaatgatcagtgcccctaaaattgtcrcataggcagctgattatgagaaattggtccagctgtttaggttacttttgagatcaaaattttgtgttttgtcaggggagtgagttgtcacaaaccccat

SEQ ID NO: 17627 - DNA, 201 bp, Homo sapiens
tgtctctcatttagatcccctatttgtttctttcttgatttgtatgggaaggcagaatctcaatcgtattggtatttttatatttaaaccatgggcctttrttttacccttgatcaaatcctgaggtcacatttcttctcctagccatgccagcatgtctgtttctcctctaagtaaaggtttctccctctaccaaataaa

SEQ ID NO: 17628 - DNA, 201 bp, Homo sapiens
atgtctgggaggcactaaaacaagagcccattatgtgttttaaaatgatattagtaataatgtaggggtttatttggacaaatgagttcacaaaattgtgytgcctgtaatgttgattcttgactgagggataaaactcacttcccaggcccctttctgtaagccagttcccaccatccccttgaacctcagctgctccac

SEQ ID NO: 17629 - DNA, 201 bp, Homo sapiens
aaaaatgctccttggctgtataagacatattttattgcccttttggagatttataatgagcacattaaagttttggaaaaatcctgcaacaaagaaatccrttttactttgtttagttcagtaactccttagtttattatccatggacccctctcctgtgccctgtgacttcctcctaacttgttacatagcctggtcaag

SEQ ID NO: 17630 - DNA, 201 bp, Homo sapiens
aggaagaagtatagcactgttttatatagtttgaagctttctggaagagttatttttatactgcagagattttcaagatgtgctttcatttccagtctctrtacattttcaacaacaaagtaaagaacaatagtgacccaaaacttatagctaagtcatgttccatgaacatttttaaccataaaataatttctctcaaag

SEQ ID NO: 17631 - DNA, 201 bp, Homo sapiens
gcgtgaaaacaatgatggtgacacagtgagagtctgggcacaggtcctggaaggtgtggagagggagcagccaatgcaggctcctgttagagtgctggagrcagaatcaggaaaggtgactcaggggagtcacctttttttcactggaaaaaaatatgtctgggaggcactaaaacaagagcccattatgtgttttaaaat

SEQ ID NO: 17632 - DNA, 201 bp, Homo sapiens
aggaaggctgaggtgggaagactgcttgagcccaggagttcaaggctgcagcccaatatgattgcatgactgcactcaaggctgggcaacaaagcgagacrctgtctcaaaaaataaataaaaatgctccttggctgtataagacatattttattgcccttttggagatttataatgagcacattaaagttttggaaaaat

SEQ ID NO: 17633 - DNA, 201 bp, Homo sapiens
ggatttcctacagcaactctgccttagcctcccagtaccatctgcttcaggctgggacatctttccttcatgcaggagaaaggggagcttaataaaatttygctggggtttcttggggcctgaggcagtagtggggaggagagaagcctgggctgttttatttcttgcacctgctatgagtcaggagtggtccttggtcag

SEQ ID NO: 17634 - DNA, 201 bp, Homo sapiens
aagggcccaaatggagccaaaaaagagtcagcagcattgccacccacctgcagacacacaataggataaaagcagcacctgatcagggaggggaaggaacsaggagggagagggacaggcttggccgtgggtgtagcccggagttgggaagcccgtggcccaggatcaggtcagccactggctcagtgtgaccttggagct

SEQ ID NO: 17635 - DNA, 201 bp, Homo sapiens
ttcctttcactgaattgccttcactttttgcctattagctttgatctctttggaaaaaagggcactggggtattattactgcctctgtttgtttttgcaartgcactatgatttgtggttggtcttttggctagcctgaggctacctgaccctccctcaacagccctagttcccccaggtcattctatagttttgcccatt

SEQ ID NO: 17636 - DNA, 201 bp, Homo sapiens
gggcatatcagtaatagtaacatactacatatgtcaatgttagacatttaatcacctctagcaacctacaagcaaataaagagacaaaactcctctggacsagcactgtccaataaaattataatttgagccacatatgtagtttgaaattttcctttgggcacattacaaaacaaaaaagaaacaaataaaattaattgt

SEQ ID NO: 17637 - DNA, 201 bp, Homo sapiens
ccaccacgccctgctaattgtttgtatttttagtagagacggagtttcactgcgttagccaggatggtctcgatctcctgaccttgtgatccgcccgcccyggcctcccaaagtgctgggattacaggcgtgagccaccgcgcctggcccagactatttaatttttgtaaataatttagtgttttgtttttgtttttgttt

SEQ ID NO: 17638 - DNA, 201 bp, Homo sapiens
cccgccaccacgccctgctaattgtttgtatttttagtagagacggagtttcactgcgttagccaggatggtctcgatctcctgaccttgtgatccgcccrccctggcctcccaaagtgctgggattacaggcgtgagccaccgcgcctggcccagactatttaatttttgtaaataatttagtgttttgtttttgttttt

SEQ ID NO: 17639 - DNA, 201 bp, Homo sapiens
gctcactgcaacctctgcctgctgggttcaagcaattctcctgcctcagtctcctgagtagctgggactacaaggcgtgtgccaccatgcccgcctaattyttaatatttttagtagagatggggtttcaccatgctggcgaggctggtcttaaactcctgacctcgtgatctacccgccttggcctcccaaaatgtgggg

SEQ ID NO: 17640 - DNA, 201 bp, Homo sapiens
ggaaggcaggagaagaaggatggcctggcctagcggtttaagtttgctcctagagagcagaagtcctggcatagaaaaggggattcctgggctgtcacagwgagtccatattagtttctcttactctgatactcttcaaagtccatccaactggagtcacatactcccttcttctttttgcaagcagtgctcaaaagtgaa

SEQ ID NO: 17641 - DNA, 201 bp, Homo sapiens
cagagctgccactgtggggatattaattaacctttttaatctcagatgtttttcatctataaaaagtatatgttgggtattttgctaggttttttttttttggtgaggattaaatgaaataatataatgctcttggcatatagtaggaacttaataaatattacttattgctgattttgttattttatctgagccctggtg

SEQ ID NO: 17642 - DNA, 201 bp, Homo sapiens
ttcagctggtccacatgggtaggaggatgtgttgggaaggcaggagaagaaggatggcctggcctagcggtttaagtttgctcctagagagcagaagtccyggcatagaaaaggggattcctgggctgtcacagtgagtccatattagtttctcttactctgatactcttcaaagtccatccaactggagtcacatactcc

SEQ ID NO: 17643 - DNA, 201 bp, Homo sapiens
atagctcttagttccttcaaattggaaatggattatggttttgcatttgactcaggaagaggaaaaaaaacacccatttttcctctcctgtttttttttttgtttttaaacagctagtgtcactcttttgggattatttgtttatatgtttgtctctgtctctggactgtgaggtctgggtgaggaggaatggtgtttaat

SEQ ID NO: 17644 - DNA, 201 bp, Homo sapiens
ggaagatagagatttgtaaagaagacctcagaaaacagaatccgtgacaatctgtttggaattttctcttcagctttgtgatttggtgactataaattaakagaacactcatgtaaaatatgactggagatagttgtgctaagtgactcctgcttcagggactagtcatagagtccccaatattgggacacagggtggctc

SEQ ID NO: 17645 - DNA, 201 bp, Homo sapiens
agctggattaacttccccagcatcatcatttattagccacgtaatcttaaatacttttgcttaatgtttctgagtctcatttgcctcatctgtaaagaagrgatgatcatgtctaccttaaaaggctgctaggaaaactagagataatacatgtaaagcccctggaataatagtgactggcacgtagtaggtgttcaagtc

SEQ ID NO: 17646 - DNA, 201 bp, Homo sapiens
tctattcggtgacaggtaggtaagtacgtagatagatagatagacagatagatagatagatagatagatagatagatagatagatagatagatagtgaagraaaggaaagggctcttccttaacagtgtaatgccaactgacatatgtgacatgtgatatatgtggaggaagtagtgaatttgtaaagtcatcattttgca

SEQ ID NO: 17647 - DNA, 201 bp, Homo sapiens
gacttgaatagacattcctccaaagaagatatacaaatggccaaaagcatatgaaaagatgttcaatatcactaataattagagaaatgcaaatcaaaacyccagtgagataccatttcacacccattagaatgcactattaaaaaaatagcaagtgtgaagaaattggaaccattgtgatctgttgataggaatgtaaaa

SEQ ID NO: 17648 - DNA, 201 bp, Homo sapiens
aagccacaagtctattcggtgacaggtaggtaagtacgtagatagatagatagacagatagatagatagatagatagatagatagatagatagatagatagatagtgaaggaaaggaaagggctcttccttaacagtgtaatgccaactgacatatgtgacatgtgatatatgtggaggaagtagtgaatttgtaaagtca

SEQ ID NO: 17649 - DNA, 201 bp, Homo sapiens
ttgcttgaaccccagaggggaggttacagcgagctgagattgcaccactgcactccagcctcggtgacagagcgacactccgtctcaaaaaaaaaaaaaaagttcagtaagggcctaaataagttatttcaactgaatttataaaatcagagaaccttgggagcaaccatagaaatcatccagcctctacttgaacattgc

SEQ ID NO: 17650 - DNA, 201 bp, Homo sapiens
tccccagaaagaaagcacctggcacagggaataaagcatttccccccttacgctggctacaacttgattttttttttttttttttttttttttttttttttgagacagagtctcgctctgtcgcccaggctggagtgcagtggcacaatctctgctcactgcaagctccgcctcccgggttcacgccattctcctgcctca

SEQ ID NO: 17651 - DNA, 201 bp, Homo sapiens
catctacattagatatttctcctaatgctatccctcctctagccccccacccgctgacaggccccagtgtgtgatgttcccttccctgagtccatgtgttytcattgtttaatgggttctcctctctcttactttaaaggcagggattccggcttattggactctgctgtgaactgactaaagtcattatctgttcaacag

SEQ ID NO: 17652 - DNA, 201 bp, Homo sapiens
tgtaatcctagcactttgggaggccgaggcgggcagatcatttaaggtcaggagttcaaaaccagcctggccaacatggtgaaaccccatctctactaaamatacaaaaaaaaaaaaaattagccgggtgtggtggagggtgcctgtaatcccagctactcaggaggctgaggcaggagaattgcttgaaccccagagggg

SEQ ID NO: 17653 - DNA, 201 bp, Homo sapiens
agatgggagaaaatacaagacgaactgtcttggtgtcttcccttctatttggtaactacacaactacttactcttccaacgaccacatgtctgttgaaaargtgcacagcagagcaagagtatatgggctttagaagcagattaatcctgaccaggtctttcaccggctgctgaacactccttgaacactcacaatgcatg

SEQ ID NO: 17654 - DNA, 201 bp, Homo sapiens
cgcttcataagagtcagctttaaataaattgtttcaagaaagaaatgggctgggctcggtggcttatgcctgtaatcctagcactttgggaggccgaggcrggcagatcatttaaggtcaggagttcaaaaccagcctggccaacatggtgaaaccccatctctactaaacatacaaaaaaaaaaaaaattagccgggtgt

SEQ ID NO: 17655 - DNA, 201 bp, Homo sapiens
tcagcccagagaatgtgttttatagcctgggctgaattcccctaaaggtagagttttcctatgagcagtgttcattgaattggctttttttttttttttttgcactagataactatattaatttattagataatctttttattgtttcagcaagatagaggaaacttacacagagacagcagagcataatgggtaagcatc

SEQ ID NO: 17656 - DNA, 201 bp, Homo sapiens
tgttgagcttctactgtgtctcagaccctgtgaacaagctaaatcagaccatgcccttgtgtagcctacaatctaatgaaggaatcagatggaaaaaaaaatatgaatcacattaagtattgtcatatagttcccagttttatgtctgctcttatgtgcgtggcattttaatgatgactactgcttgttgaatactgtgct

SEQ ID NO: 17657 - DNA, 201 bp, Homo sapiens
cctttaaccattcatctttttaaaaagataagtttgctaagcaaataaaaccagttagccttgaaagttcagtattaatgaatgttaatgcatatcttgatgattttctaaaaaactgacaaatcttccaaaagacaggaatatctagagggtaaataacaggactaaaatgctttgaaacatctttgaaatgatggttca

SEQ ID NO: 17658 - DNA, 201 bp, Homo sapiens
caattggctcacgtgtggttctgcaggctgtacagggagtatagcagcttctgcagaaggtgaacggagagcaagcttcttacatggcaggagcaagagartgagtggggaagtgccacatgcttttaaacggccatgagaatgagaacttactatcccaaggacagtaccacggggggtttgtgctaaaccattcacaag

SEQ ID NO: 17659 - DNA, 201 bp, Homo sapiens
tggaaggcagaagttgcactgagctgagagcgtaaccctgcactccagcctgggcgacagagtgagactgtctccaaaaaaaaaaaaaaaaaaaaaaaaaagtggaagttttgatgtaaataattggtaacctatttataaaaatcctctcttggagatttctaatgggtatcagcctggtggaaagtttttttttaaatt

SEQ ID NO: 17660 - DNA, 201 bp, Homo sapiens
ctctctttctctgtctctctctgtctctctcctctttctctttcctctgtgtgtgtctgtctctttctctgtctcctctctctgtctctctctctctctgwctctctctctctctgtctctctctcctctttctctctttgtctttccgctgtgtgtgtctgtctctttctctgtctcctctctcttggttgcttctggtt

SEQ ID NO: 17661 - DNA, 201 bp, Homo sapiens
aattatttaaggccacatgggtaagaaagggcagagctaggatttgaactctggtttatttgattccaaagcccttgctcttggatgctgtgacttagagwttttcaaatgccactttcttaaaaaggggtcttctagaaataaaaacttttaagaaaaggtgaactttcaatggtggaaatgtgtgtattgtggcagtcc

SEQ ID NO: 17662 - DNA, 201 bp, Homo sapiens
actccttgaacactcacaatgcatgtggcagggtgctcagtgtgttccacgatatccccattttccagataaggaaactgaggcacagagaagtaagtaamctgcccaagaccacacagagagttaaatgggaaaactaggatttgaacctgcatatcctaaggcctgagttttgttcctaatcattattatgccaaactg

SEQ ID NO: 17663 - DNA, 201 bp, Homo sapiens
ctgttgaaaaggtgcacagcagagcaagagtatatgggctttagaagcagattaatcctgaccaggtctttcaccggctgctgaacactccttgaacactyacaatgcatgtggcagggtgctcagtgtgttccacgatatccccattttccagataaggaaactgaggcacagagaagtaagtaacctgcccaagaccac

SEQ ID NO: 17664 - DNA, 201 bp, Homo sapiens
ggtgcgttggaagcagagttcagatttttcagtcttaagccagatctctaccctctcttctcgattgcctcttttcttgctgttttgaaagcagtgatgasactttgattttatttagatatttataattttcttatagcattatgttaccatcatagggcatatcagtaatagtaacatactacatatgtcaatgttaga

SEQ ID NO: 17665 - DNA, 201 bp, Homo sapiens
aacactgtatctcaggcatctttataagtaacaagatctccctgtccctcattcctaatgtatatgttctcctaaaatcactttaagtgtatcaacttgcycttgcttcatcttttaaaaacatgtataagtaatgctacactccacacctttacgcttaatggctctaagagttcacgtttcagtgcaccatctctttga

SEQ ID NO: 17666 - DNA, 201 bp, Homo sapiens
aatgaaataatataatgctcttggcatatagtaggaacttaataaatattacttattgctgattttgttattttatctgagccctggtgtagatggtttawttatttattatgataggagaaaattgctgtattattatgattacaatgttgtaattttgcattagttttatgtcatttatatgatttaatgagtattctt

SEQ ID NO: 17667 - DNA, 201 bp, Homo sapiens
ttataagctttccttggcaattatattttgatatatttatatgctaattttaacaaattttggttaacatatcttacagcagtattttttatattaataayggtaagaggaacagttacttttttacttagctattagttaattgagattattttaaaagctgtgtgacgttggaaaactgattaactaatacaggtattt

SEQ ID NO: 17668 - DNA, 201 bp, Homo sapiens
ccctatgaggtaagccagagttctaggagcattattgttcactattaggcatcttgattctctccagctccacacctgtgtgaatcctccaccatgcccaragcagaatccaggctaaaagccaggataagggcagatgggagaaaatacaagacgaactgtcttggtgtcttcccttctatttggtaactacacaactac

SEQ ID NO: 17669 - DNA, 201 bp, Homo sapiens
gccttaaaaagtaataatcatatctgacacttacatagtactccagcttgaatagtactcatgagcctccgggtgccagacactgttctaagtactttacwtgcgttatctcatttaacccttacaaaattatctccattttacagaggaggaaaccgtggcaagaagaggaggcagagtgaagattcaaattcaggcatt

SEQ ID NO: 17670 - DNA, 201 bp, Homo sapiens
ttatatgctaattttaacaaattttggttaacatatcttacagcagtattttttatattaataatggtaagaggaacagttacttttttacttagctattrgttaattgagattattttaaaagctgtgtgacgttggaaaactgattaactaatacaggtatttataagatgtttggtctaaaataaggtatttaaacta

SEQ ID NO: 17671 - DNA, 201 bp, Homo sapiens
acggagactgacttgcatgccaggaatatctaaaaagctaacgaatacaaaataaaaataaacagcagtaaaaaggctctctctttgttgcagtaagctcrgttggggttttcagtttgtttaggaatgggataattgtggcatccactttattttggtaaggcagtgaaacgtggattaatgttatgtgattgggatgct

SEQ ID NO: 17672 - DNA, 201 bp, Homo sapiens
cttgatatcccccagagaatatagagttggcctcccatatccatgggttctggatccatggattcaaccaaagtcaaatggaaaatatcagaaaaaaaatstgtctgtgctttatatgagcagaattttttcttctcattattccctagacaatagagtatagaatctatttacacagcacttacattttattaggtatta

SEQ ID NO: 17673 - DNA, 201 bp, Homo sapiens
tgttgtatagtgggtgtgtcagttttcctgagcctttcaagagtgttatgagattgaagtgaggtcatgcatgtaaagtactggagaacagcacccagccwagaggtgagtgcgtgaaattaatttggggtacatgaaattaaggatatgtgaacttccagaaataatatacacaattttatatgcatttttacggttctg

SEQ ID NO: 17674 - DNA, 201 bp, Homo sapiens
tgcaacctgtgcaactgcgcagaccatccacattggagccccctggttgatttgacgctctgcagggaaattggaattcttgatattattttcaataagasgccccacttttttattttgcactgggcccatcaacttaagtaggtactcttggttagaataatctagaacaggaccaagagcctgtgaggaacaagtcag

SEQ ID NO: 17675 - DNA, 201 bp, Homo sapiens
ttctgtatcttgagcataggcccccagttagacttttggaaagtttctgaaagtgtcacttgctctgaaattagtatcaggtttggctggtggtttgatgstgaacatctaccccatttcaaatatttctgaaaattttacacagcatcctatggagaatggaacactttgtaagctatatgtactttgatgtaaatgtat

SEQ ID NO: 17676 - DNA, 201 bp, Homo sapiens
tcacttcccaggcccctttctgtaagccagttcccaccatccccttgaacctcagctgctccaccagagtcaaagcaactcagaaggaggctgagaccccmatgcctcattgctaatcgatgggcatggtggatgggcatgagggtggggttcaggaccttacctagcatctgtcttcccagaatgttgctctgccctttc

SEQ ID NO: 17677 - DNA, 201 bp, Homo sapiens
atgcaaagctcaacttctttaggaacctgaagcttaccttataactgcacccaagcccagggctttaggaacctacctggcctttctcaaaatcttatagmttctgtggtttggctgctgggagccagagggaggtggcttgctactgtgtttgctatcattttgtaaaccttccgttgccatttaaataggtatttgtct

SEQ ID NO: 17678 - DNA, 201 bp, Homo sapiens
gaatggattctgcttttacttttactaagcattgttcttccttcctagaggccgagataactccagcttaccttggtgtgactatctaggaatttaaaaaygcgtcttcgaacaactgaaaatctccaggctatctcttccaacagttgaggaatccagccctgtaaaaagtcaatcaggctaaatgacacctgctgtgag

SEQ ID NO: 17679 - DNA, 201 bp, Homo sapiens
aatatttttcaaagcaaggatccactgacatgactttcaggcaggccctcccaagctgtctacaaccccctctgtggtctcatagggcacctatgcacatrttggcttttcatgggctgttccctcccacagaagcacctttcccccacccatcagctacagtccttctgtcttggctcagatgtcacatccctgactcaa

SEQ ID NO: 17680 - DNA, 201 bp, Homo sapiens
aaggaagttgtgtgaaattttgatttcttagagatggtttttggaagctagagtagcattttctgaggatgatttctgaaacggatcctataatgtggtcrtgctaatctgaaagctcctgggggtaaatagagctcctaattgtaattaagatgtgcatcagcagggagtgcaccttcctgatgaaaaatcctaatgaaa

SEQ ID NO: 17681 - DNA, 201 bp, Homo sapiens
tgtggtggaagccacacttgtttaggttttatgtgaaccaaaaacaagtgtccattgttaaggctgagattttgaggttttttttttttgtttttttttttgttacagctgctaatgttaccttaactaacatgaggttgtaaatcagtgtgtggtgagatcaatttagtgggttaggaccagcatttttagatagaataa

SEQ ID NO: 17682 - DNA, 201 bp, Homo sapiens
gggtgaggaggaatggtgtttaattttcatgcatatcttcagtgttcagcacattaagcctggcacaaatcaaagagacactcattaaatatttttcaaakcaaggatccactgacatgactttcaggcaggccctcccaagctgtctacaaccccctctgtggtctcatagggcacctatgcacatattggcttttcatg

SEQ ID NO: 17683 - DNA, 201 bp, Homo sapiens
ccttaatcactgtgtggtggaagccacacttgtttaggttttatgtgaaccaaaaacaagtgtccattgttaaggctgagattttgaggtttttttttttkgtttttttttttgttacagctgctaatgttaccttaactaacatgaggttgtaaatcagtgtgtggtgagatcaatttagtgggttaggaccagcatttt

SEQ ID NO: 17684 - DNA, 201 bp, Homo sapiens
atttcctccttcttgacctggaggcactctttatggcgcttgcatgcttccttggtcttagacctctgggcctcaacctggttagccaggagcttcatgcragccttatctgccttcagcttgtggatgtgttccatgagaatcgcttgtttttgaacacgttccccttaaccttcaggtacaggctgtgatacatgaggt

SEQ ID NO: 17685 - DNA, 201 bp, Homo sapiens
gtgagagggtcatgatgggtacatgactgggggctgcatgcactggtaatcagaacgaaacagaacaggatagggatttttacactgtctttccatacaawgtctggaatctatagataacataaccagttatgtcaggggtcgatctttaagtaccaggcttaggtcaggcaggcccaggcctggtttcgggtctggttc

SEQ ID NO: 17686 - DNA, 201 bp, Homo sapiens
ctttggaagaccaaggtggaaggctcacttgagcccagaagtttgagaccaacctgagaaacagagtgagatccccatctttacaaaaaaaaaaaaaaaaatactagctagctgagcatggtggcatgtgtctatagttccagcaactctggaggctgaggtgggaagatcacttgaacccagaaattcaaggctgcagca

SEQ ID NO: 17687 - DNA, 201 bp, Homo sapiens
actttggaagaccaaggtggaaggctcacttgagcccagaagtttgagaccaacctgagaaacagagtgagatccccatctttacaaaaaaaaaaaaaaaaatactagctagctgagcatggtggcatgtgtctatagttccagcaactctggaggctgaggtgggaagatcacttgaacccagaaattcaaggctgcagc

SEQ ID NO: 17688 - DNA, 201 bp, Homo sapiens
gtcacagtgagagtgaaatgagataatgcatatatagcactttctcctccatgtgactcatagataaaagctgttgatatttcaactgttctgggctatgkaaattttaaaagatttcatgtctaggtgacacgtgaaagtccagcacgtggaccataaatgttgtcatggtttgacagtattaatgaaacacttcatcgt

SEQ ID NO: 17689 - DNA, 201 bp, Homo sapiens
ccattctccattttgctcaccactgaggcatatgtacaaatccaaagaccctcttttgttacacgtgaaactttattcttatttttttgtcaaaagaaaagtcctaagtttcccaaatccaaagcaaagtgaatgcttcaatattactttatccagagccacaggcaggagagaaaagttgtgaaaatcaattcaggaaag

SEQ ID NO: 17690 - DNA, 201 bp, Homo sapiens
aggcagaggtagcagtgagccaagattgcgccactgcactccagcctgagctacagagcgagactccatctcaaaaaaaaaaaaaaaaaaaaaaaaaaaaagaattagatggacctgatcctaatgctcgttctgatgctcagatcaaggggaaaatgaggaggctttttaggcctcggtaaatcagagttaacaacaccc

SEQ ID NO: 17691 - DNA, 201 bp, Homo sapiens
accattctccattttgctcaccactgaggcatatgtacaaatccaaagaccctcttttgttacacgtgaaactttattcttatttttttgtcaaaagaaaagtcctaagtttcccaaatccaaagcaaagtgaatgcttcaatattactttatccagagccacaggcaggagagaaaagttgtgaaaatcaattcaggaaa

SEQ ID NO: 17692 - DNA, 201 bp, Homo sapiens
taggcattgtgtggaactggatgtgaacttggggaaattgcttcattctctaaacctcagtttcctcatctattaaatgggaggagtaatacctgcctctrcatgattcttgtatggaacaaataagatcatatttataaagtgcttaatacacacctgccaataaatggtcaacatgattatggttagaataaggattct

SEQ ID NO: 17693 - DNA, 201 bp, Homo sapiens
taccattctccattttgctcaccactgaggcatatgtacaaatccaaagaccctcttttgttacacgtgaaactttattcttatttttttgtcaaaagaaaagtcctaagtttcccaaatccaaagcaaagtgaatgcttcaatattactttatccagagccacaggcaggagagaaaagttgtgaaaatcaattcaggaa

SEQ ID NO: 17694 - DNA, 201 bp, Homo sapiens
attgcccaggctggtcttgaactgctggctttaagcaattctcccaccctagcctcccaaagtgcatttcttaaattcttatatatgcctcagtttactcrtctgtataagagggtaaatagaacttacctcttatggttgtaacgataaataaataagataaagtatatatatgtgtatatatatatatcacttaaaaag

SEQ ID NO: 17695 - DNA, 201 bp, Homo sapiens
ataccattctccattttgctcaccactgaggcatatgtacaaatccaaagaccctcttttgttacacgtgaaactttattcttatttttttgtcaaaagaaaagtcctaagtttcccaaatccaaagcaaagtgaatgcttcaatattactttatccagagccacaggcaggagagaaaagttgtgaaaatcaattcagga

SEQ ID NO: 17696 - DNA, 201 bp, Homo sapiens
gctcaagggatcctcttgcctcagcctcccgaagagctggggctacaggcacatgccaccatgcctggctaatttttaatttttatttatttatttatttwttttgtagagacaggtcttgtcttattgcccaggctggtcttgaactgctggctttaagcaattctcccaccctagcctcccaaagtgcatttcttaaat

SEQ ID NO: 17697 - DNA, 201 bp, Homo sapiens
tttttaggtaatctggattcttgttatttcctatagacattttataagcaaaggtggaatacaacatgcttataatatggggaagaacagatcttggcaaatgggattgttttgaggccttgttctagggcactaaccaaaacaaactagatgaaaaatcatccacctctgtgaacgtttcagagtcaactgcctgttcta

SEQ ID NO: 17698 - DNA, 201 bp, Homo sapiens
cttcacaggtaccatccctatattctgcagtaggccgaagagatagccgttgagtcattagccccattgtacagatgaggaagctgcaagttagtgtggtygttaatggtccagaatctcactgctcttaagtttccaagccattcttatgattttaaactggaaggcagatcatcccctcatcatgactttctcccccat

SEQ ID NO: 17699 - DNA, 201 bp, Homo sapiens
tcaacctgcatcttttgtttctctttgttctggtgcctgttttcttctcttctacactcttttatagttatttctgtaaatgtcttttctattcaagaatrtgcatacattaagggaagagattgtattttcttcattggttttcactaaatagcctaacaccgtgcatttcacaaagaggcacaccatatctatggaaag

SEQ ID NO: 17700 - DNA, 201 bp, Homo sapiens
atagaaaggaaaagttggccgggcgtggtgactcatgcttgtaatcccagcaccttgggaggccaaggcgggcagatcacctgaggtcaggagttcgagaycaccctggccaacatagtgaaaccttgtctctactaaaaatacaaaaattagttgggtatggtggcaggcacctgtagtcccagctacttgggaggctga

SEQ ID NO: 17701 - DNA, 201 bp, Homo sapiens
cttggggaggcacatgatgtgagtcacacaattttcatgccagcccagagcgttgggtgccattacaaagccatgggtgtcttacatgaatgggagcctcrcggggggttgaagaggctgatctgatctgtggttcctcaattcagaggacatgagcttttgaaaataggcctttctaggtggattggcctgcatgtcata

SEQ ID NO: 17702 - DNA, 201 bp, Homo sapiens
gaagaccactagaggcaagtacttccttctccatttgatgatgaggaatctgaaggtaagaggcagcaagtaacttttctaaggtcacacagcctatcagrtatagagctgggttttgcattcaggtcaattgaacattgaaccctgaggacaggcagctggtaagtatcacagctgagattaaaacgcaagccatctaat

SEQ ID NO: 17703 - DNA, 201 bp, Homo sapiens
gtataaattttggtcttgatctgggcagcatatttttaacatctggatttttttgttttcttgttgtgtgtgtgtgtgtgtgtgtgtgtgtgtgtgtgtgtttaaatcactgtttaggctgggcatggtggctcatgcctgtaatctcagcactttgggagaccaaggtgggtggatggcctgaggtcaggagttcaagac

SEQ ID NO: 17704 - DNA, 201 bp, Homo sapiens
tggctccctcttctgtttccagtctcagctgagattttacatcctcagggaagccttccttgatatcccccagagaatatagagttggcctcccatatccrtgggttctggatccatggattcaaccaaagtcaaatggaaaatatcagaaaaaaaatctgtctgtgctttatatgagcagaattttttcttctcattatt

SEQ ID NO: 17705 - DNA, 201 bp, Homo sapiens
cctaaacaccaccagattctccctagccctccttccaaatcctggctccctcttctgtttccagtctcagctgagattttacatcctcagggaagccttcyttgatatcccccagagaatatagagttggcctcccatatccatgggttctggatccatggattcaaccaaagtcaaatggaaaatatcagaaaaaaaatc

SEQ ID NO: 17706 - DNA, 201 bp, Homo sapiens
catttatacatgtgtggtgaccacatctcatcttctagtgcaagctgctctggatagccatcttgggcatggctggctcagagaagtgagtggtcctaacrttgaatagagaaaggaaggagccacattggcagtacagttgtaaatcagagcctgaaggtgcaggtggttttgggaaatgagagttttctgaacctagag

SEQ ID NO: 17707 - DNA, 201 bp, Homo sapiens
aagcagtcacatttgttggttaactttggttaacccagaggtcaaaagcagtttctgtctagcacattagataacttttgaaacgtttgacatattgcagktagcattacaggaacatccacacttgtgataaaaggagttatttatgaggtagctgtggtttcaaatgtaaaggagaaaaaaaagtcctgcaaattatga

SEQ ID NO: 17708 - DNA, 201 bp, Homo sapiens
gatatattcatttgtatgtgtatttaaaggttaagtttttaagagctttgcaacacaaactattttcagtactaaactgaagatacttcccccactttcayctttaaaatgattcttttaatgaatgggagtagagagaagcagaaaattagtgtcctatcaggtgatttttccacttggtttgctcctatactttgactt

SEQ ID NO: 17709 - DNA, 201 bp, Homo sapiens
ggaattcccatggcagatcctataaataaaagtaagtggtagcccctgaccttctgtgctcttctaagggtcagcaacctgttggcacagggaaaactgghccttgacccatagtgattttcatactgttaatcaaattattttccaatgggctgagtactgtgcctgagcattcagtggtggattagacatagttatctt

SEQ ID NO: 17710 - DNA, 201 bp, Homo sapiens
aagtacaatcaaatatggctgttgtaaattctgggaattggcttggctaggattatatgcatatgcccagacagtgcttagagaaagtgaaaaaaaagacraaagttggtttgggcaagacctggcttctcatcctccatgtcttttctttcatgtcacaggcatctaacaattagaattactaattatttattcattcac

SEQ ID NO: 17711 - DNA, 201 bp, Homo sapiens
attctcacattgctataaagaaatacctgagacagggtaattgataaaaaaaggaagttcaattggctcacgtgtggttctgcaggctgtacagggagtakagcagcttctgcagaaggtgaacggagagcaagcttcttacatggcaggagcaagagagtgagtggggaagtgccacatgcttttaaacggccatgagaa

SEQ ID NO: 17712 - DNA, 201 bp, Homo sapiens
gccgcgctgctgctggccgcacgcggggctgctgcccaaggtaagaggcgcccgccggcccccgcccgcccagaccccctgacccgtggccacccttccgycgtccagccgggcgcgggacacgcaggaagcgccgcgctggctccggggcgcgtccggccacccgccacggggctcgccggcgccgccaggccagggttt

SEQ ID NO: 17713 - DNA, 201 bp, Homo sapiens
tatcttacagcagtattttttatattaataatggtaagaggaacagttacttttttacttagctattagttaattgagattattttaaaagctgtgtgacsttggaaaactgattaactaatacaggtatttataagatgtttggtctaaaataaggtatttaaactacctgagcctcagtttcctcatatagaaaaaata

SEQ ID NO: 17714 - DNA, 201 bp, Homo sapiens
gaaggactttggcatcagatggactaggctcactactgctctgccaggtcagcaaactacgtaacctctgagactggctttcctcacgtgtaaaatgggasccataatggtgcctaccatgacagagggggaaggaccatgggtagtgtttggcacagtgcctgggccatagttggttgttggtgtgtgatcgaagctaca

SEQ ID NO: 17715 - DNA, 201 bp, Homo sapiens
aagtcagaggttttaaatgtgatatcactgctgaaaaggccagagccatcagcgtagaaccagcatgtccttgctaattacaatacacaatcattgccttrtgttgatgcagtcatttgctcattcatcagctattaattgagttcctactatgtgctcaatgtgatgctcaatgtgagggacatggaggtgaaaagatga

SEQ ID NO: 17716 - DNA, 201 bp, Homo sapiens
gaatatgcagggcctcgtgtgagaatagtgattgcagtgaagtgagaactaagtgggatgaagcttcaaatgtggaagactgtaagcagagctaagatgtsgaggaaggagactcggtaggatagtgcttcagttagaaggagggatggccacgtttgttggttcacttttgagatgcagagcctattcctagggtaggct

SEQ ID NO: 17717 - DNA, 201 bp, Homo sapiens
ttagagggtcagaggaagaacatgagtgcctccttcataggcttattgtgaagagtcaatgaaataattcatggaacacactcagactgtgcatagtgagygctcagtgagtgttctgctatagttatgtagccagtgagaggcctgatcaggatttatctgcctctaaaacccatgtactcttgctcccctgtgcacttt

SEQ ID NO: 17718 - DNA, 201 bp, Homo sapiens
gaatctaggtattttgactctcagatgtatgctctttttgttatccttaaagtgtgattggggagacaccaatgagcagatgtggtaccacaggcaactayctctcccacaagtgaattataggaaagagttgtggaaaaaatgctgtgggaacatggggaagaatacattaattctcaggggattagagggtcagaggaa

SEQ ID NO: 17719 - DNA, 201 bp, Homo sapiens
accagttatgtcaggggtcgatctttaagtaccaggcttaggtcaggcaggcccaggcctggtttcgggtctggttccttggtttcaggtctggttcctargtgccgggctacctgcctttaatttcgcttctctttccttttctgagtataaaacaatataaaacaatatgagagggtctgtctctcttctctcaccata

SEQ ID NO: 17720 - DNA, 201 bp, Homo sapiens
ttttgggtgtgttttattatagtagtggttggagtaggggtccccaaaaagtaaggattaagggagtgaggatctttcctttatgaaaatggtatggaccmgtgtcatttaatggagggttttggtggttaggaggacaggctactgggtgtgagttcagggtctaccatgttttagctggatgacataagaaattgccta

SEQ ID NO: 17721 - DNA, 201 bp, Homo sapiens
accagcatgagatcaaggtagagaaactcaattatctttgtagaaacatttctactttgaaatagaaatagaatgatctaagctgaaatagatttttttgkgtgtgttttattatagtagtggttggagtaggggtccccaaaaagtaaggattaagggagtgaggatctttcctttatgaaaatggtatggaccagtgtc

SEQ ID NO: 17722 - DNA, 201 bp, Homo sapiens
ctctgtgggtctagcctctgctgactttgctcctcagcaccaacctattcatctttcatccttccctctttccagaaaacctaaaggtggagccctgtctrctccatctgctgccctggttactctcatccagggcattcattctctttttataagtactgtgaggccttttcacaatttgttactactgcatagttatgt

SEQ ID NO: 17723 - DNA, 201 bp, Homo sapiens
attaattgacatatagcatgcagaaacggatgtagtttttaagataataaaatgtgaaaacactagttaagttgaggatggaaaaagctgtcacaagatayctataatctgttgtttgggtcatggcaaagcatacatggtaatagacatgcaccatcatggaaaagctcatcctattgacgttctagcttgaccttagga

SEQ ID NO: 17724 - DNA, 201 bp, Homo sapiens
tatcagctcctatatatttattagacattttgggggggaaacagtgaatgaatgagactggtcccatttgatgtatgctgtcaaagtttataaactatctratgaattagtaagaacatatcaaacaagacaaagaggctcattgttaatgtgcgcaggtgaggctttgcaggctgcttgtgggtgagggtaaaagttttc

SEQ ID NO: 17725 - DNA, 201 bp, Homo sapiens
gttttctgaattgaaagtaaaaaaaatcgtttttctgttggatgtcgggcaccataatagatgcttacatttttttttttggataaaggaggtttttttttaaaaaaaggaaagaataaaagaagaagaaaccatttgctataataaagatctgcaaagcatggtaccgggttccaggatggtaggtgttcaagaaacaca

SEQ ID NO: 17726 - DNA, 201 bp, Homo sapiens
tgttatagaggaggaaactgaggcccagataaacaaggatcttgctcaaggtctcatagccagatgttggcagagttggaagagccatgcccttgactcayagtcccaggctcttttcctcaggatttccccaggatgtaaggtggcccctgtgcttcatagacctggcagtttttcctttgccagcttgtgtctggactt

SEQ ID NO: 17727 - DNA, 201 bp, Homo sapiens
tagtacagcaggtaaatagatgttttctgaattgaaagtaaaaaaaatcgtttttctgttggatgtcgggcaccataatagatgcttacatttttttttttggataaaggaggtttttttttaaaaaaaggaaagaataaaagaagaagaaaccatttgctataataaagatctgcaaagcatggtaccgggttccaggat

SEQ ID NO: 17728 - DNA, 201 bp, Homo sapiens
caatgcaaccgagcagattgattcctccaaacgtgaaccctcatatgttagatcagtggtccccaacctttttggcaccagggactagtttcatgaaaggyagttcttccacagtggtggggggatgcttttggaatgatccaagcacattacgtttattttgcactctctattattattacattgtagtaaataatgaaa

SEQ ID NO: 17729 - DNA, 201 bp, Homo sapiens
tgtataaattttggtcttgatctgggcagcatatttttaacatctggatttttttgttttcttgttgtgtgtgtgtgtgtgtgtgtgtgtgtgtgtgtgtgtttaaatcactgtttaggctgggcatggtggctcatgcctgtaatctcagcactttgggagaccaaggtgggtggatggcctgaggtcaggagttcaaga

SEQ ID NO: 17730 - DNA, 201 bp, Homo sapiens
taaatggaggtaagaatagaaggctattctttcccttctccgggaaaagtgcctgacttgtgttttggttatggtgtgtttttttttttgaggagagtcakaaaaggcaccaaggtaacctggagacataaaatagcatagtgacccaggaaatgggctctggaaccagactgccttcatgtgaatccaagcgctgctgct

SEQ ID NO: 17731 - DNA, 201 bp, Homo sapiens
atgtataaattttggtcttgatctgggcagcatatttttaacatctggatttttttgttttcttgttgtgtgtgtgtgtgtgtgtgtgtgtgtgtgtgtgtgtttaaatcactgtttaggctgggcatggtggctcatgcctgtaatctcagcactttgggagaccaaggtgggtggatggcctgaggtcaggagttcaag

SEQ ID NO: 17732 - DNA, 201 bp, Homo sapiens
caaacaactcatagacctggggaggagacaggggattatacaaattaactcaatgtggaaagtgctggtaaatggaggtaagaatagaaggctattctttmccttctccgggaaaagtgcctgacttgtgttttggttatggtgtgtttttttttttgaggagagtcagaaaaggcaccaaggtaacctggagacataaaa

SEQ ID NO: 17733 - DNA, 201 bp, Homo sapiens
gatgtataaattttggtcttgatctgggcagcatatttttaacatctggatttttttgttttcttgttgtgtgtgtgtgtgtgtgtgtgtgtgtgtgtgtgtgtttaaatcactgtttaggctgggcatggtggctcatgcctgtaatctcagcactttgggagaccaaggtgggtggatggcctgaggtcaggagttcaa

SEQ ID NO: 17734 - DNA, 201 bp, Homo sapiens
gtctggacacagtgattgattagaacaatcttccttgaggatagaaaggggataatggtagatgtaccacccattttctgtacctagtcttctgagagacyggcaggcagttgcagctccatatgttaggtactataggaggggatcatataggatactctgggaacacctaattctgcacatggagcagaaaatagcatc

SEQ ID NO: 17735 - DNA, 201 bp, Homo sapiens
gatatgacagtgaaacaggcacaaattctgctctattgcttgtggagcttacattcttgagggggaacccaaggatgcttaagaagagacagaaatcatcacaatgagaagaaagagagtgatgtggtagaggttgctactttacatgggttgattagaggaggcctctccgataaggtgacatttgggcaaaggcttgaa

SEQ ID NO: 17736 - DNA, 201 bp, Homo sapiens
ttccttgtccaggtcaaacagccccaatttctccatgatctttggacattgcttccacattttctctccttcttgctctccacagggcaagtttcatttcrtcaatttttttttgtaaaatactgtaaagatatctgaatgaagtagaccaggtataatctgataagcatagagtatggtggagcatttcttttaaggttc

SEQ ID NO: 17737 - DNA, 201 bp, Homo sapiens
ggatatgacagtgaaacaggcacaaattctgctctattgcttgtggagcttacattcttgagggggaacccaaggatgcttaagaagagacagaaatcatcacaatgagaagaaagagagtgatgtggtagaggttgctactttacatgggttgattagaggaggcctctccgataaggtgacatttgggcaaaggcttga

SEQ ID NO: 17738 - DNA, 201 bp, Homo sapiens
tcctatctagaaggatgtcttgaaatagcagaatatttttattatgttttttttccaagtaatacatggttcaagaaaaaagaaattttaaaaagccacactaatagcaaaactaaaataagcatgaatcttaattttaacaaagattacagtagtccatgggaaggattgtctgcccattgcagtgggtttgattggttt

SEQ ID NO: 17739 - DNA, 201 bp, Homo sapiens
aggatatgacagtgaaacaggcacaaattctgctctattgcttgtggagcttacattcttgagggggaacccaaggatgcttaagaagagacagaaatcatcacaatgagaagaaagagagtgatgtggtagaggttgctactttacatgggttgattagaggaggcctctccgataaggtgacatttgggcaaaggcttg

SEQ ID NO: 17740 - DNA, 201 bp, Homo sapiens
atcctatctagaaggatgtcttgaaatagcagaatatttttattatgttttttttccaagtaatacatggttcaagaaaaaagaaattttaaaaagccacactaatagcaaaactaaaataagcatgaatcttaattttaacaaagattacagtagtccatgggaaggattgtctgcccattgcagtgggtttgattggtt

SEQ ID NO: 17741 - DNA, 201 bp, Homo sapiens
actgtcttacagttttgaaagtcagaagtccaaaatgggcctcactggcctaaaattaaggttccttttggaggctcaaggggagaatccattttttttttgtcatttccaggctttagaggtgacttgcatttcttggctagcagccctcttccaaattcagtcagcaacagacagtggaatccttctgaacactgcatc

SEQ ID NO: 17742 - DNA, 201 bp, Homo sapiens
attatcctatctagaaggatgtcttgaaatagcagaatatttttattatgttttttttccaagtaatacatggttcaagaaaaaagaaattttaaaaagcyacactaatagcaaaactaaaataagcatgaatcttaattttaacaaagattacagtagtccatgggaaggattgtctgcccattgcagtgggtttgattg

SEQ ID NO: 17743 - DNA, 201 bp, Homo sapiens
tcttccacagtggttgaactaatttacactcccaccaacagtgtatacgcattcctttttttctccacaacctcaccagcatctgtttttttttttttaayaatagccatgaaataaagtcttgatgatgataatgatgatgatgtcaaggattctgacaatgtaaacaatgatgacaatggtacagtcttatgggtggta

SEQ ID NO: 17744 - DNA, 201 bp, Homo sapiens
ctgtcttccacagtggttgaactaatttacactcccaccaacagtgtatacgcattcctttttttctccacaacctcaccagcatctgtttttttttttttaataatagccatgaaataaagtcttgatgatgataatgatgatgatgtcaaggattctgacaatgtaaacaatgatgacaatggtacagtcttatgggtg

SEQ ID NO: 17745 - DNA, 201 bp, Homo sapiens
actgtcttccacagtggttgaactaatttacactcccaccaacagtgtatacgcattcctttttttctccacaacctcaccagcatctgtttttttttttttaataatagccatgaaataaagtcttgatgatgataatgatgatgatgtcaaggattctgacaatgtaaacaatgatgacaatggtacagtcttatgggt

SEQ ID NO: 17746 - DNA, 201 bp, Homo sapiens
ccaacagatgttttaagaactgagcaaaagcccaattccttagcccagtcttttgtatattgtgcccaactgtgccccctagtgactatttagggtatcgsgcagtcagagcttgctgtgccctgtatgtatgtggtgcatcagctaatgtctgtctatgctttctttcagagatgagtatgaagaagatggattctgtca

SEQ ID NO: 17747 - DNA, 201 bp, Homo sapiens
ggtatggtggcacatgcttgtaatcccagcaacttgggaggctgagacaggagaatcgcttgaacccaggaggcagaggttgcagtgagccaagatcatamcactgtattccaccctgggagacagagtgagactgtctcaaaaaaaaaaaaaaaaaaaaaaagaaatacattttgttttattgcaggcaggatacatttc

SEQ ID NO: 17748 - DNA, 201 bp, Homo sapiens
atagtttctgctcaatacttagctataattattagtttatttaaattgccttaatcattcatgcaataagcaaatgtcccccctgtaggctgttctccagwtctgggatacagacatgggtaaagcttggagcttgtgtataagtagcggggtcagtcgcctgccagttcactggagagatgccatgcttggagggtggac

SEQ ID NO: 17749 - DNA, 201 bp, Homo sapiens
tttgttctggaatgtgtttaagttgtttagaagcagtttgatccttttggaaagtcttgctttgaagatttggaagactgaaatagttgtacttagtctayaactaattattctccatgacagtgaaaacactcttctatgtgctctcctcgtggcgtggggaatcatgaggttttccaatctggaaatatctttttggat

SEQ ID NO: 17750 - DNA, 201 bp, Homo sapiens
gttatatttccctgctttatgaatgcctggtaatttttgattagatgccagacattgtgaattttccttgttgggtactggctatttttgtattcctacaratatttttgaactttgttctggaatgtgtttaagttgtttagaagcagtttgatccttttggaaagtcttgctttgaagatttggaagactgaaatagtt

SEQ ID NO: 17751 - DNA, 201 bp, Homo sapiens
cattatcctatctagaaggatgtcttgaaatagcagaatatttttattatgttttttttccaagtaatacatggttcaagaaaaaagaaattttaaaaagccacactaatagcaaaactaaaataagcatgaatcttaattttaacaaagattacagtagtccatgggaaggattgtctgcccattgcagtgggtttgatt

SEQ ID NO: 17752 - DNA, 201 bp, Homo sapiens
aaggtgctccttggagcattcagattttggatttttggattaggaatgctcagctggtataaacgcatatattccagaatcttgaagacatctgaaacatktctgatctcaagcattttgggtaagggatactcaacctgtatcttgtatatagtagagtgagagtctagcttatgctttgctcttatatcttgtttcttt

SEQ ID NO: 17753 - DNA, 201 bp, Homo sapiens
tcattatcctatctagaaggatgtcttgaaatagcagaatatttttattatgttttttttccaagtaatacatggttcaagaaaaaagaaattttaaaaagccacactaatagcaaaactaaaataagcatgaatcttaattttaacaaagattacagtagtccatgggaaggattgtctgcccattgcagtgggtttgat

SEQ ID NO: 17754 - DNA, 201 bp, Homo sapiens
aagggaaaagatgtctaatatgatttaacctcaagacactaacaatgattacacctatcccctgctcccagcatcatagtcaccaactgtggcaacagctrctgctaatgttttttgaactcctgtggtatgcctggtgatgtactttatatcagctagttcattctcaaaacttgagaacacactacatataccctagta

SEQ ID NO: 17755 - DNA, 201 bp, Homo sapiens
caagattgcgccactgcactccagcctgagctacagagcgagactccatctcaaaaaaaaaaaaaaaaaaaaaaaaaaaaagaattagatggacctgatcytaatgctcgttctgatgctcagatcaaggggaaaatgaggaggctttttaggcctcggtaaatcagagttaacaacacccagttaacaagcccagtgtca

SEQ ID NO: 17756 - DNA, 201 bp, Homo sapiens
ttcattatcctatctagaaggatgtcttgaaatagcagaatatttttattatgttttttttccaagtaatacatggttcaagaaaaaagaaattttaaaaagccacactaatagcaaaactaaaataagcatgaatcttaattttaacaaagattacagtagtccatgggaaggattgtctgcccattgcagtgggtttga

SEQ ID NO: 17757 - DNA, 201 bp, Homo sapiens
agctgctaatgaaaaagcagccatggcaggtcaggacgaatcaagcaaaaaggaggacattctataattaaagattcagagaaatactagcgcagtttttkttgttgttgttgttgttttgtttttttgtttttgccaacgctatgacaattgctctttctacctgttcccgtgggttttctgtcattttatcactcatta

SEQ ID NO: 17758 - DNA, 201 bp, Homo sapiens
cgtcagccagatattaagcctagtatacattagttatttttcctgatcctctccctcctcccactctccaccctccaataggccccactgtgtgttgttcycctccatgtgtccatgtgttctcatcatttagctcctacttacaagtgagaacatgtggtatctgcttttctgttcctgcattggtttgctaaggataat

SEQ ID NO: 17759 - DNA, 201 bp, Homo sapiens
tacgatgtccttttctctctttgaagctttccaaatctttcaatcttttttttttttgcctccaaattttggaacctcaaaatttcaaggtttttttttttaatttttttattttttttccttttgttttaccttctcctttctggctttgttcagaaatcaggtatcaataagctttttattactcatccaatctgtgag

SEQ ID NO: 17760 - DNA, 201 bp, Homo sapiens
tttaattttttactttaaatttcaggggtacttgtgcaggatgtgcagggtttttacataggtaaatgtgtgtcatggggtttgttgtacagattatttcrtcagccagatattaagcctagtatacattagttatttttcctgatcctctccctcctcccactctccaccctccaataggccccactgtgtgttgttccc

SEQ ID NO: 17761 - DNA, 201 bp, Homo sapiens
aatgtcctcccaccccttggaactctgctgctgtggagcagttgtacgatgtccttttctctctttgaagctttccaaatctttcaatcttttttttttttgcctccaaattttggaacctcaaaatttcaaggtttttttttttaatttttttattttttttccttttgttttaccttctcctttctggctttgttcaga

SEQ ID NO: 17762 - DNA, 201 bp, Homo sapiens
aaagtcataggggaggttcctgggtgccataacatttgatatctttatttaggtggtagttacagagctgtgttcactttgcaaaaattaattgaattctrtagttatcatttgtgcagaattatgtatgtatattatacttcaattgtaaaagcttaccccaaaaatatctgaattattagaaattagacataaaactta

SEQ ID NO: 17763 - DNA, 201 bp, Homo sapiens
tcaacactgccattgtattgtattgtattgtattgtattgtattgtattgtattgtattgtattgtattgtattgtattgtattgtattgtattgtattgyatcatagatggcgatacttgttcagttaaccaaatggtcaactttgcaaaaatagcagaagtggacatctcatgatgatttaatacaggacacaaaaatc

SEQ ID NO: 17764 - DNA, 201 bp, Homo sapiens
aaatcaaaataatagttacctcttgaagggaatgaccaggaaagtcataggggaggttcctgggtgccataacatttgatatctttatttaggtggtagtwacagagctgtgttcactttgcaaaaattaattgaattctatagttatcatttgtgcagaattatgtatgtatattatacttcaattgtaaaagcttaccc

SEQ ID NO: 17765 - DNA, 201 bp, Homo sapiens
ttcaacactgccattgtattgtattgtattgtattgtattgtattgtattgtattgtattgtattgtattgtattgtattgtattgtattgtattgtattgtatcatagatggcgatacttgttcagttaaccaaatggtcaactttgcaaaaatagcagaagtggacatctcatgatgatttaatacaggacacaaaaat

SEQ ID NO: 17766 - DNA, 201 bp, Homo sapiens
gcaatcagttattccagtcctctttgtttatactgaaacaagtcactataaaatctcctgttcacatggataaggtacagtatccagagaaagccaatctkctctagccttattgattttgtctcttagacttctccctgctggacagaaaatgtaaaataggaacgttcaaaataaataagccagggatactaagttcaa

SEQ ID NO: 17767 - DNA, 201 bp, Homo sapiens
attcaacactgccattgtattgtattgtattgtattgtattgtattgtattgtattgtattgtattgtattgtattgtattgtattgtattgtattgtattgtatcatagatggcgatacttgttcagttaaccaaatggtcaactttgcaaaaatagcagaagtggacatctcatgatgatttaatacaggacacaaaaa

SEQ ID NO: 17768 - DNA, 201 bp, Homo sapiens
ctgccatgattggagtcctcagcaatcagttattccagtcctctttgtttatactgaaacaagtcactataaaatctcctgttcacatggataaggtacastatccagagaaagccaatctgctctagccttattgattttgtctcttagacttctccctgctggacagaaaatgtaaaataggaacgttcaaaataaata

SEQ ID NO: 17769 - DNA, 201 bp, Homo sapiens
ctcccattttacagatgagtttgcttggagtggcaaagggcctactgaaggtcacgtagataatgaaaaggcattattcagaggtttctgacttggtgccytgtggcagaccgtcttctactcaggtgattcctttctgtctatctataggcatgtagacacaatcattactggtgcaaccagcactgactacgacggcct

SEQ ID NO: 17770 - DNA, 201 bp, Homo sapiens
gcctagccaacatggtgaaaccctgtctctactaaaaatacacaaaattagccaggtatggtggcacatgcttgtaatcccagcaacttgggaggctgagrcaggagaatcgcttgaacccaggaggcagaggttgcagtgagccaagatcataccactgtattccaccctgggagacagagtgagactgtctcaaaaaaa

SEQ ID NO: 17771 - DNA, 201 bp, Homo sapiens
taagggtgagccaccgcgccaggcctcaaagcagtacattaagaactgttcgtgtaaataagctctgttgagggacattaactggggaataaagtggctggaaaggacacattgaactcctttttcatcttctctgaaaatgttaataataactgagacacatctctgtgtctatatctatacttttcataagtgaggaaa

SEQ ID NO: 17772 - DNA, 201 bp, Homo sapiens
gctactcagcaggttgagatggggggattgcttgagcctgggagatcgaggctgcagtgagccatgattgcaccgttgcactccagcctaggtgacagcgygagacactgtcaaaaaaaaaaaaaaaaaaaaaaaagcggcaaaatataacaccccccacacacatacacaaacacacatttatatgcttatagtatgatc

SEQ ID NO: 17773 - DNA, 201 bp, Homo sapiens
gatacgatcttaagagttgtacctgcatgacgcctgatgtctctgaggttaaaggcaagtccaacaaggagagtgagaggtgacagagtattatagaggcsttggtgaaaggagtaaaagtttggagtcattgttgagtacgatgatgaggtgctgataacacaaactcttgatttcgaggaaggagtgttcaaaggagga

SEQ ID NO: 17774 - DNA, 201 bp, Homo sapiens
  misc_feature (1)...(201): n = A,T,C or G, or insertion/deletion polymorphism (see Tables 1-2)
gttgtacctgcatgacgcctgatgtctctgaggttaaaggcaagtccaacaaggagagtgagaggtgacagagtattatagaggccttggtgaaaggagtnaaagtttggagtcattgttgagtacgatgatgaggtgctgataacacaaactcttgatttcgaggaaggagtgttcaaaggaggaggaggaaaatgactg

SEQ ID NO: 17775 - DNA, 201 bp, Homo sapiens
gtggcgaaaggtaatgaagggaagacttaataggtgatttcaggttcagacatctgaatgagggcatggacctattccatgcagcttcaggagatagaacraggtccaacaagtggtcattcctaggagacagattctctacccccaaacattaaacattaaaacatgtaagtaagtgtacattaaaaacattaaaatgtg

SEQ ID NO: 17776 - DNA, 201 bp, Homo sapiens
aatttaggaattgcatgttgatctaagaagttattttagttgctgtgcagtaagtatgctattgtatgaccatttcacaattaatgtacccattctcctgycttcatttttttgtgtattataaacaattttgccatgaaaactttgacttatctttctgtaaaaatgtgtgaagtttttctaggccaaatacctaggaat

SEQ ID NO: 17777 - DNA, 201 bp, Homo sapiens
aaattggaaataccctagagactgtcaaagagggatgtgaaaatatttcagaaatattatttcatgcctcctgactacaggatggtggcgaggactccttygtctgaggcacttagagctgttgaaggtgtgttgcctggaaatgcacctcatgggaagacttgcaggtgtgagcggttgcctaggaatgtcatttcagga

SEQ ID NO: 17778 - DNA, 201 bp, Homo sapiens
agacaaaagtgacaaaacccatttcagatacaaatattttttatttgtttcagatttttaaaagaaataaaacattatagatacaacaaaagctcccagtrtacccctcctaaatcctgtctcttttcttctccagagataatctgtcctttaaatgtgatgtcttttcattcccatgcatgtttttatatttttgctctc

SEQ ID NO: 17779 - DNA, 201 bp, Homo sapiens
gcattatttctgggtgtgcctgtgaagatttccagaagaaattagcatttgaatcagtagactgagtacagaatatctgccctcagatattcatgcctcgrgtatgcatcatccaatctgcagagggcccggtagaacagaaagatggaagatgggtgaatttgatgtcaccttgagctaggacacttatcttcttctgtc

SEQ ID NO: 17780 - DNA, 201 bp, Homo sapiens
aaaagcagacaaaagtgacaaaacccatttcagatacaaatattttttatttgtttcagatttttaaaagaaataaaacattatagatacaacaaaagctyccagtgtacccctcctaaatcctgtctcttttcttctccagagataatctgtcctttaaatgtgatgtcttttcattcccatgcatgtttttatattttt

SEQ ID NO: 17781 - DNA, 201 bp, Homo sapiens
tatgcatcatccaatctgcagagggcccggtagaacagaaagatggaagatgggtgaatttgatgtcaccttgagctaggacacttatcttcttctgtctrtggacatcaaagatcctagttcttgggcctttggacgctgggacttacacctgtgctaccctaatcctggttctcagacctttggactcagactgcatta

SEQ ID NO: 17782 - DNA, 201 bp, Homo sapiens
taaaaataactaaagtgctccacaacagtggatggatttttgtttttcctaccatctcagattcctggatatctagaccaatccattgctaagccatcgtsctttgttttcttttttaaactttgaaatgttttaagtgtacagaaaagcagacaaaagtgacaaaacccatttcagatacaaatattttttatttgtttc

SEQ ID NO: 17783 - DNA, 201 bp, Homo sapiens
ctgaaggatcacttgagctcaggagtttgagaccagccttggcaacatagtgacacctcatctctacaaaaaataaaaaaagttggcggggtgtggggtgkgcgcctgtggtcccagctactccagagactgagttgggaaggtcacttgagcccaggacgtcaaggctgcagtgagcagtgatggtaccccacactacag

SEQ ID NO: 17784 - DNA, 201 bp, Homo sapiens
gcctttgaatctgtatttaatggctaaagcagatggttataatttctgacttggtgtggccaccttattaataaaaaagaactgatggaagcaaaaaggcrtcttcatttttaactccagaagcataacacaaatgctttccagtctttctttgtgtggagagcagaccaagtgactgcaataagatcctgttacacattt

SEQ ID NO: 17785 - DNA, 201 bp, Homo sapiens
acaattgaataggggaaaaggtacaaggaacggttatactatggtgcaaagatagatgtgtacgggggagctgggcacttcgctgcatctgggagggcagrggaggctctgaaggagatgataacaaattggatctgaaaagatgagttaagaatctgtctgacccagaggtttcatgggtctttaagcacattaaggaga

SEQ ID NO: 17786 - DNA, 201 bp, Homo sapiens
taaaatacagctgcagtgattccactattgtttcctttgacagagctgtggttttcctacacacctttgtttgaggctttgattcagatatactccctgckgctgataagtcccatgtgtctactcatcggttagatggtgcatggggatgattcttctgtgatgtggagaatgaaagatcgtgtcttcaagttatgtgag

SEQ ID NO: 17787 - DNA, 201 bp, Homo sapiens
tttcccaaaagcacaggcccttcagtggccagtgaaactgatgtgtttggatttatcaagtagctttgccaaggaccagctggcagaagaaagcaaaaagmagcacggcagatttaaagatgagttcatttctatggtgtcagccgcagagggtgcggtttccctgtctctagagtggtggacacagtctaccactgtgtt

SEQ ID NO: 17788 - DNA, 201 bp, Homo sapiens
ggtcaagagttcgagaccagcctggccaacacggtaaaaccccatctctactaaaaatacacacacacacacacacacacacacacacacacacacacacatacacacacacaaaatagccaggtgtggtggcacgagcctgtaatcccagctactcaagagggtgaggtaggagaatcgcttggacctgggaggtggagg

SEQ ID NO: 17789 - DNA, 201 bp, Homo sapiens
tggcatatcattagcctttcttgaagtcattgattcacagactgggctgatagtgaattttgaggtgctctgtcaatctcttctccctgtcattttcccaygaaggaaccaagtctcagagttgagatcattaaccgtgaacatttaccagctgttaaatagatatgttctttgataactgttgaaaaattttacaatttt

SEQ ID NO: 17790 - DNA, 201 bp, Homo sapiens
aggtcaagagttcgagaccagcctggccaacacggtaaaaccccatctctactaaaaatacacacacacacacacacacacacacacacacacacacacamatacacacacacaaaatagccaggtgtggtggcacgagcctgtaatcccagctactcaagagggtgaggtaggagaatcgcttggacctgggaggtggag

SEQ ID NO: 17791 - DNA, 201 bp, Homo sapiens
ataagaagaatggaggctgggcgcagtggctcacacctgtaatcccagcactttgggaggccgaggtgggcagatcacgaggtcaagagttcgagaccagsctggccaacacggtaaaaccccatctctactaaaaatacacacacacacacacacacacacacacacacacacacacacatacacacacacaaaatagcc

SEQ ID NO: 17792 - DNA, 201 bp, Homo sapiens
aacctccgcctccctggttcaagtgattctcctgcctcagcctcccaagtagctgggactataggcgcatgccaccacgccccactaatttttttttttttctgtatttttagtagagacggcgtttcaccatgtcggccaggatggtcttgatctcttgacctcgtgacccgcccacctcggcctcccaaagtgctggga

SEQ ID NO: 17793 - DNA, 201 bp, Homo sapiens
caacctccgcctccctggttcaagtgattctcctgcctcagcctcccaagtagctgggactataggcgcatgccaccacgccccactaatttttttttttttctgtatttttagtagagacggcgtttcaccatgtcggccaggatggtcttgatctcttgacctcgtgacccgcccacctcggcctcccaaagtgctggg

SEQ ID NO: 17794 - DNA, 201 bp, Homo sapiens
tttgctttttgtttgtttgtttgtttgagacagaatcttgctctgtctccaagctggagtgcagtggcacgatctaggctcactgcaacctccgtctccckagttcaatcaattgtcctgcctcagcctcctgagtagctgggactataggcgtgtgccaccacgcccagctattttttgtatttttagtagagacggggt

SEQ ID NO: 17795 - DNA, 201 bp, Homo sapiens
gcatgttgatctaagaagttattttagttgctgtgcagtaagtatgctattgtatgaccatttcacaattaatgtacccattctcctgccttcatttttttgtgtattataaacaattttgccatgaaaactttgacttatctttctgtaaaaatgtgtgaagtttttctaggccaaatacctaggaatagaatagagtat

SEQ ID NO: 17796 - DNA, 201 bp, Homo sapiens
ctgctgtgccccagatagttgtatgtgttttacctgctttaaaaatctcttttcggatagactggatatttgtagtctccatgtcacagatgaggaatttrtttggtgtagagatttagtaatttataaaagatcatgaagcttagatggagcctgaacttatgtttttatactcagcaccccctctagtatgtgaaactg

SEQ ID NO: 17797 - DNA, 201 bp, Homo sapiens
aggagctgttctgtaatgttttggtaaaagaatgtctgtctccatatcatctatctatctatctatctatctatctatctatctatctatctatctatctatctaatttggcatctatttatccattaatctgtctgtaatacaaatattccaaacatttaaaaagtataagaaggctctgtagtgcaatggatagcacat

SEQ ID NO: 17798 - DNA, 201 bp, Homo sapiens
caggttcaaccaatcctcgtgcatcagcctcccaagtagcttggactacagacacacaccagcatgcccagctaatttttgtatttttttgtagagaacasggtctcactttgttgcctagactggtctcaaactcgtgggctcaagcagtcctccgctctgccttccaaagtgctgggattataggtgtgagttacctca

SEQ ID NO: 17799 - DNA, 201 bp, Homo sapiens
aggaaaaggtttgttattcacagtggaacaggggaaatgtaagaagatgatacggtttggttgtttccctacccaaatctcatcctgaattgtagctcccrtaattctcacgtgttgtggcagagacctggtgggagataattgaatcgtcggggcagtttcccccatactgttctcgtcataatgaataagtctcatgaa

SEQ ID NO: 17800 - DNA, 201 bp, Homo sapiens
tgttaattaccccccaaactccttcaacagacaaagctctttattctgctgactttgaagtataatttggggatgccttgagaaggtcaacgcgacaggcyagcttttgccctgcagtgggctgtgcaggtgtgtgctagctgttggcttccaggcctgttttattccagccctggcagagtttgcaggaatgtcatgaga

SEQ ID NO: 17801 - DNA, 201 bp, Homo sapiens
tttgtacagtggtctttaggcgttataactctgtccaggtctctcaacacttacagctatcaaggaaactttattattgatattctacagaaaaaatcacrattactgcaagtctgtaagctcttaagtatttttcccattgaaattattgtttcattaatataatatattcaaccttgtgctatcttgggtatgcaactc

SEQ ID NO: 17802 - DNA, 201 bp, Homo sapiens
agcctgtagagtgagaagagatgagagccaaggcttgaaccctgggaaatactgacatttagggaatggatgaggaagacaagccagagaagggaataagytcgtggcagtaatccatatgagataataacctatatggattaccatggtggcgttgggacatgcaagggaatgataaagctgataggcattttaaaataa

SEQ ID NO: 17803 - DNA, 201 bp, Homo sapiens
aaacaacttgaagactcatagtttcagagcatcatttatctttagtaaatacatttcatagtgattgccgatagttagtggttctgaagattagtctgggrtcaattcaggccagctgggatcaccctgtgcctttcaacccgcttggccttgcttagtatgtaagtcaggaacccactcctagaacttgaacaatggtaa

SEQ ID NO: 17804 - DNA, 201 bp, Homo sapiens
ttattattactaaataatgctaactgactcatacatcctaccccaaacaacttgaagactcatagtttcagagcatcatttatctttagtaaatacatttmatagtgattgccgatagttagtggttctgaagattagtctggggtcaattcaggccagctgggatcaccctgtgcctttcaacccgcttggccttgctta

SEQ ID NO: 17805 - DNA, 201 bp, Homo sapiens
ttcatattttaaaatattttatctgtttttattatcattttatctgagaagctgaacacgtggttatctaaaggaatggatcttgaagttgagaacaaaaytccccagaatcagcacaatcacttaatgagcttgcgaattgaaattatctttgctacagcccaagaactgagtggtaattagtgtccagggacacgtggg

SEQ ID NO: 17806 - DNA, 201 bp, Homo sapiens
acctctggcttcagttagctatttacattcctctatttttatataaattgtgctatattagcatatatttcacactgtgacctagtgtttcccagatcctytaagccaggctatttgtacattagtcaacgtcaatggaagtaaaatagcaaattgagtacagactgtagccctgctgcattgcccactctgtcatgctga

SEQ ID NO: 17807 - DNA, 201 bp, Homo sapiens
cttttttaatactaacatatcatagatacttaatatatggagcattgaaatagatagcagccaattttggcattcttgcaggttgtcccactgtctgagcmagagaatcttgattgggatttttttttttttcttttttggagacagagtctcgctctgttgccaggctggagtacagtggcgcagtctcggctcactgca

SEQ ID NO: 17808 - DNA, 201 bp, Homo sapiens
ggggtgcatgactaggttctgcatagcacagagaagggaatgatgtctgcttagaagaatcaaagaccataagcaagaggagataatttgccctccctctrcctcccttttaaaaattcatttatgtctttctgtatttctcttgttcctatagtcaataaacacttattcaatacaaactatattcctttcactgaaatt

SEQ ID NO: 17809 - DNA, 201 bp, Homo sapiens
agtaagatttatgcagtttaagaactgtggaaacaatcttgattttttttttttattccaggaggatttttgttaagattagcagaagccatgctctagtwtgagaaaaatacacatggtattattgagttaacaggcatgatgtgtatataatacttactatggagagggcttctttctataattaaggcagaatgccca

SEQ ID NO: 17810 - DNA, 201 bp, Homo sapiens
aggatttttgttaagattagcagaagccatgctctagtttgagaaaaatacacatggtattattgagttaacaggcatgatgtgtatataatacttactayggagagggcttctttctataattaaggcagaatgcccatcccttctcattgtggatctggagaggacccttagctgggatgactaaaggaggagcctctg

SEQ ID NO: 17811 - DNA, 201 bp, Homo sapiens
tacaatagtatttggagtatatctctgtagtctgtcttccttggctttgtgtctttgcttctctttctctttcaatgaatgaggtcatcttttatcactcwtctggcaatctgctttcttctccttaacatcaatagatatttattaaaagtgatgatgctggagtatttcttttaggttcctgtttcaatccttgaccca

SEQ ID NO: 17812 - DNA, 201 bp, Homo sapiens
aggtatcattttttaactttgaaataaaaactgaaatatttggaaaatactgataaacgaacaaacaaaaaaacctgaactaaccctactagtagtagtgrtaactactatacaatagtatttggagtatatctctgtagtctgtcttccttggctttgtgtctttgcttctctttctctttcaatgaatgaggtcatctt

SEQ ID NO: 17813 - DNA, 201 bp, Homo sapiens
tttctttctattttgtcttgccttttttatttgatttgatactgagtgttttgtgctcagaaaataatacccagtggtgtcttggagttggcatctgtgasattagaactatgacccctctaagttctggataccctctgttcagtaaaagggctcacaggtcgctagatggacttggaggtcctgatatccagcctcctc

SEQ ID NO: 17814 - DNA, 201 bp, Homo sapiens
tgccttttgaagtcttccagttgtcctcagcctggctcaaatcactctccttgaattcattgttacactagtgcaccctgctttgtgagttataatttaaygtgagcgtatctaattctctaatgagatggagactctttgggagtttatgtttttttccctgaaatgtttaatgtcatgcttttgaattaagaagggctt

SEQ ID NO: 17815 - DNA, 201 bp, Homo sapiens
ttaaaaaataaggatattttgttaaaaaataatataaatataccctttctgaagttgttttgatagctcctttgatagcaggtggaatttttaaacaatgkctttggtgcctggattgtcaggattttgcttggattctggtggcatttctgaaaatgtgactaatgacccctccagtgttctagaatctgtgttcagtaa

SEQ ID NO: 17816 - DNA, 201 bp, Homo sapiens
gcagaaagtgactttatcctgccttttgaagtcttccagttgtcctcagcctggctcaaatcactctccttgaattcattgttacactagtgcaccctgcwttgtgagttataatttaacgtgagcgtatctaattctctaatgagatggagactctttgggagtttatgtttttttccctgaaatgtttaatgtcatgct

SEQ ID NO: 17817 - DNA, 201 bp, Homo sapiens
ttctttctataattaaggcagaatgcccatcccttctcattgtggatctggagaggacccttagctgggatgactaaaggaggagcctctgttcttacctkatttggagtcctcttctcatcatgaaagatgtttgcgcatctttcatgccctgtacctttcttttcatttgccccctgcatttgggattggttgctttct

SEQ ID NO: 17818 - DNA, 201 bp, Homo sapiens
gagaagtagactgcattcaagtataagactgtttattttcctgttattttgtttagccaaagatttgaagccattcaatcctctaacgagtactgtagtgwtgcctaaactaagcaggattttctatattgcattacaaattttacaatctgagtgaggttgttttttcttcttttagtacagcagaaattgaaccttctc

SEQ ID NO: 17819 - DNA, 201 bp, Homo sapiens
tgttaaaaaataatataaatataccctttctgaagttgttttgatagctcctttgatagcaggtggaatttttaaacaatgtctttggtgcctggattgtsaggattttgcttggattctggtggcatttctgaaaatgtgactaatgacccctccagtgttctagaatctgtgttcagtaacttgaactccatgccatct

SEQ ID NO: 17820 - DNA, 201 bp, Homo sapiens
tataggagtccagtgtagggagtttgcttgttgagtgtggtgcatgtagtgaggaagcctgtttaaagttatctcctcaatgaaataaagcagccccttcyaggcaatcctaattactccctttcctgaaagaatatattgcaaatggaaggtcatgcaatctgccttcttgtaagatcttcaatttctcagaatacaatg

SEQ ID NO: 17821 - DNA, 201 bp, Homo sapiens
gttatatgcagtatacctaattgtataatgataatagtaagtatatttgtgataatagtaagtatacttgataatagtaataaacaactatgttagtggtytacgtatttactatactttttattattattattttagagtgtactgcttttgcttctaaaataaaacattatctgtaaaacagcctcctgaaggacctga

SEQ ID NO: 17822 - DNA, 201 bp, Homo sapiens
ataacaggttagagaatctgggtaaagctggggctgaggtgagaattaggccctataggagtccagtgtagggagtttgcttgttgagtgtggtgcatgtrgtgaggaagcctgtttaaagttatctcctcaatgaaataaagcagccccttctaggcaatcctaattactccctttcctgaaagaatatattgcaaatgg

SEQ ID NO: 17823 - DNA, 201 bp, Homo sapiens
ataataacaggttagagaatctgggtaaagctggggctgaggtgagaattaggccctataggagtccagtgtagggagtttgcttgttgagtgtggtgcaygtagtgaggaagcctgtttaaagttatctcctcaatgaaataaagcagccccttctaggcaatcctaattactccctttcctgaaagaatatattgcaaa

SEQ ID NO: 17824 - DNA, 201 bp, Homo sapiens
ctccttcattataaactgacttgttggacttaacagttcctttctcatctaatcaaggagctggattctgtttctcaataatgtaatcacagtaagatggygatattggcgaagcaccggaaatgactggcaggacactggggaaaaactgactagtctacagtttccttagaagacagcctgaaattgcttataagcaga

SEQ ID NO: 17825 - DNA, 201 bp, Homo sapiens
ttggtctcctccaggatgatgttcttcttgtcctcactaaggcagaagagcaccaccttcttgagcttcttcacctcctctggcattgaagacttatgcamcttcatgtcgttgaacatgttcatgacaccatcagacagccacaccagaggccatgtttccagaagtgaaaaggagagggcatggagagccgcagaagac

SEQ ID NO: 17826 - DNA, 201 bp, Homo sapiens
aagtgtttactgttttccacataaagtttccttgtttctcggttccttctttctttttcctaaaatgtaagctcaatgagtctttaagctatgtcttccakaaatattttttgaacacctactgtggagctaggtacccaacaggacatcagcagcagaagggcagagatatttgtctcttttgttcactgatatattccc

SEQ ID NO: 17827 - DNA, 201 bp, Homo sapiens
gtcgatggtctggctcacatcgcccaccaggatcttcttggtctcctccaggatgatgttcttcttgtcctcactaaggcagaagagcaccaccttcttgmgcttcttcacctcctctggcattgaagacttatgcaacttcatgtcgttgaacatgttcatgacaccatcagacagccacaccagaggccatgtttccag

SEQ ID NO: 17828 - DNA, 201 bp, Homo sapiens
gaggagctgttctgtaatgttttggtaaaagaatgtctgtctccatatcatctatctatctatctatctatctatctatctatctatctatctatctatctatctaatttggcatctatttatccattaatctgtctgtaatacaaatattccaaacatttaaaaagtataagaaggctctgtagtgcaatggatagcaca

SEQ ID NO: 17829 - DNA, 201 bp, Homo sapiens
gtggaggtggaagacagtgatattgatgatcctgaccctgtgtaggcctaggctaatgtgtgtgtttgtgtcttaatttttaacttaaaaatgtttaaatrgaaaaaagcttatggaataaggatataaagaaaatatttttgtacagctatacaatgtgtttatgttttaagctaagcattattacaaaagagtccagag

SEQ ID NO: 17830 - DNA, 201 bp, Homo sapiens
ttagtaatttataaaagatcatgaagcttagatggagcctgaacttatgtttttatactcagcaccccctctagtatgtgaaactgtcatctttagcttcwgactccttctggaatactgatttttgggtgctgtgtctaatcagctttcagctctacaatattccttgaagggcaccgcaacccacaaccttgggccagc

SEQ ID NO: 17831 - DNA, 201 bp, Homo sapiens
caggcttttttgccctatgcatacatttttatccataaatgtaatcatcttgtctatgttattttgtagcaagcttttttttcacttaatacataatactrttttttccaagtctttatagatattgtttttcttttcttttatttcttttatttagccatcactcagtgattggatatttagggtatttcatcattattt

SEQ ID NO: 17832 - DNA, 201 bp, Homo sapiens
agaggagctgttctgtaatgttttggtaaaagaatgtctgtctccatatcatctatctatctatctatctatctatctatctatctatctatctatctatctatctaatttggcatctatttatccattaatctgtctgtaatacaaatattccaaacatttaaaaagtataagaaggctctgtagtgcaatggatagcac

SEQ ID NO: 17833 - DNA, 201 bp, Homo sapiens
aagaggagctgttctgtaatgttttggtaaaagaatgtctgtctccatatcatctatctatctatctatctatctatctatctatctatctatctatctatctatctaatttggcatctatttatccattaatctgtctgtaatacaaatattccaaacatttaaaaagtataagaaggctctgtagtgcaatggatagca

SEQ ID NO: 17834 - DNA, 201 bp, Homo sapiens
ttcaaaagtcagatctgtccatctaagatgcttttaagtaacatttaccttaaagaaatagatggttgattggtttaaagaaagagacagctgaattggayggggaagccagattttgaccatatttctaagaggagctgttctgtaatgttttggtaaaagaatgtctgtctccatatcatctatctatctatctatcta

SEQ ID NO: 17835 - DNA, 201 bp, Homo sapiens
gaattaaaaagtaattatactgagtgttttatcttgcctgtatacggatgtataagattccaggtttctagttgatgttactgttaaaaacagaagatgttcaaacatatttgattttattaaattagttttccctgtagtcataggaggggtactgctgtttacatgctgaatcttagcaaaactataaaatagcatttt

SEQ ID NO: 17836 - DNA, 201 bp, Homo sapiens
taataagttcctcatttccacctgagaccacctcagactggacctcattgtccatatcacaatgagcattttggtaaaaatcattaaacaagtctctaggragttccaaactttcccacatcttcctgtcttcttctgagcccttcaaatttttttattctctgcccgttacccagttcctaaatcacttccacattttca

SEQ ID NO: 17837 - DNA, 201 bp, Homo sapiens
ttttccccctctgcctgccctagtagaggttctccatgaggactccactcctgcagcagacgtcttcctggacatccagacatttccatagatcctctgawatctaggcaaaggcttctgaagctcaacttttgtcttatgtgcactcgcaggcccaacaccaggtggaagctgccaaggcttggggctcccaccctctga

SEQ ID NO: 17838 - DNA, 201 bp, Homo sapiens
catgggctggcattgagtgcctgcaccttttccaggtgcacagtgcaagctaccagtggatctaccattctgggatctagaggctggtggccctcttctcwcagctctactaggcagtttcccagtggggactctgtgtgggggctccaactccattttccccctctgcctgccctagtagaggttctccatgaggactcc

SEQ ID NO: 17839 - DNA, 201 bp, Homo sapiens
gctgatgcaagaggtgggctcccaaggccttgggaagctctgcccctatggctctgcaggatacagcacccctgacacacagctgctttcatgggctggcrttgagtgcctgcaccttttccaggtgcacagtgcaagctaccagtggatctaccattctgggatctagaggctggtggccctcttctctcagctctacta

SEQ ID NO: 17840 - DNA, 201 bp, Homo sapiens
ttgtacagattatttcatcacctgggtattaagcctaggactcattagttatttttcccgatgctctccttcctcccaccctccaccttcctatatgcccyagtgtgttgttcccctctatgtgtttatgtgttcacatcatttagctcccacttacaagtgaggacatgttatatttggttttctattcctgagttagtt

SEQ ID NO: 17841 - DNA, 201 bp, Homo sapiens
agggcagggtttccttgatgaggttgttctctcttcttgcctggagagaaagcctatgttatcttatgaaatatcccctcaggtaagaagggagtgcattytattatatatcaggacatggatcctgccagactgcagtgagtcaaggctgcttcatgatgtcttgagagctggtgtcctgggatcctttggctgggctgg

SEQ ID NO: 17842 - DNA, 201 bp, Homo sapiens
cagccggcttgctacccgaatcaacatgagctaaggagctaggattcactggcttcccattccagctccagttcccattgccctccttacccttccaagtscttaccctccagctgtgccaaatcccctgccttggattcttcatgtccttcaataagtccagacacttgcaccagcagccccttcaacctggagtgtcct

SEQ ID NO: 17843 - DNA, 201 bp, Homo sapiens
gcctcctgtatgcctgtaatcctttgcttaacaatttgacaacgagaacataggattatggtttcgggggaagaagcagcaataatggcagttaaattttyaattccccaggtgcatatgtcttccttaagtgcatactctgagtcccaagtgagaggagaacatatttagaaagaattgtaaattatttctctttgccaa

SEQ ID NO: 17844 - DNA, 201 bp, Homo sapiens
attacttcctaaacaatacagtataacagctatttacatgaaattaacattgtattatgtattataagtaacctggagatgacttaaagtatatgggagcrtgtgcataggtgatgtccaaatagtatgccattttatgtcagggacttgatcatccttggattttggtatctgttgggggtcctggaaccaatcccccaa

SEQ ID NO: 17845 - DNA, 201 bp, Homo sapiens
gtttaaccagttttgtgtctgcttaatttatgctatattgcctctaactttgtttgacagtggcacagaatcgaatgtattcaagttaaaaaaatgttttygtggtgtacaacatatgttttgatatataggtacagtgtggaatggctaaatcaattttcaacatatactaattgagcatatacctcaacttttgttttt

SEQ ID NO: 17846 - DNA, 201 bp, Homo sapiens
gccaagaggccattggcactcagagactggggttggcaccagtcacagtgagaagcattacttttattagcaacttagtcattttacagcaggcgtggcaraagtgcctcctatgcagacgcaagacgctaatatggttattagggtaagaggagcagatatgcccagtatcccacaaaattctcaaattataaacatagc

SEQ ID NO: 17847 - DNA, 201 bp, Homo sapiens
tgatttatatatggacaaattactgaccaagacaatgtccttgtttgtacaatggacattgttcaggcagagctcatgggttgcattcacagaaagggctyattggctggtttaaacagaaaccaagaagagaggggtcaatgaaggcaggactggtgaaggaaggctgtgtccagggccttatagggatgaaaggggatg

SEQ ID NO: 17848 - DNA, 201 bp, Homo sapiens
tttatgtaagtatgtgatttgatcagggcttagaaaagtttatcaagctttttagatataattttgtaatctctcaagatagagatggcatttaatggcgkgatagttggccaataaaggtcactggacaatttaacagaatgttgcattcttgtaatatattcttgttcttctttgaacacaggactattactcagattt

SEQ ID NO: 17849 - DNA, 201 bp, Homo sapiens
cttattgatatgtcaggctgtgggcggcatcctggggtctgttatggcaatgaattcctggtccttaggtgacaagaatgggatgagtgtgctatgcctgsctctgagataaagaaaaaacatggaatgttaaggatcttaaagtctttacgggtttctttgcccactagttttcaatgttttttaattaatgatgccttt

SEQ ID NO: 17850 - DNA, 201 bp, Homo sapiens
ctggataaaggcagagatgccacagcttgcagagaaaaaacatcagacatttcccaatggcagcaactctgggccaagagtacggatggaggacaagctayagatacagccacatggtgcccttcatttgcttttgagtaggagctcacactgtctttaaaagattggacagtagagctcagccatgaagggcccctgtag

SEQ ID NO: 17851 - DNA, 201 bp, Homo sapiens
tgatctggcttcatcaacggaatcacagagcctctgtgttggaaagggccttgaaatcatctgcaactgcgcggcttgatacttgagggaactgaggcaayagatacaggaagtgatgtaaagttataaatgccaaaccttcaagggacttttgacatgacgtaactctgcgctcttatgttttgggggaagaatagtaag

SEQ ID NO: 17852 - DNA, 201 bp, Homo sapiens
aattgggaagagaattcaggatggtggggggaagttattgaaaaagtagaaggaaactctgggaagtgtaggatcatagaacatgaaatagagagagagckttttaggaacaggtgataatcagcgcagatgtcatcaaagaaaatctgagtagggactgaggtcttgtatttagagactgacagtgtggctggctggcca

SEQ ID NO: 17853 - DNA, 201 bp, Homo sapiens
ctgaggtcttgtatttagagactgacagtgtggctggctggccatcaagtgattatttcagggaaagaatgagaataggtgccaagtttacaggaatgaaraagaaacatagtgggaaatagctggaggtaatgacagtagacctcacattgaaaatgtttgtccatgaatgagaggagggaaattgagctaattagagta

SEQ ID NO: 17854 - DNA, 201 bp, Homo sapiens
acagtgtggctggctggccatcaagtgattatttcagggaaagaatgagaataggtgccaagtttacaggaatgaaaaagaaacatagtgggaaatagctrgaggtaatgacagtagacctcacattgaaaatgtttgtccatgaatgagaggagggaaattgagctaattagagtaataatttccaagattgagtgtgtg

SEQ ID NO: 17855 - DNA, 201 bp, Homo sapiens
ggccaggcattctcctatgcacattacaaacagtaactcacatatcctcataatgagcttctgaggtggtagcattattaccctcatgttacaggtgaggrtgctgaggcccagaggggttacataacctgcagggtcatgcagttaggaagtggcagagccagaatggtcacccattctgtatgacttttctgtctcccg

SEQ ID NO: 17856 - DNA, 201 bp, Homo sapiens
catagtttcatgtgaattagtggaattaacagtaaccagggaaacttccgaaccttagtgtggtcagaccctagtagacaataacagaccttttttttttyttttaagagtcttgctctgttgcccaggcaggagggcagtggcttaatcatgagatactgcagcctcgacctcccaagcttcagtgatcctctcacctca

SEQ ID NO: 17857 - DNA, 201 bp, Homo sapiens
aaaagcacctggtccatagtaataatagctaacatgattttgcaccagtagaaaatatttgataaatattaaaattgcgttttgttttgtttttttgagasaaggtctcactctgtcacccaggctggagtgcagtggcgcaatcacagctcactgcagcctcaaccttctgggctcaggtaatccttccgcctcagcctc

SEQ ID NO: 17858 - DNA, 201 bp, Homo sapiens
tagacattgatagaagaggagaacagtcagggaatggtagggaagcggggccaggtcaggggcatcagttcaggggagccccatgatggagctgaagaackcaagtctctagggaagagtgtgacaagattgcgatgatacaggaagtgaaatctgagtgttgtgtgctttttgtggattacgggtttctagagaatttag

SEQ ID NO: 17859 - DNA, 201 bp, Homo sapiens
ctcccactgggtccctcccacaccatatgggaattcaagatgagatttgggtggggacactgccaaaccatatcatttgacccctggtccctttcaaatcycatttccttacattttaaaaccaatcatcccctcccaaaagtcccccaaagtctcaactcatttcagcattaactcagaagtccacagtccaaagtctca

SEQ ID NO: 17860 - DNA, 201 bp, Homo sapiens
accatatcatttgacccctggtccctttcaaatcccatttccttacattttaaaaccaatcatcccctcccaaaagtcccccaaagtctcaactcatttcrgcattaactcagaagtccacagtccaaagtctcatccaagacaacgcaagtcccttctgcctatgagcctgtaaaatcaaaagcaagttagttacttccc

SEQ ID NO: 17861 - DNA, 201 bp, Homo sapiens
aaccagactaacagcaactttaaaccagcctgttatgaattgaggtgtgtcccttcctccttctctttaaattcgtatattgaaggcctaagcctaactcyttaggaagagactatatttggagatggggctgttaaacagattaagttaaaatgaagtcattagggtgagccctaatcctatttgactgttgtccttata

SEQ ID NO: 17862 - DNA, 201 bp, Homo sapiens
  misc_feature (1)...(201): n = A,T,C or G, or insertion/deletion polymorphism (see Tables 1-2)
ccaggcacattacacttaagtggtagctgttattttattatttaaaaagatagctttgccacaaaccagatatgtgacattgagtaagtcaggccatgtangtggctgggctttggttttctcatataaaatgtgaaatttagagctatagtcccttctacttctaaagttcactgagcctttgaatcccctcttaagcat

SEQ ID NO: 17863 - DNA, 201 bp, Homo sapiens
ccagtgatgtgatcatggctcgttgcagcctccatctctcagtctcaagcaatcctcccacttcagcctccaagtcgctgggaccacaggtgcaccatgtycagctaatttttgtatttagagacggggtctcaccatgtttcccaggcttgtcttgaacttttaggctcaagcaatctgccccctcggccccccaaagtg

SEQ ID NO: 17864 - DNA, 201 bp, Homo sapiens
  misc_feature (1)...(201): n = A,T,C or G, or insertion/deletion polymorphism (see Tables 1-2)
tggatttcaatgtaattaatcatttgaaaggtgaaaacatgtgttccaatcctgggcagtgacttatcccagtgcccaggtgagttactagcaaatcttangtcttgggcagttctttttgtcctgataccaaagctagagaaataaatctgctttatggctcctcagtcttatttatgaatcaaaaaatcctttcatatc

SEQ ID NO: 17865 - DNA, 201 bp, Homo sapiens
cttggcaataaccctttgaagtggaattattgagtcaaaggtaaaagtcttttgatctacacaatcattgtggctaccataaaggttacagaaatgtattyccctctctgtgttctgtggaaataaagtggtttttttgtttacacataactgatgccatgtattgtcatttaaaaaaaaaacaactttctgggttaaaaa

SEQ ID NO: 17866 - DNA, 201 bp, Homo sapiens
acctactctggtaaaacattattatggttaaaaagtaaattcaagttagttttttataaagaactataacatttattttaaacattttataataactgaaracattaaagtgagcaaatgaaatttcaaaaccacttgtaataatgtattttataatcgcactgtgatactatataacacagtctcttttgtattaaaata

SEQ ID NO: 17867 - DNA, 201 bp, Homo sapiens
ttacttgatttgtccttggcacatggtctatttaaatggtattgactggcctatagcttagagcttgatgcttagctagtcagaatggggtgactgagtcrttttcttgtgctttaattgtatatatttggagctatgggttgaaggtggtattgtaaggatagactggatcttgccttggctcttggcacgtggcaagct

SEQ ID NO: 17868 - DNA, 201 bp, Homo sapiens
tttattctacttatatgagcatccagaagtcctcaattttattaggatatctttaattctttttattatttaaaaaggtaaacatgtgatgtgtttgttgtagaaaatgagaaaagagcaaagatgtaaaaagaaaaataattgagacaataattattttaatttaagcttatatcattagaaactttttccatgtaaata

SEQ ID NO: 17869 - DNA, 201 bp, Homo sapiens
ggtctcagtgagtcaacatcctgttcttgttcaagcttagtcagtgacgatgacatgtggccatttggcagacagtcaccatcagtaaatatggaaatacraaaaatgtgcttatctctgtgaaaaggtgaggccagaggtaaggtgaaaaaaaaaagccaggttttacaggcttgagtactggtcagcatgggctgccag

SEQ ID NO: 17870 - DNA, 201 bp, Homo sapiens
gtctcaagggacgggacctcttgtgctgattaacattctcttaacaaggcacttaatctattatataattcagtgcacttaatctatgaagcagtattcayggggctttcttttgtttctcaaggccagggatgctgtcttgtacatctttgcactctccaacagtgctacatttaacaggtactagctgcactctttgaa

SEQ ID NO: 17871 - DNA, 201 bp, Homo sapiens
ctttattctacttatatgagcatccagaagtcctcaattttattaggatatctttaattctttttattatttaaaaaggtaaacatgtgatgtgtttgttgtagaaaatgagaaaagagcaaagatgtaaaaagaaaaataattgagacaataattattttaatttaagcttatatcattagaaactttttccatgtaaat

SEQ ID NO: 17872 - DNA, 201 bp, Homo sapiens
ctgccatactgcctatctgacatctggtccccttgaaagagtctatgctatttttggctcaggacgttggaggaaaccagggccactgtaggtggggaggktatgtgtggttcatctacttctttcccacctgcttctaggactaggaaagaggtaagccaaggaggtctgcacaaaccaaacaatccttttgtctctgct

SEQ ID NO: 17873 - DNA, 201 bp, Homo sapiens
cctttattctacttatatgagcatccagaagtcctcaattttattaggatatctttaattctttttattatttaaaaaggtaaacatgtgatgtgtttgttgtagaaaatgagaaaagagcaaagatgtaaaaagaaaaataattgagacaataattattttaatttaagcttatatcattagaaactttttccatgtaaa

SEQ ID NO: 17874 - DNA, 201 bp, Homo sapiens
ctggagttggggttggagtcatatgtggagggccctgaaatgtagacaattagctcttctggggaaagcacctgcacgaaatacccgttccccaaacaagrggttgataacagaagcactgctttccactgtggctttgtagtaagcatttctcctacttgggtaaaattttctttttgttttcatattttggaattaaga

SEQ ID NO: 17875 - DNA, 201 bp, Homo sapiens
tcttcaacaaagtaatggattcatcacatatataagaattatgctgattacaatgtaattacatggttaaaaagtgattttgtactgcaatataggtagtrtgactgggtaattgagcaggggtttaaagttgcaggattgtgccatcttctttctttgtgactatattgataacttcatttagagattgcatcagaaatc

SEQ ID NO: 17876 - DNA, 201 bp, Homo sapiens
gaatagctgtgaatgtgggaataactgtactgactgacaggggagagatcagatagtttaagaaacttgccccatatgcacagctcatcagtggtgctgcstggactcagccaccatctgtttcactctgccggggcatacatgtatgtgtacccttgccctggcaaactcttccttttgtagagctgaaagcagccccct

SEQ ID NO: 17877 - DNA, 201 bp, Homo sapiens
attcctttattctacttatatgagcatccagaagtcctcaattttattaggatatctttaattctttttattatttaaaaaggtaaacatgtgatgtgtttgttgtagaaaatgagaaaagagcaaagatgtaaaaagaaaaataattgagacaataattattttaatttaagcttatatcattagaaactttttccatgt

SEQ ID NO: 17878 - DNA, 201 bp, Homo sapiens
tttgatatattatgaatttttcttcaacaaagtaatggattcatcacatatataagaattatgctgattacaatgtaattacatggttaaaaagtgatttygtactgcaatataggtagtatgactgggtaattgagcaggggtttaaagttgcaggattgtgccatcttctttctttgtgactatattgataacttcatt

SEQ ID NO: 17879 - DNA, 201 bp, Homo sapiens
gtgaggatattttggccggaggaaaatgtagcttaagaaaagtcccagctggttcaagtgacttaagcccagctattcatgaaatattatctgacagctcycccttctcctcaagtggctggggagtgagtcacaattgccccagaaacctgtgttctcatatgggattttggtattccaggtttgctctactttgcacac

SEQ ID NO: 17880 - DNA, 201 bp, Homo sapiens
tttggggattttagaattggtgaaacaaacattgatcgttgaggagcttggcctctggtattggttctccagctatgtactgcagagcttagagttccatrggggacctctggggctgaagggggtttaagccagggagcaagtggttatgtctctcagctccttcccccatcccccatgtggcacagttgaagatgctct

SEQ ID NO: 17881 - DNA, 201 bp, Homo sapiens
atgcagagtgtctctacggaacccactgtagtaactgaaatgttataatggtgggcatttacagaggctctgttatcagtgaggcactttacatatgcatrttcagcctttacagtaaccctgtgagatacgtattattattgctgttttgaggatgagaatactgagatgcaaaaagattaaagtatctgtagccagtga

SEQ ID NO: 17882 - DNA, 201 bp, Homo sapiens
aacacacagtgacagtcccttttggaagctggccacaggctgcactttattcattattttaacagcaaccaaacatttgctgtgtgcccactggtggccgytagacagtcttcccaccctttagctcatgtagtcatttaaaccagttccatcactagagaaatgtgttactagccccttgaaggagagtgggccttcaac

SEQ ID NO: 17883 - DNA, 201 bp, Homo sapiens
ttttgtattaaggaaagaatgcctgcccttatatatccaggactggattttttttttctttttcttttcttttcttttctttttcttttttttttttttttgagtactcatgaaaggaaaccataagaatgtttgggtctaataatatacttgcttgtgtatgaagataaaaccaataataacattaataccacccttcag

SEQ ID NO: 17884 - DNA, 201 bp, Homo sapiens
attttgtattaaggaaagaatgcctgcccttatatatccaggactggattttttttttctttttcttttcttttcttttctttttcttttttttttttttttgagtactcatgaaaggaaaccataagaatgtttgggtctaataatatacttgcttgtgtatgaagataaaaccaataataacattaataccacccttca

SEQ ID NO: 17885 - DNA, 201 bp, Homo sapiens
gagctaattagagtaataatttccaagattgagtgtgtgtgttttaggaacacctaaccatttccagaagagggctttaaaggtgctagagagagagagaraaaaaaaaaaaaacaaccattgtagaattaaaatgctgaaagcagtgggaagagaaaagctactgaggccagagggaggggttagattttaaacggaaga

SEQ ID NO: 17886 - DNA, 201 bp, Homo sapiens
agagagaaaaaaaaaaaaacaaccattgtagaattaaaatgctgaaagcagtgggaagagaaaagctactgaggccagagggaggggttagattttaaacrgaagagagaaacctcttttctggaacgtggcaacaagaagatggcagaaatgacagagatataaggggtgagagtgaagaacctcacgcttagaatgtgt

SEQ ID NO: 17887 - DNA, 201 bp, Homo sapiens
agataatatagtttccccaagcagcaaggagggcagacctggaggtggcccttgcaaagacagctgcagtgcacagagcttccctgcaaaatcattaagamagggacaggttctataaggtgctaaattattattagtttttttttaagttgggggagggcaataataaaaaccatgtgctcagcagcctgcttggccata

SEQ ID NO: 17888 - DNA, 201 bp, Homo sapiens
gggtctgatgggagatgatgctaggtgaggtcagtggggccacacagtgtatagcaagtgaaggaatgtgggttccatctggatgtgatgggatacacccstggattttaagcaggaggccgactggtaactgcgtgaagggcacctctgaggggaaggagaaaattcaggagctgttcagtagaccaggcaagatggttc

SEQ ID NO: 17889 - DNA, 201 bp, Homo sapiens
ataacataaaaaaaatacacagtttcctttactggctcctcttacttttttaaatttggaaatggattctcgctatgatgctcaggctggcctttgaactsctaggctccatcgatcctcctgcctcagtctcctgagtagctgggactacaggtgcatgccaccacccctggcctccactcatcttaggagttctcctcc

SEQ ID NO: 17890 - DNA, 201 bp, Homo sapiens
tacacccactagtttcatgcttggcatcaggaccttctttgaaaggtcctaactatagcatctgttggactgtctggctgggctccatgtccatggcactrcggttaaaggcggaaagagaaggtcaccctgtaaacttttctgccaatgaccacagcagcacagccagcatatgtctaaatgtgcaggaatttgttcaac

SEQ ID NO: 17891 - DNA, 201 bp, Homo sapiens
cagggccttatagggatgaaaggggatgagacagtggacctatggactgtgaattctgagttccagtctttgcctcttgaaatttagtgtcacttttgagkcctgtcccctccaggaagcttttcctgatccctgaaccagttaactaacctcctatgaccccatagccctgtgttgggacctttatcctggtgtgctcct

SEQ ID NO: 17892 - DNA, 201 bp, Homo sapiens
tgcaaagacagctgcagtgcacagagcttccctgcaaaatcattaagaaagggacaggttctataaggtgctaaattattattagtttttttttaagttgrgggagggcaataataaaaaccatgtgctcagcagcctgcttggccatataaaacagaaaggcctgtgactttaagtgttgtaaaaggggttaattgtcga

SEQ ID NO: 17893 - DNA, 201 bp, Homo sapiens
tcaggccttctctcacattgtgcaatctcacttgagagtttcaggctctcctgtccttgcagatactgcttactgaggaaggattggccatctataagtckaggctggggtgccctcctgagctatggactcatagcactggtagtcagctggatagttccccttggcagtctaacaactgtgtataagttggcttgttca

SEQ ID NO: 17894 - DNA, 201 bp, Homo sapiens
gtcattgttattgactctgtctctctccaacttgagaactgcaggaagattatttgctcattgcctggccttcaggtgtctgatggaacaggaatcaaatsatagacactttgaacctctcctttgccatgatgcttggacaaaaaacttgtggcctcaattctttaactgaggagccttgtagaataacctctggagtta

SEQ ID NO: 17895 - DNA, 201 bp, Homo sapiens
aaaaaaacataattgtgttcataaatattattaagaaaagcagaggatctcaaaagtcagatttggatgaacattagttgatgcattgaaacatggattakgtcaaatatcccatggattctaagctgccttaattgtaaaaaaactctttgatgctctgcttagtacgtaagcaccttcaattgctgtcaagtgtacata

SEQ ID NO: 17896 - DNA, 201 bp, Homo sapiens
gtacaagagatatgctgaggggcatggggaaggaattccttccttctcaagctgtaggtgtcaggctttggccgtgaaaatgacagtggattttctactcmttcagcaaactttctggaaaccccatcacctgccacgtgtgtgtggaggtgctgtgtgggtatacaaaggcgaattaagatgtgatcctgggtcagggac

SEQ ID NO: 17897 - DNA, 201 bp, Homo sapiens
gactgacaggggagagatcagatagtttaagaaacttgccccatatgcacagctcatcagtggtgctgcctggactcagccaccatctgtttcactctgcyggggcatacatgtatgtgtacccttgccctggcaaactcttccttttgtagagctgaaagcagccccctgcaactttcctatgtatttattctcatcctg

SEQ ID NO: 17898 - DNA, 201 bp, Homo sapiens
accctctgccccctatccttggtcttttatgatgggagatggttgctagcctgcatttagggatagctatgcttatacagaacttctcacacagagtagtrctgcttccctgggtttggaagcatttttgattttgccagaaagattggcagggggtggggtggggtggatgcatgtgaagccggggtggtgtgctacaat

SEQ ID NO: 17899 - DNA, 201 bp, Homo sapiens
cacacagagtagtgctgcttccctgggtttggaagcatttttgattttgccagaaagattggcagggggtggggtggggtggatgcatgtgaagccggggkggtgtgctacaattggcacttggtgctccctgaaccaaatatactaaatatcttgtaatggatgcatcagtcctacccagggaataattctcccactccg

SEQ ID NO: 17900 - DNA, 201 bp, Homo sapiens
ctttggggattttagaattggtgaaacaaacattgatcgttgaggagcttggcctctggtattggttctccagctatgtactgcagagcttagagttccaygggggacctctggggctgaagggggtttaagccagggagcaagtggttatgtctctcagctccttcccccatcccccatgtggcacagttgaagatgctc

SEQ ID NO: 17901 - DNA, 201 bp, Homo sapiens
gtgtgggatcccccatctacaagtatacatgtaaactttcccctgggccactgcagtgtccctctgggaaacatgaatctgttcctggcacctctctagayactctagaatggttcagttgttttatccctatacatacttgacctccagaacatgctatttatgctactcccaaagcttatagctgaaaacaaacatttc

SEQ ID NO: 17902 - DNA, 201 bp, Homo sapiens
tggcagtgtcaacatcacctgggagcttgttagaaatgcagagtctcaggctcctctccagaactactggatcagaagctgcattttaacatgatcccagktgatttatatgcaaattaaagaaccatggctttaaagaaccattcctgctctagtaatgtattattttgtgtttttttccaaatgcatattaaaatatag

SEQ ID NO: 17903 - DNA, 201 bp, Homo sapiens
gatcctgcctccttagtaactagttgggatgtttctttcttgtctttaacaaacaaaacaaataacgacaaaaagaactagaaggccctggattggaaaamgttgctatggctgtagtggagtgagaccattactgagttatttgcacttcctccaatgtgccatggtctttctaatacataggtctcctcttaacccaga

SEQ ID NO: 17904 - DNA, 201 bp, Homo sapiens
tggccaactttaagaatcaaaattctgatgttacttcgggaaatgcatagagccagagagacacaatttgacttagtatgatccacatcatcccctcaggytgaatagtggtggcatgcacatctataccaaaatgttttaccttttttgtagaaggaaaatatttgtatcttctattccatatcttagatctttataaga

SEQ ID NO: 17905 - DNA, 201 bp, Homo sapiens
ctctgaggtcatttaaggaataggcagcccttgcagatttttgtaagtttcctcttcgcatgaacaataactgcaaaatgatccatctgatctggctaccrttgttgaaggcaagaggatacaaagagcattcatcgggccaggcgccttctcaagaagggctcatcaaggtggaaaaccaagtggcacatacttgtggag

SEQ ID NO: 17906 - DNA, 201 bp, Homo sapiens
tttatatgcaaattaaagaaccatggctttaaagaaccattcctgctctagtaatgtattattttgtgtttttttccaaatgcatattaaaatatagttaygaagaatttatccaagactgcatcaaacattctacataaaatgggtatatcatctcttaccctttaaaagtttgtactttgtgagaaaaaaggtttaaag

SEQ ID NO: 17907 - DNA, 201 bp, Homo sapiens
tgaaaacagactaatacagaaatacagacgtatacatggccaaggccaaatcactaaaactgagggaggcattctctgtttccaatagaaggctcctttgmgtatccaagtttgcaggcaaagacagatacgtgattatgacaggtgaagatgtacccactgtagaccatcttttctatgaagatcggagtctttcttggg

SEQ ID NO: 17908 - DNA, 201 bp, Homo sapiens
ttgctgtcctctgcgtgtgagcccttctgctcccttccccttcagctttcaattcttctttccttaagtcaacattacatattatttctttacggacactktccctgaacccaacctcacagcagaagacatcaggtgacctcttacattggtcactgggcaccatactttccctgtggctcctgtcccagtttataatta

SEQ ID NO: 17909 - DNA, 201 bp, Homo sapiens
ctagtaatgtattattttgtgtttttttccaaatgcatattaaaatatagttacgaagaatttatccaagactgcatcaaacattctacataaaatgggtrtatcatctcttaccctttaaaagtttgtactttgtgagaaaaaaggtttaaaggcagaaacaggcacaagcagtcgtacattcagttccagtgctagata

SEQ ID NO: 17910 - DNA, 201 bp, Homo sapiens
acccaacctcacagcagaagacatcaggtgacctcttacattggtcactgggcaccatactttccctgtggctcctgtcccagtttataattatacatttrtgtgattacctgatgaatgtctcctcttccactggactgtgaattccatgagggtaattctggcactcagtctaagcctgacacctggcaggtactcaaa

SEQ ID NO: 17911 - DNA, 201 bp, Homo sapiens
agctgatggttttataagggatttccacttttgcttctctctcatcctctcttgccaacgccatactgtaagaagtacctttcgccttcctccatgattgygaggcctctccagccacgtggaattgtgagtccattaaacctgtttttcttcccagtctcgggtatgtctttatcagcagcatgaaaacagactaataca

SEQ ID NO: 17912 - DNA, 201 bp, Homo sapiens
accaagctagacccagattgcgtttgggtgcctggaacaggagaagttttaggaatttatgttagagattcaccatgttgtactttctgccaaagcgtccytccctgagtcagaatagtggaaggctgactatattccacccagcacgacgcactgaatgcttggtatgagcagcacatcatacgacaggaatctcacaac

SEQ ID NO: 17913 - DNA, 201 bp, Homo sapiens
cttttctctctttgaagctttccaaatctttcaatcttttttttttttgcctccaaattttggaacctcaaaatttcaaggtttttttttttaattttttwattttttttccttttgttttaccttctcctttctggctttgttcagaaatcaggtatcaataagctttttattactcatccaatctgtgagttcagtttc

SEQ ID NO: 17914 - DNA, 201 bp, Homo sapiens
tttgcccatttataatggagggctccacagacatcacagccattgaaatcctatgtaaaatagagaaaggctaagacaatactacacactgctttttgcargaaaataattttctatgtaaaagtatagttgtctaattcagtggtcaaccaattaagagaaccttcaagttagacctaaatatttggctttgaaagacgt

SEQ ID NO: 17915 - DNA, 201 bp, Homo sapiens
gtcttggaatcttaatagctttctcaactgcagccaaagtgggcttctctttgtaaatgctttaagtggctgagaatcaaggctgaaaaggggtttgtttytctccccatctatgcctagagtaggatggctgcacgtttttagggcttgcccaatttgcccatttataatggagggctccacagacatcacagccattga

SEQ ID NO: 17916 - DNA, 201 bp, Homo sapiens
gaacagtcttggcaggttgatggctaatgaaaaggagttgcaaaattaattacatggaaaattatttttttttctaataagataatgaaaaaatacatacyggattagggaatgacaaactcaccaagcttaaatagcagttgttattagctgaactctgtacttttggatgtgagaatatcattcttcccagatcattgt

SEQ ID NO: 17917 - DNA, 201 bp, Homo sapiens
ctgcctcacactcccctatatttaaccctcagcctggatcatgtgcttgtcacaaatcaatatttctgccactcgacaggaacttcagccctttcaaattygttccaggtaatttgaggagactccagggcagtgatgaaataaagtgaaagcccctgatttactggatctggaggcttgtgctgtgagtgagaagtgagg

SEQ ID NO: 17918 - DNA, 201 bp, Homo sapiens
atcatgagggtattttacatggttttatgggtagaaatttttacttttaccttctacaatggttctaaaaaagccgttgagctgctctgtgcagaaagtamacagggaagagttttatgcccacagtagagtaaaaaccttaaactgggacatcaagggactccatgcctgaggccgtggagaggctaatagtgccacggg

SEQ ID NO: 17919 - DNA, 201 bp, Homo sapiens
agcagaaaataaggtggttcaactatccgggaaaactaccaaatatccgcttagcagaggcaaaataaatgtagcttaaatgcagctgaaaatgctgaaarctgcttttgtttctcatgttatagaaatgcagttatttttattaaaagtgatgggaaatccatctgtaatctcctgtctttcttttatctgtttgtaaaa

SEQ ID NO: 17920 - DNA, 201 bp, Homo sapiens
aaatactatttccagcactggttcataaccagttacagctgcctcaccacagaatgtgagcacaatagactaccatgttccatggtctcttgcttgcaaartttgtattgagttactaggagtcattctaatgggggaagtcactctcctggaaagcatttaagatgaataaagtgaagggtttaatgttctaatgaaaaa

SEQ ID NO: 17921 - DNA, 201 bp, Homo sapiens
gtggattcccccacaagtttctgtccctgcccttcctccttccctcaccatctaatctcacctgcatacccagtgtgctcatcaattcttataggttcaactgtcagttctataaggatgactgaaatttatcagccaaccctgactcttttcccgaatgcaagacctgcatttccagcctcccattggacatttccctat

SEQ ID NO: 17922 - DNA, 201 bp, Homo sapiens
agtaaacccataaatgccaagaccctgttcagtgtgagaaacattgttgggcaggatgggaaagttcaaagaaatatcagatgcaatccctgctttggtgsaatatttggtgtaacttggaaaattaaatggaaaaaaaattaaacaacaaaacagcacccagctgccaaataagtgaggaaggaaagacctcaggctgaa

SEQ ID NO: 17923 - DNA, 201 bp, Homo sapiens
gatttggggatgcctgggaatgcagtctcctggaattgcatttaggatcctgactcaatatgtattttcattctggtgtttcttttggtcctattccatgmgttggatagctgaacatggacagatatacaatatgaagtctctttggtttccatagtaacacattatttatctggcattgtcagctcattaactgttcca

SEQ ID NO: 17924 - DNA, 201 bp, Homo sapiens
acagaccctacaaacggactaaattattaaataatgaatcagcaattagttctaaaaatgtttatgtagtgcttactgtgtgccagacaccatgattaaargacaatcgaagtaactcggtaatcacctctgaactgccagtatgggtgttttatcaccttccatgttctgtgttgacggtttattgaacacattttgagt

SEQ ID NO: 17925 - DNA, 201 bp, Homo sapiens
ctgaactgccagtatgggtgttttatcaccttccatgttctgtgttgacggtttattgaacacattttgagttcttcagggcagtgcttattaaattcagygtgcgtttggatcgcctgggaatcatggtaaaatgcagattccgatttgaaagtgctgtggtggagcctgcgagtttgcatttctaacaagctcatgggg

SEQ ID NO: 17926 - DNA, 201 bp, Homo sapiens
ctctgggctggggagtggaagtgagggacataacatttactgagtattttatgtgagttattttacttaatcttcacaacactcctaggaggaaggtagtytgaattatgaaattgttccaatttcatagatgaggcacctaaagctcagacaggctcacttgcctggggtttggttttgtttctctttgtaaaaggtaag

SEQ ID NO: 17927 - DNA, 201 bp, Homo sapiens
tgtagatctaaaataccctgtccataggcagagataggtaaagaatggctaattactaaataattaataatagctggtgatgctgctggcccttatttgamctttacataagcacagctgcctctgggctcatcccaggggctatctttatcaacactagagtgtgataataaatgagtttctctaggaatttttcttttt

SEQ ID NO: 17928 - DNA, 201 bp, Homo sapiens
attgcagttgactggaaaggcctcctgaaatgctgatagctgtgggaggagggagagccctccctttccacatatgggcagatctttggcaaatccaaagrtggtcttgcatttttgtgaaagttcctatgcaggcagcgacaaacagctaggttgtttataaaagctgcaggtggaatgccatttcattttggatgtaga

SEQ ID NO: 17929 - DNA, 201 bp, Homo sapiens
tttcataagactataaagttagcaacctctggtatctggttaacagttcactttgtgcaggttattccagaggtagatagcatgagtttatgtcgaagccsaggattttgtgccaaacatccgtctctttgcaacagaattggagaattgttccagaattctttgaattcttaatttgcagaatttcataaagagttctac

SEQ ID NO: 17930 - DNA, 201 bp, Homo sapiens
accaaaatgaagataataacacatcagcaaatgtttgtgaaaatgtataaatgtgctttgcaaactctcatggatagatagcatgttattagtatgattgytctgctaatgagtgtagactttgctgaagttctcctcctcctcttcttcctgcctcttcttcctgctcattactgtcacaactaccccttatgaatttgt

SEQ ID NO: 17931 - DNA, 201 bp, Homo sapiens
cccttaccctgcaaactgccacctgctgtggtccctgcccacttacccacctccactggatgcccctcgatacccagctcactgtgcctcggtcatgacgrccttctttttcttccttggatgcaccaaaaccagggggcctgaggacctttgcatgtgctgtttgtcccctttgcctggaatgctattctccaagatctt

SEQ ID NO: 17932 - DNA, 201 bp, Homo sapiens
ttcacatttttcaagcatatatgaaagtgctttgatgaattgaataacaattcatagtgattttttgatgttctatattttttctaattaattgattctaratgttaaacctattagatgggaagaggactctagttcatttttgcattaaaagggttctttcttacttgaagctggtgggaactattggaagagggcgta

SEQ ID NO: 17933 - DNA, 201 bp, Homo sapiens
tccatgggaaaacaatcctcatgatatacatttttttaatagataaaactttggcagatccattttcaaccctggcattcagacctcctaaaattgctatyagctaatagagatttaggatatagaaagctgggaaggcagtcaaattggttcccggccactaaggccctgcatgcataagtatcacatgagggctatgga

SEQ ID NO: 17934 - DNA, 201 bp, Homo sapiens
tgttcaacctctatactgatggcttggttagacaaagatgacgtgcatgttgatcagattaatagaagacacagtgtttggaagttttgtgagcctgtggrtgacttaatctgaaaccagatgtctcaaacagcttgaacaattccaaaccagaggatatttgctagggaaaatataaattctgtactctggctgaaacaa

SEQ ID NO: 17935 - DNA, 201 bp, Homo sapiens
agtcgaggtgactgaaggtggaaatggcaatgcaccgagccctgagctggcaggtggtccagagagcagcgggccccagcccagctcctcagtatcattgyaagggttttgagaatccaacatcatcggtgatgagaaaaatgtttcacatttttcaagcatatatgaaagtgctttgatgaattgaataacaattcatag

SEQ ID NO: 17936 - DNA, 201 bp, Homo sapiens
atttgctgtgaaatacagtctatttacattaagaagacctctgtatatttaaggcataattgtttcagggccttcattaattcttgaactgcaagacctarattttcttttcttgtatcttttctataacaatggaagtcaggagtttccaaaaaaaataacaaattgttcctcattaaaatggaactgaaaatggttttc

SEQ ID NO: 17937 - DNA, 201 bp, Homo sapiens
tttttccttcatggttttatctaagttggggccacagaggggtgaatattgttctgttgaacaaacagggggatatggcagtgtctggggctttgggggaycagtggtggtttctgggtatggcttttgttctgaaggagcttccttccagaagtggggacgtgtgcccacagatgcctgtgccctgaagaggtgcaacaa

SEQ ID NO: 17938 - DNA, 201 bp, Homo sapiens
gagtcaaaactttgtttcatacacaaaattattaaaaatataggggccaggcatggtggttcacacatgtatgtaatcccagcactttgggaggctgaggmaggagaatcacttgagtccaggagtttgagaccactctgggcaacacagaaagaccctgtctctttaaaaaataataataattattattttatatatata

SEQ ID NO: 17939 - DNA, 201 bp, Homo sapiens
gtgctttgggtgtgcacgcgcgcgcgcgcgcgtgtgtgtgtgcgtgttacaaacaagagggggaaaagccatctaatgcatatttgattttggtaatctcyaaagacaatcgcaacagttagagaaagacttcaccgcaagccggagcgtcttagttcgctgcgggaagctggggtccttgctgcgtctgagccggtacac

SEQ ID NO: 17940 - DNA, 201 bp, Homo sapiens
gattaaatgagcaattggaactgcacctgccatatatagtatgtactctgtaaatgttacctcatgctattattatgctttcttaagcacacaaaatattygcaaacaacataagaataaaatggtaaagaaactgacttcagctgtaataactaaggtcctccaatgtgccaggtatgatgctccatactttatatacat

SEQ ID NO: 17941 - DNA, 201 bp, Homo sapiens
gaatgtgtgtgtgtgtgtgtgtgtgtgtgtgtgtgtgtgtgtgtgtgtgtgtgtgtttgagaaatcagcagctgtggttcttgctttcactcctcatggtraggaggtggcctacccctcacatctgttttcagcccctgttcctcaataccagagttattttctattaactcaatgcaccttttctttgtaattcttgtc

SEQ ID NO: 17942 - DNA, 201 bp, Homo sapiens
gtgttccttcaaagcctggcttactctctacttgaccacattgcctataaaatggggatggtaataacagttgccctgcttgctttgcaagcctgcggtgaggatcaaataagacagtaattgggaaagcactttgaaaattgcaaagcgctatgtaaatatatggtattattctaatgtatcacgggcctacaaaaacac

SEQ ID NO: 17943 - DNA, 201 bp, Homo sapiens
ctcacgtgttgtggcagagacctggtgggagataattgaatcgtcggggcagtttcccccatactgttctcgtcataatgaataagtctcatgaaatctgrtggttttatgaggttctcattcccttttgcctgccaccatgtaagacacttggttctcattccctcttgcctgcctccatgtaagatgtgcctttcatct

SEQ ID NO: 17944 - DNA, 201 bp, Homo sapiens
aacccaggtctgctcaggtgcagagcccagtgcttttctatttgcctctactgcctttattttcaggctgactgaaatatatgagcccaagttatgagcaygtgatggctcaagctgacattaaaattactggcatctgttctgtctatttccaggcagaatagaacctctcccattggcattataaagtaactcaaccac

SEQ ID NO: 17945 - DNA, 201 bp, Homo sapiens
ctggaaagatgtactcctcattgccagggcaggaaccatggaagaatcatttccatttttagaaattatcaattttgtgggttagccttaatctgaaattkaattacatttttagtggaggtttgttttatatcacatgatctccaacagaaattccagagagctttgtggcataaatagaaaaaaggctaatatatatat

SEQ ID NO: 17946 - DNA, 201 bp, Homo sapiens
ctttatacttccagtttagcatttacaggacatgtcattatctttcttctattttccttaccagacgatgagctccttaagggcagaggacatgtcatacytaattttgtattcccagtacctacaatagtgcctgacatgcagtagcttttgtttattgacttactgaatgagtggaagggtaattgaatgaatgcatgg

SEQ ID NO: 17947 - DNA, 201 bp, Homo sapiens
aaaaccacagagggcattggctagagtttgagccttttctgttgctgaagggaatacctaaagacttgcccaggaagagaaggctagagtgggagagtatwttggctggaactccaaggagcactttgaacgtgggtcttcagacatgaaagtgtagggagggcttcactccaccccaccctgtcctgtaattcctggact

SEQ ID NO: 17948 - DNA, 201 bp, Homo sapiens
aagataaaatccctttgtcactcactccatgagataccatctgatttggtttctgaaaattttggcaaaattatacattgcttgaaatctcattcccaggmtgtatttgaaataaagtcttttttttttaattttttactttaaatttcaggggtacttgtgcaggatgtgcagggtttttacataggtaaatgtgtgtca

SEQ ID NO: 17949 - DNA, 201 bp, Homo sapiens
ggatagattgaaagatatacacaccaccaagttgaattcctctcagatttgtccaaggccacccagcctttcttggccttttcttccatcattggttagtrtgtgttcttgaaggcagtctgattttatccttggcttaaaaagtggggaaatatttaggaagcctagcctaatgcaagagaactcatctatcttactgta

SEQ ID NO: 17950 - DNA, 201 bp, Homo sapiens
cgtccttggagctggcatagatcattttgcttttaaggggagcagactcagggacccagaagataaacaccaggtcctcctccttgctctccttggtctcrtaggttgtgtcacagagggtgtagtggcagtccttatctggcagcatcctgacaaaggtggtgtaggggtcgtcgatggtctggctcacatcgcccacca

SEQ ID NO: 17951 - DNA, 201 bp, Homo sapiens
cattcttttttggaaaatgaggtggttgcaatgcatggttcttaaggtcccttcttagcacaaacattcttgttcttgggccctggtattatggatattayacacatggtttttgctacttgccagggatccgggaaggtctgtggcacccggtaatttataattctgctgaggcaaggatttggccagaaggagtcacat

SEQ ID NO: 17952 - DNA, 201 bp, Homo sapiens
ctggttagtagcccaactaagattagaacccaggaattttgatttaatctcaaatgacctcttttatttctgcatccgggaaggagaagaggaaagtaaaygggaaattcatgttatctatggaaaagttatcagtttgatgtttattaaatgatttgtttcaggagattgtttacaacttttatcttcctagacaataat

SEQ ID NO: 17953 - DNA, 201 bp, Homo sapiens
tgtatccatgactcaaagccccatcccttttcagacaactagaggtgtacccactccattgcaatcatgaggaatttaagtttcaggacattccatcttgyttcttttgtttcctcaatgactaggcctgttctggatttttaggagttaaaatttggctgatgctcttttcaatcctaacaaaatgtctcactatccata

SEQ ID NO: 17954 - DNA, 201 bp, Homo sapiens
tttttaaaaaaatcagaaggctggagctagaagcagctttctcccataccttgaacaaatctttgacaatgatgggcctaggtgacctgatctctaaaacrattataataataattcctaccacatagcagaaaatgataataatagctgcatactgttattgaccacttcactcttctgaacattttacttcattatctt

SEQ ID NO: 17955 - DNA, 201 bp, Homo sapiens
ttttatccatgagactactgaggccttggaggttatttgtccatccatggcgggtgcacactagaggttatctggttagtagcccaactaagattagaacycaggaattttgatttaatctcaaatgacctcttttatttctgcatccgggaaggagaagaggaaagtaaacgggaaattcatgttatctatggaaaagtt

SEQ ID NO: 17956 - DNA, 201 bp, Homo sapiens
attcctaccacatagcagaaaatgataataatagctgcatactgttattgaccacttcactcttctgaacattttacttcattatcttatttaatcttcaraatgacaccttgagatgtgtaccattttttctattttaacacatggcgaaaccagagctttcagaggggaagtaacttgcttagggccacagagcagtca

SEQ ID NO: 17957 - DNA, 201 bp, Homo sapiens
tttgtagaaggaaaatatttgtatcttctattccatatcttagatctttataagagcacttaagttcaacctcctaagaaactgccaattttgttgatcaygatagtctgcacagattttcgtactatttagtgttgggagtgccttagggaccatcaacaacaggcccctccttttatccatgagactactgaggccttg

SEQ ID NO: 17958 - DNA, 201 bp, Homo sapiens
ccccatcccttttcagacaactagaggtgtacccactccattgcaatcatgaggaatttaagtttcaggacattccatcttgtttcttttgtttcctcaaygactaggcctgttctggatttttaggagttaaaatttggctgatgctcttttcaatcctaacaaaatgtctcactatccatagtcctttgcgatccactg

SEQ ID NO: 17959 - DNA, 201 bp, Homo sapiens
aacacatggcgaaaccagagctttcagaggggaagtaacttgcttagggccacagagcagtcagtcataattcaaatcaggagcctttgtgtccagggctktaacctagagcaggcctatgagagacggactctagtgaactgaagtagcagctaagcagaggtcattattattttaaaagcagtatctattggtcagaga

SEQ ID NO: 17960 - DNA, 201 bp, Homo sapiens
cctcgtcatcaccatgtgattgtgccttgcttgtccctgtttcacttttcagagggagaaaagtggccaactttaagaatcaaaattctgatgttacttcrggaaatgcatagagccagagagacacaatttgacttagtatgatccacatcatcccctcaggctgaatagtggtggcatgcacatctataccaaaatgtt

SEQ ID NO: 17961 - DNA, 201 bp, Homo sapiens
gtaacttgcttagggccacagagcagtcagtcataattcaaatcaggagcctttgtgtccagggctgtaacctagagcaggcctatgagagacggactctwgtgaactgaagtagcagctaagcagaggtcattattattttaaaagcagtatctattggtcagagaggacagtcttcctttttttctattttattacctt

SEQ ID NO: 17962 - DNA, 201 bp, Homo sapiens
cagcttagaacagtgccaggcacatggcaaatgctatggcatacttaagcatcttcctctgtggtgcctcgtcatcaccatgtgattgtgccttgcttgtycctgtttcacttttcagagggagaaaagtggccaactttaagaatcaaaattctgatgttacttcgggaaatgcatagagccagagagacacaatttgac

SEQ ID NO: 17963 - DNA, 201 bp, Homo sapiens
gacattccatcttgtttcttttgtttcctcaatgactaggcctgttctggatttttaggagttaaaatttggctgatgctcttttcaatcctaacaaaatrtctcactatccatagtcctttgcgatccactgacaagtgagaaaccaaaatgtaaggggttcccctttttttttttttttgccagccagcctaatgattt

SEQ ID NO: 17964 - DNA, 201 bp, Homo sapiens
taaatttttatagctatcatttgagttcctaatatgtgccaagcatatgctcagcatttgacatatattatttcaacatataatgcataagagacattgtrttagttatctattgctgtataaccaataaccccaaaatttaacaggttaaacccataaaagttcattatctcatatagtttctaagggtcaagaatccac

SEQ ID NO: 17965 - DNA, 201 bp, Homo sapiens
cagagggagaaaattggccaactttaggaatcaaaattccaatattgctccaggtaatgccagagaaacataatttgacctaatatggtccacatctttcyagtccagtgtcaacatcattcattaactagatatacactgttatgtactataaaaccataaccaactttccaccattttggagaaatttctagcataagg

SEQ ID NO: 17966 - DNA, 201 bp, Homo sapiens
tcatttcagtctacatccagcaccctgcattttccaaaattcatgctggggattgctaaaacagacggcatttgttggctgaagagtaaatcacgactttygtgggtacattcattcatttggaaagtatttttgatcattcactgggctaatagtgctgtggggaatttgaaaaaatgtattttatatggtttcaaaaac

SEQ ID NO: 17967 - DNA, 201 bp, Homo sapiens
gcatatgctcagcatttgacatatattatttcaacatataatgcataagagacattgtgttagttatctattgctgtataaccaataaccccaaaatttarcaggttaaacccataaaagttcattatctcatatagtttctaagggtcaagaatccacatgcaacttggctgagtggttcatgagattgccgtcatgctg

SEQ ID NO: 17968 - DNA, 201 bp, Homo sapiens
ctcaggaagggcaggctgctgcttctctccttctccttgttagcccccatgtgggtctcacccacctgcaggcctgtcttggctttgcagcaatactccayctctttgcccctgccctcctagcttgtctcccgttctttccctgctgtcaggggtggtgactgccctgtctccttcgcagagatcctcgacactggatct

SEQ ID NO: 17969 - DNA, 201 bp, Homo sapiens
ctgcttccaggctcactcagtgacttttggtaggaaaattccttgacatatgagcaaggaatccatgagtctgcttaagacatggctttcccagtgagtcrtatgacagaggaggagagagagagcccaagatggaagtcacagtcttttataacctaatttacagaagtgacatgccatcacttctgccatatactatta

SEQ ID NO: 17970 - DNA, 201 bp, Homo sapiens
caaaactgagtttggtgtcatctccacttctcttccctgcaaactggcttctcctgtgtttcctgtccccatgaatggccccattgtccatccagtgtccragccagaaatctccgctcttccatgtgttttccacccctccatgtgtgatgaaccgtccagttctgtggattccccctcccgtgttgatctcattcattt

SEQ ID NO: 17971 - DNA, 201 bp, Homo sapiens
ccctcctgagctatggactcatagcactggtagtcagctggatagttccccttggcagtctaacaactgtgtataagttggcttgttcaaaactgagtttkgtgtcatctccacttctcttccctgcaaactggcttctcctgtgtttcctgtccccatgaatggccccattgtccatccagtgtccgagccagaaatctc

SEQ ID NO: 17972 - DNA, 201 bp, Homo sapiens
acagttattattaaagtgctgaggaatttaattcaataaggtcagggacatctgctgtgcttgcttgcccaatgtccatttattcttctttttacaagaastgcttgcttttcctttgcggaaaaccacctcatgcccattctgtctaggtggagctgacccttacctaaatcagggtggccacatgaccaagccagccca

SEQ ID NO: 17973 - DNA, 201 bp, Homo sapiens
tgtctgcatagagctctgaccaaactcaaagctcatgttcttttaccagacactctgctatctctcatttgaagatttttctgaaataaatacaagcatgrtgattggttccacctctggattacatcatgccgatttccattatatgatatgacatcaaaatcttcccgtgctgatgaagaactctatcatagtattact

SEQ ID NO: 17974 - DNA, 201 bp, Homo sapiens
ttgaattacatatagtttactaaatagattcttagcaaaaatacaagaaggtgcagttcataggttgctctagctgcaacatggtgctagtgataattttrgtccctctactttggagaactggggagcccccaggccagatcatagaggaatcatctccctcttgttctgccggatcttttcttccatgcttcctggtcc

SEQ ID NO: 17975 - DNA, 201 bp, Homo sapiens
aatttggctgatgctcttttcaatcctaacaaaatgtctcactatccatagtcctttgcgatccactgacaagtgagaaaccaaaatgtaaggggttcccytttttttttttttttgccagccagcctaatgatttggcatgctggcaactgcgtggttttgaaccgtgaggctgctctgagtacctgcatccttgtcctc

SEQ ID NO: 17976 - DNA, 201 bp, Homo sapiens
cagtgctttttaaccagagcaggtagaagaggaccacgatgttcttgatcattacccagtattgccaatgaatactactatgttgctataagtgccatatrtaaaattttttgagcaattgcatcatgctgttgctgggttcatctgagcctttaaatcttcagtaaaacttattagtaatcttttgtttgtttttagggt

SEQ ID NO: 17977 - DNA, 201 bp, Homo sapiens
atctttttcaggggctaagtgtaaactagaaagacaaaaggaactgaaagtttagaacgtcttagacaagtacattaggctaaccctccattcccagcagrtatttatgttgctagggaaataaaagccagaaagactcagttctgattgaagaatcaatttaggaggttgatatggtttggctctgtgtccccacccaaa

SEQ ID NO: 17978 - DNA, 201 bp, Homo sapiens
gtaaaataaggatgttaatggcatctacctactagaattgtttcaaggaataaatgggttaatacaaataaagctcttagaacagtgcctggcacttagtsctcagtgagtccttgggataaccctctagagaggccaagatctgggctgtgctgcggactgctctttaccttatcctaacaatgaaaggacacagtgtgc

SEQ ID NO: 17979 - DNA, 201 bp, Homo sapiens
taaaataaggatgttaatggcatctacctactagaattgtttcaaggaataaatgggttaatacaaataaagctcttagaacagtgcctggcacttagtgstcagtgagtccttgggataaccctctagagaggccaagatctgggctgtgctgcggactgctctttaccttatcctaacaatgaaaggacacagtgtgcc

SEQ ID NO: 17980 - DNA, 201 bp, Homo sapiens
ttcccagtgagtcgtatgacagaggaggagagagagagcccaagatggaagtcacagtcttttataacctaatttacagaagtgacatgccatcacttctrccatatactattagtcatagagtttgactgtggtaaatataggagggactacacaaggatgtgaaagccaggaggtggaaacactagggctatcttgaag

SEQ ID NO: 17981 - DNA, 201 bp, Homo sapiens
gtttcaggctctcctgtccttgcagatactgcttactgaggaaggattggccatctataagtctaggctggggtgccctcctgagctatggactcatagcrctggtagtcagctggatagttccccttggcagtctaacaactgtgtataagttggcttgttcaaaactgagtttggtgtcatctccacttctcttccctg

SEQ ID NO: 17982 - DNA, 201 bp, Homo sapiens
ccaggaagtgagcaggctgggatttgaacactgatctggtgaactgcactgcctgtatgctttccagaatgaatacccaatgcagagagtcctggaagaaygaagtgcatgcagccctggctttgggtattctagcatgtttctgagggtgcccccggatggctgtttgctcacagatacctatctttatatagttagtat

SEQ ID NO: 17983 - DNA, 201 bp, Homo sapiens
aggctgggatttgaacactgatctggtgaactgcactgcctgtatgctttccagaatgaatacccaatgcagagagtcctggaagaatgaagtgcatgcarccctggctttgggtattctagcatgtttctgagggtgcccccggatggctgtttgctcacagatacctatctttatatagttagtatgtccctgaagagc

SEQ ID NO: 17984 - DNA, 201 bp, Homo sapiens
ttttagctttcctttcaactgagggaactggcattgcatatggtgaggctcatcttctttactggaaaatgaccaagcattgaaccaatcgcttgaaaagytcttacttcagatcaatttcctgtaccaaatgatatcaccttactaggaggccttcactcttgtttttcaatgacccttatttcctctgcttatatgctt

SEQ ID NO: 17985 - DNA, 201 bp, Homo sapiens
caataagcttctgaaacctctgaactttttgggctcaccaccatgccagtaagaagtgcttgttggtgtcttaacctttgctgacagaaatctgatataayaccacaatgattgttgccactggctttgtaacaaactgttttttggttaagcttctggcaggaaacacatggcacaagccgatagactaagggaaatgtt

SEQ ID NO: 17986 - DNA, 201 bp, Homo sapiens
ggaagggaaatgaaagtttggggtggtggtggaggagtttcaggtagaagaaatcattcacaaaggcataaaagtgagagacagcctggtccattttggarcaagaaattgggccataattgatgtttgtatctctaccttccagagtctcagaaactagaatgtttttctaggactgttccaaatccaaatgttgtctac

SEQ ID NO: 17987 - DNA, 201 bp, Homo sapiens
ccaacaagcaaacctcttctttttccttctcctgttgccccaacaacagaggatgaggacccccccttgcatcctattctcctcctgccctcattgtcccrccttccctgagggagtgggagagtggctgctgggaagggaatggaaagcacatgggttgcatatcttcaaaacatgatctccactgcatgaagtctgtca

SEQ ID NO: 17988 - DNA, 201 bp, Homo sapiens
caaaaaaaggaatattggaagcaggaagaaattgttttctgtatgccttaagaacaccacaaggcaggatgaatctacaaccattactcggtcatccaggrcaatctgtgggtaaactgtgtccttcgttatgtctgttaatactgcagaagaagcatataggtatctagtaagaaaatggaattcctgagtcagttaact

SEQ ID NO: 17989 - DNA, 201 bp, Homo sapiens
atttcattcccatgtgggagatgcgaatccatgatgccaacaagcaaacctcttctttttccttctcctgttgccccaacaacagaggatgaggacccccscttgcatcctattctcctcctgccctcattgtcccaccttccctgagggagtgggagagtggctgctgggaagggaatggaaagcacatgggttgcatat

SEQ ID NO: 17990 - DNA, 201 bp, Homo sapiens
ctgggaatggcatggccttccaggatccttccttccaccctctagctttcccccaccaccgtagcagtttccatttttaccgttatcccaagtacattgcyaagcaagtgtgactcaggggctctctcggctagaaggcctctgagcctagttttgaaggccatctgagtcctaggcctttgtgcgtgacccataattatc

SEQ ID NO: 17991 - DNA, 201 bp, Homo sapiens
tgatgtttgtatctctaccttccagagtctcagaaactagaatgtttttctaggactgttccaaatccaaatgttgtctacggccataccacgctgaacaygcccgttctcatccaaatgttgtatcatttatcccccaaaatatagtgtatgacaaggagctcaaaacttattctcaatgccatgactaatagtgtttta

SEQ ID NO: 17992 - DNA, 201 bp, Homo sapiens
gccttgaagccaggccaggggaatttgatatttactaatgtgaatacctgagtgccctgagaatagtggggactccaaaatttctgtctaggagcaatttraggatagctctcaggtggagggtaggggtgatggaaggggtagaggatctgtcttagagctagcaagcaaaagattttacctaggttgtgtatttacttg

SEQ ID NO: 17993 - DNA, 201 bp, Homo sapiens
aactagaatgtttttctaggactgttccaaatccaaatgttgtctacggccataccacgctgaacacgcccgttctcatccaaatgttgtatcatttatcmcccaaaatatagtgtatgacaaggagctcaaaacttattctcaatgccatgactaatagtgttttaaaactatatttttctgcctggtgttcatcatgac

SEQ ID NO: 17994 - DNA, 201 bp, Homo sapiens
caccaccagcccacatgctgcccactctgcctacccacacctagttatagaagctttagaccccataaaacctggatctgcccctgagaaccagaagtacraatatgctgaagtagggaacaagcttggtgtagtctaagagccttaagaaaaaagaaaattggtgtagacgagctgtgcttaagatggagtttaatagta

SEQ ID NO: 17995 - DNA, 201 bp, Homo sapiens
tttcgttgtggtaaattggaaataccctagagactgtcaaagagggatgtgaaaatatttcagaaatattatttcatgcctcctgactacaggatggtggygaggactccttcgtctgaggcacttagagctgttgaaggtgtgttgcctggaaatgcacctcatgggaagacttgcaggtgtgagcggttgcctaggaat

SEQ ID NO: 17996 - DNA, 201 bp, Homo sapiens
ttatacaccttctcataaagggatcatggatattattgctatgtatgtccagaatagctcttcttacttttgaggagtaactattagagtcttaccaggtrccaaccacagtgcttcacattcttgccacagagactggtccaaggataggcagatgacaaaaccaggcaaattctaattcttccacaaatgttttctaat

SEQ ID NO: 17997 - DNA, 201 bp, Homo sapiens
aaaacctggatctgcccctgagaaccagaagtacaaatatgctgaagtagggaacaagcttggtgtagtctaagagccttaagaaaaaagaaaattggtgyagacgagctgtgcttaagatggagtttaatagtagattcattcattcattggttcatttattaaatatcaatttactgagtgccaggcactactatgaaa

SEQ ID NO: 17998 - DNA, 201 bp, Homo sapiens
tatacaccttctcataaagggatcatggatattattgctatgtatgtccagaatagctcttcttacttttgaggagtaactattagagtcttaccaggtgycaaccacagtgcttcacattcttgccacagagactggtccaaggataggcagatgacaaaaccaggcaaattctaattcttccacaaatgttttctaata

SEQ ID NO: 17999 - DNA, 201 bp, Homo sapiens
tttattttctcatccataaggcaaggataagaatagtacttaaaagggatattttttacactttgagatagcatgtctggcacctcacaggtacttaatarccagaaattactattattgttataactgatgagtacagatcttttttttaacttttattttaagttaaggtgtacaagggcaggtttgttatgtaggtaa

SEQ ID NO: 18000 - DNA, 201 bp, Homo sapiens
tgccatcaggagacctgagagagaatgatctctcacacagaggcaaagggaataggaatgtgtgtgggaggatttcccagggagccatgaagatgacgttytgggctccaccctttatgcctctccaggggcctaggaggggccttagctattttgcatttgtaatttctcttaaagacacccccccctcaccaccagccc

SEQ ID NO: 18001 - DNA, 201 bp, Homo sapiens
ttcagtgttgagccagccatatcactgccttgccatagagtcattgggctagaagtgatccctaagaaatcatcctgaccagcccgtcaggactcagaacrtgagcaatttttcaaaatttcaaagaggaaatttcatacttttccatccaaattgcaagagagaacaagatccatcattgttcacaaacttcactgtcaa

SEQ ID NO: 18002 - DNA, 201 bp, Homo sapiens
gacactttcatcagtatgtctacttcagtgttgagccagccatatcactgccttgccatagagtcattgggctagaagtgatccctaagaaatcatcctgrccagcccgtcaggactcagaacgtgagcaatttttcaaaatttcaaagaggaaatttcatacttttccatccaaattgcaagagagaacaagatccatca

SEQ ID NO: 18003 - DNA, 201 bp, Homo sapiens
aaccaaatgcaaagacgaactacctacctctatctaaaccaagacactttcatcagtatgtctacttcagtgttgagccagccatatcactgccttgccakagagtcattgggctagaagtgatccctaagaaatcatcctgaccagcccgtcaggactcagaacgtgagcaatttttcaaaatttcaaagaggaaatttc

SEQ ID NO: 18004 - DNA, 201 bp, Homo sapiens
ttaagtaacatgtgtccgaggtcacatggttaataagaagtggacccaggactcacatctgtactcagccttttaaactgtggtttatgcatgtatgttgygtatgtgtttttgtgtgtgtaaacagataaaacttgagaataacttcattttacagtgagttgtaagctagtggggcagatttgaaatgagccctttttc

SEQ ID NO: 18005 - DNA, 201 bp, Homo sapiens
ttccctcaccatctaatctcacctgcatacccagtgtgctcatcaattcttataggttcaactgtcagttctataaggatgactgaaatttatcagccaamcctgactcttttcccgaatgcaagacctgcatttccagcctcccattggacatttccctatggacagcctgccagcattccctatttcacctctccacat

SEQ ID NO: 18006 - DNA, 201 bp, Homo sapiens
aggtgtgagttacctcattcaggccctcctgccttccttttattatatggtagggtgggatgggcaggaatttgttgtcttttgggggcttctgatgtccraatgtcttattaattagccctaccaacagacacaactcagaccagagctaaccctgtcaatttagacatcacttcctctaggaagcctttgctatatccc

SEQ ID NO: 18007 - DNA, 201 bp, Homo sapiens
agacacacaccagcatgcccagctaatttttgtatttttttgtagagaacagggtctcactttgttgcctagactggtctcaaactcgtgggctcaagcartcctccgctctgccttccaaagtgctgggattataggtgtgagttacctcattcaggccctcctgccttccttttattatatggtagggtgggatgggca

SEQ ID NO: 18008 - DNA, 201 bp, Homo sapiens
ggttcaaccaatcctcgtgcatcagcctcccaagtagcttggactacagacacacaccagcatgcccagctaatttttgtatttttttgtagagaacaggrtctcactttgttgcctagactggtctcaaactcgtgggctcaagcagtcctccgctctgccttccaaagtgctgggattataggtgtgagttacctcatt

SEQ ID NO: 18009 - DNA, 201 bp, Homo sapiens
tgcgcccggcctggttcgagctttttcatccgagttcttacacatagaaagtgctaatacatatgcatatataatgaatgaataagtcaatctctatagtwccgtggaagagagcccaagtatgatagttttaaagtaatatagttttcaagaatacagtctatttttattcactttaaagatgtgtgtcattgtggtgct

SEQ ID NO: 18010 - DNA, 201 bp, Homo sapiens
gcccggcctggttcgagctttttcatccgagttcttacacatagaaagtgctaatacatatgcatatataatgaatgaataagtcaatctctatagtaccrtggaagagagcccaagtatgatagttttaaagtaatatagttttcaagaatacagtctatttttattcactttaaagatgtgtgtcattgtggtgctttt

SEQ ID NO: 18011 - DNA, 201 bp, Homo sapiens
ctgtctacaatttctagagcctattagtcacttcatagccatctgggttatcagatagatcctcacagtgtatactcatcttggtatcacagtgcttgtgwttgagtaactcttattttatttaataatggcctcaaagtgcaagagtagtgatgctggcatattactatgttctgttttattattagttattattgttaa

SEQ ID NO: 18012 - DNA, 201 bp, Homo sapiens
ggcaacacaagattctccatggtcttacccctactgactcttcttatcttacctcctgtccccatactcaatattcaatttatttcaataatctgcctccrattccctaaacataccattctctttccagcctctatacctttgttcatgcagcttcctctgactgggtttgttcttcacttggctaacccctcttttact

SEQ ID NO: 18013 - DNA, 201 bp, Homo sapiens
tggtcggtagcatttctactgcccccaaagccaaggaagaatgatgcccctgatggttcttcccatttagaaggaactgcagtttacacacattaccttayctgattctcagatgtcctcaagtgatgttatcatgatctatcattattttccctgctttatagaagggaaaacagtcccagaggaggtaggtgactcctt

SEQ ID NO: 18014 - DNA, 201 bp, Homo sapiens
cttaaaaaaaaaaaaatactgaggcctgtttccaactgcaaatagttctctgtgctgacagactatatatatatatatatatatatatatatatatgtatrtatatacacacacattttgtcctggtttgccttttcaaatggctttctttaccaggttggagctttagcagggaagtgtgcagtgtgggtcttataaaca

SEQ ID NO: 18015 - DNA, 201 bp, Homo sapiens
atgacccaaatgccatcagtagaggagcggttaaacaaattgtggtatatccagacagtgaaacattatttatccataaaaaggaatgaaatacagatacrtgctacaaacctggatgaacctggaaaacattatactaagtaaaagaagccagacaccattgtatgatccatttatatgaaatttccagaatagataaat

SEQ ID NO: 18016 - DNA, 201 bp, Homo sapiens
catattgcaggtagcattacaggaacatccacacttgtgataaaaggagttatttatgaggtagctgtggtttcaaatgtaaaggagaaaaaaaagtcctkcaaattatgaaagctttggtaaaaatcccaagttggatgttgctggcatttctgagagggtgaaagggagattaaccaggaataaaatgggaaagtccat

SEQ ID NO: 18017 - DNA, 201 bp, Homo sapiens
ttttaaaaagggatgttttccatttattcatggccatgatggtcttttgggaaagcattagtaagttgtgtttgcttgggtaaagagaaattgctatccayatgacagaaaataactcccactttaataaactgctcactgagcaaacctatggaccgtccatctctttgagctgtgtgatgactttccttcaagggtttt

SEQ ID NO: 18018 - DNA, 201 bp, Homo sapiens
actattggtgctttccagctgacctcttattgtccagaaataagtgaagaagatctattggttccaaacacattatcacggagcacttgcaatctattcgytttctgccttggtttatcaaagctaagcaaggggtgctctaaagtgaaaaggtggagaccttagattcagctgctttctgaagtctctcctcttctccca

SEQ ID NO: 18019 - DNA, 201 bp, Homo sapiens
ttataaaaagaaatgtttctaaacactgattttgtttgtgtgtgtgtatataatgctttatgtaccctagaacttaaaatataattatatatatatatatwtatatatatatatataaagattttatgtgtaagggattatcattactgattatagtctgatcattattataactagattacaaattgaccactaatatga

SEQ ID NO: 18020 - DNA, 201 bp, Homo sapiens
gagatcaaggtgggaggattgcttgagtccaggagttcaagaccagcctgggcaacatagcaagaccctgtctctacaaaaaaaaaaaaaaaaaaaaagtraaaaaactagccaagcatggtggcacaagcctgtagttacagctactcaggaggctaaggcaggagaatcacttaagcctggaagtttgaggctgcagtg

SEQ ID NO: 18021 - DNA, 201 bp, Homo sapiens
attacctttttactcaaggtcccttgaggcctgagtgtgcccacttgctccccactgtattcccagtgccttgcagggggagttgcttcacaaatactgaycggattgctgtgcaatgaaatctccgtgaagcccatgatattaatcacatctttcactaaggtaggtttcaaatttttgtttgtccttgtaatttttttg

SEQ ID NO: 18022 - DNA, 201 bp, Homo sapiens
atatatatataaagattttatgtgtaagggattatcattactgattatagtctgatcattattataactagattacaaattgaccactaatatgattagaracaagcaatatctggagtaatttctcatctgtggagaaaaatattgtgggttaaaaggcgaaaaacacatagggattattattttttttttcttttgaga

SEQ ID NO: 18023 - DNA, 201 bp, Homo sapiens
gatcagaagtcatgtcttctttatgcatccttatctctccaacatctagtgcagttgtttgaataaagagagaaatgaatgagtggtgaaaatcagaataygggagccgaaagttactttagagtagctgtcctcaagctttggtgggtgttagagtcacttggagagacccgggttcgttgaatcaggctagaccctatt

SEQ ID NO: 18024 - DNA, 201 bp, Homo sapiens
taactattgtatcactgttaagcacttgggcaattttgaggatgaataatccaataaaatcgaactgtttccatctaaactccttccacactttacatggyggtgttatttgtgcaaatactgttttgtgttgtctctttttcactaaatcatatatgtacacatttcaaagctcttggctttattatatatttcttataa

SEQ ID NO: 18025 - DNA, 201 bp, Homo sapiens
tgaggacaaagaaggtaagtgacctatccaaggttgtatggaaataaccttgttggcagccaaagtgggaccaagaccctggtcttctcatttccagtccrgtgacttttccactcagcaatgccaagttcagtcccagcatcatgcttcagttagggaatgccctagagaaacttgaaatgtacttggctggcatttttc

SEQ ID NO: 18026 - DNA, 201 bp, Homo sapiens
agccccacataacagcaacctgggcccagggattgtgaagccttttcatttctggttaatcagtgggagaggtggggagccatgagcctgccttggacccrccagccccgaaactaaaagactaaagttgcagggcttatggggagttcgcctagtgcacttaagaaatagggatggaacttgccttgttccacctttggg

SEQ ID NO: 18027 - DNA, 201 bp, Homo sapiens
cctaaaaacagtaggagtcatcaatgcaatttaaccaggtggaactttcattaaaatgtaactatgtgatgtgaggatggggaagaaggaactaattggcsctttctcttcagacctcttgacttcagctttctggggactggcatttccactgttcttccatcatttctgagggtatcattggtttaccctctcaatcca

SEQ ID NO: 18028 - DNA, 201 bp, Homo sapiens
agagccaccattccagtctaataagctatgggattgccgtggtctctctccaaaggcaggccctttggaaatctcctctaatgcttctaacagcctataarttactatatttaatattgcccttgtctttctcccttcccttctttttcttttcagaaacagagctgtcagtcagtgctgaattagtgcctacctcatcat

SEQ ID NO: 18029 - DNA, 201 bp, Homo sapiens
ttggggatgcagtgtatgcttattggtcaaaatggtaaataaatgtaaatggtaaataataatagctaacactgagtacctcttgaaaagcagttcttatyccttctctgctgtaatgataactaacatttactaaaggctttcttttgttcagtatgctttttccttcagtagctcatgtgatcatcctgccttaggagg

SEQ ID NO: 18030 - DNA, 201 bp, Homo sapiens
cccctttgaccatgacatcaacagtgctccaaattatggggtaccgtattagcctatgtctatcttgatcagaatccttacctcggtgtattgaaattatytatttcgtgcctgcctctttaaagtcagggtttgccttatctattgtctaacaccatgcagtaggtaacatgcagtaggaaacatggcattaaattattt

SEQ ID NO: 18031 - DNA, 201 bp, Homo sapiens
acctggtcttctgcttgtactcccacttgacagagcatctagagtgattttattaaaatataaaccagatcattcattcgcttttgtaaaactcttcagcrgtttccaattgcactttgaatcaatctgtaccccttaccctgcaaactgccacctgctgtggtccctgcccacttacccacctccactggatgcccctcg

SEQ ID NO: 18032 - DNA, 201 bp, Homo sapiens
tgaattatgaaattgttccaatttcatagatgaggcacctaaagctcagacaggctcacttgcctggggtttggttttgtttctctttgtaaaaggtaagwcttttcaatttagtaggtcaaaacacgtgattctctccttttcataagactataaagttagcaacctctggtatctggttaacagttcactttgtgcagg

SEQ ID NO: 18033 - DNA, 201 bp, Homo sapiens
gactgtccaggaaaatggagatgtggcagatggagctgcagaccacgtggggagagccctggccacaggaaatgactgtggttggtagaggggaaagtatkggacagttaaggagttgccacctgcccctggtggaggcaaatgttgttttgtggaaagcacgtggcataatgacagggcctctgcaggctcagtgatgtg

SEQ ID NO: 18034 - DNA, 201 bp, Homo sapiens
acattatctctttaatcatcataacaactctcagggagagattttctcactctccccctccgcattttacagatatggaaacggaagtccggaagactcagtgtgatcatctgaattgctctttaagacttttttattctttactactttcccaagttgccaaagcctggcagctagcagcaagtcctctgccctggatct

SEQ ID NO: 18035 - DNA, 201 bp, Homo sapiens
aaatttattttttctggtctgtccattgttgatttctcatctaccccctccctatgcaaagctcaacttctttaggaacctgaagcttaccttataactgyacccaagcccagggctttaggaacctacctggcctttctcaaaatcttatagattctgtggtttggctgctgggagccagagggaggtggcttgctactg

SEQ ID NO: 18036 - DNA, 201 bp, Homo sapiens
cagtgcttgccaggcacattacacttaagtggtagctgttattttattatttaaaaagatagctttgccacaaaccagatatgtgacattgagtaagtcargccatgtaggtggctgggctttggttttctcatataaaatgtgaaatttagagctatagtcccttctacttctaaagttcactgagcctttgaatcccct

SEQ ID NO: 18037 - DNA, 201 bp, Homo sapiens
cattcttccctttggatactctacaatttagtggaagagaaaaactttagacaaggtttttcacatacacagaaatactgaaaatcatttaattccagcartgataggtgctgcaaaggagatgaatgaaaaaataagacttatcctggaatataggatcagatccatcctaggtaggcccagctaatggctgaggtagag

SEQ ID NO: 18038 - DNA, 201 bp, Homo sapiens
ttgctattcttctgtactgccaggtctctgagggctacaaaaatgaatttaacattgcaacgctaactgtttttacttagtgctacagccccatttccccrtaagagccctggcatgtccactaataaggtaaccccaggccattcactaaacctctctggacttcttgtgtcctcagttgtcacacaagggtaaaaatgt

SEQ ID NO: 18039 - DNA, 201 bp, Homo sapiens
actaaacctctctggacttcttgtgtcctcagttgtcacacaagggtaaaaatgtctacacgaagtcattcccagatcctaatatgataatgttgtgcttygtaaaatgtaaattgacttgaatatatgtctctttatttttacatcaagaaacagtaggtgatctgaaattatctctgcttaccaagcatctgtgttaaa

SEQ ID NO: 18040 - DNA, 201 bp, Homo sapiens
ctcaaggtcccttgaggcctgagtgtgcccacttgctccccactgtattcccagtgccttgcagggggagttgcttcacaaatactgaccggattgctgtkcaatgaaatctccgtgaagcccatgatattaatcacatctttcactaaggtaggtttcaaatttttgtttgtccttgtaatttttttgttttaattttta

SEQ ID NO: 18041 - DNA, 201 bp, Homo sapiens
tttttaaaatttggaatttagcctgggtgcagtggcttgtgcccataaacctagcactttgggaggccaaggcagaaggatcacttcagcctgggaggtcracaccaccctgaacaacatagggagaccctgtctctacaacaaaacaaaataaaacaaataggtgtggtggcacatgcctgtagtcccagctacttggga

SEQ ID NO: 18042 - DNA, 201 bp, Homo sapiens
ccagtcaggaaatggtgtgttatttttgagaagcaaaaccttttggtggttctcgactgttctccaaagacgcaatgtgcactgggcctccacgtagggarctccctttgctgagtctttaaaggaacctactggctgatgatgattattattaataaagtctaatatccagagagcaggattctttcccatgaacaggac

SEQ ID NO: 18043 - DNA, 201 bp, Homo sapiens
ggaaatatcaagcaaactgagtgaagaacattccacataataactgtcctgtatttgtcataggccaatgtcatgaaaagcaaaggctgaggaactgttcyaagttaaaggagactaaagagacatggtcactaaatgcaatgggtaaccctggactgggttttgtgctggagggtagaaaaaacaaatgctctgaagtac

SEQ ID NO: 18044 - DNA, 201 bp, Homo sapiens
gattccaaagcccttgctcttggatgctgtgacttagagtttttcaaatgccactttcttaaaaaggggtcttctagaaataaaaacttttaagaaaaggygaactttcaatggtggaaatgtgtgtattgtggcagtccagtcaggaaatggtgtgttatttttgagaagcaaaaccttttggtggttctcgactgttct

SEQ ID NO: 18045 - DNA, 201 bp, Homo sapiens
gtaaagtgtctatttagaggccatgctttctgttgatgttgacattgctgttttttgtttgtgggggttttgtttttgtttttactttataataacatttmtttatgtaaaaaggaatgtttgggctggggctaggagaaatgttgaggtaatggaaaactctaataatgcgatcatctattgaagacacgagctcaggga

SEQ ID NO: 18046 - DNA, 201 bp, Homo sapiens
agggccaatgtgaaaaggacatttcactgaggacatgatggggttgccttgtttttcttgcttcttaaagagccatttcaattaatttttttcacacatawtcctgaccccttggcctcccagtagaatgctatacgtgcacaacaggaattttggcgtttattgtttatcctctgggggaatgtggtcccccttttactg

SEQ ID NO: 18047 - DNA, 201 bp, Homo sapiens
gaactaccatttgatccagcaatcccattacccagaggaaaagaagtcattatacaaaaaggatacttacacacacatatttatagcagcacaatttgctrttgcaaaaaatgtggtatcagtccaaatgcccatcaatcaatgagtgtataaagaaattgtgagatatatatatatgtatatatacatacacatatacac

SEQ ID NO: 18048 - DNA, 201 bp, Homo sapiens
cagcacgtggaccataaatgttgtcatggtttgacagtattaatgaaacacttcatcgtgtgtcagccagcctcaccttgacaggtcatctctggctggcrtaacccaagggccaatgtgaaaaggacatttcactgaggacatgatggggttgccttgtttttcttgcttcttaaagagccatttcaattaatttttttc

SEQ ID NO: 18049 - DNA, 201 bp, Homo sapiens
ccgggtgccagacactgttctaagtactttacttgcgttatctcatttaacccttacaaaattatctccattttacagaggaggaaaccgtggcaagaagrggaggcagagtgaagattcaaattcaggcattctactctcagtttatgctctcagccagagccctccagtgaaacctttttctcctgtgcccagcaccct

SEQ ID NO: 18050 - DNA, 201 bp, Homo sapiens
tgcagcagataccagtatgtgaagaaaagacaccctgtccttggagggttacatttctcttttaggaggcacagcttggcaacgaagctatattctacctyctactcttccccaccgctgggcattttgtgtaatctgcaaaataaatgataaagttggcttggcatggtggcttatgcctgtaattccagcagattggga

SEQ ID NO: 18051 - DNA, 201 bp, Homo sapiens
gtatgcaggagcccactttgtaatgttattcattgcttcaattttcaatttggcttgggttaagaaaaaaagtatttttttttctctcaaaccagtgagcrggggaagaatgataaaaatcacattttctgaaattactctagcttatgtaagaagtttgatctgccagtatttgcctttttctcacatcacctgctgcat

SEQ ID NO: 18052 - DNA, 201 bp, Homo sapiens
ataaagttggcttggcatggtggcttatgcctgtaattccagcagattgggaagctgaggccagaagatcatatgagcccaggagttcgagagcagcctgrgcaatacagtgagactctatctctacaaaaaataataaaattagccaggcatggtggagcgtgacgattgtcccagctactcaggaggctgaagtgggag

SEQ ID NO: 18053 - DNA, 201 bp, Homo sapiens
gacctggtattgagtccccatctggccaattaatcaccaagttatcaaataaagcctatttgatctcttcgacctcattttcctcatctttgaaatatctkcctcttagcatgattttgaggatcaaatagagataatatatggaaaattctttgtatgcaggagcccactttgtaatgttattcattgcttcaattttca

SEQ ID NO: 18054 - DNA, 201 bp, Homo sapiens
aaaggtgaaaatatttactagctagccctttacagaagaattttgctaactaacctgtcctagatcataaactctaggagggctggggacattgaaggtaktcagtaagttttgactgaatgaatgaatgaatgaatggatgaatgaatgaatggtcaggaaattggaatttgttggatatgtaatttgacagcagacttt

SEQ ID NO: 18055 - DNA, 201 bp, Homo sapiens
tcatgtaatgaaaacaggagataggcagtagacatttccatggaaactgacatttccatcccataatgtcttctgggacccagacaccttttctgtttccsccagtcatccttagtgtgtgcttctcatctgtagtcctaagtttgctgatcctccttctgcctcacgtccatgttcttgttagaagaatgagatgggcaa

SEQ ID NO: 18056 - DNA, 201 bp, Homo sapiens
cttttgaaccctctatgtagtgctataaaataaatatgtcctcaaccaagtcctgattgactaagaaaaccagtgattggtcaatgatgttactttgtctyctgctaaacatttttggggcaggggatagaggggtgtgggagaatgggagttcaactcagaggaaacttagtaaagaggaaaagacataacagacctggt

SEQ ID NO: 18057 - DNA, 201 bp, Homo sapiens
cctcccaaagtgcatttcttaaattcttatatatgcctcagtttactcatctgtataagagggtaaatagaacttacctcttatggttgtaacgataaatraataagataaagtatatatatgtgtatatatatatatcacttaaaaagaataagcactcaatatatatttattttattaatactgctattatcatctgct

SEQ ID NO: 18058 - DNA, 201 bp, Homo sapiens
tgtctatggacatcaaagatcctagttcttgggcctttggacgctgggacttacacctgtgctaccctaatcctggttctcagacctttggactcagactrcattataccactgactttctggttctctcacttggcttttggagatggcatattgtcggattgctcagcctccatgattgtatgacccaacccccataat

SEQ ID NO: 18059 - DNA, 201 bp, Homo sapiens
atgcaacctagatccctcgcatgcgcagttcacagtagagttcacgctcctatgagaatctaatgccatcgctggctgatctgacaggaagtggagctcargtggtgatgtgagcgatgaggagtggctataaatacagatgaagctttggtcactctcccaccgctcacctcctgctgtgcaaccccgttcctaacaggc

SEQ ID NO: 18060 - DNA, 201 bp, Homo sapiens
gctcatccctaagttgctgcctaggactgtgctccgggcctctgcaaggaggagttagtaaaggtgcagagaaagtccaggacttaacactgattagtctycctccccagaaagaaagcacctggcacagggaataaagcatttccccccttacgctggctacaacttgattttttttttttttttttttttttttttttt

SEQ ID NO: 18061 - DNA, 201 bp, Homo sapiens
atctcctagatttattgtaggagttcagtgggttaatacatggaaaacactttaaaagtgtattggcatatagaaaaaaacataatagctatcattattaytattatttcaagagctgtatttgaatagtatgctgagtaatgagacagatccttatgtttcaatggtgaccaaagatttagaaatgttagcatagttgcc

SEQ ID NO: 18062 - DNA, 201 bp, Homo sapiens
ggggcacttctgtgcagggcgtccccccttgtctccctggacctctagcgcgccccagccggtgttcaggcaagtctatcctgcccccaagttgcgagccsgcccggaaggcgcggtccaggagggagtttggattttcagtggtgctcgccagagcccaggcggctcgcggatcgacgcaaacaaaagccctgtcctcct

SEQ ID NO: 18063 - DNA, 201 bp, Homo sapiens
agcttattgcctgggacaaaatgggctctaaataaggaagaatgagaaggtggctgaatggtaggagctaggaatgttggtaatattttctcctgaagcgkacccagacttctctgggaaacttgaatttaagaaagcttataagggagactgtgcagtggaaggggtctggtcaaggagaaacagagcactggtgcctgt

SEQ ID NO: 18064 - DNA, 201 bp, Homo sapiens
gccctccggccctcccgagagtcatcatagaggccaaaacttgtgcgccgctgcagccgctgccactttgtgcaaaatgtgctgtcagaggcggcctgcgsctccaaagtgctttgggtgtgcacgcgcgcgcgcgcgcgtgtgtgtgtgcgtgttacaaacaagagggggaaaagccatctaatgcatatttgattttgg

SEQ ID NO: 18065 - DNA, 201 bp, Homo sapiens
tgtttacctatcctgccaaatttgagtttcaggaacctaatccaaatgttaattcgaatttccaaatcaccaccgattgcccatccctaatcaaaaaattytaaatgctccaaaacctaaaacatttgagcaccaacatgatgccacaggtggaaaattccacacctgacctcatgtgatgggttggagtcaaaactttgt

SEQ ID NO: 18066 - DNA, 201 bp, Homo sapiens
ctgcctgtaaaagaatctgaatctagtaaacttactcgtgatttaatttgagctctgtttgaggtgttggctctgtttgttgattatgccaggttcttttyggtttctaagcagttgaatcaagtgatagaatgtctggttttctagttgcttcatacatgaagttgcatatccatccatctatccatctatccttccatc

SEQ ID NO: 18067 - DNA, 201 bp, Homo sapiens
tgttgaaaggacaatttaaaggaaaataaactgttagaagagggagagatagaagccccagaaacttggaatgagtcagatcttacagctgagcaggaacscaagctttgaggaaagctttatttatttaaataggagtctcataaggaaggcagaaaaaggaaacccaagcagatgacttggttcctattatctgctgag

SEQ ID NO: 18068 - DNA, 201 bp, Homo sapiens
ccctccggccctcccgagagtcatcatagaggccaaaacttgtgcgccgctgcagccgctgccactttgtgcaaaatgtgctgtcagaggcggcctgcggstccaaagtgctttgggtgtgcacgcgcgcgcgcgcgcgtgtgtgtgtgcgtgttacaaacaagagggggaaaagccatctaatgcatatttgattttggt

SEQ ID NO: 18069 - DNA, 201 bp, Homo sapiens
gaatgcttgtgaatgcattatttccaaatatccctgagtatttgcaagcgtttttatatacctttacttccattttgctttgacaacaccattaccattcsttgacgatgaggaactgatcggaaataaacctaattgttatttgcttaacagtttcaagacctgcaacttgcagcagtctcctgacggtctctgtacatt

SEQ ID NO: 18070 - DNA, 201 bp, Homo sapiens
cttaatcactgtgtggtggaagccacacttgtttaggttttatgtgaaccaaaaacaagtgtccattgttaaggctgagattttgaggttttttttttttktttttttttttgttacagctgctaatgttaccttaactaacatgaggttgtaaatcagtgtgtggtgagatcaatttagtgggttaggaccagcattttt

SEQ ID NO: 18071 - DNA, 201 bp, Homo sapiens
actgcagcgtctacctcttggactcaagcaatccccctacctcagcctcccgagtagctgggactacaggcacgtgcccagttaggttgggattttttcaytgaagtgattttaagtaatatgtacagtttcacatctggtaccttgctccaccatttactaactaggtgaccctggacacatttctttatttttattttt

SEQ ID NO: 18072 - DNA, 201 bp, Homo sapiens
cagccctgcagcacctttaaagaaagggtgagggagacatgcttaagcatttttttttctgctccacaacagggcccagggtattgacagtgctgacagarcaactgagaagttgtttaggttggcattaacaaacccggcacattgccttttctgattgacacaattcaaacgggtatcaactgcctttcagtaccactg

SEQ ID NO: 18073 - DNA, 201 bp, Homo sapiens
gattcccccacaagtttctgtccctgcccttcctccttccctcaccatctaatctcacctgcatacccagtgtgctcatcaattcttataggttcaactgkcagttctataaggatgactgaaatttatcagccaaccctgactcttttcccgaatgcaagacctgcatttccagcctcccattggacatttccctatgga

SEQ ID NO: 18074 - DNA, 201 bp, Homo sapiens
ggcattctatcatgattactagtggccacgaatcagatgattgtagtaacttgtcctggacttgggagatctgtatgctgactcatagagccctaacagtktcttaattgatacgcccagtggtttcttctcagtcaccagtgaactttgtagaataggatgcagctggttaccctttcatagcatctttcaccctttttt

SEQ ID NO: 18075 - DNA, 201 bp, Homo sapiens
aatcctggtaacaaatgaggtgccacatagagggaaaaagtggaattaaatgttttgaacccaactcacagaaaatctgtggagtaaaaagctgattacargtaacaaaatcttcctttttttctcccttgttcctaagtgttagacctgggttcacttgccacaacttataaaccaatcaaatgtgatgatgtttaagac

SEQ ID NO: 18076 - DNA, 201 bp, Homo sapiens
gcatgggtccccagcaagctgaccacagctactagtcatcttcaagccagtgatgtttgctgccttggtacattgtccgtggctccacaattacacactgsagggtagggctgggagtagtgggagaagatagccttgggctattcatttcacatttctgtgtctccgtctgtaaaatcctggtaacaaatgaggtgccac

SEQ ID NO: 18077 - DNA, 201 bp, Homo sapiens
ttggtcaaacattaagagctggtccccattaataactataacacttcctgtattcaggtgatgagaaaaagaaggtcctgctctcaagaggtgcaaatagkgctggggagaggtctggagagaatgagagacagaggcaccaatagctaagtagactagaagtaggtagcagaaccctgacctccacatttctcctgtttg

SEQ ID NO: 18078 - DNA, 201 bp, Homo sapiens
tgacccaaagaaaagaatggttcacacaatatcaagagtactttgtggcagaggtgggaccagactccatcccctggtcctcactgcacagccttataacrtcatagcttctcaaaagtatcctaagattgcaatggagaccagaccaagcagtcagccccatcagagcttggaggatgctatcagggaagtgtatgtttg

SEQ ID NO: 18079 - DNA, 201 bp, Homo sapiens
gagagtgagccatacgtttatctgagagagaggcagataattccaggcaaacgggacagctaacctaaaagctttgtgacagaatcatgtttggcagaatyaaggaataaaaaggcatcttagaaattgcttgggtaatgctttaagatcaattgtcatctcctttcaacttgttacagactcctgcttttaggtgtatgc

SEQ ID NO: 18080 - DNA, 201 bp, Homo sapiens
atgcaagaaagacacgatcacagaggtcctgccaggtgcaaggaaagggcacacagactccaccttctcatagaaggagcatcaaacaatttgcagatagktttctacatctctgcttgatatgtcttcctgcatgagaaatatgaaaaaatgaacacttttcagggagctttcatttcagctggaagccatgattttcag

SEQ ID NO: 18081 - DNA, 201 bp, Homo sapiens
aagaagagacagaaatcatcacaatgagaagaaagagagtgatgtggtagaggttgctactttacatgggttgattagaggaggcctctccgataaggtgrcatttgggcaaaggcttgaatgaagtgagagagtgagccatacgtttatctgagagagaggcagataattccaggcaaacgggacagctaacctaaaagc

SEQ ID NO: 18082 - DNA, 201 bp, Homo sapiens
acttaacatggctctgtgggccaggcattctcctatgcacattacaaacagtaactcacatatcctcataatgagcttctgaggtggtagcattattaccstcatgttacaggtgaggatgctgaggcccagaggggttacataacctgcagggtcatgcagttaggaagtggcagagccagaatggtcacccattctgta

SEQ ID NO: 18083 - DNA, 201 bp, Homo sapiens
gtttttagttgtcaccatgatgagggtgtgcagttgacatttattgaataggggtttaggatgttaaacacgctaccatgtgctagcaatcctgctggagraggaactttcctaccaaaaatgctaataatttctgacctaatgtcagaaacacagtgaagtggggaagctgtgagaagtgcactgtggagtcctcagcag

SEQ ID NO: 18084 - DNA, 201 bp, Homo sapiens
ggtggagcgtgacgattgtcccagctactcaggaggctgaagtgggaggatcacttgagcccaggaggtagagactgcagcaagctgtgattacaccaccrctgcactccagcctgagcaacagagcaaaaccctgtctttaaaaaaaaaaaaaaaaaaaaagattaagtgcagcagccatgcctatgagctactcaggac

SEQ ID NO: 18085 - DNA, 201 bp, Homo sapiens
ggttcaccccctcctgagcataaaacagccctttccttacctctttccttgttctgattattttcatatgtttcttttgtatcactgttttgcgaggccarggagagatgggacaggtcccccctccatgtccgcacaagtgtttaataagtatttgcttatttatcttctgtttcccctctcctgtctactcctcgcctc

SEQ ID NO: 18086 - DNA, 201 bp, Homo sapiens
tatgggaaaaggttaaaacgacccacattagtatggtcctctgtagttttcaaacggtgtcacttggagacttgttaagggtctataaggcagtggacttmaaacttttttgactgttaaactaaaaaagatcatatctcggtatacacatgcaataacatgtaaatacactcagtcccatgtaaatacagctttcacgga

SEQ ID NO: 18087 - DNA, 201 bp, Homo sapiens
tctttccttgttctgattattttcatatgtttcttttgtatcactgttttgcgaggccagggagagatgggacaggtcccccctccatgtccgcacaagtrtttaataagtatttgcttatttatcttctgtttcccctctcctgtctactcctcgcctcccctaaatgcctgcacattccagcaagaggacaggaagtct

SEQ ID NO: 18088 - DNA, 201 bp, Homo sapiens
agaaacagaaaataaacaaatacctatataatgtcccaggtgacaatggttaaaaatgaaataggtcaaggggggatatagggttagggtacgatggggtrgtaaagtgtagctgttttgtaagggatgggaaaggaagggctctcacagttctggtctgagctgagatctggaggaggtgagagagtgggccatatgggg

SEQ ID NO: 18089 - DNA, 201 bp, Homo sapiens
  misc_feature (1)...(201): n = A,T,C or G, or insertion/deletion polymorphism (see Tables 1-2)
gacctataaagcttaagccccggggtcagaaactttgcttttttgttgttgtttttaagttaggcccttactaagttatagtgaagcaaagtaatagctgntggttttgttattattatttggtttggttttacagggatgggaaaagcttcaagtgacttcttggaatgtagatgtaccctaaacctaaagagttgttag

SEQ ID NO: 18090 - DNA, 201 bp, Homo sapiens
ttgaatgctgaaacaggaggcttcagctgtctggttttaagacaataatagatattcaataataaaaaaaaatgccacttttctcactatttttggtataygcgtgtggaaaatattattttactaaatattttattaaaatatttatgttaagcaatgggattgtttttatttttaaataggttaataaacaaatatttt

SEQ ID NO: 18091 - DNA, 201 bp, Homo sapiens
agggtacactggaggggatttggctgcttggaagccctctcaagctgtctgcccctctcacctgcctcctctctgtgctcacagattcttacctgaccctygatgaaccaatgaataacatcaccacgtctctgggccagacagcagaactgcactgcaaagtctctgggaatccacctcccaccatccgctggttcaaaa

SEQ ID NO: 18092 - DNA, 201 bp, Homo sapiens
gtttttacccttaggaccacaaaatagctgctggcactccatccatcacatcaacattccaggcagggaaaagtaaaagggtaaaggacaaatgaagcatrtgtcagctatctgtctgcctttttaggagctttcacagcatcccacataacacttctttttgcatctcactgaacagaacttggtcacatgcccacatct

SEQ ID NO: 18093 - DNA, 201 bp, Homo sapiens
tccttttgttaagaaattaaccaacattaattttgaatgtaggactgtcccacgtgcccagcactgtgcttgctgatgtgggggttcagagattatgagayatgtgaaacactagaatggaatctccatgaaggcagcgatttgcctattttgttttctgatgaaactgtggtatatgtaacagtgtctggcacatagtgg

SEQ ID NO: 18094 - DNA, 201 bp, Homo sapiens
gaaccccagtgtagcatttggccataatgtagaagcatatcacatgtttaaagtttctttttctcaacctcttcttcaaaacttatctgttgtgtgcaccmtctttgctgggcacagttagacagccggcttgctacccgaatcaacatgagctaaggagctaggattcactggcttcccattccagctccagttcccatt

SEQ ID NO: 18095 - DNA, 201 bp, Homo sapiens
cctctctgtaaacttgtcttcatttgtaaagtcaggggtaatcatagtacttatttatacagttattataaggagtaaataaattagtttgtgctgagtgyctacaacaatgcctggagtgaaataagcactctgtgttagcttttattgaatttacaatgaaaaacgtccaggtcttactatctgaagtgcagttagttt

SEQ ID NO: 18096 - DNA, 201 bp, Homo sapiens
ggtaggtgtctgcccctaactgcagaaggaggagaagaggactgagaaaagcctccctggagttggtgatgatttaactgcatctcaaataatgatcagayatccatcagatgagggagcggggagagtgcctcaggcagggtcaaatgtgagcagagccgggagtggagagtgtcacgatggaggctgagctacctgtgg

SEQ ID NO: 18097 - DNA, 201 bp, Homo sapiens
ccggctgtcttggtttgaattcagacttaccatttatgaaatgtttgaccctaggcaagttgtttaacctctctgtaaacttgtcttcatttgtaaagtcrggggtaatcatagtacttatttatacagttattataaggagtaaataaattagtttgtgctgagtgcctacaacaatgcctggagtgaaataagcactct

SEQ ID NO: 18098 - DNA, 201 bp, Homo sapiens
gccttagacaggtagataatggaatggcatagagaacagcctgaagccggctgtcttggtttgaattcagacttaccatttatgaaatgtttgaccctagrcaagttgtttaacctctctgtaaacttgtcttcatttgtaaagtcaggggtaatcatagtacttatttatacagttattataaggagtaaataaattagt

SEQ ID NO: 18099 - DNA, 201 bp, Homo sapiens
ttctgggtattgttattatcctactaatggaaccagcatttgctggaccttttggggccaccatgccttagacaggtagataatggaatggcatagagaayagcctgaagccggctgtcttggtttgaattcagacttaccatttatgaaatgtttgaccctaggcaagttgtttaacctctctgtaaacttgtcttcatt

SEQ ID NO: 18100 - DNA, 201 bp, Homo sapiens
ttcagtgttcagcacattgagcctggcacaaatcaaagagacactcattaaatatttgtcaaactgatgaatattggaaagctcaagtttttatggcagaygagggagacagtgggagctgcctttttattggaaaaacattgtttattagatctgtatggatcatttagaaaatatgcagttggttatcttttatggtca

SEQ ID NO: 18101 - DNA, 201 bp, Homo sapiens
tcacttggttgtggtcggtattaaactggataatgcaaataatgcacttagcacaacacctggcataaataataagcactcaataaatgtgaaatgttatkgttgttatttcctgcttcacattataattttattgctttccagactgatgtctccgaacttaggtagtagtggagtctgtgagctattttcagtatttca

SEQ ID NO: 18102 - DNA, 201 bp, Homo sapiens
gaactctgagcatctagaggaagctgctgcccccagcccacttaggtactttcttttccccttgtggtgagaataggaattaggtagcaagagttcccagrcttcattgtccaaggctatgttagtattttcatcataaatcttgaggcatcgcctattaaagcctttttgcctttctcattaaaagaagagaatttagaa

SEQ ID NO: 18103 - DNA, 201 bp, Homo sapiens
tcatactgaagataccattgggtgttctgttctccccattctcctctccccatacaccataatattattcatgtatgctctcaagtttaatcatgtctgcrtgcggacatttagctatccttagagagcccataatttgaactctgagcatctagaggaagctgctgcccccagcccacttaggtactttcttttcccctt

SEQ ID NO: 18104 - DNA, 201 bp, Homo sapiens
aaagcagttgtatcagcttacttgtggctctaaacttggccagatcctcaagtctaaggattcttactatgcacaggtgttctcagtctggattcatgtcwcaggtgactcatgaacccttggaaattgtgtgccaaatgcatttatgagtccatgtgtgttgtgttggtatgacggggggtaggcggtttggtggttttc

SEQ ID NO: 18105 - DNA, 201 bp, Homo sapiens
tgagccattggacttaaacaagaatgattcagaggaatgaatcccaatccagttgtcaagaaacctagcgtggtctcaatcctgcctccagctgggtggayctcagttccctcatctataagatctaggacagaaataaatacaaggaaatactgggttccagggaatagaggattagaaatagaaaacatagtagtggca

SEQ ID NO: 18106 - DNA, 201 bp, Homo sapiens
gttttctgttcttgtgatagtttgctgagaatgatggcttccagcttcatccatgaccctgcaaagggcatgatctcattcctttttatggctgcatagtrttccatggtgtatatgtaccacattttctttatccagtctatcattgatgggcatttgggttagttccatgtctttgctattgtaaatagtgctgcaata

SEQ ID NO: 18107 - DNA, 201 bp, Homo sapiens
agtgaaacaggcacaaattctgctctattgcttgtggagcttacattcttgagggggaacccaaggatgcttaagaagagacagaaatcatcacaatgagwagaaagagagtgatgtggtagaggttgctactttacatgggttgattagaggaggcctctccgataaggtgacatttgggcaaaggcttgaatgaagtga

SEQ ID NO: 18108 - DNA, 201 bp, Homo sapiens
ccatcctggaaagatgtactcctcattgccagggcaggaaccatggaagaatcatttccatttttagaaattatcaattttgtgggttagccttaatctgmaatttaattacatttttagtggaggtttgttttatatcacatgatctccaacagaaattccagagagctttgtggcataaatagaaaaaaggctaatata

SEQ ID NO: 18109 - DNA, 201 bp, Homo sapiens
gtgccacggggtagggaacaggggagtctctgttcaccatggtcctgtctcattcctaaggagtctttgggagcccatagttaagctgttttgataaacastaagtaataaccagatatggacatgtggaattgattaagagaggagggattaactaatgcactaaataacccatcatgcgtggtgggttggggaggaggt

SEQ ID NO: 18110 - DNA, 201 bp, Homo sapiens
gcatctcaggagacgggtcttttcaggagcactggatgattaggccaagttacttgggaaagccagtcactgtatttatttttacaagccagatgctggcrcgtagtgcattcttttacaaaaataaaagggatttggagaaaaagaaaggttcagggtcacagatgaaatcatgagggtattttacatggttttatgggt

SEQ ID NO: 18111 - DNA, 201 bp, Homo sapiens
caagccttcattttgtttttaagtaaaagatgtaaaactcatctgggaatatatcaaacccctactagtgcctgccctcaaatgatcaagcctacacatarctgagtcgtaacaaatgtgttttaagggaatatcaagcattagcaatctacccaccacaggaaaacatctaattctataggagtcaagagttagtcctca

SEQ ID NO: 18112 - DNA, 201 bp, Homo sapiens
tcaaaattatgattatatccttctatgttcttcttgaagttttcattcttcactgctgtccttctgatgaacccagtctaggtctctcgtggtttttaatwttatacaaagattttatacccctgttgtgaaccgatatctatggagagggtattgaagttccttaaagatgctcaaccacagctaaaaagtatcctttga

SEQ ID NO: 18113 - DNA, 201 bp, Homo sapiens
ttcaattcagttgactttattgatttggtattttttttaaaaaaaagttgaccatgtgtggtggctcgtgtctgtaatcccagcactttggaaagctgagytggaaggatagcttgagaccaggagtttgagaccagcctgggcaacatggcaagacctcatctctactaaaaataaaaaataaaaaataagctaggcata

SEQ ID NO: 18114 - DNA, 201 bp, Homo sapiens
ataaaaggagcatctatgacccaactctaacattcagaacgtaaggactgtgaaatacattagacatatgaaacctggtgagagctgaggtccactgaggyaacagggctacacaactcctgcctgggaagggcttgtagggacccttgggactatggcccagaaaggcacttgtcacttcctctgagggactgcatcagg

SEQ ID NO: 18115 - DNA, 201 bp, Homo sapiens
attttaaaattttggaaaaatttaaaaatattacaaatcatacacaatagatgttgagttaaattcaattcagttgactttattgatttggtatttttttwaaaaaaaagttgaccatgtgtggtggctcgtgtctgtaatcccagcactttggaaagctgagctggaaggatagcttgagaccaggagtttgagaccagc

SEQ ID NO: 18116 - DNA, 201 bp, Homo sapiens
tcgtttggtttccgttcatagatttaggcttcatttcttctgtcattgctgggtcctggctacccctaacacttataggacctggggcatgagtacaagcrgaggttcacataccatatgtctaaatatttaaaagttataaatcaagctagcaacattgttgaataaaatatgttctatcttcccacagtgtcaaatata

SEQ ID NO: 18117 - DNA, 201 bp, Homo sapiens
atttttcagctaactggctattttaaaattttggaaaaatttaaaaatattacaaatcatacacaatagatgttgagttaaattcaattcagttgactttwttgatttggtattttttttaaaaaaaagttgaccatgtgtggtggctcgtgtctgtaatcccagcactttggaaagctgagctggaaggatagcttgaga

SEQ ID NO: 18118 - DNA, 201 bp, Homo sapiens
tggtgccctgtggcagaccgtcttctactcaggtgattcctttctgtctatctataggcatgtagacacaatcattactggtgcaaccagcactgactacracggcctccagtgatgcctgggttatatatttacctgtaacagtgtataaagcagggattttctgtaatcccagcactttgggaggccgaggcaggcgga

SEQ ID NO: 18119 - DNA, 201 bp, Homo sapiens
tgttatatattagttccataaaaatttgtttgccttcctttcaggaaaatgactacctaagttgttttatgcaagatttttacagtgtatattctattgayaacatcgctaaattagacaaatttgtttttctttttgttttattttattttattttattttgaaacaaggtctggctctatcacccaggctggagtgcag

SEQ ID NO: 18120 - DNA, 201 bp, Homo sapiens
  misc_feature (1)...(201): n = A,T,C or G, or insertion/deletion polymorphism (see Tables 1-2)
aattttcttgggctgctggaaagtatcacaaactgcatggcaaaaacaatagaaatttagtatctcatagttctggaggctagaagtatgagatcaatgtnttcatggggttggttctttcttatggctatgaggaaagatttctcctttccagaagtgtgtcagaatttttccgtattcattggcttatagatgcatctc

SEQ ID NO: 18121 - DNA, 201 bp, Homo sapiens
aatgatagtttgttgtgcaagaatattttgcattcaaactgagagaagaatttgacacattggttaatttatcttttctcctgctgaagtggctctgccastgtagtttctcctaggctctaagaagagtccatctcctccactggcagtgtcacaatacacaaaactttgacagtatgcagttgtggtcaccttctattc

SEQ ID NO: 18122 - DNA, 201 bp, Homo sapiens
gctctgtttgatttgggagaatttttttttttttttttttgggtagaggggagaatgattgtaaaccaaatgttgaaaagtagcctgttggttttttgttrcagtgtaaaatatggttcagtaattcattgcccaacctccctcccctgccaacaccaccaccaaagaaacaaaaactaatgtccctgctcctggacagca

SEQ ID NO: 18123 - DNA, 201 bp, Homo sapiens
agtcttgattactataggtttgtagtaagttttgaaatcaggaaatatgagtactctgtattagtattccactggagaaacaaaaccagtaaaattgtgtrtgtatacatatataaagagatatattacaaagaatttgctaaaatccttagggcagggagccaggaggcacaggctgggaacttttgggcagttgctcat

SEQ ID NO: 18124 - DNA, 201 bp, Homo sapiens
agttgactccaagcaggaattttctatctgattctctttgttttgtctgaacccgagatgttgaggctggaaatacagtcaagatccaatttgtgagctarcttatgagtcaggttaaggaatttacactgtatcctaaaaacagtaggagtcatcaatgcaatttaaccaggtggaactttcattaaaatgtaactatgt

SEQ ID NO: 18125 - DNA, 201 bp, Homo sapiens
gtcaattatggcttttgctgcaattgcttttggcgttttcattatgaagtctttgcccatgcctatgtcctgaatggtattgcctaggttttcttctaggktttttatggtttggggctttacatttaagtctttaatccatcctaagttaatttttgtataaggtataaggaagggtgatccagtttcagttttctgcac

SEQ ID NO: 18126 - DNA, 201 bp, Homo sapiens
ggatcacaaggtcaagagtccaagaccagctggccaatatggtgaaaacccatctctactaaaaaatacaaaaattagctggacgtggtggcgcatgcctrtagtcccagctactcaggaggctgaggcaggagaattgcttaaacccaggaggtggaggttgcagtgagccaagatcacaccactgcagtccagcctggg

SEQ ID NO: 18127 - DNA, 201 bp, Homo sapiens
gcaggtggatcacaaggtcaagagtccaagaccagctggccaatatggtgaaaacccatctctactaaaaaatacaaaaattagctggacgtggtggcgcrtgcctatagtcccagctactcaggaggctgaggcaggagaattgcttaaacccaggaggtggaggttgcagtgagccaagatcacaccactgcagtccag

SEQ ID NO: 18128 - DNA, 201 bp, Homo sapiens
gaatcagctctgtgatattgataaagaactgaaatagatccttttagacttcaggacttcatcagcctgaaataattttctcagtactaaataaatagttrccccaacaatgatgaaaaataaatatcggggctatgggtgaaataagttgctgaaggaaatttaatgttatcaataatataatggaattttgccctgttt

SEQ ID NO: 18129 - DNA, 201 bp, Homo sapiens
ctggtcttggaggttccgcggtctctcttaagactctcactggctcacctctgctgcccctccacatgccagaattctcaggcaaactaagcttaagcacmaactagggctccagtgcagcccagaacttaaagcactttgctaggtgcagacctggctttggtatgagtctgtgtaatttgtcccatgttgtcacagttg

SEQ ID NO: 18130 - DNA, 201 bp, Homo sapiens
atcaatatttctgccactcgacaggaacttcagccctttcaaattcgttccaggtaatttgaggagactccagggcagtgatgaaataaagtgaaagcccstgatttactggatctggaggcttgtgctgtgagtgagaagtgagggtgaaagacccttatcacaagtatttgtgcttttagatgcactgagtccccaccc

SEQ ID NO: 18131 - DNA, 201 bp, Homo sapiens
acacaattgctactcatctgtaagacttagcatctgcctcacactcccctatatttaaccctcagcctggatcatgtgcttgtcacaaatcaatatttctsccactcgacaggaacttcagccctttcaaattcgttccaggtaatttgaggagactccagggcagtgatgaaataaagtgaaagcccctgatttactgga

SEQ ID NO: 18132 - DNA, 201 bp, Homo sapiens
gtgattttttgatgttctatattttttctaattaattgattctagatgttaaacctattagatgggaagaggactctagttcatttttgcattaaaagggktctttcttacttgaagctggtgggaactattggaagagggcgtaataattaataatgatgacaataactaacacatgccgagaactttctaggtgccagg

SEQ ID NO: 18133 - DNA, 201 bp, Homo sapiens
agtgctagtccatggacaaatttatgcaaaaggctgcgttctccgtcaatttacacacaattgctactcatctgtaagacttagcatctgcctcacactcycctatatttaaccctcagcctggatcatgtgcttgtcacaaatcaatatttctgccactcgacaggaacttcagccctttcaaattcgttccaggtaatt

SEQ ID NO: 18134 - DNA, 201 bp, Homo sapiens
cctcaggtaattcatctgcacattaacatctgagatgtgctgctctgatgagaaaaatctgggaacttcctcaaccttgagactcgatagtctggattttygtaattctaggatgtagcatggtgaagtttgactgaccttgaatcccagagctgccactgtggggatattaattaacctttttaatctcagatgtttttc

SEQ ID NO: 18135 - DNA, 201 bp, Homo sapiens
ttttgaaatacatacatatatacatatttcatatagtatatatatatatatataaggccttgagacaatgctttctttacctagaacaaagttattttgtyctaggtataattatttccattttaccaagggaaaaaaaaagaataaggtgaagcaaattgcctacatttctggagctggttatggcagagccaggactgg

SEQ ID NO: 18136 - DNA, 201 bp, Homo sapiens
  misc_feature (1)...(201): n = A,T,C or G, or insertion/deletion polymorphism (see Tables 1-2)
tagcattgttgaaaagattaaatgacataataagatgatgcatatatagtagctagcactgtacctgatgcatattaggagcttgataatattactaacantatcatcatcaatgctatctgagcaaagaggctgttccttctttccagccagagttcttctgttggataatatttccagctgtgaaccccaaccagagac

SEQ ID NO: 18137 - DNA, 201 bp, Homo sapiens
tggttcaaacagacaaactccacttgaggtcaagcagaggtcatttcactttcattactaaaatataatttacaatatgccagacctaaacaagtttagcytaaagggtttgtataatgtaaaccatctgttcctcaacaatacagctaatttcctgccatcaccgtacagtctactgactgcttctttaagggtttttat

SEQ ID NO: 18138 - DNA, 201 bp, Homo sapiens
ggaagttactgctccttttgctggtcagtagcagactctacttgcctcctgttgaatagaacagaattttcttgccatatttcttcactaggctcctgctmtgttgggtgactgcctgtgttttgaattgaatgaaaggattgtagcaggaggcagtgcagtggtggattcagcctcttaatgtcttcatgtgggtgtttt

SEQ ID NO: 18139 - DNA, 201 bp, Homo sapiens
tctcacctgaaaggaacttgcattagcccagctctacctttctctctctctctctgccccagcaccatattgtagacaccaaaggagttgcagcagcagawactgtgcctggatggcaacatgcctacagcatcatcaggatccaatcaggaaagcagaacaaattctggactatttaacacagagaatttaacataggga

SEQ ID NO: 18140 - DNA, 201 bp, Homo sapiens
gaaacaggctggggagaagacaaagcattcaaagctgcaattcctgcccaaccttcaggtagaacattcagtggacagtttggattgtggaactgaggccyggagcaaaggtcaaggctgagggggcagacatggtggtacatttggctaagttggtggacaaactttgaagggagtaaaactccccaagagaaactaaaa

SEQ ID NO: 18141 - DNA, 201 bp, Homo sapiens
gttcaggggtgagtatggaatcatgtggggaaccgccatgaattacacatacccaggtcctgcccaggacctactgacacagtcctggggtgggggacctrcccacttggaaaacttcctgggacttcctcagctggaccctctggggattggggaaatgcattgcagtcacctgcctggggtagtaggggctgccacatc

SEQ ID NO: 18142 - DNA, 201 bp, Homo sapiens
catagttcattgctttcatatctaaagttaagagatctaaaagttcccccacatccccacttagcagtcatgactaaggtgaaaaaagccaccagtatcakcctggtctctcttatcagcagtttagaaagtactacaattttcccatctgactcacatctaaatgactcgcatctaaaatgtttttccttaattttcctt

SEQ ID NO: 18143 - DNA, 201 bp, Homo sapiens
gggtggaattgctaagctgggtgacacatttgaagccattgtaatgttttagtgatctccacagggcacgtcattggtggctctccctgtccccctgcaasccctgcaatctggctgcattttctacacacttgtttggttgtttcatgaaatctacccccctgtactgctgcaggccacaaagaacagtgttcagtaagg

SEQ ID NO: 18144 - DNA, 201 bp, Homo sapiens
tacatgcataaaaagaacagaaacatcaagttgataataataacaaaaagttaaatagtacttaccatgggccagacataggtctgagtgctttacaaacwttaactcataggtctgagtgctttacaaacattaactcattaaaagtttgcaataacatggtaagtacaattattatcatcccattttatagatgaagga

SEQ ID NO: 18145 - DNA, 201 bp, Homo sapiens
ctttttataaaactttgcacaaaaactaatagactattacttccccatttactcacacaaggagactcagcaaaggatgaagctttgatttgagcccatgyaggtggactccagagctcagactttggccagtctgctataccagctgtccttattgtggggagatgatcagttgatgaactcttacctgaattacaaatt

SEQ ID NO: 18146 - DNA, 201 bp, Homo sapiens
cattccccaccccccagagaaggaaaggtttttgcctgagtggaggtaatggggtaagcttccattaaggtggaagatttgagcctggcttgggataggcrggagaacagccacatttgaataatgtttctgtagaaacctgaacttatttcattctgtgagatagcctggttttctgcccattttgtgaattaagaaaca

SEQ ID NO: 18147 - DNA, 201 bp, Homo sapiens
gctaccagtttgggcaagtatatgactctatgccttacctgtgttagagactggcacaggtgcaggcagggcactaaccttggctccgccacttaataacygagcaacaatgggggagttacttaacctccaaatctcaatttttttccatctgcacaatgaagataaataataacctgacattcagtgtttgtgaggata

SEQ ID NO: 18148 - DNA, 201 bp, Homo sapiens
gcctagaatactgttgagcatagaataaaatctcaatagggcataatggtaggaagaagaaatgaagaggagaaaaagaataaaccatcttaacttgaaamccaaattagctgagatgctcgtgagcttccaatctcatacaggcattctaataacaagtattcacttactgtggacccaagaatggccagatggcttgtg

SEQ ID NO: 18149 - DNA, 201 bp, Homo sapiens
ccatgagaatatcactttattcttcttcttattacgccaattctcattccttgcctcttgcaaagagagagaatgagagaaaaatggaaacttgcaacttacttaacttccttggttctttccctgaaaacttattttctactaatgtctgtgggagtgaattaactagagtatccagttgaattaagtattttgctgaaa

SEQ ID NO: 18150 - DNA, 201 bp, Homo sapiens
ttccatggagtatattatacatgccacattttctttgtccagtctatcattgatgggtatttgggttgattccatgactttgctattgtgaatagtgctgyaatgaacatactcatgcacatgtctttataatagaatgatttatattcctttgggtatatacctagtaatggaattgctgagtctaatggtatttctgtc

SEQ ID NO: 18151 - DNA, 201 bp, Homo sapiens
tttgaatgtatcccatttttaagctttctgctagaaaacctactccaaaaaagtttgaaaactaccagactggattatctttaaggtgccttccagcatamctgacttcaatatataaattatctgtgtgtgatcttcctttacagaaataatggagcctttcttttcctcgtgtggttgttgctctaagaatgcatttct

SEQ ID NO: 18152 - DNA, 201 bp, Homo sapiens
gtttatatccaactatgtgactcctaagaggtgaccgcaggtggtttcaaaaatcttctgggaatgatcccatgttatataataatgagaacactgagctygacatcaggaggcctggctttagctttggtctcccttttcagtatgcctggaattctgggcagatcacttggcctctctgtgcttagttttgtcatctgt

SEQ ID NO: 18153 - DNA, 201 bp, Homo sapiens
ttcctccataccccggccagtcacagtttagcatcatgggataagtgtgggaaaggtctgactagagtagaaatacagattgtgcccagccttaaaacaawaacatgtttctttcacatttcacattaacaaatctaaacagctgatgaaatactgtaatcctaggattatataccatgaggagcctaagaaccccttttt

SEQ ID NO: 18154 - DNA, 201 bp, Homo sapiens
gcaacatgcagtccattctcacatgtgcaagtgcatctaacccacaaatgctttttttaaaaaaaatattaaggatgagctggtggtgtttcctccatacsccggccagtcacagtttagcatcatgggataagtgtgggaaaggtctgactagagtagaaatacagattgtgcccagccttaaaacaataacatgtttct

SEQ ID NO: 18155 - DNA, 201 bp, Homo sapiens
cttgccaccaaaatcctgccacccaaaagtccatactatcggggcctagcttacctttccagccacacttttctcttagtttatttctggaaagtagtctsatacacttcaaagagcaagagtgtagagacaaagagatatgattacaaatcttggctctgctgtcaactggccacaagatcttaagcaaataactaactt

SEQ ID NO: 18156 - DNA, 201 bp, Homo sapiens
ttcccacactcagcatgggcctattgtcatcatggacattttttaatgtataattcaagtaatcctcaaagcagccctaatagtttggtatctttattgtwatcagcctctcttgagaatcagaaaagttaaatacttttttaaagatcctgtagatggttagaggcagctaggattcaaatacccatctgtctggatctg

SEQ ID NO: 18157 - DNA, 201 bp, Homo sapiens
acttcccacactcagcatgggcctattgtcatcatggacattttttaatgtataattcaagtaatcctcaaagcagccctaatagtttggtatctttattgttatcagcctctcttgagaatcagaaaagttaaatacttttttaaagatcctgtagatggttagaggcagctaggattcaaatacccatctgtctggatc

SEQ ID NO: 18158 - DNA, 201 bp, Homo sapiens
aagttgcccttttttccctggtggatttccttttcctgatttcagagcttagagaactcagttctgtctagaggccctaacattccacttcccacactcarcatgggcctattgtcatcatggacattttttaatgtataattcaagtaatcctcaaagcagccctaatagtttggtatctttattgttatcagcctctct

SEQ ID NO: 18159 - DNA, 201 bp, Homo sapiens
tgttttccacagtggctgtaccattttacattcctacgagcagtgcataagcattccagtttctccacatttttgccaacacttgtcattttctgtttttktttttttttttttttaaactctttagcgttgtaatggcatggactttggctttgaaacctggctcagccacatactaggtgtgggaatttgaacaaatta

SEQ ID NO: 18160 - DNA, 201 bp, Homo sapiens
aagaacgctgcctctgaagtgggaagcttcacactcagctcgaggttactagagccattatgtggccatgcttttaaccagatctgctaataggtggcccrattcacaagttttaaaaagggatgttttccatttattcatggccatgatggtcttttgggaaagcattagtaagttgtgtttgcttgggtaaagagaaat

SEQ ID NO: 18161 - DNA, 201 bp, Homo sapiens
tgaagatacaaaaatgaaaaaggcagaaacattcttccctttggatactctacaatttagtggaagagaaaaactttagacaaggtttttcacatacacasaaatactgaaaatcatttaattccagcagtgataggtgctgcaaaggagatgaatgaaaaaataagacttatcctggaatataggatcagatccatccta

SEQ ID NO: 18162 - DNA, 201 bp, Homo sapiens
atccctgtgttcctagaaaggtgacaaatcagagattgactagcatgaggagggtagtggaaggttcacacctgtttgtaataactggcttatacaaaacrtaagtacgaacacaatggatggcgattgtgttctgccaatgcggttggcattcattctgagaaaagatggcagaccaaggccagagcatggcccagttgc

SEQ ID NO: 18163 - DNA, 201 bp, Homo sapiens
ttagctattgcagcttctgttattgagctttgtcaaatgttatgtttatattgtctcattagtgctgacaccacccaactataagacccattttacagttkaggaaattgtggcttatgagggctgagaaacttgcccgagttcttagagtcagtaagaagaaaagctaggattctgccagtggctgaattcaaaagccca

SEQ ID NO: 18164 - DNA, 201 bp, Homo sapiens
ttacctttggctcccccagctagatgatgagcctggtgaaggcagggctgttgtctaatatttctctttttcacagtctacccagcacaacccattaaatragtgctttttttctcctgtagaacatctttattactgtgatcttaagatcatttggggttttatttagagcttagctattgcagcttctgttattgagct

SEQ ID NO: 18165 - DNA, 201 bp, Homo sapiens
ctttatattccaagtccaggtcttttcaactagttattcaaataattcatttgttcatccatttactcaatagatagttattggccatgcactaagagccrggtgctggtctagttgttgaggatagagccctggacacaactgacaatgttcctgccatcacaaggcctatagtttaggaagcactagtctaacttccaa

SEQ ID NO: 18166 - DNA, 201 bp, Homo sapiens
gcaacggggcatgtgccgttggttatcatggcgggaaagaaaaacagccatccatcccttattccctggatgccgttattagtcttggaacccaagttaasggacatatgggtgaatgcagtcttaaaattgctcctttccacctgtccaaatttctacccattctaaagcttccagttccacctaacaactgcattttta

SEQ ID NO: 18167 - DNA, 201 bp, Homo sapiens
acagagcttccctgcaaaatcattaagaaagggacaggttctataaggtgctaaattattattagtttttttttaagttgggggagggcaataataaaaamcatgtgctcagcagcctgcttggccatataaaacagaaaggcctgtgactttaagtgttgtaaaaggggttaattgtcgatttctgaatgtggcaagttt

SEQ ID NO: 18168 - DNA, 201 bp, Homo sapiens
atctctgccgaccccaaaatgcttttcaccacagctgtaaaccataaaacatttagaaaggtaagcaggactaaagataatatagtttccccaagcagcawggagggcagacctggaggtggcccttgcaaagacagctgcagtgcacagagcttccctgcaaaatcattaagaaagggacaggttctataaggtgctaaa

SEQ ID NO: 18169 - DNA, 201 bp, Homo sapiens
aggccttgggaaaaaaacataattgtgttcataaatattattaagaaaagcagaggatctcaaaagtcagatttggatgaacattagttgatgcattgaarcatggattatgtcaaatatcccatggattctaagctgccttaattgtaaaaaaactctttgatgctctgcttagtacgtaagcaccttcaattgctgtca

SEQ ID NO: 18170 - DNA, 201 bp, Homo sapiens
gatgcttggcatcatctttctctagaaggtaattagtgtatattctttaatttccattttgaatgagagaggaagatcatttgttgatcaaaaccttatcrattcctactctggtctaggaactctatgaaaattaggatataaagataaaccaggcaaaggcccctgtcctccatgaactcagagactatttggaaagac

SEQ ID NO: 18171 - DNA, 201 bp, Homo sapiens
tgtaatattttacattttaattttcaagccagtgttttgaagtaaaaatcttcaaatctggccaatagattgttcatttggatggcatctaaaatgcaggygcctctactggcatctagagccaccattccagtctaataagctatgggattgccgtggtctctctccaaaggcaggccctttggaaatctcctctaatgc

SEQ ID NO: 18172 - DNA, 201 bp, Homo sapiens
gggctcagtagcaacattattattattgtcattactcctccaaactccagttcagttcgactgtgtagattctgcagtgcttttaagcccctctggccacstgcgaggtcttcttaatgggatctgcttctcaagggtgccgaccccatcagcacagagatagcccccacttttgttagaaacccagaatgcacagcctct

SEQ ID NO: 18173 - DNA, 201 bp, Homo sapiens
tccatttgatgatgaggaatctgaaggtaagaggcagcaagtaacttttctaaggtcacacagcctatcaggtatagagctgggttttgcattcaggtcarttgaacattgaaccctgaggacaggcagctggtaagtatcacagctgagattaaaacgcaagccatctaattcccatcctcatctttcttctgcttgctt

SEQ ID NO: 18174 - DNA, 201 bp, Homo sapiens
gttcttcaaactgtattgcatccacatccaggaaggcaccctggcctgtttcagcctgtcagtccttcttttgtcgtctcaccttccaccagtattctcayataggccgtctaaatcacacctgcttatgctgatttagcccaacacctttgcaataattgtcactgtcaagtattaagcattgactgtggacccagcacc

SEQ ID NO: 18175 - DNA, 201 bp, Homo sapiens
tattttctttggggtatataccttgtaatgtgattgctgggttgaatggtaggtctatttttagctctttgagaaatctcccaactgttttccacagtggyggaactaatttacattcccccaacagtgtattagcattccgttttctctgcatccttgccagcatctgttattttttgactttttttgttttttttgaga

SEQ ID NO: 18176 - DNA, 201 bp, Homo sapiens
aaccccatctctactaaaaatacaaaaattagctgggcatggtggtgcatgcctgtaatcccagctactccggaggctgagtcaggagaattgcttgaacygggactcgggaggcagaggtagcagtgagccaagattgcgccactgcactccagcctgagctacagagcgagactccatctcaaaaaaaaaaaaaaaaaa

SEQ ID NO: 18177 - DNA, 201 bp, Homo sapiens
gtatattacagtctattattaaagagttttaacagcccgtaagtacttctaacagtccataagtacttcatagtgtattatgtcctttagattattgattygtatgtttgctttgattcatgatggctttgaaaattatattttaagttatttaccacaaatgactctctatattcaaatacttagctttcatttgtcttg

SEQ ID NO: 18178 - DNA, 201 bp, Homo sapiens
tggcaaggcattttgtattttgtagtggaatcatattattttctccctgtagaactattgcctttctttccttccttccttccttccttccttccttcctkccttccttccttccttccttcctgccttcctgccttcctgacttcctttctttccttccttctcttttttttttttttcttttttgatggagtttcactc

SEQ ID NO: 18179 - DNA, 201 bp, Homo sapiens
ttctgagtgtgtgtgtgtgtgtgtgtgtgtgtgtgtgtgtgtgtagacatagcctgaggggaggttagtataaccccattacaatatattagtagcgtggmttaaattttcaaaaaacaagaacaacaaccaagattatttgtatattacagtctattattaaagagttttaacagcccgtaagtacttctaacagtccat

SEQ ID NO: 18180 - DNA, 201 bp, Homo sapiens
cagcaactctgccttagcctcccagtaccatctgcttcaggctgggacatctttccttcatgcaggagaaaggggagcttaataaaattttgctggggttkcttggggcctgaggcagtagtggggaggagagaagcctgggctgttttatttcttgcacctgctatgagtcaggagtggtccttggtcagcaggcacatg

SEQ ID NO: 18181 - DNA, 201 bp, Homo sapiens
gccactggtggccatggaattgatggagttcagctgagatgtgcttgatttttctcacttaaacttcagttttcctttcagtgaagaaaaaaagcttattwaacatcactttgtgaggggagattattaatattcaactttctacataaaataatcagcctttattttaaaaaaatatggccttggaagatattatttttc

SEQ ID NO: 18182 - DNA, 201 bp, Homo sapiens
gcagaaatggagggaacctactacttaaaaaaaaaaaaatactgaggcctgtttccaactgcaaatagttctctgtgctgacagactatatatatatatayatatatatatatatatatgtatatatatacacacacattttgtcctggtttgccttttcaaatggctttctttaccaggttggagctttagcagggaagt

SEQ ID NO: 18183 - DNA, 201 bp, Homo sapiens; identical to SEQ ID NO: 2755

SEQ ID NO: 18184 - DNA, 201 bp, Homo sapiens
gccactgtctgccttactagacaaaggagaggtatgaaagcccttgagtctctatgctggacactgtacaggagtcttttggtccattagttaatcattayctcagtcctttgctgctcccattttatggatgagaaaatagaagttaaatgatgttcagtaactttctcatgatcacaaaattaataagtgtcagatagt

SEQ ID NO: 18185 - DNA, 201 bp, Homo sapiens
ttgctttactcttcttcttcatttgcgtctgtcggaataaccagaagtcatcgtcggcaccagtccagaggcaaccaaaacacgtcagaggtcaaaatgtrgagatgtcaatgctgaatgcatataaacccaaggtaatgttagcagtacagagctacatttgttccgtgggcttcaagttaaagcaccatgttataaccc

SEQ ID NO: 18186 - DNA, 201 bp, Homo sapiens
aacattctaggactcagtgagcggtcaagaaaggcagtggggtagccacttgcttctcttgcattcagcctttgcagctactgggctggccgctagtcttrtgagtatgcgcatgcctgtgtaacctcacgcatcactgaatcggggatacaggatgtggcatggctgggagcttcttggaagggcctccacatcctgtga

SEQ ID NO: 18187 - DNA, 201 bp, Homo sapiens
actacttaaaaaaaaaaaaatactgaggcctgtttccaactgcaaatagttctctgtgctgacagactatatatatatatatatatatatatatatatatrtatatatatacacacacattttgtcctggtttgccttttcaaatggctttctttaccaggttggagctttagcagggaagtgtgcagtgtgggtcttata

SEQ ID NO: 18188 - DNA, 201 bp, Homo sapiens
tttataaaaagaaatgtttctaaacactgattttgtttgtgtgtgtgtatataatgctttatgtaccctagaacttaaaatataattatatatatatatawatatatatatatatataaagattttatgtgtaagggattatcattactgattatagtctgatcattattataactagattacaaattgaccactaatatg

SEQ ID NO: 18189 - DNA, 201 bp, Homo sapiens
aatggtaataagcagtggattcctttcttctcacagtggatttgtgtgtataaaagaatagaagaggtggttcattttaaactatgcaatgtaatattatrcatgttactttaaagagtataacttttgctctttttcatttctgcacccagattcaaaggattccaaggagaagaataaaatggaaatcctgtacatact

SEQ ID NO: 18190 - DNA, 201 bp, Homo sapiens
ctctctgaagcaaacgttctggatactcaaagactggatttgtacagtggtctttaggcgttataactctgtccaggtctctcaacacttacagctatcarggaaactttattattgatattctacagaaaaaatcacgattactgcaagtctgtaagctcttaagtatttttcccattgaaattattgtttcattaatat

SEQ ID NO: 18191 - DNA, 201 bp, Homo sapiens
gaaggaaaatagtacagttcttgaaagcaatcaggattgagggataactgaatctcaagagtctccctaatagcataattagagggaggagtggaggacarggtttgaatcttatgttacagtcataattgggaaagagtacagttagtcttgtaattgggaagagaattcaggatggtggggggaagttattgaaaaagt

SEQ ID NO: 18192 - DNA, 201 bp, Homo sapiens
attagagtggcgaaaggtaatgaagggaagacttaataggtgatttcaggttcagacatctgaatgagggcatggacctattccatgcagcttcaggagayagaacgaggtccaacaagtggtcattcctaggagacagattctctacccccaaacattaaacattaaaacatgtaagtaagtgtacattaaaaacattaa

SEQ ID NO: 18193 - DNA, 201 bp, Homo sapiens
tacgatgatgaggtgctgataacacaaactcttgatttcgaggaaggagtgttcaaaggaggaggaggaaaatgactgctagagagaaaggtgatggatgkcatgtgaaaatagttgagtgtgctgagaatcgttgattagagtggcgaaaggtaatgaagggaagacttaataggtgatttcaggttcagacatctgaat

SEQ ID NO: 18194 - DNA, 201 bp, Homo sapiens
agggaatatgcagggcctcgtgtgagaatagtgattgcagtgaagtgagaactaagtgggatgaagcttcaaatgtggaagactgtaagcagagctaagaygtcgaggaaggagactcggtaggatagtgcttcagttagaaggagggatggccacgtttgttggttcacttttgagatgcagagcctattcctagggtag

SEQ ID NO: 18195 - DNA, 201 bp, Homo sapiens
gggttcactcaagaccccaagatccagcacggtggttctccccactggggaggcagcctcagggaacattctgtctgcctttggcattctaaaccatttckaatttcatgaagataagtcagaggttttaaatgtgatatcactgctgaaaaggccagagccatcagcgtagaaccagcatgtccttgctaattacaatac

SEQ ID NO: 18196 - DNA, 201 bp, Homo sapiens
aaggcagaggtggagctgagctctgtgtctgggaagagagaagcaggcacgtcctctgatccttgcccaagggcctgctttgtgagtggggcatcaatgcygcttttgttccacctttagcgtctggcccacagctgaactcaaagaggctggctgctcggggcaaccctggcccacaaaggacagacagcaccaagccca

SEQ ID NO: 18197 - DNA, 201 bp, Homo sapiens
ttgagggcagggagatgtaaggtttttaaaggttctttgataaaaaggttggagcatggctctttggctctgatcactccattggatacttaaaacaatgwtcaactctgtcatcagaatgaaatgtccactgattcatctccatttcttaactaccaagcaacgttcttttgagggctttcacaccctcacgtatccttt

SEQ ID NO: 18198 - DNA, 201 bp, Homo sapiens
agttataacattctaggactcagtgagcggtcaagaaaggcagtggggtagccacttgcttctcttgcattcagcctttgcagctactgggctggccgctrgtcttatgagtatgcgcatgcctgtgtaacctcacgcatcactgaatcggggatacaggatgtggcatggctgggagcttcttggaagggcctccacatc

SEQ ID NO: 18199 - DNA, 201 bp, Homo sapiens
atagctccaaaaaatcccatggatccaaagaatataatttgataaatatgtcttgggccttgagggcccacccagttataacattctaggactcagtgagyggtcaagaaaggcagtggggtagccacttgcttctcttgcattcagcctttgcagctactgggctggccgctagtcttatgagtatgcgcatgcctgtgt

SEQ ID NO: 18200 - DNA, 201 bp, Homo sapiens
actactggggaatgtagcctgcctgtccttttaagttacagcagactcttacttttccaaacaggcgcctttggttgaggtgatttacctggctatgggcktctccattgaggcactagggagaggaaagaaacagggctaaaagccttcaccaaacaacatctaaagtaacactgaaaaccaacagtctcaaagccatca

SEQ ID NO: 18201 - DNA, 201 bp, Homo sapiens
ggtggctaggggacagggaggctgtttttgtcaggtcttattgttaaccccatcacgctgtttataattgcctgtttgtggtcatgtactcctctcccacmagactgtaaggttttagaaggtgttagggaccagttcaaccttttttttttttttttttgagacggagtctcgctctgtcaccaggctggagtgcagtgg

SEQ ID NO: 18202 - DNA, 201 bp, Homo sapiens
cctagggctacatcttggattattaaatgaacattaaaactgcaggccccagtccacagggcccatattcataggcaccttcagcatcggcgtccactttstgttatcctttttggcaccaagaatttccttttctttccatctcagctatgcatcatatatttccttgtgacattttattcagtactcttcaagttttta

SEQ ID NO: 18203 - DNA, 201 bp, Homo sapiens
gggagaaactgggtgaagggtgcagaatctctctggtctttacacagcttttgatgtcttatggagacgtttccctcaaccccacccaagtcctgaatggrctttcaagagtcctagcagcttctctggactgttaggagaagtatttccagcaccttcccacaggtagggcggctctcccaggctctagtaaagacttta

SEQ ID NO: 18204 - DNA, 201 bp, Homo sapiens
ttcccattgtgtataggacttaaccaagacttcacttgtttttaaagagtcaagaacaaactctcagtctgtcatggaattgcagctgtgaaagcatcttmcttgtgtctcttgtttcttttgagtggcatgtgactttgaattggccagagacaattagtaggtaatagatttttattataaaatggattataaaatatg

SEQ ID NO: 18205 - DNA, 201 bp, Homo sapiens
tagaccatcttttctatgaagatcggagtctttcttggggaggtgctatcctcaccaggtctcagctcactgtttagttgtggtggaaaattctgttttaktcaaaggaagaaattagattatccaggattccatgtctatctaaatatctggtttgccataagccacataagcctcatcaccaaaatctttggtcaggac

SEQ ID NO: 18206 - DNA, 201 bp, Homo sapiens
agtttagagacaggggtcaaaaaatcattattttttttaacatgctccccagctgagtttgggaatcattacattaaacactcttcaggctgtatctatgkttagtttctgtatctatgattagtgttttttttttttaaagtctttacccaattgtgagaactgctacttcgctaaaagtttaccatctgctggacattg

SEQ ID NO: 18207 - DNA, 201 bp, Homo sapiens
tgggtcccagcagcctgagccccccagggtcagcttctggggcaggcagccaatgttctgatgtagctgccatttttcttggatgattcatgtgtgaaaawgtctcccccaaaagaatttgggtcatcttgttctttttcccaaagccaggctcttatcagaccagaagagtctcttcatacaaatggatcccagttggga

SEQ ID NO: 18208 - DNA, 201 bp, Homo sapiens
tctgggtttccttaccctggtggtttgtagaggatcggtgctaggctgcaggttatgtaagactcacctagggagattcaatagtttagagacaggggtcraaaaatcattattttttttaacatgctccccagctgagtttgggaatcattacattaaacactcttcaggctgtatctatgtttagtttctgtatctatg

SEQ ID NO: 18209 - DNA, 201 bp, Homo sapiens
atgtctcccccaaaagaatttgggtcatcttgttctttttcccaaagccaggctcttatcagaccagaagagtctcttcatacaaatggatcccagttggsaagtttatgaatgttaaggatagttgctcattccaaaatacataaccctttttgtctgtggcatcttatatttgactatattgctttttctactcaacag

SEQ ID NO: 18210 - DNA, 201 bp, Homo sapiens
taggtctgccactaaagagaggcaacatcagaggaggacccacacacgtacaaagtcttcataatgtccctctgcagtttttaaacatttgaactttaaasttttaaacttcaataaattatgttgaaggtttgatggaaacaaatggtaataagcagtggattcctttcttctcacagtggatttgtgtgtataaaagaa

SEQ ID NO: 18211 - DNA, 201 bp, Homo sapiens
taaagttttcatccaaggtgaagcaccagggagcttccttttgattccctgggttgcggcagtaggaatggcctccattcagctctgggaaacgaagggcygtgaaagtgtgtgtgtggggatactgggaattccatggctggcactggcgccctgatttggtcacactgacggtcccccggtagtccacacctgtgctgt

SEQ ID NO: 18212 - DNA, 201 bp, Homo sapiens
tgaccagcagggaagctgtggccacgaggttaattacctgccctcccctccagaaactgctggctagaggagagctccagcatctcctatgtttctttctmattgtttgggtttttgtgtgtttttcagatcacaagtgttataacagcacaggtgtggactaccgggggaccgtcagtgtgaccaaatcagggcgccagt

SEQ ID NO: 18213 - DNA, 201 bp, Homo sapiens
tatatgatttaatgagtattcttaaagaattaaaaagcatttgcatgcttttgacctcttgttttaacctgtttttgaatcttctactcataacatggacktattatgtggctgtatttatgggtatcatgtttttggtcttttttttgagacagagtctcgctctgtcacccaggctggagagcagtggcatgatctcgg

SEQ ID NO: 18214 - DNA, 201 bp, Homo sapiens
tccctgtccctcattcctaatgtatatgttctcctaaaatcactttaagtgtatcaacttgctcttgcttcatcttttaaaaacatgtataagtaatgctrcactccacacctttacgcttaatggctctaagagttcacgtttcagtgcaccatctctttgagttcaaattatggttctgcccacaccttttcagaatgt

SEQ ID NO: 18215 - DNA, 201 bp, Homo sapiens
agttgcatccttattttttcacttaacactgtatctcaggcatctttataagtaacaagatctccctgtccctcattcctaatgtatatgttctcctaaartcactttaagtgtatcaacttgctcttgcttcatcttttaaaaacatgtataagtaatgctacactccacacctttacgcttaatggctctaagagttca

SEQ ID NO: 18216 - DNA, 201 bp, Homo sapiens
tgaagtataattagatagaaactaaactctgtgggaagtcaagagagggagaggttgatgtgggtgggtgggcttcctggcagaggctgaacttgaactgrtcttaaaggatggagaggattaggtgagaccaagagaatgcagaactctgtgcaaggcacagagggagggagaactcagttaaaatgaagatctgtggac

SEQ ID NO: 18217 - DNA, 201 bp, Homo sapiens
ggtgcctgaccagtgaaggacagttattattaaagtgctgaggaatttaattcaataaggtcagggacatctgctgtgcttgcttgcccaatgtccatttmttcttctttttacaagaactgcttgcttttcctttgcggaaaaccacctcatgcccattctgtctaggtggagctgacccttacctaaatcagggtggcc

SEQ ID NO: 18218 - DNA, 201 bp, Homo sapiens
catggtaaatgcaagtgtaaggctttgaaggcacaggggagcctctacaagccctgagtggaaattcgcagccagtatgtgaaagcatgacttcaattttwtgaagactgggccctaagaactggacatgatgaagcttaccagtttgccaatcttcaccttctgttttcttcccctgagagtttccactagaaattcccc

SEQ ID NO: 18219 - DNA, 201 bp, Homo sapiens
gtaaggtgtgtgaaggtatctgggctaagagagtggaaggtcagtgaacccctgagaaaatactagccacttgggggtcctcattcttgcccaatcagtcmgaagatccaactactcctctgtgtgccccttcctgctccatgtgctcctttattttacccatttttctccatggtaaatgcaagtgtaaggctttgaagg

SEQ ID NO: 18220 - DNA, 201 bp, Homo sapiens
ttttaactggtggcggggggaactttaaaaaaaaaatcaaaatcactgtgtatttgctgaaaagggtctctttattattgtccactttattatctttaaarttctttttgcacaacaaacttttttgtgatgatccattatgaaatttgtggcatatcttcttcccgtctcttttttccattacttttttgtttcggagag

SEQ ID NO: 18221 - DNA, 201 bp, Homo sapiens
gtagagagcctgagtggagccaggattgggtgaggagagatcatggctatgttctggcagttggtgacatgtcaggggaccttaggcaagttctctgcccragtctgggtttcttcaagtccaaccagggtatgattatctcaggccttgatcctttgcatgtggagtcatgagctaatgtctgttctgtgtacggacttt

SEQ ID NO: 18222 - DNA, 201 bp, Homo sapiens
ttggttaggcggttctctgatctggactgagccaaggtgatctcggcacatgctattagccaaagcaagtctagattcaatggtacagaaatacactccayctcttcattggaggagatacaaaaagatgtggatacagggaggaataaattgtgggcattttatagtctactacactaccttataggaataaatgtgata

SEQ ID NO: 18223 - DNA, 201 bp, Homo sapiens
tgattatgggctttgcaatcagaaagactggatttcaaatcttggctttgtcaatctatggctttagattagttcttaacctcattgagccttagagttcycatctgtaaatggacatgtattacccacaaataattctatataacaaattaccccaaaatatagtgtcttaaaacaatgagcatttatttagctgaagaa

SEQ ID NO: 18224 - DNA, 201 bp, Homo sapiens
aatacataccggattagggaatgacaaactcaccaagcttaaatagcagttgttattagctgaactctgtacttttggatgtgagaatatcattcttcccrgatcattgtttgaaagagacctcctgtacttttgcctctctcaaatttgattaaatgagctgccaacacaagaccctgtcagactaagatgactctaata

SEQ ID NO: 18225 - DNA, 201 bp, Homo sapiens
ccataatttatttaggtagtctgctattgctggacaagtaggttgtttccaatcattttatattatagacaatactgccatgaaaatgttgtaacaatatyatttcatgtatgtttgagggcatctgtcagattaaattcctagaagtggaattgatgtacacacagttattaacattttaaactttcatagatattgtca

SEQ ID NO: 18226 - DNA, 201 bp, Homo sapiens
ataggcagcagaaatggagggaacctactacttaaaaaaaaaaaaatactgaggcctgtttccaactgcaaatagttctctgtgctgacagactatatatrtatatatatatatatatatatatatgtatatatatacacacacattttgtcctggtttgccttttcaaatggctttctttaccaggttggagctttagca

SEQ ID NO: 18227 - DNA, 201 bp, Homo sapiens
tccccaaattagtatggctccctggggcagaaaaatcttttgtctacatttctaatgtctactcatccttaaaactcaactcaaaagtcagtatcccttgscaacctgagatgttcatttctgttgccctcctactcgctcttatgaggtgctctttctatggagtcccgtaaaactccgggcatacctcagaagaaacac

SEQ ID NO: 18228 - DNA, 201 bp, Homo sapiens
cagagtcagcaaatattagatacctaataagtgtccaacacgaaggatttaaagatcagtactcaaaatatacaaatatggacatgcagcgatacctaagkgactgtttacagttccccaaattagtatggctccctggggcagaaaaatcttttgtctacatttctaatgtctactcatccttaaaactcaactcaaaag

SEQ ID NO: 18229 - DNA, 201 bp, Homo sapiens
tcttctgtcacctgtctcgcttgactaactctaccactcacatttcatgattcagtgtggagaacataatgtgacaaataggaaaggagaatgtaaacacytgtagtaatgtctgtctagtgtgaccaaaatccctgaccttatattttaacattgtaacttttgggaagaatttcttttgatacatgtttttattttatg

SEQ ID NO: 18230 - DNA, 201 bp, Homo sapiens
gtcatgaaatgcaatgacccttctctcttctgtcacctgtctcgcttgactaactctaccactcacatttcatgattcagtgtggagaacataatgtgacraataggaaaggagaatgtaaacacttgtagtaatgtctgtctagtgtgaccaaaatccctgaccttatattttaacattgtaacttttgggaagaatttc

SEQ ID NO: 18231 - DNA, 201 bp, Homo sapiens
acatgagctttatggcatgagttttgtgacttctacattaaccactcagaacactgacaagctgtaaaaatattatagatcacagccatttttcagatatktgcagttgccagattgctgatatgcagatcttattttgcaaagtcaaggcaaagtggtcccttcttagtttgcctgtttgccatatatgcatttggaatg

SEQ ID NO: 18232 - DNA, 201 bp, Homo sapiens
tgtgaatgtaaattactgctgttcatttttgtgctcctgcctgggaccagggaagaaattctccaaacatcctgctttccgagtttgaggacttactttaraaaagtactaccattggctttatacctatcattagctaaaccttctgtaaatggcatcattttgggagcaaggtaattgtcaggtcaggcctggatagac

SEQ ID NO: 18233 - DNA, 201 bp, Homo sapiens
ttttgtttgtttgttttttgttttgttttgcttttttgtagagtcagggtctcactatgctatctaagctggtcttgaactcctggccccaaaagatcctyctgacttggcctcccaaagtgctagaattatagactgagccaccgtgcccagcctaaaagccctatctttagtaaaggactggtagatttacttatgatg

SEQ ID NO: 18234 - DNA, 201 bp, Homo sapiens
ctcatcatgtatatcagtcaattctggactacagtctagtagaataggataattggaaatcacaccatctctccccttattttggctttcctgccaaactrtgatgtccacatgaaagaacagatgcatggatatgcgtctctcaatcagttcaacacattgagcccttggccatggcttccatctcttactcaacctctc

SEQ ID NO: 18235 - DNA, 201 bp, Homo sapiens
agaactctgacccattaaacactaactttcgattccaccccaccctgcctctgcctcctggcaaccatcattctactttctgtccctatgattttgactastctatgtgccacatttaagtggaatcatatagtatttgtcctttgtgactggcctatttcagttatcataattgtcaagattcatccatgttagagcatg

SEQ ID NO: 18236 - DNA, 201 bp, Homo sapiens
ggagactgtcctgcatggcccctgaccagcagggaagctgtggccacgaggttaattacctgccctcccctccagaaactgctggctagaggagagctccrgcatctcctatgtttctttctaattgtttgggtttttgtgtgtttttcagatcacaagtgttataacagcacaggtgtggactaccgggggaccgtcagt

SEQ ID NO: 18237 - DNA, 201 bp, Homo sapiens
gttaagtacatttcacattgttgtgtaatcattaccaccatccaatgccagaaatttttcatctcctccaactagaactctgacccattaaacactaactytcgattccaccccaccctgcctctgcctcctggcaaccatcattctactttctgtccctatgattttgactactctatgtgccacatttaagtggaatca

SEQ ID NO: 18238 - DNA, 201 bp, Homo sapiens
cccagcttgcggtaaatagaagtcattgcccctaatgtattcaatcatctttaaagatccctatcctacccctcttatttaggagaatcctataagggggrcaaagaaaatggacagtatttgcttgatctcaatctggttttagggtaaaccttgccgtttctacataaaacacctcgtaaggtaccaaaacacgttctc

SEQ ID NO: 18239 - DNA, 201 bp, Homo sapiens
gacatctagtctcttctagaatacttttagccatgggcaactcactcctttttcagaaaaaattgtggttaaacatatgtaacataaaattactttttaaycattttaggtgtgcagttcagctgcgttaagtacatttcacattgttgtgtaatcattaccaccatccaatgccagaaatttttcatctcctccaactag

SEQ ID NO: 18240 - DNA, 201 bp, Homo sapiens
ttgttcctcattaaaatggaactgaaaatggttttctggaaatgtgctttacaaacaatgagagaatctgattgtaaatcaactccaggacccagctgtcycagggtccaggctgggaagctccaggataaaaggtagtctgtatttttatggaaaaataaaacaattttttacttccgtaattgatgaagtgcttatctt

SEQ ID NO: 18241 - DNA, 201 bp, Homo sapiens
taagcactaaataaacagcaattgtctttaacccgtgcttattccactctgtcacactgcctgccaacttaacgcacttggtcttttttcaaggtatatgkgctgtcagcttatcttcactgtactgttagctcctcaattgtgggatctgggaatgttaatctttgtatcatagtgacttttaagttagattatttaaac

SEQ ID NO: 18242 - DNA, 201 bp, Homo sapiens
ggagttcttagaaaagtgtcaccaggctgggcgtggtggctcacgcctgtaatcccaacactttgggaggtggaggtgagaggatcccttgagcccaggarttcaagatcagtctagtcaacatggtggagactctctctacacagaaaatttttttttaattagccagacttggtggtgtgtacctgtggtcccaattac

SEQ ID NO: 18243 - DNA, 201 bp, Homo sapiens
tctacctcccttttaaaaattcatttatgtctttctgtatttctcttgttcctatagtcaataaacacttattcaatacaaactatattcctttcactgarattgcagtagcatataaagcagatataattcctgttctcattttgacataaaggatgaatagaaagaaagggaagaggaatgaaaatgggcatcccaaga

SEQ ID NO: 18244 - DNA, 201 bp, Homo sapiens
cacaaagcagtgaacccagaattcaaacccatgttcttaatcaatatattatgttgcctttaagctgaattgaactttgtaataaaatgtcttaggttcakttattcaacaaatgtttattcagtgcctaccatggacgaggcctgtactggctgaagatacaaaaatgaaaaaggcagaaacattcttccctttggatac

SEQ ID NO: 18245 - DNA, 201 bp, Homo sapiens
aaaccatgattttgatgtttaattcaagtctggtcttgagtgggccaagctaggaatgaggagcaggagagagttaagacgtaaaattttactcactgtayggattgagcagtggaaagagaaccaagaagagagatcttgtgacaacttacatctccggtttacttttgcatttcagttcaatgaaacagcctacttacc

SEQ ID NO: 18246 - DNA, 201 bp, Homo sapiens
aataccattctccattttgctcaccactgaggcatatgtacaaatccaaagaccctcttttgttacacgtgaaactttattcttatttttttgtcaaaagaaaagtcctaagtttcccaaatccaaagcaaagtgaatgcttcaatattactttatccagagccacaggcaggagagaaaagttgtgaaaatcaattcagg

SEQ ID NO: 18247 - DNA, 201 bp, Homo sapiens
ctttagccctcctgagcttgcagaagttggtccacaaacagattatttggggataaagacccacaaaagaagaaaggcagtaaagaattcagcagacggcragctctgcaacccgttgcagacattattatgaggcagtggagtgtgtgaaaacttcttttagacaaacttcgaaaatgttgtgttcctgtaccaagcaag

SEQ ID NO: 18248 - DNA, 201 bp, Homo sapiens
gcaagtcctctgccctggatctgattggtcttgagaatggggaggactgtctagtgtttcagctgtgcctatgctgctgagagatgggcaataggggaagygggacccctctagaagtgatggctgagaaacttcaggctggactttccacaccttttcagggttctggagtgagtcagtgttactcagcccacttagggc

SEQ ID NO: 18249 - DNA, 201 bp, Homo sapiens
tgtctatttagaggccatgctttctgttgatgttgacattgctgttttttgtttgtgggggttttgtttttgtttttactttataataacatttctttatrtaaaaaggaatgtttgggctggggctaggagaaatgttgaggtaatggaaaactctaataatgcgatcatctattgaagacacgagctcagggaaagcct

SEQ ID NO: 18250 - DNA, 201 bp, Homo sapiens
cattccattttcacacaaccttgcattttgctggcagagagaccaaagtcaaacaggttaagcaacttagccaagaatagagccagaaaatgacccagtcyaacagcctcctcagctcctgccctgtcctcacagtggttccatcccaaatgcagtagccaagtctgtcctgagacagggtggcattggggtggaagccca

SEQ ID NO: 18251 - DNA, 201 bp, Homo sapiens
attcccaataggaatcaaatactgctgaagatagtagaatcagacttttgtgctggatcgcaggtaaaccctgggtagaccttgagatactgcccttgcartggtgctgagtaacagaaggatgctagcatcctgcatcgagtcagaggagctcactgtagcccatccctccagtccacccagactagctagacagtgcct

SEQ ID NO: 18252 - DNA, 201 bp, Homo sapiens
agacttttgattctgggaattactggaagaaaaaatatacctttgtctgaatcactcatgctgccagattggagaaacctgaatcagtttgatgttgttcrtaacaacaacggtagtaatagtaataatgaaatctgtccccaccatttgtttacctactctgtaggaggtacagtgcttgaaggttggcatccgtgatct

SEQ ID NO: 18253 - DNA, 201 bp, Homo sapiens
tgataaatgccttaaagggcccaggacagtacctggcctcatggaggtacctactacacagtgttctcttaaatctctctgcatatttacatccctagcawcagtgcaggagaatgtcctattctactactacttaccttcactcaaactaagtattgtcattttcttggttgttgtcaattttaaaagcaaaaaaatggt

SEQ ID NO: 18254 - DNA, 201 bp, Homo sapiens
ggtaccttatccatctaactcatgctgccagattggaggaatttgaggcctgaggggttcaaggaactagcccagggttatgaaggtagtgggtgatctcytgaggaaatgagacgccatggatattcttgatgtagattcttctcttcagtgacattgtcatgaccccacctcattgagatatttgatccacacaataca

SEQ ID NO: 18255 - DNA, 201 bp, Homo sapiens
taagtaatcacttccttttcagtctgaatcaaattgagcaatatttccacccctaggaagggcagcagattagtctggtgccagagacaacttttctccayaacctagactcagggaatctccaagttgaatgacctctagaagtcgtataatgtgagctcctggctgataacgtgattcccgtcttccagaagcctgata

SEQ ID NO: 18256 - DNA, 201 bp, Homo sapiens
gctatgaacagaggagagtgattaagtcaactccgtgcactaaggatccaactttatgagaaaaaaatatatttataaaaaatatataacatatatatatrtatatttggtattgatttttctgttatatggatgaggtaccttatccatctaactcatgctgccagattggaggaatttgaggcctgaggggttcaagga

SEQ ID NO: 18257 - DNA, 201 bp, Homo sapiens
tgaagcttaacagacatgacccaaagaaaagaatggttcacacaatatcaagagtactttgtggcagaggtgggaccagactccatcccctggtcctcactgcacagccttataacgtcatagcttctcaaaagtatcctaagattgcaatggagaccagaccaagcagtcagccccatcagagcttggaggatgctatca

SEQ ID NO: 18258 - DNA, 201 bp, Homo sapiens
gaaaactgttgatgctcagagggagaaaattggccaactttaggaatcaaaattccaatattgctccaggtaatgccagagaaacataatttgacctaatrtggtccacatctttctagtccagtgtcaacatcattcattaactagatatacactgttatgtactataaaaccataaccaactttccaccattttggaga

SEQ ID NO: 18259 - DNA, 201 bp, Homo sapiens
ctccattctactccatttcccaaaaaacaattgctagataatgaccattatggtggctaatatcaggtaactaccaagaagtgccttcttccaggcttctstaagtattcttgtttatttgaaagattgatagatcagagggtcaggggatgtgttttattgtaagtttctgttccaaatttcctgacattttccattaaa

SEQ ID NO: 18260 - DNA, 201 bp, Homo sapiens
tcagggcacagagcagaagtggtggaaccaatgcaggcagtctgattccatggtcaccacccttgctgcctccctctatgaactctaaaaaatctttagcyctaaccttctatgtttctctggttgtcaaaagcaaaagcgagcctggctaataaggcatttgcaattgcagggcttcctctcactcagacagtatccctg

SEQ ID NO: 18261 - DNA, 201 bp, Homo sapiens
aaaataactgcttttcctttattcagtatcattaatctcgaggtagatacctacctttccatagactctccctaatagcttgacctgattctcttgctggrctattcacaaatagagtgacttctaaagtgacaccaaaatcctcagtagctcttcaggaattggtgtgggagttcagtggcaatattttcatatgttttt

SEQ ID NO: 18262 - DNA, 201 bp, Homo sapiens
ttgattaaaagataaatttttgtttctccggatgacattagtctggacataaaagtaaggttacacagtaataataataacacaccaattgttttgttctsttggtccttccttggaccaaactctggttataactcttgcttcctttaggaagctcttcaacctctctggcaaactcacattgtgtagttcatgccactg

SEQ ID NO: 18263 - DNA, 201 bp, Homo sapiens
gaaaatagtgatgcttgtgtgcaacctagatgaatttgaaaattaactgattttcctcaagtttgtcagagtttctaaagtggctttggaaagggttccaktgcacacgaagaggaagcttaagttagacaatgtttgtccttatcaataatccatacaaaaattgtttatttcattttcttggactttatatgcgatacc

SEQ ID NO: 18264 - DNA, 201 bp, Homo sapiens
tgatcacatgactcctctgcacagtgcctcctgcctggctgcccactgccctttctctttaatatggcactcctgagttctccagtctaattacctgcccwctttttcctcaaatcttaagactttagtcataaatcattactttcttttatccatatcatactcattttaccttatgacctttatatcttcatgcatgct

SEQ ID NO: 18265 - DNA, 201 bp, Homo sapiens
gtgcacacgaagaggaagcttaagttagacaatgtttgtccttatcaataatccatacaaaaattgtttatttcattttcttggactttatatgcgatacytttcagggaggctgcctacctcataatagccctctgttgtctgatagctgctttcacgacccatcatgaggggccttcagcagccatgtttgaatttata

SEQ ID NO: 18266 - DNA, 201 bp, Homo sapiens
tccagataaggaaactgaggcacagagaagtaagtaacctgcccaagaccacacagagagttaaatgggaaaactaggatttgaacctgcatatcctaagrcctgagttttgttcctaatcattattatgccaaactgcattgcagttttttttttcaactctgtctgatgattaaaattctctgtaagatcccagccaaa

SEQ ID NO: 18267 - DNA, 201 bp, Homo sapiens
ggcattcgtcctgcttgggcaaaggggaacattctctgggtcagatttgtggttttagaagctgttctgggagaggctgccagcaggcccaggacaggtgsagagccacatccccacctcctcaggccacagcctaagggttcacagccaggaagctggtgggggctacaccaggctctccttgtatctctcactctggtg

SEQ ID NO: 18268 - DNA, 201 bp, Homo sapiens
cacccggtgggggcacagcacagaccccagaggcaggaacctctcagccgatgccccccggtatgggaaccagcacctcccaccaaccaaccacacccggkgggggcacagcacagaccccagagccaggaacctctcagccgatgcccctcagcaagagcaccccatcttcaggtagcacccactctgttgccttccctc

SEQ ID NO: 18269 - DNA, 201 bp, Homo sapiens; identical to SEQ ID NO: 2785

SEQ ID NO: 18270 - DNA, 201 bp, Homo sapiens
ctctgggtcagatttgtggttttagaagctgttctgggagaggctgccagcaggcccaggacaggtggagagccacatccccacctcctcaggccacagcmtaagggttcacagccaggaagctggtgggggctacaccaggctctccttgtatctctcactctggtgtcggggcctaacgcctgccccattctctctcag

SEQ ID NO: 18271 - DNA, 201 bp, Homo sapiens
ccctgacttttccctgcagggtgggcccccagggccattcctggcacacacacatgctggactccaagccccaggccccctccctgccccagctggtgacragggggacctcctgctccaggcagtgcaacagagctgcctggcagaccatctgctgacagcgtcatggggggcagatccagtcccaaccaaggctcctgg

SEQ ID NO: 18272 - DNA, 201 bp, Homo sapiens
gcgaagggtcttcatcgtgcatcaatgacacctccctctggatggcggccacggccaggctggctgggggcaacgcaggcttcagtgggaagtctcgctcyggggaagagtctgtgctttcgggagaaggtggcgagctcatgtcatcgagctggatgaaaacggcgtcgcttgagaaatcatcaaagacgtgtccggcct

SEQ ID NO: 18273 - DNA, 201 bp, Homo sapiens
catgtgcctgtacttgtccacgtacgccttcaccaggttggccaccttcacggggttgatctctccactcttgctgtggcagatctggagaaagaggtgcratcaccaaatgccctttcacatccagatgttccgggccagagcccagggccaaagctgggctccctcgcctgccctgctcaggagcaggccctaggtgca

SEQ ID NO: 18274 - DNA, 201 bp, Homo sapiens
ccttgtcggccgtagccacctccggcgagacatgtgcttcccccaaggctggcaacctggtggggaggtcttcccgccctggctccccctgtgcaaggggygctggggaagcctccctcacagcccccttcctctctggggaatgggaccgggtctgcggccacttctcacgggaccgaggccgcctgtgctcccgtgccc

SEQ ID NO: 18275 - DNA, 201 bp, Homo sapiens
tccctgggtctctgcagccttggccctgcacaccctcattccacgctggacacccctccgtctccacatctgtccctctgccctcccctctcctgtccccygtcccccacttcctgcctggtcgcctgccctgttctccatcctgggcctcaccggagctttgccagagcagcacttgagccgggggccatagtgcttgtg

SEQ ID NO: 18276 - DNA, 201 bp, Homo sapiens
cgcgcatcttcaaggtggggaccccagccccgccccgccccgggtgggagagcccgcctaggaccccgcgggcccggcacacgtgttctgtccccctcttmaggcctgggctgtggcccgcggcaggtggccgcctagcagcaggggaggtggcccgccccccgaggctgagactgcggagcgcgccggctggaaaaccaa

SEQ ID NO: 18277 - DNA, 201 bp, Homo sapiens
gctatgaggggctgcagtggctggacgaggcccgcacctgtttccgcgtgccctggaagcacttcgcgcgcaaggacctgagcgaggccgacgcgcgcatyttcaaggtggggaccccagccccgccccgccccgggtgggagagcccgcctaggaccccgcgggcccggcacacgtgttctgtccccctcttcaggcctg

SEQ ID NO: 18278 - DNA, 201 bp, Homo sapiens
aggtggcggcccctcggaggacaagcgcttctcggtggtggatatggcggccctgggcggggtgctgggtgcgctgctgctgctggctctccttggcctcrccgtccttgtccacaagcactatggcccccggctcaagtgctgctctggcaaagctccggtgaggcccaggatggagaacagggcaggcgaccaggcagg

SEQ ID NO: 18279 - DNA, 201 bp, Homo sapiens
gtctaggagggacaagccccttcctgccccaggttgaggcccacaacacggtgacctctggcaccgcaaccacagtcattgagatacaagtttccgaacargagcccccctccacaggtaagcccccctccacaggtgagcccccagggttctccaaataagccccttcggtggctcctttcccgcggtaggtgtgcaagg

SEQ ID NO: 18280 - DNA, 201 bp, Homo sapiens
gggggctcaaccacagtgggggtccacaggggccaagagtgtggccggaccaagcccctctccctccccaggacacgaaagtgaactccaccgtcatcccygagacgcaactgcaggctgaggaccgcgacaaggacgacattctgttctacaccctccaggaaatgacagcagtcagtgccgcccaccctgccccagcac

SEQ ID NO: 18281 - DNA, 201 bp, Homo sapiens
ccgcaccaggcagagccgtacctgtcaccctccccaagcgcctgcaccgcggtgcaaggtgagtgcatcccaggaaggggcagcctgtccccgcccacccycgtcactcacggcttgtccccgcccacccatcactcacatcctgtccccgcccacccccgtcactcacatcctgtccccgcccacccccgtcactcacag

SEQ ID NO: 18282 - DNA, 201 bp, Homo sapiens
catcatccaccgcgacggctccctcagcgccaagagggcgggtgagtgccttccctgccacggccccttcctctgtgggctgctggtcctcaggctgttcscaagcactcagcccatgtctcagtcacggaagatgtagctgaagttggggggaccattcctcagccatttttctgcattgatttcccttcttgagcagtt

SEQ ID NO: 18283 - DNA, 201 bp, Homo sapiens
tgctgcggcacgtggcccctgggttgcacctggagcttcgggggccacagctgtgggcccggcgcatgggcaagtgcaaggtgtactgggaggtgggcggmcccccaggctccgccagcccctccaccccagcctgcctgctgcctcggaactgtgacacccccatcttcgacttcagagtcttcttccaaggtcagtgag

SEQ ID NO: 18284 - DNA, 201 bp, Homo sapiens
tggcgggaatcggggccatgcccggggagctgtcgggagtggcgggaatcggggccatgcccggggagctgtcgggagtggcgggaaatggggggcatcascatgcctgccgtcgggttcctgcgctgacacctggtctgtgcacctgtgttgctcacagttgaaaactggacacttttgtatgtatattatagagacact

SEQ ID NO: 18285 - DNA, 201 bp, Homo sapiens
caggctccgccagcccctccaccccagcctgcctgctgcctcggaactgtgacacccccatcttcgacttcagagtcttcttccaaggtcagtgaggcccytgcctggggggctgtctccaggggtcgttgggagcacctgcctgccaggtactcagcagagtccccttcttcagagctggtggaattccgggcacggcag

SEQ ID NO: 18286 - DNA, 201 bp, Homo sapiens; identical to SEQ ID NO: 2805

SEQ ID NO: 18287 - DNA, 201 bp, Homo sapiens
cctgcctgctgcctcggaactgtgacacccccatcttcgacttcagagtcttcttccaaggtcagtgaggcccctgcctggggggctgtctccaggggtcsttgggagcacctgcctgccaggtactcagcagagtccccttcttcagagctggtggaattccgggcacggcagcgccgtggctccccacgctataccatc

SEQ ID NO: 18288 - DNA, 201 bp, Homo sapiens
atctacctgggcttcgggcaggacctgtcagctgggaggcccaaggagaagagcctggtcctggtgaaggtgagaccagagcctcaaggaggggaggccaygtgctcaggcccactgacagacgcctgatgccctcagagcctcggagagggggaggggaggccatacaccgggtcactgacagacgcccgacgccctcag

SEQ ID NO: 18289 - DNA, 201 bp, Homo sapiens; identical to SEQ ID NO: 2762

SEQ ID NO: 18290 - DNA, 201 bp, Homo sapiens
cctgatgccctcagagcctcggagagggggaggggaggccatacaccgggtcactgacagacgcccgacgccctcagagcctggggagggggaggggaggmcacacgccgggtcactgacaagacgcccgatccctcctggcagctggaaccctggctgtgccgagtgcacctagagggcacgcagcgtgagggtgtgtct

SEQ ID NO: 18291 - DNA, 201 bp, Homo sapiens
caggtacccttctctctgcctgcctctcctcctgccaggccgcggagctgcttacgttcaccctgacttttccctgcagggtgggcccccagggccattcytggcacacacacatgctggactccaagccccaggccccctccctgccccagctggtgacaagggggacctcctgctccaggcagtgcaacagagctgcct

SEQ ID NO: 18292 - DNA, 201 bp, Homo sapiens
gagagggggaggggaggccatacaccgggtcactgacagacgcccgacgccctcagagcctggggagggggaggggaggacacacgccgggtcactgacaagacgcccgatccctcctggcagctggaaccctggctgtgccgagtgcacctagagggcacgcagcgtgagggtgtgtcttccctggatagcagcagcctc

SEQ ID NO: 18293 - DNA, 201 bp, Homo sapiens
ttcccgtaaaccacctgcagtgcccgccgccttcccgaggctctgtgccagctagtctgggaagttcctctcccgctctaaccacagcccgaggggggctyccctcccccgacctgcaccggagatctcaggcacccggctcaactcagacctcccgctcccgaccctacacagagattgcctggggaggctgaggagccg

SEQ ID NO: 18294 - DNA, 201 bp, Homo sapiens
ggaccagcaccacttccgaggtccccagaccccctgagccctcccagggaccctccacgaccagctctgggggaggcacaggccctcatccaccctctggsacaactctgaggccaccaacctcgtccacacccggggggcccccgggtgcagaaaacagcacctcccaccaaccagccactcccggtggggacacagcac

SEQ ID NO: 18295 - DNA, 201 bp, Homo sapiens
tgggagacagcccaggcctgggtggaacccaagtgtcccaagcctggcacaggttggcatgggaaatgcctggggcactcaacagtgcggggatgatgacrttttccactgcgatgccaggtggcggcccctcggaggacaagcgcttctcggtggtggatatggcggccctgggcggggtgctgggtgcgctgctgctgc

SEQ ID NO: 18296 - DNA, 201 bp, Homo sapiens
ctctctgcctgcctctcctcctgccaggccgcggagctgcttacgttcaccctgacttttccctgcagggtgggcccccagggccattcctggcacacacrcatgctggactccaagccccaggccccctccctgccccagctggtgacaagggggacctcctgctccaggcagtgcaacagagctgcctggcagaccatc

SEQ ID NO: 18297 - DNA, 201 bp, Homo sapiens
ctgagccctcccagggaccctccacgaccagctctgggggaggcacaggccctcatccaccctctggcacaactctgaggccaccaacctcgtccacacccggggggcccccgggtgcagaaaacagcacctcccaccaaccagccactcccggtggggacacagcacagaccccaaagccaggaacctctcagccgatgc

SEQ ID NO: 18298 - DNA, 201 bp, Homo sapiens; identical to SEQ ID NO: 2767

SEQ ID NO: 18299 - DNA, 201 bp, Homo sapiens
gaggtgggcggacccccaggctccgccagcccctccaccccagcctgcctgctgcctcggaactgtgacacccccatcttcgacttcagagtcttcttccraggtcagtgaggcccctgcctggggggctgtctccaggggtcgttgggagcacctgcctgccaggtactcagcagagtccccttcttcagagctggtgga

SEQ ID NO: 18300 - DNA, 201 bp, Homo sapiens
gggcccctcctcagccaaccctgcccttgatggggagtcagaggggccaggctggggccatccaccccagccccacgacgtgccctcccttccgccatccytgaagccatctcccctcgtcctgcgtcccggacccatctacgctgaggacggagaccgcggcatcaaccagcccatcatctacagcatctttaggggtga

SEQ ID NO: 18301 - DNA, 201 bp, Homo sapiens
ggtggggacggatagccgtcgaggggtgcacctcacaacggggaggggctgtgggagaggctgacggccacatcctgcaggtgacccagctaagggtgttygtgtcagtgctggacgtcaatgacaatgcccccgaattcccctttaagaccaaggagataagggtggaggaggtgaggccagcgaagccgcggggactgg

SEQ ID NO: 18302 - DNA, 201 bp, Homo sapiens
ctcccagggaccctccacgaccagctctgggggaggcacaggccctcatccaccctctggcacaactctgaggccaccaacctcgtccacacccggggggyccccgggtgcagaaaacagcacctcccaccaaccagccactcccggtggggacacagcacagaccccaaagccaggaacctctcagccgatgccccccgg

SEQ ID NO: 18303 - DNA, 201 bp, Homo sapiens
accaagcccctctccctccccaggacacgaaagtgaactccaccgtcatccccgagacgcaactgcaggctgaggaccgcgacaaggacgacattctgttytacaccctccaggaaatgacagcagtcagtgccgcccaccctgccccagcacgagcccctcgcctctgacacccacagccgccctcgccctccaaggctc

SEQ ID NO: 18304 - DNA, 201 bp, Homo sapiens
gcggccccagagtccccgcaccaggcagagccgtacctgtcaccctccccaagcgcctgcaccgcggtgcaaggtgagtgcatcccaggaaggggcagccygtccccgcccacccccgtcactcacggcttgtccccgcccacccatcactcacatcctgtccccgcccacccccgtcactcacatcctgtccccgcccac

SEQ ID NO: 18305 - DNA, 201 bp, Homo sapiens
ctaagggtgttcgtgtcagtgctggacgtcaatgacaatgcccccgaattcccctttaagaccaaggagataagggtggaggaggtgaggccagcgaagcygcggggactgggcacgggggtgtgggagcccagggtgagggcaggaggtgagtggtggccgggggctcaaccacagtgggggtccacaggggccaagagt

SEQ ID NO: 18306 - DNA, 201 bp, Homo sapiens
agatgtgtctaggagggacaagccccttcctgccccaggttgaggcccacaacacggtgacctctggcaccgcaaccacagtcattgagatacaagtttcygaacaggagcccccctccacaggtaagcccccctccacaggtgagcccccagggttctccaaataagccccttcggtggctcctttcccgcggtaggtgt

SEQ ID NO: 18307 - DNA, 201 bp, Homo sapiens; identical to SEQ ID NO: 2791

SEQ ID NO: 18308 - DNA, 201 bp, Homo sapiens
gcggccctgggcggggtgctgggtgcgctgctgctgctggctctccttggcctcgccgtccttgtccacaagcactatggcccccggctcaagtgctgctstggcaaagctccggtgaggcccaggatggagaacagggcaggcgaccaggcaggaagtgggggacgggggacaggagaggggagggcagagggacagatg

SEQ ID NO: 18309 - DNA, 201 bp, Homo sapiens
gccctgcctccccaggcggtgcccctgagccccccgcagcggcccgagctggcggaagccccacggcggtgaggtccatcctgaccaaggagcggcggccrgagggcgggtacaaggctgtctggtttggcgaggacatcgggacggaggcagacgtggtcgttctcaacgcgcccaccctggacgtggatggcgccagtg

SEQ ID NO: 18310 - DNA, 201 bp, Homo sapiens
gcgcgcatcttcaaggtggggaccccagccccgccccgccccgggtgggagagcccgcctaggaccccgcgggcccggcacacgtgttctgtccccctctwcaggcctgggctgtggcccgcggcaggtggccgcctagcagcaggggaggtggcccgccccccgaggctgagactgcggagcgcgccggctggaaaacca

SEQ ID NO: 18311 - DNA, 201 bp, Homo sapiens
gaggtggcccgccccccgaggctgagactgcggagcgcgccggctggaaaaccaacttccgctgcgcactgcgcagcacgcgtcgcttcgtgatgctgcgrgataactcgggggacccggccgacccgcacaaggtgtacgcgctcagccgggagctgtgctggcgaggtgagcgacgccggctgccaagggcgttggcat

SEQ ID NO: 18312 - DNA, 201 bp, Homo sapiens
aaaaacatgctaaattccattgctgttcagtccatttcctttaaaggtgggctatgccacagggctagattttaaaacgtggaatttcacaccagtgctcsaaatcttatgaaagcaaaagggacctctgtagttgtactccactttggcttgagtaaaaaccactgctgtaccctttttctttcctttccctgcccattt

SEQ ID NO: 18313 - DNA, 201 bp, Homo sapiens
ctccaaggacactactattggaaattattcatttagactttatttgaaactaattttaaaagtgtagacattgtactatctcctttttttggtatcatctyaactattttattgttagtttattcatattgaataagagagggagtaaagatttcacaatggcgatagctagtatatgccaattaagttaatttaaaaagt

SEQ ID NO: 18314 - DNA, 201 bp, Homo sapiens
tggattataatttaaataatctatttaccagataaatgcacgcatagactaatggtcatttagttacaaattatcattttatgttgatcccactcttccaktggagggctaacactgaataatttggggctattttgctagtgatttttaaatactgtagatgtttgggtataggggaagggaaaataatattttagtcaa

SEQ ID NO: 18315 - DNA, 201 bp, Homo sapiens
acctacatcaactattaattttttttctctaacccaggagttgcaacaatatccaattcacaaagacatcagatcctctatactcacatcgtggcacagarcaaatttggattataatttaaataatctatttaccagataaatgcacgcatagactaatggtcatttagttacaaattatcattttatgttgatcccact

SEQ ID NO: 18316 - DNA, 201 bp, Homo sapiens
ttgaacctacatcaactattaattttttttctctaacccaggagttgcaacaatatccaattcacaaagacatcagatcctctatactcacatcgtggcayagagcaaatttggattataatttaaataatctatttaccagataaatgcacgcatagactaatggtcatttagttacaaattatcattttatgttgatcc

SEQ ID NO: 18317 - DNA, 201 bp, Homo sapiens
ttaaacctgggaggtggagtttgcagtgagctgagattgagccactgcactctagcctgggcaacaagagcgaaactctgtctcaaaaaaaaaaaaaaaaagtgaaggtgcccagtgtctgcaactatgtcaccccgggcatatcacatatcactctgtttttccgtctgtaaaacgggagcaacaatgccattgccttat

SEQ ID NO: 18318 - DNA, 201 bp, Homo sapiens
agtcttatacatatttatcatctgcaaaacacagtattaaagatttcaacagaaatactgaaagtagtgctatggaggttcaggggatgataatacttttygctggggatttgggaaaaagctctaatcagtaattataccttcatgcaaacttctattcttgtggtagatggatgtgggtgtgtatttgtttgaacctac

SEQ ID NO: 18319 - DNA, 201 bp, Homo sapiens
tactcgggaggctgaggcaggagaagcgcttaaacctgggaggtggagtttgcagtgagctgagattgagccactgcactctagcctgggcaacaagagcraaactctgtctcaaaaaaaaaaaaaaaaagtgaaggtgcccagtgtctgcaactatgtcaccccgggcatatcacatatcactctgtttttccgtctgta

SEQ ID NO: 18320 - DNA, 201 bp, Homo sapiens
caacttattccgcatcttcagagaagactacataaatagaaaaacatatcactttgataaggttcaatctcagctcactgccactgacatagagttgaacmaaaggtttaggtttccttctatgtttgaaatttaaatagggcacattcacaggctaaattgataaaattaaaaagaatttatcccataaattaaaatgat

SEQ ID NO: 18321 - DNA, 201 bp, Homo sapiens
tattttatggcatcagaaatgttctttccatgtcaagaatatttatgaactggcaagatgaaaataatttcaatagtattgcaaaatcattaatcataaaraagtctttgtcagagaattactgctgtccatcatattttcataatgtaacctatatttttatgggagggagggagggagggaagaagcatggaagagagg

SEQ ID NO: 18322 - DNA, 201 bp, Homo sapiens
tctaatcccagctactcgggaggctgaggcaggagaagcgcttaaacctgggaggtggagtttgcagtgagctgagattgagccactgcactctagcctgrgcaacaagagcgaaactctgtctcaaaaaaaaaaaaaaaaagtgaaggtgcccagtgtctgcaactatgtcaccccgggcatatcacatatcactctgtt

SEQ ID NO: 18323 - DNA, 201 bp, Homo sapiens
acatgaaaaatggtggatatggaaggtggagaagagaggagataacagctttatctttcaaaatagagaattgagagatggtaccaaaagctgatgaagtaaaaaaaaaaaaaaaaaaaaaaagatacttaatataatactttaaattacaaatataaacacaagaagaacaaatataatgatacaaatgtcagacactgg

SEQ ID NO: 18324 - DNA, 201 bp, Homo sapiens
tagaatcataaagataatccatgctattaaaagtattctttccttttttttttgtttgtttttgtttttgtttttttgagagagagtttcgctcttgttgyccaggctggagtgtatggcacaatctcggctcactgcaacctctgcttcctgggttcaagcaattctgctgcctcagcctcctgagtagctgggattaca

SEQ ID NO: 18325 - DNA, 201 bp, Homo sapiens
tccagtttactcccatttcattcattaacacaattttgagacaacagaaaacttcatgtgaagtgtgtttgtgtgtgtgtgtgtgtgtgtgtgtgtgtgtgatgttacatcatatacataaggattgggaagaataattagataattatttatataatttttaaacctcattgacatgatttaatgtcaaaaatataatta

SEQ ID NO: 18326 - DNA, 201 bp, Homo sapiens
gtccagtttactcccatttcattcattaacacaattttgagacaacagaaaacttcatgtgaagtgtgtttgtgtgtgtgtgtgtgtgtgtgtgtgtgtgtgatgttacatcatatacataaggattgggaagaataattagataattatttatataatttttaaacctcattgacatgatttaatgtcaaaaatataatt

SEQ ID NO: 18327 - DNA, 201 bp, Homo sapiens
aatcagctgggcatggtggtgcgtgcctgtaattgcagctacttgggaggttgaggcaggagaatagcttgaacccaggaggcagaggttgcagtgagccragaccgcgccactgcactccagcctgggcaacagagtgagaccccatctcaaaaacaacccaaaaaaccaaaaaacaaacaaacaaaaagaaatataatc

SEQ ID NO: 18328 - DNA, 201 bp, Homo sapiens
cctgccgcaactactgtgatgcggtacccaataatggtggaagagtttagcggggtccacctcaggccgatgcttgaatcggttatatcaacaaagcttaygtcagtgagttggggcacctctattgagttacaaagcaaagggagggggaggcaaaaggaaaatagagggaaaaaaagaggaaaaaataaagcagtgtat

SEQ ID NO: 18329 - DNA, 201 bp, Homo sapiens
tctataaagcttttcagctcttcaaaataaaatgtctgagaggtagatattttcctattttctaattacagttgacctttctctctgaatgccaaaggagrtaatctacacattactagttatatatttcttgaaatggatgaatttgatatataccaaggaaacgttttaaaataccaaaactttacatggatgagccaa

SEQ ID NO: 18330 - DNA, 201 bp, Homo sapiens
actggtagtatctataaagcttttcagctcttcaaaataaaatgtctgagaggtagatattttcctattttctaattacagttgacctttctctctgaatrccaaaggagataatctacacattactagttatatatttcttgaaatggatgaatttgatatataccaaggaaacgttttaaaataccaaaactttacatg

SEQ ID NO: 18331 - DNA, 201 bp, Homo sapiens
tattgaagtatttgtagatactataaagccagccctgggaaccactggtagtatctataaagcttttcagctcttcaaaataaaatgtctgagaggtagawattttcctattttctaattacagttgacctttctctctgaatgccaaaggagataatctacacattactagttatatatttcttgaaatggatgaatttg

SEQ ID NO: 18332 - DNA, 201 bp, Homo sapiens
acagatctctagtcatcactgtttttatttgaatgtctctcatccctctcaactcttttactgcccaatttctgtgattcctgaagacttcaacaatcaayactctctttttttgtttgttttgtttttttttttgagacagagtctcactctgtcacccaggcttggagtgcagtggcgccatctcaactcactgcaacc

SEQ ID NO: 18333 - DNA, 201 bp, Homo sapiens
cccaactccaccagtggtccactgtgtgacttccctgctccctctaagcaagtcactcctctcctctgggtctctgtttccttacctataaaatgagaacrtttcttcatgtgatctcaagtcccttttaaaatcgctaggattctttgaaaaccttttctatcatctagtgcagagaacttgttgaggaagttgggattg

SEQ ID NO: 18334 - DNA, 201 bp, Homo sapiens; identical to SEQ ID NO: 2898

SEQ ID NO: 18335 - DNA, 201 bp, Homo sapiens
ggacagaaatagaacccacccctagatcaagtctgcagtattgttctcagcttatgcgtgcatctgtcttgtgtctatatgcagatgaggcaacgtgttaygatgatgggaagacataccacgtaggagaacagtggcagaaggaatatctcggtgccatttgctcctgcacatgctttggaggccagcgggtaagactgg

SEQ ID NO: 18336 - DNA, 201 bp, Homo sapiens
tgcagcccacagtggagtatgtggttagtgtctatgctcagaatccaagcggagagagtcagcctctggttcagactgcagtaaccagtacgtaaccactkcttggtttccattttcaaagtcaaattttgttcttgggtgtctgaatgcccacgacatgtcttttgcaattacacatagggaaagtgaacttgttggtta

SEQ ID NO: 18337 - DNA, 201 bp, Homo sapiens; identical to SEQ ID NO: 2882

SEQ ID NO: 18338 - DNA, 201 bp, Homo sapiens
ttcagtgaaagaaactgactgttctctgaattgttttttgtgggccattaaaaatggtcacacagggctggccatggcattttggcacagtcaccagcagycaagtggtgtataatttcagaggtactaaaaggcatcgggtcacccatcccagtcatgtccccccaccccccaccaaacaccatcaaaataataacatac

SEQ ID NO: 18339 - DNA, 201 bp, Homo sapiens
taatttttggttatgtctatccttttgctcaacattttaaaggaagtggtcttaaatctcccacatatctacatcacaataacaacctctattcacaaacygattcctattaaatacatttccatttacattacagagaattatgagactccttatttctagctgaacatcatttgttattttcaactcgacattttgaat

SEQ ID NO: 18340 - DNA, 201 bp, Homo sapiens
ccaacttattccgcatcttcagagaagactacataaatagaaaaacatatcactttgataaggttcaatctcagctcactgccactgacatagagttgaamaaaaggtttaggtttccttctatgtttgaaatttaaatagggcacattcacaggctaaattgataaaattaaaaagaatttatcccataaattaaaatga

SEQ ID NO: 18341 - DNA, 201 bp, Homo sapiens
gctgcagaagattaaagtacttttgcagacggaatcgctcttttcttaaattactcttgaaattcctcagaggagaaaaatactaacaataatttttggtyatgtctatccttttgctcaacattttaaaggaagtggtcttaaatctcccacatatctacatcacaataacaacctctattcacaaaccgattcctatta

SEQ ID NO: 18342 - DNA, 201 bp, Homo sapiens
tttctctctgctttggatgtaccgataattgcagttcagggttcctggaacttctaccagtgccactctgacaggcctcaccagaggtgccacctacaacrtcatagtggaggcactgaaagaccagcagaggcataaggttcgggaagaggttgttaccgtgggcaactctggtatgtaaacacgtactatttagacaca

SEQ ID NO: 18343 - DNA, 201 bp, Homo sapiens
cacctcgggcccagataacaggataccgactgaccgtgggccttacccgaagaggacagcccaggcagtacaatgtgggtccctctgtctccaagtacccmctgaggaatctgcagcctgcatctgagtacaccgtatccctcgtggccataaagggcaaccaagagagccccaaagccactggagtctttaccacacgta

SEQ ID NO: 18344 - DNA, 201 bp, Homo sapiens; identical to SEQ ID NO: 2875

SEQ ID NO: 18345 - DNA, 201 bp, Homo sapiens
atctgtttggctcagagctaactgtgaacttcagaagtgtttgttttgcctttttaaaaataccattgctttaatgtaactataatttctgagactgatgygaaagtcttgctggaaaattagacttcccaaaggatcacagtcaagcaaaatggttccacaatttctcatgactggcagagttttggcaaagttttgtgt

SEQ ID NO: 18346 - DNA, 201 bp, Homo sapiens
ccttgtgggaggtggggatcttcgaattgtttgtttgtttttgttttgttttgtttttgagacagagtcttgctctgtcaccaggctggagtgcagtagcrctatctcagctcactgcaacctctgcctccagggttcaagcaattctcctgcctcagcctcctgagtagctgggactacaggcacatgccaccacaccca

SEQ ID NO: 18347 - DNA, 201 bp, Homo sapiens
gagggatggcattgtacctgttgagagaaaatacaaaatacttgccgtaatattagacacacacacacacacacacacacactctctctctctctcacacwcacatacacacacacacacaaaattgttagctggccatgttattgtaactcctaccacacatatttttacattataatacattaataattttaatattta

SEQ ID NO: 18348 - DNA, 201 bp, Homo sapiens
tatcatttataaaagagggatggcattgtacctgttgagagaaaatacaaaatacttgccgtaatattagacacacacacacacacacacacacactctcwctctctctcacacacacatacacacacacacacaaaattgttagctggccatgttattgtaactcctaccacacatatttttacattataatacattaat

SEQ ID NO: 18349 - DNA, 201 bp, Homo sapiens
agtgttttgtttttaacagtagtacactataacttaaaatagacttagattagactgtttgcatgattatgattctgtttcctttatgcatgaaatattgrttttacctttccagctacttcgttagctttaattttaaaattacattaactgagtcttccttcttgttcgaaaccagctgttcctcctcccactgacctg

SEQ ID NO: 18350 - DNA, 201 bp, Homo sapiens
ctctttttttccctctattttccttttgcctccccctccctttgctttgtaactcaatagaggtgccccaactcactgacctaagctttgttgatataacygattcaagcatcggcctgaggtggaccccgctaaactcttccaccattattgggtaccgcatcacagtagttgcggcaggagaaggtatccctatttttg

SEQ ID NO: 18351 - DNA, 201 bp, Homo sapiens
taccatcattgctttaacattccaccaattttactactagtaacctgatatacactgctttattttttcctctttttttccctctattttccttttgcctycccctccctttgctttgtaactcaatagaggtgccccaactcactgacctaagctttgttgatataaccgattcaagcatcggcctgaggtggaccccgc

SEQ ID NO: 18352 - DNA, 201 bp, Homo sapiens
aaacagattgcatattaccatcattgctttaacattccaccaattttactactagtaacctgatatacactgctttattttttcctctttttttccctctrttttccttttgcctccccctccctttgctttgtaactcaatagaggtgccccaactcactgacctaagctttgttgatataaccgattcaagcatcggcc

SEQ ID NO: 18353 - DNA, 201 bp, Homo sapiens
tattagtttttccctaaacttctgatatttagctgaaatgtcataagtaacttatcaaagctggctactggcctttctgattaaaaactgacaccataacrtccatctacaaattttcccctagaagcttaagggtcatttcatttttgattcttaagtattataaaatgattcagtaaaacaaaaactgttacattattt

SEQ ID NO: 18354 - DNA, 201 bp, Homo sapiens
caccccacgctcaggtaacttttttaagaagacacttcctatgttatcttatcaggattgttcctgaaggagggttgttttgtctctgtcaacagtcctcwcattcaagaaatcttatatattagtttttccctaaacttctgatatttagctgaaatgtcataagtaacttatcaaagctggctactggcctttctgatt

SEQ ID NO: 18355 - DNA, 201 bp, Homo sapiens
aagaaaatcaagaaagtacacctgttgtcattcaacaagaaaccactggcaccccacgctcaggtaacttttttaagaagacacttcctatgttatcttawcaggattgttcctgaaggagggttgttttgtctctgtcaacagtcctctcattcaagaaatcttatatattagtttttccctaaacttctgatatttagc

SEQ ID NO: 18356 - DNA, 201 bp, Homo sapiens
ggtggagtttgcagtgagctgagattgagccactgcactctagcctgggcaacaagagcgaaactctgtctcaaaaaaaaaaaaaaaaagtgaaggtgccyagtgtctgcaactatgtcaccccgggcatatcacatatcactctgtttttccgtctgtaaaacgggagcaacaatgccattgccttatcatcagaaggat

SEQ ID NO: 18357 - DNA, 201 bp, Homo sapiens
tcctgtttccttaaataaattagatatctatgggattgaaatataaaagtttcttccaaaatgtaaggtgggctttccacttcaagctccactatgcataygattctagtgtattttcagtgcagtaaatatatcaaactatcatggttttggttgaccaaatacttttctaatcacttatttccttcccccagaatcaat

SEQ ID NO: 18358 - DNA, 201 bp, Homo sapiens
cggaggttgcagtgagccaggatcacgccactgcactccagcctgggcaacaagagcgaaactccatctcaaaaaaaaaaaaaaaaagtacattgaattgraaagtcttcaaaaagcagcagtgatgaattttttgagatttttaacaattacaaaaattcagggttttttctaatggatgccacctgagactttattttc

SEQ ID NO: 18359 - DNA, 201 bp, Homo sapiens
tccaaaatgtttccaacttttttatgtagacccctggccagatggaaatgacatcattgtatataacttttagcaaagttaaaaggaaaaaaatatgtacstcaatattcacatgaagaaaattccataattttgggaaaaggagaaatgcaaatgtaacgttttccttcaattatttgcagccggttgttatgacaatgg

SEQ ID NO: 18360 - DNA, 201 bp, Homo sapiens
ttaaaaggaaaaaaatatgtacgtcaatattcacatgaagaaaattccataattttgggaaaaggagaaatgcaaatgtaacgttttccttcaattatttkcagccggttgttatgacaatggaaaacactatcagataaatcaacagtgggagcggacctacctaggcaatgcgttggtttgtacttgttatggaggaag

SEQ ID NO: 18361 - DNA, 201 bp, Homo sapiens
taaaaggaaaaaaatatgtacgtcaatattcacatgaagaaaattccataattttgggaaaaggagaaatgcaaatgtaacgttttccttcaattatttgyagccggttgttatgacaatggaaaacactatcagataaatcaacagtgggagcggacctacctaggcaatgcgttggtttgtacttgttatggaggaagc

SEQ ID NO: 18362 - DNA, 201 bp, Homo sapiens; identical to SEQ ID NO: 2874

SEQ ID NO: 18363 - DNA, 201 bp, Homo sapiens
acatggggagggaggtgctcccaattctgatggaggagaattggagattggaatttagattgaattcagtatctctctctgtctctctctctctctctctcccattaacacttacaacgactgtgattgtatgaccttagaactcagtcattctggtatgaaattgtgtgatggagaatgaatttgctgggaagttgattt

SEQ ID NO: 18364 - DNA, 201 bp, Homo sapiens
aaattttatttctttaacagctgggctgttcttccctaacaagacctgccagaacccatagctcacacttagaatcacatcctttgtttgacatcgtttgkgggtttgtggtttggtgattttcccataatggccttcccaggcagagagcatcatcttaaacttgggaagactctaggtggctggctcaagcaatagaaa

SEQ ID NO: 18365 - DNA, 201 bp, Homo sapiens
tacatggggagggaggtgctcccaattctgatggaggagaattggagattggaatttagattgaattcagtatctctctctgtctctctctctctctctctcccattaacacttacaacgactgtgattgtatgaccttagaactcagtcattctggtatgaaattgtgtgatggagaatgaatttgctgggaagttgatt

SEQ ID NO: 18366 - DNA, 201 bp, Homo sapiens
gacacttccaataagagtggggattagcatcttaatccccagatgcttaagggtgtcaactatatttgggatttaattccgatctcccagctgcactttcyaaaaccaagaagtcaaagcagcgatttggacaaatgcttgctgttaacactgctttactgtctgtgcttcactgggatgctgtgtgttgcagcgagtatg

SEQ ID NO: 18367 - DNA, 201 bp, Homo sapiens
ctttaaagtaatgatattagggaagcggtgaatacaaatgaatatgtttaaaagaattccattctttggcatttagtgtgaagagagaaatatttgttatygctggaaatcatgactcaatccccttgattgtttaaaaaaatacaccaaagataaagtttgtaaatggccatatttatgattatgctactcaaatataga

SEQ ID NO: 18368 - DNA, 201 bp, Homo sapiens
ttacatggggagggaggtgctcccaattctgatggaggagaattggagattggaatttagattgaattcagtatctctctctgtctctctctctctctctctcccattaacacttacaacgactgtgattgtatgaccttagaactcagtcattctggtatgaaattgtgtgatggagaatgaatttgctgggaagttgat

SEQ ID NO: 18369 - DNA, 201 bp, Homo sapiens
aataacagtgacagtggagtcctcagtaaatgccaagtcctgcattccgccctgtgaatccatcattggagtctagttaaatatgctctggctcacagatyctctgtgcaataacttcccttttcttttttctccagacattactggttatagaattaccacaacccctacaaacggccagcagggaaattctttggaaga

SEQ ID NO: 18370 - DNA, 201 bp, Homo sapiens
aatacaaatgaatatgtttaaaagaattccattctttggcatttagtgtgaagagagaaatatttgttatcgctggaaatcatgactcaatccccttgatygtttaaaaaaatacaccaaagataaagtttgtaaatggccatatttatgattatgctactcaaatatagaagaactttctgaagagtgccagtatacctt

SEQ ID NO: 18371 - DNA, 201 bp, Homo sapiens
ggccagtcctacaaccagtattctcagagataccatcagagaacaaacactgtaagtgcattagcagcacaagtgtgttccctcatactagacagtctctktctacaggtatctttcttcagaatgaaccaagtgttttaattaattaaaaaaaaaaacaactcataaatgacttaagtgaaacactgtattccataatat

SEQ ID NO: 18372 - DNA, 201 bp, Homo sapiens
aaccagtattctcagagataccatcagagaacaaacactgtaagtgcattagcagcacaagtgtgttccctcatactagacagtctctttctacaggtatstttcttcagaatgaaccaagtgttttaattaattaaaaaaaaaaacaactcataaatgacttaagtgaaacactgtattccataatatagtttaagttat

SEQ ID NO: 18373 - DNA, 201 bp, Homo sapiens; identical to SEQ ID NO: 2884

SEQ ID NO: 18374 - DNA, 201 bp, Homo sapiens
tcctgtctacttcacaaacaacaggtacatgtgtgctacatagtgttaaaagaatctttttctgtaaaacacaggcctgtagtagcacttcctgactgttygccccactttctttctttcttagcgcctgatgccccacctgacccgactgtggaccaagttgatgacacctcaattgttgttcgctggagcagaccccag

SEQ ID NO: 18375 - DNA, 201 bp, Homo sapiens
cctggcacactgcttaacaaatggtgaatgaaaaaaaaaaaagaaaagtcattctttttcttctttcaccctatgtccataatctggccatttgcagaacwtgatgtccagtgatcgaaatcaacagcatcagtgcatccaatatcttctagtctctcatcttcttattacatcattaattttatttactttaaaattaag

SEQ ID NO: 18376 - DNA, 201 bp, Homo sapiens
gaggtgtaagcatgttgtctacatggaggcaagaccagaataatagaaaatggaaacagattcccttaaagaggggaatcgtgtctttctcattggctcartgtagtctccgtagagtctagaatgcttcagcacctggcacactgcttaacaaatggtgaatgaaaaaaaaaaaagaaaagtcattctttttcttctttc

SEQ ID NO: 18377 - DNA, 201 bp, Homo sapiens
ccaagatggcactactgcactccagcctgggagacagagaaagaccctgtgtcaacataaataaatatataaataaatcatcaagtctcatattaaagacyctgtaaatatgacttattgttgacaaatgaaacaaatagaggtgtaagcatgttgtctacatggaggcaagaccagaataatagaaaatggaaacagatt

SEQ ID NO: 18378 - DNA, 201 bp, Homo sapiens
gccaagatggcactactgcactccagcctgggagacagagaaagaccctgtgtcaacataaataaatatataaataaatcatcaagtctcatattaaagastctgtaaatatgacttattgttgacaaatgaaacaaatagaggtgtaagcatgttgtctacatggaggcaagaccagaataatagaaaatggaaacagat

SEQ ID NO: 18379 - DNA, 201 bp, Homo sapiens
ctaaaaatacaaaaattagccaggcttgggggcgcacgcctgtagtcccagctcctcaggagctgaggtaggagaatcacttgaacccaggaggcaaaggktgcagggagttgagccaagatcgcgccattgcaccctagcctgggcaacagagcgagattctgtttcaaaaaacccccaagtgtattataaggcaataat

SEQ ID NO: 18380 - DNA, 201 bp, Homo sapiens
cagaggtgaacatttagactcaaaaacagcctccttcaacataaaccaaacatgcacatatcatagtacccatgcacacacttttgcatcacacacatagyccaggtagcttgaacgttgctagaaatatgaaagaaaaaacagataatctgcttttagatcattaaaaatcaacttgaattgataaatgtttgattttca

SEQ ID NO: 18381 - DNA, 201 bp, Homo sapiens
ttccaaggataaaaagaaacttttaaagtcttctatactcagccaggttatcaatcaaatatgagggcaaaataatattttcagacagattttaggcagtktatcttccatatatccttttctttaagggtatttgtagatacactccagaaaaacaagagtgaaatatgaaggaagttgtggggtccagcaaacagtgct

SEQ ID NO: 18382 - DNA, 201 bp, Homo sapiens
tgttgaatgagatcagaggtgaacatttagactcaaaaacagcctccttcaacataaaccaaacatgcacatatcatagtacccatgcacacacttttgcrtcacacacatagcccaggtagcttgaacgttgctagaaatatgaaagaaaaaacagataatctgcttttagatcattaaaaatcaacttgaattgataaa

SEQ ID NO: 18383 - DNA, 201 bp, Homo sapiens
catcataaagatagtgttttaagaaaagatagttttctgttctgcaagcataaattttctagctatttcattattatcttaaatggagttaacactacttwgaaattgatgctacttcccttattttccttttattttaaacaaaagaaccaaaaccatactttaaattttgttgataacagtgatatacatcaaggtgta

SEQ ID NO: 18384 - DNA, 201 bp, Homo sapiens
tcaaatattatttagtacaacactctgagtccttacttgtgagtatctgagttgatatagggcacaggtttcctgatgtcttttcccagaccctctccatytcaccatgctgctgtcctcttgagtgattaaatactgaaacgattacctataaagaaaataccccttctgcagacatggggacagttggcttttgctcct

SEQ ID NO: 18385 - DNA, 201 bp, Homo sapiens
acttcctgaacaaaaacatgctaaattccattgctgttcagtccatttcctttaaaggtgggctatgccacagggctagattttaaaacgtggaatttcasaccagtgctcgaaatcttatgaaagcaaaagggacctctgtagttgtactccactttggcttgagtaaaaaccactgctgtaccctttttctttcctttc

SEQ ID NO: 18386 - DNA, 201 bp, Homo sapiens
ccagggcttccagagggcttatgcagacctgcgactgaagcaagatcaatggcaggccgtctctagtattgtcgagggctcctgttaactacggagcacgyaggtagattgttggcaggaaaatctggcaggaacgatggcccctatccttgttccatttctctcctcagctggttaggaccactataccctccctctttt

SEQ ID NO: 18387 - DNA, 201 bp, Homo sapiens
ccacatagctgcttgctggaagcatttaggtggacatgttggagataaaatctggaaaggaaggaatccttgagtattggagtattacatgttgaccttaytcctactctttaaaaaggagaacagcaagatcccactgagcatagaggtgatttcggagggaagagattggaatttgacctcagatatgctctttggtgc

SEQ ID NO: 18388 - DNA, 201 bp, Homo sapiens
tggccaaaggtagtgttagccaagcctcattcctccatttcctcatctgtaatatgggaagattgtagctgattacctttaatgttccatcctaaatactraacacccagatgcaccttttctaggaacttggaagattctgcttttcccaaccctcagacactgtcagtgctggggaaggtgacttcacttttgaaggct

SEQ ID NO: 18389 - DNA, 201 bp, Homo sapiens
aggtaacaaggagaaagataggacaaaactaataacaaatgagcaatcttgcaatatgaaaaggttctccatgttttgatgcatttcttgtgatttttttwatctaacagcatagtgtatatattgtattctttaataggagaaataatttaacatgcactgcagagtttggttttattttttttctttactacagccact

SEQ ID NO: 18390 - DNA, 201 bp, Homo sapiens
attacatggggagggaggtgctcccaattctgatggaggagaattggagattggaatttagattgaattcagtatctctctctgtctctctctctctctctctcccattaacacttacaacgactgtgattgtatgaccttagaactcagtcattctggtatgaaattgtgtgatggagaatgaatttgctgggaagttga

SEQ ID NO: 18391 - DNA, 201 bp, Homo sapiens
ctcaaccatttctaaaatatgcccagtataacaaaaaataataagcctttctctaatatgatttcaaatttcaaaatgaaattatgtgtaactcaaataaaagcaatggaatgtgacagccctttgttttcaacgaagacatgccctcccagcaactccccaaatcctggtgggtgaggggcatgcttcacactcaagggt

SEQ ID NO: 18392 - DNA, 201 bp, Homo sapiens
gattaagccaggtattgttttctggattcctagagagaagggtaatactatgttactcagaacacatccagtatatcagcatgctttggtaacttctggawgtcaagaaaactttcataaccaacttattccgcatcttcagagaagactacataaatagaaaaacatatcactttgataaggttcaatctcagctcactg

SEQ ID NO: 18393 - DNA, 201 bp, Homo sapiens
tctcaaccatttctaaaatatgcccagtataacaaaaaataataagcctttctctaatatgatttcaaatttcaaaatgaaattatgtgtaactcaaataaaagcaatggaatgtgacagccctttgttttcaacgaagacatgccctcccagcaactccccaaatcctggtgggtgaggggcatgcttcacactcaaggg

SEQ ID NO: 18394 - DNA, 201 bp, Homo sapiens
atttatcccataaattaaaatgatttatctactctggagttagggatagtgtctctgacctaacgcatttgattagtgctgtaaagaagctggcctctggygtctttactgctccttctaagattgtcttggggtcttaattgttgcctttgggtttgaaggctccttttttgatattgtaaactaataacagctagagag

SEQ ID NO: 18395 - DNA, 201 bp, Homo sapiens
ttctcaaccatttctaaaatatgcccagtataacaaaaaataataagcctttctctaatatgatttcaaatttcaaaatgaaattatgtgtaactcaaataaaagcaatggaatgtgacagccctttgttttcaacgaagacatgccctcccagcaactccccaaatcctggtgggtgaggggcatgcttcacactcaagg

SEQ ID NO: 18396 - DNA, 201 bp, Homo sapiens
acctaacgcatttgattagtgctgtaaagaagctggcctctggtgtctttactgctccttctaagattgtcttggggtcttaattgttgcctttgggtttsaaggctccttttttgatattgtaaactaataacagctagagagtttgttgaagtaaaacagccattaactactggtgttgtaaataagtttaaaatcaaa

SEQ ID NO: 18397 - DNA, 201 bp, Homo sapiens
cttctcaaccatttctaaaatatgcccagtataacaaaaaataataagcctttctctaatatgatttcaaatttcaaaatgaaattatgtgtaactcaaataaaagcaatggaatgtgacagccctttgttttcaacgaagacatgccctcccagcaactccccaaatcctggtgggtgaggggcatgcttcacactcaag

SEQ ID NO: 18398 - DNA, 201 bp, Homo sapiens
aactgcatgaacccaggagatggaggttacagtgagccgagattgcaccacttcactccagtctgggcgacagagaaagactttgtctcaaaaaaaaaaawaaataaaaagtaaataaataaataaaataaatggcccattataggggtttttatctttaacttgctatttttccagatcatggttctgaagaccctgtga

SEQ ID NO: 18399 - DNA, 201 bp, Homo sapiens
taactgcatgaacccaggagatggaggttacagtgagccgagattgcaccacttcactccagtctgggcgacagagaaagactttgtctcaaaaaaaaaaataaataaaaagtaaataaataaataaaataaatggcccattataggggtttttatctttaacttgctatttttccagatcatggttctgaagaccctgtg

SEQ ID NO: 18400 - DNA, 201 bp, Homo sapiens
ctcggctcactgcaacctctgcctcccaggttcaagcaattctcctgcctcagcctcccaaatagctgggattacaggcatgtgccaccgcacccagctaatttttgtatttttagtagagacggggtttcacgatgttggccaggatggtctcgatctcctgacctcgtgatccgcccgccttggcctcccaaagtgctg

SEQ ID NO: 18401 - DNA, 201 bp, Homo sapiens
tgcatcccactaaagttctccactagcttcaattgcctcaagatctgttccatgttctatgaagtagtttcaacagaaatggcaattatcttagaagcaakggaaaaataaaagatgggcttcctgtcgggtgcctgtgacaggtgtcacatctaaccatggttttttagagcagttaatgccttgatagaacagatgaat

SEQ ID NO: 18402 - DNA, 201 bp, Homo sapiens
aaaggccaggcgcggtggctcacgcctgtaatcccagcactttgggaggccgaggcaggcagatcacaaggtcaggagatcgagaccatcctggctaacayggtgaaaccccatctctactaaaaatacaaaaacaaaattagccaggcgtggtgatgggtgcctgtagtcccagctactcgggtggctgaggcaggagaa

SEQ ID NO: 18403 - DNA, 201 bp, Homo sapiens
tctgtatagagtatcacctggactttaaaattcccacagaacatacagacattagaaggagacactggctttttagaattggggggaacaggaaaatagaagcagacatgagaggaattgaactagacacttcccacagaggctgcacaaacactggccaatctctcctacccttcacttgcctttagtttcacttttcat

SEQ ID NO: 18404 - DNA, 201 bp, Homo sapiens
acatagtgttaaaagaatctttttctgtaaaacacaggcctgtagtagcacttcctgactgtttgccccactttctttctttcttagcgcctgatgccccwcctgacccgactgtggaccaagttgatgacacctcaattgttgttcgctggagcagaccccaggctcccatcacaggtcagctaagcctccccctctttg

SEQ ID NO: 18405 - DNA, 201 bp, Homo sapiens
tcaacttttaaaatatgatttccatcttcccgttggaccctttccagtgtattaggtctaatttttggaagtgccaccctaagatctgtatagcagtactrctcttagggatgattcacataaatatgtggtgtttgcgctgtgatgatacaaatttaggacagaaatagaacccacccctagatcaagtctgcagtattg

SEQ ID NO: 18406 - DNA, 201 bp, Homo sapiens
cagtgctactgctatggccgtggcattggggagtggcattgccaacctttacagacctatccaagtaagtagctctattactgcaagttgagaactgccarttgggttataacaacagggcagtgattattaatgctctcatgcctaagttgggggtctcccctctttcccacccttttctcttgttattatctaataatc

SEQ ID NO: 18407 - DNA, 201 bp, Homo sapiens
tgggagaagtatgtgcatggtgtcagataccagtgctactgctatggccgtggcattggggagtggcattgccaacctttacagacctatccaagtaagtwgctctattactgcaagttgagaactgccaattgggttataacaacagggcagtgattattaatgctctcatgcctaagttgggggtctcccctctttccc

SEQ ID NO: 18408 - DNA, 201 bp, Homo sapiens
ctcttccccaaatttgaaataatcattttatcacaatttgaatgggctctgtaaccccttatcttgaattcgtcataatataaaattctgctaattacacrtagtatttacatgattgtatggaagaatcattaagacaattatctggaaaatgaacaaacagtaaatctgaatattgtttgaaaattacggatgtgaaaa

SEQ ID NO: 18409 - DNA, 201 bp, Homo sapiens
agacatgtatttgttcaaatactggcttctcacaggaaagtgtattttaccacattctttacttgagcatactgtaacctctgcaaaagttacacattttrggaagaaaaaaatttttttggcaaaaattgtattactgaccaaactttgaaaaaaatgttattctatgcttgtagaaaagttattttagtggaaggtgtt

SEQ ID NO: 18410 - DNA, 201 bp, Homo sapiens
cttcctgtaactattttctatgacacgtttggactacgttttctgcctccagggctcaaaaattctaccccttcacctgacagcacttagatgtctttgaygcacacaaagcttcttcccaagtgagaattcttaggatgaccaaactgaactgatccttttgcacacatacatgtttagacctggtgatcatttatcaag

SEQ ID NO: 18411 - DNA, 201 bp, Homo sapiens
agtttagaagaaaaaacccacttttgcttgtaattctatatccaaacccatagtttttatttgatccagaataaactggaactgggaaaagttatgaagcygtagttaaatccaggcttctagaacagcaagaaccctttgtgtggatgtgtagatattatcttagtttaacatcccctaacccttcctgtaactattttc

SEQ ID NO: 18412 - DNA, 201 bp, Homo sapiens
gtctctcatccctctcaactcttttactgcccaatttctgtgattcctgaagacttcaacaatcaatactctctttttttgtttgttttgtttttttttttgagacagagtctcactctgtcacccaggcttggagtgcagtggcgccatctcaactcactgcaacctccgtctcctgggctcaagcgattctcgtgcctc

SEQ ID NO: 18413 - DNA, 201 bp, Homo sapiens
aatactctttctgcacagaccacactggtgagtgtcccaagggggagccacagaagtgagaaaaactcactttcatgccctagttttatttgccagcattytagccatttattttgaacccgcccaagaagcatcgcttttgttcagtttggactcaagagatcgcagcgctcacgtaacagctgaggattcttccatctt

SEQ ID NO: 18414 - DNA, 201 bp, Homo sapiens
tttgcattccagaatttactttaccagtgtccttgtctgtatcagtgattcactttcgagatatgtttcttgttaacagttaacatccatagcatgctctmctttactgttcaaatgtggaccactttggtagtctatataaatatgggatgatagaagaacccagaaaaattgcaggctagcttgagaattctcctagta

SEQ ID NO: 18415 - DNA, 201 bp, Homo sapiens
taaaagagtccccaaatcatttcccaataaaagtacactgtgcagtttctgaagagtttacactatttaaagcataatcatagcctcacagcagtaacagkcctctggaaatatttgtccttggtgtttactttgcattccttcctctagctgggtgtacgaccaagccagggaggagaggcaccacgagaagtgacttca

SEQ ID NO: 18416 - DNA, 201 bp, Homo sapiens
atggcaataacaattgctacacaattctcccccagaatagtctcatatattaattttatggcatagatatagtcataaatattatcccaacatccttaagyagcatccttaattgacctgtataaatatagctttacaaatagagaaactgaggcatggcagcagaagtggtcatgaaggacatcagcagaagaactcagg

SEQ ID NO: 18417 - DNA, 201 bp, Homo sapiens
tgctaaagctcaccatgcccttatttctctaggtggccaccaaatatgaagtgagtgtctatgctcttaaggacactttgacaagcagaccagctcagggwgttgtcaccactctggagagtaagtaacaaaatgtcttcatatggacaaaccttctgtatagacaaaaattaaagaatggtaaatcagtggggttcagtg

SEQ ID NO: 18418 - DNA, 201 bp, Homo sapiens
ccgacattgaactctttttgtagtggaaaccatcctttatatgtggtttctatgctctggcaaactttgttacattctataaagtaacacacaattatttycttcatgtattggcattcgaaattttagaaattcagagaggacttagagatggccatgaaagacatgatatctaagcattctttttaaaaaacaagtttt

SEQ ID NO: 18419 - DNA, 201 bp, Homo sapiens
ttcctctgcatcaaataatcttattgtaattttatatcaacggaattcctttatgttgacctaagttttccagatgactattgggacagaattttataaayagctttggattttgtgcagctcttttagatgtattgtgcttattttaaaaggttgtggggggcaatttacatatccattggttgaatgcataaatcgact

SEQ ID NO: 18420 - DNA, 201 bp, Homo sapiens
aaaataggtctctcatgaaaagtggtaaccattttgaccaaagctttcccagaaacttgctggtttattagatattttgcatttaaaatgttactgtgatyatcagacttccaagatctttgtggcaatattttagcttaagacaaattagatgtctgattcaaaccttatctgttatttagaactctttaaatagcaagt

SEQ ID NO: 18421 - DNA, 201 bp, Homo sapiens
acatgcctgtagtcccagctactcaagaggctgaggtagaggatcacttgagcctacgagttcaaggctgcagtgagctatgataactccactgcactgcygcctggatgacacagagagaccgtttctaaattaattaattaacaattttaagaaagaaaaagggccattgcttatttttccatacaaaagtaaaataaa

SEQ ID NO: 18422 - DNA, 201 bp, Homo sapiens
aggtgactgagaccaccattgtgatcacatggacgcctgctccaagaattggttttaaggtaaactgcagatgttcctaatctctgtgatacagccctgaagctgtccttgtgtttcccatgtagtggaaacagggtgctcaggagtcaggagacctgggttttgtcacctgcttctgtccatacatctttgactacattg

SEQ ID NO: 18423 - DNA, 201 bp, Homo sapiens
gcgcctggccaaagtaatattttcaataagaaaaataacagtgatgtcaggatgctagaaaatgcaaaataaatttgttataattcctgattctggtgatraaatactaaatttttgcagtattattctgaaagaataatcacgtatttaaagtacaaatctttagacttcaaagtgcatccatggtggcagattttgttt

SEQ ID NO: 18424 - DNA, 201 bp, Homo sapiens
aaaagaacaagtcccgtgtgaataggcccaatcaactttccccatatttcatgttagggtttatccaagttcacaggcaaatcgcaagaggcaagggtccrtagtgtttacaatctagttcagcatttgaatgtgccattgggcttaacaacttagaaaactaccaggatttccacactttatatgcatatgtctgtttgc

SEQ ID NO: 18425 - DNA, 201 bp, Homo sapiens
cgagggacctggaagttgttgctgcgacccccaccagcctactgatcagctgggatgctcctgctgtcacagtgagatattacaggatcacttacggagaracaggtacagcagtaaaatgctattttacactctgattaaatcagattctgttgtggataacctgaaagcccaacagtgaacaaagaattaaagaaactt

SEQ ID NO: 18426 - DNA, 201 bp, Homo sapiens
gaatctgacattgcaaatcagctttaccacttccaaggtatagaaaatccaggtctatgagactaacatcacattgtaaaaatcaaatcgtggtagaatayctttaaattaatataaatacatccccattgtggggacattttgcagggtatctgcttatctcacatacacctatgttttaataagtgatgcaacattgca

SEQ ID NO: 18427 - DNA, 201 bp, Homo sapiens
gcagaagaatcacttggacccaggaggcagaagttgcagtgagccaagatcatgcctctgcaccccagcctaggtgatagagtgagactccatctcaaaamaaaacaaaacaaaacaattataacaatttgaatctgacattgcaaatcagctttaccacttccaaggtatagaaaatccaggtctatgagactaacatca

SEQ ID NO: 18428 - DNA, 201 bp, Homo sapiens
atttacagagaaagaagttgtgaaaccaccatagttagttgctgtgctttgaatttcttttgctcaaatggcctcagcgaaatcttatttgcctatagcawatctacaaaaaattttcctagaccgtcttttctacaactggatggtaaagttgattgaagtgtgcctcatgtagctttatgtttggggcatttgaagggc

SEQ ID NO: 18429 - DNA, 201 bp, Homo sapiens
caaccatctcaaaaataggaaatggtattgagatgcctgccccatccctctaaaagctctctctgtattctttcgagaagaaatacctttctcatgtaagmgatcattcgaatatgtaccagacctagagaggaggacttgtccaatcttgtctccaaggactggggcttcactggtttctccctgcttttatttgtagaa

SEQ ID NO: 18430 - DNA, 201 bp, Homo sapiens
attcccgtgtaagggtgaaaaagaattattaggaaagatcctctttaaagaggaatagtaagaaacaataaaacttaggtgatatttaaggaaacaagtcwgattaaaagaaattttggagtatcctggcttatacacaagaccataaagcaagacatttgaagaggatactaaagttgtggattatttcctaagctctga

SEQ ID NO: 18431 - DNA, 201 bp, Homo sapiens
cttattcagatactgttttgcaatgttctcccaaggtatttttctaattgtagaatagattttcctttttaatgagcaacaacctgcagctagcacctgcrgcgaacagagttttgagccagataaagaaggaagcaccccaagggcaggaagttcagtcagttttgtcgatatattccgcatgtctgcaatacgacaggc

SEQ ID NO: 18432 - DNA, 201 bp, Homo sapiens
aaccaccaagtgagttatgctgggagtaaaggtttggggctttatattatgattcttaacagagaagctgcatagagagatggcatgaaatgcagcataakgtacgtgttcattcaacatgtcatctaagctccctttgcatcaaacttttcatttgtttgatcagttgccaccaggaacacagtatgttgggccaagggt

SEQ ID NO: 18433 - DNA, 201 bp, Homo sapiens
tttgactgaaaatatggcctacattcagaaacaaaagagtttcagggtgtcagaatctgcatgcgacagaaattaagattaactctgtgataaaagattcrctgtgacagagaacaagctatgggaacaacttggccaaaggtagtgttagccaagcctcattcctccatttcctcatctgtaatatgggaagattgtagc

SEQ ID NO: 18434 - DNA, 201 bp, Homo sapiens
taaaagagggatggcattgtacctgttgagagaaaatacaaaatacttgccgtaatattagacacacacacacacacacacacacactctctctctctctyacacacacatacacacacacacacaaaattgttagctggccatgttattgtaactcctaccacacatatttttacattataatacattaataattttaat

SEQ ID NO: 18435 - DNA, 201 bp, Homo sapiens
gcctgatgccccacctgacccgactgtggaccaagttgatgacacctcaattgttgttcgctggagcagaccccaggctcccatcacaggtcagctaagcstccccctctttggctgctatgttaatcttaatgacatcagcagggagggcgcagattctgactgcggacctgcatatcactttaaatctccaatataatt

SEQ ID NO: 18436 - DNA, 201 bp, Homo sapiens
atgctgtcactggccgtggagacagccccgcaagcagcaagccaatttccattaattaccgaacaggtacaaacttctactctggggtgacaccagcttttacttattcagatactgttttgcaatgttctcccaaggtatttttctaattgtagaatagattttcctttttaatgagcaacaacctgcagctagcacctg

SEQ ID NO: 18437 - DNA, 201 bp, Homo sapiens
tatgctgtcactggccgtggagacagccccgcaagcagcaagccaatttccattaattaccgaacaggtacaaacttctactctggggtgacaccagcttttacttattcagatactgttttgcaatgttctcccaaggtatttttctaattgtagaatagattttcctttttaatgagcaacaacctgcagctagcacct

SEQ ID NO: 18438 - DNA, 201 bp, Homo sapiens
attcacaaacatattatcagtggtggaaataagtgatttttattttttcttctctttacttttctgtattttccaaattttatttaaaaggaatgtattctgttaaaagttttaaaaaggacacaatgcatgcaatcctgggttgagggcttaccttctcccacttctaatgctactctactactcagtgacattttaaag

SEQ ID NO: 18439 - DNA, 201 bp, Homo sapiens
cctcctccttgtgtccttgtggacatagaaatatgattaggcttagaggtgaacagtaaaggtcatttatgttatcttttcaaaacttaatagacatttawccatcataagcttgtcccccctcaaaatcatgattgacaagactaaataaaatgtatatcaggtgtctctttatggaggaaattgtagtaggatttattt

SEQ ID NO: 18440 - DNA, 201 bp, Homo sapiens
aattcacaaacatattatcagtggtggaaataagtgatttttattttttcttctctttacttttctgtattttccaaattttatttaaaaggaatgtattctgttaaaagttttaaaaaggacacaatgcatgcaatcctgggttgagggcttaccttctcccacttctaatgctactctactactcagtgacattttaaa

SEQ ID NO: 18441 - DNA, 201 bp, Homo sapiens
gtcatttcatttttgattcttaagtattataaaatgattcagtaaaacaaaaactgttacattattttctgcagttatttcaaaggctttttctaaaaaawtttttagtatcttttcttataaccctctccccccaccaccatatgacacttcatatgctggtaactcacttattacctattttagataaaaggttcaaat

SEQ ID NO: 18442 - DNA, 201 bp, Homo sapiens
aaactcctgacctcaagtgatccacccactttggcctcccaaagtgctgggattacaggcgtgagccatcgtgcccagccggaaggtcttactagtatccktattgaatacttaaagaaactgaggctttaaaaaagttctgcaacttgtagggtcacagagataggaagggatagagctggctctataacctatgtccga

SEQ ID NO: 18443 - DNA, 201 bp, Homo sapiens
ggccggacggggtggctcacgtcagtaatctcagcactttgggaggccgaaatgggcagatcacttgaggtcagaagttcaagaccagcctggccaacatrgtgaaaccccatctctactaaatatacaaaaattagcaaggtgtggtggcatgcacctgtaatcccagctactggggaggctgaggcaggagaatctttg

SEQ ID NO: 18444 - DNA, 201 bp, Homo sapiens
ttaaatagtcacatctccaaaatttttcttgaatagttgtctttaaaaatgtgtttacatttgtaaggatcttcataaacagaaggggtaattcaaagatrggcatggaattgacttatgccaattgattaaaacaaacatcctgtgtgttctgtgaaatacatacaactttaaaatgaaaaactcataattttatgcatg

SEQ ID NO: 18445 - DNA, 201 bp, Homo sapiens
tggtggcagtaaagaagataatttttttcctctcaagaaatttctcacctgatttgggtatttatgcatttctaataacacaagttttgttgaaaatgtaraaaattggccggacggggtggctcacgtcagtaatctcagcactttgggaggccgaaatgggcagatcacttgaggtcagaagttcaagaccagcctggc

SEQ ID NO: 18446 - DNA, 201 bp, Homo sapiens
gcttagataataaagtttgaaaatcaatgtattttttttcctagaagctttcagaaaacttaaatctgttaataatctggtgaagtgctttattacacatrcaaaattttgctctgtttgacagagtgtcagttagaaattcttgaaaaggttactataagacacaatttttatttctagtaatttaaacattgactgaca

SEQ ID NO: 18447 - DNA, 201 bp, Homo sapiens
aaagaaactcagaagactttcctacccagttggtagattctgtaaagtagcttgctgttgtctgtcatcagctctcaaaaaaaaaaaaaaaaaaaaaaaaatagatcattgtcatggtacatggagagggaagtgagaaaatgtggagaaacatcttccttagaatatggtaaagaagcccgggcgtggtggcagtaaaga

SEQ ID NO: 18448 - DNA, 201 bp, Homo sapiens
agccactggagtctttaccacacgtaagctgaaaattaagtgccttttcttaactatatttacattctctattcttcatgctttaaaacaaaacaaaacamaacaaaaaaaacattaaaaaattagtacataatttaaatcagtgatactaaaaatgtgctccatagactggctgctggcccgttaattgtttgctgctag

SEQ ID NO: 18449 - DNA, 201 bp, Homo sapiens
ataaatgcattcagaggttttttcccaatgggaacaaaatttgattgagatgtaaagagaggaagaattgtggagatgtcaaacatgtgaccagagctatkaacacacttgatacccttgaacttaaacttacccaactcaaaatatctggccttctgcgatcttacctttctacatttataataagatttgcaaggttgt

SEQ ID NO: 18450 - DNA, 201 bp, Homo sapiens
caaagaaactcagaagactttcctacccagttggtagattctgtaaagtagcttgctgttgtctgtcatcagctctcaaaaaaaaaaaaaaaaaaaaaaaaatagatcattgtcatggtacatggagagggaagtgagaaaatgtggagaaacatcttccttagaatatggtaaagaagcccgggcgtggtggcagtaaag

SEQ ID NO: 18451 - DNA, 201 bp, Homo sapiens
aacccttcctgtaactattttctatgacacgtttggactacgttttctgcctccagggctcaaaaattctaccccttcacctgacagcacttagatgtctytgatgcacacaaagcttcttcccaagtgagaattcttaggatgaccaaactgaactgatccttttgcacacatacatgtttagacctggtgatcatttat

SEQ ID NO: 18452 - DNA, 201 bp, Homo sapiens
aaatattaacctagagcatagcaaatgaattctaaattctcaagtaggaggagctaagagcaagagagctgcaaccaagctacaaactaaactctgaattsaatgcacagctccattaattttgaaagatgtaatgtttgttgctatcttaatatacttttgatatctacagctttaaaaaaatcatagtggaaaaacacc

SEQ ID NO: 18453 - DNA, 201 bp, Homo sapiens
gtatgttttacatctttatgttaaagattaagccaggtattgttttctggattcctagagagaagggtaatactatgttactcagaacacatccagtataycagcatgctttggtaacttctggaagtcaagaaaactttcataaccaacttattccgcatcttcagagaagactacataaatagaaaaacatatcacttt

SEQ ID NO: 18454 - DNA, 201 bp, Homo sapiens
gatgctgggtgtgtcattctttctgaacagagtgccacttaaaaaaaatgtggctgaatttttgcttacacactacactttaaattacagggagcttgcayaattcaaaataacctttttttcctgtttttcttccaaatttccctacagctgagaagtgttttgatcatgctgctgggacttcctatgtggtcggagaaa

SEQ ID NO: 18455 - DNA, 201 bp, Homo sapiens
agagagaagggtaatactatgttactcagaacacatccagtatatcagcatgctttggtaacttctggaagtcaagaaaactttcataaccaacttattcygcatcttcagagaagactacataaatagaaaaacatatcactttgataaggttcaatctcagctcactgccactgacatagagttgaacaaaaggtttag

SEQ ID NO: 18456 - DNA, 201 bp, Homo sapiens
aatttcctgtgatctctctgggaaagcaggattcatgacctcttccttgccatccagatttctctgtggttttccattgtgttctaagcaagacacttaaytgaattgactccaagtgaccagacctgttaacgtttcccctgtctctgatgggaaagctgttgtctgtgtctctactttagccaacctaagtacctacca

SEQ ID NO: 18457 - DNA, 201 bp, Homo sapiens
cgggccagcagaattggtattatctgtgtttgtcagaaatgcaaactccctagttttttgttggacctccagaaacagaatctgcattttagccagacccmagatgatgtgtgtggcacattaaagattgagaagcctgatcctctcccaattctcacccaatgaaaaaatatgttacatcctctatccactgcttggtta

SEQ ID NO: 18458 - DNA, 201 bp, Homo sapiens
atctgtatctctcacttcattttattctttgaggtgtaccatgttacttgtggaatagagaagtgggttttcctttagaggggattagtgaactagaaaarcttgtacctaagtgaggctcacatggactttccttttcccctcagctgaagagacttgctttgacaagtacactgggaacacttaccgagtgggtgacac

SEQ ID NO: 18459 - DNA, 201 bp, Homo sapiens
ttaaaaaatattctgctctcattttaatatggcagaaccgattgctttctaagtgtggcttttttccagtaaaggttaattattaagaccactagtcctgscctgggtcaatcccagtatgatcctgggcaagtaaattaaagaagataacttctctgtgcctcagtttttttttgttttgttttttgttttttcatttac

SEQ ID NO: 18460 - DNA, 201 bp, Homo sapiens
ctctacaaaaaatacaaaaaaaaaaaaaaaaaaaaaaatagcactgtggggagtgcctgtaatcccagctactcaggaggctgaggcaggataactgcatraacccaggagatggaggttacagtgagccgagattgcaccacttcactccagtctgggcgacagagaaagactttgtctcaaaaaaaaaaataaataaaa

SEQ ID NO: 18461 - DNA, 201 bp, Homo sapiens
cagtaagacatgcttaggggagttgcccattttaaatcacctggatatcttcaagctagacaaatcatgagacttttctgcagtgactgggaaggtgttcrtgaagagtgaaccagccatgtgttgtctggtcttcatgtttgcaatgcagagacctcttgcacctcacagaaacagtctggtttcttggtgaccagtagg

SEQ ID NO: 18462 - DNA, 201 bp, Homo sapiens
gcccctgcatcacaatgtctgtcccttagccgtagacctgtcacatgttaatcatgtgttctaagaccttattataatcctaatgctacagatgacctcarggtagcccctctccctcctagcaaagtcattattatcctcttttaaagatgaagcaaaccagtgcagtggctctcgcctgtataatcccagcactttggg

SEQ ID NO: 18463 - DNA, 201 bp, Homo sapiens
atttggcattcgattacaaaaattatacgtctttagaaaaaaagttggaaaaatgaaaggaagaaggaggaggaggagaaaggagaaagacaagaagtggkgttttcccatagtacattaataatcacagattaggtgggtgcggtggctaactcctataatctcagcacttcgggaagctgaggctggtggatcacttga

SEQ ID NO: 18464 - DNA, 201 bp, Homo sapiens
ggttcctgtgtttcttaaagacgggtatgagcacagatggaatcagtgtttgatgtgtgtgcgtttatgagtgtgtgtgcatttatgagtgtgtgtgtttstgtacatagtagaaccaagagacctcttgggttccatttcagtaagacatgcttaggggagttgcccattttaaatcacctggatatcttcaagctagac

SEQ ID NO: 18465 - DNA, 201 bp, Homo sapiens
tacatgaagtggtaattgttaaactttgcattagtaagtaaaaatacatacaccatttttctaatagaattacctgtcatttcctcttaagtttaaaaackgcttatatttgcttttcacatgcttttacctttaaaacaaagaaacgaatctttcccaaattagttcctagagtcttctttttgctttactctcccaaag

SEQ ID NO: 18466 - DNA, 201 bp, Homo sapiens
cccccaaggagaagaccggaccaatgaaagaaatcaaccttgctcctgacagctcatccgtggttgtatcaggacttatggtaagacatgaccgttgttcrttggaataaagatggagatcatctctaacacagtttctaaggtggtgaaaatataatatcataataaatctaactgttcttttcctctgcatcaaataat

SEQ ID NO: 18467 - DNA, 201 bp, Homo sapiens; identical to SEQ ID NO: 2950

SEQ ID NO: 18468 - DNA, 201 bp, Homo sapiens
tgagacaggaacgaaatgttggatgtacgttaatttcccctacaccttcctcacttcctaaactggtggtgtcttttcttttttttttctcttcctccccygggtgggaaaaacaggtcttgattccccaactggcattgacttttctgatattactgccaactcttttactgtgcactggattgctcctcgagccaccat

SEQ ID NO: 18469 - DNA, 201 bp, Homo sapiens
aaaatgcatacgtaattgacagactctcaaatggtgatatgattatagatctggaagggatttcaaatattatttagtacaacactctgagtccttacttstgagtatctgagttgatatagggcacaggtttcctgatgtcttttcccagaccctctccatctcaccatgctgctgtcctcttgagtgattaaatactga

SEQ ID NO: 18470 - DNA, 201 bp, Homo sapiens
tgtgcgagtgtgtgcgcgctttactgagagaaaccagctgtgcacacaaaaggaccgagttttgagcacgctggttctgagggcctgggatgataagaccrtgcattggaggacgaggactctgcgactttcccgtgttctaataaattctgcacgttcagattgtccttctaggaattaaccaaaacttgcctttaaaga

SEQ ID NO: 18471 - DNA, 201 bp, Homo sapiens
aaatacatctccattttttgttgtcatggtgtgtgtacctttgtcatcacagtatgattttatcgctggtctcaaaaactaaaagataccttactcaacartcacctagactttcagtcactaacaaattaagaaatttgttgtctgtccttttaaaaaacattttctaagaagatctttgttatttagatttagcagaca

SEQ ID NO: 18472 - DNA, 201 bp, Homo sapiens
ttggcaggaaaatctggcaggaacgatggcccctatccttgttccatttctctcctcagctggttaggaccactataccctccctcttttttttttttttkttttttgttttttgtcttcctttgctttgtttaaacagtgagggttattggtaagaggagagcccgtgtcattcctcactataatgctttctctctgctt

SEQ ID NO: 18473 - DNA, 201 bp, Homo sapiens
gtaggctataggactggacatttggatatttcatcagttcaaatagtcctgggcgtgctttagtttctcatgcttttgagcagagttttaaaataagcccsatttgcccctacagatctcctgcctggtacagaatatgtagtgagtgtctccagtgtctacgaacaacatgagagcacacctcttagaggaagacagaaa

SEQ ID NO: 18474 - DNA, 201 bp, Homo sapiens
gaaaatctggcaggaacgatggcccctatccttgttccatttctctcctcagctggttaggaccactataccctccctcttttttttttttttgttttttkttttttgtcttcctttgctttgtttaaacagtgagggttattggtaagaggagagcccgtgtcattcctcactataatgctttctctctgctttggatgt

SEQ ID NO: 18475 - DNA, 201 bp, Homo sapiens
attcagatttccataattgctcatgctcctccttaaccttctggaataataaaatttcccaataccattgccccccgccacccacacccccctagttcccraaaatatatgtgcttctttttgttacaaaaagtttaaattgcctgaggctctgggaaaattctatcactatggcaattccaagaagaaacaaggcacagt

SEQ ID NO: 18476 - DNA, 201 bp, Homo sapiens
aagaagaagctgggcacagtggctcacgcctgtaatcccagcactttgagaggccaaggcgggtggatcacaaggtcaggatttccagtccaagcctggtyaacacggtgaagccccgtctctattaaaaatacaaaaattagccaggcatggtggcaggcacctgtaatcccagctactcaggagtctgaggcaggagaa

SEQ ID NO: 18477 - DNA, 201 bp, Homo sapiens
aagctacaaactaaactctgaattcaatgcacagctccattaattttgaaagatgtaatgtttgttgctatcttaatatacttttgatatctacagctttwaaaaaatcatagtggaaaaacacctgcaggaaagttccatgacttcaaacaaattctgcttctaaataagcacgtaaaaataagtgaatatcaagagaaa

SEQ ID NO: 18478 - DNA, 201 bp, Homo sapiens
agggttttaccgtgttggccaggctggtctcgaactcccaacctcaggtgatctgcctgcctcaacctcccaatcaatactctttctagaataagtatcascacttttgtttctcaccttttctcctttcttggttctcttcctataaatcccatagtttcagaccttttaaattaggagagctctctggggaatgtgctt

SEQ ID NO: 18479 - DNA, 201 bp, Homo sapiens
taaccaggttctcccagctttgagacgtctcagacttaccagttctccaaaacgctattttctttaagggtgacaccttttaaaaattaggcacctcaaayatctactgcttttgagcttttgagttttgcactgtaaaaagaaaaatacacagtgggattttaagtcaaattagtttatctaatttttagggaataattt

SEQ ID NO: 18480 - DNA, 201 bp, Homo sapiens
gcaaagaaactcagaagactttcctacccagttggtagattctgtaaagtagcttgctgttgtctgtcatcagctctcaaaaaaaaaaaaaaaaaaaaaaaaatagatcattgtcatggtacatggagagggaagtgagaaaatgtggagaaacatcttccttagaatatggtaaagaagcccgggcgtggtggcagtaaa

SEQ ID NO: 18481 - DNA, 201 bp, Homo sapiens
aatcccagtagccccagctgagctggaggatggagaccacttggtagacacttgtggattatttcctaggctaaatgcaaaagctactgctgaataagggwcatttttttccagtcccaggccagtagcgacatagatttcagagtgatctctgtgagatcctgaagatcctgactgcagaaagtagtgaattgtcttctc

SEQ ID NO: 18482 - DNA, 201 bp, Homo sapiens
tcagaaagttttgtgtttggcatcattaccactctgttgacatataaatttcctcttgagcttaggaggcttctctgagagtcaaacatttactttgagagtgggcagatcttgctttacttggaaggatacacttacaggatagaaacacagaatacttgaacactgaagaatttgaaaatgtcaattctcagaagatct

SEQ ID NO: 18483 - DNA, 201 bp, Homo sapiens
ttcagaaagttttgtgtttggcatcattaccactctgttgacatataaatttcctcttgagcttaggaggcttctctgagagtcaaacatttactttgagagtgggcagatcttgctttacttggaaggatacacttacaggatagaaacacagaatacttgaacactgaagaatttgaaaatgtcaattctcagaagatc

SEQ ID NO: 18484 - DNA, 201 bp, Homo sapiens
catcattttcataatttgaaaaaaaaagccaaattaatatatttcttttttgattcactttttaagtgatcatttttaaaactttacttttgacccactgwatttatttagatagaaggaaaagagatgatgggagggaagtttagataaaggatggaagttggttttatttaaacaatagccctgtgatttcctaatgag

SEQ ID NO: 18485 - DNA, 201 bp, Homo sapiens
gagtaaaacctcgtcaaaaagaaaaaataataaaaataaaaaaaaatggaacaagatactcagggatgtatatttaattttttaaaaaatattctgctctcattttaatatggcagaaccgattgctttctaagtgtggcttttttccagtaaaggttaattattaagaccactagtcctggcctgggtcaatcccagtat

SEQ ID NO: 18486 - DNA, 201 bp, Homo sapiens
agagtaaaacctcgtcaaaaagaaaaaataataaaaataaaaaaaaatggaacaagatactcagggatgtatatttaattttttaaaaaatattctgctctcattttaatatggcagaaccgattgctttctaagtgtggcttttttccagtaaaggttaattattaagaccactagtcctggcctgggtcaatcccagta

SEQ ID NO: 18487 - DNA, 201 bp, Homo sapiens
gcagctcagcgtgaccataatcttggtttcttactttgtggctgagggcaagaatatctttatattggcatatccaccaccccagggctgttgcttctgtmcaccctggaatcactaattacagcatcacccagtatacaagcccctgcatcacaatgtctgtcccttagccgtagacctgtcacatgttaatcatgtgtt

SEQ ID NO: 18488 - DNA, 201 bp, Homo sapiens
gtgttggccaggctggtctcgaactcccaacctcaggtgatctgcctgcctcaacctcccaatcaatactctttctagaataagtatcaccacttttgttyctcaccttttctcctttcttggttctcttcctataaatcccatagtttcagaccttttaaattaggagagctctctggggaatgtgcttaaggtggagaa

SEQ ID NO: 18489 - DNA, 201 bp, Homo sapiens
taacctagagcatagcaaatgaattctaaattctcaagtaggaggagctaagagcaagagagctgcaaccaagctacaaactaaactctgaattcaatgcmcagctccattaattttgaaagatgtaatgtttgttgctatcttaatatacttttgatatctacagctttaaaaaaatcatagtggaaaaacacctgcagg

SEQ ID NO: 18490 - DNA, 201 bp, Homo sapiens
gaagacctagaatttttcttcttaaataccaaacacgaataccaaattgcgtaagtaccaattaattataagaaatatatcaccaaaatgtaccatcatgmtcttccttctaccctttgataaactctaccatgctccttctttgtagctaaaaacccatcaaaatttagggtagagtggatgggcattgttttgaggtag

SEQ ID NO: 18491 - DNA, 201 bp, Homo sapiens
ttcttatttttggtgctaaaacccaaaacaaatcttttatttaaaaataagattttttttttttttggccaggtgtgatggctcatgcctgtaattccagyactttgggaggccgaggtgggtagatcacctaaggtcaggagttcgagactggcctggccaacatagtgaaaccccatctttactaaaaatacaaaaatt

SEQ ID NO: 18492 - DNA, 201 bp, Homo sapiens
catagatgaaacagcccactaaaccagtagtacctcaattcagccattagagctatcattatgaagtggcccacacatatatttggctttttctcacacartatttttaaaataaaaataaaaaatggctccttagaatccagactgaaaaaaaaatgcgagaattgcgatgttgattctaaattcccacatggcaaagaa

SEQ ID NO: 18493 - DNA, 201 bp, Homo sapiens
ctgaagagacttgctttgacaagtacactgggaacacttaccgagtgggtgacacttatgagcgtcctaaagactccatgatctgggactgtacctgcatyggggctgggcgagggagaataagctgtaccatcgcaagtaaggaagagattgtgtaaaatgatgccaaaatatcaaatatgaatttctctgttaccatca

SEQ ID NO: 18494 - DNA, 201 bp, Homo sapiens
tatgtcttctcctatctctatctcccctccaaattctccaccctcacttgcagcctgtgagaaagtgcagtaaaccattcactcagaggtgtatggcttasagagagggaaatacccagccggcaagggaatgcatagtgaacacaaagcacattaaacttgaaaacaaaactcagacaagctccatggatgctaagtggt

SEQ ID NO: 18495 - DNA, 201 bp, Homo sapiens
taggtctccttgaggagtgaacagtgggtttcttaatcttttgatttgggaaagtggagacaagcttcaaaaatgagtcatgatttaatgttattacaggrcactttagcacttgtccaacctgagtattttgaccattatctgcagtaaaatgctacaaagaagctttattggtctgtagattcaacttttaaaatatga

SEQ ID NO: 18496 - DNA, 201 bp, Homo sapiens
tttcattatcaggctgtaactctcattcacagaaatgattggagactttaggtctccttgaggagtgaacagtgggtttcttaatcttttgatttgggaargtggagacaagcttcaaaaatgagtcatgatttaatgttattacaggacactttagcacttgtccaacctgagtattttgaccattatctgcagtaaaat

SEQ ID NO: 18497 - DNA, 201 bp, Homo sapiens
ttaaaccacaagtagatataaagctagagaaatacagatgtctgctctgttaaatataaaatagcaaatgttcattcaatttgaagacctagaatttttcktcttaaataccaaacacgaataccaaattgcgtaagtaccaattaattataagaaatatatcaccaaaatgtaccatcatgctcttccttctaccctttg

SEQ ID NO: 18498 - DNA, 201 bp, Homo sapiens
tgttgcttctgttcaccctggaatcactaattacagcatcacccagtatacaagcccctgcatcacaatgtctgtcccttagccgtagacctgtcacatgytaatcatgtgttctaagaccttattataatcctaatgctacagatgacctcaaggtagcccctctccctcctagcaaagtcattattatcctcttttaaa

SEQ ID NO: 18499 - DNA, 201 bp, Homo sapiens
agagaagtgggaccgtcagggagaaaatggccagatgatgagctgcacatgtcttgggaacggaaaaggagaattcaagtgtgaccctcgtatgtcatcasagatcatttttagtgccttattaagcattctcactttcattatcaggctgtaactctcattcacagaaatgattggagactttaggtctccttgaggagt

SEQ ID NO: 18500 - DNA, 201 bp, Homo sapiens
tcttcatgcaagcttattttctactaaaacagttttggaattattaaaagcattgctgatacttacttcagatattatgtctaggctctaagaatggtttygacatcctaaacagccatatgatttttaggaatctgaacagttcaaattgtaccctttaaggatgttttcaaaatgtaaaaaatatatatatatatatat

SEQ ID NO: 18501 - DNA, 201 bp, Homo sapiens
aggctctaagaatggtttcgacatcctaaacagccatatgatttttaggaatctgaacagttcaaattgtaccctttaaggatgttttcaaaatgtaaaawatatatatatatatatatattccctaaaagaatattcctgtttattcttctagggaagcaaactgttcatgatgcttaggaagtcttttcagagaattta

SEQ ID NO: 18502 - DNA, 201 bp, Homo sapiens
ttgataattaagtggaagtagttgtatgctttgagaagcataccttttttctttcatcaatggaactttaaaaagtttctcactcacccacctgtttcctraacagatcagtgcattgttgatgacatcacttacaatgtgaacgacacattccacaagcgtcatgaagaggggcacatgctgaactgtacatgcttcggt

SEQ ID NO: 18503 - DNA, 201 bp, Homo sapiens
tgaatcaggctttaaactgttgtgccagtgcttaggctttggaagtggtcatttcagatgtgattcatctagtgagtagttgctttgtccatccacttccrtgtttgtctcctcaagttccatgcatgcactcatgtgccaaggaagcatgtttggaagacacaggttcttccaaacatgaagcaaacaagagaatactgt

SEQ ID NO: 18504 - DNA, 201 bp, Homo sapiens
tcatagtggaggcactgaaagaccagcagaggcataaggttcgggaagaggttgttaccgtgggcaactctggtatgtaaacacgtactatttagacacargctcccctctgctgtacaccagagatgggcttttctgttgactgtacctttgttgccattgtctttttatctttgggatttaatgcaacacatcaacatg

SEQ ID NO: 18505 - DNA, 201 bp, Homo sapiens
cttcaaaacaaatgaaatcaatttaattcagatttccataattgctcatgctcctccttaaccttctggaataataaaatttcccaataccattgcccccygccacccacacccccctagttcccgaaaatatatgtgcttctttttgttacaaaaagtttaaattgcctgaggctctgggaaaattctatcactatggca

SEQ ID NO: 18506 - DNA, 201 bp, Homo sapiens
tgttttgtttttttttttgagacagagtctcactctgtcacccaggcttggagtgcagtggcgccatctcaactcactgcaacctccgtctcctgggctcragcgattctcgtgcctcagcctccccaagtagctgggactacagacatgcgccaccaagcccagctattttttagatttttagtagagacagggttttac

SEQ ID NO: 18507 - DNA, 201 bp, Homo sapiens
tgggtctggagtgcagtggtgtgatcacagctccctgcagctttgatctctcgatcttctgggctccagtcatcccccaggactcatgtcagactcctgartagctgggacgagaggtgcctgtcaccatatctggttattattatcattattattaagagtgtctcactatattgcccaggctggacttgaactcctggg

SEQ ID NO: 18508 - DNA, 201 bp, Homo sapiens
atgctttgtttgcatagatttttttaaaataagcttttccaaatcataaagagataagatcttaggtaacatgaagagactcccttacttattcctaaatmatctatattccaagggcattttcttatttggaacagttgacctcactgataaagctgtctcaccactataataacaatgtccaaaatctaggctttctgc

SEQ ID NO: 18509 - DNA, 201 bp, Homo sapiens
gacattgcttcatttcaagggttgtatgccaatacaactattaattacacataagattatggtgctaatttgatttttgaaattttctgtgaaaacaaatkgataaagacttttggaaccaggtctatttaagagtattagagacacagaaaaacctcaaatctcttttaatcttcagtgttgaatgagatcagaggtgaa

SEQ ID NO: 18510 - DNA, 201 bp, Homo sapiens
gaagcatttgtctaaattccttgttcacatatatttgaaaattatttataaaatgctaaaatgtataaagatagttgttaacaatattcaaacagcatgaygtactatagcaataacaggaaattttagatacccattacttttgccaaaaccacatggaagtctcaacaaacctatggagaaaaatcttaaacaaaaata

SEQ ID NO: 18511 - DNA, 201 bp, Homo sapiens
actgaattgttggaagggtagatggaggctgcgaaagtgttttgcaaaggataaaacattagcacgaagctgctgcttattgttatcttattttctctatyctttcctgcagggaattacatttcaaaaaaacatgggaaaactttatttgatgtgttgttctaaatgagtgtgaacaagttcacaaaagccagtttaggg

SEQ ID NO: 18512 - DNA, 201 bp, Homo sapiens
caccattgtgatcacatggacgcctgctccaagaattggttttaaggtaaactgcagatgttcctaatctctgtgatacagccctgaagctgtccttgtgkttcccatgtagtggaaacagggtgctcaggagtcaggagacctgggttttgtcacctgcttctgtccatacatctttgactacattgtcagggcctaaca

SEQ ID NO: 18513 - DNA, 201 bp, Homo sapiens
ccattattgtggaataattcagcgtaaagctttttttttttctttttttgagacggagtctcattctgtcacccaggctggagtgcaatggcatgatctcrgctcactgcaacttctatctccagggttcaagcgattcttgtgtctcagcctcccaagaagctgggactacaggcatgagccaccatgacagttaatttt

SEQ ID NO: 18514 - DNA, 201 bp, Homo sapiens
gtttaacttttatatagcatcttttattgcaaccaaaaatagctgaccattattgtggaataattcagcgtaaagctttttttttttctttttttgagacrgagtctcattctgtcacccaggctggagtgcaatggcatgatctcggctcactgcaacttctatctccagggttcaagcgattcttgtgtctcagcctcc

SEQ ID NO: 18515 - DNA, 201 bp, Homo sapiens
atattcctgttaagaagcaaaaagcatagattaaggcttttaaaaagtgctgattaaaaaataaagtcacttaaaatgtaaacaaaatgcctattaagcgmaaactggttagctttcatggcataatttaaagcccttatccagtattttctccctggttgcaggcaccctgtcaattcttgacaaacttttcagacattc

SEQ ID NO: 18516 - DNA, 201 bp, Homo sapiens
cagtccctgtatacgtctggtttgtaacaagagattctttatcaagcaaaacagtatgtaatgacatttctctggaaccttccattacaagccaccttaaygcagtttggaagatacctcccccacctgggggaatttccagctaaagtatataaaagagtccccaaatcatttcccaataaaagtacactgtgcagtttc

SEQ ID NO: 18517 - DNA, 201 bp, Homo sapiens
ctaccatgtgacccacagtccctgtatacgtctggtttgtaacaagagattctttatcaagcaaaacagtatgtaatgacatttctctggaaccttccatyacaagccaccttaatgcagtttggaagatacctcccccacctgggggaatttccagctaaagtatataaaagagtccccaaatcatttcccaataaaagt

SEQ ID NO: 18518 - DNA, 201 bp, Homo sapiens; identical to SEQ ID NO: 2878

SEQ ID NO: 18519 - DNA, 201 bp, Homo sapiens
atttaaatcagtgatactaaaaatgtgctccatagactggctgctggcccgttaattgtttgctgctagtctgcaacaagaaaaacggttgtgccagaacrtaaatcacaaagcacactgcttagtacagctgagaatttttctgaagccagattttcttgatgaaggaagcagtgtgttaatttgcacacattgccaagc

SEQ ID NO: 18520 - DNA, 201 bp, Homo sapiens
agcctgcatctgagtacaccgtatccctcgtggccataaagggcaaccaagagagccccaaagccactggagtctttaccacacgtaagctgaaaattaartgccttttcttaactatatttacattctctattcttcatgctttaaaacaaaacaaaacaaaacaaaaaaaacattaaaaaattagtacataatttaaat

SEQ ID NO: 18521 - DNA, 201 bp, Homo sapiens
cactggagtctttaccacacgtaagctgaaaattaagtgccttttcttaactatatttacattctctattcttcatgctttaaaacaaaacaaaacaaaamaaaaaaaacattaaaaaattagtacataatttaaatcagtgatactaaaaatgtgctccatagactggctgctggcccgttaattgtttgctgctagtct

SEQ ID NO: 18522 - DNA, 201 bp, Homo sapiens
gccactggagtctttaccacacgtaagctgaaaattaagtgccttttcttaactatatttacattctctattcttcatgctttaaaacaaaacaaaacaamacaaaaaaaacattaaaaaattagtacataatttaaatcagtgatactaaaaatgtgctccatagactggctgctggcccgttaattgtttgctgctagt

SEQ ID NO: 18523 - DNA, 201 bp, Homo sapiens
cttcctttctctctctcttttcttcctttcctttcctttccttccttccttcctttctttctttctttctttctttctttctttctttctttctttctttyctttctttctctctcactctctctctctttctttcttatttttggtgctaaaacccaaaacaaatcttttatttaaaaataagattttttttttttttgg

SEQ ID NO: 18524 - DNA, 201 bp, Homo sapiens
agagagccccaaagccactggagtctttaccacacgtaagctgaaaattaagtgccttttcttaactatatttacattctctattcttcatgctttaaaamaaaacaaaacaaaacaaaaaaaacattaaaaaattagtacataatttaaatcagtgatactaaaaatgtgctccatagactggctgctggcccgttaatt

SEQ ID NO: 18525 - DNA, 201 bp, Homo sapiens
tccagcctgggcaacacagcaagactctgtgtaaaaataataataataatcactgattagctattagcacattaccttctagtcgcttttccctatgaatrtataattcttaaaatatccttcttataagctgtagagtcatttgagggactagtttgctctgattagttaccttttcttttcatttcaaagatcttccaa

SEQ ID NO: 18526 - DNA, 201 bp, Homo sapiens
gggaagctgaggctggtggatcacttgaggccaggagttcgagatcagcctggccaacatggtgaacctccatctctaataaaaatgcaaaaaaaatagcygggtgtggtggtgtgcacctgtaatcccagctactcgggaggccgaggcagaagaattgcttgaaccggaaaggtagaggatgcagtgagctgaaattgt

SEQ ID NO: 18527 - DNA, 201 bp, Homo sapiens
ttcattggcgcactgaagtgtgtgccatcgtaagcactgagttcagtgaatttgaattcttataaagtgaacacaccacaagaccagcacccagatcaagraaaagaatatctctctaccctcaccccatcatcttccgccaataatcactaccctgactcttactgcagagagctatttttaaaaatttggcattcgatt

SEQ ID NO: 18528 - DNA, 201 bp, Homo sapiens
cctggaacttctaccagtgccactctgacaggcctcaccagaggtgccacctacaacatcatagtggaggcactgaaagaccagcagaggcataaggttcrggaagaggttgttaccgtgggcaactctggtatgtaaacacgtactatttagacacaggctcccctctgctgtacaccagagatgggcttttctgttgac

SEQ ID NO: 18529 - DNA, 201 bp, Homo sapiens
aagagaaaactgttttgtcaagtgatgagaaattccaaaaaaatcctctaacccagacaggattctaaatttggggaaatccatggcactctttcaatttrgagtgtgggtcacaaagattcctcaagaggtttttttacactatttgtaggaaactgatatttgctgggtgttttgctttgttttggtttggttttaaat

SEQ ID NO: 18530 - DNA, 201 bp, Homo sapiens
ggctttatgccctactgaatgaattatgcttcactgggctattgattcccgtgtaagggtgaaaaagaattattaggaaagatcctctttaaagaggaatrgtaagaaacaataaaacttaggtgatatttaaggaaacaagtctgattaaaagaaattttggagtatcctggcttatacacaagaccataaagcaagaca

SEQ ID NO: 18531 - DNA, 201 bp, Homo sapiens
cgtagagtctagaatgcttcagcacctggcacactgcttaacaaatggtgaatgaaaaaaaaaaaagaaaagtcattctttttcttctttcaccctatgtycataatctggccatttgcagaacttgatgtccagtgatcgaaatcaacagcatcagtgcatccaatatcttctagtctctcatcttcttattacatcatt

SEQ ID NO: 18532 - DNA, 201 bp, Homo sapiens
aaagatagtgttttaagaaaagatagttttctgttctgcaagcataaattttctagctatttcattattatcttaaatggagttaacactactttgaaatkgatgctacttcccttattttccttttattttaaacaaaagaaccaaaaccatactttaaattttgttgataacagtgatatacatcaaggtgtagaaata

SEQ ID NO: 18533 - DNA, 201 bp, Homo sapiens
acaggctcccctctgctgtacaccagagatgggcttttctgttgactgtacctttgttgccattgtctttttatctttgggatttaatgcaacacatcaayatgaaataaatgagcaactttatattaaattaatctctcccccacctcctgccatatcctgttgtcttcacaaaatgcatacgtaattgacagactctca

SEQ ID NO: 18534 - DNA, 201 bp, Homo sapiens
tctcaccttttctcctttcttggttctcttcctataaatcccatagtttcagaccttttaaattaggagagctctctggggaatgtgcttaaggtggagarcgattctatactaggcaggtagaaaggaatattcctcagctgtcttcaaatgattcattaaggaaaagcagggtacagtgataggaccatgagatttgga

SEQ ID NO: 18535 - DNA, 201 bp, Homo sapiens
tcacatccccagggaagatgtagactatcacctgtacccacacggtccgggactcaatccaaatgcctctacaggacaagaagctctctctcagacaaccrtctcatgggccccattccaggacacttctgagtacatcatttcatgtcatcctgttggcactgatgaagaacccttacaggtaattaattgttctcttca

SEQ ID NO: 18536 - DNA, 201 bp, Homo sapiens
atagcagctgataagtgattgattctctaaaacgtatattatttaatttgtgttgacagtatccatttttttttttccccgagatggagtcttgctctatsgccctggctggagtgcagtggcgtgatctcggctcactgcaacctctgcctcccaggttcaagcaattctcctgcctcagcctcccaaatagctgggatt

SEQ ID NO: 18537 - DNA, 201 bp, Homo sapiens
ttcccagaaatttaccaagcattttacaaggagctcttttatatttgaaaagagaaaactgttttgtcaagtgatgagaaattccaaaaaaatcctctaayccagacaggattctaaatttggggaaatccatggcactctttcaatttggagtgtgggtcacaaagattcctcaagaggtttttttacactatttgtagg

SEQ ID NO: 18538 - DNA, 201 bp, Homo sapiens
ttgctctgaatttgaaactttaagttgacaatcttcgtgcttgttagcagcaggatcattaatatctcgtctcaatggcccagcccacacatatggatgaycactagcaagtgtaatgatctcaatatttatttctcattcagttgggtttccttgtatttgccacattagtgtttaccctgttcctaatggcaaaatatt

SEQ ID NO: 18539 - DNA, 201 bp, Homo sapiens
tgatatcttagtttggtttcttattgaaaagaactagtaaatgctgtaactgaaacagaaatttgctggaagtcccagagactaagtgatttgaatttgcracaaactctgaatttttgtgcatttttgaaaaatgcatttttcaaaactgtcaattcacgaggaattatcagcattgtaatttgtctgggataatgtctt

SEQ ID NO: 18540 - DNA, 201 bp, Homo sapiens
ttccagctgagttgctctgaatttgaaactttaagttgacaatcttcgtgcttgttagcagcaggatcattaatatctcgtctcaatggcccagcccacayatatggatgaccactagcaagtgtaatgatctcaatatttatttctcattcagttgggtttccttgtatttgccacattagtgtttaccctgttcctaat

SEQ ID NO: 18541 - DNA, 201 bp, Homo sapiens
gccaaaggagataatctacacattactagttatatatttcttgaaatggatgaatttgatatataccaaggaaacgttttaaaataccaaaactttacatrgatgagccaagcaggcactaatctctagctatgctcctgtgcagatgtcagcccaccaagaagggctcgtgtgacagatgctactgagaccaccatcacc

SEQ ID NO: 18542 - DNA, 201 bp, Homo sapiens
catagaagtcttaactttgcttcaaaagcataaggtagaattgaaagatttagaatggagtcatttcttttacctaatagctgatctcagattcctccttsgtcaagatataatttatttaaaagaaaaaaaaatgacactttggacacatttctatatggaatgtcctggaccgaaacatgaaatagtgtgtgcttgtca

SEQ ID NO: 18543 - DNA, 201 bp, Homo sapiens
gttaaaagaatctttttctgtaaaacacaggcctgtagtagcacttcctgactgtttgccccactttctttctttcttagcgcctgatgccccacctgacmcgactgtggaccaagttgatgacacctcaattgttgttcgctggagcagaccccaggctcccatcacaggtcagctaagcctccccctctttggctgcta

SEQ ID NO: 18544 - DNA, 201 bp, Homo sapiens
ggaccaagttgatgacacctcaattgttgttcgctggagcagaccccaggctcccatcacaggtcagctaagcctccccctctttggctgctatgttaatsttaatgacatcagcagggagggcgcagattctgactgcggacctgcatatcactttaaatctccaatataatttatgggagaggggtttgtgtgtgtgtg

SEQ ID NO: 18545 - DNA, 201 bp, Homo sapiens
aggttactataagacacaatttttatttctagtaatttaaacattgactgacatcataaagatagtgttttaagaaaagatagttttctgttctgcaagcrtaaattttctagctatttcattattatcttaaatggagttaacactactttgaaattgatgctacttcccttattttccttttattttaaacaaaagaac

SEQ ID NO: 18546 - DNA, 201 bp, Homo sapiens
acaagctatgggaacaacttggccaaaggtagtgttagccaagcctcattcctccatttcctcatctgtaatatgggaagattgtagctgattacctttartgttccatcctaaatactgaacacccagatgcaccttttctaggaacttggaagattctgcttttcccaaccctcagacactgtcagtgctggggaaggt

SEQ ID NO: 18547 - DNA, 201 bp, Homo sapiens
tgctgtgtggcaacttaagcctcttcggcctgggataaaataatctgcagtggtattaataatgtacataaagtcaacatatttgaaagtagattaaaatyttttttaaatatatcaatgatggcaaaaaggttaaagggggcctaacagtactgtgtgtagtgttttgtttttaacagtagtacactataacttaaaata

SEQ ID NO: 18548 - DNA, 201 bp, Homo sapiens
gtcaaagcaagcgtgagtactgaccgcgggctgaaacaggctgcctcagggatgggaccctaaagccgaccaaagttggggctgaagttttgtgcgcgcgygtgtgtgcgagtgtgtgcgcgctttactgagagaaaccagctgtgcacacaaaaggaccgagttttgagcacgctggttctgagggcctgggatgataag

SEQ ID NO: 18549 - DNA, 201 bp, Homo sapiens
aattactgtctaatctgaaccatgtgaaaataacttttatttctctagcaaagggctattcacagaatattgcttttgacccatagagagcttcttcttgytgtcattttaggaggcatatccctttttccttaatctgtttggctcagagctaactgtgaacttcagaagtgtttgttttgcctttttaaaaataccatt

SEQ ID NO: 18550 - DNA, 201 bp, Homo sapiens
acttgttgaggaagttgggattggaatgagcctcagcagatgggcaaggtttgaataggaagagaagagacatttcaggagaaagaaacaacatagagagmcagatgtaggtataagatatggtaataagccaaaatgtattaagagttataaatgcatgaaatcatcatcaaagcttgcttagtgattaactgcttatat

SEQ ID NO: 18551 - DNA, 201 bp, Homo sapiens
atctcaaaaaaaaaaaaaaaaaaaaagaataccctggaaaagttagccaaaaaatgtctattcaggcgtcagatatgatagtaagataattagtttgcgaygcggactttatatgcaggatatttgggtgtttatggaggaaaagtgaagtcgattttaccttcaagaggccaacagccagctggagaggaagtgcctgct

SEQ ID NO: 18552 - DNA, 201 bp, Homo sapiens
tgcactccagcctgggagacagagaaagaccctgtgtcaacataaataaatatataaataaatcatcaagtctcatattaaagactctgtaaatatgactyattgttgacaaatgaaacaaatagaggtgtaagcatgttgtctacatggaggcaagaccagaataatagaaaatggaaacagattcccttaaagagggga

SEQ ID NO: 18553 - DNA, 201 bp, Homo sapiens
tggcctctgttaatttttcagctttggtttccagacttctttgtattacaacatatgttccagccacaataagcgactgacctgtagtttttggcaggctgggctgggctgggctctgttattgcttcaggccatctcatgtgctttcttctcttcctggggtgtactctcccctttccttcctgtcctgtagccagctcc

SEQ ID NO: 18554 - DNA, 201 bp, Homo sapiens
tttgaaaagatagtgtgaagccaagacagtcagtgcctctgctcataggtgagcagaacacaagatgcatggagcatcgtcttccagcaagtatgtgttgragtcttctgagtgtgcttttgacttcctagggcttttctattcacggagctgagatgaaccctgagctctcagacagggaggctctgggctggttctctc

SEQ ID NO: 18555 - DNA, 201 bp, Homo sapiens
actgaagagtgccaaggagacctatttttctcctgtgtgtttctgcatttcagccagttcctgggctctcatctattccttatcatccatctgtttggggmtgccattgtttttgtctggtttcctttgtcctgttgttctttcccaaacaggacaccacatctcttccttttttcctccaaagcattggtaaacaccaag

SEQ ID NO: 18556 - DNA, 201 bp, Homo sapiens
gtccatgctggtgagaaaaatgtttttgatccatgtgtgtgggagcaatgatgccagctcaggtctcagttttagagatttagagtttcagggaaatgagyccatggccccttgggtatttgtagtgttggacagccgtggggcatattccaggaggttttagaatgctcatgagcccatcactttccatttgaggattcc

SEQ ID NO: 18557 - DNA, 201 bp, Homo sapiens
gatctgtcctgtggttccacatcactactgagtggttggctgtttctccttcctttgattcactgtgaactcatgtctggcctctcagaaactctaagccrgcaaggaagaggcctgtgggacaggaaagcatggggagaaagagacagggacaaggggtttggggctgttggggagacacagctatggggaaaagcagtc

SEQ ID NO: 18558 - DNA, 201 bp, Homo sapiens
agtgcaatggcaggatctctgctcactgcaacctctgcctcccgggttcaagtgtttctcctgcctcagcctcctgagtagctgggattacaggaatgcaytgccacacccggctaatttttttgtatttttagtagagatgggtttagtagagatgggtttctccatgttctcaaactcctgacctcaggcaatctgccc

SEQ ID NO: 18559 - DNA, 201 bp, Homo sapiens
gatgagcaaatgaggaaattagacatataaggaaataactagctctgaactatatattaaaaagggttattattattattataattttttttttgggacgragtcttgctctgtcactcaggctggagtgcagtggtgtaatcttggctcactgcaacctctgcctcccaggttcaagcaattctcctgcttcagcctctg

SEQ ID NO: 18560 - DNA, 201 bp, Homo sapiens
gctgaatcttatgaagtgggcacaacctttgctctgagctgcacagaggccctatcctgctgtagaatcagatgtggcgtgtgctgatttctggcctctcstggccacagggtggcactgtcgagagggagataccatctctgtctcttctaagactatttgctctacaaactctttgaaaagatagtgtgaagccaagac

SEQ ID NO: 18561 - DNA, 201 bp, Homo sapiens
gactacccagagggggatggcaactgggccaactacaacacctttggatctgcagaggcggccacgagcgatgactacaaggttggtgccacttctctccyacttgggtgagggtgaggtgtggagtgtggctggccaccagcctgcaggagggagggctggaaggtggggatatggggaagggctggagaagaagagaga

SEQ ID NO: 18562 - DNA, 201 bp, Homo sapiens
cctctgtctaggaaagccaggtattgtccaaggtttctccccatgtgatagcctgagatatggcctcgtgggaagggaaagacctgactgtcccccagccygacacccacaaagggtctgtgctgaggaggattagtaaaagaggaaggcctctttgcagttgagataagaggaaggcatctgtcttctgcttatccctgg

SEQ ID NO: 18563 - DNA, 201 bp, Homo sapiens
aatgcactgcggaaagccgcagggacctctgcccaagaaagcctgggtattgtccaaggttttcccccactgagacagcctgagatatggcctcatgggaraggaaagaccttaccatcccccagcctgacacccgtaaagggtctgtgctgaggaggagtagtgaaagaggaaggcttctttgcagttgaggtaagagga

SEQ ID NO: 18564 - DNA, 201 bp, Homo sapiens
gtcttatgaatataatttattttttatttctttttttttctttgaagagtccttttctttctttttttttttctttgagacagagtctcgctctgtcaccmaggctggagtgcagtggcgcgatctcagcttactgcaagctccacctcccgggttcatgccattctcctgcctcagcctcccgagttgctgggactacag

SEQ ID NO: 18565 - DNA, 201 bp, Homo sapiens
agactatttgctctacaaactctttgaaaagatagtgtgaagccaagacagtcagtgcctctgctcataggtgagcagaacacaagatgcatggagcatcrtcttccagcaagtatgtgttggagtcttctgagtgtgcttttgacttcctagggcttttctattcacggagctgagatgaaccctgagctctcagacagg

SEQ ID NO: 18566 - DNA, 201 bp, Homo sapiens
tttcttctcttcctggggtgtactctcccctttccttcctgtcctgtagccagctcccattctcccatcaaaatcagcctgctctgagttacagctggtcycttccccagcagttcccaggcctcacccccgttagtgggtttgccctcccatctcagttgggtccctttccatgtgctccttccttgtagaatgtagtct

SEQ ID NO: 18567 - DNA, 201 bp, Homo sapiens
tcctactcaaggaggtttctagtgggaattttgaggcttttgtgtcccattccagtcacaaagtcttctgaacacagagagaatgcagtgttcctggtgaygcttatggtggtggcaagaactgtgatgcgtctgagatttgcccctacttgccccaggtttatagatgctggcagaaaacctgaaactcccgagccagag

SEQ ID NO: 18568 - DNA, 201 bp, Homo sapiens
gataccatctctgtctcttctaagactatttgctctacaaactctttgaaaagatagtgtgaagccaagacagtcagtgcctctgctcataggtgagcagmacacaagatgcatggagcatcgtcttccagcaagtatgtgttggagtcttctgagtgtgcttttgacttcctagggcttttctattcacggagctgagat

SEQ ID NO: 18569 - DNA, 201 bp, Homo sapiens; identical to SEQ ID NO: 3047

SEQ ID NO: 18570 - DNA, 201 bp, Homo sapiens
gtttaggactgacgtgcaccagccactggccataaaggtactgggctgcacccctacagcctggggtgtttggctgtagcctcagcttttggcttagggartccctggactggccaatgggatgctgcttctagttcatcctttgactacttggctgtttcttcacctcttctttttcaggggaatttgttgcaggattcg

SEQ ID NO: 18571 - DNA, 201 bp, Homo sapiens
cgagtggaagattccaggtgtttaacctataccagctgttggatcagaccgtcttagcatagggaatccctgacctcctgggacttcagagcagagtgatragttgatacaggggcagagattggccaggaaagatggcctcagtggtcagacttctaatgagactcattctcacattttctagcagcagcctcttctctt

SEQ ID NO: 18572 - DNA, 201 bp, Homo sapiens
acccagagggggatggcaactgggccaactacaacacctttggatctgcagaggcggccacgagcgatgactacaaggttggtgccacttctctcccactygggtgagggtgaggtgtggagtgtggctggccaccagcctgcaggagggagggctggaaggtggggatatggggaagggctggagaagaagagagaaata

SEQ ID NO: 18573 - DNA, 201 bp, Homo sapiens
gtatactcttataattgtggggaaaagaaaaagagatcagactgttactgtgtctatgtagaaagaagtagacataagagactccattttggtctgtgctragaaaaattcttctgccttgagatgctgttaatctgtaaccctacccccaaccctgtgctcacagagacatgtgctgtgttgactcacggtttaatggat

SEQ ID NO: 18574 - DNA, 201 bp, Homo sapiens
accctgtgctcacagagacatgtgctgtgttgactcacggtttaatggatttagggctgtgcaggatgtgctttgttaaacaagtgcttgaaggcagcatrcttgttaaaggtcatcaccactctctaatctcaagtacccagggacacaatacactgcggaaggccgcagggacctctgtctaggaaagccaggtattgt

SEQ ID NO: 18575 - DNA, 201 bp, Homo sapiens
agtgtctagggtagggggcagatctgtcctgtggttccacatcactactgagtggttggctgtttctccttcctttgattcactgtgaactcatgtctggyctctcagaaactctaagccagcaaggaagaggcctgtgggacaggaaagcatggggagaaagagacagggacaaggggtttggggctgttggggagacac

SEQ ID NO: 18576 - DNA, 201 bp, Homo sapiens
cccacaggtgtggaggggcaggccaccccttcaataatagttaagaaaaggtgcatacaaaacattagctgggcatgatggcgcatgcctgtaatcccagytcctcgggaggctgaggcaggagaatcgcttgaacctgggaggcggaggttgcggtgagctgagttcacaccactgcactccagcctgggcaacaagagc

SEQ ID NO: 18577 - DNA, 201 bp, Homo sapiens
cacgtgggcagtgggggtggactagagtatatgtctttatgcccttttccttgacaagtttctctactggctctgtgctcctcagactgtccattagtgcrtgtttgtgtatgttcctgcatgcattactactttaaaatacatgcatagggccaggtgtggtagctcacacctgtaatcctagcactttgggaggccgag

SEQ ID NO: 18578 - DNA, 201 bp, Homo sapiens
tccttgacaagtttctctactggctctgtgctcctcagactgtccattagtgcgtgtttgtgtatgttcctgcatgcattactactttaaaatacatgcakagggccaggtgtggtagctcacacctgtaatcctagcactttgggaggccgaggcaggcggataacttgaggtctggagttcgagaccagccttgcgctc

SEQ ID NO: 18579 - DNA, 201 bp, Homo sapiens
ggagtgcagtggagcagtcttggctcactgcaacctccacctcctgggttcaagcagttctcctgtctcagcctccagagtagctgggattacgggtgcaygccactgcacccagctaaatttttgtatttttagtagagacagggttgcaccatgttggctggtcttgaactcctgacctcaggtaatccgcccacctcg

SEQ ID NO: 18580 - DNA, 201 bp, Homo sapiens
ccactggcctctgttaatttttcagctttggtttccagacttctttgtattacaacatatgttccagccacaataagcgactgacctgtagtttttggcaggctgggctgggctgggctctgttattgcttcaggccatctcatgtgctttcttctcttcctggggtgtactctcccctttccttcctgtcctgtagccag

SEQ ID NO: 18581 - DNA, 201 bp, Homo sapiens
ttagtgggtttgccctcccatctcagttgggtccctttccatgtgctccttccttgtagaatgtagtctcttgaagaaatgtgtcaaattgtctttgtccrgtgtctaggtagttcacacagtaggtatttaattaaaattagtcgagtggaagattccaggtgtttaacctataccagctgttggatcagaccgtcttag

SEQ ID NO: 18582 - DNA, 201 bp, Homo sapiens
cactggcctctgttaatttttcagctttggtttccagacttctttgtattacaacatatgttccagccacaataagcgactgacctgtagtttttggcaggctgggctgggctgggctctgttattgcttcaggccatctcatgtgctttcttctcttcctggggtgtactctcccctttccttcctgtcctgtagccagc

SEQ ID NO: 18583 - DNA, 201 bp, Homo sapiens
actggcctctgttaatttttcagctttggtttccagacttctttgtattacaacatatgttccagccacaataagcgactgacctgtagtttttggcaggctgggctgggctgggctctgttattgcttcaggccatctcatgtgctttcttctcttcctggggtgtactctcccctttccttcctgtcctgtagccagct

SEQ ID NO: 18584 - DNA, 201 bp, Homo sapiens
ttccaggtgtttaacctataccagctgttggatcagaccgtcttagcatagggaatccctgacctcctgggacttcagagcagagtgatgagttgatacargggcagagattggccaggaaagatggcctcagtggtcagacttctaatgagactcattctcacattttctagcagcagcctcttctcttgagatgctctc

SEQ ID NO: 18585 - DNA, 201 bp, Homo sapiens
agtgggtttgccctcccatctcagttgggtccctttccatgtgctccttccttgtagaatgtagtctcttgaagaaatgtgtcaaattgtctttgtccggygtctaggtagttcacacagtaggtatttaattaaaattagtcgagtggaagattccaggtgtttaacctataccagctgttggatcagaccgtcttagca

SEQ ID NO: 18586 - DNA, 201 bp, Homo sapiens
ctggcctctgttaatttttcagctttggtttccagacttctttgtattacaacatatgttccagccacaataagcgactgacctgtagtttttggcaggctgggctgggctgggctctgttattgcttcaggccatctcatgtgctttcttctcttcctggggtgtactctcccctttccttcctgtcctgtagccagctc

SEQ ID NO: 18587 - DNA, 201 bp, Homo sapiens
gtctcttctaagactatttgctctacaaactctttgaaaagatagtgtgaagccaagacagtcagtgcctctgctcataggtgagcagaacacaagatgcrtggagcatcgtcttccagcaagtatgtgttggagtcttctgagtgtgcttttgacttcctagggcttttctattcacggagctgagatgaaccctgagct

SEQ ID NO: 18588 - DNA, 201 bp, Homo sapiens
cagtgtgagtcactgcacccggccaagaataaaaatcttcaccaccagcctggcttatgtgaaaatggagcccattgagaataaccgggttcccctggttsccctctgcaggctgactttgctgtagaggctttggccaaggcaacatatgagcgccttttccgctggatactcacccgcgtgaacaaagccctggacaag

SEQ ID NO: 18589 - DNA, 201 bp, Homo sapiens
agttcaagaccagcctggacaacatggtgaaaccccgtctctaccaaaaatgcaaaaaaaaattagccgagtgtggtggtgcgttgtctataatcccagcyactcgggaggctgaggcaggagaatcgcttgaacccaggaggcggaggttgcagtgagcagagattgtgccactgttctctagtctgggcgacgaacaag

SEQ ID NO: 18590 - DNA, 201 bp, Homo sapiens
ggcatggtggcgtcgcctgtagtcccagttaggaggctgagatgggaacaccatttgagcctgggaggttgaagctgcagtgagccgtgattgcatcactrcactccaacctgggcaacagagtgagacccagctatctcaaaaagcaaaaaaaaaggaatctcaatgacttctgttgtttgtgcccacaacaatgggaga

SEQ ID NO: 18591 - DNA, 201 bp, Homo sapiens
agagagtcaccagcccggctcacagagtgagacctggcctctacaaaaaataaaaactagcagggcatggtggctcttgcctgtagtcctagctactcgcraggctgaggtgggaggaccattcgagcctgagaggtcgaagctgcagtgggctgtgaaggcaccactgcactccggcctgggcaactccctgctgcctca

SEQ ID NO: 18592 - DNA, 201 bp, Homo sapiens
gagatctgccggtagccttcagagtgctgcacttcaaacttctcctgaaggacaacacagacactgagtgaatgacttaagacttctgagaaggctagacrcagtagcacacatccacctggagtcacagctactcgggaggctaaactgggaggactgcctgagcccaggagttagaggctgcagtgagctatgactgta

SEQ ID NO: 18593 - DNA, 201 bp, Homo sapiens; identical to SEQ ID NO: 3112

SEQ ID NO: 18594 - DNA, 201 bp, Homo sapiens
gaaagattattacaataaatacacaatgcaatacaataaatgaccaatgcaaatagtttctccatagagttatgcagtgtacaacatgcaccacggtccayggccatcctgcaggtaggaggtcaagtggaaaggtctccaactcagctctagaaaagtgcagagttagagaaggtatcatagaagagttgactcccaaga

SEQ ID NO: 18595 - DNA, 201 bp, Homo sapiens
accacctaagaaaaccaaataaatcaagaacataaaagaattcatcatctctggctgggtatggtggctcaagcccgtaatcccagcactttcggagaccraggcaggcagatcacctcaggtcaggagtatgagaccagattggccaacatggtgaaatcccatctctactaaaaatacaaaaattagccgggtgtggta

SEQ ID NO: 18596 - DNA, 201 bp, Homo sapiens
tatgacagtgacacactaatgcttttattattgaaaaaacaattccaacatagcagtgtatttagaacactaaatgaaaatatgcccgggagcagtgactyatgcctgtaatcccagcactttgggaggctgaggtgtaagaatcacattaatccagtaagtcgaggctgcagtaagccatgatcataccacttcagcctg

SEQ ID NO: 18597 - DNA, 201 bp, Homo sapiens
tcaacctcgtaagggccatggtgggggcagagttgtgatttggatctctctctgccttatcgtcttagattatcctagactttccccaaacagcatttctyaagattgccagtgagaagtaccattttgggggtgcttattaacgatatcaatgcctggacccaactccatttcccaactctagaatccccagaaaaactg

SEQ ID NO: 18598 - DNA, 201 bp, Homo sapiens
aaaagtcctatagggtattctataggggctggggtgcacttaggggtccctgttgtcaacctcgtaagggccatggtgggggcagagttgtgatttggatytctctctgccttatcgtcttagattatcctagactttccccaaacagcatttcttaagattgccagtgagaagtaccattttgggggtgcttattaacga

SEQ ID NO: 18599 - DNA, 201 bp, Homo sapiens
ctacggcttggggcccagagagatggtagtcacacaccttgcagaattcctgaatctgaaagctgccccttttttttctgagacaaggtctcgcttcatcrcccaggctggagtgcagtggctgggaacacggctcactgcggcctcaacctccagagctcaattgatccgctgccctcagcctcccaaagtgctgggatt

SEQ ID NO: 18600 - DNA, 201 bp, Homo sapiens
atttagaacactaaatgaaaatatgcccgggagcagtgactcatgcctgtaatcccagcactttgggaggctgaggtgtaagaatcacattaatccagtargtcgaggctgcagtaagccatgatcataccacttcagcctgggcgagagtgagacctctggctcaaaaaaaaaaaaaaaaaaaaaaaaaaaagaaaaaaa

SEQ ID NO: 18601 - DNA, 201 bp, Homo sapiens
agagtttgctaactcctagcttaaacagtgggaaaatgtgaatattatttatattgtaatgataggatgaatgctgaaaatcattatacaaacaatatatracttctgtggaagcagtggttataaaagtaataataggtgggcacagtggctcacacctgtaatcccaacactttagggggccgaggcaggaggattgcc

SEQ ID NO: 18602 - DNA, 201 bp, Homo sapiens
aacaaatgatgggctaaccgtgtgtgtgcaggtgaagccactgctgcaggtgacacggcaggaggaggagatgcaggccaaggaggatgaactgcagaagrccaaggagcggcagcagaaggcagagaatgagcttaaggagctggaacagaagcactcgcaggtacctgtatggatgcatggctggggttgctggggaac

SEQ ID NO: 18603 - DNA, 201 bp, Homo sapiens
ggcttcatgacccccgcaccttctcttcccccctccctagggcttttgccaagaggcagcagcagctgaccgccatgaaggtgattcagaggaactgcgcygcctacctcaagctgcggaactggcagtggtggaggcttttcaccaaagtgagtgctctgccccagcccccttcccaggggcccccagccctggttcttc

SEQ ID NO: 18604 - DNA, 201 bp, Homo sapiens
atgacttgcctaaggtcacccaggtaactggcagaggagggatttgaacttgagcaacctggtcctggagcccattatgctattctgccaattgatgctayaggggagagaggcgttgcttctgcctggggttttgcaggacgtgtaggagttgtacagtacaaaatgccagggtgctttgccagtcacataaagaccagg

SEQ ID NO: 18605 - DNA, 201 bp, Homo sapiens
acatgggccctggtgtcaagtggacctacgttcaaatcctgcttctcctccatttcctatctgtgtgaaagcaggagcaattgtgggctggagcaatttamttcaaacctctctttgcctcagtttccccggatgggtgatggggataattaataactctctcattagattgctgggtagagtaaatgaaaagatctgtga

SEQ ID NO: 18606 - DNA, 201 bp, Homo sapiens
gtgcgtcagatccgagctcgccatccagtttcctctccactagtccccccagttggagatctgtaagtagtagttgtcattctgggggcagattgcagggsaggggggtgttaaaagtcctatagggtattctataggggctggggtgcacttaggggtccctgttgtcaacctcgtaagggccatggtgggggcagagtt

SEQ ID NO: 18607 - DNA, 201 bp, Homo sapiens
ctgtgtgaaagcaggagcaattgtgggctggagcaatttacttcaaacctctctttgcctcagtttccccggatgggtgatggggataattaataactctstcattagattgctgggtagagtaaatgaaaagatctgtgagcccaaagcctagtactgtgcaggccttcaacaaatatcaattccccttcccctgccctt

SEQ ID NO: 18608 - DNA, 201 bp, Homo sapiens
ttctcccggccacagcctccctgttatccctcccctctgcttccttcgccaggccaaggcgaacctagacaagaataagcagacgctggagaaagagaacrcagacctggccggggagctgcgggtcctgggccaggccaagcaggaggtggaacataagaagaagaagctggaggcgcaggtgcaggagctgcagtccaa

SEQ ID NO: 18609 - DNA, 201 bp, Homo sapiens
gaatttgcattaatcatcatccatccattcatccatctaccatccatccatcatctgtccatccatccattcatccatccatcatccatccatcaatgctstatccattcctccatcaattctccatccatctatccatcgtctatccatcaatcctctgtccattccatctatccatctatcctctatccatccatccat

SEQ ID NO: 18610 - DNA, 201 bp, Homo sapiens
ccaaactcgggataatgaagtcttggcaaagacctcaatcctcgtgacttgaatcaggcatttcaagttaatccaaaagtttgagttaactggtgccttcrgtcaatttaacctcgagtttatcaagcagcttccaagtgacttgacccataaaagaccttgattttgaaagaaaaatatcttgctgacgtctctccaaaa

SEQ ID NO: 18611 - DNA, 201 bp, Homo sapiens
caacacttgatcattgtgctgctatcttaattttgttttcaattttaggtatcatctattgactttcctccatgaaagatgaaatttagctcattcacccyctggatttgcccctatttcctcgttccaacacacatgcctcatatcagagtcccagtataattttatcttagttttgacaaactcagtgttcagagtttc

SEQ ID NO: 18612 - DNA, 201 bp, Homo sapiens
tcagccaggcctggtggcgcccgcctgtagtcctggctactcaggaggctgaggtaggaggatcacctgagtccagaaaggtcaaggtttcagtgagtcaygttcacaccaccgcactccagcctaggtgacagagtgagaccccatctcaaaacaaacacaaaaccccccacagttgcaaaataaaacataggcagcttg

SEQ ID NO: 18613 - DNA, 201 bp, Homo sapiens
tcccacgtacctggaatatcagtgaggcccagggtttccactaagactccaagctccagtttccccatctctaacatgagaatattgagtgcttctgtgcratctgtctaccctggaggaggtctggaagtaagctgggttctctgtctgcagacgtactctggcctcttctgcgtggtggtcaacccctataaacacctg

SEQ ID NO: 18614 - DNA, 201 bp, Homo sapiens
tgatggtggctattgatacccaataattggcaaggtgaagccactgaatcgtcggagaaggaggtttcggtggagtttgatcgctcttgtagtcattgaaraatacttttgtgttgtggggacttttgctttcctagaccagcagtccccaacctttttgacaccagggaccagtttcatagaagtcagtttttccatgga

SEQ ID NO: 18615 - DNA, 201 bp, Homo sapiens
tcaggcagtaattggagtgatagggagtggctgtaaatacagatgaagcccactactcacctcctgctgtgcagtaccagtcggtggtttgagatgcctgygctagaccacctcttaactgtgaggcaatgttgtaattgacaaggacaccctgtgttcatatatttgattcctcatggtctctaggttttaacacaaaat

SEQ ID NO: 18616 - DNA, 201 bp, Homo sapiens
acttagaaatgctcacttgacacatagtaagctccaataggaaatgactatcatgattgagcacagcagcatgtcttcagtcctagcactttgggaggccraggcaggaggatcacttgaggccaggagttagagaccagcctggccaacatagtgagctcttgtctctacaaaaaaataattagctggccacagtgcgtg

SEQ ID NO: 18617 - DNA, 201 bp, Homo sapiens
gccaaggcaggaggatcacttgaggccaggagttagagaccagcctggccaacatagtgagctcttgtctctacaaaaaaataattagctggccacagtgygtgagtctgtagtcctagctactctggaggctgaggcaggaggatggcttgagcccaggacttcaagaatgcagtgtgctatgatcgtgctatggtactc

SEQ ID NO: 18618 - DNA, 201 bp, Homo sapiens
acaaaaaaataattagctggccacagtgcgtgagtctgtagtcctagctactctggaggctgaggcaggaggatggcttgagcccaggacttcaagaatgyagtgtgctatgatcgtgctatggtactccagccttggcaacagagtaagaccctgtcacgaaagaaagaaagaaaatgaaaaccgtgaatatgcacatcc

SEQ ID NO: 18619 - DNA, 201 bp, Homo sapiens
atattttgccagaggatgttacatatcagtgcatgtaggaattccttgttcccttttttaaaaaattggtttttatttttgttaaaagtattcatgcagayggcttagagtcaagtaatttttgaaggcttattaagaaaaatagccatcctctgctacttctcaactcctttaattgattttttttttttttggtattta

SEQ ID NO: 18620 - DNA, 201 bp, Homo sapiens
tcattgtgctgctatcttaattttgttttcaattttaggtatcatctattgactttcctccatgaaagatgaaatttagctcattcaccctctggatttgmccctatttcctcgttccaacacacatgcctcatatcagagtcccagtataattttatcttagttttgacaaactcagtgttcagagtttccattattatg

SEQ ID NO: 18621 - DNA, 201 bp, Homo sapiens
atagatgtgttattccgtacaaggtatctgttatggatttgttatcattacttttccgtgggagggcagagattgaggcaaacatgcccatttatggaagygttttccatgaggccatccccggccccctcgtcagttacccagccttgcaccgcagcccggttggtcctggccctggggatttgtctaccatgtccctca

SEQ ID NO: 18622 - DNA, 201 bp, Homo sapiens
cagttacccagccttgcaccgcagcccggttggtcctggccctggggatttgtctaccatgtccctcacccattgaagaactagtggagaaaccctaaggmgaagagatttgggaggaaagtgggattcttttttcctaccccctcttattcagaggtttgatttttttgggtggggggtgggagggaattgtctcctttc

SEQ ID NO: 18623 - DNA, 201 bp, Homo sapiens
tgacagccttttcttgaaggggaagaaatgcttctactttaaataaatgtaccaagttacgagtgcaggaagggaacgagttttagacctgggttctcatygtggatgccccagtttttgctgatgaaccttgggcaagttactctacctctctgagcttccagttttttagctggaaactgagcataatcattttgacct

SEQ ID NO: 18624 - DNA, 201 bp, Homo sapiens
atttttagttacttccaattaggtcctgcacacttttcaaggttattcttatacaaagtgcctgtcctcagttaaaagtgagtagtttcgtttgagggacrtatagaagaaggaccatgagagcaatcaaacagctgatggtgctgagaaactcttgttcttggagaagactgtcaaacgttctaaatataactattaaac

SEQ ID NO: 18625 - DNA, 201 bp, Homo sapiens
tgagacagagtctctctctctctctctgtcgcccaggctggagtgcagtggcgcagtctcaactcactgcaacctctgcctcttggactcaagcaattctygtgtctgagcctcccgagtggctggaattagaggcgcccaccaccacactggcctaatttttgtatttttagtagagacaaagtttcaccatgttggcca

SEQ ID NO: 18626 - DNA, 201 bp, Homo sapiens
ggtgaaaccccgtctctactaaaatacgaaaaattagctgggtgtggtggcgggtgcctgtagtcccagctactcaggaggctgaggcaggagaatggtgygaactcaggaggtggagcttgcagtgagccgagatggcgccactgcactccagcttgagtgacagaccgagactctgtgtcaaaataaataaataaataa

SEQ ID NO: 18627 - DNA, 201 bp, Homo sapiens
gcaatttacttcaaacctctctttgcctcagtttccccggatgggtgatggggataattaataactctctcattagattgctgggtagagtaaatgaaaakatctgtgagcccaaagcctagtactgtgcaggccttcaacaaatatcaattccccttcccctgcccttcttctggccttagaaagcaagtccctagaggg

SEQ ID NO: 18628 - DNA, 201 bp, Homo sapiens
tacaaagaatacacaaattagtgagtcatggtggcacatgactgtagtcccagctactggggaggctgaagtgatcgtgccactgcactccagcaggggcracagagagagaccttgtctcaaaacataaatacataaaactttggtgacctagaactttattgattctataatggtgaactgggcttctacctcatccga

SEQ ID NO: 18629 - DNA, 201 bp, Homo sapiens
aagcctggttaatttttcttattttttatagagtcagggttgtgctgtgttgctcaggctggtcttgaactcctggactcgagtgatcctcctgcctcaasttcccaaatagctgggactacaggcatgtgccaccatgcctggctaatttttaaatctttttctagaggcagtgtctctctgtgttgctgagctggtctc

SEQ ID NO: 18630 - DNA, 201 bp, Homo sapiens
ctcagcctccccaagtgctgggatcacaggcatgagccaccacatccggcccaccttttcactctttgtatctgaattcttttctatgtcctcttggaagkaatagattgggcattggacctaggctggggacccagttccgctcactaccagagatgtggccttgggcaagttacttcccctctgggagcctctgtttca

SEQ ID NO: 18631 - DNA, 201 bp, Homo sapiens
tcgacccgccagatgccgacagcccccttccctccagttgtgacaaccaaaaatatctctagacattgtcagatgttccctggggtgggacagttgccctygattgagaagcactcctttcatgaatctctgtaacgtcccaggggttaaggtaccttttgggttcccggattcctccacgtgtccccctgtccctgggat

SEQ ID NO: 18632 - DNA, 201 bp, Homo sapiens
gatggagatgctggtatcactcggcccgtgggcttcagtgcaatgccattcagtaactgtggattgagcacctactgtatgccaggaaccacttggggtgrggacctggggataagtctgagagatgctgttattctcttctctgagcttccagacctgtggaagagcatgtagttgtcaaagaatccctcaaataaacag

SEQ ID NO: 18633 - DNA, 201 bp, Homo sapiens
gtaactgtggattgagcacctactgtatgccaggaaccacttggggtggggacctggggataagtctgagagatgctgttattctcttctctgagcttccrgacctgtggaagagcatgtagttgtcaaagaatccctcaaataaacagatgatgacacggtatgactaagagcttgggaggaaaagaagagcaggtttct

SEQ ID NO: 18634 - DNA, 201 bp, Homo sapiens
atcatctattgactttcctccatgaaagatgaaatttagctcattcaccctctggatttgcccctatttcctcgttccaacacacatgcctcatatcagartcccagtataattttatcttagttttgacaaactcagtgttcagagtttccattattatgactatgtaatgctatctagagtttacattattatgattat

SEQ ID NO: 18635 - DNA, 201 bp, Homo sapiens
ttagactgtctttgtacccctattcaggatgatgggacttgctatgagtccatttttatttgttatcctggacacttagtggcccaattaatctataaacktgtgtccacaaattctgggaaatgttgcaaattatttcattgatgctgtctttctccctgtgttctctgtttctttttcttagaagtctttttatttcca

SEQ ID NO: 18636 - DNA, 201 bp, Homo sapiens
ctaccccctcttattcagaggtttgatttttttgggtggggggtgggagggaattgtctcctttccacaggtcttgaatccaaacaggtgggtcttccacrttaggcacaagcgtgtaattccaagagcagatatatagtagatttttcttgaaaaccaagttcaatattcaatccagtagaatcatagaaggccataagc

SEQ ID NO: 18637 - DNA, 201 bp, Homo sapiens
caggtcttgaatccaaacaggtgggtcttccacgttaggcacaagcgtgtaattccaagagcagatatatagtagatttttcttgaaaaccaagttcaatwttcaatccagtagaatcatagaaggccataagcaaatttaaaaatcatctcccgcacctccccaaacctcactttctcatccgggaaatggggctaatga

SEQ ID NO: 18638 - DNA, 201 bp, Homo sapiens
cttccacgttaggcacaagcgtgtaattccaagagcagatatatagtagatttttcttgaaaaccaagttcaatattcaatccagtagaatcatagaaggycataagcaaatttaaaaatcatctcccgcacctccccaaacctcactttctcatccgggaaatggggctaatgagaataactcatgttttttgggcactt

SEQ ID NO: 18639 - DNA, 201 bp, Homo sapiens
ctcataaacctcgtttctatttgggctgaaagtggtgattagaatctttaatatattaagctaccattccttacctggattgggaatgttacaaattccarttacatttgtttagggttttgtttgtttgtttttgagacagagtcttgctctgtcgcccaggctggagtgcagtggtgcgatcttggctcactgcaacct

SEQ ID NO: 18640 - DNA, 201 bp, Homo sapiens
tgggaatgttacaaattccaattacatttgtttagggttttgtttgtttgtttttgagacagagtcttgctctgtcgcccaggctggagtgcagtggtgcratcttggctcactgcaacctccgcctcctaggttcaggcacttctccagcctcagcctcctgagtagagagtagctgggtttataggcgcccaccaccat

SEQ ID NO: 18641 - DNA, 201 bp, Homo sapiens
gagtagctgggtttataggcgcccaccaccatgcctggctaattttttgtatttttagtagagatggggtttcaccatattggccaggctggtctcgaacygctgacctcaagtgattcgcctggcttggtctcccaaagtgctcagattacaggcgtgagccaccgcgcctggcttatttagggtcttgatggcatactt

SEQ ID NO: 18642 - DNA, 201 bp, Homo sapiens
acaggctaatgaatagcttgtttgtgctcaagggatgaagcagtgagttgttaggacaggactgtgaatagggctgacatattcagatgtgtcaaacatcrctaatgccatctctgagtaaattaggcttcaaacagatcgggattctaatcctggttccccaacttttgcaagggagggccttgcatttacctttcaaga

SEQ ID NO: 18643 - DNA, 201 bp, Homo sapiens
caggactgtgaatagggctgacatattcagatgtgtcaaacatcgctaatgccatctctgagtaaattaggcttcaaacagatcgggattctaatcctggytccccaacttttgcaagggagggccttgcatttacctttcaagaccccgataggcttagcaggaaaatgggaataatagataatgccactctttcatcct

SEQ ID NO: 18644 - DNA, 201 bp, Homo sapiens
cgggaggctgaggcacgagaatcgcttgagcctcagaggcagaggttgcattgagccgagatcacaccactgcactccagcctgggcaaagagtgagactyggtctcaaaaaaaaaaaaaaaaaaggcattgcaaattgcaacttgttgcagtcacatatgacagcagtccccatcctcttggcaccagagactggtttcg

SEQ ID NO: 18645 - DNA, 201 bp, Homo sapiens
ggtactactggggacctgccaagcaggtgcatttagagtgcccagtgcctctccctgcgacacatttgatgcctccctacacctggaccaggccttgagcraggatttccactgcagaggtccttccagctggcgaattgtgttgcagatcaggttcagagaacttctgttttgcctgtgtggcattcattcattcgttta

SEQ ID NO: 18646 - DNA, 201 bp, Homo sapiens
agaggggctcgtggggccagagaggcagaaacacagccaactatggttgggctgggtcgaggtgaaggagaagtggctgaataatgtgggaggaagagccmgatgctgaagccccacgaccctgccgtgagatgtgcggctgcctgcaccagtcttaccttcactccatcgtcataccctggcttgcttagaaagctttta

SEQ ID NO: 18647 - DNA, 201 bp, Homo sapiens
aacttttaagatacattattatttagtaaatatgatttagtttacaagtgactcagggttattctaaaaatcagtttgagaggccaggcacggtggctcaygcctgtaatcctagcactttgggaggctgaggcaggtggatcacttgaggtcaggggtttgagaccagcctggccaacatcgtgcaactttgtctctact

SEQ ID NO: 18648 - DNA, 201 bp, Homo sapiens
agctgatgaccacgctacgcaacaccacgcccaacttcgtgcgctgcatcatccccaaccacgagaagagggtgaggcccgccgcccagaccctggggctyccagaagccagggctgtcccaagcggtcacagcgtccccagggcgccctctgcccccacctaccccgaggaccccattttccatgtggggaaggctatct

SEQ ID NO: 18649 - DNA, 201 bp, Homo sapiens
taccacccacgggacgcctattggagtccccagggttgcgctccagcctgaaatggatttctccggttcagaatgaacccctgcacccttcaaagcatccrctcctggtacccttgactggaacaacctagacagagatgtctgtcccatctggctgagtgttttaggactgtcaggccccaaagcttccctggctcgatg

SEQ ID NO: 18650 - DNA, 201 bp, Homo sapiens
ttgaaaaaagtgaccttcctagggagcagatgtcctagctattagagagctcagacagttgcttctcttctgaaatcctcctgtaaatctgaacattagcrtcagggtctaagaggaggtaggagataggagagaacctgtgggttaagggcagagttttgtgacaacatccatccaaggtagaactgtcaggacctaggt

SEQ ID NO: 18651 - DNA, 201 bp, Homo sapiens
tatccgataccattttatgtaacaaaacatgaattgagtgccaactgtgtaccaggcacacacctcctccaagaaatacttagtaagtacctactgtgtayaattactctggtaggcacttttacatgtaccaccattctctttgtttttttctcatttgctgtttttattaagtgcctactgtataccaggcactcagcg

SEQ ID NO: 18652 - DNA, 201 bp, Homo sapiens
tggatcacctgaggtcaggagttcaagaccagcctggacaacatggtgaaaccccgtctctaccaaaaatgcaaaaaaaaattagccgagtgtggtggtgygttgtctataatcccagccactcgggaggctgaggcaggagaatcgcttgaacccaggaggcggaggttgcagtgagcagagattgtgccactgttctct

SEQ ID NO: 18653 - DNA, 201 bp, Homo sapiens
atgtaacaaaacatgaattgagtgccaactgtgtaccaggcacacacctcctccaagaaatacttagtaagtacctactgtgtacaattactctggtaggyacttttacatgtaccaccattctctttgtttttttctcatttgctgtttttattaagtgcctactgtataccaggcactcagcgagtctcacaggattgc

SEQ ID NO: 18654 - DNA, 201 bp, Homo sapiens
tttattaagtgcctactgtataccaggcactcagcgagtctcacaggattgcgatgaatagttcagatatggttccagccttcatgaagctggttcttccmactgaataacagagagtaagtgaggcagggggtactaccttcccatgcacactcccccaggctccaaagcaaaaagtttttgcctgagcccaacagggca

SEQ ID NO: 18655 - DNA, 201 bp, Homo sapiens
aacaatggttttattgtgcaaaagaagcggttgtctccgtaggagggtcagaaagatattttagtgagaaaagatgaaggaaaaattgcctctgcattccwggagaagggggtctctgaactgttgctcgctgagatggggccctgtgaaagactctttgcagaaagctctgctctgctgagcaaatgcacatggtggtcc

SEQ ID NO: 18656 - DNA, 201 bp, Homo sapiens
acaatggttttattgtgcaaaagaagcggttgtctccgtaggagggtcagaaagatattttagtgagaaaagatgaaggaaaaattgcctctgcattccakgagaagggggtctctgaactgttgctcgctgagatggggccctgtgaaagactctttgcagaaagctctgctctgctgagcaaatgcacatggtggtccc

SEQ ID NO: 18657 - DNA, 201 bp, Homo sapiens
gagatggaggttgcagtgagccaaagtcacaccactgcactccaacctgggcgacagagtgaggctcttgtctcaaaaaaaaaaaaaaaaaaaaaaaaagsgtaaaaatctaaagtcataaaggttaggttctaagcctggctaattacaaacagatttttacctccatgagtggcaggtgagacattggaagagtcataa

SEQ ID NO: 18658 - DNA, 201 bp, Homo sapiens
tggtctgggtcactctgtattacttacctgatctccaaaaacatttgggtttttgtctctggtccaaaatctttagccaatggcttggcagtaaaatcctragggaagctgttgaccaggtgaggtgatgtgcaaatcctatactctctgggctctgggatatttaatttactatttatttatttattttcaagacagagt

SEQ ID NO: 18659 - DNA, 201 bp, Homo sapiens
catcttgctgtcttttgaccaaagcagattttgcacgtcgtaactgtcagagacatcaaagccagagggaatccagcctgctccaagctctccttttttgkacagagactgaatctttgcacttgatcttgtttgtgtttttaagtctgaggttagacagggtcccaggcaatggaggcgtgcgtgtccttttatttttct

SEQ ID NO: 18660 - DNA, 201 bp, Homo sapiens
cgtgtccttttatttttctgttgtagcttttgctattttttctgacttttaaggcaactcatccacatggcaattaggaagagcccacttagggctgggcrcagcggctcatgcctgtaatcccagcactttgggagaccgaggcaggcagatcacttgaggtcaggagttcaagacctcagcctggacaacatggtgaaa

SEQ ID NO: 18661 - DNA, 201 bp, Homo sapiens
tgggctcacacctgtaatcccagcactttgggaggccaaggtgggtggatcacctgaggtcaggagttctagacaagcctggccaacatggtaaaaccccrtctctactaaaaatacaaaaattagctgggcatgatggtgtgcgcctgtaatcccagctacttgggaggccgaggcaggagaatcgcttgaacctgggag

SEQ ID NO: 18662 - DNA, 201 bp, Homo sapiens
cttagggctgggcgcagcggctcatgcctgtaatcccagcactttgggagaccgaggcaggcagatcacttgaggtcaggagttcaagacctcagcctggrcaacatggtgaaaccccgtctctacaaagaatacaggaaaatagctgggcatggtggcaggtgcctgtggtcccaactatttgggaggctggggtgggag

SEQ ID NO: 18663 - DNA, 201 bp, Homo sapiens
ggctcatgcctgtaatcccagcactttgggagaccgaggcaggcagatcacttgaggtcaggagttcaagacctcagcctggacaacatggtgaaaccccrtctctacaaagaatacaggaaaatagctgggcatggtggcaggtgcctgtggtcccaactatttgggaggctggggtgggaggatcacttgagcctggga

SEQ ID NO: 18664 - DNA, 201 bp, Homo sapiens
cctgtaatcccagcactttgggagaccgaggcaggcagatcacttgaggtcaggagttcaagacctcagcctggacaacatggtgaaaccccgtctctacmaagaatacaggaaaatagctgggcatggtggcaggtgcctgtggtcccaactatttgggaggctggggtgggaggatcacttgagcctgggaggcggagg

SEQ ID NO: 18665 - DNA, 201 bp, Homo sapiens
aagccccacgaccctgccgtgagatgtgcggctgcctgcaccagtcttaccttcactccatcgtcataccctggcttgcttagaaagcttttacagaactsagcagagattcagatctacctggaagtatggattaagtgcttgttgtgtgcacggcactgggagagatgtcccaaacaaagaggatggaagtcatattcc

SEQ ID NO: 18666 - DNA, 201 bp, Homo sapiens
gaggatatattttttatagatgggggtctcactctgtcacccaggctgcagtgcagtggcatgatcatggctcactgcatccccgacctcctgagcttaartgatcctcccacctcagcctcctgagtagctgggactgcaggtgcacactatcacaaccggttaatttttgtatgtttgctagagacaaggtttcaccat

SEQ ID NO: 18667 - DNA, 201 bp, Homo sapiens
attttttgtatttttggtagaaacagggtctcactgtgttgcctaggttggtcttgaactcctgagtgtgagcaatctgccctccttggtctcccaaagtrctgggatcataggtgtgaaccactgcgcccaacaatcctgtaccttcaaagaatattcctctgcagcacccccagacattacataccattgtccctgagt

SEQ ID NO: 18668 - DNA, 201 bp, Homo sapiens
gaggttgcagtgagccaagatcacacactgccctccagcctgggtgacagagcgagactctggctcaaacatacgtgcgtgtgtgtgtgtgtgtgtgtgtrtatgtgtgcgtgtgtatacccatgtacaccatgagaaagtctgagaatcactgctttccagattggacatgggctgtggtagcccgggcactgctagctg

SEQ ID NO: 18669 - DNA, 201 bp, Homo sapiens
tgtggttgtccaggcaggagaagatagtggagacaatggtggtgaagagaagtgggggggttgggagatatttgggagctagaagcaatcaaactgctgayggacaggaagtgagggagacgaggtgatgaggaggaagccccaggttccagccaggcgatgctagtgtcaccaagaaccagagagatcatgaggcagcca

SEQ ID NO: 18670 - DNA, 201 bp, Homo sapiens
tggcctggccaggtgggtcatccaggtaggaggtttggggctttgctgcgccatggtttctggccccagggatccactgccctctttgacctttgcagtcyggcaagctggatgcgttcctggtgctggagcagctgcggtgcaatggggtgctggaaggcattcgcatctgccggcagggcttccccaaccggatcgtct

SEQ ID NO: 18671 - DNA, 201 bp, Homo sapiens
gatcagcaaaacagatgcagcagtccctgcagtggggaaaactcagtccatgaacattcacaccagcagggggtgctgtctcgccttttaaccagggagcycctctgtgtccttctcaaggctgcccttgtccatttcaccttcttccaattcaaatcttgaaaactcacctctaaggcgaatgggggtgaggagatacag

SEQ ID NO: 18672 - DNA, 201 bp, Homo sapiens; identical to SEQ ID NO: 3114

SEQ ID NO: 18673 - DNA, 201 bp, Homo sapiens
ggccactgccccctgccctcgaacatgactgggaagaacatcttgactcatcaaaaccagtatcttaagaaaaatacaggatttccttgattttttgagtkaaaacacaaggtcttgtccaatgagtcagcaaacactttccacaaaacgtcagatggtggctgggtacagtggctcacacctggaatcccagcactttgg

SEQ ID NO: 18674 - DNA, 201 bp, Homo sapiens
aaaccagtatcttaagaaaaatacaggatttccttgattttttgagttaaaacacaaggtcttgtccaatgagtcagcaaacactttccacaaaacgtcaratggtggctgggtacagtggctcacacctggaatcccagcactttgggaggctgagatgggaaaatcacttgaggccaggagttggaggccagcctagcc

SEQ ID NO: 18675 - DNA, 201 bp, Homo sapiens
ctgcaaaggctctgttcaacacaaacgatgccgtataccaccaactccatgggatcagacagatttgggagacaggaaacatggaaacaaaggactccatmttgtgaccagatgctaatatgccttgaatgacgcacaaacacatcccggatacatttctaaaaacctggcttgaatagaaattttcaaaaagattttttc

SEQ ID NO: 18676 - DNA, 201 bp, Homo sapiens
aacttgacctgtggggttctgagtgttcgcaagaatctccccgccccacctcccatcctctgtaccatctgcctcctgcttgcccacagcatggggttaamggctgaagttgggcagcaaagcctgaactgtgttttcctgttggcagggcaaattcatccgcatcaacttcgacgtcacgggttacatcgtgggagccaa

SEQ ID NO: 18677 - DNA, 201 bp, Homo sapiens
gccgtgaagctgcaggcacactccagaaattagtgtgttcttttaactcgtgtcccaaagagacagcagttcctaacatgcagtgatgagtggacacaccrtggtgcgttggaaatcccacgttcacgtctttgacaaggaagcctcctacaatgatcttgtgctttaattttacttgatggtcaccctggttacttcatt

SEQ ID NO: 18678 - DNA, 201 bp, Homo sapiens
tgctgatctagccccatcatcccgcaccatcatgcttagtgctgtggaaatccacccagtacagtagcccagcctcctagctgccctttcccatcaccccrgaccctgtgatctccatgccaccctcacctgccctcccctctgctctccctcctgccaccccgcatcgcggagaagctctcctgaaattaattagtgtgg

SEQ ID NO: 18679 - DNA, 201 bp, Homo sapiens
gaacagagggcatggaagacagctttgccacttgttagctgtatcatcttgagaaaggacttctcttctctgagcctcagtttccccttattgaaaacacygataatagttgcacttatttcctagcatactttgtgaggcttcagtgagacaatttatatcaatcatttcacacaggaatgaatcataaatcataggatc

SEQ ID NO: 18680 - DNA, 201 bp, Homo sapiens
acctcagctactagggggtggcattatccattatttaaatttccagggtggggcaaagtggctcatgcctgtaatcccacactttcggaggcagaggcggrcggattacctgaggtcaggagtttgagaccagctcggccaagatagtgaaaccctgtctccccaaaaatacaaaaattagccaggtgtggtggctggcgc

SEQ ID NO: 18681 - DNA, 201 bp, Homo sapiens
acttgaggccgggagttcaagaccagcatggccaacatggtgaaaccccgtttctcactaaaaatacaaaattagtgggtgtagtggcacactcctgtagycccagctacttgggaagctgagataagagaatcgcttgaacctaggaggcggaggctgcggtgagccgaaattgcaccactacactccagcctggacaag

SEQ ID NO: 18682 - DNA, 201 bp, Homo sapiens
taaatttccagggtggggcaaagtggctcatgcctgtaatcccacactttcggaggcagaggcgggcggattacctgaggtcaggagtttgagaccagctyggccaagatagtgaaaccctgtctccccaaaaatacaaaaattagccaggtgtggtggctggcgcctgtcatcccagctacttgggaggctgaggcagga

SEQ ID NO: 18683 - DNA, 201 bp, Homo sapiens
gggagttcaagaccagcatggccaacatggtgaaaccccgtttctcactaaaaatacaaaattagtgggtgtagtggcacactcctgtagtcccagctacytgggaagctgagataagagaatcgcttgaacctaggaggcggaggctgcggtgagccgaaattgcaccactacactccagcctggacaagacagggcaag

SEQ ID NO: 18684 - DNA, 201 bp, Homo sapiens
aatcacttgaacctagaaggtggagtttgcagtgagctaagattgcaccactgcactccagcctaggcgatagagtgagactctgtctcaaacaataaaawtaagtttccttaatggctggctttcaggaacataggctatgaggtggagcaatttttggtaaagggggaatgctgaatggattttttatgtaccagcaaa

SEQ ID NO: 18685 - DNA, 201 bp, Homo sapiens
atttacaaaaacaacaggggaccagatttgccaacctgtgatataagccttatatattgattcaactaaaaatagctgggggtggctgggcacggtggctsacacctgtaatcccagcactttgggaggctgaggcgggtggatcacctgatgtcaggggttcaagactagactagccaacatgatgaaaccccgtctcta

SEQ ID NO: 18686 - DNA, 201 bp, Homo sapiens
tgaaggagggatgtcaaccacgcatagatcctggtggccatatgtcctcacttagccagcaactcagttctttggagcccagcagcaagaggtagaagggrctgtaagccagtgtttccaggacagcccctgcagctatggtcagagagtcaggaacggggggccggacaggcctatagagtgtgttgtctctgtccctct

SEQ ID NO: 18687 - DNA, 201 bp, Homo sapiens
ttgatgtcagaccttggcactcacatcctatgttaatctcatatagtctggcatgtcaagaagcagacctggggacatggatagaaggtgtttgatgtctstgcaacataactgtctggtcccagaaaagtttttggccacattgtaagagaggaaaccaagggacctgggggttcattctgctgggtctctccctggaag

SEQ ID NO: 18688 - DNA, 201 bp, Homo sapiens
ggtggatcacttgaggtcaggagtttgagaccagcctggccaacttggcgaagccccgtctctactaaaaatacaaaaattagctgggtgtgatggtgcaygcctgtaatcctagttactcgggaagctaaggcaggagaatcgcttgaacccagaggcagaggttgcagtgagccaagattgcaccactgcactccagca

SEQ ID NO: 18689 - DNA, 201 bp, Homo sapiens
gagataagatcaggataattagcatatccatcatctcaagcatttgccattacttttattttgctacttcctatataatgacatttatcatctctttgtgytgggaacattcaatgtccttcttctagctcttggaaacgatgtaatattttattgttcactttactcatcctatagtggatagaacattcttaatgagtt

SEQ ID NO: 18690 - DNA, 201 bp, Homo sapiens
gccttcagcttcgcagctgtgtgttgtctcagtatccatttcttttctgcccaatgcgcccctctgcccaccccaatttttaaacccttgcacatttccaygagattcttgcaaaatctggaggcttggatatctttgtgcaaagctttcattgaaaccaagatcaggatgacaaatagacctcatctcttgacccactgt

SEQ ID NO: 18691 - DNA, 201 bp, Homo sapiens
acaggtgtgagccaccgtgcatggcctcctctggcaactcttgattgcctgtcaccatagatatgccttttctattttgccattactttttttttttttckagacagagtctcgctctgtcgccgaggctggagtgcagtggcgcgatctcagctcactgcaacctccgcctcctgggttcaagcaatcctcttgcctcag

SEQ ID NO: 18692 - DNA, 201 bp, Homo sapiens
gtctcaccatgttgcccaggctggtcttgaactcctgacctcaggtgatccactcacctcagcctcccaaggtgctgagattacaggcgtgagccaccgcrcccggccgccattaccttctatctcaataaccacacttacgtttgcaccagcctaatagtttttcgtattgaaggagtaatagagcgtgtggcctttctg

SEQ ID NO: 18693 - DNA, 201 bp, Homo sapiens
gcaccaacaccaagaccttcagcttccgtggttttcctaaagcaacatcttgactaccccctgggctgacggcagcggcgatgaagacatgtgtgaaggcrgcttcccaaattccaggcgcttccccaaccttcagacagagcaaaccaaattaagctgacataacagctgtgacaaactggctagcaccggggcccagag

SEQ ID NO: 18694 - DNA, 201 bp, Homo sapiens
cccggccgccattaccttctatctcaataaccacacttacgtttgcaccagcctaatagtttttcgtattgaaggagtaatagagcgtgtggcctttctgrtttgtttcactgagcatgatgcttttgagactcatttattttattgcataatttctttccttttactgagtttccagttatataccttgggttgtttgtt

SEQ ID NO: 18695 - DNA, 201 bp, Homo sapiens; identical to SEQ ID NO: 3111

SEQ ID NO: 18696 - DNA, 201 bp, Homo sapiens
aacgtattggtaactgttctcagatctctctttgggaaggaaatgggtcttcagagcctggctccacctcagaggcctctttaagagtagaaggtgatggrtaatgtctgcttaatcacatctagttctttgatgacctctgtatcttttgggtttctctggtggtaaacaagagagactgactctgtcatctagtagagg

SEQ ID NO: 18697 - DNA, 201 bp, Homo sapiens
caccccccaccccagctgtgacaatcagcagtgtctccagacaatatcccctagtggggatcggtgggggcaacattgtccctggctcggaaccactgatsgaatttattatgacaacatatccctttgccacaaaaacaaatgatgggctaaccgtgtgtgtgcaggtgaagccactgctgcaggtgacacggcaggagg

SEQ ID NO: 18698 - DNA, 201 bp, Homo sapiens
gtaatcccagtgctttcagaggccgaggcagttcgatcagttgaggtcaggagttcaagaccagcctggccaacatggcaaaatcttgtttctactaaaamtacaaaattagctgggcatggtaacaggtgcctgcctgtaatcccagctactcgggaggctgaggcatgagaatcgcttgaatccaggaggcagaggctg

SEQ ID NO: 18699 - DNA, 201 bp, Homo sapiens
cacaggcctgtggaggtgcatccagggatatgtgtccctgctgggacagatgatgagacgggggcttggagagggttggtcatctgatcaaggccacacarctgggattgggactggaacacagtgagcccactctgttctattgccctgccttgcatgtgctaaccccttttctcctaacagcaagcctgaatggaggat

SEQ ID NO: 18700 - DNA, 201 bp, Homo sapiens
attaatccagtaagtcgaggctgcagtaagccatgatcataccacttcagcctgggcgagagtgagacctctggctcaaaaaaaaaaaaaaaaaaaaaaaraaaagaaaaaaaaaaaaaaaggccagttgcactggctcaagcctataatcccagcactctgagaggtcgagatgggaggattgcttgaggtcaggaattt

SEQ ID NO: 18701 - DNA, 201 bp, Homo sapiens
aaaatacaaaattagtgggtgtagtggcacactcctgtagtcccagctacttgggaagctgagataagagaatcgcttgaacctaggaggcggaggctgcrgtgagccgaaattgcaccactacactccagcctggacaagacagggcaagagcatgactctgtctcaaaaaagaaaaaaaaaaaaaagaccaatcaggac

SEQ ID NO: 18702 - DNA, 201 bp, Homo sapiens
agtgagaccctgtctctatgaaaaatgcaaacaaaaattagctgggtgtggtggcctgcatgtgtagtcccagctacttggtaggctgaggtggaaggatygctggagcccaggaggcggaggttgcagtgagccgagatcacaccaccgcagtctagcctgggtgacagagtgagaccctgtctccaaaaaaaaaaaaag

SEQ ID NO: 18703 - DNA, 201 bp, Homo sapiens
cctgcatgtgtagtcccagctacttggtaggctgaggtggaaggatcgctggagcccaggaggcggaggttgcagtgagccgagatcacaccaccgcagtytagcctgggtgacagagtgagaccctgtctccaaaaaaaaaaaaaggccaggcatgattgctaacgcttgtaacccccagcacttgggaggtcaaggtgg

SEQ ID NO: 18704 - DNA, 201 bp, Homo sapiens
tgagcagccaatatcgcaccactgcactccaacctggacaaaggtgaaactccctctcaaaaaaaaaaaaaaaaaatagctggaggaaaggaaaggtagtrtaagaaagctgcatttttgcctaccatagcaggaagtcactagatactatctaaacttgacatatccagaaatcgcctattacagcgattgtgctttgcc

SEQ ID NO: 18705 - DNA, 201 bp, Homo sapiens
gaaatcgcctattacagcgattgtgctttgcctctggtcttccaataggccaaaagcacctgttacttttggcactgaggactggtttcctggaagaaaakttttccacagactgggcgggcagggttggggggatggtgtggggatgattcacgtgtattacatttactgtgcactttattattacattgtaatatacaa

SEQ ID NO: 18706 - DNA, 201 bp, Homo sapiens
gtgagccgagatcacaccaccgcagtctagcctgggtgacagagtgagaccctgtctccaaaaaaaaaaaaaggccaggcatgattgctaacgcttgtaasccccagcacttgggaggtcaaggtgggaagatcgcctggaaaattaatctgaaaactcacctctagaaatctcaatgagaagcagactacagtctcagag

SEQ ID NO: 18707 - DNA, 201 bp, Homo sapiens
gatcgtcttccaggagttccgccaacggtaagtcccaaggtctggcccaggtagggcagggggtgagcgggactgggtggaggaatggatgctggaggtayccggggtgacttctgctctgtgtttcaagctacgagatcctggcggcgaatgccatccccaaaggcttcatggacgggaagcaggcctgcattctcatgg

SEQ ID NO: 18708 - DNA, 201 bp, Homo sapiens
ctccatctcaaaaaaaaaaaaagttcaggaattcaagcttcaggtacagtgagatctaggtgttcaaaagatttttctagaacctaatttcttgtcttctrtctctctcgactacattgtttctctataggatgcagtttgttgacagcaacatagctgggttccagcccttatattctttgggtttatgtccaaagaaca

SEQ ID NO: 18709 - DNA, 201 bp, Homo sapiens
cagcctcccaaagtgctgggattacaagtgtgagccactgagcctggccctgattttctttaggcaagaaaattaatgacactgttagagatcagatctgyactgtcccatcgggtggctggtttcaggaacatagtctgggctagaagttagtgccagtttctcaaaggttctacagatttaaaaagaaaaaaaagggct

SEQ ID NO: 18710 - DNA, 201 bp, Homo sapiens
tggcctcatcaggaacatgtgggcagggtttaggggagggggagtgatcgaggcagtggatttactcaggcttttcctggaggggttgctctggtgatcarttgatattgatcaaaatcatccaaccaatggccaagaaacacactgggtcttgagaacaggacagctcagaaagaaattcttggtcgggacactgtgttt

SEQ ID NO: 18711 - DNA, 201 bp, Homo sapiens
ggttctacagatttaaaaagaaaaaaaagggctggttgcagtggctcacgcctgtaatcccagcactttgagaggccgaggtgggtggatcacaatgtcaygagatcaagaccatcctaacacagtgaaaccccgtctcgactaaaaatacaaaaaattagctgggcatggtggcacacgcctgtaatcccagctactcag

SEQ ID NO: 18712 - DNA, 201 bp, Homo sapiens
tgagatggaggcttgctattgtcacccaggctggagtgcagtggcacgacctcggctcactgcaacctctgcctcctgggttcaagcaattctcttggctsagcctcctgggtagctgggattataggcgcccaccaccatgccccactaattttttttgtatttttagtagatactgggtctcgccatgttggccaggct

SEQ ID NO: 18713 - DNA, 201 bp, Homo sapiens
aggcttgctattgtcacccaggctggagtgcagtggcacgacctcggctcactgcaacctctgcctcctgggttcaagcaattctcttggctgagcctccygggtagctgggattataggcgcccaccaccatgccccactaattttttttgtatttttagtagatactgggtctcgccatgttggccaggctggtcttaa

SEQ ID NO: 18714 - DNA, 201 bp, Homo sapiens
ctggcttctgtctttgtgctttccaagtttacaatgatcaacctacaaaaatacttaggcaggcaaggacccatgttcaaagatgcacaccatcattcackaatgtggaaaactggaaacctcaatgtcaacagaggactgaatggaaaacgatgcagttgttaagaactgtaagtactaatatggaagaaagctcaggat

SEQ ID NO: 18715 - DNA, 201 bp, Homo sapiens
ccagcacaccaggatgctgccagccgtcaccacccttgctgtgttgtgtctcctcactggtttacttctttgctgtctgctaattctgccccaaggttcayctcttatggcctgggagtggtggcattcttttgtcatttctggaattacatttaactataccagaaagtgcaaaccaatggttcctgagcccacaggaga

SEQ ID NO: 18716 - DNA, 201 bp, Homo sapiens
ttgggtttctttaattctgcacacatatctgtaaacactttctttattaaatgttcctgagttaatatcttaagcacactgttcattttctgtgccacctgttaaatgatgagcatttaatatgattgtcagcatccaaaaaagatcctgcgtagtgcttagttcggtgcccaacacatagtaagtgctcaatgaacggtg

SEQ ID NO: 18717 - DNA, 201 bp, Homo sapiens
cattagaaatgtgttgggagggctgggcacagtggctcatgcctgtactcccagcactttgggaggccgaggtgggcagatcacctgaggtcagaagttcragaccacgctggccaacatgatgaaatgccgtctctactaaaaatacaaaaagtagccaagggtggtggtgcgcatctgtaatcccagctactggggagg

SEQ ID NO: 18718 - DNA, 201 bp, Homo sapiens
gtgagccaagactgtaccactgcactccagcctgggtgacagaataagactctgtctcaaaaaaaaaaaaaaaaaggaaatgggaggctgaaggtttgatmgagggagattgcaagatgaggtggaatcattccaaggtgggttcacatctcagcccttgaagaggttatttcctctctcgaagccttggttttcctatcc

SEQ ID NO: 18719 - DNA, 201 bp, Homo sapiens
cttttttttttttttttgagatgggggcttactctgtctttgaggctggagtgcagtggttctatcgtagctcagtacagcttccaagtcctggattcaarcgatcctctcacctcagcctcctgagtagctgtggaccacaggtgtgcaccaccacacctggctaattaaaaaaaaaaaaaaaaacttctgtagagactg

SEQ ID NO: 18720 - DNA, 201 bp, Homo sapiens
tatattgcccaggctggtctcaaactcctggcctcaagccatctcctgccttgacttttcacggcgctgggattacgggtgtgagccactgtgcctggccrtaactattaaatatgtcctccaatccaagtgctgtacattgacacattgtattttatttaacacagcatcccctgagttaaaaatgtttgccccttttag

SEQ ID NO: 18721 - DNA, 201 bp, Homo sapiens
ggcctgaaccaccacgcccagccagtatgttggatatttctaaagaggcccgtctgtagggagctagagggaaaattggactctttggggcccaggtcttycatctaagacgtatcatcaccatctagggagtttcaggacaggcctgtgtattcatctcacctgctgtcctcaaatagaaatcagaaaaaaaaagggcat

SEQ ID NO: 18722 - DNA, 201 bp, Homo sapiens
ccttcggcagccccaagcatctagctagaatttggtaatactgttttccttgtatttatatttataattgccatctatttatggcaagtgaagatgatttktcactgaagatagagaaagttttctattaaaacaaatgtaaggaaagagaaggaagtaaatttaaagaaaatgattaagcaaataatggagcagatggta

SEQ ID NO: 18723 - DNA, 201 bp, Homo sapiens
catggtgaaaccctgtctctactaaaaatacaaaaattagctgggcgcagtgacacatgcctgtattcccagctactcgggaggctgaggtgggagaattycttgaacccggggagatggaggttgcagtgagccaaagtcacaccactgcactccaacctgggcgacagagtgaggctcttgtctcaaaaaaaaaaaaaa

SEQ ID NO: 18724 - DNA, 201 bp, Homo sapiens
aacatggtaaaaccccatctctgctaaaaatacaaaaattagctgggcatggtggcacatgcctgtaatcccatctactcaggaggctgaaacagaagaawctcttgaacccgggaggtggaggttccagtgagcagagatcctgccactgcactccagcctgggtgacagagcaagactccatctcaaaaaaagaaaaga

SEQ ID NO: 18725 - DNA, 201 bp, Homo sapiens
agatccaatgtgatcaggcccctgcatagttttctacacatttcttaccctaccacctctcattcacttatgtcccagccacactgccttctttctcttcyttgaacacccaagcctggcagggtgctgtggctcatgcctgtaatcctgatactttgggaggccacagcgggtagatcacttgaagccaggagttcgaga

SEQ ID NO: 18726 - DNA, 201 bp, Homo sapiens
tggcctcccaaagcactgggattacaggtatgagcacccggccaaaagagaaggcagtttccaagtgctccttaatttttcgagttaaggaaaaaacacasatatcaccctaatttcccaaatttcctagaggaaaaacggtaaaaggaaagagacatacatagggttcagagcagggcttcgagtcagagctctgagtgt

SEQ ID NO: 18727 - DNA, 201 bp, Homo sapiens
gagggcatcgagtggaacttcatcgactttgggctggacctacagccctgcatcgagctcatcgagcgaccggtgaggggcacgtgggcgtgcggggctcygtcacaccttgtacacgtgtgtggcctctgtggagccgacgtggaccccacactctccccatgcacatagcattcccccacccaatccatcacccagtcc

SEQ ID NO: 18728 - DNA, 201 bp, Homo sapiens
aaaaaacaaaaacaaaaatcaaacgggcacggcggtgcgtgcctgtagtcccagctactcagaaggatgaagcaggaaaaatcacttaagcctgagaagcrgaggctgcagtgagccaagatcactgcattccagcctcccagcctgggcgacagaacaagaccccatctcaaaaaaataaaaagggggtagagtgttaat

SEQ ID NO: 18729 - DNA, 201 bp, Homo sapiens
gttcaagcgattctcctgccttggcctcttgagtagctgggattatagccatgtgccaccacacccggctaatttttgtatttttagtagagacagagttycatcacgttgtccaggctggtctcgaactcttgacctcaaatgatctgcccgccttggcctccaaaagtgctgggattacgggcgtgagccaccatgcct

SEQ ID NO: 18730 - DNA, 201 bp, Homo sapiens
ttttgtatttggtcagtgacatttcaaatttgggaggttttatattcaacaagaggatttttgaccaggcgcggtggctcacacctgtaatcccagcactwtgggatcagccgaggtgggcggatcacttgagtccaggaatttgataccagcctgggcgacatggcaagactgtgtctccacctaaaatacaaaagttag

SEQ ID NO: 18731 - DNA, 201 bp, Homo sapiens
gcaagaattatgaactcggccgggcgcggtggctcatgcctgtaatcccagcactttgggaggccgaggcgggcggatcacgaggtcaggagatggagacyatcctggctaacacggtgaaaccccgcctctactaaaaatagaaaaaatcagccgggcgccgtggcaggcgcctgtagtcccagctactcgggaggctga

SEQ ID NO: 18732 - DNA, 201 bp, Homo sapiens
gaatggcttgaacccgggaggcggagcttgcagtgagccgagatggcgccactgcactccagcctgggtgacagagcgagactcaaaaaaaaaaaaaaaamaagtaaaactcttgggtaggtgggtgggttaaggagagataacaaacccagtctcagacattcacagcttgacatgtccatgacacaccaagatgcaata

SEQ ID NO: 18733 - DNA, 201 bp, Homo sapiens
tggctcacacctgtaatcccagcactttgggatcagccgaggtgggcggatcacttgagtccaggaatttgataccagcctgggcgacatggcaagactgygtctccacctaaaatacaaaagttagccaggtgcctttagtcccagctactccggaggatgaggtgggagaatcacttgagcccacgatgaagaggttgc

SEQ ID NO: 18734 - DNA, 201 bp, Homo sapiens
ctagaagttagtgccagtttctcaaaggttctacagatttaaaaagaaaaaaaagggctggttgcagtggctcacgcctgtaatcccagcactttgagagsccgaggtgggtggatcacaatgtcacgagatcaagaccatcctaacacagtgaaaccccgtctcgactaaaaatacaaaaaattagctgggcatggtggc

SEQ ID NO: 18735 - DNA, 201 bp, Homo sapiens
taacacggtgaaaccccgcctctactaaaaatagaaaaaatcagccgggcgccgtggcaggcgcctgtagtcccagctactcgggaggctgaggcaggagratggcgtgaacccaggaagcggagcttgcagtgagtcgagatcgcgccactgcaccgtctgcctgggcgacaaggcaaaactctgtctcaaaaaaaaaaa

SEQ ID NO: 18736 - DNA, 201 bp, Homo sapiens
atcagccgaggtgggcggatcacttgagtccaggaatttgataccagcctgggcgacatggcaagactgtgtctccacctaaaatacaaaagttagccagrtgcctttagtcccagctactccggaggatgaggtgggagaatcacttgagcccacgatgaagaggttgcagtgagccaagatcacgtcactacactccag

SEQ ID NO: 18737 - DNA, 201 bp, Homo sapiens
tcgctggagcccaggaggcggaggttgcagtgagccgagatcacaccaccgcagtctagcctgggtgacagagtgagaccctgtctccaaaaaaaaaaaaaggccaggcatgattgctaacgcttgtaacccccagcacttgggaggtcaaggtgggaagatcgcctggaaaattaatctgaaaactcacctctagaaatc

SEQ ID NO: 18738 - DNA, 201 bp, Homo sapiens
ctttcgtggagaagctgtgcacggagcagggcagccaccccaagttccagaagcccaagcagctcaaggacaagactgagttctccatcatccattatgcygggaaggtaccagccacagggcccaggggactctgtctcaggggacccccagtggctgctcagcgcagagacagtctgagagtggcagaaccttgggctg

SEQ ID NO: 18739 - DNA, 201 bp, Homo sapiens
gcactccagcctgggcaagagagtgagaccttgtctaaaaaaaaagaaagtaggaatgaagatggagggaacagaaatggactccaaaaatatttagaagscaaacttaccagaacttgatgaattatgacttttcggggcaggggagagagaaaaaggaggtgaggacatcttctggggctctaccttaggcaattgggt

SEQ ID NO: 18740 - DNA, 201 bp, Homo sapiens
aggcggaggctgcggtgagccgaaattgcaccactacactccagcctggacaagacagggcaagagcatgactctgtctcaaaaaagaaaaaaaaaaaaaagaccaatcaggacctccgcttgggttagtgcaacacaatggggcatgggaacgatggctcatgcttgaaatcccagcattctgggaggccgagatgggag

SEQ ID NO: 18741 - DNA, 201 bp, Homo sapiens
aggctggagtgcaatggcgtgatctctgctaactgcaacctctccctccgggttcaagagattctcctgcctcagcctcccaaatagctgggattacaggyacctgccaccacacccagctaatttttgtatttttagtagagaagggtttcgccatgttggccaggctggtctcaaactcctgacctcaggtgatccacc

SEQ ID NO: 18742 - DNA, 201 bp, Homo sapiens
agagaggttcaacagtagataccagtcagaaaaaagacctactggggtgaaacactccaggtagaaaccccaaataaagggaaacccacaggaccttgccyagcagacttggaactctacaggatgtttctcttgactaacaaaatggtttcagatttttaaaaagctatgacagtgacacactaatgcttttattattga

SEQ ID NO: 18743 - DNA, 201 bp, Homo sapiens
gctaagaagcaggctacagtctcagaggtttatgacacctttttttttttttttggagacggagtctcactctgttgcccaggctggagtacagtagcgcratcttggctcactgcaccctccacctcccgggtccaagcaactctcctgcctcaacatctggagtagctggaattataggcacgcaccactgcacccagc

SEQ ID NO: 18744 - DNA, 201 bp, Homo sapiens
tgagccaccgtgcctggccgcccagctaaatttttaaattatgtatagatatggggtcttgctgtgttgcccaggctggtcttgaattcctgggctcaagmgatctccctgcctcggcttcctgaagtgctgggattatgagcacgagccactgtacctggcctcagcctgcttttcttgtatagactctaaatccttcct

SEQ ID NO: 18745 - DNA, 201 bp, Homo sapiens
aaattactctgaaaactcgaacgcacctctaggaatctcaatgagaagctaagaagcaggctacagtctcagaggtttatgacacctttttttttttttttggagacggagtctcactctgttgcccaggctggagtacagtagcgcaatcttggctcactgcaccctccacctcccgggtccaagcaactctcctgcctc

SEQ ID NO: 18746 - DNA, 201 bp, Homo sapiens
aaagactgtatgacttggctgggtgtggtggctcacgcctgtaaccccagcaccaaggcaggtggattacttgaggtcagcagtttgagaccagcctggcyaacatggcgaaagcccgtctctgctaaaaataaaaaataaaaaaaatttaaaaattagccagctgtgagattacaggcacacaactgtaacctcagctac

SEQ ID NO: 18747 - DNA, 201 bp, Homo sapiens
taaaaatataaaaaaaatgagccgggcgtggtggcgcatgcctgtaatcccagctactgggaggctgaggcgggagaattgctggaacccgggaggcggasgttgtggtgagccgagatcacgccattgcactccagcctggccaacaagagtgaaactccgtctcaataaaataaaataatgataataataataataata

SEQ ID NO: 18748 - DNA, 201 bp, Homo sapiens
tggaatcccagcactttgggaggctgagatgggaaaatcacttgaggccaggagttggaggccagcctagccgagagagacccccgtctctataaaaaaaaggtgttttttttttgttgttgttagtaagccaggcaggatagtgcacacctgtactcccaacctcttggaaggctaaggcaggaggatcatgtgagccag

SEQ ID NO: 18749 - DNA, 201 bp, Homo sapiens
cctcaggtgatccactcacctcagcctcccaaagtgctgggattacaggcgtgaaccaccacgcccggcctttttacacttttttttttttgccttttccyccctcttttgtgtggagaatggggtcttgttatattttccaggcaggtcttgaactcctgggctccagctttcctcatgcctgtgccttcctaagagctg

SEQ ID NO: 18750 - DNA, 201 bp, Homo sapiens
cctctgtcaacaaaagggtcatttgcgaattcctcttctcagtgatcatgaatctctgggccttgatttttttttttttttttttttgagacggagtctcrccctgtcgcctaggctggagtgcagtggccacatctcggctcactgcaagctccgcctcctgggttcatgtcattctcctgcctcagcctccctcccgag

SEQ ID NO: 18751 - DNA, 201 bp, Homo sapiens
caggtgatccactcacctcagcctcccaaagtgctgggattacaggcgtgaaccaccacgcccggcctttttacacttttttttttttgccttttcccccytcttttgtgtggagaatggggtcttgttatattttccaggcaggtcttgaactcctgggctccagctttcctcatgcctgtgccttcctaagagctggga

SEQ ID NO: 18752 - DNA, 201 bp, Homo sapiens
cagagtctcgctctatcacccaggctgcaatgcagtgctgcaatctcgtctcactgcaacctctgctttccaggttcaagcgattctcctgcctcagtctyccgagtagctgggactacaggcatgcggcaccacacccagctaatttttgtatttttagtagtgacggggtttcaccatgttggccaggctggtctcgat

SEQ ID NO: 18753 - DNA, 201 bp, Homo sapiens
gagtgtaatggtgcgattgtaactcactgcagcctcaaactcctgggttcagcaatcctgcctcagcttcccaagtagctgagactacagagatgtaccamcatgctcagctaattaaaaaaaaacaactgttttttgtttgtttgttttgagacagagtttcacccctgtcacccaggctggagtgcaatggcacgatct

SEQ ID NO: 18754 - DNA, 201 bp, Homo sapiens
gatggtgcttgaccccccagcttcccctgctattgggtttctccaacgaggagacatggtcttcgcttctcagagtctgtggggccagggacaggggccaytcatggtccccctctcaccctaccctggacgctgtccttgtagctctccgactcgaagaagaagctgcaggactttgccagcaccgtggaagctctggaa

SEQ ID NO: 18755 - DNA, 201 bp, Homo sapiens
ccaccacgcccagccagtatgttggatatttctaaagaggcccgtctgtagggagctagagggaaaattggactctttggggcccaggtcttccatctaagacgtatcatcaccatctagggagtttcaggacaggcctgtgtattcatctcacctgctgtcctcaaatagaaatcagaaaaaaaaagggcatatgaaggt

SEQ ID NO: 18756 - DNA, 201 bp, Homo sapiens
agaggcccgtctgtagggagctagagggaaaattggactctttggggcccaggtcttccatctaagacgtatcatcaccatctagggagtttcaggacagkcctgtgtattcatctcacctgctgtcctcaaatagaaatcagaaaaaaaaagggcatatgaaggtcctgagacccaaaatatcttctgacagcagattaa

SEQ ID NO: 18757 - DNA, 201 bp, Homo sapiens
aggataatctatgcaaagacctcaggagaatatttaaaaataagtatgtatcacaaaaagcagccctcttccctggaggcaaacatgattcacaggttcaygtatgtacacacacacacacacacacacacacacacacacaccccaaacataagaaaaagtcactccttgtatgttttgcagtatgattttttttccact

SEQ ID NO: 18758 - DNA, 201 bp, Homo sapiens
agaaaaagtcactccttgtatgttttgcagtatgattttttttccacttaaccctaccttatagttttttctgtctgttcataactatctagtcagacttmaaatatgtttttgaataggtaagacatgcaaatatgaaataaaatagtgtataagggaatatagaacttcccccttcgttcctatttctcgcccttccag

SEQ ID NO: 18759 - DNA, 201 bp, Homo sapiens
ccaaaggcacgctggtgctgcttggccgtctctccccgccatctctgttcttgctgctccgcccagaggctgggccacctgttcggtttggggactgatcrtacacgaggttccggcaggaagcgagtttggactccagtgcctggacagaaatacacttttatctctcaagttataggcaaggactattctgtcttacca

SEQ ID NO: 18760 - DNA, 201 bp, Homo sapiens
acattagaaagcaaatcgacgttataaataattaattgggccagcaacagtgacccacccctataatcccagcactttgggaggccgaggcaggcagatcrcctggggtcaggagttcaagaccagcctggccaacatggtgaaaccccatctctattaaaaatataaaaattagccaggcatggtggtgcacacctgcag

SEQ ID NO: 18761 - DNA, 201 bp, Homo sapiens
ccgtgtccttgcttccttcatgggtcctctcaacttctctgcgctgagatcccccgcaggcagatcgcggtggagtgttggtgcgatggtgcttgaccccycagcttcccctgctattgggtttctccaacgaggagacatggtcttcgcttctcagagtctgtggggccagggacaggggccattcatggtccccctctc

SEQ ID NO: 18762 - DNA, 201 bp, Homo sapiens
tgacccacccctataatcccagcactttgggaggccgaggcaggcagatcgcctggggtcaggagttcaagaccagcctggccaacatggtgaaaccccayctctattaaaaatataaaaattagccaggcatggtggtgcacacctgcagtcccagctactcaggaggctgaagcaggggaatcgctgaacctgggaggc

SEQ ID NO: 18763 - DNA, 201 bp, Homo sapiens
aatcaaactgctgatggacaggaagtgagggagacgaggtgatgaggaggaagccccaggttccagccaggcgatgctagtgtcaccaagaaccagagagwtcatgaggcagccattgccgaagcaaagagatgaaaacccagaggggggcactgctttgcccctcggccctcagctaagccctccttgggtgcttctgtt

SEQ ID NO: 18764 - DNA, 201 bp, Homo sapiens
ctttgactaaccagtctcttggcacccttagaatgaagttgagagcgtcacagggatgcttaacgaggccgaggggaaggccattaagctggccaaggacrtggcgtccctcagttcccagctccaggacacccaggtgagtgtcctgccacatcatccaggggacctggggggtggccttcctcggggcaggtccctggg

SEQ ID NO: 18765 - DNA, 201 bp, Homo sapiens
aagggtcagacacacctgggcacaagtcccagccccaaacttcctagatgccacagagtgggccaagtcccttaaccttctggggcatgggctctttaccygcagaatgggactcatcatagctcatggggtgcacgaggctgtcatgaggattaaataagatgctgcccacacagcactcagcaataagccaaagcccta

SEQ ID NO: 18766 - DNA, 201 bp, Homo sapiens
ccccaaccggatcgtcttccaggagttccgccaacggtaagtcccaaggtctggcccaggtagggcagggggtgagcgggactgggtggaggaatggatgytggaggtacccggggtgacttctgctctgtgtttcaagctacgagatcctggcggcgaatgccatccccaaaggcttcatggacgggaagcaggcctgca

SEQ ID NO: 18767 - DNA, 201 bp, Homo sapiens
atgtacaacctgttttgatgtcagaccttggcactcacatcctatgttaatctcatatagtctggcatgtcaagaagcagacctggggacatggatagaargtgtttgatgtctctgcaacataactgtctggtcccagaaaagtttttggccacattgtaagagaggaaaccaagggacctgggggttcattctgctggg

SEQ ID NO: 18768 - DNA, 201 bp, Homo sapiens
agggggtgagcgggactgggtggaggaatggatgctggaggtacccggggtgacttctgctctgtgtttcaagctacgagatcctggcggcgaatgccatycccaaaggcttcatggacgggaagcaggcctgcattctcatggtgagcccagaagtccaccagagacctcccaacctctggccgcaagccacctgctgct

SEQ ID NO: 18769 - DNA, 201 bp, Homo sapiens
agctgagatcgtgccaccgcactccagcctgggcaacaagagcgaaactctatctcaaaaaaaaaaaaaaaaaaaaaagaaagaaagaaaaaagaaacagytagtgcagctggggagtacgggagcccccttaggaatgatgcacatagttgtgttttctgagtggtgtttggatctcagctaagtccagggcatgttgtg

SEQ ID NO: 18770 - DNA, 201 bp, Homo sapiens
cattcttccttctcgtgcatgcctgtgtgggtgtgccctcagcatatgcttacaaggtttattgggtgatccaacgctagccgcaagagctattattagcycccttttacagctgggaaaacagactcagaggagtggagaacttgctgcagatttgttaagtgtcagagccaaatatacacttggattatcctgactcca

SEQ ID NO: 18771 - DNA, 201 bp, Homo sapiens
cttcttctttttttttttttttttttgagatggagtctggctctgtcacccaggctggagtgcagtggcactatcttggctcactgcaacctctgcctccygggtttgagcaattctgcctgagcctcccaagtggctgggattacaggtgcacaccatcacacctggctaatttttgtattttcagtagagacggggttt

SEQ ID NO: 18772 - DNA, 201 bp, Homo sapiens
ctgcgccgcctacctcaagctgcggaactggcagtggtggaggcttttcaccaaagtgagtgctctgccccagcccccttcccaggggcccccagccctgsttcttcactctggagccttcacatttgggacaggaggtggtcgcaagtgggtgtggaatggagggctcgaactcagaccttgagcattggcggttctctg

SEQ ID NO: 18773 - DNA, 201 bp, Homo sapiens
ggatcccccagcagcctgttaccagaaagaagggcagacgcagggagcctgggtctgtgctcagtccccgctgggttttctccttttatggtcagcctacmgtgctctggcttcccagacagaatccaccagcttgtgtttgggcttgggccgaaatagctggtctgtggggagctgggtacctcctgggagtcctcaggc

SEQ ID NO: 18774 - DNA, 201 bp, Homo sapiens
ttgtagagatgaggttttgctatgttgttcaggctggccttgaactcctgagcccaagcaatccacctacctcggcctcccaaagtgctgggattataggygtgacccacagtgcctggccagcaccttccttgttaaattgcatgtgtcagccacctccctcggtgtcctcccagcctctgggcagtctggctccccatt

SEQ ID NO: 18775 - DNA, 201 bp, Homo sapiens
gctggagtggagtggcacactcatagctcactccagcctccaactcctgggctcaagtgatcctcccctctcagcctcccaagtagctgggaccacaggcrcagatcatcacgcctggctaattttttgattttttgtagagatgaggtctcattatgttgcccaggctggtctcgaactcctggcctcaagcaatcctcc

SEQ ID NO: 18776 - DNA, 201 bp, Homo sapiens
gctgtaatcccagcactttgggaggccgaggcgggtggatcacaaagtcaagaaatcaagaccatcctggccaagatggtgaaaccctgtctctactaaaygtacaaaaattagctgggcgtggtggcaaacgcctgtagtcacagctactcaggaggctgaggcaagagaatcacttgaacctgggaggcagaggttgca

SEQ ID NO: 18777 - DNA, 201 bp, Homo sapiens
tcctgtctcctacaccccttcactggccagttctgctttcatgtttttatttattatatattttttgagacagagtttcactctttcacccaagctagagygcagtggcacaataatagctccctgtaacctcgaactcctaggctcaagcaattttcctgcctcagccttccaaatagctggggctacaggcacacacct

SEQ ID NO: 18778 - DNA, 201 bp, Homo sapiens
gttacattccatcacttcttcctgatttttgttgttgttgttagaagcaaatctaacccccactcaaggggaggagaattaggctccacctttttggagtmgcaaagaacttgtggatagattttaaaaccaccatggtacctactgtgctcattttatagatgaggaggttgaggttccatgaagcagagcagcttaccc

SEQ ID NO: 18779 - DNA, 201 bp, Homo sapiens
aaattagccaggcgtggtcgtgggcacctgtagtcccatctactcgggaggctgaggcaggagaatagcttgaacccaggaggcagaggttgcagtgtgcrgagaccgcaccattgtactccagcctgggctaaaagggcaaaactctgtctcaggaaaaaaaaaaaaaaagaaaaaaaacccttccttttccaatttgat

SEQ ID NO: 18780 - DNA, 201 bp, Homo sapiens
gagtttgggaccagcctgggtaatattactaagttaccttactaggccctgtctctacaaaaaaaatgaaaacaaaaaacaaaaaaaccattagccaggcrtagtggcatgcacctgtagtcccagctgctcaggaggctgagatggaaggatctgttagcccaggagttccagactgcagttagctatgatcgtgctact

SEQ ID NO: 18781 - DNA, 201 bp, Homo sapiens
ttactgctccattaattttaacaaatgtgtattgtgtaactaccaccaccacagtcaccacatagaatgttagttattgattgattgattgagatggagtstcactctgttacccaggctggaatgcagtggcatgatcttggttcactgcaacctccacctcccaggttcaagcaatacttgtgccttagccaccccagt

SEQ ID NO: 18782 - DNA, 201 bp, Homo sapiens
tggtagttacgtaacattgtgaatgtactaaatgctcctgaattatgcactttagttatttttttatctttattactattttttgagatggagtctccctstgtcacccaggctggagtgcagtggcgcgatctcagctcactgcaaactccacctccctggttcacgcgattctcctgcctcagcctcctgagtagctgg

SEQ ID NO: 18783 - DNA, 201 bp, Homo sapiens
tgagcacctactgtgtgtcaggcattgttccttgtacccgggatcaggcacagcccttgaccttcaggagctcattggttcaggggaaaagcattgaaaaygaacaattttgtaattgttggaaacctaatagagctgcatgaagtggaagaagtcagatttataatcattcagaggtggtataaaatgaacatcattttt

SEQ ID NO: 18784 - DNA, 201 bp, Homo sapiens
aagatcatgcctgcactccagcctgggtgaaagattgagactctgtctcttctttctttttttttttatttaaaaaaaaggccaggcacggtggctcacgsctgtaatcccagcactttgggaggccgaggcgggtggatcacaaagtcaagaaatcaagaccatcctggccaagatggtgaaaccctgtctctactaaat

SEQ ID NO: 18785 - DNA, 201 bp, Homo sapiens
tcagaaagtgaacactcatagggctggcattcagatgaagatctagaggtcaaccctcacaagcccccctcacgttctgtccttgcaatcattgcacaccsgagactcattcattccttatctgagttctatcaccgtagattaattctgcctggttttggacctcagttcaatagtcacagaacctgtgctttttgtgac

SEQ ID NO: 18786 - DNA, 201 bp, Homo sapiens
acaaagtgagactccatctcaaaataataataacctaataaacacatataacaacatgattttttaagacacaggtttttgctgtgtctctcaggccgaastgcagtggtacaatcacagctcactgcaatctcaaactcttgggctcaagagatcctcccgcctcagcctcctgagttactgagattacaggcatgaggc

SEQ ID NO: 18787 - DNA, 201 bp, Homo sapiens
aatagtgccttaccacgtacagcatggcgggactcgccttgtgccttgactcctccgtccctgatctgattattttcagatgctcctattcacccagtagragaggactgctattttttaaatggtaaagtgcatatgacataaaatttaccattttaaacattttaaagaaaacagtgccattaagtgcattcacaatgt

SEQ ID NO: 18788 - DNA, 201 bp, Homo sapiens
agctgtgtaacctggtgacaacctcaccatgcctcactttgccctcctgtcaaacaggcggtggggaaatcactgttactgagtagttgtgaagatgccaygcggagatgcctctgccatcttctagagactgagtcactggggtttcttcttagatatggacattgggaggtcccagaaagagatcagagggtggtggga

SEQ ID NO: 18789 - DNA, 201 bp, Homo sapiens
ctgtgtaacctggtgacaacctcaccatgcctcactttgccctcctgtcaaacaggcggtggggaaatcactgttactgagtagttgtgaagatgccatgmggagatgcctctgccatcttctagagactgagtcactggggtttcttcttagatatggacattgggaggtcccagaaagagatcagagggtggtgggagg

SEQ ID NO: 18790 - DNA, 201 bp, Homo sapiens
tggtaccacctacttgggaggctgaggcgagaggatcacttaagcccagaaactcaaggttgtagtgagccaagatcaccccactacactgcagcctgggygacagagcaagaccctgtctcaaaaaaaaaaaaaagtaaacaacattctcttctgttcttgctcttcagacttaactgctcccgtcactggttgggtttc

SEQ ID NO: 18791 - DNA, 201 bp, Homo sapiens
ccccactacactgcagcctgggcgacagagcaagaccctgtctcaaaaaaaaaaaaaagtaaacaacattctcttctgttcttgctcttcagacttaactrctcccgtcactggttgggtttctttaattctgcacacatatctgtaaacactttctttattaaatgttcctgagttaatatcttaagcacactgttcatt

SEQ ID NO: 18792 - DNA, 201 bp, Homo sapiens
ccactacactgcagcctgggcgacagagcaagaccctgtctcaaaaaaaaaaaaaagtaaacaacattctcttctgttcttgctcttcagacttaactgcycccgtcactggttgggtttctttaattctgcacacatatctgtaaacactttctttattaaatgttcctgagttaatatcttaagcacactgttcatttt

SEQ ID NO: 18793 - DNA, 201 bp, Homo sapiens
atcctgcgtagtgcttagttcggtgcccaacacatagtaagtgctcaatgaacggtggctgttatttaagccagtgaggtccggggaggtaaagtggcagstcggaggagtggagctgagatttgaacccagagctcttcaaaactccacagtttggccaggtgcaatggctcacaactataatcccagtgctttgggagg

SEQ ID NO: 18794 - DNA, 201 bp, Homo sapiens
ggtcccagaaaagtttttggccacattgtaagagaggaaaccaagggacctgggggttcattctgctgggtctctccctggaaggcttgacgatgaaatcrctcagaagaacaatgccctgaagaagatccgggagctggagggccacatctcagacctccaggaggacctggactcagagcgggccgccaggaacaaggc

SEQ ID NO: 18795 - DNA, 201 bp, Homo sapiens
caggaggaggagatgcaggccaaggaggatgaactgcagaagaccaaggagcggcagcagaaggcagagaatgagcttaaggagctggaacagaagcactygcaggtacctgtatggatgcatggctggggttgctggggaacaggacttggccccgtggggctcacccgcctcctccccaccacctgcgtgcagctgacc

SEQ ID NO: 18796 - DNA, 201 bp, Homo sapiens
ggccgaggtgggcggatcacgaggtcaagagttggagaccagcctggccaacatggtgaaaccctgtctcaaaatacaaaaattagccaggcgtggtggcrggcgcctgtaatcccagctactcgggaggctgaggcaggagaattgcttgaacccgggaggcggaggttgcagtgagctgagattgcgccactgcactcc

SEQ ID NO: 18797 - DNA, 201 bp, Homo sapiens
aaaaggctctgtcctgtagatgatttaagttgtttgcagccagacaacacatgtgtcacacagggtttctggaagaacctgagttggggagattggggcaygtccctgtgcaggttcaggatgctgcagggcagggctctgttgacagcagggtgtggcttcatgacccccgcaccttctcttcccccctccctagggctt

SEQ ID NO: 18798 - DNA, 201 bp, Homo sapiens
tggccaggtagcggggctggcaaggggcatttgctgtgtgtccatgtatcccctgggcccctgctcattcgctcattcgcagtggctgtcttggtcaaggyggccccaggcccttggcatgaacttcgtttcccaggccaggcctcccacaagccttctcgaccctgttcactcccccagatcctcaccttcgactttctt

SEQ ID NO: 18799 - DNA, 201 bp, Homo sapiens
ggagattggggcatgtccctgtgcaggttcaggatgctgcagggcagggctctgttgacagcagggtgtggcttcatgacccccgcaccttctcttccccmctccctagggcttttgccaagaggcagcagcagctgaccgccatgaaggtgattcagaggaactgcgccgcctacctcaagctgcggaactggcagtggt

SEQ ID NO: 18800 - DNA, 201 bp, Homo sapiens
tgatgatggccgggcgcggtagctcacgcctgtaatcccagcacattgggaggccaaggcaggggaatcacctgaggtcaggagttcgagaccagcctgaycaacatggagaaactctgtctctactaaaaatataaaaaaaatgagccgggcgtggtggcgcatgcctgtaatcccagctactgggaggctgaggcggga

SEQ ID NO: 18801 - DNA, 201 bp, Homo sapiens
ttcttctcttccctgcaaacacatcatgtctttgcagttgatctcacctactcccatggtgttgctgctgcctcttcgacatccaggcttttctcatctakacccccttctgaatttccgattgcccaatgagtcaatttccaccgtcatctcaaacacccctgtctaaggcgggaatgaccttcctttccccagcccctc

SEQ ID NO: 18802 - DNA, 201 bp, Homo sapiens
ggatcatttaagcccaggaatttgaggctgcagtgagccatcatcacaccactgcactccagcctgggccgcagagccagaccctgtctctgaaaataaayaaataaataaataagttagtcagaaacagctggtgtaggctgggcatggtggctcctacctgtaatcccagcactttgggaggccaaggtgggtggatca

SEQ ID NO: 18803 - DNA, 201 bp, Homo sapiens
tctgccagtccttctaaatgtcccccacccatttcctctggtttttccctcttcctggctcttagctggatttacactaatgctaatactgcagcagccastatgaatgattatttacctgctcactcggtgctaagttcttttcaagcaatacctttgcagacacctggccaggtgtactgccggtgtctttgaggagga

SEQ ID NO: 18804 - DNA, 201 bp, Homo sapiens
catccatccatcatccgtctatcctctatccatgaattattcatccatcaatccatcctctattcatccatctatcctctactcatccgtccatcattcayccattcatctacccacccatccatccatccgtccattcatccatgaacccatcctctatccatttattcattcatccatccatccaccttccacctacca

SEQ ID NO: 18805 - DNA, 201 bp, Homo sapiens
gcactttgggaggccgaggcaggaggattgcttgagcccaggagtttgagaccagcctgggcaacatggcgagacccctatctctaccaaaaaaaaaaaaactttaaaaattagctgggcatggtagcatgtgcccgtagtcccaactacttgggaggctgaggcaggaggatcatttaagcccaggaatttgaggctgca

SEQ ID NO: 18806 - DNA, 201 bp, Homo sapiens
ggagcagggtgggtttttggaaagaggcctgcaggggcgggacagtgggtgtgagggcaggggcaacgctgcaatcgaggggtctggggtcgcagagaagsgggtggcaggatggaggaataggagagagagagaaaagaaacgagggtcatctaggagaggagtatggggaggaaggaagaggagaaagaggatggagcc

SEQ ID NO: 18807 - DNA, 201 bp, Homo sapiens
tcggtcactggcggtgtgagcaagaacagtttctacacagtggaggaggaaagacgaagaactgagtgcaggagtaactgggaggtgaaaaagaggaaagmgatggaattctggagaattacctaaaagacgatgaaataaattagccaacagctagaggatgtgggcggtaggggccttggctctcaggactttgagctg

SEQ ID NO: 18808 - DNA, 201 bp, Homo sapiens
gctgagtgcggtggctcacacctgtaatcccagcactttgggaggctgaggcgggtggatcacctgaggtcaggagttcgaaaccagcctgaccaacatgktgaaaccccatctctactaaaaatataaaattagccgggcgtggtggtgggcacctgtaatcccagctacttaggaggccgaggcaggagaatcgcttga

SEQ ID NO: 18809 - DNA, 201 bp, Homo sapiens
ccatggcctgtgggttgggcttggcatgtgcaggacctgctgggctggtagaaaaagaaccttggaggtgatgatgatgatgatgatgatgatgatgatgdtggccgggcgcggtagctcacgcctgtaatcccagcacattgggaggccaaggcaggggaatcacctgaggtcaggagttcgagaccagcctgaccaaca

SEQ ID NO: 18810 - DNA, 201 bp, Homo sapiens
ggtaaccgaaggaggcagagaagaaacagagtgagagagatgagaatcaggaagactgtgctgtcctgggagtgggcggtttcaagggaaaaaagggaaasattccagtgtcacaaggatgcaacagagaagcagggaagataagggctggaaaatatccacaaggctgagcgaaagtcggtcactggcggtgtgagcaag

SEQ ID NO: 18811 - DNA, 201 bp, Homo sapiens
tggtggtgggcacctgtaatcccagctacttaggaggccgaggcaggagaatcgcttgaacccgggaggtggaggttgcagggggccaagattgcgctgtygcactccagcctgggcaacaggagtgaaactccatctcaaaaacaaacaaacaaaaccatggactcaaggtcaaggtttagcttctaattctggctccat

SEQ ID NO: 18812 - DNA, 201 bp, Homo sapiens
ggggctggaatggaaattacgcataaaataataattataattattatttgagacagactcttgctctatcacccaggctggagtgcagtggcgtgatctcrgctcactgcaacctctgcctcctgggttcaaatgattcttgtgcctcagcctcccgagcaactgcgattttacaggcatgcgccaccacgcctggctaat

SEQ ID NO: 18813 - DNA, 201 bp, Homo sapiens
aggaaccctaggtgaattcaagtcaagcaacaaattcatttgcaagaattatgaactcggccgggcgcggtggctcatgcctgtaatcccagcactttggraggccgaggcgggcggatcacgaggtcaggagatggagaccatcctggctaacacggtgaaaccccgcctctactaaaaatagaaaaaatcagccgggcg

SEQ ID NO: 18814 - DNA, 201 bp, Homo sapiens
tgggagatggaggttgcagtgagccaaaatcgcgttattgtactccagcttgggcaataagagcaaaacttcatctctaaataaatacataagtaaaagakaataaaaaataacaaatttatttcttttgttgtgttggccctaggtcaagtagtcaatagccacctgtggctagtggctggtgtactgggtagcataagt

SEQ ID NO: 18815 - DNA, 201 bp, Homo sapiens
cccaactcataggtgacggagttcccttcaagccacagattctgttttttttgtgtgtgtgtgtgtttttttttttttttatcagagtcccatacctcacsggtattttctcaatcagtgaacacctcaagtactagcccatgtgttttgagtaaaaagggctcctttcaacgaggatccccttctagaggctttgactaa

SEQ ID NO: 18816 - DNA, 201 bp, Homo sapiens
acataaaaaataaactataaactaagttcctgccaagttaattcggcttacacccacaaatggttcagtggagcttggaggttagaagcaaggtggagtcsgttaggtcagatcttgttcagtgtctcagttataattttgcagtggcagtttcattctcaggtgtttgttatgtattagagtccctaaatctggcaaatt

SEQ ID NO: 18817 - DNA, 201 bp, Homo sapiens
agaatgttcccattatcatagaaagttctgttggactgcttggactagatgattggggcttggagtgtgatgttgtggggcacgggtcgccagactgatgygcagaggtcacccaacccggcctatgtctatgtcttctctctgaaaggccttgctcaccctcgagcaggttacctcatgcctctgaagctttgtttcctt

SEQ ID NO: 18818 - DNA, 201 bp, Homo sapiens
tttaattagaggccatgggcctggctggagatagagctgtgtgatcagggggctaaagtaagaggaggagggtggtttcacataaaattagagagaggtargggggtgcttccaggccctggggaggagtttaaactttcgtctaaaatggatgacaggctgggcatggtggctcatgcctgtaatcctagcacttcggga

SEQ ID NO: 18819 - DNA, 201 bp, Homo sapiens
gtaacttactctcccagcccataatagcagcatgcatgagtcttgttaataggcgggtagtgaggtgataccaggtccgtggtctggcatgcatgactttkccctctgtgatgaagataaactttctcctccgttctgcaaggctcgcctcaaacgatgtgcccttgagaaggttctggcagacctcttgtgctcttggat

SEQ ID NO: 18820 - DNA, 201 bp, Homo sapiens
ccatccatcatccgtctatcctctatccatgaattattcatccatcaatccatcctctattcatccatctatcctctactcatccgtccatcattcacccattcatctacccacccatccatccatccgtccattcatccatgaacccatcctctatccatttattcattcatccatccatccaccttccacctaccatcc

SEQ ID NO: 18821 - DNA, 201 bp, Homo sapiens
tccatccatcatccgtctatcctctatccatgaattattcatccatcaatccatcctctattcatccatctatcctctactcatccgtccatcattcacccattcatctacccacccatccatccatccgtccattcatccatgaacccatcctctatccatttattcattcatccatccatccaccttccacctaccatc

SEQ ID NO: 18822 - DNA, 201 bp, Homo sapiens
tccctgttttgtagatgaggataagtgagactcagagaggttaagggacttgcccagggtcacacagcgaagaagtagcaaagtgaaggttcaaattcaaktaccccatacccagttctgagcccttagccactgccctttactgcctccaggtcaagggcttgagtgaggacaggttgggctgtaaatgatacctacatt

SEQ ID NO: 18823 - DNA, 201 bp, Homo sapiens
cctgtgagacgggttggagcctgtctcctgaactgtgacctcaaccatgggaaaatctagtatccagtaaggaaaaatcatgacaatagtgccttaccacrtacagcatggcgggactcgccttgtgccttgactcctccgtccctgatctgattattttcagatgctcctattcacccagtagaagaggactgctatttt

SEQ ID NO: 18824 - DNA, 201 bp, Homo sapiens
gcatgatctcagctcactgcaacctctgcctcctggaactcaagggatcctatctcagtctccttagtagctgggactacaggcatgtagcacgatgcccrgctaatttttttgtgtttttggtagaggtggggtcacaccgtattgcccaaacagatctcgaactcctgagctcaagcaatcttcaccacttcggcctcc

SEQ ID NO: 18825 - DNA, 201 bp, Homo sapiens
ggttgctgaagctcagatgtgcttagtcccaccactggaaggtgggcagagctgggattcagacaaggtctgtgtgagtccagggccagggtgactacctrtgattagtagcaaagggctcttggggtaataggcttagagcaggaggtgatggtcgtgggctggagcaggaggggacagtgccagaggccttgttagctt

SEQ ID NO: 18826 - DNA, 201 bp, Homo sapiens
accctccaccctataccaaacctctggggttgggaaaatcatgatccagagccaaggtggatgggcccccctgctcattggaactccaagcccaagtcccygaaccatgaaccccaaaggacatttttccagttctggttctgcttctggaatgcccagggggtcaggagaagccctccttccaaactttagcaggtgaca

SEQ ID NO: 18827 - DNA, 201 bp, Homo sapiens
aactgttttaattatgtcctgagtgcctctgccccctgagcaccttgaatcttgcctactctcaacagggttgagattcctatagcctccatcattcttcmgacaaatcattctacccaaggtgtccacagccaaagcaagccacgtaaacctctccaagcctcatccacacggcaacatgggcctccttcacacatatca

SEQ ID NO: 18828 - DNA, 201 bp, Homo sapiens
atttacaattcagtgacgctgaccccggatatgcctagaagtcacctctgggtcttgtgttgtagttgttagccgaggagaaaaacatctcttccaaataygcggatgagagggacagagctgaggcagaagccagggagaaggaaaccaaggccctgtccctggctcgggcccttgaagaggccttggaagccaaagagg

SEQ ID NO: 18829 - DNA, 201 bp, Homo sapiens
aggaaccgctgaagccctttatcttctcaggaaacgtgcctggggccttacacatccgaggctgggtggggagtctggggaggaggaagggagagaggcaygtttaaggatggggtgtgaggtgacatgagccccagggatctgggctgggaagctcagccccaggcgggtcctgatgatggccggccgcccccagctcca

SEQ ID NO: 18830 - DNA, 201 bp, Homo sapiens
gcaggtctagtggtttcgaagcacaaggatttggccaggtgtggtggctcacacctgtaatctccgtgctttgggaggccgaggcaggaggctcacttgasggtcaggagttcgagaccagcctggtcaacatggcaaaaccacatctctacttaaaatacaaaaattagccaggtgtggtggtgggcacctgtaatccca

SEQ ID NO: 18831 - DNA, 201 bp, Homo sapiens
attcgcatctgccggcagggcttccccaaccggatcgtcttccaggagttccgccaacggtaagtcccaaggtctggcccaggtagggcagggggtgagcrggactgggtggaggaatggatgctggaggtacccggggtgacttctgctctgtgtttcaagctacgagatcctggcggcgaatgccatccccaaaggctt

SEQ ID NO: 18832 - DNA, 201 bp, Homo sapiens
ttaccagaaagaagggcagacgcagggagcctgggtctgtgctcagtccccgctgggttttctccttttatggtcagcctacagtgctctggcttcccagmcagaatccaccagcttgtgtttgggcttgggccgaaatagctggtctgtggggagctgggtacctcctgggagtcctcaggcccacagcgggggaggaac

SEQ ID NO: 18833 - DNA, 201 bp, Homo sapiens
ctggcctcacatgatctgcctgccttggcctcccaaagtgctgggattataggtatgagccactatgcccggcccacatatttatttataaagactaattstatctatcatgccttatctcttgggtacatttcagagcaaattacagatgtcagtacatttccccttccacacctcaacattgcatattaattagagttt

SEQ ID NO: 18834 - DNA, 201 bp, Homo sapiens
gcaatggggtgctggaaggcattcgcatctgccggcagggcttccccaaccggatcgtcttccaggagttccgccaacggtaagtcccaaggtctggcccwggtagggcagggggtgagcgggactgggtggaggaatggatgctggaggtacccggggtgacttctgctctgtgtttcaagctacgagatcctggcggcg

SEQ ID NO: 18835 - DNA, 201 bp, Homo sapiens; identical to SEQ ID NO: 3070

SEQ ID NO: 18836 - DNA, 201 bp, Homo sapiens
cagaattgtacggtgaacacctttaaggccaccacctggattcagtcattgacactgtattatatgaactttatcagatacttattttgagacaggatctrgctctgtcacccaggctggagtgcagtggtgtgatctcagctccccgcaacctccaccactgggttcaagcgattctcctgcttcagcctttcatgtagc

SEQ ID NO: 18837 - DNA, 201 bp, Homo sapiens
ccacggaggacgccaaactgcggctggaagtcaacatgcaggcgctcaagggccagttcgaaagggatctccaagcccgggacgagcagaatgaggagaaraggaggcaactgcagagacaggtgcgtgctgccggggaggccagcagagggaggtcgggtggcctttttcattcctatcaccactctcatggttggtgtg

SEQ ID NO: 18838 - DNA, 201 bp, Homo sapiens
tgtgacttttctgggtaccagcaccatgagggtcacctgcacacatggtgatgccttagtttctagcctgaagaaggaatgaggtgcttatttattcactraatgtatttactgaatacctattgagtagtattccaagtaattcagtttctatacttttaataccactcttccctaagatttcattctgtaaaattccaa

SEQ ID NO: 18839 - DNA, 201 bp, Homo sapiens
ggagggaggaagccatcaagcagctacgcaaactgcaggtgggtgacactaggagcttggggcatgggtggagggagggcacagttcccctcaggccaccraagtcagcagagcgggctccaggaagcaagcctgcacctgccattggtgtgggttcagctggggtttttctggaaccattcaggatttggtggctgtctc

SEQ ID NO: 18840 - DNA, 201 bp, Homo sapiens
atccatccatcatccgtctatcctctatccatgaattattcatccatcaatccatcctctattcatccatctatcctctactcatccgtccatcattcacccattcatctacccacccatccatccatccgtccattcatccatgaacccatcctctatccatttattcattcatccatccatccaccttccacctaccat

SEQ ID NO: 18841 - DNA, 201 bp, Homo sapiens
gacgacctggttgttgatttggacaaccagcggcaactcgtgtccaacctggaaaagaagcagaggaaatttgatcaggtagagggcgtggggtgtccccyactctggccatggacgctgggttggggaatcagctctgcagagtatgacgcgtggctctggcctgtgcctgcatcccctctccactctgtggggagccat

SEQ ID NO: 18842 - DNA, 201 bp, Homo sapiens
atcccccgcaggcagatcgcggtggagtgttggtgcgatggtgcttgaccccccagcttcccctgctattgggtttctccaacgaggagacatggtcttcscttctcagagtctgtggggccagggacaggggccattcatggtccccctctcaccctaccctggacgctgtccttgtagctctccgactcgaagaagaag

SEQ ID NO: 18843 - DNA, 201 bp, Homo sapiens
catccaggtaggaggtttggggctttgctgcgccatggtttctggccccagggatccactgccctctttgacctttgcagtccggcaagctggatgcgttyctggtgctggagcagctgcggtgcaatggggtgctggaaggcattcgcatctgccggcagggcttccccaaccggatcgtcttccaggagttccgccaac

SEQ ID NO: 18844 - DNA, 201 bp, Homo sapiens
cgcaccaccagccacctggaactgagagccatgctcgtgcaatgggaacttctttgtggtcaactgcagaaaatccaaggggtgggtgtgcaaagctgaaytgggcagcagaacttgggggagtaaggacatctgagcttgtcctccctgttgactcatgcaggctcagatgaaggactttcaaagagagctggaagatgc

SEQ ID NO: 18845 - DNA, 201 bp, Homo sapiens
cagcagcagctgaccgccatgaaggtgattcagaggaactgcgccgcctacctcaagctgcggaactggcagtggtggaggcttttcaccaaagtgagtgmtctgccccagcccccttcccaggggcccccagccctggttcttcactctggagccttcacatttgggacaggaggtggtcgcaagtgggtgtggaatgga

SEQ ID NO: 18846 - DNA, 201 bp, Homo sapiens
gaccacgctacgcaacaccacgcccaacttcgtgcgctgcatcatccccaaccacgagaagagggtgaggcccgccgcccagaccctggggctcccagaarccagggctgtcccaagcggtcacagcgtccccagggcgccctctgcccccacctaccccgaggaccccattttccatgtggggaaggctatctgaatctc

SEQ ID NO: 18847 - DNA, 201 bp, Homo sapiens
gcttccctcctctatgtattcacggggcctcccctgagctcagaggaagaacatgtactttcaagggtggctgagttgtcagggtggactcttggtggggmttggcctttccctggcagacaacagccttcctccctcccacctaggacctcgccgccgctgagagggctcgcaaacaagcggacctcgagaaggaggaac

SEQ ID NO: 18848 - DNA, 201 bp, Homo sapiens
acctgggaggcggaggttgcagtgagccgagatcgcgccactgcactcctgcctggacgacagagtgagactccgtctcaaaaaaaaaaaaaaaaaaaaaagagtaaaggttgatctaactcttctgacagctttgtctctgaaggctgaaggcagggtgcctctagacaattgaggtaaaggcatcccttcctccaggta

SEQ ID NO: 18849 - DNA, 201 bp, Homo sapiens
acatgcctgtcatcccagctactcaggaggctgaggtgggagggtcacttgaacccaggagttcgagattgcagtgagtcaagattgtgccactgcactcyggcctgagcaagaagcaaaactctgtctcaaaaaacaaaagtaataataactaacattttggcataccaggcattgttctaagcattttatataaatgtt

SEQ ID NO: 18850 - DNA, 201 bp, Homo sapiens
agagggtgaggcccgccgcccagaccctggggctcccagaagccagggctgtcccaagcggtcacagcgtccccagggcgccctctgcccccacctacccygaggaccccattttccatgtggggaaggctatctgaatctcagacccattccccatccctggaggaaaaggaggaagggaggatgcatccagagactttt

SEQ ID NO: 18851 - DNA, 201 bp, Homo sapiens
cagtttcacccattagatgatgagggcaatacccctgaggcatgactccaaggagggggcatcttttaaggcgggggagggtagaggcccccaccatggcygcccttcccccaggaacgcactccaggacgagaagcgccgcctggaggcccggatcgcccagctggaggaggagctggaggaggagcagggcaacatgga

SEQ ID NO: 18852 - DNA, 201 bp, Homo sapiens
tgaatccgggaggcagaggttgcagtgagcagccaatatcgcaccactgcactccaacctggacaaaggtgaaactccctctcaaaaaaaaaaaaaaaaaatagctggaggaaaggaaaggtagtataagaaagctgcatttttgcctaccatagcaggaagtcactagatactatctaaacttgacatatccagaaatcg

SEQ ID NO: 18853 - DNA, 201 bp, Homo sapiens
ctgcaataggtcaggacctgggttcactgctccatcaatcccacattgctcggccctcactagcaccacacagggtgggtggcagcctccccatttgatcratggggaaaactcagcacacctacttggccccagaactgagagtcaaacctggggacccagcttcgctgccctcagaatgttactcttccctcctgggta

SEQ ID NO: 18854 - DNA, 201 bp, Homo sapiens
ccgggtccgcaaagccacacagcaggtgagggccgcctggacaccacagtcacgctgcctactgtctctcctgcagcaggatcctgcaccagtcaacacaygcgtggcggcttcctgtgtgcaggccctggattgagggacaagagggtggtggggcctgagagtagagatccagggcccttacaccagtgcccaggctgc

SEQ ID NO: 18855 - DNA, 201 bp, Homo sapiens
ttgaatccgggaggcagaggttgcagtgagcagccaatatcgcaccactgcactccaacctggacaaaggtgaaactccctctcaaaaaaaaaaaaaaaaaatagctggaggaaaggaaaggtagtataagaaagctgcatttttgcctaccatagcaggaagtcactagatactatctaaacttgacatatccagaaatc

SEQ ID NO: 18856 - DNA, 201 bp, Homo sapiens
ttaagtgcattcacaatgttgtacagctatcaatttcaagacagggtcttgctctgtcacccaggggctagagtgcaatggtacaatcatagctcactatwaccttgagctcctgggatcaagcaatcctcctgactcagcctcccaagtagctgggactacaggtgatcaccaccatggccagctatttttttttttttt

SEQ ID NO: 18857 - DNA, 201 bp, Homo sapiens
caatcctcctgactcagcctcccaagtagctgggactacaggtgatcaccaccatggccagctattttttttttttttttttttttgtagagagggggtcyggctgttgttgcctgagctggtctcaaacacttagcctgaagcaatcctcccaccttggcctcccaaagtgctgggattacaggcatgagccactacact

SEQ ID NO: 18858 - DNA, 201 bp, Homo sapiens
tttgtattctagatgatagaactggaaagatgttaggcttttagaaagaaccaaatattgctaaatgcatccaaactcgggataatgaagtcttggcaaakacctcaatcctcgtgacttgaatcaggcatttcaagttaatccaaaagtttgagttaactggtgccttcagtcaatttaacctcgagtttatcaagcagc

SEQ ID NO: 18859 - DNA, 201 bp, Homo sapiens
ggcacgtgccaccactgcccggctaatttttgtatttttaatagagacggggtttcaccatgttggccaggcaggtctcgaactcctgagctcaagtgatytacctgcctctgcttccaaaagtgctgggattacaggcgtgcgccaccacgcccggcctggaagaagctcttgagtggagttttacaggatgaaggagag

SEQ ID NO: 18860 - DNA, 201 bp, Homo sapiens
cacctctttccagcctctgggaaccacaagtctgttttctgtctccatggctttgcctactctagacacttcacataaatgagatgatagagtacgtgacytttcgtgcctggcttctttcactaggcatattttcaagcttcatccacattggagagctcatgtcagtgttggtctctgttttgcagatggggaaggtat

SEQ ID NO: 18861 - DNA, 201 bp, Homo sapiens
agctgctattataaacgtggccagttctctgctgcacctggccagttctcctcttttacacacacacacacacacacacacacacacacacacacacacayatattctggtcttagtttccccttctggggaaatggggtaatgccttcatggtccccatttcataaactgcctctgaggccatgtgaaataatgtggcca

SEQ ID NO: 18862 - DNA, 201 bp, Homo sapiens
ttgtaatacaagagcagccacaggcaatatataaaccaatgagtgcaggcaacacataaaccagtgagctcaggcaacacataaaccatgagcacaggcagtacataaaccaatgagcacaggcagcacataaaccaatgaacataggcaacacataaatcagtgagtgcagatgcatcactgtgttacaataaaacttta

SEQ ID NO: 18863 - DNA, 201 bp, Homo sapiens
ctgagatttgaacccagagctcttcaaaactccacagtttggccaggtgcaatggctcacaactataatcccagtgctttgggaggctgaaatgagagaaytgcttgagcccaggaatttgagaccagcctgagcaacacagtgaaacccatgtctctacagaaaatataaacatcagccaggcctggtggcgcccgcctg

SEQ ID NO: 18864 - DNA, 201 bp, Homo sapiens
tccaggaaaaaacaaaagttgggatggaaggagaagtaatcacattggactaaggagcccagctgtgcaagtttggagtatttatctaaccagaataactmcctgtgatggacttggctctgtggggaaagggaagaggattagatgggaactgaattctcatattccatggtaggatgtacacatttgatgtttgacaat

SEQ ID NO: 18865 - DNA, 201 bp, Homo sapiens
caaaccatgtcgtgctgatctaaacatatcagtcatttacactttagtgtgaattacttcaactgggtttattcttagatacttggctgagatcatcagcyagcttcctgatacatggggtgggattcctcagaggataaaggggcttgcatctgcccagtgaccaatgggataaccggttttttggtaaatttttctttc

SEQ ID NO: 18866 - DNA, 201 bp, Homo sapiens
attgtaatacaagagcagccacaggcaatatataaaccaatgagtgcaggcaacacataaaccagtgagctcaggcaacacataaaccatgagcacaggcagtacataaaccaatgagcacaggcagcacataaaccaatgaacataggcaacacataaatcagtgagtgcagatgcatcactgtgttacaataaaacttt

SEQ ID NO: 18867 - DNA, 201 bp, Homo sapiens
cattgtaatacaagagcagccacaggcaatatataaaccaatgagtgcaggcaacacataaaccagtgagctcaggcaacacataaaccatgagcacaggcagtacataaaccaatgagcacaggcagcacataaaccaatgaacataggcaacacataaatcagtgagtgcagatgcatcactgtgttacaataaaactt

SEQ ID NO: 18868 - DNA, 201 bp, Homo sapiens
ccattgtaatacaagagcagccacaggcaatatataaaccaatgagtgcaggcaacacataaaccagtgagctcaggcaacacataaaccatgagcacaggcagtacataaaccaatgagcacaggcagcacataaaccaatgaacataggcaacacataaatcagtgagtgcagatgcatcactgtgttacaataaaact

SEQ ID NO: 18869 - DNA, 201 bp, Homo sapiens
accacagcagaccagaatcctgtggcttctcaaatgaccaagcctgacatattgaaaagcagatcgtcttgctttgaaaaaccttctccacccacccccgmaaccaatttcagctgattaaattcaatcactcatgccttaagactggcaatgatttgttgacttcaacttgaatatctgcatcttatttgtgccgtgtgt

SEQ ID NO: 18870 - DNA, 201 bp, Homo sapiens
acaggtgcacaccatcacacctggctaatttttgtattttcagtagagacggggtttcaccatgttggccaggctggtcttgaactcctggcctcaagtgwtttgcccacctcggcctcccacagtgttgggtttacaggtgtgagccaccttgtccagccctacttcctgcctcctgagcactgggtagtatttcacagt

SEQ ID NO: 18871 - DNA, 201 bp, Homo sapiens
tgttactggtccattgggcacagggtaatttgaaggtagatttggaagcatgggggtcataaactcatctttatatgtgggcaaatacagtatcagatctyggcggatgcccatgcgttgtgtatagttggccagctcttcatggaatgcctgaggttgggtgttctctctgattcaagccctacttgtctcccacagaac

SEQ ID NO: 18872 - DNA, 201 bp, Homo sapiens
ccgagattgtgccactgcactccagcctgggtaacagagtgagactctgtgtccaaaacataaaaaataaactataaactaagttcctgccaagttaattyggcttacacccacaaatggttcagtggagcttggaggttagaagcaaggtggagtccgttaggtcagatcttgttcagtgtctcagttataattttgcag

SEQ ID NO: 18873 - DNA, 201 bp, Homo sapiens
tgaggcaggagaactgcttgaacgcaggaggcggagattgcagtgcgccgagattgtgccactgcactccagcctgggtaacagagtgagactctgtgtcmaaaacataaaaaataaactataaactaagttcctgccaagttaattcggcttacacccacaaatggttcagtggagcttggaggttagaagcaaggtgga

SEQ ID NO: 18874 - DNA, 201 bp, Homo sapiens
gaggggcagctcctccgaagataacttggggtctggaaaattaggctgtatgggtcagttgacaaatggatggtgtatgtgggtcttggccagggtcccayatcagaatctagtgctgatagcctccttgtctgaatgacataggccctccaagaatgattcatttcatttgggacaggggtcagttttgcttctaatctt

SEQ ID NO: 18875 - DNA, 201 bp, Homo sapiens
cccagaagaatgagagtgcccggcagcagctcgagcggcagaacaaggagctccggagcaagctccacgagatggagggggccgtcaagtccaagttcaartccaccatcgcggcgctggaggccaagattgcacagctggaggagcaggtcgagcaggaggccaggtatgcgggtgtggagttccgaacccagtttgcag

SEQ ID NO: 18876 - DNA, 201 bp, Homo sapiens
gtcgggtggagcttctgtggggctccttgtcttctgacttcataccaagatgctcacgccccgcccccacgccatgtgctcaggtgaactccttcgagcarctgtgcatcaactacaccaacgagaagctgcagcagctcttcaaccacaccatgttcatcctggagcaggaggagtaccagcgcgagggcatcgagtgga

SEQ ID NO: 18877 - DNA, 201 bp, Homo sapiens
agaacaaggagctccggagcaagctccacgagatggagggggccgtcaagtccaagttcaagtccaccatcgcggcgctggaggccaagattgcacagctrgaggagcaggtcgagcaggaggccaggtatgcgggtgtggagttccgaacccagtttgcaggggggtgatggacagcaggagtcatagtgaagtcaggga

SEQ ID NO: 18878 - DNA, 201 bp, Homo sapiens
gatagagtgagactctgtctcaaacaataaaaataagtttccttaatggctggctttcaggaacataggctatgaggtggagcaatttttggtaaaggggraatgctgaatggattttttatgtaccagcaaacatggtatattagcagttacagtgcaggaccctgtggaatgggccagggaaaaatgttgacattcctt

SEQ ID NO: 18879 - DNA, 201 bp, Homo sapiens
tcgctcctccccattctctctcagctggggaccttacttcctacttaactcaaaagcagaaatgatcatgaaacgtgcacaagctcccactgcctcatcaycctacctccgtgcacctctgtacacttctattttttttccatttctatgctgaaccctctggcaccaaccgaggccaacacctccattggacccgaccct

SEQ ID NO: 18880 - DNA, 201 bp, Homo sapiens
taattagtgtggcgtgtttacggtctctctcgcctccatcccgtcagaccccactcttggaacagagggcatggaagacagctttgccacttgttagctgyatcatcttgagaaaggacttctcttctctgagcctcagtttccccttattgaaaacactgataatagttgcacttatttcctagcatactttgtgaggct

SEQ ID NO: 18881 - DNA, 201 bp, Homo sapiens
tgccattgtaatacaagagcagccacaggcaatatataaaccaatgagtgcaggcaacacataaaccagtgagctcaggcaacacataaaccatgagcacaggcagtacataaaccaatgagcacaggcagcacataaaccaatgaacataggcaacacataaatcagtgagtgcagatgcatcactgtgttacaataaaa

SEQ ID NO: 18882 - DNA, 201 bp, Homo sapiens
aagcgcggtggctcacgcctgtaatcccagcactttgggaggctgaggtgggctgatcacctgaggtcaggagttcgagaccagcctggccaacatggtgraacttcatctctactaaaaacacaaaaatcagctaggcgtggtggcagatgcctgtaatcccagctactcgtgaggctgagacaggacactcctttgcaa

SEQ ID NO: 18883 - DNA, 201 bp, Homo sapiens
catcgcggagaagctctcctgaaattaattagtgtggcgtgtttacggtctctctcgcctccatcccgtcagaccccactcttggaacagagggcatggargacagctttgccacttgttagctgtatcatcttgagaaaggacttctcttctctgagcctcagtttccccttattgaaaacactgataatagttgcactt

SEQ ID NO: 18884 - DNA, 201 bp, Homo sapiens
gttcatgcctgtaatcccaaatcccagcaccttgggaggccaaggcaggaagatcattgacatcaggagttggagacaagcctgaccaacatagtgcaacmccatctgtactaaaaatacaaaaattagccaagcacgtggggcatgcctgtaatcccagctactcgggaggctgagacaaggggatcacttgaatccagg

SEQ ID NO: 18885 - DNA, 201 bp, Homo sapiens
catggaatgttctctgagttgcttctccaagcagagagatatgtgtgcagggccacccatgcttaccatttccctactgaggctcttaggatacttttgtragatattaatagctacttgtggccatgaaacaaactaataactagcttctggcagctttaaatctcactttgacctcagtgtgctctaagcaacgtgggc

SEQ ID NO: 18886 - DNA, 201 bp, Homo sapiens
aaaagggttcatgccaacagatggaggattgggttccatccttggtttcatggcttagctgaggcaggtagatagggccatctttggagatacttgttgarcctctagggccaggaacatgagccattcctgcctaaaggacatcctacacagggcctgcttgggcagtgtggccaatgcatactcacctgtcccacagaa

SEQ ID NO: 18887 - DNA, 201 bp, Homo sapiens
ctgccattgtaatacaagagcagccacaggcaatatataaaccaatgagtgcaggcaacacataaaccagtgagctcaggcaacacataaaccatgagcacaggcagtacataaaccaatgagcacaggcagcacataaaccaatgaacataggcaacacataaatcagtgagtgcagatgcatcactgtgttacaataaa

SEQ ID NO: 18888 - DNA, 201 bp, Homo sapiens
gcaggaagatcattgacatcaggagttggagacaagcctgaccaacatagtgcaacaccatctgtactaaaaatacaaaaattagccaagcacgtggggcmtgcctgtaatcccagctactcgggaggctgagacaaggggatcacttgaatccaggacgtagaggttgcagtgagccaagatcgcacccctgcactccag

SEQ ID NO: 18889 - DNA, 201 bp, Homo sapiens
tacaaaaataaataaataaagtgcatttcagcatatcaatgctcgggccaggccacaccaacagaagacacagtaagagacagacacttaggtctatccayggcgacagctacaaatacaaggaaaagggtcaagttcaggcactgatgatgttggcatgggattttccagaatggcaactgactctcagtgaagcgctga

SEQ ID NO: 18890 - DNA, 201 bp, Homo sapiens
aactctgccattgtaatacaagagcagccacaggcaatatataaaccaatgagtgcaggcaacacataaaccagtgagctcaggcaacacataaaccatgagcacaggcagtacataaaccaatgagcacaggcagcacataaaccaatgaacataggcaacacataaatcagtgagtgcagatgcatcactgtgttacaa

SEQ ID NO: 18891 - DNA, 201 bp, Homo sapiens
tagtcgtcttcccaccaacaaagaaatgcccgtggtgctccttgtaaatttccaccagtctcagctgtggtgattccacttgtagctgagatttgtatgcrgatgaggcttttgcttcatctttctctgggagctacaaaaaggaggatgtgtggacaaatcaaaacagaaacaaatagcagcttcctgctttgtcctgta

SEQ ID NO: 18892 - DNA, 201 bp, Homo sapiens
ttctggcacagctattcaactctgccattgtaatacaagagcagccacaggcaatatataaaccaatgagtgcaggcaacacataaaccagtgagctcaggcaacacataaaccatgagcacaggcagtacataaaccaatgagcacaggcagcacataaaccaatgaacataggcaacacataaatcagtgagtgcagat

SEQ ID NO: 18893 - DNA, 201 bp, Homo sapiens
ccattccagatgtcactttgcgtcctcagaggggactctggggcagccaccatggccggcttgtctggaggcccttggagatctaggatgggcgctggtcrtggctttggagaactttccttctccaaacaaatgcaggaaactcaagattcagcatcctagaattgtctctggcaagttggtttccagccatagtgagtg

SEQ ID NO: 18894 - DNA, 201 bp, Homo sapiens
cttctggcacagctattcaactctgccattgtaatacaagagcagccacaggcaatatataaaccaatgagtgcaggcaacacataaaccagtgagctcaggcaacacataaaccatgagcacaggcagtacataaaccaatgagcacaggcagcacataaaccaatgaacataggcaacacataaatcagtgagtgcaga

SEQ ID NO: 18895 - DNA, 201 bp, Homo sapiens
agtagctgggactacaggcacccgccagcacgcccggctaattttttgtatttttagtagagacacggtttcaccatgttagccaggatggtctcgatctsctgacctcatgatccgcccgcctcagcctcccaaagtgctgagattacaggtgtgagccaccatgcccagccgagttgttccttttgactaaagaattgg

SEQ ID NO: 18896 - DNA, 201 bp, Homo sapiens
ggcttctggcacagctattcaactctgccattgtaatacaagagcagccacaggcaatatataaaccaatgagtgcaggcaacacataaaccagtgagctcaggcaacacataaaccatgagcacaggcagtacataaaccaatgagcacaggcagcacataaaccaatgaacataggcaacacataaatcagtgagtgca

SEQ ID NO: 18897 - DNA, 201 bp, Homo sapiens
ccagagcccaacataattatttgttgcggttgctgaaaagagttaagtgtttcttctgaacggtgaaggctggcagcaggcagatctgatttttccttctyctgcccactctcttcctcctacccaaagtctcccctcacgtgaccagcccttcctgtgaagtcgaggtgataaactcaagagagaaccagcgcagagagg

SEQ ID NO: 18898 - DNA, 201 bp, Homo sapiens
tggcttctggcacagctattcaactctgccattgtaatacaagagcagccacaggcaatatataaaccaatgagtgcaggcaacacataaaccagtgagctcaggcaacacataaaccatgagcacaggcagtacataaaccaatgagcacaggcagcacataaaccaatgaacataggcaacacataaatcagtgagtgc

SEQ ID NO: 18899 - DNA, 201 bp, Homo sapiens
atcccagcactttgggaggctgaggtgggaggattgcttgagtgcagcagtctgaggccaacctggacaacacagtgagatcctatctctacaaaaaaaaatttaaaaattagccagatatggtggtgcatgcctgtagtcctagctgcttgggagggtgaggtcatggggaaaaggggattgcttgagcccaggagttca

SEQ ID NO: 18900 - DNA, 201 bp, Homo sapiens
ccaggcacacacctcctccaagaaatacttagtaagtacctactgtgtacaattactctggtaggcacttttacatgtaccaccattctctttgtttttttctcatttgctgtttttattaagtgcctactgtataccaggcactcagcgagtctcacaggattgcgatgaatagttcagatatggttccagccttcatga

SEQ ID NO: 18901 - DNA, 201 bp, Homo sapiens
gctgaaattgtgccactgtactccagcctggggacagagtgagactccatctcaaaaaaaaaaaaaaaaaaaaaagtagataattccaaataaacctgtttggacctatgtaagaaaactaaggttttcttgttcactctatttttttagagatgaggtcttgctctgtcacccaggctggagtgcagtggtgtgatcatg

SEQ ID NO: 18902 - DNA, 201 bp, Homo sapiens
tgaacccgggaagcggaggttgcagtgagccaaaatcgcaccactgcactccaacctgggcgagagtgagactctgtctcaaaaacaaaaacaaaaaaaamaaaaaaaaaacgggttgtataccaacgaggtgatggaggctggggtggtcgggtaacaagaggctttaggagtagctgggatctaattaatcttcaaaac

SEQ ID NO: 18903 - DNA, 201 bp, Homo sapiens
ctctaacacagagcttggggggctgatgtgtgggtcccagcctagaagaaacccacaggtgtcttccttggctcccgaaaagatcattcaatccatcttakttagaccctgggtgactgtgttgcagatcagaaggagaattacagttcttatttgggatctgcttttgtgtgaccttggccgagtcagttaactcctcgg

SEQ ID NO: 18904 - DNA, 201 bp, Homo sapiens
tagacctcagctactagggggtggcattatccattatttaaatttccagggtggggcaaagtggctcatgcctgtaatcccacactttcggaggcagaggygggcggattacctgaggtcaggagtttgagaccagctcggccaagatagtgaaaccctgtctccccaaaaatacaaaaattagccaggtgtggtggctgg

SEQ ID NO: 18905 - DNA, 201 bp, Homo sapiens
gttccagtgagcagagatcctgccactgcactccagcctgggtgacagagcaagactccatctcaaaaaaagaaaagagtaataataataataataataawaaaagaaaagagcctcttaaaacactgttatcttggccaggaaggtttaaaaacttaatcctcaggaaagaaatgaatctgagatgctttaggaggtgcg

SEQ ID NO: 18906 - DNA, 201 bp, Homo sapiens
gatcagaaggagaattacagttcttatttgggatctgcttttgtgtgaccttggccgagtcagttaactcctcggggctatggtttcatcatctataaaaytgagggtttgaaccaggtcccccgatttaaagctctcttgccaagacttttcaaccttacctgccagaatccccattctagaaagggagcctttttcaga

SEQ ID NO: 18907 - DNA, 201 bp, Homo sapiens
ggagtgcagtgacacaatcatagctcactgcatctttgaactcctaggcggcactgatcctcctgcctcagcctcctgactagctgggactacaggtatasgccactacgccaagctaattttttttttaagagatggggtcttactatgttgcctaggctggtctcaaattcctgggctcaagcgatcctcctgccttgt

SEQ ID NO: 18908 - DNA, 201 bp, Homo sapiens
cactcctggtacccttgactggaacaacctagacagagatgtctgtcccatctggctgagtgttttaggactgtcaggccccaaagcttccctggctcgayggacagtcgatggcacagctgtggcatgcctccctcttctctccctgccatcatccctaagtgtcttccctcagccctgtccctggtgcaccagtgtgtc

SEQ ID NO: 18909 - DNA, 201 bp, Homo sapiens
agtcacttgatgtcattaagcttcattgtcctcattagtaaaacaggagatgcaataatagttgccgtctctactagaggtattatgagggttaaattagrccagtgatgctcaaactcaagcaggcatcatgaccccctggaaggctttgtttatttatttagggacagagtcttgctttgtcacccaggctggagggcg

SEQ ID NO: 18910 - DNA, 201 bp, Homo sapiens
gtttcactgtgttggccgggctggtctcgaactcttgacctcaggtgatccacccaccttggcctcccaaagtgccgggattacaggtgtgagccactgcycccggccatccctgtgtgtctgaaagccagtgttccttccacttccctcccttccctccctgttcctcatttctgctgcaggccccgggagcaccccctg

SEQ ID NO: 18911 - DNA, 201 bp, Homo sapiens
ttcacagtcacaccacagaagatccagaacctctggcatctgcctccgtgcggggcattaggtagagagccacttttctgcaggcaatggaggctgagacytttcttctttactagcccaggggtattgatggccctgcagagacgggttttgattacctctcactggatcccccagcagcctgttaccagaaagaagggc

SEQ ID NO: 18912 - DNA, 201 bp, Homo sapiens
ggaatgcagcgttagcaaggacttggcacactgcccacacacagccagtgctggagaaggaggccttagccattgttaggaaggaaatcccaaaacgatcmgacttttatttgcaaatgcatccagtcagcccagaaccaccaacatcttcagtctctgtattcaattttattttgcttgttgtgaaattcagccaaagtg

SEQ ID NO: 18913 - DNA, 201 bp, Homo sapiens
tgagctcagaatctagtttcttcagaggaaagatgtaagctggctctgggtccccagtggctttaggctccaaaactccagggtaccttggcattgacctytgtgtctgctctgcccttctctccccacctcagccatattgaaggtggtatcatcggtcctgcagcttggaaatatcgtcttcaagaaggaaagaaacac

SEQ ID NO: 18914 - DNA, 201 bp, Homo sapiens
attgtgtatctccatctcctggaatgcagcgttagcaaggacttggcacactgcccacacacagccagtgctggagaaggaggccttagccattgttaggraggaaatcccaaaacgatcagacttttatttgcaaatgcatccagtcagcccagaaccaccaacatcttcagtctctgtattcaattttattttgcttgt

SEQ ID NO: 18915 - DNA, 201 bp, Homo sapiens
taggtgacttgcttttggagggcttcaacaactacaccttcctctccaatggctttgtgcccatcccagcagcccaggatgatgagatgttccaggaaacygtggaggccatggcaatcatgggtttcagcgaggaggagcagctatgtaagcctcacaccttgagtctggagggtagcttgcctggataccagtggaacc

SEQ ID NO: 18916 - DNA, 201 bp, Homo sapiens
taaaagttcacttaattgagctcttaaaaagtggcaagtatattgcagaactgaatttttaagattttagttaatttagatagcggttcctgccttggacrgtatgatgctgaaatatttctcatctctgtccattcctctgactccaccgcctcttcctagttcagggtcccgtcacctctcaccagggcctctgtagca

SEQ ID NO: 18917 - DNA, 201 bp, Homo sapiens
gtattcttgtccccatataacggaagaggaaactgaggcccccagaaggctaagggactagcataggccttgtgtcttagcctgttaaggctgctatatcraaataccatagactgggtggcttttaaacagatatttgtttctcgtggttctggaggctgggaagtccaagatcaagcttggtatctggtgagggcctag

SEQ ID NO: 18918 - DNA, 201 bp, Homo sapiens
ggggaaaactcagcacacctacttggccccagaactgagagtcaaacctggggacccagcttcgctgccctcagaatgttactcttccctcctgggtagcrtggtatagatagtgtagtattcttgtccccatataacggaagaggaaactgaggcccccagaaggctaagggactagcataggccttgtgtcttagcctg

SEQ ID NO: 18919 - DNA, 201 bp, Homo sapiens
tcaagcgctgctcaaagtcttcgagagacatgatcgtggcgctggcgaagagaaaagcagagttatccaagaggacaaaccgcagcatccctccagcaccrcggatccaggaggtgcgaagggtcagacacacctgggcacaagtcccagccccaaacttcctagatgccacagagtgggccaagtcccttaaccttctgg

SEQ ID NO: 18920 - DNA, 201 bp, Homo sapiens
cgtgccagggattgtggcttagcaagcagaaccaaggctggatatcagctgcagtcactggagcagtgcacaacctgcaccgctgtgtaaggctggcagtrgttggtgaggctgtctacgtgacgatgcgtgagggctttaaacggttcaagccttgataaagggaaaggaattatgatggcccagacccttgaccagatc

SEQ ID NO: 18921 - DNA, 201 bp, Homo sapiens
agcattgcagttgtgtcacatagacagtaagttcctgaggacctataaactccatccttcttgcatgtgcatcattgtatctccagcacattttctggtgmctggcacatagtagctgctcagtatttgttgaatcaatgaattattagagttatttatagaaaagaacctaccagggtcaggatggatggggtgggttat

SEQ ID NO: 18922 - DNA, 201 bp, Homo sapiens
gctattataaacgtggccagttctctgctgcacctggccagttctcctcttttacacacacacacacacacacacacacacacacacacacacacatatattctggtcttagtttccccttctggggaaatggggtaatgccttcatggtccccatttcataaactgcctctgaggccatgtgaaataatgtggccattgg

SEQ ID NO: 18923 - DNA, 201 bp, Homo sapiens
gaaagtcatcccatgtgaattgggtgtgacagggatggaggtggaagaccagaggaacacccgcagtatccccagaatccctaactccctccaaaccagayctgctagaaaaatcacgggcaattcgccaagccagagacgagaggacattccacatcttttactacatgattgctggagccaaggagaagatgagaagta

SEQ ID NO: 18924 - DNA, 201 bp, Homo sapiens
acaagaaactcgaaaactcacaccccctctgaaagggcaccaacaggtgggaacccagggatctgagttgggagttgagaggagcccaattctggaagttyttgaggcaggaatccaggtgtgcctgagagatgccacgaccccgcccccaaggtagagggactcaggtataagtgccccaactttctgacagttagccag

SEQ ID NO: 18925 - DNA, 201 bp, Homo sapiens
tgctattataaacgtggccagttctctgctgcacctggccagttctcctcttttacacacacacacacacacacacacacacacacacacacacacatatattctggtcttagtttccccttctggggaaatggggtaatgccttcatggtccccatttcataaactgcctctgaggccatgtgaaataatgtggccattg

SEQ ID NO: 18926 - DNA, 201 bp, Homo sapiens
ccacaagggcaagaaagacacaagtatcacggtgagtggcagttcccaatcagaggccatgatttagccaaccggtctccagcttgcagcccaaccgagayacaaacagaacatcattgcaagaactcaggccccatctgactacccctcccctgaagactcaaagagggaccgtctttttggcgagcaggcctgttgagt

SEQ ID NO: 18927 - DNA, 201 bp, Homo sapiens
ggtgaccacagactgggctcttctctttgggaggcttgtcctggggacaggggacactgattgaacaggaaatagcccctggcctggctcagtgtagtccwctgagtacctactgccgccgtgcaaggcccccaggtcacggaggtgaagtcaggctgtccctgctcccaggaagctgtatcattaatttattcccctggc

SEQ ID NO: 18928 - DNA, 201 bp, Homo sapiens
tgagcctaggaattctcagctgcagtgagctatgattgcatcactgcactccagcctgggccacagagtgagatcttgtctcaaaaaaaaaaaaaaaaaaatcatacaaggtaagtgtttttattatacccattttataatggggtaaagaaactgaggtatggagaggctaaatgacttgcctaaggtcacccaggtaac

SEQ ID NO: 18929 - DNA, 201 bp, Homo sapiens
ctggcctcttctgcgtggtggtcaacccctataaacacctgcccatctactcggagaagatcgtcgacatgtacaagggcaagaagaggcacgagatgccrcctcacatctacgccatcgcagacacggcctaccggagcatgcttcaaggtgagtgaactcagggctgcacggggccagctccagggagcccctcctgtc

SEQ ID NO: 18930 - DNA, 201 bp, Homo sapiens
ctttgttcaggtgaccacagactgggctcttctctttgggaggcttgtcctggggacaggggacactgattgaacaggaaatagcccctggcctggctcartgtagtccactgagtacctactgccgccgtgcaaggcccccaggtcacggaggtgaagtcaggctgtccctgctcccaggaagctgtatcattaatttat

SEQ ID NO: 18931 - DNA, 201 bp, Homo sapiens
agaatatataaataatgaggatagactgtgcatatatatatttacataatatataatatgtattatatttaatatatttatatttatatatatatatatttgaaggtctggaagcaactaaagctataatcaacagaggttatttaaataaaatatagcatttccaggtagccactacaaagagtgaggctgatctattta

SEQ ID NO: 18932 - DNA, 201 bp, Homo sapiens
aacgcagaatcaagattttcacatttccaccccactttctgtacccatttaaaaaataatgcatttggggctgggcacagtggctcatgcctgtaatcccwtcactttgagagcccgaggctggtggatcacttgaggtcaggagtttgagaccagcctggccaacttggcgaagccccgtctctactaaaaatacaaaaa

SEQ ID NO: 18933 - DNA, 201 bp, Homo sapiens
tagtcccagctagtcaggaggctgaggcaggagaatggcttgaacccgggaggcggagcttgcagtgagccgagatggcgccactgcactccagcctgggygacagagcgagactcaaaaaaaaaaaaaaaacaagtaaaactcttgggtaggtgggtgggttaaggagagataacaaacccagtctcagacattcacagc

SEQ ID NO: 18934 - DNA, 201 bp, Homo sapiens
tatagaatatataaataatgaggatagactgtgcatatatatatttacataatatataatatgtattatatttaatatatttatatttatatatatatatatttgaaggtctggaagcaactaaagctataatcaacagaggttatttaaataaaatatagcatttccaggtagccactacaaagagtgaggctgatctat

SEQ ID NO: 18935 - DNA, 201 bp, Homo sapiens
taattcatggctcttttttcttctttctgtttgcagatcgggaggaccagtccattctatgcacgtaagtggaactgctttttcttctgttttttttttgkttttttttttttttaatctgtagtcgagatccaacctatgaaagaaaagatccatgagtgcagagatctttgatttgttcatggttccaagtgcctctct

SEQ ID NO: 18936 - DNA, 201 bp, Homo sapiens
agcactttgacaggccaaggtaggcagatcgcttgagcctgggagtttgagaccagcctgggtaacatggagaaactccgtctctactaaaaatagaaaaatatcagccagctgtggtggcacatgcctgtgttcccagctactcaggaggctgagatgggaggatcacctgagcacaggaggcagaggttgcggtgagcc

SEQ ID NO: 18937 - DNA, 201 bp, Homo sapiens
tctatccatccattttcccacccatctgcccatccacccacccacctactcacctactcatctgcttatccaccctcccgtccatctgtctattcatccayccacccacccatccatctacctacccatctacccacccttccattcacccatctacccttccttcctttcttccttccttccgtccactcatcttcccat

SEQ ID NO: 18938 - DNA, 201 bp, Homo sapiens
attaatgccatcagcctctgacccagctccaaaccagctgtctagtaacccccgtcgcgcatcctcaacatccggttccccctcttgcattgctgcaatcrtttggtgaaagcacaacccaaatgaaactcaagcttggctgggcacgggactcacacctataatcccagcactttgggaggccaaggcaggtgaatcgct

SEQ ID NO: 18939 - DNA, 201 bp, Homo sapiens
aatcccagcacactgggaggctgaggcaggcagatcatgagggcaggagttcgagaccagcctggccaatatggtgaaactccgtctctactaaaaaaaaatacaaaaattagctgggcgtggtggcgggcacccatactcccagctactcaggagactgaggcggtagaatcacttgaacctgggaggtggaagttgcag

SEQ ID NO: 18940 - DNA, 201 bp, Homo sapiens
tttatttttagcttaatatattttggatatttttctgtgtccatccacaaagctctgcctggttcttttcaatggctgcctattttatttatgtatttatwtcttatttgtttttgaaacagagtcttgctctgttgcccagcctggcatgcagtggcacgatctcggctcactgcaacgtccgcctcctgagttcaagca

SEQ ID NO: 18941 - DNA, 201 bp, Homo sapiens
tttttgcctgagcccaacagggcaggggaactctgaaagtggatggttgatgataggtagacaacaatggttttattgtgcaaaagaagcggttgtctccrtaggagggtcagaaagatattttagtgagaaaagatgaaggaaaaattgcctctgcattccaggagaagggggtctctgaactgttgctcgctgagatgg

SEQ ID NO: 18942 - DNA, 201 bp, Homo sapiens
ctacaacctccacctcctgggctcaagccattgtcccacctcagcctcttgagtagctgagaccacagggattgtgccactatgcccagctaatgtttgcrtttttttttgtagagatagggtttcaccatgttgcccaggctggtttcggactcccgggctcaagcaatccacctgcctcagcttcccaaagtgctggaa

SEQ ID NO: 18943 - DNA, 201 bp, Homo sapiens
ttacttccctgaaccagtatgcaatcatgggatttataggaggttcttaaaagtagctctaaaggacagacattttcctttccatttaaaaaactgagccrggtgcagtggctcacacctgtaatcccagctctttgggaggccgaggtgggtggatcacttgaggtcaggagttcgagaccagcatggccaacatggtga

SEQ ID NO: 18944 - DNA, 201 bp, Homo sapiens
ttgaacctgggaggtggaggttgcagtgagccaagatcgcgccactgccctccagcctgggcaacaagagtgaaactccatctcaaaaaaaaaaaaaaaamaaaacaaaaagcaccacccactagaggcacaaagagttcaaagatcacgtctgccccacaggcccttccagagatgagcatgggcctggggtctggagtc

SEQ ID NO: 18945 - DNA, 201 bp, Homo sapiens
ccaggagttccagactgcagttagctatgatcgtgctactgcacttcagcctgggcatcagagtgacacctcatctcttaaaaaagaaaagaaaaaaaaaagcagatcttattgacttttgtgctttcggtacctggctcaggactcgtttgttgaatgaatatgtgaacacgtgaatatgcattttccattgcttctacc

SEQ ID NO: 18946 - DNA, 201 bp, Homo sapiens
aatacacatcagcataatgccctaactggaatatgaagaagaaataacataagacaattcataatgaaagtgtgcatttcaggccaggcgaggtggctcaygcccgtagtcccagtactttgggagactgaggcgggcagatcacttgagctcaagagtttgagaccagcctgggcaacatggggaaaccccatctctaca

SEQ ID NO: 18947 - DNA, 201 bp, Homo sapiens
gattgtgccactgcactccagcctgggcaacagagcaagactccatctcaaaaaaaaaacaggctgggcacagtggctcacgcctgtattcccagcactttgggaggctgaggcaggcggatcctgaggtcaggagatcaagaccatcctagctaacacggtgaaaccccgtttctactaaaaatacaaaaaatttagcca

SEQ ID NO: 18948 - DNA, 201 bp, Homo sapiens
ggggagatggaggttgcagtgagccaaagtcacaccactgcactccaacctgggcgacagagtgaggctcttgtctcaaaaaaaaaaaaaaaaaaaaaaaragcgtaaaaatctaaagtcataaaggttaggttctaagcctggctaattacaaacagatttttacctccatgagtggcaggtgagacattggaagagtca

SEQ ID NO: 18949 - DNA, 201 bp, Homo sapiens
cactgcagcctcaacctcctgggctcaagcaatgctcctgcctcagcctcttgagtagcttagactacaggtgtgcactaccatgtccaatgaattttttrtttttatttttttgtagagacagagtctcgctatgttgcccaggctggccttgaactcctggtctcaagcaattctccctcctcagcctctcaaagggct

SEQ ID NO: 18950 - DNA, 201 bp, Homo sapiens
tagcagctgtagaatcaaatgataaaaatgaccttcttggccaggcatggtagcccacacctgtcgtcgcagcactttgggaggatgaagggtgaggatcrcttgaagctcagagtttgagaccaaactcggcaacatggcaaaacctgtctctagaaaaaatacaaaaaattagccgagcacggtgacacgcacctgtac

SEQ ID NO: 18951 - DNA, 201 bp, Homo sapiens
tgtgaaaacagccaggcgtggtggcatgcacctgtagtcctagctacttgggagggtgaggcaagaagactgcctgagaccaggaggttgaggctgcagtragctatgatcacgccgctgcactcccgcccaggccacagagtgagaccacgacacttaaaaaaaacaagcaaaaaaaaaaaaaacccaaaatcaccagcc

SEQ ID NO: 18952 - DNA, 201 bp, Homo sapiens
tcacttgaatctgggaggtggaagttgcagtgagcagagatcgcaccactgcactccagcctgggcgacagagcaagactgtcttaaaacaaaaacaaaaacaaaaaacaactaatagtctgtgggaaacaccacgtgggaaacaccactcacactgcctacaatacaaccccaaagttattgaatgcgtggagtataaag

SEQ ID NO: 18953 - DNA, 201 bp, Homo sapiens
tggatcgtttgaggccaggagttcaagaccagcctgggtcacatggcaaaatcccatctctgctaaaaatacaaaaattagccaggcgtggcagtgtgcargtgcatgtagtcccagctactcaatactgaggctcaaggactgctggaactcaggaggcagaggttgcagtgagccaagatcatgccactgcactccagc

SEQ ID NO: 18954 - DNA, 201 bp, Homo sapiens
gacctgtggggttgtccctcttcctctcctctgctgatccctcacctcgaaacctgcttgccactagaccgccccagggtatcaacttagttctcttttgrgcagagtcttgctctgttgcccaggctggagtgcagtagcactatctcagctcactgcaacctctgcctcccagttcaagctatttttggcctattttta

SEQ ID NO: 18955 - DNA, 201 bp, Homo sapiens
tgacaccttgtaatcagaaaggggttaaatatctttggttgaatatcctgtcctgccgattcagaatcactgctgtctataacctcttccctagatcactrttttagatgatgatgataaagatgatattaacggcaattaccaagctcttaaatgtgctgtgggtaaaacaattttaagctctttctgaatccagtctct

SEQ ID NO: 18956 - DNA, 201 bp, Homo sapiens
ccccttcttaatttagttaccctaaggaacaatttgtatagaaaacgcagaatcaagattttcacatttccaccccactttctgtacccatttaaaaaatmatgcatttggggctgggcacagtggctcatgcctgtaatcccttcactttgagagcccgaggctggtggatcacttgaggtcaggagtttgagaccagcc

SEQ ID NO: 18957 - DNA, 201 bp, Homo sapiens
gatcatttgagatcaggagtttgagaccagcctaggcaaaatagcaagacccccatctctacaaaaaataagccgggcatagtggcccacacctgaggtgsgaggatcccttgagcccatgagtttgagcctgcagtaagctatgattgcaccactgcactccaccctgggcatatagtgagacccttcccccaaccaaaa

SEQ ID NO: 18958 - DNA, 201 bp, Homo sapiens; identical to SEQ ID NO: 3053

SEQ ID NO: 18959 - DNA, 201 bp, Homo sapiens
agaagcaagctctgtgatgcctacagtgcaggtatgttgtgagaactgaacgtaaacacagcaaagtgccctgctggttcctggcctagggcaagcacctraagtgtgagctgctcttagcatctccatggtcctcctgacattaacctgccttcccagcagtacatatgacttttcccagcctctgcagggatagcatgc

SEQ ID NO: 18960 - DNA, 201 bp, Homo sapiens
agttccgaacccagtttgcaggggggtgatggacagcaggagtcatagtgaagtcagggaacctcttccagcatcagttctggcttgtaagaagcaagctstgtgatgcctacagtgcaggtatgttgtgagaactgaacgtaaacacagcaaagtgccctgctggttcctggcctagggcaagcacctaaagtgtgagct

SEQ ID NO: 18961 - DNA, 201 bp, Homo sapiens
tccgtgcggggcattaggtagagagccacttttctgcaggcaatggaggctgagacctttcttctttactagcccaggggtattgatggccctgcagagaygggttttgattacctctcactggatcccccagcagcctgttaccagaaagaagggcagacgcagggagcctgggtctgtgctcagtccccgctgggtttt

SEQ ID NO: 18962 - DNA, 201 bp, Homo sapiens
tgtgtagggacacggtgcatggacaggacaagttcaacaggcattagcagtcagctgccgaggacccaccgtcaagggccatgcagtggccaccttcacartcacaccacagaagatccagaacctctggcatctgcctccgtgcggggcattaggtagagagccacttttctgcaggcaatggaggctgagacctttctt

SEQ ID NO: 18963 - DNA, 201 bp, Homo sapiens
cggtcagtgtgtagggacacggtgcatggacaggacaagttcaacaggcattagcagtcagctgccgaggacccaccgtcaagggccatgcagtggccacmttcacagtcacaccacagaagatccagaacctctggcatctgcctccgtgcggggcattaggtagagagccacttttctgcaggcaatggaggctgagac

SEQ ID NO: 18964 - DNA, 201 bp, Homo sapiens
gtaacctcgaactcctaggctcaagcaattttcctgcctcagccttccaaatagctggggctacaggcacacacctctgtccacagctaattaaaaaaaawttttttttcatagagataggggtctcgctttgagtctcaaactcctcgcctcaagcaatccttctgcctcagcctcccaaagcactgggattacaggcat

SEQ ID NO: 18965 - DNA, 201 bp, Homo sapiens
taccaccatgctcagctaattaaaaaaaaacaactgttttttgtttgtttgttttgagacagagtttcacccctgtcacccaggctggagtgcaatggcaygatctcagctcactgcaacctccacctcctgggttcaagtgattctcctgcctcagcctcctgagtagctgggattacaggcacatgccaccatgcccag

SEQ ID NO: 18966 - DNA, 201 bp, Homo sapiens
gttctgttgctgtcaggcctggggtggtttcagctcagcagatgttggttccgcctgacaacttgacctgtggggttctgagtgttcgcaagaatctcccygccccacctcccatcctctgtaccatctgcctcctgcttgcccacagcatggggttaacggctgaagttgggcagcaaagcctgaactgtgttttcctgt

SEQ ID NO: 18967 - DNA, 201 bp, Homo sapiens
ttaaaaaaagatgtaactgatgacctaaaaatgaaaaatacatgtataaaaaattttttttcaaaagagaaaaaaggaaatatttgtatggaaaatgatasaatagacaaagtcaacaaacaaaagattaccacggaaaaaattattttcaatgcaggagaaaagattagtagtaaaaatatacaaagggccaggcacagt

SEQ ID NO: 18968 - DNA, 201 bp, Homo sapiens
gagctcctgacctcaggtgatccactcacctcagcctcccaaagtgctgggattacaggcgtgaaccaccacgcccggcctttttacacttttttttttttgccttttcccccctcttttgtgtggagaatggggtcttgttatattttccaggcaggtcttgaactcctgggctccagctttcctcatgcctgtgccttc

SEQ ID NO: 18969 - DNA, 201 bp, Homo sapiens
aaaagacattggtgatactattgagggcagtctcagtcccatggtatggaaggttgtcagcatacaataaagtgcggaagtgaggaaccagtaacaacaamagcagaatgactcctcctgaggtttggaaaaagatgtgcaagatccaatgtgatcaggcccctgcatagttttctacacatttcttaccctaccacctct

SEQ ID NO: 18970 - DNA, 201 bp, Homo sapiens
gtcccagacactcaggaggctgaggtgggagaatcacttgccccaggaggtcaaggctccagtgagctgtaattgcaccatggcactctactctgggcaayggagcgaggcccagtctcaaaaaaaaaaaaaaaaaaaaaaaaaaaaaaaaaggcagtgtttaacagtgctggcacaactgggctatccacctaaagaaaa

SEQ ID NO: 18971 - DNA, 201 bp, Homo sapiens
tagttctttttaaactgcctcatgtatttttacactttttggtttgtttgtttttttttgggggatggagtttccctcttgtcgcgcaagctggagtgcaygatctctgctcactgcagcctccacctcccaggatcaagcgattctgcagcctcagcctcctgagtagctgggattacaggtgcatgccaccatgcccag

SEQ ID NO: 18972 - DNA, 201 bp, Homo sapiens
tatagtggcacatgcctatagtcccagacactcaggaggctgaggtgggagaatcacttgccccaggaggtcaaggctccagtgagctgtaattgcaccayggcactctactctgggcaatggagcgaggcccagtctcaaaaaaaaaaaaaaaaaaaaaaaaaaaaaaaaaggcagtgtttaacagtgctggcacaactg

SEQ ID NO: 18973 - DNA, 201 bp, Homo sapiens
attttctgtcttccaagatggctttgctgttctcccctctctagttctttttaaactgcctcatgtatttttacactttttggtttgtttgtttttttttgggggatggagtttccctcttgtcgcgcaagctggagtgcacgatctctgctcactgcagcctccacctcccaggatcaagcgattctgcagcctcagcct

SEQ ID NO: 18974 - DNA, 201 bp, Homo sapiens
cattttctgtcttccaagatggctttgctgttctcccctctctagttctttttaaactgcctcatgtatttttacactttttggtttgtttgtttttttttgggggatggagtttccctcttgtcgcgcaagctggagtgcacgatctctgctcactgcagcctccacctcccaggatcaagcgattctgcagcctcagcc

SEQ ID NO: 18975 - DNA, 201 bp, Homo sapiens
tcaaggaaagggagaaagacatttgccttacttgccaatttataaaacttgcaaatataaaagatgcattctggttttataaggaatttgcaggggcagcrggactaagcatttttcattatacatgttttgccagtgactttgtagaacaggggtcaagactttttctgtaaaaggccagatagtaaatcttcaggcttt

SEQ ID NO: 18976 - DNA, 201 bp, Homo sapiens
ctgaaagacaggcaggaaggcaccaaacgccaggaaagtgtggtcttaccccgactttccgcagtaggtctcccacaatgttgagggctgatatccgggcygcaggtgtgaggggggtccccccggtggagtcgtccaggcctgggtgtgcaaagggaagagcatgtaactcaccaacctatagtcatgtctgtgcgttaa

SEQ ID NO: 18977 - DNA, 201 bp, Homo sapiens
ccattttctgtcttccaagatggctttgctgttctcccctctctagttctttttaaactgcctcatgtatttttacactttttggtttgtttgtttttttttgggggatggagtttccctcttgtcgcgcaagctggagtgcacgatctctgctcactgcagcctccacctcccaggatcaagcgattctgcagcctcagc

SEQ ID NO: 18978 - DNA, 201 bp, Homo sapiens
aaagatgcattctggttttataaggaatttgcaggggcagcaggactaagcatttttcattatacatgttttgccagtgactttgtagaacaggggtcaaractttttctgtaaaaggccagatagtaaatcttcaggctttgcaggccaggtggcttctggcacagctattcaactctgccattgtaatacaagagcagc

SEQ ID NO: 18979 - DNA, 201 bp, Homo sapiens
ttttacttaagcacaaaaggatccctccctgtaattaacataaaagctgaaaggccaaattctttgccctaggctttcaagatttttttttttttttttttgagaccaagtctcactttgtcacccagcggtgcgatctcagctcactgcaacctccgcctcccggattcaaacaattttcctgcataagcctctcaagta

SEQ ID NO: 18980 - DNA, 201 bp, Homo sapiens
aaaatttttaatgcaaaaaattttttttaattacgaaaaattttttaaaatgtttgggagctgcctggaaaaagatcacggctcactgcagcctcaaccavtccttccacctcagcctcctgaatagctaggactatgcacaatcatgcttggcttaaaaaaaaaaaaaaaattcttttttaattacaaaaaattttttaa

SEQ ID NO: 18981 - DNA, 201 bp, Homo sapiens
aaaaaatttttaatgcaaaaaattttttttaattacgaaaaattttttaaaatgtttgggagctgcctggaaaaagatcacggctcactgcagcctcaacyaatccttccacctcagcctcctgaatagctaggactatgcacaatcatgcttggcttaaaaaaaaaaaaaaaattcttttttaattacaaaaaatttttt

SEQ ID NO: 18982 - DNA, 201 bp, Homo sapiens
tcccagcactctgggaggccaaggcaggaggatggcttgacatcaggagtttgagaccagcctgggccacaaagtaagatcccatctcagtttttttttttgttttgttttttacttttttagacgctgtgtcacccaggctggagtgcactggtgagatcacagctcactgcagcctcaacctcccaggctcaaccaatc

SEQ ID NO: 18983 - DNA, 201 bp, Homo sapiens
ctcctgagtagctgggaccaccagtgtacaccatcaggcctggctaatttttgcattcttgtagaggccaagtcggggcagggggtttcaccatgttgccygggctggtgtcagactcctgagctcaagtaatctcccaccttggcctcccaaagcactgggattacaggtatgagcacccggccaaaagagaaggcagtt

SEQ ID NO: 18984 - DNA, 201 bp, Homo sapiens
cagcattaaggagagacaggggtgtcctactggctggagctaaaatccacctcagaggccaggtgcactggcacacacctgtaatcccaacactttgagargctaagacaggtggatcgtttgaggccaggagttcaagaccagcctgggtcacatggcaaaatcccatctctgctaaaaatacaaaaattagccaggcgt

SEQ ID NO: 18985 - DNA, 201 bp, Homo sapiens
atcacttgctcccagaagtttcaggctgcaatgcactatggtggcaccactgccctccagcctgggtaacagagcaagaccctgtttccaaaaataaatawaagaaaaaacatctgtgctttttttgtttttttgttgttttttgttttgttttgtttttgagacagagtctagctctgtcgcccaggctggagtgcagtg

SEQ ID NO: 18986 - DNA, 201 bp, Homo sapiens
gcttcacgtccccaactgcttcatggcattaggtttgtcttcccaaagaaggcaaccagcacttcccctttcaccgtccatcatacctagccctgggcacmcacagttttgactcttccatgaagcagctcatcaaaatgtacattgggagtttaatgagaaaaagaaaaccacacagacatgccagggccccacccagac

SEQ ID NO: 18987 - DNA, 201 bp, Homo sapiens
tggaagtaagctgggttctctgtctgcagacgtactctggcctcttctgcgtggtggtcaacccctataaacacctgcccatctactcggagaagatcgtygacatgtacaagggcaagaagaggcacgagatgccgcctcacatctacgccatcgcagacacggcctaccggagcatgcttcaaggtgagtgaactcagg

SEQ ID NO: 18988 - DNA, 201 bp, Homo sapiens
ggtgagtgaactcagggctgcacggggccagctccagggagcccctcctgtcctgcttgtctgcagttcttgccaggaatgtggagtttggcaggcactgygagggaccaggagttactgtggctgaaaaagggaaaaagcaaaaggaacatctgtgtttgcagcctgggagggtgagggagagccaagagcttgggcaaa

SEQ ID NO: 18989 - DNA, 201 bp, Homo sapiens
tctgtgtttgcagcctgggagggtgagggagagccaagagcttgggcaaatacgggcatgggcccgctccagctccagctccggggctcgctgcccaaggkccccgtcgggccagctgtctgcaaaggatggaaagagggtggggaacagccctggggctgagccattgtggtctgtgttgacacctacctgtccctcaac

SEQ ID NO: 18990 - DNA, 201 bp, Homo sapiens
tgtaatccctgctactctggaagctgaggcaggagaatcgcttgaacccagggtggggtggaggttgcagtgagccaagattgcgccactacaccccagcytgagtgatggagtgaaaaccctgtctcaaaaataaataaaatgaggattgtacagtgaggctaaatgccagatgcctgcaggttccctacccctccctga

SEQ ID NO: 18991 - DNA, 201 bp, Homo sapiens
ggagggggccgtcaagtccaagttcaagtccaccatcgcggcgctggaggccaagattgcacagctggaggagcaggtcgagcaggaggccaggtatgcgsgtgtggagttccgaacccagtttgcaggggggtgatggacagcaggagtcatagtgaagtcagggaacctcttccagcatcagttctggcttgtaagaag

SEQ ID NO: 18992 - DNA, 201 bp, Homo sapiens
ctcatggccttcactctcctccccaggccgagcagctcagcaacgagctggccacagagcgcagcacggcccagaagaatgagagtgcccggcagcagctygagcggcagaacaaggagctccggagcaagctccacgagatggagggggccgtcaagtccaagttcaagtccaccatcgcggcgctggaggccaagattg

SEQ ID NO: 18993 - DNA, 201 bp, Homo sapiens
agtggagttttacaggatgaaggagaggacagggtgcccgggatcaagggactcgtgcagaggccaaacaaggcaggaagaggcatggtctcagtgcgctstcttgggcttccctgagtccgcctcatggccttcactctcctccccaggccgagcagctcagcaacgagctggccacagagcgcagcacggcccagaaga

SEQ ID NO: 18994 - DNA, 201 bp, Homo sapiens
gctgaggcaggcagatcatgagggcaggagttcgagaccagcctggccaatatggtgaaactccgtctctactaaaaaaaaatacaaaaattagctgggcstggtggcgggcacccatactcccagctactcaggagactgaggcggtagaatcacttgaacctgggaggtggaagttgcagtgagctgagatcgtgccgc

SEQ ID NO: 18995 - DNA, 201 bp, Homo sapiens
ctggctgtgtaactacagatgagtcttctaatcttctccaagcctcagtttcacccattagatgatgagggcaatacccctgaggcatgactccaaggagkgggcatcttttaaggcgggggagggtagaggcccccaccatggccgcccttcccccaggaacgcactccaggacgagaagcgccgcctggaggcccggat

SEQ ID NO: 18996 - DNA, 201 bp, Homo sapiens
cgcttatcccattttctgtcttccaagatggctttgctgttctcccctctctagttctttttaaactgcctcatgtatttttacactttttggtttgtttgtttttttttgggggatggagtttccctcttgtcgcgcaagctggagtgcacgatctctgctcactgcagcctccacctcccaggatcaagcgattctgca

SEQ ID NO: 18997 - DNA, 201 bp, Homo sapiens
aaagagaatgagaagaaagccaagagcttggaagcagacctcatgcagctacaagaggtaaagcctcgccttgctaggagagcctcagatgcgggtgtcayggtagcaccccttggcagctccagtctgtgcattcccagatttcatttcgtcctcctctggggtccacctgtctagaaagacacacgcttccctcctcta

SEQ ID NO: 18998 - DNA, 201 bp, Homo sapiens
catgcagacggcttagagtcaagtaatttttgaaggcttattaagaaaaatagccatcctctgctacttctcaactcctttaattgattttttttttttttggtatttaccaccatatctctgaaaacaacacttgatcattgtgctgctatcttaattttgttttcaattttaggtatcatctattgactttcctccatg

SEQ ID NO: 18999 - DNA, 201 bp, Homo sapiens
ggggcagcacacatctctattcctcgcccagcttcacgagtatgagacggaactggaagacgagcgaaagcaacgtgccctggcagctgcagcaaagaagmagctggaaggggacctgaaagacctggagcttcaggccgactctgccatcaaggggagggaggaagccatcaagcagctacgcaaactgcaggtgggtga

SEQ ID NO: 19000 - DNA, 201 bp, Homo sapiens
tgaggcagaagccagggagaaggaaaccaaggccctgtccctggctcgggcccttgaagaggccttggaagccaaagaggaactcgagcggaccaacaaartgctcaaagccgaaatggaagacctggtcagctccaaggatgacgtgggcaagaacgtaagtggctctgggtggtttttctcgtccatgtttcgcctgcc

SEQ ID NO: 19001 - DNA, 201 bp, Homo sapiens
tttctttaattctgcacacatatctgtaaacactttctttattaaatgttcctgagttaatatcttaagcacactgttcattttctgtgccacctgttaaatgatgagcatttaatatgattgtcagcatccaaaaaagatcctgcgtagtgcttagttcggtgcccaacacatagtaagtgctcaatgaacggtggctgt

SEQ ID NO: 19002 - DNA, 201 bp, Homo sapiens
atcctgtgtttttttaatgttctaatgtagtcccagcaccttttgcatggcatctgggacgtacagaatgaatgaatgaatgaatgaatgaatgaatgaaygaacgaacgatcagtagtttctgtttctgttggatgggcctaggctggatagcataatggaccatgctcatacctgggggcgggccaggctgggcttggt

SEQ ID NO: 19003 - DNA, 201 bp, Homo sapiens
aattcctgacttcaggtgatccacccatctcggtctcccaaagtgtcaaaattcacttaaaccccaagaaacaaaccaaaaaaaaaaaaaaaaaaaaaaarggtggcagtttttttctcttctgagacaacgtcgtgctgtcacccaggatggagtgcagtgttggaatctcagctcactcagcctcaacctcccaggctg

SEQ ID NO: 19004 - DNA, 201 bp, Homo sapiens
gctggagtggagtggcacaatctcagctcactgcaacctctgccacctgagttcaagcagttctcctgcctcagcttcccgagtagctgggattacaggcrcgcgccaccacaccttgctaatttttgtatttttagtagagatgaggtttcactgtgttggccgggctggtctcgaactcttgacctcaggtgatccacc

SEQ ID NO: 19005 - DNA, 201 bp, Homo sapiens
cagggtcccacatcagaatctagtgctgatagcctccttgtctgaatgacataggccctccaagaatgattcatttcatttgggacaggggtcagttttgcttctaatcttgcttttaaataacaatgaacaatggttaagtatttgctgtgtgccaggaatttaccaaatccttttttcttgatgtactacactgttcag

SEQ ID NO: 19006 - DNA, 201 bp, Homo sapiens
caaaaagcagccctcttccctggaggcaaacatgattcacaggttcatgtatgtacacacacacacacacacacacacacacacacacaccccaaacatamgaaaaagtcactccttgtatgttttgcagtatgattttttttccacttaaccctaccttatagttttttctgtctgttcataactatctagtcagacttc

SEQ ID NO: 19007 - DNA, 201 bp, Homo sapiens
gaaggctttctaccatagtaagtgggagcaaatggatgggtggtcagcagctgggtccttttgctgagctgggccagggaccccatggcgtgagaatagctgttgtgaagggccttgtaatgtctggtttggcctgaggaaccagagaagtctgggatctctaggctttgttcctggaacatagtgactgatttgaagcca

SEQ ID NO: 19008 - DNA, 201 bp, Homo sapiens
catgccactgcactccagcctgggtgagagagactcttaaatttcttttttaaatccaccttgaaggccaggtgtggtggcccacgcctgtaatgccagcrctttgggaggccaaggtaggagaactgcttgagctcaggagttccagaccagcctgggcaacaatatcaagacctcatctcaatttaataaaataatcca

SEQ ID NO: 19009 - DNA, 201 bp, Homo sapiens
tttttgtatttttagtagagacgggtttcaccatgttggctaggctggtctccaactcctgacctcaggtgatccacttgcctcggcctcccaaagtgctrggatcacaggcctgaaccaccacgcccagccagtatgttggatatttctaaagaggcccgtctgtagggagctagagggaaaattggactctttggggcc

SEQ ID NO: 19010 - DNA, 201 bp, Homo sapiens
ccatatctctgaaaacaacacttgatcattgtgctgctatcttaattttgttttcaattttaggtatcatctattgactttcctccatgaaagatgaaatktagctcattcaccctctggatttgcccctatttcctcgttccaacacacatgcctcatatcagagtcccagtataattttatcttagttttgacaaactc

SEQ ID NO: 19011 - DNA, 201 bp, Homo sapiens
ttctttcttcttttttttttttttgagatggaatttcacttttgttgctcaggctggagtgaagtggagcgatcttggctcattgcaacctccacctcccrggttgaagtgattctcctgcttcagcctcccgagtagctgggattgcagggatgtgccaccatgcctggctgatttttgtatttttagtagagacgggtt

SEQ ID NO: 19012 - DNA, 201 bp, Homo sapiens
aaggctttctaccatagtaagtgggagcaaatggatgggtggtcagcagctgggtccttttgctgagctgggccagggaccccatggcgtgagaatagctsttgtgaagggccttgtaatgtctggtttggcctgaggaaccagagaagtctgggatctctaggctttgttcctggaacatagtgactgatttgaagccag

SEQ ID NO: 19013 - DNA, 201 bp, Homo sapiens
tcttggcccttctaggcagggcctgccattacctccaaagaccagcaggtggagccttgcaaaggcaatcttggagctgtaatctcaggttgtaaagtgayggctcctggagtcaggtatctgtctttttttttttttgagacggagtctcgctctgtcgcccaggccggactgcggactgcagtggcgcaatctcggctc

SEQ ID NO: 19014 - DNA, 201 bp, Homo sapiens
actttgggaggctgagatgggaaaatcacttgaggccaggagttggaggccagcctagccgagagagacccccgtctctataaaaaaaaggtgtttttttkttgttgttgttagtaagccaggcaggatagtgcacacctgtactcccaacctcttggaaggctaaggcaggaggatcatgtgagccaggagttccaggct

SEQ ID NO: 19015 - DNA, 201 bp, Homo sapiens
cttgagccttccctttcatcagaatccggggttaagggattggctattaaaacagtctcagatcctgccagaaaggaccatgtctgtgagtgacatatgarcagttcttcatctcctcccaatgagtgagtgtggcttgtgttcagtcattctcatttactgagcacctactatgtgacatagtagccatcaactccaatt

SEQ ID NO: 19016 - DNA, 201 bp, Homo sapiens
gacacccaggtgagtgtcctgccacatcatccaggggacctggggggtggccttcctcggggcaggtccctgggacctctttgcatcccttttgcaggagytgcttcaagaagaaacccggcagaagctcaacgtgtctacgaagctgcgccagctggaggaggagcggaacagcctgcaagaccagctggacgaggagat

SEQ ID NO: 19017 - DNA, 201 bp, Homo sapiens
gcaggcgctcaagggccagttcgaaagggatctccaagcccgggacgagcagaatgaggagaagaggaggcaactgcagagacaggtgcgtgctgccgggkaggccagcagagggaggtcgggtggcctttttcattcctatcaccactctcatggttggtgtggaaacttcgttttctttatttttttttgaaacagagt

SEQ ID NO: 19018 - DNA, 201 bp, Homo sapiens
ccattggggctcaaataagttcttagaaccacagagtctagggccagggtcccaactcataggtgacggagttcccttcaagccacagattctgttttttktgtgtgtgtgtgtgtttttttttttttttatcagagtcccatacctcacgggtattttctcaatcagtgaacacctcaagtactagcccatgtgttttga

SEQ ID NO: 19019 - DNA, 201 bp, Homo sapiens
ggaagtcaacatgcaggcgctcaagggccagttcgaaagggatctccaagcccgggacgagcagaatgaggagaagaggaggcaactgcagagacaggtgygtgctgccggggaggccagcagagggaggtcgggtggcctttttcattcctatcaccactctcatggttggtgtggaaacttcgttttctttattttttt

SEQ ID NO: 19020 - DNA, 201 bp, Homo sapiens
ggatccatttagtgggatcaggtcccagtcaataccattggggctcaaataagttcttagaaccacagagtctagggccagggtcccaactcataggtgayggagttcccttcaagccacagattctgttttttttgtgtgtgtgtgtgtttttttttttttttatcagagtcccatacctcacgggtattttctcaatca

SEQ ID NO: 19021 - DNA, 201 bp, Homo sapiens
cccggccatgcatcctgtgggaggccaaagccacctccctgatctcctgaggtgccgctcacggtgggtttctcaatcgtcttcatgaagttgagcctcayagaatggggctgcccgctctgccggcaggtccatgagctggagaagtccaagcgggccctggagacccagatggaggagatgaagacgcagctggaagag

SEQ ID NO: 19022 - DNA, 201 bp, Homo sapiens
cctgggcaataagagcgaaactccatctcaaaaaaaaaaaaaaaaaaaaaagaaacattaaaaaatttattagctgggtgcgtgggctcacacctgtaatyccagcactttgggaggccaaggtgggtggatcacctgaggtcaggagttctagacaagcctggccaacatggtaaaaccccgtctctactaaaaatacaa

SEQ ID NO: 19023 - DNA, 201 bp, Homo sapiens
gcttgaatccaggaggtggaggtgcagtgagccaagactgtaccactgcactccagcctgggtgacagaataagactctgtctcaaaaaaaaaaaaaaaaaggaaatgggaggctgaaggtttgatcgagggagattgcaagatgaggtggaatcattccaaggtgggttcacatctcagcccttgaagaggttatttcct

SEQ ID NO: 19024 - DNA, 201 bp, Homo sapiens
agtgcagtggcactatcttggctcactgcaacctctgcctcctgggtttgagcaattctgcctgagcctcccaagtggctgggattacaggtgcacaccaycacacctggctaatttttgtattttcagtagagacggggtttcaccatgttggccaggctggtcttgaactcctggcctcaagtgatttgcccacctcgg

SEQ ID NO: 19025 - DNA, 201 bp, Homo sapiens
atggtgcacgcctgtaatcctagttactcgggaagctaaggcaggagaatcgcttgaacccagaggcagaggttgcagtgagccaagattgcaccactgcmctccagcatagacaacagagcaagactccatctcaaacaacaacaacaaaaatcattttgaacaaatgcatttaaatatatttgtctttccacccttttt

SEQ ID NO: 19026 - DNA, 201 bp, Homo sapiens
tggttttagcaattactggtagaacttgccaacttgccaagaccctttctttcttcctttctttctttttttttttttgagacggagtctcactctgtcgyccaggctggagtgcagcggcgcatctccactcacccactcactgcaagctccgcctcccaggttcacaccattctcctgcctcagcctccagagtagctg

SEQ ID NO: 19027 - DNA, 201 bp, Homo sapiens
gcttccctgggccaccccagaaaaagaagaattgtcttgggccacacgtaaaatacactagcactaatgatagctgatgagctaaaaaaaaaaaaaaaaaatcgcgaaaaaatatcatactgttttaagaaagtttatgaatttgtatcgggccacattcaaagccgtcctgggccccatgcagcctgtgggctgcaggtt

SEQ ID NO: 19028 - DNA, 201 bp, Homo sapiens
gaagttcttgaggcaggaatccaggtgtgcctgagagatgccacgaccccgcccccaaggtagagggactcaggtataagtgccccaactttctgacagtkagccagactccacaggtaggaccagaatcttggcccttctaggcagggcctgccattacctccaaagaccagcaggtggagccttgcaaaggcaatcttg

SEQ ID NO: 19029 - DNA, 201 bp, Homo sapiens
ccttatgtgaaaggcagaaccaaatagactccagaatgagacccaggtttgggtcccagctctgacacttctttttttttgagatggaggctgactctgtygccaaggctggagtgtagtggtatgatgtcggcttacggcaacctccacctcccgggttcaagtgattctcctgactcagcctcccaagtagctggggct

SEQ ID NO: 19030 - DNA, 201 bp, Homo sapiens
cccagggatctgagttgggagttgagaggagcccaattctggaagttcttgaggcaggaatccaggtgtgcctgagagatgccacgaccccgcccccaagrtagagggactcaggtataagtgccccaactttctgacagttagccagactccacaggtaggaccagaatcttggcccttctaggcagggcctgccattac

SEQ ID NO: 19031 - DNA, 201 bp, Homo sapiens
agaaaaaaaaaaaaaaaaaaaagaagtccactttacttgtcatagtgcttagaacaaatgaaacactctcctagccctcttgggatgtaattggctaccayctgcacaaactcttcattattgcacaagaatatcaatatacttaatgctactgaactgtgtttaagtggccgaggtggtgaatgttagctgtattttacc

SEQ ID NO: 19032 - DNA, 201 bp, Homo sapiens
ctcgaaaactcacaccccctctgaaagggcaccaacaggtgggaacccagggatctgagttgggagttgagaggagcccaattctggaagttcttgaggcmggaatccaggtgtgcctgagagatgccacgaccccgcccccaaggtagagggactcaggtataagtgccccaactttctgacagttagccagactccaca

SEQ ID NO: 19033 - DNA, 201 bp, Homo sapiens; identical to SEQ ID NO: 3117

SEQ ID NO: 19034 - DNA, 201 bp, Homo sapiens
ggcatggtagcgcatgcctgtagtcccagctacttgggaggctgaggcacgagaatcacttgaacccagaaacgtggaggttgcagtgagctgagattgcrtcactgcactccagcctgggtaacagagcgagactctgtgtcaaaaaaaaaaaaaaaaaaagacttagcaactattattactagtattagtattattaat

SEQ ID NO: 19035 - DNA, 201 bp, Homo sapiens
tgacctcatgatccgcccgcctcagcctcccaaagtgctgagattacaggtgtgagccaccatgcccagccgagttgttccttttgactaaagaattggtyactgagttgtgttcatccttatggcttcttatccaacccttgcgtggggagcaaaagtctgctctcttctttgatgtcctaaaataagacctgtcttccg

SEQ ID NO: 19036 - DNA, 201 bp, Homo sapiens
agcacatgtgacatgacacccaacagtgtgcgcccttatcactgcatcttgacgagatggcagaggctgtgtgtgtagcttggatttttcttcctttcatrccaaaagccactcttacgtggttagggcactcagcagtgctgtcctcccttgtccagtgaagacactgcactgaatgaatatgacagttccactatctgg

SEQ ID NO: 19037 - DNA, 201 bp, Homo sapiens
agaagacaaggtctgctgatctagccccatcatcccgcaccatcatgcttagtgctgtggaaatccacccagtacagtagcccagcctcctagctgccctytcccatcaccccggaccctgtgatctccatgccaccctcacctgccctcccctctgctctccctcctgccaccccgcatcgcggagaagctctcctgaaa

SEQ ID NO: 19038 - DNA, 201 bp, Homo sapiens
cgcagcatccctccagcaccgcggatccaggaggtgcgaagggtcagacacacctgggcacaagtcccagccccaaacttcctagatgccacagagtgggmcaagtcccttaaccttctggggcatgggctctttacctgcagaatgggactcatcatagctcatggggtgcacgaggctgtcatgaggattaaataagat

SEQ ID NO: 19039 - DNA, 201 bp, Homo sapiens
acagtgttgggtttacaggtgtgagccaccttgtccagccctacttcctgcctcctgagcactgggtagtatttcacagtgtggaaatagcatggcttatrtatccagctgtatgttggtggacatttgggttgtctgacttttggtattttaggcgatgacacacatccctttctgaagggcctttgggtggtctctgtt

SEQ ID NO: 19040 - DNA, 201 bp, Homo sapiens
tgggaggcagaggtgcatcacttgagtccaggagttcaagaccagcctgggcaacatagcgagacccctgtttccgccaaaaaaaaaaaagcctggcctgrtgaagcacacctatagtcccatctacttgggaggctgagccaggatgatcgcttaagcccaggagtttaaggcggctgtgcactatgatcacgcctagga

SEQ ID NO: 19041 - DNA, 201 bp, Homo sapiens
cctgaccaacatggagaaaccccgtctctactaaaaatacaaaattagctgggcatggtggtgcatgcctgtaatcctagctactcgggaggctgaggcargagaatcgattgaacccaggaggtggagcttgtggtgagccgagatcatgccattgcactacagcctgggcaagaagagcgaaactccatctcaaaaaaa

SEQ ID NO: 19042 - DNA, 201 bp, Homo sapiens
aggcaagtggatcacctgaggttgggagttcgagagctgcctgaccaacatggagaaaccccgtctctactaaaaatacaaaattagctgggcatggtggygcatgcctgtaatcctagctactcgggaggctgaggcaagagaatcgattgaacccaggaggtggagcttgtggtgagccgagatcatgccattgcacta

SEQ ID NO: 19043 - DNA, 201 bp, Homo sapiens
atttctttcgatggcctgattcaagcgctgctcaaagtcttcgagagacatgatcgtggcgctggcgaagagaaaagcagagttatccaagaggacaaacsgcagcatccctccagcaccgcggatccaggaggtgcgaagggtcagacacacctgggcacaagtcccagccccaaacttcctagatgccacagagtgggc

SEQ ID NO: 19044 - DNA, 201 bp, Homo sapiens
ctgggcaacaagagtgaaactccatctcaaaaaaaaaaaaaaaacaaaacaaaaagcaccacccactagaggcacaaagagttcaaagatcacgtctgccscacaggcccttccagagatgagcatgggcctggggtctggagtccctcattgcagggttccttcttccagccaagcatgccatgcctgtgttggacgcct

SEQ ID NO: 19045 - DNA, 201 bp, Homo sapiens
cttgagcctcagaggcagaggttgcattgagccgagatcacaccactgcactccagcctgggcaaagagtgagactcggtctcaaaaaaaaaaaaaaaaaaggcattgcaaattgcaacttgttgcagtcacatatgacagcagtccccatcctcttggcaccagagactggtttcgtggaagacaatattttccagggtg

SEQ ID NO: 19046 - DNA, 201 bp, Homo sapiens
ctgcctcagcctcttgagtagcttagactacaggtgtgcactaccatgtccaatgaattttttatttttatttttttgtagagacagagtctcgctatgtygcccaggctggccttgaactcctggtctcaagcaattctccctcctcagcctctcaaagggctgggattacaagtatgaaccaccatgcctggccagaaa

SEQ ID NO: 19047 - DNA, 201 bp, Homo sapiens
tggccaacatggtctctgctaaaccctatctctactaaaaatacaaaaattatctgggcatggtcgtgggcacctgtaatcccagctactcgggaggctgwggcacgagaatcgcttgagcctcagaggcagaggttgcattgagccgagatcacaccactgcactccagcctgggcaaagagtgagactcggtctcaaaa

SEQ ID NO: 19048 - DNA, 201 bp, Homo sapiens
cccattgaagaactagtggagaaaccctaaggagaagagatttgggaggaaagtgggattcttttttcctaccccctcttattcagaggtttgatttttttgggtggggggtgggagggaattgtctcctttccacaggtcttgaatccaaacaggtgggtcttccacgttaggcacaagcgtgtaattccaagagcagat

SEQ ID NO: 19049 - DNA, 201 bp, Homo sapiens
ttcagctgttaacaaatgggtgaagtgggccaagtacagggagaggcagatgacactaaggtctccgtgtcacggatatggggattgggggaaactcaacratgtgtgttctaaacaaccactactcaggttttttattttttaacttttgctctgtcacccaggatggagtgcaatggtacaatcatagctcactgcagc

SEQ ID NO: 19050 - DNA, 201 bp, Homo sapiens
tgcactctagcccaggccaacgcttaaaaaaaaaaaaaaaatcaccagcctggggcaacatggcgaaaccaaaatacaaaaattagcccggcatagtggtrcacggctgtagttccagctacttgggaggccaaggcgggcagatcacttgaggtcaggagtttgagaacagcctggccaacacggtgaaacccccgtctc

SEQ ID NO: 19051 - DNA, 201 bp, Homo sapiens
tttctttgatttactcaacgatactattttagaattgttcagagacggaacttgacgctgaactgaaagtcattaggtggcagggtgtgaaataagatagrgaattttgtttgaaggaaattgatgttttccctttgagatagctaccgttgatggaacacttcagtgccacatgctgttgcaacatttaacttaatttat

SEQ ID NO: 19052 - DNA, 201 bp, Homo sapiens
ctgagagattaaatggtgaactgtccgtccggggtttggcaaaaagaatgcaggctattaataaactgctttgcatagttttttgtttctttgatttactyaacgatactattttagaattgttcagagacggaacttgacgctgaactgaaagtcattaggtggcagggtgtgaaataagatagagaattttgtttgaag

SEQ ID NO: 19053 - DNA, 201 bp, Homo sapiens
taggacttgaagaagacaaggtctgctgatctagccccatcatcccgcaccatcatgcttagtgctgtggaaatccacccagtacagtagcccagcctccyagctgccctttcccatcaccccggaccctgtgatctccatgccaccctcacctgccctcccctctgctctccctcctgccaccccgcatcgcggagaagc

SEQ ID NO: 19054 - DNA, 201 bp, Homo sapiens
gtgtgtgtgtgtgtgtatgtgtgcgtgtgtatacccatgtacaccatgagaaagtctgagaatcactgctttccagattggacatgggctgtggtagcccrggcactgctagctggctttaggacttgaagaagacaaggtctgctgatctagccccatcatcccgcaccatcatgcttagtgctgtggaaatccacccag

SEQ ID NO: 19055 - DNA, 201 bp, Homo sapiens
ttccagcacagggtctggtagggattttgccacttgagaaaaggtaccatccaaagccatgcttgtcaagaagtaaaagaaaatatttagaaacccaaggygggagtgtttagttgcagtatgaagaactgagagattaaatggtgaactgtccgtccggggtttggcaaaaagaatgcaggctattaataaactgctttg

SEQ ID NO: 19056 - DNA, 201 bp, Homo sapiens
ggggaacaaccaggtctagagttcagtgactgatcagcctcaggagctttgcaggcggccctagggctcaggcttcctgtggaacacgtgcttggcaatgwataggacctgggggcctgacttagcttctttctgcacctgaggtcctctagcagcacctagtggtcccatttttccacgttatgtgccctggataagagg

SEQ ID NO: 19057 - DNA, 201 bp, Homo sapiens
tctggacctgtcgtcctcttagagagttggtctgtgatcggctccacttcttaggtaggaaattgatgaaaacagagtttacccagaagaatgctggtatygcaaggaacaagtagagcatctctttcatgaacctgagcggtgaagtggagccaagttagaaatttctggacgtgggggaacaaccaggtctagagttca

SEQ ID NO: 19058 - DNA, 201 bp, Homo sapiens
tgtgatgctcaaatgatctgtcccttagctgagtgaccttgggctggttactccacctctctgtgcctcatcagcaaaatggggatgataatgaatggtayctgcctcatagaaatgtgagaatagagtgaatgaactcatataaagctctaggcaccatgcgaggtgcagagtaagggctggctacgtagtgtctatcgt

SEQ ID NO: 19059 - DNA, 201 bp, Homo sapiens
tacccctgccccctaccaatctcctgcccagaggctgggagagtccaagagccacctctatctttccagcctcttaggtttcttccagaacaaatctcccsttaacagcaggcattgtggtgcagtggttatacatgtgtggaccggacccctggtttgaaccctaaacaagcagcctaggctgcatgtgatgctcaaatg

SEQ ID NO: 19060 - DNA, 201 bp, Homo sapiens
tgttggcagggcaaattcatccgcatcaacttcgacgtcacgggttacatcgtgggagccaacattgagacctgtatcctttccctgagcctgggccaaaygggtacccctgccccctaccaatctcctgcccagaggctgggagagtccaagagccacctctatctttccagcctcttaggtttcttccagaacaaatct

SEQ ID NO: 19061 - DNA, 201 bp, Homo sapiens
agtgagggaaggagaagcagaagatggctgagcagccctaccccactggagaggggcctagaggaacaggggtgttaagcgcagtagccgacccccattcrtgcttcccgcaggccaggcattctttcaaagactgtgtgcacggactcatcctatctgtatctgttcaggaacactatgaaggaagtgttattagcttga

SEQ ID NO: 19062 - DNA, 201 bp, Homo sapiens
ctgaagaagctgaagcctgggctggagaaggacttcctgccgctctacttcggctggttcctgaccaagaagagctctgagaccctccgcaaagccggccrggtcttcctggaagagctggggaaccacaaggccttcaagaaggagctgcgacaatgtaggtggcagggtggggccttataagcccaccttgctgggcac

SEQ ID NO: 19063 - DNA, 201 bp, Homo sapiens
accacacctggctaattttttgtgtttttagtagagacagggtttcaccatgttggctaggctggtctcaaattcctgacctcaggtgatccaaacgcctyggcctcccaaagtgctaggattacaggcgtgagccaccatgcccggccctgttttgttttttgagacgaagtctcactatgttacccaggctagactgca

SEQ ID NO: 19064 - DNA, 201 bp, Homo sapiens
ttgtgtgatttcttttctttctttttttttttttttgaaacggagtcttgttctgtcatccaggctggagtgcagtggtgcaatctcagctcactgcaacytccatctcagcctcccaaagtgctgggattacaggcatgagccactgtgcctttttttttttgaaatggagtctcccctctgttacccagtctggagtgc

SEQ ID NO: 19065 - DNA, 201 bp, Homo sapiens
tctccctggcacctacattcagttaacactttagtgcgacagctgtggaccatcaggaaatgccctctccatgacactggctgccaatttatcacttttttttgtttgtttgtttgttttgagacggagtctcactctgtcacccaggctggagtgcaatggcacaatctcagctcactgcaacctctgcctctaggttca

SEQ ID NO: 19066 - DNA, 201 bp, Homo sapiens
tcccgagtagctggactacaggcgcctgccaccatgcctggctaatttttgtatttttagtagacagacagggttttgccagcttgtctaggctgatctcraactcctgacctcaggtgatctgcccacttcagcctcccaaagcgctagagacatgagccaccacgccagcctcaactgttgtattaaattccacattcc

SEQ ID NO: 19067 - DNA, 201 bp, Homo sapiens
ggaggcttcgaagaggaaaaatcttctacctccaactccaaaagatgcccaggagttttccaggagagaagtgggagaagaaaggcatttttccagcaggraacagcagggccagaggcacagagacagaataacagtagctacactttgggggctcttactgtgtgctaggcactgggttaagcaccagacaggagtgat

SEQ ID NO: 19068 - DNA, 201 bp, Homo sapiens
ctccctggcacctacattcagttaacactttagtgcgacagctgtggaccatcaggaaatgccctctccatgacactggctgccaatttatcacttttttttgtttgtttgtttgttttgagacggagtctcactctgtcacccaggctggagtgcaatggcacaatctcagctcactgcaacctctgcctctaggttcaa

SEQ ID NO: 19069 - DNA, 201 bp, Homo sapiens
agtcttgctctgtcacccaggctggagtgcagtggcataatcttggctcactgcaaccttcacctcccgggttcaagtgattcttctgcctcagcctcccragtagctggactacaggcgcctgccaccatgcctggctaatttttgtatttttagtagacagacagggttttgccagcttgtctaggctgatctcgaact

SEQ ID NO: 19070 - DNA, 201 bp, Homo sapiens
aggccaggcattctttcaaagactgtgtgcacggactcatcctatctgtatctgttcaggaacactatgaaggaagtgttattagcttgactttatggagracatggaggcagaggggttagaggctacagtggttttcagtcttgggcagtctgctctagaacccacgcgtcggcccgtgccacactgtttctagtgaca

SEQ ID NO: 19071 - DNA, 201 bp, Homo sapiens
agcgggaggtttctgggcacctgagcagccagatgacagccctttattatccagcacctgctctgtggtggctggaccccctcagaggggctctgtctccrcccccacatgccctttgagctgctctgagaagccacaggagcaacagctgtggagagagactctgcggggaagcagccaacaccccagtctccctaccct

SEQ ID NO: 19072 - DNA, 201 bp, Homo sapiens
tccctggcacctacattcagttaacactttagtgcgacagctgtggaccatcaggaaatgccctctccatgacactggctgccaatttatcacttttttttgtttgtttgtttgttttgagacggagtctcactctgtcacccaggctggagtgcaatggcacaatctcagctcactgcaacctctgcctctaggttcaag

SEQ ID NO: 19073 - DNA, 201 bp, Homo sapiens
ccctggcacctacattcagttaacactttagtgcgacagctgtggaccatcaggaaatgccctctccatgacactggctgccaatttatcacttttttttgtttgtttgtttgttttgagacggagtctcactctgtcacccaggctggagtgcaatggcacaatctcagctcactgcaacctctgcctctaggttcaagc

SEQ ID NO: 19074 - DNA, 201 bp, Homo sapiens
ggctaattttttattttttgtagactcagggtcttactctgttacccaggctggtatcaaactcctggactcaagtgatcctcctgcctcgggcttccaawgtgctgggactgagccactgtacccagccctcattttctcttatcagcagtccccaagctttttggcaccaggctccagttttgcagaagacagtttttc

SEQ ID NO: 19075 - DNA, 201 bp, Homo sapiens
cctaggctccctctccacaggtagcctttctgtcctgttagactttggactttggaaggtgctattcccagcatctgccacacagtgggcatgtaatgaaygtgtgctaagtgactgaataatttgagatggagtttcactcttcttgcccaggctggagtgcaatggagtgatctcggctcactgcaacctgcaacctcc

SEQ ID NO: 19076 - DNA, 201 bp, Homo sapiens
cactgttggccactgagtcccaagccagaagaccggaggcttcccagatacctccttcccctctctgtttttgccatatcgctcaagttggtctggatgayaggcgtgagccactgcgcttggccccctcactgttcatgcccagcaatggccatgtcttgtcctgtccatactttctctgtttccctcccacaactcagt

SEQ ID NO: 19077 - DNA, 201 bp, Homo sapiens; identical to SEQ ID NO: 3228

SEQ ID NO: 19078 - DNA, 201 bp, Homo sapiens
tttttttttttttggagacggagtcttgctctgttgcctaggctggagtgcagtggcactatctcggctcgctgtatcctctgcctcctgggttcaagcarttctctacctcagcctcccaagtagctgggattacaggcgcccgccaccacgcctggctaatttctttgtatttttagtagagacggggtttcaccatct

SEQ ID NO: 19079 - DNA, 201 bp, Homo sapiens
ctgtctcacttgcacacttgcagtgtgaccattgtgtgatttcttttctttctttttttttttttttgaaacggagtcttgttctgtcatccaggctggartgcagtggtgcaatctcagctcactgcaacctccatctcagcctcccaaagtgctgggattacaggcatgagccactgtgcctttttttttttgaaatgg

SEQ ID NO: 19080 - DNA, 201 bp, Homo sapiens
ttccaggggattttgcaaaaggctgagacactgtacaccatgggagactttgagtttgccttggtattctatcatcgaggctacaagctgaggcctgatcrggaattcagagttggcattcagaaagcccaggaagccatcaacaactcagtgggaagtgagtgaccacagggcctatgcccttatccaggaaggtccttg

SEQ ID NO: 19081 - DNA, 201 bp, Homo sapiens
ttttaattaatgcaaaagtccatgatgaataaaatatcaaaaattaaagacaggatccgactttgcacgaccctgcctcactcacttcctgctaatccacrggaccggggagggtgactgagttacccctcaacacgcagaaaaagctagtggccgctcagctcgcaggcgcagtgggtgggtgcgcgtggggagcaggcg

SEQ ID NO: 19082 - DNA, 201 bp, Homo sapiens
gcccagccgtggaacctgagataagccactttagctccctcagcctcagggtctcctcctgttagctgggcaccctgtagggcagaagggaggatgaaatrcagaagtacctgtgcagaccttaggacagtgcctggtatccacaatagtagtaacaccagctctccagaaatgagatcttctcaagacttgctgacttcc

SEQ ID NO: 19083 - DNA, 201 bp, Homo sapiens
gaggggccaagaggaggctgaaggaagtgggcaggggatggatcaagcagggtcttttaaaaccggtgctgatcaagagcacgggctgtggagtcaggcaracctaggctgtggaacttgcaccgcccagccgtggaacctgagataagccactttagctccctcagcctcagggtctcctcctgttagctgggcaccctg

SEQ ID NO: 19084 - DNA, 201 bp, Homo sapiens
atattcttagtaatttttttctttctttccttttttttttttttgagacagggtctcactttgtcacccaggtgggagtgcagtggcacgattatagctcwctgcaatttcaacctctcaggcttaagcgatccccctaccttagcctcccaagtagctgggctacaggcgcacaccactgtgcctggctaaattttgtat

SEQ ID NO: 19085 - DNA, 201 bp, Homo sapiens
ccttgtgagtcccatgtgctccaggagctccctcattctaatcagccacttgctagattagccacttactagtctaagtggttttttcagtgcccacggcactcatttatttctctgaataatctataaattatttgatcacatgctttatttttgctattatgatttttagtacatattgttatgaaaaatggacatatt

SEQ ID NO: 19086 - DNA, 201 bp, Homo sapiens
tctagaacccacgcgtcggcccgtgccacactgtttctagtgacacagacagccttttcctgccccagtctgtggagctctcactccagccagactgcagygaacagagctggggctggaggtccgggaggacagagcccaatgcagattcttggctgcagccctccaggctgcaaggctgaaatcctttctggtccaggc

SEQ ID NO: 19087 - DNA, 201 bp, Homo sapiens
tgatggttcatgcctgtaattccagcattttgggaagccaaggcaggaggattgcctgagctcaagagttcaagaccagcctgggcaacattgcaaaacaycttctctaccaaaaaaaaaaaaaaaaaaacccaaaaattagcagggtgtgatggcatgcacctgtagttccagctactggggaggctgaggtgggaggat

SEQ ID NO: 19088 - DNA, 201 bp, Homo sapiens
ggaggaaggggacattgagtggcaactgaatgccagtgttctggtggcccaggcacaaggtatgggctcagagatgaccaccctaccttttccagccttcrggcccagctcacaccagggctaggagtcttgtggactgagtttaccatcccagtgtttctccttcccagattattctgagagtggggataagccactcta

SEQ ID NO: 19089 - DNA, 201 bp, Homo sapiens
cctgttttgttttttgagacgaagtctcactatgttacccaggctagactgcaggggcacgatctcagctcactgcaaccttggcctcccgggttcaagcrattctcctgcttcagcctccagggtagctgggattacaggcgcgcaccaccacacccggctaatttttgtatttttagtagagacggggtttcaccacgt

SEQ ID NO: 19090 - DNA, 201 bp, Homo sapiens
tcaaagtgcttcctgaagatgggagacttggagagatccctgaaggatgctgaggcttcgctccagagtgacccagctttctgtaaggtgactgcatgggygggaggactggatcctgccattgcctgtagcaacttctggttacaagtagttgttacaagtagaaccagccagactgcctagtgtttgatgccattttct

SEQ ID NO: 19091 - DNA, 201 bp, Homo sapiens
ctcaggtgatccaaacgcctcggcctcccaaagtgctaggattacaggcgtgagccaccatgcccggccctgttttgttttttgagacgaagtctcactakgttacccaggctagactgcaggggcacgatctcagctcactgcaaccttggcctcccgggttcaagcgattctcctgcttcagcctccagggtagctggg

SEQ ID NO: 19092 - DNA, 201 bp, Homo sapiens
tttaaaaccggtgctgatcaagagcacgggctgtggagtcaggcagacctaggctgtggaacttgcaccgcccagccgtggaacctgagataagccacttkagctccctcagcctcagggtctcctcctgttagctgggcaccctgtagggcagaagggaggatgaaatgcagaagtacctgtgcagaccttaggacagtg

SEQ ID NO: 19093 - DNA, 201 bp, Homo sapiens
accaggtgtctgagcccctggtctctcagacctgcagatggtgtctgcaggaagaggagttaccctgtcagctaagaggaggctgccctggcctccacagmacccctttcctttctcagtgctcacaagtggcagtgctgaagggagtcttcagaaagctgagaaagtgctgaagaaggtactggaatggaacaaggaaga

SEQ ID NO: 19094 - DNA, 201 bp, Homo sapiens
gtgggtagatcacctgagatcaggactttgagaccagcctttccgacatggcggaaagcttgtctctactaaaaatataaaaattagctgggtgtggtggygggcacctgtaatcccagcaactcaggggctgaggcaggagaattgcttgaacccggcaggtagagttgcagtgagccaagatcatggcactgccctcca

SEQ ID NO: 19095 - DNA, 201 bp, Homo sapiens
caaagtgcttcctgaagatgggagacttggagagatccctgaaggatgctgaggcttcgctccagagtgacccagctttctgtaaggtgactgcatgggcrggaggactggatcctgccattgcctgtagcaacttctggttacaagtagttgttacaagtagaaccagccagactgcctagtgtttgatgccattttctc

SEQ ID NO: 19096 - DNA, 201 bp, Homo sapiens
tttcacttcttttgtgattcttcagttacttcgggccatctggttgtatacgtgcaggtcacaggagatatgatggcttagcttgggctcagaggcctgayatgggaggcttaggcaggaggattgcctgagaccaggagtttgagaacagcctgggcaaattagtcagatgtggtttcttgagcatatagacctagttac

SEQ ID NO: 19097 - DNA, 201 bp, Homo sapiens
cagagggttgcagtgagccaagatcatgccattgcactctagcctgggcaacaagagtgaaactctgtctcaaaaaaaaaaaaaaaaaagaccaggtcagrtggctcatgcctgtaatcccagcactttgggaggccaaggcaggtggatcacctgaggtcaggtgtttgagaccagcctggctaacatggtgaaaccctg

SEQ ID NO: 19098 - DNA, 201 bp, Homo sapiens
caccgggaggaaacaggaggcaaatcccttagaggcctgttctccttggcgcctcctcacaccccttccccacagacctgatcaaaggcaccatgaagggyggcctgactgtggaggacctcatcatgacgggcatcaactacctggatactcacagcaacttctggaggcagcagaagccgatctacgccagggagcggg

SEQ ID NO: 19099 - DNA, 201 bp, Homo sapiens
tatgcccttatccaggaaggtccttggaatccttaggtttagaggaaggttgagtcacagcaggtgagcagccaccaccaggcccgcagggagtcctacayctggatttggctgctgcagtgttgttgaggattagccgggcatggtggcgggcaccacctgtctgctgggaggaccattccctgatgcacacactgatct

SEQ ID NO: 19100 - DNA, 201 bp, Homo sapiens
gggaggccaaggcaggtggatcacctgaggtcaggtgtttgagaccagcctggctaacatggtgaaaccctgtttctactaaaaatacaaaaaatcaaccrgacgtggtggcgagtgcctgtaatcccagctactccggaggctgaggcaggagaattgcttgaacccgggaggcggaggttgcagtgagccgagatcgtg

SEQ ID NO: 19101 - DNA, 201 bp, Homo sapiens
gccatttcaggtttgtagttgagtttggtgtgcacaaaataccctacagttctattgcctgaggggactgaggggctctcagacattggtggaaagtcagygtatccacagagcagcatattcctactcttcagccagtggcttccacaatagccatgatttgaccttgttcaaggtgagccatatgcagataatcaagtt

SEQ ID NO: 19102 - DNA, 201 bp, Homo sapiens
agcttttctttgattgtctctgctttagcgtctctaaatccggtcaccatgtcggaccccgaaggcgagaccttgcgaagcacctttccctcttatatggscgaaggcgagcggctctacctgtgcggggaattttctaaagccgcgcagagcttcagcaacgtgagtcgagctctcaacctatccatcaccccatcaccc

SEQ ID NO: 19103 - DNA, 201 bp, Homo sapiens
tcctgcctggtttctacccatctcaccagtctgagcctccttgatctcccatcatcccatttgccctcacagtgcccagccctcagccgacctgagtcctrctgcttcccctgcctctgctgtctctctccagctcctcccacaaatctccagagacacatgctatgaactctccctcccctgctcacaagtgggcctggg

SEQ ID NO: 19104 - DNA, 201 bp, Homo sapiens
gcacaatcttggctcactgcaacctccgcctcccgtgttcaagctattctcctgcctcagtctcctgagtagctgggattacaggcgtgcgccaccacacytggctaatgtttgtatttttagtagagacgggatttcaccaagttggtcaggctggtcttgaactcttgacctcgtgatctgcctgcttcagcctcccaa

SEQ ID NO: 19105 - DNA, 201 bp, Homo sapiens
tagcttgactttatggaggacatggaggcagaggggttagaggctacagtggttttcagtcttgggcagtctgctctagaacccacgcgtcggcccgtgcmacactgtttctagtgacacagacagccttttcctgccccagtctgtggagctctcactccagccagactgcagtgaacagagctggggctggaggtccgg

SEQ ID NO: 19106 - DNA, 201 bp, Homo sapiens
caccctggagaagacctggctgttccacgagatcggccgctgctacttggagctggaccaggcctggcaggcccagaattatggcgagaagtcccagcagwgtgccgaggaggaaggggacattgagtggcaactgaatgccagtgttctggtggcccaggcacaaggtatgggctcagagatgaccaccctaccttttcc

SEQ ID NO: 19107 - DNA, 201 bp, Homo sapiens
atgttggccaggctggtctcgaactcctgaccttaggtgatctgcccgcctcggccttccaaagtgatggtattactggtatgagccaccatgcctggccttttttttttttttttttttttaaatagagatggggccatgtatggtgggacctagcctgggacccaacgtgttgctgggactcggcaacatggcgaaacc

SEQ ID NO: 19108 - DNA, 201 bp, Homo sapiens
cttttttcttttctttttttgagacaaggtcttgctctgtcacccaggctacagtgcagtggtgtgactacagctcactgcagccttgatctctgggctcaagagataagtatctgggactacaggtgtgggccaccatgcctggctgatatttttaatttttattttttgtagagatgaggtctcactatattgcccagg

SEQ ID NO: 19109 - DNA, 201 bp, Homo sapiens
gcgaaactccatctcaaaaaaaaaaaaaaaaaagtaaataaaatgtaaaattctcagtcacactagccacatttcaagtcattatagccacatgtgaggcygggtgcggtggctcacacctgtaatccgaacactttgggaggccgaggcgggtggatcacgaggtcaggagattgagaccatcctggccaacattgtctc

SEQ ID NO: 19110 - DNA, 201 bp, Homo sapiens
ttttttcttttctttttttgagacaaggtcttgctctgtcacccaggctacagtgcagtggtgtgactacagctcactgcagccttgatctctgggctcaagagataagtatctgggactacaggtgtgggccaccatgcctggctgatatttttaatttttattttttgtagagatgaggtctcactatattgcccaggc

SEQ ID NO: 19111 - DNA, 201 bp, Homo sapiens
ggagaatggcgtgaacccaggaggcggagcttgcagtgagctgagatcgtgccactgcactccagcatgcatgatagagcgagactctgtctcaaaaaaamaaacaaacaaacaaacaaaaaacaaagcacaaaccctggttcatgaccagtgccataggggactaggggaattcagagtgagagagccccagctgggagg

SEQ ID NO: 19112 - DNA, 201 bp, Homo sapiens
aggcaatgagcctgagtatctgtggagtccagctgagctcatttctttatgttcatctaccaattggcatttgaggagtttccagttggggttattacagkcagtgctgggtgaacatcattgtgtgtcttttgatgaacatgttcatgcatttctgttgagtgtatacatatatgagtggacaagttttgatgaagctaa

SEQ ID NO: 19113 - DNA, 201 bp, Homo sapiens
cttaacgcctcactgcaggcaatggtaccctcctacaatatactccatgttgcagccagagggaccttcgtaaatacaaatatgattatgtttctccccarcttaaaatccttttgtgtttccccatagtccacaagggaacgaagaaacaccaccaacagcgtccacatggccttcacgacatggccctgtggacacatc

SEQ ID NO: 19114 - DNA, 201 bp, Homo sapiens
gataatgctttaggaacagttctctgactattggtgaagatgtcccagataattgccaaatggatatcattttgccaccaatatcaggagtgtatagacartctcctaaaatgcacccagggaccccagttgacatccttctgtggttgtttctttcaactgattggaggagtgaggctttggactgggggtgatcgagag

SEQ ID NO: 19115 - DNA, 201 bp, Homo sapiens
caagtttcatagccactgcagactgcatgttcctgtggcagccacaccttcaaagagctctgaatatcagccttgggacattcagtcatgttagtttgctyaggtgggtataataaaataccataggctgggtgtggtggctcatgcctataatcccagcactttgggaagccaaggtgggcagatcaccggaggtcagga

SEQ ID NO: 19116 - DNA, 201 bp, Homo sapiens
tatcttatggttctggaagtcctaagtccaaaatggtacagcatagcaatgttattttctggagtctctagaagaaaatctgttccttgccttttctggcytctcgaggaggttgcattccttcatcagtggcccctatccctctgacctctgcttccgtcctcatgtctctgtctctgactctgcccctcctgcctctct

SEQ ID NO: 19117 - DNA, 201 bp, Homo sapiens
tccaaatttatttgtgtctctgtcttacccagtttacccaattctctccatctttaagtttctttggtgccaccttctggttggcccagttctatgaagtytgaatattccttcctgcctcccagtctctgaaatgtcctcgagtgaaagatgaggttgtggaggaccccgggacttgcctgcacatactactctgccttc

SEQ ID NO: 19118 - DNA, 201 bp, Homo sapiens
tatcaatttattgtctatcagctctaaatctacctttgtggactttgtgatagtaaacctggatcctgtaacaagaacttgactgactggcccagtgttcrgctttgccaatagagggagctggagagacactgtaagaagatagaagtagaaatgcactttctggattctgatcttcttaggattattcagtgtaggcac

SEQ ID NO: 19119 - DNA, 201 bp, Homo sapiens
tttgtattaaaattaattgctttttagaaatattgggtaaagtccattttgtttaaagttccaaccctttcaaaagctataaagtccaaatgagattggarcaccaggaagacagggggaagagtcattctgttacctggttttctcccctgcctgacttctgacctgagcagaggccaagggggtgcacttgtgtgtgag

SEQ ID NO: 19120 - DNA, 201 bp, Homo sapiens
tgatggggatggcattgaatctataaattaccttggcctgcccagcttttaaagccagcttctctggaaagtctttccaggattctgtagaggttttcttmttattatttatttatttacttgtttttttctgaggatttccatagcactttcaaaattatcctgttatagagcacctgactggcttgaaactacgcattt

SEQ ID NO: 19121 - DNA, 201 bp, Homo sapiens
acaacccatcacccagtttaataactggaatattgtcatcgctggaggccgtgtttccctactgatcacaccctcctccctcatcacatccgcttccctcycctctgtatcaccaccttcctgagtttcatgataataacgacatagttttactgtctacacatgcatccagaatgatttagtttagcctggttttgaact

SEQ ID NO: 19122 - DNA, 201 bp, Homo sapiens
agtttcattacctattgaataaatacaaaagaacatttaaaatgtgtattgaattataaagaacagcagtacaacccatcacccagtttaataactggaakattgtcatcgctggaggccgtgtttccctactgatcacaccctcctccctcatcacatccgcttccctcccctctgtatcaccaccttcctgagtttcat

SEQ ID NO: 19123 - DNA, 201 bp, Homo sapiens
agggccacagttgaaaaggagaggtccaaagcaagggatggtttggagactgagaagatggaggcagtaccttcatgaagtacccctccagaagctgatgygcttctgcatgtgaaaggtggcctttcctttcctgagctgaagcttctgtgttgaaggagatggagggggcagaggacttgagggaggtttccagtcctg

SEQ ID NO: 19124 - DNA, 201 bp, Homo sapiens
gaactgtaaggaaattaattgtttaggagagaaatgagatgtgatgaaggtgagaaagagcggattgaagcagcatgaaggtgatagaaatggcagagctkttgatcatttagtgaagagaactgggaagggatgcacccaggtttctgagagatgtccagttgtacacaggtaacgtctacagctcaagagccaggttag

SEQ ID NO: 19125 - DNA, 201 bp, Homo sapiens
tctcaaaataataagagctatttatgacaaacccacagccaatatcatactgaatgggcaaaagctggatgcattccctttgaaaaccggcacaagataargacgccctctctcaccactcctattcaacatattattggaagttctggccagggcaatcaggcaagagaaagaaataaagcatattcaaataggatgaga

SEQ ID NO: 19126 - DNA, 201 bp, Homo sapiens
agcagtgtgctttaaagtttaaggaaaacaatttgtttaccaaattaacaagaaattaattgatcattgactaaataaggtataataatagaaaaaattgktctctgtttatgaaaattctgcttcgggaatgaaaatcttacagactaaataaacctgcactcaccagcaggggggaaactgtgggagatgagaaatggg

SEQ ID NO: 19127 - DNA, 201 bp, Homo sapiens
ttcactgggaactaacacccggcgccgctcagacatctctattcccgcctctccgacccggtctcacttcgctcctgggcagctgcgcggagaactggggwaggtgtttgactttgggagtggttcccacacgctggattctcgttacctgctcttgagcccaggaaaagggcgggaacctacgaaagggaagcccagtga

SEQ ID NO: 19128 - DNA, 201 bp, Homo sapiens
aaagaagacatttatgcggccgacaaacatatgaaaaaagctcatcatcgctggtcattagagaaatgcaaatcaaaaccacaatgagataccatctcacrccagttggaatgacgatcattaaaaagtcaggaaacaacaggtgctagagaggatgtggagaaataggaatacttttacactgttggtgggagtgtaaat

SEQ ID NO: 19129 - DNA, 201 bp, Homo sapiens
attcactgggaactaacacccggcgccgctcagacatctctattcccgcctctccgacccggtctcacttcgctcctgggcagctgcgcggagaactgggrtaggtgtttgactttgggagtggttcccacacgctggattctcgttacctgctcttgagcccaggaaaagggcgggaacctacgaaagggaagcccagtg

SEQ ID NO: 19130 - DNA, 201 bp, Homo sapiens
aatgcaactgctgtgatcagtgataagggaacacactgatgatttagattgaacagggagagttatattgttttctagggcacagctaaaaagacattccmtcaacccccttgcagccagaaagaccctgagccctcagaacttcactgacacaacccatattttctttccataactggccaacttttccctttgtaccaa

SEQ ID NO: 19131 - DNA, 201 bp, Homo sapiens
ggaatttgcctgctctgggtttatctacctcagaaggtgactctggatcccaggaatctcctgatgaatccatttcatttttgaacatcagcctgatctastactgttgtaatacttgggacacagggagccaacctctacttttcctggtggcttggctcctccttccctctatatcctctttctttggctgaaattaaa

SEQ ID NO: 19132 - DNA, 201 bp, Homo sapiens
tttgatgaacatgttcatgcatttctgttgagtgtatacatatatgagtggacaagttttgatgaagctaagaagagagagttctaaatatattattattkggaatattattctttattctgcatggaaggtctatttgaaagcccaatgattattgcacaaaagtcctggaagaagggtagggatcaatcttggcagtga

SEQ ID NO: 19133 - DNA, 201 bp, Homo sapiens
tttgaggagtttccagttggggttattacaggcagtgctgggtgaacatcattgtgtgtcttttgatgaacatgttcatgcatttctgttgagtgtatacrtatatgagtggacaagttttgatgaagctaagaagagagagttctaaatatattattatttggaatattattctttattctgcatggaaggtctatttga

SEQ ID NO: 19134 - DNA, 201 bp, Homo sapiens
atggagatattcatcgaggttttcagtcacttcttgttgcaattaacagaactgacactgaatatgtgcttagaactgccaacgggctctttggagaaaartcttatgatttcctcacagtaagtcatacttgtttattaggaaaataaagatagcaatgtggtgggaagtaggagaatgaatatgggctatgaattcctg

SEQ ID NO: 19135 - DNA, 201 bp, Homo sapiens
aattatacccacttttcagtaatcgaactttaatttttccgttaggaaaaaaagacagtgcagatgatgtttaaggaagctaagtttaaaatggggtatgyggatgaggtacacacccaggtcctggagctgccctatgtggaagaggagctgagcatggtcattctgcttcccgatgacaacacggacctcgccgtggta

SEQ ID NO: 19136 - DNA, 201 bp, Homo sapiens; identical to SEQ ID NO: 3239

SEQ ID NO: 19137 - DNA, 201 bp, Homo sapiens; identical to SEQ ID NO: 3241

SEQ ID NO: 19138 - DNA, 201 bp, Homo sapiens
cactttaaaaaaatatataagctcacttttttgtttaagtaagagacacccttctgttgaaaaatatcttaggaggaagcgaaatatcttaggaggaagcraaacatccaacagtgaagatactttggttaatacagttgttccccacttccttgtctcagccactcaattcccctttcctcctgtgctctaagagaccca

SEQ ID NO: 19139 - DNA, 201 bp, Homo sapiens
ccccacttctctattgcagacaatccctctgctttcagcagtccctggcccatggtggtggcctacgcgccagctccccagcctcttttcataccaaataytgagccgggttatctttctaaagccccaatgcactcatatgagacgtttgtttaaaaaccatgcatggctttccagaccataatctcaagttcaaactcc

SEQ ID NO: 19140 - DNA, 201 bp, Homo sapiens
tccattccaaagggcctcacccagggctgctctccgggcccctcccgcttccctgcctcgggctctgcgtagaccgcgccctcttccctgggtccactcgsaggggcagactcgtctccccagttctcccagcacaccctgatggctgggtctcagtctccgtttcgcgcgcgcgctctcccctcgccctcctctgtctct

SEQ ID NO: 19141 - DNA, 201 bp, Homo sapiens
tttgatgcagaccttctctgatggatgacctctgtgaagcaaatggcacttttgccatcagcttatttaaaatattgggggaagaggacaactcaagaaaygtattcttctctcccatgagcatctcctctgccctggccatggtcttcatgggggcaaagggaagcactgcagcccagatgtcccaggtatgtgtgcttg

SEQ ID NO: 19142 - DNA, 201 bp, Homo sapiens
ttctcaggctgtggacctcctcaagccaagcaccttgcccagtaccaggcaagaataggtggcccatacatttttgttaattgcacgcatgcaccttgaartggagtgtgacctgtccaagcacttattgtagaaatgcagtaagagaaaacaaaatgcttttgcatttgtgggaacctttaccaaatgagactaaactca

SEQ ID NO: 19143 - DNA, 201 bp, Homo sapiens
gtatccgtgaacctaaaataaagtttttaaaaaagaatctgagatggaatatttacaacatatgcgatagggaagggttaatacaaaacaagagaagcaamaaaaaaaaaaataaaaacttttgattataaatgggattaaacacttttatgtgtattgagaatttctatctcttctgtgaattgcctatttacatatcct

SEQ ID NO: 19144 - DNA, 201 bp, Homo sapiens
tatccgtgaacctaaaataaagtttttaaaaaagaatctgagatggaatatttacaacatatgcgatagggaagggttaatacaaaacaagagaagcaacmaaaaaaaaaataaaaacttttgattataaatgggattaaacacttttatgtgtattgagaatttctatctcttctgtgaattgcctatttacatatcctc

SEQ ID NO: 19145 - DNA, 201 bp, Homo sapiens
gcctatataacaaacttgcttaggtatccgtgaacctaaaataaagtttttaaaaaagaatctgagatggaatatttacaacatatgcgatagggaagggktaatacaaaacaagagaagcaacaaaaaaaaaaataaaaacttttgattataaatgggattaaacacttttatgtgtattgagaatttctatctcttctg

SEQ ID NO: 19146 - DNA, 201 bp, Homo sapiens
gcttagtttataagctaagattaggaatagctgaaaagaatttggactttaggttaattcctcatctttatttgcaaattatatatggtaaatcataaaaytattgattttctgatgtggcacaatgaagaagtaagccagtgatattagttgtttctgtagctgtgaaattatgtttttggtttttcctagggttttaca

SEQ ID NO: 19147 - DNA, 201 bp, Homo sapiens
tgaggacgatactgttgccagaaagcaaaagtgttgggatagtgtaaaaagaaagtaaccaatttacagagattcccagtagacaagttgtgagaatttgytcaagaacaaaaaccagtatgtgttaattgaaatacatgttacaacaaagccaagaaagagtcctttagtaaattcagataaaacaagtaaaatgggcca

SEQ ID NO: 19148 - DNA, 201 bp, Homo sapiens
cctgattggcgtatctagtggctgttggggaatgcagcataaaattcctctcccaccaatactagtgttgacttcagatgtagttttctttctttctttcttttctttctctttctttctttctttctttctttctttctttctttctttctttctttctttctttcttctctctctcttctttctttctctctctctccc

SEQ ID NO: 19149 - DNA, 201 bp, Homo sapiens
gcgtatctagtggctgttggggaatgcagcataaaattcctctcccaccaatactagtgttgacttcagatgtagttttctttctttctttcttttctttctctttctttctttctttctttctttctttctttctttctttctttctttctttctttcttctctctctcttctttctttctctctctctcccttccttcc

SEQ ID NO: 19150 - DNA, 201 bp, Homo sapiens
tagtggctgttggggaatgcagcataaaattcctctcccaccaatactagtgttgacttcagatgtagttttctttctttctttcttttctttctctttctttctttctttctttctttctttctttctttctttctttctttctttctttcttctctctctcttctttctttctctctctctcccttccttccttcattg

SEQ ID NO: 19151 - DNA, 201 bp, Homo sapiens
agtggctgttggggaatgcagcataaaattcctctcccaccaatactagtgttgacttcagatgtagttttctttctttctttcttttctttctctttctttctttctttctttctttctttctttctttctttctttctttctttctttcttctctctctcttctttctttctctctctctcccttccttccttcattgc

SEQ ID NO: 19152 - DNA, 201 bp, Homo sapiens
ttgcttccttccttgcttccttccttccttccttccttgcttccttccttccttccttgcttccttccttccttctttccttgcttccttccttccaagasagagtatcgctctgtcacccaggctggagtgcagtggtgcaatctcagctcattgcaacctccacctcctgggttcaagcatgtctcctgccccagcctc

SEQ ID NO: 19153 - DNA, 201 bp, Homo sapiens
gaacctgcaggttcaatgagggaaaggtcaaaggggatgcaggcacatgcgaagagggaccaaacatggggagaaaccttactttataacaacccactctyggaggaattaatccattccatgagagctaattgtacctcactgactaccaggagaacaggaccaaggctttcacaagggatccacccacatgacgcagac

SEQ ID NO: 19154 - DNA, 201 bp, Homo sapiens
gacccggtctcacttcgctcctgggcagctgcgcggagaactggggtaggtgtttgactttgggagtggttcccacacgctggattctcgttacctgctcytgagcccaggaaaagggcgggaacctacgaaagggaagcccagtgaagtgctcagcgcacctgttgctccagacctttccctggggctgtccttctttac

SEQ ID NO: 19155 - DNA, 201 bp, Homo sapiens
attgttctgtattccattatactaatatactacaatccatttatccattctgtttttgatggacatttgggttgtttcttttttattattatactttaagytctagggtaaaagtgcacaatatgcaagtttgatacataggtatacatgagccatgttggtttgccgcacccatcaactagtcatttacattaggtattt

SEQ ID NO: 19156 - DNA, 201 bp, Homo sapiens
acaatctaattgtggcattggcacctaaagtattattttgtattaaaattaattgctttttagaaatattgggtaaagtccattttgtttaaagttccaaccctttcaaaagctataaagtccaaatgagattggaacaccaggaagacagggggaagagtcattctgttacctggttttctcccctgcctgacttctgac

SEQ ID NO: 19157 - DNA, 201 bp, Homo sapiens
aatgggcgcggagctggggggtgaaagtcctgcctgggctccactcatcctgcaggagctggaagtaggtacaatgaggcctcccaccctggtgaagtttwtgttgggcgctggaaggggctgtgaggcctgggacctccaggaaaaacaacagcagcagtatttatttgtcggtaccgaaactcgtatgctctcagtatt

SEQ ID NO: 19158 - DNA, 201 bp, Homo sapiens
cagttaaaatgtaaagatgagattgatgcaatagttcagttcattcagaactattgaaactattgattcaatagttcagacaggatgattaaacacacctacacacacacacacacacacacacacaccccaacctaagttcatgcttgcttcaccctgagtccaaagctcttatgctaaggttggatcaaatccaaattt

SEQ ID NO: 19159 - DNA, 201 bp, Homo sapiens
aggactcctctaaggctcaaatacatccctgtcctggtagctgctgggtgctgttcccggaatttgcctgctctgggtttatctacctcagaaggtgactytggatcccaggaatctcctgatgaatccatttcatttttgaacatcagcctgatctactactgttgtaatacttgggacacagggagccaacctctactt

SEQ ID NO: 19160 - DNA, 201 bp, Homo sapiens
gaaaagtattaaaataagcattaccatcaccctaggaaatataaaaagatagagtgaagataaagtgtataaaacccacagtattactagtggggtgctaraaataagttttataatcactgttgtacagttgtattttaaaacatgtttgaaagtcttaggagaatctagtttaacagatttataagtgttgatttattc

SEQ ID NO: 19161 - DNA, 201 bp, Homo sapiens
ttccatgagaaagcttctctgtgaatgttctcaaaaaagcaaacacagcttcttccaaggataatgtcaatttttgtgtccttctccatttaccaaactgttttttttttctcacctggtaatatttgatctgctggaacaatagcttgttctattcaatactaagatgtactaatgaagattttatatctatcagcataa

SEQ ID NO: 19162 - DNA, 201 bp, Homo sapiens
aagaatgcttatttccccacaaattgcaataaactctcatattctttataggtaagatttcagaggtactggatgctgggacagtcgatcccctgacaaasctggtccttgtgaatgccatttatttcaagggaaagtggaatgagcaatttgacagaaagtacacaaggggaatgctctttaaaaccaacgaggtaggga

SEQ ID NO: 19163 - DNA, 201 bp, Homo sapiens; identical to SEQ ID NO: 3242

SEQ ID NO: 19164 - DNA, 201 bp, Homo sapiens
tgggtgaatttttccttcctggggacccttgcgaagacctggagttttagatcccataactgagaggtgctactgacatctagtggatggaagccagaagwgctgcaaaaatcctacaatgcttatatgagacaaggaagtgtcctggccccaaatgtcaatgctgcattgcccacgttgagaaaccctgtgctagacaat

SEQ ID NO: 19165 - DNA, 201 bp, Homo sapiens
taattacatgttctttttgtttgatttgccacactttgtcaaatagtaacttaaaatagcagacagttatttaaaaacacgtttaacagatggaaagatcrcctaggcgtgcaagaagtcatcaatatgtgattcatcagtttgccttcagattattttcttacactgagagatttaaataatttccaaaccactgaaaaa

SEQ ID NO: 19166 - DNA, 201 bp, Homo sapiens
attcatctttgattcttcctgctccctcttcctctcatggtccaagaagtgatgccaaatttatgtcctggaaattcctcaaggccatgtcctcctctccwtttctcctgcctctgtttcatttcagctttcctcatctctcatccatgctgcgtccttaacgcctcactgcaggcaatggtaccctcctacaatatactc

SEQ ID NO: 19167 - DNA, 201 bp, Homo sapiens
catggttggcagctgcgtttttagaccaagtatcataaatagcacaagaaatccgagtcattttgttagggtttgcaaaaggcatatccacttataccaakacttagataacattcgtttcttttaggatgtgcttatagggaggcctgagaagaggcataggtaggcagacagggttgcttttgagacactctctatctt

SEQ ID NO: 19168 - DNA, 201 bp, Homo sapiens
ctcctatgtaatgttattgtactatgcatattgttttatactttgttagcttttccttaaaaatatgtcctaaattccttccatctcagtatatgtggatytgtattactctttttaacccttgtctggtattcctaagtatggctgtaccatggtataatagacctttcttgcattgacgagtatttaagcttatttact

SEQ ID NO: 19169 - DNA, 201 bp, Homo sapiens
gctttaatgagataatcttcataaaagaactgacacagagcgtaacacagttgaaaatgaatcagccaaaacaaagatgtggtgaaaatgactgtttctcrtaattgctttgcagatatttttaattttctatgcatgatgacactataatgtatgcattaaatagtttgactagatgtttcagcaatgaaaatcttttaa

SEQ ID NO: 19170 - DNA, 201 bp, Homo sapiens
tgcacgcatgcaccttgaagtggagtgtgacctgtccaagcacttattgtagaaatgcagtaagagaaaacaaaatgcttttgcatttgtgggaacctttmccaaatgagactaaactcagtgttttgtgtttgcaggactttaaagaatactgtcagaagttctatcaggcagagctggaggagttgtcctttgctgaag

SEQ ID NO: 19171 - DNA, 201 bp, Homo sapiens
tatgcatgatgacactataatgtatgcattaaatagtttgactagatgtttcagcaatgaaaatcttttaaaactaattttggctaattacactggttgcwttcgctgacaatgctttcatgacttttctagtttttgaaaagaaaagtaccgaagtaatttcttgttatttaaaaacacaaacaacacatataaaccaag

SEQ ID NO: 19172 - DNA, 201 bp, Homo sapiens
gatgttctcaactcagccacttgtcacctgtgtgcactcagcaaaagtctggcaaatgctctggtcctgaatttctacatccataaattgagggcaaaatkatagttgcccttcctacttcaagatttttttcttaagcacaaatgttacactgtgtatgccacactgctaaacaccatcgcctaattcatcaggggccca

SEQ ID NO: 19173 - DNA, 201 bp, Homo sapiens
agttaaaatgtaaagatgagattgatgcaatagttcagttcattcagaactattgaaactattgattcaatagttcagacaggatgattaaacacacctacacacacacacacacacacacacacaccccaacctaagttcatgcttgcttcaccctgagtccaaagctcttatgctaaggttggatcaaatccaaattta

SEQ ID NO: 19174 - DNA, 201 bp, Homo sapiens
taaataatttccaaaccactgaaaaataggcagaggcagcaattttggaaaagcatgaattatgggaggattaagtgaaatagtgtacatcgatcagttaygtggtactgagaattcaaaaacgttacatgaaaaggtgatatttcatcaggacttcacagttatcttgtgaggtgtagctattactgcttccttgttcta

SEQ ID NO: 19175 - DNA, 201 bp, Homo sapiens
tcctaactacagtcacatttcctctccatgccatactgatacagaagtataaaattccaaagtaaaagcaaaattatggaaagggaaattaaatatttagytgtgagcagtttgagagaaagattgggaaacaattctataatgcatggttcataaattagttgtttcagctcatttaatttccaccaaatgttctgcttt

SEQ ID NO: 19176 - DNA, 201 bp, Homo sapiens
tgtgcaggtttgttacatatgtatacatgtgccatgttggtgtgctgcacccattaactcgtcatttaacattaggtgtatctcctaatgctatccctcayccctcccccccaccccacaacaggccccgggtgtgatgttccccttcctgtgtccatgtgttctcattgttcaattcccaccatttctataacagtgcct

SEQ ID NO: 19177 - DNA, 201 bp, Homo sapiens
gaggctctacaacatgtatgtttcattgcttacatttgtcttggtaacaatctagacattttcatataagcattgtcttagtctgttttgtgttgctatayaggaatacctgaggctgggtagtttataaagaaagaaggcttatttggctcatattctgcagaatatacaagaggtatggcactggcatccccaggcttc

SEQ ID NO: 19178 - DNA, 201 bp, Homo sapiens
ccttgcccagtaccaggcaagaataggtggcccatacatttttgttaattgcacgcatgcaccttgaagtggagtgtgacctgtccaagcacttattgtasaaatgcagtaagagaaaacaaaatgcttttgcatttgtgggaacctttaccaaatgagactaaactcagtgttttgtgtttgcaggactttaaagaatac

SEQ ID NO: 19179 - DNA, 201 bp, Homo sapiens
atattaaagtcagtggagagcgtttgacaaggatgctcctgtgatgttttgtggatagtggcagctcatgatgtcctgtaagtgtctgggtgtctcagctscctcttctcaggctgtggacctcctcaagccaagcaccttgcccagtaccaggcaagaataggtggcccatacatttttgttaattgcacgcatgcacct

SEQ ID NO: 19180 - DNA, 201 bp, Homo sapiens
cctcaggaggcggaggttgcagtgaaccttcattgaacctgcaggttcaatgagggaaaggtcaaaggggatgcaggcacatgcgaagagggaccaaacayggggagaaaccttactttataacaacccactcttggaggaattaatccattccatgagagctaattgtacctcactgactaccaggagaacaggaccaag

SEQ ID NO: 19181 - DNA, 201 bp, Homo sapiens
gttggacagatcatctcctctgatgtttatgggagaagtcaagccatagagttattttctctagatcagatcatcaatacagtctggcaaattcacatctktgataagtaggataaagtataattctgtcccacaagaaagcaaaatattccaattttgttacattttaaacttttgctaacattatatttttaatagaca

SEQ ID NO: 19182 - DNA, 201 bp, Homo sapiens
actcttggaggaattaatccattccatgagagctaattgtacctcactgactaccaggagaacaggaccaaggctttcacaagggatccacccacatgacrcagacacctctccctaagtggaacactggcacagcagggactgaatcgcagtgtgggttttcgtggagacaaaaatccacacccaaaccacagccattat

SEQ ID NO: 19183 - DNA, 201 bp, Homo sapiens
ggagaacaggaccaaggctttcacaagggatccacccacatgacgcagacacctctccctaagtggaacactggcacagcagggactgaatcgcagtgtgkgttttcgtggagacaaaaatccacacccaaaccacagccattatgttttggattgtccagacatccactttataactcagtaatcttttgaatttaggat

SEQ ID NO: 19184 - DNA, 201 bp, Homo sapiens
caggaccaaggctttcacaagggatccacccacatgacgcagacacctctccctaagtggaacactggcacagcagggactgaatcgcagtgtgggttttsgtggagacaaaaatccacacccaaaccacagccattatgttttggattgtccagacatccactttataactcagtaatcttttgaatttaggattgtgct

SEQ ID NO: 19185 - DNA, 201 bp, Homo sapiens
ctccctaagtggaacactggcacagcagggactgaatcgcagtgtgggttttcgtggagacaaaaatccacacccaaaccacagccattatgttttggatkgtccagacatccactttataactcagtaatcttttgaatttaggattgtgctgttagtaagcagtacaaatttgtctggggaatgttaatgaaaaatgac

SEQ ID NO: 19186 - DNA, 201 bp, Homo sapiens
aaatgatagttgcccttcctacttcaagatttttttcttaagcacaaatgttacactgtgtatgccacactgctaaacaccatcgcctaattcatcagggrcccagaaagacagaactccagcctgtctctcaaccaagcctctgccttatgtgtcaaagggatttttgtaaaagaatgcttatttccccacaaattgcaa

SEQ ID NO: 19187 - DNA, 201 bp, Homo sapiens
ctatcttgtgcctctttgcacctgcacgcactgtgtttcctacatgggatatctgtgtttacaaccaaactcccaggggccaaattatatcctttgtaaasgacttcaaaccaccaggcatttgctggaagtttcacggaggaaaacaagcatttttcatcttttaatctgttttgctggtcaaagaggaaaaggagtgga

SEQ ID NO: 19188 - DNA, 201 bp, Homo sapiens
cttgttgcaattaacagaactgacactgaatatgtgcttagaactgccaacgggctctttggagaaaagtcttatgatttcctcacagtaagtcatacttstttattaggaaaataaagatagcaatgtggtgggaagtaggagaatgaatatgggctatgaattcctgcaggtggtcctgaactcagaactccacgcacg

SEQ ID NO: 19189 - DNA, 201 bp, Homo sapiens
acataatacagtctatgacctatgtcttttcctaagtccttagttctttttttttccacttaccccaagacatgaagtgacaatttctcttttgtaccttstacatctgctgccattacagtatttttaaaaaatctattacttaataattctttgtattaattctcttctcttcaaatctctgatgtagtttgtttgcaa

SEQ ID NO: 19190 - DNA, 201 bp, Homo sapiens
gacaatccctctgctttcagcagtccctggcccatggtggtggcctacgcgccagctccccagcctcttttcataccaaatactgagccgggttatctttstaaagccccaatgcactcatatgagacgtttgtttaaaaaccatgcatggctttccagaccataatctcaagttcaaactcctaaatgtggcataagggt

SEQ ID NO: 19191 - DNA, 201 bp, Homo sapiens; identical to SEQ ID NO: 3244

SEQ ID NO: 19192 - DNA, 201 bp, Homo sapiens
ggactttctttgcaactccgtaacccagtttcagcaactcttggggaaaatggggcatctttttggagtcactttaaaaagtaattttttttttttttgtstttccagtagcctcatatttcaggccagcctatctcaaacaaaccctccaaatttggtgaaatgtatctagctgttttcacaggaagtgatgacagaaat

SEQ ID NO: 19193 - DNA, 201 bp, Homo sapiens; identical to SEQ ID NO: 3234

SEQ ID NO: 19194 - DNA, 201 bp, Homo sapiens
actccatgttgcagccagagggaccttcgtaaatacaaatatgattatgtttctccccagcttaaaatccttttgtgtttccccatagtccacaagggaaygaagaaacaccaccaacagcgtccacatggccttcacgacatggccctgtggacacatcagacgttgtcttgcagtgcctcatccacactatctgtacca

SEQ ID NO: 19195 - DNA, 201 bp, Homo sapiens
ttggagaaagctctttgggagagtataatggcagcgttaaaagtcagtgttggtttctgttcccaggcactttgtttatacaaagacggagatattcaccraggtttccagtcacttctcagtgaagttaacagaactggcactcagtacttgcttagaactgccaacagactctttggagaaaagacgtgtgatttcctt

SEQ ID NO: 19196 - DNA, 201 bp, Homo sapiens; identical to SEQ ID NO: 3236

SEQ ID NO: 19197 - DNA, 201 bp, Homo sapiens
ccttccagtaagtagtattcacatattgatgacaaagaaattgaaagtaagttagactacagaagagcagataataaagtataactgtactgacttaaaaygtgcttggaattacacttctgaaattacaattttagattttatgatgacttctgaattacgtcctttgtaaattgttactgatacacccatccctgttat

SEQ ID NO: 19198 - DNA, 201 bp, Homo sapiens
gtcaattctcctgcacgcagccctgcttctcccccttaattccctgtccctgagtgaccacatcattcaacacgctgtacagagctcctccccagtcccawgtgtggttattcggctgcctcctgctgaggtagcctctcaaattctcttaaatttgcccgccctcttctgaattgcacctacaactgacacaatcgtctt

SEQ ID NO: 19199 - DNA, 201 bp, Homo sapiens
aatgcttatttccccacaaattgcaataaactctcatattctttataggtaagatttcagaggtactggatgctgggacagtcgatcccctgacaaagctrgtccttgtgaatgccatttatttcaagggaaagtggaatgagcaatttgacagaaagtacacaaggggaatgctctttaaaaccaacgaggtagggaaag

SEQ ID NO: 19200 - DNA, 201 bp, Homo sapiens
atattttcatggcattttctttttcctacccttccaccatccctgtgttccttcctccatttataaaaacataattctaagttacattctgaaaatattgrtgtcccaatttacataatcacatatggaatataggagggaatacctattttaccagtattggaaatcaatagtttttcttcttacaaatttcatgtttta

SEQ ID NO: 19201 - DNA, 201 bp, Homo sapiens
aaggtgagacagtttcatttctgttgatttggaattactatacaacgaggcttagattgactgggatgggacttcccagggtgttgccactgtgacctgcrtaccacaggcctgtttgtatgtgtttgctgagtttacaggccagcaatgcaactctgtcatttcttatcagatcatgaagtactgatttctaaaactaat

SEQ ID NO: 19202 - DNA, 201 bp, Homo sapiens
atcatatacttggaaacgtaaggcttgcttttgaggctgactctcactttttctgtgagtcctgtggacagtatttaattgcctctgtctttgtttgtttscctgaaaaggaaaaactagtttaatgccaatttatttggttggctggaaataaaaacttctgattcctgtgtttttataacacaatctaattgtggcatt

SEQ ID NO: 19203 - DNA, 201 bp, Homo sapiens
tttagttattctgagagatgggtttcccttcagggcccagcatttaaattgtccatactcagaaaataaatacaattaatcctcgtgaatatcgacttgcrgacaaattccttacctaggaaaacagaccagttctacttttcattgcattatttcaaaaattagatttgttcattcttggattcatctttgattcttcct

SEQ ID NO: 19204 - DNA, 201 bp, Homo sapiens
ggcctgcccagcttttaaagccagcttctctggaaagtctttccaggattctgtagaggttttcttattattatttatttatttacttgtttttttctgargatttccatagcactttcaaaattatcctgttatagagcacctgactggcttgaaactacgcatttccatatgtgtgtcttctttagggtgtaagcttct

SEQ ID NO: 19205 - DNA, 201 bp, Homo sapiens
agagaatgtacttgtgtaaatcgaatgtacctgataggataggtacaccggtctcaaaaaaattggcactaacgcagtcagaacacatttcaagttaaaamtaggaattaactacagcaaaacagcaccacagatcacatacacggacactccatttcatcatttagcccaacttctcctagagagtgaacactccattcc

SEQ ID NO: 19206 - DNA, 201 bp, Homo sapiens
agcaggaggtgggggcctctgccaggtaccgggcggggcaggcacggaggtgcccaggttcccgcggaggccacctcttccctggagtgcgtgagagaggsgaagggaggaaggccagagcaggaatcagagcgaggcaaaggcgggcaggaactaggagaatgacggcgggaggcggccgggaaagagagtcgcggggct

SEQ ID NO: 19207 - DNA, 201 bp, Homo sapiens
acatctacggctcgagacaggttagagattttgaagaaataagttaaaagttgaaacatgaacctatggatatagtggaggtcatacaagaagatcatatyataatgaaaagaagagggcttagaatggtaggaaaggaatcaggataccaagcaaaggagtcaggaaagaagggaagggtgctctggaaatcctgggaag

SEQ ID NO: 19208 - DNA, 201 bp, Homo sapiens
tggccaaggcaattagaaaatgattagtatccttatcaggagcaatttcagagaatgtttgggtggacgtctaactacagtggagtcaaacgtgaatcaayggtgaaaaaaggacaatagccaatgtgtacactttttataaaaaccaccctccaaggaccaggcactggccctctctccggtgcccacagacatccacac

SEQ ID NO: 19209 - DNA, 201 bp, Homo sapiens
tccttacctaggaaaacagaccagttctacttttcattgcattatttcaaaaattagatttgttcattcttggattcatctttgattcttcctgctccctsttcctctcatggtccaagaagtgatgccaaatttatgtcctggaaattcctcaaggccatgtcctcctctccatttctcctgcctctgtttcatttcagc

SEQ ID NO: 19210 - DNA, 201 bp, Homo sapiens
acataaatgctctttgaataaactcacttttggatgttgtatggggatgggggagtggaggaggtagttcgtaggtatttggggctcccaggaggaggacratatcatatacttggaaacgtaaggcttgcttttgaggctgactctcactttttctgtgagtcctgtggacagtatttaattgcctctgtctttgtttgt

SEQ ID NO: 19211 - DNA, 201 bp, Homo sapiens
atatcagtggcaactatgcctatttattgccttaaaagtcaaagttatacaatcctgagcacaagaaaaaaaagttagcagatgtaaagcctaactttacsttcccttttgaatattaaaatggctggtatcaatagttgttagcttgggatttgacatccatcaaatatgatactctcatattgcacaaagatatgaaag

SEQ ID NO: 19212 - DNA, 201 bp, Homo sapiens
tgccttaaaagtcaaagttatacaatcctgagcacaagaaaaaaaagttagcagatgtaaagcctaactttaccttcccttttgaatattaaaatggctgrtatcaatagttgttagcttgggatttgacatccatcaaatatgatactctcatattgcacaaagatatgaaagttaaaaatatatttgatgcaggcttta

SEQ ID NO: 19213 - DNA, 201 bp, Homo sapiens
acatcttttctaaccagatccttcagcccaagggcctgaatatttatcttaacttcgataaagaatttttagttggaagcttccatgagaaagcttctctrtgaatgttctcaaaaaagcaaacacagcttcttccaaggataatgtcaatttttgtgtccttctccatttaccaaactgttttttttttctcacctggta

SEQ ID NO: 19214 - DNA, 201 bp, Homo sapiens
agttgccctctgatttaaccctgaatagtcccctcattagactcagaagcagagttctgagccatgctctttgtcttttgtcaaacaatctctcccactcrcagtagtatgtattgcatgaagattaatgtaatgaattggttagaattttctaaactgttaaaaaatgtttttaacatttgaaaggagttaggtacaaat

SEQ ID NO: 19215 - DNA, 201 bp, Homo sapiens
caacctctggcaactatatccctaccaggcatttgcttctatggtccagccccagcctgcccacaccctccagcaaggacatatggcttctcgtaagccasctttggccatctgacaagtttcatagccactgcagactgcatgttcctgtggcagccacaccttcaaagagctctgaatatcagccttgggacattcagt

SEQ ID NO: 19216 - DNA, 201 bp, Homo sapiens
gaggaatgtaacacaagtgtggacttatatcttctggagtgatttgaggaatatataatctgtttgattcaaaatggtgatgtatgaccttatctacaaaygaggtgtgggataatgctttaggaacagttctctgactattggtgaagatgtcccagataattgccaaatggatatcattttgccaccaatatcaggagt

SEQ ID NO: 19217 - DNA, 201 bp, Homo sapiens
atatttgatctgctggaacaatagcttgttctattcaatactaagatgtactaatgaagattttatatctatcagcataaatgtgcagaaacagtaattayacacacctagagtttctgtgagttagatatatcctatttttagtaaattatacccacttttcagtaatcgaactttaatttttccgttaggaaaaaaaga

SEQ ID NO: 19218 - DNA, 201 bp, Homo sapiens
gccgtggtaagctccaggcaatgagcctgagtatctgtggagtccagctgagctcatttctttatgttcatctaccaattggcatttgaggagtttccagytggggttattacaggcagtgctgggtgaacatcattgtgtgtcttttgatgaacatgttcatgcatttctgttgagtgtatacatatatgagtggacaag

SEQ ID NO: 19219 - DNA, 201 bp, Homo sapiens
tgcagatccctcgcttccccactaggtactatgtcctctgtgcacacccacttgcacatgggcctgtttccccacatgggctgaaatatatacttgtcacrtattaggtaaacagacactctttgctccacatggagtcacaagaattgaaagaattccatggaacagatgtgatttgttcccagggtgaaatttggatta

SEQ ID NO: 19220 - DNA, 201 bp, Homo sapiens
tccctgaacagaccaaaaatgagttctgaaattgaatctgtaatgaaaagcctaccaaccagaaaaagcatgggaccagaaggattcacagacaaattccrccagatgtataaagaagagctggtttcattcctattgaaactattccaaaaatttgaagaggaggaactccttcctaactcattctatgaagcctgaatt

SEQ ID NO: 19221 - DNA, 201 bp, Homo sapiens
ataaaggctaagaattttcacatattagataatcagcatcttttatattcagtgattaagacacctacatttagtggtctcctttaattctgagactatcmgaatcatgatacaaaaatgttcctaataatatctaccctttcagtaacttctgtcctgtacttaatgaagtttaattcctgtctgggaggcctcttcact

SEQ ID NO: 19222 - DNA, 201 bp, Homo sapiens
cccagcaatactgggtatacacccaaaggaatataaaatgttctaccgtaaagacacatgtacacatattttcatcacagcactgttcacaatataaagaygtggaaacagcctaaatgcccatcagtggtggactgagtaaagaaaatgtggtacatagacaccatggaatactatgtagccataagaaaaagaatgaga

SEQ ID NO: 19223 - DNA, 201 bp, Homo sapiens
gttcacaataattcacacatagttgagtgaggcttgaatcagttcaaagtatgtgtcagacaggaacatatttatttaagtctataaattttaatcatgayatacatttatagaatataaatatgaggtatatcatggtgcttgcaaaaatgttacatatttttaaatattcttgtaagtgatatgtttaaatataattta

SEQ ID NO: 19224 - DNA, 201 bp, Homo sapiens
ctaatttgaattatgaaaacagagcatgatggcttttcaatcaattttcagatttgagccagtttacagacctagaaccccttaaatggaggggaggcctsttcccttaaggaaggaccccccactacactaccaacaatttttactgttaatctttctcccatccttccccaaggagacttctggccttttaccaaggta

SEQ ID NO: 19225 - DNA, 201 bp, Homo sapiens
cccttaaggaaggaccccccactacactaccaacaatttttactgttaatctttctcccatccttccccaaggagacttctggccttttaccaaggtaacwgtgcattagggaaagggaaatgatgagatcttctggggactactggacactggctctgagctgacattgattccaaaaatgtcaaaacatcgtgatcctc

SEQ ID NO: 19226 - DNA, 201 bp, Homo sapiens
ggaatatttattgtttgttaaaaaagtaatgaattatttatatgtacattattgatgaaccttaaattatttaggctgagcaaaagaagacagttgaaaaagagtaaatacattatgattttatttttatataattctagataattaaaactactatgacgacttgcagagtagtggttgcctagggatgcaaaggtatgg

SEQ ID NO: 19227 - DNA, 201 bp, Homo sapiens
gaatatttattgtttgttaaaaaagtaatgaattatttatatgtacattattgatgaaccttaaattatttaggctgagcaaaagaagacagttgaaaaagagtaaatacattatgattttatttttatataattctagataattaaaactactatgacgacttgcagagtagtggttgcctagggatgcaaaggtatgga

SEQ ID NO: 19228 - DNA, 201 bp, Homo sapiens
acccctttgtaaaaccatcagatcttgtgagacttattcactaccatgagaacagtatggggaaaactgctcccataattcagctatcttcacctagcccygctgttgactcatggggattattacaattctaagtgagatttgggtggggacacagccaaaccatatcattctgccccgggctcctcccaaatctcatgt

SEQ ID NO: 19229 - DNA, 201 bp, Homo sapiens
gcactgtgtatgcagctccataaaagctctatgttgtattttcttttttgtaggtgtcctcaatgcagttgactgtgtgctcttcagtgtcaggttagttwgtgctcagtaagcaataaatagctgctgaatgaatgaatgatttataaacttggatgcttttttattatgatttttccctctcagtaagtagacatactc

SEQ ID NO: 19230 - DNA, 201 bp, Homo sapiens
agtaagcaataaatagctgctgaatgaatgaatgatttataaacttggatgcttttttattatgatttttccctctcagtaagtagacatactctgtaggyaataagaactttcttggtttgttttttaataagtctcattcctggtctcttggctctcaagtttcatgtatgtactaaagcaatgtcttaaatttgcttt

SEQ ID NO: 19231 - DNA, 201 bp, Homo sapiens
atagctgctgaatgaatgaatgatttataaacttggatgcttttttattatgatttttccctctcagtaagtagacatactctgtaggtaataagaacttycttggtttgttttttaataagtctcattcctggtctcttggctctcaagtttcatgtatgtactaaagcaatgtcttaaatttgcttttatataggccag

SEQ ID NO: 19232 - DNA, 201 bp, Homo sapiens
atgatttataaacttggatgcttttttattatgatttttccctctcagtaagtagacatactctgtaggtaataagaactttcttggtttgttttttaatragtctcattcctggtctcttggctctcaagtttcatgtatgtactaaagcaatgtcttaaatttgcttttatataggccagaattagccaagcaaagtga

SEQ ID NO: 19233 - DNA, 201 bp, Homo sapiens
ttattatgatttttccctctcagtaagtagacatactctgtaggtaataagaactttcttggtttgttttttaataagtctcattcctggtctcttggctytcaagtttcatgtatgtactaaagcaatgtcttaaatttgcttttatataggccagaattagccaagcaaagtgaaaaggaaaaattattgttgaatata

SEQ ID NO: 19234 - DNA, 201 bp, Homo sapiens
acattttgaaattgcactttatcatctgatactagagaaacaataatctggccgggcgcagtggctcatacctataatcctagcactttgggaggctgagrcaggtggatctcctaaggtcaggagttcgagaccagcctggtcaacatggtgaaaccccatctctaccaaaaaattaggccgggcacggtggctcacgcc

SEQ ID NO: 19235 - DNA, 201 bp, Homo sapiens
cttgcaaagtatccatccgacaagggattaataaccagaatatataaggagctcaaacaatgctacagaaaaaaaatctaataattcgatttaaaaatggscaaaagatctgaatagacattccacaaaagaagacacacaaatggcaaagaattatatgaaaagatgctcaacatcactgatattagagaaatataaaac

SEQ ID NO: 19236 - DNA, 201 bp, Homo sapiens
taatttaaccaaaaattacatgataactatactgaaagtgatgagagatggaaattgtaggcactggtggcgattgctgttaaaaaaaaaaaaaaactaamtacttatcttcagtaactggaaatcaatggataatgtctaaaatttaaaaaccaagaaagcagaaaaagcaagttttcagaaatacagcataagaaagag

SEQ ID NO: 19237 - DNA, 201 bp, Homo sapiens
ggtaaggcctcagactcgggagtagttcgaactttatttgtcatgctggagatacatcttaatgattttatagttctcaactaatttcttctagagctttrcagaaatatatatatgacagcattttgctagtagatttccatacctagataacaagacacatgatggtatttttgtaaaatcaagtccgagataagatgg

SEQ ID NO: 19238 - DNA, 201 bp, Homo sapiens
aagctcctctaggcagtgccccagtggggactctgtgtgggggcttcgaccccacatttcacttccttactgccctagcagaggttctccatgaggacctyacccctgcagcaaactcctgcctggacatccaggcatttccatacatcctctgaaatctaggtagaggttcccaaacctcagttcttgacttctgtgcac

SEQ ID NO: 19239 - DNA, 201 bp, Homo sapiens
tctttccggagtttatagctgttatttttaaagatgagtttgttaggtactaaattctgcgtaccagatgtgtaagttctactattctattgctttgtgtrtgaccgccaagtaaatgacatcaacatttagttacacaaataattagaactctaggctgagcacattcctgtccattcctttggtcagatatcaacgaat

SEQ ID NO: 19240 - DNA, 201 bp, Homo sapiens
gaaatgtcttgttattcccttaaaaatcctgaatggagtcttcaaacgtggaaataatgatttgaagcatccagaagaattactgagtgtgactttttttaaaaaaaaaagaaaaataatgaggagaacgtagttctaaaatgtaccaaactgaattatgcatattatcaaataagttcaaaaattggcataagactagac

SEQ ID NO: 19241 - DNA, 201 bp, Homo sapiens
gtcctccaactctgtccttattttcaaaattgttttggctattccagttatgtttatatataaagtttagactcatattgtcaatttctattttttaattstattctagttatatttacatataaattttagaatcatattgtcaatttctattttttaaaaattctactgggattttgatcagatttggataaaatctat

SEQ ID NO: 19242 - DNA, 201 bp, Homo sapiens
ccagtagtcgcaatctcgtcactaagtcagaatgctgctgtgatggtgggcgaggctggggccaccagtgcgagctttgcccacttcctggaactgcccaktacaaaaagatatgtcctcatggcccaggatatacaactgatggaagaggtaaggagttgaggaaatttattcatataatcaacacattaaattttatga

SEQ ID NO: 19243 - DNA, 201 bp, Homo sapiens
aaatctattctatgtttttaaaattcaagagtaccacaaaatataataatctgggatccaatctaatatagttagataagagagaaataacaggcttacaractctaaccaagtattaataatgatactccatcagcgtagtctggtgattgggttatggtagttatgtgactctctcgatatttgtcacatccaccaagc

SEQ ID NO: 19244 - DNA, 201 bp, Homo sapiens
tagtgagtacctggagttgtataaacatcaattacagtgatgaagcaatgtagtgaaaagaatattgtttgaatattttattttataatctcatttagctaatctgccagtttttgaaatagtaaggacctaatacagtttacaaacaccatcaattttgttccactcagacaaaatatcaacacacatttggaacaaaca

SEQ ID NO: 19245 - DNA, 201 bp, Homo sapiens
tgactgggagatacctcccagcaggggtcaacagacacctcatacaggagagctctggctggcaactggtgggtgcccctctgggacaaagcttccagagraaggaacaggcagcaatatttgctgttctgcagcctctgctggtgatatccaggcaaacaggacctggagtggacctccagcaaactccagcagacctga

SEQ ID NO: 19246 - DNA, 201 bp, Homo sapiens
acactcacacacatttacttccaagaggcacttgatgaataaggctgatttttactgacattttcatggagtgatggaataatactggtttacatcccacrtgatatagcaaaatcttctaaacatcctcttcaaaaattggtgctgaatatcttccatttccccttcagatcctatctctctctacccttctccaccctg

SEQ ID NO: 19247 - DNA, 201 bp, Homo sapiens
aaaatataataatctgggatccaatctaatatagttagataagagagaaataacaggcttacagactctaaccaagtattaataatgatactccatcagcrtagtctggtgattgggttatggtagttatgtgactctctcgatatttgtcacatccaccaagctaaagcttcagttgtccttgtcatgcacattgtatta

SEQ ID NO: 19248 - DNA, 201 bp, Homo sapiens
tgcaggtagggtgggcagcacctggattcaagagggaggaggggatcaggatttggagccaggctccttgtcatgctttttttcatctgacactttagtgyctccccagtgttcccagctaacacctgtgtgcagcattgaagggaatacctttcctccagatttctaactcctgtaaatgtagaaagatggtaatgtaaa

SEQ ID NO: 19249 - DNA, 201 bp, Homo sapiens
ctgacctcaggtgatccacctgcctcggcctcccaaagtgctgggattacaggcgtgagccactgcacccagccccactattaaaacttttaaagtattcttttttttttttttcctctggtggagatggggttttgctattttcccaggctggtatcgaactcctgggctcaaatgatccttcctcctcagcctcccaaa

SEQ ID NO: 19250 - DNA, 201 bp, Homo sapiens
taactcctgtaaatgtagaaagatggtaatgtaaagagaccagtgcacattgtcataaaatgcattgcatcctcaccctaacttcttgtgataaccaagamaaatgataggatatttcaaactcccgaagtccaaagcaggcttaatatgattgtgaagttgttctatctatactggctcttctagatgtatgtttttgat

SEQ ID NO: 19251 - DNA, 201 bp, Homo sapiens
gtaaaatttgtcctgttgttgttacagatacagcttgcccaagagggcttgccaggattaaaggtgttacgtgtgaaggtgagtgtatccttccttggaakatactatacatcttttgagcagtaagtaaaattaacattcactctcaaactttggagatatttatcattttcaaaaaccttgacatttcaataaaaatac

SEQ ID NO: 19252 - DNA, 201 bp, Homo sapiens
taatgtaaagagaccagtgcacattgtcataaaatgcattgcatcctcaccctaacttcttgtgataaccaagaaaaatgataggatatttcaaactcccraagtccaaagcaggcttaatatgattgtgaagttgttctatctatactggctcttctagatgtatgtttttgatgatcgccaagggctcaataacttcag

SEQ ID NO: 19253 - DNA, 201 bp, Homo sapiens
tatctatactggctcttctagatgtatgtttttgatgatcgccaagggctcaataacttcaggtcagggatatgatctctggcaaaggccttggactggcrgtgaagagcaagccaattccaagtctcctccagcatcctactccacaagaggttcagatgcaagacacgctgagccatatatccagggcctttcctgagt

SEQ ID NO: 19254 - DNA, 201 bp, Homo sapiens
gagggactgaagcaggagaatcgcttgaacctgggaagtggagattgcagtgagccgaggtcgcaccactataccctagccttggcaacagagtgaggctmtgtctcaaaaaaaaaaagcattttttaatattctaagatgatatattggattcttcatccttgtactttgcttaaatgcttttgtcaccacttgaattat

SEQ ID NO: 19255 - DNA, 201 bp, Homo sapiens
gtctcctccagcatcctactccacaagaggttcagatgcaagacacgctgagccatatatccagggcctttcctgagtcagccaggtggctactgataackgagaattctgttggccggtgacatctgctaaggtttggaaggattgtttagccacacatcacccctatactaacctgctttagcttatttcaatttttga

SEQ ID NO: 19256 - DNA, 201 bp, Homo sapiens
actaaagttttggtaaatgctctgatagaacctcatctgaatcagggatcccaaactcagatgcttgcaggagccaagcatgtaacatataaatgagtgaygcgacaacagggagcagtggggactgcagcaaacttcagagaacatggaccatccaaaggtttccaaattcatattttaatttccatgcaaggacaatcg

SEQ ID NO: 19257 - DNA, 201 bp, Homo sapiens
agggcctttcctgagtcagccaggtggctactgataactgagaattctgttggccggtgacatctgctaaggtttggaaggattgtttagccacacatcayccctatactaacctgctttagcttatttcaatttttgaaactgtgctgcccagcaccttcttgcaagtcttactgctaatgtttctccaatctaaacata

SEQ ID NO: 19258 - DNA, 201 bp, Homo sapiens
atgtcaaatggcatccagtagtcgcaatctcgtcactaagtcagaatgctgctgtgatggtgggcgaggctggggccaccagtgcgagctttgcccacttmctggaactgcccagtacaaaaagatatgtcctcatggcccaggatatacaactgatggaagaggtaaggagttgaggaaatttattcatataatcaacac

SEQ ID NO: 19259 - DNA, 201 bp, Homo sapiens
aagcccatcatgcagtgagatccattgtactgtttggtgaaagttcttttagaccttttaaagccagtaaatatgtgtgtgtatatatatatatatatatacacacatacatatatatacacttatatatacatacatatatatacacacacacgcacacatatatatgtattttaaacttaaaaagcctgtgctttattt

SEQ ID NO: 19260 - DNA, 201 bp, Homo sapiens
agcccatcatgcagtgagatccattgtactgtttggtgaaagttcttttagaccttttaaagccagtaaatatgtgtgtgtatatatatatatatatatacacacatacatatatatacacttatatatacatacatatatatacacacacacgcacacatatatatgtattttaaacttaaaaagcctgtgctttatttt

SEQ ID NO: 19261 - DNA, 201 bp, Homo sapiens
aaaggctcaacataaccaatcagggaaatgtaaatcaaaaactacaatgagattgtttcaccccagttaaatggctatttacaaaagacaaaaaaaaaaacaaaaaaaaaaacaaaaaaaaacaaatgctagctatgatacagagaaaagggaactcatacactgttggtggaaatgtaaattaatatagccattatagag

SEQ ID NO: 19262 - DNA, 201 bp, Homo sapiens
taaccaatcagggaaatgtaaatcaaaaactacaatgagattgtttcaccccagttaaatggctatttacaaaagacaaaaaaaaaaacaaaaaaaaaaacaaaaaaaaacaaatgctagctatgatacagagaaaagggaactcatacactgttggtggaaatgtaaattaatatagccattatagagaacagtgtggag

SEQ ID NO: 19263 - DNA, 201 bp, Homo sapiens
caaataaaaatgtaacaaaacttgaaatgtaatacctagatccaagactgcagttctcgccagtgctgtcacttactgcccatatatatatatatatatatcatatatatatatacacactttattcactgccaggcattgaaaaatgtatgcaggtctggagacaaatgttatgggctgccatttcttttagatgcatcc

SEQ ID NO: 19264 - DNA, 201 bp, Homo sapiens
cagcaccaccccactatctgataacaatttactgtattagtagtctgttctcatgccactaataaagacatacctgagactgggtgatttataaaggaaaraggtttagttgactcacatttccacatgtctgggaggcctcataatcatggcagaaggtgaatgaggatcaaagtcatgtcttacagacagcaggcaaga

SEQ ID NO: 19265 - DNA, 201 bp, Homo sapiens
aaataaaaatgtaacaaaacttgaaatgtaatacctagatccaagactgcagttctcgccagtgctgtcacttactgcccatatatatatatatatatatmatatatatatatacacactttattcactgccaggcattgaaaaatgtatgcaggtctggagacaaatgttatgggctgccatttcttttagatgcatcct

SEQ ID NO: 19266 - DNA, 201 bp, Homo sapiens
atgatagtgagtgagttctcatgagatctggtgattttataaggcagttttccctgctcttgctcagtctcaggcttactctcctgctgccgtgtaaaatrtgcctcttcttctgccatgattgtaagtttcctgaggtctcggtagccatacagaactacaagtaaattaaacctcttttctttatcagttacccagtct

SEQ ID NO: 19267 - DNA, 201 bp, Homo sapiens
ggtagaaagagcaagcaacttggaaaacatatttgaagatattgcccacgaaaaattatccaaccttgctagagaaggcaatattcaaattcaggaagtcyggagtacccctgtgaaatactgtacaagatgacaaacttcaagacatacaatcatcagattctccaaggttaacaagaaataaaaaaattttaaaggcaa

SEQ ID NO: 19268 - DNA, 201 bp, Homo sapiens
tccaatttatgtaaagttgtgatgatgtattgaaggagcatgtaactgaactctttcccaataggctgatcactgtggtcctactgagttcccagtcctakagatgtgtatccacgatgtaaaatgcatgtctccattccccattcactttatgcttcatagatccatattaaaattaccagagccaagtttaccagacat

SEQ ID NO: 19269 - DNA, 201 bp, Homo sapiens
aacagatgagttgaattgtcctgagaggggctctgtccatgcaactacctggagggtggctgatcccagcatgaggataagctgtcaggaacctggggccratgagagtggccaggtagaggagttattatccctagaatcatccgtgagaggtgagagaccttaggattaggaggattctcaaaacacactaggctttgg

SEQ ID NO: 19270 - DNA, 201 bp, Homo sapiens
ttaaaaatacctctgtgcacacaaactagaaaacttagaagaaatcataaattcctggaaacataacatctcccaagattgagccaggaagaaattgaatycctgaacagaccaaaaatgagttctgaaattgaatctgtaatgaaaagcctaccaaccagaaaaagcatgggaccagaaggattcacagacaaattccgc

SEQ ID NO: 19271 - DNA, 201 bp, Homo sapiens
gtcagatgttgctgcattacagacaaccacaaaatcacagtgacatacaacagtgcgcatctccaggctgaggattgggactgggttgttgctttccttcmagcttcagaattgcctgactttagcttcttactgcagtctgtcctcctatctgctccacgtctttcattgttctgtccctggctcaatgaatgtctgaga

SEQ ID NO: 19272 - DNA, 201 bp, Homo sapiens
caaaagaaaatgaggcatttattgcagggtgcccagcagggaaaatcaggcagctcgtgcttcagacccggactctccaatggcttataggtaaggatttytaaaggcaggaaagcagaagttacaggcaaagtcctaagtcaatacatggagcttatacattggtttgactgaaagaggctgggtatcttgaaccagggg

SEQ ID NO: 19273 - DNA, 201 bp, Homo sapiens
actagaaaacttagaagaaatcataaattcctggaaacataacatctcccaagattgagccaggaagaaattgaatccctgaacagaccaaaaatgagttmtgaaattgaatctgtaatgaaaagcctaccaaccagaaaaagcatgggaccagaaggattcacagacaaattccgccagatgtataaagaagagctggtt

SEQ ID NO: 19274 - DNA, 201 bp, Homo sapiens
cttaattaaaaagttcccttagttcctattaatgataacaaagactattttcaatgtatttccttagactaataacaatagaaaagagggacaagaaagaatatatattgtactatagtaaaatcctgaaataatgcaaaaataatgatataatgtgacagaccacaggctttcatcctctgcataacccttgttgttttc

SEQ ID NO: 19275 - DNA, 201 bp, Homo sapiens
tgtgtccagcccagcctcagccctgccgacggggtttcatccccaacatccgcactggagcttgccaaggtgagtcagctgtctgcctgtgcacaccatcrcagacctgccacttctctttttgttggagttggagaatctggcactggatggtagcttttaacagaatactgatttccaagagtggcctcgttaacaacc

SEQ ID NO: 19276 - DNA, 201 bp, Homo sapiens
tattttggcaaagaagtgttaaataagatataacccattagaagatagcttgtaaactataatttgacagttttctcattattcatattgtttgtttttcyaaagatgaaaatgaatgcaggaccaagccaggaatctgtgaaaatggacgttgtgttaacattattggaagctatagatgtgagtgtaatgaaggattcc

SEQ ID NO: 19277 - DNA, 201 bp, Homo sapiens
attatttacagaattagaaaaaaacctattttaaaattcatgtggaaccaaaaaaatggcctgaatagccaaagcaatcctaagcaaaaagaacgaagctrgaggcatcacactacctgactttaaactatactacaaggcaacagctaccaaaacagtacagtactggtacaaaaacagggatatagaccaatggaacag

SEQ ID NO: 19278 - DNA, 201 bp, Homo sapiens
ttaattaaaaagttcccttagttcctattaatgataacaaagactattttcaatgtatttccttagactaataacaatagaaaagagggacaagaaagaatatatattgtactatagtaaaatcctgaaataatgcaaaaataatgatataatgtgacagaccacaggctttcatcctctgcataacccttgttgttttcc

SEQ ID NO: 19279 - DNA, 201 bp, Homo sapiens
cacatgaccatttttaatctcatcatattagtattttggcaaagaagtgttaaataagatataacccattagaagatagcttgtaaactataatttgacarttttctcattattcatattgtttgtttttctaaagatgaaaatgaatgcaggaccaagccaggaatctgtgaaaatggacgttgtgttaacattattgga

SEQ ID NO: 19280 - DNA, 201 bp, Homo sapiens
aatgggtcaatgaagaaaggaataaggacattttaaaaatgtcttgaaacaaatgacaatggaaacgcaacataccaaaacctatgttatacaacaaaagwaatgctaagaggaaagtttgtagcaataaatacctgggtcagaaaaagtacaaagattttaagtaaaacaattaatgatgcacctcaaggaactagaaaa

SEQ ID NO: 19281 - DNA, 201 bp, Homo sapiens
aagcatctctttcagctcctgctgcattatctctaaacattgtgctataaacacagtcccttttgcaagtccttaaaacagaacctgtaaactccccttcrtttctctgcttccaagacttaccatctacatgtctctgaatgttttaaccatgactcagagccatctgccctgcctaccactacacctcttgaaaaccat

SEQ ID NO: 19282 - DNA, 201 bp, Homo sapiens
aggtgtctgcttatgtaatgcctccactcccagcctcattaatggcactactcccacatcatcttaactgcaagccaactctttttccagctgtgttaagrcagtgatacagctagctttcttccatctcagggtctctgctaatataataggttctggattgtggcatttatgcctgctcaagaatacatgcccttttga

SEQ ID NO: 19283 - DNA, 201 bp, Homo sapiens
tcaatgagtgtcttgagagcccaggcatttgttcaaatggtcaatgtatcaacaccgacggatcttttcgctgtgaatgtccaatgggctacaaccttgaytacactggagtacgctgtgtgggtgagtgttggctccacattacagaattttaaagttctattttacttctcatattcagtaaaaggtctctcaggtacc

SEQ ID NO: 19284 - DNA, 201 bp, Homo sapiens
atcttttcgctgtgaatgtccaatgggctacaaccttgactacactggagtacgctgtgtgggtgagtgttggctccacattacagaattttaaagttctrttttacttctcatattcagtaaaaggtctctcaggtaccctgggtgatggggggatttacaaatccaggataaatagctagtagtggcaccttcttcacc

SEQ ID NO: 19285 - DNA, 201 bp, Homo sapiens; identical to SEQ ID NO: 3261

SEQ ID NO: 19286 - DNA, 201 bp, Homo sapiens
gctatgagtgtaactgcccacccgattttcagttgaacccaactggtgtgggttgtgttggtaagtaaagctatatgaaacaaacaaatagaattatcaagttgaatattcagactctcttgataatgaaccgtgatgagtgtttgctacagttaacttaaaaacaaaacattatgtggtcgcctttattgtgtttctctt

SEQ ID NO: 19287 - DNA, 201 bp, Homo sapiens
tcagcctgcctataataattaatagcagattagagaaacacaactgtgaaaaatgaagaaatcttaataaaaatcagatacatgtaacatttatttttttytgttttagatcgcaatgaatgtttagaaattcctaacgtttgcagtcatggcttgtgtgttgatctgcaaggaagttaccagtgcatctgccacaatggc

SEQ ID NO: 19288 - DNA, 201 bp, Homo sapiens
tgactaactaatcaaaattagaaatgaaaagggagacataacaactgataccacagaatgcaaaagattattaaagactattataatcaggtataactaamaaactggaaagtctagaagaaatagataaatctgtggacacatacagcctaccaagattgaatcaggaagaaattgaaaaccagaacaagccaatataag

SEQ ID NO: 19289 - DNA, 201 bp, Homo sapiens
atgcaaatccagaagcattatacatcacatcagcagaatgaaggatgaaaaccatatgatcatctcaatagatgcaggaaaagcatttgataaaatccatyatcccttcatgaaaaatccctccacaaactatgcatagaaggaacatacctcgacattaaaaatgccatgtatgacacactcacagctgacaccatactg

SEQ ID NO: 19290 - DNA, 201 bp, Homo sapiens
gaagaatatatttaattatttaagaaactgccaaaatgtgctattttacatttctagcagcagtgtatgagagtatcagttactccataaccaagccagcrcttcgtatagtcaggtttttacactttagccattgtaataggtaggcagggatttctcattgtggttttaatttacatttctctaatgattcacataaaa

SEQ ID NO: 19291 - DNA, 201 bp, Homo sapiens
acatccttttcagtaaatggtgctgggaaaactggatatctatatgcagaagaatggaactagacccctgtctctcaccatatacaaaaattagctcaagrtggattaaagacctaaacataagacccgaaaccataaaactactagaagaaggcatatgggaaacactccaggacattgtctgggcaagaattttatgac

SEQ ID NO: 19292 - DNA, 201 bp, Homo sapiens
tttggtaattggggggttttattaactttgaagagtggttttaggatggtaattgagtcattttgaggttattttatttattcataatattaacacacatrtgtttcattaactagcttaaccctaaataacagatttgagttcaggtcttccattaaacagtatagatgagaggccaggtatagagagagttagcatcat

SEQ ID NO: 19293 - DNA, 201 bp, Homo sapiens
gtattacagagtgggacaagggtaaggcggccttcagcctcagcacatagaggaatacatggttcctgagtgagttcaggccaccccccactgcagggaakagtacagtgtctaaaagccaaaccgcaaaagcattgattagaactcttcgggtatgcagataaataccaagaaagcacacacggactgtgctcagggtat

SEQ ID NO: 19294 - DNA, 201 bp, Homo sapiens
ggatgcctgctgctgtgctgtcggggcggcttggggcaccgagtgtgaggagtgccccaaacctggcaccaaggaatacgagacgctgtgcccccgcgggkctggctttgctaaccgaggggatgttcttactgggcggccattttacaaaggtaactgcctgcggccagcgccttggtccttcttcaccaacaggaagcc

SEQ ID NO: 19295 - DNA, 201 bp, Homo sapiens
tactaatcatgagagacatgcaaatcaaaattacaatgagatgtcatcttattccagttaaaatcactattattaaaaagacagaaaatagcagatgctgktaaggatgtggagaaaagggaactcttatacactgttggtggtaatgtaaattagtacaaccaatatggaaaacagtatggatatttctcaaaaaattac

SEQ ID NO: 19296 - DNA, 201 bp, Homo sapiens
cgtatctcatttttaatgcagccataaatcactgttttaatcagaaatgcccccaggtcataagaaattattggatggccattttgcataacaagcagatraaattttttccaacaagttgtgaatagttacagatatttataatagaggttatctctggaggtatactggagtataccaggtcagtatactgcttaaaaa

SEQ ID NO: 19297 - DNA, 201 bp, Homo sapiens
aaacagcctatatctattttttgttttatttttacagtctgtaaatctttgtctcttcagttgagatttaaatccatgtgtatttattatattactgatayatttgtttttatttttaccatagtccttgtgcttcctacttatcttactttttttgtatttttttctcctttcttggtttcttttagatttgttcaggat

SEQ ID NO: 19298 - DNA, 201 bp, Homo sapiens
gagctccaagtattctttataactgtggaaatatcctaggtttcacaaaaggtttgtaagaatacatcggacaatggatactgtgtagctcataaaacttrttaaagaaaacagagtcggtgatatgcatccattcttttcctcactcagaaaacatttgttgatttcctaacactattagatgctaaagatgcaaaataa

SEQ ID NO: 19299 - DNA, 201 bp, Homo sapiens
agcagacgcttgacatgtgactgttcaatggatgtttcaactcattctcaccctgtgatttcgttctcggtgtagatattcgcatggagcagtgttacttraagtgggatgaagatgaatgcatccaccccgttcctggaaagttccgcatggatgcctgctgctgtgctgtcggggcggcttggggcaccgagtgtgagg

SEQ ID NO: 19300 - DNA, 201 bp, Homo sapiens
aaagaagaaaactccttttaaggaagcagacctgacaatgtggttgcaatgctgttttcacagatattgatgaatgtatgataatgaacggaggctgtgayacccagtgcacaaattcagagggaagctacgaatgcagctgcagtgagggttatgccctgatgccagatgggagatcgtgtgcaggtatagaaaggaaaa

SEQ ID NO: 19301 - DNA, 201 bp, Homo sapiens
actcctgtttttaaaactatcagatctcttgagacttattcactatcacaagaacagcacaggaaagtcctgcccccgtgattcagttacctcccaccagrtccctcccacaacatgtgggaattcacgatgagatttgggtggggacacagccaaaccatatcagatgtacacaggtgtacatctaattagcttttcatt

SEQ ID NO: 19302 - DNA, 201 bp, Homo sapiens
agtcccagctactaggggggctgaggtgcaagggatcacttgagcccaagggttcgaggctgcagtgagccatcactgtgccactccactccagcctgagyaacagagcgagatgctgactctttaaaaaacaatcaaaaatctattttcttatacagttatgattattataagagggtttttttacatgaacatgatagc

SEQ ID NO: 19303 - DNA, 201 bp, Homo sapiens
tatttgcaaactacacctctgacagtggtctaatatccagaatctataagtaacttaacaagcaaaaaaaaaatctcattaaataatgggtaaaggacatragcagacacttctctaaagaagacatacatgcagacaaaaagcatatgaaaaaatgctcagcaccacctctcattagagaaatgtaaatgaaaaccacaa

SEQ ID NO: 19304 - DNA, 201 bp, Homo sapiens
cttgaacccaggagctggaggttgtagtgagtcaagatcatgccacgccattgcactccagcctgggcgacagagcgagactccatctcaaaaaaaaacagaaggaaggaaggaaggaaggaaggatggagggagggagggagggaagaaaggaaggaaaggaaggaaggaaggaaggagaaaaagagaaagaaaagaaag

SEQ ID NO: 19305 - DNA, 201 bp, Homo sapiens
taagtgatatgtagatacacattttcatcttggataaatatttatctgttaaatatgcattgttaaaaatgtcactaacaaactactctcctgatttcagkcagtcattgcttaagaaaagaataatgtgacatttaagttaaaaaaagaagaataagtcaattttatgataaaacattaagtaatggtgcagatagggtt

SEQ ID NO: 19306 - DNA, 201 bp, Homo sapiens
aaacacaacaagaactcaatttgattatatatatatgtatatatatgtgtatatatatgtatatatatgtatatatatgtgtatatatatgtatatatgtrtatatatatatatacacacacacacacatatatatgaagatctctctctatatatatatcttgacaccaagtggtctcaagtcacagtctcaggcaatag

SEQ ID NO: 19307 - DNA, 201 bp, Homo sapiens
caactttataataatcacgtgacataatcgtatagctttataattctaatattaatatgagtatatttaatatgaaaatgtagtattataaaataataagattaattatctcctagagcagtggttataagctagatgatattaagtgatatgtagatacacattttcatcttggataaatatttatctgttaaatatgca

SEQ ID NO: 19308 - DNA, 201 bp, Homo sapiens
gcctgctgctgtgctgtcggggcggcttggggcaccgagtgtgaggagtgccccaaacctggcaccaaggaatacgagacgctgtgcccccgcggggctgrctttgctaaccgaggggatgttcttactgggcggccattttacaaaggtaactgcctgcggccagcgccttggtccttcttcaccaacaggaagccttcc

SEQ ID NO: 19309 - DNA, 201 bp, Homo sapiens
agccggtgtgggggccgggggacagggacctatcatcactggactaagtaagtggtcagttttcctgtggactctttagtttcctgcctcaagtgacattrtaatatctaacataattttaatttttcaaaagggttgtatgaacacacttgcacatgtgtgtgtgtgtttgtgggtgcgagagagagagagacagaggga

SEQ ID NO: 19310 - DNA, 201 bp, Homo sapiens
cacagacttgaatccaggtattctgatgcctaagtgtatagtctcaaacactagactgtatttgttgcctttgcttaacatgtgttttgtgggttatctamgggggaaggagaggagaactccaaaggcagcatgtgtttattgagtactgaccacatactttacacataatggacctattttgcttcacatgtattaact

SEQ ID NO: 19311 - DNA, 201 bp, Homo sapiens
agcaatcgaagatttccagacctgccttaactgctgatctagtctgcatcccgtgttctacaatgagaaatgttctgtccaaacagtgttacaaaataatyccatctgtaatgtttgcttttttgattagatactcgccagagcttctgcttcacaaattttgaaaatggaaagtgttctgtacccaaagctttcaacacc

SEQ ID NO: 19312 - DNA, 201 bp, Homo sapiens
aagacgggtgatttctgcatttccatctgaggtgctgggttcatcttactagggagtgccagacagtgggcgcaggtcagtgggtgcatgcactgtgcacragccaaagcagggcgaggcattgcctcactcgggaagcgcaaggggtcagggagttccctttcctagtcaaagaaagtggtgacagacggcacctggaga

SEQ ID NO: 19313 - DNA, 201 bp, Homo sapiens
tgatcttcaagcttttcattataccatgctgatagctgaaatgtctgcaaaatttttttgatcatcacaaaactctttgtagaacactttcatgcaaacartgtgttttcacaactagaaattccagtttaaaaacagtaaaaatattattacaaagaaaaagtatttacaaaagtcaggatgaaaaataaagccacaaaa

SEQ ID NO: 19314 - DNA, 201 bp, Homo sapiens
tccgctgcatgaacacttttgggtcctatgaatgcacgtgcccgattggctatgccctcagggaagatcaaaagatgtgcaaaggtaaggcctcagactcrggagtagttcgaactttatttgtcatgctggagatacatcttaatgattttatagttctcaactaatttcttctagagctttacagaaatatatatatga

SEQ ID NO: 19315 - DNA, 201 bp, Homo sapiens
gtgatcacattgcactgataatcgggacgcggccccatttgaatagtggggaagactcaaccggtttgagtcagttcagacttcacttctagactctgttraagggcaataatgataaagatttcaaagataattgaaagttttatctttctatgtctattaatacaaattggaagaggggaggagtagagcaattatcta

SEQ ID NO: 19316 - DNA, 201 bp, Homo sapiens
caaatttccctatcaaagcacaaaacatgtgagtgaagccatactggggtcctccagttcatcccagttgtaatggttaatgttaggtgtcaactcgattrgatcgaaagatacgtaaatggctggtaaagtattgtttctgggtgtgtctatgggggtgtggccagaggagattgacatttgagttgttagactgggaga

SEQ ID NO: 19317 - DNA, 201 bp, Homo sapiens
aatgctatgtaaatagtcattaaactgtattgtttaaggaataatgacaagaaaaaaagtctatacatgttcagtacagatataaccattcattttcaatyggtgattggttaaaatcacggatgcaaactccatggacacaagggccagctgtactgtctttcccatttaatttttctgaccatcagtaaaatagtaata

SEQ ID NO: 19318 - DNA, 201 bp, Homo sapiens
gaacccccctggataccaaaatccatggatgctcaagccgcctatataaaatttatataacctatgcaattcccccacatactttaaatcatctctagatwacttataatacctactagattataaatgctatgtaaatagtcattaaactgtattgtttaaggaataatgacaagaaaaaaagtctatacatgttcagta

SEQ ID NO: 19319 - DNA, 201 bp, Homo sapiens
ggctaggatgaaatcacatgtccctttccaaaagcagtcataaagtttccacaactgggtaaaataagatttactggagtcatgttgggaagtttgttaaytgctttaagaactaggcttttattgaaaaggctttggagcaggcaacgaatggtgcttgctatcctcacttaggtatcttttagttgtaaaagaatgagt

SEQ ID NO: 19320 - DNA, 201 bp, Homo sapiens
gtgatgctcttggccccatgcttgtccatgttcaggcttcagaccagctggcttcactcatgatcacaagataggggttactgagccacatatcacttacrccatgataagatataattgaagaaggggtgatttctatgaacaagaaaacctttccctggttcactccagcagtctttcttcaggactcattggctagga

SEQ ID NO: 19321 - DNA, 201 bp, Homo sapiens
aagagtaagacttccataagttgaacgggctccatgcacagtagttcaggatcactgcactgctcctctgtgatgctcttggccccatgcttgtccatgtkcaggcttcagaccagctggcttcactcatgatcacaagataggggttactgagccacatatcacttacgccatgataagatataattgaagaaggggtga

SEQ ID NO: 19322 - DNA, 201 bp, Homo sapiens
gacctcgattttcacatgtgtcagtgaagaggttagtgcttgattgctttgtgctgcaatgagcagaaagccccgtctcaactattttaaacaatcatgasacatcatatctcaagagtaagacttccataagttgaacgggctccatgcacagtagttcaggatcactgcactgctcctctgtgatgctcttggccccat

SEQ ID NO: 19323 - DNA, 201 bp, Homo sapiens
atgtggctctggataattgcagagccattctggcgtcaaaactaggtccaacagaactttagggaaacatgccccagtgcttaataaatacttgcaagtakaagatgcaaaacggtccactgaacaatctccatctaggccctttgcatctggccaagatgaagtgagcgggggtgcctcagttttatatctaaatgccca

SEQ ID NO: 19324 - DNA, 201 bp, Homo sapiens
tttcaagaacaatatccaaagggaaaaaaaaggcctttttagtccaagcacctgcacagtagccatatttcaagcagtgcctttatatcacattcttaatrcaaccatggtgttcagacaaaatatgattaaaggctcactgtaatttagaacatgttaacaaacatattgagcttttattttagaagacacatgttaagg

SEQ ID NO: 19325 - DNA, 201 bp, Homo sapiens
ttttacttcccatgaaacgtaagacatgttatgattggaaagtttgacgctctgcttcttgatgctttgccagacaacaacgaatgtgggtctcaaccttygctttgtggagcaaagggaatctgtcaaaacactccaggcagtttcagctgtgaatgccaaagagggttctctcttgatgccaccggactgaactgtgaa

SEQ ID NO: 19326 - DNA, 201 bp, Homo sapiens
accaagctgcgagaatcacctgaggccagaagttccagaacagcctgggcaacatagtgagatcccatctctaaaaaaaattgttttaagttggccaggcrtggtggcacatgcctgtattcttagctacttttggaaggctgtggcaggaggattgcttgagccaagaagttcaaagcttcagtgagctgtgatcgcacc

SEQ ID NO: 19327 - DNA, 201 bp, Homo sapiens
aactttataataatcacgtgacataatcgtatagctttataattctaatattaatatgagtatatttaatatgaaaatgtagtattataaaataataagattaattatctcctagagcagtggttataagctagatgatattaagtgatatgtagatacacattttcatcttggataaatatttatctgttaaatatgcat

SEQ ID NO: 19328 - DNA, 201 bp, Homo sapiens
actttataataatcacgtgacataatcgtatagctttataattctaatattaatatgagtatatttaatatgaaaatgtagtattataaaataataagattaattatctcctagagcagtggttataagctagatgatattaagtgatatgtagatacacattttcatcttggataaatatttatctgttaaatatgcatt

SEQ ID NO: 19329 - DNA, 201 bp, Homo sapiens
tatcttttcagtaggtgagaaggggacacacttaagagtttgaaatatctttcaataggttatgagagtcctctttttaagccagctctggcttctcaaakgtattcaactacagagtctctattttctagatcctgctcccatctctaacaccaattcttcagaaatgctctgagaaatgtactttatgaaaaagtatcc

SEQ ID NO: 19330 - DNA, 201 bp, Homo sapiens
gtctagctcagcagatcctacccccatggagcccttcaagctaagatcgactggcttgaaattttcactgccagcacagcagtccgatgttgacctgggaygctcaagcttggtagggggaggggtgtccactattactgaggcttgagtaggctgtttcccccttacagtgtaaacaaagccgctgggaagttctaactg

SEQ ID NO: 19331 - DNA, 201 bp, Homo sapiens
ctttataataatcacgtgacataatcgtatagctttataattctaatattaatatgagtatatttaatatgaaaatgtagtattataaaataataagattaattatctcctagagcagtggttataagctagatgatattaagtgatatgtagatacacattttcatcttggataaatatttatctgttaaatatgcattg

SEQ ID NO: 19332 - DNA, 201 bp, Homo sapiens
taaaaacacacaatattgaaattcttcttttttcaggcttcttacaaatgaaattaataggagaattatatgtggtctgtccttagatttgttatctgctkcttttatggttagctagtttcttttttacattgtgtttttatgaaaaagtttctctactcggattgatgttttcattagaaatctgtgctatatttacaa

SEQ ID NO: 19333 - DNA, 201 bp, Homo sapiens
gcaaaaatcacaagcactcctatacactaataacagagggtcaaatcatgagtgaactcccattcataattgctacaaagaaaatacaatacctaggaatrcaacttacaggggatgtgaaggacctcttcaaggagaactacaaaccactgctcaaggaaataagagaggacacaaacaaatggaaaaacattccatgct

SEQ ID NO: 19334 - DNA, 201 bp, Homo sapiens
aagcacagatctcaggccttactacggataaaaacagaatatgattccaaaaagcaaagaattacacattatgttagttgtttttactcaatatcaatatrgaggtaaaacataatagcattaattaggcagcctattcaatttttgttagattctagaaatcttccttttatataagtagatatattatgctataactta

SEQ ID NO: 19335 - DNA, 201 bp, Homo sapiens
taaaatcttaaatatcaaagcatttgtcattaaggatatatcttatgaatacttttcacacaagtgatggtcttatcatgttgttatagtatgttaaaagaaaaaaaaaaagaagggcggggcgcactggctcatgcctgtaatcctaacactttgggaggctgaagtggaaggattgcttgaggcctggagttccaaacc

SEQ ID NO: 19336 - DNA, 201 bp, Homo sapiens
actggtcatcagagaaatgcaaatcaaaaccacaatgagataccatctcacgccagttagaatggcaatcattaaaaagttaggaaacaacagatgctggwgaggatgtggagaaatatgaacgcttttacactgttgggagtgtaaattacttcaaccattgtggaagacagtgtggtgattcctcaagaatctagaacc

SEQ ID NO: 19337 - DNA, 201 bp, Homo sapiens
ggcaccaaggaatacgagacgctgtgcccccgcggggctggctttgctaaccgaggggatgttcttactgggcggccattttacaaaggtaactgcctgcrgccagcgccttggtccttcttcaccaacaggaagccttccacattctctgagaattggttttgctttaaatgtttgacttcccactttattttctcagtt

SEQ ID NO: 19338 - DNA, 201 bp, Homo sapiens
tttacatatatgtaatataccatatttgaatgcaggtacatgaaagtattttcaaagtatatgctattaaaattttttcttttttttttttgagacgaagyttcactcttgttgcctaggctggagtgcaatggcacaatcttggctcactgcaacctctgcctcctgcgttcaagcgattctcctgcctcagcctcccga

SEQ ID NO: 19339 - DNA, 201 bp, Homo sapiens
agacttccattattttggccttttgcccttatatttattaactaaacaagaacaaagacttttttacccccaagtctttatgtcattcttccaattgccarcaactaaccaccaccatatttttctcagccagtgtattgtgtgctttcatttattgtgattaaatttgaatatcccagtgtagagcagctcaaaatgaga

SEQ ID NO: 19340 - DNA, 201 bp, Homo sapiens
ataataataataaaagaaattaccctgtcttaggtatttctttatggcagcacaagaacggactaatataagcatgtttaaaagtgtcaaatgttgcagaktcacttttaagatgtctaaatattgataatagaaggtgattttgagaagtttatcaataaaccttagcaagagcattgcaataatgagttggacttagat

SEQ ID NO: 19341 - DNA, 201 bp, Homo sapiens
tttcattgcgagtgccctgaaggccttacgttggatgggactggccgtgtatgtttgggtaagattcacaccctcatgtattctatgtataaaacaagccrtgaatttccttgtttaagcagtggctagtccaaaaccacaagagtttgtacttgagaaaacttgctttaaatgagatatttagggggaaatcactagagg

SEQ ID NO: 19342 - DNA, 201 bp, Homo sapiens
aaaattttttcttttttttttttgagacgaagtttcactcttgttgcctaggctggagtgcaatggcacaatcttggctcactgcaacctctgcctcctgsgttcaagcgattctcctgcctcagcctcccgagtagctgggattacagacacctgccaccaagcctggctaatttttgtatatttagtagagacggggtt

SEQ ID NO: 19343 - DNA, 201 bp, Homo sapiens
gttttccacatcactcacatcagaatcacctgaggagtttgtcaaaattcagattcctgggctgcataccgggaaacttatgaatcggcattttaacaagygtcttggtaatattatgcacacttaactgagagccactgctctacaaggaaaacatgacatatgatttgttttagccaattagtatttgctatatcagct

SEQ ID NO: 19344 - DNA, 201 bp, Homo sapiens
aaggtgattttgagaagtttatcaataaaccttagcaagagcattgcaataatgagttggacttagattggatatgaaaggaaggaaagagaggtcagtakgttgaaaatatattgagagaagggctatgagatgggaaagatttgatcatgtttatgtactgacatgaaaggagaattttgaagatacagaagagagggg

SEQ ID NO: 19345 - DNA, 201 bp, Homo sapiens
tgatgtccttggaccctaagaccctgccttgcattttttatttagttccatttagatttcattatacttcttcttgagcataccatggttgtattttattmtataatgaagtaaaatttgtcctgttgttgttacagatacagcttgcccaagagggcttgccaggattaaaggtgttacgtgtgaaggtgagtgtatcct

SEQ ID NO: 19346 - DNA, 201 bp, Homo sapiens
ctgggactagaggtgcccgccaccatgcccagctaatttttgtatttttagtagagacggggtttcaccatgttggtcagatgggtctccaactcctgacytcaagtaatccaccctcccaaagtgctgggattacaggcgtgagccaccgcgcctgacctgtttacttttaactcagttgtcaatgtgacagcaaaaaga

SEQ ID NO: 19347 - DNA, 201 bp, Homo sapiens
agaatcacctgaggagtttgtcaaaattcagattcctgggctgcataccgggaaacttatgaatcggcattttaacaagcgtcttggtaatattatgcacrcttaactgagagccactgctctacaaggaaaacatgacatatgatttgttttagccaattagtatttgctatatcagctttgactggattccttatcact

SEQ ID NO: 19348 - DNA, 201 bp, Homo sapiens
cttcagtagaatttatgattcacagaaaacctttaaaaaaactcagtttgggccaggcgtggtggctcacgcctatattcccagctctttgggaggccgargcaggtggatcacctgaggttgggagttcaagaccagcctgaacaacatggagaaactccatctctactaaaaatacaaaattagctgggtatggtggct

SEQ ID NO: 19349 - DNA, 201 bp, Homo sapiens
actgtctatgtggccttagaaaggtcactttagttctctgggcttcactttcctcctctttaaaattagaacaataataatatttgccttgtagggctctygtgaggatttaacgagctcattcatgcagcaactctaagtcactaatcaatacatttggtggatactagagattttactgattagagagatcacatgaaa

SEQ ID NO: 19350 - DNA, 201 bp, Homo sapiens
cttagtgaagaaggtcagagatcatttacttttgctaaaatgttatctttcctggctaatgttttttacctcttaaaatgtgtatttgttttatcctggtrcataagcaggccttctaaatattttaacatggaagggaatcagctagaatctatctgctagatgactgtatcctctggtatccttgtttgcgtggtggct

SEQ ID NO: 19351 - DNA, 201 bp, Homo sapiens
tgggtatggtggctcatgcctgtaatcccagctactcaggaggcagaggcaggaaaattgcttgaaccctggaggcggaggttgcggtgagccaagattgygccattgcactacagactggacaacaagagcgaaactcagtctaaaaaaaaaaacaaaaacaaaaacaaacaaaccaacaaaagaactcagttttccagt

SEQ ID NO: 19352 - DNA, 201 bp, Homo sapiens
cccctgttctgcagatataaatgaatgtgatgaagatcccaacatttgtctttttggttcctgtactaatactccagggggcttccagtgcctctgccccsctggctttgtactatctgataatggacggagatgctttggtaagatttggcatgacttcactgtcacagttcacgcttagaaactttaaagctgaattgt

SEQ ID NO: 19353 - DNA, 201 bp, Homo sapiens
cctgtaatcccagctactcaggaggcagaggcaggaaaattgcttgaaccctggaggcggaggttgcggtgagccaagattgcgccattgcactacagacyggacaacaagagcgaaactcagtctaaaaaaaaaaacaaaaacaaaaacaaacaaaccaacaaaagaactcagttttccagtcatgcagcctcatgaaaa

SEQ ID NO: 19354 - DNA, 201 bp, Homo sapiens
gtaaaaatattattacaaagaaaaagtatttacaaaagtcaggatgaaaaataaagccacaaaaaaaatcaataaaaatgccaatgcatgaaattggaatmaaacttacccaaaaaagtcgattgcaacggaaactaaaagtattacagttaagggaattaaagttatacaggaaatctaagacctctttaatgaaaacca

SEQ ID NO: 19355 - DNA, 201 bp, Homo sapiens
tttggccacatggagcctgcaatgcccatgagacatggagttgttcatgtcaggtaggcaggtagacatacatacacccctaaagatcaaagacaggaagrtggacatggacttgggactctctggcacatggttggttgaaattacaacttttgacttctgaagcaataatagtttatttttatgaataagttaaacata

SEQ ID NO: 19356 - DNA, 201 bp, Homo sapiens
ttttggttcctgtactaatactccagggggcttccagtgcctctgcccccctggctttgtactatctgataatggacggagatgctttggtaagatttggmatgacttcactgtcacagttcacgcttagaaactttaaagctgaattgtaaaccatcatgctggtattagtcctaacaaaatacatgtctatgctaaaat

SEQ ID NO: 19357 - DNA, 201 bp, Homo sapiens
atcattatttcattctgcttcccttgtatctgtagaaagtgtatcttcatatagtgacattctctaagaatatggcttctattatttatattctaataaayaaaacattttaactgaagttacatattaacttctaacaatttctaaattttaaatttacttttaataacttagaagtgtaatattccttcaaaaggcaaa

SEQ ID NO: 19358 - DNA, 201 bp, Homo sapiens
actgcactccagcctaggcaacagagagagactctgtctcaaaaaaaaaaagaagactattcaaaaaaataaaaacacaaagaaaggaaggaattacatayagggacaatcattatttcattctgcttcccttgtatctgtagaaagtgtatcttcatatagtgacattctctaagaatatggcttctattatttatattc

SEQ ID NO: 19359 - DNA, 201 bp, Homo sapiens
aaaaatcacctgtctgctgtgttgagcctggattataacagagaaaaggaaagggccatgtaggaggctaccacagtggtgctagtgaacaatgctgcagctgtagtcgctgaagatgtggtaagtggttgtattgagcttgtattttggaggtatactctgatggaccaggcgtggtggataaaaaaaaatagaaaaagt

SEQ ID NO: 19360 - DNA, 201 bp, Homo sapiens
tagtgaacaatgctgcagctgtagtcgctgaagatgtggtaagtggttgtattgagcttgtattttggaggtatactctgatggaccaggcgtggtggataaaaaaaaatagaaaaagtaaaaatcaaaagtgacaaggagagggttttggtggagctgctggattaatagcgatgtcatttccagatacgggaaatactg

SEQ ID NO: 19361 - DNA, 201 bp, Homo sapiens
atggtatttaacttgagtctgagtgtgggtaacctgaacttctttggagttctcttttcacacttgctgatatgtacaatgaccttttatacttagcatcaaaaaaaaaaaaaaagagttcttgtggttacaggctaattgtaaaatgcagacagctcatttgtggccatagcatatgaaggtactcaattgtttatgtat

SEQ ID NO: 19362 - DNA, 201 bp, Homo sapiens
aagttttcagcagaatactgacaatcacattcatgtgaggaatctttctgagactggagaaggaactgcttgaaaggagtgaaaggaacaatactcagagttgcacataagcctggaaatactgccttcctctctaaccagattagagggtcacataattggtggggtattggttagagtactcagaatagtgttgcctca

SEQ ID NO: 19363 - DNA, 201 bp, Homo sapiens
agaataaattttaaaagtaacagctaaaaggatcaaacatctatctagaaagtttaagaatatttataagaatacaaaaatattaagcactaaataaagtaaaaaaaatcccaatacatggtatctaatcaaatatctgcaatcaaaaattttgtgtaaagaagcaggagagcatgatcaaaatggaaaaaaaatcaacta

SEQ ID NO: 19364 - DNA, 201 bp, Homo sapiens
catcagcagataaatcaagaaacaagttgtatattcatacagtgcatacaacggaatatttattgtttgttaaaaaagtaatgaattatttatatgtacattattgatgaaccttaaattatttaggctgagcaaaagaagacagttgaaaaagagtaaatacattatgattttatttttatataattctagataattaaa

SEQ ID NO: 19365 - DNA, 201 bp, Homo sapiens
tcagaaggaatagtcagatttcggccgggcgcgatggctcacgcctgtaatcccagcactttaggaggccgaggcaggcggatcacgaggtcaggagatckagaccatcctggctaacatggtgaaactccgtctttactaaaaatacaaaaaattagccgggtgcggtggcaggcgcctgtagtcccagctactcgagag

SEQ ID NO: 19366 - DNA, 201 bp, Homo sapiens
tgctattgtaatagagttgtttcagttttatttttgaaacatttatttccagtgtacagtaatgcagttgagttttgtgtattgatgttgtatcttgcaaycttgcagaacttgttaattctaatagtcttcaatggataatttaggattttacatgtattatatattaaatatattttttcataatgtatattttataat

SEQ ID NO: 19367 - DNA, 201 bp, Homo sapiens
cagattatcccaagacaagaggtaatcattatgagatacttataatagctgggttctacttcaatgtctaattgaaatatcagacatcacacatgttcagmagatataattacaccataatcatcctaaagatagaatgcaaacttaagtatgatgctaatggagatgaagaggatgggtttttgaagatatggaagaaag

SEQ ID NO: 19368 - DNA, 201 bp, Homo sapiens
ccttcagataattatgggactgattttcaaaggcatgctagatgattcagattcctagcaacattctgagctgcatcatttaaagactggtctggaagggytatcctctgagaatttatcattttccaagaactgaagaaatttcctggctgaacatctagaagtcaaaaactgagacctggagcatctttatcttaaata

SEQ ID NO: 19369 - DNA, 201 bp, Homo sapiens
gtaagtacacttctggaatgtttcagtttggattaagcatcctgaaacatggatttaattaaaggagcccttcagataattatgggactgattttcaaagscatgctagatgattcagattcctagcaacattctgagctgcatcatttaaagactggtctggaagggctatcctctgagaatttatcattttccaagaac

SEQ ID NO: 19370 - DNA, 201 bp, Homo sapiens
tgaagatttgaagacacatgtaatttcataagaaggggggcttcatatggatatacagtacaaaaaatgtcttcataaagaaacaatgacttgaattgatyctacactttagggaagctattctttttaaatgagactttgaattggggacaaagaccttgacactggagtacccactatagtgtagctgatttaaagcac

SEQ ID NO: 19371 - DNA, 201 bp, Homo sapiens
ggattatgacaaagcataagtttaaaaataaaaaattgcttaaaatattgaaaatgtaaattcctgaagatttgaagacacatgtaatttcataagaaggrgggcttcatatggatatacagtacaaaaaatgtcttcataaagaaacaatgacttgaattgatcctacactttagggaagctattctttttaaatgagac

SEQ ID NO: 19372 - DNA, 201 bp, Homo sapiens
actgacaggtatttgatttccttcactacatgctttgaaatgttttgctacaattatagaattaagtttcaaaaatacatgtaatggtgaaaatattttaytcataattctaaggtaattatccctgaaatatttatttttatatattaaaatttgatatcaagtattcacttctattaagaaacagagatggataagttt

SEQ ID NO: 19373 - DNA, 201 bp, Homo sapiens
ttcactacatgctttgaaatgttttgctacaattatagaattaagtttcaaaaatacatgtaatggtgaaaatattttactcataattctaaggtaattayccctgaaatatttatttttatatattaaaatttgatatcaagtattcacttctattaagaaacagagatggataagtttaagtgtcagacccaggagcaa

SEQ ID NO: 19374 - DNA, 201 bp, Homo sapiens
ggaagtaggaccacacctgctttttctatttgtaacatctttgctcctctgcttgctgcatttccctgcagatgttaatgagtgtgaggtgttccctggcrtttgtccaaatggacgctgtgtcaacagtaagggatcttttcattgcgagtgccctgaaggccttacgttggatgggactggccgtgtatgtttgggtaa

SEQ ID NO: 19375 - DNA, 201 bp, Homo sapiens
cagcaattgaaagatttactatttgtggacctcgattttcacatgtgtcagtgaagaggttagtgcttgattgctttgtgctgcaatgagcagaaagcccygtctcaactattttaaacaatcatgacacatcatatctcaagagtaagacttccataagttgaacgggctccatgcacagtagttcaggatcactgcact

SEQ ID NO: 19376 - DNA, 201 bp, Homo sapiens
atgcaaaacggtccactgaacaatctccatctaggccctttgcatctggccaagatgaagtgagcgggggtgcctcagttttatatctaaatgcccagcawgttcaggtcatcagtctgtccatgacaatctgggattacggtacaaattagcaagaccagcaactcaaactaggtccattgttggtcaagccattatggc

SEQ ID NO: 19377 - DNA, 201 bp, Homo sapiens
tattataggaatagtgatttgacctttttctttattagtgtcatgtttgaacttgaatttcatgattgaaaaagaaatttctattaattttcattgtatgyaacaataatttttcatttacctacagagattttttttcccccaataagctatggaacagtaaatttttagtttataaaagaactttacatagatttgtat

SEQ ID NO: 19378 - DNA, 201 bp, Homo sapiens
aagttgaacgggctccatgcacagtagttcaggatcactgcactgctcctctgtgatgctcttggccccatgcttgtccatgttcaggcttcagaccagckggcttcactcatgatcacaagataggggttactgagccacatatcacttacgccatgataagatataattgaagaaggggtgatttctatgaacaagaaa

SEQ ID NO: 19379 - DNA, 201 bp, Homo sapiens
agatttatgttcaaaagaggttcaaatattctgaaaattacatacgtagttttggaatggcccaatgatagggcaaaaggggtggtgatcaattatacttyctttatttacatttccatgaaataataaaatatgccaggctttcctaagataccaaaggaaggctgggaaaagcaaattgcatcctggctaccaagtcag

SEQ ID NO: 19380 - DNA, 201 bp, Homo sapiens
cagctgacaaaaactgctagcacagcaagccttagtcccttacaccctggcagttggaccagaagatttagtgtttcagtgaatgccagcttaaaattcatttttgtaatagattcttgagtctgggttcattgaagcgtgaactcccaaggttttatcctggcaacaaaagatacgtggaaaatgaaatagtcataaata

SEQ ID NO: 19381 - DNA, 201 bp, Homo sapiens
caatgatagggcaaaaggggtggtgatcaattatacttcctttatttacatttccatgaaataataaaatatgccaggctttcctaagataccaaaggaargctgggaaaagcaaattgcatcctggctaccaagtcagaagtcagcctaaaccaagaagtagatcagcgatgcttaaataatcagaaatgcaactgtaat

SEQ ID NO: 19382 - DNA, 201 bp, Homo sapiens
tttaattccagtactcagaaatgtaactcattaccttttagaacttgaaagaatcaatattgacagtaactaaagtagtaaacattaatttttatgtgtayatttccatcagggatctcattccctccgttagacagttttcagcttctggaaaggatttaatgtcttaaaatgttcttatcaaagaaatcatgctatttg

SEQ ID NO: 19383 - DNA, 201 bp, Homo sapiens
gagcggtgtgaactaggtaggagccttattgggagcttctgggcttctccttggaaacttctcctgccactaggacacctctttcactacgcagttccttmgtgaagaaggtcagagatcatttacttttgctaaaatgttatctttcctggctaatgttttttacctcttaaaatgtgtatttgttttatcctggtacat

SEQ ID NO: 19384 - DNA, 201 bp, Homo sapiens
tctgtaatcccagctactcgggaggctgaggcaggaaatcgcctgaacccgggaggcagaggttgcagtgagctgagactgtgctactgcactccagcctrggcaacagagagagactctgtctcaaaaaaaaaaagaagactattcaaaaaaataaaaacacaaagaaaggaaggaattacatatagggacaatcattat

SEQ ID NO: 19385 - DNA, 201 bp, Homo sapiens
ccgatcatttactgtttatgaatgggatctgacagggctgcttaaaaggcacttgaagcaattctctgaacaggaagaattatcattaaaattatcttacyttttctaaagtgaacaatacaaaaaaggagtaatagacatgaagcagtcatctcatgagaggaccttttcttcctgagggtttcttgtgagaattaagac

SEQ ID NO: 19386 - DNA, 201 bp, Homo sapiens
agggctctcatttaatgttaaggcgtctgcatttataagaagaactgtgttttgtttcttctaagatttgacgggtttatgatagtactaagaagaaaaagaggtctaaggagtaaaaattgcagggtaaaaaactatagggcagataacaacattctgaacatacttttatatatgggcattaatgagatatgtctgatt

SEQ ID NO: 19387 - DNA, 201 bp, Homo sapiens
tgagcggtgtgaactaggtaggagccttattgggagcttctgggcttctccttggaaacttctcctgccactaggacacctctttcactacgcagttcctkagtgaagaaggtcagagatcatttacttttgctaaaatgttatctttcctggctaatgttttttacctcttaaaatgtgtatttgttttatcctggtaca

SEQ ID NO: 19388 - DNA, 201 bp, Homo sapiens
gcctgaaggggacctgttggctcaacatccaggacagccgctgtgaggtgaatattaatggagccactctgaaatctgaatgctgtgccaccctcggagcygcctgggggagcccctgtgagcggtgtgaactaggtaggagccttattgggagcttctgggcttctccttggaaacttctcctgccactaggacacctct

SEQ ID NO: 19389 - DNA, 201 bp, Homo sapiens
ccaatgttctgtcccaagagtataaatcccctataagatggcattgaagtaaagagataaaacagattgcttatctttctcttctactctttgttcctctrcaaccggagatgtcgccctgatagctacatctgtagcaaaaagttacctattcccacttatctttataaaacaagtagtgagaaataaaggaatcagaac

SEQ ID NO: 19390 - DNA, 201 bp, Homo sapiens
tgctcttccccctaccctgtactttatcctactagggacttccctgtatgcattaggagtataattttgaacaggattgaagcctccaattgaattttgaygtctctctctcccaaagtgaaaaagttatgcgaattctttcattaaactggctatttcaattacctgtgatatttcttcagacagaggcaggttaagctc

SEQ ID NO: 19391 - DNA, 201 bp, Homo sapiens
tttgttatatttatgcaagaacatttcatatagtttaatcccatggattatattagaattaaaaacacaaatgactaaaactaaaaattgtacagtttttmttgttttcttcatattacacattgacaggaaaatatcagaatcaaacaaattttgttacacagtaacagacttcttggtggtaccaattcgtttttaaaa

SEQ ID NO: 19392 - DNA, 201 bp, Homo sapiens
tctgccatggccacacaatttggctgtgaccacatgagtgattatcaagaatcagtcattctcctacaaaatatatcatatctattactgcaaaaacaaayttgtgttaaatatgtaaaccaataaaaatgtatgtgaaaattgtttctctgaaaaatacctcagtaagctttcaataaagactttaaagtcactataaaa

SEQ ID NO: 19393 - DNA, 201 bp, Homo sapiens
ttaggtacctgcaggaccaatcttgggatacagctgcccagggaatgggggaagaggtcctcttagaatagtgggcatctgagggctttctgccagcgacrctaccaatagctgacggggagggggagtaagtccttctttcctgaagagggacctgggtgacatgtcacagtatctactgtatcacagactcctccagga

SEQ ID NO: 19394 - DNA, 201 bp, Homo sapiens
taaaacaaaaatgtagaaaaattctgcattcagattccttcacaactctaagttcttgtcacttcttaaagaaatcaaatctggaacttatattctaaggsgaaaaagtcttgatatctttaggggatactaaagataacctttgtctttcttgctttgctctgatagcctttgagaatcaaatggcattctataaagtgc

SEQ ID NO: 19395 - DNA, 201 bp, Homo sapiens
cctggtgctggataaagaagctcagggttcttccagttctgaccccacctcttcctttgttgtgaaattagccaaagttgcttaatgtctctaacacattsacagggctgcattgctctggatatactgtgaagttctgtggaaaattgttggctctcatcttcacagcaggaagggccggtctcctcccatgctgggggc

SEQ ID NO: 19396 - DNA, 201 bp, Homo sapiens
tgtaattttgatttttccgtatctcttactcattttcctcaagtagatatgagtttctagtactgaatgaggaaaatctaagtaattccataagttaaacrtataaaacggttaatagcccatttttttctagttaaaaattgaattttttgagcctatatttctttatagatgttgatgagtgcgagcggcatccatgtg

SEQ ID NO: 19397 - DNA, 201 bp, Homo sapiens
ctactagggggatgctctcttaggctatgtctgagtattgtctgagtacagtcagtacctgttaaactgtactattttcttagaattttacaattttgatycttgtaattttgatttttccgtatctcttactcattttcctcaagtagatatgagtttctagtactgaatgaggaaaatctaagtaattccataagttaa

SEQ ID NO: 19398 - DNA, 201 bp, Homo sapiens
ccttttcttccaactgacaaaaatgtacaatagcctctttcacagccactgctggtaaggagagtgcagaaagcgggagtgggaagccacagcctgtcctmgtgaccaaagcccctgcagctgatctctttctagtcctctgcttgtgctgtagaagcttgtcccaaatcatttcctgttcttcctccaggttgaacagat

SEQ ID NO: 19399 - DNA, 201 bp, Homo sapiens
ttttatagtaagcctcatcagaatgaaattaatggactgagcaaatttttaaaatgtagattattctcagtaaaatgaggttttatttccaaggcatatcaaaaaaaaaaaaaataatagcaagcaccgcttggacctgtttagtgaactgaacattgtttatgttcagttgtacattgtttatgagtatgactaaagact

SEQ ID NO: 19400 - DNA, 201 bp, Homo sapiens
cagaaggaagcatttcagacagatttcccccggaatcctcgtcagtggtcaacactgttagtcaatgcatcagacagtttaaacaggcaaaactgtaaacstacgatgttactaaacctgctaccaattgaagaagaatgaaagttctttgaaagtgttaatattgaaaaaagctttcagttcaaactaacactttaggaa

SEQ ID NO: 19401 - DNA, 201 bp, Homo sapiens; identical to SEQ ID NO: 3291

SEQ ID NO: 19402 - DNA, 201 bp, Homo sapiens; identical to SEQ ID NO: 3293

SEQ ID NO: 19403 - DNA, 201 bp, Homo sapiens
aactccttttaaggaagcagacctgacaatgtggttgcaatgctgttttcacagatattgatgaatgtatgataatgaacggaggctgtgacacccagtgsacaaattcagagggaagctacgaatgcagctgcagtgagggttatgccctgatgccagatgggagatcgtgtgcaggtatagaaaggaaaacacacaggt

SEQ ID NO: 19404 - DNA, 201 bp, Homo sapiens
tggttgcaatgctgttttcacagatattgatgaatgtatgataatgaacggaggctgtgacacccagtgcacaaattcagagggaagctacgaatgcagcygcagtgagggttatgccctgatgccagatgggagatcgtgtgcaggtatagaaaggaaaacacacaggttttgtacatctaactaattttttcttgaaaa

SEQ ID NO: 19405 - DNA, 201 bp, Homo sapiens
gcattctataaagtgctgttccatctccttctataaacctcatgtagagggtagatttaggctaatattcatttgcacacaccctcctataaaataggatwactttttttttgactgctgttgatttaacttatttttctgagtttctccttttcttgaataattcttgatatttagatttagtatatgctttctatattt

SEQ ID NO: 19406 - DNA, 201 bp, Homo sapiens
ctcttcagtatgatgctaatttagccctagttgaggtctttttttctttcttagaccatgtagcagtcatccttccagtatcacacagccttcagagtttrttttttcctacattcttctcagttaaagaatttttgaaagtgctaacataaaatattttcatggatttcctgttagtatataataaagcccacatttctt

SEQ ID NO: 19407 - DNA, 201 bp, Homo sapiens
gccaaaagatctgaatagacattccacaaaagaagacacacaaatggcaaagaattatatgaaaagatgctcaacatcactgatattagagaaatataaawcaaaactaaaatgagatatcattttaccccagttaaaatggcttgtatccaaaagatgggcaataacaaatgctggagaggatgtagagaaaagggaacc

SEQ ID NO: 19408 - DNA, 201 bp, Homo sapiens
aagacgtccaccgaaacaggtaaagttaaaaacactaaatgttgatcaatatattatgcaactggaattcacacattatttgtgggagtgaaaaatcatayaaccactttgggaaaagatttggaaatttcttatagaaacacacctaaacctatgatccaacaattccacgcttgggtatttacagtagagtaataaaaa

SEQ ID NO: 19409 - DNA, 201 bp, Homo sapiens
tctttaaagctagcatttctgtacaaccttcaagaaccaattcaaaagccacaccctccaaattacccattcttagcagagaagtttgcatatatatatakagagagagagagagagggagagagagagaaagagagagcactttctatgagacaggcactgttctcagcacttaacaaatagtcatttaactctatgagg

SEQ ID NO: 19410 - DNA, 201 bp, Homo sapiens
accgaaacaggtaaagttaaaaacactaaatgttgatcaatatattatgcaactggaattcacacattatttgtgggagtgaaaaatcatacaaccacttygggaaaagatttggaaatttcttatagaaacacacctaaacctatgatccaacaattccacgcttgggtatttacagtagagtaataaaaatgtatgttt

SEQ ID NO: 19411 - DNA, 201 bp, Homo sapiens
tagatagaaagaaaattaatatacatattgttagctacttaattgaatcaataaattctgttaatatgtttgtttaaaagaaagtatttacatttttttcrcatggccagtaatgagggaaataaataaagactcctgtaattggagaaataaatacagaaaaactaagtaaaagctggcagaaagcagagactgagaccc

SEQ ID NO: 19412 - DNA, 201 bp, Homo sapiens
tcagaaatctatgagagtaaactttgaaatgatctttatatctgtaagaaacatttataacacttgtgtcaagacgtatctacaaaaatatttattagaarcacatctaaaaattctaagtacctaagattattaaacagtgcacaaaatagggacagtgtaatacctttatattctattgcatgagtctcatttaatgct

SEQ ID NO: 19413 - DNA, 201 bp, Homo sapiens
tccaactcccttccctttatccttcatgggcatttccctcaacaatttcttacacatctaatcctgtccttttatcttcttctcaagttacccaggctaasaaaattattcagtgataaaaaagaaatgaggaacacgatgaatgaataaaaaaatcattatgcagattgaaaaaatagagactcaaagaaataaatgtga

SEQ ID NO: 19414 - DNA, 201 bp, Homo sapiens
ataaagagatcgtagtggggcatttttccccactgacagatttttagattaaaaacttttgatttttggactaaaacatttgtaaataggtcatgttttcktaaacatattttatatagacatgacttctctattaaaaatcttagttataagcataggagatttctcagagaaccctgtgtttgagaatatagttgctga

SEQ ID NO: 19415 - DNA, 201 bp, Homo sapiens
catctaaaaattctaagtacctaagattattaaacagtgcacaaaatagggacagtgtaatacctttatattctattgcatgagtctcatttaatgctaayagcctgcattcaattcagtagttcaattagtctgacatttaaaatgatcatatgtagaggtaataagtgaaatgaaaccgttataaactcaaaatcaaga

SEQ ID NO: 19416 - DNA, 201 bp, Homo sapiens
aaaataactccgtgaggaagtatattacttcttggaaggatcctgctatccatttaagtggtttcttgcagctttcatatccaagaaagttttatccatatgtaattaggaggatcaaagccacagtgaggtttatgtagacttttctgcctctctcatctttagtcttgcgatatcactgtcatgacataatgaaataac

SEQ ID NO: 19417 - DNA, 201 bp, Homo sapiens
tgactctctgtttgtctattattgatgggagttcactcatgatttgactctctgtttgtctattattggtgcataggaatgcttatgatttttgcacaccrattttgtatcctgagactgctgaaattgcttatcagcttcaggagattttgggctgagatgatgcggttttctaaatatacaatcatgtcatctgcaaac

SEQ ID NO: 19418 - DNA, 201 bp, Homo sapiens
ccctgtgtttgagaatatagttgctgaagattatttactgtaatatataaaaagaggaaacaaactcacccacacagtcctcaggtgttggtgacagctcrtgtcaccaaagggcttactaaatcaataagctctttacatctgaatatgacacaaaaacacaaattggggcacacaccatggccctgccctatgtgtgct

SEQ ID NO: 19419 - DNA, 201 bp, Homo sapiens
agtgttttggaaaaccagagagttcttcaaaatgttagtttattaatggccacaataatcacagctaaccggtgctgaggatttatttctttatttatttrtttgagaaggagtctcgctctgtcgcccaggctggcgacaatcttggctcactgcaatggcgcaatcttggctcactgcaacctctgcctcccgggttca

SEQ ID NO: 19420 - DNA, 201 bp, Homo sapiens
ccatcaatacctggtttactgagaatttttaacatgaacggatgttgacttttatagaaagtattttctgcatctattgagataatcatgtggtttttgtytttggttctgtttatgtgatggattacgtttattgatttgtgtatgttgaacaattgaaccagccttgcatcctggggacgaagctgacttgatggtggt

SEQ ID NO: 19421 - DNA, 201 bp, Homo sapiens
gatttgagtctctatgttttgttggtattgtgcttagttgtagcctagaaaaattactgaagtacttccaaacttccaaatattcatttccaaaagtacgraattgactttctcacctttttttttttaatcttcttagaacatgaagcaatgaaacaatttgcttattaatttatttattgtgaaattatgctatgaaca

SEQ ID NO: 19422 - DNA, 201 bp, Homo sapiens
cttttagcccactgtttaattttcagtatgatataagacctacctcataggatatagtaggttataagtctaagattctccttcaccctgattagcgttayagacaccaggataactgacaacaatatatcatgagtccgtggtgatataaagcaaatattatgtatttctaccccttgtgagcctgctgatttcatgcaa

SEQ ID NO: 19423 - DNA, 201 bp, Homo sapiens
ctttccctaactacagccagtttcagagcatttccagactttcttcttgtctttatatatccagtcatggcatgagcattaaagtacacagcccttgtgcygaaagagagaactcaattatggttatagagagaaatctctcagctcctaaatgaactgtctctaaacatgggagagacttcccattcgaaggtacttggc

SEQ ID NO: 19424 - DNA, 201 bp, Homo sapiens
ttgatggtggtggataagttttttgatgtgcttctggattcagtttgccagtattttattgaagattttcacaatttgttgttgttgttgttttagcaagttttttgttgttgttgttgttgtgtctctgccaggttttgatatcaggatgattctggcttcataaaatgagttagggaggagtcccttcttttcaattgt

SEQ ID NO: 19425 - DNA, 201 bp, Homo sapiens
agactttaaacccagtccttaagactgatgcatggggactcattctgctagtgtgtatgtttgaaaatatctattaaaaaaaaagtttgtttttaagtacygggaagttaacttaactagaggttacttcattttaaatatctgctaagtaattttaagtttctgaagatgatgtcaagaatcatcatctttgtttgcgaa

SEQ ID NO: 19426 - DNA, 201 bp, Homo sapiens
tgcgttacagaaaagttgtctgatgaagaaaatcctaattatacttttgaaagtaaatggcttgctgtccttttcaaaagtttttcaagcttttaaaagcmagttttaaagctagtacagactgtgtgtgttctttcttaattgtaacttgaaaaagaagtcctttccttttttagaaaattaattttctcgtctccttac

SEQ ID NO: 19427 - DNA, 201 bp, Homo sapiens
ttttaaacaggcagtgtgatttgtagattactatcccgacacacaaaacataacacagtgtaaacaattaaatacatgagggccctattgtcatgcctctstcttgtggaaccatcagtcttccatcagtatacttcaaatcatgtaggcaacacttcaccatctaatatagaccaggtgagcgtgccagtgtaagttcat

SEQ ID NO: 19428 - DNA, 201 bp, Homo sapiens
gagagaactcaattatggttatagagagaaatctctcagctcctaaatgaactgtctctaaacatgggagagacttcccattcgaaggtacttggctacamgtgtggagtatctgtggaatgtattgtgtcagtgagcctaacattctttgctgtgatgaccctcatacctttctgttcattggaggtcacagctgcagga

SEQ ID NO: 19429 - DNA, 201 bp, Homo sapiens
gatacctgttaccacacttatttgttcttcacaaattataaagttataaacaaaaggttagtagtatagagcagtggctgcaagtaaaccctgtaataacrttaaatttacccagtaactgcttggcttctgtcacccactgcacagatgttgatgaatgccagaccccaggaatctgcatgaatgggcactgcatcaaca

SEQ ID NO: 19430 - DNA, 201 bp, Homo sapiens
ttgggagcagttgcatcattgtagaaagctttactcaacagtattgttgtagatggaaatagagaatccagcattttctttcaatcccccaggagaacatyttacttcctcgtgaagtacacaaacccctttggagaccactgctctggtgaagcacctttctgatggctttagtgagtggacattgtgtaaagcattact

SEQ ID NO: 19431 - DNA, 201 bp, Homo sapiens
atgtcatgctggattccagaggactcctaccaagcaagcatgcattggtaaggcagtttgctttcacatatgaaaatgttccatgaaatatagtgaccaargctgttgaggttaaaagtaaatttattaaaacatggaataaaataagtgttacattattacagatttatttgtaataccctcagagattctcctttaaac

SEQ ID NO: 19432 - DNA, 201 bp, Homo sapiens
aaataagatttctcttgatctgtaatcgaatgtcctctttatggtgttgtgtctgaatctgggcagggaagaaggccccaggataatacacatacctgccrgggagcaacactgctgtgtctctctctcttctactggaaagtggctgacagttgtttctagggaagaacttgttttattaggatcatgaattttccaagt

SEQ ID NO: 19433 - DNA, 201 bp, Homo sapiens
tataatatatatgtatatagagaggatatatatattatatatatggagagaatatatatattatatatagagaatatatatattatatatacatagaatakgtgtgtgtgtgtgtgtgtatatacatatatatatatatatatatatatatatgagagagagagagagagagagagagagagagagagagagagagagaca

SEQ ID NO: 19434 - DNA, 201 bp, Homo sapiens
tgtctgaatctgggcagggaagaaggccccaggataatacacatacctgccagggagcaacactgctgtgtctctctctcttctactggaaagtggctgavagttgtttctagggaagaacttgttttattaggatcatgaattttccaagtcctcttggagcctacaaaaattaaaaataaaagttagttaggctactct

SEQ ID NO: 19435 - DNA, 201 bp, Homo sapiens
taaaggagacaaaagtaactacctctttttttatacttgacttgcaggtgactatgtatctttctcttacattaaacacaaaaacctgaatgactttccaratatattgttggaagttttcaaataacggcatttgtaacaatcatgtactgttaatgactcgccattttatcttactcatttgtaacacagtggttaaaa

SEQ ID NO: 19436 - DNA, 201 bp, Homo sapiens
tatttgaccaaatctgttccatttcagacattgatgaatgtaaagagattccaggcatttgtgcaaatggtgtgtgcattaaccagattggcagtttccgytgtgaatgccctacaggattcagttacaatgacctgctgttggtttgtgaaggtaatctgaataaagtatgtcctttatccagtataatttggtatacat

SEQ ID NO: 19437 - DNA, 201 bp, Homo sapiens
acagggaagagtaccaggcaaagattattgaacatttctaacaacatgcaaaccatgctagtttttattctccagaagtgaaatccagatttccccttttyacatggacaccggtcatgttgactcacaacctaccctaacaacctcattataacttgattacttctataaaaatcctatttccaaataaagtcacattct

SEQ ID NO: 19438 - DNA, 201 bp, Homo sapiens
cctttcatgttaacgtacaaaatttgaatttcatcctttgagtgacttttccctaaaatggagtccttactatgtaagcaagggcaactgtaagctccttygttgctctgcagacaaccgtgtgggcaactgctacctgaagtttggacctcgaggagatgggagtctgtcttgcaacaccgagatcggggtgggcgtcag

SEQ ID NO: 19439 - DNA, 201 bp, Homo sapiens
ctatggaattgatgcatttttatgtaaataatattaaattgttatctgtatgattgttaaatatctgacatgaaactagtaaagtgtctctttatatatawgttcatgtatatgtatatatagtacatgtatatatatatatacatgtatatatgtgatttttgttaagcaaatagtgacataattttttcgtcctcagag

SEQ ID NO: 19440 - DNA, 201 bp, Homo sapiens; identical to SEQ ID NO: 3268

SEQ ID NO: 19441 - DNA, 201 bp, Homo sapiens; identical to SEQ ID NO: 3269

SEQ ID NO: 19442 - DNA, 201 bp, Homo sapiens; identical to SEQ ID NO: 3270

SEQ ID NO: 19443 - DNA, 201 bp, Homo sapiens
cagagatgtgttcatgaaatattttataatgaagaaaaacaagatgcagaaaaacacatatactatggttttattctcgttaaataaacagaccatcatcytgaatatgtgtgtgaataaaagtctaaaaagacagaagcaaatttatattgatggttatttctttaattttctattttctgtatctttaacatttgttgc

SEQ ID NO: 19444 - DNA, 201 bp, Homo sapiens
gggatttaacaaggggcagtacctgtcactggatacagaggtcgatgaggaaaatgctctgtccccagaagcatgctacgagtgcaaaatcaacggctatyctaagaaagacagcaggcagaagagaagtattcatgaacctgatcccactgctgtgagtatatcccactctgtgttgccacaaaattttatccctacgga

SEQ ID NO: 19445 - DNA, 201 bp, Homo sapiens
tgatggtggtggataagttttttgatgtgcttctggattcagtttgccagtattttattgaagattttcacaatttgttgttgttgttgttttagcaagttttttgttgttgttgttgttgtgtctctgccaggttttgatatcaggatgattctggcttcataaaatgagttagggaggagtcccttcttttcaattgtt

SEQ ID NO: 19446 - DNA, 201 bp, Homo sapiens
gtggtggataagttttttgatgtgcttctggattcagtttgccagtattttattgaagattttcacaatttgttgttgttgttgttttagcaagttttttgttgttgttgttgttgtgtctctgccaggttttgatatcaggatgattctggcttcataaaatgagttagggaggagtcccttcttttcaattgtttgaaa

SEQ ID NO: 19447 - DNA, 201 bp, Homo sapiens
ttttctctgttcacatcatattatgtttctctgaacttaagatgctatcctcacaagttaaacatttggaaaaattacatatgatgaaggcttttctgagyattgggtcaaataacaattatggaaatagatcagagcaaactcaagagcactctgtacttggaaggaaaaaatgcattccaaaaattctgcattactggt

SEQ ID NO: 19448 - DNA, 201 bp, Homo sapiens
taaggttctaattccaggagccaggaatggttcacctccttacagaccactaccaccaccaccactgggccatcagtgccagcagggtcacttgattatcrctgttcttcatgcagcaaataactgggaaagagcttcccctgtgcatttcaaatggatttattgatagatgctacctgtgtcctcttagaatgtcctacg

SEQ ID NO: 19449 - DNA, 201 bp, Homo sapiens
ttagaataagtggcactgagaagaatgtatattctgttgatttggggcagagagttctgtaggcatctagtaggtccacttgatccagagctgagttcaagtactgaatatttttgttaatttcctgtctcatttatccgtctagtactgacagtggggtgttaaagtctcccactattattgtgtggaagtctaagtctc

SEQ ID NO: 19450 - DNA, 201 bp, Homo sapiens
ataatatatatgtatatagagaggatatatatattatatatatggagagaatatatatattatatatagagaatatatatattatatatacatagaatatgtgtgtgtgtgtgtgtgtatatacatatatatatatatatatatatatatatgagagagagagagagagagagagagagagagagagagagagagagacaa

SEQ ID NO: 19451 - DNA, 201 bp, Homo sapiens
gttgatttggggcagagagttctgtaggcatctagtaggtccacttgatccagagctgagttcaagtactgaatatttttgttaatttcctgtctcatttrtccgtctagtactgacagtggggtgttaaagtctcccactattattgtgtggaagtctaagtctctttataggcctctaataacttgttttatgaatctg

SEQ ID NO: 19452 - DNA, 201 bp, Homo sapiens
atatagagaggatatatatattatatatatggagagaatatatatattatatatagagaatatatatattatatatacatagaatatgtgtgtgtgtgtgwgtgtatatacatatatatatatatatatatatatatatgagagagagagagagagagagagagagagagagagagagagagagacaaggagacaaggtct

SEQ ID NO: 19453 - DNA, 201 bp, Homo sapiens
ctttggtggagagagtgtgttttgctggggggaaacccactcggccgggctgcccagattcctcagaactaccaggaggagaggctaagtctgctgatccygagactgcagccacccctccccctaggggctcaggcccagggagatccaaattctgtctctgagcctctggctggagttatcggagatcctgcaggaagg

SEQ ID NO: 19454 - DNA, 201 bp, Homo sapiens
gtactgttaatgactcgccattttatcttactcatttgtaacacagtggttaaaaaaacacaggctttgtctggatcagactacctggattcaaatcttgyctatgccattttttgcctgtaactgtaagtgaattacttaacttgtctgtcctgatttaaaatgcaatagtaataatacaattttcttttcttctttttt

SEQ ID NO: 19455 - DNA, 201 bp, Homo sapiens
tatagagaggatatatatattatatatatggagagaatatatatattatatatagagaatatatatattatatatacatagaatatgtgtgtgtgtgtgtrtgtatatacatatatatatatatatatatatatatatgagagagagagagagagagagagagagagagagagagagagagagacaaggagacaaggtctt

SEQ ID NO: 19456 - DNA, 201 bp, Homo sapiens
attttcaaatagtataatattattatgccatagtttaatagtatactattatatagtatactatataattatacagtatactattatatagtatactatataattatacagtatactatatagtatactataattatacagtatactatataattatacagtatactatatagtatactatgtaattatacgtatactata

SEQ ID NO: 19457 - DNA, 201 bp, Homo sapiens
gggcaagataaatagattttctctcaggttgataccctcctttaagtgaatgtgattaactgttgtttcatgttaatgagcattaagtcaagccagtaaawctgatctatttatagagcaaggagaaaatgtgtcatgaaatttggaacttaacagagatgtaatttgcttttttgcacagatgttgatgagtgtgcagaa

SEQ ID NO: 19458 - DNA, 201 bp, Homo sapiens
tagagaggatatatatattatatatatggagagaatatatatattatatatagagaatatatatattatatatacatagaatatgtgtgtgtgtgtgtgtrtatatacatatatatatatatatatatatatatatgagagagagagagagagagagagagagagagagagagagagagagacaaggagacaaggtcttgt

SEQ ID NO: 19459 - DNA, 201 bp, Homo sapiens
cttattgtggttgttacagtaatttccaagtttgtcttgtagttaaggtgattatggtaattataactttctatttataagtgctataaagttttctttaraataattttatgtaaaataggagtatccatttaaagaaagatattctgttaaggtcaggggtaggtcaactttttttgtaaaggccagagagtatatatt

SEQ ID NO: 19460 - DNA, 201 bp, Homo sapiens
actcagaaaaaggggatgaacagttggccgtagggaagatgaagttggaaactgaaagcgttcgtgcttctacgttgacccacaagattgggcagaatctratccattttatataaggcaactgtagggtgagttcctttttttcccaatcctggtttcttctaagcactgaagcttagtagtagaattagtagaaaatgt

SEQ ID NO: 19461 - DNA, 201 bp, Homo sapiens
gatatatatattatatatatggagagaatatatatattatatatagagaatatatatattatatatacatagaatatgtgtgtgtgtgtgtgtgtatatayatatatatatatatatatatatatatatgagagagagagagagagagagagagagagagagagagagagagagacaaggagacaaggtcttgttctgttg

SEQ ID NO: 19462 - DNA, 201 bp, Homo sapiens
ggctgtttcttgctgagaaaacgaattcagcgatatttctcctatttgcttttgaaagaagagaaatatggctctgttccacccagctctcaggcagccasacctaatggttatctcccttattccctgaacatcgctgttatcctgttcttttttcaaggtgcctagatttcatatcgtttaaacaatttgtgccgttaa

SEQ ID NO: 19463 - DNA, 201 bp, Homo sapiens
tgtaagcatcatgctaacctttgtttaaatggacgctgtataccaactgtctcaagctaccgatgtgaatgcaacatgggttataagcaggatgcaaatgsagattgtataggtaagtttgtgattctttaataatccttcttagtttttttagtagctattagattacaggatcaaattggaatgaatatgattttttta

SEQ ID NO: 19464 - DNA, 201 bp, Homo sapiens
cctgtcggagggtgaggggctaggggagggatagcattaggagaaatacctaatgtagatgacaggttgatggatgcagcaaaccaccatggcacacatayacctatgtaacaaacctgcacattctgtacatgtatcccagaacttaagtataatttttaaaaaatgcaattcatgagctaaacagaaatattcaatatc

SEQ ID NO: 19465 - DNA, 201 bp, Homo sapiens
tatatatattatatatagagaatatatatattatatatacatagaatatgtgtgtgtgtgtgtgtgtatatacatatatatatatatatatatatatatatgagagagagagagagagagagagagagagagagagagagagagagacaaggagacaaggtcttgttctgttgcccaggctagaatgcagtggcatgaaca

SEQ ID NO: 19466 - DNA, 201 bp, Homo sapiens
cctaatggttatctcccttattccctgaacatcgctgttatcctgttcttttttcaaggtgcctagatttcatatcgtttaaacaatttgtgccgttaacrcaatcatcacagggtcctgaggcgacctacatcctcagcttacgaagatgacaggattaagagattaaagtaaagacagacataggaaatcacaagaata

SEQ ID NO: 19467 - DNA, 201 bp, Homo sapiens
tgttcttttttcaaggtgcctagatttcatatcgtttaaacaatttgtgccgttaacgcaatcatcacagggtcctgaggcgacctacatcctcagcttaygaagatgacaggattaagagattaaagtaaagacagacataggaaatcacaagaatattgattggggaagtgataaatgtccatgaaatcttcacaattt

SEQ ID NO: 19468 - DNA, 201 bp, Homo sapiens
gatatacatctaattaatttactattaaatgtcctttaaaaatcaattcagaaaagtaatgcatgttgtaatgattaaatataattgtgctttaattttcygtagcaattctgaaccagacaatagatatctgtaagcatcatgctaacctttgtttaaatggacgctgtataccaactgtctcaagctaccgatgtgaat

SEQ ID NO: 19469 - DNA, 201 bp, Homo sapiens
ccaaggcacagagaagtgcagtaatttgttcaaggtctcagagcttgaaagtggcagagctaaggcagtggcccaggttgccacctggctccttgtccagygtttggccaggataacccagagtggtggtatagctgttagaatatctatttctcctgcctactggaagggtcatatagcaaagtaaatgaagtgatgaga

SEQ ID NO: 19470 - DNA, 201 bp, Homo sapiens
aaatctcaaacctcttaaaatacactttttcttaccacttttgtctttaatatgacagtgaattttggtataaattttcccaaaatgccattttcacatcrtgaaacttaggttttcatacattgctttttacttcccatgaaacgtaagacatgttatgattggaaagtttgacgctctgcttcttgatgctttgccaga

SEQ ID NO: 19471 - DNA, 201 bp, Homo sapiens
acatgagccttgaggagcattctgttctgctggtagaagtgtagaccagggcagcactgcagataatatgtttgcacaatggtacaccgattaactgtcartgtataatcaattttagtttatgagtttctttttgaagcaattcgatttgtatggattgacactttattgcgttcactcattcttagtgccaaaaaaaca

SEQ ID NO: 19472 - DNA, 201 bp, Homo sapiens
cggaaccaaagaagtggacatcccccagagattctggatttggagtctggctcacttcagattttcttacttgggggagggaaagagtgtattgtaagttrtacgaaggatcattatattatgttagataaggacttttttaatgtaaatatgtgtagaaggacaaatatagtcagccaaaagggtaaactgtagtgaata

SEQ ID NO: 19473 - DNA, 201 bp, Homo sapiens
tctcagcaaaaaagtagtatttaaacccatagactcaatggagtgatctggatgataactgtagagataaagaaaagccttagattagttgatcccttaartatcttctctaagtttgttgcaggctatcttttccaaaacctgcaaagttagctatgcaagttgaaactaaaccattggataaactcgtgatatagatta

SEQ ID NO: 19474 - DNA, 201 bp, Homo sapiens
attcttactctgtatttcaaatggtgtcaattttacttaattttaccactattttcttagtgactggctagttgattttaagtggcccacggacaaatagkttttattttaatattaataagctataagaaaaaaatttaagaaaaaatacaaccagtgcatcaaaactatgtgtttatgaatgttattcctgaaaatatt

SEQ ID NO: 19475 - DNA, 201 bp, Homo sapiens
accattggataaactcgtgatatagattaattatacaaaaaatgtattgtattcctattattggaggtccagtatgtcccaaatgagaaatttcttactaycttgtccattccatgagtataggaaaatatggtctatgtggatttctaaatataggaaagtctgccatgattggcttcctctgactcaatctcgaaaaag

SEQ ID NO: 19476 - DNA, 201 bp, Homo sapiens
aagtgcccccttttaaatgaaaagatgaaagctcttgacttaataaggcaaaaaagtcatatgctaaagttactaagctctacagtaagaatagatttttktatctgtgtaattgcgaagagggaagaagaaatttgtgctggttttgctgttgtacctcaaactgcaaaagttatggcgacagtacatgttaagcactta

SEQ ID NO: 19477 - DNA, 201 bp, Homo sapiens
ggtatctaaagatttgttgccattttattcctgagctgggagtgaggagtgtttagtgaggacaaaacaaaaaaactgaatttgaactactttcagtgatyactctgaaaccagccaagaatgttaaaggatttgaattcctctcttcctatgttttatcatgatatgttaaaaaaataatttttaactgtaatcatgtat

SEQ ID NO: 19478 - DNA, 201 bp, Homo sapiens
aaattataattaaaggagacaaaagtaactacctctttttttatacttgacttgcaggtgactatgtatctttctcttacattaaacacaaaaacctgaaygactttccaaatatattgttggaagttttcaaataacggcatttgtaacaatcatgtactgttaatgactcgccattttatcttactcatttgtaacaca

SEQ ID NO: 19479 - DNA, 201 bp, Homo sapiens
catacggttgcatctttactttaaaatgttacctatacaaaaatatacttggaagtagaattaattagtttgtattttgattttcttcttatgaattatgktttatcagatgtggatgagtgtgaaattggtgctcataactgcgacatgcatgcctcatgtctgaatatcccaggaagcttcaagtgtagctgcagagaa

SEQ ID NO: 19480 - DNA, 201 bp, Homo sapiens
atgagtgtgaaattggtgctcataactgcgacatgcatgcctcatgtctgaatatcccaggaagcttcaagtgtagctgcagagaaggctggattggaaayggcatcaagtgtattggtgagtttgcaaatgtaaatatcctttgctaaggcacaaatttttaaaggctcttttttgcatggttgtagaatcatgctcttc

SEQ ID NO: 19481 - DNA, 201 bp, Homo sapiens
caaatatctgcatgtttggggaatgtgagaacacaaagggatccttcatttgccactgtcagctgggttactcagtgaagaaggggaccacaggatgtacmggtaggtttcaagcttgtgttctctgtatttcaacttctcagatgtcaaaggccaactttcaacatcatttgttctctggcatctcttagagcggttacc

SEQ ID NO: 19482 - DNA, 201 bp, Homo sapiens
gtagaaataatttctctcaactgcttggctgaataaaaaagaagaagaaaaaatcttgaaaggtttttgttttttatgcattctcagaactagattttccrctgtcattcattatgggtttagcattacatcttttccataaagctaatatacagaccatttgtaactgtgtcattatctaaaaaccttacattgatttag

SEQ ID NO: 19483 - DNA, 201 bp, Homo sapiens
ttttaacaggagctaagcacaaaatttgattattttcctttatatccatatactgaaggtcctttccactctccgcactattttttctcattcagttggcrttctttttttaaaaaaaactaaaagccatgagcacatggctcatttaggtagtggaatttgactgggggttgtttatggaagaagaaggaattggttccc

SEQ ID NO: 19484 - DNA, 201 bp, Homo sapiens
tgttcacctgtgatccactgccctcagagggcaaggctttaaacagtatgaagggggtgggaaattcaagaactaccagctacttctgaaagtctcaggtrtgttaaaagaaaggaataccttaatcaggttcctaagttctcagtgaaaggtaaaaatgcaacttaaggaatgcctatcactttgctaaaataatctctc

SEQ ID NO: 19485 - DNA, 201 bp, Homo sapiens
tcattggttttcaggttgttcagcactattcttctgcggatgggagtgacagcttccaagctttttatatgtcccagctgcaatgccaatgctgtgactckgtgtgctttttaaagtcaagtcaactacttaaaggctaactcacttgtgattccatcagatcaggaggattattttactttttctggggatacagtgacg

SEQ ID NO: 19486 - DNA, 201 bp, Homo sapiens; identical to SEQ ID NO: 3295

SEQ ID NO: 19487 - DNA, 201 bp, Homo sapiens
tctgtagggctgccagaaaggatatgagaagactaatgactggtctttgggcgttgcaacctattgcttttcacaatacatgaagatctctggacttactrtgttcctagtatactggctttaaaactttgttttagccagaaagcatgttcttcataggaactctttcttaaaaccgtaagcaaataagacagcctaaaa

SEQ ID NO: 19488 - DNA, 201 bp, Homo sapiens
ggaaagtcaagagcaaagatatgttgcttctgcttgaaatcattcactgatcctggtccttcctttattgctattagagtttaagttttcttaatagtttmttttttaaagatctgtagtgatgaatctctttctttcaacagcatattataggaatagtgatttgacctttttctttattagtgtcatgtttgaacttga

SEQ ID NO: 19489 - DNA, 201 bp, Homo sapiens
tctcctggtgctaatgtataaaagacaggcatggtataaggttctaattccaggagccaggaatggttcacctccttacagaccactaccaccaccaccamtgggccatcagtgccagcagggtcacttgattatcactgttcttcatgcagcaaataactgggaaagagcttcccctgtgcatttcaaatggatttattg

SEQ ID NO: 19490 - DNA, 201 bp, Homo sapiens
ctgcaagaaatagagcatatgttgttttatttcattctcccaccaaccatgttctgtacagaagaagagttaaatacggttgaaaatcgaacaattaatamtatttgaatgtaaaactaggtctcttgactcaaggctatggttttgttttttgttgtttcgttttcaaattctatattacaacctccttcttgtagaagc

SEQ ID NO: 19491 - DNA, 201 bp, Homo sapiens
aaggaaaggaaggaaggaaggaaggagaaaaagagaaagaaaagaaagaaaaagagagagaaagaaggagagaaaaggcatgcagaagtctgctaacatayggaaaagatgcatttaggtccagtctgtcaccagatcattcatgtgagcatattctcatggtgctaccggtattgttccttttatcctatcctgtataca

SEQ ID NO: 19492 - DNA, 201 bp, Homo sapiens
ctgtctaggatgccatgagccattctaacctgaaagtgtgaagttatttttcatttaaacttaggatattttttccaattacatctttattacttctgtayttgttttttaaatcttagtttggaattcatattacttacattccagtttctaggctctatgttgtgacctgtttattctcactgacttccagacaactaa

SEQ ID NO: 19493 - DNA, 201 bp, Homo sapiens
gttagacttcccacctctctctgcttactgaactagaagagaagtacattaaaagtttatataaatgactgggttttctgctttaaggaaaattttaaagmaagcagacttttcattaatgggaaaggaaatagactatttccagcattgagtatgctgaatggataaatgtagggaggtacaataggaaaactggacact

SEQ ID NO: 19494 - DNA, 201 bp, Homo sapiens
ctgataaaggcctacacaggaatataagaccacgtgctttttatcaccacttataagacgtgagattttaggttctatgtgacctttggtataaagaagarcaatgcaaaaaaacaaaggaactttgggactgtaattgcgtacaaatagtttcaatactattatccatttaagcaatagtttggcaactgctaagaaagt

SEQ ID NO: 19495 - DNA, 201 bp, Homo sapiens
ggagaatggcgtgaacccaggaggcggagcttgcagtgagccgagatcgcgccactgcagtccgcagtccggcctgggcgacagagcgagactccgtctcaaaaaaaaaaaaaaaaaaaaaaaaaaaaagaacaagtgatatttgcttatataaaactatttaatgtaatcagtagtataatatatctggaaaaactataa

SEQ ID NO: 19496 - DNA, 201 bp, Homo sapiens
tgctaaactctaccataagatacacgatagattgaaacttacggacaattcatggttgatatatagtcactggcaaaagggtggcagctgacaaaaactgmtagcacagcaagccttagtcccttacaccctggcagttggaccagaagatttagtgtttcagtgaatgccagcttaaaattcatttttgtaatagattct

SEQ ID NO: 19497 - DNA, 201 bp, Homo sapiens
ttgaggcattaggatcacctaagcccaggaggcggaggttgcagttacctgggatcatgccactgcactccagcctgtagtagtcatgttatgaagaaaaragatgttgttaagtcattttgaaacaaaaagctagtaaaatcctggtcaccaactgcaaacaaactacatggcctactgaaattaagactttcaaaacag

SEQ ID NO: 19498 - DNA, 201 bp, Homo sapiens
taatgtatttagagtagtgatataatattactatatacgtacatatatgtgtgtatatacatatgtatatgcatacacacgtgtcactatttcctctaccytgcattgctgataaaggcctacacaggaatataagaccacgtgctttttatcaccacttataagacgtgagattttaggttctatgtgacctttggtata

SEQ ID NO: 19499 - DNA, 201 bp, Homo sapiens
ggaccatgacaataacctgcatctacccatggtggttatgaggcccccatataaccatcactttgtataggaatctcacattttcttgttaatttttagawaattttattaaatctagagatactccattcatcatcataatcattattgcagttgttaaacgttacaaaagagttttaatgctgtgtggaatttaacttt

SEQ ID NO: 19500 - DNA, 201 bp, Homo sapiens
cttgagtttcctcatctctaaagtgggcataaggatagtacttatttcatagtgtcatgatgattaaaaaagtaaaaatatgtaatgtatttagagtagtratataatattactatatacgtacatatatgtgtgtatatacatatgtatatgcatacacacgtgtcactatttcctctaccctgcattgctgataaaggc

SEQ ID NO: 19501 - DNA, 201 bp, Homo sapiens
atctacccatggtggttatgaggcccccatataaccatcactttgtataggaatctcacattttcttgttaatttttagataattttattaaatctagagwtactccattcatcatcataatcattattgcagttgttaaacgttacaaaagagttttaatgctgtgtggaatttaactttttcacttcatattataatga

SEQ ID NO: 19502 - DNA, 201 bp, Homo sapiens
gttacatttcatcaaagcagcatacagagccaagccagacatgggagaaagacagtacaagtctttattcaccacttgcctatgttctttaggaaagaggracattgatagcacgtaggcaccacccaaagccctgaatccagtcgtgcctttctttgcttcctgcccaggcagccaaatccatttaaccattgcccagaa

SEQ ID NO: 19503 - DNA, 201 bp, Homo sapiens
agctaaccttttagggttcctactcaactgtaaggagaattgtgaaacacataggttttttttgcacaataaaattgttaacagaaaaaccacaaatttartgtcactccacatgtccttctatgtcccagatttattttatccaaaaaaagaaaatgtcaaacatcttttaattttctgttctttttattgtcaggaaga

SEQ ID NO: 19504 - DNA, 201 bp, Homo sapiens
taaatctagagatactccattcatcatcataatcattattgcagttgttaaacgttacaaaagagttttaatgctgtgtggaatttaactttttcacttcrtattataatgatatgattgatctatgtaattgcatgctgctctaattcattctttagagtgggatacaatattccattatgtagctataccatagcgtgt

SEQ ID NO: 19505 - DNA, 201 bp, Homo sapiens
cctgtggctagatgtcagggcctccagcatgactgatttcttcactgtcatgctaacagcctgctttgagaagtaagatgtctgttgggagcctcatgtcrtgtctttgaatgagaattgtttgtgttttacagatgaatcagagtttctatcttgcattaggtaaatcatttttcgtgaaatattaagtctgtataactg

SEQ ID NO: 19506 - DNA, 201 bp, Homo sapiens
aaaatgctcagtgctgtttaaaacaaaatggctgctgaggcctgagggaaaggcccatcctcacattctacaaaaggctcaattaagattggttcatagcttttttttttttcatatcaatgtagctaagttgtatgatgatagacaaattaatttatggctcgttgccataattcactgtatttttccaggagggttgat

SEQ ID NO: 19507 - DNA, 201 bp, Homo sapiens
ctttttatgtctcttccatgaggcgctggacacatcgttcagattaggaaatcatacaggagaaacgaagataccgcaaatatttccatacttttttttctttttttttttttttaagtggagccactgggtttaagaatcaaagccttttttgactttttcttatttgtgctaagcaaaaatgacatcacttagggttac

SEQ ID NO: 19508 - DNA, 201 bp, Homo sapiens
tcacattatgataatttaatattcgtgagagcatacataatgaaaatgttcttggatatttagtaataatgataaatgaatttggattttattagctatartggcatattcataaatgtgaatcatggtagtgccaataaactgttaagtgttacattgcagtgttcaatgaaaatatgcatttgtgaacccctctcaata

SEQ ID NO: 19509 - DNA, 201 bp, Homo sapiens
ctgtatttttccaggagggttgattaaatataaattgggaaaatggggtagtgtgaaaacctaaaatattaagtaagttattagtgaaaatattgataagwattacattttacataggaaaaattggtaagctaaaatgtgaccattaacttaatattgatcagtaatttttaaatgttggactatatggtatgaagaagt

SEQ ID NO: 19510 - DNA, 201 bp, Homo sapiens
gtgggtctcaaccttcgctttgtggagcaaagggaatctgtcaaaacactccaggcagtttcagctgtgaatgccaaagagggttctctcttgatgccacyggactgaactgtgaaggttagttgatttgctcaaaaattcttaatctaataacagtaaaccatatatatttttaacttccaagacaaattggtataatct

SEQ ID NO: 19511 - DNA, 201 bp, Homo sapiens
ttaacttaatattgatcagtaatttttaaatgttggactatatggtatgaagaagttcaaaggttatgcagctgccattcttgcttccatccccccacttkatcacatggtatttcaattcttttaggggcctgtctcaccactaaactgggggcttctggagacaaggtccacatcttactcatcattacagccataagt

SEQ ID NO: 19512 - DNA, 201 bp, Homo sapiens
taaactctgtatccagtgctaaaaattttaactttacctgttaatggaattataagcaattaacagtttcatcttcattattgatatgcagatcctgattrctgtggtacatctttcttcttgtgatcatagacaaaacaactttgaaagcatcttgatagggttgaataatatgttgttaatgaagctcacagttttttc

SEQ ID NO: 19513 - DNA, 201 bp, Homo sapiens
catttaaattttaatgctttatttttttaattaaataaatgattttgagagaaaaacaaatatgtattaacattgtctcccaagaaaattataagtgaaawcctttaaggataaaggagagatgttaatctaaaaatgatttatgtttaaggagttattttaagatagcttcaaatgactaaaaagggtttccgagttgtg

SEQ ID NO: 19514 - DNA, 201 bp, Homo sapiens
tagtcagtgtgccttcaatcactccaaaatatgctcaaatctcaaacctcttaaaatacactttttcttaccacttttgtctttaatatgacagtgaattktggtataaattttcccaaaatgccattttcacatcatgaaacttaggttttcatacattgctttttacttcccatgaaacgtaagacatgttatgattgg

SEQ ID NO: 19515 - DNA, 201 bp, Homo sapiens
atgttgttaatgaagctcacagttttttccattggttactataaaggcagtttcagttataacccataaagtttacagatgatattgataatttatccctrtgcaactttgcattttatgcagtcttttgcaatcatcataacctgtcttctagcctttatctgatcattttgatccattgtgtattctgctatcagattg

SEQ ID NO: 19516 - DNA, 201 bp, Homo sapiens
aaaattgctgtccatcaggctctcttttatgacctggagaatggcaacttttaataactatagatactaagagttgaaccagtaggccaaataagaaacartgattatgcatttgttaccaaatattacttagggtatatgtatttaaatgttccatttaatgtattgatgaaattaaggagagaaatgatgaaaagcaac

SEQ ID NO: 19517 - DNA, 201 bp, Homo sapiens
tgtgagcctggccgctgctggggcatcggaaccattcctgaagcctgtcctgtcagaggttctggtacgtggctggctgttagtctcctcagcacagacastgttaggaaaattagtagcagtactgtattttgctctctgggagaccaaggcaggtggattgcttgagtccagaagttcaaaaccagcctgggcaacatg

SEQ ID NO: 19518 - DNA, 201 bp, Homo sapiens
aggagcacacagaccctggactgaagtaggaggaagctgggaagccttcatggggctgccaagtgccaggacttgttcctgaccctgagaagtgaattaartagttgaggagtggcccactctttgcaggggtctctggaatcctacctgcagaagatcttacaacctccatggacatttgagacatgggagagctgcttg

SEQ ID NO: 19519 - DNA, 201 bp, Homo sapiens
gtacatattttgtgttttatcccttaaaaatagctttaggagcaaatatagccaaactctttaaaaattcccagtagctaatgtaatgggtagccaagtgrtaatagagcttagtgagtacttgctgagctgatgattaataggttttcaaagacagatgggctggatgccatgaagctgggactgagtataaccccttaa

SEQ ID NO: 19520 - DNA, 201 bp, Homo sapiens
ctcttctttgattatgtctctaagttgaatggtaagattttgagacatagctaatagtggcagaagtgtctcaactttttccaccagtgaactcagtttgrgcggccaactctggggctatggctctagggtaattttgagtgagtgactgatggcaaattctaataatgtgcttaattcaaattaggaggcattgttgaa

SEQ ID NO: 19521 - DNA, 201 bp, Homo sapiens
gttttatcccttaaaaatagctttaggagcaaatatagccaaactctttaaaaattcccagtagctaatgtaatgggtagccaagtgataatagagcttartgagtacttgctgagctgatgattaataggttttcaaagacagatgggctggatgccatgaagctgggactgagtataaccccttaagtctgatgtcagc

SEQ ID NO: 19522 - DNA, 201 bp, Homo sapiens
aggtcagtagggaaatagtgagttatctcaactgatagttcacagtatcagttacagatagaactccttgttctacttttcctcccttctcactgctgcastttactagtcttagaaaaaaaaatagaagagggaaataaggtggtcaccattttttttagtatttcaggtgtgtcctaggcagtgtgcttagtgcttaac

SEQ ID NO: 19523 - DNA, 201 bp, Homo sapiens
gttaaacatataaaacggttaatagcccatttttttctagttaaaaattgaattttttgagcctatatttctttatagatgttgatgagtgcgagcggcayccatgtggaaatggaacttgtaaaaacaccgttggatcctataactgtctgtgctacccagggtttgaactcactcataataatgattgcctgggtaagt

SEQ ID NO: 19524 - DNA, 201 bp, Homo sapiens
gaagggtcccataacattctcaaatccaattactactttgtaatagaaacttttaagaaaagatttcatctttgatgactgtggaatagcccttttttttwatctgttaaagtatttggtttttttttttgtgatgccacagccaagaaaactgcagtagtaatagtatgcaaaaagatgtaacattctctcttcatctta

SEQ ID NO: 19525 - DNA, 201 bp, Homo sapiens
aggcattctaagcacttatttctaaaagacaaggaggaaaatgaagctcttaaagatatgctgtaaaacagccacagagttcacaacaccttatatcatargtgttcatgactcctaaaagtctgtaagcccaagaagacaagaccatatctttttcttagttaatcatgatggaagtattgtgcagatttttaaactagc

SEQ ID NO: 19526 - DNA, 201 bp, Homo sapiens
tttcccattgtcctctaccttgaataatctccaacttaactttattcattttctcagataatggtaaaagttctgtgacaaagccaagaagatatttgagyagaataaacttgccatctaagtgtgcgttcatttggatgcatagaaatctgattcttacaagatcacacttttgaaagctctaatattaactcttatcct

SEQ ID NO: 19527 - DNA, 201 bp, Homo sapiens
aaattgcaaatatgtgccaaaagatatataatttcattgactggtttctagttaactgaaaccatagtattggcctaaattgtcacaagacaatatactcktgaatccttttgtcaatcagccaatcatttcaggaaaaaaaggtcattcagatcacagtaaacatatttggactgatttatggtttagggtatttgtatt

SEQ ID NO: 19528 - DNA, 201 bp, Homo sapiens
ttcccttgggtcgctttcttatttcctctgttgcattcaaacagtaagtgtttctgtctgaagcagttctcttcattctcttctttctgaattaatttccmaagactagacagggaattattagcagattcattgcaaatcttagctttttcttgtatatttgtcttgtgcactaattttgtttgtcaatcatgttttcag

SEQ ID NO: 19529 - DNA, 201 bp, Homo sapiens
agaactaaaacttaaatgaaaacttaatacttaatgtcttttttctttcaattatgtttgatatcagcaattccagtgtttttaatatcattgattttccwgtaataaataagctcatttatttgttctctgaatatgctcagcttagctccaggtaaagtatatgcaaattaggcaatcagattaaatcccacatatcct

SEQ ID NO: 19530 - DNA, 201 bp, Homo sapiens
ctctgctatgatggcttcatggcttccatggacatgaaaacatgcattggtgggtatcataagaaaggataaacatttatacacacacatgcacacacacscacatgcacacacaagcgtgataaaaggaaggctttttctgttgttattttaaaaattcaaatcattttactagaactgtaaaatctcaggaagaattac

SEQ ID NO: 19531 - DNA, 201 bp, Homo sapiens
gttaaacatagaaatgaaagactgttaccagccaccacaaaaacaaacttaagtacatagaccattgacactgtaaagcaactacacaattaaatctgtawaacaacctcctaaatgcaatggcaggatcaaatcagcacataccaatattatccttgaaaatgaacgggctaaatgccccactgaaaaggcacagggtgg

SEQ ID NO: 19532 - DNA, 201 bp, Homo sapiens
gtgcacaaattcagagggaagctacgaatgcagctgcagtgagggttatgccctgatgccagatgggagatcgtgtgcaggtatagaaaggaaaacacacrggttttgtacatctaactaattttttcttgaaaatatggctccagatattaccaagtggaaccagatagaaaacaaaaacatttgagattgatgaacgac

SEQ ID NO: 19533 - DNA, 201 bp, Homo sapiens
tattcagtcatgccaatcccatgttattgctcttatttgtgtactattacaaactcttttggtattcccaaccttttagcccactgtttaattttcagtaygatataagacctacctcataggatatagtaggttataagtctaagattctccttcaccctgattagcgttatagacaccaggataactgacaacaatata

SEQ ID NO: 19534 - DNA, 201 bp, Homo sapiens
tgaaaatatggctccagatattaccaagtggaaccagatagaaaacaaaaacatttgagattgatgaacgacatttttattttcatttgatgctaattttktatcatcagacattgatgaatgtgaaaacaatcctgatatctgtgatggcggccagtgtaccaacattcctggagagtatcgctgcctctgctatgatgg

SEQ ID NO: 19535 - DNA, 201 bp, Homo sapiens; identical to SEQ ID NO: 3391

SEQ ID NO: 19536 - DNA, 201 bp, Homo sapiens
ctaaccaggagtcccattcatttcactatcaacatcctgaacactaggaacaaaggaaggtctctagggaagggagaatggctctccagaattacaaaacyagtgttataattaagtaagcagcttaaaaatgttttgaataactatgttacatttggaataagtatgtgttttccatacatgagaaaaaattaatctaac

SEQ ID NO: 19537 - DNA, 201 bp, Homo sapiens
catttgcttcattttagggtttactgcattgtcacaggtacttctgcgttactcactggctagactgtgggctttgttaggccctgtcttatgcagcttcmtggaccctgggctttatgtaataggcatcttgcatagaagtttgtgctgagtaaatcttttctgaatgaacaggaaaaccagcaaatgaatgaatgagat

SEQ ID NO: 19538 - DNA, 201 bp, Homo sapiens
tataagtaaagctcccctgttatatccatactacaaatgaggaaactgacttagcctattcaagaccataggcgtgtagctggtgaagctagaattctggytgtgaatccagagctgtctgactgcagccctgtgcttttagtcagtatgctaagtgcatatgtctataatggcagagacacaaaatatgacaccttacct

SEQ ID NO: 19539 - DNA, 201 bp, Homo sapiens
acacacacccgccctcatgcccagctaatttttgtatttttgtaaaagccagtcattgtgctcattacttgagagttttatctcatgatattcacacatcyacatcatacactataagtaaagctcccctgttatatccatactacaaatgaggaaactgacttagcctattcaagaccataggcgtgtagctggtgaagc

SEQ ID NO: 19540 - DNA, 201 bp, Homo sapiens
acatctgtagtcttcatctgtagtctatacaatattggcttcctggttataaattataacaagtgaataatcacaaacacacatcctttttctttatgttrctgtgttgctttggatatagcatctaacctctgaggtcttctatttccttaggggtcaattgagtataataattacacctacttcactgtacagagttaa

SEQ ID NO: 19541 - DNA, 201 bp, Homo sapiens
ccaacagtcttggttttgtcttcagcagaaacaccaggggaagttctcatgacatctctcaccatcagtatggctaacatctgttaaaacagagttgataygaaattggatagtttttctttttaatacttgatctgggtatggctctgatctcaaattgttaaaacaataaaactacattttatatgatttatgtttttt

SEQ ID NO: 19542 - DNA, 201 bp, Homo sapiens
agagaataagctgtggaattttgaggaacaggttggctatttttatgattcaattatctttgttcgctttgcacttgctgtggcttccatgatttatgccmacagtcttggttttgtcttcagcagaaacaccaggggaagttctcatgacatctctcaccatcagtatggctaacatctgttaaaacagagttgatatga

SEQ ID NO: 19543 - DNA, 201 bp, Homo sapiens
ggactacaggcacatgccaccacgtccacatccagctaatttatgtattttttagtagagatggggtttcaccatgttgtccaggatggtctcgatctctygatcacagatctcttggtctgcccacctcagcctcccaaactgttgggattacaggcatgagccaccgcacctggccctgaaaattttaataagctctat

SEQ ID NO: 19544 - DNA, 201 bp, Homo sapiens
gttctaaaattaaattttaaaaaatcgtattaactggaggtaaatggatagaattcgaaataaaatatgtgtcccttggggacataaacctgtgtaatcayttatgcattactatatatacttgatattacaatgtgagcattagagttgatgttttcacttcccagtacataaaactttttcgattatagaggtgtaaac

SEQ ID NO: 19545 - DNA, 201 bp, Homo sapiens
caactaggcagcactacagtcccccgaagggctcataaacttcgagcttgccatgacatatagacctttctatcaaatattaactggactttttggcttcyattgggtggagagactcctacctcaaatatttactttactttactttggttagaaagaccttaaaaatgctatcccatcatattcttctgggagcttaaa

SEQ ID NO: 19546 - DNA, 201 bp, Homo sapiens
taataagctctattttcatttttatttagtttaaaatattctttaatttctcttgagacttcttttttggcatgtttgttatttagaagtttattatttartctccagatagttagggatttttccagctctattctgtcttttgttcctaatttaattctattgtgatctgagagcatactttgtatgatttctattctc

SEQ ID NO: 19547 - DNA, 201 bp, Homo sapiens
agattcattgcaaatcttagctttttcttgtatatttgtcttgtgcactaattttgtttgtcaatcatgttttcagagtattttaaatatataacaaatarcactaataataaagagagtaaagttcttctatatttcagattgaagttacagaaactttattttactttttttgtttgagctctgagagtctgtgaaagt

SEQ ID NO: 19548 - DNA, 201 bp, Homo sapiens
acaccttggtggtggtgggatggcctcattactgctgggcagtgagaagattcctgagcatctactaggtatcttctgacaccatcccagcagacaggggmatctcattactgttaggtggaggtggaagtccagcttctccactgacaccatggggagaaggtggctcacgactgtgcagggggatgaaagtctgagctt

SEQ ID NO: 19549 - DNA, 201 bp, Homo sapiens
taatttttttcaagaaacattgtgtctgtgtggatgcaaaaagagtaactcacttatgttgaggttggtgagtaagctcatgtgccctgttagcgtttaawgtttatatatatatttttaaattactgaatttcaaaatatatgttctttgttatcttaataaaaagacctttgtaaaatcagagatatttgttcctccta

SEQ ID NO: 19550 - DNA, 201 bp, Homo sapiens
agcatctactaggtatcttctgacaccatcccagcagacaggggcatctcattactgttaggtggaggtggaagtccagcttctccactgacaccatgggragaaggtggctcacgactgtgcagggggatgaaagtctgagctttccacttggctttctctgacactatccaggagaaggggagggataccttgctacac

SEQ ID NO: 19551 - DNA, 201 bp, Homo sapiens
tacctgtcagaatttggagggatccttcagatgcatctgtcccccagggtatgaagtaaaaagcgagaactgcattggtaagagtaacatttattctgagrcccactagtagttcagtatagtaagacatggtaaagactctggaaacatactaagtgccaaccactgcaagcatgctgacctaaggaattaaacatatag

SEQ ID NO: 19552 - DNA, 201 bp, Homo sapiens
tatgggtcaggaactcagaagagtttgcctgggtagttcttacttggggtgtctcacgcagttgcagttatatattgactgtagctgcaaccatataaatragacttactagactggatgatagcatcaaaaatgttatttttcactaacattcatatcaaaatcccagataaggggcaagcattgcttttggtggttgtg

SEQ ID NO: 19553 - DNA, 201 bp, Homo sapiens
tctgaggcccactagtagttcagtatagtaagacatggtaaagactctggaaacatactaagtgccaaccactgcaagcatgctgacctaaggaattaaamatatagctgcctacatctgttttactgaaccatcagaaatgatggtgagaataaaaaacttagggatgtaggattttttcattaccagaaatctaatgct

SEQ ID NO: 19554 - DNA, 201 bp, Homo sapiens
gaaaataacaaatagtaaaatatacacaggacaagtcatgaatgtataataggactgtcagtggctctcatcagtggttagcctgcaactttctcttccayaggtccaggtcattacattttgaaatttcatgatgtgattactaatttaaaattacattagattatatatgaattagttggatactatgaatatttaaag

SEQ ID NO: 19555 - DNA, 201 bp, Homo sapiens
atgtaccttatgttttatcagtagaaacttggagagggtgggtagacaagacatagatttacctgaggaatttctgaaccaaataggtgattacttgatcrcaaatgtggcctgtctagagtccttctttcaacttttttgacttaaaggattgttgaaatcttttgtaatggaattttctttgaagtttatataaggctc

SEQ ID NO: 19556 - DNA, 201 bp, Homo sapiens
ccactttaaccagaacatttcatccccaacttaacctgaacctctctttcttgcctgattacctacaagatactgttgccagtatgttcattatcctgttsctagttttctcatatttgcctttggcaaaaaacacaatgctggaggaattttaagattcagtttcttaattcctctacctgggagctgggacattctctg

SEQ ID NO: 19557 - DNA, 201 bp, Homo sapiens
gacatgatgaagtccgaccttttttacagttcactttatttcacttttatacaaattattttttacagccttgttgaaattcagaagcaccagcattttaktgtggtttttctaacgtgaaaagatgctaaggatattttctgcctttgaattatccaattctatcgcccttggcaagattctacctaaagatatgtcatt

SEQ ID NO: 19558 - DNA, 201 bp, Homo sapiens
ttaatgcaagaaaaacaggacttcatttgaaattttgaagactactggtcacaattaaaactctttatctactatgaaagcataggtttaagcctagagtmgttctgtgtttgtgtattgtagccttagtgggtttgatttgaaaagagtcaatgagcatttgcatctagtttgttatctcagttgtgttgcattgagaat

SEQ ID NO: 19559 - DNA, 201 bp, Homo sapiens
ttcaaaaaatctaaactttcaagcctttatgtaaaatgaaaatagattgatttccatttaggttaccttttatgaaatcatccagttatagacctaatgcrtgaacccaggtctaaaagcgtgctgagaaggagtcactccatctctgcctggatatctctagtcaggggctctcactcactcaccccatcatgaaacagt

SEQ ID NO: 19560 - DNA, 201 bp, Homo sapiens
tgatttatcagaatgactatgttaattttgttgttgtcatagcttttttgtttgttggtgtatgtgatgcttttgatgtgatgtaacttactgaaagttaycttgattgtttttcttagactatcatgcaacagtgaaaaaagagactctgtgtggaaatcactttgatactgagcatgatttctcgaattttcttagcac

SEQ ID NO: 19561 - DNA, 201 bp, Homo sapiens
actttactttctgaagaagtctattttattgtaaaaatgtataattttttgctattcaatgaagattctgctaatgaaattatatttttactcttctttgwttatgtctctaagttgaatggtaagattttgagacatagctaatagtggcagaagtgtctcaactttttccaccagtgaactcagtttgggcggccaact

SEQ ID NO: 19562 - DNA, 201 bp, Homo sapiens
tactattacaaactcttttggtattcccaaccttttagcccactgtttaattttcagtatgatataagacctacctcataggatatagtaggttataagtytaagattctccttcaccctgattagcgttatagacaccaggataactgacaacaatatatcatgagtccgtggtgatataaagcaaatattatgtatttc

SEQ ID NO: 19563 - DNA, 201 bp, Homo sapiens
aatattttgagagtgaaatcatctccttgcatataagttttgatggttcattgaacaacctagcctgagaaacttctttcagcttttgaataagacatgtstaagcacaggtggagttacccttttatttcattccccacctccaaggttagtattacttgctttcaaaagtacgaatttgagaggtccaaggcaggagaa

SEQ ID NO: 19564 - DNA, 201 bp, Homo sapiens
tatcggtaagacaaagttacaaatgggaaattttacaaacttctagtagatgcataaaaattatatttaaaattataaacagaagaatgtcctggtatttrtgttcagtaaccaataccccataatttgtggtctaaagaagttgctaataagatagatattttcaagaacaatatccaaagggaaaaaaaaggccttttt

SEQ ID NO: 19565 - DNA, 201 bp, Homo sapiens
aattactcataattcctacacttaggattaattaccgttaatgtcttggagactataacgtacactgcacgttgtaataacacaaaaggacaagcaagatrtaagagtaagttatacgtgctttggggtgtttacttcaatttacctttttaactacaaattagaatatacaagagtgtaactaaactaatttttaaattt

SEQ ID NO: 19566 - DNA, 201 bp, Homo sapiens
acccacagtataagatttgctattttctgtctctatatgaaggcgtgcattctgtaattacctaagaatgggaagaatctgcttaccgagcagaaacacgrtaggtacaactattctatatcaaaaatgataaatgtgaaatgtgtgagatttatagaaactcaagtaaagtgttttttttccactaaaaattttctagta

SEQ ID NO: 19567 - DNA, 201 bp, Homo sapiens
ccaaaaaattatgataaactctttttatctcttgcctccttatgttataaagtcctaagtctctacctgaacattcaaagccttacctaacctgtattccygagtcatctctaaccacttgccacctcacacttgtatttccctcattgttgtacaagaccacactgccatgcctttgccagcagtaccccctctgcccga

SEQ ID NO: 19568 - DNA, 201 bp, Homo sapiens
tagtattacttgctttcaaaagtacgaatttgagaggtccaaggcaggagaaagaagggaatggaaattatattccaggttgctccaggagtcccatgtgrgcattgtatcacaggctgtggctctcagaatgttacattaaattctgagaagctgagtcagcacaatggccctttacaggaaaagatcaatagcctcagg

SEQ ID NO: 19569 - DNA, 201 bp, Homo sapiens
gagtttctgtctctctcacatgccctcgctcttcgtgtctgctgaatgctaaaagaatcccctctggtatgttggcttgttccctctctggccctcctgcratccattctccacgtagcagcaggaggaagcttttaaaccatggattcgatctcttcatagtcttcactataacccattgaattcgggataaaattcagc

SEQ ID NO: 19570 - DNA, 201 bp, Homo sapiens
gcctttaattatgtgtgcatacatcacatttagtgctcggttttgggtcttactgggattttggggagaaatagaaggagttgttcgattcttatacagartatcttaaaggtaattcatttattttatgatagcttaaaagcaatctgaggcatgctatatatgggccattagaggacataatgtgcttactttaaactc

SEQ ID NO: 19571 - DNA, 201 bp, Homo sapiens
attgtgaatgatatgcttcgaaatcagttatattactctgaagaatattgatgtatttgtcttagcagacagtcaactctggtaggcacaatagcagaccstcaggcctcagaagggcggtggctcatctgtcagttctttaaaccttactcactagcattcttgattttgccccacacatgcatagtacagtcatgccac

SEQ ID NO: 19572 - DNA, 201 bp, Homo sapiens
atcacagttccatcaagtgccatgagtaactactatgtctctgtcagaaacaatcttgcaaaaaattaactaggtcaaactatttaagtcttgattcaatrtaaaatttgcaagcagggacatactgcaatatataaaatttgcaagcagggacatactgcgatatgttcgtcagttcagtgattcacagctttttctcca

SEQ ID NO: 19573 - DNA, 201 bp, Homo sapiens
ctgtatccagtgctaaaaattttaactttacctgttaatggaattataagcaattaacagtttcatcttcattattgatatgcagatcctgattgctgtgstacatctttcttcttgtgatcatagacaaaacaactttgaaagcatcttgatagggttgaataatatgttgttaatgaagctcacagttttttccattgg

SEQ ID NO: 19574 - DNA, 201 bp, Homo sapiens
gatatgcttcgaaatcagttatattactctgaagaatattgatgtatttgtcttagcagacagtcaactctggtaggcacaatagcagaccctcaggcctsagaagggcggtggctcatctgtcagttctttaaaccttactcactagcattcttgattttgccccacacatgcatagtacagtcatgccacttgagctga

SEQ ID NO: 19575 - DNA, 201 bp, Homo sapiens
aacttaatacttaatgtcttttttctttcaattatgtttgatatcagcaattccagtgtttttaatatcattgattttcctgtaataaataagctcatttmtttgttctctgaatatgctcagcttagctccaggtaaagtatatgcaaattaggcaatcagattaaatcccacatatcctcctgcctgtgggaaaataaa

SEQ ID NO: 19576 - DNA, 201 bp, Homo sapiens
ggactgtaaactagttcaaccgttgtggaagtcagtgtggcgattcctcagggatctagaactagaagtaccatttgacccagccatcccattactgggtwtatacccaaaggactataaatcatgctgctgtaaagacacatgcacacgtatgtttattgcggcattattcacaatagcaaagacttggaaccaacccaa

SEQ ID NO: 19577 - DNA, 201 bp, Homo sapiens
gacttggttgccctaagattccctcccctccttcctctggatggaatctcagaaagtttcttctggagagttagctaccagatgacagcactgccaggccrtggtcatctggagggtaatttcagaaaaatagaagccaaatcaatgtgaaattactccctactggttgtttgctctgagtttcagctcaccactaaaaac

SEQ ID NO: 19578 - DNA, 201 bp, Homo sapiens
caatcctggatatcaggctacgccagaccgccagggctgtacaggtaaggggagaccaagcaggcctgaaactcatatgtctcaaatcagcctaggaaaayttttggcgctgaattataatgaaggctatgcaaatcctttgtcccaaaaatgaatgtaagactaggggcagatctcagttattgtgtgatcttgcagcag

SEQ ID NO: 19579 - DNA, 201 bp, Homo sapiens
cggagtttatagctgttatttttaaagatgagtttgttaggtactaaattctgcgtaccagatgtgtaagttctactattctattgctttgtgtatgaccrccaagtaaatgacatcaacatttagttacacaaataattagaactctaggctgagcacattcctgtccattcctttggtcagatatcaacgaatgtgccc

SEQ ID NO: 19580 - DNA, 201 bp, Homo sapiens
gaaacatttagtagccctgttttttacttggatgcattactgttgtccatcatgatagatttttaacttaaagtgatggacctaatcgtttatatcaaccrgctctacattctggcttcattctgcttttagacatcaatgaatgcaaagcatttcctgggatgtgcacttatgggaagtgcagaaatacaatcggaagct

SEQ ID NO: 19581 - DNA, 201 bp, Homo sapiens
ccttcgaccagttctccagtgcctgccacgacgtgaatgagtgctcgtcctccaagaacccctgcaattacggctgctctaacacggaggggggctacctytgtggctgcccccctgggtattacagagtgggacaagggtaaggcggccttcagcctcagcacatagaggaatacatggttcctgagtgagttcaggcca

SEQ ID NO: 19582 - DNA, 201 bp, Homo sapiens; identical to SEQ ID NO: 3392

SEQ ID NO: 19583 - DNA, 201 bp, Homo sapiens
atcttaatcagttattacattatagatttgtagattatagtaagattgtagagatcatagtgaaatatataaaggaatgtaaccctgcacactttttaagyactacttatataatacttctctttttagaataattactgacattcataagtattcatttcttatttcacagttatgtattttctattgtttatgactcta

SEQ ID NO: 19584 - DNA, 201 bp, Homo sapiens
ttttaaatcccaatgtaagaagtacatactccctgcagggggcaaaattgagccaagaatgtttataatagcttcgaatcttggcttggttactatgtggwaaactaagaaataacccaaataaactttaaaaataatatgtagaatgacttgtaaatgaatgggaagctttatctagttttttaaaaaggaaaatcctac

SEQ ID NO: 19585 - DNA, 201 bp, Homo sapiens
gacctttgttgttgttgttgttgttgttgttgttgttgatattagctgtgggaaagggagactctgtgatatggttttactctactgtattttccaggaawtttttttatcacatttaaaaagtttttgacctgaaatctatctaaagtcacacagaaagccaggaggaggggcttccaatcgaagatgatatagtttgtg

SEQ ID NO: 19586 - DNA, 201 bp, Homo sapiens
aaacgtaactatgtgggtaaatatataatacttttccttagtattttaaatctttttaggaaacaattgactgaacaaaaattaattacaatgtcctatgkggtgtagagtagatgtggtggtaaaataataaaacaatacacagaggctgggatgtgcctatactatatgtcaagaattatgttacttgaagatagacat

SEQ ID NO: 19587 - DNA, 201 bp, Homo sapiens
aaatatagattatagggttagtagtacagaaattgagggttgagtagttacattctaaatgagcatgagagccagcgaatatgattctgattaaaaaaaaracaaaaaaccttttaccaaacacttgcttaacagtgtgatttacatgaagtatgtaagtttttgtctgaatatacttaaatatatttacttaaatttaag

SEQ ID NO: 19588 - DNA, 201 bp, Homo sapiens
ttcatcaggaacttttctaaccctcccaatcatcatcctgtttgaccttgctaaagcttttggcactattaatcattatcttcttgaaatgttgtttttcrttttctttgaaacacccttgacttttaaaatgccagtggccttcagtgctccttttcttgatcattcctttttagtctcttttctatgtcttcatcagtc

SEQ ID NO: 19589 - DNA, 201 bp, Homo sapiens
ataaatttttttactaaaagaaaaattcttattctgatttatcagaatgactatgttaattttgttgttgtcatagcttttttgtttgttggtgtatgtgwtgcttttgatgtgatgtaacttactgaaagttaccttgattgtttttcttagactatcatgcaacagtgaaaaaagagactctgtgtggaaatcactttg

SEQ ID NO: 19590 - DNA, 201 bp, Homo sapiens
gttaggtactaaattctgcgtaccagatgtgtaagttctactattctattgctttgtgtatgaccgccaagtaaatgacatcaacatttagttacacaaayaattagaactctaggctgagcacattcctgtccattcctttggtcagatatcaacgaatgtgcccagaacccactgctgtgtgctttccgctgcatgaac

SEQ ID NO: 19591 - DNA, 201 bp, Homo sapiens
agaatcaggcaactttttttcaacctcttctcagtaattctttatgccaatgtcaataaagcaaaattaatctaagaatttgaagcacaaattatgtactrcagaagaaactgtattatacataatcaaacttggaagaactcaggcagtatatcctgagttcttccaagaacgcttttagttcaaaagccctttttgaaa

SEQ ID NO: 19592 - DNA, 201 bp, Homo sapiens
aaaataataattggccttttgttccatgattcttaaatgtataagaattaaatataaaaagaatctgtcatcagagagaattgaacaaatgtactgaacaygctaaggtgaaatgatggctgtttctgttttttacgagtcaagctcccgcttcactccttcactttcttacagtggaccttggtctcctctgcaataact

SEQ ID NO: 19593 - DNA, 201 bp, Homo sapiens
aaagcacaaaacatgtgagtgaagccatactggggtcctccagttcatcccagttgtaatggttaatgttaggtgtcaactcgattagatcgaaagatacstaaatggctggtaaagtattgtttctgggtgtgtctatgggggtgtggccagaggagattgacatttgagttgttagactgggagaggaagatccaccct

SEQ ID NO: 19594 - DNA, 201 bp, Homo sapiens
ccccgaaaccatgcaactacatctgcaagaacactgaggggagttatcagtgttcatgtccgagggggtatgtcctgcaagaggatggaaagacatgcaarggtgagtgaagagtctctgacaatcgtgaccctagtctgtatcttttctttcaaatttaaatattagattatcaggaattatgccatgtgcatcaccttc

SEQ ID NO: 19595 - DNA, 201 bp, Homo sapiens
tacaaaaatgttcctaataatatctaccctttcagtaacttctgtcctgtacttaatgaagtttaattcctgtctgggaggcctcttcactgagagcccaygtgcatcttccaaatctcactgagctgctgcagatccctcgcttccccactaggtactatgtcctctgtgcacacccacttgcacatgggcctgtttccc

SEQ ID NO: 19596 - DNA, 201 bp, Homo sapiens
gtgcatcaataccatgggctcattccgatgcttctgcaaggttggctacaccacagacatcagtggaacctcttgtataggtaacgatgggcacctctatrtccaggggtttgggggctaatcagctactgtttcctgcaagtcactcattatcagtagagtgtctttattatggagctttggaatatatattttattaaa

SEQ ID NO: 19597 - DNA, 201 bp, Homo sapiens
cactgcactcctgcctggtcgacagagcgagactctgtctcaaataaataaataaataaataatcaccaaactacatacactaatttttttaaattaattraagtggaagaaataatataagtggaccaatggtgagccaagaaaccagtaagcctcattaatttaaacagatgctgatggcacactaaaaatctaacaaa

SEQ ID NO: 19598 - DNA, 201 bp, Homo sapiens
accatgggctcattccgatgcttctgcaaggttggctacaccacagacatcagtggaacctcttgtataggtaacgatgggcacctctatatccaggggtytgggggctaatcagctactgtttcctgcaagtcactcattatcagtagagtgtctttattatggagctttggaatatatattttattaaaatgttgccat

SEQ ID NO: 19599 - DNA, 201 bp, Homo sapiens
taaaaagagtatttcaactatatcacatttttttctgaatgacgtcatatgcttcaaattccaagaaatttttgatcaaaaaaacattttttgtttattgktatctctaatctatacctttactaactaacatcagtcttttaggaaataggaaaagtaacctacatataaagtgtaattttctgttcattttattaacag

SEQ ID NO: 19600 - DNA, 201 bp, Homo sapiens
cttgtataggtaacgatgggcacctctatatccaggggtttgggggctaatcagctactgtttcctgcaagtcactcattatcagtagagtgtctttattrtggagctttggaatatatattttattaaaatgttgccatcctctcaataatgtgcttcttaatcacacagcacttggcctttgtccagtaatgtgggatg

SEQ ID NO: 19601 - DNA, 201 bp, Homo sapiens
agttccgcatccttaactctttctactttgccatttcagacaatcgacagggtctctgctttgcagaggtactgcagacaatatgtcaaatggcatccagyagtcgcaatctcgtcactaagtcagaatgctgctgtgatggtgggcgaggctggggccaccagtgcgagctttgcccacttcctggaactgcccagtaca

SEQ ID NO: 19602 - DNA, 201 bp, Homo sapiens
cccatcacttgagattatttttccatcacatccatgttgctgttcacctgaatgatgaacaggtgctccagtgctattaggaatgtttgcagttagttatstcatctccatttcttcatttctctttgattctaaccagttttacccttgcatatatgttaactcctgattgtttttgttgttttggtccacagatattga

SEQ ID NO: 19603 - DNA, 201 bp, Homo sapiens
ttgctcatagaaaaactctaccaatatgctcattgcaggaagcagagaggattaaaacccaagttaaaacagtttgcttcttatagaaaactgcataaatwttaaaaaataaaataaaacaaaagttttggtatgggaagagatcgaaacaaatcactgaaataagatatttgttgttgttgcttatctaagcttttattt

SEQ ID NO: 19604 - DNA, 201 bp, Homo sapiens
aaagccgtaagcttacagtgggttgtggtagtgtgaatgacaagctagccctggcagtcttctgttgctccacttcctgtgtagacaaaacgtgattactycctaagctcagttaccatctgaccctgcaaggaaggatgccagcactgtttttgtcagtaacctgcctttgttctccatcagttacagaatcacaaggtc

SEQ ID NO: 19605 - DNA, 201 bp, Homo sapiens
atttttattttgcttaacatataatagccatttcatagtagaatgaaaaaacaataattcaggccaaaataaaatgcaagttctataatattcatatgtayctttatattctcttgacaaaatgaggaagaaagaaggagagggacagggaagaagggtaggaggaagagagagagagagagggaacctttctccatctca

SEQ ID NO: 19606 - DNA, 201 bp, Homo sapiens
ataatggtcttttctgcttaaggtttttatgcataacatataaagcatttgacactttgggtccttgttaaagacaaggatagcaaagaaattaattgtgkaagagttctgatgtgtaatttcagtgatgacttttagtacagtttctaataaataaattcttttaaaaagctaacaaaaatcttgaaaataacacagttg

SEQ ID NO: 19607 - DNA, 201 bp, Homo sapiens
atgttgggaggcagagcatagagtagtttggaaatttagtgcagagtcatttggagaatatatattaacagttaaaatgtgaaatggaaatttgaagtatrtatgcttttataaactatttgggaagggcatactagcagtgatatttttagtctgatttttagaagcccatgctgtgtttcataaatggaaacgtcacat

SEQ ID NO: 19608 - DNA, 201 bp, Homo sapiens
gcaaatcaaaaccacaatgagataccatctcacgccagttagaatggcaatcattaaaaagttaggaaacaacagatgctggtgaggatgtggagaaatakgaacgcttttacactgttgggagtgtaaattacttcaaccattgtggaagacagtgtggtgattcctcaagaatctagaaccagaaataccatttgaccc

SEQ ID NO: 19609 - DNA, 201 bp, Homo sapiens
ttggaaagcctttccaagaaggatggatacaaacaagcccagactgcaaagactgcaacaaatacttaacttttcaatgcccagacattgacaaacatccrtaagcatcaagaacatccaggaaaacatgacttcacaaacaaactaaataaggcaccagaaaccaatcccagagtgacagagatatgtgacctttcagac

SEQ ID NO: 19610 - DNA, 201 bp, Homo sapiens
tgcgacctggggtggcatgggctagtgtagtagaccagcactgtcttccagtcacacatgaggtttcattccatgggggcctggctgcctcatttaccacstgcctcattcagcccataccacagttgcagggttcatccttctgttaacatttctttctttttctttttcttttcttttttgagacaggttgtccctctg

SEQ ID NO: 19611 - DNA, 201 bp, Homo sapiens
caattagagtttaccttccataggtagtgtgtgtctggcttcttagacacttggccagtattgtctgaagtccaacagcaccactgcaacctccctcagcrttgcaaaaatacttactcatagttcatccactcagagaagagaagctaaatgccgataagatttgaagtggcttgggctgtaatgccgtggagtacctac

SEQ ID NO: 19612 - DNA, 201 bp, Homo sapiens
ttaggttctctacttcaagtatattgatttctttttttagacttttgatcttttatccactctttacttcttttgatctttatcagtaattctttttagcwgtgtctgttctgttgtttttgccaattagtgtaatggttttataatcatataagatatcttactttgtttttagtttatttagaagtttctcttttattt

SEQ ID NO: 19613 - DNA, 201 bp, Homo sapiens
gacaaaacgaacatggtctcttggaggtccaggactgtgagactcagaataaagaggagacagaagtgttcatgtagaagttggcagtggtcgtttgtgaytagtctaaaactgaaaatcccagaaaacaaacgaaaaacaacaaatgggttttaaagtcatatggaattgtaaagtcactaattgcttttttggtgattg

SEQ ID NO: 19614 - DNA, 201 bp, Homo sapiens
ttggtgattgttttgaccaaaattaagtgaacgattacatcttctctgtgtactagacccttgatgagtccctgaggggctcaggagacagaagtgaattrtggttgtagtggcaaaatagctgacagagctgccatagtaacaaggagccttaggagcagactctccaggggagaaaacagtcctgcagaagtggctttc

SEQ ID NO: 19615 - DNA, 201 bp, Homo sapiens
ttttctcaggtagctgggattacaggtacccagcaccatgcccagctaatttttgtatttttagtagagatgggttttcgccatgttggccaggctggtckcgaactcctgacctcaggtgatccagctgcctcagtctcccaaagtgctgaaattataagcatgagccaccacgccacacctggtctgggcaacagagtg

SEQ ID NO: 19616 - DNA, 201 bp, Homo sapiens
tttcttaatattgaacttctaaactgttctttgcttctgtcggagacagcctcattcttctttaaagcaaatcgaagttttatgtggttttaaggtttttrttgttgtactgcagcacgtatatgatatctaaggcttcctagcttagcattttgaatgttaaattatatccaagtttgattttcctagaaacagtttttc

SEQ ID NO: 19617 - DNA, 201 bp, Homo sapiens
tcaaccttgaagaatctgatgattatgtgtcttggggttgatcttctcatggagtatcttaatcgtgttctctgtatttcctgaatttgcctgttggcctrtcttgctaggttggggaagttcttctggataatatccagaaatatgttttccagcttgtttccattctccctgtctcctcctggtactccagtcaatcgt

SEQ ID NO: 19618 - DNA, 201 bp, Homo sapiens
tttaaaccctgtgaattagacatcgacgagtgcaggatttctcctgacctctgtggcagtggaatctgcgtcaatacaccgggcagctttgagtgcgagtkcttcgaaggctatgaaagtggcttcatgatgatgaagaactgcatgggtaagcaccgtgagctcttcctcgccagcttgaaaccatactagcacagactc

SEQ ID NO: 19619 - DNA, 201 bp, Homo sapiens
aggctgctgtaaagataacagctacaacacatttttaattgttgcatttcaattatgtaacacaaaattgaagtgatcttcaacactgcgaactgaaggtsgtatttcatattggaaagtctatttattatactttatatgcttgctaatgctctctctcttttctcattttgcttcgttcctttggctcagtagaattga

SEQ ID NO: 19620 - DNA, 201 bp, Homo sapiens
ttaagactaatattgttgcactttattaagtgcatattactcaatcaagaaacgttaattctgtgggtgcctcatcttctgcgaattaaagactgtgtttyccatgaccatacttaatgtcgtggtttaatgcatgcaaactttttgcatatgggcaaagccttatgtttgtgaatgtcttcatctgatttagaaatagca

SEQ ID NO: 19621 - DNA, 201 bp, Homo sapiens
tctgaactttattgctgtgttctgcagatctggacgaatgttctaatggaacccaccagtgtagcatcaatgctcagtgtgtaaataccccgggctcatamcgctgtgcctgctccgaaggtttcactggtgatggctttacctgctcaggtgggtgacagtcctgaggtgtgctctgacgggatggtcatagaacactct

SEQ ID NO: 19622 - DNA, 201 bp, Homo sapiens
gtaaagataacagctacaacacatttttaattgttgcatttcaattatgtaacacaaaattgaagtgatcttcaacactgcgaactgaaggtggtatttcrtattggaaagtctatttattatactttatatgcttgctaatgctctctctcttttctcattttgcttcgttcctttggctcagtagaattgatggtatca

SEQ ID NO: 19623 - DNA, 201 bp, Homo sapiens
ttacaagtaatttcttgtttgaaaaatgaggacattgggctagatcagtgtttactcatcttgcttggtcataagaatcaccagagtatttttgtcaacartattgattcccacatctgttccttggagattcaaattcagtactctgaatacagtgatttgcaaccattgttgcttattatcatcaccagggagttttta

SEQ ID NO: 19624 - DNA, 201 bp, Homo sapiens
accaagtcatgcctggtctttattcacagcttcagtgctacacccaccaccctggtccaaacgcgctacctcattgctgattcatctcagaattcttttascagatgactgcctgtcttctttttcatttcctattcatccacaggtagttgcttgaatcaactttccagcagttttcattgtgttactcttaatctagaa

SEQ ID NO: 19625 - DNA, 201 bp, Homo sapiens
acataagaatctctggagccataggacccatggccaaacattagcattttttaaagcccgcgaagtaattgtgctataaggtgaagtttgtgaaacattgstatagcatgaggcccttacaaagtaccccagggcatttttataattagctaggcttaagaaatcatttattaaaatatctctaatattttatccaataat

SEQ ID NO: 19626 - DNA, 201 bp, Homo sapiens
aaaatgtttgacatatgcagtacacaaatctctaaaactgtggcttgtgatatctagcagtgcaatggataccaacacaccacagaaatattgtttacaargtaacacatcatattcatctactaatgaaagtccagatcatttcatttgcagtgaggtctgccattgccttattttcttataaaataaacactcattgaa

SEQ ID NO: 19627 - DNA, 201 bp, Homo sapiens
ctgccttcaattgcacaaacttaatctaagtaccagataaggatcatgctcaattcttataatttcaatgaattacaatgaaattctagggacagtagagrttaaaaaattgagactgaattcttatgtttctgagtaagaaacaaatttttgactctccaagaaggaggagtactgtagttttgctggttgaactcatga

SEQ ID NO: 19628 - DNA, 201 bp, Homo sapiens
tgaagcttagtagtagaattagtagaaaatgtgaatcaatgtaaatgtggaatgacatgatttattatctacattagcttgacaagagttagtgggagaargaacaggtcagcagtagccactttcaacaacataaattctttatacccagacaggatttttccttcctaattgtgtattactttatgggtggcataggcc

SEQ ID NO: 19629 - DNA, 201 bp, Homo sapiens
taaaaatacaaaaaattagctgggcacagtggcacgcgcctgtaaccccagctactcgagaggctgaggcaggagaattgcttgaacccgggaggcagagrttgtggtgagccgagatcacgccactgcactccagcctggatgacagagtgagactccatctcaaaaaaaaaaaaaaaagtagagtagtgtactccataa

SEQ ID NO: 19630 - DNA, 201 bp, Homo sapiens
agtttactaggctgggtatcacactcactcatgacctcccttagctgcggggagggggtttcccatccccgtgtggctctcaagtgggccgtggcaccacrctactcatccttctctctgtggatcacgccagccttctagtcaactttgatgaaagaacctggatacattggttgccagtgaaggattcacactctttgt

SEQ ID NO: 19631 - DNA, 201 bp, Homo sapiens
aatattgagagccatttgagttttagccgttgtgcttaatccacatttaatctactttcttccattttattatacattaaaggaccaaagttaactcatayaggacttaaaatttaagctatcataaaacaagtgaattaaaaatgttaatagtgtcattaagcccttttccaataatatttgtgaactttaaatatataa

SEQ ID NO: 19632 - DNA, 201 bp, Homo sapiens
gagtagaggttgaggtcgtcattgcaggtacttaagtcaactagcttaataaattggtatcagtagctaaatacataaatagaggatgagacagtaacagmagcaaaaggtcccaaagaattatcacaaaaactggaatgagacacaaaggctaaagagaattgtttatttaagataatagataacttaagaatgctggtg

SEQ ID NO: 19633 - DNA, 201 bp, Homo sapiens
aaagtagagtagtgtactccataatatataataatatatatataatatatataattctaaaacaacacaaatcattaagaaagggtagtgtatctaataaytagtgctgggcactcaagttactaaatatcagaatgattattaaatacaggatgtcaaaaaatagaagaaaaatcaaataacaaatttctagttaggaaa

SEQ ID NO: 19634 - DNA, 201 bp, Homo sapiens
atttcagggtcctgcagatatcaagttaccaatatatacttgttttgatgatcattttaacatttgaattttgtgtatcatacatgagtagatattcattmtggatcaaaccatattaaatgattgctaggacaccccatatgtttcagattccaaatagaaatagacctattatttagttgctgcccttaaagttagaca

SEQ ID NO: 19635 - DNA, 201 bp, Homo sapiens
ttcatgacagatcagctacacaataaaataagcacacagaagatgtaaatgatataattattatacttcagctaacagatatgtctcaaactctttaacaygaaagagtatataacctcttttcaagaccccaaacatacataatgccatataaataaacagataatttccaatatatacacaaatacatgaagaacagat

SEQ ID NO: 19636 - DNA, 201 bp, Homo sapiens
taagcacagatctcaggccttactacggataaaaacagaatatgattccaaaaagcaaagaattacacattatgttagttgtttttactcaatatcaatayagaggtaaaacataatagcattaattaggcagcctattcaatttttgttagattctagaaatcttccttttatataagtagatatattatgctataactt

SEQ ID NO: 19637 - DNA, 201 bp, Homo sapiens
aatcaattctgttaaggttaattaaaaaataagaaaatatattttatctctattaacatattaccattcctactgcttttcattttctgtgtgtaggttakaattttaatctcacttttattttacctgaagagcttccttttacatttaaagtccaaaaattctttattaatgcttcgtgaattttattatgtcaatact

SEQ ID NO: 19638 - DNA, 201 bp, Homo sapiens
actttattgctgtgttctgcagatctggacgaatgttctaatggaacccaccagtgtagcatcaatgctcagtgtgtaaataccccgggctcataccgctstgcctgctccgaaggtttcactggtgatggctttacctgctcaggtgggtgacagtcctgaggtgtgctctgacgggatggtcatagaacactctatatg

SEQ ID NO: 19639 - DNA, 201 bp, Homo sapiens
caacagattgtccacataacagtatggatgtatgggggaacccgcccccaataattcaatgttatttcacgtaggttcttttctatttccctaagtgttgsccagtctgagaaataaagggaaagagtacaaaagagagaaattttaaagctgggtatccgggggagacatcacatgtcggcaggtgccgtgatgccccac

SEQ ID NO: 19640 - DNA, 201 bp, Homo sapiens
ggcgggtggatcttgaggtcaggagatcgagaccatcctggctaacaaggtgaaaccctgtctctactaaaaatacaaaaaattagccgggcgcggtggcrggcgcctgtagtcccagctactcgggaggctgaggcaggagaatggcgtgaacccaggaggcggagcttgcagtgagccgagatcgcgccactgcagtcc

SEQ ID NO: 19641 - DNA, 201 bp, Homo sapiens
aaacagataagactttttgggtcataaatttaaaaaccatgaaaatcatcttagcttaatttataacactgtagttaaaacatatgtattccctctctctygaataagaaagtcaggggtgctacactcaaacctgctttctgcccccatcacaaataatttattcctcacttaccatattgtatctgaactatttttctt

SEQ ID NO: 19642 - DNA, 201 bp, Homo sapiens
tttaagtttttcagagcctcatgaaatcatcaaagcaatcaacctttgtttgtgcacaggatgttgcacctggaattgcatcttattatgtgggaaaaaawaatccaatttatgtaaagttgtgatgatgtattgaaggagcatgtaactgaactctttcccaataggctgatcactgtggtcctactgagttcccagtcc

SEQ ID NO: 19643 - DNA, 201 bp, Homo sapiens
aaatctactgcttcaggccccctccccagattgaccaatttaagcactgcactcataatagctggtttccatggagccttttaagaagttagcccatgagrgctaattcctgaaaaagtaaacgtttctctccgaagtattctatgccgcctctctggctgatatgttagatattcagttaagggatttttgttatatttt

SEQ ID NO: 19644 - DNA, 201 bp, Homo sapiens
agcatttgttattttttgactttttaatagtagccatactgactggtgtgagatagtatctcattgtggttttgatttccatttctccaatgattgattttgagctctttttcatatgattgttggccacatgtatgtcttcttttgaaaactgtctgttcgtgtcctttgctcactttttcatggggttatctttttctt

SEQ ID NO: 19645 - DNA, 201 bp, Homo sapiens
tgaatcgtaatggaaaagttaactcttaggcattttatttatgaaatgattgatatacccaagaagtcagcccacaaaatatttgagaactaagtaaaaaygataactttaataggtttttagtccaagagaattgtcctttccatttgataatttaaaagttgtcatttgagtttatagaccataactagtgtttaaaag

SEQ ID NO: 19646 - DNA, 201 bp, Homo sapiens
gcttgaacccgggaggcagaggttgtggtgagccgagatcacgccactgcactccagcctggatgacagagtgagactccatctcaaaaaaaaaaaaaaaagtagagtagtgtactccataatatataataatatatatataatatatataattctaaaacaacacaaatcattaagaaagggtagtgtatctaataatta

SEQ ID NO: 19647 - DNA, 201 bp, Homo sapiens
tgctgcaccccatatgaattgtgtcatctcaagaaaattaatgcctgcatctttacaataggaataataatggtcttttctgcttaaggtttttatgcatracatataaagcatttgacactttgggtccttgttaaagacaaggatagcaaagaaattaattgtggaagagttctgatgtgtaatttcagtgatgacttt

SEQ ID NO: 19648 - DNA, 201 bp, Homo sapiens
ttcaatagaagtagaaattaatactctaaaaagaaaaatatataatcataggaaaattctatatctttttcttaaatactttgaattcaaaatgaaaattwaaaaaattataaaataaagataataaacacatcacttaccaaacaattaagggcttatctaaagttgtgctcaaagaacaattcatagttttatactctt

SEQ ID NO: 19649 - DNA, 201 bp, Homo sapiens
tggaacaaaaccagtgatgagcacatgtagctgttgggaagtcactgggacagggagagttttctaagcatttactctgagtgtcataatcctgaaaggtrtttgaacctactaagagcagagagctaggattgtggatgttctattggagaggaggagatgttcccataagagacagatctacttcagaacctcacagta

SEQ ID NO: 19650 - DNA, 201 bp, Homo sapiens
ttcattttatttcctttttcctttatcatgtaacataagttttattgatttcctatcagcatttaagtgttgttaggttaaggattagtgcacttccagtygtatgaagcatagttgtattatgttaggtccaattatgaccttattattgtctttatttagggattaagtatgatttcaggtgacgtatatgggtgccaa

SEQ ID NO: 19651 - DNA, 201 bp, Homo sapiens
gcacagtgaattctgttgcctactgcttagaaccattaccaatacacagccctacttctgtgttctcgtattttttaacccactattggctgcaagttctrttacttacagtctaattgattccaaggtagcaaagacaacttggaaaaaaaagattaagaaaaactagaactcgtgccagcaggtattaaacatattata

SEQ ID NO: 19652 - DNA, 201 bp, Homo sapiens
taagcaagtgcaaactaattacggtcttaggaaagggatttttgtttttttacccttcctccaagtcttttatttattttttgagcttttaaaaaaaaaaacaacaaaaaacacaaccaaaagaactgacgagaggaagacaaagccccaggatcagccagagaccaagcagcatgggatgaggcccaggttgggcctagc

SEQ ID NO: 19653 - DNA, 201 bp, Homo sapiens
ataagcaagtgcaaactaattacggtcttaggaaagggatttttgtttttttacccttcctccaagtcttttatttattttttgagcttttaaaaaaaaaaacaacaaaaaacacaaccaaaagaactgacgagaggaagacaaagccccaggatcagccagagaccaagcagcatgggatgaggcccaggttgggcctag

SEQ ID NO: 19654 - DNA, 201 bp, Homo sapiens
aagtaatctataagcaagtgcaaactaattacggtcttaggaaagggatttttgtttttttacccttcctccaagtcttttatttattttttgagcttttwaaaaaaaaaacaacaaaaaacacaaccaaaagaactgacgagaggaagacaaagccccaggatcagccagagaccaagcagcatgggatgaggcccaggt

SEQ ID NO: 19655 - DNA, 201 bp, Homo sapiens
tctactaaaactacaaaaattagcctggcgtggtggcaggtgcctgtaatcccaggtactcaggaggctgaggcaggagaatcacttgaacccaggaggcrgaggttgtagtgagccaagattgtgtcatttcactccagcctgggtgacagagagtctgtctcaaaaaaacaaacaaacaaaaaaaacacatgtacccca

SEQ ID NO: 19656 - DNA, 201 bp, Homo sapiens
atggacacaagttctttttgggtgatgaaaatgttctaaaactggattgtggtgatggttgcataattcaataaatttactaaaaaccattgaattttacmcttaaaacaggcgaattatggtacgtaaattacaccttcctatagttatttgaaacaacaaaacaattagcagccaaagtttttgatgagcttgctaact

SEQ ID NO: 19657 - DNA, 201 bp, Homo sapiens
tttttcatgtatttctgttgtattttatagcaaatgagaataattgaattggtgaatcctcagaaaactgacctttctctgatttcttgtatctctcaaawcagcaacaacaacaaagctgaaattaaaatttatttagttcatgattcagttctgtttcaccgatcatcgaaaagtttcactgaaagtaaatcacagaag

SEQ ID NO: 19658 - DNA, 201 bp, Homo sapiens
tcttgttcacctagtcagaaaagaaaatctctgctaagtaaagaggagtcattaatgctgatgccttcagggcccaggaaggaaacatcagtgaatgtacygagctgggatttagtggtgtcctggagaaaacacacttcatcccaccagtgctgtgtgacatggcaggtctagcatgaccagaacttccaatttttcaag

SEQ ID NO: 19659 - DNA, 201 bp, Homo sapiens
gataatgggttaactagaagcccaaaccttaccattatgcaatatattcacataacaaacccgcacctgtatccccgaaaccataaaaattgaaaagaaamagcaagttcaatgtaaaaaaattaaaattagaaatggatctaatttggtaacaagaaaagttaaaaaacacgctatgaaatatagtagtaatttctatgt

SEQ ID NO: 19660 - DNA, 201 bp, Homo sapiens
ccatccaaaaggaaatatggcacacatcaagagaaatcatagagaaatgaaaagcctgtgcaaacaatgccttccaacccctctatagtggacgtttgtcrtttctgcctgcccagcatattttgaactccttctttagattttaatagtcccctatgttacgaatcttgccttgccaatatagaaacaaaactacctttc

SEQ ID NO: 19661 - DNA, 201 bp, Homo sapiens
agaaggcacagccactgactgattatagtagttgtgacatttctaatgcacatcgaacaatgtatttcttcttagttaaaaatggaatgaggcttttctaygttacatttcatcaaagcagcatacagagccaagccagacatgggagaaagacagtacaagtctttattcaccacttgcctatgttctttaggaaagagg

SEQ ID NO: 19662 - DNA, 201 bp, Homo sapiens
aaaagttgcttattatttatttgtttttttcaatatataatgagggttttattatatttacatggttcagaaaaaattaaattgatttcctgcatattgtsctagtttaataaccaaaaactggtttggaaaaggcatgcaaagataaaagaatatagaagtgtagtattttaaagttttttcatatgacaaaaggtttgg

SEQ ID NO: 19663 - DNA, 201 bp, Homo sapiens
atcaagagcatgtaaacattaaatgcagtttcaaatgtttagatcttctgtgtcatggttcctctttggtcacctgcaggtaatgcttctgatgtcaaggwcctttgctttttagctaaaagaaagaaatgtcttctgctcattcactgtgatgtcttcttaacagaaatcttattctgaaaggcttattctgccaaaaaa

SEQ ID NO: 19664 - DNA, 201 bp, Homo sapiens
agaaaatgtggcacatatacaccatggaatactatgcaaccataaaaaaggatgagttcatgtcctttgcagggacgtggatgaagctggaaaccatcatyctcagcaaactaagacaggaacagaaaaccgaacactgcatgttctcactcataggtgggagttgaacagtgagaacacgtggacagggagggaaacatc

SEQ ID NO: 19665 - DNA, 201 bp, Homo sapiens
aaaatttacaggaatgcactaggacatctgtatggaattagcagagctgattctatagattcatgtgactcaccagttctagtttctgtgcttctgagacmagctttttttcttctttctttaataaaaataagacttgtctacattatgggtaacataattaaaccaggataacacaaatttgtttaaatataaactcca

SEQ ID NO: 19666 - DNA, 201 bp, Homo sapiens
caaagtttcataaccaatgaagagacacatctatccttgttgaaacacatccttttgctctgtagagggaaaaatgaaaattagaatcactgaagaaagcrccttgccttgcctcaactgatctttcagagtatttgctcaaatctgtcctgaaattagctgtcttcagtctgaattaagctgctcttcatgccttgggca

SEQ ID NO: 19667 - DNA, 201 bp, Homo sapiens
gagaatagattcataattgtttagaacagttgttaacacaccatcaaataaattggcaaaaatatagagacatctgtatcgatgatgagaaagcaatggcrgaagaaatacaggaatagtggaaaagctgttgccaaagtacattgaaagactcactgtgtttcacagaccagcactggcagttaagaaaacgtaacatta

SEQ ID NO: 19668 - DNA, 201 bp, Homo sapiens
cagttaaaatgtgaaatggaaatttgaagtatgtatgcttttataaactatttgggaagggcatactagcagtgatatttttagtctgatttttagaagcycatgctgtgtttcataaatggaaacgtcacatccaagaaagtgagaccagcggggaagagtgataggaactccagaggggcagccaaacagcagctcaga

SEQ ID NO: 19669 - DNA, 201 bp, Homo sapiens
tctatcctattccattgatatatgtatcaattgtttttccaataatacactcccttgattactgtggttttatagcaagttttaaagttggattttgtgtsccctccaactgtatagactatagattatcagtgttcctatcagtttatggctccagcagcttttactccagataagctgatcttgactgcaattttctgt

SEQ ID NO: 19670 - DNA, 201 bp, Homo sapiens
ctcagagctgacatacgaggcaaaatgagcacttagcacctcctagcatatttatcagaagttgccaatctaaactatttgagtttcttcccacaaatggmgtgcactagtaaaacacatgtgttaagcaacttggacagcaccttgacggtgttagttaactaacagccatatttcatggggaattactgaagtgacgtc

SEQ ID NO: 19671 - DNA, 201 bp, Homo sapiens
aatttgtaaacattttcataaaaaatattaaaaagtgtgtgtgtgtatgtgtgtgtgttaatgcatagaatgtccatggaaggactagaaagtctgtggcrttggatattgttgggggtgaaattgtctggcttggaaaaaggaatggagaggagatttcacattgagtgccctaacctaagtttttgactttgaaccatg

SEQ ID NO: 19672 - DNA, 201 bp, Homo sapiens
atttgtgctaagcaaaaatgacatcacttagggttaccgttttcctatctttctccatataaaatagacaattacttgtaatccaatgaaagttctttgcrctaaggaatctgctttttatgatacatttatgttgggaggcagagcatagagtagtttggaaatttagtgcagagtcatttggagaatatatattaacag

SEQ ID NO: 19673 - DNA, 201 bp, Homo sapiens
gaagtatgtatgcttttataaactatttgggaagggcatactagcagtgatatttttagtctgatttttagaagcccatgctgtgtttcataaatggaaaygtcacatccaagaaagtgagaccagcggggaagagtgataggaactccagaggggcagccaaacagcagctcagagctgacatacgaggcaaaatgagca

SEQ ID NO: 19674 - DNA, 201 bp, Homo sapiens
tttattcccctgctccagttccacctaaattacagcaatggagagttaagacccagagggcttgatttatttaacataagacagtggtcaggaaattgcastttgatggattcaggaaaaatttcccaaatgctgagaaccaatgttgtttccctagtgccattgtatgtttaaattctttttttaaaattatgaaaaaaa

SEQ ID NO: 19675 - DNA, 201 bp, Homo sapiens
ctgttgtacctcaaactgcaaaagttatggcgacagtacatgttaagcacttagttaaaaatggaaaaagcacgaaatttgtgggtagaagacgtgaacaraaacgtgttcctgattgacagcaatcaggttcagtaccatgcatggtttcaggcatccattgagggtcatggaacatatttcccagagaaggagagactg

SEQ ID NO: 19676 - DNA, 201 bp, Homo sapiens
agacgtgaacagaaacgtgttcctgattgacagcaatcaggttcagtaccatgcatggtttcaggcatccattgagggtcatggaacatatttcccagagaaggagagactgctgtattagaaagcgattttaattcttaaagtaagtgttgtcaaacaggaactcaggatcttattatttttgccagaaagttccaaagg

SEQ ID NO: 19677 - DNA, 201 bp, Homo sapiens
agaggttgctttcttgttttgttgaattctaagtacaacagatttgtagtgcttgaagatgttttgtaacagaaaacttgaaatttgcaaaagaaaaaagktctcatttagctttagtgaaaccatactgtaaaaatttaattgtaggcttagaaattaattcaacttaataaactcgtagcatatcatctttcacaaatt

SEQ ID NO: 19678 - DNA, 201 bp, Homo sapiens
gcacccagtcaacaatctgatattttaaatgggcaaaagatctaaacaaatatttcttaaaagaagacatacatatggccaacaggtatgtgaaaaaatgytcaacatcactaacctttggagaaatgcaaatcaaaactacaattatttatcacctcaacccagtgaaaatggcttttatcaaaaaggcaataatagatg

SEQ ID NO: 19679 - DNA, 201 bp, Homo sapiens
aagccaaacactggcatcgagattgcagcaaaagaaaatgaggcatttattgcagggtgcccagcagggaaaatcaggcagctcgtgcttcagacccggaytctccaatggcttataggtaaggatttctaaaggcaggaaagcagaagttacaggcaaagtcctaagtcaatacatggagcttatacattggtttgactg

SEQ ID NO: 19680 - DNA, 201 bp, Homo sapiens
ttatcattatctgtattcattcctgggatccctgaattcctaaactattttaaaaattcacacatattaaggttcactctgggttgtaaatttctaagggmtttggcaaatgattaatgtcatatatccaccattgcagtattatacagaatagcttcaacatcctaagaatcccgtgtgctacatctattcatctccact

SEQ ID NO: 19681 - DNA, 201 bp, Homo sapiens
tattctagaaaacatgaacagaagtatcataatttctaacttatatctctgataaagttctatctctgtattttatcaactagagtacagtccttttgagyagttctctctgtctttagtctaacagactctatttatgtccataggtacttaggtcagcaacttttaccttaccaacttcaatgagattgttttagatat

SEQ ID NO: 19682 - DNA, 201 bp, Homo sapiens
gaaaactagctgccaccatctgccatccatctattattctagaaaacatgaacagaagtatcataatttctaacttatatctctgataaagttctatctcygtattttatcaactagagtacagtccttttgagtagttctctctgtctttagtctaacagactctatttatgtccataggtacttaggtcagcaactttt

SEQ ID NO: 19683 - DNA, 201 bp, Homo sapiens
aacagccacttctctaaagagtactggttcctttttaatggataaagacactagaaaacaagatctgggcactaggaactaggtgtgattgttgttactayggtatcgtttcttttaggaccttccaggtaacagagcagagaaatatatgtatgtatctaattcatgtatatatacacatcaatcaatgtttctgtatat

SEQ ID NO: 19684 - DNA, 201 bp, Homo sapiens
ctgcttcgaccattggaagctctttcagttggtacctatgcttttcattatattccacaatgtgtgtgtgtgtgtgtgtgtgtgtgtgtgtgtgtgtgtgtctaggttaaaaaaaaagcttgttaatttgtttatcttgagcactttattactttttggcattacaagatgtttcagtctcatcttgtatatttcctgccc

SEQ ID NO: 19685 - DNA, 201 bp, Homo sapiens
cctgcttcgaccattggaagctctttcagttggtacctatgcttttcattatattccacaatgtgtgtgtgtgtgtgtgtgtgtgtgtgtgtgtgtgtgtgtctaggttaaaaaaaaagcttgttaatttgtttatcttgagcactttattactttttggcattacaagatgtttcagtctcatcttgtatatttcctgcc

SEQ ID NO: 19686 - DNA, 201 bp, Homo sapiens
ccccaagattcagttatctccacctggtccttcccattgacatgtggggattaagggaactgcaattcaagatgagatttgggtggggacacagccaaacygtatcagtcaataatttatttatattagtatgaattctatggatggttgctttatattttgggttacaattcaacaccatttatttattttgttactcaa

SEQ ID NO: 19687 - DNA, 201 bp, Homo sapiens
cactatataattacaaaggggtcaattcggcaagaggataacaatatatatattgtaaatatatatgcacccaaaaccggagcacccagatacataaaacwaatattattggagctaaagagagggataagccccaacgtgatagctacagacttcaacaccccgctttcagcattggacagatcttccagacagaaagtt

SEQ ID NO: 19688 - DNA, 201 bp, Homo sapiens
acatgatttatgatttatgaatactgactttgatcatatggctgaaatagtgtctttcaggtttctccactgtaaagttatgatttttctcccactttttrttctgcaatctttggagtgaagttactatgtgtagcctacacttaaagagtaggaagttattctcttccgtctttaggttggagtaactacataattttt

SEQ ID NO: 19689 - DNA, 201 bp, Homo sapiens
taaaagaaagacatggaggaaggaaagaagtatgagcagactacaaaacatctagaaaacaaatgacaaaatgacagcaataagcccttacttatcaatamtaacattgaatgtaaatagactaaactctccaatcaaaagacatagaatggctgaatggattaaaacaaaagagtaaatgattcgtggcctacaaaaaac

SEQ ID NO: 19690 - DNA, 201 bp, Homo sapiens
gtatactcattttcttaatagactttattttaaagaaaattttcagctgggctcagtggctcacgcctgtaatcccaacactttgggcagctgaggtgggyggatcatgaggtcaagagatcgacaccatcctggccaacatgatgaaaccccatctctactaaaaatacaaaacttagctgggtgtggtggcatgtgcct

SEQ ID NO: 19691 - DNA, 201 bp, Homo sapiens
aactacaataactttttgtagacatagcacaataagacagaaatagaaacaaaattggaaggaaaaaagtactttttattagttttgactttgcttattasttagctagtttgtttatgaaataagtgttaagttctcatcagcttaaaataatggcttataaggtattatttgcaagctttatggtaatctcaaatttaa

SEQ ID NO: 19692 - DNA, 201 bp, Homo sapiens
gatcaaaaatagtaactacaataactttttgtagacatagcacaataagacagaaatagaaacaaaattggaaggaaaaaagtactttttattagttttgwctttgcttattacttagctagtttgtttatgaaataagtgttaagttctcatcagcttaaaataatggcttataaggtattatttgcaagctttatggta

SEQ ID NO: 19693 - DNA, 201 bp, Homo sapiens
tatgaatgtaaactgtcaagagaataagaaaatcaaccaataatgagaaaattcaactctatgaatttgaagattaacattcttcataaaaattgcacatrtatgtgtctcagtgaatgagggtaccattttcattgagtttctttctttttatgatattaagtgtgaaaaacacagaggctaatgctcatttatatgata

SEQ ID NO: 19694 - DNA, 201 bp, Homo sapiens
catctgtggggttgtgacagtactcattagcacggtgaaggcaaagttaccaaaagctgagaatgtagaaaacccatgtgttggggtgaaggaacatagtrtaggggtaaaagcacacaagcacttggagtgaaatggatctcaaaggtgaatctcactttcacttgtctttagctctgtgattcaccatgtattacttaa

SEQ ID NO: 19695 - DNA, 201 bp, Homo sapiens
tagtgtatacaagatgaagaaaatatgttttccaagtaacattctgaacataaagtacatattttccatcacttctaatttagagcacaacagtttctttytggtttctaacaggacacaaactaaatataaaatttgaagaacaccataattgcaatgatatataaaatgctatttgtgtaaatactaataaccatacat

SEQ ID NO: 19696 - DNA, 201 bp, Homo sapiens
ttgcacatgtatgtgtctcagtgaatgagggtaccattttcattgagtttctttctttttatgatattaagtgtgaaaaacacagaggctaatgctcattyatatgataattctatagtggaatgtagggtggatttctttttcatttggtgccatttatttagaagatacaaaataaatgatttttagatgcatcctcag

SEQ ID NO: 19697 - DNA, 201 bp, Homo sapiens
atggtttaaaagcaagagttttggagtcagatttggattcaagtcttgacccagcacttagcagttgggtattctcagccatgttacttaacaactcttakcttaagtatatacctatgtaaagtgaggttggagaaaggattcaattagataaaaagcaaagtacgtgacaaatgcatataatatgcagatagtcgatgt

SEQ ID NO: 19698 - DNA, 201 bp, Homo sapiens
agaagcttccatgaatattctctggaaaaattaaaaatgataaataaataagaagccaggaagtaactgtgagtgaggagatgcagatgtttcagagaaakaaaacatcgccttaatgttgctatggctgtatttaaatataataagtgtacacaatgacagattatcccaagacaagaggtaatcattatgagatactta

SEQ ID NO: 19699 - DNA, 201 bp, Homo sapiens
ctaagtgccattacaagtattggcagttttaagtaaagaaacagtggggatagaatgaatttttagaaagaacacctggttggtagtgtggagatggactrgaaggatcatcgagaaaccagggagagcaactaggcagcactacagtcccccgaagggctcataaacttcgagcttgccatgacatatagacctttctat

SEQ ID NO: 19700 - DNA, 201 bp, Homo sapiens
ggcaggcaagggacgacagatgaaaggcagtgtttagacatttctgaccctcctgcattccagcatctagctcttttgcttccacgtctgcctcccgatcyccaataatttgaagtgtaattttgatttgtttgttgtcctgaaatctactcgctcggggcattgcttacgaagaccgtttatatgttgctgcatccctct

SEQ ID NO: 19701 - DNA, 201 bp, Homo sapiens
cagctctctcttctgagttccctacctttgtctggagctgcctgccaggcacgtatactttaaacatcccacaattatctcaaactcaacatacacagacygagtcttcagctccactacacccaccccacgtataccttatcatcatttctcacgttcatcatgacagtgattggcacaattattcattctctttcccaa

SEQ ID NO: 19702 - DNA, 201 bp, Homo sapiens
ttatttttggaccaaagatgcattagatctgttcaagcaccttgtttctattggttctatttctgactttattgataatggataaatgttttctgagtacrtgtcacttttccctgaaatatattcaggcctacttaacgatagtacagattttcctaagatactataaaatgtggtacttttaaatttgacttgcttatg

SEQ ID NO: 19703 - DNA, 201 bp, Homo sapiens
attccactcctactgctgccctggatggaagacgctccctggaggaaaccagtgcattgtccgtgagtgcttggcagggatcgcagcttggggcagcgcastcggccctatctccggccgacctcttgcactcagccatttggacgcatagttgcgtttaaaatcaagtgatcacattgcactgataatcgggacgcggcc

SEQ ID NO: 19704 - DNA, 201 bp, Homo sapiens
tccttgcctgcttaatgatttggtcactcctcattgcctacagtgcaaggacagattactgaaaatggcattctaggcctgtcacttaactttctagtttyattgttttctaagtaaatgccctcaggtcatggaaagctgcccatttctcatccatgccttataattggctacctccatactttagctagagtattttca

SEQ ID NO: 19705 - DNA, 201 bp, Homo sapiens
tcttcatatggcagatacttttgctatctctcagttcctgttgttatcatttcaggctattattaagttttatcttatcacatggctcttttgtttcaagratcctttctcagaagtgtagcctgtgaatgctatttcactgtactttaactctcaggaaacacaggagaaaacgaatgctagcctatttaatctcctttg

SEQ ID NO: 19706 - DNA, 201 bp, Homo sapiens
agttggcaggggaactttggtcatcatagttactaagggacttggaatgaaggaggctctatctcaacacatgcctccatggctaccaaagcaaagagccrgatggtgacttgcacattggtccttaaacactttggcctggaagtgacacttctgtgttttcatatcattggccataaaaagtcacatgttgtggccata

SEQ ID NO: 19707 - DNA, 201 bp, Homo sapiens
gttttatctttctatgtctattaatacaaattggaagaggggaggagtagagcaattatctagataactcaaaaccactttttctgtaaaaaatccagatragaccacatgttattatgcaaattatcaggcttttaactctgcttgaggtttgggccttatgaagatcaagatttcttaggcatttatataaaaccactt

SEQ ID NO: 19708 - DNA, 201 bp, Homo sapiens
ggattacatttgccccccttcccaaaaacaaattatctattagaggaaaaagtttttatgttaagtggctggtctggaaaagttagtatgccagatttctkgtttataataagaatgtaataagtaagatctcttccaatggctaatggttcatattaaattagaaaacctgaattcagttaaaaagaacatggaatggga

SEQ ID NO: 19709 - DNA, 201 bp, Homo sapiens
tgcagtttatatcagaatctacccagtttcaaacataactccttaaagaatcattacctctacaccaaatgctgtgatattccccatttctctgtggtacygggagacaactactccaatatgcattgaaagaactttctgggatgatggaaatgctctttgtgccgtccaggacagtagccactaagcacatgtggccct

SEQ ID NO: 19710 - DNA, 201 bp, Homo sapiens
gggaagcggaggttttggtgagccgagatcatgccattgcactccagcccgggcaacaagagcaaaactcttgtctcaaaacaaaaaaaattatacatcaktatcagttgagatttatctcaggaatgccagattggttcatcatctgaaaattaattgatgtaatatattatttaaataaaagacaaaagccgtgatcac

SEQ ID NO: 19711 - DNA, 201 bp, Homo sapiens
agaattaatgctttccctaagattgggcacaagactgatgtctactctcaccatttctcttcaacattgtactacaggttctagccaaggcaattatgcarttaggtaaataaaagttacccggactggaaaaaaagaagtaaaactatctctatttgtagatgacacgtgtttagtggacaaggtaacaactgaagtgaa

SEQ ID NO: 19712 - DNA, 201 bp, Homo sapiens
atatagatgaacaagtgatccaaactgaacaaataaaagctcttcttgggaactattaggaaagaagtgccctttcattacagcttgacagtctagatacrgtgtcaactttggcctggcttgaccattttagccattacatggtgataccctgcctgggaattaaaccaggacagaagataacagagatgagagatagag

SEQ ID NO: 19713 - DNA, 201 bp, Homo sapiens
gatttaagcaaagttgcaattgtacaagatcaatgtacaaaaatgaattttatttttatacaaagaataaatggcttaggaataaatttagcagagtaggygatagatttgtacactgaaaactgtaaagccttgttaaattaagaatgatctaaataaacaaatatacaccatgcttacagattgaaaaacttaatattg

SEQ ID NO: 19714 - DNA, 201 bp, Homo sapiens
ggatcaaattcagcaactggcatatagatgaacaagtgatccaaactgaacaaataaaagctcttcttgggaactattaggaaagaagtgccctttcattmcagcttgacagtctagatacggtgtcaactttggcctggcttgaccattttagccattacatggtgataccctgcctgggaattaaaccaggacagaaga

SEQ ID NO: 19715 - DNA, 201 bp, Homo sapiens
gtgggacacatcatctgtgcttggttaagggaacactggatcaaattcagcaactggcatatagatgaacaagtgatccaaactgaacaaataaaagctcytcttgggaactattaggaaagaagtgccctttcattacagcttgacagtctagatacggtgtcaactttggcctggcttgaccattttagccattacatg

SEQ ID NO: 19716 - DNA, 201 bp, Homo sapiens
ctttctgtagaatcacatggagatgacataattctcccagcaataatgtgtggcaacacatgcaaagtgctgtcaaccagagagtcactcttgaaccctartgtcagggttttaatttaaggatccatcatgcaagcatacaacatttgcatgactgacttttgctactcagtctccagccctccaaaggccaaatttata

SEQ ID NO: 19717 - DNA, 201 bp, Homo sapiens
caaatggaactaatacatacttacacaacatttcatataccttctcctcactacatggattactctcaaggataaaccatatactaggccacaaataactsttaaaaattcaaaaaagtgaaattatgtcaagtatcttctctgactacaatggaataaacctagaaatcaatgaggaattttagaaactatacaaacaca

SEQ ID NO: 19718 - DNA, 201 bp, Homo sapiens
aaatcgcctgaacccgggaggcagaggttgcagtgagctgagactgtgctactgcactccagcctaggcaacagagagagactctgtctcaaaaaaaaaaagaagactattcaaaaaaataaaaacacaaagaaaggaaggaattacatatagggacaatcattatttcattctgcttcccttgtatctgtagaaagtgta

SEQ ID NO: 19719 - DNA, 201 bp, Homo sapiens
tcctagtttgctcatagtttttattatgaatgggtattggatgttgtcaaatgttttttattatcaatgagtattggactgatgtaatcataattgttttctgtagcctattgatatgatggattacatttatcaatttttaaatgcttaactaatctttcatacgtggcatacatgctcataggtcacagagtatgtttc

SEQ ID NO: 19720 - DNA, 201 bp, Homo sapiens
aaaacttgctttatgaaactgagtgctcctgtgttgggtgcatacatattttagaaagttaggtcttcttattgaattgaaccctttactattatgtaatrcccttctttgttttctttgatctttgttggtttaaagactgcttgtttgaaattaggattgccatcctgctttgttctgttttctatttgcttggtaaat

SEQ ID NO: 19721 - DNA, 201 bp, Homo sapiens
aaatggcttgtatccaaaagatgggcaataacaaatgctggagaggatgtagagaaaagggaaccctcttacgttgttggtgggaatgtcaattagtacarccactatggagaacagtatggttcctcaaaaaactaaaaatagaactaccatatgatccagcaatcccactgctaggtatatacctaaaagaaagaaaat

SEQ ID NO: 19722 - DNA, 201 bp, Homo sapiens
aggcacagaaagaaaaattttgtatgttctcactcatttgtgggtgaagaaaattaaaacaattgaacttatggagttagagagtagaatcgtggttaccwgtggctggaaatcatagtgagtggggctggggggaagtggggtggttgagtggggctggggggaagtggggtggttaacgggtacaaaaaataaggccta

SEQ ID NO: 19723 - DNA, 201 bp, Homo sapiens
ttgttatagacagctttgtaatggaaacataattaagtgtaatttcatgtatattgttcatcctttcttaagttctttgataatttcaagtcttcaataayggagaatttgtatttttctttgtagttgcatttcaggatttgtgtccatatggccatggaactgtccctagtcttcatgatacacgtgaaggtacgcttt

SEQ ID NO: 19724 - DNA, 201 bp, Homo sapiens
gtgatctgtctaatactgccagtgaggtgttgaagggtcccactattattgtgtggcaatctaagtctctttgaaggtctctaaaaacttgctttatgaawctgagtgctcctgtgttgggtgcatacatattttagaaagttaggtcttcttattgaattgaaccctttactattatgtaatacccttctttgttttctt

SEQ ID NO: 19725 - DNA, 201 bp, Homo sapiens
taattataaaactatctgaggtatatttttgtcccagtctagcagcagctaacataggacaaatgaagggttgggttgcaggtttgtgccttttggtgaayggcagaggaaaatttgggcattattaaccaacagctgtatgctatcaaattaaattttgcatagcttgatttaactagccatatagctgatgctaatctg

SEQ ID NO: 19726 - DNA, 201 bp, Homo sapiens
ttttgcatttgctgaggagtgttttacttccaattacgtgattgacttcagagtaagtgccatgtggtgaggagaagaatgtatatttcattgttttgggktggagagttctgtagatatctatcaggtccatttggtccagtgctgagttcaggtcctaaatatctttgttaattttctgcctcagtgatctgtctaata

SEQ ID NO: 19727 - DNA, 201 bp, Homo sapiens
aacatttcaattcttttgcatttgctgaggagtgttttacttccaattacgtgattgacttcagagtaagtgccatgtggtgaggagaagaatgtatattycattgttttggggtggagagttctgtagatatctatcaggtccatttggtccagtgctgagttcaggtcctaaatatctttgttaattttctgcctcagt

SEQ ID NO: 19728 - DNA, 201 bp, Homo sapiens
tacatttagcaagacaatggagaaaaaaaatcatcagtgtacactgttgtgagtcaagactcaaactcaaaactttacaaacttacacataaatatctttyctttagaactcactaactatccataaaagtgggttttgatacagggtgtactaactcctctttatttagtcacttaaaaaatattccctttccttttaca

SEQ ID NO: 19729 - DNA, 201 bp, Homo sapiens
cttacagattgaaaaacttaatattgttaagatggcagtactctccaagtcgatctgtaaatgcaacacaatccctgtcaaaaatgaagcttgcttttttkcagaaattgaagaactaatcttaaagttcatatggatgcaaaatacacatttttcgtagcagcacatagaatattctccaggatagagaccatatgttag

SEQ ID NO: 19730 - DNA, 201 bp, Homo sapiens
atcctatggatctcagctatttagacttcccagaaattgaagtagagcctttctagtaagtaacagtttagtttgcccccaaaatgtataattacatatgkaacccacagtataagatttgctattttctgtctctatatgaaggcgtgcattctgtaattacctaagaatgggaagaatctgcttaccgagcagaaacac

SEQ ID NO: 19731 - DNA, 201 bp, Homo sapiens
tataagaatggacagtctctctagggtgttcttagaattcattgatatctgagatcatgttatcactacttatcaaattattcattatattccgtttagtrtaagatttacaggaaatgttggttgacaaatatgaggttatgtggtttggcagtcagaaatctgtcagatggttttgtttagattggatttcctttttta

SEQ ID NO: 19732 - DNA, 201 bp, Homo sapiens
gggggtacatgtgcaggtttgttaccagggtatattgcaagatgctgaggtttgggatatgattgatcctgtcatccaggtactgagcgtggtacccaatmgttagtttttcaacccttcttcccttcctccctcatctattagtccctggtgtctattgttcccatctttatatccatgtgtagccaatgtttagctccc

SEQ ID NO: 19733 - DNA, 201 bp, Homo sapiens
caaagtccttcctgttgatttttccttcaaattatatcctgaatatatgttcccttcctcatcataaagccttacttcaagttctcaacatttatccctgractattatatcatctgtccacattaaacacaaggactatctttctaaaatattgataggcttatgtaattcttttgtttaaactccttcatagacactat

SEQ ID NO: 19734 - DNA, 201 bp, Homo sapiens
gcctagttgaacatatctcacagaaactgaacaagacacattggttgaaaccacttctagacttcagatatgacagctattaaatttttgatttatatcartttaaatcagtttttctgatatttgcagaccaaagctgcaaactgatatagtttcaaaaaagatcaaggagagatgggtggcagtatattcagtgtgcag

SEQ ID NO: 19735 - DNA, 201 bp, Homo sapiens
agaatccaactgggtttgttttatgttgtcaaagtcattttgggaataaagaaagacacaaaggcacgagaaaaattttttaaaatctgctttgggagacmgaatgtagtaattaaagcttcttttgtgctatgaatcatgaatgttattaacatcttatttacttagaacttgtttattctattgaaaatagttactata

SEQ ID NO: 19736 - DNA, 201 bp, Homo sapiens
cacagcacagtgagctaccctcacatttcccttcctgagcttttaacctagtctattccaattttaagctgacaataggtaaaaagagaggaaaaaagagrcactgttatctttactggcactaaagattcatgtagtgcaggaattaggaaaattaatccaatacttaaagaatggtgttgtttggtccactagagggtg

SEQ ID NO: 19737 - DNA, 201 bp, Homo sapiens
ctcattatctcatagctgtgaggagtcaggcaagctaccatcttctctacacttcagtttcttctaataagtgtccaataaaatattcttcattattattmttattaagaggaggaggaggatatgcctgctctggacctatataaatatgtcatatggtccttctaatagccctgtgtgataagtatagttattccaaat

SEQ ID NO: 19738 - DNA, 201 bp, Homo sapiens
atactttaacattttttccagctattatcgcttaaaatgttttaagaaccattgatttatatgaaatatgaaaattccttgacatgccaccccccaccccygattgccaaccagacaactcattttcaatacttgaaatacttttatgggttcaaagtcattacattttacgtgtcctgaatatttcattaaggctttaac

SEQ ID NO: 19739 - DNA, 201 bp, Homo sapiens
agaaggaagtgaggttattattgtgaagttctggaaataccaaatacagcacatgtattttatttggtaatcaatgtggagtaattgaaggcttttgagamcaaattgtaatgcagggttgggggcttgagaatagagagaaatgaaactagttatgaggtagaattgccaaaacaagtttcagcgttttattccccattt

SEQ ID NO: 19740 - DNA, 201 bp, Homo sapiens
agcatgaatcctcattttattcagataagaccaacgtacctaatgatttactaaggtgggttttcttagaggagagttttgatttaccaaaaaattatgayaaactctttttatctcttgcctccttatgttataaagtcctaagtctctacctgaacattcaaagccttacctaacctgtattcctgagtcatctctaac

SEQ ID NO: 19741 - DNA, 201 bp, Homo sapiens
agataagttttttcatgtgctgctgaattcagtttgccagtattttattgaggatttgtgcattgatgttcatcaagaatattggcctgaagtttttttttgttgtatttctgccaggttttaatatcaggatgatgctggccccatagaatgagttagggaggagtccctccttttcaatttttgttaatgctttcagta

SEQ ID NO: 19742 - DNA, 201 bp, Homo sapiens
ttctaaatatacagtcatgtcatctgcaaacagggacaatttgacttcctcctttcctaattgaataccctttatttctttcttctgcctgattgccctgrccagaacttccaacactatgttgaataggagtggtgagagagggcatccctgtcttgtgccagttttcaaagggaatgcttccagtttttgcccattcag

SEQ ID NO: 19743 - DNA, 201 bp, Homo sapiens
gctgagacgatggggttttctaaatatacagtcatgtcatctgcaaacagggacaatttgacttcctcctttcctaattgaataccctttatttctttctyctgcctgattgccctgaccagaacttccaacactatgttgaataggagtggtgagagagggcatccctgtcttgtgccagttttcaaagggaatgcttcc

SEQ ID NO: 19744 - DNA, 201 bp, Homo sapiens
tctgttattggtgtataggaatgcttgtgatttttgtacattgattttgtatcctgagactttgctgaagttgcttatcagcttaaggagattttgggctsagacgatggggttttctaaatatacagtcatgtcatctgcaaacagggacaatttgacttcctcctttcctaattgaataccctttatttctttcttctg

SEQ ID NO: 19745 - DNA, 201 bp, Homo sapiens
agttcactcatgatttggctctctgtttgtctgttattggtgtataggaatgcttgtgatttttgtacattgattttgtatcctgagactttgctgaagtwgcttatcagcttaaggagattttgggctgagacgatggggttttctaaatatacagtcatgtcatctgcaaacagggacaatttgacttcctcctttcct

SEQ ID NO: 19746 - DNA, 201 bp, Homo sapiens
aggctttgtcatagggagaggagagactttgtttaaaggtctttctctccatctgcttattatccagattaaatctgcacctccttccaacattatctcaratgttgcctccaccagaacctttctgactgcccaacattagcactgtgtatgcagctccataaaagctctatgttgtattttcttttttgtaggtgtcct

SEQ ID NO: 19747 - DNA, 201 bp, Homo sapiens
tttattttgttgagcagtggtttgtagttctccttgaagaggtccttcacaccccttgtaagttggattcctaggtattttattctctttgaagccattgygaatgggagttcactcatgatttggctctctgtttgtctgttattggtgtataggaatgcttgtgatttttgtacattgattttgtatcctgagactttg

SEQ ID NO: 19748 - DNA, 201 bp, Homo sapiens
agctttctacctatggctagccagttttcccagcaccatttattaaatagggaatcctttctccattgcttgtttttctcaggtttgtcaaagatcagatrgttgtagatgtgtggtattatttctgagggctctgttctgttccattggtctatatctcagtaccatgctgttttggttactgtagccttgtagtatagt

SEQ ID NO: 19749 - DNA, 201 bp, Homo sapiens
ccatgcttatgtcctgaatggtattgcctaagttttcttctagggtttttatggttttaggtctaacatttaactctttaatccatcttgaattaattttygtaaaaggtgtaaggaaaggatccagtttcagctttctacctatggctagccagttttcccagcaccatttattaaatagggaatcctttctccattgct

SEQ ID NO: 19750 - DNA, 201 bp, Homo sapiens
tcccattctgtaggctgcctgttcactctgatggtagtttcttttgctgtgcagaagctctttagtttaattagatcccatttgtcaattttggcttttgwtgccattgcttttggtgttttagtcctgaagtccttgcccatgcttatgtcctgaatggtattgcctaagttttcttctagggtttttatggttttaggt

SEQ ID NO: 19751 - DNA, 201 bp, Homo sapiens
attgacattctatattgtatcctgcaaacttactataattgcttattagttccaggagtttcttgctggtctttaggattttctacatagacgatcatgtmatttgcaaacatagatagttctgtttcttccttatcaatctgtataaatatatttcttattcttgtcttattttagtaaaatgtagaataggagtggtga

SEQ ID NO: 19752 - DNA, 201 bp, Homo sapiens
tatcattgatggacatttgggttggttccaagtctttgctatcgtgaatagtgccacaataaacatatgtgtgcatgtgtctttatagcagcatgatttawaatcctttgggtatatacccagtaatgggatggctgggtcaaatggtatttctagttctagatccttgaggaatcgccacactgtcttccacaatggttg

SEQ ID NO: 19753 - DNA, 201 bp, Homo sapiens
tcctcatttttgatgatcttgacagttttgaggaacattggtcaggcatgttgtaggaatcccctctactggatttgatgtttttctcattaagctggggytggttatgggtttggggaagcaggaaggcaaacgtaaagtaatttttttgtcacgtcatatcaagattgcatagtagcaacatgatttatgatttatgaa

SEQ ID NO: 19754 - DNA, 201 bp, Homo sapiens
ataacttagaaggacttggttatcaatattactgagagagatatgaatgagaataaatgtactcaagtatggataatttgtgaaaaatagctataattctrtgaaaatctgttagaaaatggaagggaattctgcattaaataattggtttttctctcatttctgtctcttgcccattccatatgtaattcgctttctgga

SEQ ID NO: 19755 - DNA, 201 bp, Homo sapiens
aatctcttctattatgacttttgctcagaagcaaatatttaatttctaagtacgtgaaaataatatccttcatctaatgcataagtaataacttagaaggrcttggttatcaatattactgagagagatatgaatgagaataaatgtactcaagtatggataatttgtgaaaaatagctataattctatgaaaatctgtta

SEQ ID NO: 19756 - DNA, 201 bp, Homo sapiens
aactgtgtatctgagtttatctgaaattggtttttgtgataaatcaagaaatctcctttaatgatctctaaatttagggacataaggggttatgatgtaakgtgaaatatatagtttatatgtcatatggatgctcaaatttggaaattttacatttgttataagaagttattgtgctggataattttttcttatcattgg

SEQ ID NO: 19757 - DNA, 201 bp, Homo sapiens
atccatgtccataaaaaggacatgaactcatccttttttatggctgcatagtattccatggtgtatatgtgccacattttcttaatccagtctatcattgwtggacatttgggttggttccaagtctttgctatcgtgaatagtgccacaataaacatatgtgtgcatgtgtctttatagcagcatgatttaaaatccttt

SEQ ID NO: 19758 - DNA, 201 bp, Homo sapiens
tgtccaggaatttatccatatcttctagattttctagtttacttgcatagaggtgtgaataatattctctgatggctgtttgtatttctgtgtcatcagtrgtaatagcccccttatcatttctgattgtgtttattgtgtttatgtaaatcttctctcttttcctctttattagtctagctagtggtctattttattagc

SEQ ID NO: 19759 - DNA, 201 bp, Homo sapiens
aggaaggcaaacgtaaagtaatttttttgtcacgtcatatcaagattgcatagtagcaacatgatttatgatttatgaatactgactttgatcatatggcygaaatagtgtctttcaggtttctccactgtaaagttatgatttttctcccactttttgttctgcaatctttggagtgaagttactatgtgtagcctacac

SEQ ID NO: 19760 - DNA, 201 bp, Homo sapiens
gtgtgattgttgttactacggtatcgtttcttttaggaccttccaggtaacagagcagagaaatatatgtatgtatctaattcatgtatatatacacatcwatcaatgtttctgtatataaccatctttatcattttaaacatgaattattactgatgtctccatcgctgaatttttaccatgggaagtgttctggcttcc

SEQ ID NO: 19761 - DNA, 201 bp, Homo sapiens
cacttctctaaagagtactggttcctttttaatggataaagacactagaaaacaagatctgggcactaggaactaggtgtgattgttgttactacggtatygtttcttttaggaccttccaggtaacagagcagagaaatatatgtatgtatctaattcatgtatatatacacatcaatcaatgtttctgtatataaccat

SEQ ID NO: 19762 - DNA, 201 bp, Homo sapiens
tgtaaagttatgatttttctcccactttttgttctgcaatctttggagtgaagttactatgtgtagcctacacttaaagagtaggaagttattctcttccktctttaggttggagtaactacataatttttggaatttttctgcatgaaataattgtgtcttctccccaatatattaacttagtcaatgtattaatccatt

SEQ ID NO: 19763 - DNA, 201 bp, Homo sapiens
gtatcgtttcttttaggaccttccaggtaacagagcagagaaatatatgtatgtatctaattcatgtatatatacacatcaatcaatgtttctgtatatarccatctttatcattttaaacatgaattattactgatgtctccatcgctgaatttttaccatgggaagtgttctggcttcctccccttgcttatctaaatt

SEQ ID NO: 19764 - DNA, 201 bp, Homo sapiens
cctcacccagttcctccaattgttaacatcttacattagtttgggactattgttccaacagattaatcaatattgatgcattattttaactaaattccacrgtttattaagattgttcttaatttttacttaatgtcttctttcggttccaagatcccatccagcgtaccaaattacatctagttgtcattgtctccttag

SEQ ID NO: 19765 - DNA, 201 bp, Homo sapiens
aagtgttctggcttcctccccttgcttatctaaattcccactccaacagtgagaaaactagctgccaccatctgccatccatctattattctagaaaacaygaacagaagtatcataatttctaacttatatctctgataaagttctatctctgtattttatcaactagagtacagtccttttgagtagttctctctgtct

SEQ ID NO: 19766 - DNA, 201 bp, Homo sapiens
caaaaacaaaacaaaataaaacaaaaaaacaaaagaaaattttcagatttaagaaaaatcaaccagatagtaaagagagttttcatatgtcccccaaccckcacccagttcctccaattgttaacatcttacattagtttgggactattgttccaacagattaatcaatattgatgcattattttaactaaattccacagt

SEQ ID NO: 19767 - DNA, 201 bp, Homo sapiens
aagttgttcatcaaatatgtcttttgcatatatgttttcccaggctgtagtttttcttttcattctgttaatggtgattcttttagtctttcccaaagtamatttttttccttttaattaagttcaatatatccatttttccttccctggattgtgtttttcgtgatgtttctaaaaactagttaccaaacacaaggtcac

SEQ ID NO: 19768 - DNA, 201 bp, Homo sapiens
tcaaatctgtcctgaaattagctgtcttcagtctgaattaagctgctcttcatgccttgggcatatgtgtgtatgtatgtatgagggttgtacagaacacrctctagtgggtgtgtctcttgttcttcacacaggaatgagaaggcaggggatggaaaggactttccgcttctaaaatgctttgatgttcttccgcccctg

SEQ ID NO: 19769 - DNA, 201 bp, Homo sapiens
attatagaggtgtaaactcttgttttacagttttcatttaagagaataagctgtggaattttgaggaacaggttggctatttttatgattcaattatcttkgttcgctttgcacttgctgtggcttccatgatttatgccaacagtcttggttttgtcttcagcagaaacaccaggggaagttctcatgacatctctcacc

SEQ ID NO: 19770 - DNA, 201 bp, Homo sapiens
ttgccttgcctcaactgatctttcagagtatttgctcaaatctgtcctgaaattagctgtcttcagtctgaattaagctgctcttcatgccttgggcataygtgtgtatgtatgtatgagggttgtacagaacacactctagtgggtgtgtctcttgttcttcacacaggaatgagaaggcaggggatggaaaggactttc

SEQ ID NO: 19771 - DNA, 201 bp, Homo sapiens
gatactttttctatattttctttgtacattcaggtatttcccacattttctacaacagacttctgtttataaccagaaaagaaagacagaagtctatcacraacacagtattcataaaaagatagattgatatatatttttaggccttagaaaagtgttaggatatctgattgccaactctgttttgcaaagtttcataac

SEQ ID NO: 19772 - DNA, 201 bp, Homo sapiens
aaaaagtcagctgttgacagttgtctttttgtctttaatgtttttactgtgatatgtctacatttggatatctttgcatttttactacttaaactttgttwaacttcttggaggtataaattaatagtgtttcatcaagtttggaagttttctgctgtttctctgaatatcttttactgttcttttcctcctcttcctctg

SEQ ID NO: 19773 - DNA, 201 bp, Homo sapiens
aatccctttacctactataaattagtaattagaaaataattactcattaattggaaaatccaattttctaattactctagagtcactgttggtaatttctrtctttctagaaacttgtccatttcatatgtctgatttgttggtaaacttgttcacttcatgttcagagtattacttcattatcctctttatttctgtaaa

SEQ ID NO: 19774 - DNA, 201 bp, Homo sapiens
cacctcttccactagctcagagacatcactgtgaactagaaaaaacacccccttttaaaaacactttattgccagaaatttgtcatgataaaacatagaartctagatcgactatactttgaattacctgtgcctggagactgcagtatgcctttccttttacgtgctggttctggatggttcaggccactttcttgagtg

SEQ ID NO: 19775 - DNA, 201 bp, Homo sapiens
catctcaaaaacaaaacaaaataaaacaaaaaaacaaaagaaaattttcagatttaagaaaaatcaaccagatagtaaagagagttttcatatgtcccccmaccctcacccagttcctccaattgttaacatcttacattagtttgggactattgttccaacagattaatcaatattgatgcattattttaactaaattcc

SEQ ID NO: 19776 - DNA, 201 bp, Homo sapiens
ctgaaacttacacttaagcttaacatgtgcttaatatacattagtcgatttttgatgatattgtgaaatgtttgtttatgacagataaaaatgcagaattygaagctacattgtatacaatggggattctgtatactcattttcttaatagactttattttaaagaaaattttcagctgggctcagtggctcacgcctgta

SEQ ID NO: 19777 - DNA, 201 bp, Homo sapiens
ccatcatgcaagcatacaacatttgcatgactgacttttgctactcagtctccagccctccaaaggccaaatttatacaacttggtcccaaacctcaagtrcacacaaaaaagcacttaccataaatcacattgcatccttttttccttcttgtattaataggatcctcttttgccctttggaaaatttcccttgtctgtc

SEQ ID NO: 19778 - DNA, 201 bp, Homo sapiens
gagagtcactcttgaaccctagtgtcagggttttaatttaaggatccatcatgcaagcatacaacatttgcatgactgacttttgctactcagtctccagmcctccaaaggccaaatttatacaacttggtcccaaacctcaagtacacacaaaaaagcacttaccataaatcacattgcatccttttttccttcttgtat

SEQ ID NO: 19779 - DNA, 201 bp, Homo sapiens
caaccagagagtcactcttgaaccctagtgtcagggttttaatttaaggatccatcatgcaagcatacaacatttgcatgactgacttttgctactcagtytccagccctccaaaggccaaatttatacaacttggtcccaaacctcaagtacacacaaaaaagcacttaccataaatcacattgcatccttttttccttc

SEQ ID NO: 19780 - DNA, 201 bp, Homo sapiens
aaccaaggggaaaaaaacttccagttttcttctttctgtagaatcacatggagatgacataattctcccagcaataatgtgtggcaacacatgcaaagtgytgtcaaccagagagtcactcttgaaccctagtgtcagggttttaatttaaggatccatcatgcaagcatacaacatttgcatgactgacttttgctactc

SEQ ID NO: 19781 - DNA, 201 bp, Homo sapiens
ttgctgtgactagaacttgcagtgattactgaagtattctgatttctcaagaaaagccagctttgcagatttctatgtaaaatatcctagtttttaaataytggtgtatcagaggtcagaagaccatcctcaaactcgatgattcttagataggatcacaggactgaaaaaaaaagctgttatattcatggctataatttg

SEQ ID NO: 19782 - DNA, 201 bp, Homo sapiens
tttgaacaagtcctgctcttcagatctaggaatgacaatgatgtctttttcttattagtgcagggattctacagtatctcttatagttttcctacatgctrccttcacagtccttttattatattctcttcaaattaccctaatttggatatgccatctgttctttgccagaaagtattgactgatacaatatcactattt

SEQ ID NO: 19783 - DNA, 201 bp, Homo sapiens
atccatccccatagagcttttctcagagcgtgctccatacactgaccttaatctgcaaaaccaaaagtccatccagaaggttcaacaaaataaaatctgaytattagcttaaggtacaaccatagcctcttcctccaatcttgttctgggaagacttaatgtatttgactgtagtttcttctggttaaggagactgtaata

SEQ ID NO: 19784 - DNA, 201 bp, Homo sapiens
ttttggcgattcttgcctggaggttccacttgtatttccccaaaatgttcacattttcttgtgcctgaggctttgtcatagggagaggagagactttgttyaaaggtctttctctccatctgcttattatccagattaaatctgcacctccttccaacattatctcaaatgttgcctccaccagaacctttctgactgccc

SEQ ID NO: 19785 - DNA, 201 bp, Homo sapiens
agtagcctctcaaaccctcttgaagcttgagcccctctcccctcttagacctgacagattctgcactgtataccaaaacgactttttaaaaacaaatcatycttctgcttaaaattattcagttgctacccgctgccttaggaagaagtccatataccttaacacacctgcaacgccatgcagaattccatcctgtcctgc

SEQ ID NO: 19786 - DNA, 201 bp, Homo sapiens
aaacatagaaaaaccaagtcttaggtgtaaaagaatatctagcttgttttcagttaacattattttatttttcttgcaatgaaaaatttttttaaattgtkgtaaaatatacataacaaaatttaccattttagccacttttaagtgtatagttcagtggcattaagtccattcacactgttgtgtaaccatcaccaccat

SEQ ID NO: 19787 - DNA, 201 bp, Homo sapiens
cttcttccttccctctccagttccctctttgtatctatgattttttagaacttctcaaaattaaccccaggagagccaatctgataaattatcctttgctyaaatatatttaatactaagatacagggtgatgaaatgatttttaaaaagcagatgttattgtgaaacagggagctgtaacccagcaaaactggtaccttc

SEQ ID NO: 19788 - DNA, 201 bp, Homo sapiens
tgtctatatctgataaagacttgtatccaggatatataaacaatttctacaactcaataatagaaagaaaaacaacccaataaaaaaatcagccaaaaaaycttgaacagcctttttatgtaaaaaggcacagaaatagttaataagcacaagagaaagtgattaatatcagtcattagggaaatacaaattagaatcaca

SEQ ID NO: 19789 - DNA, 201 bp, Homo sapiens
ttgaaagagaacaaagcaaactctaatgctttcaaacttactataaggcttcagtaatcaagacactgtggtactgatctttgacaaagctgtcaaagccrttcaataggaaaaggaaagtcccttcaacaaacagtgctgaaactggtatatatggtcagatatatctatatatgtctacagcgatctagatatgtatag

SEQ ID NO: 19790 - DNA, 201 bp, Homo sapiens
taatttttttctgttacttaactagaattatgaaacaaactctcctaatcattcagttaaaactgtttggagattttgtgttaattattttaactatcacrttaccaggaatattgaaatatggctccacctcttccactagctcagagacatcactgtgaactagaaaaaacacccccttttaaaaacactttattgcca

SEQ ID NO: 19791 - DNA, 201 bp, Homo sapiens
tgtgttgtggagaagtctgactctagcctgatttttcttctcctaagtcacttgctgttttttcctggatgctcaaagagtttttactttataattatttwttttttttgttctgtataagttttagtgaaaagcatgtgatcatttgattggaatgatagacttcttccttaattttggagaaacgttctattgtttctt

SEQ ID NO: 19792 - DNA, 201 bp, Homo sapiens
aatgtgttgtggagaagtctgactctagcctgatttttcttctcctaagtcacttgctgttttttcctggatgctcaaagagtttttactttataattatkttttttttttgttctgtataagttttagtgaaaagcatgtgatcatttgattggaatgatagacttcttccttaattttggagaaacgttctattgtttc

SEQ ID NO: 19793 - DNA, 201 bp, Homo sapiens
tcgccatcggaaggattggagcagtagcctctcaaaccctcttgaagcttgagcccctctcccctcttagacctgacagattctgcactgtataccaaaaygactttttaaaaacaaatcattcttctgcttaaaattattcagttgctacccgctgccttaggaagaagtccatataccttaacacacctgcaacgccat

SEQ ID NO: 19794 - DNA, 201 bp, Homo sapiens
gcaaatcgccatcggaaggattggagcagtagcctctcaaaccctcttgaagcttgagcccctctcccctcttagacctgacagattctgcactgtatacyaaaacgactttttaaaaacaaatcattcttctgcttaaaattattcagttgctacccgctgccttaggaagaagtccatataccttaacacacctgcaac

SEQ ID NO: 19795 - DNA, 201 bp, Homo sapiens
aaaaccaaaagtccatccagaaggttcaacaaaataaaatctgattattagcttaaggtacaaccatagcctcttcctccaatcttgttctgggaagactyaatgtatttgactgtagtttcttctggttaaggagactgtaatattttcttgtggcacctagggtctcccctactcatagtctgctcaccctccaaatct

SEQ ID NO: 19796 - DNA, 201 bp, Homo sapiens
ccagatatacagaattgacctggattcctaccttcctgctccttgccaatcctctcaaaagttgtgcattactctccattcccttgggcaaatcgccatcrgaaggattggagcagtagcctctcaaaccctcttgaagcttgagcccctctcccctcttagacctgacagattctgcactgtataccaaaacgacttttt

SEQ ID NO: 19797 - DNA, 201 bp, Homo sapiens
tgtgtgagccctggagagaggcacagcccacctttgcacacaaaggccaaaggaagacaagtgtgtcctctccatatcccatgaacaggtgcctcgccccmgccatctggttctttttctcagcttttgtaccttcatcaagtgatgcaaggataaagggacagtttatgctactgtgctcagcatcaggggtgggtagag

SEQ ID NO: 19798 - DNA, 201 bp, Homo sapiens
agccaaaagggtaaactgtagtgaatattccttatttgttggctgcacaaacctcttccttttggggagaaatctcccactgtgtgagccctggagagagrcacagcccacctttgcacacaaaggccaaaggaagacaagtgtgtcctctccatatcccatgaacaggtgcctcgccccagccatctggttctttttctc

SEQ ID NO: 19799 - DNA, 201 bp, Homo sapiens
ccctccggaagaaggtttgagtgatcccactgggtaaagaatcccagccagctgaggtgctagcagagggcaaagcaaacagaaatgcttggtggaggaakaaagtcataaataccagtgacagtctcatggtcacttgcagaaacaaagactaaagcctctacccaatttttctttcttgttgaatcatggttatatttg

SEQ ID NO: 19800 - DNA, 201 bp, Homo sapiens
cctaggcgacagagtgagacacggtctcaaaaaaaaaaaaaaaaaaagaaagaaagaaagaaaaaagggtaaaatgcactactgaagatggatttaagtcmtaatgtacaatagatactttgaaaattcagggcctggttctgtagatgtagtaattgttctttaaccagcaaacagtaaacaattctgtttttcccaaaa

SEQ ID NO: 19801 - DNA, 201 bp, Homo sapiens
ggattcgagtgctctccagcattatccccagaatgaactctagtgggcattttgtccacttcaagggaaaccaagtattggcacactacacaacatttctsccagccaaagaattcactttactttagaaatagccagtcttatcataggaccctcatctagagtcaatcatcttataaaagcgtaaaatgtgctgggcgc

SEQ ID NO: 19802 - DNA, 201 bp, Homo sapiens
tcatctgcagcaatgtggatagaactggaggtcattatgttaagtgaaataagccaggcacagaaaaacaaatattgcatgtctcactcgtatgtagcagmtaaacatgttgcacaaagtcattttaaagatccaagaggctccttcaatgaagaaaagcctaatgaccacaaaggacaataaaatcactggtgtagagaa

SEQ ID NO: 19803 - DNA, 201 bp, Homo sapiens
agtagatacccaaaagaaaggaaatcagcatatcaaagatatatctgcactcccatgtttattgcagcactattcacaatagccaaggtataaaatcaatstaagtgttcatcagtggacaaatagatgaagaaaaggtggtatatatacacagtgaaatagtattcagccataaaaagaaagagatcctgtcatctgcag

SEQ ID NO: 19804 - DNA, 201 bp, Homo sapiens
attaatgcttctggccacatacactttttttctacttgtggttagggaaacacagtgagggatgcttccagaatcattgtgcacatcttttttgggacttstatttggggatattgagaaagtaatgttactaattattgtctgcataatcagtatgagtttttcaaggagcagatggccattgtagtagtctgttctgcc

SEQ ID NO: 19805 - DNA, 201 bp, Homo sapiens
atcagggtatctagaatatcaatcacctcaaacatttactttttctttgtattgataacacttgaaatcttctcttctagctattatgaaatattccacamgttatagttaactattgtcaccctactgttctatcaaacaatagtacttagcccttctgtgtttgtactcattaaccagcctcttttcattctcttccac

SEQ ID NO: 19806 - DNA, 201 bp, Homo sapiens
cattttaaaaagttttactgatatgtaataattgtctgtatgtatggggtacatgtgatattttgatatatgcatataatgtataatgatcaaatcagggwatctagaatatcaatcacctcaaacatttactttttctttgtattgataacacttgaaatcttctcttctagctattatgaaatattccacacgttatag

SEQ ID NO: 19807 - DNA, 201 bp, Homo sapiens
gcagtctaagatgttgaaataaaatcttgtatatttgaaaaaactttggatctggtaaataccaccaaaatagatataaaattcttgacctcttacccaastcctagaacaaagtcattttaaaaagttttactgatatgtaataattgtctgtatgtatggggtacatgtgatattttgatatatgcatataatgtataa

SEQ ID NO: 19808 - DNA, 201 bp, Homo sapiens
atatttttgacaatgtttaatcaaccatgcagtctaagatgttgaaataaaatcttgtatatttgaaaaaactttggatctggtaaataccaccaaaatasatataaaattcttgacctcttacccaactcctagaacaaagtcattttaaaaagttttactgatatgtaataattgtctgtatgtatggggtacatgtga

SEQ ID NO: 19809 - DNA, 201 bp, Homo sapiens
acaaaaaccatattatatccaggtgaacaatttatgttattattaatatagttattaatataatgttaataatgtcaatctggaatcataaaactaaatayctttttaaaatgaaagtgtactaaagatactttcagacaaatcaacactgtgagagtttgtcacctaaagactcctagtacaagaaagttctgaagtatg

SEQ ID NO: 19810 - DNA, 201 bp, Homo sapiens
cacttctaattttaatattacactatgtaaaatatcagtaaattacagacacaagcctcaaagtccattcaaaagagggaaatctaagaggagtggggctmctccgcttatgaaacttggactgtcaggtcatgagctctttcaggggaagcagaaacattcttccctcaaacatcaactcttcaccacttagacactgag

SEQ ID NO: 19811 - DNA, 201 bp, Homo sapiens
tagttgggcatgatggtgtgtgcccataatcccagctactcgggaggctgaggcagaagaatgcttgaacccgggaggcagaggttgcagtaagccgggawtgtgccactgcactccagcctgggcaacagagcaagactctgtctcaaaaaaaaacaaaaataatccattttaaatccacttctaattttaatattacac

SEQ ID NO: 19812 - DNA, 201 bp, Homo sapiens
gcactattccagagcaatgtgtggccacgaggtgagcagcttaggtaggatggatgtaattatgattggaaacaaggaaggccaggaagctggaggccagrgtgtcaaatatactattaacatggatgttgttccaggagaattatggcagcagtagaactggagaggaagagattgatttaggtgttctcaagacttcaa

SEQ ID NO: 19813 - DNA, 201 bp, Homo sapiens
taaagagaattgtttatttaagataatagataacttaagaatgctggtgtactgataaagaaaagagggaagtgtttgaagagtgatttcatttgttaagytggaggtgatgtgatccaaaggataaagtggaggatttggcctctgggttgaaagtcgacatttcttcccactagcaagaggtgaagcaaagaagttcaa

SEQ ID NO: 19814 - DNA, 201 bp, Homo sapiens
tctgttgaacattgcactgtttggtcctagcaatggcaataggcaatacaaagaaatgaaagtcatgtatttggaaaggaggaagtaaaattgttttactkgtagatgatgttattgtctatgtagaaaatccgatggactttacaaaaatctactggagctcataagtaagttcagcaaggctgcaggatacaaactaat

SEQ ID NO: 19815 - DNA, 201 bp, Homo sapiens
gatgccaaaatctgttcccaaaacagtcagcaagataaagaatagaagagaatttcctcaacatgaaagaagggcatttccaaaaaaactgtaatatggtracaaagcaaggatagtcactctcgtcacttctgttgaacattgcactgtttggtcctagcaatggcaataggcaatacaaagaaatgaaagtcatgtatt

SEQ ID NO: 19816 - DNA, 201 bp, Homo sapiens
gtgaacaagagggaagacagaaggagatgaggtcagataagtagctcagagtaaggtcattgttgaacctcataaggaatgatggcatcattggaattttmctctgagtaggagaaaaatcactggaggtttttgaaccaaaatatcatatgatctattttgatgctactataaatgggattattttcttaattttatttt

SEQ ID NO: 19817 - DNA, 201 bp, Homo sapiens
agcttcaaaatacatgaaataaaaacagaactgcaaggaggtgtagacaaatccataattaatggagatttcagtaccccctctcaataattgagagtagrtaagaagtcaatacgggcatagaaaactttagcactgctgtcaatctacttgacctatttaatatttatagaacactttgccacacagcagcagataata

SEQ ID NO: 19818 - DNA, 201 bp, Homo sapiens
gaatccaaattgaacttctacagatgaaaactacaatgtctgaggtgaacatttttctggatgggattaatgggagatgagacattataggcgaaaagackagtgagcctgaaaacatagcaacagaaattatttgaaataaagcacaaagaaaaaaaggcttaagaatgtaggagagcataagtgagctctgtgacaact

SEQ ID NO: 19819 - DNA, 201 bp, Homo sapiens
attttgagatctagaagcgtgtatatctgcccgtcctaaaaaatgttgctgatcttgctattgtggatcgtagctgctctagtttcattctccagcctttkattgtgtaaactatgtctaatatgcccctgagtttctgagtctgctctcaccatcaagccaaacctactcttgatatttgtcaatacagcagtcatgcag

SEQ ID NO: 19820 - DNA, 201 bp, Homo sapiens
aattcctgatggactgtatttctaatagacctgtttttactagaccaaaacttcacttatttacatatgaaccctgtagccagagaagtctgagcaattgmtcttggttttcatcccacagcactgagttcagaaatggccttgaaccagatctggccagactgggatgggaaaaggtaataaattagggctgtgttcctg

SEQ ID NO: 19821 - DNA, 201 bp, Homo sapiens
ttttgtaaaggccagagagtatatattttagaccttgctttctccattgcaaatactcaactctgccattgtagtgcagaagtgaccatagataatatgtraatgaaagagctaggatgtgtttcagcaaaattgtatactttatagacactggaatttgaatttcacacaattttcacttgtgactgagtattatttctt

SEQ ID NO: 19822 - DNA, 201 bp, Homo sapiens
ttgtgttgacttgattagaggtacataggaaaaacttaaagtgaagagacagatcaaagaatcaaagaatcactacaagaaaaatttcttacggcgaatgytctaaccattggaatggtttccagatgagaatccccaagcactcattaactttaacagttccctggaaactaagcagattacttcatcagtattgagcca

SEQ ID NO: 19823 - DNA, 201 bp, Homo sapiens
tccattgcaaatactcaactctgccattgtagtgcagaagtgaccatagataatatgtgaatgaaagagctaggatgtgtttcagcaaaattgtatacttyatagacactggaatttgaatttcacacaattttcacttgtgactgagtattatttctttgatttttcaactacttaaaagtgtcaaaattcctcttagct

SEQ ID NO: 19824 - DNA, 201 bp, Homo sapiens
tgtctcaaaataaataaataaataaataatagctcccttgtgttgctctttttgtgaacttctacacaacacagcatcacattggtgacactgactttacmacttccttgtaagaaacccaacatagtctattctaagttttgagaatttcactaccgaatgaacgttccaaaggacatcaaagttatacatcattcatct

SEQ ID NO: 19825 - DNA, 201 bp, Homo sapiens
agattgtggcactgcactccagcctagcgacagagcaagactctgtctcaaaataaataaataaataaataatagctcccttgtgttgctctttttgtgawcttctacacaacacagcatcacattggtgacactgactttacaacttccttgtaagaaacccaacatagtctattctaagttttgagaatttcactaccg

SEQ ID NO: 19826 - DNA, 201 bp, Homo sapiens
ctcaccaaactagaatcatctaaccagtggcaaggtaaaatccctggagatggtttgtgttgacttgattagaggtacataggaaaaacttaaagtgaagrgacagatcaaagaatcaaagaatcactacaagaaaaatttcttacggcgaatgttctaaccattggaatggtttccagatgagaatccccaagcactcat

SEQ ID NO: 19827 - DNA, 201 bp, Homo sapiens
ttgaggaacaagtcagtcaggaagtgacactgtagccatggcttttgaagacagaagagacacttgtggaactaagggtggcaactcaccaaactagaatyatctaaccagtggcaaggtaaaatccctggagatggtttgtgttgacttgattagaggtacataggaaaaacttaaagtgaagagacagatcaaagaatc

SEQ ID NO: 19828 - DNA, 201 bp, Homo sapiens
aatttgtctcaaaaaaaaaaaaaaaaaaaaagaaccgaaaaacaatgaattattggcaatatctaaaaattaaatgtaaaatgtatttttcaatggcaagwtctttgataaataaacaagatttatgaaattatttataattaaataagaatttttttatttaaaaaacgtagattgaaaatattcagacatatcacaaag

SEQ ID NO: 19829 - DNA, 201 bp, Homo sapiens
ttcatgagtaaggaattgcccagatatatcctcattttagtctgcatcaaatcaagtttccagggagtcgcaggagaagttctctattttagtttttaacrtggctacaattatgaggacattaaatgtctcattatcttcaaggtaatattaatagcttaattttctgttcagtgtgagtccacgaatgtacatccatgg

SEQ ID NO: 19830 - DNA, 201 bp, Homo sapiens
accagtaggatatacataaagaaatttattgcaagaaattggcttacatgattgttgaggttggctaggtaagttggaaattcacaggacaggatcagcayggcaggctgaaacgctgtggcaggaactgaagttttggtccacaggaggaatttcttcttcctcaaggaaatctcagttctactcttaaagcctttcaac

SEQ ID NO: 19831 - DNA, 201 bp, Homo sapiens
gcataggcttaagaagaaataggtggactttgacttggttgcagcttcagcagagctatggacccacaggttcctgtgggttcaccgccagtatttctccytgaggaacaagtcagtcaggaagtgacactgtagccatggcttttgaagacagaagagacacttgtggaactaagggtggcaactcaccaaactagaatc

SEQ ID NO: 19832 - DNA, 201 bp, Homo sapiens
cccatcatattcttctgggagcttaaaatatgtttctttcactagagattatctaacttgtaatgttaatgtaactcgattaaattccatgcacaaaatayctatcacatcaactggcctattataaatgatcaaaaaaatcaactcccagctgggcgcggtggctcacgcctgtaatcccagcactttggggggccaagg

SEQ ID NO: 19833 - DNA, 201 bp, Homo sapiens
tgacatttttctaatatatttgtcccaaggctatgtgaaaccttggttatacacttaatggcccaacaccccaatcaacttttctatcatcaattcctcayctttaatgattaataattttggtaactaatagaatgactattaatgattaaatcacccaaaccttataacacaaattttaacccttctattccagagaag

SEQ ID NO: 19834 - DNA, 201 bp, Homo sapiens
tgaggccagagaggtagcaaagaccttgtacgggcatgtcaaacatgctggattttagctaagtgccattacaagtattggcagttttaagtaaagaaacrgtggggatagaatgaatttttagaaagaacacctggttggtagtgtggagatggactggaaggatcatcgagaaaccagggagagcaactaggcagcact

SEQ ID NO: 19835 - DNA, 201 bp, Homo sapiens
aggctgtttatgtctgcatgtgaggatgtgggagactcttaaaatacctagagagatatgattttggacagaagagaactgaggttctgtgtcgtaaaaastggtagcttcaagttaacaaatttgagaactgacatttttctaatatatttgtcccaaggctatgtgaaaccttggttatacacttaatggcccaacacc

SEQ ID NO: 19836 - DNA, 201 bp, Homo sapiens
aagaatagctattatcaacaaattatgacaccttttgcactttcagcaattcccctaatgaaacatattatctttactatggtagttcttttaagaattcyggtaactacttagaaatgttaacaagatgattcacaagcaaagggtagtacaaattctcctatgcctaaacaaggatatatttctgagtgtctaagattt

SEQ ID NO: 19837 - DNA, 201 bp, Homo sapiens
tagattttaatagtcccctatgttacgaatcttgccttgccaatatagaaacaaaactacctttcctacgtttctttgccccaagcataaagaaacatgayttcatttctgcaacatacacagccataagatgactgagttggaatagaactacataaggaaacaggaaagggtggggtatctcttcagagggtagcaata

SEQ ID NO: 19838 - DNA, 201 bp, Homo sapiens
caggaatagacataaacaagagtgatccaggcagtgggagcataagtaggggagatgatgtgaactgaggccagagaggtagcaaagaccttgtacgggcrtgtcaaacatgctggattttagctaagtgccattacaagtattggcagttttaagtaaagaaacagtggggatagaatgaatttttagaaagaacacctg

SEQ ID NO: 19839 - DNA, 201 bp, Homo sapiens
caggcattaggatagcggcaaccacagggagccaggccaggatgtgaggaggtctcctaagaactgtgggtgcttgcatctccagaaaggatgcaaagcasagccctctgtactagtagactcagaatcatgtactatgcatgtcaaactgtctatattgcttacacattctgcatatttgtcatttcttcactggttgtt

SEQ ID NO: 19840 - DNA, 201 bp, Homo sapiens
atacattgctgcaggtactgtagaatggtatagccagtgtcgaaattgttctaatagtttctcataaagttaaaagcacatctattttgctgggtgtggtkgctcacacctgtaatctcagcactttgggggccgaggtgggcagatcacctgaggtcaggagtttgaggccagcctggccaacatggtgaaaccccgtct

SEQ ID NO: 19841 - DNA, 201 bp, Homo sapiens
atgcatccttaactatagttacaaaatcagtcaatttacattttttatttggtactgaaataacataagtaaacttattaaatttttaattttccattggyataataaaataaatagcaaaactatcatacctgctatatattgctctagtatttagtggcattttaataacatatgaatgaaaacttaaaaattatcttt

SEQ ID NO: 19842 - DNA, 201 bp, Homo sapiens
tagcgaccaaccttttctccacaacctcggcagcatttgttattttttgactttttaatagtagccatactgactggtgtgagatagtatctcattgtggytttgatttccatttctccaatgattgattttgagctctttttcatatgattgttggccacatgtatgtcttcttttgaaaactgtctgttcgtgtccttt

SEQ ID NO: 19843 - DNA, 201 bp, Homo sapiens
tatttaaattctggatggaaggatttttccacattaggaagtcttttcagacagtacttatcaaatatacaaaatttaaaatattatgttttttcattcartgatcactgtttatttttaaagtactcattttaaaaagtggaaatgcatccttaactatagttacaaaatcagtcaatttacattttttatttggtactg

SEQ ID NO: 19844 - DNA, 201 bp, Homo sapiens
taaaagaattgcttacatttctcttcatagtgaaaaaggagccattctacatttgaaagggaaaatcttcttatttataaaaggcgtcttcatccaagaawcttaaatgtactatggcaattggcttcaaaatatctaccccataaattgcttaatatagtttaaagatgggaaatttgaaaccatatgactttactttcc

SEQ ID NO: 19845 - DNA, 201 bp, Homo sapiens
acaaatattattggagctaaagagagggataagccccaacgtgatagctacagacttcaacaccccgctttcagcattggacagatcttccagacagaaarttaaaaaagaaacggaggacttaacctgcactatagaccaaatggaactaatacatacttacacaacatttcatataccttctcctcactacatggatta

SEQ ID NO: 19846 - DNA, 201 bp, Homo sapiens
tgttcttttgaaacactaaaagaattaaatttttaaaattattcaataaaacttaaaagatatcaacttaaccataaaaaaatcactaaaaaggtataggygcaagtataacaaaaatttacagaaaagaattttacctgctttatatattcgggaaggacagacattcaagaaacaagttcctttataatgaacgtcctt

SEQ ID NO: 19847 - DNA, 201 bp, Homo sapiens
gagctaaagagagggataagccccaacgtgatagctacagacttcaacaccccgctttcagcattggacagatcttccagacagaaagttaaaaaagaaayggaggacttaacctgcactatagaccaaatggaactaatacatacttacacaacatttcatataccttctcctcactacatggattactctcaaggataa

SEQ ID NO: 19848 - DNA, 201 bp, Homo sapiens
tacaatatatatcattttcatgaagggataaattcaaaataataaatgatcagtaaggcacaggcaccagcaaatgaaaatggataatggccactacaaaktaccaatgtctactggcagaatatcatccatggttttcatatcaaatggaggagtcagcatagacacctaaattgagtcatctgtaacacagtcatggca

SEQ ID NO: 19849 - DNA, 201 bp, Homo sapiens
gaaaacaaaatcacacatcttgatgacaaatcgactgtaattctacacacatgttctctggtctttcttctcaacctttcccccaaaggagcactaggtastttacattgtgaaaaataagaaaaataattaccaaaacgttttaggttgtatttgacactgagccctagctaaccttaattccagcaacccataaaatga

SEQ ID NO: 19850 - DNA, 201 bp, Homo sapiens
tttacattgtgaaaaataagaaaaataattaccaaaacgttttaggttgtatttgacactgagccctagctaaccttaattccagcaacccataaaatgaytatgatctgacagtcagtgtgaggcttatgggatcatgtgggaaaatagagaacttgcccaaggccaatgggacaacaaacccatccaattgttattttc

SEQ ID NO: 19851 - DNA, 201 bp, Homo sapiens
ctgctattgaattacagtcctactcagttatggccctggaagatagtagaaaaagataatacttccaatgggcagatatttgagttacctgctatcttatyaaagcaaaataacctgagaagagtttctaaactgatgcttatgcactagctaatggtttgttcaaatgggactctcagaatagataaaggctagtaatat

SEQ ID NO: 19852 - DNA, 201 bp, Homo sapiens
atgctatttactctaagatctatgtaaggcgtttacattttactttcagtactgcaactacttcctccctccacctcactattttctctgattactccagraaaaacagtgtttattcaaattccatcattacagatccatcttaacacctagagcaaacatcattttatctactaaatagctctggagagatgtaaagat

SEQ ID NO: 19853 - DNA, 201 bp, Homo sapiens
taaaagtttaaaaatcaaatggaaagaccacagactaacttataataaaaaagttacctatgaaggaacaagcaagataataagattatgatgtaggacawaggagtttcagtgtttcagtatttttttatgttttttagaatatttggctgggtgcagtggcttacacctgtaatcccagcactttgggaggccaaaggg

SEQ ID NO: 19854 - DNA, 201 bp, Homo sapiens
gagcacacagaccctggactgaagtaggaggaagctgggaagccttcatggggctgccaagtgccaggacttgttcctgaccctgagaagtgaattaaatrgttgaggagtggcccactctttgcaggggtctctggaatcctacctgcagaagatcttacaacctccatggacatttgagacatgggagagctgcttgga

SEQ ID NO: 19855 - DNA, 201 bp, Homo sapiens
aagggaaacaacagtgtgaaccttttgacttccgcagcttgctgcctgaaagggtttttccaggttgtgctacaacatggaagtttgccccacctgtggcycacaggcttcatgcagcccaggagagctttgaatgcagcccaacacaaattcgtaaactttcttaaaccattatcagggttttttttcttttttcttttt

SEQ ID NO: 19856 - DNA, 201 bp, Homo sapiens
actaagaagtcaaaatgtacagaacgtagtatttaagtactttctgttcctgtaaacaagacaaaacgaacatggtctcttggaggtccaggactgtgagmctcagaataaagaggagacagaagtgttcatgtagaagttggcagtggtcgtttgtgactagtctaaaactgaaaatcccagaaaacaaacgaaaaacaa

SEQ ID NO: 19857 - DNA, 201 bp, Homo sapiens
gatttagtagaatgaaaattacaataagcagagagagaatgttaccaactgcagatgtcagactcacatgtaccctcaggcacacacacacacacacacayatttctgcacttgtgaggccgttaagaagagcattttataaccttgcactctctaagctaaacttagccttaaatgggcatcagagaaataccaaaagat

SEQ ID NO: 19858 - DNA, 201 bp, Homo sapiens
tgaaagaagcaagacaaaaaaagaccacgtgttatatgatttcacttatattaattgtccagagaaatcaaatttatagtcacagaaactagattagtggytgactgaggctgggacagggaatggacacaagttctttttgggtgatgaaaatgttctaaaactggattgtggtgatggttgcataattcaataaattta

SEQ ID NO: 19859 - DNA, 201 bp, Homo sapiens
gctggaaaccatcattctcagcaaactaatacaggaacagaaaaccaaataccacatgttctcattcataagtagtagttgaactatgagaacacacggayacagggaagcgaacatcacacacccgggcttgtgggggctaggggaaggatagcattagaagaaatacctaatgtagatggtgggttgatgggtgcagca

SEQ ID NO: 19860 - DNA, 201 bp, Homo sapiens
aatagtaaaatacacaagtaatctggaaaaatatttttatttatcatttcttaatctttatggaatttacattaatcaataaggagagttgaaatcctctrtagaaaaaacagcagtgtacataaacaggatttcagaaagtagaaatgcaaatggaagaataccatgtaaaaagatgcccactctccgtataattaaaaa

SEQ ID NO: 19861 - DNA, 201 bp, Homo sapiens
ttctcagcaaactaatacaggaacagaaaaccaaataccacatgttctcattcataagtagtagttgaactatgagaacacacggacacagggaagcgaayatcacacacccgggcttgtgggggctaggggaaggatagcattagaagaaatacctaatgtagatggtgggttgatgggtgcagcaaaccaccatgccac

SEQ ID NO: 19862 - DNA, 201 bp, Homo sapiens
aacaatgaagtttcttttcattaagatcaatatgcttacaaggcaatgtttacaccaatatgtttataagactatgtccaagaggcaggcattaggatagyggcaaccacagggagccaggccaggatgtgaggaggtctcctaagaactgtgggtgcttgcatctccagaaaggatgcaaagcacagccctctgtactag

SEQ ID NO: 19863 - DNA, 201 bp, Homo sapiens
caagtaaaccacccacctcaacctccccaaatgctgagattataggcatgagtcaccgtgcctggcccaatctattttaagtgtaacacaataagcaaatrctgcttttataataagataacaatgaagtttcttttcattaagatcaatatgcttacaaggcaatgtttacaccaatatgtttataagactatgtccaag

SEQ ID NO: 19864 - DNA, 201 bp, Homo sapiens
tgttcatgtgtaaagtaaacgaatggtgagattatgggaatttaacttttttcctcataatttaatctttctttctttctttctttcttttttttgacatrgtctcattctgttgccaggttgaagttcaatgttgcaatcacagctcactacagcctcaacctccacagctcaagccatcctcccactccagcctcttga

SEQ ID NO: 19865 - DNA, 201 bp, Homo sapiens
tagctcttattattttgagataagtcccatcaatacttaatttattgagagtttttagcatgaagggctgttgaatttcttagtctggaattctaatttgrtagttctatggtctgagagactgtttgttaacatttcaattcttttgcatttgctgaggagtgttttacttccaattacgtgattgacttcagagtaagt

SEQ ID NO: 19866 - DNA, 201 bp, Homo sapiens
tttttgtatcagttctaatgtcatcataaaaaatcattgcatgaaagaaggtcgcaatgtttcaagatcattttttcagtgaaaaaataaacaaatctggygaacactaaaggttgcagccacctctatgttgttcttttgaaacactaaaagaattaaatttttaaaattattcaataaaacttaaaagatatcaactta

SEQ ID NO: 19867 - DNA, 201 bp, Homo sapiens
aatctcaaatgcctacaggaattaggtaaaataatggtgtgaatctggcagtacatacacccacctaaagaattgaaattcaactgtcttaaactttatgygggctacattaaatgtgtttgcatcctctgctttaaagcctgtgataacaagacaatacctctgtggtaaaagacaggaggcttcacaggacaaagtgat

SEQ ID NO: 19868 - DNA, 201 bp, Homo sapiens
tggagagttaagatactgaaaattctgcaaagcaatgtttaggcaagagagagaaaaagtagagaagcactatggttatcactctagggaaatcaatggtkatctgtttttgtatcagttctaatgtcatcataaaaaatcattgcatgaaagaaggtcgcaatgtttcaagatcattttttcagtgaaaaaataaacaaa

SEQ ID NO: 19869 - DNA, 201 bp, Homo sapiens
agaaaggtcatttgcagaggacaaacagctgtccttgtccagatattccccttctccacagagacggtactaagaggacataagtttaaggtgtagttagragaaggaatgaatctactgtcaagttggtttatttatgaatttggttatgagggagactgtgcagatttcattctgggaatcctaaaagtgcatagaatg

SEQ ID NO: 19870 - DNA, 201 bp, Homo sapiens
gctaggtagagtatccagtttggagaaaagtgaatttgaaataaggctaaaaagatggagagttaagatactgaaaattctgcaaagcaatgtttaggcargagagagaaaaagtagagaagcactatggttatcactctagggaaatcaatggtgatctgtttttgtatcagttctaatgtcatcataaaaaatcattgc

SEQ ID NO: 19871 - DNA, 201 bp, Homo sapiens
gagtgcaaataaaacagtgtagtagatgagatttatgttcagcattcttgatcacttcattttcactaattctccctccttaagttcctcactgtggagcycagctggtatgtaacttcaggcagtgcactgcaatctgaacctttatttctcttctttctttcctcttggattccatttcctctagccctcctcattaac

SEQ ID NO: 19872 - DNA, 201 bp, Homo sapiens
atgagggttgctgaggaggctaggtagagtatccagtttggagaaaagtgaatttgaaataaggctaaaaagatggagagttaagatactgaaaattctgyaaagcaatgtttaggcaagagagagaaaaagtagagaagcactatggttatcactctagggaaatcaatggtgatctgtttttgtatcagttctaatgtc

SEQ ID NO: 19873 - DNA, 201 bp, Homo sapiens
gaggaacaaattggagaagcctgggaagctgaactgagtgcaaataaaacagtgtagtagatgagatttatgttcagcattcttgatcacttcattttcaytaattctccctccttaagttcctcactgtggagctcagctggtatgtaacttcaggcagtgcactgcaatctgaacctttatttctcttctttctttcct

SEQ ID NO: 19874 - DNA, 201 bp, Homo sapiens
atctatataaacatgggacttactatgaaatgagggttgctgaggaggctaggtagagtatccagtttggagaaaagtgaatttgaaataaggctaaaaaratggagagttaagatactgaaaattctgcaaagcaatgtttaggcaagagagagaaaaagtagagaagcactatggttatcactctagggaaatcaatgg

SEQ ID NO: 19875 - DNA, 201 bp, Homo sapiens
agataaactttaaactatgacagaaaatatctcagttgtgtatacctaatgttttaaattaatatccagaataaatacattgtatattatatagcattaayggactctcttcttataaaacgccacttctgcagtccctttaggagaaagataatctgcttgtctttctgtcttctttgaatgacctcctgaaaaaaaaga

SEQ ID NO: 19876 - DNA, 201 bp, Homo sapiens
ttctcttcttgtaatatctctggttttgatattaggggaatgctggcctcatagaatgaattaggaagtgtttgctctgcttagatattctggaagatgtygcagaaattgataccattggttccttaaatgttttgtaaaaccccagtgaattagtagaaaatgccactgaaaccatctgagcctggtactttctttttt

SEQ ID NO: 19877 - DNA, 201 bp, Homo sapiens
acagtaatagcgtgactgcagagattcacgttagtgattaatgatgatgataatggctataattgaacagtaatattcaggactacagaaaaatctgattygtttgacagagcagaatatctaagacaaaggaattcccaaatatgacgtatggtagtcttttaatgcaatccaaaaaagttagggttttattttagaagc

SEQ ID NO: 19878 - DNA, 201 bp, Homo sapiens
ctccttcaatagtgagccattagttttatttcctccttaatatgttatgagataatgggtttatatgaagagaataatctattagagatttgtgtaactcmcattataagaagactctgattgttgtgttattttagactacattaactctataagatgttggtcttaatctcaaatgcctacaggaattaggtaaaataa

SEQ ID NO: 19879 - DNA, 201 bp, Homo sapiens
gggagtgaggcgaggtcatgggagctggcccactttctcctcggaccagcctcccaacaggctcactagcttggccagcacagggacccctgtagctagckgtcttcttctgtggagtgaggggaacataacaatttagttccagttccaacccatggtgggcagaggttggtggaaagggttttgtttttgtttttggtt

SEQ ID NO: 19880 - DNA, 201 bp, Homo sapiens
tgtctgatagtttgctttttggaacagttatcattactggtggaataatgatttatttgaccagagtgtctgaggaacaaattggagaagcctgggaagcygaactgagtgcaaataaaacagtgtagtagatgagatttatgttcagcattcttgatcacttcattttcactaattctccctccttaagttcctcactgt

SEQ ID NO: 19881 - DNA, 201 bp, Homo sapiens
atatgtttaacatagatcacttttgcttcattactcatgctattagattttaaaccttgaaccataagtccttgtgtgactccactgggaaatccctcatrgtgttaacatttttttacactcaagcgcttgtttactccattttctcactttttaacaaattaaagttccaatgtattacagcagttttacatttgtcta

SEQ ID NO: 19882 - DNA, 201 bp, Homo sapiens
cagctgcagaaacaaggaaaatatatcatctagagattccagacttgaaactgaatgcattaaattagcatcaagttaatctactttatggtgctgagatmatttttctgtttgtgatagatgtgttatgacaactgagggtagttttaaagttttatatatggaggaaaatgaaaaatgcatgtgcgggtgtgtgcgcat

SEQ ID NO: 19883 - DNA, 201 bp, Homo sapiens
tgttgtttttcctatatggaacatcttccttatttttacagttaataaaaatcctacttttcctttgaaaactgtctcccattcaaagtcatcactgaagyataggaagaatccagtatatgcctatgtgatatttcttcttggaatttgaatctgatgcagggggagaaaagagtgaggcaaacaagaatgtcagtacag

SEQ ID NO: 19884 - DNA, 201 bp, Homo sapiens
cttcctttgataaaatacccaatactgtattttcttccactaaaatataggattttgcttaatcagtcagaactgaattattttcttggactcagagaacrataagcataatgatgtcaatctatagaacagacagcaattttttttattagtggtgctcttacaaatgaggttttatatgggatccaaatgcatctattc

SEQ ID NO: 19885 - DNA, 201 bp, Homo sapiens
tccacctcactattttctctgattactccagaaaaaacagtgtttattcaaattccatcattacagatccatcttaacacctagagcaaacatcattttayctactaaatagctctggagagatgtaaagatatgcaaaatgtacttatggcaggcagtgtggtacagcagacagagcacagatagaccttatgagatttg

SEQ ID NO: 19886 - DNA, 201 bp, Homo sapiens
tcaaatgtatgcaccatttcatttttttttgtctatgtatcttttatataggttcctaaaagtggaattgctggatcaaagggtaaaggcataggcaattytagagcatttagatttaatgtgatggacaggaatgaaccatgaagccacgtaagtattaaacaacagcaacaacaacaaaaaaagcagatacaggatgtt

SEQ ID NO: 19887 - DNA, 201 bp, Homo sapiens
atgtgtcatgctaatctaagatatgcaacagttttctatacatatatcaactgaataacaaaaaccttcttataaaaattaatcaatgtacagatttgtayatataaagcaatgtaatgaaattttattatatttccaaagaaagaggagaaagcttgataacagacagtggctggaggaggagggttgtgagatcattct

SEQ ID NO: 19888 - DNA, 201 bp, Homo sapiens
tcaactgaataacaaaaaccttcttataaaaattaatcaatgtacagatttgtacatataaagcaatgtaatgaaattttattatatttccaaagaaagargagaaagcttgataacagacagtggctggaggaggagggttgtgagatcattctttggaaggtggtggaaagtcaggtgttttaatattggacaggtatt

SEQ ID NO: 19889 - DNA, 201 bp, Homo sapiens
gcaggcagtgtggtacagcagacagagcacagatagaccttatgagatttgacttcaattctagtcaagttcataatttcttatttgtgtgggaaagaagrgttatttgcagtcatttaacccatctaatctatttccaatacctagagcaactgtttcaatcatttatcactgttttcaaattcaacattcttcctcaac

SEQ ID NO: 19890 - DNA, 201 bp, Homo sapiens
aacacattaaattttatgaattcagataaatgtgaaggaaaagtgaaaaattgatacaatcaaaagagtagctaaaatgtttataccttgatatttatatytgatgtgtgttttcatatatatgtatatagaaagaataatctttgctaatgctttagagattttaggagttaatcttcgtatcagacctaaggggtagaa

SEQ ID NO: 19891 - DNA, 201 bp, Homo sapiens
gttcataatttcttatttgtgtgggaaagaagagttatttgcagtcatttaacccatctaatctatttccaatacctagagcaactgtttcaatcatttaycactgttttcaaattcaacattcttcctcaaccctttgactctcgacatacgacaatgtccttacttaacttacaaaaatagaagcactaggaatgacct

SEQ ID NO: 19892 - DNA, 201 bp, Homo sapiens
taaataaaatttccagctgcggagcagtctcagtacagaatccttctatcattttacaatttatttttcttattcggttttttattgtctcactcacaccwatatatgacagtcgtggggcagaaaggacttagacttttgtcgggtctttccaaagtattcaacttcatttttattaaagaaaaaattttttttctcctt

SEQ ID NO: 19893 - DNA, 201 bp, Homo sapiens
ccctaataaatctgtcttttagttagatgattacaatatctatcaactcgagttttcctttggatttggagccaacagcctataaattgtctttattaatktcatcataaatgctggcatatttcgtgatttaactctttgaatttctgccagcgtctttcatttttcttttgatttaccagtgaagtgtcctatatcttt

SEQ ID NO: 19894 - DNA, 201 bp, Homo sapiens
ggaatgacctcaaaccctttttatccaacctccaagtgggtctataactttcctccatgcattccataatagagtatacatgtacatggaggtaagtggcagtgttgggttcacagcatcttggaatattcatttttactcaaatatttagagaagataagacttaaattggtgaccttttaagagtcacaaacctatgca

SEQ ID NO: 19895 - DNA, 201 bp, Homo sapiens
agaagacacatgttaaggaactttagtcagtgtgccttcaatcactccaaaatatgctcaaatctcaaacctcttaaaatacactttttcttaccactttwgtctttaatatgacagtgaattttggtataaattttcccaaaatgccattttcacatcatgaaacttaggttttcatacattgctttttacttcccatga

SEQ ID NO: 19896 - DNA, 201 bp, Homo sapiens
tttcatttttcttttgatttaccagtgaagtgtcctatatctttcagttttattttcttactccttgttttcagttctttttcctttctgaaaggcaggcwaattgtgagtttgcagagttaaacacttcatatgttgaatggtctttactagacctgcatttatcaacaaacaataacatgtttgttgatagcactaaac

SEQ ID NO: 19897 - DNA, 201 bp, Homo sapiens
aagtaatatcagcaaagtgaggcttttccatggcagccaaccttatatttctttctggaagcctggagcatacaaagttttattaatagtatttaactgartaatctgatttaaaatacataataaattttgttattatagtagatatcaatttctcagaattcaaagccatgttagtaaaaaatctaactttatttttcc

SEQ ID NO: 19898 - DNA, 201 bp, Homo sapiens
atcccatatagtctaattcagtgggaagatgatgatgacaacttctctgaaaggagtcaaccacaacctgccactcaggtgtgcatgctggcaacttggcktctaattataaactctttaattattgtatacatttttatttattcacccatacttcaggaagtaaagtaactgtagtagccattaaatctacttagacct

SEQ ID NO: 19899 - DNA, 201 bp, Homo sapiens
cgtggtgacagaccgagactccatctcagaaaaaagaaaagagaaaaggaagggaagggagggaaggggagtggagaaagaaagagagaaagaaaattgtratgcagtcacaatttgtacacatattacactattatgggaaaagctatggtagtctagtccttaaaatataatgttaatttttaaagtatcaagattaag

SEQ ID NO: 19900 - DNA, 201 bp, Homo sapiens
cagagttctttaatggatctcacgtttttacctttcagacattgacgaatgtgaacgtaaccctctcctttgtaggggtggcacctgtgtgaacactgagkgcagctttcagtgtgactgcccactgggacacgagctgtcaccatcccgtgaggactgtgtgggtgagtttatctcctcagcacataaacctgcccagca

SEQ ID NO: 19901 - DNA, 201 bp, Homo sapiens
ttgaacttgtatgtaaatatcactctttgctcctcttattaagggcctgaattgattcaatttgacccaaggccagagacaaacagatgcttaaaaatgcrgctcacacgttgccatggatacctgggctgtgaggtagaagtggaaatggccttgccacaggttcttctacaaattctggaaggtgctagcatagtgatc

SEQ ID NO: 19902 - DNA, 201 bp, Homo sapiens
aggcgtggtggcacatgcctgtattcttagctacttttggaaggctgtggcaggaggattgcttgagccaagaagttcaaagcttcagtgagctgtgatckcaccagtgcactataaccagggcaacagagtgagatcctgtctcaaaaacaaacaaaaaactcattgtgggctttttaaactggagttttagatgatatt

SEQ ID NO: 19903 - DNA, 201 bp, Homo sapiens
caagtacaaaggagcaaaagagtgtgtgtgctgtgtgtaagctatctaaaataatgtcctgatggtaaacagtttcatgacatatcaagaagttaaacttygtaaaatgtgataaataactagcatcgagccataacagtaaaaacaaacttgagctaaaattaatattacataatcattcattgttatttacatcctcag

SEQ ID NO: 19904 - DNA, 201 bp, Homo sapiens; identical to SEQ ID NO: 3285

SEQ ID NO: 19905 - DNA, 201 bp, Homo sapiens
ggccactaaaaaacagtaattagcctaaagaaaaaaaaaagaaaacttcagcataaaatcccctttttctaaacttacttctggtgacagtttcccctatkgtccaacatcttttcaggaactcctcaaagaggagtgctcattccattcccactgaaagtacttgaagatttatcttttcagtaggtgagaaggggacac

SEQ ID NO: 19906 - DNA, 201 bp, Homo sapiens
ttcaagtctgcccatatttcaaggcaatgatgagtgggaagtgctatgtaggactcagctggagataggtaaagaagcagaagggtatggttcctagggakctgtacttgtgcagagacacacagaatcatgcctttaattgaagtgtaacttatcaacaaatgcctctgaggccattggcacagtgacgctttaaggtca

SEQ ID NO: 19907 - DNA, 201 bp, Homo sapiens
taaatatataacaaatagcactaataataaagagagtaaagttcttctatatttcagattgaagttacagaaactttattttactttttttgtttgagctmtgagagtctgtgaaagttaaaatttttacagcaagcactgtggtttagattgtgtttccagtgacataactagttaaatgtaaaccagatgtgctttgaa

SEQ ID NO: 19908 - DNA, 201 bp, Homo sapiens
ttaatttaaaatagaaattttaaaaacacacaatattgaaattcttcttttttcaggcttcttacaaatgaaattaataggagaattatatgtggtctgtycttagatttgttatctgcttcttttatggttagctagtttcttttttacattgtgtttttatgaaaaagtttctctactcggattgatgttttcattaga

SEQ ID NO: 19909 - DNA, 201 bp, Homo sapiens
taaatgtgaacagctaaagacagagaaggtggatagggactagaggagagttatgtacccaccatgaatgtttcagtccttatttcctgattcatacccamgagcttggaattaaagcagcattgtgatattttgcatctaagatagactttttaagtttttcagagcctcatgaaatcatcaaagcaatcaacctttgtt

SEQ ID NO: 19910 - DNA, 201 bp, Homo sapiens
atatattccaaataggaagatatttcagttttacatagtgccaaattaactggcagtttttattatctagccaaaatgaatctttagtttcatatttgtcraagacaatagctttttcagtattatgtctgacattaaccatatttagctggatgctagagtacctgtttgttacataaagacaaatgaccaagtccaaaa

SEQ ID NO: 19911 - DNA, 201 bp, Homo sapiens
gaatgtataataggactgtcagtggctctcatcagtggttagcctgcaactttctcttccacaggtccaggtcattacattttgaaatttcatgatgtgaytactaatttaaaattacattagattatatatgaattagttggatactatgaatatttaaagatttagaatctatttttcaagctttctaaatataaatta

SEQ ID NO: 19912 - DNA, 201 bp, Homo sapiens
ctgaggcgattcctggaaagtgaaagattctgaagaaaaactagttttgcagataatcctgacccactttactcatgaggatgcataggcttttgtaaaastgcttgctctctgcctttctactcagcctcacatgaattagtgccttatgtagaaatgagatcaccatgtgctgggagtgagctgtggggaggaagaaca

SEQ ID NO: 19913 - DNA, 201 bp, Homo sapiens
tcctgctgtagtcaaataaaaatgtaacaaaacttgaaatgtaatacctagatccaagactgcagttctcgccagtgctgtcacttactgcccatatatayatatatatatatcatatatatatatacacactttattcactgccaggcattgaaaaatgtatgcaggtctggagacaaatgttatgggctgccatttctt

SEQ ID NO: 19914 - DNA, 201 bp, Homo sapiens
tggttcccccaaacctcagcacattagaggaatagtgcccaacaggtcatggcaatctttaaagagcgagtatgacatggtttggctctgtgtccccaccyaaatctcatctcgaactgtaatccccacttatcaagggagggacctggtggaagttgattggatcatggggacagtttccaccgtgctgttcttgtgata

SEQ ID NO: 19915 - DNA, 201 bp, Homo sapiens
ttcagacccagattgagccactaccagcttctctcttccccagcctgcctatcgtaggacttcgctttgtgatcaaggagtcaattctccctaataaactycccttcgtatatacatatatcctatcagttctgtccctctagagaaccctgagtaatatacaccagtcatcagctgaataccaccaacttctacccagtc

SEQ ID NO: 19916 - DNA, 201 bp, Homo sapiens
aaaaaaaagatacctagatggctggttaagtatttgtctgtgagggtgttgccagaggagatttacattttaagttgctggactgggagaggaagacccamcctcaatgtgtgtggacaccatccaatcagctgccagtccagctagaacaaaagcaggtggaagaaggtaagataacttttcttgttgattcttctggct

SEQ ID NO: 19917 - DNA, 201 bp, Homo sapiens
aaagtagataatgagtgaaggtgaggatgtggtgtgtatgaaggactccctcatatattgctagtggggatgtaaattattacagctgctttggaaaacastttgtcagttcctcaacaagttaaacatagaattactgtatgactcagcaattccacttctaggtgtatatctaagataaatgaaaacatatgtctacac

SEQ ID NO: 19918 - DNA, 201 bp, Homo sapiens
tgttggtgggaatgtaatttagtacagccactatggagaacagtatggagtttcctcaaaaaactaaaattagaactaacatataattcagcaatcccacyactgggtatatatcaaaaaaaaaaaaggaaattagtatattgaggaggtatctacactcccatgtttatagtagcactattcatgacagccaaaatataa

SEQ ID NO: 19919 - DNA, 201 bp, Homo sapiens
ggtggaagatatgaacagaaacgtgttcaaattgaaagcagttggattcagctccattcaaggtttcaggcatccactggagatcttaaaacgtatccccygcagataagggagaactactttataatttggctgtcagctttctatgagagttgaaaattagtgcaactacctacatctggcttgattttcttgaactct

SEQ ID NO: 19920 - DNA, 201 bp, Homo sapiens
ccagcctgggtaacatagaaagaccttgtgtatgaaagaataataataatcttattttattttattttgtttttttttgaaacagagtcttgctctgttgyccaggctggagtgcagtggcaccatcttggctcactccaacctccgcctcccaggttgaagcaattctcatgcctcagccttctgagtagctgagattat

SEQ ID NO: 19921 - DNA, 201 bp, Homo sapiens
ttaagattgccacttggccactttgggctcctccttcctctaagtcaagaggctaagaagggagttacagtgttggtggaggtgattgaccagacaatcargatgaaatcagactactctacaatggaagtaaggaagagtatgtcaggaatacaggagatcccttagggtgtctctcattattacaatgcccatgattaa

SEQ ID NO: 19922 - DNA, 201 bp, Homo sapiens
tcagcccaacaaaatgagtacctattctgtgaaatgcaccatcttaggtgcagggcccaactgtgaaagtactccagtcatgaatccaagaatacctgcakcccataagccacagagtaatgctttgtcttaattttaccaatgacaggaagagagttataggatttttaattaatatgagtttctttaagaataagtcaa

SEQ ID NO: 19923 - DNA, 201 bp, Homo sapiens
accctctcctttgtaggggtggcacctgtgtgaacactgagggcagctttcagtgtgactgcccactgggacacgagctgtcaccatcccgtgaggactgkgtgggtgagtttatctcctcagcacataaacctgcccagcacaactggtaaagaccagggatcagttctgacaaacctgttgtttgaggagcacatgaaa

SEQ ID NO: 19924 - DNA, 201 bp, Homo sapiens
cttggatcaagaacatttcaatccatttattcattcacacatttgtttatttcagcccaacaaaatgagtacctattctgtgaaatgcaccatcttaggtscagggcccaactgtgaaagtactccagtcatgaatccaagaatacctgcagcccataagccacagagtaatgctttgtcttaattttaccaatgacagga

SEQ ID NO: 19925 - DNA, 201 bp, Homo sapiens
gagtgacaatctctgcagaaatggaaaatgtgtgaacatgattggaacctatcagtgctcttgcaatcctggatatcaggctacgccagaccgccagggcygtacaggtaaggggagaccaagcaggcctgaaactcatatgtctcaaatcagcctaggaaaacttttggcgctgaattataatgaaggctatgcaaatcc

SEQ ID NO: 19926 - DNA, 201 bp, Homo sapiens
acaggtctgcaagtctggaagggggaaactctcctgtctgcttctggctggagtcaaaatggctaggctctattggccaccatgcttgttcaactcccctrtctccaggaggtggaacaggaaacacaaggaggggaaacaaaagaaagaaggcattctgcccctgaagaggggcatgttactcccctgccttatcttgtc

SEQ ID NO: 19927 - DNA, 201 bp, Homo sapiens
ggtgtgctttttaaagtcaagtcaactacttaaaggctaactcacttgtgattccatcagatcaggaggattattttactttttctggggatacagtgacrgtatacaaatgttggaggaaacttgaggctctgaatccctcagtcagggggcactggtggagttgttgctttttaggctgtgtggctaggaaaaatttgt

SEQ ID NO: 19928 - DNA, 201 bp, Homo sapiens
agatcttgattacttttccctttcacaagatatcacactggaccattacattgatgaaattacactgactggacccagtgagtgagaagtagcaaccacaytgagaatttgcatgccagggtatgggcaataaatccgactaaaattcagcaactgtctacctcagtgaaatttctaggagtccgggctgcggggcctgtc

SEQ ID NO: 19929 - DNA, 201 bp, Homo sapiens
atgtttcctcagacttctacaggtctgcaagtctggaagggggaaactctcctgtctgcttctggctggagtcaaaatggctaggctctattggccaccakgcttgttcaactcccctatctccaggaggtggaacaggaaacacaaggaggggaaacaaaagaaagaaggcattctgcccctgaagaggggcatgttact

SEQ ID NO: 19930 - DNA, 201 bp, Homo sapiens
tgatgaacttcccttcctaggtaactgggcctttctctctggctgccttttaacatattttctttgattttaacatattttctttgattttgaccttggaraatctgacgattatgtgtcttgggaatgatcttcctgtggagtatcttactggggttctctacattttctgattttgaatgttggtctttctatccaagt

SEQ ID NO: 19931 - DNA, 201 bp, Homo sapiens
tcgtagagagaaatgtttcctcagacttctacaggtctgcaagtctggaagggggaaactctcctgtctgcttctggctggagtcaaaatggctaggctcyattggccaccatgcttgttcaactcccctatctccaggaggtggaacaggaaacacaaggaggggaaacaaaagaaagaaggcattctgcccctgaagag

SEQ ID NO: 19932 - DNA, 201 bp, Homo sapiens
ttcttccttatcaatctgtataaatatatttcttattcttgtcttattttagtaaaatgtagaataggagtggtgagagggtacatccttgtcttactccmaaataaatggtgagaaagcgttcagtttctcaccattaagtatgatgttagctctagttgttttttgtagatattctttatcatgttgaggaagttcttc

SEQ ID NO: 19933 - DNA, 201 bp, Homo sapiens
agatatatgaaatttttatggttcgtggaaaaatgagtaaagatgtttgcagattattacataatctatttcccggggttgatttattgcttaataaagtwtttgacgtgaaaactaaaagagaatagattcataattgtttagaacagttgttaacacaccatcaaataaattggcaaaaatatagagacatctgtatcg

SEQ ID NO: 19934 - DNA, 201 bp, Homo sapiens
ttgcatctaagtatgttttttgctaattaatttttcgttggtaatagataggaaggcaattgacttttccacattgacattctatattgtatcctgcaaayttactataattgcttattagttccaggagtttcttgctggtctttaggattttctacatagacgatcatgtcatttgcaaacatagatagttctgtttct

SEQ ID NO: 19935 - DNA, 201 bp, Homo sapiens
gaaggattctgagaattttagttctagtcacctgctgtattggtcgcaaggttaggtaaattgtttctccatgtgccagtagttgttttacctgcttccaraagacagctatttaaagagcccttattttagaagacacaaaatcaatataaataaacaaatttagttatagtatgagaaggtttcttttaatgtcataca

SEQ ID NO: 19936 - DNA, 201 bp, Homo sapiens
tatcaaccggctctacattctggcttcattctgcttttagacatcaatgaatgcaaagcatttcctgggatgtgcacttatgggaagtgcagaaatacaaycggaagcttcaaatgccgttgcaatagtggctttgctctagacatggaggaaagaaactgcacgggtaagatggttctgctgttttatttgataaactct

SEQ ID NO: 19937 - DNA, 201 bp, Homo sapiens
tctaaattcttgcagctttgccaagttcaaataagtatagtaaatttaactttggaatttcctgacttttgcattgctgaaattttagattttgcccaacrttaagggagtctttcaatttaaattccctttatttaaaatgtttagggcaattgtgaaaagtgaggaaattggatgaaagaaattttctggaggacatgg

SEQ ID NO: 19938 - DNA, 201 bp, Homo sapiens
tctggttctaaattcatgagttatattaatatcaaaaatgaaaaaaatgtatctttatggttgaaaaatagtaggactctatgggatcctattaattataygatccttatgatatgtgccatttttctctgttgatgaggagttgtaatatgggatttcttataaatgcatgccaataagtatgtttttaagtagcgtctt

SEQ ID NO: 19939 - DNA, 201 bp, Homo sapiens
aggccccagtgtgtgttgttcctctcccagtgtccatgtgttctcatcgttcagttcccacttataagtgagaacatgtggtgtttcgctttctgttcctktgttagtttgctgaggataatggcttccaccttcatccatgtcgctgcaaaggacattatgttgttcctttttatggctggatagtattccatggtgtgt

SEQ ID NO: 19940 - DNA, 201 bp, Homo sapiens
acagtggtgctagtgaacaatgctgcagctgtagtcgctgaagatgtggtaagtggttgtattgagcttgtattttggaggtatactctgatggaccaggygtggtggataaaaaaaaatagaaaaagtaaaaatcaaaagtgacaaggagagggttttggtggagctgctggattaatagcgatgtcatttccagatacg

SEQ ID NO: 19941 - DNA, 201 bp, Homo sapiens
gcctaagtgacataggacaaaagcaggctttaaagaaattccaattgaagaatgcgaattgcaataaaaaaaaaaaaaatatatatatatatatatatatrtgccaaggaaattattttttgccactttagaataatttcttttgatgctttatattttttaatatggggatttttttcttttgaagaaagatgtatctgt

SEQ ID NO: 19942 - DNA, 201 bp, Homo sapiens
taagaaaaaagtttgcaataccatacagttattataattaaaacagatttcatttttaactcagtttttgatagcacatttaaatctggattggaagcatkactgtaaaatcatacaaaattatttagaaaacataatatccaaagtacaaaaataaagaaaatgtctttcagatttttaaatattttaaaaattatcttt

SEQ ID NO: 19943 - DNA, 201 bp, Homo sapiens
gaaaattcacataatccagggaaaaaccatgatgcaaaaggtaaagttggcaggagaaaaaaaaaaactttaaatgtaataatattataacactttctttkgtagtgatcttaatagttgtaacaaattggcaaatagattatagccgatcatttactgtttatgaatgggatctgacagggctgcttaaaaggcacttga

SEQ ID NO: 19944 - DNA, 201 bp, Homo sapiens
taacattaaaaaaaaatcacctgtctgctgtgttgagcctggattataacagagaaaaggaaagggccatgtaggaggctaccacagtggtgctagtgaamaatgctgcagctgtagtcgctgaagatgtggtaagtggttgtattgagcttgtattttggaggtatactctgatggaccaggcgtggtggataaaaaaaa

SEQ ID NO: 19945 - DNA, 201 bp, Homo sapiens
atgatgcaaaaggtaaagttggcaggagaaaaaaaaaaactttaaatgtaataatattataacactttcttttgtagtgatcttaatagttgtaacaaatkggcaaatagattatagccgatcatttactgtttatgaatgggatctgacagggctgcttaaaaggcacttgaagcaattctctgaacaggaagaattatc

SEQ ID NO: 19946 - DNA, 201 bp, Homo sapiens
ttaccacattttccagtcagaggaaaggcaacatcactgggtcagaaaatcagcatatactgaacatttgttctctaggtttctcatgggatgacatcttycttaatgtttacctcagggataatagaacatataggggaagcaaaatgtgtagcaaacacaatttatttgtcagcaagtaagaaggtaaaggtatgataa

SEQ ID NO: 19947 - DNA, 201 bp, Homo sapiens
tccatctggctttctgaagtcctgctgccttgaagtctgctcaagccctgtgccagtctccagagcttcatcccctcacctgttttctccactctggctgytgcacttggctgggagagtctgaggagtgctgcctgagattactgcattcacctccaagtccttgaagctgcttgacaacactcatattcacctccattc

SEQ ID NO: 19948 - DNA, 201 bp, Homo sapiens
tagggacttccctgtatgcattaggagtataattttgaacaggattgaagcctccaattgaattttgacgtctctctctcccaaagtgaaaaagttatgcraattctttcattaaactggctatttcaattacctgtgatatttcttcagacagaggcaggttaagctcctcaggaaacagactccaaggcagagaagagc

SEQ ID NO: 19949 - DNA, 201 bp, Homo sapiens
attgctttgctagtatatgaggtgaattttgtcatagataaatagatattttaaaatgataaatgaaaaggtttttatgttcttatttcattttaatagckgtacaaaaggctttttcacactaataattgcagaatatttattcatggttgaacatattgaggtataatgagtcacagatctaagtttactttgttattt

SEQ ID NO: 19950 - DNA, 201 bp, Homo sapiens
tgtagagacagggtttcatcatgttgcccagaatggtcttggactcctgggcttatgcaattctctcgccttggcctcccaaagtgctgggattacaggcmtgagccaccaggcccagcagcaacatggtttaaaagcaagagttttggagtcagatttggattcaagtcttgacccagcacttagcagttgggtattctc

SEQ ID NO: 19951 - DNA, 201 bp, Homo sapiens
gatgggcatacacacacaacagtgggtcagtggggagacagggagggaggatggaggaaaggaatcggagagagagaaggatgagcctgtaggggggtgcrgggtgctatcaatggatttgtagcttttcaagtgttgatacagcaccagcctaaagaatcacagtgctacagagtgagggctttggagtcagactgcatg

SEQ ID NO: 19952 - DNA, 201 bp, Homo sapiens
ccgttcctggaaagttccgcatggatgcctgctgctgtgctgtcggggcggcttggggcaccgagtgtgaggagtgccccaaacctggcaccaaggaataygagacgctgtgcccccgcggggctggctttgctaaccgaggggatgttcttactgggcggccattttacaaaggtaactgcctgcggccagcgccttggt

SEQ ID NO: 19953 - DNA, 201 bp, Homo sapiens
cattggctaattaatcacagtgttcctggaagtaaaattgacaggaaacttactgcattcttacttaatttgtataagcagaaaacttccaggtcaagtaracaaaagactaatttgaattatgaaaacagagcatgatggcttttcaatcaattttcagatttgagccagtttacagacctagaaccccttaaatggagg

SEQ ID NO: 19954 - DNA, 201 bp, Homo sapiens
ggtttaatgtaggggaagggattcaaaggcttagggagattggaatgctagagtggattagtcattttagactttctcatcccaactgagaaggtccagargacacatccttcaccaataccttgtaaaatagatttgtgaggggagcacctgcgtccttgaagagctctgtgattgctcttctcggtatgccagatctta

SEQ ID NO: 19955 - DNA, 201 bp, Homo sapiens
taacatcctgcaatggcttagtgaagtgccagcctctagtccagccatctttccagggttactatcataacttttcaaccataccctcattcccattttcrtagccccatgtgcctactctttttctctttttggcctcccatttttatgcttcttgtccatctgtcattttggccaactattgcaaaacagcctgcctct

SEQ ID NO: 19956 - DNA, 201 bp, Homo sapiens
cattcctgtccattcctttggtcagatatcaacgaatgtgcccagaacccactgctgtgtgctttccgctgcatgaacacttttgggtcctatgaatgcaygtgcccgattggctatgccctcagggaagatcaaaagatgtgcaaaggtaaggcctcagactcgggagtagttcgaactttatttgtcatgctggagata

SEQ ID NO: 19957 - DNA, 201 bp, Homo sapiens
tgtcacccaaattcatcctctcctttacatcttctttcccctactctagtcccaaccagagagagtttctgtctctctcacatgccctcgctcttcgtgtytgctgaatgctaaaagaatcccctctggtatgttggcttgttccctctctggccctcctgcaatccattctccacgtagcagcaggaggaagcttttaaa

SEQ ID NO: 19958 - DNA, 201 bp, Homo sapiens
aagtcagaatgagatctaacactaatttgctttaagctgttaaaaaattcacgttgactagatatctcacaaattgcttgaattcataattttggcccacrtttatagcctggacattggacattgggtctgagagcttagcgaattagaactgtgatcctgcaaactaaaatgcctgtcatttatccagtttatatgtaa

SEQ ID NO: 19959 - DNA, 201 bp, Homo sapiens
tgcctatgccattttttgcctgtaactgtaagtgaattacttaacttgtctgtcctgatttaaaatgcaatagtaataatacaattttcttttcttctttkttattcctaaatgaatggcatgggaaaactgttcagctttttaagataggatatatgacctatccaatcactgctatttaatgtgtttatcaaagtctca

SEQ ID NO: 19960 - DNA, 201 bp, Homo sapiens
aagtttctgtggtaattaaagtacagctgtttagtttcatctctcttttgaatccatgctcagttgtattaagatgcactgcactaagatagcaacacagratgcaacaggacctaattttgcacacgtggttttattttgttggattaagtctgatggcagctctttgaccacattttgtatttactcctcatgtagtca

SEQ ID NO: 19961 - DNA, 201 bp, Homo sapiens
cctatgccattttttgcctgtaactgtaagtgaattacttaacttgtctgtcctgatttaaaatgcaatagtaataatacaattttcttttcttctttttkattcctaaatgaatggcatgggaaaactgttcagctttttaagataggatatatgacctatccaatcactgctatttaatgtgtttatcaaagtctcagt

SEQ ID NO: 19962 - DNA, 201 bp, Homo sapiens
tcagggattcagcaagggctgtacttttgcttaatactagtggttccttattctaagtgatgacatcatccacctttcctagaaatgggtctttgtgcctrgtatgatatctttccaagaaaaagaatttggattttctattaaattagaaactcaattcacattatatatagtttgagccatcattgtgttatgaatagg

SEQ ID NO: 19963 - DNA, 201 bp, Homo sapiens
cagaagactgggagagaagacggcagattttgtacatggaggaaagagcattgacagtttgattttagatgtgttaactttgaaataattattagatgttkaagagaagaaatgaaataggcaattggtagaagggtctagagttcacgggagagatgagatacagaaccataaatttgagagttctcagcaaaaaagtag

SEQ ID NO: 19964 - DNA, 201 bp, Homo sapiens
aatattcaaacttttgagaaagtaccatgacagttaaatattgaaactatagatactgtaagcctgttcctaggaaagacttcagaatatatatctctttkctaaacatttcagtgtatttgattattcaatactaccatttaatgttatagtgtacagaatagtactggacaaacacaactcattcttgggatgcaatct

SEQ ID NO: 19965 - DNA, 201 bp, Homo sapiens
agatgtttaagagaagaaatgaaataggcaattggtagaagggtctagagttcacgggagagatgagatacagaaccataaatttgagagttctcagcaawaaagtagtatttaaacccatagactcaatggagtgatctggatgataactgtagagataaagaaaagccttagattagttgatcccttaaatatcttctc

SEQ ID NO: 19966 - DNA, 201 bp, Homo sapiens
aagagcaaagatggcagcctgctgcttcctctgagagctctatcccagggaggtacagacatgttgccagcctgaacgcaccaataggaagtgggtggagrtgctggttgggaggtctcaccctagtcatgagtaacgggattgtggacacgcttaaagaagcagtctggccatgcttttgtagagaagctgtgctgtgct

SEQ ID NO: 19967 - DNA, 201 bp, Homo sapiens
ggaggtctcaccctagtcatgagtaacgggattgtggacacgcttaaagaagcagtctggccatgcttttgtagagaagctgtgctgtgctcggataccamttctgctcaggtggcttgggctctccaaacaccgtgggctagaatggctgagctgcccaaacagcaaagatggtggcctatccctccccaccgggaactc

SEQ ID NO: 19968 - DNA, 201 bp, Homo sapiens
tgatagaacattctatggttatgataatattctatatcttgatagaggtttggattgcacaaaactcatctaatgttaggcttaaaatttgcatattttgkcacgtgaaaactttgccctaaaacaagaactgtaaattaatactgaactctagttatatacatgctgaaatgtctggagaaaagtatactgatttctgaa

SEQ ID NO: 19969 - DNA, 201 bp, Homo sapiens
acccacagccaatatcacactgaatgggcaaaagctggaagcattccctttgaaaaccagcacaagacaaggatgccctctttcacaactcctattcaacrtagtattggaagttctggccagagcaaacaggcaagagaaagaaataaaggtattcaaataggaagaggggaagtcaaattgtctctctttgcagatgac

SEQ ID NO: 19970 - DNA, 201 bp, Homo sapiens
taatatccagaatctacaatgaagttaaacaaatttacaagaaaaaaacaaacaaccatcaaaaagtgggcaaaggatatgaacacacacttctcaaaagraaacatttatgctccaacaaacatatgaaaaaaagctcatcatcactggtcatcagagaaatgcaaatcaaaaccacaatgagataccatctcacgccag

SEQ ID NO: 19971 - DNA, 201 bp, Homo sapiens
acaaacaaccatcaaaaagtgggcaaaggatatgaacacacacttctcaaaagaaaacatttatgctccaacaaacatatgaaaaaaagctcatcatcacyggtcatcagagaaatgcaaatcaaaaccacaatgagataccatctcacgccagttagaatggcaatcattaaaaagttaggaaacaacagatgctggtga

SEQ ID NO: 19972 - DNA, 201 bp, Homo sapiens
cagctactcaggaggctgaggcaggagaattgcttgaacccaggagacagaggtttcagtgacccaagatcgtgccactgcactccagcctggctacagartgagactccatctcaaaaacaaaacaaaataaaacaaaaaaacaaaagaaaattttcagatttaagaaaaatcaaccagatagtaaagagagttttcata

SEQ ID NO: 19973 - DNA, 201 bp, Homo sapiens
tcagaagtggcactgaagaaagaaagtgtgccaaaagttcatgaaattctccagaaatagcaaccaatttggagagactcagaaaaaggggatgaacagtkggccgtagggaagatgaagttggaaactgaaagcgttcgtgcttctacgttgacccacaagattgggcagaatctaatccattttatataaggcaactgt

SEQ ID NO: 19974 - DNA, 201 bp, Homo sapiens
atcaaaaccacaatgagataccatctcacgccagttagaatggcaatcattaaaaagttaggaaacaacagatgctggtgaggatgtggagaaatatgaaygcttttacactgttgggagtgtaaattacttcaaccattgtggaagacagtgtggtgattcctcaagaatctagaaccagaaataccatttgacccagca

SEQ ID NO: 19975 - DNA, 201 bp, Homo sapiens
gaaagtgtgccaaaagttcatgaaattctccagaaatagcaaccaatttggagagactcagaaaaaggggatgaacagttggccgtagggaagatgaagtkggaaactgaaagcgttcgtgcttctacgttgacccacaagattgggcagaatctaatccattttatataaggcaactgtagggtgagttcctttttttcc

SEQ ID NO: 19976 - DNA, 201 bp, Homo sapiens
tcaatttttaaatgcttaactaatctttcatacgtggcatacatgctcataggtcacagagtatgtttcctttcatacattgtttaatttgctactgttttgagggtttttgcatctatgttcatgagagatattggcccataattttctcttcttgtaatatctctggttttgatattaggggaatgctggcctcataga

SEQ ID NO: 19977 - DNA, 201 bp, Homo sapiens
tagaaggtgattttgagaagtttatcaataaaccttagcaagagcattgcaataatgagttggacttagattggatatgaaaggaaggaaagagaggtcartatgttgaaaatatattgagagaagggctatgagatgggaaagatttgatcatgtttatgtactgacatgaaaggagaattttgaagatacagaagagag

SEQ ID NO: 19978 - DNA, 201 bp, Homo sapiens
tccttcctaattgtgtattactttatgggtggcataggccctttcagaacttccctctcccccaagatggtgctaaatagttactgtttactgtacttccytcacatctagttttctcatatgtcattaccacagagagaaactcctaactgacagggaagctgagggttggcacacctgtagttcaccctcagttggacc

SEQ ID NO: 19979 - DNA, 201 bp, Homo sapiens
ttggagattaaaaagcctgatttaaaggaatataattttgggatattggggttaatgtcaaaggaaaaataaagagcataacattgaaggcatagcaacakggtttgtttgtttgtttgtttgtttgtttagttagttagctaattattttgagacaaggtttcactctgtcacccaggctggagtgcagtggctcaatca

SEQ ID NO: 19980 - DNA, 201 bp, Homo sapiens
ccattttctataatttctgaggagagagcaaaggctaagttcatcaacatagagcccagaggagctctccccattctcaatcttctctccctccaccttaygaaactttgggcgactgaatacagctttaatgaaaccgaaaccagctatcttccacataaagctctgataaagaaggaaagatatcaagagatgttattt

SEQ ID NO: 19981 - DNA, 201 bp, Homo sapiens
attaagaatctcacagaaagttaatctcaaaatccagctttctgattgctgagtctgatagaagtattgctgtgctgtatacacaccgctcaggtagtgcrcatctttggttggggtgaccttctaggggtcattcggtcaccaagtgacaggatgccatggatcagtgggcacaactaattctctttagtatttgaaata

SEQ ID NO: 19982 - DNA, 201 bp, Homo sapiens
agaaagataattgtgataattttatcaaatgccctaagtcaccctcatatgtttcaattatcaaaagtaatattcttgttatataataatatataataaamttccagattttaaaatgtgttataagatttcaaggatcatactagttgtgatggcagttcatttggctaagattgacatttttggcttcttaaaacagtg

SEQ ID NO: 19983 - DNA, 201 bp, Homo sapiens
cctccaccttacgaaactttgggcgactgaatacagctttaatgaaaccgaaaccagctatcttccacataaagctctgataaagaaggaaagatatcaaragatgttatttaaactgtactaaagtagatagaagctcttgaaagagcagacaaagtagtgtctatacaagctgaaaaacagtagcaactatgcaggcat

SEQ ID NO: 19984 - DNA, 201 bp, Homo sapiens
aagtctcagaatgttaagctgccttttagaaattctgagttacatagaaaacattaagaatctatcttcttaatttaaacaaatggcatggtacattccccaaacactcaaccaccataaataacactgggaatactaagaatgcatgattcaggagatgcagaaaaattgtactttcccagaaaatctgcgttttataaa

SEQ ID NO: 19985 - DNA, 201 bp, Homo sapiens
aaaaaagtgaacataattaaataaaaataaggagttggaaggatacatgagtgctaattttcttataatttattgtatagaattcattaatactgtctaamaattacatttcaactttagcataaagccaaaaaatttttagcgttttttattcttaacattagaaaagtattttaaaactgttgagatgatggtaaattt

SEQ ID NO: 19986 - DNA, 201 bp, Homo sapiens
aaaaagtgaacataattaaataaaaataaggagttggaaggatacatgagtgctaattttcttataatttattgtatagaattcattaatactgtctaaamattacatttcaactttagcataaagccaaaaaatttttagcgttttttattcttaacattagaaaagtattttaaaactgttgagatgatggtaaattta

SEQ ID NO: 19987 - DNA, 201 bp, Homo sapiens
aggagttggaaggatacatgagtgctaattttcttataatttattgtatagaattcattaatactgtctaaaaattacatttcaactttagcataaagccmaaaaatttttagcgttttttattcttaacattagaaaagtattttaaaactgttgagatgatggtaaatttatctgatgcatacaaattgttttagcttc

SEQ ID NO: 19988 - DNA, 201 bp, Homo sapiens
agttggaaggatacatgagtgctaattttcttataatttattgtatagaattcattaatactgtctaaaaattacatttcaactttagcataaagccaaamaatttttagcgttttttattcttaacattagaaaagtattttaaaactgttgagatgatggtaaatttatctgatgcatacaaattgttttagcttcact

SEQ ID NO: 19989 - DNA, 201 bp, Homo sapiens
ggatcatcttattaacatgaaattagggaagaaattagttctctgtttaaaactgctttataataacagataagattacaaaataaaaaggaagtaaaaamtaaaaagttaatatttatttaattaactaaatttatttaattaactaaattaactaaatttatttaattaactaaattaactaaaaagttaattttaata

SEQ ID NO: 19990 - DNA, 201 bp, Homo sapiens
agtctcagaatgttaagctgccttttagaaattctgagttacatagaaaacattaagaatctatcttcttaatttaaacaaatggcatggtacattccccaaacactcaaccaccataaataacactgggaatactaagaatgcatgattcaggagatgcagaaaaattgtactttcccagaaaatctgcgttttataaag

SEQ ID NO: 19991 - DNA, 201 bp, Homo sapiens
agcttcaattgaatggttctcaaaggcatgggaatttttcatttagattttgttgtttatgtttaaatctatcagatttggattaagaatctcacagaaarttaatctcaaaatccagctttctgattgctgagtctgatagaagtattgctgtgctgtatacacaccgctcaggtagtgcgcatctttggttggggtgac

SEQ ID NO: 19992 - DNA, 201 bp, Homo sapiens
ctccattcatatagtgtgaacattaatttacaaataaaagaacatttaaattttaatgctttatttttttaattaaataaatgattttgagagaaaaacamatatgtattaacattgtctcccaagaaaattataagtgaaatcctttaaggataaaggagagatgttaatctaaaaatgatttatgtttaaggagttatt

SEQ ID NO: 19993 - DNA, 201 bp, Homo sapiens
actcttagcttaagtatatacctatgtaaagtgaggttggagaaaggattcaattagataaaaagcaaagtacgtgacaaatgcatataatatgcagatartcgatgtttgttttaaattccagggaaacagcttcaattgaatggttctcaaaggcatgggaatttttcatttagattttgttgtttatgtttaaatcta

SEQ ID NO: 19994 - DNA, 201 bp, Homo sapiens
gtggctcaatcatggctcactgcagcctcgacctcccaggttcaagtaatccttccacctcagcctcccaagtagctgggactataggcatatgccactaygcccagctaatttttttgtatttttttttttgtagagacagggtttcatcatgttgcccagaatggtcttggactcctgggcttatgcaattctctcgcc

SEQ ID NO: 19995 - DNA, 201 bp, Homo sapiens
agaagaaatacataaacctggacgtatatgcacatataaatttgcatacctttttggagattaaaaagcctgatttaaaggaatataattttgggatattrgggttaatgtcaaaggaaaaataaagagcataacattgaaggcatagcaacatggtttgtttgtttgtttgtttgtttgtttagttagttagctaattat

SEQ ID NO: 19996 - DNA, 201 bp, Homo sapiens
cacaataatagtgggagactttaacaccccactgtccatattaggcagatcgacaagtcagaaaattagcaaggatattcaggacttgaactcagctctgraccaaacagacctaataaacatctacagaactcgccaccccaaatcaacagaatacaatctcctcagcaccacatcacatttattctaaaattgaccaca

SEQ ID NO: 19997 - DNA, 201 bp, Homo sapiens
gtctcagaatgttaagctgccttttagaaattctgagttacatagaaaacattaagaatctatcttcttaatttaaacaaatggcatggtacattccccaaacactcaaccaccataaataacactgggaatactaagaatgcatgattcaggagatgcagaaaaattgtactttcccagaaaatctgcgttttataaaga

SEQ ID NO: 19998 - DNA, 201 bp, Homo sapiens
atagttacagccaaaacaaattcatcttggctgcctacattaaccaagttaacgagatcattataaagtctaactttaattcatgctgtattaacacaagytattcctaaacaattaaaaaactttaaagcaaactcaattatagaaactcctatttaaagataacagaatattcctcttcttctaaccccacaaaaaact

SEQ ID NO: 19999 - DNA, 201 bp, Homo sapiens
tctcagaatgttaagctgccttttagaaattctgagttacatagaaaacattaagaatctatcttcttaatttaaacaaatggcatggtacattccccaaacactcaaccaccataaataacactgggaatactaagaatgcatgattcaggagatgcagaaaaattgtactttcccagaaaatctgcgttttataaagaa

SEQ ID NO: 20000 - DNA, 201 bp, Homo sapiens
ccactagacagtgtcccagtggggactctgtgtgggggctgcgaccccacatttcccttccacactgccctagcagaggttctccattagggctccacccstgcagcacacctctgcctggacatccaggcatttgcatacatcctctaaaatctaggtggagttcccaaacctcaattcttgacttctgtgcactcacag

SEQ ID NO: 20001 - DNA, 201 bp, Homo sapiens
ttcccagaaaatctgcgttttataaagaaaggcacataacctttctggaagcctcaggtattgcaccttcaaagatgattcttttattcaaccttaacctaaatcacaggattatgacaaagcataagtttaaaaataaaaaattgcttaaaatattgaaaatgtaaattcctgaagatttgaagacacatgtaatttcat

SEQ ID NO: 20002 - DNA, 201 bp, Homo sapiens
tgcgctaatgttagacattacattaaaattttaaaatgtcttcttaaataagagattacttttttttaaaatcttcagatattgatgaatgctccttccawaacatttgtgtctttggaacatgtaataacctgcctggaatgtttcattgcatctgcgatgatggttatgaattggacagaacaggagggaactgtacag

SEQ ID NO: 20003 - DNA, 201 bp, Homo sapiens
ttgttagaatactgaattggaaaaaaacagctataaataacattattggaacaattaaataatttaaatattgactgaatattaaacagtataattgaatccatacaatttttcctgatgcgatcattgtattgtgattatttaaaagaatgaccttgttcttgggaaatactcatggaagtagataaatccaggtgaatg

SEQ ID NO: 20004 - DNA, 201 bp, Homo sapiens
tccaggtgaatggaataaggtgttcattaaatattcttgctgcttctctctaagcttgaacatgttgcaagtaaaaagttgtagaataataaacaaaagckgtgtgtgtgtgtgtgtgtgtgtgtgtgtgtgtagcaatataagagaaaaaaagcaatgagggtggagatggagataattattttatgttggtgatgagag

SEQ ID NO: 20005 - DNA, 201 bp, Homo sapiens
aatggcctggagaattttctggaagtatacaaaaaaagggaggggtggagaattccttgcttgagtagaaatctgcctactgtcctcagtgtcagtttttkggcctgcagcaaatggaaggaatatttgctgctgtgatttatacacaacttatatactgttttcaagttttggagaatacttttaattatcatttacaca

SEQ ID NO: 20006 - DNA, 201 bp, Homo sapiens
atatatatatgatatatgatatatatgatatatgatatatacgatatatatgatatatgatatatatgatatatacgatatatgatatatacgatatataygatatatatgctatatgatatatatgatatatatgatatatatgatatatatgatatatatgatatatatgatatatgatatatatgatatatatgatat

SEQ ID NO: 20007 - DNA, 201 bp, Homo sapiens
agaggatgggtttttgaagatatggaagaaagttggattagaaatagaaaataaaccagttctctcagacatcagtggttgatacatttcattcacattgytcttttattttattaatttattaatttagtctatttagactagtcacactattattattattattatttttgagacagagtctcactctgtcactcaggc

SEQ ID NO: 20008 - DNA, 201 bp, Homo sapiens
aaaagggaggggtggagaattccttgcttgagtagaaatctgcctactgtcctcagtgtcagtttttgggcctgcagcaaatggaaggaatatttgctgcygtgatttatacacaacttatatactgttttcaagttttggagaatacttttaattatcatttacacaaactccaagtctgtgttttccattcaaaataat

SEQ ID NO: 20009 - DNA, 201 bp, Homo sapiens
tcttacttggggtgtctcacgcagttgcagttatatattgactgtagctgcaaccatataaataagacttactagactggatgatagcatcaaaaatgttrtttttcactaacattcatatcaaaatcccagataaggggcaagcattgcttttggtggttgtgccataacagttcccctccctcttctctactgatgtca

SEQ ID NO: 20010 - DNA, 201 bp, Homo sapiens
ccattctcccagctgcagcctcccaagtagctgagactacaggtgcccaccaccacacccagctaatattttgtatttttagtagagacgggggtttcacygtgttacccaggatggtcttgatctcctgacctcgtgatctgcccgcctcagcctcccaaagtgctgggattacaggcatgttatttttttctataacat

SEQ ID NO: 20011 - DNA, 201 bp, Homo sapiens
tccttctttgctaatatatgcattcagtgttataaatgctcctcaaagcactgctttctctgcatcctgaaaattttattttattttattttattttattwatttattttgagatgagtttcactctgacaccgggctggagtgcagtggcacaatcttggcccactgcaacctctgcctcctgggttcaagtgatactcc

SEQ ID NO: 20012 - DNA, 201 bp, Homo sapiens
gaaggctgggaaaagcaaattgcatcctggctaccaagtcagaagtcagcctaaaccaagaagtagatcagcgatgcttaaataatcagaaatgcaactgwaatcagaaaaacaatcttgtgaaagctcagttcttaaaataaattcccattgtttccatctacagttattctctatcttttggatagtagagcatagtca

SEQ ID NO: 20013 - DNA, 201 bp, Homo sapiens
aaagggaggggtggagaattccttgcttgagtagaaatctgcctactgtcctcagtgtcagtttttgggcctgcagcaaatggaaggaatatttgctgctrtgatttatacacaacttatatactgttttcaagttttggagaatacttttaattatcatttacacaaactccaagtctgtgttttccattcaaaataatt

SEQ ID NO: 20014 - DNA, 201 bp, Homo sapiens
gcagctttcacttcctgtctcctgaaatgttctttctggtgtatattagggatcttcagggaagtataacccataggatagataggtgtatatataaggcttttttttttttttttaaagtaattggctcacacgcttgtggggactggcaagtgtaaaatcttcagagcaggctggtaggttggagacccagagaagggc

SEQ ID NO: 20015 - DNA, 201 bp, Homo sapiens
cccaaaaaataaataaacaaataaatataaataaacctaattagaagggggaccatgagaatcttgcagcctctgagatctgagattcagcaacaaaaacwaaatgcaaaatctgagacaaaaataaagtaaaataagtttttttaaaaagcccaaatgattctaatatgcagccagggatgaaaattactttgtagactg

SEQ ID NO: 20016 - DNA, 201 bp, Homo sapiens
cagctttcacttcctgtctcctgaaatgttctttctggtgtatattagggatcttcagggaagtataacccataggatagataggtgtatatataaggcttttttttttttttttaaagtaattggctcacacgcttgtggggactggcaagtgtaaaatcttcagagcaggctggtaggttggagacccagagaagggct

SEQ ID NO: 20017 - DNA, 201 bp, Homo sapiens
tctgcagagaaactctttcccattgtcctctaccttgaataatctccaacttaactttattcattttctcagataatggtaaaagttctgtgacaaagccragaagatatttgagcagaataaacttgccatctaagtgtgcgttcatttggatgcatagaaatctgattcttacaagatcacacttttgaaagctctaat

SEQ ID NO: 20018 - DNA, 201 bp, Homo sapiens
ttaggggcctgtctcaccactaaactgggggcttctggagacaaggtccacatcttactcatcattacagccataagttctagcttacagtagaatctcartattttaattgtgaaatgagtgaatgcttctaactgaacattaaacatgtagcgtaattatttccattataacttttcttttggaacatgtttgataaat

SEQ ID NO: 20019 - DNA, 201 bp, Homo sapiens
gcttcagaaggtgggtaataatgaacagctctcagctaaaggagcatgttctaaaacaatgcaaggaagctaagaaccttgaaaaaatattagaggaattkctaactagaatatccagtatggagaagaacataaatgccccaatggagctgaaaaacatagcatgagaacttcatgaagcacacgcaagtatcaatagct

SEQ ID NO: 20020 - DNA, 201 bp, Homo sapiens
ttttccaatgtacaggtcttacacatatgctgttatatttatccctaagtatgttgtattttcagacacttttaacatggtaattaagaaacttcatcttycagttgttcattgctgttatataaaaatataccattttgatttggaggattttgacctttcattctgcttaattcacttaataattttagtagctgtttt

SEQ ID NO: 20021 - DNA, 201 bp, Homo sapiens
ttgtcctcactactcattatatgccaattataatgcatttgcatgctaaaggatactcccaccagcacaatgatggtttacaaatgccatggcatttgaarttaccttatatggtctgaaaaggggaagaaccctcagttctgggaactccccatccctttctcgaacaacacatgaacaatccaccccttgtttagcaaa

SEQ ID NO: 20022 - DNA, 201 bp, Homo sapiens
aaaccaaaaggaggagaaaagcgaactctgattgtcctcactactcattatatgccaattataatgcatttgcatgctaaaggatactcccaccagcacartgatggtttacaaatgccatggcatttgaagttaccttatatggtctgaaaaggggaagaaccctcagttctgggaactccccatccctttctcgaacaa

SEQ ID NO: 20023 - DNA, 201 bp, Homo sapiens
agctttcacttcctgtctcctgaaatgttctttctggtgtatattagggatcttcagggaagtataacccataggatagataggtgtatatataaggcttttttttttttttttaaagtaattggctcacacgcttgtggggactggcaagtgtaaaatcttcagagcaggctggtaggttggagacccagagaagggctg

SEQ ID NO: 20024 - DNA, 201 bp, Homo sapiens
caggaggttaggcattctttgtcacaggacgagataagaggttggtggaactggtttcacaagatacaagtcacaaagacccagctggtaaaacaggatgmggtaaagaagccagccaaaacccatcaaaaccaaaaggaggagaaaagcgaactctgattgtcctcactactcattatatgccaattataatgcatttgc

SEQ ID NO: 20025 - DNA, 201 bp, Homo sapiens
ctccattctgaatagggactggataaaatgaggctgagacttgctgggttgcatccccaggaggttaggcattctttgtcacaggacgagataagaggttsgtggaactggtttcacaagatacaagtcacaaagacccagctggtaaaacaggatgcggtaaagaagccagccaaaacccatcaaaaccaaaaggaggag

SEQ ID NO: 20026 - DNA, 201 bp, Homo sapiens
aggtgtcaactcgattagatcgaaagatacgtaaatggctggtaaagtattgtttctgggtgtgtctatgggggtgtggccagaggagattgacatttgagttgttagactgggagaggaagatccaccctcagtatgggtgggtaccattcaatcagctgccagtgcggctagaagaaagcaggcggaagatggtgggat

SEQ ID NO: 20027 - DNA, 201 bp, Homo sapiens
aaaatctggagcatatttctttctactttatttctccagaatttagaaattatttatatctttttggggtggttgcggggacagggtctggctgtcacccmggcaggagtgcagtggtgcaataacagctcactgccttctgggctcaaatgatccttccacaccaccatgcacagctaatttttgtattttttatacaga

SEQ ID NO: 20028 - DNA, 201 bp, Homo sapiens
ggtgtcaactcgattagatcgaaagatacgtaaatggctggtaaagtattgtttctgggtgtgtctatgggggtgtggccagaggagattgacatttgagttgttagactgggagaggaagatccaccctcagtatgggtgggtaccattcaatcagctgccagtgcggctagaagaaagcaggcggaagatggtgggata

SEQ ID NO: 20029 - DNA, 201 bp, Homo sapiens
  misc_feature (1)...(201): n = A,T,C or G, or insertion/deletion polymorphism (see Tables 1-2)
atatatgatatatatgatatatgatatatacgatatatatgatatatgatatatatgatatatacgatatatgatatatacgatatatatgatatatatgmtatatgatatatatgatatatatgatatatatgatatatatgatatatatgatatatatgatatatgatatatatgatatatatgatatnnnnnnnnnnn

SEQ ID NO: 20030 - DNA, 201 bp, Homo sapiens
gtgtcaactcgattagatcgaaagatacgtaaatggctggtaaagtattgtttctgggtgtgtctatgggggtgtggccagaggagattgacatttgagttgttagactgggagaggaagatccaccctcagtatgggtgggtaccattcaatcagctgccagtgcggctagaagaaagcaggcggaagatggtgggataa

SEQ ID NO: 20031 - DNA, 201 bp, Homo sapiens
ttgccactttagaataatttcttttgatgctttatattttttaatatggggatttttttcttttgaagaaagatgtatctgtgttatataaatgcatattwgggatattttctttatttctaagttttgcataaatggggatttagagaatcacctatgctttgttcagtcatctaagtaatataaattcattgaaaaaat

SEQ ID NO: 20032 - DNA, 201 bp, Homo sapiens
atgaactatgtaaattgctcctttacatgacatttacagtagaaagatatactcaagagattgggttgtcataagggagagaaaccttaatccagaccatytattgtaaaagcgtatacaaattgtattaatatgtagatgttctctggaaaaaataaaatacttctctcattcatccttgctgattccctatagatgata

SEQ ID NO: 20033 - DNA, 201 bp, Homo sapiens
gaaggatttcagagattactgccaccatcaagaacttgaaagacgcaggggtggtgattcccaccacatctctgttgaactctcctatttgttctgtgcaraagacagatggattttggaaaatgacagtggattagcacaaacttaaccaagtggtgactccaactgcagctgctgtaccagatgtggtctcattgcttg

SEQ ID NO: 20034 - DNA, 201 bp, Homo sapiens
agctgctgtaccagatgtggtctcattgcttgagcaaattaagaaacctcctggtacctggtatgcagctattaatttgacaaatgcctttttctccattyccgtccataatgtcctaccttatgggtatatcaactctcccgctctgtgtcataatcttgttcacagagatcttgattacttttccctttcacaagatat

SEQ ID NO: 20035 - DNA, 201 bp, Homo sapiens
gagtatgtcaggaatacaggagatcccttagggtgtctctcattattacaatgcccatgattaaggtcaatgggaaactagttacccaatccagacaggaygaaaaatggcccagacccttcaggaatgaaggtttgggttccttcaccaggcgaaaaccaacaacaggccagggtacttgcttaaggcaaaaagaataca

SEQ ID NO: 20036 - DNA, 201 bp, Homo sapiens
aatttctcatgtataaaataggaataataaataattacagtgactaattcatatgggtgcaatgacaattagggagattatacatataaattataatttgmagatttccagacaattagaaaccattaagttgagcatctgtggtctttctatctgttctcaatactcggtatatattgatggatgaaatatacaatatcc

SEQ ID NO: 20037 - DNA, 201 bp, Homo sapiens
ttatcatgtaacataagttttattgatttcctatcagcatttaagtgttgttaggttaaggattagtgcacttccagtcgtatgaagcatagttgtattaygttaggtccaattatgaccttattattgtctttatttagggattaagtatgatttcaggtgacgtatatgggtgccaagttgacaaggggtggacttgtg

SEQ ID NO: 20038 - DNA, 201 bp, Homo sapiens
tactcacttgtatagcagtgagcgtcagaagcatttttcatcttgcaaattagaattcttttaaatttccattgatttggttaattatgtgtaagaatacytcttatagtccctattttatttcataatgcattgtttttgatgactcaaatttcacattccaatagacacagtaaaaaaaaaaaagacaaaattcgcatc

SEQ ID NO: 20039 - DNA, 201 bp, Homo sapiens
tgaggcaggagaaccatttgaacccaggtggcagaggttgcagtgagttgagatcacgccactgcactttagccaaggcaacagagtgagactccgtctcaaaaaaaaaaaaaaaagatacctagatggctggttaagtatttgtctgtgagggtgttgccagaggagatttacattttaagttgctggactgggagagga

SEQ ID NO: 20040 - DNA, 201 bp, Homo sapiens
tttaagtctccattatgaatatatgataaaataaaatacatacaatgatgaaaacatagctttttaaacaaatgaatagcagcacttagggtaacctgaakaaggggtttgattgcctagaaagttcatttgctatattgactctgaaattacttggtatattttatcagctacttagattttttccatcactgtttctat

SEQ ID NO: 20041 - DNA, 201 bp, Homo sapiens
agtggctggtaacagtctttcctttccatatttagtacttccttcagcagctcttgtaaggcagatctggtggtaattaactccctcagcatttacttctyttatttctcctttgcttatgaagcttagtttgtccagatatgaaattctgggttggaattttttaagaatgttgaatattggttcccaatctcttctgac

SEQ ID NO: 20042 - DNA, 201 bp, Homo sapiens
tcacaagcatcttgtaagtacccctttttgacaaaacatagctttggttcccccaaacctcagcacattagaggaatagtgcccaacaggtcatggcaatytttaaagagcgagtatgacatggtttggctctgtgtccccacccaaatctcatctcgaactgtaatccccacttatcaagggagggacctggtggaagtt

SEQ ID NO: 20043 - DNA, 201 bp, Homo sapiens
atttgcatgattaaaaaaagagggttggatactttgaagtcctgctcattttgattcagctgttgttatggttcattttcagcctgcctataataattaayagcagattagagaaacacaactgtgaaaaatgaagaaatcttaataaaaatcagatacatgtaacatttatttttttttgttttagatcgcaatgaatgt

SEQ ID NO: 20044 - DNA, 201 bp, Homo sapiens
catagttggggagtctgctgtctcatatgatgaatgacctttctaaatattttcttaattcagtttttttgaaggctaatagtgaattctaataaacctcmatttggatttcattacttcatacaattaagtaaactaaagtttgtctttgtttttctgctcaaattaagggatttaaatttctgggtaagtgtttataat

SEQ ID NO: 20045 - DNA, 201 bp, Homo sapiens
gagcaaacagaaagaaccaggagcactgagcaggtggcaccctagaaggtggccctcactaaatatgcttttgaaataaatcataaaaataaaagagtctkgttatagacagctttgtaatggaaacataattaagtgtaatttcatgtatattgttcatcctttcttaagttctttgataatttcaagtcttcaataatg

SEQ ID NO: 20046 - DNA, 201 bp, Homo sapiens
acatttattttataactcatgctaactttactatgtaacatatagtatattgtatttaatggatgtatataacccttattttgtatcatatacattatacrtatatcataagattatatcgtgatatatgaaatacatatttctctgacaaaagaagtatttacaagtctgtgttgaatagacatacacagtactggcata

SEQ ID NO: 20047 - DNA, 201 bp, Homo sapiens
cagaaatagcaaccaatttggagagactcagaaaaaggggatgaacagttggccgtagggaagatgaagttggaaactgaaagcgttcgtgcttctacgtkgacccacaagattgggcagaatctaatccattttatataaggcaactgtagggtgagttcctttttttcccaatcctggtttcttctaagcactgaagct

SEQ ID NO: 20048 - DNA, 201 bp, Homo sapiens
cacctgtagtcgtagctactcaggaggctgaagcaggagaatggcgtgaacccgggaggcagagcttgcagtgagccgagatcacgccactgcactccagsctgggtcaacagagcgagactccatctcaaaaaaaaaaaaaaagaaaaagaaaacaaactcactcaaaactgcacaactatatggaaactgaacaacctg

SEQ ID NO: 20049 - DNA, 201 bp, Homo sapiens
aaagagcttatccaccacgatcaagtcggctttatccctgggatgcaaggccggttcaacatatgcaaatcagtaaatgtaatccatcacataaacagaascaatgacaaaaactgcatgattatctcaaaagatgcagtaaggccttcgataaaactaggcctttgataaaataggcccttcaataaaattcaacacccc

SEQ ID NO: 20050 - DNA, 201 bp, Homo sapiens
accattagttgaaataaatactgttttcctctttgaattacattagaatcttgttctacaaaaattaaataaccacatatgggtgggtctctttttgacawtattctttcattctattgatttatatgactatcctaacaccaatactattttttttgataactacagttttataataagtcttgaaatcatgtagtgtaa

SEQ ID NO: 20051 - DNA, 201 bp, Homo sapiens
atttatttaattaactaaatttatttaattaactaaattaactaaatttatttaattaactaaattaactaaaaagttaattttaatatctccaatatttaaaatgattatgtatttgttttttcataatataaaacatttattaactataaaatgtctgctgtttgcactaattagttagaatctttgaatttgctttta

SEQ ID NO: 20052 - DNA, 201 bp, Homo sapiens
tctaaaaacatgttcatgtgtaaagtaaacgaatggtgagattatgggaatttaacttttttcctcataatttaatctttctttctttctttctttctttkttttgacatagtctcattctgttgccaggttgaagttcaatgttgcaatcacagctcactacagcctcaacctccacagctcaagccatcctcccactcc

SEQ ID NO: 20053 - DNA, 201 bp, Homo sapiens
agacagagagcagctcttttgtctagattctaaaggtgatggtgaagtgaatcatctaagcacaatcccagactacgtgtcttcagagaccaatatcctakgtgaatgttttcaaacttcagaatcagcaagtgaaaggacagtgtatttccgtagacaaaggaaatacagtattctcatccacttagtcaatagaaagaa

SEQ ID NO: 20054 - DNA, 201 bp, Homo sapiens
tgcagtggcgtgatcttggctcactgcaatctccgcctccccggttcaagctattctcctgcctcagcctcctgagtagctgggattacaggcatgcgccmccacccctgctaatatttttgtacttttaatagagatggggttttgccacgttggccaggctggtctcaaactcctgacctcaggtgatccacccgcctc

SEQ ID NO: 20055 - DNA, 201 bp, Homo sapiens
tcttgcaaagcataataacattgaaccattattttttatatacaaattatgagacgtactgggatctagttctgggattctctgtaagaattcattctaasgtgacaaatcaataagatcatgagaaggctgtttatgtctgcatgtgaggatgtgggagactcttaaaatacctagagagatatgattttggacagaaga

SEQ ID NO: 20056 - DNA, 201 bp, Homo sapiens
tcctctttataaaaaattttttgtgattaaggtggtagttgaaaccaaggtttagaatgatatgtgaggataggatagggggatatagaatgagaaaaagmcaaagattaaccacagaactctagggaacaccaatgtttaaggagcaggccaaagtataggagcccattccagaaattaagatggagccaaggacaaact

SEQ ID NO: 20057 - DNA, 201 bp, Homo sapiens
cttcatagaatttaattattcttcagaccacataattagataccatgggtatcccctagtcattctgattttctgatttgtatagttcattataagactatctagtgtttttaatacttaaaaaataataaacaataatactagaatcatctcagtgagaagtttcttgaaaagtttaaggggggaggagccaagatggcc

SEQ ID NO: 20058 - DNA, 201 bp, Homo sapiens
ttacagtgactaattcatatgggtgcaatgacaattagggagattatacatataaattataatttgcagatttccagacaattagaaaccattaagttgarcatctgtggtctttctatctgttctcaatactcggtatatattgatggatgaaatatacaatatccctgacctgatagcacttggaatatagtatgcagt

SEQ ID NO: 20059 - DNA, 201 bp, Homo sapiens
cccagctgggcgcggtggctcacgcctgtaatcccagcactttggggggccaaggcgggcagatcacgaggtcaagaggtagaaaccatcttggccaacayggtgaaaccccatctctattaaaaatacaaaaattagctgggcatggtggtgtgcacctgtcctagctactcaggagactgaggcaggagaattgcttga

SEQ ID NO: 20060 - DNA, 201 bp, Homo sapiens
ggagcagaagcaggatggggcgtcacctcatccaggaagtgcaaggggttggggaactccctcccctaaccaagagaagccatgaaggactgtgccttgaygaacagtgcattctggcccagatgctatgcttttcttacagtcttggcaacccacacaccaggaaattccttcgggtgagtacaccaccagagccctggg

SEQ ID NO: 20061 - DNA, 201 bp, Homo sapiens
ttcatagaatttaattattcttcagaccacataattagataccatgggtatcccctagtcattctgattttctgatttgtatagttcattataagactatctagtgtttttaatacttaaaaaataataaacaataatactagaatcatctcagtgagaagtttcttgaaaagtttaaggggggaggagccaagatggcca

SEQ ID NO: 20062 - DNA, 201 bp, Homo sapiens
gatcctggaaaactaaaatattttggaaaagttttggaagacctataatcagaataacttccaaagagaataaagtaggtgaaattagggagactgacctaaaattgtgaagaaaagcagtatggttgacatactgaataaattcttgttaaaataagagggtagaaattttatagatgattacacatgtgaagtattaga

SEQ ID NO: 20063 - DNA, 201 bp, Homo sapiens
tcatagaatttaattattcttcagaccacataattagataccatgggtatcccctagtcattctgattttctgatttgtatagttcattataagactatctagtgtttttaatacttaaaaaataataaacaataatactagaatcatctcagtgagaagtttcttgaaaagtttaaggggggaggagccaagatggccaa

SEQ ID NO: 20064 - DNA, 201 bp, Homo sapiens
agtcttggaatgtagaagggaaaattacctacagcaagagaacaaaaaacaatatttcaataaattatcctagcatatatatatatatatatatatatatatacacttaaaaatagtcctgatagtatatcccaaaatgttaatcatgtgtatcaaggatgagatttttaaattacttttttcttgcttttatctacattt

SEQ ID NO: 20065 - DNA, 201 bp, Homo sapiens
catagaatttaattattcttcagaccacataattagataccatgggtatcccctagtcattctgattttctgatttgtatagttcattataagactatctagtgtttttaatacttaaaaaataataaacaataatactagaatcatctcagtgagaagtttcttgaaaagtttaaggggggaggagccaagatggccaaa

SEQ ID NO: 20066 - DNA, 201 bp, Homo sapiens
gggatttacaaatccaggataaatagctagtagtggcaccttcttcaccagtcttacattttccagtcagacctgatttatgtgaagatggagagagttamcaacctctgtcttcaaccaaacatacaaaatcttatgtgtcctagagacttacaattgccaaaatctctcattggataagaaatccattttactttatgc

SEQ ID NO: 20067 - DNA, 201 bp, Homo sapiens
aagttttttacaatgaatatagatttgcgaatttttttaagttgatctttcatttaaaagggttcatttggtgtgttttataaactactcccaaggttaattttttctctcctttaagaattctataaacacttcacagtttcaagtcagtatacatccctatggtgtgtataagacgtgatttcaatgaatggtgattgc

SEQ ID NO: 20068 - DNA, 201 bp, Homo sapiens
gcgcaccaggagattatatcccgcacatggctcggagggtcctatgcccatggagtctcactgattgctagcacagcagtctgagatcaaactgcaaggcrgcagcgaggctgggggaggggcgcccaccattgcccaggcttgcttaggtaaacaaagcagcccggaagctcgaactgtttggagcccaccacagctcaa

SEQ ID NO: 20069 - DNA, 201 bp, Homo sapiens
catctttagggcgagtattgctgcctgggggccagagcattgcacattgatccttcagaccctctgcactacatagctgccagccagccaaggcccaaggkatgccagggttacatgtgcccttctcagatcctggaaatgggtgagggccaagcatgggtcttcctgggcattctcctgttaaactaaaacatctttgtg

SEQ ID NO: 20070 - DNA, 201 bp, Homo sapiens
gggagaatgaaagtcacatccgtcaggtccccattcaaatggactcaaaaccacttcagtgtgtcctgtctcacctcaatcactgttttagagaaaaacattttttttcaccatacaaaaaattagtggaattcagaaacaatgaacatttgtattgtggacatagtacactttatatcacttccagtgacatcaatgata

SEQ ID NO: 20071 - DNA, 201 bp, Homo sapiens
tctttttcagatactgatgagtgttcaatcggcaatccgtgtggaaatggtacatgcaccaatgttattgggagttttgaatgcaattgcaatgaaggctytgagccagggcccatgatgaattgtgaaggcaagtgatctttgtcttaaatattatttcttcttgacatagaaagtgttttttaatgtctcaatatttat

SEQ ID NO: 20072 - DNA, 201 bp, Homo sapiens
cttctaaccttggtttttaattgtaatttactgttaatttaacttcaatactatctatttagtttaagtactgtaatgatccatgtttgaatcaatggtgttttttggcgggagtaaggtgttaggactatcgaataagttgtattttaaaaatatgtgtattgcgcatttcaactattaatcattcacattctattgtta

SEQ ID NO: 20073 - DNA, 201 bp, Homo sapiens
taaactacagcttgctccagataatttttaatttttattttttgttctagatctggatgaatgtgctgaagggttacacgactgtgaatctaggggcatgrtgtgtaagaatctaatcggcaccttcatgtgcatctgccctcctggaatggcccgaaggcccgatggagaaggctgtgtaggtaagcggtaagggaaggt

SEQ ID NO: 20074 - DNA, 201 bp, Homo sapiens
gcaagaattaaggttgctgcagacccaggcagatttgctacagctaacaatatgattccatatatgtgaatttctagcaggtcaaactaatctatgttgakaaaaaatctgaagaatggttgtctcaagaggttaggaataagcattgactgggaagaaacatgatagaacattctatggttatgataatattctatatct

SEQ ID NO: 20075 - DNA, 201 bp, Homo sapiens
taattattttacaaaagagtgagtttctgaactattctgaattacatgtgtcatataaaaaattatatatacaacaaattataattggattttttagtttmttttcatttgttagatatttcattcaaatatagtacttaataaagttaaaaatagacgtacataggaggtgtagttatgcagtgattctttcaaaaacac

SEQ ID NO: 20076 - DNA, 201 bp, Homo sapiens
tttaaagggctctcatttaatgttaaggcgtctgcatttataagaagaactgtgttttgtttcttctaagatttgacgggtttatgatagtactaagaagaaaaagaggtctaaggagtaaaaattgcagggtaaaaaactatagggcagataacaacattctgaacatacttttatatatgggcattaatgagatatgtc

SEQ ID NO: 20077 - DNA, 201 bp, Homo sapiens
gaaagtgaatcaatacatgtggcagtagccacaggggtaataggtgaataagagagttttttgtattgttttaagatgaaagttactagagaatttatgcygagggaatgattccttgaaaagggagtattgtgaaatctgggaaggcaatctagagtaccggtgcaagagctggccttggagaaaaaacaaagatagttt

SEQ ID NO: 20078 - DNA, 201 bp, Homo sapiens
tgattttttcacccttttaaaaacattattcaaaacattagatcaagaccaaaaaaataagaaagaaaacttttagaagaccatataaaattcataatagscagaaactggaaacagcctaagtttctgtcactaggagaataagcacagggtgtaatattcataaggtggaacagtgctgtggaggtcatgaataggctc

SEQ ID NO: 20079 - DNA, 201 bp, Homo sapiens
taagaatttgaagcacaaattatgtactacagaagaaactgtattatacataatcaaacttggaagaactcaggcagtatatcctgagttcttccaagaaygcttttagttcaaaagccctttttgaaaaaaaataattcagacaaatcaaatacaattcaaaatcagggtgaatgacattaaggataggattagaccaag

SEQ ID NO: 20080 - DNA, 201 bp, Homo sapiens
acagtcatgaatcaaaaggggtcttttacagaccacagaactggataaatgctatgcttttgtatttgtccattgtacttcctggtgaggtaaaaagggatttttttttttccctgagtaaaaattatgtgggtctggtatttctctttgctgaataatttatttctggctgcacagtattaattttcaggctgtgaaacc

SEQ ID NO: 20081 - DNA, 201 bp, Homo sapiens
gaaggaatcacagttatcgagaaagaaagaaagaaacagctacttcaggagcaaatgagagcagggaatatttaaggcaaattgtgatagacttctatggycctcaataaaacacaccttcaagtattcattgcactgtatgatactggggctgaccatgtgactagctttggccaatggtacacagcacccataaagtaa

SEQ ID NO: 20082 - DNA, 201 bp, Homo sapiens
aaaaagcacaaaaagtaaggatatagagaattttagtgaaaacaattttgttgaagtaggtttatttatcaccaaccaaaagagcagtattacttaaactkcctctcccattaactaccctcacagaccatagttgttcctgtgattttactcaaaaccaatttagcagcttgtcctttattcctggcctgtgaggctttt

SEQ ID NO: 20083 - DNA, 201 bp, Homo sapiens
cttgatttttgtataaggtgtaaggaaggggtccagtttcaattttctgcatatggctagccagttttcccagcaccatttactaattaggagatcctttmcccattgcttgtttttgtcaggtttgttgaagatcagatggttctagatgtgtggtgttatttctgaggtctctgttctgctccattggtctgtatgttt

SEQ ID NO: 20084 - DNA, 201 bp, Homo sapiens
atttccattatgatagtattaggtggtggggcctttgggaggtaactgggtcatgagggtggagccctcatgaatgggatcagagggttctctagctttgyttcccttaagtgaggacacagtgagaagtgagtcacctgcagcctggagaaatgccctcaccagaacccgaccatgctggcatccttatctcagttctca

SEQ ID NO: 20085 - DNA, 201 bp, Homo sapiens
tttgactagtgagattaaaatttatttcacagctattcaactccagcacattttgggttttataaccagttttccaaagttgattatcccttctgacaccraaagttagacagtttgagtgtgtgtgtatgtgtgtgtactttgcagaaaagaaaaatagaccaccccagaagttaggatattcctaatacattttgggga

SEQ ID NO: 20086 - DNA, 201 bp, Homo sapiens
gaatgtttaccagaagactagcactgcttaagaggtgtttagaaaaacaatgacatgaacaacatcatatataaagagttgtgaagggaaggcataaatarctggtaaggttttatgaccagctgcagaaacaaggaaaatatatcatctagagattccagacttgaaactgaatgcattaaattagcatcaagttaatct

SEQ ID NO: 20087 - DNA, 201 bp, Homo sapiens
cataactgagcagaaaggggcactgtggtcctgcagagaaatatcaggatgcttcctgtttctgtgtagtaattcaaattacttcacaggttattcacatrttgaattattgtgatccactaaataaattagtctgattttatcctttgtggtcttctcaaaagaaatttctagtgacagctaagtgaattaagaacaaaa

SEQ ID NO: 20088 - DNA, 201 bp, Homo sapiens
ataattaagacattaagctgtcttaattattcctaaggaggaaattcttgactgccctgcttaatttgaaagccaggataatgaaatgtcagttccgcatmcttaactctttctactttgccatttcagacaatcgacagggtctctgctttgcagaggtactgcagacaatatgtcaaatggcatccagtagtcgcaatc

SEQ ID NO: 20089 - DNA, 201 bp, Homo sapiens
tgtaggctccacctctgggggcagggcacagacaaacaaaaagacagcagtaacctctgcagacttaaatgtccctgtctgacagctttgaagagagcagyggttctcccagcacgcagctggagatctgagaacgggcagactgcctcctcaagtgggtccctgacccctgacccccgagcagcctaactgggaggcacc

SEQ ID NO: 20090 - DNA, 201 bp, Homo sapiens
tcaaattactccgagctatgggaggacactcaaaccaaaggcaaagaacttgaaaactttgaaaaaaatttagatgaatgtataactagaataaccaatasagagaagtgcttaaaggagctgatggagctgaaaaccaaggctcgagaactacgtgaagaatgcagaagcctcaggagctgacgcgatcaactggaagaa

SEQ ID NO: 20091 - DNA, 201 bp, Homo sapiens
ctagcagaaggcaagaaataactaaaatcagagcagaactgaaggaaatagagacacaaaaaacccttcaaaaaattaacgaatccaggagctggtttttkgaaaggatcaacaaaattgatagaccactagcaagactaataaagaataaaagagagaagaatcaaatagatgcaataaaaaatgataaaggggatatca

SEQ ID NO: 20092 - DNA, 201 bp, Homo sapiens
gggtgtttactgtaacattatttgaaattttctgtatggctaaaaagtttcttaacaaatcccagaacactgcagataagaaaatcaaatgcatctcaagmagtcagatgcaaaaaaagacaaagaaatttaatggtgaagaggtagagcaggataactgaatagaaccctccagctattgtcacctctgcaggaaaacca

SEQ ID NO: 20093 - DNA, 201 bp, Homo sapiens
aacaaatttacaagaaaaaaacaaacaaccccatcaaaaagtgggcaaaggacatgaacagacacttctcaaaagaagacatttatgcagccaaaaaacasatgaaaaaatgctcaccatcactggccatcagagaaatgcaaatcaaaaccacaatgagataccatctcacaccagttagaatggcaatcattaaaaagt

SEQ ID NO: 20094 - DNA, 201 bp, Homo sapiens
actgaagaggttaggaaagacagtcttaaaaggccaacaccatgctacccctgtcccccgcagcagctgcatggcagagagagagaatctgtgtgcttggrgggaagaacagcacagtgactgtgggacactgtattggaactcagtgccacctgtctcagtggaaagcaacacaaggtggaatctggctggcacccacag

SEQ ID NO: 20095 - DNA, 201 bp, Homo sapiens
aacaccgcatattctcactcataggtgggaattgaacaatgagaacacatggacacaggaaggggaacatcacactctggggactgtggtggggtcggggraggagggagggatagcattgggagatatacctaatgctagatgacgagttagtgggtgcagcgcaccagcatggcacatgtatacatatgtaactaacct

SEQ ID NO: 20096 - DNA, 201 bp, Homo sapiens
tgaagaggttaggaaagacagtcttaaaaggccaacaccatgctacccctgtcccccgcagcagctgcatggcagagagagagaatctgtgtgcttggagkgaagaacagcacagtgactgtgggacactgtattggaactcagtgccacctgtctcagtggaaagcaacacaaggtggaatctggctggcacccacagag

SEQ ID NO: 20097 - DNA, 201 bp, Homo sapiens
ggaacatcacactctggggactgtggtggggtcgggggaggagggagggatagcattgggagatatacctaatgctagatgacgagttagtgggtgcagcrcaccagcatggcacatgtatacatatgtaactaacctgcacattgtgcacatgtaccctaaaacttaaagtataataattaattaattaattaaaaaaaa

SEQ ID NO: 20098 - DNA, 201 bp, Homo sapiens
tcaaagggataataacagagaactccctgtacctaaagaaatatatcaatatttaagtacaagaaagttataaaacaccaagcatatttaactcgaatagrggactacttcaagacacttaataatcaggctcccaaaggtcaaggataaagaaaggatcctgaaagtatcaagagtaaagaaataaataacatacaatgg

SEQ ID NO: 20099 - DNA, 201 bp, Homo sapiens
aaagttataaaacaccaagcatatttaactcgaataggggactacttcaagacacttaataatcaggctcccaaaggtcaaggataaagaaaggatcctgraagtatcaagagtaaagaaataaataacatacaatggagatccaatacatctggcagcagacgtttcaggggaaacctatgtgccaggagagagtggaca

SEQ ID NO: 20100 - DNA, 201 bp, Homo sapiens
ctaactcattttatgaggccagcatcattctgataccaaagccaggcagagacacaaccaaaaaagagaattttagaccaatatccttgatgaacattgaygcaaaaatcctcaataaaatactggcaaaccgaatccagcagcacatcaaaaagcttatccaccatgatcaagtaggcttcatccctgggatgcaaggct

SEQ ID NO: 20101 - DNA, 201 bp, Homo sapiens
atgcctggctaatttttttttgtatttttagtagagatggggtttcgccatgttgcccaggctggtctcaagctcctgacctcaggtgatccacccacctmggcctcccaaagtgctgggatttataagcatgagccactgcgcctggccggcatatctttttatatgaggaaattcacatgcagttctatattttagatg

SEQ ID NO: 20102 - DNA, 201 bp, Homo sapiens
tcacctagtcagaaaagaaaatctctgctaagtaaagaggagtcattaatgctgatgccttcagggcccaggaaggaaacatcagtgaatgtactgagctsggatttagtggtgtcctggagaaaacacacttcatcccaccagtgctgtgtgacatggcaggtctagcatgaccagaacttccaatttttcaagagaagc

SEQ ID NO: 20103 - DNA, 201 bp, Homo sapiens
acaatgtgttttcacaactagaaattccagtttaaaaacagtaaaaatattattacaaagaaaaagtatttacaaaagtcaggatgaaaaataaagccacaaaaaaaatcaataaaaatgccaatgcatgaaattggaatcaaacttacccaaaaaagtcgattgcaacggaaactaaaagtattacagttaagggaatta

SEQ ID NO: 20104 - DNA, 201 bp, Homo sapiens
tagcttaacactagctctaaatcatggttcttttgaagtttggaagataatgatatcctgtagctgatgaaattagttgtgaatgaaacatgcccttgtartaaacagagtagctgtggaaaatgagggacaacaggaaattaagataatacttaaagaattaagctgtgagaaaatcagtaactttattttatttattta

SEQ ID NO: 20105 - DNA, 201 bp, Homo sapiens
tttgcactaaggaatctgctttttatgatacatttatgttgggaggcagagcatagagtagtttggaaatttagtgcagagtcatttggagaatatatatyaacagttaaaatgtgaaatggaaatttgaagtatgtatgcttttataaactatttgggaagggcatactagcagtgatatttttagtctgatttttagaa

SEQ ID NO: 20106 - DNA, 201 bp, Homo sapiens
caggctttgatctggattgtgatctggagcaaagtttgaaatatccagatgacattttaactttttaaaaatctattttattttcaaacatatttatcccmgtaacaagaggaaaattatagagaaaaatgacaatttaagttttcagtaaaattaaggaaataaatttggggagggaagagaacatttgggacccaaatg

SEQ ID NO: 20107 - DNA, 201 bp, Homo sapiens
tttttaatacttaaaaaataataaacaataatactagaatcatctcagtgagaagtttcttgaaaagtttaaggggggaggagccaagatggccaaatagsaacagctccggtctacagctcccagcatgagtgacggagaagacgggtgatttctgcatttccatctgaggtgctgggttcatcttactagggagtgcca

SEQ ID NO: 20108 - DNA, 201 bp, Homo sapiens
ttgtccagtaatgtgggatgcttaaaggagcctcagtaaagagagtttaaaagaacttgtgccacatccatgtgtcaaaaacagagaaactcttaagtttmtgattctcaggttgtaaacctgagaaacaaaaatcacaaatacatactttcaacattttatattttaatttaaaatttaaagtgcacatttgtttgtcac

SEQ ID NO: 20109 - DNA, 201 bp, Homo sapiens
ttgtactttttaggtatctctgtaatgcttctatcctcccaaaaatgaggattgtatctcagtcactttcaaacttactggactatgcaatgcaaatatatttatatatatatatatatatatatatatgatttaccaaataaatcataccatttgcagttaattagttcaaaatgtacaacatttgtggttgctatggtt

SEQ ID NO: 20110 - DNA, 201 bp, Homo sapiens
tactttttaggtatctctgtaatgcttctatcctcccaaaaatgaggattgtatctcagtcactttcaaacttactggactatgcaatgcaaatatatttatatatatatatatatatatatatatgatttaccaaataaatcataccatttgcagttaattagttcaaaatgtacaacatttgtggttgctatggttgac

SEQ ID NO: 20111 - DNA, 201 bp, Homo sapiens
ttcataaacaaaggcaaagtgtatggcacactctttagaatatcagaaacagtattttttacatagctattaaaataatgtaaaacattctgtaggttgcstattcactctgatgatagtttcttttgctatgcagaagctctttagcttaattagatcccatttgtcaattttggcttttgttgcaatttcttttgacgt

SEQ ID NO: 20112 - DNA, 201 bp, Homo sapiens
agctcgctgcaacttccacctcctccctgcaacttccacctcctccctagtagctaggattacaggcgcctgccaccatgcctggttaattattattagtttattattattattattattattactattattattattattattattgtatttttagtagagacggggtttcaccatgttggccaggctggtttcgaactc

SEQ ID NO: 20113 - DNA, 201 bp, Homo sapiens
gctcgctgcaacttccacctcctccctgcaacttccacctcctccctagtagctaggattacaggcgcctgccaccatgcctggttaattattattagtttattattattattattattattactattattattattattattattgtatttttagtagagacggggtttcaccatgttggccaggctggtttcgaactcc

SEQ ID NO: 20114 - DNA, 201 bp, Homo sapiens
aatttagcagggaatctgtgcattcatttggccttgggcaatccttccatttcatcaggaacttttctaaccctcccaatcatcatcctgtttgaccttgmtaaagcttttggcactattaatcattatcttcttgaaatgttgtttttcattttctttgaaacacccttgacttttaaaatgccagtggccttcagtgct

SEQ ID NO: 20115 - DNA, 201 bp, Homo sapiens
ctcgctgcaacttccacctcctccctgcaacttccacctcctccctagtagctaggattacaggcgcctgccaccatgcctggttaattattattagtttattattattattattattattactattattattattattattattgtatttttagtagagacggggtttcaccatgttggccaggctggtttcgaactcct

SEQ ID NO: 20116 - DNA, 201 bp, Homo sapiens
ccaggttttggtatcaggatgatgctaccttcataaaatgagtcagggagtagtccctacttttcaattgtttggaatagtttcagaaggaatggtaccakctcctcttggtacctctggtagaattctgctgagaatccatctggtcctgggcttttttttggttggtaggctattaattactgcctcaaatttagaact

SEQ ID NO: 20117 - DNA, 201 bp, Homo sapiens; identical to SEQ ID NO: 3343

SEQ ID NO: 20118 - DNA, 201 bp, Homo sapiens
aaggcaaatatttcatggtctcactcatatgtgtataaaaattgatctcatggagtgagagagtagaataagagttaccaaaggctgggaaggatgtttgrccatagtggaggatgaagagaagttacttaatgtgtacaaacatacagttagacagaaggaataagttccagtgtttcataacaagagtagggtgactat

SEQ ID NO: 20119 - DNA, 201 bp, Homo sapiens
gctgtttccaatggctctgcttaactgagacctgagagtgattgctccatctgtggtggcatatgggctgaaactgcctagcagcatgtcagaagtggggygttcgcaggacatccttgtccaggttggcagttgagcttggcaggtgaccgctgagaccccttccaactccaccacttcaggaatctctttttttttttt

SEQ ID NO: 20120 - DNA, 201 bp, Homo sapiens
aattattcgagcatggtggtgtgtgcctgtagtcacaactacttgggaggctaaggcaggaggatcacttgagcccaggagttcaaggctgcactgagccrtgacggtgcgactgcattctagccacagaatgagaccctgtctctaaagcaaaaaagagaaggagaataagtgaggtacttgagcaagtgggtgaggatg

SEQ ID NO: 20121 - DNA, 201 bp, Homo sapiens
gcctcggcctcccaaagtgctgggattacaggtgtgagccaccgcacctggccagtggagttccttcttaagtacatgtattgacatctttaaaaagggcragaggatttacaggaaactatcaggtcagtaatggcaggggccgtccacagtgggtggctgagtccccctatttttctgctggtgtgcggggaggtcatt

SEQ ID NO: 20122 - DNA, 201 bp, Homo sapiens
aaaatggaatgcagaattaagtgtatgcaccttgccagaaacagggtttggggtttacattagatgctcagataggtcattgatccccaaaacactaaggwctctgacttctagacagatagtagttaagaaccaaagctttggagcttgagtgctggatttaagacccatgactgtcacagctgtgcaacctcagacaaa

SEQ ID NO: 20123 - DNA, 201 bp, Homo sapiens
aggtgtgagccaccgcacctggccagtggagttccttcttaagtacatgtattgacatctttaaaaagggcgagaggatttacaggaaactatcaggtcartaatggcaggggccgtccacagtgggtggctgagtccccctatttttctgctggtgtgcggggaggtcatttcctgccacccatgtttccccaccctgaa

SEQ ID NO: 20124 - DNA, 201 bp, Homo sapiens
tggtctcatttctgattttaaaatggctctggctgtgatgtggagaagaggcagggtgagcctcatctgcagcaactgctaactgcccacatccccccagmcttctcaaaaatttgccactcccctgctcaaagaccctcaaaagctgcccactgcttagaggacaggcctttgacctgaggtcctcacttgggcttcagg

SEQ ID NO: 20125 - DNA, 201 bp, Homo sapiens
cctggtctcatttctgattttaaaatggctctggctgtgatgtggagaagaggcagggtgagcctcatctgcagcaactgctaactgcccacatccccccrgacttctcaaaaatttgccactcccctgctcaaagaccctcaaaagctgcccactgcttagaggacaggcctttgacctgaggtcctcacttgggcttca

SEQ ID NO: 20126 - DNA, 201 bp, Homo sapiens
taatcccagcacttttggaggctgaggcgggcagatcacttgagatcaggagttcgagaccagcctggtcagtatgatgaaaccccatctctactaaaaayacaaaaattagttgggcatggtggcttgcctgtagtcccagctactggggaggctgaggcaggagaatcacttgagcctaggaggtagaggttgcagtga

SEQ ID NO: 20127 - DNA, 201 bp, Homo sapiens
taatttcaaagtagataagcataaataatactttatgatactgaaattgtgatgtgatatgagaatagctgtgagttttgttttgctggggacaggatcastgatgctgtcattactggggtctcttccctccattctttttttaaaattgtattttattttatttttaaaattttaaaataaatagagacagggtatcac

SEQ ID NO: 20128 - DNA, 201 bp, Homo sapiens; identical to SEQ ID NO: 3462

SEQ ID NO: 20129 - DNA, 201 bp, Homo sapiens
gccaagtgatatctcttcccttctgctgtcttcccttctgccatccttcacatggtggcattgtatccttagacttgccacccatgccctcaggttggccrttgcacactgtcttacataaagcaggaaggaaaggaaaggctgctacgagagagtgtaccttgtgcatctcttttttaatcaggaagcaaacatctttct

SEQ ID NO: 20130 - DNA, 201 bp, Homo sapiens
agtccccctatttttctgctggtgtgcggggaggtcatttcctgccacccatgtttccccaccctgaatccaccttcctcacattcccattggagggacamtctctggacatatgggacctggggtcccacagggctgcattccaatgcctgctgtgccactcgccagctgtgtgatgttgggcatatcccataacctctt

SEQ ID NO: 20131 - DNA, 201 bp, Homo sapiens
cctgccacccatgtttccccaccctgaatccaccttcctcacattcccattggagggacactctctggacatatgggacctggggtcccacagggctgcawtccaatgcctgctgtgccactcgccagctgtgtgatgttgggcatatcccataacctctttgtgcctcagtttcctcatctgtaacacaggagtgacaag

SEQ ID NO: 20132 - DNA, 201 bp, Homo sapiens; identical to SEQ ID NO: 3463

SEQ ID NO: 20133 - DNA, 201 bp, Homo sapiens; identical to SEQ ID NO: 3464

SEQ ID NO: 20134 - DNA, 201 bp, Homo sapiens
tgggacaacaggcgcttgccaccacacctggctaattttcttattttaatttaattttattttattttttgggacagagtggagtctcaaaaaccaagctrgagtgcagtggtgcgatctcgactcactgcaatctctgcctcccgggttcaagcgattctcctgccttagcctcccgactagctgggattacaggcgtgt

SEQ ID NO: 20135 - DNA, 201 bp, Homo sapiens
tcctgggctaaagagatcctcccatttcaacttccagagcagctgggacaacaggcgcttgccaccacacctggctaattttcttattttaatttaatttwattttattttttgggacagagtggagtctcaaaaaccaagctagagtgcagtggtgcgatctcgactcactgcaatctctgcctcccgggttcaagcgat

SEQ ID NO: 20136 - DNA, 201 bp, Homo sapiens
ctgacaaaagggtgagttattcaacagattaccagcatgagtaactgatgcttacctgccggggatctctggaagaccatgcatggcacatgcccagttatgcctgcaaaggagagggagctggggtatttgtccaccagctcccatctgtcattggctgagagctgcttccaggagcattaattctccagcacttccagc

SEQ ID NO: 20137 - DNA, 201 bp, Homo sapiens
acaatcttgcctaacagtaacctccgcctcccgggttcaagcaattcttctgcctcagcctccagagtagctgggattacaggcgcatgccactatgcccrgctaattttttgtatttttggtagagatggggtttcaccatgttggtcaggctggtctcgaactcctgacctcatgatctgcctgcctcagcctcccaaa

SEQ ID NO: 20138 - DNA, 201 bp, Homo sapiens
cacaatcttgcctaacagtaacctccgcctcccgggttcaagcaattcttctgcctcagcctccagagtagctgggattacaggcgcatgccactatgccyggctaattttttgtatttttggtagagatggggtttcaccatgttggtcaggctggtctcgaactcctgacctcatgatctgcctgcctcagcctcccaa

SEQ ID NO: 20139 - DNA, 201 bp, Homo sapiens
tgaaacagataacaatgtatgggaccctcattcattatttcagcaaatatttgctgagttcctcctacatggctagccctgtgctagacactggggaatcrgcgatgaacaaagcagatagaaatccccactcttgtggagctgacattctggagggagagacaaaaagcaaacatataaagaaagaaagaaatcacatgg

SEQ ID NO: 20140 - DNA, 201 bp, Homo sapiens
tcctactggggagactgaaaatacatatcaatcacaaacaggtggttttccatagtgacccactctctgaatgcactagaccagggtggaggccagagatsttctggggtgctttttgcaagggggaccaggataaggctctccaaggagggaaaatttgaggggggccctgactggggagaatgagctggccagggataa

SEQ ID NO: 20141 - DNA, 201 bp, Homo sapiens
ttttgagacggagtctcactctgtcacccaggctggagtatagtggcacaatcttgcctaacagtaacctccgcctcccgggttcaagcaattcttctgcytcagcctccagagtagctgggattacaggcgcatgccactatgcccggctaattttttgtatttttggtagagatggggtttcaccatgttggtcaggct

SEQ ID NO: 20142 - DNA, 201 bp, Homo sapiens
attggaatttattgagacaatacatataaagtgcatattccagcctcttgcaaataccaagtgccatttatgtatcagttagtgtttgctgtgtaacaaaygaccccgaaatgtagagggttacaacaactttatttagcttatgcttctgcaggctggcatttggggctgggctcagcagtgagggtggcgggggaggct

SEQ ID NO: 20143 - DNA, 201 bp, Homo sapiens
atacgtatttactgagcagctactacacaccttgagagtagagctgagaacatatcgacaaggaccccacttttttcttttttttttttttttttttttttgagacggagtctcactctgtcacccaggctggagtatagtggcacaatcttgcctaacagtaacctccgcctcccgggttcaagcaattcttctgcctca

SEQ ID NO: 20144 - DNA, 201 bp, Homo sapiens
ctggcctcatataagcatttctgtctccatttatcatccatctttccctcttgaaggtcagtttcaccaaggcaggcatctttgtctcgttcactgttgtrgcctcagggccaggcacagtgagtcaaacatagaaggtgctcaataaatatgtgtttatttattgaaaccatgggcagaggctaattcagaagcggtctg

SEQ ID NO: 20145 - DNA, 201 bp, Homo sapiens
cctgagctcaagcgatcctccctcctcagcctcctaaagtgctgggattacaggcgtgagccaccgcacccggcttccatatcctttctaattggtcatgrcttgggataatggtgttgcttttaattatcatcatccataaagactttttcttactcaacagatctgagcttgtatttggtgcccaggacatgtgctggg

SEQ ID NO: 20146 - DNA, 201 bp, Homo sapiens
gtcctctcagtcaataatacgtatttactgagcagctactacacaccttgagagtagagctgagaacatatcgacaaggaccccacttttttctttttttyttttttttttttttttgagacggagtctcactctgtcacccaggctggagtatagtggcacaatcttgcctaacagtaacctccgcctcccgggttcaag

SEQ ID NO: 20147 - DNA, 201 bp, Homo sapiens
cgcacccggcttccatatcctttctaattggtcatggcttgggataatggtgttgcttttaattatcatcatccataaagactttttcttactcaacagayctgagcttgtatttggtgcccaggacatgtgctgggttcccgaaatcccaaagacacagaccctaccctcagggatttctcattctagcaacatagactg

SEQ ID NO: 20148 - DNA, 201 bp, Homo sapiens
ttcccgaaatcccaaagacacagaccctaccctcagggatttctcattctagcaacatagactgatcaattactgattataacgttagaaggcatgtctgmagtagacagccatcaggacatggtgatttcaggctgggctttgaagaatgaataggagtttttcaagtgtcgaaactgaaccctgaccaacctttgcttt

SEQ ID NO: 20149 - DNA, 201 bp, Homo sapiens
aaggctctccaaggagggaaaatttgaggggggccctgactggggagaatgagctggccagggataagcaagatggagtcatcccacatccccttacaacrctgggtgcctgggcaactgggggcatttgggggcatgtggtaggagccagaggaatttgcgacgattgccctgatggagtcaggagacctgggtttgaat

SEQ ID NO: 20150 - DNA, 201 bp, Homo sapiens
ggctgaagtgcagtggcgcggttacggctcactgcagcctccaattcctgggctaaagagatcctcccatttcaacttccagagcagctgggacaacaggygcttgccaccacacctggctaattttcttattttaatttaattttattttattttttgggacagagtggagtctcaaaaaccaagctagagtgcagtggt

SEQ ID NO: 20151 - DNA, 201 bp, Homo sapiens
ctaaaaccggcatcctactggggagactgaaaatacatatcaatcacaaacaggtggttttccatagtgacccactctctgaatgcactagaccagggtgsaggccagagatcttctggggtgctttttgcaagggggaccaggataaggctctccaaggagggaaaatttgaggggggccctgactggggagaatgagct

SEQ ID NO: 20152 - DNA, 201 bp, Homo sapiens
tcctgggcccagtgctgccgagcagtccctctggagtgcagggtggcagggacttgcccctctagtctgcccctttgcagtcctctcagtcaataatacgyatttactgagcagctactacacaccttgagagtagagctgagaacatatcgacaaggaccccacttttttcttttttttttttttttttttttttgagac

SEQ ID NO: 20153 - DNA, 201 bp, Homo sapiens
cagcaagtttaagatctggaggtggcactgagctttggaggagcagggggcaatgaggtggccggtgtgacgaggactcaatgtgcaagagggagagtggyggggagatgaggtggaggggtggtcggcggtcagatcgtggagggtctcggacgagggtcctgaccctgggtctccagtcctgggaagtggagcccaggc

SEQ ID NO: 20154 - DNA, 201 bp, Homo sapiens
aaaagcaaacatataaagaaagaaagaaatcacatggatctggatgacagtgagtgctgggaagaaaataaaagcagaggaaggggatggagcgatgggcrgggggcaacggtagggagggtgtcggggaaaactttttggagaatgtgacgatgaaagtgaacaaggagaagtcaaccgtgttgagatgatggcagctaa

SEQ ID NO: 20155 - DNA, 201 bp, Homo sapiens
actggggactcggcagtgaatgggacagaccctggctgtcaggatgacagacaatttaaaaagggacagatgtcccacgctggcttgtcctttgcaccccyggcacttcgtgaggagcagcggccagttcttgtatatagactggcccttggtgtacatttgtctgacgtttccaaatgatgtatgcatccttggcaggaa

SEQ ID NO: 20156 - DNA, 201 bp, Homo sapiens
tgaactcctgacctcaagtgatccacccacctcgttctcccaaggtgctgggtacaggcatgagccactgtgcctggccaattttcttacattttgtagagactggctgtcacttatgtagcccaggctgatcttgaacttctacccctttatctttattcatggcacttattaccatgaatgaatgacctcatataagca

SEQ ID NO: 20157 - DNA, 201 bp, Homo sapiens
tgatgttgggcatatcccataacctctttgtgcctcagtttcctcatctgtaacacaggagtgacaagagcacccgcccacagggctatgacagtacaagktgtgtgatacagatgagctcccctgtttggcccacatgtgtcctaaaagccatgtgccctttctcttgagtgccccaggccacagagatccccatctgcc

SEQ ID NO: 20158 - DNA, 201 bp, Homo sapiens
ggtcagtgcggataactatacactggacctgtgggctgggcagcagctgctgtggaagggctccttcaagcccagcgagcatggtgagcagggcggagtgyggcaggggtggctgggtgtgttcccacagctgcctgggctgagggtggggtgggcaggggaggaggtggggtcatagcaacagcaggaggaagccgcctg

SEQ ID NO: 20159 - DNA, 201 bp, Homo sapiens
gcagcagctgctgtggaagggctccttcaagcccagcgagcatggtgagcagggcggagtgcggcaggggtggctgggtgtgttcccacagctgcctgggytgagggtggggtgggcaggggaggaggtggggtcatagcaacagcaggaggaagccgcctgtattttcccaaatctgatgggattcctgcccctgcctgg

SEQ ID NO: 20160 - DNA, 201 bp, Homo sapiens
atatctcttcccttctgctgtcttcccttctgccatccttcacatggtggcattgtatccttagacttgccacccatgccctcaggttggccgttgcacaytgtcttacataaagcaggaaggaaaggaaaggctgctacgagagagtgtaccttgtgcatctcttttttaatcaggaagcaaacatctttctagaagctt

SEQ ID NO: 20161 - DNA, 201 bp, Homo sapiens
cctcccacctttgaaacggagctggtcgcagtagaccaccaagcccccttcagcccagctgtttccacccctgaacttaagtgcccaggaaggcgtattgrgatgaggtgtgcttgctggaaggcatgcctgctgctgattgaaaaccgaactgggaacattccttccattctgtgtccactggtcagctgctgcggcttt

SEQ ID NO: 20162 - DNA, 201 bp, Homo sapiens
atctcttcccttctgctgtcttcccttctgccatccttcacatggtggcattgtatccttagacttgccacccatgccctcaggttggccgttgcacactrtcttacataaagcaggaaggaaaggaaaggctgctacgagagagtgtaccttgtgcatctcttttttaatcaggaagcaaacatctttctagaagcttcc

SEQ ID NO: 20163 - DNA, 201 bp, Homo sapiens
tttatatctctcaggtctggtttcccctttggcactgggccaggtatggggaaagagcaggaatggggcagttggctcacacagcagaggctcagaaagcrgggggcatggggggaaggagtgcacagatgctagagagtggggcaagttttgtttggtcaataaatctccttctcatgccccaggcctgtgcaagaccta

SEQ ID NO: 20164 - DNA, 201 bp, Homo sapiens
tgtaccttgtgcatctcttttttaatcaggaagcaaacatctttctagaagcttccctagcaaaattccccttacatctcattggccaagactgttacatrttacatggttactgttattacttgctcattgcaaggaagactgggaactcaaatgcctggaaaaaggaacaggataatcgtgattggctcaagccttagg

SEQ ID NO: 20165 - DNA, 201 bp, Homo sapiens
cttgacggttctaataagagtcctaaggctgctgctcagtggcctggcttcgatgctgtgccagcctctgaaccaatcactggctgtgggtggagagaggrtgctggtggagggccctgcttgtccagggaggagtcacatacctgcctctagggctgcaggtgggctcagctccatccaaaccagatgaactgaaaataa

SEQ ID NO: 20166 - DNA, 201 bp, Homo sapiens
tggcttcgatgctgtgccagcctctgaaccaatcactggctgtgggtggagagagggtgctggtggagggccctgcttgtccagggaggagtcacataccygcctctagggctgcaggtgggctcagctccatccaaaccagatgaactgaaaataaggcaggagtggcttccccaggggaaactggggaagaggaagcag

SEQ ID NO: 20167 - DNA, 201 bp, Homo sapiens
tgtatacttgtcggcaaatagccactatcctgaacactcccctccttttttttaatatacaggatctcactctgtggcccaggctggtgtgcagtggtgcratcatagctcactgcaccttcaaactcctgagctcaagtgatcctcccatcttagcctcccgagtagctgatactacagatgtgcattaccacgcctggc

SEQ ID NO: 20168 - DNA, 201 bp, Homo sapiens; identical to SEQ ID NO: 3478

SEQ ID NO: 20169 - DNA, 201 bp, Homo sapiens
acatgcccagctaattttccttttttttaattcttgtagagatgtttgagacggcttgggctctgttgcccaggctgttctcaaactcctgagctcaagcratcctccctcctcagcctcctaaagtgctgggattacaggcgtgagccaccgcacccggcttccatatcctttctaattggtcatggcttgggataatgg

SEQ ID NO: 20170 - DNA, 201 bp, Homo sapiens
tgcctcagcctcctgagtagctgggattacaggtgcccgccaccacacccagctaatttttgtatttttagtagagacagagtttcaccatgttggccagrctggtcttgaactcctcacctcaagtgatccacccacttcggcctcccaaagtgctgggattacaggcatgagccaccatgcccagccccatctctcttt

SEQ ID NO: 20171 - DNA, 201 bp, Homo sapiens
gcgatgaacaaagcagatagaaatccccactcttgtggagctgacattctggagggagagacaaaaagcaaacatataaagaaagaaagaaatcacatggrtctggatgacagtgagtgctgggaagaaaataaaagcagaggaaggggatggagcgatgggcagggggcaacggtagggagggtgtcggggaaaactttt

SEQ ID NO: 20172 - DNA, 201 bp, Homo sapiens
tccatggctgtatctccagaacccagcacagaaccaggtgcttgggaaagttttgaattgattctcatctgccattggcatggggaagggaactagcttgyatgaaacagataacaatgtatgggaccctcattcattatttcagcaaatatttgctgagttcctcctacatggctagccctgtgctagacactggggaat

SEQ ID NO: 20173 - DNA, 201 bp, Homo sapiens
ttcttctgcctcagcctcctgagtagctgggattacaggtgcccgccaccacacccagctaatttttgtatttttagtagagacagagtttcaccatgttrgccaggctggtcttgaactcctcacctcaagtgatccacccacttcggcctcccaaagtgctgggattacaggcatgagccaccatgcccagccccatct

SEQ ID NO: 20174 - DNA, 201 bp, Homo sapiens
tcgtgaaaactcaatgaaagaagattcttcaacgtggtaggtgcagtggcagctggcagtaccctgaccctgccaccgcacagccctctcagcattgctcrtcctgcactgtggatatcagttgagccacgtgtctcctgccctgggctgtgagctccataggcagggtctccatggctgtatctccagaacccagcacag

SEQ ID NO: 20175 - DNA, 201 bp, Homo sapiens
caaagatgtgattcaaagtggggatcatcggggccatcttaggtttgtctgcagtgatcactgtgccatctctctctctctcttttttttttttttttttygagacgaagtcgtcactctgtcacccaggctggagtgcagtggcatgatctcagcttaccacaatctctgcctcccaggttcaaatgattcttctgcctc

SEQ ID NO: 20176 - DNA, 201 bp, Homo sapiens
acaagttgtcaagtttgtgtgagataaaggtgcacttggttcgttcttgtctaatggcccccgcacccatgggtatttcttcagcttccacagtcatcccracactagctgggaagctccagcagccctggtcctggccccagctctgtgggcgctggccctcaactttgcctgcactgtgcttttgtgctattccccttg

SEQ ID NO: 20177 - DNA, 201 bp, Homo sapiens
ttgattatctcacataaaatgaagtcttacaaatggacctactgggttttgtacagcagccaagtgatatctcttcccttctgctgtcttcccttctgccrtccttcacatggtggcattgtatccttagacttgccacccatgccctcaggttggccgttgcacactgtcttacataaagcaggaaggaaaggaaaggct

SEQ ID NO: 20178 - DNA, 201 bp, Homo sapiens
acaaagatgtgattcaaagtggggatcatcggggccatcttaggtttgtctgcagtgatcactgtgccatctctctctctctcttttttttttttttttttcgagacgaagtcgtcactctgtcacccaggctggagtgcagtggcatgatctcagcttaccacaatctctgcctcccaggttcaaatgattcttctgcct

SEQ ID NO: 20179 - DNA, 201 bp, Homo sapiens
gcagaggcccagtccctggagccaggagcctgggaggcaagccctggggctggatagcaaatcccaggagctagagacctggcttctcacctggctctgcmctaggcaagtccctttgcttcctggccccccacccctcacatcagagaaggggagttatctctgcatgccgctcctcctctgtaaaggtagggctgtggg

SEQ ID NO: 20180 - DNA, 201 bp, Homo sapiens
cacttcctctcaaattctattggtgaaaatggtcacatgactacacatagccacaaaggaggctgggaactttctcacttggaacctacatcccagaaacractcttttcagtgaggtatcccacaggtctttcgcagtagaaatattgattatctcacataaaatgaagtcttacaaatggacctactgggttttgtaca

SEQ ID NO: 20181 - DNA, 201 bp, Homo sapiens
ggaagtgggccgcatcacttcctctcaaattctattggtgaaaatggtcacatgactacacatagccacaaaggaggctgggaactttctcacttggaacstacatcccagaaacaactcttttcagtgaggtatcccacaggtctttcgcagtagaaatattgattatctcacataaaatgaagtcttacaaatggacct

SEQ ID NO: 20182 - DNA, 201 bp, Homo sapiens
ctatgttgcccaggctgcttttgacctcctgggctccagtgatcttcccatcttggcttcccaaagtgctgggattacaagtgggagccagtgttcctggycccttcctccattcttaatggaaggagatgctaggtgtgagaggttagggaaagtaaagatgtaatttctttcccatccaagttctcagacccctgaatt

SEQ ID NO: 20183 - DNA, 201 bp, Homo sapiens
tattgaaatgcagttataaaacatttaaacacatttttaatctagagatatatgtgcttctttattaagatctataaataataagttctaggggtagctcrcataaatactgtaatttcaaagtagataagcataaataatactttatgatactgaaattgtgatgtgatatgagaatagctgtgagttttgttttgctgg

SEQ ID NO: 20184 - DNA, 201 bp, Homo sapiens; identical to SEQ ID NO: 3455

SEQ ID NO: 20185 - DNA, 201 bp, Homo sapiens
tgaaacccccatctgtacaaaaattagccaggcatggtggcatgcacctgtagtcccaggtactgggaaggctgaggtgggaggatcacttgagcccaggrgtttgaggctgcagtgagccgtgatcgtaccactttactcccacctgggtgacagagcaagagcccatctctaaaaataaataaatacaatgaaataaaa

SEQ ID NO: 20186 - DNA, 201 bp, Homo sapiens; identical to SEQ ID NO: 3457

SEQ ID NO: 20187 - DNA, 201 bp, Homo sapiens
cctgccgtggtgtatctgccaggtaggcaggctaggctgcagtaacacacaagcccacaatttccatggcttaacactataggaatatatttcttgctcaygtaacaagctaacgtgaatgttgctggtttgtaggtggtttccctccctgtagaaatctggggagtgaggttctttccatcttgtggtgccatcattctc

SEQ ID NO: 20188 - DNA, 201 bp, Homo sapiens
taaggaggctgtttccaatggctctgcttaactgagacctgagagtgattgctccatctgtggtggcatatgggctgaaactgcctagcagcatgtcagargtggggtgttcgcaggacatccttgtccaggttggcagttgagcttggcaggtgaccgctgagaccccttccaactccaccacttcaggaatctcttttt

SEQ ID NO: 20189 - DNA, 201 bp, Homo sapiens
aagcctcttctcccactgcatctgtgatctctcctgaaatgtagcacccacacatccctgagaagctagctgcggcacgtgtgtgtgcacatgggcatgcrtaagtctgggcgtgccttccacaacagattaaggatatcaatcctgacgccatgctgggatgttttagtgaatcttgacagggttgttgactcccctgtt

SEQ ID NO: 20190 - DNA, 201 bp, Homo sapiens
ccttcaagtgtgcccaagtcactcggagagcatccagcaggggcctagagctcctgaggtggccttaagttcttatgatgccccagacactgcacacagtrcttcagaggcaacacctccgttcctgtttgctgcaagcctgtgaggttagccttggaaccattcctgtgccacagaaacacagccagagcaccaaaagag

SEQ ID NO: 20191 - DNA, 201 bp, Homo sapiens
aacttaagtgcccaggaaggcgtattgagatgaggtgtgcttgctggaaggcatgcctgctgctgattgaaaaccgaactgggaacattccttccattctdtgtccactggtcagctgctgcggctttggatggtcttgaccgtggaaggctgaccttcttctggtacccggagtccctgcaggaatcccccttgagcttg

SEQ ID NO: 20192 - DNA, 201 bp, Homo sapiens
gtggagggggagttttggcttgggcattgaaggatgcataggagttttctagatggggaaagaagggaacggtagaccaggcagagggaactgcatgatawaaggtttatgggtgtgaaaattcatggaatgtttgaggattatggggttgggggatgtgggaatatgtgtagcgataaagcaccaaacaaagccaaaagt

SEQ ID NO: 20193 - DNA, 201 bp, Homo sapiens
gcccaggaaggcgtattgagatgaggtgtgcttgctggaaggcatgcctgctgctgattgaaaaccgaactgggaacattccttccattctgtgtccactsgtcagctgctgcggctttggatggtcttgaccgtggaaggctgaccttcttctggtacccggagtccctgcaggaatcccccttgagcttgctgggctgt

SEQ ID NO: 20194 - DNA, 201 bp, Homo sapiens
atagaaggtgctcaataaatatgtgtttatttattgaaaccatgggcagaggctaattcagaagcggtctgaggaccttacctcccagtgatgatgcaccrtggccccaggcaggccaggaagagagaagggttgtgtttctccgtaggtcccccagcttcccaggccatcccaggccattccctggtcatttgccctcag

SEQ ID NO: 20195 - DNA, 201 bp, Homo sapiens
ccaggcagagggaactgcatgataaaaggtttatgggtgtgaaaattcatggaatgtttgaggattatggggttgggggatgtgggaatatgtgtagcgawaaagcaccaaacaaagccaaaagtttagttagagccctgaatgcctgcctcataatggtttccatattttatatgcctactatgtgccaggcacattgct

SEQ ID NO: 20196 - DNA, 201 bp, Homo sapiens
gctgattgaaaaccgaactgggaacattccttccattctgtgtccactggtcagctgctgcggctttggatggtcttgaccgtggaaggctgaccttcttytggtacccggagtccctgcaggaatcccccttgagcttgctgggctgtggtgacaggagtttaaaacatgcgttgtattccagtgatgcatgatatgaca

SEQ ID NO: 20197 - DNA, 201 bp, Homo sapiens
acatgaagaagtgtggttcagaacacctgggctgttaaggaccttcactggcttctggaatggcaaatagacagtcaggagggttgcaggggagacagagrcagaagccgaatgaggtcattagcagaccagaggctttcccgcccttccccttggcaatcccagcctggggtgggcttctctggggttggtttcctgttt

SEQ ID NO: 20198 - DNA, 201 bp, Homo sapiens
gggcatggctccctgacaagggagagaggaaaaagctgttgagtgaagaagactgcttcagtttccccatctgtataatgggaggagtaagggctgtcgtraaaactcaatgaaagaagattcttcaacgtggtaggtgcagtggcagctggcagtaccctgaccctgccaccgcacagccctctcagcattgctcatcct

SEQ ID NO: 20199 - DNA, 201 bp, Homo sapiens
aagattcttcaacgtggtaggtgcagtggcagctggcagtaccctgaccctgccaccgcacagccctctcagcattgctcatcctgcactgtggatatcarttgagccacgtgtctcctgccctgggctgtgagctccataggcagggtctccatggctgtatctccagaacccagcacagaaccaggtgcttgggaaagt

SEQ ID NO: 20200 - DNA, 201 bp, Homo sapiens
atgaggatgcggaggcacagagaagataagggacttgtcctgtgtcacacagcaaggagccatccggctcctaagttggtgcatttgacttctgtgcttcyggaaagaaagagcagcaagtttaagatctggaggtggcactgagctttggaggagcagggggcaatgaggtggccggtgtgacgaggactcaatgtgcaa

SEQ ID NO: 20201 - DNA, 201 bp, Homo sapiens
caccgtgcccagctaatttttgtatatttagtagagatggggtttcactgcgttggccaggctggtctcaaactcctgacctcagatgatccactcgcctyggcctcccaaagtgctgggattacaggtgtgagccaccgcacctggccagtggagttccttcttaagtacatgtattgacatctttaaaaagggcgagag

SEQ ID NO: 20202 - DNA, 201 bp, Homo sapiens
agcagccgggactacaggcacctgccaccgtgcccagctaatttttgtatatttagtagagatggggtttcactgcgttggccaggctggtctcaaactcytgacctcagatgatccactcgcctcggcctcccaaagtgctgggattacaggtgtgagccaccgcacctggccagtggagttccttcttaagtacatgta

SEQ ID NO: 20203 - DNA, 201 bp, Homo sapiens
ctctgtcacccagggtggaacacagtggcgtgatcttggctcactgcaacctccgcctcctgggttctagcgattctcctgcctcagcctcctgagcagcygggactacaggcacctgccaccgtgcccagctaatttttgtatatttagtagagatggggtttcactgcgttggccaggctggtctcaaactcctgacct

SEQ ID NO: 20204 - DNA, 201 bp, Homo sapiens
gctacttgggaggctgaggtaggagaatggcttgaacccaggagaaggaggttgcagtgagcttagatcatgctactgccctccagcctgggcgacagagygagattacgtctcaaaaaaataaaaataaataaaaataaaaagattttttaaaaggctgaagtttgggttactttggctcatacactttgccttcactgt

SEQ ID NO: 20205 - DNA, 201 bp, Homo sapiens
gaggccgggtgtggtggttcatgcctataatcccagcactttgggaggccgagcccagcggatcaccggaggtcaggagttcgagaccagcctggacaacrtggtaaaaccccgtctctactaaaaatacaaaaaattagtctggcatggtggcaggcgcctgtaatcccagctacttgggaggctgaggtaggagaatgg

SEQ ID NO: 20206 - DNA, 201 bp, Homo sapiens
ctgggcttttatatcataggatgcctctaatggcaatcctgccattagatacacctgccgtggtgtatctgccaggtaggcaggctaggctgcagtaacamacaagcccacaatttccatggcttaacactataggaatatatttcttgctcacgtaacaagctaacgtgaatgttgctggtttgtaggtggtttccctcc

SEQ ID NO: 20207 - DNA, 201 bp, Homo sapiens
tgtggccaaaggtgtgaaggatgcagctgtaaaagctgaagtttgaggccgggtgtggtggttcatgcctataatcccagcactttgggaggccgagcccrgcggatcaccggaggtcaggagttcgagaccagcctggacaacatggtaaaaccccgtctctactaaaaatacaaaaaattagtctggcatggtggcagg

SEQ ID NO: 20208 - DNA, 201 bp, Homo sapiens
ccattcttcccctgtggccagacacttcccctggctgagtctctgggcttttatatcataggatgcctctaatggcaatcctgccattagatacacctgcygtggtgtatctgccaggtaggcaggctaggctgcagtaacacacaagcccacaatttccatggcttaacactataggaatatatttcttgctcacgtaac

SEQ ID NO: 20209 - DNA, 201 bp, Homo sapiens
atgaatcaaaataaagaaaaatactcagtaaatcatcataaagtacagagatgtggccaaaggtgtgaaggatgcagctgtaaaagctgaagtttgaggcygggtgtggtggttcatgcctataatcccagcactttgggaggccgagcccagcggatcaccggaggtcaggagttcgagaccagcctggacaacatggta

SEQ ID NO: 20210 - DNA, 201 bp, Homo sapiens
gtgacagtgagactttgtctcaggaaaaaaaaacaaaaacaaaaaacaaaaaactcgtaccccctaaatttatacaaataaccaaaaaaaaaaaaaaaaaaggaaattgtgtggcctttgaagtccaaaatattaactatctggcctgttacagaaaaagtttgcagacccctggcctagcccgtgagatgtgggttggct

SEQ ID NO: 20211 - DNA, 201 bp, Homo sapiens
ggtgacagtgagactttgtctcaggaaaaaaaaacaaaaacaaaaaacaaaaaactcgtaccccctaaatttatacaaataaccaaaaaaaaaaaaaaaaaaggaaattgtgtggcctttgaagtccaaaatattaactatctggcctgttacagaaaaagtttgcagacccctggcctagcccgtgagatgtgggttggc

SEQ ID NO: 20212 - DNA, 201 bp, Homo sapiens
tagagggttgtccaaggaaggccacatccagaagcatctcccaggacagttgttgtgtagctcaccctctggactttgtgggtctgggtgttgtttcatgwttatagagagagctctgtgaacgtggaggacctgttgtcggcagagacacaaatggccagggcatggctgggcagccgcagtggctcaggcctgtaatcc

SEQ ID NO: 20213 - DNA, 201 bp, Homo sapiens
tttcatctgaggctcaattggggaagggtcacttctaagctcatacaatattggtgacattcagtccctggcaggctgttgaactgagagcctcagtttcstgctggctgttggttgtagttaaccctgaattccttcccatgtgccctttgcaaagccatcaaggcagagagacttgcctagcaagtaggatattacagt

SEQ ID NO: 20214 - DNA, 201 bp, Homo sapiens
aggaggccgaggcaggaggatcgcttgagcccaggagttcgaggtcagcttgggcaacatagggagaccttgtctctacaaataataaaatattagccagrtgtggcagtgcacgcctgtagccccagctactcaggaggccgaggtgggaggatcccttgaactcaggaggtcaaggctgcagtgaactgtgatcgcgcc

SEQ ID NO: 20215 - DNA, 201 bp, Homo sapiens
ggcacaggccaccacgccaggctaattttttgtatttttagtagcgacagggtctcgccatgttgtccgggctggtctggatctcctggcttcaagtgatmcccctggctcagcctcccaaggtgctgggattacaggcttgagccaccgcatccagcccagatctgagatttgcacccagtatttgaactcccaagcctg

SEQ ID NO: 20216 - DNA, 201 bp, Homo sapiens
ttttgttgttgttgttgttgttgagacagagtctcactctatcacccaggctggaatgcaggggcgtgatcatggctcactgcatccttgacttcctgggmtcaggtgattctcccacctctgcctcccaggtagctgggactacaggcacaggccaccacgccaggctaattttttgtatttttagtagcgacagggtct

SEQ ID NO: 20217 - DNA, 201 bp, Homo sapiens
gtgacggacccaccagaaccccagacttcaccactaggcagcatatccagtgagaacagatctgaggcttgccatcaaaattgcacttgtaaggccgggcrctgtggtggctcgcggctgtaatcccagccctttgggaggccgaggtgggcagatcacttgaggtcaggagttcgagaccggcctggccaacatggtgaa

SEQ ID NO: 20218 - DNA, 201 bp, Homo sapiens
gtttccacccctgaacttaagtgcccaggaaggcgtattgagatgaggtgtgcttgctggaaggcatgcctgctgctgattgaaaaccgaactgggaacaktccttccattctgtgtccactggtcagctgctgcggctttggatggtcttgaccgtggaaggctgaccttcttctggtacccggagtccctgcaggaatc

SEQ ID NO: 20219 - DNA, 201 bp, Homo sapiens
attttttgtatttttagtagcgacagggtctcgccatgttgtccgggctggtctggatctcctggcttcaagtgatccccctggctcagcctcccaaggtrctgggattacaggcttgagccaccgcatccagcccagatctgagatttgcacccagtatttgaactcccaagcctgtgctctttttcctcccatggacat

SEQ ID NO: 20220 - DNA, 201 bp, Homo sapiens
gggtctcgccatgttgtccgggctggtctggatctcctggcttcaagtgatccccctggctcagcctcccaaggtgctgggattacaggcttgagccaccrcatccagcccagatctgagatttgcacccagtatttgaactcccaagcctgtgctctttttcctcccatggacatttctctcagagatggtctcccaaac

SEQ ID NO: 20221 - DNA, 201 bp, Homo sapiens
ttaaaaaacagacaaaccgcaagtagttctttggaagctcagatttctcttttgtttcttagtaaaacatttcccagttcccagctcccttccagggtgtragatttcttcggtaacttacatctagctgttgcttcttgtttgctcatgtttagaaagaaagacaaaagagagtgagaattttctctcccttccccagtc

SEQ ID NO: 20222 - DNA, 201 bp, Homo sapiens
tgacaggagtttaaaacatgcgttgtattccagtgatgcatgatatgacatgcatcacaggaataaaaacctgaggtctcatggatatgattgcttcaaargagaccaagttttaaaacagatgaatcaaaataaagaaaaatactcagtaaatcatcataaagtacagagatgtggccaaaggtgtgaaggatgcagctg

SEQ ID NO: 20223 - DNA, 201 bp, Homo sapiens; identical to SEQ ID NO: 3475

SEQ ID NO: 20224 - DNA, 201 bp, Homo sapiens
gtgtaacaaatgaccccgaaatgtagagggttacaacaactttatttagcttatgcttctgcaggctggcatttggggctgggctcagcagtgagggtggygggggaggctgggctgggctgggctgggcagatctgaattgagctgacccgtccccgtagcctccctccgtgtctgacagttggcttttttttttttttt

SEQ ID NO: 20225 - DNA, 201 bp, Homo sapiens
gtggaggggtggtcggcggtcagatcgtggagggtctcggacgagggtcctgaccctgggtctccagtcctgggaagtggagcccaggctgtaccatggckgacctcagctcatggcttcccctcccacttccagcctacagggagcccttcgagcagcacctcctgctgggcgtcagcgtttcctgcattgtcatcctgg

SEQ ID NO: 20226 - DNA, 201 bp, Homo sapiens
cagcctacagggagcccttcgagcagcacctcctgctgggcgtcagcgtttcctgcattgtcatcctggccgtctgcctgttgtgctatgtcagcatcacsaagtgagtcctgggcccagtgctgccgagcagtccctctggagtgcagggtggcagggacttgcccctctagtctgcccctttgcagtcctctcagtcaa

SEQ ID NO: 20227 - DNA, 201 bp, Homo sapiens
tgcacttgtaaggccgggcactgtggtggctcgcggctgtaatcccagccctttgggaggccgaggtgggcagatcacttgaggtcaggagttcgagaccrgcctggccaacatggtgaagctccatctctactaaaaatacaacaattaactgggtgtagtggcgcacacctgtaatcccagctactagggaggctgagg

SEQ ID NO: 20228 - DNA, 201 bp, Homo sapiens
gcatgtctgaagtagacagccatcaggacatggtgatttcaggctgggctttgaagaatgaataggagtttttcaagtgtcgaaactgaaccctgaccaamctttgcttttgcagacactggaagaattgtcttaccaagctcttgccctgttttctggagcacaacatgaaaagggatgaagatcctcacaaggctgcca

SEQ ID NO: 20229 - DNA, 201 bp, Homo sapiens
cagaaccccagacttcaccactaggcagcatatccagtgagaacagatctgaggcttgccatcaaaattgcacttgtaaggccgggcactgtggtggctcrcggctgtaatcccagccctttgggaggccgaggtgggcagatcacttgaggtcaggagttcgagaccggcctggccaacatggtgaagctccatctctac

SEQ ID NO: 20230 - DNA, 201 bp, Homo sapiens
tgttggccaagctggtctcgaactcctgaactcaggtgatccacccgcctcagcgtcccaaagtgctgggattacaggcatgagccactgagcccggcctyctcctttatcttaattgaaataattcagaaatggaaagtcaaatactgcatgttctcacttataagtaagagttaaataatgtgtacacatgggcattat

SEQ ID NO: 20231 - DNA, 201 bp, Homo sapiens
cacccggctaatttttcgtatttttagtagagaccggttttcatcatgttggccaagctggtctcgaactcctgaactcaggtgatccacccgcctcagcstcccaaagtgctgggattacaggcatgagccactgagcccggcctcctcctttatcttaattgaaataattcagaaatggaaagtcaaatactgcatgtt

SEQ ID NO: 20232 - DNA, 201 bp, Homo sapiens
ccacacccggctaatttttcgtatttttagtagagaccggttttcatcatgttggccaagctggtctcgaactcctgaactcaggtgatccacccgcctcrgcgtcccaaagtgctgggattacaggcatgagccactgagcccggcctcctcctttatcttaattgaaataattcagaaatggaaagtcaaatactgcat

SEQ ID NO: 20233 - DNA, 201 bp, Homo sapiens
aaagtttagttagagccctgaatgcctgcctcataatggtttccatattttatatgcctactatgtgccaggcacattgctcagggtcacacagctggaartggcagggctgagtttttgttgttgttgttgttgttgagacagagtctcactctatcacccaggctggaatgcaggggcgtgatcatggctcactgcatc

SEQ ID NO: 20234 - DNA, 201 bp, Homo sapiens
aagcgattctcctgtctcagcctcccgagtagttgggattaatggtgcctgccaccacacccggctaatttttcgtatttttagtagagaccggttttcaycatgttggccaagctggtctcgaactcctgaactcaggtgatccacccgcctcagcgtcccaaagtgctgggattacaggcatgagccactgagcccggc

SEQ ID NO: 20235 - DNA, 201 bp, Homo sapiens
tgtttgtttgtttgtttgttttctttgagacagagtttcgctcttgttgcccaggctggagtgcagtggcacaatctcggctcactgcaacctctgcctcscgggttcaagcgattctcctgtctcagcctcccgagtagttgggattaatggtgcctgccaccacacccggctaatttttcgtatttttagtagagaccg

SEQ ID NO: 20236 - DNA, 201 bp, Homo sapiens
ctggagttgcaggcagtggagttctgtcctaagcagtgggcacctaaacccgatggcataaaagctgggcgggtgtccacctgcatctgccacagcactgyaggcaccaactgtggctcatactgagtgggataaattccagaaagaaacattaggaacttactatagaattttggggctagagctactcattcattcccc

SEQ ID NO: 20237 - DNA, 201 bp, Homo sapiens
atccggcccactgcttgtttttgtaaataaagttttattggaacacactggctgctgtagttgtaacagaaactgcatggccctcctttatgtttttttttgtttgtttgtttgtttgtttgttttctttgagacagagtttcgctcttgttgcccaggctggagtgcagtggcacaatctcggctcactgcaacctctgc

SEQ ID NO: 20238 - DNA, 201 bp, Homo sapiens
cctggagttgcaggcagtggagttctgtcctaagcagtgggcacctaaacccgatggcataaaagctgggcgggtgtccacctgcatctgccacagcactrcaggcaccaactgtggctcatactgagtgggataaattccagaaagaaacattaggaacttactatagaattttggggctagagctactcattcattccc

SEQ ID NO: 20239 - DNA, 201 bp, Homo sapiens
aatccggcccactgcttgtttttgtaaataaagttttattggaacacactggctgctgtagttgtaacagaaactgcatggccctcctttatgtttttttttgtttgtttgtttgtttgtttgttttctttgagacagagtttcgctcttgttgcccaggctggagtgcagtggcacaatctcggctcactgcaacctctg

SEQ ID NO: 20240 - DNA, 201 bp, Homo sapiens
gaggtgggaggatcccttgaactcaggaggtcaaggctgcagtgaactgtgatcgcgccactccactccagcctgcgtgagaaagtgagaccctgtcaaamaaaaagagaaggtgatggggaaagaacacagaacagcataagagggggttggggaagctgggtggagtgggggggattgcagttgaaagtagggaagtca

SEQ ID NO: 20241 - DNA, 201 bp, Homo sapiens
aaatccggcccactgcttgtttttgtaaataaagttttattggaacacactggctgctgtagttgtaacagaaactgcatggccctcctttatgtttttttttgtttgtttgtttgtttgtttgttttctttgagacagagtttcgctcttgttgcccaggctggagtgcagtggcacaatctcggctcactgcaacctct

SEQ ID NO: 20242 - DNA, 201 bp, Homo sapiens
ttaatattttcatatttctagatctgccttcaggcatggctggatccagcttctaggaacctgtccagctctgcgccctgctttattctgtactggcttcrtttttaggcaggctcttccctcatgtagtggcagatatgcctactagttgctccaggcctacatcccaaagccacagtgggaaaagggttttttttcttg

SEQ ID NO: 20243 - DNA, 201 bp, Homo sapiens
tgagaaagtgagaccctgtcaaaaaaaaagagaaggtgatggggaaagaacacagaacagcataagagggggttggggaagctgggtggagtgggggggaytgcagttgaaagtagggaagtcagggaaggcctcattgagctgacttggaggaagcgggaaccgtgcagatgtctggggaaggctcattcttggcagaga

SEQ ID NO: 20244 - DNA, 201 bp, Homo sapiens
gtgtgatacagatgagctcccctgtttggcccacatgtgtcctaaaagccatgtgccctttctcttgagtgccccaggccacagagatccccatctgcccrctgtcccacacactggtctgtcatttgttccttgaggtttgtgagggccggctctgtgcatcccaggggcccaggctgggcctggttggctctcagggag

SEQ ID NO: 20245 - DNA, 201 bp, Homo sapiens; identical to SEQ ID NO: 3458

SEQ ID NO: 20246 - DNA, 201 bp, Homo sapiens; identical to SEQ ID NO: 3459

SEQ ID NO: 20247 - DNA, 201 bp, Homo sapiens
atggaggcgcctgagtggtctcatgctcaggtggtttagcaaactcagtgtacatcctgccaattccagtcctgccatggccactgacaagctaggagggygctgaaaggagaaggaccccgatgtctcctccagcccatccatctcctctctcccattggccaaacccaaccggaaactaaaggccaagggtacccggtg

SEQ ID NO: 20248 - DNA, 201 bp, Homo sapiens; identical to SEQ ID NO: 3460

SEQ ID NO: 20249 - DNA, 201 bp, Homo sapiens
tgacagctcacttgaataaccctattattgaagagaataatactgactcaagagacagtgacccgtgtcagttcccttttgaggccaacgggttaaggagraagtccccatacagctgactcgtttactaattcctcttaatgaagagagcagaggccacaccccaggcttagactttcccaagaaaacaagatcagtttg

SEQ ID NO: 20250 - DNA, 201 bp, Homo sapiens
gcaagtccctttgcttcctggccccccacccctcacatcagagaaggggagttatctctgcatgccgctcctcctctgtaaaggtagggctgtgggccacrtctgtgtttcccagtttgggggacacaagtgatcgtaggtggcacattgacagctcacttgaataaccctattattgaagagaataatactgactcaaga

SEQ ID NO: 20251 - DNA, 201 bp, Homo sapiens
gtacatcctgccaattccagtcctgccatggccactgacaagctaggagggcgctgaaaggagaaggaccccgatgtctcctccagcccatccatctcctstctcccattggccaaacccaaccggaaactaaaggccaagggtacccggtgatgaagactgtggtatcagcctcctgagcacagagagggcagaaagggg

SEQ ID NO: 20252 - DNA, 201 bp, Homo sapiens
ccccaccctcagctccctctgtaataggaaaatctctgaactctctgtagttgctccagcaatcttttggaactttgcttctttcttgtgaaaaaacctcyccttggctcactttgcaccaggtttccccaaatgtgcttccaaccacaagcagaaatggagctgccagtaaccaggaagaaactgccgggggctgaggaa

SEQ ID NO: 20253 - DNA, 201 bp, Homo sapiens
gttgggagtctggacatagcttagccaggttctctgctttagagtctcgtgaggctataatcaaggtgtgggatggggctgcagtttcatctgaggctcarttggggaagggtcacttctaagctcatacaatattggtgacattcagtccctggcaggctgttgaactgagagcctcagtttcgtgctggctgttggttg

SEQ ID NO: 20254 - DNA, 201 bp, Homo sapiens; identical to SEQ ID NO: 3465

SEQ ID NO: 20255 - DNA, 201 bp, Homo sapiens
caaatccggcccactgcttgtttttgtaaataaagttttattggaacacactggctgctgtagttgtaacagaaactgcatggccctcctttatgtttttttttgtttgtttgtttgtttgtttgttttctttgagacagagtttcgctcttgttgcccaggctggagtgcagtggcacaatctcggctcactgcaacctc

SEQ ID NO: 20256 - DNA, 201 bp, Homo sapiens
atttttttttgtatttttggtagagacaggtttcaccatgttggccaggctggttgtgaactcctaaagtgctgggattacagatgtgagccaccacgccyggccccagtacacactttttggagggtatttgacgttatgtaccaggagtgctggggaaaagtacacacttgactccgtgagattctgcttcttagcatt

SEQ ID NO: 20257 - DNA, 201 bp, Homo sapiens; identical to SEQ ID NO: 3466

SEQ ID NO: 20258 - DNA, 201 bp, Homo sapiens; identical to SEQ ID NO: 3467

SEQ ID NO: 20259 - DNA, 201 bp, Homo sapiens; identical to SEQ ID NO: 3468

SEQ ID NO: 20260 - DNA, 201 bp, Homo sapiens
tgtggtggtgggcacctgtaatcccagctactcgggaggctgaggcagaagaatcgcttgaacccgggaggtggaggttgcagtgagctgagattgcaccrctgcactccagccttggagacagagcgagactctgtctcggaaaaacaaacaaacaagcaaacaaacaaacaaataaatggccagggcaggggagggttg

SEQ ID NO: 20261 - DNA, 201 bp, Homo sapiens
catggtgaaaccccgtctctactaaaaatacaaaaattagccaggtgtggtggtgggcacctgtaatcccagctactcgggaggctgaggcagaagaatcrcttgaacccgggaggtggaggttgcagtgagctgagattgcaccgctgcactccagccttggagacagagcgagactctgtctcggaaaaacaaacaaac

SEQ ID NO: 20262 - DNA, 201 bp, Homo sapiens
ggctctgccctaggcaagtccctttgcttcctggccccccacccctcacatcagagaaggggagttatctctgcatgccgctcctcctctgtaaaggtagrgctgtgggccacatctgtgtttcccagtttgggggacacaagtgatcgtaggtggcacattgacagctcacttgaataaccctattattgaagagaataa

SEQ ID NO: 20263 - DNA, 201 bp, Homo sapiens
tggtcttgaactcctgggctcaagccatcctccctccttagcctcccaaagtgctgggattacaggtgtgagccaccacacctggcttctgaacattttttcttaatgataatagctggtgctatgggctgaatgtgttcccccaaattcatatgttgaaacttcatcccattgtagtcatattaagagatggggcctttg

SEQ ID NO: 20264 - DNA, 201 bp, Homo sapiens
aggcaagccctggggctggatagcaaatcccaggagctagagacctggcttctcacctggctctgccctaggcaagtccctttgcttcctggccccccacycctcacatcagagaaggggagttatctctgcatgccgctcctcctctgtaaaggtagggctgtgggccacatctgtgtttcccagtttgggggacacaag

SEQ ID NO: 20265 - DNA, 201 bp, Homo sapiens
cattgcactccagcctgggcaacaagagtgaaactctgtctcaaaaaaataaaatgaaataaaataaaataaaatgttaaaaaacaaaaaagaagaagaagtgtaggtggcaggcgtaggatgcatgggtgctgggcccaggtggagagggaggtggagccctgctggggggagggccttcaagtgtgcccaagtcactcg

SEQ ID NO: 20266 - DNA, 201 bp, Homo sapiens
atgtctccgacactctgctgctgacctggagcaacccgtatccccctgacaattacctgtataatcatctcacctatgcagtcaacatttggagtgaaaaygacccggcagatgtgagtgggcatgctttgacgtttttctgtgacctctggggaacagggtgggtgaccagcagaggcccagtccctggagccaggagcc

SEQ ID NO: 20267 - DNA, 201 bp, Homo sapiens
ccattgcactccagcctgggcaacaagagtgaaactctgtctcaaaaaaataaaatgaaataaaataaaataaaatgttaaaaaacaaaaaagaagaagaagtgtaggtggcaggcgtaggatgcatgggtgctgggcccaggtggagagggaggtggagccctgctggggggagggccttcaagtgtgcccaagtcactc

SEQ ID NO: 20268 - DNA, 201 bp, Homo sapiens
cgaccaaaaatctgggtggtggctgtggtttgtaggccggggctgggctgggtgatgggggagtcactgcatagatcctcacatagaggccgcttctcccrcagtgaaacccagggccccaggaaacctgacagttcacaccaatgtctccgacactctgctgctgacctggagcaacccgtatccccctgacaattacct

SEQ ID NO: 20269 - DNA, 201 bp, Homo sapiens
catcctgccaattccagtcctgccatggccactgacaagctaggagggcgctgaaaggagaaggaccccgatgtctcctccagcccatccatctcctctcwcccattggccaaacccaaccggaaactaaaggccaagggtacccggtgatgaagactgtggtatcagcctcctgagcacagagagggcagaaaggggtgg

SEQ ID NO: 20270 - DNA, 201 bp, Homo sapiens
gccattgcactccagcctgggcaacaagagtgaaactctgtctcaaaaaaataaaatgaaataaaataaaataaaatgttaaaaaacaaaaaagaagaagaagtgtaggtggcaggcgtaggatgcatgggtgctgggcccaggtggagagggaggtggagccctgctggggggagggccttcaagtgtgcccaagtcact

SEQ ID NO: 20271 - DNA, 201 bp, Homo sapiens
  misc_feature (1)...(201): n = A,T,C or G, or insertion/deletion polymorphism (see Tables 1-2)
gcggttcctggaggcatgtcccggacacagctgtggggcccagccagcctacaggtgaccagcctaacccagcccctgtgtctgcagagcccacacgtgtntccctgagaacaacggaggcgcggggtgcgtgtgccacctgctcatggatgacgtggtcagtgcggataactatacactggacctgtgggctgggcagca

SEQ ID NO: 20272 - DNA, 201 bp, Homo sapiens
ggccggggctgggctgggtgatgggggagtcactgcatagatcctcacatagaggccgcttctcccgcagtgaaacccagggccccaggaaacctgacagktcacaccaatgtctccgacactctgctgctgacctggagcaacccgtatccccctgacaattacctgtataatcatctcacctatgcagtcaacatttgg

SEQ ID NO: 20273 - DNA, 201 bp, Homo sapiens
gccactgacaagctaggagggcgctgaaaggagaaggaccccgatgtctcctccagcccatccatctcctctctcccattggccaaacccaaccggaaacyaaaggccaagggtacccggtgatgaagactgtggtatcagcctcctgagcacagagagggcagaaaggggtggagacaaagaggggcgcagatagtgggc

SEQ ID NO: 20274 - DNA, 201 bp, Homo sapiens
ggagtgcagtggctcaatcttggctcactgcaagctccgcctcccgggttcaagccattctcctgcctcagcctcctgagtagctgggactacaggcaccygccaccacgcccagctaattttttgtatttttagtagagactgagtttcaccatgttagccaggatggtctcgatctcctgacctcatgatctgcctgcc

SEQ ID NO: 20275 - DNA, 201 bp, Homo sapiens
tcacctgtcaataattcagagatcaacaccttttccttttgtttttcaggattaagaaagaatggtgggatcagattcccaacccagcccgcagccgcctsgtggctataataatccaggatgctcaggtaggagtaggcgtggatgaggacatgtgggactgtgtacatgaagaagtgtggttcagaacacctgggctgt

SEQ ID NO: 20276 - DNA, 201 bp, Homo sapiens
agaatgaataggagtttttcaagtgtcgaaactgaaccctgaccaacctttgcttttgcagacactggaagaattgtcttaccaagctcttgccctgtttyctggagcacaacatgaaaagggatgaagatcctcacaaggctgccaaagagatgcctttccagggctctggaaaatcagcatggtgcccagtggagatca

SEQ ID NO: 20277 - DNA, 201 bp, Homo sapiens
gcactttgggagcccagcgcaggcagatcacttgagccctgggctattgaggctgcagtgagctgggattgtgccactgcactccagcctgggcaacagartgggaccctgtctcaaaaaagaagaaaaaaagggtaattaataaacactaaagttctatgtagaattttagcaacattattgttattataatcttctttg

SEQ ID NO: 20278 - DNA, 201 bp, Homo sapiens
tgggagggtgggagaggggtgaaggaagagaagttacttaatgggcatagtgtacaccatttgggtgacggacccaccagaaccccagacttcaccactakgcagcatatccagtgagaacagatctgaggcttgccatcaaaattgcacttgtaaggccgggcactgtggtggctcgcggctgtaatcccagccctttgg

SEQ ID NO: 20279 - DNA, 201 bp, Homo sapiens
ttaaaaagggcgagaggatttacaggaaactatcaggtcagtaatggcaggggccgtccacagtgggtggctgagtccccctatttttctgctggtgtgcrgggaggtcatttcctgccacccatgtttccccaccctgaatccaccttcctcacattcccattggagggacactctctggacatatgggacctggggtcc

SEQ ID NO: 20280 - DNA, 201 bp, Homo sapiens
ctagctcgagggcagaggcttggtgtgatggaatggcactccttaaactgctacatattttccctttaatttggccaagaacaagttgtcaagtttgtgtragataaaggtgcacttggttcgttcttgtctaatggcccccgcacccatgggtatttcttcagcttccacagtcatcccgacactagctgggaagctcca

SEQ ID NO: 20281 - DNA, 201 bp, Homo sapiens
atggtttgctgctgtttatatggtgttagaggggaggtcccatctccagggacatgttatgtaagatacagtggagcgcatggtgggagtgttggtccacrtggcacatggatacggctggaatactggactagaccagcagttctcacactttttggtctcaggaccctttttcacacttaaaaatgagtgaggacccaa

SEQ ID NO: 20282 - DNA, 201 bp, Homo sapiens
ctgaaaataaggcaggagtggcttccccaggggaaactggggaagaggaagcaggactgtgctggctaaaatgccagccaggtttaagacgtggcaccagatgccagtcatgggattggattggtcagcatgcctgggctatggcttaggggtatgttggtgctcagggatgccacaggcctccagataccaggtctgagg

SEQ ID NO: 20283 - DNA, 201 bp, Homo sapiens
ccagccccatctctctttaaaaaacaaacaaacaaacaaaaaacataaaaagaagcagagaacacatacacatctgcatcttcccttgtttacttaacaayagatcttggaagtcacttctcagtagaggctaggttgggcagagcattggattctaggccagtgagtttggacttgaccatggagacactaggaagccca

SEQ ID NO: 20284 - DNA, 201 bp, Homo sapiens
acaaaaaacataaaaagaagcagagaacacatacacatctgcatcttcccttgtttacttaacaatagatcttggaagtcacttctcagtagaggctaggytgggcagagcattggattctaggccagtgagtttggacttgaccatggagacactaggaagcccatgaaggacagagagagatgcctcgaccctgccagt

SEQ ID NO: 20285 - DNA, 201 bp, Homo sapiens
accctatttgaaatacttacgtatattaacccatttccttatcaccacaaccctgcgggaagggagataggcacttttattatcttcattttgcagatgasgacattgaggtccagagaggttatgtcacttacttaaggtcacacagccaggaagtggtagtagggactcttacccttgttttacagatgagattgaatt

SEQ ID NO: 20286 - DNA, 201 bp, Homo sapiens; identical to SEQ ID NO: 3479

SEQ ID NO: 20287 - DNA, 201 bp, Homo sapiens
ggatgggaggagattcagagcactcctctgtggccacttttgccatcgaccacagtccctgtaaatattaggacaatgtaattaattcccaggaatctgargctcagaaagcgtaagtgacctgttggacttctgatctgtgtgatgtcgaggcttgtaccccttcctgagcattgccgtactccaggccgggctgcaagg

SEQ ID NO: 20288 - DNA, 201 bp, Homo sapiens; identical to SEQ ID NO: 3480

SEQ ID NO: 20289 - DNA, 201 bp, Homo sapiens; identical to SEQ ID NO: 3481

SEQ ID NO: 20290 - DNA, 201 bp, Homo sapiens
cagccttcccagtagctggggctacaggcatgtgccacctctaataacttttctttaatttacaatagtattagtttgttctcatgctgctctaaggacaygcccaagactgggtaatttataaaggaaagaggtttgactcacagttctgcagggctggggaggcttcaggaaacatattatcatggcggaaagggaagc

SEQ ID NO: 20291 - DNA, 201 bp, Homo sapiens
aactcctgacctcatgatctgcctgcctcagcctcccaaagtgctgggattacaggtgtgagccactgcacccaaccaggactccacatttctaaaaccgscatcctactggggagactgaaaatacatatcaatcacaaacaggtggttttccatagtgacccactctctgaatgcactagaccagggtggaggccagag

SEQ ID NO: 20292 - DNA, 201 bp, Homo sapiens
tctcatttctgattttaaaatggctctggctgtgatgtggagaagaggcagggtgagcctcatctgcagcaactgctaactgcccacatccccccagacttctcaaaaatttgccactcccctgctcaaagaccctcaaaagctgcccactgcttagaggacaggcctttgacctgaggtcctcacttgggcttcagggat

SEQ ID NO: 20293 - DNA, 201 bp, Homo sapiens
cttgaacccgggaggtggaggttgcagtgagccgacatcacgccactgctctccagcttggggaacagagcaaacctccgtctcaaaaaaaaaaaaaaaaatctagggaagttgaaaacattttgcagtcaaagctatctttgctatctgcatcttgaaataaaataaacattcatacatgtaacctcattaatctgatta

SEQ ID NO: 20294 - DNA, 201 bp, Homo sapiens; identical to SEQ ID NO: 3449

SEQ ID NO: 20295 - DNA, 201 bp, Homo sapiens; identical to SEQ ID NO: 3450

SEQ ID NO: 20296 - DNA, 201 bp, Homo sapiens
gcttgaacccgggaggtggaggttgcagtgagccgacatcacgccactgctctccagcttggggaacagagcaaacctccgtctcaaaaaaaaaaaaaaaaatctagggaagttgaaaacattttgcagtcaaagctatctttgctatctgcatcttgaaataaaataaacattcatacatgtaacctcattaatctgatt

SEQ ID NO: 20297 - DNA, 201 bp, Homo sapiens; identical to SEQ ID NO: 3452

SEQ ID NO: 20298 - DNA, 201 bp, Homo sapiens; identical to SEQ ID NO: 3453

SEQ ID NO: 20299 - DNA, 201 bp, Homo sapiens; identical to SEQ ID NO: 3454

SEQ ID NO: 20300 - DNA, 201 bp, Homo sapiens; identical to SEQ ID NO: 3456

SEQ ID NO: 20301 - DNA, 201 bp, Homo sapiens
gcacaggatgcttcgttacactggtgcccaggacataatcacgtacacaagacacacagttacggggcagactggggatatacggcacaccagcatgcagsgttcaccagtaaaggtggtattccatgattattctaaggtagatgggctgtgctttgtttccattggcttagtccagggattggcaaactatggcccgtg

SEQ ID NO: 20302 - DNA, 201 bp, Homo sapiens
attaaaacaattaaaaattttttttcttactgaaatggaggtctcactgtgttgcccaggctgctctcaaactcctgggctccagtgatcctcctgcctcmgcctcccaaagtgctgggattacaagcgtgagccgctgtatccggcccaaaatggagaaattttaagtcccaacaacatgcaagcccgcattcaacaaat

SEQ ID NO: 20303 - DNA, 201 bp, Homo sapiens; identical to SEQ ID NO: 3461

SEQ ID NO: 20304 - DNA, 201 bp, Homo sapiens
gtattatgatgaaaagagttttacctggtgggcccagaccacactttgagaaccactggactagacccttgattgaggagtacggtgttgagagtggagtyctctgtgatggtggatggaccaggacacatggcataggagtcaggtggttccctgggctactccatggtgcacaggatgcttcgttacactggtgcccag

SEQ ID NO: 20305 - DNA, 201 bp, Homo sapiens
acagtcatcccgacactagctgggaagctccagcagccctggtcctggccccagctctgtgggcgctggccctcaactttgcctgcactgtgcttttgtgytattccccttggtcctgtttgggtgcaagtccccctcacgcattgagttcctgggccgctcaggctgctcctgtgtctccccagggaacatgaaggtctt

SEQ ID NO: 20306 - DNA, 201 bp, Homo sapiens
ttaaactgctacatattttccctttaatttggccaagaacaagttgtcaagtttgtgtgagataaaggtgcacttggttcgttcttgtctaatggcccccrcacccatgggtatttcttcagcttccacagtcatcccgacactagctgggaagctccagcagccctggtcctggccccagctctgtgggcgctggccctc

SEQ ID NO: 20307 - DNA, 201 bp, Homo sapiens
cttaacatggtaagcccttatgcaagttgttgtcagctgagatgggcgtggcactgagcatgggagcatggaggcgcctgagtggtctcatgctcaggtgrtttagcaaactcagtgtacatcctgccaattccagtcctgccatggccactgacaagctaggagggcgctgaaaggagaaggaccccgatgtctcctcca

SEQ ID NO: 20308 - DNA, 201 bp, Homo sapiens
cagaaggatgccagaagagaaggtactttggggaggggcgggaatcaggagttagttttggacatgagataagcttggaatatttatttgctatctaagayagctccttaacatggtaagcccttatgcaagttgttgtcagctgagatgggcgtggcactgagcatgggagcatggaggcgcctgagtggtctcatgctc

SEQ ID NO: 20309 - DNA, 201 bp, Homo sapiens
tgccaccacgccaggctaattttgtatttttaatagagatggggtttcttcatgttggtcaggctggtctggaactcctaatatcagatgatccacccacytcagcctcccaaagtgctgggattacaggcgtgagccactgcacccagcctagttggctgacttttacctgggacagtgcaggtgcctgagccatgtgcc

SEQ ID NO: 20310 - DNA, 201 bp, Homo sapiens
gtgagtgggcatgctttgacgtttttctgtgacctctggggaacagggtgggtgaccagcagaggcccagtccctggagccaggagcctgggaggcaagcyctggggctggatagcaaatcccaggagctagagacctggcttctcacctggctctgccctaggcaagtccctttgcttcctggccccccacccctcacat

SEQ ID NO: 20311 - DNA, 201 bp, Homo sapiens
ataagagggggttggggaagctgggtggagtgggggggattgcagttgaaagtagggaagtcagggaaggcctcattgagctgacttggaggaagcgggamccgtgcagatgtctggggaaggctcattcttggcagagaggccctgcactgagcctggcgggagggttgagcacaggagggaatgtggtggaggagagtg

SEQ ID NO: 20312 - DNA, 201 bp, Homo sapiens
acgtttttctgtgacctctggggaacagggtgggtgaccagcagaggcccagtccctggagccaggagcctgggaggcaagccctggggctggatagcaawtcccaggagctagagacctggcttctcacctggctctgccctaggcaagtccctttgcttcctggccccccacccctcacatcagagaaggggagttatc

SEQ ID NO: 20313 - DNA, 201 bp, Homo sapiens
gtagctgggactagagatgcacaccattgcacccaatagagcaatacgtttctgttctttgtaaattacctgctctaaggtatttttgttatagcagcctrtatggactaagctgacttgtaacgttacttgagactttaaagtgttccggtcactgttggagggctctgtctgtgttagctcatttaatccccacaacac

SEQ ID NO: 20314 - DNA, 201 bp, Homo sapiens
ggaggcaagccctggggctggatagcaaatcccaggagctagagacctggcttctcacctggctctgccctaggcaagtccctttgcttcctggccccccrcccctcacatcagagaaggggagttatctctgcatgccgctcctcctctgtaaaggtagggctgtgggccacatctgtgtttcccagtttgggggacaca

SEQ ID NO: 20315 - DNA, 201 bp, Homo sapiens
aaacttcatcccattgtagtcatattaagagatggggcctttggagaagtgattaagtcatgagggctctgtggttggtcatgaatggggttagtgccctyatgaacgggctgaaggaagtgtgtttgccccttctgtcatatgaagacacagcagcatggcatcgtccgtgaggaatgggctctcaccagatctggatct

SEQ ID NO: 20316 - DNA, 201 bp, Homo sapiens
aggtccagagaggttatgtcacttacttaaggtcacacagccaggaagtggtagtagggactcttacccttgttttacagatgagattgaattatctcacraaaactcagaaaggttaaacaacttgcctaagtaacatacagctaattagtcgaggagcctgacgcatgttgctctagcctggtcacagttacagaggtg

SEQ ID NO: 20317 - DNA, 201 bp, Homo sapiens
tacagatgagattgaattatctcacgaaaactcagaaaggttaaacaacttgcctaagtaacatacagctaattagtcgaggagcctgacgcatgttgctstagcctggtcacagttacagaggtggcaagcaatggcctgaacaggacgaacaaccaaatacccaggctggtggctcttaaacatggtggggtcagctaa

SEQ ID NO: 20318 - DNA, 201 bp, Homo sapiens
cttgcctaagtaacatacagctaattagtcgaggagcctgacgcatgttgctctagcctggtcacagttacagaggtggcaagcaatggcctgaacaggaygaacaaccaaatacccaggctggtggctcttaaacatggtggggtcagctaacgacagcaaccagggtgggcactggtgcccctcgcccccggctggtgc

SEQ ID NO: 20319 - DNA, 201 bp, Homo sapiens
tctgccttctcttccctgcattcggtaattgccctgtgacattagccttcaagggacggcaggaggaggggtgttctggaaacgtggactgctggccaagmcccctgagtttcactggtgtgtcaggtacatggtgataccccttgggagtgctgttatagttaacaaccagagcagccgtgcctgttgttaaaatcttga

SEQ ID NO: 20320 - DNA, 201 bp, Homo sapiens
caatcctgccattagatacacctgccgtggtgtatctgccaggtaggcaggctaggctgcagtaacacacaagcccacaatttccatggcttaacactatrggaatatatttcttgctcacgtaacaagctaacgtgaatgttgctggtttgtaggtggtttccctccctgtagaaatctggggagtgaggttctttccat

SEQ ID NO: 20321 - DNA, 201 bp, Homo sapiens
tatcaatcacaaacaggtggttttccatagtgacccactctctgaatgcactagaccagggtggaggccagagatcttctggggtgctttttgcaaggggsaccaggataaggctctccaaggagggaaaatttgaggggggccctgactggggagaatgagctggccagggataagcaagatggagtcatcccacatccc

SEQ ID NO: 20322 - DNA, 201 bp, Homo sapiens
ggaagggctccttcaagcccagcgagcatggtgagcagggcggagtgcggcaggggtggctgggtgtgttcccacagctgcctgggctgagggtggggtgrgcaggggaggaggtggggtcatagcaacagcaggaggaagccgcctgtattttcccaaatctgatgggattcctgcccctgcctgggcctcagtcctccc

SEQ ID NO: 20323 - DNA, 201 bp, Homo sapiens
gtgccaccacgccaggctaattttgtatttttaatagagatggggtttcttcatgttggtcaggctggtctggaactcctaatatcagatgatccacccayctcagcctcccaaagtgctgggattacaggcgtgagccactgcacccagcctagttggctgacttttacctgggacagtgcaggtgcctgagccatgtgc

SEQ ID NO: 20324 - DNA, 201 bp, Homo sapiens; identical to SEQ ID NO: 3470

SEQ ID NO: 20325 - DNA, 201 bp, Homo sapiens
gattacaggcatgtgccaccacgccaggctaattttgtatttttaatagagatggggtttcttcatgttggtcaggctggtctggaactcctaatatcagrtgatccacccacctcagcctcccaaagtgctgggattacaggcgtgagccactgcacccagcctagttggctgacttttacctgggacagtgcaggtgcc

SEQ ID NO: 20326 - DNA, 201 bp, Homo sapiens
aattttcttgcctcagcctcccaagtagctgggattacaggcatgtgccaccacgccaggctaattttgtatttttaatagagatggggtttcttcatgtyggtcaggctggtctggaactcctaatatcagatgatccacccacctcagcctcccaaagtgctgggattacaggcgtgagccactgcacccagcctagtt

SEQ ID NO: 20327 - DNA, 201 bp, Homo sapiens
gacagttggctttttttttttttttctttttctgagacggagttttgctcttattgcccaggagtgcaatggcgtgatcttggctcactgcaacctctgcytcctgggttcaagcaattttcttgcctcagcctcccaagtagctgggattacaggcatgtgccaccacgccaggctaattttgtatttttaatagagatg

SEQ ID NO: 20328 - DNA, 201 bp, Homo sapiens
gtctgacagttggctttttttttttttttctttttctgagacggagttttgctcttattgcccaggagtgcaatggcgtgatcttggctcactgcaacctstgcctcctgggttcaagcaattttcttgcctcagcctcccaagtagctgggattacaggcatgtgccaccacgccaggctaattttgtatttttaataga

SEQ ID NO: 20329 - DNA, 201 bp, Homo sapiens
ccgtccccgtagcctccctccgtgtctgacagttggctttttttttttttttctttttctgagacggagttttgctcttattgcccaggagtgcaatggcrtgatcttggctcactgcaacctctgcctcctgggttcaagcaattttcttgcctcagcctcccaagtagctgggattacaggcatgtgccaccacgccag

SEQ ID NO: 20330 - DNA, 201 bp, Homo sapiens
aaaccctgtctctactaaaaatacaaaattagttgggtgtgtggcccatgcctgtaatcccagctactcagaaggctgaggcaggagaatcgcttgaaccygggaggcggaggttgcagtgagccgagatcgcgccattgcactccagcctgggcaacaagagtgaaactctgtctcaaaaaaataaaatgaaataaaata

SEQ ID NO: 20331 - DNA, 201 bp, Homo sapiens
cttgctcacgtaacaagctaacgtgaatgttgctggtttgtaggtggtttccctccctgtagaaatctggggagtgaggttctttccatcttgtggtgccrtcattctccaggacaaagattcttacctacttttgtgtcctggtttcctttggcagcctggtgaagcctatggacctcatttcagaatatttttaaatac

SEQ ID NO: 20332 - DNA, 201 bp, Homo sapiens
acggtgtttcaccatattggccaggctggtctcgaacttctgacctcaggtgatacacctgccttggcctcccaaagtgctgggattacaggcgtgagccrccatgcctggcctcatataagcatttctgtctccatttatcatccatctttccctcttgaaggtcagtttcaccaaggcaggcatctttgtctcgttcac

SEQ ID NO: 20333 - DNA, 201 bp, Homo sapiens
gaaaaggcatggaggtgggactgagtttggtgtgtttaagaagtgcaggtggcagccgggctcagtggctcacgcctgtaatcccagcactttgggaggcygaggcaggcggatcacctggggtcgggagttcaagaccagcctgaccagcatggagaaaccctgtctctactaaaaatacaaaattagttgggtgtgtgg

SEQ ID NO: 20334 - DNA, 201 bp, Homo sapiens
taacaagctaacgtgaatgttgctggtttgtaggtggtttccctccctgtagaaatctggggagtgaggttctttccatcttgtggtgccatcattctccmggacaaagattcttacctacttttgtgtcctggtttcctttggcagcctggtgaagcctatggacctcatttcagaatatttttaaatacataaaatccc

SEQ ID NO: 20335 - DNA, 201 bp, Homo sapiens
agtagagacggtgtttcaccatattggccaggctggtctcgaacttctgacctcaggtgatacacctgccttggcctcccaaagtgctgggattacaggcrtgagccgccatgcctggcctcatataagcatttctgtctccatttatcatccatctttccctcttgaaggtcagtttcaccaaggcaggcatctttgtct

SEQ ID NO: 20336 - DNA, 201 bp, Homo sapiens
ctacttttgtgtcctggtttcctttggcagcctggtgaagcctatggacctcatttcagaatatttttaaatacataaaatcccagcctgggcaatatagwgaaacccccatctgtacaaaaattagccaggcatggtggcatgcacctgtagtcccaggtactgggaaggctgaggtgggaggatcacttgagcccagga

SEQ ID NO: 20337 - DNA, 201 bp, Homo sapiens
tttagtagagacggtgtttcaccatattggccaggctggtctcgaacttctgacctcaggtgatacacctgccttggcctcccaaagtgctgggattacargcgtgagccgccatgcctggcctcatataagcatttctgtctccatttatcatccatctttccctcttgaaggtcagtttcaccaaggcaggcatctttg

SEQ ID NO: 20338 - DNA, 201 bp, Homo sapiens
ctttctttctaagatatacattcaataatataaatttccctctaagcactgcttttgctacgtctcaccgattttgataggctatattttcatttttattkagttaaaaatatttttagtttctcttgtgatttcttctttgatccatatgttattcggaagtgtgtttttaaatctccaaatacttggaaattttctggc

SEQ ID NO: 20339 - DNA, 201 bp, Homo sapiens
gaactcctgacctcaagtgatccacccacctcgttctcccaaggtgctgggtacaggcatgagccactgtgcctggccaattttcttacattttgtagagactggctgtcacttatgtagcccaggctgatcttgaacttctacccctttatctttattcatggcacttattaccatgaatgaatgacctcatataagcat

SEQ ID NO: 20340 - DNA, 201 bp, Homo sapiens
attaattagtgccttctctctcatttttttgattcgcctaggtagagatttatcaatttcattgatcttttcgaagaaccaatttttgatttcattgattytcctcgattaattttctatttttaatttcattgatgtatgctccaattttgtatttttttcttctgcttgttttagacatatattgcttttctgtttcta

SEQ ID NO: 20341 - DNA, 201 bp, Homo sapiens
gccttaacctcctgggctcaagtgatcctcctgcctcagccttcccagtagctggggctacaggcatgtgccacctctaataacttttctttaatttacartagtattagtttgttctcatgctgctctaaggacatgcccaagactgggtaatttataaaggaaagaggtttgactcacagttctgcagggctggggagg

SEQ ID NO: 20342 - DNA, 201 bp, Homo sapiens
gagtttggacttgaccatggagacactaggaagcccatgaaggacagagagagatgcctcgaccctgccagtcctttagaaagatcacccagtgctttttrtataccaaaccctatttgaaatacttacgtatattaacccatttccttatcaccacaaccctgcgggaagggagataggcacttttattatcttcatttt

SEQ ID NO: 20343 - DNA, 201 bp, Homo sapiens
tggtgccatcattctccaggacaaagattcttacctacttttgtgtcctggtttcctttggcagcctggtgaagcctatggacctcatttcagaatatttwtaaatacataaaatcccagcctgggcaatatagtgaaacccccatctgtacaaaaattagccaggcatggtggcatgcacctgtagtcccaggtactggg

SEQ ID NO: 20344 - DNA, 201 bp, Homo sapiens; identical to SEQ ID NO: 3476

SEQ ID NO: 20345 - DNA, 201 bp, Homo sapiens
aaacgtggactgctggccaagccccctgagtttcactggtgtgtcaggtacatggtgataccccttgggagtgctgttatagttaacaaccagagcagccktgcctgttgttaaaatcttgacctaattgtatacttgtcggcaaatagccactatcctgaacactcccctccttttttttaatatacaggatctcactct

SEQ ID NO: 20346 - DNA, 201 bp, Homo sapiens
tttatttttaaaattttaaaataaatagagacagggtatcactatgttgcccaggctgcttttgacctcctgggctccagtgatcttcccatcttggcttyccaaagtgctgggattacaagtgggagccagtgttcctggccccttcctccattcttaatggaaggagatgctaggtgtgagaggttagggaaagtaaag

SEQ ID NO: 20347 - DNA, 201 bp, Homo sapiens
cctgagctcaagtgatcctcccatcttagcctcccgagtagctgatactacagatgtgcattaccacgcctggctattttaaaaggtttttgcctgtaatdccagctactcaggaggctgaggcatgagaatcacttgaacccgggaggcagaggttgcagtgagcgcagattgtgccactgcactccagcctgggcgaca

SEQ ID NO: 20348 - DNA, 201 bp, Homo sapiens
ttctctagcctcagccttctaagtagctgggactacagtcatacaccaacatgcccagctaattttccttttttttaattcttgtagagatgtttgagacrgcttgggctctgttgcccaggctgttctcaaactcctgagctcaagcgatcctccctcctcagcctcctaaagtgctgggattacaggcgtgagccaccg

SEQ ID NO: 20349 - DNA, 201 bp, Homo sapiens
aatgcactagaccagggtggaggccagagatcttctggggtgctttttgcaagggggaccaggataaggctctccaaggagggaaaatttgaggggggccytgactggggagaatgagctggccagggataagcaagatggagtcatcccacatccccttacaacactgggtgcctgggcaactgggggcatttgggggca

SEQ ID NO: 20350 - DNA, 201 bp, Homo sapiens
cacagctaggaaatcctggagccaggatttgaacccgggtctgacctaagagctcccagccgccgtgatatatcagcttatgtcatcctgacacctacgcrgatgtcggctcgaatccactttgcctgagcattgtctcagagaaatctaatttaaaaattaggcagcaaatagaaaatatatttgactgctagagatgca

SEQ ID NO: 20351 - DNA, 201 bp, Homo sapiens
ggggggccctgactggggagaatgagctggccagggataagcaagatggagtcatcccacatccccttacaacactgggtgcctgggcaactgggggcatytgggggcatgtggtaggagccagaggaatttgcgacgattgccctgatggagtcaggagacctgggtttgaatcctggccttggagcttggtagctggcg

SEQ ID NO: 20352 - DNA, 201 bp, Homo sapiens
agttgggaggctcaatgattatcccaattttacagataaggaaacaggtccagagaggttgaggattagcctagaaccacacagctaggaaatcctggagycaggatttgaacccgggtctgacctaagagctcccagccgccgtgatatatcagcttatgtcatcctgacacctacgcagatgtcggctcgaatccactt

SEQ ID NO: 20353 - DNA, 201 bp, Homo sapiens
tttgggggcatgtggtaggagccagaggaatttgcgacgattgccctgatggagtcaggagacctgggtttgaatcctggccttggagcttggtagctggyggccgacaagttgctgaaacccctgagcctggggttcctgctttgcagagtgacagtgatggtgagaacatatttcatcagccagaagaggccaaatcac

SEQ ID NO: 20354 - DNA, 201 bp, Homo sapiens
tttgctagattggaaacttgtaaaacaacagtttgacaaaggaagatgattctggcaagaaaaagtttctgtgaagatggcacttcttagcatagtcctcrcccttattattaaaagatgcatttccactttgacagtgatttccccacccgagagcctggttgggcagccctgagccccttagccagtatctttcccatc

SEQ ID NO: 20355 - DNA, 201 bp, Homo sapiens
ttgcagtgagccaagacagtgccagtgcactccagcctcggtgacagcgcaaggctccgtctcaataattaaaaaaaaaaaaaaaaaaaaaaggccgggcrcagtggctcaagcctgtaatcccagcactttgggaggctgaggcgggcagatcacctgaggtcaggagttttgagatcagccttggcaacacggtgaaac

SEQ ID NO: 20356 - DNA, 201 bp, Homo sapiens
gtccccactgatgcccgagacggtgcccctgtgtgtgtgagccctcgacccacataacagagaggtgtcctgatgccctctgtcctctccaggtggatctmggatccggcttccaacatgtggcagctctgggcctccctctgctgcctgctggtgttggccaatgcccggagcaggccctctttccatcccctgtcggat

SEQ ID NO: 20357 - DNA, 201 bp, Homo sapiens
gcagggattggggagggagttgtgggatcagagcttgtaatgaagaccttcctttatccagagttatgtttaccgaggacctgaagctgcctgcaagcttygatgcacgggaacaatggccacagtgtcccaccatcaaagagatcagagaccagggctcctgtggctcctgctgggtaaggccctgctggctggcgggga

SEQ ID NO: 20358 - DNA, 201 bp, Homo sapiens
gccagatccaaatgcaggtctcctgactccaagtgcagggctcattttatcgtccggttgcagcacgctggcggccccttgagccccaacctggataccayaggggaggagcagagaagccaggaacaccacagccctgggccaaggtgcggggctgaaagaacttcccagcgctcagcctgggactagtggaatgggctg

SEQ ID NO: 20359 - DNA, 201 bp, Homo sapiens
agctctgaaaatctgaggaacattgtaggaaaggtttgttaagcatctcttaagtgccatgatgagcataacagccggccgtggtggctcacgcctgtaakcccagcactttgggaggccaaggtgggaggatgacaaggtcaggagttcaagaccagcctggccaacatgctgaaacctcacctctactaaaaatacaaa

SEQ ID NO: 20360 - DNA, 201 bp, Homo sapiens
caacgttctacagagccggggtggagcgtgctttctcataagtgctctgcaggtttggagagagaggatatgaggagcacccttttctgttttttttaacmcaaagattagcttggaaaaggggcagaggggtgcactggaactcaggtctgcctaagcagcacagcagaccaaggtctagagatgacatctgctcgcagc

SEQ ID NO: 20361 - DNA, 201 bp, Homo sapiens
cagatgctagatcaaataagctctgaaaatctgaggaacattgtaggaaaggtttgttaagcatctcttaagtgccatgatgagcataacagccggccgtsgtggctcacgcctgtaatcccagcactttgggaggccaaggtgggaggatgacaaggtcaggagttcaagaccagcctggccaacatgctgaaacctcac

SEQ ID NO: 20362 - DNA, 201 bp, Homo sapiens; identical to SEQ ID NO: 3487

SEQ ID NO: 20363 - DNA, 201 bp, Homo sapiens
ggggagcagtgggtgctgggtgtggggcgttgcaggcaggctggggtgggcgacccaggtggaagtgaattgcacttggcttcctggtgggcctctgtcayccccttcccaggcgctgagaaagccagcaggctggcaaagaaaaggaccctagcgcaggccccacactcctcctcctaacggacgagagaccccccaaac

SEQ ID NO: 20364 - DNA, 201 bp, Homo sapiens
tggccaactttctgcgcaagatcccacgcaattcctgggaccccagaagacaggtcctgttgaagaacaggaatctggcactgggtgggctggggaggaasccgcacggtgttaaatccataaacaggaagagaaaccagacagcgaaaccaagaggcgaatgggcgattggatgccggtggggagaaggccgggggcgca

SEQ ID NO: 20365 - DNA, 201 bp, Homo sapiens; identical to SEQ ID NO: 3489

SEQ ID NO: 20366 - DNA, 201 bp, Homo sapiens
gactggctgaccgtggcgtgccacgaggcacggtcactgccctccccaaccccgagctcggttcattttccaggatacaattcctacagcgtctccaatarcgagaaggacatcatggccgagatctacaaaaacggccccgtggagggagctttctctgtgtattcggacttcctgctctacaagtcaggtgcgtgctga

SEQ ID NO: 20367 - DNA, 201 bp, Homo sapiens; identical to SEQ ID NO: 3492

SEQ ID NO: 20368 - DNA, 201 bp, Homo sapiens
aaagtgaaactccgcctccaggaaaaaaaaaaaaaaaaaccacacacacacatacaaactaatactacacattttgcagatttcagaaatgaaccgagttyccaggcagaggttcacggtggtgcttctcttgctttaaaagctgagttgggcagatgttgaggcaggagagtggggcaagtggctcatgacgcctctaat

SEQ ID NO: 20369 - DNA, 201 bp, Homo sapiens
cttctccgtgggggctgtaggttgactccgctttctcccgggtcccatcagggtgcagaccgtactccatccctccctgtgagcaccacgtcaacggctcycggcccccatgcacgggggagggagatacccccaagtgtagcaagatctgtgagcctggctacagcccgacctacaaacaggacaagcactacggtaagg

SEQ ID NO: 20370 - DNA, 201 bp, Homo sapiens
gctggagtgcagtggtgggatattggctcactgcaacctctgcctcctgggttcaagcaattctcctgcctcagtctccccagtagctaagactacaggcrtgtgccaccacgcccagctaatttttgtatttttagtagagatggggttttgccatgttggacagcctggtctcaaacgcctcacctgttgatctgcctt

SEQ ID NO: 20371 - DNA, 201 bp, Homo sapiens
agcttcgatgcacgggaacaatggccacagtgtcccaccatcaaagagatcagagaccagggctcctgtggctcctgctgggtaaggccctgctggctggyggggaagcgctggagagaaagtgggagcaacactggagagtcttgggggattcggggtggggacaactctgacaaggcaagttatagaaactttctgagt

SEQ ID NO: 20372 - DNA, 201 bp, Homo sapiens
tggactgttgaaaaatggccctgaccctgagtcatgtcggctctggaccacgcctccctcctttgtcccataccccacgtgtgtgcatgagtgtgtgtgcwtgtgtatgaatatatggttgtgtgcacgtggaggtgtgtgggggagtaagtgagcttcggaagtgttcaaaaccagctagcccctgtgacgcccgccgtg

SEQ ID NO: 20373 - DNA, 201 bp, Homo sapiens
tcccaggtcggtctgtgcacactgactccaggaatgggaagccagccctcactgtggcccacagaacattgtcctggactgttgaaaaatggccctgaccytgagtcatgtcggctctggaccacgcctccctcctttgtcccataccccacgtgtgtgcatgagtgtgtgtgcttgtgtatgaatatatggttgtgtgca

SEQ ID NO: 20374 - DNA, 201 bp, Homo sapiens
cctgctggtgttggccaatgcccggagcaggccctctttccatcccctgtcggatgagctggtcaactatgtcaacaaacggaataccacgtggcaggtargctgtggggctgcgtcctatgtatgtcccctcccaggtcggtctgtgcacactgactccaggaatgggaagccagccctcactgtggcccacagaacatt

SEQ ID NO: 20375 - DNA, 201 bp, Homo sapiens
ctctctctgggctctggccgcctggcccccggggacccacacgaggtcatggcgtgctgcgggcagtggggcggggatcccatagacacctcagctccttagagttctccgcctgggccaggacgagcatgggggtccccactgatgcccgagacggtgcccctgtgtgtgtgagccctcgacccacataacagagaggtg

SEQ ID NO: 20376 - DNA, 201 bp, Homo sapiens
ttctctgttctacccaccgcacagccttaaaccctggacctacggccaggctgtgagctcctcctaagtgccaggcagtcaggagttcccttttgctgtgrgggcagactctgagcagcttcagagccaacgcctgcaacagttcccacagcatcgcgccagatcctgtgatgggaagggtgaccgggcagggggcttgcc

SEQ ID NO: 20377 - DNA, 201 bp, Homo sapiens
tggactcggtctcgtccagcacagccccttggctctctctctgggctctggccgcctggcccccggggacccacacgaggtcatggcgtgctgcgggcagkggggcggggatcccatagacacctcagctccttagagttctccgcctgggccaggacgagcatgggggtccccactgatgcccgagacggtgcccctgtg

SEQ ID NO: 20378 - DNA, 201 bp, Homo sapiens
agccaacgcctgcaacagttcccacagcatcgcgccagatcctgtgatgggaagggtgaccgggcagggggcttgcccgtggaggtgtgccccacggctcyagaagccttgtggtgttgaggactgtgctagtgggcccacagcaggagtggccagggatgagtgacttaaggtcttttaaggatgagtctgactatattg

SEQ ID NO: 20379 - DNA, 201 bp, Homo sapiens
gaaggccctggactcggtctcgtccagcacagccccttggctctctctctgggctctggccgcctggcccccggggacccacacgaggtcatggcgtgctkcgggcagtggggcggggatcccatagacacctcagctccttagagttctccgcctgggccaggacgagcatgggggtccccactgatgcccgagacggtg

SEQ ID NO: 20380 - DNA, 201 bp, Homo sapiens
actttctggccagatggattgtttgagcaattaaccatcatggctttatttgcctttataaactgggggttgagacagaggggctgctgagaggtgctagycaggtgtacaggcctctggcaggacctgcctggcgtccatgctgcaggcacgaggcttgccttgccccaggtctgcctcgcccagctggggcttctccgt

SEQ ID NO: 20381 - DNA, 201 bp, Homo sapiens
gtgtcagtgagctgtcttaattttgtcatttaattgtggtaaaatacacgtaacagaaatgtaataatcttagcaatcttcttttgttttctttttctttytttttttttttttttttttttggagatggagtcttgctctgtcacccaggctggagtgcagtggtgggatattggctcactgcaacctctgcctcctggg

SEQ ID NO: 20382 - DNA, 201 bp, Homo sapiens
atggtgaaaccctgtctttactaaaaatacaaaaattagccgggtgtggtggtgcatgcctgtaatcccacctactcaggaggctgaggcacgagaatcgmttgaactcaggaggcagaggttgcagtgggcagagatctcgccactgcactccagcctggatgacacagtgaaattctgtccactcccaccctcccgtcc

SEQ ID NO: 20383 - DNA, 201 bp, Homo sapiens
catttagtcagtggcagagccagatccaaatgcaggtctcctgactccaagtgcagggctcattttatcgtccggttgcagcacgctggcggccccttgagccccaacctggataccataggggaggagcagagaagccaggaacaccacagccctgggccaaggtgcggggctgaaagaacttcccagcgctcagcctgg

SEQ ID NO: 20384 - DNA, 201 bp, Homo sapiens
ttctggtggcctctatgaatcccatgtaggtaagtgtgtccccttggccactttctggccagatggattgtttgagcaattaaccatcatggctttatttrcctttataaactgggggttgagacagaggggctgctgagaggtgctagccaggtgtacaggcctctggcaggacctgcctggcgtccatgctgcaggcac

SEQ ID NO: 20385 - DNA, 201 bp, Homo sapiens
actcctgacctcgtgatccgcctgcctcagcctcccaaagtgctgggattacatgcgtgagccattgtgtccggcctttttttttttttttttttttttttgagacagagtctcgctctgttgcccaggctggagtgcagtggtgtgacctcagcttactgcaacctccgcttcctggattcaagtgattctcctgcctca

SEQ ID NO: 20386 - DNA, 201 bp, Homo sapiens
tactcgtgcaaaaatttaaaaaattgcaacctctggcataaatgggttgagtgacacttttcctgtttttattgttggtcagtgatggcatatttgctggktttttttgttttttttttgaaacggagtctcactgtgtcgccaggctggagtgcagtggtgtaatctcggctcactgtaacctccgcctcccgggttcaa

SEQ ID NO: 20387 - DNA, 201 bp, Homo sapiens
gacacactccctctatcgctcaggctggagtgcagtggtgcgatctcggttcactgccacctccgcctctcatgttgaagcaattctcctgtctcagcctscctcccaagtagctgggattgccagtgcccatcaccacacctggcttttttttttttttttgtatttttagtagagacgggctttcaccatgttagccag

SEQ ID NO: 20388 - DNA, 201 bp, Homo sapiens
aattagctgggcatggtggcacatgcctgtaatcccagctacttgggaggctgaggcaggagaatcgcttgaacccgggaggcggaggttgcagtgagccragacagtgccagtgcactccagcctcggtgacagcgcaaggctccgtctcaataattaaaaaaaaaaaaaaaaaaaaaaggccgggcgcagtggctcaag

SEQ ID NO: 20389 - DNA, 201 bp, Homo sapiens; identical to SEQ ID NO: 3513

SEQ ID NO: 20390 - DNA, 201 bp, Homo sapiens
ccaccgcagcgtaagtgaccttggcggggacggtgctacccggccgccgagacgggttcctctgcgccctcagtcgggcccaggcgcggccccgcggcgtmcctgggggccggcggggagccgggaccctcgggactgtccctgacgggcgggctggggtgggagtccgcgcgctccgaagcgtcggcgagaaaagcagaa

SEQ ID NO: 20391 - DNA, 201 bp, Homo sapiens
ttttctgttgctcttggttggattgggaagtgaattgaagggaggtcacgtttcaggggtgccttgggatgtctgtcagtgattttcttttctttcttaawttctttttctttcttttttttttttttttgagacacactccctctatcgctcaggctggagtgcagtggtgcgatctcggttcactgccacctccgcctc

SEQ ID NO: 20392 - DNA, 201 bp, Homo sapiens
agcctcatctccgcagccggaagcagagcccttggctgactggaaaaaccagagaggccccgggagtgggtggatggccagcccagccccacctctcagcstcaacctccaccagcccacaccgagcttgtttgtctgtgtcctgtcgaaactaggactcctggattgtaacttttcttacatttccctgtcccctgggtc

SEQ ID NO: 20393 - DNA, 201 bp, Homo sapiens
aattttcttaaatctggtaatgagttgtggttgtgtagagtaacataccgtcctttcgagatatggactgaaacattgagagggaggagttacaggtatgycgattcttcttttctctctctcctttttttttttgaggtggagtctgactctctcacccaggctggagtgcagtggcaagatctcagctcactgcaacct

SEQ ID NO: 20394 - DNA, 201 bp, Homo sapiens
acaaaacaattctgtgttgcatgtggtactttttgtgtgtgaggagtccagtgtgaagattcagacttcaggcagccacttgtacaagcactgtcctgttkcctctctggcctcacctaggtaacgctgattcctccacggaggatgtgcttctgagtggtccgttgggtgctgtgctgatgagcatcacccagcatttta

SEQ ID NO: 20395 - DNA, 201 bp, Homo sapiens
gggatcaaattccactctgtgtttagacatttttttctttctttttttttttgagacagagtttcactctgtcacccaggctggaatgccgtggcacaatytcagctcactgcaaccttacctcccaggttcaagcaatgttcctgcctcagcctccggagtagctgggattagaggcatgcaccaccatgcctggctaat

SEQ ID NO: 20396 - DNA, 201 bp, Homo sapiens
ggccaaaatggtgaaaccctgtctttactaaaaatatgaaaattagctgggcatgatggcacatgcctgtaatcccgctgctcgggaagctgaggtaggaraatagcttgaacccaggaggcagaggttgcagtgagccgagatcatgccattgcactccagcctgggggacagagtaagactccgtctcaaaaaaacaaa

SEQ ID NO: 20397 - DNA, 201 bp, Homo sapiens
cagggtttcaccaccttagtcaggctggtctctaactcctgacctcaggtgatccaaccgcctcggctacaggcatgcgccaccgtgccccaccaactaaytgcttttttaatggttgcttcatattctatttaaccacttaccgtaatttaacagttactctgttattggatacttgattcatttccaggacatgcagat

SEQ ID NO: 20398 - DNA, 201 bp, Homo sapiens
caaaactgaaataataggaacatactcacttttttttttttcttaaaagtaagggtatgttgtgaaaaaaagtctccccaccgtagtgaccgactgccgtrcatcttccttggcattttgcatgtagtggcaggagtgttcctacatgtgtagattgctgagagggtcagatgcttatggtcctcagtcacccacagcttg

SEQ ID NO: 20399 - DNA, 201 bp, Homo sapiens; identical to SEQ ID NO: 3596

SEQ ID NO: 20400 - DNA, 201 bp, Homo sapiens
agaccaaggtctagagatgacatctgctcgcagctgttcttccaccagcccgcatcctggaaaggggtcttgtggcacacaagagttcacatccttccctsgtgaaataaggactttgtgttcatcatctcttgtaagaagcagagcagaaagcacagaattaagaaataaaagggaagtgggtgcctatataaagggaag

SEQ ID NO: 20401 - DNA, 201 bp, Homo sapiens
cctgccaccatgcctggctatttttttgtatttttagtagaaacggggtttcaccgtgttatccaggatggtctcgatctcctgacctcgtgattcgcccrcctcagcctcccaaagtactgggattacaggcgtgagccagcatgcccggcccagagctaggcctttctgtggctggccttcgcgtcagcctcaactacc

SEQ ID NO: 20402 - DNA, 201 bp, Homo sapiens
attctgccctaagagcccggagggccgggctgtctcatgaccctctgacgtgctgacctggactctggcagaatgtgcacacacacagtcacacagcttcstggcttgcgcaagtcccaggagggcggtgccagccacaggcttttcccattcgagggttggaagcgtatcatcaaaccacatcagagtgctgggggccac

SEQ ID NO: 20403 - DNA, 201 bp, Homo sapiens
gtcactatcctgcccaggctggtcttaatctcctgggttcagtcaatcttcccaccttggcctcccgaagtgtcagaattatagatgtgagccactgtgcycagcccagaactgatgttttctaaatgctgggtgctgagaaggatgtgtggctggcagtcttgactgtgttatctgtctttaccaggccagtaacttctt

SEQ ID NO: 20404 - DNA, 201 bp, Homo sapiens
acccacttatgcctagtgttccattattagaacgctaagcatgtgggagtttttacatcatactgctcaaggtcatcgccaaggtctgatgtttttactcrtgcaaaaatttaaaaaattgcaacctctggcataaatgggttgagtgacacttttcctgtttttattgttggtcagtgatggcatatttgctggtttttt

SEQ ID NO: 20405 - DNA, 201 bp, Homo sapiens; identical to SEQ ID NO: 3482

SEQ ID NO: 20406 - DNA, 201 bp, Homo sapiens
gtgatgggaagggtgaccgggcagggggcttgcccgtggaggtgtgccccacggctccagaagccttgtggtgttgaggactgtgctagtgggcccacagyaggagtggccagggatgagtgacttaaggtcttttaaggatgagtctgactatattggttgacccttgtcacactttaaaagcaccttactttttattcc

SEQ ID NO: 20407 - DNA, 201 bp, Homo sapiens; identical to SEQ ID NO: 3484

SEQ ID NO: 20408 - DNA, 201 bp, Homo sapiens
gtgtttagacatttttttctttctttttttttttgagacagagtttcactctgtcacccaggctggaatgccgtggcacaatctcagctcactgcaacctyacctcccaggttcaagcaatgttcctgcctcagcctccggagtagctgggattagaggcatgcaccaccatgcctggctaatttttgtatttttagtaga

SEQ ID NO: 20409 - DNA, 201 bp, Homo sapiens
ccaaagtgttgggattacaggtgtgagtcactgtgcccagccatgtgtttagacttttaactaatctcttttttagtttcaagccttatcgtccgcctctrtagaccactcctgtgcctgtttcctgatccttccaagggccattgtattccctgtctgctgcccctcttttggattcttctgcacatttttttgttcatg

SEQ ID NO: 20410 - DNA, 201 bp, Homo sapiens
attgtttgattaatgacagggtcttgctttgtctcccaggctggtgtgcagtggtgcgaccacggctcacggcagcctcagccacccagatgtaagcgatytggttcccacctcagcctcccgagtagtaagtagctgggaccacaggcggtgcccaggttttttttttttttttttttttttttcgtttgtagagacagg

SEQ ID NO: 20411 - DNA, 201 bp, Homo sapiens
gtgttaagtgcccagtgtgtttatctactgagggacagttatgttatttcgtgttcactattatcccatgctacaataaatatcctgtgtctcccagatasttagaagagtttctgcagggcacatgtgggagagtttgtttctgggtcatgaggtgtgttcatcttccatcttgctagatgctggcaaagggttctccag

SEQ ID NO: 20412 - DNA, 201 bp, Homo sapiens; identical to SEQ ID NO: 3495

SEQ ID NO: 20413 - DNA, 201 bp, Homo sapiens; identical to SEQ ID NO: 3498

SEQ ID NO: 20414 - DNA, 201 bp, Homo sapiens
ccttaatttaatcataagccaagaatctactaaacacagttccattaggggcaaagacgtaacacatcagaggccacagcaaggctgtgattcatactcaraaaggaaaggtctctgggtcacaacagagcatagttgaggtcagcacactcccacccagtgcagggctgctccagcattgaggtgtgtctggcaggttga

SEQ ID NO: 20415 - DNA, 201 bp, Homo sapiens
ctcctgtgacttagccgcacctcctctcctttgactttcattccacctccttccaggatcgcaaggtccctatttgtcctggaaacggcttcaaggtagtytagggtgccgtttgccgggggaggaaggtgctctggttgatagagtcgcctggccgcacactctttttggcacataacaacgttctacagagccggggtg

SEQ ID NO: 20416 - DNA, 201 bp, Homo sapiens
gtttgcagtgagccatgatcgtgccactgcactccagcctgggcaacagagtgagatcctgtcttaaaacaaacaaaaaaaacaaacttgttttcatttaractcttcctggcgttggggacctattggaataggtttagtgtgaactgagagctagaagtgttagaggagagagggagggaacagagcccgctggagcga

SEQ ID NO: 20417 - DNA, 201 bp, Homo sapiens
gtggatctaggatccggcttccaacatgtggcagctctgggcctccctctgctgcctgctggtgttggccaatgcccggagcaggccctctttccatcccstgtcggatgagctggtcaactatgtcaacaaacggaataccacgtggcaggtaggctgtggggctgcgtcctatgtatgtcccctcccaggtcggtctgt

SEQ ID NO: 20418 - DNA, 201 bp, Homo sapiens
ccctggcacagctctcctgggtgttggctcaggacagccctgtttccaactggttaggcggtgaggggtggtggccctttggttccaggttgaaactgccyatgtggtgctgatttagcagactggggaggctctttttgtaggcaggttcttttctttccccagctgctggacctgggagttggaagagaagttgcaccc

SEQ ID NO: 20419 - DNA, 201 bp, Homo sapiens
ggggccggcggggagccgggaccctcgggactgtccctgacgggcgggctggggtgggagtccgcgcgctccgaagcgtcggcgagaaaagcagaaaacarctccgcccgccagccctctgccctccgctcccctccccgggctgtgcgccggaccccggccctcggagcggggacgcggccaggaccgccgagggaggcg

SEQ ID NO: 20420 - DNA, 201 bp, Homo sapiens
cctcggactgagaaccaagaatgaggagtgagccatgttgagggctggagagggtctctgattgtcagcaaatgggagcagatcaggggagacacccactytgcccgtgtgtcactctgggctgttccccagtgccccccaacccttgggcccttgaattgggtagggcctctggttttccctgggttgggcttcgtgtgt

SEQ ID NO: 20421 - DNA, 201 bp, Homo sapiens; identical to SEQ ID NO: 3508

SEQ ID NO: 20422 - DNA, 201 bp, Homo sapiens
caaatgggagcagatcaggggagacacccactttgcccgtgtgtcactctgggctgttccccagtgccccccaacccttgggcccttgaattgggtagggyctctggttttccctgggttgggcttcgtgtgtgggcagcgtgcccatccaccgccatcccgggagacccttcagtcagtgggtgactctcttccaggccg

SEQ ID NO: 20423 - DNA, 201 bp, Homo sapiens
gtgtgtgggcagcgtgcccatccaccgccatcccgggagacccttcagtcagtgggtgactctcttccaggccgggcacaacttctacaacgtggacatgrgctacttgaagaggctatgtggtaccttcctgggtgggcccaagccaccccagaggtgagtgcctgctcctctgcaccgctgtaatgtgagtggcaggcg

SEQ ID NO: 20424 - DNA, 201 bp, Homo sapiens
ggcgtccatgctgcaggcacgaggcttgccttgccccaggtctgcctcgcccagctggggcttctccgtgggggctgtaggttgactccgctttctcccgsgtcccatcagggtgcagaccgtactccatccctccctgtgagcaccacgtcaacggctcccggcccccatgcacgggggagggagatacccccaagtgta

SEQ ID NO: 20425 - DNA, 201 bp, Homo sapiens; identical to SEQ ID NO: 3600

SEQ ID NO: 20426 - DNA, 201 bp, Homo sapiens
caaactggaagggaccaaagccctccttttacaagggagtggcgtgtcctggagtcttgaggtatcctggcctcttccggggcctcgtgctcattgctccsttctcccatttctgagcttccagccccagccctgtccttagttcttcaggggagccttccttgagctcccctggcagggcaagtccccttagatgcagtc

SEQ ID NO: 20427 - DNA, 201 bp, Homo sapiens; identical to SEQ ID NO: 3602

SEQ ID NO: 20428 - DNA, 201 bp, Homo sapiens
cgtgctgatggctgatggcaatagagggtgggggtcgggaggggagcctgggtgccaggatggttcatgttgaccaatagggctggattgggcaggcaggkgaggggctggggaagagggctgtgtggggccttccatataggctcactcctctgtggaccagcctggcacctgactgtctttgtccaggtgttgtgccaa

SEQ ID NO: 20429 - DNA, 201 bp, Homo sapiens; identical to SEQ ID NO: 3603

SEQ ID NO: 20430 - DNA, 201 bp, Homo sapiens
gctggcggggaagcgctggagagaaagtgggagcaacactggagagtcttgggggattcggggtggggacaactctgacaaggcaagttatagaaactttytgagtcccagtttccatcagtacaaaaatcacaatccctctggccatgaatgatggcgaggattaggtggagtggcgggcagagcatccagcagattgca

SEQ ID NO: 20431 - DNA, 201 bp, Homo sapiens
acaagcagcacagtgatcatcacccacaaggacaggttgctgggatgaggcaccctttcctttcatgtttaggttcttctcacctgcatttcactttcctwaaggtcccagccacacagcgttcttttagggattaaagtagtaggaaaaaaataaagagaacacaacatccatccttaaagaaaaaaagtaaatccactt

SEQ ID NO: 20432 - DNA, 201 bp, Homo sapiens
cagctatggacaaatttgggatcagtgttctccagtctgaacatagtcttctgttacctgggagagagtggtcaggtactgccagctcagggcagccaaargcatgacaaacgacaggtagatgggggagtagtggcttcgggaaatcagctgacagttgggaagattctgcgtccggatggtggagatgatctgccttgt

SEQ ID NO: 20433 - DNA, 201 bp, Homo sapiens
gctgctgagaggtgctagccaggtgtacaggcctctggcaggacctgcctggcgtccatgctgcaggcacgaggcttgccttgccccaggtctgcctcgcscagctggggcttctccgtgggggctgtaggttgactccgctttctcccgggtcccatcagggtgcagaccgtactccatccctccctgtgagcaccacgt

SEQ ID NO: 20434 - DNA, 201 bp, Homo sapiens
actgatgcccgagacggtgcccctgtgtgtgtgagccctcgacccacataacagagaggtgtcctgatgccctctgtcctctccaggtggatctaggatcyggcttccaacatgtggcagctctgggcctccctctgctgcctgctggtgttggccaatgcccggagcaggccctctttccatcccctgtcggatgagctg

SEQ ID NO: 20435 - DNA, 201 bp, Homo sapiens
ctggggaagagggctgtgtggggccttccatataggctcactcctctgtggaccagcctggcacctgactgtctttgtccaggtgttgtgccaacacacasaattccagaggcctctcccagagcctctgggctagttccttcccatccattggagtccagctcatacatgttctctgtgggaacgcccccctccctggtg

SEQ ID NO: 20436 - DNA, 201 bp, Homo sapiens
ttcccatcagctagcattagctgccaccagtcctcccttctcctccctcacctcttcagggtgtacctggagcagctattaaaactctttaagccgtgtarcgcttttgacaaacccttacttacatggaatcccagtataaagaacagatgaatcagtcatctagcattaaatgttttatcaattagaatgtattagaaa

SEQ ID NO: 20437 - DNA, 201 bp, Homo sapiens
cccatcagctagcattagctgccaccagtcctcccttctcctccctcacctcttcagggtgtacctggagcagctattaaaactctttaagccgtgtaacrcttttgacaaacccttacttacatggaatcccagtataaagaacagatgaatcagtcatctagcattaaatgttttatcaattagaatgtattagaaatt

SEQ ID NO: 20438 - DNA, 201 bp, Homo sapiens
gtataaagaacagatgaatcagtcatctagcattaaatgttttatcaattagaatgtattagaaattctatttttaaagccaacaagcacattttgtaggmatctatttcaatatttactcaacaactttgagtgtgttgggccttcaaaaatatatttaattccccagtattgtgggaccccccctggagcctcctggtg

SEQ ID NO: 20439 - DNA, 201 bp, Homo sapiens
ctagcattaaatgttttatcaattagaatgtattagaaattctatttttaaagccaacaagcacattttgtaggaatctatttcaatatttactcaacaamtttgagtgtgttgggccttcaaaaatatatttaattccccagtattgtgggaccccccctggagcctcctggtggagcagcaggttccctctggaagctg

SEQ ID NO: 20440 - DNA, 201 bp, Homo sapiens
ctatttcaatatttactcaacaactttgagtgtgttgggccttcaaaaatatatttaattccccagtattgtgggaccccccctggagcctcctggtggarcagcaggttccctctggaagctgtttctccttcccggagcatgaccagctgagtgtggggggtgctgtggggcgtgggacagtggcccggtctcggtctc

SEQ ID NO: 20441 - DNA, 201 bp, Homo sapiens; identical to SEQ ID NO: 3503

SEQ ID NO: 20442 - DNA, 201 bp, Homo sapiens; identical to SEQ ID NO: 3505

SEQ ID NO: 20443 - DNA, 201 bp, Homo sapiens; identical to SEQ ID NO: 3506

SEQ ID NO: 20444 - DNA, 201 bp, Homo sapiens
cttgctgcagctgggggtgggtccacgagtggcctcgggcacttgggtagcacacagtggtctggagagctggtggtgcttctctcagaggttttcattasaggctgtcttttcagctgtaatggtggctatcctgctgaagcttggaacttctggacaagaaaaggcctggtttctggtggcctctatgaatcccatgta

SEQ ID NO: 20445 - DNA, 201 bp, Homo sapiens
tgggggtccccactgatgcccgagacggtgcccctgtgtgtgtgagccctcgacccacataacagagaggtgtcctgatgccctctgtcctctccaggtgratctaggatccggcttccaacatgtggcagctctgggcctccctctgctgcctgctggtgttggccaatgcccggagcaggccctctttccatcccctgt

SEQ ID NO: 20446 - DNA, 201 bp, Homo sapiens
ggtttagtgctgagagaccctgggccccagcttctcagtggaggggactttgaggacttcctgggactgctgcgagtcagaagtgtttcggggagactccragagtctggcaggcagggcctggcaaggctgctgcttcctgggaggtgcctgaaccaaggctggcccggcagagctgtctgaggggtggcatcccagcaa

SEQ ID NO: 20447 - DNA, 201 bp, Homo sapiens
gtcggcggaggacctgctcacctgctgtggcagcatgtgtggggacgggtgagtcaggctgtgcttccacagcgggtttagtgctgagagaccctgggccscagcttctcagtggaggggactttgaggacttcctgggactgctgcgagtcagaagtgtttcggggagactccgagagtctggcaggcagggcctggcaa

SEQ ID NO: 20448 - DNA, 201 bp, Homo sapiens; identical to SEQ ID NO: 3575

SEQ ID NO: 20449 - DNA, 201 bp, Homo sapiens
caagccttatcgtccgcctctgtagaccactcctgtgcctgtttcctgatccttccaagggccattgtattccctgtctgctgcccctcttttggattctyctgcacatttttttgttcatgcattcattcatttattgtttgattaatgacagggtcttgctttgtctcccaggctggtgtgcagtggtgcgaccacggc

SEQ ID NO: 20450 - DNA, 201 bp, Homo sapiens; identical to SEQ ID NO: 3578

SEQ ID NO: 20451 - DNA, 201 bp, Homo sapiens; identical to SEQ ID NO: 3579

SEQ ID NO: 20452 - DNA, 201 bp, Homo sapiens; identical to SEQ ID NO: 3509

SEQ ID NO: 20453 - DNA, 201 bp, Homo sapiens
ctcaaatgaaccaattaactgaagtctccctgggcccaaactaattttggtgtcagtggtcacagcaagaaagtgtgcttacaacaatgcaaatccaacgytgcagctcgaaacaactcaaattcaatgattaagccaccatccacgatgggctgcagaagagtagactttatgagtacctgtagcattaatggcttctag

SEQ ID NO: 20454 - DNA, 201 bp, Homo sapiens; identical to SEQ ID NO: 3510

SEQ ID NO: 20455 - DNA, 201 bp, Homo sapiens; identical to SEQ ID NO: 3512

SEQ ID NO: 20456 - DNA, 201 bp, Homo sapiens; identical to SEQ ID NO: 3515

SEQ ID NO: 20457 - DNA, 201 bp, Homo sapiens; identical to SEQ ID NO: 3514

SEQ ID NO: 20458 - DNA, 201 bp, Homo sapiens; identical to SEQ ID NO: 3517

SEQ ID NO: 20459 - DNA, 201 bp, Homo sapiens; identical to SEQ ID NO: 3516

SEQ ID NO: 20460 - DNA, 201 bp, Homo sapiens; identical to SEQ ID NO: 3518

SEQ ID NO: 20461 - DNA, 201 bp, Homo sapiens
gctgcgggcagtggggcggggatcccatagacacctcagctccttagagttctccgcctgggccaggacgagcatgggggtccccactgatgcccgagacrgtgcccctgtgtgtgtgagccctcgacccacataacagagaggtgtcctgatgccctctgtcctctccaggtggatctaggatccggcttccaacatgtg

SEQ ID NO: 20462 - DNA, 201 bp, Homo sapiens; identical to SEQ ID NO: 3520

SEQ ID NO: 20463 - DNA, 201 bp, Homo sapiens; identical to SEQ ID NO: 3521

SEQ ID NO: 20464 - DNA, 201 bp, Homo sapiens; identical to SEQ ID NO: 3522

SEQ ID NO: 20465 - DNA, 201 bp, Homo sapiens
ctggcaaggctgctgcttcctgggaggtgcctgaaccaaggctggcccggcagagctgtctgaggggtggcatcccagcaaaacagtcagtttcagaaaawgtggtggaatgtctggcccctggtctggtttgtgtcatcgcatgttcctttttcctgcttggggaaccagtttggggcgtttccttatgtgtagttagcg

SEQ ID NO: 20466 - DNA, 201 bp, Homo sapiens
ggagcctcctggtggagcagcaggttccctctggaagctgtttctccttcccggagcatgaccagctgagtgtggggggtgctgtggggcgtgggacagtsgcccggtctcggtctcagccagttcttcccttttcaggagtgtaccaacacgtcaccggagagatgatgggtggccatgccatccgcatcctgggctggg

SEQ ID NO: 20467 - DNA, 201 bp, Homo sapiens
tcggctttctctgttctacccaccgcacagccttaaaccctggacctacggccaggctgtgagctcctcctaagtgccaggcagtcaggagttcccttttrctgtgagggcagactctgagcagcttcagagccaacgcctgcaacagttcccacagcatcgcgccagatcctgtgatgggaagggtgaccgggcaggggg

SEQ ID NO: 20468 - DNA, 201 bp, Homo sapiens
aactgtttcatatcactcacttgggaaagtgtctcaagctgttctacaaatccatgcaaaggccgtttaaaaatagcagcgaaggccctggactcggtctygtccagcacagccccttggctctctctctgggctctggccgcctggcccccggggacccacacgaggtcatggcgtgctgcgggcagtggggcggggatc

SEQ ID NO: 20469 - DNA, 201 bp, Homo sapiens
gcaaaatgctgggattacaggcgtgagccaccgtgcccagcaactattttcaagtgtacagttctgtagcattaagtacattcacagtgttgctcagccaycaccaccatctgtcccccgaactctttttcagctcgcaagacagaaactctgtccccattaacaccaatattgtagcccctggtaagccccactctactt

SEQ ID NO: 20470 - DNA, 201 bp, Homo sapiens; identical to SEQ ID NO: 3488

SEQ ID NO: 20471 - DNA, 201 bp, Homo sapiens
ccagcctgggcaacaaaagtgaaactccgcctccaggaaaaaaaaaaaaaaaaaccacacacacacatacaaactaatactacacattttgcagatttcaraaatgaaccgagttcccaggcagaggttcacggtggtgcttctcttgctttaaaagctgagttgggcagatgttgaggcaggagagtggggcaagtggct

SEQ ID NO: 20472 - DNA, 201 bp, Homo sapiens
agcgtggaggtgtcggcggaggacctgctcacctgctgtggcagcatgtgtggggacgggtgagtcaggctgtgcttccacagcgggtttagtgctgagasaccctgggccccagcttctcagtggaggggactttgaggacttcctgggactgctgcgagtcagaagtgtttcggggagactccgagagtctggcaggca

SEQ ID NO: 20473 - DNA, 201 bp, Homo sapiens; identical to SEQ ID NO: 3491

SEQ ID NO: 20474 - DNA, 201 bp, Homo sapiens; identical to SEQ ID NO: 3493

SEQ ID NO: 20475 - DNA, 201 bp, Homo sapiens; identical to SEQ ID NO: 3494

SEQ ID NO: 20476 - DNA, 201 bp, Homo sapiens
gcccggacatggcagcctcacccggtggggctcgttcctgcaggccttcggggctgtggaagccatctctgaccggatctgcatccacaccaatgcgcacrtcagcgtggaggtgtcggcggaggacctgctcacctgctgtggcagcatgtgtggggacgggtgagtcaggctgtgcttccacagcgggtttagtgctga

SEQ ID NO: 20477 - DNA, 201 bp, Homo sapiens; identical to SEQ ID NO: 3499

SEQ ID NO: 20478 - DNA, 201 bp, Homo sapiens
atcctgtgatgggaagggtgaccgggcagggggcttgcccgtggaggtgtgccccacggctccagaagccttgtggtgttgaggactgtgctagtgggccmacagcaggagtggccagggatgagtgacttaaggtcttttaaggatgagtctgactatattggttgacccttgtcacactttaaaagcaccttacttttt

SEQ ID NO: 20479 - DNA, 201 bp, Homo sapiens
gccaagaacagtgaattgtgagccacaccccgtggccatctcggctttctctgttctacccaccgcacagccttaaaccctggacctacggccaggctgtsagctcctcctaagtgccaggcagtcaggagttcccttttgctgtgagggcagactctgagcagcttcagagccaacgcctgcaacagttcccacagcatc

SEQ ID NO: 20480 - DNA, 201 bp, Homo sapiens; identical to SEQ ID NO: 3500

SEQ ID NO: 20481 - DNA, 201 bp, Homo sapiens
cagctagcattagctgccaccagtcctcccttctcctccctcacctcttcagggtgtacctggagcagctattaaaactctttaagccgtgtaacgctttygacaaacccttacttacatggaatcccagtataaagaacagatgaatcagtcatctagcattaaatgttttatcaattagaatgtattagaaattctatt

SEQ ID NO: 20482 - DNA, 201 bp, Homo sapiens; identical to SEQ ID NO: 3501

SEQ ID NO: 20483 - DNA, 201 bp, Homo sapiens
caacaaaagtgaaactccgcctccaggaaaaaaaaaaaaaaaaaccacacacacacatacaaactaatactacacattttgcagatttcagaaatgaaccsagttcccaggcagaggttcacggtggtgcttctcttgctttaaaagctgagttgggcagatgttgaggcaggagagtggggcaagtggctcatgacgcct

SEQ ID NO: 20484 - DNA, 201 bp, Homo sapiens
agcctggcacctgactgtctttgtccaggtgttgtgccaacacacagaattccagaggcctctcccagagcctctgggctagttccttcccatccattggmgtccagctcatacatgttctctgtgggaacgcccccctccctggtggctggccacgcctgccctcgccttcctggctttgcattgctttaccagcatgtt

SEQ ID NO: 20485 - DNA, 201 bp, Homo sapiens
ccagcctggcacctgactgtctttgtccaggtgttgtgccaacacacagaattccagaggcctctcccagagcctctgggctagttccttcccatccattrgagtccagctcatacatgttctctgtgggaacgcccccctccctggtggctggccacgcctgccctcgccttcctggctttgcattgctttaccagcatg

SEQ ID NO: 20486 - DNA, 201 bp, Homo sapiens
agatcaaataagctctgaaaatctgaggaacattgtaggaaaggtttgttaagcatctcttaagtgccatgatgagcataacagccggccgtggtggctcrcgcctgtaatcccagcactttgggaggccaaggtgggaggatgacaaggtcaggagttcaagaccagcctggccaacatgctgaaacctcacctctacta

SEQ ID NO: 20487 - DNA, 201 bp, Homo sapiens
tgatcataactttgtcacctcagttcaatagtttctcctggattcttgtccaagtgagatgacaggtggacgtaacaatgccttttcagtctttacctagmctctccagagaatcactccagaatagaaattagagtataggtaggcagtccaacctctgcatttaaaaaaaaaaattttgagatgggagtctctctctgt

SEQ ID NO: 20488 - DNA, 201 bp, Homo sapiens
aaaagctttcagaactttccagaatattgactaaattgtcttgtttacaaccaacaacgacaacaaaaaataactgctgagggccttcgtagtgtctgctrtttcaagtgtacagtagtcattttgtctgcaggatgtggggttgctgtggctgaccttgtacaatattccactcataggtgtcttcaggcctatggagag

SEQ ID NO: 20489 - DNA, 201 bp, Homo sapiens; identical to SEQ ID NO: 3507

SEQ ID NO: 20490 - DNA, 201 bp, Homo sapiens
aggaaaaaaaaaaaaaaaaaccacacacacacatacaaactaatactacacattttgcagatttcagaaatgaaccgagttcccaggcagaggttcacggkggtgcttctcttgctttaaaagctgagttgggcagatgttgaggcaggagagtggggcaagtggctcatgacgcctctaatcccagcactttgggaggcc

SEQ ID NO: 20491 - DNA, 201 bp, Homo sapiens
ccttgagctcccctggcagggcaagtccccttagatgcagtcttcccctggaggccaccagaaatcagtgactggctgaccgtggcgtgccacgaggcackgtcactgccctccccaaccccgagctcggttcattttccaggatacaattcctacagcgtctccaatagcgagaaggacatcatggccgagatctacaaa

SEQ ID NO: 20492 - DNA, 201 bp, Homo sapiens
aactcagcctcagcccttccaaactggaagggaccaaagccctccttttacaagggagtggcgtgtcctggagtcttgaggtatcctggcctcttccgggrcctcgtgctcattgctcccttctcccatttctgagcttccagccccagccctgtccttagttcttcaggggagccttccttgagctcccctggcagggca

SEQ ID NO: 20493 - DNA, 201 bp, Homo sapiens
aagatctgtgagcctggctacagcccgacctacaaacaggacaagcactacggtaaggggcctggggcctggccacggcgcacgtggaggctggggagctrctgcatccctcctcacgctgcagcgaagaggtcagggctgaggagccttggggtcccggaactctaggatagaggagggggagtgatgccctcttgccag

SEQ ID NO: 20494 - DNA, 201 bp, Homo sapiens
atggattgtttgagcaattaaccatcatggctttatttgcctttataaactgggggttgagacagaggggctgctgagaggtgctagccaggtgtacaggmctctggcaggacctgcctggcgtccatgctgcaggcacgaggcttgccttgccccaggtctgcctcgcccagctggggcttctccgtgggggctgtaggt

SEQ ID NO: 20495 - DNA, 201 bp, Homo sapiens
ggccagatggattgtttgagcaattaaccatcatggctttatttgcctttataaactgggggttgagacagaggggctgctgagaggtgctagccaggtgyacaggcctctggcaggacctgcctggcgtccatgctgcaggcacgaggcttgccttgccccaggtctgcctcgcccagctggggcttctccgtgggggct

SEQ ID NO: 20496 - DNA, 201 bp, Homo sapiens
tcagttgagaatcagtgttctacccggaagggcactcgtagcctggtctggtatggacatgaacaggagagcctcctgtcttctcccggatctttgtgggyaggggtggggctggcggttattccctgcaagctgtgcttatctagggagcgtcccttggagggtttggggtctgggaggtctgctcgcaccacttgctgc

SEQ ID NO: 20497 - DNA, 201 bp, Homo sapiens
ggcctggggcctggccacggcgcacgtggaggctggggagctgctgcatccctcctcacgctgcagcgaagaggtcagggctgaggagccttggggtcccrgaactctaggatagaggagggggagtgatgccctcttgccaggagaagcagcacactctccactttctgcctgttccaccctgaactcagcctcagccct

SEQ ID NO: 20498 - DNA, 201 bp, Homo sapiens
aaaacagtcagtttcagaaaatgtggtggaatgtctggcccctggtctggtttgtgtcatcgcatgttcctttttcctgcttggggaaccagtttggggcrtttccttatgtgtagttagcggggatggctccaccttaacaacaaggtggtggcacagaactttctgctccagctgcctgcagcctcgccttggttccgc

SEQ ID NO: 20499 - DNA, 201 bp, Homo sapiens
gggagatacccccaagtgtagcaagatctgtgagcctggctacagcccgacctacaaacaggacaagcactacggtaaggggcctggggcctggccacggygcacgtggaggctggggagctgctgcatccctcctcacgctgcagcgaagaggtcagggctgaggagccttggggtcccggaactctaggatagaggagg

SEQ ID NO: 20500 - DNA, 201 bp, Homo sapiens
tcctgcaggccttcggggctgtggaagccatctctgaccggatctgcatccacaccaatgcgcacgtcagcgtggaggtgtcggcggaggacctgctcacvtgctgtggcagcatgtgtggggacgggtgagtcaggctgtgcttccacagcgggtttagtgctgagagaccctgggccccagcttctcagtggaggggac

SEQ ID NO: 20501 - DNA, 201 bp, Homo sapiens
gcctctaatcccagcactttgggaggccgaggtgggcaaatcacttgaacccgggagttcaagaccagtctggccaacatagcaagaccccatttctaccraagaaaataaaagctgagtttgagccccaggagcgtcccctggtgttgagagatcagttgcctacaaggtctgaggtgcccctgtggccctttgagggga

SEQ ID NO: 20502 - DNA, 201 bp, Homo sapiens
agtggggcaagtggctcatgacgcctctaatcccagcactttgggaggccgaggtgggcaaatcacttgaacccgggagttcaagaccagtctggccaacrtagcaagaccccatttctaccaaagaaaataaaagctgagtttgagccccaggagcgtcccctggtgttgagagatcagttgcctacaaggtctgaggtg

SEQ ID NO: 20503 - DNA, 201 bp, Homo sapiens; identical to SEQ ID NO: 3787

SEQ ID NO: 20504 - DNA, 201 bp, Homo sapiens
gagggctccccacacacagacacacacacacacacgcactaggagtgttgggcgccaatcaggtgatggtcaggcggttgttaactgtttccttaaagtartaatcattcacagctggtgccagggaacagcagtctcctaatagatacaaaacacctgaaactgatcagcagcttcccaataagatctcaggagttggga

SEQ ID NO: 20505 - DNA, 201 bp, Homo sapiens
cacacagatatcaaaccagaaagtgttacaacagtgggtagctaattaggtatgagcagggcaggagagggctccccacacacagacacacacacacacamgcactaggagtgttgggcgccaatcaggtgatggtcaggcggttgttaactgtttccttaaagtagtaatcattcacagctggtgccagggaacagcagt

SEQ ID NO: 20506 - DNA, 201 bp, Homo sapiens
gaggcataagaatcacttgaacctcagaggcggaggtggcagtgagccaagatcatgccattgcactctagcctgggcaacaagagtgaaactgcttctcmcaaaaaaaaaaaaaaaaaaaaattatcttaggtcctctcgtgtgtgcatcaagagtggcaagaagacaaaatgaagaaaatcaattcagttgactgaaaa

SEQ ID NO: 20507 - DNA, 201 bp, Homo sapiens
cgggatgtccgagtggccaatgcctcagctgctgaagattcagcctttcagagagctgtgctgatggagaagccagatgtggtagtggggaccccatctcrcatattaagccacttgcagcaagacagcttgaaactccgtgactccctggagcttctggtggtggacaaggctgatcttttttccttggctttgaggaag

SEQ ID NO: 20508 - DNA, 201 bp, Homo sapiens; identical to SEQ ID NO: 3790

SEQ ID NO: 20509 - DNA, 201 bp, Homo sapiens
taggccaaggcaggaggattgcttgagcccaggagtatgagaccagtctgggaaacacagggagaccccatctctacaaaaaaaattttttaaaataaaawtttaggccaggtgcggtgacactgaggtgggcagataacctcaggtcagaagtttgagacccacctggccaacatggtgaaaccccatctctactaaaaa

SEQ ID NO: 20510 - DNA, 201 bp, Homo sapiens
gggcagattgcctgaggtcaggagtttgagaacatggagaaacccatctctactaaacccatctctactaaaaatacaaaaaaattagccgggtgtggcartgcattcctgtaatcccagctactcaggaggctgaggcaggagaaacacttgaacccgggaggcagaggttgcagtgagcagagatcctgccattgcact

SEQ ID NO: 20511 - DNA, 201 bp, Homo sapiens
ggctctctttttttttttttttttttttgagatgtagtctcgctctgtcacccaggctggagtgcagtggtgcaatcttggctcactgcaacccccacctmctgggttcaagcgattctcctgcctcagcctcctgagtacctgggactacaggtgcacaccaccacacctggctaatttttgtatttgtagtagagatgg

SEQ ID NO: 20512 - DNA, 201 bp, Homo sapiens
aactaccactggtaaaaaaagtactcattccctaagtcgggaattgaaccctggccaccactgtgaaaagacagagtcttatccactaagccacagcatcrggcagtttctgctgctcttcccagaagtagcctagagaggtcaattttgaacttcaaatggcttttaaatgttcaaaataattttcagagctgttacatg

SEQ ID NO: 20513 - DNA, 201 bp, Homo sapiens
accgtgattgtgaggcctccccagccatgtggaactgtaagtccaaaaacctctttcttttgtaaattgcccagtctcagttatgtctttatcagcagcaygaaaatggacaaatacaagggatttatctactctcagttcctggggtttcatgaggaaaaaaggtttttcccaaaatggggtctgtggcacttcttctga

SEQ ID NO: 20514 - DNA, 201 bp, Homo sapiens; identical to SEQ ID NO: 3788

SEQ ID NO: 20515 - DNA, 201 bp, Homo sapiens
gtcatcatggcccgttctcaatgagctgttgggtacacctcccagacggggtggtggccaggcagaggggctcctcacttcccagaaggggcggccgggcrgaggcaccccccacctccctcccagagggggcggctggccgggcgggggctgaccccccacctccctcccggatggggaggctggccgggcgggggctga

SEQ ID NO: 20516 - DNA, 201 bp, Homo sapiens
ctgtccaaaaaaaaaaaaagctatcacttaaaaatagcagcaagtgaatgagtaagtcagcctcaccttcaaaatagtctaacctgaccaccattcacaaycctactgctttcatcctcttctaagccactagcatcccctggctggctgcaagtctcctcattggtctctctgcttctgctcttggcagtcttcagtata

SEQ ID NO: 20517 - DNA, 201 bp, Homo sapiens
ctgagatcatgccattgcactccagcctgggcaacagagggagactccgtcttaaaaataaataaataaggctgggcacagtggctcacacctgtaatccyagcagtttgggtggcagaggcaggcggctcacaaggtcaggagtttgagattagccggccaatatggtgaaaccctgtctctactaaaaatacaagccgg

SEQ ID NO: 20518 - DNA, 201 bp, Homo sapiens
gaggaccctgcagccttccacagtgtttgtgtccctgggtacttgagattagggagtggtgatgactcttaatgagcatgccgccttcaagcatctgtttracaaagcacatcttgcaccgcccttaatccatttaaccctgagtggacacagcacatgtttcagagagcacagggttgggggtaaggtcatagatcaaca

SEQ ID NO: 20519 - DNA, 201 bp, Homo sapiens
tacagtttgtttatacttccatttaggccatagttcgtgatgtacagagaaacctttaggccaaacttaaaatatgtaaggaggcagctgtaggctaaatktgatttaacaatggagaaaatttaagattacatcacccaaacagaaagaagggcctgggcacctgtagtcccaacactctggtaggccaaggcaggagga

SEQ ID NO: 20520 - DNA, 201 bp, Homo sapiens; identical to SEQ ID NO: 3791

SEQ ID NO: 20521 - DNA, 201 bp, Homo sapiens
acaatctgctcccatcttacctttgtgctgtcatgacctgctgctttcctccatacttatgcagcttctgctagccaaatctccctgcagctccctgaacrcagtgaagatactcccatctcaataccttggcagttgctattccctctgcctggtactttatggctcaatccctcaccttcttcagatccttcctcaatg

SEQ ID NO: 20522 - DNA, 201 bp, Homo sapiens; identical to SEQ ID NO: 3792

SEQ ID NO: 20523 - DNA, 201 bp, Homo sapiens
agaccaaggcaggtggatcacgaggtcaggagatcgagaccatcctggctaacacggtgaaacctgtatctactaaaaatacaaaaacttagccgggtgcrgtggcgggcacttgtagtcccagctactccttgggaggctgaggcaggagaatggcatgaacccgagaggcagagcttgcagtgagttgagtcgagatca

SEQ ID NO: 20524 - DNA, 201 bp, Homo sapiens
tcctcttacctcaactgcaaagaagccttcctctttcactactcctcctcagcacagaccctttacgggtgtcaggctgggggatggtaaggtctttcctytcccatgaggccatatctcaggctgtctcagtgggggaaaaccttggacaatacccaggctttcttgggcagaggtccctgcggctttccgcagtgcatt

SEQ ID NO: 20525 - DNA, 201 bp, Homo sapiens
ctcattccctaagtcgggaattgaaccctggccaccactgtgaaaagacagagtcttatccactaagccacagcatcaggcagtttctgctgctcttcccrgaagtagcctagagaggtcaattttgaacttcaaatggcttttaaatgttcaaaataattttcagagctgttacatgaactccgaaattcctgttccctg

SEQ ID NO: 20526 - DNA, 201 bp, Homo sapiens
ctgtagtcccagcaactcgggaggctgaggcaggagaatggcatgaacccgggaggtggagcttgcagtaagctgagatcgcgccactgcactccagcctkggtgacagagcgagactctgtctcaaagaaaaaaaaaaagaaagaaaaggactcttcaaagaaaaaaaaagaaataaaaaataaattatattcataagac

SEQ ID NO: 20527 - DNA, 201 bp, Homo sapiens
aaattccaaacccagaatgtctttgtctttatttttcttttcttttctttttttttttttttttttgggtaaagttttgctctgtcacccagggtggagtrcaatggcgagatcttggctcactgcaacctctgcctccctggctcaagccaaccttccacctcagcctcctgaggagctgggactacaggcacgcattac

SEQ ID NO: 20528 - DNA, 201 bp, Homo sapiens; identical to SEQ ID NO: 3796

SEQ ID NO: 20529 - DNA, 201 bp, Homo sapiens
cactttgacagactgaggcaggtggatcacctgaggtcaggagttcaagaccagccttaccaacatagtgaaaccccatctctactaaatacaaaaattakccaggcacggtagcgcatgcatgtaatcccagctacttgggaggctgaggcataagaatcacttgaacctcagaggcggaggtggcagtgagccaagatc

SEQ ID NO: 20530 - DNA, 201 bp, Homo sapiens
aatatttagtttcttgttagctggtcttcagttgacttggttctctatccagttacagccatggtgcatgttgcatgcagtcgtctatacattatttaaaygggcttaaatattaaatgtgttacccaccaataataaaatagacccttatgaaaactataaaaacaaaacacacaaaaaaagccattgggtacatttgtt

SEQ ID NO: 20531 - DNA, 201 bp, Homo sapiens
tgggtctcctgaatacagcacactgatgggtcttgactctttatccaatttgccagtctgtgtcttttaattggagcatttagcccatttaaatttaaggktaatattgttaatatttacatttaagtttaattatgtgtgaatttgatcctgtcattatgatgttagttggttattttgcttgttagttgatgcagtttc

SEQ ID NO: 20532 - DNA, 201 bp, Homo sapiens
agttctgctctgagcttagttatttcttgccttctgctagcttttgaatttgtttgctcttgcttctctagttcttttaattgtgatgttagggtgtcaaytttagatctttcctgctttcttttgtgggcatttagtgctatacatttccctccacacactgcctttaaatgtgtcccagagattctggtatgttgtgtc

SEQ ID NO: 20533 - DNA, 201 bp, Homo sapiens
gtgatatcgcctttatcatgttttattgcatctatttggttcttctctcttttcttctttattagtcttgctagtggtctatcaattttgttgatcttttmaaaaaaccagctcctggattcattgatgttttcaagggtttttggtgtctccatctacttcagttctgctctgagcttagttatttcttgccttctgcta

SEQ ID NO: 20534 - DNA, 201 bp, Homo sapiens; identical to SEQ ID NO: 3793

SEQ ID NO: 20535 - DNA, 201 bp, Homo sapiens
tttgttttgtgttgtgttgttttgtttgagacgcagtctcactctgttgcccaggctggagtgcagtggcatgatctcagctcactgcaacctccgcctcyggggttcaagtgattctcctacctcagcctcccgagtagctgggatgacaggcacccaccaccacacccagctaatttttgtatttttagtacagacggg

SEQ ID NO: 20536 - DNA, 201 bp, Homo sapiens; identical to SEQ ID NO: 3794

SEQ ID NO: 20537 - DNA, 201 bp, Homo sapiens
cgaatcctgcaacaaattcccctgaaaaagaagaggtgaagaaacagccaagtagtcaaaggatgaactagaagcagcatcccattggccagtccagggaytccctaagccaaaagctgaggctacagccaaacaccccaggctgtaggggtgcagcccagtacctttatggccagtggctggtgcacgtcagtcctaaac

SEQ ID NO: 20538 - DNA, 201 bp, Homo sapiens
tgcatttggagcaaagcactttttgtttgtttgttttgtgttgtgttgttttgtttgagacgcagtctcactctgttgcccaggctggagtgcagtggcaygatctcagctcactgcaacctccgcctctggggttcaagtgattctcctacctcagcctcccgagtagctgggatgacaggcacccaccaccacacccag

SEQ ID NO: 20539 - DNA, 201 bp, Homo sapiens
accctatctgagaggtaaaatcaccactacatctcctacctcccatcccatttgaaaaccaatgctctagtccacagggagcaatggagaaaaagtgtggkaatgggtttgggaaatgttatgattagatttgcatttggagcaaagcactttttgtttgtttgttttgtgttgtgttgttttgtttgagacgcagtctca

SEQ ID NO: 20540 - DNA, 201 bp, Homo sapiens; identical to SEQ ID NO: 3795

SEQ ID NO: 20541 - DNA, 201 bp, Homo sapiens; identical to SEQ ID NO: 3797

SEQ ID NO: 20542 - DNA, 201 bp, Homo sapiens; identical to SEQ ID NO: 3799

SEQ ID NO: 20543 - DNA, 201 bp, Homo sapiens; identical to SEQ ID NO: 3800

SEQ ID NO: 20544 - DNA, 201 bp, Homo sapiens
cagaggggcacccagctgtatgaggtgtcagttggcccctactgggagatgtctcccagttagactacataggggtcagggacccacttgagggggcagtytgtccattctcagagctcaaacactgtgctgggagaaccactgctctcttcagagctgtcagacagggatgtttaagtctgcagaagtttctgctgcctt

SEQ ID NO: 20545 - DNA, 201 bp, Homo sapiens; identical to SEQ ID NO: 3789

SEQ ID NO: 20546 - DNA, 201 bp, Homo sapiens
ggtggctcacgcctgtaatcccaacactttgggagaccaaggcaggtggatcacgaggtcaggagatcgagaccatcctggctaacacggtgaaacctgtmtctactaaaaatacaaaaacttagccgggtgcagtggcgggcacttgtagtcccagctactccttgggaggctgaggcaggagaatggcatgaacccgag

SEQ ID NO: 20547 - DNA, 201 bp, Homo sapiens
gacactgcacttcagcctggatgacaggagtgaaactctctctcaaaaaaaaaaaagaaaaagaaaggtatcggccaggcgcggtggctcacgcctgtaaycccaacactttgggagaccaaggcaggtggatcacgaggtcaggagatcgagaccatcctggctaacacggtgaaacctgtatctactaaaaatacaaaa

SEQ ID NO: 20548 - DNA, 201 bp, Homo sapiens
ctcggcctcccaaagtgctaggattacaggtgtgagctaccacacctggccctatgcatgtattttaaagtagtaatgcatgcaggaacatacacaaacaygcactaatggacagtctgaggagcacagagccagtagagaaacttgtcaaggaaaagggcataaagacatatactctagtccacccccactgcccacgtg

SEQ ID NO: 20549 - DNA, 201 bp, Homo sapiens
tttcagcttttctgctctgatttctccccatctttgtggttttatctacctttggtctttgatgatggtgaagtacagatagggttttggcatggatgtcytttttgttgatgttgatgctattcctttctgtttgttagttttcctcctaacagtcaagtccctcagctgcaggtctgttggagtttgctggaggtccac

SEQ ID NO: 20550 - DNA, 201 bp, Homo sapiens
ggtggaggttgcagtgaaccaagattgtgacactgcacttcagcctggatgacaggagtgaaactctctctcaaaaaaaaaaaagaaaaagaaaggtatcrgccaggcgcggtggctcacgcctgtaatcccaacactttgggagaccaaggcaggtggatcacgaggtcaggagatcgagaccatcctggctaacacggt

SEQ ID NO: 20551 - DNA, 201 bp, Homo sapiens
cattctacatccagctttgttccattgctggcgaggaactgcaatcctttggaggagaacaggctgtctggtttttagaattttcagcttttctgctctgrtttctccccatctttgtggttttatctacctttggtctttgatgatggtgaagtacagatagggttttggcatggatgtcctttttgttgatgttgatgc

SEQ ID NO: 20552 - DNA, 201 bp, Homo sapiens
gagcgcaaggctggtctcgaactccagacctcaagttatccgcctgcctcggcctcccaaagtgctaggattacaggtgtgagctaccacacctggccctmtgcatgtattttaaagtagtaatgcatgcaggaacatacacaaacacgcactaatggacagtctgaggagcacagagccagtagagaaacttgtcaagga

SEQ ID NO: 20553 - DNA, 201 bp, Homo sapiens
ggtgctgccccccacctccctcccggatcgggcggctggccggcagggggctaacatttaagtctttaatccatcttaaattaatttttgtacaaggtgtyaggaagggatccagtttcagctttctacatatggttagccatatgtagaaatggccatctacaattggccagcaccatttattaaacagggaatcctttc

SEQ ID NO: 20554 - DNA, 201 bp, Homo sapiens
gtggacacagcacatgtttcagagagcacagggttgggggtaaggtcatagatcaacagcatcccaaggcagaagaatttttcttagtacagaacaaaatkaagtctcccatgtctactcctttctacacagacacagcaacaatctgatttctctatcttttccccacctttcccccttttctattccacaaaactgcca

SEQ ID NO: 20555 - DNA, 201 bp, Homo sapiens
agcgcttgtacccaggaggtggaggttgcagtgaaccaagattgtgacactgcacttcagcctggatgacaggagtgaaactctctctcaaaaaaaaaaaagaaaaagaaaggtatcggccaggcgcggtggctcacgcctgtaatcccaacactttgggagaccaaggcaggtggatcacgaggtcaggagatcgagacc

SEQ ID NO: 20556 - DNA, 201 bp, Homo sapiens
ttatatatacatttatagaattatatgtaatatttatatataatatatatttatatatgtacatatatattgtatatatatgctatatatatatatatatatttattttttttttttttttttttttttttgtagagactggatttcgccatgtcgctggtgctggtcttgaacttcctggactcaagcaatccacctgcc

SEQ ID NO: 20557 - DNA, 201 bp, Homo sapiens
ggaggctgaggcaggagaatggcatgaacccaggaggcagagcttgcagtgagccgagatcgcgccactgcattccagcctgggcgacagagtgagactcygtctcaaaaaaaaaaaaatacaaaaattagctaggcacagtggcgggtgcctgtagtcccagctactcaggaggctgaggcaggagaatcgcttgaacct

SEQ ID NO: 20558 - DNA, 201 bp, Homo sapiens
gggaggctgaagcggggggatcatttgagcccaggagttcaagaacagctgggcaacataaggagacctggtttaaaaaaataaaaataaataaataaatwaaaacttgacattctattatttatttttatagcatattgtatatttcctggtactagggtacaatctccagaaaggcagaaatgtgtacctgacttgttg

SEQ ID NO: 20559 - DNA, 201 bp, Homo sapiens; identical to SEQ ID NO: 3798

SEQ ID NO: 20560 - DNA, 201 bp, Homo sapiens
gagaatcacttgaacctgggaggcagaggttgcagtaagccaagatcacgccattgcactccagcctgggcaacaagagagaaactccatatcaaacaaamaaaaaaaaaaagtcttaaatgctgggcacggtggctcacacctgtaaccccagcactttgggaggctgaggcgggcagattacctgagatcaggagtttg

SEQ ID NO: 20561 - DNA, 201 bp, Homo sapiens
acaacaatcacagtgacactgacaaatactggctacctttcccctctaagcatcatctgttgggaatctgattgtgtcctcttcccaataggattataaaycattgaaaacaccaagtacatcttgaccatattttattttttaaatttatttatttatttatttatttatttttagacagagtctcactctgttgcccag

SEQ ID NO: 20562 - DNA, 201 bp, Homo sapiens
tacctcatttcacaatctccatatattcagagctaacaaaatgcaaatctgacaataaacagccgttctctatttgtctagtgtaagggaaagttataagygaggtagggttcaaggttgctcccattgtgcagttgtacaaaaatgccccttctactttcttggtggtccctgagagtgttcgctttcttggacactgct

SEQ ID NO: 20563 - DNA, 201 bp, Homo sapiens
cataccatttacctatttaaagcgtgcaattcaatggtgtttcatatattcagagttgtgcaaccatcaccccaatcaattttagaacattttcattatcycaaaaagaaacctgtattctttagctatcttgcctaatcccccagccctagccaaccaaactactttccatctccatggatttgcgtattctggacattg

SEQ ID NO: 20564 - DNA, 201 bp, Homo sapiens
agcagatactctgtaagtacacatttcatatacattatatttaaaagtactccactgaacagtgaaatatttccagactcacccacgtcctgcattcacaygaattcttccccgctccctagtctgtttcagaccagaagccctgggcttctctgactagccttggccagttctgatttcgaatattctctcctgcaattt

SEQ ID NO: 20565 - DNA, 201 bp, Homo sapiens
tttcgtttaacgccaaagtctaggctctggaagtgaggcagatctagggtgtatgcttggaggagtggagcagctgacagctcattgcaatttagccgatwctaattaccccctacacaccaggccatcagctgcaggagacacccaagcttcttgacctcagttcaccttctgatgagggaatcagacatgtgatcactt

SEQ ID NO: 20566 - DNA, 201 bp, Homo sapiens
gacagagactccctccaagatgtgaagttgctgtcccagcaataatggctttgagagagtggaaaatgaggtctttgctccctgggcagtgcgggacacaratgtgttctcctgaagcgataaacatggctgggtccacccaaaacaccctgtaggaccaacttatttactttgtcttggatccaaagggtgtctctggac

SEQ ID NO: 20567 - DNA, 201 bp, Homo sapiens
ttatttagaaagatgataatgttttccatattatcaaaacaagaatcaggcagagacttttgaagtttggttgcgtggtatatttgttacctattgctgcwtaacaatttacctaaaacttactggcttaagataacacagatttattatcctgaagtttctgagggtcaggaatgcaggagtggctgagttgggtggtgc

SEQ ID NO: 20568 - DNA, 201 bp, Homo sapiens
attgggcaaaccagaaaagataaatttggggggaaattacatctttgtgtggttagaagaagccatttctgtagatttgtccacacctagtcctgtaatgygtgtagagtggggtgcaagcgtcttggagacacacaaacatgcgcataacacccacatgttgcacacacacattgaatgctttgtaattaacctggtggt

SEQ ID NO: 20569 - DNA, 201 bp, Homo sapiens
ttccccagaatgagggatcccagacaggagagagagtgatcaggataaaagctgcattgtcttttattacctgatggagtattttgttggttaatgttaaygtgggaggtgaccacgtgtaagtgtgatgagcagagggcaaggaccattggggggggcatcttgaagggcttctatagcaagggaggtggtggtggttgt

SEQ ID NO: 20570 - DNA, 201 bp, Homo sapiens
ctgcattgtcttttattacctgatggagtattttgttggttaatgttaacgtgggaggtgaccacgtgtaagtgtgatgagcagagggcaaggaccattgrggggggcatcttgaagggcttctatagcaagggaggtggtggtggttgtggcggtaaaaactaggtcactgtttttgttgttttgtcgatgatatttgtg

SEQ ID NO: 20571 - DNA, 201 bp, Homo sapiens
gatatttgtgttaagatgaagagctgagactcatatctcaacagagtttataaaatgcttttcttttttccatcctgccctctcttctcccttgtctgttygagctagccatgggaatgtggtgttcctgccagtgcatccattgagttcgtttattgttaatttatttattttctgagatggagtttttgctctattgct

SEQ ID NO: 20572 - DNA, 201 bp, Homo sapiens
gacaggttctgccagtatctctggccagctagctaactaacttttttcttattccaaaaaaatgacttgggaccacttataaaaattatgtattgttcaaygagatacaattaatgaggaaatcaggatgagagaaaaataaaggcagggaaataaagctatggcccatttagcacaaacgcatcccaaagattgctagaa

SEQ ID NO: 20573 - DNA, 201 bp, Homo sapiens
aaaaattatgtattgttcaatgagatacaattaatgaggaaatcaggatgagagaaaaataaaggcagggaaataaagctatggcccatttagcacaaacrcatcccaaagattgctagaagcagaggtgaaatttttgctgtgtgttaacaatcaaagcaaaaagaggaacaaggtccattagaacattctcagaatcca

SEQ ID NO: 20574 - DNA, 201 bp, Homo sapiens
accatgttggccaggctggtctcaaactcctaacctcagatgatctacccacctcggcctcctaaagtgctaggattacaggcgtgagccaccgtgcccarcctatttcagtctttaaacactggccatgacacactacactgatgcattatgtgatctgtagtttggaagccactgctttaagccatcgagggtcagaca

SEQ ID NO: 20575 - DNA, 201 bp, Homo sapiens
tgcgccaccacacccgattaatttttgtatttttagtaaggacggagtttctccatgttggtcaggctggtctcgaactcctgacctcaggtgatccgccygcctcggcctcccaaagtgctaggattacaggcatgagccaccacgcccagcagaaatgatgtatatcttaggaagctcccgcatagtggcccagtagag

SEQ ID NO: 20576 - DNA, 201 bp, Homo sapiens
atctctgcccggctttggtatcaggatgatgctggcctcatcatcctgagggaggattccctctttttctattgactggaatagtttcagaaggaatggtrccagttcctccttgtacctctggtagaattcggctgtgaatccatctggtcctggactctttttggttggtaagctattgattattgccacaatttcaga

SEQ ID NO: 20577 - DNA, 201 bp, Homo sapiens
atggtgctggttatccccacagtcactgtattatccctgccacagagtgagcacttaatcaatttcagtttaaaaacacaggaggaacttgagccctataragttcagtgtcttgcccagggtactactagagcagtcccctgactccgagaccaggaccctcccacagcaccacctgggccacctggagtcaatcagggc

SEQ ID NO: 20578 - DNA, 201 bp, Homo sapiens
tgtgcctggctcgatgttgccaaagtgctagatattgccaaagtgctcttcaagatggttgaacattttcatcagtagtgatgctagtgtttgttttcccrcatccttaccaacaaactttttctttctttctttcttttttaaatagagattagggtcttgctatgttgaccaggctgttctcgaactcctggcctcaag

SEQ ID NO: 20579 - DNA, 201 bp, Homo sapiens
ctctgtcgcccaggctggagtgcagtggcgcgatctcggctcactgcaacctccgcccaccaggttcaagtgattctcctgcctcagcctcctgagtagcyggcattacagggggctgccaccacgcccagctaatttttgtatttttagtagagacggggtttcaccatcttggccaggctggtcttaaactcctgacct

SEQ ID NO: 20580 - DNA, 201 bp, Homo sapiens
actccctccaagatgtgaagttgctgtcccagcaataatggctttgagagagtggaaaatgaggtctttgctccctgggcagtgcgggacacagatgtgtyctcctgaagcgataaacatggctgggtccacccaaaacaccctgtaggaccaacttatttactttgtcttggatccaaagggtgtctctggacaaaggct

SEQ ID NO: 20581 - DNA, 201 bp, Homo sapiens
ttcagttggaccatctaagttcagtccttcattttcaaaattaaaaaacaggcctcaaacgggtgcatctcacgttagctagagacagaactggagctagmagtcagatctcttacaaagttgcctttcttcttctgtgggtaagtggggcacccttgggacgctgtgctgggcgtacatgggtgcttgatgaagttactt

SEQ ID NO: 20582 - DNA, 201 bp, Homo sapiens
ctccctccaagatgtgaagttgctgtcccagcaataatggctttgagagagtggaaaatgaggtctttgctccctgggcagtgcgggacacagatgtgttstcctgaagcgataaacatggctgggtccacccaaaacaccctgtaggaccaacttatttactttgtcttggatccaaagggtgtctctggacaaaggctt

SEQ ID NO: 20583 - DNA, 201 bp, Homo sapiens
tccctccaagatgtgaagttgctgtcccagcaataatggctttgagagagtggaaaatgaggtctttgctccctgggcagtgcgggacacagatgtgttctcctgaagcgataaacatggctgggtccacccaaaacaccctgtaggaccaacttatttactttgtcttggatccaaagggtgtctctggacaaaggcttg

SEQ ID NO: 20584 - DNA, 201 bp, Homo sapiens
cccgtcacttgcctctcataggaaacaccatctctaatgaatgcaggcagggatcacccaccacctatgcagagcttcctgctctcattggcttttctcascctcactgtcctcttgctgacatccggttgggaccatttgcgcaactgcagactggcagggccaggcaaacacagcatggcgcctgccaagaaggtggtg

SEQ ID NO: 20585 - DNA, 201 bp, Homo sapiens; identical to SEQ ID NO: 3810

SEQ ID NO: 20586 - DNA, 201 bp, Homo sapiens
agatgagaaccacgcctagccaaaatcacttttcctgtttgcctcagtgacacagctgcagggaccctcgtggatgttgtattaaataaatttgacctttrctctttgcagatctgtgaaatgttgtcttctgaggggccacatgcatctatagtgctgaggactccttgggcctctgaagtcacagagagaaccgagcag

SEQ ID NO: 20587 - DNA, 201 bp, Homo sapiens
tgcaacctctgtcccccggcctcaagcatcctcccctctcagcctcctaagtagatcctatctactttaaacatgaagagtaatattctactgtggcctgkgtgaccctgggcaagtcatagagcctctcaagaccttggtcaccttctctgtgagatgaggtatgggctggaggcaggtcagtggtcctcgggctttatt

SEQ ID NO: 20588 - DNA, 201 bp, Homo sapiens
ccattgtttgttgccaaaccaattgactgcattcttttctgttttccatctttcttagtttaggcttcatgttatcggcataattggagaacttttgtctmcttttttttttttcagacagggtctggctctgtcactcaggctggagtgcagtggcatgatcttggctcactgcaacctctgtcccccggcctcaagcat

SEQ ID NO: 20589 - DNA, 201 bp, Homo sapiens
tctttgcatttttgatagagatggggcttcgccatgttgcccaggctgttctggaactcctaaactcaggggatccacccaccttggcctcccaaagtgcygggattacagggatgagctaccatgcccagccaggaatccttttttttaattgtcataaaatatacataatattaagtttaccattttctttttttttga

SEQ ID NO: 20590 - DNA, 201 bp, Homo sapiens; identical to SEQ ID NO: 3817

SEQ ID NO: 20591 - DNA, 201 bp, Homo sapiens
ggagtgcagtggtgcaatctcgactcactgcaacctccacttcccggatttaagtgattctcctgcctcagcctcccaagtagatgggattacaggcgccygccaccacactcagctaattttttttttttttttttgagacagagtttcgctcttgatgcccaggctggggtgcaatggagcgatctcggctcactgcaa

SEQ ID NO: 20592 - DNA, 201 bp, Homo sapiens; identical to SEQ ID NO: 3818

SEQ ID NO: 20593 - DNA, 201 bp, Homo sapiens
gttccccaaggtcttggacgtcgagtgttttgctttggagacccccagtagcttcagcctttcttcttgttttcttttttctcttttttttttttggatayggagtctcgctctgtcactcaggctggagtgcagtggtgcaatctcgactcactgcaacctccacttcccggatttaagtgattctcctgcctcagcctc

SEQ ID NO: 20594 - DNA, 201 bp, Homo sapiens
tgtaatccatctactggggaggctgaggcagaagaatcgcttgaacccgggaggcagaggttgcagtgagccaggatcaagccactgctctccagcctggrtggcagagcaagactccgtctaaaaaaaaattaaaaatgcatctcctaactgtcctcctcctttgcgaacccagattgggcagtacacagtccccggggg

SEQ ID NO: 20595 - DNA, 201 bp, Homo sapiens
ttattattactttttgagacaaggtcttgccctgttgcccaggttagagtacagtggtgtgatcgtggctcactgcagcctcaaactcctgggcttaagcrttgctcccacctcagcttcacgagtagttgggaccacaggcatgcaccaccgtatgcagctattttttatatttttttgttgttactatgttcttactgt

SEQ ID NO: 20596 - DNA, 201 bp, Homo sapiens
tgagccaggatcaagccactgctctccagcctggatggcagagcaagactccgtctaaaaaaaaattaaaaatgcatctcctaactgtcctcctcctttgygaacccagattgggcagtacacagtccccgggggtcactgcacactcctgcacgctcaaaggaaacagtggctcctgcacgctcaaaggaagcagtctca

SEQ ID NO: 20597 - DNA, 201 bp, Homo sapiens
ggcaggagaatcccttggacccaggaggtggaggttgtggtcagctgagattgcgccattgcactccagcctgggtgacagagcaagactcggtctcagaacacacacacacacacacacacacacacacacacatatatgctcagccaggtgtggtggctcatacttataatcccagcactttgggcagctgatgtggga

SEQ ID NO: 20598 - DNA, 201 bp, Homo sapiens
gatcaagccactgctctccagcctggatggcagagcaagactccgtctaaaaaaaaattaaaaatgcatctcctaactgtcctcctcctttgcgaacccarattgggcagtacacagtccccgggggtcactgcacactcctgcacgctcaaaggaaacagtggctcctgcacgctcaaaggaagcagtctcagaaccttc

SEQ ID NO: 20599 - DNA, 201 bp, Homo sapiens
ggggggacgtgtagggatttgggaaaaacacctggttttatggtcatggactttcagtacatttttttccaaatcccctacagatcaattactttttctcttttttatacttatttaattttttttagatggagtttcgctcttgttgcccaggctggagtgcaatggcgcgatctcagctcactgcaacctctgcatccc

SEQ ID NO: 20600 - DNA, 201 bp, Homo sapiens
gcaggagaatcccttggacccaggaggtggaggttgtggtcagctgagattgcgccattgcactccagcctgggtgacagagcaagactcggtctcagaacacacacacacacacacacacacacacacacacatatatgctcagccaggtgtggtggctcatacttataatcccagcactttgggcagctgatgtgggag

SEQ ID NO: 20601 - DNA, 201 bp, Homo sapiens
tcaagcatcctcccctctcagcctcctaagtagatcctatctactttaaacatgaagagtaatattctactgtggcctgggtgaccctgggcaagtcataragcctctcaagaccttggtcaccttctctgtgagatgaggtatgggctggaggcaggtcagtggtcctcgggctttattaaaacatcaatagtttggcgc

SEQ ID NO: 20602 - DNA, 201 bp, Homo sapiens
ttgtaacttgtgtactttggcaactattttactattattatttatgtggttaattcttagtagtcaaattgttgaatcagatgttttgtgcattttcttttttatttatttatttatttatttatttatttatttatttatttatttgagacagagtttcactcttgttgcccaggctcgagtacagtggcgcaatctcag

SEQ ID NO: 20603 - DNA, 201 bp, Homo sapiens
agatggctggaaacaaaggctggagtttgggaatggagaatcaccggatatgagctgaaaaagtggctgagcctaagcgtgacaggtgtcaggtgccagtmtcaggagtaggcaattgtcctgcatgcagtgaaaagccagaagatggaaggaaggacaggatgcaaatgagttctcggaacgatccacctggtggctggg

SEQ ID NO: 20604 - DNA, 201 bp, Homo sapiens
taactgtcctcctcctttgcgaacccagattgggcagtacacagtccccgggggtcactgcacactcctgcacgctcaaaggaaacagtggctcctgcacrctcaaaggaagcagtctcagaaccttcctgcccagctgggaagctccctgggatcattgccatctgtctcccttcctctgaggctaaccccaggctgcat

SEQ ID NO: 20605 - DNA, 201 bp, Homo sapiens
gggtcagggagcaggcatggtgacttcagacctcatggtacgttagaggctaatgtgaagcccatgtgaagctgttggtttaaactgggtcgatatcagtrgctcacatttactgaccatgtgtccagccctgtgtgaagtactgtagtaaattgctccaatggaaactcacaataaccacagaaggccagtaacagcatt

SEQ ID NO: 20606 - DNA, 201 bp, Homo sapiens
gaggctaaggcgggcggatcatgaggtcaggagatcgagaccatcctggctaacacggtgaaaccccatctctactaaaaatacaaaaaattagctggacrtggtggcgggcgcctgtagtccagctacatgggaggctgaggcaggagaatggtgtgaacccgggaggcagagcttgcagtgagccaagatcgcaccagt

SEQ ID NO: 20607 - DNA, 201 bp, Homo sapiens
tcagggagcaggcatggtgacttcagacctcatggtacgttagaggctaatgtgaagcccatgtgaagctgttggtttaaactgggtcgatatcagtggcwcacatttactgaccatgtgtccagccctgtgtgaagtactgtagtaaattgctccaatggaaactcacaataaccacagaaggccagtaacagcattgtc

SEQ ID NO: 20608 - DNA, 201 bp, Homo sapiens
aaaaaaaaattggggcccagtgtggggtaggtttgtgagatcagtgagccagctgggtgcagagcggagtctttgctgacctttccccttcatgttccccrtcatcttctagcatgcagcatttcaggactgcctattttgggaaatggcttaaagggcacagttctggcccttaaaccccctttcaccccctgagtaata

SEQ ID NO: 20609 - DNA, 201 bp, Homo sapiens
aggattgggtgaagcagaggcggtcagcatgtgccctccttgccaagctgtgcagctgcagggatgccatcacctaactggtccctctttccccatttgcrcaaaagctgtgtgggctgcagaggtccaggtagacccgtaaagagggtcacttgggggcaatggagagctttttgggaattcaatttgagttttctagac

SEQ ID NO: 20610 - DNA, 201 bp, Homo sapiens
ggagggtgagctggccgtgaccaccccaccatgcgcctggtatatggtgtttgatagcatttgttgcagtgtctgcgttgtttgtgcacctgtctgcctcrcagcctggagctcctgaaagctgggaccaggcccgatcacctttcctcttccacagtgcggggttcacactaggtgtctaggattctgctgagtgagtga

SEQ ID NO: 20611 - DNA, 201 bp, Homo sapiens
gattctgctgagtgagtgatttggccaggcctgacatcaagcagagggtgtcttggggatgtggaggatcccccaatagggttggggatccctacagcttyccttgaggcccccacatctggtgccacagaaagagagtgaggggtgtgtgggcatctctgctgtcccagcagtgtggtgccctggtagctcagccactct

SEQ ID NO: 20612 - DNA, 201 bp, Homo sapiens
ctggagtgcaatagcacgatcttggttcactgcaacaatcgcctcctgggtccaagtgattctcatgcctcagccttccaagtagctgggattggaggcaygcaccaccacgcccagctaatttttgtatttttagtagagacggagtttcaccattgttggccaggctggtctcgaactcctggccacaagtgatccacc

SEQ ID NO: 20613 - DNA, 201 bp, Homo sapiens
cacttcttagccatgtcaccatgggcaaatttcttggcctctcaagacctctgcttcctaatctgtaaactgggaatcataaactccctcacttggttgtygcaagggttgaatgagcacctggcatagacctggtctattgcaagtgcccacaggagcactttgtagaagcaggaactagagatcccagggtgtgttgaa

SEQ ID NO: 20614 - DNA, 201 bp, Homo sapiens
catatggagaatgtagcagttgcttacccaaggcataggattcaaccaaggccaggctttgacttaggaatcagagacccacattaacacttgacttcccrcttcttagccatgtcaccatgggcaaatttcttggcctctcaagacctctgcttcctaatctgtaaactgggaatcataaactccctcacttggttgttg

SEQ ID NO: 20615 - DNA, 201 bp, Homo sapiens
tgaccctgccacatatggagaatgtagcagttgcttacccaaggcataggattcaaccaaggccaggctttgacttaggaatcagagacccacattaacayttgacttcccacttcttagccatgtcaccatgggcaaatttcttggcctctcaagacctctgcttcctaatctgtaaactgggaatcataaactccctca

SEQ ID NO: 20616 - DNA, 201 bp, Homo sapiens
cttggctcactgcaagctccgcctcccgggttcacgccattctcctgcctcagcctcccgagtggctgggactacaggcacacgccaccacgcccggctartttttgtatttttcagtagagacaaggtttcactatgttggccaggctggtcttgaactcctgacctcatgatccacccgcctcggcctcccaaagtgtt

SEQ ID NO: 20617 - DNA, 201 bp, Homo sapiens
ctctttttaaggtagaatcatatcattttaaaacatttcagttggaccatctaagttcagtccttcattttcaaaattaaaaaacaggcctcaaacgggtrcatctcacgttagctagagacagaactggagctagaagtcagatctcttacaaagttgcctttcttcttctgtgggtaagtggggcacccttgggacgct

SEQ ID NO: 20618 - DNA, 201 bp, Homo sapiens
gatataagccaattctgttctggggacttgccagaaatgacacaattggccagttgacccacagcctagttcctagcagagattggatagctgattgagcrttgtggctgttttgaggcttgaccagagattcctgccgttggcagaggggaatctgtagtctttgcttcttggtagcaggtgaggctgaaaacgcaagta

SEQ ID NO: 20619 - DNA, 201 bp, Homo sapiens
atttttgaaaaaccaattctctggggaatttttagctcaaatacctcatttcacaatctccatatattcagagctaacaaaatgcaaatctgacaataaayagccgttctctatttgtctagtgtaagggaaagttataagtgaggtagggttcaaggttgctcccattgtgcagttgtacaaaaatgccccttctacttt

SEQ ID NO: 20620 - DNA, 201 bp, Homo sapiens
gccagctgggactgtgctaattcggtaaggcctgggtggagaaggagggcctgggcacgaccatctggtttcggaatggaggtagcagtcatttattaagyacttaatgtatatcgggcactgtacaggagacgttctggctgttctcctgtacatttcctgcaaagacctaatgagatatgattactccatcctacaggt

SEQ ID NO: 20621 - DNA, 201 bp, Homo sapiens; identical to SEQ ID NO: 3805

SEQ ID NO: 20622 - DNA, 201 bp, Homo sapiens
acagtcactcagcggagggaggcttgtgtctctcaatcaggctgatactgacagactttctcttcaatcaggctgatactgacagactttctctttccccrtaggagtgcccagtcccagggtgacactggacaagaaagaggccatccaaggtgggatcgtgagggtcaactgttctgtcccagaggaaaaggccccaat

SEQ ID NO: 20623 - DNA, 201 bp, Homo sapiens
ctgcttgaatcctgtactccctccaggggccaagatgtggcagctcacagaatgcctatatctttttttttttttgtcttttgagacagtctcactctgtygcccaggctggagtgcagtggtgagatctcacctcactgcaacccccgcctcccaggttcaagtgattcttgtgcctcagcctctcaagtagctgggatt

SEQ ID NO: 20624 - DNA, 201 bp, Homo sapiens
attgctgtccattgtttgttgccaaaccaattgactgcattcttttctgttttccatctttcttagtttaggcttcatgttatcggcataattggagaacktttgtctacttttttttttttcagacagggtctggctctgtcactcaggctggagtgcagtggcatgatcttggctcactgcaacctctgtcccccggcc

SEQ ID NO: 20625 - DNA, 201 bp, Homo sapiens
gtattgagcactccctctgtgtgagacacttggagccctaccttaatccccaagatcatctaacagttgatgggggttctattattattcttgctctgcakatggggaaacgggcccagaggttaactaatttgtccttgttccacagccagtggcagagcaaggactgaacccagggggcctggctgaagccatgctctt

SEQ ID NO: 20626 - DNA, 201 bp, Homo sapiens
aagaactgcaagtgtgcatggagtaagtgttccatccgtatttgagtttttcacattttgtcttcagattgctttagaaaatgcctacttgaggttctttygctgttgggagaggttccagagcccttaggggactaggagggtccaggaatcacggggtcctttgggtccttgcaggtcagatttgcattgggggtgctg

SEQ ID NO: 20627 - DNA, 201 bp, Homo sapiens
tcctggctctcgcctcctccctcttttctcgacctgctcctgaccctgtgatgttgttggggcagttgaactgggttatttgcgttgctcactgccatgtyatcctttgttttgtagatgccgtggaaagcagatactctgtaagtacacatttcatatacattatatttaaaagtactccactgaacagtgaaatatttc

SEQ ID NO: 20628 - DNA, 201 bp, Homo sapiens
ggcgtgagccactgcgcccgcccggcaaattcaccattttccagtgtatacttaaccattttaaagtgtataattcagttgcattaggtccgttcacattrctgtgcaaccaccaccactatccatctccagagctttttctttttaagtgaaagcaagtttattagagaagtaaagaaacaaaagaatggctactccata

SEQ ID NO: 20629 - DNA, 201 bp, Homo sapiens
tgccatgtcatcctttgttttgtagatgccgtggaaagcagatactctgtaagtacacatttcatatacattatatttaaaagtactccactgaacagtgraatatttccagactcacccacgtcctgcattcacacgaattcttccccgctccctagtctgtttcagaccagaagccctgggcttctctgactagccttg

SEQ ID NO: 20630 - DNA, 201 bp, Homo sapiens
tgtaacttgtgtactttggcaactattttactattattatttatgtggttaattcttagtagtcaaattgttgaatcagatgttttgtgcattttcttttttatttatttatttatttatttatttatttatttatttatttatttgagacagagtttcactcttgttgcccaggctcgagtacagtggcgcaatctcagc

SEQ ID NO: 20631 - DNA, 201 bp, Homo sapiens
agactaagtcttgctctgtcactcaggctggagtgcaatagcacgatcttggttcactgcaacaatcgcctcctgggtccaagtgattctcatgcctcagscttccaagtagctgggattggaggcatgcaccaccacgcccagctaatttttgtatttttagtagagacggagtttcaccattgttggccaggctggtct

SEQ ID NO: 20632 - DNA, 201 bp, Homo sapiens
gtaacttgtgtactttggcaactattttactattattatttatgtggttaattcttagtagtcaaattgttgaatcagatgttttgtgcattttcttttttatttatttatttatttatttatttatttatttatttatttatttgagacagagtttcactcttgttgcccaggctcgagtacagtggcgcaatctcagct

SEQ ID NO: 20633 - DNA, 201 bp, Homo sapiens
taacttgtgtactttggcaactattttactattattatttatgtggttaattcttagtagtcaaattgttgaatcagatgttttgtgcattttcttttttatttatttatttatttatttatttatttatttatttatttatttgagacagagtttcactcttgttgcccaggctcgagtacagtggcgcaatctcagctc

SEQ ID NO: 20634 - DNA, 201 bp, Homo sapiens
agccaagatcacgccaccgcactctagcctgggcgacagagcaagactctgtctcaaaaaaaaaaaaagtatccgacagagggaaaaccagggaggtaagrgggttgcagaggaagggcagctcagtctggggaagacgaggaaaaattctggagaaatggattcctgaactgagttaggaaggatgggtaggaatttgct

SEQ ID NO: 20635 - DNA, 201 bp, Homo sapiens
tacccaactggtatattggcatatacattgggtcctgctggtctatagtgtgtgctagcaatttagttaagtattgatcatgacttatattttgatggctcatggtatttttttactgatacaatttatattatctcattaaagaaaagtaccagttcaacacatattgagcattttctgtatgctgggcaacttactggg

SEQ ID NO: 20636 - DNA, 201 bp, Homo sapiens
aggcatgcaccaccacacctagataatttttgtatttttagtagagacggggtttcgccatgttggccgggcttgtcttgaactcctgacattgtgatccrtccacctcggcctcccaaaatgctgggattacaggtgtgagccaccacgccctgccagttcagtgtttttcctatggggtctgtgacaaataatgcatct

SEQ ID NO: 20637 - DNA, 201 bp, Homo sapiens
cgtgtgcatgtgtctttatagcagcatgatttatagtcctttgggtatatacccagtaatgggatggctgggtcaaatggtatttctagttctagatcccygaggaatcgccacactgacttccacaatggttgaactagtttacagtcccaccaacagtgtaaaagtgttcctgtttctccacatcctctccagcacctg

SEQ ID NO: 20638 - DNA, 201 bp, Homo sapiens
aaacagccagcccagctgtctatctctgtaagagttctcagtcccagctattcctagggtcactgacaacccccaggctctaacccagacctcaggatctygttctggatcccggggtctgggctctcaggtgattgggaggccatagcccaaccctgcgttgagggacctggcagaatgtctggacaagggtcacggtgg

SEQ ID NO: 20639 - DNA, 201 bp, Homo sapiens
gttgccattgcttttggtgttttagacatgaagtccttgcccatgcctatgtcctgaatggtaatgcctaggttttcttctagggtttttatggttttagktctaatgtttaagtctttaatccatcttgaattaatttttgtataaggtgtaaggaagggatccagtttcagctttctacatgtggctagccagttttcc

SEQ ID NO: 20640 - DNA, 201 bp, Homo sapiens
aggattccctctttttctattgactggaatagtttcagaaggaatggtgccagttcctccttgtacctctggtagaattcggctgtgaatccatctggtcytggactctttttggttggtaagctattgattattgccacaatttcagatcccgttattggtctattcagagattcgacttcttcctggtttagtcttggg

SEQ ID NO: 20641 - DNA, 201 bp, Homo sapiens
attcggctgtgaatccatctggtcctggactctttttggttggtaagctattgattattgccacaatttcagatcccgttattggtctattcagagattcracttcttcctggtttagtcttgggagagtgtgtgtgttgaggaatttatccatttctcctagattttctagtttatttgtgtagaggtgtttgtagtatt

SEQ ID NO: 20642 - DNA, 201 bp, Homo sapiens
tctcttttttatacttatttaattttttttagatggagtttcgctcttgttgcccaggctggagtgcaatggcgcgatctcagctcactgcaacctctgcmtcccgggctcaagcgattctcctgcctcagcctactaagtagctgggattacaggcatgtaccacacccggctaattttgtatttttagtagagacaggg

SEQ ID NO: 20643 - DNA, 201 bp, Homo sapiens
cgaggtgggcaaatcacctgaggtcaggaattcaagaccagcctggccaacagggcaaaaccccgtctctaaaacaacaacaacaacaaaaaaatccaaaragttagctgggcctggtgggcgcacctgtcattccagctactcgggaggctgaggcaggagatttgcttgaacccaggaggcacacgttgcggtaagctg

SEQ ID NO: 20644 - DNA, 201 bp, Homo sapiens
tttatctgctacttcctactttccatagttttcatttttttcttaaaaaaatatgtgctactaatttttttttttttttgagatggagtcttgctgtgtcrcccaggctggagtgcagtggcgcaatctcagctcactgcaacctctgcctcctgggttcaagcgattctcctgcctcagcctcccgagtaactgggacta

SEQ ID NO: 20645 - DNA, 201 bp, Homo sapiens
atagttttcatttttttcttaaaaaaatatgtgctactaatttttttttttttttgagatggagtcttgctgtgtcacccaggctggagtgcagtggcgcratctcagctcactgcaacctctgcctcctgggttcaagcgattctcctgcctcagcctcccgagtaactgggactacaggtgcccaccaccacgcctggc

SEQ ID NO: 20646 - DNA, 201 bp, Homo sapiens
atcttctacttttttgttgctattttttgttttttgagactaagtcttgctctgtcactcaggctggagtgcaatagcacgatcttggttcactgcaacawtcgcctcctgggtccaagtgattctcatgcctcagccttccaagtagctgggattggaggcatgcaccaccacgcccagctaatttttgtatttttagta

SEQ ID NO: 20647 - DNA, 201 bp, Homo sapiens; identical to SEQ ID NO: 3802

SEQ ID NO: 20648 - DNA, 201 bp, Homo sapiens
accatgcccagccaggaatccttttttttaattgtcataaaatatacataatattaagtttaccattttctttttttttgagacggagtcttgctctgtcrcccaggttggagtgcagtggcgcaatcttggctcactgcaagctccgcctcccgggttcacgccattctcctgcctcagcctcccgagtggctgggacta

SEQ ID NO: 20649 - DNA, 201 bp, Homo sapiens
tggagtgcaatagcacgatcttggttcactgcaacaatcgcctcctgggtccaagtgattctcatgcctcagccttccaagtagctgggattggaggcatrcaccaccacgcccagctaatttttgtatttttagtagagacggagtttcaccattgttggccaggctggtctcgaactcctggccacaagtgatccaccg

SEQ ID NO: 20650 - DNA, 201 bp, Homo sapiens
gaaagaaggacacagagacagtgtacagtgaagtccggaaagctgtccctggtgagtgagggtctccagtgccccagcctgggggatgccccctagaatcwctgatggggccttgggagtgggcagagaaaagaagaagcaaagaaggccaaaaaaggggtgccacctcttacaccagcgctgtgggcttcctctctccca

SEQ ID NO: 20651 - DNA, 201 bp, Homo sapiens
gtgattctcatgcctcagccttccaagtagctgggattggaggcatgcaccaccacgcccagctaatttttgtatttttagtagagacggagtttcaccattgttggccaggctggtctcgaactcctggccacaagtgatccaccggccttggtctcccaaagttctgggatgacaggcgtgagccactgcgcccagtcc

SEQ ID NO: 20652 - DNA, 201 bp, Homo sapiens
gagcagagaccgcgccactgcactccagcctgagtgacagagtgagaatccatctaaaaaaaattgcttgctaaagaagtggtctcctgaggtcttaagaygttcctgacaatgtcttgagtgggtgggagagaggctgcagtcattgtgctgtggaatttcagaggtgagaaccacacctaaccaaaattactttccctg

SEQ ID NO: 20653 - DNA, 201 bp, Homo sapiens
taaaagctgcattgtcttttattacctgatggagtattttgttggttaatgttaacgtgggaggtgaccacgtgtaagtgtgatgagcagagggcaaggaycattggggggggcatcttgaagggcttctatagcaagggaggtggtggtggttgtggcggtaaaaactaggtcactgtttttgttgttttgtcgatgata

SEQ ID NO: 20654 - DNA, 201 bp, Homo sapiens
ctctcttctcccttgtctgttcgagctagccatgggaatgtggtgttcctgccagtgcatccattgagttcgtttattgttaatttatttattttctgagwtggagtttttgctctattgctcaggctggagtgcaatgatgtgatcttggctcactgcaacctctacctcctggattcaagtgattctcctgcctcagcc

SEQ ID NO: 20655 - DNA, 201 bp, Homo sapiens
gagcagataatgtgtgttagagttgcttagaaaaacaagatggtggacgggccccatgctagtgggtaccatccctactggaaaaaccactgcttggtgcrttagccaaatttgctttaaaattgttttttaaaaagggagggcttttataaaaatcaaatgaactaggactggttagtgggaggctcacgcaagggttgt

SEQ ID NO: 20656 - DNA, 201 bp, Homo sapiens
tactggaaaaaccactgcttggtgcattagccaaatttgctttaaaattgttttttaaaaagggagggcttttataaaaatcaaatgaactaggactggtyagtgggaggctcacgcaagggttgtgctgaggctggaaggcccagagtaggaagagttgtggagtgcagaatgagctctccaagggcagacactgccagc

SEQ ID NO: 20657 - DNA, 201 bp, Homo sapiens
agtaggaagagttgtggagtgcagaatgagctctccaagggcagacactgccagcctcactgttctctgaacccccagtatgggggacagtgcttggcacrgaaaaacccccttaaatgtttgctatgaatggtgctaaggaagaaggcagagaatgtcaaccagaggccaggcactgggcaatatatacacggccccttc

SEQ ID NO: 20658 - DNA, 201 bp, Homo sapiens
tgtctctaaactggcagaccattagggaacctgccaggtctctaacctgcccaggggtgaaggtagagagagccctggttcttgcacaggctgtagccctyggggcctgcagctgcctgcagctgtgcctccaacccacctggaagcctctggtcctggaagccaaggggtttcctgtttgtcagtgcttccttgaggaga

SEQ ID NO: 20659 - DNA, 201 bp, Homo sapiens
ctggaagcctctggtcctggaagccaaggggtttcctgtttgtcagtgcttccttgaggagaggagcctgcaggacatggctgatttcttttctttctctstttctctctctctctttctttctctctcgctctctctttttctttttcttcctttctttcctttttcctttctttccttttctctttcctccttctttct

SEQ ID NO: 20660 - DNA, 201 bp, Homo sapiens
ctctctctctttctttctctctcgctctctctttttctttttcttcctttctttcctttttcctttctttccttttctctttcctccttctttctatctttctctctctctctctctccttccttccttctttcttttcttttctttcttttttgtaagacagagtctcactgtgtcacccaggctggagtgcagtggcac

SEQ ID NO: 20661 - DNA, 201 bp, Homo sapiens
tctctctctttctttctctctcgctctctctttttctttttcttcctttctttcctttttcctttctttccttttctctttcctccttctttctatctttctctctctctctctctccttccttccttctttcttttcttttctttcttttttgtaagacagagtctcactgtgtcacccaggctggagtgcagtggcacg

SEQ ID NO: 20662 - DNA, 201 bp, Homo sapiens
gcttaggcttctctcacactcatcctcagcctctctttgttcaagtcttccccagagcccagagctgttaaggatcatcatttctttctttctttctttcttttttttttttttgagacagggtcttcgctctgtcacccaggctggagtgcagtggcgcgatcgcagctcactgcaacctccagctcccgggttcaagtg

SEQ ID NO: 20663 - DNA, 201 bp, Homo sapiens
cgggggttgtgtactgcccaatctgcacaactcacttccaagtctagactggacctgagaggggtggggaacgcggcaggcctgaagctctcttcctcattttttttttttttttttttttatgacagtcttgctcttgttgcccaggctggaatgcaatggcacagtttcggcacactgcttcctctgcttcccgggttc

SEQ ID NO: 20664 - DNA, 201 bp, Homo sapiens
gggggttgtgtactgcccaatctgcacaactcacttccaagtctagactggacctgagaggggtggggaacgcggcaggcctgaagctctcttcctcattttttttttttttttttttttatgacagtcttgctcttgttgcccaggctggaatgcaatggcacagtttcggcacactgcttcctctgcttcccgggttca

SEQ ID NO: 20665 - DNA, 201 bp, Homo sapiens
ggggttgtgtactgcccaatctgcacaactcacttccaagtctagactggacctgagaggggtggggaacgcggcaggcctgaagctctcttcctcattttttttttttttttttttttatgacagtcttgctcttgttgcccaggctggaatgcaatggcacagtttcggcacactgcttcctctgcttcccgggttcaa

SEQ ID NO: 20666 - DNA, 201 bp, Homo sapiens
gggaagggttgaagggacaagaaggaggtattgtaatcccagcactttgggaggcagaggcgagaggatcacttgagcccaggcattcaagaccagcctgkgcaacaaagcaagaacttatttctacaaaaaatttaaaaataaggaggtatcgagaccctccaggattgggtgaagcagaggcggtcagcatgtgccctc

SEQ ID NO: 20667 - DNA, 201 bp, Homo sapiens
ttaagtgaggttctgagggtgaaggtgataggtaagttgctgtgctgtgagaagaaatcatgtgggcttggggcattctttcacccccagggactgtgggracaataagagaagtagggggccaggtgcggtggctcatgcctgtaatcccagcactttaggaggccaaggccggtgaatcattgaggccaggagttcaag

SEQ ID NO: 20668 - DNA, 201 bp, Homo sapiens
taacagcattgtcgttattttatcatgacgcaactgaggcttagggcagacagctggtgggtggtgggactgggatttgagcccactggtgtcccaggccyggagcttggcttcttccattgtcttaccacagcctgcactcacaggagagtgactcataagttacaataccatctgctgaccatctgctctcacactaga

SEQ ID NO: 20669 - DNA, 201 bp, Homo sapiens
tcgactcactgcaacctccacttcccggatttaagtgattctcctgcctcagcctcccaagtagatgggattacaggcgcccgccaccacactcagctaattttttttttttttttttgagacagagtttcgctcttgatgcccaggctggggtgcaatggagcgatctcggctcactgcaacctccgcctcccggttcaa

SEQ ID NO: 20670 - DNA, 201 bp, Homo sapiens
aacagcattgtcgttattttatcatgacgcaactgaggcttagggcagacagctggtgggtggtgggactgggatttgagcccactggtgtcccaggcccrgagcttggcttcttccattgtcttaccacagcctgcactcacaggagagtgactcataagttacaataccatctgctgaccatctgctctcacactagaa

SEQ ID NO: 20671 - DNA, 201 bp, Homo sapiens
aaggtaacatattttattctaactttgccaccttccaaactccccgtagaagaaagatggagaataatcataatgccttcaaagactttgaacattgctcyagcgtaatattataattctccattttcaagacagagaccagatattgaatgaaaacattggtaaaacatcttctcagatggaattattacaagcacaaga

SEQ ID NO: 20672 - DNA, 201 bp, Homo sapiens
cccgtagaagaaagatggagaataatcataatgccttcaaagactttgaacattgctccagcgtaatattataattctccattttcaagacagagaccagrtattgaatgaaaacattggtaaaacatcttctcagatggaattattacaagcacaagacagttttacttcaaatttgccacaaagggaaagcaatttcaa

SEQ ID NO: 20673 - DNA, 201 bp, Homo sapiens
cagagaccagatattgaatgaaaacattggtaaaacatcttctcagatggaattattacaagcacaagacagttttacttcaaatttgccacaaagggaawgcaatttcaatattctctcagtaaaggcataaataaagtgttccaactaagaaatatctattcataaggctcatcagtagcttcagggtcagctcagctg

SEQ ID NO: 20674 - DNA, 201 bp, Homo sapiens; identical to SEQ ID NO: 3809

SEQ ID NO: 20675 - DNA, 201 bp, Homo sapiens; identical to SEQ ID NO: 3812

SEQ ID NO: 20676 - DNA, 201 bp, Homo sapiens; identical to SEQ ID NO: 3814

SEQ ID NO: 20677 - DNA, 201 bp, Homo sapiens
agaatgaaactccatctcaaaaaaataaaaataaatataaatatataaagcttcttaacaaagagcaataaatttgtagacaaatgacaagacaaaggaargatggtttttggcttcccagagtggcaaactgagaaagtcaatcaagtggccacaaatattttatgggggcatttacagcaggtgtgttttcttaggagt

SEQ ID NO: 20678 - DNA, 201 bp, Homo sapiens
cttgtcgctacagagaacggaaggctcccttgatggaacttagacagcaaggccagatgcacatccctggaaggacatccatgttccgagaagaacagatratccctgtatttcaagacctctgtgcacttatttatgaacctgccctgctcccacagaacacagcaattcctcaggctaagctgccggttcttaaatcca

SEQ ID NO: 20679 - DNA, 201 bp, Homo sapiens
tcaaaaaaataaaaataaatataaatatataaagcttcttaacaaagagcaataaatttgtagacaaatgacaagacaaaggaaggatggtttttggcttyccagagtggcaaactgagaaagtcaatcaagtggccacaaatattttatgggggcatttacagcaggtgtgttttcttaggagtttctgcttttagggct

SEQ ID NO: 20680 - DNA, 201 bp, Homo sapiens
ctctcttaggttttctgactggggccctgcaaattacacaagacagattaacaagagaaaaacagagaccctctttgtttttctcttgttaatctgcctcaaaaaaaaaaaaaaaggaagaagtagtttctgcttttagtcagataaacaagctctgggaagacttccttctacatctgaaccagctcaaaacaatcctta

SEQ ID NO: 20681 - DNA, 201 bp, Homo sapiens
acaagagtctcgctctgtcagccaggctggagtgcagtggtgcgatctcggctcactgcaacctccacctcccgggttcaagcaattctcctgcctcagcytcccaagtaactgggactacaggcgcctgccaccacgcccggctaatttttgtatttttactagagacagggtttcactgtgttggccaggctggtctca

SEQ ID NO: 20682 - DNA, 201 bp, Homo sapiens
cagcactttgggaggctgaggcaggcagatcacctgaggtcaggagttcaagaccagcctagccagcgaaaccccatctctactaaaaacacaaaaattasccgggcgtggtggtgcatgcctgtaatcccagctactcgggaggctgaggcacgagaatcacttgaacccaggaggcggaggctgcagtgatccgagatt

SEQ ID NO: 20683 - DNA, 201 bp, Homo sapiens
atcttgatgaattgtttagtcagttacagatcaaactccatgttcttttctctgttctcacgactactcttgactagtctaaaaatatattaggttgttgmaaagtaattgtggtttttgccattacttttttaaaagatggcaaaaaacacaattataagtagcacacattttcttttttttttccttttttttttgaga

SEQ ID NO: 20684 - DNA, 201 bp, Homo sapiens
tgttaggggtactgaatttttaaaaggttttagaaaactagaatttcccttgtcactcaccctaattgttatttttcaactaggtcacaatgacgatgtcrgaaaccatgcaatgaaaccaataaatgataataaaggtaattatctaattacatgtttttattagaaccaacttttacattaaaaaaaagactcatagga

SEQ ID NO: 20685 - DNA, 201 bp, Homo sapiens
tcctaggagttcttaatcccaggttagtaagaaaattgctcaagcatttcagcagggatgctacttacttcccagagggggctataattacatcacaaaargtcctgtcccagaccaaatttggaacactcttcctcttttctttctttcttttttttttagacagggtcttcccaggctggagtgcagtggtgcaatctc

SEQ ID NO: 20686 - DNA, 201 bp, Homo sapiens
attgtgacccccgctgtgacagacaggccctgagcctgcccgaggtccaggaggaactgtatgtgagcttggggctgggtctatactgaggccccttggcrtacttttctcgataagactgaggacttatggccctcccaccattccctccaccaccttcgagaacagcaaccatccccaatgcccacatctcctcttggg

SEQ ID NO: 20687 - DNA, 201 bp, Homo sapiens
atcacggggtcctttgggtccttgcaggtcagatttgcattgggggtgctgtcctcaacctcactcaatgcatggaagttgacacaatggctcaacattascgttgggctgattcatcatttggctgttgacaccagcctctggcccagccaggacagaaaaagggcccctgaggaacttctggctctgttccctctatgg

SEQ ID NO: 20688 - DNA, 201 bp, Homo sapiens
tctcatcagccactgggccatgtaatatacggaaacgtaaaaggaaaggtaacatattttattctaactttgccaccttccaaactccccgtagaagaaakatggagaataatcataatgccttcaaagactttgaacattgctccagcgtaatattataattctccattttcaagacagagaccagatattgaatgaaaa

SEQ ID NO: 20689 - DNA, 201 bp, Homo sapiens
tcacccaggctggagtgcagtggcgcgatcgcagctcactgcaacctccagctcccgggttcaagtgattcttctgcctcagcctcctgagtagctgggamcacagctactgccaccacgcccgggtaattttttttgtatttttagtagagacggtgtttcaccatattggtcaggctgatctcgaactccagacctcag

SEQ ID NO: 20690 - DNA, 201 bp, Homo sapiens
atcattgccatctgtctcccttcctctgaggctaaccccaggctgcatccacctagccaggcaggcctggggtagttttcctgactgtgcaggctgaatgsgtgcagttttccaggccgtgccagccactagccagaccacatggcaatggggtcctgaaatcaccccttgctccatgatctgggaggagtcttggacttc

SEQ ID NO: 20691 - DNA, 201 bp, Homo sapiens
aagactccgtctaaaaaaaaattaaaaatgcatctcctaactgtcctcctcctttgcgaacccagattgggcagtacacagtccccgggggtcactgcacmctcctgcacgctcaaaggaaacagtggctcctgcacgctcaaaggaagcagtctcagaaccttcctgcccagctgggaagctccctgggatcattgccat

SEQ ID NO: 20692 - DNA, 201 bp, Homo sapiens
agtctttaaacactggccatgacacactacactgatgcattatgtgatctgtagtttggaagccactgctttaagccatcgagggtcagacaccaggaagytgggtttggaggggatcgggaggaaagaggggccaggtcctcagccttggcctcctgttgttcaacgtagatttgcgttggacaaacagcaaacaaatga

SEQ ID NO: 20693 - DNA, 201 bp, Homo sapiens
gcaatgtgaaaattcaaggttttctgttttgttttgttttgttttttttgagactaaatctcggtctattgcccaggctggagtgcagtggtgcaatctcrgctcactgcgacctccacctcccgggttcaagcgaattctcctgcctcagcctcctgagtagctgggcccacggcacgtgccaccacacctggctaattt

SEQ ID NO: 20694 - DNA, 201 bp, Homo sapiens
gggtttcaccatgttggccaggctggtctcaaactcctgacctcaggtgatccgctggcctccacctcccaaagtgctgggattacaggtgtgagccaccrcgcccggcctcacattttctagatttcagtgcattgctgttttttgggatggggaagtgatttttttattttaatgagcaattccataattagttttttg

SEQ ID NO: 20695 - DNA, 201 bp, Homo sapiens
ggctggagtgcagtggtgcaatctcagctcactgcgacctccacctcccgggttcaagcgaattctcctgcctcagcctcctgagtagctgggcccacggmacgtgccaccacacctggctaatttttgtgtttttagtagagacagggtttcaccatgttggcaaggctggtctccaactcctgacctcaagtgatcctc

SEQ ID NO: 20696 - DNA, 201 bp, Homo sapiens
ggtttcaccatgttggccaggctggtctcaaactcctgacctcaggtgatccgctggcctccacctcccaaagtgctgggattacaggtgtgagccaccaygcccggcctcacattttctagatttcagtgcattgctgttttttgggatggggaagtgatttttttattttaatgagcaattccataattagttttttgt

SEQ ID NO: 20697 - DNA, 201 bp, Homo sapiens
tgaaacagagtctcactctgtcacccagactggagtacagcagtgccatctcagctgactgcaactccgtgcaacaccccccggcccctaaggcttaagcratcctcccaagtagctagaaccacagacacacaccaccatgcccagctaagtttttgtatttttggtagagatgaggttttaccatgttgcccagactgg

SEQ ID NO: 20698 - DNA, 201 bp, Homo sapiens
ttacaggcgtgcaccactatgctcagctaattttttgtatttttagtagagatggggtttcatcatgttagccaggctagtctcaaactcctgacctcagrcgatccacctgccttggcctctcaaagtgctgggattacaggtgtgagccaccgcaccgggccctgaaatgtttttcttccagaggccctgtgtgaggaa

SEQ ID NO: 20699 - DNA, 201 bp, Homo sapiens
ggcctccacctcccaaagtgctgggattacaggtgtgagccaccacgcccggcctcacattttctagatttcagtgcattgctgttttttgggatggggargtgatttttttattttaatgagcaattccataattagttttttgttgttttaccataatggcttatttgaatattgtaacctatccccaactgtttttat

SEQ ID NO: 20700 - DNA, 201 bp, Homo sapiens
taacaaaatgcaaatctgacaataaacagccgttctctatttgtctagtgtaagggaaagttataagtgaggtagggttcaaggttgctcccattgtgcarttgtacaaaaatgccccttctactttcttggtggtccctgagagtgttcgctttcttggacactgctgaagagttcactttcagttgctttcgttaagca

SEQ ID NO: 20701 - DNA, 201 bp, Homo sapiens
aagacagatcctagtttaaattgttgctactttttttactcctaaatgataaaaatcacacactggagctcattttccattcacctgtgaggctacaagtrtatctgtaatattttgtgcttgtacaaagggaagtggggtgctgcctatctttgaagcctggtttatcttccactttacagctaattttgaacctttgtc

SEQ ID NO: 20702 - DNA, 201 bp, Homo sapiens
atgggatttgtccatgggattcaccacaaatcccattttacagttgaggatactaaggcatagagaggttaagacgcttgcccaagatcacgcagcaagcmagcccctgagaatcgttcctccccggagtggactccacgctcttgatcactgaggtgtactgtcttcggtttgggaaagtcgggtggtagaaggtggaag

SEQ ID NO: 20703 - DNA, 201 bp, Homo sapiens
ccatggcaacccacggaggcaggatatccataatcttcataattatcctgctggactgatggtgtcaccaagcctcagaaataaccgattttaccagccgygttggctcacacctgtaatcccagcactttgggaggccaaggtggtcgaatcacttgaagccaggagttcaaaaccagcctggccaaaacagtgaaaccc

SEQ ID NO: 20704 - DNA, 201 bp, Homo sapiens
cactcaaggaaacagacccaggggccacaaggcaccaagcaagcagggtcaacactgggggtgggcagggcggcggctggaaccaggtctccattccttaggccccctaggccagcatttgcagtgcgtggcctgcaggcttgctctgagtctcccgctctgcggctggggtcctgggacagcctcggccctttcccttcc

SEQ ID NO: 20705 - DNA, 201 bp, Homo sapiens
aaacagacccaggggccacaaggcaccaagcaagcagggtcaacactgggggtgggcagggcggcggctggaaccaggtctccattccttaggccccctaggccagcatttgcagtgcgtggcctgcaggcttgctctgagtctcccgctctgcggctggggtcctgggacagcctcggccctttcccttccttccatctc

SEQ ID NO: 20706 - DNA, 201 bp, Homo sapiens
cttcctctgtcacccaggctaaagagcaatggcgcgaccttggctcactgcaacctctgtctcctgggttcaagcgattctcctgtctcagcctcccaagmaactgggattacaggcacgcgccactgtgcctggctaattttttgtatttttagtaaggatggggttttaccatgttggccagcctggtctcgaactcct

SEQ ID NO: 20707 - DNA, 201 bp, Homo sapiens
agcctcggccctttcccttccttccatctcaggcctctttgttcccctccagcccgcacctcactgcagctgcctcacctcaggaggtgacggctgctccrtcttcacctagaaaacagtcatctggagggaactccctcaacttcccgcctgggcctggctgcaggcttatcagcctctccacccatcctctcggtttcc

SEQ ID NO: 20708 - DNA, 201 bp, Homo sapiens
ggtggtttggggttagaacaataacaacaacaaatatatctatatattgttttctgtttttatatttcattttaaggccagcagtaccacttctgaactcyaacaacgagaaaatgtcagatcccaatatggaagctaacagtcattacggtaaagtcatgttctcctgccatttctaatttcccccaacttgctacatac

SEQ ID NO: 20709 - DNA, 201 bp, Homo sapiens
gcactccagcctgggtgataagagcgggactctgtctcagaggaaaaaaaaaaaagttgagcagtggctgtctcatgttcctcttcctctgcccttctttkctcagtgtgaatccttttcctgcttttcagccccggtggatgaggtccagatttctatcctgtcaagtaaggtggtggagtctggagaggacattgtgct

SEQ ID NO: 20710 - DNA, 201 bp, Homo sapiens; identical to SEQ ID NO: 3816

SEQ ID NO: 20711 - DNA, 201 bp, Homo sapiens
aaaacccactcagactcctgaaatcagagactatcgtgtcactgggacaaggagcccaatttacagatgaggaaactgaggcctgcactggtagaatagcrtgtctggggtcacctggatggctaatagagtgaggaacagagcccaggcctctatactctgcggccagtcctctgtcacgacagagactccctccaagat

SEQ ID NO: 20712 - DNA, 201 bp, Homo sapiens
agtctgctcccaggatggttctgagagctcacccatgactggtcctgtccccccagaaaaaagaatagagtcatttgatgggagcacagggtttccagccrttgggaaaggaattttgaacctttaagcaaatgggttttgtttataaaagaagcaggtatagcttccctaataatcagctggtgtgggtcaggagaaaat

SEQ ID NO: 20713 - DNA, 201 bp, Homo sapiens
gtataattataactgctccccacccccaaaaaagccaaatcgtagtggaaaatgactaggaaaaaaaaaagtatcaacagggtttggagaatgaggccagrtatcatttttatctgctacttcctactttccatagttttcatttttttcttaaaaaaatatgtgctactaatttttttttttttttgagatggagtcttg

SEQ ID NO: 20714 - DNA, 201 bp, Homo sapiens
ggaccccacgcctacgtgcattcaagtccctctcccctaccaccacttctagaatctctatttctgcttctggctctgttctctcagtgaatgggaactcttttttttaggaaaaagaaaaatcacaagcagacacccacccccaccgtttatctggtgtccccctatctggcctttctagtttcctttctcagtcgaacc

SEQ ID NO: 20715 - DNA, 201 bp, Homo sapiens
ctttattcccaaagaggataccggtggtgttattgaaaagagcaaaaacttggaaagcacctacatttttaaagtaaggaattggtgaagtcaatagttgyacatccatttaacaattatttagtagctaattggacaattatgcttaagaagttttcagaaaaagtttataaagccatgttatatgaaaaagttaagtta

SEQ ID NO: 20716 - DNA, 201 bp, Homo sapiens
tcagaagcagaatatgtaagtggtgggattacagttggaagagaaaccctggcttcaacagggtacttcatctcatcagccactgggccatgtaatatacrgaaacgtaaaaggaaaggtaacatattttattctaactttgccaccttccaaactccccgtagaagaaagatggagaataatcataatgccttcaaagac

SEQ ID NO: 20717 - DNA, 201 bp, Homo sapiens
tgggaggtgaccacgtgtaagtgtgatgagcagagggcaaggaccattggggggggcatcttgaagggcttctatagcaagggaggtggtggtggttgtgscggtaaaaactaggtcactgtttttgttgttttgtcgatgatatttgtgttaagatgaagagctgagactcatatctcaacagagtttataaaatgcttt

SEQ ID NO: 20718 - DNA, 201 bp, Homo sapiens
gaaaccctggcttcaacagggtacttcatctcatcagccactgggccatgtaatatacggaaacgtaaaaggaaaggtaacatattttattctaactttgycaccttccaaactccccgtagaagaaagatggagaataatcataatgccttcaaagactttgaacattgctccagcgtaatattataattctccattttc

SEQ ID NO: 20719 - DNA, 201 bp, Homo sapiens
gcagtggagtgagcaaaactgggaggctggagaagtcgctttaaattaacctgaaaatgtttaatatgctttttattttgtttattttttttgagatggartctatctttgttgcccaggctggagtgcagtggtgcaatctcggctcactgcaatatccacctcccaggttcaagtgattcttctgcctcagcctcccga

SEQ ID NO: 20720 - DNA, 201 bp, Homo sapiens
tcatgctatgacctgggccagagtgcagcggtgcaatcctagctcactgtagcctcaaagtcctgagctcaaacaagcctcccatctcagcctccagagtrgctgggactaccggggcacaccaccacaccaggctaatttttaaaaattttttgagagaagttggtgggaggtgaaaaaaaaaattttttttttttggta

SEQ ID NO: 20721 - DNA, 201 bp, Homo sapiens
agagagttattttattcctgaagtccggatctatgactcagggacatataaatgtactgtgattgtgaacaacaaagagaaaaccactgcagagtaccagstgttggtggaaggtgagtccttggaactgagcacaggcaagcagatggagcaaagcacacagtggcgtgaataacagctgtgaatgaatagtgacactgg

SEQ ID NO: 20722 - DNA, 201 bp, Homo sapiens
atggtggctcatgcctgtaatcccagttactcagctggctgaggcaggagaatcgcttgaacccgggaggcggaggtttcaatgagctgaaattgtgccaytgcactccagcctgggcaacaagaatgagactccatctcaaaaaaaaaaaaaaaaaagaaacaacaaaaatgtatttctcacagttctggagtttgggaa

SEQ ID NO: 20723 - DNA, 201 bp, Homo sapiens
tcggggtgtcaggtacttttcaggtctgaggtgaggccgtgggcagggcagcttctacccacctcatctcaactctcccttttcttgctcagtgtcacatrtaggaccagttacataatttgtgggtctagtgcaaatgaaaattcaaaattatcaggaatttcaaggtggcgacagcaaggcatcaaaccaagcatggca

SEQ ID NO: 20724 - DNA, 201 bp, Homo sapiens
tggagaatagtaccaagaactcaaatgatcctgcggtattcaaagacaaccccactgaagacgtcgaataccagtgtgttgcagataattgccattcccaygccaaaatgttaagtgaggttctgagggtgaaggtgataggtaagttgctgtgctgtgagaagaaatcatgtgggcttggggcattctttcacccccagg

SEQ ID NO: 20725 - DNA, 201 bp, Homo sapiens
gccaaggccggtgaatcattgaggccaggagttcaagaccagcctggccaacatggtgaaaccccatctctactaaaaatacaaaaattagctgggcatgrtggcgtgcgcctataatcccagccactcgggaggctgaggcaggagaattgcttgaacccaggaagcagaggttgcactgagccaagttgcgccattgca

SEQ ID NO: 20726 - DNA, 201 bp, Homo sapiens
tgggactgggatttgagcccactggtgtcccaggcccggagcttggcttcttccattgtcttaccacagcctgcactcacaggagagtgactcataagttmcaataccatctgctgaccatctgctctcacactagaaggaaagtctacttgggaagacaatttaggatccgaattttggtagttgaggatggagctagga

SEQ ID NO: 20727 - DNA, 201 bp, Homo sapiens
ggtggcttatgcctgtaatcccagcattttggaaggccgaggtgggcaaatcacctgaggtcaggaattcaagaccagcctggccaacagggcaaaacccygtctctaaaacaacaacaacaacaaaaaaatccaaagagttagctgggcctggtgggcgcacctgtcattccagctactcgggaggctgaggcaggagat

SEQ ID NO: 20728 - DNA, 201 bp, Homo sapiens
gcgggactctgtctcagaggaaaaaaaaaaaagttgagcagtggctgtctcatgttcctcttcctctgcccttctttgctcagtgtgaatccttttcctgsttttcagccccggtggatgaggtccagatttctatcctgtcaagtaaggtggtggagtctggagaggacattgtgctgcaatgtgctgtgaatgaaggat

SEQ ID NO: 20729 - DNA, 201 bp, Homo sapiens
ttcctcttcctctgcccttctttgctcagtgtgaatccttttcctgcttttcagccccggtggatgaggtccagatttctatcctgtcaagtaaggtggtrgagtctggagaggacattgtgctgcaatgtgctgtgaatgaaggatctggtcccatcacctataagttttacagagaaaaagagggcaaacccttctatc

SEQ ID NO: 20730 - DNA, 201 bp, Homo sapiens
ctcagaggaaaaaaaaaaaagttgagcagtggctgtctcatgttcctcttcctctgcccttctttgctcagtgtgaatccttttcctgcttttcagccccrgtggatgaggtccagatttctatcctgtcaagtaaggtggtggagtctggagaggacattgtgctgcaatgtgctgtgaatgaaggatctggtcccatca

SEQ ID NO: 20731 - DNA, 201 bp, Homo sapiens
ggtcccatcacctataagttttacagagaaaaagagggcaaacccttctatcaaatgacctcaaatgccacccaggcattttggaccaagcagaaggctadcaaggaacaggagggagagtattactgcacagccttcaacagagccaaccacgcctccagtgtccccagaagcaaaatactgacagtcagaggtgagtca

SEQ ID NO: 20732 - DNA, 201 bp, Homo sapiens
tgcgtggtgcttttctgacccctggattcagctaggcaaaaatgaaagctattattttcctcattgggcaaaccagaaaagataaatttggggggaaattrcatctttgtgtggttagaagaagccatttctgtagatttgtccacacctagtcctgtaatgcgtgtagagtggggtgcaagcgtcttggagacacacaaa

SEQ ID NO: 20733 - DNA, 201 bp, Homo sapiens
gtatttcctaccttggtggcttctatgggttcctgggaaggtgggatggtttttgcagttgtattttgctagaggtgacagtggggaggaagtgcatggarggtaaagctgggggtttttttgtttgtttgtttttgttttctttgagatggagttttgctcttgctacccaggctggagtgcagtggtgtgatgttagct

SEQ ID NO: 20734 - DNA, 201 bp, Homo sapiens
ccaggctttgacttaggaatcagagacccacattaacacttgacttcccacttcttagccatgtcaccatgggcaaatttcttggcctctcaagacctctrcttcctaatctgtaaactgggaatcataaactccctcacttggttgttgcaagggttgaatgagcacctggcatagacctggtctattgcaagtgcccac

SEQ ID NO: 20735 - DNA, 201 bp, Homo sapiens
caccatgctgcaatccagcatggccaaagagagctgatacatttcctgcccctgcttatctgaatgaatgtgctcagatggggctttggtgctcgtgggargaaaccactgcagagcgagttaacagtctactgtgcgtgttgagggtgcaggctccggcaccaaagctcaaccctgccgctcactgcttctgtgaccttg

SEQ ID NO: 20736 - DNA, 201 bp, Homo sapiens
agagttgcttctgtgaatcccccactgcccagcccagagccctctcagtgcctctgaaccccttctgcagtttgttgagacctcttataccttctacttcrtagtggtgttgtttatcaataattgatacaatataaaattcttggggacagcttcttgcatccccagcatagagaacagtgtgggtcagataagggtcca

SEQ ID NO: 20737 - DNA, 201 bp, Homo sapiens
cccctgcttatctgaatgaatgtgctcagatggggctttggtgctcgtgggaagaaaccactgcagagcgagttaacagtctactgtgcgtgttgagggtrcaggctccggcaccaaagctcaaccctgccgctcactgcttctgtgaccttgggtgagttattgaacgtgccgcagcgctgtgagatggtgataatgacc

SEQ ID NO: 20738 - DNA, 201 bp, Homo sapiens
tctgtgggccttctctccagaaaaagcacacatttgcacacaattggaggtagttgatgagcctcctaacacccacccatgcacctcccaggggctgtgtmccccaggttgtgaacagtcactctgtgtaaatagtgagacctacaggcagtaattcagtttggctgtgcttggctggtttatttagaaagatgataatgt

SEQ ID NO: 20739 - DNA, 201 bp, Homo sapiens
ggctgtgtcccccaggttgtgaacagtcactctgtgtaaatagtgagacctacaggcagtaattcagtttggctgtgcttggctggtttatttagaaagaygataatgttttccatattatcaaaacaagaatcaggcagagacttttgaagtttggttgcgtggtatatttgttacctattgctgcttaacaatttacct

SEQ ID NO: 20740 - DNA, 201 bp, Homo sapiens
gtactgtgattgtgaacaacaaagagaaaaccactgcagagtaccaggtgttggtggaaggtgagtccttggaactgagcacaggcaagcagatggagcawagcacacagtggcgtgaataacagctgtgaatgaatagtgacactggacttaactctccacccatcaccctctcattcatctgcctggcattttccttac

SEQ ID NO: 20741 - DNA, 201 bp, Homo sapiens; identical to SEQ ID NO: 10220

SEQ ID NO: 20742 - DNA, 201 bp, Homo sapiens
aattgtgaataggagttcattcatgatttagctctctgcttgcctattttggttcactccaggaaccacagaggacacattaataactggaagtaaaactsctgccccagtcacctcaacaggctcaacaacagcgacactagagggacaatcaactgcagcttcttcaaggacctctaatcaggacatatcagcttcatc

SEQ ID NO: 20743 - DNA, 201 bp, Homo sapiens
gcaattcgagctaaggagacagcagcagcaaccctccctcctggccctcagagctgaggatcaacccacaggggtgcggtggaggctgagagcaggggtgyggtggaggctgagagcaggggtgcggaacccgagtcagcaggggcagtgaggaggctgccgcagtagtcaaagcgacggggaggatgtggcaaagcaaac

SEQ ID NO: 20744 - DNA, 201 bp, Homo sapiens
caggcaggaggatgtggcacctggtaaggagaaggaggccgggctgggcaggaggatgtggcacctggtaaggagaaggaggccgggccgggcaggaggawgtggcacctggtaagaagaaggaggctgggccaggcaggaggatgtggcacctggtaaggagaaggaggccgggctgggcaggaggatgtggcacctggt

SEQ ID NO: 20745 - DNA, 201 bp, Homo sapiens
ttacacaggtatatatgtgccatggtggtttactgcacctatcaacccatcacctgcatgtattagctatttatcctgacgctcttcctccccttgtcccrtccctgacaggcgccagtgtgtgttgttcccctctctgtgtccatgtgttctcattgttcaactccaacttatgagtgaaaacatgcagtgtttggtttt

SEQ ID NO: 20746 - DNA, 201 bp, Homo sapiens
tgtgtacagacggtgagaagagggagggagtgtgtacagatcgtgagaaaagggaggggcgtgaagtctatttttaggctgaggaaaacggcctttgcagytgcctcaaggttgtatttggaaacccaagagaaaggggaaaacatgtttaaaatgcattttgaatttaagctgccggctacaaaactgaacaatgtctcc

SEQ ID NO: 20747 - DNA, 201 bp, Homo sapiens
aaaagataaagataaagaaacaggcaacgtcaccctctctccagcctcggctgaaggcaacaaaggccacagggcctgggatgtattccacagatgtgtaygaagtcactgctgtatgccaagtctcgtttcaggctctggagatcacaagagatcagttattccaagggtatcttgagttagtgtctttcctcatcttga

SEQ ID NO: 20748 - DNA, 201 bp, Homo sapiens
tctaggacacagcactggatgcacacagtgaagagtgaaacagacgtggcccagtctcttggcactaaaatcttggtgcagacagacatcaaataattacrgaaatgttctcaactgcacatgtggtaaatgcagtgtggaaaagtacagggtgtgctgagagctgcatttcgaatggccagagagtaggggaggtgcatc

SEQ ID NO: 20749 - DNA, 201 bp, Homo sapiens
taaatgccttttcacccttttcctggagattctgaagaagtctcaggaactgggcatttgtgttgcacgtgaggccttgcaatggcggccctgcttggagraagggcactggcctgggttgcccgcagctccactccccgtgtatgtgtttagggaccacagaggacagacatcgactctctgtagagatgccgccccgcc

SEQ ID NO: 20750 - DNA, 201 bp, Homo sapiens
ttaatttttgtataaggtgtaaggaaggggtccagtttcagttttctgcatatggctaaccagttttcccagcaccatttattgaatagagaatcctttcmccattgcctgcttttgtcaggtttgtcaaagatcagatggttgtagatgtgtggtcttatttccaaggtatctattctgttccattggtttatatgtcag

SEQ ID NO: 20751 - DNA, 201 bp, Homo sapiens
ggaaaagcacgggggcgtgacccggagaaggagtgaaggactgttggtgtgcaagggcgtctccatgacgacccgaagaagctaggcatgtcgtggagcgctgagtcctttgcgtcgctaaggggaccaagtggagctgggccaggagaggagatggtcgtggctgggagatggcacccacacatctgaccgggcatgacc

SEQ ID NO: 20752 - DNA, 201 bp, Homo sapiens
agaggagcgcagaggggcaagacctggggtgggcgtggaaaagcacgggggcgtgacccggagaaggagtgaaggactgttggtgtgcaagggcgtctccrtgacgacccgaagaagctaggcatgtcgtggagcgctgagtcctttgcgtcgctaaggggaccaagtggagctgggccaggagaggagatggtcgtggct

SEQ ID NO: 20753 - DNA, 201 bp, Homo sapiens
ctgcagatgtggttgaaggagtctccacgggaatcatgactcccagagcgaggctggggcttggggcgccggggaggcagcttggatttaggagccccagkgccaagtctttgccgtgaactgttctggcccctgtgaccaggccctgccccgtgtctccccagggccccggtcccctgtgtaaaaagcagtggtgaacgg

SEQ ID NO: 20754 - DNA, 201 bp, Homo sapiens
cttacctctgagctcgggtttaaaagcctccatttgggtcacggccttgcctggggctcgtagccccggcattggccttgggctcctccgtgtacagagcygggaggggagggatgccaggcctgtgggagatgttccctcgggggcccccgtcctcttccccacactttccaggctgtccctctggcttcaggaccaagt

SEQ ID NO: 20755 - DNA, 201 bp, Homo sapiens
agcactgggattcaggcatgaatcaccacacccagctggaatgcaattatttttaaaattttgattatggatatagaactttgctaataatgtatatgttygggaagtttctatgtaaacaattatgttatctgcaaataaccataggcttgtttcatcccttccatacccaaaatcacatttctgtactctcatactttt

SEQ ID NO: 20756 - DNA, 201 bp, Homo sapiens
ctttcaccattgcctgcttttgtcaggtttgtcaaagatcagatggttgtagatgtgtggtcttatttccaaggtatctattctgttccattggtttataygtcagttttggtaccagtaccatgctgttttggttactgtagccttgtagtatagtttgaagtcaggtagcctcccactttgttctttttgcttaggatt

SEQ ID NO: 20757 - DNA, 201 bp, Homo sapiens
cgcagtagtcaaagcgacggggaggatgtggcaaagcaaacaagaggacgcgatggggtgaacacttgggaggaagatcaacgagtactgactaggacacrggggacaaggaagagaaagaaatccagaggacccacagctttctgggctggatgtctgggggactgttgttagcatgaacagaaggaaggaagaaagctt

SEQ ID NO: 20758 - DNA, 201 bp, Homo sapiens
gcttcctcagtgtccacaggtcacgccacctctcttcttgtcaccgacgcttcctcagtatccacaggtgacaccacccctcttcctgtcaccgacactamctcagcatccacaggtgacaccacccctcttcatgtcaccgacgcttcctcagtatccacaggtcacgccacctctcttcctgtcaccagcctttcctca

SEQ ID NO: 20759 - DNA, 201 bp, Homo sapiens
aggcagggcaggccattttccaaagcaattcgagctaaggagacagcagcagcaaccctccctcctggccctcagagctgaggatcaacccacaggggtgyggtggaggctgagagcaggggtgtggtggaggctgagagcaggggtgcggaacccgagtcagcaggggcagtgaggaggctgccgcagtagtcaaagcga

SEQ ID NO: 20760 - DNA, 201 bp, Homo sapiens
cgcttcctcagtgtccacaggtcacgccacctctcttcttgtcaccgacgcttcctcagtatccacaggtgacaccacccctcttcctgtcaccgacactwactcagcatccacaggtgacaccacccctcttcatgtcaccgacgcttcctcagtatccacaggtcacgccacctctcttcctgtcaccagcctttcctc

SEQ ID NO: 20761 - DNA, 201 bp, Homo sapiens
gtaaagataggtcatacttgaacacaggatttcttacctacaaataacctactcaagcttagtagattgagttatctgcaaattgttttcctaaacagctraataatcaatctattgcaggagtggcttcagaggtattgtttaaatgatggtgaaagacaaatgcaataactgtagttttgtcgtaacgaatgctaatct

SEQ ID NO: 20762 - DNA, 201 bp, Homo sapiens; identical to SEQ ID NO: 3845

SEQ ID NO: 20763 - DNA, 201 bp, Homo sapiens; identical to SEQ ID NO: 3847

SEQ ID NO: 20764 - DNA, 201 bp, Homo sapiens; identical to SEQ ID NO: 3848

SEQ ID NO: 20765 - DNA, 201 bp, Homo sapiens; identical to SEQ ID NO: 3837

SEQ ID NO: 20766 - DNA, 201 bp, Homo sapiens
gcccaacaccacagcggctaatgtttgtatttttagtagagatggggtttcaccatgttggccaggctggtctcgaactcctgacctcaggtgatccgctygcctcggctcccaaagtgctgggattataggcgtgagctactgtgcctggccctacttcatagaggtttaaatgccttttcacccttttcctggagattc

SEQ ID NO: 20767 - DNA, 201 bp, Homo sapiens; identical to SEQ ID NO: 3846

SEQ ID NO: 20768 - DNA, 201 bp, Homo sapiens
ttttttaatttttaattttttttttgagacggagtctcactctgtcacccaggcaggagtgcagtggtgcaatctcggctcactgcaagctccgcctccccgggttcacgccattctcctgcctcagcctcccgagtagctgggactacaggcgcccgccaccacgcccggctaatttttttgtatttttagtagagacgg

SEQ ID NO: 20769 - DNA, 201 bp, Homo sapiens
actctttacctttatgattttcttacctccaggaaagaacagggtcagctcgtccacccagagctggagggactgttgggggaccacgccacttccccacrgtatccgcattattatggcgtggcccaggctttggcctggggccatgaacagactttcagcttctagaagcaagtggtcacagggcctccgtgaccctcg

SEQ ID NO: 20770 - DNA, 201 bp, Homo sapiens
agcctgggcaacaagaagtgaaactccatctggaaaaaaaaatgtttaaaggctatgtccaatgttctataagggcagggacacacacacacagtgtctcwcacacacacacacacacacacacacacacacacacacacacagtgtcacacatacatactagcaacacacagaacgggcataaagtaagatgtattaagg

SEQ ID NO: 20771 - DNA, 201 bp, Homo sapiens
aggcacactcttgcacactgccaacaggtctgtaaattggcataagctttctgcaaagaaatttggcagtctgtattaataacatgaaaaattttataacrgcataaaccagcaattccactgatagaaatttatgttaaggagatgagctgaaataatgtaaacaaaacattagacacgaagatagtcatcagggcttta

SEQ ID NO: 20772 - DNA, 201 bp, Homo sapiens
ggagtgcagtggcgcgatctcggctcactgcaacctccacctcccaggtttgagagattctcctgcctcagcctcctgagtagctgggattacaggtgcaygccaccatgcctgggtaatttttgtatttttagtagagatggggtttcatcatgttggccaggctggtcttgaactcctgacctcaaatgatccacccgc

SEQ ID NO: 20773 - DNA, 201 bp, Homo sapiens
cacctgcatcagaatcactctggacatgtgttaaaatgctgatgcaccctctgccttttgagaaccactttttttttttttttttttttcagagaaggggycttgagctattgcccaggctggtctcaaactcctggcctcaaggaatcctcccgcctctgcctgtccgtgctgggattttaggcatgagctaccatgccc

SEQ ID NO: 20774 - DNA, 201 bp, Homo sapiens
tttaccttaaatatacgtctttcttactgctaggctgagttcccgccccagcatgttctgagaaattgagtcaaaataactgagtctgttggcacctcatmgacgatttcttcatagacggtttttttattgttgctgttgttgttggttttttgggtttgtttgtttgttttttgagacagagtttctctctgtccccca

SEQ ID NO: 20775 - DNA, 201 bp, Homo sapiens
ctccaatatcaactctttaggcgcaaatctcccagctctctgctccccaagtttatgcgtttggccagagtgagaacaagtttcagttgtctgacaatctsacggaatctgaagggcctgacttgcatcctggtgagagccaaggtcagttcattctggccaacacttgagcagcaagaacaaggctatgagtatttttta

SEQ ID NO: 20776 - DNA, 201 bp, Homo sapiens
agggagccccggggccccggggagggtgcggagaaggctctgggcattgaaggagatgaagggcacggctttggttctttcagtgaagtagaaaatggagkgtcacggggagagaagagagaggagagacctgtttctctccaatatcaactctttaggcgcaaatctcccagctctctgctccccaagtttatgcgtttg

SEQ ID NO: 20777 - DNA, 201 bp, Homo sapiens
cagcttccacaggtgacaccacccgtcttcctgtcaccaacgtttcctcggcatccacaggtcatgccacccctcttcctgtcaccagcacttcctcagcktccacaggtgacaccacccctcttcctggcaccgacacttcctcagtatccacaggtcacaccacccctcttcttgtcaccgacgcttcgtcagtatcca

SEQ ID NO: 20778 - DNA, 201 bp, Homo sapiens
caccgacgcttcctcagtatccacaggtgacaccacccctcttcctgtcaccgacactaactcagcatccacaggtgacaccacccctcttcatgtcaccracgcttcctcagtatccacaggtcacgccacctctcttcctgtcaccagcctttcctcagcatccacaggtgacaccacgcctcttcctgtcactagccc

SEQ ID NO: 20779 - DNA, 201 bp, Homo sapiens; identical to SEQ ID NO: 3839

SEQ ID NO: 20780 - DNA, 201 bp, Homo sapiens
ccaaaactctccacagacccctctgcccctctgggaaaccccactgtgctccaggacactcaaaaggaaaggatccctggacaagaggtcctgccaggaamatcagccaaattttggccaacgaccagcaaggtgcacagggaagagcaggggctgaaactcagaggtccagcatcagcgacgcccttggcagcccaggga

SEQ ID NO: 20781 - DNA, 201 bp, Homo sapiens
agcccaggccagaggaaaaacacagggtttccacaaaggagctgccgcaatgagggtttccttaaggaacagccctggctctcaagggttaaaggataagrcacagcagacagaggtgggctagacaaggacagatggaaatttggtgtctactggtcgccccaggcaggaatgactcagaaggaagcctggccgtcctgg

SEQ ID NO: 20782 - DNA, 201 bp, Homo sapiens
tcctggcctcgagtgatcctcccaccttggcctcccaaaatgctgggattacagacatgagccaccatgcctggcctctgcctgggaaataattttttttwaaaaagtggttatggtcaataatattagcttcttggtagtctgtgaccagggcaagagtatatgcatttaccccttgggttttttaccagattggcacag

SEQ ID NO: 20783 - DNA, 201 bp, Homo sapiens
cctcgtttgtgtctccctccagggatgatgcccggatggaaggaggagccacgttcctccacaggtgtcctccacaacaggtgtcctcacaacaggtgtcstaacaacaggtgtcctcacaacaggtgtcctaatactcccgcagcccctcagcatctacaggctcactcccaccctacaacctttcagataggtgttatc

SEQ ID NO: 20784 - DNA, 201 bp, Homo sapiens
acgaaaaagaaaagtagaaatttaatttatttttaagaaagataatgctataattcaagttgagagagttaacccggcttatagcaggggtactgtttgcytcttcccatggagtttaacacagttaattcaccattctagtctaacctcaccttcctcctcacaaggaagacaggcgggagctggagaagaccattggct

SEQ ID NO: 20785 - DNA, 201 bp, Homo sapiens
aattccagaaagtggacttgaagctgaattcttccctgagactttgtctctctgagtatcatcttgccaactatctaggagcactgaggttgaaaaaaagrgtgggagcggtggctcacacctttaatcccagtactttgagagtctgaagcaggaggatcgcttgaggccgggagttcgacaccagcctaggcaacatag

SEQ ID NO: 20786 - DNA, 201 bp, Homo sapiens; identical to SEQ ID NO: 3844

SEQ ID NO: 20787 - DNA, 201 bp, Homo sapiens; identical to SEQ ID NO: 3843

SEQ ID NO: 20788 - DNA, 201 bp, Homo sapiens
gttaacttcttcactcctgagtgtttccctttctttcttctcatctcacctctgcattagaaaacatttattacatttataacctgtatttatctggcatyggctggttttgctattagaggcttatctcttcttccatattgctgaaatggagctgtgccacttttataaagaactacaaaaatctttactttaaaaaaa

SEQ ID NO: 20789 - DNA, 201 bp, Homo sapiens
catttattccatttttaattgtttctatagtgagttctggtctgttactatatccttcattctgcttcctttttcttttttcttcctggtctttctagtcyaccttttttgctggcggttccagctttttgcagggaaactcagttcagtgtcgtgaccgagggtcttgcttcctttcctttttcagcctttcagtcagca

SEQ ID NO: 20790 - DNA, 201 bp, Homo sapiens
gtacccttttttgtttctaataatcttgatatctgtgtcttttctgtctctctctctccctcctcccacacccccccccactttctttctcttgccaggtrtttgttttattttcaaagaactaatctttggcttcatttattccatttttaattgtttctatagtgagttctggtctgttactatatccttcattctgct

SEQ ID NO: 20791 - DNA, 201 bp, Homo sapiens; identical to SEQ ID NO: 3838

SEQ ID NO: 20792 - DNA, 201 bp, Homo sapiens
ttcacgaagatggtatgtggctagtgcaggtgctgtgaaatattttaaacaaaaaaagccaatatttaaacattctgcctgggaaatatttttctttattwaatatctatttttattattattattattatttttattttttaagacacagggtctcgctatcttgcccaggctggtctcaaactcctggcctcgagtgat

SEQ ID NO: 20793 - DNA, 201 bp, Homo sapiens; identical to SEQ ID NO: 3842

SEQ ID NO: 20794 - DNA, 201 bp, Homo sapiens
gatggcagaggcttgacagagccttcaaggactcagatgtggggaacgtctctacctcagtgccaacgccagtgccctcctcgtccctggatggagactcytcctctgagagaatgtcttaaaaactatccgttttactcaatgacacacgtgtgtcttctcacagtgatcttgtcaccttaaggtgtcaacagccttcac

SEQ ID NO: 20795 - DNA, 201 bp, Homo sapiens
tgtatgccaagtctcgtttcaggctctggagatcacaagagatcagttattccaagggtatcttgagttagtgtctttcctcatcttgaattctagggaartacccagtggacacaaccctggtcacagttgattctgggctgatacacaaatagcattagctccctgccaaaggcggtggggccagcggttcagcgtctg

SEQ ID NO: 20796 - DNA, 201 bp, Homo sapiens
aaggcaacaaaggccacagggcctgggatgtattccacagatgtgtatgaagtcactgctgtatgccaagtctcgtttcaggctctggagatcacaagagrtcagttattccaagggtatcttgagttagtgtctttcctcatcttgaattctagggaaatacccagtggacacaaccctggtcacagttgattctgggct

SEQ ID NO: 20797 - DNA, 201 bp, Homo sapiens
ctctccagcctcggctgaaggcaacaaaggccacagggcctgggatgtattccacagatgtgtatgaagtcactgctgtatgccaagtctcgtttcaggckctggagatcacaagagatcagttattccaagggtatcttgagttagtgtctttcctcatcttgaattctagggaaatacccagtggacacaaccctggtc

SEQ ID NO: 20798 - DNA, 201 bp, Homo sapiens
caccagcacttcctcagcatccacaggtgacaccacccctcttcctgtcaccgacacttcctcagcatccacaggtcacgccacccatcttcctgtcaccrgcctttcctcagcttccacaggtgacaccacccgtcttcctgtcaccaacgtttcctcggcatccacaggtcatgccacccctcttcctgtcaccagcac

SEQ ID NO: 20799 - DNA, 201 bp, Homo sapiens
cttgcctcggctcccaaagtgctgggattataggcgtgagctactgtgcctggccctacttcatagaggtttaaatgccttttcacccttttcctggagaytctgaagaagtctcaggaactgggcatttgtgttgcacgtgaggccttgcaatggcggccctgcttggagaaagggcactggcctgggttgcccgcagct

SEQ ID NO: 20800 - DNA, 201 bp, Homo sapiens
ggacttgaacctgggaggtggaggttacagtgagctgagatcgcaccactgcactcctgcctgggcgacagagcgagactccatctcaaaaaaaaaaaaaagataaagataaagaaacaggcaacgtcaccctctctccagcctcggctgaaggcaacaaaggccacagggcctgggatgtattccacagatgtgtatgaa

SEQ ID NO: 20801 - DNA, 201 bp, Homo sapiens
gggacttgaacctgggaggtggaggttacagtgagctgagatcgcaccactgcactcctgcctgggcgacagagcgagactccatctcaaaaaaaaaaaaaagataaagataaagaaacaggcaacgtcaccctctctccagcctcggctgaaggcaacaaaggccacagggcctgggatgtattccacagatgtgtatga

SEQ ID NO: 20802 - DNA, 201 bp, Homo sapiens
accgctcttcctgtcaccagcacttcctcagcatccacaggtgacaccacccctcttcctgtcaccgacacttcctcagcatccacaggtcacgccacccmtcttcctgtcaccggcctttcctcagcttccacaggtgacaccacccgtcttcctgtcaccaacgtttcctcggcatccacaggtcatgccacccctctt

SEQ ID NO: 20803 - DNA, 201 bp, Homo sapiens
tgaggatgaaacgagacagcatctggtgtaaagtagaaaaggcataaagggccgggcgcggtggctcacgctgtaatcccagcacttttggaggcccaggygggtggatcacctgaggtcaggagttcaagaccagcttggccaaccctgtctccactaaaaataaaaaattttgccgggcgtggtggcgagcgcctgtaa

SEQ ID NO: 20804 - DNA, 201 bp, Homo sapiens
aggggctgaaactcagaggtccagcatcagcgacgcccttggcagcccagggaacacaggcaacgccttttggctctggagtcttaggctcttcatcggcraactgagcccagggggaaggggctactatgtagggttgtcatgaggatgaaacgagacagcatctggtgtaaagtagaaaaggcataaagggccgggcgc

SEQ ID NO: 20805 - DNA, 201 bp, Homo sapiens
ctatcactgatggacatttgggttggtttcatgtctttactattgtaaatagtgctgcagtaaacatacgtgtgcatgtatctttataacagaatgatttmtattcctttgggcatatacccagtaatgggattgctgggtcaaatggtatttctggttctagatccttgaggaatcgccacactgtcttccacaatggtt

SEQ ID NO: 20806 - DNA, 201 bp, Homo sapiens
ggggttcgccctgttagccaggatggtctcgatctcctgacctcatgatccgcccacctcagcctcacaaagcgctgggattacaggtgtgagccaccackcctggcctaaactatatattttttaaagcataaaaacatcctggaaggaagcattgtctggtagcaagattatgggttttgatctttcaactataaatgt

SEQ ID NO: 20807 - DNA, 201 bp, Homo sapiens
acgccattctcctgcctcagcctcccgagtagctgggactacaggcgcccgccaccacgcccggctaatttttttgtatttttagtagagacgggggttcrccctgttagccaggatggtctcgatctcctgacctcatgatccgcccacctcagcctcacaaagcgctgggattacaggtgtgagccaccactcctggcc

SEQ ID NO: 20808 - DNA, 201 bp, Homo sapiens
atcaactctttaggcgcaaatctcccagctctctgctccccaagtttatgcgtttggccagagtgagaacaagtttcagttgtctgacaatctcacggaayctgaagggcctgacttgcatcctggtgagagccaaggtcagttcattctggccaacacttgagcagcaagaacaaggctatgagtattttttagaataaa

SEQ ID NO: 20809 - DNA, 201 bp, Homo sapiens
agggcccgggagcgtggacggtggagcaggacccgtcagcttcaatgagggtgaggctgggtggtggcacggggccgccggccagggagagcacgtggagsggggggcgcaatacacatctgtcagattcatgaatgaatgaatggatggggccgaactgatgagacgcgtgaggactggagaaaatcgtttttgctgttg

SEQ ID NO: 20810 - DNA, 201 bp, Homo sapiens
cctctgcatgtggcagtccaagaacttggggcaggtcagtgaccatttctccatctttgcctcagctctccatccactcggtggcagtcccagagctgaamagctcgcagcttccgagcaatggctcttaccccgagcccccggccctgctacttccaaggcatataatatcactcggtctcttcaaatctcaatttccct

SEQ ID NO: 20811 - DNA, 201 bp, Homo sapiens
gcgacgcccttggcagcccagggaacacaggcaacgccttttggctctggagtcttaggctcttcatcggcgaactgagcccagggggaaggggctactaygtagggttgtcatgaggatgaaacgagacagcatctggtgtaaagtagaaaaggcataaagggccgggcgcggtggctcacgctgtaatcccagcacttt

SEQ ID NO: 20812 - DNA, 201 bp, Homo sapiens
ccctctgcatgtggcagtccaagaacttggggcaggtcagtgaccatttctccatctttgcctcagctctccatccactcggtggcagtcccagagctgaraagctcgcagcttccgagcaatggctcttaccccgagcccccggccctgctacttccaaggcatataatatcactcggtctcttcaaatctcaatttccc

SEQ ID NO: 20813 - DNA, 201 bp, Homo sapiens
gcaacaaaggccacagggcctgggatgtattccacagatgtgtatgaagtcactgctgtatgccaagtctcgtttcaggctctggagatcacaagagatcwgttattccaagggtatcttgagttagtgtctttcctcatcttgaattctagggaaatacccagtggacacaaccctggtcacagttgattctgggctgat

SEQ ID NO: 20814 - DNA, 201 bp, Homo sapiens; identical to SEQ ID NO: 3840

SEQ ID NO: 20815 - DNA, 201 bp, Homo sapiens
cgcgtctggggtctgccatgcgtctgcactgaggttctgccacgcgtctggggtctgccacgcgtctggggtctgccacgcgtctggggtctgccacgcgyctgcactgagcagatattccaagcacaccacccctttccaaaagacggcatacagtgcatttctgttcctgcccctcacccacatggttccccgcttccc

SEQ ID NO: 20816 - DNA, 201 bp, Homo sapiens
gctcctgccctgcctctcagcaggctaagaacagtcgccgagggaaaatatttcttgggcgcatatttgaggagcttcctgggagtgagtcagaaggcgartgccgtttaaaggctgcaagagaagccatgctggtgaagcggacccttccacctcgggatgtttcaggactaggctgagggcaaaggaaactgccaccac

SEQ ID NO: 20817 - DNA, 201 bp, Homo sapiens; identical to SEQ ID NO: 3849

SEQ ID NO: 20818 - DNA, 201 bp, Homo sapiens
ctgacagaaaaatgaccacgggccgggtgcagtggctcacgcctgtaatcccagcactttgggaggccaaggcgggcggatcatctgagttcaggggttcragaccaacctggccaacatggtgaaacctcgtccctactaaaaatacaaaaaaaattagccgggcgtggtggcaggtgcctgtagtcccagctactaggg

SEQ ID NO: 20819 - DNA, 201 bp, Homo sapiens
caacaaacggcatggccttctagttttacttgagtttagcttaatttcccaaaaggacagtgctcaaggtcactcattctagttcactgctctagttcagygtttacaaaataaacggattctgaaaagaaaatggtttgtatagacagacttaatctaattggcctttatattagcagaaagtgaaaaaacaatgactat

SEQ ID NO: 20820 - DNA, 201 bp, Homo sapiens
aaattttgatattttttgagaagttcctgtacaacaaacggcatggccttctagttttacttgagtttagcttaatttcccaaaaggacagtgctcaaggycactcattctagttcactgctctagttcagcgtttacaaaataaacggattctgaaaagaaaatggtttgtatagacagacttaatctaattggccttta

SEQ ID NO: 20821 - DNA, 201 bp, Homo sapiens
tccctggcttcctgaaggccactgctgggtgtccacaaggctttgggccccaggatctgacctcttcatatttgcggtcggcatcttcagcaatgtgcttkgcctctttcagttggatctcctgaatttccattttttcttcatctttttgggctcgactctcaatgactttcatgcctctgaaaagaaagacaagcaaga

SEQ ID NO: 20822 - DNA, 201 bp, Homo sapiens
ttgaaggtggaaccagataaggactacaggctgtagtcacaaattgttcttccaaaacactgcccttgcatttttttcccattgtttatagctgcagatgsctgactactccagtgtaattaaaatatagctctgcaaaagaaagatgttccattagcccctgcctcccctcaccaggagacagccttctgtggtttcgtt

SEQ ID NO: 20823 - DNA, 201 bp, Homo sapiens
aggagagaaaaaggagagggatgggaaaaaatgaaaactgagtcctagagacgaagggctgccttaaagtagccaaatcatcaggtattaaaatgtttagkttttccaggaacactgccccccaacctcgcaacagcagaaggcagggtgaccaaatccaacaactttgaagtgcgataatttggctccttttttggctgc

SEQ ID NO: 20824 - DNA, 201 bp, Homo sapiens
agtacttctatgcaatatggcaaatccttacttccaacagttgagcttaagggaaaatgccttttagaccacacaaggctgtgctggtctatacgaaccaygctttcctttactaccacaaagctgaatctgagtaataattcagctacagccagattacagtggaggtgggctcagaacacacgagcatctgactatttg

SEQ ID NO: 20825 - DNA, 201 bp, Homo sapiens
agaacctatttgtgggggaaggcaggtcagtcacacgttcaaaagttcacaaattaagaacatacaaatgacaggaccaccaaatttagaaaatgtcctamaatgtgcattttattccatatcattatacaatgtttacatatagttaaaactctcaagaaaacgtcctttaccagttgtatgtggtgtctaaatctttaa

SEQ ID NO: 20826 - DNA, 201 bp, Homo sapiens
atcgccctgacatgggcttgcctttttgtatgtgttttccccaccccctgacctagctggtatcttgtggatgtttctgtgacagtggtaaaagtaaatawattgcatttaaggggtaagcaggtgtttaaaaacaaaacaaaacaaaacaaaatgaaagaatgtggtcgcagctaaggaggttttcacatgttgtttaac

SEQ ID NO: 20827 - DNA, 201 bp, Homo sapiens
cgtcggcttcagcctaggtagagagtgaaaagcatttcagagttggggagaaagtgagggtggtagcttcaggaaatggctgggactgcaatgctgatttyagataggaagactgtcttgtggtgagctacctttaagtgcattacaagccctcatcaactctggagttctcggacacatttacacattgatttatacagt

SEQ ID NO: 20828 - DNA, 201 bp, Homo sapiens
accaatccacacctgattgtgtttccaacattaaccttcctgttgactctatcattggcactttgaatggaacttctcctgctttagtgaggattcctacrctgactaagcacactgtgttgctaaactctctacaaagtgtggcagcatcaacccgggaaatggcacatttgaaccaggatcgccctgacatgggcttgc

SEQ ID NO: 20829 - DNA, 201 bp, Homo sapiens
ttgttcaaagtagcaccaatccacacctgattgtgtttccaacattaaccttcctgttgactctatcattggcactttgaatggaacttctcctgctttartgaggattcctacgctgactaagcacactgtgttgctaaactctctacaaagtgtggcagcatcaacccgggaaatggcacatttgaaccaggatcgccc

SEQ ID NO: 20830 - DNA, 201 bp, Homo sapiens
ctggatctgctctgcttcagctgctgtggagctggtgtgcatgggtggcccaaaggcagggacaagacatgctcatatccttggaagtgttttcccttccrgttctatggagactcccagctgtctgaaacttcaagtgcccaaactcagtgatgcttttggtttggcccaccagagcagctgtagctatggcctggccct

SEQ ID NO: 20831 - DNA, 201 bp, Homo sapiens
aatgactattctaggttatgacaaaaagggtgaacacaagagtgcaaagatggagattagggagcaaggaaggcatggtggtgagtttattacattagcawgagggcagggtgtaagcaggcagagtggatgaacgtttacatggaagtcatatcgttgagagcgtggtccagctcctcgctgatggctttgtacttcagt

SEQ ID NO: 20832 - DNA, 201 bp, Homo sapiens
ttttgttcaaagtagcaccaatccacacctgattgtgtttccaacattaaccttcctgttgactctatcattggcactttgaatggaacttctcctgcttwagtgaggattcctacgctgactaagcacactgtgttgctaaactctctacaaagtgtggcagcatcaacccgggaaatggcacatttgaaccaggatcgc

SEQ ID NO: 20833 - DNA, 201 bp, Homo sapiens
aataaaacctaagtgccttagggaagaaatgcttaagtataatttttccctcctccttcaggatataaagtattttgttaagataatatatgacttaaaawaacccctaaatccttactttgaattcatacttggaagaagatgggttcttctaaaaacaagaccacaatcaccacatcattcccaatttaattaggaagt

SEQ ID NO: 20834 - DNA, 201 bp, Homo sapiens
gaccacagggggaccttttgttcaaagtagcaccaatccacacctgattgtgtttccaacattaaccttcctgttgactctatcattggcactttgaatgraacttctcctgctttagtgaggattcctacgctgactaagcacactgtgttgctaaactctctacaaagtgtggcagcatcaacccgggaaatggcacat

SEQ ID NO: 20835 - DNA, 201 bp, Homo sapiens
aatccttcacaagcttcaaagctcaacatttaggatatctgtgagatagagtggttattactaaaataaaacctaagtgccttagggaagaaatgcttaartataatttttccctcctccttcaggatataaagtattttgttaagataatatatgacttaaaaaaacccctaaatccttactttgaattcatacttggaa

SEQ ID NO: 20836 - DNA, 201 bp, Homo sapiens
agaccacagggggaccttttgttcaaagtagcaccaatccacacctgattgtgtttccaacattaaccttcctgttgactctatcattggcactttgaatrgaacttctcctgctttagtgaggattcctacgctgactaagcacactgtgttgctaaactctctacaaagtgtggcagcatcaacccgggaaatggcaca

SEQ ID NO: 20837 - DNA, 201 bp, Homo sapiens
ttaacatgaaggactgaaaagagtggaaatccacactgattgttatcctacagattgtcatgagctgcacgtgtgccaatcagaaaggaatggaagtctcrgaagagcagcgtggcttacagacccttggctttagtgaattcaggcatgcgggatccatagtctcatcttgtagtaaaactcaagacaaaataaattagt

SEQ ID NO: 20838 - DNA, 201 bp, Homo sapiens
cagctcttaaaagatgcctttcccccacaccatcctcctggcctaccttctcagcctgagcctccagtgacttcaagttgttcgtcacagttttcaattcytcttcaagctcggcacatttgctaatgttttcgatcagaggcagaaagggtgggagacaagccaaaggaaggaggagagaaaaaggagagggatgggaaa

SEQ ID NO: 20839 - DNA, 201 bp, Homo sapiens
tcatcttgtagtaaaactcaagacaaaataaattagtgttggacagagttctacattgtacaatgttgaacaaaagaccacagggggaccttttgttcaargtagcaccaatccacacctgattgtgtttccaacattaaccttcctgttgactctatcattggcactttgaatggaacttctcctgctttagtgaggatt

SEQ ID NO: 20840 - DNA, 201 bp, Homo sapiens
ggggaccttttgttcaaagtagcaccaatccacacctgattgtgtttccaacattaaccttcctgttgactctatcattggcactttgaatggaacttctyctgctttagtgaggattcctacgctgactaagcacactgtgttgctaaactctctacaaagtgtggcagcatcaacccgggaaatggcacatttgaacca

SEQ ID NO: 20841 - DNA, 201 bp, Homo sapiens
atgttgaaactaaaatgtcaataaataagaagtaaaaagaatagcaaacagaaatagcttacacagtgtttatttgacactgaaacgaagagcttctgtamaatagaaagcacagtgtgtgcctggctctaaggcaggatgctaagagagagaaccagggtcagctggagaatagacaaatgcagagctcagagaggtggg

SEQ ID NO: 20842 - DNA, 201 bp, Homo sapiens
aaaatgaagcacatcacctataaaatggatcagaaactacttgtcagtttcagtcacctctgtgagaaatggcagttagcacagtacataaactccaaggygacctttgaatattcctgacttggatcattggaactttaaaatgaaaaggccctgaccggttccatgaaaacaaactcatttaaaatccagttggcttca

SEQ ID NO: 20843 - DNA, 201 bp, Homo sapiens
gaggggagggcatctttgacccaaaggagccatggcacggattctcacagagcagtcaggtgcacctccaccaacaattcactgaggataaaatgcacgtrgggtttggtgaaggttcactgacggtgtgccgtgggaacagggagaggtaaaaaccaaatacagctgcagcactgttatacaaactgaagaagttacgaa

SEQ ID NO: 20844 - DNA, 201 bp, Homo sapiens
gcattctcacctctcactctcatctgctgccttctcagcttcctccagcttctgcaaagctgttgccagacgctcctgggcacgatccaactcttcctcarccagctggatgcgtctgttcagagaagctacgtcggcttcagcctaggtagagagtgaaaagcatttcagagttggggagaaagtgagggtggtagcttc

SEQ ID NO: 20845 - DNA, 201 bp, Homo sapiens
ggggagggcatctttgacccaaaggagccatggcacggattctcacagagcagtcaggtgcacctccaccaacaattcactgaggataaaatgcacgtggkgtttggtgaaggttcactgacggtgtgccgtgggaacagggagaggtaaaaaccaaatacagctgcagcactgttatacaaactgaagaagttacgaaca

SEQ ID NO: 20846 - DNA, 201 bp, Homo sapiens
agcttaatttcccaaaaggacagtgctcaaggtcactcattctagttcactgctctagttcagcgtttacaaaataaacggattctgaaaagaaaatggtytgtatagacagacttaatctaattggcctttatattagcagaaagtgaaaaaacaatgactattctaggttatgacaaaaagggtgaacacaagagtgca

SEQ ID NO: 20847 - DNA, 201 bp, Homo sapiens
gggagctcccagtcagaatggttctctcttccttgttgcctccaaatacacatgcctattagttcggactcgcttcactcctctatctccccatcagatgsccagcttattgaggacaaagagcctttccagcccatctctttaccacacccccactgcttcccacggtgttttgcacgtgacatatgcttgggggttcca

SEQ ID NO: 20848 - DNA, 201 bp, Homo sapiens
gtccaggctcctcctgggaacttgccctcatctcatgactccctctgccccagtcacatttgcttttctcttttcccaaacatcaaaacccttcccgtctsaggtcattttcactgctcttaccctatttctctaaatgctcacagcactgtccctttctccttcaggtcctggctcagaaatgtctcccatgccctccca

SEQ ID NO: 20849 - DNA, 201 bp, Homo sapiens
acagagcagagtggtgctggtggcaaggagaacagagggagaaccacagcagggaggacgcctggggatctggggtgctagagagtggggacggggggtamaacagagaagagagaatttaacagggagagcggcagagatgcagagatgggataagaggcggaaatatatggagattgaggacgatcgaagaattgggga

SEQ ID NO: 20850 - DNA, 201 bp, Homo sapiens
attataggaacctggtctccctgggtgaggataacttccctccagaagtggggatgtgcccttgtggatctttgtattttctcttgttgcctcttgggagycacatccttgcttggctaaaatggaagccgtattgagttagaaatgaaaagcttcatgatgtagcatctggactttcactgtcccctttagatgttctgc

SEQ ID NO: 20851 - DNA, 201 bp, Homo sapiens
ttataggaacctggtctccctgggtgaggataacttccctccagaagtggggatgtgcccttgtggatctttgtattttctcttgttgcctcttgggagcyacatccttgcttggctaaaatggaagccgtattgagttagaaatgaaaagcttcatgatgtagcatctggactttcactgtcccctttagatgttctgca

SEQ ID NO: 20852 - DNA, 201 bp, Homo sapiens; identical to SEQ ID NO: 3855

SEQ ID NO: 20853 - DNA, 201 bp, Homo sapiens
acatatttctaacattcaggattgacttctaaagacttggtacgtgaggaaaaaacacggaagaggaagaggaaagcaaaggagtcagggatggctcttcytcaggtgagatgatattctcgggggattgttctgtctccttcctttcagaaatgctgatcttggagttgggaatcttctctgagtctcaagtgtcctgcc

SEQ ID NO: 20854 - DNA, 201 bp, Homo sapiens
tataggaacctggtctccctgggtgaggataacttccctccagaagtggggatgtgcccttgtggatctttgtattttctcttgttgcctcttgggagccrcatccttgcttggctaaaatggaagccgtattgagttagaaatgaaaagcttcatgatgtagcatctggactttcactgtcccctttagatgttctgcat

SEQ ID NO: 20855 - DNA, 201 bp, Homo sapiens
ccagcccagctccccactgctgcagcgtgtgagggcttctccaggagggaagcgagagttttcttatagaaatttattatccctggtgcagtgggcagcasaggtgaccatattttttcagagtgagggcacctttgtatgtgtcattgtgttacaggcaggaggtgtgttgattctgagcagtaaacaacatatttctaa

SEQ ID NO: 20856 - DNA, 201 bp, Homo sapiens; identical to SEQ ID NO: 3858

SEQ ID NO: 20857 - DNA, 201 bp, Homo sapiens; identical to SEQ ID NO: 3859

SEQ ID NO: 20858 - DNA, 201 bp, Homo sapiens; identical to SEQ ID NO: 3861

SEQ ID NO: 20859 - DNA, 201 bp, Homo sapiens; identical to SEQ ID NO: 3860

SEQ ID NO: 20860 - DNA, 201 bp, Homo sapiens
tctccctgggtgaggataacttccctccagaagtggggatgtgcccttgtggatctttgtattttctcttgttgcctcttgggagccacatccttgcttgrctaaaatggaagccgtattgagttagaaatgaaaagcttcatgatgtagcatctggactttcactgtcccctttagatgttctgcattcttcatgatagc

SEQ ID NO: 20861 - DNA, 201 bp, Homo sapiens
gataacttccctccagaagtggggatgtgcccttgtggatctttgtattttctcttgttgcctcttgggagccacatccttgcttggctaaaatggaagcygtattgagttagaaatgaaaagcttcatgatgtagcatctggactttcactgtcccctttagatgttctgcattcttcatgatagctcagtgggggttcc

SEQ ID NO: 20862 - DNA, 201 bp, Homo sapiens
ccctccagaagtggggatgtgcccttgtggatctttgtattttctcttgttgcctcttgggagccacatccttgcttggctaaaatggaagccgtattgakttagaaatgaaaagcttcatgatgtagcatctggactttcactgtcccctttagatgttctgcattcttcatgatagctcagtgggggttccagaagtaa

SEQ ID NO: 20863 - DNA, 201 bp, Homo sapiens
aaattagatacagagatgatcatggacaattatcaatcattattaacattagcttttaatattactctttgttgcattattaatataacctaggaataacyggcaggtatagggtcaggtgctgaagggacatggtgagaagtgacctagaaggcaagaggtgagtcctctgtcacacccgcataagggccgcttgagggg

SEQ ID NO: 20864 - DNA, 201 bp, Homo sapiens
ggcctggctttagtcctgtgcgcacacatccgcgcagaccaggaagcggatcccgtggagtgaaggtcgcaccgcggcggtgagttttgctctgtgttgtrttaagtctgcactccccatatccccggcacttccgtacctgggacgtggggtcaccacagacctgtaaattctcgcccatcttccttcaaccagagcaaa

SEQ ID NO: 20865 - DNA, 201 bp, Homo sapiens
tccagaagtggggatgtgcccttgtggatctttgtattttctcttgttgcctcttgggagccacatccttgcttggctaaaatggaagccgtattgagttwgaaatgaaaagcttcatgatgtagcatctggactttcactgtcccctttagatgttctgcattcttcatgatagctcagtgggggttccagaagtaaagt

SEQ ID NO: 20866 - DNA, 201 bp, Homo sapiens
atgatcatggacaattatcaatcattattaacattagcttttaatattactctttgttgcattattaatataacctaggaataactggcaggtatagggtsaggtgctgaagggacatggtgagaagtgacctagaaggcaagaggtgagtcctctgtcacacccgcataagggccgcttgaggggtccttggtcaagcgg

SEQ ID NO: 20867 - DNA, 201 bp, Homo sapiens
ttaatataacctaggaataactggcaggtatagggtcaggtgctgaagggacatggtgagaagtgacctagaaggcaagaggtgagtcctctgtcacaccsgcataagggccgcttgaggggtccttggtcaagcggtaacgccagtgtctgggaaggcacccgttacttagcagaccgcgaaagggggtctcctttcctt

SEQ ID NO: 20868 - DNA, 201 bp, Homo sapiens
ccaggaggcagaggctgcagtgagccaagatcatgccattgcactctgtccagtgacagagtgagactccatctcaaaaaaataaaaatacaaaatttttwaaaaaaagtcacaaagtgcctgttccacatggatatagataattttgtaacagttatttagaaaaatacggtgttaacatttttctttttgagaggtagt

SEQ ID NO: 20869 - DNA, 201 bp, Homo sapiens
gctgaagggacatggtgagaagtgacctagaaggcaagaggtgagtcctctgtcacacccgcataagggccgcttgaggggtccttggtcaagcggtaacrccagtgtctgggaaggcacccgttacttagcagaccgcgaaagggggtctcctttccttggaggagtcagggaacactctgctccaccagcttctcgtgg

SEQ ID NO: 20870 - DNA, 201 bp, Homo sapiens
ctgtccgccatgctgtaaaactcacacttgccaaaaatacatgggttagggtttctccccctccctcaggatgatgctagttagctgacacagatggtcayctccattaccaagtagagccaggatgaattatgtgtgaccaagggtgttgtcaagtcctcttccctgaggactgatcagtgtttatcttgaaaacatgta

SEQ ID NO: 20871 - DNA, 201 bp, Homo sapiens
ggggtccaaggcgggcagatcaagaggtcaggagatcgagaccatcctggctaacatggtgaaaccccgtctctactaaaaatacaacaaattagctgggygtggtggcgggcacttgtagtcccagctactcgggaggctgaggcaggagaatggcatgaacccgggaggcagagcttgcagtgagccgagatcgcacca

SEQ ID NO: 20872 - DNA, 201 bp, Homo sapiens
tgggaatcttctctgagtctcaagtgtcctgcctgacaggtttgctcacactcaactcatgccttccctcagtccctgtcatctcacttagattccatctcttgtgactgagtgacatgaacttgggaagaggctgcactgggcatggtcctgggaagggctcacacccagacatgtatggagatggggtgagggtcccgc

SEQ ID NO: 20873 - DNA, 201 bp, Homo sapiens
aaattagctgggtgtggtggcgggcacttgtagtcccagctactcgggaggctgaggcaggagaatggcatgaacccgggaggcagagcttgcagtgagcygagatcgcaccactgcactccagcctgggcgacagagtgagactccgtctcaaaaaaaaaaaaaaaaaaaaaaaaagaagtgtatagaagaaaacgctaa

SEQ ID NO: 20874 - DNA, 201 bp, Homo sapiens
cttatcaatcacttagaagattcaccctccttaccctgcccccttgtcttgtatgcaataaatatcagcgcacccagctgtttggggccactacctgtctycgcgtcttgatggtagtggtcccccaggcccagctgctttctctttatctctttgtcttatgtctttatttattacaatctctcatctccgcataagaga

SEQ ID NO: 20875 - DNA, 201 bp, Homo sapiens
agtgtcctgcctgacaggtttgctcacactcaactcatgccttccctcagtccctgtcatctcacttagattccatctcttgtgactgagtgacatgaacktgggaagaggctgcactgggcatggtcctgggaagggctcacacccagacatgtatggagatggggtgagggtcccgcagtgtcagtgctgttgggcagc

SEQ ID NO: 20876 - DNA, 201 bp, Homo sapiens
atggagtctcactttgtcacccaggctggagtgcagtggttcgatgttggcgcactgcaacctttgcctcttggcttaaagcaattcttgtgcatcagccrcttgagtagctgggactttataaaggcgtgggccaccacacctgcctaatttttgtaatattttcttatcttctcagtgctatgattctttgacaataca

SEQ ID NO: 20877 - DNA, 201 bp, Homo sapiens
tgacaatacagaaattccattgattttgattatccttacaggagcttgttgtggattatttaccaaaatagtaccttgtctggttttttagcatttatttrtttacactaagtaccctataaatatgaagaatatatatttttctcttctttgatgtgacagtgatacgtcttttgcaaagtgtgatacactttagggtca

SEQ ID NO: 20878 - DNA, 201 bp, Homo sapiens
gtgcccaccaccacacctggctactttttgtatgtttagtagagaagaggttttgccatgttggccaggctggtctcgaactcctgacctcaggtgatttkcctgtctcggcctcctaaaatactgggattacaggcgtgaaccaccatgccctgccttgtttctttagagatggagtctcactttgtcacccaggctgga

SEQ ID NO: 20879 - DNA, 201 bp, Homo sapiens
tccttttgtgttcctaaactttgaagatcatgtttgggaagtttaaaataagtattgttttttatgtaatatttacacatttcagtattgtataacttccrtacttaatttgaaacctatttgtgtttatattttgtagatacctcttccaaatgcatgatgaagatgttctcatcaacaggacaaggcaatacagaagtg

SEQ ID NO: 20880 - DNA, 201 bp, Homo sapiens
tcttgattgaaaaagtttgcttatgtcttagttctacagctgaccctctttccctgctttttgtttgtttgtttgcttgtttgttttgagatgcactttcrctcttgttgcccaggctggagtgcaatggtgtgatcttgggtcaccgcaaccctttttggttttttttttgagacggagtttcgctcttgttgcccgtgc

SEQ ID NO: 20881 - DNA, 201 bp, Homo sapiens
aaaaaaatcttaaagttatagcataataatgaaacctaaaattttcataacctggccaggtgtagtggctcatgcctataatcccagtaatttgggaggcygaggtgggcagatcaccagaggtcaggtattcaaatccagcctagttaacatggtgaaacttcgtctctagtaaaattacaaaaattatccaggcacggt

SEQ ID NO: 20882 - DNA, 201 bp, Homo sapiens
aagagagcttgatgtccacatattacatgttacagtgctctccaagcattcagaaggaggcagtcagtggagcaattagtaaaatattttcctagatccayctgtaatgtcttctttcctacagaaatatagggctgggactctacaaaagctccagcacgtcttagtactttctttttataagcaggagtctcatgctga

SEQ ID NO: 20883 - DNA, 201 bp, Homo sapiens
cacatatgtatatattttgaaaatctgagacaaatgacaacactttgtattaacgtggttttttgtgagtgtgtgtaggttttattttttttttaacatayacaaaatagaattttgtacttcgattaattttattttcatgtattttattttattttgagagagagtcttgctttgttgcccaggctagaatgccttggt

SEQ ID NO: 20884 - DNA, 201 bp, Homo sapiens
ttttcttatagaaatttattatccctggtgcagtgggcagcagaggtgaccatattttttcagagtgagggcacctttgtatgtgtcattgtgttacaggsaggaggtgtgttgattctgagcagtaaacaacatatttctaacattcaggattgacttctaaagacttggtacgtgaggaaaaaacacggaagaggaaga

SEQ ID NO: 20885 - DNA, 201 bp, Homo sapiens
ctagctgtgtctttgtacatctgcattttataaatgttactgtaattttcttgtgaggaagaattaaatgttgggaatcagtggcatcagaacttgcaaargaagtttctttatcccaggtatgtgaaagaggcttctctaattttcaaggatagttttgataaggccaaccctttcctttatcccttccaggccaccatg

SEQ ID NO: 20886 - DNA, 201 bp, Homo sapiens
acctttatatatatacacacaaccccatacatatacacacacatatatacatacacatacatatatacacacacacatatgtatatattttgaaaatctgrgacaaatgacaacactttgtattaacgtggttttttgtgagtgtgtgtaggttttattttttttttaacatatacaaaatagaattttgtacttcgatta

SEQ ID NO: 20887 - DNA, 201 bp, Homo sapiens
tgtactaattagaatggaaagttcataaacagacatgaatgatacaggggttttattccatccttatttaaagaatatgaaatcaacctaaataatagcargagatttattaaaccattcttagcaaattaagctgatggagacagtggtgttactgtggagaggcttttgaaacaggtgttttttgtaaaaatggttaca

SEQ ID NO: 20888 - DNA, 201 bp, Homo sapiens
attgcattgtgcaaatccactgaatgtgttgattagttccagtagtattttggttgactcaggccccgcccacctcttcgcctcccgtctggcctgacccmggccccgcccacctcctcgggggtctccccgcgggtctggcttctgtactgtgctgattggcacagacccggaagctgatggcatggactgaaggttgcc

SEQ ID NO: 20889 - DNA, 201 bp, Homo sapiens
gtaattgagtgagttactgtgtttctgactcaaaaaattgtactaattagaatggaaagttcataaacagacatgaatgatacaggggttttattccatcmttatttaaagaatatgaaatcaacctaaataatagcaggagatttattaaaccattcttagcaaattaagctgatggagacagtggtgttactgtggaga

SEQ ID NO: 20890 - DNA, 201 bp, Homo sapiens
gtaccttgtctggttttttagcatttatttatttacactaagtaccctataaatatgaagaatatatatttttctcttctttgatgtgacagtgatacgtyttttgcaaagtgtgatacactttagggtcacagtagaaaaacactcctgactttaggcttacacatgtttgtgccctgtcagtgtttcgtcatgatattg

SEQ ID NO: 20891 - DNA, 201 bp, Homo sapiens
tgaaaatatcaaaaaactccagatgggtgggaatgtattataggtgtaaatgcaggtaagagctcagatgggcagagtggaagctccaccttcaaatagtrtgtggggaaactctgcaagtgggagaattctgttggaaaaggaaagtttcaatcctgagatctctgaaatgacatctttctttgcccccacttatccctc

SEQ ID NO: 20892 - DNA, 201 bp, Homo sapiens
gatgctggagaattataggaacctggtctccctgggtgaggataacttccctccagaagtggggatgtgcccttgtggatctttgtattttctcttgttgyctcttgggagccacatccttgcttggctaaaatggaagccgtattgagttagaaatgaaaagcttcatgatgtagcatctggactttcactgtccccttt

SEQ ID NO: 20893 - DNA, 201 bp, Homo sapiens
gggtcacagtagaaaaacactcctgactttaggcttacacatgtttgtgccctgtcagtgtttcgtcatgatattggaaataggcttccataaaaatgatytgaagcacatgcaatcaccctttatttattaaaggatcttactccttttgtgttcctaaactttgaagatcatgtttgggaagtttaaaataagtattgt

SEQ ID NO: 20894 - DNA, 201 bp, Homo sapiens; identical to SEQ ID NO: 3862

SEQ ID NO: 20895 - DNA, 201 bp, Homo sapiens
gtctttgtacatctgcattttataaatgttactgtaattttcttgtgaggaagaattaaatgttgggaatcagtggcatcagaacttgcaaaggaagtttytttatcccaggtatgtgaaagaggcttctctaattttcaaggatagttttgataaggccaaccctttcctttatcccttccaggccaccatgtaagaatt

SEQ ID NO: 20896 - DNA, 201 bp, Homo sapiens; identical to SEQ ID NO: 3851

SEQ ID NO: 20897 - DNA, 201 bp, Homo sapiens; identical to SEQ ID NO: 3852

SEQ ID NO: 20898 - DNA, 201 bp, Homo sapiens; identical to SEQ ID NO: 3853

SEQ ID NO: 20899 - DNA, 201 bp, Homo sapiens
gctagaatgccttggtgcaatcgcagctcactgaaacctccaccatcaaggtcaagccgtcctcccacctcagccttccaagtagttgggacaacagatgsctgccaccatacccggctaattatttatttctaacgtaagcaattcatactgagagggtatcctgagctcttcagaaagtataatcaaacaccactggga

SEQ ID NO: 20900 - DNA, 201 bp, Homo sapiens; identical to SEQ ID NO: 3854

SEQ ID NO: 20901 - DNA, 201 bp, Homo sapiens; identical to SEQ ID NO: 3857

SEQ ID NO: 20902 - DNA, 201 bp, Homo sapiens
tctcaaaaaaaaaaaaaaaaaaaaaaaatcttaaagttatagcataataatgaaacctaaaattttcataacctggccaggtgtagtggctcatgcctatmatcccagtaatttgggaggctgaggtgggcagatcaccagaggtcaggtattcaaatccagcctagttaacatggtgaaacttcgtctctagtaaaatta

SEQ ID NO: 20903 - DNA, 201 bp, Homo sapiens
gtttgttgttagcggggcccagcagtgctctgggagcacatcctgaacccaggcggtgacaaggggcttgtccccacaggtggcccggcagtctctgaccrtgttcgttctcatcatgaatggctgccacatcgagattgatgcccaccggctgaatgatggggggctcctgctctcctacaatgggaacagctacaccac

SEQ ID NO: 20904 - DNA, 201 bp, Homo sapiens
cagcctcctggcaaggacccgagcctggattgacccctagctacccgactcctatgcagccacttgaacccgccaccctgtgcagtctggggttgtccccrccccctccccgctccccagcaaagagaccacactccctaatgtcgggtctcccagcacagtggctggggtgggacagagagcctagaggtactctgaagg

SEQ ID NO: 20905 - DNA, 201 bp, Homo sapiens
tcccacctttccacccactgtcttcctgccaccattttgaggggtctttactggtttgagcttaaaccaaggtttttctgagctggtacatttataaaggygaaaactatctctctctttctctttctttcttctttttttatttttttggacagagtctcactctgtcacccaggctggagtgcagtggcatgatcttgg

SEQ ID NO: 20906 - DNA, 201 bp, Homo sapiens
ccattcttcatgtccagtttccccttcgggtgccctttacaaaaacttcctttaactctgcagccaacatggttgcttctcaccttccctagctctaaaartctagtgcttttacttgatgcatgtattttcttgttgtgtgatgttgtttcataaatatttttccttttcccaactgtactatttgctccactgtgaaaa

SEQ ID NO: 20907 - DNA, 201 bp, Homo sapiens
aggcaattctggtcgatctaactccctgtattactgacattttaaaacaaattattgaagtgccattacacattgcagaaaattagaaaaggaaccccccaaaaaagtaattttgcagcttctatcattctggtatagttccctctcatcttctgtctttatgtggtttatttatagtgaatatgcagttttgtattctac

SEQ ID NO: 20908 - DNA, 201 bp, Homo sapiens
gaagctcatggaacagctaggtaagggggtcccaaaggcttcacctctcagaggtcaagagaggcccagctggcccactgctgggggtttctaggatgttmaaaataaaatgaaaaaataccaaaatacagctataataactgtgagatttttaaagatattcacatttgtctgtttgttttgttttgtttttttgaggtc

SEQ ID NO: 20909 - DNA, 201 bp, Homo sapiens
cacattgcagaaaattagaaaaggaaccccccaaaaaagtaattttgcagcttctatcattctggtatagttccctctcatcttctgtctttatgtggttwatttatagtgaatatgcagttttgtattctacttttttcactgtattaaaacattttccttgttgaaaagtctctatacttaatgtctgctcaaatctca

SEQ ID NO: 20910 - DNA, 201 bp, Homo sapiens; identical to SEQ ID NO: 3876

SEQ ID NO: 20911 - DNA, 201 bp, Homo sapiens
ttcaggtcattccagatcttctgccaagaaccccaagtcacaaatgtcagtttgtattcccaagtgccccttttccccatctgcatgccatctgttaccaytctctgcaaccaatctctttttctttcttttaagatgtttttcctcctatctgaccatatatagcagtagcaaccctttcctgcgtttctgtaacttccc

SEQ ID NO: 20912 - DNA, 201 bp, Homo sapiens
ctcagcctcccaaaatgctggggttacaggcatgagctaccatgattggaggacattcacatttctaaatcaacctttttaacattttatatatatatatatatatatatatatatatatatatatatatatatatattgccatcgtgaatttatttctcagcatacacaaaagatagcaattgaagtatttggggctgat

SEQ ID NO: 20913 - DNA, 201 bp, Homo sapiens
cttctctggaagaaggggttgggggttggcccaggcacttcacgtgcgagttccattcctttccaccaccttgatccacccctgttgtgcagatgaggaagctgaggcacagagaggtgaaggcatttgtccatggttatgcagagacggaatcaagtctgcttggctccagaacccagccctttccttttatgacctagg

SEQ ID NO: 20914 - DNA, 201 bp, Homo sapiens
caggccacaagggctaacaacccctttgggcatcagaaggtggccttgggtgctctccccagaaaacttcacagacactggcactctgaattccatcttargagagccatggacaggagccctgttgtatgccactgttggtgggaggctgcaatgcttgcatgctttccaagctgggcagctcacccttcagccttgtag

SEQ ID NO: 20915 - DNA, 201 bp, Homo sapiens
aacgtggccctcgtcacagaaagttctagtggttcatgctgctccaggccctataccatcccagccctcctctgatggttcttgcctcaaaaagggcaccrataggtctgctacctttcgaggctcttaccatttgggggctttttctttgccttccaataaaataatccgccagattaaaaagagcattctcctccacgt

SEQ ID NO: 20916 - DNA, 201 bp, Homo sapiens
ttattattattactatttcctgagtcttggatgccaaaatagtcgtgaagattaaatgaactaatatttctcaggtacttggcaagagaataaagcatccrtatttggtagataataaatagaaaggggggcaagtctcccacctttccacccactgtcttcctgccaccattttgaggggtctttactggtttgagctta

SEQ ID NO: 20917 - DNA, 201 bp, Homo sapiens
ctgtgagtccttgttaactgggtgacatcactgagcctcagtttccctcctttgtaaaagggggttaagaacaggaccaacctcagagggccgaggtaagrgtctgatgagctaattgctgacatgcagtgtgattgtcagtgctgttattattgcattcttgttttcatgtagggtgcctggggacctggagagatgtgt

SEQ ID NO: 20918 - DNA, 201 bp, Homo sapiens
actaccactcatggggtgctttcagtatgccaggccaagtgctttgtaggtgtggtctcatgccatcttcaaaataccactgtgggggcactaagtggagrgtgttgtacccatttcacaaaccactttaatggaaaaaaagaaaaacctcacacaaatttggaattgtcccagcaagtccaggacgtggggtccccctat

SEQ ID NO: 20919 - DNA, 201 bp, Homo sapiens
aagggggcagggggagaataaggggtaaataaaaatgttggaaatgaggccaggcgtggtggctcacgcctgtaatcccagcattttgggaggctaagggsggcagatcacttgaggccaggagttcaagaccagcctggccaacacagtgaaaccccgtctctactaaaaatacaaaaattagctgggcatggtggtaca

SEQ ID NO: 20920 - DNA, 201 bp, Homo sapiens
ctaccactcatggggtgctttcagtatgccaggccaagtgctttgtaggtgtggtctcatgccatcttcaaaataccactgtgggggcactaagtggagastgttgtacccatttcacaaaccactttaatggaaaaaaagaaaaacctcacacaaatttggaattgtcccagcaagtccaggacgtggggtccccctatt

SEQ ID NO: 20921 - DNA, 201 bp, Homo sapiens; identical to SEQ ID NO: 3877

SEQ ID NO: 20922 - DNA, 201 bp, Homo sapiens; identical to SEQ ID NO: 3879

SEQ ID NO: 20923 - DNA, 201 bp, Homo sapiens
aataaaaatacaaaaattagcagagcgtggtagcacacatctgtagtcccagctactcgggaggctgaggcaggagaatcacttgaacctgagaggtggargtagcagtgagctgagatcacaccgctgcactccagcctgggcgacagagcaagactccctttcgaaacaaacaaacgaaacaaaacaaaaaacaatcta

SEQ ID NO: 20924 - DNA, 201 bp, Homo sapiens
tacctggacatcagcctctacaaagaagtgactgactccagatctggaaatgtaaggctggcccgcgccgtgggggtctaagtcaaagcagaagcaggctkcttgggccatcaatttgtagattaagatggcatttggaggcggtcttgccttgctctcccatgtcattctgggttggggtagccccctctgagtgttatg

SEQ ID NO: 20925 - DNA, 201 bp, Homo sapiens
taggattgtgggcgattcaaaggctatgatatggtgaacgaaggagtgatgtgctgcatgaacttgggtgagtcccttcccctctctgagtctccaatttmtcatctttagaatgaggaggctgaggctgggcctgatggctcatacctgtaattccagcactttgggtggccgaggtgggtggattgcttgagctcagga

SEQ ID NO: 20926 - DNA, 201 bp, Homo sapiens
gggcgattcaaaggctatgatatggtgaacgaaggagtgatgtgctgcatgaacttgggtgagtcccttcccctctctgagtctccaatttctcatctttrgaatgaggaggctgaggctgggcctgatggctcatacctgtaattccagcactttgggtggccgaggtgggtggattgcttgagctcaggagttcaagac

SEQ ID NO: 20927 - DNA, 201 bp, Homo sapiens
cgggaggctgagggaggaaaattgcttgaacctgggaggtggaggttgcagagagccgagattatgccactgctctccagcctgggcgacagagtgagackcagtctcagaaaaataaaataaaataaaataaagaaataattatatcaaaagacacctgtacttgtatagttatcacagcactattcacagtagcaaaga

SEQ ID NO: 20928 - DNA, 201 bp, Homo sapiens
agtgtcctgggggcccccagccacctggccctccagcctgggcttctgcccttctgtccacagctctgaagggaacgtggcagagcggattctttgaccayggcagtttcaaggaaatcatggcaccctgggcgcagaccgtggtgacaggacgagcaaggtaatcatgaagacgggagcaggctgcccatgtctgactca

SEQ ID NO: 20929 - DNA, 201 bp, Homo sapiens
gagctctaaatctggtccagctcactgaagcttcaggagtaggagcagctcgtagagttgggtctgcaagcagctgcctcatccccgacttgccatcaccytacaggatgaccgtgcccatcagcatcaccaaccctgacctgctgaggcacagcacagagctcttcatggacagcggcttctccccactgtgccagcgca

SEQ ID NO: 20930 - DNA, 201 bp, Homo sapiens
tatccaaagctttatttttctagctaagacacatccttttcttaatgtcttcattttttttttcagtttagtttccagtactgtcagttgctttcttttcsgggaccaatttccaccaagaaaccaggggttagtggcttcatgagaattgccacaggctgtgacagatggagaacagcctggtcacgctggcaggtgata

SEQ ID NO: 20931 - DNA, 201 bp, Homo sapiens
ggatatccggcttctgtatggagagtcaccatggggagtgactcccatttcttttgaaaccccctcaaaccctcccctcgcccgaggccacgtcattgccrccagaatcaccagcgaaaacccagacgaggcaagttatgggggcccctgtgtttccaccatctcagatctcccagcatgtgggggaccctggatgttagc

SEQ ID NO: 20932 - DNA, 201 bp, Homo sapiens
taaaacaggaaattgacattggcacaggactgttcgcaccaacactgaccacgttcggatttcaccagcgtttccatgcatgcctgttgttgggagtgtgwgatgccttgatcactgtatttttggaactgcattccacagcccctgttgtcccttcttgttctggccctccacagtggtgaagaagggagttttacgtag

SEQ ID NO: 20933 - DNA, 201 bp, Homo sapiens
gtgtgatgccttgatcactgtatttttggaactgcattccacagcccctgttgtcccttcttgttctggccctccacagtggtgaagaagggagttttacrtagcccaggcactcactttgtcatgccatgtgacatgctttgcttcccccacctgcattttcattgaggactgggcagaaataaattgggggagatgtgt

SEQ ID NO: 20934 - DNA, 201 bp, Homo sapiens
gatggaaacatatatatattattatatatataattatatataataatatatataatatattatataatataacatataatatacataatataatatataatatgttatataacattatatatacataatataatacatattatatgtatttatataaatatatatttatataaatgtatatataattattatatatatata

SEQ ID NO: 20935 - DNA, 201 bp, Homo sapiens
atcaaccagcaagtagaagaagagagagaataggagaggggaaaaatgcataaaccagtaggccagtgtaggaatttcaacatccagataataggacttcrggaaaaaatagagaaaaaaagaggcaaggacatcatcaaggaggtatttgtttcttgttgttgttgttgttgtttgagatggagtctcactctattgccc

SEQ ID NO: 20936 - DNA, 201 bp, Homo sapiens
aacaatggtgatgtaggggcctagaggacagccagtacctacggaaggagaacagaggccttcaggagagatgtcaccagtggaaaaaaacagaactgatmaattatttattattattatttttaatgagatggggtcttgctacattgcccaggctggtctcgaactcctggtctcaagcagtcctcctgccttggcctc

SEQ ID NO: 20937 - DNA, 201 bp, Homo sapiens
caacccagtgctttcagaggctgagggaggaggatcacttgaagccaggagttcaagaccagcctgggcaacatagcaagaccccatctccagaaaaagtaaaaaaaaaaaaaattaactggttatggtggtgcatacctgtagtcccaactactgaggaggctgaggcaggagggtggcttgagcctaggaggtcgaggt

SEQ ID NO: 20938 - DNA, 201 bp, Homo sapiens
ggcttagcatttttagtgcagtcaggtttgctgatgcagagagttgcgtaatttttttaaatgcaagggatggctgtggagttctcagtccctcccaaggstgaccacaaccctgtcttttctttcaggggccaggtcctcccagcggattcactactgaacctcgtagatgtggaattaatttacggaggtgttaagtac

SEQ ID NO: 20939 - DNA, 201 bp, Homo sapiens
tggccgatgcgatgttcagaacgtgcatgacagatttcttacactccctggaaaggtaggggctgtggcagttcccttctgcttttgtgatatgtgttagyggcttaggaggctgaatctgtctcctttatttgtgtggccagttagtcaccaggcaattggtgagtctctcctccggtcttgcctctgggaaattcctct

SEQ ID NO: 20940 - DNA, 201 bp, Homo sapiens
gagttaaacagcctgcagcaccggcagctcccggacggcacctgcgtggtagaattccagttcatgctgccgtcctcccacccaaaccggtatggagtggracacacccagggacggcctgtgtttctgttcttcctgacctctgtcgtcctgtctctggaaggacctggcaagtgtgtttgggcacgctgctggggagac

SEQ ID NO: 20941 - DNA, 201 bp, Homo sapiens
tgggttgtggttgtgcagagacatctgatccccgcagctctgtgttccagataattcagcaggcaggacaggtgtggttcccagactcagcctacaaaacygcccaggccatcaaggacttcaaccgggagaagttgcccctgatgatctttgccaactggagggggttctccggtggcatgaaaggtaagcccctccctg

SEQ ID NO: 20942 - DNA, 201 bp, Homo sapiens
gtgttggattttgtcaaatgcttttcctgcatcaattgggatgatcatgtggtttttttccctttgttccattaatgtggcatgttacattgacattgagycacccttgactgacttttctttaaaaaaaacacatgatgatcttgaaaggaaaaaacccctctgaccctgtgtactacctagaaaatagccttggcaaca

SEQ ID NO: 20943 - DNA, 201 bp, Homo sapiens
gcgagaccttgtctcaaaaaaggaaaaaaggaaagaaatcattccttgtgcatctactgcatgcacagggctcgatgccatgaaactgactttctagaagrcctcagcctagttggggaagatgaccttgtgtttagttataatttaagctgaatgagccaaggctggcaagagccacaagtgatgatggtagtctagagg

SEQ ID NO: 20944 - DNA, 201 bp, Homo sapiens
aggggccaggtcctcccagcggattcactactgaacctcgtagatgtggaattaatttacggaggtgttaagtacattctcaaggtaaatgcccccgtgcytctccgatgtctccaacactctgcaagcttcagggagtttctttcttccatgaaccatccctggagtggatttgctcatgcttgggtttgagctcttgtg

SEQ ID NO: 20945 - DNA, 201 bp, Homo sapiens
gatccccctcggctgggaagctgacacagtacacagtggaggatgggggccacgttgaggctgggagcagctacgctgagatggaggtgactgcagagccsgccgtggggaatcctgaaccctcaaactcccactcttctggctttgtcccatgtctgaacaaacaggcctacctctccccttgaccactgtctgcaaatt

SEQ ID NO: 20946 - DNA, 201 bp, Homo sapiens
gggaatgtagagggtacactccccctttaggaaggggaaatggtattgaaagccggactagggcttgctgagttggtagtcctcatcagtctccctacccsactcctcctctctcccagttaccgaattaccatcggcaataagacgtgtgtgtttgagaaggagaacgatcctacagtcctgagatccccctcggctggg

SEQ ID NO: 20947 - DNA, 201 bp, Homo sapiens
ctgaaccgttcacaggagaactccctgcccagcagacactgcccatcctcggagagaaactgcaccaggtcttccacagcgtcctggaaaacctcaccaaygtcatgagtggcttttgtctgccagagcccgtttttagcataaaggtaaagtcacctatgagcgcaggcgtgtagaccagtgcggagggtcagaagatct

SEQ ID NO: 20948 - DNA, 201 bp, Homo sapiens
gccggcagatctgtcctgcctcccattctgcccggtcccatttggaattcccagagttttcctgacctgtcgttcttgtggtgtctcatcaggctgaaccrttcacaggagaactccctgcccagcagacactgcccatcctcggagagaaactgcaccaggtcttccacagcgtcctggaaaacctcaccaacgtcatga

SEQ ID NO: 20949 - DNA, 201 bp, Homo sapiens
ctcggggtagcacgtggcccccagcgcaggtagatgtgcatctacagctccttccttgtcttcccatgcaggtgcttattgccaacaacgggattgccgcygtgaagtgcatgcgctccatccgcaggtgggcctatgagatgttccgcaacgagcgggccatccggtttgttgtgatggtgacccccgaggaccttaagg

SEQ ID NO: 20950 - DNA, 201 bp, Homo sapiens
agtgaggcgaagcacattctgtttttaaaaaaaaattttatagacaggatctcgccatgttggccaggctggtctcgaactcctgggctcaagtgatcctyctgccttggcctcccaaactgctggggttataggcgtgagttactgcacctggctgggaggcatattcttgaaggaagattgttgctcacccctttctgt

SEQ ID NO: 20951 - DNA, 201 bp, Homo sapiens
ttttatagacaggatctcgccatgttggccaggctggtctcgaactcctgggctcaagtgatcctcctgccttggcctcccaaactgctggggttataggygtgagttactgcacctggctgggaggcatattcttgaaggaagattgttgctcacccctttctgtgtttgcaggcggtgtgggctggctggggccatgct

SEQ ID NO: 20952 - DNA, 201 bp, Homo sapiens
cttctgtgtccaagatgctgcccttatgtggtgactgagagcttgaaagtggccagtgtgactgaggaactgaattttacattttatttcattttgatcartttaaatagctgtgtgtggttaggggtcaccgtatcagacagggcagatctaaagtgttccattgcaaggttgttggcttgctaattttgttctaatttt

SEQ ID NO: 20953 - DNA, 201 bp, Homo sapiens
gtaaaagatcagcagagtcctggatgagtaccctaaacacatcactgcgtttgttttatgttctctcctgagaacttccagaagcttccagagctggtttycccatgaagatcaggctgctctgcttcccccgacaggtacagagtgagatcccaggctcgcccatctttctcatgaagctggcccagcacgcccgtcacc

SEQ ID NO: 20954 - DNA, 201 bp, Homo sapiens
gcacctgctggaacctctattgaaggtgcttctcccagagccctttgtgcagtggactccctccccacccagcctgtaggtctcaacatgatcatcgcatytctctcagagaacctcatttattttcttcccagcactgacctgagtctgtagttattgtgtttattttcttgtttatcttctccaacataaaagaaaaac

SEQ ID NO: 20955 - DNA, 201 bp, Homo sapiens
ctgggcctttgctgagacagaatagtgggcccgggtctgtttccaggggctctgaggctggttttgttctctgtctctgcaccacgtgtagattactggcrtcttccctggtttactactggagtccctggggcttattccggttgctctcctctgtcagaagtgcctagttgccctttgtgggccatccaaggtcaattc

SEQ ID NO: 20956 - DNA, 201 bp, Homo sapiens
cacaaggggtggagggtccagatcccacaaggctccaaattcctgggctgatgtaacacagaaaagagtgttcaagtgaggcgaagcacattctgtttttwaaaaaaaattttatagacaggatctcgccatgttggccaggctggtctcgaactcctgggctcaagtgatcctcctgccttggcctcccaaactgctggg

SEQ ID NO: 20957 - DNA, 201 bp, Homo sapiens
gagagctgggaccagagaattttctctgtcatctgctccttacctggccccaccaccgtgcactcggtcggccttcagcctcgagggtcttgtgactgacyggattctgcttcccttcttgtccccgattcctcaggccctcccagtgaggccatgtgggccttaggagataagatcgcctccaccgttgtcgcccagacg

SEQ ID NO: 20958 - DNA, 201 bp, Homo sapiens
ctgtcatctgctccttacctggccccaccaccgtgcactcggtcggccttcagcctcgagggtcttgtgactgaccggattctgcttcccttcttgtcccsgattcctcaggccctcccagtgaggccatgtgggccttaggagataagatcgcctccaccgttgtcgcccagacgctacaggtcccaaccctgccctgga

SEQ ID NO: 20959 - DNA, 201 bp, Homo sapiens; identical to SEQ ID NO: 3882

SEQ ID NO: 20960 - DNA, 201 bp, Homo sapiens; identical to SEQ ID NO: 3885

SEQ ID NO: 20961 - DNA, 201 bp, Homo sapiens; identical to SEQ ID NO: 3864

SEQ ID NO: 20962 - DNA, 201 bp, Homo sapiens
ggcctgcgcaacagagcaagaccctgtatctaaaaaaaataataataactaaaataaaataaaaagttttcccccaaagaaacaaactcattttccttgtrcattcatccccttgccaggtgggcatggtggccttcaaaatgaggtttaagacccaggagtacccggaaggacgggatgtgatcgtcatcggcaatgaca

SEQ ID NO: 20963 - DNA, 201 bp, Homo sapiens
aggaagcctgtctggccgctcacttcatcatctctggaatctccccgttggccgacacttctgtgtttgataaacataggaggcaggcaggccggaaggarcagctgctctgggatttctttctgtgtttgcatataaagtgccacattgttcaatttcaggatcttagcaattctatagtacagatgtcccaacccctgt

SEQ ID NO: 20964 - DNA, 201 bp, Homo sapiens
tttctcagatgtaaccactattagcagctgccgatggtggggggctcttttcagcactgtcactgtatatacttttacatagacattcatacagttgtttyattattttttgcatgacttcatcctatacattattgcaaatttgttaaacttaatttgtcttagaaatcattgcacgtgaatacttttcacattgtcttt

SEQ ID NO: 20965 - DNA, 201 bp, Homo sapiens
gtctgggaagcagagccctagtccatgtccaggtgtcttagtccatttgggctactgtcgtaaaataccaaagactgagtggcttctaaaccacacactgratttctcacaattctctaggctgggaaggtcaatatcaagatactggcagatttggtatctactgaggacccacctttcgtttcatagatgctgtccttt

SEQ ID NO: 20966 - DNA, 201 bp, Homo sapiens
gaggcaaagatgagatctgaaccatggccatcaggattctgactctgtgctcttcgcccccacgttatgctgcctgatgattattaccaccattgcaacattttttttttttttttggagacagggtcttgctctgtctcccaggctggagtacagtgggggaaacactgctcactacaacctcgacctctgggttcaagc

SEQ ID NO: 20967 - DNA, 201 bp, Homo sapiens
gcccccagcttacacacagtttttgagctcttactctgtgccaagcaccaagctgggtacaaggatccaaaatgaatgacacttggtctatgtccccaagsaccacccagtcggtcagggagaacagacaaccgaacaagccacttccatgccatgttttctgtgtcatcatgatggaagtctgtacccaggcctcccagg

SEQ ID NO: 20968 - DNA, 201 bp, Homo sapiens
cccaagactacaccagaatcagctccctgaactccgtccactgtaaacacatcgaggaaggaggagagtccaggtaaataacttatcaggtagctccttarttttgctcatggttaatttcagctgtcttctttcctcggggcttgtggcgatattttccagtggggtggtggtgtttgtatgatgggaaccaatgcctgt

SEQ ID NO: 20969 - DNA, 201 bp, Homo sapiens
atttctcacaattctctaggctgggaaggtcaatatcaagatactggcagatttggtatctactgaggacccacctttcgtttcatagatgctgtcctttygctatgtccttagatgtcagaaatgggccacagagctctacaggggatcttttataagggcactaatctcttttacaagggccccaccttcatgatctca

SEQ ID NO: 20970 - DNA, 201 bp, Homo sapiens
agtacatcaagcgtccaggtgccgtgctggaagcaggctgcgtggtggccaggctggagctcgatgacccttctaaagtccacccggtatgtggctccacrgcccaagtgctctggctggtgcaggtgcactcgtgacctccactggttcagtgagacaggtggactcaaggctggtagcgcttctcctgcctccacctgc

SEQ ID NO: 20971 - DNA, 201 bp, Homo sapiens
atcaccgtgccagatgactttgagggggtttataccatcctggagtggctgtcctatatgccaaaggtgcagtactccccctgcagcttagaacctggaaractcttattaagctcattggctaattctgtccctgtcacctcctgggtggtgtgggaggctgaggagcaggaagcactgcacatgtggctggggttgatt

SEQ ID NO: 20972 - DNA, 201 bp, Homo sapiens
gtgttaagggtgatcacaatgacaccaaaggaataaaaaaaaaatcattcactgggctcggcacagtggctcatgcctgtaatcccagcactttgggaggrtgaggtgggcagatcatttgggcccagcctgggtttgtgttcaagttcaagaccagcatggacaacatgacaaaatcctgtctctgcaaaaaaattaaaa

SEQ ID NO: 20973 - DNA, 201 bp, Homo sapiens
tactcaggaagctgaggtgggaggatcgcttcagcccagggggtctaggctgcagtgagctgtgattacaccgctgcattccagcctgggaaacagactgmgactctgtctcaaataaaacaacataaacctaaaagcataactcaggtccgagcacagtggctcacgcctgtaatcccagcactttgggaggccaagatg

SEQ ID NO: 20974 - DNA, 201 bp, Homo sapiens
gaggtgggaggatcgcttcagcccagggggtctaggctgcagtgagctgtgattacaccgctgcattccagcctgggaaacagactgagactctgtctcarataaaacaacataaacctaaaagcataactcaggtccgagcacagtggctcacgcctgtaatcccagcactttgggaggccaagatgggcgaatcacttg

SEQ ID NO: 20975 - DNA, 201 bp, Homo sapiens
ggacagtggaatacctctatagtcaggatggcagcttccacttcttggagctgaatcctcgcttgcaggtggaacatccctgcacagaaatgattgctgaygttaatctgccggccgcccagctacaggtgagaaaatgggcttggggccctgggacttctctgccctgggtcaggggtccatgtgctgctcccattagtc

SEQ ID NO: 20976 - DNA, 201 bp, Homo sapiens
gtgatctcagctcactgcaaccccacaggctcaagaaatcctcccacatcagcctcctgagaagctgggactacaggcatgcatcaccatgtctggctacttttttttttttttttttttttttagtatttttagtagacactgggtttcaccatgttggctaggctggtcttgaactcctgagttcaagcaatccaccca

SEQ ID NO: 20977 - DNA, 201 bp, Homo sapiens
caccacgcctggctaatttttgtatttttagtagagacagaatttcaccatgttgcccaggccggtttcgaactcctggcctcaggccatctgcctgcctyggcctcccaaagtgctgggattacaggcgtgagccaccacgcctggccttctctttacattttcatacatgtttgtccattgttaccatagaaatctgca

SEQ ID NO: 20978 - DNA, 201 bp, Homo sapiens
tatgcatatttttatgcgcccctgagtgaaatgccaaggatcttcctgtaatgtttaatttattcatttattgacttaggaaggggctgggagaaactctsttttcaagtctctttagctcctaaaatgtttactttttctttttctttttctttttttcttttcttttcttttttctttcttttttttttttttgagacg

SEQ ID NO: 20979 - DNA, 201 bp, Homo sapiens
atgcatatttttatgcgcccctgagtgaaatgccaaggatcttcctgtaatgtttaatttattcatttattgacttaggaaggggctgggagaaactctcktttcaagtctctttagctcctaaaatgtttactttttctttttctttttctttttttcttttcttttcttttttctttcttttttttttttttgagacgg

SEQ ID NO: 20980 - DNA, 201 bp, Homo sapiens
catttacactggggatatttgggggatgaatacttgttggttttggtttgaatctctaaaaatcaggatacagtgggttacttttttggaggaggtgaagrcaaggctgtgaacaccttcccagaaacttgaagaactgagaattttgtttatctgttttttttcttaaacctgttgttgaaatgttatttaatatatggt

SEQ ID NO: 20981 - DNA, 201 bp, Homo sapiens
ctccggtggcatgaaaggtaagcccctccctgcctatgttaccccaaagccttggggtcagcacccaggacagcaccctctgggtggtgatgctaatgtcstagtctgtgcccatcatcatcttagctgtgtctcccaacaaccctgaggagaaaatattgttcaggtgccccactaccccgttttaaagatgaggaactg

SEQ ID NO: 20982 - DNA, 201 bp, Homo sapiens
cccaccccaccaggatggtcacactgggccggctcccggtctggctcgatatctggcctctgatcaagttgaactccttgagacccacttatagcctaacrtatcaggggccgagggtttccttttgagccttgtctgcagaatcctatcatttactcaaagcaacagttgtttgaatgaacatcagtattccttaggcct

SEQ ID NO: 20983 - DNA, 201 bp, Homo sapiens
atctgccggccgcccagctacaggtgagaaaatgggcttggggccctgggacttctctgccctgggtcaggggtccatgtgctgctcccattagtccatcycgcccatctcttggccgactgtcccaggggaatgactggccaaagagcactttgagaaatctgtaaaagctatagttctccctgggaaaatatcttttat

SEQ ID NO: 20984 - DNA, 201 bp, Homo sapiens
gtcccttcttgggaaatgcatccaccttggattttttggggctagagcccagcctttaacctgtgcttgcttttgaagatacatgatcacggatatcatcrggaaggatgatggcttgggcgtggagaatctgaggggctcaggcatgattgctggggagtcctctctggcttacgaagagatcgtcaccattagcttggt

SEQ ID NO: 20985 - DNA, 201 bp, Homo sapiens
gctcctagcttacctctttgatctagctttctgccttccctccaaagtgaattttgtatatgccactgtagcctaggttgtaactcacaacaggtttacartccacatacgttgaaagttgactgatgcaatagcagactaacagattatttttcttccctgacatgaggttaagctccttgagagctgggaccagagaat

SEQ ID NO: 20986 - DNA, 201 bp, Homo sapiens
agttcaagaccagcctgggcaacatagcaagaccccatctccagaaaaagtaaaaaaaaaaaaaattaactggttatggtggtgcatacctgtagtcccarctactgaggaggctgaggcaggagggtggcttgagcctaggaggtcgaggttacagtgaactatggtggcaccactgcactccagcctgggtgatgagac

SEQ ID NO: 20987 - DNA, 201 bp, Homo sapiens
actactgaggaggctgaggcaggagggtggcttgagcctaggaggtcgaggttacagtgaactatggtggcaccactgcactccagcctgggtgatgagaycctgtctttaaaaggaaacaacaacccatcttacatttcctagtttgtgactttttttttcctcactaatgaatatctttctatgtaaaaaatacacttt

SEQ ID NO: 20988 - DNA, 201 bp, Homo sapiens
gacagagtttcaccatgttggctgggctggtctcaaactcttggccttgagtgatccacccgccctggcctcccaaagtgctgggattacaggtgtgatcygctgcgccctgcctgatcaattttaactgtaggaacgaattgcacatttacttactggtagctagttttcctcttttaaaaccttatgtccgttatcagc

SEQ ID NO: 20989 - DNA, 201 bp, Homo sapiens
ttgctttttaaaaaatagactttatttattagagcagttttagggtcacagcaaaatggagcggaaagaatagagagttcccacataccccaggccctcaygtgcacacagatgcccaagcttttttattttacttatatgagtgcactatgaatatgttcttaatgtagagagtcagtcaagtcagccatgtgttaagaa

SEQ ID NO: 20990 - DNA, 201 bp, Homo sapiens
gagacccatcagtggactccaaaagccatgcctatctttgggacaagcagccaggtttagaaccctagtccttggatttctggccccgtgtgctttttgcyacagtatgaagtctggctcattgtagagagtccctttgtgacttggccttacttgggtcttaaaaaacaaaccaactggcatcccttacagtttacatgc

SEQ ID NO: 20991 - DNA, 201 bp, Homo sapiens
cagctcttaacaggatgaagtaagtttgtccttagattccacccgggagagctagctgagaaagtgcagtaagtggaagaaaaagacaaccacagattagkgtgttttggtcccattttcattcaaagaaactttctctgtatgtgttgctatatgcatagaagaaagccagtttggacaccaaactctttaacagtgcaa

SEQ ID NO: 20992 - DNA, 201 bp, Homo sapiens
gaatgactggccaaagagcactttgagaaatctgtaaaagctatagttctccctgggaaaatatcttttatacaatttcaggacattcatagacctagagraatgtttcttaaccttgttatcattatcactccctgcaaggatcctttggacacattttatatcctaatccctgtcttgtgaaattttaatatcacaaat

SEQ ID NO: 20993 - DNA, 201 bp, Homo sapiens
cccactagcttctttaggagagaaatcacttgattatgtaaatcctaaaatgtctctccttttctccttacagattttctgaatggtcttgcttctttgtytatcttgtctgattttctcctgtctgaccttttcctggttaaaaatctgggggaaaatgacggactccaagccgatcaccaagagtaaatcagaagcaaa

SEQ ID NO: 20994 - DNA, 201 bp, Homo sapiens
gcccccactcatcagactggtgattaaaaaacttactcactggctgggcacggtggctcatgcctgtaatcccagcactcgggaggccaagactggaggaycacttaagcccaggaatttgaggccagcctgggcaacatgtgagaccctgtctctacaaaaaatagacacacaaaaaaaagagccacgatgttggcgcac

SEQ ID NO: 20995 - DNA, 201 bp, Homo sapiens
tcctttacatttaaaccttatcagtagttccctaatgggttgtatttcacaccgaagactaaattttaaggagtgtgtcctgctgtgaaccacccaccacyctgaggcctgtgacagcagccccatgtccccagctcagccaagtcctcccatacttgtgatagtttctgcagagctgagaagcccacattgacagaggga

SEQ ID NO: 20996 - DNA, 201 bp, Homo sapiens
aggctggtctcaaactcctgacctcagatgatctgcccacctcaacttcccaaagtgctaggattacaggcatgagccactgcacctggcctgtaccacaytttctttatccaatcatctgttgatggacatttaggttgattccaaatcttggctattgtgaatagtgctacaataaacatgggagtacagatactcttc

SEQ ID NO: 20997 - DNA, 201 bp, Homo sapiens
cttctgtctgtttgtataattttagggggctcaatcttttttttttttctttgagatggagtctcgccctttcacccaggctggagtgcagtggtgcgatsttggctcactgcaacctccacctcccaggttcaagcgattctcctgcctcagcctcccgagtagctgggattataggtgcctgccaccacacccagctaa

SEQ ID NO: 20998 - DNA, 201 bp, Homo sapiens
tgtagagatcgggtctcattatgttgcccaggctggtctccaactcctaggctcaagcgatctgcctgcttcagcctcccaaagttctgggattacaggcmtggacactggcatttttgaggagctcaggcagaatgtccctcattggatttctctgattgtttcttcctggttcgattcctgctacacattttggcagaa

SEQ ID NO: 20999 - DNA, 201 bp, Homo sapiens
ggatgatggctcgttcccaggttcctaggaggatggaggaccaggtatggtaacagcccaggcacttgggtcgctccatctctcacttctacatacctctycccaaatccttcatcccttagttcaggagccctaatcccagtgagaggtgccatgtccacccactcttaccaaaattgtacttagagggagacgggccgt

SEQ ID NO: 21000 - DNA, 201 bp, Homo sapiens
tattgctgttagtgagagtccagtagggggatcaactgtcctcgttttcctggcaccggtttctcaggttgaaggacttctcagtgctaaaatggggaccrccccaaggaaactgggacaagtcactcacccgtgagaccagcgggttaactctcatacccagcttccagacccacagctgacttttcatggcctatggat

SEQ ID NO: 21001 - DNA, 201 bp, Homo sapiens
gtccttccccgttacctgctgacagcacacaggatgctgcaagacatgaaagcttactcggccaggcacagtggctcatgcctgtaatcccagcactttgrgaggccaaggcgggcagatcacttgaagccaggagttcaagaccagcctggccaacatgacgaaaccccgtgtctactaaaaatactgaaattagccggg

SEQ ID NO: 21002 - DNA, 201 bp, Homo sapiens
gcagtgggattacaggcatgaaccaccatgcctggctggttctttctctactaatcattaactattatagtcaataattataacaataataactaatcacrttcattgtagttaacatttattgatcagtgaccatgtgcattacatggattgtctcatttcaattctcgaacaccctcatgaagtcagggctatttcccc

SEQ ID NO: 21003 - DNA, 201 bp, Homo sapiens
ctcatgaagtcagggctatttccccattttccatatgaggaaactgaggcccagagttctcaagtcacttggccaagattagccaggcagtaaaccctggygctgattcaatgcactggctgtgtcagtcagagccctctcttaactcttctttttttttttttttggagacagagtcttgctctgtcgcccagcctggag

SEQ ID NO: 21004 - DNA, 201 bp, Homo sapiens
cagcaactctgttgatgtatgcatgaatttggaaaatgatccatgtgcctttcccttcaaggaacatggtggtggctttgaaggaactgtccatccgaggygactttaggactaccgtggaatacctcattaacctcctggagaccgagagcttccagaacaacgacatcgacaccgggtggttggactacctcattgctg

SEQ ID NO: 21005 - DNA, 201 bp, Homo sapiens
ggcaacagagcaagaccctgtctcttaaaaaaaaagtataagtaatcccctataagtagcggatattcaggctgtttctctctgttttttttttttttttkggggggggctattatcaacagcacagtgaggagtacccctgtagctgaatctctgcctccatcctttattttcttaggatatgtttacctggtccataaa

SEQ ID NO: 21006 - DNA, 201 bp, Homo sapiens
acattgcccaatgtcccagggttaggagtagaataatcacccccagttgagaactgctgcaagaggcaaaggaactatcaaaaagaaaataaaaggataawcttttttttttttgagacagagtcttgctctgtcatccaggctatcacccaggctagagtgcagtggtatgatcacagctcactgcagcctggacttcct

SEQ ID NO: 21007 - DNA, 201 bp, Homo sapiens
tcagggttgaaaactcgtgcctagcttggggtcagcagactgctattataaacggccagacagtaaatatttttggctttgtggccatgtggtctctgttrtaactactcaactctgctgtttcctgcaccagaagccatagttatgtaattgaacaggcctggctgtgtttcaatcagacattatttatagatggggaaa

SEQ ID NO: 21008 - DNA, 201 bp, Homo sapiens; identical to SEQ ID NO: 3870

SEQ ID NO: 21009 - DNA, 201 bp, Homo sapiens
cccgtcacctggaagttcagatcctcgctgaccagtatgggaatgctgtgtctctgtttggtcgcgactgctccatccagcggcggcatcagaagatcgtkgaggaagcaccggccaccatcgccccgctggccatattcgagttcatggagcaggtacacttctcagagcccagggggcagcttcagagagagccgtctc

SEQ ID NO: 21010 - DNA, 201 bp, Homo sapiens
tatgtggaggaatggacagcagggagggggctgggagatagagaaggagagtagctggaaaatggcagaaaagtttgttaatttacaggcaggctgaagcrggaggatcgtttgagcccaggagtttgaggctgcagtgagctatgattgtgccagtgtaccccagcctgagcaacagagcaagaccctatctctcttaag

SEQ ID NO: 21011 - DNA, 201 bp, Homo sapiens
caaggggtctgagagcccacaggccagggcattccccatcatttttacagagagagctgtggaatagttaagagcacaacacgctggtggctgaggctggrggctggtgtgctggcttctccacctagccatcatgtgacttggggccaagttctgtgattttctgtgcctcagtttcctctgaaatgaagtcatcgtgtt

SEQ ID NO: 21012 - DNA, 201 bp, Homo sapiens
caggatctgttccgagcctccccagcttctggtgctgctggcagtccctggtgatttttggcttgtggatgccttgccccagtctctgtctctgttttttkttgttgttgttgttgttgttgttttttcaaacggagcctcactctgtcacccaggctggagtgcagtggctcaaccttggctcactgcaacctccatctc

SEQ ID NO: 21013 - DNA, 201 bp, Homo sapiens
ggattacaggcatgcaccaccatgcccagctaatttttgtatttttaatagagacagggtttcaccatgttgtccaggctggtcttgaactcctgacctcytgatctgccctccttggcctcccaaagtgctgggattacaggtgtgagccactgcgcccggcctcctaaaatgttttctaggagcttgggggaaagagga

SEQ ID NO: 21014 - DNA, 201 bp, Homo sapiens
gcttctggtgctgctggcagtccctggtgatttttggcttgtggatgccttgccccagtctctgtctctgtttttttttgttgttgttgttgttgttgttktttcaaacggagcctcactctgtcacccaggctggagtgcagtggctcaaccttggctcactgcaacctccatctcccaggttcaagcaattcttctgtc

SEQ ID NO: 21015 - DNA, 201 bp, Homo sapiens
acctggttggtggggattcagagctgaacgggacatgactcccagctctgtggcctgcgaggtgtgtgaccaggtgcctgctgcctgtgcatctgggctcyggcatccacccagttagtgcggcagtgacctactaagctcctccgtaccaggcgctgtgctgggtgttgggatagcattctgggtgtgactcgtggagct

SEQ ID NO: 21016 - DNA, 201 bp, Homo sapiens
tttgcttttctgcaaaaatgaaggcaaattgtatgtggataattttatagttgaggaagtggagagacgggatttacttaaggtcatccgtgaggggaagkgtaagttcaagcccatggatggcacagtctttctaccacgctgctggccacatgcatgcggattttcttgttgattttgtgtgtgtattgttcattgacc

SEQ ID NO: 21017 - DNA, 201 bp, Homo sapiens
ctccttcagtggaagcaaatgctggccgaaggtcagctctctagagccaatgttggttggcttccagctttatcaaaaagaattaaaatagccacttgccyggagattgggcctgaaacaaggccagtccggcagctttgtgtgttcgcttgcctagcctgcggtaatgggcttgtggcctgcctgatggaggggctctgt

SEQ ID NO: 21018 - DNA, 201 bp, Homo sapiens
caaactcctgaactcaggtgattcacctgcctcggcctcccatagtgctgggattacaggcgtgagccactgcacccggccctgaggtccagtttctcatrtgtaagtcaaggtccaaaccagtagacacaggaagcttggaagaaacagaaaccacgctggagaagagaagtttaaaaagctctcattaatatcatcgtt

SEQ ID NO: 21019 - DNA, 201 bp, Homo sapiens
acggccttagacaatacaaacagcccatcctgatctatatcccgccctatgcggagctccggggaggctcctgggtggtcatagatgccaccatcaaccckctgtgcatagaaatgtatgcagacaaagagagcaggtgggtgtgttgcccttagcctggcttagccttttcttgttctcccagccttgagagcccatgac

SEQ ID NO: 21020 - DNA, 201 bp, Homo sapiens
tcagcacacatttcctgtgctgggttaatgaggcagggcctgcccacccattccctgcagcctcacataaatgcttgtgagacagactgggagatcgagtracttcacttggtgagtgtagttagaagaccgcccttggccctgggctgtggggacccacatggagaagctatgatcagattgtgtaggggaaaaccctca

SEQ ID NO: 21021 - DNA, 201 bp, Homo sapiens
cagaaataaattgggggagatgtgtgattctctctcactctctgttttccctcctttctggtccagatcatgtttcactccttcggcaacaagcaagggcsccagcacgggatgctgatcaatactccctacgtcaccaaggatctgctccaggccaagcgattccaggcccagaccctgggaaccacctacatctatgac

SEQ ID NO: 21022 - DNA, 201 bp, Homo sapiens
tcaactctgaaagtgctgagattataggcgtgagccactgtgcctggtaagaaatgtttttagtgtttggttatgcttttgaacggtagtagaatcacagyccctgctctggtttctttcataagccgaaggcaggatcccatatgtgaaatttttccaagagaccgttatggattttgctcctgaaaagcctttgtaaga

SEQ ID NO: 21023 - DNA, 201 bp, Homo sapiens
tgtgagctgggcctttgctgagacagaatagtgggcccgggtctgtttccaggggctctgaggctggttttgttctctgtctctgcaccacgtgtagattwctggcatcttccctggtttactactggagtccctggggcttattccggttgctctcctctgtcagaagtgcctagttgccctttgtgggccatccaaggt

SEQ ID NO: 21024 - DNA, 201 bp, Homo sapiens
atgctttcacaatcatcctcctttgcccctaatgcctcttggctacctttggggacctagctgcccccaacttgattttaaatgtcacatatgcacaatgyagaaaatttcaaaatttcaagcgagcataaaaaatcaggaaaacaaatccatcatgtgctaatgcctagaggtaatcctggtaaacattttagcaaatct

SEQ ID NO: 21025 - DNA, 201 bp, Homo sapiens
cattttatttcattttgatcaatttaaatagctgtgtgtggttaggggtcaccgtatcagacagggcagatctaaagtgttccattgcaaggttgttggcytgctaattttgttctaatttttgttgttattacaaataatgctgcaatacacattcctctatttcttgctgccttgtgtcataaactgtgaattttatag

SEQ ID NO: 21026 - DNA, 201 bp, Homo sapiens
agcaatctttgttaaccatgttatttccagataggaatccaagctcaataaagtggcctgaagaataggcttttgcctctactgtggtttggctccaaatygggttgccattggtcaaaacataacttccatttggtcccagcaggttcctggactcttccctgctgtggggggtgggtccctcgccactctccagaattc

SEQ ID NO: 21027 - DNA, 201 bp, Homo sapiens
gtttcaaaatgactttcccttcagggttaaaacaaatgcaactttcttatcatgttggctcaggtacactggaccccttctgattggttgctattgttttytggaaaactggtcagtttcaaagttcagactgattgcgaggcagttggccaggagtgatccgtcgttttggtttggtctgtaggggctaagcacaggagc

SEQ ID NO: 21028 - DNA, 201 bp, Homo sapiens
gctgcaatacacattcctctatttcttgctgccttgtgtcataaactgtgaattttataggttgaaggccctttagggtgtgtgttttctgagagaaaacygaactgaagtaccagatggggcaggcgctcttcctggagggagatgtagtgctggggccagggcttggctgtgtctctctcacgtgtcccaaagctcttg

SEQ ID NO: 21029 - DNA, 201 bp, Homo sapiens
cttcaaggggctgtctccttcctgcagtgcccagagcatcccagagttctcacaactgtgttcctgttttgggagttcgcactgggttccctctgaactgraacactctctttctcccaacccctgaacccagacctcccaccagggccagcttcacaggcatgccctgtgcttcaagggaccccgtgcttgttttgacgc

SEQ ID NO: 21030 - DNA, 201 bp, Homo sapiens
cagtctgcatttggtgaaggaactgatagtcaccatttacagttccctgaaaagacctctggaacccccttggcctctttctgtttcttcacagtgtgccrtccgcctggccaagaccgtgggctatgtgagtgcagggacagtggaatacctctatagtcaggatggcagcttccacttcttggagctgaatcctcgctt

SEQ ID NO: 21031 - DNA, 201 bp, Homo sapiens
ccacctacatgaaggaagaggttgacaggtgcgtgggggtgcgagtcccactgtgggctgggcatgcacagctctctgtcctaggcatggaaaacacagcrctggcctgtgtgcaggtccaagggtcttagagaaggtgcctttctggtaaattctgggggtgtgcagagaagttaatctcttggttggaattctgtgcaa

SEQ ID NO: 21032 - DNA, 201 bp, Homo sapiens
tcacttcctcaaagggccttccctgtccctttctcacatttaaaaaatctaccccccaattaccttcagtatctttatcaatcactctgattagttgtctytgcaacatttaattatttcttgagattatgtctgtttttgtttgtttgtttgtttgtttgttttgacacagtttcactctgtcacccaggctggagtgct

SEQ ID NO: 21033 - DNA, 201 bp, Homo sapiens
tcccactgtgggctgggcatgcacagctctctgtcctaggcatggaaaacacagcactggcctgtgtgcaggtccaagggtcttagagaaggtgcctttcyggtaaattctgggggtgtgcagagaagttaatctcttggttggaattctgtgcaactggcagatatttaggggaggatcctaggaggcccttttctagta

SEQ ID NO: 21034 - DNA, 201 bp, Homo sapiens
atgtgatgaatgagtgtgggaatggatgaacgaatggatgaatgaatggatgaatgaatgaatggattaattaattaattaacaggtgaataggcattttrtagttgttgctctttagcagcagtaaatttttgttttcataaaattctttctccttgtatcttgtgactttggagactagttctggggtgaaactccaat

SEQ ID NO: 21035 - DNA, 201 bp, Homo sapiens
ggggaggatcctaggaggcccttttctagtaacctggttggtggggattcagagctgaacgggacatgactcccagctctgtggcctgcgaggtgtgtgaycaggtgcctgctgcctgtgcatctgggctccggcatccacccagttagtgcggcagtgacctactaagctcctccgtaccaggcgctgtgctgggtgttg

SEQ ID NO: 21036 - DNA, 201 bp, Homo sapiens
aaatttttcttctgtctttgataggatcatgcaaactcagcctttctctcctttctcccagctggcaagggctggctgagaatatgaatccaacaacctcrttaagctctctcctcccatctcctcccctttgggttgatctcagggcagggattagaacttggcctttccttggacttggaaacagtccctgaggtttgg

SEQ ID NO: 21037 - DNA, 201 bp, Homo sapiens
gcatatgctaccacgcccagctatttttttttttttattttttgtagaggcagggtctcactgtgttgcccaagcttgtcttgaactcctggcctcaagcsatcctcccacctcggcctcccaaagaaagcatcacagccttggccaggcacagtggctcacgtctgtaatcccagcactttgggaggctgaggcgggcgg

SEQ ID NO: 21038 - DNA, 201 bp, Homo sapiens
tggcctttccttggacttggaaacagtccctgaggtttggaaatcccatgcaacacttagaaacagagctaatgagaacattacatgatgtggcaaaatcrctgcttacatgctctgaaatgagcacggttacaagaacctcctgttctgtgtgatcccattttgttggacaaacagcatgtggttagtagtgcatagtgg

SEQ ID NO: 21039 - DNA, 201 bp, Homo sapiens
atgtggctccacggcccaagtgctctggctggtgcaggtgcactcgtgacctccactggttcagtgagacaggtggactcaaggctggtagcgcttctccygcctccacctgcagacagagctcgtcgcagcagccaccgtgatggtgcagaaacacaaggaagccgcgccctgctttactcagatccctctctgtggctc

SEQ ID NO: 21040 - DNA, 201 bp, Homo sapiens
tagtaattatttatcctattctgctgctgaaatattaatatgataatgtggaacagaaagttttaccttcctaaaaacaataatttccaagttccaaaacrtatcaggccctgggaatttcagataagggattatggactatatataacatgcttagaatagttcctggcatatagtaagcacaaaaaatgcttctgctta

SEQ ID NO: 21041 - DNA, 201 bp, Homo sapiens
attatggactatatataacatgcttagaatagttcctggcatatagtaagcacaaaaaatgcttctgcttagtaaatgtgcctaataaatgtgtgtgtgtrtatgcgtatgtgtttgtatgtgtgtgtcttagagggactgtaaagagtgtctccaaatagtaaataatcattttatgtggtatgattatgagtgatttaa

SEQ ID NO: 21042 - DNA, 201 bp, Homo sapiens
atagtaaataatcattttatgtggtatgattatgagtgatttaaattttcttctgcattttctaactttctgctctaaatgtcattttataatgcattttracaatgtataataataaaacagtataaaaatattgggagaaagagtaaaccaatcatctcacttcctagataggaagctgaagcccagagacattccagg

SEQ ID NO: 21043 - DNA, 201 bp, Homo sapiens
gtgctgatcagaggtattattgacaagcaccacagactgagtcagagacttggctttcttttttaggataatcacagccctgtccctatcatcacacccaytgaccccattgacagagaaattgaattcctcccatccagagctccctacgacccccggtggatgcttgcaggaaggcctcacccaagtaagttctaaagt

SEQ ID NO: 21044 - DNA, 201 bp, Homo sapiens
ccgtgttctggtaggactgacagtctgtgggttggatctcttgattttagatcgccatgggcgtgccactgcaccggctgaaggatatccggcttctgtayggagagtcaccatggggagtgactcccatttcttttgaaaccccctcaaaccctcccctcgcccgaggccacgtcattgccgccagaatcaccagcgaaa

SEQ ID NO: 21045 - DNA, 201 bp, Homo sapiens
tacaggcatgcgccaccacgcccggctaatttttgtgtttttagtagagacgtggtttcaccatgttagccaggctggtcttgaattcctgacctcaggtratccaccagcctcggcctcccaaagtgctgggattatagacatgagccaccacgcccggcctggcaacttttttttgtaaagggctccagatagtaaaga

SEQ ID NO: 21046 - DNA, 201 bp, Homo sapiens
cagggtgcggtccccacgatgtgcgtttccccccaccctcctatgtgtcccctaccgtgctcagccctcaccatgcacagtcccaccgtgctgccggcccstgcccgagcctctgccttctgccctgggaggttggctcacgccagcgcccccatccctccccctgcagatcctgattgcctcccacctcccctcctacga

SEQ ID NO: 21047 - DNA, 201 bp, Homo sapiens
acaccgcatgtgctcactcataagtgggagctgaacattgagaacacatgggcagagggagggtaacaacgcacaccggggcctgtcggggggtgggggcygaggggagggaacttagaggacaggtcggtaggtgcagcaaaccaccatggcacatatatacctgtgtaacaagcctgcacgttctgcacatgtatcctg

SEQ ID NO: 21048 - DNA, 201 bp, Homo sapiens
ttacgtggcagccaacagtggcgcccgtattggcatggcagaggagatcaaacacatgttccacgtggcttgggtggacccagaagacccccacaaagtaygtcgtgaaactggcggggcagggtgattctgctcagctactactgtattttcagtgggagtgctagcacctgcaagaggtgaaaaaaatctcacttatgt

SEQ ID NO: 21049 - DNA, 201 bp, Homo sapiens
ggtgtgttgcccttagcctggcttagccttttcttgttctcccagccttgagagcccatgaccttgggagatcatggagggatgcagtggctggaacctgwaagtggtggagaaatgttgtctcttctttcatggtttccacttccccttcccaaggaagtttgcaatcaaaaaataaaaaggaaagaccaaaagcacttg

SEQ ID NO: 21050 - DNA, 201 bp, Homo sapiens
ctgcagaccctgccaacctggattctgaggccaaggtgagggggccgggagctgtggctgctggtttagccagcggtactgtcgagagtgggtcctgggcrtgggggtcccatccctgccctgccaacttaggtggagaagcaggggacccagtgcagtccctggccctggggggctcagtgcctgtttctctgacacttt

SEQ ID NO: 21051 - DNA, 201 bp, Homo sapiens
ctcacacgagcctgtgtttgtgtcggttgaggtagaagtgggtgccaggtttttatgggggacattttttcaactatggccagtctggagtcctggtgacrtcctgcctctgagcaggtgccttctcctccctgagcctcagcttacttgcctgggatgatctgggaatgatctcagagcctgggcccagccccgggcagc

SEQ ID NO: 21052 - DNA, 201 bp, Homo sapiens
caccgtgcccggccaagtcatctcttaaaaggggagaaaagcctgcagggctaggggtggggatgggtgtgggtggaggggtagagggtgggcaggaaacrgagtgttctctgctgggagaacagcaccccagcactgtgcgtcatgcacagtaggtatttgtagaatgaatgagtagacgaatgagcacatttagtctgt

SEQ ID NO: 21053 - DNA, 201 bp, Homo sapiens
ctaggggtggggatgggtgtgggtggaggggtagagggtgggcaggaaacagagtgttctctgctgggagaacagcaccccagcactgtgcgtcatgcacrgtaggtatttgtagaatgaatgagtagacgaatgagcacatttagtctgtgttgccctctagggagctttttatttttccatgtgtttacctaagactga

SEQ ID NO: 21054 - DNA, 201 bp, Homo sapiens
ctgagagaatgtccgtgtgtttctgccttgtcaggtttacgtgcggaggggctacatcgcctatgagttaaacagcctgcagcaccggcagctcccggacrgcacctgcgtggtagaattccagttcatgctgccgtcctcccacccaaaccggtatggagtgggacacacccagggacggcctgtgtttctgttcttcct

SEQ ID NO: 21055 - DNA, 201 bp, Homo sapiens
gcttgagcccacccacccagctcctgagatcttatggggaagctgcttatcactagcttcaggtgttttctatctatcaggagattgcctttccctggagscagctgtgaccaatattaattttagagagacactttagcaactgcctaactatcacctgatggttgccttcctctcctgccctgctcatgtctgcttaac

SEQ ID NO: 21056 - DNA, 201 bp, Homo sapiens
tctagattatatgtatagtctttttattttgaagtcatctaggacccaccgtaagttataagatactacagagaatttccaagtacccttcacccagcttyccctatggtacttacataaccgtagtacattatcgaaaccaggaaactgacattggcacaatattgttaactcagtacagaccttattttgaatttcacc

SEQ ID NO: 21057 - DNA, 201 bp, Homo sapiens
ccccactatgaggtaatgtgcattttctccttgtaactgaggagtgcagagttcaggtggggtccacacccttcccaacctgtgcccaccttgatcaagcygtttgctgatgccaaagcttcaagggtggctatgcacaaaaggagaagacacgagccttctcagaagtttccttccttccttctttccttctttccttcc

SEQ ID NO: 21058 - DNA, 201 bp, Homo sapiens
caggcatggtggctcacacctgtaattccagcactttgggaggatgaggcaggaggatcgcttgaggccaggagttcaagaccagcctgggcaatatagtragacctcatctctaaaaaaaaaattaagaatttgccagacattgtggtgcatacctatagttctagctacttgagaggctgaagcaggagggtcacttga

SEQ ID NO: 21059 - DNA, 201 bp, Homo sapiens
catgtgacatgctttgcttcccccacctgcattttcattgaggactgggcagaaataaattgggggagatgtgtgattctctctcactctctgttttcccycctttctggtccagatcatgtttcactccttcggcaacaagcaagggccccagcacgggatgctgatcaatactccctacgtcaccaaggatctgctcca

SEQ ID NO: 21060 - DNA, 201 bp, Homo sapiens
cacacctgtaattccagcactttgggaggatgaggcaggaggatcgcttgaggccaggagttcaagaccagcctgggcaatatagtgagacctcatctctaaaaaaaaaattaagaatttgccagacattgtggtgcatacctatagttctagctacttgagaggctgaagcaggagggtcacttgagcccagaagtttgt

SEQ ID NO: 21061 - DNA, 201 bp, Homo sapiens
ttttaaaaattgtggttaaatacacataacaaaatttaccatcttagccatttttaaatgttctcttgagcagtattaaatccattcacattgttgcacarccatcaccatcatccatctccagcacttgcaaaactgaaacttgacactcgttaaatggtaactcctgagtccctcctccctccagcccctggcaaccat

SEQ ID NO: 21062 - DNA, 201 bp, Homo sapiens
cagaacttcagtttatggctgttattaatacggtatttacatgagatgtgttaatgtgtcattgacatgttactaacatgttattaacatccatccctacratgttcacattaagaaaaaaaaaacagtggctttcagtgcagggaactggattcgtagcctcactaaagtattttttaagggatttaaatacctgtacct

SEQ ID NO: 21063 - DNA, 201 bp, Homo sapiens
gtttcaccatgttggccagtctggtcttgaactcctgacctcaagtgatccacccgccttggcctcccaaagtgctggaattacaggcatgagccatcacrtctagcctacttaactatctttcatagggaaaatgaaaccaaaatgttgagtgaatttcctgccctcgtgtcttcatggcatagaaacctaacattgtag

SEQ ID NO: 21064 - DNA, 201 bp, Homo sapiens
tccactgatggacacttggattgtttctacctgttggctactgtgaataaggcagctatgaacatgagtgtacgattttcttagtttttacctattgtccrggatcccatccaggttagcacattgcatatagttgtcaggtctctttcaaccgccctttaaaaaattgtgctcacctccacccacgtgcaaacacacacc

SEQ ID NO: 21065 - DNA, 201 bp, Homo sapiens
tgaggtgggagaatcacttaagcccaggaggcagaggttgcagtgagctgagattgccccactgcatcccagcctgggtgacacaggcagaccctgtctcaaaaaaaaaaaaaaaaaaaaaatgaatgaggaggctgcaccagactcctgagatgtgacctgtggccctaaagctcactgacatacagttagttattttgt

SEQ ID NO: 21066 - DNA, 201 bp, Homo sapiens
ggatcccatccaggttagcacattgcatatagttgtcaggtctctttcaaccgccctttaaaaaattgtgctcacctccacccacgtgcaaacacacaccrtacctcacaaagatgatctcactgattgtcttgttgctttattatttggcctccaggagactggaaacaccgtgagaacagggccttttggctttcttgc

SEQ ID NO: 21067 - DNA, 201 bp, Homo sapiens
tccttagggagaccagggcaaggggtctgagagcccacaggccagggcattccccatcatttttacagagagagctgtggaatagttaagagcacaacacrctggtggctgaggctggaggctggtgtgctggcttctccacctagccatcatgtgacttggggccaagttctgtgattttctgtgcctcagtttcctctg

SEQ ID NO: 21068 - DNA, 201 bp, Homo sapiens
gttgagaatttagaattttagcacccaggggcaatgcgggtggttctgctggcacctcctgagacactggcacttcctcaaggaacattcccagccccagratcaggggcttctgacagagaagactcatgtgtgcttgttgtttctaatgaactgtagtgagaatcccacatcaaagaatcttcagggagtcaagcctta

SEQ ID NO: 21069 - DNA, 201 bp, Homo sapiens
tcaggaccaccagggggtgcaccagagtgtctgtcatgtgaccctgagctcaggctcttgggggcacctccaatttagattcctcttaatttgtcaagctstgtcattaccgatgagtccctgaggtcaaggactactttcgatgtccactgttgtgatcctggggcttagcacagtgctcggagcatagtgggtgctcag

SEQ ID NO: 21070 - DNA, 201 bp, Homo sapiens
gtttgctggttacccattgactcttttgcacacatacaggcagggtagtaatacctcttccctggtgttcacaggtcaacacccaagcagttttgggtgtrggccatggaaggtggtgtcaaaagacaaaatcacagcaaatttgatttaaaactcgaattggcttttatttacaattctaggatcatgcagcacctcatt

SEQ ID NO: 21071 - DNA, 201 bp, Homo sapiens
taaaataattagtacatctgtccagtaaaaaaaaaatttaaaaatatcacatggtctcttttctccagagtattctattaattgtatttgttttctttttwaaaaaaattataattattatgggtacataataggtgtacatgtttatgggggtacatgtgatcttttggtataggcataccgtctaataatcaaatcagg

SEQ ID NO: 21072 - DNA, 201 bp, Homo sapiens
ccccatctctactaaaaaaaaaaaaaaatagaaaaattagctgggcgtggtggcaggtgcctgtaatcccagctcttcaggaggctgagttaggagaatcrcttgaacctgggaggcagaggttgcagtgagccaagaccacgccactgcactccagcctgggcgacagagtgagactctgactcgaaaaaaaaattatta

SEQ ID NO: 21073 - DNA, 201 bp, Homo sapiens
tatgggggtacatgtgatcttttggtataggcataccgtctaataatcaaatcagggtgattggggtatctattacctcaagcatttttcatttctttgcrctaggaacattccagttctactcttttggttagtttaaaatgtacagtcgattttaattgactgtagagtcaccctgttgtgctatcaatactatatctt

SEQ ID NO: 21074 - DNA, 201 bp, Homo sapiens
tgttcattgacctgggttttccctctgcaataccagtaagtaaaattgagcttctagtaagtctgagaggaagggcttaatgcatgagacagcaactaccrccatgcttgaactgtttcatcaaaaagcacaacaatggatgtttgtataaaggtggtgttgtgcttggaggtggatattaggttggtgcaaaagtaatcg

SEQ ID NO: 21075 - DNA, 201 bp, Homo sapiens
aatcccagctcttcaggaggctgagttaggagaatcgcttgaacctgggaggcagaggttgcagtgagccaagaccacgccactgcactccagcctgggcracagagtgagactctgactcgaaaaaaaaattattattattttttcttgataagttgctaaataatctgtatcctctggcaaatcttctaaccgtttgag

SEQ ID NO: 21076 - DNA, 201 bp, Homo sapiens
gcgcaggcgtgtagaccagtgcggagggtcagaagatctaccccgtgacagcagaggtcattattgagtaagaaatgagaaaatggtcggtcctctgttgkttttattttatttattttattttttcagacaaggtctcactctgtcacccagactcactgcagcctcgacctcctgggctcaagagatcctaccacctca

SEQ ID NO: 21077 - DNA, 201 bp, Homo sapiens
ctttgtaggtgtggtctcatgccatcttcaaaataccactgtgggggcactaagtggagagtgttgtacccatttcacaaaccactttaatggaaaaaaaraaaaacctcacacaaatttggaattgtcccagcaagtccaggacgtggggtccccctatttataataatatggacatactttgttgggggactacattgt

SEQ ID NO: 21078 - DNA, 201 bp, Homo sapiens
ggctgtgaacaccttcccagaaacttgaagaactgagaattttgtttatctgttttttttcttaaacctgttgttgaaatgttatttaatatatggtcagrgcatagctatccactgctgtcaggcatggctgcttaaacaggggcccagggtgtttatgttgtggccaagtacttggcacccccgggaagtgtggccctg

SEQ ID NO: 21079 - DNA, 201 bp, Homo sapiens
attctctctcactctctgttttccctcctttctggtccagatcatgtttcactccttcggcaacaagcaagggccccagcacgggatgctgatcaatactscctacgtcaccaaggatctgctccaggccaagcgattccaggcccagaccctgggaaccacctacatctatgacttcccggaaatgttcaggcaggcaag

SEQ ID NO: 21080 - DNA, 201 bp, Homo sapiens
caaatgataacatgaaaagaaagttcctagaacactgtctggcactaagcaagtatcctataaacatcagctcatcatgtgaccttatgtttgatcccccmcaccatgctggctttctgatgcacagagagggggagtcagggtcttcctatgtagggaaactgagtattcccctgtggtcagggggccattccactctgg

SEQ ID NO: 21081 - DNA, 201 bp, Homo sapiens
acacacaaatttaattaatgtgtacactgggagaaccgcagagtgattacccagaagggaatttactggccagcatttacattatttttggttggtttgtkggctatgaaagtaggctacctttattattactgcgatgacttctaggtagtgttttggttctttgcatttattacattacttgaagaagcattcattcat

SEQ ID NO: 21082 - DNA, 201 bp, Homo sapiens
cctcagtctctcgagtagctgggactacaggtgtgcaccaccatgcccggctaatttttgtattattagtagagacagggtgtcaccatgttggccaggcyggcctcaaactcctgacctcaagcgcctgcctcagcctcccaaagtgctggtattacaggcatgagctaccaggcccggcctcattcgtttattctaact

SEQ ID NO: 21083 - DNA, 201 bp, Homo sapiens
cgtccggaaggcggggccctcctggggcggggtcggtgtgggggcggggcctgggtggggcctaggcgggcgcgatggcccgggactctggcgcgcagggygcatttcgggatggagcaagcgcagcgcgaagttgggcgcccgccggctgcagcagaaccccgcccgcggcgctctaggactgcatctcggcctccgggt

SEQ ID NO: 21084 - DNA, 201 bp, Homo sapiens
tggcccgggactctggcgcgcagggtgcatttcgggatggagcaagcgcagcgcgaagttgggcgcccgccggctgcagcagaaccccgcccgcggcgctstaggactgcatctcggcctccgggtcgcgacctggctgtcctgctgggtcccgggcctcgggtcggcttcaggcggttaaggggtgcatgctctgcaccc

SEQ ID NO: 21085 - DNA, 201 bp, Homo sapiens
tgttttagagtattttaaagccagcccccatcatgtcttttcatccataaatacgtaagggtagatctttaacagataatgactctcaccctcttcccccrgtttttaaaaacataactgaaatactaatattacacccaacagaatcagcaatatcattgaaacccagtgtggtttaacagttatctcaaaatacccttt

SEQ ID NO: 21086 - DNA, 201 bp, Homo sapiens
ggttgcagtgagccgagatggtgccacttcactccagcctgggtgacagagctagactctgtctcaaaaaaaaaaaaaaaaccaaccaaccaaacaaaaamcctcagcattatacatgtttgtctcttatttgagaggaatataagaggccatatgtgtaatgcatgttttaaaagtccagttaatagaggggcttccatt

SEQ ID NO: 21087 - DNA, 201 bp, Homo sapiens
agatatggaatcaacctaagtgtccaccaacagatgactagatacagaaaatttggtgtatatatatatataattttttatggctcagtagtattcttttktgtgtatgtgtgtgtgtggtgtgtgtgtgtgtgtatacctacatgtatacatgggtgttcctcttacaaaattaatagcttttttcttattgaaaataac

SEQ ID NO: 21088 - DNA, 201 bp, Homo sapiens
ggaatcaacctaagtgtccaccaacagatgactagatacagaaaatttggtgtatatatatatataattttttatggctcagtagtattcttttgtgtgtrtgtgtgtgtgtggtgtgtgtgtgtgtgtatacctacatgtatacatgggtgttcctcttacaaaattaatagcttttttcttattgaaaataacacatca

SEQ ID NO: 21089 - DNA, 201 bp, Homo sapiens
ctgccctctggtgggagggttccccaccatcatcatccacccacccacaaattggtgatttgggaaaccagaggacagtgtagttcaggccattctcggargttaggagttctatgggttggaatgttgttcagccaaagaaagaaagaatactgattcatgctcccacgtggatgaacctattgtgctaagggaaataag

SEQ ID NO: 21090 - DNA, 201 bp, Homo sapiens
ttccccgttccccccggggctccaggctgacctttactgtccaggcagaagactggaaaacttctccctggggaatctggccagcgagagagaaagacacraagatactgactcaggggatccccaacgcactcctacctcaccctacattgagctcagggtcaaccaggtccaccacagtctcagaaattctgttctcac

SEQ ID NO: 21091 - DNA, 201 bp, Homo sapiens
attcctctttttttttttttttttttttgagacctcccgaatagttgggattacaggtgtacaccaccattcccagctatttttttgtatttttttagtgragatgggttttcaccatgttggccaggctggtcttgaactcctgacctcaggtgatctgcctgcctcggcctcccagagtgctgggattacaggcatgag

SEQ ID NO: 21092 - DNA, 201 bp, Homo sapiens
caaccaaaacttcaccagccagagggaaacctctgttctcattgttctacttcttccttctagtgtgtttttctcctctggagtgaagttttactggctaktcttttaagcatctcctgtactctctcccaaattagaaaaatctagaggtggtcttccatacatgtccatgttagcagtgagcttggttttaaccctggt

SEQ ID NO: 21093 - DNA, 201 bp, Homo sapiens
ggctggagcgcagtggcacaatcttggctcactacaacatccgcctcctgggttcaagtgattctcctgcttcagcctctcaagtagctgggattacagaygcacaccaccatgcccggctaatttttgtatttttagtagagacggggtttcaccatgttggccaagctggtctctaactcctgaccttaagtgatcttc

SEQ ID NO: 21094 - DNA, 201 bp, Homo sapiens
cgttcatgaagaaggaagtagattagtggccgccaggggctgcagtgcagggaaaatggagagtgagcgctaatgactacaaggtttctttttagagtgaygaaaatgctttaaaattagatggtggtgatagttgcacaactttatgaatacactaccaaccactgaatgtacactttaaagggagatggtggaatatga

SEQ ID NO: 21095 - DNA, 201 bp, Homo sapiens
cactgcagccttgacttcctgggctcaagtgatccttctaccttagcctcctgagtagctaggactacaggcaggtgccaccatgcctagctaatttaaatttttttttttttttttttgagatggagtctgaccctgttgcccagtctggagtgcagtggtgcaatctcggctcactgcaacctccacctcctgggttca

SEQ ID NO: 21096 - DNA, 201 bp, Homo sapiens
aagcctgcaattgtaatgaccatgatcttttacaaacttacgcagtcttccttccccttgaagtcaagctgtgtgtcctcttagcaccgccccctttaccsccacccccatccaaagaaacacgggcttgagttggctgctggggagatgatgcccgccttggaaactctagctggccttggcgggaggggaggaaggagg

SEQ ID NO: 21097 - DNA, 201 bp, Homo sapiens
gcaatggggaggggctgtaaatacagatgaagcttcgctccctcacccactgcttacctcccactgttcagccagttcctaacaggccacggaccagtgcycgtttgggtactggtttggggaccctttctttaggggactgctgtgtgtcatctgaatcatcagcagtcagacctgtcttgttttcccatccagatagcc

SEQ ID NO: 21098 - DNA, 201 bp, Homo sapiens
actgcagccttgacttcctgggctcaagtgatccttctaccttagcctcctgagtagctaggactacaggcaggtgccaccatgcctagctaatttaaatttttttttttttttttttgagatggagtctgaccctgttgcccagtctggagtgcagtggtgcaatctcggctcactgcaacctccacctcctgggttcaa

SEQ ID NO: 21099 - DNA, 201 bp, Homo sapiens
ctcccaaagtgctgggattacaggcctgagccaccatgtctggcctataaatgtattaagttttgtgaagtgctgacaaatagtaaatacttgatagatayattagattgagacaatgggatgaaatagctttatgtatgataaaacactgcaaaaattgttattgtggcttttgggacaattgcaaaggaaagtggatga

SEQ ID NO: 21100 - DNA, 201 bp, Homo sapiens
ctcacaagattgcatacacttgttgtttaggactatggagatgtgtaattgctagaaaaaatcagcatcagtttcctctggtgtggagggacagagcaggwaacctgttttgttgttaaacatttaaaaaattgttttcagttttctaaagaaattttgtgggctgggcgtggtggctcatgcctgtattttggaaggccg

SEQ ID NO: 21101 - DNA, 201 bp, Homo sapiens
ggagagagattttagtgtggattccccacaaactgcaagtttcacagccaagggctaggaagggagtcctcctaaaacacatagactgctaaccttaagcycatcctttaagcttcagagaaacatctaggaaaaatgaaccattaataaattaactgaattttctagcaagttttctgtgctgaccataaatattaaagc

SEQ ID NO: 21102 - DNA, 201 bp, Homo sapiens
gtagaaaagtacatgaaagatattaataccatgtaacaagtcggaacgattagaatgtgtggacttcttccctgatcataaaactctcacccttgttatargttttttagtattattcaggttcctaaacaatgggcatgtaaagtaaaaattaacttaggattaaaaatctaaacatccaccttgggacaggtagaagaa

SEQ ID NO: 21103 - DNA, 201 bp, Homo sapiens
ctgctaaccttaagcccatcctttaagcttcagagaaacatctaggaaaaatgaaccattaataaattaactgaattttctagcaagttttctgtgctgamcataaatattaaagccctgtcctgtattgtgtaagtatgttttaaaatcacatttgtatcagagtcttttagcatcttggtctgttttgttgtgatttgg

SEQ ID NO: 21104 - DNA, 201 bp, Homo sapiens
tacaaaaatgtttaaaagtcggctgggcttggtagtgccctctgtggtcccagctacccaaggaggtcgaggctgcagcgagccacgattgcaccactgcrtactagcctaggtgacagaatgagatcccgtctcaaaaaaaaaaaaaaaaaaaaaaaaaaaaccgaaggtgcttcctgaccttgagcctccttgtaaatt

SEQ ID NO: 21105 - DNA, 201 bp, Homo sapiens
tcggttatgaaagagccctctggagttgggaggcatttgggatcttgtgctgaaggctcgggccatctaagaagccagaactcctgagaaggtgaggtcgsaaatgatgactgatttttcatggcatgagaacggggtcacagttcagagagtagagaaatgattgtggatcagagtgcagaagggcttgaaataaagttg

SEQ ID NO: 21106 - DNA, 201 bp, Homo sapiens
atttttggaagaacatccaggttaaaactttgttttaaaagaagcggctaggtgcgatggctcacacctataatcccagcactttgggaggccaaggcggrtggattgcttgagctcagaggttcgagaccagcctgggcaatatggtgaaaccctgtctacaaaatatacaaaaattagccaggcttggtggtggccacc

SEQ ID NO: 21107 - DNA, 201 bp, Homo sapiens
tgcctgcatgcaaatattggctgtagacctatcaggggttttcactcttggctacacattagaatttcctggtggggagatttttgaaaaatctggatgcyggggaccccacctctaccccctagacatgctgatgggaccccgacatcagaatcttataaagtttttcatgtcagggttgaaaactcgtgcctagcttgg

SEQ ID NO: 21108 - DNA, 201 bp, Homo sapiens
ctcagcctcctatgtagctaggaccacagtcatgcgctaccactcccggctaatttttttgatttttttgtaaagacaaggtctcaccttgttgcccaggytgctcttgaacttctgagctcaaatgatactcacgcctcagcctcccaaagtgctgggattattggtgtgagccaccatgcctggccttaatttttttgt

SEQ ID NO: 21109 - DNA, 201 bp, Homo sapiens
attgaacaggcctggctgtgtttcaatcagacattatttatagatggggaaattcaaagttcatataatttttatgtgtcacaaaacaggattcttttgattttttttttttttcgatgacttaaaaatgttggctgggcatggtggcttatgtctatagtcccagcactttagaagaccaagacaggagggttgcttgag

SEQ ID NO: 21110 - DNA, 201 bp, Homo sapiens
gatgatcctccttcagtggaagcaaatgctggccgaaggtcagctctctagagccaatgttggttggcttccagctttatcaaaaagaattaaaatagccmcttgcccggagattgggcctgaaacaaggccagtccggcagctttgtgtgttcgcttgcctagcctgcggtaatgggcttgtggcctgcctgatggaggg

SEQ ID NO: 21111 - DNA, 201 bp, Homo sapiens
tggaaggtcgaagctgcagtgagctgtgattgcaccactgtactccagcctgggtgacagagcaagactctgtctcaaaaaaaaaaatatatgtatgtgtrtatatatatatatatatatatatatatatatatttcagacaaacagccatccatccatccatccatttgatgatccattcatgtggatggcagactttga

SEQ ID NO: 21112 - DNA, 201 bp, Homo sapiens
cacctccctatactccgaggatgactgcaaggtaagcgtctaagcccagggagcaacctggggagcaggtgggccgtggcccccaggctttccagccctaycccttgcttctccctctcagagcctcagagaagagcccatccacattctgaatgtgtccatccagtgtgcagaccacctggaggatgaggcactggtgcc

SEQ ID NO: 21113 - DNA, 201 bp, Homo sapiens
gtaatcccagcactttgggaggctaaggtgggaggattgcttgagcccttgagtttgagagcagcctgggtaacataataagaccctgtctctacaaaaawtaaaaataaaaaaattaactgggtatagtggcacgcacctgtagtctcagctactcaggaagctgaggtgggaggatcgcttcagcccagggggtctagg

SEQ ID NO: 21114 - DNA, 201 bp, Homo sapiens
tccagcctgggcaacagggtgagattctgtctcaaaaaataaataaaagaaaaagtaagccagcaagtaaattttttagactttgcaggttggtgtggtckctgtcgtgaccactcaacactgcctttgtacaatgtaagggaatgggcatggctgtgttcccataaaactttgttgggagcccgaggtgggaggatcact

SEQ ID NO: 21115 - DNA, 201 bp, Homo sapiens
actattgaactgtacactcaaaaatggttaagatggtaaattttgtgtgtgttttttttttaccataatttaaaactctggattgtatttttgtttgtttstttgttttttgagacagggccttgctctgtcacccaggctggagcgcagtgacatgatcacgactcattgtagcctcgaccttctaggctcaagtgatcc

SEQ ID NO: 21116 - DNA, 201 bp, Homo sapiens
acttggacttggcttatagtagaaaggggtttggcaatttttttttttttttttttgagatggagtcttgctctgtcgcccaggctggggtgcaatggcayaatcttggctcactgcaacctccgcctcccgggttctatctatcttctatctatctttttttttttttttgaggcagagtctcactctatcccccaggct

SEQ ID NO: 21117 - DNA, 201 bp, Homo sapiens
ctttgtcatgccatgtgacatgctttgcttcccccacctgcattttcattgaggactgggcagaaataaattgggggagatgtgtgattctctctcactckctgttttccctcctttctggtccagatcatgtttcactccttcggcaacaagcaagggccccagcacgggatgctgatcaatactccctacgtcaccaag

SEQ ID NO: 21118 - DNA, 201 bp, Homo sapiens
gtagcctcgaccttctaggctcaagtgatcctcctgccttggcctcccaagtagctgggactataggcatgcaccaccattcctggctactttttttggatttttttttttttttttttttgtggagacaaagtctctgtgtgttgcccaaactggtcttgaattcttggcctcaagtgatcctcctgcctctgcctccca

SEQ ID NO: 21119 - DNA, 201 bp, Homo sapiens
gagatggagtcttgctctgtcgcccaggctggggtgcaatggcataatcttggctcactgcaacctccgcctcccgggttctatctatcttctatctatctttttttttttttttgaggcagagtctcactctatcccccaggctggagtgcagtggcacgatctctgttcactgcaacctccacctccagggttcaagca

SEQ ID NO: 21120 - DNA, 201 bp, Homo sapiens
cccaggctggagtgcagtggcacaatctcagctcactgcaacctctgccttccaggttcaaacaattctagtgcctcagcctcctgagtagctgggattayaggcgtgtgccaccacacgcagctcatttttgtctttttagtagagacagagtttcaccatgttggctgggctggtctcaaactcttggccttgagtgat

SEQ ID NO: 21121 - DNA, 201 bp, Homo sapiens
ttgggaattgggacattttcctggacctccttggtgatagaggctaaaaatgttgaaccaattacagtctcgggataaatgtgagattcattattcttctractttcttggtcccatttgttagaaaatagtgagttctctgcacctgatggtatttggtacctgagaggttttgaacaaagacttgtgaattgaatgatt

SEQ ID NO: 21122 - DNA, 201 bp, Homo sapiens
acaatctcagctcactgcaacctctgccttccaggttcaaacaattctagtgcctcagcctcctgagtagctgggattacaggcgtgtgccaccacacgcrgctcatttttgtctttttagtagagacagagtttcaccatgttggctgggctggtctcaaactcttggccttgagtgatccacccgccctggcctcccaa

SEQ ID NO: 21123 - DNA, 201 bp, Homo sapiens
cttggtgaatgtgatcctatccttttctcttcaaggtagctatgttaatagtcccatcttacagaggaaggaactgaggctcagagaggtcaagtgacttatgcaacgtcacacagctagaaagtggcagaaccaggttttgcattattgggtctgcctcattccagattccatgctagttaccactgctgtctcatgtca

SEQ ID NO: 21124 - DNA, 201 bp, Homo sapiens
cttcccttccattgccttcctgccttcctttcttccttccttcctcccctcttctgccctcccctccccttccatcccttcccctcccttccttcctcccktccttcctcctccccttcccttctttcctcccttcctccctccttccttcttttcctgacttctctgctttcctccccctccctttcttcctccttcttt

SEQ ID NO: 21125 - DNA, 201 bp, Homo sapiens
tcagagaggtcaagtgacttatgcaacgtcacacagctagaaagtggcagaaccaggttttgcattattgggtctgcctcattccagattccatgctagtyaccactgctgtctcatgtcattccagcctcttccaggcagggcacattaaatactaatccctgagagccaagtctgaggcacctcatctaaactttctga

SEQ ID NO: 21126 - DNA, 201 bp, Homo sapiens
gtgtgtgtatacctacatgtatacatgggtgttcctcttacaaaattaatagcttttttcttattgaaaataacacatcattgcagaacattttttaaaayatagcaaagagataacggctcttaatactttagcatttttttcccccagatcaggggtctgtctacaaatgatgtcccttgggttgcatctacctttttt

SEQ ID NO: 21127 - DNA, 201 bp, Homo sapiens
ttccattgccttcctgccttcctttcttccttccttcctcccctcttctgccctcccctccccttccatcccttcccctcccttccttcctcccgtccttyctcctccccttcccttctttcctcccttcctccctccttccttcttttcctgacttctctgctttcctccccctccctttcttcctccttctttccttcc

SEQ ID NO: 21128 - DNA, 201 bp, Homo sapiens
tttgtatttttagtagagatggggtttcaccatgttgtccatgctgctctcaaactcctgaactcaggtgattcacctgcctcggcctcccatagtgctgrgattacaggcgtgagccactgcacccggccctgaggtccagtttctcatatgtaagtcaaggtccaaaccagtagacacaggaagcttggaagaaacaga

SEQ ID NO: 21129 - DNA, 201 bp, Homo sapiens
ctctgcctcctgggttcaaatgattctccttcctcagcctccccagtagctgggcctacaggcgcccaccaccacacctggctaatttttgtattgttagyagagacagggtttcaccatgttggccaggctggtctggaactcctgacctcaagtgatctgcctgcctcagcctcccaataaatctgctgcccttttaga

SEQ ID NO: 21130 - DNA, 201 bp, Homo sapiens
aaatgcataaaccagtaggccagtgtaggaatttcaacatccagataataggacttcgggaaaaaatagagaaaaaaagaggcaaggacatcatcaaggargtatttgtttcttgttgttgttgttgttgtttgagatggagtctcactctattgcccaggctggagcgcagtggcacaatcttggctcactacaacatcc

SEQ ID NO: 21131 - DNA, 201 bp, Homo sapiens
tgtgccagcgcatgggagccatggtagccttcaggagattcgaggacttcaccaggtacccagcatggcccggtctccaacaccctgagcatgggggctgsgcagacttcccttgaatccccccccaattcactggacagatggggtgggagagacccagacacgtggcacagcatgtcaataacaacagaataataatag

SEQ ID NO: 21132 - DNA, 201 bp, Homo sapiens
ggccaagctggtctctaactcctgaccttaagtgatcttcccacttcagcttccaaaagtgctgggatcacaggcgtaagccaccatgttcagcccatcarggaagtatttgaagacaaattcccaggatggaagtttccagattgagagggcctgagagatgtgcagcctcattggtggaagcagacacatacttgagcc

SEQ ID NO: 21133 - DNA, 201 bp, Homo sapiens
ggagagacgggatttacttaaggtcatccgtgaggggaagggtaagttcaagcccatggatggcacagtctttctaccacgctgctggccacatgcatgcrgattttcttgttgattttgtgtgtgtattgttcattgacctgggttttccctctgcaataccagtaagtaaaattgagcttctagtaagtctgagaggaa

SEQ ID NO: 21134 - DNA, 201 bp, Homo sapiens
ggaagggcttaatgcatgagacagcaactaccaccatgcttgaactgtttcatcaaaaagcacaacaatggatgtttgtataaaggtggtgttgtgcttgkaggtggatattaggttggtgcaaaagtaatcgtggtttttgcaatcccttttaatggcagaaactgcaattagttttgcaccgactgaatattattcatt

SEQ ID NO: 21135 - DNA, 201 bp, Homo sapiens
accttgggacaggtagaagaaactgctccttctagttcatgtgctggtaccttagctggcctcttaaggtgctttcagttgggtacagtggttcacgcctrtaatcccaatgctttgaaaggctttgacgtcacttgacatcaagagtttggacgagcctgggcaacatagtgagaccccatctctacaaaaatgtttaaa

SEQ ID NO: 21136 - DNA, 201 bp, Homo sapiens
ttgaactcttgagctaagcaatcctcacaactcagcttcccaaagtgctgggattacaggcatgagccaccatgcccggctctttcttggttcgttgagaytctgtgtggaagtcgctggtcttgagtactgccctgggtcagcacaaacattgatgaaaactaataagtaaagacagagttcggttatgaaagagccctc

SEQ ID NO: 21137 - DNA, 201 bp, Homo sapiens
ggaagtagttgtaattacagaattgcctggctcagaatcagctcttagcagtgcgggtagccgttaccatctctattttatagaagaaaagagagggaagraattgaaggtctgattaatgccggggccctagcctaatggcccagcctgggctcctgtaatgctatcctgcagacgtacatggtagctaaagtgttgcaa

SEQ ID NO: 21138 - DNA, 201 bp, Homo sapiens
tctaccagagtttctaaactgcggctctgttgacacttggggctgtccagttctttgtggggctgtcctgtgcattgcagggtgttgagcagcatccctgrtctccacccactagatgccagtagcgcatcccccaagttgtgacaatcaaagatgtctccaggtattgctccccggggagcaaaatttcccccagttaag

SEQ ID NO: 21139 - DNA, 201 bp, Homo sapiens
gggaagtatttgaagacaaattcccaggatggaagtttccagattgagagggcctgagagatgtgcagcctcattggtggaagcagacacatacttgagcycatcactgtgaaatcatagagttctggggacagagggacgctcctataagcatctggatatgaaaaaacaggtcacctacaaaggatcaaggatcagaat

SEQ ID NO: 21140 - DNA, 201 bp, Homo sapiens
ttcctctacagatcaacctaggctacccttgaagaggctgtgggttagggaatgggattctcgaggccagggtggcagtcagtgaacaggctgttgtgtayggatccatgctgacttgtgtaaggtacatcataatagtcaggagttctgagttcaaggaggtggatttgggaagcaaagcggcttaaaggtcatctctac

SEQ ID NO: 21141 - DNA, 201 bp, Homo sapiens
ttacctcccactgttcagccagttcctaacaggccacggaccagtgctcgtttgggtactggtttggggaccctttctttaggggactgctgtgtgtcatytgaatcatcagcagtcagacctgtcttgttttcccatccagatagccaccatcctggactgccatgcagccaccctgcagcggaaggctgatcgagaggt

SEQ ID NO: 21142 - DNA, 201 bp, Homo sapiens
tgtagggctgtgcattctgcagagggcacaatggagcgtggataagtttcctgtagctgcggtaacaaggtaccacaaactggtttaaaccaacaaaaatktattgtgtcccagttctggaagccaagtctaaaatcgaggtgttggcgggccgtggtctctctgaaggcgctggggcaggatctgttccgagcctcccca

SEQ ID NO: 21143 - DNA, 201 bp, Homo sapiens
catggcccggtctccaacaccctgagcatgggggctgggcagacttcccttgaatccccccccaattcactggacagatggggtgggagagacccagacaygtggcacagcatgtcaataacaacagaataataatagcattgtagccaagagtatgagcctacatgtcagcttgcctggcacagcacatcaataacaaca

SEQ ID NO: 21144 - DNA, 201 bp, Homo sapiens
tttcttaaaagggccagaaagtggctgggtgcggtggctcatgcctgtaatcccatcactttgggaggctgaggcgggcagatcacttgaggttaggagtktgagaccagcctggctaacatagtgaaacctcgtctccactaaaaatacaaaaattagctggccatggtggtgcatacctgtaatcccagctacttggga

SEQ ID NO: 21145 - DNA, 201 bp, Homo sapiens
ctgtgcattctgcagagggcacaatggagcgtggataagtttcctgtagctgcggtaacaaggtaccacaaactggtttaaaccaacaaaaatgtattgtktcccagttctggaagccaagtctaaaatcgaggtgttggcgggccgtggtctctctgaaggcgctggggcaggatctgttccgagcctccccagcttctg

SEQ ID NO: 21146 - DNA, 201 bp, Homo sapiens
ccccctcttcagcgaggcccgcacctccctatactccgaggatgactgcaaggtaagcgtctaagcccagggagcaacctggggagcaggtgggccgtggyccccaggctttccagccctaccccttgcttctccctctcagagcctcagagaagagcccatccacattctgaatgtgtccatccagtgtgcagaccacct

SEQ ID NO: 21147 - DNA, 201 bp, Homo sapiens
tagtagaaatgggatttcaccatgttgcctaggctggtcttgaactcctgagctcaagtgatctgccctgccttggcctcccaaagtgctgggattacagkcatgagccaccccccggcctctgcctctgtgtgtgtgtgtgtgtgtgtgtgtgtgtgtgtgtgtgtgtgtgtgtgtgtgtgtgtgtgtgtgtgtgtgtgt

SEQ ID NO: 21148 - DNA, 201 bp, Homo sapiens
gaggatgactgcaaggtaagcgtctaagcccagggagcaacctggggagcaggtgggccgtggcccccaggctttccagccctaccccttgcttctccctmtcagagcctcagagaagagcccatccacattctgaatgtgtccatccagtgtgcagaccacctggaggatgaggcactggtgccgattttacggacattc

SEQ ID NO: 21149 - DNA, 201 bp, Homo sapiens
gagtgcagtggcaccatcatgactcactgcagcctcaacttccctgggctccgagatgatccccccacctcagtcccccaagttgctgggactacgggcaygtgccaccacgcctggctaatttttgtattttttgtagagacggggttttgccatgttgctcaggctggtcttgaacttctggactcaagcagttggcca

SEQ ID NO: 21150 - DNA, 201 bp, Homo sapiens
acttcagagccacagacctggcttcccactctagctctgctcgcctcatagctggcgaccttgggcagatgtggctgaacgtggggtcagcatttctctcrctcacggtgttgcaatgattcaatgacaaagtatatacacggcttagccagtcccaggtacggagggcacacccaataaatagtttggagattttctggg

SEQ ID NO: 21151 - DNA, 201 bp, Homo sapiens
gttagcagtcactcccctctgtccccaacccaaaaaccctctccccaccacagccctaggcaaccactaatctactttctctctatatagatttgcctatkctggacgtttcatataaatggaatcagatcacaggaggtctcttatgattgacatcttccacttagcataatgtttacaggttcatccgtgtggtaacat

SEQ ID NO: 21152 - DNA, 201 bp, Homo sapiens
tgtgtgtatgtgtctgtcttctctctctggtccgcctacagtttgcagaagatcgcatttaccgtcacttggaacctgccctggccttccagctggaactyaaccggatgcgtaacttcgatctgaccgccgtgccctgtgccaaccacaagatgcacctttacctgggtgctgccaaggtgaaggaaggtgtggaagtga

SEQ ID NO: 21153 - DNA, 201 bp, Homo sapiens
gagactctgtctcaataaataaataaataaataaaatgaggctgagcattttattatcttgtagagcttttggctttggattttggcatctttgggatccktggtagcctggtgtttgctggttacccattgactcttttgcacacatacaggcagggtagtaatacctcttccctggtgttcacaggtcaacacccaagc

SEQ ID NO: 21154 - DNA, 201 bp, Homo sapiens
atacatgtgtatatgtatatatacgcacatacatgtgtatatgtgtatatatacatgtatgtgtatatacgcacatacatgtgtatatgtgtatatatacrtgcatgtatatacacatatatacatgtatgtgtgtatatacatataaacatatatatgtatatatataatattttttaagaattatactgaggtcgggtg

SEQ ID NO: 21155 - DNA, 201 bp, Homo sapiens
tgtatatatacgcacatacatgtgtatatgtgtatatatacatgtatgtgtatatacgcacatacatgtgtatatgtgtatatatacatgcatgtatatayacatatatacatgtatgtgtgtatatacatataaacatatatatgtatatatataatattttttaagaattatactgaggtcgggtgcattggctcacac

SEQ ID NO: 21156 - DNA, 201 bp, Homo sapiens
acacatatatacatgtatgtgtgtatatacatataaacatatatatgtatatatataatattttttaagaattatactgaggtcgggtgcattggctcacrcctgtaatcccagcacgttgggaggccagggcaggtggatcacttgaggtcaggagttcgagaccagcctggtcaacatggtgaaaccccatctatacta

SEQ ID NO: 21157 - DNA, 201 bp, Homo sapiens
agcaattctccctcctcggctttccaaggtgctgggattacaggtgtgagccaccacgcctggccctgaatagcctttcttagaaagctacttgaggatgycttccactgaaaacagagggtaaaccaaggaagagcaacacacaggagacaggaaacaggagattcaacatagactgaaagggagtctccagggtgatgg

SEQ ID NO: 21158 - DNA, 201 bp, Homo sapiens
agtggtggtagtagtggtggtggtagtagtagtagtggtagtagtgtttgtggtggtgaatctgtatgggtctaaggcagagtgagagaccgaggcaagtytctcagcaggagtgaaagtttattaaaaagttttaaagcaagaatgaaatgaagtacacttggaagagggccaaacaaggcaacctgagagatccaagtg

SEQ ID NO: 21159 - DNA, 201 bp, Homo sapiens
ccctgtctctactaaaaatacaaaattagccaggtgtggtggtgcctcaacccgggaggttgaggcaggagaatcactgaatccgggaggcagaggttgcrgtgagctgagattgcgccattgcactccagcctgggcaacaagagaaaaaaaaaatagaaaaagtaatttgcggaaggatgtgtacagtgtggtactctt

SEQ ID NO: 21160 - DNA, 201 bp, Homo sapiens
cctcggctttccaaggtgctgggattacaggtgtgagccaccacgcctggccctgaatagcctttcttagaaagctacttgaggatgccttccactgaaamcagagggtaaaccaaggaagagcaacacacaggagacaggaaacaggagattcaacatagactgaaagggagtctccagggtgatggtgataaggaagcc

SEQ ID NO: 21161 - DNA, 201 bp, Homo sapiens
ccaggaaaaggcaaaaagaaaggaactaaaatctggtacactgcagctctcatatgtgaataatgatcacaaacttcatatgtgaataatgatcacaaacwagtaaaacattgaatacccagtttgctaaattacagtagacttctatggtattgaccagctggtggaggggagccgatggggtggccttgtgagataact

SEQ ID NO: 21162 - DNA, 201 bp, Homo sapiens
ctgtattttggaaggccgaggtgggaggatcacttgaagccaggagttcaagaccagcctgggcaacaaagtgagacccctgtctctacaaaaaagaaaayttaaaaacttctgaaatacaaatgtagaaaagtacatgaaagatattaataccatgtaacaagtcggaacgattagaatgtgtggacttcttccctgatc

SEQ ID NO: 21163 - DNA, 201 bp, Homo sapiens
gagccacgattgcaccactgcgtactagcctaggtgacagaatgagatcccgtctcaaaaaaaaaaaaaaaaaaaaaaaaaaaaccgaaggtgcttcctgmccttgagcctccttgtaaattgcttcaggggctctggagagcaagtgcaaagcaggggggctctggtgcagtttggctcctctgctccactggctttaca

SEQ ID NO: 21164 - DNA, 201 bp, Homo sapiens
agtggctcatgcctgtaatcccagcactttgggaggatgaggtgggcagatcatttgggcccagcctgggtttgtgttcaagttcaagaccagcatggacracatgacaaaatcctgtctctgcaaaaaaattaaaaaattagcaggatgtggtggtgtacacctgtagtcccagctactcgggaggctgaggtgggagga

SEQ ID NO: 21165 - DNA, 201 bp, Homo sapiens
ttgttgtgatggtgacccccgaggaccttaaggccaacgcaggtacctgggccttgaccctctcctcccatcacgctccatccttgcctgccctcgcctcyttcccctgtgcctaggcaagtccatcctggactcccgatggtcaggacctctcatgagtctgtatttatttgtccttccttctttatttaattaaaacgt

SEQ ID NO: 21166 - DNA, 201 bp, Homo sapiens
tctttcccctgtgcctaggcaagtccatcctggactcccgatggtcaggacctctcatgagtctgtatttatttgtccttccttctttatttaattaaaargtctgctgacatcaagaacaactcatgtgccttacaaaaatgcagatggttaacatgcagagaggaaattcgatctttgagaaatgtctgtgttctagca

SEQ ID NO: 21167 - DNA, 201 bp, Homo sapiens
aaaaaaaaaaaaaaagcaaaacaaaaaccaacataagtcaggtcttcaggtctttttgtgcttctccttaaaatgcatcagaggctgtgtgctgttcccartattagcaacctcagcaccatcccctaagccttcctgccccaagctcttcacagacatggcctcatttgttacttacagctctgttttacagatggcaca

SEQ ID NO: 21168 - DNA, 201 bp, Homo sapiens
cataaaatgaaaaagttgtggacatctgtttcacaatataaatatacttcactattgaactgtacactcaaaaatggttaagatggtaaattttgtgtgtgttttttttttaccataatttaaaactctggattgtatttttgtttgtttgtttgttttttgagacagggccttgctctgtcacccaggctggagcgcagt

SEQ ID NO: 21169 - DNA, 201 bp, Homo sapiens
caggagccctagggaggggatattgctgcataaccaggcataatcatagtcagaggagcaaagtgctgatcagaggtattattgacaagcaccacagactragtcagagacttggctttcttttttaggataatcacagccctgtccctatcatcacacccactgaccccattgacagagaaattgaattcctcccatcca

SEQ ID NO: 21170 - DNA, 201 bp, Homo sapiens
tcttcccggattcaagctattctcatgcctcagcctcctgagtagctgggactaccggcgcgtgccaccatgcccagctagtttttgtatttttagtagaracagggtttcaccattttggccaggctggtctcgatctcttgacctcgtgatctgcctgcctcggcctcccaaagtgctgggattacaggcatgagccac

SEQ ID NO: 21171 - DNA, 201 bp, Homo sapiens
ttgtgcagagacatctgatccccgcagctctgtgttccagataattcagcaggcaggacaggtgtggttcccagactcagcctacaaaaccgcccaggccrtcaaggacttcaaccgggagaagttgcccctgatgatctttgccaactggagggggttctccggtggcatgaaaggtaagcccctccctgcctatgttac

SEQ ID NO: 21172 - DNA, 201 bp, Homo sapiens
aagaaatggaaatcattcataatcctatgacccagtgttgaacatttattacattgtaggtatctacctttccaacctttttctgggcatattctttgggaaaaaaaaaaaaaaaagacagatcttggccagtggctcatgtctgtaacccaaccccccaacccagtgctttcagaggctgagggaggaggatcacttgaa

SEQ ID NO: 21173 - DNA, 201 bp, Homo sapiens
ggtcttgctcccgggagcaagaattcaggtcttcttgaattcaggaaccaagaagtgttgtgttggttccaggaaatcagagttttaaatctgctcttttwttattattattattattattttgagactcgcttgtgcctagggtggagtgcagtggcactatctcggctcactgcagcctctgcctcctgggttcaaatg

SEQ ID NO: 21174 - DNA, 201 bp, Homo sapiens
catcctgacatacactgaattagtgttggactctcagggccagctggtggagatgaaccgacttcctggtggaaatgaggtaatagctcagcggagcctarcccctggctggagtcacccccttaaaaatatttttgggccaggtgcagtagctcacacctgtaatcccagtgctttgggaggccaaggtgggtggatcac

SEQ ID NO: 21175 - DNA, 201 bp, Homo sapiens
ccttaaaaatatttttgggccaggtgcagtagctcacacctgtaatcccagtgctttgggaggccaaggtgggtggatcacttgaggtcagaagttcaagrccagcctgggctacatggtgagaacctgtctctacataaaattttaaaattagctgtgtgtggtggtgtgctcctatagtcccagctactcgagagactg

SEQ ID NO: 21176 - DNA, 201 bp, Homo sapiens
ggtcggtaggtgcagcaaaccaccatggcacatatatacctgtgtaacaagcctgcacgttctgcacatgtatcctgtttttttttttagaagaaataagaaaaaaagtgtacaatttaatatatttttagtatattcaccaggttgtacaaccatcaccagaatcaattttaggacattctcatcactccatagaaaaac

SEQ ID NO: 21177 - DNA, 201 bp, Homo sapiens
gacagtcatcctttccattcagagcatgcattctcgggggcgatattgcccactacccccaagaagacagaaaaataatttttggggtggcaataaaataktttttaacatatatacatatacagagtatgtaaatagtggttaaacagtgtatcttgaaaattaaaatttcatgttggggtgctggcaataagaaataaa

SEQ ID NO: 21178 - DNA, 201 bp, Homo sapiens
ttgatggaaacatatatatattattatatatataattatatataataatatatataatatattatataatataacatataatatacataatataatatataatatgttatataacattatatatacataatataatacatattatatgtatttatataaatatatatttatataaatgtatatataattattatatatata

SEQ ID NO: 21179 - DNA, 201 bp, Homo sapiens
gcatgcattctcgggggcgatattgcccactacccccaagaagacagaaaaataatttttggggtggcaataaaatattttttaacatatatacatatacrgagtatgtaaatagtggttaaacagtgtatcttgaaaattaaaatttcatgttggggtgctggcaataagaaataaaaatgagatagtccttagaggaga

SEQ ID NO: 21180 - DNA, 201 bp, Homo sapiens
tatgttatataacattatatatacataatataatacatattatatgtatttatataaatatatatttatataaatgtatatataattattatatatatatwtttttttggagatggagttttgctcttgttgcccaggctggagtgcaatggcacaatctcagttcactgcaacctccgcacccccgggttcaaacaattc

SEQ ID NO: 21181 - DNA, 201 bp, Homo sapiens
acaccagaatcagctccctgaactccgtccactgtaaacacatcgaggaaggaggagagtccaggtaaataacttatcaggtagctccttaattttgctcrtggttaatttcagctgtcttctttcctcggggcttgtggcgatattttccagtggggtggtggtgtttgtatgatgggaaccaatgcctgttgggggcac

SEQ ID NO: 21182 - DNA, 201 bp, Homo sapiens
ccctaggggctttaaaggagcctgaaccactgacattggtgatgtgaatgtctcttcattttccaggattgctttggaatgacattatatatatatatatwttatttatttatttatttattatactttaagttctagggtacatgtgcacaatgtgcaggtttgttacatatgtatacatgtgccatgttggtatgggat

SEQ ID NO: 21183 - DNA, 201 bp, Homo sapiens
cctaggggctttaaaggagcctgaaccactgacattggtgatgtgaatgtctcttcattttccaggattgctttggaatgacattatatatatatatatattatttatttatttatttattatactttaagttctagggtacatgtgcacaatgtgcaggtttgttacatatgtatacatgtgccatgttggtatgggatc

SEQ ID NO: 21184 - DNA, 201 bp, Homo sapiens
catcacacatgctaaagtgcattgtgaatctctaacagaggctggcgggacagtgtttctcattatgtggccctggaatttttgattgattgattgtgaaygggtttcctctgtgtacccccatctctctgtagaccgttggaggaatatgggccgagggtgatatttcactgagacagcccctgaacaggcagatatctt

SEQ ID NO: 21185 - DNA, 201 bp, Homo sapiens
agtcgaggcacagggatgtgaatttatcacttgtccagggtcacacaaccatcatgtgatgcgggtgggatgggaaccctggtctgggttcagagcatcayccagtgggtcctcccatcttggttagtctaaaattcaaaattgtcacccaggcctattaagtcccctcctggctccatctcgaacctcttgccctccatc

SEQ ID NO: 21186 - DNA, 201 bp, Homo sapiens
attatgtggccctggaatttttgattgattgattgtgaacgggtttcctctgtgtacccccatctctctgtagaccgttggaggaatatgggccgagggtsatatttcactgagacagcccctgaacaggcagatatctttggttgtataaaccaaaaagtatctgagacaggtctcaatcaattgagaagtttattttgc

SEQ ID NO: 21187 - DNA, 201 bp, Homo sapiens
gtctgggttcagagcatcacccagtgggtcctcccatcttggttagtctaaaattcaaaattgtcacccaggcctattaagtcccctcctggctccatctygaacctcttgccctccatcagccgggtaccagtcaccctgacctctggtagctcctgggcctgttgcagagtcttggcacctgctggaacctctattgaa

SEQ ID NO: 21188 - DNA, 201 bp, Homo sapiens; identical to SEQ ID NO: 3878

SEQ ID NO: 21189 - DNA, 201 bp, Homo sapiens
ctttgtgcagtggactccctccccacccagcctgtaggtctcaacatgatcatcgcatctctctcagagaacctcatttattttcttcccagcactgacckgagtctgtagttattgtgtttattttcttgtttatcttctccaacataaaagaaaaactggacaaggaccaggaagcctgtctggccgctcacttcatca

SEQ ID NO: 21190 - DNA, 201 bp, Homo sapiens
tcacaatataaatatacttcactattgaactgtacactcaaaaatggttaagatggtaaattttgtgtgtgttttttttttaccataatttaaaactctgkattgtatttttgtttgtttgtttgttttttgagacagggccttgctctgtcacccaggctggagcgcagtgacatgatcacgactcattgtagcctcgac

SEQ ID NO: 21191 - DNA, 201 bp, Homo sapiens
acagtagagcaccatgttgtctatagagtagtgtctgtatatcctaaatcattgactgaacctccgttgcatctaccactgtgcctggtgttttggggccrtgttctggtaggactgacagtctgtgggttggatctcttgattttagatcgccatgggcgtgccactgcaccggctgaaggatatccggcttctgtatgg

SEQ ID NO: 21192 - DNA, 201 bp, Homo sapiens
agcctgggcaacaagagaaaaaaaaaatagaaaaagtaatttgcggaaggatgtgtacagtgtggtactctttatttaaagtttgcagtgcaaaacgataytgtatgtttccaatgtatgcatacaggataaaggaaaatgaaaaaaaaagcatgcataggactgggtaggcactgaattcaagggaatggtcacctgtgg

SEQ ID NO: 21193 - DNA, 201 bp, Homo sapiens; identical to SEQ ID NO: 3888

SEQ ID NO: 21194 - DNA, 201 bp, Homo sapiens
ctgagacaggtctcaatcaattgagaagtttattttgccaaggttagggacacatccagaagcaaagaacacggaatcatagaaaccgtctgtggcgtgtrcctttcttcaaagatgatttggagggcttcagtatttaaaggagaaaagcaggctggaggggaaagagggaagttctggtaatcacatgttgcaggagaa

SEQ ID NO: 21195 - DNA, 201 bp, Homo sapiens
ggcctctccaagggggaaacaaggaatggattcatttcttgatgttttaaattgaattttagctctgttggagagtttatacagaattagtaataagtacrtagaaacctagcatatcaaaaaaagatacaaaaacataatgcaaaatattcctaactcagttatgaatattttgagttactgtaaaagctgagtattgat

SEQ ID NO: 21196 - DNA, 201 bp, Homo sapiens
cacggacgcatgtcaactctggagcagatatcttcagcgcagcatctgacctgggagtacagccacataccctcattcctaaacggcagattgactactgsagccacacacagtctccgggcaatgtggagacatgtctaatatttagtcaacataactcagggtgccacagtcttcacaactgttgtgagcacttgagga

SEQ ID NO: 21197 - DNA, 201 bp, Homo sapiens
aaacaaaccaccccatcaaaaagtgggtgaaggatatgaacagacacttcttaaaagaagacatttacatagccaacaaacatatgaaaaaaagcttaacrtcactaatcatctgagaaatgcaaatcaaaaccacaatgacataccatctcacgccagtcagaatggcaattattaaaaagtcaggaaacaatagatgct

SEQ ID NO: 21198 - DNA, 201 bp, Homo sapiens
ccaaaaggagatgaagaaggtgttcctgctgttgttattgacatgtcaggactgcgggtaaggccaggtcccagttgtgtttggagaatatgatgctattktcatgttggcagttccattaccttgtgtggccctgattctggagttccatgactgggcatttctgcctaaagccctgttaaaacggtaaaactgtgagca

SEQ ID NO: 21199 - DNA, 201 bp, Homo sapiens
ttgataaaattcaacaccacttcatgctaaaaactctcaataaacaggtattgatggaacatatctcaaaataataagagctatttatggcaaacccacarccaatatcatactgaatgggcaaaagctggaagcattccctttgaaaactggcacaagacaaggatgccctctctcaccactcctatttaacctggtatt

SEQ ID NO: 21200 - DNA, 201 bp, Homo sapiens
acaggcatgcaaacacttgttgaaccaatgcacaaatatattttgctcttcttcatagattcctccggcctcagatgaccaggcaccactagatacagaayactgtgctttccttctccaaggtaaaggaataaatatctgttccccttcatgaagtgttactgttgggcctttatgccatcctgaagccaccaggatgtg

SEQ ID NO: 21201 - DNA, 201 bp, Homo sapiens
acattatttcagttaatctaattttcttcctagtgtttttttatctgctagtttcccaacttacagatatcaaatgaaatgatactatttcatctgtataytgaacactgcagaaataaacattagaattaggacacatcaaaatataaaactaatcagtgtccacagatttgaagagtttcaagtgttcctattttgcca

SEQ ID NO: 21202 - DNA, 201 bp, Homo sapiens
cactagactatactccttgagaacagcgattgtgtcttatttatttctgaatcaccaattcagacaggcatgcaaacacttgttgaaccaatgcacaaatrtattttgctcttcttcatagattcctccggcctcagatgaccaggcaccactagatacagaatactgtgctttccttctccaaggtaaaggaataaatat

SEQ ID NO: 21203 - DNA, 201 bp, Homo sapiens
cagataccccaagacactgtttaaattataagactggttcacttttcatgaataaacatgagagataatgtgtgaaggggaaaaacatttaccaatcatgygtcttcaaaaccttccaagattatgcagctttaatggctgaatgattttgaaagaaaaacttgtaaatggagctgcacctgaactcataataaaaaggca

SEQ ID NO: 21204 - DNA, 201 bp, Homo sapiens
cacatgacaaaatttccttctcttttaaagctgaatagtattccattgtgtatagagaccacattttctttattcattcatgtgatgctggatacttagaytgatgtcacatcttggctgtcatgaataatgctgcagtgaacatgggagtgcaggtatctgttctgagtgcatttcctttgggtatatgcctctgccatg

SEQ ID NO: 21205 - DNA, 201 bp, Homo sapiens
ctcataataaaaaggcatcagattaattgagtctcagagcttccctaacaataagcctgacctgcatatccaagttgtggccggccaaggccaagagggcmtttgcccttagtctcaggctgctccagtttgacagaaagtcaaggcaggccactcctgacagggtacactaataaggacagagggttagggcacttcaag

SEQ ID NO: 21206 - DNA, 201 bp, Homo sapiens
gttcaggtatacactgaatatcctcgaagaaattggtggtggccagaaggtcaatgatgacattattgtcaactgggtgaatgaaacattgagggaagcaragaaaagttcatccatctctagtttcaaggtaaaattctttgtcttctgctagaggccatctgagctctatgcctatctgtattgttttcattatgtgtt

SEQ ID NO: 21207 - DNA, 201 bp, Homo sapiens
ggacgcatgtcaactctggagcagatatcttcagcgcagcatctgacctgggagtacagccacataccctcattcctaaacggcagattgactactgcagycacacacagtctccgggcaatgtggagacatgtctaatatttagtcaacataactcagggtgccacagtcttcacaactgttgtgagcacttgaggatgc

SEQ ID NO: 21208 - DNA, 201 bp, Homo sapiens
tagagaagaagttgggtaggtcaggctaggaatgtaaatctgagaggatcttaaatattaggatattgacaggcagtggagagctactggaagatttagarcaggaaagctacaggatctgcattaagagatgaatctggaattgaggccaagttattctcttaattttcaagggcgaatgaggaaagatccagctctgac

SEQ ID NO: 21209 - DNA, 201 bp, Homo sapiens
acacacagtctccgggcaatgtggagacatgtctaatatttagtcaacataactcagggtgccacagtcttcacaactgttgtgagcacttgaggatgctscatttgaagataggaatttgccctcaagcatctggggtttgggtacagaacagagcttcccctgccaccacctgctaattttataaaatgtgcattcaaa

SEQ ID NO: 21210 - DNA, 201 bp, Homo sapiens
ggtttatttctattgctctatttcacggaggctatttactgtgattttatcttctttaaaatgttttcaggaaaagcgcgtattgataatttagattgtayggcttattggcccaatgggggtagtttaattttagttcctgcggttctgtttttctaaaaaacttctttacagtactttagtggataaattatctagagt

SEQ ID NO: 21211 - DNA, 201 bp, Homo sapiens
atttgctcaatgctttgatcttggagtaagtataacattaatcacattgtcttagtttcaagtacttatttgctgacagacctgagctccttctccatctytcctggcacatgtagatactaaaggcatttattgaattgaaaatttgtcacaagtattttttttctcagcttcttacatacgcatgaaagactttgattg

SEQ ID NO: 21212 - DNA, 201 bp, Homo sapiens
ggcaaagtttaaaattagaagtggatctttattaacctcaggtgcaactttttttccataaaaaccttttataataattcatgagattataatagatgtgwgtgcattcaatatagcttccatcctgaaaatgttttttcagtttttatttatttttaaattgacatataacggtatgtatttatggggtacctagtaatg

SEQ ID NO: 21213 - DNA, 201 bp, Homo sapiens
ccgcctttttcaggggctcagacatcattcgcaaaacccaggctttgggctggtgacttgtcatacttcagggataaagggatacatttctgagcagcaargaagggagactggtggagtggtagcagctggggctttgtatgtttgttttggccacttaggaataaaattcactttggctaaagttttaactcaagcttt

SEQ ID NO: 21214 - DNA, 201 bp, Homo sapiens
ggtctcaggcctgccagccttcaggctagaactacaccactggctctcctgggtctccagcttgctgaatcgtcatgaagatcttgggacttgtcagcctscctaatcacatgaagcaattccttgtaataaatctctttatacatacacatacatgcatacataaatacatacacacacacacacatacacacacatcct

SEQ ID NO: 21215 - DNA, 201 bp, Homo sapiens
gttagtgctgtgtgctcctagggacgctgcttttcgtctgttgtgcttccaagtagataactcttcacttgccttttttccttgtctgtgtcttcaactasagtggacattctacaatggcaaggactgtacccatcttaattcatcttcattccctgcccatgatatattgggatgagggtgggctgcagagtgaagcaa

SEQ ID NO: 21216 - DNA, 201 bp, Homo sapiens
ttgccttttttccttgtctgtgtcttcaactagagtggacattctacaatggcaaggactgtacccatcttaattcatcttcattccctgcccatgatatrttgggatgagggtgggctgcagagtgaagcaaaggtgtttttctcttcatacaaatcccatgagtgcatggagaggaagtggggagagctgaagatgcta

SEQ ID NO: 21217 - DNA, 201 bp, Homo sapiens
taactcaagctttccttagcaatttatctttgatttgatgccaaataaacagcattttagatgaaaacataagcctttctaagaagcgagggggtgaaaarcgggaagtactctggcagccttcatagtaattttggccacagccacgagtataataaatataacttgcttttattccatcaatttgttgattaactggaa

SEQ ID NO: 21218 - DNA, 201 bp, Homo sapiens
gaagttcagtttcctcatctataaaatcaggcaagtgctatctactcgctaggtgtgatgtgggttattttccccttccattttcccatgttgtcgtctakgtagatatggagcatatctactccacccagcgtcaccactgacttactgagcccctaatatttactaggcatcatgccaaacgcttgaaagataattact

SEQ ID NO: 21219 - DNA, 201 bp, Homo sapiens
ctaggcatcatgccaaacgcttgaaagataattactcttttattttcatacatagctaggtaaagttgttattaattatatccttattccagatgaccaarctgaggttcagggagggttaagtgacttgtctggggtcacagaaccagtaactggcagagtcaagattcacacctttcctctctctcattttatgttggc

SEQ ID NO: 21220 - DNA, 201 bp, Homo sapiens
taaagcacatttcatggaccgtgcatctcaaaggttttttaaataaaactttaggttcttaaaatgccaactgacttgtgtttttcccacgcattgcttcraccaaactaagactccagaggttccacttacttctctttttggaccagtcactgacttactttgagactttggggagtgacttcaccctccagggcccct

SEQ ID NO: 21221 - DNA, 201 bp, Homo sapiens
ctcttttactgtggatgttgaaagtaatgctggtgcccctattcagtagcaacagtcatcttgtgagattctgactcttccctgggatcatgccttaatgyctgaatgatagcctctctcgtcccttcaccttccatctagtcttccctcacctctctaaaagctgttgcctgaatcgtcctgaagcttcagtatattgtg

SEQ ID NO: 21222 - DNA, 201 bp, Homo sapiens
cgtttggccttttgtttttaaatacaggaattttcagaacctttgctgggtcaaatgtgcaatgtgaatctttaaggcggagatacattcactacacagtrtttcccaaacttttatgactcaggatttctctgagggacactactgttttcaaaaactgtcagtttgggaaacatagtgctaggctgtgaagacataact

SEQ ID NO: 21223 - DNA, 201 bp, Homo sapiens
tgagaaaaaatgctttataatgacttattcttcattctaatgtcaacatatgaccttaaacagtagatatgatttccttttcaaacctagcattctgcttwtgcctactgccctattgagtatatgttttattcgtaagtacatgaggctaaaagttgtgtatgggagtaagggcgggacatgtaagagtccattgtattc

SEQ ID NO: 21224 - DNA, 201 bp, Homo sapiens
taaatgcatctatatgataagtgcttttataaacaaattattctgtgtcatcatatcatcatcatcatcattatcatcaccatcagcagcagcagcagcarcaacagcatcagtagtcagcccctctgtacacttgactgagtagaagttggttgttaacaattacaggcctctgcatgggtcacaaaacatgatctccac

SEQ ID NO: 21225 - DNA, 201 bp, Homo sapiens
cagtaaaatgatcaacctgtcagtgccagacacaattgatgaaagaacaatcaacaaaaagaagctaacccctttcaccattcaggtatgtcttcccaccrttaccataatacaggatttgtttggcatcaatgagcatcataactgctgagtccgcctttttcaggggctcagacatcattcgcaaaacccaggctttgg

SEQ ID NO: 21226 - DNA, 201 bp, Homo sapiens; identical to SEQ ID NO: 3953

SEQ ID NO: 21227 - DNA, 201 bp, Homo sapiens
gcaggtaagcacttgaaatataaaacacctatgggaatagacaagagaacattgttattattacaaaattgatctcttaaaagcaaaaatgttgtcatatygtgaaatgtggtttgacagacccagcaaaacatccgagccagtagccttggttatttttatggctctgcccaaatgttcttaaacatagcgttgagattc

SEQ ID NO: 21228 - DNA, 201 bp, Homo sapiens; identical to SEQ ID NO: 3954

SEQ ID NO: 21229 - DNA, 201 bp, Homo sapiens
ggcaaaggcgaggagaacacccaggctagagtgagtgagaaggttcatgagagtcaggtgaaatgaggttactcttagccaaactaaaaagatgtaacccrgggcaggcagatggtattggtgcctgacacctgcatgtgactttcactgacttcaaaatagctacagtgaaaagtcagagaagggagggtagatagaagg

SEQ ID NO: 21230 - DNA, 201 bp, Homo sapiens; identical to SEQ ID NO: 3956

SEQ ID NO: 21231 - DNA, 201 bp, Homo sapiens
ccaggccttacctaccctaaccagttgtagaaacaaaataatagctgatttttcgatctttatgagaaattgagatgctattaaatgatttaaataaactwcctgaaaatctgtatgctttcattgactaagaataaatttatattttaagactataattctgagaattctttttgtcaataagcatattttcagaatcta

SEQ ID NO: 21232 - DNA, 201 bp, Homo sapiens; identical to SEQ ID NO: 3959

SEQ ID NO: 21233 - DNA, 201 bp, Homo sapiens
ctaacagttgtatttttcaggttaatgctctaagattcaacaaaaagcatatagctttaattacgttctaccaggtagaggtgctggagatgtttacttgwcttttttaaaaaaatcatgaactagtcccaatattgagacaaaggtcaactaatattaaatgaatatcacccaagcaaggagattcagatttgaagtatg

SEQ ID NO: 21234 - DNA, 201 bp, Homo sapiens
tatagtacattaactatagttacccttttgtacaataggtctctaggagttattcctcctgtctaactgaaattttgtactctatgaccaacatcttcccrtttttcttaccctccccccattgctcaactactccctgcttctataagtcaactttttaagatttcacataaaagtgagattaggcagtatttgtctttc

SEQ ID NO: 21235 - DNA, 201 bp, Homo sapiens
ttaatgtatgtatacattgcggaataattaaactaagctaattaacttacctatcccctcatatacttttttttttcccgtgagaatatttaaaatctccyttagcaattttcaaggatatagtacattaactatagttacccttttgtacaataggtctctaggagttattcctcctgtctaactgaaattttgtactct

SEQ ID NO: 21236 - DNA, 201 bp, Homo sapiens
atttttatgtgtttgacattttatgaaaaaaaattgcaagtcatgaacagccctctttctttcttaagctacctgaaaataataactataattaacttttsttacattgttatcagaaaggaatagtcaaattagcattaaacagatgtaaagtcaaccttcatatggcagctgtgtatataaattctctggaagacctat

SEQ ID NO: 21237 - DNA, 201 bp, Homo sapiens
tccttcattggcttctttatttatgtggcttaaatgtctcatgtcatggaaattgggtaccaagagggagcatcctaagaatgagcattccaaaaagaagraagcagaagtttccagccccagacatcatttctaccaccctctaatggtcaaagcagttaaaaaaccagcccagattctaggggagggaaataagctcta

SEQ ID NO: 21238 - DNA, 201 bp, Homo sapiens
taacctaaaatggccaatttcatagtttcactctctgctgatcaaatttcctgattctttttacctatgtttgttttgtgtcatcttcaacattttcttayatacagtaaatacttgcttaataaaaagtactaagagtgattgaaataaggaagttcggtcatgtgaattcattggagctatgttgactatcctttggcc

SEQ ID NO: 21239 - DNA, 201 bp, Homo sapiens
ggcagagtgcaagagggacttgaaaaataggaagattagtagaaagtttatataaggagcagtaagacattccccaccttatccccacccacatgttgctwtataaaataaaaaaagaaacattcagaaaaaaagagtttttagctattgctatggtttgaatgtcccctccaaaactcatgttgaaatttaattgccaat

SEQ ID NO: 21240 - DNA, 201 bp, Homo sapiens
attgtacaatgactaacaaacagggaaaattacaatctcatttttttagtataaatacattggttgggccaaaacttagctacccttgccaaaactatatrcccaataatgggcctctttgatgacaaagaacacaagggcagttgttaacttttacttagtcactttggattattctcagaaaattctcaagtcaacttc

SEQ ID NO: 21241 - DNA, 201 bp, Homo sapiens
cttatacagtgttgtgcctgttctctggcagccgctgcatggcaactgactccgtgctgtcatgtgtatgtctgagtagccagccagcaaccttgggagaygtctttaaatcgtgtaaattggcaaaggcgaggagaacacccaggctagagtgagtgagaaggttcatgagagtcaggtgaaatgaggttactcttagcc

SEQ ID NO: 21242 - DNA, 201 bp, Homo sapiens
atgattttattctcttttgtggctgcatagtattccatggtgtatatgtaccacattttctctatctagttcattgttgatgggcacctaggttgattccwtatctttgctattatgaatagtgctgcgatgaacacaagcatgcaggtgtctttttggaagaataatttattttcctttgagtatgtacccaatattggg

SEQ ID NO: 21243 - DNA, 201 bp, Homo sapiens
aagccctatttaatggctggcacatacacaacaaggtccactctgctgttgctgtctccacctggttaaaaagtcatatttctcatgagtgtttactacayaagaatcgtgcatttaagaaagtagacagaaaaatatattactgtagaaggagaagtaatgactgataattatataaatggcaccggaagggattttttt

SEQ ID NO: 21244 - DNA, 201 bp, Homo sapiens
tttaagaaagtagacagaaaaatatattactgtagaaggagaagtaatgactgataattatataaatggcaccggaagggatttttttccctgcatgctayatattaaaagatctattaaatttacagctggttctagctggaatttatttcattgaattgtgctgatgtgctaatttggtcatttatctggacaataaat

SEQ ID NO: 21245 - DNA, 201 bp, Homo sapiens
ttactgtagaaggagaagtaatgactgataattatataaatggcaccggaagggatttttttccctgcatgctatatattaaaagatctattaaatttacrgctggttctagctggaatttatttcattgaattgtgctgatgtgctaatttggtcatttatctggacaataaatggcttgtcattttttcctatgagagc

SEQ ID NO: 21246 - DNA, 201 bp, Homo sapiens
ctcccaagtagtttggacttcaggcacctgccaccatgcctggctaattttttgtatttttagtagagacggggttccaccttgttggccaggatggtctygatctcttgacctcatgatccacccgccttggtctcccaaagtgctgggattacaggcgtgagccactgcgcccgttctaaatatttcttttacatttat

SEQ ID NO: 21247 - DNA, 201 bp, Homo sapiens
tcccaagtagtttggacttcaggcacctgccaccatgcctggctaattttttgtatttttagtagagacggggttccaccttgttggccaggatggtcttratctcttgacctcatgatccacccgccttggtctcccaaagtgctgggattacaggcgtgagccactgcgcccgttctaaatatttcttttacatttatt

SEQ ID NO: 21248 - DNA, 201 bp, Homo sapiens
cagccaaacgtagacaagtaatgtttttccagaaattaaattctagtacagcaatcagaaacctgaacagctttattaaagtgtgtccattatttcagtcrattgcttatttataattccatgttggatgtcttcaaacattatcatgcaaaaattctaattaagataattagagcaagcagagagccacagggatttttc

SEQ ID NO: 21249 - DNA, 201 bp, Homo sapiens
ctatcagtttttgtttcaagtatcgtgaaactctgttattaggttcataaacagtttagattgttgtttcattctaatttactcatccctttgtccttatraagtagtcttttttatgcctactaatattcttttctctgaaatctattttttctgacattaatagataatagctactattgcttctataggcttcctatt

SEQ ID NO: 21250 - DNA, 201 bp, Homo sapiens
cctttgtccttataaagtagtcttttttatgcctactaatattcttttctctgaaatctattttttctgacattaatagataatagctactattgcttctrtaggcttcctattgattagtggttagcatggcctatctttttaccatccttttacttcaattgatctgtgtaaataacaattacttttaaagggactttt

SEQ ID NO: 21251 - DNA, 201 bp, Homo sapiens
ggggtttcaccgtgttggacaggctggtctcaaactcctgacctaatgatccgagtgcctcagcctcccaaactgctgggattacaggcatgagccaccaygcccagctccattgttgtttcttatgcttgaggtttgttgaacttatagaatctatgggtttatactttccatcaaatttggaaaacttaactttcatct

SEQ ID NO: 21252 - DNA, 201 bp, Homo sapiens
gcagatcttacacactggtaaattggaaatgggttattgatattcaagggactttatttttagccatgattttcttgctgtgaatattatttttcttaaartaaacataatgtatagtgctcgtacctcctcctttattgatacttatcttttattgggcacagaaaaacaggaataaaaggtagtcctttattattgaaa

SEQ ID NO: 21253 - DNA, 201 bp, Homo sapiens
ccgagtgcctcagcctcccaaactgctgggattacaggcatgagccaccatgcccagctccattgttgtttcttatgcttgaggtttgttgaacttatagratctatgggtttatactttccatcaaatttggaaaacttaactttcatctcttcaaacatatcttccatacccaccagccctggttctgggggattccaa

SEQ ID NO: 21254 - DNA, 201 bp, Homo sapiens
cttacctccctcatgtttttgttcaaatgtcactttctcagaaaggcctttcctggtaacgtcattaagaattttaattccacaccaccctcaaccctgawtgcatacacacacatagacttacattccccttctgcgctttaatttttttctccctaagacttattactatctaatatgtacttagttatcttaaatatc

SEQ ID NO: 21255 - DNA, 201 bp, Homo sapiens
gtctaatattccattaactccatccagtgtacatgttttttaacctggacattatagtttccatgtatagaaattttgagtcatttttatatttcccatakctgtcctttcctttaccttcttgaacatacagaaaataattacagtaacttattttgggatctgtttctactaatttatttttatcttcattatgagtca

SEQ ID NO: 21256 - DNA, 201 bp, Homo sapiens
ccctcactgtctgcccttacctccctcatgtttttgttcaaatgtcactttctcagaaaggcctttcctggtaacgtcattaagaattttaattccacacyaccctcaaccctgaatgcatacacacacatagacttacattccccttctgcgctttaatttttttctccctaagacttattactatctaatatgtactta

SEQ ID NO: 21257 - DNA, 201 bp, Homo sapiens
ctgcagcttggaaactttttccatgctggaaaaatcttaaggctaactttgttttcttcttttcaggggccactgtcctgtgcttcctattgtctgatgtmtgaacaacattgtttcatatgtttttcactgtattataagtgtttaaatgtgggccctgttattccatcatggccagaaacagaagttcctttcatacaa

SEQ ID NO: 21258 - DNA, 201 bp, Homo sapiens
agagaagttctagtctagttgattctcctcactctacagatatggaaaattaagcacagaagggtgactaatcattaattatagtaataaaaatgattaamtattagtactagcacttttagaacgtatgctgtgtgttagtcattatactaagtactctccatgcatttcttcatttatgcctcgcaactaggctatgat

SEQ ID NO: 21259 - DNA, 201 bp, Homo sapiens
atgggccacaaaggaaatcttaaaaaattctaaaggggagcttagtagatattccagtttgactagagaagaagttgggtaggtcaggctaggaatgtaartctgagaggatcttaaatattaggatattgacaggcagtggagagctactggaagatttagagcaggaaagctacaggatctgcattaagagatgaatct

SEQ ID NO: 21260 - DNA, 201 bp, Homo sapiens
tgttggccaggctggtcttgaactgctgacctcaagtgatcctcccgcctcagcctcccaagatgttgggattacatgagtgagccaccacatctggcctyttttgctttttctacgtatcatgctctcaaatatttttcttaccagtttttttcgtgtttttttttcaccttttaacatgagcattgttaaaatgctcac

SEQ ID NO: 21261 - DNA, 201 bp, Homo sapiens
ccctgtatccaataaataaagaacacacattccccttcagtatacttgaaatatttaccaagatgggccacaaaggaaatcttaaaaaattctaaaggggmgcttagtagatattccagtttgactagagaagaagttgggtaggtcaggctaggaatgtaaatctgagaggatcttaaatattaggatattgacaggcag

SEQ ID NO: 21262 - DNA, 201 bp, Homo sapiens
aaacaatatattaatactggacaaagtagactctaatgggcttattttttaaggatacaaagaaatgattcatcaaggtgatgtgccagcatatgactgtytgcacttaactgcataacttctaaataccagaaacaacaatggacaaaatgacaaggagctattgataaatctacctctaaaatgagaacctttttttaa

SEQ ID NO: 21263 - DNA, 201 bp, Homo sapiens
cagggactagagaatccattctctagcccacagcatatcaaggaagctgaccataggctaggcaaacaatatattaatactggacaaagtagactctaatrggcttattttttaaggatacaaagaaatgattcatcaaggtgatgtgccagcatatgactgtttgcacttaactgcataacttctaaataccagaaacaa

SEQ ID NO: 21264 - DNA, 201 bp, Homo sapiens
ctcactgcagccttgacctcctgggcttaagcaatcttcccacctcagccttctgagtagctgggactatagcgcatgccaccacaccaggctaatttttwaaaaagtttttgtggacacggggttttgacatgttgcccaggctggtctcaaactcctgggctagagcgagctgcctaccccagcctcccaaagtgctgg

SEQ ID NO: 21265 - DNA, 201 bp, Homo sapiens
agaaaggccagcttgaacaaagaagagtgggatataaattctttatagagaaagctaggtaataggtgcaaagtgggagtaaggaaaaaagagaagatcaygcctgtagttttgcactgttgagcactcttttgtcatcttaaaaatgcgaactgaacttcccccactgtttctaatgctttataaacagttttaaagttt

SEQ ID NO: 21266 - DNA, 201 bp, Homo sapiens
ttattaattatatccttattccagatgaccaagctgaggttcagggagggttaagtgacttgtctggggtcacagaaccagtaactggcagagtcaagatycacacctttcctctctctcattttatgttggcagtttcttaaaagtataatccatgtctatttaaactgttttgtatcttctaacatgatccactagttg

SEQ ID NO: 21267 - DNA, 201 bp, Homo sapiens
tcttcttttcaggggccactgtcctgtgcttcctattgtctgatgtctgaacaacattgtttcatatgtttttcactgtattataagtgtttaaatgtggkccctgttattccatcatggccagaaacagaagttcctttcatacaaaactttagatatgttttggaactgaatataaacttgactaatgtgagaagtata

SEQ ID NO: 21268 - DNA, 201 bp, Homo sapiens
gtctgaacaacattgtttcatatgtttttcactgtattataagtgtttaaatgtgggccctgttattccatcatggccagaaacagaagttcctttcatasaaaactttagatatgttttggaactgaatataaacttgactaatgtgagaagtatagggtgatattagttaaacaaaaataggttataaaaagatacaca

SEQ ID NO: 21269 - DNA, 201 bp, Homo sapiens
taaacaaaaataggttataaaaagatacacaaatagaaaataaattataagaaaaagaaacaattttggtacaaaatcataagcttgggaagacttttagrtaggaattctgtaagtaataaaataatttacttgtaaatgcttcagtctttccccctatactaatagctctgacaaggcaagaatcttacatcccctcat

SEQ ID NO: 21270 - DNA, 201 bp, Homo sapiens
ataatttacttgtaaatgcttcagtctttccccctatactaatagctctgacaaggcaagaatcttacatcccctcattagatcctatgttagtgtgactyaattcattttcctacctggaaggaagccccagaaactgcatgtcacattacattctgtctggaaagataatggcaaagacaaggttcgtggtgtgcctag

SEQ ID NO: 21271 - DNA, 201 bp, Homo sapiens
cttacatcccctcattagatcctatgttagtgtgactcaattcattttcctacctggaaggaagccccagaaactgcatgtcacattacattctgtctggmaagataatggcaaagacaaggttcgtggtgtgcctaggcactgcagctttagttccaagccactgtctgcagatcctaataatggccggctctggatgta

SEQ ID NO: 21272 - DNA, 201 bp, Homo sapiens
gatgatttcccccctccgcctccaggaagaaagaatgttactgccttaataaaaaatgaaaagagaatgatgctcaaaatctttccaaataaaatgttccytatattaggtgtctctggatgtttcattttgaaagtttgctgacagtgtgctataaatcgttcattcattcattcctccaacacgttcgagtgcctagta

SEQ ID NO: 21273 - DNA, 201 bp, Homo sapiens
acttccctatccccttcagtagcttggaaatcattctcagggtggacagttggcaaacagcatatgcataaacttgcagataaaacccttgaagcaagcargctgccagcacatggcaatgatggctctgaagcaaatgaacaaagaatccgaagcagacaattaggaaactctccccaggtcaaacaggctgtggatggt

SEQ ID NO: 21274 - DNA, 201 bp, Homo sapiens
tatgcataaacttgcagataaaacccttgaagcaagcaggctgccagcacatggcaatgatggctctgaagcaaatgaacaaagaatccgaagcagacaawtaggaaactctccccaggtcaaacaggctgtggatggtgaagtcaggatgggtccttgaaaaacaaaatgcctggtttgttcctctatgccaaataataa

SEQ ID NO: 21275 - DNA, 201 bp, Homo sapiens
tttcccactgctatatgacgtgcattcagtggcatttagaactcagcgtgtgtcaggcactgtgccagtcagagtcaagcttctagatggaaagcccccaytttttaggatctaagctaaatccatctttctaactatgcatctttcatgggctattaacattcttctagcaccaccaaccgacctgggttttaacaggag

SEQ ID NO: 21276 - DNA, 201 bp, Homo sapiens
aaataataaataagtaaaacaagtgttggaaggcaggaaagtaagcaggtactaatcacatccctctagtgcctcacatccaaacctcatcaactctcttrttgaaggaggaactggctaaagctggagctcataattctgtttcattttgacaaagagcttttcagcacagcacattttacaaacactggtaatactgag

SEQ ID NO: 21277 - DNA, 201 bp, Homo sapiens
cttcattctattgtttcctttgcagtacagaaagaaaatagcatcttattgtaattagtatttgattattaatgagtttaaactttttttgtatgtttatkactgagtgtattctgttgtaaatggcttatccagtcccttgtccatttttacatggtagtattttttcttcctccaatgattttttttttaattttaatt

SEQ ID NO: 21278 - DNA, 201 bp, Homo sapiens
agatgagcaattgcttagtgtactatctagaatggaggctctagcctaatttttttttgagacagagttttgctcttgttgcccaggctggagtgcaatgrtgcgatctcagctcaccacaacctccacccgccaggttcaagcaattctcctgcctcagcctcccaccaaatagctgggattacaggcttgtgccaccac

SEQ ID NO: 21279 - DNA, 201 bp, Homo sapiens
agcacctctcccaagtagaagggacagacttttgatggaacagggtgaagcacaggaagtgagtaccctctggggaggccacacagccatagtcagagatragattaagatcttgtcttctgaaactaataaaatgctctttatatgattttatactgttttgggtattttggatatagggtctcactctgtccccaggct

SEQ ID NO: 21280 - DNA, 201 bp, Homo sapiens
ggcttgtgccaccacacccggctaattttctacttttagtagagacagggtttctccatgttggtaaggctggtctcaaactcctgacctcaggtgatccrcccgcctcggcctcccaaagtgctcgaattacaggcatgagccaccgtgcccggcccagcctaattctattctttcttctctttgtgttttttttttttt

SEQ ID NO: 21281 - DNA, 201 bp, Homo sapiens
cccaggtagcagaaaatttcttcatttcctttgccaggttttccaggtgaggtaatccctaaccaaggaaaagaatatagtgtctagctctattcagaagscatggggaagacagtttgtggggctttattcttctccccactgcaattccaagaaagcaactatgcttgtatgagtttgacatattaggctctgctgttt

SEQ ID NO: 21282 - DNA, 201 bp, Homo sapiens
aatgttggcaactctagtttgcagttctcagactgtggcacaaatgctatgctctaggcagtgtcccacattctgtcacaggtctttatactcctctgggyggcacaggagctgtgggagagctcgtgcctgaaggagtcctggtacagtgttgtaaggaggccttgactctcccccacgtgagttgggtctgcgagctgc

SEQ ID NO: 21283 - DNA, 201 bp, Homo sapiens
tctccaaatgttggcaactctagtttgcagttctcagactgtggcacaaatgctatgctctaggcagtgtcccacattctgtcacaggtctttatactccyctgggcggcacaggagctgtgggagagctcgtgcctgaaggagtcctggtacagtgttgtaaggaggccttgactctcccccacgtgagttgggtctgcg

SEQ ID NO: 21284 - DNA, 201 bp, Homo sapiens
cacagggcactaaaatgcttttgagaaagaagtgttttattggtctgaatttacctgtttatattaattatatgtacggggaaatgtcttcttcaccagtmacagtggcttaaatgtacccacttatttcatgtgttttcatgctgttgcctagagaatagttttatattttctcaaatgttaataaagatattttgaaga

SEQ ID NO: 21285 - DNA, 201 bp, Homo sapiens
ttggtatattttatatgtatatatgttattctaacacatctgactcgctttgtctatggaaatgatatatcagtataggatgagtttagacaggacaaacraaattcaatttagattattttatagttcttatatttttgaaaatattatcccctcaattttctttcttcttttgtaaaataacgtgtttttgaaataatg

SEQ ID NO: 21286 - DNA, 201 bp, Homo sapiens
tgacgtgtcgcctctgtcatggtgttgatgaacctgtgtgtgcagtcatagatacatcgtgtgtgtttgcaaaaatgtgcgtgtttctctggagatttgarggggaaagagcactagaaagagctcatctgatagatgcggaaatccgaactcagaaagtaaactaggtagagcttccttccaggtttggttttttctaag

SEQ ID NO: 21287 - DNA, 201 bp, Homo sapiens
ctttaaagttcctggctgaggctggattgtgtagaaataagggcattagggatccaagcgggccataaaagaaacccatttctcactgtcatcgtcctctkttctggttatcatattgtgacgtgtcgcctctgtcatggtgttgatgaacctgtgtgtgcagtcatagatacatcgtgtgtgtttgcaaaaatgtgcgtg

SEQ ID NO: 21288 - DNA, 201 bp, Homo sapiens; identical to SEQ ID NO: 3952

SEQ ID NO: 21289 - DNA, 201 bp, Homo sapiens
agaaaggtttggcaattcttttgctccttgtaacactcggggctcattttctcctgtcttcttagtaagttgttgcagaattgattaagtaaaagaggccvcataatgtactgaaagaaatgtcatactagccccacattccttttatgtgaagcccttttaaaaatgaacacaacccactctttaaaaaaaaaaaaaaga

SEQ ID NO: 21290 - DNA, 201 bp, Homo sapiens
ataaaggaagcgaggaacattagcttttgtttggaatgcctttacatgggtgtatccctgtatcctagatccacacatctaagaagtaaagcacatttcayggaccgtgcatctcaaaggttttttaaataaaactttaggttcttaaaatgccaactgacttgtgtttttcccacgcattgcttcgaccaaactaagact

SEQ ID NO: 21291 - DNA, 201 bp, Homo sapiens
agcgaggtatggagcatcgtacccaacaggcagttttctagcccttgtcctcctccctccctccccattcacctagtttctactgtctatttttaattttwatttttatatttttaattttaatttattttttaatattttttattatttatgtttacttttcatatctgttttttgtgacaaggtctcactctgtcaccc

SEQ ID NO: 21292 - DNA, 201 bp, Homo sapiens
ccctgtatcctagatccacacatctaagaagtaaagcacatttcatggaccgtgcatctcaaaggttttttaaataaaactttaggttcttaaaatgccarctgacttgtgtttttcccacgcattgcttcgaccaaactaagactccagaggttccacttacttctctttttggaccagtcactgacttactttgagact

SEQ ID NO: 21293 - DNA, 201 bp, Homo sapiens
tttgtcagcatatttctaacatttttacttatataaggcaaaaagtattttatactttttctttatcatgtaggctactcagacttttccaacattgagttatttcttgattttttatcttttttaaattgccacaggttggaatcttttccttcattttcctttccttgcattttttccctttggctttttctttttgct

SEQ ID NO: 21294 - DNA, 201 bp, Homo sapiens
ctgctgggctttctcccatgcatttccctttcagaagtgagtagctttagggaatggtggttcttctctgctccagagacagtgtgggttttttttttttyttttttttttttttttgagacagagtctcactctgttgcccaggctggagtgcagtggcactatctcagctcactgcaacctctgcctcccaggctcaag

SEQ ID NO: 21295 - DNA, 201 bp, Homo sapiens
gctatatattaaaagatctattaaatttacagctggttctagctggaatttatttcattgaattgtgctgatgtgctaatttggtcatttatctggacaataaatggcttgtcattttttcctatgagagcaaatgagagatatgtacttaaacttccctatccccttcagtagcttggaaatcattctcagggtggacag

SEQ ID NO: 21296 - DNA, 201 bp, Homo sapiens
gtgatcttacatataacccgctcacaagcaggcaaaacaacagatgttaagtttgtggtgaagtgtctcctatgccacttgttaaagcaattttcttcttytttttttcaatatttctttttttttgagatggagtctcgctctgtcgcccaggctggagtgcggtggcgcaatctcggctcactgcaagctctgcctccc

SEQ ID NO: 21297 - DNA, 201 bp, Homo sapiens
atttttattaatagcagcattttattaaatttcttgactcatgtttcatgcattaactggattcctcctcaaaggacgtgtgcacttgatccacatcatcrtaatgcctgtgccatcttaactacatttttctagcttgaaggtcaggattagggggaggaacaccttccgagttgtattaacagggttggtgaggtggtt

SEQ ID NO: 21298 - DNA, 201 bp, Homo sapiens
agttttccacattatgaatattttttatgaaagtgaggggttctaaggacagatggaaaattctttaattttgaatcctagaattgcagaaccagttgagrcttgagaggtcattcggtcttaccatatttatttcattttttatctttatttttattatttatctggtatttatcataatcaagatgatgacgttaaatc

SEQ ID NO: 21299 - DNA, 201 bp, Homo sapiens
ggacgtgtgcacttgatccacatcatcataatgcctgtgccatcttaactacatttttctagcttgaaggtcaggattagggggaggaacaccttccgagytgtattaacagggttggtgaggtggttcgtcatgatatccatcctgtgtttcaaaatcaagaaaaaatgaaaatctctttccacaagcagtagcagaaga

SEQ ID NO: 21300 - DNA, 201 bp, Homo sapiens
gtggttcgtcatgatatccatcctgtgtttcaaaatcaagaaaaaatgaaaatctctttccacaagcagtagcagaagatattgtcagggcagggctgtcrcaggagtgtccacctgctgtgagctcatcacagataaccgtcacctctgctccatctccagcctactgttcagtctggagagctgagcagagttaggagt

SEQ ID NO: 21301 - DNA, 201 bp, Homo sapiens
tccatcctgtgtttcaaaatcaagaaaaaatgaaaatctctttccacaagcagtagcagaagatattgtcagggcagggctgtcgcaggagtgtccacctsctgtgagctcatcacagataaccgtcacctctgctccatctccagcctactgttcagtctggagagctgagcagagttaggagtggatgctggtcactga

SEQ ID NO: 21302 - DNA, 201 bp, Homo sapiens
atctccagcctactgttcagtctggagagctgagcagagttaggagtggatgctggtcactgatgcaagcagattcttccagaaagagatttggaaaggcrgcaagcagattcttccagaaagagatttggaaaggcagtaaagaaaagcaaagttgaaaggagctctagatattgaatgggctctggctaccaggggctc

SEQ ID NO: 21303 - DNA, 201 bp, Homo sapiens
accaggggctccttgttcatgtcttagggcatcttcgctgacattgtgaagctggctttactgttttcctcattttataggtgaggacatcaaagctcaaktaacttcctaagagtatggctagtaattgtatgtgatggtccacaaatgggaggaaaatgccttttacctgtggggtgaggctgtagagtgtagtgtatc

SEQ ID NO: 21304 - DNA, 201 bp, Homo sapiens
atatatttaggaagaaaaagccacccacttcctttgagctgaatgggagtaactttgggacacgttgatgaaaccctccctgtgtctctgcataggaccckaagattagtacaagtctgcctgttctggacctcatcgatgccatccaaccaggttccattaactatgaccttctgaagacagaaaatctgaatgatgatg

SEQ ID NO: 21305 - DNA, 201 bp, Homo sapiens
tatgtctacttctttctacacagacacagcaacaatctgatttctctatcttttccccacatttcccccttttctgttccacaaaaccgccattgtcatcmtggcccgttctcaatgagctgttgggtacacctcccagacggggtggcggccgggcagaggggctcctcacttctcagaaggggcggcagggcagaggcg

SEQ ID NO: 21306 - DNA, 201 bp, Homo sapiens
caaaagctttctactagaatgactggacaagctcactatattgtagttttaaaaatctcccatggggctatccatagtccatatacttaataactcattgkttttttttttttttttttaattgatcattcttgggtgtttctcgcagagggggatttggcagggtcacaggacaatagtggagggaaggtcagcagataa

SEQ ID NO: 21307 - DNA, 201 bp, Homo sapiens
tgtataccattaggttatggattgttttgttcatgtacacagctcatttactgagtacctcacatgggccagacactaatctgctaggagagatgaatggwaacagggaccacactacagagatctggaccaaagctcagaggaagggctcactgattctccccagcctccagaacaggatgcctgaaaccatgatgattg

SEQ ID NO: 21308 - DNA, 201 bp, Homo sapiens
tgccaagaagcccagcctcaggatctgcaatctcagacagaatcgcttttgcggctggcaaggtagggctaggcagcaggcacaggtgccatttcacagaytacctcgggccagcagctgccctttagacaccaaattaactcaccaaagttgtctttccagcaaagtggtttaatgtgaatttgaagcatttagtagcct

SEQ ID NO: 21309 - DNA, 201 bp, Homo sapiens
caggtgcaactttttttccataaaaaccttttataataattcatgagattataatagatgtgtgtgcattcaatatagcttccatcctgaaaatgttttttcagtttttatttatttttaaattgacatataacggtatgtatttatggggtacctagtaatgtttcaatacatacaatgtctagtgatgagatcagggta

SEQ ID NO: 21310 - DNA, 201 bp, Homo sapiens
gcaaacccacagttctgtggttgcagcattgattcttatttcagcatctgttacatggacagaagggagggtctccctccctctctctctctcgctctctyacacacacacacacacacacacacacaaataaacacacatacacggaaacacacacacacactcactcacacactccttcttgactggataagctaaagt

SEQ ID NO: 21311 - DNA, 201 bp, Homo sapiens
aaaattaacacagtataagaaccctcgtccaaatccaatacagtttattttatttctttctttcattctactttcagtttttattgcatcctctttagttraactttggtcataaaaaagctatgttttcttcggtcccaaaagataacccatcttcattcatctaggtgagacgagagaagagcggacatttaggaactg

SEQ ID NO: 21312 - DNA, 201 bp, Homo sapiens
agaccaggctgtatatattatatatttaggaagaaaaagccacccacttcctttgagctgaatgggagtaactttgggacacgttgatgaaaccctccctktgtctctgcataggacccgaagattagtacaagtctgcctgttctggacctcatcgatgccatccaaccaggttccattaactatgaccttctgaagaca

SEQ ID NO: 21313 - DNA, 201 bp, Homo sapiens
gacaggtgcttttctcagatcagattccgttagtttccttgggctgccacaacgaagtactgcacaaactgggcagcagaagtttcttctctcacagttayaggagctagaggtttgcaatcaagatgttggcaggattggtttcttctgagggagaatctgccccatgccaatctctgcctccatcttcacatggcattc

SEQ ID NO: 21314 - DNA, 201 bp, Homo sapiens; identical to SEQ ID NO: 3958

SEQ ID NO: 21315 - DNA, 201 bp, Homo sapiens
tgaaaaaaaagttaaaatgtccttataaagacaaaatctttttctttcctggctgatgatttgtcattctagtcacttcctgccttgtgaccacacacccrggcttgacaaagctgttctgcagatcagaaagaaggggttcctggtcatacaccagtactaccaaggacagcttttttcctgcaaggtaaatgttcttca

SEQ ID NO: 21316 - DNA, 201 bp, Homo sapiens
ctaagaaaataaagtacttatggtagaattactttggttatccacccagaatttcctaatgtgctaagaaaatcaggataattttgcagctgtttaggtgrgagaatgaagtggggtcctcatttccaacctcaatatatgaatgtggcttcagtagtattcacctttcccgcagatagtttgagtctagtcaaacggcat

SEQ ID NO: 21317 - DNA, 201 bp, Homo sapiens
gtgaagagtgtctggtgtaaccatagtaagaggtcactagataataaacgaggtgaataaaagaactgccaggtagtagtgtgggctcatttgaaaataarttacaattaatgaaatttatcttcatatatctacaaatagagcaaaaatgttctgatgcagctattatcattctatgtgaaaatatggaatataaatctc

SEQ ID NO: 21318 - DNA, 201 bp, Homo sapiens
tttccctctgtgttttataatggggaaaaattaattttactttgttaataattaatatggaagaagttattgagagagagacaaggagaaaaaatgggacyactcatgcctgatgctcttaatttaatttgatcaataaagtaaaagtaaagtaattttaggagagcaggaggtagtaaatgtgggcttgggtagagtgaa

SEQ ID NO: 21319 - DNA, 201 bp, Homo sapiens
tttaccatccagtcttttgcaaaaaaagttaatgaacatctgctccagacaggtgcttttctcagatcagattccgttagtttccttgggctgccacaacraagtactgcacaaactgggcagcagaagtttcttctctcacagttataggagctagaggtttgcaatcaagatgttggcaggattggtttcttctgaggg

SEQ ID NO: 21320 - DNA, 201 bp, Homo sapiens
ctctttccacaagcagtagcagaagatattgtcagggcagggctgtcgcaggagtgtccacctgctgtgagctcatcacagataaccgtcacctctgctcyatctccagcctactgttcagtctggagagctgagcagagttaggagtggatgctggtcactgatgcaagcagattcttccagaaagagatttggaaaggc

SEQ ID NO: 21321 - DNA, 201 bp, Homo sapiens
catatttttctcagaggtaggtgattatagacttttattactgaagctagctaacaagatcttggcactcacagttttaagagagaataaaagagagagagcaagagaaagaagagagagagagagagaagaaaaactttgtaataaatttacaaacatttttatttttataaataagagataccattgcaggttttatat

SEQ ID NO: 21322 - DNA, 201 bp, Homo sapiens
gcatatttttctcagaggtaggtgattatagacttttattactgaagctagctaacaagatcttggcactcacagttttaagagagaataaaagagagagagcaagagaaagaagagagagagagagagaagaaaaactttgtaataaatttacaaacatttttatttttataaataagagataccattgcaggttttata

SEQ ID NO: 21323 - DNA, 201 bp, Homo sapiens
ggactactcaaagacagctggaggagaaagggagagagaaaaatgcttataaagaggtgggcaaaagagcgggaccttgtctcaaaaaaaaaaaaaaaaaagaggaagtggtaggaggtgtctgaatttcactgtgacctgttctgtcaggtgatttttggtggggcggggacatgaaaaaaaagttaaaatgtccttata

SEQ ID NO: 21324 - DNA, 201 bp, Homo sapiens
acttacatgttttttccccactagactatactccttgagaacagcgattgtgtcttatttatttctgaatcaccaattcagacaggcatgcaaacacttgytgaaccaatgcacaaatatattttgctcttcttcatagattcctccggcctcagatgaccaggcaccactagatacagaatactgtgctttccttctcca

SEQ ID NO: 21325 - DNA, 201 bp, Homo sapiens
aatataaaactaatcagtgtccacagatttgaagagtttcaagtgttcctattttgccagatggaagcgcactccttaaaaaagtgttaatgttctacagkgtcttcattttgaggctctcggaagtcacctcctgattagatgttggtttcctagggatatctccctatagctgctgtggccgtggtgttccccagatgg

SEQ ID NO: 21326 - DNA, 201 bp, Homo sapiens
atgttttttccccactagactatactccttgagaacagcgattgtgtcttatttatttctgaatcaccaattcagacaggcatgcaaacacttgttgaacyaatgcacaaatatattttgctcttcttcatagattcctccggcctcagatgaccaggcaccactagatacagaatactgtgctttccttctccaaggtaa

SEQ ID NO: 21327 - DNA, 201 bp, Homo sapiens
aaaaaattaacaatcatacctaattcatagagttgttgtgaggaataaatgaaataatggatgttaggggtctagtccagagcctgacgtaaatattaagmgattagttaacacgtacataggatatactacgtgccaggcactcttctaagttctttacatatatcaattcacttaccccttgcaacaactgtctaaaat

SEQ ID NO: 21328 - DNA, 201 bp, Homo sapiens
tgtttctgtgactttcctcagcaatatttagaggcctgagagtagcaggtgatctgatatctgggactgaggccagaggcttcagggcaggagagggtggratgaagtctgagagggtggtagggcttagaggaaggcaaaacccaggccaggaacaggtggcagtggaggctcatagagggtgggctgagaaaggtccac

SEQ ID NO: 21329 - DNA, 201 bp, Homo sapiens
cagcatttttataatatcaaatagtaggcagcatccaaatatccatcagctgatgagtaaataaaatgtgatatattcatacagtggaatagcattcttcyataaaaaggagtgaaggtcaggtgcagtggctcatgtctgtaatcccagcactttgggaggccgaggcaagaggatcacctgagcccaggaattcgagac

SEQ ID NO: 21330 - DNA, 201 bp, Homo sapiens
gtgtttctgtgactttcctcagcaatatttagaggcctgagagtagcaggtgatctgatatctgggactgaggccagaggcttcagggcaggagagggtgrgatgaagtctgagagggtggtagggcttagaggaaggcaaaacccaggccaggaacaggtggcagtggaggctcatagagggtgggctgagaaaggtcca

SEQ ID NO: 21331 - DNA, 201 bp, Homo sapiens
tgtgcccagaagggcttcacacttggtttaatgctctgctgtcactgtctaaaaattcctaatttttaaacaaaggactccacatttttattttgcactgrgggccacaaattatgtagttggttctgttcttggttctaggagagtgattcagatttatagacaaggggagtggagagacaggcagggagagtgagcaca

SEQ ID NO: 21332 - DNA, 201 bp, Homo sapiens
agaaatgtagaaatgatgatgtaaaaatcatgtaacaaaagttgggagagaaagtaggagaggaaattgtggcagtattacaggtaagttgagttacctaytgttaatagccataggtcaaaagatgataatttaacattataaatcaagttatagactaggtatatttgaacagtataaatgttgacactaaaactgcaa

SEQ ID NO: 21333 - DNA, 201 bp, Homo sapiens
actgaccttgggaagaaagaagaatgccgcttccattaagactgaaagagaggaggaagaggtggatattgtggaagtagagaggaagctcataccagackacttggatcatctcagtcaagaaggggcaacagaagaatcttgggccaggacaaagcataggagggtgaagtggaaggttgaggcaagaggagagagttt

SEQ ID NO: 21334 - DNA, 201 bp, Homo sapiens
tatgctggcccctctgttcgaaatggccttcatcacttttctccctcctttatctggccagcttctatatatttctcaaggcccagctatacatcattttmgtttttaactgacaaataaaagaatatatatttatggtatacagtgtgatgttttaatgtatgtatacattgcggaataattaaactaagctaattaact

SEQ ID NO: 21335 - DNA, 201 bp, Homo sapiens
caaccttcatatggcagctgtgtatataaattctctggaagacctatcgtgcttagagaatgaattttagatatatatttattttattttattttattttwttttttttgagacagggtctcgtactttcgcccaggccggactgcagtggcgctatctcggctcactgcaagctccgccttctgggttcacgccattctc

SEQ ID NO: 21336 - DNA, 201 bp, Homo sapiens
cagaaaacctgatggctacaggtgatctggaccaagatggaaggatcagctttgatgagtttatcaaggtgagtaccatgcagaatacaaggagacacatytgaaacttggaacttgaattctgttttaaaaaatatccagaaagacattccttacctccttgcttcgacattacatattctttcctttgtgattttcttg

SEQ ID NO: 21337 - DNA, 201 bp, Homo sapiens
tttgatgagtttatcaaggtgagtaccatgcagaatacaaggagacacatttgaaacttggaacttgaattctgttttaaaaaatatccagaaagacattycttacctccttgcttcgacattacatattctttcctttgtgattttcttgatcactgcttgagtttctaaagatacattatatttttgcagattttccat

SEQ ID NO: 21338 - DNA, 201 bp, Homo sapiens
gtcatcaagattgggttgtttgctgacattgaactcagcagaaatgaaggtaagagcaagtcccaaaggtcatttatgacacagctttctaataacttacrcgttggggactgtaggaggaagatgtcagaaattctcaagttttgaaaactacacagttatattgattccatggtattcatgtcacagattctatacaca

SEQ ID NO: 21339 - DNA, 201 bp, Homo sapiens
gcttcagtagtattcacctttcccgcagatagtttgagtctagtcaaacggcataactgattttatatctaaacatcacagattctgttgctatcttcttkgattatggtattgctagaatttaaattcaacgttactgggctctgttattcagaagactgctttctttaatttaattgtttctctttcagtaaaatgatc

SEQ ID NO: 21340 - DNA, 201 bp, Homo sapiens
aaatttttagcagtatgagttaattcagtaaaagtatgttttaagctaagcttcataaccagagaaacactttttacctttctgctttttttttttcagtyctatcagtttttgtttcaagtatcgtgaaactctgttattaggttcataaacagtttagattgttgtttcattctaatttactcatccctttgtccttat

SEQ ID NO: 21341 - DNA, 201 bp, Homo sapiens
gtttgagtctagtcaaacggcataactgattttatatctaaacatcacagattctgttgctatcttctttgattatggtattgctagaatttaaattcaaygttactgggctctgttattcagaagactgctttctttaatttaattgtttctctttcagtaaaatgatcaacctgtcagtgccagacacaattgatgaaa

SEQ ID NO: 21342 - DNA, 201 bp, Homo sapiens
cttgcacttatatttatcaccttttgtggttacctcataattcgtctaaaagaagacctccctctgctgattaacaggcaccctgccttcatctataaaargtacatagccaaaggacaataggaaagacaagtagaactagttaaatgtcactgaggttcaatcctgataactttgtataggaaagaggtgggatgcaga

SEQ ID NO: 21343 - DNA, 201 bp, Homo sapiens
tctcattgggctgtacaacacacacccctgaccaaaccagttcctgatgttcttaatagagaccttgcctgttgctccctttgtatgcatatttatactaycttctactcccaccccttgctatctccccaaatcctctactctttcctttttctgatccagattttgctagctatccaaggacaagttcaaattccaccc

SEQ ID NO: 21344 - DNA, 201 bp, Homo sapiens
gaatttattgtagtaattttacaaagccataatgactgccgttgtctgtcaactaaaatctgctacctggtatccaaagatccccaattctgaatccttcytccagataggcttatctcattgggctgtacaacacacacccctgaccaaaccagttcctgatgttcttaatagagaccttgcctgttgctccctttgtat

SEQ ID NO: 21345 - DNA, 201 bp, Homo sapiens
tggctagagattctctagaattatttgagcacattgagtggttcaaaatctgaagtctgcaaaaataaaattgatattatatatttatcaataataatacrtaggttaactgataaaatttattttatttgggttgcaagtataccaactcaatgtggagacagtggttatgctaatcatatgttcttactggcaagtgta

SEQ ID NO: 21346 - DNA, 201 bp, Homo sapiens
ccgtttctgtgcctcatttaatatcactggagttaaatccaatgagttcatgttgaagtcaactgattcctaatgagaagtagagtaaaagtaaatgacamgtaaagctcatgaaatgcataatgtgtagcgttatctagtaaagggtcatattaagaaatcatcctaatttaaagttttgttttctgaaaattggtggtt

SEQ ID NO: 21347 - DNA, 201 bp, Homo sapiens
tcaagttctaatctttagttatacatacttttttatttatatgtccaaatcacaataaccaatgaaaaatcctgaaatattatttaaaaaccaatgtattmaacataatataaagaaggcgggggagaggaaatagggatcttagaacctgtgagaaagaatattgatcttcaaataatgacctcagctaaatttaaacct

SEQ ID NO: 21348 - DNA, 201 bp, Homo sapiens
agatgaaaacataagcctttctaagaagcgagggggtgaaaagcgggaagtactctggcagccttcatagtaattttggccacagccacgagtataataamtataacttgcttttattccatcaatttgttgattaactggaatagtaaccagcagtaagtgtatttctgtgttgtgttccaatattttaacattatcata

SEQ ID NO: 21349 - DNA, 201 bp, Homo sapiens
gaatatacatacctatgccatcagcctatattgaaggacattgtaagaaacacaaaacctgtgtttaccccatcccacaaatggcctcttcttaaagcctstgtgaagattttgctgtcagacatcagatctgctgccctaagaaaattggtttgtctcatagatagtgaattgtataaccgatgatactttcctttttgc

SEQ ID NO: 21350 - DNA, 201 bp, Homo sapiens
ttcttgctcttcttaatacttcctttaaagatgttgagaaaccgaagacacatttagaacttccctaaagagcctaggaagggcccagtcctaagtaaaaycttgcagaaatatgtgtttccctaattaacatgaggtcagagctttgaccttcaagggcaaccccaaaggatggcagggaaactcgagatacaggaatcc

SEQ ID NO: 21351 - DNA, 201 bp, Homo sapiens
gaaccaactacataatttgtggccctcagtgcaaaataaaattgtggagtcctttgtttaaaaatgaagaatttttagacagcgacagcagagcattaaaycaagtgtggaggccttctgggcacaggcctgtgtgagactgcacaggcggctggattatatggtagttctacttttaattttttgaggaacctccatatt

SEQ ID NO: 21352 - DNA, 201 bp, Homo sapiens
ctggtgtcctgaaagaatgtaggtgcttcttgaaagctctctgcaacttattaattgggagtgattatgcgatggagaaaacagagtcccatcaccccctsagtcttccctgggaaatcacaagagggctgatagctctctgtgaggtgaaccgtttctagaatccccaccgtctcgtcctgttcttccgcccacccagtt

SEQ ID NO: 21353 - DNA, 201 bp, Homo sapiens
cagcctatttcagactgaggcttaaggcacgggacatttccatgtgctctcagtccttgggatgagccctgggcccaccttccttacatttactatgcctstcgtcactgacctctgttctttgttccacccagtgtgcagatgggcttgcagtaaacgccagcagtgctatcttcgtgaacttggcattgttttgcccag

SEQ ID NO: 21354 - DNA, 201 bp, Homo sapiens
cccctcttaattttagatgtcagtttttaaacttcttctcatttgcatccaatgcgtcctcctagacagttaactctttcctacagttgtagtcatctccrtgctaatgaggctccaatctatatcttctgccctgacctagcactaagctctggatacataccttgcattatccacaggccagctctcctgagcttcttc

SEQ ID NO: 21355 - DNA, 201 bp, Homo sapiens
ttgtttagttagttagaaatcaatgctagcattttcagtctatgtgaccagtagtgctgatgtggatggcctcttgtccacccaaaatacataggaatgcsagataaaatatgtagctgagatgaacagaaaaggaaatccctgatgttgggagaagaaaaagaacttaatgtcagcgaagtgagctggagatgaagtcct

SEQ ID NO: 21356 - DNA, 201 bp, Homo sapiens
taccatcttccccaaagcattcattcttccaaactcctaaacaatatttcagacactctcctttcactacagcccttgtgtagctccttccccagcctcaytcattgtgaaaataggggcaattagaagaatttccccaggtgcacctcccagcacctgcgaccctttactgtgctttctctcctgcccttgtggataagc

SEQ ID NO: 21357 - DNA, 201 bp, Homo sapiens
atcttctggtcctgctggcacctgcattgtgtctcttgacatgatctcttgccagctgcccagggctgcctctttaatagatctgacccagtttgtgccaygtcactcaagtcttccctcttatccctccaccgcctgtcaaactggcttttctcccaccatgcctggagcaatctctctatgacttccagtgacagggaa

SEQ ID NO: 21358 - DNA, 201 bp, Homo sapiens
ataaacattagaattaggacacatcaaaatataaaactaatcagtgtccacagatttgaagagtttcaagtgttcctattttgccagatggaagcgcactycttaaaaaagtgttaatgttctacagggtcttcattttgaggctctcggaagtcacctcctgattagatgttggtttcctagggatatctccctatagct

SEQ ID NO: 21359 - DNA, 201 bp, Homo sapiens
agttatttcctttgtttgaactggagatcctgggattcctttaaaaaaattactaataaggaaatgtcatgcaacctttatcatggaattaaaaaaaaaaatcaaacacaaggaaaggacaatgtctgtctgttttcaaaagtgccttcatgaatttagtcattcattccagaatcatttattggaaacctactatgcata

SEQ ID NO: 21360 - DNA, 201 bp, Homo sapiens
cagaatctgacaacttttgtctcctctgctaagagtttggtccaagccacatcatctctcacctagattattgcaacagcctcccaatttgtctcactgcwtctgacattgcccttctttggtttaatcatgacacagcagttagaaagatctttttaaaaatgtgtatcagatcttgtaactctgttgatgagaccaccc

SEQ ID NO: 21361 - DNA, 201 bp, Homo sapiens
gcagaaataaacattagaattaggacacatcaaaatataaaactaatcagtgtccacagatttgaagagtttcaagtgttcctattttgccagatggaagygcactccttaaaaaagtgttaatgttctacagggtcttcattttgaggctctcggaagtcacctcctgattagatgttggtttcctagggatatctccct

SEQ ID NO: 21362 - DNA, 201 bp, Homo sapiens
tctttatgttctttcagcattcttaagtcttttgcactctttgtaaatgctgaagttatgtttctaaccctgcagtgacttccatgtttctgtacaaacaytgcaaacttgccacagaccagaagttgtaaattagtgatgtctagatgagtcagttacagattagccaacatgatatttaattgaaaaaatgttgccagt

SEQ ID NO: 21363 - DNA, 201 bp, Homo sapiens
agctctgccgggccgcggcggtgatcgatggggagcggctggagcggacccagcgagtgagggcgcacagccgggacgccgaggcggcgggcgggagaccmgcaccagcgcagccggccctcggcgggacgtgacgcagcgcccggggcgcgggtgagtccgcgcggaccgccaggcatgcttgggggacttcaagggcgg

SEQ ID NO: 21364 - DNA, 201 bp, Homo sapiens
ttggaggtggggcctggtgggaggtgtttggatcctgcaggcggatctctcatgaatggcttggtgccctccccatgttaatgaaagagttcttgctctgraactgtgacacctcccccctctctctcttgctcctgctctcgccatgtgacatgctggttccctatcaccttctgccatgattgtaagcatcctgtggcc

SEQ ID NO: 21365 - DNA, 201 bp, Homo sapiens
aataaggaagaaaagtttactctgctacttacccaaagcccaggtaaaatgcttagctgagaaggaatttaaaactcatagtttaaatgcatgatgcatgyctgctgtcattttatctgtgctgccacagtgtcctttcaagcagataactgagagttgctgtattttgctttcgaatttgttacagggacaaaaatagtg

SEQ ID NO: 21366 - DNA, 201 bp, Homo sapiens
ttacccccatctcaagtgctcagtagacacatgtggttagtggacaacacagatttagaacatttctatcataggaagtactactggacagtactgctgtmaacacacttattaataatgcagcagactttcttggccacttggtaagaaagttttctgctcttttaaacttatttgggaagtttttaatacttttgaaat

SEQ ID NO: 21367 - DNA, 201 bp, Homo sapiens
actagtgactattgctgctagctgtggttgtattaacattaaaatatttgctatgggatttttcttcttatcaaagcagatgctcagatgaggaaaaactytcttgcatatgaaaatcaaaattgtcttccaaaatatttaagtaacaaaaaattcattatgtagtataaatgctgtatgattacattattcttatagtta

SEQ ID NO: 21368 - DNA, 201 bp, Homo sapiens
ttggcatggcagtggtgtcttatttctgctcctctttttccccagggcatgccattgcaagagaatgctcagccatgttcatctggggacctgctcctggyagagcaataggatctgtgtgcccagcaccactgcccacctagctgtcctggcctgtgcccaatgctgaccttcacctcagagtgtggctgtaccacattc

SEQ ID NO: 21369 - DNA, 201 bp, Homo sapiens; identical to SEQ ID NO: 3984

SEQ ID NO: 21370 - DNA, 201 bp, Homo sapiens; identical to SEQ ID NO: 3985

SEQ ID NO: 21371 - DNA, 201 bp, Homo sapiens; identical to SEQ ID NO: 3987

SEQ ID NO: 21372 - DNA, 201 bp, Homo sapiens
aggagcgctggaaatgatcctgtgaaaaatactggctcacaatgtatcagctgagtttggggcaactgaggtagtaggaggcgccccctggacttctgctrgaatttagatttaaatagatggatgaattagacaaaacatactctctgaaagagtgagaaatacaatattcaccaattaagtgaaggaaaaatctacact

SEQ ID NO: 21373 - DNA, 201 bp, Homo sapiens
aggaataaaattatttaatggaaaatttcaaataggctaactctaaaaatgtacagataatctggatgagagaaaactatcctcactttgtgttatttttyaatggtagcattttctcataatccccatgcttttttcatgtcctgctattctttaagatttcctaatgaggattagggaataggcatatttaacaatctg

SEQ ID NO: 21374 - DNA, 201 bp, Homo sapiens; identical to SEQ ID NO: 3992

SEQ ID NO: 21375 - DNA, 201 bp, Homo sapiens; identical to SEQ ID NO: 3993

SEQ ID NO: 21376 - DNA, 201 bp, Homo sapiens; identical to SEQ ID NO: 3995

SEQ ID NO: 21377 - DNA, 201 bp, Homo sapiens; identical to SEQ ID NO: 3996

SEQ ID NO: 21378 - DNA, 201 bp, Homo sapiens
atgtcgtcttgctacattgcctaggttgctcatgaacccccagcctcaagtgatcctcctgcctcagcctcccaaaatgctaagattacaggcatgaaccmctgcacccaaccaatattaatatttttaacaattgaaagagctcaaagaaataggttttaaatttagaggccctgttttgctgacaggaaaggcttttag

SEQ ID NO: 21379 - DNA, 201 bp, Homo sapiens
ggacatgtacagttgctaaatgataattttccaaaaataagcttcaattctccaaaatggcagatagaaagcagctggtgttactcaacagagataagccctcctagagctcaccacagagaggagagcatcatgtctgcagatgccacagcagatctgctgagaatcagccagcgccatgtgacacaagaacccacagat

SEQ ID NO: 21380 - DNA, 201 bp, Homo sapiens
ggcaatttaagctgtgtttcctgattaaagccagggactgaaaaatcactacctattcatgatgaaagactagaaaacttctgaagaccagacagagtttsagagtggtatagttactaatctactaaatactgcaaatatatagtatctgcaaatatatatataaggttgaaaactaagctcagaaatgagcattaaaaa

SEQ ID NO: 21381 - DNA, 201 bp, Homo sapiens
tcttattgatttaaactagtgatatgtaaacagcacttcagagcttgtttcacaggaccaaaaaatttatgctgaaatctactcatgacaaatgggaaaamcctgattagcacatttaaatgaataaataaagaaccgtattcaatggcttaaaatttatagacctgcatcatccattatggtagccatttactatatgtg

SEQ ID NO: 21382 - DNA, 201 bp, Homo sapiens
cagagtggtatagttactaatctactaaatactgcaaatatatagtatctgcaaatatatatataaggttgaaaactaagctcagaaatgagcattaaaarcttttccagatcaagggagtgctgtacccccaagctgaggtttcataggctaccatcatccaggcactcagtcttcccaagcaagttaattcccaccaaa

SEQ ID NO: 21383 - DNA, 201 bp, Homo sapiens
tttctttgggcaaccatttgtgacctggctattgagcccacctgggcctcttctctttgtttgctgatagcctcgttaagtattaaaaacctactcccccycttcaggagccctcttttaatgaaagtttgggtactgggatcagatttgggacttggctacatttatttcctgtgtcattctgagaagagaaagtaatag

SEQ ID NO: 21384 - DNA, 201 bp, Homo sapiens
atggccacaggtgattcctttgagcagtgttcttcctgtatagggcttaagaggaccagaagggaaatgattgtactctcttgtcagctacttcctgggcratttgggttctttgataccccagtgctcactttcggaagtgttaagaccataaaccttaacagttgaccttctcaccttcagaaaacccaaatgtctcgg

SEQ ID NO: 21385 - DNA, 201 bp, Homo sapiens
ctatctcatcctcccaagtatctaggactacaggcacatgcactatgcccagctaattatttttttaattttttgtagagatgtcgtcttgctacattgcmtaggttgctcatgaacccccagcctcaagtgatcctcctgcctcagcctcccaaaatgctaagattacaggcatgaaccactgcacccaaccaatattaa

SEQ ID NO: 21386 - DNA, 201 bp, Homo sapiens
ttccaatagatgggagccaaggaaaagacaagcatctgtgatgtcatgtctcccccaaacgggtagctgcctcaccagcctccattagagacatcccccasagtaagaaataagaaataatcatgagtagaatgagaaaaaaatgcagcttcctttatctgagaaaaacaatagtagctcaatgctgtggcctaaagggct

SEQ ID NO: 21387 - DNA, 201 bp, Homo sapiens
tgttttagtcaaataagattttagcaagcatatttcaaattgttctaaatctaagtaaattggtaattaaatgctatcattagaaagtattttaatatcaraaaaattggaccataagaaagttagtttacccttgtattcatatatacatgtgctttgtgctaaaaattgttatcatttagtgagaacctgtgactatat

SEQ ID NO: 21388 - DNA, 201 bp, Homo sapiens
cctagaaatggggttgtgttgagttgacagagatgtgtggctctttaaactgaaatataatccaaagagaacaagatctagtagaatttcaggtcctaagsctggttaaatttcaggtcctaaggctggttaatagtacaaatacagttatttatttataactagtgcaaatacagttatttatttataactatacaggaa

SEQ ID NO: 21389 - DNA, 201 bp, Homo sapiens
agtcaggagctctgagaggaatgttcaggatagaataaagcagatattttaatgtctcatttcagtgaggaaaattgttaattcatatgccaccagccatyggcagaaatgtaacaggaaatgaagaaaaacttaattactttaaatacagtggtctgtagtacaaattattgtgccgtgaattagtttccttctgctgta

SEQ ID NO: 21390 - DNA, 201 bp, Homo sapiens; identical to SEQ ID NO: 3983

SEQ ID NO: 21391 - DNA, 201 bp, Homo sapiens; identical to SEQ ID NO: 3986

SEQ ID NO: 21392 - DNA, 201 bp, Homo sapiens; identical to SEQ ID NO: 3988

SEQ ID NO: 21393 - DNA, 201 bp, Homo sapiens
gaagcttatcagtagcagaagtgcagactgggaaatggcctatgtcaccctcccatctagaaatgcccagtgcacatccagatcccacacccccaagagckttgtgcaatatctgttaatttatgagagctgtttcccatagatgatgctgcaggcattagtaaggagggcaaagttcaagtgatgacaccatctctactc

SEQ ID NO: 21394 - DNA, 201 bp, Homo sapiens; identical to SEQ ID NO: 3989

SEQ ID NO: 21395 - DNA, 201 bp, Homo sapiens
tgctttctagatctcacaaatctggcttttctagtcaatcacatctctctctccttcggcttctcaccaaaccagcatccgttcagcttcaaagaaaaaasagccctactgtttcccactcatttatcatcaatctaaagtaactgccaatcacaaaagtcccatctttatttctttccttagaaacaaatttctctaggg

SEQ ID NO: 21396 - DNA, 201 bp, Homo sapiens; identical to SEQ ID NO: 3991

SEQ ID NO: 21397 - DNA, 201 bp, Homo sapiens
taagccacagagcttggataaaaggaatagtaagaccaaaaataggaaaagtaggaagaggtggatcctcctatgtttttaatcagggttctatctacctrtaactcttctgggaaaagaagcaggatgtgactgaaacatagctgctttctagatctcacaaatctggcttttctagtcaatcacatctctctctccttc

SEQ ID NO: 21398 - DNA, 201 bp, Homo sapiens
tctgaataactcactgatgccatcccagaaagtcggcaccaggtaaatgccttacatctacagcagtgggtctgtcagcagttttctttaatgtgtcagcrgtggggagagcgcaaaaacccacacacaccattatcttgtgaaagaagtagaggaagcagaaaataatgaaatcccagtgttaccacatcccctccaata

SEQ ID NO: 21399 - DNA, 201 bp, Homo sapiens
caccattatcttgtgaaagaagtagaggaagcagaaaataatgaaatcccagtgttaccacatcccctccaatatacagattaagagcgtttgtatttatrtggttttaaacataaataacatcagaattactaagctatttccattcatgtactgataatgaatcatgtgagaaagtcctttggcaaggactccacatgg

SEQ ID NO: 21400 - DNA, 201 bp, Homo sapiens
aaagatcatgtgcaataaatatcactgttcatgtttcctacagatgaaaaaaaactgagggtcatgttcagagaaattggatgacttacccagagccacayagatttgtacgtggcaaaggaggattccatttcaagtctttcaaccccaaattcatcttcctttctctaaggggaaatggtgctatggaattcatgtaag

SEQ ID NO: 21401 - DNA, 201 bp, Homo sapiens
aaagctgtcaaaggatataaggtaactcttacaaaagcaattgtaaaataaacgtggtttggccacaatgagccaacacctatgtttgccacagacttagrttcccacctcactcatggcaaatttattcagctgcttaagattattttttactcatacttcgaaagaacaacagcctggaatttttagacttttaatggc

SEQ ID NO: 21402 - DNA, 201 bp, Homo sapiens; identical to SEQ ID NO: 3997

SEQ ID NO: 21403 - DNA, 201 bp, Homo sapiens; identical to SEQ ID NO: 3998

SEQ ID NO: 21404 - DNA, 201 bp, Homo sapiens; identical to SEQ ID NO: 4000

SEQ ID NO: 21405 - DNA, 201 bp, Homo sapiens
aggtgcatgccaccatgcctggctaatttttgtatttttagtagagacggggtttcaccatgctggccaggctggtctcgagctcctgaccttgtgatccrcccaccttggcctcccaaagtgctgggattacaggcgtgagccaacatgcctggcctgcagtcaactgatttatgttcatcaccttcttaagttaaattg

SEQ ID NO: 21406 - DNA, 201 bp, Homo sapiens
agtctcgctctgttgcccaggctggagtgcaatggcatgatctcagctcactgcaacttccacctcctgggttcaagtgattctcctacatcagcctcccragtagatgggattacaggtgcatgccaccatgcctggctaatttttgtatttttagtagagacggggtttcaccatgctggccaggctggtctcgagctc

SEQ ID NO: 21407 - DNA, 201 bp, Homo sapiens
gatctcaatttctagagaagcgaagaagaatcccccaattctagttctaagtttcttttttcccttgctaaatcctgcagtctactgatttttttttttttagacggagtctcgctctgttgcccaggctggagtgcaatggcatgatctcagctcactgcaacttccacctcctgggttcaagtgattctcctacatcag

SEQ ID NO: 21408 - DNA, 201 bp, Homo sapiens
caagaaaaggaaattgcgcagaaagtgcctgcattttaaggggaaaagttagttaaaattattcagatgataaaattcacatatttcataggaaaaaaaaagccagaatgggcttcaagggaaggtggcacacttcccatccttttagatgttcctcaattcctctaaataagcaaaaactctctggccaaagtcacagta

SEQ ID NO: 21409 - DNA, 201 bp, Homo sapiens
tgtcacctctattataactttaaccaggcaagctcagtctcatgcattagtttataaaattgcaacagagccttctaagactgaaaggacattagtttttwaacctatatattatgacctaattaaatgaaattttattttaaagccctcataaaagtagtaaaattggtgttttaaataaaccaaatgggaattcaacca

SEQ ID NO: 21410 - DNA, 201 bp, Homo sapiens
gcattcatgatatcttttcactcttaattctgagtgtttccgtccgtttttttaatttttgtactttatgggctttttcttcatttacccccaattatgcrggaaaggctgtgtgcctcttttgaaagctctgatgttctcaatgaagagaccttttaaatgaccttgtttgtcccccaccgagttgcatatcacaacttc

SEQ ID NO: 21411 - DNA, 201 bp, Homo sapiens
aactttcatatttaatcattttttttcttttttggtttctatggtatcaccatccatcaatccatattggttggagggggggaatatatatatatatatawgtatgtctcccaagagaaagtaattctgcaatcttcctcagcaattcagtctaacaattaagaacccttaagctaaatagaaaaattcatttcacaggca

SEQ ID NO: 21412 - DNA, 201 bp, Homo sapiens
tctgaggaccaaagaaaatacatacgttgttcagatttgccctgaggggtcagtttgtacccaaacatttgctgccacaagtagtaaatgtagaagcaatscaatatctactattttacttttctttcagggttaatcaagtgccttgttataattcttcaaactaaaaacattattataataatgaaaaatatttctgct

SEQ ID NO: 21413 - DNA, 201 bp, Homo sapiens
ctatactgggctacctactttttaaggccaactaattatttgaaaatttatttaaagttttaatttgagatcaaaatctgtttccctcataaattttttttaaaaaaagcaaacaagatctattccattttgatctaatgttttcctgtcaccttacctttaagtgcaataatgggaaattctagaaattccttctttaac

SEQ ID NO: 21414 - DNA, 201 bp, Homo sapiens
catgtctcccccaaacgggtagctgcctcaccagcctccattagagacatcccccagagtaagaaataagaaataatcatgagtagaatgagaaaaaaatrcagcttcctttatctgagaaaaacaatagtagctcaatgctgtggcctaaagggctttgaaaataatgcaatttctgataaaaataaatgccattattct

SEQ ID NO: 21415 - DNA, 201 bp, Homo sapiens
atgataaatgaattggtcctgcttacctcaggaaaaactttcaagtctttctgaaaaactaatttaattcagtagtattttctaagatttaggttatgttwttaatcaatttggaaaccaagatttacttatagaaaaaaaggaaaaggacctagataggtttattcacatagaatcccaatttcacttctctggatgata

SEQ ID NO: 21416 - DNA, 201 bp, Homo sapiens
ttggatgacttacccagagccacacagatttgtacgtggcaaaggaggattccatttcaagtctttcaaccccaaattcatcttcctttctctaaggggamatggtgctatggaattcatgtaagccacagagcttggataaaaggaatagtaagaccaaaaataggaaaagtaggaagaggtggatcctcctatgttttt

SEQ ID NO: 21417 - DNA, 201 bp, Homo sapiens
tgagagaagtttaattgtagtttagagtttcattattagacagtagtcttaaacaattcccaagaagctaaaatgtgggattaacattttactttcattgkaattcatatcctaaatataaatgttaatataaattataaagtttctgaatttcctttcataaaactgggttctttgggttcttagttattttggatgaaa

SEQ ID NO: 21418 - DNA, 201 bp, Homo sapiens; identical to SEQ ID NO: 3990

SEQ ID NO: 21419 - DNA, 201 bp, Homo sapiens; identical to SEQ ID NO: 3994

SEQ ID NO: 21420 - DNA, 201 bp, Homo sapiens
tttggacacctacatgccagacactattctcagcattgagcacaaagtcgtgagcaaggtagacaaaaatgcttggcctcataaaacttacattccagtgyataaagatgagaacaatcacgtaaaatttataatatgttggatggcatggaaaatggaaataaagtggaagggaggcttcaggttaaaaagagtgtttag

SEQ ID NO: 21421 - DNA, 201 bp, Homo sapiens
aaaacccacacacaccattatcttgtgaaagaagtagaggaagcagaaaataatgaaatcccagtgttaccacatcccctccaatatacagattaagagcrtttgtatttatatggttttaaacataaataacatcagaattactaagctatttccattcatgtactgataatgaatcatgtgagaaagtcctttggcaag

SEQ ID NO: 21422 - DNA, 201 bp, Homo sapiens
tgtgtctaaagtggtcacactgtttggttctggccacttctgtaataaccactgctcctttcccctcctcgtgagattataactcctttgacagtatggayggcacctaacgcatccttgttttcttttactaaatgttccacggagtcacttgcttgcctgtttgttgcttatttgtttgtttttggctaaaactacaga

SEQ ID NO: 21423 - DNA, 201 bp, Homo sapiens; identical to SEQ ID NO: 3999

SEQ ID NO: 21424 - DNA, 201 bp, Homo sapiens
gggttttggatctccaggtgtttatttcacatagcatatgctttaacccccttataagtcttctctaaggaagaaactgccatacttcccttgtcttctcyggtgtttccctagctataaaggccccacctgcataacctgtcctcaggctgtgatgtattcccgggtgccctggtaccttctccttcctctccaccaccc

SEQ ID NO: 21425 - DNA, 201 bp, Homo sapiens
tcaatggcacagtctccttattcaaaaaataaaaataaaaataaatctcaagtccaacaatgaatcatctttgagactctcccaagtgatctagttttaarggcaaaaactttggggaaactgttgggggagcaactggtgcccagtactgtttcacacacgtggtttttcttatctattgctcacacacttagacataac

SEQ ID NO: 21426 - DNA, 201 bp, Homo sapiens
aaaccatagcggtgggtcctagacacgggacatcgctccaaccttggccaaactctcccaccctcagggttcccagatgtcctttgaataatcaaactgargaaggagaagcaagatgtctccacaccccaatccctacagccttagccaatgcatgtgtgtaactgagacagaattttagcaaaaggtctcctgcttcca

SEQ ID NO: 21427 - DNA, 201 bp, Homo sapiens
acactattctcagcattgagcacaaagtcgtgagcaaggtagacaaaaatgcttggcctcataaaacttacattccagtgcataaagatgagaacaatcamgtaaaatttataatatgttggatggcatggaaaatggaaataaagtggaagggaggcttcaggttaaaaagagtgtttagggaaggtcttcttaggaaga

SEQ ID NO: 21428 - DNA, 201 bp, Homo sapiens
taaatgtccaggtaaacatctccatagtgccagcctgctatagtctcccgaagacctcagcaattcttccccaaagcgtctccttctgcaccgtttttttytttgggcaaccatttgtgacctggctattgagcccacctgggcctcttctctttgtttgctgatagcctcgttaagtattaaaaacctactccccctctt

SEQ ID NO: 21429 - DNA, 201 bp, Homo sapiens
tcctcaggtgattcaaatgcacattaagggaaaagaaacacagtgtaccgtacctgtggcttgtttagaataattatgaagaggtgttttcttggctcttmactaacgtttttaataaagctaatatttattgagtacataaatgtgccaaacacaacgttcagtctttctttaaattttttttatttaatcctcacaaca

SEQ ID NO: 21430 - DNA, 201 bp, Homo sapiens
gaactcatgaaattctattaaaaaacaacaattaccacatgttaagtcagataattcacagaagagacttatatgaatactaggggagctgtaggcaacamaatttttctctgaatcctgcattttgaaggaagtttctgtcatttaattagttgaggtttgattcaccaaccaaaggtctatagtgtgatatattttctt

SEQ ID NO: 21431 - DNA, 201 bp, Homo sapiens
tcaggtgattcaaatgcacattaagggaaaagaaacacagtgtaccgtacctgtggcttgtttagaataattatgaagaggtgttttcttggctcttaackaacgtttttaataaagctaatatttattgagtacataaatgtgccaaacacaacgttcagtctttctttaaattttttttatttaatcctcacaacaacc

SEQ ID NO: 21432 - DNA, 201 bp, Homo sapiens
agtctgggaggtgaaggctgcagtgagccatgatcacaccactgcactccagcctgagcaacagagaaagaccctgtctcgaataataataataataatamcaacttttgatatctctattttttcccataaaaatccaaaattttctgtttactttttggtgctctcatgctataaagtaaattctcccttggattggac

SEQ ID NO: 21433 - DNA, 201 bp, Homo sapiens
gttttgtgcatgtggtagatgtgtaggaagctaaggacccaaaaaacaaccacatcataaaatcaagcagaaacacacacacaccacacacacacacagargctcaaagcataagtgtcaacagatcagaagaaaacatgggagaatgtattttttcataccaaattattaaaattccatcatctaaataacttcctatca

SEQ ID NO: 21434 - DNA, 201 bp, Homo sapiens
gtgaacatctattaattggacacttactggtgtcaggcactgtgtcatgcactgtgtcaggcactgtattttcttatttaatccaacaaaaaaaaataggmtaaattatcttattggctcaattttctttacagaaactgagcctaaatttcccaaatggctaaccaatgccagggccagcaactcaaatttgggagtaat

SEQ ID NO: 21435 - DNA, 201 bp, Homo sapiens
attactaaaattattcttgaatcctacctttgagatctatataaaacactaggcaatttgcctgcaaatacatagaaaacaatttttaaaaggattgggaygagttattttcccctctgttaaatattagcctttgaaatgaacccagctgatctgccaaataacacttggaaattgttgtgttttaataaagtgacagac

SEQ ID NO: 21436 - DNA, 201 bp, Homo sapiens
ttattgcctttgtattgttgttgccattttataaaggaagacaaaaaagatcagacaaaataatagtgaacatctattaattggacacttactggtgtcargcactgtgtcatgcactgtgtcaggcactgtattttcttatttaatccaacaaaaaaaaataggctaaattatcttattggctcaattttctttacagaa

SEQ ID NO: 21437 - DNA, 201 bp, Homo sapiens
cattttataaaggaagacaaaaaagatcagacaaaataatagtgaacatctattaattggacacttactggtgtcaggcactgtgtcatgcactgtgtcargcactgtattttcttatttaatccaacaaaaaaaaataggctaaattatcttattggctcaattttctttacagaaactgagcctaaatttcccaaatgg

SEQ ID NO: 21438 - DNA, 201 bp, Homo sapiens
gactggttaaataaactatgtgtgagtacaatgaatgaaatattgtacagccatcaaaatgaatgaggtagatttatatatgctgatgtaggaaatctgcwagccatcataagtaaaataaatgaaacaaagaagaaaatactatgatgtacaaaaagaaaaaactatagatatacatatttatatgcatgtgtatgcatt

SEQ ID NO: 21439 - DNA, 201 bp, Homo sapiens
ggtcttcagaaaccacagagaagagtggataacaaaagtgaaatcaagtattgaagagtatgaactgacaggaactagagacatatttagaatggatgccrgaacaggagaaatgggtgggattttaaaagctaaatgatttaaagacttaaaatgctctgaagtgtagtgaaatgttccccaaactgcagattttcccag

SEQ ID NO: 21440 - DNA, 201 bp, Homo sapiens
agaacaggagaaatgggtgggattttaaaagctaaatgatttaaagacttaaaatgctctgaagtgtagtgaaatgttccccaaactgcagattttcccargaaaccaggtgcataatttagtcatcgatgactggttctgtggcaatgactctagtaattagacccctgcattttatgtcagttccttctggatactcag

SEQ ID NO: 21441 - DNA, 201 bp, Homo sapiens
tgggattgtgtgtgtatcatccatccacatgtaagtaggaataaaattatttaatggaaaatttcaaataggctaactctaaaaatgtacagataatctgratgagagaaaactatcctcactttgtgttatttttcaatggtagcattttctcataatccccatgcttttttcatgtcctgctattctttaagatttcct

SEQ ID NO: 21442 - DNA, 201 bp, Homo sapiens
cttaaccttagttttttaactgctctgaaaatggtttctgtccctggtggactcttgtttcaatgcagttattttgtctggtagagtcacagagttaagcygtcattcagatcagaaaaaataaaagagagagatgaattaatctcaatggcacagtctccttattcaaaaaataaaaataaaaataaatctcaagtccaa

SEQ ID NO: 21443 - DNA, 201 bp, Homo sapiens
tcacacacgtggtttttcttatctattgctcacacacttagacataactggaattattgcctttgtattgttgttgccattttataaaggaagacaaaaargatcagacaaaataatagtgaacatctattaattggacacttactggtgtcaggcactgtgtcatgcactgtgtcaggcactgtattttcttatttaatc

SEQ ID NO: 21444 - DNA, 201 bp, Homo sapiens
tcatgttcaggtttctggaaggctcagagcctgggcttctactggcagagggtagacccaaatggactactctagtgaaaatctccaggtgaacatggaaygcagtgaaaacctggggtatccaacttgcagtataggccaccagcaagtgtcacctctattataactttaaccaggcaagctcagtctcatgcattagtt

SEQ ID NO: 21445 - DNA, 201 bp, Homo sapiens
caacagatcagaagaaaacatgggagaatgtattttttcataccaaattattaaaattccatcatctaaataacttcctatcatagcatgttgtcgacctyatttttcaaatccataattttagaacttatgtcgtggggtagtctaaaagcctcttgcaaacttttaacatctagtttcaaatcaaaaataatatattaa

SEQ ID NO: 21446 - DNA, 201 bp, Homo sapiens
ttcatggagcatcaggtagcatactcagtaggttcttgcctcaggaatgggaaaaatttagccctagactaattgctgctctggtaccacctaagaaaccrtaaaagtcagactcaaaagaattaaattatttgcaagtaactcaactgcttttcagaaaacaactggagaaattttgtaggaatacaaaagcatccaata

SEQ ID NO: 21447 - DNA, 201 bp, Homo sapiens
atatgtgaatacatgagtgtggagttctttaggaggcctgctgcatatgctagggaaaggtttcatcatttctaatcaggatggctctgtaaatgggatgyctcatgttcaggtttctggaaggctcagagcctgggcttctactggcagagggtagacccaaatggactactctagtgaaaatctccaggtgaacatgga

SEQ ID NO: 21448 - DNA, 201 bp, Homo sapiens
ccccatgaaaacaatctgcagccacctcaacttgcctgtgctgttctcaggttctgtccatggggagccacacttcagtgagctcagcgattggatggctwtttagtctacatgagagggaaactccatgtgcctctagactagtgcttctcaaactctaatgaacacccaagtcatctggggaatctgcttgaaatgcag

SEQ ID NO: 21449 - DNA, 201 bp, Homo sapiens
ccattgatagaaatcatctcaaaaatgctccatcttccttgtgaaagccaaaggccagcagtttccacatacccagcatctgataagtagttaatgatccwgaaataaactgttaggtgcttcagggaatttctgtgtatagagaagttccatgtaaatatttctccgagaggtggatggagaatgataattcacttttac

SEQ ID NO: 21450 - DNA, 201 bp, Homo sapiens
cctcccctctctgagtctttccaccccttgctggtactttagtttcttccacttctagcaccacgtgtagtttcccaatttctcttacccaaatttgctcrcagggaaaaaaataaattaaattagccatttacaccacagtgtgaacttaataacaccaacaaaagttccaaagctctagggtctcatagcacctccaga

SEQ ID NO: 21451 - DNA, 201 bp, Homo sapiens
atcatcctcatcgtgaacattattattattatcatcattttccagatgaagaaaatgaatcacaagtcaactgacagtccaaaggctccacagctcagagraggtaaatcatgtgcttaattcagaacttttggctcccatcactatgctcttcccactgtcttaactctggttgtcacctgagccattgtgtttcttctc

SEQ ID NO: 21452 - DNA, 201 bp, Homo sapiens
gtatgctttattttacatcttaaaagtattgaacagaaggagttttgtccatgatatcccatcagcccactagcaggaaaagcaggacacttacccagggkgttcctgctggaaatgattcttggaatcagccttccttctactctatttgggaagtctttggtttctaacattcacacatttgtagcaaagcttccaaaa

SEQ ID NO: 21453 - DNA, 201 bp, Homo sapiens
aggaaactatggggaatttttttttctttagattgcaaactagttttaaaaagagcttgtaatgaacaatttaattagattggttttggcttgcctaaaarcttaagaaggtattaatattctaatcaaaagtcttgggaaagcattcttagaataaaaaaaggaaagaaaatcttcattcttatgctttaagaaccagga

SEQ ID NO: 21454 - DNA, 201 bp, Homo sapiens
acagtcaaagattacaaaacctaagcagaagtccattatcaagaaacagtgtccacaagtgcaataaatataatttatacctgaggaactataaatagtaragcaattgggtaggggctcttaacagacagatattcaaaatgttaaggaaaataaaagaagaagtagacttcgtaaaataggaacagagggctaagaaat

SEQ ID NO: 21455 - DNA, 201 bp, Homo sapiens
gctctcctgaatgccaagcacaaccatgcttggcatggcagtggtgtcttatttctgctcctctttttccccagggcatgccattgcaagagaatgctcakccatgttcatctggggacctgctcctggtagagcaataggatctgtgtgcccagcaccactgcccacctagctgtcctggcctgtgcccaatgctgacct

SEQ ID NO: 21456 - DNA, 201 bp, Homo sapiens
agtgagctcagcgattggatggctttttagtctacatgagagggaaactccatgtgcctctagactagtgcttctcaaactctaatgaacacccaagtcayctggggaatctgcttgaaatgcagattctatctcggtctggggtggggcctgaggctgtcttgttcgtaaactcccagttgatgctaacgctgcccatcc

SEQ ID NO: 21457 - DNA, 201 bp, Homo sapiens
tctacatgagagggaaactccatgtgcctctagactagtgcttctcaaactctaatgaacacccaagtcatctggggaatctgcttgaaatgcagattctrtctcggtctggggtggggcctgaggctgtcttgttcgtaaactcccagttgatgctaacgctgcccatccagggccacccagagcagcaagccggttcta

SEQ ID NO: 21458 - DNA, 201 bp, Homo sapiens
ttaggaagaaggaggaagctatgtggacatctgggagaagatcgctccaggcagagggtagagcaaatgcaaattccttgaggcagcaatgtgctggcatrgtcaaggcacagcgagtatgccagggtcttcagaaaccacagagaagagtggataacaaaagtgaaatcaagtattgaagagtatgaactgacaggaact

SEQ ID NO: 21459 - DNA, 201 bp, Homo sapiens
taacgctgcccatccagggccacccagagcagcaagccggttctatgacagctctctttattttttagttacatattttgtttttactcatttcttctttrtttgctcttttactttaataacttctgttaaatttttaatatttggatctgtaaaacatttaaagttctctttcacttcactatgtacaagtatctctgg

SEQ ID NO: 21460 - DNA, 201 bp, Homo sapiens
tgtctcttgccccatggtgccaggtggtctgccatgcttccctcttcgtggctgccaggattcccggtatagaggcaaatacaacctgtaaaggctcaaaygcttcatcaaaagccatgactataatccaaagctattaggtttaagcaacttatttggaaattatcaccttcaaataacatgtagggcaacctcagtaga

SEQ ID NO: 21461 - DNA, 201 bp, Homo sapiens
gttttgcttaggaataacaaaacatggaagaaaacattctgtgaaattttaaactttttcaaacctttaagtttcagatgaataagcaaaacatacttaaktctaagaagctattttttgtttgtcaaagaactgatgttataccagttctaatattaattagcaactttgccctggttttcctgtaaaataatctccaag

SEQ ID NO: 21462 - DNA, 201 bp, Homo sapiens; identical to SEQ ID NO: 4001

SEQ ID NO: 21463 - DNA, 201 bp, Homo sapiens
ttcataatattatttccatttgtcagatcaatgaaggtttaatgatttgtccaagatctcaatttctagagaagcgaagaagaatcccccaattctagttytaagtttcttttttcccttgctaaatcctgcagtctactgatttttttttttttagacggagtctcgctctgttgcccaggctggagtgcaatggcatga

SEQ ID NO: 21464 - DNA, 201 bp, Homo sapiens
tattttttaaattatggtacaataaaatgtgcataagctttatactaagtaatagaatcatttaagtttagctgtagattcacaagtaaaaatccaatctrttttcatattcttacatttatagacatttcttacatgtctatagaaagaaatggctaggaatgagactgcactattttaccctaaaacgttctttttctc

SEQ ID NO: 21465 - DNA, 201 bp, Homo sapiens
ccaggtgcataatttagtcatcgatgactggttctgtggcaatgactctagtaattagacccctgcattttatgtcagttccttctggatactcagctacmttatttggtgcttttggtatacttcaaatatgcattgcctatcactgacctgtaatcctgtgtctctgggcctgaaaatataacttttcatgtagtagag

SEQ ID NO: 21466 - DNA, 201 bp, Homo sapiens
gaataaaagttaagaccacattgggccagatcaggactaacactagatacacagctgagataaagttccagtgactttggcagtgtgaaagtcaggaccastaggcacatatactgaaggcaatttaagctgtgtttcctgattaaagccagggactgaaaaatcactacctattcatgatgaaagactagaaaacttctg

SEQ ID NO: 21467 - DNA, 201 bp, Homo sapiens
catcgatgactggttctgtggcaatgactctagtaattagacccctgcattttatgtcagttccttctggatactcagctacattatttggtgcttttggyatacttcaaatatgcattgcctatcactgacctgtaatcctgtgtctctgggcctgaaaatataacttttcatgtagtagagaattagggctgtgcaaca

SEQ ID NO: 21468 - DNA, 201 bp, Homo sapiens
gcattctcccatgtatctgacttaaaagcaatacttgtctcttgccccatggtgccaggtggtctgccatgcttccctcttcgtggctgccaggattcccrgtatagaggcaaatacaacctgtaaaggctcaaacgcttcatcaaaagccatgactataatccaaagctattaggtttaagcaacttatttggaaattat

SEQ ID NO: 21469 - DNA, 201 bp, Homo sapiens
cagggcatgccattgcaagagaatgctcagccatgttcatctggggacctgctcctggtagagcaataggatctgtgtgcccagcaccactgcccacctakctgtcctggcctgtgcccaatgctgaccttcacctcagagtgtggctgtaccacattcggtgatgtcactctcactgaaccttcagcctccttcctggga

SEQ ID NO: 21470 - DNA, 201 bp, Homo sapiens
cttcatatttctctgaccgttagagagtttgtgacttggataactttcaaacaactagtaccctgatggaaatccagaattttgttaacccagatcacagstgcatacttaaatgctatgcaacagtggcacttacccccaaaccgtatcctatggaaatgcctttttagcaaattaaactgaattgtgttcagagatcca

SEQ ID NO: 21471 - DNA, 201 bp, Homo sapiens
cttcctgccttaaatacagaatgccagatcacagctctgaataaaagttaagaccacattgggccagatcaggactaacactagatacacagctgagatamagttccagtgactttggcagtgtgaaagtcaggaccagtaggcacatatactgaaggcaatttaagctgtgtttcctgattaaagccagggactgaaaaa

SEQ ID NO: 21472 - DNA, 201 bp, Homo sapiens
atctggggacctgctcctggtagagcaataggatctgtgtgcccagcaccactgcccacctagctgtcctggcctgtgcccaatgctgaccttcacctcakagtgtggctgtaccacattcggtgatgtcactctcactgaaccttcagcctccttcctgggacttcctgatggactgttatccagggcagaatgtgttga

SEQ ID NO: 21473 - DNA, 201 bp, Homo sapiens
caccactgcccacctagctgtcctggcctgtgcccaatgctgaccttcacctcagagtgtggctgtaccacattcggtgatgtcactctcactgaaccttyagcctccttcctgggacttcctgatggactgttatccagggcagaatgtgttgattttctaaatcacataaatgaatagcttgactgttgattatgtaga

SEQ ID NO: 21474 - DNA, 201 bp, Homo sapiens
ctgtgtctctgggcctgaaaatataacttttcatgtagtagagaattagggctgtgcaacattgccactagattatttttaatgaaagctttgcccttttrgataaatacagcaatgtattcaaacaagtcctagggataccactgagtgcaaaatgtcatgtactagttattccatttaaattattttatcttcaagtct

SEQ ID NO: 21475 - DNA, 201 bp, Homo sapiens
tatactgggctacctactttttaaggccaactaattatttgaaaatttatttaaagttttaatttgagatcaaaatctgtttccctcataaattttttttwaaaaaagcaaacaagatctattccattttgatctaatgttttcctgtcaccttacctttaagtgcaataatgggaaattctagaaattccttctttaact

SEQ ID NO: 21476 - DNA, 201 bp, Homo sapiens
ttatcttttgtgagggatctgtagttttccccggaagatataatgcatgaaataaaagcctccaataaaattcagtatacagttaatttatttcataaaargtgagagatataaattatcaaaggttaaaacaaaaagtaggaaccagagcagggtttttcagtagcaactctattgacattttggattagataatttttt

SEQ ID NO: 21477 - DNA, 201 bp, Homo sapiens
ctggcagagcagactctttgccaggacagcagtccagtgctttctcttccaggctgttctgctcttcctcaatttttacagcatttttatgttaatcaatmaataaataaaaagtaaagaactataatgcatacaaaactgtgatggaagaaaaggaaactatgtgataaaatcaaataaatatgacccttatagctttag

SEQ ID NO: 21478 - DNA, 201 bp, Homo sapiens
ttatgttaatcaatcaataaataaaaagtaaagaactataatgcatacaaaactgtgatggaagaaaaggaaactatgtgataaaatcaaataaatatgamccttatagctttagttttcttagaacagaggccctttaacttcagaatgttgaaaccttctcttgaagttctcttataatactctgccctcacctctgtg

SEQ ID NO: 21479 - DNA, 201 bp, Homo sapiens
gcaaaagtaaaaaagatgtaggatcatttttaaaggccaatattttcttccttactcattaccttctgtaaaattctgtaagattttctttagttttccartaatgataaacatttcaccattgcatagacataattaattgattttttaagcagttggagagccaaacaaaataaggggtagaatacttcttattttatt

SEQ ID NO: 21480 - DNA, 201 bp, Homo sapiens
tttatttcctgtgtcattctgagaagagaaagtaatagaggcaagaaatttggcaccctattgatctattttattactttgttgagcaacttgtgcttccsgctgaagatgctgcatcccaacatgattctcttattattagttaccacctgagggttttggatctccaggtgtttatttcacatagcatatgctttaacc

SEQ ID NO: 21481 - DNA, 201 bp, Homo sapiens
ttaacagtataaaagtaattaatctagctgcctcgtaccggtttggcctaaataaacatgcaataaaaaagccataggattttattatttttttactcackttactactttagtgtgttggaattttaatatgtcagaagaaagatatctttgcattaaaaaatcattttcttttcaaatgttaatgtactgattataact

SEQ ID NO: 21482 - DNA, 201 bp, Homo sapiens
cagaattcacacggtcatgatattttatagaagaaatcattttatgggaactttcttttgttaatagatccttccaatgctaacattattctgtataacartgctaaagttggtatgcctaaatgctaaacttggtatgctaaagttggtttaaaaattaacctatatacaatcttcttgaataactcttcaactttaaat

SEQ ID NO: 21483 - DNA, 201 bp, Homo sapiens
taacagtataaaagtaattaatctagctgcctcgtaccggtttggcctaaataaacatgcaataaaaaagccataggattttattatttttttactcacgwtactactttagtgtgttggaattttaatatgtcagaagaaagatatctttgcattaaaaaatcattttcttttcaaatgttaatgtactgattataacta

SEQ ID NO: 21484 - DNA, 201 bp, Homo sapiens
aaaatactatgatgtacaaaaagaaaaaactatagatatacatatttatatgcatgtgtatgcattttttatgaatatacatatttatatgcatgtgtatrcaagtcctagaaggagacataggtaactattagtagtacctctgggaagtaaatgcagagaaaagtaatagagggtaaggatatgtttacttttatttta

SEQ ID NO: 21485 - DNA, 201 bp, Homo sapiens
agcactgaactaaagaaccagaaaatagaggggtgtattagtgaactacagaaaattcaagtcccaaaagctgtaaatactctgaggaccaaagaaaatayatacgttgttcagatttgccctgaggggtcagtttgtacccaaacatttgctgccacaagtagtaaatgtagaagcaatgcaatatctactattttactt

SEQ ID NO: 21486 - DNA, 201 bp, Homo sapiens
aatagtgacccctcacatttaggtgttttggctgcttaatgcgagctcctgccctctagccgcatgcttattagtttacctagccctttttctggtcagtsatgactggagaatgccaaagagtctcccaagtaggctaccaaattaagaattgtgtttagaagtttgaagtcagtccaagtgttgtaaagattaaaacgt

SEQ ID NO: 21487 - DNA, 201 bp, Homo sapiens
gaaaaggctgcactctgagataagaaagaacagtggtgttttcatagtaagagaatagagttcttaatgggaaaggggagagtataatttccactgatttmgctggtctttcaaactttatgatgcttttctccttgaactagcctataagaaatttgtagggaaaataccacaggaatcaaattttgggcatagatgtct

SEQ ID NO: 21488 - DNA, 201 bp, Homo sapiens
agccaggactgttttgtctatctaactcttcttacatgggcctatgtgatatttttcataacaagagtccgggatttacctaactaataagatttccccaygcccctccttacaaaaactcagttcaaagaacaagccctcagcttctcctagtcccctccagggaaaatgaagagtagcttgtcctattctgaatatgtt

SEQ ID NO: 21489 - DNA, 201 bp, Homo sapiens
tatttgcattgctacttccttgtgcttccttccactgtttctatcgcctaaaattcttctccctttttcctccaccctcgagtaggaaaaaatttgtttcyttattgggcagggagttctggtcattatacatttatgtaaaatgttcttctaattggcatattccatgctatgtccagattctttcaagcgaattctcat

SEQ ID NO: 21490 - DNA, 201 bp, Homo sapiens
acgtggcaaaggaggattccatttcaagtctttcaaccccaaattcatcttcctttctctaaggggaaatggtgctatggaattcatgtaagccacagagyttggataaaaggaatagtaagaccaaaaataggaaaagtaggaagaggtggatcctcctatgtttttaatcagggttctatctacctgtaactcttctgg

SEQ ID NO: 21491 - DNA, 201 bp, Homo sapiens
ttctgaagaccagacagagtttcagagtggtatagttactaatctactaaatactgcaaatatatagtatctgcaaatatatatataaggttgaaaactargctcagaaatgagcattaaaaacttttccagatcaagggagtgctgtacccccaagctgaggtttcataggctaccatcatccaggcactcagtcttccc

SEQ ID NO: 21492 - DNA, 201 bp, Homo sapiens
ccgccaccatgcccagctaatttttgtatttttattagagacggggtttcaccatgttggccaggctggtctcaaactcttgacctcaaatgatccacccscctcagcctcccaaagtgctgggattacatgcatgagccaccacacccggccggagacaggttctccctgacctgtgagactgcaaaggtggtgtttcct

SEQ ID NO: 21493 - DNA, 201 bp, Homo sapiens
cctgggttcaagcgattctcctgcctcagactcccaagtagctgggattacaggcatccgccaccatgcccagctaatttttgtatttttattagagacgrggtttcaccatgttggccaggctggtctcaaactcttgacctcaaatgatccacccgcctcagcctcccaaagtgctgggattacatgcatgagccacca

SEQ ID NO: 21494 - DNA, 201 bp, Homo sapiens
attaaaaaatcattttcttttcaaatgttaatgtactgattataactaagtgaattccatatatttataattgtgggcagatgttctcaattaatagtttyattcattctacttcacagtttagtgaaaaggattattttaaattaaggtgtaaataagaacaaatgagatttttattactacaaatcacacagaatttgt

SEQ ID NO: 21495 - DNA, 201 bp, Homo sapiens
ctagtatatctcataaatgtaataatacagtgcagacctggtggaaaataattatttatctgaaactgggcctcagtgcctttcctgaatctaaacaaatrttcatctcacccagagaactgggacaacaggaacaaggtattgcaagtccaaaatccaatccaaagcagcgttcttcctccccacctctaggcaaggcca

SEQ ID NO: 21496 - DNA, 201 bp, Homo sapiens
ggaggtgccctcttagcctctttacaggcatgagtcacatggcagggcattaaactctctcacaacctgttgtggagctcagcagggttagccaggactgytttgtctatctaactcttcttacatgggcctatgtgatatttttcataacaagagtccgggatttacctaactaataagatttccccacgcccctcctta

SEQ ID NO: 21497 - DNA, 201 bp, Homo sapiens
caacctgtaaaggctcaaacgcttcatcaaaagccatgactataatccaaagctattaggtttaagcaacttatttggaaattatcaccttcaaataacaygtagggcaacctcagtagagatgaaatggacgaagcaggcatggaaactgcccttcctgccttaaatacagaatgccagatcacagctctgaataaaagt

SEQ ID NO: 21498 - DNA, 201 bp, Homo sapiens
agttcagagtaccagagagttgagagctgcacagagaacccagagatctgcaaatggtaccccttgtgcttcagtgcatgtgggcaaataatcacccaaaygtattagagagaacaagccccagaggtcatcaagagctagaaaatagttgctatttccaccagccacagtggaaagtctcataattcatggagcatcagg

SEQ ID NO: 21499 - DNA, 201 bp, Homo sapiens; identical to SEQ ID NO: 4221

SEQ ID NO: 21500 - DNA, 201 bp, Homo sapiens
attaaatattaactaaggaaaggtaaccatttctgaagtcattcctagcagaggactcagatatatataggattgaagatctctcagttaagtctacatgraaaggatggtttcttggagcttccacaaacttaaaaccatgaaacatctattattgctactattgtgtgtttttctagttaagtcccaaggtgtcaacga

SEQ ID NO: 21501 - DNA, 201 bp, Homo sapiens; identical to SEQ ID NO: 4266

SEQ ID NO: 21502 - DNA, 201 bp, Homo sapiens
cgcccatcagtggaggtggctatcgggctcgtccagccaaagcagctgccactcaaaagaaagtagaaagaaaagcccctgatgctggaggctgtcttcaygctgacccagacctggtgggtgcactgatgtttcttgcagtggtggctctctcatgcagagaaagcctgtagtcatggcagtctgctaatgtttcactga

SEQ ID NO: 21503 - DNA, 201 bp, Homo sapiens
aaatgaaatattgcttttttcagatgaaaagttcaaattagagttagtgtgtattgttattattaatagttatgaaacacggttcagtctaatttatttayttgtagaacagtttgtcctcaactattatttttgctgacttattgctgttaatttgcagttactaaaaatacagaaatgcatttaggacaatggatattt

SEQ ID NO: 21504 - DNA, 201 bp, Homo sapiens
tgaaatattgcttttttcagatgaaaagttcaaattagagttagtgtgtattgttattattaatagttatgaaacacggttcagtctaatttatttatttrtagaacagtttgtcctcaactattatttttgctgacttattgctgttaatttgcagttactaaaaatacagaaatgcatttaggacaatggatatttaag

SEQ ID NO: 21505 - DNA, 201 bp, Homo sapiens
acatatagcatagtatcattaaactagaaataagaatacacaataatatttaaatgaagtgattcatttcggatcattattgagtttcaagggaacttgartgttgtacttatcagactctacatgtaagaacatatagttaatctggttgtgtgtgtaaaaacatatggttaatctggttaagtctggttaatcatatta

SEQ ID NO: 21506 - DNA, 201 bp, Homo sapiens
tttagagagttccagaagaactcacacaccaaaaataagagaacaacaacaacaacaaaaatgctaagtggattttcccaacagatcataatgacattacrgtacatcataaaaatatccttagccagttgtgttttggactggcctggtgcatttgctggttttgatgagcaggatggggcacaggtagtcccaggggtg

SEQ ID NO: 21507 - DNA, 201 bp, Homo sapiens
gaaagacctgtggcaaaagaggcagaagcaagtaaaaggtagatatccttgtgctttccattcgattttcagctataaaattggaaccgttagactgccaygagaatgcatggttgtgagaagattaacatttctgggttagtgaatagcattcatacgcttttgggcaccttcccctgcaacttgccagataagcactat

SEQ ID NO: 21508 - DNA, 201 bp, Homo sapiens
agaaaatcaaaattgtatagttaaatacattagttttatgaggcaaaaatgctaactatttctacataatttcatttttccagataatgaaaatgtagtcmatgagtactcctcagaactggaaaagcaccaattatatatagatgagactgtgaatagcaatatcccaactaaccttcgtgtgcttcgttcaatcctgga

SEQ ID NO: 21509 - DNA, 201 bp, Homo sapiens
taaacatatttttagagagttccagaagaactcacacaccaaaaataagagaacaacaacaacaacaaaaatgctaagtggattttcccaacagatcatartgacattacagtacatcataaaaatatccttagccagttgtgttttggactggcctggtgcatttgctggttttgatgagcaggatggggcacaggtagt

SEQ ID NO: 21510 - DNA, 201 bp, Homo sapiens; identical to SEQ ID NO: 4247

SEQ ID NO: 21511 - DNA, 201 bp, Homo sapiens; identical to SEQ ID NO: 4248

SEQ ID NO: 21512 - DNA, 201 bp, Homo sapiens; identical to SEQ ID NO: 4249

SEQ ID NO: 21513 - DNA, 201 bp, Homo sapiens
tggaggctgtcttcacgctgacccagacctggtgggtgcactgatgtttcttgcagtggtggctctctcatgcagagaaagcctgtagtcatggcagtctsctaatgtttcactgacccacattaccatcactgttattttgtttgtttattttggaaataaaattcaaaacataaacatattgggcctttggtttaggct

SEQ ID NO: 21514 - DNA, 201 bp, Homo sapiens
cgtatcgctgaattttcctatgtgctattttaacaaatgtccatgacccaaatccttcatctaatgcctgctattttctttgtttttagggggtgttgtgycctacaggatgtcagttgcaagaggctttgctacaacaggaaaggccaatcagaaatagtgttgatgagttaaataacaatgtggaagctgtttcccaga

SEQ ID NO: 21515 - DNA, 201 bp, Homo sapiens
acataatgttgtcttacatttgcagaatgtgaggaaattatcaggaaaggaggtgaaacatctgaaatgtatctcattcaacctgacagttctgtcaaacygtatagagtatactgtgacatgaatacagaaaatggaggtaagctttcgacagttgttgacctgttgatctgtaattatttggataccgtaaaatgccag

SEQ ID NO: 21516 - DNA, 201 bp, Homo sapiens
tggaatggacaggggattcagatattattttcaaagtgacattatttgctgttggttaatatatgctctttttgtttctgtcaaccaaaggatggacagtkattcagaaccgtcaagacggtagtgttgactttggcaggaaatgggatccatataaacagggatttggaaatgttgcaaccaacacagatgggaagaatt

SEQ ID NO: 21517 - DNA, 201 bp, Homo sapiens; identical to SEQ ID NO: 4091

SEQ ID NO: 21518 - DNA, 201 bp, Homo sapiens; identical to SEQ ID NO: 4254

SEQ ID NO: 21519 - DNA, 201 bp, Homo sapiens; identical to SEQ ID NO: 4271

SEQ ID NO: 21520 - DNA, 201 bp, Homo sapiens; identical to SEQ ID NO: 4274

SEQ ID NO: 21521 - DNA, 201 bp, Homo sapiens
agagctgctgggcaggacagattatctctgttttctctgtcactgatttactacccttgacttatgcaatgacatcagctaatatgaagaacactgcactratgacctcaaaataactgaacaaatagtactccctttcccctccaccaatggcatcaacattctaaaaaaatttaagcatcttaataagcggtgtctctg

SEQ ID NO: 21522 - DNA, 201 bp, Homo sapiens
cttcagtgcccgtggtcatcgaccccttgacaagaagagagaagaggctcccagcctgaggcctgccccaccgcccatcagtggaggtggctatcgggctygtccagccaaagcagctgccactcaaaagaaagtagaaagaaaagcccctgatgctggaggctgtcttcacgctgacccagacctggtgggtgcactgat

SEQ ID NO: 21523 - DNA, 201 bp, Homo sapiens
tataatctaatgaataaatgacaatgcaattccaaatagagttcatctgatgacttctagactcacaaaattgcaagagagctcagttgttgctcagttgktccaaatcatgtcgtttgttaatttgtaattaagctccaaaggatgtatagctactgacaaaaaaaaaaatgagaatgtagttaatccaaatcaaaactt

SEQ ID NO: 21524 - DNA, 201 bp, Homo sapiens
ttgttgatagaagataagactaaaagtgaaattcgaagtggagaggacacttaaactgtagtacttgttatgtgtgattccagtaaaaatagtaatgagcrcttattattgccaagtactgttctgagggtaccatatgcaataagttatttaatccttacaataatcttgtaaggcagattcaaactatcattacactta

SEQ ID NO: 21525 - DNA, 201 bp, Homo sapiens
aatccttacaataatcttgtaaggcagattcaaactatcattacacttattttacagatgagaaaactggggcacagataaagcaacttgcccaaggtctyatagctgtaagtcaaccctacggtcaagacctacaagtagccgagctccagagtacattatgagggtcaaagattgtcttattacaaataaattccaagt

SEQ ID NO: 21526 - DNA, 201 bp, Homo sapiens
gctgagatgggagatcacctgagcccacaacctggagtcttgatcatgctactgaactgtagcctgggcaacagaggatagtgagatcctgtctcaaaaaraaaaattaattaaaaagccaggaaacaagacttagctctaacatctaacatagctgacaaagagtaatttgatgtggaattcaacctgatatttaaaaag

SEQ ID NO: 21527 - DNA, 201 bp, Homo sapiens
actgttattttgtttgtttattttggaaataaaattcaaaacataaacatattgggcctttggtttaggctttctttcttgttttctttggtctgggcccmaaatttcaaattaggatatgtgggtgccacctttccatttgtattttgccactgcctttgtttagttggtaaaattttcatagcccaattatattttttc

SEQ ID NO: 21528 - DNA, 201 bp, Homo sapiens
aaattttcatagcccaattatattttttctggggtaagtaatattttaaatctctatgagagtatgatgatgactttcgaatttctggtcttacagaaaaycaaataataaatttttatgttggctaatcgtatcgctgaattttcctatgtgctattttaacaaatgtccatgacccaaatccttcatctaatgcctgct

SEQ ID NO: 21529 - DNA, 201 bp, Homo sapiens
cttagccagttgtgttttggactggcctggtgcatttgctggttttgatgagcaggatggggcacaggtagtcccaggggtggctgatgtgtgcatctgcrtactggcttgaacagatggcagaaccacagatagatgtagaagtttctccattttgtgtgttctgggagctcatggatattccaggacacaaaaggtgga

SEQ ID NO: 21530 - DNA, 201 bp, Homo sapiens
aaaaaaaaaattaattaaaaagccaggaaacaagacttagctctaacatctaacatagctgacaaagagtaatttgatgtggaattcaacctgatatttawaaagttataaaatatctataattcacaatttggggtaagataaagcacttgcagtttccaaagattttacaagtttacctctcatatttatttccttatt

SEQ ID NO: 21531 - DNA, 201 bp, Homo sapiens
gcccatcagtggaggtggctatcgggctcgtccagccaaagcagctgccactcaaaagaaagtagaaagaaaagcccctgatgctggaggctgtcttcacrctgacccagacctggtgggtgcactgatgtttcttgcagtggtggctctctcatgcagagaaagcctgtagtcatggcagtctgctaatgtttcactgac

SEQ ID NO: 21532 - DNA, 201 bp, Homo sapiens
ctacataatttcatttttccagataatgaaaatgtagtcaatgagtactcctcagaactggaaaagcaccaattatatatagatgagactgtgaatagcartatcccaactaaccttcgtgtgcttcgttcaatcctggaaaacctgagaagcaaaatacaaaagttagaatctgatgtctcagctcaaatggaatattgt

SEQ ID NO: 21533 - DNA, 201 bp, Homo sapiens
tccagataatgaaaatgtagtcaatgagtactcctcagaactggaaaagcaccaattatatatagatgagactgtgaatagcaatatcccaactaaccttygtgtgcttcgttcaatcctggaaaacctgagaagcaaaatacaaaagttagaatctgatgtctcagctcaaatggaatattgtcgcaccccatgcactgt

SEQ ID NO: 21534 - DNA, 201 bp, Homo sapiens
ggggattcagatattattttcaaagtgacattatttgctgttggttaatatatgctctttttgtttctgtcaaccaaaggatggacagtgattcagaaccrtcaagacggtagtgttgactttggcaggaaatgggatccatataaacagggatttggaaatgttgcaaccaacacagatgggaagaattactgtggccta

SEQ ID NO: 21535 - DNA, 201 bp, Homo sapiens
attttattttgtttttcttttaggtgaatattggcttggaaatgataaaattagccagcttaccaggatgggacccacagaacttttgatagaaatggagkactggaaaggagacaaagtaaaggctcactatggaggattcactgtacagaatgaagccaacaaataccagatctcagtgaacaaatacagaggaacagc

SEQ ID NO: 21536 - DNA, 201 bp, Homo sapiens; identical to SEQ ID NO: 4097

SEQ ID NO: 21537 - DNA, 201 bp, Homo sapiens; identical to SEQ ID NO: 4231

SEQ ID NO: 21538 - DNA, 201 bp, Homo sapiens; identical to SEQ ID NO: 4098

SEQ ID NO: 21539 - DNA, 201 bp, Homo sapiens
gacaaagtaaaggctcactatggaggattcactgtacagaatgaagccaacaaataccagatctcagtgaacaaatacagaggaacagccggtaatgccckcatggatggagcatctcagctgatgggagaaaacaggaccatgaccattcacaacggcatgttcttcagcacgtatgacagagacaatgacggctggtat

SEQ ID NO: 21540 - DNA, 201 bp, Homo sapiens; identical to SEQ ID NO: 4101

SEQ ID NO: 21541 - DNA, 201 bp, Homo sapiens
cgtaacttgaccaccgtagttctgtttctaataacgccaaacacattttctttcaggttaacatcagatcccagaaaacagtgttctaaagaagacggtgrtggatggtggtataatagatgtcatgcagccaatccaaacggcagatactactggggtggacagtacacctgggacatggcaaagcatggcacagatgat

SEQ ID NO: 21542 - DNA, 201 bp, Homo sapiens; identical to SEQ ID NO: 4104

SEQ ID NO: 21543 - DNA, 201 bp, Homo sapiens; identical to SEQ ID NO: 4103

SEQ ID NO: 21544 - DNA, 201 bp, Homo sapiens
taatttcatttttccagataatgaaaatgtagtcaatgagtactcctcagaactggaaaagcaccaattatatatagatgagactgtgaatagcaatatcscaactaaccttcgtgtgcttcgttcaatcctggaaaacctgagaagcaaaatacaaaagttagaatctgatgtctcagctcaaatggaatattgtcgcac

SEQ ID NO: 21545 - DNA, 201 bp, Homo sapiens; identical to SEQ ID NO: 4106

SEQ ID NO: 21546 - DNA, 201 bp, Homo sapiens
ctgggagctcatggatattccaggacacaaaaggtggagaagagctttgttcatcctcttagcagataaacgtcctcaaaactgggttggacttactaaaktaaaatgaaaatctaatatttgttatattattttcaaaggtctataataacacactccttagtaacttatgtaatgttattttaaagaattggtgactaa

SEQ ID NO: 21547 - DNA, 201 bp, Homo sapiens
ttctacataatttcatttttccagataatgaaaatgtagtcaatgagtactcctcagaactggaaaagcaccaattatatatagatgagactgtgaatagyaatatcccaactaaccttcgtgtgcttcgttcaatcctggaaaacctgagaagcaaaatacaaaagttagaatctgatgtctcagctcaaatggaatatt

SEQ ID NO: 21548 - DNA, 201 bp, Homo sapiens
ttttcccaacagatcataatgacattacagtacatcataaaaatatccttagccagttgtgttttggactggcctggtgcatttgctggttttgatgagcwggatggggcacaggtagtcccaggggtggctgatgtgtgcatctgcgtactggcttgaacagatggcagaaccacagatagatgtagaagtttctccatt

SEQ ID NO: 21549 - DNA, 201 bp, Homo sapiens
cctaacttcccatcattttgtccaattaaatgaattgaagaaatttaatgtttctaaactagaccaacaaagaataatagttgtatgacaagtaaataagytttgctgggaagatgttgcttaaatgataaaatggttcagccaacaagtgaaccaaaaattaaatattaactaaggaaaggtaaccatttctgaagtcat

SEQ ID NO: 21550 - DNA, 201 bp, Homo sapiens; identical to SEQ ID NO: 4242

SEQ ID NO: 21551 - DNA, 201 bp, Homo sapiens; identical to SEQ ID NO: 4243

SEQ ID NO: 21552 - DNA, 201 bp, Homo sapiens; identical to SEQ ID NO: 4241

SEQ ID NO: 21553 - DNA, 201 bp, Homo sapiens
gatgtgtttttctcacttgctattctgagtactgtgattttcatttacttctagcaatacaggattacaattaagaggacaagatctgaaaatctcacaarctataaaataataaaagagcagaattttaagataaaagaaactggtggtaggtagattgttctttggtgaaggaaggtaatatatattgttactgagatt

SEQ ID NO: 21554 - DNA, 201 bp, Homo sapiens
gcccaaggtctcatagctgtaagtcaaccctacggtcaagacctacaagtagccgagctccagagtacattatgagggtcaaagattgtcttattacaaawaaattccaagtagaatcaacctttaataagtctttaatgtctcttaaatatgtttatataggagtctaatcaccaattcacaaaaatgaaagtagggaaa

SEQ ID NO: 21555 - DNA, 201 bp, Homo sapiens; identical to SEQ ID NO: 4244

SEQ ID NO: 21556 - DNA, 201 bp, Homo sapiens
attcacaaaaatgaaagtagggaaatgattaacaataatcataggaatctaacaatccaagtggcttgagaatattcattcttcttgacagtatagattcyttacaatttcgtaagttccaatgtatgttttaggaatatgaggtcattactattcataatctgatacagctttatcctaaggcctctctttaaaaactac

SEQ ID NO: 21557 - DNA, 201 bp, Homo sapiens
tcttgacagtatagattctttacaatttcgtaagttccaatgtatgttttaggaatatgaggtcattactattcataatctgatacagctttatcctaagrcctctctttaaaaactacactgcatcatagcttttttgtgcagttggtctttctactgttactgaacagtaagcaacctacagattcactatcaccaacc

SEQ ID NO: 21558 - DNA, 201 bp, Homo sapiens
gaagccaacaaataccagatctcagtgaacaaatacagaggaacagccggtaatgccctcatggatggagcatctcagctgatgggagaaaacaggaccaygaccattcacaacggcatgttcttcagcacgtatgacagagacaatgacggctggtatgtgtggcactctttgctcctgctttaaaaatcacactaatat

SEQ ID NO: 21559 - DNA, 201 bp, Homo sapiens
cagccactgtcctaagctctttatgcatcactcgaaagcatttcaactataaggtagacattcttattctcattttacagatgagatttagagagattacrtgatttgtccaatgtcacacaactacccagagataaaactagaatttgagcacagttactttctgaataatgagcatttagataaatacctatatctcta

SEQ ID NO: 21560 - DNA, 201 bp, Homo sapiens
tctgacttattgtatttaaagaatgtttcatagtatttcttatataaaaacaaagtaatttcttgttttctagtttatcacctttgttttcttaagatgargatggcttagctaatgtaagatgtgtttttctcacttgctattctgagtactgtgattttcatttacttctagcaatacaggattacaattaagaggaca

SEQ ID NO: 21561 - DNA, 201 bp, Homo sapiens
aagtcaaccctacggtcaagacctacaagtagccgagctccagagtacattatgagggtcaaagattgtcttattacaaataaattccaagtagaatcaayctttaataagtctttaatgtctcttaaatatgtttatataggagtctaatcaccaattcacaaaaatgaaagtagggaaatgattaacaataatcatagg

SEQ ID NO: 21562 - DNA, 201 bp, Homo sapiens
tatgaggtcattactattcataatctgatacagctttatcctaaggcctctctttaaaaactacactgcatcatagcttttttgtgcagttggtctttctrctgttactgaacagtaagcaacctacagattcactatcaccaaccagccagttgatggatcttaagcaaattatcaagcttgtgataacctaaattataa

SEQ ID NO: 21563 - DNA, 201 bp, Homo sapiens
cagtggaggtggctatcgggctcgtccagccaaagcagctgccactcaaaagaaagtagaaagaaaagcccctgatgctggaggctgtcttcacgctgacycagacctggtgggtgcactgatgtttcttgcagtggtggctctctcatgcagagaaagcctgtagtcatggcagtctgctaatgtttcactgacccacat

SEQ ID NO: 21564 - DNA, 201 bp, Homo sapiens
ccacgagaatgcatggttgtgagaagattaacatttctgggttagtgaatagcattcatacgcttttgggcaccttcccctgcaacttgccagataagcaytattcagctcttattcccagtctgacatcagcaagtgtgattttctatgaaaaattctactatgactccttattttaagtatacaagaaacttgtgactc

SEQ ID NO: 21565 - DNA, 201 bp, Homo sapiens
gccagataagcactattcagctcttattcccagtctgacatcagcaagtgtgattttctatgaaaaattctactatgactccttattttaagtatacaagwaacttgtgactcagaagataatatttacagagtggaaaaaaacccctagcatttatagttttaacatttgaggttttgaatgagagagttatccataata

SEQ ID NO: 21566 - DNA, 201 bp, Homo sapiens
ggtagacattcttattctcattttacagatgagatttagagagattacgtgatttgtccaatgtcacacaactacccagagataaaactagaatttgagcrcagttactttctgaataatgagcatttagataaatacctatatctctatattctaaagtgtgtgtgaaaactttcattttcatttccagggttctctgat

SEQ ID NO: 21567 - DNA, 201 bp, Homo sapiens; identical to SEQ ID NO: 4259

SEQ ID NO: 21568 - DNA, 201 bp, Homo sapiens; identical to SEQ ID NO: 4260

SEQ ID NO: 21569 - DNA, 201 bp, Homo sapiens; identical to SEQ ID NO: 4376

SEQ ID NO: 21570 - DNA, 201 bp, Homo sapiens
agaaatcaggaacaatgatccaatattatcggcttccgtgagataagggcatcttgcctggaggctgccacccaggccggtcatggcagctgctcatgaargacagtaacaatttggcagtttgttaaatgaacaaaatgtagaaataaagtaagcagaatttttagtttttctgaaggtagggcttttggccagatatgc

SEQ ID NO: 21571 - DNA, 201 bp, Homo sapiens; identical to SEQ ID NO: 4377

SEQ ID NO: 21572 - DNA, 201 bp, Homo sapiens
gcccatttaatgattgattatatcattttgtggatatagttataatctgatgggcctggctgggagtggaagaagggaagccttttgcaaatagtagagtrtcagttgcaggtgccaatgactaactttttgaattctatgttggcattaacaataaagcattttgcaaacactggttataactgtctttatggaggcagc

SEQ ID NO: 21573 - DNA, 201 bp, Homo sapiens; identical to SEQ ID NO: 4379

SEQ ID NO: 21574 - DNA, 201 bp, Homo sapiens
tcaaaaagaagaaaaaaagaaaaaaaagaaaaaaagaaataaaataaaataaaaagaagttggaaacaatcacttgtagcgttttgttcagaagttcccawaggaaggtcagagaagggtcattgaagacttcccaatgggaaaaaccattcatttccaggatccatactaacttctttctaaaatttaaatcaaaatatt

SEQ ID NO: 21575 - DNA, 201 bp, Homo sapiens; identical to SEQ ID NO: 4381

SEQ ID NO: 21576 - DNA, 201 bp, Homo sapiens
tcccttgatgtggatgggtagacaggattcctgccctggcagccagacccctgccttgggtctgcacctcctctccctccttcctctccccgtcatccctraatcttgtcctcgagccactgccaccctgtgtaaaccctcatgcccagtcttgcgggtgccatcccttctctttgaagctgaatggaccaaacataccca

SEQ ID NO: 21577 - DNA, 201 bp, Homo sapiens
tctccctatgtcttcacatggtcctcctctgcatgtgcctgagttctaacttcctctcctctcctcatctccaccagtcttatagaattagggccccccartgacctcattctaacttaataacctctttaaagtctctatctccaaatacagtcacattttgaaatattgagggttaggacttcagtgtatgaattttgg

SEQ ID NO: 21578 - DNA, 201 bp, Homo sapiens
agacccctgccttgggtctgcacctcctctccctccttcctctccccgtcatccctaaatcttgtcctcgagccactgccaccctgtgtaaaccctcatgyccagtcttgcgggtgccatcccttctctttgaagctgaatggaccaaacatacccattgagtgttgggtggggacatctctggaaagtcagcacctggac

SEQ ID NO: 21579 - DNA, 201 bp, Homo sapiens
ctaatcaactcccaaaggccccctgtcctaataccaccaccttgggggttaggtttcaacatatgaacaatgtggggacacaaacattgagaccacagcastgagtgtcgaacttggactctgagatttcctatcccctggtgcagggcagtccccattacaccagattgctgagggcagctgggaaataagctaaggacg

SEQ ID NO: 21580 - DNA, 201 bp, Homo sapiens
catggagagagcccagcagaaagggattccctccaaggcgacacacagggcaaagctcacatcagaagccaggcaggccctctgcacctggtaattagccrgcccgggtgctgtcaggctcacacgtgtgtgtgtgtgtgtgtgtgtgtgtgtgtaaagcatgtaccctatggtacagttgagaatatggaggcctcagat

SEQ ID NO: 21581 - DNA, 201 bp, Homo sapiens
tatcattttgtggatatagttataatctgatgggcctggctgggagtggaagaagggaagccttttgcaaatagtagagtatcagttgcaggtgccaatgrctaactttttgaattctatgttggcattaacaataaagcattttgcaaacactggttataactgtctttatggaggcagctctgggaatggtgacattga

SEQ ID NO: 21582 - DNA, 201 bp, Homo sapiens
ttaccttcccaaattctccattgagggctcctatcagctggagaaagtcctccccagtctggggatcagtaacgtcttcacctcccatgctgatctgtccsgcatcagcaaccactcaaatatccaggtgtctgaggtgggttcagaagctcctatgcatctgcttcccaagatctattctgttctattctttctattcta

SEQ ID NO: 21583 - DNA, 201 bp, Homo sapiens
aggcaaggaaaccctgggaaatcgtctttggccggaggaaactcagcagacatgacgactaaatgcaatgtagaatcctcggacagaaaaggacattagtrggacagctggtgaaacccaagtaagtccaggctgtaccaatgtccacttcccagttctgaggaacatgctgtggtctgtccacatttacattaggagaag

SEQ ID NO: 21584 - DNA, 201 bp, Homo sapiens
catttcctacttgctccatggctcagttgaacagatacttagaggttgatgcccataggcagaagctttgccatttgctatgatgacttcacctgcccctrgtggcctggtgatgcctggtgtctcccctgcagatggtgcacaaagctgtggtggaggtggacgagtcgggaaccagagcagcggcagccacggggacaa

SEQ ID NO: 21585 - DNA, 201 bp, Homo sapiens
ttaagctccccctcgggattcaaatgcacacagatttttggtgctttgccgcctacagtacaagagagggcaggactgtcctgttcagtgcactgtgaccyggacgctcaggcccacggaactcccctactccccctgctccctgcggtgccacccacctagctttcgtgcctgagggtggtcctcagactcctcctagaa

SEQ ID NO: 21586 - DNA, 201 bp, Homo sapiens
ctaccccatttcattccattccattccactcaactccactccactccactccactccagttcactctattcaattccactccactccactccagttcactytattcaattccactccactccactccagttcactctattcagttccactccactccactccactccagttcactctattccattccactccattccactc

SEQ ID NO: 21587 - DNA, 201 bp, Homo sapiens
ctcacacttccatagcacgtgcccccaagcaccccatggtgtaggtgctgttattatcactatcttacagttatggagcagtggctcaaggtgtaactgayttgcccaaaatcacactacaaggacacagcagggctgagatttgaacccaggcagtggcttcagagcctgagctgtttcctactgcagagggaggaggca

SEQ ID NO: 21588 - DNA, 201 bp, Homo sapiens
gcctggaggctgccacccaggccggtcatggcagctgctcatgaaggacagtaacaatttggcagtttgttaaatgaacaaaatgtagaaataaagtaagmagaatttttagtttttctgaaggtagggcttttggccagatatgcagcaataaaagagcaaactgcttccttgggccagtgtccttgctcatagatcagg

SEQ ID NO: 21589 - DNA, 201 bp, Homo sapiens; identical to SEQ ID NO: 4393

SEQ ID NO: 21590 - DNA, 201 bp, Homo sapiens
gactggtcagttcattcattcattcattctacaaaggtttatggagcatctctcctgactgcaagctcttgaaggtgagagcagcacaaatgagggtcccwtggagagagaggccggaatgaaaaatgtcaatgacaaatgcatatataaaggcacatgtgtaattgaaagagctttgagagaaagagtcaagggactgtt

SEQ ID NO: 21591 - DNA, 201 bp, Homo sapiens; identical to SEQ ID NO: 4400

SEQ ID NO: 21592 - DNA, 201 bp, Homo sapiens; identical to SEQ ID NO: 4402

SEQ ID NO: 21593 - DNA, 201 bp, Homo sapiens
tatccttcatgtaatgggaagccatatccaccactgttccttgagttaaggagtcctgttttaaacaatcaaaactaagaaggcacttcctagctatgtgrtctccaaaaaatacttgactctctgagcttcctttctctcttctataaaattgaagaattacaccttgctcaaagatgccatgagaattcaatgacagac

SEQ ID NO: 21594 - DNA, 201 bp, Homo sapiens
gtccggcatcagcaaccactcaaatatccaggtgtctgaggtgggttcagaagctcctatgcatctgcttcccaagatctattctgttctattctttctaktctactctaccccatttcattccattccattccactcaactccactccactccactccactccagttcactctattcaattccactccactccactccag

SEQ ID NO: 21595 - DNA, 201 bp, Homo sapiens
taaaagccctatctccagatatagtcacattctggggtattgaaggtaaggacttcagtatatgcattttgggggcacaattcagccagaacaggaggacrgtggggatgtccacatgaagaggttcaggcagaattcctttaggaggggaagatgtctctctgtgggacaagggtggcatggagcagcccctgggggaag

SEQ ID NO: 21596 - DNA, 201 bp, Homo sapiens
atccaagtcctgggggcctagcccagttggagggacaagagctggaaactgggttccttagggtggtgccagagtgggcagagacctctgggcagcccacrtccaagtccagagcaaggggaggctcatcctagaaaagaggccagaggagccataaccaccattgttccttgggttaaggagtccttttttaaaaccatc

SEQ ID NO: 21597 - DNA, 201 bp, Homo sapiens
gccgtcacaaagtcccaggggctagggggcttcaacaacagaaatttctttctttacaactctggaagctggaagtctgagattaaggcaccagcaggatwtgttccttccaaggcccctctccttggctcacaggtggctgccttctccctgtcttcacctggtcttccctctgtgcatgtctctatcctgatctcctct

SEQ ID NO: 21598 - DNA, 201 bp, Homo sapiens
cttgggtctgcacctcctctccctccttcctctccccgtcatccctaaatcttgtcctcgagccactgccaccctgtgtaaaccctcatgcccagtcttgsgggtgccatcccttctctttgaagctgaatggaccaaacatacccattgagtgttgggtggggacatctctggaaagtcagcacctggaccagctccacc

SEQ ID NO: 21599 - DNA, 201 bp, Homo sapiens
ccagtcccccgtatccctcagatcttggcccctctgccctcatagaggccaagactccctcagacaaatgcttgttcctctgaaatgcctcctcctgactyctcagcaagagctgacctctgcttatctccccgacactccttgtaagcattcctgctcgcctctgcagctcctgccagttgctgaccctggggaaagcaa

SEQ ID NO: 21600 - DNA, 201 bp, Homo sapiens
cctccttcctctccccgtcatccctaaatcttgtcctcgagccactgccaccctgtgtaaaccctcatgcccagtcttgcgggtgccatcccttctctttraagctgaatggaccaaacatacccattgagtgttgggtggggacatctctggaaagtcagcacctggaccagctccacccctctctgaggacaccttctt

SEQ ID NO: 21601 - DNA, 201 bp, Homo sapiens
atctttggccatttgggtggctataacaaaataccataaactgggtggcttagcaacaacaaacatatatttctcatagttctggaggctgagaagtccakgatcaaggcactggcagatgcagtgcccattccttggttcatagagagtgccttcttagtatatccttgctggaaggaggaaggcagctctctgtggtct

SEQ ID NO: 21602 - DNA, 201 bp, Homo sapiens
gaaggtaagatgaatgccttcttgctgtggatgggattagtgaggctgagatgctgtttcctccacggaggaagagctggttgctgtcttcgggcccctgrggacatctgaagccccagctttctacaggctctgaagtatgaacccattgtggccaccatggcaaagacaccaacaccttagccactcagggcaggacac

SEQ ID NO: 21603 - DNA, 201 bp, Homo sapiens; identical to SEQ ID NO: 4380

SEQ ID NO: 21604 - DNA, 201 bp, Homo sapiens; identical to SEQ ID NO: 4382

SEQ ID NO: 21605 - DNA, 201 bp, Homo sapiens; identical to SEQ ID NO: 4383

SEQ ID NO: 21606 - DNA, 201 bp, Homo sapiens; identical to SEQ ID NO: 4384

SEQ ID NO: 21607 - DNA, 201 bp, Homo sapiens; identical to SEQ ID NO: 4385

SEQ ID NO: 21608 - DNA, 201 bp, Homo sapiens; identical to SEQ ID NO: 4386

SEQ ID NO: 21609 - DNA, 201 bp, Homo sapiens
tggtgtctcccctgcagatggtgcacaaagctgtggtggaggtggacgagtcgggaaccagagcagcggcagccacggggacaatattcactttcaggtcrgcccgcctgaactctcagaggctagtgttcaacaggccctttctgatgttcattgtggataacaacatcctcttccttggcaaagtgaaccgcccctgag

SEQ ID NO: 21610 - DNA, 201 bp, Homo sapiens
cacaaaattctttttcatttttcccttttttcatctttagctaagtgggagacaagcttcaaccacaaaggcacccaagagcaagacttctacgtgacctyggagactgtggtgcgggtacccatgatgagccgcgaggatcagtatcactacctcctggaccggaacctctcctgcagggtggtgggggtcccctaccaa

SEQ ID NO: 21611 - DNA, 201 bp, Homo sapiens
cgtcttcacctcccatgctgatctgtccggcatcagcaaccactcaaatatccaggtgtctgaggtgggttcagaagctcctatgcatctgcttcccaagrtctattctgttctattctttctattctactctaccccatttcattccattccattccactcaactccactccactccactccactccagttcactctatt

SEQ ID NO: 21612 - DNA, 201 bp, Homo sapiens
tttatttgcagctgagaatttctaattctgacacaaaattctttttcatttttcccttttttcatctttagctaagtgggagacaagcttcaaccacaaasgcacccaagagcaagacttctacgtgacctcggagactgtggtgcgggtacccatgatgagccgcgaggatcagtatcactacctcctggaccggaacct

SEQ ID NO: 21613 - DNA, 201 bp, Homo sapiens
gagagaccctgaaataaggccatggggacaaaatgtcggctggataggaggtgctcagtaagtggcagcttctgttgttttctgtgcctggagtcttgggsctttagaaatcaggaacaatgatccaatattatcggcttccgtgagataagggcatcttgcctggaggctgccacccaggccggtcatggcagctgctca

SEQ ID NO: 21614 - DNA, 201 bp, Homo sapiens; identical to SEQ ID NO: 4395

SEQ ID NO: 21615 - DNA, 201 bp, Homo sapiens; identical to SEQ ID NO: 4398

SEQ ID NO: 21616 - DNA, 201 bp, Homo sapiens; identical to SEQ ID NO: 4401

SEQ ID NO: 21617 - DNA, 201 bp, Homo sapiens
gaaggaaaagtcccacgaaaagtccaagaatgtgcccaatgttataaagagacttgccttcatattcaagaggttcaacagtcactgctctggggctgccrtaaagatggtctccgctggctatctttactgtcttcactccttttatttgcagctgagaatttctaattctgacacaaaattctttttcatttttccctt

SEQ ID NO: 21618 - DNA, 201 bp, Homo sapiens
tccctaccaactttagggactctgcaggggccatgaagcagatcaatgattatgtggcaaagcaaacgaagggcaagattgtggacttgcttaagaacctmgatagcaatgcggtcgtgatcatggtgaattacatcttctttaaaggtaaggcccttgggcccaaacctgcactttctttggcttttctgctgcttttat

SEQ ID NO: 21619 - DNA, 201 bp, Homo sapiens
gttcacccagatatcaggtagcattcacagccagccacatttttcaccctcttcacttggagatttggtcttgagtaaaacgttagagaatcagagaacaycaggggtccagggcctctgaagatgtgaaaaccaacctccttgttttgcaaatgtggaaggaaaagtcccacgaaaagtccaagaatgtgcccaatgtta

SEQ ID NO: 21620 - DNA, 201 bp, Homo sapiens
ccagatatcaggtagcattcacagccagccacatttttcaccctcttcacttggagatttggtcttgagtaaaacgttagagaatcagagaacatcagggrtccagggcctctgaagatgtgaaaaccaacctccttgttttgcaaatgtggaaggaaaagtcccacgaaaagtccaagaatgtgcccaatgttataaaga

SEQ ID NO: 21621 - DNA, 201 bp, Homo sapiens
tgggataccccacaaaggcctccctgagaagcgctagagacaaagatgagtgcctcctcatctggaagatgaaaagatgtctttgcctgcatgggctgccrtcacaaagtcccaggggctagggggcttcaacaacagaaatttctttctttacaactctggaagctggaagtctgagattaaggcaccagcaggatttgt

SEQ ID NO: 21622 - DNA, 201 bp, Homo sapiens
ggcaagacttctacccgtagccagatggggaggcatgggcacaggaacggctcttgggtgaagtggagggaggaagaggaggactgaaggcgaaggccacrtcaggagtgatgggataccccacaaaggcctccctgagaagcgctagagacaaagatgagtgcctcctcatctggaagatgaaaagatgtctttgcctgc

SEQ ID NO: 21623 - DNA, 201 bp, Homo sapiens
ttcagagcctgagctgtttcctactgcagagggaggaggcaagacttctacccgtagccagatggggaggcatgggcacaggaacggctcttgggtgaagyggagggaggaagaggaggactgaaggcgaaggccacgtcaggagtgatgggataccccacaaaggcctccctgagaagcgctagagacaaagatgagtgc

SEQ ID NO: 21624 - DNA, 201 bp, Homo sapiens
atgggtagacaggattcctgccctggcagccagacccctgccttgggtctgcacctcctctccctccttcctctccccgtcatccctaaatcttgtcctcragccactgccaccctgtgtaaaccctcatgcccagtcttgcgggtgccatcccttctctttgaagctgaatggaccaaacatacccattgagtgttgggt

SEQ ID NO: 21625 - DNA, 201 bp, Homo sapiens
ggggcccactctagtgacctcattctaactcagtcccctctttaaaagccctatctccagatatagtcacattctggggtattgaaggtaaggacttcagyatatgcattttgggggcacaattcagccagaacaggaggacggtggggatgtccacatgaagaggttcaggcagaattcctttaggaggggaagatgtct

SEQ ID NO: 21626 - DNA, 201 bp, Homo sapiens
gtagccagatggggaggcatgggcacaggaacggctcttgggtgaagtggagggaggaagaggaggactgaaggcgaaggccacgtcaggagtgatgggakaccccacaaaggcctccctgagaagcgctagagacaaagatgagtgcctcctcatctggaagatgaaaagatgtctttgcctgcatgggctgccgtcaca

SEQ ID NO: 21627 - DNA, 201 bp, Homo sapiens
aaggccagcagtgctgatggtcccaggcatgtagctggtctgagttcatagaaggaccacagcgccctgccatgtgccaaaccaggacaccagagtgaagrccagaagctcacatggaagcagcttagttccctggtaacctcgagatgctgatgagacagagcagagcagagggaaccctctccctccatatcccatcct

SEQ ID NO: 21628 - DNA, 201 bp, Homo sapiens
agaaggggacagtttgcatactggtattctgcctaccccagggtggacactcactcagcgtttgctgaatgaacagggcaaggccagcagtgctgatggtsccaggcatgtagctggtctgagttcatagaaggaccacagcgccctgccatgtgccaaaccaggacaccagagtgaaggccagaagctcacatggaagca

SEQ ID NO: 21629 - DNA, 201 bp, Homo sapiens; identical to SEQ ID NO: 4389

SEQ ID NO: 21630 - DNA, 201 bp, Homo sapiens
cacatgaagaggttcaggcagaattcctttaggaggggaagatgtctctctgtgggacaagggtggcatggagcagcccctgggggaaggagaaggggacwgtttgcatactggtattctgcctaccccagggtggacactcactcagcgtttgctgaatgaacagggcaaggccagcagtgctgatggtcccaggcatgt

SEQ ID NO: 21631 - DNA, 201 bp, Homo sapiens
gagggaggaggcaagacttctacccgtagccagatggggaggcatgggcacaggaacggctcttgggtgaagtggagggaggaagaggaggactgaaggcsaaggccacgtcaggagtgatgggataccccacaaaggcctccctgagaagcgctagagacaaagatgagtgcctcctcatctggaagatgaaaagatgtc

SEQ ID NO: 21632 - DNA, 201 bp, Homo sapiens
aggaacggctcttgggtgaagtggagggaggaagaggaggactgaaggcgaaggccacgtcaggagtgatgggataccccacaaaggcctccctgagaagmgctagagacaaagatgagtgcctcctcatctggaagatgaaaagatgtctttgcctgcatgggctgccgtcacaaagtcccaggggctagggggcttcaa

SEQ ID NO: 21633 - DNA, 201 bp, Homo sapiens
ggaaggtcagagaagggtcattgaagacttcccaatgggaaaaaccattcatttccaggatccatactaacttctttctaaaatttaaatcaaaatattgsaatgaaagtgcaaacagagaagttcacccagatatcaggtagcattcacagccagccacatttttcaccctcttcacttggagatttggtcttgagtaaa

SEQ ID NO: 21634 - DNA, 201 bp, Homo sapiens
cactccactcatccactccactcttccattccactccattccactcctccactccactcttccactccactccattccactcctccactccactccactcyattctattctattccattccattctactctattctattccattccattgcagtcaactccactccactctctactattctattccactcctctcccctcc

SEQ ID NO: 21635 - DNA, 201 bp, Homo sapiens
tggcctggtgatgcctggtgtctcccctgcagatggtgcacaaagctgtggtggaggtggacgagtcgggaaccagagcagcggcagccacggggacaatmttcactttcaggtcggcccgcctgaactctcagaggctagtgttcaacaggccctttctgatgttcattgtggataacaacatcctcttccttggcaaag

SEQ ID NO: 21636 - DNA, 201 bp, Homo sapiens
gaacccaggcagtggcttcagagcctgagctgtttcctactgcagagggaggaggcaagacttctacccgtagccagatggggaggcatgggcacaggaayggctcttgggtgaagtggagggaggaagaggaggactgaaggcgaaggccacgtcaggagtgatgggataccccacaaaggcctccctgagaagcgctag

SEQ ID NO: 21637 - DNA, 201 bp, Homo sapiens; identical to SEQ ID NO: 4407

SEQ ID NO: 21638 - DNA, 201 bp, Homo sapiens; identical to SEQ ID NO: 4375

SEQ ID NO: 21639 - DNA, 201 bp, Homo sapiens; identical to SEQ ID NO: 4743

SEQ ID NO: 21640 - DNA, 201 bp, Homo sapiens
caatcctaaatgggatgatctctttcatcccaatttcagggtagtttggtcatccacgccacattccaagtgtcccctgggccctttctctccctcacccycctgtctgcacatgagtagatgcctccatgcagccctcccaggacgctcacctctatccacagatgcttctccaaaacccaccaggccctcccatggaac

SEQ ID NO: 21641 - DNA, 201 bp, Homo sapiens
atgggataccccacaaaggcctccctgagaagcgctagagacaaagatgagtgcctcctcatctggaagatgaaaagatgtctttgcctgcatgggctgcygtcacaaagtcccaggggctagggggcttcaacaacagaaatttctttctttacaactctggaagctggaagtctgagattaaggcaccagcaggatttg

SEQ ID NO: 21642 - DNA, 201 bp, Homo sapiens
gagagagcccagcagaaagggattccctccaaggcgacacacagggcaaagctcacatcagaagccaggcaggccctctgcacctggtaattagccggccygggtgctgtcaggctcacacgtgtgtgtgtgtgtgtgtgtgtgtgtgtgtaaagcatgtaccctatggtacagttgagaatatggaggcctcagatgggg

SEQ ID NO: 21643 - DNA, 201 bp, Homo sapiens
tggcagcaaccagactcagacatttctctgcagttgtgctgtgggctcagggtggctctttatgaaggggccccttcatggggtcatgcactcctgtgtgytttcccttgcatcatgccttgcctgtcttggcaaatatttctctggagtttacccagccagtccaaggtcacagggaagccctgtctgtgtctcacacag

SEQ ID NO: 21644 - DNA, 201 bp, Homo sapiens
gcccagatcgcacatgtgcgggctggtggcaggggagatggcagcaaccagactcagacatttctctgcagttgtgctgtgggctcagggtggctctttaygaaggggccccttcatggggtcatgcactcctgtgtgttttcccttgcatcatgccttgcctgtcttggcaaatatttctctggagtttacccagccagt

SEQ ID NO: 21645 - DNA, 201 bp, Homo sapiens
ggacgctcacctctatccacagatgcttctccaaaacccaccaggccctcccatggaacgagctcacctacagggtaaaatcaggtcacggtcacatatagcctgactactcccctcaggaccctcattcacagccactgtattaatttgctggggctgccaaaacaaagtgtcctcatctgggaggctgcagtagatttg

SEQ ID NO: 21646 - DNA, 201 bp, Homo sapiens
tagagaagtataaatgagctaatacaggtgaaccgcctggggataccaggaggtgaggtcgaggaggaacgaggtatcactcctcagagccactcagagasaggctgtgcacgagtcagaggaacctggattttaattccggttccatcactcagtagctgaaacaagctattccacttcacttagcctcagtctattcaa

SEQ ID NO: 21647 - DNA, 201 bp, Homo sapiens
ggcagcgagtgggcatcgtggtgaaagcctcgggatcagggagctgcgtctgcaggcaggcctgctggccggaaacctgccaggaaaggaaggggctgtcycggggcggggccagggaggggtggagacagggccggctgtggtcagtgacaaatgctggctgcaatccagccagccctctgccctttctgagcccgaggg

SEQ ID NO: 21648 - DNA, 201 bp, Homo sapiens
cccattgagtgttgggtggggacatctctggaaagtcagcacctggaccagctccacccctctctgaggacaccttctttccctttcagaacaaagaacakccaccatgcagctcttcctcctcttgtgcctggtgcttctcagccctcagggggcctcccttcaccgccaccacccccgggagatgaagaagagagtcga

SEQ ID NO: 21649 - DNA, 201 bp, Homo sapiens; identical to SEQ ID NO: 4399

SEQ ID NO: 21650 - DNA, 201 bp, Homo sapiens; identical to SEQ ID NO: 4396

SEQ ID NO: 21651 - DNA, 201 bp, Homo sapiens
gagacagggccggctgtggtcagtgacaaatgctggctgcaatccagccagccctctgccctttctgagcccgagggactgccacctccactgtgtgcacrctcagctacgggacacagtaagtaccgatgccgcaaagggaggtccccagggcttgagggcatgtgaggcgaggagaggatggactctagagttttgggg

SEQ ID NO: 21652 - DNA, 201 bp, Homo sapiens
aaatgctggctgcaatccagccagccctctgccctttctgagcccgagggactgccacctccactgtgtgcacactcagctacgggacacagtaagtaccratgccgcaaagggaggtccccagggcttgagggcatgtgaggcgaggagaggatggactctagagttttggggtttggggtctgcaaagctctgaaggag

SEQ ID NO: 21653 - DNA, 201 bp, Homo sapiens; identical to SEQ ID NO: 4403

SEQ ID NO: 21654 - DNA, 201 bp, Homo sapiens
tgcaatccagccagccctctgccctttctgagcccgagggactgccacctccactgtgtgcacactcagctacgggacacagtaagtaccgatgccgcaamgggaggtccccagggcttgagggcatgtgaggcgaggagaggatggactctagagttttggggtttggggtctgcaaagctctgaaggagtctcatctct

SEQ ID NO: 21655 - DNA, 201 bp, Homo sapiens
aatgggaagccatatccaccactgttccttgagttaaggagtcctgttttaaacaatcaaaactaagaaggcacttcctagctatgtgatctccaaaaaayacttgactctctgagcttcctttctctcttctataaaattgaagaattacaccttgctcaaagatgccatgagaattcaatgacagacacatgcgaagtc

SEQ ID NO: 21656 - DNA, 201 bp, Homo sapiens
gtgcctggagtcttgggcctttagaaatcaggaacaatgatccaatattatcggcttccgtgagataagggcatcttgcctggaggctgccacccaggccrgtcatggcagctgctcatgaaggacagtaacaatttggcagtttgttaaatgaacaaaatgtagaaataaagtaagcagaatttttagtttttctgaagg

SEQ ID NO: 21657 - DNA, 201 bp, Homo sapiens; identical to SEQ ID NO: 4406

SEQ ID NO: 21658 - DNA, 201 bp, Homo sapiens
tagaaatcaggaacaatgatccaatattatcggcttccgtgagataagggcatcttgcctggaggctgccacccaggccggtcatggcagctgctcatgarggacagtaacaatttggcagtttgttaaatgaacaaaatgtagaaataaagtaagcagaatttttagtttttctgaaggtagggcttttggccagatatg

SEQ ID NO: 21659 - DNA, 201 bp, Homo sapiens
cagtgagctgtgattgtaccactgcactccaacctgggtgacagcgagaccctgtctcaaaaaaaaaaaaaaaaaaaaaatagtttaaacagtagttaaaccagacctacaagaaagctttgccaagagtaagaaatgtgctgtcatcttttaaatcagtctgcacgggtattcttttttccttccttcctcatacaacaa

SEQ ID NO: 21660 - DNA, 201 bp, Homo sapiens
agtgagctgtgattgtaccactgcactccaacctgggtgacagcgagaccctgtctcaaaaaaaaaaaaaaaaaaaaaatagtttaaacagtagttaaaccagacctacaagaaagctttgccaagagtaagaaatgtgctgtcatcttttaaatcagtctgcacgggtattcttttttccttccttcctcatacaacaaa

SEQ ID NO: 21661 - DNA, 201 bp, Homo sapiens
ctaccgatttctctcctcacagataaagagagttttaatgagcaaaaaacttgcagaatctgaaggaaaaggctggtatagctgtacgaagtggcagagcrtgaaattggtggttattactttttttttttttccccgccatcagattccaccccgcatcaaagctgtgccaaataggctcgctttgtttagggacagggt

SEQ ID NO: 21662 - DNA, 201 bp, Homo sapiens
cactcgagtgcattgaccccaggagacggcagcgctaacttagcagagcgtttgctgtcaggcctttggatacctacagagcttactgtttcttgatagaytcctaatttttttcgtaaacaaatctgaaagtcaccaccttccccgttgactaccgatttctctcctcacagataaagagagttttaatgagcaaaaaac

SEQ ID NO: 21663 - DNA, 201 bp, Homo sapiens
attctctgataatcaagagttcacaaagaagagaatacttacttcacttcagttaatcaaagaagagatataaaaatccttaagacagtctctggccatamggacgaaagcacctaagaagcagattagtatatggtctttttaacctttttaaagctaatacagtttcagccatgtctgccttacctgtaatacccatat

SEQ ID NO: 21664 - DNA, 201 bp, Homo sapiens
cgtagtagcagcagtatcaattttgtgcaataaaattttgaataaccaattttatgcaaattgatatcaatagagaggagtaatgctgtattgaaattacytgttgccttccctgcttttttagggtgaaaaggtaataaaaagcatgtctaaaagtgatatgaattgcagatagtgataatgttgtaacattttggtgac

SEQ ID NO: 21665 - DNA, 201 bp, Homo sapiens
ccttaaacgcattgccaaagcttctggaggtatgtcttgtgctggctgtcacataaaatacttttattatccctgatcctatcaaaggtctttttacattrgaatattgacagaaaacagctcaaaaacatttatattctcttaatgctttgtgctaccaacacatttatagagccatttttcatgtaactggagaaattt

SEQ ID NO: 21666 - DNA, 201 bp, Homo sapiens; identical to SEQ ID NO: 4559

SEQ ID NO: 21667 - DNA, 201 bp, Homo sapiens
cactgcgacctccgccttccgggtttaagtgatactcctgcctcagtctcctgagtatctgggattacaggcgcccaccaccaggcccaactaattttttstatttttagtagaggcggtttcaccgtgttggccaggttggtctcgaactcctgacctcaggtgatctgcccgcctcagcctcccaaagtgctgggatta

SEQ ID NO: 21668 - DNA, 201 bp, Homo sapiens
ggcgtgagccactgcacttggcctggactcatcttcattgtccacctcctaggctaaatttatgtcttttatgtgcttgtaatctctgcataccactttartgacacttgccctggagtgtgattggtaatccctctccccactagatccttgaaggcaggacctgtgttccctgtttaaccatagttctcaattagtaat

SEQ ID NO: 21669 - DNA, 201 bp, Homo sapiens; identical to SEQ ID NO: 4549

SEQ ID NO: 21670 - DNA, 201 bp, Homo sapiens
ctgtgttccctgtttaaccatagttctcaattagtaattcaaatttgggttggggagagctaagtggtaatttttaattccttcaaattttccatgaattsgactaatttaaattctggtcagagataacaaaggataatacaatttgatctatgattatcttgtgataaatacttaatggaagttaaattatttttaaaa

SEQ ID NO: 21671 - DNA, 201 bp, Homo sapiens; identical to SEQ ID NO: 4552

SEQ ID NO: 21672 - DNA, 201 bp, Homo sapiens
ttagtgacatccattccatccaaaaggttaagggtgtgatctaaaagatcccttagaaattctaaattgtcttaaaattttgaaccagtagcatctgttaygtgtacctaaggctaatgtaacagaatcagttcccctagaaagcatgtgatccaaatgctctcagtggctgggggtagtggctcacacctgaaatctcaa

SEQ ID NO: 21673 - DNA, 201 bp, Homo sapiens
tactcacagcttgctttatggctggaattggtcctattcccataatggaaggctccacacccacttgggaccaggaaactatccgtgctaaaggtgtaagyccacgtttatcagcttctgacttcttcataagaacgacagctgcagcaccatcatttattcctgtaaaatatgagtgacttaatttctaccatgcttatt

SEQ ID NO: 21674 - DNA, 201 bp, Homo sapiens
agccggtgtggtggtgtgcgcctgtagtcccagccactcaggaggctgagacaggagaattgcttgaacctgggaggcggagattgcagtgagccaagatygcaccactgcactccagcctgggcgacagagtgaggctccgtctcaaaaagaaaaaaaaaggattacagcagttggggaggggagatctctgacaggaaa

SEQ ID NO: 21675 - DNA, 201 bp, Homo sapiens
ctgctgtagatccccaaactctccacgccagacgccgccgacccggaagtagcaagtcccctgccactgagtggccaagaaggcgatctgttatcctgcaycgccaatcatcgctcacgtcgaggggcacgcaggccctggagcccaccaaccacctcgtagctacgcccaagaccacgcttgttgcttaagtccggggtc

SEQ ID NO: 21676 - DNA, 201 bp, Homo sapiens
gtctagttgggatgtcaagaaaccaaattaattctttcagtataggttaagtcaatgatcaaatacagagaaatgacatgtttccttaaactgttttaagrataattttgtacataaatattgagttgggtgtggtggctcatgcctgtagtcccccagctacttgggaggttaaggcagggggctcacttgagcccagga

SEQ ID NO: 21677 - DNA, 201 bp, Homo sapiens
ttaattcatttcatcactaccattttggttaataatatatggccattttagtgtcattccatatgtattgcacatgttgaatatccggcacactcagaccrgtgaatgttttctcaacaggttattattgcagcagaactcctaaaaaatgcagatgaattagtcaaacagaaaattcatcccacatcagttattagtggc

SEQ ID NO: 21678 - DNA, 201 bp, Homo sapiens
actaagatataatttctaaagattcctatgtattactcttttagatgttactcttacctataaataggttgatgtttaaaccactatgatatactcacctyttctagttgacaccaaaactggtacaatctctttgtcaaaatggccagctttctgtgcattctctgtcctgttctgggacagaactgcaaccttgtcctg

SEQ ID NO: 21679 - DNA, 201 bp, Homo sapiens; identical to SEQ ID NO: 4550

SEQ ID NO: 21680 - DNA, 201 bp, Homo sapiens
agacataggagactccattttgttctgtactaagaaaaattcttctgccttgagattctgttaatctatgaccttacccccaaccccctgctctctgaaayacgtgctgtgtcaaactcagggttaaatggattaagggttgtgcaagatgtgctttgttaaacagatgcttgaaggcagcatgctcgttaagagtcatca

SEQ ID NO: 21681 - DNA, 201 bp, Homo sapiens
tctccattaaaaataaatttagccgggcatggtgtgtgtgccatgtagctagtagtcctagctgcttgggaggctgaggcagaaggatcacttgagcctargagttcaaggctgcagtgagccatgattgtgcctctgcactccagcctgggtgaccctgtctcacaaaacaaaacaaaaatcaggaaatttaacatgaat

SEQ ID NO: 21682 - DNA, 201 bp, Homo sapiens
cttccccatcatattttcacccactagttttagcattcattcatgactttctaactccaacattccttctattggtaagatattaattggcattttaccayaaagaaaaccttttccttttctcccatttattcagttatttatatcaggatggactcatacattttcattttattgaataagttataactcattactttc

SEQ ID NO: 21683 - DNA, 201 bp, Homo sapiens
cataaagaaaaccttttccttttctcccatttattcagttatttatatcaggatggactcatacattttcattttattgaataagttataactcattactytcattacttactttgatgctgaaatttttcaatacttgggcagttataacccattactatcattacttatttgcacgctgaaattgttcaaaatttaggc

SEQ ID NO: 21684 - DNA, 201 bp, Homo sapiens
agataaagagagttttaatgagcaaaaaacttgcagaatctgaaggaaaaggctggtatagctgtacgaagtggcagagcatgaaattggtggttattactttttttttttttccccgccatcagattccaccccgcatcaaagctgtgccaaataggctcgctttgtttagggacagggtcccacctgtcgcccagacga

SEQ ID NO: 21685 - DNA, 201 bp, Homo sapiens
tagagccttttctttgattcttgtttcatacttgcatcttcaactaattatgctctttcctggattcttcctgtggctcttttgtccttcaagcttcttcrtacatccttgtgctataggtactccctatcgtacatctttacaggcagatgtcatgagtggtttactacacaaaacttctctggtgcttttcttctcatc

SEQ ID NO: 21686 - DNA, 201 bp, Homo sapiens; identical to SEQ ID NO: 4546

SEQ ID NO: 21687 - DNA, 201 bp, Homo sapiens
aggctggagtgcagcagctactaacaggcaaaatcaaccatagtatactatacaacctcaaactgctggcctcaagtgatcctcccaccacagcctccctrgtagctgggactataggcacctgccactgcaccctgtaaaagctattctcttatatatacttctagaagctttacattttttgcttttatttttaaatcc

SEQ ID NO: 21688 - DNA, 201 bp, Homo sapiens
tccctgcctatcttacctcgttccttttatgccaagtaagccaatgtctttttttttttttttttttttttaccttgggaagtaatgaactcagtcctagtaactagtatttctttaactattacccacatggccaacacctagaagatactatcttaaaattggattgtgaaattcactggtaagctctcagggttactt

SEQ ID NO: 21689 - DNA, 201 bp, Homo sapiens
gggagagctaagtggtaatttttaattccttcaaattttccatgaattggactaatttaaattctggtcagagataacaaaggataatacaatttgatctrtgattatcttgtgataaatacttaatggaagttaaattatttttaaaaatcacagaaggtaactcaggttacaaaaatactttgcagagaatcagatatc

SEQ ID NO: 21690 - DNA, 201 bp, Homo sapiens
tggggcagggcgctgtggccccacttttcccacagcgaggaggagccccgccgcgcgcggcagggttttgagaccggcaacgcgtggatgtggtgtccggkgcggcgttggaaacgcgccctccgcgggaaagcgggcctcccgggctcgcacgtgcgggccacgcctcgcacccccttttgtttcagggcgaccccctga

SEQ ID NO: 21691 - DNA, 201 bp, Homo sapiens
ctggtcagagataacaaaggataatacaatttgatctatgattatcttgtgataaatacttaatggaagttaaattatttttaaaaatcacagaaggtaaytcaggttacaaaaatactttgcagagaatcagatatcaccaaggagagaattcagaagatcctggcaactggtgccaatgttattctaaccactggtgga

SEQ ID NO: 21692 - DNA, 201 bp, Homo sapiens
aaagattcatagaaaagaggtctaaacttgggtggaaaggctaaagttaaaccattctttgtcaacataaatatatgctgcatgatactggtaactgctastttggtttgttcttaggttaatacagtgacattctcacacatttttgccttagtgacatccattccatccaaaaggttaagggtgtgatctaaaagatcc

SEQ ID NO: 21693 - DNA, 201 bp, Homo sapiens
aatgctcttggttactcttctggtagggaaagactagagctaactacatgaataagctcacttaaggctaacaggaagacaaatttcataaaagggaatarggttatactcacagcttgctttatggctggaattggtcctattcccataatggaaggctccacacccacttgggaccaggaaactatccgtgctaaaggt

SEQ ID NO: 21694 - DNA, 201 bp, Homo sapiens
tcttcatttgtatgtctagttgggatgtcaagaaaccaaattaattctttcagtataggttaagtcaatgatcaaatacagagaaatgacatgtttccttmaactgttttaagaataattttgtacataaatattgagttgggtgtggtggctcatgcctgtagtcccccagctacttgggaggttaaggcagggggctca

SEQ ID NO: 21695 - DNA, 201 bp, Homo sapiens
cttttttagggtgaaaaggtaataaaaagcatgtctaaaagtgatatgaattgcagatagtgataatgttgtaacattttggtgacaagtaatgcttgctkctttaatagattagattactaaaaggaagtcccttgaaattacccttgatttttcacgtgtgtaccctttgtccattccaaacctgttactgtccttaac

SEQ ID NO: 21696 - DNA, 201 bp, Homo sapiens
ctgaggaaagtagctaccagggacctgtttgtgccaaattctgctatagtttgggtcatagtacttggctggttacgagtgagtggatcaggcagtctcaragccaatcgtgcactgctggcaggacataagagatatcagttatcaataagggagcttgacgggagcattctgtattagaaaatagcgagtgaccccaaa

SEQ ID NO: 21697 - DNA, 201 bp, Homo sapiens
gcagctaaaatgatttttttttttttgagacagaattttgctctgtcgcccaggcgctcagctcactgcaacctccgcctcctgggttcaagtgattctcrtgcctcagccactggagtagctgggattacaggcgtgcaccaccacgcccctctaatttttatatttttagtagagacggggtttcaccatgttggccag

SEQ ID NO: 21698 - DNA, 201 bp, Homo sapiens
cgggaaagcgggcctcccgggctcgcacgtgcgggccacgcctcgcacccccttttgtttcagggcgaccccctgagtgtccatgttaaacgccaggtttyattttaggaccatttaccagaaaaagagtaggtccatccgcgcgccctcggatgagcccggtgccctgtccgcccgcagctgcagtcgaggtcgggcgtc

SEQ ID NO: 21699 - DNA, 201 bp, Homo sapiens
ctcaacacttggggagcctaaggcaagaggatcaattgaactcaggagttcaaaaccagcctgggcgacatagaccttgtctctacgaaatgaagaaggcktggtgcacctgtagttcgaggtaatgggaggctaaggcaggaggaatatttgagcctaggagttttgaggctgcagtgagctatgatggtgccactgcac

SEQ ID NO: 21700 - DNA, 201 bp, Homo sapiens; identical to SEQ ID NO: 4540

SEQ ID NO: 21701 - DNA, 201 bp, Homo sapiens
gtttctctccctgttgtccctgcctctttttccttcccgccgtgccccgcggccgggccggggcagccgggaagcgggtggggtggtgtgttacccagtakctcctgggacatcgctcgggtacgctccacgccgtcgcagccactgctgtggtcgccggtcggccgaggggccgcgatactggttgcccgcggtgtaagc

SEQ ID NO: 21702 - DNA, 201 bp, Homo sapiens
tgtgagaaattaataaatacatcatgatatgacagtgtgatcttaccgagtcagtaaatgtgatacacagtataaactcttcatagatcatccagcatgcyggtatagtagaaacactattgtttggtgagaaagatgttaattctggagaaactagatagtttgtggggaaaatgtatttctagattaaactttagccat

SEQ ID NO: 21703 - DNA, 201 bp, Homo sapiens
ttcccataatggaaggctccacacccacttgggaccaggaaactatccgtgctaaaggtgtaagcccacgtttatcagcttctgacttcttcataagaacracagctgcagcaccatcatttattcctgtaaaatatgagtgacttaatttctaccatgcttattaacctcagttacatatctgtggcttctttaccacct

SEQ ID NO: 21704 - DNA, 201 bp, Homo sapiens
agttttccttccataagaagctgacagtctttttgctttaaaaatatttcttagtgttttatcaacttgaagaactatcttttttaaataaaataatagcytaatataggtcatatgaatagtcacactcggtttagcttctgttgagcattttttctaaaggtaatagatgtgttgtcttttacggttgtattgatgaac

SEQ ID NO: 21705 - DNA, 201 bp, Homo sapiens
gcacgcgtgcgtagtagcagcagtatcaattttgtgcaataaaattttgaataaccaattttatgcaaattgatatcaatagagaggagtaatgctgtatkgaaattacctgttgccttccctgcttttttagggtgaaaaggtaataaaaagcatgtctaaaagtgatatgaattgcagatagtgataatgttgtaacat

SEQ ID NO: 21706 - DNA, 201 bp, Homo sapiens
tgtgcgcatgtgttgcgcgcacgcgtgcgtagtagcagcagtatcaattttgtgcaataaaattttgaataaccaattttatgcaaattgatatcaatagagaggagtaatgctgtattgaaattacctgttgccttccctgcttttttagggtgaaaaggtaataaaaagcatgtctaaaagtgatatgaattgcagata

SEQ ID NO: 21707 - DNA, 201 bp, Homo sapiens
ttttaaagcataagactttgagatgggcatggtggtatgtgcctgtagtcccagctactaaggaggctgaggtaggagtattaattgaacccaggagtgcyagtccaatgtgggcaacatagcaagaccctgtctcgggagtgggtgcgtgtgtgcgcatgtgttgcgcgcacgcgtgcgtagtagcagcagtatcaattt

SEQ ID NO: 21708 - DNA, 201 bp, Homo sapiens
gcactccagcctgggtgaccctgtctcacaaaacaaaacaaaaatcaggaaatttaacatgaatcaaacactattatctaatccttggtccacattcaaayttcacctatatttcagtaatgtccttctagctcctttatttgagccaataaagaagcatgcattgtacaactatcaatctctctagtttgcttttgtctg

SEQ ID NO: 21709 - DNA, 201 bp, Homo sapiens
ctgaatttgttcatttctaaaatgacagttccatcttaggataaaaggagttaccgtgtgctgcctaactaaattctaaacttgtaatatagcacttttaycacaaatgctactgagtccaaggatattaaaatcatgaaagagcaatattcacagatcctttgtaactctcttattagcaactattctgtcaaccctggc

SEQ ID NO: 21710 - DNA, 201 bp, Homo sapiens
agaagtccttaagaaattctaaaaaatcctcaccaagcagataagcagcagataaacctgataaacacttacatgctgtagtatagtggtaataacctagygtcctggctctgaggtcagttaaaacatatgtaaatcttagctctggcacttactaatcatgtctccctaaacctcaatttctttgatcctgtaaaatgg

SEQ ID NO: 21711 - DNA, 201 bp, Homo sapiens
tgtgtgcgcatgtgttgcgcgcacgcgtgcgtagtagcagcagtatcaattttgtgcaataaaattttgaataaccaattttatgcaaattgatatcaatagagaggagtaatgctgtattgaaattacctgttgccttccctgcttttttagggtgaaaaggtaataaaaagcatgtctaaaagtgatatgaattgcaga

SEQ ID NO: 21712 - DNA, 201 bp, Homo sapiens
gcgccaccagcctggctaattttgtatttttagtagagatggagtttctccatgttggtcatgtgggtctcaaactcccgacctcaggtgatctgcctgcrttgacctcccaaagtgctgggattacaggcatgagccaccacacctggcctattttttaatttaatttaatttaatttaattttttgagacagagttttg

SEQ ID NO: 21713 - DNA, 201 bp, Homo sapiens
gtgtgcgcatgtgttgcgcgcacgcgtgcgtagtagcagcagtatcaattttgtgcaataaaattttgaataaccaattttatgcaaattgatatcaatagagaggagtaatgctgtattgaaattacctgttgccttccctgcttttttagggtgaaaaggtaataaaaagcatgtctaaaagtgatatgaattgcagat

SEQ ID NO: 21714 - DNA, 201 bp, Homo sapiens
gtgcgcatgtgttgcgcgcacgcgtgcgtagtagcagcagtatcaattttgtgcaataaaattttgaataaccaattttatgcaaattgatatcaatagagaggagtaatgctgtattgaaattacctgttgccttccctgcttttttagggtgaaaaggtaataaaaagcatgtctaaaagtgatatgaattgcagatag

SEQ ID NO: 21715 - DNA, 201 bp, Homo sapiens
tgaggaaggagaatcactggaacctgggaggcggagattgcagtgagccaagatcacaccactgcactccagcctgggctacagagtgagactccgtctcaaaaaaaaaaaaaaataaaaaatgtttttttgtggattatgtgcagtacatctttttgtaatttaaagcacatacaacatggtagaaggaatgtgaattaa

SEQ ID NO: 21716 - DNA, 201 bp, Homo sapiens
ggctgaggtggcaagaatctgaagcccaggaggttgaggctgcagtgagctgtgattgtaccactgcactccaacctgggtgacagcgagaccctgtctcaaaaaaaaaaaaaaaaaaaaaatagtttaaacagtagttaaaccagacctacaagaaagctttgccaagagtaagaaatgtgctgtcatcttttaaatcag

SEQ ID NO: 21717 - DNA, 201 bp, Homo sapiens
agttctttgtgagctggctgatctgcaagacaaagaagttggagatggaactacttcagtggtaggtagactggctaaagaatgatcatttttctaaaaaygaccgactttcagaaagttgaagccataagtgggtcatttgtgctgtgtcagaaataagttacatattctgaatgcccagaagattgagcaagaagaaaa

SEQ ID NO: 21718 - DNA, 201 bp, Homo sapiens
gctgaggtggcaagaatctgaagcccaggaggttgaggctgcagtgagctgtgattgtaccactgcactccaacctgggtgacagcgagaccctgtctcaaaaaaaaaaaaaaaaaaaaaatagtttaaacagtagttaaaccagacctacaagaaagctttgccaagagtaagaaatgtgctgtcatcttttaaatcagt

SEQ ID NO: 21719 - DNA, 201 bp, Homo sapiens
ctgcagtgagctgtgattgtaccactgcactccaacctgggtgacagcgagaccctgtctcaaaaaaaaaaaaaaaaaaaaaatagtttaaacagtagttaaaccagacctacaagaaagctttgccaagagtaagaaatgtgctgtcatcttttaaatcagtctgcacgggtattcttttttccttccttcctcatacaa

SEQ ID NO: 21720 - DNA, 201 bp, Homo sapiens
cctgtttgtgccaaattctgctatagtttgggtcatagtacttggctggttacgagtgagtggatcaggcagtctcaaagccaatcgtgcactgctggcakgacataagagatatcagttatcaataagggagcttgacgggagcattctgtattagaaaatagcgagtgaccccaaaagatccaccctttagaaatgtga

SEQ ID NO: 21721 - DNA, 201 bp, Homo sapiens
ctggaaccaagagtgcttgagtgctgacataggtcccatgttaccgtgtcctgtaaacccagcataccccctccccacattcatgtatccaggacatatayttgcaacctgaaaaacataactaagatataatttctaaagattcctatgtattactcttttagatgttactcttacctataaataggttgatgtttaaac

SEQ ID NO: 21722 - DNA, 201 bp, Homo sapiens; identical to SEQ ID NO: 4542

SEQ ID NO: 21723 - DNA, 201 bp, Homo sapiens
tccagcttctcatgaaacctgctgtgtgtgcacagtggtcatggacgctctggaaccaagagtgcttgagtgctgacataggtcccatgttaccgtgtccygtaaacccagcataccccctccccacattcatgtatccaggacatatatttgcaacctgaaaaacataactaagatataatttctaaagattcctatgta

SEQ ID NO: 21724 - DNA, 201 bp, Homo sapiens
atacttacttcacttcagttaatcaaagaagagatataaaaatccttaagacagtctctggccataaggacgaaagcacctaagaagcagattagtatatkgtctttttaacctttttaaagctaatacagtttcagccatgtctgccttacctgtaatacccatatgacagttgtgaaatgcatctgtaagaccatcaca

SEQ ID NO: 21725 - DNA, 201 bp, Homo sapiens
ttagcatttaagtagtaatatttgaagttaaaaacttggaccagtatcttttttctcatttgactaccacattttctcctaataatagattttagtggctrtgcttatgggatagattaaacttgccatgatctgaagagggagggttttttcatgtcctcctcctatatgaaatggctgaacgggtattattacttacga

SEQ ID NO: 21726 - DNA, 201 bp, Homo sapiens
tagattttagtggctatgcttatgggatagattaaacttgccatgatctgaagagggagggttttttcatgtcctcctcctatatgaaatggctgaacggrtattattacttacgacattttggctctgtgttaagcatgatgaatgcaaagagtttgagtagtgactttataagcgtttttctcccccacacttttaaac

SEQ ID NO: 21727 - DNA, 201 bp, Homo sapiens
acagcgagaccctgtctcaaaaaaaaaaaaaaaaaaaaaatagtttaaacagtagttaaaccagacctacaagaaagctttgccaagagtaagaaatgtgytgtcatcttttaaatcagtctgcacgggtattcttttttccttccttcctcatacaacaaagtgtcctttcttccatcaaagccagtccctctacagtaa

SEQ ID NO: 21728 - DNA, 201 bp, Homo sapiens
aaaaaaaaaatagtttaaacagtagttaaaccagacctacaagaaagctttgccaagagtaagaaatgtgctgtcatcttttaaatcagtctgcacgggtrttcttttttccttccttcctcatacaacaaagtgtcctttcttccatcaaagccagtccctctacagtaagtgttctagagtctgtttccttctgctcta

SEQ ID NO: 21729 - DNA, 201 bp, Homo sapiens
gcaaccctttgattatgtccttcttgaaatgctttcggggatggaaggctttgtgatgctgctttgtctggaccatgtcataatactctccaggatagccyctttgttcccatgacttcatgtattatctctctatgccagagactctttcagctgtttctctaagctccaaacacacatacctctatctagtagaatgct

SEQ ID NO: 21730 - DNA, 201 bp, Homo sapiens
tttgaaaacacagatgatatactagtcttgcttagagatattaagcttagtatctagattgtttggtgtaacctgcaaggtttttcacttttctggttctrccttcttttgtgctttcaactctggactcctgtttttgtttgtttgtttgtttttgagacggagttttgctcttgttgcccaggctggagtgcagtggca

SEQ ID NO: 21731 - DNA, 201 bp, Homo sapiens
cggtctcggctcactgcgacctccgccttccgggtttaagtgatactcctgcctcagtctcctgagtatctgggattacaggcgcccaccaccaggcccarctaattttttgtatttttagtagaggcggtttcaccgtgttggccaggttggtctcgaactcctgacctcaggtgatctgcccgcctcagcctcccaaag

SEQ ID NO: 21732 - DNA, 201 bp, Homo sapiens
cttgtagtctcacagtgatacgagcagttatacgcatgggataaaataacattgggccactgtaaattgagatgaagtaaccattttcatctcttctgcakggactagacattgtttctgtatagtatatctaaatatcctgtgtaggcaggacttaagggaactttatgtagacttattttattaaaatgccattttttt

SEQ ID NO: 21733 - DNA, 201 bp, Homo sapiens; identical to SEQ ID NO: 4544

SEQ ID NO: 21734 - DNA, 201 bp, Homo sapiens; identical to SEQ ID NO: 4547

SEQ ID NO: 21735 - DNA, 201 bp, Homo sapiens; identical to SEQ ID NO: 4548

SEQ ID NO: 21736 - DNA, 201 bp, Homo sapiens
tgcagtgagctgtgattgtaccactgcactccaacctgggtgacagcgagaccctgtctcaaaaaaaaaaaaaaaaaaaaaatagtttaaacagtagttaaaccagacctacaagaaagctttgccaagagtaagaaatgtgctgtcatcttttaaatcagtctgcacgggtattcttttttccttccttcctcatacaac

SEQ ID NO: 21737 - DNA, 201 bp, Homo sapiens
gcagtgagctgtgattgtaccactgcactccaacctgggtgacagcgagaccctgtctcaaaaaaaaaaaaaaaaaaaaaatagtttaaacagtagttaaaccagacctacaagaaagctttgccaagagtaagaaatgtgctgtcatcttttaaatcagtctgcacgggtattcttttttccttccttcctcatacaaca

SEQ ID NO: 21738 - DNA, 201 bp, Homo sapiens
gggcttgcgggcagaaccgcggacctcggacgcatttacagagcgcctgaaaccccagtgtttctggacaccccaatgttggagttccccgacttgacgtyttgggcttttttttaaaaaatcttagggtttctcgaaacagtaaagactggggggtgacaaagacttatctctcgttcagctcaggactggaatcccacg

SEQ ID NO: 21739 - DNA, 201 bp, Homo sapiens
aactcatataaaaataacttgaccctacacaaaatgtccttttagcaacattcaaagtaattaactgttacaatttccaaagcggcagaagtattgaagcaaaaaaaaaaaaaaaaaaaaaaaaagaaaagaaaaaaaaaacaaagaaaaaaaacaacaaaaaaaaaccaaaacgtacacccacaaaaaggcaaattgtga

SEQ ID NO: 21740 - DNA, 201 bp, Homo sapiens
caaacttggcagtcataaacccacatctactctaacaagtctgaatggtgcataagtacagtaacagcatgagtacgaatgcccttacacagcacagattytaaacagacagatttatacagacatcattgtgttgtattttaaggaaaaatttccatttacaatttcacattaactcatataaaaataacttgaccctac

SEQ ID NO: 21741 - DNA, 201 bp, Homo sapiens
cacctagcagttccgcccctgccgcaggcattaccgatggcgcctcccggagccggccaatcaggggccccggaggagaacacctccctacgccaaccaaygggagaggcaggccacgcgatggctctaccccgggagccaatccaagcacgagggacggagtacgcacatcgggagaggagagggtggggctgtagcacc

SEQ ID NO: 21742 - DNA, 201 bp, Homo sapiens
cagaccacctagcagttccgcccctgccgcaggcattaccgatggcgcctcccggagccggccaatcaggggccccggaggagaacacctccctacgccamccaatgggagaggcaggccacgcgatggctctaccccgggagccaatccaagcacgagggacggagtacgcacatcgggagaggagagggtggggctgta

SEQ ID NO: 21743 - DNA, 201 bp, Homo sapiens
ctcgaaacagtaaagactggggggtgacaaagacttatctctcgttcagctcaggactggaatcccacgggcgagaatctcgagtgcgagcccggcccgcrgcgggtctcagcacagctctgatgggtccttttgctctcggcggcttcgggaggtcctatgcgtttctcctggcgccagtcattcgctcgcgtgaggggc

SEQ ID NO: 21744 - DNA, 201 bp, Homo sapiens
aggggcgggcggaggcgcgcggggcgcggggcgcggggcgcggggcggaagtgaggccggggcgcggggcgcggggcggaagtgaggccggggtctgggcytgcgggcagaaccgcggacctcggacgcatttacagagcgcctgaaaccccagtgtttctggacaccccaatgttggagttccccgacttgacgtcttgg

SEQ ID NO: 21745 - DNA, 201 bp, Homo sapiens
tcccccgacaggcaactccgagtctgcccccgtccctgcaacgggtgactctcaggatgcccctgtgcccctcacaagtgactctgaggctgcccccgtgyccccctcaggtgactctgaggctcccccgtaccccctacgggtgactctgaggcccgtgcccaccttgggtgacactgaggctgccccatccccgctacg

SEQ ID NO: 21746 - DNA, 201 bp, Homo sapiens
cccctgcacagcctcttctcactctgcagggaccccaacatgggccactcggctgtgcccacacactgggaaccctacactacggaaaacagcggctaccyggagatcaccaagaagatgggcagcagctccatgaagcggagcctgagaaccaacttcctgcgctactggaccctcacctatctggcgctgcccacagtg

SEQ ID NO: 21747 - DNA, 201 bp, Homo sapiens
ggtgggaaggctctggctgccctcaccctgttcccatcactgcagagggctgtgcggtggctggagctgccaccgagcgtctcggtgagggtgacctcacrctggctgagcttacaggccccatcttaagactttgttcgtggtgttctttcacttctcagagcctttcctggctccaggattaatacctgttcacagaaa

SEQ ID NO: 21748 - DNA, 201 bp, Homo sapiens
ctaccccaaatgggtgggggccgaccatagagatgagatccagtacatctttggggagccctttgccaccccactccgggctaccggccccaagacaggayagtctctaaggccatgaccgcctactggaccaactttgccaaaacagggtaagacgtgggttgagtgcagggcggagggccacagccgagaagggcctcc

SEQ ID NO: 21749 - DNA, 201 bp, Homo sapiens
gtgggggccgaccatagagatgagatccagtacatctttggggagccctttgccaccccactccgggctaccggccccaagacaggacagtctctaaggcyatgaccgcctactggaccaactttgccaaaacagggtaagacgtgggttgagtgcagggcggagggccacagccgagaagggcctcccaccacgaggcct

SEQ ID NO: 21750 - DNA, 201 bp, Homo sapiens
tggcagggctgggcaaggacaaacctgaatataaaattcagtgtgtctgctgcccaccagtcctttatgcttggagaagagagagatgtttctctttttcytctcttctatctattaaacctccgctcctaaagtcctcgtgtttgtccctgtcctaaattttcctggtgcatgacaacaaaccccgggtatgtagaccag

SEQ ID NO: 21751 - DNA, 201 bp, Homo sapiens
ctctcccctccaggagtgccaagacctacgcctacctgttttcccatccctctcggatgcccgtctaccccaaatgggtgggggccgaccatagagatgasatccagtacatctttggggagccctttgccaccccactccgggctaccggccccaagacaggacagtctctaaggccatgaccgcctactggaccaactt

SEQ ID NO: 21752 - DNA, 201 bp, Homo sapiens
ctaaggccatgaccgcctactggaccaactttgccaaaacagggtaagacgtgggttgagtgcagggcggagggccacagccgagaagggcctcccaccaygaggccttgttccctcacttgccagtggagggactttgggcaagtcacttaacctccccctgcatcggaatccatgtgtgtttgaggatgagagttactg

SEQ ID NO: 21753 - DNA, 201 bp, Homo sapiens
caagacctacgcctacctgttttcccatccctctcggatgcccgtctaccccaaatgggtgggggccgaccatagagatgagatccagtacatctttgggragccctttgccaccccactccgggctaccggccccaagacaggacagtctctaaggccatgaccgcctactggaccaactttgccaaaacagggtaagac

SEQ ID NO: 21754 - DNA, 201 bp, Homo sapiens; identical to SEQ ID NO: 4575

SEQ ID NO: 21755 - DNA, 201 bp, Homo sapiens
tgaggatgagagttactggcagagccccaatcccgtgcacgtgcacagccagtgcccagtatgcagtgaggggcatggtgcccagggccagctcagagggyggggatggctcaggcgtgcaggtgcagagcagggcttcagccccctgggagtccccagcccctgcacagcctcttctcactctgcagggaccccaacatg

SEQ ID NO: 21756 - DNA, 201 bp, Homo sapiens
cccaagacaggacagtctctaaggccatgaccgcctactggaccaactttgccaaaacagggtaagacgtgggttgagtgcagggcggagggccacagccragaagggcctcccaccacgaggccttgttccctcacttgccagtggagggactttgggcaagtcacttaacctccccctgcatcggaatccatgtgtgtt

SEQ ID NO: 21757 - DNA, 201 bp, Homo sapiens
acccacatcctctgggtgcagggagtgaagtctgtgttctaactggggtctggggaacccgcctgggaaaagaaagggattctgctcctccagccggatgyaagtggaagaaagaataacacatcacaccagaaggttggaagcagaggatggggagggtgctgggcagtaggcgctgggtggtgggcctctggggggtgc

SEQ ID NO: 21758 - DNA, 201 bp, Homo sapiens
gcccccctcaggtgactctgaggctcccccgtaccccctacgggtgactctgaggcccgtgcccaccttgggtgacactgaggctgccccatccccgctaygggtgactctgaggccgcccctgtgtcccccacagatgactccgaggaagctcagatgctgcagtcattagtttctagtgtcccatcagccttggtctca

SEQ ID NO: 21759 - DNA, 201 bp, Homo sapiens
ccccacccttgaatgagacggctttatgctgctctgggacccgcacccagcttggactgcttgctccatggccccaggaaaagctcgtacagataaggtcmgccacttgggtggggggcccacagcatgtcaccctctctgtcccagaagtcacgtgcttggtcccctgtgaagcccctctggggacctaggggacaggca

SEQ ID NO: 21760 - DNA, 201 bp, Homo sapiens
aaagctcgtacagataaggtcagccacttgggtggggggcccacagcatgtcaccctctctgtcccagaagtcacgtgcttggtcccctgtgaagcccctytggggacctaggggacaggcagggcatggagacaaagtatgcccttttctctgacagtgacaccaagccctgtgaacaaaccagaaggcagggcactgtg

SEQ ID NO: 21761 - DNA, 201 bp, Homo sapiens
tgccctgctcagccctgcaccccatggtccttcccactggagagttcttgagctaccttccatcccccatgctgtgtgcactgagagaacactggacaatrgtttctatccactgactctcatgggcctcaactttgccaccttacaaaataatttcagcccaaggcctcattaaagaccttcatgtaataatagccaatt

SEQ ID NO: 21762 - DNA, 201 bp, Homo sapiens
cccatggtccttcccactggagagttcttgagctaccttccatcccccatgctgtgtgcactgagagaacactggacaatggtttctatccactgactctyatgggcctcaactttgccaccttacaaaataatttcagcccaaggcctcattaaagaccttcatgtaataatagccaattagaaggaaaaataaggccga

SEQ ID NO: 21763 - DNA, 201 bp, Homo sapiens
tccctgcaacgggtgactctcaggatgcccctgtgcccctcacaagtgactctgaggctgcccccgtgcccccctcaggtgactctgaggctcccccgtaycccctacgggtgactctgaggcccgtgcccaccttgggtgacactgaggctgccccatccccgctacgggtgactctgaggccgcccctgtgtcccccac

SEQ ID NO: 21764 - DNA, 201 bp, Homo sapiens
attgtaaggctgtggccttctgtgcttgtggatcctcagtctcagtggccttcctcttccccccaccccaactcctgtgttgcgtgtttaacacacctacscccaaccgggacataactaaatcctagactgtggacaaagaatacagtcacctcagggggctgcgagctctaaaggctcagggcccagctacccctttag

SEQ ID NO: 21765 - DNA, 201 bp, Homo sapiens
gaaggttggaagcagaggatggggagggtgctgggcagtaggcgctgggtggtgggcctctggggggtgcccaatggctctggcagagttgacggggcagsggcagagggcagaaggcagagtcaggagtactcctgcctctgctgggtctaagcccaggcacatcactgagcacttgaccagcctgacctcaccatggcc

SEQ ID NO: 21766 - DNA, 201 bp, Homo sapiens
acaggcaactccgagtctgcccccgtccctgcaacgggtgactctcaggatgcccctgtgcccctcacaagtgactctgaggctgcccccgtgcccccctyaggtgactctgaggctcccccgtaccccctacgggtgactctgaggcccgtgcccaccttgggtgacactgaggctgccccatccccgctacgggtgact

SEQ ID NO: 21767 - DNA, 201 bp, Homo sapiens
gatggctcaggcgtgcaggtgcagagcagggcttcagccccctgggagtccccagcccctgcacagcctcttctcactctgcagggaccccaacatgggcsactcggctgtgcccacacactgggaaccctacactacggaaaacagcggctacctggagatcaccaagaagatgggcagcagctccatgaagcggagcct

SEQ ID NO: 21768 - DNA, 201 bp, Homo sapiens
gctaatcctggtgattccacctaccaacctctctgttgttcccattttacagaaggggaaacgggcccaggggcagggagtgtggagagcaggcagacggstggagagaagcaggcaggcagtttgcccagcatggcacagctgctgcctcctattcctgtgcaggaagctgaaagccgagctactccacacccgggtccg

SEQ ID NO: 21769 - DNA, 201 bp, Homo sapiens
ctggggactcctgtctccacctctgctgcctgctctccacactccctggccctgggaccgggaggtttgggcagtggtcctgggctcctgactcaaaggasaggtcaccttcttcttgggcgagctcttcttggggtgctgagaggccttcggcaggtcatcacgacccctccccatttccccaccctgaggccctcagga

SEQ ID NO: 21770 - DNA, 201 bp, Homo sapiens
ttcggcaggtcatcacgacccctccccatttccccaccctgaggccctcaggatggacaagcccaaacaaagcaacccccacggccccgctagaagcaaarcctgctgtgctgggcccagtgacagccaggccccgcctgcctcagcagccactgggtcctctaggggcccgtccaggggtctggagtacaatgcagacct

SEQ ID NO: 21771 - DNA, 201 bp, Homo sapiens
aaattatccaggcatggtggtgcacacctgtgatcccagctactcaggaggctgaggcagcagaatcagttgaacccaggaggtggaggttgcagtgagcmgagattacgccactgcactccagcaggggcaacagagtgagactgtgtctcgaataaataagtaaataaataaataataaaaattaaaaataaattagca

SEQ ID NO: 21772 - DNA, 201 bp, Homo sapiens
atgtttactgtcacaggggacatgtttcagcactttcattgtaaggctgtggccttctgtgcttgtggatcctcagtctcagtggccttcctcttcccccsaccccaactcctgtgttgcgtgtttaacacacctacccccaaccgggacataactaaatcctagactgtggacaaagaatacagtcacctcagggggctg

SEQ ID NO: 21773 - DNA, 201 bp, Homo sapiens
cacggccccgctagaagcaaagcctgctgtgctgggcccagtgacagccaggccccgcctgcctcagcagccactgggtcctctaggggcccgtccagggstctggagtacaatgcagacctcccaccatttttggctgatggactggaacccagccctgagagagggagctccttctccatcagttccctcagtggcttc

SEQ ID NO: 21774 - DNA, 201 bp, Homo sapiens
gatgcccgtctaccccaaatgggtgggggccgaccatagagatgagatccagtacatctttggggagccctttgccaccccactccgggctaccggccccragacaggacagtctctaaggccatgaccgcctactggaccaactttgccaaaacagggtaagacgtgggttgagtgcagggcggagggccacagccgaga

SEQ ID NO: 21775 - DNA, 201 bp, Homo sapiens
ctgctgtgctgggcccagtgacagccaggccccgcctgcctcagcagccactgggtcctctaggggcccgtccaggggtctggagtacaatgcagacctcscaccatttttggctgatggactggaacccagccctgagagagggagctccttctccatcagttccctcagtggcttctaagtttcctccttcctgcttca

SEQ ID NO: 21776 - DNA, 201 bp, Homo sapiens
ctataaatttcccccaagcactgctttcgatttcaccgcatgctgtaagttttggtatgttgtgtttttgttttgtctcaaggtgtcttctaatttccctygtgacttccttttagacccattggttgtttaagagtgtgttaagcctgggcacggtggctcacgcctgtaatcccagcactttgggaggctgaggcaggt

SEQ ID NO: 21777 - DNA, 201 bp, Homo sapiens
cccagctactcaggaggctgaggcagcagaatcagttgaacccaggaggtggaggttgcagtgagcagagattacgccactgcactccagcaggggcaacagagtgagactgtgtctcgaataaataagtaaataaataaataataaaaattaaaaataaattagcaatctgaaaaagataggaagataaaagtataccta

SEQ ID NO: 21778 - DNA, 201 bp, Homo sapiens
ccagctactcaggaggctgaggcagcagaatcagttgaacccaggaggtggaggttgcagtgagcagagattacgccactgcactccagcaggggcaacagagtgagactgtgtctcgaataaataagtaaataaataaataataaaaattaaaaataaattagcaatctgaaaaagataggaagataaaagtatacctag

SEQ ID NO: 21779 - DNA, 201 bp, Homo sapiens
accagctgtggtggtgcacacctgtaatcctagctactcaggaggctgagacaggagaattgcttgaaccttggaggtggaggttgcagtgagctgagatygtgccacggcaccccagcctgggcgatggagcaagactccgtctggagtcggggaggggaagagtgttaagatccttttgtagttgatgaacaatgatga

SEQ ID NO: 21780 - DNA, 201 bp, Homo sapiens
tgggtggtctctcccctccaggagtgccaagacctacgcctacctgttttcccatccctctcggatgcccgtctaccccaaatgggtgggggccgaccatrgagatgagatccagtacatctttggggagccctttgccaccccactccgggctaccggccccaagacaggacagtctctaaggccatgaccgcctactgg

SEQ ID NO: 21781 - DNA, 201 bp, Homo sapiens
gggtggtctctcccctccaggagtgccaagacctacgcctacctgttttcccatccctctcggatgcccgtctaccccaaatgggtgggggccgaccatasagatgagatccagtacatctttggggagccctttgccaccccactccgggctaccggccccaagacaggacagtctctaaggccatgaccgcctactgga

SEQ ID NO: 21782 - DNA, 201 bp, Homo sapiens
gcaccctgcccggccccaccatcccccttaccacccgccaccttgccacctgcctctgctcccaggtaagtggtaacctgcacaggtgcactgtgggtttkgggaaaactggatctccctgcacctgagggtgtagaggggagggagtgcctgagagctcatgaacaagcatgtgaccttggatccagctccataaatacc

SEQ ID NO: 21783 - DNA, 201 bp, Homo sapiens
gggcgttgtagtgggtgcctgtaatcccagctgctcaggaggctgaggcaggagaatcgcttgaactcaggaggtgaagtcttcagtaagcagagatagcrccacctcactccagcctgagccacagagtgggactcagtctcaaaaaaaaaaaaaaaactagctgggaatggtaatgggcacctgtaatcccagctactt

SEQ ID NO: 21784 - DNA, 201 bp, Homo sapiens
aagactccatctcaaaaaaaaaaaaaacaaaatcctaatgcctgattccttcccccaccacactgactgctgagtcagccggtccatcctccaagagcagyggagaggtggggacacattagcccagcacagtgatagggtcacagcaagggctcacagactgcggggagcctgcctggcctttcccctctcagctacctg

SEQ ID NO: 21785 - DNA, 201 bp, Homo sapiens
tgaacccgggaggcagagcttgcagtgagccgagatcgtgccactgcactccagcctgggcaacagaacaagactccatctcaaaaaaaaaaaaaacaaaatcctaatgcctgattccttcccccaccacactgactgctgagtcagccggtccatcctccaagagcagtggagaggtggggacacattagcccagcacag

SEQ ID NO: 21786 - DNA, 201 bp, Homo sapiens
ggcgtgaacccgggaggcagagcttgcagtgagccgagatcgtgccactgcactccagcctgggcaacagaacaagactccatctcaaaaaaaaaaaaaamaaaatcctaatgcctgattccttcccccaccacactgactgctgagtcagccggtccatcctccaagagcagtggagaggtggggacacattagcccagc

SEQ ID NO: 21787 - DNA, 201 bp, Homo sapiens
gaccccaggatgctgcagaatcagtgagaggtgcgtaaggccaaaccccattccccggaccccgctagcacttcaccacctggctcagtgatcaaggggtyatgacctctctttgctggggttatcgagaagtggcaattttataatagttactgaaacttacaaagaggttctggtgcccagagacacttggggtcatct

SEQ ID NO: 21788 - DNA, 201 bp, Homo sapiens
gtaacagatgtttgataatttgttgagagaaaaataataatagaaatttcttgtccaggcacagtggctcatgcctgtaatcccaacactttgggaggccraggcaggcgactcacttgaggacaggagtttgagactagtctggccaacatggcgaaaccctgtctctacaagaaacacaaaaattagctgggcgtggtg

SEQ ID NO: 21789 - DNA, 201 bp, Homo sapiens; identical to SEQ ID NO: 4631

SEQ ID NO: 21790 - DNA, 201 bp, Homo sapiens
gtcggtgagtcacgtgatgcatgtcatggccgcctccatggcccggggaggcgtgagtgccagggttctgctgcaggctgccaggggcacctggtggaacrgacctgggggcacttccgggtcgggggagggggtggcgctggggacaaccagaaagtttcaagcgacaggtacctggggcgcccggggcgggcagcgtta

SEQ ID NO: 21791 - DNA, 201 bp, Homo sapiens
cccatgtccttattcatgcttatctgttgcctgtcaagatgtaacagatgtttgataatttgttgagagaaaaataataatagaaatttcttgtccaggcrcagtggctcatgcctgtaatcccaacactttgggaggccgaggcaggcgactcacttgaggacaggagtttgagactagtctggccaacatggcgaaacc

SEQ ID NO: 21792 - DNA, 201 bp, Homo sapiens; identical to SEQ ID NO: 4620

SEQ ID NO: 21793 - DNA, 201 bp, Homo sapiens
ctccctatgttgcctaggttggtctcaaactcctgggctcaggcaatcctcccacttcagtctctccagtagctgggattgcaggcctgagccactgtacctggctacttttttttttcttttcttttctttttttttttttttgagacagagtctcactctgtcccccaggctagagtgcagtggcgcaatcttggctca

SEQ ID NO: 21794 - DNA, 201 bp, Homo sapiens
agagacaggatctccctatgttgcctaggttggtctcaaactcctgggctcaggcaatcctcccacttcagtctctccagtagctgggattgcaggcctgagccactgtacctggctacttttttttttcttttcttttctttttttttttttttgagacagagtctcactctgtcccccaggctagagtgcagtggcgca

SEQ ID NO: 21795 - DNA, 201 bp, Homo sapiens
gtctcaaactcctggcctcaaatgatctgcccgccttggcctcccaaagtgctgggattataagcgtgagccaccatgcctggcctactttttgacttttyttttctttgagacgcagtcttgctattgtcccccatgctggagtacaatggcgcgatgtcagctcattgcaacctccgcctcctgggttcaagtgattct

SEQ ID NO: 21796 - DNA, 201 bp, Homo sapiens
caaaggagctggtggccagtggcatgggctgggcagccttcaatctcagcaacgtgactggcaacagtcggatcctctgctcagtgtactgcaatggctcycagataacaggctcctctaacatcaccgtgtacagtgagtcgacgtgtccggaggtgggactggtcttgggtagtggtgtgggcaagtggccaatggctc

SEQ ID NO: 21797 - DNA, 201 bp, Homo sapiens
caggctgccaggggcacctggtggaacagacctgggggcacttccgggtcgggggagggggtggcgctggggacaaccagaaagtttcaagcgacaggtayctggggcgcccggggcgggcagcgttaatccgtcagatgccggcggggcggggctcggcgcagccgctcaccgaaccgtgttttccaggctcgcgcccgg

SEQ ID NO: 21798 - DNA, 201 bp, Homo sapiens
gttggtctcaaactcctgggctcaggcaatcctcccacttcagtctctccagtagctgggattgcaggcctgagccactgtacctggctacttttttttttcttttcttttctttttttttttttttgagacagagtctcactctgtcccccaggctagagtgcagtggcgcaatcttggctcactgcaacctctgcctcc

SEQ ID NO: 21799 - DNA, 201 bp, Homo sapiens
ggttggtctcaaactcctgggctcaggcaatcctcccacttcagtctctccagtagctgggattgcaggcctgagccactgtacctggctacttttttttttcttttcttttctttttttttttttttgagacagagtctcactctgtcccccaggctagagtgcagtggcgcaatcttggctcactgcaacctctgcctc

SEQ ID NO: 21800 - DNA, 201 bp, Homo sapiens
tgttgcctaggttggtctcaaactcctgggctcaggcaatcctcccacttcagtctctccagtagctgggattgcaggcctgagccactgtacctggctacttttttttttcttttcttttctttttttttttttttgagacagagtctcactctgtcccccaggctagagtgcagtggcgcaatcttggctcactgcaac

SEQ ID NO: 21801 - DNA, 201 bp, Homo sapiens
atgttgcctaggttggtctcaaactcctgggctcaggcaatcctcccacttcagtctctccagtagctgggattgcaggcctgagccactgtacctggctacttttttttttcttttcttttctttttttttttttttgagacagagtctcactctgtcccccaggctagagtgcagtggcgcaatcttggctcactgcaa

SEQ ID NO: 21802 - DNA, 201 bp, Homo sapiens
ctatgttgcctaggttggtctcaaactcctgggctcaggcaatcctcccacttcagtctctccagtagctgggattgcaggcctgagccactgtacctggctacttttttttttcttttcttttctttttttttttttttgagacagagtctcactctgtcccccaggctagagtgcagtggcgcaatcttggctcactgc

SEQ ID NO: 21803 - DNA, 201 bp, Homo sapiens
cctatgttgcctaggttggtctcaaactcctgggctcaggcaatcctcccacttcagtctctccagtagctgggattgcaggcctgagccactgtacctggctacttttttttttcttttcttttctttttttttttttttgagacagagtctcactctgtcccccaggctagagtgcagtggcgcaatcttggctcactg

SEQ ID NO: 21804 - DNA, 201 bp, Homo sapiens
ccctatgttgcctaggttggtctcaaactcctgggctcaggcaatcctcccacttcagtctctccagtagctgggattgcaggcctgagccactgtacctggctacttttttttttcttttcttttctttttttttttttttgagacagagtctcactctgtcccccaggctagagtgcagtggcgcaatcttggctcact

SEQ ID NO: 21805 - DNA, 201 bp, Homo sapiens
gaggctgaggcaggagaatcgcttgaacctgggaggcggagggaagattgtatacaaagggctgggtactacaattgtctgcttcactccaccggcccttyttctacagatgtcccccccgcccagtggcttcggcgaacggagcagcggtgggagtggcgggggccccctgtctcacttctattcaggctcgcccacttc

SEQ ID NO: 21806 - DNA, 201 bp, Homo sapiens
gatctccctatgttgcctaggttggtctcaaactcctgggctcaggcaatcctcccacttcagtctctccagtagctgggattgcaggcctgagccactgtacctggctacttttttttttcttttcttttctttttttttttttttgagacagagtctcactctgtcccccaggctagagtgcagtggcgcaatcttggc

SEQ ID NO: 21807 - DNA, 201 bp, Homo sapiens
ggatctccctatgttgcctaggttggtctcaaactcctgggctcaggcaatcctcccacttcagtctctccagtagctgggattgcaggcctgagccactgtacctggctacttttttttttcttttcttttctttttttttttttttgagacagagtctcactctgtcccccaggctagagtgcagtggcgcaatcttgg

SEQ ID NO: 21808 - DNA, 201 bp, Homo sapiens
attctacctttcccactggaccatgaaggcaggaacccttctgtctcggcacaaggagagaggtgttaaatggtggggcctgttgatgcgtgggttggggracaaggaaacaaacaccaggacttcttcatgttcctgaaggtgtccaggggcaggagttccttttgcgggtggagccccagaaccctgtgctctctgctg

SEQ ID NO: 21809 - DNA, 201 bp, Homo sapiens
caagccacaatgccaggctgttttgtttcctactttgtcatctgtcccccagtgagattggtgacccatgtccttattcatgcttatctgttgcctgtcargatgtaacagatgtttgataatttgttgagagaaaaataataatagaaatttcttgtccaggcacagtggctcatgcctgtaatcccaacactttgggag

SEQ ID NO: 21810 - DNA, 201 bp, Homo sapiens
cagcgccacggggtggacctggaaggtaggaaccgggcagagggaattaaggaggtccttatacatttgtccaaaaaaaaaaaaaaaaaaaaccacaaatyaggtgtgtctcttcacgtctttttcccaccaaatatggactaaaatccaaacccctcaccatggcctcatctgttgccaagctcttatttgttaagcatt

SEQ ID NO: 21811 - DNA, 201 bp, Homo sapiens; identical to SEQ ID NO: 4627

SEQ ID NO: 21812 - DNA, 201 bp, Homo sapiens; identical to SEQ ID NO: 4629

SEQ ID NO: 21813 - DNA, 201 bp, Homo sapiens
tggccaagcacaggccccctgggacagctaggatttgggggtgcctgccaccggggctctgtaaccctcggtgcccaggccaaagctggggtggtggcagrggttggtcttgctcagggtggagtagcaacagcctattgtcctccatccactctgcatcaagcacctagcactgccagcattccgggctttctgtcactt

SEQ ID NO: 21814 - DNA, 201 bp, Homo sapiens
ctactaaaaatacaaaaaattagctgggcatggtggcgcatgcctgtaatcccagctactcgggaggctgaggcaggagaatcgcttgaacctgggaggcrgagggaagattgtatacaaagggctgggtactacaattgtctgcttcactccaccggcccttcttctacagatgtcccccccgcccagtggcttcggcga

SEQ ID NO: 21815 - DNA, 201 bp, Homo sapiens
ccaatagcagttgcaacgtgggttgggcctgagtgcccgaagctggacacagcgcggaaagagggcgaggcttgaacggccgaaagcgtggcccggatatyccgagaggaaaggggagggcggagggagcggcttgacccacaggaaggtcctgttcattaagctcctgggcaatgccccgcctttaggcttcctaggacc

SEQ ID NO: 21816 - DNA, 201 bp, Homo sapiens
tgccactctatggggcagtgggcggtccccggcactcacctgggtctcagtgagctatgtggcctcacatatttggcgtccacaggctggaacagtttctstgtgcccattcgtgcggtgatgatccctgggttcctggaggaggaagaggaggcgggtacccacgtgccagctctcctcagtcctattagccaaagctag

SEQ ID NO: 21817 - DNA, 201 bp, Homo sapiens
aatcttaaccgctgtgcttccgtcgcagtgggaggccccgccttttcccctgcctgcccttcgggcacctcaggaaggcaccttcctctgtcagaatggcyaccatggtaccatccgtgttgtggcccagggcctgctggactctgctggtctgctgtctgctgaccccaggtgagaccagtcaagccggggagggctgga

SEQ ID NO: 21818 - DNA, 201 bp, Homo sapiens
gtgcccgggagatcgtctgcaacgtgaccctagggggcgagagacgggaggcccgggagaacttgacggtctttagtaagaggaggcgtgggaagggggcrcggcctcagcagtctgggggcgtggcagagggggcggagactagccgaaaaggtggggcctggcttgccccaatagcagttgcaacgtgggttgggcctg

SEQ ID NO: 21819 - DNA, 201 bp, Homo sapiens
gtacttatcagtgccaagcgtccagctcacgaggcaaatacaccctggtcgtggtgatggacattgagggtgagctaatacggggctgcgggtctggaccsgtaagccggggggcgggggggttggagacagaagggacgcatattgacttagcgctttctctgcacagctgggagctcccactttgtccccgtcttcgtg

SEQ ID NO: 21820 - DNA, 201 bp, Homo sapiens
tgccctattcagtacctgtgcgtcaagcctcaattcctacttcctaaccctagattctacccgggccctgagcccatcatccagttcggcattcgcacttycatctgtccccagggtgaacgtggtgttcgtagaccgctcaggccagcggatcccagtgagtggcagagtcggggacaatgttcttcacctggcccagcg

SEQ ID NO: 21821 - DNA, 201 bp, Homo sapiens
ggcacctggtggaacagacctgggggcacttccgggtcgggggagggggtggcgctggggacaaccagaaagtttcaagcgacaggtacctggggcgcccrgggcgggcagcgttaatccgtcagatgccggcggggcggggctcggcgcagccgctcaccgaaccgtgttttccaggctcgcgcccggctggagaggagg

SEQ ID NO: 21822 - DNA, 201 bp, Homo sapiens
gctcaaatactgttttgtggacaaatacaaagggacaggtttgtggggccatggggcgggccagggcagggagtgaccatccctgaagatgggagggcctrgctcactgtctgctgctctgagcttcaggcccagtattgccccccaggccaacatggcaggttgccccaatctgcctgtcatcctgtcatcttgggacag

SEQ ID NO: 21823 - DNA, 201 bp, Homo sapiens; identical to SEQ ID NO: 4612

SEQ ID NO: 21824 - DNA, 201 bp, Homo sapiens
caggatctccctatgttgcctaggttggtctcaaactcctgggctcaggcaatcctcccacttcagtctctccagtagctgggattgcaggcctgagccactgtacctggctacttttttttttcttttcttttctttttttttttttttgagacagagtctcactctgtcccccaggctagagtgcagtggcgcaatctt

SEQ ID NO: 21825 - DNA, 201 bp, Homo sapiens
ttatgaaaggcctacctaaagttctgttctggaatccagcagccaatagtctaggacagggattggaatgtgagatagatttatttgttcatttatttatytgagacagagtctcgctctatcacccaggctggactgcaatggcatgatcttggcttactgcaacctctacctccagggttcaagtgattctcctgcctt

SEQ ID NO: 21826 - DNA, 201 bp, Homo sapiens
acaggatctccctatgttgcctaggttggtctcaaactcctgggctcaggcaatcctcccacttcagtctctccagtagctgggattgcaggcctgagccactgtacctggctacttttttttttcttttcttttctttttttttttttttgagacagagtctcactctgtcccccaggctagagtgcagtggcgcaatct

SEQ ID NO: 21827 - DNA, 201 bp, Homo sapiens
ttcgtcaacgtaacacataatggtacttatcagtgccaagcgtccagctcacgaggcaaatacaccctggtcgtggtgatggacattgagggtgagctaayacggggctgcgggtctggaccggtaagccggggggcgggggggttggagacagaagggacgcatattgacttagcgctttctctgcacagctgggagctc

SEQ ID NO: 21828 - DNA, 201 bp, Homo sapiens
gacaggatctccctatgttgcctaggttggtctcaaactcctgggctcaggcaatcctcccacttcagtctctccagtagctgggattgcaggcctgagccactgtacctggctacttttttttttcttttcttttctttttttttttttttgagacagagtctcactctgtcccccaggctagagtgcagtggcgcaatc

SEQ ID NO: 21829 - DNA, 201 bp, Homo sapiens
cacctggcccagcgccacggggtggacctggaaggtaggaaccgggcagagggaattaaggaggtccttatacatttgtccaaaaaaaaaaaaaaaaaaamccacaaatcaggtgtgtctcttcacgtctttttcccaccaaatatggactaaaatccaaacccctcaccatggcctcatctgttgccaagctcttatttg

SEQ ID NO: 21830 - DNA, 201 bp, Homo sapiens
tgggggaccagatgctgaatgcgacagtcatgaaccacggggacacgctaacggccacagccacagccacggcgcgcgcggatcaggagggtgcccgggaratcgtctgcaacgtgaccctagggggcgagagacgggaggcccgggagaacttgacggtctttagtaagaggaggcgtgggaagggggcgcggcctcagc

SEQ ID NO: 21831 - DNA, 201 bp, Homo sapiens; identical to SEQ ID NO: 4623

SEQ ID NO: 21832 - DNA, 201 bp, Homo sapiens
ggaccctgggttcgagggggtgactctgaagtttcagataaagccggactccagcctgcagatcatccccacgtacaggtaggggccggctggggccaggycgccctttctcccagttacaacgcaaacaccagtgtgggaggtaggggtgctctctggcgtcggtgtggaccctcacctgtgctctacgttacacgtggc

SEQ ID NO: 21833 - DNA, 201 bp, Homo sapiens
tcccctcctctctcagggctcccggagcgtgtggagctggcacccctgcctccttggcagccggtgggccagaacttcaccctgcgctgccaagtggaggrtgggtcgccccggaccagcctcacggtggtgctgcttcgctgggaggaggagctgagccggcagcccgcagtggaggagccagcggaggtcactgccact

SEQ ID NO: 21834 - DNA, 201 bp, Homo sapiens; identical to SEQ ID NO: 4626

SEQ ID NO: 21835 - DNA, 201 bp, Homo sapiens; identical to SEQ ID NO: 4617

SEQ ID NO: 21836 - DNA, 201 bp, Homo sapiens
gtcctgttggggaattgtgaatgggctggtacattggaccaccagttgccccctgcttggatgatgcttttctccacccactctaccacagggtggcgggrcctcacatccagaagtttcaggactgcggagagtacgcccctccatatcacgcgtttattcactgctctcagagataaatccggaagttaacagcagccc

SEQ ID NO: 21837 - DNA, 201 bp, Homo sapiens
cttgtatctccacaggaagtacatgacctgctcagtgactatgagctcaaatactgttttgtggacaaatacaaagggacaggtttgtggggccatggggygggccagggcagggagtgaccatccctgaagatgggagggcctggctcactgtctgctgctctgagcttcaggcccagtattgccccccaggccaacatg

SEQ ID NO: 21838 - DNA, 201 bp, Homo sapiens
cctgcagatcatccccacgtacaggtaggggccggctggggccaggccgccctttctcccagttacaacgcaaacaccagtgtgggaggtaggggtgctcyctggcgtcggtgtggaccctcacctgtgctctacgttacacgtggcccagtctctggttgacaacttgagctggtgccagatacagtcctgccgctcctg

SEQ ID NO: 21839 - DNA, 201 bp, Homo sapiens
actggggaaccctgtgcctgtctgcccaggatcggccgtgccctggagttggggtgtgtctgccaagactctgggccacacctgtctgcttccctgggccmccctgcccccatctgcaactgtctgtgctctgtccctagaagcccggcatcctgggagactcacccctgggcgccctccagcctggggcccagccagcca

SEQ ID NO: 21840 - DNA, 201 bp, Homo sapiens
ccaggtccctctggcctgcatgccaggagtcggtcaccgccctgtgcttcctccaagagacagtggagaggctgggtcagtcccctgcccaggacaccccrgtcctggggccttgctgggacccgatggctctggggactcagggccgcctgctgctggacagggattccaaggacacacagaccaggatcagccaaaagg

SEQ ID NO: 21841 - DNA, 201 bp, Homo sapiens
ggagcgccgctgctgggcaccagtttgtgaatagactctgctcggaagctctatagacatgcctgggaaaaaactccaggtctatcccctcagtgtgtgcrcacacacacacgcacacctagaaacacaggtatacatatagactcacacatacaaagatgcaaatatacacacagagacatagacacacaaagacataag

SEQ ID NO: 21842 - DNA, 201 bp, Homo sapiens
ctgctacctgcacctttgctgcccgggcattcagcaagtgccggtgcccagcccaaccacttcccttagcactgctacctggcttggccactgtctggaaygagagcccttccttccccacccgttgctgattatctcttttttttttttttttttgagatggagttttgctcttgttgcccaggctggagtgcagtggcg

SEQ ID NO: 21843 - DNA, 201 bp, Homo sapiens
cactctcgaggtggacggcgagttcttgcacaggaacagtagcgtccagctgcgagtcctgtgtgagtcggtcaccctgacctttaatccctccacccctkccctggaaagattagacgctcctctgcaccactgtgcctcgggtgtgttgggtgtctgatcacacatggtggttccacagatggtcccaaaattgaccga

SEQ ID NO: 21844 - DNA, 201 bp, Homo sapiens
aggtggaggttgtagtgagctgagatgacaccactacactccagcctgggcaacagagcgagactccatctgcaaaaataataataataataataataatwttactaatgagaggcaaagccaggccattcagatattagttgcctcctcgggggatggctgataccttgatactaaatcttcatttcggagggctgttgg

SEQ ID NO: 21845 - DNA, 201 bp, Homo sapiens
cattcagcagcccccaccatcctccccacttccagttcctggaatgggagctgcctcccccaccactaccccctgcgctcagtcagcttcctccctccccsacctctggccccccacccacccagctagcttgccctcggctaacactgcccgtgtcaccaccctagggaagacgacatgctagacatggcccccctcctc

SEQ ID NO: 21846 - DNA, 201 bp, Homo sapiens
gtgtcgcgcgcctgtagtcccagctgcttgggaggctgaggctcaagaattgcttgaacccgggaggtggaggttgtagtgagctgagatgacaccactayactccagcctgggcaacagagcgagactccatctgcaaaaataataataataataataataatattactaatgagaggcaaagccaggccattcagatat

SEQ ID NO: 21847 - DNA, 201 bp, Homo sapiens
gcttgaactcaggaggtgaagtcttcagtaagcagagatagcgccacctcactccagcctgagccacagagtgggactcagtctcaaaaaaaaaaaaaaaactagctgggaatggtaatgggcacctgtaatcccagctacttgggaggctgaggcaggagaatcgcttgaacccaggaggtggaggttgcactgagcaga

SEQ ID NO: 21848 - DNA, 201 bp, Homo sapiens
tggggcgcccggggcgggcagcgttaatccgtcagatgccggcggggcggggctcggcgcagccgctcaccgaaccgtgttttccaggctcgcgcccggckggagaggaggacgcgggcggcccggagcggcccggggacgtgtgagtgcagggggccaagtcccccattcctcatcccacggaattcctctggtccccat

SEQ ID NO: 21849 - DNA, 201 bp, Homo sapiens
agctctactaaaaaaatataaaaaaattagccaggcgtggtggcaggcacctgtagtcccagctacttgggaggctgaggcaggagaatggcgtgaacccrggaggcagagcttgcagtgagccgagatcgtgccactgcactccagcctgggcaacagaacaagactccatctcaaaaaaaaaaaaaacaaaatcctaat

SEQ ID NO: 21850 - DNA, 201 bp, Homo sapiens; identical to SEQ ID NO: 4637

SEQ ID NO: 21851 - DNA, 201 bp, Homo sapiens
ggaagccaccacccctgctgccatccgtgcttggccctgctgggggtgaccgggaggccctgggcttgggtcccccagcggcccagctcactcctcccccmgcccctgtggggctccgaggctctggcctcagaggcctccagaaagacagtgggcctctgccgacgccccctggggtaaggccctgccctgcgcgcggca

SEQ ID NO: 21852 - DNA, 201 bp, Homo sapiens
ggcaacagagtgagaccctgtctcaaaaaaaaaaaaaaaaaaaatcctggccgggtgcagtggcttacgcctgtaatcccagcactttgggaagctgaggygggcagatcatgaggtcaggagatcaagaccatcctggctaacatggtgaaaccccagctctactaaaaaaatataaaaaaattagccaggcgtggtggc

SEQ ID NO: 21853 - DNA, 201 bp, Homo sapiens
gggttcacgccattctcctgcctcagcctcccgagtagctgggaatacaggcgcctgccaccgcgcccggctaatttttttgtatttttagtagagacggrgtttcaccttgttagccaggatggtctcgatctcctgacctcgtgatccacccgcctcggcctcccaaagtgctgggattacaggcgtgagccaccgcgc

SEQ ID NO: 21854 - DNA, 201 bp, Homo sapiens
ccatggcactccaggctgggcaacagagtgagaccctgtctcaaaaaaaaaaaaaaaaaaaatcctggccgggtgcagtggcttacgcctgtaatcccagsactttgggaagctgaggcgggcagatcatgaggtcaggagatcaagaccatcctggctaacatggtgaaaccccagctctactaaaaaaatataaaaaaa

SEQ ID NO: 21855 - DNA, 201 bp, Homo sapiens
gcttgagccgggaggttgaggcagtaagctatgactgagccatggcactccaggctgggcaacagagtgagaccctgtctcaaaaaaaaaaaaaaaaaaaatcctggccgggtgcagtggcttacgcctgtaatcccagcactttgggaagctgaggcgggcagatcatgaggtcaggagatcaagaccatcctggctaac

SEQ ID NO: 21856 - DNA, 201 bp, Homo sapiens
ctggagtgcagtggtgcgatcatagctcactgcagcctcaacctcttgggctcaagcgatcctcacacctcagtctcctgaggagctgggaccacaggcaygcacctccatgcccagctaatttttaaatttgtggtagagacggagtctcattgtgttgtccaggctggtctcaaactcctgacctcaagtgagccaccc

SEQ ID NO: 21857 - DNA, 201 bp, Homo sapiens
cgcttgagccgggaggttgaggcagtaagctatgactgagccatggcactccaggctgggcaacagagtgagaccctgtctcaaaaaaaaaaaaaaaaaaaatcctggccgggtgcagtggcttacgcctgtaatcccagcactttgggaagctgaggcgggcagatcatgaggtcaggagatcaagaccatcctggctaa

SEQ ID NO: 21858 - DNA, 201 bp, Homo sapiens
acctgggaggcagaggttgcattgagccgagatcataccattgcactccagcctgggcaaagagagcgaaactccacctcaaaaaaaaaaaaaaaaaaaaattagccaggtgtggtggtgcgcacatgtagtcccagctactcgggaggctggggtgggaggatcgcttgagccgggaggttgaggcagtaagctatgact

SEQ ID NO: 21859 - DNA, 201 bp, Homo sapiens
cgcactgccctcctcccaccgcagccttcgtgaccctgctgaatggggagcaggccgaggccgcaatcaatgctttccaccagagccgcctgcgggagcgygaactgtcggtgcagctgcagcccacggatgccctgctgtgtgtggccaacctgccccccagcctcacacagcagcagttcgaggagctggtgcggccct

SEQ ID NO: 21860 - DNA, 201 bp, Homo sapiens
tgagtggcagagtcggggacaatgttcttcacctggcccagcgccacggggtggacctggaaggtaggaaccgggcagagggaattaaggaggtccttatmcatttgtccaaaaaaaaaaaaaaaaaaaaccacaaatcaggtgtgtctcttcacgtctttttcccaccaaatatggactaaaatccaaacccctcaccat

SEQ ID NO: 21861 - DNA, 201 bp, Homo sapiens
tcactgtggcctcaaactcctgggctcaagcaatcctcccactttggcctcccaaagtgctaggatcacaggcatgagccaccataccatgccaggcattktattacttcttgccactctatggggcagtgggcggtccccggcactcacctgggtctcagtgagctatgtggcctcacatatttggcgtccacaggctgg

SEQ ID NO: 21862 - DNA, 201 bp, Homo sapiens; identical to SEQ ID NO: 4624

SEQ ID NO: 21863 - DNA, 201 bp, Homo sapiens; identical to SEQ ID NO: 4614

SEQ ID NO: 21864 - DNA, 201 bp, Homo sapiens
ggctgggagcgccgctgctgggcaccagtttgtgaatagactctgctcggaagctctatagacatgcctgggaaaaaactccaggtctatcccctcagtgygtgcgcacacacacacgcacacctagaaacacaggtatacatatagactcacacatacaaagatgcaaatatacacacagagacatagacacacaaagac

SEQ ID NO: 21865 - DNA, 201 bp, Homo sapiens
actgcgctggcctggccttaccttcttatgtggagatcaaaggtcacagggtcatgaccagctacaggtactctcctagcctgtttccacatctcaaaatrgggctggcagtgcttcatgatcaggttgttgtgaacagctgcccattcattcctccactcgaacattcactaaacttaattttttttttttttgagacag

SEQ ID NO: 21866 - DNA, 201 bp, Homo sapiens
agccttcaatctcagcaacgtgactggcaacagtcggatcctctgctcagtgtactgcaatggctcccagataacaggctcctctaacatcaccgtgtacrgtgagtcgacgtgtccggaggtgggactggtcttgggtagtggtgtgggcaagtggccaatggctcaggagagtggggaccctcagtttgcaaagaatgg

SEQ ID NO: 21867 - DNA, 201 bp, Homo sapiens
ggtgggaggattgcctgattctgggagtccgaggctgcagtgagccatgatcgcaccacagcaccatgacactacagcctgagcaacagagctagaccctyatctcaaaaacagagagacagtcctgggctcggacccccagctctgtgggcttgagtgggtccctctcgtgtaagtggggtattggtgccccatttaaac

SEQ ID NO: 21868 - DNA, 201 bp, Homo sapiens
cactgggcctggtctcaccaaacatttgttgagcatctgatgagtagcaggcgttgaagtgatgtcctccgaggagcccacctttaatgttaggtgacccygctgaatggagggtgggcttgacagtgaagcagcttgaggttcacacatcagtccctcgacttaggaattgtgtggccttgatcactctgtgacccctct

SEQ ID NO: 21869 - DNA, 201 bp, Homo sapiens
gaacaggccagactcactctctaagagcccccagaaggtcttgatccccagagatcccaaaggggacattcccccagcactcgctgtggactctgagtacrtaaccttcagttgcttcatcctgtagcaaccctgagaggcaggtatcactcccattttcaggtgaggataccaaggcacagaggggtcaagtaacttgcc

SEQ ID NO: 21870 - DNA, 201 bp, Homo sapiens
atgataatcactgcgctaatgataatagcaaacgcttcgactggcccagctctaagccctctaagtttattaactcaaagctcacagttctcggcaggacyaccctgtctcctccccagtccctggggtgagtgggtgggtttgcaggacccgctaagtgccatcctcccctcctctctcagggctcccggagcgtgtgga

SEQ ID NO: 21871 - DNA, 201 bp, Homo sapiens
gccaatggctcaggagagtggggaccctcagtttgcaaagaatggaccacagttctgacccagagctcagacctggacatttgtgtgtgagatacaaagayagacagagacagagacacagagacagagacagagatatagagacgcatctcaatctcatgccaaggcagcagttgtgaaatcaattaacttgggccccaa

SEQ ID NO: 21872 - DNA, 201 bp, Homo sapiens
tcccgccactgcactccagcctgggtgacagagtgagactctgtctcaaaacaaacaaacaaaaaccaagtagaatcctggatagacagtggctcagggamtcagctgtccccaaatcacctaccttagctctttgtgcaggggatgggggatccccaagatcttcaaagatagggaggtatcctcaagatcttcaaaggt

SEQ ID NO: 21873 - DNA, 201 bp, Homo sapiens
atctcagcaacgtgactggcaacagtcggatcctctgctcagtgtactgcaatggctcccagataacaggctcctctaacatcaccgtgtacagtgagtcracgtgtccggaggtgggactggtcttgggtagtggtgtgggcaagtggccaatggctcaggagagtggggaccctcagtttgcaaagaatggaccacagt

SEQ ID NO: 21874 - DNA, 201 bp, Homo sapiens
agctcaggagaccctcggtcaccatggctgatgggacagtgatagagttggagtgtggcgggcactggggaaccctgtgcctgtctgcccaggatcggccrtgccctggagttggggtgtgtctgccaagactctgggccacacctgtctgcttccctgggcccccctgcccccatctgcaactgtctgtgctctgtccct

SEQ ID NO: 21875 - DNA, 201 bp, Homo sapiens
aacctgggaggcagaggttgcattgagccgagatcataccattgcactccagcctgggcaaagagagcgaaactccacctcaaaaaaaaaaaaaaaaaaaaattagccaggtgtggtggtgcgcacatgtagtcccagctactcgggaggctggggtgggaggatcgcttgagccgggaggttgaggcagtaagctatgac

SEQ ID NO: 21876 - DNA, 201 bp, Homo sapiens
ttcttttcttttctttttttttttttttgagacagagtctcactctgtcccccaggctagagtgcagtggcgcaatcttggctcactgcaacctctgcctyccgggttcaagcgattctcctgcctcagcctcctgagtagctgggattacaggcgcatgccaacacgcccagctaatttttgtatttttagtagggacag

SEQ ID NO: 21877 - DNA, 201 bp, Homo sapiens; identical to SEQ ID NO: 4609

SEQ ID NO: 21878 - DNA, 201 bp, Homo sapiens
gggatgaatatatcagggatcctgattttatcattaaaggggaagatatgttgggaggggttatgaaaggcctacctaaagttctgttctggaatccagcrgccaatagtctaggacagggattggaatgtgagatagatttatttgttcatttatttatctgagacagagtctcgctctatcacccaggctggactgcaa

SEQ ID NO: 21879 - DNA, 201 bp, Homo sapiens
agctctttggaggccgagacggacggatcacctgaggtcaggagtttgagaccagcctgacaaacatggagaaatcccgtctctactaaaaatacaacaamaaaaaaaaggtagccaggcatggcgccacgcgcctgtaatctcagctactcaggaggctgagacaggagaattgcttgaacccagaagactgcggttgcg

SEQ ID NO: 21880 - DNA, 201 bp, Homo sapiens
ggtgcaggcctgtaatcccagctactcaggaggctgaggcaggagaatcgcttgtacctgggaggtggaggttgcagtgagctgagatcacgccactgtaytccagcctgggtgacaaagcaacactgcatctcaaaaacagaaaaaaaaaaaaaaaaaaaaaacaggccaggcgcagtggctcacgcttgtaatgccagc

SEQ ID NO: 21881 - DNA, 201 bp, Homo sapiens
agagacaaggtttcaccatgttggccaggctggtctcgaactcctgacctcaggtgattcacccgcctcggcctcccaaaatgctgggattataagcgtgrgccaccccgcccagccagctaaaggtataccctctaagagcatgttgcctgggtaatagcacagtctgcagctaggttctgaatcccatctctgccaggt

SEQ ID NO: 21882 - DNA, 201 bp, Homo sapiens
tcttgtgacccgcctgcctcagcctccaaagtgctggaattacaggcgtgagcccggcctctttttttttttttttttttgttgttgttattttttttttwttttttttttttttttgagacggagtctcgctctgtcgcccaggctggactgcggactgcagtggcgcaatctcggctcactgcaagctctgcttcccgg

SEQ ID NO: 21883 - DNA, 201 bp, Homo sapiens
cgatctcttgatcttgtgacccgcctgcctcagcctccaaagtgctggaattacaggcgtgagcccggcctctttttttttttttttttttgttgttgttrtttttttttttttttttttttttttttgagacggagtctcgctctgtcgcccaggctggactgcggactgcagtggcgcaatctcggctcactgcaagct

SEQ ID NO: 21884 - DNA, 201 bp, Homo sapiens; identical to SEQ ID NO: 4622

SEQ ID NO: 21885 - DNA, 201 bp, Homo sapiens; identical to SEQ ID NO: 4688

SEQ ID NO: 21886 - DNA, 201 bp, Homo sapiens; identical to SEQ ID NO: 4689

SEQ ID NO: 21887 - DNA, 201 bp, Homo sapiens; identical to SEQ ID NO: 4690

SEQ ID NO: 21888 - DNA, 201 bp, Homo sapiens; identical to SEQ ID NO: 4691

SEQ ID NO: 21889 - DNA, 201 bp, Homo sapiens
ataaaccctggaagtggtgcagccactctgggaccaggcagctccggccagaggcctcaatccatggcagccagctgctcgatggcacggcgcactttctycgcagtttcctcaaattctttcttcttattgttggtttcctttgcctggaaataaagaatagacacatgacactgaaaccagagcttcccagtcacatcc

SEQ ID NO: 21890 - DNA, 201 bp, Homo sapiens
gaatggctttgtgcttagttttaattgtagtttgtgctattctgtgaattaacaattcaaacaaaataagaaagccatgttgttaaacagtagaggagccrgggactctgtctccattctctcatcacacacaagtcatgcatctaccaaaaaaaaaaaaacaaaaaaacacaacaacaaaaaaactgtcctctgaggagg

SEQ ID NO: 21891 - DNA, 201 bp, Homo sapiens
aaaaaacaaagacctttattgggttaaatttgtttgctgacagaggttaacttaaaaaaaattactttttttttgagacggactttcgctcttgttgcctwggctggtgtgcaaaggcacgatcttggctcaccgcaacctctgcctcccgggttcaagagattctcctgcctcagcctcccgagtagctgggattacagg

SEQ ID NO: 21892 - DNA, 201 bp, Homo sapiens; identical to SEQ ID NO: 4693

SEQ ID NO: 21893 - DNA, 201 bp, Homo sapiens
ccaggcatggtggcatgcgcctgtagtcccagctactgggaggctgaggcaggaggattgcttgagtccaggaggtcgaggctatagtgagctgtgattgygccactgtactccagcctgagcaacagagcaagaccctgccaaagaaaacaaacaaaacactcctgccacccaggtctacaactcgcctctccttctagt

SEQ ID NO: 21894 - DNA, 201 bp, Homo sapiens
caaaataagaaagccatgttgttaaacagtagaggagccagggactctgtctccattctctcatcacacacaagtcatgcatctaccaaaaaaaaaaaaacaaaaaaacacaacaacaaaaaaactgtcctctgaggaggcacaggtgtgacagataaggaacctgcagctcagattcaacaggcacctgccaagtccaca

SEQ ID NO: 21895 - DNA, 201 bp, Homo sapiens; identical to SEQ ID NO: 4695

SEQ ID NO: 21896 - DNA, 201 bp, Homo sapiens
ccgcaacctcaaattcttgcgttcaagtgaacctcccactttagcctcccaagtagctgggactacaggcgcacgccatcacacccggctaattgaaaaawttttttttttgtttagatggaatctcactttgttgcccaggctggtctcaaactcctgggctcaagtgatcatcctgcttcagcgtccgacttgttggta

SEQ ID NO: 21897 - DNA, 201 bp, Homo sapiens; identical to SEQ ID NO: 4696

SEQ ID NO: 21898 - DNA, 201 bp, Homo sapiens; identical to SEQ ID NO: 4698

SEQ ID NO: 21899 - DNA, 201 bp, Homo sapiens; identical to SEQ ID NO: 4699

SEQ ID NO: 21900 - DNA, 201 bp, Homo sapiens
cagcagcagcagcattcccggctacaaggacccttcgagccccgttcgccggccgcggacccggcccctccctccccggccgctagggggcgggcccggawcacaggactggagctgggcggagacccacgctcggagcggttgtgaactggcaggcggtgggcgcggcttctgtgccgtgccccgggcactcagtcttcc

SEQ ID NO: 21901 - DNA, 201 bp, Homo sapiens
gcagcagcagcagcattcccggctacaaggacccttcgagccccgttcgccggccgcggacccggcccctccctccccggccgctagggggcgggcccggwtcacaggactggagctgggcggagacccacgctcggagcggttgtgaactggcaggcggtgggcgcggcttctgtgccgtgccccgggcactcagtcttc

SEQ ID NO: 21902 - DNA, 201 bp, Homo sapiens
gaccggaccggggccggaggcggcgcgccctgcaagaggtgaggggcctcgggcggcgcaagtccagctctcccggggacatcccgtccaccagccctctycccccgtgcccactgctggggccggcgcgccgaggtcctcggacatctcccgggaccagctcacaatctcaggcgcccgcggggcgcggggactaagtgt

SEQ ID NO: 21903 - DNA, 201 bp, Homo sapiens; identical to SEQ ID NO: 4697

SEQ ID NO: 21904 - DNA, 201 bp, Homo sapiens
agtccagctctcccggggacatcccgtccaccagccctcttcccccgtgcccactgctggggccggcgcgccgaggtcctcggacatctcccgggaccagmtcacaatctcaggcgcccgcggggcgcggggactaagtgtggacgggacaggcacccgcccgggccctctccccgcacgcgtctcctcttccagcggctc

SEQ ID NO: 21905 - DNA, 201 bp, Homo sapiens
ggccgctagggggcgggcccggatcacaggactggagctgggcggagacccacgctcggagcggttgtgaactggcaggcggtgggcgcggcttctgtgcygtgccccgggcactcagtcttccaacggggccccggagtcgaagacagttctagggttcagggagcgcgggcggctcctgggcggcgccagactgcggtg

SEQ ID NO: 21906 - DNA, 201 bp, Homo sapiens
aaacccgctttttcggggatcccgcgcccccctcctcacttgcgctgctctcggagccccagccggctccgcccgcttcggcggtttggatatttattgasctcgtcctccgactcgctgacaggctacaggacccccaacaaccccaatccacgttttggatgcactgagaccccgacattcctcggtatttattgtctg

SEQ ID NO: 21907 - DNA, 201 bp, Homo sapiens
gctctcctggctctcacctgcgctcggtccctctctccccacaggaaacttcctcctggccaaccctgtgtctggcagccccatcgtgacgggtgtggccstgcagcagggcaagatcatcctcaccgccaccttccccaccagcatgctcgtctcccaggtcctgccgccagcccccggcctggccctgccactgaagcc

SEQ ID NO: 21908 - DNA, 201 bp, Homo sapiens
tcaaggagaggtaatagtaaaagagatactattcaaaatcctgtcctccaaaattgttaaattctaattgccaaagaagtagagtaagtagaattctaccraagtaaaatgttcataatctattctcaaaaggagaaaaagcacaagccacaaaataatcttatcttggatgtttgtttctacacatacaaaactaaaaag

SEQ ID NO: 21909 - DNA, 201 bp, Homo sapiens
tgaaatagatgttactaaccttgatgattattctttctttttcagtgagatcaacataatcttggagttgagaccctacttaccaaaatgttaggataggrtgccattatgtattcttcatgaaaatatttacaggttaggtagactccttatttttggtacatttaaaaaatacatacagaaaagaatatttaccataga

SEQ ID NO: 21910 - DNA, 201 bp, Homo sapiens; identical to SEQ ID NO: 21365

SEQ ID NO: 21911 - DNA, 201 bp, Homo sapiens
tcaaggggaaaaaaatgtcttggtctagaaaagttaattttgcacccaaatctagtgcctccatattaattcttacatagagaaatgtgactctgctgcakaaaacaaaaggtagtaaaacattaggaacatgatttcttgcatcataccacattaaaatttaaaggaaacaatgaggacttacagcgttctgccaagtca

SEQ ID NO: 21912 - DNA, 201 bp, Homo sapiens
atttctgaatttccagacaagatatttttctcagaacctagagacaggtccaaagtgacaactcctcccatttacccaggactgagtagcttcctgaaacrcaagacttttagttctaaattcagaaaagtcctgaggaagaaagaccaaagataggttttgagtacatagtgttgtgtggaagcccaaggccctgaccca

SEQ ID NO: 21913 - DNA, 201 bp, Homo sapiens
atgatctacccttactcatatgcttacaaactcggtgagaacaatgctgagttggtaagtagcaaagtagtaggtatgacattttactattgagatttttwaaattctaatcctgaaaaaaaaatcattataagaacactttctggaagtccctttattgatttttttggtagtagaattgaaaaacttattacagattta

SEQ ID NO: 21914 - DNA, 201 bp, Homo sapiens; identical to SEQ ID NO: 21368

SEQ ID NO: 21915 - DNA, 201 bp, Homo sapiens
gttagcttaaaaacataccatcctaatcctgtgattaaatggatattttactatataatatatacataatagggacaactttaaggactccttgataaggrctcctatgaaaacaactccctaatttgaaagtttaaaacatccccacaagaacttcactaggtgatccttgccattaacatcatatgtttttccagaaat

SEQ ID NO: 21916 - DNA, 201 bp, Homo sapiens
caaatcaatattgaatgtctacatgtatcaagttccaataaggacagatatgacctcacatcctttaggggaaaacagactttaaataaggaattgcagtrgtatttaacagatggaaagaagagtaaagtgctggagttcagaagaatagagcaagtctaggggtcagggagggctgtcctaggaaatgattcttcagct

SEQ ID NO: 21917 - DNA, 201 bp, Homo sapiens; identical to SEQ ID NO: 21372

SEQ ID NO: 21918 - DNA, 201 bp, Homo sapiens
tataatatatacataatagggacaactttaaggactccttgataaggactcctatgaaaacaactccctaatttgaaagtttaaaacatccccacaagaayttcactaggtgatccttgccattaacatcatatgtttttccagaaattggagcctctcgaaacccctgtgatgaaacttactgtggacctgccgcagagt

SEQ ID NO: 21919 - DNA, 201 bp, Homo sapiens
caatgaattctaacacatgaacatctgtttcacagacacgcttatcccaaacattgttataactctttcctgcctacatccccgagggaaccagattcccyagcttcttttatcatatgtggatttttaaatcattattttgatttattcaaaaggaaaaatgcaataaaataagagaagacctataaatttaaccacatt

SEQ ID NO: 21920 - DNA, 201 bp, Homo sapiens
cttcagaattatcccacctgagaggtgaaggagttggagtaattcatcattcgcttttcaggattcttggttgaaccacaaagaataatttccttggtacygcctgtctacctggagctgataacttggcttttcccagttctacaggaaagagccctcaggtacagagaggcagatcttagcaaggggagtacactgagc

SEQ ID NO: 21921 - DNA, 201 bp, Homo sapiens; identical to SEQ ID NO: 21373

SEQ ID NO: 21922 - DNA, 201 bp, Homo sapiens
gaaagaaaaccatttataagcaattaagctgttctgaagtggcactagatatacacaaggttctgctagaaccaccaccaagaacatcatgcaagcatttratgctttgagtggaaagctagcatcttaatacaggctcttccaaagcagaccctgagacaaagattcaagggaaagaattttatctgggaagtgcaggga

SEQ ID NO: 21923 - DNA, 201 bp, Homo sapiens
atttccagccatgtttctcctaggaagtatcagagactaactccagtatagtgggtctgtgtcacacatgcaacactccagagtgttgtatgtatgttgaraggtttgctaactggttttctccatgtcaaactgaaatttttaagcaacctcaggttagttctgtaagtttctgtcaaacatatttatgagatttatttg

SEQ ID NO: 21924 - DNA, 201 bp, Homo sapiens
gaaggattctttagttgttaggcagccggctgattaaattgatattcttataatgctatcatttaaagatatctcttgatcatccaataagtgttctatayggttctttgtcacatttataattttataacttcagttttctaacttcataatgtatagtttaattccctacatctacatcctatatttcactccatgttt

SEQ ID NO: 21925 - DNA, 201 bp, Homo sapiens
ttaaaatgaatgagacagtttgatatctcaaggagcttgtaatctcagggaaaggagaaggcttcacaaatattcaactagaatacaaaaataaataaacratatgaagaaataaaagcaaaacactatgagactatatagaaaaggaaataattaacacccacaaaagaagcagacttgtcaaagtcaatgaattgccta

SEQ ID NO: 21926 - DNA, 201 bp, Homo sapiens
aaaatatgagtttgtggaaataatactttatcacactctgatatacactacacacagagagagataaaataaatgagtgtttcactgatgggatactgggygattttctctgacaaacacataagtttctatgaatagattcaccaatgtgaagggattcacactatagctcaagaaaattgagaaataaatgctttgatc

SEQ ID NO: 21927 - DNA, 201 bp, Homo sapiens; identical to SEQ ID NO: 3996

SEQ ID NO: 21928 - DNA, 201 bp, Homo sapiens
attttgatttccctcacacctaaaaaaaaaaatttaattactaactgaaaatcttaattgccctccacttggaaccacagtgtatggattgagataaactytccagtgtgtttacagttccaattacagcacaccacaagccatccacaaataattatgtcctcctttagtggatattggtcactctttttagctgtccag

SEQ ID NO: 21929 - DNA, 201 bp, Homo sapiens
ggccgaggcaggcggatcacaaagtcaggagctcgagaccatcctggctaacacagtgaaaccccatctctactaaaactacaaaaaaaaaaaaaaaaaaagtagccgggtgtggtggcaggcgcctgtagtccccgctactcgggaggctgaggcaagaaaatggcatgaacccaggaggtggagcttgcagtaagcaga

SEQ ID NO: 21930 - DNA, 201 bp, Homo sapiens
tctgtttactccttactcatcagttctaggtagcactcaggttgagagaatggtttttccagaatcatcgtttggcccagttgttaaactcacacctcaaragaaaaaaaaagcgtcaagagaactactcctttagtttttgtgcctgttcgcctgcctggcactataggtctcaaagaacacaattaagcccttttcatc

SEQ ID NO: 21931 - DNA, 201 bp, Homo sapiens
cttgcacaagaattacttggatcatatcactaggttaagtagaaaaatgaaaatgggtcctgaataagcatataatacgatccaaattgttacttacatgytttgaatgccttaaaaataatgtacagggcatttgtttggcagtgtgcttttatttatttccttacttattcctgtttcttttgcagaatgccctggcta

SEQ ID NO: 21932 - DNA, 201 bp, Homo sapiens
agcatttaccctatttgaacatggtttgaacagttagccccctttgattggccaaaactcagttattggcacaagtgtaggttacatctgtatacaactctgtttagtttgtacttcagtatgtacagggaaacctgtaggccaaacttaaaatatgtaagtagtcagctttaggcttaacttgatttagcatactcaata

SEQ ID NO: 21933 - DNA, 201 bp, Homo sapiens
cagcatttaccctatttgaacatggtttgaacagttagccccctttgattggccaaaactcagttattggcacaagtgtaggttacatctgtatacaactctgtttagtttgtacttcagtatgtacagggaaacctgtaggccaaacttaaaatatgtaagtagtcagctttaggcttaacttgatttagcatactcaat

SEQ ID NO: 21934 - DNA, 201 bp, Homo sapiens
aaatatcaagaatatacatctaagaaggtagagtaaataccatcatccactgaaacagagagaggtttactatgcaggtttcagtcaatattctctattaataatacttcctagtgatttagagtcatccttctcttcctggaacaaagcggagatactcatacaaaaggaacattttttaaaagatgtaacttttttaca

SEQ ID NO: 21935 - DNA, 201 bp, Homo sapiens
aggagtgagcaagtggagaaggaagaagactgggagcacaaagagagggagaggcatttttttaatcctttttttaatgcttgtgcaagagatgttgggggtaattgcttcagctgtgttcttcacactgcctctgaagccctgccatggccaacaatttgtgacttggtccgtatttctcttgatcaacctgtcactctg

SEQ ID NO: 21936 - DNA, 201 bp, Homo sapiens
gcaatctcggctcactgcaacctctgcctcccaggttcaagcgattctcctgcctcagcctcctgagtagctgggattatgggcgcccaccaccatgcccrgctaattttcatatttttagtagatatggggtatcaccatgttggctaggctggtctcaaactcctgacctcaggtgatccacccacctcggcctcccaa

SEQ ID NO: 21937 - DNA, 201 bp, Homo sapiens
cctttgcagggacatggatgaagctggaaaccatcattctcagcaaactaacaaaagaacagaaaatcaagcaccacaagttctcactcataagtgggagstgaacaatgagaacacatgaacacagggaggagaacatcccacactggggcctgtcagagggtagggggagggatagcattaggagaaatacctaatgta

SEQ ID NO: 21938 - DNA, 201 bp, Homo sapiens
taaatttttagagaagtgacatgacaaaggaaaaggactgggactctctagggacagcaacttgggaaagacaaccaacaaaaaaatggttaagtaagtaaagcttgttaactgtagattcctccagcattgcccccaggactatacgtgtttaaagctgccgtcagtggttgttgttcttggtagagcaggggcaagata

SEQ ID NO: 21939 - DNA, 201 bp, Homo sapiens
atctcatggaactttttcccaagcttgatgaagttctgctgtgccatatggacatgtacagttgctaaatgataattttccaaaaataagcttcaattctscaaaatggcagatagaaagcagctggtgttactcaacagagataagccctcctagagctcaccacagagaggagagcatcatgtctgcagatgccacagc

SEQ ID NO: 21940 - DNA, 201 bp, Homo sapiens
tcttttctgaaataactccccatttaggagcttgcctcttctataatataaaatcctattgcctttttaacatcagaattgaagcaacaaagttctatttkcatagtaagtggtctaggaattgatgacagaatatgatgatgaaaagaaggaggaggaggaaataatgacaataataatatgagaggaaaaataattttt

SEQ ID NO: 21941 - DNA, 201 bp, Homo sapiens
tttaccacctggctgataaagtattaatgctataggaattggaatccttgaagtcttacggccacgccctcatcagtttgacataagattctactaaactrgtttcaacattagaataaggaaaggaaaattcctactttgtaaaaatcatattattctgatttcatcaccaacctcacagttttccaggcatatgtagaa

SEQ ID NO: 21942 - DNA, 201 bp, Homo sapiens
attcaaaacactaaaagtgttcaagcaagaaagcacttccaaaccacaaaccaagctactatgcctatttcaacactggtgctagggtttctgtaagatcrctctgagtcatcaaacatctccaaagcatctttagctctgtccttgccatttaacttgatattgctttgaggaacaaggtgcaatttcttgtctgtaaat

SEQ ID NO: 21943 - DNA, 201 bp, Homo sapiens; identical to SEQ ID NO: 3983

SEQ ID NO: 21944 - DNA, 201 bp, Homo sapiens
tatctcctattgttcactgagaaaactgatgctttgtttaattgttgtgatcacttttccttgtgagttctcttgaacgttatgctactgtctgattgtcygttggcatgtatacatcacaccaatattctggaacaccacatactaaaatgaaaactttttgagtctgtgttactgcgctggcagctgtcaaaataattc

SEQ ID NO: 21945 - DNA, 201 bp, Homo sapiens
taagcacacaatcagtattgtttcatgaccaaacttgtcatgaagttatcctgacctaaatacatactcagatcattcattttaactttctatgtacaaayctgaacaaaaggaagatccatctatctgtcttctgtattgacacaactggctctcttaaaactctctcctccctagccttcatggatactacactattcc

SEQ ID NO: 21946 - DNA, 201 bp, Homo sapiens
ccagggatgctgccaaacatcctgcaatgcacagaacagtcccacacaacaaagaactatctggtacaaaatatcaattgtgccaaggctgaggtccctgrggtagatgaggaagggaagagcaccatgtgaatgctgcagtaaattgtgctaaataatgaagtgccagtctcccagttcttataacctctaaagtgtctc

SEQ ID NO: 21947 - DNA, 201 bp, Homo sapiens; identical to SEQ ID NO: 3986

SEQ ID NO: 21948 - DNA, 201 bp, Homo sapiens
ccaaaatgtgaaagcgactttggaactgggtaacaggcagagaggttggaacagtttggagggctcagaagaagataggaaaatgtggaagagtttggaamctcctagagacttgttgaatggctttgacaaacatgctgatagtgatatgaacaataaggttcaggctgaggtggtctcagatggagatgaggaacttgt

SEQ ID NO: 21949 - DNA, 201 bp, Homo sapiens
atccaaacctgccaaaatccaatggaaaaggccttcatttaccaagctaacacaacttacatgagaaattatataactgaagttgaaaagatgcatttcarcaatcaggaagagccagaattagaaatcagactgttttttttttccagaagctgagaataagagaagttagctttagtaatatttaattctaaatcattc

SEQ ID NO: 21950 - DNA, 201 bp, Homo sapiens; identical to SEQ ID NO: 3988

SEQ ID NO: 21951 - DNA, 201 bp, Homo sapiens; identical to SEQ ID NO: 21393

SEQ ID NO: 21952 - DNA, 201 bp, Homo sapiens
cctctttttgttcctagtttcaggtatgtctttattggcagcatgaaaatgaactaatatggtaaattggtaccagtagggtggggcattgccgaaaagawaccccaaaatgtgaaagcgactttggaactgggtaacaggcagagaggttggaacagtttggagggctcagaagaagataggaaaatgtggaagagtttg

SEQ ID NO: 21953 - DNA, 201 bp, Homo sapiens
aatgcatggcttgcatgttgcctgggctctctttacctgacagtgacctgggagttctctgggtatcatagagccagtgagcacagcatccaaacctgccraaatccaatggaaaaggccttcatttaccaagctaacacaacttacatgagaaattatataactgaagttgaaaagatgcatttcaacaatcaggaagag

SEQ ID NO: 21954 - DNA, 201 bp, Homo sapiens; identical to SEQ ID NO: 3989

SEQ ID NO: 21955 - DNA, 201 bp, Homo sapiens; identical to SEQ ID NO: 21395

SEQ ID NO: 21956 - DNA, 201 bp, Homo sapiens
caattaaacctctttttgttcctagtttcaggtatgtctttattggcagcatgaaaatgaactaatatggtaaattggtaccagtagggtggggcattgcygaaaagataccccaaaatgtgaaagcgactttggaactgggtaacaggcagagaggttggaacagtttggagggctcagaagaagataggaaaatgtgga

SEQ ID NO: 21957 - DNA, 201 bp, Homo sapiens
gatttagaccatgaaatcataagcagagagaggaaattagtgctcctcaccacttgagggcccaaatgcatggcttgcatgttgcctgggctctctttacytgacagtgacctgggagttctctgggtatcatagagccagtgagcacagcatccaaacctgccaaaatccaatggaaaaggccttcatttaccaagctaa

SEQ ID NO: 21958 - DNA, 201 bp, Homo sapiens; identical to SEQ ID NO: 3991

SEQ ID NO: 21959 - DNA, 201 bp, Homo sapiens; identical to SEQ ID NO: 21397

SEQ ID NO: 21960 - DNA, 201 bp, Homo sapiens
ttcagacctcacaggagagatacatacagtcagggccccaggaccatgttggatccactggacccagaccaaccagaggaagagggaacccaaatattagrgtgggaagcaagtcataaacagtagacagaatggtatggggcaagcccttaaccatatggattttatatagttcaggctgtatgactgtatattggagct

SEQ ID NO: 21961 - DNA, 201 bp, Homo sapiens; identical to SEQ ID NO: 21400

SEQ ID NO: 21962 - DNA, 201 bp, Homo sapiens; identical to SEQ ID NO: 21401

SEQ ID NO: 21963 - DNA, 201 bp, Homo sapiens; identical to SEQ ID NO: 3997

SEQ ID NO: 21964 - DNA, 201 bp, Homo sapiens; identical to SEQ ID NO: 3998

SEQ ID NO: 21965 - DNA, 201 bp, Homo sapiens
cactcctgccatcaatggttgactcaagtgccacccagactgttggcactcgacactgagttcttccctcatcccctgccctcactgacactgctggaccragagacctgagggtaggtttatggtgacagccccagaattttccccaaaacctgctggcttttttgcagcaccaattccatgttcagctgctgggcaacc

SEQ ID NO: 21966 - DNA, 201 bp, Homo sapiens; identical to SEQ ID NO: 4000

SEQ ID NO: 21967 - DNA, 201 bp, Homo sapiens
gaaaaggtatgtagcttaaaccctccctgactaaacagcctggtgaagacactcctgccatcaatggttgactcaagtgccacccagactgttggcactcracactgagttcttccctcatcccctgccctcactgacactgctggaccgagagacctgagggtaggtttatggtgacagccccagaattttccccaaaac

SEQ ID NO: 21968 - DNA, 201 bp, Homo sapiens; identical to SEQ ID NO: 21416

SEQ ID NO: 21969 - DNA, 201 bp, Homo sapiens; identical to SEQ ID NO: 21417

SEQ ID NO: 21970 - DNA, 201 bp, Homo sapiens
gcatcacaaatacgactgcttaagtgccaaaaacctggcccgcttaatgaccaatcagagaactacatgatcgttcaatctattcagaacctttttttttyccctgaggtaaatatagttaagctgtaaatattcttactgttttccatcaagtgtgctttttcttaaaatactgcttccttttcagcatcaaaaattcaa

SEQ ID NO: 21971 - DNA, 201 bp, Homo sapiens
aatccataggagaggactttttgtttggttagttggtgggctgattttcagctttttaatttttttcatagagtggagatgttgtaaccctgtcttataarctaatagaattaggaaagctgcctccatccacagcagtttgtttttcatcccaatggtttgtcaacataatgaactagataaacaatctgcacaagaaat

SEQ ID NO: 21972 - DNA, 201 bp, Homo sapiens
tcaggcctcacttgttactgaaaactcagcagaaacttacaaagacacaagaacaattgggaggatgccaaacacacaagccaaataaactgaagattctycttcaggcttcagtttctttgcttttcctacatacatctcacccagcatttggctaggcactcctaactaagaatgttgaggttatcagaaaaattggcc

SEQ ID NO: 21973 - DNA, 201 bp, Homo sapiens
tacacctatttaattcacttattcttcacaattgtgcttggattacccgtgaaattttcagggacctcagacaaagctaagcatcatttcaagttatttcyccattaagtattttcactgcacatgcatgttaggcagacgtcaccaaaacaacaacttaaaagttaaatacatcggatttttgttattattaaactaaca

SEQ ID NO: 21974 - DNA, 201 bp, Homo sapiens
tgaataagtatctattttttaacttaacttagcaaaacttaagggtgtaagttaccaaagagatttacaaaactgtttttaagtagatatattataaaacrtaattattgtttgaaagcatattcataaattcttaccccacttacacctatttaattcacttattcttcacaattgtgcttggattacccgtgaaatttt

SEQ ID NO: 21975 - DNA, 201 bp, Homo sapiens
ttaaagcatccaggaggatgtgcataagttatataaaaataactacagcattttataaagggagttaagcaccagtggattttggaatctgcaaggatccstagaacaaatcacccaccagatactgagggatgcctctacttctaaataatccatgagtcaaagaggaaggctcaaggaaaagcaaaaatatatattgaa

SEQ ID NO: 21976 - DNA, 201 bp, Homo sapiens; identical to SEQ ID NO: 3990

SEQ ID NO: 21977 - DNA, 201 bp, Homo sapiens
aaaatgaagaaatgacaaaacaggattgttgttattgtgagattaatatattttaaagttttacattagtatatagacccttatatgaataaaaatgaagkaactatattattcacaagataacataatttataaacatatacagttaacgagtacatcaaagagcccagtgatggggcataaggcaaacctgtataatga

SEQ ID NO: 21978 - DNA, 201 bp, Homo sapiens
cagagcgataatccatttcatttcactggcagagttgggagagggcatttaacaaggtcagctttaacactgttttcctgggatgctgaatgtggtttgtwactgttgatgctctgtgttttggaataaggttgtaagactaggtttaaaagaaggtattgacctgtcattttcctataaaagtggagcagagatggcttt

SEQ ID NO: 21979 - DNA, 201 bp, Homo sapiens; identical to SEQ ID NO: 3994

SEQ ID NO: 21980 - DNA, 201 bp, Homo sapiens
attatatctttagtctcatctagaaataatgtcacaaatctgcactcaagaatctgtagatcataaaacataaaatgaaccgtgggtttattctattttartatttctgtagaagacatctcaactaataaagccatgtcacatttttttcctttgctgctaatggagtatttgcaaaactctgcacactgccgaaaaaac

SEQ ID NO: 21981 - DNA, 201 bp, Homo sapiens
gatttggagctggtgcgggtgactgtcaagcgcagatggccagttaccgacgtaatctgtgtatctgggaggcatgtgctataagaaggcagctgctaaamcaaatgaatcaagccacagtttttaagaaggaaaagtgtagattggaaaaggataaaagttttgaatgcatgcagctgtgcagggctatgatcaatgctt

SEQ ID NO: 21982 - DNA, 201 bp, Homo sapiens
gaaatgtatattctctacttccactctcccatcggccatcgattactttggaggcatgcagctctcatagagaccacctttgacattggtttggtctattscagaatggcatggccacaggtcaaatggatcacagtaaaaagtgctattggatcaggggtctgcctctgcaaatctgctgtcttagctaaatgccctctt

SEQ ID NO: 21983 - DNA, 201 bp, Homo sapiens; identical to SEQ ID NO: 21421

SEQ ID NO: 21984 - DNA, 201 bp, Homo sapiens; identical to SEQ ID NO: 21422

SEQ ID NO: 21985 - DNA, 201 bp, Homo sapiens; identical to SEQ ID NO: 3999

SEQ ID NO: 21986 - DNA, 201 bp, Homo sapiens
taagcttttggggaaaaaaaggctagtcatttctaatgctggctctttctcattgtggaaattcatctttttggacatcagttacatcatttttcaagtayggtgagttggcttggtgaaagaaggcttttatattttatattttattttattttattttattttattttattttattttattttatttttgagatggagt

SEQ ID NO: 21987 - DNA, 201 bp, Homo sapiens
ggtttgaacagttagccccctttgattggccaaaactcagttattggcacaagtgtaggttacatctgtatacaactctgtttagtttgtacttcagtatrtacagggaaacctgtaggccaaacttaaaatatgtaagtagtcagctttaggcttaacttgatttagcatactcaatatctaacagacacaaatacatgt

SEQ ID NO: 21988 - DNA, 201 bp, Homo sapiens
taatttaaaatcttagatcgcactgtgattccgacaatggaaaaaaaaacatgaaatattaactatagcattttggtagcaagaaataaaaacttggaaarcatttagtgccataatgtcttctttttctgcctaaattagattgccataagccctgtagtattataaatccatggtaacttttaaaagagctgacagtgt

SEQ ID NO: 21989 - DNA, 201 bp, Homo sapiens
acctctttgagcctcagtttactcatctataaatagggtcctattcaacctcaggcttataagaaggatagagtaaattaatgtatggcaaagtgattgayagatatcagacccttagcaaatattagtgatattgatgatagctctgtgtttcaaaaaagaaagccagaggggaaaatcaaaaggggttttcttcctggt

SEQ ID NO: 21990 - DNA, 201 bp, Homo sapiens
gaggttgcagtgagccaagatcgtgccactgcactccagcctgggcgaaagagtgagactccgtctcaaaaaacaaacaaacaaacaaacaaacaaacaaaaaaacttgtatgattatgctcttagaggccatgaattatctgcttgatctcttggggctgccactgagtaatccagaagaccattaaattccccagtaag

SEQ ID NO: 21991 - DNA, 201 bp, Homo sapiens; identical to SEQ ID NO: 21426

SEQ ID NO: 21992 - DNA, 201 bp, Homo sapiens
ggaggttgcagtgagccaagatcgtgccactgcactccagcctgggcgaaagagtgagactccgtctcaaaaaacaaacaaacaaacaaacaaacaaacaaaaaaacttgtatgattatgctcttagaggccatgaattatctgcttgatctcttggggctgccactgagtaatccagaagaccattaaattccccagtaa

SEQ ID NO: 21993 - DNA, 201 bp, Homo sapiens; identical to SEQ ID NO: 21428

SEQ ID NO: 21994 - DNA, 201 bp, Homo sapiens
agtgtgattggccaaatccccaggggacatttggccatgtctggaatcacttttggttgtcgcaacttgaaagaggagagtgccactggcacttagtaggkagaggccagggatgctgccaaacatcctgcaatgcacagaacagtcccacacaacaaagaactatctggtacaaaatatcaattgtgccaaggctgaggt

SEQ ID NO: 21995 - DNA, 201 bp, Homo sapiens; identical to SEQ ID NO: 21429

SEQ ID NO: 21996 - DNA, 201 bp, Homo sapiens; identical to SEQ ID NO: 21431

SEQ ID NO: 21997 - DNA, 201 bp, Homo sapiens; identical to SEQ ID NO: 21432

SEQ ID NO: 21998 - DNA, 201 bp, Homo sapiens
cagagcttctcgacaagttagacttttatgtcctgcctgtgctcaatattgatggctacatctacacctggaccaaggtatatgcaccaatactgagagargctgatgaaattaaaaccaacgcctctctattatatttgtcctaactatgtagtccactttcagagccgattttggagaaagactcgctccacccatact

SEQ ID NO: 21999 - DNA, 201 bp, Homo sapiens; identical to SEQ ID NO: 21433

SEQ ID NO: 22000 - DNA, 201 bp, Homo sapiens
aacacataagaaatacaaatgtgtctgcaactatcattgagaaaagaacttcatgaagatgaaagctgagagccaggaaggttgttttcatttgttataayaaatatcttaaggagctgtcttaagatatcttcaatagttacagttcttgaagtaaaattacaaaatatagttgctaaagagcccaaaggaaaattatat

SEQ ID NO: 22001 - DNA, 201 bp, Homo sapiens
ctttacagggaagctctcttattatgtaaaataaaggtagaaacacataagaaatacaaatgtgtctgcaactatcattgagaaaagaacttcatgaagaygaaagctgagagccaggaaggttgttttcatttgttataacaaatatcttaaggagctgtcttaagatatcttcaatagttacagttcttgaagtaaaat

SEQ ID NO: 22002 - DNA, 201 bp, Homo sapiens
aaattaactcaataataatcccataacccaaagagagctactcttaatattatagtatattcttatagacacttttctatatacatgctattttcattttyttacataattaacattctataattttgtatcatgctttctaacctaatatgtcacaagcatatactatctactttattatatttcaactacatttttata

SEQ ID NO: 22003 - DNA, 201 bp, Homo sapiens
tagacacttttctatatacatgctattttcatttttttacataattaacattctataattttgtatcatgctttctaacctaatatgtcacaagcatataytatctactttattatatttcaactacatttttataataattacatattatttcaccctacaactacgttataatttatttcagcagtcaactattgttaa

SEQ ID NO: 22004 - DNA, 201 bp, Homo sapiens
tacttcaagaaaagagatctgtaattttttttttttttttttacctgaacccagcaccatgatctggtgactatattgggaaggattctggaatattgctstaagcaaattcaggagtaagtataggatatactacctacacgcatttggggctcattccaaaggttgcctggagaaaaacaccaggttagaattatgtaa

SEQ ID NO: 22005 - DNA, 201 bp, Homo sapiens
aacacaagaccatgcttcaagcaagtttatcatggaatctgatgctagaccatcagtcctgagaatgaaaactgtagcccatccacagaggcactctcctytgactaagtaggacctgtcaacagccaatactccatggatcagggaaagcatttcatgtggtttagaatcactcttctggctgtaatgcaataccggaga

SEQ ID NO: 22006 - DNA, 201 bp, Homo sapiens
gtggagaaggaagaagactgggagcacaaagagagggagaggcatttttttaatcctttttttaatgcttgtgcaagagatgttgggggtaattgcttcarctgtgttcttcacactgcctctgaagccctgccatggccaacaatttgtgacttggtccgtatttctcttgatcaacctgtcactctgtcagttaaaatt

SEQ ID NO: 22007 - DNA, 201 bp, Homo sapiens
aaaaatgctaagaggaaatacgagcaaacaaatagtttcaaaaatgggtataatgcaggagtgagcaagtggagaaggaagaagactgggagcacaaagaragggagaggcatttttttaatcctttttttaatgcttgtgcaagagatgttgggggtaattgcttcagctgtgttcttcacactgcctctgaagccctgc

SEQ ID NO: 22008 - DNA, 201 bp, Homo sapiens; identical to SEQ ID NO: 21435

SEQ ID NO: 22009 - DNA, 201 bp, Homo sapiens
gatgacaaattttgagagaaagtaaggatgcaattttttcaaatgccaactcatggacccctaagatttttttcccctaagaaaaccctgctttagaagasgaaagctacaggaaaatgtttctattgcactctcttcttccctgtccccagacttttcctgaatcactcataatccctttacctatattcttttttcctt

SEQ ID NO: 22010 - DNA, 201 bp, Homo sapiens
ggtacttctttttgaagtatcaattaagatcagtggcaacttcaaagtaattgtaagtataagtaattttcaaggtatttgcaaccattacattgtaataygaaaatattttttgtttctattagagacctagtcatggatgttgctaataatacagaagtttgtagcctatatttatagttgagggagatgacaaatttt

SEQ ID NO: 22011 - DNA, 201 bp, Homo sapiens
cggaggttgcagtgagccaagatcgtgccactgcactccagcctgggcgaaagagtgagactccgtctcaaaaaacaaacaaacaaacaaacaaacaaacaaaaaaacttgtatgattatgctcttagaggccatgaattatctgcttgatctcttggggctgccactgagtaatccagaagaccattaaattccccagta

SEQ ID NO: 22012 - DNA, 201 bp, Homo sapiens
tattattccctaaacaatacagcataacagctatttacatagcatttgtaatgtattctatattattagtaatctagaaatgatgatttaaagcatccagraggatgtgcataagttatataaaaataactacagcattttataaagggagttaagcaccagtggattttggaatctgcaaggatccctagaacaaatcac

SEQ ID NO: 22013 - DNA, 201 bp, Homo sapiens
gcggaggttgcagtgagccaagatcgtgccactgcactccagcctgggcgaaagagtgagactccgtctcaaaaaacaaacaaacaaacaaacaaacaaacaaaaaaacttgtatgattatgctcttagaggccatgaattatctgcttgatctcttggggctgccactgagtaatccagaagaccattaaattccccagt

SEQ ID NO: 22014 - DNA, 201 bp, Homo sapiens; identical to SEQ ID NO: 21438

SEQ ID NO: 22015 - DNA, 201 bp, Homo sapiens
acacagtagaagtttgagcaaagagggaaatgcaccaagaaatgcagccaaggtataggagggattcaccttgctccaagccaggccctttgtcattagaagcagtttttacagctcaggataaaagtgggcaattgtctgtttaccttagtcaatataatacagtcagtaaaattacctaatcatcaaagtagaatattt

SEQ ID NO: 22016 - DNA, 201 bp, Homo sapiens; identical to SEQ ID NO: 21439

SEQ ID NO: 22017 - DNA, 201 bp, Homo sapiens
gcacagacaagtcggctagaggtcagggcctcagggcctcccccactgaggaccgagagcataaatacctcagacacactgtaagccattcatgtgggaarggttgctgtccagtagaggttgctaacttttttgtcatgctatctgttgacatctattaaccccttctcagaatatttttaaatgcatgaaataaaattt

SEQ ID NO: 22018 - DNA, 201 bp, Homo sapiens; identical to SEQ ID NO: 21440

SEQ ID NO: 22019 - DNA, 201 bp, Homo sapiens
gtaacctaacagtttgcctaaacttcctttgtcatagaacacatgaagtttatgtttgcacagacaagtcggctagaggtcagggcctcagggcctccccmactgaggaccgagagcataaatacctcagacacactgtaagccattcatgtgggaagggttgctgtccagtagaggttgctaacttttttgtcatgctat

SEQ ID NO: 22020 - DNA, 201 bp, Homo sapiens; identical to SEQ ID NO: 21441

SEQ ID NO: 22021 - DNA, 201 bp, Homo sapiens
ttcattgttcaaaaactaaagataaattggcatggaaacacataccagactagagactaccaaataatatagagagtatgtatggatggatatatatatakagagagagagagacagagagtatggatttattaaaatttgaccttatataagagggggaaaatgactacatgaagataaaggttttagtcaagcctctca

SEQ ID NO: 22022 - DNA, 201 bp, Homo sapiens
taatactttatcacactctgatatacactacacacagagagagataaaataaatgagtgtttcactgatgggatactgggcgattttctctgacaaacacrtaagtttctatgaatagattcaccaatgtgaagggattcacactatagctcaagaaaattgagaaataaatgctttgatcctttcataaacttttcattc

SEQ ID NO: 22023 - DNA, 201 bp, Homo sapiens; identical to SEQ ID NO: 21442

SEQ ID NO: 22024 - DNA, 201 bp, Homo sapiens
aactcataggcttgtgaaggaggcagctcctgtcattattgctttgctatttggatgctgatccacagaaaggttaaataccgtttccaaggtcacggagmgttttcctgacagagcctacttaagcattcattgccgctgacacagggctctagggaaaaggaaacagaggaggcgaggaaaagccctaggctacaatga

SEQ ID NO: 22025 - DNA, 201 bp, Homo sapiens
aattgtctgcaaggtaagatgagcaaaatctaagcagacattctgactgagagagggcataagacaacttggagattctgccaaatccataggagaggacyttttgtttggttagttggtgggctgattttcagctttttaatttttttcatagagtggagatgttgtaaccctgtcttataagctaatagaattaggaaa

SEQ ID NO: 22026 - DNA, 201 bp, Homo sapiens; identical to SEQ ID NO: 21443

SEQ ID NO: 22027 - DNA, 201 bp, Homo sapiens
agaacagcaaatattgcagaacagcaaatgctgctgcctgatccttcctctggaagcttcgtctcagaggggcacccggctgtatgaggtgtcagtcggcscctactgggaggtgtctcccacttaggctactcgggggtcagggacccacttgaggaggcagtctgtccatactcagatctcaatctctgtgctgagaga

SEQ ID NO: 22028 - DNA, 201 bp, Homo sapiens
agaccccaacagaaattttgatgctggttggtgtggtaagtatctggctagccattttgcatgtatccattgaaaaacataagaggaaaaatatgaaaacrcaacagtatctaaaataaaaaaagcaagttttatattttaaagttctaaccttctaaaagcaccaaaaaaaaaaaaaccagtttaattcatttgaccaaa

SEQ ID NO: 22029 - DNA, 201 bp, Homo sapiens; identical to SEQ ID NO: 21444

SEQ ID NO: 22030 - DNA, 201 bp, Homo sapiens
atgattaccagtagtgggacaaatcaacactgagtcccacctgataggattcaatgagaatacggtatcacttctataatactcctatcaaaatgcataayctgaatcaaaccataagaaaatatcaaagatacaaaaagtaaggaacattcaagaaaataactggtctgtcatctttaaaagtcgcaacatgaaagtcaa

SEQ ID NO: 22031 - DNA, 201 bp, Homo sapiens
gaatagctttccaaatcagtaaaactcacaaatacttggctgaggcaaatacaaaattattctataggagtgactccacagggaccagtctacaacccaasacactgggatttctctggtaaacaatccctcttgaaaaattacccacagtaaaaaaattataagccctacatagaaatgagccacgttgaagcacagtga

SEQ ID NO: 22032 - DNA, 201 bp, Homo sapiens
tatgtcctgcctgtgctcaatattgatggctacatctacacctggaccaaggtatatgcaccaatactgagagaggctgatgaaattaaaaccaacgcctstctattatatttgtcctaactatgtagtccactttcagagccgattttggagaaagactcgctccacccatactggatctagctgcattggcacagaccc

SEQ ID NO: 22033 - DNA, 201 bp, Homo sapiens
acaagtaaacaaaggttttacttaacaaactataacttttctattcaaaaaaatgtaactacatttactgtgctccaccctatcaatgaggctccaccacrctatccatctacctactctcacaacaggccaacctttttcttgccctagggcctttgtaaatgctgttccttgtgcctggattggtctcccattttcccc

SEQ ID NO: 22034 - DNA, 201 bp, Homo sapiens
caattgcgggcacccctcccccagcctcgctgccaccttgcagttcgatctcagactgctatgctagcaatgagcaaggctccatgggcgtgggaccctcygagccatgcacgggatataatctcctggtgtgccatttgctaagactgttggaaaagcgcagtattagggtgagagtgtcccgattttccaggtaccatc

SEQ ID NO: 22035 - DNA, 201 bp, Homo sapiens
tcagaaaatccacagttttcttataaacaagcatctaatgctggtgaaaattgttgccatttccagcaggaagtgacctaggactcctagaaagcaactgmttttaagggtctggtgatgaccactgggcatgagctggtgagtgattaacattgttagatttgtccgtagtatttaagatgttcagagtgttttacaatc

SEQ ID NO: 22036 - DNA, 201 bp, Homo sapiens; identical to SEQ ID NO: 21445

SEQ ID NO: 22037 - DNA, 201 bp, Homo sapiens
ccagtggattttggaatctgcaaggatccctagaacaaatcacccaccagatactgagggatgcctctacttctaaataatccatgagtcaaagaggaagkctcaaggaaaagcaaaaatatatattgaactgcatgataacagaaatacaatatatcaaaatctatgggactcaactagagcagtgttgagatgaaaatt

SEQ ID NO: 22038 - DNA, 201 bp, Homo sapiens
gtctttatcacatcacctttaaggagaggaactcatcattgctcagtagtcaccaatctcagtttacttcttatcctaaaaacatggacaaaggggagatkggaaacccagattggccctggaggccggccagctgtgaatcccattctaggctcttagtccttataatcatttgtttaatcagactgccttctgcacatg

SEQ ID NO: 22039 - DNA, 201 bp, Homo sapiens
atcatctgccctcatctctttttacagaaacatgaagggaaaagagttaccactctaaattgtagcaaatgcaagaattacctttctctctaccattcttrgcaggggtcagtcatctgggttgattggaacattcccactgagcttgctgccccaggtggaattccattctgctagaaatttctgtgttggtgaaatatg

SEQ ID NO: 22040 - DNA, 201 bp, Homo sapiens
atccacgtataaaaatagtgccattttctatgtgtaaaaaaaagataggaaagcactaaaagaggctataaaataatattagtaaagatggacaaagaacrttattgatttcaaacagataagtggaaaagtcttgaaaaaccatttcaaattattatggagatgtagtcaattcaaaataacataatattaaaaatatga

SEQ ID NO: 22041 - DNA, 201 bp, Homo sapiens; identical to SEQ ID NO: 21446

SEQ ID NO: 22042 - DNA, 201 bp, Homo sapiens
cttttgcctgcttctgccatttccccaggatcccatctgtgggctctgaagcaagtgaatgtcccagaaaaatcccacatcctcgtcaccagaaattcagsgaaaggaataagaacctccctaggttcttagttggaacagacccattacaaaagacaggttaacaagagagaaacaaacagaagtttgttaacaggttta

SEQ ID NO: 22043 - DNA, 201 bp, Homo sapiens
aagaagatttggagctggtgcgggtgactgtcaagcgcagatggccagttaccgacgtaatctgtgtatctgggaggcatgtgctataagaaggcagctgytaaaacaaatgaatcaagccacagtttttaagaaggaaaagtgtagattggaaaaggataaaagttttgaatgcatgcagctgtgcagggctatgatcaa

SEQ ID NO: 22044 - DNA, 201 bp, Homo sapiens
cgcaaattgtttaaaaggaaatacatcataattaggctaacaaatctgctgtgatgctgcctctcctgatgaataaattttgtgtagatagaggggtagayacataggggtactttgcatttttctcttcattgattttcatacatcataatacgatggattaaccaacattggctcacaattgctctttgtccgaagttt

SEQ ID NO: 22045 - DNA, 201 bp, Homo sapiens
ttttcttaaggggtttctagcagagatagcccacctatttatatatggtgaacttggtgcatgttttattcagttcaactaggcttctttttccattacaytgtaagactttggagggcagagccaacatctctcctttgttctggcatcttcagagttgagcccatagcctgctgttcagtgggggctatacaattgttg

SEQ ID NO: 22046 - DNA, 201 bp, Homo sapiens
aaaaagttgctcctatcaggctatgaatatcagaaaccaaacttttttaaccgaaggtattatctactaagcaactcaggatcaaaaccaataaacctttyatggcttaaccacagatacactagtcatctccagaggtgcaaagatactgcctccatgatttcaaagttcactttcagagatagccaaaaaaaatcaaag

SEQ ID NO: 22047 - DNA, 201 bp, Homo sapiens
agaaggaagaagccaacttggggagatcttaagttcttaaagaagctaatgaagttccatattacccttaacaaaatttatgccaatgagaaagaaacctkaaagtggcggcagaacctacagttagcaagggtttgagaagggcttcccatggaggaattcctatgggaggagcaggatcaaatggagagaacagagtgg

SEQ ID NO: 22048 - DNA, 201 bp, Homo sapiens
gacagagcttctcgacaagttagacttttatgtcctgcctgtgctcaatattgatggctacatctacacctggaccaaggtatatgcaccaatactgagasaggctgatgaaattaaaaccaacgcctctctattatatttgtcctaactatgtagtccactttcagagccgattttggagaaagactcgctccacccata

SEQ ID NO: 22049 - DNA, 201 bp, Homo sapiens
cctgggaggcggaggttgcagtgatctgagatcctgccactgcactctagcctgggcgacgagagcaaaactccatctcaaaaaaaaaaagacagagtgtytttttggctaaacagacgacaaacaagtaccagggctacctgaggcacaagtcaccttcaagaggtagacaccagtccctctaattagacactcagtgta

SEQ ID NO: 22050 - DNA, 201 bp, Homo sapiens
gaaacagaagcaatgagaaggaagaagccaacttggggagatcttaagttcttaaagaagctaatgaagttccatattacccttaacaaaatttatgccartgagaaagaaaccttaaagtggcggcagaacctacagttagcaagggtttgagaagggcttcccatggaggaattcctatgggaggagcaggatcaaatg

SEQ ID NO: 22051 - DNA, 201 bp, Homo sapiens
tgatcacttagatgtgtgacttaatctgtatggctggataaattctggattttctgtctatccatggtttaacccataatgttactggaaaatgagccaayattactttgttctggctgtgtgcacagcagtgaattctaattgtgtttctcaatctaagccccagaatgaaaactgccaagatcaattcattttgataaa

SEQ ID NO: 22052 - DNA, 201 bp, Homo sapiens
cgctcatgctgggggatatagactggagctgttcctattcagccatcctggaacttccccccaccaaatatttatataatttcaatacataaggattttayccctacaaaatccttattaattacaaagggataaagagaatcttcacagtggaaaaacctgactgtaccactttaataatggtcatgattaccagtagtg

SEQ ID NO: 22053 - DNA, 201 bp, Homo sapiens
gcatagaacaaaaaagtatgagataggcaaatttcctctctctctgattctctttctctctgattctctctctctctctctctctctctctctctctctcwctctctctctgtttctcttttctggagctgagatacgcatcttctcctgtccttggacatcagaactccaagtcctctggcctttggacttcaggacttg

SEQ ID NO: 22054 - DNA, 201 bp, Homo sapiens
caaagtccaggtactgatcaaatattctattttccagaaatctgaaagggggataaaactgagtcatgtctttctttacttctcagacattgtgttccttrcttttttgggagtcccagttatctaatttgcttgtgtgttagaaaaaaaaaaaaaaaaaggagaagttggatggcactataaaacgagcatataaaagta

SEQ ID NO: 22055 - DNA, 201 bp, Homo sapiens
gatatttacatagtttcttttttattattattattatactttaagttctagggtacatgtgcacaactgtgcaggtttgttacatatgtatacatgtgtcwtgttggtgtgctgcacacattaactcgtcattcacattaggtatatctcctaatgctatcgctccccactcccccaaccccatgacaggcccctgtgtgt

SEQ ID NO: 22056 - DNA, 201 bp, Homo sapiens
tggggttgcaagcagtccctgtgcatcccattattacctcatatggtaactagtatttagacgatttcctgctggcaaaaatttgcagtagtgtttgtatrtaacaagagccatccactgcacacaagttctaccaaaataacttttcagattttttcagtgtttccaaccctcttcaccaagacctgtattatttggcag

SEQ ID NO: 22057 - DNA, 201 bp, Homo sapiens
gggggtcagggacccacttgaggaggcagtctgtccatactcagatctcaatctctgtgctgagagaaccactactctcttcaaagctgtcagagagggaygtttaagtctacagaagtttctgctgccttttgttcagctatgccctgcccccagaggtggagtctacagaggcaggcaggcctccttgagctatggtgg

SEQ ID NO: 22058 - DNA, 201 bp, Homo sapiens
ctcgggggtcagggacccacttgaggaggcagtctgtccatactcagatctcaatctctgtgctgagagaaccactactctcttcaaagctgtcagagagrgatgtttaagtctacagaagtttctgctgccttttgttcagctatgccctgcccccagaggtggagtctacagaggcaggcaggcctccttgagctatgg

SEQ ID NO: 22059 - DNA, 201 bp, Homo sapiens
actctgatttttagaattttcagcttttctgctctggtttctccccatctttgtggttttatctacctttggtctttgatgattgtgacgtacagaggggkttttgatgtggatgtcctttctgtttgttagttttccttctaacagtcaggaccctcagctgcaggtctgttggagtttgctggaggtccactccagacg

SEQ ID NO: 22060 - DNA, 201 bp, Homo sapiens
tgccgtttattctagttagccattcatctaatcttttttcaaggtttttagcttctttgcaatgggttcaaacatcctcctttagcttggagaagtttgtkattaccaatcgtctgaagccttcttctctcaactcgtcaaagtcattctctgtccagctttgttccgttgctggcaaggagctgctttcctttggaggag

SEQ ID NO: 22061 - DNA, 201 bp, Homo sapiens
tgaagcttgtgcatgtgtcacgtagttcttgtgccatggttttcagctccatcaggtcatttaaggtcttctctatgccgtttattctagttagccattcrtctaatcttttttcaaggtttttagcttctttgcaatgggttcaaacatcctcctttagcttggagaagtttgttattaccaatcgtctgaagccttctt

SEQ ID NO: 22062 - DNA, 201 bp, Homo sapiens
ttttgcaacttggtttcattctccccgtcactttcagttacgccaatcagacgtagatttggtcttttcacatagttccatatttcttggaggctttgttygtttctttttactcttttttctccaaatttctcttctcgcttcatttcattcatttgatcttcaatcactaataccctttcttccacttgattgaattgg

SEQ ID NO: 22063 - DNA, 201 bp, Homo sapiens
agaatttctgccaagagatcagctgttagtctaatgggcttccctttgtgggtaaccgacctttgtctctggctgcccttaacattttttccttcatttcractttggtgaatctgacaattatgtatcttggagttgctcttctcaaggagtatctttgtggctttctctgtatttcctgaatttcaatgttggcctgcc

SEQ ID NO: 22064 - DNA, 201 bp, Homo sapiens; identical to SEQ ID NO: 21449

SEQ ID NO: 22065 - DNA, 201 bp, Homo sapiens
agcaggactccaaagctcaagtgactgagaggctagagtgggagggaaaaggtccgtcaaagaaggacagagggacggaggaggcagaggctggaaggagrcatatcaacaatgtaagggaactgatggaagatttaaggcaacaaaagaaaaaaggagaaacagaagcaatgagaaggaagaagccaacttggggagatc

SEQ ID NO: 22066 - DNA, 201 bp, Homo sapiens
ttttttttgttttccatttgcttggtagatcttcctccatccctttattttgagcctatgtgtgtctctgcacatgagatgcgtctcctgaatacagcacrctgatgggtcttcactctttatccaatttgccagtctgtgtcttttaattggaacattaggcccatttacatttaaggttaatattgttatgtgtgaatt

SEQ ID NO: 22067 - DNA, 201 bp, Homo sapiens; identical to SEQ ID NO: 21450

SEQ ID NO: 22068 - DNA, 201 bp, Homo sapiens
agtgccagtatatttccaattaacctttgtagtctcggatatatgctttgggggaatcctgagatccatgagagcaggactccaaagctcaagtgactgaraggctagagtgggagggaaaaggtccgtcaaagaaggacagagggacggaggaggcagaggctggaaggaggcatatcaacaatgtaagggaactgatgg

SEQ ID NO: 22069 - DNA, 201 bp, Homo sapiens
ttgggtgcatatatatttaggatagttagctcttcttgttgaattgatccctttaccattatgtaatcgccttcttagtctcctttgatctttgttggttkaaagtctgttttatcagagagtaggattgcaacccctgcttttttttgttttccatttgcttggtagatcttcctccatccctttattttgagcctatgt

SEQ ID NO: 22070 - DNA, 201 bp, Homo sapiens
ctcttggggctgccactgagtaatccagaagaccattaaattccccagtaagggccaggcacagtggctcacacctgtaatcccagcactttgggaggccraggcgggcggattgcctgaggtcgggagttcaagaccagtctggccaacatggtgaaaccccgccactactaaaaatacaaaaaaaattagccaggcatg

SEQ ID NO: 22071 - DNA, 201 bp, Homo sapiens; identical to SEQ ID NO: 21451

SEQ ID NO: 22072 - DNA, 201 bp, Homo sapiens
tgaagttcgcatttcaaaagggatggttctcaggtaagacagggtagaacatttatatctcaaaggtacagaaaaagaatgtaagtttcaatccaagaagsagccttggggcacatttttctatcatcagagctcaatcctgtggaggctgttgactaaattttaagtgccagtatatttccaattaacctttgtagtctc

SEQ ID NO: 22073 - DNA, 201 bp, Homo sapiens
atgttaggacatcaattttagatctttcctgctttctcttgtgggcattcagtgctataaatttccctctacacactgctttaaatgtgtcccagagattmtgttatgttgtgtctttgttctcattggtttcaaagaacatctttatttctgccttcatttcattatgtgcccagtagtcattcagaagcaggttgttca

SEQ ID NO: 22074 - DNA, 201 bp, Homo sapiens
ggggctgccactgagtaatccagaagaccattaaattccccagtaagggccaggcacagtggctcacacctgtaatcccagcactttgggaggccgaggcrggcggattgcctgaggtcgggagttcaagaccagtctggccaacatggtgaaaccccgccactactaaaaatacaaaaaaaattagccaggcatggtggc

SEQ ID NO: 22075 - DNA, 201 bp, Homo sapiens
aagaaaatcacagtaaggctaatttattttcaaaataagtctagtgttattaaacttcaattgattatttatataagtgcagcaaaaacagtgattgatcrcataggctctttttaagtctgctttgctggaacttttgataagaaatttcagattagatttttaaaaggctttgactcaaggccaaggatttgctagaag

SEQ ID NO: 22076 - DNA, 201 bp, Homo sapiens
ccagaagaccattaaattccccagtaagggccaggcacagtggctcacacctgtaatcccagcactttgggaggccgaggcgggcggattgcctgaggtcrggagttcaagaccagtctggccaacatggtgaaaccccgccactactaaaaatacaaaaaaaattagccaggcatggtggcgtgcacctgtaatcccagc

SEQ ID NO: 22077 - DNA, 201 bp, Homo sapiens
aaaatgaggaaatgtatttcagctgtcactgccatgtcattatagcccccccttaactgcatttatgttgccaagaggaatcctcaccagatcaaactgaytggaatgaggcccaagacagctgtggcccagataaagaaaaccaaatgattttcagtctcctgaataccaagaaacaggatatgtcattgatgtccagtt

SEQ ID NO: 22078 - DNA, 201 bp, Homo sapiens
tatttttctctaagcctcagtttcttcaaatgtaatatggggtaattcatagagcaatcatgaaaaccaagttagacaacacatgttaagttgctagtacygagcctgacacagagtaagttctcaatcaataatatggtgatgtcctttagctgatccaagcaactggccagataatacttagaactctaagaagaaaat

SEQ ID NO: 22079 - DNA, 201 bp, Homo sapiens
ggctgtcatataacttatgccaaatctgttttcttctccttaaaaaaatatgttttcaaaaactttttctaaatattttcatgaagttagtgctggtcaayggagccacactaaagcactcataacctcagcttaaccacgggaaaagcactttgttatagcattgatcgacctcacatttatttcagaaaatccacagtt

SEQ ID NO: 22080 - DNA, 201 bp, Homo sapiens
ttacctactcagatggccaaacctttctaccactatttttggaaaagacttagatttttttatttgcccaacttccaaatagcttttttttccttctgatwatcatctccctgaagttcgcatttcaaaagggatggttctcaggtaagacagggtagaacatttatatctcaaaggtacagaaaaagaatgtaagtttca

SEQ ID NO: 22081 - DNA, 201 bp, Homo sapiens
tttttttcactgtcataattttcttgctggtataatttttgcaaaggcagtttcaatatcaccaactaaacctgtgatgtcaacactattgctaaacgttktagttatattaataacaagttctgtcatttagctagtttacttttagttttggttgcaaacaaggggaaattagggataggaagtgaagaaagaacccaa

SEQ ID NO: 22082 - DNA, 201 bp, Homo sapiens
tagcattaggagatatacctaatgtaaatgacgagttaatgtgtgcagcacaccaacatggcacatgtacacatatgtaacaaacctgcacgttgtgcacrtgtaccctagaacttaaagtataataaatttaaaaaaattggcggggggtagggggagacagggaccaatgaagtgaaggaaggattcagtgaagtgaag

SEQ ID NO: 22083 - DNA, 201 bp, Homo sapiens
acaggtccccatatggagcagtcttttcgacattgaattcctaaggaaatttctcacgttggactgtggatagagacatagagtcacagagggatcgtttktaagcatcattttttatttcagcctgattcttagttggttgttctcggaatgttcttcttaaaacccaagagcatgacaccaattcaatgaagcttggtg

SEQ ID NO: 22084 - DNA, 201 bp, Homo sapiens; identical to SEQ ID NO: 21452

SEQ ID NO: 22085 - DNA, 201 bp, Homo sapiens
ctagagctcaccacagagaggagagcatcatgtctgcagatgccacagcagatctgctgagaatcagccagcgccatgtgacacaagaacccacagatgcrgattcgtcctgactggtggctttcttctggccattgctgttacagagaagtttctaagcagtactcaatgcacacaaaactaagtagaggctatataggc

SEQ ID NO: 22086 - DNA, 201 bp, Homo sapiens
tggtgttactcaacagagataagccctcctagagctcaccacagagaggagagcatcatgtctgcagatgccacagcagatctgctgagaatcagccagcrccatgtgacacaagaacccacagatgcagattcgtcctgactggtggctttcttctggccattgctgttacagagaagtttctaagcagtactcaatgca

SEQ ID NO: 22087 - DNA, 201 bp, Homo sapiens; identical to SEQ ID NO: 21453

SEQ ID NO: 22088 - DNA, 201 bp, Homo sapiens
tttgcttcgctgttcactgcttagcacatttgtagcatataattttctaaatattaaataataataagtccctggaaatcctggagaagcataccagcaayatccttgctggggttgcaagcagtccctgtgcatcccattattacctcatatggtaactagtatttagacgatttcctgctggcaaaaatttgcagtagt

SEQ ID NO: 22089 - DNA, 201 bp, Homo sapiens; identical to SEQ ID NO: 21454

SEQ ID NO: 22090 - DNA, 201 bp, Homo sapiens
aacaaagatcagcgaccatagattaaccctagctacctgaatgatgtcttaattctacccttatcacaaaacagtaaaatggtttctgatagaatttcaayctctatttataatcagatagaaagttcactttcttttttagtggtgaactttttgggaattgtgtatgaatgttgtctcatctagaacataggacatccc

SEQ ID NO: 22091 - DNA, 201 bp, Homo sapiens; identical to SEQ ID NO: 21455

SEQ ID NO: 22092 - DNA, 201 bp, Homo sapiens
ataataaagacatatctctctctcccaccacaccatagaatgacaggtgtttattaggaacacaaattcagagctaagtttcaaaaatatgctttctcttrtaatgtgcttatcttcaattgcccttctctccacaatgttggctaactagaagttgtcaccagccccttgctttctctgtccttatcttagcatgtcttt

SEQ ID NO: 22093 - DNA, 201 bp, Homo sapiens
gaaaaattcctttgaaaaaatgtaaagacactaattataaaagaaaaatgttggtaaacaaactttatcaaaattaaaaacatctgttcatcaaaacatamcattaagaaaataaaaatgcaagccacatactgggaaaaatatttggaacatatatttctaacacaggtcttgtatccatgctatataaagaacggctac

SEQ ID NO: 22094 - DNA, 201 bp, Homo sapiens
cactgtttcctcatcaatatttagttgacttgctgtttcggtagtatgcttttgggccttagagttgattctggaaaggatcgagactttggagaatgctrgaacagagtgaatatattttataccttcacctctccaaagacccagatcatcatttccaactgcttattgtacatttccacttggataacacattgactg

SEQ ID NO: 22095 - DNA, 201 bp, Homo sapiens
tgagggatgagtgtctcagcactgaaaaaaggatctgggcagagccctgtggtgtccaccccacagcctggaggagcgcttagctcctccgccacctcctctttttccccttctcctttcttctcctgctcccccatgggctcctcctttagcacaaactgcttccattctacaccacatcgccctggggcaaaacacagc

SEQ ID NO: 22096 - DNA, 201 bp, Homo sapiens
agctgttgatatgcataaatcattaacaattcatttcataaatgcataaaagagtaaagtcactaacagttgctatccatctgtctcgagagtggtttctyagcctcactaaaacctttccttcattgaacatcatatccctcactgtaactagggagaatgtatgaagtccctctttcacatcaggagatctgagctaca

SEQ ID NO: 22097 - DNA, 201 bp, Homo sapiens
attttcatatttttagtagatatggggtatcaccatgttggctaggctggtctcaaactcctgacctcaggtgatccacccacctcggcctcccaaagtgytgggattacaggcgtgagccacaacgcctggcctgactcatattttgtttaatttccaaaatacatgtaagctgttgatatgcataaatcattaacaatt

SEQ ID NO: 22098 - DNA, 201 bp, Homo sapiens
ggaagattagaagaggcagccccctgtcatgatgctggctgtgtacaagagattggaacaagggctatgtgcacagtcacgaaaggggagtttctttatcrtatattcgatgggaatgcaggtcagtggaaaagaatatcctctccttattcatctcaccaggtccttggaactcaatgcctggagaaacattacactaag

SEQ ID NO: 22099 - DNA, 201 bp, Homo sapiens
atccatttttaaagaggttcataaacttcatgtctatcagacaacattacaaagcacatcaacaatttgtttctgtcattttctaacaccatttttgtcaygtaattctaatgaaggaaataaaaagacagggaataagtgagagagtagtaaaaattcttacaagattagcgacaatcatgattacttctaattactcat

SEQ ID NO: 22100 - DNA, 201 bp, Homo sapiens
ttttctatcatcagagctcaatcctgtggaggctgttgactaaattttaagtgccagtatatttccaattaacctttgtagtctcggatatatgctttggsggaatcctgagatccatgagagcaggactccaaagctcaagtgactgagaggctagagtgggagggaaaaggtccgtcaaagaaggacagagggacggag

SEQ ID NO: 22101 - DNA, 201 bp, Homo sapiens
aggagtgaccaggaggaaggttcagaggatgtccctgacatacttcatcagaatgtccttggggcagccagaggagaagcagacttttgatgtgtgtctgmaattctctgtatgtcagataaaatcatttcaaggtttaactgtggataatagaaatttctgcaaagtggcctctgtctgtaatattcactgtactgtgat

SEQ ID NO: 22102 - DNA, 201 bp, Homo sapiens
tagaggtgtttatagtattctctgatggtaattagtatttctgtgggatcggtggtgatatccccattatcattttttatggaatctatttgattcttctstcttttcttctttattagtcttgctagtggtctatcaattttgttgatcttttcaaaaaccacctccaggattcattgattttttgaagggatttttgtg

SEQ ID NO: 22103 - DNA, 201 bp, Homo sapiens
tacccttatcacaaaacagtaaaatggtttctgatagaatttcaatctctatttataatcagatagaaagttcactttcttttttagtggtgaactttttrggaattgtgtatgaatgttgtctcatctagaacataggacatcccctgagggctaagagcttgttaatttttgcttcgctgttcactgcttagcacattt

SEQ ID NO: 22104 - DNA, 201 bp, Homo sapiens; identical to SEQ ID NO: 21460

SEQ ID NO: 22105 - DNA, 201 bp, Homo sapiens
cttgcaccccagggatgaagccaacttgatcgtggtggataagctttttgatgtgctgctggattcggtttgccagtattttattgaggatttttgtgtcsatgttcatcagggatattagtctaaaattctcttttattgttgtgtctctgccaggctttggtatcaggatgatgctggcctcataaaatgagttaggga

SEQ ID NO: 22106 - DNA, 201 bp, Homo sapiens; identical to SEQ ID NO: 21461

SEQ ID NO: 22107 - DNA, 201 bp, Homo sapiens
gcatatattgaaccagtcttgcaccccagggatgaagccaacttgatcgtggtggataagctttttgatgtgctgctggattcggtttgccagtattttaytgaggatttttgtgtccatgttcatcagggatattagtctaaaattctcttttattgttgtgtctctgccaggctttggtatcaggatgatgctggcctc

SEQ ID NO: 22108 - DNA, 201 bp, Homo sapiens
tcttgtgccagttttcaaagggaatgcttccagtttttgcccattcagtatgatattggctgtaggtttgtcataaatagctcttattattttgagacacrtaccatcagtacctagtttattgagagtttttagcatgaagggctgttgcattttgtcaaaggccttttctgcatctattgagataatcatgtgattttt

SEQ ID NO: 22109 - DNA, 201 bp, Homo sapiens
attaatttttgtataaggtgtaaggaagggatccagtttcagctttatacatatggctagccagttttcccggcaccatttattaaatagggaatcctttycccatttcttgtctttgtcaggtttgtcaaagatcagatggctgtagatgtgtggtattatttctgagggctctgttctattccattggtctacttctct

SEQ ID NO: 22110 - DNA, 201 bp, Homo sapiens
tgccattgcttttggtgttttagtcatgaagtccttgcccatgcctatgtcctgagtggtattgcctaggttttcttctagggtttttatggttttaggtcttacatttaagtctttaatccatcttgaattaatttttgtataaggtgtaaggaagggatccagtttcagctttatacatatggctagccagttttcccg

SEQ ID NO: 22111 - DNA, 201 bp, Homo sapiens
tgtcaattttggcttttgttgccattgcttttggtgttttagtcatgaagtccttgcccatgcctatgtcctgagtggtattgcctaggttttcttctagrgtttttatggttttaggtcttacatttaagtctttaatccatcttgaattaatttttgtataaggtgtaaggaagggatccagtttcagctttatacata

SEQ ID NO: 22112 - DNA, 201 bp, Homo sapiens
tgtgatagttggctgagaatgatggtttccagcttcatccatgtccctacaaaggacatgaactcatcattttttatggctgcatagtattccatggtgttatatgtgccacattttcttaatccagtctattattgatggatgtttgggttgattccaagtctttgctattgtgaatagtgccacaataaacatatgtgt

SEQ ID NO: 22113 - DNA, 201 bp, Homo sapiens
atgtgtaaaaaaaagataggaaagcactaaaagaggctataaaataatattagtaaagatggacaaagaacgttattgatttcaaacagataagtggaaaagtcttgaaaaaccatttcaaattattatggagatgtagtcaattcaaaataacataatattaaaaatatgagttatagttgtgtgcatttctggacaaga

SEQ ID NO: 22114 - DNA, 201 bp, Homo sapiens
aaaaagtatgagataggcaaatttcctctctctctgattctctttctctctgattctctctctctctctctctctctctctctctctctcactctctctctgtttctcttttctggagctgagatacgcatcttctcctgtccttggacatcagaactccaagtcctctggcctttggacttcaggacttgcaccagcagt

SEQ ID NO: 22115 - DNA, 201 bp, Homo sapiens; identical to SEQ ID NO: 4001

SEQ ID NO: 22116 - DNA, 201 bp, Homo sapiens
ttaaaagaaatatttaaatgccactagtaagtggcatgctacttaaggtgactgttatttgattatctgattcatttggtgtctgaatttagtttagcacrccaaagcaactttaatattttgagtagctggagatccttccaactttttcttatattgtagaattctagtttacttacttccagagcacattttgctaaa

SEQ ID NO: 22117 - DNA, 201 bp, Homo sapiens; identical to SEQ ID NO: 21464

SEQ ID NO: 22118 - DNA, 201 bp, Homo sapiens
gagccaggccttgcttctcaagtgttttatttaaataggcagtatgtcagtggagttttaccacagagtttctgagcgcagagagcctttccctaggagtrgggtgcagggaactggagggcaatggttcttatgagaaggtgatgatgcttctaagaaaaaagattacacgtaagttaatacctaacaattttttttaat

SEQ ID NO: 22119 - DNA, 201 bp, Homo sapiens
atcagaggttctgcctttcagataaataactaactggagatttcctttgataaatggcaagataaagaaattgtagaatggtagaaaatatcatgtttacstacaaaaagaactattgcctcaccatgtttcacatctctagaagatggttttaaatctattatgagcattatgtaatgtttaactggttctggtttcaat

SEQ ID NO: 22120 - DNA, 201 bp, Homo sapiens; identical to SEQ ID NO: 21465

SEQ ID NO: 22121 - DNA, 201 bp, Homo sapiens; identical to SEQ ID NO: 21466

SEQ ID NO: 22122 - DNA, 201 bp, Homo sapiens; identical to SEQ ID NO: 21467

SEQ ID NO: 22123 - DNA, 201 bp, Homo sapiens; identical to SEQ ID NO: 21468

SEQ ID NO: 22124 - DNA, 201 bp, Homo sapiens
ataatcttatcttggatgtttgtttctacacatacaaaactaaaaagttcaaataaaaatacatgccacttttatctttaccagagtacaagacaggtgaytaaaatgcaaaaatttaatttgatgtatcatactcattgatttaaaagttatttttaatttccaataattttctctattgattaagcttttctctagtat

SEQ ID NO: 22125 - DNA, 201 bp, Homo sapiens; identical to SEQ ID NO: 21469

SEQ ID NO: 22126 - DNA, 201 bp, Homo sapiens; identical to SEQ ID NO: 21470

SEQ ID NO: 22127 - DNA, 201 bp, Homo sapiens; identical to SEQ ID NO: 21471

SEQ ID NO: 22128 - DNA, 201 bp, Homo sapiens; identical to SEQ ID NO: 21472

SEQ ID NO: 22129 - DNA, 201 bp, Homo sapiens; identical to SEQ ID NO: 21473

SEQ ID NO: 22130 - DNA, 201 bp, Homo sapiens; identical to SEQ ID NO: 21474

SEQ ID NO: 22131 - DNA, 201 bp, Homo sapiens
acattgtcccataccttattgaatcagtcacttagtactaagaataagtcagttcagttaaactgaactgaactgaactgaactgaactaagtcagttcasttcagcgtctcatttcaggaggtggtattacaagtgggctcccaccaaagttaggcctatatggtgcaagcatacagttatttaataagaggtatttata

SEQ ID NO: 22132 - DNA, 201 bp, Homo sapiens; identical to SEQ ID NO: 4706

SEQ ID NO: 22133 - DNA, 201 bp, Homo sapiens; identical to SEQ ID NO: 21479

SEQ ID NO: 22134 - DNA, 201 bp, Homo sapiens
tctaatataattgtgtgtacgaccatgtgagctaattttgccacaaaaaaacagccacctgggtaataaactgtctgaaaaaataatgataatttataaamatgccaattggggaaaagcacttaatattatgctgtctagccaaagaaaatgagatccactccaattatttcaatactctgacatgaagcattttgtgtt

SEQ ID NO: 22135 - DNA, 201 bp, Homo sapiens; identical to SEQ ID NO: 21480

SEQ ID NO: 22136 - DNA, 201 bp, Homo sapiens
tcatgccactgcactccagcctgggtgacagagcaagactccgtctcaaaaacataaaaataaaaataaatttcccagtaagtagatgaagaaaaacactraataaatatggaaacaataggaaaacaagagactcataaatgaaatttatttttaaattgtgctggattaggcttaccaataaggaaagggaattcatta

SEQ ID NO: 22137 - DNA, 201 bp, Homo sapiens; identical to SEQ ID NO: 21482

SEQ ID NO: 22138 - DNA, 201 bp, Homo sapiens; identical to SEQ ID NO: 21484

SEQ ID NO: 22139 - DNA, 201 bp, Homo sapiens; identical to SEQ ID NO: 21485

SEQ ID NO: 22140 - DNA, 201 bp, Homo sapiens
taggcttagactccctgaaacagtgcaagatctccagaaatttccacagaagcctgaggagcttatgtgttcgtggtctcctttagtttttgccatctgcytttccagttcagtttagagattatgatctcactactccacactgtaagatgccatattattccatggctgtaagatgccgtattccatgtgaaacagctc

SEQ ID NO: 22141 - DNA, 201 bp, Homo sapiens
actgcactccagcctgggcgaaagagtgagactccgtctcaaaaaacaaacaaacaaacaaacaaacaaacaaaaaaacttgtatgattatgctcttagargccatgaattatctgcttgatctcttggggctgccactgagtaatccagaagaccattaaattccccagtaagggccaggcacagtggctcacacctgta

SEQ ID NO: 22142 - DNA, 201 bp, Homo sapiens; identical to SEQ ID NO: 21487

SEQ ID NO: 22143 - DNA, 201 bp, Homo sapiens
aaaaaagtatgagataggcaaatttcctctctctctgattctctttctctctgattctctctctctctctctctctctctctctctctctcactctctctctgtttctcttttctggagctgagatacgcatcttctcctgtccttggacatcagaactccaagtcctctggcctttggacttcaggacttgcaccagcag

SEQ ID NO: 22144 - DNA, 201 bp, Homo sapiens
ttgttgtagccatttgtcactccaaaggagaggtggtgtttccagaagttgtcacagtgtgtacttataccataagtatggagccaacatagtgaaagacyggacaaagaatggaaatgaatcaagtccttatgacatcattggagagttgactttttgtgctagaaatttgcactgtcctccagatctccctatcttaag

SEQ ID NO: 22145 - DNA, 201 bp, Homo sapiens
atagaacaaaaaagtatgagataggcaaatttcctctctctctgattctctttctctctgattctctctctctctctctctctctctctctctctctcacwctctctctgtttctcttttctggagctgagatacgcatcttctcctgtccttggacatcagaactccaagtcctctggcctttggacttcaggacttgca

SEQ ID NO: 22146 - DNA, 201 bp, Homo sapiens; identical to SEQ ID NO: 21491

SEQ ID NO: 22147 - DNA, 201 bp, Homo sapiens
agcatagaacaaaaaagtatgagataggcaaatttcctctctctctgattctctttctctctgattctctctctctctctctctctctctctctctctctyactctctctctgtttctcttttctggagctgagatacgcatcttctcctgtccttggacatcagaactccaagtcctctggcctttggacttcaggactt

SEQ ID NO: 22148 - DNA, 201 bp, Homo sapiens
tagaacaaagtaagttgctcaataagtgtctcttcctgcttctccttaaagagcctttttttttttttttttacgcaaattccagcttaggggtaatatcmctttctaaagcagaaattattttctgctgggagttgttcctagacacaatttgctccttattgaataaataaataattcctattttgtaaagtaaaattc

SEQ ID NO: 22149 - DNA, 201 bp, Homo sapiens
aattttgaatatctggtaatttttaatgttctcactataaaataatagactattcctggttcaaagttacatttgagatcatatatccccactctcatttyatttatttaggtttatttcatcagaaaaaagatttgaggaaacgtaataaaattacaaatgaactgatacatttaaagacaaaaagataagtaagagcca

SEQ ID NO: 22150 - DNA, 201 bp, Homo sapiens
ataagttcttgatttgctcttcaaaatttgttttccacgatgttatttcacaactggagtttgcatatgtattttcaagatgaaacaaagtcattccaagraacaaagaccttctctatgactttttccctttatcaaatcaaatctattattgtttcttataaactattatattttccttcagagaaaaatgcccccata

SEQ ID NO: 22151 - DNA, 201 bp, Homo sapiens; identical to SEQ ID NO: 21496

SEQ ID NO: 22152 - DNA, 201 bp, Homo sapiens
ctattttaatatttctgtagaagacatctcaactaataaagccatgtcacatttttttcctttgctgctaatggagtatttgcaaaactctgcacactgcygaaaaaacaatgccatttgtggtattaccataaagccatattctgaaattgcaccagtcttgagtatgacagtcacatctgatatacatgaaaatgtcag

SEQ ID NO: 22153 - DNA, 201 bp, Homo sapiens
ttgaacttaaaataaaagtggaagaagaaaaaaaaaagagaaatcatagagggcagaggtaagtggcaaaatattttgaaattgctggaaaaaaaaaaaaaccatcaacccataatcttatgcccagtgaaaatatcctttagaaaggaaggggaaattaaggcattctttgatgaaggaaaagagaattttttacctgca

SEQ ID NO: 22154 - DNA, 201 bp, Homo sapiens
attctgggttgaaaattcttgtctttaagaatgttgaatattggcccccactctcttctggcttgtagagtttctgctgagagatccactgttagtctgaygggcgtccctttgtgggtaacccaacctttctctctggctgcccttaacattttttccttcatttcaactttggtgaatctgacaattatgtgtcttgtg

SEQ ID NO: 22155 - DNA, 201 bp, Homo sapiens
agccgagcacagtggctcatgcctgtaatcccagcactctgggaggccaaggcaggcagatcgcttgatgccaggagttcaaggccagcctggccaacacrgcgaaactgcacctctactaaaaatacaaaaattagccaagcatgatggtgcatttcagtaatcccagctactcaggagtctgaggcacaagaatcactt

SEQ ID NO: 22156 - DNA, 201 bp, Homo sapiens; identical to SEQ ID NO: 21497

SEQ ID NO: 22157 - DNA, 201 bp, Homo sapiens; identical to SEQ ID NO: 21498

SEQ ID NO: 22158 - DNA, 201 bp, Homo sapiens; identical to SEQ ID NO: 21363

SEQ ID NO: 22159 - DNA, 201 bp, Homo sapiens; identical to SEQ ID NO: 21364

SEQ ID NO: 22160 - DNA, 201 bp, Homo sapiens
ctttcctctgctcctcacctctcccctgaccccccaaaaatggcattacaaaatatgagtcatgtaggtactttccaatatattatccaagcctatttatycaaaatcaatacagtaatattttactttgtctgaaaccgatctcactggatttcaagatagaattttaatagtctttgtccttgaaaattgggctcacta

SEQ ID NO: 22161 - DNA, 201 bp, Homo sapiens
catccccaggccacagttaattggtccaggcttgaagtggaccaatcacagtttttcatgaggatttttcaaacaggcgctgatgaagagctggccccagwgttggcatttctgagacgtaagctcaacaccagccacatctctcaccacgtggaagaagctagtctgcaacagagtgaagtaaacagaaaaggcaagaga

SEQ ID NO: 22162 - DNA, 201 bp, Homo sapiens
tttccttttcacaacaggccctgtctgccgttgccatgtattgaaattttcctttctctttagcagagagggtcttccacttctctgagtgcttcttagamaactctgagaaatcgactgaagcatctgtgtgctcctcctggcaaatttgcacaaagaatgcatatgatgacattttgtctcttggcttctgaggttttc

SEQ ID NO: 22163 - DNA, 201 bp, Homo sapiens; identical to SEQ ID NO: 21367

SEQ ID NO: 22164 - DNA, 201 bp, Homo sapiens; identical to SEQ ID NO: 21366

SEQ ID NO: 22165 - DNA, 201 bp, Homo sapiens
ctcccaggttcaagcgattttcctgcctcagcctcccaagtaactgggattacaggcacgcatcaccacacctggctaatttttgtatttttagtagagaygggttttcactaggttggccaggctggtcttaaactcctgacttcaggtgatctgcccgcctcagcctcccaaaatgctgggattacaggtgtgagccac

SEQ ID NO: 22166 - DNA, 201 bp, Homo sapiens
tgagatatcttggggtgtctaaagtcaaaacacaaaattcatttatgtatcatatacaccttatatacatatcctgaaggtaattttacacagtatttttrataattttatgcatgaaacaaagttttgactgcattttggctgatatccgtcacatgaggtcaggtgtggaaatttccacttgtgacatcatgtcaatgc

SEQ ID NO: 22167 - DNA, 201 bp, Homo sapiens
cctaaggacagttgtagcagcatcattgaaaactacctcaacatggatgctatttaagaccttgagaggtaaggagagagttgcaacagaaaagataaaawatgcttactgcttcaccttttgcttctggctgcagaacaagtagaaaggagcaattacacccaaaacgttaaaaaaaaaaaaaaagcaattaggctaaag

SEQ ID NO: 22168 - DNA, 201 bp, Homo sapiens
gaaagcaactgattttaagggtctggtgatgaccactgggcatgagctggtgagtgattaacattgttagatttgtccgtagtatttaagatgttcagagygttttacaatcccttttcttagtcacaactcataggcttgtgaaggaggcagctcctgtcattattgctttgctatttggatgctgatccacagaaaggt

SEQ ID NO: 22169 - DNA, 201 bp, Homo sapiens; identical to SEQ ID NO: 3984

SEQ ID NO: 22170 - DNA, 201 bp, Homo sapiens
gaacagaaactgttttaaaacaaatggagttaaaatattggacaaagacaaagaaagtgagtggaggacttcggagttaaggattccaaagggccttacaytgtttcagagcaagatagatgtgatatttaacttcacaatttaagaagtcacataaaaatttaaaggtaatatagagcagaaaaagaatgaaaaactttc

SEQ ID NO: 22171 - DNA, 201 bp, Homo sapiens; identical to SEQ ID NO: 3985

SEQ ID NO: 22172 - DNA, 201 bp, Homo sapiens
agaatttccttgtctgtaagaattacacactgaaatagttggaagtgacagggatttacatcagctacttattcttaagtgtgtcaagggaaaaaaaaagytttttatgctactctgcagtctttctcctggtttgaaattatttcatattaaaaaataaaactcatgtaccaaacagtagtgcagacacagttgagtgaa

SEQ ID NO: 22173 - DNA, 201 bp, Homo sapiens; identical to SEQ ID NO: 3987

SEQ ID NO: 22174 - DNA, 201 bp, Homo sapiens
cagtgttgacttcctagtttagatgttggagaatttccttgtctgtaagaattacacactgaaatagttggaagtgacagggatttacatcagctacttaytcttaagtgtgtcaagggaaaaaaaaagctttttatgctactctgcagtctttctcctggtttgaaattatttcatattaaaaaataaaactcatgtacc

SEQ ID NO: 22175 - DNA, 201 bp, Homo sapiens; identical to SEQ ID NO: 3992

SEQ ID NO: 22176 - DNA, 201 bp, Homo sapiens; identical to SEQ ID NO: 3993

SEQ ID NO: 22177 - DNA, 201 bp, Homo sapiens
aaaatcttagatcgcactgtgattccgacaatggaaaaaaaaacatgaaatattaactatagcattttggtagcaagaaataaaaacttggaaaacatttrgtgccataatgtcttctttttctgcctaaattagattgccataagccctgtagtattataaatccatggtaacttttaaaagagctgacagtgtgacaac

SEQ ID NO: 22178 - DNA, 201 bp, Homo sapiens; identical to SEQ ID NO: 3995

SEQ ID NO: 22179 - DNA, 201 bp, Homo sapiens
gccttccttcctgtggcctctttccccacatctcttcactaaccaaagaggtaactcttggctaatctcttacttaccacaaaacttaatttcataaatcytcccccccgtctcttacttaccataaaacttaatttcataaatcttccccccgtctcttatcaagtcagatttcagttacgtcaaaaggctcaaataaac

SEQ ID NO: 22180 - DNA, 201 bp, Homo sapiens
atatgctttctcttataatgtgcttatcttcaattgcccttctctccacaatgttggctaactagaagttgtcaccagccccttgctttctctgtccttaycttagcatgtctttatacttcctcacttcatttaacctctcatccttgactcactaggtcaccttctacagccaatccttatccaaacattgatactcta

SEQ ID NO: 22181 - DNA, 201 bp, Homo sapiens
gatgagtgtctcagcactgaaaaaaggatctgggcagagccctgtggtgtccaccccacagcctggaggagcgcttagctcctccgccacctcctctttttccccttctcctttcttctcctgctcccccatgggctcctcctttagcacaaactgcttccattctacaccacatcgccctggggcaaaacacagctcttt

SEQ ID NO: 22182 - DNA, 201 bp, Homo sapiens; identical to SEQ ID NO: 21378

SEQ ID NO: 22183 - DNA, 201 bp, Homo sapiens
atcctttttccaaaaagtccttgttattttcttattcaagatataaacccaaggtgttctacttcaagaaaagagatctgtaattttttttttttttttttacctgaacccagcaccatgatctggtgactatattgggaaggattctggaatattgctctaagcaaattcaggagtaagtataggatatactacctacac

SEQ ID NO: 22184 - DNA, 201 bp, Homo sapiens
gagacagctttgttgccactagttgtatacaataacaaccagaacctgggctactctaaaagtctccaaatcattcttaaaaaaaaaaaaaaaaaaaaaaagacaagtaagtcctgcctttagaatattatgaataatttttgctacttcctaaggaaattttctccagtaaaagaaccaagcctcagagttagcaagttt

SEQ ID NO: 22185 - DNA, 201 bp, Homo sapiens
aatgaatcagggtggagtaggtaatagaaaaaggttactttacgaggaagttaagtttaaaagtagaaggcaaagaattgaacatactgacatattaattmtttgaagagaaattcagaattcatatttaacgtatatgttatttttataacttctaatagtaacagccatatccagatgttgttagaagcaataatgtaa

SEQ ID NO: 22186 - DNA, 201 bp, Homo sapiens
catggggaaattgtgttaaaaaaaattgggggggcaggcagtgtcatttctggggctaagtagacaagtctattaagcttctgcaaaaaaaaaaaaaaaaagtttattcactcattaacgttaggaacaaaggcagctggtagcatgggataaacctaaagggttataacccacttccatgggagacaaaatgaaggtgtg

SEQ ID NO: 22187 - DNA, 201 bp, Homo sapiens
taaaagtatgacttatttcaactgtgcacagagacccagaggataaagatgttatgatcataccatgagtcctaaggacagttgtagcagcatcattgaamactacctcaacatggatgctatttaagaccttgagaggtaaggagagagttgcaacagaaaagataaaaaatgcttactgcttcaccttttgcttctggc

SEQ ID NO: 22188 - DNA, 201 bp, Homo sapiens
gacaggcatagaattctctgcttatatgcattatattatttaatcctcacaacacccagtcatgctatttctgttattatcctatgagacaaaaaaaaaaacacagattttacataatcagtccaatgtaacatgactggtaaatgttggtgttgacatttgaaatcaggcattctgactccagaatctgtgctcttattt

SEQ ID NO: 22189 - DNA, 201 bp, Homo sapiens; identical to SEQ ID NO: 21379

SEQ ID NO: 22190 - DNA, 201 bp, Homo sapiens
attgtcctcttagcagtttctgtcggttgatttttttgtttgtttccaggtttttgtcttacttggcttgctttgttttggtttggttagtctgtttttakttttttgttatccttgaatatcattttcctgaactattttttagttttcctccacgttttcctgagttatgacagtggtaactgggaaatttttattttt

SEQ ID NO: 22191 - DNA, 201 bp, Homo sapiens; identical to SEQ ID NO: 21380

SEQ ID NO: 22192 - DNA, 201 bp, Homo sapiens
agactccttatttttggtacatttaaaaaatacatacagaaaagaatatttaccatagagatctaggtgcccaacagaatgcaaaagctacatttatattraaatatatatttcaatatacacccatttacacccatttctgaggtgtaaatttcaatatacacaatattaaaatttacctcattctaagcttttggggaa

SEQ ID NO: 22193 - DNA, 201 bp, Homo sapiens
agacgtgacaaataaaggcaatgtaggatcctagattgtaacctagaatggaaaaaggacattagtggataaacttgtgaaatctgaataaagtctacagyttagtttatagtattgtatccatgctaatttattcactttaataattataccatggttgtgtaagatggtaacattcaggaagctggatgacgggtatgt

SEQ ID NO: 22194 - DNA, 201 bp, Homo sapiens; identical to SEQ ID NO: 21381

SEQ ID NO: 22195 - DNA, 201 bp, Homo sapiens; identical to SEQ ID NO: 21382

SEQ ID NO: 22196 - DNA, 201 bp, Homo sapiens
aaaatgttagggatagtgagaagtttgggatagctcaccaaagtctctgatttcggcagcccaagaaagagaggccaagaagggttagatggtttcacaargccacacccttatctggtggcagatcctgagctagaattcagagctctagagtcttattcccatgctcttcctgtgccttacaggaagatttttcttttt

SEQ ID NO: 22197 - DNA, 201 bp, Homo sapiens; identical to SEQ ID NO: 21383

SEQ ID NO: 22198 - DNA, 201 bp, Homo sapiens; identical to SEQ ID NO: 21384

SEQ ID NO: 22199 - DNA, 201 bp, Homo sapiens; identical to SEQ ID NO: 21385

SEQ ID NO: 22200 - DNA, 201 bp, Homo sapiens; identical to SEQ ID NO: 21386

SEQ ID NO: 22201 - DNA, 201 bp, Homo sapiens
atttgcaaaactctgcacactgccgaaaaaacaatgccatttgtggtattaccataaagccatattctgaaattgcaccagtcttgagtatgacagtcacrtctgatatacatgaaaatgtcagtatgcccctgttatgcaaattgaacaaagaagcactcaattactcaatacacactcacaaaatgcagattttacatg

SEQ ID NO: 22202 - DNA, 201 bp, Homo sapiens; identical to SEQ ID NO: 21387

SEQ ID NO: 22203 - DNA, 201 bp, Homo sapiens
aataagtcctaatgagaagtgaagcatgtttttgtatactgtgttagaaagcaatagaaacactaaattcttgaatgatcattaaattaattagatggatkatgagtactttatgttttgttcaaactaattcattctataaaaaggctacaaaacatggattcaataccctactgaaaagaagagaagcttgagagtaat

SEQ ID NO: 22204 - DNA, 201 bp, Homo sapiens; identical to SEQ ID NO: 21388

SEQ ID NO: 22205 - DNA, 201 bp, Homo sapiens; identical to SEQ ID NO: 21389

SEQ ID NO: 22206 - DNA, 201 bp, Homo sapiens
aggagcaattacacccaaaacgttaaaaaaaaaaaaaaagcaattaggctaaaggctgaggaaatgatcataacatgatggaagttccagcagccaagatsaatcagaaagtagctatgtagcctatcatgataggaaagctgggcatagacatagatcagtgttttccaaccaagtgtgggccaggagtggtggctcacg

SEQ ID NO: 22207 - DNA, 201 bp, Homo sapiens
tatggacatacgctgatatagttaactagtcaccaaattggaaaattgagctttttctgatttttttagtatcataaattacactgagatgagcattcaagtatgtgaatctgagaaatttcccatactcctagaagtggtgcaactgaaatacacgtatgaacattttttaatagtctaactacctgttatcaaatattt

SEQ ID NO: 22208 - DNA, 201 bp, Homo sapiens
tgttaggataggatgccattatgtattcttcatgaaaatatttacaggttaggtagactccttatttttggtacatttaaaaaatacatacagaaaagaawatttaccatagagatctaggtgcccaacagaatgcaaaagctacatttatattgaaatatatatttcaatatacacccatttacacccatttctgaggtg

SEQ ID NO: 22209 - DNA, 201 bp, Homo sapiens
tagggggagggatagcattaggagaaatacctaatgtagatgatgggttgatgggtgcagcaaaccaccatggcatgtgtatacctatgtaacaaacctgcactttctgtacatgtaccccagaacttaaagtataattaaaaaatatagattctctgaagtaattttctaaaatgtattacttgaaatttccaaaaactt

SEQ ID NO: 22210 - DNA, 201 bp, Homo sapiens; identical to SEQ ID NO: 21398

SEQ ID NO: 22211 - DNA, 201 bp, Homo sapiens
caagaaaactgaaagatgaagagaagaaggaaaactagctacagatctcaggacccttggaaacacatggtgatgagttcgtgagttttctttctgcctcrtatataccagacttggagtcaaataatatgaccacccagaaacaccaatggacacagacaaaaataagcccaatacaaacctcttctgtccagccaaagg

SEQ ID NO: 22212 - DNA, 201 bp, Homo sapiens; identical to SEQ ID NO: 21399

SEQ ID NO: 22213 - DNA, 201 bp, Homo sapiens
aacagcatcataattccatttttccatgaaattcctcttcataattcacatacaggctgttcgtacctatggacgtgagatccaagtgacagagcttctcracaagttagacttttatgtcctgcctgtgctcaatattgatggctacatctacacctggaccaaggtatatgcaccaatactgagagaggctgatgaaat

SEQ ID NO: 22214 - DNA, 201 bp, Homo sapiens
atatatcaccataacctcagaatggggtatttactaaattttttttttttcagacagggtctcactctgtcccccaggctggagtgcagtggtgtgatctyggctcactgcaacctcccactgctagattcaggcaatcctcccacctcagcctcctgaatagctgggactacaggcctgctccaccactcttggctaata

SEQ ID NO: 22215 - DNA, 201 bp, Homo sapiens; identical to SEQ ID NO: 21405

SEQ ID NO: 22216 - DNA, 201 bp, Homo sapiens; identical to SEQ ID NO: 21406

SEQ ID NO: 22217 - DNA, 201 bp, Homo sapiens; identical to SEQ ID NO: 21407

SEQ ID NO: 22218 - DNA, 201 bp, Homo sapiens; identical to SEQ ID NO: 21409

SEQ ID NO: 22219 - DNA, 201 bp, Homo sapiens; identical to SEQ ID NO: 21408

SEQ ID NO: 22220 - DNA, 201 bp, Homo sapiens; identical to SEQ ID NO: 21410

SEQ ID NO: 22221 - DNA, 201 bp, Homo sapiens; identical to SEQ ID NO: 21411

SEQ ID NO: 22222 - DNA, 201 bp, Homo sapiens; identical to SEQ ID NO: 21412

SEQ ID NO: 22223 - DNA, 201 bp, Homo sapiens; identical to SEQ ID NO: 21413

SEQ ID NO: 22224 - DNA, 201 bp, Homo sapiens
taacagccaggacattcaatagtgtgtgttaagggggaagaggtgtggagatatagacgtaccaatagtgagagggggctgaggctactacactatctacwattgcaaattattgtaaactgaagtctctccctgagatggcacaggggtaaaatacacttctgttgcatgagcaattataaaaaatatgatttagaccat

SEQ ID NO: 22225 - DNA, 201 bp, Homo sapiens; identical to SEQ ID NO: 21414

SEQ ID NO: 22226 - DNA, 201 bp, Homo sapiens
ttgcaaatacagtatttaagaaaaagaacggattaaaagagcactcacatgagctggaaaatagccacatggattataatatttttataaattccatttcyttttcaaagcaccacttaacattatatattgctatattatctacctacacagaaataatatactcatcaggccaaaattcataaagtaaatccaagtgta

SEQ ID NO: 22227 - DNA, 201 bp, Homo sapiens; identical to SEQ ID NO: 21415

SEQ ID NO: 22228 - DNA, 201 bp, Homo sapiens
aaaaaaaaaaaaaccatcaacccataatcttatgcccagtgaaaatatcctttagaaaggaaggggaaattaaggcattctttgatgaaggaaaagagaawtttttacctgcagacctactcgaaaagaatggctacaggaagctctctaaaaaggaaggcaaaggcaaatagaatccttctcacatcacatcaccctggc

SEQ ID NO: 22229 - DNA, 201 bp, Homo sapiens
ccataatcttatgcccagtgaaaatatcctttagaaaggaaggggaaattaaggcattctttgatgaaggaaaagagaattttttacctgcagacctactygaaaagaatggctacaggaagctctctaaaaaggaaggcaaaggcaaatagaatccttctcacatcacatcaccctggcctcctcctctgcccttgcttt

SEQ ID NO: 22230 - DNA, 201 bp, Homo sapiens
gtaaatttttagagaagtgacatgacaaaggaaaaggactgggactctctagggacagcaacttgggaaagacaaccaacaaaaaaatggttaagtaagtaaagcttgttaactgtagattcctccagcattgcccccaggactatacgtgtttaaagctgccgtcagtggttgttgttcttggtagagcaggggcaagat

SEQ ID NO: 22231 - DNA, 201 bp, Homo sapiens
ccttgctttcccattttaaggacacttgtgattacactatgcctactgagataatctaggtatccccatctgatgattacctaattaacaacttcagttcyatatgctaccttaatttctgtttgctgtattaggtaacatattcataggttctggggattaggaggcagggatctttgaggggccattatactgtctacc

SEQ ID NO: 22232 - DNA, 201 bp, Homo sapiens
agtaaatttttagagaagtgacatgacaaaggaaaaggactgggactctctagggacagcaacttgggaaagacaaccaacaaaaaaatggttaagtaagtaaagcttgttaactgtagattcctccagcattgcccccaggactatacgtgtttaaagctgccgtcagtggttgttgttcttggtagagcaggggcaaga

SEQ ID NO: 22233 - DNA, 201 bp, Homo sapiens
tgacagaactaaaagagaaaaataggcaaatctacagtaataatgacagactacaacacctctctctcaacaattgatagaacaaataggcagaaaagcakcaaggatatagaagaactcaatactcaagaatatatgtattctgtttttgttgggtgggtgatttgttgggttgggtgattctataaatatcaaactaaa

SEQ ID NO: 22234 - DNA, 201 bp, Homo sapiens
aagtaaatttttagagaagtgacatgacaaaggaaaaggactgggactctctagggacagcaacttgggaaagacaaccaacaaaaaaatggttaagtaagtaaagcttgttaactgtagattcctccagcattgcccccaggactatacgtgtttaaagctgccgtcagtggttgttgttcttggtagagcaggggcaag

SEQ ID NO: 22235 - DNA, 201 bp, Homo sapiens
gggtgggtgatttgttgggttgggtgattctataaatatcaaactaaagtaatcaactgaaagaatttgatattcatagaatacccctcccaacaatgacrgaatatccatattcttttcagatgcctgtggaacatatagtaagatagagcatattcctgggccataaaataaatctcaacaattttaaaagaattgaaa

SEQ ID NO: 22236 - DNA, 201 bp, Homo sapiens
tcaaactaaagtaatcaactgaaagaatttgatattcatagaatacccctcccaacaatgacagaatatccatattcttttcagatgcctgtggaacatawagtaagatagagcatattcctgggccataaaataaatctcaacaattttaaaagaattgaaatcataaacattgtgtattatggacttaattatgtcccc

SEQ ID NO: 22237 - DNA, 201 bp, Homo sapiens
cctccaatcacagccctgctaatttgaaataccatgcatgcattttactgggatagattttccctgcactaaccaaaagcaaagaaggttgagacgatgaragccccctgtggactgggatctattattaagacaaactcccctgagagttggcacaaagaacacttagtttctcagattcccaacccgactagcttccag

SEQ ID NO: 22238 - DNA, 201 bp, Homo sapiens
taagatagagcatattcctgggccataaaataaatctcaacaattttaaaagaattgaaatcataaacattgtgtattatggacttaattatgtccccccycccccgtgccaaaattcatatgttgaagccctaaccccttagtgtgattttttgaagacggagcctataaaaaggtaattacggttaaatgaggtgaata

SEQ ID NO: 22239 - DNA, 201 bp, Homo sapiens
caagccagggttacctactcagatggccaaacctttctaccactatttttggaaaagacttagatttttttatttgcccaacttccaaatagcttttttttccttctgataatcatctccctgaagttcgcatttcaaaagggatggttctcaggtaagacagggtagaacatttatatctcaaaggtacagaaaaagaat

SEQ ID NO: 22240 - DNA, 201 bp, Homo sapiens
tcccccctcccccgtgccaaaattcatatgttgaagccctaaccccttagtgtgattttttgaagacggagcctataaaaaggtaattacggttaaatgargtgaatatggtgaggtgaataaggttacatgaggtgaatatggtggagccctaattcaaaatggcttatgtcttgatgagaagagtaagagacaccaggg

SEQ ID NO: 22241 - DNA, 201 bp, Homo sapiens
cagaatccaaattgtttctgacaaatgggacaagccagggttacctactcagatggccaaacctttctaccactatttttggaaaagacttagatttttttatttgcccaacttccaaatagcttttttttccttctgataatcatctccctgaagttcgcatttcaaaagggatggttctcaggtaagacagggtagaac

SEQ ID NO: 22242 - DNA, 201 bp, Homo sapiens
tattatttctagtagttttaattatatatgttaatccaaatttttaactcgaagtaactttaatttctagaaacatgtgcttcctcatagtataattttttaatgtgacacatgtttaacagacccaaatatcttcagcttctctatactatatgaaaacaaaatgccaaaagtatacaaacttaaacttatgcttagtaa

SEQ ID NO: 22243 - DNA, 201 bp, Homo sapiens; identical to SEQ ID NO: 21420

SEQ ID NO: 22244 - DNA, 201 bp, Homo sapiens
aggttcctgattctgccaggaagtgacattccgtactcacctataaggtttgcaacacttttaattaggtactaggccaggttttttgaagggggggggggctttattggttccataaagccaaccttagtttcttaaaactacagacagcttgtcacccaggctggtgtacagtggcccaataacagctcactacagcct

SEQ ID NO: 22245 - DNA, 201 bp, Homo sapiens
aaataatcttatcttggatgtttgtttctacacatacaaaactaaaaagttcaaataaaaatacatgccacttttatctttaccagagtacaagacaggtractaaaatgcaaaaatttaatttgatgtatcatactcattgatttaaaagttatttttaatttccaataattttctctattgattaagcttttctctagt

SEQ ID NO: 22246 - DNA, 201 bp, Homo sapiens
tgtttattgtggcactattcacaatagcaaagacttggaaccaacccaaatgtccaccagtgatagactggattaagaaaatgtggcattatatacatcayggaatactatgcagccataaaaaagaatgagttcacgtcctttgtgaggacatggatgaaactggaaaccatcaatctcagcaaactatcgcaaggacaa

SEQ ID NO: 22247 - DNA, 201 bp, Homo sapiens
ataaacatcctacaatgcacagaacagccctcccatccccaacaaattatccagcccaaaacgtcaagagtgccaaggttgagaaacttgctttaaataamtataagaacaaagtcacattcctggacaaaggctctcgcctttcacaggatcttatactttcttcacaaaactttacaatgttctgcaaattacaagtgc

SEQ ID NO: 22248 - DNA, 201 bp, Homo sapiens
tgatgctatgctattcattgtgagaatcatagcaaattgagagatgttaaaaattgggatctaattaaactaaagagcttctgcacagcaaaaaaaaaaaactaccatcagagtgaacaggcaacctacagaatgggaaaaaatttttgcaatctactcatctgacaaagggctaatagaatctacaaagaactcaaacaa

SEQ ID NO: 22249 - DNA, 201 bp, Homo sapiens; identical to SEQ ID NO: 21424

SEQ ID NO: 22250 - DNA, 201 bp, Homo sapiens
ttcagaactgtgcaaagaaccatgtgcctaaaaagccaacgaaaggttcctggggcctttcttttctgatagtttaaagcatgtggcttttgcctcacagyaaatttttctaaaatatgtaatcagttttctgttcaaaaaaaaaaaaaaaggagggaaagcctggacaacatagcaaacttttctctaaaaaaaattaaa

SEQ ID NO: 22251 - DNA, 201 bp, Homo sapiens
tcccagcccctgagggatgagtgtctcagcactgaaaaaaggatctgggcagagccctgtggtgtccaccccacagcctggaggagcgcttagctcctccrccacctcctctttttccccttctcctttcttctcctgctcccccatgggctcctcctttagcacaaactgcttccattctacaccacatcgccctggggc

SEQ ID NO: 22252 - DNA, 201 bp, Homo sapiens; identical to SEQ ID NO: 21425

SEQ ID NO: 22253 - DNA, 201 bp, Homo sapiens
actttcggtcaagcctcataatgtcaaacttctggtttgatttctcagaatccctcacccctaacacagctacagcaagatacttggaaagatccagatgycaccagaggaaatggaacaagattacacagaaagcagaagtggatgtctaaaaatagaataaaaacggataagggaatccacctaatccccaaatcccac

SEQ ID NO: 22254 - DNA, 201 bp, Homo sapiens
acacaacacttagaatgcctggaaatggtcccaaaatatcatgagcccacaatttagtgatggtcaggccatgaaaaagttgattagcctccctgagtctsagtttcctcctccatacaattgggagattggatttgatgagttctaaaatttctaacagctccaaggtgttataactaaatccttccactgctctataag

SEQ ID NO: 22255 - DNA, 201 bp, Homo sapiens
acttagaatgcctggaaatggtcccaaaatatcatgagcccacaatttagtgatggtcaggccatgaaaaagttgattagcctccctgagtctgagtttcytcctccatacaattgggagattggatttgatgagttctaaaatttctaacagctccaaggtgttataactaaatccttccactgctctataagaaagtct

SEQ ID NO: 22256 - DNA, 201 bp, Homo sapiens
ttgatgctatgctattcattgtgagaatcatagcaaattgagagatgttaaaaattgggatctaattaaactaaagagcttctgcacagcaaaaaaaaaaaactaccatcagagtgaacaggcaacctacagaatgggaaaaaatttttgcaatctactcatctgacaaagggctaatagaatctacaaagaactcaaaca

SEQ ID NO: 22257 - DNA, 201 bp, Homo sapiens; identical to SEQ ID NO: 21427

SEQ ID NO: 22258 - DNA, 201 bp, Homo sapiens; identical to SEQ ID NO: 21430

SEQ ID NO: 22259 - DNA, 201 bp, Homo sapiens
cagcatagaacaaaaaagtatgagataggcaaatttcctctctctctgattctctttctctctgattctctctctctctctctctctctctctctctctctcactctctctctgtttctcttttctggagctgagatacgcatcttctcctgtccttggacatcagaactccaagtcctctggcctttggacttcaggact

SEQ ID NO: 22260 - DNA, 201 bp, Homo sapiens
tacctgaggcacaagtcaccttcaagaggtagacaccagtccctctaattagacactcagtgtatgcaagcaagtggctagagtggtaggggctagacccragagctgtgggtgctgcagcttagatttatctggaaggcacattccacaggcctcattttcaatttctacgtatatcttcctttgccttcaaatggtttc

SEQ ID NO: 22261 - DNA, 201 bp, Homo sapiens
agaatcgtttgaacctgggaggcggaggttgcagtgatctgagatcctgccactgcactctagcctgggcgacgagagcaaaactccatctcaaaaaaaamaagacagagtgtttttttggctaaacagacgacaaacaagtaccagggctacctgaggcacaagtcaccttcaagaggtagacaccagtccctctaatta

SEQ ID NO: 22262 - DNA, 201 bp, Homo sapiens; identical to SEQ ID NO: 21434

SEQ ID NO: 22263 - DNA, 201 bp, Homo sapiens; identical to SEQ ID NO: 21436

SEQ ID NO: 22264 - DNA, 201 bp, Homo sapiens
caacatgagaatttatggagagtgcaatgtgccatctactaaagcagtggctctggggttttatgtgtgttcactggagaaaaatacacttatgttcatargaacacccactttggttcgttgcagggtactgataagcaacctgagaaatgtggtggaggctcagtttgatagccgggttcgtgcaacaggacacagtta

SEQ ID NO: 22265 - DNA, 201 bp, Homo sapiens; identical to SEQ ID NO: 21437

SEQ ID NO: 22266 - DNA, 201 bp, Homo sapiens
tcactgcacggcaccaagtacacatatggcccgggagctacaacaatctgtgagtcttggcttcagaactgtgcaaagaaccatgtgcctaaaaagccaaygaaaggttcctggggcctttcttttctgatagtttaaagcatgtggcttttgcctcacagtaaatttttctaaaatatgtaatcagttttctgttcaaaa

SEQ ID NO: 22267 - DNA, 201 bp, Homo sapiens
tgctcctgccctaactcacacaaccctattgtaacttaatctggctttataaactgccacattgccaagtgtttttttgtttttttgttttttttttttttgctttgttttctttgcgtttttgcatgcgtgtgttttggtttgtttgcctgcaaacaggtaaacaacttctttgcacaaccataaagacttccttgtctc

SEQ ID NO: 22268 - DNA, 201 bp, Homo sapiens; identical to SEQ ID NO: 21447

SEQ ID NO: 22269 - DNA, 201 bp, Homo sapiens; identical to SEQ ID NO: 21448

SEQ ID NO: 22270 - DNA, 201 bp, Homo sapiens; identical to SEQ ID NO: 4702

SEQ ID NO: 22271 - DNA, 201 bp, Homo sapiens
actttaaagtttattcaagcaagcctagggaagggttgaatttaagtttaatatgatgctggagcagagggactgtgactacgagaacatattaaatgggyatgatgtccctcattcatagataagtatctacattatttaacagggacaacaggattgtcccttcttgagaaagacaacaaaggaaactcccatcactat

SEQ ID NO: 22272 - DNA, 201 bp, Homo sapiens
accatcctggctaacacatctctaccacaaaaaattagccgggcgtggcggcgggcgcctacagtcccagctactcgggaggctgaggcaggagaacggcrtgaacccaggaggcggagcttgcagtgagccaagatcacgccactgcactccagcctgggcgacagagcgagactcctactcaaaaaaaaaaagacttca

SEQ ID NO: 22273 - DNA, 201 bp, Homo sapiens
ttgcataagagggaaggaggaaataaagtctctagtacaaagcagaggtcctcctccagggggtagattagggaggaacaaagacaaagtcttgggctccrgtcctgaacattcaaatgtttatccggcaatcccccatcacaagctcaagtcttcattatgttttggaagaatgtagcctatataattttaacagaaatt

SEQ ID NO: 22274 - DNA, 201 bp, Homo sapiens
aagacaaagtcttgggctccggtcctgaacattcaaatgtttatccggcaatcccccatcacaagctcaagtcttcattatgttttggaagaatgtagcckatataattttaacagaaatttctcttgtttttcacgtcttaaaaatgtaaaagaatagtatctgtgccagtgaagatgtcagaattgtcacctataaaat

SEQ ID NO: 22275 - DNA, 201 bp, Homo sapiens
tcatagaacacatgaagtttatgtttgcacagacaagtcggctagaggtcagggcctcagggcctcccccactgaggaccgagagcataaatacctcagasacactgtaagccattcatgtgggaagggttgctgtccagtagaggttgctaacttttttgtcatgctatctgttgacatctattaaccccttctcagaat

SEQ ID NO: 22276 - DNA, 201 bp, Homo sapiens; identical to SEQ ID NO: 21456

SEQ ID NO: 22277 - DNA, 201 bp, Homo sapiens
ggtgagaacaatgctgagttggtaagtagcaaagtagtaggtatgacattttactattgagattttttaaattctaatcctgaaaaaaaaatcattataaraacactttctggaagtccctttattgatttttttggtagtagaattgaaaaacttattacagatttataaggaatctggagttggctaaaagaaatacaa

SEQ ID NO: 22278 - DNA, 201 bp, Homo sapiens
ggtcagacacaatgttggcactcttggttctggtgactgtggccctggcatctgctcatcatggtggtgagcactttgaagggtaagtaagccatctttarggagcaagtccttcttccttgctagcccccaaatttggacacattactcatttccaattctctgtgcttctattatctcattattcagcgagaaggtgtt

SEQ ID NO: 22279 - DNA, 201 bp, Homo sapiens
gtggtgtctttagaagagcaatattttaaaagtcaaaccactagtaacctaacagtttgcctaaacttcctttgtcatagaacacatgaagtttatgtttrcacagacaagtcggctagaggtcagggcctcagggcctcccccactgaggaccgagagcataaatacctcagacacactgtaagccattcatgtgggaag

SEQ ID NO: 22280 - DNA, 201 bp, Homo sapiens; identical to SEQ ID NO: 21458

SEQ ID NO: 22281 - DNA, 201 bp, Homo sapiens; identical to SEQ ID NO: 21457

SEQ ID NO: 22282 - DNA, 201 bp, Homo sapiens
ttgttaggaaggcatggttggttttgaaatgtgaggacatgagatttggaggggccggggtggaatgatagggtttggctgtgtccccacccaaacctcartttgaatcgtatctcccagaattcccacatgttgtgggagggacccaggggtaggtaattgaatcatggggaccgatctttcccaggctattcccatgat

SEQ ID NO: 22283 - DNA, 201 bp, Homo sapiens
gttactggaaaatgagccaacattactttgttctggctgtgtgcacagcagtgaattctaattgtgtttctcaatctaagccccagaatgaaaactgccargatcaattcattttgataaattaactgtttctgatggctatctacactgaactgcagctgctgtgtttttttcttccttaacaaaatgattatgaagtaa

SEQ ID NO: 22284 - DNA, 201 bp, Homo sapiens; identical to SEQ ID NO: 21459

SEQ ID NO: 22285 - DNA, 201 bp, Homo sapiens
atcacacagttactcagtgcacctttccaccagctcagcactcctctgtcccaagtggtgtgtctccctgtggccatcccctgctgggcagtactgatacrtgtacatatatgaaaaacaacatccataaggaaaggttaatttggagaaaagcctaagtggaggaatcgatcagcaacaagagttaataatcaattgcag

SEQ ID NO: 22286 - DNA, 201 bp, Homo sapiens
tatgctagcaatgagcaaggctccatgggcgtgggaccctccgagccatgcacgggatataatctcctggtgtgccatttgctaagactgttggaaaagcrcagtattagggtgagagtgtcccgattttccaggtaccatctgtcatggcttcccttggctaggaaagggaattccctgaccccttgcattcccaggtga

SEQ ID NO: 22287 - DNA, 201 bp, Homo sapiens
atgccgtttattctagttagccattcatctaatcttttttcaaggtttttagcttctttgcaatgggttcaaacatcctcctttagcttggagaagtttgytattaccaatcgtctgaagccttcttctctcaactcgtcaaagtcattctctgtccagctttgttccgttgctggcaaggagctgctttcctttggagga

SEQ ID NO: 22288 - DNA, 201 bp, Homo sapiens
tcaactaataaagccatgtcacatttttttcctttgctgctaatggagtatttgcaaaactctgcacactgccgaaaaaacaatgccatttgtggtattaycataaagccatattctgaaattgcaccagtcttgagtatgacagtcacatctgatatacatgaaaatgtcagtatgcccctgttatgcaaattgaacaaa

SEQ ID NO: 22289 - DNA, 201 bp, Homo sapiens
agcctgtcttggtacatgtgattatatctttagtctcatctagaaataatgtcacaaatctgcactcaagaatctgtagatcataaaacataaaatgaacygtgggtttattctattttaatatttctgtagaagacatctcaactaataaagccatgtcacatttttttcctttgctgctaatggagtatttgcaaaact

SEQ ID NO: 22290 - DNA, 201 bp, Homo sapiens
acatcaaagagcccagtgatggggcataaggcaaacctgtataatgaacgtattcttcatcgagcctgtcttggtacatgtgattatatctttagtctcayctagaaataatgtcacaaatctgcactcaagaatctgtagatcataaaacataaaatgaaccgtgggtttattctattttaatatttctgtagaagacat

SEQ ID NO: 22291 - DNA, 201 bp, Homo sapiens
atagttcctgtttgcaatcaggagaagaaagcaaagaacactcaggattataaaagcagatgagacctacccactagacctggtcagacacaatgttggcrctcttggttctggtgactgtggccctggcatctgctcatcatggtggtgagcactttgaagggtaagtaagccatctttaaggagcaagtccttcttcct

SEQ ID NO: 22292 - DNA, 201 bp, Homo sapiens
gagaacccaactttttattactcgttaaatgaaatgtgcagtctttttccccttttaaggtcaagtatacagtattttggaaaacaaaccataaaaacatrattagagagaacagaggaagtcattattttctccagtcataaagaatgtagcatcattctatcaatctaatgtatctttgtaacggcagtggcagcatgt

SEQ ID NO: 22293 - DNA, 201 bp, Homo sapiens
ggtagcaagaaataaaaacttggaaaacatttagtgccataatgtcttctttttctgcctaaattagattgccataagccctgtagtattataaatccatrgtaacttttaaaagagctgacagtgtgacaactggatgagttgcaactgtcacgaaggtcacagaacatctaatgtacagtcactttccttctaaggcaa

SEQ ID NO: 22294 - DNA, 201 bp, Homo sapiens; identical to SEQ ID NO: 21463

SEQ ID NO: 22295 - DNA, 201 bp, Homo sapiens
tgcactccagcctgggtgacagagcaagaccctgtctcaaaaaaaaaaaaaaaaaaaaaagaaagagaaagagagaaaaaaagaaagaaagaaagaaagaraaagagaaagaaagaaatttcattgagcacctattaagtgttcattataaagtatgtttcctgccactgagaatttacaatcctactgaaatgataagac

SEQ ID NO: 22296 - DNA, 201 bp, Homo sapiens
tcaacactattgctaaacgttttagttatattaataacaagttctgtcatttagctagtttacttttagttttggttgcaaacaaggggaaattagggatrggaagtgaagaaagaacccaaattggggttgatggatttcaaaagttgaagctagaaagacattaacaaaagccaaatccaaaaggcaaggtcagtgggg

SEQ ID NO: 22297 - DNA, 201 bp, Homo sapiens; identical to SEQ ID NO: 21475

SEQ ID NO: 22298 - DNA, 201 bp, Homo sapiens; identical to SEQ ID NO: 21476

SEQ ID NO: 22299 - DNA, 201 bp, Homo sapiens
ttaacctgtgttcagtcaaaaccattaggtaattttttttcctcacatgaatcaccctcaaacaggatgtccctccttttgtgcttacctaattgactttyttcacctaaatgtaggattttagatttacacttttaagatttatcttgacagcctgttttcagcatgttgagatcttttagaaaactaattcagtcatcc

SEQ ID NO: 22300 - DNA, 201 bp, Homo sapiens; identical to SEQ ID NO: 21477

SEQ ID NO: 22301 - DNA, 201 bp, Homo sapiens
tgtaggattttagatttacacttttaagatttatcttgacagcctgttttcagcatgttgagatcttttagaaaactaattcagtcatccagggcaataaytcttcccctaactttgtctctccaacaagtttgataatcatgtctttttgacttttatccttgtcactgataaaagaaaacattaaataggtcaggagtc

SEQ ID NO: 22302 - DNA, 201 bp, Homo sapiens; identical to SEQ ID NO: 21478

SEQ ID NO: 22303 - DNA, 201 bp, Homo sapiens
ctgcagctttgccagaatccatgccaggccccagcagctcctgcttctgggcttcacctgttttcgtgtttataaaatctaaaacttgccccctctactcrccagtgagcccttcgagctctgattcttccaagattgctgagaaagttctgcaatcacatctgcagtatttttttagttatctaaaattcagcatttcat

SEQ ID NO: 22304 - DNA, 201 bp, Homo sapiens
catcagacatatctctagccccaaagcagtgcgcaaacatccgaacagagattggctgagacacagggagaaagaaagacccaatgtcaggctgacctcaracttctaggcttccactcggcacaagcaaggaagagaataacagacacctacaagacacagtatgttttagttaatatttttccactgaaaggtgttact

SEQ ID NO: 22305 - DNA, 201 bp, Homo sapiens
ccttggccactgggcagaatttccacaaagcagactatattaccttcacattcccaaatataaagtttttgtgaacaaatatggttccatatgccttatawtatttatattatttttatattatttttaatttcattaatgtaatgccagccactcaccccaaaggtcttctactattttcacaaaggatcacctcaaaaa

SEQ ID NO: 22306 - DNA, 201 bp, Homo sapiens
acagagcctagcatatcgtaggttctcacaatagttgatgagtaactgaataaatgaaaatgtcagtacatgactggatccccaagagcaatttgtctccrgccacagtgtcaatatacccattgtgaaaagatgccatttttcttcctgatgtatccaccacaggtcagggatcctcctggttccacatattactgtgac

SEQ ID NO: 22307 - DNA, 201 bp, Homo sapiens; identical to SEQ ID NO: 21481

SEQ ID NO: 22308 - DNA, 201 bp, Homo sapiens
ctaggaagctttgtataataatcctttaagagtttaaagaccatgagatttacccttcaagcagtgtaataggaaaatatttatctatatgcacaagagaygtaaatttgatgaaaaaatgatgttaattttaaaactattaaaagccagtttgctattatgattattttgcttcaagtatccaaatgatgatgagccaaa

SEQ ID NO: 22309 - DNA, 201 bp, Homo sapiens; identical to SEQ ID NO: 21483

SEQ ID NO: 22310 - DNA, 201 bp, Homo sapiens
gcagccaacaaacacatgaaaaaatgctcatcatcactggtcattagagaaatgcaaatcaaaaccacaatgagataccatctcacaccagttagaatggygatcattaaaaagtcaggaaacaacagatgctgggaaggatgtggagaaataggaatgtttttacactgttggtgggagtgtaaattagttcaaccattg

SEQ ID NO: 22311 - DNA, 201 bp, Homo sapiens
attattctgatttcatcaccaacctcacagttttccaggcatatgtagaagaagtaattataatgccaaagtatgaaatatagccggtttcataaccggartgaattatggctaattctcctgcagtaaataatttgtttttcaaatctgtattccccagacagctgagccaggccttgcttctcaagtgttttatttaaa

SEQ ID NO: 22312 - DNA, 201 bp, Homo sapiens
tggttcctgcttatagaccgtaagggcttcttcttttgcaccaaaattataaaagttaagtttcttattggtcccttggtgtaatttacccattatcgcasgacagaaggaaggaaactgcagttaaggattattttgatgtttctcttatcacaaatattcacccatagggatggctaaactcagaactttcagttagaa

SEQ ID NO: 22313 - DNA, 201 bp, Homo sapiens
tgattccgacaatggaaaaaaaaacatgaaatattaactatagcattttggtagcaagaaataaaaacttggaaaacatttagtgccataatgtcttcttyttctgcctaaattagattgccataagccctgtagtattataaatccatggtaacttttaaaagagctgacagtgtgacaactggatgagttgcaactgtc

SEQ ID NO: 22314 - DNA, 201 bp, Homo sapiens
tagaccaatggaacagaacaggggcctcagaaataacaccacacatctacaaccatctgatctttgacaaacctgacaaaaacaagaaatggggaaaggaktccctatttaataaatggtgttgggaaaactgtctagccataggcagaaagctgaaactggatcccttccttacaccttatataaaagttaactcaagat

SEQ ID NO: 22315 - DNA, 201 bp, Homo sapiens; identical to SEQ ID NO: 21486

SEQ ID NO: 22316 - DNA, 201 bp, Homo sapiens
ttatcttggatgtttgtttctacacatacaaaactaaaaagttcaaataaaaatacatgccacttttatctttaccagagtacaagacaggtgactaaaaygcaaaaatttaatttgatgtatcatactcattgatttaaaagttatttttaatttccaataattttctctattgattaagcttttctctagtatcttaaa

SEQ ID NO: 22317 - DNA, 201 bp, Homo sapiens
tgtgattttggatgagcttatattgggtctagcaaataaacaggctacaactgttaactgtcatagtaattagttaaatgctctggtcctttctgcagccrggaatttagatagcacttactaaatgggaggggaaaggaaattcctaaatttattttcatatcaaagttttaacttcttacagcctaacagaatgatgtt

SEQ ID NO: 22318 - DNA, 201 bp, Homo sapiens
gaagcagacttttgatgtgtgtctgaaattctctgtatgtcagataaaatcatttcaaggtttaactgtggataatagaaatttctgcaaagtggcctctrtctgtaatattcactgtactgtgatcaaggatactaatgatcataaacttttctctcttccaagcatacttttcactcaaagtagaaagggaagtgaagt

SEQ ID NO: 22319 - DNA, 201 bp, Homo sapiens; identical to SEQ ID NO: 21488

SEQ ID NO: 22320 - DNA, 201 bp, Homo sapiens; identical to SEQ ID NO: 21489

SEQ ID NO: 22321 - DNA, 201 bp, Homo sapiens
ttgcctcaggtgaagtggaacagtcaatactgaaacttaaggaaaaagttgcctgtctgtctaaggcagacattgatggttaactattgttaacaatattractattgcacagaatctaccatggcctgcaaggaggaagtctaaggtaattctaccatccatgacaaccctggccagtgagttggggccgcccttaatgc

SEQ ID NO: 22322 - DNA, 201 bp, Homo sapiens; identical to SEQ ID NO: 21490

SEQ ID NO: 22323 - DNA, 201 bp, Homo sapiens; identical to SEQ ID NO: 21492

SEQ ID NO: 22324 - DNA, 201 bp, Homo sapiens; identical to SEQ ID NO: 21493

SEQ ID NO: 22325 - DNA, 201 bp, Homo sapiens; identical to SEQ ID NO: 21494

SEQ ID NO: 22326 - DNA, 201 bp, Homo sapiens
tatatatttgttaacacttttatcaacatctaactgcttggttccaacccttgttcactcaaaggaaatattttcaacagatttcatggatgatttgattytgaaaataactcaattcagtagagcaataatgtgctcgcagattatccttcatccattgaattataggtatccaatatatcttgtcctttattcagattg

SEQ ID NO: 22327 - DNA, 201 bp, Homo sapiens; identical to SEQ ID NO: 21495

SEQ ID NO: 22328 - DNA, 201 bp, Homo sapiens
ggagcaaccattttccaagtttaaggttcacagatagtcaaatacctgaggtttgggctgtggaagatcctaccttgcttgcattctccagtatccttctyagtgacttactcactctttatggtcagtaacagaatctctctggagcagctgaaggtcatcaggaagaaccagaggacaacatgagaatttatggagagt

SEQ ID NO: 22329 - DNA, 201 bp, Homo sapiens
aacaaaagatagaaagctacttccaaattctaacaccttccagtccagtggcaactcagtcactgcctcttaattgaagttttttttgtttgtttgtttgyttgtctgtttgtttttgagacggagtctcgctctatcacccaggctggagtgcagtggtgcaatctcggctcactgcaagctccacctcccgggttcatg

SEQ ID NO: 22330 - DNA, 201 bp, Homo sapiens
ttgatcttcaatcactgataccctttcttccagttgatcaaattggctcctgaagcttatgcatgtgtcaggtagttctcgtgccatggttttcagctccwtcaggtcatttaaggacttctctacactggttattctaatataagtgataagtgctagggaaaaaataaaacagaaaaaatagatagtaattgccatgtt

SEQ ID NO: 22331 - DNA, 201 bp, Homo sapiens
aattattaaatgtgaacaaaagatagaaagctacttccaaattctaacaccttccagtccagtggcaactcagtcactgcctcttaattgaagttttttttgtttgtttgtttgtttgtctgtttgtttttgagacggagtctcgctctatcacccaggctggagtgcagtggtgcaatctcggctcactgcaagctccac

SEQ ID NO: 22332 - DNA, 201 bp, Homo sapiens
acagaaggcttaaataagtgtcagagtctcataatatgagattcataatatgactttcaaagtgttcagtttgcaattaaaaagcactcatcataccaagragcaggaaatgtaaacttgaataaaaaaagaatcaatcatcaatagatgccaacactgagacaacaaagatgttagaattatctgataatgattttaaag

SEQ ID NO: 22333 - DNA, 201 bp, Homo sapiens
agttgccactaccgtcaaaggaagttttgagacttaaaagaaaaacaatgaatttagatttccaaaattctaaaggacaatgaaatattgaattctgtgamcttgttattgtcagagaaattaaaactgggagaaaaggctctcaaacctagccatatggctgcacttattgggcaggaagaagctcccaatctttggtgc

SEQ ID NO: 22334 - DNA, 201 bp, Homo sapiens
tcaaaacaacaacaaagtaagtgccattgtcttcttttcatatataataaaattgaaatcaattcttaagtcaattatttgaggcaatatagccagtaaastgccacttcaggatttgagcctatatatttctatcttcaaagtccatactttttccaaacaccccagattactcccttgagtctcagtctattgtccact

SEQ ID NO: 22335 - DNA, 201 bp, Homo sapiens
gacagctttgttgccactagttgtatacaataacaaccagaacctgggctactctaaaagtctccaaatcattcttaaaaaaaaaaaaaaaaaaaaaaagrcaagtaagtcctgcctttagaatattatgaataatttttgctacttcctaaggaaattttctccagtaaaagaaccaagcctcagagttagcaagtttaa

SEQ ID NO: 22336 - DNA, 201 bp, Homo sapiens
aattatttgaggcaatatagccagtaaagtgccacttcaggatttgagcctatatatttctatcttcaaagtccatactttttccaaacaccccagattaytcccttgagtctcagtctattgtccacttaactattatataagttcttgatttgctcttcaaaatttgttttccacgatgttatttcacaactggagttt

SEQ ID NO: 22337 - DNA, 201 bp, Homo sapiens
aaccagggagcaaatcaaagcaagggaagtctttcaatcttttagcatctctggtaaattagtaaggtatcctcctgcacgttgctctgggtttgaaaagrttttaaaacaaattacttttttctcttggcctgtctcaggagcaacctaaattctacttttcaaatgctgaaatgcccttaaaagggaggggttgaaatg

SEQ ID NO: 22338 - DNA, 201 bp, Homo sapiens
cctagcactttgggaggccaaaacaggtgaattgcttgggcccaggaattggagaccagcctgggcaacacggtggaacctcatctctttaaaaaaaaaaattgtatttatttgaatttcactcatctgaactttctcacccacatttggtagagagtccaacaactagcatagtgattggtcatgtaaaagctaatggtt

SEQ ID NO: 22339 - DNA, 201 bp, Homo sapiens
cacacttgtagatttatcgttccgaatccaacatcggctgagccatctatgtgaatcagtgtatgccctaaccccttccccagatttcgctttcctcacaytcccttccagccacatcgctccattgtctgcaaataaccttgccttttacttcaaagagaaaattgaagccaccctgcagaaaatgcctctttccactca

SEQ ID NO: 22340 - DNA, 201 bp, Homo sapiens
ttcttaattgccttcagctcaacaattctttatattttggagtggcatattctggtcccccacacaataatagtctataattccttgcctctgaaatttayttcagccccatattcaaactctcagagaagttctgtctcattttaaataaagatgcatcattcacttcagtcttgaaactaccctcttttaaatcacaca

SEQ ID NO: 22341 - DNA, 201 bp, Homo sapiens
gggagtgtaaattcgttcaaccattgtggatgacagtgtggtgattcctcaaggatctagaaccagaaataccatttgacccagcaatcccattactgagyatatacccaaaggattataaatcatccttctataaagacacatgcacacgtatgtttattgcagcactgttcacaatagcaaagacttggaaccaaccca

SEQ ID NO: 22342 - DNA, 201 bp, Homo sapiens
cctaataacctcaaaatatataaaataaaagatggacaacattataaaaagaaatagacaaatgtacaataaataaaatattttaacacaactcatttagtatctagtaagacaagtactccccccaaaatcagtaaagtatctagaagatttgaataaatattaacagattggattcactgaccttgttacaagaaagaa

SEQ ID NO: 22343 - DNA, 201 bp, Homo sapiens
aaaaacaagcaatggggaaaggattccctatttaataaatggtgttgggaaaactggctagccagatgcagaaaactgaagctggaccccttcctttacaycttatacaaaaactaactcaagatgtattaaagacttaaatgtaagacctaaaactataaaaaccctagaagaaaacctaggcaataccattcaggacat

SEQ ID NO: 22344 - DNA, 201 bp, Homo sapiens
tcctaataacctcaaaatatataaaataaaagatggacaacattataaaaagaaatagacaaatgtacaataaataaaatattttaacacaactcatttagtatctagtaagacaagtactccccccaaaatcagtaaagtatctagaagatttgaataaatattaacagattggattcactgaccttgttacaagaaaga

SEQ ID NO: 22345 - DNA, 201 bp, Homo sapiens
atcctaataacctcaaaatatataaaataaaagatggacaacattataaaaagaaatagacaaatgtacaataaataaaatattttaacacaactcatttagtatctagtaagacaagtactccccccaaaatcagtaaagtatctagaagatttgaataaatattaacagattggattcactgaccttgttacaagaaag

SEQ ID NO: 22346 - DNA, 201 bp, Homo sapiens
aatcctaataacctcaaaatatataaaataaaagatggacaacattataaaaagaaatagacaaatgtacaataaataaaatattttaacacaactcatttagtatctagtaagacaagtactccccccaaaatcagtaaagtatctagaagatttgaataaatattaacagattggattcactgaccttgttacaagaaa

SEQ ID NO: 22347 - DNA, 201 bp, Homo sapiens
agttacaaccacagtgcatgctaagtgcttagctaagaggggaaaggcattaaatttgtgggcggaagaggtgaacagaaatgtgttctaattgacagctrtcaggtttggtactatctgaggttttgggtatcggctaatgtcttggaacatgtcccccaaagataagtgggtgactactgtatattcaaaataagcatt

SEQ ID NO: 22348 - DNA, 201 bp, Homo sapiens
gtctaggtaagaatttctttgtattgcttgggtttgcacatttttttttttttggttgttttttttttttttttttttttttgacagaatttcactcttaycacctgggctggagtgcagtggtgggatatctcggctcactgcaacctccgcctccggggttcaagttatcctcccacttcagccttccaagtagctgca

SEQ ID NO: 22349 - DNA, 201 bp, Homo sapiens
ataacttccaaatgtgaaacagcctaaactaaactacctagaaattttgttgctgacataatttaaattttaaaatgctgatggatgcttccagtgtgcayggtcctttggaattttaaagaagtataagagctctgcacccaaagtgtatgcatatagaagtaggtggtggagttttatgaaatctacttattaggaagc

SEQ ID NO: 22350 - DNA, 201 bp, Homo sapiens
ttagagctttcatgttttttctagaaatcttttgtccaagtcctccagttattcctaatgggagacacacaggaaaacctctggaagtctttccctttggraaaacagtaaattacacatgcgacccccacccagacagagggacgagcttcgacctcattggagagagcaccatccgctgcacaagtgaccctcaaggga

SEQ ID NO: 22351 - DNA, 201 bp, Homo sapiens
gcctcagcatccatttagaatatgtttagctttctcatgccagaagcagggcttagtcacccttaatgccctttctagttctgtacctcctcccaattttkcaacgtggtcgagccagatatctgccttatacaactgcctcctggtgaccacctctctatgggacagctagataaaacctacttgactagcgtccctgac

SEQ ID NO: 22352 - DNA, 201 bp, Homo sapiens
aagcgcagagactccagcccagctgcaatgggggaagaggatttaccgacagaaaaaggaaactgacgtacagaaaacagaagtgaggtacagaaacagccgattggttatagctcagcgtttgccttatttgaaaacagttcaaacagttggccacatttgattggccaaaactcggtgattggcgtaagagtagtctgc

SEQ ID NO: 22353 - DNA, 201 bp, Homo sapiens
ttcagaaaatttgcatttatattctcaagagatcttgggttataatttgcttttattttaatgtccttatcaggtttgggcatcaagattatgttggcctsataaaatgtgttaaaaattatttattttttctagtgtctggaacaatttgtgtaacattatttttccttatatgtttggaagaattcagcagtgaagcaa

SEQ ID NO: 22354 - DNA, 201 bp, Homo sapiens
aggtatatacatatatatacgtatatatacatatacatatataggtatatacatatatatacgtatatatacatatacatatataggtatatacgtatacrtatacatatataggtatatgtatacatatatacacactatatatatatacacatatatatagtgtgtatatatgcacacatcttaatcatgcagttcaat

SEQ ID NO: 22355 - DNA, 201 bp, Homo sapiens
gtatgtatatgtgtatatatgtacgtatatatacatacgtacgtatatatacgtgtatacgtatatatacatatacatatataggtatatacatatatatacgtatatatacatatacatatataggtatatacatatatatacgtatatatacatatacatatataggtatatacgtatacgtatacatatataggtata

SEQ ID NO: 22356 - DNA, 201 bp, Homo sapiens
tgtatgtatatgtgtatatatgtacgtatatatacatacgtacgtatatatacgtgtatacgtatatatacatatacatatataggtatatacatatatatacgtatatatacatatacatatataggtatatacatatatatacgtatatatacatatacatatataggtatatacgtatacgtatacatatataggtat

SEQ ID NO: 22357 - DNA, 201 bp, Homo sapiens
tgacttaaagtttgtccacttgtcatcttgcctccaggctgtcttaatctttgtacttgaactgttccactcagggggtaagaagcaaggaaagagtagcscaaagaaaagagtaggaaaaggaagaggctatttcttcctaaggaggggaagaagttgcctggtccttcagggcaaacattaggccttttccagagcaga

SEQ ID NO: 22358 - DNA, 201 bp, Homo sapiens
gtgggaaaaagggactgagggaggggtggagggaaggcagtaaggcacagttatgtaaatcaggaagaaaaatgtattcactggagacgacatgaaaacawctgcctctgaacactaaccagtatctgtataattgacagtctccataagttcatgaggggtacatgggcatgcaaagttcaaaattggaaatgtggatat

SEQ ID NO: 22359 - DNA, 201 bp, Homo sapiens
gggagagcaccatccgctgcacaagtgaccctcatgggaatggggtttggagcagccctgcccctcgctgtgaactttctgttcgtgctggtcagtatccrcttccacatatcctaaatgggttcagaatatgtggacccaatccctcatgtttctgtaataagactatggtatttgtttgtgagcttaactttgtcataa

SEQ ID NO: 22360 - DNA, 201 bp, Homo sapiens
tgaagaagaaatcaaaattccaaatggtgttgtatcaaagaaatattaatgaggcacaaaactagttaaatggggtcactaaaactgttttatttaatatrgaaataaaatatcaaagcaggactaattcttgaaagataattcatgtaatatgaaaagaagaagaaacttgatataaaaaatagattttatcacttcagc

SEQ ID NO: 22361 - DNA, 201 bp, Homo sapiens
ggaatgggggaaatcaaaagttaagcttgggacataactttagtgttcctcttagatatccagatggatatgttggagagtcccaggctgcccatagatakgtagaagccatcattgtatctgctatgcttgaaatcaggactgaaagagatcttcacctagggagtgagtgctgctagagaacagatgcatggactgagc

SEQ ID NO: 22362 - DNA, 201 bp, Homo sapiens
cttgacataaaaaataaggagaaaatggtacttcacaccagtataaaatctatatatctatatctatatatatctatatctatatctatatatatatatawaatcaaattttaaaagataatcagaagggcgaaaccacttggtccataaaacaaaagaggggtgagagaaacaagagctagcaagctttctgtctctctt

SEQ ID NO: 22363 - DNA, 201 bp, Homo sapiens
tcaaactcatcagttataatagtaaatgtgaatgattccaatccccccttttgaaagacaaaggcttctaaatatggtcagaatcctatttacagtagcaycaaaaagaataaaatacttaggaatcaatttaatcaaggaggcacaagacctgtgcactgaaaactcagtaactgaaaatgagcaaatgatgtgatagac

SEQ ID NO: 22364 - DNA, 201 bp, Homo sapiens
taaaaattcaaagttttagaaaacggagtaccttagatcttgatcaaagagaaatttaaaaacagccattgcagattacctggagaataacaatcgctaaygatcctcaagtgcatgtgcctcaagcattcttctaagtcctttacttgaattgatttacttagtctttaaaagaccctttgaaatggatatcatgcatat

SEQ ID NO: 22365 - DNA, 201 bp, Homo sapiens
ttgggaggctgaggtgggtggattacctgaagtcaggaattcaagaccagcctggtcaatgtggtgaagcctgtttctactaaaaatgcaaaaatcagccragtgtggtggcaggcacctgtagtcccagcagctaaggaggctgaggcaggagaatctcttgaatccgggaggtggaggttgcagtgagccaagatcgca

SEQ ID NO: 22366 - DNA, 201 bp, Homo sapiens
tacaaggggtacctgctatgaaaggccagagaggcagcttatgatgggcaccctgagaatggagtatggagagagatgataaaatatgtcttgctactcakgagtgaattagcacaaacacatgaagatttgagtggttaactgaggatataggcactccgataggaggtcagaatgtgaaactacaagctgaagttcttg

SEQ ID NO: 22367 - DNA, 201 bp, Homo sapiens
tagcagaggcctaatacatttattttgcagtttctactttccttaagaagaaaagtacgcttaattggcaacacagtcacagtatgacaactgtagaatcrccttggattatactttaaaattttttatggaattgagagctcttgttttctttctagatatcttttgtccaaatcctccagctatccttaatgggagaca

SEQ ID NO: 22368 - DNA, 201 bp, Homo sapiens
ttgttgtcccttaacttcatgagaaaatcaaaagtctgttcagcctctcagttgccccgtcctgattcagctgcccattcccaaacaataagcagcccagktgccaagcccaaatacccagctctcaactggattctcatcttctcctagatcatggcccaggaatgcttcactagtttgttagctttctgatgctttaac

SEQ ID NO: 22369 - DNA, 201 bp, Homo sapiens
tcttcaggaagcataggaaattcccccataactaacaagtactctggaactgtcctttccacagtgtgtcagccgcctccagaaatcctgcatggtgagcrtaccccaagccatcaggacaacttttcacctgggcaggaagtgttctacagctgtgagcctggctatgacctcagaggggctgcgtctctgcactgcaca

SEQ ID NO: 22370 - DNA, 201 bp, Homo sapiens; identical to SEQ ID NO: 4736

SEQ ID NO: 22371 - DNA, 201 bp, Homo sapiens
gcctcagaatagacaaagaccttagagtttgtctataatggtctgcctcctacattttattttgattttattttatttaaaaactatttattagagttgaygtcccactctgttgcccaggctgaagtacagtgatacaatcatggctcactgcagcctcagattcctaggctcaagccatccacgtcctacattttatcc

SEQ ID NO: 22372 - DNA, 201 bp, Homo sapiens
tagaccaatggaacagaacagaggcctcagaaataatgccacacatctacaaccatctgatctttgatgaacctgacaaaaacaagcaatggggaaaggaktccctatttaataaatggtgttgggaaaactggctagccagatgcagaaaactgaagctggaccccttcctttacaccttatacaaaaactaactcaaga

SEQ ID NO: 22373 - DNA, 201 bp, Homo sapiens
ctttagtcattggtgtgcaatcagagaaattgggggaaatctgtaaaacagatttggtctcaggtgacagtctcattacctgaataacaatggtacaaatygggattaccttcctaggaaatatgtagatggagaatccaccaatactgataacttcacattggatagccagagctaggagaaaatacctcatgccctgta

SEQ ID NO: 22374 - DNA, 201 bp, Homo sapiens
aaatggccatactgcccaaggtaatttatacagtcaatgctatccccatcaaattaccaatggctttcttcacagaattacaaaaaaaaaaaaaaaaaaaactactttaaacttcatatggaaccaaaaaatagcccatatagccaagacaatcctaagcaaaaagaacaaagctggaggcaccacgctacatgacttcaa

SEQ ID NO: 22375 - DNA, 201 bp, Homo sapiens
atgaggcaagaacccttccagagtaagccccaatttaggggcatgcctgtcccgaaacagtatgactgtactttagtcattggtgtgcaatcagagaaatygggggaaatctgtaaaacagatttggtctcaggtgacagtctcattacctgaataacaatggtacaaatcgggattaccttcctaggaaatatgtagatg

SEQ ID NO: 22376 - DNA, 201 bp, Homo sapiens
aaaatatccgtaatctgataagcaacttcagcaaagtctcaggatacaaaatcaatgcaaaaatcacaagcattcctatacaccaataatagacaaacagmgagccaaatcatgagtgaactcccattctaaattcctgcaaagtgaataaactaccttggaatacaacttacaagggaagtgaaggacatcttcaaggag

SEQ ID NO: 22377 - DNA, 201 bp, Homo sapiens
ggccataggcaggctggggaaggcttctataagaaagtgacattttagcagatgcctgaaggaagaattgaagtcagagtgaagataaaattgcgtcacayagaaggaatgtcatagacgggaaaaatgtgtgtctttgggaaactgaaaaaggggaaagggccacaccttggtgaggggaccaagtggcacaagatgagg

SEQ ID NO: 22378 - DNA, 201 bp, Homo sapiens
ccattatctcagcttaaaatatccgtaatctgataagcaacttcagcaaagtctcaggatacaaaatcaatgcaaaaatcacaagcattcctatacaccartaatagacaaacagagagccaaatcatgagtgaactcccattctaaattcctgcaaagtgaataaactaccttggaatacaacttacaagggaagtgaag

SEQ ID NO: 22379 - DNA, 201 bp, Homo sapiens
acagtgtataacatctttgtcttactcttctctttggataactggactcctttacttttcttcttggtatttaaaaatgttacttttactagaaagtttamgagcttcagaatctaagtttacaaatgacattggtcacacatttattgctgtttatccactttaagaaacagttttgctattttgtaaaacaaattggga

SEQ ID NO: 22380 - DNA, 201 bp, Homo sapiens
ctaaaaactctcaataaactaggtattgatggaatatgtcccaaaataataggagctatttataacaaacccaccactaatatcatactgaatgggcaaawgctggaagcatgcgctttgaaaaccagcacaagacaaggatgccctctctcaccactcctattcaacatagtattggaagctctggccagggcaatcagg

SEQ ID NO: 22381 - DNA, 201 bp, Homo sapiens
cgcagatgctgagcgggtgccgcacgaaattccttgcctttgtgtattcacagcctcggctggctatagccaagacgtggcgttgatcctagtgaaagggracttggggatccgacaaacctgagttctggtcctagaaacttaactgtgaggcaacttagcacacctgagtctgtttgctcttctgtaaaatggggacac

SEQ ID NO: 22382 - DNA, 201 bp, Homo sapiens
gataccaaaacctggcagagacacaataaaaaaggaaaatttcaggccaatatccctgatgaacattgatgcaaaaatcctcaataaaatactggcaaacraaattcagcagcacatcaaaaagcttatccacaacgatcaagctggcttcatccctgagatacaaggctggttcaacatacgcaaatcaataaacgtaat

SEQ ID NO: 22383 - DNA, 201 bp, Homo sapiens; identical to SEQ ID NO: 4710

SEQ ID NO: 22384 - DNA, 201 bp, Homo sapiens
gaaaagatctaaaatcgacgccctgacatcgcaattaaagaactagagaagcaagagcaaacaaattcaaaagctagcagaagagaagaaataactaagawcagagcagaactgaaggagatagagaaacaaaaaacccttcaaaaaatcaatgaatccaggagctggttttttgaaaagattaacaaaatagaccactag

SEQ ID NO: 22385 - DNA, 201 bp, Homo sapiens
agtgaggaataatactggttagacttcttcattcagagcccattattgcctcttgttactgcctcgtacccactcccatttctacacaaaacagccttgtmcacagtcaaaatttcaaagtttccattgttgtgatgtttagaatgataaaatacttaaggccatcctctgtgaagtctccctgaattttcctatgttcac

SEQ ID NO: 22386 - DNA, 201 bp, Homo sapiens
gaaaacaaagacacaatgtaccagaatctctgggacacagccaaagagtgtttagagcactaaatttatagcactaaatgcccacaggagaaagcagaaaagatctaaaatcgacgccctgacatcgcaattaaagaactagagaagcaagagcaaacaaattcaaaagctagcagaagagaagaaataactaagatcaga

SEQ ID NO: 22387 - DNA, 201 bp, Homo sapiens
atggaggaatatttaccaagcaaatggaaagcaaataaaagcaggggttacagtcctagtctctgataaaacatactttaaaccaacgaagatcaaaagaracaagagcattacataatggcaaaggatgcaacaagaagagctaactatcctaaatatatatgcacccaatacaggagcacccagattcataaagcaagt

SEQ ID NO: 22388 - DNA, 201 bp, Homo sapiens
tttgtcaccaccagacttgccttacaagggctcctgaaggaagcactaaacatggaaaggaataactggtaccagccactgcaaaaacataccaaattgtraagaccatcaacaatatgaagaaaccacatcaactaatgggcaaaataacaaatcagcatcataatgacaggatcaaatttacacataacaattctaaca

SEQ ID NO: 22389 - DNA, 201 bp, Homo sapiens
tgtggcctggagtttacgttcttgggaagtttttttttttccaaccattttcctgtaccatgtagacttttggctgaagtataacatatatatatatatayacacacacacacacacacacacacacacacatatatacatatatacttatatgtatatatgtatatatacgtatatacgtatgcatacgtgtatgtatat

SEQ ID NO: 22390 - DNA, 201 bp, Homo sapiens
atgtggcctggagtttacgttcttgggaagtttttttttttccaaccattttcctgtaccatgtagacttttggctgaagtataacatatatatatatatacacacacacacacacacacacacacacacacatatatacatatatacttatatgtatatatgtatatatacgtatatacgtatgcatacgtgtatgtata

SEQ ID NO: 22391 - DNA, 201 bp, Homo sapiens
tatgtggcctggagtttacgttcttgggaagtttttttttttccaaccattttcctgtaccatgtagacttttggctgaagtataacatatatatatatatacacacacacacacacacacacacacacacacatatatacatatatacttatatgtatatatgtatatatacgtatatacgtatgcatacgtgtatgtat

SEQ ID NO: 22392 - DNA, 201 bp, Homo sapiens
ggtatgtggcctggagtttacgttcttgggaagtttttttttttccaaccattttcctgtaccatgtagacttttggctgaagtataacatatatatatayatacacacacacacacacacacacacacacacacatatatacatatatacttatatgtatatatgtatatatacgtatatacgtatgcatacgtgtatgt

SEQ ID NO: 22393 - DNA, 201 bp, Homo sapiens
gaagatagtagagcaaagcatttaggcatgagggaaaagtgaggagcaacattagacaaggcgagcagtttgagactccttaaattctcaaaacatgtacytaaataatttatgctgagagattcataaataatgtcatttttaaaaatttattatacttttaagttctagggtacatgtgcacaacgtgcaggtttgtta

SEQ ID NO: 22394 - DNA, 201 bp, Homo sapiens
taacacagaatcttggcagcctccaaatgccagcacccagtaagagttaggagggcatcggggtccagcagacattgagaattttcgacaattgcatgcaraaaataagtcctctcttctttcctttttcccctagaatattcatgcttactcttcagcagcccaaattgcccttttgagccttcttcacgccatcacaga

SEQ ID NO: 22395 - DNA, 201 bp, Homo sapiens
aaaatcagcattttttaaaaaaatccagccatatatcatctggttaatcatgggctctgggctctgagctggggtcctgatggctgctgttaatatttccrgcaagctcattaccttgtttatgtccacctagtgctcttcgcagggtgcacatctctacacgggagctgaccggcatgggcaacaaagcacctgatccca

SEQ ID NO: 22396 - DNA, 201 bp, Homo sapiens
acaattagctgtactttgtttctctctccccagtatgtcagccacctccagatgtcctgcatgctgagcgtacccaaagggacaaggacaacttttcaccygggcaggaagtgttctacagctgtgagcccggctacgacctcagaggggctgcgtctatgcgctgcacaccccagggagactggagccctgcagccccca

SEQ ID NO: 22397 - DNA, 201 bp, Homo sapiens
agctttcatgttttttctagaaatcttttgtccaagtcctccagttattcctaatgggagacacacaggaaaacctctggaagtctttccctttgggaaarcagtaaattacacatgcgacccccacccagacagagggacgagcttcgacctcattggagagagcaccatccgctgcacaagtgaccctcaagggaatgg

SEQ ID NO: 22398 - DNA, 201 bp, Homo sapiens
ggaggtagggtggaagtctctctgctaactttgatattcctgtggtttttctctccaggtcactgtaaaaccccagagcagtttccatttgccagtcctaygatcccaattaatgactttgagtttccagtcgggacatctttgaattatgaatgccgtcctgggtattttgggaaaatgttctctatctcctgcctagaa

SEQ ID NO: 22399 - DNA, 201 bp, Homo sapiens
tactctcagtacctcatataagtggaatcatacagtacctgtccttttgtgacttatttcacttagcataatgtcctcaaggttcattaatgttgtagcaygtgtcagaatttctttcctttttaaggaaaggaagaaattcattgtgtgtatatgcaattttgtttacattttgtttatccatttatctgtcgatagaca

SEQ ID NO: 22400 - DNA, 201 bp, Homo sapiens
gtgtaaaaaaccaattagggaagctcaggtatatgtaaactaaatgaacagtgaggatcaatcagaggaaagcacaccaaatgggaagagaggttctcaarccagtccatggatttacctggaacttgtagctaggctttaaactgtcttcagcttgaaggtcgggtttcaccgggatctgccccatctgcctaggatttg

SEQ ID NO: 22401 - DNA, 201 bp, Homo sapiens
ccctaagcatgaacgaacaggactataaataaaggcagatgttgagtcaaatactctccaaataatatgccctctcgtgacaaaggactgtcttatttaakggcttgtgtttttgatggctcatcttgtctactgatgccacaatagctggcttagcagctgtgtaggaggtgttatggttgatacatagggacagagaag

SEQ ID NO: 22402 - DNA, 201 bp, Homo sapiens
tgccatggcaacgacctagaagttaccgcccctttcctggaaagttctaaataactcgcccctcaatctgcattgatccactccttaatttacatgtaacygaaatgggtttacagcagtataaacacagttgcctgccaggaacccttatgttgctgactctgggtgtgctgcctgtgagttagccctgctctgcaagaa

SEQ ID NO: 22403 - DNA, 201 bp, Homo sapiens
gcaccatgacagtttacaaatgccatggcaacgacctagaagttaccgcccctttcctggaaagttctaaataactcgcccctcaatctgcattgatccaytccttaatttacatgtaactgaaatgggtttacagcagtataaacacagttgcctgccaggaacccttatgttgctgactctgggtgtgctgcctgtgag

SEQ ID NO: 22404 - DNA, 201 bp, Homo sapiens
ccttgttagtgagatgtggctactgaactaccaatcttctcttttaatagctgcactctgcaatgacgatttttaagccctctggtaagcataagatatarcaaaggaaattgccccatatctaacaagtgctctggaactgtcctttccacagtgtgtcagccgcctccagaaatcctgcatggtgagcataccctaagc

SEQ ID NO: 22405 - DNA, 201 bp, Homo sapiens; identical to SEQ ID NO: 4734

SEQ ID NO: 22406 - DNA, 201 bp, Homo sapiens
atggaaccaagttggaaaacactcttcaagatattatccaggagaactgccccaacctagcaagacagtccagcattcaaattcaggaaatacagagaacrccacaaagatactccttgagaagagcaaccccaagacacgtaattgtcagattcaccaaggttgaaatgaaggaaaaaaatgttaagggcagccagagag

SEQ ID NO: 22407 - DNA, 201 bp, Homo sapiens
ccactgcctgagccacttctagaagtagaacagattctgccatcatcctgctttttaatttggtatatatgcctccaattggcagaacctaaccagagccyagctatcaaggaagatgaacgatttatttttaaggcctccattgttagctgtcaaaagacagtgcagaagtgtgaggctgggggccaacagaaatttaac

SEQ ID NO: 22408 - DNA, 201 bp, Homo sapiens
aagaatgaaaaggaatgaacaaagcctccaagaaatatgggactatgtgaaaagaccaaacctacgtttgattggtgtacctgaaagtgacggggagaatrgaaccaagttggaaaacactcttcaagatattatccaggagaactgccccaacctagcaagacagtccagcattcaaattcaggaaatacagagaacacc

SEQ ID NO: 22409 - DNA, 201 bp, Homo sapiens
gcacaagaacttcatgaagcatacacaagtatcaatagccgaatcgatcaagtgaaacaaaggatatcagagattgaagatcaacttaatgaaataaagcwtgaagacaaaaaaagaatgaaaaggaatgaacaaagcctccaagaaatatgggactatgtgaaaagaccaaacctacgtttgattggtgtacctgaaagt

SEQ ID NO: 22410 - DNA, 201 bp, Homo sapiens
aaagaacataaatgacctgatggagctgaaaaacacagcacaagaacttcatgaagcatacacaagtatcaatagccgaatcgatcaagtgaaacaaaggwtatcagagattgaagatcaacttaatgaaataaagcatgaagacaaaaaaagaatgaaaaggaatgaacaaagcctccaagaaatatgggactatgtgaa

SEQ ID NO: 22411 - DNA, 201 bp, Homo sapiens
cttttaaaaactctggagtggacctccatcaaactccagcagacctgcagcagaggggcctgactgttagaagataaactaacaaacataaaggaatagcrtcaacattaacaaaaaggacgtccacatgaaaaccccatccaaaggtcaccaacatcaaagaccaatgatagataaatccacgaagatgaggaaaaacca

SEQ ID NO: 22412 - DNA, 201 bp, Homo sapiens
agacattatggggttcttgctcttgacttctccttgggacaagtagccacaccaaaagccattgcctcaactgagaaggggcttttaaaaactctggagtrgacctccatcaaactccagcagacctgcagcagaggggcctgactgttagaagataaactaacaaacataaaggaatagcatcaacattaacaaaaagga

SEQ ID NO: 22413 - DNA, 201 bp, Homo sapiens
aaaaagaaaataccctcatgaacccaacatatacctgaaatcgcttactagagtgtaaacattggttaagctattttaacctttgattagtttatctatarttcttttaagctgtaatatcctcttcccaaattcaaagcaaattagaaaagggaaggagtgtccccaaatagaggcattccaaggaataaatgtgtttct

SEQ ID NO: 22414 - DNA, 201 bp, Homo sapiens
tagtttgccccatgggattatctattgtttgtcccgctgtttgtgcccgcttttgatagaaattgttctttgttggaatagatacaagcaatgttttgggraaaaataaacatgagaatcatgtgttttgggtaccatcctataaatatttatgaggagagtctgtgctataaatagagagaaatgcttcatagaaataaa

SEQ ID NO: 22415 - DNA, 201 bp, Homo sapiens
atatgtagacgtatacatatggacacgtatatgtatacgtatacatatggacacgtatatgtatacgtatacatgtacatgtgtatatgtatacgtatacrtgtccatatgtatacgtatatgtatacatatgtatatatacatatgtatatacatatatatggaacatatgtatatatacatatgtatatacatatatac

SEQ ID NO: 22416 - DNA, 201 bp, Homo sapiens
aacattagacagggtgagcagtttgagactccttaaattctcaaaacatgtacctaaataatttatgctgagagattcataaataataagtcatttttttwaaatgagcctcatatgttcaataatcagtagactactgatttctcctagtctacccatgtataatttccccaatggaagatagaactttgcttcaattct

SEQ ID NO: 22417 - DNA, 201 bp, Homo sapiens
gaggaaactggaacatatattaactggcaagttcaaaggcaagtataactagtggttatgaatatataggtaacacattaagcaaaaaatatcagccagamacggtggctcacgtgtgtaatcccagcacctttgggaggttgaggcaggcagatcacctgaggtcaggagttggagaccagcctggacaacatggtgaaa

SEQ ID NO: 22418 - DNA, 201 bp, Homo sapiens
cacctcaatattacatcaccaggcattgattagtccagggaaacactgggtgatgagccctgaaaatggacattacagcatcagagtatttacaaactccytaaagaagtcatttttctattccaatcccccatttgatgcttgagaaagctgaagtccagaaaagggaactgatctgctcaaagacaaaccgaaattatt

SEQ ID NO: 22419 - DNA, 201 bp, Homo sapiens
tgaaattacactctcattatggtgacagtaggtctttcagattttgttcgacagtttcccaccttctcactgaagtgaaatgaatgactaggcagcaccttgctacatagcatgaagagaggagacccatagttctttaccaccctatgtcaggtggccgctgagagaagacttgaaaggagatgagcatagatgtatgga

SEQ ID NO: 22420 - DNA, 201 bp, Homo sapiens
ctgtcatctccttagcatattttcagcaacaccaatcatagcaccctgtaattgcagaatacctctggtgaaactcctgaatgaaacttagagctttcatrttttttctagaaatcttttgtccaagtcctccagttattcctaatgggagacacacaggaaaacctctggaagtctttccctttgggaaaacagtaaatt

SEQ ID NO: 22421 - DNA, 201 bp, Homo sapiens
tcctaagaatgtaggctccttcctcagcgctgtgtccccaggatcctgatgaagggctgacacaggataagtgctcaattaatatatattgactaaatgawtaaataacccttcaaaatggttatttttcttcttcaaatgttttgctacttcattaaagttgtaaagtttctactgtccaggaactgttactatccggaa

SEQ ID NO: 22422 - DNA, 201 bp, Homo sapiens
tactgtcatctccttagcatattttcagcaacaccaatcatagcaccctgtaattgcagaatacctctggtgaaactcctgaatgaaacttagagctttcrtgttttttctagaaatcttttgtccaagtcctccagttattcctaatgggagacacacaggaaaacctctggaagtctttccctttgggaaaacagtaaa

SEQ ID NO: 22423 - DNA, 201 bp, Homo sapiens
ctcaaagacaaactgaaattactttttccattttataacagttttatgtaatttatttgagatccaaatgtgttttgatttcccaagatcagatcaactayattaagagagagcctgagatgccgttacaatatgttgtgtgaaattacactctcattatggtgacagtaggtctttcagattttgttcgacagtttccca

SEQ ID NO: 22424 - DNA, 201 bp, Homo sapiens
agatctatcaattacctttgagtataataatggttgatacaaaatgagtgattcctctgcccaggcactataatacaggctacatgtgaattttaatcctkaaaacaaagttattaggtagttcccagttgttctatgtttgtctgttttgttttgcttgagatactgtcttgatctgtcactcaggttggactgcagtgg

SEQ ID NO: 22425 - DNA, 201 bp, Homo sapiens
ctactgtcatctccttagcatattttcagcaacaccaatcatagcaccctgtaattgcagaatacctctggtgaaactcctgaatgaaacttagagctttyatgttttttctagaaatcttttgtccaagtcctccagttattcctaatgggagacacacaggaaaacctctggaagtctttccctttgggaaaacagtaa

SEQ ID NO: 22426 - DNA, 201 bp, Homo sapiens
tgagatccaaatgtgttttgatttcccaagatcagatcaactacattaagagagagcctgagatgccgttacaatatgttgtgtgaaattacactctcatyatggtgacagtaggtctttcagattttgttcgacagtttcccaccttctcactgaagtgaaatgaatgactaggcagcaccttgctacatagcatgaaga

SEQ ID NO: 22427 - DNA, 201 bp, Homo sapiens
tgctgaaattgcgaagcaaagctcaacctgggcaagggatatgatgtttctttggggttcttataaacagatctatcaattacctttgagtataataatgkttgatacaaaatgagtgattcctctgcccaggcactataatacaggctacatgtgaattttaatcctgaaaacaaagttattaggtagttcccagttgtt

SEQ ID NO: 22428 - DNA, 201 bp, Homo sapiens
agagagagagagcaaggcagaggtgctacacactttggaacaagcagatctcgagagaactctatcacaagacagcactagggtgatggtgctcaaccatwagaaaccacctccatgatccagtcacttcccaccaggctccttctccaacactgggaattaccatttgacatgagatttgggaggggacatagagccaaa

SEQ ID NO: 22429 - DNA, 201 bp, Homo sapiens; identical to SEQ ID NO: 4723

SEQ ID NO: 22430 - DNA, 201 bp, Homo sapiens
gctggtctcgaactcctcagctcaagcaattcacccaccttggcctcccaaagtgctgggattataggcatgagccaccgtgcccggcctctatgttttayagagaatatgtgccttagacacatcagataacattctgagacagtaacttgcagacaaaactggattgcaagtccacctcactccagagccttggctttg

SEQ ID NO: 22431 - DNA, 201 bp, Homo sapiens
aggattgcttgacctgggaagtggaggttgcagtgagccatgatcgtgccactacactccagcctgggtgacagagcaagactctgtcccaaggttttgtyttggttaacttgctgtccctttttccaggaattccttgtgggctaccccccaccatcgccaatggagatttcattagcaccaacagagagaattttcact

SEQ ID NO: 22432 - DNA, 201 bp, Homo sapiens; identical to SEQ ID NO: 4730

SEQ ID NO: 22433 - DNA, 201 bp, Homo sapiens; identical to SEQ ID NO: 4732

SEQ ID NO: 22434 - DNA, 201 bp, Homo sapiens
tgttttaccatactcttccttctctcagtcatatcttgtgagccacctccaaccatatccaatggagacttctacagcaacaatagaacatcttttcacartggaacggtggtaacttaccagtgccacactggaccagatggagaacagctgtttgagcttgtgggagaacggtcaatatattgcaccagcaaagatgat

SEQ ID NO: 22435 - DNA, 201 bp, Homo sapiens
gggtagagattcctttttctccctattcccaagggtagaaagactgtaattttttagcttatgtttgtctaaactttctgttaagtcgctatcaacagctrgactcacttgtgcactgggacacgactgagtttgtcctgtgcaattgtggtagaattgacctcgaggtgcccaatctataatagttccgaattcactgtt

SEQ ID NO: 22436 - DNA, 201 bp, Homo sapiens
cacctcaatattacatcaccaggcattgattagtccagggaaacactgggtgatgagccctgaaaatggacattacagcatcagagtatttacaaactccytaaagaagtcatttttctattccaatcccccatttgatgcttgagaaagctgaagtccagaaaagggaactgatctgctcaaagacaaactgaaattact

SEQ ID NO: 22437 - DNA, 201 bp, Homo sapiens
catacactggcatggtattcagccataaaaaatgacagcataaagaagcacttaatgactagaaagagatgtattttacgtggaaaaagaatcagatgaayggcatatatggcaagatctcactttattaaaaaataatacacctatgtagtgagggccaggctgaggctgagagaaatacagtgtataacatctttgtct

SEQ ID NO: 22438 - DNA, 201 bp, Homo sapiens
tggtggcagtaataaccggggaacagatgagctggaggcctcatcaggaggggtgtcccttggtggaaggacaccattcccggccttaaaaggagacgctycagcacggctggggaagcacgtggataccttgtactaaatccactactgcagctcattcttaactgtaagtagaagaggaggacatgctttctgaagctg

SEQ ID NO: 22439 - DNA, 201 bp, Homo sapiens
tgtacatgtgtatacatatgtgtatacatggacacgtatatgtagacgtatacatatggacacgtatatgtagacgtatacatatggacacgtatatgtakacgtatacatatggacacgtatatgtatacgtatacatatggacacgtatatgtatacgtatacatgtacatgtgtatatgtatacgtatacatgtccat

SEQ ID NO: 22440 - DNA, 201 bp, Homo sapiens
gtaacctaaatattttaaactatggtttggaaataatctactagtaggaaaaagatgtgttcaaatgaccattataaagaattccctaagaaacataaaayagctatgcagaatgaaaataagtatatccatacactggcatggtattcagccataaaaaatgacagcataaagaagcacttaatgactagaaagagatgt

SEQ ID NO: 22441 - DNA, 201 bp, Homo sapiens
tatggacacgtatatgtatacgtatacatgtacatgtgtatacatatgtgtatacatggacacgtatatgtagacgtatacatatggacacgtatatgtakacgtatacatatggacacgtatatgtagacgtatacatatggacacgtatatgtatacgtatacatatggacacgtatatgtatacgtatacatgtacat

SEQ ID NO: 22442 - DNA, 201 bp, Homo sapiens
tgtatatatatgtatacatacgtatacatatggacacgtatatgtatacgtatacatgtacatgtgtatacatatgtgtatacatggacacgtatatgtakacgtatacatatggacacgtatatgtagacgtatacatatggacacgtatatgtagacgtatacatatggacacgtatatgtatacgtatacatatggac

SEQ ID NO: 22443 - DNA, 201 bp, Homo sapiens
tgaacctgggaggcgggggttgcagtgagctgagatcacgccactgcactccagcgtggggaacagagtgaggatctgttaaaacaaacaaacaaacaaamaaaaaacacatggactctaataatacatggatacatttagtgaaataaggttaactgagtagagcagcactcataacattttaaaactataagaacatgt

SEQ ID NO: 22444 - DNA, 201 bp, Homo sapiens
cgatgggtgggctgagcgcgcgacccggcagggcggcgggtgtaggatccttctgcgcactggagaccctcggtgcttctgggtaagcgtggagttcccasgtgcaggggcttaagtcgtgacgagcgcagtggaaggcgcagatgctgagcgggtgccgcacgaaattccttgcctttgtgtattcacagcctcggctgg

SEQ ID NO: 22445 - DNA, 201 bp, Homo sapiens
tgcctgtaatcccagctactcaggaggctgaggcaggaaaatcgcttgaacctgggaggcgggggttgcagtgagctgagatcacgccactgcactccagygtggggaacagagtgaggatctgttaaaacaaacaaacaaacaaaaaaaaaacacatggactctaataatacatggatacatttagtgaaataaggttaa

SEQ ID NO: 22446 - DNA, 201 bp, Homo sapiens
cgagattgggcgcattcagggtggtatggctgtaaatcagtatccagttctttttattacttctgaatctgtaagtatcatgtttattatatgtaatattrtatatttgtgctttgtctttattagttcttccagagcttttgttcttattatttaataaagatgttatactgagccacgtgtggtgactcaaacttgtaa

SEQ ID NO: 22447 - DNA, 201 bp, Homo sapiens
tagatgagaatagtattttcaatatttacttctggtaatttggaattaaaaaaaaaacttttgggaaaatttacaataaagtatgattttaacaaaccagkctaggcgtggtggctcacgcttataatcccagcactttgaaaagcagaggcatgcagattgcttgaggccaggagttcaagactagcctgcccaacatgg

SEQ ID NO: 22448 - DNA, 201 bp, Homo sapiens
ttacaaagaatggatctcatccctcttggaaatggtatccttctgatatttgaagaatctagtcatatccttaaaatggctcacagcattccaaacttccrccttcacctagaaatgcttttttttttcttatctcagtctaatgtattttaaactagtctttagctcatttaaccagcccccaatgtcctcttctgttgg

SEQ ID NO: 22449 - DNA, 201 bp, Homo sapiens
actttataaaaatgtacctatgtgttagcaaagattaaaagcaaataatgaatgtaaaaatagctatagtttagtgactcatgagatttctgtcattcatwatttaaactgactgttatttatcctgctcttcctttttccaggaattccttgtgggctaccccccaccatcaccaatggagatttcattagcaccaacag

SEQ ID NO: 22450 - DNA, 201 bp, Homo sapiens
aaagtggactctaataatacatggacacatttagtgaaataaacttaactgagtagagcagaacttataatattttaaaactgtaagaacatgtctgtacmttagcaaatagtagatgagaatagtattttcaatatttacttctggtaatttggaattaaaaaaaaaacttttgggaaaatttacaataaagtatgattt

SEQ ID NO: 22451 - DNA, 201 bp, Homo sapiens
tgaaatctctttccccattcaccccaccattgaatcctagagttgtcctcctagaattacaaagaatggatctcatccctcttggaaatggtatccttctsatatttgaagaatctagtcatatccttaaaatggctcacagcattccaaacttccgccttcacctagaaatgcttttttttttcttatctcagtctaatg

SEQ ID NO: 22452 - DNA, 201 bp, Homo sapiens
cgcttgaacctgggaggcaagggctgcagtgagccaagatcacgccactgcactccagcctggggaacagagtgaggatctgttaaaaaaaaaaaaaaaaagtggactctaataatacatggacacatttagtgaaataaacttaactgagtagagcagaacttataatattttaaaactgtaagaacatgtctgtacatt

SEQ ID NO: 22453 - DNA, 201 bp, Homo sapiens
gtgggcagatcacttgaggtcagtagtttgagaccaccctggccaacataatgaaaccccgcctctactaaaaatacaaaagttagccgagtttggtggcrcatgcctgaaatcccagctactcaggaggctgaggcaggaaaatcgcttgaacctgggaggcaagggctgcagtgagccaagatcacgccactgcactcc

SEQ ID NO: 22454 - DNA, 201 bp, Homo sapiens
gtaaaaagagaaaataaatcatcaacagacctagacattttcaaaagcaaagccatctgaatccatttggagttttttttttttttttatcatggcctgaytatgtttcaattcactgtgacagggctattgttatcactgagattgatgatcaatatcaataagtaatcagtgaaaggtttcacctatttaagatgatta

SEQ ID NO: 22455 - DNA, 201 bp, Homo sapiens
cctgacccagagagtaaaaagagaaaataaatcatcaacagacctagacattttcaaaagcaaagccatctgaatccatttggagttttttttttttttttatcatggcctgactatgtttcaattcactgtgacagggctattgttatcactgagattgatgatcaatatcaataagtaatcagtgaaaggtttcaccta

SEQ ID NO: 22456 - DNA, 201 bp, Homo sapiens
atataccatgctaatgctagtcacagaaagcaggaatagctgtgttaatttcaaacacagcagacttcagaccaagaaaaattattagggataaagagggrcatcatataatgataaaggggccaattatccaagaagacgtaacaatatcccatatgtatgcacctgatggagagacaaaatacgtgaggcaaaacccat

SEQ ID NO: 22457 - DNA, 201 bp, Homo sapiens
cgagattgggcgcatttagggtggtatggttgtagatcagtatccagttctttttattatttctgaatctgtaagtatcatgtttattatatgtaatattrtatatttgtactttgtctttgttagttcttccagagcttttgttcttattatttaataaagatgttatactgagccacatgtggtgactcaaacgtgtaa

SEQ ID NO: 22458 - DNA, 201 bp, Homo sapiens
aatctggtggcagtaataaccggggaacagatgagctggaggcctcatcaggaggggtgtcccttggtggaaggacaccattcccggccttaaaaggagasgcttcagcacggctggggaagcacgtggataccttgtactaaatccactactgcagctcattcttaactgtaagtagaagaggaggacatgctttctgaa

SEQ ID NO: 22459 - DNA, 201 bp, Homo sapiens
tcttgaaaggccccatgcactataaacctcagaagtgaacatatattttaacctacttcttaaaatttatacttaggaaataatcacacactttttaaagyagtttggtataaacttttcattgcagcattatttatattagttaaaatgttagagtaacctaaatattttaaactatggtttggaaataatctactagta

SEQ ID NO: 22460 - DNA, 201 bp, Homo sapiens
atacaggtaacaggtgatgctgggaagtcctgtgaaatggaaggagaacgaagatgaggaatctggtggcagtaataaccggggaacagatgagctggaggcctcatcaggaggggtgtcccttggtggaaggacaccattcccggccttaaaaggagacgcttcagcacggctggggaagcacgtggataccttgtacta

SEQ ID NO: 22461 - DNA, 201 bp, Homo sapiens
tgtgtgttggacatgagagtatttggaggaatacaggtaacaggtgatgctgggaagtcctgtgaaatggaaggagaacgaagatgaggaatctggtggcmgtaataaccggggaacagatgagctggaggcctcatcaggaggggtgtcccttggtggaaggacaccattcccggccttaaaaggagacgcttcagcacg

SEQ ID NO: 22462 - DNA, 201 bp, Homo sapiens
ggcaggctccaaagacatagctgtgtgttggacatgagagtatttggaggaatacaggtaacaggtgatgctgggaagtcctgtgaaatggaaggagaacraagatgaggaatctggtggcagtaataaccggggaacagatgagctggaggcctcatcaggaggggtgtcccttggtggaaggacaccattcccggcctt

SEQ ID NO: 22463 - DNA, 201 bp, Homo sapiens
agggacctattagatgggacatgggcaggggcactcctttattgcttaaaatgcaagactaaattggtgatgcctttctagaaaggaagtatgaagatacraaaatccatcattcctcccaattttgtactgggtgaacagtaattggaagcattctagaaggaactgtccattgtgaaatcttagttgcatactttagat

SEQ ID NO: 22464 - DNA, 201 bp, Homo sapiens
gttctggggcggagtaaagaggcaggctccaaagacatagctgtgtgttggacatgagagtatttggaggaatacaggtaacaggtgatgctgggaagtcytgtgaaatggaaggagaacgaagatgaggaatctggtggcagtaataaccggggaacagatgagctggaggcctcatcaggaggggtgtcccttggtgga

SEQ ID NO: 22465 - DNA, 201 bp, Homo sapiens
cattcatgtagttgcttatttattcttcaaacattcttagccacttacaatgtgccatacattgtgcttatgtgtgttttcttttccatgctaaattaacytctgatgaatagagacaattttttaaagatctccccaatctctgagtataatcaaatgagaaatgttcagtaatcaactgagcacgttaatcaattgaga

SEQ ID NO: 22466 - DNA, 201 bp, Homo sapiens
catcattgttaaaaacaagaaataggggaaaatataaaaaatataaaaattacctgcaataatctctatctagtagtattcttaagcttctttgcatattrttagacatttgcatatacaccttgagattatattgattgcacaatattgaatcctgctttttttaccaaatgacaaacatttctcccatcattataacag

SEQ ID NO: 22467 - DNA, 201 bp, Homo sapiens
ccaggagatccaaaaaggtagggtaggatgtaaaggcttcaatctgttcaagtggatatgagactccctggctccccttacaataagtagcatggattttstctctctgccttacttcctccaaacattctgaatgagaagtgttcaaaccactatttgttcaattgcttaatctactttgggacacaagtttaataaatt

SEQ ID NO: 22468 - DNA, 201 bp, Homo sapiens
ccactgttttggggtgatgactctataagttagtacagtcacagtcactactttttcaaagcattcctataatttcctgtatttatgctatgaaactttgmgaagtagtatgcttttttcttgtggaacccaagaatttgctgcctgcttgtacctccaagtcttccagcttcccttaaatgcacagagtcactttaatgt

SEQ ID NO: 22469 - DNA, 201 bp, Homo sapiens
cattctttgtgacgttgctcacagtaacattatggatacctaataaattttttaaaagacaaaatgttctacgttttgtggcctactctggatggctttawggtaaagtgggtgagtatccctaccctttacatttcaagtgtaggggtgtttagctgtctcttctggctctcatttactgactcttctgggtaaatccat

SEQ ID NO: 22470 - DNA, 201 bp, Homo sapiens
cattcatttggagttggtctcttccaggtggctacccttaacctttgtgctcaaataaactctatccttaaatatattttctgaatctcattatttaaggktgaaaatgtgctaacctaaataattcacaggatttgttttttattctcattttttcctaacctatccacctggttcaaggcacatagattaagaaggaaa

SEQ ID NO: 22471 - DNA, 201 bp, Homo sapiens
cttccttggaatgtagcaatctgtaaccaatcaaaatgctgtaactatgcatggtcccatatggaaaatataatcctgctaaaatttctctgtctctgccyatgtaagtgataccttatgtcctccactttggagtgctgaccccattcatttggagttggtctcttccaggtggctacccttaacctttgtgctcaaata

SEQ ID NO: 22472 - DNA, 201 bp, Homo sapiens
cgaagtcatatagtgtacaataccaagagtggaccctaacataaactatggacttggggtggccatgatgtgtcagtgtaggttcctcaattgcgaaaaaygtaccaccctggtgaaagatgtttataataggggaggttatccatgtataggggcagggagtacataggaaatctctgtatcttctgttcattattgctg

SEQ ID NO: 22473 - DNA, 201 bp, Homo sapiens
aacatatgattccaactatatgccattctggaaaaggcaaaactatggagacagtgaaaatatcagtggttgtcaggggttagggaagaaggggatgaatsggaagagcacagaggattttgagggtagtgaaactactctgtatgatgccataacagtaggtacatgtcataataaatttatccgaagtcatatagtgta

SEQ ID NO: 22474 - DNA, 201 bp, Homo sapiens
atctattgagagaaatagatacttctaaaagcacacaaagataaaaagcacaaattgtaataacaaacaattattgatatgaaaggaaaagcaaagtgtcrgactagaaattattatagggtggggcagagggaagtagtttagattccaaatccctaagagggtcagggaaggcttcagatgagattgggtgtgttcagg

SEQ ID NO: 22475 - DNA, 201 bp, Homo sapiens
ttgcagtccacagtgaagccaagatattaagaagcaatgtgggccaggagaagttagagcagaaatatctctttcaataatgaaagaataagaaaaagaartagaagagctggaaacaataggtaaagtttaggctaggccttagacttctcctgcattgtaatccttctggtttgccacatatgcatgctgtcaggaagt

SEQ ID NO: 22476 - DNA, 201 bp, Homo sapiens
agacaagatcaaaagcaacaaatcttgtatttataaaaaacatgtctcaagtaaaatgacatagtattatacacacacacacacacacacacacacacacmcaaattaagtgaaaatgcaaacaaaaaaaggcaaaaataatatttagagaaagatagaatttaagaaaaaaattgtcaaactggtctacaaaataattgt

SEQ ID NO: 22477 - DNA, 201 bp, Homo sapiens
atggtgtaatctgtcctgtaatgtctaatgtctacctgctattattttctaaatggtgagttaaatgggaaatatgtgtagcgtataaccattttctatcmtttgctttaggtttcgactcattggttccccatctactacttgtctcgtctcaggcaataatgtcacatgggataagaaggcacctatttgtgagagtaa

SEQ ID NO: 22478 - DNA, 201 bp, Homo sapiens
atttgagtgttccttcttctctaaaagagtaaataaaataaaataaagtagaaccaagtcccgcaagagttgttattaatatttgatctccttaggcaccrgaaagtaacctgtcaggtgcagagatgtgataaaacgtacaatcttatttttaggagagaagcatgcccagtaagttaagcaatctgttgtcaacgctta

SEQ ID NO: 22479 - DNA, 201 bp, Homo sapiens
tgttattatgagttactcacagtacccgtaaagtggtatagtgctatttgaaagaggacttagattagctgcaaatagatattgcaaatgtaggacaaccmctgaaaaatgtgaaaaaaagaactataatttatatgttaataagtaagagagaattgcatcatataaaatgctcagttaaaacaataaagatggctgggg

SEQ ID NO: 22480 - DNA, 201 bp, Homo sapiens
ggacatctttgaattatgaatgccgtcctgggtattttgggaaaatgttctctatctcctgcctagaaaacttggtctggtcaagtgttgaagacaactgyagacgtgagtaacccctccctgggaactacttcatgtctgttaaagcataggtgggaccgggcttggtggctcacgcctgtaatcccatcactttgggag

SEQ ID NO: 22481 - DNA, 201 bp, Homo sapiens
agaaaagatgagtagactgactatatagagtttgactctaaaattgagaaaataggtttaaatatctgttgtgtgcatatccatgtgtgtaatatacatgyacatatataaaatgaaattcctcattagaaaaaataataagtttaatttccaaattattagaataactaaaacagctgaatctatctcttccatatagca

SEQ ID NO: 22482 - DNA, 201 bp, Homo sapiens
ggtgtaatgcatgtgacagtgttttgtaatctgaaaacccccatgcatgtctgaaaaaccatgactaagaagtcgtgcaagactgcaggatcaccgaaaarcgagaaatctcaactcctatgatcaggaaaggatgagtgaaaggtatatggctttactagcacttaaagagtgaatctagaaacagattgcatacgacaa

SEQ ID NO: 22483 - DNA, 201 bp, Homo sapiens
gagacagcaagaaaaggtaggctaaacttacattacagaaaagatgagtagactgactatatagagtttgactctaaaattgagaaaataggtttaaatakctgttgtgtgcatatccatgtgtgtaatatacatgcacatatataaaatgaaattcctcattagaaaaaataataagtttaatttccaaattattagaat

SEQ ID NO: 22484 - DNA, 201 bp, Homo sapiens
gcaaatgtttttgtattttatttttctaaaaaagctaaccttggttaataacaaaaatggaaattaagaaagcaaacggaaaagagtaggagaaaactgtrtaaatactataacactatgatcaaagagctatttaaaatgaaaagaatgtggattgagttaatacatgcatgcaaatactataggaaatcatatcagtaa

SEQ ID NO: 22485 - DNA, 201 bp, Homo sapiens
taggatattggtaaaaagaaaaaacaacaataaaaaaatacacacaaaaactcggcaatgtaatcataatttactaataatctctctaaactcatagaacrtatcaataaaactagaaaatgtgagacagcaagaaaaggtaggctaaacttacattacagaaaagatgagtagactgactatatagagtttgactctaaa

SEQ ID NO: 22486 - DNA, 201 bp, Homo sapiens
ggcaagcacagtggctcacatatgtaatcccaacacactgagaggctgaggcaagagtatcacttgagcccaggagctcaagaccagcctagacaacatgrcaaaaacccatctctacaaaaaagtataaaaattagctgggcatggcagcatatgcctgtagtcacagctaggcaggagactaaagtgggaggatcacct

SEQ ID NO: 22487 - DNA, 201 bp, Homo sapiens
gatattgcactaggtaggtcattgataccaaagaatttagaaagtacttcaggagttggaaacttcttttttttttattggattattattgtcatttccamtgttttggggtgatgactctataagttagtacagtcacagtcactactttttcaaagcattcctataatttcctgtatttatgctatgaaactttgagaa

SEQ ID NO: 22488 - DNA, 201 bp, Homo sapiens
aggaggtagggtggaagtctctctgctaactttgatattcctgtggtttttctctccaggtcactgtaaaaccccagagcagtttccatttgccagtcctwcgatcccaattaatgactttgagtttccagtcgggacatctttgaattatgaatgccgtcctgggtattttgggaaaatgttctctatctcctgcctaga

SEQ ID NO: 22489 - DNA, 201 bp, Homo sapiens
agaccagtctgaaaaatcaggagaaattttacaaaagagatttactgccaagaaaccagggaaactttcagaacactctccttttcatatttgtaacaagwttcaattgtacaaatacttctgtgaaactagccatgaagtgtgtacatgaatgaatatatgtattcagtgtgtttatatatttcatttcatacatgtgat

SEQ ID NO: 22490 - DNA, 201 bp, Homo sapiens
agcatttttaaatgcaattggtaaatttcctgactgtaccctcctcatcttgcattgctgaataagtgaggaacctctctatggcatgaagcagaaaaccmttgagcttatgagaagaaacaggaaatacatgtaaaagagaccagtctgaaaaatcaggagaaattttacaaaagagatttactgccaagaaaccaggga

SEQ ID NO: 22491 - DNA, 201 bp, Homo sapiens
tcatcccaaggtaacatcaaggagaagaaaatcttttgctattcttgtaagtctctttgtttctgtgatccacctatcagcttaattgaagagaaagaggmggtagggtggaagtctctctgctaactttgatattcctgtggtttttctctccaggtcactgtaaaaccccagagcagtttccatttgccagtcctacga

SEQ ID NO: 22492 - DNA, 201 bp, Homo sapiens
gtggaaaatggaatattggtatctgacaacagaagcttattttccttaaatgaagttgtggagtttaggtgtcagcctggctttgtcatgaaaggaccccrccgtgtgaagtgccaggccctgaacaaatgggagccagagttaccaagctgctccaggggtgagtctgactgatgcctagaagggccctgccagtgacat

SEQ ID NO: 22493 - DNA, 201 bp, Homo sapiens
cctagaatctgacaaaaattagaataaatccgatgtctccttttctctcttttttttaagcatttttaaatgcaattggtaaatttcctgactgtaccctmctcatcttgcattgctgaataagtgaggaacctctctatggcatgaagcagaaaaccattgagcttatgagaagaaacaggaaatacatgtaaaagagac

SEQ ID NO: 22494 - DNA, 201 bp, Homo sapiens
caggtggccgctgagagaagacttgaaaggagatgagcatagatgtatggacgctctttgttgcaccagtgtgataggtgatggagggacctattagatgrgacatgggcaggggcactcctttattgcttaaaatgcaagactaaattggtgatgcctttctagaaaggaagtatgaagatacaaaaatccatcattcct

SEQ ID NO: 22495 - DNA, 201 bp, Homo sapiens
tgccagcataggcctcacagaccacagcacctagaatctgacaaaaattagaataaatccgatgtctccttttctctcttttttttaagcatttttaaatrcaattggtaaatttcctgactgtaccctcctcatcttgcattgctgaataagtgaggaacctctctatggcatgaagcagaaaaccattgagcttatgag

SEQ ID NO: 22496 - DNA, 201 bp, Homo sapiens
gtaaagaggcaggctccaaagacatagctgtgtgttggacatgagagtatttggaggaatacaggtaacaggtgatgctgggaagtcctgtgaaatggaasgagaacgaagatgaggaatctggtggcagtaataaccggggaacagatgagctggaggcctcatcaggaggggtgtcccttggtggaaggacaccattcc

SEQ ID NO: 22497 - DNA, 201 bp, Homo sapiens
aagcatgcgctttgaaaaccagcacaagacaaggatgccctctctcaccactcctattcaacatagtattggaagctctggccagggcaatcaggcaagaraaaggaataaagggtattcaaataggaagagaggaagtcaaattgtctctgtttgcatatgacatgactgtatatttagaaaaccccattatctcagctt

SEQ ID NO: 22498 - DNA, 201 bp, Homo sapiens
ataggtaaacatcttcagttagaacccttctattattatttttcggctccccagaagtcttcttggttgcctagactcactggcaacatctcatttgaagygacagtcttggttgtttttgtccagcctattcctgacaactccgggttcgcccttctctgccactagacattttacattcattatttgagtgttccttct

SEQ ID NO: 22499 - DNA, 201 bp, Homo sapiens
tactttttccattttataacagttttatgtaatttatttgagatccaaatgtgttttgatttcccaagatcagatcaactacattaagagagagcctgagmtgccgttacaatatgttgtgtgaaattacactctcattatggtgacagtaggtctttcagattttgttcgacagtttcccaccttctcactgaagtgaaa

SEQ ID NO: 22500 - DNA, 201 bp, Homo sapiens
gtggaaggcgcagatgctgagcgggtgccgcacgaaattccttgcctttgtgtattcacagcctcggctggctatagccaagacgtggcgttgatcctagygaaagggaacttggggatccgacaaacctgagttctggtcctagaaacttaactgtgaggcaacttagcacacctgagtctgtttgctcttctgtaaaat

SEQ ID NO: 22501 - DNA, 201 bp, Homo sapiens
cactgcagtgcaaagtcattcatgttgtgcagcttaagtgtcaaaatctcgatgtaaatcctatttactaatcaaaattatgtcagaaatagtgaaatgtrttaaggcatggacatctgcctataaacaatttagagtactctgacagaaaatataggatgattttagtattattttctaatctaagtttttgcttagtat

SEQ ID NO: 22502 - DNA, 201 bp, Homo sapiens
acgagcgcagtggaaggcgcagatgctgagcgggtgccgcacgaaattccttgcctttgtgtattcacagcctcggctggctatagccaagacgtggcgtygatcctagtgaaagggaacttggggatccgacaaacctgagttctggtcctagaaacttaactgtgaggcaacttagcacacctgagtctgtttgctctt

SEQ ID NO: 22503 - DNA, 201 bp, Homo sapiens
ctgtgttcacagtcactcactctctatgagaccctgagcaagatacttatcctcagtaaatttcattttccttgcctgtgaaatggagataataatagttmctaccttacttaacatagtgcctcatttatgatgcatgtcagaaaatgttagctattatttacacatgattgttattactgatattaaaaagtgagtaaa

SEQ ID NO: 22504 - DNA, 201 bp, Homo sapiens
ttcctgggccaactccctcatggccgtgtgctacttccacttaatctccagcttggggcaaaggtgtcctttgtttgcgatgaagggtgagtgtgacccamcgttgagaccaaggactcagtgtggagaatcactctcttgagatcaggggttaatccaattaaggagctgacctagtagataagaagtacccagagagat

SEQ ID NO: 22505 - DNA, 201 bp, Homo sapiens
ctctgcgcgcccgggtccgaaggcagcgcgatgggtgggctgagcgcgcgacccggcagggcggcgggtgtaggatccttctgcgcactggagaccctcgstgcttctgggtaagcgtggagttcccaggtgcaggggcttaagtcgtgacgagcgcagtggaaggcgcagatgctgagcgggtgccgcacgaaattcctt

SEQ ID NO: 22506 - DNA, 201 bp, Homo sapiens; identical to SEQ ID NO: 4731

SEQ ID NO: 22507 - DNA, 201 bp, Homo sapiens
cctatttgtgacagtgagttgaaatatcccttcctatttcttttaccgacacattctaatttttctctggaataataaaaatcttaactgaattccttctrtgcaatctgtccttcacacggctgaagactgcggtaatgttctcgaatattcctatggggttcctggcaactctttctttaagttcttccttatcctggg

SEQ ID NO: 22508 - DNA, 201 bp, Homo sapiens
agatcaaactcatcagttataatagtaaatgtgaatgattccaatccccccttttgaaagacaaaggcttctaaatatggtcagaatcctatttacagtarcatcaaaaagaataaaatacttaggaatcaatttaatcaaggaggcacaagacctgtgcactgaaaactcagtaactgaaaatgagcaaatgatgtgata

SEQ ID NO: 22509 - DNA, 201 bp, Homo sapiens
tttcattgataaaagatgaagtgtttattaacccccaaagaggcagtgtaccataccaagtgagggtgagggctttgcaaccgctaaggcctgtgttcacrgtcactcactctctatgagaccctgagcaagatacttatcctcagtaaatttcattttccttgcctgtgaaatggagataataatagttcctaccttact

SEQ ID NO: 22510 - DNA, 201 bp, Homo sapiens
aaacacctatttgtgacagtgagttgaaatatcccttcctatttcttttaccgacacattctaatttttctctggaataataaaaatcttaactgaattcyttctgtgcaatctgtccttcacacggctgaagactgcggtaatgttctcgaatattcctatggggttcctggcaactctttctttaagttcttccttatc

SEQ ID NO: 22511 - DNA, 201 bp, Homo sapiens
tgtcattctaatttccataagatggtaaagaataactgagtgatgaggaaacagtggtacatgttgaagtgagttaactcttcaagcttccattctaaaayccctaataccaactcatacataaaatctccaggtactggtactgttttatcatttcattgataaaagatgaagtgtttattaacccccaaagaggcagtg

SEQ ID NO: 22512 - DNA, 201 bp, Homo sapiens
aagcacatatgcttaaacgatatcacacttgatttcatgtgccttctcaatcctcagctttccctgattaagaatacctaattactctgcccatttcctcygcaccctccaccttggcctttccactcactattactactatctcctgccttcttggtctctactattctcctcaccatccctgctccctggactatgatc

SEQ ID NO: 22513 - DNA, 201 bp, Homo sapiens
ggaggtggaggttgcagtgagttgagattgtgccactgcactccagcctgggcaacaaaggcaaaactccatctgaaaaaaataaataaataaattaaatwaaataaaacaagaaaagaaactaaagtgatagagaaatagaaggaatacacacacagaaatgatctcaccttctttaaaatgctcctcaaggaggtctac

SEQ ID NO: 22514 - DNA, 201 bp, Homo sapiens
aggagaattgcttgaacccaggaggtggaggttgcagtgagttgagattgtgccactgcactccagcctgggcaacaaaggcaaaactccatctgaaaaamataaataaataaattaaataaaataaaacaagaaaagaaactaaagtgatagagaaatagaaggaatacacacacagaaatgatctcaccttctttaaaa

SEQ ID NO: 22515 - DNA, 201 bp, Homo sapiens
tactactgattggttggggatgggggtgtgggaaatgttcctcatgtgctgtgtccacctctggttgggggccacaggaccagttgagtcatgagtcacargtccaggtagagtcagtcagttgccaaatgcaaaaacctgaaaaacatctcagaagaccaatcttatattctacatagtgatgttatctataggagcaat

SEQ ID NO: 22516 - DNA, 201 bp, Homo sapiens
ggaaggtactgtaagatagaaaactacccacatcatggagcagatgagcaaagttaataatgaacagcctttcttaatccaagttagtgctacactttccyttctccccatctcttatgactcttctaatacatggttctacaccaagattgttcaagatccagttttacaattaatcctgtaaatatgctaatatgactc

SEQ ID NO: 22517 - DNA, 201 bp, Homo sapiens
gtaagctacaggcaggttgagaccttatgtactaaaaaaagtttttagtttactctacttggctccaaaattctgtttctttcctgtaggtaaatcatgtygtaatcctccagatcctgtgaatggcatggtgcatgtgatcaaaggcatccagttcggatcccaaattaaatattcttgtactaaagggtgagttggcat

SEQ ID NO: 22518 - DNA, 201 bp, Homo sapiens
ggacaagaaagagaagtggattaaataactaaaagatgtgacaatcttgggctttgagatctttggattataccagttgaattgaattacagataataacraagtttacatttttctgggaggcataatatggggatgaaacagatctgaaaggaaagttttttttgaaagggagctgatcctgaggcagtctggtgagtt

SEQ ID NO: 22519 - DNA, 201 bp, Homo sapiens
agggatgcaggtgttacctgacaactgccccgcatggaactgtcctcgccccccacaccaagccaccacggccatcatcaccatgcacttaattgacagcrtactttaagacagatgcatgccaggcacttgcggattagaagagcaagggaagccccagaacatgcaatgtaaccgttgcaggtagaagggacagtagat

SEQ ID NO: 22520 - DNA, 201 bp, Homo sapiens; identical to SEQ ID NO: 4709

SEQ ID NO: 22521 - DNA, 201 bp, Homo sapiens; identical to SEQ ID NO: 4711

SEQ ID NO: 22522 - DNA, 201 bp, Homo sapiens
tgattctccctgcaaacctggtaggaaaatattattccctttatgaagatgaaactgaggctcagcaagattaagcggtttgcctaagacctcatagccaytaagtagaagacattgggttcaagattcaatctatgaacccaacatttttaatactatataccattctctttttgtattaatttcctattgctgctgtaa

SEQ ID NO: 22523 - DNA, 201 bp, Homo sapiens
tttctacttctgtaacctctctgtatccaaatcctggtaaatggcctcaagtcttcttggaaaaggctaggggaagatttacaatacatgcttttgattgygtagcatggtgcttcctcaagagaatccagtctcccatccgttggtgctgctctgggtctataaactattcaagtctaggaattgttgatgaacaatgaa

SEQ ID NO: 22524 - DNA, 201 bp, Homo sapiens; identical to SEQ ID NO: 4713

SEQ ID NO: 22525 - DNA, 201 bp, Homo sapiens
tggataaagagtcaagacccattggtgtgctgtattcaggagacccatctcatgtgcaaagacacacataggcgcaaaataaagggatggaggaatatttwccaagcaaatggaaagcaaataaaagcaggggttacagtcctagtctctgataaaacatactttaaaccaacgaagatcaaaagagacaagagcattaca

SEQ ID NO: 22526 - DNA, 201 bp, Homo sapiens
ttcagttgtctaccatgctgttaattaaatgaaaacatcctgttatttcagggtccttccttgacaaagtactatacagctgaagaacatctcgaatacarttttggtgggaaaggagccaattgatttcaacagaatcagatctgagcttcataaagtctttgaagtgacttcacagagacgcagacatgtgcacttgaa

SEQ ID NO: 22527 - DNA, 201 bp, Homo sapiens
agttcagttgtctaccatgctgttaattaaatgaaaacatcctgttatttcagggtccttccttgacaaagtactatacagctgaagaacatctcgaatayaattttggtgggaaaggagccaattgatttcaacagaatcagatctgagcttcataaagtctttgaagtgacttcacagagacgcagacatgtgcacttg

SEQ ID NO: 22528 - DNA, 201 bp, Homo sapiens; identical to SEQ ID NO: 4719

SEQ ID NO: 22529 - DNA, 201 bp, Homo sapiens
acatgtcagaaaggacaactaaactattaccatctgctctttaacggcttcaacacagatgtttagctcctgactgaaatgagcaaaggtatgacaagatygggggaaaatcatctgtatccttgctggaaaccaaggcagagcatatatgaaaagtgtggcattcattgggtgggaaggaagaaaatgggggaagagtat

SEQ ID NO: 22530 - DNA, 201 bp, Homo sapiens
atacacacacagaaatgatctcaccttctttaaaatgctcctcaaggaggtctactttaactatcctagtaaagatgacatgaccccacccccacattccyagtctctcttatcctgctttatttttttcatagccttattctcttttattataattaattaaataattacattccatgtttattctctctctccctccat

SEQ ID NO: 22531 - DNA, 201 bp, Homo sapiens
tgtggaagaacctggactctcatgtaccacgagatcaacacatcctcttgaaaggccccatgcactataaacctcagaagtgaacatatattttaacctayttcttaaaatttatacttaggaaataatcacacactttttaaagtagtttggtataaacttttcattgcagcattatttatattagttaaaatgttagag

SEQ ID NO: 22532 - DNA, 201 bp, Homo sapiens
tttctatcatctgcctaaaaaactcagtctggactggtgctaaggacaggtgcagacgtaagtaactctggagtgggaacccccctgttagtcaaacatcygtaagatctgattcaatttgttcaaattttgtaactgagttgcatatgacaattagtttgccaaggtgcaatacatatgagaattattcttgtagatcat

SEQ ID NO: 22533 - DNA, 201 bp, Homo sapiens
tctgctgcggaggatccctgctggcggttgtggtgctgcttgcgctgccggtggcctggggtgagaggcgggcgggcgtggggaggcgcccgggcggacgrggaacccggggccccgcagagaactcgcgtgcagcgctgagctgcgctgctctgcgcgcccgggtccgaaggcagcgcgatgggtgggctgagcgcgcga

SEQ ID NO: 22534 - DNA, 201 bp, Homo sapiens
tgggggcctcttctccaagaagcccggagcctgtcgggccgccggcgcccggtctccccttctgctgcggaggatccctgctggcggttgtggtgctgctygcgctgccggtggcctggggtgagaggcgggcgggcgtggggaggcgcccgggcggacgaggaacccggggccccgcagagaactcgcgtgcagcgctga

SEQ ID NO: 22535 - DNA, 201 bp, Homo sapiens
gcttggggagaatgggggcctcttctccaagaagcccggagcctgtcgggccgccggcgcccggtctccccttctgctgcggaggatccctgctggcggtygtggtgctgcttgcgctgccggtggcctggggtgagaggcgggcgggcgtggggaggcgcccgggcggacgaggaacccggggccccgcagagaactcgc

SEQ ID NO: 22536 - DNA, 201 bp, Homo sapiens
ggctgtgatttttccagaataaggtagcctgtgcaactctgccatctgctggcctcagatcctcaaaatcctgaaattggggctgggccttagattgtgarctaagtgtcctcttggctgaaacagctcactattcactcctattttcttctttagatttcaattaaaaggcagctctgctagttattgtgtcttggctgg

SEQ ID NO: 22537 - DNA, 201 bp, Homo sapiens
ttggtaatttgtatttccatttatatcatttagattttcaaaatatttaaccccctgtagtctacagttttataaatattctcatatacataaaaatatgyttaaattctttttcctactgtgtatatttgtgttttctctcatcccttatactttatcttttagcaaatgtttttgtattttatttttctaaaaaagcta

SEQ ID NO: 22538 - DNA, 201 bp, Homo sapiens
ttcccttttaataaggacaccagtcacactggattagggcctactttcatgacctcaccttaacttgattgcgtctgcaaagattgtatttccaaataagrtcacatccacagggactggaggttaagacttcagcatacttggggggagacacaattcaacctataacagagcccctttgaaaatgtcaggcatcaggtg

SEQ ID NO: 22539 - DNA, 201 bp, Homo sapiens
gtctgtttccaaagttttcccttttaataaggacaccagtcacactggattagggcctactttcatgacctcaccttaacttgattgcgtctgcaaagatygtatttccaaataagatcacatccacagggactggaggttaagacttcagcatacttggggggagacacaattcaacctataacagagcccctttgaaaa

SEQ ID NO: 22540 - DNA, 201 bp, Homo sapiens
tgcagaaattggccagaattatgcatttaataaagagcagagtgccagtatttgttgtgaagccagacagaattaacatggtactcctgttccctcacagmgtgaccccagtggctccagggctagatcaccgttagcctaattcctaatctttccacagctttccagttgcagagctgttaatcaacagtgaatgcacag

SEQ ID NO: 22541 - DNA, 201 bp, Homo sapiens
agccttcaaacttgattttacttcaataaacgtgaaattatgttgtttctaccacctccagtataataatcatcttgcttggcaaatcagtaaagattttwaaaattgatactcttcaaggttagcgaagctgtggaagaacctggactctcatgtaccacgagatcaacacatcctcttgaaaggccccatgcactataa

SEQ ID NO: 22542 - DNA, 201 bp, Homo sapiens
ctctgggtctgtgtcctcatatgctgttctctctgtgcatgtctgtttccaaagttttcccttttaataaggacaccagtcacactggattagggcctacyttcatgacctcaccttaacttgattgcgtctgcaaagattgtatttccaaataagatcacatccacagggactggaggttaagacttcagcatacttggg

SEQ ID NO: 22543 - DNA, 201 bp, Homo sapiens
taactgtcctctttgcatggtcgatagcagtgcttctccatccagagcattaacaaaatcaccttgttaaaaagattctcaaactccattccatggcctcygattctgttttaaagtggggtcaaaagtctatttttaacaaactcatcagaatgctctgatgcaggaagaccacagaccacacttcaagaaataccactt

SEQ ID NO: 22544 - DNA, 201 bp, Homo sapiens
tctttggcaccatttaatctgagtaaaaacagccttactggtgtctgatgacaccactggaaatttggtattggtcctgatggtaatggtcttgaatcacyaagaaacatttacattgctaaagatgatagctcatgtttattaaagttcatagatttccttgaaacttatggtctctgatgaccaaaactttgtctgtct

SEQ ID NO: 22545 - DNA, 201 bp, Homo sapiens
aggtaaaattcaagcatgagaagtcaatcattgtttgatgtactaggtcttttatatacacataattctgataaatttgggtatctcttcctaaattcatrtcaaactagaagcatcaattgcttttagggaaggaactgttctaagcagactaaaaggaggaagaaatggtggctaataattggaagaaatcaaaaaagg

SEQ ID NO: 22546 - DNA, 201 bp, Homo sapiens
tcgcatatcataaacaatttagtcagcttgttttttagcctgcagtatttaatgacatagggcttcccatgtgccaggactttccatgtgtagaaaaagcratgaatagtgaatgaatagtgaagacacctccctactttcctgggatgtattttcttgttgggaagcagactatgaacaaggaaataaataagtaaacaa

SEQ ID NO: 22547 - DNA, 201 bp, Homo sapiens
ctgtttctacttctgtaacctctctgtatccaaatcctggtaaatggcctcaagtcttcttggaaaaggctaggggaagatttacaatacatgcttttgaytgtgtagcatggtgcttcctcaagagaatccagtctcccatccgttggtgctgctctgggtctataaactattcaagtctaggaattgttgatgaacaat

SEQ ID NO: 22548 - DNA, 201 bp, Homo sapiens
cgtttggtgggtcctgagttgttgtcccgcatccaagaagaacaaggttatactgacaatagaagggtgaggagggtggagaagagttttattgagtgacraaacagcttctcagcggagacgagacacgagggtggaccccagatgaagtcagggggtcattctctctctcagcgtggctggttctggggcttttatgga

SEQ ID NO: 22549 - DNA, 201 bp, Homo sapiens
caagatagcgccactgcactccagcctgggtgatggagccagtctccgtctcaaaaaagaaaaaaaaaagtatggtaatttctccattaactttgatgctkctatggtcttgatctccaggtcaatgcaatgccccagaatggcttccatttgccaggcctaccaacctaactgatgagtttgagtttcccattgggacat

SEQ ID NO: 22550 - DNA, 201 bp, Homo sapiens
tttctccattaactttgatgcttctatggtcttgatctccaggtcaatgcaatgccccagaatggcttccatttgccaggcctaccaacctaactgatgartttgagtttcccattgggacatatctgaactatgaatgccgccctggttattccggaagaccgttttctatcatctgcctaaaaaactcagtctggactg

SEQ ID NO: 22551 - DNA, 201 bp, Homo sapiens
gcttcctcttagccaagggcaaaataggttttggctattttctcctattctcgcagttaaaacggacaatcaacaataaaatatcaatttctttctgattkgtctaatttcagaagtaaattgtagcttcccactgtttatgaatggaatctcgaaggagttagaaatgaaaaaagtatatcactatggagattatgtgac

SEQ ID NO: 22552 - DNA, 201 bp, Homo sapiens
ttaaaaacatgcttcctcttagccaagggcaaaataggttttggctattttctcctattctcgcagttaaaacggacaatcaacaataaaatatcaatttmtttctgatttgtctaatttcagaagtaaattgtagcttcccactgtttatgaatggaatctcgaaggagttagaaatgaaaaaagtatatcactatggag

SEQ ID NO: 22553 - DNA, 201 bp, Homo sapiens
gatccaaaacgggcattacattggaggacacgtatctctatatcttcctgggatgacaatcagctacatttgtgaccccggctacctgttagtgggaaagrgcttcattttctgtacagaccagggaatctggagccaattggatcattattgcaaaggtgacttatttcttggtattccttattcttgctgggttgtatg

SEQ ID NO: 22554 - DNA, 201 bp, Homo sapiens
aaggcttctaaatatggtcagaatcctatttacagtagcatcaaaaagaataaaatacttaggaatcaatttaatcaaggaggcacaagacctgtgcactraaaactcagtaactgaaaatgagcaaatgatgtgatagacatgtctccaagggaaatatacaaatgcccaataaacacatcaaaagatgttcaacatcat

SEQ ID NO: 22555 - DNA, 201 bp, Homo sapiens
acgttggacatagccatatgatcaaaggaatacaaaaaagaaggtacaatatgtattgtattgtaaaccagaggagggcaacatgttcctgtcaaaggtgrtacatgtgaaacctggtcaggcattcattggatgaaaaggagcagcttacaaataaggaaaaggaaaaaaggtagttgaaccatgtaaacctccttaact

SEQ ID NO: 22556 - DNA, 201 bp, Homo sapiens
tgagtgttcaattctttttgatcagcctggatttcctttggttctagttatgtatccccttccttccttccttccttcctttccttccttccttccttcctccctcccttccttcctttccttctttccttctttgctttctttctttcctttttactttcttttttttttttgatacaaggtcttgctttgttgcccagg

SEQ ID NO: 22557 - DNA, 201 bp, Homo sapiens
taagaacctccatatttctatagtgacagtcatttttgcttgtgaaaatggctttgctgtaactgtcagagacagaactacctcccaagtgaatgacaaaygggttatagataggcacgctgtctcaattgttggtattctgatggtccttcctatggggtgaagagtgtgggatggtaaggagagaagggggtggacagt

SEQ ID NO: 22558 - DNA, 201 bp, Homo sapiens
acagggggaaggtttcataagtatatatataatatatatataatataacataaaattcatatatattataaaaataataaatatgatataaatttgatatraaatattatataaatctgatttttaacatattttgattttatactggtgtaaagtactattttctctttattttttacatcaagaatatgtatcccctac

SEQ ID NO: 22559 - DNA, 201 bp, Homo sapiens
tagtattttaagtataaaatgagtgttcaattctttttgatcagcctggatttcctttggttctagttatgtatccccttccttccttccttccttcctttccttccttccttccttcctccctcccttccttcctttccttctttccttctttgctttctttctttcctttttactttcttttttttttttgatacaagg

SEQ ID NO: 22560 - DNA, 201 bp, Homo sapiens
gatattggatgtgttcatgtattcatatgtctatgtttaactgagtgtcttttcttgtgtttgtgtgggaacttgttcttagcctgcccacatccacccargatccaaaacgggcattacattggaggacacgtatctctatatcttcctgggatgacaatcagctacatttgtgaccccggctacctgttagtgggaaag

SEQ ID NO: 22561 - DNA, 201 bp, Homo sapiens
taattccagaagtttaaatacataaaagccttcaaacttgattttacttcaataaacgtgaaattatgttgtttctaccacctccagtataataatcatcytgcttggcaaatcagtaaagatttttaaaattgatactcttcaaggttagcgaagctgtggaagaacctggactctcatgtaccacgagatcaacacatc

SEQ ID NO: 22562 - DNA, 201 bp, Homo sapiens
ctttagtattttaagtataaaatgagtgttcaattctttttgatcagcctggatttcctttggttctagttatgtatccccttccttccttccttccttcctttccttccttccttccttcctccctcccttccttcctttccttctttccttctttgctttctttctttcctttttactttcttttttttttttgataca

SEQ ID NO: 22563 - DNA, 201 bp, Homo sapiens
ttctacatttataggtcagtgatcatttaattgagtcaatactggttatgtgtgtatatgtgtgtagtcacttagccaatatgtgaatattattatcttaygatagaacacagtattcatttatcattttattgcccttaaatctgccattatttcatttctcatgccttatcttttgtgtttccttttctctctttttct

SEQ ID NO: 22564 - DNA, 201 bp, Homo sapiens
aaatgaatgagaatgtatacaaggtgcctcccatatctgccaagaacttgaaattctatgaaataattcaaattatcaaagaattatcagtttactatacraagttttcaaggcatggcaccttttgtagggggttatcttttataaaaaaatttccacttctacatttataggtcagtgatcatttaattgagtcaatac

SEQ ID NO: 22565 - DNA, 201 bp, Homo sapiens
acatatatcaaaacaccacattttaccctataaatatatacaattattgtttgttcataaaaataaaatcagattttaaaaaatattcactgtgtttttttcagccatacataggctggaaccttcttcacattttggctccaacaatctagcttagtcacagcgagcacatctaaaacaacctctaggaggccaaaagtc

SEQ ID NO: 22566 - DNA, 201 bp, Homo sapiens
gaaagaaagaaaagaaaaagaaagggaaaaaaaattgctagaagagtagattttaaatattctcaccacacacacacacacacacacacacacacacacaaaacaaatatgagaggtgacggacatgttaattagcttaatttaatcatttgcaacagaaacatatatcaaaacaccacattttaccctataaatatatac

SEQ ID NO: 22567 - DNA, 201 bp, Homo sapiens
agaaagaaagaaaagaaaaagaaagggaaaaaaaattgctagaagagtagattttaaatattctcaccacacacacacacacacacacacacacacacacaaaacaaatatgagaggtgacggacatgttaattagcttaatttaatcatttgcaacagaaacatatatcaaaacaccacattttaccctataaatatata

SEQ ID NO: 22568 - DNA, 201 bp, Homo sapiens
aagaaagaaagaaaagaaaaagaaagggaaaaaaaattgctagaagagtagattttaaatattctcaccacacacacacacacacacacacacacacacacaaaacaaatatgagaggtgacggacatgttaattagcttaatttaatcatttgcaacagaaacatatatcaaaacaccacattttaccctataaatatat

SEQ ID NO: 22569 - DNA, 201 bp, Homo sapiens
aaaagaaagaaagaaaagaaaaagaaagggaaaaaaaattgctagaagagtagattttaaatattctcaccacacacacacacacacacacacacacacacacaaaacaaatatgagaggtgacggacatgttaattagcttaatttaatcatttgcaacagaaacatatatcaaaacaccacattttaccctataaatat

SEQ ID NO: 22570 - DNA, 201 bp, Homo sapiens
atttggtcaaagggcgcagggtttcagttagacaggaggagtaagtttcagagatctattccacagcatggtgactatagttaataataatgtgtatttcmaaattgctggccgggcacagtgtctcatgcctatagctctttgggaggctgaggcatacgaattgcttaagcctagaagttagaaactaggctgggcaaa

SEQ ID NO: 22571 - DNA, 201 bp, Homo sapiens
aagtggaattcctgggggatatggtaattctgtttaacttttcaaagaattgccagactattttccacagctgctgtaccattttacatccccatcagcartgcacaaatgttccaatttctctacatcctcaccaacacttgtcatttttctggtttaaaaaaaattattattataccaccctaaaaggggctgaagtca

SEQ ID NO: 22572 - DNA, 201 bp, Homo sapiens
gtaataaacatggaattggaataggaattttcctggaaatatgaaaaagattagtaaaatagagaaaacaaaaaatataataatacacctatacctgtatytattttttatctctgtttctacttctgtaacctctctgtatccaaatcctggtaaatggcctcaagtcttcttggaaaaggctaggggaagatttacaat

SEQ ID NO: 22573 - DNA, 201 bp, Homo sapiens
ccctatggaaaagaaatatcttacgcatgcgacacccacccagacagagggatgaccttcaacctcattggggagagctccatccgctgcacaagtgaccstcaagggaatggggtttggagcagccctgcccctcgctgtgaactttctgttcctgctggttagtacctgcttccacatatcctaaatgggttcagaata

SEQ ID NO: 22574 - DNA, 201 bp, Homo sapiens
tctgctttttccagcctctgctacttaccagctggtgtcttggacccagtaagttaagtcacatcactgaccttcagtgtccacatgtataaaatgagcayaactgacatcctgatctctgagagagacgttttgaaaatcagatggtgtaatgcatgtgacagtgttttgtaatctgaaaacccccatgcatgtctgaaa

SEQ ID NO: 22575 - DNA, 201 bp, Homo sapiens
cactctcttgagatcaggggttaatccaattaaggagctgacctagtagataagaagtacccagagagattaatttatggaagggtagttttgaaataagrgtagggactaagtggcaccactttcagaaggcaatgagaaaatggcacatacagctcaatgtcaggtacaaacctaaatacagtcactgatcttgagtac

SEQ ID NO: 22576 - DNA, 201 bp, Homo sapiens
acgttgttaaatttctgaaaacaagtgcaacttaagcatataactaaggagtagatgttaacctggacaaatgaaacatagattgttttgagcaagagacrgcaaaattttttgtcaagagccagatagcaaaattttcaattttgcagaccatgcaatctctattgcaattactcagttctgccattgcagtggaaaaat

SEQ ID NO: 22577 - DNA, 201 bp, Homo sapiens
atataaaaatgaggaaagaatatgcacaggcaattcacaaaaggaaacataaaaatggccttaaaaattgctaaaataaatatttaagcaaaaaagctcarcttcactatggtttggggaaatgcaaattaaagcaacaatatgtcatgttttcacagtcacattaataaaagtttaaaagacggaagtagaggtaaatag

SEQ ID NO: 22578 - DNA, 201 bp, Homo sapiens
gagaaagaggatggtcaccatcccaaccagattggccattagatctatgtatcaacagagtgacatacgggagaattaaaattctagtatgcaaaaatacrccgtatgttaacagaaaatagactgcagggaaatttgtattaggtaaaaccgagagaaagttaagagcatacaacagtagataagcaatagacaacccga

SEQ ID NO: 22579 - DNA, 201 bp, Homo sapiens
cgcctggcctgaagacaagaacttttgaacaagagagcgctaactaacgtattgaaatacataaaacaaatactgatatatagaagagctcattcagctgyttcaaagacagagctctgtaacacatgtactcttacctaaagaactgtctcccaccactggaaaggaggtcttctctgaccaaatacacagcatcttgga

SEQ ID NO: 22580 - DNA, 201 bp, Homo sapiens
gaaaactcagtaactgaaaatgagcaaatgatgtgatagacatgtctccaagggaaatatacaaatgcccaataaacacatcaaaagatgttcaacatcaytagtcattagggaagtgcaagtcaacctgactttgtactaggatgttttgtattaggatggttataatatttttaaaaaataggaaataaaaggtgttgg

SEQ ID NO: 22581 - DNA, 201 bp, Homo sapiens
tactcgggaggctgaggcaggagaatcacttgaacccgggaggcggaggttgcagtgagccgagatggtgccactgcaccccagcctgggcaacaagagcraaactctgtctcaaaaaataataataataataataacaataacaataacaaaaatgtttaagagtgaaaagaattcttgagaccaaaaaagtttaagaac

SEQ ID NO: 22582 - DNA, 201 bp, Homo sapiens
tatttaggggtttttgtggactaatatatgatcacttttacacagatatcatcttatgatatcaaacttagatttgatgaaatgagttggtaagcttcatrtcttttatatgttgtgaaaccttgaaattacatttggaagtatatttttgaatgaattttggtaatttgtatttccatttatatcatttagattttcaaa

SEQ ID NO: 22583 - DNA, 201 bp, Homo sapiens
accctgtctctactaaaaaatacaaaattagccaggtgtggtggcgcatgcctgtaatcccagctactcgggaggctgaggcaggagaatcacttgaaccygggaggcggaggttgcagtgagccgagatggtgccactgcaccccagcctgggcaacaagagcgaaactctgtctcaaaaaataataataataataataa

SEQ ID NO: 22584 - DNA, 201 bp, Homo sapiens
ctgaagaaaaatcaggatgacttgtcactggctgagaggtcctgttcaatcatgttgcatgccagagtgatgttttgtgacttttgtcttccttttaggtrcacatgatgctctcatagttggtaagttttatgaaagttttgctgaggaattctggcatctataacagtaagtacctacctataatgaatgaaatgtaaa

SEQ ID NO: 22585 - DNA, 201 bp, Homo sapiens
taaaagatggacaacattataaaaagaaatagacaaatgtacaataaataaaatattttaacacaactcatttagtatctagtaagacaagtactcccccmaaaatcagtaaagtatctagaagatttgaataaatattaacagattggattcactgaccttgttacaagaaagaattatacatgatgataggagagagga

SEQ ID NO: 22586 - DNA, 201 bp, Homo sapiens
ggataaagaaaatgtggcacatatacaccatggaatactatgcagccataaaaaaggatgagttcatgtcctttgcagggacatttatgaagctagaaacyatcattctcagcaaactaacacaagaacagaaaaccaaccaccgcatgttctcattcctaagtgggagttgaacaatgagaacacatggacacaccgagg

SEQ ID NO: 22587 - DNA, 201 bp, Homo sapiens
ggtggtcggggctccatctggccctctgagacttaaaggagctttgcttttcagagttgagaatggagagaatgttacctctcctggctctggggctcttrgcggctgggttctgccctgctgtcctctgccaccctaacagcccacttgacgaggagaatctgacccaggagaaccaagaccgagggacacacgtggacc

SEQ ID NO: 22588 - DNA, 201 bp, Homo sapiens; identical to SEQ ID NO: 4376

SEQ ID NO: 22589 - DNA, 201 bp, Homo sapiens; identical to SEQ ID NO: 4377

SEQ ID NO: 22590 - DNA, 201 bp, Homo sapiens; identical to SEQ ID NO: 21572

SEQ ID NO: 22591 - DNA, 201 bp, Homo sapiens; identical to SEQ ID NO: 4379

SEQ ID NO: 22592 - DNA, 201 bp, Homo sapiens; identical to SEQ ID NO: 21577

SEQ ID NO: 22593 - DNA, 201 bp, Homo sapiens
cctctccccttggtttgcaggtggctctcctctccctatgtcttcacatggtcctcctctgcatgtgcctgagttctaacttcctctcctctcctcatctmcaccagtcttatagaattagggccccccaatgacctcattctaacttaataacctctttaaagtctctatctccaaatacagtcacattttgaaatattg

SEQ ID NO: 22594 - DNA, 201 bp, Homo sapiens
ccaatttcagggtagtttggtcatccacgccacattccaagtgtcccctgggccctttctctccctcacccccctgtctgcacatgagtagatgcctccaygcagccctcccaggacgctcacctctatccacagatgcttctccaaaacccaccaggccctcccatggaacgagctcacctacagggtaaaatcaggtca

SEQ ID NO: 22595 - DNA, 201 bp, Homo sapiens; identical to SEQ ID NO: 21581

SEQ ID NO: 22596 - DNA, 201 bp, Homo sapiens
cagggacatttggcaaaatagcccaccactcctacttaaaagtgtcgaggtcttgaaaggcaaggaaaccctgggaaatcgtctttggccggaggaaactmagcagacatgacgactaaatgcaatgtagaatcctcggacagaaaaggacattagtaggacagctggtgaaacccaagtaagtccaggctgtaccaatgt

SEQ ID NO: 22597 - DNA, 201 bp, Homo sapiens; identical to SEQ ID NO: 21583

SEQ ID NO: 22598 - DNA, 201 bp, Homo sapiens
taagtccaggctgtaccaatgtccacttcccagttctgaggaacatgctgtggtctgtccacatttacattaggagaagcagggagagcgtatatgggacytctctgtattgtttttataacttttctgtaaatccaaaactgtcttaaaatagtttttttaaattatactttaagttctggggtacaggtgcagaatatg

SEQ ID NO: 22599 - DNA, 201 bp, Homo sapiens
tgacattgatagcttaccatgctccaggccgggtgcctggcccttcacctggatggtcgcatttgcccctcataagactcccatgaagaaaggcaccactrttatcccatctgttattcacagatgggaaaggcaaggcttgaagtggttaggtggcttacccagtcacatatcttctaagtggtgcagccagaatttggc

SEQ ID NO: 22600 - DNA, 201 bp, Homo sapiens; identical to SEQ ID NO: 21585

SEQ ID NO: 22601 - DNA, 201 bp, Homo sapiens
ccaaaacagacagcttttaaatatttcacaagctaagcttcatacatttttaaaagattatgaggaagaaggaagaaaaggagaaagacaaagaggagtcrggggagaagaggagacagagatcatatgcgaccatcaaagtctaaagcacttactatttggcccattacagaaaaaagtttgcagatccctggaatgtag

SEQ ID NO: 22602 - DNA, 201 bp, Homo sapiens
ggaggatgaaaggatcaggaaaactggaactcgtgttagtttgtgattttagatagagtagccattaggtgatgtttgagcatccatataacagaggggargggtggagtcatgttggtatattagggaaaagcattcctggcagagggaacagtcagtgcaaggcctctgaggtggaagtgagcttgatgtggtcaaaga

SEQ ID NO: 22603 - DNA, 201 bp, Homo sapiens
caggagtcagagtcttcagtaagcaatgagcaatgattgcgccactacattccagcctgggtgacaaagcgagtctctctctctctctctctctctctctmtatatatatatatatatataatatatatataaaaatatataatatattatatatgtgtatacgtatatatgtatatatatacacacacacacatagagag

SEQ ID NO: 22604 - DNA, 201 bp, Homo sapiens
aggagtcagagtcttcagtaagcaatgagcaatgattgcgccactacattccagcctgggtgacaaagcgagtctctctctctctctctctctctctctcwatatatatatatatatataatatatatataaaaatatataatatattatatatgtgtatacgtatatatgtatatatatacacacacacacatagagaga

SEQ ID NO: 22605 - DNA, 201 bp, Homo sapiens
tctctctctatatatatatatatatataatatatatataaaaatatataatatattatatatgtgtatacgtatatatgtatatatatacacacacacacatagagagagatatatatataaagacacacacacacacacacacacacacacacacacacacacattcaattccaaaactgggagcctgaaagtcatttaa

SEQ ID NO: 22606 - DNA, 201 bp, Homo sapiens
ccaggtgagtctttagacttgggtcaattcatcctttgtatccgaacttgaattggtgaaggccagatggacttttgggtactcttgaacttgggttaatrcacgtgcatttctcattatatactcaccctgcttgggacacccccaagccaagaagagctaggttacagcccagctcctcctgccgtgttaggggttgag

SEQ ID NO: 22607 - DNA, 201 bp, Homo sapiens
ctctctctatatatatatatatatataatatatatataaaaatatataatatattatatatgtgtatacgtatatatgtatatatatacacacacacacatagagagagatatatatataaagacacacacacacacacacacacacacacacacacacacacattcaattccaaaactgggagcctgaaagtcatttaag

SEQ ID NO: 22608 - DNA, 201 bp, Homo sapiens
ccagctgggcattgaggaagccttcaccagcaaggctgacctgtcagggatcacaggggccaggaacctagcagtctcccaggtgagtctttagacttggrtcaattcatcctttgtatccgaacttgaattggtgaaggccagatggacttttgggtactcttgaacttgggttaatgcacgtgcatttctcattatata

SEQ ID NO: 22609 - DNA, 201 bp, Homo sapiens
atataaaaatatataatatattatatatgtgtatacgtatatatgtatatatatacacacacacacatagagagagatatatatataaagacacacacacmcacacacacacacacacacacacacacacattcaattccaaaactgggagcctgaaagtcatttaagaaagatgggcccagacagttattggtcatctta

SEQ ID NO: 22610 - DNA, 201 bp, Homo sapiens
tggtgcccatgatgagtttgcatcacctgactataccttacttccgggacgaggagctgtcctgcaccgtggtggagctgaagtacacaggcaatgccagygcactcttcatcctccctgatcaagacaagatggaggaagtggaagccatgctgctcccagagaccctgaagcggtggagagactctctggagttcaggt

SEQ ID NO: 22611 - DNA, 201 bp, Homo sapiens
caaaagaagccctggtgggtgacactctttggatggcccctgcctctccggaaggcaccagcgttggtttctctccgcctcaccttcccatgcaggtgggyacgtttgtgcttgggctcctgctggttatgccccagaagcacactcttccctatctgcagtcccagcccatgtgtggacacaacccatttcctagggtgt

SEQ ID NO: 22612 - DNA, 201 bp, Homo sapiens
tgcaccgagtggccatggcatgtgtggccctgtctgcttatccttggaaggtgacagcgattccctgtgtagctctcacatgcacaggggcccatggactyttcagtctggagggtcctgggcctcctgacagcaataaataatttcgttggacacgttgcttgtgcctttccatgctgactatcagactctgcgcccctg

SEQ ID NO: 22613 - DNA, 201 bp, Homo sapiens
gcagggagagcgtatatgggacctctctgtattgtttttataacttttctgtaaatccaaaactgtcttaaaatagtttttttaaattatactttaagttmtggggtacaggtgcagaatatgcaggtttgttacataggtatacatgtaccatggtggtttgctgcaccccctttttttaagaaaatgtttcaaaaagaa

SEQ ID NO: 22614 - DNA, 201 bp, Homo sapiens
aaaagaagccctggtgggtgacactctttggatggcccctgcctctccggaaggcaccagcgttggtttctctccgcctcaccttcccatgcaggtgggcmcgtttgtgcttgggctcctgctggttatgccccagaagcacactcttccctatctgcagtcccagcccatgtgtggacacaacccatttcctagggtgtt

SEQ ID NO: 22615 - DNA, 201 bp, Homo sapiens
agagaatgctcaatagatacttgttgaatgaaggatggaatgaacggacaaacacatgaatgaatgaataaaaatagaaataggacaccttcctccttcakgggactcagagtttaatggaagacacagcctcctgtataattgtaagaccaggcagacagtgacaggcatcttaagagggctataaactaagggaggggg

SEQ ID NO: 22616 - DNA, 201 bp, Homo sapiens
tagacataggaagctttttcctccttcctactccccttcctggaggttgacacagaccaaagcttggtaagaaaacttaggataaaagaaggggcagaggycgggcaaggtggctcatgcctgtagtcccagcactttgagtggccaaggtgcgtggatcaattgagcccaggtgattgagaccagcctgggcaacatggt

SEQ ID NO: 22617 - DNA, 201 bp, Homo sapiens
tactccccttcctggaggttgacacagaccaaagcttggtaagaaaacttaggataaaagaaggggcagaggccgggcaaggtggctcatgcctgtagtcycagcactttgagtggccaaggtgcgtggatcaattgagcccaggtgattgagaccagcctgggcaacatggtgaaaccatgtctctgcaaaaaattacaa

SEQ ID NO: 22618 - DNA, 201 bp, Homo sapiens
agcctgggcaacatggtgaaaccatgtctctgcaaaaaattacaaaaattagctgggcatggtggtgtgcacctgtaatcccaactactcgggaggctgargggggaggatcacttgagcccaggatgttgaagctgcacatgaggtgagattgcaccactgcactccagcttgggctacagagtgagtccctatctcaaa

SEQ ID NO: 22619 - DNA, 201 bp, Homo sapiens
gcctgggcaacatggtgaaaccatgtctctgcaaaaaattacaaaaattagctgggcatggtggtgtgcacctgtaatcccaactactcgggaggctgaasggggaggatcacttgagcccaggatgttgaagctgcacatgaggtgagattgcaccactgcactccagcttgggctacagagtgagtccctatctcaaaa

SEQ ID NO: 22620 - DNA, 201 bp, Homo sapiens
ggggtgggctcactgtggtctctgctgcatgtcacacattgaagcactgtgctgggggtcatcacaggctgtttaactcaattgtcacatgagcctgggtrcacaaaatggtagagcagctcagagagagatggacagacagcatgaacctctgaggagtcaggttttcttggatgaagggacactaagatggctttggag

SEQ ID NO: 22621 - DNA, 201 bp, Homo sapiens
cacatgtgctgtacagcaaggatgtcaaagctctcttcctcaaaggcaggagcatctcctcagaccctagtatcctcctcatttcctctttgcttcctttkgtcgggttccaaaaaacagtagaagtgccctggattctgatgagagaacattctcaagggattgctgactcgggaggcaaacaggctccagcgatcctgc

SEQ ID NO: 22622 - DNA, 201 bp, Homo sapiens
agtggccatggcatgtgtggccctgtctgcttatccttggaaggtgacagcgattccctgtgtagctctcacatgcacaggggcccatggactcttcagtytggagggtcctgggcctcctgacagcaataaataatttcgttggacacgttgcttgtgcctttccatgctgactatcagactctgcgcccctgaggctac

SEQ ID NO: 22623 - DNA, 201 bp, Homo sapiens
taaaggcttgtagagcttgggtggtgatttcatccaccaaacctatctctctccccattctggcatacaaggcagcagtcagggtccccagaggcagcccrtctttctggcagggacccatgctggagatctggccagctgaaaggccccaaaggagctcggtgccctgggtaatatgggaaggtgctccatggcactgcc

SEQ ID NO: 22624 - DNA, 201 bp, Homo sapiens
gctgttggttgattcctgggcaagccacttcccctcctgggcctgggttttcatctgtaaatgaaggcgtggatccagatctccctctaagactactccaygcctcacgtgccatttgttctctgagtttcccatgttctcgcctcctactacctagccctatgctaggactctcccctccaggacacagtagccagccta

SEQ ID NO: 22625 - DNA, 201 bp, Homo sapiens; identical to SEQ ID NO: 4742

SEQ ID NO: 22626 - DNA, 201 bp, Homo sapiens; identical to SEQ ID NO: 4380

SEQ ID NO: 22627 - DNA, 201 bp, Homo sapiens; identical to SEQ ID NO: 4382

SEQ ID NO: 22628 - DNA, 201 bp, Homo sapiens; identical to SEQ ID NO: 4383

SEQ ID NO: 22629 - DNA, 201 bp, Homo sapiens; identical to SEQ ID NO: 4384

SEQ ID NO: 22630 - DNA, 201 bp, Homo sapiens
ccagaatttggcggggggagtgcgaccaagaaccctacactcagtcctgtgctctgtgctgtggaggagagatgaccaggagcagaaacttcattcagggrcatctcaggcaccagctcccccatgagccagctaagttccctccctcccttcaccaagcaccatgtgtttcctcatgtgccgaatgaagaggattagata

SEQ ID NO: 22631 - DNA, 201 bp, Homo sapiens
cagaaacttcattcagggacatctcaggcaccagctcccccatgagccagctaagttccctccctcccttcaccaagcaccatgtgtttcctcatgtgccraatgaagaggattagatactcaagaatggaatgagtgggtgagtgagtccttcgctgcacccaagtctgattttctgtgcgcctgctcaccccaccctgc

SEQ ID NO: 22632 - DNA, 201 bp, Homo sapiens
tgcccaatcccattgatagaaactcaaccaatgcaaacctcagcctgcaagctccgaaggggcagagtgcaagccggtagcttttgcctcctggagcccayagtccagatggggacaaaaaaagagatagggacacaaagagtgatcactgagccagagggtggaaaggtgcttaggagacatgagctgcttggaggcaga

SEQ ID NO: 22633 - DNA, 201 bp, Homo sapiens
cttgcatcatgccttgcctgtcttggcaaatatttctctggagtttacccagccagtccaaggtcacagggaagccctgtctgtgtctcacacagaaggtyaacgtccagcactgtccaaactttactcagcaaacagtcacaaagcagctcctgtgtggggggtcaggggtgggctcactgtggtctctgctgcatgtca

SEQ ID NO: 22634 - DNA, 201 bp, Homo sapiens; identical to SEQ ID NO: 21609

SEQ ID NO: 22635 - DNA, 201 bp, Homo sapiens
gtgcttcaatgcatgaaacgcatcaatgacttgcagcagaggccacactcagcccccctctgccctttgagtttttgcagctcttgccaagatcattcttkttcttagaaagcccaccattattttcctttctagccatatggattctaaaagttcctcttgtgagctgtaatcagaatgcagagaagtaatacaaggtta

SEQ ID NO: 22636 - DNA, 201 bp, Homo sapiens
cttgcagcagaggccacactcagcccccctctgccctttgagtttttgcagctcttgccaagatcattcttgttcttagaaagcccaccattattttcctytctagccatatggattctaaaagttcctcttgtgagctgtaatcagaatgcagagaagtaatacaaggttagggcccaggactctttctcccacctctcc

SEQ ID NO: 22637 - DNA, 201 bp, Homo sapiens
gtggccgtgccggcggttcagtgacagagatcctaaatgggaggccaatcctaaatgggatgatctctttcatcccaatttcagggtagtttggtcatccrcgccacattccaagtgtcccctgggccctttctctccctcacccccctgtctgcacatgagtagatgcctccatgcagccctcccaggacgctcacctct

SEQ ID NO: 22638 - DNA, 201 bp, Homo sapiens; identical to SEQ ID NO: 4750

SEQ ID NO: 22639 - DNA, 201 bp, Homo sapiens
gcaaacagtcacaaagcagctcctgtgtggggggtcaggggtgggctcactgtggtctctgctgcatgtcacacattgaagcactgtgctgggggtcatcrcaggctgtttaactcaattgtcacatgagcctgggtgcacaaaatggtagagcagctcagagagagatggacagacagcatgaacctctgaggagtcagg

SEQ ID NO: 22640 - DNA, 201 bp, Homo sapiens
ccttgggttcagaccgtggtggctggtgtgacctggagcaggtcgctgctcttctctggagctcagctacctcctgaagagaaaggaatgtcctttccccrccacccctgttttcactgggtgattgtgagaatccggtgaggtattgtatgttgaagccataataaaccactaagggcaagggagctgcttcaacactaa

SEQ ID NO: 22641 - DNA, 201 bp, Homo sapiens
aataaaaatagaaataggacaccttcctccttcaggggactcagagtttaatggaagacacagcctcctgtataattgtaagaccaggcagacagtgacargcatcttaagagggctataaactaagggagggggagtttgcaggtggcaggtgtgacctgggcctctaggagcttgctacctgctctatgccagcccaca

SEQ ID NO: 22642 - DNA, 201 bp, Homo sapiens
aaacaccacatgttctcactcataagtgggagctgaacaacgaaaacatatggacacagggaggggactatcacacattggggcctgttggggggttgggkgctggcagagggatagcattaggagaaatacctaatgtaaatgacaagttgatgggtgcagcaaaccaatatggcacatgtatacctatgtaaaaaacct

SEQ ID NO: 22643 - DNA, 201 bp, Homo sapiens
ctttagaaatacaccaaaatgtggctgggtgcggtggctcatgcctgtaatcccagcactttgggaggctgaggtgggcagatcacgaggtcaggagttcragaccagtccgaccaacaaggtgaaaccctgtctctacgaaaaatacaaaaattagctgggcgtggtggtgtgtgcctgtagtcccagctactcgggagg

SEQ ID NO: 22644 - DNA, 201 bp, Homo sapiens
tagaggcatcctctgtgtctgggttttcacacctgcaaagggtggaggtgccctggggcctctatggtcatttctgccttgatacttacagattcggattygagtcagctgtgcatctgaccctcagggaagaggtgctgtccccttgcctggagcagggtgcagctctcagaacatgtggcagatgtgattattgcagca

SEQ ID NO: 22645 - DNA, 201 bp, Homo sapiens
aaaatggcaacaattatggtacctacctcaaagggtgaaatgaagcagagtgatgtgtgtcgggtgccccagagagcacctacctgagggaggctccaaarctagcaagaggcagcaggacagggaccaggacgcaggctgggtggagggcagtgggaggtggtcggggctccatctggccctctgagacttaaaggagct

SEQ ID NO: 22646 - DNA, 201 bp, Homo sapiens
ggagggcagtgggaggtggtcggggctccatctggccctctgagacttaaaggagctttgcttttcagagttgagaatggagagaatgttacctctcctgrctctggggctcttggcggctgggttctgccctgctgtcctctgccaccctaacagcccacttgacgaggagaatctgacccaggagaaccaagaccgagg

SEQ ID NO: 22647 - DNA, 201 bp, Homo sapiens
tcagcctctggtctgagtcagtgtggtgcttttcactctgatttaaacttgtccggcaaacagaaagaaggagctctcctttcaaaccactccagggcgcrtaggagctagagctccctccttgcaggggtgctgctagactaggccaggaagtccctctgtctggatgcacctggggctcctgccctgcacatgtgggag

SEQ ID NO: 22648 - DNA, 201 bp, Homo sapiens
aaatgagggcagaaatggcattgttcccatctggggaagagcctcaagggtgggcagtatacaaaacatgaccctttgccagattctaactggtccagtgmccaatcccattgatagaaactcaaccaatgcaaacctcagcctgcaagctccgaaggggcagagtgcaagccggtagcttttgcctcctggagcccacag

SEQ ID NO: 22649 - DNA, 201 bp, Homo sapiens
tgtgcccggcttttccactgcaagaaaatggcaacaattatggtacctacctcaaagggtgaaatgaagcagagtgatgtgtgtcgggtgccccagagagyacctacctgagggaggctccaaagctagcaagaggcagcaggacagggaccaggacgcaggctgggtggagggcagtgggaggtggtcggggctccatct

SEQ ID NO: 22650 - DNA, 201 bp, Homo sapiens
gaattcaagaaaggaaggtttcccctagaaaacggttttcgtcttttctcttaaatccagatagaataagaagcgaaggccgttacagcagagagaaagtygagtcaagcagagatcagatactaaagacactagactaaccagacattcgggccctcagttgaacagctgaggatgtcagaagatgttaaggaggcaaaa

SEQ ID NO: 22651 - DNA, 201 bp, Homo sapiens
ggctctccctcacccccaataacttttactcttgccaagctacttctctaaaccaaagcagggtccctcctatgagggactctgggcacttccactgctgsggaagcagggtcgagcagggcgacccttgcactcacaccttctccaactgcttgctccaccttcagccaaatgggagatgccctttgacccccaagatac

SEQ ID NO: 22652 - DNA, 201 bp, Homo sapiens
agaaaagaaatagtcccctggagcccctggccctgacctcccaaaagccagagtgaactttcaatctcaccgtaggctgaccccctgtgtccattttaagycagaggactatacccatccacagtcaaagaagagggtggtgaccaatgtggacaaagctcccattcagctgagaccccaatcagtaaagaaaatctttcc

SEQ ID NO: 22653 - DNA, 201 bp, Homo sapiens
ctggaagagtatgatttggccttagtgttgcttcacttttctgtcttaattgccctgtggtttcatctggtcatgggagtccacgatgacatgtgccatcyttgtatgaatggtgcttgcagaaccgaaggaagggcctgtaccaatgcctggggaaaagcagaccaatgaagacttgtaagagcccagaaaagaggctgg

SEQ ID NO: 22654 - DNA, 201 bp, Homo sapiens
agccagagtgaactttcaatctcaccgtaggctgaccccctgtgtccattttaagtcagaggactatacccatccacagtcaaagaagagggtggtgaccratgtggacaaagctcccattcagctgagaccccaatcagtaaagaaaatctttccctacacagatctacagacaaccaaagccttaaaaaggcatcaacc

SEQ ID NO: 22655 - DNA, 201 bp, Homo sapiens
ctgactttcaggactcagctgcagctaagaagctcatcaacgactacgtgaagaatggaactagggggaaaatcacagatctgatcaaggaccttgactcrcagacaatgatggtcctggtgaattacatcttctttaaaggtgagtgtgcctggcttggggttcagaagaggtggatctcagggccatttctgtcctgac

SEQ ID NO: 22656 - DNA, 201 bp, Homo sapiens
ttcccttcccctgtggccctttctatggactggaaggtggacatagcagtgagccatcttagcctagacaaacagacgtggaggggcagctgagcaaccasacaggaggacgtggtttctgacaacgtggaggcaccatatcaacccactgcctccagctggacctgcaggagagggaaatgaacttcagtctcattttag

SEQ ID NO: 22657 - DNA, 201 bp, Homo sapiens
tgccatgttggctgggctggtcttgaagccctgacctcaggtgatccacctgccttggcctcccaaagtgctgggattacaggcatgagccactgcccccrgcctacatactattttaaatccactgcacctgttcttattctggagtggatgctgaattctgcccttggacaaggccctcagtgtgttctgggagagcct

SEQ ID NO: 22658 - DNA, 201 bp, Homo sapiens
acagcgattccctgtgtagctctcacatgcacaggggcccatggactcttcagtctggagggtcctgggcctcctgacagcaataaataatttcgttggamacgttgcttgtgcctttccatgctgactatcagactctgcgcccctgaggctacctgtgccccaaagacaagccccttgagctcccatgcaggctcagct

SEQ ID NO: 22659 - DNA, 201 bp, Homo sapiens
atgtgccatcatgcctggctaatttttttgtatttttattagagatggggttttgccatgttggctgggctggtcttgaagccctgacctcaggtgatccrcctgccttggcctcccaaagtgctgggattacaggcatgagccactgcccccagcctacatactattttaaatccactgcacctgttcttattctggagt

SEQ ID NO: 22660 - DNA, 201 bp, Homo sapiens; identical to SEQ ID NO: 4745

SEQ ID NO: 22661 - DNA, 201 bp, Homo sapiens
gcctcagcattcatgaaaatccactactccagacagacggctttggaatccaccagctacatccagctccctgaggcaggtaatccatgatgttttacatyctgggagcggaggaatctgtttttccaggagagttttaggcagcagcctggagtgtgtggagtgtgaggggtaagcagaggccaggaggaggtgtactca

SEQ ID NO: 22662 - DNA, 201 bp, Homo sapiens
gctgggatccaggagggagccatgcatgtgagaagtcattgagttctggataaatctgagggtagaggaacttgctgggacacacggaattgagctgaccratttcatggggacacagtgaggaggagcagtagttccgggcccagaccctgcagtgggcccagggagtgcatgtgggcagctgtgtggggtagagaggaa

SEQ ID NO: 22663 - DNA, 201 bp, Homo sapiens
caatcaaaagtggccaaaataaaatcccagtccaagtctgggagactccaaagccctctctgccttctccccactaagaggcccttccaggcttatggtgracacagacaccacgtggcaacctggcaggggcagagaagaacatttgcctttctttggtcttgctgccaaccattatcagggccatcgaggctccagaca

SEQ ID NO: 22664 - DNA, 201 bp, Homo sapiens; identical to SEQ ID NO: 4746

SEQ ID NO: 22665 - DNA, 201 bp, Homo sapiens
aaagtggccaaaataaaatcccagtccaagtctgggagactccaaagccctctctgccttctccccactaagaggcccttccaggcttatggtggacacaracaccacgtggcaacctggcaggggcagagaagaacatttgcctttctttggtcttgctgccaaccattatcagggccatcgaggctccagacactgtac

SEQ ID NO: 22666 - DNA, 201 bp, Homo sapiens; identical to SEQ ID NO: 4747

SEQ ID NO: 22667 - DNA, 201 bp, Homo sapiens
atcccaagttcagggacatttggcaaaatagcccaccactcctacttaaaagtgtcgaggtcttgaaaggcaaggaaaccctgggaaatcgtctttggccrgaggaaactcagcagacatgacgactaaatgcaatgtagaatcctcggacagaaaaggacattagtaggacagctggtgaaacccaagtaagtccaggct

SEQ ID NO: 22668 - DNA, 201 bp, Homo sapiens
aatgcgtgcgaatcatgggcctatgtcatgattcccaaagaatgagtttcatggaattttcaacattttaaatattttactccattcttcccttgcttgcmtagtttctgatgagaagtctgctgtcattttcatccttattcctttttagataaggtggagttttcctccctctgcctctacctctacctctttcaagat

SEQ ID NO: 22669 - DNA, 201 bp, Homo sapiens
ctcttgtctgccctctgtgctcacacagcactgggttgaggtctgcactccacctttcaaacagcaaagtaagagagggttgtgtgtagaggagcagaccygtatggttcaggaattcaaggccatgaaaagtacttgaaagccccaaggatgtttaagctagagcaggagagatgctgaaagccatgctggcttggctga

SEQ ID NO: 22670 - DNA, 201 bp, Homo sapiens; identical to SEQ ID NO: 21635

SEQ ID NO: 22671 - DNA, 201 bp, Homo sapiens; identical to SEQ ID NO: 4407

SEQ ID NO: 22672 - DNA, 201 bp, Homo sapiens
aatggaagacacagcctcctgtataattgtaagaccaggcagacagtgacaggcatcttaagagggctataaactaagggagggggagtttgcaggtggcrggtgtgacctgggcctctaggagcttgctacctgctctatgccagcccacacctggcttgagggacagtgcccactggtgaggcaagatgggaacctcca

SEQ ID NO: 22673 - DNA, 201 bp, Homo sapiens; identical to SEQ ID NO: 4375

SEQ ID NO: 22674 - DNA, 201 bp, Homo sapiens
atttgagtaggtctaacaagcccgtattaccagaaattatcatctggtcatttccagtccgagaacagaacacttggttgtcctggcatttcccaagcagkgggaggagttctctgcaggaataaataagcctcagcattcatgaaaatccactactccagacagacggctttggaatccaccagctacatccagctccct

SEQ ID NO: 22675 - DNA, 201 bp, Homo sapiens
gggcaggactgtcctgttcagtgcactgtgacccggacgctcaggcccacggaactcccctactccccctgctccctgcggtgccacccacctagctttcrtgcctgagggtggtcctcagactcctcctagaacaggcccagaggctcttagctatgtaagtattcattcctccaatcactgcagagcactcaccaggta

SEQ ID NO: 22676 - DNA, 201 bp, Homo sapiens
ggcatcaggactgtgcaaaactagttggcaggggagttgggaggagcaaacattcaacagcacaaagacaggccagcactaggtgctcaatgcacattagwccccttagtggcacacaggcaggtcgctgaactcctgcgcatctgtgtttcccgtgtgtaatgttctgctgtccccacaggtggtccataaggctgtgct

SEQ ID NO: 22677 - DNA, 201 bp, Homo sapiens; identical to SEQ ID NO: 4743

SEQ ID NO: 22678 - DNA, 201 bp, Homo sapiens; identical to SEQ ID NO: 21640

SEQ ID NO: 22679 - DNA, 201 bp, Homo sapiens
gtgcgggctggtggcaggggagatggcagcaaccagactcagacatttctctgcagttgtgctgtgggctcagggtggctctttatgaaggggccccttcrtggggtcatgcactcctgtgtgttttcccttgcatcatgccttgcctgtcttggcaaatatttctctggagtttacccagccagtccaaggtcacaggga

SEQ ID NO: 22680 - DNA, 201 bp, Homo sapiens
ggagctagtgcaagcacaatgataagagtgagcctggcagacactgaccccagcaataatcaggtaaacaaataaacagaactacaaactatgatgacaasaattcatccatccacagatattcactgaatggccactgtgtgcctggcactgttccaagtgctgaagaaaaatgaagaaaacaaaaatccctgcccttat

SEQ ID NO: 22681 - DNA, 201 bp, Homo sapiens
tcattctaacttaataacctctttaaagtctctatctccaaatacagtcacattttgaaatattgagggttaggacttcagtgtatgaattttgggaggaygcaactcagccaggctcactcttatcattacagctgcactagtgccatgcctggttcccagtggacaccccaggaacagccatccatccagagtgatatt

SEQ ID NO: 22682 - DNA, 201 bp, Homo sapiens
tgtggaggagacaaggaggagggaggtggccgtgccggcggttcagtgacagagatcctaaatgggaggccaatcctaaatgggatgatctctttcatccyaatttcagggtagtttggtcatccacgccacattccaagtgtcccctgggccctttctctccctcacccccctgtctgcacatgagtagatgcctccatg

SEQ ID NO: 22683 - DNA, 201 bp, Homo sapiens
atgcagccactgcagctggcccagcccaggctctcaacacactcaggggtccctgctggtgtgaaggtgcttcaactgcattgcaagctgcagggaaaggrcagggccaggctcgagcagggccacaactccaggcttggtgtgctgcctggagactttcacacttgcagatctgaatgaataattaatgaataagaagag

SEQ ID NO: 22684 - DNA, 201 bp, Homo sapiens
gtgcctgagttctaacttcctctcctctcctcatctccaccagtcttatagaattagggccccccaatgacctcattctaacttaataacctctttaaagkctctatctccaaatacagtcacattttgaaatattgagggttaggacttcagtgtatgaattttgggaggatgcaactcagccaggctcactcttatcat

SEQ ID NO: 22685 - DNA, 201 bp, Homo sapiens
caggacgcaggctgggtggagggcagtgggaggtggtcggggctccatctggccctctgagacttaaaggagctttgcttttcagagttgagaatggagaraatgttacctctcctggctctggggctcttggcggctgggttctgccctgctgtcctctgccaccctaacagcccacttgacgaggagaatctgacccag

SEQ ID NO: 22686 - DNA, 201 bp, Homo sapiens
agcaggctgccatgcagccactgcagctggcccagcccaggctctcaacacactcaggggtccctgctggtgtgaaggtgcttcaactgcattgcaagctkcagggaaagggcagggccaggctcgagcagggccacaactccaggcttggtgtgctgcctggagactttcacacttgcagatctgaatgaataattaatg

SEQ ID NO: 22687 - DNA, 201 bp, Homo sapiens
tcagaatgcagagaagtaatacaaggttagggcccaggactctttctcccacctctccctgcagagactcagatttttttaaaaaatgaccttggtcttcrggggaagaacttcccaccacagtgaacagccatgcccagcctacacttgactgtgcggcttacttagctcatccatccaaaggctattcctgggttgcct

SEQ ID NO: 22688 - DNA, 201 bp, Homo sapiens
ttactcagcaaacagtcacaaagcagctcctgtgtggggggtcaggggtgggctcactgtggtctctgctgcatgtcacacattgaagcactgtgctgggrgtcatcacaggctgtttaactcaattgtcacatgagcctgggtgcacaaaatggtagagcagctcagagagagatggacagacagcatgaacctctgagg

SEQ ID NO: 22689 - DNA, 201 bp, Homo sapiens
gagcagctcagagagagatggacagacagcatgaacctctgaggagtcaggttttcttggatgaagggacactaagatggctttggagcgtgagaaggacytcacctagcaaatgtgggaaaggagtgagacctccaggcagagggactggctggagacgagcgtgatgtggtgagccatggagtgtatgggtccccacag

SEQ ID NO: 22690 - DNA, 201 bp, Homo sapiens; identical to SEQ ID NO: 4751

SEQ ID NO: 22691 - DNA, 201 bp, Homo sapiens; identical to SEQ ID NO: 21643

SEQ ID NO: 22692 - DNA, 201 bp, Homo sapiens
aggtgctccattctttacctcgatggctctgggcaaatcatactcagcatctgggtctccatttgcacatctaggcatcaggactgtgcaaaactagttgrcaggggagttgggaggagcaaacattcaacagcacaaagacaggccagcactaggtgctcaatgcacattagaccccttagtggcacacaggcaggtcgc

SEQ ID NO: 22693 - DNA, 201 bp, Homo sapiens; identical to SEQ ID NO: 21644

SEQ ID NO: 22694 - DNA, 201 bp, Homo sapiens; identical to SEQ ID NO: 21645

SEQ ID NO: 22695 - DNA, 201 bp, Homo sapiens
gctctcctctccctatgtcttcacatggtcctcctctgcatgtgcctgagttctaacttcctctcctctcctcatctccaccagtcttatagaattagggccccccaatgacctcattctaacttaataacctctttaaagtctctatctccaaatacagtcacattttgaaatattgagggttaggacttcagtgtatga

SEQ ID NO: 22696 - DNA, 201 bp, Homo sapiens
caccattattttcctttctagccatatggattctaaaagttcctcttgtgagctgtaatcagaatgcagagaagtaatacaaggttagggcccaggactcyttctcccacctctccctgcagagactcagatttttttaaaaaatgaccttggtcttcgggggaagaacttcccaccacagtgaacagccatgcccagcct

SEQ ID NO: 22697 - DNA, 201 bp, Homo sapiens
ggatcacaggggccaggaacctagcagtctcccaggtgagtctttagacttgggtcaattcatcctttgtatccgaacttgaattggtgaaggccagatgkacttttgggtactcttgaacttgggttaatgcacgtgcatttctcattatatactcaccctgcttgggacacccccaagccaagaagagctaggttacag

SEQ ID NO: 22698 - DNA, 201 bp, Homo sapiens
acaggggttaagaaattgaggaacagattatttattttccaatcagaagggggtgactgtagaggaaaccagggaagaccatgctgcgaggtgggaggcasgtaggtactgatcagcagaggttcagatactttttttttctcgttttctagagagataggtgagctctacctgccaaagttttccatctcgagggactat

SEQ ID NO: 22699 - DNA, 201 bp, Homo sapiens; identical to SEQ ID NO: 4754

SEQ ID NO: 22700 - DNA, 201 bp, Homo sapiens
tggccagggcaatcccagaaggctcacttgtggggctgttggtagaaggtctcagttcctccctatgtgggctactcacagggctgctcaaatgtgacttrgagagagagagagagagagagagagagagagagagaggcttgtttgtttagtgtccaggaccgagagaggatatagagagaaagcacaaaagagagagag

SEQ ID NO: 22701 - DNA, 201 bp, Homo sapiens; identical to SEQ ID NO: 4755

SEQ ID NO: 22702 - DNA, 201 bp, Homo sapiens
aagtagatgtggcaaagccatgttgcaaaagaagccctggtgggtgacactctttggatggcccctgcctctccggaaggcaccagcgttggtttctctcygcctcaccttcccatgcaggtgggcacgtttgtgcttgggctcctgctggttatgccccagaagcacactcttccctatctgcagtcccagcccatgtgt

SEQ ID NO: 22703 - DNA, 201 bp, Homo sapiens
tattttaggctgtgtggtccacatgagggcagattcttctttttgacttcctcctctgcatcttcttcatcttctctttcctcttcattttttttacaacstttgaaaaatataagcaccattcttagctttaggtacacacaaaaataagctatggctgtattggcttacaggctatagtttcctgacccctgttctagg

SEQ ID NO: 22704 - DNA, 201 bp, Homo sapiens
accaatgcctggggaaaagcagaccaatgaagacttgtaagagcccagaaaagaggctgggagaaggtcaggaatggggtaaacgtggccttggggcatcygcctggagctccaggtgaccagtggcacccagaacaattcttgaccctctgcaggtcctccaaagcatcctcagtaggacctgcagaaggtcaaaaattt

SEQ ID NO: 22705 - DNA, 201 bp, Homo sapiens; identical to SEQ ID NO: 4396

SEQ ID NO: 22706 - DNA, 201 bp, Homo sapiens
cacatatgtttattgtggcaccattcacaatagcaaagacttggaaccaacccaaatgtccaccaataatagactggataaagaaaatatggcacatatamaccatggaatactatgcagccataaaaaaggatgagttcgtgtccttttcagggacatggatgaagctggaaaccatcattctcagcaaactaatacagg

SEQ ID NO: 22707 - DNA, 201 bp, Homo sapiens
ttggaaccaacccaaatgtccaccaataatagactggataaagaaaatatggcacatatacaccatggaatactatgcagccataaaaaaggatgagttcrtgtccttttcagggacatggatgaagctggaaaccatcattctcagcaaactaatacaggaacaggaaaccaaacaccacatgttctcactcataagtgg

SEQ ID NO: 22708 - DNA, 201 bp, Homo sapiens; identical to SEQ ID NO: 4403

SEQ ID NO: 22709 - DNA, 201 bp, Homo sapiens
aggctgtgccccaccctctgattctagagtctggactgtatcagaggtgagtgcctactagaggtaacaaggtcaggaccccaaaccttgtccatcccccraagtactgagcccccaccatgcaccagcccatgccagatgctttgcacttgtgatatcacccatcccttgacaacccagcaagttctattattgttccca

SEQ ID NO: 22710 - DNA, 201 bp, Homo sapiens
taggtggcttacccagtcacatatcttctaagtggtgcagccagaatttggcggggggagtgcgaccaagaaccctacactcagtcctgtgctctgtgctrtggaggagagatgaccaggagcagaaacttcattcagggacatctcaggcaccagctcccccatgagccagctaagttccctccctcccttcaccaagca

SEQ ID NO: 22711 - DNA, 201 bp, Homo sapiens
acctatggttccagctactcagaaggctgaggcggcaggatatcttgagtcgaggcggcaggatatcttgagtccaggagtcagagtcttcagtaagcaaygagcaatgattgcgccactacattccagcctgggtgacaaagcgagtctctctctctctctctctctctctctctatatatatatatatatataatatat

SEQ ID NO: 22712 - DNA, 201 bp, Homo sapiens
ggcttgagggacagtgcccactggtgaggcaagatgggaacctccaattgattgtttcaggatccccaaagctcttctaacacaatcagactcttcagagrcccccaggccctttttgacctgcctctggctcctggcccacctcatccctcactaccctcctccctgaaacactgagatcacccaccgccccgtggagca

SEQ ID NO: 22713 - DNA, 201 bp, Homo sapiens; identical to SEQ ID NO: 4406

SEQ ID NO: 22714 - DNA, 201 bp, Homo sapiens
caaagttttccatctcgagggactataacctgaacgacatacttctccagctgggcattgaggaagccttcaccagcaaggctgacctgtcagggatcacrggggccaggaacctagcagtctcccaggtgagtctttagacttgggtcaattcatcctttgtatccgaacttgaattggtgaaggccagatggacttttg

SEQ ID NO: 22715 - DNA, 201 bp, Homo sapiens
agtcgaggcggcaggatatcttgagtccaggagtcagagtcttcagtaagcaatgagcaatgattgcgccactacattccagcctgggtgacaaagcgagyctctctctctctctctctctctctctctatatatatatatatatataatatatatataaaaatatataatatattatatatgtgtatacgtatatatgta

SEQ ID NO: 22716 - DNA, 201 bp, Homo sapiens
gcagagacatgagatatttttgtgtgtttgtttatcccacatatcttgcagaaaggggaccaagaggtgactggaggtaaagagtcagaatttctaggggrggagctataaaaatgtctagactgcctaggagagtgtttctcaaaatgcattctgccaaatgagaccgagaatttctctatgagaaaagaattctttgtt

SEQ ID NO: 22717 - DNA, 201 bp, Homo sapiens
atggatgggaaattttattttaatataaacagtaaaatagcattgttttcacttgcagctttgaaatagtgggggccatatatggttgtttccttttttakgtggacacagaggacttcgtgccagaggcaagatccctgtaaatattgttgcacaaaaatctcactagctctcttcccataccacccaatgctgatgtcc

SEQ ID NO: 22718 - DNA, 201 bp, Homo sapiens
tcagtgccttgagaaaactactctggggacttctgacctagggcaggtgaagcaaaagattttatatggaatcccaactagaatcgtggtggtacactatrggacgttgtgttgggatggattctgagggcttacctggtcattactgctggtgatctctgctctggatggagaaggagggaatgctggcctctgtgccag

SEQ ID NO: 22719 - DNA, 201 bp, Homo sapiens
tcctgcctgttggcagctcagtcaggtaatagcacctggagttcacccacctgggtgtcccccacttctgctaatctcctcctcttgaatccttcttgctrttcagcttggaaactagaatttaggaagaaaagtcactgtatgatgtaatgcacagctttggccttgtttctgcactgtagtgacccaaacatccccgat

SEQ ID NO: 22720 - DNA, 201 bp, Homo sapiens
taaaaagatgtccatatgtattaattagggttgccaactcttgaaaaggccatctggtaatgattattcctctggggggaagattttcctccttccattcrgggtcatttccagattaattgtttttatgcatttcctgagggaggggattaatttatttccaattcaaacttaaaatgaagatataatcctttggggctc

SEQ ID NO: 22721 - DNA, 201 bp, Homo sapiens
ggaaaccagtctggatggtggtaagaggtgggaatgggcagagggatatgggctcgcaggggcttgcaggagctcacaggggcttggaagaatttgctggrggtggcagaagaggtgatgagcacagtggagtcaagtttgaggcagggatgaactgggacaacagagaggggcattgtccaattcagaacctgagctctc

SEQ ID NO: 22722 - DNA, 201 bp, Homo sapiens
ggaattaagcacttaatgaattcaaacacatttattgagtcccttcaatgtgctagacagtgtgtaagagttatagttgacaatgctcagaggataatgakggagacagggacaaactggatcattcttatttctgatgtggccaaagtgcaggcaaagacatgtcagggaaatcatgggtacaccgaggagggcagacag

SEQ ID NO: 22723 - DNA, 201 bp, Homo sapiens
agttggaagagtcaacacttgagttaaaaccttcatatgggcagggttttgtgggaccccaaccaccctctcagcaaaatccatgcaatcgggccaggcgyggtgactcacgcctgtaatcacagcactttgggaggccaagacggggatcatttgaggtcaggagttcaagaccagcctggacaacatggtgaaaccccg

SEQ ID NO: 22724 - DNA, 201 bp, Homo sapiens
gcaagtcaggtgctctagtgacgctgagcaagtgaattctttgacataagtttactccttagtgccaaggtacaaacaggtgccccaagaacctgtaggtktactttatttggtctgcatggtgatgaaaaaaatattgaattctatacatgataaaacctgaattgaaacctggactttagggaagtgatctggtagcgc

SEQ ID NO: 22725 - DNA, 201 bp, Homo sapiens
aaccctgtctctactaacaatacaaaaattagccgggtatggtggcaggtgcctgtaatcccagctacgcaggaggctgaggcagggaattgcttaaaccygggaggagtggctccttccaagggctattgtgaggattaaaggtaaccacttaaggcaagtacctgacagcatctcaggcatattagcattcattgccat

SEQ ID NO: 22726 - DNA, 201 bp, Homo sapiens
ctccttcaaggcttagagacccacagtcaggcatgaactctgcagaggcttggatttgtctgtgattggagttttactatcatttgagatggaaggacatrgagtacaaaacttaggcatgttgacaagagggtgcttgataaaatggatcaaaaccgaattaatttatactaaagcatcaaacacagtgcctgatatatt

SEQ ID NO: 22727 - DNA, 201 bp, Homo sapiens
aggaacacaggtgaagtgaatttttactttcattccttcctccttgtggctgagttttctctaaggaggatgcattatttcatgatcaggaaaaaaaaaaagaaaactttttatttaaagagaaagtgagttaggagcttggctggccttggttctctctcatggggctcctctggctttcttggtctctcagaatgagct

SEQ ID NO: 22728 - DNA, 201 bp, Homo sapiens
gggtccctgaggattgggctagcgggtacttcctgggggaagctgcttcctgtctttgctgcctcatgcactaggatccaggtccttgggaacaggaggcytacctggccagcagggatgggctaaagatcagccagtagtagctgcctgggaggctgtgctgaagagaattgaggggttacattccaccaggaaggagtg

SEQ ID NO: 22729 - DNA, 201 bp, Homo sapiens
ttgaggagatgactgatattttctaggtctctgaacagcaactcaaagaagctgtggcccaggctgtggaaaacaccaagtttggaaaggagaggcatcartggagtctggaaggtaagacaaatggtgaactttgatgtaaaatatctttgccttcttagaaagcttaggatttatccattaactcatcctctatccaag

SEQ ID NO: 22730 - DNA, 201 bp, Homo sapiens
cttatgggaccactatcatataagcagttctttgttgaccataatgactgcattttaatatcacatttgaatatatacatatttgaaacccaaaacacagrataatcattcttttcaaatgtgcacagaacacataaaacacttagtcacatcacatactggctaacagagtaaacctcaatgaattccaacaaataaaaa

SEQ ID NO: 22731 - DNA, 201 bp, Homo sapiens
tcctcaaggttcatttatgttgtagcacgggccagaatttccttcctttttaaggtcgaataatcttctagtatgtgtatgtgtgtgtgtgtgtgtgtgcstgtgtgtgtatcacatgctgtttatcatctgtttttgggtacttgggttgtttccaccttttgactattgtgaataatgctacaatgaacgtggagtaca

SEQ ID NO: 22732 - DNA, 201 bp, Homo sapiens
ggaggcagaggttgcagtaagccaagatcgcaccattgcacttcagcctgggcaacagagcaagaccctgtctcagaaaaaaaaaaaaaaaaaaagagagragatatcagtaagagaaatacaggttctttctcccataaacaatatatttctgggtactccagatatattttttataaataatttctaagagaagttcaa

SEQ ID NO: 22733 - DNA, 201 bp, Homo sapiens
agccagggaggcagaggttgcagtaagccaagatcgcaccattgcacttcagcctgggcaacagagcaagaccctgtctcagaaaaaaaaaaaaaaaaaaagagagaagatatcagtaagagaaatacaggttctttctcccataaacaatatatttctgggtactccagatatattttttataaataatttctaagagaa

SEQ ID NO: 22734 - DNA, 201 bp, Homo sapiens
ggtctgtttatctaataaagccccacaggtgcctcaaaaaaaaaaccccaaaaaccaaacaaacaaaaaaaagagaatgatctgggcatagctcagagccrtgttcctcaaagtgtggtctggaccagcagaatcaatgtcaactgggaacttgttagaaatgtggaatctcagacgcccggacccagacctgctgaacga

SEQ ID NO: 22735 - DNA, 201 bp, Homo sapiens; identical to SEQ ID NO: 4786

SEQ ID NO: 22736 - DNA, 201 bp, Homo sapiens
ggctggttcaagcctgtggctggagctggggtctgtttatctaataaagccccacaggtgcctcaaaaaaaaaaccccaaaaaccaaacaaacaaaaaaaagagaatgatctgggcatagctcagagccgtgttcctcaaagtgtggtctggaccagcagaatcaatgtcaactgggaacttgttagaaatgtggaatctc

SEQ ID NO: 22737 - DNA, 201 bp, Homo sapiens; identical to SEQ ID NO: 4787

SEQ ID NO: 22738 - DNA, 201 bp, Homo sapiens
ggggatgtctgaggccatacccagtgggctggttcaagcctgtggctggagctggggtctgtttatctaataaagccccacaggtgcctcaaaaaaaaaamcccaaaaaccaaacaaacaaaaaaaagagaatgatctgggcatagctcagagccgtgttcctcaaagtgtggtctggaccagcagaatcaatgtcaactg

SEQ ID NO: 22739 - DNA, 201 bp, Homo sapiens
attctgtggtcctagctgagatggtttccttgagaacacttcacatgatgttggtgcaggaaaagtctgttggaaagggcctctgaaacactcatctgccrttcattcactgaacatgcaaatgccccttctttgtgtcaacccccatcaaagctttggggacaaaaaatgaatgagactatgtctatctctcctctccag

SEQ ID NO: 22740 - DNA, 201 bp, Homo sapiens; identical to SEQ ID NO: 4789

SEQ ID NO: 22741 - DNA, 201 bp, Homo sapiens
ggagtgcatcattctgtggtcctagctgagatggtttccttgagaacacttcacatgatgttggtgcaggaaaagtctgttggaaagggcctctgaaacaytcatctgccgttcattcactgaacatgcaaatgccccttctttgtgtcaacccccatcaaagctttggggacaaaaaatgaatgagactatgtctatctc

SEQ ID NO: 22742 - DNA, 201 bp, Homo sapiens
gtgtaagttgattatacttagttggctttgtttctggatgttttcagaggatcagagctctgcacaggatctttatgcttgggtgaattcttgtgtttggkttcacagatgcatatattagtaggataatttttggtgttgcagcttaggctgtgatccagtagatggtgtggaagagtgatggccaatagctaggctgat

SEQ ID NO: 22743 - DNA, 201 bp, Homo sapiens
attaaagtctttgaatccatttattcaaaaatcatgaagctgcagagttataattctgaaagagagcaagaaaaaagttgaggcagggcccactggaactrtaacaatgagtatgggagtgaatcaggctcagttaacactcttgcttgagaggttcagggaagcactatgtcactccaaggtaaactgagcctagatccc

SEQ ID NO: 22744 - DNA, 201 bp, Homo sapiens
taaaagcttaaaacgtatgtattcttctgccaatggatctgagcattgatatactggttaacaaatcctctcaaaatgcagcaagctttttaaccaagcakatttggcctctggactttggttcatggcactggggtttgtaaaaggcagacctgatacaacagtttcagtggctgtagggaaaggaagctgactctgtgg

SEQ ID NO: 22745 - DNA, 201 bp, Homo sapiens; identical to SEQ ID NO: 4769

SEQ ID NO: 22746 - DNA, 201 bp, Homo sapiens
tggcaggaggagcagatctagaaaacaaggtgattacggtgagtggccaagtgaaggggcatgtcacagccagaggcaatggttctgggggagggggacayacttgccaggaaggggccctgtgctggggaaatgaagaatgcatgacactaggccactgggcaggtcctgtccactcagcacatcccagagcctggggct

SEQ ID NO: 22747 - DNA, 201 bp, Homo sapiens
tttccatcaacggcaagtctctcaaggggaccacgcaccatgatgccttggccatcctccgccaagctcgagagcccaggcaagctgtgattgtcacaagraagctgactccagaggccatgcccgacctcaactcctccactgactctgcagcctcagcctctgcagccagtgatgtttctgtagaatctagtaagttct

SEQ ID NO: 22748 - DNA, 201 bp, Homo sapiens
ccattctttacagatgaggaaactgaggtttgaggaggtgatgtaacttggaggctggccaagctggggtttgagataacaaatcagtctgatgtcagtcygatgttaaattgttcatcctcttgcagtaaaatgtttttgaatgtatgtatttcctctgcagcaattagacggcatccatgtcaccatcttacacaagga

SEQ ID NO: 22749 - DNA, 201 bp, Homo sapiens
agttattttgattttatttgttaagtttctatacttcatccatcagcaagtctatcttcaaaatatcttccatgggcatccgtttctttccatcttcactrgaggtgaagtccaaggccaccactgtttctctcaacagaggcctcttagctggtcttcttgcttccattctccatgacccatagttctttcccttcacag

SEQ ID NO: 22750 - DNA, 201 bp, Homo sapiens
aggggaccacgcaccatgatgccttggccatcctccgccaagctcgagagcccaggcaagctgtgattgtcacaaggaagctgactccagaggccatgccygacctcaactcctccactgactctgcagcctcagcctctgcagccagtgatgtttctgtagaatctagtaagttctcccaactcagtggaagccacatgg

SEQ ID NO: 22751 - DNA, 201 bp, Homo sapiens
cctgctttctcctctgggttccggcttcatctgtgcaaacatctgctctacacgtcgctgggatagtcccagacatcctgacagcacccccttgcctgtgmagccacctgaagtatccattcctcactttccagcacattgcacatgtcatttgggcaaagctgaaccccccagtcttaccctcataatcctgggcttcca

SEQ ID NO: 22752 - DNA, 201 bp, Homo sapiens
caccactagcagctatgaagctctgggccagttacttgagttcttggtttcctcagctgttaaaaggaaacacaaataatacacccctcataggattactrtcataaatgcaaaacattagcacaacgcctgttaaaataattgcccaatacactttagctatattttcattactatcattagtattatcttctactctta

SEQ ID NO: 22753 - DNA, 201 bp, Homo sapiens; identical to SEQ ID NO: 4783

SEQ ID NO: 22754 - DNA, 201 bp, Homo sapiens
gcagtggttcaatcacagctcactgcagccttgatctcccaggttcaagtgatcccccacctcagcctctgaagtagttgggactacaggtgcatgccacyacatccagctaatatttgtacgttttgtagaaacagggtttcgccatgttgcccagggtgcccccatctcagcctcacaaagcgctgggattagaggtgt

SEQ ID NO: 22755 - DNA, 201 bp, Homo sapiens
agcattgggttcaatgtcaagaggactagattccagtgttagttctgccacatgaccttggtagcatgatcttggacaagtcacttcaccaccatgggccyatttgcttaaatgtttaggatgagactgccagctgcagggtgatgttggaaggagagatgcagattctggagccagaaagtctgggttccagcccagggc

SEQ ID NO: 22756 - DNA, 201 bp, Homo sapiens
tctaaaagagactatagaattgctatgtttaaaatcattttaaaaagataaaaaaaggaatataaactgtaagacaagaccggaaacagtaaaaaaaaaaataagtggaagtgaaaaaaataacttttggaaatgagcaaaaaaagcagtcattgaaataaaaaactcaatggatggcttaaacagaagattagatgcagc

SEQ ID NO: 22757 - DNA, 201 bp, Homo sapiens
aaagagggaactgagaaactcgctcaagttcacattgctagtgggtcacagttacccactatgcaatgctgagtttcccatccttacccagaagctgtctsccccatcacggaatggccctgcaggggccctggcccttcccttaagcacaccgtgggcaggtgggagggggcctctggaaatcccctaaaacaatctaca

SEQ ID NO: 22758 - DNA, 201 bp, Homo sapiens
atctaaaagagactatagaattgctatgtttaaaatcattttaaaaagataaaaaaaggaatataaactgtaagacaagaccggaaacagtaaaaaaaaaaataagtggaagtgaaaaaaataacttttggaaatgagcaaaaaaagcagtcattgaaataaaaaactcaatggatggcttaaacagaagattagatgcag

SEQ ID NO: 22759 - DNA, 201 bp, Homo sapiens
cacagaacacataaaacacttagtcacatcacatactggctaacagagtaaacctcaatgaattccaacaaataaaaataagacacatcctgtggcacgaygcaattaaactggaattttctaataaaaaattgtaagaacagcaacactaaatctgggaaatttaactacatgaaattaacaataacaccaaaaatctcc

SEQ ID NO: 22760 - DNA, 201 bp, Homo sapiens
gagactctcttactcaaagtcataccactagagcacagaggctctggaatggagatccagctggcttgactcccatgcctagccattgggcattaatcacrtctaccatggaacatccttatgaaagaacaacatgcaaccattggcactgatattgacaagaaattaaatgatctggggaaatgttcagagaaaagaaca

SEQ ID NO: 22761 - DNA, 201 bp, Homo sapiens
cttatagaccttaagggctggaactcagatttgaatgcccacatgggcagaggggacagagccttgggtccatgtgaggctctgagaacctgcacacagcyttgataatgaaagagtttcccctcagtaaagccaacaggccccaggggagcaacaaggaaacttaactttacccatggctcctcagttggccaaaaacat

SEQ ID NO: 22762 - DNA, 201 bp, Homo sapiens
atataattctgacatttatttaattcttataattcttataataaatcagagactatgctaattcatgcattcacacataatttttatgcaaattttataasaaaaagtgaggccctcagagactctcttactcaaagtcataccactagagcacagaggctctggaatggagatccagctggcttgactcccatgcctagc

SEQ ID NO: 22763 - DNA, 201 bp, Homo sapiens
tcaggggttgatgatgtggcggggagggctgctggatgcttatagaccttaagggctggaactcagatttgaatgcccacatgggcagaggggacagagcyttgggtccatgtgaggctctgagaacctgcacacagccttgataatgaaagagtttcccctcagtaaagccaacaggccccaggggagcaacaaggaaac

SEQ ID NO: 22764 - DNA, 201 bp, Homo sapiens
atgttcattaggaatattggagtggggttttcttacttcattgtgtctctgccacattttggtattagactgattgtggcttcataggataagttagggargagtgcctcctcctcaattttttggaatagtttcggtaggattgataccagttctttgtacatctggcagaatttggctgtgaatccatcttgtctaggg

SEQ ID NO: 22765 - DNA, 201 bp, Homo sapiens
gccccattctgtggattgcacactggagctaaacacaatcagagacaagcaaacttcttaattaaggcaaacaaataattggcctaaatctctggacaatwcaagaaaagaaagaggtcccaattaatttgtcatttcctcctgctgcttttaggactacggcagaaaatcagtggagtagggcgtcaggttgtgggcaaa

SEQ ID NO: 22766 - DNA, 201 bp, Homo sapiens
atgcccagctgctaagaaacaaagaaacaactttaaatctaagaatggcagactcaggggttgatgatgtggcggggagggctgctggatgcttatagacyttaagggctggaactcagatttgaatgcccacatgggcagaggggacagagccttgggtccatgtgaggctctgagaacctgcacacagccttgataatg

SEQ ID NO: 22767 - DNA, 201 bp, Homo sapiens
aaagaatattttaaaatttctgccttaatttctgtgctcatccaggagttattcagaagcaagttgtttaatttccatgcatttatgtagttttgagaaascttcttgatactgatttctatttttattgcactgtggtttgataatgtgcttggtatgagttcaataacttatttgaagttattgagacttgctttagga

SEQ ID NO: 22768 - DNA, 201 bp, Homo sapiens
agggacacagacaaaccatatcaggcaacatgaggcaatgcttgggaagactcaacaagagctgctgggcaagtggctctggggtaagagagggaggaacygaagatatctcgaatatttttagattggaagactgagcaatggtcttccaccagaagagagaagaggaaaaggtagcaggcttgggagggagagaagagc

SEQ ID NO: 22769 - DNA, 201 bp, Homo sapiens
tcccagacttggagtctcacaatgacaaggactggttccttttatttttcactttggctccagcaacctaacagacggaactgatctgaatactctccccmccctgcctccagcccctgtttccaatacgtagacttgtgaaataatatagcacatccaaaatcaaaataaagacgtggaaatgcccagctgctaagaaac

SEQ ID NO: 22770 - DNA, 201 bp, Homo sapiens
ccgctgttgatagacacatacctgagactgggtagtttataaagaaaaagagatttaatagacttacagttccatgtggctggggaggcctcacaatcacrgcagaaggtgaaaggcatgtcttacatgatggcagacaagagagaataagagccaagtgaaaggggaaaccccttataaaatcgtcagatcttgtgagac

SEQ ID NO: 22771 - DNA, 201 bp, Homo sapiens
ttctgtgtttaaacaaaggggtgggggaagggttgaagtggcaagaaaagagaatattgtgttttgttctctttcctgaatgtaagcctgcccaagccaamctttttattttttctgagcatttgcctcccttaattaacagcaatcataaaaattgaagatttcaatgagtcaagactctcagctagtatatgatccctg

SEQ ID NO: 22772 - DNA, 201 bp, Homo sapiens
atattctgatgttttaaatgtatctattttccttcccagacttggagtctcacaatgacaaggactggttccttttatttttcactttggctccagcaacytaacagacggaactgatctgaatactctccccaccctgcctccagcccctgtttccaatacgtagacttgtgaaataatatagcacatccaaaatcaaaa

SEQ ID NO: 22773 - DNA, 201 bp, Homo sapiens
agaggaaccgggactagaacacaagcctttttgactctaggactcatactcttaactattactccaaagtgataataaactgtgagtcacagctcagacastataatagtgattgtgattattacgatattgttgataatgatgatgtcatgacagcattgccaagaacggactagctcatagagataacctatgaagtgg

SEQ ID NO: 22774 - DNA, 201 bp, Homo sapiens
ctaaatttagcttatatttttgctttgtttggaagacacaagattttaaaagcatctgaatttaaattgctacaaatgtgccaggctctctccagctccckgtggtctccaccgttccctttatcctgtaccaagttgccattcacacaatagcccctgcaggcacttgagtttgcagcccctagtttataataatagaat

SEQ ID NO: 22775 - DNA, 201 bp, Homo sapiens; identical to SEQ ID NO: 4818

SEQ ID NO: 22776 - DNA, 201 bp, Homo sapiens; identical to SEQ ID NO: 4819

SEQ ID NO: 22777 - DNA, 201 bp, Homo sapiens
aaggccttccttcagcagacaaaatcctttgctttgctgcctgtgagcaactcagcctgtggctttggggcctgggccttcttggcaagtgggaaacccartcttttggctgcctgcctcttcctgccgcagaagagcgacttatggatgctgagagcagccactgagagggaagcttagggctccatgactcccacagag

SEQ ID NO: 22778 - DNA, 201 bp, Homo sapiens
atcccataaggctatgaaagacaaagttcaagttcaaccagttcatcaaattatctcagagcaacctccagcttctgggctctgcttgtttctcagaaaarctatggtacagcttttatttactttttggcctccaggtattccttacccatttgctattttgttgatacatttacatcccatgcaacctttctacttgtt

SEQ ID NO: 22779 - DNA, 201 bp, Homo sapiens
aaaaccctctcggcccttggatgtcactgttttccatgccttatgccagcaacggcaaagagaagagctactattccaggagggttttttttttttttttwaagcaaaaagaaagtcttttggtttgcataactgcataggtcaatgcagtttcaggcatggctggatctagatgcccatatgataatgtctgaactcagt

SEQ ID NO: 22780 - DNA, 201 bp, Homo sapiens; identical to SEQ ID NO: 4771

SEQ ID NO: 22781 - DNA, 201 bp, Homo sapiens
tttctcagaaaaactatggtacagcttttatttactttttggcctccaggtattccttacccatttgctattttgttgatacatttacatcccatgcaacmtttctacttgtttttgtttttgtgtttctagagacagggtctctctctgttgactgggctgggatgcagtggtgtgatcatacctcactgcaatctcaac

SEQ ID NO: 22782 - DNA, 201 bp, Homo sapiens
attctctctcccttcctccctctcgatgccaggcctggagggaaggcaatctcccacagaagtccaattctggcttctctactacagctcttttgcaattrttctcttcctttaaaaaaaaaaatccataatgacaaggctcattttgaaaactgccttcactcttaaccaaagtgttaatgccttgccccctggttcatt

SEQ ID NO: 22783 - DNA, 201 bp, Homo sapiens
acaaatacactagctctgttggggaggtgtggggaagcctccagggagttggagagcagttttctagggagctgcagaacttctcggtttttctgcttggragtaaaacaactgatcgcattagcttagccatgttagaaaccttcattgtgcttcccccccggaatcctctggaggagacccacaaggctgtcttgtgga

SEQ ID NO: 22784 - DNA, 201 bp, Homo sapiens
aattcagcaatttgaaacacattttaccagctagttcttctctctccatgtggttatttaccctcccaaagatctccagtgagttaaatgtattttatccrggtggaaatactgtggcctttcctccggtaggttagctttgcctagcacaaaaacaggcacatgacagtttctcaacaagtgcttgttgaatgaaaaaaa

SEQ ID NO: 22785 - DNA, 201 bp, Homo sapiens
aagaaaggcattagtttatttcttcattttgacaaatcaaaagaggaaagacacctgatagtgccaaacagctaaaaaagcatttaataaacaaccacccrttcttgatgaaaatgcttccaaaattatcattagtaacatgtatttccttaatatgataaaaaaattatgtctcaatatatcggtcaacattctacatac

SEQ ID NO: 22786 - DNA, 201 bp, Homo sapiens
actcatgacaatatgtagctctaatatagcttttttgtatataatcatgacaatatatagctcccctttcaaaaactattttttttgttttttttttttttgcattgggttgtaataaccagctttcagttaactcacttaatactctacacttaactggtttaaacttcccccaatggagatgataattttggtacattt

SEQ ID NO: 22787 - DNA, 201 bp, Homo sapiens
attgaaagtgtttttccttaatgcttatcctgtttttaaaccattatttccaagttgacaccttttttaaggaaaaataaatattttgcggcattaaagcyatatacaaggtctatatcagaaaaatatatttggggggctgcagcacaggactgagggagcggtacatgcttaaaaggcaacagggcctggttttcagtg

SEQ ID NO: 22788 - DNA, 201 bp, Homo sapiens
aacataactttataaactcatgacaatatgtagctctaatatagcttttttgtatataatcatgacaatatatagctcccctttcaaaaactattttttttgttttttttttttttgcattgggttgtaataaccagctttcagttaactcacttaatactctacacttaactggtttaaacttcccccaatggagatgat

SEQ ID NO: 22789 - DNA, 201 bp, Homo sapiens
ttttaagaagagaagcttaaggccgggcgcagtggctcacgcctgtaatcccagcactttgggaggccgaggtgggtggatcacctgaggtcaggagttcragaccagcctgaccaacatagagaaaccctgtctctactaaaaatacaaaattagccgggagtggtggcacacgcctgtaatcccagctactcaggaggc

SEQ ID NO: 22790 - DNA, 201 bp, Homo sapiens
tttaaagtctgttttaaaaatagtgactcctgttcttttttgttttccatttgcatagtatatctttctctatccctttattttaagtctatgggagctaygtgaaataggtctcttgaagataataaatggttgggtcttgtctttttatccagcttgcccctctgtgccttttaagtgggaacatttagtccatttaca

SEQ ID NO: 22791 - DNA, 201 bp, Homo sapiens
atcacaccaaatcataatattagagatcatctatgttaacatattcagttatttcccttctatgcctacatatgctataaaaaacttcacacacgcatttrtttatatataactatttcaggtcatcagaaactcttgaaaacaccattttttagtggatccatggtattttattatatgaatttatgaaatctagttaac

SEQ ID NO: 22792 - DNA, 201 bp, Homo sapiens
cagtttcccgagagggactcagttgtgagttgtcacaggcaacacttatgtcagctgtgggaatgaacacctcggtccaggggtgaggagcttatccgggygatgccccatcaactactcaatacatttgacacagtgccttctttctctgagttaggctgttagaagattgggcattcacatgcagggacacctgtccag

SEQ ID NO: 22793 - DNA, 201 bp, Homo sapiens
cagacaacagagcaccaccctgtcctgacctgctctctctctgtcactcgcgcacgcgctctctctctctctctctgtcactcgctctctctctctctctmtatatatatatatttgtgcatatacgcacacacaacatgtgcacacacacacaaggattatggtagtgagtaataaaaccaatataactcaagaattaag

SEQ ID NO: 22794 - DNA, 201 bp, Homo sapiens
tccctaaaatctcaggatgaggagagggaagaaagtaaaagttgtctcaaaatctcatcttagatgagggagagtcatgttttctgtttcattactgaccctggtatggaaatgagtccaagtatgttgtttaatatactgcttacatactcaatactataaaatattttctaaattattagtataaaaagagagcaaaga

SEQ ID NO: 22795 - DNA, 201 bp, Homo sapiens
gcagggagactgggattctggaggctgaggtcatgcctcagactgtttcttcactgatccggaaccctctgggcttccatttcctcactgatagaggaagragtaactccagcagggttcccaaaggacaaatgacgagccacctgcatcatctgcacaggctgacaaacatacaggtttccccagacccgaaacgtgcag

SEQ ID NO: 22796 - DNA, 201 bp, Homo sapiens
ccatccctaaaatctcaggatgaggagagggaagaaagtaaaagttgtctcaaaatctcatcttagatgagggagagtcatgttttctgtttcattactgaccctggtatggaaatgagtccaagtatgttgtttaatatactgcttacatactcaatactataaaatattttctaaattattagtataaaaagagagcaa

SEQ ID NO: 22797 - DNA, 201 bp, Homo sapiens
ttccctttctccctcacccattctttgcttttttactgttttgttttgcagccaagaccagctatacaattggtaggactcactgtaaaatgaaaaggcasgattgctgttcaaaaaatatatgaataatttcaaaaaggtagaagaaaatctttgaaccaggttgggattcttcaatcacagggccccaggtgactgtgc

SEQ ID NO: 22798 - DNA, 201 bp, Homo sapiens
cccatccctaaaatctcaggatgaggagagggaagaaagtaaaagttgtctcaaaatctcatcttagatgagggagagtcatgttttctgtttcattactgaccctggtatggaaatgagtccaagtatgttgtttaatatactgcttacatactcaatactataaaatattttctaaattattagtataaaaagagagca

SEQ ID NO: 22799 - DNA, 201 bp, Homo sapiens
aaatcataatattagagatcatctatgttaacatattcagttatttcccttctatgcctacatatgctataaaaaacttcacacacgcatttatttatatrtaactatttcaggtcatcagaaactcttgaaaacaccattttttagtggatccatggtattttattatatgaatttatgaaatctagttaaccaactccc

SEQ ID NO: 22800 - DNA, 201 bp, Homo sapiens
acccatccctaaaatctcaggatgaggagagggaagaaagtaaaagttgtctcaaaatctcatcttagatgagggagagtcatgttttctgtttcattactgaccctggtatggaaatgagtccaagtatgttgtttaatatactgcttacatactcaatactataaaatattttctaaattattagtataaaaagagagc

SEQ ID NO: 22801 - DNA, 201 bp, Homo sapiens
gtaatctattcattcaatatttgtaattaaacaaatgaatgtatgtctatgagtgaaaggatgatggtgattctaaatccctgctcttatagtacttatcrtttcagtaggggagacagataatctgagtacttctatggtcagtgtcaaaatccaattttgctaagcacaagttttctattctaacttgctgaataaaaa

SEQ ID NO: 22802 - DNA, 201 bp, Homo sapiens
gtcagtcatcatcattagataatatctttttttaacttactatgataacacaggtatacctatgtcacaactctttacaaactttttttttttttttttttgagacagagtctcgctctgtcacccaggctgaagtacagtggcaggatcttggttcactgcaacctctgcctcccaggtttatgtgattctcctgcctca

SEQ ID NO: 22803 - DNA, 201 bp, Homo sapiens
tgtcagtcatctttcactaaaatgcattttctccaagatcaacatccttgtctgtcttggtcacagctatgtgcacaatgtctaacaaagaacttgacatstaatagctgaaggattcattcaatttgtgtcgcattagtttactattaatgtaatctattcattcaatatttgtaattaaacaaatgaatgtatgtctat

SEQ ID NO: 22804 - DNA, 201 bp, Homo sapiens
tgcttgtttattgtcagtcatctttcactaaaatgcattttctccaagatcaacatccttgtctgtcttggtcacagctatgtgcacaatgtctaacaaakaacttgacatctaatagctgaaggattcattcaatttgtgtcgcattagtttactattaatgtaatctattcattcaatatttgtaattaaacaaatgaa

SEQ ID NO: 22805 - DNA, 201 bp, Homo sapiens
acatatatatttgttgagtgccatcttctatatttgtctattaggtcaaattccacaataaccattaatttgcatgaatagtcaaatagagaagatatttrtctacccatttcccctatgaatagcttgttagctattttcccaatcttttttaactttatcaattccagctctcaattatttgctgaaagaagcatgtta

SEQ ID NO: 22806 - DNA, 201 bp, Homo sapiens
atgagttaggaaatactttctcttttccattttctggaatactttgacttacattggtgctatacttttttaaaatggttgaagaattcacctatgagccrtctgggactagagatttctttttggaaaggttttaaattatcactgtatttatttagtagaaataggactatacaaattttcaacttcttttgatatcag

SEQ ID NO: 22807 - DNA, 201 bp, Homo sapiens
tgtccagagcaggtggtgaatattgtgtcctactcacggcatctcaactatcggagcctgggatctgactcaaaggccggcctccgtctgagaactgagcrtccatttctcaatccttgccggctctgacccaggcctgggccacaggctgtccgggaataagtggtgctgcaatccctgctgggcagatggagagaggag

SEQ ID NO: 22808 - DNA, 201 bp, Homo sapiens
gctctcctagtcatttctgtgttgtccaaagaaggcaggggcaactgggctggaccaaggaacctcactgtggttctgtggctctgcactgggtttgcctyctgggtgttgccggccagcccagcagatggtggaccttgttctgaggctgagcttctcagcactggcagcccccctttttggatcaagccttttcacgtg

SEQ ID NO: 22809 - DNA, 201 bp, Homo sapiens
agctgttctgactccaggtgctgatagcagagtttctctggcaacctgtagcactgccttgagaaatgattatctaaagtatatttgcatgggggtgaggrgtgcagagggagtacgagagtcacagtgtcttggcagtggattgagcagagtgatggtgatgccagtggccacgactctttggagccctgagtggtagca

SEQ ID NO: 22810 - DNA, 201 bp, Homo sapiens
tttttttttttgtgagacagagtttcactcttgtcacccaggctggagtgcagtggtgcaatctctgctgactgcaacctccacctcccaggttcaggctrttctcctgcctcagcctcccaagtagctgggattacaggcatgcaccaccatgctcagctaattttgcagtttttagtagagacagggtttcgccatgtt

SEQ ID NO: 22811 - DNA, 201 bp, Homo sapiens
tgtgtatctgaacatttgtaacaaaaggtacagtaaaaatatggtattttaatcttatgggaccactatcatataagcagttctttgttgaccataatgaytgcattttaatatcacatttgaatatatacatatttgaaacccaaaacacagaataatcattcttttcaaatgtgcacagaacacataaaacacttagtc

SEQ ID NO: 22812 - DNA, 201 bp, Homo sapiens
atatctcaacagtattccatgtatcttgatgatcacttacaatataaggcaagtaagcataggcaattcatcagatttgaaccagagatggggttactaastgaactattagttccccagaagaattagcccaagcaaaggtgttgtacagtatgtaaaatgtcttttcctactttatacattttatctggccagagaaca

SEQ ID NO: 22813 - DNA, 201 bp, Homo sapiens
caggacctggtatcggcccacagaccaagtcctccacagagggcgagccagggtggagaagagccagcccaggtaagctttcattgagatcttccaaaagraagggtcttttgaaaaaaggtgcagggataagataagagcacaaattggcctgaggatcagagtgctctgcattgacatcaccactggacctggctgatc

SEQ ID NO: 22814 - DNA, 201 bp, Homo sapiens; identical to SEQ ID NO: 4778

SEQ ID NO: 22815 - DNA, 201 bp, Homo sapiens
tgaagcctctactgctcatttattcaatccccagtgagtcttttaaataaaacttagtaccccaaccatttcctggccactcttcaagccccaggcaccamgctaaaatattcacatacctcatttaatttaaaccttacaacaacctggagcttagggagtatatccccaaaccgagaggtgaggaggcttgcacaggac

SEQ ID NO: 22816 - DNA, 201 bp, Homo sapiens
tttctgtagaatctagtaagttctcccaactcagtggaagccacatgggccacatcctctttggccatttggggccagacctgatggggctactcagtaayttgtgaccccaagaatgtgtggctgcctagtacactgcctgagacgtgtttacatgtgcctgtgtgcaaacacgggggctgtatcaccccgggctcactt

SEQ ID NO: 22817 - DNA, 201 bp, Homo sapiens
gttgatgaaaagacaaaacacatttgtgctgttctaagttgtaaagctgcattgactgcagttggtatcacatgtggctgcctgtaaaagagctaacaatycatgaatgtcaacagatgtcaacttacagagctcccaaccaggtgaaattaaatttcatccccatgtaatttctcttgtggacaagagacttagagatca

SEQ ID NO: 22818 - DNA, 201 bp, Homo sapiens
gatggcaggattgtatgtgatgacttttttcctctttttattaaatttttatataatttgagaggagttcttgctatggtttgcccgggcttgtcttgaaycccccggctcaagtgatccttctgcctcagcctcctgagtagctgggattataggcacgtgccacagcttccagcatgtgatgaggtttatagaaagctc

SEQ ID NO: 22819 - DNA, 201 bp, Homo sapiens
ttatctttaatctttgttggcctaaaaatcctctagcattgactaaccggttcaatcctcctccagcaagtatgtggactggacttgtgtgatttctggtmctgacttcctttggtttgctcaggttcacagagtgtttccaaatgggctggcctcccaggaagggactattcagaagggcaatgaggttctttccatcaa

SEQ ID NO: 22820 - DNA, 201 bp, Homo sapiens
agtcaccctaattgaggaacattctagcaaaagcaaacgcctcagtgtttaactgacaggaggttgtcactccaatctgcaaagggcttgcctgtggaacytctgcctcctgattctcacaacagcaccttacagccaagccattcaaaaatgcagaaacaggctggaggcctgggctcacttgcccaaggccagtctctt

SEQ ID NO: 22821 - DNA, 201 bp, Homo sapiens
acaaaagtgccccattcttttatgctgcagttttcaacatgctctgtatacgttaggtcatgggctctcgcacctgagcacgcaccaaaatcacctggagrctttgtgaaaacagagtgccagaggtgctgcttcaggaggtctaggccagggcctgagaacttgcatttctagcagatgctgctgatgcagctggcttga

SEQ ID NO: 22822 - DNA, 201 bp, Homo sapiens
ggttgcgttccagtagcaagcatcccccaaggcacacaggccagcctccctctgcccctgggaaagagagccaggacaccctctcccttacccatgcagayatgatgctggttcaatgctggcttctgagaaagactcctatgtgctccagggcatgcctgaggtcctggctggcacagagcaggttgcacattgcaatcc

SEQ ID NO: 22823 - DNA, 201 bp, Homo sapiens
accaaaaatggtttaagttatcttggtgtgcacaaaatatgcattcaatgagtaatctttatgaggccggggggtggaagaagatgaatcatttgatatasaaatcctcatgtacagagcagtgatgatgagttcagaaataaagcaggcttcccactatctggcgataaaacctacaccccaagatctcgtcactaacag

SEQ ID NO: 22824 - DNA, 201 bp, Homo sapiens
tgaactcctggcctcaagtgattctcccacctcagcctcccaaagagttaggattacaggtctgatccactacgaccagtcaagtgatttaatgtgtgagwtgggagggggtgtcagggaagtcttcctggaggaggtgattctgagccaagccttgaaaaacatacaagagttcactggaggcagggcttgttgaagctc

SEQ ID NO: 22825 - DNA, 201 bp, Homo sapiens
attttcttagttttttttgtagagagagaattttgccatgttgcccagtctggtttcaaactcctgagctcaagcaatccacctgcctcagtctcccaaartgctgttgttataggcatgagccaccatgtctggccatgcatctatatttatgaagactattggcttgtagttttctttttttgtaaatctttgtctggt

SEQ ID NO: 22826 - DNA, 201 bp, Homo sapiens
ctgttcagttcattgtgaaaagtgtatatcccagtgtaaagcacacccctagcaaggcataaaatgttatcatcactggctggatgcagtggctcacatcygtaatcgctacacttttgtaggctgagtagggagatggctgatgcccaggagttcaagaccagtctgtgcaacatagcaagaccccatctctaaaaaaat

SEQ ID NO: 22827 - DNA, 201 bp, Homo sapiens
ttgctctgtcacccaggctggagtgcagtggcacaatcatggctcactgcagtcttcacctctcaggctcaagaaatcctcccacctcagcctctcaaatrgctgggaccataggcatgtgccaccatgcctggctaatttttattttcttagttttttttgtagagagagaattttgccatgttgcccagtctggtttca

SEQ ID NO: 22828 - DNA, 201 bp, Homo sapiens
tggctgcactgcctttggttgggtttccctggtaacagatggtgagacagagatttgcgcataggaagttcattggtgtgtgctctgggaacaacaccagygtggggtgagggagacagaaccagacagatggagaagttgggctgtgatgcagttgcaacactggcctcagcggatccaggggatcttatggggttttgt

SEQ ID NO: 22829 - DNA, 201 bp, Homo sapiens
gaattcaatttgctaacattttgcttatatattagctatataagtatatatatatatatatatatatatatttttttttttttttttttttttttttttttgaggcaaggtcttgctctgtcacccaggctggagtgcagtggcacaatcatggctcactgcagtcttcacctctcaggctcaagaaatcctcccacctca

SEQ ID NO: 22830 - DNA, 201 bp, Homo sapiens
ttttttctagaagtttcatagtcttacattatacttgtaagtccattttgagttaatttttgtgtgaaatgtgaaacttaaaccaagctttttttttttttctctcctgtggatatccaattatagcaccatttgttgaaaaaaactatcttccattgaattcctgctgcatctttgtcacatatcagtttggtatatgct

SEQ ID NO: 22831 - DNA, 201 bp, Homo sapiens
gattccccactaggtctttgctggtcttcctcctttcctggtgttttagccaggctggcgagaacaggcttgtctttgtttgtttgtttgtttgtttgttkgtttttggctttgcctattggcagttctgggttgcaggcctctccagcctctagtttggggtagatagtagatagaaagaaaatccagggaactcaccct

SEQ ID NO: 22832 - DNA, 201 bp, Homo sapiens
gccaacaggaagtcctggggggcagcaccagtctccaaggagctgctgtgtccagggaaggatgggaataggactactggggtgtcctggcgcatcagaaragacaaacacaagagtggctagtcttaaaactcacacctggctgagtccaagcagcacacatttttctaattaaacaaagtgattgttttcttgtaaagg

SEQ ID NO: 22833 - DNA, 201 bp, Homo sapiens
tatttaaacaaattttcttcatctttagtttttagaagtttaattatgatgtatctagttgttgatttatttgggtttattttagtttatcttttctcacwtgactcgtgaattctcagttcttgacattataagtgactcaattgtatcttggacattttgattattatgtgagaagactcttcatctgacttagatctt

SEQ ID NO: 22834 - DNA, 201 bp, Homo sapiens
ttatttaaacaaattttcttcatctttagtttttagaagtttaattatgatgtatctagttgttgatttatttgggtttattttagtttatcttttctcayatgactcgtgaattctcagttcttgacattataagtgactcaattgtatcttggacattttgattattatgtgagaagactcttcatctgacttagatct

SEQ ID NO: 22835 - DNA, 201 bp, Homo sapiens
tgccagaaaacattttgtactattcctgaaagctagttttaggagttggccttttgaatttcattagctctggcagaacttcatttggttagtgaagaggkgttaggtagaaaagaagaggagaataaggccgggcgcggtggctcatgcctgtaattacaatactttgggaggctgaggcgggtggatcatctgaggtca

SEQ ID NO: 22836 - DNA, 201 bp, Homo sapiens
ttggtaaaaaccatagtgatgttcatttttcattcctaatattgatacatatgtcttctctttctgtgtgtgtgtgtgtgtgtgtgtgtgtgtgtgtgtgkcttgattgattcctagactaattgttccatagttaaagaagagaatgtattgcgaatgattttaatcactggaaatttgttgagaatatatatacatgca

SEQ ID NO: 22837 - DNA, 201 bp, Homo sapiens
ggatcctggttctgccttgcggcatctccgatatcagagagcagggagcaagcagctacctccacattcacagctgatgtgtctgctttcgtggacatgcrggaagcacagccttcagccccagactctttccaaatattaaatgctgaaagtagcaaacagtcttagaatttataataatgacaagaaacatttctaagg

SEQ ID NO: 22838 - DNA, 201 bp, Homo sapiens
taccctacacacgtcccaccagcttgcctttcagccccagccaaagcacgctgtgctgcacgctgccacttttggtcacacagcgccctctgtctgtagcwtctcacccctccttctctgatctctatctctagaaactgccccagccttcaaaaaccttcctaaggttctcttttgcctgggaaagctcctgatctctcc

SEQ ID NO: 22839 - DNA, 201 bp, Homo sapiens
ttttctatcacataaaaaacacttaaaacctgtaagtctctatttctctcactgagtgcagctgagtattacaaaaagattcctgaccgtgtagtttactktctacttgaagaggaggaaagagagcttgcctgtgggaatggcactttgggtatttttctctgtccatgagtagcaacttctgtccacgtcatctggcca

SEQ ID NO: 22840 - DNA, 201 bp, Homo sapiens
catccatcctgggagtgaggggccagggaaacagagctgcctgtcttcttgtcctgtagagtcagggttccccccacccccacctccaccctaaagtcatkcatggattattgagcaacaggtttggcccaaagaaattgccaggtttcaactcaggaggcaaagttcaggggctggaagtcacagggcagagagtaccca

SEQ ID NO: 22841 - DNA, 201 bp, Homo sapiens
acagtgtgtaagagttatagttgacaatgctcagaggataatgagggagacagggacaaactggatcattcttatttctgatgtggccaaagtgcaggcamagacatgtcagggaaatcatgggtacaccgaggagggcagacagtgtggggaggggcgtcctgggggaggtggctgttgaaagcaggatattccaggaaa

SEQ ID NO: 22842 - DNA, 201 bp, Homo sapiens
aatgcatgtagtaattgcttgataaatatgatgatgattattatttctattttagcatgggggcactaattctgaggaattaagcacttaatgaattcaawcacatttattgagtcccttcaatgtgctagacagtgtgtaagagttatagttgacaatgctcagaggataatgagggagacagggacaaactggatcatt

SEQ ID NO: 22843 - DNA, 201 bp, Homo sapiens
tattactggctcttctgctagtgccttgggttggtacttcccctctctgcacctcagttcccttgtctatagaatgagaagctctggggctaggtctccaygacactgggagtggagtgggtgttaaccgcttgggttaactgagccccatttggctggcacactggaagggccagtgatcttaaaggatgatctgcccat

SEQ ID NO: 22844 - DNA, 201 bp, Homo sapiens
taaaatcaaagagctaatacagaaaacaataaatgtgtgcaattcgagtgctgaaaaacagtctatttttaggcagaaattctccttttggaggatatgtraaagggttttgatgtaatgaaatgttattaggtctctgctattccttattcaatactggatgtgcgcaaacagcagtaccaatgggccaagagcatccca

SEQ ID NO: 22845 - DNA, 201 bp, Homo sapiens
atattttaatccttcctagggtctgattggtggagaagtccatggttttctcaggagacagctatttgtctggggacatcactacaaaggttctgtaaatsaattctaaattgattccagaaggatgaaggagagaatggatgggtaactatacaaacagcaggaaataccaggattcactggtaggaagtggactaacaa

SEQ ID NO: 22846 - DNA, 201 bp, Homo sapiens
ttgttggcctaaaaatcctctagcattgactaaccggttcaatcctcctccagcaagtatgtggactggacttgtgtgatttctggtcctgacttcctttrgtttgctcaggttcacagagtgtttccaaatgggctggcctcccaggaagggactattcagaagggcaatgaggttctttccatcaacggcaagtctctc

SEQ ID NO: 22847 - DNA, 201 bp, Homo sapiens
cagcatgtaaccacgacatgatatgctatcatttctaaaatagaataaatttaaggaaactaaatattcaattcttgaagatagaaaaaaaataaaacaawtaaaagcaagaaggagaaaagtagctaaagcagaaataaatatgttggaaatcaaaccccaaaaagcagatgttttcactgcttctaagaatgagtcctt

SEQ ID NO: 22848 - DNA, 201 bp, Homo sapiens
aaccggttcaatcctcctccagcaagtatgtggactggacttgtgtgatttctggtcctgacttcctttggtttgctcaggttcacagagtgtttccaaakgggctggcctcccaggaagggactattcagaagggcaatgaggttctttccatcaacggcaagtctctcaaggggaccacgcaccatgatgccttggcca

SEQ ID NO: 22849 - DNA, 201 bp, Homo sapiens
actgcacctctcacctggcaaagaaaagccacaggaaatctaagccctttctgcagtctggcatcggcatatgaaagattccaacgaggaatttcagaacycatcccagctcccgaatctgagtaagcacagacctcttgagtagggctgagcaaatgcggcaaaatcaatgcacatatgacaagattcagtggcccaaag

SEQ ID NO: 22850 - DNA, 201 bp, Homo sapiens
ctccctacacggagacaagcctctcaccattaacaggattttcaaaggtgtggggtgtgtctggttctttgcgtgctctccagttgtgggcatgtggccargcccccaaaaggcttctgggcactttctgggctatgttgtttcccacaactccatgtcctcttcataggcatgctggtccttttagggctcaattctgct

SEQ ID NO: 22851 - DNA, 201 bp, Homo sapiens
tgtagtgacccaaacatccccgataaaacacccactgcttaagaggcaggctcggatggactatagctttgataccacagccgaagacccttgggttaggrtttctgactgcatcaaaaacttatttagccccatcatgagtgagaaccatggccacatgcctctacagcccaatgccagcctgaatgaagaagaagggac

SEQ ID NO: 22852 - DNA, 201 bp, Homo sapiens
agtgtcatcggctgtcatgaaatccttgctgtgccttccatcttctatctcctgtgcccagactccctgcatccccaaggaaggggcatctccaacatcawcatccaacgaagactcagctgcaaatggttctgctgaaacatctgccttggacacagggttctcgctcaagtgagtttctacacccggtgtttctcttta

SEQ ID NO: 22853 - DNA, 201 bp, Homo sapiens
catccaacgaagactcagctgcaaatggttctgctgaaacatctgccttggacacagggttctcgctcaagtgagtttctacacccggtgtttctctttamctttctcatctttttctttctcatctttatttttaaaaataatcctatatataatttaaaaaattcccagatatattgattaaagaattgttctgcctct

SEQ ID NO: 22854 - DNA, 201 bp, Homo sapiens
ggggtggatattactttctcagttttcagttttgtttgcccactcactgtatattcttttggtctttccaatggtgatccaaggatttatttaacccagcrgtcaaattggtcattttaaataatagtacatcttgtccaagtccaaaaataaaatgtcctggtatgagaaggcaagcggaggaaattgggtagagtaggc

SEQ ID NO: 22855 - DNA, 201 bp, Homo sapiens
tcaagtgagtttctacacccggtgtttctctttacctttctcatctttttctttctcatctttatttttaaaaataatcctatatataatttaaaaaattyccagatatattgattaaagaattgttctgcctctttctttccatgtgtgtgcagatgtctgagtgtgtgtgtgtctgtctgtaggtattacacctctgcc

SEQ ID NO: 22856 - DNA, 201 bp, Homo sapiens; identical to SEQ ID NO: 4782

SEQ ID NO: 22857 - DNA, 201 bp, Homo sapiens
tttaaaactccagactatatcattattattctatagagtcaatattcatgtacattaatttaaatgtttacattttccattatttttcattccttcctgcwtttatgtgtttctcggtaagatcacttcctttctgcctgcagcaggctgcctctaatacaggtaggccctagaatgaaagtacacatgagatctacatgt

SEQ ID NO: 22858 - DNA, 201 bp, Homo sapiens; identical to SEQ ID NO: 4785

SEQ ID NO: 22859 - DNA, 201 bp, Homo sapiens
tctgagaaagactcctatgtgctccagggcatgcctgaggtcctggctggcacagagcaggttgcacattgcaatcccctgctcatcacattcccaacacycaggctgcatcccaggtatcttcagtcagtacctaggggtgggcgtcagtatttttcagggccctccagattccagtatgtagccaaggtggagaatcct

SEQ ID NO: 22860 - DNA, 201 bp, Homo sapiens
attggtaaaaaccatagtgatgttcatttttcattcctaatattgatacatatgtcttctctttctgtgtgtgtgtgtgtgtgtgtgtgtgtgtgtgtgtgtcttgattgattcctagactaattgttccatagttaaagaagagaatgtattgcgaatgattttaatcactggaaatttgttgagaatatatatacatgc

SEQ ID NO: 22861 - DNA, 201 bp, Homo sapiens
gaaagactcctatgtgctccagggcatgcctgaggtcctggctggcacagagcaggttgcacattgcaatcccctgctcatcacattcccaacacccaggytgcatcccaggtatcttcagtcagtacctaggggtgggcgtcagtatttttcagggccctccagattccagtatgtagccaaggtggagaatcctacttc

SEQ ID NO: 22862 - DNA, 201 bp, Homo sapiens
aaaaaccctctcggcccttggatgtcactgttttccatgccttatgccagcaacggcaaagagaagagctactattccaggagggtttttttttttttttttaagcaaaaagaaagtcttttggtttgcataactgcataggtcaatgcagtttcaggcatggctggatctagatgcccatatgataatgtctgaactcag

SEQ ID NO: 22863 - DNA, 201 bp, Homo sapiens
catataaaaatgaatttgtaagatgtatacacactctaaaaaataaagatgccctatacaccggtgtgtcaattatcaagtttaagaaacaaaccttaccrttaactttgagattatttgaatgttcctacctgatgcctttccattctcactcctctctaaggtaaccacttaattttgggttattattctcttgctttt

SEQ ID NO: 22864 - DNA, 201 bp, Homo sapiens
ccagtatgtagccaaggtggagaatcctacttcacagattcctttctacctggaaccttttcatcagcttttgagggagggaaaacactcctttgccgagrgcaagctgatcaatgacctgtgtataggcagagcagcaaacacacggcttcagggccaggcaggtacatacatgggaaatgctggctgggtgagagggag

SEQ ID NO: 22865 - DNA, 201 bp, Homo sapiens; identical to SEQ ID NO: 4788

SEQ ID NO: 22866 - DNA, 201 bp, Homo sapiens
actgctcacatgctgatgcttccactcgacattgggttgtggataacttctcagttccgacaaagttatctgaaccaccagtcttaccaacctcagaaaawcagatcagatgcctgtgcagtaatttatttaaccattccccaattatggacatcttggcttgctttcaattttatgttttccaaaatatcatcataaata

SEQ ID NO: 22867 - DNA, 201 bp, Homo sapiens
cgatgccaggcctggagggaaggcaatctcccacagaagtccaattctggcttctctactacagctcttttgcaattgttctcttcctttaaaaaaaaaaatccataatgacaaggctcattttgaaaactgccttcactcttaaccaaagtgttaatgccttgccccctggttcattgccatctcccatcccatgggccc

SEQ ID NO: 22868 - DNA, 201 bp, Homo sapiens
tatttgaatgttcctacctgatgcctttccattctcactcctctctaaggtaaccacttaattttgggttattattctcttgcttttctttatactttatyatacctgtttgtatatctgaatgttttattatttagttccacttatttttgattagcatttacatggtgtctattttttatccttttattttcaacctat

SEQ ID NO: 22869 - DNA, 201 bp, Homo sapiens
tccatctctccatccctctgtccatccatgcatccatctttttttttcatttttttcttttttaaatatagagatgaagtcttactatgttgcccaggggrgcctcgaactcctgtccccaagtgatcctccctgcctcagcatcctaaagtgctgagattacaagagtgagccaccatgcctggctatccatctcatttt

SEQ ID NO: 22870 - DNA, 201 bp, Homo sapiens
atactgtggcctttcctccggtaggttagctttgcctagcacaaaaacaggcacatgacagtttctcaacaagtgcttgttgaatgaaaaaaaaaaaaaaatgaaaaggaaggaaggaaggaggaggaagggagggacagactaacagatcctgcttcacagtacatattctgcaagttttttgaacttctttaaaggaga

SEQ ID NO: 22871 - DNA, 201 bp, Homo sapiens
ttgtcctgagtcacctgtccagagcaggtggtgaatattgtgtcctactcacggcatctcaactatcggagcctgggatctgactcaaaggccggcctccrtctgagaactgagcgtccatttctcaatccttgccggctctgacccaggcctgggccacaggctgtccgggaataagtggtgctgcaatccctgctgggc

SEQ ID NO: 22872 - DNA, 201 bp, Homo sapiens
gtaaagctacagcatgtaaccacgacatgatatgctatcatttctaaaatagaataaatttaaggaaactaaatattcaattcttgaagatagaaaaaaaataaaacaaataaaagcaagaaggagaaaagtagctaaagcagaaataaatatgttggaaatcaaaccccaaaaagcagatgttttcactgcttctaagaa

SEQ ID NO: 22873 - DNA, 201 bp, Homo sapiens
acatctgtctgtcttagcagcagcagcagcagcagcagcagcaggaggaggaagacagcaatgatgaggctgcctaccgagcattcatgaggacctcctatgagaagaacccaaagctgttagcatccctggctgctgaataggtctactgtgcctggcaccccaagcagccctccttacagccttgcagccaagcctctt

SEQ ID NO: 22874 - DNA, 201 bp, Homo sapiens
ccacatctgtctgtcttagcagcagcagcagcagcagcagcagcaggaggaggaagacagcaatgatgaggctgcctaccgagcattcatgaggacctccwatgagaagaacccaaagctgttagcatccctggctgctgaataggtctactgtgcctggcaccccaagcagccctccttacagccttgcagccaagcctc

SEQ ID NO: 22875 - DNA, 201 bp, Homo sapiens
tcttgtttccgcctcctgctgtctttgaggaatgctcagccaccatccagctgggccacatctgtctgtcttagcagcagcagcagcagcagcagcagcaggaggaggaagacagcaatgatgaggctgcctaccgagcattcatgaggacctcctatgagaagaacccaaagctgttagcatccctggctgctgaatagg

SEQ ID NO: 22876 - DNA, 201 bp, Homo sapiens
atcttgtttccgcctcctgctgtctttgaggaatgctcagccaccatccagctgggccacatctgtctgtcttagcagcagcagcagcagcagcagcagcaggaggaggaagacagcaatgatgaggctgcctaccgagcattcatgaggacctcctatgagaagaacccaaagctgttagcatccctggctgctgaatag

SEQ ID NO: 22877 - DNA, 201 bp, Homo sapiens
catcttgtttccgcctcctgctgtctttgaggaatgctcagccaccatccagctgggccacatctgtctgtcttagcagcagcagcagcagcagcagcagcaggaggaggaagacagcaatgatgaggctgcctaccgagcattcatgaggacctcctatgagaagaacccaaagctgttagcatccctggctgctgaata

SEQ ID NO: 22878 - DNA, 201 bp, Homo sapiens
tgctgtcattccttccttcattcagtaaatacttaagccaggcacgggagtgagcaaaacagactcagtcctattgcaacttttattctgatttggggatrtagataataacaacttgatatataatataatattatattaagtagtgaaggactatgaagacatattaagcaggataaggggatagagagtgatgaggag

SEQ ID NO: 22879 - DNA, 201 bp, Homo sapiens
tttatgcacattcacactgttgaggagaaacagctgggacttcaagtctgatctttatgactctgaagcctgtgcgaaaaggcttttcactcctataatcyagtgacctgctttaccaacattgcctctaattcttaaaacaagcttagaaaggaatatgttgttagtcccattttatagtaggacactgaggcttggcaa

SEQ ID NO: 22880 - DNA, 201 bp, Homo sapiens
atttaaaccttacaacaacctggagcttagggagtatatccccaaaccgagaggtgaggaggcttgcacaggaccactcagctagacgttcccaggacccraacccagcttgactccaaaatccatgctctcactggctttgtggcatgcctcaataaatacttgagtttcctcaacacaaagatggtcatatatccatag

SEQ ID NO: 22881 - DNA, 201 bp, Homo sapiens
tgttggggaggtgtggggaagcctccagggagttggagagcagttttctagggagctgcagaacttctcggtttttctgcttggaagtaaaacaactgatsgcattagcttagccatgttagaaaccttcattgtgcttcccccccggaatcctctggaggagacccacaaggctgtcttgtggagggcccaccagaggca

SEQ ID NO: 22882 - DNA, 201 bp, Homo sapiens
tctggggcaggaaagtagagacccagggtcccagctagtagaccaagaaatttattcatttatgcgtctagtaggtacccactgtgggaatgtctggaggyaggtactgaagatacagaggcaagttcatagcacacagtcctgccctgcagaagctcacagtatcaataaagagcctgacatacaaataattgcaaaaca

SEQ ID NO: 22883 - DNA, 201 bp, Homo sapiens
catacctcatttaatttaaaccttacaacaacctggagcttagggagtatatccccaaaccgagaggtgaggaggcttgcacaggaccactcagctagacrttcccaggacccaaacccagcttgactccaaaatccatgctctcactggctttgtggcatgcctcaataaatacttgagtttcctcaacacaaagatggt

SEQ ID NO: 22884 - DNA, 201 bp, Homo sapiens
aatgggcagagtcagaagaacccagacaatggggttcccaagtctaagctctcaccactaagccgtatttcccctctgcagggcggcttcctgtggcacayagctctggttctcattcatgaatagttaagcctgtctgcctaccccaaaattacattctgagttttgaagtctttgggctccgcccccttgcccaccacc

SEQ ID NO: 22885 - DNA, 201 bp, Homo sapiens
ccatacaaagacgacccctttgtcccaggaggccagttcaagctcccactgggttcctggaagcagcctgggagctgccgtctctgtggctccccttcctrtttctccagtttcccccggaaggagaagaccgttcagcctttttcctcctctgttctccttctttaccctgaagttaagtgatggtcaacatttacgagc

SEQ ID NO: 22886 - DNA, 201 bp, Homo sapiens
gcagctacctctagggtgccaacattccagttgcaacagtcctgctgcattcaggatttctgagtcagagaatgcaacgccagaaaagtataaatagcatstaccagtggtcacctcctccatgaggtggatagcaagggtgtgtccacatggtacacctgacaatgctaagacatgacttgaatatttatttgcttgcta

SEQ ID NO: 22887 - DNA, 201 bp, Homo sapiens
gtctacacgatcctgagtcactgtgatcccggtccagtccccatcattgttagccgacatccagacccacaggtaacacccactgggttatcctcttcttytcaggctcactcgttcagtaccaaaattggaacaagaaatagatgaaaacagagatgttgctggctgggtttgtacctgaattcccaagaatcccttcca

SEQ ID NO: 22888 - DNA, 201 bp, Homo sapiens
aaatgtaaaagtaatcatttatttttggtttgattctaaaagtagtatattctctctatggaaaatatagaaaatacagaaacatgtgaaaaaatagtatycataatcccatcacccaaacccactcttgctaattcatgagagcaagaccttgtgtttcatgtctgctgtcacatcctcagtacttggaacagtgcctgg

SEQ ID NO: 22889 - DNA, 201 bp, Homo sapiens
agtaagtgcttaataaacatttgttgaatgaatgagtgttactgttttggtatacttatttccagcctttttgccctttttctatgtatattttacatgaytgtagtcagtcatcatcattagataatatctttttttaacttactatgataacacaggtatacctatgtcacaactctttacaaactttttttttttttt

SEQ ID NO: 22890 - DNA, 201 bp, Homo sapiens; identical to SEQ ID NO: 4784

SEQ ID NO: 22891 - DNA, 201 bp, Homo sapiens
tatctttttttaacttactatgataacacaggtatacctatgtcacaactctttacaaactttttttttttttttttttgagacagagtctcgctctgtcrcccaggctgaagtacagtggcaggatcttggttcactgcaacctctgcctcccaggtttatgtgattctcctgcctcagcctcccaagtagctgggacca

SEQ ID NO: 22892 - DNA, 201 bp, Homo sapiens
gagccaccgcgcttggcctagtttttgtatttttagtaaaaacaaggtctcactatgttgtcttggctggcctttaactcctgggcttaagcaatctgccsctcttggcctcccaaagtgctagaattacaggcatgagccactgcacttggccatgtttaggtgtttattattattattgttattaaggaatgttgaatt

SEQ ID NO: 22893 - DNA, 201 bp, Homo sapiens
ggccagggtggtcttgaactccttgaactcctgaactccagtgaaccccccaatttggcctcccaaagtgcagggattacaggtgtgagccaccgcacccrgactctacatttttaaaggtgcttagtattcgatgtattgtgtacacatcatttacttatttacgctcatgcagctagatatttgagataaaatacaaat

SEQ ID NO: 22894 - DNA, 201 bp, Homo sapiens
taaaataaaataataaaataaataaataaatatataaaataattaacccggtatgctggcacatgcctgtagtcccagctgcccaggaggctgaggtgggrggattgcttgagtccgggaatttgaggccacagtgagctgtgatagagccactgcactccagtctgggcagcagagggagacgctatctctaatgaatat

SEQ ID NO: 22895 - DNA, 201 bp, Homo sapiens
tacaggttcgtaccaccacactggcaaaatttttaaaaactttgtagagatggatctcactttgttgcccagactggtcttgaactcctggcctcaagcartcctccaaccttggctcttttccttttatttagcagaaggatccactgtactaccagacatagaagtctcctgtcatgacacctttagttattctcctat

SEQ ID NO: 22896 - DNA, 201 bp, Homo sapiens
ctgaaatgtcctgcggttactcagaaagaccagaatgaggccaggaaattatccatcaggaattcttactctccaaatggaatccacttgtactctgcacrtgggttcaactccctcgtcagggagttaggatgtctgggtcctagtctcagcttaggcactgattctgactatgagcaggttctttccatgctcaccctc

SEQ ID NO: 22897 - DNA, 201 bp, Homo sapiens
tgacttgtaaggtttctgctgagaggtctgctgctgcctaatagggttctttcagtttatgatttaccctactctctaattgcctttaagattttttttttgtttgcattgaccttggtgagtctggtgactatgtgtcttggtgatggttgtcttgtgtagtatctagccagggttctctatatttctcatatttgcata

SEQ ID NO: 22898 - DNA, 201 bp, Homo sapiens
ctaatgaatatctctgtgtgtatgtgtgtatatagatatggagacgggggacctgggaggttgcaggactcgtccaaggtgacttggttagtgaggagccraaccaaggcaatgaccccaggctgtctgacccctgggccttgttcttaaccatgacgccatcctgagtccccaggatgggtgagactttgagtctagagc

SEQ ID NO: 22899 - DNA, 201 bp, Homo sapiens
tactcagaaagaccagaatgaggccaggaaattatccatcaggaattcttactctccaaatggaatccacttgtactctgcacgtgggttcaactccctcrtcagggagttaggatgtctgggtcctagtctcagcttaggcactgattctgactatgagcaggttctttccatgctcaccctcagattccttgtcagttg

SEQ ID NO: 22900 - DNA, 201 bp, Homo sapiens
aacctccagcttctgggctctgcttgtttctcagaaaaactatggtacagcttttatttactttttggcctccaggtattccttacccatttgctattttrttgatacatttacatcccatgcaacctttctacttgtttttgtttttgtgtttctagagacagggtctctctctgttgactgggctgggatgcagtggtg

SEQ ID NO: 22901 - DNA, 201 bp, Homo sapiens
tctggcatgttcctgcgtgtcacttcagagtcaatcatgtcagtggtgacttccttgatttcctgataagttttctatcacataaaaaacacttaaaacckgtaagtctctatttctctcactgagtgcagctgagtattacaaaaagattcctgaccgtgtagtttactttctacttgaagaggaggaaagagagcttgc

SEQ ID NO: 22902 - DNA, 201 bp, Homo sapiens
tgagggaggggattaatttatttccaattcaaacttaaaatgaagatataatcctttggggctccctttttatccaagagaagtatcctgttaaactctcyttcctaggaagggactggtatttctcttctcttcccaatatcccataaggctatgaaagacaaagttcaagttcaaccagttcatcaaattatctcagag

SEQ ID NO: 22903 - DNA, 201 bp, Homo sapiens
aaattgggtcatgtgatgttcttctgttctttttgcttaaaattgccttggctatgtgggttcttttttgattccgtatgaattttagaatagtttttctrattctgtgaagaaggacactggtagtttgataggaatagcattcaatctttaaattgctttgagcagtatggccatttaaacaatattgattcttccagt

SEQ ID NO: 22904 - DNA, 201 bp, Homo sapiens
ccaaattctgcctgagacctggcttatgaggacttgtcctggaggcagcgtgttctgtgatgttaacctgggccctacttccttgataaaccttagtgagmcttttggctgctcatctacatcaggctcagcaaagcaggctcctagaaccaaggaagtccctccccaccataatcctacccacaccccactaaccacatt

SEQ ID NO: 22905 - DNA, 201 bp, Homo sapiens
ctaggatttttatagtttgagatcttatatttacgcctttaatccattttgagttggtttttgtatatggtgaaaggtaaggttctggtttcattcttcakcatatggctagccagtttatccagaaacatttattaaataaggagtcctttccccattgctggtttttgctggcgttgttgaagagcagatggttgtagg

SEQ ID NO: 22906 - DNA, 201 bp, Homo sapiens
ctttcatctcagcagggtgcccccatctcagcctcacaaagtgctgggattagaggtgtgagccacagtgcccagctagaaaaagaaaccagagaaaaagratggatcatatacaatggaaccatgattaggtgacagcagattcatcagtaacgaccaggtccagaagtcagtgtaaacatagtatttatatctgagttg

SEQ ID NO: 22907 - DNA, 201 bp, Homo sapiens
atggagacagggacaaaccagatcattcttatttctgatgtggccaaagtgcaggcaaagacatgtcagggaaatcatgggtacaccgaggagggcagacmgtgtggggaggggcgtcctgggggaggtggctgttgaaagcaggatattccaggaaaccagtctggatggtggtaagaggtgggaatgggcagagggata

SEQ ID NO: 22908 - DNA, 201 bp, Homo sapiens
ttacatatatatgcagtcatgtgttgcatggcaatgaagataagttctgagaaatttcatcgtcgtacaaacgttacatagggtacttaaacagacctggatggtatagcctactacaccccaaggctatatggtattgcctactgcttctagtctacaagcctgtacagcatgttattgtaggcatttgtaacacagtgg

SEQ ID NO: 22909 - DNA, 201 bp, Homo sapiens
tgaagagctgtgggaagccgaagtggccccatcagaagctgtgcacaggcaccttgtttttaatgacacgggtaggtcaaagcacaaacagctgccaactyatgacctttgtcttaaaagtttaaacggcaggagaactgctttggcttttacacatttaacatggtatcttggaggctccttagtgcagtagaaaggaca

SEQ ID NO: 22910 - DNA, 201 bp, Homo sapiens
tgaagtccttgcccatgcctatgtcctgaatggtattgcctaggttttcttccagggtttttatggttttaggtctaacatttaagtctttaatccatctkgaattaatttttgtataaggtgtaaggaagggatccagtttcagctttctacatatggctagccagttttcccagcaccatttattaaatagggaatcct

SEQ ID NO: 22911 - DNA, 201 bp, Homo sapiens
cccagactccctgcatccccaaggaaggggcatctccaacatcatcatccaacgaagactcagctgcaaatggttctgctgaaacatctgccttggacacrgggttctcgctcaagtgagtttctacacccggtgtttctctttacctttctcatctttttctttctcatctttatttttaaaaataatcctatatataat

SEQ ID NO: 22912 - DNA, 201 bp, Homo sapiens; identical to SEQ ID NO: 4817

SEQ ID NO: 22913 - DNA, 201 bp, Homo sapiens
aatgctgtaattagtaaaatgtagagtaatcagtttttacccattctctgctcttcaataacagcttgttgagtattctctctgatttattctagcatcaracacacacacgcgcacacactgtgctgcagcatgttttgttttccaattctatgtagcacaaaaagacttaacctcattcttctccatatctcaacagta

SEQ ID NO: 22914 - DNA, 201 bp, Homo sapiens
tcagcctcacaaagtgctgggattagaggtgtgagccacagtgcccagctagaaaaagaaaccagagaaaaaggatggatcatatacaatggaaccatgaytaggtgacagcagattcatcagtaacgaccaggtccagaagtcagtgtaaacatagtatttatatctgagttgcttggtgtaatgttgaattcagagaaa

SEQ ID NO: 22915 - DNA, 201 bp, Homo sapiens
gccttggacacagggttctcgctcaagtgagtttctacacccggtgtttctctttacctttctcatctttttctttctcatctttatttttaaaaataatyctatatataatttaaaaaattcccagatatattgattaaagaattgttctgcctctttctttccatgtgtgtgcagatgtctgagtgtgtgtgtgtctgt

SEQ ID NO: 22916 - DNA, 201 bp, Homo sapiens
gagccatgctgcggctgctcgctctctaaagccgagtgcattgctgtcatcccagggctgtgttgtctcagggtatcctttgtgtaggctgtgctgggctyatttgaatttccatgcccaactgaaaacaaatcctccagttcacagcatcagccagcattcaacataccacacccccttgcagtggcaatctggcatgtt

SEQ ID NO: 22917 - DNA, 201 bp, Homo sapiens
ttctgagagtgagaaagaacagatcttcggaaaatagagggagaggcgggaactggattcaggtgccgatgacaagagagagcttagacttagtggaggasgggggctgtggggccctcccaggcctcaggatccaagaagggcaaggccagcccccatagccctggggtgctgaattgctcctcagcctctctgccagag

SEQ ID NO: 22918 - DNA, 201 bp, Homo sapiens; identical to SEQ ID NO: 4772

SEQ ID NO: 22919 - DNA, 201 bp, Homo sapiens
ctgggcatgctggcatgcatctgtagtaccagctactcaggaggctgagtgggaggatctctggagcccaggaggtcaaggctgcagtgagccgagatcamaccactgtactccagccagacaacagagcaccaccctgtcctgacctgctctctctctgtcactcgcgcacgcgctctctctctctctctctgtcactcg

SEQ ID NO: 22920 - DNA, 201 bp, Homo sapiens
gtgtggggacgagattgtggaaatcagtgattcccctgtgcactgcctgacgctcaatgaagtctacacgatcctgagtcactgtgatcccggtccagtcyccatcattgttagccgacatccagacccacaggtaacacccactgggttatcctcttcttctcaggctcactcgttcagtaccaaaattggaacaagaaa

SEQ ID NO: 22921 - DNA, 201 bp, Homo sapiens
ctgctgagctatgagtttattctcccagagccacctgtacaattccaggatatgtttgttggctcatgggaatcacctaggacaatggcagatagagcagrtgcaggagggagagcacgtgattggagggatgtccttgagaaggggattgagaaggcctttggtgggagaagggctacattgtaaagctgctactattat

SEQ ID NO: 22922 - DNA, 201 bp, Homo sapiens
agtggagcatccgccataaatcttttcctgatcctcctcttatcctgcacccttagtttccaccatccctgcttgaaacaacaaacaattaagaaacttayatattcccattgaagaatggcaactagctgcaggtaggaggaatttactgtaacaatttgtgtttccacccccagtttagaagaatgtctgaaaaaaggt

SEQ ID NO: 22923 - DNA, 201 bp, Homo sapiens
gtgggaatggcactttgggtatttttctctgtccatgagtagcaacttctgtccacgtcatctggccagtcacccttgagacactgcagacaacaggaaamtaggaggaaggcgcacatgttggctgagcacatgcacaaaagcttctttctccttctgtgtttgagcatttctcttcctttccagatgattaaaagggaa

SEQ ID NO: 22924 - DNA, 201 bp, Homo sapiens
aacataccacacccccttgcagtggcaatctggcatgttcctgcgtgtcacttcagagtcaatcatgtcagtggtgacttccttgatttcctgataagttytctatcacataaaaaacacttaaaacctgtaagtctctatttctctcactgagtgcagctgagtattacaaaaagattcctgaccgtgtagtttactttc

SEQ ID NO: 22925 - DNA, 201 bp, Homo sapiens
tttgaaatagtgggggccatatatggttgtttccttttttatgtggacacagaggacttcgtgccagaggcaagatccctgtaaatattgttgcacaaaawtctcactagctctcttcccataccacccaatgctgatgtcctcaccacatgcggagaacaaatgtgaagggagtaggatattgggtcagtgtccaaagca

SEQ ID NO: 22926 - DNA, 201 bp, Homo sapiens
tctgtccatgagtagcaacttctgtccacgtcatctggccagtcacccttgagacactgcagacaacaggaaactaggaggaaggcgcacatgttggctgrgcacatgcacaaaagcttctttctccttctgtgtttgagcatttctcttcctttccagatgattaaaagggaactaacgtagagcaccatccacggccat

SEQ ID NO: 22927 - DNA, 201 bp, Homo sapiens
caggaaactaggaggaaggcgcacatgttggctgagcacatgcacaaaagcttctttctccttctgtgtttgagcatttctcttcctttccagatgattaraagggaactaacgtagagcaccatccacggccatgctgagcactcactgacctgttgtctaaattcatcctacccacactttggattgataaattggtgg

SEQ ID NO: 22928 - DNA, 201 bp, Homo sapiens; identical to SEQ ID NO: 4762

SEQ ID NO: 22929 - DNA, 201 bp, Homo sapiens; identical to SEQ ID NO: 4763

SEQ ID NO: 22930 - DNA, 201 bp, Homo sapiens
cagagggatatgggctcgcaggggcttgcaggagctcacaggggcttggaagaatttgctgggggtggcagaagaggtgatgagcacagtggagtcaagtytgaggcagggatgaactgggacaacagagaggggcattgtccaattcagaacctgagctctcttgttcttttttttaaggagtacaggtgatccttaaag

SEQ ID NO: 22931 - DNA, 201 bp, Homo sapiens; identical to SEQ ID NO: 4767

SEQ ID NO: 22932 - DNA, 201 bp, Homo sapiens; identical to SEQ ID NO: 4768

SEQ ID NO: 22933 - DNA, 201 bp, Homo sapiens
caacagtcaagggttccaggtgctgggcagcagcaccgtggaggtgctgtccagggtggggagcctcctgggtggacgggtgatgctgtgggggtggcagsaggaatgcaggccattctggataattgggaggatggagcccttggaagaggtccaaagacacacccacccagccatcctgggcagctacctctagggtgc

SEQ ID NO: 22934 - DNA, 201 bp, Homo sapiens
tttcacagaaggtccacagggaagtcacagttaggtctgagccatgtacctcaatgcaggaaattatccttaccctggaagaggttcacagaagcaaccamaaggatggttaaatcctctcacaaaacctggcttcgggggacataacggatgctccacatgggtggctggaagacagtgcagaatctcggtgagttacaa

SEQ ID NO: 22935 - DNA, 201 bp, Homo sapiens
taacataaaatttaccatcttaaccattttttaagtgtacagttcagtggcattaaggacattctcattgttgtgcaaccattgccaccatccgtctccasaactctttccatctttcagaatttaaactctaccagttaaacaagtccctatgttctcctaccagcaaatcctgggaaccaccattttactttctgtctc

SEQ ID NO: 22936 - DNA, 201 bp, Homo sapiens
atgcactaggatccaggtccttgggaacaggaggcctacctggccagcagggatgggctaaagatcagccagtagtagctgcctgggaggctgtgctgaaragaattgaggggttacattccaccaggaaggagtgcttcaggagattggcagtgttttggggacaggagtgggagactcagttattccctctactcaact

SEQ ID NO: 22937 - DNA, 201 bp, Homo sapiens
tttacagtacttgatattccagtccctttacatgatatatttctgcaaagtttgattggagatttttgttgttgttgtttatttttcagcatatccaatcrttacctaccatttctgaataagcggagctctatttctccccttccaatttttatacttttttcccctttattttacaggctaaggcctacagtgcaatgt

SEQ ID NO: 22938 - DNA, 201 bp, Homo sapiens
atgcatttcttcaggactgaaagatttttaataattacgtgaagtataattctaccttattattcctattcccttcttgtggaacactgattagatgttargctttgtcactctatcttacatgtttctttacctctcttttatgttttctttatgttgccatctgagtattttgttagatatatattccaattctttcat

SEQ ID NO: 22939 - DNA, 201 bp, Homo sapiens
agtagctgggattacaggagcctgccactacacccagctaattttaaaaatatttttagtagaaatggggattcaccatgttggctgagctggtttcaaartcctgacctcaagtgatctgcccgccttggcctcccaaagtgcttgggggagtgagccaccacacccagtccatattttgggtttaaaaatgtcttcaca

SEQ ID NO: 22940 - DNA, 201 bp, Homo sapiens
ttatttgtaatatcttcttgtcatcttttaatctttactgtatttgtaattgtgtcccctttcaaccctcattttatttgtgttttctttcttttcttttycttttttttttttttttttttgatcttgagtgaccttgctggagcgtcatcagtattttaaaatcttttcacagaaccagcttataattttgtcaactcc

SEQ ID NO: 22941 - DNA, 201 bp, Homo sapiens
gttaggttctccttccaggatgctgaaagtgcaatggtccctgtgaggggcttctccaggatcttaaggacttttctgaggagcagcattgagaatcttcyctgatggctcttgacttgtcttctgctctgaggtcagcccactgtggctccttgtcactctgatgttggttggttacctggagtgcatcattctgtggtc

SEQ ID NO: 22942 - DNA, 201 bp, Homo sapiens
tacataaaaaataaacactcctaacagagcaatggaattgtcatgatctttggggagaagtttaggctttggaatcaccttgtttgcaggacacaatgccscagaattctccatcttcattctgggtccattccttggttgcatgagaatcttgtttgtttttgtttttttccccatttcttggagttgactgtttagccc

SEQ ID NO: 22943 - DNA, 201 bp, Homo sapiens
gtcatttctgtgttgtccaaagaaggcaggggcaactgggctggaccaaggaacctcactgtggttctgtggctctgcactgggtttgcctcctgggtgtkgccggccagcccagcagatggtggaccttgttctgaggctgagcttctcagcactggcagcccccctttttggatcaagccttttcacgtggagcagtca

SEQ ID NO: 22944 - DNA, 201 bp, Homo sapiens; identical to SEQ ID NO: 4774

SEQ ID NO: 22945 - DNA, 201 bp, Homo sapiens
cttgaacccgggaggcggagactgcagtgagccgagatcatgccactgcactccagcctgggtgacagagggagactccatctcaaaaaaaaaaaaaatatatatatatatatatatatatatataaaatacatattttttattgtgcatttgaattggtaatacattttcatatataggttacgttttgctattaaaaag

SEQ ID NO: 22946 - DNA, 201 bp, Homo sapiens
tgcttgaacccgggaggcggagactgcagtgagccgagatcatgccactgcactccagcctgggtgacagagggagactccatctcaaaaaaaaaaaaaatatatatatatatatatatatatatataaaatacatattttttattgtgcatttgaattggtaatacattttcatatataggttacgttttgctattaaaa

SEQ ID NO: 22947 - DNA, 201 bp, Homo sapiens
gacacacttgccaggaaggggccctgtgctggggaaatgaagaatgcatgacactaggccactgggcaggtcctgtccactcagcacatcccagagcctgsggctgcgtggagagggtagcaggcctggccatgggcatcttttcctgtgggtcccactattctggctcatccaatctgatcagcattggctgctgccttc

SEQ ID NO: 22948 - DNA, 201 bp, Homo sapiens
attgcttgaacccgggaggcggagactgcagtgagccgagatcatgccactgcactccagcctgggtgacagagggagactccatctcaaaaaaaaaaaawatatatatatatatatatatatatatataaaatacatattttttattgtgcatttgaattggtaatacattttcatatataggttacgttttgctattaa

SEQ ID NO: 22949 - DNA, 201 bp, Homo sapiens
ggttctgggggagggggacacacttgccaggaaggggccctgtgctggggaaatgaagaatgcatgacactaggccactgggcaggtcctgtccactcagyacatcccagagcctggggctgcgtggagagggtagcaggcctggccatgggcatcttttcctgtgggtcccactattctggctcatccaatctgatcagc

SEQ ID NO: 22950 - DNA, 201 bp, Homo sapiens
atttgccttaccctagtcctggacacgtcagctcctgcctttatttaaaatgttgatagatattttgttcatcagggattggagtacaaaccagtctgatrtgggggtcacttggatttccctgtgaaaatcatgaatgactgtggctaccatgtaaaaccatccctgattctttggtgttcctcaaattggaggtctcca

SEQ ID NO: 22951 - DNA, 201 bp, Homo sapiens
ttaaaattaattttaaaaaaacatgttggacaaaatatccaagtttaaatcaagacagagtctgactttgtactgcacacttggcctcatttgccttaccstagtcctggacacgtcagctcctgcctttatttaaaatgttgatagatattttgttcatcagggattggagtacaaaccagtctgatatgggggtcactt

SEQ ID NO: 22952 - DNA, 201 bp, Homo sapiens
ttaaatagatcaagaattacttttttacaaaatgataaaaagagcactcaatgaaggcatgaaaatcagaaaactttgggtaaacataaagcgtcgaaatrtgtaaaacaaaaaaattagagatatactccaaatatggtgttagatttcaatgtacaccactgttaagattttttcagattaattagacaaaatgtacat

SEQ ID NO: 22953 - DNA, 201 bp, Homo sapiens
ttaaaggggtgccaaaacactcagtaactcagatcgatactattttaatgcagcgtgttttttaaaattaattttaaaaaaacatgttggacaaaatatcmaagtttaaatcaagacagagtctgactttgtactgcacacttggcctcatttgccttaccctagtcctggacacgtcagctcctgcctttatttaaaatg

SEQ ID NO: 22954 - DNA, 201 bp, Homo sapiens
gttgaattggctaacccacaccctcagtctttaatgggcatagttaaatgtgaaaagaaggaggaaagttacagatgaacttttgttaatgttgacccacygtaaataggaaatgtctgctgctttgtggttgtacggtaagggggtatgggatatgctactttggtctgccctgttctgagttttggtctggtggctagt

SEQ ID NO: 22955 - DNA, 201 bp, Homo sapiens
ctggaataggagtctctgactgtgtcctggctccatgggagtccccgtctaggctaggaagtaccgtagtaatgtgtgtgtgtgtgtgtgtgtgtgtgtgkcacacttgcacactgtgcattggggcaggatgttagctgggcttccttagtgctgctgctgtgacccatggagaagtagaagggaagaaggagcaaccaa

SEQ ID NO: 22956 - DNA, 201 bp, Homo sapiens
accaagtaaaatattttgctatcaagtgctgtggcttctatcaaaggtgagatttttcaagagtccagatggccctaaaccatgggatcagtgctgctaaygcagtgataagccaacatacagacatttctcctatagcctactgccagtctatgcatttaaatagggaagacattccagtacctttgaaaggggtctgtc

SEQ ID NO: 22957 - DNA, 201 bp, Homo sapiens
taccagaaatctagaccaagtaaaatattttgctatcaagtgctgtggcttctatcaaaggtgagatttttcaagagtccagatggccctaaaccatgggrtcagtgctgctaacgcagtgataagccaacatacagacatttctcctatagcctactgccagtctatgcatttaaatagggaagacattccagtaccttt

SEQ ID NO: 22958 - DNA, 201 bp, Homo sapiens
ttgaagagagccttttagcttgtgaaccactttcagtagattgacttcttgcatcttcttttgtcattttataaatgagaaaggtaaggctcaatcaaggytacagaacctgggttttctgtctccaagttcaagttcagtgctgtttccacattccatgtgctgctgtcctggcatgtgtctgttgtgggatgctgtcca

SEQ ID NO: 22959 - DNA, 201 bp, Homo sapiens; identical to SEQ ID NO: 4790

SEQ ID NO: 22960 - DNA, 201 bp, Homo sapiens; identical to SEQ ID NO: 4791

SEQ ID NO: 22961 - DNA, 201 bp, Homo sapiens
gaaaggcatgtcttacatgatggcagacaagagagaataagagccaagtgaaaggggaaaccccttataaaatcgtcagatcttgtgagacttattcactrtcatgagaacagaatgggggaaactgcccctatgactcaattatctcccaccaggtccctcccacaacatgtgggaattatgggagctaaaactcaagat

SEQ ID NO: 22962 - DNA, 201 bp, Homo sapiens; identical to SEQ ID NO: 4821

SEQ ID NO: 22963 - DNA, 201 bp, Homo sapiens
cctgatggaggtgatgatacccagtggccatgggactttgtcagcaaaggcagtgataaacagcatgagaggtcaatactccgggacaccatggggcagaygtcagccttattcacatgcccatgggagaaattccctggggtcgaccagaagtgcgtggtggtgaagctttgccaggtcctcatgaatccagtgtgacaa

SEQ ID NO: 22964 - DNA, 201 bp, Homo sapiens; identical to SEQ ID NO: 4822

SEQ ID NO: 22965 - DNA, 201 bp, Homo sapiens
ccagaatcggactctgaaaaagctgtcatttcatgtctctaaaacagcctttgatttaatgtacaagatgtcaagaagtaaaggacaataaaataaaaacsaaaaaaggagaactatttcaattaagaagcattcctatatcaattcttggaaatcacataaaataaaagctgtcagaatcaatctctgtttaaaaggctg

SEQ ID NO: 22966 - DNA, 201 bp, Homo sapiens
cacaggtggtgtctcaagacattcaaggtgctcagtgagtgcagactatgcaggagaagtgacacagaagcctgatggaggtgatgatacccagtggccaygggactttgtcagcaaaggcagtgataaacagcatgagaggtcaatactccgggacaccatggggcagacgtcagccttattcacatgcccatgggagaa

SEQ ID NO: 22967 - DNA, 201 bp, Homo sapiens
tcagatctaagttctgttgcttgctggttgccttgagtgagtcagttaacccctctggcctcagtggagatgaaaataatatgggtctgttgtgagcattrcacaagttaatgtatgtaaatctctccccacactgccaggcacacaatgagcctcacgtaagcatcaggtactacatttaggaagagagatggtggtaag

SEQ ID NO: 22968 - DNA, 201 bp, Homo sapiens
agaagatgacactctaaagaagtacttctcaaaatacgtcctcaaaaaccctccactggcctccagacagctccttgtaacactgattattagcactcccyttgaatgtcacagctggagagtgacctaacagatcattaagcctggtcactttacagctgtgtgccgtcaagttgaggggtgctagggcaggtaggactc

SEQ ID NO: 22969 - DNA, 201 bp, Homo sapiens
aacgcttaccacagagtgcgtcaaagtgaagaggctccacacatgtgagggggtgatcgctattttgtttggctcatgttgtgacagattcagctttgtcrcttagcaaaatgagctatacaaagtgacaaagaagggattcctctgggtcagagctcagaaagcaccacagtatgctactgctccatcagaatggcaagc

SEQ ID NO: 22970 - DNA, 201 bp, Homo sapiens; identical to SEQ ID NO: 4824

SEQ ID NO: 22971 - DNA, 201 bp, Homo sapiens; identical to SEQ ID NO: 4825

SEQ ID NO: 22972 - DNA, 201 bp, Homo sapiens
tatctatgggtgctttcatgctagaatagcagggctgagtagctgcaagggagactgcatggcctgcagagcctaaaatatttacctggccctgtgctgaraagtgtgctgatcccggtctaaagcactgtaaacaagctagggggagaacagtaggagatgaagtttaagggttcagggaaaggtggcaaattctgcagg

SEQ ID NO: 22973 - DNA, 201 bp, Homo sapiens; identical to SEQ ID NO: 4827

SEQ ID NO: 22974 - DNA, 201 bp, Homo sapiens
gtagcagtagtgagctcattttgaagtgcttgctttaacccctgaatcccaacagcaaccagcattgagaacctaaagtacaaggcaatgtttgttttcaraataggattacaacatacacagtgattcataaatatttgcatcttttaattgtttctaaaaatgaagtggcaagtggcatcgcacaggaatgttatttct

SEQ ID NO: 22975 - DNA, 201 bp, Homo sapiens
agcccattctactttctcatccttctctcttgccatgccttggcctgttctctgtcttgtaaggaatataggttgcactagccccttggtctggttatgtycatttctaaagtctctggcaaaaacactgtcatctttcaggatgcagttcaaatttcacttccttccctacatagttcatgactcctttgtgttaaagac

SEQ ID NO: 22976 - DNA, 201 bp, Homo sapiens; identical to SEQ ID NO: 4828

SEQ ID NO: 22977 - DNA, 201 bp, Homo sapiens
tagtgagctcattttgaagtgcttgctttaacccctgaatcccaacagcaaccagcattgagaacctaaagtacaaggcaatgtttgttttcaaaataggrttacaacatacacagtgattcataaatatttgcatcttttaattgtttctaaaaatgaagtggcaagtggcatcgcacaggaatgttatttctcccgtgg

SEQ ID NO: 22978 - DNA, 201 bp, Homo sapiens
gttttaaaataaatgaagattatttcttagaagtgttacaaacattaatataattttataaggtacaatagtgtggttgcatgaattaacctggttttttkacttcaaatgaaatcttctgagtcttgaaaagaccagaatctgggggaacacttatattactctatttaatatgggattagtatccctttgtcaggttaa

SEQ ID NO: 22979 - DNA, 201 bp, Homo sapiens
aaagaaataaacccccatacagaaaaaaagtcacagatgcaatctccaattctatatgaaggagtttcatgcatttccaaaaatttcatctttaattgacaataattaaaagcctcatataacattctaggaatctaccttttattgctatgggttttcaatgatgtttgaatgcctttttcagagaaagataaatatttc

SEQ ID NO: 22980 - DNA, 201 bp, Homo sapiens
aagaaataaacccccatacagaaaaaaagtcacagatgcaatctccaattctatatgaaggagtttcatgcatttccaaaaatttcatctttaattgacaataattaaaagcctcatataacattctaggaatctaccttttattgctatgggttttcaatgatgtttgaatgcctttttcagagaaagataaatatttct

SEQ ID NO: 22981 - DNA, 201 bp, Homo sapiens
aagtggcaagtggcatcgcacaggaatgttatttctcccgtggagcgaatgagcagtggaattttaactagtttcattccctttcagttctcagatctgaratcttcggtcacatctcctgtacaatgttttcctcatatcacagtctctttaatggctccagtttctgattttttttttcctccttaattacatgtcctt

SEQ ID NO: 22982 - DNA, 201 bp, Homo sapiens
agaaataaacccccatacagaaaaaaagtcacagatgcaatctccaattctatatgaaggagtttcatgcatttccaaaaatttcatctttaattgacaataattaaaagcctcatataacattctaggaatctaccttttattgctatgggttttcaatgatgtttgaatgcctttttcagagaaagataaatatttctt

SEQ ID NO: 22983 - DNA, 201 bp, Homo sapiens
gaaataaacccccatacagaaaaaaagtcacagatgcaatctccaattctatatgaaggagtttcatgcatttccaaaaatttcatctttaattgacaataattaaaagcctcatataacattctaggaatctaccttttattgctatgggttttcaatgatgtttgaatgcctttttcagagaaagataaatatttcttg

SEQ ID NO: 22984 - DNA, 201 bp, Homo sapiens
gaacatcgtgaagtcacagaagaacttcacaagtgttccgatcggaagggagccctttgagtaagtgaaatgaagcgtgaataactgcctaattagtggayatgaaaactggacagtctccaaagtcatcagagatgaccacgcttgccaggcaacttactagactaagggtgagtccatttgtaatcatcccagctggga

SEQ ID NO: 22985 - DNA, 201 bp, Homo sapiens
gctgcaagggagactgcatggcctgcagagcctaaaatatttacctggccctgtgctgagaagtgtgctgatcccggtctaaagcactgtaaacaagctagggggagaacagtaggagatgaagtttaagggttcagggaaaggtggcaaattctgcagggccttgtaacccatggaaaagggctgggattctgttctgca

SEQ ID NO: 22986 - DNA, 201 bp, Homo sapiens
ggttgcatgaattaacctggttttttgacttcaaatgaaatcttctgagtcttgaaaagaccagaatctgggggaacacttatattactctatttaatatrggattagtatccctttgtcaggttaaaaagcaaaagacagatttttactgattgggatatttttatattccaactttaatcaacaaatacttgaaaagtg

SEQ ID NO: 22987 - DNA, 201 bp, Homo sapiens
atagtggtcatacaatacaaaattgtaaaatcttcaaagggccacaaaataaaatgttaccagttgcatttacctgttgcattcagaataactaaatgtattcttaacacatacatgttgctatatctgaaagaggaattctaatttcttaaaaattaacaaattaacactaggtgagaaatctcttcgaggcagtcaccg

SEQ ID NO: 22988 - DNA, 201 bp, Homo sapiens; identical to SEQ ID NO: 4829

SEQ ID NO: 22989 - DNA, 201 bp, Homo sapiens; identical to SEQ ID NO: 4830

SEQ ID NO: 22990 - DNA, 201 bp, Homo sapiens; identical to SEQ ID NO: 4831

SEQ ID NO: 22991 - DNA, 201 bp, Homo sapiens; identical to SEQ ID NO: 4832

SEQ ID NO: 22992 - DNA, 201 bp, Homo sapiens; identical to SEQ ID NO: 4833

SEQ ID NO: 22993 - DNA, 201 bp, Homo sapiens; identical to SEQ ID NO: 4834

SEQ ID NO: 22994 - DNA, 201 bp, Homo sapiens; identical to SEQ ID NO: 4835

SEQ ID NO: 22995 - DNA, 201 bp, Homo sapiens
tgaggctccctgtggagtaaagtgttgcctccatcaaaacttctgggggctctctgaattcatctagaggcctgggagggccaagggaattctcctcttcycaggattgcaaaggtcccttttagaaactgtgtatcctcttggggggtctcactcaccctttctccttgttagagagctcctgctggctccaggccaggc

SEQ ID NO: 22996 - DNA, 201 bp, Homo sapiens
cactgcctagtacatcatgagaaattaatctatggtaagcactacttttcctatcacggcaaagatattggaaggggatctaagcaatgaaaatgacacaygcaaatgctctaaagtgtgaaactgcactgtgagttctgtacaactaaaattctataaagagtttctatgaagaaactatggaaagatgcagcacagaat

SEQ ID NO: 22997 - DNA, 201 bp, Homo sapiens
gtgtgacactgtacgccacttttctcttgtaggttctacccatcacctacagataatggtgagtaaatacaagaacaatgttctgctgaaaggattagaarccatcaatgactatcacttcagcataattaattccttactgatcaatgatttaaaacttaattcaacaaggagagacgaatatgacaaaattcagattgc

SEQ ID NO: 22998 - DNA, 201 bp, Homo sapiens
ctaggtgctttcttagggccaacactctgcattgataaaagaaaaacttcagccaaattaaatttaaatgagtttaattgagcaatgaatgatcgtgaatyggggagccctcagaatcacagcagtttcagagatactccaggggtgccttgtgatcagaacgaatttatagacaaaaaaggtaaagtgaggtacaagaat

SEQ ID NO: 22999 - DNA, 201 bp, Homo sapiens
agctaaacactttagtaaatatatatcgcacaaatatagtatcttcaccccccaatagagaagagtgttaacttcaggttcagaggggaaaatgctttgtycatatttataaaaacctagttttttaattgcaagtcagtacatccccaaacactagtacttagaggaatgatgtgtataactttctagtgtctctttttt

SEQ ID NO: 23000 - DNA, 201 bp, Homo sapiens
atttttagatatactctttataagcttgcattttttgcaatatagtatcctataatgattactattttagtacttgttttattcatttaactatcagatckatcttttcaagtctatgaattaaaatacaaattattatttagtggcaatgtaatgttgaattgcacaaatattggaatttattttaaaaataattctcta

SEQ ID NO: 23001 - DNA, 201 bp, Homo sapiens
tttctcctaaatcttgatgagcttccttacctccagagtctgaattctatgtcagtcatttccgtctgcttaattatcattactgtggggttggggtattygtttggagataaggcgacattctatctttctgaattgccagagttcttatgctgattctttctcatgtgtgagggctggtgttcctttaactgtaatgta

SEQ ID NO: 23002 - DNA, 201 bp, Homo sapiens
cccaggattgcaaaggtcccttttagaaactgtgtatcctcttggggggtctcactcaccctttctccttgttagagagctcctgctggctccaggccagrcctcagtgggctgttgcttggcttcactctcctctgttctccatgtccctttattcccttgatggatctcaacctggtttcttagataatcttcctgtac

SEQ ID NO: 23003 - DNA, 201 bp, Homo sapiens
aaggtcccttttagaaactgtgtatcctcttggggggtctcactcaccctttctccttgttagagagctcctgctggctccaggccaggcctcagtgggcygttgcttggcttcactctcctctgttctccatgtccctttattcccttgatggatctcaacctggtttcttagataatcttcctgtacagtcagtttact

SEQ ID NO: 23004 - DNA, 201 bp, Homo sapiens
ccaacaataattgagagagcatcttaatgagagctgattagggaaaagccaaatgagcaagtcagtacctcaacaagactttcttgtgctgtggcagaacrtttcttctaaaatgtaagaagctacagcctattttgtgcataggccacataaatcatagtaggtggaggaagagtcaggtatcaatatgcagatatccag

SEQ ID NO: 23005 - DNA, 201 bp, Homo sapiens
gagctgattagggaaaagccaaatgagcaagtcagtacctcaacaagactttcttgtgctgtggcagaacatttcttctaaaatgtaagaagctacagccyattttgtgcataggccacataaatcatagtaggtggaggaagagtcaggtatcaatatgcagatatccagaaaaaggttccagcctcctaaaagatggca

SEQ ID NO: 23006 - DNA, 201 bp, Homo sapiens
agatgttgattgtgttcagtgtgacaggacagatcatttgcctcacttctggtgcacagagacaactagcatatttctatacaatacagggtctaaataaktaggttacgtgccaataatttcatctctttgtactctatcccaactggagctcataattttactttggattttgatatatttactttgtataatgaattg

SEQ ID NO: 23007 - DNA, 201 bp, Homo sapiens
aaaacctagttttttaattgcaagtcagtacatccccaaacactagtacttagaggaatgatgtgtataactttctagtgtctctttttttttttttttttaatgaagccatctatgccctgtcttacaataggccaggaaatgtgcaccaatcctttgtttccagaaagacaattgacatataacaaacctactacccag

SEQ ID NO: 23008 - DNA, 201 bp, Homo sapiens
tctaaacactggaacagttacctatttccagacacacttccaccacatccaccctaacccaactcaactatcataatatagggaaaaaaatttttagatcrtcttgatgcaacaattcataatcaatattccaaatgatgtaactggtgattacagtccatcttcatcacacacacccaagagcaacactttgacatcggc

SEQ ID NO: 23009 - DNA, 201 bp, Homo sapiens
ctccagcaggcagtttttcttcattagtttctcatcaagcttcagatttatcaaattgcataataattaatcttgtttgtaaaaagcaatgagctaaacamtttagtaaatatatatcgcacaaatatagtatcttcaccccccaatagagaagagtgttaacttcaggttcagaggggaaaatgctttgtccatatttat

SEQ ID NO: 23010 - DNA, 201 bp, Homo sapiens
acaaagaggagacaatacttcaatgaaagcctacctgtcagagagacaaactacctttttaaaaaaacacagatttaattttttttcaaaaggcaaagttyagaatcaccatatagtcacctcataaacctatatcatatttcatttcactggtttctgtaatttgaatagattatctctggagcatgtccaagaagttag

SEQ ID NO: 23011 - DNA, 201 bp, Homo sapiens
ctggtactgagcctggtctggtagagaggagtgtagcaatttgacttctccccagcaccatgactgcaggctctattgggactatggcagctggtactgggctgctctggggttcaagacctgtgaggctccctgtggagtaaagtgttgcctccatcaaaacttctgggggctctctgaattcatctagaggcctgggag

SEQ ID NO: 23012 - DNA, 201 bp, Homo sapiens
gatcagaacgaatttatagacaaaaaaggtaaagtgaggtacaagaatcggaagtgcggtacagaaagagtgagattggttacagctcggcgtttgccttrttttaacacaatttgaacattccgcagtctacgagtagttgaagtatggctgctgggactagccaacactcagccattgttacaggtgcataccattaag

SEQ ID NO: 23013 - DNA, 201 bp, Homo sapiens
ctcagaatcacagcagtttcagagatactccaggggtgccttgtgatcagaacgaatttatagacaaaaaaggtaaagtgaggtacaagaatcggaagtgmggtacagaaagagtgagattggttacagctcggcgtttgccttattttaacacaatttgaacattccgcagtctacgagtagttgaagtatggctgctgg

SEQ ID NO: 23014 - DNA, 201 bp, Homo sapiens
tgatcaatgatttaaaacttaattcaacaaggagagacgaatatgacaaaattcagattgccgacttgatggaagaaaagttcccaggtgatgctggtttkggcaaactgagaactcttcaaagaaataccaacactgggagaggagaccttgctgaaactcttagaaaagtcaaaaggtaattgggaaaagggaattctc

SEQ ID NO: 23015 - DNA, 201 bp, Homo sapiens
ttaactatcagatcgatcttttcaagtctatgaattaaaatacaaattattatttagtggcaatgtaatgttgaattgcacaaatattggaatttattttmaaaataattctctatttacttccaatatcccaacctcaatgcctgtcctaggaacattcatgcacctgtgccctttgaggctcctattatgtcctttaga

SEQ ID NO: 23016 - DNA, 201 bp, Homo sapiens
tatgtgtactgtaactttcttgtcaacttgaaatttgttgttactagtgttttagaaaagtgttccttgtgttatgttatttggcaatattaatataatcmattaaagttaaatcctagtaaagtccaaacacccacagatgttgattgtgttcagtgtgacaggacagatcatttgcctcacttctggtgcacagagaca

SEQ ID NO: 23017 - DNA, 201 bp, Homo sapiens
ggaaaatgctttgtccatatttataaaaacctagttttttaattgcaagtcagtacatccccaaacactagtacttagaggaatgatgtgtataactttcyagtgtctctttttttttttttttttaatgaagccatctatgccctgtcttacaataggccaggaaatgtgcaccaatcctttgtttccagaaagacaatt

SEQ ID NO: 23018 - DNA, 201 bp, Homo sapiens
cctagttttttaattgcaagtcagtacatccccaaacactagtacttagaggaatgatgtgtataactttctagtgtctctttttttttttttttttaatkaagccatctatgccctgtcttacaataggccaggaaatgtgcaccaatcctttgtttccagaaagacaattgacatataacaaacctactacccagtaat

SEQ ID NO: 23019 - DNA, 201 bp, Homo sapiens
cattagttgattgatattggagaaatagtttcactgatcccctaaaataatggaagtctccacttcatcagcatggttaaaatattaagtgagacaatgcrtatttatgcatataagtttacatatatgtaaaatttatataacatatctcactgcctagtacatcatgagaaattaatctatggtaagcactacttttcc

SEQ ID NO: 23020 - DNA, 201 bp, Homo sapiens
cagacacacttccaccacatccaccctaacccaactcaactatcataatatagggaaaaaaatttttagatcgtcttgatgcaacaattcataatcaataytccaaatgatgtaactggtgattacagtccatcttcatcacacacacccaagagcaacactttgacatcggccactcactcacataggcatagccagtct

SEQ ID NO: 23021 - DNA, 201 bp, Homo sapiens
caatgaaagcctacctgtcagagagacaaactacctttttaaaaaaacacagatttaattttttttcaaaaggcaaagttcagaatcaccatatagtcacytcataaacctatatcatatttcatttcactggtttctgtaatttgaatagattatctctggagcatgtccaagaagttagacttgtgaaaatatgacagt

SEQ ID NO: 23022 - DNA, 201 bp, Homo sapiens
tttccaagctggcaaatctgccaggctaggagcagcagggatgggttgagttgcccaatctgccatccaggtgcttttcaggggaacatggagatgtatascctagcagaggtcaggtaggggtagagctggaagctggtactgagcctggtctggtagagaggagtgtagcaatttgacttctccccagcaccatgactg

SEQ ID NO: 23023 - DNA, 201 bp, Homo sapiens
ttttctatttttagtagagatggggtttctccacattggtcaggctggtcttgaactcctgacctgaggtgatctgcccacctcagcctcccagagtgccrggattacaggtgtgagccaccacacccggtcgaatgtgggtgttttaagagtgtgggctcccccaactgcttgaatgctttccaagctggcaaatctgcc

SEQ ID NO: 23024 - DNA, 201 bp, Homo sapiens
ttcaagcaattctgcctcagcctcctgagtagctgattacaggcatgcgccaccatgcccagctaattttctatttttagtagagatggggtttctccacrttggtcaggctggtcttgaactcctgacctgaggtgatctgcccacctcagcctcccagagtgccaggattacaggtgtgagccaccacacccggtcgaa

SEQ ID NO: 23025 - DNA, 201 bp, Homo sapiens
attccagcaaaaggaaaaacctcatcaaagaagaggaagcagagaaaagtaggtccaactacacctttagcaaccacagacaagaagttcacagctgaagraggagaggagactcctatagctcaggtaagcttgagtaagaggagcaggcttcaattcccacagaagaaactgccatggctcttccactctgtctctcca

SEQ ID NO: 23026 - DNA, 201 bp, Homo sapiens
caatggcgtgatctcagctccccgcaacctgtgcctcccgggttcaagcaattctgcctcagcctcctgagtagctgattacaggcatgcgccaccatgcscagctaattttctatttttagtagagatggggtttctccacattggtcaggctggtcttgaactcctgacctgaggtgatctgcccacctcagcctccca

SEQ ID NO: 23027 - DNA, 201 bp, Homo sapiens
ggatttttttttttccagatggagttttcgctcttgttgcccaggctagaatccaatggcgtgatctcagctccccgcaacctgtgcctcccgggttcaakcaattctgcctcagcctcctgagtagctgattacaggcatgcgccaccatgcccagctaattttctatttttagtagagatggggtttctccacattggt

SEQ ID NO: 23028 - DNA, 201 bp, Homo sapiens
tggcaccatgctctcattttccttactcgggtgttctgggccacagggctccctcaggcaggggacatggctgacaagctgtactctttccagactagccytgcagaaagagcaacattctgctcctccaccagcccagatgtctcatccttctcagtgttctgagagtgtggatttttttttttccagatggagttttcg

SEQ ID NO: 23029 - DNA, 201 bp, Homo sapiens
cataccattaagttaggttttcaattttgtctcacaaggttagggttcatccacaaggactcaaatatagaagtatggagtatggagttcttctaaggccrtgtttagtttgctttaacagtacagaatctttatttgtggctgaaatttttgccttaggtttcacaggcactgtatactggcaaaatatttttggtgttg

SEQ ID NO: 23030 - DNA, 201 bp, Homo sapiens
taggtggagccatagaaaagttggatatatatttgggggtgactacaagtaaaggatgctacaaatgaggatgaaactatgtacacagagaggtcaaagawaaagtggaaatatgtataatatgcatcaaaaataagtttaacaaggaagagggtcaacacagctcatgtcagactcaaataaacaaggaagtcttggaat

SEQ ID NO: 23031 - DNA, 201 bp, Homo sapiens
agaaactatcatcagagtgaacaggcaacctacagaatgggagaaaatctttgcaatctacccatcagacaaacaatcccatcaaaaagtgggcaaaggayatgaacagacacttctcaaaggaagacatttatgccaccaacagacatatgaaacaatgctcatcatcactggtcatcagagaaattcaaatcaaaaccg

SEQ ID NO: 23032 - DNA, 201 bp, Homo sapiens
tgctgaaactcttagaaaagtcaaaaggtaattgggaaaagggaattctcccctccctgccactgtccctaaacccttcccaaccttgaatagaacctcakcttcattatggttaatatatccatttcccaatttatgcctcagcggtcatgatattgttggtactttgcatgtcaacaagttgacagcatagagcattcc

SEQ ID NO: 23033 - DNA, 201 bp, Homo sapiens
aagatatgctatataattctgggtcttaaatatgcaaaataaaaaaaaaacgaggtaaaacagagaaattattgagggctttccatgccagagtgaggagyaatgcacttttcccaaagaaaatggagaagtattcaatgatttcaagtagggtagaaatatgaattatagagagagctggctcaatgaaaacaactgatt

SEQ ID NO: 23034 - DNA, 201 bp, Homo sapiens
ttgacatcggccactcactcacataggcatagccagtctttccaattgtctgtataaatgtgtgacactgtacgccacttttctcttgtaggttctacccrtcacctacagataatggtgagtaaatacaagaacaatgttctgctgaaaggattagaagccatcaatgactatcacttcagcataattaattccttactg

SEQ ID NO: 23035 - DNA, 201 bp, Homo sapiens; identical to SEQ ID NO: 9124

SEQ ID NO: 23036 - DNA, 201 bp, Homo sapiens; identical to SEQ ID NO: 9125

SEQ ID NO: 23037 - DNA, 201 bp, Homo sapiens; identical to SEQ ID NO: 9127

SEQ ID NO: 23038 - DNA, 201 bp, Homo sapiens
tagacactgttaatcacctcactcttcttgaatcactcccctcccttcacatccttcacatgcatgcttgtttagttttttttgttttttttttttttgtwttttttcccaaaattcctagtccttcctcctttcacatgcttgtttaggtttttgtttttgtttttgttttcaatactcctagcctgccttcctgccttc

SEQ ID NO: 23039 - DNA, 201 bp, Homo sapiens; identical to SEQ ID NO: 9128

SEQ ID NO: 23040 - DNA, 201 bp, Homo sapiens; identical to SEQ ID NO: 9129

SEQ ID NO: 23041 - DNA, 201 bp, Homo sapiens; identical to SEQ ID NO: 9130

SEQ ID NO: 23042 - DNA, 201 bp, Homo sapiens; identical to SEQ ID NO: 9131

SEQ ID NO: 23043 - DNA, 201 bp, Homo sapiens
ctagaacttatcttagcaattttccaagtttctaggcagcctgaccaagtaggaagaataatttggtcaattccatgaagaggttccctcttttgaaatgyatgattctaatccgcagctctttcatcaaagcaaaggcagtgaataacacagcccaaactgattttgttggtaaacaccacccaactgttttcttattag

SEQ ID NO: 23044 - DNA, 201 bp, Homo sapiens; identical to SEQ ID NO: 9132

SEQ ID NO: 23045 - DNA, 201 bp, Homo sapiens; identical to SEQ ID NO: 9133

SEQ ID NO: 23046 - DNA, 201 bp, Homo sapiens; identical to SEQ ID NO: 9134

SEQ ID NO: 23047 - DNA, 201 bp, Homo sapiens; identical to SEQ ID NO: 9135

SEQ ID NO: 23048 - DNA, 201 bp, Homo sapiens; identical to SEQ ID NO: 9136

SEQ ID NO: 23049 - DNA, 201 bp, Homo sapiens; identical to SEQ ID NO: 9137

SEQ ID NO: 23050 - DNA, 201 bp, Homo sapiens; identical to SEQ ID NO: 9138

SEQ ID NO: 23051 - DNA, 201 bp, Homo sapiens; identical to SEQ ID NO: 9139

SEQ ID NO: 23052 - DNA, 201 bp, Homo sapiens; identical to SEQ ID NO: 9140

SEQ ID NO: 23053 - DNA, 201 bp, Homo sapiens; identical to SEQ ID NO: 9141

SEQ ID NO: 23054 - DNA, 201 bp, Homo sapiens; identical to SEQ ID NO: 9142

SEQ ID NO: 23055 - DNA, 201 bp, Homo sapiens; identical to SEQ ID NO: 9143

SEQ ID NO: 23056 - DNA, 201 bp, Homo sapiens; identical to SEQ ID NO: 9144

SEQ ID NO: 23057 - DNA, 201 bp, Homo sapiens; identical to SEQ ID NO: 9145

SEQ ID NO: 23058 - DNA, 201 bp, Homo sapiens; identical to SEQ ID NO: 9146

SEQ ID NO: 23059 - DNA, 201 bp, Homo sapiens; identical to SEQ ID NO: 9147

SEQ ID NO: 23060 - DNA, 201 bp, Homo sapiens; identical to SEQ ID NO: 9148

SEQ ID NO: 23061 - DNA, 201 bp, Homo sapiens; identical to SEQ ID NO: 9149

SEQ ID NO: 23062 - DNA, 201 bp, Homo sapiens; identical to SEQ ID NO: 9150

SEQ ID NO: 23063 - DNA, 201 bp, Homo sapiens; identical to SEQ ID NO: 9151

SEQ ID NO: 23064 - DNA, 201 bp, Homo sapiens; identical to SEQ ID NO: 9152

SEQ ID NO: 23065 - DNA, 201 bp, Homo sapiens; identical to SEQ ID NO: 9153

SEQ ID NO: 23066 - DNA, 201 bp, Homo sapiens; identical to SEQ ID NO: 9154

SEQ ID NO: 23067 - DNA, 201 bp, Homo sapiens; identical to SEQ ID NO: 9155

SEQ ID NO: 23068 - DNA, 201 bp, Homo sapiens; identical to SEQ ID NO: 9156

SEQ ID NO: 23069 - DNA, 201 bp, Homo sapiens; identical to SEQ ID NO: 9157

SEQ ID NO: 23070 - DNA, 201 bp, Homo sapiens; identical to SEQ ID NO: 9158

SEQ ID NO: 23071 - DNA, 201 bp, Homo sapiens; identical to SEQ ID NO: 1018

SEQ ID NO: 23072 - DNA, 201 bp, Homo sapiens; identical to SEQ ID NO: 9161

SEQ ID NO: 23073 - DNA, 201 bp, Homo sapiens; identical to SEQ ID NO: 9162

SEQ ID NO: 23074 - DNA, 201 bp, Homo sapiens
atcctactctcttctgcttggtgaattcatctgcacagtctaagctcaaatgtcattagattcaaaccttttgccgatctcctgtcctcctgtttgtgtcygctctgtgccctgcatgtatttgtgtgccatcataactataagacggacggaacttaggtgattatatgtctatttccttatcctggaaggtgagctcct

SEQ ID NO: 23075 - DNA, 201 bp, Homo sapiens
gatgggggcacctgattgatgttgacacgccaatgttgggctatcatcggaggaggtctgtattaattttaacaatgaaaatagacgggttacagttaccytaaatagcatcaagtcaccccacttcataaagcccttcaatggctttcctttccttttggaaggaagtagtgcatttttcacatggtccactgggtctta

SEQ ID NO: 23076 - DNA, 201 bp, Homo sapiens
tgctattcattctttcccccaactctcttcttttgtttgtttgttttttgtttgagatgcagtctcactctgtcgcccaggctggagtgcagtggcactaycttggctcactgcaacctccgcctcccaggttcaagcgattctcctgcctcagcctccctagtaactgggattacaggtgcacgccaccatgcccggcta

SEQ ID NO: 23077 - DNA, 201 bp, Homo sapiens; identical to SEQ ID NO: 9163

SEQ ID NO: 23078 - DNA, 201 bp, Homo sapiens
tgttacatgagtgacagacacacttctgtagtgtgaagctcttgagatttgggggcccctcattacaacacttatgctattcattctttcccccaactctsttcttttgtttgtttgttttttgtttgagatgcagtctcactctgtcgcccaggctggagtgcagtggcactatcttggctcactgcaacctccgcctcc

SEQ ID NO: 23079 - DNA, 201 bp, Homo sapiens
ttgcaattaggggtggtcatgtttccaaagagtgtgtacaccacctccaggcctggcctgtaaaattcttcctcatatcatcttctctgttttccacttgycagctggttgtggatgatccagcagaggcatctgaggttccagtggacgacagggttacaagatggaaaaagcctgaattcctgagtcactgcatggaag

SEQ ID NO: 23080 - DNA, 201 bp, Homo sapiens
agttctccaagaaatcctgtctctgactcccccatccaggcttggaaccctggaggcttcctcgtagggctgcgtagagcaggtggggagggcaactccasagccctagtcacctgtgagctgcgtagacaagagaattttccagcaagtagaagtcaagtgtcctggggaaggtctgatttgcagagtcagggtttagtt

SEQ ID NO: 23081 - DNA, 201 bp, Homo sapiens
atgagctttgatctacaaatgcaggtcttgcttcaacttaaaaatattttcttttctaatatctttaaatagctcttctgttctttttttctctctccttyaaaactagatttctatcacctgtctttctatgtctagaccttgtttctgatagttttgatctctttgtcctttttttttcttttttgtgaggcaggttct

SEQ ID NO: 23082 - DNA, 201 bp, Homo sapiens
atcttctccactcagtccaccaactcacatgccagtctcttctgaaaacaccctcacagacacacccagaaagaatgcttcaccagctatctaggcatccsttgagccaatcaaggtgacacctaaaattaaccatcatagtgataatttaaggcattaaggacatcatttcatgtcctgcagctctttaagcccaggctt

SEQ ID NO: 23083 - DNA, 201 bp, Homo sapiens; identical to SEQ ID NO: 9164

SEQ ID NO: 23084 - DNA, 201 bp, Homo sapiens; identical to SEQ ID NO: 9165

SEQ ID NO: 23085 - DNA, 201 bp, Homo sapiens
ggaactcatctcctcccaaacctccttctggtaaacaataaccacctcctagtccttcagctccagccattgcaggtcaactgccaggacccattgtttckttgttgttgttgttgttgttttttgtgtgatagcttttcacattcttccattcctcttcctttctactgccagtacctgattgagcctatccctacctcc

SEQ ID NO: 23086 - DNA, 201 bp, Homo sapiens; identical to SEQ ID NO: 9166

SEQ ID NO: 23087 - DNA, 201 bp, Homo sapiens; identical to SEQ ID NO: 9167

SEQ ID NO: 23088 - DNA, 201 bp, Homo sapiens; identical to SEQ ID NO: 9168

SEQ ID NO: 23089 - DNA, 201 bp, Homo sapiens; identical to SEQ ID NO: 9169

SEQ ID NO: 23090 - DNA, 201 bp, Homo sapiens; identical to SEQ ID NO: 9170

SEQ ID NO: 23091 - DNA, 201 bp, Homo sapiens; identical to SEQ ID NO: 9171

SEQ ID NO: 23092 - DNA, 201 bp, Homo sapiens; identical to SEQ ID NO: 9172

SEQ ID NO: 23093 - DNA, 201 bp, Homo sapiens; identical to SEQ ID NO: 9173

SEQ ID NO: 23094 - DNA, 201 bp, Homo sapiens; identical to SEQ ID NO: 9174

SEQ ID NO: 23095 - DNA, 201 bp, Homo sapiens; identical to SEQ ID NO: 9175

SEQ ID NO: 23096 - DNA, 201 bp, Homo sapiens; identical to SEQ ID NO: 9176

SEQ ID NO: 23097 - DNA, 201 bp, Homo sapiens; identical to SEQ ID NO: 9177

SEQ ID NO: 23098 - DNA, 201 bp, Homo sapiens; identical to SEQ ID NO: 9178

SEQ ID NO: 23099 - DNA, 201 bp, Homo sapiens
cttcagacctcaggtgtcccccagaggtgccatctttgaatctaatgtgtagattcttattcagttggtctgggtagggtgtgggctttagaattttaaargatctccctggtgcttctaatgcacaggtagggttgagaagcacactgttctcaaagagtggtcccagaccagcagcatcagcatcacctgggaaattgg

SEQ ID NO: 23100 - DNA, 201 bp, Homo sapiens; identical to SEQ ID NO: 9179

SEQ ID NO: 23101 - DNA, 201 bp, Homo sapiens; identical to SEQ ID NO: 9180

SEQ ID NO: 23102 - DNA, 201 bp, Homo sapiens; identical to SEQ ID NO: 9181

SEQ ID NO: 23103 - DNA, 201 bp, Homo sapiens; identical to SEQ ID NO: 9182

SEQ ID NO: 23104 - DNA, 201 bp, Homo sapiens; identical to SEQ ID NO: 9183

SEQ ID NO: 23105 - DNA, 201 bp, Homo sapiens; identical to SEQ ID NO: 9185

SEQ ID NO: 23106 - DNA, 201 bp, Homo sapiens; identical to SEQ ID NO: 9184

SEQ ID NO: 23107 - DNA, 201 bp, Homo sapiens; identical to SEQ ID NO: 9186

SEQ ID NO: 23108 - DNA, 201 bp, Homo sapiens; identical to SEQ ID NO: 9187

SEQ ID NO: 23109 - DNA, 201 bp, Homo sapiens
tcctgggccaggcccaggcccccactgtgtgcagcctaggaacttggtgctgtgagtcccagccactccagctgtggctaaaaggggccaaggtaccactwggacttgtggcttcagagggtgcaagtcccaaatcttagcagcttttacatggtttgagcctgcaggtgcaaaaaagtcaagaattgaggttggggaacc

SEQ ID NO: 23110 - DNA, 201 bp, Homo sapiens; identical to SEQ ID NO: 9188

SEQ ID NO: 23111 - DNA, 201 bp, Homo sapiens
tggaaaattttcagcctgatgatgcaatagaaaagaaaaacccattttctggagagaaattcaagcctgctgcagaaatttgcataagtaaggagcccaaygttagtcaccaagacaatggggaaaatgtctccagggtatgtcagagacctttgcagcagcccctcccctcacaggcccagaggtctagggggaaaaaat

SEQ ID NO: 23112 - DNA, 201 bp, Homo sapiens
tagtttaaatattgttttaagtgttgttcaaatgtatttccattttctacagtaacattttttctttaaaatattcaattttaacacttcttgagtgctaygtgtatccattttctcgttacagaatagttgcataggttacacgtgatatagtttggctgcatccctaaccaaatctcatcttgaactgtagctcccata

SEQ ID NO: 23113 - DNA, 201 bp, Homo sapiens; identical to SEQ ID NO: 9189

SEQ ID NO: 23114 - DNA, 201 bp, Homo sapiens
agcctcccgagaagctgacaccacaggtgcacgccatcaagcccagctaattttttttttttttgagacagtctcactttgttgcccaggctggagtgtartggcacaatctcggctcactgcaaactctgcttcccgggttcaagcaattctcctgcctcagcctcccccaagtagctgggactataggcgcacgctgcc

SEQ ID NO: 23115 - DNA, 201 bp, Homo sapiens; identical to SEQ ID NO: 9190

SEQ ID NO: 23116 - DNA, 201 bp, Homo sapiens; identical to SEQ ID NO: 9191

SEQ ID NO: 23117 - DNA, 201 bp, Homo sapiens; identical to SEQ ID NO: 9192

SEQ ID NO: 23118 - DNA, 201 bp, Homo sapiens; identical to SEQ ID NO: 9193

SEQ ID NO: 23119 - DNA, 201 bp, Homo sapiens; identical to SEQ ID NO: 9194

SEQ ID NO: 23120 - DNA, 201 bp, Homo sapiens; identical to SEQ ID NO: 9195

SEQ ID NO: 23121 - DNA, 201 bp, Homo sapiens; identical to SEQ ID NO: 9196

SEQ ID NO: 23122 - DNA, 201 bp, Homo sapiens
gcctcccaggttcaagcgattcttctgcctcagcctcccaagtaggtgggactacagatgcacgccactgtgtctggctaatttttgtatttttagtagaratggggttttaccacattggccaggttggtctcaaactcctgacctcagatgatccacccaccttggcctcccaaagtgctgggattacaggtgtgagcc

SEQ ID NO: 23123 - DNA, 201 bp, Homo sapiens; identical to SEQ ID NO: 9197

SEQ ID NO: 23124 - DNA, 201 bp, Homo sapiens; identical to SEQ ID NO: 9198

SEQ ID NO: 23125 - DNA, 201 bp, Homo sapiens; identical to SEQ ID NO: 9199

SEQ ID NO: 23126 - DNA, 201 bp, Homo sapiens; identical to SEQ ID NO: 9200

SEQ ID NO: 23127 - DNA, 201 bp, Homo sapiens; identical to SEQ ID NO: 9201

SEQ ID NO: 23128 - DNA, 201 bp, Homo sapiens
gccttaccagtcatgggcctgagacaatgagaggggtctgggagctgtcccatttggctagagatagtgtgcattgtattttatttatttaataagcacaytagcagtcagtgttctaaggagtttaatcaatcatttaaaaaaatcacttttttttttttttaacagtacatggaactctaggttgccaaaataccattt

SEQ ID NO: 23129 - DNA, 201 bp, Homo sapiens; identical to SEQ ID NO: 9202

SEQ ID NO: 23130 - DNA, 201 bp, Homo sapiens
gccagacgtggcggtgggcacctgtaatcccagctacttgggaggctgagataggataatcgcttgaacccaggaggcagaggttgcagtgagccgagttytagtgccattgcactctagcctaggcaacaagagctaaattccatctcaaaaaaaaaaaaaaaaaaaaaaaggcagaaaggcatcaattggatttagcaa

SEQ ID NO: 23131 - DNA, 201 bp, Homo sapiens; identical to SEQ ID NO: 9204

SEQ ID NO: 23132 - DNA, 201 bp, Homo sapiens; identical to SEQ ID NO: 9205

SEQ ID NO: 23133 - DNA, 201 bp, Homo sapiens; identical to SEQ ID NO: 9206

SEQ ID NO: 23134 - DNA, 201 bp, Homo sapiens; identical to SEQ ID NO: 9207

SEQ ID NO: 23135 - DNA, 201 bp, Homo sapiens
ggagtgcagtggctcgatctcagctcactgcaacctctgcctctgggttcaagcaattctcctgcttcagcctcccgagtagctgggactacaggtgtgcrccaccatgcttagcaaatttttgctttttttttttttttttttgagatggagtctcgctctttcacccaggccagactgcagtggcgctctcttggctca

SEQ ID NO: 23136 - DNA, 201 bp, Homo sapiens; identical to SEQ ID NO: 9208

SEQ ID NO: 23137 - DNA, 201 bp, Homo sapiens
tgggttcaagcaattctcctgcttcagcctcccgagtagctgggactacaggtgtgcaccaccatgcttagcaaatttttgctttttttttttttttttttgagatggagtctcgctctttcacccaggccagactgcagtggcgctctcttggctcactgcaagctccgcctcctgggttcacaccattctcctgcctca

SEQ ID NO: 23138 - DNA, 201 bp, Homo sapiens
ggtgacctcacacactctaaagctttcaccgccatccacactggtgtgtggtccctggcctcagcccagatgtctcccaaacttcctttgaacagtgattrtctgccgaatgcttctacctagggggttcacaaactggacagcacacactcccatatggaacactgcactggtcaccttttctcattgaatgtgccttcc

SEQ ID NO: 23139 - DNA, 201 bp, Homo sapiens
gcaatctcggctcactgcaacctccgcctcccgggttcaagtgattctcctgcctcagcctcccaagtagctgggactacaggtgcccaccatcatgccckgctaattttttgtatttttagtagagacagggtttcaccatgttggccaggatggtctcgatctcttgacttcgtgatccacccacctcagcctcccaaa

SEQ ID NO: 23140 - DNA, 201 bp, Homo sapiens
gagacaggaccaataggagataggtagatagatagatagatagatagatagaaccaataggagatagatgatagatagatagatagatagatagatagatdatagatagatagatagatagatagatagatagatagaaccaataggaaatagataggtagatagatagacacaaccaataggagattagatagatagata

SEQ ID NO: 23141 - DNA, 201 bp, Homo sapiens; identical to SEQ ID NO: 9209

SEQ ID NO: 23142 - DNA, 201 bp, Homo sapiens
gggaggggctgccgcgcagcgcggggggactgggcgcagggcgggccccgggtagtgggtgagagggccggcctggacccggcgggcgcacggctccgagyccagcgcagccgagccggtctgcagaggggcccccagaactttgtgtgtgtgtgtgcacgcgcgcgcgtgtgtgcccaggtgcgagggtgcgcgcgtgtg

SEQ ID NO: 23143 - DNA, 201 bp, Homo sapiens; identical to SEQ ID NO: 9210

SEQ ID NO: 23144 - DNA, 201 bp, Homo sapiens; identical to SEQ ID NO: 9211

SEQ ID NO: 23145 - DNA, 201 bp, Homo sapiens; identical to SEQ ID NO: 9212

SEQ ID NO: 23146 - DNA, 201 bp, Homo sapiens; identical to SEQ ID NO: 9213

SEQ ID NO: 23147 - DNA, 201 bp, Homo sapiens; identical to SEQ ID NO: 9214

SEQ ID NO: 23148 - DNA, 201 bp, Homo sapiens; identical to SEQ ID NO: 9215

SEQ ID NO: 23149 - DNA, 201 bp, Homo sapiens; identical to SEQ ID NO: 9216

SEQ ID NO: 23150 - DNA, 201 bp, Homo sapiens; identical to SEQ ID NO: 9217

SEQ ID NO: 23151 - DNA, 201 bp, Homo sapiens; identical to SEQ ID NO: 9218

SEQ ID NO: 23152 - DNA, 201 bp, Homo sapiens; identical to SEQ ID NO: 9219

SEQ ID NO: 23153 - DNA, 201 bp, Homo sapiens; identical to SEQ ID NO: 9220

SEQ ID NO: 23154 - DNA, 201 bp, Homo sapiens; identical to SEQ ID NO: 9221

SEQ ID NO: 23155 - DNA, 201 bp, Homo sapiens; identical to SEQ ID NO: 9222

SEQ ID NO: 23156 - DNA, 201 bp, Homo sapiens; identical to SEQ ID NO: 9223

SEQ ID NO: 23157 - DNA, 201 bp, Homo sapiens; identical to SEQ ID NO: 9224

SEQ ID NO: 23158 - DNA, 201 bp, Homo sapiens; identical to SEQ ID NO: 9225

SEQ ID NO: 23159 - DNA, 201 bp, Homo sapiens; identical to SEQ ID NO: 9226

SEQ ID NO: 23160 - DNA, 201 bp, Homo sapiens; identical to SEQ ID NO: 9227

SEQ ID NO: 23161 - DNA, 201 bp, Homo sapiens; identical to SEQ ID NO: 9228

SEQ ID NO: 23162 - DNA, 201 bp, Homo sapiens; identical to SEQ ID NO: 9229

SEQ ID NO: 23163 - DNA, 201 bp, Homo sapiens
cctttgcccaagcggtcactttcccacccactttcccagaggggtaccttctccatcttctctctttaagcagattctacctgtgcctggctcacctcctmcacaaaacagcccgagatagcgtgggagtaagtcagacctaggttcaaatcctagctcttccacttaactatgtgatcttggtcaaaatgcttaacctct

SEQ ID NO: 23164 - DNA, 201 bp, Homo sapiens; identical to SEQ ID NO: 9230

SEQ ID NO: 23165 - DNA, 201 bp, Homo sapiens; identical to SEQ ID NO: 9231

SEQ ID NO: 23166 - DNA, 201 bp, Homo sapiens; identical to SEQ ID NO: 9232

SEQ ID NO: 23167 - DNA, 201 bp, Homo sapiens; identical to SEQ ID NO: 9233

SEQ ID NO: 23168 - DNA, 201 bp, Homo sapiens; identical to SEQ ID NO: 9234

SEQ ID NO: 23169 - DNA, 201 bp, Homo sapiens; identical to SEQ ID NO: 9235

SEQ ID NO: 23170 - DNA, 201 bp, Homo sapiens; identical to SEQ ID NO: 9237

SEQ ID NO: 23171 - DNA, 201 bp, Homo sapiens; identical to SEQ ID NO: 9236

SEQ ID NO: 23172 - DNA, 201 bp, Homo sapiens; identical to SEQ ID NO: 9238

SEQ ID NO: 23173 - DNA, 201 bp, Homo sapiens; identical to SEQ ID NO: 9239

SEQ ID NO: 23174 - DNA, 201 bp, Homo sapiens; identical to SEQ ID NO: 9240

SEQ ID NO: 23175 - DNA, 201 bp, Homo sapiens; identical to SEQ ID NO: 9241

SEQ ID NO: 23176 - DNA, 201 bp, Homo sapiens; identical to SEQ ID NO: 9242

SEQ ID NO: 23177 - DNA, 201 bp, Homo sapiens; identical to SEQ ID NO: 9243

SEQ ID NO: 23178 - DNA, 201 bp, Homo sapiens
aaaatatagttctctggagttccaatgagagagttccaaggcctcactgaattagggccttggggaaatatgacacagattctagagctgagcaacaagasaaagcatgtctaatgagaaagtgagctccccagaattggaggatttcaagcagagaccaggtacctaggtgccaggggtgctatgaaggtagaagactgg

SEQ ID NO: 23179 - DNA, 201 bp, Homo sapiens; identical to SEQ ID NO: 9244

SEQ ID NO: 23180 - DNA, 201 bp, Homo sapiens; identical to SEQ ID NO: 9245

SEQ ID NO: 23181 - DNA, 201 bp, Homo sapiens; identical to SEQ ID NO: 9246

SEQ ID NO: 23182 - DNA, 201 bp, Homo sapiens; identical to SEQ ID NO: 9247

SEQ ID NO: 23183 - DNA, 201 bp, Homo sapiens; identical to SEQ ID NO: 9249

SEQ ID NO: 23184 - DNA, 201 bp, Homo sapiens; identical to SEQ ID NO: 9248

SEQ ID NO: 23185 - DNA, 201 bp, Homo sapiens
tccaagttggtagaatgaaagaagggctggaaataagggctataagattttgagtttaagtgcccaccttataaatcattagcaaaagcagaatataaccytttctccaattctgtatgggtgacacccaccagtctggtaaatggaggtcgttagtgtgatggggtgtcattctcactttgtttagcacccccactagat

SEQ ID NO: 23186 - DNA, 201 bp, Homo sapiens
gcaaacatgagttagttagacactgttaatcacctcactcttcttgaatcactcccctcccttcacatccttcacatgcatgcttgtttagttttttttgttttttttttttttgtattttttcccaaaattcctagtccttcctcctttcacatgcttgtttaggtttttgtttttgtttttgttttcaatactcctagc

SEQ ID NO: 23187 - DNA, 201 bp, Homo sapiens
acagaaaaggaagcccatagctacccctgctggcttttggtgtccatttgcatgaagtgtctttttccacccctttactttaagtttacatgagtccttawgtgtcaggtgagtctcctgaaggcagcagatagttagttggtgagttcttatccattctgcagttctgtatcttttaagtgcagcatttaggccatttac

SEQ ID NO: 23188 - DNA, 201 bp, Homo sapiens; identical to SEQ ID NO: 9251

SEQ ID NO: 23189 - DNA, 201 bp, Homo sapiens
tccaagtcatcaaaggatgaatgagggaggagagaagggtatactttcatccctgtcctccaaaagagatatcctggaaaatgcacttttaaagtcataastatcatttgaggcccaggtaagagaacatcaataggaaacaaagcaagatggtaaaggaaaagaagagcaataagaatgcttggtgcgaagtagggtcat

SEQ ID NO: 23190 - DNA, 201 bp, Homo sapiens; identical to SEQ ID NO: 9250

SEQ ID NO: 23191 - DNA, 201 bp, Homo sapiens
ggacaaatagccagtcctctttatctgcagggatgagggcagggacagaaatcagactccctgtctgcttttactcataggagactgagtttgcttttcaytgggtcctagacttccaagtcaaccctactacatccaagtcatcaaaggatgaatgagggaggagagaagggtatactttcatccctgtcctccaaaaga

SEQ ID NO: 23192 - DNA, 201 bp, Homo sapiens; identical to SEQ ID NO: 9252

SEQ ID NO: 23193 - DNA, 201 bp, Homo sapiens
tcttaaaatgaatatcacttgtgtcaaccgaaaacattttacaggtagtctcctccccataagaagggaacaatcttgggcaaggaaatagagtcccatgraaggggaacaagatggagccatacagacagaggtccaccttctcttcagaccaccatgactgaagctgtatccatgagatgcaaaacatgcattcaattg

SEQ ID NO: 23194 - DNA, 201 bp, Homo sapiens; identical to SEQ ID NO: 9253

SEQ ID NO: 23195 - DNA, 201 bp, Homo sapiens; identical to SEQ ID NO: 9254

SEQ ID NO: 23196 - DNA, 201 bp, Homo sapiens; identical to SEQ ID NO: 9255

SEQ ID NO: 23197 - DNA, 201 bp, Homo sapiens; identical to SEQ ID NO: 9256

SEQ ID NO: 23198 - DNA, 201 bp, Homo sapiens; identical to SEQ ID NO: 9257

SEQ ID NO: 23199 - DNA, 201 bp, Homo sapiens; identical to SEQ ID NO: 9258

SEQ ID NO: 23200 - DNA, 201 bp, Homo sapiens; identical to SEQ ID NO: 9259

SEQ ID NO: 23201 - DNA, 201 bp, Homo sapiens; identical to SEQ ID NO: 9260

SEQ ID NO: 23202 - DNA, 201 bp, Homo sapiens; identical to SEQ ID NO: 9261

SEQ ID NO: 23203 - DNA, 201 bp, Homo sapiens; identical to SEQ ID NO: 9262

SEQ ID NO: 23204 - DNA, 201 bp, Homo sapiens; identical to SEQ ID NO: 9263

SEQ ID NO: 23205 - DNA, 201 bp, Homo sapiens; identical to SEQ ID NO: 9264

SEQ ID NO: 23206 - DNA, 201 bp, Homo sapiens; identical to SEQ ID NO: 9265

SEQ ID NO: 23207 - DNA, 201 bp, Homo sapiens; identical to SEQ ID NO: 9266

SEQ ID NO: 23208 - DNA, 201 bp, Homo sapiens; identical to SEQ ID NO: 9267

SEQ ID NO: 23209 - DNA, 201 bp, Homo sapiens; identical to SEQ ID NO: 9268

SEQ ID NO: 23210 - DNA, 201 bp, Homo sapiens; identical to SEQ ID NO: 9269

SEQ ID NO: 23211 - DNA, 201 bp, Homo sapiens; identical to SEQ ID NO: 9270

SEQ ID NO: 23212 - DNA, 201 bp, Homo sapiens; identical to SEQ ID NO: 9271

SEQ ID NO: 23213 - DNA, 201 bp, Homo sapiens; identical to SEQ ID NO: 9272

SEQ ID NO: 23214 - DNA, 201 bp, Homo sapiens; identical to SEQ ID NO: 9273

SEQ ID NO: 23215 - DNA, 201 bp, Homo sapiens; identical to SEQ ID NO: 9274

SEQ ID NO: 23216 - DNA, 201 bp, Homo sapiens; identical to SEQ ID NO: 9275

SEQ ID NO: 23217 - DNA, 201 bp, Homo sapiens; identical to SEQ ID NO: 9276

SEQ ID NO: 23218 - DNA, 201 bp, Homo sapiens; identical to SEQ ID NO: 9277

SEQ ID NO: 23219 - DNA, 201 bp, Homo sapiens; identical to SEQ ID NO: 9278

SEQ ID NO: 23220 - DNA, 201 bp, Homo sapiens
tgcccaatgtcacacagtattgaagcttaggaataggtctcgtggctcccactctagtgttttttgctccacaccggtcatttatctccttcccttctatyctccctgcaatctttaactttagtcttggcccaggtcatcctaaatattgccatcttcataatacgtggttctggccatgccacgctcctggctaacatc

SEQ ID NO: 23221 - DNA, 201 bp, Homo sapiens; identical to SEQ ID NO: 9279

SEQ ID NO: 23222 - DNA, 201 bp, Homo sapiens; identical to SEQ ID NO: 9280

SEQ ID NO: 23223 - DNA, 201 bp, Homo sapiens; identical to SEQ ID NO: 9281

SEQ ID NO: 23224 - DNA, 201 bp, Homo sapiens; identical to SEQ ID NO: 9282

SEQ ID NO: 23225 - DNA, 201 bp, Homo sapiens; identical to SEQ ID NO: 9283

SEQ ID NO: 23226 - DNA, 201 bp, Homo sapiens; identical to SEQ ID NO: 9284

SEQ ID NO: 23227 - DNA, 201 bp, Homo sapiens; identical to SEQ ID NO: 9285

SEQ ID NO: 23228 - DNA, 201 bp, Homo sapiens; identical to SEQ ID NO: 9286

SEQ ID NO: 23229 - DNA, 201 bp, Homo sapiens; identical to SEQ ID NO: 9288

SEQ ID NO: 23230 - DNA, 201 bp, Homo sapiens; identical to SEQ ID NO: 9290

SEQ ID NO: 23231 - DNA, 201 bp, Homo sapiens; identical to SEQ ID NO: 9292

SEQ ID NO: 23232 - DNA, 201 bp, Homo sapiens; identical to SEQ ID NO: 9293

SEQ ID NO: 23233 - DNA, 201 bp, Homo sapiens; identical to SEQ ID NO: 9294

SEQ ID NO: 23234 - DNA, 201 bp, Homo sapiens; identical to SEQ ID NO: 9295

SEQ ID NO: 23235 - DNA, 201 bp, Homo sapiens; identical to SEQ ID NO: 9296

SEQ ID NO: 23236 - DNA, 201 bp, Homo sapiens; identical to SEQ ID NO: 9297

SEQ ID NO: 23237 - DNA, 201 bp, Homo sapiens; identical to SEQ ID NO: 9298

SEQ ID NO: 23238 - DNA, 201 bp, Homo sapiens
gcctggccctaccccacaagcctcattaccgttttatctgcccatatcccatcaccctctatccacatcttgttatccagtggagagtttccacttctagkttccaagccagaaatgtgtggatcattctgtcttccctcacttccttaaacaacccgtcggcaagtcccacagactggatctccagagtttccctgtagc

SEQ ID NO: 23239 - DNA, 201 bp, Homo sapiens; identical to SEQ ID NO: 9299

SEQ ID NO: 23240 - DNA, 201 bp, Homo sapiens; identical to SEQ ID NO: 9300

SEQ ID NO: 23241 - DNA, 201 bp, Homo sapiens
agctcttttctccatgctcaccaccctagtttagggcaatgccaccctttattgagactctggaagaacctcctgacagttcctgctcccctctggccccktcaatccattttctacacagtggcccagaatgtttaaaaatgcaaatcaggttgtatcatgcctccagtggcttctcattgcacctagggtaaaatccaa

SEQ ID NO: 23242 - DNA, 201 bp, Homo sapiens; identical to SEQ ID NO: 9301

SEQ ID NO: 23243 - DNA, 201 bp, Homo sapiens; identical to SEQ ID NO: 9302

SEQ ID NO: 23244 - DNA, 201 bp, Homo sapiens
gctcttttctccatgctcaccaccctagtttagggcaatgccaccctttattgagactctggaagaacctcctgacagttcctgctcccctctggccccgycaatccattttctacacagtggcccagaatgtttaaaaatgcaaatcaggttgtatcatgcctccagtggcttctcattgcacctagggtaaaatccaag

SEQ ID NO: 23245 - DNA, 201 bp, Homo sapiens; identical to SEQ ID NO: 9303

SEQ ID NO: 23246 - DNA, 201 bp, Homo sapiens; identical to SEQ ID NO: 9304

SEQ ID NO: 23247 - DNA, 201 bp, Homo sapiens
ttgtatccagttggtcaagtggacactcaacatgactttgctggaatcacaaggtggttgttgccattggaggaaagaacagatgtggaaggcctcatacraggtgggaaaatatagttctctggagttccaatgagagagttccaaggcctcactgaattagggccttggggaaatatgacacagattctagagctgagc

SEQ ID NO: 23248 - DNA, 201 bp, Homo sapiens; identical to SEQ ID NO: 9305

SEQ ID NO: 23249 - DNA, 201 bp, Homo sapiens
attcccttggaggcagctgctgccaaaacttaggattatcttctacttgagggtttaccattattgggcctgtgcctgggtcgcagtgccccctttgcagrcagagtgaatatttctgatttacattgttcattggagtgtggagaattgagccttgattcaagtagaaaccacgttctcagagggtccagctgggctggt

SEQ ID NO: 23250 - DNA, 201 bp, Homo sapiens
cttgccttaaggcagtcaagccgtctgctgactctccacttttgcaaggagaactacgtctagtcatcaacatgtagccgcatccagccatgaggaggggmgggagagatttgacaacatctcaggaagtgctaacatctgacaagctgagatcatgggtgtcataaattgatagagaggctgaaatgagaaggagatagg

SEQ ID NO: 23251 - DNA, 201 bp, Homo sapiens
tgtctctctacaccctccactttgccaaagccaggaaggaggtggccgtaatgaccacattgccactttcccttggtctttctgtggcacgaatgctgtasgtcgtttcctgcttcctgcaactgtccgccagtggcttcagtggaaacaatcacagacctcgtgtattgagtgctccctgtgagccagagctccactaat

SEQ ID NO: 23252 - DNA, 201 bp, Homo sapiens; identical to SEQ ID NO: 9306

SEQ ID NO: 23253 - DNA, 201 bp, Homo sapiens; identical to SEQ ID NO: 9307

SEQ ID NO: 23254 - DNA, 201 bp, Homo sapiens; identical to SEQ ID NO: 9308

SEQ ID NO: 23255 - DNA, 201 bp, Homo sapiens; identical to SEQ ID NO: 9309

SEQ ID NO: 23256 - DNA, 201 bp, Homo sapiens; identical to SEQ ID NO: 9310

SEQ ID NO: 23257 - DNA, 201 bp, Homo sapiens; identical to SEQ ID NO: 9311

SEQ ID NO: 23258 - DNA, 201 bp, Homo sapiens; identical to SEQ ID NO: 9312

SEQ ID NO: 23259 - DNA, 201 bp, Homo sapiens; identical to SEQ ID NO: 9313

SEQ ID NO: 23260 - DNA, 201 bp, Homo sapiens; identical to SEQ ID NO: 9314

SEQ ID NO: 23261 - DNA, 201 bp, Homo sapiens; identical to SEQ ID NO: 9315

SEQ ID NO: 23262 - DNA, 201 bp, Homo sapiens; identical to SEQ ID NO: 9316

SEQ ID NO: 23263 - DNA, 201 bp, Homo sapiens
cagcctcctgtctcatctggaagaccaccactctggggtctcagaggaatgatggaagccttggggtttctaaaattggaagtgaatggccccatggtgarggtggccctgtcagtggctctcttggccctcctgaaatggtaagtgcagccagccctagggactgtgacagcgtcagccgtctcaccctggagccttgct

SEQ ID NO: 23264 - DNA, 201 bp, Homo sapiens; identical to SEQ ID NO: 9318

SEQ ID NO: 23265 - DNA, 201 bp, Homo sapiens; identical to SEQ ID NO: 9319

SEQ ID NO: 23266 - DNA, 201 bp, Homo sapiens; identical to SEQ ID NO: 9320

SEQ ID NO: 23267 - DNA, 201 bp, Homo sapiens; identical to SEQ ID NO: 9321

SEQ ID NO: 23268 - DNA, 201 bp, Homo sapiens; identical to SEQ ID NO: 9322

SEQ ID NO: 23269 - DNA, 201 bp, Homo sapiens; identical to SEQ ID NO: 9323

SEQ ID NO: 23270 - DNA, 201 bp, Homo sapiens; identical to SEQ ID NO: 9324

SEQ ID NO: 23271 - DNA, 201 bp, Homo sapiens; identical to SEQ ID NO: 9325

SEQ ID NO: 23272 - DNA, 201 bp, Homo sapiens; identical to SEQ ID NO: 9326

SEQ ID NO: 23273 - DNA, 201 bp, Homo sapiens; identical to SEQ ID NO: 9327

SEQ ID NO: 23274 - DNA, 201 bp, Homo sapiens; identical to SEQ ID NO: 9328

SEQ ID NO: 23275 - DNA, 201 bp, Homo sapiens; identical to SEQ ID NO: 9329

SEQ ID NO: 23276 - DNA, 201 bp, Homo sapiens; identical to SEQ ID NO: 9330

SEQ ID NO: 23277 - DNA, 201 bp, Homo sapiens; identical to SEQ ID NO: 9331

SEQ ID NO: 23278 - DNA, 201 bp, Homo sapiens; identical to SEQ ID NO: 9332

SEQ ID NO: 23279 - DNA, 201 bp, Homo sapiens; identical to SEQ ID NO: 9333

SEQ ID NO: 23280 - DNA, 201 bp, Homo sapiens; identical to SEQ ID NO: 9334

SEQ ID NO: 23281 - DNA, 201 bp, Homo sapiens
ctgtacgtcgtttcctgcttcctgcaactgtccgccagtggcttcagtggaaacaatcacagacctcgtgtattgagtgctccctgtgagccagagctccwctaatcaggccacacgaggaattcattttcctctcaaccatcctaggcagtgtggacagttatcaccacttcacaaatgagaaaccgaggctcagagaga

SEQ ID NO: 23282 - DNA, 201 bp, Homo sapiens; identical to SEQ ID NO: 9335

SEQ ID NO: 23283 - DNA, 201 bp, Homo sapiens
tgtacgtcgtttcctgcttcctgcaactgtccgccagtggcttcagtggaaacaatcacagacctcgtgtattgagtgctccctgtgagccagagctccaytaatcaggccacacgaggaattcattttcctctcaaccatcctaggcagtgtggacagttatcaccacttcacaaatgagaaaccgaggctcagagagat

SEQ ID NO: 23284 - DNA, 201 bp, Homo sapiens
cggctccgagtccagcgcagccgagccggtctgcagaggggcccccagaactttgtgtgtgtgtgtgcacgcgcgcgcgtgtgtgcccaggtgcgagggtkcgcgcgtgtgctggcggggagggaaccgacccgaaagagagccccacgctggcaaagtggctcgcccatctcacagccggttggcgctcgcggaggtagg

SEQ ID NO: 23285 - DNA, 201 bp, Homo sapiens
gcacgccgcggaaatgcagcccccggggtggtcgctgggttcctgccggagtctggcttccacgccaccctgatcttctcctcctcgcgtctacactgtcycgagggccgccactccatcacttgaatgggagctcacaactctctgggtcctcgcttttctcagcgctctctcctatcagggcttccgctaaacactctc

SEQ ID NO: 23286 - DNA, 201 bp, Homo sapiens; identical to SEQ ID NO: 9336

SEQ ID NO: 23287 - DNA, 201 bp, Homo sapiens; identical to SEQ ID NO: 9337

SEQ ID NO: 23288 - DNA, 201 bp, Homo sapiens; identical to SEQ ID NO: 9338

SEQ ID NO: 23289 - DNA, 201 bp, Homo sapiens; identical to SEQ ID NO: 9339

SEQ ID NO: 23290 - DNA, 201 bp, Homo sapiens; identical to SEQ ID NO: 9340

SEQ ID NO: 23291 - DNA, 201 bp, Homo sapiens; identical to SEQ ID NO: 9341

SEQ ID NO: 23292 - DNA, 201 bp, Homo sapiens; identical to SEQ ID NO: 9343

SEQ ID NO: 23293 - DNA, 201 bp, Homo sapiens; identical to SEQ ID NO: 9342

SEQ ID NO: 23294 - DNA, 201 bp, Homo sapiens; identical to SEQ ID NO: 9344

SEQ ID NO: 23295 - DNA, 201 bp, Homo sapiens; identical to SEQ ID NO: 9345

SEQ ID NO: 23296 - DNA, 201 bp, Homo sapiens; identical to SEQ ID NO: 9348

SEQ ID NO: 23297 - DNA, 201 bp, Homo sapiens; identical to SEQ ID NO: 9347

SEQ ID NO: 23298 - DNA, 201 bp, Homo sapiens; identical to SEQ ID NO: 9346

SEQ ID NO: 23299 - DNA, 201 bp, Homo sapiens; identical to SEQ ID NO: 9350

SEQ ID NO: 23300 - DNA, 201 bp, Homo sapiens; identical to SEQ ID NO: 9349

SEQ ID NO: 23301 - DNA, 201 bp, Homo sapiens; identical to SEQ ID NO: 9352

SEQ ID NO: 23302 - DNA, 201 bp, Homo sapiens; identical to SEQ ID NO: 9351

SEQ ID NO: 23303 - DNA, 201 bp, Homo sapiens
atttccaaaagcaatagagaagcactgaatatttttgagcaggagtccaagttggtagaatgaaagaagggctggaaataagggctataagattttgagtktaagtgcccaccttataaatcattagcaaaagcagaatataaccctttctccaattctgtatgggtgacacccaccagtctggtaaatggaggtcgttag

SEQ ID NO: 23304 - DNA, 201 bp, Homo sapiens; identical to SEQ ID NO: 9354

SEQ ID NO: 23305 - DNA, 201 bp, Homo sapiens; identical to SEQ ID NO: 9353

SEQ ID NO: 23306 - DNA, 201 bp, Homo sapiens
ggttttaccacattggccaggttggtctcaaactcctgacctcagatgatccacccaccttggcctcccaaagtgctgggattacaggtgtgagccaccargtccagtcacattattttcttaactgtgtcaactctctcatatcactttgttggcttatctcattcttaccttttatttcatggagtctgagatttttat

SEQ ID NO: 23307 - DNA, 201 bp, Homo sapiens; identical to SEQ ID NO: 9356

SEQ ID NO: 23308 - DNA, 201 bp, Homo sapiens; identical to SEQ ID NO: 9355

SEQ ID NO: 23309 - DNA, 201 bp, Homo sapiens; identical to SEQ ID NO: 9357

SEQ ID NO: 23310 - DNA, 201 bp, Homo sapiens; identical to SEQ ID NO: 9359

SEQ ID NO: 23311 - DNA, 201 bp, Homo sapiens; identical to SEQ ID NO: 9358

SEQ ID NO: 23312 - DNA, 201 bp, Homo sapiens; identical to SEQ ID NO: 9361

SEQ ID NO: 23313 - DNA, 201 bp, Homo sapiens; identical to SEQ ID NO: 9360

SEQ ID NO: 23314 - DNA, 201 bp, Homo sapiens
tataaacggcagttcccctacatatactcacttgcctgccaccatgtaagacatgcctttgctcctcctttgctttccaccataattgtgaggcctcccasccatgtgaaactgtgagtccattaaacctctttttctttataagttactcagtcttggtatttcttcatagcagtatgaaaatggactaatacaacatgt

SEQ ID NO: 23315 - DNA, 201 bp, Homo sapiens; identical to SEQ ID NO: 9363

SEQ ID NO: 23316 - DNA, 201 bp, Homo sapiens; identical to SEQ ID NO: 9362

SEQ ID NO: 23317 - DNA, 201 bp, Homo sapiens; identical to SEQ ID NO: 9366

SEQ ID NO: 23318 - DNA, 201 bp, Homo sapiens; identical to SEQ ID NO: 9365

SEQ ID NO: 23319 - DNA, 201 bp, Homo sapiens; identical to SEQ ID NO: 9364

SEQ ID NO: 23320 - DNA, 201 bp, Homo sapiens; identical to SEQ ID NO: 9367

SEQ ID NO: 23321 - DNA, 201 bp, Homo sapiens; identical to SEQ ID NO: 9369

SEQ ID NO: 23322 - DNA, 201 bp, Homo sapiens; identical to SEQ ID NO: 9368

SEQ ID NO: 23323 - DNA, 201 bp, Homo sapiens; identical to SEQ ID NO: 9370

SEQ ID NO: 23324 - DNA, 201 bp, Homo sapiens; identical to SEQ ID NO: 9372

SEQ ID NO: 23325 - DNA, 201 bp, Homo sapiens; identical to SEQ ID NO: 9371

SEQ ID NO: 23326 - DNA, 201 bp, Homo sapiens; identical to SEQ ID NO: 9373

SEQ ID NO: 23327 - DNA, 201 bp, Homo sapiens; identical to SEQ ID NO: 9374

SEQ ID NO: 23328 - DNA, 201 bp, Homo sapiens; identical to SEQ ID NO: 9375

SEQ ID NO: 23329 - DNA, 201 bp, Homo sapiens; identical to SEQ ID NO: 9376

SEQ ID NO: 23330 - DNA, 201 bp, Homo sapiens; identical to SEQ ID NO: 9378

SEQ ID NO: 23331 - DNA, 201 bp, Homo sapiens; identical to SEQ ID NO: 9377

SEQ ID NO: 23332 - DNA, 201 bp, Homo sapiens; identical to SEQ ID NO: 9379

SEQ ID NO: 23333 - DNA, 201 bp, Homo sapiens; identical to SEQ ID NO: 9380

SEQ ID NO: 23334 - DNA, 201 bp, Homo sapiens; identical to SEQ ID NO: 9381

SEQ ID NO: 23335 - DNA, 201 bp, Homo sapiens; identical to SEQ ID NO: 9382

SEQ ID NO: 23336 - DNA, 201 bp, Homo sapiens; identical to SEQ ID NO: 9383

SEQ ID NO: 23337 - DNA, 201 bp, Homo sapiens; identical to SEQ ID NO: 9384

SEQ ID NO: 23338 - DNA, 201 bp, Homo sapiens; identical to SEQ ID NO: 9385

SEQ ID NO: 23339 - DNA, 201 bp, Homo sapiens; identical to SEQ ID NO: 9386

SEQ ID NO: 23340 - DNA, 201 bp, Homo sapiens; identical to SEQ ID NO: 9387

SEQ ID NO: 23341 - DNA, 201 bp, Homo sapiens; identical to SEQ ID NO: 9388

SEQ ID NO: 23342 - DNA, 201 bp, Homo sapiens; identical to SEQ ID NO: 9389

SEQ ID NO: 23343 - DNA, 201 bp, Homo sapiens; identical to SEQ ID NO: 9390

SEQ ID NO: 23344 - DNA, 201 bp, Homo sapiens; identical to SEQ ID NO: 9391

SEQ ID NO: 23345 - DNA, 201 bp, Homo sapiens; identical to SEQ ID NO: 9392

SEQ ID NO: 23346 - DNA, 201 bp, Homo sapiens; identical to SEQ ID NO: 9393

SEQ ID NO: 23347 - DNA, 201 bp, Homo sapiens; identical to SEQ ID NO: 9394

SEQ ID NO: 23348 - DNA, 201 bp, Homo sapiens; identical to SEQ ID NO: 9395

SEQ ID NO: 23349 - DNA, 201 bp, Homo sapiens; identical to SEQ ID NO: 9396

SEQ ID NO: 23350 - DNA, 201 bp, Homo sapiens; identical to SEQ ID NO: 9397

SEQ ID NO: 23351 - DNA, 201 bp, Homo sapiens; identical to SEQ ID NO: 9398

SEQ ID NO: 23352 - DNA, 201 bp, Homo sapiens; identical to SEQ ID NO: 9399

SEQ ID NO: 23353 - DNA, 201 bp, Homo sapiens; identical to SEQ ID NO: 9400

SEQ ID NO: 23354 - DNA, 201 bp, Homo sapiens
agccagacgtggcggtgggcacctgtaatcccagctacttgggaggctgagataggataatcgcttgaacccaggaggcagaggttgcagtgagccgagttctagtgccattgcactctagcctaggcaacaagagctaaattccatctcaaaaaaaaaaaaaaaaaaaaaaaggcagaaaggcatcaattggatttagca

SEQ ID NO: 23355 - DNA, 201 bp, Homo sapiens; identical to SEQ ID NO: 9402

SEQ ID NO: 23356 - DNA, 201 bp, Homo sapiens; identical to SEQ ID NO: 9401

SEQ ID NO: 23357 - DNA, 201 bp, Homo sapiens; identical to SEQ ID NO: 9404

SEQ ID NO: 23358 - DNA, 201 bp, Homo sapiens; identical to SEQ ID NO: 9405

SEQ ID NO: 23359 - DNA, 201 bp, Homo sapiens; identical to SEQ ID NO: 9403

SEQ ID NO: 23360 - DNA, 201 bp, Homo sapiens; identical to SEQ ID NO: 9407

SEQ ID NO: 23361 - DNA, 201 bp, Homo sapiens; identical to SEQ ID NO: 9408

SEQ ID NO: 23362 - DNA, 201 bp, Homo sapiens; identical to SEQ ID NO: 9406

SEQ ID NO: 23363 - DNA, 201 bp, Homo sapiens; identical to SEQ ID NO: 9409

SEQ ID NO: 23364 - DNA, 201 bp, Homo sapiens; identical to SEQ ID NO: 9410

SEQ ID NO: 23365 - DNA, 201 bp, Homo sapiens; identical to SEQ ID NO: 9411

SEQ ID NO: 23366 - DNA, 201 bp, Homo sapiens; identical to SEQ ID NO: 9412

SEQ ID NO: 23367 - DNA, 201 bp, Homo sapiens; identical to SEQ ID NO: 9413

SEQ ID NO: 23368 - DNA, 201 bp, Homo sapiens; identical to SEQ ID NO: 9414

SEQ ID NO: 23369 - DNA, 201 bp, Homo sapiens; identical to SEQ ID NO: 9415

SEQ ID NO: 23370 - DNA, 201 bp, Homo sapiens; identical to SEQ ID NO: 9416

SEQ ID NO: 23371 - DNA, 201 bp, Homo sapiens; identical to SEQ ID NO: 9417

SEQ ID NO: 23372 - DNA, 201 bp, Homo sapiens; identical to SEQ ID NO: 9418

SEQ ID NO: 23373 - DNA, 201 bp, Homo sapiens; identical to SEQ ID NO: 9419

SEQ ID NO: 23374 - DNA, 201 bp, Homo sapiens; identical to SEQ ID NO: 9420

SEQ ID NO: 23375 - DNA, 201 bp, Homo sapiens; identical to SEQ ID NO: 9421

SEQ ID NO: 23376 - DNA, 201 bp, Homo sapiens; identical to SEQ ID NO: 9423

SEQ ID NO: 23377 - DNA, 201 bp, Homo sapiens; identical to SEQ ID NO: 9425

SEQ ID NO: 23378 - DNA, 201 bp, Homo sapiens; identical to SEQ ID NO: 9426

SEQ ID NO: 23379 - DNA, 201 bp, Homo sapiens; identical to SEQ ID NO: 9427

SEQ ID NO: 23380 - DNA, 201 bp, Homo sapiens; identical to SEQ ID NO: 9428

SEQ ID NO: 23381 - DNA, 201 bp, Homo sapiens; identical to SEQ ID NO: 9429

SEQ ID NO: 23382 - DNA, 201 bp, Homo sapiens; identical to SEQ ID NO: 9430

SEQ ID NO: 23383 - DNA, 201 bp, Homo sapiens; identical to SEQ ID NO: 9431

SEQ ID NO: 23384 - DNA, 201 bp, Homo sapiens; identical to SEQ ID NO: 9432

SEQ ID NO: 23385 - DNA, 201 bp, Homo sapiens; identical to SEQ ID NO: 9433

SEQ ID NO: 23386 - DNA, 201 bp, Homo sapiens; identical to SEQ ID NO: 9434

SEQ ID NO: 23387 - DNA, 201 bp, Homo sapiens; identical to SEQ ID NO: 9435

SEQ ID NO: 23388 - DNA, 201 bp, Homo sapiens; identical to SEQ ID NO: 9436

SEQ ID NO: 23389 - DNA, 201 bp, Homo sapiens; identical to SEQ ID NO: 9437

SEQ ID NO: 23390 - DNA, 201 bp, Homo sapiens; identical to SEQ ID NO: 9438

SEQ ID NO: 23391 - DNA, 201 bp, Homo sapiens; identical to SEQ ID NO: 9439

SEQ ID NO: 23392 - DNA, 201 bp, Homo sapiens; identical to SEQ ID NO: 9440

SEQ ID NO: 23393 - DNA, 201 bp, Homo sapiens; identical to SEQ ID NO: 9441

SEQ ID NO: 23394 - DNA, 201 bp, Homo sapiens; identical to SEQ ID NO: 9442

SEQ ID NO: 23395 - DNA, 201 bp, Homo sapiens; identical to SEQ ID NO: 9443

SEQ ID NO: 23396 - DNA, 201 bp, Homo sapiens; identical to SEQ ID NO: 9444

SEQ ID NO: 23397 - DNA, 201 bp, Homo sapiens; identical to SEQ ID NO: 9445

SEQ ID NO: 23398 - DNA, 201 bp, Homo sapiens; identical to SEQ ID NO: 9446

SEQ ID NO: 23399 - DNA, 201 bp, Homo sapiens; identical to SEQ ID NO: 9447

SEQ ID NO: 23400 - DNA, 201 bp, Homo sapiens; identical to SEQ ID NO: 9448

SEQ ID NO: 23401 - DNA, 201 bp, Homo sapiens; identical to SEQ ID NO: 9449

SEQ ID NO: 23402 - DNA, 201 bp, Homo sapiens; identical to SEQ ID NO: 9450

SEQ ID NO: 23403 - DNA, 201 bp, Homo sapiens; identical to SEQ ID NO: 9451

SEQ ID NO: 23404 - DNA, 201 bp, Homo sapiens; identical to SEQ ID NO: 9452

SEQ ID NO: 23405 - DNA, 201 bp, Homo sapiens; identical to SEQ ID NO: 9453

SEQ ID NO: 23406 - DNA, 201 bp, Homo sapiens; identical to SEQ ID NO: 9454

SEQ ID NO: 23407 - DNA, 201 bp, Homo sapiens; identical to SEQ ID NO: 9455

SEQ ID NO: 23408 - DNA, 201 bp, Homo sapiens
ggtcactttccctttctgggtttctgttttcacctctgtaaaaaagagtaaggcttggtcagtgtttctcaaagcactctccttggaaaactacatctggkatatgttataaatgtccctgaagaggcctttgtggtaaaatacacttgagaaatgcagctctctgcatcgtgctcttggagatttccaatgcatattagc

SEQ ID NO: 23409 - DNA, 201 bp, Homo sapiens; identical to SEQ ID NO: 9456

SEQ ID NO: 23410 - DNA, 201 bp, Homo sapiens; identical to SEQ ID NO: 9457

SEQ ID NO: 23411 - DNA, 201 bp, Homo sapiens; identical to SEQ ID NO: 9458

SEQ ID NO: 23412 - DNA, 201 bp, Homo sapiens
aggtacaagtcagactggggttcagtacagagaccaccagtacagacagggatggaactaggatcagtaaagacagggacttggctaaatgttcaaggtaygaaggtgttggccaggctgttctctaactcctgacctcaagtgatccacctgctttggcctcccaaagtgctaggattataggtatgagccaccacgccc

SEQ ID NO: 23413 - DNA, 201 bp, Homo sapiens; identical to SEQ ID NO: 9459

SEQ ID NO: 23414 - DNA, 201 bp, Homo sapiens; identical to SEQ ID NO: 9460

SEQ ID NO: 23415 - DNA, 201 bp, Homo sapiens; identical to SEQ ID NO: 9461

SEQ ID NO: 23416 - DNA, 201 bp, Homo sapiens; identical to SEQ ID NO: 9462

SEQ ID NO: 23417 - DNA, 201 bp, Homo sapiens; identical to SEQ ID NO: 9463

SEQ ID NO: 23418 - DNA, 201 bp, Homo sapiens; identical to SEQ ID NO: 9464

SEQ ID NO: 23419 - DNA, 201 bp, Homo sapiens; identical to SEQ ID NO: 9465

SEQ ID NO: 23420 - DNA, 201 bp, Homo sapiens; identical to SEQ ID NO: 9466

SEQ ID NO: 23421 - DNA, 201 bp, Homo sapiens; identical to SEQ ID NO: 1013

SEQ ID NO: 23422 - DNA, 201 bp, Homo sapiens; identical to SEQ ID NO: 1016

SEQ ID NO: 23423 - DNA, 201 bp, Homo sapiens; identical to SEQ ID NO: 9469

SEQ ID NO: 23424 - DNA, 201 bp, Homo sapiens; identical to SEQ ID NO: 9470

SEQ ID NO: 23425 - DNA, 201 bp, Homo sapiens; identical to SEQ ID NO: 9471

SEQ ID NO: 23426 - DNA, 201 bp, Homo sapiens; identical to SEQ ID NO: 9472

SEQ ID NO: 23427 - DNA, 201 bp, Homo sapiens; identical to SEQ ID NO: 9473

SEQ ID NO: 23428 - DNA, 201 bp, Homo sapiens; identical to SEQ ID NO: 9474

SEQ ID NO: 23429 - DNA, 201 bp, Homo sapiens; identical to SEQ ID NO: 9475

SEQ ID NO: 23430 - DNA, 201 bp, Homo sapiens; identical to SEQ ID NO: 9476

SEQ ID NO: 23431 - DNA, 201 bp, Homo sapiens; identical to SEQ ID NO: 9477

SEQ ID NO: 23432 - DNA, 201 bp, Homo sapiens; identical to SEQ ID NO: 9478

SEQ ID NO: 23433 - DNA, 201 bp, Homo sapiens; identical to SEQ ID NO: 9479

SEQ ID NO: 23434 - DNA, 201 bp, Homo sapiens; identical to SEQ ID NO: 9480

SEQ ID NO: 23435 - DNA, 201 bp, Homo sapiens; identical to SEQ ID NO: 9481

SEQ ID NO: 23436 - DNA, 201 bp, Homo sapiens; identical to SEQ ID NO: 9482

SEQ ID NO: 23437 - DNA, 201 bp, Homo sapiens
aaaggggtggtggcatgctggctcctccaaccccagctgtgagctgaaatactgtctcaaatccaaactgtctacatgatactgataagaaacaggattckaatctcaattttgctacccaaggattttgatgtaagagaatgtaaatttaaaaccaacattaggactgtgagtttgagactaaaactctggccttgctgt

SEQ ID NO: 23438 - DNA, 201 bp, Homo sapiens; identical to SEQ ID NO: 9483

SEQ ID NO: 23439 - DNA, 201 bp, Homo sapiens; identical to SEQ ID NO: 9484

SEQ ID NO: 23440 - DNA, 201 bp, Homo sapiens; identical to SEQ ID NO: 9485

SEQ ID NO: 23441 - DNA, 201 bp, Homo sapiens; identical to SEQ ID NO: 9486

SEQ ID NO: 23442 - DNA, 201 bp, Homo sapiens; identical to SEQ ID NO: 9487

SEQ ID NO: 23443 - DNA, 201 bp, Homo sapiens
gcccatgtcaccgcaaggcctgtcctgccccgggtatggcgccgtcccttggcgtccttgcagttcacccgggaccacaagatggcgtggcgagcacgggragggaacactcacctatggaaaccttgttccaggaggagctcaagcacttcgaagccaaaatcgagaagcacaaccactaccagaagcagctggagattg

SEQ ID NO: 23444 - DNA, 201 bp, Homo sapiens; identical to SEQ ID NO: 4869

SEQ ID NO: 23445 - DNA, 201 bp, Homo sapiens
ggcgctcccgcgagacgcggggatggaatgctagcgtgcacctagcttcacctgaccacggcaaagctcggtgttggttaagaaagccgtgtggcactgcmtgaggcacccgcaccgttggggcagaggtcagggccgctgagagaagggaccttcggtgagttattcaccctgagccacgggcttctatgtggagaggga

SEQ ID NO: 23446 - DNA, 201 bp, Homo sapiens; identical to SEQ ID NO: 4871

SEQ ID NO: 23447 - DNA, 201 bp, Homo sapiens; identical to SEQ ID NO: 4874

SEQ ID NO: 23448 - DNA, 201 bp, Homo sapiens
agaatgttcctgtgtctgagcctggaagaggctcgggtctggctccgggcgtggttcccttcccgtgtctgagcctggaagaggctcgggtccggctccgrgcgtggttcccttcccgtgtctgagtctggaagaggctcgggtccggctccgagcgtggttcccttcccgtgtctgagcctggaagaggctcgggtccgg

SEQ ID NO: 23449 - DNA, 201 bp, Homo sapiens
ccgggtaaggaaacacggccctctccttctagctctctcctgtggtgaagattctcttgcagtttccgggtaaggaaatgcagccctctcctccaagctckctctctcaagattctcgcagtttcttccttaaccactcggtgaacctgcttgcgttttccttctcatctgcgtgggaactcgtgtttcaggggcggggcc

SEQ ID NO: 23450 - DNA, 201 bp, Homo sapiens
cgccaacctcacggacaaggagctggaggcgttccgggtaaggaaacacggccctctccttctagctctctcctgtggtgaagattctcttgcagtttccrggtaaggaaatgcagccctctcctccaagctctctctctcaagattctcgcagtttcttccttaaccactcggtgaacctgcttgcgttttccttctcat

SEQ ID NO: 23451 - DNA, 201 bp, Homo sapiens
acctctctgtgccccataagccccatgtgagctactgagcagatgccctctgtgccccataagactttgagtgcacgcacccgtgtttcacacacatgcargtcgcgcctgcaaaccctcataggctccacgcacactcagcgtggttgccgcggggctggctgtggtgtgcaccccgggtgctgctgaggccactcttgc

SEQ ID NO: 23452 - DNA, 201 bp, Homo sapiens
gaggagggagcaggggccactgttgcggggctccatgggcaggcggctctggactactcactcctggttggagagtggtgacagccccggagtctctcacygcgtcccttcgtgagcaccagggtccaggagccgtcttggtttgtttggctcctcccaggagcccgaatgtttgactttcacgagcacaacatcctgctg

SEQ ID NO: 23453 - DNA, 201 bp, Homo sapiens
gggcacagtggctcacacctgtaatcccagcactttgggaggctgaggtgggtggatcatctgagctcaggagttcgagaccagcctgggcaacatggtasaaccccatctctaccaaaagtagaaaaaattagccgggcgtggcggtgggcacctgtagtcctaagtacatgggaggctgaggtgggaggatcacttgag

SEQ ID NO: 23454 - DNA, 201 bp, Homo sapiens
tctgagctcaggagttcgagaccagcctgggcaacatggtagaaccccatctctaccaaaagtagaaaaaattagccgggcgtggcggtgggcacctgtartcctaagtacatgggaggctgaggtgggaggatcacttgagcctgggaggcagaggttgcagtgagctgagatcatgccactgcactccagcctgggtga

SEQ ID NO: 23455 - DNA, 201 bp, Homo sapiens
cggctccgagaatgttcctgtgtctgagcctggaagaggctcgggtctggctccgggcgtggttcccttcccgtgtctgagcctggaagaggctcgggtcyggctccgagcgtggttcccttcccgtgtctgagtctggaagaggctcgggtccggctccgagcgtggttcccttcccgtgtctgagcctggaagaggctc

SEQ ID NO: 23456 - DNA, 201 bp, Homo sapiens
gagaatgttcctgtgtctgagcctggaagaggctcgggtctggctccgggcgtggttcccttcccgtgtctgagcctggaagaggctcgggtccggctccragcgtggttcccttcccgtgtctgagtctggaagaggctcgggtccggctccgagcgtggttcccttcccgtgtctgagcctggaagaggctcgggtccg

SEQ ID NO: 23457 - DNA, 201 bp, Homo sapiens
tgtaggtgatgccctccactccgcagagccagtcccacaggggtacccattctgactcctaccaccgcagctccctacctcccgcctgccatgggttccamgtgcatggctctgggcagtctgtgtctttgcgtgcgtctgtgtatgtctgcgtgtatctgcttacattcgctcagcatctgagattcacccaggcttttg

SEQ ID NO: 23458 - DNA, 201 bp, Homo sapiens
ctcagcacttagagacacgggctggcatggcgggtgctggcggcaggggtgagaaataaactttcagccctagaggaggagcccaagaggagagcatgccrtcacctggagtctctggtatgtgcctggcacctgtactgattgcattaaccactgtgattttttagaagatgtactagtttgaaatgtataatacatacg

SEQ ID NO: 23459 - DNA, 201 bp, Homo sapiens
gatttgtctggagttgcagagccgagtagtgcagcaaagatttggagtcagggttttctgactcctgagcaggtggtctgttcccagccacccctcttctsccattggcaggcatcagcagacatgtcatgtggctgcgcccgggttaaagacagagggccggcttcatttttgctggtttatgccaccatgttcaagagt

SEQ ID NO: 23460 - DNA, 201 bp, Homo sapiens; identical to SEQ ID NO: 4886

SEQ ID NO: 23461 - DNA, 201 bp, Homo sapiens
ttcaggttgggacagtcctggaaagcagcccctgcagagatgggggcgcagagcatctaccaggagggcccagacaaaagactgtcctgggaccacccacyaagggttagagaaccttctagagaattagaagctttcctctgccctaggccctgccattcattttgtgcctaccgtttgctatctttttaccattgggga

SEQ ID NO: 23462 - DNA, 201 bp, Homo sapiens
aattagaagctttcctctgccctaggccctgccattcattttgtgcctaccgtttgctatctttttaccattggggatcttggctcagtaatctgaattcrtccctaactaaattttaaactcctggagggtggggcctgtgtggctagggcagccacagagtcaggctgggcttctgagagaagagagggcggagctgac

SEQ ID NO: 23463 - DNA, 201 bp, Homo sapiens
tttattgaaatataacacacatactttggatactagcttgtgttgtatttatgttagaaaatagctaatgaaatatagataaaagattaatatttcaaacstctaagggaaaacagactccatatttaaacacacatgatcagagacaggcgttaggtgatgggcacctggagctcagaggcaggagctggggttccctcc

SEQ ID NO: 23464 - DNA, 201 bp, Homo sapiens
actctcctttcctaggagcacccctccataatcacctccacaggaattccatctcagctctgcttccaggaaacctgacccaagacagaggttgttgcaarggcagaggccacaggcatctacaccagcctctgtgcgttcagtctgtgagcggcccaacgctgcccatgtgctcctccttaaagcctactcaaccctggg

SEQ ID NO: 23465 - DNA, 201 bp, Homo sapiens
tgttgcggggctccatgggcaggcggctctggactactcactcctggttggagagtggtgacagccccggagtctctcactgcgtcccttcgtgagcaccrgggtccaggagccgtcttggtttgtttggctcctcccaggagcccgaatgtttgactttcacgagcacaacatcctgctggagaccctgagcaggaccga

SEQ ID NO: 23466 - DNA, 201 bp, Homo sapiens
aaagcttaggatttgtgttgggggctcaccctcatgagggaggtggccactggcttcagtgtttgggggggctaaccctcatgagggatggtggctgctcscctcagtgctgtgggctacgcctctgactccttggcttttggccaaggggcccattgggcacagcctgcggggggctatcctccgagcacagatgcgccc

SEQ ID NO: 23467 - DNA, 201 bp, Homo sapiens
cctggtctcccagaacctcccggtggccagcctcctccgaggtcagtttctcgctgtgtcctggtccgtcctgctcgtggctcacaggctcctccccttcrttcgcagctgcatcttcctcccgtgaggctggccgagctccacgctgatctgaagatacaggagagggacgaactcgcctggaagaaactaaagcttgac

SEQ ID NO: 23468 - DNA, 201 bp, Homo sapiens
ctctcggcccggaggggaaggcaggaccccattctgtgggaggcggggccctgggagaattcccccagcccccaggaaagggcgggcaggcaagcccaccrcccgctaaggaggcgggtgtggttgcatgggccccggattccaggggacctagtagagggcctgtcacacagagccacagcacaggacttggaagtggga

SEQ ID NO: 23469 - DNA, 201 bp, Homo sapiens
ggggaaggcaggaccccattctgtgggaggcggggccctgggagaattcccccagcccccaggaaagggcgggcaggcaagcccaccgcccgctaaggagrcgggtgtggttgcatgggccccggattccaggggacctagtagagggcctgtcacacagagccacagcacaggacttggaagtgggaattggggcctggg

SEQ ID NO: 23470 - DNA, 201 bp, Homo sapiens
gaggcaggtgggatgacaatgaggggctggcagaggtccccctaggaaggtggccttgctgtcctcaccacctgcagccgggagagccaggcaagcccggrgtcaccgggctgctgccctgtccccctccttgggatcttctgctccccaccccagccagctcggtagctgtcccctgttgagcctggacacgtccaagag

SEQ ID NO: 23471 - DNA, 201 bp, Homo sapiens
tccaggaggagctcaagcacttcgaagccaaaatcgagaagcacaaccactaccagaagcagctggagattgcgcacgagaagctgaggcacgcagagagygtgggcgacggcgagcgtgtgagccgcagccgcgagaagcacgccctgctggaggggcggaccaaggagctgggctacacggtgcgcacgggttccagga

SEQ ID NO: 23472 - DNA, 201 bp, Homo sapiens
agctcaagcacttcgaagccaaaatcgagaagcacaaccactaccagaagcagctggagattgcgcacgagaagctgaggcacgcagagagcgtgggcgayggcgagcgtgtgagccgcagccgcgagaagcacgccctgctggaggggcggaccaaggagctgggctacacggtgcgcacgggttccaggaccggggagg

SEQ ID NO: 23473 - DNA, 201 bp, Homo sapiens; identical to SEQ ID NO: 4889

SEQ ID NO: 23474 - DNA, 201 bp, Homo sapiens
cgaggtcctggcagcctctgcacacaggccacgtccatcctctgcctcctgcttcagaggcagccagggcgggctgtggcgcttcccaggctctgatggargcaggtgtttctggacacaaaggagaagcagttgtttggccaaggggacagagaagccacatttcagcgaggtcatgtgagctactgacctctctgtgcc

SEQ ID NO: 23475 - DNA, 201 bp, Homo sapiens
ggaaactactggaaaatgagaggcaaacctgtctcacccaccgtggcaacccagatgtgttggcttttgactgtttttcacaggaaaccatatcaaatagwacctcccctctctcctagtcatcttggccaagtatggtctggacggaaagaaggacgctcggcaggtgaccagcaactccctcagtggcacccaggaaga

SEQ ID NO: 23476 - DNA, 201 bp, Homo sapiens
acggccctctccttctagctctctcctgtggtgaagattctcttgcagtttccgggtaaggaaatgcagccctctcctccaagctctctctctcaagattstcgcagtttcttccttaaccactcggtgaacctgcttgcgttttccttctcatctgcgtgggaactcgtgtttcaggggcggggccaggctctggaggga

SEQ ID NO: 23477 - DNA, 201 bp, Homo sapiens
gagctgggagggcaggggtgggatgaatgaagcgtggcctgccctgcggagagggatgagggtggggcggggaagttcctcagccccagtgcggcagctcrttccggggcgctgcctgtgtggtctacgccagcaggtaagtgagagggtgacagattcctgctccagaaggatctggggctgtgtaagaaccgtctcagc

SEQ ID NO: 23478 - DNA, 201 bp, Homo sapiens
ggcttcagtgtttgggggggctaaccctcatgagggatggtggctgctcgcctcagtgctgtgggctacgcctctgactccttggcttttggccaaggggsccattgggcacagcctgcggggggctatcctccgagcacagatgcgcccttggccgtggtctcagtttgctgtcacagatgccattggcacgccagaggg

SEQ ID NO: 23479 - DNA, 201 bp, Homo sapiens
ccgaaggtgccccccgcccccaccccctcctgccctctgccccaccccctcctgccccccacccctcctgcacctgaggctcgttgtgctcagtgggcagyctcagctcccctcaggaacacggcaggggcagggaggcggcaccagacgccctcccagggttccaccggacttgtgagtggggaggttgctgtgcaggca

SEQ ID NO: 23480 - DNA, 201 bp, Homo sapiens
ccccctcctgccctctgccccaccccctcctgccccccacccctcctgcacctgaggctcgttgtgctcagtgggcagcctcagctcccctcaggaacacrgcaggggcagggaggcggcaccagacgccctcccagggttccaccggacttgtgagtggggaggttgctgtgcaggcaggctctgggagtcgcctgcctg

SEQ ID NO: 23481 - DNA, 201 bp, Homo sapiens
cctgccctctgccccaccccctcctgccccccacccctcctgcacctgaggctcgttgtgctcagtgggcagcctcagctcccctcaggaacacggcaggkgcagggaggcggcaccagacgccctcccagggttccaccggacttgtgagtggggaggttgctgtgcaggcaggctctgggagtcgcctgcctgcattgg

SEQ ID NO: 23482 - DNA, 201 bp, Homo sapiens
gaaacgcgagtccggagaggagttccgcatggagaagttgaaccagctgtgggagaaggcccagcgagtgagcgcggcccgcggtcggtggagcggggccygggggcgggggccgtggttggggtcgttggagcggggcccaggggtcggaggcggaggggggcgcagccggggcacctgtgccctacgcgccctgtcctt

SEQ ID NO: 23483 - DNA, 201 bp, Homo sapiens
ctgggtggaatcttccttccagtggcgtttcagtcccctgggtctgcctcactcttcaccaccgtcttgtgcttctgcactgagctccagccagaccacckgcctgcagccacctggcgctacctgttcccgtgtgcttcctgcctttgcctggagagaataacaatctatagtccaaactcaaggacaaaaacaaactgc

SEQ ID NO: 23484 - DNA, 201 bp, Homo sapiens
caggggctcctggggcgtgtggagtgccagatcattctgagggtggagaattcatcagctcggtgagcacccagcagggctgtgaggagtggggagtccakcgggggtcctgggtgggcagccttgagtatggtatccggccatgagttcacccagggtccctatagctggtgtctgttgggagggaggtgggtgtggtcc

SEQ ID NO: 23485 - DNA, 201 bp, Homo sapiens
ggggcaccttagctggccgcaggcacgtgcatggggcttggcaggtggggccacatggagggccctgggtctggagcgtggggtcaaggcagggcagggcrcctacaggagcagggacagagctgcagtccagcagcagtggagcccaggcaggctgggggcagggtgcagaggcagccaccacagaagcacagcccctgg

SEQ ID NO: 23486 - DNA, 201 bp, Homo sapiens
gttggggctgctccggagagtcgagtgctcagctgcctgctgtcagctatgtgtagcagccctaggagctgctgtgcctccacccaactgctgcccctggscctgaccccaggcaccccttccccaatcccctcccccgctgctccctgtgtgacctgggcccccggcacagtcccctgccccccacctccgtttcctcct

SEQ ID NO: 23487 - DNA, 201 bp, Homo sapiens
agaggctcgggtctggctccgggcgtggttcccttcccgtgtctgagcctggaagaggctcgggtccggctccgagcgtggttcccttcccgtgtctgagyctggaagaggctcgggtccggctccgagcgtggttcccttcccgtgtctgagcctggaagaggctcgggtccggctccgagcgtggttcccttcccgtgt

SEQ ID NO: 23488 - DNA, 201 bp, Homo sapiens
caacctggcctgggcttacccacggccaggcgctccgcggagggcagaagcgggctgggccaggctcctcagcgccaggcccgggccgcagtgccaacccsgcaacggcactggacatgcaagagtcggcgtcagtgcgcgtgaagccggagcattatcaggctcagccaaacgcggcccggttcttgggctttccgctct

SEQ ID NO: 23489 - DNA, 201 bp, Homo sapiens
tccccagctgatgagacgtttctgtccacaggtgaagaagcatctgcaggacctgtccggcaggatctccagagctcggcacaacgaactctgaaggcatyggggagcccagcccggcagggaagaggccagcgtgaaggacctgggctcttggccgtggcatttccgtggacagcccgccgtcagggtggctggggctgg

SEQ ID NO: 23490 - DNA, 201 bp, Homo sapiens
cggcactggacatgcaagagtcggcgtcagtgcgcgtgaagccggagcattatcaggctcagccaaacgcggcccggttcttgggctttccgctctttctktggggcagagagggaaagaggcctcgagtcgtgcgggctccaggctccgggctctgggtgaggcctgatccctgctcccacccggccaccctcattctcc

SEQ ID NO: 23491 - DNA, 201 bp, Homo sapiens
agctgatgagacgtttctgtccacaggtgaagaagcatctgcaggacctgtccggcaggatctccagagctcggcacaacgaactctgaaggcattggggrgcccagcccggcagggaagaggccagcgtgaaggacctgggctcttggccgtggcatttccgtggacagcccgccgtcagggtggctggggctggcacgg

SEQ ID NO: 23492 - DNA, 201 bp, Homo sapiens
catctgttgagtgggtggagtcccccctccccatgaggaatggggagcccgaaatagactccctgaccgattggaggtggcgctgaggaagtgcactcggrcccaggaaccccagcggctcccttttgggtgctggcccaagtcttccacctgctctgcagggccgccctggtgcgctccaccttacctccagccacctcc

SEQ ID NO: 23493 - DNA, 201 bp, Homo sapiens
gctctgggagtcgcctgcctgcattggatgaaccaagtctcaccggcgcctgcccccactatgggcacagctgctgcctttgtcagacctgagcttcgctratgggtccttcattctggactcgtgaccctccccaaatgtgtgactttcccaccccacaaagctggagtaaaatggagggtgacccagcagagagggggc

SEQ ID NO: 23494 - DNA, 201 bp, Homo sapiens
tcctgaagttctagttgtgtgggcaagtcttttttgctgaacagaacgtgaagttcttcgggggtgagggtgttttgggggattttgtgtgtcttcccccmttccagagagcctggtactatggcaggcaggcctgcagagcccattcgtcctgattttccttccagataacggaagcttggagggtggcggtgctgtgag

SEQ ID NO: 23495 - DNA, 201 bp, Homo sapiens
cctgctggcctcactcacgcagcttccgattctgtacctcatcctccacgtgcacactgagcaccagctgcacgccaggcactgctctaggctcgaggagrcagcagccgccaggagatggcatctgtgccctcatggtgataagacagcagggctggtctctgtccccggtgccaggcagagccaccgcctcgtctccag

SEQ ID NO: 23496 - DNA, 201 bp, Homo sapiens
caggaaacctttgcctttgatgggcttgggctgtgagacctgcgttgaggttgccgccaagaagatgctgagacccgctttcatcaggcgagacccggccrggggggtgctgcttcatcctctccagcaacttgaatcttgactttctgtgactctcccagttcctctttcacaggcgggctccactgtgttgcaagactc

SEQ ID NO: 23497 - DNA, 201 bp, Homo sapiens
caccagctgcacgccaggcactgctctaggctcgaggaggcagcagccgccaggagatggcatctgtgccctcatggtgataagacagcagggctggtctytgtccccggtgccaggcagagccaccgcctcgtctccaggatggtctgcccagaggcagcctccagcacagcagtcaaatgtgtccacgcgggcccaggt

SEQ ID NO: 23498 - DNA, 201 bp, Homo sapiens
cagcctgctcctcatggtgggtgccttgcagtctggcgcgggcactcaggtgagcgctgggaggatggcacatgccctctgaagaggtggtccattggcgrtcctggtggcattggaacctgcccagcctgaactgtgctgtgtgtgcaggttgacaccagtggtgtagctgtggaccctggcctgggtttcctggggcgt

SEQ ID NO: 23499 - DNA, 201 bp, Homo sapiens
gggcactcaggtgagcgctgggaggatggcacatgccctctgaagaggtggtccattggcggtcctggtggcattggaacctgcccagcctgaactgtgckgtgtgtgcaggttgacaccagtggtgtagctgtggaccctggcctgggtttcctggggcgttgagaagcagcagcaggttattggaaagttccagaaagc

SEQ ID NO: 23500 - DNA, 201 bp, Homo sapiens
cccccggcaaaatcccgcccacccttggaggccttttcagatcattcttgccagatgagctccccttgtcccttctctgagcccaaaggggcccagctgcygtctgtctccctccttccccttgtttcccgcgctacctccagggcacttcccaactcactggccaagcccccaacgagcggtctatgctaactttggctc

SEQ ID NO: 23501 - DNA, 201 bp, Homo sapiens
tgtccccagctgatgagacgtttctgtccacaggtgaagaagcatctgcaggacctgtccggcaggatctccagagctcggcacaacgaactctgaaggcrttggggagcccagcccggcagggaagaggccagcgtgaaggacctgggctcttggccgtggcatttccgtggacagcccgccgtcagggtggctggggct

SEQ ID NO: 23502 - DNA, 201 bp, Homo sapiens
cctggggggactcgaactttccatacagagggagaagcagcataatgagcttcatcctggggtctacagtggcagacagtggggaaagcagtgacagggaktttgccagcagaggaggcagctgagggtgtcttactcaaagaccctccctgaatgctgggagctgggaaggggttggttttgcccaagcacatggggtct

SEQ ID NO: 23503 - DNA, 201 bp, Homo sapiens
tgccaccatgttcaagagtctggttgagacgtaagccaagatacggcggcagggactgcctggggaagagagacatggctgaaacaattctggatggttgygtccccaccagcgtgtctagtgggccattcccaagggccaagaaagagcctgtcctggaggtgcccccaggaagaagggactggctatgcagcagggcag

SEQ ID NO: 23504 - DNA, 201 bp, Homo sapiens
ttctctcgtaagcaagatactcagcttcagcactgaccagcctcacaatccgtcctcaccaagtggagggccctccctccgggttcctccacggccgtatstgtctctgttcatacaccttcccctcagcacttagagacacgggctggcatggcgggtgctggcggcaggggtgagaaataaactttcagccctagagga

SEQ ID NO: 23505 - DNA, 201 bp, Homo sapiens
cattcccaagggccaagaaagagcctgtcctggaggtgcccccaggaagaagggactggctatgcagcagggcagcattcggggcctggaggagacagagyagcttgcagggggcacagaagtgggctaagaaccagctccctcctgcaggccaggcagtgtccttgcagggtgtccaggtctgtggcccaagtggagctg

SEQ ID NO: 23506 - DNA, 201 bp, Homo sapiens
agcagctcaaggcgggtacggctgtgcccttgtccacggagctcaggtggaaggagctggggcacagtggctgggctgggacagtgcatgccacctgccgkggtgagacaggtacagcgtgccaggaagccttggtcaccgccacagcctgctcctcatggtgggtgccttgcagtctggcgcgggcactcaggtgagcgc

SEQ ID NO: 23507 - DNA, 201 bp, Homo sapiens
ccaggaggagctcaagcacttcgaagccaaaatcgagaagcacaaccactaccagaagcagctggagattgcgcacgagaagctgaggcacgcagagagcrtgggcgacggcgagcgtgtgagccgcagccgcgagaagcacgccctgctggaggggcggaccaaggagctgggctacacggtgcgcacgggttccaggac

SEQ ID NO: 23508 - DNA, 201 bp, Homo sapiens
tcgaggaggcagcagccgccaggagatggcatctgtgccctcatggtgataagacagcagggctggtctctgtccccggtgccaggcagagccaccgcctmgtctccaggatggtctgcccagaggcagcctccagcacagcagtcaaatgtgtccacgcgggcccaggtccccttgggtggctgtgctgctgtcacctga

SEQ ID NO: 23509 - DNA, 201 bp, Homo sapiens
ccttagcctgacctggtgctggtgactgtcagccgtaggcttttggccgtagtgctgggggctggaccaccttgtaggcctgcgatgcagtttgctgagtkcctgtgctggagagacccggatgagcctggctatagtccatgcaggaaagggcgactcagccccacacacttctcttcccacctcgggctgtccccaagg

SEQ ID NO: 23510 - DNA, 201 bp, Homo sapiens
ccttctgcgctgagcactggcagccacacatcaggggaaagggagctggcttttgtgagacatgcggtgtgaaatttagaccccctgttgcctgagagttkgggaatcagagggagaaaatgactttcccctgtgggttgcagattttacagcccacagagcacctgcccttgattctcccagcaccctagggaggcagac

SEQ ID NO: 23511 - DNA, 201 bp, Homo sapiens
tgagttcctgtgctggagagacccggatgagcctggctatagtccatgcaggaaagggcgactcagccccacacacttctcttcccacctcgggctgtccycaaggcagttgtgtccagcggctcctgcagttctcttgcgggtctgcctgggccttccagcaagccccaccagcccagggtcctcggggtcctgagcagg

SEQ ID NO: 23512 - DNA, 201 bp, Homo sapiens
ggtcaccgggctgctgccctgtccccctccttgggatcttctgctccccaccccagccagctcggtagctgtcccctgttgagcctggacacgtccaagaraagggtggttgcctgccggcagctcttctccggtttgttttttgttttcctgcccttcgtgaggccaagaacctggcctggcactcacgtaggcaagggc

SEQ ID NO: 23513 - DNA, 201 bp, Homo sapiens
aaggcggcgcgggctgcgggacactgggaaggcagccggctcttgacgcttcgtggggatgttcactgttttacgtaaactttattgaaatataacacacrtactttggatactagcttgtgttgtatttatgttagaaaatagctaatgaaatatagataaaagattaatatttcaaacctctaagggaaaacagactcc

SEQ ID NO: 23514 - DNA, 201 bp, Homo sapiens
accctggtcccacctcatgacacgttctggttcacacagctgggccactctgctctgcacggaagagccttcgcttccctgaagggctagcctgccccagygcacgcctcttagcggccgggccagccccgaggccagagttgatgagagctggccggtgggtttcattctgctgcttgcctcggccgcctggcattctgg

SEQ ID NO: 23515 - DNA, 201 bp, Homo sapiens
caggagctctaagggctcggtgctcctgaggccgcctccagcttcagtgctctgtgactccattccatgcagaagaacccagcacctccagaatccagaascttccatagtccctgctgctgatcgcagccgtgggtactctgccttttgatggggtctgaccagccactttgggctctggctcagagcttttggctccaa

SEQ ID NO: 23516 - DNA, 201 bp, Homo sapiens
tggagaccctgagcaggaccgaaggtgccccccgcccccaccccctcctgccctctgccccaccccctcctgccccccacccctcctgcacctgaggctcrttgtgctcagtgggcagcctcagctcccctcaggaacacggcaggggcagggaggcggcaccagacgccctcccagggttccaccggacttgtgagtggg

SEQ ID NO: 23517 - DNA, 201 bp, Homo sapiens
ccggccgctcacggaggaactacaattcccaggagaccgcgcggtgggtgggggcggggtagtgggcggggcatcggcaggctaggttttctccgcgcagsgccagtcgcagaggaagatggcgccgcggagggtcaggtcgtttctgcgcgggctcccggcgctgctactgctgctgctcttcctcgggccctggcccgc

SEQ ID NO: 23518 - DNA, 201 bp, Homo sapiens
aggcagttgtgtccagcggctcctgcagttctcttgcgggtctgcctgggccttccagcaagccccaccagcccagggtcctcggggtcctgagcaggaargggtcagcagaggagggagcaggggccactgttgcggggctccatgggcaggcggctctggactactcactcctggttggagagtggtgacagccccgga

SEQ ID NO: 23519 - DNA, 201 bp, Homo sapiens
ggttccaggaccggggaggccacagttcccctgcaggaaagatgaggccgcccacatgcagctcagggcttcctgtagatggggtgtgggccccacgctgytgtcttccctgtccgagttgaaccccagggccacaagtgtgtggggcactgaaggccacagcagccatgctaggggagccccccgggcttgtagtgcagt

SEQ ID NO: 23520 - DNA, 201 bp, Homo sapiens
ctatgtggagagggaggtggcgcccacgagcagggttttgtgagaatctggggagagctacagtgaccccagcccaggctgggctgacgcagcacctgctsccactggggtggtatctgtggggatgctctgggctgttgtgatgtgaggagctggaggtccctctccttccctcccaggccctgaggaggaaggcgcctt

SEQ ID NO: 23521 - DNA, 201 bp, Homo sapiens
tcccaggccctgaggaggaaggcgcctttcccagagctctgtcccagtctctctggtcattgcttttaaaaataacactgtggggctgggcacagtggctyacacctgtaatcccagcactttgggaggctgaggtgggtggatcatctgagctcaggagttcgagaccagcctgggcaacatggtagaaccccatctcta

SEQ ID NO: 23522 - DNA, 201 bp, Homo sapiens
ggcgcatcagggttggaagggccccagggtacagcatgtgggtgcctgttcctttgtggacttgtgtgtgtgtggctggtggggcggggggtggattctgsttcttttttttcccattatcctgagagccttaaggtactcagtgtgttggtgagactcagccctgtcatctagcagaagcgtgttccttttcattgctgt

SEQ ID NO: 23523 - DNA, 201 bp, Homo sapiens
agggtcacgggtgaaggcccagaggaggcgctggggtccgggagtcaccatctgggtgaagaggtcctcggggtgaggggaagtgtgaggcgaagggaggytccgagcccagcatcttgggagaggcctactcggggccctctcggcccggaggggaaggcaggaccccattctgtgggaggcggggccctgggagaattc

SEQ ID NO: 23524 - DNA, 201 bp, Homo sapiens
tggggcctggggagagctactgccgtggagggcgaggccagcccccaggctctgctctcacatcccaagtgcaggacttgtcctgttggcaccagggcccrcgtcgagcgcctgctttcatatcatgttggtggcagcgtgtggtgacagacacagcccacagatgccgagtcccccctagggaagcggggctaggggagc

SEQ ID NO: 23525 - DNA, 201 bp, Homo sapiens
tgtgattagaaaggtgccctcgtgtgtggggctgggctttcaccctgtgcctgggaagggtgcggggccaggcgctgggacccagcagggcctggtgggcygtggcagggtgtttacctgccgcagctcccccatttccagcggctcctgctccagaacagtttctctggatcacattgatttggggtcaacagttagact

SEQ ID NO: 23526 - DNA, 201 bp, Homo sapiens
tttgttttttgttttcctgcccttcgtgaggccaagaacctggcctggcactcacgtaggcaagggcctgcctggccatgaggagtggttggctgaagagyggccctggccacacgagcccgcggcgggttcactccaggccttgtttccctcttaggcgaagacctctgggaaattctccggcgaagaactggacaagct

SEQ ID NO: 23527 - DNA, 201 bp, Homo sapiens
ggtgacccagcagagagggggcagggcaggggtccagagtcagcccccaggggacctggtgccccagctgtcaccgccaggcgccacttggtgcgcgtgtcccggcgtctcgcctgtctcgcctggaaaggaagctgtgccaacggtcgtttctgcggcgctgcaggaccgcggaagggggacattttcagcccagaaatg

SEQ ID NO: 23528 - DNA, 201 bp, Homo sapiens
cccagcagagagggggcagggcaggggtccagagtcagcccccaggggacctggtgccccagctgtcaccgccaggcgccacttggtgcgcgtgtcccggcgtctcgcctgtctcgcctggaaaggaagctgtgccaacggtcgtttctgcggcgctgcaggaccgcggaagggggacattttcagcccagaaatgagagc

SEQ ID NO: 23529 - DNA, 201 bp, Homo sapiens
ggggtcggaggcggaggggggcgcagccggggcacctgtgccctacgcgccctgtccttggcacagcctcccccaagtgtcaggtggggcgccccgacccyttctgcagcaggaaaggtacccgtgccggcgacgacgccgtgtgaagcaggtggcggccggcaccccgagggtcagtgtcgccctccccagcctgggcgg

SEQ ID NO: 23530 - DNA, 201 bp, Homo sapiens
aggtggctcggccggtggggccccccgggacaacagcttcctaattggtgcgtgaccctgggccagctgctctcttcattaagatacggttgcttcatttsttaggtgttcctgaaaacacctgaaatgggtgttttcgaactatgccgaccatctgggcctcattatctcatctcaaatgcaggagtcagattagatctc

SEQ ID NO: 23531 - DNA, 201 bp, Homo sapiens
tctgggcctcattatctcatctcaaatgcaggagtcagattagatctctgtctcaatagtccagttttaagcattcctgagtctttgagagggaaagtaartgatttgcagaataagaaggaacttttggaacgaaaagggagaggagaaacaggtgggggacagacagacgacagacggttataagactgcgtggggatg

SEQ ID NO: 23532 - DNA, 201 bp, Homo sapiens
gattcaaaaataggaaaggcctaaaaaataaatgaaggtagaagttctgataggagagggtggtgcgggtctgcctggcagaatgtgcaggagagcagccygtggcccttgcccgtgggcaggagctcaggtccagggtgagcaccaccatgtggggtttgcagggcgctcccgcgagacgcggggatggaatgctagcgt

SEQ ID NO: 23533 - DNA, 201 bp, Homo sapiens
ctggggcgttgagaagcagcagcaggttattggaaagttccagaaagctctgctggcacgcgggtggtgctgtgtggggaagggccactgctgaggtcccragcagtgctgggcccttgggtctggtcaggaggacacggtcggctctgcttgtgtctggggacacaggaccggcgtcgtttgatcagctgagccggcttt

SEQ ID NO: 23534 - DNA, 201 bp, Homo sapiens
ctgaagatacaggagagggacgaactcgcctggaagaaactaaagcttgacggcttggacgaagatggggagaaggaagcgagactcatacgcaacctcartggtacgtttgtttctttcctaatgcaggtcgagtatccctcttcctaaatgcttgagagcggcagtgttttggatgtcggattttgtttttggatttgg

SEQ ID NO: 23535 - DNA, 201 bp, Homo sapiens; identical to SEQ ID NO: 4867

SEQ ID NO: 23536 - DNA, 201 bp, Homo sapiens
tcccgagggtggggccgtctctggttgtgttttggggacaagcaggcaggtgcttgtagcgacgggaacctgggcctgtggacgcagcggagaccctcggygcgctcagtctacccaggggtggtcacaggcctcgctcccaggagctgctccgtgaaggtcactcgccgtccccagccttgtacctggagactagcggag

SEQ ID NO: 23537 - DNA, 201 bp, Homo sapiens; identical to SEQ ID NO: 4868

SEQ ID NO: 23538 - DNA, 201 bp, Homo sapiens
agttcagtgcccctggagggctccacgtccatcccacagggacccggactctcatcttcctcctgagcgtgctctccctggagacctggcattggaattcrccctgccaccttctggtctccccaagtggaaacctgggcgtcagtctggacgcttgtcaccaaattctgtcccttccaccttcacatggcctctccatct

SEQ ID NO: 23539 - DNA, 201 bp, Homo sapiens
gggcagtggcggcagcgggcctgggagcagcccttcccagcgtctccccagcctcagcagcacggcccctcccgtgctgctgttggccaagaacagagacyactcgtcaaacatagctccgtctccatctcatgccacccacaccgtccatcagtccccctcagcccggcaggggcaggacgcccgctgaggccacagagc

SEQ ID NO: 23540 - DNA, 201 bp, Homo sapiens
tcagcagctcatctccctccactgcaggccctcagtggccaggctctgcaccactgcttcttgccccgtacccgggccagagccttgtgcagggtgtaccrgaagcctgctggcctcactcacgcagcttccgattctgtacctcatcctccacgtgcacactgagcaccagctgcacgccaggcactgctctaggctcga

SEQ ID NO: 23541 - DNA, 201 bp, Homo sapiens
tgcacagcaggcacacggagctgaaggagaagctgcgcagcatcaaccagggcctggaccgcctgcgcagggtcagccaccagggctacagcactgaggcyggtgagtgcccgcccgggactgttggttcccgagggtggggccgtctctggttgtgttttggggacaagcaggcaggtgcttgtagcgacgggaacctgg

SEQ ID NO: 23542 - DNA, 201 bp, Homo sapiens
cgggctgggacccgttgctagtgtgatggcctcccagctgccgccccctcattgcccatgtcaccgcaaggcctgtcctgccccgggtatggcgccgtccyttggcgtccttgcagttcacccgggaccacaagatggcgtggcgagcacggggagggaacactcacctatggaaaccttgttccaggaggagctcaagca

SEQ ID NO: 23543 - DNA, 201 bp, Homo sapiens
tctctggttgtgttttggggacaagcaggcaggtgcttgtagcgacgggaacctgggcctgtggacgcagcggagaccctcggcgcgctcagtctacccasgggtggtcacaggcctcgctcccaggagctgctccgtgaaggtcactcgccgtccccagccttgtacctggagactagcggagggcagtggcggcagcgg

SEQ ID NO: 23544 - DNA, 201 bp, Homo sapiens
cggcgcgctcagtctacccaggggtggtcacaggcctcgctcccaggagctgctccgtgaaggtcactcgccgtccccagccttgtacctggagactagcrgagggcagtggcggcagcgggcctgggagcagcccttcccagcgtctccccagcctcagcagcacggcccctcccgtgctgctgttggccaagaacagag

SEQ ID NO: 23545 - DNA, 201 bp, Homo sapiens
tcctgctggagaccctgagcaggaccgaagggaaacggcctgtgcctgcgtctggacctggctgaacttgcaggtgcccccacccgaggtcctggcagcckctgcacacaggccacgtccatcctctgcctcctgcttcagaggcagccagggcgggctgtggcgcttcccaggctctgatggaggcaggtgtttctggac

SEQ ID NO: 23546 - DNA, 201 bp, Homo sapiens
gcgggtcctgtggatggtcaacagttggtcgggacccagccacagcctggggggaggggaccaaggacactaccgggatcgtttaggggtgtcaccacttsctgagatggaggcccagggagggaaggagaccacctcaggtggcaggggctcctggggcgtgtggagtgccagatcattctgagggtggagaattcatca

SEQ ID NO: 23547 - DNA, 201 bp, Homo sapiens
aagggagaggagaaacaggtgggggacagacagacgacagacggttataagactgcgtggggatggggattgacgcctgggcatcagctccacaggccctycctgaactgctcctgggaccagcagtcaagccccaggcgtaatgttcagcctgcggaggtgggaggtgggagaacgctctgggctggagcggcagggcgg

SEQ ID NO: 23548 - DNA, 201 bp, Homo sapiens
ccctgcactggtccagctaccctcgggctgcccctgcactgtcccccggtgctgggtgctcgcctgaccagtttcagtcttgggttgggtcatgtctcctraacctccctgaggttcactgggcaccatggtagggcgagctgctcacctccactttggactgagccttggactagatgatctttctggtccctttaagtc

SEQ ID NO: 23549 - DNA, 201 bp, Homo sapiens
tcctgggctcaagtgatcctcccgcctctgcctcctaaagtgttgggattacaggtgtagtcccaggaggcaccgcacgcagacagtccttagttctgacrtgaatggtgactgcaatgagagtgtgtgaagcatcttgttctcagaggtctgacgagtggaaactgaggtctgcagagaggagccctcagagccccaccc

SEQ ID NO: 23550 - DNA, 201 bp, Homo sapiens
tcttagcggccgggccagccccgaggccagagttgatgagagctggccggtgggtttcattctgctgcttgcctcggccgcctggcattctggcccagtcwttctgacgtggggacactcttggcctaaatcctgtctttgcaaccaaaaagcagtgtgcccagcggtcacctcacttgcttccttctctcacccagggtc

SEQ ID NO: 23551 - DNA, 201 bp, Homo sapiens
cagccaccagggctacagcactgaggctggtgagtgcccgcccgggactgttggttcccgagggtggggccgtctctggttgtgttttggggacaagcagrcaggtgcttgtagcgacgggaacctgggcctgtggacgcagcggagaccctcggcgcgctcagtctacccaggggtggtcacaggcctcgctcccaggag

SEQ ID NO: 23552 - DNA, 201 bp, Homo sapiens; identical to SEQ ID NO: 4873

SEQ ID NO: 23553 - DNA, 201 bp, Homo sapiens
cgagtttgagctccccagcagtgggcgttctagacagtggtctgggcaggcagtgcgaggactcccagcctcatggcgtcctgccttcggttttacagaartccacgagaacgtcattagcccctcggacctgagcgacatcaagggcagcgtcctgcacagcaggcacacggagctgaaggagaagctgcgcagcatcaa

SEQ ID NO: 23554 - DNA, 201 bp, Homo sapiens
gacaggctcagagagggtgatttgtctggagttgcagagccgagtagtgcagcaaagatttggagtcagggttttctgactcctgagcaggtggtctgttmccagccacccctcttctcccattggcaggcatcagcagacatgtcatgtggctgcgcccgggttaaagacagagggccggcttcatttttgctggtttat

SEQ ID NO: 23555 - DNA, 201 bp, Homo sapiens
ctgtggtgaagattctcttgcagtttccgggtaaggaaatgcagccctctcctccaagctctctctctcaagattctcgcagtttcttccttaaccactcrgtgaacctgcttgcgttttccttctcatctgcgtgggaactcgtgtttcaggggcggggccaggctctggagggaggggctttggttcttttgtccgtgt

SEQ ID NO: 23556 - DNA, 201 bp, Homo sapiens; identical to SEQ ID NO: 4876

SEQ ID NO: 23557 - DNA, 201 bp, Homo sapiens; identical to SEQ ID NO: 4879

SEQ ID NO: 23558 - DNA, 201 bp, Homo sapiens
atgtaggtaaataatacaaatcacattctttggccagagtgcaattgaggaggaaatcagtaacaaaaagacaattaaatccatttgattcttttgttttmgttttgtagtaacttgcacttccctggtgccagaggcatgacacctttttgtctgctcttggccatttgggtggcgtctttgggaagggcctacttaatt

SEQ ID NO: 23559 - DNA, 201 bp, Homo sapiens
gcccagggtcctcggggtcctgagcaggaaggggtcagcagaggagggagcaggggccactgttgcggggctccatgggcaggcggctctggactactcastcctggttggagagtggtgacagccccggagtctctcactgcgtcccttcgtgagcaccagggtccaggagccgtcttggtttgtttggctcctcccagg

SEQ ID NO: 23560 - DNA, 201 bp, Homo sapiens
ctccccagttagccagggacagcaccctgtctccgtgaaccctggtcccacctcatgacacgttctggttcacacagctgggccactctgctctgcacggmagagccttcgcttccctgaagggctagcctgccccagcgcacgcctcttagcggccgggccagccccgaggccagagttgatgagagctggccggtgggt

SEQ ID NO: 23561 - DNA, 201 bp, Homo sapiens
ccacttcctgagatggaggcccagggagggaaggagaccacctcaggtggcaggggctcctggggcgtgtggagtgccagatcattctgagggtggagaaytcatcagctcggtgagcacccagcagggctgtgaggagtggggagtccagcgggggtcctgggtgggcagccttgagtatggtatccggccatgagttca

SEQ ID NO: 23562 - DNA, 201 bp, Homo sapiens
agggtctttgggaaatgaagatggggcagatctgagattacagtgattttttttaaaaaagaacttctaggtgtctgtgtccttgcaatatgtatctgcartggtaatgcagtgggtatcttcttcctgctctgtttatccgagtgcccgatgactgtcctcaggtgctagggtggggtgtcctgttacagccggacagga

SEQ ID NO: 23563 - DNA, 201 bp, Homo sapiens
gctcatgccaagttctttctggagggagctggggctcaggagccccatctgtgccttttaaactttgaactgcaggcatgtgttaccgattcaaaaatagsaaaggcctaaaaaataaatgaaggtagaagttctgataggagagggtggtgcgggtctgcctggcagaatgtgcaggagagcagcctgtggcccttgccc

SEQ ID NO: 23564 - DNA, 201 bp, Homo sapiens
gagcgcctgctttcatatcatgttggtggcagcgtgtggtgacagacacagcccacagatgccgagtcccccctagggaagcggggctaggggagcaccaygtgggcagatcctagagggctccccgagtggctgggccacagcacactgcagactatttattcctcctggctgctaccagtaactttttgttagaagctg

SEQ ID NO: 23565 - DNA, 201 bp, Homo sapiens
gcctgggcaacatggtagaaccccatctctaccaaaagtagaaaaaattagccgggcgtggcggtgggcacctgtagtcctaagtacatgggaggctgagrtgggaggatcacttgagcctgggaggcagaggttgcagtgagctgagatcatgccactgcactccagcctgggtgacagagcgagaccctttcagtaagt

SEQ ID NO: 23566 - DNA, 201 bp, Homo sapiens
gtgattagaaaggtgccctcgtgtgtggggctgggctttcaccctgtgcctgggaagggtgcggggccaggcgctgggacccagcagggcctggtgggccrtggcagggtgtttacctgccgcagctcccccatttccagcggctcctgctccagaacagtttctctggatcacattgatttggggtcaacagttagactt

SEQ ID NO: 23567 - DNA, 201 bp, Homo sapiens
acaccatgggcctatcacagagaccctgagctttccacttcagcatgaactgctcctggctggtggctcttagcgttctttggtgggattttctagttagyactgagctgcttttgtgatttgagcatttctggatgggtgtggaattggaaagtcagatgtgcagggcttgcgccttttccttttggatcgcgcgtctcc

SEQ ID NO: 23568 - DNA, 201 bp, Homo sapiens
cgagcgtgtgagccgcagccgcgagaagcacgccctgctggaggggcggaccaaggagctgggctacacggtgcgcacgggttccaggaccggggaggccrcagttcccctgcaggaaagatgaggccgcccacatgcagctcagggcttcctgtagatggggtgtgggccccacgctgttgtcttccctgtccgagttga

SEQ ID NO: 23569 - DNA, 201 bp, Homo sapiens
gtccccagctgatgagacgtttctgtccacaggtgaagaagcatctgcaggacctgtccggcaggatctccagagctcggcacaacgaactctgaaggcaytggggagcccagcccggcagggaagaggccagcgtgaaggacctgggctcttggccgtggcatttccgtggacagcccgccgtcagggtggctggggctg

SEQ ID NO: 23570 - DNA, 201 bp, Homo sapiens
agaccatcactgtgggcctcgcatctcagaccctcccgggcagtgcagcacggtaagtaaggcgcctacagggtagcagcagccacggggaagtagagatrgaagcagacctgttcctccaggagtttgggtcacaaacaagataggcaggtgtgggctccccctcctcctgaggcaccgactgcccctcctgagagttca

SEQ ID NO: 23571 - DNA, 201 bp, Homo sapiens
gtggatggggctggctgggtggatggggctggctggggaagaggcacacaggtaggggtgtgtcgaaggctgccagggaaagggttttcaggttgggacartcctggaaagcagcccctgcagagatgggggcgcagagcatctaccaggagggcccagacaaaagactgtcctgggaccacccaccaagggttagagaac

SEQ ID NO: 23572 - DNA, 201 bp, Homo sapiens
ccaataaatataagatgtgtgctgtcagaaagccctgccaccctgcacagtctgcaggtggcctctgtcctgtggtccttagagtttttgccctatggcakcaggtgaggctgcaaattttgttcttgaaaatctgtgcagctggtcgctaaagacgggccaatcggtaaccactcttacagcccagcccaccagctgctt

SEQ ID NO: 23573 - DNA, 201 bp, Homo sapiens
cctttgctgccccaacaacagtcaggggaggccggggaatcacttaaggggccccgcccaccaccggagttccacccactccgcgtgcctctccctccccmcagatcatcacgcctgggagttgcgggagcgggtgcgctgcctcggagtcccgcgtgtatacggctccccagccgtctgcccctgtgtgtgaatccctga

SEQ ID NO: 23574 - DNA, 201 bp, Homo sapiens
cttgcttcaaagagagaaagatgtactgccttctgtgatggaaaagaataagatggccgggtggtgtggctcacgcctgtaatcccagcactttgggaggycaaggagggtggatcacttgaggtcaggagtttgagaccagcctggccaacatgtcaaaaccccgtctttactaaaaatacaaaaattagctgggcatgg

SEQ ID NO: 23575 - DNA, 201 bp, Homo sapiens
ccttgccactcttgggtacctcagtccacatctccttcacgttctccagcaccatgttgcagtgcctggtggggaacagggaggggaggcactgggcgtgrggggcgtgcctctgacagtgccccctactgcctgctgctcgccccctccagcagcatggcttggggaagggtgcaggtgctaggccgggatgaccaagct

SEQ ID NO: 23576 - DNA, 201 bp, Homo sapiens; identical to SEQ ID NO: 4920

SEQ ID NO: 23577 - DNA, 201 bp, Homo sapiens
ccaagctgccaaagcaactctgccagtccttaggttgaggctgaggcaaaggactgcacctctctgtgccagtttgctcctttttaagagggaagataatsacgttaccttcctcacagggccattgaaaattatcattttcttttttgagacagaatctcactctgttgcccaggctgcaatgcagtggtgcgatttcag

SEQ ID NO: 23578 - DNA, 201 bp, Homo sapiens
atgcctgtaatcccagctctttgggatgccaaggcaggaggatcgcttgagcccaggagtttgagatcaggctgggcaatatagtgaaaccttgtctctaygacaaataaaattagctaggcatactggtggtgcacctgtggtaccagctataggggggcgctgagacaggaggattgcttgagctcaggaggttgaggc

SEQ ID NO: 23579 - DNA, 201 bp, Homo sapiens
tttgagatcaggctgggcaatatagtgaaaccttgtctctacgacaaataaaattagctaggcatactggtggtgcacctgtggtaccagctatagggggscgctgagacaggaggattgcttgagctcaggaggttgaggctgcagtgagccctgattgtgtcactgcattctagcctgggtgacagagtgagaccctgt

SEQ ID NO: 23580 - DNA, 201 bp, Homo sapiens
gctacattgcactagaaactatatccacatcaacctgttcacgtctttcatgctgcgagctgcggccattctcagccgagaccgtctgctacctcgacctkgcccctaccttggggaccaggcccttgcgctgtggaaccaggtgggcatcctccttccgttcctccaaatgggaatcttgcttctctggtgggaccagga

SEQ ID NO: 23581 - DNA, 201 bp, Homo sapiens
tctctggttggctggtcacatgcctcgtgccctggagctgaagggtggagtcagcccttctcaaataagggtaagcagttccccaagataaaatagggtayttgggcagaaacaaagagcagaggtccttccagtctctctctgggcctggggcttcgagccaagccttgttcccttccccttcttgccccgaccaggacc

SEQ ID NO: 23582 - DNA, 201 bp, Homo sapiens
aacttccgcctcccgggttcaagcgattctccagcctcagcctcccgagaagccgggattacagaagccgggattacaggcgcgcgccaccacacccggctttttttttatatatatatttttagtacagacagggtttcaccatgttggccaggctggtctcgaactcctaacctcaagtgatccgccggccttggcttc

SEQ ID NO: 23583 - DNA, 201 bp, Homo sapiens
agcgtagctctagggcaaccgcccgctcagcaaacaccccccccttccacctttgctgccccaacaacagtcaggggaggccggggaatcacttaaggggycccgcccaccaccggagttccacccactccgcgtgcctctccctccccccagatcatcacgcctgggagttgcgggagcgggtgcgctgcctcggagtcc

SEQ ID NO: 23584 - DNA, 201 bp, Homo sapiens
aggccctcattggggccaaggagagactcccttccaacctaaacttctcccaaggtgctgggcaatctcagacccccttccctctccactccaggacaggrgcctttcccaggacccggagggcaccaggaatgtggggcagagagcggggaggcagcctaagtccaggaagcgagaaccctcgcctcccccgagacttgt

SEQ ID NO: 23585 - DNA, 201 bp, Homo sapiens
tgacgctggggttggagtaggagggcagaggtgctgaccttgccctgggaccctccaggcctgatcgcccctgcacgaaccagacccttcgccgccctcasgatgactacctctccgatcctgcagctgctgctgcggctctcactgtgcgggctgctgctccagagggcggaggtgaggaagcgaggagccagaggagct

SEQ ID NO: 23586 - DNA, 201 bp, Homo sapiens
tttaaaaaaaaaaatagaactctgtgtggctgaggacagctctccaggggcccccacactgccttccaaattcccctaggcggctacattgcactagaaaytatatccacatcaacctgttcacgtctttcatgctgcgagctgcggccattctcagccgagaccgtctgctacctcgacctggcccctaccttggggacc

SEQ ID NO: 23587 - DNA, 201 bp, Homo sapiens
gggttccgcaggaccacgatgactgagtccccgcgcaggaacatcttggagatgtagcggtctttgttgactggcttggacttcttcttgcccttgccacycttgggtacctcagtccacatctccttcacgttctccagcaccatgttgcagtgcctggtggggaacagggaggggaggcactgggcgtgaggggcgtgc

SEQ ID NO: 23588 - DNA, 201 bp, Homo sapiens
tgccaactacacgtggctgctggtggagggcgtctacctgcacagtctcctggtgctcgtgggaggctccgaggagggccacttccgctactacctgctcstcggctggggtgagctccgatcccgtcccccgcccaacccagcgcgcctctcctcggctcccccaactgccctgctggttggcctctgcgggtctcctcc

SEQ ID NO: 23589 - DNA, 201 bp, Homo sapiens
gtgagagaaaccaatcacagataccattcactggggacacagagtggaagaacctttgatggcaagagacggggtggaagggcgatcaaagctgggggagrctgggagacacccgggcagcgctgactacccctttaccggtctggcccctccctaggccctcgctgcctgccgcacggcccagatcgtgacccagtactg

SEQ ID NO: 23590 - DNA, 201 bp, Homo sapiens
tgtgtgcacctgtgtgactgtgcgtgactgtgggaggtgggattgcagggtgtgacaagtcactgtgacgtgcacagctatgggacagtgaggttgtgtgygtgacatgtatatgactgtatgtgacttgtgaatatgggtgagactaagggagagttgtgagtctgtatgaccatgtcactcagtgtgaccgtgggggtg

SEQ ID NO: 23591 - DNA, 201 bp, Homo sapiens
cgtgggaggctccgaggagggccacttccgctactacctgctcctcggctggggtgagctccgatcccgtcccccgcccaacccagcgcgcctctcctcgkctcccccaactgccctgctggttggcctctgcgggtctcctcccgtctctaggcttctgccttccccaccccgacagaggaattccgcgggtcttgggcc

SEQ ID NO: 23592 - DNA, 201 bp, Homo sapiens
tgcgagatggggaaccagggctgcgggatcactgctgccgccctctctccccaggctggctcgctccacgctgacgctggtgcccctgctgggtgtccacsaggtggtgtttgctcccgtgacagaggaacaggcccggggcgccctgcgcttcgccaagctcggctttgagatcttcctcagctccttccaggtgctcag

SEQ ID NO: 23593 - DNA, 201 bp, Homo sapiens
atcaacctgttcacgtctttcatgctgcgagctgcggccattctcagccgagaccgtctgctacctcgacctggcccctaccttggggaccaggcccttgygctgtggaaccaggtgggcatcctccttccgttcctccaaatgggaatcttgcttctctggtgggaccaggaagttctcagtccatttcctatctcctac

SEQ ID NO: 23594 - DNA, 201 bp, Homo sapiens
acagtggctcacatctgtaatcccagcactttgggaggccaagacgggcagatcacgaggccaggagttcaagatcagcctggccaatatggtgaaacccygtctctactaaaaatacaaaaattagctgggtgtggtggcggacacctgtaatcccagctactcaggaggctgaggcagaagaattgcttgaacccagga

SEQ ID NO: 23595 - DNA, 201 bp, Homo sapiens
attctgtctctactaaaaacacaaaaaattagctaggcgtggtggcgcatgcctgtaatcccaggtacttgggaggctgattcaggagaatcgcttgaacstgggaggccaagtttgcagtgagctgagatcgtgccactgcactccagcctgggcaacagagcaagactctgtctccctgtctccaaaaaaaaaaaaaaa

SEQ ID NO: 23596 - DNA, 201 bp, Homo sapiens
tgcctgtaatcccaggtacttgggaggctgattcaggagaatcgcttgaacctgggaggccaagtttgcagtgagctgagatcgtgccactgcactccagmctgggcaacagagcaagactctgtctccctgtctccaaaaaaaaaaaaaaaaaagcaaaaaacaaaacggcaacacaatcaccctaaattttcacaacta

SEQ ID NO: 23597 - DNA, 201 bp, Homo sapiens
tgaggcagaagaattgcttgaacccaggagacagaggttgcagtgagctgagattgcgccactgcactccagcctgggtgacagagcaagactccatcgcaaaaaaaaaaaaaaaaaaaaaagccatagcgtggcccggcagtggctcatgcctgtaatcccagcactttgggaggctgaggtgggcagatcgctttttgc

SEQ ID NO: 23598 - DNA, 201 bp, Homo sapiens
agaatcgcttgaacctgggaggccaagtttgcagtgagctgagatcgtgccactgcactccagcctgggcaacagagcaagactctgtctccctgtctccaaaaaaaaaaaaaaaaaagcaaaaaacaaaacggcaacacaatcaccctaaattttcacaactactactatattactgctccattttccagatgaagaaac

SEQ ID NO: 23599 - DNA, 201 bp, Homo sapiens; identical to SEQ ID NO: 4923

SEQ ID NO: 23600 - DNA, 201 bp, Homo sapiens
tgcgccactgcactccagcctgggtgacagagcaagactccatcgcaaaaaaaaaaaaaaaaaaaaaagccatagcgtggcccggcagtggctcatgcctrtaatcccagcactttgggaggctgaggtgggcagatcgctttttgcccaggagttcaagaccagcctgggtaacatagcaaaaccccacctctacaaaaa

SEQ ID NO: 23601 - DNA, 201 bp, Homo sapiens
aagaccagcctgggtaacatagcaaaaccccacctctacaaaaacatacaaaaattagccaggcatggcggccctcgcctgtactcccagctacttgggargctgagatggtaggatcacttgagtccatcaggtcgaggctgcagtgagctgtgatgctgtgatagtgccagtgcaatctggcgaaagattgagaccctg

SEQ ID NO: 23602 - DNA, 201 bp, Homo sapiens
gcggccctcgcctgtactcccagctacttgggaggctgagatggtaggatcacttgagtccatcaggtcgaggctgcagtgagctgtgatgctgtgatagygccagtgcaatctggcgaaagattgagaccctgtttcaaaaaaataaaatgaaataaaataaaataagaggggccaggcacagtggctcatgcctgtaat

SEQ ID NO: 23603 - DNA, 201 bp, Homo sapiens
ctcactgcagcctcaatttcctgagctcaagcaaatcctcctgcctcagccatccaagtagctgggaccacaggcgcaccaccaccatgcctggctaattwaaaaaaaaaatgttgagaggccgggcgcggtggctcacgcctgtaatcccagcactttggaaagccgagatgggcagatcacctgcagtcaggagttcga

SEQ ID NO: 23604 - DNA, 201 bp, Homo sapiens
ctcccgggttcaagcgattctccagcctcagcctcccgagaagccgggattacagaagccgggattacaggcgcgcgccaccacacccggctttttttttwtatatatatttttagtacagacagggtttcaccatgttggccaggctggtctcgaactcctaacctcaagtgatccgccggccttggcttcccaaagttc

SEQ ID NO: 23605 - DNA, 201 bp, Homo sapiens
tgagacatgagaattgcttgaacccaggaggcagaggttgcagtgagccaagatcgtgccactgcactccagcctgagtaacagagcgagactccatctcaaaaaaaaaaaaaaaaaaaaaagaatgctgtagttgggccaaggtcaatggctcatgcctataattccaacactttgagaagatgattgcttgaacgcagg

SEQ ID NO: 23606 - DNA, 201 bp, Homo sapiens
gagacatgagaattgcttgaacccaggaggcagaggttgcagtgagccaagatcgtgccactgcactccagcctgagtaacagagcgagactccatctcaaaaaaaaaaaaaaaaaaaaaagaatgctgtagttgggccaaggtcaatggctcatgcctataattccaacactttgagaagatgattgcttgaacgcagga

SEQ ID NO: 23607 - DNA, 201 bp, Homo sapiens
cacccatgtggtggcagcatcatagttcactgcagcctgggaactcctgggttgaagcgatcctcccgcctcagcctcccaaatagcagggactacaggcrcacgctaacacacccagctaatttttttaaaaaaattggcagtgacagagtcttgccatgttacccaggctggtcttaaactcctggcctcaagggatcc

SEQ ID NO: 23608 - DNA, 201 bp, Homo sapiens
gtccccgggttcccaggagtctgtaggtccagacttgcggtgacactgacacttccgcccagcgtagctctagggcaaccgcccgctcagcaaacaccccscccttccacctttgctgccccaacaacagtcaggggaggccggggaatcacttaaggggccccgcccaccaccggagttccacccactccgcgtgcctct

SEQ ID NO: 23609 - DNA, 201 bp, Homo sapiens
aaaaccctttgggcttggagagtgggagctcggatgggcgtttcaagttctccaccaggctgtgggaactcagatgggcgtttcaagtaccccactagggrgtactgaaaaccttcaagtttttcagttccccatagaaaaggggtctaggctgacggtttctaccccctcctctccaaggcggtccccgggttcccagga

SEQ ID NO: 23610 - DNA, 201 bp, Homo sapiens
ggtccttccctccttccctccctccctggcgcctattagctagcccaggccatgggggcggtggctgctgagtctccgtgccaggcccagcccccagagaygcacctgttctgacctgctgagcaggttcccaggtttctgccgtcgttgttggccacagcgtgggaagcagctctgggggagctcggagctcccgatcac

SEQ ID NO: 23611 - DNA, 201 bp, Homo sapiens
tgctctgcattctgaggtctgccttctgggggttaggatcagctttctgtctgaggttaatttccttgaaagggaggggcccatccttacttttctactcstgtttacagaggggggcaggccctttcctgtaggacctacccaaacccagggaagccagcaagggaggtggtgagaactgggagaatcccagggaagccc

SEQ ID NO: 23612 - DNA, 201 bp, Homo sapiens
gatggagcactcaatccttccaccttagtgaggctcagatccatgtgcctggatgttgccaagtatgcacatgcacacagcacacacatgctcttcagcckcactgccacctgcagccacacactcacacttgcagggccagcacggcacccacaccctccgggcctgtctcactaggctcagccaggataggctcacctt

SEQ ID NO: 23613 - DNA, 201 bp, Homo sapiens
gtgtgcagagttccgcgagacaagaatgcactccatgcatacagagggtgtgacatgcacacggaatcatgtgtgcacacacattcacacatactgatacrcagctcttccctctggacacagacaagtaagtacgtatatgcccctaagataagacatgaacacatatatgtgccaaacacccaccagtttatgcaagaa

SEQ ID NO: 23614 - DNA, 201 bp, Homo sapiens
ctgcctttgagtctttcctctccttcatctctctttctggtcagtgaccaaatccctgtcaaatctccccccagaactgtcccctcctctccaccctagcrctactgcacccaggctgcagctgcagccttcagtgactgcccctcaccacttgctcatggcactccctggctaaggaacctttagtgactccccatttcc

SEQ ID NO: 23615 - DNA, 201 bp, Homo sapiens
cttactcccttcctccttctcacagacccacctctacgatcccctacattcacatctgtaagtcccagcaggggatactgatggagaaaggcccctcataragaaaagatacttccttaaagatgctcttgatggctgggtgtcagcaagtgccagcctcagtttcccctcctgagatcagaggccaggctcacataggaa

SEQ ID NO: 23616 - DNA, 201 bp, Homo sapiens; identical to SEQ ID NO: 4932

SEQ ID NO: 23617 - DNA, 201 bp, Homo sapiens; identical to SEQ ID NO: 4934

SEQ ID NO: 23618 - DNA, 201 bp, Homo sapiens
agattaatatgtcttcaagtcttggggtaaggtggggaaggatgctgggggtgacattccaggcaggatgcagaggcaaaggctcacagccacataccacwgaccaagggcagctgagacagagagacatgtggaagccaagataaaccgacagcaaaatatttactatgtgtgcagagttccgcgagacaagaatgcact

SEQ ID NO: 23619 - DNA, 201 bp, Homo sapiens
gatgagggcgagtacgagtgccgggtcagcaccttccccgccggcagcttccaggcgcggctgcggctccgagtgctgggtaagcggggatctctgggtayggtctgagccgctgtggatgcagggggaagcagagatggggactgcagagatggatggggcagaggtagaacaggaataaaaagtggggtcatgttcagg

SEQ ID NO: 23620 - DNA, 201 bp, Homo sapiens
tttctcttcgggtccttctgtctctgtttcagattttgtcttggccacttcagccactttgtctctttgaattctcccccttcaataactcgcgcgcgggygcgcgcgcgcgtgtgtgtgtgtgtgtgtgtgtgtctccaatacaatccctgacttacaatggttcaacctacaatttttctttttctttttctttttttt

SEQ ID NO: 23621 - DNA, 201 bp, Homo sapiens
ggcagagaaggagctatgctcaagtgcctgagtgaagggcagccccctccctcatacaactggacacggtaagggcccgagcctgaggaaggcctaacttkagactaggttcctcccctctcagggccaggatataccactatggaatgggacaacatattctgagcccccaaataaattggggtatgtgttcagatctct

SEQ ID NO: 23622 - DNA, 201 bp, Homo sapiens
gtccttctgtctctgtttcagattttgtcttggccacttcagccactttgtctctttgaattctcccccttcaataactcgcgcgcgggcgcgcgcgcgcgtgtgtgtgtgtgtgtgtgtgtgtctccaatacaatccctgacttacaatggttcaacctacaatttttctttttctttttctttttttttttttgagacg

SEQ ID NO: 23623 - DNA, 201 bp, Homo sapiens
tccttctgtctctgtttcagattttgtcttggccacttcagccactttgtctctttgaattctcccccttcaataactcgcgcgcgggcgcgcgcgcgcgtgtgtgtgtgtgtgtgtgtgtgtctccaatacaatccctgacttacaatggttcaacctacaatttttctttttctttttctttttttttttttgagacgg

SEQ ID NO: 23624 - DNA, 201 bp, Homo sapiens
tgttacagttgtttctgtgtctgcctctcctgattgaaggctccttgagggcagggactatgtgttatgtgtctcggtctcctcccttgagcctgacacayagtggcactcatttaatgtctgttgaaggaatgcatgggtgcaggcgcgcacgcagcaatgtcactcagacaaacacacatgataaagacactatcatgg

SEQ ID NO: 23625 - DNA, 201 bp, Homo sapiens
cagcccccttaccagtccctctttccttagccctggctcatgcagcccagcaccgcatctctgctacgtctttgttctcccgtctccctctccccatgccyaacacttgttcctggtccccgatctctgggcccctatgcttctgaggcaaccgttacccctgcttacgcctggcctctgatcccaccatgacccagccat

SEQ ID NO: 23626 - DNA, 201 bp, Homo sapiens
tcccaccatgacccagccatgccccaccatgtgcagctgccctgcctttgttcctgacttgccctttgcccttggtctccagagtgaagagcccgagggcygcagttactccacgctgaccacggtgagggagatagaaacacagactgaactgctgtctccaggctctgggcgggccgaggaggaggaagatcaggatga

SEQ ID NO: 23627 - DNA, 201 bp, Homo sapiens
tcctgctcaacacacacaccctgtcttaggctgggtcctctcctctttgcttcctaaacaagccaccttctccatctccttggtgtttgctcaccgtggtycctgatttagaatgcctttctaggcctctctccctcctaatcctacccaactcatgcatggggccctcccaaatgattcagtcccatagtgattgcccca

SEQ ID NO: 23628 - DNA, 201 bp, Homo sapiens
ggccctgccccacccctgacagggaaaggagcccaggcttgggaggcgcctcagcaccacagctctttgtctctccttaatgggttgagtttccgggtgargtctcctcccttctccctcccccatctcttgccctggggctgagggacccaaatccacgagacacccctccccccattaggatcctagtccctagctctt

SEQ ID NO: 23629 - DNA, 201 bp, Homo sapiens
agtgattcccctacctccatctccagccaaagctttgaggagggaaataaggcctagatgtgtggattggtggaggtatgggctgctccaactctgatttyattataggtcatgggcccagcctccagtcgtaggatactgagctcctacccctgccatcccctcacagtcccctaccacctgtgttttaattcccatctt

SEQ ID NO: 23630 - DNA, 201 bp, Homo sapiens
caggccatgggggcggtggctgctgagtctccgtgccaggcccagcccccagagacgcacctgttctgacctgctgagcaggttcccaggtttctgccgtygttgttggccacagcgtgggaagcagctctgggggagctcggagctcccgatcacggcttcttgggggtagctacggctgggtgtgtagaacggggccgg

SEQ ID NO: 23631 - DNA, 201 bp, Homo sapiens
ctgaggaggagctaagggtctggagcacagatggagcactcaatccttccaccttagtgaggctcagatccatgtgcctggatgttgccaagtatgcacaygcacacagcacacacatgctcttcagccgcactgccacctgcagccacacactcacacttgcagggccagcacggcacccacaccctccgggcctgtctc

SEQ ID NO: 23632 - DNA, 201 bp, Homo sapiens
ctgtccctctctgccccctgcaggccggtgccccgcgggtgagctggagacctcagacgtggtaactgtggtgctgggccaggacgcaaaactgccctgcytctaccgaggggactccggcgagcaagtggggcaagtggcatgggctcgggtggacgcgggcgaaggcgcccaggaactagcgctactgcactccaaata

SEQ ID NO: 23633 - DNA, 201 bp, Homo sapiens
gagaattgcttgaacccaggaggcggagattgcagtgagccgagatcatgccactgcactccagcctgggcaacagacggagactcagtctcacaagtagwtaaataaataaataaataaatacataaaataaaggtttttatagtttccctttattcacatataagttaataacatcagccttggagtaaaaataaaaac

SEQ ID NO: 23634 - DNA, 201 bp, Homo sapiens
cactgagcacagcggcatctacgtctgccatgtcagcaatgagttctcctcaagggattctcaggtcactgtggatgttcttggtaagcactggagcagargtccttggtaaggacctgggccaagggcttggtgggggcagcaggaagcaagacagagacagtgaattgggaaagtgtttattcagagggggctgggctg

SEQ ID NO: 23635 - DNA, 201 bp, Homo sapiens
ctgctgctgctgcagcagctacaacctgcacagagctgaggttgctctgggggctggaggctcctagcctgaggatcagatggtcctacctccactaccayccccattctggctcttctgtgtgtagactctccttaatggctcccaggaacctggaatgtttcatgtctctgaaaaaatccttggactgggaagtcagga

SEQ ID NO: 23636 - DNA, 201 bp, Homo sapiens
ggtgttggaagggtcactgggtctggctgtggagataggaggaggaaagcgttctggtcgcatctctcagagggtaccagagtacctttccccaggccttyctggccctactgcaaattcaccccccacccaaatcctgggccattagagctctgagccccagggccctgccccacccctgacagggaaaggagcccaggc

SEQ ID NO: 23637 - DNA, 201 bp, Homo sapiens
tggatgcttgggtagggaggcccaaggggttctcagcagattggtgagatgccacaggtccctgagccatgccaggctggccagcctgggtcctggaggcwatagtatgtgacagagcactagtccaaatgtggaagacctggagcccgatcccagaggatagacctctctgagcttctgtgtccttatctttacaaagga

SEQ ID NO: 23638 - DNA, 201 bp, Homo sapiens
atctctcagagggtaccagagtacctttccccaggccttcctggccctactgcaaattcaccccccacccaaatcctgggccattagagctctgagccccrgggccctgccccacccctgacagggaaaggagcccaggcttgggaggcgcctcagcaccacagctctttgtctctccttaatgggttgagtttccgggtg

SEQ ID NO: 23639 - DNA, 201 bp, Homo sapiens
actgctggcatcatttacaggtaggacttgcctgaaccatcaggacacttgcttctgagcccaacctggcactgacacacatgcacaaacacatagacacrcacgcacgcacacacatatcctcctttctttgactctgaactgaggatccagtctctcctgcccccagcttccagcagtgcccccagaaaagccagtata

SEQ ID NO: 23640 - DNA, 201 bp, Homo sapiens
atgtatgtgtacagagatacgtagggaacacatgatggtgggatatagcatgttacagttgtttctgtgtctgcctctcctgattgaaggctccttgaggkcagggactatgtgttatgtgtctcggtctcctcccttgagcctgacacatagtggcactcatttaatgtctgttgaaggaatgcatgggtgcaggcgcgc

SEQ ID NO: 23641 - DNA, 201 bp, Homo sapiens
atgaaagcagggtgctggggagcacagaggaagggcacctaatgctgcctggggtgggggtgggaggagggaggactcctgctggaaatgatgtctaagcrgagtcttaaatgatgagtaggtgctaccagacatagggaggagggcattccaggcagcgggtacggtgtgagcagaggtgaggaacaacaaggtgtgtgg

SEQ ID NO: 23642 - DNA, 201 bp, Homo sapiens
gggcacctaatgctgcctggggtgggggtgggaggagggaggactcctgctggaaatgatgtctaagcagagtcttaaatgatgagtaggtgctaccagayatagggaggagggcattccaggcagcgggtacggtgtgagcagaggtgaggaacaacaaggtgtgtggcttgctgggcagaggcagggacaacacactgt

SEQ ID NO: 23643 - DNA, 201 bp, Homo sapiens
ccaggaggcggagattgcagtgagccgagatcatgccactgcactccagcctgggcaacagacggagactcagtctcacaagtagataaataaataaatamataaatacataaaataaaggtttttatagtttccctttattcacatataagttaataacatcagccttggagtaaaaataaaaacccaagtgtaaatcta

SEQ ID NO: 23644 - DNA, 201 bp, Homo sapiens
tgcctcagactcccaagtagctgggattacaggtgtgtgccagcatgcccagctagttttttgtatttttagtagagatgggctttcaccatgttgaccaygctggtctcgaactgctgacctcgggtgatccgccagcctcggcctcccaaagtgctggaattataggcgtgagccaccatgcccggccttgtctaactt

SEQ ID NO: 23645 - DNA, 201 bp, Homo sapiens
atatgtgcatagcatgtatgtgtacagagatacgtagggaacacatgatggtgggatatagcatgttacagttgtttctgtgtctgcctctcctgattgarggctccttgagggcagggactatgtgttatgtgtctcggtctcctcccttgagcctgacacatagtggcactcatttaatgtctgttgaaggaatgcatg

SEQ ID NO: 23646 - DNA, 201 bp, Homo sapiens
ttttatatatttatgtgagtgcataaaatggacaagacagctgtgtctttttctaattgttgttaagccaacactcctataaccaccacaatattgctagyacctcaaaaacacccactacctccagttccctcaaggcatccttggcctttttccaagatctgaaatatctagagagtcagggagaggttgggtacacat

SEQ ID NO: 23647 - DNA, 201 bp, Homo sapiens
gccgtgggaccaaaccgtgggtgcccttagccaggatagatgatcgtaaactatgtctatgagtgagccctcctcatcgaaggtgttcatttccatctctstcttcaggacagctacagaacagtacacattttagaatgaaaatgaggagtcactggtaactgcggtacctaaaacataatttgctctgtgcatttcatg

SEQ ID NO: 23648 - DNA, 201 bp, Homo sapiens
atcttaaaaagagacacacatgagaataaccaatctcacattccagtcctgtaatcccagtatgtttgggctactgattctctttttaaaagtggcatctytcatttttaaaagagaaaatcctagatagtgactcctattatcatcaagtaatatatatcaaggccccaaggctaccttgtcacattttactctggcata

SEQ ID NO: 23649 - DNA, 201 bp, Homo sapiens
aggaatcccctttgttccagcaggaaacttgatgcctatccagaagcaaagttcacttggccgccctcaccgtggaaacgtgttgccacaccaaatgaacwtccccctcctgctgtcaaagagcagtcagtggccaccgctattgacctgagctctaattaggctggttttataatgaggaaaagagtgcgattctaatta

SEQ ID NO: 23650 - DNA, 201 bp, Homo sapiens
gccctcaccgtggaaacgtgttgccacaccaaatgaacatccccctcctgctgtcaaagagcagtcagtggccaccgctattgacctgagctctaattagkctggttttataatgaggaaaagagtgcgattctaattagtaaatttccatctctttctcaataggtatcctccagtcaaagcaatcagctatcctcatca

SEQ ID NO: 23651 - DNA, 201 bp, Homo sapiens
atcacactggttccattgccaaaaaaataactgtatcataaaactctagtaaaagtgatgatggttaagacaacaagagagcagaacgaggttttatttgstgctaatgacctgcattctctctcttaggtccgtggcactcaggtagttggttctgacatgactgtgacaattcagtttaccaatcctttaaaagaaacc

SEQ ID NO: 23652 - DNA, 201 bp, Homo sapiens
actgggcacaacatatagaaggcaatggcagccatagcttgcgccatgcatagcctggagtagacaaacctaaatgaactttcttccttctcacttctcayggactcatttaggtgaatgccaaagatgacgaaggtgtcctcgttggatcctgggacaatatctatgcctatggcgtccccccatcggcctggactggaa

SEQ ID NO: 23653 - DNA, 201 bp, Homo sapiens
aggctattggtgtgtatcctttggccagaataaccagccaagcatgtttacagtgatgcagggaatcaatccgttctatgactatttccttaactctccarttagttgctatcctgcccagcaaacacagctgagagaagctgcttaataagaaccaaaatactgagctatttgcatacctgaagaactagtgcaattacc

SEQ ID NO: 23654 - DNA, 201 bp, Homo sapiens
attcaggaaaatctcttactacagtgaggtacagtataggtaaaatcttcctgtcttgctatttgatctttattcctttttaagaaaattctggtattgcytgtggctagcagttctttctaagaagactgaactggtaccagactcctcccttgatagtgtaatctactttctgcagccttctgccctctccttgatcct

SEQ ID NO: 23655 - DNA, 201 bp, Homo sapiens
gtggaggtatgaatatgcttctgtttgaattgatgagtgtgaattacttgagggactttcaggtaaacctgtccaatagataatatgagtctgaagcttcrggaggaggtttgggttggacaggagataatttggatatcatacacacgtgggcaagctcactcagaaaaaggtaaatcaagtcagcagtggactgaggct

SEQ ID NO: 23656 - DNA, 201 bp, Homo sapiens
tgggaggccaagatgggaggatcgcttgaggccaggagtttgagacctagtctctaaaaaataaaaattaaaaattagatgggtgtggtggtgcacacctrtactcccagctacttgggaggctgaagtgggagaattgcttgagttcgggagttggaggttacagtgagcaatgattgtgccactgtactccagcctggg

SEQ ID NO: 23657 - DNA, 201 bp, Homo sapiens
tatttgatctttattcctttttaagaaaattctggtattgcctgtggctagcagttctttctaagaagactgaactggtaccagactcctcccttgatagygtaatctactttctgcagccttctgccctctccttgatcctggggtccaccttgtctcagaagaggggaaaccttagagggacagtcactatatgaggtc

SEQ ID NO: 23658 - DNA, 201 bp, Homo sapiens
tctaaaaaataaaaattaaaaattagatgggtgtggtggtgcacacctgtactcccagctacttgggaggctgaagtgggagaattgcttgagttcgggarttggaggttacagtgagcaatgattgtgccactgtactccagcctgggcaacagagcaagactccgtctttgaaaaaagaaaaaaaacaagctcatgtat

SEQ ID NO: 23659 - DNA, 201 bp, Homo sapiens
aggggtgagactgtcgcccaagtgaaaaagatagcagaagataagaaggaaaactgtttccagaaattgtcaaaagacagccaggtgaacaagattgtggyccgaggtggcacaggatgctgggctgaaaattacagcagcatgcacagcacttattgataggagaatgctcagctgtgctcctgagggcccttcagcctg

SEQ ID NO: 23660 - DNA, 201 bp, Homo sapiens
cagaaaatggttaagattaaaactgttcaatgcactgattcaaatatctttgggtggccttgaagctgctcttagcagagggaaagagacatccagccatktgagtgtcctgagggatgccaatgagaatgaatctgcccagaaaacccaagtctagagccccaggatatctccaggagccctcagatttggcttaatcca

SEQ ID NO: 23661 - DNA, 201 bp, Homo sapiens
tgcactgattcaaatatctttgggtggccttgaagctgctcttagcagagggaaagagacatccagccatgtgagtgtcctgagggatgccaatgagaatsaatctgcccagaaaacccaagtctagagccccaggatatctccaggagccctcagatttggcttaatccattctaataatctgtagatagcatatgcaca

SEQ ID NO: 23662 - DNA, 201 bp, Homo sapiens
ttagagggacagtcactatatgaggtctcctactattttgggtgcaaactaagtagtgtgaagcaccttcctgtgatacacctgagagctctttattttckaaatgcacgaggattcacattactttcgaggtcctaagactctggcctgactttggtaaatgattcattccttcttcttgggtacaggagccaatatgtt

SEQ ID NO: 23663 - DNA, 201 bp, Homo sapiens
aaacctctttttttggagtgaacggtcgtagatacatctgaggacccaggtgctcaatgggcattgtccttggcatttctaaatcaccaaggaactttttygcatttacccatatggattttaatttttgaaaaagttcatctatcaaaacaaatcatgattatgtaataataccttgttaccccattcttgtgtcagatt

SEQ ID NO: 23664 - DNA, 201 bp, Homo sapiens
gagcttctgggtctccaaccctatcagcttttatttaaaagtgttattgtctctttctatgattcatatcaggaatgaaatttctcagtttggaacagcakaaaaaggcagaagcctccggtgttccttgcaacctttccaattgtaacgcatatcaattagtaggagctctcggggtgacaactttgggagaatccactg

SEQ ID NO: 23665 - DNA, 201 bp, Homo sapiens
gccctttgtggtatgcactggtaagatataaggcaggagagaaaatagagaactcgaaaaataattatagatcatcctttaaattgtttttccagaacctrgcctccttttatgtcatgtgatttcctccaaagcttcagtatgtgggtatttgtcttctaacttgccaactatgctaagcagctgcagctctgacctccc

SEQ ID NO: 23666 - DNA, 201 bp, Homo sapiens
atctcagcctcaaataatctttatttaaagtactactaaatcaactagattcgcctttagaatattttcaaaacctgtttggccctatgatacgaatccartgttgttgaagaaaggggcatgtcagctccagagatctctagacgactgctctatggacagttaaagactttggcaacagcagacatgtgatgatggcta

SEQ ID NO: 23667 - DNA, 201 bp, Homo sapiens
acagtgatttctgcatttccatctgaggtatggggttcatctcactagggagtgccgcacagtgggcacaagtcagtgggtgcgtgcactgtgcgcgagcygaagcagggcgaggcattgcctcactcaggaagtgcaaggggtcagggagttccctttccgagtcaaagaaaggggtgacggacggcacctggaaaatgg

SEQ ID NO: 23668 - DNA, 201 bp, Homo sapiens
tcatttacattacagctaagaaagatggcactcatgtggtggaaaatgtggatgccacccacattgggaaattaattgtgaccaaacaaattggaggagayggcatgatggatattactgatacttacaaattccaagaaggtaatttactaccactgaatgaagatttatttgcccaagtccattgagtacttattcatt

SEQ ID NO: 23669 - DNA, 201 bp, Homo sapiens
tgaaaattgcatgcccaacctctccacctccttatcctcctccatgtggctcaatttccaaagcagttcctacctcctcacccctaagtggatttacttayggctcttcttgggctccaccctaaccctatcagactataatctatcagagcaaacattctgttttgttctctgatgtatcccatgtacctagatcacagc

SEQ ID NO: 23670 - DNA, 201 bp, Homo sapiens
cgaccatttctgtagggcgtggagtaaaactagggttggtttgaccagcactttcatcatttaatccttaaagacaccctacgatgtagatactgctattrtctcccttctgtagctgaggaatttgaggctttgagaggttgactggttacacaggttcagttacacagtttatgaaaacagagccaagattcagactca

SEQ ID NO: 23671 - DNA, 201 bp, Homo sapiens
attcatataggactgtaattccaggaggaaactagtggcaaaaactgagctgaggctcagaagatcagtcacatagataaggctactatggagggcttggrgacaagctagagttcagttgattaatggttggatgggaatcagcccagctcctgatggccactgggaggctggcggatgcatcccagtggaaggaaccat

SEQ ID NO: 23672 - DNA, 201 bp, Homo sapiens
catatcaggaatgaaatttctcagtttggaacagcagaaaaaggcagaagcctccggtgttccttgcaacctttccaattgtaacgcatatcaattagtargagctctcggggtgacaactttgggagaatccactgatttatattaatgaagagtgttactgtagtccaacagagtaaagtactaaattaccaactctaa

SEQ ID NO: 23673 - DNA, 201 bp, Homo sapiens
attgtagtgggccaaatatgctcatagtttctctttgactgcagaatctttatagaaagaatgatagactatatcctgtgtaatccatcacttaacacccraagaaatagagggttacagtaaaaatatagagaaaaaagccattttcttttcagccaccacattttaaaaaaactaaaacagttaaaactaaaataataa

SEQ ID NO: 23674 - DNA, 201 bp, Homo sapiens
ttctctttgactgcagaatctttatagaaagaatgatagactatatcctgtgtaatccatcacttaacacccgaagaaatagagggttacagtaaaaatayagagaaaaaagccattttcttttcagccaccacattttaaaaaaactaaaacagttaaaactaaaataataaataacaaaagatatatattgcttattta

SEQ ID NO: 23675 - DNA, 201 bp, Homo sapiens
gtccattgagtacttattcattgtcactcagagatgagttccagagaatgcactggcatttgcagcatttggtagcaacagcagaagtataaactttcacrtgtgaaagacacgtcacatatgcaatttttcattgtagttttctttgctagcttgctttgggcagaattctcattcacgtggcttgtaaaatgatttggt

SEQ ID NO: 23676 - DNA, 201 bp, Homo sapiens
agcagaagtataaactttcacgtgtgaaagacacgtcacatatgcaatttttcattgtagttttctttgctagcttgctttgggcagaattctcattcacstggcttgtaaaatgatttggtttaaagtcatacctaatttaacagaatatagaatatgttcttgctcacaagaaccttaattttaaataatcctattaga

SEQ ID NO: 23677 - DNA, 201 bp, Homo sapiens
ctgtgtctgagcacttattaatggttttgactatcactcctactacacatacacctcatagtttaatggtggaagctacagcacctgtccaagtgcacccygccatctgcaaccccctccattgaggtctcttgtgctatatcagactgtatttacacgtgacttctcagtgagacttgcaaaaccccttgccttcacagg

SEQ ID NO: 23678 - DNA, 201 bp, Homo sapiens
tcagatgcaagaatcgttcaggcaaagtgaaacacgtttcctcttccatacagccccctgctgtatccaactttttccttcccagacagtaaacccacaarctttatctgagtgtaccggaaacttctctatctttacaccttggctatccccctagaattccaccttggtcaaggccaacacatgaaaaaagacactgtg

SEQ ID NO: 23679 - DNA, 201 bp, Homo sapiens
aatagaaattaaaataactacttcacatttgtttagtactttaccaattatttccacatacattgttctattacattatcatggaagactacaacgtagayaatacaatattaataggacaatgcaatctctctaactcaggacaattaggtcgaaggccagtttcaattccaaaataatgtcatggtgggtttttgttaa

SEQ ID NO: 23680 - DNA, 201 bp, Homo sapiens
ggcatctaagaaagtaggacagtgtttcccagagtgtgttctctatgaacacctgtcatgtgagattctccttgggggaaaaaagttccatcatcaaatayagttggatcatgctgtgttttgtgtctcttctcatagaggcccaaggcacattaatatataaaaggctatgagtagacacgtagtcaaaaaatgaatctt

SEQ ID NO: 23681 - DNA, 201 bp, Homo sapiens
ctaataatggcatctaagaaagtaggacagtgtttcccagagtgtgttctctatgaacacctgtcatgtgagattctccttgggggaaaaaagttccatcrtcaaatacagttggatcatgctgtgttttgtgtctcttctcatagaggcccaaggcacattaatatataaaaggctatgagtagacacgtagtcaaaaaa

SEQ ID NO: 23682 - DNA, 201 bp, Homo sapiens
ttcttgggtaactactgggctccagacgctgttcttaaagcactttacatggttgcattttcaaccaccaacaaccccacaaggtaaagagtactggcatyactttacagatgagaaaactgaagcacagagaggttctataactcctccaaggccatacagccagcaaatggcggagctgggcttccaaccccagcaggc

SEQ ID NO: 23683 - DNA, 201 bp, Homo sapiens
ggagtcactggtaactgcggtacctaaaacataatttgctctgtgcatttcatgtttgctatttttttgaatcttaaaaagagacacacatgagaataacsaatctcacattccagtcctgtaatcccagtatgtttgggctactgattctctttttaaaagtggcatctctcatttttaaaagagaaaatcctagatagt

SEQ ID NO: 23684 - DNA, 201 bp, Homo sapiens
ttccaggaggaaactagtggcaaaaactgagctgaggctcagaagatcagtcacatagataaggctactatggagggcttggagacaagctagagttcagytgattaatggttggatgggaatcagcccagctcctgatggccactgggaggctggcggatgcatcccagtggaaggaaccatgacccaataagactgtca

SEQ ID NO: 23685 - DNA, 201 bp, Homo sapiens; identical to SEQ ID NO: 4940

SEQ ID NO: 23686 - DNA, 201 bp, Homo sapiens
atagaaagaatgatagactatatcctgtgtaatccatcacttaacacccgaagaaatagagggttacagtaaaaatatagagaaaaaagccattttctttycagccaccacattttaaaaaaactaaaacagttaaaactaaaataataaataacaaaagatatatattgcttatttatcattgagaagttgtataaatat

SEQ ID NO: 23687 - DNA, 201 bp, Homo sapiens; identical to SEQ ID NO: 4941

SEQ ID NO: 23688 - DNA, 201 bp, Homo sapiens
ctgtgtaatccatcacttaacacccgaagaaatagagggttacagtaaaaatatagagaaaaaagccattttcttttcagccaccacattttaaaaaaackaaaacagttaaaactaaaataataaataacaaaagatatatattgcttatttatcattgagaagttgtataaatatgcgtatttatttattattgagaat

SEQ ID NO: 23689 - DNA, 201 bp, Homo sapiens
aaaataatgtcatggtgggtttttgttaacttttattgcatagaatgtttcaaatggcactactgagtttaattctatctcaatcaatgcttagtgtccgstctatgcctgcaattggtttggtgctggcgattccagcagtgagcaggactcagttcctgtcctggtccgagtgacaggattattgtgcagaggggtctt

SEQ ID NO: 23690 - DNA, 201 bp, Homo sapiens
aattctatctcaatcaatgcttagtgtccgctctatgcctgcaattggtttggtgctggcgattccagcagtgagcaggactcagttcctgtcctggtccragtgacaggattattgtgcagaggggtctttggaaacaataagtaggggcatttagtccaactgattcagaaaaagacttgagaagagaagtcgtggacc

SEQ ID NO: 23691 - DNA, 201 bp, Homo sapiens
tgactttgcagaatttataacataggaataatgacggcaccctcctcctggggaggtctgaagcttgtattatagaaacaccccaacaagtgcagtacacrgtgcatccattaatgtgactttctctctggtggattgtatttttgcctgtcattatctctggatctcccccaggtcaagaagaagagagattggccctag

SEQ ID NO: 23692 - DNA, 201 bp, Homo sapiens
gattatacaggaaagttttacttatcactgccttagtttttccccacttatagtaccactgtgattttatgtttttcctgaggcattggcttgttgaagtkatattgcaacagagaatcaaaagatcacttagaaaaagtaacatgttagaaaacatcatgcttagaattaaatgtctaaagtataccagtatagatgata

SEQ ID NO: 23693 - DNA, 201 bp, Homo sapiens
attaatcagcaccctttttctcaccctttgttatcaacatataagcaggctagaaagacagtattttattccaatgtgaaacaaaactgctgatctggagktcttatgttataaattcccacatcataccttcaactatatatatgtcctgaaactagcatattttgagaataaaatgggaaatgacatttaaaggacacc

SEQ ID NO: 23694 - DNA, 201 bp, Homo sapiens
ggagcctcacctcaggggggctacagttttgcacagagcggccccactgttgacgccaacagaggccatggtctgagctccttagctgttcaggagagggmtggggactcaggaacctcagaagggcagagcagggcagagtaattagatcccagggtagcaaatgaaaccccaagtgggcaaatgcaaagtagcagatcc

SEQ ID NO: 23695 - DNA, 201 bp, Homo sapiens
gccaccacattttaaaaaaactaaaacagttaaaactaaaataataaataacaaaagatatatattgcttatttatcattgagaagttgtataaatatgcrtatttatttattattgagaattttataaatatatccacttaatttttatcccagttatggaaggtattatagcaggtggtctcatattcatttttccaca

SEQ ID NO: 23696 - DNA, 201 bp, Homo sapiens
catataaagaattgtaggcctttataaggcctttggtttttattttgagtgagctgaggagcctttagagagttttgagcagaaatgtggcataatctaasttaggttttgaaaagaccactggctgctgtgttgagaagagactaaagaggaagtagggcggaaggttagagactggtaggatgcttctgcaatcactcc

SEQ ID NO: 23697 - DNA, 201 bp, Homo sapiens; identical to SEQ ID NO: 4952

SEQ ID NO: 23698 - DNA, 201 bp, Homo sapiens; identical to SEQ ID NO: 4955

SEQ ID NO: 23699 - DNA, 201 bp, Homo sapiens; identical to SEQ ID NO: 4957

SEQ ID NO: 23700 - DNA, 201 bp, Homo sapiens; identical to SEQ ID NO: 4960

SEQ ID NO: 23701 - DNA, 201 bp, Homo sapiens; identical to SEQ ID NO: 4961

SEQ ID NO: 23702 - DNA, 201 bp, Homo sapiens
tctgtaactgtaaatcccaaagatgcttaacttatatagagttttctcacccctgaatctgttatcacagagtctctgttcctgggttctttgtttgactyagcccctaattattttgatatcactttcaagtattaatagtttggttatgataggtaccatattccctgaagtacttcatgttcgacaatgtgtgtaaaa

SEQ ID NO: 23703 - DNA, 201 bp, Homo sapiens
ggccaacctcttcccatcttccccttcatgttctcctcctcagtctctggtaaccactgttctgctctttgcttctatggtataataatttttttttttttagtgtctacatgtgagtgaaatcatgtagtatttgtctttccatgtctggtttatttcacttaccatgatgcccttcctccaagtctaattcatgttgtt

SEQ ID NO: 23704 - DNA, 201 bp, Homo sapiens
tctcttttccatctgatggtttgcaaatgtttgcaaacagctgtctcatcttccttgaatcttttctacctggggacaaatatctgtcctgactttatttycctctcctctaacatggtttcagctctctctctctctctcccacacattccaatttgtcactactcctcttaaagtgtgacacccagaatggatcccaat

SEQ ID NO: 23705 - DNA, 201 bp, Homo sapiens
tccattctcagtcttgtcagtgtggcttcaaatccaatgttgctcccaccggtttgaaaatctcccttactttctgactgccgttttttttttttttttttggacgtcagtacgaaacagttttggttgtcttgttattgctgagttgttggcttttccagctcctctgacctcagagtagcactctatcttagagttcaa

SEQ ID NO: 23706 - DNA, 201 bp, Homo sapiens
atccattctcagtcttgtcagtgtggcttcaaatccaatgttgctcccaccggtttgaaaatctcccttactttctgactgccgttttttttttttttttttggacgtcagtacgaaacagttttggttgtcttgttattgctgagttgttggcttttccagctcctctgacctcagagtagcactctatcttagagttca

SEQ ID NO: 23707 - DNA, 201 bp, Homo sapiens
tatccattctcagtcttgtcagtgtggcttcaaatccaatgttgctcccaccggtttgaaaatctcccttactttctgactgccgttttttttttttttttttggacgtcagtacgaaacagttttggttgtcttgttattgctgagttgttggcttttccagctcctctgacctcagagtagcactctatcttagagttc

SEQ ID NO: 23708 - DNA, 201 bp, Homo sapiens
caacagccacaaccgttacaccatcacagcttatctctcagccaacatcaccttctacaccggggtcccgaaggcagaattcaagaaggagacgttcgacrtgacgctggagcccttgtcctgtaagctaacaatggtgtggttctttgtgagactcgctgtctggcccctgtcttgctaggtgttaatgcccgttatagc

SEQ ID NO: 23709 - DNA, 201 bp, Homo sapiens
aatgtcatcatttacagactgaatttggtgctgattatgttcaccattactaaaaatattgggaaatgagctatgcttggtgaaacaaagggcattttttwaaaatttggctgattaaatgtagtttagaaacaaaataaacttgcataaacttgcaagtgtttggaaacagtctggtttggtaatagtcactatgtttaa

SEQ ID NO: 23710 - DNA, 201 bp, Homo sapiens
gaccgcctttggaggcagaagagcagttccacccaataactctaatgcagcggaagatgacctgcccacagtggagcttcagggcgtggtgccccggggcrtcaacctgcaaggtatgagcataccccccttccccaccactctgggtccaggcacagccgggccctggcccctcttccctgcaggtaaacatcctctgtc

SEQ ID NO: 23711 - DNA, 201 bp, Homo sapiens
gttgatgagagtggaagataaatgtgggagcctctgtgctcctacttctcaggcccacagctgtagcttctgggggcatctgtggttgcatccatgagacrccttcctgccctggaagcaggaacccaggcttctggcagtgaccctgaggagtgacatctcatgcagcccttatccaggtcttagagcccttccctagtc

SEQ ID NO: 23712 - DNA, 201 bp, Homo sapiens
ctggaatctgtgggataaatgcaaggcctcacttataccctctggggcaactttattgcccataaagggctctccgcatttctttcaaattacaatgctcrtagcttctgcatctcatcatttaagagatgccttattgcagatgcaataaacaacagagaaaataatcttagtgcttttgaaacaacgcaagcacaaaac

SEQ ID NO: 23713 - DNA, 201 bp, Homo sapiens
tacacataaaagtttcttcttgaactaaccttctctaaattgcctgaaggctccctttatttaaggttttatgagagcaagaaaatgaaaaatatgactgygaaaatgaaatgaaaatatgactatgcagatatggaattatgctttcagcaataaggaaaagggagctttgcagattcctaaaataatgtgatgcaaaca

SEQ ID NO: 23714 - DNA, 201 bp, Homo sapiens
cgtcctcaactgatggtttagcgataacttaaaaggtgatgctgcaaatgattctttgctggatttcagaaaataaagaagctattccagcaaaaaaaaaagtttctatttttacctgtattctgtcagggatcacagtatatgtagttttgaagatgaatgttttagagtcagaaagacctggatttatatccaacttcc

SEQ ID NO: 23715 - DNA, 201 bp, Homo sapiens
ttgagatataatgagtgccccaaacaaagtacatgacagtgactggctacactgtgagacttaactgtagtttcatttagtgctgtaaatatcacaaacttcattaaggtggaaaatgggaacagactatgtgttctaattattgctgaaccctgaccattttcccctccatgtccacaaccgagcacgttctctctccag

SEQ ID NO: 23716 - DNA, 201 bp, Homo sapiens
taaattgtagcaaatgcctagagctttcaaaaccattatcagagaggccgggtgcagtggctcacacctgtaatcccagcactttggaaggccaaggtggstggatcacttgaggtcaggagtttgggatgaacctgaccaacatggtgaaaccctgtttctactaaaaataaaaaattagccaggctgtagtggtgcgtg

SEQ ID NO: 23717 - DNA, 201 bp, Homo sapiens
cctgaactcaggaggtggaggttgcagtgagccaagatcgtgccactgcactccagcctgggggacagagcaagacttcatctcaaaaaaaaaaaacactrtagtgttttctttggaaactaaaagctttggcacttttcctattcctagggtagtaaaggtaattttcatggaaaagaatagtcagtgtaaaggactgaa

SEQ ID NO: 23718 - DNA, 201 bp, Homo sapiens
tgtggagcatggatctaaatgatccatctcagaaacaggccctctgctggtgcctctcgcccaagttaggaaagtcttttgggggctgtccagaatgaatrgtgtgctttgctttcccattcaaaaagatacacgcgctgacataggccgcttcttaaaacgctgtctcctgtaatctcagcactttgggaggctgaggtt

SEQ ID NO: 23719 - DNA, 201 bp, Homo sapiens
tgcgatgatcttggttcactgcaacctttgcctcctgggttcaagcaatcctcctgcctcagcctcccgagtagctgggattacaggcacatgccaccacrccaggcaaatttttgtatttttagtagagacgggatttcactatgttggccaggctgatctcaaactcctgacctcaggtgatccacccacctcggcctg

SEQ ID NO: 23720 - DNA, 201 bp, Homo sapiens
tggagtgcaatgcgatgatcttggttcactgcaacctttgcctcctgggttcaagcaatcctcctgcctcagcctcccgagtagctgggattacaggcacrtgccaccacgccaggcaaatttttgtatttttagtagagacgggatttcactatgttggccaggctgatctcaaactcctgacctcaggtgatccaccca

SEQ ID NO: 23721 - DNA, 201 bp, Homo sapiens
agaacccactcattctgcaaaagcctccactttctttttttttatttttattttttgagatggaatctcgctctgacacccaggctggagtgcaatgcgaygatcttggttcactgcaacctttgcctcctgggttcaagcaatcctcctgcctcagcctcccgagtagctgggattacaggcacatgccaccacgccagg

SEQ ID NO: 23722 - DNA, 201 bp, Homo sapiens
acttcatccattctatctagagacacgataaactgaccatttgtgctcatctgaggctgtaaccaatagagggccagaacctcactcatctaaacaattawttgcaaggggagccatggaggaagcagggtccaggcttaggtccaaagacagcaatacgagagcgggtcattccaaaaggcaggacctgggggccaaggt

SEQ ID NO: 23723 - DNA, 201 bp, Homo sapiens
caggagatatgtttggaagctgtagagatactccaggctagaagaggaatagaccagagggattttagcccctggaggtatggggctcatttctcttgttscagcttcctctgagcacctgagcaatccttcaacattataggttccaggatgtattaataacaacactttataaattaagccacttaagaaaatgctttt

SEQ ID NO: 23724 - DNA, 201 bp, Homo sapiens
tgagagtggaagataaatgtgggagcctctgtgctcctacttctcaggcccacagctgtagcttctgggggcatctgtggttgcatccatgagacgccttyctgccctggaagcaggaacccaggcttctggcagtgaccctgaggagtgacatctcatgcagcccttatccaggtcttagagcccttccctagtctctgg

SEQ ID NO: 23725 - DNA, 201 bp, Homo sapiens
gagcctccaccaaggagatggtggaggtatgaatatgcttctgtttgaattgatgagtgtgaattacttgagggactttcaggtaaacctgtccaatagayaatatgagtctgaagcttcgggaggaggtttgggttggacaggagataatttggatatcatacacacgtgggcaagctcactcagaaaaaggtaaatcaa

SEQ ID NO: 23726 - DNA, 201 bp, Homo sapiens
gtgagggtaggtagtccttgcttctcgtgaatcctttgctgtgagtcatttggaaagccaatgactgctgtgcagcattcagaatggcagtgtttcttggrtaactactgggctccagacgctgttcttaaagcactttacatggttgcattttcaaccaccaacaaccccacaaggtaaagagtactggcatcactttac

SEQ ID NO: 23727 - DNA, 201 bp, Homo sapiens
ctacctatgagtcctgagggactctgagcaaggaaagcctgcttaccccaggggaccctaggaggggacaccttcagccctgctcccatagctgactctcsatcccctcgtggctactttcacagaggattgtggccgtgggaccaaaccgtgggtgcccttagccaggatagatgatcgtaaactatgtctatgagtgag

SEQ ID NO: 23728 - DNA, 201 bp, Homo sapiens
gggagaacccactcattctgcaaaagcctccactttctttttttttatttttattttttgagatggaatctcgctctgacacccaggctggagtgcaatgmgatgatcttggttcactgcaacctttgcctcctgggttcaagcaatcctcctgcctcagcctcccgagtagctgggattacaggcacatgccaccacgcc

SEQ ID NO: 23729 - DNA, 201 bp, Homo sapiens
gggccaatattcaacattcttaaagaaaagaattttcaacccagaatttcatattcagccaaactaagcttcataagtgaaggagaaataaaatactttayagacaagcaaatgctgagagattttgtcaccaccaggcctgccctaaaagagctcctgaaggaagcgctaaacatggaaaggaacaaccggtaccagccg

SEQ ID NO: 23730 - DNA, 201 bp, Homo sapiens
aacagcggatctctcggcagaaactctacaagccagaagagagtgggggccaatattcaacattcttaaagaaaagaattttcaacccagaatttcatatycagccaaactaagcttcataagtgaaggagaaataaaatactttacagacaagcaaatgctgagagattttgtcaccaccaggcctgccctaaaagagct

SEQ ID NO: 23731 - DNA, 201 bp, Homo sapiens
aaaagcaaggctcaagacctacgtgaagaatgcagaagcctcaggagccgatgcgatcaactggaagaaagggtatcagcgatggaaaatgaaatgaaagmaatgaagcaagatgggaagtttagagaaaaaagaataaaaagaaaccagaaaagcctccaagaaatatgggactatgtgaaaagaccaaatctacgtctc

SEQ ID NO: 23732 - DNA, 201 bp, Homo sapiens
gtaggtctttaagggtccccaggtgattgtgatatagagccatgactgagaactcttcaatcagaagtcctggaagcaaggcacagcacttacgcatctgyaaagagacttccaaatagaagtgctgcccaagacagaggctttcccagcctcttggtcttcaaggtccagagcaagctgctgcagatccatcgcaggtgt

SEQ ID NO: 23733 - DNA, 201 bp, Homo sapiens
aaaactctttcaagaatgaacaaaacctggggtcgcctatggctctgcccccctacttaatgccaacatcaaatacctgttgcgtctacttcctgcttccrctggcacccctccacttaccttcccccgagagtcagtcaaagacaccatcatgcctcccttgagcacttcagcaccctctgactggtttccttgctccac

SEQ ID NO: 23734 - DNA, 201 bp, Homo sapiens
agtgaataagttttgctcttgaaggttctcctgcttacaatcaaagtaatttgcagacttgcctgatttgtatgtttcttcaagtcaagaataattctaakggattactcctgtcccttcagctataagataacagagtgagaacaaaaatggcttgtgaaatcaacctaacagagtatttcttctctcttctcataggtc

SEQ ID NO: 23735 - DNA, 201 bp, Homo sapiens
caagtgtttggaaacagtctggtttggtaatagtcactatgtttaaaccctgatgcagatgatgctgtgtatctggacaatgagaaagaaagagaagagtwtgtcctgaatgacatcggggtaattttttatggagaggtcaatgacatcaagaccagaagctggagctatggtcaggtgagccacttaaaatttgttatt

SEQ ID NO: 23736 - DNA, 201 bp, Homo sapiens
atggaatctggtggtcacagggtactttcttggctccggatgccttgctttgacttccatatgggatctccctgtgttccttacccactgctccagtaccygtgttatcctgcctacctggctttgtgaacagcttccctgactccggagaattacatgcccagtgctcaggcttccccgcctgcatttctaatgtcctgc

SEQ ID NO: 23737 - DNA, 201 bp, Homo sapiens
tgaaaagcaaggctcaagacctacgtgaagaatgcagaagcctcaggagccgatgcgatcaactggaagaaagggtatcagcgatggaaaatgaaatgaawgaaatgaagcaagatgggaagtttagagaaaaaagaataaaaagaaaccagaaaagcctccaagaaatatgggactatgtgaaaagaccaaatctacgtc

SEQ ID NO: 23738 - DNA, 201 bp, Homo sapiens
actctagaaagaagagcgcctctcctcctccaaaggaacgcagttcctcaccagcaaaggaacaaagctggacggagaacgactttgacgagctgagagamgaaggcttcagacgatcaaattactctgagctacgggaggacattcaaaccaaaggcaaagaagttgaaaactttgaaaaaaatttagaagaatgtataa

SEQ ID NO: 23739 - DNA, 201 bp, Homo sapiens
gggaaaaaacagagcagaaaaactggaaactctagaaagaagagcgcctctcctcctccaaaggaacgcagttcctcaccagcaaaggaacaaagctggayggagaacgactttgacgagctgagagaagaaggcttcagacgatcaaattactctgagctacgggaggacattcaaaccaaaggcaaagaagttgaaaac

SEQ ID NO: 23740 - DNA, 201 bp, Homo sapiens
actgcctcctcaagtgggtccctgacccctgacccccgagcagcctaactgggaggcaccccccagcaggggaacactgacaccttacacagcagggtatwccaacagacctgcagctgagggtcctgtctgttagaaggaaaactaacaaacagaaaggacatccacaccaaaaacccatctgtacatcaccatcatcaa

SEQ ID NO: 23741 - DNA, 201 bp, Homo sapiens
gaaggggcagactgcctcctcaagtgggtccctgacccctgacccccgagcagcctaactgggaggcaccccccagcaggggaacactgacaccttacacrgcagggtattccaacagacctgcagctgagggtcctgtctgttagaaggaaaactaacaaacagaaaggacatccacaccaaaaacccatctgtacatca

SEQ ID NO: 23742 - DNA, 201 bp, Homo sapiens
atgcagctggagatctgagaaggggcagactgcctcctcaagtgggtccctgacccctgacccccgagcagcctaactgggaggcaccccccagcaggggmacactgacaccttacacagcagggtattccaacagacctgcagctgagggtcctgtctgttagaaggaaaactaacaaacagaaaggacatccacaccaa

SEQ ID NO: 23743 - DNA, 201 bp, Homo sapiens
cattgcctcactcgggaagcacaaggggtcagggagttccctttcctagtcaaagaaaggggtgacggatggcacctggaaaatcgggtcactcacacccraatactgcgcttttccgacgggcttaaaaaacggcgcaccacgagattatatcccgcacctggctcggagggtcctacgcccacggagtctcgctgattg

SEQ ID NO: 23744 - DNA, 201 bp, Homo sapiens
atgagtgacgcagaagactggtgatttctgcatttccatctgaggtaccgggttcatctcactagggagtgccagacagtgggcacaggtcagtgggtgcrcgcaccgtgcgcgagccaaagcagggtgaggcattgcctcactcgggaagcacaaggggtcagggagttccctttcctagtcaaagaaaggggtgacgga

SEQ ID NO: 23745 - DNA, 201 bp, Homo sapiens
cagcaatccaggtaagacaaaatccacatacacacacccaaccatggtcttaccctggcctttgcaatctatgtcctgccatcccacaccatcacctgtggccagggagggagggttgagttgccaaaggaggaaggggagcctggaggctactctaagagaggaatacagcccacctacagggttgatgggaatgcctgg

SEQ ID NO: 23746 - DNA, 201 bp, Homo sapiens
ctgttggatttggaggctggcaagctgtggacagcaccccccaggaaaatagcgatggtaaaactgtgtcctccctctgggaacttgcttcattgctgatytttgttttgcttttatgcttgcatttgatgtgtgggaaccacgcccattgggaggcaacatctgaagtgtgcttcctgggcacatgtacagtattagcta

SEQ ID NO: 23747 - DNA, 201 bp, Homo sapiens
gtcaggaagaaagtcccctacaagaagggttttttcactctgtgtttattaaatgctggtgatgtgtttagctgtggtctgtcctttcctgtagttttacratgccttggaataccagcaagaattgttaccaattatttctctgcccatgataatgatgccaatttgcaaatggacatcttcctggaagaagatgggaac

SEQ ID NO: 23748 - DNA, 201 bp, Homo sapiens
gtgttttctaaggaactaccactgctggaatgaagcatggatgacaaggcctgaccttcctgttggatttggaggctggcaagctgtggacagcacccccyaggaaaatagcgatggtaaaactgtgtcctccctctgggaacttgcttcattgctgatctttgttttgcttttatgcttgcatttgatgtgtgggaacca

SEQ ID NO: 23749 - DNA, 201 bp, Homo sapiens
tacagagtcaccctcagtgccatgaatcttgcagtatctggacagaattggagatgacaaactcacaccgcccttcctctgtgcaatgcaggcatgtatcrgtgtggccccgcctcggttcaagccatcaagcacggccatgtctgcttccaatttgatgcaccttttgtttttgcagaggtaagcaggaagctggaggaa

SEQ ID NO: 23750 - DNA, 201 bp, Homo sapiens
cagccagaaacagaatgagagtggcaatcgttttattgataagaccctgggtgaacagggctgaaaatcaagaaaggaaaatgggaacgggaggcccgtgrcagctgccactgttgtttggggcattaagatcaagtcctttaaggagggggacccttgaatctctaccagactccagtttggacttccaaggttgttctg

SEQ ID NO: 23751 - DNA, 201 bp, Homo sapiens
tgataatgatgccaatttgcaaatggacatcttcctggaagaagatgggaacgtgaattccaaactcaccaaggattcagtgtggtgagtttgattgacartggcattggctgatgtcacattatagtaatgttacacatttaccacaagatagactcaatctgatgtttctgttctattttgaggaccattcaacagcac

SEQ ID NO: 23752 - DNA, 201 bp, Homo sapiens
cctcttcctcctggcagtaggtcacatagccacagttagcccaaaagaagtccagggaagcaagcgatgggcatggtggcatggcattgtcttctctcctrtgagaggtaggacttatcacaaggacagaggagggagaaaaatggttgcttcttagacagtttattatctcagcctcaaataatctttatttaaagtact

SEQ ID NO: 23753 - DNA, 201 bp, Homo sapiens
gtgtcactcaatccacgagagttgtgtgtttcaagaggaaagcatgaccaatgttattaaatataactaggagatgcagtgagataggaacttcccactggagtcaacagttgggggacactggttgaactcgggtagattccaaattttaatggtctaaaagtcaaggagatgtgaggaaatgggtgtagtcaatttgga

SEQ ID NO: 23754 - DNA, 201 bp, Homo sapiens
cggggtttcaccaagttcgccaggatggtctcgatctcctgacctcgtgatctgcctgccttggcctcccaaggtgctaggattacaggcgtgagccaccragcccggccgtcctccatacattttttatctttgagcttgtcatttactgagtcttcacaatgtgccaacagtgtgctctgtgtttgcattagttttatg

SEQ ID NO: 23755 - DNA, 201 bp, Homo sapiens
ctgtcaccaggctgaagtgcagtggcacaatctcagctcactgtaacctccatatcccagattcaagcgattctcctgcctcagcctcccaagtagctggractacaggcacccgccaccacacccagctaatttttgtatttttagtagagacagggtttcatcatgttggcaaggctggtcttgatgtcttgaccttgt

SEQ ID NO: 23756 - DNA, 201 bp, Homo sapiens
ctggtgtgtagtgggtacatagtgaaattaatatctcttgaaccaatcaaaaatgggctgcactcagagaaagatgggagcatgggcaaacagctgacatygaagggcgtctaggcacggaacccgtggtagttgaacctgaaattcatcagtgtcataaacaaagactgctgtaactacctcaccacattattaaatctt

SEQ ID NO: 23757 - DNA, 201 bp, Homo sapiens
aacagacttccctgcattgcattacatgctagcccctgccctatcttttcttctgtcttacaacctagatcacttttttttttttttttttagacagggtytcactctgtcttccaggatggagtgcagtggtgcaatcatggctcactgcagccttgatctcccgggctcaagtgatcctcccactcagcccctcaagta

SEQ ID NO: 23758 - DNA, 201 bp, Homo sapiens
cagaagtgctcagaaagggctttctgctaactaatgatggcaaacgtggtctgtgtgatggggtggcatctactttctgaaaatttttaattttaatttttgttgttttcgttttgttttgttttataacttgtgttttatttttgccaaatttggtttcattccctgcctgttccatttggaggtactacactaaaaaaa

SEQ ID NO: 23759 - DNA, 201 bp, Homo sapiens
ccagaagtgctcagaaagggctttctgctaactaatgatggcaaacgtggtctgtgtgatggggtggcatctactttctgaaaatttttaattttaatttttgttgttttcgttttgttttgttttataacttgtgttttatttttgccaaatttggtttcattccctgcctgttccatttggaggtactacactaaaaaa

SEQ ID NO: 23760 - DNA, 201 bp, Homo sapiens
cccagaagtgctcagaaagggctttctgctaactaatgatggcaaacgtggtctgtgtgatggggtggcatctactttctgaaaatttttaattttaatttttgttgttttcgttttgttttgttttataacttgtgttttatttttgccaaatttggtttcattccctgcctgttccatttggaggtactacactaaaaa

SEQ ID NO: 23761 - DNA, 201 bp, Homo sapiens
acccagaagtgctcagaaagggctttctgctaactaatgatggcaaacgtggtctgtgtgatggggtggcatctactttctgaaaatttttaattttaatttttgttgttttcgttttgttttgttttataacttgtgttttatttttgccaaatttggtttcattccctgcctgttccatttggaggtactacactaaaa

SEQ ID NO: 23762 - DNA, 201 bp, Homo sapiens
gaacccagaagtgctcagaaagggctttctgctaactaatgatggcaaacgtggtctgtgtgatggggtggcatctactttctgaaaatttttaattttaatttttgttgttttcgttttgttttgttttataacttgtgttttatttttgccaaatttggtttcattccctgcctgttccatttggaggtactacactaa

SEQ ID NO: 23763 - DNA, 201 bp, Homo sapiens
ggaacccagaagtgctcagaaagggctttctgctaactaatgatggcaaacgtggtctgtgtgatggggtggcatctactttctgaaaatttttaattttaatttttgttgttttcgttttgttttgttttataacttgtgttttatttttgccaaatttggtttcattccctgcctgttccatttggaggtactacacta

SEQ ID NO: 23764 - DNA, 201 bp, Homo sapiens
tgcttgacaggtctcagtttctgtgacttctactaacaaagagtgtgacccaacaagataacccattccatggtcaggtagctctaacagtaaggaaacakgtttttctaccatttgatcctgccaatgatcctaattctgccatctggactgacagaaagtaaggcccatctcttttccatctgatggtttgcaaatgtt

SEQ ID NO: 23765 - DNA, 201 bp, Homo sapiens
gatgaatggtctccaatgaacagataacgttcaaccagtagagatggatggagagaccccttcagatactaggaagaaaatgttagcaagggctagagggraggtggacggcagtatgtagagcagtgagaagcgtgccttggctggggtggaggctgggagcagggatgagtaagggtaacctgaaaaagatagcttgag

SEQ ID NO: 23766 - DNA, 201 bp, Homo sapiens
ctgtcacaaggatgtgtcactgtagggctttctcacttacgaagtgggtattgattctttgcaggatcctgtgtggtaagtagggcagccattactcatgsacttttacaagttaggacacagggtaaggacagctttcagtgacaaagccacagctagaactccggtctgctgacttcaaatctagacattttctacttt

SEQ ID NO: 23767 - DNA, 201 bp, Homo sapiens
agaggacaggtctgtgcggctgtccatccagtcttcccccaaatgtattgtggggaaattccgcatgtatgttgctgtctggactccctatggcgtacttygaaccagtcgaaacccagaaacagacacgtacattctcttcaatccttggtgtgaaggtaagaggcagacatttagttttctcatttaaaaattcaccta

SEQ ID NO: 23768 - DNA, 201 bp, Homo sapiens
catttgaccagtagttttcatgatgcctctccagtgatcaccagaaatctctgcccaaatggctcaagagacttggcagaggaaggccgagggttgatgakagtggaagataaatgtgggagcctctgtgctcctacttctcaggcccacagctgtagcttctgggggcatctgtggttgcatccatgagacgccttcctg

SEQ ID NO: 23769 - DNA, 201 bp, Homo sapiens
caaagcagctactccattctgtattcccactagcaatacacaaaagttccaacttcatattcttgcaaataacttttattttctgttttttttttttttttaattattattgtagccatcctaatgggtgtgaagtggtatttcatggtgggattaattttcatttctctaatgaccaatgacgttgaacatctttttgtg

SEQ ID NO: 23770 - DNA, 201 bp, Homo sapiens
actgtattcctctagcctgggtgacagagtgagacttggtctcaaaaataaataaataaaaataattaacatccttattaaaatatgcttcacggcctggygaggtggctcacacctgtaatcccagcaatttaggaggctgaggcaggtggatcacaaggtcaggagatcaagaccatcctggctaacacagtaaaaatc

SEQ ID NO: 23771 - DNA, 201 bp, Homo sapiens
atcaggagtttgagaacagcctgaccaacacggtgataacctgtctctactaaaaatacaaaaaaattagctgggcgtggtggtgcatgcctgtaatcccygctacttgggaggctgaggcaggagaatcacttgaacctgggagacagaggttgcagtaagccaagatcatgccactgtattcctctagcctgggtgaca

SEQ ID NO: 23772 - DNA, 201 bp, Homo sapiens
atcccagcactttgggaggccgatgcaggaggatcacttgagatcaggagtttgagaacagcctgaccaacacggtgataacctgtctctactaaaaatasaaaaaaattagctgggcgtggtggtgcatgcctgtaatccccgctacttgggaggctgaggcaggagaatcacttgaacctgggagacagaggttgcagt

SEQ ID NO: 23773 - DNA, 201 bp, Homo sapiens
agaacctgaattacaaacccaagggggctgaccccagagcccactctttttaaaatgacatccttattgactgggcgtggtggctcacacctataatcccwgcactttgggaggccgatgcaggaggatcacttgagatcaggagtttgagaacagcctgaccaacacggtgataacctgtctctactaaaaatacaaaaa

SEQ ID NO: 23774 - DNA, 201 bp, Homo sapiens
caatgccctgatttaagtgctgacatgtattaatttacttctacctcttaacagcatgttaaggtaattactgttagtggcacggtaacttaaccaaggtyccagccaataagtggcagaacctgaattacaaacccaagggggctgaccccagagcccactctttttaaaatgacatccttattgactgggcgtggtggc

SEQ ID NO: 23775 - DNA, 201 bp, Homo sapiens
aaattcagaatgtagaccaaattgcttaaagatgcttaagggtttgtaaaaatatcccatgatgcattgcagttgccaattctggacagttatcagagatkcttattttcaaacattttcttgttaaccatatttctggccaagttggttttaggaaaatcacctggagttagaccatgagccttagcattagaggactga

SEQ ID NO: 23776 - DNA, 201 bp, Homo sapiens
gatctttgttggtttaaagtctgttttatcagagactaggattgcaacccctgcctttttttgttttccatttgcttggtagatcttcctccatccttttrttttgagcctatgtgtgtctctgcacgtgagatgggtttcctgaatacagcacactgaagggtcttgactctttatccaatttgccagtctgtgtctttt

SEQ ID NO: 23777 - DNA, 201 bp, Homo sapiens
atatgcggtgtttggttttttgttcttgtgatagtttactgagaatgatgatttccaatttcatccatgtccctacaaaggacatgaactcatcattttttatggctgcatagtattccatggtgtatatgtgccacatattcttaatccagtctatcatttgtggacatttgggttggttccaagtctttgctattgtga

SEQ ID NO: 23778 - DNA, 201 bp, Homo sapiens
gagtgttatgttccccttcctgtgtccatatgttctcattgttcaattcccacctatgagtgagaatatgcggtgtttggttttttgttcttgtgatagtwtactgagaatgatgatttccaatttcatccatgtccctacaaaggacatgaactcatcattttttatggctgcatagtattccatggtgtatatgtgcca

SEQ ID NO: 23779 - DNA, 201 bp, Homo sapiens
tgtgctcctgagggcccttcagcctgctttgcattcataggcaatttatcctccttaatcactaaatcattaatggggatcaatagcaatgccacatcagwgaaggcaggggtgcatgcggggagaataattgcttgcttagtttttagtttagtggtgctaaccgggcttcgggtccattctgggaggaaacccttctcc

SEQ ID NO: 23780 - DNA, 201 bp, Homo sapiens
ccaaaaactcattgcaattgttaaaaatgacaaaaagatagttatttggcattctccatatctcttccttaaaaacacacagacacacacacacacacacmgacagacacacagacacacacacacagcctttgtagctaagtgcagttcaaagttatctttcccagctccttgattcaggtacctcccatcatcaaataa

SEQ ID NO: 23781 - DNA, 201 bp, Homo sapiens
ggttcctagtgataaaaatcaatcattccttataatagcaaccaccaaaaaaaggtcatagttttagctgctgcatatgcctatactagttcctctctacyttgatatattaatattacagttaatagcagaagtattggagccaagcgttctctgggtcagtgccctgggactaatagagctaacatttatttagtattt

SEQ ID NO: 23782 - DNA, 201 bp, Homo sapiens
tgtctggtgtcctgggaggcagggagggcatttggattaagtttaatcagtaggtacatatggcaagaaaggtattcagataatttgttatctattaaaaygaactaaaatgaatctgtggtgtcacccaccaatgcatgtcacaggagcaaattctggccaagacagcaaattccaccaaggacctactctgtaaattcc

SEQ ID NO: 23783 - DNA, 201 bp, Homo sapiens
ttctgaaggagaaaataaaaaggcaagccaagtcattaatcttaaaattgtcagctgaattattttcaatgagccctgatgtctggtgtcctgggaggcakggagggcatttggattaagtttaatcagtaggtacatatggcaagaaaggtattcagataatttgttatctattaaaatgaactaaaatgaatctgtggt

SEQ ID NO: 23784 - DNA, 201 bp, Homo sapiens
ggtgaacagggctgaaaatcaagaaaggaaaatgggaacgggaggcccgtggcagctgccactgttgtttggggcattaagatcaagtcctttaaggaggrggacccttgaatctctaccagactccagtttggacttccaaggttgttctgttgaaggaggtgggtagtctttggttaaaaatgctaaactattctgaag

SEQ ID NO: 23785 - DNA, 201 bp, Homo sapiens
attgataagaccctgggtgaacagggctgaaaatcaagaaaggaaaatgggaacgggaggcccgtggcagctgccactgttgtttggggcattaagatcargtcctttaaggagggggacccttgaatctctaccagactccagtttggacttccaaggttgttctgttgaaggaggtgggtagtctttggttaaaaatgc

SEQ ID NO: 23786 - DNA, 201 bp, Homo sapiens
gggataatgtgaattagtgttcagccagaaacagaatgagagtggcaatcgttttattgataagaccctgggtgaacagggctgaaaatcaagaaaggaaratgggaacgggaggcccgtggcagctgccactgttgtttggggcattaagatcaagtcctttaaggagggggacccttgaatctctaccagactccagtt

SEQ ID NO: 23787 - DNA, 201 bp, Homo sapiens
gaggaacaggtgccctaaagtcaagcctcactttcttgaaattatgagtaaggcagagtcttgaccaagtcgtgtctgggataatgtgaattagtgttcakccagaaacagaatgagagtggcaatcgttttattgataagaccctgggtgaacagggctgaaaatcaagaaaggaaaatgggaacgggaggcccgtggca

SEQ ID NO: 23788 - DNA, 201 bp, Homo sapiens
ctaaaataataaataacaaaagatatatattgcttatttatcattgagaagttgtataaatatgcgtatttatttattattgagaattttataaatatatmcacttaatttttatcccagttatggaaggtattatagcaggtggtctcatattcatttttccacatttctcaatgcccctgagcaattagagatcagaac

SEQ ID NO: 23789 - DNA, 201 bp, Homo sapiens
attcccctaatttgccttcacccttgctcctatgtctgtttctctctgtcttcacacttgtatcttatgatgacctctttcacttacaagaattcataaaygtggctcatttgcacccacataattgaaactgtactccaccagaaagcgctggtctgaactcagggaggacggactgtgggcattccctggcttttccac

SEQ ID NO: 23790 - DNA, 201 bp, Homo sapiens
tggtccctagggtaatagagtcgctgatgtctttgtcacattaagggtgccacacagagcacttatgaagggccatgggtatcggaatgagaacactcagmacatccacaaacgcttcctccctgactgcctcctgtgctttctcccctctttcctattcccctaatttgccttcacccttgctcctatgtctgtttctct

SEQ ID NO: 23791 - DNA, 201 bp, Homo sapiens
ggcatgtgccactatgcccagctagtttttgtatttttagtagagatggggtttcaccatgttggccaggctggtcttgaattcctgacctcaagcaatcyatctgcctcatcctctcaaagggctgggattacatgcctggccaaaaagatcagcattttgattatatttattactttctagaatttaaaatataaatta

SEQ ID NO: 23792 - DNA, 201 bp, Homo sapiens
gtctacccagctctggagtgacactgggcattgtctgcacagaatcctgtgatgtgagccatctctgggtccctctcagccaccggaatagcgcctattcyggtggaggtggcagggggtacaatggacactgttagggttcttagctttggtgtttaatgctctatttttgtgctggttggctccctgccaggaggtggt

SEQ ID NO: 23793 - DNA, 201 bp, Homo sapiens
acacaggccacttcaaattgtgcttgacaggtctcagtttctgtgacttctactaacaaagagtgtgacccaacaagataacccattccatggtcaggtarctctaacagtaaggaaacaggtttttctaccatttgatcctgccaatgatcctaattctgccatctggactgacagaaagtaaggcccatctcttttcca

SEQ ID NO: 23794 - DNA, 201 bp, Homo sapiens
aagaggctgaagatagggttccaatcccttctagattgtagggtttctgctgagaaatttgctgttcatctgataggttttcttttataggttacctgatscttctgtctcacagctcttaagattcttttctttgtcttaactttggataacctaatgacaatgtgcctaggcaaagatctttctgcaatgaatttcctg

SEQ ID NO: 23795 - DNA, 201 bp, Homo sapiens
ttagcagttcttgtagtggtggcttggtaatggtgaattatctcagcatttgtttgtctgaaaaaggctgtatctttctttcatatatgatgcttagtttygctggatacaaaattcttggctgataattgttttgtttgaagaggctgaagatagggttccaatcccttctagattgtagggtttctgctgagaaatttg

SEQ ID NO: 23796 - DNA, 201 bp, Homo sapiens
gttgaaatgtgaggtaccattacattcatcatgctctttgttgcctgtgtactttggtttttttgttttttgtttttgctttttaacttgtatttttgttycataggtcctgtgtgatttatgctttaaagaagttctgttttgatgtgtttccaggatttgcttcaagatttagagctccttttagcagttcttgtagtg

SEQ ID NO: 23797 - DNA, 201 bp, Homo sapiens
ttcagttctgtatcttttaaatatagcatttaggccatttacattcaatgttagtgttgaaatgtgaggtaccattacattcatcatgctctttgttgccygtgtactttggtttttttgttttttgtttttgctttttaacttgtatttttgtttcataggtcctgtgtgatttatgctttaaagaagttctgttttgat

SEQ ID NO: 23798 - DNA, 201 bp, Homo sapiens
aggttatttggattttctctctttttggttaattttgctaatgatctatcaattttatttatctttttaaataaccagctttttgtttcatttatcttttrtatttttgtttgtttcaattttgtttagttctgctctgatcttggttatttcttttctcctgctgggttagggttttgtttgttcttgtttctccagttc

SEQ ID NO: 23799 - DNA, 201 bp, Homo sapiens
agtccttggggttttcaaggtaaacaatcatatcgtcagcaaacagtgacagtttgacttcctctttacctatttggatgtcctttatttctttctcttawcttattgctctggctaggacttccagtactatgttgaagaggagtggtgacagtgggactccttgtcttattccagttctcagaggaaatggctttcaac

SEQ ID NO: 23800 - DNA, 201 bp, Homo sapiens
cccgggttcataccattttcctgcctcagcctcctgggtagctggggactacaggcgcccgccaccaggcctggctaatttattgtatttttagtagaggyggggtttcaccaagttcgccaggatggtctcgatctcctgacctcgtgatctgcctgccttggcctcccaaggtgctaggattacaggcgtgagccaccg

SEQ ID NO: 23801 - DNA, 201 bp, Homo sapiens
gtaacagttttattaagaaaaattttaattacaaagcaatatctaacccatcctttggtttataaagcagcttaaacctctttttttggagtgaacggtcrtagatacatctgaggacccaggtgctcaatgggcattgtccttggcatttctaaatcaccaaggaactttttcgcatttacccatatggattttaatttt

SEQ ID NO: 23802 - DNA, 201 bp, Homo sapiens
gttcaacctggcttataaagaaaggtattttcaaagtgatgcaaagaatactgcaaggggtgtgcccaattcaaagaaatagcttctttttttttttttttaagtgttagcctagggtactgctaattagaaaagagtgttatcatttcatcaaaggaagggccactgagcttttacatagaaagattttatcagctgcaa

SEQ ID NO: 23803 - DNA, 201 bp, Homo sapiens
atctcattagttcaacctggcttataaagaaaggtattttcaaagtgatgcaaagaatactgcaaggggtgtgcccaattcaaagaaatagcttctttttktttttttttaagtgttagcctagggtactgctaattagaaaagagtgttatcatttcatcaaaggaagggccactgagcttttacatagaaagattttat

SEQ ID NO: 23804 - DNA, 201 bp, Homo sapiens
gtgagccacttaaaatttgttattgtcaaggacatttttacttcatattttttgtcacatgtatccctacaggatcccatatatcgatattagacaagcayaatttcctgctttttaggatctgagactccaaggcagagagcataggagtagggactcataaagacaactgcgtaatttatcagctgaaaccacatatct

SEQ ID NO: 23805 - DNA, 201 bp, Homo sapiens
aaatgtcatcatttacagactgaatttggtgctgattatgttcaccattactaaaaatattgggaaatgagctatgcttggtgaaacaaagggcattttttaaaaatttggctgattaaatgtagtttagaaacaaaataaacttgcataaacttgcaagtgtttggaaacagtctggtttggtaatagtcactatgttta

SEQ ID NO: 23806 - DNA, 201 bp, Homo sapiens
gactcatttaggtgaatgccaaagatgacgaaggtgtcctcgttggatcctgggacaatatctatgcctatggcgtccccccatcggcctggactggaagsgttgacattctattggaataccggagctctgagaatccagtccggtatggccaatgctgggtttttgctggtgtctttaacacatgtaagtatccaactg

SEQ ID NO: 23807 - DNA, 201 bp, Homo sapiens
tttttttggaggaaggggcaaaaatatttcataagtcacgccattgcttcctaggacattcatcctggcagaagatacatatatttaggtttgtcaatagyatctggttcacgttttatcagtctcatccacccgttacgaagttctcttcttaacgaattatttctgcctcaattcgttacttcattagggattgcaaga

SEQ ID NO: 23808 - DNA, 201 bp, Homo sapiens
ttggctattttctctctctctctctctctttttttttttttttttttttgggacagattctagctctgttgcccagcctggagtgcagtagtgctatctcrgcctcctgggctcaagcgattctcctgcctcagcctcccgagtagctaggattacaggcacacaccaccatgcctggcttatatttttatttttagtaga

SEQ ID NO: 23809 - DNA, 201 bp, Homo sapiens
atttacctttgggcaagtccttcaatctttcttctttttcaacatattagtttttggctattttctctctctctctctctctttttttttttttttttttttgggacagattctagctctgttgcccagcctggagtgcagtagtgctatctcggcctcctgggctcaagcgattctcctgcctcagcctcccgagtagct

SEQ ID NO: 23810 - DNA, 201 bp, Homo sapiens
tgttcttcacagctggctcttcctatagacatgtgggaccccctgctgcaggcctgtcccagctgcttggtggaagcagcttttgctacccttctgggctrttgcgcaggtttcatttatgagctcaaccctgaaccttccctgacagcagcaaggcctgtgtgcgtacctaattatgaagtgacggcctgtccctgtgaa

SEQ ID NO: 23811 - DNA, 201 bp, Homo sapiens
aatttacctttgggcaagtccttcaatctttcttctttttcaacatattagtttttggctattttctctctctctctctctctttttttttttttttttttttgggacagattctagctctgttgcccagcctggagtgcagtagtgctatctcggcctcctgggctcaagcgattctcctgcctcagcctcccgagtagc

SEQ ID NO: 23812 - DNA, 201 bp, Homo sapiens
gtcctaacttttggagcaaactcctcataaagcagcatgttctcccatgcttgaagcttagtctggaatctttgggttagagggaatgactgtttggttcrtggctgtatctcacttaaaacagtgcctagggccaggcacagtggctcacgcctgtaatcccagcacattgggaggccaaggcgggtggatctcttgagg

SEQ ID NO: 23813 - DNA, 201 bp, Homo sapiens
aaattggggtccaaagtttaatttacctttgggcaagtccttcaatctttcttctttttcaacatattagtttttggctattttctctctctctctctctytttttttttttttttttttttgggacagattctagctctgttgcccagcctggagtgcagtagtgctatctcggcctcctgggctcaagcgattctcctg

SEQ ID NO: 23814 - DNA, 201 bp, Homo sapiens
gacagagagagcacaggagacacaccctgacatctcccctcctcctgcttccaatcctctctttggccgaacctacctcgaagtcagagagcagaggagcrtgggaacatggcttcctgtggaacctgacagaagattctaggggtgcaggcaataggtctgagaacagccagtctgtcaataggtggagttgctgagaca

SEQ ID NO: 23815 - DNA, 201 bp, Homo sapiens
taaggattgttattaagaagttatttatcattattgttgctacgatttgaaagtagagggggtcgctgtttgtacttacatggcttcctccagagggaatkcccgaattctcagacagctcatttaaagcttccaaaatgacaaatattccacaggtatctgctgcgtcctctcctgtcctgattcctgacttcacatttc

SEQ ID NO: 23816 - DNA, 201 bp, Homo sapiens
acatcccaccccaacacacatatacaaaagccaccccatacaggtgtttctcgtctcctctctccgcaaaggacagtgctgttggtctgtcctgagatttyagcctacaggaatttctgaagccatattcaaggtgggggggcaggaatcagccactttcatattttgcttgtttccctggaaaaccacaagctgttataa

SEQ ID NO: 23817 - DNA, 201 bp, Homo sapiens
tcactctgtgtaggaagaatgctttgcatgctttgttccctctctgcattcaagtctctgctctggtcacctcttcaaagaggccttcgctcacccaactscacctaaaatatcaccatctgccctgttgttttcatcctccaaccttagtgtgtactccatttctcccttctagaatatgagctccatgaaggtagaagc

SEQ ID NO: 23818 - DNA, 201 bp, Homo sapiens
tacaataaaactgaacataaattcctacaagattccatggcttcccttccacttcatcccttgtttatttccctccagccatactgagatttttctcttcrgaaagcatccacacatcctcttgtgtcagcacttttagacatactgctccttttgctaggaaagctcccctcactatctttcactctgtgtaggaagaat

SEQ ID NO: 23819 - DNA, 201 bp, Homo sapiens
attataattactcctttctcacccactgcagaggcgtgtctgacagagggtacaatttgttgctttggcatgggctgcgctccaggggctgagccattttkaagagatgtttgagttgatgaaaagtgtatgaggaatcttttctcaagggtgcctgcagtgggaccccatggggagtgtcatatgagtcgatatgactca

SEQ ID NO: 23820 - DNA, 201 bp, Homo sapiens
aatgttaatatttagaaagcaaaacgaacatcaaaattcagacagcaagatcaggaatttgaaacacacaaaagaccagtgttcatctcatcgtacctgcygtggcagtttacagaagcctttggagaccaagcttactggacttggaattttatcccctcgttttcactttgggatttgaagatttccacaaacctccca

SEQ ID NO: 23821 - DNA, 201 bp, Homo sapiens
gaatgcatactggtaaccattgcactctagtactccaggaggaacaaatagttattattaatgtacaccaggcattgtactggggggaattctaaggttcragtctttaagaaacgtatttctagatgccaggtgacagggcacaaacacactgaacatgaaataacaacaatacttgtcaggtgggccatgtagagagca

SEQ ID NO: 23822 - DNA, 201 bp, Homo sapiens
aataaaatcgaggcaaagagtgattaagtgactttctcacaaccatctagctaataaatagcagtgctaagatttgaagccaggcagatacctgaatgcayactggtaaccattgcactctagtactccaggaggaacaaatagttattattaatgtacaccaggcattgtactggggggaattctaaggttcaagtcttt

SEQ ID NO: 23823 - DNA, 201 bp, Homo sapiens
ataaattggggtccaaagtttaatttacctttgggcaagtccttcaatctttcttctttttcaacatattagtttttggctattttctctctctctctctctctttttttttttttttttttttgggacagattctagctctgttgcccagcctggagtgcagtagtgctatctcggcctcctgggctcaagcgattctcc

SEQ ID NO: 23824 - DNA, 201 bp, Homo sapiens
tttatctgatggaaaagtctcattatagaaataaaaaataataaaagcataaaaagagctcaaagatctacaaattagagacactaacaattaacattttsttgtaatgtcatccatttaaagtattttcagtgcttttcatttttaattggcaattaattgaatatattgttcttttcaaataaacacacatgtacattt

SEQ ID NO: 23825 - DNA, 201 bp, Homo sapiens
tatgatgaaccgctccccccaacacacacacaagcacatacactgtagcccagcagtcccctgcagttttatgcttgtgtgtgtgttaatgcataacaaargattcagcgctatggcctggtaactggaaagtaggtcaaaagagaggggtgagactgtcgcccaagtgaaaaagatagcagaagataagaaggaaaactg

SEQ ID NO: 23826 - DNA, 201 bp, Homo sapiens
atatctcacttaccattcttttcacctctctgtcatacctatggtgacccctgattcatgactcttgtcctccatacatttttttttttttttttttttttgagacggagtctcactctgtcgcccaggctggagtgcagtggcatgatctcggctcactgcaagctctgcctcccgggttcataccattttcctgcctca

SEQ ID NO: 23827 - DNA, 201 bp, Homo sapiens
tcacctggagggtcaccacgcttggagcacatcagaatcacctggagggtcaccacgcttggagcacatcagaatcacctggagggtcaccacgcttggarcacatcagaatcacctggagggcttgttcagccacttctgtgcagcaccctcaggttgagtaggtctgaggcctggcctgagaatttgcatttctaacca

SEQ ID NO: 23828 - DNA, 201 bp, Homo sapiens
tatatctcacttaccattcttttcacctctctgtcatacctatggtgacccctgattcatgactcttgtcctccatacatttttttttttttttttttttttgagacggagtctcactctgtcgcccaggctggagtgcagtggcatgatctcggctcactgcaagctctgcctcccgggttcataccattttcctgcctc

SEQ ID NO: 23829 - DNA, 201 bp, Homo sapiens
cagtgatggaagcagcgagaaccagtccgatctgggcatgtgctgaaggtggagcccgcctgattggctgagagactggatatgtggtgtgagagaaggarggtatggaggaagccaaatgagtgatgaatgtgaaatgtgtgccacatggtagaatcttagtaaatggtaacttccaacatgtttacatttggggaaact

SEQ ID NO: 23830 - DNA, 201 bp, Homo sapiens
gtatatctcacttaccattcttttcacctctctgtcatacctatggtgacccctgattcatgactcttgtcctccatacatttttttttttttttttttttttgagacggagtctcactctgtcgcccaggctggagtgcagtggcatgatctcggctcactgcaagctctgcctcccgggttcataccattttcctgcct

SEQ ID NO: 23831 - DNA, 201 bp, Homo sapiens
cacacacaccccggggttcttgattcattcccctaacctttatttagtgcttgcaagtccaggttctgttttatgctggagacacagcaatgcctattctkactgaatttctgatctcatgggggaaccaaacaaacaagtgaatctatagtatagttatatgggtaatagaaaaatacaaagcaggttaaggaaaacggg

SEQ ID NO: 23832 - DNA, 201 bp, Homo sapiens
ttgcaaatagacaattctggatgtaagcgatgactgtgtcacctaccagctgtgtttcctgagcaaggtacttaagcactctgagctgtctctcctcatcygcaaaggggaaaaacagcacacacaccccggggttcttgattcattcccctaacctttatttagtgcttgcaagtccaggttctgttttatgctggagac

SEQ ID NO: 23833 - DNA, 201 bp, Homo sapiens
agctctccatcaccttccggaacaacagccacaaccgttacaccatcacagcttatctctcagccaacatcaccttctacaccggggtcccgaaggcagarttcaagaaggagacgttcgacgtgacgctggagcccttgtcctgtaagctaacaatggtgtggttctttgtgagactcgctgtctggcccctgtcttgct

SEQ ID NO: 23834 - DNA, 201 bp, Homo sapiens
ggcatgggtgttgggggcaatggcaattgagtgagatagggaagaacggggcaggagccctcaagggtcagctcagcaaacagcaagtgggacaggcccargtggaaggagagatgaggaagacaggtcttattggggggcaggtattcacaaatcagagagaaaagttacattgcaggaggtggaatggcaagaggcaat

SEQ ID NO: 23835 - DNA, 201 bp, Homo sapiens
ggaagcattccctttgaaaactggcacaagacagggatgccctctctcaccactcctattcaacatagtgttggaagttctggccagggcaattaggcagragaaggaaataaagggtattcaattaggagaagaggaagtcaaattgtccctgtttgcagacgacatgattgtatatctagaaaaccccattgtctcagc

SEQ ID NO: 23836 - DNA, 201 bp, Homo sapiens
aaatcaataaatgtaatccagcatataaacagaaccaaagacaaaaaccacatgattatctcaatagatgcagaaaaggcctttgacaaaattcaacaacscttcatgctaaaaactctcaataaattaggtattgatgggatgtatttcaaaataataagagctatctatgacaaacccacagccaatatcatactgaat

SEQ ID NO: 23837 - DNA, 201 bp, Homo sapiens
agcaggaagctggaggaaagtgctgtttttctccccaacctcttaacacatgaaagagtaagctaaaagttgttgtttctaagttttccaggtacatagcrtatgcttcgtgttgacaaaggtaactaggcattattccaacttccaggctattaatgctaaatgcagttcttgtttaacatttttctttccttgatgttt

SEQ ID NO: 23838 - DNA, 201 bp, Homo sapiens
aaatcagcaatgaagttgggaacactggtctttacagagtcaccctcagtgccatgaatcttgcagtatctggacagaattggagatgacaaactcacacygcccttcctctgtgcaatgcaggcatgtatcggtgtggccccgcctcggttcaagccatcaagcacggccatgtctgcttccaatttgatgcaccttttg

SEQ ID NO: 23839 - DNA, 201 bp, Homo sapiens
taaatcagcaatgaagttgggaacactggtctttacagagtcaccctcagtgccatgaatcttgcagtatctggacagaattggagatgacaaactcacaycgcccttcctctgtgcaatgcaggcatgtatcggtgtggccccgcctcggttcaagccatcaagcacggccatgtctgcttccaatttgatgcacctttt

SEQ ID NO: 23840 - DNA, 201 bp, Homo sapiens
catggggacattttacaggtgactaatagcagctaatctcttattaactatatagataggtggttaaaatttaaagcattttagaagagtaacataggccytctgacttcctaaatgcatggtgggcatggccaaaatgcacaggcaatgtccaaattctccagttaaacttgacatatgttcataatgtccaaaaacaaa

SEQ ID NO: 23841 - DNA, 201 bp, Homo sapiens
cattgaagggcgtctaggcacggaacccgtggtagttgaacctgaaattcatcagtgtcataaacaaagactgctgtaactacctcaccacattattaaayctttctttattactatatgaacattttctatagtgctgaggggttaatgtgctctcatttgattctgtactgtcatataatttcaggtcttttcaaggac

SEQ ID NO: 23842 - DNA, 201 bp, Homo sapiens
atttagatcttcttcttaaattattccaatggctttttatagcctaagaataaagcatgaatgtttaatttgatatcaaaggatttcacaatcttatcctyacctatatcataggtcagtgttgaagagtgtggatttcagagctctatcactaactagctgtgacctcagcaaggttcttaaccttcctgggtttcagct

SEQ ID NO: 23843 - DNA, 201 bp, Homo sapiens
ggtatatctcacttaccattcttttcacctctctgtcatacctatggtgacccctgattcatgactcttgtcctccatacatttttttttttttttttttttttgagacggagtctcactctgtcgcccaggctggagtgcagtggcatgatctcggctcactgcaagctctgcctcccgggttcataccattttcctgcc

SEQ ID NO: 23844 - DNA, 201 bp, Homo sapiens
gcagggtcgcctttttaatgtcttgccagagcccagcatccttggggactgggggatgcaagttttggtagaaccttctgccatggcatgggtgttggggrcaatggcaattgagtgagatagggaagaacggggcaggagccctcaagggtcagctcagcaaacagcaagtgggacaggcccaagtggaaggagagatga

SEQ ID NO: 23845 - DNA, 201 bp, Homo sapiens
cccttcatctccaccacaaccactttgcaaaccctgcacaaaacattttcctaaaagcagcacacacacctcgaactgcattagaacttaggtgcaccacygcctgtcaacagatgtccctcaaaaaactgccctccgtgtcagatgagtttgggaaaccttgtgtaaagaaaggcaaagaggtgtccttgctgctgggct

SEQ ID NO: 23846 - DNA, 201 bp, Homo sapiens
gctgtgaagttgcttgtggctggcttcaaggcttcttctcccattcacctcaccttggccagctcagctcctctctgatgtgttcctgatgctcgaatttscctcctgcattttgcctcaatgcatctctggcccgcatccaaagtgatcatcattaatgttctcttctcatggatctattggccagatgatttctgctaa

SEQ ID NO: 23847 - DNA, 201 bp, Homo sapiens
cctgcacccatggcaggctgtgaagttgcttgtggctggcttcaaggcttcttctcccattcacctcaccttggccagctcagctcctctctgatgtgttmctgatgctcgaatttccctcctgcattttgcctcaatgcatctctggcccgcatccaaagtgatcatcattaatgttctcttctcatggatctattggcc

SEQ ID NO: 23848 - DNA, 201 bp, Homo sapiens
atatagtgcctgacacataataagtgtccaataaaagtttcccctattactagtaattctgttattcctgccatactactgctattagtttgggctatgawtagttttctcctggaaaaatacttgctctagcttcccaattccacctcacctcctcaggccctccttccctcagtctagcccctgccttgctgccaaagt

SEQ ID NO: 23849 - DNA, 201 bp, Homo sapiens
tttcctgtagttttacgatgccttggaataccagcaagaattgttaccaattatttctctgcccatgataatgatgccaatttgcaaatggacatcttccyggaagaagatgggaacgtgaattccaaactcaccaaggattcagtgtggtgagtttgattgacaatggcattggctgatgtcacattatagtaatgttac

SEQ ID NO: 23850 - DNA, 201 bp, Homo sapiens
atccacatagatggttgtaagcgacgactcatcctgcttcggggctggagtttgaccccaagtggatagtttcttaatcaagggtggcatacacatttcaractggaactttggaagtgaccaagtagaatgttgttttgagaagaacaccaagactgcatctgaatgtggcgggtagaaggattgatggccgccattggc

SEQ ID NO: 23851 - DNA, 201 bp, Homo sapiens
tggaatccatgaagtgctaaggagtgcagaatttattttaaatagtttagacagtctccctgctcttatttacaaaagtaatttgcactacaaagaagaarcttgctgaattgagaacacttgtgcatagtctcagaaagtcagaatttttgttatctgaactagtgaattttcactgtattttttaaatgcttcattttc

SEQ ID NO: 23852 - DNA, 201 bp, Homo sapiens
ataatgtcatggtgggtttttgttaacttttattgcatagaatgtttcaaatggcactactgagtttaattctatctcaatcaatgcttagtgtccgctcyatgcctgcaattggtttggtgctggcgattccagcagtgagcaggactcagttcctgtcctggtccgagtgacaggattattgtgcagaggggtctttgg

SEQ ID NO: 23853 - DNA, 201 bp, Homo sapiens
caagcgatgggcatggtggcatggcattgtcttctctcctgtgagaggtaggacttatcacaaggacagaggagggagaaaaatggttgcttcttagacartttattatctcagcctcaaataatctttatttaaagtactactaaatcaactagattcgcctttagaatattttcaaaacctgtttggccctatgatacg

SEQ ID NO: 23854 - DNA, 201 bp, Homo sapiens
tgggtttctgcattgatgatcaacgtgtttatttttaagcatctctgtgaagtgactaataatggcatctaagaaagtaggacagtgtttcccagagtgtrttctctatgaacacctgtcatgtgagattctccttgggggaaaaaagttccatcatcaaatacagttggatcatgctgtgttttgtgtctcttctcatag

SEQ ID NO: 23855 - DNA, 201 bp, Homo sapiens
ataatctcataaatctgtatgaaatgaacatagatacagcacatgcatataacaggaaacatttcttgcgaagatgctgctgtaggattatggagggtggsggaatctgggtctccaaaaatcttttaatttttaaatttctttgaataagccccttttcttctgctttccatatgttttgacacatacaaaaatctcccc

SEQ ID NO: 23856 - DNA, 201 bp, Homo sapiens
acatgttggctatagttaattatactatactatatatttcaaaattgccaggagagtaaatttcaaatgtttgcaccacaaaaataaatatgggaggtaakcgatatgttattaacttaattatcctgcaatgtgatttgattttatatatatatgtaaaatcatcactttgtaccctataatatatacaattatacaatt

SEQ ID NO: 23857 - DNA, 201 bp, Homo sapiens
caagattgagtatgcacgaagagggagcagaaacaggagatgggtgcctctggaacaaacatgcttatgcaggtgggtttatggaggggctcctgagaggstgagtcccatgagtcttcaagagcattacttagatgccatggcacctaggcagaaaacaatgtttaaatttgtgctggatttacaagtatatgtgatatt

SEQ ID NO: 23858 - DNA, 201 bp, Homo sapiens
gaatcagttggtattttccaacctggagaatcagtagatgaaattaggaaaagtctgtacggaaggaataagtgtttgagatcaaatatacaacatgttgkctatagttaattatactatactatatatttcaaaattgccaggagagtaaatttcaaatgtttgcaccacaaaaataaatatgggaggtaatcgatatgt

SEQ ID NO: 23859 - DNA, 201 bp, Homo sapiens
gggagaaaattatacaaaattatgcaaaaggtagtgggagtcatttaaaattctgctctgcatgtgattttgaaacactaatatgccatggatgtctttcytgcctagtcaatatagatctgcatttttatggctgaatagcattctattctgtttcaaaatacttgatcacatgttggacagttaggctgcttccatgct

SEQ ID NO: 23860 - DNA, 201 bp, Homo sapiens
aaataaataaatagtcctcagtgtttcggagggaacctaatacatgtttattatgcagtattttaaatgttgcagaaaaaataccaaagtaagaagtatcyattttctaactactcagaacatctgtaacatttccttaacccttctgtaatatgtctctttgtgtgtcgtatgcatgtttttaatgctgcataccaaagt

SEQ ID NO: 23861 - DNA, 201 bp, Homo sapiens
acacgtaatcacaccatggggaaaaatgaaaggagaagaaaaaaagaaagctggataatcagcccctaattttctaaaaattgctattaacaaagctgctktacaattctcttgataaatatccaagaaatctgttcttggaagcttaagaagagagtggaaaggctgtactctcaggactaaggaaggactcactcccta

SEQ ID NO: 23862 - DNA, 201 bp, Homo sapiens
gaatgatatttcattgtgtggataaaccaggttttatttatccattcatcagttgtacatttgggttgtttccatttttggctttcatgaataatgttgtwatgaacattcaggtaaaagtttttatgtgaacatatgttttttatttctcatgggcatatatttagagtggaatttctgggttgtatggtaactctatgt

SEQ ID NO: 23863 - DNA, 201 bp, Homo sapiens
gctgaccccagagcccactctttttaaaatgacatccttattgactgggcgtggtggctcacacctataatcccagcactttgggaggccgatgcaggagkatcacttgagatcaggagtttgagaacagcctgaccaacacggtgataacctgtctctactaaaaatacaaaaaaattagctgggcgtggtggtgcatgc

SEQ ID NO: 23864 - DNA, 201 bp, Homo sapiens
gttggaaaaaacattatttgccaccttcaaagaataagagtagctcatgttcacaaaaatacttttttttgcaatgccctgatttaagtgctgacatgtaytaatttacttctacctcttaacagcatgttaaggtaattactgttagtggcacggtaacttaaccaaggtcccagccaataagtggcagaacctgaatta

SEQ ID NO: 23865 - DNA, 201 bp, Homo sapiens
ttcttgttaaccatatttctggccaagttggttttaggaaaatcacctggagttagaccatgagccttagcattagaggactgagaatatacactgaaggyacacaatagtgttggaaaaaacattatttgccaccttcaaagaataagagtagctcatgttcacaaaaatacttttttttgcaatgccctgatttaagtg

SEQ ID NO: 23866 - DNA, 201 bp, Homo sapiens; identical to SEQ ID NO: 4947

SEQ ID NO: 23867 - DNA, 201 bp, Homo sapiens
atattccagatgctgagcctgggaacaaggtctatcccaagggagttggcaaaagctaattcgagtgtcagggcctcagcaaaggcagctgggggattcayataggactgtaattccaggaggaaactagtggcaaaaactgagctgaggctcagaagatcagtcacatagataaggctactatggagggcttggagacaa

SEQ ID NO: 23868 - DNA, 201 bp, Homo sapiens
ccaatttggtggttgaaataggaatttgaattacagaacatgaagattctcaaagtcaaatggcagcaggcagggctatattccagatgctgagcctgggmacaaggtctatcccaagggagttggcaaaagctaattcgagtgtcagggcctcagcaaaggcagctgggggattcatataggactgtaattccaggagga

SEQ ID NO: 23869 - DNA, 201 bp, Homo sapiens
ttgggcttaaactttaagtttctcaaataggacagaagctaaggtctagacgcacagaggacaaaccatgggcagttgcagtttattgtaataataatctyatttgcctgcgtgcattcaagatgataaatggccggtatctcctgatggctcagcacgttactgagaatcgtttatcacaacatccatccccagaaaata

SEQ ID NO: 23870 - DNA, 201 bp, Homo sapiens
tttgggtttcaacaaatgaatgtgtgaggaccacaaacatttagtccgtaacagtcctcaatctctctttttaagttttttttactgacacattgtaattstacatatttatgtggggcaatttgatgtttcgatacatatatatgttgtataatgatcaaatcggagtatttagtgtatccatcaccccatgcatttatc

SEQ ID NO: 23871 - DNA, 201 bp, Homo sapiens
ggctagatttctctttcctatcttgtgaagaatactaatatcaagaaactgtgcacaaagctcaatcaagcctaggtagctaaggttggaaaagagtaacrtcacaaatggaattaaagattttcatcttcttcctcctacatcccagctggggggattaaggtaggtctgtgtaaggagagtgaggccctcagtaaaggg

SEQ ID NO: 23872 - DNA, 201 bp, Homo sapiens
tattgagcacctactacgttccaaacatcatgcaagctgctgggtatacaaagttaaacaaaactccatctctgtcttcacaaagtttccccccaaccctwcctaagtttgcctgagctagaataaacatggccaggaaggtctcttttctttaggaaacatctggaaatatgtatgtaatctgccaatggcaacttagca

SEQ ID NO: 23873 - DNA, 201 bp, Homo sapiens
aaagacttcaagctctccatcaccttccggaacaacagccacaaccgttacaccatcacagcttatctctcagccaacatcaccttctacaccggggtccygaaggcagaattcaagaaggagacgttcgacgtgacgctggagcccttgtcctgtaagctaacaatggtgtggttctttgtgagactcgctgtctggccc

SEQ ID NO: 23874 - DNA, 201 bp, Homo sapiens
tagtcagcatcaggtgacagccttatgatttctttctgattcactcaaaaaacctagcacgatgctggtttcatgtatatcccacaaaattacgccttacrtttactccaaaagaggctttaagtgatgtaggaagcactgaaagaaaagtaaaataaaatcaaggtagaaaagacaccttaacaagtacctagcttccat

SEQ ID NO: 23875 - DNA, 201 bp, Homo sapiens
gcatttaagcaggctcaaatatctgctgtgttaaaaacaaaaattacaaaaatctttttcaccactgtctcttcctcctcgcctccttgccgtcctggagygctgcctggacttgcgtcctgctgtgttccttctccactccttccgcgcacactctgtcctgatttctgctaccagcacttccttgaagttgttctcaag

SEQ ID NO: 23876 - DNA, 201 bp, Homo sapiens
gtcctcatgttcacattcctgccttggttagccatctaagtggtgcacttcttaaagccagggaccaggtagtcagcatcaggtgacagccttatgatttmtttctgattcactcaaaaaacctagcacgatgctggtttcatgtatatcccacaaaattacgccttacatttactccaaaagaggctttaagtgatgtag

SEQ ID NO: 23877 - DNA, 201 bp, Homo sapiens
tttattgagtatgtattgtaaatatccacttgtaggttaatactagatggactgtaccatactccttagaatgttttctatgttgatttttgtttctccartaattgctttaatctctggcaatgcaaactcatttaacacttgcttttatatattgcattcatatatactccaaagacaaacaaatgctttatcagaatt

SEQ ID NO: 23878 - DNA, 201 bp, Homo sapiens; identical to SEQ ID NO: 4969

SEQ ID NO: 23879 - DNA, 201 bp, Homo sapiens
agaacaattgtgttcccccacaaggcatcattaggcaaggatggtccaacctcaatacggtttctttacatccctgtgtttcagctacatccgtggtctcytgtattgtttatctatgtcacttgcaaaaaactaggcttgaatacagttttttaaaagtgatgcttttaaatataagcggtaatcaacttatgaaggaac

SEQ ID NO: 23880 - DNA, 201 bp, Homo sapiens; identical to SEQ ID NO: 4970

SEQ ID NO: 23881 - DNA, 201 bp, Homo sapiens
cagtggggaacacatgaccagaggaaatgagagaagattggaatatattctaaggccttaaaaagatgtcaagaacaattgtgttcccccacaaggcatcmttaggcaaggatggtccaacctcaatacggtttctttacatccctgtgtttcagctacatccgtggtctcctgtattgtttatctatgtcacttgcaaaa

SEQ ID NO: 23882 - DNA, 201 bp, Homo sapiens
ctcttgtcctccatacatttttttttttttttttttttttgagacggagtctcactctgtcgcccaggctggagtgcagtggcatgatctcggctcactgmaagctctgcctcccgggttcataccattttcctgcctcagcctcctgggtagctggggactacaggcgcccgccaccaggcctggctaatttattgtatt

SEQ ID NO: 23883 - DNA, 201 bp, Homo sapiens
attttagagcagaaattaaccagctttcacacctgggacactgccctaatcagtgtataatcctaattctcattatgtcctcagtactcatatggtgtttyacacattgtaggtgcatttttgaaattgagattgttcttctatacattattttatttttatttttatttatttttattattatactttaagttttagggt

SEQ ID NO: 23884 - DNA, 201 bp, Homo sapiens
atgaggacaaagggatggggctttgttcctccatagtgatcagtcactggatgtgagccacccctggaatgaggtgtgaccctggatgaggcagttttctyctgctaaggcaactcccaaggaggcctgaaccaccaaggactattttctgtcatcactcccagcagctgaggataagcctgtcggtcatttccgaaggtg

SEQ ID NO: 23885 - DNA, 201 bp, Homo sapiens
gtgtcctcctctcagcttttccccaccggaatgcacccacccacagggggagcagtgtctgatctattttatttttgttgttttgtcagcatgtaacagtrtgcagggcatagagcaagcactgaataaacagaattgcttggaaaaaatttttaatgcataaaaactccatgctgcaatgggtggtcttaatctataaac

SEQ ID NO: 23886 - DNA, 201 bp, Homo sapiens
gggcagagtaattagatcccagggtagcaaatgaaaccccaagtgggcaaatgcaaagtagcagatcccagaaggagcaatttcggccgcctgtccccagygtgctgatgagttctgaattatgtgtaacctctggggggaaggcagctatgaatcactggacagtttaatgaagacgcttgctcaatgtttagctgcagt

SEQ ID NO: 23887 - DNA, 201 bp, Homo sapiens
agaggtaggcctgatgctgatttaattattattggtcactggtaagaagcaggggctgcctgagcatagggctggtgaggaagggtgagggtgagggtgarggtggaggctaaacaggggctgaggtgggggtgggaatgatttgctgggcatcagctgacctctgtgaggtcagtgcggtgtagactggcgacacatggc

SEQ ID NO: 23888 - DNA, 201 bp, Homo sapiens
gctgtgtggctttgagaaaatgacttcacctctctgagcttcattttcttcatcagtagaatgaaagtaatcttagtagttaccatttcccgatggagtgrctataatgattaaatcaggtcatccaggtagagtgcttaccatagaggtaggcctgatgctgatttaattattattggtcactggtaagaagcaggggct

SEQ ID NO: 23889 - DNA, 201 bp, Homo sapiens; identical to SEQ ID NO: 4980

SEQ ID NO: 23890 - DNA, 201 bp, Homo sapiens
gcacatcagaatcacctggagggtcaccacgcttggagcacatcagaatcacctggagggtcaccacgcttggagcacatcagaatcacctggagggtcasccacgcttggagcacatcagaatcacctggagggtcaccacgcttggagcacatcagaatcacctggagggtcaccacgcttggagcacatcagaatcac

SEQ ID NO: 23891 - DNA, 201 bp, Homo sapiens
aatccatctgaaagtgctgagatgacaggcatgagccaccgcacctgactgacttcaggttttacctgttggcatacttctggggtcttgcgtccctactyctgtgattcttcccttaagtggtgtgtctgcgtgtgcagtggcctgctagcgcttagaagcggagcatgcacagtgcgtttactagtgttgtactcgtga

SEQ ID NO: 23892 - DNA, 201 bp, Homo sapiens
cttgcgtccctactcctgtgattcttcccttaagtggtgtgtctgcgtgtgcagtggcctgctagcgcttagaagcggagcatgcacagtgcgtttactastgttgtactcgtgaccacttgatgcattttttccttaccagttgagtgtccctggaggaaggccacatactggttaaattccgccattttggctcttagt

SEQ ID NO: 23893 - DNA, 201 bp, Homo sapiens
attggagtggagcaaagtggagtgaatcgggagaaaggatggataaggccagtcccttcttggacacagatgtcctgcccacacactggcttaaggtactrttagtagttactgcaacacgtaagtctaggcagacaagtagatagacagagagctagctgctcttagtcagtttgagctgctgtaacagaaatgccatag

SEQ ID NO: 23894 - DNA, 201 bp, Homo sapiens
tatttgggaggcctcaggctcaaaataggttaaatctccagatggtttgtttattgttaatgtctgacattggagtggagcaaagtggagtgaatcgggaraaaggatggataaggccagtcccttcttggacacagatgtcctgcccacacactggcttaaggtactgttagtagttactgcaacacgtaagtctaggca

SEQ ID NO: 23895 - DNA, 201 bp, Homo sapiens
tcaggcaaagtgaaacacgtttcctcttccatacagccccctgctgtatccaactttttccttcccagacagtaaacccacaagctttatctgagtgtacyggaaacttctctatctttacaccttggctatccccctagaattccaccttggtcaaggccaacacatgaaaaaagacactgtgtgtcttagacaaaagat

SEQ ID NO: 23896 - DNA, 201 bp, Homo sapiens
attcatttggtatacatagctcctaaacaaacaaacaagtcttatagccacctggcattttgcggcacattgcgtttatgttggaaaagcatatggttctraagtgtgtggcatacagtaaacacagcttaaggtatagtaataataagagcattctacatagatcgccccataaaagtgtcagcccattttaaagacaag

SEQ ID NO: 23897 - DNA, 201 bp, Homo sapiens
tgccgttttatgagcatttttcattccaaacctttcttgcaagggaagaactattattcttatcttattcccaagttacttagagcttatacagatccatycatttggtatacatagctcctaaacaaacaaacaagtcttatagccacctggcattttgcggcacattgcgtttatgttggaaaagcatatggttctaaa

SEQ ID NO: 23898 - DNA, 201 bp, Homo sapiens
ccatatattttctcccatattatatagtggctaaaggaacatggaatagtaatggctgtgttgtcatctggaagatccagacatccagtaaattccatttytgagccattgacttaatttaataaatatttactggacattggtattgaagtactaagtattggagttaaaagtgggctgaaatataaggtgaataagaca

SEQ ID NO: 23899 - DNA, 201 bp, Homo sapiens
caagggtcctcttctctgggcaatgtccttcctctttacgtccattcttaaaaacgcctcatttccatatattttctcccatattatatagtggctaaagraacatggaatagtaatggctgtgttgtcatctggaagatccagacatccagtaaattccatttttgagccattgacttaatttaataaatatttactgga

SEQ ID NO: 23900 - DNA, 201 bp, Homo sapiens
gatcagatcaggaagattttattcttgactgtagcataagtaagcaagggtcctcttctctgggcaatgtccttcctctttacgtccattcttaaaaacgsctcatttccatatattttctcccatattatatagtggctaaaggaacatggaatagtaatggctgtgttgtcatctggaagatccagacatccagtaaat

SEQ ID NO: 23901 - DNA, 201 bp, Homo sapiens
gtgctggactccctgcctggcacacgatccatgctgtctaggtgcacctgctgttgttgctaccatgaccatcgtctgcccctctcctagttcccctgaayccagctctccaccactgccctccaggagatgcggatttaaatgtaacaaagtttagggagttggctgaaagtttcgtttttcttatagacttaagaaatc

SEQ ID NO: 23902 - DNA, 201 bp, Homo sapiens
tttaagtgtgtttgtgtataattattgcagctaatacaaatcaacaagagctccttggtattatctaatgaaccatctttaatctaattttcccaatgtcyaaaaattatctttttagttagtttatttggattaaggtctgtagattaaatttggttggtatgtcacttaaatcttttcctctagagtaatcctcttcat

SEQ ID NO: 23903 - DNA, 201 bp, Homo sapiens
actgaggattgctggttaaagtgctggactccctgcctggcacacgatccatgctgtctaggtgcacctgctgttgttgctaccatgaccatcgtctgccyctctcctagttcccctgaatccagctctccaccactgccctccaggagatgcggatttaaatgtaacaaagtttagggagttggctgaaagtttcgtttt

SEQ ID NO: 23904 - DNA, 201 bp, Homo sapiens
tattttacctgtacatattttagcgtgtagctttttaaaaatagacatatatacagtatacatagatacatatgtacatatgtgtgtatgtatgtgtttawgtgtgtttgtgtataattattgcagctaatacaaatcaacaagagctccttggtattatctaatgaaccatctttaatctaattttcccaatgtccaaaa

SEQ ID NO: 23905 - DNA, 201 bp, Homo sapiens
tgccccagtggctggccctctgccatttgtaggccatctcagggatgacagctcacgtgattaaagggctaaatgaagccctttttggtggggaaagaggsggcttggactcaaggcagtgcccagtcagaacccgagctccaccatggatagcagtgacagaatcactttaccccaccccccatcacattactgtttcct

SEQ ID NO: 23906 - DNA, 201 bp, Homo sapiens
tgagactgtcgcccaagtgaaaaagatagcagaagataagaaggaaaactgtttccagaaattgtcaaaagacagccaggtgaacaagattgtggcccgakgtggcacaggatgctgggctgaaaattacagcagcatgcacagcacttattgataggagaatgctcagctgtgctcctgagggcccttcagcctgctttg

SEQ ID NO: 23907 - DNA, 201 bp, Homo sapiens
cagaagcctctgtagtagcattttaggtagagtattaagatctgatttttttctactttttagattactatagcagaagtgtggaagataaattggaggamcgagattttgttagggacattagtaagagactcaagggggaaaaaaatctcactaataaatgataggataaatggatgctgcatgagtttgtatgatttt

SEQ ID NO: 23908 - DNA, 201 bp, Homo sapiens
ctttggagggagtgactgatggcaagaatagttgaaagaatcctccagaaagtgctatttgaggcgggtctcaaaaaacgaatagaaattgacccaggggratggaaattgtatacattctagaaaaaaaaaaatagaaaagttcagtggagcatgacattttggaagcacactgatgtctttgtatgacttgataagaag

SEQ ID NO: 23909 - DNA, 201 bp, Homo sapiens
gtcacacagctggaatttcttagaggcaatatgtttccatcaacccaagtacatcaaagcggtcagaaaaagagggatgcccagtgtcctaagatgactgygctatttctgttactttggggtatttttaaagaaaaagcagacacttggcctcaccagtgcaaacacccatgcaccttagaagttataggtggtccagga

SEQ ID NO: 23910 - DNA, 201 bp, Homo sapiens
gggccttctctctctctcacctctgagcctgcagcctcgacaaatcatgaaaggcaaggaggggagtggtaatcacaggttttactaacctgtggctgagrctgtgaaagcttgggagcagcttctggtgttaatttgctgttactttgacatgggcccctgcttttttgatacccagttgagggtgaaatcccaagctgt

SEQ ID NO: 23911 - DNA, 201 bp, Homo sapiens
tgtcacaggagcaaattctggccaagacagcaaattccaccaaggacctactctgtaaattcctaacttcctattagtgggtttttaaaattgtattttcrggaacatagtcccattcatgggactaaaataatactacgttgatgatcaaacgcttagaaacgaaacaattagaaccctgttgggattctactctagttg

SEQ ID NO: 23912 - DNA, 201 bp, Homo sapiens
tttaaatccaaagatgtttttgaaatgtttcttaatgcaggaaaaaatatattggacacacttgagaatgaaatcagggacaccatgtaaagtattctgawgtattgctacaccttcaatatctaaattgattgaggcagggcctctgggaagaaagtgaaaaattcagtctgtcttccacatgttttgtctataccagtg

SEQ ID NO: 23913 - DNA, 201 bp, Homo sapiens
tcattaataaagaatttttacctagctaacattttttaaatcaaaaacaaagggaggggttggaggctggagggaggtcatttaaaaaaatgattacaaawcctatttgttttagctcaaagtctcaacagtctaagacttggtgatctaaatttaaaaaaaaaaagtcatgagttttgttttgttttattttcccatagt

SEQ ID NO: 23914 - DNA, 201 bp, Homo sapiens
ctgcagttttatgcttgtgtgtgtgttaatgcataacaaaggattcagcgctatggcctggtaactggaaagtaggtcaaaagagaggggtgagactgtcrcccaagtgaaaaagatagcagaagataagaaggaaaactgtttccagaaattgtcaaaagacagccaggtgaacaagattgtggcccgaggtggcacagg

SEQ ID NO: 23915 - DNA, 201 bp, Homo sapiens
atatgagattttatctgtttgcttgtttgtttttacataaatgatgcagaaataactgactctccaactggaagaaagtttaaaaattgaccctcatcttrtcccatatacagtagtaaatctcagatggaatgagtattaatgtaaaaaagacaattttttgaggaaatttaacagacttaactaaaaactggaaactct

SEQ ID NO: 23916 - DNA, 201 bp, Homo sapiens
atatttagtaggacataatagagaatccagaaatggatttcagtatatgagttaatatgattgttggtttcatgaagtaagaagaccatatgagattttawctgtttgcttgtttgtttttacataaatgatgcagaaataactgactctccaactggaagaaagtttaaaaattgaccctcatcttgtcccatatacagt

SEQ ID NO: 23917 - DNA, 201 bp, Homo sapiens
ctaaatttcaatttcacgtaaacagaatgggattaataatcatgtctacccccaagaccatagggctgtagagaagattaaataaggtagtgtaagtaaaytgatgaacagaatgcctgcattactaagtaaacactaactaaataaatgtaagttacttgttattattgttgtcattaaccagagtcaggatcacgtgtt

SEQ ID NO: 23918 - DNA, 201 bp, Homo sapiens
tacaaagggaaaaagaagctctgggccaggcatggtgacttatgcctgtaattccaactctttggaaggctgaggcaggagaatcacttgagcccaggagktcaagactagcctgggcaacatagggagaccctggctctacaaaaaaaataaatttaattagccgagcatacacctgtagtcctagctactcgggagcct

SEQ ID NO: 23919 - DNA, 201 bp, Homo sapiens
tatctaagtggaaaaaagttaacaaatttcactgtaatcagaaattagaaagaaatgcctgctatcatcattccctttttaaaaagaagtactttaaaggytttagtaaatgaacaatgtaagagatacatctgctataaatgctggaaactaagaagtaaaactatatatttgctaatactatgattgtgtatgtagaaa

SEQ ID NO: 23920 - DNA, 201 bp, Homo sapiens
tgtaatgtcaatgtaaacattgttgaaatggcaccagtttttggaaaagctcctggactccccacctaaactcttctgactgtaattaaacatgatcaacrttacaccaagagaggtagattcagcagtgcccagaaaaaaactggcaagatgccttgaaactgttacctcttggcctttgttttactatgtaaacacaaa

SEQ ID NO: 23921 - DNA, 201 bp, Homo sapiens
tgcttctaaacgaatgtgcacacaaatcacccagtgatcttgttaaaatgcaaattcttattcaagagttctgggaggggcctgagattctgaattcctamcaagctcccagggaatgccaatattgctgatccatgaatgcctcaagtagcaaggctccacaccattgtaatgtcaatgtaaacattgttgaaatggcac

SEQ ID NO: 23922 - DNA, 201 bp, Homo sapiens
gtcttattcttactcaaatatacatttcctatatgtttgttgactatataagtgattattgaacaactacagagcatccagtctttgctaacacttggtaraactcagaaagacggagattttttttctttgttcccaatgaattgataaaccagcggggaagacagacttctctacaactagacacagcaagtcaaaaag

SEQ ID NO: 23923 - DNA, 201 bp, Homo sapiens
tttcttgaccatctctctccaggcataaggtcttattcttactcaaatatacatttcctatatgtttgttgactatataagtgattattgaacaactacakagcatccagtctttgctaacacttggtaaaactcagaaagacggagattttttttctttgttcccaatgaattgataaaccagcggggaagacagacttc

SEQ ID NO: 23924 - DNA, 201 bp, Homo sapiens
tctgtcttttttctttttgagttggagtctcgctctggtgcccatgccggagtgcagtggcgtgatctcagctcactgcaacctctgcctcccaggttcawgtgattctcttgcctcagcctcctgagtagctgggattacaggtgcccgccaccaggcctagctaatttattttttgtatttttagtagaaacgggattt

SEQ ID NO: 23925 - DNA, 201 bp, Homo sapiens
ctgacctcaagcaatctatctgcctcatcctctcaaagggctgggattacatgcctggccaaaaagatcagcattttgattatatttattactttctagawtttaaaatataaattagaaatctcaggtttttgttgactagctggtaagatggttaaggttaggagctgagccatgttgcctctctgctttactccatag

SEQ ID NO: 23926 - DNA, 201 bp, Homo sapiens
gtatcccatgtacctagatcacagcctggcatgtcataggccctcaataaatattggttgaattaaattgcaaatgtaaacgctttagaagacaacatttrtctggacatggttgtgtgcgtttattcttaaaagtgacttataatctcataaatctgtatgaaatgaacatagatacagcacatgcatataacaggaaac

SEQ ID NO: 23927 - DNA, 201 bp, Homo sapiens
actttctctctggtggattgtatttttgcctgtcattatctctggatctcccccaggtcaagaagaagagagattggccctagaaactgccctgatgtacrgagctaaaaagcccctcaacacagaaggtgtcatgaaatcaaggtccaacgttgacatggactttgaagtggaaaatgctgtgctgggaaaagacttcaa

SEQ ID NO: 23928 - DNA, 201 bp, Homo sapiens
acctagatcacagcctggcatgtcataggccctcaataaatattggttgaattaaattgcaaatgtaaacgctttagaagacaacatttgtctggacatgsttgtgtgcgtttattcttaaaagtgacttataatctcataaatctgtatgaaatgaacatagatacagcacatgcatataacaggaaacatttcttgcga

SEQ ID NO: 23929 - DNA, 201 bp, Homo sapiens
atttcaagatcccatctgtgacaggtataatcattctctgaagaatattttacaacctagggagacaataatttacattttgttcatattagacaaaaagyaggaggacagggaggcagttgctcctccggagatttttttcttttctttaacagtccattttccgatatgtttggaattaggctaaattgtgttaggtag

SEQ ID NO: 23930 - DNA, 201 bp, Homo sapiens
cctggcaccagtgatcctgccctagaaaacctccttcttcttaagggaataactattattatagtctgatcgagctgatacaaatatagcccttgtgttgygaggcttatgtgagaatatatgtgaattatggttgtcagctggggctggttctttgtaatcaacaggggtgcctcaaataaatgaattacaggatccacc

SEQ ID NO: 23931 - DNA, 201 bp, Homo sapiens
aacatcgtacctggcacaggacagctctgcaacaaagatgcatccagcccgatatgtcagtagtgttgatgctgagaagccctgatctagatcatgattastgtttttgccacagccttcaaaccaggcttctctctccacaccccatgtgccagccagcctaaaagtaacttctggttcatgttctagtttgcctgtcat

SEQ ID NO: 23932 - DNA, 201 bp, Homo sapiens
gctactatcagatatacttttgaaggggcttatgcccatccttatatagcataccatggagaagacagatggctccaaaatattttttccagaaagaatawagtgatcatagcaaacacttttgccaataatgtctctgtggcagctccatcttcttcagtttagagagcttttgtaaatgctatctttattttgtatttt

SEQ ID NO: 23933 - DNA, 201 bp, Homo sapiens
tactggtatgggaagggttcttaatctagggttcatgggcccctagaaaaccatgtatggacttcataggtctatagtgcatcccctaaaaatacatgccyatattgtatatatcttgtatttgtcactgtgtatgtctgtgtagaggaaaggtcagtagctactatcagatatacttttgaaggggcttatgcccatcct

SEQ ID NO: 23934 - DNA, 201 bp, Homo sapiens
gaggcttcatgtagagccagtctactggtatgggaagggttcttaatctagggttcatgggcccctagaaaaccatgtatggacttcataggtctatagtrcatcccctaaaaatacatgcccatattgtatatatcttgtatttgtcactgtgtatgtctgtgtagaggaaaggtcagtagctactatcagatatacttt

SEQ ID NO: 23935 - DNA, 201 bp, Homo sapiens
catcagtgacctggaagggtgtatttcactttccacagcgtaggaggcttcatgtagagccagtctactggtatgggaagggttcttaatctagggttcaygggcccctagaaaaccatgtatggacttcataggtctatagtgcatcccctaaaaatacatgcccatattgtatatatcttgtatttgtcactgtgtatg

SEQ ID NO: 23936 - DNA, 201 bp, Homo sapiens
atactaagcattccttctcactgtcatcagtgacctggaagggtgtatttcactttccacagcgtaggaggcttcatgtagagccagtctactggtatggraagggttcttaatctagggttcatgggcccctagaaaaccatgtatggacttcataggtctatagtgcatcccctaaaaatacatgcccatattgtatat

SEQ ID NO: 23937 - DNA, 201 bp, Homo sapiens
aatactggaagcaaactgattaggcatgacatatgaaattacctgagaaggtttaatgtcctgaacatattcagatctgaagcctatctatgatggcccarttgcatgggccagtttctcaaatactaagcattccttctcactgtcatcagtgacctggaagggtgtatttcactttccacagcgtaggaggcttcatgt

SEQ ID NO: 23938 - DNA, 201 bp, Homo sapiens
atcaacacataacgtgaaaacactatgtgttggcagcattttcctcaaaagaagcaaggagagggagacacctccagttacatttcccaagcagaacacastgatgtcgagcattgggtaggtttttacatttagtttggtttgagtgtctaaggctcattatcatcagtagtcagggacaggaagtttacattctcggtg

SEQ ID NO: 23939 - DNA, 201 bp, Homo sapiens
ggtaccatagcatggtgcatcactgaaatcaacacataacgtgaaaacactatgtgttggcagcattttcctcaaaagaagcaaggagagggagacacctycagttacatttcccaagcagaacacagtgatgtcgagcattgggtaggtttttacatttagtttggtttgagtgtctaaggctcattatcatcagtagtc

SEQ ID NO: 23940 - DNA, 201 bp, Homo sapiens
cttgacaccatgggttgcattgtagagagaggtgggtacaggcacagttgtgtgatttcctagtgtcatatgtcaacagtggcaggagctggaatgacatscagcccctgaattaccctgtgctctaagactggtctgtatagtgccaaatattgataacttgggcccacccaaggagaaaatctcatataaataaaagta

SEQ ID NO: 23941 - DNA, 201 bp, Homo sapiens
tagcaatggaaagggcggatttctacagtcctcaaagagatgatttgcttttgaatacttgtgtttctctcctcttagttgctatcatccatgatttctgygcctttttgattgtttcttttttggtggtggcattttgtttttgtagctggtaacctggtatttctaagagttatttggtgacttattcccacttggtct

SEQ ID NO: 23942 - DNA, 201 bp, Homo sapiens
gccatgtgcaagctccagtcttgacaccatgggttgcattgtagagagaggtgggtacaggcacagttgtgtgatttcctagtgtcatatgtcaacagtgkcaggagctggaatgacatccagcccctgaattaccctgtgctctaagactggtctgtatagtgccaaatattgataacttgggcccacccaaggagaaaa

SEQ ID NO: 23943 - DNA, 201 bp, Homo sapiens
gttggcatcagacagtccaggttttgacttttgaactggcccattagtagctaaggaaagctgaggatagtttctgtgtcactgaaaacaatcacacttayctcatggaaatcttagtgtcctttctccagacctgctccctctctttcctgcatttgagggatgagatctacttttagaattacagagggaggaggcatt

SEQ ID NO: 23944 - DNA, 201 bp, Homo sapiens
tgatttgacacttttgaacattacaaggcagtaatttttagaatgcccctccatttgggtttgactgatgtttcctcacttgatgttaaaatcaagtcacrtatctttcacaggaagattgcagaaatgatgctgtgttcttcttggtgcctcctacctggttgcacataacttttacagatcccattactgatgatgtta

SEQ ID NO: 23945 - DNA, 201 bp, Homo sapiens
acggggattgtggtcttaataagaccagaggacttaggagaaaggcagcttggaatagagaggtctagagaattaaacatctttagctcacagcataatgsaaagaaagtgcccttcaggggaacatgtatacaacagggttctgagaagaggtaaaaataaaactgcatcctgcactttctgcttgccgtaatgctgcag

SEQ ID NO: 23946 - DNA, 201 bp, Homo sapiens
cttcctctgcatgcagtttcttttccctatatttatgctcaaacttgcatcattcttgtctctagacgttctatttgctgtaataaatgaaattcttctcmatctaaggttagtttgatctcacttctgaactacaatttgaggccaatgtaccacattctatctactcttcagtactctgcaagagattggagtgaggac

SEQ ID NO: 23947 - DNA, 201 bp, Homo sapiens
cctgtgctaagaaagaggaccagaggagttgattgctaagctccttttcaacaggaacatttgtgctcctccagctcattcttgggctggtttatcacggrgattgtggtcttaataagaccagaggacttaggagaaaggcagcttggaatagagaggtctagagaattaaacatctttagctcacagcataatggaaag

SEQ ID NO: 23948 - DNA, 201 bp, Homo sapiens
ctgctgtgggggatgggggtgagatttctaggtcactggagctgtgtacctaagaggattatggctgcctctgctgagtcatgcaggttgtcagggaagtkgggggaagctggcagtcacaggagtcacccagctgccatgcaaaccaaagggccagtctcactcccaccgtgcccccctcaacagccctaagtccatttc

SEQ ID NO: 23949 - DNA, 201 bp, Homo sapiens
aaaaaaaaaaagaatgtgttttaagggttttgctttatcagatgcataatataaatcaacagtgagttaagagtatccaagacactgacaatatcttgatktgaaataatagactgtttattttaaaagatgtaatggtctcttttttttttttttacagaaaaaccacaactagagtaatgtacttaattccagaaaata

SEQ ID NO: 23950 - DNA, 201 bp, Homo sapiens
cttggtaatggtgaattatctcagcatttgtttgtctgaaaaaggctgtatctttctttcatatatgatgcttagtttcgctggatacaaaattcttggcygataattgttttgtttgaagaggctgaagatagggttccaatcccttctagattgtagggtttctgctgagaaatttgctgttcatctgataggttttct

SEQ ID NO: 23951 - DNA, 201 bp, Homo sapiens
accgtggctcccactagtacatttcagccaaccatcatctttcaatttcttaagcaactatgcactctcttgcctcagtcttcacctatccttctttctcygcctgaagcattcctctccacccccctttccacatggacaactgactcctcttttgctcactgcttatgtctcacttccttcagagaaattccttatttt

SEQ ID NO: 23952 - DNA, 201 bp, Homo sapiens
tccctgtgaaggtctcaggagagaggcttcccaagctgtgaagtgctcaaaccacagcagaaaatagaatttaattgcaccactgataataaaccggatgkatgaaggaaactgataactttcatcttttaggcactattaatttgcaggattatttgttagttatcttctgggtttacttaaagagcagtttaattcccc

SEQ ID NO: 23953 - DNA, 201 bp, Homo sapiens
tgatgtgtgattttcacatacataacatactttctctattgagaaatgtcttgccccaaactgtgcagcttgtaacgtgtagataactatttcttagcctrtactctttcaactattttgtgctgcattttggtgaaaatagacagcctatttcatcattttgaagcaacatttatatagaatgtcatttcagatttttgc

SEQ ID NO: 23954 - DNA, 201 bp, Homo sapiens
tatgatgctacgagagcccctaatgaggagatcactctgaaatccacaaagccttgttttcagctttttattacactttattgctgcaaagaaggagaagraggacctccctccacaagcaagctgcctaatagctgtaaatgcaaacactttttgctattattaaatatagatcggggtgttatgaatgtcatcaggatt

SEQ ID NO: 23955 - DNA, 201 bp, Homo sapiens
tttcacatgaatcactatttgcccatgtttgccactatttctcctatgttttatttttgaagctttataatttgaacttttacattgtggtctatgatccrtcttgagttaccttttggtgttgtgtgaggtagggatcaaatcttattttttccaaatttatccatttgttccaccagcatttgttgaaaagactgttgg

SEQ ID NO: 23956 - DNA, 201 bp, Homo sapiens
tgctggtagcactgggggtgggtcatgagttgcctggccccactaattcacacacaatgttctatttcccctggatttgtcctctgtctgtcctctctccmggtcacatgagctccttggatacagatataatgccttttacatgtcctgtctgattcaatccttctctttcaggtgggggcagtggggggacgatgaact

SEQ ID NO: 23957 - DNA, 201 bp, Homo sapiens
tgatcctacagataaacagaaaataaagttattttccctttgtccatcttttcctccccctctttttgtcccagtatttagaaagatttttttctttccaygcatgaaaaagacagtaatgacataactacttttatatcttgccaagcagctcctcaaggggttaactataaaaccatgttttgttcattttctttcaat

SEQ ID NO: 23958 - DNA, 201 bp, Homo sapiens
ttctttgctttttggaaaagagatgaggcagctccagtctgtgtctcccttggctttccccagacaccgtaaatgatattggcagcatcccagccctaccrctcatagagcgaaaacctattcctccttctcctgccacgtttaataaactttatctagaacaatttcttgtgcagtggcaaaacacagcacttacataac

SEQ ID NO: 23959 - DNA, 201 bp, Homo sapiens
actgaagaacttggagtctgatgttcaaaggcaggaagcatccagcatgggagaaagatgtaggctgggaggctaggcccatctctccttttcaagttttkctgcctgctttatattcactggaagctgattagcttgtgcccaccagattaagggtggatctgccttccccagcccactgactcaaatgttaatctcttt

SEQ ID NO: 23960 - DNA, 201 bp, Homo sapiens
ataaggaaaagggagctttgcagattcctaaaataatgtgatgcaaacagatattttctccccaaatagtcattgttctcagcattttgtaggtaccatarcatggtgcatcactgaaatcaacacataacgtgaaaacactatgtgttggcagcattttcctcaaaagaagcaaggagagggagacacctccagttacat

SEQ ID NO: 23961 - DNA, 201 bp, Homo sapiens
catatgcttagtggaagatatcttgtgatttctaaaaaagtaatttctttccaaaaagtttatataagagaaagagagtatgtgtgtgttagtaactttcytgtttaccaaagaatcagagtagcagctcattatcatgaattagtataaaggacaggaatgtcaatatcagtaagtgatatgtaacttgaaaaagcatac

SEQ ID NO: 23962 - DNA, 201 bp, Homo sapiens
ggatttcagaaaataaagaagctattccagcaaaaaaaaaagtttctatttttacctgtattctgtcagggatcacagtatatgtagttttgaagatgaawgttttagagtcagaaagacctggatttatatccaacttccgccagattcctaactctgtaggctttttatttatcttctaaatttcaatttcacgtaaac

SEQ ID NO: 23963 - DNA, 201 bp, Homo sapiens
cttagccaggatagatgatcgtaaactatgtctatgagtgagccctcctcatcgaaggtgttcatttccatctctctcttcaggacagctacagaacagtrcacattttagaatgaaaatgaggagtcactggtaactgcggtacctaaaacataatttgctctgtgcatttcatgtttgctatttttttgaatcttaaaa

SEQ ID NO: 23964 - DNA, 201 bp, Homo sapiens
aggagtgcagttgctctgttttaacctgagctaaccagcacttacacagagcctggggtgctcctcttgcaaagacagtgtacatggggcctgtgaaagakgcttaacccacagaaatcgacttcaacaagcagaatatctgcatgaccagcactgattggtggggaattgtatagataacacaagatccatgggaagtat

SEQ ID NO: 23965 - DNA, 201 bp, Homo sapiens
gagtagtgaagaaaagttgcacctacaggcagctaggggcagcaggaagcgagctgtccacatgacagatgtctcttggaaaccatggagccgagcacagytgccattagctgtcagcatggaggtgacagtgaaggccaactcaggaatgggacagaatcagatgccacgagaggaaagactaaaacccagtccacgaaa

SEQ ID NO: 23966 - DNA, 201 bp, Homo sapiens
aagatagactcaatctgatgtttctgttctattttgaggaccattcaacagcacaggcagaaaactctgattgtcaaagaatgttctagcaaatgattagwaatgttactgaagagacagtttgggttcctagtgataaaaatcaatcattccttataatagcaaccaccaaaaaaaggtcatagttttagctgctgcata

SEQ ID NO: 23967 - DNA, 201 bp, Homo sapiens
agggcatagagcaagcactgaataaacagaattgcttggaaaaaatttttaatgcataaaaactccatgctgcaatgggtggtcttaatctataaacaaasctttttcaaagcacattttagagcagaaattaaccagctttcacacctgggacactgccctaatcagtgtataatcctaattctcattatgtcctcagta

SEQ ID NO: 23968 - DNA, 201 bp, Homo sapiens
ttcccttgagatgtatgcatttatttttaaccctggccttttgctaatatcgaaccacaatgccatcattaatccccattaatactttgctctgactatgmcttttgggaactaactcatgactaaacttttttaaccaatcgatgttcgatgtactctttagcattgtaaaaaaatcttgaacttcagctagtaaatcaa

SEQ ID NO: 23969 - DNA, 201 bp, Homo sapiens
gaggtttttaaaaaaatactgaagagacctgaaattgcatgaatgctgagaagacccactattagcaagcaggagcttgaagctgcaagaggaagagtacrtaagagtcacagcaaagccccggagaacaaggcaacgcagaagcctggtttggagatgcagagggaggagggacctttccaacttcagtaacaagaagaa

SEQ ID NO: 23970 - DNA, 201 bp, Homo sapiens
attataactcagacctgtgcttctaaacgaatgtgcacacaaatcacccagtgatcttgttaaaatgcaaattcttattcaagagttctgggaggggcctsagattctgaattcctaacaagctcccagggaatgccaatattgctgatccatgaatgcctcaagtagcaaggctccacaccattgtaatgtcaatgtaaa

SEQ ID NO: 23971 - DNA, 201 bp, Homo sapiens
gagaaaagaaaaaaaagagaagcaattagaaaaaatgaagaaacttgcccacagttatacttctccctttaaattgcattgcttgattgctgctttctttycaatgcatttctgatgtgacagttcccaccaggaaaattgccagagaaagctaaggagaatgcttaactttgtgccatccgaacacttacttccctcaca

SEQ ID NO: 23972 - DNA, 201 bp, Homo sapiens
gccaggaactaggcttggacaggggaagcaaattcatttcctgtttgtggcaaacggagtctggatgatgataagactttttccatctaaactgccttgtkaacccagtaaacaaagcaaaaatcaatatgctagattcatcaatgcttgctggaacacactccatggcaagggacatttcctaggcaaaatggacaatgg

SEQ ID NO: 23973 - DNA, 201 bp, Homo sapiens
tgcatctcacatcattcaggaagttacatgagagcctcaacttcatggctgccatagttgtaagacaggaagaaaaaagaacattgctggggaaataattmtcttaaaattcagtgcctgtttcaataggactgaataaagccaaggaaattagattttaaggctaattgctataatgagaagagacaagtatagaacgtg

SEQ ID NO: 23974 - DNA, 201 bp, Homo sapiens
ggagggggagaatttgggtgttaaggggtagaggtcctgacctgagacattttgagcaatatttccatttccgtcatacccttgtttatatacacaaaatrttcaatggttttcaaaaacactttcacctctattagctcctttaaaccttagaatacctctgtgaatctttccaaaatctgttccgttttaataatttta

SEQ ID NO: 23975 - DNA, 201 bp, Homo sapiens
aaatacgttacagacaagcaaatgctaagagattttgtcaccaccaggcctgccctaaaagagctcctgaaggaagcgctaaacatggaaaggaacaaccrgtaccagccactgcaaaatcatgccaaaatgtaaagaccatcaagactaggaagaaactccatcaactaatgagcaaaatcaccagctaacatcataatg

SEQ ID NO: 23976 - DNA, 201 bp, Homo sapiens
aacagacttaactaaaaactggaaactctgacactgtagaagaaagcaagaaccatgtacagttatgtgccacatagcaacatttcagtcaatgacagatyatgcataggtgatcttatgagattctgatggagctgaaaaattcctgttacatagtgatgtcatagctatcataatagaatagtgagattacttattttt

SEQ ID NO: 23977 - DNA, 201 bp, Homo sapiens
tctactatttagtgtagaaattaagcacacttcgaggggcgtggaaggacccatggtagaggatttatcttgatcagagtcatttctgcatctcacatcaytcaggaagttacatgagagcctcaacttcatggctgccatagttgtaagacaggaagaaaaaagaacattgctggggaaataattctcttaaaattcagt

SEQ ID NO: 23978 - DNA, 201 bp, Homo sapiens
catttttttcagtggccactcttccagttagcaagctgctcttgtaatactgactgagaaatgcagagaggcaagaagaggaaaaggggggaaatggcggstttttcatttctaatagttctgtagcagtgagtcctgcccatcactgtgtgtgatatatacagtgttctaaggtatactgagtgtatataacgcccttaa

SEQ ID NO: 23979 - DNA, 201 bp, Homo sapiens
ggacgtggattaaatgggatgtccaggacccatgcagtcctggattatatcaatgtacccaacatggagagccagatgttggtacagagaagtagacccartctggctgaagagtagattatttctgaagaaatgttaaactgggtggtatttcaaacaatcaaagactgaaaaaaagaaatacttatattaccaatttcc

SEQ ID NO: 23980 - DNA, 201 bp, Homo sapiens
gattgtcgtgagcatctagtgagcagtgtctgtgatcaagtctgacccacagcacgtgaccaataagtgttcattgactgggaatgtgcaacttatcataycccagcaaggtcaggaaagcactccagggaatacttgttcctatgaggaatatgtacgacctgtagcccccataaatctgacatctgaacaaaatgctgc

SEQ ID NO: 23981 - DNA, 201 bp, Homo sapiens
gtcagaaacttccaggaccgcctttggaggcagaagagcagttccacccaataactctaatgcagcggaagatgacctgcccacagtggagcttcagggcktggtgccccggggcgtcaacctgcaaggtatgagcataccccccttccccaccactctgggtccaggcacagccgggccctggcccctcttccctgcagg

SEQ ID NO: 23982 - DNA, 201 bp, Homo sapiens
tgaggtacagtataggtaaaatcttcctgtcttgctatttgatctttattcctttttaagaaaattctggtattgcctgtggctagcagttctttctaagragactgaactggtaccagactcctcccttgatagtgtaatctactttctgcagccttctgccctctccttgatcctggggtccaccttgtctcagaagag

SEQ ID NO: 23983 - DNA, 201 bp, Homo sapiens
taatgacctgcattctctctcttaggtccgtggcactcaggtagttggttctgacatgactgtgacaattcagtttaccaatcctttaaaagaaaccctgygaaatgtctgggtacacctggatggtcctggagtaacaagaccaatgaagaagatgttccggtaaaccttgggttggggagaccgggcaggcagtgcagg

SEQ ID NO: 23984 - DNA, 201 bp, Homo sapiens
cagaataaccagccaagcatgtttacagtgatgcagggaatcaatccgttctatgactatttccttaactctccagttagttgctatcctgcccagcaaayacagctgagagaagctgcttaataagaaccaaaatactgagctatttgcatacctgaagaactagtgcaattacccattactgcatccatcctgtcagtt

SEQ ID NO: 23985 - DNA, 201 bp, Homo sapiens
cctttgggtaggcaccctggagcacagtcacttgattgtatcttctgccactcaaagaggctattggtgtgtatcctttggccagaataaccagccaagcrtgtttacagtgatgcagggaatcaatccgttctatgactatttccttaactctccagttagttgctatcctgcccagcaaacacagctgagagaagctgc

SEQ ID NO: 23986 - DNA, 201 bp, Homo sapiens
tcctcagtgacatgcaacctttgactatactgcctactgcctgatgcccttgtcttgggtccccaatttctagcctttagcctggtgattctatttatggyccaaatatgacaatctatagatagctaacaaggggaaaagtcatcaaggtgggcagcaaggaggtctggaaaagtgtcccaagcccagtcagggcactct

SEQ ID NO: 23987 - DNA, 201 bp, Homo sapiens
ctaataaatgagggttgtgatttatctagcaacaggggaacagctcagcattaacaattaaaaggtctgtagaggacagagctttttttccttactcttcyccttagctgattgagttcagccctatgctataaatagcccttgtaattaatggctatctgtttgaaaatcagttatcaggaccacagtttaggagccttt

SEQ ID NO: 23988 - DNA, 201 bp, Homo sapiens
gtgggggccaatattcaacattcttaaagaaaagaattttcaaccccgaatttcatatccagccaaactaagcttcataagtgaaggagaaataaaatackttacagacaagcaaatgctaagagattttgtcaccaccaggcctgccctaaaagagctcctgaaggaagcgctaaacatggaaaggaacaaccagtacca

SEQ ID NO: 23989 - DNA, 201 bp, Homo sapiens
gttgctatcatccatgatttctgtgcctttttgattgtttcttttttggtggtggcattttgtttttgtagctggtaacctggtatttctaagagttattyggtgacttattcccacttggtctcagcacactccctttccatcctaagactgttagcacaagttttgcttccttttccaaagcaactgtattcacacttc

SEQ ID NO: 23990 - DNA, 201 bp, Homo sapiens
tactccagaagcatgttgtaaggattaatgagggaataactggaagctctttgaactgcttcgtgatagttccttcctaataagatgacccaattaccagscttattttcaatattgcaactatgtaggaaagctaaattcttatggtattccttaaggaaggataaccttcataaaatgctactataacagcagccagag

SEQ ID NO: 23991 - DNA, 201 bp, Homo sapiens
gctgggaaaagacttcaagctctccatcaccttccggaacaacagccacaaccgttacaccatcacagcttatctctcagccaacatcaccttctacaccrgggtcccgaaggcagaattcaagaaggagacgttcgacgtgacgctggagcccttgtcctgtaagctaacaatggtgtggttctttgtgagactcgctgt

SEQ ID NO: 23992 - DNA, 201 bp, Homo sapiens
tgatttatttagccaacacttactgagcacctcctaatgactgggccctgctctagtgctggagatgtgtagaagaataagaccaacagagctcccaaagkagatttatgcactctacaaatgcatgatggaattgcaagatgaaaacagaaaaactcttatggatctagataaagaagctttagaataaaaagtagcatt

SEQ ID NO: 23993 - DNA, 201 bp, Homo sapiens
gacacggtaccttttgactgtatagtgagaacttaagtttcaaatgaaggctccgagaacataaaaaaccatgaatcttaaagagaaacaaacaagcaaargtttaataagaacttccttgctagatgtcctcatgatttatttagccaacacttactgagcacctcctaatgactgggccctgctctagtgctggagatg

SEQ ID NO: 23994 - DNA, 201 bp, Homo sapiens
aaacctaaatgaactttcttccttctcacttctcacggactcatttaggtgaatgccaaagatgacgaaggtgtcctcgttggatcctgggacaatatctrtgcctatggcgtccccccatcggcctggactggaagcgttgacattctattggaataccggagctctgagaatccagtccggtatggccaatgctgggtt

SEQ ID NO: 23995 - DNA, 201 bp, Homo sapiens
gatccagttcaatatgttatttcaagagaaaaactcccccactttgtgatttgggcttaaactttaagtttctcaaataggacagaagctaaggtctagamgcacagaggacaaaccatgggcagttgcagtttattgtaataataatcttatttgcctgcgtgcattcaagatgataaatggccggtatctcctgatggc

SEQ ID NO: 23996 - DNA, 201 bp, Homo sapiens
ggggtagggaaacttggagaaaagtaaagcagaccctgtctcaagtcttgatgccaggcctgtgtgtgttttctcctactagtcaagaaagaggcggtgcwgatccaagccggcgagtacatgggtcagctgctggaacaagcgtccctgcacttctttgtcacagctcgcatcaatgagaccagggatgttctggccaag

SEQ ID NO: 23997 - DNA, 201 bp, Homo sapiens
attctgttttgttctctgatgtatcccatgtacctagatcacagcctggcatgtcataggccctcaataaatattggttgaattaaattgcaaatgtaaaygctttagaagacaacatttgtctggacatggttgtgtgcgtttattcttaaaagtgacttataatctcataaatctgtatgaaatgaacatagatacagc

SEQ ID NO: 23998 - DNA, 201 bp, Homo sapiens
actcacccagccaggcgtgcacctggggctccccccttctcccccttagcactgtgtctcccgacagcgcgccacactgttctgcacccctggcaatgccrcagcctaccttcggtatttctcactagaggatggctctcgcagccttctccctatcattaaccctttttcgctcttctccctcccttcccccgtcagctc

SEQ ID NO: 23999 - DNA, 201 bp, Homo sapiens
tacatacacgggtagattcaagggctgtttaagaggtaggatagaaaatatttgctcaaggatcggatttgatgattgagggagagaaacaaggaagcctsaagaatgatgcccatgtgtctggtgtaccacctgcgtgcaaagtgatggtattcattgaggtagggaactcctgagatgcaccaggttttccaggaaagt

SEQ ID NO: 24000 - DNA, 201 bp, Homo sapiens
aatgacttttaggggtttttgaaatttttttctaattttgtaggtattatgggagggcaatttagtgtagccttaatgaagttgaataatgcctcctgtaygtagtcctggacttgtattgtctacttgaccaccagtgactcaagaccaagacactttattctgccactggtcaaaccctgagatcatgagagggtgtta

SEQ ID NO: 24001 - DNA, 201 bp, Homo sapiens
gtgtgtggctgactcatgggcaatgaaataaattttgttgaatcagtggtattggggacctcacctctatccccaatactttggacaacccattaagcttsctcatgtcttttccatttgactacagtctggaacattatttctttaaactctcaacctctctgtgtagcttttaatcttccccttcttagccaagtttta

SEQ ID NO: 24002 - DNA, 201 bp, Homo sapiens
cattttgattatatttattactttctagaatttaaaatataaattagaaatctcaggtttttgttgactagctggtaagatggttaaggttaggagctgakccatgttgcctctctgctttactccatagtcctcatgttttgttgggaccatgttttgaagtttattgcattatgctgataatgacttttaggggttttt

SEQ ID NO: 24003 - DNA, 201 bp, Homo sapiens
ggtagacagtttgaaagctgtcactttgaaagagcgagctgccaagtttctagctaccgtatttaaaaaaaaaaaaaaaaaaaaggcggcttagcaatgarctgttccattttgccaggaactaggcttggacaggggaagcaaattcatttcctgtttgtggcaaacggagtctggatgatgataagactttttccatct

SEQ ID NO: 24004 - DNA, 201 bp, Homo sapiens
gggtccagcttgtataggccttgtcagtttcagcttgcaatttatccaaaaagcaaagagaagtagccatataagggctttgtgcaaataatttgatttcrgattttagccctgaaatgctcattctgactgcactgtagagaatggactggaaaggggtacatacacgggtagattcaagggctgtttaagaggtaggat

SEQ ID NO: 24005 - DNA, 201 bp, Homo sapiens
catccagcagggagttttcatggaatctggtggtcacagggtactttcttggctccggatgccttgctttgacttccatatgggatctccctgtgttcctyacccactgctccagtacccgtgttatcctgcctacctggctttgtgaacagcttccctgactccggagaattacatgcccagtgctcaggcttccccgcc

SEQ ID NO: 24006 - DNA, 201 bp, Homo sapiens
atatcatatataaatatattgtttataatatgtaaacaatatatacataaataatatataaaaactatatattatatatgtaaacaatatatttttaaaamccaaactcatgggtttatagttttttcatagtgaaaacaaacaaatatatagtttgcttatatctattatatataaacagtatataatatataaagatat

SEQ ID NO: 24007 - DNA, 201 bp, Homo sapiens
agtccattttccgatatgtttggaattaggctaaattgtgttaggtagacagtttgaaagctgtcactttgaaagagcgagctgccaagtttctagctacmgtatttaaaaaaaaaaaaaaaaaaaaggcggcttagcaatgagctgttccattttgccaggaactaggcttggacaggggaagcaaattcatttcctgtt

SEQ ID NO: 24008 - DNA, 201 bp, Homo sapiens
aacatggtaaagccccatctctactaaaaatacaaaaattaggcgggcatggtggcatgcacctgtagttccagctacttgggaggctgaggcagaagaaycacttgaacccgggaggtggaggttgcactccagcctttgcaacagagcaagacttcatctgaaagatagaaagatgaaagaaagaaagaaagaaagaaa

SEQ ID NO: 24009 - DNA, 201 bp, Homo sapiens
caaaatccaggtcttgttcagctggaaaaaaccagcagcgtccagacatgactgggttttttgtttgtttgtttgagatgtgaagttttgcatgtaaatcraatagagtttgccagaaaattcattgcctgaacaaatatggtctgctccttgggtattgccaagtaggagaaagatggtttgtctggagagactgcagag

SEQ ID NO: 24010 - DNA, 201 bp, Homo sapiens
gagttttggctgggatggctggaactgtgcatcattgcgctgggcatccagcagggagttttcatggaatctggtggtcacagggtactttcttggctccrgatgccttgctttgacttccatatgggatctccctgtgttccttacccactgctccagtacccgtgttatcctgcctacctggctttgtgaacagcttcc

SEQ ID NO: 24011 - DNA, 201 bp, Homo sapiens
ttagcgacacaagcgggggcgaatgtcatttctcaggagttttggctgggatggctggaactgtgcatcattgcgctgggcatccagcagggagttttcayggaatctggtggtcacagggtactttcttggctccggatgccttgctttgacttccatatgggatctccctgtgttccttacccactgctccagtacccg

SEQ ID NO: 24012 - DNA, 201 bp, Homo sapiens
accaaatacttggttgacctgtgggtggctgactcatgggcaatgaaataaattttgttttatacgtataactttatatatatgtaactttatatatatawaaaaagtttgcttatatataatatatatacacatatcatatataaatatattgtttataatatgtaaacaatatatacataaataatatataaaaactat

SEQ ID NO: 24013 - DNA, 201 bp, Homo sapiens
ttgtgttccagaatctctacctcttttaaggtgcagatactttttcactcgtttctccacagcaggtgtttccaccattctgttcagaacaataaaaagakcagcttttttttttttttttttttttgagacaggatctcactctgttgcccaggctggagtgcagtggtacaatcagctcactgcaacctctgcctcccc

SEQ ID NO: 24014 - DNA, 201 bp, Homo sapiens
atgtacatcagcatcatagaattctgaaactactgatgcaacagaatcataaaatgtttaatgagacatatcaatttaattctgctgcttggaacttaaaragccagagttcgtcagcattttgctaacaaatgtcatcatttacagactgaatttggtgctgattatgttcaccattactaaaaatattgggaaatgagc

SEQ ID NO: 24015 - DNA, 201 bp, Homo sapiens
tctcacgtgtcccagatttgttttaaaaatcattttcaattcatctagttttctattaatgttaaaaggttggaaattatattttaattagtgttagagaygtacatcagcatcatagaattctgaaactactgatgcaacagaatcataaaatgtttaatgagacatatcaatttaattctgctgcttggaacttaaaga

SEQ ID NO: 24016 - DNA, 201 bp, Homo sapiens
attaaaaggagatgacctactgcttccctcctgccagtgatgggccacaaaacagacatgacacgtgggccttctcacgtgtcccagatttgttttaaaartcattttcaattcatctagttttctattaatgttaaaaggttggaaattatattttaattagtgttagagatgtacatcagcatcatagaattctgaaac

SEQ ID NO: 24017 - DNA, 201 bp, Homo sapiens
actcccggctaattttttgtatttttagtagagacagggtttcaccgtgttagccaggatggtctcgatctcctgatctcgtgatctgcccctctcgcctyccaaagtactggaattacaggcatgagccaccgcgcccggcccccaagacgcacttttaagagattatacaggaaagttttacttatcactgccttagtt

SEQ ID NO: 24018 - DNA, 201 bp, Homo sapiens
ccaatgtccaaaaattatctttttagttagtttatttggattaaggtctgtagattaaatttggttggtatgtcacttaaatcttttcctctagagtaatyctcttcatctgtttcttcatgccacaaacttatggctgaaactgagtcattttttatgtagaactttccatattctgaattttgctgattccatcccccg

SEQ ID NO: 24019 - DNA, 201 bp, Homo sapiens
cccgggttcaagcggttctcctgcctcagcctcccgagtagctgggactacaggcgcccaccaccactcccggctaattttttgtatttttagtagagacwgggtttcaccgtgttagccaggatggtctcgatctcctgatctcgtgatctgcccctctcgcctcccaaagtactggaattacaggcatgagccaccgcg

SEQ ID NO: 24020 - DNA, 201 bp, Homo sapiens
tccttattttttgccttagcattttcaagtaaattctagtaatcatattattttacctgtacatattttagcgtgtagctttttaaaaatagacatatatrcagtatacatagatacatatgtacatatgtgtgtatgtatgtgtttaagtgtgtttgtgtataattattgcagctaatacaaatcaacaagagctccttg

SEQ ID NO: 24021 - DNA, 201 bp, Homo sapiens
ctgcaagctccacctcccgggttcaagcggttctcctgcctcagcctcccgagtagctgggactacaggcgcccaccaccactcccggctaattttttgtwtttttagtagagacagggtttcaccgtgttagccaggatggtctcgatctcctgatctcgtgatctgcccctctcgcctcccaaagtactggaattacag

SEQ ID NO: 24022 - DNA, 201 bp, Homo sapiens; identical to SEQ ID NO: 4943

SEQ ID NO: 24023 - DNA, 201 bp, Homo sapiens
ggcacaatcagaataccttatcccacaagttagcagacctgggcatgtagagagtactttaaatggagagttatattgttttgtgtttccttccacaaagsaaccagagatgctgttcctggaggaaacttatttagaggtagggacatttgatagggaagagagcatgagagagatggagattctggcttctgtccatgc

SEQ ID NO: 24024 - DNA, 201 bp, Homo sapiens
ttacttaaagagcagtttaattccccagggcacaatcagaataccttatcccacaagttagcagacctgggcatgtagagagtactttaaatggagagttrtattgttttgtgtttccttccacaaaggaaccagagatgctgttcctggaggaaacttatttagaggtagggacatttgatagggaagagagcatgagag

SEQ ID NO: 24025 - DNA, 201 bp, Homo sapiens
cctgtcccagctgcttggtggaagcagcttttgctacccttctgggctattgcgcaggtttcatttatgagctcaaccctgaaccttccctgacagcagcraggcctgtgtgcgtacctaattatgaagtgacggcctgtccctgtgaaggtctcaggagagaggcttcccaagctgtgaagtgctcaaaccacagcagaa

SEQ ID NO: 24026 - DNA, 201 bp, Homo sapiens
aaaatatacagcttgatgatgattttgtatgtgcgtgtgccttgcaaccacaagccagatgaagaaatggaggatttccaacacccctagaaggttccctsttgccttttacagccaataaccccctagactatcaccaagatagtaacttttctgacttttatcaccataggtttgttttgcccatttgaccagtagttt

SEQ ID NO: 24027 - DNA, 201 bp, Homo sapiens
cgtgctaaccatccctgagatcatcatcaaggtcagtcttagcgtctcatcctggaacagagacaaaggcacgcagacttagtgttcatgtgtgcatatgygtgcttgtatgtgtgtgtgtgtgtgaatgaatgtcctgctcaaaaaaaaaaaaaaaaaaaataccagtgctaggatcctcttgttctttgaaagaagtaa

SEQ ID NO: 24028 - DNA, 201 bp, Homo sapiens
ttaacttatttcaagatcccatctgtgacaggtataatcattctctgaagaatattttacaacctagggagacaataatttacattttgttcatattagasaaaaagtaggaggacagggaggcagttgctcctccggagatttttttcttttctttaacagtccattttccgatatgtttggaattaggctaaattgtgt

SEQ ID NO: 24029 - DNA, 201 bp, Homo sapiens
tgctgaaggtggagcccgcctgattggctgagagactggatatgtggtgtgagagaaggaaggtatggaggaagccaaatgagtgatgaatgtgaaatgtktgccacatggtagaatcttagtaaatggtaacttccaacatgtttacatttggggaaactgaagctcgagagatgagtcgatgtgttcaagcccccacac

SEQ ID NO: 24030 - DNA, 201 bp, Homo sapiens
cactgcaagctccacctcccgggttcaagcggttctcctgcctcagcctcccgagtagctgggactacaggcgcccaccaccactcccggctaattttttktatttttagtagagacagggtttcaccgtgttagccaggatggtctcgatctcctgatctcgtgatctgcccctctcgcctcccaaagtactggaattac

SEQ ID NO: 24031 - DNA, 201 bp, Homo sapiens
ggtacccaaaagaaatgtgagaaagagttatttttcctgtttttttttaaataaataaaccagtttctcatggatagcatttatgcttatagttcaataayaatattaccaaaaattgcatggagaattcagttcactagggaattcctagtatataaacctaaacatttaacttatttcaagatcccatctgtgacaggt

SEQ ID NO: 24032 - DNA, 201 bp, Homo sapiens
aatgttcacatccaattggaaacattttgtatgtgttcattttgtatttcagttttatatcttttgacaaagttaatttttcttataaatattttcagatraactcaaaagcagaaagagtagcacaatgaatatctacttatatgactctcagagttaatggttatcaagattttgccacatttgctttatctatccctt

SEQ ID NO: 24033 - DNA, 201 bp, Homo sapiens
agacagactttttttgtttttgttttgagacggagtccggctctgtcgccaggctggagtgcagtggcgcgatctcggctcactgcaagctccacctcccrggttcaagcggttctcctgcctcagcctcccgagtagctgggactacaggcgcccaccaccactcccggctaattttttgtatttttagtagagacaggg

SEQ ID NO: 24034 - DNA, 201 bp, Homo sapiens
gggactaaaagatgaaagagaagatataagcctgggaaaagatggcaggcatcacaccataccaggccttggggatcttgctttcctcctgcagataatgsgggacttgagaaggattctaattagcagaaatacataatcagaattatgctttacaaagtggtagggagggctgggcacggtggctcatgcttgtaaccc

SEQ ID NO: 24035 - DNA, 201 bp, Homo sapiens
aaatataatcatgcagtatgtactccttgtgaggcttcttttatgcttccttactgtattctgagcttcatccatgctgttttttgtttcagtagttcatwcctctttattgctgagtagtagtgtttcattgtatggatgaatcactatttgcccatgtatttacttgtggatggacatttaggccattttccgtttttg

SEQ ID NO: 24036 - DNA, 201 bp, Homo sapiens
tgaatgagcatgcaaagttccaaaacttctgagtagaagtttggttgggttcacattggtcatatagactaatttgggtagaatttatatctttacattastgaatgttcacatccaattggaaacattttgtatgtgttcattttgtatttcagttttatatcttttgacaaagttaatttttcttataaatattttcag

SEQ ID NO: 24037 - DNA, 201 bp, Homo sapiens
cagccttgactatcaacattcaattctcacctgccccaccccacaacaccgtaactactgagtttcttttgcaaaaccctagcatgtcatgaagcacaatytgacatccaccacaccacttccacctgtgattaagtctggtcaccaccacactgtagctggggatttgtggttcacaaaacctggaaacgattttctaca

SEQ ID NO: 24038 - DNA, 201 bp, Homo sapiens
gccctgcctggctgttttctttcacattgttttttccagataagcttttgaatgagcatgcaaagttccaaaacttctgagtagaagtttggttgggttcmcattggtcatatagactaatttgggtagaatttatatctttacattactgaatgttcacatccaattggaaacattttgtatgtgttcattttgtatttc

SEQ ID NO: 24039 - DNA, 201 bp, Homo sapiens
ggaaatacatgcacagagaagcaggggtggcacaacataggaaatctgcccatataatcctatgcacaaattaaaggaaaaaattaggcaatcaaatcagyagtcacagaaaggtacatggtaaaattcagcatccagttttaggaagagtttaaggggaaaaatttagaaaaaaaacacctcaatgataataaagattgc

SEQ ID NO: 24040 - DNA, 201 bp, Homo sapiens
gctaatgacctgcattctctctcttaggtccgtggcactcaggtagttggttctgacatgactgtgacaattcagtttaccaatcctttaaaagaaacccygcgaaatgtctgggtacacctggatggtcctggagtaacaagaccaatgaagaagatgttccggtaaaccttgggttggggagaccgggcaggcagtgca

SEQ ID NO: 24041 - DNA, 201 bp, Homo sapiens
ttaccttctctgggtcgggaggacagtgggaatgtcagagggtgactgaaatccaccccaaattttcttggcccactcttttcttttttaactacccttcyattcccaccagaggaacagtaaaataaatgaggtcattattcttcactacatgcctcttgtaaattgttagtcagcctgcaagggtggttatttacgagg

SEQ ID NO: 24042 - DNA, 201 bp, Homo sapiens
tcagtaggctcagcatttgtttttacatgtttgttataaatccttaccttctctgggtcgggaggacagtgggaatgtcagagggtgactgaaatccaccscaaattttcttggcccactcttttcttttttaactacccttccattcccaccagaggaacagtaaaataaatgaggtcattattcttcactacatgcctc

SEQ ID NO: 24043 - DNA, 201 bp, Homo sapiens
tagtcattgttatttcgaggataccagtcctggcgaactactctactttatactgaaggggctaaaaggaaagaagcaaactcaactgactattgaggaamcatttgcttgtgcttcatagattgattccattccagtgttactagataggcaagcaacgtctctggagtggctatatgaaaccattttaggaaggcagtg

SEQ ID NO: 24044 - DNA, 201 bp, Homo sapiens
tcagccctttaggatatgcacagcttcatgcaccttgggttcccttcataccctctttctttcccctgtctcctcctgttacatccttccctttttcctcytcctgctctgcatttttccctctctcatacgtccattcctttaattcagatatttttgaggcctgttctataccagctctacaccatgcagcagtggtat

SEQ ID NO: 24045 - DNA, 201 bp, Homo sapiens
ttccttgtagagtctcttatatgcttcaaagtgtgctcatagtcagtatctccctagattgtgtgtttggaaggtgtaatccttatctcattcagcctttygtggtgcctggaattgagtcaatgttcagtaaatgtttgctgaactgaactgataatcaccattctgagaggcaaggagacgattattagactcagattt

SEQ ID NO: 24046 - DNA, 201 bp, Homo sapiens
ctagtttctctttgtttttctttctccaaatagtttgaagatggcatcctggacacttgcctgtatgtgatggacagagcacaaatggacctctctggaakagggaatcccatcaaagtcagccgtgtggggtctgcaatggtaagcagcaattactgatacctaaaatctgttacacctgtcatttgcctcagtatatat

SEQ ID NO: 24047 - DNA, 201 bp, Homo sapiens
attccttcttaagcattctaaaatggcacactcatcagcataagcttactcacacactgtgtgtacttttacgcacccagaagtcagaaatcactgcctarcagaagccagtgcaaaagagaagcagacaggaagcagttaacctaatgtgtctgtggtggcagctggctaagcggaagctgttaattattgaataagcac

SEQ ID NO: 24048 - DNA, 201 bp, Homo sapiens
gagtttgagaccagcctgccctacatggcaaaaacttgtctctactaaaaatacaaaaagttagccaggcatggtggtgggtgcctgtaatcccagctacytgggaggctgaggcaggaaaattgcttgaacccaggaggcagaggttgcagtgagctgagactatgccactgcactccagcctgggtggcaagagtgaaa

SEQ ID NO: 24049 - DNA, 201 bp, Homo sapiens
tcacccagtggccactagtggcctctaagaggccttgtatccgcggttaccaatctgcggatgatgactttggctccaggaacaccagccccaagttaaaytcttgtctccatttttttcagtggccactcttccagttagcaagctgctcttgtaatactgactgagaaatgcagagaggcaagaagaggaaaagggggg

SEQ ID NO: 24050 - DNA, 201 bp, Homo sapiens
gtaatactgactgagaaatgcagagaggcaagaagaggaaaaggggggaaatggcgggtttttcatttctaatagttctgtagcagtgagtcctgcccatyactgtgtgtgatatatacagtgttctaaggtatactgagtgtatataacgcccttaagtcatggctttggtaacatttggttaagaattattttggtaaa

SEQ ID NO: 24051 - DNA, 201 bp, Homo sapiens
ttggcaattgctggagacacttttggttgtgatggctggggtgcggggctgctcctggcatgcagtgggtagacaccagggatgttgcttaacatcgtacmtggcacaggacagctctgcaacaaagatgcatccagcccgatatgtcagtagtgttgatgctgagaagccctgatctagatcatgattactgtttttgcc

SEQ ID NO: 24052 - DNA, 201 bp, Homo sapiens
ttaggaagttatttaagagccaactgtcttgtctttcccgagtccgtttgaggaagtccccgaggcgcacagagcaagcccacgcgagggcacctctggasgggagcgcctgcaggtaagccaccgcccctgcaccctatgagccagggcccgctgcgtccaccttctgcacctcggtttcctggttgaaccagcaagcgg

SEQ ID NO: 24053 - DNA, 201 bp, Homo sapiens
aacaagagagcagaacgaggttttatttgctgctaatgacctgcattctctctcttaggtccgtggcactcaggtagttggttctgacatgactgtgacarttcagtttaccaatcctttaaaagaaaccctgcgaaatgtctgggtacacctggatggtcctggagtaacaagaccaatgaagaagatgttccggtaaac

SEQ ID NO: 24054 - DNA, 201 bp, Homo sapiens
caccttctacaccggggtcccgaaggcagaattcaagaaggagacgttcgacgtgacgctggagcccttgtcctgtaagctaacaatggtgtggttctttstgagactcgctgtctggcccctgtcttgctaggtgttaatgcccgttatagctttatatcaaagttaaagttccctccaagatctcagaagtgtgagcct

SEQ ID NO: 24055 - DNA, 201 bp, Homo sapiens
tcttgtctttcccgagtccgtttgaggaagtccccgaggcgcacagagcaagcccacgcgagggcacctctggaggggagcgcctgcaggtaagccaccgmccctgcaccctatgagccagggcccgctgcgtccaccttctgcacctcggtttcctggttgaaccagcaagcggcttgctctgggccctgtggcgccggt

SEQ ID NO: 24056 - DNA, 201 bp, Homo sapiens
ttcaaatggcactactgagtttaattctatctcaatcaatgcttagtgtccgctctatgcctgcaattggtttggtgctggcgattccagcagtgagcagractcagttcctgtcctggtccgagtgacaggattattgtgcagaggggtctttggaaacaataagtaggggcatttagtccaactgattcagaaaaagac

SEQ ID NO: 24057 - DNA, 201 bp, Homo sapiens
gtcttgctcttcctctctgtctgtctctcatgcatacatacacactgtcctgtggatgcacgtctaggtgttagtggcagcaaatgtactggagtcccacrgcaccaaagtatgttagcagcagtgaatccacatggatctacagcagcctcaattcttgcctcctcataaggcaggagagactggggcaagttttagagc

SEQ ID NO: 24058 - DNA, 201 bp, Homo sapiens
aagagagcagaacgaggttttatttgctgctaatgacctgcattctctctcttaggtccgtggcactcaggtagttggttctgacatgactgtgacaattsagtttaccaatcctttaaaagaaaccctgcgaaatgtctgggtacacctggatggtcctggagtaacaagaccaatgaagaagatgttccggtaaacctt

SEQ ID NO: 24059 - DNA, 201 bp, Homo sapiens
actgactgagaaatgcagagaggcaagaagaggaaaaggggggaaatggcgggtttttcatttctaatagttctgtagcagtgagtcctgcccatcactgygtgtgatatatacagtgttctaaggtatactgagtgtatataacgcccttaagtcatggctttggtaacatttggttaagaattattttggtaaaatctg

SEQ ID NO: 24060 - DNA, 201 bp, Homo sapiens
cgaaatgtctgggtacacctggatggtcctggagtaacaagaccaatgaagaagatgttccggtaaaccttgggttggggagaccgggcaggcagtgcagrgctgtgggaagctttctctgtgtgtgtcttttccaaacatagatctgctccccagtgaaaatgtcttggaagctgcctcctccttgccgaccatttctgt

SEQ ID NO: 24061 - DNA, 201 bp, Homo sapiens
aaagtcatttctatgattctaaaatgacccagggaattcaatgatgaatgagaggtacagactcaaagcaattctctaatgtattcaaagtaaacaatacyataaggtcaccttattcaccagggattttcatttctgttcattgaagatttttaaaaaattgacagatatattggaagccagtgggaaaatagaatttat

SEQ ID NO: 24062 - DNA, 201 bp, Homo sapiens
aatgcagagaggcaagaagaggaaaaggggggaaatggcgggtttttcatttctaatagttctgtagcagtgagtcctgcccatcactgtgtgtgatatayacagtgttctaaggtatactgagtgtatataacgcccttaagtcatggctttggtaacatttggttaagaattattttggtaaaatctgtattttaaaat

SEQ ID NO: 24063 - DNA, 201 bp, Homo sapiens
ggagagatgggacactaacaaggtggaccaccacactgacaagtatgaaaacaacaagctgattgtccgcagagggcagtctttctatgtgcagattgacytcagtcgtccatatgaccccagaagggatctcttcagggtggaatacgtcattggtgagtgccatgtgcaagctccagtcttgacaccatgggttgcatt

SEQ ID NO: 24064 - DNA, 201 bp, Homo sapiens
tattgtctctttctatgattcatatcaggaatgaaatttctcagtttggaacagcagaaaaaggcagaagcctccggtgttccttgcaacctttccaattrtaacgcatatcaattagtaggagctctcggggtgacaactttgggagaatccactgatttatattaatgaagagtgttactgtagtccaacagagtaaag

SEQ ID NO: 24065 - DNA, 201 bp, Homo sapiens
aaataaatcaatttaatttaatatgaagaaatcaatatgttcccaatatcttggatgcttttaacagcaaataaataaatatgacctgcttgtattttatyattaaattcatccttagccaatttgctttgtatttatataaggtctttttagcccctttcatacagaatggagtaagtaaccaagactggtgtcctcaga

SEQ ID NO: 24066 - DNA, 201 bp, Homo sapiens
taggctaaattgtgttaggtagacagtttgaaagctgtcactttgaaagagcgagctgccaagtttctagctaccgtatttaaaaaaaaaaaaaaaaaaaaggcggcttagcaatgagctgttccattttgccaggaactaggcttggacaggggaagcaaattcatttcctgtttgtggcaaacggagtctggatgatga

SEQ ID NO: 24067 - DNA, 201 bp, Homo sapiens
agcagcctgcggtcccagctacttgggaagctgaggcaggaggattgcttgggcccaggagttcgaggcagccccgccagcctgtctctaagaagaaagaragacaataagcaataactttaaaactcaagaggcagggccgggcccagtggctcacgcctgtaatcccagcacttcgggagaccaaggcaggcagatcat

SEQ ID NO: 24068 - DNA, 201 bp, Homo sapiens
ggcacctttctcaagactttctgtagcacctagatgttgaagcgaaggtcaaaggagaattttttaaagacaagagagagtgggtgttattttatggtgayggagaggaaccaggaaagagagtttgcagtccagagagaggacggtggttcacagccttggctgcacgttgcaatcatctgggaagctttgaaactatgg

SEQ ID NO: 24069 - DNA, 201 bp, Homo sapiens
gaaggtggaggttacaatgagctgagatggcacccctgcactccagcctgggcaacagagcaagactccgtctccaaacaaaacaaaacaaacaaaaaaaataaaaaaaatggtgcctggcaccttgtaggcactgaaaaactctttcaagaatgaacaaaacctggggtcgcctatggctctgcccccctacttaatgcc

SEQ ID NO: 24070 - DNA, 201 bp, Homo sapiens
tgatcttgaaaaggacggtttcactaaagtgatagagacagaagccagggagatggtcatgggctgtgttgtaaacaggaggcgagaaagtagagacggcrggagatggcacctttctcaagactttctgtagcacctagatgttgaagcgaaggtcaaaggagaattttttaaagacaagagagagtgggtgttatttta

SEQ ID NO: 24071 - DNA, 201 bp, Homo sapiens
gttttcagttcatggaaaggattggaggaaggtgggacaaaaaccagagaccaatttggaagctgtggtctaggacaaagatgatgataaactaaacatgstggtaccagtggagatgagaaggggttagattggagatctattttgtatttagaacaaaaattgcacagggattcaagatgagaagtaaagaaatgggag

SEQ ID NO: 24072 - DNA, 201 bp, Homo sapiens
agtaacttatgtaaccacctccttagaatgttctctctctgacaatatgcctaccaaagactcttttaaagatctttgaaattagtaattagggaggttamaatggagcactgtttgcttgtcttaatgtggaatcctctacatgctttatagaaaacaaatgaagtgaataagttttgctcttgaaggttctcctgctta

SEQ ID NO: 24073 - DNA, 201 bp, Homo sapiens
aacctctttttttggagtgaacggtcgtagatacatctgaggacccaggtgctcaatgggcattgtccttggcatttctaaatcaccaaggaactttttcrcatttacccatatggattttaatttttgaaaaagttcatctatcaaaacaaatcatgattatgtaataataccttgttaccccattcttgtgtcagattt

SEQ ID NO: 24074 - DNA, 201 bp, Homo sapiens
gagctgaaaccagatatggtccttactctcagatcatattaccttagagggccactatcaacacgttattgccaataacacaataattatgtaagattgarttgccatttcctagaaaagaagagagccccaagggaatggagcccagatgaggcaaattattgaaaatggggaataagtgaagaaaggtatcaatcagag

SEQ ID NO: 24075 - DNA, 201 bp, Homo sapiens
ggagcaaagagaacaggcttccctgtccccagttctgtctccacttctgcctagctatgtgatgtgcacacatgacgccctcaccaagcctcagtttcccrtctgtaaaaatttcctcacagaggttttgtaaggaccccaagaaataaaacttatttcctgtcactttatttgcatcactatgtgaactgccttggcaac

SEQ ID NO: 24076 - DNA, 201 bp, Homo sapiens
gtctatgcctgttcctgcctcccgactgataggatctggcagcaactatgggcagagaatttcccccaaggagatgcagctgcttctgcaaaggctgccgytactgcagataaaggctcgttattcactgtgacacacctacatgtaccacctccatccatatttgctccagtgggtcaaggcattaccagtggaggatct

SEQ ID NO: 24077 - DNA, 201 bp, Homo sapiens
gaccctcatgcaggttctctccacctggtcttccttctcttcactcactcagttgttacctcctttgatccacatttctggctcacacaactcttatccayggcagcatattttctcaatgtcccttttcctcatattcctttggactttccagttttattcttctcttgtctcctttcatctccctagatcccttttgcc

SEQ ID NO: 24078 - DNA, 201 bp, Homo sapiens; identical to SEQ ID NO: 23890

SEQ ID NO: 24079 - DNA, 201 bp, Homo sapiens
acagtggtgtgatctcagctcactgcaacctcttcctcctaggttcaagcgattctggtgcctcagcctccagagtagctgggaccacagttgcacaccaytacgcccagctaattttatgtatttttggtagaggcagagtttcaccatgttgtccaggctggtttcgcactcctaacctcaagttatccacccacctca

SEQ ID NO: 24080 - DNA, 201 bp, Homo sapiens
gtacattaatcttgtatccagaaactttgctgaattcttttatcagtcctaggagctttctggaggagtccttggggttttcaaggtaaacaatcatatcrtcagcaaacagtgacagtttgacttcctctttacctatttggatgtcctttatttctttctcttaacttattgctctggctaggacttccagtactatgt

SEQ ID NO: 24081 - DNA, 201 bp, Homo sapiens
tgtgtgatatatacagtgttctaaggtatactgagtgtatataacgcccttaagtcatggctttggtaacatttggttaagaattattttggtaaaatctrtattttaaaatgtataaactcatgtaagtttcctctcatacacaccatgatattcaagaaaaaaaaatgaaatatttgaggtaggcacggaaatcccaga

SEQ ID NO: 24082 - DNA, 201 bp, Homo sapiens
caaagcctagagccccatgagttgtgagaattaaatgtaacttcttgctactcaaagtgtggtccatgagccagctgcatcagcattccccaggagtttgwaaaaaatgtagaatctcatgtcccaccccacaccctctgaatcaaaatccatgttttgacaagatcccaagcagactggagtgtacaggagagtttgtgg

SEQ ID NO: 24083 - DNA, 201 bp, Homo sapiens
agctttgttacaagctggctagagggaacttaagatcccagggaaattccatttttccttgagaccccctaagtccaaatcaatacactaagaagaaacgraaaaaatcctaagagtttaagtaggaagaatttttatcaaggtctgtgtgggaggaaattggggcataagttcctctgtggtcaggcattgagctaggta

SEQ ID NO: 24084 - DNA, 201 bp, Homo sapiens
aaaaaggtcatagttttagctgctgcatatgcctatactagttcctctctaccttgatatattaatattacagttaatagcagaagtattggagccaagcrttctctgggtcagtgccctgggactaatagagctaacatttatttagtatttactatgcatcggtcttggtgtatgcatgatcttatccagttcttttta

SEQ ID NO: 24085 - DNA, 201 bp, Homo sapiens
ccagctgaattgctttccccttagccacaatatctcaatcaacacaagtaacgtactttccttgggacattcacctttcttcagattcagaaccagagagsaaaaaagaaatcaccccttcttccttctgcctttactttctagtagaagttatacttaaaaaaaaaaaacaatttgccaggcatggtggctcacacctgt

SEQ ID NO: 24086 - DNA, 201 bp, Homo sapiens
ccgcccagaagcgagggctcctgcccgccgcactcacccagccaggcgtgcacctggggctccccccttctcccccttagcactgtgtctcccgacagcgygccacactgttctgcacccctggcaatgccgcagcctaccttcggtatttctcactagaggatggctctcgcagccttctccctatcattaacccttttt

SEQ ID NO: 24087 - DNA, 201 bp, Homo sapiens
cttcatgcagttcacccagtggccactagtggcctctaagaggccttgtatccgcggttaccaatctgcggatgatgactttggctccaggaacaccagcmccaagttaaactcttgtctccatttttttcagtggccactcttccagttagcaagctgctcttgtaatactgactgagaaatgcagagaggcaagaagag

SEQ ID NO: 24088 - DNA, 201 bp, Homo sapiens
gtttcttaatgtcacgagcgttcacctgttcaaggagagatgggacactaacaaggtggaccaccacactgacaagtatgaaaacaacaagctgattgtcygcagagggcagtctttctatgtgcagattgacttcagtcgtccatatgaccccagaagggatctcttcagggtggaatacgtcattggtgagtgccatgt

SEQ ID NO: 24089 - DNA, 201 bp, Homo sapiens
tatctcctggttaccttttgcatttcagatttatatttaattgttctaaaagcaggttttctggcactatatatcaagttttctccaagtcactaagggaygaaatttgctaagcgactaaaccttggaaagaacactcatttttaaaatgccatcttcatgcagttcacccagtggccactagtggcctctaagaggcct

SEQ ID NO: 24090 - DNA, 201 bp, Homo sapiens
atcagtcattatttacttggcagacatatgtgtccacaacccaagtgacattctgggatatccattagaggcactggcataggaatatgaatgtccagtgrctgtagaatgaatgaacgaacagtcaatcacttgtgaattgaatgactcatagctctagtggcattataatttattattaataacaagctacagatttca

SEQ ID NO: 24091 - DNA, 201 bp, Homo sapiens; identical to SEQ ID NO: 4948

SEQ ID NO: 24092 - DNA, 201 bp, Homo sapiens
gggaggccgaggtgggcagatcaccagatcaggagttcgagaccagcctggccaacatggtgaaaccctgtctctactaaaaatacaaaaattagcctggkgtggtggtgggcgcctgtaatcccagctactcgggaggctgaggcaggagaatcgcttgaacctgggaggtggaggttgcagtgagccgagattgtgcca

SEQ ID NO: 24093 - DNA, 201 bp, Homo sapiens
cagtaattaaccatgctattatttgaagaaaccctttctccatggtggaaattatatacaaacagctagtcaccaaaagcactgaagaaaaatgtagtagrgggttatttgctcttctgggggcttgtttgttttgcaattcagaaaactaaggttgacacaactgaagtttattccataggatctcaacatttacagtta

SEQ ID NO: 24094 - DNA, 201 bp, Homo sapiens
aatgaatgatttgactttattagtatgaaaagatgtgcctagagagcccacaagaaaatgttctgaagttgtggactcttagccagaaccctgttgcaggkcgacagagctgtgtgtgttttctcaggggctgggcccaggcctcacaggtaaaacagaggctggtgcagagttgttctgaattcctctcaaacacctccc

SEQ ID NO: 24095 - DNA, 201 bp, Homo sapiens
tttctgttaagcagctggttagatctacagactctgtcagattcagctccaagtggcattttttttttggaggaaggggcaaaaatatttcataagtcacrccattgcttcctaggacattcatcctggcagaagatacatatatttaggtttgtcaatagtatctggttcacgttttatcagtctcatccacccgttacg

SEQ ID NO: 24096 - DNA, 201 bp, Homo sapiens
aaaaaaaaaaaaaaaaaagtgtaaggagaaaatggagaacaggagatatgtttggaagctgtagagatactccaggctagaagaggaatagaccagagggrttttagcccctggaggtatggggctcatttctcttgttccagcttcctctgagcacctgagcaatccttcaacattataggttccaggatgtattaataa

SEQ ID NO: 24097 - DNA, 201 bp, Homo sapiens
gccggcggatcacctgaggtcaggagttcaagaccagcctggccaacatggtgaaaccccgtctctattaaattttttaaaaatacaaaaattagcggggyatggtggtgagtgcctgcaatcccagctactcaggaggatgaggtggggaggattgcttgaacccaggaggcagaggttgcagtgagccgagatcgcgcc

SEQ ID NO: 24098 - DNA, 201 bp, Homo sapiens
cccacccagcaagtctacccagctctggagtgacactgggcattgtctgcacagaatcctgtgatgtgagccatctctgggtccctctcagccaccggaayagcgcctattccggtggaggtggcagggggtacaatggacactgttagggttcttagctttggtgtttaatgctctatttttgtgctggttggctccctg

SEQ ID NO: 24099 - DNA, 201 bp, Homo sapiens
atatgaagaaatcaatatgttcccaatatcttggatgcttttaacagcaaataaataaatatgacctgcttgtattttatcattaaattcatccttagccwatttgctttgtatttatataaggtctttttagcccctttcatacagaatggagtaagtaaccaagactggtgtcctcagagtaacaatgacccacattcc

SEQ ID NO: 24100 - DNA, 201 bp, Homo sapiens
accaaatgaacatccccctcctgctgtcaaagagcagtcagtggccaccgctattgacctgagctctaattaggctggttttataatgaggaaaagagtgygattctaattagtaaatttccatctctttctcaataggtatcctccagtcaaagcaatcagctatcctcatcacactggttccattgccaaaaaaataac

SEQ ID NO: 24101 - DNA, 201 bp, Homo sapiens
actgaaggggctaaaaggaaagaagcaaactcaactgactattgaggaaccatttgcttgtgcttcatagattgattccattccagtgttactagataggmaagcaacgtctctggagtggctatatgaaaccattttaggaaggcagtgcgtttggatccttccagaataaaaagctcagactctaaaaatgccattcct

SEQ ID NO: 24102 - DNA, 201 bp, Homo sapiens
ggtaacatttggttaagaattattttggtaaaatctgtattttaaaatgtataaactcatgtaagtttcctctcatacacaccatgatattcaagaaaaaraaatgaaatatttgaggtaggcacggaaatcccagaggtgggaccagccattcagtggtagcgtttgacatctttgcatgattttaggcatctttaatgt

SEQ ID NO: 24103 - DNA, 201 bp, Homo sapiens
tcatttaacagttctattgtattgaattaaaactggaaagcaagcctggccctatttaaaaactgggttctagtagtttttcaggctaatggggtcttatrcctttctaagaatctcctccatcccaccactccttgtcagaattaaatcaaccaattaatgataaacctcctctttgtgcagagtaaacctctctggatt

SEQ ID NO: 24104 - DNA, 201 bp, Homo sapiens; identical to SEQ ID NO: 4974

SEQ ID NO: 24105 - DNA, 201 bp, Homo sapiens
cgtggttgtcttttctccagcatgttgttagtgctccacatgtctctggaaccatctctctactctggtggcctctataatggggactcttcacctcttgkgggtgtgcctggtttttgaaaatagccaagtctccaggagtcatgactgggtaatccaggggatcaagggggaaccttcactgggcccagaaacaaagtc

SEQ ID NO: 24106 - DNA, 201 bp, Homo sapiens; identical to SEQ ID NO: 4977

SEQ ID NO: 24107 - DNA, 201 bp, Homo sapiens
gggagtggggccaagtgagaacagcctgctagactggaaccccgccggcttggctccccactcctgcgcgcctccccactcctgcgcatcgcctgcctccrtcccaatttggagctgaactcgagccacttctcctccttagacccgcccagaagcgagggctcctgcccgccgcactcacccagccaggcgtgcacctgg

SEQ ID NO: 24108 - DNA, 201 bp, Homo sapiens
caggcttggggaatgggaaatgttggcaaccctgacttcttaagcctattgatagccctattgaaaattgcatgcccaacctctccacctccttatcctcytccatgtggctcaatttccaaagcagttcctacctcctcacccctaagtggatttacttatggctcttcttgggctccaccctaaccctatcagactata

SEQ ID NO: 24109 - DNA, 201 bp, Homo sapiens
atttctctccagagcagcctggtgagctggcaaggcaagctgcttccccagcctcttgcctctgcctgatccctagaaacctgttccgggtacagcagccrgcagctgacctcctctcagccctgtcagtggtgacaaggtccaggtgccagcactggtttggtgatacagacatcattcccctgggccatggcagggaca

SEQ ID NO: 24110 - DNA, 201 bp, Homo sapiens
tgcttccccagcctcttgcctctgcctgatccctagaaacctgttccgggtacagcagccggcagctgacctcctctcagccctgtcagtggtgacaaggyccaggtgccagcactggtttggtgatacagacatcattcccctgggccatggcagggacattcagactcatgtccccgagtggcattgagcagggagtct

SEQ ID NO: 24111 - DNA, 201 bp, Homo sapiens
cctacaagaagggttttttcactctgtgtttattaaatgctggtgatgtgtttagctgtggtctgtcctttcctgtagttttacgatgccttggaataccmgcaagaattgttaccaattatttctctgcccatgataatgatgccaatttgcaaatggacatcttcctggaagaagatgggaacgtgaattccaaactca

SEQ ID NO: 24112 - DNA, 201 bp, Homo sapiens
ttcaatattttcttcatgttcagtcaggatattaattcctagcttgctatgccagagtggtaaaagggggtagggcttcattttcaaaatgaacccagcaragggaacccagaagtgctcagaaagggctttctgctaactaatgatggcaaacgtggtctgtgtgatggggtggcatctactttctgaaaatttttaatt

SEQ ID NO: 24113 - DNA, 201 bp, Homo sapiens
tggaaaccattgcccctctgagatatctgtggtatacatcagcatattaaagtctcacatgaatgcttcagtaaagaatcctgatcagctttggttaggcyagcattttccacactggtttaaacatggagctctaattcttccaatacctgtcaatatcccataaaactagcactatgccatgatggactgactctaacc

SEQ ID NO: 24114 - DNA, 201 bp, Homo sapiens
ctcggttcaagccatcaagcacggccatgtctgcttccaatttgatgcaccttttgtttttgcagaggtaagcaggaagctggaggaaagtgctgtttttytccccaacctcttaacacatgaaagagtaagctaaaagttgttgtttctaagttttccaggtacatagcgtatgcttcgtgttgacaaaggtaactaggc

SEQ ID NO: 24115 - DNA, 201 bp, Homo sapiens
tggtgtcagccactctataagataggtacttcattcccatattaaagataagaaaactgaggctcagatagattaaataacttttctgaggctgcacaatwagtaagtagtgaagcatttccaaaaacatattctgaaaaatgcagatctccaaagaaaaaagtttccatagtcatttacatttggaaaccattgcccctc

SEQ ID NO: 24116 - DNA, 201 bp, Homo sapiens
caataataataaacatttattaagaatgtacttggtgtcagccactctataagataggtacttcattcccatattaaagataagaaaactgaggctcagakagattaaataacttttctgaggctgcacaataagtaagtagtgaagcatttccaaaaacatattctgaaaaatgcagatctccaaagaaaaaagtttcca

SEQ ID NO: 24117 - DNA, 201 bp, Homo sapiens; identical to SEQ ID NO: 23890

SEQ ID NO: 24118 - DNA, 201 bp, Homo sapiens
tttattttgctactatcttatcagatgcagcctatttttttggcatctcctacttggctataaaataatccagtcatttattcaaatagcatacaaaactytggaattattttagctttccttcttaacctcccttatgcatcttgccaaaaataccttcccaaaattatcataaatccagccacttctacaatctctatc

SEQ ID NO: 24119 - DNA, 201 bp, Homo sapiens
tgttccggtaaaccttgggttggggagaccgggcaggcagtgcagggctgtgggaagctttctctgtgtgtgtcttttccaaacatagatctgctccccartgaaaatgtcttggaagctgcctcctccttgccgaccatttctgtagggcgtggagtaaaactagggttggtttgaccagcactttcatcatttaatcct

SEQ ID NO: 24120 - DNA, 201 bp, Homo sapiens
aggctgagacatgagaattgcttgaacccgggaggcagaagttgcagtgagctgaaattgcaccactgaactccagcctgagcaacagagcaggactctgyctcaaaaaaaaaaaaaaaaaaaaaaaagaatgtgttttaagggttttgctttatcagatgcataatataaatcaacagtgagttaagagtatccaagaca

SEQ ID NO: 24121 - DNA, 201 bp, Homo sapiens
gggaggctgaggcagggggattacctgaggtcaggagttcaagaccagcctgaccaatatagtgaaaccccatctctactaaaacaaaaacaaaaacaaamaaattagccaggcatggtggtgtgagcctgtagtcttagcaacttgagaggctgagacatgagaattgcttgaacccgggaggcagaagttgcagtgagc

SEQ ID NO: 24122 - DNA, 201 bp, Homo sapiens
actgagattataaaggtagcaagagcctctgtaaagaaatcatatcccattagccaaaagaaatccagtggtcaaacatagtcctctagaaatagtcagargaagtcattttattattgttattactggaaacagctagaggcaaaaggcatcttcttcgaggccttccaccttgccacttcatccattctatctagagac

SEQ ID NO: 24123 - DNA, 201 bp, Homo sapiens
agtcttggtgccctcatccataatacggttacaatatatacctcacaggcttgttgttgtgaggttcaaactaaatcctttataaaatgtccctgaaacaytgtaggtatgcaacaaatgttggctatctcccccttagtagaaatccgacttcatgtgcactcagaacattctgtgagaaagtaaaattgctctctttaa

SEQ ID NO: 24124 - DNA, 201 bp, Homo sapiens
tccaatacatctctttttgaaggggtagtaagattattctaaatacatatgcctctcctacatataccatctttaatgattgaaagagaaagatagaaaaytcatcctccatgtgtatgaagataaaacctctatatgtgaagtcaatgctgctatacatttatttcgggattaattggagattgtctaaagttgcagtta

SEQ ID NO: 24125 - DNA, 201 bp, Homo sapiens
catacatacacactgtcctgtggatgcacgtctaggtgttagtggcagcaaatgtactggagtcccacagcaccaaagtatgttagcagcagtgaatccayatggatctacagcagcctcaattcttgcctcctcataaggcaggagagactggggcaagttttagagcaggagtgaaagtttattcaaaagctttagaac

SEQ ID NO: 24126 - DNA, 201 bp, Homo sapiens
aggggtagtaagattattctaaatacatatgcctctcctacatataccatctttaatgattgaaagagaaagatagaaaattcatcctccatgtgtatgargataaaacctctatatgtgaagtcaatgctgctatacatttatttcgggattaattggagattgtctaaagttgcagttagttatttgtggagctattaa

SEQ ID NO: 24127 - DNA, 201 bp, Homo sapiens
gaaatttctgccataataaataaatacataaataaataaataaattcaggttgatatttacaagatcaaatgaaagctttctctgggaaaaaaaattaaarcataccaacaagggcacaggctcccttagaggatatgtgctaagtaaagaagctctgacattttctttgtagaattgcttcatgaataatagtctatctt

SEQ ID NO: 24128 - DNA, 201 bp, Homo sapiens
gctgtcccttgggacatgaagttgagtaagttagtccctggcctcaagaaactctcagtgtagaagacaaaataaataaaagatcattgcaattcagtgtrataaagactgtgactgtgatttatgcaaattgcagtgaaataacagaaatcaatgtctagcggtgtggtggagtggggaagaggatgaggagggcttcct

SEQ ID NO: 24129 - DNA, 201 bp, Homo sapiens
gaggaagtccccgaggcgcacagagcaagcccacgcgagggcacctctggaggggagcgcctgcaggtaagccaccgcccctgcaccctatgagccagggmccgctgcgtccaccttctgcacctcggtttcctggttgaaccagcaagcggcttgctctgggccctgtggcgccggtcacaggcagctccacttgcccaa

SEQ ID NO: 24130 - DNA, 201 bp, Homo sapiens
ctccatccatcttccacgaacagagatttgcaaatttagatcttcttcttaaattattccaatggctttttatagcctaagaataaagcatgaatgtttartttgatatcaaaggatttcacaatcttatccttacctatatcataggtcagtgttgaagagtgtggatttcagagctctatcactaactagctgtgacct

SEQ ID NO: 24131 - DNA, 201 bp, Homo sapiens
gaagacaaaataaataaaagatcattgcaattcagtgtaataaagactgtgactgtgatttatgcaaattgcagtgaaataacagaaatcaatgtctagcrgtgtggtggagtggggaagaggatgaggagggcttcctgatgcaaggatattggagccgagacttagaggatgagtatgagtgttcctgacaggcaagcg

SEQ ID NO: 24132 - DNA, 201 bp, Homo sapiens
ccctctgaccaaaggggacgggtggggacttcctggcactgcagggccccttgcctggtactcccagcaactggttgcggtggggagggcagatctagggrtggggatggggaggagaagtgggaatgggaaattgggagtcagaggggcaagtgggagagaagggcgcacctgccgggataacaggccagatgaagtaaa

SEQ ID NO: 24133 - DNA, 201 bp, Homo sapiens
tgtggtggagtggggaagaggatgaggagggcttcctgatgcaaggatattggagccgagacttagaggatgagtatgagtgttcctgacaggcaagcgcrtggaaaagtgtttgcagtagagggaacagtatattgcaagtgaggagggactaaaagatgaaagagaagatataagcctgggaaaagatggcaggcatca

SEQ ID NO: 24134 - DNA, 201 bp, Homo sapiens
agcagccggcagctgacctcctctcagccctgtcagtggtgacaaggtccaggtgccagcactggtttggtgatacagacatcattcccctgggccatggsagggacattcagactcatgtccccgagtggcattgagcagggagtcttttttgtcaataacattcatgcaccaaaatctaattttactcctaagggtgtt

SEQ ID NO: 24135 - DNA, 201 bp, Homo sapiens
actcatgtccccgagtggcattgagcagggagtcttttttgtcaataacattcatgcaccaaaatctaattttactcctaagggtgttctgtgctgggttycactggggataaacacctatttgctgggataggtgagcatggtcatgctggagctgtgtggtcgattcccctcattagaaggagaccaatgcctgaaagc

SEQ ID NO: 24136 - DNA, 201 bp, Homo sapiens
agacacaatggagtactatacagcccttagaagaaggaaaattctgccattctcaacaagggtagaactggagagcactatgctaactgaaataagccagrcacagaaagatgaatactgtatgatctcacttatatgtggaatctgaaaaagtcaatctcagaaacacagtagaaagttgtttaccagaggctggggctt

SEQ ID NO: 24137 - DNA, 201 bp, Homo sapiens
agtggcattgagcagggagtcttttttgtcaataacattcatgcaccaaaatctaattttactcctaagggtgttctgtgctgggtttcactggggataarcacctatttgctgggataggtgagcatggtcatgctggagctgtgtggtcgattcccctcattagaaggagaccaatgcctgaaagcccagattgatgca

SEQ ID NO: 24138 - DNA, 201 bp, Homo sapiens
cagcctagctccacagtctatgctcttactatgctcttctacttctcttaataataataacaacaacaataataataaacatttattaagaatgtacttgstgtcagccactctataagataggtacttcattcccatattaaagataagaaaactgaggctcagatagattaaataacttttctgaggctgcacaataag

SEQ ID NO: 24139 - DNA, 201 bp, Homo sapiens
aaaatggcatgcttccctgggaaggctggaaggccactgctaaaaagcttcccagggacattctttaccttgtgacttccattgctcagattccagcctcrcaccatgccttctcagatacctgactacttaatgattggtcctaagggccaatccaaatgctcagtgctattatgattattattgccatcaatttctgag

SEQ ID NO: 24140 - DNA, 201 bp, Homo sapiens
aaattcaaagcaagcctgtctgctcagaagacaaggagtataaaatggcatgcttccctgggaaggctggaaggccactgctaaaaagcttcccagggacmttctttaccttgtgacttccattgctcagattccagcctcgcaccatgccttctcagatacctgactacttaatgattggtcctaagggccaatccaaat

SEQ ID NO: 24141 - DNA, 201 bp, Homo sapiens; identical to SEQ ID NO: 23890

SEQ ID NO: 24142 - DNA, 201 bp, Homo sapiens
ccatggcctaggtgagacacttcttatttgacaagggatcctatgtggaatgggggccttggacttcagcaccccacatgttccattttgggatgatcccrgcccaaatcaaagccaccattaaaacccattggtccttctttgccatgaaaatcacatcttttccatggcatttcttttacaacagcaaaagaactgttt

SEQ ID NO: 24143 - DNA, 201 bp, Homo sapiens
taagtccctatgaggcactcctacaaataaccccacaggccctaaacagagttaatacaaaatagcgaaggtagatcttgcccttggtaaccctgtcctcwttcaggtccctgctccaaattacttccccttttcctgacaccatttgttcctttggtgccttactcaaatatcccatcaccctgagactgttcttcctgg

SEQ ID NO: 24144 - DNA, 201 bp, Homo sapiens
atctggacagaattggagatgacaaactcacaccgcccttcctctgtgcaatgcaggcatgtatcggtgtggccccgcctcggttcaagccatcaagcacrgccatgtctgcttccaatttgatgcaccttttgtttttgcagaggtaagcaggaagctggaggaaagtgctgtttttctccccaacctcttaacacatga

SEQ ID NO: 24145 - DNA, 201 bp, Homo sapiens
agtccttgcaatgaaagacactggccagggaagctggttggacacacacacatacttgcacattcacaagtatctttcattaaaaggagatgacctactgsttccctcctgccagtgatgggccacaaaacagacatgacacgtgggccttctcacgtgtcccagatttgttttaaaaatcattttcaattcatctagttt

SEQ ID NO: 24146 - DNA, 201 bp, Homo sapiens
ccaggcctgggaataagtaccagactgatgatagacggggaggatgatcctcctgaaattctagccacagggaagaaaagtccttgcaatgaaagacactrgccagggaagctggttggacacacacacatacttgcacattcacaagtatctttcattaaaaggagatgacctactgcttccctcctgccagtgatgggc

SEQ ID NO: 24147 - DNA, 201 bp, Homo sapiens
cgaactgggtggagcccaccacagctcaaggaggccagcctgcctctgtaggctccacctcagggcacagacaaacaaaaagacagcagtaacctctgcasacttaaatgtccctgtctgacagctttgaagagagcagtggttctcccagcacacagctggagatctgagaacaggcagactgcctcctcaagtgggtcc

SEQ ID NO: 24148 - DNA, 201 bp, Homo sapiens
cctcctgccagtgatgggccacaaaacagacatgacacgtgggccttctcacgtgtcccagatttgttttaaaaatcattttcaattcatctagttttctrttaatgttaaaaggttggaaattatattttaattagtgttagagatgtacatcagcatcatagaattctgaaactactgatgcaacagaatcataaaatg

SEQ ID NO: 24149 - DNA, 201 bp, Homo sapiens
tgacaggcaagcgcatggaaaagtgtttgcagtagagggaacagtatattgcaagtgaggagggactaaaagatgaaagagaagatataagcctgggaaargatggcaggcatcacaccataccaggccttggggatcttgctttcctcctgcagataatgggggacttgagaaggattctaattagcagaaatacataat

SEQ ID NO: 24150 - DNA, 201 bp, Homo sapiens
aacgttgacatggactttgaagtggaaaatgctgtgctgggaaaagacttcaagctctccatcaccttccggaacaacagccacaaccgttacaccatcayagcttatctctcagccaacatcaccttctacaccggggtcccgaaggcagaattcaagaaggagacgttcgacgtgacgctggagcccttgtcctgtaag

SEQ ID NO: 24151 - DNA, 201 bp, Homo sapiens
taatatgattgttggtttcatgaagtaagaagaccatatgagattttatctgtttgcttgtttgtttttacataaatgatgcagaaataactgactctccractggaagaaagtttaaaaattgaccctcatcttgtcccatatacagtagtaaatctcagatggaatgagtattaatgtaaaaaagacaattttttgagg

SEQ ID NO: 24152 - DNA, 201 bp, Homo sapiens
ggcattgagcagggagtcttttttgtcaataacattcatgcaccaaaatctaattttactcctaagggtgttctgtgctgggtttcactggggataaacamctatttgctgggataggtgagcatggtcatgctggagctgtgtggtcgattcccctcattagaaggagaccaatgcctgaaagcccagattgatgcagct

SEQ ID NO: 24153 - DNA, 201 bp, Homo sapiens
cattgagcagggagtcttttttgtcaataacattcatgcaccaaaatctaattttactcctaagggtgttctgtgctgggtttcactggggataaacaccyatttgctgggataggtgagcatggtcatgctggagctgtgtggtcgattcccctcattagaaggagaccaatgcctgaaagcccagattgatgcagctct

SEQ ID NO: 24154 - DNA, 201 bp, Homo sapiens
tctgtgctgggtttcactggggataaacacctatttgctgggataggtgagcatggtcatgctggagctgtgtggtcgattcccctcattagaaggagacsaatgcctgaaagcccagattgatgcagctctccatatagcaaagggaaaggggaagtgcagtttatccagcaagccagacacttgcccaggtgttgtgga

SEQ ID NO: 24155 - DNA, 201 bp, Homo sapiens
tttttttttaaaaagaagacagatgtttcctgcgaatcaagaggagaaatgctttctatttacctgtggaaattcaaagcaagcctgtctgctcagaagayaaggagtataaaatggcatgcttccctgggaaggctggaaggccactgctaaaaagcttcccagggacattctttaccttgtgacttccattgctcagat

SEQ ID NO: 24156 - DNA, 201 bp, Homo sapiens
ccaggcactatagcaagataattaagacatggtccagtcttcaaggggattacaatcccatggctaaaaaatcacctatataaagataatacaaagagacratgatacttttttttttttaaaaagaagacagatgtttcctgcgaatcaagaggagaaatgctttctatttacctgtggaaattcaaagcaagcctgtct

SEQ ID NO: 24157 - DNA, 201 bp, Homo sapiens
agcgagtgaatgactaagaagccaaacaaacgacatggtgaggcaacccaggaattaggaacagtagaaaactgccaccacaccaggagctggaggcacayggaggaggaggtcccatcagaacccagaaggcatcagcaggtgctggagccatggaggagactcagactctcacctcaagacagagagagcacaggagac

SEQ ID NO: 24158 - DNA, 201 bp, Homo sapiens
aacaaaactgctgatctggaggtcttatgttataaattcccacatcataccttcaactatatatatgtcctgaaactagcatattttgagaataaaatggkaaatgacatttaaaggacacctatggttaatcctacagtaaatgagataatttattttgaaatgaatgatcaactctacgctccaaattttcacgtaaaa

SEQ ID NO: 24159 - DNA, 201 bp, Homo sapiens
gaatcaaaagatcacttagaaaaagtaacatgttagaaaacatcatgcttagaattaaatgtctaaagtataccagtatagatgatataatttaaaacaaytgatactatcagctgtcataagaaccaaatacttggttgacctgtgggtggctgactcatgggcaatgaaataaattttgttttatacgtataactttat

SEQ ID NO: 24160 - DNA, 201 bp, Homo sapiens
aaagatcacttagaaaaagtaacatgttagaaaacatcatgcttagaattaaatgtctaaagtataccagtatagatgatataatttaaaacaattgataytatcagctgtcataagaaccaaatacttggttgacctgtgggtggctgactcatgggcaatgaaataaattttgttttatacgtataactttatatatat

SEQ ID NO: 24161 - DNA, 201 bp, Homo sapiens
atataaaaagtttgcttatatataatatatatacacatatcatatataaatatattgtttataatatgtaaacaatatatacataaataatatataaaaastatatattatatatgtaaacaatatatttttaaaacccaaactcatgggtttatagttttttcatagtgaaaacaaacaaatatatagtttgcttatatc

SEQ ID NO: 24162 - DNA, 201 bp, Homo sapiens
ggaaaaactataaacccatgagctggggttttgtctttttttttttgacttaggttttctattctcaaaggcattaatcagcaccctttttctcacccttygttatcaacatataagcaggctagaaagacagtattttattccaatgtgaaacaaaactgctgatctggaggtcttatgttataaattcccacatcatac

SEQ ID NO: 24163 - DNA, 201 bp, Homo sapiens
gggttttgtctttttttttttgacttaggttttctattctcaaaggcattaatcagcaccctttttctcaccctttgttatcaacatataagcaggctagraagacagtattttattccaatgtgaaacaaaactgctgatctggaggtcttatgttataaattcccacatcataccttcaactatatatatgtcctgaaa

SEQ ID NO: 24164 - DNA, 201 bp, Homo sapiens
ttgacttaggttttctattctcaaaggcattaatcagcaccctttttctcaccctttgttatcaacatataagcaggctagaaagacagtattttattccratgtgaaacaaaactgctgatctggaggtcttatgttataaattcccacatcataccttcaactatatatatgtcctgaaactagcatattttgagaata

SEQ ID NO: 24165 - DNA, 201 bp, Homo sapiens
cttttctgaggctgcacaataagtaagtagtgaagcatttccaaaaacatattctgaaaaatgcagatctccaaagaaaaaagtttccatagtcatttacrtttggaaaccattgcccctctgagatatctgtggtatacatcagcatattaaagtctcacatgaatgcttcagtaaagaatcctgatcagctttggttag

SEQ ID NO: 24166 - DNA, 201 bp, Homo sapiens
tcccagaaccgttattagagttgtcaatctgatgtctcgtcatccctgaatactttagtgtgtactacctatgagcaaagacattcttctgtgcaaccatmaaaataaggaaattaacactgatatttgatggtagtctaatctttagaacacatttgagtttttctacttgttcagtaatgtaccttatagcaacagaag

SEQ ID NO: 24167 - DNA, 201 bp, Homo sapiens
atgtaatatcagtatattccttccattggtgctggtaaacggagaactgatgaaacccatttctaaggactttggtgtttagctatttttaaaaaaaaaaytttaaagcccctgtgctaagaaagaggaccagaggagttgattgctaagctccttttcaacaggaacatttgtgctcctccagctcattcttgggctggt

SEQ ID NO: 24168 - DNA, 201 bp, Homo sapiens
aagttttccaggtacatagcgtatgcttcgtgttgacaaaggtaactaggcattattccaacttccaggctattaatgctaaatgcagttcttgtttaacrtttttctttccttgatgttttgggattccctactcccaaaagtaaatgctttactaacattagcttagttctctgcacccattaagtatcaactgctcca

SEQ ID NO: 24169 - DNA, 201 bp, Homo sapiens
acatcaagaccagaagctggagctatggtcaggtgagccacttaaaatttgttattgtcaaggacatttttacttcatattttttgtcacatgtatccctrcaggatcccatatatcgatattagacaagcacaatttcctgctttttaggatctgagactccaaggcagagagcataggagtagggactcataaagacaa

SEQ ID NO: 24170 - DNA, 201 bp, Homo sapiens
tacttcatattttttgtcacatgtatccctacaggatcccatatatcgatattagacaagcacaatttcctgctttttaggatctgagactccaaggcagwgagcataggagtagggactcataaagacaactgcgtaatttatcagctgaaaccacatatctctgggtattacagtgttacagaaatgagagattccatg

SEQ ID NO: 24171 - DNA, 201 bp, Homo sapiens
tgcataggtgatcttatgagattctgatggagctgaaaaattcctgttacatagtgatgtcatagctatcataatagaatagtgagattacttatttttttaaatgtactgtagcctaagtttatagtgtttataaagtctacagtagcatgcagtaatgacctaggccttcgcattcactcaccactcacccagggctac

SEQ ID NO: 24172 - DNA, 201 bp, Homo sapiens
tcctgctttttaggatctgagactccaaggcagagagcataggagtagggactcataaagacaactgcgtaatttatcagctgaaaccacatatctctggktattacagtgttacagaaatgagagattccatgaataatgtggcattctattgagaaatgctttggccacttagaacagtgaaatctcattagttcaacc

SEQ ID NO: 24173 - DNA, 201 bp, Homo sapiens
aggccttcgcattcactcaccactcacccagggctacttctggtcctgcacgttccattcatggtaagtgtcctatgcaggtgtaccattttttacttttyatattgtatttttactgtactttttctatgtttatatataaatgtttctatgtttatatataaatacttaccattgtgttacaattgcctgcagtgctgt

SEQ ID NO: 24174 - DNA, 201 bp, Homo sapiens
attcaggataggagaggagatgatcagaagagagaggatgagaaccggggttatggctgcagttgtagacatggacaggagtgacagggtttgagaaatayttaggaggcaaaatctgcaggacttgtgttggggagtctgtgaggggtggaagggaggagggtcaaggtcgacttccaggtggctggcttatgtgactat

SEQ ID NO: 24175 - DNA, 201 bp, Homo sapiens
tatagcaaagggaaaggggaagtgcagtttatccagcaagccagacacttgcccaggtgttgtggactggtgtcattgtgttactgtcacactagatgatwtgatatcaaatagtgaaatcagggaggtatccagtaccatccaagtttgggaaaagaagttcacagaacagaagggcatcttcagtcaggtggtagagtt

SEQ ID NO: 24176 - DNA, 201 bp, Homo sapiens
atatttaattgttctaaaagcaggttttctggcactatatatcaagttttctccaagtcactaagggacgaaatttgctaagcgactaaaccttggaaagmacactcatttttaaaatgccatcttcatgcagttcacccagtggccactagtggcctctaagaggccttgtatccgcggttaccaatctgcggatgatga

SEQ ID NO: 24177 - DNA, 201 bp, Homo sapiens
aaagagtgctttcagatgtacttctctagttttttgctattccccaaagtgcatccttacataattagctttaaaattcctttcatcccttatttttttttaaatctatcattaacacgtagatttttatctctaagtttatttttactaaacttgcatctttttaaatacgacgtattctgaatctaaatcagtatttag

SEQ ID NO: 24178 - DNA, 201 bp, Homo sapiens
tctgagaaggggcagactgcctcctcaagtgggtccctgacccctgacccccgagcagcctaactgggaggcaccccccagcaggggaacactgacacctyacacagcagggtattccaacagacctgcagctgagggtcctgtctgttagaaggaaaactaacaaacagaaaggacatccacaccaaaaacccatctgta

SEQ ID NO: 24179 - DNA, 201 bp, Homo sapiens
gtggaaaatgggaacagactatgtgttctaattattgctgaaccctgaccattttcccctccatgtccacaaccgagcacgttctctctccagcctcctgyactctctgtggctccatcgcactctcgtcaccaagattcacccctgcccacacccacacccttcatggggaggccggggatgggaaccaggaggtgggct

SEQ ID NO: 24180 - DNA, 201 bp, Homo sapiens
tggaaaatgggaacagactatgtgttctaattattgctgaaccctgaccattttcccctccatgtccacaaccgagcacgttctctctccagcctcctgcrctctctgtggctccatcgcactctcgtcaccaagattcacccctgcccacacccacacccttcatggggaggccggggatgggaaccaggaggtgggctt

SEQ ID NO: 24181 - DNA, 201 bp, Homo sapiens
taaagttagttgattattttcttcaacccttgtttttcttgttcatagagtttcttaatgtcacgagcgttcacctgttcaaggagagatgggacactaamaaggtggaccaccacactgacaagtatgaaaacaacaagctgattgtccgcagagggcagtctttctatgtgcagattgacttcagtcgtccatatgacc

SEQ ID NO: 24182 - DNA, 201 bp, Homo sapiens
attctctttttaaaagtggcatctctcatttttaaaagagaaaatcctagatagtgactcctattatcatcaagtaatatatatcaaggccccaaggctamcttgtcacattttactctggcatagaaatctaattccttctctataaagtcaaaaagagagaggtgagttatagatgttttctaatttagtttagggtca

SEQ ID NO: 24183 - DNA, 201 bp, Homo sapiens
tcttaggtccgtggcactcaggtagttggttctgacatgactgtgacaattcagtttaccaatcctttaaaagaaaccctgcgaaatgtctgggtacaccyggatggtcctggagtaacaagaccaatgaagaagatgttccggtaaaccttgggttggggagaccgggcaggcagtgcagggctgtgggaagctttctct

SEQ ID NO: 24184 - DNA, 201 bp, Homo sapiens
aaggctaccttgtcacattttactctggcatagaaatctaattccttctctataaagtcaaaaagagagaggtgagttatagatgttttctaatttagttyagggtcaacttataatcctcgtcctcaactgatggtttagcgataacttaaaaggtgatgctgcaaatgattctttgctggatttcagaaaataaagaag

SEQ ID NO: 24185 - DNA, 201 bp, Homo sapiens
ataaatatgcgtatttatttattattgagaattttataaatatatccacttaatttttatcccagttatggaaggtattatagcaggtggtctcatattcrtttttccacatttctcaatgcccctgagcaattagagatcagaacataatgaacaatctttccctctccagtttcccctctggtttttaatccacccaac

SEQ ID NO: 24186 - DNA, 201 bp, Homo sapiens
caatctttccctctccagtttcccctctggtttttaatccacccaacatccaatctgtagaggaaagcatatgagaacagaattattctcttcagtgtcaygcatcatttttcagaggcatttgcctctctagacccagacgatattacaattaattcagtgaatatttttaaaaatacatttatttcagtatgtcttcat

SEQ ID NO: 24187 - DNA, 201 bp, Homo sapiens
gtacagactcaaagcaattctctaatgtattcaaagtaaacaataccataaggtcaccttattcaccagggattttcatttctgttcattgaagatttttwaaaaattgacagatatattggaagccagtgggaaaatagaatttatctaacagaaagtatcttcatagccacttttgagaaattgcataaatccattcca

SEQ ID NO: 24188 - DNA, 201 bp, Homo sapiens
tgagttttttcgtatgtacacatcattatgccggatggttttatgagtaagagaaaatgataagagggggctaaatacttagcttctatttgaggtggttrtctacagtacatggtctcaggtcgggtccttaaccagggccactgtttcacaaagtgcttctgattgatcacttgggggaaccagaggagagagaatgaa

SEQ ID NO: 24189 - DNA, 201 bp, Homo sapiens
aagtactaagtattggagttaaaagtgggctgaaatataaggtgaataagacaaactacccagagcattgctaccctaaaaagcatcaactgtaatgcatygggcctttgccatgtgccttgcaatatgtttgccgttttatgagcatttttcattccaaacctttcttgcaagggaagaactattattcttatcttattc

SEQ ID NO: 24190 - DNA, 201 bp, Homo sapiens
ctctttacgtccattcttaaaaacgcctcatttccatatattttctcccatattatatagtggctaaaggaacatggaatagtaatggctgtgttgtcatmtggaagatccagacatccagtaaattccatttttgagccattgacttaatttaataaatatttactggacattggtattgaagtactaagtattggagtt

SEQ ID NO: 24191 - DNA, 201 bp, Homo sapiens
ttagtataaaggacaggaatgtcaatatcagtaagtgatatgtaacttgaaaaagcatactacgggttgatttttttaaaacagagagagatattttcaayagaatattgagaaaaacttaaggccatcaagtatatgcaaaagcatttgacgtcaccaagtaagacatatgctttattcttttctctggcccaagtaatg

SEQ ID NO: 24192 - DNA, 201 bp, Homo sapiens
ttggaggctggagggaggtcatttaaaaaaatgattacaaaacctatttgttttagctcaaagtctcaacagtctaagacttggtgatctaaatttaaaamaaaaaagtcatgagttttgttttgttttattttcccatagtatcaaacaggataagattattttcttagccatttaaatataacccagggaagaaggaat

SEQ ID NO: 24193 - DNA, 201 bp, Homo sapiens
ttgtttaccaaagaatcagagtagcagctcattatcatgaattagtataaaggacaggaatgtcaatatcagtaagtgatatgtaacttgaaaaagcataytacgggttgatttttttaaaacagagagagatattttcaatagaatattgagaaaaacttaaggccatcaagtatatgcaaaagcatttgacgtcaccaa

SEQ ID NO: 24194 - DNA, 201 bp, Homo sapiens
tcaacagtctaagacttggtgatctaaatttaaaaaaaaaaagtcatgagttttgttttgttttattttcccatagtatcaaacaggataagattattttyttagccatttaaatataacccagggaagaaggaatacatatttcttgggagcaatgaaaatcaaaagtatagtcccctagaagcactggtctctgaagtt

SEQ ID NO: 24195 - DNA, 201 bp, Homo sapiens
gaaatcgacttcaacaagcagaatatctgcatgaccagcactgattggtggggaattgtatagataacacaagatccatgggaagtatcactgttgacccyggagaggaggcagggaccttcctctgggcggcttccctccaggccagcactcacccctgtgcagattgtgcccatctgcaggtgggaaggagacagtgag

SEQ ID NO: 24196 - DNA, 201 bp, Homo sapiens
taattgttctaaaagcaggttttctggcactatatatcaagttttctccaagtcactaagggacgaaatttgctaagcgactaaaccttggaaagaacackcatttttaaaatgccatcttcatgcagttcacccagtggccactagtggcctctaagaggccttgtatccgcggttaccaatctgcggatgatgactttg

SEQ ID NO: 24197 - DNA, 201 bp, Homo sapiens
cttataaagaaaggtattttcaaagtgatgcaaagaatactgcaaggggtgtgcccaattcaaagaaatagcttctttttttttttttttaagtgttagcstagggtactgctaattagaaaagagtgttatcatttcatcaaaggaagggccactgagcttttacatagaaagattttatcagctgcaagttgattgtct

SEQ ID NO: 24198 - DNA, 201 bp, Homo sapiens
gcttctttttttttttttttaagtgttagcctagggtactgctaattagaaaagagtgttatcatttcatcaaaggaagggccactgagcttttacatagraagattttatcagctgcaagttgattgtctagacacaaagtagcaaatggcatttctttaagatgttcagtcattcaaactatttcagtttggtatcttt

SEQ ID NO: 24199 - DNA, 201 bp, Homo sapiens
acacgtgcatggaggttccctgtatggagccatgttttccatccagattgggccaaggatagctgatgggcagtcatggatgttgatggatgggttttccmagggtagctggattgtggtctcgtaaccatgccgactcctggggctgagaagggctatttagtgaaatgaaatactactctgtcacaacttcctcactca

SEQ ID NO: 24200 - DNA, 201 bp, Homo sapiens
tcagaagagagaggatgagaaccggggttatggctgcagttgtagacatggacaggagtgacagggtttgagaaatatttaggaggcaaaatctgcaggayttgtgttggggagtctgtgaggggtggaagggaggagggtcaaggtcgacttccaggtggctggcttatgtgactatgatgacagatgctagcacttcca

SEQ ID NO: 24201 - DNA, 201 bp, Homo sapiens
tggacaggagtgacagggtttgagaaatatttaggaggcaaaatctgcaggacttgtgttggggagtctgtgaggggtggaagggaggagggtcaaggtcracttccaggtggctggcttatgtgactatgatgacagatgctagcacttccaaatgagataaagaatgcctggaattccagagggaaaaaatcgagtgtg

SEQ ID NO: 24202 - DNA, 201 bp, Homo sapiens
accagaagctggagctatggtcaggtgagccacttaaaatttgttattgtcaaggacatttttacttcatattttttgtcacatgtatccctacaggatcycatatatcgatattagacaagcacaatttcctgctttttaggatctgagactccaaggcagagagcataggagtagggactcataaagacaactgcgtaa

SEQ ID NO: 24203 - DNA, 201 bp, Homo sapiens
acatttttacttcatattttttgtcacatgtatccctacaggatcccatatatcgatattagacaagcacaatttcctgctttttaggatctgagactccwaggcagagagcataggagtagggactcataaagacaactgcgtaatttatcagctgaaaccacatatctctgggtattacagtgttacagaaatgagaga

SEQ ID NO: 24204 - DNA, 201 bp, Homo sapiens
tgaacccaggaggcagaggttgcagtgagctgagactatgccactgcactccagcctgggtggcaagagtgaaagtccttctcaaaaaaaaaaaaaaaaaatgagtgccccctcagccagcccctactgtgtgctaagcataaagctttcattatattataaaatctattgtctttttatttcccaaactaaactgcaaag

SEQ ID NO: 24205 - DNA, 201 bp, Homo sapiens
ttgaacccaggaggcagaggttgcagtgagctgagactatgccactgcactccagcctgggtggcaagagtgaaagtccttctcaaaaaaaaaaaaaaaaaatgagtgccccctcagccagcccctactgtgtgctaagcataaagctttcattatattataaaatctattgtctttttatttcccaaactaaactgcaaa

SEQ ID NO: 24206 - DNA, 201 bp, Homo sapiens
cttgaacccaggaggcagaggttgcagtgagctgagactatgccactgcactccagcctgggtggcaagagtgaaagtccttctcaaaaaaaaaaaaaaaaaatgagtgccccctcagccagcccctactgtgtgctaagcataaagctttcattatattataaaatctattgtctttttatttcccaaactaaactgcaa

SEQ ID NO: 24207 - DNA, 201 bp, Homo sapiens
ttagcgataacttaaaaggtgatgctgcaaatgattctttgctggatttcagaaaataaagaagctattccagcaaaaaaaaaagtttctatttttacctstattctgtcagggatcacagtatatgtagttttgaagatgaatgttttagagtcagaaagacctggatttatatccaacttccgccagattcctaactct

SEQ ID NO: 24208 - DNA, 201 bp, Homo sapiens
tgcaaatgattctttgctggatttcagaaaataaagaagctattccagcaaaaaaaaaagtttctatttttacctgtattctgtcagggatcacagtatakgtagttttgaagatgaatgttttagagtcagaaagacctggatttatatccaacttccgccagattcctaactctgtaggctttttatttatcttctaaa

SEQ ID NO: 24209 - DNA, 201 bp, Homo sapiens
gaacaatactgggctcacatgtctgaatccaagtcaccgtcaaccaaagcaggccagtggcttcctgtttgtgcatcccagtggacccagtcgtggatttyactggtccctgtggtgataaagatggggcctgggctcaatagtgctcccagtcaaccattcccagcacccaccatgtgtgagtcagagtgtgtgatcctc

SEQ ID NO: 24210 - DNA, 201 bp, Homo sapiens
agacagaaaggacccaagttctccccatgcctacaatttcactatcccagtgtaattccttccggctcacaacaagataaaatagtgaacaccttacatcygttcgtgtctttggcataaaaaggttatccaatctatgcctgaaaacaggctttggcggtaaatcaagaaaaggcagaaacacacagtggggaagtcaca

SEQ ID NO: 24211 - DNA, 201 bp, Homo sapiens
gtagagatggatggagagaccccttcagatactaggaagaaaatgttagcaagggctagaggggaggtggacggcagtatgtagagcagtgagaagcgtgycttggctggggtggaggctgggagcagggatgagtaagggtaacctgaaaaagatagcttgaggctatgtggaggggagtctacaattttggatgagagc

SEQ ID NO: 24212 - DNA, 201 bp, Homo sapiens
acgttactataaccctattttactgattagaaaactgagaggaccagagaaggcagtgccttgtagcacagtggtcagaacatgggctctggaaccaaatyatctgagtttaaagcttgttttctgaacatcataactgtgtaaacctggacagatcatttcacctctgttggcttctgcattctcatctgtaagtcaaaa

SEQ ID NO: 24213 - DNA, 201 bp, Homo sapiens
caatttaaaacccaggtagttctcagtccaccctaactctgccctaacttaccccttctgctgttagaacctcctgtctctcagagtatctcacacttcartaggcattgtctggggtcttattcaaatgcagatcctgacttcactggtgcagtaagaagtcagagaatctgcatctgtaacaagctcccaggtgatgat

SEQ ID NO: 24214 - DNA, 201 bp, Homo sapiens
tgttgtgggactatcctgtgcattgtaggatgtttaactgcatttttggcccctatccaccagattccagtagtaacccaccctccaccccagttgtgacmatcaaaaagttctccagacattgccaaatgtcccctggggataacattgcctcctattgacaactactagtctaggatgaccaacctttctagttttcca

SEQ ID NO: 24215 - DNA, 201 bp, Homo sapiens
tctatccttagggatacacaaagataaacccaaaggtatttaggatggaaaagaggatgatgaccatccctcacatctgcatgagccctgtttccaagccraagccttttgtccaaggctctgtaaggaccgttctcccaccttcccagtgtctgaggcataagctccttctgaggcctgacttgtatctgtattttctgc

SEQ ID NO: 24216 - DNA, 201 bp, Homo sapiens
tctctatccttagggatacacaaagataaacccaaaggtatttaggatggaaaagaggatgatgaccatccctcacatctgcatgagccctgtttccaagscaaagccttttgtccaaggctctgtaaggaccgttctcccaccttcccagtgtctgaggcataagctccttctgaggcctgacttgtatctgtattttct

SEQ ID NO: 24217 - DNA, 201 bp, Homo sapiens
aggagggtcaaggtcgacttccaggtggctggcttatgtgactatgatgacagatgctagcacttccaaatgagataaagaatgcctggaattccagaggraaaaaatcgagtgtggaaaatgctaatggaggtagtagcttcattgataactcattggcactgttgctgtgcagaggtgctgtatgcctcccatttaatt

SEQ ID NO: 24218 - DNA, 201 bp, Homo sapiens
attatgtaagatgccagagcacgcagcataactgtagagaaacaggaattactctgccaggctctgggaaagccgtgcagttgttttctcctctctgggcstgcgcttcctggaacagccccagcctgcttctgtttggcggtctccgctcacagaggacagtgcttccccagaaggaagctccaggttcctgcacccatg

SEQ ID NO: 24219 - DNA, 201 bp, Homo sapiens
atttcatcaaaggaagggccactgagcttttacatagaaagattttatcagctgcaagttgattgtctagacacaaagtagcaaatggcatttctttaagrtgttcagtcattcaaactatttcagtttggtatctttaacaatggagcaaatgaatgatattttaccaattttccataaatgaatgcatgtcctgtgatt

SEQ ID NO: 24220 - DNA, 201 bp, Homo sapiens
catttaacagcatcattaaggcccccaaatccccaaacgcctctcagctttctactctgccaccttctcattgtcagcagtgtttctgttcactgtctcaygatggccacagcagcttcaagcatcccttcacctgaaaacacctgaaaacagctgaaagcagaaggggaaggacaaactcatccatgtacctctctcctt

SEQ ID NO: 24221 - DNA, 201 bp, Homo sapiens
tagcgacacaagcgggggcgaatgtcatttctcaggagttttggctgggatggctggaactgtgcatcattgcgctgggcatccagcagggagttttcatrgaatctggtggtcacagggtactttcttggctccggatgccttgctttgacttccatatgggatctccctgtgttccttacccactgctccagtacccgt

SEQ ID NO: 24222 - DNA, 201 bp, Homo sapiens
tgttccttacccactgctccagtacccgtgttatcctgcctacctggctttgtgaacagcttccctgactccggagaattacatgcccagtgctcaggctyccccgcctgcatttctaatgtcctgccaagctacaagctagttggcaccccctgttcttggattcctgcctgactccctggtttcaagccatcccctcct

SEQ ID NO: 24223 - DNA, 201 bp, Homo sapiens
taggagtcctactcacacttgtgctgctgcaagtgagaaacttgaccgtcaccttcaatttcaatgttggcaacaacaacaaaagcagccacacacaacayctgtgaatgcccagaccttaactgcagtttgggatggagggtgagagcaggaaggatgcactctgtggtcaccacgcttggagcacatcagaatcacctg

SEQ ID NO: 24224 - DNA, 201 bp, Homo sapiens
gaggcagagcttgcagtgagccaagattgcaccactgcactccagcctgggcaacagtgcaagactccatctcaaaacaaaacaaaataaaacaaacaaamaaaaaaacagtaggtaagctacatttggcccgcagactatagttttctaaccattgctctaaaggatgaatggagattacattgatcattaacaactcag

SEQ ID NO: 24225 - DNA, 201 bp, Homo sapiens
caatgccgcagcctaccttcggtatttctcactagaggatggctctcgcagccttctccctatcattaaccctttttcgctcttctccctcccttcccccstcagctcaccaatgactgtaaatatatttatctatacttatggatacccattcacaccttatgcatccaaacactcctgtctccttctcagaccagacac

SEQ ID NO: 24226 - DNA, 201 bp, Homo sapiens
tgggttcaagcaatcctcctgcctcagcctcccgagtagctgggattacaggcacatgccaccacgccaggcaaatttttgtatttttagtagagacgggrtttcactatgttggccaggctgatctcaaactcctgacctcaggtgatccacccacctcggcctgccaaagtgctggaattataggcgtcagccaccgca

SEQ ID NO: 24227 - DNA, 201 bp, Homo sapiens
cttttctccagcatgttgttagtgctccacatgtctctggaaccatctctctactctggtggcctctataatggggactcttcacctcttgtgggtgtgcmtggtttttgaaaatagccaagtctccaggagtcatgactgggtaatccaggggatcaagggggaaccttcactgggcccagaaacaaagtcccccttcat

SEQ ID NO: 24228 - DNA, 201 bp, Homo sapiens
agagcagcccccaagcctgctttccaccccacctttactgagaagctagggccctgaccaatggtagaggctactatgtaggaagtgcctgtacttaagasgcaagggtgtggtgttgtgaaaaaaatatccaatttcatgcaccaatgcccagattttgtgtgatgataacccttcaagtgtagggatagaaaaagggga

SEQ ID NO: 24229 - DNA, 201 bp, Homo sapiens
cttggaattttatcccctcgttttcactttgggatttgaagatttccacaaacctcccagctgtcatttgatagtttatgatgctacgagagcccctaatsaggagatcactctgaaatccacaaagccttgttttcagctttttattacactttattgctgcaaagaaggagaaggaggacctccctccacaagcaagct

SEQ ID NO: 24230 - DNA, 201 bp, Homo sapiens
ttggttaacttttcttccccaccctgtcggtacctagtaagttctgtttcgttagtcagcagaaaatggttaagattaaaactgttcaatgcactgattcmaatatctttgggtggccttgaagctgctcttagcagagggaaagagacatccagccatgtgagtgtcctgagggatgccaatgagaatgaatctgcccag

SEQ ID NO: 24231 - DNA, 201 bp, Homo sapiens
gcaagttcctgaccctgttatgaaactcccaccctaaatacacagataacgtctcagccatgagtgaaactagaagagatcatgtgtaactaattagatgkcagagtgagagaaaagaaacttttccccgggtcctggtcatttgaaaagaaatattatcctcaaagaaaagtctttacttgagatctgaagtgcaaagca

SEQ ID NO: 24232 - DNA, 201 bp, Homo sapiens
gcagctatgaatcactggacagtttaatgaagacgcttgctcaatgtttagctgcagtccaaacagcaaatagaatacgagggctcagtgaggagggagtsagggctactcagaggggcagggggacagcaatggtttggcctcaccttggaagagctcagcttgatcacctcattatacaaaggtcacagtcaaaatgga

SEQ ID NO: 24233 - DNA, 201 bp, Homo sapiens
tacaatttgaggccaatgtaccacattctatctactcttcagtactctgcaagagattggagtgaggactacagtattagaagatgaacaatctttggtakcatgcttagggtctgctctttcccttaagattctcctacatctgtcactccagaacccacccccacaactggaggcatatctcagttccattgggggata

SEQ ID NO: 24234 - DNA, 201 bp, Homo sapiens
attgctacaaaggaatatgctttttctaaataggaactatattaaaaagttcaaaataaatatttcagttttggttaacttttcttccccaccctgtcggyacctagtaagttctgtttcgttagtcagcagaaaatggttaagattaaaactgttcaatgcactgattcaaatatctttgggtggccttgaagctgctct

SEQ ID NO: 24235 - DNA, 201 bp, Homo sapiens
tttggttcttccacacctgtggagtctgcacaccggatttgcaccctcccccaagttttggccaggaggcttctcaccccattcaaattgctacaaagttsagctagagatttccttctccatgtggagttttatcctctgctcctctgtccacctttctgatggatctctgtggtgccaggcagggatggcctgctaggg

SEQ ID NO: 24236 - DNA, 201 bp, Homo sapiens
tccaaatgagataaagaatgcctggaattccagagggaaaaaatcgagtgtggaaaatgctaatggaggtagtagcttcattgataactcattggcactgktgctgtgcagaggtgctgtatgcctcccatttaattgttcaagcagccctctgggcattggactatggccatctccatttttcccatgagataatggttg

SEQ ID NO: 24237 - DNA, 201 bp, Homo sapiens
aaaggattaagtaatttacccaggtcacacctggaaagtgctgggacctcaatttggacccaagcagcctcttctacttacaatgcttactacctccaccragggagcctccaccaaggagatggtggaggtatgaatatgcttctgtttgaattgatgagtgtgaattacttgagggactttcaggtaaacctgtccaat

SEQ ID NO: 24238 - DNA, 201 bp, Homo sapiens
ccttacccactgctccagtacccgtgttatcctgcctacctggctttgtgaacagcttccctgactccggagaattacatgcccagtgctcaggcttcccygcctgcatttctaatgtcctgccaagctacaagctagttggcaccccctgttcttggattcctgcctgactccctggtttcaagccatcccctcctcagt

SEQ ID NO: 24239 - DNA, 201 bp, Homo sapiens
taaataggaactatattaaaaagttcaaaataaatatttcagttttggttaacttttcttccccaccctgtcggtacctagtaagttctgtttcgttagtsagcagaaaatggttaagattaaaactgttcaatgcactgattcaaatatctttgggtggccttgaagctgctcttagcagagggaaagagacatccagcc

SEQ ID NO: 24240 - DNA, 201 bp, Homo sapiens
ctttagaaaacaatgatagatataatgatactgtagaccagttattcttaagaaccccttgcctagagactgaggagtgatcatgacaaaaatgtcaatgmctataatcaaacagttgatcaaccaaacatcaaggtgcacagaagatgtgcaaggcacagcttttctcaattttcacactgatagtaagagtgaagaaat

SEQ ID NO: 24241 - DNA, 201 bp, Homo sapiens
cttctacttacaatgcttactacctccaccaagggagcctccaccaaggagatggtggaggtatgaatatgcttctgtttgaattgatgagtgtgaattasttgagggactttcaggtaaacctgtccaatagataatatgagtctgaagcttcgggaggaggtttgggttggacaggagataatttggatatcatacaca

SEQ ID NO: 24242 - DNA, 201 bp, Homo sapiens
ctgcctactgcctgatgcccttgtcttgggtccccaatttctagcctttagcctggtgattctatttatggcccaaatatgacaatctatagatagctaamaaggggaaaagtcatcaaggtgggcagcaaggaggtctggaaaagtgtcccaagcccagtcagggcactcttcgccagcttgcctttgggtaggcaccct

SEQ ID NO: 24243 - DNA, 201 bp, Homo sapiens
ttatggcccaaatatgacaatctatagatagctaacaaggggaaaagtcatcaaggtgggcagcaaggaggtctggaaaagtgtcccaagcccagtcaggkcactcttcgccagcttgcctttgggtaggcaccctggagcacagtcacttgattgtatcttctgccactcaaagaggctattggtgtgtatcctttggcc

SEQ ID NO: 24244 - DNA, 201 bp, Homo sapiens
aagaagaatggaatgaacataatgccaaaataattaaatatataagaactaagacaaagccccatttgttttatattcctggaagaatgtgtccagctacycaaaaactaatagaagagtcacagagaaaaatgaacggtaagtatgcgaagaggtccattgaattgttcatagtgggtaaggtaatatgttcatatgcac

SEQ ID NO: 24245 - DNA, 201 bp, Homo sapiens
tgtgaagaagtatttccagttagtttttgtgtgtatataactcacttgtgtaagtggatgtgttaaaagatctctttttaaaaatccttttattggagtarttattaaaacagtaaatgcatagagctttgcacagcaatctgtatccatgagccagttccaccactagtaccttcatctgtggcttatccagcaaaatgt

SEQ ID NO: 24246 - DNA, 201 bp, Homo sapiens; identical to SEQ ID NO: 5004

SEQ ID NO: 24247 - DNA, 201 bp, Homo sapiens
tctggctcaatttcaaattccatttctggttccaattctttgctagcttcattttctgaaggttctacactttcaactcgattagtttccattacctcctsgtcagcaattacatgtttgacattctcaaccatctctagcacatccataacttcttcaggctgactatcctgctgcttctcactttcccttacctcagtt

SEQ ID NO: 24248 - DNA, 201 bp, Homo sapiens; identical to SEQ ID NO: 5006

SEQ ID NO: 24249 - DNA, 201 bp, Homo sapiens
ctggttgggactgggattgaagctgaagctggggctgagactgaggctgaggttgagccacaggctcaggttggggctcagattctttttcttctttttcstcagactccttttccatgtctaaagcactgacattctctttcccaggagaaagggatttacattctttatctggctcaatttcaaattccatttctggtt

SEQ ID NO: 24250 - DNA, 201 bp, Homo sapiens; identical to SEQ ID NO: 5008

SEQ ID NO: 24251 - DNA, 201 bp, Homo sapiens
ggcccggaactgcagcacaaagccccttcccgctccggcggacacccggcccgttgctggccccgagaccctgccgggacgcaacaagccgccttaccccrgcttcctgtccacgtgcagcctcctcggggatggcgggatggggacctgatccaggcttgttaatgtgtgggggcatcgaggtgaatataatttctgtga

SEQ ID NO: 24252 - DNA, 201 bp, Homo sapiens
gcccggaactgcagcacaaagccccttcccgctccggcggacacccggcccgttgctggccccgagaccctgccgggacgcaacaagccgccttaccccarcttcctgtccacgtgcagcctcctcggggatggcgggatggggacctgatccaggcttgttaatgtgtgggggcatcgaggtgaatataatttctgtgac

SEQ ID NO: 24253 - DNA, 201 bp, Homo sapiens
cctgttgtcgccgaggtggagaggccccaggtcccctccgtagagcgctggtctcaggtccctgaggaaggagagcgaggcctgggtgcgccggcatgctktcttggcctgtgagaagacccggactgctgattcccgctctcggccctgcaggcccggaactgcagcacaaagccccttcccgctccggcggacacccgg

SEQ ID NO: 24254 - DNA, 201 bp, Homo sapiens
gagcgaggcctgggtgcgccggcatgctttcttggcctgtgagaagacccggactgctgattcccgctctcggccctgcaggcccggaactgcagcacaawgccccttcccgctccggcggacacccggcccgttgctggccccgagaccctgccgggacgcaacaagccgccttaccccagcttcctgtccacgtgcagc

SEQ ID NO: 24255 - DNA, 201 bp, Homo sapiens
atttggcttgttgatgggtacccttcaaaaatttaaacaagaatccactgttgctactgaaagggtatttatccaagttttgttttgcatcatatatttaagttatcaaagtagtagattaatgttttttttaaaaaatccttaaagctcttttaagacctaactgtaaacctgaaacaaagccaagtaaaaacttggttt

SEQ ID NO: 24256 - DNA, 201 bp, Homo sapiens
aaatatgttggtttgaacaaaacctgtgataaaatcaataacccagtgtttgtcgtctttgttttgtttaatgttgtaatagactagatttctgtataaawatagttatcctgaaaaactggaggttgaagaatatattaagtttaccaattttgagtgaacttaattcttataaagtaacactataaaagcattttggaa

SEQ ID NO: 24257 - DNA, 201 bp, Homo sapiens; identical to SEQ ID NO: 5009

SEQ ID NO: 24258 - DNA, 201 bp, Homo sapiens
aatatgttggtttgaacaaaacctgtgataaaatcaataacccagtgtttgtcgtctttgttttgtttaatgttgtaatagactagatttctgtataaatrtagttatcctgaaaaactggaggttgaagaatatattaagtttaccaattttgagtgaacttaattcttataaagtaacactataaaagcattttggaat

SEQ ID NO: 24259 - DNA, 201 bp, Homo sapiens
cagccaaacagagagaccttgaaggggcagtcagtaggtaggtttaaaaaaagattcctgaaggcttctttagtttctgaggtaccacacaaatataaatrtttattaacaataattctgtttcagcaatattaaaattgagtggtatgccactccctgccccccccaagttctgttggtatttgactgaacagttgacta

SEQ ID NO: 24260 - DNA, 201 bp, Homo sapiens; identical to SEQ ID NO: 5011

SEQ ID NO: 24261 - DNA, 201 bp, Homo sapiens; identical to SEQ ID NO: 5012

SEQ ID NO: 24262 - DNA, 201 bp, Homo sapiens
caggcccatccaagccagattgctggccctttctggtcctggtggaggtagaggacgtggtagtttattactgaggtaagatttcctttggactttactcrtgctgaaactactggtactttactaaatatgttggtttgaacaaaacctgtgataaaatcaataacccagtgtttgtcgtctttgttttgtttaatgttg

SEQ ID NO: 24263 - DNA, 201 bp, Homo sapiens
tgaagaatatattaagtttaccaattttgagtgaacttaattcttataaagtaacactataaaagcattttggaatgaatgcccgtttaaggctactttasttggaaagatttttgaaagtttaaccatattctcttgtcaaatggaaataccatttatcttgtatttcaagtgttttatgttgaacattttaaatttcag

SEQ ID NO: 24264 - DNA, 201 bp, Homo sapiens
caataattctgtttcagcaatattaaaattgagtggtatgccactccctgccccccccaagttctgttggtatttgactgaacagttgactatcagttccytcaaaacgcagttctgcactcatgataacctaaattttatccaaataaaggtcatgtgaagagtaaaattggaaaaattgtcaattagtaccattttttc

SEQ ID NO: 24265 - DNA, 201 bp, Homo sapiens
ctatctttttggaacttttgtgattttttctccttatgatccacatctctgaaagtatttgggtgcgactgtgtgtgtctacatatgattttgcactgatwtgtaaatcttttacaggcccatccaagccagattgctggccctttctggtcctggtggaggtagaggacgtggtagtttattactgaggtaagatttcct

SEQ ID NO: 24266 - DNA, 201 bp, Homo sapiens
aatgaaatagtacttcctgtcctgtttcagacatttagatttatttgaaactatctttttggaacttttgtgattttttctccttatgatccacatctctraaagtatttgggtgcgactgtgtgtgtctacatatgattttgcactgatttgtaaatcttttacaggcccatccaagccagattgctggccctttctggt

SEQ ID NO: 24267 - DNA, 201 bp, Homo sapiens
gaggaagttaaatgaaatagtacttcctgtcctgtttcagacatttagatttatttgaaactatctttttggaacttttgtgattttttctccttatgatycacatctctgaaagtatttgggtgcgactgtgtgtgtctacatatgattttgcactgatttgtaaatcttttacaggcccatccaagccagattgctggc

SEQ ID NO: 24268 - DNA, 201 bp, Homo sapiens
cagtgtttgtcgtctttgttttgtttaatgttgtaatagactagatttctgtataaatatagttatcctgaaaaactggaggttgaagaatatattaagtktaccaattttgagtgaacttaattcttataaagtaacactataaaagcattttggaatgaatgcccgtttaaggctactttagttggaaagatttttgaa

SEQ ID NO: 24269 - DNA, 201 bp, Homo sapiens
ttttacaggcccatccaagccagattgctggccctttctggtcctggtggaggtagaggacgtggtagtttattactgaggtaagatttcctttggacttwactcatgctgaaactactggtactttactaaatatgttggtttgaacaaaacctgtgataaaatcaataacccagtgtttgtcgtctttgttttgtttaa

SEQ ID NO: 24270 - DNA, 201 bp, Homo sapiens; identical to SEQ ID NO: 5000

SEQ ID NO: 24271 - DNA, 201 bp, Homo sapiens
cacccacctcagcctcccagagtgctgggatgacaggtgtgagccactgtgcccggcctgcagatacctttacatagtgaaaaaaaaaaaaaaaaaaaaawttttttttgagatggagtttggctcttcttgctcaggctggagtgtagtggcgtgatctcagctcactgcaacctccgcctctggggttcaagtgatttc

SEQ ID NO: 24272 - DNA, 201 bp, Homo sapiens
aactggggagggagatgactgcctggctgacttttcattggctcagagtcacaaaggctgcaggttcttcccccttccggtcgctgagtggttgaggccgraagacaacgctcatcgtcattggctgagcccggctgtcagtcctttcgcgcctcggcggcgcggcatagcccggctcggcctgtaaagcagtctcaagcc

SEQ ID NO: 24273 - DNA, 201 bp, Homo sapiens
accctggaggtgaggttgcaatgagccaagatcacactattgtaccccagcctgggcaacaggcgcaaaactccatctcaaaaaaagaaaaaatgtgaagsatatgcagataccttttttttttctttttctttttttttgtagagatggggttttatcatgttgcccaggctggtctgagctcaaagcaatccacccacc

SEQ ID NO: 24274 - DNA, 201 bp, Homo sapiens
ggcttgttgatgggtacccttcaaaaatttaaacaagaatccactgttgctactgaaagggtatttatccaagttttgttttgcatcatatatttaagttatcaaagtagtagattaatgttttttttaaaaaatccttaaagctcttttaagacctaactgtaaacctgaaacaaagccaagtaaaaacttggtttaact

SEQ ID NO: 24275 - DNA, 201 bp, Homo sapiens
tggcttgttgatgggtacccttcaaaaatttaaacaagaatccactgttgctactgaaagggtatttatccaagttttgttttgcatcatatatttaagttatcaaagtagtagattaatgttttttttaaaaaatccttaaagctcttttaagacctaactgtaaacctgaaacaaagccaagtaaaaacttggtttaac

SEQ ID NO: 24276 - DNA, 201 bp, Homo sapiens
ttggcttgttgatgggtacccttcaaaaatttaaacaagaatccactgttgctactgaaagggtatttatccaagttttgttttgcatcatatatttaagttatcaaagtagtagattaatgttttttttaaaaaatccttaaagctcttttaagacctaactgtaaacctgaaacaaagccaagtaaaaacttggtttaa

SEQ ID NO: 24277 - DNA, 201 bp, Homo sapiens
tttggcttgttgatgggtacccttcaaaaatttaaacaagaatccactgttgctactgaaagggtatttatccaagttttgttttgcatcatatatttaagttatcaaagtagtagattaatgttttttttaaaaaatccttaaagctcttttaagacctaactgtaaacctgaaacaaagccaagtaaaaacttggttta

SEQ ID NO: 24278 - DNA, 201 bp, Homo sapiens
atgacagctcactgcagtctcaaactcctggactcaaacaatcatcccgcctcagcctctccagtacaatttttaaaatttttatttttagagacaggatygttgctatgttgcccaggctggtcttaactcctgggctgtagcgattctcccacctcagtctcccaagtatctgggattacaggcacaatccactggact

SEQ ID NO: 24279 - DNA, 201 bp, Homo sapiens
ccggctgtcagtcctttcgcgcctcggcggcgcggcatagcccggctcggcctgtaaagcagtctcaagcctgccgcagggagaagatggcggtcgccgtragaactttgcaggaacagctggaaaaggccaaagagagtcttaagaacgtggatgagaacattcgcaagctcaccgggcgggatccgaatgacgtgaggt

SEQ ID NO: 24280 - DNA, 201 bp, Homo sapiens
atatatatgattttatgccaaaactggttctgttttacagaagttttatttttcatcagacataaagattgatctgttttcttcatcagttagaaaatgtstagttctgtctgccacaatttctagtatgtagatttcccatggatctttgcttttataattttatgtcagtttgtggttacttaattgccataatctttt

SEQ ID NO: 24281 - DNA, 201 bp, Homo sapiens; identical to SEQ ID NO: 5013

SEQ ID NO: 24282 - DNA, 201 bp, Homo sapiens
tttaaacaagaatccactgttgctactgaaagggtatttatccaagttttgttttgcatcatatatttaagttatcaaagtagtagattaatgtttttttwaaaaaatccttaaagctcttttaagacctaactgtaaacctgaaacaaagccaagtaaaaacttggtttaacttcttatagaacagctttacttaaacat

SEQ ID NO: 24283 - DNA, 201 bp, Homo sapiens
aattggtttgggcgttagttcacacattgtagtatcctttctctgctggaggaaagaataaaatgggatggagacttgatagaacaaagcttctggaaacragtcctagaagagagggcatttgcccttggtgtgcagttacataaatacctcagtggtcatttaaattaatttttggccaggcacagtggctcatccctg

SEQ ID NO: 24284 - DNA, 201 bp, Homo sapiens; identical to SEQ ID NO: 5014

SEQ ID NO: 24285 - DNA, 201 bp, Homo sapiens
gttgttgatatcatagctaatagccttgaaatttagatatgtgaaaaaaaaaagcctcaagtctccatttccttaaagacaaattacagtcagtaccaagkgctaagttctagttagttggtatcctgaattgaaaatgtgaagcggccaggtgcagtggctcatgcctgtaatcccagcactttgggaggctgaggcagg

SEQ ID NO: 24286 - DNA, 201 bp, Homo sapiens
gccacaggctcaggttggggctcagattctttttcttctttttcctcagactccttttccatgtctaaagcactgacattctctttcccaggagaaagggwtttacattctttatctggctcaatttcaaattccatttctggttccaattctttgctagcttcattttctgaaggttctacactttcaactcgattagtt

SEQ ID NO: 24287 - DNA, 201 bp, Homo sapiens; identical to SEQ ID NO: 5015

SEQ ID NO: 24288 - DNA, 201 bp, Homo sapiens; identical to SEQ ID NO: 5018

SEQ ID NO: 24289 - DNA, 201 bp, Homo sapiens
gatttcctttggactttactcatgctgaaactactggtactttactaaatatgttggtttgaacaaaacctgtgataaaatcaataacccagtgtttgtcrtctttgttttgtttaatgttgtaatagactagatttctgtataaatatagttatcctgaaaaactggaggttgaagaatatattaagtttaccaattttg

SEQ ID NO: 24290 - DNA, 201 bp, Homo sapiens
ttggcctgtgagaagacccggactgctgattcccgctctcggccctgcaggcccggaactgcagcacaaagccccttcccgctccggcggacacccggccygttgctggccccgagaccctgccgggacgcaacaagccgccttaccccagcttcctgtccacgtgcagcctcctcggggatggcgggatggggacctgat

SEQ ID NO: 24291 - DNA, 201 bp, Homo sapiens
acaaaggctgcaggttcttcccccttccggtcgctgagtggttgaggccggaagacaacgctcatcgtcattggctgagcccggctgtcagtcctttcgcrcctcggcggcgcggcatagcccggctcggcctgtaaagcagtctcaagcctgccgcagggagaagatggcggtcgccgtgagaactttgcaggaacagct

SEQ ID NO: 24292 - DNA, 201 bp, Homo sapiens
ctgagatgcgatccggccgctgggcgggggcgaaaaaaacaacttccggtcccctctaccccggcattcggccagctctatgatcactgagttcctctctyccaagcccggagaggccagcgcccagatatgaggaaggttcccctctcaccacgatgtcgggggcagagcaagataaaataagacctaaagctcccgcct

SEQ ID NO: 24293 - DNA, 201 bp, Homo sapiens; identical to SEQ ID NO: 4998

SEQ ID NO: 24294 - DNA, 201 bp, Homo sapiens; identical to SEQ ID NO: 4999

SEQ ID NO: 24295 - DNA, 201 bp, Homo sapiens
agggcggccagccttaagaagactggaacctcgaggcctgttcgcggggcggcgggtaaaaccctgttgtcgccgaggtggagaggccccaggtcccctcsgtagagcgctggtctcaggtccctgaggaaggagagcgaggcctgggtgcgccggcatgctttcttggcctgtgagaagacccggactgctgattcccgc

SEQ ID NO: 24296 - DNA, 201 bp, Homo sapiens; identical to SEQ ID NO: 5001

SEQ ID NO: 24297 - DNA, 201 bp, Homo sapiens; identical to SEQ ID NO: 5002

SEQ ID NO: 24298 - DNA, 201 bp, Homo sapiens; identical to SEQ ID NO: 5003

SEQ ID NO: 24299 - DNA, 201 bp, Homo sapiens
tggtctgagctcaaagcaatccacccacctcagcctcccagagtgctgggatgacaggtgtgagccactgtgcccggcctgcagatacctttacatagtgraaaaaaaaaaaaaaaaaaaaattttttttgagatggagtttggctcttcttgctcaggctggagtgtagtggcgtgatctcagctcactgcaacctccgc

SEQ ID NO: 24300 - DNA, 201 bp, Homo sapiens
tgagtggtatgccactccctgccccccccaagttctgttggtatttgactgaacagttgactatcagttccctcaaaacgcagttctgcactcatgataasctaaattttatccaaataaaggtcatgtgaagagtaaaattggaaaaattgtcaattagtaccattttttctgacttgtacttgaaaaacttaaccagtt

SEQ ID NO: 24301 - DNA, 201 bp, Homo sapiens
gaaccagaagcgggacaacacacacagacaccactaacaacagggccgctcccttaggtctggtcttaaccagctctaggccaggtgaagaggctaactcraccatgactgcgtgtctgtctcgccattgctttcttttctctagtatagatgctcagcgtctaatcagagactgattctcaactggcgtgaccaaaggac

SEQ ID NO: 24302 - DNA, 201 bp, Homo sapiens
aggtccattgaattgttcatagtgggtaaggtaatatgttcatatgcacacgtttgttttctaaaataattatgattcagtgattggtttgctgtgtttgstttttttttttaaataagataataagatattctaggccgggcgtggtggctcacgcctgtaatcccagcactttgggaggctgaggcaggcagatcatga

SEQ ID NO: 24303 - DNA, 201 bp, Homo sapiens
aaccagaagcgggacaacacacacagacaccactaacaacagggccgctcccttaggtctggtcttaaccagctctaggccaggtgaagaggctaactcarccatgactgcgtgtctgtctcgccattgctttcttttctctagtatagatgctcagcgtctaatcagagactgattctcaactggcgtgaccaaaggaca

SEQ ID NO: 24304 - DNA, 201 bp, Homo sapiens
tatatatgattttatgccaaaactggttctgttttacagaagttttatttttcatcagacataaagattgatctgttttcttcatcagttagaaaatgtgyagttctgtctgccacaatttctagtatgtagatttcccatggatctttgcttttataattttatgtcagtttgtggttacttaattgccataatcttttg

SEQ ID NO: 24305 - DNA, 201 bp, Homo sapiens
ctggctcaatttcaaattccatttctggttccaattctttgctagcttcattttctgaaggttctacactttcaactcgattagtttccattacctcctgstcagcaattacatgtttgacattctcaaccatctctagcacatccataacttcttcaggctgactatcctgctgcttctcactttcccttacctcagttt

SEQ ID NO: 24306 - DNA, 201 bp, Homo sapiens; identical to SEQ ID NO: 5019

SEQ ID NO: 24307 - DNA, 201 bp, Homo sapiens; identical to SEQ ID NO: 5020

SEQ ID NO: 24308 - DNA, 201 bp, Homo sapiens; identical to SEQ ID NO: 5021

SEQ ID NO: 24309 - DNA, 201 bp, Homo sapiens
agtctctgggcttcttagagcaaaagttttaaaaccatcatttatatgtttaatatatttttatctatttctagatttattttaaaggcagtaaaataatmtaacaggctcctgggtacccatggtgtttattatattatgaagaaataaaatattactcatacagtcgaaaccctacaattaaattcctttccctccctt

SEQ ID NO: 24310 - DNA, 201 bp, Homo sapiens
tcgacgaggtgagagctgcagcagaatgtcactgctctgataaaaggacaactaaaagccaaatatgattattttcagaagaatattttgcagtaaatgtyattcatgtaataaatttattctttaatctatcagtgtattagcgttccctccaggaagtagtttttaaactcatctcaataattactttcatgtttaatt

SEQ ID NO: 24311 - DNA, 201 bp, Homo sapiens
tactaaacaacagtttcatatgatatatcttggacattctgtgaaatagtaagttgctgatgatagagaaaaaacatggctttgtgatcagttactagccrtattcttgaaggttacagacagagcggggtaggctgcagcctacagacagaaagtggggctgtaggtgtagggtcctggctgcacagagtgtgtgatgga

SEQ ID NO: 24312 - DNA, 201 bp, Homo sapiens
ctaatccatttattgctctttaaagattaccatgtactcctttttcttattataaaatattgcatattcatattaaaatctggaaaattcatagaagcagmaataagtaatctaatgaatcaaaaacaatgtcaagtagtgtttcttaatcattacaattatttatgaattttggttttaatttttcaacatttggtctac

SEQ ID NO: 24313 - DNA, 201 bp, Homo sapiens
aggtccttgagagctcttagctcatcatcctttaagtatagtttggagtattcttcccaggctgtactacttcatgcatttttttttttttttttttttttgcctattgtatttagagtttttcctgaaatgaatttctcactatgtatttgactatcaagaagagttgtatcatctgcaagtttgaggtttcacttgaaa

SEQ ID NO: 24314 - DNA, 201 bp, Homo sapiens
tacataccaggaaatgtcctgaactctttacacatgattcattaattttctgaattacacttgtagataggaactattgttatcctcattttatagacaaagacacagagatagaggttaagtatctttactggggccacacagctaggaattggcagaaccaggatttaggcactaaaatctgtttatttaaccactagc

SEQ ID NO: 24315 - DNA, 201 bp, Homo sapiens
tatttcttcatcattcagtcttggtcgattctatgtgtctagcctttatcaacttcttgtaggttattgtatttattggtgtataattgttcatagcagtstctatgatccttttttatttctgttgcaatgtctcctctttaatttataattttatttagttgaatcctcattccttttttcttagtttggctgaaggtt

SEQ ID NO: 24316 - DNA, 201 bp, Homo sapiens
atgaaacagccactaaggaaaatcattgcaaggaacaattagcagggtgtccttgcctgcctcttctattcaaaagccatcagctacattctttataaaakgtgctttaagtgtttgctgttgattcctgcaatctaagctctcaggagcatggtttgttccctagcaagaagataatagccagcacaacccaaggaagac

SEQ ID NO: 24317 - DNA, 201 bp, Homo sapiens
tgtataattttatgcgtagagataagagatgagtactttcgcagaaacaaatgaataattatataccaacatggagaacttaagctcataggtgaatgtgrgaatatggaggagaatgaaaatcattgccaggtgagtgatcaaagagtgcattctagaaaaggtggtacctgtacaggggtttggaggatgcattggtat

SEQ ID NO: 24318 - DNA, 201 bp, Homo sapiens
aagcgttcatgcagaatggctactgagacgtttagaaaccatgatcgagacaaatgagggatcatttatttggacaaactgagaacttttactaatctaayagccagatattgtagtcatggtctctgaggagaaatgcaaactgaatgctctcatttgaatcttagaatgctttagaatcctggtttcacatgtcttcta

SEQ ID NO: 24319 - DNA, 201 bp, Homo sapiens
tctgttatcccagcttctaagctaaccagactcatcattttggcctttcatgtatgcttttcctatggccaaaacgtccacaaattactaataaatgctgrcaaggagagaggttaaaaccaggaagccatgccttttagctgacaaaacattcattgaaatgctatctgggtgaagcactgagaaattaatcatctgaat

SEQ ID NO: 24320 - DNA, 201 bp, Homo sapiens
aagtaggtaagcagagtccaaaatgtagggtcattttcaatggcagagaggaataggagagtcaataagaagcaaatgctcaaggagcttgagtagagackggaataggcatctctttattatcttattggctgatttatacttcttgtaaaataattagcttaagctaattatctaagaaacaagaatctctcctaggca

SEQ ID NO: 24321 - DNA, 201 bp, Homo sapiens
ggggatagttacagaggcaagagctcccacccagcgccttctgagcttcttcctctgattgatgtactgtaagagaccgtcaatggctaagttcccgtcaytgatgcggatccctgcccacatgtcccacagctcactctcacagagccaagtacacggcccaaagactggggtgagacctcgagagaatacaaagaagtt

SEQ ID NO: 24322 - DNA, 201 bp, Homo sapiens
ccaattttgcttttaccaagccttagtgaaaagtgaatgaattctaacaagaagactcaaagacactggtgctccccctgtgtctcccttcacttattctrcatggtcagcacctcttcaaaagaccaataataatggtcccctacaagaagtatacaattgctcctctgatgtgaaagcatatgaagaaaataagtgtcc

SEQ ID NO: 24323 - DNA, 201 bp, Homo sapiens
gggtcccatcagtcttccaggtgtaaaccattagattcctactagatccctatctttcttcccgttactatatcagtgagcaaggtcttgattctatttcrttttttgtcacaattaattattattaatagaaaataaacacttattccagtttcaaagttgttataattgaagttgctaattttaaaaaatgaattttaa

SEQ ID NO: 24324 - DNA, 201 bp, Homo sapiens
aacccccaaatcttaaaatcttagcattatagaggtttatttctcaatgatgcaatgacaaatacaggtccatctggtgactcagggtcccagttgtcctycgcttatgatgtttccaactcaggaaatgccttttatggttgctatggcagaggaagagaggagtggggagctggcacctaggtcttcagtgcttcagct

SEQ ID NO: 24325 - DNA, 201 bp, Homo sapiens
gcttaaaatatattcacattatcttaatttctactgtctccaagtccgactccttaccaaatctgtagacagtcagcttcggtcccttaaatttaaatgtraattcctctaagatcattttcccagttgcacaagctgaagtaatagtcttttgggcctgactcatcccatcctctctggacacaaagaagggcagaaaat

SEQ ID NO: 24326 - DNA, 201 bp, Homo sapiens
tcatattaaaaatagcaaaaatattacttcttcaaaaatgctttatacttcatgtatattactgattttaagtaaaagtacaattaagacaattagccagwcctatttatgagtagctctaattggagcagcttgttgctggaccctattcagtggtagagataaggttgagatggctgaatagttcatctaatttgaaat

SEQ ID NO: 24327 - DNA, 201 bp, Homo sapiens
atcaaggatgcatatgaagtagttaaaggctagatctaaggacatgtggtagaaaagcatgtaattcagaaaaagcctagcttgacccctaagaagggggyggtagtgagagggatcaatgagataaggagttcctgtctgctttctaaacaatgcagtttgaacagagaagtgcctcatctttccttttttccatctatt

SEQ ID NO: 24328 - DNA, 201 bp, Homo sapiens
taattttgcactttagaaaatgtctgcatgtttattagagaagtgaatgctgaaatcagcgaacaaaatgtaaagtgagcaactaagaaatacttataagrgctcacttgtattatttaactgtgtaatcctctatctcatatatatgtaatactttcttcaagttcattatagctcccgggcccagtacatcctagtcca

SEQ ID NO: 24329 - DNA, 201 bp, Homo sapiens
ttatattagctaatcactaaacagaaattttaaaagaagtatttaatattaattctcaagtcttaggagaatatttagctaataattctacagttgactgsagagtttattcattatttaattcataatgtcttttcaatcactttactgtttcttgattcatgaagaatacatgccaagtgtattagtctgttctcacac

SEQ ID NO: 24330 - DNA, 201 bp, Homo sapiens
tatattgttatgagcacaatttctacccagattttgttggttcttttcaaatccatcaagtaaaacagtgtgcgtatgatttgtgaatactgcagttgctrtaatcacaataaaagagggtttcttgcaagaaactatgtaaaacaacttttatgaagaatagctgtccttagccccagataaaaactactgtcagccaca

SEQ ID NO: 24331 - DNA, 201 bp, Homo sapiens
aagcactctatctcggaaatgttcgtggcccacgtcttttccgtcattgtgcatttttgccccatcgctaacacttggcagtgtcagccctttcttatacyccttgtcatcaaactatattcacattttccttttaaggtgaagtgatatgtatactgaaataatcctatattttttaatgttttagtgtatctttttgag

SEQ ID NO: 24332 - DNA, 201 bp, Homo sapiens
cttttcctggtccattaatggatatatgacaagtgatggcaaaaggatagttacagttattaacttaatcattaattggctcagggtatccccaaaaccgyagttggaactgaagtgctacaaaaatgaccattttgttgttatagcttttcttcacataaggaaataaataagcaaaaagagggagtgtcttatctattt

SEQ ID NO: 24333 - DNA, 201 bp, Homo sapiens
gaatagagtatctactgtatgactagaggtatagctaagaaaaaagactatagggagaaattaatattgtaggacaaagcatttaattctagaatgatccyactaaggtaagaccaccgtcatcggttgcaaaattgctgaatcactagggttaatagttacagatcctaaatactcctcacatgttttctttcctcgtta

SEQ ID NO: 24334 - DNA, 201 bp, Homo sapiens
actttaaatacctgcaaagttaacatgtcataacagcaactcaaaaaccattaagtgctaaggagtttgtgttattttccatttaaaggatatacatacgyttctaggacccaaatcctagcaaagtacacttcacatttctttctctacatctctagagtttcatagaagaaagtagccccaaaatgttatccctctaaa

SEQ ID NO: 24335 - DNA, 201 bp, Homo sapiens
atggaaaaattaatgaatttgaagacagaaaatattagacctgataaatcaaaaaggtgactccttaggaatatagattaaaaattaagtgattgtcaagwttcatcaagaaaaataaaggacaaataggcaaagctctaaaagaggtatcactagacaagggaggaaatttaacacataagagatcacttggaaaaactt

SEQ ID NO: 24336 - DNA, 201 bp, Homo sapiens
aacaattctaaacaatcaactttgctgactttagaaaaagcagagttaacttaaagaatgaaaaagatggaaaaattaatgaatttgaagacagaaaatawtagacctgataaatcaaaaaggtgactccttaggaatatagattaaaaattaagtgattgtcaagtttcatcaagaaaaataaaggacaaataggcaaag

SEQ ID NO: 24337 - DNA, 201 bp, Homo sapiens
gagggcaattttaaaagaaggtagtttctcaggtgtttctagtcaaaatgacaaacctacaaagtacatttgcattattttatgtatactttactgatagwgtcctttaaatgttgagttcaagctaatttttcttaatcttcaaaaagtttagggatcaaattgtatcctgcagatttttgttatgctaaatttcatttc

SEQ ID NO: 24338 - DNA, 201 bp, Homo sapiens
tctatagaattaactagattatgctgtttctgataacacaaattcaccccaacacacgaatgacttaattgcaagaggattaaaatagataaggtctacaytgttgttgtttttacccactgaagctcactttttcctctccttgtaattattctcaacttctgtagaattatatttggagaaacacataataaaactagg

SEQ ID NO: 24339 - DNA, 201 bp, Homo sapiens
ctatactgagggcaattttaaaagaaggtagtttctcaggtgtttctagtcaaaatgacaaacctacaaagtacatttgcattattttatgtatactttaytgatagagtcctttaaatgttgagttcaagctaatttttcttaatcttcaaaaagtttagggatcaaattgtatcctgcagatttttgttatgctaaatt

SEQ ID NO: 24340 - DNA, 201 bp, Homo sapiens
actgaatttctctatagaattaactagattatgctgtttctgataacacaaattcaccccaacacacgaatgacttaattgcaagaggattaaaatagatwaggtctacactgttgttgtttttacccactgaagctcactttttcctctccttgtaattattctcaacttctgtagaattatatttggagaaacacataa

SEQ ID NO: 24341 - DNA, 201 bp, Homo sapiens
atcagatgtctgcaccatggttcctgtacagcctgcagaacagagaaccaattaaatatcttttctttataaattacccagcctcagatgtttcttaaaarcagtgcaaaaaatggcttaacactgtgatatttggtattttctagtccattagtgcacatccccccgatgtaggataaatatggtatgaatatttgaata

SEQ ID NO: 24342 - DNA, 201 bp, Homo sapiens
gaagtttgagatcagcctgggaaacatagcaagactctatctctacaaaaaggaaaaatgagtgaaatatctgtatgatagccacataaaagtggaaaacwgaatttctctatagaattaactagattatgctgtttctgataacacaaattcaccccaacacacgaatgacttaattgcaagaggattaaaatagataag

SEQ ID NO: 24343 - DNA, 201 bp, Homo sapiens
aaatcgcatgttgaaatggtattcccagtattggacgtggggactggtgggaggtgattggatcatggggacagatccctcatgaatggtgtagcaccatycccttggtgataagtgagttctcccttagttcccatgagatctggttgtttaaaagaaattgggatctccccctgctctctcttgctcccactccctcca

SEQ ID NO: 24344 - DNA, 201 bp, Homo sapiens
ttccatccaagactatcactaccacttctaaaccacctccagccacacaaaaaacacacactatgcttgagtcattccaaattacacaccttcctctaaayattagtgtgaaattaggacatttgggaaatgtgattgatatgatttgcatgtttgcccccttcaaatcgcatgttgaaatggtattcccagtattggacg

SEQ ID NO: 24345 - DNA, 201 bp, Homo sapiens
aaaaatccaagcaaagcaggtaacaagaggacttgattccagactgtgaacagatttgaggcagggtcagaaagccaccctgaaatttcagtgctataaamctgtagtgggaactctataggaatactaatttctcccttcatcaacaaagatattatactggtcctgtgaagaggcttagtcacttcccagtttatgtat

SEQ ID NO: 24346 - DNA, 201 bp, Homo sapiens
agtgagaagctaaaatggaagggagacgataaatagctcagcaaggtttttagggaagcagaaatgactcagatttgaaatataggtgacagaattagccytaaggaggagaaagaaaagatcttttgagactataagaaaggaggtgagagttgatgtagccataaaaaatacagagatgaaagggtggggagttaaaag

SEQ ID NO: 24347 - DNA, 201 bp, Homo sapiens
agatgagattgtgtgtgatttttaaaaattatatttattctacctaataagcatttattacttttataacctgagagataaacattattgaaaaagaagakcatggatttaaagcgaggatgtgagactgtggctgttacatatttttttggtttggaccttggttaagaaggcaaagagggatagagattgtgggacata

SEQ ID NO: 24348 - DNA, 201 bp, Homo sapiens
taactaccaggtttgcacgttgacttctttatgcttcatttggattttctgaggctttaacgttttccgtttttaagactaagctcaagggtcaactcttycatgaaaattaattgctatttatgtttccatctataagaagagtgaaataaacaatgaaatctaatgacactgaaaagtgctttcaatgtactgttgagt

SEQ ID NO: 24349 - DNA, 201 bp, Homo sapiens
tatcctgtaccaaatggtatgccaggggtgaggatacaaagatagaatagaactttttagtacaatgtgaagaaagaaacataaagaaataagactgctgragtattttaactaccaggtttgcacgttgacttctttatgcttcatttggattttctgaggctttaacgttttccgtttttaagactaagctcaagggtc

SEQ ID NO: 24350 - DNA, 201 bp, Homo sapiens
cggctaattttgtatttttagtagagacgaggtttctccatgttggttaggctggtcccgaactccagacctcagttgatccaactgcctcggcctcccaragtgctgggattacagacatgagccactgcgcccggccgactctggtgaatttctcggatgtaagttgttatggtatgtgtgtaggagtggggagtatag

SEQ ID NO: 24351 - DNA, 201 bp, Homo sapiens
gaatttccgagaaaaagaaggtgactgcaaaggatgcactgtcaggttagttgagatgagaactctcccagggtctgtcctgtgcataataaaagcttcgwttttattgcataatattctattatcatgtggatgatgtggagcaggtttgaaaggattatactcagaggtggaattaccacaaaactaatgaatcttcaa

SEQ ID NO: 24352 - DNA, 201 bp, Homo sapiens
tgtcacatactagacaaagatgatttgttttcattgttctgaatgtatgtgagatctgtaataacatcctttcatcacagatgagaaaatattaactaacytgcccaaaatcatgtactacaaataacaggaccaggtattaaatgagatgatatatttgacttaaatacctccatctatgcacagccaatagattattct

SEQ ID NO: 24353 - DNA, 201 bp, Homo sapiens
tacttacgtagcagagctgtttagtagattaatataattatcctcagtttgtagaaggaaaatatgcccagcaacttgtcaaggacaaacaaaaattccartgcttattttagaattagaaattaaattacggtcctgctcttgactttgtagatgctaactatcacctcttttggacttttatatatttatctttcataa

SEQ ID NO: 24354 - DNA, 201 bp, Homo sapiens
ctctttgagaggatctcactttggcaaacacttgaagatgacgtgggagtgatttgtgcagttatcagggggaagagtactctctgtacagggagcaggcytatgaggatctaagcttggagcatggtgagaaggctcagaggagaaatgggaaactggaacacatagcattgttgaccttaattttaaagattttgcctt

SEQ ID NO: 24355 - DNA, 201 bp, Homo sapiens
tgggcctatatgcattggaatgtggtaaatgaatgaatgtttacagtgagtaaagaagataaaaaaattcctgctcttgtggaactaatatttagttgggrtggagatgagcagacaggactatgatgaatatatgatgaagcaacaaaagaacacctatattgtataaaatgtagttgatgaaaaatgtcctggacaaac

SEQ ID NO: 24356 - DNA, 201 bp, Homo sapiens
tgaattagttattgcagtgcccaacagatatttagtattgctgtgtgtccttcaaatgtttacaatattccactgtgcctttgtgagttcactgcagcacsctggggcacctctacacacagtttgtgaacacaggggtagatagatcctagaggcattgaaactacacggaaacttgaatgacgttagggatcccagagc

SEQ ID NO: 24357 - DNA, 201 bp, Homo sapiens
gcatggtgcttattgcgaacaagatctaatttcttactttcagatcagaagagggtttctccataacctgactccctgtgaaacagtcatctctgaggttsccatatgtggtcactctagtatgtatgtctgtctgtgcagaataagtaatcagatatacagcacatcccaaacttgtgacagctactagggaaagggaag

SEQ ID NO: 24358 - DNA, 201 bp, Homo sapiens
tccctcctttcctgaagctcctactatgaccccctagtgggaggaagagcatatgcaagcatggtgcttattgcgaacaagatctaatttcttactttcasatcagaagagggtttctccataacctgactccctgtgaaacagtcatctctgaggttcccatatgtggtcactctagtatgtatgtctgtctgtgcagaa

SEQ ID NO: 24359 - DNA, 201 bp, Homo sapiens
gtcaagaatataatatatggaaaaaataccttgatatagaaaactgcctacaggtctttgatttgtttagcacctaatgtttgagatatttattgttgtckcaatatcctagatttataataagattaatggttcttacttaataccgcagtgtgtcatcctaaggtaacaatttttatttgcttctgtgtattttctttt

SEQ ID NO: 24360 - DNA, 201 bp, Homo sapiens
gagcttcagtcatgaatgacttagtactgctccctgccatttttatgctgtccttgccttgagggaatctgaacttgccgggagcaatttgttttgctttytaatttttgaatatacatctgttaaaagtaaatttgcccttgtgtgagtttgagatttgaagcctgtctacattgcactgatcgaatgtttgtggagata

SEQ ID NO: 24361 - DNA, 201 bp, Homo sapiens
tacattaaaataaatttgaccacagccataccaagttctgtaatcttttctagtttaatgttcaaataatgtgactgataaaaataatgtaactaaggcartccagatgcctttaacgagtgttatgtctgtgataatctgagttcagatttatatcttcaacagtaagtatttagcactctccaacccttcttgcacttg

SEQ ID NO: 24362 - DNA, 201 bp, Homo sapiens
gaacatagccctaggctacacttagaaaaaattattttctgttctttattaaaaagcacagtggttgccttattagcattttaaataacatatatgaaaayacattctgtttcaaatttcagtttcatgtttctaatggaatcaaaacaatttattgttaaaaggatggcttttgaaaatttggccccatacgtagtcttt

SEQ ID NO: 24363 - DNA, 201 bp, Homo sapiens
aggggaacagaaagactgaaaatgagagataagatacactatgcaaactctaaccagaagaaagctggtatgctaccattaatagcaatcaaaaagacttyaatttttttaaaagaattattaaggacaaagaaagtgatcatgatagaataaaaggaacaaggaaaactaaaaaattatgagcctgcaaggtcataataa

SEQ ID NO: 24364 - DNA, 201 bp, Homo sapiens
ataacatatatgaaaatacattctgtttcaaatttcagtttcatgtttctaatggaatcaaaacaatttattgttaaaaggatggcttttgaaaatttggycccatacgtagtctttaagtcttttttatttttcctcttttaagctccagggagacattacattttctcctgtaaaatagcagcttattctagctgggat

SEQ ID NO: 24365 - DNA, 201 bp, Homo sapiens
gagaaaaaatgaagagacatgtaggcccctaccatactggctcatgaagcctggaccacgtctggtctgagtcattgaccagaagtagccgtgtgccccargctaactgtaagggaggtctggaaaagtaggaggcacataggatatttgatgagcactaactatctctgcttcaggttgtcttcataataaatgcaaaca

SEQ ID NO: 24366 - DNA, 201 bp, Homo sapiens
agcctggaaaaatatcaaaattcaaaatttgaagtatgatttatattgactatgtattgctttggcactatcacaaaatcgaaaaataccaagttcaaccrtcataaattgatgactatctgtaccaccaaatagcccattactcaaatcctcaactttttctcttcaatgtatgtgacctctatttatatagtcaatact

SEQ ID NO: 24367 - DNA, 201 bp, Homo sapiens
gaggatatgaggccctcctctgcccatttacactggaaatgtcttagatgtcttagtgcttttcaatcaggtatatccaaacaacaaacaaacaaataaartaagactaatgcagaatgaattccatagttcagattcttcaagataatggaaaattatcacataatctccacctgttttgaaacattatcttctttcctt

SEQ ID NO: 24368 - DNA, 201 bp, Homo sapiens
cttcaatacaatcaagttggcactcagtattaaccatcacagtgaatgaatagattttctatgacgttgactccttggaatgaccaccagaggcaataagyacactctcagtgacacgaggatatgaggccctcctctgcccatttacactggaaatgtcttagatgtcttagtgcttttcaatcaggtatatccaaacaa

SEQ ID NO: 24369 - DNA, 201 bp, Homo sapiens
gaggcctctagaagctgagagcagcactggattgataatcagcaagaaagcacagctgagctaacatggagactgcagcctctctaggtcgacaggaactkattatcaatgaatgttgttttaagtcactacgtttgtgataatttattatacagtaataaaaaccaaatacaaaagattaaaaagaaatctaagttgaag

SEQ ID NO: 24370 - DNA, 201 bp, Homo sapiens
tcaaacaggatccctgtctgccattgacacctcaaggactattggatctgctaggtcatacggcccaatcggcagagcagtttgcacagcagtctggactygttgcagagcccacttaaaattggcagcctttcaggtcactcaataaatgggcccattttaacacacccaggaacaatgctttgcatccttcaatacaat

SEQ ID NO: 24371 - DNA, 201 bp, Homo sapiens
tcatgagaactcactgtcatgaggacagttccaagggggatggtgctaaaccacttatgagaaatcagcccctattctccaatcatctcccaccaggcccytcccctaacattggagattacatttcaatacgagatttgggtaggatcacacatcctatatcacttttggagaaagaatggaggtagctctgaaggtttg

SEQ ID NO: 24372 - DNA, 201 bp, Homo sapiens
aaatgctcatctaaaataagaaagatgataggcctgatccatcttctgtttactaggttaaatctggaaaatataaacctcaggtgccagacttcagaggsatatagaaaaacaattactttttgcattagtccattcttgcattgctaaaatcctaaagactggataatttctaaagaaaagatgattaaggcgggatgc

SEQ ID NO: 24373 - DNA, 201 bp, Homo sapiens
tctactggagatttgttctccaaaacctgacaatctagtactttgtaggaactaatgtgtataatcttagggggcttagtggacagaaagttcattagccrttggtactgtgataggggaaaaagcaaatgggaccttaaacaatatgaatagacatggtttctcaaagaatagtctatggttcacctgagcacacatcac

SEQ ID NO: 24374 - DNA, 201 bp, Homo sapiens
tgaaaagattttcatcggttagagtgatacgtctgttatgatgcaattaattgtgatatactgtctactggagatttgttctccaaaacctgacaatctartactttgtaggaactaatgtgtataatcttagggggcttagtggacagaaagttcattagccgttggtactgtgataggggaaaaagcaaatgggacctt

SEQ ID NO: 24375 - DNA, 201 bp, Homo sapiens
agatgtatttatggcagcaagctcatttggtacatgtatgtatgagggaatcaagatctgaaaagattttcatcggttagagtgatacgtctgttatgatrcaattaattgtgatatactgtctactggagatttgttctccaaaacctgacaatctagtactttgtaggaactaatgtgtataatcttagggggcttagt

SEQ ID NO: 24376 - DNA, 201 bp, Homo sapiens
ccaaagggagctcatttggggtggcaggggtaaccgaaaagtgtgggagctgaggtattgtttgagagcctgtgggcagtgtgactgctccaatcgtagtytcagtgaggaagagcaccatctgtgcaagattttctcagatgtcctctataagactttcattgtcatcagttctatgtgctctcaaatcattgctttttc

SEQ ID NO: 24377 - DNA, 201 bp, Homo sapiens
ccccaaaatttttttaaataagaaagttttaataagcagaatattagtttaattatgaatgagaagagatgtatagcatttgtaggggtacagaaccatgyattccataaaggaagaagttaagagcaatgatgtggaataagcatggggcttttaagaacttgtctgaaaagaggatattctttggtcaatagttgaaaa

SEQ ID NO: 24378 - DNA, 201 bp, Homo sapiens
tacctggggccacagcattaccactggttgtaaggtgagtgaaccacttttttgctctgataattttttggggagatttttgttttgtagagctctgtaaytgggcatttcaaaattcaatattacatcacaaaataatgtagaagtattactataatgtgattacagatattaatcaatatcttacagtttacttgtagg

SEQ ID NO: 24379 - DNA, 201 bp, Homo sapiens
atatactcagtagtcccgattatgttggtgttaccaaaggatgttccctggaggttggtctgtttttgatagttctctaaacacatttatatcagatttcrcttacttagtgtggctgctcctacaaggatcagtcttttgttaatatattttacttttctactgatcctactcttaaacgataaagcaagattaaagcat

SEQ ID NO: 24380 - DNA, 201 bp, Homo sapiens
aggagtcacctatgggagcctgccaaaggcttcaaacaggatccctgtctgccattgacacctcaaggactattggatctgctaggtcatacggcccaatyggcagagcagtttgcacagcagtctggacttgttgcagagcccacttaaaattggcagcctttcaggtcactcaataaatgggcccattttaacacaccc

SEQ ID NO: 24381 - DNA, 201 bp, Homo sapiens
ttttccttatacagacatggacgcagctcataatgttgaaggatacctctgttgctgatacatctctttatttgcaggaaaatgttgaaggaggagactgyagtcgttgcaaatccggcttcttcaatttgcaagaggataattggaaaggctgcgatgagtgtttctgttcaggggtttcaaacagatgtcagagttcct

SEQ ID NO: 24382 - DNA, 201 bp, Homo sapiens
tccacctctaggagtcacctatgggagcctgccaaaggcttcaaacaggatccctgtctgccattgacacctcaaggactattggatctgctaggtcatayggcccaatcggcagagcagtttgcacagcagtctggacttgttgcagagcccacttaaaattggcagcctttcaggtcactcaataaatgggcccatttt

SEQ ID NO: 24383 - DNA, 201 bp, Homo sapiens
ccaggcacggtggctcatgcctgtaatcccagcactttgggaggccgaggtgggcagactgcctgagctcgggagttcaaaaccagcctgggcaacatggygaaaccccgtctctattaaatattcaaaaaattagctgggtgtggtggtgggcacctgtaatcccagctactcaggaggctgaggcaggagaattgcttg

SEQ ID NO: 24384 - DNA, 201 bp, Homo sapiens
ggcagtttaggttgcatggtgacttgatgacctacagtcaaacattcagtttctaccaaagcccagtaacaggccaagagttgtctctcaaatggagagtrgtgatctgcagaagatggcagggccttgctccaaaatcctagaggcttccacctctaggagtcacctatgggagcctgccaaaggcttcaaacaggatcc

SEQ ID NO: 24385 - DNA, 201 bp, Homo sapiens
tccattaaataatgactttaattctctattctttttgctatgttagtaagtttgaagtttcattttaaaactaaacatgtgggccaggcacggtggctcaygcctgtaatcccagcactttgggaggccgaggtgggcagactgcctgagctcgggagttcaaaaccagcctgggcaacatggcgaaaccccgtctctatt

SEQ ID NO: 24386 - DNA, 201 bp, Homo sapiens
acagcgaataaggcattctgggagttcacggatggtactcttggcagaaacattgggcgtaggatgggcaaatccatatccagaataagtgcctattccaktgaggacaaacctctgcctttgcatgatggaagaggtctgatataatcaacctgccaccaagaagctggctgatcaccctgaggaaggatgccagacgga

SEQ ID NO: 24387 - DNA, 201 bp, Homo sapiens
aaagcttaacaatacagaagagtcctctactcctttgagtctagccctataaagaaggaagaatgttttcaataacttaaaaggaaaaacaaagaaacaawttatacatttgcaggagaaaaggaaaaggtcaagtagtagagcaaccaacgaccactatgaagaaagtggaggtcagacaatttgagaagaaaaaaagca

SEQ ID NO: 24388 - DNA, 201 bp, Homo sapiens
aaatagtggcatgatcattgcagaagcatttctatgttcagttatcctttcagaatgaatctacttttcaaatctaaactaaattttaatccatcttctgwtagataattttctattttaaagaccctaatttcaagttcaccattttcatttcacctgttttattgtatgattattttcagcacctaaaatggtgcctgg

SEQ ID NO: 24389 - DNA, 201 bp, Homo sapiens
agtttcctttttttttttcatcccaatgcttgatacatagtagccatttgataagtacatgttgaatgaaagcatgaatttataacatatataccttcacytgacttggagtttcataaggaatgcaacagcttccaattcatttactttctttttgcttaacaaagtatctgacacgtagtacaaaagttaaatattata

SEQ ID NO: 24390 - DNA, 201 bp, Homo sapiens
aggttcattttgtgatcataatgaaacatcatattctatgagcaatttgtactgtttttggtttctcttgagtgagccctactaatgccatatgttctgtygacttcttattcaaaatagtggcatgatcattgcagaagcatttctatgttcagttatcctttcagaatgaatctacttttcaaatctaaactaaatttt

SEQ ID NO: 24391 - DNA, 201 bp, Homo sapiens
cactactgacttctaactcatctttttgctttctcttatttggaacagttattcagcttaccctaagtccagagtgaatttccaaaaaatcaaaggttctscaacttttcatttctcttcaattccaactcaggttcacacgtttatcacctagtgtagaagggctttcctccacagttttgcttggcaaactccttttca

SEQ ID NO: 24392 - DNA, 201 bp, Homo sapiens
ccagtcttagcaggttcattttgtgatcataatgaaacatcatattctatgagcaatttgtactgtttttggtttctcttgagtgagccctactaatgccrtatgttctgttgacttcttattcaaaatagtggcatgatcattgcagaagcatttctatgttcagttatcctttcagaatgaatctacttttcaaatcta

SEQ ID NO: 24393 - DNA, 201 bp, Homo sapiens
ttatgaggtccttagagtgctagacactgtttgcatgaattattttatatgatctcaccacaaccttataaaaaagtttttattgtccgatgttttagacrgcgtagttataggagttagtttcagccaccagttgtatatagagaagctgctaggcaaacataagatttttttaaatctagcacaaggacctgaacttta

SEQ ID NO: 24394 - DNA, 201 bp, Homo sapiens
gggatattagagatatcccctaaatgaaccagtcttagcaggttcattttgtgatcataatgaaacatcatattctatgagcaatttgtactgtttttggyttctcttgagtgagccctactaatgccatatgttctgttgacttcttattcaaaatagtggcatgatcattgcagaagcatttctatgttcagttatcct

SEQ ID NO: 24395 - DNA, 201 bp, Homo sapiens
ctgggttagcattgtataatagttacctcatataatgagattggaagtgttccctccaagtgtctggtcttgaacttttctttattgggagatttttttttctgatttattctccttactcattatcaggtactcattacccaaatttgttcagattttctatttcttcatcattcagtcttggtcgattctatgtgtcta

SEQ ID NO: 24396 - DNA, 201 bp, Homo sapiens
agccgatgagaaagctcagtaatagaagcaaatactagtacttgttttcttgtggagataaaattatttttgcattattctactgtgaccatgcctatctrttggtgacaactggaatatcactttgttctcccaatggacatgagtgtttgtgtaagtgtactcacacattcacacatatctgtttttgtccacagcgat

SEQ ID NO: 24397 - DNA, 201 bp, Homo sapiens
acatatagtatgctttttattctatgtatatacctatgaaaaagtttaatttatgttaggcacagcaagagattaacaacaatagagcaattataacaatwtactataataagagttatgtgaatgttgtctctctcactccccctcaaaatatcttattgtattatactcatctttctccttgtgatgatgtgagatgat

SEQ ID NO: 24398 - DNA, 201 bp, Homo sapiens
aaatagcattattataataaaaactggtaaaacacaccaggacaattttcaaaccaatgtcagtgtgttaccttttacttactgcctatggtaaatccagsactttctcatacatctcccagtttatttctcatatcagtcacatgaaggaagatgttttctttatttgccatatgtaaaaagggacagaaatgacatttg

SEQ ID NO: 24399 - DNA, 201 bp, Homo sapiens
gtctgaaactgcagattgtactgacacctacatatagtatgctttttattctatgtatatacctatgaaaaagtttaatttatgttaggcacagcaagagwttaacaacaatagagcaattataacaatttactataataagagttatgtgaatgttgtctctctcactccccctcaaaatatcttattgtattatactca

SEQ ID NO: 24400 - DNA, 201 bp, Homo sapiens
acattccaggacccccagagtatgtctgaaactgcagattgtactgacacctacatatagtatgctttttattctatgtatatacctatgaaaaagtttartttatgttaggcacagcaagagattaacaacaatagagcaattataacaatttactataataagagttatgtgaatgttgtctctctcactccccctcaa

SEQ ID NO: 24401 - DNA, 201 bp, Homo sapiens
tttctctgactaattttatttagctttcaagcatttctttgtggcttcagttttgacttcagtttttaaacaatttaaacaaataaaaattacattacagrattgttacttttaaactcttactttccacggggactgttattgtaaaatctgttcttattcttttaatttaactccattattttgttttaaatgtaatga

SEQ ID NO: 24402 - DNA, 201 bp, Homo sapiens
caaattaagaaacttaaagaatacagataatgccccatccgcactcgccccccaaaaaaacctagtccttaaatatctgttaaaatataataaacgtgcawgcatgtttagaaattgggaaaaatgctttttgttgttttttgcttgaagcagtaaaacatttttcttgctctgcaatattatgcattttagatactttgc

SEQ ID NO: 24403 - DNA, 201 bp, Homo sapiens
cccaggcttgctcaccaccccaaatcccacgtctatacaccagagaaaggattacccatcaccaaaggtgtctctcattccctaaattatgcatagatcargtggtctgattgtgtctgtccagatagggcacccttttctaatttatgtgaagtgccatgtgggatagctatactttagggaaataagaacaccactcac

SEQ ID NO: 24404 - DNA, 201 bp, Homo sapiens
caattcttctctgaatagcttctactcatctaattctatcaccaaagctacaaaatgtttagatgtagttcaagaaattccagaaactactttagaaaaargtgatcagcgtaagaaagggcaaattaataaggatcagagtcaagcagctgaaacattaaaaaaaaatcagaacagggttggaatatacacattgtaact

SEQ ID NO: 24405 - DNA, 201 bp, Homo sapiens
ttattttatgtgtttaattcaagattgggaaataattatcaagaaaacattgaaaaattgtacaattaaagcaggtgacttattgttatgctccaaaaaawgtcatctcccggaatcacagcctcctttttcttaagatggtctgagcttggtaccatggaaacacagccctaagaagaaacaaaagctggaatatcttat

SEQ ID NO: 24406 - DNA, 201 bp, Homo sapiens
gaataacagttaaatattccacagctaactattatttaatactaatattatgtcttggttaatggaagacaccatagaccacattttgaatatttgtgctyctttttaatattggtaatcctccttctgagataaattcaggaaatctgacctttctcctcagcccttttgaaataaagaccacttttccaattaggaata

SEQ ID NO: 24407 - DNA, 201 bp, Homo sapiens
actctgctccacatttttacaatctaagaatagtcagatgcccctcttaactgcaaggggctgagaagtgtagggaacacaagaatattttttgagagctmctatctctgcttacatataatggcagaagaaatatcctcctaaatctattaaaatcatactatgctctcaaagattctagctgctcccttaatttgatat

SEQ ID NO: 24408 - DNA, 201 bp, Homo sapiens
ttaggtgaagtaaacagtaagtttagagcaaaatttactcaaaaagaaatagtacacctgagaactataaccgttaaataaattgcatcagtagttaatasaacaaaataacaatatgtacaaaaatgtaaaggacccattatgcaatttgttcccaagaatggaaaaagaagaaaaatttcctcagcttattttatgagg

SEQ ID NO: 24409 - DNA, 201 bp, Homo sapiens
tcaactcccccttggcctccctaatgtgctccttggcacccaaaatccagaaggggccaagatagtagggggctagagtgtcagtgctgccccgagcatakgcacacctggctgggttgcaacagcctcagctttgctctgaaatcagcctgggtgccgggaacagtgagagaccaggaagaaggagcgggcacttctgag

SEQ ID NO: 24410 - DNA, 201 bp, Homo sapiens
cctggcttgaaggtggagcttcactgagggcccacccctttccacccaggaacctgtatgcctcctgccaccaccaacctgccatccacggcgcccactgrcacccaggctgttcatgcctagggtcaccttcaggcccatgcagagccaccctcaactcccccttggcctccctaatgtgctccttggcacccaaaatcc

SEQ ID NO: 24411 - DNA, 201 bp, Homo sapiens
cctacttaaatagtttaattaaaatgaacctcagaggagatagaaaatctgtcctgcaataaaatctgttctaaaataataaagaaaataggtctaaaatrggtctggaaatgaaacaacaaccctcatcctttacaccagcaagaagttctaaatttctttctttttctaaattcatgatgcatacatgttttaatttct

SEQ ID NO: 24412 - DNA, 201 bp, Homo sapiens
cacgtctggctgagtccggggttttttatgggcctcagaggggaggaagtgtatgctgattggtccatgggtggccatgagctggcccaaaaaaagcaccrtaagttctcactccagtttgtggaaccgacagtccagcccccttccttcaggcagtccctggcttgaaggtggagcttcactgagggcccacccctttcc

SEQ ID NO: 24413 - DNA, 201 bp, Homo sapiens
ccctcaacagaggtgagacacacagtgggtagctcctatccacaggtagatcatcctgttgtctgcccacgtctggctgagtccggggttttttatgggcytcagaggggaggaagtgtatgctgattggtccatgggtggccatgagctggcccaaaaaaagcaccataagttctcactccagtttgtggaaccgacagt

SEQ ID NO: 24414 - DNA, 201 bp, Homo sapiens
agcatctgtgcagcaccctcaacagaggtgagacacacagtgggtagctcctatccacaggtagatcatcctgttgtctgcccacgtctggctgagtccgrggttttttatgggcctcagaggggaggaagtgtatgctgattggtccatgggtggccatgagctggcccaaaaaaagcaccataagttctcactccagtt

SEQ ID NO: 24415 - DNA, 201 bp, Homo sapiens
gaggagatactggttgcattaaaaatcttgtaatcaaaaccattctgtaagtgatttgtgtgatcagcttatgcacatcatctaaataagaccagaatttraaaactaaatcaacatttcccaaattgtagatgttcctggaataaagaattctgtgatcacatgagtttgggaagcatccatttgcatgttaaaagttct

SEQ ID NO: 24416 - DNA, 201 bp, Homo sapiens
ttctattttgagacccctttctctatatgtgggaactgtgaggtcttagaaacataatctgagcccatttcaagttgttttcttctcctctctcccagctwgaatcaaagttctattaagcttacctagtaccaaaggccttatatgcaagggtagaggggagggtataatgtctgtgtgtatatgttgagcaaggggaca

SEQ ID NO: 24417 - DNA, 201 bp, Homo sapiens
acttgtgagtctccttgtgcctttgggtcctgaatgcagagcatgggctacagaaataacagaggaggggcagttatacctacctgtagtactgttagcaraattgtgactccagttgaggtgtcaagaggccactcatatgtggttgtgcagtttgtacactgcacaaaggcactcagggaaggggaagattgagggctt

SEQ ID NO: 24418 - DNA, 201 bp, Homo sapiens
accctcttcttttccatgaagtccctgggtgtctagtctgtttactttttctgcatatgtctagaaaggacaatttcttccaacttgtaaaaggcaccatktgagcagggaaacaccctcagtcttttgctgattatgtcaaatgggaggaagtaagaacacagcattacagccacgactctttatacagcagccaccctc

SEQ ID NO: 24419 - DNA, 201 bp, Homo sapiens
ggagaaaagaaaggctttactgcaaaattgttcagcaaggagacaagagtcaggttcaaatctgtctccctaatttgggatatggggaaggttgcaagggrtcagaaggcaaggcaaaggatttagaaatgctggcttggcagagtctgattggagggcttcaaatttgatcacttacagtaaggtatattgaggcagatt

SEQ ID NO: 24420 - DNA, 201 bp, Homo sapiens
attttccctagcactactcctgtcatcattcttagtgattttaatgtccatgaacttaactcttccatactcttcactttcagtttcttgtgcctctctgktctccatttgaagcgtttttttgttgttgtttggtttttgtttgtttttttttttttttcccactgtgtcgtttctctctagttcacttcttctaaatac

SEQ ID NO: 24421 - DNA, 201 bp, Homo sapiens
gatgaaacgagaaatacaggagtattacaaggtttagcaagagatgaacttcattgttgtcatttcaaatttaagacgcttctgtgttatacaatatttaytcaagaagcaattagaagcagaagtctggaacccattagagatatccaggctgaatacataaaatacagagttttgggcacaccattaactgaagtcata

SEQ ID NO: 24422 - DNA, 201 bp, Homo sapiens
cattactctgaaatctacatagtggtattcctgggactcaatccttggagcaatttgtttctctaactacattcattcagatggtgatcttacccaggcaygtggctttctgtactgagatattttgatattgacatcccacagtatttactattaagtttatgatttaattttatatccactcattactatggtgtgggg

SEQ ID NO: 24423 - DNA, 201 bp, Homo sapiens
cccacagctcatctttgttaagcccatctcccacctctgctcaccttctgaaaccattctactgagccttgtggaactcatggtcaaaacaggcaaaataycccgcagaatcctcctcttccctcagtgttctcttcatcatgctctgactgaaacccaactctcactttgcatgctgctaccccggcagccctcttaagg

SEQ ID NO: 24424 - DNA, 201 bp, Homo sapiens
cttctttctttttgaacacgtattctatttgccatcataagtttcagcagcctcggcttcctcaaactccactctttgtctctcaactcagctataatgcrggctttgggtttaccctctctgtgttgcagcctagaaattgcctctgtacactgcttcatgtttttttccttctctcagaaatcacagtcctgtgcttcc

SEQ ID NO: 24425 - DNA, 201 bp, Homo sapiens
acttggaggctgaggtgggaggattgcttgagcccagaagtttgagcctgcagtgagctgtgatcatgccacagcactccagcctggatgacagtgagacmctgtctcaaaaaaaaaaaaaagaaaaagaaaataaaagaaaacaataatagacaggaagatagcttttgcaggttcctgaagaatctaccacaccaacac

SEQ ID NO: 24426 - DNA, 201 bp, Homo sapiens
cttggaggctgaggtgggaggattgcttgagcccagaagtttgagcctgcagtgagctgtgatcatgccacagcactccagcctggatgacagtgagaccstgtctcaaaaaaaaaaaaaagaaaaagaaaataaaagaaaacaataatagacaggaagatagcttttgcaggttcctgaagaatctaccacaccaacaca

SEQ ID NO: 24427 - DNA, 201 bp, Homo sapiens
ttctcttcatcatgctctgactgaaacccaactctcactttgcatgctgctaccccggcagccctcttaaggagtagccatcacctttttgtttttttttycccctgagatgctgactcactctgtcgtgcaggctggagggcagtggcgatcctggctcactgcaacctccgactcccgggttcaagtgattctcatgcc

SEQ ID NO: 24428 - DNA, 201 bp, Homo sapiens
acaaagcctataacagatacatgattaatatgtgtttaatggaagcatagaaacattagaattaaaattttaagatatttcccataaagttgtgttaatgrttgctgtttttatctcctctataggcttgtaactgcagcacagtgggatccttggatttccaatgcaatgtaaatacaggccaatgcaactgtcatccaa

SEQ ID NO: 24429 - DNA, 201 bp, Homo sapiens
accttacaacaggaaacctccagtcccctttcctatcctttgtactatattgtcatatatttttacttctatatattatacatctgacaatataagcttaygattttgatttcaatagtcaattatctttttaaacaagaaaatttctcctataactctttttccttgtgtatatcaattttaatgctttaaattcctttg

SEQ ID NO: 24430 - DNA, 201 bp, Homo sapiens
ctccaaatttccatcttttctcggttcaaagctagaacccatcagtatctaatctgaaaacaagacacctctaaaatttatttaacctcatcccagcactytgggaggctgaggcaggaggatcatgaggtcaggagatcgagaccatcctggctaacatggtgaaaccccatctctactgaaaatgaaaattaaaaaaaa

SEQ ID NO: 24431 - DNA, 201 bp, Homo sapiens
aggtagagtttcaaaaagtagtgtggttaagatattcaagggtattatctgctgagaacctgtgacctgcagtgttaaattagcgacaatagtgaattagygacaatgagggcagaatagcagtaaattcttgtaacatggctattataattacataagaataggcaacttttgttttgttattgtttttatttgaaagta

SEQ ID NO: 24432 - DNA, 201 bp, Homo sapiens
caaggataggtgctattttagataggtaatcagaggagtggctattaccagaatggagggaggacacaagccaaagagtaggaagagcacatagtgggaakatctgcaagtgcaaaggcttagaggcaggaactagttgtatgtacctggcaacatactgaattggtcggtgaagggaaggaaagaagggtatgaaattag

SEQ ID NO: 24433 - DNA, 201 bp, Homo sapiens
ctctttttaaatactcccattacctttccaaaccttttgttcagctgttgggaccatcaacatcctggtcacacctctatggatgaagtctaatttgtcarctactctcttaaatggtggtgtcatgaattgatcacagtgctctggatgtgctctgactagctatgactgctcctggatcgccgtttcctttaatctata

SEQ ID NO: 24434 - DNA, 201 bp, Homo sapiens
cagtgaagtccccatcaccccccatgtgcctactgttttgccttctagcattataattttccaatttctacaacttcttaaaaatagaatcgtagtctgtytttttgagggggggtttgtttgtttctttgtttggcttccttcacttggtgttacgtttttgtaattcatccatattgttgcatgtatcagcagtttgtt

SEQ ID NO: 24435 - DNA, 201 bp, Homo sapiens
ggtagactggagatggagatttatcccaggcttgctcaccaccccaaatcccacgtctatacaccagagaaaggattacccatcaccaaaggtgtctctcrttccctaaattatgcatagatcaggtggtctgattgtgtctgtccagatagggcacccttttctaatttatgtgaagtgccatgtgggatagctatactt

SEQ ID NO: 24436 - DNA, 201 bp, Homo sapiens
tattgtgaactacgtattcttatattttcctcattatccttaaaaatatggaacactttgcatatttgcctgccagttttgcacatagacaatgctattcyactctgaataattacaacttggttatatatgttgcttaggtgaggcttctctgatttctgtaactgtgaccaatttctttaagacaacaaaggagaaaat

SEQ ID NO: 24437 - DNA, 201 bp, Homo sapiens
gtctccttgttatagtttcatgtggtagaaagggcaagggggttatctggcatcccttttataagagcactaatttcattcttgcccttatgacctaatckcctctcaaaggctctgtattaatctcttctcacgctgctataaagaactacctgagactgggtaacttatgaagaaaagacgtataaattgaccacagtt

SEQ ID NO: 24438 - DNA, 201 bp, Homo sapiens
aaagcgtaaattcagccttctgctgtattttgaccccttgcaggtgactctgaaggctgagcagaccattctacccctggtagatgaggctctgcagcacrcgaccaccaagggcattgtttttcaacatccagagattgttgcccacatggacctgatgagagaagatctccatttggaacctttttattggaaacttcc

SEQ ID NO: 24439 - DNA, 201 bp, Homo sapiens
gaagaggaagaagatacagaacgtgttctccagcttatgattatcttagaggtagagtactgagagcatgttcacccgtgttacttcctgatgttacttamggttaccagtactgtattttttacctgcctggtttgacactgacttacaggactactaaaaaaaaatataccttaggagatttttgtgccactcttttgt

SEQ ID NO: 24440 - DNA, 201 bp, Homo sapiens
tactgatcctactcttaaacgataaagcaagattaaagcattctctaaattaccatgataaaaaatggtattatgaagtcctagaattgtgatccaatttyccaaatgtatagctctttatagcacatatcattaatactaatctcttttctgtttttctctttttttccaacactacttttcccttttccttatttttgt

SEQ ID NO: 24441 - DNA, 201 bp, Homo sapiens
tttcccttttccttatttttgtcatccattttaaatttattttacttttatgtgttgtatatagctttattagcaaccttacattttttctggaaccattsaagtttacacaagtagcaagtagtaatttacaccgtagccattagtgcatagtctgttgtctacaaacttgaagtctagcccccttgtctttgaaataac

SEQ ID NO: 24442 - DNA, 201 bp, Homo sapiens
tcccgggttcaagtgattctcatgcctcagcctcctgagtagctgggactacaggctcacgccaccacacctggatattttttttatttttagtagagacrgggtttcaccatgttgtctaggctggtctcgaactcctaacctcaggtaatccacccaccttggcctcccaaagtgctgggattacaggcatgagccacc

SEQ ID NO: 24443 - DNA, 201 bp, Homo sapiens
tgcaaagacttgtgtttgacatgcctgcaaagtcctttgttagctgatatcctcagtaactcttctttgatgctaaagcatcctagcattcccctattttygtttaactattttgcactgtttcttcagttgacactgacccatatgtgagaaagaccccggccatagctctactctcttaaaatatccataagcaagagt

SEQ ID NO: 24444 - DNA, 201 bp, Homo sapiens
aggcacaaaatgagataaaagtaatgacaaggtaaaactggatgaaaattggtcaacaagtgaggaattaactgccttgcaaaagcagtttttattatacrgaaaccattttgaaagcagttattcagaaagtttctatcagtatatgatttgtagctcaaattattgttggtctatcaatcacaaatactattttctgca

SEQ ID NO: 24445 - DNA, 201 bp, Homo sapiens
gttctttacagggagtcaggcgaccttggtctcaatgacaactgtgccactatctagacatacaaattgggcaagtcaattaatctgtaagcatcagttcytcaaatctacaataagtgcattatactatagcatacatatagggtatcttcaaatattcatatcatattattttgcagctttcccaaactaattcacaaa

SEQ ID NO: 24446 - DNA, 201 bp, Homo sapiens
ttctttacagggagtcaggcgaccttggtctcaatgacaactgtgccactatctagacatacaaattgggcaagtcaattaatctgtaagcatcagttctycaaatctacaataagtgcattatactatagcatacatatagggtatcttcaaatattcatatcatattattttgcagctttcccaaactaattcacaaat

SEQ ID NO: 24447 - DNA, 201 bp, Homo sapiens
tctttttaagagttctgatggaactagaactaaaacagattcctccattattttttcttcttttttttccaatttctttcttaatcttaacatagtaaatwatcacttttcctaagagtaaactcagcacatataacagcagcaccctgtatttgatattaatatttaaacaacaacaactttctccccagagacaaattt

SEQ ID NO: 24448 - DNA, 201 bp, Homo sapiens
gactccattctcaccctagggaaacacggattttactgctcaggggatgatgaaaattggattccgacttttacacctcagattatttctattaattacayctcagattatttctattacacctcagattattatctcagattattatctattacacctcagattatttctattattcagtcttagccgaagattcccagc

SEQ ID NO: 24449 - DNA, 201 bp, Homo sapiens
tgctaagggggtgactaaaatctatattgaccaatacttgatgagtatatttgacagatgtttaaaagttaaccctgctcaaaaatgtaacgggatctttrctaatcaggatcataggtttgcatgggttcctaggaggaaaagaatgagtgggaccagtttatacaccaagcatcaaaggactccattctcaccctaggg

SEQ ID NO: 24450 - DNA, 201 bp, Homo sapiens
aaaaataattaataacctagcatttcaacaaaatatgcatacaatttaaatactgaaaagacacttagtgtagtgtatttaaatactgaaaagacacttartgtagtgtatttaaatactgaaaagacacttaatgtaacagttcatactgtttcacaaaaacatgatttgacatagatatgtcaactgattgtaaaaaca

SEQ ID NO: 24451 - DNA, 201 bp, Homo sapiens
cccccttgatccagtctcctccctccctccatacgtggagattacaatttcaaatgagatttgggtggggacacagagccaaaccatatcactgtctttcwgaagaaaaaaaaggaattcttgtatgttgccctaaagatataaaactgcttacaatgcctagtgatttgtattgattactatgtgttccctaaagtttga

SEQ ID NO: 24452 - DNA, 201 bp, Homo sapiens
gatatttttaaatgatatctcaccatctgtgtacatcacaatgttgagctacaaatgtggtggctctaacaaaattttaagtatgaagtcagatgtatagwggatcccttctccatcacgttcttctgtttttcatttcccgcttctcacaaactactccccagatgtcaataattctacaatctcctcttcctacaacct

SEQ ID NO: 24453 - DNA, 201 bp, Homo sapiens
tacaattagaaagtgggtaagtctcattcttaaacatatacttttgcattatagtcacatgaaaccactgagcgtgttcatgtgtgtgtgtgtgtgtgtgwgagagagagagagagagagagaaagcccaagagtgagagtttgtcttgaggagaagtgtttaaaaggaatatataaatcaaggatgcactatagtatcac

SEQ ID NO: 24454 - DNA, 201 bp, Homo sapiens
ttttcttcttttttttccaatttctttcttaatcttaacatagtaaataatcacttttcctaagagtaaactcagcacatataacagcagcaccctgtatktgatattaatatttaaacaacaacaactttctccccagagacaaatttacctttgctgttttcaaagtatctgactccaacaggtcagaaaacagcagca

SEQ ID NO: 24455 - DNA, 201 bp, Homo sapiens
ggaaatgtttctaatcaccctatcccccagctctggctgagttaggccttctctgcacaattcccatgaaagcacctaccacccagcaggcagaaatatcsctctttgactttctcactaaactgcaaattcctggtgagtgacaactggattctattcttcttctaacctctagaacctagcagattgctttggagacct

SEQ ID NO: 24456 - DNA, 201 bp, Homo sapiens
tatttaaacaacaacaactttctccccagagacaaatttacctttgctgttttcaaagtatctgactccaacaggtcagaaaacagcagcagacctatacrtcttctaacacataatttcaccgtcaacagtaactcagcaccctctggcatatagtatgtatgtagaaatgtttgttgaatgacagtaacaattgaatac

SEQ ID NO: 24457 - DNA, 201 bp, Homo sapiens
aaccaatttggagtctactgacatgctagcagtattccagaaatactgctgtgaggcaggatgctgggccactgtcctgtcacaggctccagcatgattcrccctgctcggtgacacaccagccgtgtgacttacccgaaggtgcacctgtctattttatggcaaccgtttgataaatgaaaattacctgtgtggaaagca

SEQ ID NO: 24458 - DNA, 201 bp, Homo sapiens
aaattttttaaaaagagtatgctcccgttatgcattctcagggtgatttctcccctaactttgccgttataaactctgagggtctcttgtctttcctcagrtgaatgtggaaggcatccactgtgacagatgccggcctggcaaattcggactcgatgccaagaatccacttggctgcagcagctgctattgcttcggcac

SEQ ID NO: 24459 - DNA, 201 bp, Homo sapiens
accaggaagaaatacacattaagtatcaaaatcggcacttgcgtttgtaagtgatgttgcccctgccgcaggtgggggaaggccagtctgtctttgcagcyactgaagagctcaagcgttgctaatgcagtatttctaactttgctgtcctaattggcttccttttctttcaggcatgcttgccgggattttatcgactgc

SEQ ID NO: 24460 - DNA, 201 bp, Homo sapiens
gaggtataattgacaattaaaaattgtgtatattctagatatgcatgacgatttaatatacatatacattgtgaaatgattaccacaaccaaattaattartatgtgtatcacctcacatagttatcactttgtgtgtgcgtgtttgtttatgcatggaggacatttaagatctgtgtttggaaaattccaaataaacagt

SEQ ID NO: 24461 - DNA, 201 bp, Homo sapiens
aaagaacatatctagtcctggagttaagatttctattttttctagatttatagaggtataattgacaattaaaaattgtgtatattctagatatgcatgaygatttaatatacatatacattgtgaaatgattaccacaaccaaattaattaatatgtgtatcacctcacatagttatcactttgtgtgtgcgtgtttgtt

SEQ ID NO: 24462 - DNA, 201 bp, Homo sapiens
agacttacatatattacagagaagcgtaacagagcaaatgattaagttctaagtttcactgtacaccctaaaaaaaaggagaaattgatatggaacatgartagtataggaaaatggtccttaggaaggccagacatgagagggtgagctctaggtgaccacctgtaggatcaggaaagaacatatctagtcctggagtta

SEQ ID NO: 24463 - DNA, 201 bp, Homo sapiens
gccagatatgggatataattccagcctgaagagtttatgctcaagacaagacttacatatattacagagaagcgtaacagagcaaatgattaagttctaartttcactgtacaccctaaaaaaaaggagaaattgatatggaacatgaatagtataggaaaatggtccttaggaaggccagacatgagagggtgagctcta

SEQ ID NO: 24464 - DNA, 201 bp, Homo sapiens
tagataaactaactgaatcaatatgaataaggcatagattatttatggttgcttaaaccaaataaataatttggttgctgccaaaatggctgaaaatcacrtggggtgtttgttaagccaacaggtttcatgggctcccacctagagagtctgtgtaggctgctctggggtttggccccatgtgtacattctaacactctc

SEQ ID NO: 24465 - DNA, 201 bp, Homo sapiens
agctcagctgtcataatatttggctccaatttcattcataatggacagaatatctacaatgttttgaatccctactttcaaatgtcagcacactggaacawatattaaagaatgggtttgaatctaagtagatgagtatttccttgaagcaacatgttatagcctaaatgttgtttccttcaattatgtttaaacaatgta

SEQ ID NO: 24466 - DNA, 201 bp, Homo sapiens
aaaactgctcagaagatttgaagttatcatataactagaaataatatttcttcaactgctcttaaactttccatgttttcctgctttctaaacctatgatstatttcataatcacattaattgcatcgaggagggtgagtgagatggagaacttatttaaattttcatttctaatggtttctactcttcttttcctttact

SEQ ID NO: 24467 - DNA, 201 bp, Homo sapiens
ctgaccaaaaggagctgtgggcctggcctatacaccttattgcctgttttcagcatcaactgatttagtgaagcagcaaaaagaaaaatggtgtgtgcagyattatctttctgccacagatacatgtttttaatttccaagtttccaatgcatcattcagttttatctaacgggaatgcagctgagagaagtttgtaacaa

SEQ ID NO: 24468 - DNA, 201 bp, Homo sapiens
agatcaatttgttcacatattttgcaaaagttagagcttattactcattcatgtactattgatgtaacgcattagaagacagttaacattaggtcctaatkgcacctgaccaaaaggagctgtgggcctggcctatacaccttattgcctgttttcagcatcaactgatttagtgaagcagcaaaaagaaaaatggtgtgt

SEQ ID NO: 24469 - DNA, 201 bp, Homo sapiens
gctcagggagtccataggtctcagctccccaaaaggccacagcccttctctcctgctcattgctgtcaacatggtgagctggggaagggggtgtgtttcarccctgtttgtgttgtagctctctcatttccaccatttgcgggggggtcccaagttcttgtcccacatcctggaagaatgaggtttgcagacaactggagg

SEQ ID NO: 24470 - DNA, 201 bp, Homo sapiens
tttccaccatttgcgggggggtcccaagttcttgtcccacatcctggaagaatgaggtttgcagacaactggagggttagcaaggtgaagaggtgctttaytgagtgacagtgcaactctcaggaggcctgaaatgggtagctccgttccacaggcaggtaattccagcatctgtgcagcaccctcaacagaggtgagaca

SEQ ID NO: 24471 - DNA, 201 bp, Homo sapiens
agaagagcagtgaacagcatcagttgctgctctcacaagggagacccaatgaatatggtggcaattgactattgtaattgagcaaataaatgggcttgccrcctgaagcacatagaagccaataacgttggcactggcttcggagaaaagaaaggctttactgcaaaattgttcagcaaggagacaagagtcaggttcaaa

SEQ ID NO: 24472 - DNA, 201 bp, Homo sapiens
gaagagaactttggaaaagtttaaattagagtagaaatgggtaagaggagctcaggaaagtatttatttgcttttctttaattccccattgtgttccagawaggattttagatgggactcaaaaagtaacttttttgcttccaattccaacataatcattctcacgaacttttgtctcagttcaccaagaggaaaaacatt

SEQ ID NO: 24473 - DNA, 201 bp, Homo sapiens
ttttcatataggttggctttttctttgaatgttttcacttagctagtgtaccaaaacagttctacatttccaccaaattaaaggtctgattagtttaatgyccttcatttgccatatttttctcaagaaagattatacagtgcatgaactcattcttattcagtaaatttaaatttgagtggcattatattccaactagtg

SEQ ID NO: 24474 - DNA, 201 bp, Homo sapiens
tgaaatagagaataaagtaggtgtatgctgaatcttattaaggttgacatccagtttgaatacattcatcctctaaggtatagttttgggtataaaccatygagcaagcacaaaacagtgaagctgagagctgcagaacatagagatctggtggattctaaaggactgagaatgatcgatggctactgaaatgaagtgtga

SEQ ID NO: 24475 - DNA, 201 bp, Homo sapiens
atgtcatcacaaagcattttcaaaatgcctgctatatttgtaaataggaagagatcagttcactagatgtataagaaggcatgaaggaggatagcaacagwtgagttcagacaggtagaaagcaggcctgattataaatgtttagatcaccaaggagtttgtctacgacactacaggtgacaggcaactcacaaaagtctt

SEQ ID NO: 24476 - DNA, 201 bp, Homo sapiens
tgaaaagaagttattgggtgaacatgatggctcatgcctgtaatctcaacagtttgggaggttgaggtgggaggatcacttgaggccaggagtttgagatmaacttgggcaacagagcaagatccatctttacaataattaaaaaaaaaatagaaattagctgtatgtgatggcttgcacctgtagttctagctactcagg

SEQ ID NO: 24477 - DNA, 201 bp, Homo sapiens
cagaactttcaggatcttcattgttcatagctacaggctccaatttggaattggccatagacacccactctgagaagtttgggaataagaaaagagaaaayacattaagaactaaaactgtaaggacccatactggcttcttaaaggaagttttactgagaattttaatcttcaaagcctaactctcattcacattcaaaa

SEQ ID NO: 24478 - DNA, 201 bp, Homo sapiens
cattttgtctgctgcttctaatcaaaattatcttaaaccactccaatagaattagggaaatgaagggaaaatgtgggtaaagaaaaaagtaaatccaccayttgaatgatgaggtttaaagactggaacagaactttcaggatcttcattgttcatagctacaggctccaatttggaattggccatagacacccactctga

SEQ ID NO: 24479 - DNA, 201 bp, Homo sapiens
ctcttctaagctttcctctttgttgtctttattttcactagggttttctctgtaaggtgcctaaaatggctactagtagctacaggtttaggacctggtcyttagcagtttaaatcggaggaggaaaaatacctcctgttcttaaagtccctattaatctctgttggccttgcatgggtgatgggcccaaccatgtaggaa

SEQ ID NO: 24480 - DNA, 201 bp, Homo sapiens
agtgtttggattttgtcattctaataagtgtgtatggtatctcattcttgttttagtttgcaattccttaatgacatatgatgtcgagcatcttttcataygcttatttgccatctgtatatcttctttggtaaggtgtctatttaggtctttttccattttttcattgggttgttttcttgtcgaattcagagttttttg

SEQ ID NO: 24481 - DNA, 201 bp, Homo sapiens
ttcatatcactagcctggaaaaatatcaaaattcaaaatttgaagtatgatttatattgactatgtattgctttggcactatcacaaaatcgaaaaatacsaagttcaaccgtcataaattgatgactatctgtaccaccaaatagcccattactcaaatcctcaactttttctcttcaatgtatgtgacctctatttata

SEQ ID NO: 24482 - DNA, 201 bp, Homo sapiens
tattgaccctgatcacctgactaacatagtgtttgccagatttttccactgtaaagttactcttttatgcccttttcatactctaatactatttttatctrcccattcttcagattcagtaacataaaaggcgcagaaataggactactgaaagcaaagatcactttgatgggttgagaagggggaggaaatgtaaatact

SEQ ID NO: 24483 - DNA, 201 bp, Homo sapiens
cacctgactaacatagtgtttgccagatttttccactgtaaagttactcttttatgcccttttcatactctaatactatttttatctgcccattcttcagrttcagtaacataaaaggcgcagaaataggactactgaaagcaaagatcactttgatgggttgagaagggggaggaaatgtaaatactcattaattacttt

SEQ ID NO: 24484 - DNA, 201 bp, Homo sapiens
aaataggactactgaaagcaaagatcactttgatgggttgagaagggggaggaaatgtaaatactcattaattacttttttcctaccatatttataattasaaatatatcttccatgcagaccataaatactcaagtcaacatgaccaattctctctttccctgtggtcaagctgcatgacaatcaaaaggtgaattaata

SEQ ID NO: 24485 - DNA, 201 bp, Homo sapiens
tatgagccagatgttagccagctgataggttgatgggcatatacgttgctaaaaaaatgtgacccagagtacactctagtgatatctccaatgatgaggcrtaagctttgtatttgaccttgttgtgttcaaaatatctgtaaatgctttggatgatatctatcaaatattcagataatataaagctgaaagtattatcta

SEQ ID NO: 24486 - DNA, 201 bp, Homo sapiens
tgtgaccgctgtgcccacggctatttcaacttccaagaaggaggctgcacaggtctgtaaatatgacttaagtcctacatattcactctgatagttttagrgtctgacttctgtaacagtttgttcttttaaaggaagcacagattgatacaacgtatttaacataatgagtaatgtctacttatttttacgttacttaaa

SEQ ID NO: 24487 - DNA, 201 bp, Homo sapiens
gtaaaccttaactattagaataggtgtttttacatgtatttgatatccaataacttttattttagttctagaagtttatcagttgattcagttattgttawgtttaccattttttttttttttttttttttttgagagggagtcttgctctgtcacccaggctagagggcagtggtgctatcatggctcactgcaacctcc

SEQ ID NO: 24488 - DNA, 201 bp, Homo sapiens
aaaagtaacagttttaaatgcttcgaagataattgagtaagaaaagcataaaataggtttcccttgcttttgacaacatggccatccattgaacacctttstaaagtactcagcagattcatagtggcaagaggcacactgaagaggtaataaatgaatgatgaagaagaagaggggactatagaaatattctgtcaagta

SEQ ID NO: 24489 - DNA, 201 bp, Homo sapiens
tttcccttgcttttgacaacatggccatccattgaacacctttctaaagtactcagcagattcatagtggcaagaggcacactgaagaggtaataaatgartgatgaagaagaagaggggactatagaaatattctgtcaagtatccttgatgtgaaagagaatgaaggacagaggaggttgtggagttgcaaaggttttc

SEQ ID NO: 24490 - DNA, 201 bp, Homo sapiens
tcaagtatccttgatgtgaaagagaatgaaggacagaggaggttgtggagttgcaaaggttttcaaagataagagacatttgagttggtttagatgcttgkggggaaaggcagggaagttgaagaccaagtggtggtgggcatggtgtctctctagaagtaaaaacatatgggtcattaagcataggcaaaaaccttatat

SEQ ID NO: 24491 - DNA, 201 bp, Homo sapiens
tcatctcccagtcctcctttttgtgactaattctcttatcagtttgacctgaggtggcagataccacaatttcctattagacaacttctctcacaattacytaagagccatgaatttgatttagaaatggggttgtatgtgtgtgtttttctatcacatattaaacgcacaatctgtaaaaaagattcaggaggatgtttg

SEQ ID NO: 24492 - DNA, 201 bp, Homo sapiens
atgctgaggatacctgcctgatcggacactaagttactttcagaataagtttgtaacctcagcaacatgtcatacattatggagaaggcatttcaaaaagrcaggcaagttcatctggtggattctataggacaacatgaaacttaatgggatacatagacttcttaagccctccccgctccccagctggcaaatttttaa

SEQ ID NO: 24493 - DNA, 201 bp, Homo sapiens
tgccaagaacacacaatgggattgaactgtctgtccagtgaagggtgtttggagcagtagatgtccacatgcagaagaatgagtatagacccttatctcaygccatataaaaaatccattcaaattctaaatgaattaaagactgaaactgtaaaactactgaaagaaaacacaggggaaaagttccatgacattggtctg

SEQ ID NO: 24494 - DNA, 201 bp, Homo sapiens
atgttccaaatgtagattataccttacctgagtataccttgtttaagtacaacagaatatagttaaaatcacagttctttacctgctttagttgtatataratttttaagatcatttgttcagtatcacaagtagaatctgtggttaattagaaaatatattttccctttaaaagaatttgtgctgacttttaaaattatt

SEQ ID NO: 24495 - DNA, 201 bp, Homo sapiens
agtctgaacaagactttctaaaatagattgaatgtgggcagttttcacagctgcctgatgacttccacacacaaaacatccacatttcatccttttggtggaatactgtgtattttccaattttattcttagagtttaattttttacttacatattatgcttatgtatatcatatttgttatatatattatatataactaa

SEQ ID NO: 24496 - DNA, 201 bp, Homo sapiens
gtttacatttttaatatttctattgacacttagaagatgctatgttcacgtaatcatagaaagcttttaattaaaccctctactctttggttttaactttyctttattgatatatataaaaaatctatttttgtgtcaaaatagcattttaaaggttactgtcattaaaactttaacaactaaattatgtacttgttttag

SEQ ID NO: 24497 - DNA, 201 bp, Homo sapiens
acaaatggcacatgtgctgggaatggaagtcaacctttttgaatttttcaaatgtaagtcagtctggaaaatcccagtaaattggtatatttgttttgggytatttttgaagacctcttttaaaatttgcctaaaataaattctcggtatgctataattatagcagaactcttttctcagtcacccactaccactgttagg

SEQ ID NO: 24498 - DNA, 201 bp, Homo sapiens
ctgctctttatgatttctacccgtaggtagaataatcaagaggtgagattgatgttgtttttgattctggacattaactagagggaaaattcgaagccctstaagaatggtatctaacttaatagacacctctccattacctttactcaaaactaagactctttgtggtatgggcccaccccacctctagtagccagctgc

SEQ ID NO: 24499 - DNA, 201 bp, Homo sapiens
gtccatgttaccatgtggggtatattattatttaacaagcctattaagactattagaaagttttcctgatcacaggtctctcttctctttgcagcctgtckctgtaatgccggtggctctttctctgaggtttgccacagtcaaactggacagtgtgagtgcagagccaacgttcagggtcagagatgtgacaaatgcaag

SEQ ID NO: 24500 - DNA, 201 bp, Homo sapiens
caatttgaaagtgtttcaataaactctcaatgtaaaacttcacgttgttttctgtagcttttcagtaacttcttacactcatgttctatgtgcggctcagkggggaactatctgtatccagtggattgttggttctgacacactagcctacgtgcatatggggcaacccccaacatgctggcccctgccacttgcaataga

SEQ ID NO: 24501 - DNA, 201 bp, Homo sapiens
ctgagcaggcaaacaatgaaaaagtcccctccatgcaaaatgtatgtaaaatcagctttcaataagtgaacagtatttactacctgctgttccttttcacyatttgcagtaccattcttagactcactgcaggcataaaccctgggataaggaaaagttaagcctccgttcttcatacctctaataaggctttgccaatgg

SEQ ID NO: 24502 - DNA, 201 bp, Homo sapiens
ctgcatgaatatattttagtaaaagttggagcaacagatgataaaattccacaaattcagtgaactctgagaataaatatggaaggtccgcagttaattaycctgcaaagaaaacgaaccttgaactttctgttaatagactttgcttcccaattaaaagctagcagtttgaaaggtttacctcatcagcgattccctatc

SEQ ID NO: 24503 - DNA, 201 bp, Homo sapiens
gcagctataaaattaagaagatacatgtttaactttgtataacccagtatttgtcatatttatttgagccaggaacatccaagaaactagcatcctaaagrataaacatttagaaattcccttataacccactggttcaaatgcccattttcaaacccttgcttattcagatcctacatcagacaaaggtttagaggccaa

SEQ ID NO: 24504 - DNA, 201 bp, Homo sapiens
gaatcatattagagcctacaaatgatatcccacttatctttttgtctgttaaatactttaaaaatgttttcagtgatttgtaggagtggttattatcaaayttttattttagaattgtagattattattattattattatttgaaatttgacagactttcctttgttcagatccaagctgtgccgcttattacatgtgtaa

SEQ ID NO: 24505 - DNA, 201 bp, Homo sapiens
ccctaatgcttatataaagcagttaacttacttttgtatttttagtttcgtatcatttatttctgctctcatcttggctagcaaggactgaacattccatwtttccatgctggcctcctatttcactcacatcatctccccaggacaattgtcttctctaggatgttcctgttgatcaattgtaggtgcaaagtcaccctc

SEQ ID NO: 24506 - DNA, 201 bp, Homo sapiens
taaaacagtatgacaacatttattgaatacatgttatgtgctaggtaccaagtgaggagttttatgtttattttctcatttcatcctaagagcaaacttcrgaggtaggtgtgattcgtctcattttagtgaaaattcactgatgctctgaaagcaaaattaactttcccaagggccttgtagtgcttaaaggcagaatca

SEQ ID NO: 24507 - DNA, 201 bp, Homo sapiens
atcatcatcactgacattctgatagcctttgtttgttgagcacttactgtgtgcagtgctattccttaatttattaaacctttgcaatttgattatgtagrtactatgattattattatcatgcccatttcacatataagaacactgagtcttggagaacttagatcacttgcaacatctggactcaagggcaaggacttc

SEQ ID NO: 24508 - DNA, 201 bp, Homo sapiens
tattctagtgatgattttaattatcataaaataatttttaggaattatctataaaggtgtgcctgttaaattctataaaatctgttaaaatctgaatctgytaaatgaatctttatcactaaaatgtttttactttcatgatacagcattgcataattacagtatactatttccatggtgtggcacattatttcaaaacag

SEQ ID NO: 24509 - DNA, 201 bp, Homo sapiens
ggggaggaccgaaatagtatgccaaattcttttccagccctcaaattttatgagcctgagttgcattgtgtgggtaaaagtcttgtgctctgtggatcagraggaagttagatgttttggatatttacatagaaacaaagaatttgaagactggaaagaacttgagcaggactctattaaatgtgttttgtgtgagatggt

SEQ ID NO: 24510 - DNA, 201 bp, Homo sapiens
tgagaggggtgaagggtggcaggaaagaatttgatttccaactgtattgaatcagatgtgacttatacttgtttatttttaatattttatcagcatctttrcagttcaagtggatgaaaacagaagatacatgcaaaacctgacagttgaacagcctatcgaagttaaaaagcttttcgttgggggtgctccacctgaatt

SEQ ID NO: 24511 - DNA, 201 bp, Homo sapiens
ctacctgtctcttagagttcttgttagcagaaacaaatttctgtgtaataaagtgcctggcaaaaagtaggtcctaaataaaatgttattttccccaaggraaagattattaggaattataacattgggacacacctttgtttaaaaagctctaattaacaagaaccacagcaggggcgcgcatacaggggttggagagaa

SEQ ID NO: 24512 - DNA, 201 bp, Homo sapiens
aactgatatggtttaaaaaaaaatcttaaacccacattccaaacaaataagaaatagggtataagtaatcaggtaattatgaaactctaagaatcagccaytgaaactgtaaaaaaaaaaataaagctgacctattacaatactaaagtaatacaaagtttaatgtacctttttgcacatagcaggcctcagtaaaaagct

SEQ ID NO: 24513 - DNA, 201 bp, Homo sapiens
aattttatagaagaagcatttctgaagatagaaaataaggataatttttaaacacaagaaatcacatgcttttcatatcattatcaatgtggaaaatgctraaacaacttgctattaaaaaccatttatcagaaacttgtttaattaatatgtcaaatatctgggtttttaaatcatgtataacaatgaaaatattcctaa

SEQ ID NO: 24514 - DNA, 201 bp, Homo sapiens
aatgaatttggcttataaaagatatgaggcatttaacagcaattggagccaaacttggtgttctttctgatttttttaaaattaatataccagaggaatchtaaaatgttatggaacttatttcctcaagttctggaaatcattgggttaaacatagctaatttcccccttatgttattatagagtttatatttatattac

SEQ ID NO: 24515 - DNA, 201 bp, Homo sapiens
tacctcggtgaggttctagacttctgccctgctgcagctactcagtactttaggccatgacctccgctctccttcctcagcaactcaccacagaccttccrgaaaaatgttaaacccttctcatccttttcttgttattggtttctattttctttctttcttttttctttagcgtcacaggggaagagctgataattgtat

SEQ ID NO: 24516 - DNA, 201 bp, Homo sapiens
tattattattaggaattctgaggtggtggaataattcattttccaatgtgttaacttctcatgagtttaatgtgagtataaaaagtctgttttaactgagrgcagagtattcctttttctcttataatacaggagccagttacaacacaggaggtgaaatggcctgtttgcttacctgcaacttcaggaatttcatgctta

SEQ ID NO: 24517 - DNA, 201 bp, Homo sapiens
gagtatctacctccctgactgattgtgaagatgaaatgaaatagtcagtagaaagtagttagaatagttcacagcatacagtatttattatttttatgattaactaatgttttatgaggtccttagagtgctagacactgtttgcatgaattattttatatgatctcaccacaaccttataaaaaagtttttattgtccga

SEQ ID NO: 24518 - DNA, 201 bp, Homo sapiens
aagtctccaaaattattcatccttttggggacaactataaccatgattttttgtgacactcataacctgttgaattggaaaaatattaatgttagaaatcygttctcatgtcacttttaaaattcttctccttttttgcctcctgtagcatgagtcctagtttgattaaactagacacttgattttctccaatggtaacat

SEQ ID NO: 24519 - DNA, 201 bp, Homo sapiens
attttgagagccagtgcaaactgcaccgcaggtgtattgcctgttcaaatttttctttaccactctatattaacacctaagttaaaggccggcacaataarcaatgtgttgcttgataatatttgtaaaacaaatggattagtgaacaagttaatatgtcactctgtggtctttaaaatatatatggaaatgcagaatatt

SEQ ID NO: 24520 - DNA, 201 bp, Homo sapiens
aatcctcacaactttatgaaggaagtatatgtgtgagaaaagatacacacgattagattttgagagccagtgcaaactgcaccgcaggtgtattgcctgtkcaaatttttctttaccactctatattaacacctaagttaaaggccggcacaataaacaatgtgttgcttgataatatttgtaaaacaaatggattagtga

SEQ ID NO: 24521 - DNA, 201 bp, Homo sapiens
cttaatatcttcttccacgtatgcaatccaactgatatggtttaaaaaaaaatcttaaacccacattccaaacaaataagaaatagggtataagtaatcargtaattatgaaactctaagaatcagccattgaaactgtaaaaaaaaaaataaagctgacctattacaatactaaagtaatacaaagtttaatgtaccttt

SEQ ID NO: 24522 - DNA, 201 bp, Homo sapiens
cctccccttgacactgatacgtattcagaggcacacacatacatgcatgttcattattccaaatgggtagatgttaatttagcaccaggctctgttgtttyctgtcttgaaactttcatgcatgtgaatctatgacaaaatgaaaaattcttttctcaaaatggacattttccagtattggatgaagtggtctgctctctc

SEQ ID NO: 24523 - DNA, 201 bp, Homo sapiens
agttctgaggctgggaagcccaagatcaaggtaccagcaatgttcgatgtctagtgaaggcctgttcctcacagagggtgacttcttgctatgaccccacrtttaattcatttaatatctggatactgaggaaaaggatagctagctctctggggtctctttaataagggcactaatcccaatcatgaaggctacattctc

SEQ ID NO: 24524 - DNA, 201 bp, Homo sapiens
ttacttcctgatgttacttaaggttaccagtactgtattttttacctgcctggtttgacactgacttacaggactactaaaaaaaaatataccttaggagwtttttgtgccactcttttgtttcactctgagacatatctagaagattgagtatatttgttgggtttgaatgataaaggagaactttagaccagacttgaa

SEQ ID NO: 24525 - DNA, 201 bp, Homo sapiens
ccttacaaaaccaataaaattcaaattaaaaacattaatataaagtaacatgattttggctgaatggaaattgctgcttgcaacaagaataggatattgastattttcacacagttcttccaccagagatgatgtggtaactcatttctcctaccttaccacatttgaaccagagagccccctacaaagggtcctgaaatg

SEQ ID NO: 24526 - DNA, 201 bp, Homo sapiens
tgtgtggttcatcctgggactttatggagggtagctgatgcatcaaaaaaaaattatatatatatatatacacacacacacacacacacacacacacacayacatatatatatatataaagttttacagaactttgttttcaacttttaaaacaggatttctaaagaagttatgtggttttttttctttcatggcaatggc

SEQ ID NO: 24527 - DNA, 201 bp, Homo sapiens
tcctgggagaaggggagaatgaaaaatatgtaaacattgccccaactgaggtccccccaaaggctcactgatgaaatttcttgccttaggtgtgcagaagrctattttggacaaccctctgtacctggaggatcatgtcagccatgccaatgcaatgacaaccttgacttctccatccctggcagctgtgacagcttgtct

SEQ ID NO: 24528 - DNA, 201 bp, Homo sapiens
atggggtatccatcacctcaaacatgtatcctttatgtttcaaacaatctgattatactcttttagttatttttaaatgtacaattatttttttttttttactgtagttacccttgtgctagcaaatactaaatcttattcaaactatttttgtatcattaaccatccctactcctccctgccactaaccttcccaacctc

SEQ ID NO: 24529 - DNA, 201 bp, Homo sapiens
ctactaattttttatttttatttcttgctattaggggtcccaatgcatctacattgtctacagctatgcaggggaggagggaaacaatgaggatcttcaayttagactgagaaaagcacactaatggacttaaaaaggcatgcggggattgggcttaattgtaaggaagcaaaaaaacgaaaataaaaaaatcttatttat

SEQ ID NO: 24530 - DNA, 201 bp, Homo sapiens
aagcagcaaaaagaaaaatggtgtgtgcagcattatctttctgccacagatacatgtttttaatttccaagtttccaatgcatcattcagttttatctaaygggaatgcagctgagagaagtttgtaacaacccaaaactacatgctaatatagtttagttttcaagtcttgtggagtctttttttttttaatggaataag

SEQ ID NO: 24531 - DNA, 201 bp, Homo sapiens
acgtcagctattgtttgttgtgaattgccacacattccctaccaacaattgtctggccattagaagacacatgaaacataaatacattcttcttgattgaytaaatgaagcagagcccagtctatgggatatcatccaagttcaagctggcggcttcgtggctccagctgagattatcaggaagtcaattcactaacatgt

SEQ ID NO: 24532 - DNA, 201 bp, Homo sapiens
gcccctcttgtgtcgcagaaggacttgacgactaccgctgcacggcttgtccacggggatatgaaggccagtactgtgaaaggtaccaacagccatgaaaygtacagagtaatgatatgtagggactatatggtaaagggtcacaataggaaaacattcattatttgaagaacttcaatatttgcatatcctttagaagtt

SEQ ID NO: 24533 - DNA, 201 bp, Homo sapiens
ctgtttagagacctaattgaattcttgccaagtttgggcatgatccagagctgctccaattctcggtattttccatgctatgtattttcccctattctaasatgtatatagcattgatacctctatctgcagaatgtaagaaattgtaactgtatacatgagagtatattataaatgcagtagttcctgctccttggcgtg

SEQ ID NO: 24534 - DNA, 201 bp, Homo sapiens
cacttttatatatgtattccttgggtttccttttgatatttctcactataacaggagattatttttatatgaaataataaaaaaaatatacttaaaaaacrctgttatctatactgttaattattttagaatatcacatgtaaattaggtggcagaagccatagcagatttgcatgtcttagaaaatagcaggtaatttcg

SEQ ID NO: 24535 - DNA, 201 bp, Homo sapiens
tcacacagaacagcaagaatgaatgcaatgttgtcgaacctacatgatgggaatacttcaagggagtattccgtgttttcttatgaccaaaattggccaaytgaaatgaggcttgttgggtctgacacttaggaccacactggtaacattcatgataccggtctcagtgtcctggggcagaattaatctcaagcttttaaa

SEQ ID NO: 24536 - DNA, 201 bp, Homo sapiens
tcaggggaaccaggcagggccaagttggtccagtctcctccaactgtgagcattctaatctgttcaccccagtgtgccatacaatgttgtcattttccctrtgcatcatgttgagaaatgattctgaatcactttgaaaaaaatcacacagaacagcaagaatgaatgcaatgttgtcgaacctacatgatgggaatactt

SEQ ID NO: 24537 - DNA, 201 bp, Homo sapiens
ctacaattagaaagtgggtaagtctcattcttaaacatatacttttgcattatagtcacatgaaaccactgagcgtgttcatgtgtgtgtgtgtgtgtgtkagagagagagagagagagagagaaagcccaagagtgagagtttgtcttgaggagaagtgtttaaaaggaatatataaatcaaggatgcactatagtatca

SEQ ID NO: 24538 - DNA, 201 bp, Homo sapiens
aactagataaagcaaagaaaaatctgtcaattactcagccagtttcatcttagtagcctactgtaaattgaggtctatgtttttgagtgaatgaaatctartaaattaagttcaccaggtcttattctagtttattttagatggaaatgtatgatttttaaaagtgggagtaaaatcttacacatatttctgaaatgttaa

SEQ ID NO: 24539 - DNA, 201 bp, Homo sapiens
tttgagatagagaaacctattgatttatgtatgacaattattaaacatgctttatctcaagtaatcctcagatccaccctatgaaaagcagaacctaccaytgattgagtgcttactatctcctgtacacttcctaatacagttacaccaacatcatcgactataatttatgatccccattttacgggtgagagaattgag

SEQ ID NO: 24540 - DNA, 201 bp, Homo sapiens
tctttaagaatgttgaatattggcccccactctcttctggcttgtagagtttctgccgagcgatctgctgttagtctgatgggcttccctttgagggtaamccgacctttctctctggctgcccttaacattttttccttcatttcaactttggtgaatctgacaattatgtgtcttgaagttgctcttctcgaggagtat

SEQ ID NO: 24541 - DNA, 201 bp, Homo sapiens
atttctccttcacttatgaagcttagtttggctggatatgaaattctgggttgaaaattcttttctttaagaatgttgaatattggcccccactctcttcyggcttgtagagtttctgccgagcgatctgctgttagtctgatgggcttccctttgagggtaacccgacctttctctctggctgcccttaacattttttcc

SEQ ID NO: 24542 - DNA, 201 bp, Homo sapiens
aaatgcttaattttatatgatgtgaatttcatctaaactaatgacaagaaaagtaaatgcctgtgacactgcatttttcattgacagggttcctcagtgargggggaaaaaagcatttaatgattttcaaatgacacatgtaacctaaacactataggacagtgatatttgcctaatctagaaccttctaccaggttgtcc

SEQ ID NO: 24543 - DNA, 201 bp, Homo sapiens
gaaatgtctctcttctcagtcctcaggtggaagatagtgaggggactattcaatttgatggagaaggttatgcattggtcagccgtcccattcgctggtamcccaacatctccactgtcatgttcaagttcagaacattttcttcgagtgctcttctgatgtatcttgccacacgagacctggtaaagatcatatgcatag

SEQ ID NO: 24544 - DNA, 201 bp, Homo sapiens
agaaaaaagattagattctatttattatgtaaattacaaacattaggacacatttctcttaatatcttcttccacgtatgcaatccaactgatatggtttwaaaaaaaatcttaaacccacattccaaacaaataagaaatagggtataagtaatcaggtaattatgaaactctaagaatcagccattgaaactgtaaaaa

SEQ ID NO: 24545 - DNA, 201 bp, Homo sapiens
tgctcgttagttgtttcagtttcttcctagcatcgatggtctttacaatttggcatgtttttgcagtggctggtactggttgttcctttccatgtttagcrcttccttcaggagctcttttagggcaggcctggtggtgacaaaatctctcagcatttgcttgtctgtaaagtattttatttctccttcacttatgaagct

SEQ ID NO: 24546 - DNA, 201 bp, Homo sapiens
gcatccgccttggtggccagcagttcttactggacaaaaacatcaaaccctaagagcctgaagtagttacttaagcaaataggacaagcaactgaactgaktttttcttctgggaaagctttcttcacacaggtacagaaataggctaaaggtcaggaagtagggtgagatattttaggagtcatttggggtttccagaat

SEQ ID NO: 24547 - DNA, 201 bp, Homo sapiens
tgttatgccacattatagaagccgtgagaagtgacataaaagttctagaaagaacaatcacctctagtagggcctgaagatttcctgaagggaaggatttsagccaggcattgaggtgggatagtgctggggagttgggggtggagtcaggtaacagggagagtattctgagaagagggaatgacttaaaccaaggcagtg

SEQ ID NO: 24548 - DNA, 201 bp, Homo sapiens
gattcccaaatctaacaagttatttggtaattgtgaatcactgatcaacaaaaatctaccatcactcctgagaaaggaactgaaaaatgcaggccatagcragaatcagttgcttctttcttatggttacaagatgccatatcatatgctataaaatgtctatcggtaatttttaaaactgtgattattatgagtcaatag

SEQ ID NO: 24549 - DNA, 201 bp, Homo sapiens
catttaattatgtgctcttagagtttatttaaaatttattttcatgcactaaaatgatttggagatacaaatagtgaaaagtatatttcttgtaatgtttygtagtaatttttatttggtttcaacagtcaatgaaaataggttaataaaatgtctagtatttcataataacctactgtgtgttacatattataccaagaa

SEQ ID NO: 24550 - DNA, 201 bp, Homo sapiens
gctataaatttccctctacacactgctttaaatgtgtcccagagattctggtatgttgtatctttgttctcattagtttcaaagaacatctttattccagmcttcatttcgttatatacccagtagtcattcaggaacaggttgttcagtttccatgtagttgagccgttttcagtgagtttcttaatcctgagttctagt

SEQ ID NO: 24551 - DNA, 201 bp, Homo sapiens
taatgttttgtagtaatttttatttggtttcaacagtcaatgaaaataggttaataaaatgtctagtatttcataataacctactgtgtgttacatattayaccaagaagtttatattcatttccttttaaatcaagctcatggtgtatggactattatattatctccattgtatagaagaaaaaattgaggcctagaaag

SEQ ID NO: 24552 - DNA, 201 bp, Homo sapiens
tagtgagccaagattatgccactacactccagcctgggtgacagagtgagactctgtctcaaataaataaataaataaataaataaataaaaagaaaaaaraaaagaaaagaataggaagagcaaatatattaagtggaagtggatcattgtaaaggtcttcatcctcgttgtcttcattttgagcagactaaagaggagg

SEQ ID NO: 24553 - DNA, 201 bp, Homo sapiens
tccattccccattgcttgtttttgtcaggtttgtcaaagatcagatggttgtagatgtgtggtattatttctgagggctcttttctgttccattgatctayatctctcttttggtaccagtaccatgctgttttggttactgtagccttgtagtatagtttgaagtcaggtagcatgatgcctccagctttgttcttttgg

SEQ ID NO: 24554 - DNA, 201 bp, Homo sapiens
agaccattaatgtcttaattccagcttgctgagaacctctggccaaaaaaggatcaaatgactccattgtagacattctcttttacttcatttggggccayagtgttgattcaggatcttttttctcatttctacttgacttcttgtgaagtgttctgcagttaaatctttcaaaaattttcttactttcatagtgctgtc

SEQ ID NO: 24555 - DNA, 201 bp, Homo sapiens
catactgataacatagtagattaacatatatttgtgtgggtattatatattgtattcttataataaagtgagctagagaaaagaaaatgttattaagaaartaataagggctgggctcagtggctcatgcctgtaatcccagcacttcgggaggccaaagcaggcagatcacttgaggtcaacagttcaagaccagcctgg

SEQ ID NO: 24556 - DNA, 201 bp, Homo sapiens
aggagaatcgcttgaacccaggaggcggaggttgcagtgagctgagatcgtgcctctgcactccagcctggtgacagagcgagactccatctcaaaaaaawaaaaaataataataataagggtaaatacaaggagtgtgttttgaatacaaaatatctatttttagaatctcaaacccatgagttactttcttccatatat

SEQ ID NO: 24557 - DNA, 201 bp, Homo sapiens
gatccacccttatcaaatgaacatatgttataacatgcattttgaattctaaatacacccttaagtttatcttttttttagtatttttttctctttaaccwtgctttattcttaatgcacatattttgacagatagaattaaattctttttagaacaaggttaattgtttctctatgtatgcattcacatacataaacata

SEQ ID NO: 24558 - DNA, 201 bp, Homo sapiens
acaaggcaaagaagcatggctggagtgaaacatgttgctgaaagctaaagctagcacctgagttctctgttggttcttcatctggtgttcagctctattgyttcagacccaaattagaaatatgtgcaaagagagaagtgaattttgaaacatgccagagggtatgagatggcaaggttgcttttgtttggttaggtttat

SEQ ID NO: 24559 - DNA, 201 bp, Homo sapiens
aaagaaaaaagaaaaaaaaatccaaagttataaatgcacagtcttacatacttctcttctgggaatttattctgtaagtatatatatatatatacacacayacacacacacacacacacacacacacacacacgtgtgtgaaatgacatatatgcaaagtgattcattccagaaatgtttgtaattgtcaccacaaagctg

SEQ ID NO: 24560 - DNA, 201 bp, Homo sapiens
tcccccttcgcttggcacttcttcttcctgctgccttgtgaggaaggtaccttgcttccccttggccttctgccacggttgtaagcttcctgaggtctccscagccgtgctgaactgtgattcaattaaaactttttcctttataaatcacccagtttcgggcagttctttatagccttgtgaaaacgactaatacagcac

SEQ ID NO: 24561 - DNA, 201 bp, Homo sapiens
gcttttcttgtgatagtgagtgagttctcatgagctctgatagttttataaggggctcttcccccttcgcttggcacttcttcttcctgctgccttgtgargaaggtaccttgcttccccttggccttctgccacggttgtaagcttcctgaggtctccccagccgtgctgaactgtgattcaattaaaactttttccttt

SEQ ID NO: 24562 - DNA, 201 bp, Homo sapiens
tgaacagtattactctattcatataggcattccttttttagcaatttatagtaatttttaaggtattattcaaaagaaaagggagctgttaaatacattartagtgatagccattggaaattatttccatttcatttcctgacaacttcatgaaaaggtacaatttattctgaaatgtatgttctgagtagaatgattaat

SEQ ID NO: 24563 - DNA, 201 bp, Homo sapiens
aacagtattactctattcatataggcattccttttttagcaatttatagtaatttttaaggtattattcaaaagaaaagggagctgttaaatacattaatwgtgatagccattggaaattatttccatttcatttcctgacaacttcatgaaaaggtacaatttattctgaaatgtatgttctgagtagaatgattaatat

SEQ ID NO: 24564 - DNA, 201 bp, Homo sapiens
caaaattgtattgataactaagtgctgatattccattttgagtatatgggttctgatacaatacacaaagaggagaatatttgaatgttgctcatcaaggrcattcttactgttcagctgaccctgcattttagcttcttgtttatttttcatggttttaacccaccattaagtagcatggtttttagcatgaaaaataaa

SEQ ID NO: 24565 - DNA, 201 bp, Homo sapiens
ttcctcttgaaaactaaaagaaaaatagtttcttagtttaagtgataccaaaaccgctgaaatttcaattgtaaaatttcattaaacaaccttaatgaagrtcattctcattagctccatgtaaaatcacctgcctaaaacgttcccatattgataatggagaaatgtatgacgttagaagtttgttagttgcatgcttca

SEQ ID NO: 24566 - DNA, 201 bp, Homo sapiens
actctggttcattttctatgcattaaggatgatgtaactttaaaacctctcatgtaaattctgcctgttttctaattctacaatcctcttgtttatgttcyattctaataattatcgagcttttaaagaagagaaatctgttcttaactcaaatttatacatacactgaaggaaataacaaaaccttgaagtaaaacactg

SEQ ID NO: 24567 - DNA, 201 bp, Homo sapiens
tttttaaggaagtttttcagcaaaagtgtgtgtgcatgtgtgagagagagtgacagagtgcttgcgtgtttggtggtgttgagggaattaagtacttaacygggtttaaggacatttatactcataaagtgcagttcttctttcagaaaagatacattctgttaaagaaggtgaaccttatttgataaattcattcttttg

SEQ ID NO: 24568 - DNA, 201 bp, Homo sapiens
aattatttttcatattgtgtagattcacatctctttaatcaatgggagaccaagtgccgatgatccttctccagaactgctagaatttacctccgctcgcyatattcgcctgagatttcagaggatccgcacactgaatgctgacttgatgatgtttgctcacaaagacccaagagaaattgaccccattgtcaccagaag

SEQ ID NO: 24569 - DNA, 201 bp, Homo sapiens
agtctctattgaattgccctgtcatatataatagaaaacaaatctacttagggaaaacataataagagaaagattaattgagggcatttccctttaaaacrgtagcgcaacagaccttacagaattcaaaatggttgatggcccttcagagagccagtcgagaacgcattaccgtgtgtcaatcttggggtaggggttcat

SEQ ID NO: 24570 - DNA, 201 bp, Homo sapiens
aacccatgagttactttcttccatatataagtcccaacatgttttctataatcagtctatgtctattagatgtgtaattatattaattatgtaaatgcacrtgaataccaaattatttggttaatcttcgaatttcttttagcaattatatactctcctccaggttagattgagctttcccttcaactcagagaaatcagt

SEQ ID NO: 24571 - DNA, 201 bp, Homo sapiens
ggtagggctggtgcttgttacagtggccagtaggcctggtttctggttatagcacatggcagagttaggagctctacctacattatgtccccacggcctcrtctgtggtttccccataagaaaactaccttttgggaaaacatgatacaaacagatcaggtgaattagaaggtctcctgcagatttaaaattttatgaata

SEQ ID NO: 24572 - DNA, 201 bp, Homo sapiens
gaagcagctcatgcatgtctagtaggttcctggtagctggtaccctaagccctcagtaatcagtgttttgtcctgactaggtaggatgctttaaattagasgtgtagctgtaggcctgaccttggctgaagcataaagatgtaaaaacaaatcattatgcattcccagattcctcctttaaggttccttccatttctgggc

SEQ ID NO: 24573 - DNA, 201 bp, Homo sapiens
taaggaccaaaattcacttttatatatgtattccttgggtttccttttgatatttctcactataacaggagattatttttatatgaaataataaaaaaaawatacttaaaaaacgctgttatctatactgttaattattttagaatatcacatgtaaattaggtggcagaagccatagcagatttgcatgtcttagaaaat

SEQ ID NO: 24574 - DNA, 201 bp, Homo sapiens
tcggggcatagtggacactggtgatgaatttggtgtcagatccagaacatgttgtctgtacccctcttacagcagtgattttcttccaccttgtaatatamttatctgaagtccgcctcatcagaaagtacatagggaaactatcgtgactctatttctccaagtagaaactgtgctaagggaactaaagcaaaaaagaaa

SEQ ID NO: 24575 - DNA, 201 bp, Homo sapiens
tgtgttaatttaaaaatatacggcactagaaatagcaaccctttaaaactaaagtgcattcaaatctacctttgcatctaattcagtaatgaattctgtcwagggttttattctgaatttttaaataatcttctaaagtttgaacccagataagccttaaaatactcattatattcaaatttttctgttcaattataaaaa

SEQ ID NO: 24576 - DNA, 201 bp, Homo sapiens
aaaaagaaaaaagaaaaaaaaatccaaagttataaatgcacagtcttacatacttctcttctgggaatttattctgtaagtatatatatatatatacacayacacacacacacacacacacacacacacacacacgtgtgtgaaatgacatatatgcaaagtgattcattccagaaatgtttgtaattgtcaccacaaagc

SEQ ID NO: 24577 - DNA, 201 bp, Homo sapiens
aaaaaaagaaaaaagaaaaaaaaatccaaagttataaatgcacagtcttacatacttctcttctgggaatttattctgtaagtatatatatatatatacayacacacacacacacacacacacacacacacacacacgtgtgtgaaatgacatatatgcaaagtgattcattccagaaatgtttgtaattgtcaccacaaa

SEQ ID NO: 24578 - DNA, 201 bp, Homo sapiens
aaaaaaaaagaaaaaagaaaaaaaaatccaaagttataaatgcacagtcttacatacttctcttctgggaatttattctgtaagtatatatatatatatayacacacacacacacacacacacacacacacacacacacgtgtgtgaaatgacatatatgcaaagtgattcattccagaaatgtttgtaattgtcaccaca

SEQ ID NO: 24579 - DNA, 201 bp, Homo sapiens
aacagaaaaattatgaagtctctcaatggccaactaatgaatataaaaatactatttttcaaatgtttatactggaataagcacacaagacagcagaaaaycttttatttcatgcagaagatccataatgcttttctgattgatgtagagacttttagtaaaagagtaaattaaggaccaaaattcacttttatatatgta

SEQ ID NO: 24580 - DNA, 201 bp, Homo sapiens
aatcgcttgaatccaggaggcagaggttgcagtgagcagagatcatgccactacactccagcctgggtgacagagcaagggattccatctcaaaaaaaaaagaaaaaagaaaaaaaaatccaaagttataaatgcacagtcttacatacttctcttctgggaatttattctgtaagtatatatatatatatacacacacac

SEQ ID NO: 24581 - DNA, 201 bp, Homo sapiens
aaggaagttttagggtccatttaggaaaaagaagtccagtttgcccagagtaattgataaaggaaacacataaccagaaagatcaacagaggccaggtctygtcaggccttcaataatcagttaagcaatttcatttaacaacactggtacttgggataagcctcactggttaggataagctgaaagctttgagcatggaa

SEQ ID NO: 24582 - DNA, 201 bp, Homo sapiens
tggagtaaatgcctttcttatttgttcttaaaagtagttcacttattgataaggaaatagatgccaagtgaaaaagaggaaccttgtccgggaagcattaygttttgagatgggaagagtgagggcaccagagcatgaatgttgatatgagctaacacaccaatgagaaccaggacttgtcacacattcattccaaccaac

SEQ ID NO: 24583 - DNA, 201 bp, Homo sapiens
gtataatcagagctgtgctttttaaatataaatccagaagcagtgtatggggtagatgaaagaaagaagaatgaaggacccaactatagctgtggcaagakaaaagaagaacgtgatgtaccactcctatattttgcaatgttaacttggaagaagcaataagagtaaatattattttgtgaatctcacatttagccacat

SEQ ID NO: 24584 - DNA, 201 bp, Homo sapiens
gctcggcttaacttcaactttctcaggaaagctgcccctgcatcctcaagtcatatcattctcatggcataatcacttttcaaacctttttcttttcttttatgatctcataatgagtaattctgttttatgtctatcttacctctggtgatgatatggaccctatatattttctttaccattgcacaataagaagataac

SEQ ID NO: 24585 - DNA, 201 bp, Homo sapiens
tatttctcatcccatagtcaccaattcaaagccagacttaccttgtttctcctagtgttttctaatgaattaaatgaactggggggatctacagctctgtktttagccactcccagtccacaactctttcccgcaggtatctccacaatcgcagtaacatcagacagataggtaggtagatagacagatacataaaaatag

SEQ ID NO: 24586 - DNA, 201 bp, Homo sapiens
aaagtacacaaaaggaaaataactacaaaaggaaaccagtagccacaaaaatgaggatatttgtacacaaagaactagaaagggtagtctgaaataaatttgtattcataaaaatctgtgatcatattcttatcacataaatcataaaaatatgtttaaaatgtacaattataaaagcatgattagaagattgaagaataa

SEQ ID NO: 24587 - DNA, 201 bp, Homo sapiens
ttccaacactatgttgaataggagcggtgagagagggcatccctgtcttgtgccagttttcaaagggaatgcttccagtttttgcccattctgtatgataytggctgtgggtttgtcatagatagctcttaatattttgaattacgtcccatcaatacctaatttattgagagtttttagcatgaagggttgttgaatttt

SEQ ID NO: 24588 - DNA, 201 bp, Homo sapiens
atgtttggctttcaagcttaccttgcttgattcacaaagcttctaggaactataaattgagattttattccacatttaggaaattttaggctattttttttatttttacttattttttttaggcttttgtttaaaacctgttttttgaccagtgtttttccttctctttctaggactccagctgcatgtgtgctagggcgt

SEQ ID NO: 24589 - DNA, 201 bp, Homo sapiens
tcaacacagtatcatttcagtataaaatctcatattttgaataaaacaaacatatctttacacattattaaatgaactacgctgacaaattttgtttcttyttttgagaaccagaaaaacaattatacttagatgggccatctaaaatgtccttccagcttgtggagtaggttgtgtttgtttttcaatgaacatctgttt

SEQ ID NO: 24590 - DNA, 201 bp, Homo sapiens
tgaagtctttaaaattggctgctaaaaccaataaaattatatttttggaacatagttaaccactttgtgcacataagtgaggctgtagaaactagggttttaaatgacttaaaagatatatatttctccaaactataggtaattatatcaatattactttgacagagatatagtaattctccatcttatagtaaaatttat

SEQ ID NO: 24591 - DNA, 201 bp, Homo sapiens
ttaaggaagtttttcagcaaaagtgtgtgtgcatgtgtgagagagagtgacagagtgcttgcgtgtttggtggtgttgagggaattaagtacttaaccggktttaaggacatttatactcataaagtgcagttcttctttcagaaaagatacattctgttaaagaaggtgaaccttatttgataaattcattcttttgtta

SEQ ID NO: 24592 - DNA, 201 bp, Homo sapiens
agccaagatcagactctgagtattgattcgagatctaatgaatttggaatgttagaaactaaacagccagttttctcttaaattcttaaaaacaagtctcygcattttatatcttttaaatctggaattaccagaaatgtgatgcatatttcattttctgtatgttcctccccttcacttcaacacgtacccttgaagaac

SEQ ID NO: 24593 - DNA, 201 bp, Homo sapiens
gagataagtggaaggaatgaagatgtatttagggtatttcctgccctacaacagcctatagtctcattgctattcagtgatgcattgaataatgacagacygaatagatatgatctgattcatgtgaaatgtctctcttctcagtcctcaggtggaagatagtgaggggactattcaatttgatggagaaggttatgcatt

SEQ ID NO: 24594 - DNA, 201 bp, Homo sapiens
acatccttttccagctgcatttccaacaggaaactctagagaaacctctcatatgggacaaaaactggctttgcaattctttattttggagtgctgctgcrtacattgttcctgtgtaagagaggcacaatgcacatttgcatgtcagaagctctgtgtagttagttgttcagtaagaagaatgtttagctgtttaaccca

SEQ ID NO: 24595 - DNA, 201 bp, Homo sapiens
ggaggtcattatcctaagtgacataacccagaaacagaaaatccaataccatatgttctcacttacaaggcgagaagctaaacaatggatacacgaagacrtgaagatggaaacaatagacactggggactccaaaaggggggagggaggagaaggggtgaagatttaaaaatcgcctgttgggtacagtgttcactgtgt

SEQ ID NO: 24596 - DNA, 201 bp, Homo sapiens
attttaagtagagatgtgacagggtaatttcaatttaagtatattactcgaggtgtcagtgtggaagacatattgtcagaagaccaaactgaagacaaagygaacaattggattcaataatagtctaggcaggaggtaaattatgcttgaagtaagagatgcagtgggaattgacatcaaagaaatgcagaataaatccac

SEQ ID NO: 24597 - DNA, 201 bp, Homo sapiens
attgttatgagcacaatttctacccagattttgttggttcttttcaaatccatcaagtaaaacagtgtgcgtatgatttgtgaatactgcagttgctatartcacaataaaagagggtttcttgcaagaaactatgtaaaacaacttttatgaagaatagctgtccttagccccagataaaaactactgtcagccacaggt

SEQ ID NO: 24598 - DNA, 201 bp, Homo sapiens
gtgttagacatagttgagatccattataataatgtcactacattttgaaataaaattctgaaatgccttaatacataaatccttttatgaagtctttaaaattggctgctaaaaccaataaaattatatttttggaacatagttaaccactttgtgcacataagtgaggctgtagaaactagggttttaaatgacttaaaa

SEQ ID NO: 24599 - DNA, 201 bp, Homo sapiens
gttttaggttaaaaaaattctttaccttttagctttgatgaattacttcatttttatatctaataggtttttttaaccttcactttaattgatttcttaamctctttatcttgctcattttttaatctttttaatgattttaaaatgctgattttaataattttatcttggcatatttatatttatcagtttttctgcttc

SEQ ID NO: 24600 - DNA, 201 bp, Homo sapiens
cttattttttattttggggttttagtattttcatgttttaggttaaaaaaattctttaccttttagctttgatgaattacttcatttttatatctaataggtttttttaaccttcactttaattgatttcttaacctctttatcttgctcattttttaatctttttaatgattttaaaatgctgattttaataattttatc

SEQ ID NO: 24601 - DNA, 201 bp, Homo sapiens
ttaagactattagaaagttttcctgatcacaggtctctcttctctttgcagcctgtcgctgtaatgccggtggctctttctctgaggtttgccacagtcaractggacagtgtgagtgcagagccaacgttcagggtcagagatgtgacaaatgcaaggtaaggagtagaggctgacccataaattactttctccttacag

SEQ ID NO: 24602 - DNA, 201 bp, Homo sapiens
cccctttgcccaaataccactaagacacccttaagcatcaatataactatctactaccaagtgcttttacaaaacataaagcacttaaaaaaactaatgayttagttattgcacacctcatgaaaggtgagaggtggtttttacttattctagcacggtggcagtagagatggagataagtggaaggaatgaagatgtatt

SEQ ID NO: 24603 - DNA, 201 bp, Homo sapiens
gcatatgatgggccagacatgatgctaaagcctttatgttaattatccctacagcttgtagagttgttatagggattaaatgatagaatgcctaacagggyacttaacaaatcagaaaacattctgttactgaacttaggcgtccatgttaccatgtggggtatattattatttaacaagcctattaagactattagaaag

SEQ ID NO: 24604 - DNA, 201 bp, Homo sapiens
aggatctgggatacaatgggttcccgagtgcagtggtgtgatctcggctcactgcaacctccgccttccgattttcaagcgattctcctgcctcagcttcyggagtagctgggattacaggcgcccaccaccacccccgactaattttttttttttgtattttttagtagagacggagtttcaccatattggccaggctgg

SEQ ID NO: 24605 - DNA, 201 bp, Homo sapiens
ataaatttaaagtgtcaagtcagaaaaacattacaaatcaaatttaaatagtaccacagttattacctagaaattcatttgccagtcattcaccaaaagtytgttgagtatctactatgtgacaggctccataccaaatactaggaatccagtggttgttcaaatctaagatttgctttacaagatcattaaccatatatt

SEQ ID NO: 24606 - DNA, 201 bp, Homo sapiens
tgaatttcagtgtcttcatgctcaaaattggaatgatgatgatgacattaatattttaatggcatatgatgggccagacatgatgctaaagcctttatgtkaattatccctacagcttgtagagttgttatagggattaaatgatagaatgcctaacagggtacttaacaaatcagaaaacattctgttactgaacttagg

SEQ ID NO: 24607 - DNA, 201 bp, Homo sapiens
cctccctagtgccatgctgtctgctgaagaatcaaactgtgctctcacatgcttaccactgccttcttgctttttgcaggcctgcagatatgcaaacattyacacagcctttgcacctcttgtcaaagctgtttatctattgacatgtttatttaaaactagctatggtgccagatgaaggaatctctggaaatactatat

SEQ ID NO: 24608 - DNA, 201 bp, Homo sapiens
aaatttgctgctaaccttttgtttttctttgaccaataacatttctcagcttagtgtatgggctatgtaaagtgcctgtcaaatggagggatgtctttgtkgaaagaatccagactcacagaaagtgagtgactttctggtcagatggttagaactctcccaattttgacaaagatcgttctctgtttgggatttgtaaag

SEQ ID NO: 24609 - DNA, 201 bp, Homo sapiens
attgccccaactgaggtccccccaaaggctcactgatgaaatttcttgccttaggtgtgcagaaggctattttggacaaccctctgtacctggaggatcaygtcagccatgccaatgcaatgacaaccttgacttctccatccctggcagctgtgacagcttgtctggctcctgtctgatatgtaaaccaggtacaacagg

SEQ ID NO: 24610 - DNA, 201 bp, Homo sapiens
ccattgttgtactctgtgacagtttcattgaaaggactgtcatgttccatgaggaactcagcctacctgctcttttaccagtagctggtgggaaagccatrctgtgccaatgacttattcacaggaggcaggtcaatcttttgaaaccacagattgtttcaaatgagagaaaaatatgtgagaagagaatagatgtcaagg

SEQ ID NO: 24611 - DNA, 201 bp, Homo sapiens
gatatgtaatattatcttattttttagctatctcccaagaaaaagcctcaaataaaaaaaaatctttttcaaaataaataaacgttttcagatttttttttctaacttttgagcaaggtttttaaaaactttttggtatatagtttgtttatgctgcctatgcaattatcttgtctttggtgaaaaaaataaaacttattt

SEQ ID NO: 24612 - DNA, 201 bp, Homo sapiens
gaaagtccctagagaaggataagaaaatggggcaatacataagcttggaaatagatgatgatatttcttttttttttaatttaattttatttatttatttwttttattaatcattcttgggtgtttctcacagagggggatttggcagggtcacaggacaatagtggagggaaggtcagcagataaacatgtgaacaaagg

SEQ ID NO: 24613 - DNA, 201 bp, Homo sapiens
ggatgatggagaaagactgaattttgcaagcaggttataataactcctgagagtgattgtaatagggtgattaggtcatgcatggactacaagggatcaartagaaaaggagtggtaaagtagtaaacagcagagggtacaggctactcttaagaaagtccctagagaaggataagaaaatggggcaatacataagcttgg

SEQ ID NO: 24614 - DNA, 201 bp, Homo sapiens
aaatgttattttccccaaggaaaagattattaggaattataacattgggacacacctttgtttaaaaagctctaattaacaagaaccacagcaggggcgcrcatacaggggttggagagaaattcagttagtgctgtcttctggacactccttctatcttcattctctcctctgccattgttaaccttccattttaggcaa

SEQ ID NO: 24615 - DNA, 201 bp, Homo sapiens
gagataaggagttcctgtctgctttctaaacaatgcagtttgaacagagaagtgcctcatctttccttttttccatctatttctgaattcttatcttcatmacattaaaaataccttgagagacccaaaagaaaagcaagaaggcatgaggactgtacctctgtcacaacacttagcatcctggtctaaaatgtaatttac

SEQ ID NO: 24616 - DNA, 201 bp, Homo sapiens
tacaatcatattttacaacagtgacactttgcagatgagtctaaatcccagtagttcctgtggatagtaaaacttacagaaagagccatagattaggcatrtttctaattaattatctgattcctaattagatatctttgttatttagcatttttaaccttgctttattttctaactacttatctagattatagaaaacta

SEQ ID NO: 24617 - DNA, 201 bp, Homo sapiens
atcctctctcctcagcatctccaagtaactgggactccaggcacacaccaacatgcccagctactttttttggaggggagggcaaagacagggtctcactmtgttgcctcaggctggtcttgtcttgaactcgtggcctcaagcgatcctccctcttcggcctcccaaaatgcagggattacaggaatgagccactacact

SEQ ID NO: 24618 - DNA, 201 bp, Homo sapiens
acaaagctaggtatcatcagatccaggctctaagtccttacttggggacatattggtcatttggcctgaaacaggccatttaaccttctgaaattcacttrgtctcttctgggaagtgcacctaccccagaaagattttgtgaaattaattccagtaatgtagtacaagtgctctgaatctcacagcatgcttcacaaata

SEQ ID NO: 24619 - DNA, 201 bp, Homo sapiens
ttgtgacaataagtgtgtaaaggacactgttggtgccctgcctaggcacctacactgaagccttctctccaacagaagaggcagaaaggcctgaatgtttmcccgcccttcctgcagtggcccatgactaaccagcgtgagagtacaaaagtccagctctttggcccctaagtggaacaagttttgagatcttattttatg

SEQ ID NO: 24620 - DNA, 201 bp, Homo sapiens
aaaatgcagggattacaggaatgagccactacactcggccagtaaacctaatttttaaacatctgttttttagactatataatccaaaagaatgtttcttrgactttgttttacttaaaagccttaaagagatatgtaatattatcttattttttagctatctcccaagaaaaagcctcaaataaaaaaaaatctttttca

SEQ ID NO: 24621 - DNA, 201 bp, Homo sapiens
aatgattatgcatcttctgtcttgtagctcccagcagtaggaggacagttgacatttaccatatcatatgaccttgaagaagaggaagaagatacagaacrtgttctccagcttatgattatcttagaggtagagtactgagagcatgttcacccgtgttacttcctgatgttacttaaggttaccagtactgtatttttt

SEQ ID NO: 24622 - DNA, 201 bp, Homo sapiens
taaatgacgagttaatggatgcagcacaccaacatggcacatgtatacatatgtaacaaacctgcacattgtgcacatgtatcctataacttaaagcatamcaataaaaaaagaaacttaaaaaaaatgaaatgtccgtatattttcttgattttttccaaatgttttgaagaaagtttttgtattattaaatgctattca

SEQ ID NO: 24623 - DNA, 201 bp, Homo sapiens
agtaaatcattaaatcaaaaaaactaactaaatttttctagattaatagtaacattaaaattttgccaggggtgctattaattttgaaaattcctcaaaaytattttagttctaaagtcagtatgcattacttacaatgggataatagtattttaagtgttaccctgatgtatctgtaaagaactaaaacagcgttacacc

SEQ ID NO: 24624 - DNA, 201 bp, Homo sapiens
tcatgtcctttgtagggatatggatgaagctggaaaccatcattctcagcaaactatagcaaggacaggaaaccaaacaccgcatgttctcactcataggwgggaaacgaacaatgagaacacttggacacagggtgggtaacatcacacaccggggcctgttgtggggtggggtgaggggggagggatagcattaggaga

SEQ ID NO: 24625 - DNA, 201 bp, Homo sapiens
gaatcttaaaaaaggcataaatatttcacctcaaaccattttttaaacttaacacaaaaccggcacacagtaaatcattaaatcaaaaaaactaactaaayttttctagattaatagtaacattaaaattttgccaggggtgctattaattttgaaaattcctcaaaactattttagttctaaagtcagtatgcattactt

SEQ ID NO: 24626 - DNA, 201 bp, Homo sapiens
actatatttaaaataagtatttgcgttaatagtaaagaagtgtgagatagttctcctagcttctcaggagcattttaattcttactagcattagcataaargctgtgagcaatgggcctccataaatggctgaacaaacctcagagatgtgcagggctggtatcctctggctagagctaaaagcctggtgttttggcattt

SEQ ID NO: 24627 - DNA, 201 bp, Homo sapiens
gcagttcttttgtttgtttatttgtttgttttttaaaaggagaacctagagccaggagaataaaatattagcataggctgatagagtacctgtttatagcwtaattttaggttgtgttcaaatcaaaatattcagaaatttaacaaaatcatctatgagtagcctaaattcccatgtcatctcctccttgtatttttattc

SEQ ID NO: 24628 - DNA, 201 bp, Homo sapiens
actgttctctcaatatcaagaggtagcaattttaaatgttctgtgttttaaactttaatgtataacttacgtcagtcaatcctgataataccactattctyactagtcatcaacatcattatcatcattgtcatcatcatgtaacaattatataatggttaatattggccacaaatcaatcctagttccttaaaatctatt

SEQ ID NO: 24629 - DNA, 201 bp, Homo sapiens
aaattgttatattgtattgaatcctgctcttatatgtcttgttttttacttctcgttattttttattttagtttactacattttcttagcttcttgaaatsgatacctatgttattaatatttcagttcttttttcctaatatatttattaacgcctacaatttgcctctacatagggctttagttgcctcctacaagttt

SEQ ID NO: 24630 - DNA, 201 bp, Homo sapiens
acttcacagctgttgaccatcaatccaacctttatttgattaagctcagtatatagtacatcactggaaaccagtcatttagttaattggccatataaacraacagttttgccattcattgttaattacaggataatatatgacatattagtgtgtagtcactgaactctgtgccaaaacagtaatacatttgctaccata

SEQ ID NO: 24631 - DNA, 201 bp, Homo sapiens
aaatctgactcatgatgtttctcctctcccatcacttttcactgtgttctgctgatctccatactgtttcctcaatgatgggcccaaaaaatgctggaagktttcttctatttctctctttgagaatcatgaggcactcattgggattgtggttcttggattgtttccctctttgtatgtatttatgtatgagccatatac

SEQ ID NO: 24632 - DNA, 201 bp, Homo sapiens
tgctggtattcaaatcccagcactgtaaccgaccatctgtgtgaatttgggaaagctacctgtccaatctatttctcagtttcccatccaagtactaaccrggcccaaccctgcttagcttttgagatcagaaaagatcggatgctttcagggtgatttggccatagactatttctgtttcctcatctgtcaaatgaggat

SEQ ID NO: 24633 - DNA, 201 bp, Homo sapiens
tactcctatcctcccgtaaacactatctagaaaattgtcacccaacctattgtagaactaaaaacctagtggtcttcctcatcttcattgtcttcattatytccactacacgaaacattcccttgtaacaaatataatattcacagcattgtgcaaaaaatgtacattttaaatttctagtataaaatttgatttgtgact

SEQ ID NO: 24634 - DNA, 201 bp, Homo sapiens
accctgtgtttgttggaggcttcccaggtgagtgttggctaccccagcaacaatttctttgctctcttatgttactggttttgaaaacatttatatttacrtgtgtctaagaatgtgtgcttatgtgtacttgcttcctagctttagaatctgcttagaatctgcaccttacctaaaatttccagtgtgtaaaatgaacat

SEQ ID NO: 24635 - DNA, 201 bp, Homo sapiens
ctttgccatgttgctcagactgaactcctgggctcaaacaatcctccccacctcggcctcccatagtgctaggattataggcatgagccactgcacctggyttttatattcttaatatttcttgtttcttctatttattttctttactttaaactcgttgttataaagtggtatgggttaatcaagagtgatggaaagatt

SEQ ID NO: 24636 - DNA, 201 bp, Homo sapiens
tatgagacagctgtcattgaagaaattctgttgagaatctgaattactctccttctgtattattttaatgtttgatattcacatgatggttgttttaaccrtttttttttactttaaagaaaaagctataaactagttatatgatcttttcttcttcctttcatatgatgctgctaactcaatagagagacacccgattac

SEQ ID NO: 24637 - DNA, 201 bp, Homo sapiens
catttgtatgtgtgaaccatcatgatacttctttaatgaaaccatctgtgactgttctatttcctactttccagttgatgtttcatgtggacaatggtgcrggcagattcactgctgtctatgatgctggggttccagggcatttgtgtgatggacaatggcataaagtcactgccaacaagatcaaacaccgcattgagc

SEQ ID NO: 24638 - DNA, 201 bp, Homo sapiens
atccaagatgttctcactggtccgtggcaaagtaagaaaatgagaacaactttccacatttttcataaaaatagaaaggatacaatttaaataattgtcckccattttgatattatgggttttaaaaactaatgatggtttttaaatgccctttgtttcatgaaataataatgatgctttattaaatgatagaaatatatt

SEQ ID NO: 24639 - DNA, 201 bp, Homo sapiens
cttttacaaaacataaagcacttaaaaaaactaatgacttagttattgcacacctcatgaaaggtgagaggtggtttttacttattctagcacggtggcartagagatggagataagtggaaggaatgaagatgtatttagggtatttcctgccctacaacagcctatagtctcattgctattcagtgatgcattgaataa

SEQ ID NO: 24640 - DNA, 201 bp, Homo sapiens
atttgtgcatgtacatagaattctttctgtattcagatggtgctaattcagactccagactgaattttaattcaagttctttctcaagtctataaataatattaaactgattatttcattctaaataattgcctgttttgtgtgattttaaggataaaaggtaactggccataaattgttgagtttgcaacatgccctcca

SEQ ID NO: 24641 - DNA, 201 bp, Homo sapiens
aagggaccctgggaattgccttctagcagagaggccaactcacatttcaaataagtatttttccctcctcaactgcttttctaagctttgcacattaacaytgacctagtgcaccatttaaaagtcctaaatatatcacacagtcgccagcccaatcaaggtgagtggtcagacaccagcatgctgtgcacagtatgctag

SEQ ID NO: 24642 - DNA, 201 bp, Homo sapiens
ggagtgcaatggcgtgatcttggctcactgcaacctctacctcctgggttcaagtgattctcctgcctcagcctcccaagtagctgggaatacaggcaccygccaccatgcctgtgctattttttttttttttcatagagatggggtttcactgtgttggccaggctggtcttgaactcctgacctcaggtgatctgccca

SEQ ID NO: 24643 - DNA, 201 bp, Homo sapiens
aatttgtgcatgtacatagaattctttctgtattcagatggtgctaattcagactccagactgaattttaattcaagttctttctcaagtctataaataatattaaactgattatttcattctaaataattgcctgttttgtgtgattttaaggataaaaggtaactggccataaattgttgagtttgcaacatgccctcc

SEQ ID NO: 24644 - DNA, 201 bp, Homo sapiens
aacaaatgatagacattacttccttctggatgagcaaaaccttgatgctttcagtagaaggtatttggaactatggttgaatcttttctgggggtattgaygggactagagtcaggatgaggtggatgaaatgccaggtactttcatctgtatgacttgagagtgtatgcatcaaattttgcaccctcgagcacctctctc

SEQ ID NO: 24645 - DNA, 201 bp, Homo sapiens
tgacctgaggtggcagataccacaatttcctattagacaacttctctcacaattacctaagagccatgaatttgatttagaaatggggttgtatgtgtgtktttttctatcacatattaaacgcacaatctgtaaaaaagattcaggaggatgtttgggaaatgttttctgtgatatttatttttcttcagaagaagtgcc

SEQ ID NO: 24646 - DNA, 201 bp, Homo sapiens
taatttgtgcatgtacatagaattctttctgtattcagatggtgctaattcagactccagactgaattttaattcaagttctttctcaagtctataaataatattaaactgattatttcattctaaataattgcctgttttgtgtgattttaaggataaaaggtaactggccataaattgttgagtttgcaacatgccctc

SEQ ID NO: 24647 - DNA, 201 bp, Homo sapiens
tgttctttgctgtataaatggttttgtatgagttacttaaccacactgagcctcaaattcccatcagttatatgtggattataatgtctgcctcatgcttrttgtgaacattcaatgtaatcattcatatgaagaagcaatgaacacagggtctggtgcacataaatgttcaacaaatgatagacattacttccttctgga

SEQ ID NO: 24648 - DNA, 201 bp, Homo sapiens
aagttatgatttgtatttccccatttttatttacctgtagtgttttctaaaccagtcacagtctggatttactttacattattattatttattattatttwttattattattattattattattattatttgagatggagtctcactctgtcacccgggctggagtgcagtggcacaatcttggctcactgcaaccttcgc

SEQ ID NO: 24649 - DNA, 201 bp, Homo sapiens
tcttgttaacagaaagaatggaaatattatggggatgatcctcgagtccatagaactgtgacccgagaagacttcttggatatactatatgatattcattrcattcttatcaaagctacttatggaaatttcatgcgacaaagcaggtaaactctaatagaaaatattcaagctcttattttagagtctgtaaggaaggtt

SEQ ID NO: 24650 - DNA, 201 bp, Homo sapiens
aggaagattctacatgaatatccaacctacttaacctttagggatttatttttacaatgtaagaaagtgataaagtcaccttcaaaaagttctaagtaagtcagtacttaaaagtatttgatcaattgctttgtttcatgaagtaacattttacaattttaagtcacaactataaatttgttcatcccaaaccaagttatt

SEQ ID NO: 24651 - DNA, 201 bp, Homo sapiens
gaggaagattctacatgaatatccaacctacttaacctttagggatttatttttacaatgtaagaaagtgataaagtcaccttcaaaaagttctaagtaagtcagtacttaaaagtatttgatcaattgctttgtttcatgaagtaacattttacaattttaagtcacaactataaatttgttcatcccaaaccaagttat

SEQ ID NO: 24652 - DNA, 201 bp, Homo sapiens
acactgtttgaaaaaccttattttgtaaaaaaaaatctgttctattcactgtctcacagatttaggacagtttattaattaagaacactagatttcaagtyaaacagacctgaccttaaaccttgaccttgttctttgctgtataaatggttttgtatgagttacttaaccacactgagcctcaaattcccatcagttata

SEQ ID NO: 24653 - DNA, 201 bp, Homo sapiens
agaggaagattctacatgaatatccaacctacttaacctttagggatttatttttacaatgtaagaaagtgataaagtcaccttcaaaaagttctaagtaagtcagtacttaaaagtatttgatcaattgctttgtttcatgaagtaacattttacaattttaagtcacaactataaatttgttcatcccaaaccaagtta

SEQ ID NO: 24654 - DNA, 201 bp, Homo sapiens
atattgctattttatgtgctttgaagcaattacactgtttgaaaaaccttattttgtaaaaaaaaatctgttctattcactgtctcacagatttaggacartttattaattaagaacactagatttcaagtcaaacagacctgaccttaaaccttgaccttgttctttgctgtataaatggttttgtatgagttacttaac

SEQ ID NO: 24655 - DNA, 201 bp, Homo sapiens
aagaggaagattctacatgaatatccaacctacttaacctttagggatttatttttacaatgtaagaaagtgataaagtcaccttcaaaaagttctaagtaagtcagtacttaaaagtatttgatcaattgctttgtttcatgaagtaacattttacaattttaagtcacaactataaatttgttcatcccaaaccaagtt

SEQ ID NO: 24656 - DNA, 201 bp, Homo sapiens
tgccaggattttacccctcatatctgtcagttatcggctacaagtccaaggggcagggggaagtgcaagtgatgtatcttgctggaagtctcagggtcagraggctctcattcaaagaggcaggtctctggaatgatgcagctgcaagccattagcagccaacccttgcctcagctgagagatgggtaccaggatgaaagg

SEQ ID NO: 24657 - DNA, 201 bp, Homo sapiens
ctttacgtatcttgcctattaactcccaacaatgccccaaagcaaagagcataatttgtggctcctggtgattagatttatactttaatttgtcaagtttwaaaatttttttcaatatgcccagttacatccatttcaaatgattctggctgatgtctttcctagagacctgatcatttgtatgtgtgaaccatcatgata

SEQ ID NO: 24658 - DNA, 201 bp, Homo sapiens
catttccagtatggttttatatcactggtcatgaaggtacagttaggaaaaagaaataggaaataacctctacataataattttttaatcctttaattttwttgtgggtacacagtgggtgtatatatttatgggtgacctgagatattttgatgtaagcatgcaatgcataataatcatatcagggtaaatggggtatcc

SEQ ID NO: 24659 - DNA, 201 bp, Homo sapiens
acagcaaaataaataattttgcaagaacactcatatgtttatactatgttgtttttctaccttccagtttctggagatgagatatgatttttttcttcttttcaattccctgcaaggctgtatttcataatctcctccccatcaacacacacccatacacacaatgcacacccatgtctgtttcttgttgatagtgacaat

SEQ ID NO: 24660 - DNA, 201 bp, Homo sapiens
ttctgtaaaggttaactttttggctgaagttagaaattaagcattgaattaagttcttcatattctctaccttcaatgctaatttttaccttaatcaaaaagaaaaagtggtggccctctgtcctaacatctactcccctggcctgcttgagtctcaactaaaatattgacatttgccatcacacattttgctttagctgt

SEQ ID NO: 24661 - DNA, 201 bp, Homo sapiens
tttcaagtgatactcccacttcagcctcttcactagctgggactacaggctcttgccaccccacctggctaatttttctattttttttgtaaagatggtaytttgccatgttgctcagactgaactcctgggctcaaacaatcctccccacctcggcctcccatagtgctaggattataggcatgagccactgcacctggc

SEQ ID NO: 24662 - DNA, 201 bp, Homo sapiens
ttttttttttttgagacaggctcttactccgttgcccaggctgaagtgcagtggcaggatcatggcttattgtgcccttgacatctcagtttcaagtgatmctcccacttcagcctcttcactagctgggactacaggctcttgccaccccacctggctaatttttctattttttttgtaaagatggtactttgccatgtt

SEQ ID NO: 24663 - DNA, 201 bp, Homo sapiens
tgtttgctagctcttgtatagaatgtaagaggaaaggacatatgtcagagccctttgcttttatgtaaaagccaagggagttcaggtaaatggagtcaagrcaataaagggaaacagatttcaagggaaaaaaatcaggaaaatgaggcattaggtatgtgatgaaggaaagaatttttaggaagaaaaagtaacagtttt

SEQ ID NO: 24664 - DNA, 201 bp, Homo sapiens
agtgatccacccgcttcagcctcccaatagatatattttttgttaatattatttcatatataatatattaaaaggtagatatatattatatgtagagagakatattttacatatctatagatcgatctatagatatctatatctatagatcgatctatagatatctatatctatagatagatatatagaggccagaaagta

SEQ ID NO: 24665 - DNA, 201 bp, Homo sapiens
gctggcaaatttttaacaacttctccttaagtgatgagagaggggtcaaaagccaggactaatctcacaattgccactgaaaatgtggaaggtgtttgaayctaattgcttaatattttgaaaattcatctacagttttatcctcaagattcatactagatatcaaagaaattcctttttgtatcttaaatttcagttcca

SEQ ID NO: 24666 - DNA, 201 bp, Homo sapiens
ttttattttgtttttgaggcagaatctcactctgtcacccaggctggagtgcagtggtgcgatctcagctcactgcaaccgccatctcccgggttcaagcrattctcctgcctcagcctcccgagtagctgggattacaggcacgtgacaccatgcctggctattttttgtatttcaagtagaaatggggttttaccatgt

SEQ ID NO: 24667 - DNA, 201 bp, Homo sapiens
acacagctaaagatgtactggcacagattacagagctccaccagaacctcgatggcctgaagaagaattacaataaactagcagacagcgtcgccaaaacraatgctgtggttaaagatccttccaagaacagtaagatctcctttttcattgtgatgatgtcatttatttcctctcactgtaaaagtatcccagacctgt

SEQ ID NO: 24668 - DNA, 201 bp, Homo sapiens
ggcccaggtcagcaatgcagcaactcccatttttcttgatgaggatgtttttgctctttaggtctcgatgagcaattgcgggctttccttgggtgccatamgtttctgtgtgcaggtggcacagaccacaggcagctgaataagccaatttaagcagggctctggtgtccagcgtagcacatttcaggaagtcatagagag

SEQ ID NO: 24669 - DNA, 201 bp, Homo sapiens
ctatctccctagatagaaatatgtggaggttggatttcctgctgagtttctttatttttttcctttcttttttttttttttttttttaagatggagtctcmccctgttgcccaggctggagtgcaatggcgtgatcttggctcactgcaacctccgcctcccgggttcaagtgattctcctgcctcagcctcctgagtagc

SEQ ID NO: 24670 - DNA, 201 bp, Homo sapiens
cccatgataagcccatcttagtaatatttttattctcagatcctttactgtctggcataatatgtgctcaaaacatatttgatgaaggaatagttgtaccrttaaatgcaaaatggtgatgaatgacaaaatagaaagatatacagacaaactttatttaatcgcatatcatttattaacctagaaaataaaatgtctaag

SEQ ID NO: 24671 - DNA, 201 bp, Homo sapiens
aaatgccattgcctgatttcctggtggcttttattttccttctgaaatcatttacaaatatttcttagggtattggctactgttggtttgaaatgagatamaacttatggattataaatatgtttgtgcaaattttctctagcagtaattctaaaacctttgtggacattaagctgtaattgtagctttctcttgcaagct

SEQ ID NO: 24672 - DNA, 201 bp, Homo sapiens
agaccatacttatatgccattccctctgcctgatacgtttgttttttctttcttcattttccctaacagataaacttctatttctccttgaaaattcagcwcaagattacttcccatgataagcccatcttagtaatatttttattctcagatcctttactgtctggcataatatgtgctcaaaacatatttgatgaagga

SEQ ID NO: 24673 - DNA, 201 bp, Homo sapiens
tttaaagaaattgccattgatttacatggttgtatggaagagttttgtttaaatgccattgcctgatttcctggtggcttttattttccttctgaaatcayttacaaatatttcttagggtattggctactgttggtttgaaatgagatacaacttatggattataaatatgtttgtgcaaattttctctagcagtaattc

SEQ ID NO: 24674 - DNA, 201 bp, Homo sapiens
tcaagatgagattttgtgaggacactgagccagaccatatcactaagagaataaaaatggacacagaatgccactttcctattccctttaaatatttccasttgaaagtatttccatgacctagtgagttcttagagaattcaatcactattgatgtcccaactggtataataaaagaagaaaacacataattttgagaca

SEQ ID NO: 24675 - DNA, 201 bp, Homo sapiens
gctgttcacctgctgattgcgtgtccatcctgctgagccaagaacagctgagaaaatcctcagtgtgctttagtcagttcattgaaagacctacaatgaakctcctggaggcattttatttgatttgtccatctcagggtttacagttttgcctcaagttggcattgcctttgtgacagattaaagatgtgagtgtattaa

SEQ ID NO: 24676 - DNA, 201 bp, Homo sapiens
ctgaaggccagaatataataagcattgttaatttagttaaaggaaaaggctgctgttgaaggttagacttcttgtgtatgtgtgggagataacagaataaygtctcttttccaagatgcatatggttttcttttgcttatgtgccaattttaatcaatggagaaattaatatgttaaatgaaataattaaccattttataa

SEQ ID NO: 24677 - DNA, 201 bp, Homo sapiens
ttttttttttttttgagacggagtctcgctctgtcgcccaggctggatggagtgcagtggcgcgatctctgctcactgcaagctccgcctcccaggttcaygccattctcccgcctcagcctcccgagtagctgcaactacaggtgcttgccaccacacctggctaattttttgtatttttagtagagacagggtttcacc

SEQ ID NO: 24678 - DNA, 201 bp, Homo sapiens
cctctcatcaccattattattagaatacatggctagattgcaatattaggtaggcaaattgagagtccatgtttgttcctcatagcaatgtgatttgttcmttatgtgaggtattccttcaaatttaaaaaggattgtgttctaatctaaaaggtcattcataagccactcattcgaaacatcttcccagatacttagttt

SEQ ID NO: 24679 - DNA, 201 bp, Homo sapiens
atctccgcatgttagttaaaaatataataatatgccaagtacggacaatgaagacagctactccacaatattcatttaatttaatttttttttttttttttgagacggagtctcgctctgtcgcccaggctggatggagtgcagtggcgcgatctctgctcactgcaagctccgcctcccaggttcacgccattctcccgc

SEQ ID NO: 24680 - DNA, 201 bp, Homo sapiens
aatttttaaccaagaagtaaccttacttattactagtatgctctttccttaaaagcttttctgatttatgttattttaattatatcaatcttgttattatktacagtttttaattattttaataatttcaacctttctgcaactttccattttagatatgtctcattaatggcatatagtgaagttttgacgttttgtcta

SEQ ID NO: 24681 - DNA, 201 bp, Homo sapiens
gcactttatggacattaatatttctatggagaaagcttaaaaagtgtcacttgtgcattgaaactcttttgtaacagcttctttactcttctgttgttgtyatgatatcctccagattacttaaatttttaaccaagaagtaaccttacttattactagtatgctctttccttaaaagcttttctgatttatgttatttta

SEQ ID NO: 24682 - DNA, 201 bp, Homo sapiens
gatttaattaaatgtaggcctttagtctaagggtttttcaacatcaaaatgttcttcaaaagacattttgatagcttctctctttaagatgtgcaaaaaaagacggtgagaaaaagaaagaaaaccaattttgtgtaaaaaccctgatttaaatacagttctggcttggacagactaggtgacattttaaagatgctttca

SEQ ID NO: 24683 - DNA, 201 bp, Homo sapiens
ggccttttctctgtctttttaaatagaccttatttttagagcagtttgaggttcacagcaaaattaagaggaaagtacagaaattccccatatttcccccrccccaacacatgcgtggacttctccattaccaaaatccccctccagagtgctacatttgttacagtccatgaacctacattgacaacagcatcacccaaa

SEQ ID NO: 24684 - DNA, 201 bp, Homo sapiens
tgattcctcaatgagcagctgaatttccacctgttcttgacgtattacctatcaccatcaggctatgttatgaaactcacttttagagataaagcaaattrtccaaatgtcaccaattattgaatctaaatgtgggcatacaggttttatttgaagcagtctttcagcttttctatatgattacatttttatttaaaaatt

SEQ ID NO: 24685 - DNA, 201 bp, Homo sapiens
tgtggaggttgcagtgagccgagatcgcgccattgcactccagcctgggtgacagagggagactctgtctcaaaaaaaaaaaaaaaaaaaaaaaaaaaaaagcctggaatactgatttagcacacagaggtcagctgccctaacagtcacccaggcctgtagaggattttacatgagtaagcctttgttttctgttaagcc

SEQ ID NO: 24686 - DNA, 201 bp, Homo sapiens
gtggtctttacaaacttgactataaatgttgagacatttttcgagaaatacatacacatgtgtgtgtatgtgtgtgtataagtatctattggtatctccgyatgttagttaaaaatataataatatgccaagtacggacaatgaagacagctactccacaatattcatttaatttaatttttttttttttttttgagacgg

SEQ ID NO: 24687 - DNA, 201 bp, Homo sapiens
ccagttgatgtttcatgtggacaatggtgcgggcagattcactgctgtctatgatgctggggttccagggcatttgtgtgatggacaatggcataaagtcrctgccaacaagatcaaacaccgcattgagctcacagtcgatgggaaccaggtggaagcccaaagcccaaacccagcatctacatcagctgacacaaatga

SEQ ID NO: 24688 - DNA, 201 bp, Homo sapiens
attctaatttgtatgacttggtatctcattgtggttttaatttgcatctccctgatgattagtgatactgagcattttttcatttgctttttggccacttrtatgtctttttcttttcttttcttttcttttttttttttttagaagtgtctgttaatttcctttgcccacttttaatggagctatttgtttttttcttgt

SEQ ID NO: 24689 - DNA, 201 bp, Homo sapiens
gttactgataaaaaaaaaaaaagaaaagaatgaagtaaatgaatgtgacttttctgtttcattttgtctaagtcttttaagccagagaaaacataatgtgraacagtgtttttatgtgtgttttatcactagagataagaaattgtcaagctgtccttaaggaccagggagggcccatggggaacagcatctttcctgatg

SEQ ID NO: 24690 - DNA, 201 bp, Homo sapiens
attttctgacaaaagaaagtttgccatgtctccagaacaggcacacaatttatgtactaaatcctgatatgaatttcttttcttttcttttcttttctttttttttgaaatggagtcttactctgttgcccaggctggagtacagtggcacgatctctgcaacctctacctcctgggttcaaaatgattctcctgccttat

SEQ ID NO: 24691 - DNA, 201 bp, Homo sapiens
tattttctgacaaaagaaagtttgccatgtctccagaacaggcacacaatttatgtactaaatcctgatatgaatttcttttcttttcttttcttttctttttttttgaaatggagtcttactctgttgcccaggctggagtacagtggcacgatctctgcaacctctacctcctgggttcaaaatgattctcctgcctta

SEQ ID NO: 24692 - DNA, 201 bp, Homo sapiens
ttattttctgacaaaagaaagtttgccatgtctccagaacaggcacacaatttatgtactaaatcctgatatgaatttcttttcttttcttttcttttctttttttttgaaatggagtcttactctgttgcccaggctggagtacagtggcacgatctctgcaacctctacctcctgggttcaaaatgattctcctgcctt

SEQ ID NO: 24693 - DNA, 201 bp, Homo sapiens
tttattttctgacaaaagaaagtttgccatgtctccagaacaggcacacaatttatgtactaaatcctgatatgaatttcttttcttttcttttcttttctttttttttgaaatggagtcttactctgttgcccaggctggagtacagtggcacgatctctgcaacctctacctcctgggttcaaaatgattctcctgcct

SEQ ID NO: 24694 - DNA, 201 bp, Homo sapiens
ttttattttctgacaaaagaaagtttgccatgtctccagaacaggcacacaatttatgtactaaatcctgatatgaatttcttttcttttcttttcttttctttttttttgaaatggagtcttactctgttgcccaggctggagtacagtggcacgatctctgcaacctctacctcctgggttcaaaatgattctcctgcc

SEQ ID NO: 24695 - DNA, 201 bp, Homo sapiens
gtttccaatgtagaaatacatctcaaaaattatgcagaagttctatcatataatgttcttgcatgggtctgaagctctttgaaggcaagggtccttgactrtgttgttcattgttgtgtaattactgcctagatgagtacttggaaaggtggagtgattcaatgaatatgtgttgcatatagtttaagaagaactgggact

SEQ ID NO: 24696 - DNA, 201 bp, Homo sapiens
aaagtaaacattcaagtgtagtttgagtataaaagtcatttttcaattttattgaaaaaataaaatgtatgggtttttgcatttggttgctttattttgtkattgttctaatgtagaatacagactttggggtcaatctgtaaactaaattaatctgttaaaaaaaaacatttttttattttgagacagggatctcactct

SEQ ID NO: 24697 - DNA, 201 bp, Homo sapiens
cctggggtcctaatctttgcctaggaatttaaagtaaagattggccgaatcttatttctcttgacttgtatctacctttactttagctcaccctctgggcgtggcctctagccagtctcactttgagtatctttgaaactctctccttattgtcaaccccttactttgattattttttttaatttaatgtttccaatgtag

SEQ ID NO: 24698 - DNA, 201 bp, Homo sapiens
agggttagtatgattgttactttgagagttggttgaatgaggacaaacagatagaccagttaagagacttggcattcatccagtcattagctgtgaagtctggaccacagtgataatggtgaaaatgatcaagtgtggtttgattccagatacattttgaaggtaatgctgaaaagatatgctaatagtttggctgtggaa

SEQ ID NO: 24699 - DNA, 201 bp, Homo sapiens
atcaaaatcctaactttgtttctggtctacacaccttcatttgtccatctttttcaggtttattccctgctgtcctgaatcttgcttctaatgctcttatyacgaccaatgcaacatgtggagaaaaaggacctgaaatgtactgcaaattggtagaacatgtccctgggcagcctgtgaggaacccgcagtgtcgaatct

SEQ ID NO: 24700 - DNA, 201 bp, Homo sapiens
tcctgatggattctttactgctctcagctaatccattatatggttttagacatccaggatagacactgaaaggaataactattacaaaagtaattttaagrggagcatttgattgactgatgctcctcttatgtattcattgtgtgtatgtattgaatttgtgtattcattgtatgtattcaatattcaatgtatgtattc

SEQ ID NO: 24701 - DNA, 201 bp, Homo sapiens
tgatgaggctaaaaacatctccttcaatgccactgcagccttcaaagcttacagcaatattaaggactatattgatgaagctgagaaagttgccaaagaarccaaagatcttgcacatgaagctacaaaactggtaagaaacaaatggcacatgtgctgggaatggaagtcaacctttttgaatttttcaaatgtaagtca

SEQ ID NO: 24702 - DNA, 201 bp, Homo sapiens
ggaattaccaggagccctatctcacacccataggttgtgatgcagttggtctggggtagagtcagaccactgggatattcaagaactccccagattatacwgataaagaattactgtgatcctgtagttacctaatagctaagactctcttccctctggaaaatgccttaattggtactgccaatcttttttttttttttt

SEQ ID NO: 24703 - DNA, 201 bp, Homo sapiens
gttacctaatagctaagactctcttccctctggaaaatgccttaattggtactgccaatcttttttttttttttttaaacagagtttcacccttgttgtcsaggctggagtacaatggtgtgaactcagctcactgcaacctccacctcctaggttcaagcaattctcctgcttcagcctcccaagtagctgggattgcag

SEQ ID NO: 24704 - DNA, 201 bp, Homo sapiens
gggaaacaatgaggatcttcaacttagactgagaaaagcacactaatggacttaaaaaggcatgcggggattgggcttaattgtaaggaagcaaaaaaackaaaataaaaaaatcttatttattacattctattagccccatggactttgcaaggcctgtgtccttcaaaaatgctgacattggtcgctgtgcccatcaga

SEQ ID NO: 24705 - DNA, 201 bp, Homo sapiens
ttcttttctctgtgcccatctcataccattgtatgtgtgtcatatgatggatctggtttctttttcttatttgttgggagatgtccagagactcaaggatstatcctttgaccaaatttttcactcttcaagggcctcatactgctctgatttcagatgtatagatatattgcttatcaaacactgatgggtctgaacatg

SEQ ID NO: 24706 - DNA, 201 bp, Homo sapiens
tctgtaacttagcaaaaatacaaattggtgtttccactttgatttctctttttgaaataaattttcagcttgactttcttttgcctcgggtattctggatkatcattttgtagcatctggataattttacattaacatctggagttgagggtctttttatttgtcggatgcatatagaatacttctgtaagaaatgtattt

SEQ ID NO: 24707 - DNA, 201 bp, Homo sapiens
cagtggtgttttcagcatggacaactggagctttaacttaaaagatctagaaactgggcttgttggccacagttttagtgtgattagaggtggtcataggktagtcaaagttgccactatcctggttatggatggtaatagaactgcctatttatttgatgtcttcacttagttgtctcctaggtccttcacagcgaacat

SEQ ID NO: 24708 - DNA, 201 bp, Homo sapiens
acctggggtcctaatctttgcctaggaatttaaagtaaagattggccgaatcttatttctcttgacttgtatctacctttactttagctcaccctctgggcgtggcctctagccagtctcactttgagtatctttgaaactctctccttattgtcaaccccttactttgattattttttttaatttaatgtttccaatgta

SEQ ID NO: 24709 - DNA, 201 bp, Homo sapiens
ttttcagcatggacaactggagctttaacttaaaagatctagaaactgggcttgttggccacagttttagtgtgattagaggtggtcatagggtagtcaargttgccactatcctggttatggatggtaatagaactgcctatttatttgatgtcttcacttagttgtctcctaggtccttcacagcgaacatttgccagg

SEQ ID NO: 24710 - DNA, 201 bp, Homo sapiens
cttacctccatatttaatggattaccattctcattgattttaccttcttaatttctcttaaattgattttctttctctatacctaatgttagtacctttcygccatgtttctatctggtttacattgctggaacagcacctgatttgctatcttgttcttagtcttgccatcccaacttagtccattcctctgatgtcttt

SEQ ID NO: 24711 - DNA, 201 bp, Homo sapiens
tgtgtgtgtgtgtgtatgtgtgtgttttgtggatgtatgcgtgcatatgtatttcttagtttattctttcagaagccttgaatttacatgaagttatgtgwtaatgacctaccttatataggacctagaattttttgttgttcttctgtaaaaccatgctccctgaactgtagtctagtcatcagaatttgccagtcaact

SEQ ID NO: 24712 - DNA, 201 bp, Homo sapiens
agtctgattgtgtacttgcaaacacttccatggtatctatttcaagtgtattttgaaaagtctaacatctaggctttcaacttgatctgttgtactttctrtattctatacctgagtgtcagcaaagacgcctgggagctgtctttgagtcttccttctctcttacctccatatttaatggattaccattctcattgattt

SEQ ID NO: 24713 - DNA, 201 bp, Homo sapiens
gcaataagtgacacatacacaatttataaatgataaaatataaaatatttgtcttaaatagggagatgctgtaatgtctctttcccctcttcaacgtatcrtattacagtgattcctcaatgagcagctgaatttccacctgttcttgacgtattacctatcaccatcaggctatgttatgaaactcacttttagagataa

SEQ ID NO: 24714 - DNA, 201 bp, Homo sapiens
acctatgtctttactgtgtatacatatacacccatatccctatatattcgcgtgttcacttttgatttcaaattttatttgtgaaaaaagcagatttattyttttttttctttgagatggagtctcgctctgtcaccccctggctggagtgcagtggcttgatcttggctcactgcaacctcagcctcccaggttcaagta

SEQ ID NO: 24715 - DNA, 201 bp, Homo sapiens
catagtcctaatatgcatttttatggtcgacagtcgtggtatatgagagaaaatatgtagcctttgatgtaaaaagattgtttttaaaaaaacataaactktacaatatatgcttgtgtgtgtcagtcagagggggaggtggagagaggcagtgtttctgaaacaagagatctatgaaagaagggaacagtctgttagttc

SEQ ID NO: 24716 - DNA, 201 bp, Homo sapiens
tccttgctcctctatttttgaaaattaacatagtcctaatatgcatttttatggtcgacagtcgtggtatatgagagaaaatatgtagcctttgatgtaaraagattgtttttaaaaaaacataaactttacaatatatgcttgtgtgtgtcagtcagagggggaggtggagagaggcagtgtttctgaaacaagagatct

SEQ ID NO: 24717 - DNA, 201 bp, Homo sapiens
atttacctgtataaattattaataagtacatacaacataatccctgtcctatctgtttagggagacaataaatatctatgaaaaatgggatctcagcactrtataattaagggagaggtatgtgctacagaacatacatgcaataatcattcaaagggatgagctactgcagtggagagagatgcaaagtgtcctggagtg

SEQ ID NO: 24718 - DNA, 201 bp, Homo sapiens
ttatgtgagtttctcagtatatacatgaaagacactctgcctgtatccttgctcctctatttttgaaaattaacatagtcctaatatgcatttttatggtygacagtcgtggtatatgagagaaaatatgtagcctttgatgtaaaaagattgtttttaaaaaaacataaactttacaatatatgcttgtgtgtgtcagtc

SEQ ID NO: 24719 - DNA, 201 bp, Homo sapiens
aaaaaaatatggactgctttgattttcctttgaagtaatgtcacaagaagaaaacagcaagctggttcatttgccaaggaaggaagagcatgaaagacaaratgaaatgccagtaactaggtactagaggaaaggagtgctaagaaaatgttcaaaagggatcttgaaaagcaaagatcacttggtagatgaacttgttca

SEQ ID NO: 24720 - DNA, 201 bp, Homo sapiens
gctgtgtaggccaagaatctagttatcctttcagaaatttttttttctgaccacctactctgtgccttaagcaaaagtacctgcccttctttctttctttyttttttttttttttgagagcatggtgtggtctcggctcactgcaacattcgcctcccgggttcaagcgattcacttgcctcagcctcctgagtagctggg

SEQ ID NO: 24721 - DNA, 201 bp, Homo sapiens
ttccaacttgtaaaaggcaccatttgagcagggaaacaccctcagtcttttgctgattatgtcaaatgggaggaagtaagaacacagcattacagccacgmctctttatacagcagccaccctcttctgtgcctttgccaatacgttccctctgcctggaagattgcagccctttcactcctccacccgagactaactaat

SEQ ID NO: 24722 - DNA, 201 bp, Homo sapiens
atcgcttgaacccaggaggcggaggttgcagtgagctgagatcgtgcctctgcactccagcctggtgacagagcgagactccatctcaaaaaaaaaaaaaataataataataagggtaaatacaaggagtgtgttttgaatacaaaatatctatttttagaatctcaaacccatgagttactttcttccatatataagtcc

SEQ ID NO: 24723 - DNA, 201 bp, Homo sapiens
ggagaactttgccccagtccggcaaagtattgtcacctagttggcattgtaattatgacttcaaaagggcattccacaattctatcaatccacctgcttcrggatgatgggaaacatgataagaccagtgaattccatgagcatgagcccagtgctgcacttctttagctgtaaagtgagtgccttgttcagaggcaatgc

SEQ ID NO: 24724 - DNA, 201 bp, Homo sapiens
agaatcgcttgaacccaggaggcggaggttgcagtgagctgagatcgtgcctctgcactccagcctggtgacagagcgagactccatctcaaaaaaaaaawaaataataataataagggtaaatacaaggagtgtgttttgaatacaaaatatctatttttagaatctcaaacccatgagttactttcttccatatataag

SEQ ID NO: 24725 - DNA, 201 bp, Homo sapiens
ggatgtcctagaaaggggctgtagtgctgcagctgtccacttttgggtgctacctgcatatcttgcagaatcatctgtgaaccaggccctagtcttctctkcctctgtcaactgatcatggggaactccctgtgaggccatcagtgcaggcttggggagagaaggcagggtggcaggagtggaggccatgggcgtttgagc

SEQ ID NO: 24726 - DNA, 201 bp, Homo sapiens
ctggatttccgaaatatttttaaaagattttttctgggatcatttaaggcctcatctgttcagaaccaaggggaggaccgaaatagtatgccaaattcttktccagccctcaaattttatgagcctgagttgcattgtgtgggtaaaagtcttgtgctctgtggatcaggaggaagttagatgttttggatatttacatag

SEQ ID NO: 24727 - DNA, 201 bp, Homo sapiens
acttgaacaaagatatacagcttctccagagaccaggcagacactaggtttatgatttcctgacttccactgcagatctcttaccatttttctatgagagwcataaaaaaagaatcagctatttactttctagtcaaggtgggttaaaatcaagccacttgttttcaaacatcgatttcgggttcatgccatcaaattaaa

SEQ ID NO: 24728 - DNA, 201 bp, Homo sapiens
aaaagaatcagctatttactttctagtcaaggtgggttaaaatcaagccacttgttttcaaacatcgatttcgggttcatgccatcaaattaaaaaattcrcttaactgagtttaatttgctttcacttaggaagcagctgcctttcaagataataaaataaacagatacaataatatttggtcagctgtggcttttaatt

SEQ ID NO: 24729 - DNA, 201 bp, Homo sapiens
caaaagtggggttgaccattttcttcttcgctgtctccatgattttgctttttccaagatgtcatgtagttagaatcatacaatgtgttgtcttttcaggytggcttttttcacttagcaatatgcctgtaaggttccgccatgtcttttcttgccttgataattcatttctttttagctctgaatactattttgttgtct

SEQ ID NO: 24730 - DNA, 201 bp, Homo sapiens
tgttgtctggatataaccacagttgaattatccatttacctcctgaaaaacatcctgcttgctaccatgttctggcaatatgaatcaagctgctataaacrcttatgtgataagtcttgtgtggatataaatattcaacttatttgggtaaataccaaagagtgcaattactggatcatatggtcagagcatgctagtttt

SEQ ID NO: 24731 - DNA, 201 bp, Homo sapiens
taaccacagttgaattatccatttacctcctgaaaaacatcctgcttgctaccatgttctggcaatatgaatcaagctgctataaacacttatgtgataartcttgtgtggatataaatattcaacttatttgggtaaataccaaagagtgcaattactggatcatatggtcagagcatgctagttttgtaataaactgcc

SEQ ID NO: 24732 - DNA, 201 bp, Homo sapiens
attttgcattctcaccagcaatgaacaagagttcctgtttctccacattctcaccagcatttcatattgtcaatgttttagacatcagctattctaatagrtatgtagtggtatatcgttgttttaatttgaaattctctaatgatgtaagatgatgagcatgttttcatgtgcttattttccatctgtatataagctttg

SEQ ID NO: 24733 - DNA, 201 bp, Homo sapiens
aattccctttgctcctttgtgaaagatcagatggccatattcatgcgggtgtatttctgggctggctattctgttccattgatctaagtgacttttttctsaccagtactatattgtcttgataactatagttttatactaagtcttgaagttgggtagtgttagctttacaagtttgttcaatattatttaatgatgtgt

SEQ ID NO: 24734 - DNA, 201 bp, Homo sapiens
gcgctctaattgtctgttagacttttctaagagttttaaaacaaactcgggcctcaactctcccccagaggaattgactccacctcctctagggctggacyggaccacagactcccactatgggcgcttgtctattgtgtcaggctgcctgtcggggaaaaccacagtaataggaaaaatgtgttgtgcgttagagtagac

SEQ ID NO: 24735 - DNA, 201 bp, Homo sapiens
cattatcaattttcagcctctcttcttttttatttttaatttctttgccacctcttcttaatacataatgctctttcttccttcgttcctccccctctctstttcttccttcctcctttctttcttgctttcttctttcttttctttattctttctttttttttttttttcaaggtcttgacgtgttgcccaggctggagt

SEQ ID NO: 24736 - DNA, 201 bp, Homo sapiens
ttatcatgacaaatgctagtcaatgttgaatcacagagggctatatgagatccattttcattcttaaagaaaattattatatctttttattaatatggtgratattaactcagtaaataataaagaaaactaatatgaagtacaatttgtaatattctacttatgatgcatgatttttgttgcacaattagaaaatactta

SEQ ID NO: 24737 - DNA, 201 bp, Homo sapiens
gatttatacagtagtcttatgatccaatgcccatgtatgaacaaaggttactgttcctgtcttctaaattggggttcccagtgtaatacaggaagactacygtgtgctagtaaacagaaagcacaatccacatttgaccatattttcctcgttggatgtgtttatggatatattttattctgcttttatctttctgagatt

SEQ ID NO: 24738 - DNA, 201 bp, Homo sapiens
tgacaaatgctagtcaatgttgaatcacagagggctatatgagatccattttcattcttaaagaaaattattatatctttttattaatatggtgaatattwactcagtaaataataaagaaaactaatatgaagtacaatttgtaatattctacttatgatgcatgatttttgttgcacaattagaaaatacttaagttct

SEQ ID NO: 24739 - DNA, 201 bp, Homo sapiens
ttctttaaaatgagcaaagatgagctcagcaaataaggtacttgtaataatgaaagtactatatgcaggaatactggctttttgtttttaatctgcaattrgttaattaaatttcattgtagatgtattgcataaaatacatttgaaaggcaccattcttcctcataatacagctagtgaaggtccaaatttcagtgactc

SEQ ID NO: 24740 - DNA, 201 bp, Homo sapiens
ggttattctttaaaatgagcaaagatgagctcagcaaataaggtacttgtaataatgaaagtactatatgcaggaatactggctttttgtttttaatctgyaattagttaattaaatttcattgtagatgtattgcataaaatacatttgaaaggcaccattcttcctcataatacagctagtgaaggtccaaatttcagt

SEQ ID NO: 24741 - DNA, 201 bp, Homo sapiens
aatcatggaaatgaactagtgtccacataactgaaatccttcacatctggctatctttaggccctaaattatgtgaaattcactgagtattttccacagabttgtttactgttgtaaaatcttaaatcaaaatgttacatcaaaggaagagttgcatcaaaagaacctcagcaaaacctcaaaacaaccaaacactccact

SEQ ID NO: 24742 - DNA, 201 bp, Homo sapiens
tcgctcttgtcccccaggctggagtgcaatggcatgatcttggctcactgcagcctctgcctcccaggttccagcgattctccggccttggccccaccccscccccgccgacccccatgagtagctgggatttcaggtgcctgccaccaaacccggctaatttttgtatttttagtagagatggggtttcaccatgtgggc

SEQ ID NO: 24743 - DNA, 201 bp, Homo sapiens
tgacactcaatgtgtaagtgcccagttgaaatagtttccttatcttttctttgaaggtgagaaggctaagttccttttatatacaaaaatgtgttctgtcraacactatcactgcaaggccatttactaaaaatgtttatgggatggaatctttttcagcacttgctgtcacctcagcgggccccagagaggcttattcag

SEQ ID NO: 24744 - DNA, 201 bp, Homo sapiens
tatttatctatggaactcttctttgttagatattgaatttcatggattaatcccctagctttttgtctttggtttattttgattactctttttttttttttccttttttttttttgagacaaagtctcgctcttgtcccccaggctggagtgcaatggcatgatcttggctcactgcagcctctgcctcccaggttccagc

SEQ ID NO: 24745 - DNA, 201 bp, Homo sapiens
aaaaattcttttctcaaaatggacattttccagtattggatgaagtggtctgctctctctctttctgtctctctctttctctctctctctgtctctctctytctctctctctctctctctctctctctctctctctctatatatatatatatatatatatatatatggcaactagatgtatactttggaattcctttaagg

SEQ ID NO: 24746 - DNA, 201 bp, Homo sapiens
atcatccttacaataggctttatcttttggaaatacatataatattgatgtgctctggttttaatcatcacctgcctcttgcctcagcaagctctaggttrtattttaaaggagattaaatatattttcactgaatttaattgtatctaagtaatacctttcgaagagtcaaataatacagaaaagctcataacaaaaagt

SEQ ID NO: 24747 - DNA, 201 bp, Homo sapiens
cttcacttcgagttaactgatttaaatttaatttttctctcctcttccattgccaggctgggacctttggcctacaatcagcaaggggctgtgttccctgmaactgcaattcttttgggtctaagtcattcgactgtgaagagagtggacaatgttggtgccaacctggagtcacagggaagaaatgtgaccgctgtgccc

SEQ ID NO: 24748 - DNA, 201 bp, Homo sapiens
aatccaaacagtgttattgtaaagtctctgggcttcttagagcaaaagttttaaaaccatcatttatatgtttaatatatttttatctatttctagatttrttttaaaggcagtaaaataatctaacaggctcctgggtacccatggtgtttattatattatgaagaaataaaatattactcatacagtcgaaaccctaca

SEQ ID NO: 24749 - DNA, 201 bp, Homo sapiens
ttgaaaaaacaaaaacaaaacctatgtctgtagtatgtatatttgtgcatttaaatgtttgtgcccatggacttgtgtgtgtgtgtgtgtgtgtgtgtgtkaatgtatgtctatatatatatgtatggtgtttgtgtgagaggcaaagagaagagaaaaaagaatgacgttagcttatcaatatattataataaaattgtg

SEQ ID NO: 24750 - DNA, 201 bp, Homo sapiens
ggacctgtttttatgcttccaagatggcactttgaatgctcaggagaggaggaacattgtgccctcacatggcagaagagcaagagagagagagctctcamccctgtaagcctttttaatagtggcatcaattcattcatgaggacagagccctcatgaccgaaacacttcccaaaaggcccccctcccaacactgttgca

SEQ ID NO: 24751 - DNA, 201 bp, Homo sapiens
caaaaacaaacaaaataaaggattcaaatgggtgacatggccagtcctggttacagtatgagacagatgccggttacggtgggcaacagaacagatgctggctacagtggtcgacagagttcattttagttcaagcagaaggtagggctggtgcttgttacagtggccagtaggcctggtttctggttatagcacatggca

SEQ ID NO: 24752 - DNA, 201 bp, Homo sapiens
gtttctttctttttccctctgcattacaaatacatacgcaatactttttcaggttgttttttccaaaagcaacaataaactactagtggagtaaaaaatayggaactgaaagtccaactgtttgattaagtgtatgttataaccattgtatgactttgagtgaatttctatttttaagaaagtggtatttggaaccacaat

SEQ ID NO: 24753 - DNA, 201 bp, Homo sapiens; identical to SEQ ID NO: 5052

SEQ ID NO: 24754 - DNA, 201 bp, Homo sapiens
tatatgagatccattttcattcttaaagaaaattattatatctttttattaatatggtgaatattaactcagtaaataataaagaaaactaatatgaagtrcaatttgtaatattctacttatgatgcatgatttttgttgcacaattagaaaatacttaagttcttgagaatagttggaaagggttgtaatgatcagaaa

SEQ ID NO: 24755 - DNA, 201 bp, Homo sapiens
attcttaaagaaaattattatatctttttattaatatggtgaatattaactcagtaaataataaagaaaactaatatgaagtacaatttgtaatattctayttatgatgcatgatttttgttgcacaattagaaaatacttaagttcttgagaatagttggaaagggttgtaatgatcagaaacacatattatacctaaac

SEQ ID NO: 24756 - DNA, 201 bp, Homo sapiens
aataaacttgggcctgtagccaatagtttgtattccaggcttttaaaaaaaattcaaatacagaaacatcagattttcattgccataggggtcatgacatmttttaacataagtgcagaaactatctgtaatgaatcaaaacttaaatcagatgacattaagaccagctttgctattaccacagatggcatcacaattaac

SEQ ID NO: 24757 - DNA, 201 bp, Homo sapiens
tcataggtagaataaatgagagaattatggtgatctaaatatagaaagcatttaaattagagaacagctgaaattgtgcttctaaaacatttcagtgttgytcattttctatatgttacattgaaaaaagtaatatggaaatgtaatgttttcatttgcagatgcttaaatttagatacatgtttaatactgtaatcattt

SEQ ID NO: 24758 - DNA, 201 bp, Homo sapiens
agagaattatggtgatctaaatatagaaagcatttaaattagagaacagctgaaattgtgcttctaaaacatttcagtgttgctcattttctatatgttayattgaaaaaagtaatatggaaatgtaatgttttcatttgcagatgcttaaatttagatacatgtttaatactgtaatcattttgatcaaacagcagctat

SEQ ID NO: 24759 - DNA, 201 bp, Homo sapiens
tgctgtgtatgcccaactttatggctagatgggtcagaaagcatccagttcatgaaaggcagtttaggttgcatggtgacttgatgacctacagtcaaacrttcagtttctaccaaagcccagtaacaggccaagagttgtctctcaaatggagagtagtgatctgcagaagatggcagggccttgctccaaaatcctaga

SEQ ID NO: 24760 - DNA, 201 bp, Homo sapiens
attgaaaaaagtaatatggaaatgtaatgttttcatttgcagatgcttaaatttagatacatgtttaatactgtaatcattttgatcaaacagcagctatyatttattattcaatatttatatgtaaaacctgaaactttcatctaccttaatgatggtattgtgataaaagtacccatgtatcaccaagctttgccaatt

SEQ ID NO: 24761 - DNA, 201 bp, Homo sapiens
aacataatgttgtgggaacaggaagcaaaattttgctagtgggtcactagtggtgatggtgagtggtgccacttccgcttccaccccttgattctgggacmcgtgaacactggctatgggagaaacagtaccatattttggacactgattcaaggcatacacagccttctggagaactttgccccagtccggcaaagtatt

SEQ ID NO: 24762 - DNA, 201 bp, Homo sapiens
cagcagctatcatttattattcaatatttatatgtaaaacctgaaactttcatctaccttaatgatggtattgtgataaaagtacccatgtatcaccaagmtttgccaattctttttattccttaaagaatatccgacaatttgctggtttgtataagtttgagttaagacaccgtaataatgtcctgcagtatatatgtc

SEQ ID NO: 24763 - DNA, 201 bp, Homo sapiens
gaactttattcagtagcctccgtggtaaagtttgtatctgttctgatttccaaaagcactatctttgattgtgtaaagagaaagaaaaacaaatgaaaatrcttgtggtctctttcatctcatcgtgggatttttgcattagtatagaaatacagtgtaaatcagtctttccacacaaaagaggaaatcttctctattgtg

SEQ ID NO: 24764 - DNA, 201 bp, Homo sapiens
gacctttggcctacaatcagcaaggggctgtgttccctgcaactgcaattcttttgggtctaagtcattcgactgtgaagagagtggacaatgttggtgcyaacctggagtcacagggaagaaatgtgaccgctgtgcccacggctatttcaacttccaagaaggaggctgcacaggtctgtaaatatgacttaagtccta

SEQ ID NO: 24765 - DNA, 201 bp, Homo sapiens
ctacttatttttacgttacttaaaaaatgaaatacatgtcagtttgaaacactgccttaataactgtgtgcaagtactcagtaaaaatcagcagatgctcktttggttgtgtccctccctgtctgtgactttgattcagccagtcactcaaacactgctacggcttgaaagttaaatgttcgatttttctggtaccagtct

SEQ ID NO: 24766 - DNA, 201 bp, Homo sapiens
taaaacctgaaactttcatctaccttaatgatggtattgtgataaaagtacccatgtatcaccaagctttgccaattctttttattccttaaagaatatcygacaatttgctggtttgtataagtttgagttaagacaccgtaataatgtcctgcagtatatatgtcaaaatacatgggtcaaaaagacactctaaaatag

SEQ ID NO: 24767 - DNA, 201 bp, Homo sapiens
ctttaaatgaagtagctcaataacagaacagtgaacctaactggccccattttagtcaatctaatgcattcctgcacaggtatttatcatgacatttactytacactcaacctacatgaagatcaacatagtcacttttacgagagtagatttgcatccatccaataatctttctcaccagtgtaattagaaaggatacag

SEQ ID NO: 24768 - DNA, 201 bp, Homo sapiens
atatataaacacatacgcacaagaagactgtctctctgtttgtatatatacatacacgcacatataaatacacagagagagtgtgtgtgtatatatacacmgagagagagagagagagagagagagagagtcagtcttgctctgttaaccagctggggtgctgtggtgcaattatggctcactggagcctccacctcccag

SEQ ID NO: 24769 - DNA, 201 bp, Homo sapiens
atttataacatatataccttcacctgacttggagtttcataaggaatgcaacagcttccaattcatttactttctttttgcttaacaaagtatctgacacrtagtacaaaagttaaatattataaataaaagattaattgcacagatatttttaaaggagacagaaaagatttgaatatccaggaattccacccaacgatg

SEQ ID NO: 24770 - DNA, 201 bp, Homo sapiens
atagttcacagcatacagtatttattatttttatgattaactaatgttttatgaggtccttagagtgctagacactgtttgcatgaattattttatatgayctcaccacaaccttataaaaaagtttttattgtccgatgttttagacggcgtagttataggagttagtttcagccaccagttgtatatagagaagctgct

SEQ ID NO: 24771 - DNA, 201 bp, Homo sapiens
ctttatcaacttcttgtaggttattgtatttattggtgtataattgttcatagcagtgtctatgatccttttttatttctgttgcaatgtctcctctttartttataattttatttagttgaatcctcattccttttttcttagtttggctgaaggtttgtcaattttgtttatctttaaaaaaacaattcttacttatat

SEQ ID NO: 24772 - DNA, 201 bp, Homo sapiens
gcccaggtcagcaatgcagcaactcccatttttcttgatgaggatgtttttgctctttaggtctcgatgagcaattgcgggctttccttgggtgccatacrtttctgtgtgcaggtggcacagaccacaggcagctgaataagccaatttaagcagggctctggtgtccagcgtagcacatttcaggaagtcatagagaga

SEQ ID NO: 24773 - DNA, 201 bp, Homo sapiens
aggacccatggtgcttctggctttgtccttctttcttaagattgctttggatattttgggtcatttgtgatttcatatgaattttaattattaaaattctyattcttttttttagaactgttttttctacattttctttctttttttctttcttttttttctgaggtggaatttccctcttttcgctcaaggtggagtgca

SEQ ID NO: 24774 - DNA, 201 bp, Homo sapiens
ggccggtactgtgagctctgtgctgatggatattttggagatgcagttgatgcgaagaactgtcagcgtaagtcctgaactattgatgcccctgacagaaytgatgtattgtacctcaaagtagctgatgagttcttgagtgtggattgaagagtaggaaattatgtggaatacatggttgatagatgcatagaatataca

SEQ ID NO: 24775 - DNA, 201 bp, Homo sapiens
tagcaggatttccttctcttttatggctgaataatattcctctatctccctctctccctctctttctgtgtgtgtgtgtgtgtgtgtgtgtgtgtgtgtgkctgtgtgtctgtgtatgtgtgtatactatatttactttatccattcattcactgatggatacttaggccatttatttatcttgactgttgtgaatgatgc

SEQ ID NO: 24776 - DNA, 201 bp, Homo sapiens
cttactttccacggggactgttattgtaaaatctgttcttattcttttaatttaactccattattttgttttaaatgtaatgattgttcattatatttttytccaactgctttaaaagcaccaatccttctttgctgtatatgtatcaaagtccataaatattctttgacattatcctagccttgaataataaaaggaaaa

SEQ ID NO: 24777 - DNA, 201 bp, Homo sapiens
atactggcagtccaggcaaccctggaggctcctgccaagaatgtgagtgtgatccctatggctcactgcctgtgccctgtgaccctgtcacaggattctgmacgtgccgacctggagccacgggaaggaagtgtgacggctgcaagcactggcatgcacgcgagggctgggagtgtgtttgtacgtatactaactttgctg

SEQ ID NO: 24778 - DNA, 201 bp, Homo sapiens
actgaatgtgtataattataagaattatttcattttcttacaactttttctctttattttatactctcaccctattatctgtcctttttcttttttttttctttctttctttctttctttctttctttctttttttttttttttttgagacaggctcttactccgttgcccaggctgaagtgcagtggcaggatcatggct

SEQ ID NO: 24779 - DNA, 201 bp, Homo sapiens
tgtattctgcattctcaattaaaagtcattttatcttttactttttcttttattcctttttaagcaacaaatgaattaaatttcctttgttttatatatgrcctattaacctcaatggagaaagaggctccctttgtttgcttcaggacttacatattgttacagttagtccttaggtaaatgaaatgagaagagcttcac

SEQ ID NO: 24780 - DNA, 201 bp, Homo sapiens
ttgtgctggctttctttccttttttaaaatcccatggtatctcatcatctcttcttgtcctcccattctacaaatagaacatgaaattgaagccttttttwaaaaaaaaaaaactaattacagaattaatatatgtttactatgtacttactacaattagaaactatatataaacaaaaaagagagcttgcccatcaatcc

SEQ ID NO: 24781 - DNA, 201 bp, Homo sapiens
aatgctgacaaggagagaggttaaaaccaggaagccatgccttttagctgacaaaacattcattgaaatgctatctgggtgaagcactgagaaattaatcrtctgaatagtctaaattatagtacatgaagaatgcaacttgctagggagacataccttcagcattattcgaggttaatttaaaccaacatgtaaatgttt

SEQ ID NO: 24782 - DNA, 201 bp, Homo sapiens
tatttttgatagtctgtgattctgagccctatctatgctttcagtcaaattaccaatggtatgaaactctttaattttgtgtgtctcacgtttagagggtrgcttaagaggttctttaactgcatgactattgtgaggaggatacttatgagttgttcttcatttccatggggacaaggacaatgaaaatacagtataata

SEQ ID NO: 24783 - DNA, 201 bp, Homo sapiens
ttaaaaaaatctcataggaatcatcctgaataaaatgttcagaaccatcatttatttattttgtttcacatagaacctaccaaacacatgagaattttttkggggagaaatctgattggacatttgactgtgagtgaaatacacataagcagtggtgttaaagaaactgatcaatattttctttgcttcagtgttgggcaa

SEQ ID NO: 24784 - DNA, 201 bp, Homo sapiens
aatttttatgaatttttgaattaaaaagctcttaacctttggctacaatcattgttcgtaatacatttggaacaagtattttagagtttgggcattccaarttctatcacattatttgaatgccttcaatggtgacaaatctttatgctttagatgtaaagcaacattttgtacatgagttgtgtgatagtaagttggtag

SEQ ID NO: 24785 - DNA, 201 bp, Homo sapiens
ccctaagatatgaatgtggctggcatgttcaaagaccctcaaggatggggtaagagtggggaagagttgaaggatatggggaaggggaaaatatcgtaggyctttggcacactgtagttaatgtcttcacatttttcttgcaatgcaatgagaaacacagacatgtaatgatctgagttatgttttaatagggttagtatg

SEQ ID NO: 24786 - DNA, 201 bp, Homo sapiens
cagtaaaactagagattaaaataattgaccatggaatctaagacagtgatgagaaaccctcaagctacagcgatttcccattgtctccctaaatgctattrgtactgtagccaagacaagtctttcttttataggactatacaaggccttagaggatatttagtatccttggcctaaaggataaaggtaaagtggtacagt

SEQ ID NO: 24787 - DNA, 201 bp, Homo sapiens
atgaagtctctgcttcatgacctggtcacctccaaaggccccacttcctaatcctatcaccttgaggattaggatttcaacatatgaattttcaggggacrcagacattcaggccactgccctttacttattcaatttcccacttatgtaaaaagtgatcaacatgggatccaaagattggaataacaaaatgcttacaaa

SEQ ID NO: 24788 - DNA, 201 bp, Homo sapiens
atgatagtcctgcatttcatggcaattttcaatagcagtttaatggtcttaagtgggtagcataatagccaggtgaacaacaaaaaaaacaaaaacaaaamcaaaaaaactatttggcaaattgggatatgagaattgaggccaaaacttttagtccttgccaattttttttaaaacttcaattatcttgattcatattcc

SEQ ID NO: 24789 - DNA, 201 bp, Homo sapiens
gtgtggtctcggctcactgcaacattcgcctcccgggttcaagcgattcacttgcctcagcctcctgagtagctgggattacaggcgcctgccaccaagcygggctaatttttgtatttttagtagagacaaggtttcaccatgttggccagactggtcttgaactcttgacctcatgatctgcatgcctgagcctcccaa

SEQ ID NO: 24790 - DNA, 201 bp, Homo sapiens
atagaaaggtatatattcttattatagcagtgtctgccagggctgcagtcctgttgttagaaggctgtcagaattttaaatgtaagccttcctttcccagrtgttataatttaatcttctaactcctattaatttctgaagactgtggggccatcctatatcttagaacaaaatatagatacgtacattcctgattttttt

SEQ ID NO: 24791 - DNA, 201 bp, Homo sapiens
gtttcatagcttgggagtgagcagagctgtgatcccaaaccagaagggctgtcacttggatgtagcttttaatcactgtgccctagtacatagagaatgaytgagacaaggataggtgctattttagataggtaatcagaggagtggctattaccagaatggagggaggacacaagccaaagagtaggaagagcacatagt

SEQ ID NO: 24792 - DNA, 201 bp, Homo sapiens
gatatttttttctcactacttcttcctttctccctctttttacacaattaaaaaactaaagataaaagttggctctatagggaaaggttttattttttacrtttctggcaaatttgagatttctataaaattcttcataggtatataaaacagagtaagtatattttgtttaacttttaaagcagggtattattcatttgt

SEQ ID NO: 24793 - DNA, 201 bp, Homo sapiens
tttgtaccctcttttcagttttactcttttttatttcttttttttccccctttagggtaatgacttgagcatcagcacagcccaagatgaggtgtacctgsacccatctgaagaacatactaatgtattgttacttaaagaagaatcatttaccatacatggcacacattttccagtccgtagaaaggaatttatgacagt

SEQ ID NO: 24794 - DNA, 201 bp, Homo sapiens
cacatgagaccttaaaagtagaagagggggtcagagtgatgaaacaatggaagaagaggaaggagaagtttgaagcatgaaaaatatttcattcatcattkctggctttaaagatggagagtcccttgaaccaaggaatgtgaatgacctctagaacctggaaaagagcattggctgacaaacagcaaggaaatgggaacc

SEQ ID NO: 24795 - DNA, 201 bp, Homo sapiens
taattgagcaattatacttatgccatactttttgtagaataattctccctatacataggccttctttctgtttcttaaatactctaagtttcctatcttargtattttatatgctacatcattttctatctgtgcctctctttgtttttattgtactcatctaatctttctttaagaatatattatacattaatttactca

SEQ ID NO: 24796 - DNA, 201 bp, Homo sapiens
atgataccgtaatggatatttttttctcactacttcttcctttctccctctttttacacaattaaaaaactaaagataaaagttggctctatagggaaagrttttattttttacatttctggcaaatttgagatttctataaaattcttcataggtatataaaacagagtaagtatattttgtttaacttttaaagcaggg

SEQ ID NO: 24797 - DNA, 201 bp, Homo sapiens
gctgtgaggcaggatgctgggccactgtcctgtcacaggctccagcatgattcgccctgctcggtgacacaccagccgtgtgacttacccgaaggtgcacytgtctattttatggcaaccgtttgataaatgaaaattacctgtgtggaaagcatagtaagtatttgagaaatatttcaagaagagttatatggcacagtc

SEQ ID NO: 24798 - DNA, 201 bp, Homo sapiens
ttctcgagaagtatctttgtggccttctctgtatttcctgaatctgaacgttggcctgccttgctagattggggaagttctcctggataatatcctgcagwgtgttttccaacttggtttcattctccccgtcactttcaggtacaccaatcagacgtggatttggtcttttcacatagtcccatatttcttggaggcttt

SEQ ID NO: 24799 - DNA, 201 bp, Homo sapiens
tgtctttagtcattgcttctacatggcaataggaaatatgaccataaaaacctcagtgaaagtaacccacatttagagaaggcttgtattccttaatcccrcccctctacacaccccacccattcaacccatctgtagcctccctttcagctgttcttaaaagaccttcccttttaagggaacttacattttcccttcaat

SEQ ID NO: 24800 - DNA, 201 bp, Homo sapiens
atagtggcaggaaagagagagaatgaaaggggaagtgccacataccttcgaacaacctgatcttgtgagaatttattcactatcacaagaacagcaagggrggaggtttgctcccatgattcagtcaccacccaccaggcccctccctcaacatgtgggtattacaacttgagatgagatttgaggtggtcggtgggggga

SEQ ID NO: 24801 - DNA, 201 bp, Homo sapiens
tttctcgagaagtatctttgtggccttctctgtatttcctgaatctgaacgttggcctgccttgctagattggggaagttctcctggataatatcctgcaragtgttttccaacttggtttcattctccccgtcactttcaggtacaccaatcagacgtggatttggtcttttcacatagtcccatatttcttggaggctt

SEQ ID NO: 24802 - DNA, 201 bp, Homo sapiens
gcaataggaaatatgaccataaaaacctcagtgaaagtaacccacatttagagaaggcttgtattccttaatcccacccctctacacaccccacccattcracccatctgtagcctccctttcagctgttcttaaaagaccttcccttttaagggaacttacattttcccttcaatactaaatcccaaaagctaatagcaa

SEQ ID NO: 24803 - DNA, 201 bp, Homo sapiens
agtcttagtatgaaaacagttttgcttctcctgaggaatttttacttacctttatagatactgtatgcctcttaagaatcctatttgtattccctgctacrcgtagtctactaagatgcttagtagtggacttaggatgcactgcattgaacgttatggcatggttttctgtctactaattctttccctaatttatacaac

SEQ ID NO: 24804 - DNA, 201 bp, Homo sapiens
ttttctcgagaagtatctttgtggccttctctgtatttcctgaatctgaacgttggcctgccttgctagattggggaagttctcctggataatatcctgcmgagtgttttccaacttggtttcattctccccgtcactttcaggtacaccaatcagacgtggatttggtcttttcacatagtcccatatttcttggaggct

SEQ ID NO: 24805 - DNA, 201 bp, Homo sapiens
aatctggcctaaaatcacaagcaaacattccatgatggaatggcagatcatgctagatttgctggttattatcagttttattttacgttacctaagtagartttaagcctttcagttaaaatatgactcccaagcaaaaggaagaggattaatggattaactattgtttgtgttatcaataatattggcaataactatttg

SEQ ID NO: 24806 - DNA, 201 bp, Homo sapiens
tatctatttcagctttatgtttggatagatgtactattcatcctatctttcattatgagtcatgacctcgttatagataatcaccttctattcatctaagrcattcttatctcactataattttataatatctaccgtgctatgactcctgattagttcataaataaactgttttattccacgcattattagaattaatga

SEQ ID NO: 24807 - DNA, 201 bp, Homo sapiens
ctgccgagagatctgctgttagtctgatgggcttcccttccagggtaacccgtgctttctctctggctgcccttaacattttttccttcatttcaactttrgtgaatctgacaattatgtgtcttggagttgcttttctcgagaagtatctttgtggccttctctgtatttcctgaatctgaacgttggcctgccttgcta

SEQ ID NO: 24808 - DNA, 201 bp, Homo sapiens
attgatttttgtgaattttgctttggcagtgataccactatctatcaccactacccataggtgatagtgcatttgtcataggcttctttatgaagtctctygtgggtatttttgaccagggtgaatcttcaacttaattactgtgtaatgagacatgatttttaaaaatatatctagatgatgttctgatatgattttgaa

SEQ ID NO: 24809 - DNA, 201 bp, Homo sapiens
tcccattattaatgtgtgggagtctaagtctctttgtaggtcactcaggacttgctttatgaatctgggtgctcctgtgttgggtgcgtatatatttaggwtagttagctcttcttgttgaattgatccctttaccattatgtaatggccttctttgtctcttttgatctttgttggtttaaaatctgttttatcagagac

SEQ ID NO: 24810 - DNA, 201 bp, Homo sapiens
gtcaattttggaataggtgtggtgtggtgctgaaaaaaatgtatattctgttgatttggggtggagagttctgtagatgtctatcaggtccgcttggtgcmgagctgagttcaattcctgggtatccttgttgactttctgtctcgttgatctgtctagtgttgacagtggggtattaaagtctcccattattaatgtgtg

SEQ ID NO: 24811 - DNA, 201 bp, Homo sapiens
ttgttataatttctgttcttttacatttgctgaggagagctttacttccaagtatgtggtcaattttggaataggtgtggtgtggtgctgaaaaaaatgtrtattctgttgatttggggtggagagttctgtagatgtctatcaggtccgcttggtgcagagctgagttcaattcctgggtatccttgttgactttctgtc

SEQ ID NO: 24812 - DNA, 201 bp, Homo sapiens
acaaatgtatgtatatttataggatgcttaggcaaaatgaagccctgagctgtaaaatgtttcatgacagtctttgctgacagagaacgctgtaaatgggwgtcaggtccccacttagacagtgtaacagaaatccatgccagggtgaaataagagctggcagttaggatgatagactttgaaatcagccatcacagtata

SEQ ID NO: 24813 - DNA, 201 bp, Homo sapiens
taactagcattacagaaaaccaaacaccgcatgttcttactcgtaagtgggagttgaacaatgagaacacatgaacacagacaggggaacatcacatgccrgggcctgtcagtgggtgggggtctaggggaggaacagcattaggagaaatacctaatgtagatgacaggtcgatggctgcagcaaaccaccatggcacgt

SEQ ID NO: 24814 - DNA, 201 bp, Homo sapiens
attttgtatttcatatgtatatatgctgtattcttataataaagtgtgttagagagaaaagaaaatactaagaaaatcataaggaagataaaatatatttktgttaatcaagtgaaagttgatcatcttaaaggtcttcatctgcatcatcttcatgttgaaaaggctaaggaggaggaagaagaggaggggttggtcttg

SEQ ID NO: 24815 - DNA, 201 bp, Homo sapiens
atgttcaaagtataacaaagatgagaagtaagttgaaaaaagaattattagtgatatttcttctaccatatacatgttatcttggaattggaattttttcrtaataagaaatccattagcataaatacagtttaaattgaataagtaaatttcattaaaaacaaaatatttatttgggggtacattttataaatagctgca

SEQ ID NO: 24816 - DNA, 201 bp, Homo sapiens
caccaacgctctcatgtttctcataaaaaatgctcagctttatttggaaactttggccattgttttctttttcttctttcttcttctccttcctcttttgrgttaaaaaggccacagtctgacctacttatatgtgtgatgaaatgtgcagactctgccaaggctatttattctaatgatttatctactcaagataaaaag

SEQ ID NO: 24817 - DNA, 201 bp, Homo sapiens
aaaatccagatcatactgatttgttgccatggtatagtagtcagagaatcttgctctgggcagttacaatattttggagattgttttacataatagcaacwataacaggaacaatgataactgctaacttgtttacatttacaaaatgtcaaatactattctagattattcaattgaatcatcacaacaacgctatgaggt

SEQ ID NO: 24818 - DNA, 201 bp, Homo sapiens
aacaacgctatgaggtagttactgttatattgttttgatttccctgatggagacttgacacaaagagagactaagtaattcactcctgtcacacacagctwaaaagtggcagagctgagtgttttgccccaggtagtccagttctagaactgtactcttttccactatgctataccatcttcctaatactatctgtacaag

SEQ ID NO: 24819 - DNA, 201 bp, Homo sapiens
tcagtttccttctatggtgactctttgtaagccttatccaactctaacctgttgttatttatatggcagagtgaacattctaaattgcagatcctatcatstcattctcttccttaaattgtactatggctttccacttttttcaggatgacatacagtgctctcccaccatgatctaatctctgcttctctctcatctct

SEQ ID NO: 24820 - DNA, 201 bp, Homo sapiens
tcgccgtttcctttaatctatacactatgtgtcttcctaatacagagagtatgttgtttgcctatatatcataacaaattgaaaatgcatttataacttayaaagtatatattactaggtgctagaatttacactattatcctaatatacagaagctgggaaaagtaatgccatagagttgatttatgtgtgtaaatgtct

SEQ ID NO: 24821 - DNA, 201 bp, Homo sapiens
tagtgtgaaatgtttacagtattttaattttgaaaactatacttattaaaacagtatgacaacatttattgaatacatgttatgtgctaggtaccaagtgrggagttttatgtttattttctcatttcatcctaagagcaaacttcggaggtaggtgtgattcgtctcattttagtgaaaattcactgatgctctgaaagc

SEQ ID NO: 24822 - DNA, 201 bp, Homo sapiens
ctaagcacatcatcttcttctatgtgatgttttgcaaatctattcataggagatttatattttcaagtgtgctcaaatggatctgtgttggggaaagataygtgaaataagaaaataaaagctaatccatttgttttaaaattttgtctgcctaccacattttgttggacttcttgttatatgagaactcctaattgtctg

SEQ ID NO: 24823 - DNA, 201 bp, Homo sapiens
tgtagggatttaggggatacttttaatgttatattctatgccttaaaggaaatcttcaatacttgtgcaatacactttttctccccaaatctatttgctcstcctctttggtccctcagtttatattatcgcctctatttcaggttctgggcgacatgcatatctgttcttttgttgttgttcttatctttcctcaaccat

SEQ ID NO: 24824 - DNA, 201 bp, Homo sapiens
atctctggtggtctgttccagaactatgtccttgactctgtcacattcatacttttcatcactactttttatacttctgcaatttaggtcacccaatacasgttatcttatcaggttaaactgattgtagtggtcacattgaaaaagaaaaaaaaaatcccaaattcaggacttttcccaaccagttctaattaatgcacg

SEQ ID NO: 24825 - DNA, 201 bp, Homo sapiens
attttcgtattgctataaagaaatgcctgaagctcggcaatttgtaaagaaaagaggtataattggctcatggttccatcaggctgtacaggaagcatggytggggtggcctcagggaactttcactcatggcagaaggcaaagctggagcaggcatcttcacacaggcagagcaggaggaagtgggggctggaggtggca

SEQ ID NO: 24826 - DNA, 201 bp, Homo sapiens
ttaaactgattgtagtggtcacattgaaaaagaaaaaaaaaatcccaaattcaggacttttcccaaccagttctaattaatgcacgtgtgaaaggacatarttattgtgaaaagaaatgctatcaaaacagtctaatggctacaagaagaaaaagaaaagaagaagaaggaggaggaagaggagaaggagatgaagaagaa

SEQ ID NO: 24827 - DNA, 201 bp, Homo sapiens
aacatgtatatagcattgatacctctatctgcagaatgtaagaaattgtaactgtatacatgagagtatattataaatgcagtagttcctgctccttggcrtgcagatacacctcattactctgcaatgcaaaactaaaaatatacatgttttttaaatctgctaaaagattcaatatatgttaattttggaaattatacg

SEQ ID NO: 24828 - DNA, 201 bp, Homo sapiens
ttccttaactctgtaaaattggcaacttccaaccacttggtgaaaccggaagtctgaagttttatcctatcttgatctacagagatataatcaacattgtygtttttaatagccagttgccaccaaagatctgatcacaataatgcagagacctttatatattatcactagaacactgttgtacatttataatcaaaaatg

SEQ ID NO: 24829 - DNA, 201 bp, Homo sapiens
tggttattatcagttttattttacgttacctaagtagagtttaagcctttcagttaaaatatgactcccaagcaaaaggaagaggattaatggattaactrttgtttgtgttatcaataatattggcaataactatttgtctatggtgctgtgtcagttacaaggcactctgccatgcattcttccatctgatcctcacca

SEQ ID NO: 24830 - DNA, 201 bp, Homo sapiens
ttaagccaaaacaacaggtaataggaaattgtcctgggcaaaccagaatgtatggccctgctagcattgtgtaaagttaccaaacttccagtgtcataacmcggagtgaaatacacttaggtgaatggatgcatagatacgtggaagagtcaattaatggactgcatttagggttcatccagttggattctctttctactt

SEQ ID NO: 24831 - DNA, 201 bp, Homo sapiens
aagatctctagcacagaaaagtctggttacaagattacagagagagagagaaaaaaaaaactgtagtgacttgtctagggaactgtgtggttgccacataraaaatgtggaagggagtgatgggagacaggctatgttcctagcaattgccttgactcaccataattatttcacctactgaataactgaataaattgagta

SEQ ID NO: 24832 - DNA, 201 bp, Homo sapiens
tcagcatcaactgatttagtgaagcagcaaaaagaaaaatggtgtgtgcagcattatctttctgccacagatacatgtttttaatttccaagtttccaatrcatcattcagttttatctaacgggaatgcagctgagagaagtttgtaacaacccaaaactacatgctaatatagtttagttttcaagtcttgtggagtct

SEQ ID NO: 24833 - DNA, 201 bp, Homo sapiens
ctcacacaattccctaaaggaaaactacaaaaaggatgtttcttgagataggaatacaaataaacttttgcttgtttgtttgttttgttttaaatccagtrataagaatgaatgttttctgtatttgctttttttaaaaaaactctatattttatgtgcagacatttaacataaaatcttttcccaatgtctttcttagat

SEQ ID NO: 24834 - DNA, 201 bp, Homo sapiens
gtagccctgcagacaaaatgataattgagagaagattagggagttgtgaacagaaagaataaactcaagcttcaagtgagatggaatccctactccctccrgaagaccttttatgtgatataaggaaacagtgcaatccaccataatatcataatttgaaaaaaattgtatcaactattcaagaattactacattcctata

SEQ ID NO: 24835 - DNA, 201 bp, Homo sapiens
tatggtagaaatttaactcttatgacggagtggcagtgctcacacacccttagaagtttccagtgccttcccaaggaaagatcagactctttgagcattasaaaccctctgtaatctgactacctttccaggctccaagccctcaactccattctatataatgccaagtttggcatttcttgcacttatctagacatcatt

SEQ ID NO: 24836 - DNA, 201 bp, Homo sapiens
ggaggcatgatgagtgattactgactcatttccacggcattagttcaagtcctcattatctcttaccaaaacaaatatggtagaaatttaactcttatgayggagtggcagtgctcacacacccttagaagtttccagtgccttcccaaggaaagatcagactctttgagcattagaaaccctctgtaatctgactacctt

SEQ ID NO: 24837 - DNA, 201 bp, Homo sapiens
ctacaagaagtatacaattgctcctctgatgtgaaagcatatgaagaaaataagtgtccaaagctgcataaatatttgcacccctttgagagtatgagaargtgtgtgttttatgttgtgattgataggacaactttcatggcccactttgaactcttagcaggaactttggaatgtcctgagggtctgtctgcctttgta

SEQ ID NO: 24838 - DNA, 201 bp, Homo sapiens
ccaccacgcccagctaatttttgtatttttagtagagacaggatttcaccatgttggccatgttggtctcgatctctcgacctcgcaattcgcccgcctcrggctcccaaagtgctgggattacaggcgtgagccaccgtgccggtccctcatgctccatttttatagtttctccaagaagcactttctgacctctagact

SEQ ID NO: 24839 - DNA, 201 bp, Homo sapiens
ccacatagttacagaggtgtgtgttttcttctttgtttagcactttaaagatgtggcaccattattttctggatttcattcatccttatgacaacatagccattatttgtttctttgttctatatatatatatctttaattcactagatgatttcaaaaatttttttatatctgccttttgacacttataccatgtatgat

SEQ ID NO: 24840 - DNA, 201 bp, Homo sapiens
tgaagcttagttttatgaattaccttttagccttctccagtcatgtgggaaaactttcctgcctcattaaatctttaatgcaatgtgcaccatgcacactrtattgttatttgtgacattaggttatatattgcatagtaactataatattacttgcaaacaagctggtttttccccctgaaggtagaattaaaacaggta

SEQ ID NO: 24841 - DNA, 201 bp, Homo sapiens
ctggtttttccccctgaaggtagaattaaaacaggtactcatgggaaacagctacttgtgttcttcttttcttaatggggtgaagctgaagaacaggaaaktgaatggcttagcccagaaccatctccaggaatggaggtaaattttttcctgcagtgccttctcaatttgatatctgaatctccctgaagagaatttgcc

SEQ ID NO: 24842 - DNA, 201 bp, Homo sapiens
gaaggtagaattaaaacaggtactcatgggaaacagctacttgtgttcttcttttcttaatggggtgaagctgaagaacaggaaattgaatggcttagccyagaaccatctccaggaatggaggtaaattttttcctgcagtgccttctcaatttgatatctgaatctccctgaagagaatttgccttagtagatatggag

SEQ ID NO: 24843 - DNA, 201 bp, Homo sapiens
agcattacagccacgactctttatacagcagccaccctcttctgtgcctttgccaatacgttccctctgcctggaagattgcagccctttcactcctccayccgagactaactaatccctgttcagctcccaaaagtcagcactatcatcctgaaaatgtccttgattgggcctaatctgagttggttgcccttttgtgtg

SEQ ID NO: 24844 - DNA, 201 bp, Homo sapiens
gtcttatttacatttaaacggccctttttcaaaatattgcaatttgatttgaaaaagttaacagatgtggaaaggaacaatgcctttgttatgtcaagatrtccgtttctagcaaggcattcattcgataaactatttttaaaaatgcactcattctgccttgcatatgaaaatgagagggcttgacatttcacattacaa

SEQ ID NO: 24845 - DNA, 201 bp, Homo sapiens
gatgagcataaaagtggtgtactactgaggaaattatattctcccacattgtttttgatccccttcaattttgacacttgctgcaaaagactttatcttgrtaagatggcaaagataacagagctagcctgaccataagattcagatgccctgttctgtttctcctttggcaaatgtggcttagtataaagtgtgagcaaa

SEQ ID NO: 24846 - DNA, 201 bp, Homo sapiens
tggatgaagtggtctgctctctctctttctgtctctctctttctctctctctctgtctctctctttctctctctctctctctctctctctctctctctctmtatatatatatatatatatatatatatatggcaactagatgtatactttggaattcctttaaggtgaaaagagttctctaaatgtaaagtgttgagtgaa

SEQ ID NO: 24847 - DNA, 201 bp, Homo sapiens
gaagatacatgcaaaacctgacagttgaacagcctatcgaagttaaaaagcttttcgttgggggtgctccacctgaatttcaaccttccccactcagaaayattcctccttttgaaggctgcatatggaatcttgttattaactctgtgtaagtggatctcctcattactactactaattttttatttttatttcttgcta

SEQ ID NO: 24848 - DNA, 201 bp, Homo sapiens
gaaatagttccaatattattcatagtggcttgtataattatgtcctctctcttcatccatcatcttttctgtattttcaaggcataaaaataagagggaakagtcagctaaagcatttgacttagttgacaattctttgatagctcatgcatctctaaaatttagtactatattattgccaacattatgtatttaaatgaa

SEQ ID NO: 24849 - DNA, 201 bp, Homo sapiens
tcagaatctctctaagaatcaaagactgatgagaaacctctgaaagctgtgaaaagtgtgttattgtttttaattgcttccctaaagaatgagagaaggcraagctgggaccctagtggtattgatgggctgttgctccttatccatgatgtgtaagagtgaggaactaagtctgaaaactttttaaggggaaaatagcag

SEQ ID NO: 24850 - DNA, 201 bp, Homo sapiens
agaatgtatccttagtgctttcaaagttccctcaacattgctttcaataacctattctaataagagctgttttttttctatcaataattacacaaataatktgtatcacttaaaaacaaaacttgaatatctaccaaaagctgtggctttcaattagagtattaaccacataatttcattttgtaactctttctctctgag

SEQ ID NO: 24851 - DNA, 201 bp, Homo sapiens
aagacccagtagggtaccctatttcattaagaaatgtgtctctctcatcacaggtttagaagatgagttctagctttttgttatttaataatgataattcrttgaatcaaaaccaaatcactttctggaccaactggcagctgttaatataacctgtaaattgatctttttttaaagcaaaatttccaacagctcagtgcc

SEQ ID NO: 24852 - DNA, 201 bp, Homo sapiens
tcaagactgacaccccaaagcatccttaatctataataaacacaggagtacagggaagctcacctccactttgtttacatttctatgggcaaatgtgccgwctttctagtgagatgtgaggaatttaagtgcccttactgcagccttgggaatagaaacaggatcatcaacagcctccactcctgccatcctcacccatgc

SEQ ID NO: 24853 - DNA, 201 bp, Homo sapiens
ttgtgtaaatttaatctaattttttgatgaaacaatatattatgaaaataaattaaagatagacgagagcagaagaaaattgagccatgaataatttcaayagtggggaagagaactttggaaaagtttaaattagagtagaaatgggtaagaggagctcaggaaagtatttatttgcttttctttaattccccattgtgt

SEQ ID NO: 24854 - DNA, 201 bp, Homo sapiens
aactagtttcactagcagaaaagaaaaataaaaatataaaatagcaaataatctttaaagaaaactgattttcttattatgctgaaatttattaaagactrttgtgttgactgaagaatatgtttaaatattttgtggaaggcaaagctttcattcaggaatgacaagtgcaaggactgtaattctaaagaaattaaagaa

SEQ ID NO: 24855 - DNA, 201 bp, Homo sapiens
tagttttagggtctgacttctgtaacagtttgttcttttaaaggaagcacagattgatacaacgtatttaacataatgagtaatgtctacttatttttacrttacttaaaaaatgaaatacatgtcagtttgaaacactgccttaataactgtgtgcaagtactcagtaaaaatcagcagatgctcgtttggttgtgtccc

SEQ ID NO: 24856 - DNA, 201 bp, Homo sapiens
tcattcataagccactcattcgaaacatcttcccagatacttagttttatgaaattctcaagactgacaccccaaagcatccttaatctataataaacacmggagtacagggaagctcacctccactttgtttacatttctatgggcaaatgtgccgactttctagtgagatgtgaggaatttaagtgcccttactgcagc

SEQ ID NO: 24857 - DNA, 201 bp, Homo sapiens
ggtaagcactgcttatacagtaagcactgctctttccaatatacatatgtacacatagtgtatgggtgaaaactgagactgtgtggcacatatgaaatgartgacctttccagtgagcattgaagattttaaaatggaggacagaaagaatgtgagatttttctagacaagagatggaatttcctttatcccaggtagcgt

SEQ ID NO: 24858 - DNA, 201 bp, Homo sapiens
ttttgaaatgacatttttatgaatagaaagactaagtgattttcattttaattatgccataagtcttttaaaatgtactttgggaaaaatattgggttacmtttaaacacttcactaacatgcagtaggaaataatactcagcccaaaactgacatggaattgttttacttaccctaagaagacaaaaataagtatgtcat

SEQ ID NO: 24859 - DNA, 201 bp, Homo sapiens
ctatgtggcatgcattccttgtcttggatggctttgaagatattctcaaacattatttttgcaatctttgaaaaagtacaaaaggtagataactttgtacyctttgaatattgcatgatagcaacaaaaatgaaaaatctatagaaaaaagtcaggtggtaaataaaaatcgaaagtatctttatatataaacagtgtcca

SEQ ID NO: 24860 - DNA, 201 bp, Homo sapiens
attttttagcatataaatttaaacataatggtaactatttttcttcttaatgaaggacacatctaaaataaatcatttggcttaaaattagcaacaacagyaataaccaaaacagcaatgactaacatttatttagtgtttactcggtgtaaagtatttttctaaacaccttccacagctggtgtgtaatgctgtgagcaa

SEQ ID NO: 24861 - DNA, 201 bp, Homo sapiens
attgatttgtccaagaaaactcagcccatttatcaggcatttcatcataattaagaattttgttaatttccacatcaattgtgcttatgtgtacaacaaaygcaagaaacacattttcacacactataaatggacaaatacccaaaacggggaaagttgtttctaattacaaaagtgtggttctcatatcacaggacaaaa

SEQ ID NO: 24862 - DNA, 201 bp, Homo sapiens
aaatttataaagcttaacttgctttaaaatttgattataaattatctgaaaaatatttttggcaccagaacaaaatctaaacttctgcaatagtgtaggtstatatttaaaagacattttaactcaaagtccatttgaagtaagccaggaagtattcaatgtcacatgggaagatttcatgcttgcttcttctcatagttc

SEQ ID NO: 24863 - DNA, 201 bp, Homo sapiens
gccttaatttgtggatcagtggatttttgaaatgacatttttatgaatagaaagactaagtgattttcattttaattatgccataagtcttttaaaatgtrctttgggaaaaatattgggttacatttaaacacttcactaacatgcagtaggaaataatactcagcccaaaactgacatggaattgttttacttacccta

SEQ ID NO: 24864 - DNA, 201 bp, Homo sapiens
tttaatagttgtaaacataagtatggctttgacctctttggacttcaatcacttcatctgtaaaataaggaggaggacaattgctctgccagcttcaaaargtcaccgcaagaattgaattagagagctgcaaaagcacttggctagtggtaacccagcacacaaatatgaagcatttctatcttatctacttcatcccaa

SEQ ID NO: 24865 - DNA, 201 bp, Homo sapiens
attactaaatgagtatgtgaggacagagcagaggaaaaggccaagggttgagcactgtggtgctctattatgagaaagttaggaaggattaaagttggcastgaaggggattgagaaggagtagctgaagcggtagaaggaaaacaagaacagtgtgtcctggaagtcagtggagtaatcacttgtctcaaatgctgctaa

SEQ ID NO: 24866 - DNA, 201 bp, Homo sapiens
aaagtggcctaaagtacaagtaagcagaaacatggctcaaaatgttgagaacattcttaagtggaatatagcatgttctaaggtttcaacttgtgaaccaycttgaattagttattgcagtgcccaacagatatttagtattgctgtgtgtccttcaaatgtttacaatattccactgtgcctttgtgagttcactgcagc

SEQ ID NO: 24867 - DNA, 201 bp, Homo sapiens
gcagtttcagtggaatggaggaagaccaatggaataataggagcattgtggaggaataaaccaaaatgtacctatttaccatccagagccagactcagagyctttactctgtgctagaaacacaatgaccaattgttgcattgttccctttccttgagctttctacagctcacctcgcttcttcaaacatgtacaatcaga

SEQ ID NO: 24868 - DNA, 201 bp, Homo sapiens
cctttggggtagtatataccttctcaaacttgagtatcagattggataatgctatccttatttccttttccacattgacttttgtgcagttcttgcttttrattacagtctcttctgaaaacctttcttaataaagatataaagtggcctaaagtacaagtaagcagaaacatggctcaaaatgttgagaacattcttaag

SEQ ID NO: 24869 - DNA, 201 bp, Homo sapiens
tcatattatccatcctcctctacatcagggtccacaacccctgggccacaggaggatattggtccgtggccttttagaaaccagaccacacagcaggaggsaagcagcaggcaaaggagcaagcgcagcttcattagcatttacagctgctcctcattcctggtattactgtactgcctgagctccacctcctgtcagatc

SEQ ID NO: 24870 - DNA, 201 bp, Homo sapiens
catttcagaagaattataataaggaatatagcatctttaacccatttctcatttgcctgaagaatacttgcagacagcatttgtggcttaatgtttacccygagataacttgtggcttactgtcctaaccttatccccaaagtttgccatgaaatatctcacttttattattatttttgcataggtctagcatattgactt

SEQ ID NO: 24871 - DNA, 201 bp, Homo sapiens
acattccagagaatcaaaattgcttgggatgacatcgggtactctcttaggctaagactatatgatgagtccttttatatcagctgccttttttacagtastttttcttctactttcctgtctgtgcttttttctttgagactgtcacatttcaattctttatatctctgctttattttaccatttcagaagaaacaccaa

SEQ ID NO: 24872 - DNA, 201 bp, Homo sapiens
caaagaggagaatatttgaatgttgctcatcaagggcattcttactgttcagctgaccctgcattttagcttcttgtttatttttcatggttttaacccascattaagtagcatggtttttagcatgaaaaataaatttataaatttataaagcttaacttgctttaaaatttgattataaattatctgaaaaatattttt

SEQ ID NO: 24873 - DNA, 201 bp, Homo sapiens
tgattcaattttttaaaacccttaagtatttgaagacataattttagttgtatcagtgagataacatgcaaataattttacaaaaaaacaagcaattcttyagtaatagcttagtttagctaaacttaaaaattgaaaggaagtaaaacaaaaatcaaatcggggaaaaaatctttcttcaaatggatccatgttttgcac

SEQ ID NO: 24874 - DNA, 201 bp, Homo sapiens
gctctatgactacacacacacacacacacacacacacacacacacacgcaatatcatgtattttcttaaggaaaataaagaaaaaatgaagtaagatttgyataatgaaaaacattaaaatgaatttcaatcatctttttgtaagtatgcatatgctgaaactactgtgttgtttataagctagatattaaattaactttc

SEQ ID NO: 24875 - DNA, 201 bp, Homo sapiens
tctcctgcctcagctggactacaggctgtgttgaataaaaatcaacaatttttactcaaaagtgattataaataactatacttttaaataaaaggaaattmttttctgaagaactctcttaaaggtgagcttagtgcttaataaggttcatatcgtattgtacactttccagctatctctaggcactgtgacaacactgac

SEQ ID NO: 24876 - DNA, 201 bp, Homo sapiens
ggagagaaatgttctaaatgtgcacccaatacctggggccacagcattaccactggttgtaaggtgagtgaaccacttttttgctctgataattttttggrgagatttttgttttgtagagctctgtaattgggcatttcaaaattcaatattacatcacaaaataatgtagaagtattactataatgtgattacagatat

SEQ ID NO: 24877 - DNA, 201 bp, Homo sapiens
atttatctagcaaggttttgagaaaataagacattggtttaatgcaggggtcctcaaccatctatagcctgttaggaaccgggctgcctagcaggaagtgmgtggttggcattaccacctgagctcagcctcctaacagatcaggcaggcattagattctcatagaagctcaaaccctattgcgaactgcacctgcgaggg

SEQ ID NO: 24878 - DNA, 201 bp, Homo sapiens
ctgcacctgcgagggatctagcttgtatgctccttatgagagtctaactgatgcctgatgatctgacgtggaacagttttatcccaaactcctcccctgcrtctgtggaaaaattgtctccaacaaaacaagtacctggtgccaaaaattttggggaccactggttaatgtatgttagtgatcagaacatttccagggcct

SEQ ID NO: 24879 - DNA, 201 bp, Homo sapiens
tatgactagaggtatagctaagaaaaaagactatagggagaaattaatattgtaggacaaagcatttaattctagaatgatcccactaaggtaagaccacygtcatcggttgcaaaattgctgaatcactagggttaatagttacagatcctaaatactcctcacatgttttctttcctcgttacttaacttcccacaccc

SEQ ID NO: 24880 - DNA, 201 bp, Homo sapiens
aggaaaaacattcaatattgacaaacaccctaaaaattatttaaattgaaagaatagtgcaaaataatcaaggaaaagagagaatttctgttttttttttwaaaaaaaacagcacgttttaagtttctaatctttgcgttgtcaaatactctctctctctcttttgctacctcatagaaatttaatccatcaggatacgaa

SEQ ID NO: 24881 - DNA, 201 bp, Homo sapiens
ggtatatattcttattatagcagtgtctgccagggctgcagtcctgttgttagaaggctgtcagaattttaaatgtaagccttcctttcccaggtgttatwatttaatcttctaactcctattaatttctgaagactgtggggccatcctatatcttagaacaaaatatagatacgtacattcctgatttttttctccata

SEQ ID NO: 24882 - DNA, 201 bp, Homo sapiens
accttttagctcttattacaatgttctgcttaccttcattttatgttaacatatctgtaaagcaaggtcctttatttctcttctcttctaattaactagaygctcttacatattcttccagctgacacttttatgcactattttaatctcttccacaaattttaattacaatcaaaattactggaattttgattgtaatta

SEQ ID NO: 24883 - DNA, 201 bp, Homo sapiens
agcaccactatcaatccagcagagctggctgcccattgcatcatgtgaattccagctgaatacatattagaattatataattgattgagtatgcaaaccckatggatttaccctcaagtctgaccaacattactataaatgcagaggaaacattagggagataattttgcttggataattataggcattcatgacccattg

SEQ ID NO: 24884 - DNA, 201 bp, Homo sapiens
ccgtaggcatgggaccctccgagccaggtgtgggatataatctcctggtgtgccgtttgctaagaccattggaaaagcgtggtattagggtgggagtgacscgattttccaggtgccgtctgtcacagcttcccttggctaggaaagggaatttcctgaccccttgtgcttcccgggtgaggtgatgcctcgccctgcttt

SEQ ID NO: 24885 - DNA, 201 bp, Homo sapiens
aaaccatactttgcattatggtattttttatcttttattgcctttagccagtatccttaggaatgtgttacagaaaggaagatatagacatcttattattrtaaaactcatccttcagtattggcaggggattggttccaggacccccccccacagatatcaaaattcttgaatactcaagtcccttttataaaatggcat

SEQ ID NO: 24886 - DNA, 201 bp, Homo sapiens
gaattgctatatttacactagtcactcttctctcttcagatattttatgtcttacagtaaactgttttaaggttgtctatatcaagcacgcatttctcatwtaaaaattctttctatgtatcttacattttcattttaatggtagtaaacattacctgttttgtttcaacatagtaaatgtactaactggtcattattggt

SEQ ID NO: 24887 - DNA, 201 bp, Homo sapiens
aagtctgaccaacattactataaatgcagaggaaacattagggagataattttgcttggataattataggcattcatgacccattgttgtctctttatttrttgtgcatttacttggataatgggttctaattgttgttcctgaaaaagaaagaaagtctgcaagcattaaaacacaatccatcagtgccaaagggattgg

SEQ ID NO: 24888 - DNA, 201 bp, Homo sapiens
ttgctgccaccttgcagttcagtctcagactgctgggctagcaatgaacaaggctccgtaggcatgggaccctccgagccaggtgtgggatataatctccyggtgtgccgtttgctaagaccattggaaaagcgtggtattagggtgggagtgacccgattttccaggtgccgtctgtcacagcttcccttggctaggaaa

SEQ ID NO: 24889 - DNA, 201 bp, Homo sapiens
ctggcatttttagcacagttatatttgctttatatgattaatttagaagcatttataaataatgcagtttaatttcaattttgttaggattaaaattaccrtctttatactgtcctcttttgaccaattgactattatgactatttttgttctctaagaattctaaaagcatgtctattttctgaggaatccctagatgaa

SEQ ID NO: 24890 - DNA, 201 bp, Homo sapiens
caagcattaaaacacaatccatcagtgccaaagggattgggtttccagtgtccaataatattatttcctaaaagatgtatattctaatttggtataattaygttgatcctgatttttaaaaatgcatataacacagtgataacaataccagtaacaccaagtatttaatgattctttcattttcaaaatgttttcacttag

SEQ ID NO: 24891 - DNA, 201 bp, Homo sapiens
tccagaccctgtttgcctgggtatcagcagcggaggctgcagaacagcagatattgctgaacagcaaatgttgccgcctgatcgttcctctggaagcttcrtctcagaggggtactcggccgtgtgggatgtcagtctgcccctactgggtggtgcctcacagttaggctattcagggctcagggatccacttgaggaggc

SEQ ID NO: 24892 - DNA, 201 bp, Homo sapiens
tcttcaatcactgataccctttcttccagttgatcgaatcagctcctgaggcttgtgcatttgtcaggtacttctcgtgccatagttttcagctccatcargtcatttaaggacttctctacactggttattctaggtagccatttgtcctatcttttttcaaggtttttagcttctttgtgatgggttcgaacttcctcc

SEQ ID NO: 24893 - DNA, 201 bp, Homo sapiens
aaaggccttttctgcatttattgagataatcatgtggtttttgtttatatgctggattacgtttattgatttgtgtatgttgaaccagccttgcatcccgkggatgaagcccacttgatcgtggtggataagctttttgatgtgctgctgcattcagtttgccattattttattgaggatttttgcattgatgttcatcag

SEQ ID NO: 24894 - DNA, 201 bp, Homo sapiens
caaaggccttttctgcatttattgagataatcatgtggtttttgtttatatgctggattacgtttattgatttgtgtatgttgaaccagccttgcatcccrtggatgaagcccacttgatcgtggtggataagctttttgatgtgctgctgcattcagtttgccattattttattgaggatttttgcattgatgttcatca

SEQ ID NO: 24895 - DNA, 201 bp, Homo sapiens
gggacgcttcttctctagaaagactaaaattaatcaaggctacaatgtagtgtttttttccctaatgactttagcgttaaaagaccagcaatgtttcttargtacaattcttgttacctgctttctttataaaactgtaggattatcaatctgagcattacatgtagactaaattttgaaatattaaaaaacggatacgtt

SEQ ID NO: 24896 - DNA, 201 bp, Homo sapiens
acttgttttcaaacatcgatttcgggttcatgccatcaaattaaaaaattcacttaactgagtttaatttgctttcacttaggaagcagctgcctttcaakataataaaataaacagatacaataatatttggtcagctgtggcttttaatttaaatgtttgatttaatgttgtttagtttgctggattccaaaatattct

SEQ ID NO: 24897 - DNA, 201 bp, Homo sapiens
attgttttatagtaaagatgcttgtaatatcaaaacaagtatgtttttaaaaaattaatttcatcctattacatttcacattttatatttgatgtgggttrgaggagccccttagagattcttttttctttgtagagaagttttgtagagatcaatagtgtaagaatcatacaagtgtaaatagttttgtttccttttaat

SEQ ID NO: 24898 - DNA, 201 bp, Homo sapiens
aattgagagattatatccttccctgtttttcattatatggtcagctttcactggcctgagtccacattttaagctcaactatatacaaataatttttcagwatactgagagtaggattaatgaaaccagtctggagagcagtcacagaatgagaatagatctttcccatagtatcactatgtgactaactgattgtactga

SEQ ID NO: 24899 - DNA, 201 bp, Homo sapiens; identical to SEQ ID NO: 5037

SEQ ID NO: 24900 - DNA, 201 bp, Homo sapiens
agacacttaatgacctagggaaactatcctttttaaaaatattttataaaaaacattactgttataatgtgagctagaaactctgagatatgaattgaatmtttgcatacaatcctgaagacgagattttaatttccacaggttattcagagaaaaaaaaaaagggagctaaaggttgacgcaaccttcatgggaagtcta

SEQ ID NO: 24901 - DNA, 201 bp, Homo sapiens
gcaaataacaatgtaactatttcgaatgtttatattctttaatttctggcatcacatagcttataggttaaataaaatatgaaagagacatgtgaatctcwgcctttgaatacttaggatgtgtttgaatatataatattattgaagttgttatagattttcatcagttatataataaaatatattattggcacaaggctg

SEQ ID NO: 24902 - DNA, 201 bp, Homo sapiens
gttgacctttgggctcactcaagagatcatattgaatgcacgttgttaaaattaatatagagaaatgtattccaagacaataggtaaatttaaggaaacawtcaattcagccatattctctagaaaattgagaatgctctagatgttttagtgctctttcctacacattgttttatgtgcacatgggagattatgatgggt

SEQ ID NO: 24903 - DNA, 201 bp, Homo sapiens
aaaataattcattatgcaattattttactgcaaaagcaaaaggctgaaaattattgttgaagatcccatgtatttttggcacattcatctctataaaatawgttcttaaaacactccccagttaacacttattcatcagcatgacaccttgctgaatgacttgaaattataattcatagataattattttatcttggagcc

SEQ ID NO: 24904 - DNA, 201 bp, Homo sapiens
agctatgttaatataagggactagagcaggatgagaaaactgcagatttaattctttaactattaactaaatacctttcacgttaaatcaacatatcttawtttgtttaaaaatttgtaaaaaaaaaaaaaaggcaaagttttttaaaaaattaataagtcgtatctataatttattatggcaatatgctttcatactttt

SEQ ID NO: 24905 - DNA, 201 bp, Homo sapiens
agcttcaagtgagatggaatccctactccctccagaagaccttttatgtgatataaggaaacagtgcaatccaccataatatcataatttgaaaaaaattrtatcaactattcaagaattactacattcctatacagtaaacactttattatttttttattgacatttcattattttactataacgaaatgtaatttaatc

SEQ ID NO: 24906 - DNA, 201 bp, Homo sapiens
atggcaatatgctttcatactttttcagtataaaagggtttatcaaatcaatcatattattccattttgcagaatgggaaacaggtttagagaaatatatygttcaaagacatacttagaaaataaatcaagtctaattaagaaatgcaattgtggagattaaatcagatttcatagtacttaaaggtaattaaagaaata

SEQ ID NO: 24907 - DNA, 201 bp, Homo sapiens
agcaataagagagtgaatcttcagtttatgttgttgaaagaatatcaaagcacaaatacagatatattttatgagaaagttttatttggatgcgttatgtygagtatctatattactagaaacttaaacttacttaattcttaccagtaggtttcaatgacaattggttataggaagaagagaatatcacattaagaatct

SEQ ID NO: 24908 - DNA, 201 bp, Homo sapiens
ttcctacttcctttgctataatcctcttgagggcatttttatattccctgtgatatctcatatgtcttgtatatagtagttcagctatgagttgatgaacraataatataaagaataaagcaacgataagaaataatgagcagagcatttattaataatttgatattgataacagaggaagttaaattattcaaagagctc

SEQ ID NO: 24909 - DNA, 201 bp, Homo sapiens
atgattgggttaaacaagagatgagaaactgcaggatagaaaatcagaaatataggcctgaaaaaattacctataaattgacatagggaagtaaataaatrtgatgctaactgactcacagaattgtaaaattgaacagaagtttagcagaagttgccaaagaagagattagaagaagttgagggaaacaatattcaaaaa

SEQ ID NO: 24910 - DNA, 201 bp, Homo sapiens
agcatcccagaccagcctttatctccttgacccagcagattcatttagactttccactgagttgaaatgtttaaaatgatagacttacctggtcctaataycttgctagtatcccaaaaataggaagaactattaaatctttacagaactaccctgagttaagccagagaaatactattcagaaatagtgttcatgatctg

SEQ ID NO: 24911 - DNA, 201 bp, Homo sapiens
aagttaagaaagtatttcaaagtaattcaagtgtcaggagcaggatcaaatcaggacttggaatgtttaatttgttgttatgtctttaattcatttagccrtcaagcaagtctctattgaattgccctgtcatatataatagaaaacaaatctacttagggaaaacataataagagaaagattaattgagggcatttccct

SEQ ID NO: 24912 - DNA, 201 bp, Homo sapiens
agaaagtatgtgaggctgcatatgtgccaggcctggaggaatttctaaaaagcagctatacatttccacttgttactgatgatcactactcagagcagtcraaagtcagttaataacatgtcacagggatactgctctccactgggctatattcacgtctgcagaaatagcaatgtcatttcatcctccattggccagacc

SEQ ID NO: 24913 - DNA, 201 bp, Homo sapiens
ttattctttcagaagccttgaatttacatgaagttatgtgataatgacctaccttatataggacctagaattttttgttgttcttctgtaaaaccatgctycctgaactgtagtctagtcatcagaatttgccagtcaactccaggaaagacattgttttaaagaatgacgtaagctttctagaagtcaattttgtagttt

SEQ ID NO: 24914 - DNA, 201 bp, Homo sapiens
aaaagagcttcattaggaagtcttgggcctaattgttttttgttttataaattttaaatgactgctctgtgatgagcccatttcagttgaggctgtattayttttcctgtgggtaaaatgacatactgagctgatatggacatcacttctcccacttttgctattttaaaaatacagatatgctgcataaacatagcaaat

SEQ ID NO: 24915 - DNA, 201 bp, Homo sapiens
tttctagtttatttgcatagaggtgtttgtagtattctctgattttagtttgtatttctgtgggatccgtggtgatatcccctttatcattttttattgcwtctattagattcttctctctttttttctttattagtcttgctagcggtctatcaattttgttgaccctttcaaaaaaccagctcctggattcattaattt

SEQ ID NO: 24916 - DNA, 201 bp, Homo sapiens
cctggtttagtcttgggagagtgtatgtgtcgaggaatttatccatttcttctagattttctagtttatttgcatagaggtgtttgtagtattctctgatkttagtttgtatttctgtgggatccgtggtgatatcccctttatcattttttattgcatctattagattcttctctctttttttctttattagtcttgcta

SEQ ID NO: 24917 - DNA, 201 bp, Homo sapiens
ataggaatactattttataaaataaatggattaaactttttttgcaatccttttctttctgattcagtttcagcccctcttgtgtcgcagaaggacttgaygactaccgctgcacggcttgtccacggggatatgaaggccagtactgtgaaaggtaccaacagccatgaaacgtacagagtaatgatatgtagggactat

SEQ ID NO: 24918 - DNA, 201 bp, Homo sapiens
gtacaattcttgttacctgctttctttataaaactgtaggattatcaatctgagcattacatgtagactaaattttgaaatattaaaaaacggatacgttwtgatagtcgaatgatgaattactgagctcacttttcgttttaagccttttctctttgtgtttacaagtaaatcacaatgttgttttcattaatatcattt

SEQ ID NO: 24919 - DNA, 201 bp, Homo sapiens
gtagcaacaaatatggagcatttagaacagtgtctggcattgagaaaacctatgttttagttgttattagtattaaaagaaaggaattatattatacatayttttctttacccacaggctctaatacagaaatttccatatggtagtaattcattacagattacctagctgttaatcattcagtgccatcattgaataatt

SEQ ID NO: 24920 - DNA, 201 bp, Homo sapiens
ataccaatccttctcaaaatcctccaaataactgaagatgagggagtacttccaaacttattttatgaggccagccattagcctgataccaaagccaaagrcactgcaagaaaagtacattacagatcaatatttttgatgaacatagatgcaaaactcctcaagaaaatactaacaaaccaaattcagcagcacattaaa

SEQ ID NO: 24921 - DNA, 201 bp, Homo sapiens
gggtgggatatgccaggtcaaggaaagggccatgggagtgggtgcctgatgcggagaggaggaaaagaggtcagcgaggaggtaaagagcctgggcacagkcatgttggtagattttacagttacataaggagaggtaggaaggaagatggcgaaccagaaagtaagtcattaataatggctggaaggtggttttatgagg

SEQ ID NO: 24922 - DNA, 201 bp, Homo sapiens
agaattctttacactaaattaaagatgataaagcaatctgcttttcatactaaacagtgaagtgaaaagcattattttaaagaaatatttctgttttgttrgtgtacgaaattctgtaatagtggctaacttctttaggaacctttttaggtgaaacttatgattgactatgaaatctattctaggacaaaataaaatgag

SEQ ID NO: 24923 - DNA, 201 bp, Homo sapiens
tgaaaggagtgtgaagtgaatactgttgacattcctgagaaatgtatctggggggccttaaaatctgtaaatatcataaatatcatacgaatcctaagaarttctgggatttaaggatgagtgggagacttaggttcttggttctgtgttgtaagtcattctccaagtgtagcaggaccatagcactgatgaaaatgattt

SEQ ID NO: 24924 - DNA, 201 bp, Homo sapiens
taaaaataatatatttaaacaactataacttaatttaaacattttagacattatctcttcctttcctagtatggaagacaaagattgagcactctcatctraccctcacacatttctgcctacatcctgcaacatatacttaaaataaatatttaatgctaacattgttaaaaccatataaatattactcacagctgagct

SEQ ID NO: 24925 - DNA, 201 bp, Homo sapiens
caaaccaagttatttcatgtcttaagatgtataattctagatgttttcatatgttataactattaaaaagttgaggctggacatggtggctcatgcctgtwatcccaacactttggaattacactttgggcatagatggggagatctcttgagcccaggagttggagagcagcctgggcaacacggcgaagggaggatcgc

SEQ ID NO: 24926 - DNA, 201 bp, Homo sapiens
agagttgctgtctgtggactgccgtcttgcttcgccttcagagagtgcgctctggggcaagaggaacttgaagcaagttcaagttcaatgccatgagagcrtagtgtagggggaattacctaagtcctgcaaaaggaacggggagtgcttttcattgttctttagtttcgaagaggtcttgctatcacgatacatcccgta

SEQ ID NO: 24927 - DNA, 201 bp, Homo sapiens; identical to SEQ ID NO: 5062

SEQ ID NO: 24928 - DNA, 201 bp, Homo sapiens
aaaagtcagttaataacatgtcacagggatactgctctccactgggctatattcacgtctgcagaaatagcaatgtcatttcatcctccattggccagacmctaatctctgtctctggggtgagaatgaccagcctgtactcttttgtcagagcagtagtggagagagagaaatgagaaaatgctaatgactttgtgtatg

SEQ ID NO: 24929 - DNA, 201 bp, Homo sapiens
aaaaaaaaatgaaacaagcagcatttatttgcaatcaagaaactagatatctttaattgtgtgtgtgtgtctgtgtgtgtgtttaaagaaaggcatgtgcrtattacttactataataggagaacatatcattgccaagacagatttacatcaagtgcctaaaccccccagttcactacaggcaacctttttttagcaact

SEQ ID NO: 24930 - DNA, 201 bp, Homo sapiens
caagtttgatatattgtatttttcattatcatttattttaaaatatattctaattttcatagtaaatttttctgtggcctctgagttatatagaagtgaartgcttaatttctgaacaattgagtatttttctaatcgttttgtttttgttgttattcctttcctcactaattccactatggtcagtgtattttcaattct

SEQ ID NO: 24931 - DNA, 201 bp, Homo sapiens
gagatttgggtggggacacagagccaaaccatatcactgtctttctgaagaaaaaaaaggaattcttgtatgttgccctaaagatataaaactgcttacartgcctagtgatttgtattgattactatgtgttccctaaagtttgaaactctccattaacatagcaaaactactatattctaaatcaaatgtcagcaggtt

SEQ ID NO: 24932 - DNA, 201 bp, Homo sapiens
gatcaaaggggaagagggagcaggcacatcttacatggtacaggagagagaggagaaagtgaatggggaagagccccttataaaaccatcagatcttgtamgaactcactcactatcatgaggacagcatgggggagctgcccccttgatccagtctcctccctccctccatacgtggagattacaatttcaaatgagatt

SEQ ID NO: 24933 - DNA, 201 bp, Homo sapiens
tcttagttctaagatcagggctaaagtttggagttttaatgccctcactaggacttgacactaggatttggacccacagacggaaattgcagctgaactcmctgaagcagggacactagaaatgctttcagacagtgaaatgggggctagaaaattcttcctgcaagcctacagaggcagctagaaaatttttctcttagg

SEQ ID NO: 24934 - DNA, 201 bp, Homo sapiens
aaatagtaagttgctgatgatagagaaaaaacatggctttgtgatcagttactagccatattcttgaaggttacagacagagcggggtaggctgcagcctrcagacagaaagtggggctgtaggtgtagggtcctggctgcacagagtgtgtgatggaccgtttatttggcatcagggttttacatatagtagctcatagt

SEQ ID NO: 24935 - DNA, 201 bp, Homo sapiens
tcatttgtatctaagtatcattgctttaaaaatatatctgaggcaaatataaaatataaatattttgttacctctaggttgcatgggtaatgcatgttatrtgtgctttttgaatgtcttaatataatttctaatttaaaatttctttaattgaatgtaaaaaagaattccagatttaaaaagaggagaatgaaattttta

SEQ ID NO: 24936 - DNA, 201 bp, Homo sapiens
gctgtcttccagtgttaaacaggaatttgtgggattacaagatagatgatcaacccagattgctatgagtgataaccgtgcttcctcctgtctaccttctmccatattcactggtttatggcacctcccacatatgctgctacacaaccaaggcattattaccagggaagtcaattcagccataactctataaagtaaact

SEQ ID NO: 24937 - DNA, 201 bp, Homo sapiens
gacttgattcctgggcatttttacaaatggacttcaatgtgtacatttaatcctgaatctaaattacagatgtagaatttttggcataaaaggttcatgcrtgaatgaatttatctcttgcaacccctacagttcaaataatattatgttagtcaattttttacatggacagactctctccttgaccaaattttggaaagt

SEQ ID NO: 24938 - DNA, 201 bp, Homo sapiens
tgagcttacagggttttatcaggatcagactaagtaaaaatgtataattattttataaataaaaatgttttggggtttcagatttaaaaatcaagagtaasaagttttacaatatttactaaagattacgattagtataccacaaaacatctgaactttagatattatttatgtgaccttaaaagtcagacctttccctgc

SEQ ID NO: 24939 - DNA, 201 bp, Homo sapiens
aaaagtgtgttattgtttttaattgcttccctaaagaatgagagaaggcgaagctgggaccctagtggtattgatgggctgttgctccttatccatgatgygtaagagtgaggaactaagtctgaaaactttttaaggggaaaatagcagtatagcatactgaaagttttgttgtaatatttaaaaatgccaattaaaaaa

SEQ ID NO: 24940 - DNA, 201 bp, Homo sapiens
agtgcaagggcctttgaaatcaggcctggtttggaatcttggtccagcaatcaatagctgtgtaatcttaggtaactctttgaagtttagtttccgcatcyaagaatgaggaagtataaatacatatctgcccacgttggttgtattaaatgagatactttacataacacatccgactaaggtgcagatgtaataaatgac

SEQ ID NO: 24941 - DNA, 201 bp, Homo sapiens
aacacatacatgtgcatgcatgtacacacctacacacagacacatacccatcttcataccttaataaaaggatataaatacagctaatttgggttctaccyatacactatttttttgtgaatcttgggcaagtcgtaaacctctcaaaaagtaaaatgaagggactgatttaactgacttttaagtacccattctatccct

SEQ ID NO: 24942 - DNA, 201 bp, Homo sapiens
taaatttaagtgaggattgtaggagtttaacagctatttaaaatacgccctgctgctttccttcctaggttctccacaccttcaaagctcatcacttggayaagattgcctctttactttttccaaatcaatctggttcatccattttttgcaaaaatgaaaactcccctctttcactaaggtatttgagccatcaagaac

SEQ ID NO: 24943 - DNA, 201 bp, Homo sapiens
ccaggaagagtctgtcaaaacaagtatatcaagtaaaacaaacaaatatattttacctatatatgttaattaaactaatttgtgcatgtacatagaattcyttctgtattcagatggtgctaattcagactccagactgaattttaattcaagttctttctcaagtctataaataatattaaactgattatttcattctaa

SEQ ID NO: 24944 - DNA, 201 bp, Homo sapiens
aaggtaaaaaggatttttcccctcagatagttctgaaaaatcaattccaggataaatgcagtttaaactgtgtcagaggtatcttttcaagataaaatctrtgcaaaaagggacagaggaaacaggaagataaaatctgggtagtggttgttaaaatggccttgagaattgaggaaaatggcagtttctaccatcaagggc

SEQ ID NO: 24945 - DNA, 201 bp, Homo sapiens
ttgctcagttttaacttcattcagtgtttgttatacctgcttcattaagctaaacaaacagatggacaaaatctcattgccagacatggagttttcattgrtatgcatttgttggcataccgataaacactgcttttctagagcttattttcaacccaaacccacctttttttctagttggtggagatgatctattttcaa

SEQ ID NO: 24946 - DNA, 201 bp, Homo sapiens
gaagctattaaaataagcttcttatccttagggaaactatttcaacactagagctatcatcaaaagtccttgagacaagtaacccaggagtggaatggttrtgattacactttataagcaaacttaaaaagatatcaggagctgctttactaggcccctgctatgaagtgaaaactggagaaaaatctacagcaaagcatt

SEQ ID NO: 24947 - DNA, 201 bp, Homo sapiens
caggatccactgatatggaacagaagggtaagcttctgttaagctaggtaaggaagcttagggttgtgaaagaaggtacaaagacactgcacactgacttytggggaattacctggatttggctttcaggtagctctgccaaggattaacaatagggttcagaaagaagagtaaaccatctaatatgtgccccagccagtt

SEQ ID NO: 24948 - DNA, 201 bp, Homo sapiens
atcaacaaatgttagagaactgggttcaactactaccaagaaagagcttaaccctgaaacctagcatcctaggcctgcacccaaagggagaagagaagctyattctgagctatgagataatcgtaaggtatcaagtctcagggcctggcaaaggagggataatggaggatataggcaagataataatatgactgggtatgt

SEQ ID NO: 24949 - DNA, 201 bp, Homo sapiens
agttgacttttaaaagttgacaatcgctaaacttaaaaatggttcagaggagatacaatattgctggatctaatgtaagtagaaagaatcctaattctgakatatcatggcatagaaaaagacacaaggaattagaagacctggattctggtactggttccagttatttgtgggaccttggtcaaatgatttaatctctct

SEQ ID NO: 24950 - DNA, 201 bp, Homo sapiens
agtaacaatacctctttatttcaccccttttcttgcatgtttaccttttgtaaagagaaggtacagaaacccttcatttaatgtgtttcaggttcaatccrttgtcttcataacactggaatttctcctccattattttctatttggggatgtaaaggaatggacatttattgaggatttactgccacaatgctagaacca

SEQ ID NO: 24951 - DNA, 201 bp, Homo sapiens
catgatgtctatgatcctttctggttctgatattgtataactctcatcacttaatgaaagccaccgttcctatttggataaataagagaattgaaaaacgyactattagaactgagagtacagatgagctttccaaatatattagagatggcatcacagtacatggaaatgttaaaatccataacatgggcaagagcacat

SEQ ID NO: 24952 - DNA, 201 bp, Homo sapiens
attaactcaggacccctcttgtatcagttttcaacccatccacatcctactccacccctccagattattgggaagcaaattccatatgtattactcgcttygtaactacttcattatgtatctctgaaggataagactcttttataaaggaaaccattgtcacatctaaaaattaatactattatactgattctttaatat

SEQ ID NO: 24953 - DNA, 201 bp, Homo sapiens
ggtatttctccagggtgaataaattttagaaggcaaatttaaactgtcatatttctgattgcctgtgattcacaccattgttgtactctgtgacagtttcmttgaaaggactgtcatgttccatgaggaactcagcctacctgctcttttaccagtagctggtgggaaagccatactgtgccaatgacttattcacaggag

SEQ ID NO: 24954 - DNA, 201 bp, Homo sapiens
tcagaaaaattgggagaaaatacaaggagaagaatttgcagggtgattgttgtaagatttttatcatgtcctcttaaaaatggtagcttttcagaaacttktgttaactgctttgcattccatcttgagaaaatgtctgtatagttagatgagcatcatctcctctccttgtttttaaatcacatccaaaatgacatcagg

SEQ ID NO: 24955 - DNA, 201 bp, Homo sapiens
ttccacgggtccttttgagcttcagaaatccagctctcagcacttcataaatcatttctgacctgatgtcactgaagttgtattattatgtggttagtatmaaattcagaaaaattgggagaaaatacaaggagaagaatttgcagggtgattgttgtaagatttttatcatgtcctcttaaaaatggtagcttttcagaa

SEQ ID NO: 24956 - DNA, 201 bp, Homo sapiens
ttttgtgaaggccttttctttaccaaattagtaatatggtgaatattaaactaaacctgagtcatactacatttgtttttaaattttgtagggaagggggraatagcaaataatattttatgctagtaatcaggcattatatcagttgttgtaaggaactacatgaaagttggtggtatacaggttaccagtagtaagttt

SEQ ID NO: 24957 - DNA, 201 bp, Homo sapiens
tttctttattttcaattaaagagggacccttattaaaaatatttttattaacctgttagtcttatcttggcagctataaaatattatatagttatatttgrtacatgtgagcatatgtgtacatatacaaccattaagccataatataagtagtaaatattagttttaatgaagtgtttatgaattgggacaagaatgtct

SEQ ID NO: 24958 - DNA, 201 bp, Homo sapiens
tttctttgagctctacagggttggactacagttaagttcctcactgcctgcctcttcaccaattctacaaaatctatagccatatgaaggtaaattttgcwatcagaaaaagccaaaaccacttcagtttttacctcaggtctagtctaggagagtgataccatttctttttaagggggaagaaatccagaaaagcttctt

SEQ ID NO: 24959 - DNA, 201 bp, Homo sapiens
tagagagacacccgattacaaatgctattgatggaaagaacacttggtggcagagtcccagtattaagaatggaatcgaataccattatgtgacaattacmctggatttacagcaggtatagttcctctttttttgtcatttccacttttgaaattgcattttacatttgctatttgtttagttagtggtttgtgggtgaa

SEQ ID NO: 24960 - DNA, 201 bp, Homo sapiens
ggactttatggagggtagctgatgcatcaaaaaaaaattatatatatatatatacacacacacacacacacacacacacacacacacatatatatatatataaagttttacagaactttgttttcaacttttaaaacaggatttctaaagaagttatgtggttttttttctttcatggcaatggcgcctccagcctcacct

SEQ ID NO: 24961 - DNA, 201 bp, Homo sapiens
cagactaaatattacaatatcttggcaagaaaattaaagtaatgataatggcaatatagcaactaaattccatctcacaattacagctattaaaaggatcyagagtcagcatgaacttaaagaaaagcttaactgttccagtgacgtgtatataaaaactcaatataattgcgaacaaaaatatacaacaatttaaaggag

SEQ ID NO: 24962 - DNA, 201 bp, Homo sapiens
ttaggatatgaatcagatttgataacatgaactatcttatttaattattctaaattgaaaacatcatgaaagataattgggatttttccatttttattttmctcttgtttcttgcttatttgaatcattcgttttattcttctttctacttaggctaagctctcaaaaggaaaggagatgtaattcaatgtatgtaagttt

SEQ ID NO: 24963 - DNA, 201 bp, Homo sapiens
atctcttcctttcctagtatggaagacaaagattgagcactctcatctgaccctcacacatttctgcctacatcctgcaacatatacttaaaataaatatwtaatgctaacattgttaaaaccatataaatattactcacagctgagctctgtggtgcactgtgtctctcttttcttttttgtacatcgttgcctggcatt

SEQ ID NO: 24964 - DNA, 201 bp, Homo sapiens
ccaatcatctcccaccaggcccctcccctaacattggagattacatttcaatacgagatttgggtaggatcacacatcctatatcacttttggagaaagartggaggtagctctgaaggtttgttacatcacagcatttgaggaatggctggggtgatggcaaatatcatacagaagagcaggcgtagacaagatatacca

SEQ ID NO: 24965 - DNA, 201 bp, Homo sapiens
catgtttttaaaaaaggacttttactctgttggaaccaattaggccaatgtgaggaactttggaaggaccatgagcagccaaacttgctaacagcaaaacrtatttttctgaaggcagcatgaaaaggacggaggagttctctaaggactgtgagttccacgggtccttttgagcttcagaaatccagctctcagcacttc

SEQ ID NO: 24966 - DNA, 201 bp, Homo sapiens
taaactagacacttgattttctccaatggtaacatgtttttaaaaaaggacttttactctgttggaaccaattaggccaatgtgaggaactttggaaggamcatgagcagccaaacttgctaacagcaaaacatatttttctgaaggcagcatgaaaaggacggaggagttctctaaggactgtgagttccacgggtcctt

SEQ ID NO: 24967 - DNA, 201 bp, Homo sapiens
aatgtattctgttcatctttaaataatttcatttatgtttaagctgcaaaaattgatctgaagttagtctggtatattgtgtactttaagcatgtgatacrtttctaaaatgttcatgtcaagaatatctacaattcaaatcatgaccttcttttggcttgtattctaattttgaagtttctgacctagacacaaaaatga

SEQ ID NO: 24968 - DNA, 201 bp, Homo sapiens
atactcaagaaaattaaactagtgacaaaatagatttatttaacttataagctaattcataaattaatggcaaaatttatcacagtatacataactgagaytttgcagatttttttgtaaatagataacattctgatacaattaacagatctccatcagctgcattagatttcaagttgccctgctaccactgtatatatg

SEQ ID NO: 24969 - DNA, 201 bp, Homo sapiens
tgaaatagttactttattcattcttaagaaaatgtttatcaaacaaatgagtcttaaaaaccatagttagatcctttttgtagtacatagggtattccacraaaaaagtggctagtttagcttgcagctgaaaacaactgtacaaatgcttttcctcaaatcaaccatcatgcttcagtatacagttgatgttaaaaagat

SEQ ID NO: 24970 - DNA, 201 bp, Homo sapiens
tttgtttgttttcacaaatattttaatgtggattttgagtcaaattttctgtaggaaggtcatggtagattaatgtcaaattagctgaaacaataaacacratgaaaagaaaaatcagccttgtaagacagtacaactaaggagatcagtttaaaacactaatgaggagttgcctctcagcactgggtcattatgattata

SEQ ID NO: 24971 - DNA, 201 bp, Homo sapiens
gactattgatctcaccagaaaagtccctaaatattagaagctgttaatctcacaatggtagagacaaatttttcagaatttttattttcatttgtaagttyctgtagttattgacaaattttgttatttttcttgaaatagttactttattcattcttaagaaaatgtttatcaaacaaatgagtcttaaaaaccatagtt

SEQ ID NO: 24972 - DNA, 201 bp, Homo sapiens
tttctaaatgcaatttttttgtgcgtggagctatttgttgttgtaatcattgctttctaagcacttagaatagtgcccaacatataggaagcattcaatgygtttgtattaagttaataaatgactgaatgaataactagtacaaaccaccaatccataatttaagaatcttattgaatctgagaattaaaggattaagtg

SEQ ID NO: 24973 - DNA, 201 bp, Homo sapiens
gtaagtggtagttttcaaaagattggctgcagtgtggtatctgaaactgcatcaacgatatttttgtacgcttttatattaaaatctacggatctatcttrcacctggaaagaattttacccatgtgtgatgttatagtatcattcatagatcatttggaagatactgatttactagttatgcagatcagccacaacttga

SEQ ID NO: 24974 - DNA, 201 bp, Homo sapiens
ttactgttcagttgaatatttatctttctaaatgcaatttttttgtgcgtggagctatttgttgttgtaatcattgctttctaagcacttagaatagtgcmcaacatataggaagcattcaatgcgtttgtattaagttaataaatgactgaatgaataactagtacaaaccaccaatccataatttaagaatcttattga

SEQ ID NO: 24975 - DNA, 201 bp, Homo sapiens
gttctttacctgctttagttgtatatagatttttaagatcatttgttcagtatcacaagtagaatctgtggttaattagaaaatatattttccctttaaawgaatttgtgctgacttttaaaattattaataaaggtgacagctagctttggtgtctatattgaagaaaatgttcatcctaattggtttccgtttgtctac

SEQ ID NO: 24976 - DNA, 201 bp, Homo sapiens
gagattataatatacatgttccaaatgtagattataccttacctgagtataccttgtttaagtacaacagaatatagttaaaatcacagttctttacctgytttagttgtatatagatttttaagatcatttgttcagtatcacaagtagaatctgtggttaattagaaaatatattttccctttaaaagaatttgtgctg

SEQ ID NO: 24977 - DNA, 201 bp, Homo sapiens
aagctgcattttaaataaataactcccttataactgtgtccacaatgaaggtaacacaattaatacccaactcaaaaactttttatttattttaaggtggyatgtaattttctttttaaaaattttatcaagcctctaattcattcaggaaacgtgctagacaccaaaattgattgtgtcagtgatgagcccccttagagc

SEQ ID NO: 24978 - DNA, 201 bp, Homo sapiens
agtgccttcccaaggaaagatcagactctttgagcattagaaaccctctgtaatctgactacctttccaggctccaagccctcaactccattctatataawgccaagtttggcatttcttgcacttatctagacatcattagcagtctgctcttgctattccctcagacaatccctgtgaaatctaatttatttttaaagg

SEQ ID NO: 24979 - DNA, 201 bp, Homo sapiens
aagatgttctcactggtccgtggcaaagtaagaaaatgagaacaactttccacatttttcataaaaatagaaaggatacaatttaaataattgtcctccawtttgatattatgggttttaaaaactaatgatggtttttaaatgccctttgtttcatgaaataataatgatgctttattaaatgatagaaatatattggag

SEQ ID NO: 24980 - DNA, 201 bp, Homo sapiens
atgtaaatctgggttacctgctgaggaaagaagcaaacatttagattatgagcctctcaggggaataggaggggatcactgagccgtaatcagaataaagyggcaattccatatggagtaaaataaagaatcaaacgtgtggactgatactcttggagcattacagggaaagtagaatggaaagagaagatggcaagaaaa

SEQ ID NO: 24981 - DNA, 201 bp, Homo sapiens
aagaagaagaggggactatagaaatattctgtcaagtatccttgatgtgaaagagaatgaaggacagaggaggttgtggagttgcaaaggttttcaaagayaagagacatttgagttggtttagatgcttggggggaaaggcagggaagttgaagaccaagtggtggtgggcatggtgtctctctagaagtaaaaacatat

SEQ ID NO: 24982 - DNA, 201 bp, Homo sapiens
agggaggggaagaggagaagtcatgccaggaagagaaatcagaattagacagaaaatcctagttactcggggagctacaagtaggaatgactagaactgamagtgccaaagggcagagagtagagatgagactagagcaaaaggctggagccagattatgaaggcatttaacaaccacaggagaagtgatttagggagagg

SEQ ID NO: 24983 - DNA, 201 bp, Homo sapiens
gcttttgctctctttatttatttaattatgtgggataattggtacataatccaattctatattttctgaacatacaacataaagaaaatactttatccctsgtctcttttcttggcttcctcccatgattgctgaggcctgggaaagtacaggcctggcctgctccaatcaggtctttcagggcagaccaaagcagggcac

SEQ ID NO: 24984 - DNA, 201 bp, Homo sapiens
caaattggtcattcattagcaactaattggagacctttgctgaccaatatgcttaaccgatttttaaaaataaacagcaaaatagcaatgaaatttcatawagcaactattccctgaccataaaacaaggcaattaaattgtgcaaaggttaattttgagcacataatcagtaactgtaatagaaacaaatcaaagaaaag

SEQ ID NO: 24985 - DNA, 201 bp, Homo sapiens
catgctgaagattcaataaaagctcagatattgattcattcttcaaattggtcattcattagcaactaattggagacctttgctgaccaatatgcttaacygatttttaaaaataaacagcaaaatagcaatgaaatttcataaagcaactattccctgaccataaaacaaggcaattaaattgtgcaaaggttaattttg

SEQ ID NO: 24986 - DNA, 201 bp, Homo sapiens
aggacttgtaaagctatgatggaagttagcccatgagtgtgtttacagaaggcagagctagatggcataagactcagggatgatgcaggaggtgataaatrtttttgtttagagtagtgagaagagtgaaacacagtagatctttaataataaaattttcactcatttggaattatgaaaattgtgtttgaaaaccagctg

SEQ ID NO: 24987 - DNA, 201 bp, Homo sapiens
ccccagtgattttatgaatccattgaggagatctgcagaagtgttgtcactgctggagaaaaccaaggcttcacttgcaaaaaggagtactttcttaaaaytgagaaatttggaaatatatcataggacttgtaaagctatgatggaagttagcccatgagtgtgtttacagaaggcagagctagatggcataagactcag

SEQ ID NO: 24988 - DNA, 201 bp, Homo sapiens
tttccccagtgattttatgaatccattgaggagatctgcagaagtgttgtcactgctggagaaaaccaaggcttcacttgcaaaaaggagtactttcttayaactgagaaatttggaaatatatcataggacttgtaaagctatgatggaagttagcccatgagtgtgtttacagaaggcagagctagatggcataagact

SEQ ID NO: 24989 - DNA, 201 bp, Homo sapiens
gaccggacaggatgctgagaggaccaacacaagagcaaagtccctgggagaattcattaaggagcttgcccgggatgcagaaggtattagaaagaatcacrttttaatcatcatttctcccaacagaaaaacacagaaagggatgacacaggactggaatttctcttgttataagtgacatctgtaaaatcaaaggtagag

SEQ ID NO: 24990 - DNA, 201 bp, Homo sapiens
taatccgtacagcataaacaaattagaaatgaacttaaaataaatatacaaacaaaatagtaaactttgtagtacccgaatataaggtgttacagttaacrtggaatctgataacaccaattctttcctttcttaaacttcataggaaagctaaaaatactttaacttttgaaattaataaatgaaatacatcttatattt

SEQ ID NO: 24991 - DNA, 201 bp, Homo sapiens
aatcactgtgccctagtacatagagaatgattgagacaaggataggtgctattttagataggtaatcagaggagtggctattaccagaatggagggaggamacaagccaaagagtaggaagagcacatagtgggaatatctgcaagtgcaaaggcttagaggcaggaactagttgtatgtacctggcaacatactgaattg

SEQ ID NO: 24992 - DNA, 201 bp, Homo sapiens
tagcaatatttgtctctcactgattttactcttctaggccaggattgagtttcatgtacttttgagacaagctatatgttccaaagaaaaattataatctrttctctcatgaaacagtccattaggttgattcttccatgtgatggtttctctatttcttaaaaagtattttccctaagtttccttaaaaatctcacttca

SEQ ID NO: 24993 - DNA, 201 bp, Homo sapiens
tttccctaagtttccttaaaaatctcacttcaaatttcacagaactcccattgaatacatctgcttatgtttatgctcacaaagtactcatttgtatatarattctagaattcaatatgtagtaccaatataactattcagcacttatattttagttagaaatggatgctccatctttctttaaaagtagttttaattcct

SEQ ID NO: 24994 - DNA, 201 bp, Homo sapiens
ttaaaaatctcacttcaaatttcacagaactcccattgaatacatctgcttatgtttatgctcacaaagtactcatttgtatatagattctagaattcaayatgtagtaccaatataactattcagcacttatattttagttagaaatggatgctccatctttctttaaaagtagttttaattccttaactagtatcgcat

SEQ ID NO: 24995 - DNA, 201 bp, Homo sapiens
tgtagggaatattacaaatctgtttcctggaaagcaggatgccttcctttagaattattagttaagattaaccactctttaaattgagagattatatcctwccctgtttttcattatatggtcagctttcactggcctgagtccacattttaagctcaactatatacaaataatttttcagtatactgagagtaggattaa

SEQ ID NO: 24996 - DNA, 201 bp, Homo sapiens
gagaccctgtcttaaaaaaattaaacaaattaaaaagaaatgaagttattgagtgacagttaaagaaactgatttgcaagtggccttcaggaggcagaagraggctacttgtctttccccagtgattttatgaatccattgaggagatctgcagaagtgttgtcactgctggagaaaaccaaggcttcacttgcaaaaagg

SEQ ID NO: 24997 - DNA, 201 bp, Homo sapiens
aatagagaagctacaaatgaaatattataaaacccagttcaaatgtacatattttaaagatctgtaaatatacagtaaaacattaacatttgccagatacrgatgatgggaatagaggtgtctgtattaatttctaatcgtatctatcttatttcctacttaaatagtttaattaaaatgaacctcagaggagatagaaaa

SEQ ID NO: 24998 - DNA, 201 bp, Homo sapiens
gttagtaagtttgaagtttcattttaaaactaaacatgtgggccaggcacggtggctcatgcctgtaatcccagcactttgggaggccgaggtgggcagaytgcctgagctcgggagttcaaaaccagcctgggcaacatggcgaaaccccgtctctattaaatattcaaaaaattagctgggtgtggtggtgggcacctg

SEQ ID NO: 24999 - DNA, 201 bp, Homo sapiens
tgtgtttgtgtggcggggagcggtgtgtgtagctgaatttgaggtagagacaaaaagtaattaaactggaagcagaaatcttagaatggggaaaagtaagrcatatttgttcacaaagtatcttttaacattttctggtttctgtggagtcacattttattaatgctggttgacatttatctacctagaaaaaaatgacag

SEQ ID NO: 25000 - DNA, 201 bp, Homo sapiens
aaatagagaagctacaaatgaaatattataaaacccagttcaaatgtacatattttaaagatctgtaaatatacagtaaaacattaacatttgccagatayagatgatgggaatagaggtgtctgtattaatttctaatcgtatctatcttatttcctacttaaatagtttaattaaaatgaacctcagaggagatagaaa

SEQ ID NO: 25001 - DNA, 201 bp, Homo sapiens
tgatgtgtttgtgtggcggggagcggtgtgtgtagctgaatttgaggtagagacaaaaagtaattaaactggaagcagaaatcttagaatggggaaaagtmaggcatatttgttcacaaagtatcttttaacattttctggtttctgtggagtcacattttattaatgctggttgacatttatctacctagaaaaaaatga

SEQ ID NO: 25002 - DNA, 201 bp, Homo sapiens
aggatgctactgtaataaatgtaaagtaaggttaggatatctgaatataaatgttgatgtgtttgtgtggcggggagcggtgtgtgtagctgaatttgagrtagagacaaaaagtaattaaactggaagcagaaatcttagaatggggaaaagtaaggcatatttgttcacaaagtatcttttaacattttctggtttctg

SEQ ID NO: 25003 - DNA, 201 bp, Homo sapiens
gtactggtctgcagccctggggttggggaccccgggttaggatgctactgtaataaatgtaaagtaaggttaggatatctgaatataaatgttgatgtgtktgtgtggcggggagcggtgtgtgtagctgaatttgaggtagagacaaaaagtaattaaactggaagcagaaatcttagaatggggaaaagtaaggcatat

SEQ ID NO: 25004 - DNA, 201 bp, Homo sapiens
tgcttcaggttgtcttcataataaatgcaaacattaaaattgacaggttactatgattttcatattggattaaaatgtctaaaacaaagggattcgtctakgtatgacttacacaaatactgcaaatcttaggggaacagaaagactgaaaatgagagataagatacactatgcaaactctaaccagaagaaagctggtat

SEQ ID NO: 25005 - DNA, 201 bp, Homo sapiens
aaaagtctttaaaaaagaaagtgagttttagggaagataatttcaacaacaatggggaagattaatgggagtagagtcacgcaggaagactaggaagggcwgtggtgctcaacctgtttggcaccagggaccagttttgtggaagacaatttttccattgacagggataggggtggatggtttcaggatgaaactgttcca

SEQ ID NO: 25006 - DNA, 201 bp, Homo sapiens
attctggggaggaaagcaaaaagctaattaactttagttttcactaagaatatgtattaaacattgaaaaaaaatctggaaaaataaaattgacaatattygagttctccagagaaacagaacaaattggaagtgtatatatacacagatatattatatattttaaagaattgactcatgagattgtggggtctggctgca

SEQ ID NO: 25007 - DNA, 201 bp, Homo sapiens
tgtacaaatctaagtaagcattatggaaagcataatgataataattattaaatatgtggaattaaaaacaaagtggaactaaaacacaagagactaataamatggaaaatggggcaggtagtcagttatttaataaaagtttttaatattcttgaattctggggaggaaagcaaaaagctaattaactttagttttcacta

SEQ ID NO: 25008 - DNA, 201 bp, Homo sapiens
gtattcttgcattaattaatgtattcattaaatatgtcttcagtactttttttgggtccagcattacattaggcagatatattattcagcaagttttcaayttagttcagggaaagagggatgataaatattattatgagtgtttagaaatattaagaacccgaatccatttatcagtttcataacaatgattttcaagct

SEQ ID NO: 25009 - DNA, 201 bp, Homo sapiens
actcgaagtctattccccaatttagagtaggagaaaaatttacatagagattgattcagggaaaagagaatagcaactcttattgtcagtgtagctacgayagcacagtattagtttctcaaatcaaagagttcctttaaaaatatttatatcaaagactgagttctctgtcagtgataaagtgtgtgtgtgagtgtgtgt

SEQ ID NO: 25010 - DNA, 201 bp, Homo sapiens
aggaaagagggaaggagggagagagggagggagggagggaggaaggaaggaaggaaaggaaggaaggaagggaggaaagagggagggagggaaggagggarggagggaggaaggaaggaagagagagagagaaagaaaggaagaaagggagaaagacctggagtttgctaatagagttggcaggcacagttcagtatcacc

SEQ ID NO: 25011 - DNA, 201 bp, Homo sapiens
ggatatatgataaacaaaacagaccaagttctcacccccttagagcttaccttacagttggagaggttgtcaataaataggtgagccaattactaagtaaktctcaaatccatggtgctatgaaggaaacgtcctgctgcaggaagtgtggaaacctaggtagcaccctgggaatggccacgctaaggagaagcacttaaa

SEQ ID NO: 25012 - DNA, 201 bp, Homo sapiens
gaggaatggggacttctgtggagtttaatctatagtaatgcacatgaatctgataaattattataatctttgcttttagtagaaatggggatttagagtayatcagtacaggtggcgaaaaatgtgaatttaaaacatattttgaaaaacaaggataagaattagtgtttaaaagctaaaagagaagaatttgtgtcagct

SEQ ID NO: 25013 - DNA, 201 bp, Homo sapiens
tattgtgttaaatataattctgcttcatgaaaattttaatttgaagctatttgcacactattctgaagctattctcatttctttgtggaaaggtgttaaarggtatcaccccaatgtctcttattatgcaagcataagaaagaagatatcgatctgagattgctagttttagattgactcctctgtatttatgaagaacca

SEQ ID NO: 25014 - DNA, 201 bp, Homo sapiens
gcaggaggcagaataataactcaacaaaataaatagaatctctaatttcaaaatactattatccccaaaagtaatgggaattttaaaaattatttagtgtytccagtttagatatttaagaacaccactcacatctacatgccaaataaattgactccaccctccacccgttatatcagggccccactccatccattgtct

SEQ ID NO: 25015 - DNA, 201 bp, Homo sapiens
agcaacaaagatcttatgggtcatcctggtattatgtttaatggtgaaaccagaagcctgtttaaagggagaatgggagatgaagaagtagagaccaggartgtaaacaatgtctttttaaaagcttatcgaaaataggatagaaattgtcaagcaatttgagacctcacagattttttttttaagacaggaaaggcttga

SEQ ID NO: 25016 - DNA, 201 bp, Homo sapiens
ggaggagaaaaaagagatgaggaccaaagttagaattaagggcgtcaattatattgaacagaaagggaaggaagagtcgataaaggagaattcgagtagcygcagaagtaggagaaacatcaactggcttactcttaaagaagccatgggggctgggcacggcagctcccgcctgtaatcccaacactttgggaggccagg

SEQ ID NO: 25017 - DNA, 201 bp, Homo sapiens
tcataggaaagctaaaaatactttaacttttgaaattaataaatgaaatacatcttatatttattgaacagctcctttctgaaatacattgtactataatrtaaaagatgaatgaagtaagtttttatttccaaatatccttaagtgtagaactgaaaagaaaataagacaaaccaacacaatataaaactcaacactttg

SEQ ID NO: 25018 - DNA, 201 bp, Homo sapiens
tgattttatttatttcttttaaaatctagccattatctccgtcatgccctttgatttgtttcagaagaaagctgattggcaggcggggtaaaacagagggrggcagcttttcagtagacttttcaaacacatattgaggtgatactcactcctggctaatccaggaatgccattaattagttaagctcatgtcttaactag

SEQ ID NO: 25019 - DNA, 201 bp, Homo sapiens
ccaatattcagcttttaataaaatttttcttttaaagatgattttactttctatcagattcctattgcattgaggacttagttttgctttatttttattgktttttcaaatgttttaccaagtacaacttgtctctaagattcaaaacagtgtacattttgaatagatgtatcatttattttatgtatatgcataataatg

SEQ ID NO: 25020 - DNA, 201 bp, Homo sapiens
tatatcagggccccactccatccattgtcttttttcttagttatatcttgatatgtcaccctattagttttttccttgcagcatttcacttgcttcttgcyttttttaaacaaaaatttatgcactaccctccctgcatccatgttcctgctgcctcatattcattcattcttcagctggtggcaatcagcattcagtttc

SEQ ID NO: 25021 - DNA, 201 bp, Homo sapiens
ctccccttggccacatctcccatcacttgtgcccctggccatctgcactccagccatactgtcccccagccactttgtcccaccacaaagcattgccacayatttctttattttgccttaaaggtaatctacctctccctacattttgttaatttctgttaactccaatttacctttcaaatctcagctcgtgaaagccct

SEQ ID NO: 25022 - DNA, 201 bp, Homo sapiens
agatgacatccatgaaacatatgacagaataccttgccatagtggctactcagcatgtaagttttttgtttgtttctttgagacagagtctccctctgtcrccaggctggagtgcagtggcgagatctctgctcactgcaacctctgcctgctggattcaagtgattctcctcccaaatagctgggattacaggcatccgg

SEQ ID NO: 25023 - DNA, 201 bp, Homo sapiens
atattgcagttattctccttttgggcatatagtaggattacatttgctcacccctgaaattaggcatagacaccgtcaatgaaatgtgaacagaactgacwtgctttactcttagattgaatacgagttttacaagccagtgcataattcgccatgctatagagacagatgatcttccagatggatgcctgagtgtagaat

SEQ ID NO: 25024 - DNA, 201 bp, Homo sapiens
ggatctatcctttgaccaaatttttcactcttcaagggcctcatactgctctgatttcagatgtatagatatattgcttatcaaacactgatgggtctgarcatgagtggtagtaagatatttccagattaagtagacaaattgtgcagaactttttagtatcactatttaaatgactaaatttttgaggtttatgtgtat

SEQ ID NO: 25025 - DNA, 201 bp, Homo sapiens
cagctcaggaaagtcaggaatacaaggggtaggattttatgaaaatgcaattttgatgtcttgttcataatggtctacagaaaaagaaggaggctgttgaragcggcaaacgacaaattgagaacactttaaaagagggcaatgacatactcgatgaagccaaccgtcttgcagatgaaatcaactccatcatagacgtga

SEQ ID NO: 25026 - DNA, 201 bp, Homo sapiens
tatcaacttaaatgtaaagaaaattcaaaggcacaaaacaccacacttaatactggaagcttcaagaacatatgaaaagaaatagtagcatgtataatggrtcttaaacaattaatttcaggattttcactggtgggaatagtaggaaattatatgggcaaatgcttacaaaatacaaggcatgtgcaaaacctaataagt

SEQ ID NO: 25027 - DNA, 201 bp, Homo sapiens
ggaagggaggaaagagggaaggagggagagagggagggagggagggaggaaggaaggaaggaaaggaaggaaggaagggaggaaagagggagggagggaargagggaaggagggaggaaggaaggaagagagagagagaaagaaaggaagaaagggagaaagacctggagtttgctaatagagttggcaggcacagttcag

SEQ ID NO: 25028 - DNA, 201 bp, Homo sapiens
aggaagggaggaaagagggaaggagggagagagggagggagggagggaggaaggaaggaaggaaaggaaggaaggaagggaggaaagagggagggagggarggagggaaggagggaggaaggaaggaagagagagagagaaagaaaggaagaaagggagaaagacctggagtttgctaatagagttggcaggcacagttca

SEQ ID NO: 25029 - DNA, 201 bp, Homo sapiens
aaacaaaggaaaaaaaagagtcagagagtgaggggagaaggtattcatgatgatacctttgctaagattctagacttttatcatctggacaagaggagaayaaaaataacaaagagacagaatcttgaagggctaaaagagattaagtaagcaattggaatatcaagagcaattaaaaagactgttgagctaaaagtgagt

SEQ ID NO: 25030 - DNA, 201 bp, Homo sapiens
gggggtggcaggtaatgaagctcttccttgccatgctaatgatttgttattcatcctgactgcatttgggagctagtgtaggctttcaagcaagagaaggkcatggtttgatatgttcataggatgatcactctgattgcagtgtggagaaatcaccagataagaaaatatggagacaggatctttagctaaaaggctatt

SEQ ID NO: 25031 - DNA, 201 bp, Homo sapiens
tggtgaaaataataatggattctgaatttaaatatttgtttttatctttaccacaagtatcagagtgagaaaggctttggtctcaaaattagacttaattwgaattggtaaaattaacaaacatgcctgagcattatggactttttttttttttgctttaaggatataaaaataaaatattattttaataatgtataataa

SEQ ID NO: 25032 - DNA, 201 bp, Homo sapiens
aataacttgcttaagtcataaaacagcagaggccatatccatgtttcaaatgctggtttgtttaaatagatgtttgatgagctatttcatagtatccttgygcacaagattgaaaatatgagccagatgttagccagctgataggttgatgggcatatacgttgctaaaaaaatgtgacccagagtacactctagtgatat

SEQ ID NO: 25033 - DNA, 201 bp, Homo sapiens
tttgtttttatctttaccacaagtatcagagtgagaaaggctttggtctcaaaattagacttaatttgaattggtaaaattaacaaacatgcctgagcatwatggactttttttttttttgctttaaggatataaaaataaaatattattttaataatgtataataataaataatattatttgacaagtattatcatgaag

SEQ ID NO: 25034 - DNA, 201 bp, Homo sapiens
caggtaccagttttcaacttgatttagcacacagtgaatctattttacatgttttcttattttctcattcttttcatgttagcatctctttgtaacatggyttaataccaataaaccctaaggcagtgacatgagctcattgtctattattgggctgggggtggttacagagctgcagaagcccttctgaaaaaagtgaag

SEQ ID NO: 25035 - DNA, 201 bp, Homo sapiens
gaatggtacatttattatagtcgataaacctaagttgacacctcctcatcacccaaagtccatagtttacattagggttccctcttggtattgtacattcyatgggtttggaaaaatgcattatgacatgtgtccaccgttgttgtaaaatatagaaaagttttactgcccgaaaactcctctatgcttcacctattcata

SEQ ID NO: 25036 - DNA, 201 bp, Homo sapiens
ggaaaaatgcattatgacatgtgtccaccgttgttgtaaaatatagaaaagttttactgcccgaaaactcctctatgcttcacctattcatacctccctcytccttgacccctggcaaccactcatatttttactacatccatagttttgccttttttggaatatatagctggaatcatacagtgtggtactttttcatat

SEQ ID NO: 25037 - DNA, 201 bp, Homo sapiens
gtggaagcccaaagcccaaacccagcatctacatcagctgacacaaatgaccctgtgtttgttggaggcttcccaggtgagtgttggctaccccagcaacmatttctttgctctcttatgttactggttttgaaaacatttatatttacatgtgtctaagaatgtgtgcttatgtgtacttgcttcctagctttagaatct

SEQ ID NO: 25038 - DNA, 201 bp, Homo sapiens
tccagtgcaatctaatggagcaccacacatttagactctggagcatgttttattccctgtggacaggttcctttcgattgctcatgtagggatttaggggrtacttttaatgttatattctatgccttaaaggaaatcttcaatacttgtgcaatacactttttctccccaaatctatttgctcctcctctttggtccctc

SEQ ID NO: 25039 - DNA, 201 bp, Homo sapiens
ttcacacaggcagagcaggaggaagtgggggctggaggtggcacacacttttaaataaccaggtcttatgagaactctgtcatgagaacatcactagggcrgtggtgctaagccattaaaaccactccagtgattcaatacctcccacgaggccccatatccagtattggggatgacatttcaatatgagatttggatggg

SEQ ID NO: 25040 - DNA, 201 bp, Homo sapiens
cagtgtttactgaatgtttttttactgtttcaggatcccatgcaggatactacattacatttagccattgtgtcttcttagggttcctctagactgtgacracactgtcaaaaatactgtaacagtgtttctgatgactttgagagtttggacaggttcgtgtgtttggtaagctgtccctcaattggggtttgcctcata

SEQ ID NO: 25041 - DNA, 201 bp, Homo sapiens
tggtaagctgtccctcaattggggtttgcctcatatctttctcatgattagaatggaattatgagtttttgtgggaaaaacttcagaggtaaagtaccatkttcatcacatcaagaacccatgtgaccaatatgacttattactgtggatattgaccctgatcacctgactaacatagtgtttgccagatttttccactgt

SEQ ID NO: 25042 - DNA, 201 bp, Homo sapiens
tgagtagtagatcaatttgttcacatattttgcaaaagttagagcttattactcattcatgtactattgatgtaacgcattagaagacagttaacattagktcctaatggcacctgaccaaaaggagctgtgggcctggcctatacaccttattgcctgttttcagcatcaactgatttagtgaagcagcaaaaagaaaaa

SEQ ID NO: 25043 - DNA, 201 bp, Homo sapiens
accatatcaaggtactgttggtaaccagggtatttgaggttgaatagaaatgattcctggcctcaaagaatttacaacctcctgaaaaattcagacatgtyaacctttcactctacataatactatgataatattgactgggagattcagcaaaagtttcacaaaaataacagcatcatagcagaagtggagaggaattgg

SEQ ID NO: 25044 - DNA, 201 bp, Homo sapiens
aagctaaggaattggtttttatcctgagagccataggaagcaattgaaatattgcagtcatgggttaaaataaaatgttgcagaatttgagtggctcactkaaactgaataaatggttttttatcggaaaatagtgtgatattaggctagaaaagtaggctgggataatatttatctacatatctgtcaggtacctaccat

SEQ ID NO: 25045 - DNA, 201 bp, Homo sapiens
ttcctatatataaacacacatagacaatcaagaatcacactgaaaggaaaatatgagtgagaaggaagtggatcctttataagcaggagaaagctaatacsatttgtttgtactgcagtattattttgtaaagagtaatagctacttgtcttgcataactaatttctttaaatatcagaatgaaatgttattttaagaatt

SEQ ID NO: 25046 - DNA, 201 bp, Homo sapiens
gtcttcctatatataaacacacatagacaatcaagaatcacactgaaaggaaaatatgagtgagaaggaagtggatcctttataagcaggagaaagctaayacgatttgtttgtactgcagtattattttgtaaagagtaatagctacttgtcttgcataactaatttctttaaatatcagaatgaaatgttattttaaga

SEQ ID NO: 25047 - DNA, 201 bp, Homo sapiens
ctagccctataaagaaggaagaatgttttcaataacttaaaaggaaaaacaaagaaacaatttatacatttgcaggagaaaaggaaaaggtcaagtagtasagcaaccaacgaccactatgaagaaagtggaggtcagacaatttgagaagaaaaaaagcattgaaaataccataagaaaagaaacaaagaaatgatagaa

SEQ ID NO: 25048 - DNA, 201 bp, Homo sapiens
agcaggaaagaagaatttgcatattagatagacaccatgtatccatttttttatctcaattctaatcacttgctttaaataattttttctgcccatgatayttcagtagtagccatcagaaggtgttaatcagttatgctttcatatgttaactttacagtgtcgtattttgtaataggtataaaattctgccaatatttt

SEQ ID NO: 25049 - DNA, 201 bp, Homo sapiens
agagtcctctactcctttgagtctagccctataaagaaggaagaatgttttcaataacttaaaaggaaaaacaaagaaacaatttatacatttgcaggagraaaggaaaaggtcaagtagtagagcaaccaacgaccactatgaagaaagtggaggtcagacaatttgagaagaaaaaaagcattgaaaataccataagaa

SEQ ID NO: 25050 - DNA, 201 bp, Homo sapiens
gcctgtgacactgcatttttcattgacagggttcctcagtgaggggggaaaaaagcatttaatgattttcaaatgacacatgtaacctaaacactataggrcagtgatatttgcctaatctagaaccttctaccaggttgtccaagatgtgcccctagagaatatagcactcaattaatagtgttggatgagtttatttac

SEQ ID NO: 25051 - DNA, 201 bp, Homo sapiens
tattggataagaaaaagaagacaatctgtcccagaaattttgttggaatgtttttcatgaacagaatgaataaaattttagtttaatagatcagtataatrtagttctactttgctggaaaagaaatatatttgaaaagcattacgttgagtaattatctagataggactaacatcccataaatataagatctgatataaa

SEQ ID NO: 25052 - DNA, 201 bp, Homo sapiens
aacctgaaaaatatagctgtctatttaaagaagacattttcttgtttggcagaatattatcatcatacagcatatgtacaatatggtcctaatttgtgtcratatgtgctaggcttagaaaactcactttaagttttactaaatttattttggagtttaactcttacttttgacatgatttatattctaaggagatctcag

SEQ ID NO: 25053 - DNA, 201 bp, Homo sapiens
ttattccttctctctttccacaatcatttaaaaataattaaatgtctgaaaaattacaaaataagtgctatagagaatcagtgatttattaaatgactatyggataagaaaaagaagacaatctgtcccagaaattttgttggaatgtttttcatgaacagaatgaataaaattttagtttaatagatcagtataatatag

SEQ ID NO: 25054 - DNA, 201 bp, Homo sapiens
aacctcaaacagagagtgatggtgagttgtaatgcattacaccatgtctgctgttatcattattccttctctctttccacaatcatttaaaaataattaartgtctgaaaaattacaaaataagtgctatagagaatcagtgatttattaaatgactattggataagaaaaagaagacaatctgtcccagaaattttgttg

SEQ ID NO: 25055 - DNA, 201 bp, Homo sapiens
tttttgaagacctcttttaaaatttgcctaaaataaattctcggtatgctataattatagcagaactcttttctcagtcacccactaccactgttagggtsttaaaattatctcagaaaccaagcaagtttgtgctaccaactcacaaaataaaacaggcaaagacaacactctggatagggaattttatcaccattatct

SEQ ID NO: 25056 - DNA, 201 bp, Homo sapiens
caccttgtaactatgctcttcatcatacctaatgatacttgcaagataattgttgcttcatcctaggcattaataaatcctgtacataggcatgttattaygaatagctcagtgacattgctccttaagaaaaaaaatttttttgaagactaaaacctatgtaatactgagtccaaggggatagcgggaggtaagtgaact

SEQ ID NO: 25057 - DNA, 201 bp, Homo sapiens
tgtgcttatattagtataatctgtagtataacagaagtttaaggtgtctgcctataaaaccctttatatgaagtggagtgaatcattaattaatatgtccmgtactcttcttcacatccagacaccgatagttcagaatcctccatctatccacctttccctttgctattcttcacagatgcaggccaacaaagatgagga

SEQ ID NO: 25058 - DNA, 201 bp, Homo sapiens
ctttggaaaaaccaaatgcattttctgaagctataaataagaaaaatccctccctctgcccctcttaaatattacctcctcaaataaggtatgcacacagyaaaactcacaaatcagctccactggagccagcaggctttggcggtttctatctcattcaggttccaaagcagttatggcagctgcttagctgtcacagat

SEQ ID NO: 25059 - DNA, 201 bp, Homo sapiens
tttggaaaaaccaaatgcattttctgaagctataaataagaaaaatccctccctctgcccctcttaaatattacctcctcaaataaggtatgcacacagcraaactcacaaatcagctccactggagccagcaggctttggcggtttctatctcattcaggttccaaagcagttatggcagctgcttagctgtcacagata

SEQ ID NO: 25060 - DNA, 201 bp, Homo sapiens
accatgaaactgggtagtttataaataaacaaacatttatttctcacaattcttgaagctaagaagtctgagatcaaggtactggcagatttggtgtttastgagagccagtttttcatagaaggaggcttcttgctgttctcacatagtagaaagagtgaacaagctcctttggacctattttataagggcactaatttc

SEQ ID NO: 25061 - DNA, 201 bp, Homo sapiens
ccaaaggccccacttcctaatcctatcaccttgaggattaggatttcaacatatgaattttcaggggacacagacattcaggccactgccctttacttatycaatttcccacttatgtaaaaagtgatcaacatgggatccaaagattggaataacaaaatgcttacaaactgtctggcacatattgagatctaaatgaat

SEQ ID NO: 25062 - DNA, 201 bp, Homo sapiens
tagtacaattcttcaggctgtgtattacaggtgaaataaaactccctacacacataattctgctcagcaggtacctcttattacaatctgaagaatgactrtaagaagccaaaacctgtgttcctattggacaaatggactcaatcccgtgactttgcggtcactccttcctatctcatacccttgcccagggctgggaat

SEQ ID NO: 25063 - DNA, 201 bp, Homo sapiens
cccaccccaccagcgtggaacttcgtgtgtattcaaaggtccagtttgaattactgtgaggccagtggctagaaagcagtgtagttgggactggagattcwcatgcctggctcttctcccaagcttcaactgtagctcttgagcagcagcttcctctgagcttctaaaaaatgcccagaaaattgcccagccaaccacatt

SEQ ID NO: 25064 - DNA, 201 bp, Homo sapiens
gtggaacttcgtgtgtattcaaaggtccagtttgaattactgtgaggccagtggctagaaagcagtgtagttgggactggagattcacatgcctggctctyctcccaagcttcaactgtagctcttgagcagcagcttcctctgagcttctaaaaaatgcccagaaaattgcccagccaaccacatttcctggcaagcata

SEQ ID NO: 25065 - DNA, 201 bp, Homo sapiens
atacacacacacacacacacacacacacacacacacatatatatatatataaagttttacagaactttgttttcaacttttaaaacaggatttctaaagaagttatgtggttttttttctttcatggcaatggcgcctccagcctcacctttttcaaacccacatcttatcttcatatcctattttattgtagtgaaatcg

SEQ ID NO: 25066 - DNA, 201 bp, Homo sapiens
agttgggactggagattcacatgcctggctcttctcccaagcttcaactgtagctcttgagcagcagcttcctctgagcttctaaaaaatgcccagaaaaytgcccagccaaccacatttcctggcaagcatagcaccaggcatatggtcagtttgagtgctattagataggctttagaacttccaagggatcattggttt

SEQ ID NO: 25067 - DNA, 201 bp, Homo sapiens
acagtgcagccttcagtctgtggttaaaggcctgacagcccctggcaaacccctggtgtaagtccaggaatccaaaagctgaagaacttggagtgtgatgktcaagggcaggaagtatccagcatgggtgaaagatgaaggctggaagagtcagaagatctactctttccactttcttctgcctgcttttattctagccac

SEQ ID NO: 25068 - DNA, 201 bp, Homo sapiens
cacattgagggtgggtctgcctcttccagtccagtgactcaaattttaatctcctttggcaacaccctcacagagacacccaggaacaatactttgcatcsttcaatccaatcaagctgatactcaatattagtcatcacaagtccaccccttgtcaacttgaacccatacacatctcctgaaatcatacataatctccaa

SEQ ID NO: 25069 - DNA, 201 bp, Homo sapiens
aaaaatgaagaaagaattttattttcagccattttttttccaagagaaaaagaaatctaaagacaagcattgtaggaagggttaggagacagaaatgttcrttagtttaaatttattttttttgtagttcaggtagtacattatttaaagtaatgaaaacccacaaactactcaagtaataattcctctagaaaaccaagc

SEQ ID NO: 25070 - DNA, 201 bp, Homo sapiens
ggttatagaaaactataggacaatataataagtagatacttcactattatttggaattgtcatagatatattggccatgatcatttggaagccagatttcrtataattaggacgttcttcatttgagtaccattgagtgccctgacattccttttttgaatcatcccaccagaatccttgatgaggctaaaaacatctcct

SEQ ID NO: 25071 - DNA, 201 bp, Homo sapiens
agcattgtaggaagggttaggagacagaaatgttcattagtttaaatttattttttttgtagttcaggtagtacattatttaaagtaatgaaaacccacaractactcaagtaataattcctctagaaaaccaagccaaggctatgacggagatgggaatgttttcttgctacattatgacatttctctgatttgtggcca

SEQ ID NO: 25072 - DNA, 201 bp, Homo sapiens
tctcttctgggaagtgcacctaccccagaaagattttgtgaaattaattccagtaatgtagtacaagtgctctgaatctcacagcatgcttcacaaataargtgaagaattgtctcatatcacacacctgctagagcacctggttgcagagacttttggaggatgctatgggtatttaagatatgttggtagtatttcata

SEQ ID NO: 25073 - DNA, 201 bp, Homo sapiens
aggaagggttaggagacagaaatgttcattagtttaaatttattttttttgtagttcaggtagtacattatttaaagtaatgaaaacccacaaactactcragtaataattcctctagaaaaccaagccaaggctatgacggagatgggaatgttttcttgctacattatgacatttctctgatttgtggccaattacgga

SEQ ID NO: 25074 - DNA, 201 bp, Homo sapiens
ttgttttaaccatttttttttactttaaagaaaaagctataaactagttatatgatcttttcttcttcctttcatatgatgctgctaactcaatagagagmcacccgattacaaatgctattgatggaaagaacacttggtggcagagtcccagtattaagaatggaatcgaataccattatgtgacaattacactggatt

SEQ ID NO: 25075 - DNA, 201 bp, Homo sapiens
tttaagttttttaaaacattgaaaaacagaaatatatgcacacagaaagcaatttagccagcacaaccgggtataaaatgagaagttttagtacattgtcyctcacggcactattaactgcctcattcattcccagtttctacccactattaattactgtaaaggtttttggcatgttcttctctacccagctcccaccag

SEQ ID NO: 25076 - DNA, 201 bp, Homo sapiens
gtctgtaatatctttctacctattagaactgctggaaatttttgcatggtattagttcctgaaagcacacgttattttaaagatactacttttactatttytatattgttaaagcatgatataataacaacaaagattataaacacttattgagtacttaatatacttatgttaagtgtatgtaatcctcataccaattgg

SEQ ID NO: 25077 - DNA, 201 bp, Homo sapiens
agaaattgagtgtcatgcagttccaaagctggaatccaagtcttctagctctgccccggtgcttttttcctctgaaatttttccagttgagaagagattasgaattctcaaggtgtgcctaacattcagcagagagatgcaaaacactttttaatccgtgtgtgtaattaaaaacacagttgtacttgggtaattatatcc

SEQ ID NO: 25078 - DNA, 201 bp, Homo sapiens
atcttcttctcataccgtaataaacagtctcctaactttaactaccgaatatgtgctaataatttacaattctatatctgcagcccagagctctttcctaraggcaaactctgtgtaccaactgccttctggatccctccactccattattctatggttttagatgtatgacatttgtttttctgtccacaggcaacaggt

SEQ ID NO: 25079 - DNA, 201 bp, Homo sapiens
aaggaagcaaaaaaacgaaaataaaaaaatcttatttattacattctattagccccatggactttgcaaggcctgtgtccttcaaaaatgctgacattggwcgctgtgcccatcagaaactccgtgaagatgaagatggagcagctccagctgaaatagttatccagcctgagccagttcccaccccagcctttcctacgc

SEQ ID NO: 25080 - DNA, 201 bp, Homo sapiens
ctcttaatatttggtgcaggacatttcaaagctgagccctcttgcattgcctttttcagatgacctcaagcagtttggcctaacaaccagtattccgttcygaggttgcatcagatccctgaagctcaccaaaggcacaggcaagccactggaggttaattttgccaaggccctggaactgaggggcgttcaacctgtatc

SEQ ID NO: 25081 - DNA, 201 bp, Homo sapiens
atactaaaaatacaaaaaattagccaggcatggtagcaggtgcctataatcccagttacttgggaggctgaggcaggagaattgcttgaacctgggaggcygaggttgcagtgagccgagattgtgccattgcactccagcctgcgcgacaatgtgagactccgactcgaaaaaaaaaaaaaaagaaaaagaaaaaaaaga

SEQ ID NO: 25082 - DNA, 201 bp, Homo sapiens
aggtcaggatttcgagaccagcctggccaacatagtgaaatcctgtctaatttgtatactaaaaatacaaaaaattagccaggcatggtagcaggtgcctrtaatcccagttacttgggaggctgaggcaggagaattgcttgaacctgggaggccgaggttgcagtgagccgagattgtgccattgcactccagcctgcg

SEQ ID NO: 25083 - DNA, 201 bp, Homo sapiens
tttcctaagcctggttttgtggagctctcccctgtgccaattgatgtaggaacagaaatcaacctgtcattcagcaccaagaatgagtccggcatcattcytttgggaagtggagggacaccagcaccacctaggagaaaacgaaggcagactggacaggtaccctcacacctagctgataatgcattttccctaatgctt

SEQ ID NO: 25084 - DNA, 201 bp, Homo sapiens
aatctcctttggcaacaccctcacagagacacccaggaacaatactttgcatcgttcaatccaatcaagctgatactcaatattagtcatcacaagtccamcccttgtcaacttgaacccatacacatctcctgaaatcatacataatctccaaataaagacaataataacatcataattatacctaacataatacagcta

SEQ ID NO: 25085 - DNA, 201 bp, Homo sapiens
catacaaaatgtattttaacatgcatagcatggaagaatcacaggaggatgattacccaataacccaataggagcatagatgtagatatacccttcttcaygggggagggaagatggggaaaatatggcaatttggaaaatagtaaatgattttttaggggaattcaagaacctacaatggcctgggacaaagtctgttgg

SEQ ID NO: 25086 - DNA, 201 bp, Homo sapiens
aacggtatttctttctgcagaaggctgatgctgtacgtgtgattacattcactggctgcatgggagaaacatactttgacaacaaacctataggtttgtgraatttccgagaaaaagaaggtgactgcaaaggatgcactgtcaggttagttgagatgagaactctcccagggtctgtcctgtgcataataaaagcttcga

SEQ ID NO: 25087 - DNA, 201 bp, Homo sapiens
ataatacagctatcccttgtacaatcagaagcacactaatccttaacctaaatgctattacataaagttaacaacacttaaatgctgatatgaagtcaatraattttatgtcacatgataaaggaaaaagaaagcaaatgaagatattttcctagtacaagtgtatacatgcacaaacatattcttaacagaataaggagg

SEQ ID NO: 25088 - DNA, 201 bp, Homo sapiens
gtagcatgctaatgagccagggcagagttgctaagtggcaacgtgaaactttagtcaaaggaaggaagtaagggaaggggaggagaggggaggggaggggrgggaggcgaggggaggggaggggaggggaggggaggggaggggtggtagaaagaaagaaggaagggcagttttcttgtttgaacaagaaaggcttgaact

SEQ ID NO: 25089 - DNA, 201 bp, Homo sapiens
gactcatcatttatgaaaatatacaattttgttctgcaaaataatttaattttttaaaattccttgtgcaatgagaaaagatcagagaggcctacagtttscttttacagagctaggccaggggctgtatttagagtaattgaacacatgattttacttgaatgcggagaaacttgaccaactgtgaatatgcaatttcac

SEQ ID NO: 25090 - DNA, 201 bp, Homo sapiens
tccacttgattattaaaatcctcctcagctgaggtcacccgttggtgagcactcacataggatacaaatatcttcacagtttttgaccactcagagaggtycatccacatacctcttccccagattactttgccaccaattttttaatcatgcttcttccaagtccctgaccatccagccaaaccattggctacagcacat

SEQ ID NO: 25091 - DNA, 201 bp, Homo sapiens
agtccctgaccatccagccaaaccattggctacagcacattaattagtatataattacacatctggccatttcttcttccaagcaagtgcacaaccaggtrccctgctcaaaattctgccccctgggaagacttccctttgctactgtccttcagggatgtcctagaaaggggctgtagtgctgcagctgtccacttttgg

SEQ ID NO: 25092 - DNA, 201 bp, Homo sapiens
agcagctgctgctcgctcagctcacaagccaaggccaggggacagggcggcagcgactcctctggctcccgagaagtggatccggtcgcggccactacgaygccgggagccgccggggtcctcctccttctgctgctctccggaggcctcgggggcgtacaggcgcagcggccgcagcagcagcggcagtcacaggcacat

SEQ ID NO: 25093 - DNA, 201 bp, Homo sapiens
caccaagggcattgtttttcaacatccagagattgttgcccacatggacctgatgagagaagatctccatttggaacctttttattggaaacttccagaayaatttgaaggaaagaaggtaagcacaagaactttaatgtcaagtgagaacaagataaaatctttttagaatcacaccatttggagatttatccaattcct

SEQ ID NO: 25094 - DNA, 201 bp, Homo sapiens
ctaagtaacaaatatataggaatttattattctattatctttacttttgtgtaagcatgtaaaagaactggattttagaaattataaacatgtattaaagrtaattcttatagttttctcaataatttgctgctctgtattattaaaactactttgtctataaaagtttgctgaagtgaaaaatattgctgtttctattac

SEQ ID NO: 25095 - DNA, 201 bp, Homo sapiens
atttgcttttctttaattccccattgtgttccagaaaggattttagatgggactcaaaaagtaacttttttgcttccaattccaacataatcattctcacraacttttgtctcagttcaccaagaggaaaaacattcaatattgacaaacaccctaaaaattatttaaattgaaagaatagtgcaaaataatcaaggaaaa

SEQ ID NO: 25096 - DNA, 201 bp, Homo sapiens
attagattatgcgtgatcattattttctaggtggttttctaaagttcctgaaaggtcattcagagcattgggaagaagaaatttgggatagtagtaaattmaaagcaatttcaccagtgcctgtacgaaataattgaatggggaatgaccttgggttgtctgtttgcaagaatataaatgtctaattaattggccgtgtct

SEQ ID NO: 25097 - DNA, 201 bp, Homo sapiens
ttttcttgattttttccaaatgttttgaagaaagtttttgtattattaaatgctattcattggtcaatttaagtaatcttcttttaagaaatcattcagarattgtaggtccttgatcgtaattctttttgggtaatttcaatttcaataggttaaacactgtgctggaagatttgagaaagattatcattggtccatttt

SEQ ID NO: 25098 - DNA, 201 bp, Homo sapiens
ttatcgtcaggcatatggctgctcctctgattggccaattgacaaggcatgaaattgaaatgacagaggtaaagttagtcattgtttggtgcaaagatacyaatcaatggttttgcattcagttttgtcatagtgatttctcttcttgttaacagaaagaatggaaatattatggggatgatcctcgagtccatagaactg

SEQ ID NO: 25099 - DNA, 201 bp, Homo sapiens
atctaattttaaacacctttaacttttttgtttattttttgttagtatactttgtttatttatttatttctgttagtaaacttccatcaagaaagtatccyatttcttttctgccttttttaaatgaaagcctgctagtgataaatctctcatcttttgtttgttttttcacttttctttacttttgagacttattttcca

SEQ ID NO: 25100 - DNA, 201 bp, Homo sapiens
agttgactcagaatcagttccttcctttcagatccttatctttaattactttgtcttctaacctggggtcctaatctttgcctaggaatttaaagtaaagrttggccgaatcttatttctcttgacttgtatctacctttactttagctcaccctctgggcgtggcctctagccagtctcactttgagtatctttgaaact

SEQ ID NO: 25101 - DNA, 201 bp, Homo sapiens
aggtttttttcctgtcttcatattgatgaagtgttttttctaaagccattatttcatttattctatgaaagacaaaattggcattttaaaagtagaacacrgtcttttgatacctgtcatctgagatacctaaaggattttttttttaagttagcatcaagggtaaataataacaaatgaagttattttatgttagatctt

SEQ ID NO: 25102 - DNA, 201 bp, Homo sapiens
catttcactttgcaaaccgacttactattctttgtacctctctccttctctttttgctctgtcactaatagagctttcagctactaagacacacaggagtsctttctagagagtaactgaaattaaccacatacatcattttggtggcaaacctcacagccaccagtcatttatagtaccaagtccctgctctttgggtaa

SEQ ID NO: 25103 - DNA, 201 bp, Homo sapiens
attttccaaacgattcacacagcatcaacttaatcttctggaaaacattttagggaccacaaatacatattgtacccaggatgtagtgtacttactgcagygtggtctatgatttttcttggcatgcataattcaaagacccagatagaaatgactgattttagcacttctaacaataaaacaaaagctcttctacaagag

SEQ ID NO: 25104 - DNA, 201 bp, Homo sapiens
acccagcatctacatcagctgacacaaatgaccctgtgtttgttggaggcttcccaggtgagtgttggctaccccagcaacaatttctttgctctcttatrttactggttttgaaaacatttatatttacatgtgtctaagaatgtgtgcttatgtgtacttgcttcctagctttagaatctgcttagaatctgcacctta

SEQ ID NO: 25105 - DNA, 201 bp, Homo sapiens
cctgcagcctaagcatttaaacatttcctgctaccttgtatggtgctatgagacagctgtcattgaagaaattctgttgagaatctgaattactctccttytgtattattttaatgtttgatattcacatgatggttgttttaaccatttttttttactttaaagaaaaagctataaactagttatatgatcttttcttct

SEQ ID NO: 25106 - DNA, 201 bp, Homo sapiens
ctcaaagcagtcattttactaaatttttgatctttattaaacatagatgcaaaagtaataataatatttccacaaataaagggatgttaaccaaaattaaygttcaagaatcctttcagtgtttctctacctctttaaatattccagaaatggtgatacagtcaggagcaatatattgccaggaactttggcaggacgaga

SEQ ID NO: 25107 - DNA, 201 bp, Homo sapiens
tgcagtgactcatgccggtaatcccagcactttgggaggctgaggtgggaagattgcttgagcccaggagtttgagaccagcctggacaacatggcgaaamcccatctctactaaaaatacaaaaattagccaggcatggtgacacatgcctgtaatccaggctactcaggaggctgaggtgggaggatcccctgagcctg

SEQ ID NO: 25108 - DNA, 201 bp, Homo sapiens
ttgcaattaggatggaaagtggacaaatgccacattccatcctatttgtatgcctaaataatgtgcaggggtgatggtcaggatagttaatgacagacacyatacactgtaaaggtcatggtttttataagttatcactgtgtggggaagcccccagccagtgggccagatcagcacaagacattttcctaatggatgcca

SEQ ID NO: 25109 - DNA, 201 bp, Homo sapiens
cactttaacctccacctctcaggtcaagtgattctcctgcctcagcctcccaagtagctgagattacaggcatgcaccaccacacccagctaattttgtayttttagtagagacgaggtttcaccatgttggccaggctggtctcggactcctgacctcaggtgatccacctgccttggcctcccaaagtgctgggataac

SEQ ID NO: 25110 - DNA, 201 bp, Homo sapiens
agcatgagtacaatctccctcctccagtgtctaggttcattttggtgagggctgcatatattcaagagccacagaaagctggctggagcaaacaagctggyggattgcacggtagacctgccttccacccatatgggcctcctcgggatatgaggaactggtggcggcaggggctcagtgctgcagcttatatcaccaaat

SEQ ID NO: 25111 - DNA, 201 bp, Homo sapiens
ggctgaggcaggagaatggtgtgaacctgggaggcagagcttgcagtgagccaagattgctccactgcactccagcctgggcgacagagtgagactccgtytcagaaaaaaaaaaaaaaaaaaaaaaaaattatttaacctcttgatcatcatttctgattgagtatgctaagaagcacattttgatctttgcttttacaa

SEQ ID NO: 25112 - DNA, 201 bp, Homo sapiens
aattagaaaagatattattttattccaagtgaaacatgtattcacacttcacgtcttgaagcaccagtggccatttgggctgagttttcaagaaaaaaaawttatatagattttatgccctttttttaacctaagagatattaagtaatagctattccactatcagacaatgtgcataaattctagtcagatttttctttt

SEQ ID NO: 25113 - DNA, 201 bp, Homo sapiens
aaaccccatctctactaaaaatacaaaaaattagcctggcgtggtggtatgtgcctgtagtaccagctactcgggaaggtgaggcaggagaatccctttaytcaggaggcagaggttgcagtgagccaagatggtgccactgcactccagcctgggcgacagagctctgtctcaaaaaaaaaaaaaaaaaaaaagagaaaa

SEQ ID NO: 25114 - DNA, 201 bp, Homo sapiens
gggaggccagggcaggcagatcacggggtcaagagatggagacgatcctggccagcatggtgaaaccccgtctttactgaaaatacaaaaattaactgggyatggttacgcatgcctgtaatctcagctactcaggaggctgaggcaggagaatcgcttgaacctgggaggcagaggttgcagtgagctgagatggtgcca

SEQ ID NO: 25115 - DNA, 201 bp, Homo sapiens
aatcccaacactttgggaggccagggcaggcagatcacggggtcaagagatggagacgatcctggccagcatggtgaaaccccgtctttactgaaaatacraaaattaactgggcatggttacgcatgcctgtaatctcagctactcaggaggctgaggcaggagaatcgcttgaacctgggaggcagaggttgcagtgag

SEQ ID NO: 25116 - DNA, 201 bp, Homo sapiens
atgttgttaaatgaagaaatgtttaaaataattttttttcaaaaacaaatgcatacatttacaataaaagaaaaagataataactgattaaaatgtctccwaaatataaatttagcagaaagtcaacgttcattcaagccctacatatcttacagtactattgtatgaagcagggttttgtcccgagactattttttcctc

SEQ ID NO: 25117 - DNA, 201 bp, Homo sapiens
caggaggctgaggcaggagaatcacttgaacctggtaggcggaggttgtagtgagccaagattatgccactacactccagcctgggtgacagagtgagacwctgtctcaaataaataaataaataaataaataaataaaaagaaaaaagaaaagaaaagaataggaagagcaaatatattaagtggaagtggatcattgta

SEQ ID NO: 25118 - DNA, 201 bp, Homo sapiens
gatagatagatagatagatagatagatagataatagattagatgatagacagaaagaataagagatttattatgaagaattggcttacgtgattatggagsctgcaaagtcccagtatctgtgagctgcagatccatgatatagttcactttgagtccaaaggccagagaatcacgggagctgatggtacaaaccacagtt

SEQ ID NO: 25119 - DNA, 201 bp, Homo sapiens
atggttttgcattcagttttgtcatagtgatttctcttcttgttaacagaaagaatggaaatattatggggatgatcctcgagtccatagaactgtgaccygagaagacttcttggatatactatatgatattcattacattcttatcaaagctacttatggaaatttcatgcgacaaagcaggtaaactctaatagaaaa

SEQ ID NO: 25120 - DNA, 201 bp, Homo sapiens
accatttcagttgacaggtctaattttaagttccaccttttcataattgattattcatttgtacacaagtatttgttgagtaccagaaatagcatttagtyatttcaagctttagtttttcatcatcctattctccagatttcagcagcatcagaagccatataaacactgccttcggatggcccttagatggccaccaag

SEQ ID NO: 25121 - DNA, 201 bp, Homo sapiens
cccatggccagtcaagttgacacatacaatttacaatgacactggccttcaactccagtgcacaatgtggtcttcctctttattctccaaattcaagttctcttacttgctacagttgtccatatttcttgggaaccatcattctaaaaaatgttgaccaggcctttcttaggcatttctaggaaaaataatataaaatac

SEQ ID NO: 25122 - DNA, 201 bp, Homo sapiens
taactgtagatacattatagattgaaaaataaaaatggatatattggaggatatgcgcaattttattcaaacacatttgaatacttaggtgaagtaaacartaagtttagagcaaaatttactcaaaaagaaatagtacacctgagaactataaccgttaaataaattgcatcagtagttaatacaacaaaataacaatat

SEQ ID NO: 25123 - DNA, 201 bp, Homo sapiens
aaggcagttagagaaggaaaatcaaggatagattctagatttttgtcttgagcaactgcatggatggtgatgtcattgaatgtgatggaatagatcgggargggtgcaagatttttcatggagggaaggccagagaagaaacagttctgctatagccatactgaattttaggcaccttttagacatctaaatagaactatt

SEQ ID NO: 25124 - DNA, 201 bp, Homo sapiens
aggcagtaatttttaattctccctctcttcccacccttccttttcttccctatctcctttattttcttccttcttctttattagtttttaaatatgcatatctctttttataggagaaaggatggataatgattgcagcattctctgaccactctaatatctcaccctagaaattttaataaatgatttactaacattctc

SEQ ID NO: 25125 - DNA, 201 bp, Homo sapiens
ataacttttaaatttagcatgtcaattctttaccaaaaagcctgctaggatttggctgaaattatattgaattgatagatcaatttgggaagaattgacakcttaaaagtattagatatcccagtgtatgaacatggcataactctgcatttttttaggttgttataattttttctcagaaatgtttgtagtttttgatgt

SEQ ID NO: 25126 - DNA, 201 bp, Homo sapiens
catgtatcagcagtttgttctaaaaattgcttaataatattccatttgtgtaatgtacagtgacttgcttacctgtttaccatttaatgggtgtttgggtmatttctagtttggggttacaattttgctgtgaacattagcatacaagtcaaaagcatatttatggacaaatgttttctcttttttttcttaagaacactc

SEQ ID NO: 25127 - DNA, 201 bp, Homo sapiens
tgtgagcagtctacctaatggaagtttcagtagagaagttaatcaagatatttttaaagatgcattattttgctaaaacaaaatattcaattaaaatacarcatgttgttctcagtccctgaacataccgattgccctgctttcagtatggcaagcaacttcagattcctccatgagggtggacagatttgctctagcgct

SEQ ID NO: 25128 - DNA, 201 bp, Homo sapiens
gacctccttgagacacagttttctagtctacaaagagagtcatgaattttctgtggggactaaaggatttggcacatagagggtatccagtgagttcccargtcctggagatgctcacacatggtagctgtctttggtagcagtgctcatagtagctgtgcatatcagttgttcaccagtgaattctaaggctaagttagt

SEQ ID NO: 25129 - DNA, 201 bp, Homo sapiens
tgcactctggcctgggcgaaagagcgagactccgtctcaaaaaaaaaaaaaaaaaaaaaaaaagtacaatacctttagtcttatatctatttaaaaataargcatttttaaaagatccatgaactcctaacaatgaggttaactacatgtgccatttgagatgtgagtctaatactcagtgttcttctgttttgttttaaa

SEQ ID NO: 25130 - DNA, 201 bp, Homo sapiens
cactgcactctggcctgggcgaaagagcgagactccgtctcaaaaaaaaaaaaaaaaaaaaaaaaagtacaatacctttagtcttatatctatttaaaaakaaagcatttttaaaagatccatgaactcctaacaatgaggttaactacatgtgccatttgagatgtgagtctaatactcagtgttcttctgttttgtttt

SEQ ID NO: 25131 - DNA, 201 bp, Homo sapiens
aaattagctgggcgcggtggcgggcgcctgtagtcccatctactcggaaggctgaggccggagaatggtgtgaacctgggaggcggagcttgcagtgagcmgagatagcgccactgcactctggcctgggcgaaagagcgagactccgtctcaaaaaaaaaaaaaaaaaaaaaaaaagtacaatacctttagtcttatatc

SEQ ID NO: 25132 - DNA, 201 bp, Homo sapiens
ggactacaggcgtccgccaccacgcccggctaattttttgtgtttttaatagagacagggtttcaccatgttagccaggacggtctcaatctcctgacctygtgatccgccctcctcggcctcccaaagtgctgggattacaggcatgagccaccgcgcccggcctaatgaagaaccagaactcagcttggaagtgtggtg

SEQ ID NO: 25133 - DNA, 201 bp, Homo sapiens
ctcccaactaaaggcacacctgggattctttctgggccactgggctcccgtgctaaataatacaaaaataatgatgaagattctttttttttttttagacrgagccttgctctgtcgcctaggctggagtgcagtggcgcgatctcggctcactgcaagctgcacctcctgggttcacgccattctcctgcctcagcctca

SEQ ID NO: 25134 - DNA, 201 bp, Homo sapiens
gataacttgcatgaaaagaacattccttcttttgcttactttgagtttaattttctcttgtgttccaagtttttttgttttttgttttttgtttttgagayggagtcttgctctgacccccaggctcgagtgcagtggcagatcttggctcactgccagctccgcctcccgggttcacgccattctcctgcctcagcctcc

SEQ ID NO: 25135 - DNA, 201 bp, Homo sapiens
tcaaatttttactatttttccccttctttgttttccctcttataccggtgaagcttgtgaatgttctcatctgggtaataattgtgacccaaagactgggygatgcatttgccctcccaataccattggagagaaatgttctaaatgtgcacccaatacctggggccacagcattaccactggttgtaaggtgagtgaacc

SEQ ID NO: 25136 - DNA, 201 bp, Homo sapiens
caggctgggacctttggcctacaatcagcaaggggctgtgttccctgcaactgcaattcttttgggtctaagtcattcgactgtgaagagagtggacaatrttggtgccaacctggagtcacagggaagaaatgtgaccgctgtgcccacggctatttcaacttccaagaaggaggctgcacaggtctgtaaatatgactt

SEQ ID NO: 25137 - DNA, 201 bp, Homo sapiens
aaagtgtcaaggccaggtgcaatggctcatgcctgtaatcctagcactttgggaggccaaggcaggtggatcacttgaggtcaggagttcaagaccagccyggccaatatggtgagaccccatttctactaaaaatacaaaaatgggccaggcctggtagcacctgcctgcaatcccagctactcaggaggctgagacact

SEQ ID NO: 25138 - DNA, 201 bp, Homo sapiens
gctccttatgagagtctaactgatgcctgatgatctgacgtggaacagttttatcccaaactcctcccctgcgtctgtggaaaaattgtctccaacaaaasaagtacctggtgccaaaaattttggggaccactggttaatgtatgttagtgatcagaacatttccagggcctaaggcatgagcctgaatgggctcaaaac

SEQ ID NO: 25139 - DNA, 201 bp, Homo sapiens
ggtatcatcagatccaggctctaagtccttacttggggacatattggtcatttggcctgaaacaggccatttaaccttctgaaattcacttggtctcttcygggaagtgcacctaccccagaaagattttgtgaaattaattccagtaatgtagtacaagtgctctgaatctcacagcatgcttcacaaataaggtgaaga

SEQ ID NO: 25140 - DNA, 201 bp, Homo sapiens
tttgcttgttgtaccccctaaatgtcatcctctctctgctcgtactcactgctcaagtaagttcttatttgaaaggacagtaagtatgtcatagttttctrtagtctaagctgtgtcatgttgttcacatccaggtgttaggcaatctataaaacatcttctgttcaccttgtttgcaccttctactcatttgttttgtta

SEQ ID NO: 25141 - DNA, 201 bp, Homo sapiens
acaaaagtccagctctttggcccctaagtggaacaagttttgagatcttattttatgctccagagcactccatggaatcaggctaagactgggacatcacytgaaatcatacccttgattagagcttttcttttccatgtcctgcttcacccactcctttgctagattctcctaggaacacttaaatggtaagcttctttg

SEQ ID NO: 25142 - DNA, 201 bp, Homo sapiens
cttaccctcaaactgcctgtgtttgcataatcatgtggatactacaggatagattctttagactcatcttatgtaggaggaatagtgacatgaaccatcawaagaggagcattaactaaactttgcttgtcttacccatgaaagaacatcagtgtgactccctgccaaatatctgataatgaaaagaaatgcattgtgatc

SEQ ID NO: 25143 - DNA, 201 bp, Homo sapiens
ctgcagcctcaaactcctgagctcaagtgatcctcctgcctcagcctcctgagtagctgggactacaggtgtataccaccatgcccagctatttttttttktttgttttaatagagacaagatctcaatatgttgcacaggctgatctcgaactcctgagctcaagcaatcctcccacctcagcctcccaaagttctgggg

SEQ ID NO: 25144 - DNA, 201 bp, Homo sapiens
aaattagccagacatggtggcacgtgtcagtaatcccagctactcaggaggctgaggcagtagaatcacttgaacccgggatgtggaggttgcagtgagcygagatcgcgccattgcactccagcctgggtgacagagggagactctgtctcaaaaaaaaaaaaaaaaaaaaaaaaaaaaaagcctggaatactgatttag

SEQ ID NO: 25145 - DNA, 201 bp, Homo sapiens
tgagggtggttctgtctttcccagccctctgactcaaatgttaatctcctttggcaacaccctcacagacacactcaggtacagtactttgcatacttcartcaagtagacagtcaatattaatcaccacattctccaacgctttctcatacaggttctatttctccactatgaacagtgagattttttttctggtatact

SEQ ID NO: 25146 - DNA, 201 bp, Homo sapiens
ggaaacttctaattaaattgagggaagatgctagcaggccagaatttgggaattagatgatctggctccaaattcaatacatattgtctatgtaattagckgtgtcacctaatgtaccaataatgccttttcaagaaacactgtgcagtctgttctgattcctccattggcttaattcctataataaatatagtttccaaa

SEQ ID NO: 25147 - DNA, 201 bp, Homo sapiens
atggtgcctacccagaatgagggtggttctgtctttcccagccctctgactcaaatgttaatctcctttggcaacaccctcacagacacactcaggtacartactttgcatacttcaatcaagtagacagtcaatattaatcaccacattctccaacgctttctcatacaggttctatttctccactatgaacagtgagat

SEQ ID NO: 25148 - DNA, 201 bp, Homo sapiens
gttaattcttacacagggttttctggagggacagaactaataggattgatgtatatatgaaggggagtttgttaggagaattggctcacatgatcacaagrtgaagtcccacaataggccatctgcaagctgagtagcaagaaagccagttcgattcccagaacctcaaaattagggaagccagcggtgcagccttcagtc

SEQ ID NO: 25149 - DNA, 201 bp, Homo sapiens
gtaatatcattgtatatctactcatatcttttcctatgcaaatagtttttctacaaatgggtgatatttatataactgtttcataacttactatgggaatkaacatcacatacgtattttaaaaaatattctcaaaaatatatttttaaaatgtatattgaactagattctgagaatttacatcattattatagtaagaac

SEQ ID NO: 25150 - DNA, 201 bp, Homo sapiens
tgctttggctgacacttgatgggctgcaaccactgtcctgcacccactgtcagacaagccccagtgaggtgaccctggtacctcaattggaaatgtggaartcacccatattctgtgtcgctcatgctgggagctgtagactggagctgttcctattcgaattatactggtttctaaaaaagattgtaatatattgttgag

SEQ ID NO: 25151 - DNA, 201 bp, Homo sapiens
gcttcccgggtgaggtgatgcctcgccctgctttggctgacacttgatgggctgcaaccactgtcctgcacccactgtcagacaagccccagtgaggtgamcctggtacctcaattggaaatgtggaaatcacccatattctgtgtcgctcatgctgggagctgtagactggagctgttcctattcgaattatactggttt

SEQ ID NO: 25152 - DNA, 201 bp, Homo sapiens
cttcctcctttagctcagagaagtttgatcgtctgaagccttcttctctcaactcctcaaagtcattctccatccagctttgttccattgctggcaaggarcttcattcctttggaggaggagaggcgctctgatttttagagttttcagcttctctgctctgttttttccccatctttgtggttttatctacctttggtc

SEQ ID NO: 25153 - DNA, 201 bp, Homo sapiens
cttgagtctttatccaatttgccagtctgtgtcttttaattggagcatttagcccatttacatttaaggttaatattatgtgtgaatgtgatcctgtcatkatgatgttagctggttattttgctcgttagttgtttcagtttcttcctagcatcgatggtctttacaatttggcatgtttttgcagtggctggtactggt

SEQ ID NO: 25154 - DNA, 201 bp, Homo sapiens
tgcttcttgagaactactatcaacaataaaaaaagctttgattttaacgtgtatatcttaagatttcttttgatcaatactaatgaaaataaacctgaaamgcgaatcattggacaaatgtgagatttttcctttaatttatacattaattgatgtaagatagtatttagaaagtttcaatcctttccagttacaattgta

SEQ ID NO: 25155 - DNA, 201 bp, Homo sapiens
tgcacaaatacgcgtagtctgctgacagtaacctgccaggttctagacttccatattgattactgttagcaaaatgtgtaggtgaaatttttgtagggtaygcacgtgaccattcacagaaggcaagaggttctctttggaatttaattttctgtgtgaaaaataaatcacttttttgtgtgtgtggaacatttctcatgg

SEQ ID NO: 25156 - DNA, 201 bp, Homo sapiens
attttactctctatatcaatatcacacacactaacacttggtgtgcattttagaatatcttgctggttcccagtaaatatgtcaactttttgcactatatrccgcttgaaatgtcaatactgcacaaatacgcgtagtctgctgacagtaacctgccaggttctagacttccatattgattactgttagcaaaatgtgtag

SEQ ID NO: 25157 - DNA, 201 bp, Homo sapiens
tataatcacattttatgaataagttttatttcacttaacagatttatttattttttaaaaccacaactttaattcccaagtaactcttagaagtttctccyttttggattttcattttgatgtttagtaggcttaaattccagtgtttaacacaacccccagcttttgagtcacagtttatttcattatagtagacccctg

SEQ ID NO: 25158 - DNA, 201 bp, Homo sapiens
aaagtcaggggatgtgtttagttcttaatttgcttgacttctgtagcacgtcataatgctgctcagttatgtccttacaacaccgccagttatcatgcatygagtcacttctgcatctcttaatttccatagtgttatgctctcctaatttctccttttcctctgtggaatgccagtcaccttgccagctccactttctct

SEQ ID NO: 25159 - DNA, 201 bp, Homo sapiens
cacactgatgggtcttgagtctttatccaatttgccagtctgtgtcttttaattggagcatttagcccatttacatttaaggttaatattatgtgtgaatrtgatcctgtcattatgatgttagctggttattttgctcgttagttgtttcagtttcttcctagcatcgatggtctttacaatttggcatgtttttgcagt

SEQ ID NO: 25160 - DNA, 201 bp, Homo sapiens
acatgagatgggtctcttgaatacagcacactgatgggtcttgagtctttatccaatttgccagtctgtgtcttttaattggagcatttagcccatttacrtttaaggttaatattatgtgtgaatgtgatcctgtcattatgatgttagctggttattttgctcgttagttgtttcagtttcttcctagcatcgatggtc

SEQ ID NO: 25161 - DNA, 201 bp, Homo sapiens
agaccgaggtgggcagatcacctgaggtaaggagtttgagaccagcatggccagcgtggtgaaaccctgtctctactaaaaacgcaaaaattagctgggcwtggtggtgggtgcctgtaatcccagctactcaggaggctgaggtaggagaattgctggaacccaggatacggaggttacagtgagctgagattgcgccac

SEQ ID NO: 25162 - DNA, 201 bp, Homo sapiens
gagcctgtgtgtgtctctgcacatgagatgggtctcttgaatacagcacactgatgggtcttgagtctttatccaatttgccagtctgtgtcttttaattrgagcatttagcccatttacatttaaggttaatattatgtgtgaatgtgatcctgtcattatgatgttagctggttattttgctcgttagttgtttcagtt

SEQ ID NO: 25163 - DNA, 201 bp, Homo sapiens
tatgtaatggccttctttgtctcttttgatctttgttggtttaatgtctgttttatcagagactaggtttgcaacccctgcctttttttgttttctatttscttggtagatcttcctccatccctttattttgagcctgtgtgtgtctctgcacatgagatgggtctcttgaatacagcacactgatgggtcttgagtctt

SEQ ID NO: 25164 - DNA, 201 bp, Homo sapiens
atctcctggattcactgatttgttgaagggttttttgtgactctatctccttcagttctgctctgatcttagttatttcttgccttctgctagcttttgartgtgtttgctcttgcttctctagttcttttaattgtgatgttagggtgtcaattttggatctttcctgctttctcttgtgggcatttagtgctataaatt

SEQ ID NO: 25165 - DNA, 201 bp, Homo sapiens
taatttgcatagaggtgtttatagtattctctgatggtagtttgtatttctgtgggatcggtggtgatatcccctttatcattttttattgcatctatttsattcttctctcttttcttctttattagtcttgctagcagtctatcaattttgttgatcttttcaaaaaatcatctcctggattcactgatttgttgaagg

SEQ ID NO: 25166 - DNA, 201 bp, Homo sapiens
catgagaaaaggcgataatcatctttcatatcaaatattagaacaatgcaagagaaatatggtgattttactctctatatcaatatcacacacactaacayttggtgtgcattttagaatatcttgctggttcccagtaaatatgtcaactttttgcactatataccgcttgaaatgtcaatactgcacaaatacgcgtag

SEQ ID NO: 25167 - DNA, 201 bp, Homo sapiens
cctgttattggtctattcagagattcaacttcttccttgtttagtattgggagggtgtatgtgtccaggaatctatccatttcttcaagattttctagttwatttgcatagaggtgtttatagtattctctgatggtagtttgtatttctgtgggatcggtggtgatatcccctttatcattttttattgcatctatttga

SEQ ID NO: 25168 - DNA, 201 bp, Homo sapiens
ccatttattaaatagggaatccattccccattgcttgtttttgtcaggtttgtcaaagatcagatggttgtagatgtgtggtattatttctgagggctctwttctgttccattgatctacatctctcttttggtaccagtaccatgctgttttggttactgtagccttgtagtatagtttgaagtcaggtagcatgatgcc

SEQ ID NO: 25169 - DNA, 201 bp, Homo sapiens
ttaccccaattcctggcaaccaccattcattccaccattctactctctgcttctatgagttcaactttttagattccacatgtgagtgagatcatactgtrtttgtttttctatgtgtggcttatctcacctagcacaatgcccttcaggcttatccatgtcattgcaaatagcaggatttccttctcttttatggctgaa

SEQ ID NO: 25170 - DNA, 201 bp, Homo sapiens
tttttcttgtaagtttgtttgagttctttgtagattctggatattagccctttgtcagatgagtagattgcaaaaatcttctcccattctgtaggttgccwgttcactctgatggtagtttcttttgctgtgcagaagctctttagtttaattagatcccatttgtcaactttggcttttgttgcccttgcttttcgtgtt

SEQ ID NO: 25171 - DNA, 201 bp, Homo sapiens
cgggcatggtggcacatgcctgtaatcccagctactcgtgaggctgaggcaggagaatcgcttgaacctgggagacaagaggttgcagtgagccaagatcrcaccactgcactccagcctgggagacagagcaagactccatctcaaaaaaaaaaaataaaaattaaaaaaaaagcctgaacctagaaacggacctacaaa

SEQ ID NO: 25172 - DNA, 201 bp, Homo sapiens
tgtggatgcagatatctccttgagatactgatatcaccttttaaaatatatagctagaaatgggattgctgggtcatattgtagtactattttcatttttkgaagaatctctatgcttaatgctgttttccatagtggctatgcctatttacattcccaccaaaagtgtagaagggtttctttttctctgtttcctcacca

SEQ ID NO: 25173 - DNA, 201 bp, Homo sapiens
caagtaatttatttatgagcatgtgttttactgtttttaaaactgggatgactttaatttaaatgaacagtgatttgagatttatagcttccctttctttrtgtcatggataatttctctgtgctaaggtgtgagcatacacatcatttgggctgttattgaagtagaatacgaagcctgccttctttcactagcagggga

SEQ ID NO: 25174 - DNA, 201 bp, Homo sapiens
cttttcagctgtgaaaactattattactaagtattaaaacaaactgagggcaaggcacggtggctcatgcccgtattcccagcactgtgggaggccgaggmgggtggatcacttcagatcaggagttcaagaccagccttgccaacgcggtgaaaccctgtctctactaaaaatacaaaaattagccgggcatggtggcac

SEQ ID NO: 25175 - DNA, 201 bp, Homo sapiens
gccataaaaaatgatgagttcatgtcctttgtagggacatggatgaaattggaaatcatcattctcagtaaactatcacaaggacaaaaaaccaaacaccrcatgttctcactcataggtgggaattgaacaatgagaacacatggacacaggaaggggaacatcacactctggggactgttgtggggtgggggggagggg

SEQ ID NO: 25176 - DNA, 201 bp, Homo sapiens
tactatgcagccataaaaaatgatgagttcatgtcctttgtagggacatggatgaaattggaaatcatcattctcagtaaactatcacaaggacaaaaaamcaaacaccgcatgttctcactcataggtgggaattgaacaatgagaacacatggacacaggaaggggaacatcacactctggggactgttgtggggtggg

SEQ ID NO: 25177 - DNA, 201 bp, Homo sapiens
ataaagacacatgcacacgtatgtttattgtggcactattcacaatagcaaagacttggaaccaacccaaatgtccaacaatgatagactggattaagaamatgtggcacatatacaccatggaatactatgcagccataaaaaatgatgagttcatgtcctttgtagggacatggatgaaattggaaatcatcattctca

SEQ ID NO: 25178 - DNA, 201 bp, Homo sapiens
atcaggaggagaatatagcaacttcgtcttctggaaacaactttggtcttgacttgaaagcagatgacaaaatatattttggtggcctgccaacgctgagwaacttgaggtaatttagtttatatgtaaagctaaggattaagttttaattaaatgaccactatgctcactagagttctgaagtttaattacaataagaat

SEQ ID NO: 25179 - DNA, 201 bp, Homo sapiens
tagaatggcagtcattaaaaagtcaggaaacaacagatgctggagaggatgtggagaaataggaacacttttacactgttggtgggactgtaaactagttyaaccattgtggaagtcagtgtggtgattcctcagggatctagaacttgaaataccatttgacccagccatcccattactgggtatgtacccaaaggacta

SEQ ID NO: 25180 - DNA, 201 bp, Homo sapiens
agacatttatacagccaaaaaacacatgaaaaaatgctcaccatcactggccatcagagaaatgcaaatcaaaaccacaatgagataccatctcacaccarttagaatggcagtcattaaaaagtcaggaaacaacagatgctggagaggatgtggagaaataggaacacttttacactgttggtgggactgtaaactagt

SEQ ID NO: 25181 - DNA, 201 bp, Homo sapiens
gttttcatgtggcatgtttgtttactaatttacaaaatttgttttaccccctgcagctgtaaatgaaaaagctataaaactaaatgaaactctaggaactygagacgaggcctttgagagaaatttggaagggcttcagaaagagattgaccagatgattaaagaactgaggaggaaaaatctagagacacaaaaggaaat

SEQ ID NO: 25182 - DNA, 201 bp, Homo sapiens
gcagtctccaagaacccaggaagtatgtgatccataggagtgtacatattttattttctttaaaaaataagacagacacttctcaaaagaagacatttatrcagccaaaaaacacatgaaaaaatgctcaccatcactggccatcagagaaatgcaaatcaaaaccacaatgagataccatctcacaccaattagaatggc

SEQ ID NO: 25183 - DNA, 201 bp, Homo sapiens
ctggactggaagtgtttatattctttttaaaagaatagcagtttttattccagaaaaaaatattaaattataggattgtttttgatatctagactcttttkctaaagcacagttaattatcttataattatgctgtatagattttccatatactgctcttaagcattagtgatttccacttacttctaggaatgttttctc

SEQ ID NO: 25184 - DNA, 201 bp, Homo sapiens
aataaataaacgttttcagatttttttttctaacttttgagcaaggtttttaaaaactttttggtatatagtttgtttatgctgcctatgcaattatcttstctttggtgaaaaaaataaaacttatttcattacacatgtaaagcatcaataagaagtcagttaattcctgtacctcatgtttaaatgctgtgggtgaga

SEQ ID NO: 25185 - DNA, 201 bp, Homo sapiens
gaatcgcttgaacccaggaggcggaggttgcagtgagctgagatcgtgcctctgcactccagcctggtgacagagcgagactccatctcaaaaaaaaaaawaataataataataagggtaaatacaaggagtgtgttttgaatacaaaatatctatttttagaatctcaaacccatgagttactttcttccatatataagt

SEQ ID NO: 25186 - DNA, 201 bp, Homo sapiens
acttgtcccatgtgatattaagaaaagggccaatcctccagttacaaagctacaccagttttataattcttatttgctttattcttgccccacaaggaaaygtatttacaggggttatacatggtatttagttcagttgctggactggaagtgtttatattctttttaaaagaatagcagtttttattccagaaaaaaata

SEQ ID NO: 25187 - DNA, 201 bp, Homo sapiens
agcaaggtttttaaaaactttttggtatatagtttgtttatgctgcctatgcaattatcttgtctttggtgaaaaaaataaaacttatttcattacacatrtaaagcatcaataagaagtcagttaattcctgtacctcatgtttaaatgctgtgggtgagattattgttaaaggggagaaggactacaaaaagactcctt

SEQ ID NO: 25188 - DNA, 201 bp, Homo sapiens
tccagctctttggcccctaagtggaacaagttttgagatcttattttatgctccagagcactccatggaatcaggctaagactgggacatcacctgaaatyatacccttgattagagcttttcttttccatgtcctgcttcacccactcctttgctagattctcctaggaacacttaaatggtaagcttctttgtaaatat

SEQ ID NO: 25189 - DNA, 201 bp, Homo sapiens
gtgaaaaaaataaaacttatttcattacacatgtaaagcatcaataagaagtcagttaattcctgtacctcatgtttaaatgctgtgggtgagattattgytaaaggggagaaggactacaaaaagactccttctgcaggataacatgaacatccatttagaccaaccagtagataatggaaaccagagtttgctgggtac

SEQ ID NO: 25190 - DNA, 201 bp, Homo sapiens
tttaaatgctgtgggtgagattattgttaaaggggagaaggactacaaaaagactccttctgcaggataacatgaacatccatttagaccaaccagtagayaatggaaaccagagtttgctgggtacacgtgtgcacagtttgatagacatgtgcctgcatgtgtctgctccacaaggcttccttcccatagtcagagact

SEQ ID NO: 25191 - DNA, 201 bp, Homo sapiens
ctcttaaaatatccataagcaagagtcaatagtcaacagcaaatattagcaagaattttatagaaactcaatagtgatcagcttgtttttaaaatgaaaaygttaaatatgtcattctcatacatttttaattatcctatcataatacaattattcattttgtctgctgcttctaatcaaaattatcttaaaccactccaa

SEQ ID NO: 25192 - DNA, 201 bp, Homo sapiens
tggcaggtcaaagcaggaggatcgtttgagcccaggagtttgaaactaggctaggcagcatgataagaccctttctctacaaaaaatgtttaaaaattaamtgggcatggtcgtgcacaactgtgattccagctattcaggactgctattcagctgttcacgccaccacactctagcctggatgacagagtgagactctgt

SEQ ID NO: 25193 - DNA, 201 bp, Homo sapiens
ctggatgacagagtgagactctgtctcaaaactttttttaaaaaagagtatcaattttgcaaggacataaactttagtatctatatcccctgtccatttgrttctgttaaaagcaatccctcaactgcccagatttaagcatcatacctcttattgccttggtattctttaatatcttcaatcacattttttaaaacgtaa

SEQ ID NO: 25194 - DNA, 201 bp, Homo sapiens
ttcgagaccagcctggccaacatagtgaaatcctgtctaatttgtatactaaaaatacaaaaaattagccaggcatggtagcaggtgcctataatcccagytacttgggaggctgaggcaggagaattgcttgaacctgggaggccgaggttgcagtgagccgagattgtgccattgcactccagcctgcgcgacaatgtg

SEQ ID NO: 25195 - DNA, 201 bp, Homo sapiens
aaaattctaataaacttattaacttgctcttcaaacaatggaatcaatctgcacgtccactagcactcttgtgaacacttggcattatcatacatttaatwttccccaatctcaaaaataagaaatgacatcttactgttgcttagttttacagttctttatgataatcttgagtgctttttacgaatttcataaatgatt

SEQ ID NO: 25196 - DNA, 201 bp, Homo sapiens
accttttaaaatatatagctagaaatgggattgctgggtcatattgtagtactattttcatttttggaagaatctctatgcttaatgctgttttccatagyggctatgcctatttacattcccaccaaaagtgtagaagggtttctttttctctgtttcctcaccaacatgtgttatcttttgtcttttatataatagcca

SEQ ID NO: 25197 - DNA, 201 bp, Homo sapiens
ttatgaaaatgcaattttgatgtcttgttcataatggtctacagaaaaagaaggaggctgttgaaagcggcaaacgacaaattgagaacactttaaaagarggcaatgacatactcgatgaagccaaccgtcttgcagatgaaatcaactccatcatagacgtgagtattgggtaaaactcaaaagagagatgataatgaa

SEQ ID NO: 25198 - DNA, 201 bp, Homo sapiens
aagggtttagaattttagaattgtgctttgcaaaaaggaagcacaatatatgaatgctagttcttattaccccgagagagacacatttatgggaacctatmcagtttctcactgggtctggatagccactctctcccatatttattttacctcattaatctcaattactgaccatgaatgtctgctccttaagtttgttta

SEQ ID NO: 25199 - DNA, 201 bp, Homo sapiens
ttgactccacaattggttagctcatgaccttaggcaacttacttaacctttctgtgcctcagtttcaccactcaataaaaaagtggtgagaatgacaactstctgccagggttgtcctgaggagtaaatgagtacatatttgtaaagagtttagatttgtaaagggtttagaattttagaattgtgctttgcaaaaaggaa

SEQ ID NO: 25200 - DNA, 201 bp, Homo sapiens
aacagcaaaataaataattttgcaagaacactcatatgtttatactatgttgtttttctaccttccagtttctggagatgagatatgatttttttcttcttttcaattccctgcaaggctgtatttcataatctcctccccatcaacacacacccatacacacaatgcacacccatgtctgtttcttgttgatagtgacaa

SEQ ID NO: 25201 - DNA, 201 bp, Homo sapiens
gaacagcaaaataaataattttgcaagaacactcatatgtttatactatgttgtttttctaccttccagtttctggagatgagatatgatttttttcttcttttcaattccctgcaaggctgtatttcataatctcctccccatcaacacacacccatacacacaatgcacacccatgtctgtttcttgttgatagtgaca

SEQ ID NO: 25202 - DNA, 201 bp, Homo sapiens
agaacagcaaaataaataattttgcaagaacactcatatgtttatactatgttgtttttctaccttccagtttctggagatgagatatgatttttttcttcttttcaattccctgcaaggctgtatttcataatctcctccccatcaacacacacccatacacacaatgcacacccatgtctgtttcttgttgatagtgac

SEQ ID NO: 25203 - DNA, 201 bp, Homo sapiens
ctctctggctgcccttaacattttttccttcatttcagctttggtgaatctgacaattatgtgtcttggagttgctcttctcgaggagtatctttgtggcrttctctgtatttcctgaatctgaacgttggcctgccttgctagattggggaagttctcctggataatatcctgcagagtgttttccaacttggttccatt

SEQ ID NO: 25204 - DNA, 201 bp, Homo sapiens
aagaacagcaaaataaataattttgcaagaacactcatatgtttatactatgttgtttttctaccttccagtttctggagatgagatatgatttttttcttcttttcaattccctgcaaggctgtatttcataatctcctccccatcaacacacacccatacacacaatgcacacccatgtctgtttcttgttgatagtga

SEQ ID NO: 25205 - DNA, 201 bp, Homo sapiens
ggccagaacttccaacactatgttgaataggagcggtgagagagggcatccctgtcttgtgccagttttcaaagggaatgcttccagtttttgcccattcwgtatgatactggctgtgggtttgtcatagatagctcttaatattttgaattacgtcccatcaatacctaatttattgagagtttttagcatgaagggttg

SEQ ID NO: 25206 - DNA, 201 bp, Homo sapiens
accagcacttctcagtccttttccaactgccagtttaataaaggaaggtgatagaagttttattaaaacagtatccatcctgttgcaaatcaatgattgatagtaaacatcaccttggatgtccttaaaaacaaaggactatacaccataatggctttaaactttgaggttacatgttagagtgatcagtttggtacaact

SEQ ID NO: 25207 - DNA, 201 bp, Homo sapiens
aatgtttgtaacaaaagcagctggagaagatgatcatagcaattatgcagacagccatagaaatgagcaaaaccagccatcgaatgctgccatcaaaaaayggacctatgacaacagggggcatgtgggttgcaaatactggttacataaattggtccgacaacattctattgtccggcgtagctgggcttttggagaatc

SEQ ID NO: 25208 - DNA, 201 bp, Homo sapiens
caccagcacttctcagtccttttccaactgccagtttaataaaggaaggtgatagaagttttattaaaacagtatccatcctgttgcaaatcaatgattgatagtaaacatcaccttggatgtccttaaaaacaaaggactatacaccataatggctttaaactttgaggttacatgttagagtgatcagtttggtacaac

SEQ ID NO: 25209 - DNA, 201 bp, Homo sapiens
ccagcacttctggagccaggtagcgtttggtgcccaccctggtattcaagggcacatcaacttcatttgtgtcactgttgaatttaacagcaaggcccagrtcagcaatgcagcaactcccatttttcttgatgaggatgtttttgctctttaggtctcgatgagcaattgcgggctttccttgggtgccatacgtttctg

SEQ ID NO: 25210 - DNA, 201 bp, Homo sapiens
acaccagcacttctcagtccttttccaactgccagtttaataaaggaaggtgatagaagttttattaaaacagtatccatcctgttgcaaatcaatgattgatagtaaacatcaccttggatgtccttaaaaacaaaggactatacaccataatggctttaaactttgaggttacatgttagagtgatcagtttggtacaa

SEQ ID NO: 25211 - DNA, 201 bp, Homo sapiens
ctgtgacagatgccggcctggcaaattcggactcgatgccaagaatccacttggctgcagcagctgctattgcttcggcactactacccagtgctctgaarcaaaaggactgatccggacgtgggtgagtagggaactgctgagccatgtaatggtataatgttagttcctgctggtgtcttttagtcaggcactgagggg

SEQ ID NO: 25212 - DNA, 201 bp, Homo sapiens
cacctcccgggttcatgccattctcccacctcagcctcctgagtagctaggactacaggcgcccgccaccacgcctggctaattttttgtatttttagtaragacggggtttcactgtgttagccaggatggtctcgatctcctgacctcgtgatcggcccgcctcggcctcccaaagtgctgggattacaggcgtgagcc

SEQ ID NO: 25213 - DNA, 201 bp, Homo sapiens
tacaccagcacttctcagtccttttccaactgccagtttaataaaggaaggtgatagaagttttattaaaacagtatccatcctgttgcaaatcaatgattgatagtaaacatcaccttggatgtccttaaaaacaaaggactatacaccataatggctttaaactttgaggttacatgttagagtgatcagtttggtaca

SEQ ID NO: 25214 - DNA, 201 bp, Homo sapiens
aaatcttaaacccacattccaaacaaataagaaatagggtataagtaatcaggtaattatgaaactctaagaatcagccattgaaactgtaaaaaaaaaaataaagctgacctattacaatactaaagtaatacaaagtttaatgtacctttttgcacatagcaggcctcagtaaaaagctgttaaataaatactttttaa

SEQ ID NO: 25215 - DNA, 201 bp, Homo sapiens
ggcggatcacgaggtcaggagatcgagaccatcccggctaaaacggtgaaaccccgtctctactaaaaatacaaaaaattagccaggcgtagtggcgggcrcctgtagtcccagctacttgggaggctgaggcaggagaatggcgtgaacccgggaggcggagcttgcagtgagccgagatcccgccactgcactccagcc

SEQ ID NO: 25216 - DNA, 201 bp, Homo sapiens
gctgaggcaggagaattgcttgaacctgggaggccgaggttgcagtgagccgagattgtgccattgcactccagcctgcgcgacaatgtgagactccgacycgaaaaaaaaaaaaaaagaaaaagaaaaaaaagaaaatctaaaaataatataatcttgtcaatagatagtaaaaacatttggtaaaatttaacagtcatt

SEQ ID NO: 25217 - DNA, 201 bp, Homo sapiens
tgaggcaggagaattgcttgaacctgggaggccgaggttgcagtgagccgagattgtgccattgcactccagcctgcgcgacaatgtgagactccgactcsaaaaaaaaaaaaaaagaaaaagaaaaaaaagaaaatctaaaaataatataatcttgtcaatagatagtaaaaacatttggtaaaatttaacagtcattca

SEQ ID NO: 25218 - DNA, 201 bp, Homo sapiens
ggaccagaaggaataggtgagggtctcagtgctaatgtagggttaatccagggccaagtagacaaaaataataataaaaccacaacaataataataataayaaatgatggctagcatttgttgcacatttattttatggagggtgttaatctaagaaatttcccatgtataaattcatatatactaatacttgtcgcattt

SEQ ID NO: 25219 - DNA, 201 bp, Homo sapiens
aaggaataagcaaagcaaaaaaccacaagcttgctgaagttggaggaccagaaggaataggtgagggtctcagtgctaatgtagggttaatccagggccargtagacaaaaataataataaaaccacaacaataataataataataaatgatggctagcatttgttgcacatttattttatggagggtgttaatctaagaa

SEQ ID NO: 25220 - DNA, 201 bp, Homo sapiens
aatgtacagtatatataatctacagggaatacagtccttgtccccaaaaggggaaaagctcactgcagtttataatgggatatcgaaaccatactggttgytatagtattagaaagaacagtattggaaagatgtgaatcaaagagtgcccttgatcactgctggtagaaaaagtaaatttctaaagtcactttggaaaac

SEQ ID NO: 25221 - DNA, 201 bp, Homo sapiens
gtacagacccagatttttgcacatgggcataataagacatgtacaagaatgtttatagaagtattctttataatagcagagaaactagaaacaacccaagwgttcatcagctggagaacagagaggcaaactgtggcacttttgcataatgggatatcaaggaataagaaaaaggaataaattataactaaatataacaac

SEQ ID NO: 25222 - DNA, 201 bp, Homo sapiens
ctttgcagagaactgctatattaatatatccactttccagatcatctcacaagcaaaaatggtaaatgattagaaagatatttccagctgttttcaaaacsgtttgagaaaataaagtcttaatttctcaggtaagatctcagagcagacgaacctgtggttctgccagggaatctctaaagctaagccataaatgagact

SEQ ID NO: 25223 - DNA, 201 bp, Homo sapiens
attgcaaggattatttatatattctggatacatgttctttaacgtatgttaaagcttgcttttcatatagattgctttttacctagtttcatcatctaatytttataaacactagcttattatctttttcttctatagtccatactttttatgttctacccaagaaagacaaggtccaaagatttctctcccatgttttct

SEQ ID NO: 25224 - DNA, 201 bp, Homo sapiens
agacgaacctgtggttctgccagggaatctctaaagctaagccataaatgagacttctgtttaatcttcaataaccacttgctgttgcaggcctattatgyaatactcctcaacaggggccgtctggaagtgcatctctccacaggggcacgaacaatgaggaaaattgtgatcagaccagagccaaatctgtttcatgat

SEQ ID NO: 25225 - DNA, 201 bp, Homo sapiens
ataaccacttgctgttgcaggcctattatgcaatactcctcaacaggggccgtctggaagtgcatctctccacaggggcacgaacaatgaggaaaattgtsatcagaccagagccaaatctgtttcatgatggaagagaacattccgttcatgtagagcgaactagagggtaacaatagcactaaaatatttattattgta

SEQ ID NO: 25226 - DNA, 201 bp, Homo sapiens
gtgtttacaaagcttatgcccatttctattttgagttgtttgtttccttagtaatgcattgcaaggattatttatatattctggatacatgttctttaacrtatgttaaagcttgcttttcatatagattgctttttacctagtttcatcatctaatttttataaacactagcttattatctttttcttctatagtccata

SEQ ID NO: 25227 - DNA, 201 bp, Homo sapiens
taacaatagcactaaaatatttattattgtaactcaggtgaacttcctttgctagcatcggtatctatcagtatctgcctgaacctctgtgtgtgtggacmtactatgcattgcaaaaggataccgtagcttaattccctcttctttacttttcatacttcgggaacctcatttgcctcagcccttaggagttctaccctt

SEQ ID NO: 25228 - DNA, 201 bp, Homo sapiens
aatcatcccttgtgccccattgcagtgaagtccccatcaccccccatgtgcctactgttttgccttctagcattataattttccaatttctacaacttctkaaaaatagaatcgtagtctgtttttttgagggggggtttgtttgtttctttgtttggcttccttcacttggtgttacgtttttgtaattcatccatattg

SEQ ID NO: 25229 - DNA, 201 bp, Homo sapiens
gcctgaacctctgtgtgtgtggacctactatgcattgcaaaaggataccgtagcttaattccctcttctttacttttcatacttcgggaacctcatttgcytcagcccttaggagttctacccttaacatttttattcgtgcagttatctccacctttggaaaaaccaaatgcattttctgaagctataaataagaaaaat

SEQ ID NO: 25230 - DNA, 201 bp, Homo sapiens
aaggatctagtttgttaagaaacataggcatcataacaaataaatgttcttgaattcaaaaaaaattaaagcttgattgttcagaaagcaatttcatctayatttaggagatgtttacaggtgttatattttataatgcagatctgagttcactttttgtacaagtagaagagtcacacttttatattaatagtgataata

SEQ ID NO: 25231 - DNA, 201 bp, Homo sapiens
gggtttcagatttaaaaatcaagagtaagaagttttacaatatttactaaagattacgattagtataccacaaaacatctgaactttagatattatttatrtgaccttaaaagtcagacctttccctgccaatgacttaacttctgtctttagtgctattttgtttgaaggcttatttatctgctatgaagtgatttttct

SEQ ID NO: 25232 - DNA, 201 bp, Homo sapiens
tatccactcactttattgtgatatcaaaataagatagcatatgtgcatatccttggagattttaaagctatctgaaaatgtgccatatttaaacatactgwacatagttaaaagacatgcatctgattaatgtaaaaactataccaatttattgtagtccacttggaaagacaagtagcttacttaaagatctattttgtt

SEQ ID NO: 25233 - DNA, 201 bp, Homo sapiens
atgtttagcagcataaggaatagaaacatttggagttttagctttagcttatacaatgcatcctgttttataattgttttccaacaatgtttacataatgkgagggtcactctttaacatgaggggctctgtcactagaattgcagtgtgttagcccctcattttctccagtgtttttgtaaatctttccattgacaatct

SEQ ID NO: 25234 - DNA, 201 bp, Homo sapiens
attaggaatgaacatgtctatcaagattcattttaaatacagggaggaggagagaggaagatggcaaggttgtgaaagagtgaatgaatgaatgaatgaawgaattatagaaagctatatgcttctgcacagctttgagattgagatggggagctgattttctcccttttgcaccttatttacatttctacttgaaatgta

SEQ ID NO: 25235 - DNA, 201 bp, Homo sapiens
tacttaaaagccttaaagagatatgtaatattatcttattttttagctatctcccaagaaaaagcctcaaataaaaaaaaatctttttcaaaataaataaacgttttcagatttttttttctaacttttgagcaaggtttttaaaaactttttggtatatagtttgtttatgctgcctatgcaattatcttgtctttggtg

SEQ ID NO: 25236 - DNA, 201 bp, Homo sapiens
ttacttaaaagccttaaagagatatgtaatattatcttattttttagctatctcccaagaaaaagcctcaaataaaaaaaaatctttttcaaaataaataaacgttttcagatttttttttctaacttttgagcaaggtttttaaaaactttttggtatatagtttgtttatgctgcctatgcaattatcttgtctttggt

SEQ ID NO: 25237 - DNA, 201 bp, Homo sapiens
tttacttaaaagccttaaagagatatgtaatattatcttattttttagctatctcccaagaaaaagcctcaaataaaaaaaaatctttttcaaaataaataaacgttttcagatttttttttctaacttttgagcaaggtttttaaaaactttttggtatatagtttgtttatgctgcctatgcaattatcttgtctttgg

SEQ ID NO: 25238 - DNA, 201 bp, Homo sapiens
ttttacttaaaagccttaaagagatatgtaatattatcttattttttagctatctcccaagaaaaagcctcaaataaaaaaaaatctttttcaaaataaataaacgttttcagatttttttttctaacttttgagcaaggtttttaaaaactttttggtatatagtttgtttatgctgcctatgcaattatcttgtctttg

SEQ ID NO: 25239 - DNA, 201 bp, Homo sapiens
ttttattaatcattcttgggtgtttctcacagagggggatttggcagggtcacaggacaatagtggagggaaggtcagcagataaacatgtgaacaaaggyctctggttttcctaggcagaggaccctgcggccttccgcagtgtttgtgtccctgggtacttgagatcagggagtggtgatgactcttaacgagcatgct

SEQ ID NO: 25240 - DNA, 201 bp, Homo sapiens
aactgggactccaggcacacaccaacatgcccagctactttttttggaggggagggcaaagacagggtctcactctgttgcctcaggctggtcttgtcttgaactcgtggcctcaagcgatcctccctcttcggcctcccaaaatgcagggattacaggaatgagccactacactcggccagtaaacctaatttttaaaca

SEQ ID NO: 25241 - DNA, 201 bp, Homo sapiens
taactgggactccaggcacacaccaacatgcccagctactttttttggaggggagggcaaagacagggtctcactctgttgcctcaggctggtcttgtcttgaactcgtggcctcaagcgatcctccctcttcggcctcccaaaatgcagggattacaggaatgagccactacactcggccagtaaacctaatttttaaac

SEQ ID NO: 25242 - DNA, 201 bp, Homo sapiens
caaatcatagctctgctacttgctagctgtaatcaggggcgagttacttaacacctctctgccttcttaataaaatagagataatagtggtatgaagctcrtgtggatgttttgtgtagcaaatcattgtaggaacagtgtctgacaatagtgcttggcacattgcaaacattcaacgatgctggctattatgattataat

SEQ ID NO: 25243 - DNA, 201 bp, Homo sapiens
gtaactgggactccaggcacacaccaacatgcccagctactttttttggaggggagggcaaagacagggtctcactctgttgcctcaggctggtcttgtcttgaactcgtggcctcaagcgatcctccctcttcggcctcccaaaatgcagggattacaggaatgagccactacactcggccagtaaacctaatttttaaa

SEQ ID NO: 25244 - DNA, 201 bp, Homo sapiens
tagcttaattccctcttctttacttttcatacttcgggaacctcatttgcctcagcccttaggagttctacccttaacatttttattcgtgcagttatctmcacctttggaaaaaccaaatgcattttctgaagctataaataagaaaaatccctccctctgcccctcttaaatattacctcctcaaataaggtatgcaca

SEQ ID NO: 25245 - DNA, 201 bp, Homo sapiens
agtaactgggactccaggcacacaccaacatgcccagctactttttttggaggggagggcaaagacagggtctcactctgttgcctcaggctggtcttgtcttgaactcgtggcctcaagcgatcctccctcttcggcctcccaaaatgcagggattacaggaatgagccactacactcggccagtaaacctaatttttaa

SEQ ID NO: 25246 - DNA, 201 bp, Homo sapiens
aagtaactgggactccaggcacacaccaacatgcccagctactttttttggaggggagggcaaagacagggtctcactctgttgcctcaggctggtcttgtcttgaactcgtggcctcaagcgatcctccctcttcggcctcccaaaatgcagggattacaggaatgagccactacactcggccagtaaacctaattttta

SEQ ID NO: 25247 - DNA, 201 bp, Homo sapiens
ttgcaacctactcatctgacaaagggctaatatccagaatctacaatgaactcaaacaaatttacaagaaaaaaacaaacaaccccatcaaaaagtgggcraaggacatgaacagacacttctcaaaagaagacatttatgcagccaaaaaacacatgaagaaatgctcatcatcactggccatcagagaaatgcaaatca

SEQ ID NO: 25248 - DNA, 201 bp, Homo sapiens
aatatcgtgaaaatggccatactgcccaaggtaatttacagattcaatgccatccccatcaagctaccaatgactttcttcacagaattggaaaaaactastttaaagttcatatggaaccaaaaaagagcctgcattgccaagtcaatcctaagccaaaagaacaaagctggaggcatcacactacctgacttcaaacta

SEQ ID NO: 25249 - DNA, 201 bp, Homo sapiens
atgataacagtttccatttatcttctatgtcaaatcaaacaagtaatttgtcttttacttttctgattttattcatctgaaatgtggctagtagtctttaytgtatcctttgccatggagtttgttagtcattgtttgtaatagaactgttttccattcatctattcatttattatttaagtatttagtcagttacttttg

SEQ ID NO: 25250 - DNA, 201 bp, Homo sapiens
aggaaataacctctacataataattttttaatcctttaatttttttgtgggtacacagtgggtgtatatatttatgggtgacctgagatattttgatgtargcatgcaatgcataataatcatatcagggtaaatggggtatccatcacctcaaacatgtatcctttatgtttcaaacaatctgattatactcttttagtt

SEQ ID NO: 25251 - DNA, 201 bp, Homo sapiens
ttatttgatacaggctcgaattgcaaaattggacacatatttgtaggtcatttttatcttcatgcttgctctgataacttatttaggaaagagtgtaagakgtggtctcatggtttgcacttcttcatcagattacataaccagatagtagaaaaggatattttagtgtattactggcattcatttgattacgagggaaat

SEQ ID NO: 25252 - DNA, 201 bp, Homo sapiens
atgactctctagtttagtagattgggtgggggggtcataagaccaacaaaaaaaagtaagttaagtaatacagatttgggagttagatgataattattttsatttggaatgtttagcttaaagtacgcaaggaaaatatagatgatggtgtctcacctgttgaatgtggacttttaggcaaaaatcaggtccaagcataca

SEQ ID NO: 25253 - DNA, 201 bp, Homo sapiens
aaaatcacaaacattcttatacaccaacaacagacaaacagagagccaaatcatgggtgaactcccattcacaattgcttcaaagagaataaaatacctargaatccaacttacaagggatgtgaaggacctcttcaaggagaactacaaaccactgctcaaggaaataaaagaggagacaaataaatggaagaacattcc

SEQ ID NO: 25254 - DNA, 201 bp, Homo sapiens
cactgtgtgggtgatgggtccactagaagcccaaacttcactcttatgcaatatatccatgaaacaaaccttcatatgcaccacctggatctaaaattgtraaataataaaaataaaaataaagacattcggaacactaagctgaattggctaatgctataaactctaaagatagtaatatgcttggtagatgtacggtat

SEQ ID NO: 25255 - DNA, 201 bp, Homo sapiens
aaagtctcaggatacaaaatcaatgtacaaaaatcacaaacattcttatacaccaacaacagacaaacagagagccaaatcatgggtgaactcccattcayaattgcttcaaagagaataaaatacctaggaatccaacttacaagggatgtgaaggacctcttcaaggagaactacaaaccactgctcaaggaaataaaa

SEQ ID NO: 25256 - DNA, 201 bp, Homo sapiens
gtcagccccaaccctattttcccataagccctgttatttgtaagaataatttttatagaactcctggtgtttgtttgtttgtttgtttgtttatttgttgytttcaggaaaacacttatcacatttgaacataaagagcaatcattcctactaaagagcaggagtgatttcatggagaagatgtaaaagtgaggctaaaag

SEQ ID NO: 25257 - DNA, 201 bp, Homo sapiens
ggccagggcaatcaggcaggagaaggaaataaagggtattcaattaggaaaagaggaagtcaaattgtccctgtttgcagacgacatgattgtttatctaraaaaccccatcgtctcagcccaaaatctccttaagctgataagcaacttcagcaaagtctcaggatacaaaatcaatgtacaaaaatcacaaacattctt

SEQ ID NO: 25258 - DNA, 201 bp, Homo sapiens
aaaataataagagctatctatgacaaacccacagccaatatcatactgaatgggcaaaaactggaagcattccctttgaaaactggcacaagacagggatrccctctctcaccgctcctattcaacatagtgttggaagttctggccagggcaatcaggcaggagaaggaaataaagggtattcaattaggaaaagaggaa

SEQ ID NO: 25259 - DNA, 201 bp, Homo sapiens
gcaccatgaaagatttaattaaatgtaggcctttagtctaagggtttttcaacatcaaaatgttcttcaaaagacattttgatagcttctctctttaagaygtgcaaaaaaagacggtgagaaaaagaaagaaaaccaattttgtgtaaaaaccctgatttaaatacagttctggcttggacagactaggtgacattttaa

SEQ ID NO: 25260 - DNA, 201 bp, Homo sapiens
cagcctgggtggcagattgagatgctgtctcaaaaaaaaaaaagggggttatcttggtatccttgttacatggtttcaccaaaggagatgcttgggtaatytgtgcttttcactttcaagagactagccctctttatatgccaacatttttgggggggtatcaaaatatttggagtataaaaacaaaagcactgtaattgg

SEQ ID NO: 25261 - DNA, 201 bp, Homo sapiens
tgttaagtgtatgtaatcctcataccaattggagcaaaaacatttgcttcatttgcttgcatcaattggtcatatatatatatatatatatatatatctawctcaattggttatatagataacataagtatagataacataggtaacattcagaatagtcacttcactactttaagagctaattaggtattcatacagata

SEQ ID NO: 25262 - DNA, 201 bp, Homo sapiens
ttatgttaagtgtatgtaatcctcataccaattggagcaaaaacatttgcttcatttgcttgcatcaattggtcatatatatatatatatatatatatatmtatctcaattggttatatagataacataagtatagataacataggtaacattcagaatagtcacttcactactttaagagctaattaggtattcatacag

SEQ ID NO: 25263 - DNA, 201 bp, Homo sapiens
agaatctctgggacgcattcaaagcagtgtgtagagggaaatttatagcactaaatgcctacaagagaaagcaggaaagatccaaaattgacaccctaacwtcacaattaaaagaactagaaaagcaagagcaaacacattcaaaagctagcagaaggcaagaaataactaaaatcagagcagaactgaaggaaatagaga

SEQ ID NO: 25264 - DNA, 201 bp, Homo sapiens
cttatgttaagtgtatgtaatcctcataccaattggagcaaaaacatttgcttcatttgcttgcatcaattggtcatatatatatatatatatatatatatctatctcaattggttatatagataacataagtatagataacataggtaacattcagaatagtcacttcactactttaagagctaattaggtattcataca

SEQ ID NO: 25265 - DNA, 201 bp, Homo sapiens
catggaaactgaacaacctgctcctgaatgactactgggtacataacgaaatgaaggcagaaataaagatgttctttgaaaccaacgagaacaaagacacsacataccagaatctctgggacgcattcaaagcagtgtgtagagggaaatttatagcactaaatgcctacaagagaaagcaggaaagatccaaaattgaca

SEQ ID NO: 25266 - DNA, 201 bp, Homo sapiens
atgtatcctttatgtttcaaacaatctgattatactcttttagttatttttaaatgtacaattatttttttttttttactgtagttacccttgtgctagcraatactaaatcttattcaaactatttttgtatcattaaccatccctactcctccctgccactaaccttcccaacctctggtaactatccttctactttct

SEQ ID NO: 25267 - DNA, 201 bp, Homo sapiens
acttatgttaagtgtatgtaatcctcataccaattggagcaaaaacatttgcttcatttgcttgcatcaattggtcatatatatatatatatatatatatatctatctcaattggttatatagataacataagtatagataacataggtaacattcagaatagtcacttcactactttaagagctaattaggtattcatac

SEQ ID NO: 25268 - DNA, 201 bp, Homo sapiens
caacagaatatacatttttttcagcaccacaccacacctattccaaaattgaccacatagttggaagtaaagctctcctcagcaaatgtaaaagaacagarattataacaaactatctctcagaccacagtgcaatcaaactagaactcaggattaagaatctcactcaaagccgctcaactacatggaaactgaacaacc

SEQ ID NO: 25269 - DNA, 201 bp, Homo sapiens
catatccagtatgtatatgtaccacactttctttatccgttcatctgctgatggacacttaggtggcttccaaatctattgtaactagtgctgcaataaaygtgggagtgcagatatctcttcaatattcttttgggtatatatctaagagtggaattgatggatcatatggtagctctatttttggtgttttgaggaacc

SEQ ID NO: 25270 - DNA, 201 bp, Homo sapiens
gagaatgaaaccaagttggaaaacactctgcaggatattatccaggagaacttccccaatctagcaaggcaggccaacgttcagattcaggaaatacagakaacgccacaaagatactcctcgagaagagcaactccaagacacataattgtcagattcaccaaagttgaaatgaaggaaaaaatgttaagggcagccaga

SEQ ID NO: 25271 - DNA, 201 bp, Homo sapiens
atgatcagtgatgttgagccccttttgatatacctgtttttcatctgaatatcttcttttgagaaatgtctatccaaatcttgtacccatttttaaatagkattattagatttttttcctatagaattgtttgaattccttttatattctggttattaatcccttctcagatgggtagtttgcaaatattttatcccattc

SEQ ID NO: 25272 - DNA, 201 bp, Homo sapiens
gggatctcctgtattccatgcatgctcttccttgccttcattgtggaatagtagactgatttcaccttgatattctgggtcaattacccagccaacactgmaacccccttcttagcctgttgacttggaggtaggagggccccaattggccaggtggtaatcttaacttccagtttaatggaatcattgttgtatcccttg

SEQ ID NO: 25273 - DNA, 201 bp, Homo sapiens
aatgtgagttataccaccttttgcatcttgtagtgacaccatacagtgtagcctccaaggcagggaagagaaaaaatgaagagacatgtaggcccctaccrtactggctcatgaagcctggaccacgtctggtctgagtcattgaccagaagtagccgtgtgccccaagctaactgtaagggaggtctggaaaagtaggag

SEQ ID NO: 25274 - DNA, 201 bp, Homo sapiens
gggctgtgttccctgcaactgcaattcttttgggtctaagtcattcgactgtgaagagagtggacaatgttggtgccaacctggagtcacagggaagaaaygtgaccgctgtgcccacggctatttcaacttccaagaaggaggctgcacaggtctgtaaatatgacttaagtcctacatattcactctgatagttttagg

SEQ ID NO: 25275 - DNA, 201 bp, Homo sapiens
acaacaaagattataaacacttattgagtacttaatatacttatgttaagtgtatgtaatcctcataccaattggagcaaaaacatttgcttcatttgctygcatcaattggtcatatatatatatatatatatatatatctatctcaattggttatatagataacataagtatagataacataggtaacattcagaatag

SEQ ID NO: 25276 - DNA, 201 bp, Homo sapiens
agtttgagaccagcatggccagcgtggtgaaaccctgtctctactaaaaacgcaaaaattagctgggcatggtggtgggtgcctgtaatcccagctactcrggaggctgaggtaggagaattgctggaacccaggatacggaggttacagtgagctgagattgcgccactgcacttcagcctgggcaacagagtgagactc

SEQ ID NO: 25277 - DNA, 201 bp, Homo sapiens
aattttattttcagccattttttttccaagagaaaaagaaatctaaagacaagcattgtaggaagggttaggagacagaaatgttcattagtttaaatttmttttttttgtagttcaggtagtacattatttaaagtaatgaaaacccacaaactactcaagtaataattcctctagaaaaccaagccaaggctatgacgg

SEQ ID NO: 25278 - DNA, 201 bp, Homo sapiens
agcaggggcacactgacacctcacacggcagggtattccaacagacctgcagctgagggtcctgtctgttagaaggaaaactaacaaccagaaaggacatmtacaccgaaaacccatctgtacatcaccatcatcaaagaccaaaagtagataaaaccacaaagatggggaaaaaacagaacagaaaaactggaaactcta

SEQ ID NO: 25279 - DNA, 201 bp, Homo sapiens
agatctgagaatgggcagactgcctcctcaagtgggtccctgactcctgacccccgagcagcctaactgggaggcaccccccagcaggggcacactgacayctcacacggcagggtattccaacagacctgcagctgagggtcctgtctgttagaaggaaaactaacaaccagaaaggacatctacaccgaaaacccatct

SEQ ID NO: 25280 - DNA, 201 bp, Homo sapiens
tcctgtctttaagattttaataataccagggccgtgccctcgcctctatttccccacaaacactggtattataaaaatgaagaaagaattttattttcagscattttttttccaagagaaaaagaaatctaaagacaagcattgtaggaagggttaggagacagaaatgttcattagtttaaatttattttttttgtagtt

SEQ ID NO: 25281 - DNA, 201 bp, Homo sapiens
gacgtgtagagtacccagatttgactattgatgactcatattggtaccgtatcgtagcatcaaggtaaccaacttaataaagattaagataattaaatgayagaattttgaagtagtttcccagtttataagaaaactcctatttccatttcaataaggtaactgtgtatgcatgtaaacacatgtgtatgaattttatac

SEQ ID NO: 25282 - DNA, 201 bp, Homo sapiens
cgggaagctcgaactgggtggagcccaccacagctcaaggaggcctgcctgcctctgtaggctccacctctgggggcagggcacagacaaacaaaaagacrgcagtaacctctgcagacttaagtgtccctgtctgacagctttgaagagagcagtggttctcccagtacgcagctggagatctgagaatgggcagactgc

SEQ ID NO: 25283 - DNA, 201 bp, Homo sapiens
tcagcaaatcaaccttttctctccactttaatcctgtgcctcactttgcacacctgaagttagctttaaaattatgacttttaaatgcttgtcagattacrttcttacaaaaaggtattcacactccaaggcactggggaaagctgttttctttttttgtctagtttcatctagtactataaatggcctatattatcttga

SEQ ID NO: 25284 - DNA, 201 bp, Homo sapiens
ggcgcaccacgagactatatcccacacctggctcggagggtcctacgcccacggaatctcgctgattgctagcacagcagtctgagatcaaactgcaaggyggcaacgaggctgggggaggggcgcccgccattgcccaggcttgcttaggtaaacaaagcagccgggaagctcgaactgggtggagcccaccacagctca

SEQ ID NO: 25285 - DNA, 201 bp, Homo sapiens
aaaatttcatctctaataaaaaagtaatttggggaacatttaggaaaaaagcaaaatatataaagcaatgtaaacaataacttttaaacttgcttgtttaraaaatcactggggtacaggttagtcagcctgataaactctaacttgccttcacacctccctcctccagcagagcctcctctgacagccaaacatctaggc

SEQ ID NO: 25286 - DNA, 201 bp, Homo sapiens
catcttttacagccaactctttcaatgagttcaaaaatttcatctctaataaaaaagtaatttggggaacatttaggaaaaaagcaaaatatataaagcaatgtaaacaataacttttaaacttgcttgtttagaaaatcactggggtacaggttagtcagcctgataaactctaacttgccttcacacctccctcctcca

SEQ ID NO: 25287 - DNA, 201 bp, Homo sapiens
ataattgtgccatggcagaatacagaagtcccttctctgaagacattttattccttaaaggactccctttgattttttttcagtgggccatttgatgcttrattgccagttgctctgtgcagaagagaaggggtattttattccataaaataacttgcagtgaattattcctttttattttcacaactgactctcattctc

SEQ ID NO: 25288 - DNA, 201 bp, Homo sapiens
gtcctaacatctactcccctggcctgcttgagtctcaactaaaatattgacatttgccatcacacattttgctttagctgttatggccatgctttgtcacrttaataagatgaaattgtttggttaagcatactgctattctaattctgtgtgtgcacgtgtgtgcatgcatatacatgcacactaattttgttctatgca

SEQ ID NO: 25289 - DNA, 201 bp, Homo sapiens
taactcaggtgaacttcctttgctagcatcggtatctatcagtatctgcctgaacctctgtgtgtgtggacctactatgcattgcaaaaggataccgtagyttaattccctcttctttacttttcatacttcgggaacctcatttgcctcagcccttaggagttctacccttaacatttttattcgtgcagttatctccac

SEQ ID NO: 25290 - DNA, 201 bp, Homo sapiens
ttagctatcttaagcaaccaacccactcacaccactagtaaaaggcagagtaagaattttattctagcgagtcagactccaaagtctgactccttatctcyggaacactctgcctttccaatttattctacttttaatagaccatggtaggctattgagagtgtttccagtttttcactattagaaactatactctgatga

SEQ ID NO: 25291 - DNA, 201 bp, Homo sapiens
cttcctccctgggacagatgccacaacctgtgattcagagactaaaaaatgctcctgtagtgatcaaactgggcagtgcacttgtaaggtatgtgctgctracatgcagctagggaaaacctccctcaattctgtttccattgctcagttttaacttcattcagtgtttgttatacctgcttcattaagctaaacaaacag

SEQ ID NO: 25292 - DNA, 201 bp, Homo sapiens
ttggcactaaaacccagatatctaaattccaactgctatttcaccttctttttgtttgtttgtttgtttgtctgttttttgagatggagtttcactcttgytacccaggctggagtgtaatgtcacaatctcgtctcactgcaacctccacctcctgggttcaagcaattctcctgcttcagcctcccgagtagctgggat

SEQ ID NO: 25293 - DNA, 201 bp, Homo sapiens
attgtagatgccattcagtagagtgattaagaggatagactctggagccagattgctttggttcaaatcatagctctgctacttgctagctgtaatcaggrgcgagttacttaacacctctctgccttcttaataaaatagagataatagtggtatgaagctcatgtggatgttttgtgtagcaaatcattgtaggaacag

SEQ ID NO: 25294 - DNA, 201 bp, Homo sapiens
gtacctgaatctgcgtaactaattgggagaatgggaagttaactttatttttccaagaaaaagaaacaaaatcaatatttaaattttggaaaacataattrttaaattatttttcatattgtgtagattcacatctctttaatcaatgggagaccaagtgccgatgatccttctccagaactgctagaatttacctccgct

SEQ ID NO: 25295 - DNA, 201 bp, Homo sapiens
gttttctcagaaatatacataaatttttagaggataatgaaactatgagttaatcaataaatatgtctgagcacattcctttagccattccagggtgtgayatgagaaaactgattcacacgcactgagcactcaataataagtacttactatgcagtagactacagagatgaataatgtagtttttattcttaaagaatt

SEQ ID NO: 25296 - DNA, 201 bp, Homo sapiens
cccctgaaatctcacatgatggacataattcaagtttatgtctcacatcacaacacaatgtgagttataccaccttttgcatcttgtagtgacaccatacrgtgtagcctccaaggcagggaagagaaaaaatgaagagacatgtaggcccctaccatactggctcatgaagcctggaccacgtctggtctgagtcattga

SEQ ID NO: 25297 - DNA, 201 bp, Homo sapiens
aatggatggataggtggataataggctggtagatgatagatggatgatagacagattagatagatagatagatagatagatagatagatagataatagattagatgatagacagaaagaataagagatttattatgaagaattggcttacgtgattatggaggctgcaaagtcccagtatctgtgagctgcagatccatga

SEQ ID NO: 25298 - DNA, 201 bp, Homo sapiens
gatgaatggatggataggtggataataggctggtagatgatagatggatgatagacagattagatagatagatagatagatagatagatagatagataatagattagatgatagacagaaagaataagagatttattatgaagaattggcttacgtgattatggaggctgcaaagtcccagtatctgtgagctgcagatcc

SEQ ID NO: 25299 - DNA, 201 bp, Homo sapiens
agatgaatggatggataggtggataataggctggtagatgatagatggatgatagacagattagatagatagatagatagatagatagatagatagataatagattagatgatagacagaaagaataagagatttattatgaagaattggcttacgtgattatggaggctgcaaagtcccagtatctgtgagctgcagatc

SEQ ID NO: 25300 - DNA, 201 bp, Homo sapiens
ggatatatctatcttgtgccatttcaatgggcatgtgacaaaggaaaattacactgtcattgtgttcccagtcgacccttgctactctgctgcttccattmcctcattgtgagtcctgcttttgccaaactaattctagcacatttttcttctactctatgaggaggagatgagaaagggagagccagacttaaagacgta

SEQ ID NO: 25301 - DNA, 201 bp, Homo sapiens
tagatgaatggatggataggtggataataggctggtagatgatagatggatgatagacagattagatagatagatagatagatagatagatagatagataatagattagatgatagacagaaagaataagagatttattatgaagaattggcttacgtgattatggaggctgcaaagtcccagtatctgtgagctgcagat

SEQ ID NO: 25302 - DNA, 201 bp, Homo sapiens
ttactccaagataaatgatggcatatgttcacccaaaaatttgtacacagatgtgtacatatccctatgatgaaataattaccaataaaaaggatcaaatrtggatacacacacaacatagataaatgttgaaactatgttgagtgaaagaagccagacaaaaagagagtacatgcagaatgtttccatttgtataaaatt

SEQ ID NO: 25303 - DNA, 201 bp, Homo sapiens
ttcccaatgtctttcttagatgattaggtagttgaaagacgctactgtttacgaggcattgctaaaagcttttgggttccatgagggagagggccatgacmtactcctttgtacatttccccactcctccgtttacatcacataaacatatatgtatggtcttccatgcagtcagccaaatcagacaaatcatgcctagga

SEQ ID NO: 25304 - DNA, 201 bp, Homo sapiens
tgacagatagatgaatggatggataggtggataataggctggtagatgatagatggatgatagacagattagatagatagatagatagatagatagatagatagataatagattagatgatagacagaaagaataagagatttattatgaagaattggcttacgtgattatggaggctgcaaagtcccagtatctgtgagc

SEQ ID NO: 25305 - DNA, 201 bp, Homo sapiens
atgatggaaggctgctgtgtatgcccaactttatggctagatgggtcagaaagcatccagttcatgaaaggcagtttaggttgcatggtgacttgatgacytacagtcaaacattcagtttctaccaaagcccagtaacaggccaagagttgtctctcaaatggagagtagtgatctgcagaagatggcagggccttgctc

SEQ ID NO: 25306 - DNA, 201 bp, Homo sapiens
ctgtgtaatcttaggtaactctttgaagtttagtttccgcatctaagaatgaggaagtataaatacatatctgcccacgttggttgtattaaatgagatamtttacataacacatccgactaaggtgcagatgtaataaatgacagctgttattatcatttatttcagcacgttgcagaaagcaacttacaatttcttctt

SEQ ID NO: 25307 - DNA, 201 bp, Homo sapiens
tcactgctgtctatgatgctggggttccagggcatttgtgtgatggacaatggcataaagtcactgccaacaagatcaaacaccgcattgagctcacagtygatgggaaccaggtggaagcccaaagcccaaacccagcatctacatcagctgacacaaatgaccctgtgtttgttggaggcttcccaggtgagtgttggc

SEQ ID NO: 25308 - DNA, 201 bp, Homo sapiens
atgacagatagatgaatggatggataggtggataataggctggtagatgatagatggatgatagacagattagatagatagatagatagatagatagatagatagataatagattagatgatagacagaaagaataagagatttattatgaagaattggcttacgtgattatggaggctgcaaagtcccagtatctgtgag

SEQ ID NO: 25309 - DNA, 201 bp, Homo sapiens
tgatcatgtatataccacttacagttgatgatggaaggctgctgtgtatgcccaactttatggctagatgggtcagaaagcatccagttcatgaaaggcartttaggttgcatggtgacttgatgacctacagtcaaacattcagtttctaccaaagcccagtaacaggccaagagttgtctctcaaatggagagtagtga

SEQ ID NO: 25310 - DNA, 201 bp, Homo sapiens
gatgacagatagatgaatggatggataggtggataataggctggtagatgatagatggatgatagacagattagatagatagatagatagatagatagatagatagataatagattagatgatagacagaaagaataagagatttattatgaagaattggcttacgtgattatggaggctgcaaagtcccagtatctgtga

SEQ ID NO: 25311 - DNA, 201 bp, Homo sapiens
ttattctgaaaacagtaattttcaatatactattttcttataaccactttaaagaaattaaggacttgcaggttgtctggttttttactatttttcttatscatagcaaggttggtgctcaataatactagatgagcaactgaatgaagagatgacaaaaataaatgaatttattaccactgcatgttaaagaagtgtact

SEQ ID NO: 25312 - DNA, 201 bp, Homo sapiens
taatgaaactatgagttaatcaataaatatgtctgagcacattcctttagccattccagggtgtgatatgagaaaactgattcacacgcactgagcactcrataataagtacttactatgcagtagactacagagatgaataatgtagtttttattcttaaagaattacgctaatatgtaagaaacaattagacagcatca

SEQ ID NO: 25313 - DNA, 201 bp, Homo sapiens
aattaaggacttgcaggttgtctggttttttactatttttcttatccatagcaaggttggtgctcaataatactagatgagcaactgaatgaagagatgayaaaaataaatgaatttattaccactgcatgttaaagaagtgtacttttttatgcttgtctttgagaaaagtgtcaaggtggcatacatgacaaaacacaa

SEQ ID NO: 25314 - DNA, 201 bp, Homo sapiens
attgatagatgacagatagatgaatggatggataggtggataataggctggtagatgatagatggatgatagacagattagatagatagatagatagatagatagatagatagataatagattagatgatagacagaaagaataagagatttattatgaagaattggcttacgtgattatggaggctgcaaagtcccagta

SEQ ID NO: 25315 - DNA, 201 bp, Homo sapiens
agcttatttgtgccactctttctttaattctgcacaagaagggcctgttaggcaaagggatgtagcgtatctgaaattgtgttgggagcccaggctctttsctcaatcaaactaatgcacttttaaaactgtgcatgaattttgctacccacttaatttatgaaagtgctattagtctgcagggttccttacaacattcct

SEQ ID NO: 25316 - DNA, 201 bp, Homo sapiens
gtccctgctgagcaaaagacaaagacctccttctccattgtcccgcactgatggtgggcttgggatgtattttcagaaataattatttgcagggaacttayaaaaacaaatgaatcaccctcatcactgtgcttgttccgttttgggatgtttgtctactagactttctaaattgggagatttagaaattcagtaagaaag

SEQ ID NO: 25317 - DNA, 201 bp, Homo sapiens
attggctacagcacattaattagtatataattacacatctggccatttcttcttccaagcaagtgcacaaccaggtgccctgctcaaaattctgccccctrggaagacttccctttgctactgtccttcagggatgtcctagaaaggggctgtagtgctgcagctgtccacttttgggtgctacctgcatatcttgcagaa

SEQ ID NO: 25318 - DNA, 201 bp, Homo sapiens
tcttccaagtccctgaccatccagccaaaccattggctacagcacattaattagtatataattacacatctggccatttcttcttccaagcaagtgcacarccaggtgccctgctcaaaattctgccccctgggaagacttccctttgctactgtccttcagggatgtcctagaaaggggctgtagtgctgcagctgtcca

SEQ ID NO: 25319 - DNA, 201 bp, Homo sapiens
agtagtaaattataaacaatatattttgaattcataattaaaattaacgagtcaattttctgaggcattgacctattaaagatttatgagttacctaaaaycccaaatcttccctgaggtaatagcttcagttgagataaagggaaggtatcttatttgtcgcttcactgcaggaaaaaataaaatttgtgattatgactc

SEQ ID NO: 25320 - DNA, 201 bp, Homo sapiens
tattgaaggaaataaacttttttctaaccatatttatgcaatcaatatttattaggtagtttttgagaaaatcttatatgagaacttattccttgtatacmaaatgtttcatggaacaccaccagcatagacatttttgtttactctgtgcaactggatttcgttctggggagcttcaatttgtacatgagctcattttca

SEQ ID NO: 25321 - DNA, 201 bp, Homo sapiens
gaacaaaaaggacgaggcaataccttcttaacactgataattaaataagataagcttaaattataaaatcagcacagagggaatgtaaattggttcaaccrttatggaaggaaaaaagtaggaaggttcctcaaaaaattcaaaatgggactgcgaggccgggtgtggtggctcaagcctgtaatctcagcactttgggag

SEQ ID NO: 25322 - DNA, 201 bp, Homo sapiens
acacttcattcactgaactataataaaattcacttcaaaaggaatgtgaacaaaatgaaagaacttggatataaaggggcaaaagtgaacaaaaagatagraaatgtgtacaaatctaagtaagcattatggaaagcataatgataataattattaaatatgtggaattaaaaacaaagtggaactaaaacacaagagact

SEQ ID NO: 25323 - DNA, 201 bp, Homo sapiens
cttctctgcctctgtcaactgatcatggggaactccctgtgaggccatcagtgcaggcttggggagagaaggcagggtggcaggagtggaggccatgggcrtttgagccacttcctcatgcaactgacttgtgcctttaggactggctcgagcctgatcatgtatataccacttacagttgatgatggaaggctgctgtgt

SEQ ID NO: 25324 - DNA, 201 bp, Homo sapiens
aaagaaatcaatattattagattatgcgtgatcattattttctaggtggttttctaaagttcctgaaaggtcattcagagcattgggaagaagaaatttgsgatagtagtaaattaaaagcaatttcaccagtgcctgtacgaaataattgaatggggaatgaccttgggttgtctgtttgcaagaatataaatgtctaat

SEQ ID NO: 25325 - DNA, 201 bp, Homo sapiens
acacgtgaacactggctatgggagaaacagtaccatattttggacactgattcaaggcatacacagccttctggagaactttgccccagtccggcaaagtwttgtcacctagttggcattgtaattatgacttcaaaagggcattccacaattctatcaatccacctgcttcaggatgatgggaaacatgataagaccagt

SEQ ID NO: 25326 - DNA, 201 bp, Homo sapiens
ccttggtgacagcattcttccctctggaactaagatgtctaggccagcagaacataatgttgtgggaacaggaagcaaaattttgctagtgggtcactagyggtgatggtgagtggtgccacttccgcttccaccccttgattctgggacacgtgaacactggctatgggagaaacagtaccatattttggacactgattc

SEQ ID NO: 25327 - DNA, 201 bp, Homo sapiens
tgtgacaaataccataaactgattagcttataaacaatagaaatatatctctcacagttctgaggctgggaagcccaagatcaaggtaccagcaatgttcratgtctagtgaaggcctgttcctcacagagggtgacttcttgctatgaccccacatttaattcatttaatatctggatactgaggaaaaggatagctagc

SEQ ID NO: 25328 - DNA, 201 bp, Homo sapiens
agagaatcattttcaaatcctgatttctgttaattatgaacacactagctatatggcctttctgtggataggcttaattaggagggtctgggcaaagcttygctacagcagcatcaaaagtctgatttacaagtagactcaaatatggcttagtaggaagtgaacatagccctaggctacacttagaaaaaattattttct

SEQ ID NO: 25329 - DNA, 201 bp, Homo sapiens
ccatgtgtttaccttataacttcatgagctagacttgtacagaagctttgaaaaaatccccatggctgtcatattcataagtctctctgacccattcagasagatgttagtatattgcttggagcgtactataaaacttacctttcacttatggaaatgtgcttgtactttgttccccaaaaagcaaatacagataccata

SEQ ID NO: 25330 - DNA, 201 bp, Homo sapiens
aatcaatatcttacagtttacttgtaggaaagatgatgaagtaaatatacatttatgcagctgaacacttgaaatctacaagaggggtaaaaagaacaaarattctgtaataataccagaaaagagctataacctcatacctaggcacaaggacatacatgtgcaaagtatgaggatatgaggaactaattaattttccaa

SEQ ID NO: 25331 - DNA, 201 bp, Homo sapiens
gtgagaccctgtctgtatcactccgttttcacactgctgtaaagatactacccgagactgggtaatttataaaggaaagaggtttagttgactcacccttbtgcatggctaggaggcctcaggaaacttatgatcaaaggggaagagggagcaggcacatcttacatggtacaggagagagaggagaaagtgaatggggaa

SEQ ID NO: 25332 - DNA, 201 bp, Homo sapiens
gcctaagagatcctaatgacatgtatacctatgaagtggcattgtttaaatagataggcttttcttggtctaagttggtttcttaaatttcctagtctatwccattaaataatgactttaattctctattctttttgctatgttagtaagtttgaagtttcattttaaaactaaacatgtgggccaggcacggtggctcat

SEQ ID NO: 25333 - DNA, 201 bp, Homo sapiens
catgctcctataatcccagctactggaaagaagctatggtgggaggatctcttgagcccaggagtttgaggccagcctgggccacatagtgagaccctgtstgtatcactccgttttcacactgctgtaaagatactacccgagactgggtaatttataaaggaaagaggtttagttgactcacccttctgcatggctagg

SEQ ID NO: 25334 - DNA, 201 bp, Homo sapiens
tagccactgctatgactatcttatcagcaatgcagagcttgcgtttccagcctccaagtgttatgctacaggtcactgttttttttaaactcttacctgartatgcttcgacctacttctttattttaattctttctttcttttgaggttagaaacaccatgctttaattgctgtaacccccaaaagaaatataatattga

SEQ ID NO: 25335 - DNA, 201 bp, Homo sapiens
gaacagtatttactacctgctgttccttttcactatttgcagtaccattcttagactcactgcaggcataaaccctgggataaggaaaagttaagcctccrttcttcatacctctaataaggctttgccaatggctgcaatcattttacaaccatccacttatgtttaggtttaacagagtcttggcttcataatgaaata

SEQ ID NO: 25336 - DNA, 201 bp, Homo sapiens
ttcctctatactgcctaggcccagaatctaaattagatcaaatttcaaaagatatttcttatgaaagctgatttatacacgcacacacacacacgcgcgcrcacacacatattcatttaacaaagaaaaaacatacagctttagcaggttgggaagtggcatttattaatatcatcttcattttaaaaagtgagtacaaat

SEQ ID NO: 25337 - DNA, 201 bp, Homo sapiens
acaattatacttagatgggccatctaaaatgtccttccagcttgtggagtaggttgtgtttgtttttcaatgaacatctgtttgacaaattgaaatgctarttatgatttatcatttccatgacatcaaatatccagatagtaataaacgttgatgactaactatatttttcagtttcagccagatgtttggcatcacgta

SEQ ID NO: 25338 - DNA, 201 bp, Homo sapiens
gaatgaaattagtactggatgattggattaaaagccagtagaaattatatattatcctatttaaatgtaggactatataagttattggtaatcctttttcrtaattttattactttttccagtacctaagtggatactggtgactggtatataataagtaaccaatgaatagatattgaataatgcattgctttgctcaat

SEQ ID NO: 25339 - DNA, 201 bp, Homo sapiens
ttcagtaatatgtgaaagtaagagtggtaccataaagttcagtcaagtctagactagaaaaatatccaaagcagtttagactacgaacatcttttttttttcttttcttttctttttttttgagacagaggctcgctctgtcgccaggctggagtgcagtggcgtgatctcggctcactgccaagctgttgaccttagtta

SEQ ID NO: 25340 - DNA, 201 bp, Homo sapiens
ttgctgaacacactaagatgtagctttctctataacctcctattcaactgtcagcaaatcagtaaaagtaccctgagaggaaaatggctagcttaccttawtttgcttccctttacttaagtctggctgccttggttgcttgctgatgccttcaaactgctgtttttagtattttatccagcttttatggttgttgtcttt

SEQ ID NO: 25341 - DNA, 201 bp, Homo sapiens
aaaacagcaaatttataaaagtagtgtgtcagtttgataataattgataatcaaattctaaacacctctttcagccctgcagtaagacaactttgcactayaggcagcaggtaaacagagaagggaaaacaagaaatttcacaagttttctatttggttattaaataggaatcgtacttcaactcagttcacgtttccacc

SEQ ID NO: 25342 - DNA, 201 bp, Homo sapiens
caccagtttgataaacactgttctaaattgtggttaaagcttttggtagttaacgaggtaggagaaaacattaaagaaattggggttgtttcacctgatgraaaaagatgaaaggtgtcaacttactatcagtcaattatcagatatttattaagaaattatagaatacctcagcattgcacttggttccctggggatttc

SEQ ID NO: 25343 - DNA, 201 bp, Homo sapiens
aaagatttaacagtggtgtctgcatttgataaaatgtaaatgagaagctcccaaaagagattgagaagctctattttgacaactcttcttttatctgtgtwattattatatactttaactgaagaaagaaaaacacaaagataaatacaatatttcaacttcgagtactttttaaaaattatttgaaagcatttaaaaata

SEQ ID NO: 25344 - DNA, 201 bp, Homo sapiens
atttgaattacccgtgcattactgtttcatatattcatggtactttcatattttataacatttaaaaatatttcaatattccattgatttgaataagattytttaaattacagtgaaagctttctgataaggtatggtaagattatttttcagtaattatgctgatacatataataaagctactgacaattcataaagatg

SEQ ID NO: 25345 - DNA, 201 bp, Homo sapiens
ctggcctaaatcagttttattatgtcacttaaatatgtgcaaacataaaatcaggtataaactctttatacttatagctctataaaattaaaacaaattartccttacaaaaccaataaaattcaaattaaaaacattaatataaagtaacatgattttggctgaatggaaattgctgcttgcaacaagaataggatattg

SEQ ID NO: 25346 - DNA, 201 bp, Homo sapiens
ttatttttcagtaattatgctgatacatataataaagctactgacaattcataaagatgataatacacttagtacaaactgagcttcaatgggattactaratgagtatgtgaggacagagcagaggaaaaggccaagggttgagcactgtggtgctctattatgagaaagttaggaaggattaaagttggcactgaaggg

SEQ ID NO: 25347 - DNA, 201 bp, Homo sapiens
tcagttgatctccagatgctgattactgatctaacactttgcttgttgtaccccctaaatgtcatcctctctctgctcgtactcactgctcaagtaagttyttatttgaaaggacagtaagtatgtcatagttttctatagtctaagctgtgtcatgttgttcacatccaggtgttaggcaatctataaaacatcttctgt

SEQ ID NO: 25348 - DNA, 201 bp, Homo sapiens
ttaacaattttggtttggttcaatttgttgcataggtaataataatccatttacagaatacaaaaatagtgtaagtatgtgcttcttcctatctgtatgtygagagattcctcattcttttttatggttgcagataattcattatgcagatatacaatttatttaaccagtcccatattgatggatattaggttatttcca

SEQ ID NO: 25349 - DNA, 201 bp, Homo sapiens
tttagccagtatattcaacattaatgaattcagccctttattcatttactgcttccatgtttagagcccattctacctcgattaaaaataaatataaaackagctaaaattacaaaatgagaaattttaagtgtatgtaatctcagtaatgacatttattttctgctaatcattgagactcctctaagatttaaaacatta

SEQ ID NO: 25350 - DNA, 201 bp, Homo sapiens
tttacagaatacaaaaatagtgtaagtatgtgcttcttcctatctgtatgttgagagattcctcattcttttttatggttgcagataattcattatgcagwtatacaatttatttaaccagtcccatattgatggatattaggttatttccagtcctttgatgtgaccaaaaaagattataataaaaaatgctgaaagaat

SEQ ID NO: 25351 - DNA, 201 bp, Homo sapiens
tgcacccctagaggcctaggaatcaactccctccttcttgccatatccaaaaatattaacaacattttgaggggagccttaaaacaagctaatcgaccccmaaaaaacacatagatcccaggcatcagagaaggagaattcagtcttcaagaccactcccagctgggccttcctgctttcttctgagcctaaacccagtga

SEQ ID NO: 25352 - DNA, 201 bp, Homo sapiens
gtagatcctctaagaatctgtatatctctaagccaatatctgtataacttaaaaattataaagctgtattttaaaatatactctgttctttaaatccaaarctcactgacatttttacttaatatgaattaatgaggtagtattatacatttaaatacatatagtaacaaattataaatgagaccaagaatattattttaa

SEQ ID NO: 25353 - DNA, 201 bp, Homo sapiens
tcctgctgtctcttgtgggcatttagtgctataaatttccctctacacactgctttgaatgtgtcccagagattctggtatgttgtgtctttgttcttgtyggtttcaaagaacatctttatttctgccttcatttcgttatgtacccagtagtcattcaggagcaggttgttcagtttccatgtagttgagcagttttga

SEQ ID NO: 25354 - DNA, 201 bp, Homo sapiens
ccaacactatattgaataggagtggtgagagagggcatccctgtcttgtgccagttttcaaagggaatgcttccagtttttgccaattcagtatgatattygctgtgggtttgtcatagatagctcttattattttgaaatatgtcccatcaatacctaatttattgagagtttttagcatgaagtgtggttgaattttgt

SEQ ID NO: 25355 - DNA, 201 bp, Homo sapiens
cattttaaaggtataatttcttttttgtttgtttttttcgtttttttattttttatttttatttttttcttttattattatactttaagttttagggtacrtgtgcacattgtgcaggttagttacatatgtatacatgtgccatgctggtgcgctgcacccactaactcgtcatctagcattaggtatatctcccaatgc

SEQ ID NO: 25356 - DNA, 201 bp, Homo sapiens
tttttcctttgtctctatctccctagatagaaatatgtggaggttggatttcctgctgagtttctttatttttttcctttcttttttttttttttttttttaagatggagtctcaccctgttgcccaggctggagtgcaatggcgtgatcttggctcactgcaacctccgcctcccgggttcaagtgattctcctgcctca

SEQ ID NO: 25357 - DNA, 201 bp, Homo sapiens
ttttttcctttgtctctatctccctagatagaaatatgtggaggttggatttcctgctgagtttctttatttttttcctttcttttttttttttttttttttaagatggagtctcaccctgttgcccaggctggagtgcaatggcgtgatcttggctcactgcaacctccgcctcccgggttcaagtgattctcctgcctc

SEQ ID NO: 25358 - DNA, 201 bp, Homo sapiens
caagagaagcatacacattctaaagcatttcaaatgtttattatgatgtcctagaggtggctgtctttctgttgctgtgcataccctgagcagacttgacwttgctttggaagcacatattttctgatagacatattactctcataatctaaaatttttcagaagtgacaaaagtggggttgaccattttcttcttcgctg

SEQ ID NO: 25359 - DNA, 201 bp, Homo sapiens
aggaggctgagatgggaagattacttgaacccgggaggtcgaggctgcagtgacccatgatcacaccactgcactttagcctgggcaacagagcaagaccytatctaggaacaataaaaaattcattattcattatttgatccaaaacaaaaacatgttatagactatctatagattcaattttcaaaaatcctatgcttc

SEQ ID NO: 25360 - DNA, 201 bp, Homo sapiens
cacagctataatcccagctctttggaaggccaaggcaggaggatggcttgaggccaggagttcaagaccagcttaggcaaaatagtgagatccctgcctcyacaaaaataaaatgaaaaaattagctgcgtgtggtggcacatgccagtggtcccagctactcaggaggctgagatgggaagattacttgaacccgggagg

SEQ ID NO: 25361 - DNA, 201 bp, Homo sapiens
ttgcaatggaagtcctatcggccagtttactagttaacaggagctgtagtactagagctatgactgcatcagaagtccagcagtgtgggcacaaagcagcrcagcacttttgaagttagacatcgagagtttgagtcctagattcacaccttgctggctgagtgctgttgcaatagtgctgttgagtgagttatttaactt

SEQ ID NO: 25362 - DNA, 201 bp, Homo sapiens
tctttggcccctaagtggaacaagttttgagatcttattttatgctccagagcactccatggaatcaggctaagactgggacatcacctgaaatcataccyttgattagagcttttcttttccatgtcctgcttcacccactcctttgctagattctcctaggaacacttaaatggtaagcttctttgtaaatataaacta

SEQ ID NO: 25363 - DNA, 201 bp, Homo sapiens
tgatttcagatgtatagatatattgcttatcaaacactgatgggtctgaacatgagtggtagtaagatatttccagattaagtagacaaattgtgcagaaytttttagtatcactatttaaatgactaaatttttgaggtttatgtgtatccagcccaatatgtcctctccttatctagtataatttatctttaaaaatta

SEQ ID NO: 25364 - DNA, 201 bp, Homo sapiens
catccagctaccatttcaaaaaacagcaaatttataaaagtagtgtgtcagtttgataataattgataatcaaattctaaacacctctttcagccctgcaktaagacaactttgcactacaggcagcaggtaaacagagaagggaaaacaagaaatttcacaagttttctatttggttattaaataggaatcgtacttcaa

SEQ ID NO: 25365 - DNA, 201 bp, Homo sapiens
tgggaggccggggcgggtggatcacgaggtcaggagatcgagaccatcctggctaacatggtgaaaccctgtctctactaaaaaaaaaaaaaaaaaaaaaagcaaaaattagccgggcgtggtggcgggcgcttgtagtgccaggtactctggaggctgaggcaggagaatggcgtgaatccgggaggaggagcttgcagt

SEQ ID NO: 25366 - DNA, 201 bp, Homo sapiens
ttttttgtgtgtgtttctatacaattttagaatcaacttgtcaattacagaaaatattaggattattgcttagactctatatacaaatatggaaaatggakcttgaggagatgttggtcaaagaatataaaatttcagttagatagtaggaatacattgaagatatttattgtacagcatggtgactgtagttaataacaa

SEQ ID NO: 25367 - DNA, 201 bp, Homo sapiens
agtgagccaagatggtgccactgcactccagcctgggcgacagagctctgtctcaaaaaaaaaaaaaaaaaaaaagagaaaaagaaaagaaaagaaaagamaagacttgtaccttgtcatattggaaaaccagattcatttcacattgttataaaatctgtaaatgtcacaatataatttcaaatataacaccaaaaatgt

SEQ ID NO: 25368 - DNA, 201 bp, Homo sapiens
cgtgaatgtccttggatgtgtatggtctcttgcttgaagttatcagccagcaaaatggtgaaatacttagaattaatcaaacatctggaggtcaagaaacrcagtacctatattcttctccttactttaagaatgaaactaataaaaaataaggcggagctggcccttcagcaaaggagggatttttattatatgagtgaa

SEQ ID NO: 25369 - DNA, 201 bp, Homo sapiens
gcgggaggtaagtgaactaacagtaactagtacacacacataggtagtaagtaggtagatagatagatagatagatagatagatagatagatagatagatacagaaggaagatattttcatttaatcattgctacaccctgtagtcagattatttctcctattttttttttcacatgggaatattgaagacttagctagct

SEQ ID NO: 25370 - DNA, 201 bp, Homo sapiens
tggatgaacaagataagtctatttatgtcccagaagcttcccatcaacattgtacttacagtttctctctttattaataaaatgtgtggcaacttttgaamcctttcagatgattgtggcaccatttagtgtgccccactaaaactttactgaaaaataactgaaatgtttttctttacccaacagagagacttctaagat

SEQ ID NO: 25371 - DNA, 201 bp, Homo sapiens
agcgggaggtaagtgaactaacagtaactagtacacacacataggtagtaagtaggtagatagatagatagatagatagatagatagatagatagatagatacagaaggaagatattttcatttaatcattgctacaccctgtagtcagattatttctcctattttttttttcacatgggaatattgaagacttagctagc

SEQ ID NO: 25372 - DNA, 201 bp, Homo sapiens
tgcaggcctattatgcaatactcctcaacaggggccgtctggaagtgcatctctccacaggggcacgaacaatgaggaaaattgtgatcagaccagagccraatctgtttcatgatggaagagaacattccgttcatgtagagcgaactagagggtaacaatagcactaaaatatttattattgtaactcaggtgaacttc

SEQ ID NO: 25373 - DNA, 201 bp, Homo sapiens
ttctattgacacttagaagatgctatgttcacgtaatcatagaaagcttttaattaaaccctctactctttggttttaacttttctttattgatatatatmaaaaatctatttttgtgtcaaaatagcattttaaaggttactgtcattaaaactttaacaactaaattatgtacttgttttagaaatgttgatatgtggc

SEQ ID NO: 25374 - DNA, 201 bp, Homo sapiens
atgtacttactatgatgaaaatgagaaaaataaatagcaaaaataaattgtagtgtttcctttaatctgataaaagaaacagttaaagtggttgaaatagwtcttcatgtataaaccatgataaatttcagaaacttcaggtggaaaaaacaatgtcattatggtattatttatatcaagttgtaaaacataaaacaatgc

SEQ ID NO: 25375 - DNA, 201 bp, Homo sapiens
tagcgggaggtaagtgaactaacagtaactagtacacacacataggtagtaagtaggtagatagatagatagatagatagatagatagatagatagatagatacagaaggaagatattttcatttaatcattgctacaccctgtagtcagattatttctcctattttttttttcacatgggaatattgaagacttagctag

SEQ ID NO: 25376 - DNA, 201 bp, Homo sapiens
gttacctctagagaaacaggaaagggaataaaacagaagtgaaatgagattcatttgtatctaagtatcattgctttaaaaatatatctgaggcaaatatraaatataaatattttgttacctctaggttgcatgggtaatgcatgttatatgtgctttttgaatgtcttaatataatttctaatttaaaatttctttaat

SEQ ID NO: 25377 - DNA, 201 bp, Homo sapiens
atagcgggaggtaagtgaactaacagtaactagtacacacacataggtagtaagtaggtagatagatagatagatagatagatagatagatagatagatagatacagaaggaagatattttcatttaatcattgctacaccctgtagtcagattatttctcctattttttttttcacatgggaatattgaagacttagcta

SEQ ID NO: 25378 - DNA, 201 bp, Homo sapiens
ataatttgatattgataacagaggaagttaaattattcaaagagctcaaccataaagcagatggcttcactttcaagctgggaatcaaaaaactttaagtsctagaatattcatgtcaagaggatcttccaagaataagccaggaatgcaattaggggctgactcatggatgacaatggtcgatgagtcacaaagaaattt

SEQ ID NO: 25379 - DNA, 201 bp, Homo sapiens
attatacagtgcaatgccctctaccttggtatagtggcaagcatgaactctgcagtcagagtgccttgattcaaatcctggcttcaccccttactggtagygtgagcctactcaatttatttaacctgaatgaggtcttagtttcttcatttatataatgaaaacaataatagtggctactcacagagtttttgtaaggat

SEQ ID NO: 25380 - DNA, 201 bp, Homo sapiens
tctcattctatctatgtccacaagttgaatttttaaaccatgcttcaaggatcaggtcaaactccactcctgtcataaagcttccttaagccttatagcaraaattagtgcttcctctatgttcccgtaattatttatttctcagatgcacttaccatattccaccttgcattatagttgattgtgagtatatctttttac

SEQ ID NO: 25381 - DNA, 201 bp, Homo sapiens
atagcaggatttccttctcttttatggctgaataatattcctctatctccctctctccctctctttctgtgtgtgtgtgtgtgtgtgtgtgtgtgtgtgtgtctgtgtgtctgtgtatgtgtgtatactatatttactttatccattcattcactgatggatacttaggccatttatttatcttgactgttgtgaatgatg

SEQ ID NO: 25382 - DNA, 201 bp, Homo sapiens
ggctggttgaaacacttttaacttatggccagtttcttatatttaacagaactctgaatgctattacaaaaaatgtgtaaatgtctaaaagacattttcartgaacatgtattttaagagacagagtatgttgcataaaattcaatagctgtaaaataaaaatcgaattaaacttttatttgcaaggccctttacagcaag

SEQ ID NO: 25383 - DNA, 201 bp, Homo sapiens
aacactgaatataaaacatgaaacatctagtaaggcctcaataaatgttcattttcaaaatgcctcaaaaaatgaattaaacctaacaacctaacatgacwttctctggctgaaagaaacactcttctccaacatcatgtggtataccaaattcagttgagactgtttgtgaaggaaggaatttgcttatatacttaaaca

SEQ ID NO: 25384 - DNA, 201 bp, Homo sapiens
caaaagcctgagtcaacggagttaaattttctattcgtaagataggtttaggttagataataaatgtgaaaatacttgccagctaatcagtaaatactagytcttttcttctttattttatgagcataaaactaaaaaaaaagatttgctttgcatatagcatatcctttttgcttaagaacagcaaaatattctaaaaat

SEQ ID NO: 25385 - DNA, 201 bp, Homo sapiens
tcatgtgtactttaaggccacagtgactagatatacactttggaggactttggaagatggctgtatttaatgtaacttaaataacttattctcctcagagmctcttagtgtttatgtatatatagctctcatttctgaaactttggggagtctttgaagagttattttattatcatgaattttacaggaagcacatgtgca

SEQ ID NO: 25386 - DNA, 201 bp, Homo sapiens
ccaagtaccagtgaaaatctgtgaaatttgaaatgtttaccatttctattaatagagttaattagtaccacaatttaggagggcaatatggtattatctastatctttgaaggtgataaaaccctgtcaaccagcaattccacatccaaacatttaccccaaaaaactcttacaatgtatagagaaaaaccatctaaaatg

SEQ ID NO: 25387 - DNA, 201 bp, Homo sapiens
gactttatggagggtagctgatgcatcaaaaaaaaattatatatatatatatacacacacacacacacacacacacacacacacacatatatatatatataaagttttacagaactttgttttcaacttttaaaacaggatttctaaagaagttatgtggttttttttctttcatggcaatggcgcctccagcctcacctt

SEQ ID NO: 25388 - DNA, 201 bp, Homo sapiens
tttaattgtaaattaaatcaaattaaataacaataaatattcagtttctcattgagacaagctacatttcaagtcctaatagccacatgtggctagtaackactgatttggacagtgcagaacagacaatatccatcatcacaggaagttctgtggaatagcactgttataattaaagaagtatcatcatcactgacattc

SEQ ID NO: 25389 - DNA, 201 bp, Homo sapiens
aggaacttggcatcatgggacaatgaggagagaattaatcatcaccctatcaactacaatatattgatgccgactggacagtttttaccgatgctgattamcaccacataaagaattatctttttcacttctatataccttcactattcaaaatagtagccacaagtcacagtagctatttaattgtaaattaaatcaaat

SEQ ID NO: 25390 - DNA, 201 bp, Homo sapiens
acaaggaaaaattatcaatgaaaataaagaagttccagaaaggagtgcgggggtggaaacagacagacacctgacatgaaataaatcacctgatatacacygccaaggtctaatttgtttttccacctgtttttcctcatgccatgtgtttttcattaagataaaaaaaggaacttggcatcatgggacaatgaggagaga

SEQ ID NO: 25391 - DNA, 201 bp, Homo sapiens
gaaagtacatctttacacccattgacaaatgggtgtaaaatccaaaaacacaaagtaaattatcttctcaatgtatatagtagatgcatcctagaaaaaarcaaacaaacaaacaaaaaacacacacaaaaatttgatgtggaaacaaacttaaattaggtttcaaatataaggcaaggttttgttgttttgtttgtttgt

SEQ ID NO: 25392 - DNA, 201 bp, Homo sapiens
ctattgcaaaaagtttcagctttgcatgtactatattttggttttgctttaaacattgcgtagctattctttccactgttacagtattaatggtagatgcrtaaaaggaatcttcctttataaaaaggtcatatgtggataaaggtgatataaaatgtttttaatagtgttataaaaagtttggtcaggcgaagtggctca

SEQ ID NO: 25393 - DNA, 201 bp, Homo sapiens
tgtccacacaaaaaccttcacatgtgaaatatgagaatagttataatctatagtgacaaaattagatcagcagttgcctttttctgggaatggaggttggrggatttattgcaaaaggtcagatgctgatagcagttgtatcaataattgtcaaaacttggaaccaaccaaggtgtttttcattagatgaatggatgagta

SEQ ID NO: 25394 - DNA, 201 bp, Homo sapiens
tgtccatgaacttaactcttccatactcttcactttcagtttcttgtgcctctctggtctccatttgaagcgtttttttgttgttgtttggtttttgtttktttttttttttttttcccactgtgtcgtttctctctagttcacttcttctaaatacttccacttcaatgtgtgtaatctcacaattgatgcacacacttt

SEQ ID NO: 25395 - DNA, 201 bp, Homo sapiens
atggaaggacaaaaatctttaaaattcttagaagaaaatataccaggattaaattttgaccttcgggaaaagaacacttgattgaacaaaacaagattatragtggaactgcattaaaattaaactctttggtcatcaaacaacacaaaacacaagcctcagtctggaaatgtacagtatatataatctacagggaataca

SEQ ID NO: 25396 - DNA, 201 bp, Homo sapiens
gcttccaaaagcaattctctttgcatctgtaaagttctgggagaagctagcttggcttgtctgctgttcctgcattaccattaaggtttgaaattctctcyctgaatattattaaattaatcttatgtgatttgttctttaccaaaacctgcttattttctacagcattatgctatctttctgtttctagcttagagaagc

SEQ ID NO: 25397 - DNA, 201 bp, Homo sapiens
ttaatgtccatgaacttaactcttccatactcttcactttcagtttcttgtgcctctctggtctccatttgaagcgtttttttgttgttgtttggtttttktttgtttttttttttttttcccactgtgtcgtttctctctagttcacttcttctaaatacttccacttcaatgtgtgtaatctcacaattgatgcacaca

SEQ ID NO: 25398 - DNA, 201 bp, Homo sapiens
aaagtaatctctggtaaactcttttgttttgttgttcttgcttgactttccattctacttcacggatctcaaattaaagctatagatttgaagaaggaaaytgatatttgagatttgtaggacagggtagatctcatcatataaaagaagctcaacaaataccttgtaattgatgctacatgcttaacacaaacaaacaaa

SEQ ID NO: 25399 - DNA, 201 bp, Homo sapiens
gtgattttaatgtccatgaacttaactcttccatactcttcactttcagtttcttgtgcctctctggtctccatttgaagcgtttttttgttgttgtttgktttttgtttgtttttttttttttttcccactgtgtcgtttctctctagttcacttcttctaaatacttccacttcaatgtgtgtaatctcacaattgatg

SEQ ID NO: 25400 - DNA, 201 bp, Homo sapiens
atttatatcaaagatgaaattcctagaatagaagaatagcgtagttggggctgttccaccagatatcagcacattagaaggtaaagttttgtattgtggarctatcatgttaattcatgtataactgtgcaaataggaaagaattgagaaccctgaaaatacacaagcatagatggaaacagcatttgacaataagtggca

SEQ ID NO: 25401 - DNA, 201 bp, Homo sapiens
tttctctgatggccagtgatggtgagcattttttcatgtgtcttttggctgcataaatgtcttcttttgagaagtgtctgttcatgtccttcgcccacttkttgatggggttgtttgtttttttcttgtaaatttgtttgagttcattgtagattctggatattagccctttgtcagatgagcaggttgcgaaaattttct

SEQ ID NO: 25402 - DNA, 201 bp, Homo sapiens
aacaaaattagaaccccagcctaggttttatctcttacaggatttttttttaattgacacataggatcctacaagtgcttcaactggaaacctatgggatytaatgattctgcttcaagagagaaggagaacaaggggccgagatagtccaggaggaaagttcctaatacatgacctcaattataagatagagggtagaat

SEQ ID NO: 25403 - DNA, 201 bp, Homo sapiens
attgtcaaatttcttaggatctaatttctataattgtgaaatattaataggaacagtacgacttaagggaggtggaatgaatagatgagaaactggcctgrgtttgaatctcgacttcaccatacagtaagcctgagaccctgcactgggtgctacacctctttaggctttagcaggtaaacaccaagtccctgagtaact

SEQ ID NO: 25404 - DNA, 201 bp, Homo sapiens
tacttttgtatttttagtttcgtatcatttatttctgctctcatcttggctagcaaggactgaacattccatatttccatgctggcctcctatttcactcrcatcatctccccaggacaattgtcttctctaggatgttcctgttgatcaattgtaggtgcaaagtcaccctcatatttgcacctatatttcctatgggtt

SEQ ID NO: 25405 - DNA, 201 bp, Homo sapiens
tcctaattaaatttataaagcattagttctaatgttaaaaattgttatataaaaagcattttaatattcacatgcatctgtctacagtgttttacattttrtttataattcgtcaactgaatgaatactagataggagaatgttccatttaataaaaactcttgagaaaaataaaatagcttacttaacagtaatttcaat

SEQ ID NO: 25406 - DNA, 201 bp, Homo sapiens
tgggaggcggagcttgcagtgagcagagatagcgccactgcactctggcctgggcgaaagagcgagactccgtctcaaaaaaaaaaaaaaaaaaaaaaaaagtacaatacctttagtcttatatctatttaaaaataaagcatttttaaaagatccatgaactcctaacaatgaggttaactacatgtgccatttgagatg

SEQ ID NO: 25407 - DNA, 201 bp, Homo sapiens
ctgggaggcggagcttgcagtgagcagagatagcgccactgcactctggcctgggcgaaagagcgagactccgtctcaaaaaaaaaaaaaaaaaaaaaaaaagtacaatacctttagtcttatatctatttaaaaataaagcatttttaaaagatccatgaactcctaacaatgaggttaactacatgtgccatttgagat

SEQ ID NO: 25408 - DNA, 201 bp, Homo sapiens
cctgggaggcggagcttgcagtgagcagagatagcgccactgcactctggcctgggcgaaagagcgagactccgtctcaaaaaaaaaaaaaaaaaaaaaaaaagtacaatacctttagtcttatatctatttaaaaataaagcatttttaaaagatccatgaactcctaacaatgaggttaactacatgtgccatttgaga

SEQ ID NO: 25409 - DNA, 201 bp, Homo sapiens
ctctctggctgcccttaacattttttccttcatttcaactttggtgaatctgacaattatgtgtcttggagttgcttttctcgagaagtatctttgtggcsttctctgtatttcctgaatctgaacgttggcctgccttgctagattggggaagttctcctggataatatcctgcagagtgttttccaacttggtttcatt

SEQ ID NO: 25410 - DNA, 201 bp, Homo sapiens
acctgggaggcggagcttgcagtgagcagagatagcgccactgcactctggcctgggcgaaagagcgagactccgtctcaaaaaaaaaaaaaaaaaaaaaaaaagtacaatacctttagtcttatatctatttaaaaataaagcatttttaaaagatccatgaactcctaacaatgaggttaactacatgtgccatttgag

SEQ ID NO: 25411 - DNA, 201 bp, Homo sapiens
aacctgggaggcggagcttgcagtgagcagagatagcgccactgcactctggcctgggcgaaagagcgagactccgtctcaaaaaaaaaaaaaaaaaaaaaaaaagtacaatacctttagtcttatatctatttaaaaataaagcatttttaaaagatccatgaactcctaacaatgaggttaactacatgtgccatttga

SEQ ID NO: 25412 - DNA, 201 bp, Homo sapiens
tggttattttgctcgttagttgatgcagtttcttcctagtctcgatggtctttacattttggcatgattttgcagtggcttgtactggttgttcctttccrtgtttagtgcttccttcaggagctcttttagggcaggcctggtggtgacaaaatctctcagcatttgcttgtctgtaaagtattttatttctccttcgct

SEQ ID NO: 25413 - DNA, 201 bp, Homo sapiens
gaagttaactccaagcctattgatttgcaagtaatatcaatcaaaattcaaaaatttttaaaaatgcaaaattatacaaactttccagagaatagaacaaytgggacgtactcctcacataattttatgtggcttgatataaaatcttgacaagaggactatgaagaagaaaacccctacccaaagtcactcatgaacgta

SEQ ID NO: 25414 - DNA, 201 bp, Homo sapiens
attcttaatcctgagttctagtttgattgcactgtggtctgagagatagtttgttataatttctgttcttttacatttgctgaggagagctttacttccawgtatgtggtcaattttggaataggtgtggtgtggtgctgaaaaaaatgtatattctgttgatttggggtggagagttctgtagatgtctatcaggtccgc

SEQ ID NO: 25415 - DNA, 201 bp, Homo sapiens
tcttatttggaacagttattcagcttaccctaagtccagagtgaatttccaaaaaatcaaaggttctgcaacttttcatttctcttcaattccaactcagkttcacacgtttatcacctagtgtagaagggctttcctccacagttttgcttggcaaactccttttcatccttcaagactcaacaaaattgttgccttttc

SEQ ID NO: 25416 - DNA, 201 bp, Homo sapiens
tatcatgaaaatgtaaacattttggagacccagatcctatttcaaatagagtcaagatgactgccctagaaaatgcttcttgaagtcatggaataaattakatgattgtttatttaaaaaaaaagaacaataatacataggagatctgttaaaaaatctgtgaggaaagagctgttaaaatgttgaaaccacatgaattct

SEQ ID NO: 25417 - DNA, 201 bp, Homo sapiens
ggctccaatttggaattggccatagacacccactctgagaagtttgggaataagaaaagagaaaacacattaagaactaaaactgtaaggacccatactgkcttcttaaaggaagttttactgagaattttaatcttcaaagcctaactctcattcacattcaaaagatatatacatgaggatggaaactgtccggaaaat

SEQ ID NO: 25418 - DNA, 201 bp, Homo sapiens
actcctacaaaatctaggactttaaaaatgaatattttaagcactttaaattcctaactacatgggcttgcttaaataaatactagcaaattcataaagtrgaaagtcctcctgccattaaaagtgactatctacatttactgagagagtgatatcttccacatatgtaagaaaaaaaagtcattaggaatgaacatgtct

SEQ ID NO: 25419 - DNA, 201 bp, Homo sapiens
tatggaaatttcatgcgacaaagcaggtaaactctaatagaaaatattcaagctcttattttagagtctgtaaggaaggttattgacctacagatatcagrtaagaaagattggaaagtgattggttttgcagtataatgatagaagataaaccatggaggcttccctgtgacctggaagaagctactaccattcatcaga

SEQ ID NO: 25420 - DNA, 201 bp, Homo sapiens
aagtgactatctacatttactgagagagtgatatcttccacatatgtaagaaaaaaaagtcattaggaatgaacatgtctatcaagattcattttaaatayagggaggaggagagaggaagatggcaaggttgtgaaagagtgaatgaatgaatgaatgaatgaattatagaaagctatatgcttctgcacagctttgaga

SEQ ID NO: 25421 - DNA, 201 bp, Homo sapiens
agttcactttgagtccaaaggccagagaatcacgggagctgatggtacaaaccacagttcaagaactagagagaaaatgagatgagatgtcccagctcaayctgtaaggcagaaaagaagggaaggaattcctcctttctttgctttttgttctattcagccctcaagagattgggtgatgcacagcaatattgaggaggg

SEQ ID NO: 25422 - DNA, 201 bp, Homo sapiens
tcttttactgtcatccagaaacaccctcacagacacacccggaaataatgtttaatttaggtgcccatggccagtcaagttgacacatacaatttacaatsacactggccttcaactccagtgcacaatgtggtcttcctctttattctccaaattcaagttctcttacttgctacagttgtccatatttcttgggaacca

SEQ ID NO: 25423 - DNA, 201 bp, Homo sapiens
tgggctcccgtgctaaataatacaaaaataatgatgaagattctttttttttttttagacagagccttgctctgtcgcctaggctggagtgcagtggcgcratctcggctcactgcaagctgcacctcctgggttcacgccattctcctgcctcagcctcaggagtagctgggactacaggcgtccgccaccacgcccggc

SEQ ID NO: 25424 - DNA, 201 bp, Homo sapiens
tgcagagtatgtaatcctaaatactggtttgcagcaatttaattatgctttttgttttctttttgtgtgtttaataattattttttcatgggattagttaratctgttggccctgtaggattatagttttcatcaaatttggaaatgaaagttgtcagccattatatctttaaatatttttttgttcttcattcttattgt

SEQ ID NO: 25425 - DNA, 201 bp, Homo sapiens
tccagtgcacaatgtggtcttcctctttattctccaaattcaagttctcttacttgctacagttgtccatatttcttgggaaccatcattctaaaaaatgytgaccaggcctttcttaggcatttctaggaaaaataatataaaatacagaataaagtgaggggagttcagatataatgcatttctcatagaaaaaatgat

SEQ ID NO: 25426 - DNA, 201 bp, Homo sapiens
ttatcattttattcctgttgtttcaggtctgctgacaataattttttccttttttttttttttttttttgttccagaaaggttttttttttttttccgaaratgtttttgcagagtatgtaatcctaaatactggtttgcagcaatttaattatgctttttgttttctttttgtgtgtttaataattattttttcatggga

SEQ ID NO: 25427 - DNA, 201 bp, Homo sapiens
gttgaccaggcctttcttaggcatttctaggaaaaataatataaaatacagaataaagtgaggggagttcagatataatgcatttctcatagaaaaaatgwtagtgggatggttagtaaagaactgtgctgtgtaagcaagatgtaagctttaaacaaagtgaagaaaaggggagaagcctagaaaaaataacattataca

SEQ ID NO: 25428 - DNA, 201 bp, Homo sapiens
atgtaagctttaaacaaagtgaagaaaaggggagaagcctagaaaaaataacattatacagaaagagaatattcttaaatatgtcaacttctcttatagcraatttcccagtgttcattcctaatacaaggagagtaaaaactccatagaaacctcaaaaagagctttttcttgcaatggggttaggtgtctaaggaataa

SEQ ID NO: 25429 - DNA, 201 bp, Homo sapiens
cctggattcattaattttttgaagggttttttgtgtctctatttccttcagttctgctctgattttagttatttcttgccttctgctagcttttgaatgtrtttgctcttgcttttctagttcttttaattgtgatgttagggtgtcaattttggatctttcctgctgtctcttgtgggcatttagtgctataaatttccc

SEQ ID NO: 25430 - DNA, 201 bp, Homo sapiens
tgtatttgtgataaagacagctaagcagaagcaagcatttctccgatgtcaaactggccttactgtaggaagtttgaaaatatcatctgcttctgtctctkgaataatatcattgctctgttttgtttttattttattttatggttggtttttaaagcccaatatgtggcgggatccagagaagcgattctgtgtgctatg

SEQ ID NO: 25431 - DNA, 201 bp, Homo sapiens
catacattatggagaaggcatttcaaaaaggcaggcaagttcatctggtggattctataggacaacatgaaacttaatgggatacatagacttcttaagcyctccccgctccccagctggcaaatttttaacaacttctccttaagtgatgagagaggggtcaaaagccaggactaatctcacaattgccactgaaaatgt

SEQ ID NO: 25432 - DNA, 201 bp, Homo sapiens
ccccagtgaggtgaccctggtacctcaattggaaatgtggaaatcacccatattctgtgtcgctcatgctgggagctgtagactggagctgttcctattcsaattatactggtttctaaaaaagattgtaatatattgttgagagtgaagggagttttatatcaataattaaattattttaaaatattgtttatttcattt

SEQ ID NO: 25433 - DNA, 201 bp, Homo sapiens
atttgtctattcagagattcaacttcttcctggtttagtcttgggagagtgtatgtgtcgaggaatttatccatttcttctagattttctagtttatttgygtagaggtgtttatagtattctctgatggtagtttgtatttctgtgggatcggtggtgatatcccctttatcattttttattgcgtctatttgattcttc

SEQ ID NO: 25434 - DNA, 201 bp, Homo sapiens
atattgaaccagccttgcatcccagggatgaagcccacttgatcatggtggataagctttttgatgtgctgctggatttgttttgccagtattttattgakgatttttgcatcaatgttcatcaaggatattggtctaaaattctcttttttggttgtgtctctgcctggctttggtatcagaatgatgctggcctcataa

SEQ ID NO: 25435 - DNA, 201 bp, Homo sapiens
aaagtagagcatggagggcctaggaaggatgatagtggttgaatagactttaattttatatagaatattaggtcagagatctgaaggtgactaggaaaaarttatgtgggtatctggagcaagagcatcttaggacaaagagaaagtaagtgaaaaggccctaagatatgaatgtggctggcatgttcaaagaccctcaag

SEQ ID NO: 25436 - DNA, 201 bp, Homo sapiens
taaggcaactattcatagtgaagctgaccttaatgctatcttttaaaaagttttgttaaaaataaatttgagaaagaattttaaataacttagagaaaagmctgttttcaaatatcaccagttactacagaaatacatatccacatttagttgatgaaattggcacgtgatgtttaaaatttttcaattttctccatgttt

SEQ ID NO: 25437 - DNA, 201 bp, Homo sapiens
tgttgcagcctagaaattgcctctgtacactgcttcatgtttttttccttctctcagaaatcacagtcctgtgcttcctataattcaatatctaaaaacarttgtttcttggtttgtatttttattttagttggttgtgtactttaacagcttaacaaagaagaataaatactgtaaaaactaagaagaggctgttcaaaa

SEQ ID NO: 25438 - DNA, 201 bp, Homo sapiens
atggaaaacttaattaaggatgatggggaacttagagcaggcactgacacagggaatctaagactaaaataccctgttttaatcagaattcagtttttatrtaataaagtgtttcacattttaaacaaggaatgaaaaatacaagcaaagttacagaagaatgccataaaataagctatcaagaatgtgagaaataaatca

SEQ ID NO: 25439 - DNA, 201 bp, Homo sapiens
aagaggagttgaggattatttcccaactatggacctgagcaactaaaagacttgtcattgatttagatggggaagactgtggtaaaaacaaattttttacrggagatcatgaactcagcttagctaattatataaagttagagatgcctattatatatcgaggtgtaaatgttaaagtgatagctagtatacaagtctgaa

SEQ ID NO: 25440 - DNA, 201 bp, Homo sapiens
attctaagtgcccactgaatataaaattacttgaatattacaattgcttaattggctatgcttttagtctcttccttctctccttcaaaaatattttcaayacattctagatatgtttgataaattctgtaaatttacctgtataaattattaataagtacatacaacataatccctgtcctatctgtttagggagacaat

SEQ ID NO: 25441 - DNA, 201 bp, Homo sapiens
actttttaatgactgccattctaactggtgtgagatggtatctcattgtggttttgatttgcatttctctgatggccagtgatgatgagcattttttcatstgttttttggctgcataaatgtcttcttttgagaagtgtctgttcatgtccttcgcccactttttgatggggttgtttgtttttttcttgtaaatttgtt

SEQ ID NO: 25442 - DNA, 201 bp, Homo sapiens
atgaactcagcttagctaattatataaagttagagatgcctattatatatcgaggtgtaaatgttaaagtgatagctagtatacaagtctgaagttcattkggtcaggaacatctgaactgaagatgtaaaatgtttgaatcatcaatccatatgtcatttaaaccagaagactagatgtgataaccaagaaaatgaataa

SEQ ID NO: 25443 - DNA, 201 bp, Homo sapiens
gaactagtttacagtcccaccaacagtgtaaaagtgttcctatttctccacatcctctccagcacctgttgtttcctgactttttaatgactgccattctractggtgtgagatggtatctcattgtggttttgatttgcatttctctgatggccagtgatgatgagcattttttcatgtgttttttggctgcataaatgt

SEQ ID NO: 25444 - DNA, 201 bp, Homo sapiens
catctgaactgaagatgtaaaatgtttgaatcatcaatccatatgtcatttaaaccagaagactagatgtgataaccaagaaaatgaataacgagacaaartatgagatctaaggattgggccctatagcaccccaacatttagaggttaggaaactgaggacgaactagaaaggagactaagaatcagtgaccaaaaaag

SEQ ID NO: 25445 - DNA, 201 bp, Homo sapiens
tgcctctactgagaggaagttaagactcatcaactgtctagccatttgtcagttctaagattctaatattatagtctattgcttttagagtgcatacttgyatttaaatttctgaattcttaaaatgtcaagaaaatgttaaatatataaaaatgtgtttttaaatcccttctgggatttaaaataaaaacatgtttgaga

SEQ ID NO: 25446 - DNA, 201 bp, Homo sapiens
gtggatccatagaagaacatgacaaacaaccaggtttgaattttataatatggagaaaatagctcctctcctcacttcctccccatgccattttgagttgytcagaaatagctgaattgtgtttgagcaacttgcttctggaaatgaccatgcagtgatcagatgtacagttagtgagggatgctttatgagggaatgcct

SEQ ID NO: 25447 - DNA, 201 bp, Homo sapiens
ccttctctagcacattaaatatagcatgtgaactgtagagatttacctaaagtgcccataaacaagagtggccaacttgatgagaagtaagccaagtgccycttaataagtactgtaataacatagcctcctggaatggtctttcatcattttgtcaagaggaacttttatccctgtttatataaagctcctttgctaaat

SEQ ID NO: 25448 - DNA, 201 bp, Homo sapiens
tgtaaatgctcgagttggaaagaccctcatggtggtgtagtctgccttccttctttcatagattggcctcagaaattgagtgtcatgcagttccaaagctrgaatccaagtcttctagctctgccccggtgcttttttcctctgaaatttttccagttgagaagagattaggaattctcaaggtgtgcctaacattcagca

SEQ ID NO: 25449 - DNA, 201 bp, Homo sapiens
gtgggattgaaaatgtttaaagaaaatatcttgctatatatatataaaaaacaaattatatagcatatatatatatatatatatatatatatatatatatwgtgggtagaaaaaagacaattgtaacatcaagggtatttttgttgttttaaagtgtcatgttttgtgctggttgttttagtgtaatatagcatatcttac

SEQ ID NO: 25450 - DNA, 201 bp, Homo sapiens
agtatcagtttctgtcagttactgctcttactcgatgtgggattgaaaatgtttaaagaaaatatcttgctatatatatataaaaaacaaattatatagcatatatatatatatatatatatatatatatatatatagtgggtagaaaaaagacaattgtaacatcaagggtatttttgttgttttaaagtgtcatgtttt

SEQ ID NO: 25451 - DNA, 201 bp, Homo sapiens
cattcagttcaaagaaggcattgtacagtagagaagacagatatacatatacatactgtacatttatgataatataaatagtgcagaagaagtgtgcacartgcatataaatagtgcagaagaagtgtgcgcagtgcatactggtagaactaagaaggaagcaatgaattcttgtgttagcatttaatacacttttaataa

SEQ ID NO: 25452 - DNA, 201 bp, Homo sapiens
agagttttctgaatttaagttccttatagagccccatgtaatgagctcttagaagacattgcagagctgcaatttaaaatcctgtttaatcagccgtagcragctatgtgccattctctgtggaacactaagaggaatcagggttcttcctcctccatccagtacattcccaaccaggaattgctgtctggtcagggttgg

SEQ ID NO: 25453 - DNA, 201 bp, Homo sapiens
tgaagtggtctgctctctctctttctgtctctctctttctctctctctctgtctctctctttctctctctctctctctctctctctctctctctctctatmtatatatatatatatatatatatatggcaactagatgtatactttggaattcctttaaggtgaaaagagttctctaaatgtaaagtgttgagtgaaatta

SEQ ID NO: 25454 - DNA, 201 bp, Homo sapiens
aaactaagcctatttaattgcacagaggaaagtataccttctttgcctgttttgtttgaattttaatataaaataaaatttgctgctaaccttttgttttwctttgaccaataacatttctcagcttagtgtatgggctatgtaaagtgcctgtcaaatggagggatgtctttgttgaaagaatccagactcacagaaagt

SEQ ID NO: 25455 - DNA, 201 bp, Homo sapiens
agttattgcagtgcccaacagatatttagtattgctgtgtgtccttcaaatgtttacaatattccactgtgcctttgtgagttcactgcagcaccctgggrcacctctacacacagtttgtgaacacaggggtagatagatcctagaggcattgaaactacacggaaacttgaatgacgttagggatcccagagccactgg

SEQ ID NO: 25456 - DNA, 201 bp, Homo sapiens
gcaaaaaattagccaggcttggtggcaggcgcctgtaatctcagctattatggaggctgaggcatgagaatcgcttgaacctgggaggcacaggtggcagygagccgagatcgcgccgttgcactccagcctgggggatagagcgagactctgtctccaaaaaaaaataaataaataaaaaataaacataaatttttaaag

SEQ ID NO: 25457 - DNA, 201 bp, Homo sapiens
ttttatatagagttctccctgtttggaatcttttagttcccttatttactgtggttgccactgactctgcatcaggctttggaaatatcactaaaaaactgttttttctttagtcttcttactagtcaaatatcagctaaacaaacaaagaaaataagtgtttgaatggtcagagaactataagaatgagaattctggcag

SEQ ID NO: 25458 - DNA, 201 bp, Homo sapiens
aggaacttccttctaaatcaggttaagttagacattcaaatgtgaccccagcctgacaacccggtatacctttaatgaaagcaatgtctccaatattggaktttttattgctgacaccaccacctctcacctccctgtccctcatcatttccctgtgctgcctagtttgcctttcactggtaatatttcaacttagtctaa

SEQ ID NO: 25459 - DNA, 201 bp, Homo sapiens
gttctaattaatgcacgtgtgaaaggacataattattgtgaaaagaaatgctatcaaaacagtctaatggctacaagaagaaaaagaaaagaagaagaaggaggaggaagaggagaaggagatgaagaagaaagctaaggagaagatgggtaacaggaaaaaaagagggcaggaaaagcagataggaaggaaaaaaaaggt

SEQ ID NO: 25460 - DNA, 201 bp, Homo sapiens
acttagttgacaattctttgatagctcatgcatctctaaaatttagtactatattattgccaacattatgtatttaaatgaatgcagcttgatatcaagaraatgaccatactgaaggggaaaaaaaaataaactgcagccttcttcatgagtaacacttgaaactgttaaacacattaaaatcccatttaacaaatagca

SEQ ID NO: 25461 - DNA, 201 bp, Homo sapiens
tatgtgttcatgaatatgaatagcaatattatttatgatagctcgaaggtagaaacaatccaaatattcatcaactgatgaatgaataaacaaaatgtggyatgtacatgcagtgaacattagtcattaaaaggaatgaaatactgatacatgctgcaatgaagttatctagaataggtaacttcatagcaacaaaagcag

SEQ ID NO: 25462 - DNA, 201 bp, Homo sapiens
aggaaagatttagggaaggcaatcataaggactgtcctcaaattttcagaagagtcgttatgttaaagagggactattctaaaggctgaaggtggatccayagaagaacatgacaaacaaccaggtttgaattttataatatggagaaaatagctcctctcctcacttcctccccatgccattttgagttgttcagaaata

SEQ ID NO: 25463 - DNA, 201 bp, Homo sapiens
agaatgatgcaatcaaaatgattctgcatttcagcaaggcagtgtctaaaatgttttctgatattcttgtgaataatatgtggaaactgaagcataatggyaggtaaattgcaactgattgaaaaatagttcacaaagaatattgcatagtggattaaggtcaatccggaaagaagtctctagcagtgcaacagaggtttt

SEQ ID NO: 25464 - DNA, 201 bp, Homo sapiens
gacccctcatttctgaaggagttccaatgtccaggttttgattttgtccctgtcttgttggttcaaggggaggaatagttggttcctggtgttgttagagktcaaaatttttctattgaacatgcctgggctacatgacttgcagcttttggctctgttatacctaaaaggtaacttgacattttgttatcaacagggtag

SEQ ID NO: 25465 - DNA, 201 bp, Homo sapiens
caaatttgatcacttacagtaaggtatattgaggcagattttagccctggatcttctgggccaatggacccctcatttctgaaggagttccaatgtccagrttttgattttgtccctgtcttgttggttcaaggggaggaatagttggttcctggtgttgttagagttcaaaatttttctattgaacatgcctgggctaca

SEQ ID NO: 25466 - DNA, 201 bp, Homo sapiens
gctaatttttatataagaaaaaatactatgtacactatttcaaagcagacagaaaagtcatatgaaaagggtatgtcaaaaaagtttcaaaaagaggctcytgatttatgtgttgtgtgtttgtggacctaaccaggacatttgattcaattaaccaagtttagtatgtcagcaaccctctgaaagattgagaagattgac

SEQ ID NO: 25467 - DNA, 201 bp, Homo sapiens
aatcttcttggctgtgaacagaaatttaaaaatttacagcagcactaccatagagtgatttatacaagtgcttttaaaaaatctcttctatgtcatcagcrtgtcccctttcttctgatctcaggggaaaaagctttgtgtatgcatggcccaaatttgcccaaagaaaattatgtaggagcactagcatttattgaacac

SEQ ID NO: 25468 - DNA, 201 bp, Homo sapiens
gttggccatttcttaaaagactaaatatacatctaccatacaaaccaatcatttcactcctaattattcacccaggacacaagaaagcatattttttatasaaagacttgtaccaaaatgctcacattacttttatctgtgttactcaaaaactgaaaacaaatcacatatccatcgacaggtaaatagatatacataaat

SEQ ID NO: 25469 - DNA, 201 bp, Homo sapiens
tgaaaggtaaaagaagccagagagcttgacattatggaagccagaagaaatttcctatagggaaggaaatgctaacagcattaaatattgcacaaacatgrattcagataaagtttaaaagaactccactgagtttgggtataggcaggtccctgaggactttagcaagaccagagatgacagagtagtgggagaggaatt

SEQ ID NO: 25470 - DNA, 201 bp, Homo sapiens
tttccctctgcgtgctaataccatactatcttcattgctttagtaagtctagaatttaggtaatataatgtaccaactttattttttattttcaagattgtctatagtaggggcttttttgtgtgtgtttctatacaattttagaatcaacttgtcaattacagaaaatattaggattattgcttagactctatatacaaa

SEQ ID NO: 25471 - DNA, 201 bp, Homo sapiens
atttggaattgtcatagatatattggccatgatcatttggaagccagatttcatataattaggacgttcttcatttgagtaccattgagtgccctgacatwccttttttgaatcatcccaccagaatccttgatgaggctaaaaacatctccttcaatgccactgcagccttcaaagcttacagcaatattaaggactata

SEQ ID NO: 25472 - DNA, 201 bp, Homo sapiens
ctgtatttagagtaattgaacacatgattttacttgaatgcggagaaacttgaccaactgtgaatatgcaatttcactctacagatgaaataaaattaaayggggcaaaagtaaagaagaatggagactaggtaaagtgatggaaagagacaccaaaaaattagtcatgtgaaagcaaaactaagaggagagggaaaggtg

SEQ ID NO: 25473 - DNA, 201 bp, Homo sapiens
gtttgacaaattgaaatgctaattatgatttatcatttccatgacatcaaatatccagatagtaataaacgttgatgactaactatatttttcagtttcasccagatgtttggcatcacgtaagataccaccttagttttacataaaaataaaatgtttcttgagtctggcttatcataatggggaggaaactaatatgaa

SEQ ID NO: 25474 - DNA, 201 bp, Homo sapiens
agaagaaaaaattcacccaaaatgcaacataacattttaatgttttaagtatttcccaccaatttttacatgtgtttatgaataagatttatataacaccatggatgcagttttatgtcttgtcctttacatttttacctatcatgaggttgtattatgttgttagatattatttaaaatctttacgatctttgtttggat

SEQ ID NO: 25475 - DNA, 201 bp, Homo sapiens
catgggatttgaaaaactgactcctaccttttattcataaatcaagcaatgtctgcagctatgcatgaggagaggactgagcctgaaacacaagacggttytcatcttcgtgccagagctgtggactaccttccagaaagccagagatgtttgttgatacattttcataataaacccaaatgaagatggaagtcttgattt

SEQ ID NO: 25476 - DNA, 201 bp, Homo sapiens
gctgaacttgtgaaaattgagaactaatgtttatgtatttccttctccctccctaacccatcaactattatctagccttggaaaagtgtgttttaggagtwagtcctcaacaaatactgctaattaactaattatccttcttttgttaacttattttaatactaggatgcattagtctaaaggtcataacagaagaaaacc

SEQ ID NO: 25477 - DNA, 201 bp, Homo sapiens
agaaaagcagctgatagatattttttaaaaattaatgatgactgtgtgttttctctaagatacaagatatgagtggctggtatctgactgaccttcctggycgcattcgagtggctccccagcaggacgacttggactcacctcagcagatcagcatcagtaacgcggaggcccggcaagccctgccgcacagctactact

SEQ ID NO: 25478 - DNA, 201 bp, Homo sapiens
aatgtcccttcagtacgggatttctttctaccattttcctgagtaattaccttctagtcatcattcaaaaagcatttaagcattgaattctataggaaatrtttctaatcaccctatcccccagctctggctgagttaggccttctctgcacaattcccatgaaagcacctaccacccagcaggcagaaatatccctcttt

SEQ ID NO: 25479 - DNA, 201 bp, Homo sapiens
tgtttatgggatggaatctttttcagcacttgctgtcacctcagcgggccccagagaggcttattcagctggcagagggcaatctgaatacactcgtgacmgaaatgaacgagctgctgaccagggtaaggtggcaaaattatgaatcttctgaaagcagatagattatgtcaatgaaggaaaattacttcaaagttctga

SEQ ID NO: 25480 - DNA, 201 bp, Homo sapiens
ttggaattgtcatagatatattggccatgatcatttggaagccagatttcatataattaggacgttcttcatttgagtaccattgagtgccctgacattcyttttttgaatcatcccaccagaatccttgatgaggctaaaaacatctccttcaatgccactgcagccttcaaagcttacagcaatattaaggactatatt

SEQ ID NO: 25481 - DNA, 201 bp, Homo sapiens
cctcttgcctcagcaagctctaggttgtattttaaaggagattaaatatattttcactgaatttaattgtatctaagtaatacctttcgaagagtcaaatratacagaaaagctcataacaaaaagttgcaattcttccatccctccttcactctcagagacatgactgatctatctcagctgtttcttctagcatttacc

SEQ ID NO: 25482 - DNA, 201 bp, Homo sapiens
caatgggcataagatttttaagtgaaaaaaaaaaattctacttaaccaaggtggtaaaatagtccccttgtaattctccatgggatttgaaaaactgactyctaccttttattcataaatcaagcaatgtctgcagctatgcatgaggagaggactgagcctgaaacacaagacggttctcatcttcgtgccagagctgtg

SEQ ID NO: 25483 - DNA, 201 bp, Homo sapiens
ggaggtactagaaagttcttaatctgatattttttctggcttagtcagcaatcacttttctttcatcaatgggcataagatttttaagtgaaaaaaaaaaattctacttaaccaaggtggtaaaatagtccccttgtaattctccatgggatttgaaaaactgactcctaccttttattcataaatcaagcaatgtctgca

SEQ ID NO: 25484 - DNA, 201 bp, Homo sapiens
gttgctcctaggctacagacctgcacagcatgttattggtactgaatacagtaggcaattgtaacataatggtaagtatttgcatatctaaacatatttawacatagcaaaggtacattaaaaatatagttttataatcttatgggaccactgtcgtacacatggtcctatcattgaccaaaatgtcattatgcagcagca

SEQ ID NO: 25485 - DNA, 201 bp, Homo sapiens
tccatgctaggggcaggaggtaggatggagcagatagggagtctcttttcctcttaaaccggatgttttttttaaaatcagttttatatgttgagagtccrtggaatggaatgtggaaactgagaccctgaaagattaagtcacttgaacaaagatatacagcttctccagagaccaggcagacactaggtttatgatttc

SEQ ID NO: 25486 - DNA, 201 bp, Homo sapiens
gattatatatttttttcgggctgaaatctaattactagtgggctggcaggatatcatcttgtatctacactgcagttgtagaaaaacatttttttaatcaygttgcgtttgagaaaaggaacacttaaaaggaaaatccatcatcctgggagaaggggagaatgaaaaatatgtaaacattgccccaactgaggtcccccc

SEQ ID NO: 25487 - DNA, 201 bp, Homo sapiens
tttttttctatcaataattacacaaataatgtgtatcacttaaaaacaaaacttgaatatctaccaaaagctgtggctttcaattagagtattaaccacayaatttcattttgtaactctttctctctgagatattttgcctataactgaaaatctgatgtttctgtctttgctacatatttgatctattgtatgctggat

SEQ ID NO: 25488 - DNA, 201 bp, Homo sapiens
aactaaacagccagttttctcttaaattcttaaaaacaagtctctgcattttatatcttttaaatctggaattaccagaaatgtgatgcatatttcatttyctgtatgttcctccccttcacttcaacacgtacccttgaagaactgggagaaatggaactatttctgtgagagccctggatggacccaaagccagcattg

SEQ ID NO: 25489 - DNA, 201 bp, Homo sapiens
tggaattgtcatagatatattggccatgatcatttggaagccagatttcatataattaggacgttcttcatttgagtaccattgagtgccctgacattccktttttgaatcatcccaccagaatccttgatgaggctaaaaacatctccttcaatgccactgcagccttcaaagcttacagcaatattaaggactatattg

SEQ ID NO: 25490 - DNA, 201 bp, Homo sapiens
gaaaaaacagatacattcagtgatttaaaaatggggtaattctttctgtttttatttcacaagtcttttgtaacttattttagagttttaaaactttgtakacatatttaaaatgttcaattttcactaaaacaatcacatttttaaacataagggcatatatttggtgtgacaacctaacatttgccaccaagtgttaaa

SEQ ID NO: 25491 - DNA, 201 bp, Homo sapiens
agtgttgactcttactgtataatctaccataaatagaagcgaagttgcacatgcatttaattttttttattttggaattatgttaagtttacacacatgtrtgaagattatagagaatcctcacattccctcatccagctatccctaggaataatatcttaaataatgacaatgcacatgttaaaactaagaagttagcat

SEQ ID NO: 25492 - DNA, 201 bp, Homo sapiens
ttaaatgaacagtgatttgagatttatagcttccctttctttgtgtcatggataatttctctgtgctaaggtgtgagcatacacatcatttgggctgttaytgaagtagaatacgaagcctgccttctttcactagcaggggaatagtgagtaaattctctattgctaaacaaatattacctctatttatgatttaaattt

SEQ ID NO: 25493 - DNA, 201 bp, Homo sapiens
tcaaccattttaaagtatttgcaaaattggattattctgttgtgtgcgtttctaactatatacatgatgtaccgaatttaagaagcttattaagcttattrgtttttactgcagatcgggctcatcaaggaaaaactaatccgtacagcataaacaaattagaaatgaacttaaaataaatatacaaacaaaatagtaaac

SEQ ID NO: 25494 - DNA, 201 bp, Homo sapiens
gcatgtaagtgctatggaagcatttatcattattattattatctttattagttttattaattgtgttatacattgtgctttggcacaggaaaactagctarttactcaggttttctttctatttagtgttatgattccgctgaagaactacttaagataatttctatttgcaagtaatgatttgcactgtcccatgacatt

SEQ ID NO: 25495 - DNA, 201 bp, Homo sapiens
agtggttattatcaaatttttattttagaattgtagattattattattattattatttgaaatttgacagactttcctttgttcagatccaagctgtgccrcttattacatgtgtaacatttatcaaacattttagccttctcaaactttaatttcttcttttgtaaaatgagaatcacaatgtctacttaataatcttat

SEQ ID NO: 25496 - DNA, 201 bp, Homo sapiens
gatggcttcttcagacccaaaggggtaaagtatgctttttctttcataaagagttatttttttgctttttcatacaaaaatgttttatacaaaaaaataakaattttgaaagcttctgtaaacagttgaacttcaaattaaaaggtaagtaggaacatttcgtagttgaaactgacctaaatctttgaggatgtaagataa

SEQ ID NO: 25497 - DNA, 201 bp, Homo sapiens
ctcccagactcaagcaattctcatgcctcagccttctgagtggctgggactcccagcattcaccaccacacccagttagttattgtactttttttttttttgaagagacagggttttgctgtgttgcccaagctgatcttgaactcctggacctccagcaattctcctggcttggcttctcaatatgctgaaattataggc

SEQ ID NO: 25498 - DNA, 201 bp, Homo sapiens
cagtccaggcaaccctggaggctcctgccaagaatgtgagtgtgatccctatggctcactgcctgtgccctgtgaccctgtcacaggattctgcacgtgcygacctggagccacgggaaggaagtgtgacggctgcaagcactggcatgcacgcgagggctgggagtgtgtttgtacgtatactaactttgctgttagttt

SEQ ID NO: 25499 - DNA, 201 bp, Homo sapiens
agccctgaattctaatgtttatcttcttatcctgtgagattgctgaacacactaagatgtagctttctctataacctcctattcaactgtcagcaaatcartaaaagtaccctgagaggaaaatggctagcttaccttattttgcttccctttacttaagtctggctgccttggttgcttgctgatgccttcaaactgctg

SEQ ID NO: 25500 - DNA, 201 bp, Homo sapiens
tgatgaagaaattactctgtgtgcaagtgtggagaaaaatagcttgtgataccatagtgatcttagagctcattatacatcagcaatgaagagctttaacwaccatgcaattaaaatactagagagtataaataagattgtaccatgtgtatgtggcagcatataaaaactcagaagtggaaggaattttagtcaagtgtt

SEQ ID NO: 25501 - DNA, 201 bp, Homo sapiens
ccatttatcagtttcataacaatgattttcaagcttgtttcatttctcacagggtagacaaagacaaaatatatatctcataaaagtaataatctaccagkcatgtttgttgtagccaagcaaatatatagaattctaaaaatattgtttatagctcttgtttcaacatgcttgggacaagttaatgtttacagttttgtg

SEQ ID NO: 25502 - DNA, 201 bp, Homo sapiens
gataaggaaataatttgaccagagcatgggattttaattgagaatattaagagataaaattataataaatgtagggaaggtgtatcagagtgagattatgrtatactatacttgaaatatctaaatgaagtatttatgtttactctaaaagtcaagtgagagagattctggagtgagacaagaatgtgaggaatggggact

SEQ ID NO: 25503 - DNA, 201 bp, Homo sapiens
atgtgcccctgacatctgtacatgtgtttaatttccagtgagctcaaaatacttcaagtgatctcatttgagtattaactagggaaatacattcacagtcyagcaattttcttttatgtctacattattttaaatcatagcatagattttccactgtgctttatgaccagaacacatttatttgcaaagtattttcactta

SEQ ID NO: 25504 - DNA, 201 bp, Homo sapiens
ttatcaaatttttattttagaattgtagattattattattattattatttgaaatttgacagactttcctttgttcagatccaagctgtgccgcttattayatgtgtaacatttatcaaacattttagccttctcaaactttaatttcttcttttgtaaaatgagaatcacaatgtctacttaataatcttatttttcaga

SEQ ID NO: 25505 - DNA, 201 bp, Homo sapiens
ctcatcttgaattgcagttcccacaattcccaagggtcatgggagggacctggagggaggcaattcaatcataggggcaggtctttcccatgcttttctcrtgatagtgaataagtctcacgagatctgatgattttataaaggagagttcccctgcacatgccctcttgcctgccaccatgtaagacgtgactttgctct

SEQ ID NO: 25506 - DNA, 201 bp, Homo sapiens
ttcctttacaaaaaaagaccaaaaatgttctgccattcttgctcatcatgattttgcctcagtttttcaagttatgttttgttcataatggatttttttttgtttgttttctgaatgtgttctgttccttctactgccttaaaaagccctcatcactgagtcttcctactacttccctcacctccacttaccctactgaat

SEQ ID NO: 25507 - DNA, 201 bp, Homo sapiens
taaaattcgtatacaacagtaagtaaaatatgatttaatagcccatctcctatcccgtaatgattatgcatcttctgtcttgtagctcccagcagtaggargacagttgacatttaccatatcatatgaccttgaagaagaggaagaagatacagaacgtgttctccagcttatgattatcttagaggtagagtactgaga

SEQ ID NO: 25508 - DNA, 201 bp, Homo sapiens
ttgggcctgactcatcccatcctctctggacacaaagaagggcagaaaatggatctgggagaaagcaagtagaacacaaccaacacagacagggacaattwtatcccaatagcattcaaggatgttaaagcctaaagaatgtcaaccagccgggtgtagtggcccatgtctgtaatcccagcactttggcaggtcaaagca

SEQ ID NO: 25509 - DNA, 201 bp, Homo sapiens
aaaagctttttctaacataactcacagctgtagacttttcctttcaataataagcaaaaacaattttcatagctacaaaccgccgacacaactttctattyaaagaggacttctttgcaggaggcagaataataactcaacaaaataaatagaatctctaatttcaaaatactattatccccaaaagtaatgggaatttta

SEQ ID NO: 25510 - DNA, 201 bp, Homo sapiens
aagtccgactccttaccaaatctgtagacagtcagcttcggtcccttaaatttaaatgtaaattcctctaagatcattttcccagttgcacaagctgaagwaatagtcttttgggcctgactcatcccatcctctctggacacaaagaagggcagaaaatggatctgggagaaagcaagtagaacacaaccaacacagaca

SEQ ID NO: 25511 - DNA, 201 bp, Homo sapiens
atctgtaaaacataaacaattaagtgatagagtttattcaagagatattcgttacagtgttttcaaaggaaacttagggacaatctccctagacatgtacytgcttgtgtgtcagtttgacttaaatctttggtttaaacaacaacaacaaaaaaaggtacctaacagtgataatcttctatatttaaaatcaaaagctct

SEQ ID NO: 25512 - DNA, 201 bp, Homo sapiens
tttctttgtcaggaacagtgtggcaacaataataaatcagatttagactggctactgaaggggtttgtttaaaagatttaaaaatctcttcagagtcaaakatgttaattctacctggtgaaccagaatgatcctgcatatatcttgggacagacttatattttctaaatctgggtaatgatcatacatgcactgaaaaga

SEQ ID NO: 25513 - DNA, 201 bp, Homo sapiens
tttacatttctacttgaaatgtaactgttttaattttatactgagcaaggacaatggtattactttaatattgagaaaaaactagactatgcgatgtttgktttatttatttttaaggtttggtcttatcactggggaaaaatgcagacacagataatggtcatacccatctgtaaaacataaacaattaagtgatagagt

SEQ ID NO: 25514 - DNA, 201 bp, Homo sapiens
tcaatgttattctgcagcacttgtttgccagcagctgttagggattattgcaggtttctttgtcaggaacagtgtggcaacaataataaatcagatttagwctggctactgaaggggtttgtttaaaagatttaaaaatctcttcagagtcaaagatgttaattctacctggtgaaccagaatgatcctgcatatatcttg

SEQ ID NO: 25515 - DNA, 201 bp, Homo sapiens
taccaggtccaccctacttaaaatgggaagtaactgagaactgattcagttattctatctttggagctttaatgcaattatcaacatctagtaccatatakattacttatagaactatccctgtcttcagcacttccctcccattttctcttcttgttttcccaattctcaactccctgttaaacccaaagcagctaacag

SEQ ID NO: 25516 - DNA, 201 bp, Homo sapiens
ccaagctataaagcatttattaaataaaaatgaagtaaactacatacagtcgctttgactactaattcagccccattcagaattggatatgattgtctgcyagggataacgcactatgctattcagttctactcatgaattccagtcagatcttgatttcttgttcactttgatcctcttatgatgtcaatggtacgtata

SEQ ID NO: 25517 - DNA, 201 bp, Homo sapiens
tgtaggttcagggccagaggacaaaaactgttgaaattgccttgatatagattcatagattgcaaatgagcactttttaaaatttaaacccttgaatatgrtatctcaggcacagagtgagttctttatatatacaaaatgtgattcttaccgcctaccagctgtcttccgatttcaccagatgaccttccctataagttt

SEQ ID NO: 25518 - DNA, 201 bp, Homo sapiens
tgactctttagtcaaactgaggatcagtattttaaaagtctataaaatacttaagccatcttgtagaaataaatagtcttcccacccagaccataatctcygaaataattattaggaattttctttttctttcaaacactttggaattataatttagattctttaaaaactgagttttatgactgttttttcaaaaaagct

SEQ ID NO: 25519 - DNA, 201 bp, Homo sapiens
ataaggctgctgaacttaaaaaaaaaatgctcaaagtgagtgaaggtaagagatgttcattttcttccagtactgaaaattaagagtacagacccacatgytattatacaagagaaagtagtcctatgactgctggataatttacatacattatctaatttatcataaccctgggagagtggaaatattgctattcttatt

SEQ ID NO: 25520 - DNA, 201 bp, Homo sapiens
ccaggaaggagagagtgaaatcaaggagaaggtgatggataggagaaaggaccctgagttattataacagagtccaagagtcagagagctgcacagatggkgtgggatatgccaggtcaaggaaagggccatgggagtgggtgcctgatgcggagaggaggaaaagaggtcagcgaggaggtaaagagcctgggcacaggc

SEQ ID NO: 25521 - DNA, 201 bp, Homo sapiens
ttggaatagatcatggggtgggagttaattgaaggggtagtcaagaaaggccctgctaaagaagtgttgggttggttagagcccagcaagggacttttcakctctggagatgcttgtagagaaatgcagaggtcctaatatgggaatgaacatctcatgtagggtatagcttctcatgtttgaggaacagaaacaaggccc

SEQ ID NO: 25522 - DNA, 201 bp, Homo sapiens
gtcctttttccttatactgttgatctcagaactgttctgcagtcctgaagtatgaaacactattgccattttttggtacagccagtgctctaaaaaatgtraatggatgaaagcgattcaatctattatggaagcagaaacatcttcctatttgctttacaaatttttccgagtaaaatgcagtcaggtttgtaacattgc

SEQ ID NO: 25523 - DNA, 201 bp, Homo sapiens
gattgctcagtgagtactaatgtggaatattactgggaaagatgtttgagtgttgaagtttctcatagctcagaatggttacacagattaaggagaggaaygtctgttgttcaaaagacaaatgaaatttgtcagttcactgaaaatatttttgtttttgtatcttttttaaaactgtttcttaaagtagtcaactgctca

SEQ ID NO: 25524 - DNA, 201 bp, Homo sapiens
gcatatacttgatgatttgattggtggtttgattccagttatattaacttgccagaaactttctagtttccaaacagtgaatacaacttagacctcatgamgcttacattctagttagaagagagaatattaattagataagcacataaaatatacatgtgttagatagtgataaatgacaagaaaaaaagtagagcatgg

SEQ ID NO: 25525 - DNA, 201 bp, Homo sapiens
acttatggattataaatatgtttgtgcaaattttctctagcagtaattctaaaacctttgtggacattaagctgtaattgtagctttctcttgcaagcttytttatcctctgctttattattcccttgtaggaaattaagtattttatataataatgcttagaacatctttctcttttaaagagggaaattaagataaaga

SEQ ID NO: 25526 - DNA, 201 bp, Homo sapiens
atgaagtcacatggctgcagttgccatttattggagaaactgaatttcagggatttggatcaggtcaaggtatgttatgcacataaaccaaatattaatgrtatttatttagtgtgcaccagtgatatttgttttttccttcgctaaactgaagattaaggcaatcagaacctagtaaacattgctgaattcaccattgta

SEQ ID NO: 25527 - DNA, 201 bp, Homo sapiens
gtggaagagagaaatgaatgcaggcaggcaggatgttttcctcgaggttttttatttatatcccctggactgcataactcagtttattcccttctaaaccracttttctagaatgtgttgtctctgttcgacacctacaactctggttcattttctatgcattaaggatgatgtaactttaaaacctctcatgtaaattct

SEQ ID NO: 25528 - DNA, 201 bp, Homo sapiens
agaacacccaaaaacaaacaaaataaaggattcaaatgggtgacatggccagtcctggttacagtatgagacagatgccggttacggtgggcaacagaacwgatgctggctacagtggtcgacagagttcattttagttcaagcagaaggtagggctggtgcttgttacagtggccagtaggcctggtttctggttatagc

SEQ ID NO: 25529 - DNA, 201 bp, Homo sapiens
acatctagcatttgcatcaaggtgagtttgtctcaaaagctctgttctagtgccccactcaagaacagatattgtcaaatttgtaaaagatattttaactrgaatagacttgatttttattgctgatttaatctattacaaactattgcttttctattctaagctgttgtaaaaattattgctttaatatgatcacttaat

SEQ ID NO: 25530 - DNA, 201 bp, Homo sapiens
ttcagcacttgctgtcacctcagcgggccccagagaggcttattcagctggcagagggcaatctgaatacactcgtgaccgaaatgaacgagctgctgacsagggtaaggtggcaaaattatgaatcttctgaaagcagatagattatgtcaatgaaggaaaattacttcaaagttctgaaatgcaaatcaccttcttcct

SEQ ID NO: 25531 - DNA, 201 bp, Homo sapiens
aatagtattcttttgataacacatagtatttatgtagtatactgaattgtcaggtatttatcattaattatctcatgttgggttactttaatgctccgaaraatattttatctcaattgcttttaaaatgtatcaaaatcctaactttgtttctggtctacacaccttcatttgtccatctttttcaggtttattccctgc

SEQ ID NO: 25532 - DNA, 201 bp, Homo sapiens
agacaaaaaaagcacagttctgtagatacttagaaaaaaagattaattttgtttgggggatatcaggaaacgtttcatggaggaatcagcatttgagcaargcttcaggtgattttaacactcccatacaaagtagtgggtgatagaagagtaggaccctccaccaaaatataggtaggaaaccccacctacagggaagca

SEQ ID NO: 25533 - DNA, 201 bp, Homo sapiens
aatacgtgtatgttcattagaaataaactaataagcacataatatgtggagattatgatgggaaacagaaataagtaacatagttctttctatcaagaatrtattatcaactggtaagaaattgaaagaaggcaagtaaaaatgattaaagacaaaaaaagcacagttctgtagatacttagaaaaaaagattaattttgt

SEQ ID NO: 25534 - DNA, 201 bp, Homo sapiens
atggctgtggttttcaaacatctacccataaactgaggccaggtggctgaagacatttccactgctctaagtgagaaacgtagaacagagtgtgttcaccmtcaagctcgatgtattcaattttaaggaataatatttattctgagattatattatagcatttttatggtggctaaaaggcctttctattatgaaatagta

SEQ ID NO: 25535 - DNA, 201 bp, Homo sapiens
ttttgctgtgaggctacaagaattgctggaagacaacatttttatttcgtggaaatttgtgttgtgtttctccttggttgttaatgctttgcatttacatrgtgaacatcttattatcagagctggcctgtgaggagggtagtgggggggcattgatgttcccgtttctgagtgaggagacctatgtcggggccttggtga

SEQ ID NO: 25536 - DNA, 201 bp, Homo sapiens
attgaaaagaataaaagctgacaatgtaacaaattttttaaactttaaatttaatagttttaaagaattttcttggtgtgttcctgcagtaaacattttawaaaaaaaataattatttattctgatataatgaacttccttttttattgctgtctttttcttttttaatgaaaatatggtgattgattttttttaatgccc

SEQ ID NO: 25537 - DNA, 201 bp, Homo sapiens
gaaagaagagtagagcctggctaatcaggagagagatgtgcagtgagttgcttggatccctaccttttaatcagaatggtagattgctctcatctcttaaytggtggtggagttttgaatgagtcacccctcagccacagtttcctcatctacaatgtaggataaacaataccttatgtccttcaaggcaaggaattggat

SEQ ID NO: 25538 - DNA, 201 bp, Homo sapiens
tggacaaaatttggagcatatgtctttctttttacctgatttctccagaatttgaaaactatttgggagtattcttaactaatagcaatatagttatttgyctaagtgcagtaagaatcttttcttttgtaataggacacaattaaagaaactgcttattttatgaaggctttgactagaatggtgtgctttcagatacaa

SEQ ID NO: 25539 - DNA, 201 bp, Homo sapiens
ctggctaatcaggagagagatgtgcagtgagttgcttggatccctaccttttaatcagaatggtagattgctctcatctcttaattggtggtggagttttkaatgagtcacccctcagccacagtttcctcatctacaatgtaggataaacaataccttatgtccttcaaggcaaggaattggatcagatgatatcatgag

SEQ ID NO: 25540 - DNA, 201 bp, Homo sapiens
cataagattaaaactttatggcaaacaaatttgtcccactatgatttgtctttggtaaaaatggaagctagagagagaatttgtttcaaaaactatgatayaccagttattagattctagtctcgtctgttgtttttgagtttcttctgcaatttaggcagaccctgcttattcctgagaatcaaccagtgatctatggct

SEQ ID NO: 25541 - DNA, 201 bp, Homo sapiens
ccattggatccagcaatcccattactgggtatataaccaaaggaatataaatcattctaccataaagacatgcatacgtatgttcactgcagcactattcaacgatagcaaagacatggaatcatcctaaatgcccattgacagtagactggataaagaacatctggcacatatacaccatggaatactatgtgttgataa

SEQ ID NO: 25542 - DNA, 201 bp, Homo sapiens
cctcctgatggcttgctcagagagcctgttttcattgcccactttatatgtcagtaaataatcttccctggcagtgggtccaccatgtctggatgcacacrgggaaatctggtggggtctggccagtgaaaaacactcctcaggttttgcaggaaaagcagtgaacccttcttttaagctcgagaatgctttaaagatgca

SEQ ID NO: 25543 - DNA, 201 bp, Homo sapiens
gaggagaccatgccccagttctccgctgtctttgcatggcccttggacagaggtaggagaaggtgatgatagtggcccctagttcaaggtccaagttgcttgtgtgtgtgtgtgtgtgtgtgtgtgtgtgtgtgttttcctcttctttcccatcagaacattattttggaggcttatgactgtgacctttgttaaccaatt

SEQ ID NO: 25544 - DNA, 201 bp, Homo sapiens
tgttttcattgcccactttatatgtcagtaaataatcttccctggcagtgggtccaccatgtctggatgcacacagggaaatctggtggggtctggccagkgaaaaacactcctcaggttttgcaggaaaagcagtgaacccttcttttaagctcgagaatgctttaaagatgcatcattggcaagccttgccaaagaaat

SEQ ID NO: 25545 - DNA, 201 bp, Homo sapiens
aggagaccatgccccagttctccgctgtctttgcatggcccttggacagaggtaggagaaggtgatgatagtggcccctagttcaaggtccaagttgcttgtgtgtgtgtgtgtgtgtgtgtgtgtgtgtgtgttttcctcttctttcccatcagaacattattttggaggcttatgactgtgacctttgttaaccaattt

SEQ ID NO: 25546 - DNA, 201 bp, Homo sapiens
ggagaccatgccccagttctccgctgtctttgcatggcccttggacagaggtaggagaaggtgatgatagtggcccctagttcaaggtccaagttgcttgtgtgtgtgtgtgtgtgtgtgtgtgtgtgtgtgttttcctcttctttcccatcagaacattattttggaggcttatgactgtgacctttgttaaccaattta

SEQ ID NO: 25547 - DNA, 201 bp, Homo sapiens
gagaccatgccccagttctccgctgtctttgcatggcccttggacagaggtaggagaaggtgatgatagtggcccctagttcaaggtccaagttgcttgtgtgtgtgtgtgtgtgtgtgtgtgtgtgtgtgttttcctcttctttcccatcagaacattattttggaggcttatgactgtgacctttgttaaccaatttag

SEQ ID NO: 25548 - DNA, 201 bp, Homo sapiens
tggtgcactgggactttggtaattcaccagttacctgtcctggtcatttatagaaaccgaggtatgaaattcgctggagggtcattgaatcaatcagcccrgatggacatgaatatatttatgtggacccgatgcagctgccttatgactcaagatgggagtttccaagagatggactagtgcttggtaagttccatgggg

SEQ ID NO: 25549 - DNA, 201 bp, Homo sapiens
cctgggcataggccgaactaactttgagaggaacttagtttatagtttgactttgaaaaaaagacaataatagccctttgccaaaacaaaccctctttttscctgggaactagactgcctttgcgggactaacgaattagctacaagattagaaagtatggtttaggggtcactgttgtaaaacctgaggtcagtgcttga

SEQ ID NO: 25550 - DNA, 201 bp, Homo sapiens
ttccctgtgggctcaattccttttttgacacgatgacttggaggagtcattatgattactccaaacaggaaagacactcgcccagctgtccgcccgcagaragctggctacggtgcagaaagctgaggaggcgtctggagtttttgggtgttaatgattctgcctgcccacaggtcgggtcttggggtctggagcgtttgg

SEQ ID NO: 25551 - DNA, 201 bp, Homo sapiens
ctcctttctcccgtctgtgttttctttcccttgcaagtgttattcgacaaaagcaattatgctaatttccttccctgtgggctcaattccttttttgacasgatgacttggaggagtcattatgattactccaaacaggaaagacactcgcccagctgtccgcccgcagagagctggctacggtgcagaaagctgaggagg

SEQ ID NO: 25552 - DNA, 201 bp, Homo sapiens
gtctcatatgttctgggacacgagctattccattctgacttctttctgcctcttgcagttccttcatccattctggacttggtcgatgatcaccatggctyaactgggggacagacggtgaggtgcacagctgaaggcacgccgcttcctgatattgagtggatgatatgcaaagatattaagaagtatggaaaacagatg

SEQ ID NO: 25553 - DNA, 201 bp, Homo sapiens
agcaaaatctgttgccagtccagtcatagccattcatggctctttattaaaaaaaaaaaaaaaaaaaaaaaaagcttttttggtatcttatttttttctgygccatatggtctgcaggacaattcatggcttttctgttcttcattttcatacccatctcctaacggcttttgtccccataggccccatttacatcatcac

SEQ ID NO: 25554 - DNA, 201 bp, Homo sapiens
acagggataaatctcaaaacaccaaaactgtgaaaatgctgctaaccatgtgggtctgtctaaactggagtgttacttgtacaactggtttcagcccctcsggagtgttttgaatgccatgtagatgagttgtgaactcatattccactttgtagtctcatatgttctgggacacgagctattccattctgacttctttct

SEQ ID NO: 25555 - DNA, 201 bp, Homo sapiens
caccaagactaaggaccctcatggagtccattgcactgtccaccacctccaccagaacaagcactggtatacatggctgagagacccatagatggttcacrtcacaggactctgtgcagacaacccccagtaccagcccagagctgggtagactaattgggtggctagacccagaagagagaaaacaaccactgcagttta

SEQ ID NO: 25556 - DNA, 201 bp, Homo sapiens
tgaaaaacaatctgactctgattgaaaatctcactgagatcaccactgatgtggaaaagattcaggaaataaggtaaagaaactctctgcccaagtatgcytttttttagtgtgcatcagaggcggactgaggtttgtgtgtgtcttacaacccagacccaaagtcagtctagaaaatgtaacaatctgagttaagagatg

SEQ ID NO: 25557 - DNA, 201 bp, Homo sapiens
acttttctccccggtcatggaagaaaagcagcacttaggggagaagcagtgtctgcatatgtcacatatcgggaatacctctgctggactcatgaattcargtatttctgggaggttctgggttactctagagtaggcgaggaatccctaggctccaccagctagctttatttttgtagagatggagtcttgccatgttgc

SEQ ID NO: 25558 - DNA, 201 bp, Homo sapiens
atgacacaaattgaaaatgaatttctgtgactaaaaatgagcagatgagaaatgaatgaggacaaccacaaaatgtattttgattcagtacattctgaagwtgcattagatactcctttttacatatttggaatatggaatataaaaatataggtacattttgaggcaaaatatgtaaaaataagcaagccaacttatcac

SEQ ID NO: 25559 - DNA, 201 bp, Homo sapiens
ggctgttctgaaacaccactggaaggaaaatgtgttctttcaagccccaggatgtagacagtgttaagataacctggtgtgaggccagtatgctgcagccrcctcaaaccacatgttgtgccttattgtgtctgagataggcccatgcaggtggagatgggggtttttgttgggggttgcgtctcactcctggcctctgcc

SEQ ID NO: 25560 - DNA, 201 bp, Homo sapiens
ccagtatgctgcagccgcctcaaaccacatgttgtgccttattgtgtctgagataggcccatgcaggtggagatgggggtttttgttgggggttgcgtctyactcctggcctctgcccctcctctcctttgggctatgccagagtgacttcctcccactggaagtggtcccaatgacattcgcatcccagctgctttttca

SEQ ID NO: 25561 - DNA, 201 bp, Homo sapiens; identical to SEQ ID NO: 5202

SEQ ID NO: 25562 - DNA, 201 bp, Homo sapiens
ggtagaaggaattgtatgcccaagccacatgaccacacggctcaagttccaaccaaggcttgtgagttgaaaaactgagaaagaataatgacagacttaaygtagtgaattcttcaaactttaagtgtaatggacttacaggtccatgggagcacagccccactgtcttagatgtggctcttcaggatgtgcgggctcctg

SEQ ID NO: 25563 - DNA, 201 bp, Homo sapiens; identical to SEQ ID NO: 5203

SEQ ID NO: 25564 - DNA, 201 bp, Homo sapiens
tatactcactctgggtgttgggactttccagtggtttaatatgatacttaaagtatttagagggaagtgtatagggatggtaagtgaacctggcagcccaygtggtctctaaatgcaggtctgcacaaccagttctgtgacatgtttccaggtttgtggcctgtaaattgaaaagaataaaagctgacaatgtaacaaatt

SEQ ID NO: 25565 - DNA, 201 bp, Homo sapiens
aaggagatgatgacactgaattttcttgaaaaaaccagtgcttcaaggctataggatctgaaaggttttctaacagtgttctatcatgccaagtgtttcarcaatgcactgagcgtttgttagtcctggtgttttattgtttggcttttaggtggcaccccttaccccggcatgatggtggattctactttctacaataag

SEQ ID NO: 25566 - DNA, 201 bp, Homo sapiens
ctctttaccattggtggccccttcttcatgttctatgtctctggggatagttgacatgactctccttcaactaagtcccacatcttccaggtagtttggaratatgtacagttaaataatggtaagttctgagtgtctctattcatttttgaggtttggttgttaacacttgattaaatatgttcaatgaatgtttataga

SEQ ID NO: 25567 - DNA, 201 bp, Homo sapiens
tttaaatggtaatttattacattctttatccttcagcagtatagcacaaacaccttatatgtgtcattaactgtccttttaaaaaatgggctgggtgtggwggctcatgcctgtaatcccagtactttgggaggctgaggcaggagagtcacttgaggccaggagtttgagatcagcctgggcaatgtatcaagactccgt

SEQ ID NO: 25568 - DNA, 201 bp, Homo sapiens
tatgattgaagaaaagatttgggtgaaatctagtgttcttccctgcaaagggggttgttctcacggattcttatggtgccatgtttctcagaatttgtagyttcagttacttatatttgcacacctgactttagatgagctccagaatagcagttactaattaaggatgagcatttagagtagataaaagtggcaggaaca

SEQ ID NO: 25569 - DNA, 201 bp, Homo sapiens
atatgcctaattgttgtacaccatctcacaatcaagccttgtgagattttccaaattttatcttgatcaaactggtttgcaaattatttttcagggttttyttaaaaaaaaaaaaaaaaacccaaactttataagatcctggctatcctgtggatttttaggcccttgtatttgttcttttttatagcaacatcagagctg

SEQ ID NO: 25570 - DNA, 201 bp, Homo sapiens
gtatttctgggaggttctgggttactctagagtaggcgaggaatccctaggctccaccagctagctttatttttgtagagatggagtcttgccatgttgcycaggctggtctcctgggttcaagctatcttcccaccttggcctctcaaagtactgggattacaggtgtgagccactgcacctggcctccaccagcttact

SEQ ID NO: 25571 - DNA, 201 bp, Homo sapiens
gctcaggctggtctcctgggttcaagctatcttcccaccttggcctctcaaagtactgggattacaggtgtgagccactgcacctggcctccaccagcttrcttagcacctgcttctcaatctgagaagagagaagcagatgaccttagattgttctggagagttttgctacaagttttccttatagacattgtacagtgg

SEQ ID NO: 25572 - DNA, 201 bp, Homo sapiens
ttgggagggatggaacaccctgtggctttgcagggtttagcccctgcagctgctctcaggggctgttgtcgagtgcctgtggtttttcctggtgcagagtrcaggctgttggtggatatattattcatggaggatggtggccctcccctcgtagcttcacgaggcagtgccccagtggagactctgtgtggggacttcaac

SEQ ID NO: 25573 - DNA, 201 bp, Homo sapiens
tttacagtaaaaataaaacttaaattgaagagtacaattgtttaaacaattggaacttacttagctactgcttgttgaaacaaaatcctttttttaaaagstatcgaagcaaattaaagctgatccgtgctaaggaagaagacagtggccattatactattgtagctcaaaatgaagatgctgtgaagagctatacttttg

SEQ ID NO: 25574 - DNA, 201 bp, Homo sapiens
accccacatttcccctctgcagtgccctagtagaggttctctgtgagggctccaatcctgcagcatgcttctgtctggacaccctggttttttaatatatmctccgaaatctaggcagaggctcccaagcctcaactcttaacactctgtacacccacaggctaacaccacatggaagcggccaaggtttatggctgtcac

SEQ ID NO: 25575 - DNA, 201 bp, Homo sapiens
ttttgcaaggatagcaccaaggggatggtgctaaaccatttgtgagaaattcacccccatgatccagtcacctcccaccaggccccacctccaatactggrgattacacttcaacatgagatttgggtggggacacatatccaaactatatcattgcgtgtgtgtgtgtgtgtgtataatttttaaaccagatatatgttt

SEQ ID NO: 25576 - DNA, 201 bp, Homo sapiens
tccaatcctgcagcatgcttctgtctggacaccctggttttttaatatatactccgaaatctaggcagaggctcccaagcctcaactcttaacactctgtrcacccacaggctaacaccacatggaagcggccaaggtttatggctgtcacaagctgaagcagcagcccaagctgcacctgaactcctttgagccacggct

SEQ ID NO: 25577 - DNA, 201 bp, Homo sapiens
atgatccagtcacctcccaccaggccccacctccaatactggggattacacttcaacatgagatttgggtggggacacatatccaaactatatcattgcgygtgtgtgtgtgtgtgtataatttttaaaccagatatatgtttctgcatatctctttcctttctttcattctttctttctttttttttttttttttttttg

SEQ ID NO: 25578 - DNA, 201 bp, Homo sapiens
gaaaatctcactgagatcaccactgatgtggaaaagattcaggaaataaggtaaagaaactctctgcccaagtatgcctttttttagtgtgcatcagaggyggactgaggtttgtgtgtgtcttacaacccagacccaaagtcagtctagaaaatgtaacaatctgagttaagagatgcttgaaatcacatccctttaatg

SEQ ID NO: 25579 - DNA, 201 bp, Homo sapiens
acatatccaaactatatcattgcgtgtgtgtgtgtgtgtgtataatttttaaaccagatatatgtttctgcatatctctttcctttctttcattctttctwtctttttttttttttttttttttgagacagagtctcactctgtcacccaggctgcagtgcagtggtgtgatctcggctcactgcaactcattgcaacctc

SEQ ID NO: 25580 - DNA, 201 bp, Homo sapiens
cagaaagtacaatgaattcacttcataataaattacttggtggacaccaaatgggtgctaaattgattgggtagaaggaattgtatgcccaagccacatgrccacacggctcaagttccaaccaaggcttgtgagttgaaaaactgagaaagaataatgacagacttaatgtagtgaattcttcaaactttaagtgtaatg

SEQ ID NO: 25581 - DNA, 201 bp, Homo sapiens
ccagtggctgggcttcatggcggtgctccacgagaccctagtagcaatgatgaatgaaaaccctccccttcccgtggggctttcctttcatcttatatgtrcagtacctgtaagcactattctccagatgtttgagtatcagaagttagtgtgcagttagaagactcagggcatccatggccattacatcactaatttgag

SEQ ID NO: 25582 - DNA, 201 bp, Homo sapiens
ttaaccctcagttggtcaaagatgctctgactggtggaaatgtgttggtgggaagagattgaagttattgttgaaaatagggtcttttcacatccaatgtkagacctctccaatgtttaaggatcatgaaggctttgggtattatccacccaatagaaggcctcactgcctctctatgggacccatccaagccctggaaag

SEQ ID NO: 25583 - DNA, 201 bp, Homo sapiens
tttgagtgcacttaaatccatgcgaaattggcttttaccagcggactggaaggaacaacctcagctgttatctgtggcaccagctggttttttgtggaatrggaagcattgttcaaaggaacaaatgtaatttcttggaaccaggcaggatatgtaaatgaatgaaacaactttctgctgaggtgttgagaggaaaactca

SEQ ID NO: 25584 - DNA, 201 bp, Homo sapiens
tggtacattccgctttctaaaatgtcagttgtccatgctgctcgggatccatatgtggtaatcattatttaatggaaactcttccctgtacagagaaaggkttcattgaaatcaaacccaccttcagccagttggaagctgtcaacctgcatgaagtcaaacattttgttgtagaggtgcgggcctacccacctcccagga

SEQ ID NO: 25585 - DNA, 201 bp, Homo sapiens
aatagggtcttttcacatccaatgttagacctctccaatgtttaaggatcatgaaggctttgggtattatccacccaatagaaggcctcactgcctctctrtgggacccatccaagccctggaaaggcaacgtgatggggaccagaaggattctcagttgtagctactgacttggagaaggggctactggtatcttagcac

SEQ ID NO: 25586 - DNA, 201 bp, Homo sapiens
atttctgtccatggtacattccgctttctaaaatgtcagttgtccatgctgctcgggatccatatgtggtaatcattatttaatggaaactcttccctgtrcagagaaaggtttcattgaaatcaaacccaccttcagccagttggaagctgtcaacctgcatgaagtcaaacattttgttgtagaggtgcgggcctaccc

SEQ ID NO: 25587 - DNA, 201 bp, Homo sapiens; identical to SEQ ID NO: 5193

SEQ ID NO: 25588 - DNA, 201 bp, Homo sapiens; identical to SEQ ID NO: 5194

SEQ ID NO: 25589 - DNA, 201 bp, Homo sapiens
cgtcttactgtttgaaccttgaattttaacctgggacatgtttgactaaaatgatgctgttaatattttctgttgtgcaaaacacaaagagaactaggctycagggttgtttctatttgctaatgctgtttctgttgacttttgacttttctagtttcccagagctatggggacttcccatccggcgttcctggtcttagg

SEQ ID NO: 25590 - DNA, 201 bp, Homo sapiens
taaagtcaggtgttgcttctagagattcggtgcctgttttttaaaacatcaatagatttcaaggggtcagtacactgccttggcagcagattgcccaggtktgagtgccagctccaccacttacttaatttggatttggggctagatacttgactgttctgcccctctgtctccctgattgtagtgggaggtgataatagt

SEQ ID NO: 25591 - DNA, 201 bp, Homo sapiens
atgagctccagaatagcagttactaattaaggatgagcatttagagtagataaaagtggcaggaacagcaagactcactcccagagagcctcactacaggwctaataggtgaggaaattccccatgtttcccatttttcttcattacctccctgtggggcaagcactgccattattcatgagtaaactgtctgagttatag

SEQ ID NO: 25592 - DNA, 201 bp, Homo sapiens; identical to SEQ ID NO: 5204

SEQ ID NO: 25593 - DNA, 201 bp, Homo sapiens
ttggccctatacttaggccctttttctctctagatgtaataatgaaacttcctggactattttggccaacaatgtctcaaacatcatcacggagatccacycccgagacaggagtaccgtggagggccgtgtgactttcgccaaagtggaggagaccatcgccgtgcgatgcctggctaagaatctccttggagctgagaa

SEQ ID NO: 25594 - DNA, 201 bp, Homo sapiens
gctgaagctggtggctcccagtgagttcctcaacagtcaggacaactcatcagctgagccgcatctgccccaggcggaactttgaatcccagataggggtyatatagaaatgaaggtcccaaggcagaaattcagttacgaatgctcttaaaggcatgtgggactttgttttattttgttttgttttttgagacagagttt

SEQ ID NO: 25595 - DNA, 201 bp, Homo sapiens
aggacaactcatcagctgagccgcatctgccccaggcggaactttgaatcccagataggggtcatatagaaatgaaggtcccaaggcagaaattcagttaygaatgctcttaaaggcatgtgggactttgttttattttgttttgttttttgagacagagttttgctctgtggcccaggctggagtgcaatggcacaatat

SEQ ID NO: 25596 - DNA, 201 bp, Homo sapiens
cccttcttcactttctctattgctcctcctttcatgcttgtacctgcttttccatgccctgtttagcctggcttgggatccagcaggttctccaagggttyctgcaagaaccccggctgggtgcccaggtctgagcctggtatgtgcctcagtatcacaaaggcctcctgtaaatgacacacattgttggaagtttcagaa

SEQ ID NO: 25597 - DNA, 201 bp, Homo sapiens
ctgagccgcatctgccccaggcggaactttgaatcccagataggggtcatatagaaatgaaggtcccaaggcagaaattcagttacgaatgctcttaaagkcatgtgggactttgttttattttgttttgttttttgagacagagttttgctctgtggcccaggctggagtgcaatggcacaatattggctcactgcaacc

SEQ ID NO: 25598 - DNA, 201 bp, Homo sapiens
atggggaccagaaggattctcagttgtagctactgacttggagaaggggctactggtatcttagcacctaatggcagaagctctttaccattggtggcccyttcttcatgttctatgtctctggggatagttgacatgactctccttcaactaagtcccacatcttccaggtagtttggaaatatgtacagttaaataatg

SEQ ID NO: 25599 - DNA, 201 bp, Homo sapiens; identical to SEQ ID NO: 5199

SEQ ID NO: 25600 - DNA, 201 bp, Homo sapiens
cttcttcatgttctatgtctctggggatagttgacatgactctccttcaactaagtcccacatcttccaggtagtttggaaatatgtacagttaaataatrgtaagttctgagtgtctctattcatttttgaggtttggttgttaacacttgattaaatatgttcaatgaatgtttatagagttatgaaaaaattcacctg

SEQ ID NO: 25601 - DNA, 201 bp, Homo sapiens
aaaatctcactgagatcaccactgatgtggaaaagattcaggaaataaggtaaagaaactctctgcccaagtatgcctttttttagtgtgcatcagaggcrgactgaggtttgtgtgtgtcttacaacccagacccaaagtcagtctagaaaatgtaacaatctgagttaagagatgcttgaaatcacatccctttaatga

SEQ ID NO: 25602 - DNA, 201 bp, Homo sapiens
ataagcctctcctgccattgtcttaaatagtcattgaactggggaaaaagtgaagagaggcgggactgggtcctttgacgctataccctacctgtgaattkgaatcacctgcagagatttaaaaactgctgatctacaagcctcacccaaaacaacaaattagaatccctgggggtggtggccaactgctccctggctgat

SEQ ID NO: 25603 - DNA, 201 bp, Homo sapiens
taaacaataccttatgtccttcaaggcaaggaattggatcagatgatatcatgaggcctcttaaggttttaagctgtgattagaacccaagagtcagaagrtacatctcacagcacccagctaaccagccctatacttttgtcagaaatcatctcagaaagacaaagtcagtcctgtatttcaagccttcaggaggaagaa

SEQ ID NO: 25604 - DNA, 201 bp, Homo sapiens
agcaaaatcatggaatcaacctaaatgcccatcaatgatagactggataaagaaaatgtgatacatatacaccatggaatacgatgcagccgtaaaaaggwatgagatcatgtcctttgcagggacatggatggagctggaagccgttaccgtcagcaaactaacacaggaacagaaaaccaaacaccacatgttctcact

SEQ ID NO: 25605 - DNA, 201 bp, Homo sapiens
agcctcctgagtagctgggattacaggcatgtgccaccatgcctggctaatttttttttttttgtatttttagtagagatgggggtttcaccatgtttgtsaggctggtctcgaactcctgacctcaagtgattcacctaccttggcctcccaaagtgctgggattacaggtgtgagtcatcacacccagcctataacttt

SEQ ID NO: 25606 - DNA, 201 bp, Homo sapiens
aatcccgtgcttgaaaaataatcaaacaaaaagagaatgcattgtaagaagcctcactgtactcctgtccccagctgcccagttctcccctcctccccacrgggaaacatcttcattagtttcattaggttcttatgaaaccttccagagtttctttaagcaaaatacaagcaagtaggactgtcatatcctgcagaccgc

SEQ ID NO: 25607 - DNA, 201 bp, Homo sapiens
gatcttggggccccattgattctttcatctttcaggcgtcttactgtttgaaccttgaattttaacctgggacatgtttgactaaaatgatgctgttaatrttttctgttgtgcaaaacacaaagagaactaggctccagggttgtttctatttgctaatgctgtttctgttgacttttgacttttctagtttcccagagc

SEQ ID NO: 25608 - DNA, 201 bp, Homo sapiens
catgatcttggggccccattgattctttcatctttcaggcgtcttactgtttgaaccttgaattttaacctgggacatgtttgactaaaatgatgctgttmatattttctgttgtgcaaaacacaaagagaactaggctccagggttgtttctatttgctaatgctgtttctgttgacttttgacttttctagtttcccag

SEQ ID NO: 25609 - DNA, 201 bp, Homo sapiens
ccgccatgatcttggggccccattgattctttcatctttcaggcgtcttactgtttgaaccttgaattttaacctgggacatgtttgactaaaatgatgckgttaatattttctgttgtgcaaaacacaaagagaactaggctccagggttgtttctatttgctaatgctgtttctgttgacttttgacttttctagtttc

SEQ ID NO: 25610 - DNA, 201 bp, Homo sapiens
cccgcttttgccttttattccgcactctgatttttggggggatcgtttgttcccgctcattttctacaaacattacggtatcctgttagcattccgaacarggggctgttcatatatttgccttcaatgatttcctgaagggacatgtggaagtaatagcgagcggtgcagtcacccaagctgaagatgcacgagagcggg

SEQ ID NO: 25611 - DNA, 201 bp, Homo sapiens
accaacctggagtcctaattaaacttaaggtttgagctggtctctgaagtcaaggagatgatgacactgaattttcttgaaaaaaccagtgcttcaaggcyataggatctgaaaggttttctaacagtgttctatcatgccaagtgtttcagcaatgcactgagcgtttgttagtcctggtgttttattgtttggctttta

SEQ ID NO: 25612 - DNA, 201 bp, Homo sapiens
ttgaccaacctggagtcctaattaaacttaaggtttgagctggtctctgaagtcaaggagatgatgacactgaattttcttgaaaaaaccagtgcttcaasgctataggatctgaaaggttttctaacagtgttctatcatgccaagtgtttcagcaatgcactgagcgtttgttagtcctggtgttttattgtttggctt

SEQ ID NO: 25613 - DNA, 201 bp, Homo sapiens
cccactctgcccaggtctggttcctggagcatcagcgccccctttccctcgccggcaggatcgtttcctcccgacactggcctctcgccttgggcgcaggrtttggggctcagctgtcaattccaaggaattcgtagggttcgacccacgcggcgggagggaacggagggagaatcaaaaggcatcctcccccacgacgcg

SEQ ID NO: 25614 - DNA, 201 bp, Homo sapiens
aggcatatcacatggccagagcaggagcaagtgagagagagagagagagagagagagagagagagagaggtgccatacagttttaaacaggcagatcttgyaagaagtcactcacttttgcaaggatagcaccaaggggatggtgctaaaccatttgtgagaaattcacccccatgatccagtcacctcccaccaggcccc

SEQ ID NO: 25615 - DNA, 201 bp, Homo sapiens
tggtttccatttctgagttacttcacttagaataatagtctctaatcccatccaggttgctgcaaaagccattaattcattcctttttatagctgagttayatatatatatatatatatgcacacctacacatacatatgtatagatacactgcagtttctttatccactccttgattgatgggcatttggggttggttcc

SEQ ID NO: 25616 - DNA, 201 bp, Homo sapiens
aaatcacctttgcaaaaattgtaactgaggaaattatgacagtgaatgagatatgacctaaccaactccattttgctttagcctccaagttgtccttgttccttcctgggcataggccgaactaactttgagaggaacttagtttatagtttgactttgaaaaaaagacaataatagccctttgccaaaacaaaccctctt

SEQ ID NO: 25617 - DNA, 201 bp, Homo sapiens
attagccagtgagagttatcggaaccagtacttcctctcccctcccatattgttaaaaatagtttacattgcttcccaggctgggctggtggagttggcaygagatgtcagaggaacctgagtcatgctcaggcccaagccctgttggcaggcagaccactgctttctggccttccgtgactatctgaaaaaaatcgtgaa

SEQ ID NO: 25618 - DNA, 201 bp, Homo sapiens
  misc_feature (1)...(201): n = A,T,C or G, or insertion/deletion polymorphism (see Tables 1-2)
ttgcaggggtgatgctatatcagctacagatggcttgatcctgagtcatttcttccttttccatgcagtgtgtccaccgtgatctggctgctcgcaacgtnctcctggcacaaggaaaaattgtgaagatctgtgactttggcctggccagagacatcatgcatgattcgaactatgtgtcgaaaggcagtgtacgtcctc

SEQ ID NO: 25619 - DNA, 201 bp, Homo sapiens
caaaccctctttttgcctgggaactagactgcctttgcgggactaacgaattagctacaagattagaaagtatggtttaggggtcactgttgtaaaacctraggtcagtgcttgagatattttggagaccctgtatttcgatgcaccagctgacaccacccaggtcaataaactggctcatctgatcttggggcccctacc

SEQ ID NO: 25620 - DNA, 201 bp, Homo sapiens
taaactgtctgagttatagataagtaatgacatgaaacttcacaaacacgctgagcacagtggctcacgcctgtaatcccagcactttgggaagccgacgygggtgaatcacgaggtcaggagttcgagatcagcctgaccaacatggtgaaaccctgtctgtactaaaaatacaagaaattagctggccatgatggtggg

SEQ ID NO: 25621 - DNA, 201 bp, Homo sapiens
ccgaattgtgctaagacctcaggatgtgcgcaaggagtgcctggaagaacttgccactcactccatcttcctgggtgggaggcaagcatggatggggcccmtatcaggtccctaccgccccgcgtccgaaaagccgcgggctgggcggtgtgggaaatggctttttggctccgaggccaaattgctcaatgttttggaccg

SEQ ID NO: 25622 - DNA, 201 bp, Homo sapiens
ccagcaggttctccaagggttcctgcaagaaccccggctgggtgcccaggtctgagcctggtatgtgcctcagtatcacaaaggcctcctgtaaatgacayacattgttggaagtttcagaaattctaggtcaaaatggcactgaaatattaaggtatttaccccaacccaagcaacttttctaaaagttgtagagagtgt

SEQ ID NO: 25623 - DNA, 201 bp, Homo sapiens
tgggcaagggtttggggcgctctggagcggtttgttgggtcagtgaggtgccagggagagcgggtgcctgccgggcagtgtgctcgggttgcacgccctakcgcgggggcgacagcggcggcgcgggcgggcggtctggaataatgacaaacacatttggccctgagtgaagaagtcgtcgtcgcctcgcattccagcaac

SEQ ID NO: 25624 - DNA, 201 bp, Homo sapiens
atagaaacttaatatattcataaggaatgtggcccaatatcaggcaaaacaagagttaacagcatggactaaactaataaaagaccaaaacaatcttttartgactttttgcttaaaacattgcatatcctttctgttttgcttttcagagtcaagaaaacttttcctttggaaagtatttactgcttttaacaattgaaa

SEQ ID NO: 25625 - DNA, 201 bp, Homo sapiens
agcctcatataagaagaaatctatgttaggtaaaagtgtctatactcactctgggtgttgggactttccagtggtttaatatgatacttaaagtatttagrgggaagtgtatagggatggtaagtgaacctggcagcccacgtggtctctaaatgcaggtctgcacaaccagttctgtgacatgtttccaggtttgtggcc

SEQ ID NO: 25626 - DNA, 201 bp, Homo sapiens
aagcaggctgatactacacagtatgtccccatgctagaaaggaaagaggtttctaaatattccgacatccagagatcactctatgatcgtccagcctcatrtaagaagaaatctatgttaggtaaaagtgtctatactcactctgggtgttgggactttccagtggtttaatatgatacttaaagtatttagagggaagtg

SEQ ID NO: 25627 - DNA, 201 bp, Homo sapiens
gtcctccgcagtgcatctcaccggacaaacatccccggagccacaggaggggaggaaggggctctccgggcgtgcgcacctccccagccgccgcgctgtcycatccccgacccctaatctggtcaacctggaccccggcactgctgaattgcatcccctcttctccctttctcctcggcctcctcctttccacaaccctca

SEQ ID NO: 25628 - DNA, 201 bp, Homo sapiens
gtaagatttctctttctgtttttacagctatgttattttatcttttgaaaacaatggtgactacatggacatgaagcaggctgatactacacagtatgtcyccatgctagaaaggaaagaggtttctaaatattccgacatccagagatcactctatgatcgtccagcctcatataagaagaaatctatgttaggtaaaag

SEQ ID NO: 25629 - DNA, 201 bp, Homo sapiens
catctcacctcttttttgctccttccgctccggacctttacaagttgtggccattccaaactcctttcacttctgattatctcatgttctctctcacctcyccgcccatgcaatgaggttcctccccaactagattcttattcctcttagattctcagagaagccttccctgaaagaagccgtctcccatctcccagattg

SEQ ID NO: 25630 - DNA, 201 bp, Homo sapiens
gcatcccctcttctccctttctcctcggcctcctcctttccacaaccctcaagatgaggaggccctgcctcgactccccgacaggcgcaaggccgaccagsctcgctttgacgccctggtcaggccctgcttcggagcttgcagttttgggttgacccaagtgcagctggacctcgttcacaagagtgaggggaagccaag

SEQ ID NO: 25631 - DNA, 201 bp, Homo sapiens
gcaaatgaaagtagaggtagaggttgtgttatgatgaatgatctaacagtatatatgttaaagaatgccaaatgcaggttttaattatccaccggtctcaytgcaaaatacagaagagtttaagtcttcttagagagttaggtaaactgaaatcaagcaaggcaccagagtgaaatcacctttgcaaaaattgtaactgag

SEQ ID NO: 25632 - DNA, 201 bp, Homo sapiens
tgtacacccacaggctaacaccacatggaagcggccaaggtttatggctgtcacaagctgaagcagcagcccaagctgcacctgaactcctttgagccacrgctggagctggagtcatagggatgcagggagcagtgtctcgaggctgcacagggcagtggaccctggggctggcccatgagaccattcttccctcctagg

SEQ ID NO: 25633 - DNA, 201 bp, Homo sapiens
caccacatgttctcactcataggtgggagctgaacaacaagaacacatgaacacaggcgggggggaacatcacacatcagagcctgtcagggggtgggggsccgggggagagatagcattaggagaaacacctaatgtaaatgacgagttgatgggtgcagcaaaccaacatggcacatgtatacctatgtaacaaacccg

SEQ ID NO: 25634 - DNA, 201 bp, Homo sapiens
caaaatggcactgaaatattaaggtatttaccccaacccaagcaacttttctaaaagttgtagagagtgtgacctctttattaattgaaacgtgaaaatcrgctctagtttggaagctgagaaaaaatatatatatatgtatttatttctttgttgtttgaattcttaatataaatggtttaaaggaccattgaaaactgc

SEQ ID NO: 25635 - DNA, 201 bp, Homo sapiens
ggtttaaaggaccattgaaaactgcatgcaatcacagaaggttttggcttcaggcagctcccgccatgatcttggggccccattgattctttcatctttcrggcgtcttactgtttgaaccttgaattttaacctgggacatgtttgactaaaatgatgctgttaatattttctgttgtgcaaaacacaaagagaactagg

SEQ ID NO: 25636 - DNA, 201 bp, Homo sapiens
atcgtttgttcccgctcattttctacaaacattacggtatcctgttagcattccgaacaaggggctgttcatatatttgccttcaatgatttcctgaaggracatgtggaagtaatagcgagcggtgcagtcacccaagctgaagatgcacgagagcgggtcgcgtagaagaactgcggcaatgggacccccagcgcagcc

SEQ ID NO: 25637 - DNA, 201 bp, Homo sapiens
aagtccaagcatgttgtagatgacctatgtaagtcacgataaagtttatacaagagaatttattaaaatttagatgtaattagccataactgaaaggaaawttatttatttatttatttatttatttatttatttatttatgatttattttgagaaggagttttgctcttgttgcccaggctggagtgcaatgtcatgatc

SEQ ID NO: 25638 - DNA, 201 bp, Homo sapiens
gcaatggcaacaaaagccaaaattgacaaatgggatctaattaaactaaagagcttctgcacagtgaaagaaactaccatcagagtgaataggcaacctamaaaatgggagaaaatttttgcaacctactcatctgacaaagggctaatatccagactctacaatgaactttaacaaatttacaggaaaaaaacaaacaac

SEQ ID NO: 25639 - DNA, 201 bp, Homo sapiens
ttacaatttataggccttggcagaatagagatctgagcttgtgcttagtaagaactaggcaatggaaatttgctttcagaaatacatttctgtcttgacartaagttaattggatcattgcaatgatttttttaaatctctttccataacaaattatagttaaggaaaattttacaaagggagaagagaatatgaagaggg

SEQ ID NO: 25640 - DNA, 201 bp, Homo sapiens
actcataggtgggaattgaacaatgagaacaacacggacacaggaaggggaacatcacactctggggactgttgtggggtgggggtagtggggagggatasctttaggagatatacctcgtgctaaatgacgagttaatgggtgcagcacaccagcatggcacatgtatacatatgtaactaacctgcacattgtgcgcat

SEQ ID NO: 25641 - DNA, 201 bp, Homo sapiens
acaatgagaacaacacggacacaggaaggggaacatcacactctggggactgttgtggggtgggggtagtggggagggatacctttaggagatatacctcrtgctaaatgacgagttaatgggtgcagcacaccagcatggcacatgtatacatatgtaactaacctgcacattgtgcgcatgtaccctaaaacttaaagt

SEQ ID NO: 25642 - DNA, 201 bp, Homo sapiens
acggagcccagtcctctctgagttccttgtttgggtgtcttgtttttttaagctttgtgctgcatgggtttattaccagtactctgcatacacagtccaaragagtgaaaagaaatagaaaactataggacgttatccagaatgaccacaaaccttcagttccctttgctgtattgcacttactccatttcaaaaggaatg

SEQ ID NO: 25643 - DNA, 201 bp, Homo sapiens
tatcttccaaataaacactcgatttttcagattcactatcaacatacatttattcttggagagttggaaggaattttctttttccttttaaaaaagttacatatatatatatatatatatatatatatatatttttttttttttggtaacagggtctcactctgttgcccaggctggaatgcagtggcatgatcatcatag

SEQ ID NO: 25644 - DNA, 201 bp, Homo sapiens
atcttccaaataaacactcgatttttcagattcactatcaacatacatttattcttggagagttggaaggaattttctttttccttttaaaaaagttacatatatatatatatatatatatatatatatatttttttttttttggtaacagggtctcactctgttgcccaggctggaatgcagtggcatgatcatcatagc

SEQ ID NO: 25645 - DNA, 201 bp, Homo sapiens
tggtctcgaactcctgacctcaagtgattcacctaccttggcctcccaaagtgctgggattacaggtgtgagtcatcacacccagcctataactttttttwaataggtgatagaatcccgtgcttgaaaaataatcaaacaaaaagagaatgcattgtaagaagcctcactgtactcctgtccccagctgcccagttctcc

SEQ ID NO: 25646 - DNA, 201 bp, Homo sapiens
ttggtttccatttctgagttacttcacttagaataatagtctctaatcccatccaggttgctgcaaaagccattaattcattcctttttatagctgagttwtatatatatatatatatatgcacacctacacatacatatgtatagatacactgcagtttctttatccactccttgattgatgggcatttggggttggttc

SEQ ID NO: 25647 - DNA, 201 bp, Homo sapiens
tacagtccaacaaatgtacatcttccctgaaatatgaagtgatttggttcttctgttcatacttgattgactttaatccttaacacataaacactgctttytatttataggagacagcaatttttttttccaaaccgaagtacatgctatttggcttacaaatatataatcaaagtattgtttcatacagtatgttttttc

SEQ ID NO: 25648 - DNA, 201 bp, Homo sapiens
aggtttgagctggtctctgaagtcaaggagatgatgacactgaattttcttgaaaaaaccagtgcttcaaggctataggatctgaaaggttttctaacagygttctatcatgccaagtgtttcagcaatgcactgagcgtttgttagtcctggtgttttattgtttggcttttaggtggcaccccttaccccggcatgatg

SEQ ID NO: 25649 - DNA, 201 bp, Homo sapiens
ctatcaagttgcccgaggaatggagtttttggcttcaaaaaatgtaagttcaaggaacacagacctttttagacccagatttcagtgagtggagtgtggamggagatgctaggagatagatgttggaaaggccattaataacaggggcctcttacttacctgtctctctccttcatcccctacgcaggtcagggagtctga

SEQ ID NO: 25650 - DNA, 201 bp, Homo sapiens
cctacgacagcagacagggctttaatgggaccttcactgtagggccctatatctgtgaggccaccgtcaaaggaaagaagttccagaccatcccatttaaygtttatgctttaaaaggtacttgtatcatctccttccttctttaaataagagtaacaggcaaaatcataaggtgcgtgtaggatttttttttttttttaa

SEQ ID NO: 25651 - DNA, 201 bp, Homo sapiens
gaagttccagaccatcccatttaatgtttatgctttaaaaggtacttgtatcatctccttccttctttaaataagagtaacaggcaaaatcataaggtgcrtgtaggatttttttttttttttaaatcatcatcactggtgatcctaaattctgatttggggatttaggaccccagctaatacaatgtctgtggctataat

SEQ ID NO: 25652 - DNA, 201 bp, Homo sapiens
tcactatcaacatacatttattcttggagagttggaaggaattttctttttccttttaaaaaagttacatatatatatatatatatatatatatatatatwtttttttttttggtaacagggtctcactctgttgcccaggctggaatgcagtggcatgatcatcatagcttactgcaatctcaactcccttggttcaagc

SEQ ID NO: 25653 - DNA, 201 bp, Homo sapiens
gcagccagagcgccggtcccgcacttcgctccccgaattgtgctaagacctcaggatgtgcgcaaggagtgcctggaagaacttgccactcactccatctycctgggtgggaggcaagcatggatggggcccatatcaggtccctaccgccccgcgtccgaaaagccgcgggctgggcggtgtgggaaatggctttttggc

SEQ ID NO: 25654 - DNA, 201 bp, Homo sapiens
catgaatatatttatgtggacccgatgcagctgccttatgactcaagatgggagtttccaagagatggactagtgcttggtaagttccatggggtaacctyccaagactcccttttcccttgcacacaactttacaatttataggccttggcagaatagagatctgagcttgtgcttagtaagaactaggcaatggaaatt

SEQ ID NO: 25655 - DNA, 201 bp, Homo sapiens
tttttaacaatgaggtggttgaccttcaatggacttaccctggagaagtggtaggtaccctcaaaacgtgcaatggcttggagcagagcaacagggctcaraagacctgcatttgagctcggtctgtcactgatgggcacatcactgagtttctctagaccttagcttcccacctctgggatgaacacatttgattaaatg

SEQ ID NO: 25656 - DNA, 201 bp, Homo sapiens; identical to SEQ ID NO: 5198

SEQ ID NO: 25657 - DNA, 201 bp, Homo sapiens
catatggaaaacagaaggggagagagccaggaggtgtgggtgagagccccgaaggcaagaggatcccaggggctggcccagcacggagctggtagacagcrcgctcacaccagggagggctgcaccctcctttctcccgtctgtgttttctttcccttgcaagtgttattcgacaaaagcaattatgctaatttccttccc

SEQ ID NO: 25658 - DNA, 201 bp, Homo sapiens
ccatgatccagtcacctcccaccaggccccacctccaatactggggattacacttcaacatgagatttgggtggggacacatatccaaactatatcattgygtgtgtgtgtgtgtgtgtataatttttaaaccagatatatgtttctgcatatctctttcctttctttcattctttctttctttttttttttttttttttt

SEQ ID NO: 25659 - DNA, 201 bp, Homo sapiens
attagtagagatagggttttaccatgttggccagactggtctcaaacttctgacctcaggcaatccacccacctcggcctcccaaagtgctgggattataggcataagccaccatgcctggcctatatatctattttctaagatagaatctttgcatagtgatattcatctgtgagatctaaacattctacaaaaaaatta

SEQ ID NO: 25660 - DNA, 201 bp, Homo sapiens
aggcctgggggcagaatcttgccatactgtgcagcccaaatttgaatgccaaaggctttcgtttgtctctggggggccacagtctaggtctagttctgtgyaggagttgtaatatttgctcttctctccctcctccagctcgcagacctctgaagagagtgccattgagacgggttccagcagttccaccttcatcaagag

SEQ ID NO: 25661 - DNA, 201 bp, Homo sapiens
tgggtggagtgagaacctgggagaaggccagccctttatatccaggcagacagctccaagtgccaccatggatcagccagtcttgcaggggtgatgctatatcagctacagatggcttgatcctgagtcatttcttccttttccatgcagtgtgtccaccgtgatctggctgctcgcaacgtcctcctggcacaaggaaaa

SEQ ID NO: 25662 - DNA, 201 bp, Homo sapiens
gctatggggattaaatcaatgaattcatgtaaagtgcttaggacagtgcctggcatatagaaacagcactcaataatgttagctattttatttatttattwatttatttatttatttatttatttattttctttttttttgagacagagtctcactctgtcacccaggctggagtgcagtggcgcaatcttggctcactgc

SEQ ID NO: 25663 - DNA, 201 bp, Homo sapiens
ctatggggattaaatcaatgaattcatgtaaagtgcttaggacagtgcctggcatatagaaacagcactcaataatgttagctattttatttatttatttatttatttatttatttatttatttattttctttttttttgagacagagtctcactctgtcacccaggctggagtgcagtggcgcaatcttggctcactgca

SEQ ID NO: 25664 - DNA, 201 bp, Homo sapiens
ctattttatttatttatttatttatttatttatttatttatttattttctttttttttgagacagagtctcactctgtcacccaggctggagtgcagtggygcaatcttggctcactgcaaacttctgcctcccaggttgaagcaattctcctgccttagcctcccgagtaggtgggattacaggcatgcaccaccatgtt

SEQ ID NO: 25665 - DNA, 201 bp, Homo sapiens
ccaggttgaagcaattctcctgccttagcctcccgagtaggtgggattacaggcatgcaccaccatgttcagctaatttttgtatttttagtagagacagsgtttcaccatgttgcccagactggtctcgaactcctggcctcaagtgatctacctgcctcagcctcccaaagtgctgggatgacaggtgtgagccactgc

SEQ ID NO: 25666 - DNA, 201 bp, Homo sapiens
atcaggcagccagttaaagttcaaattatctcacaaatattatcatactccattaaaaagtgggcagaggacataagcagacacttttcaaaagaagacakacctgcagccaacaagcatatgaaaaaatgctcaacatcactgatcactagagaaatgcaaatcagaaccgtgatgagataccatctcacaccagacaga

SEQ ID NO: 25667 - DNA, 201 bp, Homo sapiens
aattatctcacaaatattatcatactccattaaaaagtgggcagaggacataagcagacacttttcaaaagaagacatacctgcagccaacaagcatatgaaaaaatgctcaacatcactgatcactagagaaatgcaaatcagaaccgtgatgagataccatctcacaccagacagaatggttattattaaaaagtcaaa

SEQ ID NO: 25668 - DNA, 201 bp, Homo sapiens
ctgcctcccaggttcaagcgattctcctgcctcagcctcccgagtaactgggattacaggtgcccgccaccacgccaggctaatttttgtatttttagtasagacggggtttcaccatattggccatgctggtctcgaactcctgacctcaggtgatccgcccacctcggcctcccaaagtgctgggatttacaggcgtaa

SEQ ID NO: 25669 - DNA, 201 bp, Homo sapiens
tgaattcttcaaactttaagtgtaatggacttacaggtccatgggagcacagccccactgtcttagatgtggctcttcaggatgtgcgggctcctgctaargatgtgcagggaactggctctgaaaacaagtgaacagtagtcatcatggcagctgacatttgtggagtcctttgtatgtgccaggtgccatgacaaatat

SEQ ID NO: 25670 - DNA, 201 bp, Homo sapiens
cgattctcctgcctcagcctcccgagtaactgggattacaggtgcccgccaccacgccaggctaatttttgtatttttagtagagacggggtttcaccatrttggccatgctggtctcgaactcctgacctcaggtgatccgcccacctcggcctcccaaagtgctgggatttacaggcgtaagccaccgcgcccggccag

SEQ ID NO: 25671 - DNA, 201 bp, Homo sapiens
ggggtttcaccatattggccatgctggtctcgaactcctgacctcaggtgatccgcccacctcggcctcccaaagtgctgggatttacaggcgtaagccamcgcgcccggccaggaacggttcttaaatgccgagagggcgcatgctagctctcctcagcattcccggtgagccgctacccacggccgtgcggctctcgtg

SEQ ID NO: 25672 - DNA, 201 bp, Homo sapiens
gatgctaggagatagatgttggaaaggccattaataacaggggcctcttacttacctgtctctctccttcatcccctacgcaggtcagggagtctgaaatyatcaggcatctactcttctctagagctttctctctgttgggagtgggtggagtgagaacctgggagaaggccagccctttatatccaggcagacagctcc

SEQ ID NO: 25673 - DNA, 201 bp, Homo sapiens
ttaaatgccgagagggcgcatgctagctctcctcagcattcccggtgagccgctacccacggccgtgcggctctcgtgcccataggaggcgctggcgagckcctgtaaccctaaacccctcggcccctttccccccacccgcccggattctcttcccgctctcccccctctctccacacccgcccggccccctctcgggtc

SEQ ID NO: 25674 - DNA, 201 bp, Homo sapiens
atttagatgtaattagccataactgaaaggaaatttatttatttatttatttatttatttatttatttatttatgatttattttgagaaggagttttgctsttgttgcccaggctggagtgcaatgtcatgatcttggttcactgcagcctccgcatcctgggttcaggcatttctcctgtctcagcctcctgagtagcta

SEQ ID NO: 25675 - DNA, 201 bp, Homo sapiens
ttaacaatgaggtggttgaccttcaatggacttaccctggagaagtggtaggtaccctcaaaacgtgcaatggcttggagcagagcaacagggctcagaaracctgcatttgagctcggtctgtcactgatgggcacatcactgagtttctctagaccttagcttcccacctctgggatgaacacatttgattaaatggcc

SEQ ID NO: 25676 - DNA, 201 bp, Homo sapiens
tcctggtcttaggctgtcttctcacaggtacggagcccagtcctctctgagttccttgtttgggtgtcttgtttttttaagctttgtgctgcatgggtttwttaccagtactctgcatacacagtccaaaagagtgaaaagaaatagaaaactataggacgttatccagaatgaccacaaaccttcagttccctttgctgt

SEQ ID NO: 25677 - DNA, 201 bp, Homo sapiens
tttgtgcgactatttgattaatgctcatttccttgactagatcacctcatgtgaaaggtatggattggttttgcttttacccagttagctcccatgcctayctcagtacctggcacattgtaggtcccccagaatcatcatctactgaaagtggaatgaccacttcagaagggcaccctgggtaagatttctctttctgtt

SEQ ID NO: 25678 - DNA, 201 bp, Homo sapiens
cgagggctataagaaatggaagatgtggaattcttgagcacagatgtgctttgtgttttcttcagtctgtgtccttgcctccattcttattccatgtgggktttttttttttttttttttttttttttgagacagggtctctcgctctattgcccaggttggagtgcagaggctgactgcaacctcaatcccctgggctcc

SEQ ID NO: 25679 - DNA, 201 bp, Homo sapiens
aagtgtctatactcactctgggtgttgggactttccagtggtttaatatgatacttaaagtatttagagggaagtgtatagggatggtaagtgaacctggmagcccacgtggtctctaaatgcaggtctgcacaaccagttctgtgacatgtttccaggtttgtggcctgtaaattgaaaagaataaaagctgacaatgta

SEQ ID NO: 25680 - DNA, 201 bp, Homo sapiens
aacacatttgattaaatggcctttaggactccttgatcaatgggagagtttgaaatgatagttcctggaccaggcccttcagaatacataaagagtgtgcmgtaagccttctttttcagaagtcagacagaaataggaaggttctctggctacaagatatcaaccaaaaaattagaagagcaaaaaaaccactggatttta

SEQ ID NO: 25681 - DNA, 201 bp, Homo sapiens
gaattgatggaagctcattggtttttgagcaaaatctgttgccagtccagtcatagccattcatggctctttattaaaaaaaaaaaaaaaaaaaaaaaaarcttttttggtatcttatttttttctgcgccatatggtctgcaggacaattcatggcttttctgttcttcattttcatacccatctcctaacggcttttgt

SEQ ID NO: 25682 - DNA, 201 bp, Homo sapiens
aattgaaaagaataaaagctgacaatgtaacaaattttttaaactttaaatttaatagttttaaagaattttcttggtgtgttcctgcagtaaacattttwaaaaaaaaataattatttattctgatataatgaacttccttttttattgctgtctttttcttttttaatgaaaatatggtgattgattttttttaatgcc

SEQ ID NO: 25683 - DNA, 201 bp, Homo sapiens
catcaccttacgtgaaagttaacgtcataggcttaatctggaacccatttgccctaattgaggactccacaggaaagaagagtagagcctggctaatcagragagagatgtgcagtgagttgcttggatccctaccttttaatcagaatggtagattgctctcatctcttaattggtggtggagttttgaatgagtcaccc

SEQ ID NO: 25684 - DNA, 201 bp, Homo sapiens
cagagcaagactccgtctcaaaaaaaaaaaaaaaaaaaaaaagaagcctgtgcccaagttcatactgtgcgagggcgtaaacgccagcaggcgggtttgctgggccttcctagaatctgctgggccttcctagaatctgctgggccttcctagaatctgctgggcccaggcaactcaggggagctctcacagcacgtgccg

SEQ ID NO: 25685 - DNA, 201 bp, Homo sapiens
gcaagactccgtctcaaaaaaaaaaaaaaaaaaaaaaagaagcctgtgcccaagttcatactgtgcgagggcgtaaacgccagcaggcgggtttgctgggccttcctagaatctgctgggccttcctagaatctgctgggccttcctagaatctgctgggcccaggcaactcaggggagctctcacagcacgtgccgtggt

SEQ ID NO: 25686 - DNA, 201 bp, Homo sapiens
ctctggtgaggccccttggggcaatgtgggcagggtttcttcatccgcctccaggaggagcaccccctaccgccccaacatcccagctgtgtgatttgctrtgatccagggaggtgaatcggatttttttttttcttccgagacagagtctcactgtcgcccaagctagagtgcagtggcacgatctcggctcactgcaac

SEQ ID NO: 25687 - DNA, 201 bp, Homo sapiens
tcctgtatataacagcactgtagcaataaacgtgacattttataacgatgccctgcagtccccgggttctttctggtgtcacatgtttaggaagggaagtgggggggggccctgacgttcacctcgggtgcagcaaggaccgtggtccaccctgtgcactgggcttcctcgaagcgactcctcactctgaggagcccatgg

SEQ ID NO: 25688 - DNA, 201 bp, Homo sapiens
gattcctgccctgttggtggcatctgcctccgagccaggttccaggagcagctgtgcgtgcccccagctggtgagcgggcacctggcctacacttggagastctctggtgaggccccttggggcaatgtgggcagggtttcttcatccgcctccaggaggagcaccccctaccgccccaacatcccagctgtgtgatttgc

SEQ ID NO: 25689 - DNA, 201 bp, Homo sapiens
cgggctagtttttatatttttagtagagatgaggtttcaccatgttggccaggctggtctagaattcctgacctcaggtgatccacccgcctcggcctccsgaagtgctgggattacaggtgtgaaccgccgcaccccgcccggaattggattttaatttcagccctctgttggccagcagtgggacctgcaattgttatc

SEQ ID NO: 25690 - DNA, 201 bp, Homo sapiens
aaataacgttctggcacatactaggcgcacaaaatcactggcaggtagccccgcggagcccagaagcacaatcggccgccagaccacgtggccagaaagcmccgccctaacgccgcccactccggaccacttctccgcggtcgtccaaccctcgccggaagttactgtaagtggcttccgggtctgcgcgcacagtggcgg

SEQ ID NO: 25691 - DNA, 201 bp, Homo sapiens
cgagaagagcctggccaacaaggtgaaaccctgtctctactaaaaatacaaaaattagtcgggcgcggtagtggacacctgtaatcccagcttcatgggargctgagacaagagaatcacttgaacctgggaggcgggggttgccgtgagctgagattgcgtcattgcactccagcctgggtgacagagcgagattctatc

SEQ ID NO: 25692 - DNA, 201 bp, Homo sapiens; identical to SEQ ID NO: 5219

SEQ ID NO: 25693 - DNA, 201 bp, Homo sapiens
ggtgaggccccttggggcaatgtgggcagggtttcttcatccgcctccaggaggagcaccccctaccgccccaacatcccagctgtgtgatttgctgtgayccagggaggtgaatcggatttttttttttcttccgagacagagtctcactgtcgcccaagctagagtgcagtggcacgatctcggctcactgcaacctcg

SEQ ID NO: 25694 - DNA, 201 bp, Homo sapiens; identical to SEQ ID NO: 5214

SEQ ID NO: 25695 - DNA, 201 bp, Homo sapiens; identical to SEQ ID NO: 5216

SEQ ID NO: 25696 - DNA, 201 bp, Homo sapiens
tccccaggcccccctaagctgctctcccttggaacctgcacagctctctgaaatggggcattttgttgggaccagtgacccctggcatggggaccacaccytggagcccggtgctggggacctcctggacaccctgtccttcactcctttgccccagggacccaggctcatgctctgaactctggctgagaggatgctgct

SEQ ID NO: 25697 - DNA, 201 bp, Homo sapiens; identical to SEQ ID NO: 5217

SEQ ID NO: 25698 - DNA, 201 bp, Homo sapiens; identical to SEQ ID NO: 5212

SEQ ID NO: 25699 - DNA, 201 bp, Homo sapiens
tctgctgggccttcctagaatctgctgggccttcctagaatctgctgggcccaggcaactcaggggagctctcacagcacgtgccgtggtgggcaagagcrtgagcttggaaccggaggcctcgatcctcgccagctgtgtggcctcaggtgagggcctcgccctgtctgttgtttggtgtcctcgcctgggaacagggac

SEQ ID NO: 25700 - DNA, 201 bp, Homo sapiens
tctgttgtttggtgtcctcgcctgggaacagggactgtgatggcggcacctgcctgagtcctgcagctgtggcagggatggatgaatttctgcagactgcmgcagaccggacccatcatcatggtggttgcaaacttacaaacacctacacatgcgccaggcccagcctccccccagctccactcccaccccagcagcccc

SEQ ID NO: 25701 - DNA, 201 bp, Homo sapiens; identical to SEQ ID NO: 5215

SEQ ID NO: 25702 - DNA, 201 bp, Homo sapiens
cttctaaagccaccagcaaattgtgcctaagcgaaatattttttttaaggaaaataaaaacattagttacaagattttttttttcttaatgtagatgaaamttagcaaggatgctgcctttggtctctggtttttttaagctttttttgcatatgttttgtaagcaacaaatttttttgtataaaagtcccgtgtctctcg

SEQ ID NO: 25703 - DNA, 201 bp, Homo sapiens
caagactccgtctcaaaaaaaaaaaaaaaaaaaaaaagaagcctgtgcccaagttcatactgtgcgagggcgtaaacgccagcaggcgggtttgctgggccttcctagaatctgctgggccttcctagaatctgctgggccttcctagaatctgctgggcccaggcaactcaggggagctctcacagcacgtgccgtggtg

SEQ ID NO: 25704 - DNA, 201 bp, Homo sapiens
tacaatcccaacactttgggaggctgaggaaggggcatcacttgaaccaggagttcagtactaacctgggcaacaaagaggcccctgtctctgataaaaaraaaaaaaatgaaaaaataaaaatgaacaggtataaaaagagaatatggtacaaagtcacactccctgatacagctgcccagttttttccagctcttgcca

SEQ ID NO: 25705 - DNA, 201 bp, Homo sapiens
agttctgggattacaggcatgagccactgcgcccagcccaacatttattgagcacctactatgtgttagggacgcgccaatagaccgaacccttgtgggcrgacattctggttggtgggcaaggaaaggtaaagaaacgagacctgtggtgtggggctgacctaaaataacgaagcgggagaggaaggggtgcagacacgt

SEQ ID NO: 25706 - DNA, 201 bp, Homo sapiens
tctcatccgagggtgtgaccaggcagatccgtttccacgatcactcacggggttgttggctggattcatttatttcttcctttttttttttttttttgagmcggtgtctcgctctgtcaccaggctggagtacaatggcatgatctaagctcactgcaagctccgcctcccgggttcatgccattctcctgcctcagcctc

SEQ ID NO: 25707 - DNA, 201 bp, Homo sapiens
gcaacgattctgtgacatgagagggtgggaacggtttgcaggactgtggtggggggccgagggggtaatcagtgcacatcaggggcaccgggttggggtcrgaaggcaagagacacgatcctgctggctagcttctagcagtcacctccctctctgagtctcagcctccctctctgctctggctctcaataataacaaaga

SEQ ID NO: 25708 - DNA, 201 bp, Homo sapiens
ccaagagccctatgaggtaggtcctatcattatccccattggatggaagatgacactgaagcttaaaggtgaaacactgcccttgtcacacagccaggaastggtgaatgcccaagaggacgggagttttctgggctcagctcagacaactgagtgcctggagaggccgagtgtgcaacgattctgtgacatgagagggtg

SEQ ID NO: 25709 - DNA, 201 bp, Homo sapiens
ggccaggattctaaccacaagagtctagctctataggctgtgatcttacccacctaactcacccggactatgtctgcctgcttctaatggggggtgatatkaggagaagttgagccttaaagttcaaggtcctgggccgggcgctgtggctcacgcctgtaatcccagcactttgggaggcagaggcaggcagaccacctg

SEQ ID NO: 25710 - DNA, 201 bp, Homo sapiens
gagcttcaatgaccgcacccgcttccgggcatctctgagactcaaaccccgcacctctgctgagggtaagcccccggggggctgagtccgatcgagggccrgctgagggtggcagggcggggacagtctgggctgggagcagaaagatctggctcgcgtctcagctctggaactgatggaccgtctttgggctctggtctt

SEQ ID NO: 25711 - DNA, 201 bp, Homo sapiens
ccagcacccgtcccaaggctgagaaacaacccaaccatagtttctctgtgaggtgggtcctctgtgcaagccctattgactcatatgccttgggggctttstttagaatgactgtttcctggtcctaaaataatcagcctaaaataatcactgacctcccatctcccaagagaataggcaaattgtcctcactgcccacct

SEQ ID NO: 25712 - DNA, 201 bp, Homo sapiens
agtggcagggctcctggctgcccatgtgtgcttctgctgagaggtgttttttcctagaaacgtgggttctggaccacaatctagctactacccactattcrtgtgtccttgggcaaatcacctgacccctttgcacctcagtttcctcagatgtaaaatgcagatgtaaatagggtctgcttccactaaaactggacctgg

SEQ ID NO: 25713 - DNA, 201 bp, Homo sapiens
ttcctgcagatcctgcgcatggtgcgcatggaccgccgcggcggcacctggaagctgctgggctcagtggtctacgcgcatagcaaggtgaggcctgcaasccgcgcgcggagacccgagggcgtgtctggggcacgaccggagcgggcagggcggagagggcgaggtcagaggggctgtctccgtgctgggaaggggtgt

SEQ ID NO: 25714 - DNA, 201 bp, Homo sapiens
ccccctgaacccgaacctgaacctgtcggaatctctagtggcaaaccacagcaggggaggcagcgatgacgtcacagggcatgggatggaggacatttgcrtaggtcctaccccaacagccataacattgtccttgaacctcttggacacagagttactctaccagatcatggttaaccagggcttgtcctggggaatgag

SEQ ID NO: 25715 - DNA, 201 bp, Homo sapiens
gcgtcccttggggcacaatggccactgtcccctgggagctggccttctgaggggcattgtaggggcaggcggctggcactgtccatgccaagagacagctrgtattgtggtgcccataattaatgagacagctctggcagctgctccccagcccatgccaggggcctaggcaagcaggaagtaaaaatattcctgtcttag

SEQ ID NO: 25716 - DNA, 201 bp, Homo sapiens
gcggcacctggaagctgctgggctcagtggtctacgcgcatagcaaggtgaggcctgcaacccgcgcgcggagacccgagggcgtgtctggggcacgaccrgagcgggcagggcggagagggcgaggtcagaggggctgtctccgtgctgggaaggggtgtggcctgcgggggttggagccctagcaggaggcgaggtcta

SEQ ID NO: 25717 - DNA, 201 bp, Homo sapiens
gcgggcagggcggagagggcgaggtcagaggggctgtctccgtgctgggaaggggtgtggcctgcgggggttggagccctagcaggaggcgaggtctaagsgggtggggcggagtggagtctgaattaggtaggggcgggcctaggagtccggaccggatcagggggcggggccggagaggcggggcttgagggtttcccc

SEQ ID NO: 25718 - DNA, 201 bp, Homo sapiens
atgttctgtgttgttaattccttgggacctggattattcatttctggttttacaataaacctggctgagtgtaggtgtctgaagtgaatatagcccagagrggtcaggtgacaacctcttttctgctgtgagatgccctgccatctttcctacccccatcatatccccatctctctggcctggcctcccagcagctgtccc

SEQ ID NO: 25719 - DNA, 201 bp, Homo sapiens
ggagagggcgaggtcagaggggctgtctccgtgctgggaaggggtgtggcctgcgggggttggagccctagcaggaggcgaggtctaagggggtggggcgragtggagtctgaattaggtaggggcgggcctaggagtccggaccggatcagggggcggggccggagaggcggggcttgagggtttcccctggatgcttct

SEQ ID NO: 25720 - DNA, 201 bp, Homo sapiens
ctttcaggtaagagcaggacaaccgccgctgcccacccagccacacacagcactgggcacactttaagcacccgcaccaggcacacagtgctcgaccccarcggacacacctcatccccttcggactccacctccactttcgcagccacccacacccgacccataactcacacctcactgactccatccccgcacctggta

SEQ ID NO: 25721 - DNA, 201 bp, Homo sapiens
gggaagggaagtctgagtgcatgtgtagacgtgcacgtacacgttcacatgcacacagactgtgtaaatgctgttgaaccgggagctcagtaggcagtatsggggggtagatctttagcggggatccaagaccacacaggcaggatgtcaatcaaggtgggctgaacttaggtaggagagaccacagaagaacatgttatc

SEQ ID NO: 25722 - DNA, 201 bp, Homo sapiens
ctttactcccaatcccgactctgaccctggagacccgcacagattcagcggaccctccccctccctccccagtcccctgccacatccccagaagtccccgsctccgggtccgtgcgcggggtaggctggctgtgatctcgccgcccccgcccctgcagacttcatcgtgttcgtggcctcggtggccgtcatcgccgcggg

SEQ ID NO: 25723 - DNA, 201 bp, Homo sapiens
ctcactgagagggcaggcaccaggcatggcctgggcatacatgtgggcccagcagctagaaccatggggccgaggccctcagtaggccatcacgctgcacrcctccagggcaccactgcatggaagtctgtgtgatggagtccttattttgcagtgcactgcctgcacagctgtacgaggccctaaaaccctgaccagtgt

SEQ ID NO: 25724 - DNA, 201 bp, Homo sapiens
aggaggcaagagggagcacagtgtggggaaaaaagctggcagcccagtttggcccccctgagactggacatcagagcgaaggttgggggcagagctgggtyatgcagaacctaaaagcccagtgtgagcttcaccctgttggcatgcttggcagcctgagctcatggagtcctgggtttccaaaggtgcctctggggccct

SEQ ID NO: 25725 - DNA, 201 bp, Homo sapiens
gagtccagggagtactgttagctaggacccccttcccagagacgcaggctgtggcaggaggggccccagcagaagagcctgcaagagaagggctctgggcsgggcgcagtggctctcacctgtaatcccagcactgtgagaggctgaggtgggaggatcgcttgagcctaggcaacatggtgagacccctgactctacaaa

SEQ ID NO: 25726 - DNA, 201 bp, Homo sapiens
cataaaatgggaacaataatagcatccacttcctaggattattgtgaggattaaatgagataatccatggaaggtgaacagaagacttttgggaatatagkaggtgctcaacaaatagctaaacacaaatgtactttggaagcggcaggaatgcatccttgatgagccctgactatgcactgcccagcactggcttatctc

SEQ ID NO: 25727 - DNA, 201 bp, Homo sapiens
caagccgtaggtggcccccgtgaccagtcctgcctgtaacctgtttgtgtctccagattacattgacaaccatcggctatggtgacaagacaccgcacacrtggctgggcagggtcctggctgctggcttcgccttactgggcatctctttctttgccctgcctgccgtgagttgcctcctgctcagttggtgggggaggc

SEQ ID NO: 25728 - DNA, 201 bp, Homo sapiens
cacggagctgctcagtggaaccgagggaaggtttccactagccatcttgcttgagtttctcaaatcctggctgcctaaattccaccccatgtttccccttyctttcaatggcatcctgcttgggagggcccacacctccctgtttgagaagtcagctctgtctggccagtcccaacagatggatgcccctgtgtcctcttt

SEQ ID NO: 25729 - DNA, 201 bp, Homo sapiens
acctctgttcgtgtcttattctcaaacttccagccagatgtttaataataaacggagtttctttcggatccacgccagctggagaccgaggtaccccctcrcctgctcctcctgtccccactcctccttgccccacccaatttgggggctggagaggggacaggatgggccaaggacaaggtgcatgtgcctgccgcctgc

SEQ ID NO: 25730 - DNA, 201 bp, Homo sapiens
caggactttagataacaattttcctaacctagccaacaggggagatggatgctctaagaactttgcccttgtgattgggaaagtctttgagtgtgacccamatttttcgtgctgctgtttttcagccctagtccttttgcttggtctttgtaaggagctggggagaccatcctgttcttatactgccttcctcctcctcct

SEQ ID NO: 25731 - DNA, 201 bp, Homo sapiens
tccacaaagccgttttaggcatgctggacccattgtgggctttacttattgtttgttcaatgaatcccactgaattcatgtaacaaccctggaggaagatrctattatgctattttgtgctgaggctcagaaaggagaagtgacttgcccaaggtcattcagctgagaagttgctgacttagggctggactccaggggtcc

SEQ ID NO: 25732 - DNA, 201 bp, Homo sapiens
cgtagtttgaaaaccacaaatctaagcaaaccattcactttttcatctctaatcctcttgctccctcctgaacgagtgggatagtcatgggatggggagaygggggaaatggagaggaaaggttggataagccttgtgatcagaccagctggggagagccagccaggcaacacccgcctgtctcattctgcctcctgggct

SEQ ID NO: 25733 - DNA, 201 bp, Homo sapiens
tgcaaacatttgcaaagcacccacatgtgccagacactatatttgcactgagaatgcagcggtaacaaagacacagcttgcagtctagggggagagaaagwtatcagtcaaatacacaatgaataggtattcatcaaatgtgataaggggaataacaggagtgtttaacagaggaacctggcatgaagtgcctactatata

SEQ ID NO: 25734 - DNA, 201 bp, Homo sapiens
ctaggtagcaggcactattattgttcccattttgcagacaagaaactggggctcaaagaagagaaacaccacatactaagttacacagcttgtctgtggtygagtcaagactcaaacccatgtcggcatcagggccaagcccgagctctaaatggttctcagcctcgccagctgacccaaggcagtttccagtggcctaag

SEQ ID NO: 25735 - DNA, 201 bp, Homo sapiens
gggcccaggccagccagcacccatgtttcatctatatttgtatagatggagaaactgaggtcccagagggggccagagagaatccttagaaagtcctttgwtggatgaatgaagccacaccctagttgtggcaggcatgagaccccagctaaggggctccttcaccttgtctcctctacccctgacctccagatactgatc

SEQ ID NO: 25736 - DNA, 201 bp, Homo sapiens
agcatctcacaatgttgcccaggctggtcttgacctcctggactcaagcaatcctcccaccttggactcccaaatgttgggattacaggcatgagccaccrcgcctcgtcccaggatgttttctattagtccaagtatatcccttcaaatgtaatgagagtatcaagggtatagaaactcttagccagtgggttaaagcag

SEQ ID NO: 25737 - DNA, 201 bp, Homo sapiens
gatctcagtgaggagtaagcgggtaggaacactctccctcttgtagaatagtgtgagaaggggtgcctgagggggcccacaggggccctggaatcctaacsaggggctaaagaagctcctctattcaaagccgatcatggatggatgaggtggaagagagacagcccaagaaggggagacagtacaaaagccaccaaggtg

SEQ ID NO: 25738 - DNA, 201 bp, Homo sapiens
gggatgaggttccagcgtagtgcagtctcatggcccatctctctgcacctctgccaactttcctctgtggttcttagttccattcctgcgaaagacaatcygattggctcagcccaacctatgggtgggcccttcttgggtcagtctccagctctccatgaatctgtggcggccaggagagtgctgtggagccaaccgcag

SEQ ID NO: 25739 - DNA, 201 bp, Homo sapiens
ctcacagccaccactcaggatcctgcctccatcagctgggcctgcaggctgggcagcctttctctttacaggcggaggaaactaagaagagtatctgcagrtgtcctcccagcttccagttaaagaccctcccaaccacccttccaccttagctgtgggtcaggcccagagaagctgcgctcctggcctcgagtcacacag

SEQ ID NO: 25740 - DNA, 201 bp, Homo sapiens
aacaagtcggaaggtttggggctggtgcaggtgggagaggaggaagctattcctcatcaaacaccttgtctagaagacactgcctttcatgtcccgtgggwcagaaaccattcaagctggctcaataaaaactggcttctgtactattacatttgggataaagaaaaagaaaaattggcttctggaggtagaggacagata

SEQ ID NO: 25741 - DNA, 201 bp, Homo sapiens
agagaaggcaggtgacagtctcaaaaccacacacacaagcaggactgggatccaaactcaggtctctctgaccccgagctgctgtccttaaggtcaccacraaacatgaatataaataaagccacatagaaggtgacttgggccacacatagggaggcaagcatcgggagttggcagttctgaaggggggatagtggggtg

SEQ ID NO: 25742 - DNA, 201 bp, Homo sapiens
aagcagacagaacaagtcggaaggtttggggctggtgcaggtgggagaggaggaagctattcctcatcaaacaccttgtctagaagacactgcctttcatrtcccgtgggacagaaaccattcaagctggctcaataaaaactggcttctgtactattacatttgggataaagaaaaagaaaaattggcttctggaggtag

SEQ ID NO: 25743 - DNA, 201 bp, Homo sapiens
tcctcccccaactcctgccccacttcaggtctcctctaaggctggctggtactctcttgatctggggccccagacatttggggtgggtccccctgaacccraacctgaacctgtcggaatctctagtggcaaaccacagcaggggaggcagcgatgacgtcacagggcatgggatggaggacatttgcataggtcctaccc

SEQ ID NO: 25744 - DNA, 201 bp, Homo sapiens
ttggggcacaatggccactgtcccctgggagctggccttctgaggggcattgtaggggcaggcggctggcactgtccatgccaagagacagctagtattgyggtgcccataattaatgagacagctctggcagctgctccccagcccatgccaggggcctaggcaagcaggaagtaaaaatattcctgtcttaggagggtg

SEQ ID NO: 25745 - DNA, 201 bp, Homo sapiens
ggccagacccagcacccgtcccaaggctgagaaacaacccaaccatagtttctctgtgaggtgggtcctctgtgcaagccctattgactcatatgccttgsgggctttgtttagaatgactgtttcctggtcctaaaataatcagcctaaaataatcactgacctcccatctcccaagagaataggcaaattgtcctcact

SEQ ID NO: 25746 - DNA, 201 bp, Homo sapiens
gcttggcccgctgctcgcctttcaggccgccgcgttttcaattgttaatttggaaacggaaaaagtagccggccgggcgggggaggccgcggggaggtaaycggagccgcagcaccgccccggcccctcccgctctcggggcctggcattggcaaagccccgcccctcccagggacgcaagagccccgcccaccattcccc

SEQ ID NO: 25747 - DNA, 201 bp, Homo sapiens
catcaagggttttttctccttggcctggctgcctgggcaaaggagctggctgtggcatgaccatgtgggcacctgccagcccctcccttgttggggtctgktcatctaatgcccttcacatgacaggcatggggtgggccctggctggggagagggatttgcactctcctaatccaagggctgcagccctccctctgtctt

SEQ ID NO: 25748 - DNA, 201 bp, Homo sapiens
aagaaaacatcttggtccccccacggttgtttataccaggactccctctccttctctggcctggtctggcctctccactcctgagctgggctacctgagtygagggtccagcccccggtcatggcaggaggccctggcagcacgcccactggcccccaccagggactgagcactcaccacctcctggtggcctgtcccatt

SEQ ID NO: 25749 - DNA, 201 bp, Homo sapiens
ctgggaaagaatccctgctctaacaggacactccctctgagccccctcccccaacaggattctcaagttcctggtggccaaaaggaaattcaaggagacaytgcgaccgtacgacgtgaaggacgtcattgagcagtactcagcaggccacctggacatgctgggccggatcaagagcctgcaaactcggtgggtgcaccg

SEQ ID NO: 25750 - DNA, 201 bp, Homo sapiens
cgtttccagttaatcaccgagccctacttcctgcggtgttttccaacccatccactcctcttccctgctgccaccaccctgggccaggccacagtcatctstcgtctgagctattgtggagctttcttggtctttctgctgagtcttatctcctttgatctattctgtgtacttccccaagtggtcctgagatgcaaattg

SEQ ID NO: 25751 - DNA, 201 bp, Homo sapiens
tccctcatgatcaggctcctacctgcctgtacccccaacaagccgtaggtggcccccgtgaccagtcctgcctgtaacctgtttgtgtctccagattacaytgacaaccatcggctatggtgacaagacaccgcacacatggctgggcagggtcctggctgctggcttcgccttactgggcatctctttctttgccctgcc

SEQ ID NO: 25752 - DNA, 201 bp, Homo sapiens
gttctggaacacagaaggcacccttctggctcagatgtgttggatttgtttttccctctggaggtgggatgggggttaagggagcatgaggtgggggctcygacctaagcctgccagtctgagctcatgctcagacacagcatgagtaaaggtggggaggggaaaagagcgcgtttgccattgtcagggacagagctatga

SEQ ID NO: 25753 - DNA, 201 bp, Homo sapiens
gagaccaaagtcacctgggaaatgagtagcagatacagcggactctgtgcagagacctcagctgggctaggccagggcagagagttgaaattgctcctgcytccttgtccaggactgttcgctccgttcctagtggccaccgggcttggctcttggagtctgaaatgaaatctctggttgtgtgtgcagcaccaactatgc

SEQ ID NO: 25754 - DNA, 201 bp, Homo sapiens
atcttcaacttctccttcttgatctcttggctccttccactctggctctctcatcttaaaagaaaagaaaaagattccctataccctgcatccttctccarctacgatctctgatctcttctttgcagtcaaacatcttcaaattgttaaacctacacttactgtctctacctcctcactgcccctcccctttctcacttt

SEQ ID NO: 25755 - DNA, 201 bp, Homo sapiens
gcccagtgggtatgaagagagagacctcagctggatccagggacatccccagagaatctggagctgagctgatggccgatcctctccaccccactgctggrgagttaccaagctacagggaccttaaccatcactgagttgtccccgacctttgtgtgtgtttctgacagggaaattgaggcccagagcattagtagggcc

SEQ ID NO: 25756 - DNA, 201 bp, Homo sapiens
aactcattaagaacatgcatttagagggcttggcacagtgtctggccaataggaagcctttggccagcaggagcagttatggttattacttcaggtcaccrcatgagagccacctccccagcagagctttccccctcctgccctgtggccgcttctggacagtgacttgaggaggtataaatgtggagaaggcggtgattg

SEQ ID NO: 25757 - DNA, 201 bp, Homo sapiens
gcgaggtcagaggggctgtctccgtgctgggaaggggtgtggcctgcgggggttggagccctagcaggaggcgaggtctaagggggtggggcggagtggaktctgaattaggtaggggcgggcctaggagtccggaccggatcagggggcggggccggagaggcggggcttgagggtttcccctggatgcttctgggtttg

SEQ ID NO: 25758 - DNA, 201 bp, Homo sapiens
ggctgcactggagtgagaggtaggaggtgaggtcagagggctaacggcactcagagagtgtaaagtcctgtaggcccctgcaaagacgttggtgttcatcyaggatgagctgcaagcattggagggttttgtgcaaacgactgacaagatctgaattgtcttttaaaaggatcaccctgggtgctgtgttgaggatggact

SEQ ID NO: 25759 - DNA, 201 bp, Homo sapiens
agctgacagccagcaaccccttttgtcaccaggtcagagttagggagtctgagacagctgggacagggagggcctgttgaggagcagaaaaatccgatcakttcatggggaccggaaggggaggacacactagggcttttagtcttcttgcaggaggcggagggggccacctgccctccggaatcgtcaagtccaggaaac

SEQ ID NO: 25760 - DNA, 201 bp, Homo sapiens
gtgggggtggtcagatggtctaggacctctgcccagaggaacagagcctagtctggagattctggatccactgggcatctgctccctggaccttagtttgstcatccatacaatgggaaggcaggcaggagagagggaagataccctccttggctcatggcagcagaaaatggcctggagagttaggaagaagccacggtc

SEQ ID NO: 25761 - DNA, 201 bp, Homo sapiens
gtcagatggtctaggacctctgcccagaggaacagagcctagtctggagattctggatccactgggcatctgctccctggaccttagtttgctcatccatrcaatgggaaggcaggcaggagagagggaagataccctccttggctcatggcagcagaaaatggcctggagagttaggaagaagccacggtcccgaatcta

SEQ ID NO: 25762 - DNA, 201 bp, Homo sapiens
gcgcgttccctccctccgcctcgcctcgcttgctcgctcgctccctcccgatttgggaaggcggccgcggggcgggcgggggaggggcggggcgggggagkgtgacatgtgagcggcgcgcgccggtggcaggtggaaaggcgagcggcatggagcgcgtaataagagagttggagtcggaaagagcagccccagtcgccg

SEQ ID NO: 25763 - DNA, 201 bp, Homo sapiens
ggcgcagtgatgtggagttccaggcccttggccaaagtgtcagggccttctccactctcctctcttcctctccctcttggaggagtggaggacaggagaargggttgcacggaccgggcagggtggagggtgcttgccagcatgagggagcctgcaggaatggctctgcagaggaaagtttgggagagccaacctcaaact

SEQ ID NO: 25764 - DNA, 201 bp, Homo sapiens
gcagcagaaaatggcctggagagttaggaagaagccacggtcccgaatctagtcttcaaaaacccagtggcaagagtgagtgctggaggggaaggaagctrggctagccaccctgtcacaccgccctcctcacctccatctccccttaaaatccagagtcagatctggagggaaaggatgtcagggccactgctggcctct

SEQ ID NO: 25765 - DNA, 201 bp, Homo sapiens
acctgctcacccctgtcacacatttgcctggggagcctggggtacctcagaggggcaaggatggggacacccttgcagcctcttactgccccaccactgcyagcacattcccccaaccatgccctatccctctagggcatcctaggctccggctttgccctgaaggtccaggagcagcaccggcagaagcacttcgagaag

SEQ ID NO: 25766 - DNA, 201 bp, Homo sapiens
gcaccttggctccctcccctccaccccatgccctgggcatgggagaccccagttcccacccaataccgaaaccagaatctcttctctgctcaacccttgayctgaaagcctctgagagtaggtgacacggtgtcctcccccaactcctgccccacttcaggtctcctctaaggctggctggtactctcttgatctggggcc

SEQ ID NO: 25767 - DNA, 201 bp, Homo sapiens
gcctggtacatcgggttcctggtgctcatcttcgcctccttcctggtctacctggctgagaaggacgccaactccgacttctcctcctacgccgactcgcwctggtgggggacggtgcgtgagggtctttgtagggctgcccttctccctgggatcctccctgggaacttcccgaggtctgcccatcgtgactcctgactc

SEQ ID NO: 25768 - DNA, 201 bp, Homo sapiens
agttaggaagaagccacggtcccgaatctagtcttcaaaaacccagtggcaagagtgagtgctggaggggaaggaagctgggctagccaccctgtcacacygccctcctcacctccatctccccttaaaatccagagtcagatctggagggaaaggatgtcagggccactgctggcctctctgaggaggcacggcacgttc

SEQ ID NO: 25769 - DNA, 201 bp, Homo sapiens
tacatcgggttcctggtgctcatcttcgcctccttcctggtctacctggctgagaaggacgccaactccgacttctcctcctacgccgactcgctctggtsggggacggtgcgtgagggtctttgtagggctgcccttctccctgggatcctccctgggaacttcccgaggtctgcccatcgtgactcctgactcagggtt

SEQ ID NO: 25770 - DNA, 201 bp, Homo sapiens
ctccagggcggccctcattcctacccctgcccagctgactgtgggtgtgtgggggtccctgtgggccccctgggccctgacactcgcatatgctgtgtccsacttgatctgtgtcttcgctcagtcttcccctccaccctcaacttcccagtggcaacggcggccgccctgcctgccctgccctaccctgccggcttggcc

SEQ ID NO: 25771 - DNA, 201 bp, Homo sapiens
tggggctctgagggtctgagtgggagagatgtccatgccatcctttcccatcatctcctccgttcatggcattgtcctctttctttctctgttcccacgtyccccttactcctccatccctgcacccccatccctcccgggaagctggacagaggaggaggccactggccacaggtgcttacggctcaggtaatcgtgggc

SEQ ID NO: 25772 - DNA, 201 bp, Homo sapiens
ccctcatgatcaggctcctacctgcctgtacccccaacaagccgtaggtggcccccgtgaccagtcctgcctgtaacctgtttgtgtctccagattacatygacaaccatcggctatggtgacaagacaccgcacacatggctgggcagggtcctggctgctggcttcgccttactgggcatctctttctttgccctgcct

SEQ ID NO: 25773 - DNA, 201 bp, Homo sapiens
tttcctgatgccaggaaatgccctcgccagggccgtgcttgtcctgaccacttgtccccgggagcccagggccagggcatgtcttgggaactctgggggargaagtatggtgtgaaagtgtcctggtgtttaaggatctcagggaattggtcacccatcttagaggtcaaaggggacagaggtgtcaggaaccccacctct

SEQ ID NO: 25774 - DNA, 201 bp, Homo sapiens
ctcttggacacagagttactctaccagatcatggttaaccagggcttgtcctggggaatgaggcctctgctaacttgttttcctccaacgtttggggaacrtggtggggagttggatgcgggaagggaagtctgagtgcatgtgtagacgtgcacgtacacgttcacatgcacacagactgtgtaaatgctgttgaaccgg

SEQ ID NO: 25775 - DNA, 201 bp, Homo sapiens
aggctcctacctgcctgtacccccaacaagccgtaggtggcccccgtgaccagtcctgcctgtaacctgtttgtgtctccagattacattgacaaccatcdgctatggtgacaagacaccgcacacatggctgggcagggtcctggctgctggcttcgccttactgggcatctctttctttgccctgcctgccgtgagttg

SEQ ID NO: 25776 - DNA, 201 bp, Homo sapiens
aggggcaaggatggggacacccttgcagcctcttactgccccaccactgccagcacattcccccaaccatgccctatccctctagggcatcctaggctccrgctttgccctgaaggtccaggagcagcaccggcagaagcacttcgagaagcggaggatgccggcagccaacctcatccaggtacaagatgcccgggaaga

SEQ ID NO: 25777 - DNA, 201 bp, Homo sapiens
gggaacagtgggtcacacctgtagtcccagcactttgggaggctgagacgggcagatcgcttgagtccaggagttcgagaccagcctgggcagcatagtgrgacccccatctctttaaaaaataaaaattaaaaaaaaaaaaaacagagttattgatgtgcctgccccacaatgtcccattgcccagtctctgccagagat

SEQ ID NO: 25778 - DNA, 201 bp, Homo sapiens
cacccaggctggaaggcagtggtgtgatcatggttcactgcagccttgaactcctgggctcaagcgatcctcctgcctcagcctttcatgtagctgagacygcaggtgcacgtcacggcgctaggctaatttttaaattttttgtagagaggggatcttgttatgttgcccaggctggtttcgaattcctgtgctcaagca

SEQ ID NO: 25779 - DNA, 201 bp, Homo sapiens
tagttgtctccaatgatgataaataacagtgaaaacctttctgcagagcttcccaggggctggcctgggcttaggcaccctctggatggtcttgggcagaygtttttcacatctcgagccttagctcgaggtccaaaatactacctgtactgggaaggaggtcctctctcccactgacagtccacaaagccgttttaggca

SEQ ID NO: 25780 - DNA, 201 bp, Homo sapiens
ctctctcccaacctgcctgccctgccagcagccggatgggcatcaaagaccgcatccgcatgggcagctcccagcggcggacgggtccttccaagcagcakctggcacctccaacaatgcccacctccccaagcagcgagcaggtgggtgaggccaccagccccaccaaggtgcaaaagagctggagcttcaatgaccgca

SEQ ID NO: 25781 - DNA, 201 bp, Homo sapiens
tcattcactcaacatttattgagaacctacaatgcaccaggccctgcactaggttttggagagaaagtaggaacaagatcaagtacctgcattcatggagyttacattgaggggggcgggagaaccaggaactgtatctatccccggtgtctaccatctggcacctgtgcctgggctggatgcctgggaacagggactctt

SEQ ID NO: 25782 - DNA, 201 bp, Homo sapiens
gaatccctgctctaacaggacactccctctgagccccctcccccaacaggattctcaagttcctggtggccaaaaggaaattcaaggagacactgcgaccrtacgacgtgaaggacgtcattgagcagtactcagcaggccacctggacatgctgggccggatcaagagcctgcaaactcggtgggtgcaccgggcctgtt

SEQ ID NO: 25783 - DNA, 201 bp, Homo sapiens
tctcaagcaagctgctgctctctggcccaaaagggactgggcctggcacacagatggcactcagcaaatggaagcactcgccctcccacccttcctctcartcaatacttgctccattgatggctgatggggacagtgatgaattacagaagatcttggagccctgcccacttcttgcacagatggggaaacaagtccagg

SEQ ID NO: 25784 - DNA, 201 bp, Homo sapiens
caaactgtttcaagtcatagatctggttctttgaatgacacctgatacagaagcacaatatataaaacagatcaaagtagggctactctgggtggagtcaygggttggggcccagaattctacccactctatgccagcctatatggccctggcatatcaacccagagcctgtacatggtcctccttgctctagaacacatt

SEQ ID NO: 25785 - DNA, 201 bp, Homo sapiens
gtccctgtggaagctggagggatccttcctactccacaccagctcctccctggctctggatcccagcctcccatcttccttggggacttcattccattgaytactcactctgtctccccgcatcttcaacttctccttcttgatctcttggctccttccactctggctctctcatcttaaaagaaaagaaaaagattccct

SEQ ID NO: 25786 - DNA, 201 bp, Homo sapiens
gttgtgtgtgcagcaccaactatgcacagggcaccctgctgagctctctctaaaccggtctcattgtgtccttctgcagccttgtgaggtgggcactgttmtcctcctcatttgacagatggggaaactgggactcagcagaggccacccagttaatgtggaagagcctcagcccggagcgggggctgactgggagctgtt

SEQ ID NO: 25787 - DNA, 201 bp, Homo sapiens
gcaagctctgggaagagaggactgctgactcctgtcttctcctgttgggatccagaatgaggggccactgagcccctctccaagctttccctctctctgtrgaccctcagtctgatcaccaagctgcatccccctcctatgccccagtccctgatttaagccctgaagccttcacaggccctgctctctgaattttaagaa

SEQ ID NO: 25788 - DNA, 201 bp, Homo sapiens
aactgatgttgaacttctggcctccagaactgtgagagaataaatttctgttgttttaagcaaccaattttacagtaatttgttatggtaaccacaggaarctaatacggcggattatttggtgtcatagtgagagaagccactctcaccagctcccttggattcctggaaccttatatcctggctatgtcaatgaggata

SEQ ID NO: 25789 - DNA, 201 bp, Homo sapiens
gactgaggggggctgtgtgaggtagcacctctgggctgggagtccgggactgaggggggctgtgtgaggtagcacctctgggctgggagtccgggactgargggggctgtgtgaggtagcacctctgggctgggagtccgggactgaggggggccgtgtgaggtggcacctctgggctgagggctgaaggtggaaagaggc

SEQ ID NO: 25790 - DNA, 201 bp, Homo sapiens
ggggtgagaggagcgcattcgccctagggtatgcctccctcccatctgccagcccgtcccctctgagccccacacagaacctgcatctttctggctccaaraggtgggagattgcctagagtacaagcccagatttggcctgtcctgcggcagctgcaagctctgggaagagaggactgctgactcctgtcttctcctgtt

SEQ ID NO: 25791 - DNA, 201 bp, Homo sapiens
ccttcgctactgcccgtcttggcccagctgccaccctctactggagggaccagcccctgggcacagtggggattcagaccctatggaacttcctcgcttasaggcaggaccagcaggaagggactaggcctttctacccccatcctctctccatatatccctgctatacagaacctcaggtctcagcgctggagcagatcc

SEQ ID NO: 25792 - DNA, 201 bp, Homo sapiens
cacataattttctgaaaataatgttctcctctcttggctctgtaaccccctgccaggggcaccttggctgtcctgtccctccaacaatctaaccctctccytcatgttgtaattgcagatttttgctggtcttcagctgcctggtgctgtctgtgctgtccactatccaggagcaccaggaacttgccaacgagtgtctcc

SEQ ID NO: 25793 - DNA, 201 bp, Homo sapiens
gggaacagcaagtgccaaggacttgagaggggcaagtggctggagtgttggcttcagcacagcagggagcctggtgtggctgcactggagtgagaggtagraggtgaggtcagagggctaacggcactcagagagtgtaaagtcctgtaggcccctgcaaagacgttggtgttcatccaggatgagctgcaagcattggag

SEQ ID NO: 25794 - DNA, 201 bp, Homo sapiens
ctcctcaccgcgcccctccgcctgccccgcaggagctgatcaccgcctggtacatcgggttcctggtgctcatcttcgcctccttcctggtctacctggcygagaaggacgccaactccgacttctcctcctacgccgactcgctctggtgggggacggtgcgtgagggtctttgtagggctgcccttctccctgggatcc

SEQ ID NO: 25795 - DNA, 201 bp, Homo sapiens
ttggggtgcagagcaggagtgtttggggctcatcctgggccaccccttcctggaaaaatttggctacaagtcagggaggcaaatgtgtgggccatgccccycccctcgctaggcagtaaacactgccgtcgcctgggagacaagaaaacatcttggtccccccacggttgtttataccaggactccctctccttctctggc

SEQ ID NO: 25796 - DNA, 201 bp, Homo sapiens
ggacacagggtgatggtagtaaagtggccctttctcccagggaccccagggggctgagccatggtttgtagatcagtcaccaggctcaggcccaatggccrtatcgttaatcgtggctgtctagaccgccagccaggacacccttcctccaccaaaaacacacacacatatacacactcggttggccacacctctggtggt

SEQ ID NO: 25797 - DNA, 201 bp, Homo sapiens
tgagccagggctctctgtgcttccagttcactctggtctcattttgactgaataggaaggcaaggggaatggacattagcctggggcctagtacctgtacrctccccacggctcctttggtccctgacacccccagggcccaggaacagattactactaagggcttggctgtcactgactcccagcctcgtatctatctgc

SEQ ID NO: 25798 - DNA, 201 bp, Homo sapiens
cccactgctgcccccatcagctgtgcagcagtaagcctgccccacttccagcaccttcattcattcattcattccacaagcactcacacaaatgaagagargatggtgcagacagggcttttaggaatctcaacatttagcaggtgggtgggcctgcaaagttgagctgggcaaggagacagaaggaacagccagaggggt

SEQ ID NO: 25799 - DNA, 201 bp, Homo sapiens
aacagggcagggactaaactcaggtcagcagtagagcccagaccagaacccaggctcagtccaagcatcttagttgtctccaatgatgataaataacagtraaaacctttctgcagagcttcccaggggctggcctgggcttaggcaccctctggatggtcttgggcagacgtttttcacatctcgagccttagctcgagg

SEQ ID NO: 25800 - DNA, 201 bp, Homo sapiens
cacgttcaggcagtcagcttgatgggctgagagtaagctccttgcacggctgcccttgagctgtgccagccttcacatccatgcttggcatccctgggaaytgggggtagaaagggagtggggaaggccagtctcccactgtccaccctgtcctattctggccgggctgtcagtgaacacctctagagcagcaggacctgg

SEQ ID NO: 25801 - DNA, 201 bp, Homo sapiens
ggtatgttcagcagttaagatcttatttaccttaaaagaaaatagcttagaaaccatggctgtgggcaatggtttgagctgaagcgttgagctaaggagtytctgggtcaggcccgccattttgcaagcctcctttggctgtggagggtgtggacaggaaggacacagccatggcagaggccagtggcgaggctgtttcca

SEQ ID NO: 25802 - DNA, 201 bp, Homo sapiens; identical to SEQ ID NO: 5234

SEQ ID NO: 25803 - DNA, 201 bp, Homo sapiens
ggaccacaatctagctactacccactattcgtgtgtccttgggcaaatcacctgacccctttgcacctcagtttcctcagatgtaaaatgcagatgtaaayagggtctgcttccactaaaactggacctggctccaataaatattggccttatttgatttggtatgttcagcagttaagatcttatttaccttaaaagaaa

SEQ ID NO: 25804 - DNA, 201 bp, Homo sapiens
agcctgaggccagacccagcacccgtcccaaggctgagaaacaacccaaccatagtttctctgtgaggtgggtcctctgtgcaagccctattgactcataygccttgggggctttgtttagaatgactgtttcctggtcctaaaataatcagcctaaaataatcactgacctcccatctcccaagagaataggcaaattgt

SEQ ID NO: 25805 - DNA, 201 bp, Homo sapiens
gccctttctcccagggaccccagggggctgagccatggtttgtagatcagtcaccaggctcaggcccaatggccatatcgttaatcgtggctgtctagacygccagccaggacacccttcctccaccaaaaacacacacacatatacacactcggttggccacacctctggtggtgcttggggatggacctgggccaagtg

SEQ ID NO: 25806 - DNA, 201 bp, Homo sapiens
gggggatggcattgccagggccagcacctctcctcttcagggttttgcaatgagtttatcaaaccatggtctccagacctcctgcatcagcatcccatggrgtgtttgttcaaaatgcagatacctggacctgtctccaagcccacaggatcagaatctctggagaagagacacagccttctgcatatgtaacatggtccc

SEQ ID NO: 25807 - DNA, 201 bp, Homo sapiens
cctgccgcccgcggccacaactccacattccactttccacaagcacacacgaggcgtcccaccccgggctggccttcggggccacactgccccacgcagckgtggacaccacttgcacgcgtccggcttcccggccccgcgcgctgcccccgccacgcggttcggcccaggcaccaactcggccgcccgtgcgccctgccc

SEQ ID NO: 25808 - DNA, 201 bp, Homo sapiens
gtggggaagagacttgcccaggtgggagtgagtcttagtgaatgcgtctcctcagtggggcagggaagctttcgcagtgttaccagggtggagacagggcytgggggtggaaaggaaactgctgagggtggggtcaggggaacaggtgggagagggaaggaggagggtagggaaccacggtgtccagtcccctccagcaga

SEQ ID NO: 25809 - DNA, 201 bp, Homo sapiens
agcacccccaagggctcactgctgcagctgagtttctagactgaggaggtccctggcttgcagtgccagcctgaggccagacccagcacccgtcccaaggmtgagaaacaacccaaccatagtttctctgtgaggtgggtcctctgtgcaagccctattgactcatatgccttgggggctttgtttagaatgactgtttcc

SEQ ID NO: 25810 - DNA, 201 bp, Homo sapiens
tttcttccctggctgatacacctgcccacaagcctcttttcttgtattccttttaaaattagagtcaggctgggcgtggtggctcatgcctgtaatcccamcactttgggaggctgaggcaagagaatcacttgaggtcagaagttcgagaccagcctgggcagcatagtgaaatcttgtctttgcaaaaaaaaaaaaaaa

SEQ ID NO: 25811 - DNA, 201 bp, Homo sapiens
agaaggttctgagccctttctgggcctctgtcttcctattggacactctactggtggtttggcatacaagggtcggatgggaggttgggagtggccccttyggtgggccacttgccccatacctgccttttcagatgccccctcagaggaagtagcagaggagaagagctaccagtgtgagctcacggtggacgacatcat

SEQ ID NO: 25812 - DNA, 201 bp, Homo sapiens
tggactaggccagctgtgccctaaagcagctcccacctacccaccaggcagatgtttaccctgactggccaccggggcagatgggcatgcaacacactggrgctttccaccctggggagggcagtgagacacaggagcccccaagaaggttctgagccctttctgggcctctgtcttcctattggacactctactggtggt

SEQ ID NO: 25813 - DNA, 201 bp, Homo sapiens; identical to SEQ ID NO: 5232

SEQ ID NO: 25814 - DNA, 201 bp, Homo sapiens
taagatcttatttaccttaaaagaaaatagcttagaaaccatggctgtgggcaatggtttgagctgaagcgttgagctaaggagtctctgggtcaggcccrccattttgcaagcctcctttggctgtggagggtgtggacaggaaggacacagccatggcagaggccagtggcgaggctgtttccatagtccctgaagagg

SEQ ID NO: 25815 - DNA, 201 bp, Homo sapiens
cataattttctgaaaataatgttctcctctcttggctctgtaaccccctgccaggggcaccttggctgtcctgtccctccaacaatctaaccctctccctyatgttgtaattgcagatttttgctggtcttcagctgcctggtgctgtctgtgctgtccactatccaggagcaccaggaacttgccaacgagtgtctcctc

SEQ ID NO: 25816 - DNA, 201 bp, Homo sapiens; identical to SEQ ID NO: 5240

SEQ ID NO: 25817 - DNA, 201 bp, Homo sapiens
gccctcctttttaagttggaggctgagtttggtgaggtgtgtttttaaaagaccattagtctgttccattctacctttcctgaagattgaggatggtaagsggtatgaaggttccactgaataccaagagcctgagaaactgcttgggtgatttgactaataaaggccagtccgttattggaccgtatagaggtgggaagg

SEQ ID NO: 25818 - DNA, 201 bp, Homo sapiens
aaatcttgttcccacaattccaaaatctataaaagctctggaaaccaaaaggtttcttgggactcatttgttgacaaaacctgacctgtctcaccctgaayttgtcagcaaaactccccttggccgatgggaggctcactgtggggttatttatcacggttactgtgaattagtcacatttcaccacagacatcatgctga

SEQ ID NO: 25819 - DNA, 201 bp, Homo sapiens
aggatagagagctcggaagtgaaccctttatgatccatttgattttatgatccattgatttttttttttttttttttggagacagagtctcactctgtctyccaggctggagtgcagtggcacaatcttgactcattgcaacctccgccaccccagttcaagcgattctcgtgacttagcctcctagtagctgcaactgca

SEQ ID NO: 25820 - DNA, 201 bp, Homo sapiens
agtatatggaattttaaatggtatgttttgtaggcacactacatatttcctaagactacttcagattattttttacaggggaacttagattttcacacatygttaaataaaaatagattatttttatttcaaaaaagaggatatgtaccatcagtaaccgtatttgcctatttccttgattgtacagggagaagataccca

SEQ ID NO: 25821 - DNA, 201 bp, Homo sapiens
gctgttgaattttcccacaaagtttcaagtttggaggctcctcaagaaacttgtcaaaattacttaatgaggttttaaactgtacaaattagtggtcagggccagggcctgtattttggtccatttcttttgcagaagcttcttggagatgcaccaaagaatctttattgcctggttttaggatttaatggaatttaatta

SEQ ID NO: 25822 - DNA, 201 bp, Homo sapiens
tagagagctcggaagtgaaccctttatgatccatttgattttatgatccattgatttttttttttttttttttggagacagagtctcactctgtctcccargctggagtgcagtggcacaatcttgactcattgcaacctccgccaccccagttcaagcgattctcgtgacttagcctcctagtagctgcaactgcaggca

SEQ ID NO: 25823 - DNA, 201 bp, Homo sapiens
gctgaggctgtcagaccatgctacttgtgtgacgattgctcagtgctgttcccactgaaaccatagcacatgcgctctgaatgttcacagagctgacgcaygtgctaattgccccgatttcatccttacacattgtatgtatggatcaaaataacactctctgggtcccattagtaggtacaattactacatttccactaa

SEQ ID NO: 25824 - DNA, 201 bp, Homo sapiens
gggttgacgagtgactcctaacattttcataatcagtgtaggctgaaggacagcgtcctggaaggcctccgaggccggctgaggctgtcagaccatgctasttgtgtgacgattgctcagtgctgttcccactgaaaccatagcacatgcgctctgaatgttcacagagctgacgcacgtgctaattgccccgatttcatc

SEQ ID NO: 25825 - DNA, 201 bp, Homo sapiens
cgtcttaatgatatttgtgtctacagtgcatggcacagtgtgtggtatatagctggtgctaagaagtctttattattattattgttagtttttttttttttgagacagagttttgctctgttgcccaggcttcagtacagtggcgtgatctcggctcactgcaacctccgcctcccaggttcagacagttcttctgtctca

SEQ ID NO: 25826 - DNA, 201 bp, Homo sapiens
ccaaggcacagccagcccaggtgctgagtacagggcagctgcaggggactgtgccagccacgctaaacggcctctcctgtgaaagaagacatgtggactgwgactgaaagcagttgaactgcttcttgaactgtgatctgtccccctttaaagtggacatctccacataaacaggaaagcctagtggaacactgggttgac

SEQ ID NO: 25827 - DNA, 201 bp, Homo sapiens
ttataatgaagaaaatttaaatcaccttcagtcccactcagatacattaaaaaaattacatatttatattcagtctttttcttttttttcttttcttttcyttttttttttttttttttttttttgtgatggagtttcgctcttgttgcccaggctggagtgcaatggtgctatgatcttggctcaccgcaacctccgcct

SEQ ID NO: 25828 - DNA, 201 bp, Homo sapiens
aaatatgttgtattgtagcttgtaggatgatgcatctatgaagatgcttgaacatagttttttttttgtaatagatcttgctattttttttttttttttttgagacgtactctcagtctgttgcccaggctggagtgcagtggcgtgattttggctcactgtactctccaccttctgggttcaagcgattctcctgcctca

SEQ ID NO: 25829 - DNA, 201 bp, Homo sapiens
ggggtttgggataggacctgagcaagccaatctgcgggtgtgccatgaaggcaagagtggtgtgggagcctggggaagggatggcgaaggccctttgcccrccactgtctctggatgaatgtctctgaattctttggcgtgagttagtaattggggtgaatagagcatggctacccgccagcgatcctagtttgtgtattt

SEQ ID NO: 25830 - DNA, 201 bp, Homo sapiens
gtggtgtgatttcagctcactgcaacctctgcctcctgggttcaaggtattctcccacctcagcctcccaagtagatgggactacaagtgtctgccaccaygcctgggtaatttttgtatttttagtagagacagggtttcaccatattggccaggcttgtctcgatctcctgaccttgtgatccacctgcctcagcctcc

SEQ ID NO: 25831 - DNA, 201 bp, Homo sapiens
caggaggctaaggtgggaggatcacctgagcctggaaggttgaggcttcagtgagacatgattgcaccattgcactccagcctggatgacagtgaggcttwgtctcaaaaacaaaaaaaaaaaggaggggtgggtcttttcttggaactttgaaatgctcattttcagatagtgtatctataaactgaagactaaatctta

SEQ ID NO: 25832 - DNA, 201 bp, Homo sapiens
ctcctaaagtgcagggattacaggcgtgagccaccgcgcctggccccaagcctgccttatttctttgtggcctcgctcatatgcctctgggtctcaatttrtaggagcttccttgaagctttctgaaacaaatgcccagagattgtaacagccttcctgtgatctctgccgcaaagatgagccatttgttcaatggagaag

SEQ ID NO: 25833 - DNA, 201 bp, Homo sapiens
tttcatggaatcaaaaaaggtacctcaaataatccttttcatctccttctgtgagcatcaatttttgtttttattttatttgtttatttatttgttattgktattattatttttgagacggagtcttgcagtgtggaccaggctggagtgcagtgacgtaatcttggctcactgtgagctccgcctcctgggttcatgcca

SEQ ID NO: 25834 - DNA, 201 bp, Homo sapiens
ggtttcaccatgttggccaggctggtctggaactcctgacctcaggtgatccacctgccttggcctcccaaagtgctgggattacaggcatgagcgaccaygcctggcctcagccatattgattttaaactatacctatactactactgggtactcttcaaataaccaaacaaatgttgaactttccaatatatgttaaaa

SEQ ID NO: 25835 - DNA, 201 bp, Homo sapiens
atatacatataaatatatggttgttccttacccaaaatcaaatgggattacattaaatatgttgtattgtagcttgtaggatgatgcatctatgaagatgyttgaacatagttttttttttgtaatagatcttgctattttttttttttttttttgagacgtactctcagtctgttgcccaggctggagtgcagtggcgtg

SEQ ID NO: 25836 - DNA, 201 bp, Homo sapiens
cagggtgctgattggtgcgtttacaatccctgagctagacacaaaagttctccaagtccccgtgagatcagctagacacagagcactgattggtgcatttrcaaaccttgagctagatacagggtgctgattggtgtgtttacaaactttgagctagatacagagtgctgattggtgtatttacaaaccgtgagctagata

SEQ ID NO: 25837 - DNA, 201 bp, Homo sapiens
ttgtgatccacctgcctcagcctcccaaagtgctgggattacaggtgtgagccattttattttacttatttattattattatttttttagagatgagggtytcaccatgttgcctagactggtctcaaaatcctgggatctggtggtcctcctgtctcggcctcccaatatgttggaattacagctgtgcctggccacttt

SEQ ID NO: 25838 - DNA, 201 bp, Homo sapiens
tacttttagtagagatggggtttcaccgtgttagccaggatggtcttgatctcctgacctcgtgatctgcccaccttggcctcccaaagtgctggtattasaggcgtgagtcaccgtgcccagcctatttattattattttttgagacagagtctcgctgtgttgcccaggctggagtgcagtggtgtgatttcagctcac

SEQ ID NO: 25839 - DNA, 201 bp, Homo sapiens
ggcatgtgcctcctcgcccagctaatttttttttttttttggtggagatggggttttgctgtgttgcccagcccaggctttttttttttttttttttttttgagatagagttttgccctgttgcctaggctggagtccaatggcgcgatctcggctcactgcaacctccacctcccgggttcaagtgattcttctgcctca

SEQ ID NO: 25840 - DNA, 201 bp, Homo sapiens
gactacaggcgcccgccaccacaccctgctaatttttttatacttttagtagagatggggtttcaccgtgttagccaggatggtcttgatctcctgacctmgtgatctgcccaccttggcctcccaaagtgctggtattacaggcgtgagtcaccgtgcccagcctatttattattattttttgagacagagtctcgctgt

SEQ ID NO: 25841 - DNA, 201 bp, Homo sapiens
cctccatctcctgggctcaggcaatcctcccacctcagcctcctgagtagttaggaccacaggcatgtgcctcctcgcccagctaatttttttttttttttggtggagatggggttttgctgtgttgcccagcccaggctttttttttttttttttttttttgagatagagttttgccctgttgcctaggctggagtccaa

SEQ ID NO: 25842 - DNA, 201 bp, Homo sapiens
atttaataaatgccatcaacataactgactgcacctggaagaaaataattgaaagcaccattttcacaccgcagacaaaaatgaaccctattcagacggcsgttcaaaccttctagagggaaatgtggcagaggcaggatttgagctcaggtccgtctcactcccaagccactaaactacctgtgtttaaaccgtacaatt

SEQ ID NO: 25843 - DNA, 201 bp, Homo sapiens
ccggggccagcagcaccagctggccgcacctagtgcggggcccgctgagcccacacccacccagaactcatgctggcccgcaagcaccacgtgcagccccrgttcccgcctgcacctctccctccacacctcgcggtgcctcttcctccacacctccccgcaagctgagggagccggctctggccccggccagcccaggga

SEQ ID NO: 25844 - DNA, 201 bp, Homo sapiens
ccaggcgtggtggtgggcacctgtagtcccagctactcgggaggctgaggcaggagaatggcgtggacctgggaggcagagcttgcagtgagctgagatcrggccactgtactgcagcctgggcaacaaagcaagagactccgtctcaaaaaaaaagaaaataaatatgtatatatgcgtatatatatataaaatttacat

SEQ ID NO: 25845 - DNA, 201 bp, Homo sapiens
cactgacttcaagaactaaacctcagaccctcacggtgagtgttacagttcttaaaagcagtgtgtctggagtttgttccttctgaagttcagatgtgttsagagtttcttccttctggtgggttcgtggtctcactggcttcaggagtgaagctgcagaccttcgcggtgagtgttatcgctctgaaggcggcgcatctg

SEQ ID NO: 25846 - DNA, 201 bp, Homo sapiens
ccactgcgtccggcccagagagaatttttaaaagtatctgttgtaattacaatgaggtttaaactgtctttttttttttccgccatggaaagagtcaagtwatttgtctttcttaaatgctggtgtgtccgcagttggtgggttcttggtctcactgacttcaagaactaaacctcagaccctcacggtgagtgttacagt

SEQ ID NO: 25847 - DNA, 201 bp, Homo sapiens
ctactgcactccagcctgggcaacagagcaaaaaaaaaaaaaaaagtatatgtgtgtatacatataaaatttacatttatggggcgggtgcagtggctcaygcctgtaatcccagcacttcgggacgccgaggttggctgatcacttgaggtcaggagttcgagaccagcctggccaatgtggtgaaaccccatctcaacc

SEQ ID NO: 25848 - DNA, 201 bp, Homo sapiens
aaattagccgggcgtggtggcgggcgcctgtagtcccagctactcgggaggctgaggcgggagaatggcgtgaacccgggaggcggagcttgcagtgagcygagattgcgccactgcactccagcctggacaacagagggagactccatctcaaaaaaaaaaaaaaaaaaaaaatctcaggtaaacagtgtgattagctag

SEQ ID NO: 25849 - DNA, 201 bp, Homo sapiens
agctggtttcaaccaagtaagaaaaatctcaggtaaggccgggcgcagtggctcacgcctgtaatcccagcactttgggaggccaaggcaggcggatcacraggtcaggagatcgagaccatcctggctaacatggtgaaaccccatctctactaaaaatacaaaaattagccgggcgtggtggcgggcgcctgtagtccc

SEQ ID NO: 25850 - DNA, 201 bp, Homo sapiens
atcaaaaaattacccaggtatggtggcacacacgtgtgattccagctactcgggaggctgagatgggaggatcacttgaacccaggaggttggggctacartgagctatgatcgcaccacttcattccagcctggatgacaggtaagactctgtcttaaacagaaaataattctagatttattttcaaaagtagttccttc

SEQ ID NO: 25851 - DNA, 201 bp, Homo sapiens
agggtttttggggatgctgggaaatttagagaggtcttttaactggattttgatggggtcgtggtgagtagctagggaaggggtggtggtgtcccaccctrttgggtttacaaaagaggtgggaagtgggtactggggagaggggtcaggggctggactcgcatagaggagtaggagggactccggttgagggagggagaa

SEQ ID NO: 25852 - DNA, 201 bp, Homo sapiens
aatatcaaaaaattacccaggtatggtggcacacacgtgtgattccagctactcgggaggctgagatgggaggatcacttgaacccaggaggttggggctwcaatgagctatgatcgcaccacttcattccagcctggatgacaggtaagactctgtcttaaacagaaaataattctagatttattttcaaaagtagttcc

SEQ ID NO: 25853 - DNA, 201 bp, Homo sapiens
actgaatgcagaaatggaatatttcacagagatgtaaaaccagaaaatatactaataaaggtaagagcttttacatgaaagctgggtatcagaataaaagytgaatagaaaatctttcccgaaaggttttctcctcctaccagaggaactttcagtccatgcggctagacagcctgtttgttacagtaatttttttccctc

SEQ ID NO: 25854 - DNA, 201 bp, Homo sapiens
acaaaatatcaaaaaattacccaggtatggtggcacacacgtgtgattccagctactcgggaggctgagatgggaggatcacttgaacccaggaggttggrgctacaatgagctatgatcgcaccacttcattccagcctggatgacaggtaagactctgtcttaaacagaaaataattctagatttattttcaaaagtag

SEQ ID NO: 25855 - DNA, 201 bp, Homo sapiens
gggagggactgggggagcttgaggagcttgaggggcctgtggggccgggcgtcgtcgccttctgccgtggctcgacaggcccgggaggctccgcatgtggrccccgaatccccctcggctgtgagaagccggtgcccctgggggaagcttgaggggttggggctaggttgggaactttggggtctcggagagccgactcga

SEQ ID NO: 25856 - DNA, 201 bp, Homo sapiens
ctctacaaaatatcaaaaaattacccaggtatggtggcacacacgtgtgattccagctactcgggaggctgagatgggaggatcacttgaacccaggaggytggggctacaatgagctatgatcgcaccacttcattccagcctggatgacaggtaagactctgtcttaaacagaaaataattctagatttattttcaaaa

SEQ ID NO: 25857 - DNA, 201 bp, Homo sapiens
ccccatctctacaaaatatcaaaaaattacccaggtatggtggcacacacgtgtgattccagctactcgggaggctgagatgggaggatcacttgaacccrggaggttggggctacaatgagctatgatcgcaccacttcattccagcctggatgacaggtaagactctgtcttaaacagaaaataattctagatttattt

SEQ ID NO: 25858 - DNA, 201 bp, Homo sapiens
tgcccagtggccttctttgccacacttaaaacaaggcccggagggttgctgctatcgggtcttttgtgcccttgggtgatacggctgggttgatggacagycgctgctagaagctggtatttagcacgatctctttgggctttatctaatttattttgctcatccctgttattaaagactttgaaagccaagttaaggagg

SEQ ID NO: 25859 - DNA, 201 bp, Homo sapiens; identical to SEQ ID NO: 5237

SEQ ID NO: 25860 - DNA, 201 bp, Homo sapiens
caagtaacatggggtgaaaaagacaaaacaattccataccaaccagttcaacccaaatgtacaggacaaactaagccaatttaacagaagataaacaagcrgtatattcaagatagttttaatattaacttttgtgaattagaaatatcactcttaaatgatgaaaattactagtgaagtaactattttccccaattgcag

SEQ ID NO: 25861 - DNA, 201 bp, Homo sapiens
agattccgagggtgatgatttcctacagatttggagaaaagggaaatcctgccagccacccttggacttcccgccctgcacttggcccttgcacctgcctrctcttggcaggaggcgtcagggtccccaggccgcttcagctgcgtgtggttccctgtgtccgtctgggccctgtgatgggggccagggctgagggcagag

SEQ ID NO: 25862 - DNA, 201 bp, Homo sapiens
cttattttgcagtctattttgtctaatattaatataaccatttcttcctcccctttactttgaggactttcttcatatagattgtattggttagataaacytattttccataaaattcatccaataaaatgaaatgttgaaatttcatagttgatctttaaataatttttttttttttttgagacggagtctcacactgtc

SEQ ID NO: 25863 - DNA, 201 bp, Homo sapiens
tgtgacacccttccttcacgtgctctccagtggtcctggccccagccccaggccacctgacacgacagcggggccgcaggagatggaccgcgggccacgcrgagggagggcaggctggaggaggaggcaagggcggggagcgtggggcagcgagtccgtgggcacaggtgcccactctgcaccacatgggggcaaaggaac

SEQ ID NO: 25864 - DNA, 201 bp, Homo sapiens
agtagagatggggtttcatcatgttggccaggctggtctcaaactcctgacctcaggttatccacccgtctcggcctcccaaagtgttgggattataggcrtgagccactgtgcccagcctgaagtataattttcctttcataaaattcagctattgtaagtgagtttcaggacatttatacggctgtgcaactgtcacca

SEQ ID NO: 25865 - DNA, 201 bp, Homo sapiens
gtcctctgaggctgtgtggctaaaagagcccttgctgggcaagctggcagcatgaccggacagacgactagtgtgtgttgttcatttgtagaagcgccaaygggttaaccagtttccaaacctgtaggcattttggaaatatatgtgaaacagccagaatatttgtaaacctgttccactgaatagacatcacttcctcat

SEQ ID NO: 25866 - DNA, 201 bp, Homo sapiens
cagtggctcacacctgtaatgccaacactttgggaggccgaggcgggcagatcacgagttcaggagatcaataccatcccagctaacacggtgaaaccccrgctctactaaaaatacaaaaaattagccaggcgtggtggtgggcacctgtagtcccagctactcgggaggctgaggcaggagaatggcgtggacctggga

SEQ ID NO: 25867 - DNA, 201 bp, Homo sapiens
tgggattacaggcgcgtgccaccatgcctggctaatttttgtatttttagtagagatggggttttgccatgttggccaggctgtcttgaactcctgacctyaggcaattcgccagacttggcctcccaaagcactaggattacaggcgtgagctaccatgcttggcctatacttttcttattatataaaagtctttgttag

SEQ ID NO: 25868 - DNA, 201 bp, Homo sapiens
ttttcgcctcatgattagcttcagcttaaatgtttttaccaggaatatgtgagaggcaacgttgtgtctctgtcagtgtggcccttccagagtgcctgatgtcagttcgttgcagttttgctgaagttagatttgatcatttggtttatttatctaccttctttttctcttagactctttttttttttggacagggtctct

SEQ ID NO: 25869 - DNA, 201 bp, Homo sapiens
aatgtctacttttatgtttgttaatatgtaaaataaactaccaagtattctttcaggatcttagatgggaaaaattttaacgtatgttctagctataagamccttgattttttaatgcagcaatgaggtatgcttaacttcagtttctaatgggagaaataaaacctgattaacttgcttgaaatatttgtgagttttaaa

SEQ ID NO: 25870 - DNA, 201 bp, Homo sapiens
tcctttttcttgtattgtggtggataacattcattcatttttgaataataactcaaccttgcattcccagtatagctgggattccccacttagtcataacwtatgatcagttttacatgttcctggatttgatagtattttgtcaagtatttttgtatttgtactcataagggatacttttttttttttcgtgatggagtc

SEQ ID NO: 25871 - DNA, 201 bp, Homo sapiens
attttcgcctcatgattagcttcagcttaaatgtttttaccaggaatatgtgagaggcaacgttgtgtctctgtcagtgtggcccttccagagtgcctgatgtcagttcgttgcagttttgctgaagttagatttgatcatttggtttatttatctaccttctttttctcttagactctttttttttttggacagggtctc

SEQ ID NO: 25872 - DNA, 201 bp, Homo sapiens
gattttcgcctcatgattagcttcagcttaaatgtttttaccaggaatatgtgagaggcaacgttgtgtctctgtcagtgtggcccttccagagtgcctgatgtcagttcgttgcagttttgctgaagttagatttgatcatttggtttatttatctaccttctttttctcttagactctttttttttttggacagggtct

SEQ ID NO: 25873 - DNA, 201 bp, Homo sapiens
gtttgtttatgcttcccacgatctccccttgtgcggtccagatggtttgtaattggtgaggtctgttggctctgccctaacactgaccacagtgccccttstgcccttccagtctgcagcccctctttcctggagtaaatgaactggaccaaatctcaaaaatccacgatgtcatcggcacacccgctcagaagatcctca

SEQ ID NO: 25874 - DNA, 201 bp, Homo sapiens
tttatggagttcttttgtggttattgttttttgttttctgtcttagaagaaatttttgtctacttctaggttgtgaatgtattctcctgtattttctcctraaaaccttatcattttaactttttacatttaggtctgtgatccatcttttttttttttttttttttgagatggagtctcgctctgtcacccaggctggac

SEQ ID NO: 25875 - DNA, 201 bp, Homo sapiens
ttttaaatgtttgaaataattcaccagtgaaattgtctggtctaggagttttccttgtggggaaggtccctcccacaatgatgtttattataacatcattygtagtgataaaaagatgggatcacgacgaagtggtggaacaaggaatgacctcaaggcacatctgtatcaaggaatattaaagaaaaaaaccagaactat

SEQ ID NO: 25876 - DNA, 201 bp, Homo sapiens
acttgggctgctataacaaattatactgtattctgtctggcttaaacagcagacatttatttcttacagttctggagggtgataagtacaagattaagatkctggcagacaggtctggtatctggcgagggcttgctttaggatttgcaggtggccctcttcttgctttgtcctcaaatgacagatagcagagagagagag

SEQ ID NO: 25877 - DNA, 201 bp, Homo sapiens
tctccccttgtgcggtccagatggtttgtaattggtgaggtctgttggctctgccctaacactgaccacagtgccccttctgcccttccagtctgcagccsctctttcctggagtaaatgaactggaccaaatctcaaaaatccacgatgtcatcggcacacccgctcagaagatcctcaccaagttcaaacagtaagtat

SEQ ID NO: 25878 - DNA, 201 bp, Homo sapiens
gtgtccttcctctacttgggctgctataacaaattatactgtattctgtctggcttaaacagcagacatttatttcttacagttctggagggtgataagtrcaagattaagatgctggcagacaggtctggtatctggcgagggcttgctttaggatttgcaggtggccctcttcttgctttgtcctcaaatgacagatag

SEQ ID NO: 25879 - DNA, 201 bp, Homo sapiens
gtattgaggccatgtggtgttacagtaaaagataagccttttagggcagatttctgaacggaggccaagagtatacagattgtgtaggaggcacccaaggsgggtagttttaggaggaatagactgagaggctcccatagtgaatggaagggaggggggtagaggaagaagagactgccggtgacgtcccctttcccgcgg

SEQ ID NO: 25880 - DNA, 201 bp, Homo sapiens
gatccatgccgtcagaatagatgccttccctcctctcatctgcccccatacctgggccagaagcatctttcccaagtgttcccatttaggcagagcctaaktcacatctggaacactcagctgcaaggcagcatgaagaatgtcatttggacgttcaggcctggcatgctagatgggggtttgggataggacctgagcaag

SEQ ID NO: 25881 - DNA, 201 bp, Homo sapiens
tattgggagggcctggtgtgcctgtttgcagaggagatggcggatgagggagagtgctgggaggtactctcctaattgagaatcagaaggaggcctgtttygtaagaggaaagggtctcagaaggaggcctgttttgtaagaggaaagggcatccatacattaattcaaatgggctgaggaaggagggtgcctttgggctg

SEQ ID NO: 25882 - DNA, 201 bp, Homo sapiens
taaggagaccccatctctacaaaatatcaaaaaattacccaggtatggtggcacacacgtgtgattccagctactcgggaggctgagatgggaggatcacktgaacccaggaggttggggctacaatgagctatgatcgcaccacttcattccagcctggatgacaggtaagactctgtcttaaacagaaaataattctag

SEQ ID NO: 25883 - DNA, 201 bp, Homo sapiens
tcttgagattttatctgttcctgtgtgatgtccccaacagtgtataactcctgcctcagttgggagatgtgcggcttgaaggagttggtaaataagggggyggttagtgatagggtcactttggcagtaaggaatctcctctcttgccagatggtggcgtgggaatgaagaatgtgatatacatctttggagtctgtgtaa

SEQ ID NO: 25884 - DNA, 201 bp, Homo sapiens
cataaggagaccccatctctacaaaatatcaaaaaattacccaggtatggtggcacacacgtgtgattccagctactcgggaggctgagatgggaggatcrcttgaacccaggaggttggggctacaatgagctatgatcgcaccacttcattccagcctggatgacaggtaagactctgtcttaaacagaaaataattct

SEQ ID NO: 25885 - DNA, 201 bp, Homo sapiens
tgtagattatgaggactgtaggtggtggtattttgactcaatgttagtttcctgcttacagctaaagtggccgctgctgctagcattctaagacaggttgrccatcctctgactgtgttgtctaactgtttagagaggtaggctacaggggcaaaggaaggagggtctcctttctgttgccctaagacaccgagggctatt

SEQ ID NO: 25886 - DNA, 201 bp, Homo sapiens
acataaggagaccccatctctacaaaatatcaaaaaattacccaggtatggtggcacacacgtgtgattccagctactcgggaggctgagatgggaggatsacttgaacccaggaggttggggctacaatgagctatgatcgcaccacttcattccagcctggatgacaggtaagactctgtcttaaacagaaaataattc

SEQ ID NO: 25887 - DNA, 201 bp, Homo sapiens
gcaacataaggagaccccatctctacaaaatatcaaaaaattacccaggtatggtggcacacacgtgtgattccagctactcgggaggctgagatgggagratcacttgaacccaggaggttggggctacaatgagctatgatcgcaccacttcattccagcctggatgacaggtaagactctgtcttaaacagaaaataa

SEQ ID NO: 25888 - DNA, 201 bp, Homo sapiens
gcctaggcaacataaggagaccccatctctacaaaatatcaaaaaattacccaggtatggtggcacacacgtgtgattccagctactcgggaggctgagaygggaggatcacttgaacccaggaggttggggctacaatgagctatgatcgcaccacttcattccagcctggatgacaggtaagactctgtcttaaacaga

SEQ ID NO: 25889 - DNA, 201 bp, Homo sapiens
gatcatattcacaggtatgctctcggagatttgacagctctgaaattaataaaatgtgttaacattcagattcaagaatttgaataaatgaagtgtaattytatttttcctttatactgaatgcagaaatggaatatttcacagagatgtaaaaccagaaaatatactaataaaggtaagagcttttacatgaaagctggg

SEQ ID NO: 25890 - DNA, 201 bp, Homo sapiens
atggtgaaaccccatctctactaaaaatacaaaaattagccgggcgtggtggcgggcgcctgtagtcccagctactcgggaggctgaggcgggagaatggygtgaacccgggaggcggagcttgcagtgagccgagattgcgccactgcactccagcctggacaacagagggagactccatctcaaaaaaaaaaaaaaaaa

SEQ ID NO: 25891 - DNA, 201 bp, Homo sapiens
agcctaggcaacataaggagaccccatctctacaaaatatcaaaaaattacccaggtatggtggcacacacgtgtgattccagctactcgggaggctgagrtgggaggatcacttgaacccaggaggttggggctacaatgagctatgatcgcaccacttcattccagcctggatgacaggtaagactctgtcttaaacag

SEQ ID NO: 25892 - DNA, 201 bp, Homo sapiens
gtttgttacagtaatttttttccctctcaggttgtaaaaaatggtttatttaataaatgccatcaacataactgactgcacctggaagaaaataattgaamgcaccattttcacaccgcagacaaaaatgaaccctattcagacggccgttcaaaccttctagagggaaatgtggcagaggcaggatttgagctcaggtcc

SEQ ID NO: 25893 - DNA, 201 bp, Homo sapiens
ggaggccaaggcaggcggatcacgaggtcaggagatcgagaccatcctggctaacatggtgaaaccccatctctactaaaaatacaaaaattagccgggcrtggtggcgggcgcctgtagtcccagctactcgggaggctgaggcgggagaatggcgtgaacccgggaggcggagcttgcagtgagccgagattgcgccac

SEQ ID NO: 25894 - DNA, 201 bp, Homo sapiens; identical to SEQ ID NO: 5254

SEQ ID NO: 25895 - DNA, 201 bp, Homo sapiens
acaagatggacctgtggagcgccggctgtgtgttctacgagatcgccaggtagcaccaggccaggctcctgcctggttcctgcggcggagcggtgcagcasccaggctcgtgctccttcctttacaatccagatgtcatggtcattctggtttttctttctgttttactgtttttaatttaacagaaaattgactaggctt

SEQ ID NO: 25896 - DNA, 201 bp, Homo sapiens
ggctgtaagcctttttggtgggttagggagatagggtttttggggatgctgggaaatttagagaggtcttttaactggattttgatggggtcgtggtgagyagctagggaaggggtggtggtgtcccaccctattgggtttacaaaagaggtgggaagtgggtactggggagaggggtcaggggctggactcgcatagagg

SEQ ID NO: 25897 - DNA, 201 bp, Homo sapiens
taggtgacagagcaagaccctgtctcagaaaaacaacaaaagaaatacagaaattctactggtgcatatttcattttttctttttctttttttttttttttgagacggagtttcgctcttgttgcccaggctggagggcactggcatgatctcagctcaccacaacctccgcctcctgggttcaagtgattctcctgcctc

SEQ ID NO: 25898 - DNA, 201 bp, Homo sapiens
aaaaaaagcctgtcctagaattgatgaaatataatgataatgataatagctaacagttcatgaatggtacccatatggccaggcactgttcttaatactttataggaattaactcattttaaccttccaacaaccctgtcaggcagatacggttattttttatttttttaagatggagtctcactctgtcgccaggctgga

SEQ ID NO: 25899 - DNA, 201 bp, Homo sapiens
tcttcccagctgcagatgctgatgccaacgtcaggtctacatgtggtacatggtttttctcaagtcacacctctaagcagtcctcaaattacttttacaamaacaaaaagtctgctgtgtaaggttataaatagaaacaaaggcaaggaatttattagtctctctaaaagcctttttttttttttttacttaaaagtataa

SEQ ID NO: 25900 - DNA, 201 bp, Homo sapiens
gcttttagtctatatttttcctatagaaatagaagaaatggagtgagtctcttaaaaaaaatccctagtcttggtatttgtaggatctccctttgtgcccygaggcagtgacattggcacaagtctgctaaacccggggttcagtgtagggttaccagctctgactctaaaggtcggaaccagcagctcctccattttagt

SEQ ID NO: 25901 - DNA, 201 bp, Homo sapiens
attagtagcagaaagtcatactgagtcacttgggcagcatgaggttggtatttggagcctctgacccctaccccctccagtattacttctgctcctttccyatgctttaattcaaatagaaacggatggcttttgcagtaatcttagttaatatgaagttaaagaaaggtaaaaaaatacacataatggattagtactgtg

SEQ ID NO: 25902 - DNA, 201 bp, Homo sapiens
ttatccagcctcagcctcatgagtaacagggactacaggtgcaagccaccaaatgcctagataatttttgtaatttttttttttttttgagacagagtctygcattgtcacctaggctggagagcagtggcgtgatcttggctcactgcaacctctgcctcccaggttcaagcaattctcctgcctcagcctcccgagtat

SEQ ID NO: 25903 - DNA, 201 bp, Homo sapiens
cagccacctttgacccaaagttgccagtacaggattttgaacagtagggtgtgatgcttttttttttcttttttttttttttttttgagtcagggtctcaytctgttgcccaggctagagtgcagtggtgtgatctcagctcactacaacctctgcttccagggctcaagcgattatccagcctcagcctcatgagtaaca

SEQ ID NO: 25904 - DNA, 201 bp, Homo sapiens
ggaaactactatgcatgtaaacaaatgaagcagcgctttgaaaggtaggctacagagatgcacttgggaccaaacacagatccaagtttcagtcaataacrgcaacttaatattaggggggagctttattaatttaataatatgtaagatacaatcagatttctttgggcagtgagggttatatgctaatgttatgtttat

SEQ ID NO: 25905 - DNA, 201 bp, Homo sapiens
agatgtgaggtaatttgacattttttctagattactgggtgggcagagccagatgtgaacccagattctgctaaggcaaatccttgttcttcactgcccartgcatatggtagtttacctaccactaggaagactgaagccaccaggtgttctgctccttctcttctagcacttcttcctctctatgcattctgcattctc

SEQ ID NO: 25906 - DNA, 201 bp, Homo sapiens
tttcagcagtagtgaatgggaatgtacaggggtattgtattttattttattttttgagacagagttttgctcttgtcccccaagctggagtgcagtggtgygatcttggctcactgcaacctctgccttccgggtttgagcaattcttctacctcagcctcccaagtagctgggattacaggtgcgcaccatcacatccag

SEQ ID NO: 25907 - DNA, 201 bp, Homo sapiens
tgggcagccactcccttggggtgtctgggacctggtggatgtgtcccagtcacatcttatggtcaagaaattgtattaggcaaaagcagtacaaaagagcytctttcgtttttcctaatttccataaagcagaaagcgttttatgtccaactggcctctgttctgtttcaagaaacagtccctaaagcaagaggaggaccg

SEQ ID NO: 25908 - DNA, 201 bp, Homo sapiens
gaggctgagatgggaggatcacttgaacccaggaggttggggctacaatgagctatgatcgcaccacttcattccagcctggatgacaggtaagactctgycttaaacagaaaataattctagatttattttcaaaagtagttccttctgccttccaaatacacccgcagttcactgtagctgttttgggccctcctgggt

SEQ ID NO: 25909 - DNA, 201 bp, Homo sapiens
ggttccccctgaaggtttggcctcccccgtgggactctagtgggcagccactcccttggggtgtctgggacctggtggatgtgtcccagtcacatcttatsgtcaagaaattgtattaggcaaaagcagtacaaaagagcctctttcgtttttcctaatttccataaagcagaaagcgttttatgtccaactggcctctgt

SEQ ID NO: 25910 - DNA, 201 bp, Homo sapiens; identical to SEQ ID NO: 5247

SEQ ID NO: 25911 - DNA, 201 bp, Homo sapiens
ttatccccacagaacccagaacggaagcgaggatgaggcctcagccgtcctcctccccattcaaacacgttcatccctcaaccctctgctgagcacctgcrtgctgcccggccgcagtgtcacccttcttgtgtgagcctaccctcatccacccacctcaccctcctgaccttaaagaagacaccgggcagaagcacaggg

SEQ ID NO: 25912 - DNA, 201 bp, Homo sapiens
tgtcccttcccagcgctgctggtcagtcgtggagcgccatcatgtcttaccagtgacgctgctgacacccctgacttttattaaagaataagctgtcgttrcagtattgcattttaatgttttccgagtccaacatgtgtccttaccagccattcctttattttagcttttgtgggcacacgaggggaattgattttgttg

SEQ ID NO: 25913 - DNA, 201 bp, Homo sapiens
gtcactcctggccggcattcacccaagtccccaccctcagtcacatccgaggtcggcatatttttctctaagggtctgataggaaatattttaggccccgkggccgtggggtgttcgttacactccctgctttgctgcagtgtgaaaggagctggaggcaacacatgaaccacataggggctgcgttccagtagaactggg

SEQ ID NO: 25914 - DNA, 201 bp, Homo sapiens
cctgctgaatgtgaatctaagacctgtctgccctgaggtcacctaattccggacctctggacactcctgtttgcctaactgtggaggtgacagtttgatcygaaactgcgagtccctgggtaggcagcgcttctgattcatggagccagctctgttcctggcccagagactgtcaggctgagacagaaaagaaaaaaaaag

SEQ ID NO: 25915 - DNA, 201 bp, Homo sapiens
ggtgtatcctccccaaaatgaggatgttagcagctccacggcaggagaaagaggggctggctgtccactttgcggttgatgccaaggctacaggtagtaakccttctagaagagcctggtgtgcggcccttgtaaatggtgtgaacaggatgcattctgagatggtagagcactgtggatgtcacctggcgctggaagtac

SEQ ID NO: 25916 - DNA, 201 bp, Homo sapiens
ggctagggaaaaggtttaaggaagtgagatcttgagctaaagcttgtccaaagaagtgagggttatctctgaagccttgagggaggacagtccaggttagytgttgtgactggagggtgtcaaggtcggtccaggtgaaagcaaagaggttttgggaatcagggtgcaggggaatagtaaaaaaagtcatcttttaggtca

SEQ ID NO: 25917 - DNA, 201 bp, Homo sapiens
gtagcgcggaaccagcttctctgacggcgctgctcttcgacccagcccaggccgccactgaattttgtgtctgtaatttttctttgacagacagatccgcrgaaggaccttaagcctgccccgcagcagtgtcgcctgcccaccatagtgcggaaaggcggaagataactgagcagcaccgtcgtctcgacttcggaggca

SEQ ID NO: 25918 - DNA, 201 bp, Homo sapiens
gcaatggtggcctatgatcccgatgagagaatcgccgcccaccaggccctgcagcacccctacttccaagaacagaggtaggcactctcgtgggttcggtrgggcagatgcaggacctggcaaatgagacccatgggcacatggtggggcaaggtactgccccctggagggtccctggttcttgggaatcgcgctctctat

SEQ ID NO: 25919 - DNA, 201 bp, Homo sapiens
tgttcaaaaattggaactactgctagcttgttagcttcttgctctttccacctgaagcaggatttctctatctcaacactgttggcattttggcctggaaytttttttttttttctgttctgtgcattgtagaatattgaatgatttgtattcattggtaaatagctgctgtcctgacccttctgagtctcgcctagcccc

SEQ ID NO: 25920 - DNA, 201 bp, Homo sapiens
tttcccattgttagccataagtatgtagaaatgcaattaatttttgtttactttgtattttgagaaatttctcaggattcacttattttttttttttttttgttctagtatgttttggttgctttcttaggattttttacttaaagaaatatgtcacctgcaaatagagacagttttactcttctttcccaatgttgatga

SEQ ID NO: 25921 - DNA, 201 bp, Homo sapiens
ttgcagtgagtggagattgggccactgcactccagcctgggcgacagagtgagactctgtctcaaaaaagaaaaacaaaacaaaaaaaaactattgagatkatgaataggattgtattgagtctatcgttcaatttgggagagaatgcatatcttagcaatattgaactttgcaattcataaacatggtataaccgtctct

SEQ ID NO: 25922 - DNA, 201 bp, Homo sapiens
taggttgtgaatgtattctcctgtattttctcctgaaaaccttatcattttaactttttacatttaggtctgtgatccatcttttttttttttttttttttgagatggagtctcgctctgtcacccaggctggactgcagtggcgctatctctgctcactgcaagctccgcctcccaggttcactccattctcctgcctca

SEQ ID NO: 25923 - DNA, 201 bp, Homo sapiens; identical to SEQ ID NO: 5242

SEQ ID NO: 25924 - DNA, 201 bp, Homo sapiens
tgggtcaaagggtaggtatatgtttaactttataagaaactgacaagccttttctcaaagtgattgtaactttttatttttttatttaatttaattaattwatttatttatttgagacagagtgtcgctctatcacccaggctggctatctcggctcaatgcaagctctgactcctgggttcacgccattctcttgcctca

SEQ ID NO: 25925 - DNA, 201 bp, Homo sapiens
gcggttgaggttgcagtgagccatgattgtgccactgcactccagcctgggtgacagagcaagaccctgtctcaaacaacaacaacaacaacaacaacaamggttctcttgctatgcttttagtctatatttttcctatagaaatagaagaaatggagtgagtctcttaaaaaaaatccctagtcttggtatttgtaggat

SEQ ID NO: 25926 - DNA, 201 bp, Homo sapiens
caaagaagccagtaggccgtgtgctctgcgggctctcagtggagctgctccattctcttctccttccccgtaggaaaacagagaagcgggctctgggcagycacagaaaagctggctttccggagcaccctgtggcaccggaaccactcagtaacagctgccagatttccaaggagggcagaaagcaggtactaagcgaaa

SEQ ID NO: 25927 - DNA, 201 bp, Homo sapiens
tgaatgaccacaaaaaagtttaagtttcaaaagtgtgtctcaccttaaacagtctgtatgttcctaaaagttataaatgtgttggatttctttttttttttaattaaaaaaaacagcaaaaaaatgatatatcaaccaatggaacaggatagagagctcggaagtgaaccctttatgatccatttgattttatgatccatt

SEQ ID NO: 25928 - DNA, 201 bp, Homo sapiens; identical to SEQ ID NO: 5253

SEQ ID NO: 25929 - DNA, 201 bp, Homo sapiens
ttctggtctgtttgcttctggtcagttccacacccaaggttctcttctagatctagttctcaagcctgcattttctttttttttttttttttttgagatgrcatctcactctgtagcccaggctggagtgcagtagtgtgatcttggctcactgcaacttccacctcctgggttcgagggattctcctgccccaccctccc

SEQ ID NO: 25930 - DNA, 201 bp, Homo sapiens
cagccacagaaaagctggctttccggagcaccctgtggcaccggaaccactcagtaacagctgccagatttccaaggagggcagaaagcaggtactaagcraaatcggagccggagactgcctagctcagccgggactggatgccctcgggtggcctgtgtctctctcaggaggacgccacctgtggaggctgtggcagac

SEQ ID NO: 25931 - DNA, 201 bp, Homo sapiens
ttccatgttggtcaggctggtcttgaactcccgacctcagatgatctgcccacctcggccttccaaagtgctgggattataggcgtgagccaccatacctrgtctttttttttttttttctctaagtgtaatgcattttatctcctgcttcttgtaagtttccaggaccaagtaatactcaaacccttcccagagggtttt

SEQ ID NO: 25932 - DNA, 201 bp, Homo sapiens
gaggcatgcaccaccacacccggctaattttgtatttttagtagagatggggtttttccatgttggtcaggctggtcttgaactcccgacctcagatgatytgcccacctcggccttccaaagtgctgggattataggcgtgagccaccatacctagtctttttttttttttttctctaagtgtaatgcattttatctcct

SEQ ID NO: 25933 - DNA, 201 bp, Homo sapiens
taaagatttctggtctgtttgcttctggtcagttccacacccaaggttctcttctagatctagttctcaagcctgcattttctttttttttttttttttttgagatggcatctcactctgtagcccaggctggagtgcagtagtgtgatcttggctcactgcaacttccacctcctgggttcgagggattctcctgcccca

SEQ ID NO: 25934 - DNA, 201 bp, Homo sapiens
atctcggctcaccgcaacctcctcctcttgggttcaagcgattcgcctgcctcagccttcctgagtagctgggattagaggcatgcaccaccacacccggstaattttgtatttttagtagagatggggtttttccatgttggtcaggctggtcttgaactcccgacctcagatgatctgcccacctcggccttccaaagt

SEQ ID NO: 25935 - DNA, 201 bp, Homo sapiens
aatgagacacctgtaacctcagacagagccagtattaattctgtgtgtgtgtatagtttttaaggacattattattattattattattattattattattwtttttgagacggagtctcactttgttgcccaggctggagtggagtggcgcaatctcagcttactgcaacctccacttccctggttgaagtgattctcctg

SEQ ID NO: 25936 - DNA, 201 bp, Homo sapiens
ccaggctggagtgcagtggcgtgatctcggctcaccgcaacctcctcctcttgggttcaagcgattcgcctgcctcagccttcctgagtagctgggattasaggcatgcaccaccacacccggctaattttgtatttttagtagagatggggtttttccatgttggtcaggctggtcttgaactcccgacctcagatgatc

SEQ ID NO: 25937 - DNA, 201 bp, Homo sapiens
gcacaatgaagacactgatcttcttgtagagaaatttctgggctttccagtttaattcatttaagagaaggggtaaattttggtggtgttttagcaagcarcagctatcccttgactagtatgaacagggcctggtaggtcagtatgagggtctgcttgagggcagaagatgtttaggctgttgaattttcccacaaagtt

SEQ ID NO: 25938 - DNA, 201 bp, Homo sapiens
ggctttatgaggagaaggtgcatagtggagcatgagcagttctgtaacaggaggacaaggtgcacacagaaggaagaaagacatctgcttgaaagcttccyaggccggtcctggaagattggaatccagagcaccatgtatttggtattacacactatgtactccataattagttgtttttttgttttgttttgttttgtt

SEQ ID NO: 25939 - DNA, 201 bp, Homo sapiens
cctagccaaggagcctggctgaattaagctgctgggcttgtgagccatcctggaacctccattcctcccctcccccaagcctgtttgttttcattggctawagggatgactgtcttagctaagcagggcctttctagggaaagctgctgcacacacacctggtttacttctgtgtgatcctatttaccccgagaggaccga

SEQ ID NO: 25940 - DNA, 201 bp, Homo sapiens
ctgtaggtcactttttgcttttgcaaggtaagatgctcacttgtatgagaaacagcgtattatgcacctgtagaactggtggacctgtgactcattctttytgttatgactggtgtttgcttccaggtaatagcagtgagtgcccgcctccaggaaatgctgaagatgacactgtttgcttggatcttggcaagtgtaagg

SEQ ID NO: 25941 - DNA, 201 bp, Homo sapiens
cgggagccgggctcgtgggcacccacgcagtcactttggtgacgcgcgaaggtcgttgccccttggagtccgtttgcaagaagctcggcctccgcgcttgytcacccacagcaaggctgcccccagggagtccggagcccgcgtcccgctgcgtggttcccggaagaaaagcggttgggggcccttctaagcccaccccgc

SEQ ID NO: 25942 - DNA, 201 bp, Homo sapiens
caggctggtctcaaactcttgacctcagatgatccacccaccttgacctcccaaagtgttgggattacaggcgtgaaccaccacgcctggcctctagttctttttttttttttttttggagacagagtctcgctctatcatccaggctggagtgcagtaatgtgatcttggctcactgcaacctctgcctccctgtttcaa

SEQ ID NO: 25943 - DNA, 201 bp, Homo sapiens
ggctggtctcgaacccctaacctcaagtgatccacctgccttggcttcccaaagtgctgggattacaggtgtgggtcaccacacccagccaaaaaaattayattttaaacacagaaatgtattcaaaaggataggaaaaaaggttccattttcatgtgatccactgttggcttctctgaagaaaccaatacatctactcct

SEQ ID NO: 25944 - DNA, 201 bp, Homo sapiens
caccatgcccagctaattttgtgtgtgtgcgcgtgtgtgcgcgtgtgcgtgtgtgcgcgtgcgtgtgtgtgcgagtgcgtgggtgtgtgcgtgtgtgtgtgcgcgcgcgcgcgtgtgtgcgtgcgtctgtgtgcgtgcgtcagtgtgcgtgtgcatgcgtctgtgtgcgcacgtgtgtgtgcgtctttgtgtgcgtgtgtg

SEQ ID NO: 25945 - DNA, 201 bp, Homo sapiens
accatgcccagctaattttgtgtgtgtgcgcgtgtgtgcgcgtgtgcgtgtgtgcgcgtgcgtgtgtgtgcgagtgcgtgggtgtgtgcgtgtgtgtgtgcgcgcgcgcgcgtgtgtgcgtgcgtctgtgtgcgtgcgtcagtgtgcgtgtgcatgcgtctgtgtgcgcacgtgtgtgtgcgtctttgtgtgcgtgtgtgc

SEQ ID NO: 25946 - DNA, 201 bp, Homo sapiens
ccatgcccagctaattttgtgtgtgtgcgcgtgtgtgcgcgtgtgcgtgtgtgcgcgtgcgtgtgtgtgcgagtgcgtgggtgtgtgcgtgtgtgtgtgcgcgcgcgcgcgtgtgtgcgtgcgtctgtgtgcgtgcgtcagtgtgcgtgtgcatgcgtctgtgtgcgcacgtgtgtgtgcgtctttgtgtgcgtgtgtgcg

SEQ ID NO: 25947 - DNA, 201 bp, Homo sapiens
catgcccagctaattttgtgtgtgtgcgcgtgtgtgcgcgtgtgcgtgtgtgcgcgtgcgtgtgtgtgcgagtgcgtgggtgtgtgcgtgtgtgtgtgcgcgcgcgcgcgtgtgtgcgtgcgtctgtgtgcgtgcgtcagtgtgcgtgtgcatgcgtctgtgtgcgcacgtgtgtgtgcgtctttgtgtgcgtgtgtgcgc

SEQ ID NO: 25948 - DNA, 201 bp, Homo sapiens
ctaattttgtgtgtgtgcgcgtgtgtgcgcgtgtgcgtgtgtgcgcgtgcgtgtgtgtgcgagtgcgtgggtgtgtgcgtgtgtgtgtgcgcgcgcgcgcgtgtgtgcgtgcgtctgtgtgcgtgcgtcagtgtgcgtgtgcatgcgtctgtgtgcgcacgtgtgtgtgcgtctttgtgtgcgtgtgtgcgcgtgcgtgcg

SEQ ID NO: 25949 - DNA, 201 bp, Homo sapiens
tagaagaatttagtgtttaggaattattattgttttccatctcagtcgtatatattttctgttttagccactttggagatttgttaatgataccaaagacraaagaatgttagtttataaatctgaagatatcaagaatgtttcacgtttgcagtctccaaaagtgtgtggttatttaaaagtggataatgaagagttgct

SEQ ID NO: 25950 - DNA, 201 bp, Homo sapiens
atttgaggaaaaaataaaactgaagataggtcctagttctaaagcagaatactgtatttactttttttctttttttttttgagatggagtcttgctctgtkgcccaggctggagcgcagtggcacaatcttggctcactacaacctccgcctcccggattcaagtgattctcctgcctcagcctccctagtagctgggatt

SEQ ID NO: 25951 - DNA, 201 bp, Homo sapiens
aataaaataagttgattaacacatttttaaaatatgtattattactgtgttcttacaatcaagtaagctagagaaaggaaaatgttatgatgaaaatcatwaaaaaaaaaaaaagcccggcatggtggtgtgtgcctgtagtcttctgttactcaggaggctgaggtgagaggattgcttgagtccagaaattcaggctgt

SEQ ID NO: 25952 - DNA, 201 bp, Homo sapiens; identical to SEQ ID NO: 5279

SEQ ID NO: 25953 - DNA, 201 bp, Homo sapiens
tctctactaaaattacaaaaattagcccggtgtggtggcgcacgtctataatcccagctactcgggaggctgaggcaggagaaacgcttgaatccgggagrcggagcttgcagtgagccgagatcgcgctactgcactccagtctgggcgacagagcgagactccgtctcaaaaaaagaaaaaaagaaaaaaaaaaaaaag

SEQ ID NO: 25954 - DNA, 201 bp, Homo sapiens
ttggcagttgtctgccacggccccttacttgtttctggggaagacattcgaggtactcaccaagagatagagtgaagatggaattctttttagaagggaayacagttgacccaggaacagtgcgggggtgtggttagaagcactgaccttcttccctctgcagtcgaaaatcctcacgtgactttttttttttaaggctct

SEQ ID NO: 25955 - DNA, 201 bp, Homo sapiens
ccatgcctgactaatttttgtattttttactagagtcggggtttcactatgttggccaggctgttctcaaactcctgacctcaagtgatccacctgcctcrgcctcccgaagtgctgggattaaagacatgagccaccacgcccagcctgtgtgtggcttctttcacttagaataatgtttccaaggttcatctgtgttgt

SEQ ID NO: 25956 - DNA, 201 bp, Homo sapiens
tcacccaggctggagtgcagtggcacgatcactgcaacctctgcctcctgggttcaagtgattctgtggcctcagcctgttgagtagctgggattacaggygcccaccaccatgcccggctgatttttgtgtttcagtagagatggggtttcaccgtgttggtcaggctgttctcgaactcctggactcaagttatctgcc

SEQ ID NO: 25957 - DNA, 201 bp, Homo sapiens
agcttactatttatataaataatcctgggttaaacttgcatagtgagataatatttcccccaacttttatttatttatttgagatggagtcttgctctgtygcccaggctggagtgcagtggcgcaatctcggctcactgcagtctccgcctcccaggttcaagcatttctcctgcctcagcctcccaagtagctgggatt

SEQ ID NO: 25958 - DNA, 201 bp, Homo sapiens
aggtgatactctcacctcagcctcccaagtagctgggaccacaggtgtgcaccaccatgcctggctaatttttttttttttttttttgagacgaagtctcrccctgtctcccaggctggagtgcaatggcgtgatctcagctcactgcaacctccgccccctgggttcaagcagttctcctgcctcagcctcccgagtagt

SEQ ID NO: 25959 - DNA, 201 bp, Homo sapiens
atttccttaggttgaatttctacacgtgggccgtcccttggcgcatattgccacacagctttccagaggatcacaagctattctctcaccaggaatgtaasagttccaatcttatttcatgcgtgtcagctgtaagtattactgcttcatattgcttttctgagtcaaaaaatcaaaataccttgttttaattggcatttt

SEQ ID NO: 25960 - DNA, 201 bp, Homo sapiens
gctgtgtataatgatcataatgagagctcagaaacgtattccattcctaggcgtttccctagggatggatgtgcaaattacaaagtaccttgaaacgtggytgtgtgttttggggtgaagcacggttcatctaaatctggttaaaactatcatttggactttgttgtcaagcttaatggtgtagatttgagctctaggaaa

SEQ ID NO: 25961 - DNA, 201 bp, Homo sapiens
cagtggctcacacttgtaatcagcactttgggaggctgaggcgggtggactgcttgagcccaggaatttgagaccagcccaggcaatatagggagaccttrtctctactcctccacaaaaaaaaaaaaaaaaaaaaaattagctgggcatggtggcacatgcctgtggtctcagctacttagaatgctgaagcagtaggat

SEQ ID NO: 25962 - DNA, 201 bp, Homo sapiens
atcacttaagcccaggagttggaggctacagtgaggtatcattgcaccactgagttccagcctgggtgatagactgtctccccccacagcgcgcgcgcgcrcgcgacacacacacacacacacacacacacacacacacacacacacaaaaaggccggggagggagggtataacttttctaaatgccagtgtgtaccattc

SEQ ID NO: 25963 - DNA, 201 bp, Homo sapiens
tctttggctgttatgtgtaaacagttcctctgttactttgcatgttatgttttatttttcctctgcttgacaacttgtgccagagaaacatttttctaccmctttttgtctactcttccaacctgtcaaactgttgaattttccttctcttttcatagtctctgcatttctaatcatgttcactatagttcagtgctgccc

SEQ ID NO: 25964 - DNA, 201 bp, Homo sapiens
gaggaactgaattgtaaattctattttatttaaatttttaataatgtttgcctgtgatgggagacgggaatgggcattaactgtaaaaggacatgagtgasattactggaaggatggaaatgtcctaaaattgacttatagcaatggtttcaacacttggtaaagttattagaaatcactgagttatatacttgaaatgga

SEQ ID NO: 25965 - DNA, 201 bp, Homo sapiens
taattttgtgtgtgtgcgcgtgtgtgcgcgtgtgcgtgtgtgcgcgtgcgtgtgtgtgcgagtgcgtgggtgtgtgcgtgtgtgtgtgcgcgcgcgcgcgtgtgtgcgtgcgtctgtgtgcgtgcgtcagtgtgcgtgtgcatgcgtctgtgtgcgcacgtgtgtgtgcgtctttgtgtgcgtgtgtgcgcgtgcgtgcgc

SEQ ID NO: 25966 - DNA, 201 bp, Homo sapiens
tttttgttgttattcctaggggaacatgtcttgtagaaagcttaactaatggtcttttaaaaaaaatactatttttgtgtgttggtgttttaatatataartttcttaggaattttatacttttaagcataggagactgtttaactggatttgtccaggtcctttgatgagtaaagcccttattgaagagcattttcaggc

SEQ ID NO: 25967 - DNA, 201 bp, Homo sapiens
gcgcgtgcgtgtgtgtgcgagtgcgtgggtgtgtgcgtgtgtgtgtgcgcgcgcgcgcgtgtgtgcgtgcgtctgtgtgcgtgcgtcagtgtgcgtgtgcrtgcgtctgtgtgcgcacgtgtgtgtgcgtctttgtgtgcgtgtgtgcgcgtgcgtgcgcgcacgtgtgtgtgtgcgtgcgtgtgtgcgcgtgtgtgtgtg

SEQ ID NO: 25968 - DNA, 201 bp, Homo sapiens
gtatctgaacaacgacacctgctgcaacagcgactgcacgttgaaggaaggtgtccagtgcaggtgaggagtctctccacagggattttgggaagttggtrtaacaagatgtccaaaataagagaagactgaacttgcaggggctttagaatcaactgaaaggggtgtgagtgtgtttgtttacatctacctcttttgccc

SEQ ID NO: 25969 - DNA, 201 bp, Homo sapiens
agccaaaatatgtgtctttaggatccaagttaaatttgctcagattacatttttttttttttaagatggcatctcgccctgtcacccagactggagtgcartggcgcgatctcggctcaccacatcctctgcctcccaggttaaagcgattctcctgcctcagtcccttgagtagctggaattacaggcgtgtgccaccat

SEQ ID NO: 25970 - DNA, 201 bp, Homo sapiens
atctcctgacctcatgatctgccagcctcggcctctgaaagtgctgagattaaaggcgtgagccactgtgcctggccagcttattaattcttaagccaaawtatgtgtctttaggatccaagttaaatttgctcagattacatttttttttttttaagatggcatctcgccctgtcacccagactggagtgcaatggcgcg

SEQ ID NO: 25971 - DNA, 201 bp, Homo sapiens
gcagagagcactgctccctttttctcattccttagtcccaacaacccgcacctgacacttactacacgtggcctgcttccctgtcctgtgtgttttggggrgtgctgaagaggaaggctcctgtgtcttcagcacaaacacaataaacacttcacagcagtactggctttatgttttccatttctgatatcagaagtagga

SEQ ID NO: 25972 - DNA, 201 bp, Homo sapiens
ttttttcttttttttgagatggagtatcactctgtcactcaggctagagtgcactggcgtggtctcggctcactgcaacctctggctcctgggttcaggcrgttctcccgccttagacccttgagtagctcagactacaggcacatgctacctcacctggctaatttttgtatttttagtagagacggggtttcaccatgt

SEQ ID NO: 25973 - DNA, 201 bp, Homo sapiens
tgatggatatgttctatttcagtagtaattttaataccacgtattgttttgcacattgaaatgttaaataattgcaggcctctttttaaagtctttaggargctttattcagtatcaaaaaacagacacatggagaattgactgaattattctttatttatttatttttttgagagtcttgctctgtcgtccaggctggag

SEQ ID NO: 25974 - DNA, 201 bp, Homo sapiens
tttttctgctagacacactggaaatgctagatcaatgaaaggtggtagttcatagtctgagaagttaaagaggaagctaggaaagtcaggctgtggtcacycttccattgaaagagtagcaatagaaatcaagaccacagtggctgcattggttaagacacatatctatctgtcagatattagtctacaaaacaaaacgtt

SEQ ID NO: 25975 - DNA, 201 bp, Homo sapiens
agattatctgtacttggacagataactactattgacattttgacagacatccttccaaatttttttttctatgtgtaaatacacaaataaatatagttatrcccactattttttcctgcaaaactaggaccatacaatatgtacagtttgtcttcacacatttttcgtttaacaatatgattatgaaccttttcgtgttaa

SEQ ID NO: 25976 - DNA, 201 bp, Homo sapiens
aagcccaggagttggaggctacagtgaggtatcattgcaccactgagttccagcctgggtgatagactgtctccccccacagcgcgcgcgcgcgcgcgacrcacacacacacacacacacacacacacacacacacacacaaaaaggccggggagggagggtataacttttctaaatgccagtgtgtaccattctctcatt

SEQ ID NO: 25977 - DNA, 201 bp, Homo sapiens
acctttattttaaaatatatgctcattgcaaaattcggaaaatagattatctgtacttggacagataactactattgacattttgacagacatccttccamatttttttttctatgtgtaaatacacaaataaatatagttatacccactattttttcctgcaaaactaggaccatacaatatgtacagtttgtcttcaca

SEQ ID NO: 25978 - DNA, 201 bp, Homo sapiens
cttaagcccaggagttggaggctacagtgaggtatcattgcaccactgagttccagcctgggtgatagactgtctccccccacagcgcgcgcgcgcgcgcracacacacacacacacacacacacacacacacacacacacacaaaaaggccggggagggagggtataacttttctaaatgccagtgtgtaccattctctc

SEQ ID NO: 25979 - DNA, 201 bp, Homo sapiens
cttggagataaaatacttggtgatcctattacgtatgtatttgagaaaatttatcaaacaagcaattgcagtttactttttgacctttttctgcaatgagraaaaaaaatgtcattgaaatccacaaatagtatagttcctaggcctgtacattctaaatcatgctttctgtctctcttagttcttcctttacctagaagt

SEQ ID NO: 25980 - DNA, 201 bp, Homo sapiens
atatgaaaatttaagagtacatttataatattataaataattcattgacatatgttttccataccatatgcttctctgtttgtttcaaacattgaatattrgtactgaagaatttatgaattttggttttaaaatgttttttttctagaacgattctttttttgaacagataaaataatgcagtattcagagccttctgac

SEQ ID NO: 25981 - DNA, 201 bp, Homo sapiens
tggcctcccaaagtgatgggattacaggtgtgagccaccacacccagcccaagtcttgcctttttgagacaccaaaacagatggactcatgtagtaagtarccttcagagaccagcttccttccctcagtgaagcgcctcgagagtcacccacgttgctgcgcttgtcagttcctcctctttattgccgagtagtatccca

SEQ ID NO: 25982 - DNA, 201 bp, Homo sapiens
cacttaagcccaggagttggaggctacagtgaggtatcattgcaccactgagttccagcctgggtgatagactgtctccccccacagcgcgcgcgcgcgcrcgacacacacacacacacacacacacacacacacacacacacacaaaaaggccggggagggagggtataacttttctaaatgccagtgtgtaccattctc

SEQ ID NO: 25983 - DNA, 201 bp, Homo sapiens
agaccatcctggctaacacggtgaaaccccgtctctactaaaaatacaaaaaattagccaggcgtggtagcaggcgcctgtagtcccagctatttgggagkctgaggcaggggaatggcgtgaacccaggaggtggagcttgcagttagccgagattgcgccactgcactccagcctgggcgacagagtgagactccgtct

SEQ ID NO: 25984 - DNA, 201 bp, Homo sapiens
aatatggttcattttgctgtattcacattcccatacatgcataaccaagcagagaagctggggcacccgcggagaactgcaggccacagcgtcaggcagcrgctccaaagcagcacaaggggacactttctgacactgctcaaagttctcaggtggcatttataaactgcagaaccaccaccgaaactcagccttatttct

SEQ ID NO: 25985 - DNA, 201 bp, Homo sapiens; identical to SEQ ID NO: 5273

SEQ ID NO: 25986 - DNA, 201 bp, Homo sapiens
gcgtcattaaagtttaaaacaagaacaaaaacaaagatagctgaagtaatcagtttgtatcagggctgaattaactctatgaaacccctcattacttgatrgtaaatgagaagattccgtttttcgatagcagtggaaggcaaagtaatttaaaccaagatcattgcattaaatttggatgtaactattagaggttgaaaa

SEQ ID NO: 25987 - DNA, 201 bp, Homo sapiens
gccccagggaacagggccgccaacagaactattgtagtcaagtccctggtcagcaacacccaccttctacaatagggctgtttaaccgggggtcccaggayagcctgtggggagggggttgtctaacctccttgaaatcaaaggtaaaactgcatatatgtgtgtcccctgcccccgccccacagccttacctgactgcca

SEQ ID NO: 25988 - DNA, 201 bp, Homo sapiens
agtttccatactaaatatttaatgggaaatttatctaacagtctatggaattttataccaggtgttttaaaataggttatttcctttaatccccaaaaccrttcagttattaggtgatattatttccatttgtagataaatacttaggattcaaagattgaggccaaggtcggacagtgagtaaatgaaagtaggacttaa

SEQ ID NO: 25989 - DNA, 201 bp, Homo sapiens
caggctggagcgcagtggcacaatcttggctcactacaacctccgcctcccggattcaagtgattctcctgcctcagcctccctagtagctgggattacargtgtgcaccaccacagccagctaatttttgtatttttagtagagtcagggtttcaccatgttggccaggctggtcttgaactcctagcctcaagtgatcc

SEQ ID NO: 25990 - DNA, 201 bp, Homo sapiens
gaggctacagtgaggtatcattgcaccactgagttccagcctgggtgatagactgtctccccccacagcgcgcgcgcgcgcgcgacacacacacacacacrcacacacacacacacacacacacacaaaaaggccggggagggagggtataacttttctaaatgccagtgtgtaccattctctcatttgtggccctgcgac

SEQ ID NO: 25991 - DNA, 201 bp, Homo sapiens
gtcataagttgattattgttgaagctggtgaggggcacgggggcattcatgataccatcctgtctacttcatagatgcttgaatatttctgtaatagaaastgtaaaatatgtgactaggaacaaaatttaagtagccacatatggttggtggctaccatattgcatactgtttctctaagtaataggtcatatgcttctt

SEQ ID NO: 25992 - DNA, 201 bp, Homo sapiens
gccagaatcccttttctaggtcaaaaaaggtctcaggtataacataatggaagctataatttaataattttggattgaaaacagactgaaatggacatacygagcccctaagaaacagaagccccaggcaggaaaccactgtcctatcagagttcctccctcagcattcctatccagatttgccgagattggctgtggttt

SEQ ID NO: 25993 - DNA, 201 bp, Homo sapiens
tattgcatactgtttctctaagtaataggtcatatgcttcttggttatgaggatagtgtcagaacttgggagcaaaatgttttactttgcagactgcctgrgtggacatgcatgctgctgactcttcctgctgccagttctggggctcttcaaaacagccctgtaagaacttgccagtgaggcatggtggctcacacctgt

SEQ ID NO: 25994 - DNA, 201 bp, Homo sapiens
aggaaagccctgtacagtaggattttgtgacatgaatgtgagtatttatgtacagctttttctgtaacagccagataggaagtttttattttgtaagtacwtgattttgcagatgaaaacaaatcaaaacacaagtggggctacatccttctggcccattgttatctacgggtattacttaggaggagaagacggagtgct

SEQ ID NO: 25995 - DNA, 201 bp, Homo sapiens
gatggggtttcaccatgttggccaggttggtcaactgactggtcaacaaactcctgacctcaggtgatccacctgcctcgacctctcaaagtgctgggatkacaggcatgagctgctgtgcccagcctatgttttaaatgaattccttaataaaaatatttttaactgatgaaaagggcttacaggacaaaaataaagtag

SEQ ID NO: 25996 - DNA, 201 bp, Homo sapiens
tggacttctctgtggacagatgacattagtgaaaaggaatgtaggacctttgagattgtaacttcttaggaaggtttgctgaacggaagaggaagtcttakgacaaggatgcaaacagaagctgccagatcttcagggatgtgtaggcagaaagccagagttgcgggttggtccttttatcgttagtgctctccagctgct

SEQ ID NO: 25997 - DNA, 201 bp, Homo sapiens
gtgtgtgcgcgcgcgcgcgtgtgtgcgtgcgtctgtgtgcgtgcgtcagtgtgcgtgtgcatgcgtctgtgtgcgcacgtgtgtgtgcgtctttgtgtgcgtgtgtgcgcgtgcgtgcgcgcacgtgtgtgtgtgcgtgcgtgtgtgcgcgtgtgtgtgtgagcgcgtgtgtgtgtgcgtgtagagacagggttttagcat

SEQ ID NO: 25998 - DNA, 201 bp, Homo sapiens
tggctcacgcctgtaatcccagcactttggagaccgaggtgggcagatcatgaggtcaagagatcgagaccatcctggtcaacatggtgaaaccctgtttytacaaaaaatacaaaaattagctgggcgtggtggcatgcacctgtagtcctagctactcaggaggctgaggcagaagaatcacttgaacccgggaggcgg

SEQ ID NO: 25999 - DNA, 201 bp, Homo sapiens
tgtgtgcgcgcgcgcgcgtgtgtgcgtgcgtctgtgtgcgtgcgtcagtgtgcgtgtgcatgcgtctgtgtgcgcacgtgtgtgtgcgtctttgtgtgcgtgtgtgcgcgtgcgtgcgcgcacgtgtgtgtgtgcgtgcgtgtgtgcgcgtgtgtgtgtgagcgcgtgtgtgtgtgcgtgtagagacagggttttagcatg

SEQ ID NO: 26000 - DNA, 201 bp, Homo sapiens
acaaaaattagctgggcgtggtggcatgcacctgtagtcctagctactcaggaggctgaggcagaagaatcacttgaacccgggaggcggaggttacaatragccaagattgtgcctctgtagtccagcctggtgacagagcaagactccatctaaaaaaaaaaaaaaaaaaaaaaaaaaacagatttgaagatgtttttt

SEQ ID NO: 26001 - DNA, 201 bp, Homo sapiens
gtgtgcgcgcgcgcgcgtgtgtgcgtgcgtctgtgtgcgtgcgtcagtgtgcgtgtgcatgcgtctgtgtgcgcacgtgtgtgtgcgtctttgtgtgcgtgtgtgcgcgtgcgtgcgcgcacgtgtgtgtgtgcgtgcgtgtgtgcgcgtgtgtgtgtgagcgcgtgtgtgtgtgcgtgtagagacagggttttagcatgt

SEQ ID NO: 26002 - DNA, 201 bp, Homo sapiens
cagatttgaagatgttttttaaaaagccagttagtatttctgtgtaagatgaggtctttgctatctttctgaaagtagctcctttggtgtctgatttggtrgttacaggcacctttggagggtctcatacacttggctctcaggggcttcatgattgttgtctggggtgaaagtgaagccattttggcatctgcagagcac

SEQ ID NO: 26003 - DNA, 201 bp, Homo sapiens
tgtgcgcgcgcgcgcgtgtgtgcgtgcgtctgtgtgcgtgcgtcagtgtgcgtgtgcatgcgtctgtgtgcgcacgtgtgtgtgcgtctttgtgtgcgtgtgtgcgcgtgcgtgcgcgcacgtgtgtgtgtgcgtgcgtgtgtgcgcgtgtgtgtgtgagcgcgtgtgtgtgtgcgtgtagagacagggttttagcatgtt

SEQ ID NO: 26004 - DNA, 201 bp, Homo sapiens
cttaattcttgtcactgcatgagtggcatgcctgaggtgaggagatttcaagtctgatggagctacgagctctctgttgtgctattctgcttgtccttaartgggctttgactgggatgtttggtctcagtatttgtatagcttgcttaccttcgtaagaagaattatagatccttaaccaagttcacatcagccatttag

SEQ ID NO: 26005 - DNA, 201 bp, Homo sapiens
accatgttggccaggctggtctcgaactcctgacttcgtgatctgcctgcctcagcctcccaaagtgttgggattacaggcgtgagccactgctcctggcygcccaaagaatcttttgggcaacagagataagatttaacaagggtataagatttaacaaggtttttttatggctacatcctaatagcaaaattttggaaa

SEQ ID NO: 26006 - DNA, 201 bp, Homo sapiens
taaaactgaagataggtcctagttctaaagcagaatactgtatttactttttttctttttttttttgagatggagtcttgctctgtggcccaggctggagygcagtggcacaatcttggctcactacaacctccgcctcccggattcaagtgattctcctgcctcagcctccctagtagctgggattacaggtgtgcacca

SEQ ID NO: 26007 - DNA, 201 bp, Homo sapiens
tgcatctggccatctttattctttatataggacaagccttctcaactatgttaaaaaataaaaggaatatgtgcgtctggtttaaaaaacaagccatggakgatatgcaaagtttttacttctaactcagttagacttctcagacccagagaggtttcctttgtaaacttccaattttttgttttgttttgttttttgttt

SEQ ID NO: 26008 - DNA, 201 bp, Homo sapiens
ttagggtaggagggtaggagggtagggtattgggtagaggataaagaaggggtttgggaaaggtggggggtgtctcttggcagttgtatggttaaattgartttttgttttatttagtgatatgtgttttttgggtacatgtgatattttgatacctgtgtataatatgtagtgatcaaatcagggtgattgggataccca

SEQ ID NO: 26009 - DNA, 201 bp, Homo sapiens
gcagttctcttgcctcagcctaccgagtagctgggattataggcgtctgctgccatgcccagctaattttttgtatttttagtagagacagggttttgccrtgttggccaggctggtcttgaactcctgacctcaggtgatccacccgcctctgcctctccaagtgctgggattacaagtgtgagccaccatgcccagcca

SEQ ID NO: 26010 - DNA, 201 bp, Homo sapiens
cacacacctggtttacttctgtgtgatcctatttaccccgagaggaccgagcaagccaccgtacctggctgtcctgcatcagggtccacaggtcaagtacrtcagtcccacagtcttgggccacttgtaaacacgcattggcatattcaccaacaacagagttcaggcgatttagtttgcaacctattgaagagaagaaat

SEQ ID NO: 26011 - DNA, 201 bp, Homo sapiens
ctccttgggtcaagcaattctctcaccttgacctcccaaagtgctgggattacaggagcgagccaccgccctcagccccatgttcttaaaaaccttttgtraacgacatttaaaatagttgcagattttttcccctgtctttggaagtgttacaacatccaaccatttcacagttactaatttaccatcattctggttttt

SEQ ID NO: 26012 - DNA, 201 bp, Homo sapiens
atggctacaccattttacagtctcagcagcattgtatgagggtcccagcttctccatatcctcaccaacacttgttatcttttttattgtaactatcctargttttgtgataaggatgcaaacagaaagctggaggtcttcagggacctagtgaatgaagttgtgtcctattttggcttgattttggttttccgtgtgcat

SEQ ID NO: 26013 - DNA, 201 bp, Homo sapiens
ggaagaactgtttttactatagtttgtaatggcttcagaatcttcaatttgagatatccagttattaaaagagaatcaattgcagttgaaatgcattagtyaagtattttaaagtgctttagcaagctacatttaaaaagtgcttattatagaaaatatacccaaaataaccaatgatgttactgtcttgtgcttattttt

SEQ ID NO: 26014 - DNA, 201 bp, Homo sapiens
tttggaagtgaagtgcagtgaaatattgagtacctgagaggttacttgttagtgaaaacacaatagcagtagtacgtagctacagtttggctccaaaggargaactgtttttactatagtttgtaatggcttcagaatcttcaatttgagatatccagttattaaaagagaatcaattgcagttgaaatgcattagttaag

SEQ ID NO: 26015 - DNA, 201 bp, Homo sapiens
acggagttttagcatgttggccaggatggtctcgatctcctgacttcatgatctgcccaccttggcctcccaaagtgctgggattacagaggggagccacygtgcctggcctttattttctttttgagacagggtctcagtctgttgcccaagatggagtgcagtggcatgatcatggctcactgcagcctcaacctccca

SEQ ID NO: 26016 - DNA, 201 bp, Homo sapiens
tgtgtgcgcacgtgtgtgtgcgtctttgtgtgcgtgtgtgcgcgtgcgtgcgcgcacgtgtgtgtgtgcgtgcgtgtgtgcgcgtgtgtgtgtgagcgcgtgtgtgtgtgcgtgtagagacagggttttagcatgttgcccaagttggtctcaaactcctgggttcaagcaatctgctcccctgtgcctcccaaagtgctg

SEQ ID NO: 26017 - DNA, 201 bp, Homo sapiens
tcaccatgttggccaggctcatctcgaactctcctgacctcaggtgatccacccacctcggcctcccaaagtgttgggttgggattataggtgtgagccayctcgcccagcccatcttgtcttttttaaattaatgcgttaaatgaatgaaaaccaagggcaccaagatgtttcacaggtgattgctgtgttcccattctt

SEQ ID NO: 26018 - DNA, 201 bp, Homo sapiens
ccaaatgtgaaaatctcaagtttggatgggaagaagtcagtttgataaataataaatatacataaccaatttcctcttttatatattttttatatataaacgcgcgcgtgtgtgtgtgtgtgtgtgtgtgtatgatatgggggaaaataccagaaataatcttatggcctcacctataaacaggaaaatataatataagac

SEQ ID NO: 26019 - DNA, 201 bp, Homo sapiens
tagtgtggcatttatgtgacctcacgcacattaggaagggacaaagtgtgtgcaggtagctctagcagcggagatgtctgatgatgtaggagtgggtgacrgagccaggaggtcttccccggtgatcttcaggtcactgtaacgtaactgtagcgtttgatttgatatggggccataatttgaattgctctgttcctgtct

SEQ ID NO: 26020 - DNA, 201 bp, Homo sapiens
tacttccaaggtcaacccctaacggccccacctgtgcccgcagggaatggggcgagagagctcctggcgcctctgcccggagctggccgcggggcctcctrggacacagcgcgcggtcgcccgcggccgctaacccggacccggaggggaaaggccgctgcccaggagggcgctgaggggaagaccgcgcatctcgacccg

SEQ ID NO: 26021 - DNA, 201 bp, Homo sapiens
caaatgtgaaaatctcaagtttggatgggaagaagtcagtttgataaataataaatatacataaccaatttcctcttttatatattttttatatataaacgcgcgcgtgtgtgtgtgtgtgtgtgtgtgtatgatatgggggaaaataccagaaataatcttatggcctcacctataaacaggaaaatataatataagact

SEQ ID NO: 26022 - DNA, 201 bp, Homo sapiens
aagtgtgtgcaggtagctctagcagcggagatgtctgatgatgtaggagtgggtgacggagccaggaggtcttccccggtgatcttcaggtcactgtaacrtaactgtagcgtttgatttgatatggggccataatttgaattgctctgttcctgtctgctgttcttctccagtgacaggaacagtccttgctgtaaaaac

SEQ ID NO: 26023 - DNA, 201 bp, Homo sapiens
ctcctggcccatgtgtttgttttttatttgcaaaatgcagaccacctgtgccagaagaatgcatagacttttcttttttcttttcttttctttttctttctttttttttttttttgaggcagtgttttgctcttgttgcccaggctggagtgcaatggcgtcatctcagctcaccacaacctccgcctcccgggttcaagc

SEQ ID NO: 26024 - DNA, 201 bp, Homo sapiens
acaatcaaaatgacaatcttgggataatgaatgttatcatgaatctatgcactggaatagtgtggaggaagcaggatacaagttagaagggtaaccagttyttctatatgtatctatatgtatttcactgttggggacacctacatattgtttagttatatgattggctgtgttttacttacaagtcaccaagtggtagct

SEQ ID NO: 26025 - DNA, 201 bp, Homo sapiens
tcctggcccatgtgtttgttttttatttgcaaaatgcagaccacctgtgccagaagaatgcatagacttttcttttttcttttcttttctttttctttctttttttttttttttgaggcagtgttttgctcttgttgcccaggctggagtgcaatggcgtcatctcagctcaccacaacctccgcctcccgggttcaagca

SEQ ID NO: 26026 - DNA, 201 bp, Homo sapiens
gtgatcgcccaccttggctttctctctctttttttttttttggattttgagacaggatctggcctcgttgcctaggctggagtgcagtggcacgatatcarctcactgcaacctctgcctcctgagctcaagccatcctcccacctcagcctcctgagcagctgggactgcaggtgtacaccaccacgcctggctaatttt

SEQ ID NO: 26027 - DNA, 201 bp, Homo sapiens
atttatgcagtcatcacaattaattttagaacatttacattactccagaaagaaaccctgtatcctttagctatgatcctccaatccccccattccccacractcagagcaaccactaaccaccctattctttatggagttgtctgttttgaacatttcatataaatggaattatacaatatggtttcgtgaccacatatt

SEQ ID NO: 26028 - DNA, 201 bp, Homo sapiens
tttctagacctatttttatacatagttaagattatacaatatgaatatttctgaaatctatatttaacattataacatatgtatttttccatgttctttctttttttttttttttgagactgggtctcatcctgtcacccaggctggagtgcagtggtgctatcttggcttactgcagccttgacctcctgggctcaagtg

SEQ ID NO: 26029 - DNA, 201 bp, Homo sapiens
tcttttaaataaacgtaagtaaaacaatttgaaaacgtttgttcttatcaaacagccttttgttcccttgatattttatacaaaatagtagatagcagagkataagttcctgataaggaatcagtattttctagcaggaaaagctagagaacaacaacctcaaaaaaaaaaaaaaaaaagaagaagaaagaaaaaaagcaa

SEQ ID NO: 26030 - DNA, 201 bp, Homo sapiens; identical to SEQ ID NO: 5274

SEQ ID NO: 26031 - DNA, 201 bp, Homo sapiens
tactttgagttgttaccttcctttagcttagttcagtggttttttctttttcttttttgagatggagtcttgccttgttgcccaggctggagagtagtggkgtgatctcggctcactgcaacctccgcctcccaggttcaagcagttctcttgcctcagcctaccgagtagctgggattataggcgtctgctgccatgccc

SEQ ID NO: 26032 - DNA, 201 bp, Homo sapiens
tttctagcaggaaaagctagagaacaacaacctcaaaaaaaaaaaaaaaaaagaagaagaaagaaaaaaagcaattagcatttcacaaccagcagcagcarcatcacctgggagcttattagaaatggaaattgtcagtcccctccctggatctactgcatcaaaaaatgtgggaagggaggccagcagtctgtgctgtgt

SEQ ID NO: 26033 - DNA, 201 bp, Homo sapiens
gaccatacaatatgtacagtttgtcttcacacatttttcgtttaacaatatgattatgaaccttttcgtgttaatatagatctaaattagggttttttttktttgtttgtttgttttttgagacggagtcttgctctgtcacccaggctagagtgcaatggcgtgatcttggctcactataacctctgcctccccggttca

SEQ ID NO: 26034 - DNA, 201 bp, Homo sapiens
gctcccttcctccatttggaggttgtgcgaatgacagcagtggtgagatccaagccgaggatgaggggatggggaagggcagggtggtgtctggagacagscatctctgcatgcagatccaccatacctgggagacctatcctgttggtgtttcttcttgctgcagtttcaggccatatggcaggctttgaggtgggagag

SEQ ID NO: 26035 - DNA, 201 bp, Homo sapiens
taatcagcactttgggaggctgaggcgggtggactgcttgagcccaggaatttgagaccagcccaggcaatatagggagaccttgtctctactcctccacaaaaaaaaaaaaaaaaaaaaaattagctgggcatggtggcacatgcctgtggtctcagctacttagaatgctgaagcagtaggatcagttgaattcggaag

SEQ ID NO: 26036 - DNA, 201 bp, Homo sapiens
ggcaggaggagaggcaggtctcagaacaatccagctgtcaatgcgtgttctctgttccagaaactgacaactcctgcaaggtgtgctgcagggacctttcyggccgctgtgtgccctatgtcgatgctgaacaaaagaacttatttttgaggaaaggaaagccctgtacagtaggattttgtgacatgaatgtgagtattt

SEQ ID NO: 26037 - DNA, 201 bp, Homo sapiens
gctgaggtgggtggatcacttcaggccaggagttcgaggccagcctggccaacatggtgaaacctcgtctctactaaaaatacaaaaattagccaggcttrgtggcttgcgcccgtaatcccaactgctcgggaggcctaggtgggagaatcgcttgaacctgggagacagaggttgcagtgagctgagatcgctccactg

SEQ ID NO: 26038 - DNA, 201 bp, Homo sapiens
tcttttctttttctttctttttttttttttttgaggcagtgttttgctcttgttgcccaggctggagtgcaatggcgtcatctcagctcaccacaacctcygcctcccgggttcaagcaattctcctgcctcagcctcccaagtagctgggattacaggcatgtgccaccacgtccggctaattttttgtatttttagtag

SEQ ID NO: 26039 - DNA, 201 bp, Homo sapiens
cgtgatccgcccacctgggcctccctaagtgctgggattacaggcatgaaccaccgctcctggcccatgtgtttgttttttatttgcaaaatgcagaccayctgtgccagaagaatgcatagacttttcttttttcttttcttttctttttctttctttttttttttttttgaggcagtgttttgctcttgttgcccaggc

SEQ ID NO: 26040 - DNA, 201 bp, Homo sapiens
tggttgttatttgttaaaaaataacatgattgtcaagtaactatagtatttggcatgaaaataagaggtttgttccagaaattttcatcttcttttgtttrtaatgtaagagttgaaaactctggaaaataatgggaacaacagagattagactttaaaaaagattagggaaaagggaaatggagtgatctgagggaaaat

SEQ ID NO: 26041 - DNA, 201 bp, Homo sapiens
gttgtactggtttcacttcatttgacagtgttctgctaatgactagacgtgtatctctgacctggacttgttctctggagttcatattcagctgcccattkggcacttcaaatataacatgtccaaaattagttaccttttttttttttttgagacagagtctcactgtcacccaggctggagcgcagtggcgcaatcttg

SEQ ID NO: 26042 - DNA, 201 bp, Homo sapiens
tttctccttgatattttggattcctttcagcattcttgtccattgtgtggtaagtcatcaacttttaagtaattaaatgttttatttaaattttgatcaaytccaaccatgtaatctctggaaaaggtaaaacttgttcttagcaaagtttggcctgatatttccaatagctttttttgttgttattcctaggggaacatg

SEQ ID NO: 26043 - DNA, 201 bp, Homo sapiens
ttccttttttttttttctttgttgttacatgagttgtactggtttcacttcatttgacagtgttctgctaatgactagacgtgtatctctgacctggactkgttctctggagttcatattcagctgcccatttggcacttcaaatataacatgtccaaaattagttaccttttttttttttttgagacagagtctcactgt

SEQ ID NO: 26044 - DNA, 201 bp, Homo sapiens
tcgaaacacaatggacctaagtataaaacttccctgaaaaatcatctaatacttttattattaatatcagtggcaaaggtttaagcctgaggaaaaaagcktacctctacgtattgacaactttgagttctgtagataacaagcagatttgggtctcctgtgattggctaatggtctccatctcccagcagacttaattca

SEQ ID NO: 26045 - DNA, 201 bp, Homo sapiens
tagctaaataaattagttcatttgtcgttacaggagatatattgctctaagtacctaataagactttagttgtaacttgcatagtgttttattaatgtcamtgcttctggctttttaagaaagtttaattatgtgaaaatgagacttaaaatttgtgtgcttagagtaaaatatgaatgcatttttcttcaggcattttaa

SEQ ID NO: 26046 - DNA, 201 bp, Homo sapiens
tggataagggatgctcaatctgtatctctttatttactcctaaaatcagccaaggaaatgggcatctctccgttcccccccttccttttttttttttcttkgttgttacatgagttgtactggtttcacttcatttgacagtgttctgctaatgactagacgtgtatctctgacctggacttgttctctggagttcatatt

SEQ ID NO: 26047 - DNA, 201 bp, Homo sapiens
tgtgttgcccaggctgatctcaaatgtctgactgtaagcaatcctcttgcttggcctcccaaagtgctgggattacaggtgtgagccactgtgcgcagccrttaaatattttaaaccgtcactgactttaccatagcttactatttatataaataatcctgggttaaacttgcatagtgagataatatttcccccaacttt

SEQ ID NO: 26048 - DNA, 201 bp, Homo sapiens
tgttttcctagattacttacagaactgactaagattgcaaaattattcagggtgtgattttgaaacaggtgctgaatgagtaggaaagacctagaaggctrcttgacttacttaagccagacccttttgttctctagagaagcataatttttctcatgcagaatgatgggagagggttttaagatttacgaggcttcacag

SEQ ID NO: 26049 - DNA, 201 bp, Homo sapiens
gagttcgaggccagcctggccaacatggtgaaacctcgtctctactaaaaatacaaaaattagccaggcttggtggcttgcgcccgtaatcccaactgctygggaggcctaggtgggagaatcgcttgaacctgggagacagaggttgcagtgagctgagatcgctccactgtactccaatgtgggtgacagggtgaaact

SEQ ID NO: 26050 - DNA, 201 bp, Homo sapiens
tccttgatttttgtctcctggtaattctaaatcacttgtaaaaatggagtaattatgaaagtgttaatgacagatgttctactttcttgggtactcattaygcggaagttattgccttgtgtcaaagatgggaaaacgtttgattttaatgaagccctttacatgtcagttatttttataaagctacattgcttctgaata

SEQ ID NO: 26051 - DNA, 201 bp, Homo sapiens
ggattaccaaagatgtatatgcatataatatttaacagttttattgagataaaattcacatactatattattcacccacttaatgtatacaattttgtagttttgtgtgtgtgtgtgtgtgtgtgtatttttgagatggagtctcactctgtcacccaggctggagtgcagtggcacgatcactgcaacctctgcctcctg

SEQ ID NO: 26052 - DNA, 201 bp, Homo sapiens
tctcggtagtatgtctagccagcagctctggcatttgacacaatggtaatatcctaagagcatttcactttagatttgtgaagtacttggtcaagacattmactgtttggaattgttcacaggaaagtttttagcagacaacatcgttgggtctgtcctggttttctccttgatattttggattcctttcagcattcttgt

SEQ ID NO: 26053 - DNA, 201 bp, Homo sapiens
gtgttttaatatataaatttcttaggaattttatacttttaagcataggagactgtttaactggatttgtccaggtcctttgatgagtaaagcccttattkaagagcattttcaggctgacttcgttgcaatagagcaaatatcaaacatcggcatttcagatgttccccatatatcatgtagattattggcagcagatgg

SEQ ID NO: 26054 - DNA, 201 bp, Homo sapiens
agaaggttatatccatcttgggacaatccatttagggtcatttaaaaaacgtaaccatcttggaattttactgcccaaaacacctctggttaggttttttgttttgttttgttttgttttgttttgcagcgcgatctcggctcactgcaacctttgacttccaggttcaggtgattctcctgcctcagactcctgagtagc

SEQ ID NO: 26055 - DNA, 201 bp, Homo sapiens
ggagactgtttaactggatttgtccaggtcctttgatgagtaaagcccttattgaagagcattttcaggctgacttcgttgcaatagagcaaatatcaaayatcggcatttcagatgttccccatatatcatgtagattattggcagcagatggctatgtcttcagccttctgcacaaataggatgtagggactggggccc

SEQ ID NO: 26056 - DNA, 201 bp, Homo sapiens
gacaatccatttagggtcatttaaaaaacgtaaccatcttggaattttactgcccaaaacacctctggttaggttttttgttttgttttgttttgttttgttttgcagcgcgatctcggctcactgcaacctttgacttccaggttcaggtgattctcctgcctcagactcctgagtagctggattataggcatgtgccac

SEQ ID NO: 26057 - DNA, 201 bp, Homo sapiens
cttgggtgagaaatggattgtcatctgttgagcctgctatcactttctacaactcaggttctaagttcttcagttagtgttaggaatagcctgtgatgaartagtactcactaactgaattgtatttgtagggaatgaccttcttgctgtttctttctaggataagaaattggataaacagtatgaatctctgtctctgtt

SEQ ID NO: 26058 - DNA, 201 bp, Homo sapiens
actgtttggaattgttcacaggaaagtttttagcagacaacatcgttgggtctgtcctggttttctccttgatattttggattcctttcagcattcttgtycattgtgtggtaagtcatcaacttttaagtaattaaatgttttatttaaattttgatcaactccaaccatgtaatctctggaaaaggtaaaacttgttct

SEQ ID NO: 26059 - DNA, 201 bp, Homo sapiens
accatcaaaactgcagagtccaccccagtaaacttaccacacagtggcagaggagaccagaatgggccttctctgcaggcaggcaggcaggcaggcaggcrgagagactcacagaaactctgagctgagcatggtttccttctttatctcacacttactaatgggagcctttgttacttttttttttcttctttgcaggtt

SEQ ID NO: 26060 - DNA, 201 bp, Homo sapiens; identical to SEQ ID NO: 5278

SEQ ID NO: 26061 - DNA, 201 bp, Homo sapiens
ttgagcctgggaggtcgaggctgcagtgagctgtgattgcgtcactgcattccagcctaggtgacacagcgagaccctgtctcaagcaaaataaatcaaaccccccccccaaattaaggtttttttaaacttggagacgctggacggttatggtagaggtttttaaagtaatgtatgaagcccttttaaattaagaaaaaa

SEQ ID NO: 26062 - DNA, 201 bp, Homo sapiens
cagagggcaagattacttctgcttttccctggctctgacaccctgctttctgaaatttctgcctcctgttctttttgtgatctttgattgttgcatctcatttttttttggctttttatgtatattttctgcatctcattttctttggctgttatgtgtaaacagttcctctgttactttgcatgttatgttttatttttc

SEQ ID NO: 26063 - DNA, 201 bp, Homo sapiens
ttgttactcagatacttgttatactaatacttgaacttgtaccttatggtatttgctatcttttaactagtcatgatattcttatactttagttacacttytggaatttgatacaaggttgagtggggtgtgtgggtgtatgtatgagtgaaacagttctcaaaagaatgtaagaaaaaccatttttataaaattgtgact

SEQ ID NO: 26064 - DNA, 201 bp, Homo sapiens
gtaaagtcctgggctcaagtgatccacccttctaagcctcctaaagtgtggagattctaggtatgaggcaccatgcctggcccaaataatcttttatttctttttttttttttttgagacggagtcttgctctgtcgcccaggctggagtgcagtggcgtgatcttggctcactgcaacctccgcctcctgggttcaagcc

SEQ ID NO: 26065 - DNA, 201 bp, Homo sapiens
gttgggggctgtccccacaagacttgatacttcagaaaccctttttattgacccacaagcagatatttgaattacttcttactttattgctccaggattcyggatgggctgcatttactgtgtgaaggataaaaatcattagcctggattctgatttctataaattgccattaaaagctttttttcccctaagaactgaaa

SEQ ID NO: 26066 - DNA, 201 bp, Homo sapiens; identical to SEQ ID NO: 5283

SEQ ID NO: 26067 - DNA, 201 bp, Homo sapiens
ctgttcagaactatccttcatccataagacggatccctaagacattttccatccataagaactcaagtatcggaaaccattctcacctgaccagcctgtcrgccagcgatgctccccatccaccctgctggaaggaaaactggaggaagaaaagcccattattactactaatgactgtaaccgggcatctcagcgagggca

SEQ ID NO: 26068 - DNA, 201 bp, Homo sapiens; identical to SEQ ID NO: 5286

SEQ ID NO: 26069 - DNA, 201 bp, Homo sapiens
tatttttcttttgaagaatgactttttttttcagtttgtttgacagcttacaatataatttgttacttaaccttaccattagattgagttggtcaagactrgcaaatagtttcatagttgaaaaacatgctttattatttattttttatgtttattgtcctacaaatactactatattgcagtactcaatatcgattaggc

SEQ ID NO: 26070 - DNA, 201 bp, Homo sapiens
ttcactatgttggccaggctgttctcaaactcctgacctcaagtgatccacctgcctcggcctcccgaagtgctgggattaaagacatgagccaccacgcycagcctgtgtgtggcttctttcacttagaataatgtttccaaggttcatctgtgttgtagcatgtatctgtatcttatttatttttattgctgaatagta

SEQ ID NO: 26071 - DNA, 201 bp, Homo sapiens
cccggtgtggtggcgcacgtctataatcccagctactcgggaggctgaggcaggagaaacgcttgaatccgggaggcggagcttgcagtgagccgagatcrcgctactgcactccagtctgggcgacagagcgagactccgtctcaaaaaaagaaaaaaagaaaaaaaaaaaaaagctaaacagaaatctaagttcaggaa

SEQ ID NO: 26072 - DNA, 201 bp, Homo sapiens
gcatatgtctgcttatttccttagaataatttattcttttttgtttttttgagactgagtctcactctgttaccaggctggagtgcagtggcgtgatctcrgctcactgcagactctgcctcctgggttcaagccattctcctgcctcagcctcccgagtagctgggattacaggtgcgcaccaccacacccagctaattt

SEQ ID NO: 26073 - DNA, 201 bp, Homo sapiens
atctgaagatatcaagaatgtttcacgtttgcagtctccaaaagtgtgtggttatttaaaagtggataatgaagagttgctcccaaaagggttagtagacrgagaaccacctgaaggtaagacttaaagagtgtatttcaaataagaaacaaacatactacaattgacttcagtaggggtggttgttatttgttaaaaaat

SEQ ID NO: 26074 - DNA, 201 bp, Homo sapiens
ggggctatggatagtattagctatttaaataaaaaataaatgtgatttcttacctctttgggagcatggtcagggaggaaagaggaggcaggaggagaggyaggtctcagaacaatccagctgtcaatgcgtgttctctgttccagaaactgacaactcctgcaaggtgtgctgcagggacctttctggccgctgtgtgcc

SEQ ID NO: 26075 - DNA, 201 bp, Homo sapiens
gtcttgctttgctgcccaggctggagtgcagtgacatgatcatggctcactgcagcctcaacctcctgggctcaagcgatctttctaacctcagccccctragcagctgggactacaggcacgtgccaccatacctggctacctggctaatttttgtgctttttgtagagatgggtctctcattatgttgcccaggctggt

SEQ ID NO: 26076 - DNA, 201 bp, Homo sapiens
caaagagcttcccgcacactggatccttccttcccttgagtacttcaaatatcatcagtcccgtccaagctttctctctggatcccagcatagcaatgaartagcctttaatgtgccctactgaacaagctctttacaaaagagtagcacaaggtcacagaaaaattaaaaaagaccagtgcctgtctgcccctcttcacc

SEQ ID NO: 26077 - DNA, 201 bp, Homo sapiens
tgcatggatatgccacattttgtttattcattcattggttgatagacatttgggttgcttccacttttttgctataacaaataatgctgctgtgaacatttatctatgagtttttgtgtggacagttcctttggatattattcaggaatagaatttctgggtcatgtggtaactatgcttaatcttttgaggagctgtcag

SEQ ID NO: 26078 - DNA, 201 bp, Homo sapiens
gatgcgggccacaggaggacctatgctggcccaggctctacatcacagcgaagaaactattcaccagctttgattcatacttgggatcaattgtttataawattcacctagattataactagctaccccatccctacaaaaaaatttaaaaaattagctgagcatggttgcacatgcctgtggttccagctacttgggagg

SEQ ID NO: 26079 - DNA, 201 bp, Homo sapiens
gcatggatatgccacattttgtttattcattcattggttgatagacatttgggttgcttccacttttttgctataacaaataatgctgctgtgaacatttatctatgagtttttgtgtggacagttcctttggatattattcaggaatagaatttctgggtcatgtggtaactatgcttaatcttttgaggagctgtcaga

SEQ ID NO: 26080 - DNA, 201 bp, Homo sapiens
tccccgtttgtctgtgcctccggtgtgtggcaccccttggcatatgctgtttgtgacttgagaacgcattggatccttctctaaggatgacaggccctttkagagcaagggacatagctacaaccccactcaacagtaaactcatacaacagtaaggacttgagctgtgaagtcacacttgctggatttgattcctggttg

SEQ ID NO: 26081 - DNA, 201 bp, Homo sapiens
catggatatgccacattttgtttattcattcattggttgatagacatttgggttgcttccacttttttgctataacaaataatgctgctgtgaacatttatctatgagtttttgtgtggacagttcctttggatattattcaggaatagaatttctgggtcatgtggtaactatgcttaatcttttgaggagctgtcagac

SEQ ID NO: 26082 - DNA, 201 bp, Homo sapiens
tcattgtttaccatttgctaaccacatgtaagtacagtataaaggaaaaaagtcaccaatgttcctaccacccagaaaaccactgttggcatttggatgtrtatctttccggtcttttcatgaagatacatacacttttaaaaaaatgagtttgcactgaagattatattcacactgaagacttcatattttgcttttctc

SEQ ID NO: 26083 - DNA, 201 bp, Homo sapiens
atggatatgccacattttgtttattcattcattggttgatagacatttgggttgcttccacttttttgctataacaaataatgctgctgtgaacatttatctatgagtttttgtgtggacagttcctttggatattattcaggaatagaatttctgggtcatgtggtaactatgcttaatcttttgaggagctgtcagact

SEQ ID NO: 26084 - DNA, 201 bp, Homo sapiens
gaatgttctgttcagaactatccttcatccataagacggatccctaagacattttccatccataagaactcaagtatcggaaaccattctcacctgaccascctgtcagccagcgatgctccccatccaccctgctggaaggaaaactggaggaagaaaagcccattattactactaatgactgtaaccgggcatctcagc

SEQ ID NO: 26085 - DNA, 201 bp, Homo sapiens
cttgttttaattggcattttttgataagttttcacacattttcaaatatgtatttgctgttaaatttcgccttttatctattcctgtcctttgcctacatyttctattggagttggtatttttcttattgatttctacactaaagacattactctcttgtctgccacattttgcagatattttccttaacacatcattttc

SEQ ID NO: 26086 - DNA, 201 bp, Homo sapiens
tcccaaatataatggttagtgtgcagtctccaccgatacctgtcatctacgtaatctttctcctagagagcaagaattcctcttactgcagttggtgttcyttcatgtccagcctcaactcagaggtctcctacggtgtgcccgtgaatagcagaccacagcacttctgtgacacaagtagggtaacaaaagaaatctctg

SEQ ID NO: 26087 - DNA, 201 bp, Homo sapiens; identical to SEQ ID NO: 5280

SEQ ID NO: 26088 - DNA, 201 bp, Homo sapiens
cgatagcacgcagaaggcttttttcaagagtagaaggggaagaaaggcctcttacatggctagctttcctctagtcacagcagcaattcttcagcagtcarggagagaccatctccttttccaaacccacgttcaccattgcccaggattcaagcctaactgaggtcagggtggctgctgccctgacatatccctccctaa

SEQ ID NO: 26089 - DNA, 201 bp, Homo sapiens; identical to SEQ ID NO: 5281

SEQ ID NO: 26090 - DNA, 201 bp, Homo sapiens
tgaccctgggcacgctgtgctccttcctcacatgtaaagtgaggagaatcccagttaaggattcgcatcaggcagtaggtttgaaacccctcagagaataycagtcacataagagggactctttttttcttagtcttggtaaaatgatatgatttgggatttgcttcagaataatccataggagggatggatgggctcatt

SEQ ID NO: 26091 - DNA, 201 bp, Homo sapiens; identical to SEQ ID NO: 5284

SEQ ID NO: 26092 - DNA, 201 bp, Homo sapiens
gcccaggagttggaggctacagtgaggtatcattgcaccactgagttccagcctgggtgatagactgtctccccccacagcgcgcgcgcgcgcgcgacacrcacacacacacacacacacacacacacacacacacacaaaaaggccggggagggagggtataacttttctaaatgccagtgtgtaccattctctcatttg

SEQ ID NO: 26093 - DNA, 201 bp, Homo sapiens
gcctgtcagccagcgatgctccccatccaccctgctggaaggaaaactggaggaagaaaagcccattattactactaatgactgtaaccgggcatctcagygagggcagttctgattggcaacttctgttttctcggcgctcccttcttggctttgattgcttcactccaggaggtcattttggggattacaggtaagtac

SEQ ID NO: 26094 - DNA, 201 bp, Homo sapiens
taaaaaaaagaacaatcatctgtgtgtgcagaggtcatggtgggactgattaccatgaaacagaacggccgccctacacacttgtgggcgtgcagtgcttyctgacagcagcacggtcctaattagtgatgacttgaggctggggtgaaagactggggaaagtctagtaaactacatttacatcaaagcccacagtttgat

SEQ ID NO: 26095 - DNA, 201 bp, Homo sapiens
agagtagacttggactcgaacagcagcagtggagatgaagacagaaaagattcaagtgcaacttagaatccttattattaactcaaattggttaccccagrggagagggtaaccagcagcggttgctatcggcagatcttgatggtttcaatgggagctgcacatacatgcctggaagaagaatccaaaattctaaaataa

SEQ ID NO: 26096 - DNA, 201 bp, Homo sapiens
tagagaagggatgaggtgaactaagctgtattatggaagaggacagcaatggagtggcatacacgcgaaccttgtactatgcagtaacccggaaaaacacrgaaaacttcaaccataataatataaaaagaacaatgtgaaaaaaatgttggaaacactggaagcaaatgccaatatgcaacagtagactgttgagtgtga

SEQ ID NO: 26097 - DNA, 201 bp, Homo sapiens
ggcctattaacgtaatcagcaaaaatgaaaaatttggtattaggagtgttcaggggccccatgagtcaatattgtttttgactctaggcaggtttttaggyagaaagaacttctaccatctaacctagaacagtaattgctgggacacaggagtccagtctccctcccattgccctgaactcaagagtacatatttaaaaa

SEQ ID NO: 26098 - DNA, 201 bp, Homo sapiens
ggtcaagtacgtcagtcccacagtcttgggccacttgtaaacacgcattggcatattcaccaacaacagagttcaggcgatttagtttgcaacctattgamgagaagaaatagaggtggcagttggtaaacccaagtgctggcccttgtgtaagttctgctccactcatctagacagtttcaaaatgccattaaatattga

SEQ ID NO: 26099 - DNA, 201 bp, Homo sapiens
cacagcaccacgcctgggtgatttttgttatttttagtagagacagagtttcaccatgttggccaggctggtcttgaactcctcacctcaagtgatccacsatctcggcctcccaaagtgctgggattacagacaggggccactgcatctggccatctttattctttatataggacaagccttctcaactatgttaaaaaa

SEQ ID NO: 26100 - DNA, 201 bp, Homo sapiens
gaaatgctagatcaatgaaaggtggtagttcatagtctgagaagttaaagaggaagctaggaaagtcaggctgtggtcactcttccattgaaagagtagcratagaaatcaagaccacagtggctgcattggttaagacacatatctatctgtcagatattagtctacaaaacaaaacgtttcctcataattgtgaattga

SEQ ID NO: 26101 - DNA, 201 bp, Homo sapiens
gcccaggctggagtgcagtggcacaatctcagctcactgcaacccccacctcctgggttcaagcaattctcctgcctcagcatcacaagtagctggaattrcaggcgtgaaccacagcactcggccccatatcaagtgaatttattatgaggctagtaagagtcactgtgattcttgttcctaaataagagagatttttac

SEQ ID NO: 26102 - DNA, 201 bp, Homo sapiens
ccaccctgctggaaggaaaactggaggaagaaaagcccattattactactaatgactgtaaccgggcatctcagcgagggcagttctgattggcaacttcygttttctcggcgctcccttcttggctttgattgcttcactccaggaggtcattttggggattacaggtaagtacacctggcagcactttagcagaggggg

SEQ ID NO: 26103 - DNA, 201 bp, Homo sapiens
aaaataagcagaaatgcaggattagtgaaaatgcccggctttatatatttgaggaaaaaataaaactgaagataggtcctagttctaaagcagaatactgkatttactttttttctttttttttttgagatggagtcttgctctgtggcccaggctggagcgcagtggcacaatcttggctcactacaacctccgcctccc

SEQ ID NO: 26104 - DNA, 201 bp, Homo sapiens
ttggggattacaggtaagtacacctggcagcactttagcagagggggatttttctctatcaaaagctaaacagcctgtattcccagcactttgggaggccraggcgggcggatcacatgaggtctcgagttcgagaccagcctggtcaacatggcgaaaccccgtctctactaaaattacaaaaattagcccggtgtggtg

SEQ ID NO: 26105 - DNA, 201 bp, Homo sapiens
ttcctgaaggcgttttacttccaaggtcaacccctaacggccccacctgtgcccgcagggaatggggcgagagagctcctggcgcctctgcccggagctgrccgcggggcctcctgggacacagcgcgcggtcgcccgcggccgctaacccggacccggaggggaaaggccgctgcccaggagggcgctgaggggaagacc

SEQ ID NO: 26106 - DNA, 201 bp, Homo sapiens
ctgcctcagcctccctagtagctgggattacaggtgtgcaccaccacagccagctaatttttgtatttttagtagagtcagggtttcaccatgttggccargctggtcttgaactcctagcctcaagtgatccacctgccttggcctcccaaagtgttgggattacaggcaggagtcaccatgcccagcctgtatttactt

SEQ ID NO: 26107 - DNA, 201 bp, Homo sapiens
cagcagcggttgctatcggcagatcttgatggtttcaatgggagctgcacatacatgcctggaagaagaatccaaaattctaaaataatgggcagttgatytagtagttagttctagaataatggacaaattaattagcaatttagcagtattcaggctgttgaaataaaggccatttgacattaaaagtaaacaggctcc

SEQ ID NO: 26108 - DNA, 201 bp, Homo sapiens
gggagctgcacatacatgcctggaagaagaatccaaaattctaaaataatgggcagttgatctagtagttagttctagaataatggacaaattaattagcratttagcagtattcaggctgttgaaataaaggccatttgacattaaaagtaaacaggctcccccagagaaacgaatgcattttattttaggtaacaaaag

SEQ ID NO: 26109 - DNA, 201 bp, Homo sapiens
agatgggaggatcacttaagcccaggagttggaggctacagtgaggtatcattgcaccactgagttccagcctgggtgatagactgtctccccccacagcrcgcgcgcgcgcgcgacacacacacacacacacacacacacacacacacacacacacaaaaaggccggggagggagggtataacttttctaaatgccagtg

SEQ ID NO: 26110 - DNA, 201 bp, Homo sapiens
ttgtccaagtagcctaaacctaacagctaggaatagaggaaaccggtgaggctgtgagtcttcccgtttgtccaaagagcttcccgcacactggatccttccttcccttgagtacttcaaatatcatcagtcccgtccaagctttctctctggatcccagcatagcaatgaagtagcctttaatgtgccctactgaacaag

SEQ ID NO: 26111 - DNA, 201 bp, Homo sapiens
gctgaggcagaattgcttgagcccaggaggcaaaggttgcagtgagccgagatcgtgccactgcactccagcctggctgacagagccagactctatctccaaaaaaaaaaaaaaaagagaacttccataatgcacattttcaacattaacatacagctgacccttgaacaacacaggtttgaaccgtgaaggtccacttat

SEQ ID NO: 26112 - DNA, 201 bp, Homo sapiens
aaatggagttcacaacagatagataatctgagcaagtatctcaggtaaaaagtcactaatatcctggaacttaaatagtttagtttggtttatatttaaayagtctatagaatatttgagatttctggttttgattaaatagttttagtaaatacattcgttgtgtttcaacttaaaccggttaatactttttgtttcctt

SEQ ID NO: 26113 - DNA, 201 bp, Homo sapiens
ttagtaaatacattcgttgtgtttcaacttaaaccggttaatactttttgtttccttcttaaaaacagttggattcacagtactgtaggtgtaatgggggaaaaaaaaaaaaaagccgggttgcctggatttgtttctcggctccctgtgtgactaggcgtgaccctgggcacgctgtgctccttcctcacatgtaaagtg

SEQ ID NO: 26114 - DNA, 201 bp, Homo sapiens
ctccccacagagcaccttgtgacccccttcccctgctaacaatagataaccacctttaactgtaattttccactacctacccaaatcctatagtactgccmtacccatctccctttgctcttttcagactcagcccacttgcacccaagtgaataaacagccttgttgctcacacaaagcctgtttggtggtctcttcacg

SEQ ID NO: 26115 - DNA, 201 bp, Homo sapiens
gagctgagtcaatttctgtgatgacattagaaaagtgtgctttcagagtgatgtgctttaattctgcagtagaaggtggaactattcacagctttagttakgaaacaactttgttggctagaataaaatgaactcatagatagtctgtccccgtggagcttggatgcacagattttctgacaagggaaataaagtcaaaat

SEQ ID NO: 26116 - DNA, 201 bp, Homo sapiens
gccatttccttgatttgtctgagtctacccagccatcagtgctcaaccctaaaatatctaattggtcagactgagtgaagagtaaatgttttctgttccttctcctatatactgattaggggaggcaagcaaaattaataaaggaggaatgttctgttcagaactatccttcatccataagacggatccctaagacatttt

SEQ ID NO: 26117 - DNA, 201 bp, Homo sapiens
acatctcaatgctagtttttgcgaaagtagaaacttttgcaatggcctctaaactgagattttttctttccccatagattttatattgcattgccaggagwggtaaagagttacataatgtcttttttcttttttaaatacacacagatagagctaattgacagagttgatgacatctatcggaacacttcatgggataat

SEQ ID NO: 26118 - DNA, 201 bp, Homo sapiens
ccatttccttgatttgtctgagtctacccagccatcagtgctcaaccctaaaatatctaattggtcagactgagtgaagagtaaatgttttctgttccttctcctatatactgattaggggaggcaagcaaaattaataaaggaggaatgttctgttcagaactatccttcatccataagacggatccctaagacattttc

SEQ ID NO: 26119 - DNA, 201 bp, Homo sapiens
atttccttgatttgtctgagtctacccagccatcagtgctcaaccctaaaatatctaattggtcagactgagtgaagagtaaatgttttctgttccttctcctatatactgattaggggaggcaagcaaaattaataaaggaggaatgttctgttcagaactatccttcatccataagacggatccctaagacattttcca

SEQ ID NO: 26120 - DNA, 201 bp, Homo sapiens
gacaaggatgcaaacagaagctgccagatcttcagggatgtgtaggcagaaagccagagttgcgggttggtccttttatcgttagtgctctccagctgctkgggagttgtaactctgacaaatcagtgaagaggtcttcttatctgttcactgtgaattttaactccattttaacctgataaaatggaacccagagataca

SEQ ID NO: 26121 - DNA, 201 bp, Homo sapiens
ggcttccggctgtgggtggtgcgggggacagcggcggccggaagctggctgagccggcctttggtaacgccacctgcacttccgggggcgtcgagcctggmggtagaatcttcccagtaggcggcgcgggagggaaaagaggattgaggggctaggccgggcggatcccgtcctcccccgatgtgagcagttttccgaaac

SEQ ID NO: 26122 - DNA, 201 bp, Homo sapiens
atgattatatagaagataaatgaatactctttaaaaaaaccatcatctcataaaaaattagccagctgtggtggcgtgtgcctgtggtcccagataagagkctgaggtgggaggatcactgagccgggaaggttgaggctgcagtgagctgtgactgcaccactgcactccagcctgggcggcactgcgagaccgggtctc

SEQ ID NO: 26123 - DNA, 201 bp, Homo sapiens
gagacagagtcttgctctgtggcccagtctggagggcagtggcaccatcttggctcactgtaacctctgccttctgggttcaagcagttctcctgcttcarcctcctgagtagttgggattacaagcacctgtcaccacgcctggctaatttttgtatttttgttttagagacagggtttcaccatgttggccaggctggt

SEQ ID NO: 26124 - DNA, 201 bp, Homo sapiens
tgaagatgttgctagaggtaggtcttagaatcctggatatggtgctaacaccactttgtcatttctgatatgtggattgtatgtgttttaatgaaggagcrtgttagaaaagatggacacccagaagcagtctcctccagctgatccagcagtaaccccatcccatgtagcagcatagacaacaaataacaaaaactctat

SEQ ID NO: 26125 - DNA, 201 bp, Homo sapiens
atgtatttttgtgggatatatgaaaattaaagcataaagaagaaaataaaaatggcctgtcagccttcttttgaaacatgtgaggaccactgcttttctcraaccctctgtcctggacccctctgacctgcagcaactcttagagctccctgtctcctagtcctgcagtgcagctgtcattcaaggcatcccacaccctct

SEQ ID NO: 26126 - DNA, 201 bp, Homo sapiens
gttttttaaatttctgcctaaataaaatttatgtatttttgtgggatatatgaaaattaaagcataaagaagaaaataaaaatggcctgtcagccttcttytgaaacatgtgaggaccactgcttttctcgaaccctctgtcctggacccctctgacctgcagcaactcttagagctccctgtctcctagtcctgcagtgc

SEQ ID NO: 26127 - DNA, 201 bp, Homo sapiens
aaaaccatccttacaaaggtatgttcttttatttctaaaagaatagtgttagagtttattgtagtagaacctcagttatatatttatgtaggtattttttwaaaaaatgtaatatatactgttttttaaatttctgcctaaataaaatttatgtatttttgtgggatatatgaaaattaaagcataaagaagaaaataaaa

SEQ ID NO: 26128 - DNA, 201 bp, Homo sapiens
gacttcaacatttgaattgtggggtggcacaattcagccagtagcaggaagattaaatgacttgtctgattagtcatacaactggtgatggcagaggttgwattgagcacagatctcctgactcctagaacagctgaaccactgcgcctgtctgcttttctgtgagcctccagacagcccatggcaggggaggaaccaaag

SEQ ID NO: 26129 - DNA, 201 bp, Homo sapiens
ctccgtctcaaaaaaagaaaaaaagaaaaaaaaaaaaaagctaaacagaaatctaagttcaggaaataaagtcaaaggtcagtgaggaaatgaaggccacrccgcctcactgctttgctggttaccgagctgagggtgaacactttttcatacacattcccatggaattcggcagctctgactgccccatatgcctaaaca

SEQ ID NO: 26130 - DNA, 201 bp, Homo sapiens
tgcagcctgtttattgtcaaaccagttcctttccccaaagacattcatgtcactagtttcatatgtatctttctagagatgtcgtatgcaggtatagtgtrtgtatatgtctgtatttgacacaacggtgctatgcagtacacttttacaccttgctttttcatttcacagtatgttggagagtacttcatgttcatgcat

SEQ ID NO: 26131 - DNA, 201 bp, Homo sapiens
cgtctataatcccagctactcgggaggctgaggcaggagaaacgcttgaatccgggaggcggagcttgcagtgagccgagatcgcgctactgcactccagyctgggcgacagagcgagactccgtctcaaaaaaagaaaaaaagaaaaaaaaaaaaaagctaaacagaaatctaagttcaggaaataaagtcaaaggtcag

SEQ ID NO: 26132 - DNA, 201 bp, Homo sapiens
acagagtgtgtctagtaatgttatattaatgtcatcttaataatagctcatattaaaagttatttcaaattgctaggactaattaaaaaggcttctgacawagggtattgctttgggcagagagacattttgatatgtaaattatataaattgttatctctatttttttccaagctttttgtagtaaaccatatttttata

SEQ ID NO: 26133 - DNA, 201 bp, Homo sapiens
ttcactaagtggaagtggatcatcataatggtcttcatgttgagtaggctgaggaggaagaggaagagttgatcatattgtctctggtgacagaggctcarggaaatccatatgtaagtggacacttgaagttcaaatctgttgttcaagggtcaactgtatttcaggtatactgattgacttttaaatttaatttttatt

SEQ ID NO: 26134 - DNA, 201 bp, Homo sapiens
tgcgcctccccaccccaaacttgcactggagggagatctccagtgggcatctggaattggagtggcagcacccatcgtcctgggcagcccaagagacctgytatcaactccgatacacaggagaaggccatcaggactggaaggtatggtcaagcaacaaatgcccacagacctcactacgcaggggatccctggggttgg

SEQ ID NO: 26135 - DNA, 201 bp, Homo sapiens; identical to SEQ ID NO: 5337

SEQ ID NO: 26136 - DNA, 201 bp, Homo sapiens
ttgacttacatttttaaaagatatgtttctctgtgaataaataaataagagtagaagcagaatcaccagtcagaaatttgccttaatccaagcaaggaatratagtggcttcatctaacatagcagtggtaaagatcaaaatcaatagtttgtgacattatattctggacattatcacatcaacatttttggaaacaaatt

SEQ ID NO: 26137 - DNA, 201 bp, Homo sapiens
ccacataaacatgcctgggaggacccagggccaactcaccagctgttccttagatgtctccttgctggcatcagactcagagcccctgaagtgtttctccygaacatttgaggacctcacttgcttctgggatgaggaagaggcagcgcccagtgggacataccagctgctgtatgcctacccgcggtaggtgctggactg

SEQ ID NO: 26138 - DNA, 201 bp, Homo sapiens
atgtgttcctaaaccagactcggactcagcgagtcctctttgtggacagtgtaggtaagagccatcctcctgtcaccctgccccctccacttgctgccccyagtccagctcccggaatcagacttgcctgtgcccttccagctcagcacggatacccctattaccagaccccctgaggcaccccaagactcccttgtcatt

SEQ ID NO: 26139 - DNA, 201 bp, Homo sapiens
cctacataacccctaatcccacctatcccaggcagtgagaagaaaaatggcagtactagagacagaagttgggcatgggcccaggtctgggtcctcagggstccgcatggtggctgtgtaggagggacctcttctatgccaacagggagaagccccgtgcttgccccctgagttcccagagcatgccccactttggaaccc

SEQ ID NO: 26140 - DNA, 201 bp, Homo sapiens
ccctacataacccctaatcccacctatcccaggcagtgagaagaaaaatggcagtactagagacagaagttgggcatgggcccaggtctgggtcctcaggsctccgcatggtggctgtgtaggagggacctcttctatgccaacagggagaagccccgtgcttgccccctgagttcccagagcatgccccactttggaacc

SEQ ID NO: 26141 - DNA, 201 bp, Homo sapiens
aaaagggatccctgcttacaagaagcactgagtctagcaagccatcatactgcaaagaagtcactgttctcatgagagaagaacagaatcaggagcctccytagcctgccctccaggagaatgacagcctacaatttttgaatccagaagctgccccaattcagcccccagcacccctctctgcagtccagaggctgagcc

SEQ ID NO: 26142 - DNA, 201 bp, Homo sapiens
ccggaaccatcattttagagagacaactagcaatgttgagaaagagatgaagcgatagagaatcctagtgcctaaagctacctgtcccaaactttctaacwggaaaaaactgtcagttgttgggaaatctgaaaacatggggagataaagggcaagtgcacaggtacgggctcacgagagccaaaagccagttatcttccc

SEQ ID NO: 26143 - DNA, 201 bp, Homo sapiens; identical to SEQ ID NO: 5340

SEQ ID NO: 26144 - DNA, 201 bp, Homo sapiens
gccaacagggagaagccccgtgcttgccccctgagttcccagagcatgccccactttggaacccgatacgtgtgccagtttccagaccaggaggaagtgcstctcttctttccgctgcacctctgggtgaagaatgtgttcctaaaccagactcggactcagcgagtcctctttgtggacagtgtaggtaagagccatcct

SEQ ID NO: 26145 - DNA, 201 bp, Homo sapiens
tcaaaacctggcccaagtcagcagccaaggtgaggtgcacagagggtggagatcacctatgcccaggaagagggagccctgggaggtgatgcagggccccvggaggggaggtagagtaagaggctctcctgctggtcccctccccttccacataaacatgcctgggaggacccagggccaactcaccagctgttccttaga

SEQ ID NO: 26146 - DNA, 201 bp, Homo sapiens
tcctccctgccaatccactgccatggctcagtctgcttctcttccttctcccccaggagactgaggcatgccctgtggccctcacttccagacctgcaccrggtcctaggccagtaccttagggacactgcagccctgagcccggtgagtgtgcttccctcccctgtgcccaccaccaaccctgcctggtactggatcctt

SEQ ID NO: 26147 - DNA, 201 bp, Homo sapiens
aagctgggattttcctcccaaggcttcagctctgacagcagagggtggaagctgcctcatctcaggactccagcctggcaactcctactggctgcagctgygcagcgaacctgatgggatctccctcggtggctcctggggatcctggtccctccctgtgactgtggacctgcctggagatgcaggtgagtcaacaaagga

SEQ ID NO: 26148 - DNA, 201 bp, Homo sapiens
ccagaggggcttaaggcacgggacctgactgttctttggataataccatcttgctccttcactaccctttatgccaggaacatcagaaagcctgggctttraacctgaacggttttgatgtagaggaagccaagatccttcggctcagtggaaaaccacaaaatgcgccagagggtaagacccgaagttcctggttcctgg

SEQ ID NO: 26149 - DNA, 201 bp, Homo sapiens
gcacccggggccagacattccgagctcgcggcggtggaaggcacgcaaaagggcgaaccgagacgactccaggacgctgaggcagcgcaggccccacccgkccccgccctgccccgccctgtcccgccctgtcccggccggctttccagtactagtcctctggcgccggctcccagcccctctcgtacccttcaaatcgcg

SEQ ID NO: 26150 - DNA, 201 bp, Homo sapiens
cggctcagtggaaaaccacaaaatgcgccagagggtaagacccgaagttcctggttcctggagggaggtgtcagttcatctccagggctgagcacagatayctgtctcctcttcctatctaagattgagggcaagggaggtgttgattttcccagcgtctagactcactccgttgccacaggttaccagaacagactgaaa

SEQ ID NO: 26151 - DNA, 201 bp, Homo sapiens
ctccagccggaagacctgccgttacattccttccctgccagaccgtatcctggatgcgcctgaaatccgaaatgactattgtaagtgcatccttatcctcrcctcatgcatggagaaagagggcctgggaccacacaaacaaggaagctcatgctcttctctccacctctgacagacctgaaccttgtggattggagttct

SEQ ID NO: 26152 - DNA, 201 bp, Homo sapiens
ggtagccagatccaacaaaaaagttggagaagtaggaggaggtggtctgctgagccaggcatactcagtttcttttccccaatttaccaggtaagtcacaycttctcccctggagagatatgagtgaggtcactgaagcggcctgaaatgttctactgacgtccctccacatggaaatatgaagctaaagaatccaggttc

SEQ ID NO: 26153 - DNA, 201 bp, Homo sapiens
tgcagaggcctcactcagcctctgctctggaccagtctccatgtgctcagcccacaatgccctggcaagatggaccaaagcagacctccccaagtagagargtatgctgaccttcttctgccccacctcttatctcctaccttcaatcttgccccaggaaaggacagaccatactttggggattccagacctaggttcgtc

SEQ ID NO: 26154 - DNA, 201 bp, Homo sapiens
gttcgtccttggagagttagtataggctcagatatgagccacgcctacttaggggcttcctactttgggtcattcccactgacaaaagcaaaggctttcargcctccaaattaatggagatttcgcaacaaaaccctgaacaccacctgaaacccaccaacttagcccctggtctgtgtgcatatctatccagcaaggagc

SEQ ID NO: 26155 - DNA, 201 bp, Homo sapiens
ttcccagagcatgccccactttggaacccgatacgtgtgccagtttccagaccaggaggaagtgcgtctcttctttccgctgcacctctgggtgaagaatrtgttcctaaaccagactcggactcagcgagtcctctttgtggacagtgtaggtaagagccatcctcctgtcaccctgccccctccacttgctgcccccag

SEQ ID NO: 26156 - DNA, 201 bp, Homo sapiens
ccctccccttccacataaacatgcctgggaggacccagggccaactcaccagctgttccttagatgtctccttgctggcatcagactcagagcccctgaaktgtttctcccgaacatttgaggacctcacttgcttctgggatgaggaagaggcagcgcccagtgggacataccagctgctgtatgcctacccgcggtagg

SEQ ID NO: 26157 - DNA, 201 bp, Homo sapiens
aaagggatccctgcttacaagaagcactgagtctagcaagccatcatactgcaaagaagtcactgttctcatgagagaagaacagaatcaggagcctcccyagcctgccctccaggagaatgacagcctacaatttttgaatccagaagctgccccaattcagcccccagcacccctctctgcagtccagaggctgagcca

SEQ ID NO: 26158 - DNA, 201 bp, Homo sapiens
cagagggaaagctctggaggcccctggaaggaaggagttaaatgataatccctgcaggccatcgttcttgtaggatgggaagccttgggattagtctctgrggcaggcctgattcaatgactctgtggggctgggtcttaggtaccccatctgggagaactgcgaagaggaagagaaaacaaatccaggactacagacccc

SEQ ID NO: 26159 - DNA, 201 bp, Homo sapiens
ctccgcatggtggctgtgtaggagggacctcttctatgccaacagggagaagccccgtgcttgccccctgagttcccagagcatgccccactttggaaccygatacgtgtgccagtttccagaccaggaggaagtgcgtctcttctttccgctgcacctctgggtgaagaatgtgttcctaaaccagactcggactcagcg

SEQ ID NO: 26160 - DNA, 201 bp, Homo sapiens
cgaggcgcggggcgcggagaggggcggggccctgaccttgcgggccgacggctgcgcaggtgcccgcagtgcccaggggcggcgaggggcggggccagagyaggggctggctggatgagggcggggctccggcccgggtgggccgaagtctgaccctttttgtctcctagcctggatctccttggtgaccgctctgcatct

SEQ ID NO: 26161 - DNA, 201 bp, Homo sapiens
ggctgagcacagatatctgtctcctcttcctatctaagattgagggcaagggaggtgttgattttcccagcgtctagactcactccgttgccacaggttaycagaacagactgaaagtactctacagccaaaaggccactcctggctccagccggaagacctgccgttacattccttccctgccagaccgtatcctggatg

SEQ ID NO: 26162 - DNA, 201 bp, Homo sapiens
cctaccttcaatcttgccccaggaaaggacagaccatactttggggattccagacctaggttcgtccttggagagttagtataggctcagatatgagccaygcctacttaggggcttcctactttgggtcattcccactgacaaaagcaaaggctttcaggcctccaaattaatggagatttcgcaacaaaaccctgaaca

SEQ ID NO: 26163 - DNA, 201 bp, Homo sapiens
ctgattttgtggccggccaggagcgaaggggtccctttctgtcccctgagcaccgtcgcctcctttcctccagggctccgtaggcaccaactgcaaggacycctccccctgcgggcgctcccatggcacagttcgcgttcgagagtgacctgcactcgctgcttcagctggatgcacccatccccaatgcaccccctgcgc

SEQ ID NO: 26164 - DNA, 201 bp, Homo sapiens
tccttagatgtctccttgctggcatcagactcagagcccctgaagtgtttctcccgaacatttgaggacctcacttgcttctgggatgaggaagaggcagygcccagtgggacataccagctgctgtatgcctacccgcggtaggtgctggactgtgccccactccccatgtatctgtccctgcacttagctgagtcccac

SEQ ID NO: 26165 - DNA, 201 bp, Homo sapiens
ccctgaagtgtttctcccgaacatttgaggacctcacttgcttctgggatgaggaagaggcagcgcccagtgggacataccagctgctgtatgcctacccrcggtaggtgctggactgtgccccactccccatgtatctgtccctgcacttagctgagtcccactccagcagctttcctgcctgtccgaggaccactctga

SEQ ID NO: 26166 - DNA, 201 bp, Homo sapiens
agcaacaaatgcccacagacctcactacgcaggggatccctggggttggccatgcctgttagcaggagtgaaagtgtctatgtatccagtctctgctagtrtatctatgtttatcagattcaactggtatcttagtctctcttgggcatctgatatttctggctactcctacttaacatttctcttccctttgtctttggg

SEQ ID NO: 26167 - DNA, 201 bp, Homo sapiens; identical to SEQ ID NO: 5346

SEQ ID NO: 26168 - DNA, 201 bp, Homo sapiens
cactttgggaggccgaggtgggcagatcacaaggtcaggagatcaagaccatcctggctaacacagtgaaaccccatctctactaaaaatacaaaaaaaaytagccaggcatggtggtgggcgcctgtagtcccagctactcaggaggctgaggcaggagaatggtgtgaacctgagaggcggagcttgcagtgagccaag

SEQ ID NO: 26169 - DNA, 201 bp, Homo sapiens
accagtgtgccatccccaggcactaccccagcactaccccagcccttctccttcctgtacagtccagcccctcctcccacaggatctgctttaatccagcrcctctcctcatctctcccagcccaaggccacagtctcagatacctgtgaagaagtggaacccagcctccttgaaatcctccccaagtcctcagagaggac

SEQ ID NO: 26170 - DNA, 201 bp, Homo sapiens
gcccccagcacccctctctgcagtccagaggctgagccatagactgtggtactcagagttctgatgtgccctgtcttgccctcaggcctgccggctccccmcagtatcatcaaggccatgggtgggagccagccaggggaacttcagatcagctgggaggagccagctccagaaatcagtgatttcctgaggtacgaactc

SEQ ID NO: 26171 - DNA, 201 bp, Homo sapiens; identical to SEQ ID NO: 5349

SEQ ID NO: 26172 - DNA, 201 bp, Homo sapiens
aggggcggcgaggggcggggccagagcaggggctggctggatgagggcggggctccggcccgggtgggccgaagtctgaccctttttgtctcctagcctgratctccttggtgaccgctctgcatctagtgctgggcctcagcgccgtcctgggcctgctgctgctgaggtggcagtttcctgcacactacaggtaccgcc

SEQ ID NO: 26173 - DNA, 201 bp, Homo sapiens; identical to SEQ ID NO: 5351

SEQ ID NO: 26174 - DNA, 201 bp, Homo sapiens
cagttgagctcatgtaattaccatatgttaatttgggggtgatatgttttaggttgatattaactaatatgttttcctatgcagtgagaaatgttttgctkctttcctttcagaacagaacaatccatatgcatgtatactccaaggcaaccccttgacttttctgggaaatttactttcttgggaataacctaagttatt

SEQ ID NO: 26175 - DNA, 201 bp, Homo sapiens
cctgcccgagcgtacccccccggggggttccggggaagggggcgggggtccggatccccggatccccggaaggcgacttgcggggaccccggccggcctckcacgccggcgatcgatcccttttccggctgcccaggatcgggggagagaggcgggatccgggtgccgcggtgcccgagcctcccggggaaagcctccgcg

SEQ ID NO: 26176 - DNA, 201 bp, Homo sapiens
tggggaaagttcccaggccggggaaaaggtggccgcacgctggcttttctcaaggcagccggccctcttggcgtcgtgcttgatttcatgggtgtttaatwcgtgctttgtgggcgctggctccccctccccaccccaccctcaccctcttttctggcttcacttttcagataatgctgtccctggcgttttggtgaccga

SEQ ID NO: 26177 - DNA, 201 bp, Homo sapiens
ggggaaagttcccaggccggggaaaaggtggccgcacgctggcttttctcaaggcagccggccctcttggcgtcgtgcttgatttcatgggtgtttaattygtgctttgtgggcgctggctccccctccccaccccaccctcaccctcttttctggcttcacttttcagataatgctgtccctggcgttttggtgaccgac

SEQ ID NO: 26178 - DNA, 201 bp, Homo sapiens
tcagatttatagtcagttaacggaggcttaagtgatgtaaagttttatttctctctcacatagaaattagttagaggtagtagtttagggctcttagaggscccaggctgtcatattctacctgcttacacatggctttcaggatctaggtcacctcacagtccatgatggctgctggggctccatcccccttgtctgagt

SEQ ID NO: 26179 - DNA, 201 bp, Homo sapiens
atcagatttatagtcagttaacggaggcttaagtgatgtaaagttttatttctctctcacatagaaattagttagaggtagtagtttagggctcttagagsccccaggctgtcatattctacctgcttacacatggctttcaggatctaggtcacctcacagtccatgatggctgctggggctccatcccccttgtctgag

SEQ ID NO: 26180 - DNA, 201 bp, Homo sapiens
cttttctgccagtcatgtttcttaaaggaaatcggtagaatttataaatgtcatgttttccaaatactgttcttcttttaattacctaagaaaatcttttwaaaaatttttataaagatagtaatgcatattcattatataaaacatagacaagaaaagaataacaagtaaatcattaactggagataaccattgatcact

SEQ ID NO: 26181 - DNA, 201 bp, Homo sapiens
ctggttttcacgtgtctcctgaagccacccctaaggagaaggcttcgatgtcatcttctggtcagagccgagcacagtggtcctcttcagagacagatccrtgcagcaggatggcacctctgttgtcctcccagactagcagtaggtacacgtgggcttcgcaggctgttttctgccctggaatgctgctgttttttagac

SEQ ID NO: 26182 - DNA, 201 bp, Homo sapiens
ggccttctctaggggaaaaacatgtagtttatgcaacttttcttttccctttctgctctggatttgaccttttgttccttcaggtgattgaaaaaattcgraaagtcacctgtttcctcagaattgctttaagacaagactaagtgaaccaacaagaatgaagtcagctttttggaaatacctcccaagaggccttgctct

SEQ ID NO: 26183 - DNA, 201 bp, Homo sapiens
acaggtgcgagtcccaccccagaggggccttgagaggctgcaagtgtcctgggtgggctgcctgcttcaggaggacttattattggggaaaaatacccccmctacttattactaagggccgaatgctttatgttcacacaacaactccatgttgtgtgactttggacatgttccttaactttctttatcttggtcttctca

SEQ ID NO: 26184 - DNA, 201 bp, Homo sapiens
tgcccttttataatggcaccaaccccacccatgagggtggagtcctaatggcctaatcagctctctgagatcccatctgttaatactgttacaatggcaaytaaatttcaacatgagttttggaggggacagacattcaaaccatggcaggtggcaagaagtatcaaactactagatccttgggattgtgctttgtactgg

SEQ ID NO: 26185 - DNA, 201 bp, Homo sapiens
tgatacatggaaaaatgtacctgaaatgtgagtcctgcttttgtgactcaccctttcctttacataagcattgatttacatctgttgttttttaagatagkgtgtatgttgaaaagttcagaacaagatcaagtggagacataaaatggtaagatgtgaaaagttgttcttgccagattaaatggttccacctgaagaaaa

SEQ ID NO: 26186 - DNA, 201 bp, Homo sapiens
tcactgccacagagaagtcagaggaagggacttgttgctaaaaaatcctttaaaaggttaaatactttaaaagattaaagcaacataactgtaaacatatygtataaaaatgaaaaacacaggaaccctcttcccttccgcctggtgtgggcttgggaaatgggcaagcggccccagcaatcatgggaggaactcttgcgg

SEQ ID NO: 26187 - DNA, 201 bp, Homo sapiens; identical to SEQ ID NO: 5402

SEQ ID NO: 26188 - DNA, 201 bp, Homo sapiens
ccctgggctgcatcatccttccacattgtctctctaaagtacctgaagccagtagttctcaaactttggagagggttttgagtcacctcgagagctgataagaacagaggcccagattgaagttgaatagtgctgggcctttgtttttaccaagttccctggatggttctgctacctcctagcctgtgagaactactcctt

SEQ ID NO: 26189 - DNA, 201 bp, Homo sapiens
attgtggcagaagggtatcttaaaaaccatttgtttctttaaaaaaactcaaacattagcactttattcttataaacttgttttctgtctttttttccccrtaagagaaatgtttaaaaacattctttaaacaattctattttgtcattatcttttttttggacaaatatcagtgtcttctgtttattacgttgctgctgg

SEQ ID NO: 26190 - DNA, 201 bp, Homo sapiens
ccatgttagccaggatggtcttgatctcctgacctcgtgatccgcccacctcagcctcccaaagtgctgggattacaggcctctgcgcctggccttgcatkgacaattaatttgtttatggaaagccagttatccaatgatggtgaacaaatgcaacttgactgtataatacttattttggttttggaccaaagtcaccat

SEQ ID NO: 26191 - DNA, 201 bp, Homo sapiens
taattatcaataattatgaattgtcaaaattatgtcatgaaacctctttttttcttttttttgagggggagtcttgctctgtcacccaggctggattgcartggtgtgatcctggttcactgcaacctttgcctctgaggttcaagtgattcttctgcctcagcctgggattacaagcatgcgccaccatgcctggctaat

SEQ ID NO: 26192 - DNA, 201 bp, Homo sapiens
tcaggcctttttatggggctgcctctctctctggaggaggaagggagcagatattgatggagcaccaactgtggccactgtctgatggccatctgatgggrttggggctccgaaggaaaatgggggatgtgtccctcttgtggttgatgtctttttgtctcctgtgcttgaaacagatgccagcaatacagagagaagccg

SEQ ID NO: 26193 - DNA, 201 bp, Homo sapiens
aaaaatacaaaaaattagccaggcgtggtggtgggcgtctgtagtcccagctactcgggaggctgaggcaggagaccgcgccactgcactccagcctgggygacagagcgagactctgtctcaaaaaaaaaaaaaaaaaaaaaaaaaagaaaacaggaagtagggaggggcaaggaggcatctggtgcagtgatctgacta

SEQ ID NO: 26194 - DNA, 201 bp, Homo sapiens
cctcttttctggcttcacttttcagataatgctgtccctggcgttttggtgaccgacctttccccttcctggcatttccataggggctgaggcagagcagytgaaggggcattcccatttcacagatggggaactgagggagagaagtgaaatagcggagcacccagcccgtgccatgggagctgagccagcgggcacgtc

SEQ ID NO: 26195 - DNA, 201 bp, Homo sapiens
ccttggctccccaaagtgttgggattacaggcatgaaccactgcacccagccatgtttttattttatctgagagaaaactgaggttcagaacttaactgtrtacttctggaatcttcacagagaaataaaaaaaaagaaaaataatttactatagattcattaactactacgtggcggagccagggctgatgtctccactg

SEQ ID NO: 26196 - DNA, 201 bp, Homo sapiens
ttcatggctcttactggccactgggcaagactcagatagcaccaaccaaccagtcacagttgtgatgtaggatgtgactgtgaatgacatccctgctgccygcttcagagaaagggctgccacttgccagagaaggaatggtgataatgagggacagccagtccctaagtggagatccctgaaagtggtgaatatcttaga

SEQ ID NO: 26197 - DNA, 201 bp, Homo sapiens
gctgaggcatgagcatcacttgagccctggaggtggaggttgcttgagtcctggaggcggagtgagccaagattgcgccactgcacttcagcttgggctgyagggtgagattctgtctcaaaaaaataaataaataaataaataaaataaaaaaacaattgaggtggatgtctccctaggggtaccccaggaagccacagg

SEQ ID NO: 26198 - DNA, 201 bp, Homo sapiens
ggtcagaggcaagaggagggtgcctctgagcttcaacccctcccaggaacaatgagctcaaattggaagagtccagtggaatcggggggatggtgtgagcrcccctgttcagtctttgacaattgcatacagaaaagcagctggtatgggtttgggtgtcaatgaaagggccaaagactggtggccagctggtttggggga

SEQ ID NO: 26199 - DNA, 201 bp, Homo sapiens
tgagaaacattcaccatatctcaataagctctcctcagccagttggtccttttgtggttgaaaaaagtgccatatctttggttgggcatccaataaaatayggtatttaggggctacctgtatggaaaatccatatccttaaaggttagctcaccaggaggatgttgagaaatggcacagggggctgggcgcggtggctca

SEQ ID NO: 26200 - DNA, 201 bp, Homo sapiens
tctttatgcaggactgttatttcaaaggatggtgtcccctccccaaccataagaacgatccaaacctgttttctggggcccagagtttgctgaggataggmctgggctgaagctttcattgctggtctgtggggtagaggtaagcctcccctgtgaagctggtaggttacatgctttggcaacatgaattgttatttctgg

SEQ ID NO: 26201 - DNA, 201 bp, Homo sapiens
aaagcccatgtctactaaaaatataaaaattagccaggtgtggtggtgggcgcctgtaatcccagctactagggaggctgggcaggagaactgctggaacscaggaggcggaggttgcagtgagctgagattgcaccactgcattccagcctgggtgacaggcaagactctgtctccaaaaaaaaaaaaaaaaaaaggcac

SEQ ID NO: 26202 - DNA, 201 bp, Homo sapiens
ctacaaaggacctgaactcatccttttatggctgcatagtattccatggtgaatgtgtgccacatttttcttagtccagtctatcattgatgggcatttcrgttggttccaagtctttgctattgtgaatagtgctgcaataaacatacatgtgcatgtgtctttatagcagcatgatttataatcctttgggtatatacc

SEQ ID NO: 26203 - DNA, 201 bp, Homo sapiens
ctggtcctgcccgcctggtcctgtggccagcactctccactgtgagtcattcaggcccagtccttgtcctggtggtgcatctgcctcatgatgtcaagcaytgtgggaaaggcacccagcctgccccactccaaaggatgagtatggggaggtggtggtgcttctcaaacccaaggctgtttgtcataccacattccgaag

SEQ ID NO: 26204 - DNA, 201 bp, Homo sapiens
agcttcttatggctcttatgttctgcaggacggatgaactaggtacccaggacaggtctgtttgtgcacaaggctgtctccttctccccctccttggtttytctactgaggctttgttgtgcttggctcagggtgatgttagcaaatgcactctccaccctgctgtgccacattaaggaaacgcatgttgtattggcttct

SEQ ID NO: 26205 - DNA, 201 bp, Homo sapiens
gaactcctgacctcaagggatctgcccgcctcagcctcctgaagtgttgggatcacaggcgtgagcccctgtgcctggccagattaggttctgattttggrgggggaaatggatcagtcagtggctggataaaacagttttattgtttcttgttaaaaataagagtaatacatgcttatggcaaaaaatatagaaaagaag

SEQ ID NO: 26206 - DNA, 201 bp, Homo sapiens
tttatgtcttcttttgtactaagtctttgatatctagtctgtattgtgtgcttgtagcacatctgaatgcaaactggtcacctctcaggggcttggcagcygcatgtggctagagggctgctgtatcagcacaggtttagacaattatgttgtggttgttttggagttcagatttctgtctccttgaatcttgaatatata

SEQ ID NO: 26207 - DNA, 201 bp, Homo sapiens
tgacagcatgccctgatgacctctccctccctctgccttggccgttctggttattttgaactcctcttgtgttctcacagatgctattcaggtttttgacrtcaccgctgtgaacatcagtgccacaagcctgaccctgatctggaaagtcagcgataacgagtcgtcatctaactatacctacaagatacatgtggcggg

SEQ ID NO: 26208 - DNA, 201 bp, Homo sapiens
ccacccccattattaaatcctcaactgctttatttctgatttgcattttccatggctgaatgaatctgctgacttccgttttctttttctgtttcagatcytgtgcgcaggtggcagtgagtacccttttcctctctattcttgtgttgttcgctactgccccctaatggacacacagcaacattaacagcaatgtgaaat

SEQ ID NO: 26209 - DNA, 201 bp, Homo sapiens
tgtctgatggccatctgatggggttggggctccgaaggaaaatgggggatgtgtccctcttgtggttgatgtctttttgtctcctgtgcttgaaacagatrccagcaatacagagagaagccgggcagggagccccaccgcccctgtgcatgatgagtccctcgtgggacctgtggacccatcctccggccagcagtccca

SEQ ID NO: 26210 - DNA, 201 bp, Homo sapiens
acagcaaggaccaagtacaatgttcccctgatatttaatttgctaaaacatgtaagaagaagaaagttcttacattgttaggtcccaaagagagtgccacyaagcaaccttgccaaaaccaccttgctggagcttcttattatctttttttagcgaatggcaataaagtcattttgtcaagctaaccaagtaccataatga

SEQ ID NO: 26211 - DNA, 201 bp, Homo sapiens
ggctcatcatacacagtggagatctttgcacaagtaggggatgggatcaagtcactggaacctggccggaagtcattctgtacaggtgagtgtagccccarctgcctcttggactcctccctgagtggtgctgaccttgcaggtcagtcctcccaagtctgtagtttgtctggttttgtgtgatgtgcagtgatggacatt

SEQ ID NO: 26212 - DNA, 201 bp, Homo sapiens
agcattaactgctgaccttgccatctgtgagcaggtgttgaatgagctcagttccctcccagcccttctttttccctggtgggtcattggctcctgagtargatagatgcatgcaatagaagagctgttaatagcatttactctttcttaatccttattaatcccattcatatttcagtgtctgaaacttggcaggatgtc

SEQ ID NO: 26213 - DNA, 201 bp, Homo sapiens
ttatttcaacatgtaatttctgtgaagtattaatgagttattttatgtcttcttttgtactaagtctttgatatctagtctgtattgtgtgcttgtagcayatctgaatgcaaactggtcacctctcaggggcttggcagccgcatgtggctagagggctgctgtatcagcacaggtttagacaattatgttgtggttgtt

SEQ ID NO: 26214 - DNA, 201 bp, Homo sapiens
tttgtttgctcaaattgcctttataaaatagattgatactctataataagcaaatgttgtgaatttggaattttcaaattgaggcttactaataatgttawctattttatccgagtttatttgggtttcttataaaatgtaatttctcaagaagattttgctgccctaaaaaaaaaaaaaagaaaaagaaaaagacaaaaa

SEQ ID NO: 26215 - DNA, 201 bp, Homo sapiens
atgtgagttcattattgataggcagctgtggcaggaagggaaggatctgaatgcagaattggaggatgagggacttctgttgcatctgaaatcagtgttgrggaaatgacttcacttctgtgaatctctgctgcctcatctttaaagggggataataaactctccttcttgagcatattgtgagggtttgatgagcaagca

SEQ ID NO: 26216 - DNA, 201 bp, Homo sapiens
agctggaaagaaaccaaatgggcatgtagaggtctggggcttgatggcagtgtggcctaggatggcttgtgaggctcacttctgaagccctgcacaaggamtttcttggccagtgtctgcctttcagttccccatgctgtgctccaaccagcccaggaaccagccctgctcagagtgaccatgcacactcgtcctcctgtg

SEQ ID NO: 26217 - DNA, 201 bp, Homo sapiens
ttattgccagcttaacttgtttttatgacatcttcaggaagaaaacctctgctgtctatttaatggagatgaattgttaaacttttaccatttgcaactayacgtctctatgagtcagacttttattgatcgtgtacaactaaatgaaacccggaaatgaaggaaatgtaacaagcgattttatgtattttttgtttgctc

SEQ ID NO: 26218 - DNA, 201 bp, Homo sapiens
ggtatgaactcacacaaacaggttacattaaatggctatataacgcaaggggttgttgcgctccaaaccctttgcgtcatactgtcctggatgtctacctyggactactcctgactgaagcacagccactttccttagaaattggcttgtttttcctgaaagttagaaaactgttaacagaaactaggaattcaagtcagg

SEQ ID NO: 26219 - DNA, 201 bp, Homo sapiens
ctactctaggggcaaagggagctggatggggactgtgtcctaggtcaagggacagctgctgctctgctctaaatcaattttcatgctgaaagcagggcctrttgtaggcagatctgatttttaaagagaaaataagtctggatttttatgagaaattttaagagttggcaagaattgtaaattaaaaaaagaaaaaacaat

SEQ ID NO: 26220 - DNA, 201 bp, Homo sapiens
ttgccatgcacccagggtgcagggagacctgtcttgcaggtgttcaaacaacttttgtcagcctcagtgtcagggacttttgttgcgtagagcagtcaccraatcctatggtgagaagagaaatcgttggagatgggggtgcaggggtggaagctcttatttcagaagacctgttgtgaggtaagactcagaccctcagct

SEQ ID NO: 26221 - DNA, 201 bp, Homo sapiens
ttcagctagcagcagacttctcagcagaaacttacaggccaggagagagtgggatgatatattcaccatgctgagggaaaacaacctgccaaccaagattrctatacccagcagaactggccatcaaaaatgaaggcaagataaaagactttaccagagaaacaaaagctgagggagttcatcaccactagacatgtctta

SEQ ID NO: 26222 - DNA, 201 bp, Homo sapiens
ctggtcaagacagagccctgtggactatggaagggattgaagccattctgtggatcctataggcttcttttctaagcgaatgattagtgtttattcagtarccctatgtcaggtggtttctgtatgaatgagaggtttgcctttccagctgcggcggggctttgggcaagttgctgtctctgtgctccttcgtttgctcat

SEQ ID NO: 26223 - DNA, 201 bp, Homo sapiens
aaaatacctcacagggttgcagtgaagatgtaaggatgatgatgatgacaacagcagctcaaatagatcatttaacttaattctcgccaaagcaaggcagrtacaaagatcatcctgttggcagatacagacagggagggacagagaggttaattaagcaagctacctgcccgcagttacatggccagaagcagtggcact

SEQ ID NO: 26224 - DNA, 201 bp, Homo sapiens
agtttccacatttttaaatgggtggagaaaacaaaatctacaaagaataatgtttcatgacacatgaaaattatgtaaaatatacatttaacgcttgtaartaaagttctgttggaactcagctacagtcgttagtttacatatcatcgatggctggtttcgcagtacaagggcacagtttaaagcctgccaggcctaaaa

SEQ ID NO: 26225 - DNA, 201 bp, Homo sapiens
tgcagcttggaactcttgggctgaagtgattcttcttccttagcctccccagtagctaggactatagtgccaccatgcctggctaatttaaattttttttktgtgtgtgtgtgtggtggagatgggttctcactgtgttgctcaggctggtcttgaactcttgggcttaagcgatcttcccatcttggcctcccagagtgc

SEQ ID NO: 26226 - DNA, 201 bp, Homo sapiens
taccatgtctccttttccagcctcattccctgagatgtagccggagttccagttcagccaacctgcccgttgttttctctcctggaactgggtgtttgagyctcctgcatggagtgttcttccttcccagctaaagtcctggtcatcccatttccatctgaaaggcccccttgttcatgaagcctctcatggtccttcccc

SEQ ID NO: 26227 - DNA, 201 bp, Homo sapiens
gtagcaagcatgcagacattctcatgacatcctggcagatatcaagaccaaagaacatcccatgttccctcttgaaggcttgtaataactgccataaattrtcttgtgggaatggagtggccctggcctaagctgtgctgtaccggactctcctggtgacagttttagtggctgcatatgtttgcagaagaaggaagcgtg

SEQ ID NO: 26228 - DNA, 201 bp, Homo sapiens
aatgctgtgtacacgcttggtcactcttccctttcttgagatgacatgtccccttcttggagacccaagatgattgacaacaataacattcctttacaacrttttcttctcatctagagcactgggaggctgccttttaacagagatatcacagagtagcaagcatgcagacattctcatgacatcctggcagatatcaag

SEQ ID NO: 26229 - DNA, 201 bp, Homo sapiens
gctttggttctcctgtgtgccaggaacagcagtaaactttatgtcctaagattagtatggttggaaatgcatgtggcagtggttcccaaacactggtgtgyagatggaacacagcccgtgaagttttcagcggtccttgttaaaaagagataaaggaaagagataaaggataaagtgctgagattctcgtgaagctaaatg

SEQ ID NO: 26230 - DNA, 201 bp, Homo sapiens
tgtaaagtttaatttttagtcattacaactcctggttagtactcaggctctgcttgatttcccctgcctttttgatgttgttaggcagcctttctgtctgkatctaaatcattttctgggcttttagatccagacaagtgagagtcaccctctgagacagttccatttcacctcctggccagaccacggtgttcccgacac

SEQ ID NO: 26231 - DNA, 201 bp, Homo sapiens
tgatacaaagaagagaaagagagggatcagtttttccaagtgtgcatttcatttcagtgtaaatattttgtgaggtggggcatccctgtctcctggagaartatatttttaatctaattgtttactttctttgcatagcccctagtccaattcctgacccttcagtagcaactgttgccacaggggaaaatggcataacgc

SEQ ID NO: 26232 - DNA, 201 bp, Homo sapiens
gctctccagttttataggtgaggaagctgagctcaagtggttttcctgtggcccacctgggtgtcatagcagagtgagccctggaacccaggcctgcctcrtcctgacttctgtgatctcgggcgatcacatagatcgcagtgttcgctcttgcatcatgtgtgtttgacaacttttctgggtgcccctggccctagggta

SEQ ID NO: 26233 - DNA, 201 bp, Homo sapiens
tccagagcctgagcccttgaccacaggagctcacgcctcctctcatttcctgtgaatgattgtgtgcaatgtaagcacagagcttctgcactctcatgatmaagtgctctctccatggccagaaacagcagtttctgaggggctcatgttgtaggtgatgatacaaagaagacagagagagggatcaggtgtcctaagtgt

SEQ ID NO: 26234 - DNA, 201 bp, Homo sapiens; identical to SEQ ID NO: 5386

SEQ ID NO: 26235 - DNA, 201 bp, Homo sapiens
gagatgaggcaattctcatccctccctcttgcttctttctgttcatcagcttcattctcagagcagctccctctgcacacttaaggagcccagctgctccygtttcacaccctgcagctgccccaccagccagctgccccaccaaccagggtctggtccagggaaacgtgtcttgagtggggtctgattagcaaagtctgc

SEQ ID NO: 26236 - DNA, 201 bp, Homo sapiens
tacttaataaaacaaaaagacgcatgactgacctgatttagaactctttgcatgagagacatgtgctgtgaagaatcatcttaccgtttcggagctggacrgtgccttagaatcatctaggccgatgtctttaccttcaggcccctgcagccctcaggaggggttttgctctatctgcagcactacctgtgcttttctgta

SEQ ID NO: 26237 - DNA, 201 bp, Homo sapiens
gtcagaggtcaaggccagtggtctatcagaacccagttcctgcaggagccagtgccggtactaggtagactcagatgactgaatggtcctcgggatctgarggccagtgggggagatgaggcctggcctcccggaagtgctcagtaaacatttgttaatcatttcctgcctagggaagctctgtggtatgctcaggagaat

SEQ ID NO: 26238 - DNA, 201 bp, Homo sapiens
ggagatgaggcctggcctcccggaagtgctcagtaaacatttgttaatcatttcctgcctagggaagctctgtggtatgctcaggagaatcttgcttctcrtgggggaatgggtggttgtcatttgggtggcctgactgccagcctgcttgctggctctctgggagttggggtggtggcatcaacctgcagaggcggggca

SEQ ID NO: 26239 - DNA, 201 bp, Homo sapiens
acttcaaagaaagtgctgccctcccagtggtgatgaagaccttccgctggccccagcctctgggatctggcctttacttgggtattcatgtggccctgggrgttggctttgctgaagttgggcagagcaggtgggttctggaatgtgcaggggcaaccagagtgtccatctgtttgggtgaagccagctgtttaggtctga

SEQ ID NO: 26240 - DNA, 201 bp, Homo sapiens
tggggtttgggagttgggcgggggaatgacctgtttgaaaataattttgggtgctaatttctgggacccatgttcattttctgtctctctctttcgttttyctatcaggaccagtatgttttcctcaatcagtgtgttttggatattgtcagatcccagaaagactcaaaagtagatcttatctaccagaacacaactgca

SEQ ID NO: 26241 - DNA, 201 bp, Homo sapiens
aggataaaaagcaggcatcttgctggagggtctctgttgctcagtagaaattattttgtaatgttttttgaaaaccacaaacatggacatattatggactrgataccacatttgcatcaggatttttttttcaaccagtacagtacataacaaagaaatctctaccctgcagaccctctgggggtgtgagagcgctccttg

SEQ ID NO: 26242 - DNA, 201 bp, Homo sapiens
ccttgctgtaggtaatacttgctttgaagtactggtgtggatggcctatgccctggcagtcttactaggtgggactggctgtcctctcattctcatgggawtggcctcatgctggtagctgacttcctccccgtgagaccgtaggtctaaactaacaaggtttacacatgtgacaaacatccaggttgccagggctcaaaa

SEQ ID NO: 26243 - DNA, 201 bp, Homo sapiens
aacacctggcctcaagtgatcctcctgctttagcctcctgagtagctgggaccacaggcttacaccaccatacctggcaaattttttttttttttttttttggagaggcagagtcttgctccgttgtccaggctggagtgcagtggtgtagtcatggctcgctgcagcctctgtctcctgggcttaagccattctcctgcc

SEQ ID NO: 26244 - DNA, 201 bp, Homo sapiens
gatgggtggggaccatctgtgctctcctggaaaggaaattgtggtttctttcttttcttttttctttcttcttcttttttttttttttttttttttttagyttatgggaaagggagacttgtgtctcaattgagtctttgtggcgttgtattacagagagtcacagaaaatgttctatgtaaatgactatgtgctctgatt

SEQ ID NO: 26245 - DNA, 201 bp, Homo sapiens
tggcagtttctgaggggctcatgttgtaggtgatgatacaaagaagagaaagagagggatcagtttttccaagtgtgcatttcatttcagtgtaaatattktgtgaggtggggcatccctgtctcctggagaaatatatttttaatctaattgtttactttctttgcatagcccctagtccaattcctgacccttcagtag

SEQ ID NO: 26246 - DNA, 201 bp, Homo sapiens
aggaggaaatgaaggctcagagaattgagtaacttgcttgaagtccaaagctgaggagtggagccagaattcaaactcgagtttgtctggcttccgaatcstgctatttcctcagcacagtggccgtcctccaaggctgtcacatgttccttccctggtgattcacggcacctggctacctccttttagactcactttgtg

SEQ ID NO: 26247 - DNA, 201 bp, Homo sapiens
ggatgggtgctattttccaaggaaagcccctcctggtggggggccataggaaacagctggtgcaaaggcctggaagactcactggcatctttctggaatarcaaggatcagcttggtgggaagtggaatgagctgggggtggagtggggtggggtggattttggagtctgagcttgagatacctgcttggagatgctgagc

SEQ ID NO: 26248 - DNA, 201 bp, Homo sapiens
tctattaaggaacatttcaaactttgacagattcagaaggaatgatatgatgagcgccatgttcccttcacccatagtgttctgcatttggccagtcctakttcctctgcgcccccagctgggcgatgttaatgtgctcccagctgtcacatcaggccactgatagacgccacagtgtgggatgctactttcaaatgatat

SEQ ID NO: 26249 - DNA, 201 bp, Homo sapiens
tcatttgcttgtgccgagccgccaagtgccccctcctgctggcgacaggtccggatgtgggccagttctcagcccagggaaaatgaacagtgtcttctccrtggtgcccagaacagtctgagtcagtggaatgtgctggccagtcaggcagaagggaacttccacttcttttttaaaaccttggtggaaactgtgctggca

SEQ ID NO: 26250 - DNA, 201 bp, Homo sapiens
accttgtttgtttaaagaccattaaagaacgtcttcaatttattctggattgagttttcctcaaaccaaaccacccctcagttcaccccccagagctgttsaggcccttcctgggggcttgtggctgtggctgcctcagatcagagcagaccctgggctgcatcatccttccacattgtctctctaaagtacctgaagcca

SEQ ID NO: 26251 - DNA, 201 bp, Homo sapiens
ttctgggttccttccggctgtccaaatcaaatttaattttcacacccagaccttgtccctgctctcatccttcagcccaccctcctgttccccattcagcyagaccccctgccagtcagttcaagtgctaggcatggggtatcgagtctcaggccggtccacagacattccagcacctggtggtaagaggtgagtgctgcg

SEQ ID NO: 26252 - DNA, 201 bp, Homo sapiens
ccggtccacagacattccagcacctggtggtaagaggtgagtgctgcgtggacccactgaggaaggctctggctgtgctgggggaggggagtttatgctcrtcctcatagaaggataagcaggaattaagtgggcaaaggagggagtgaggaagctctcactttctaggtagtaggaccagcatgaaccaaggtaggggat

SEQ ID NO: 26253 - DNA, 201 bp, Homo sapiens
ctgccaggctgggttgggagatgaatgtgtatgcatgtgtgaatggattcatttctgatgataaaaatactttatgcttatttatgtgaaacttggaaaayagaggaaaagtataaaattgaaactaaaagtcatccataatccttctaagtagctttatcatttaatgttttagtatatttccttcctgttttttttttt

SEQ ID NO: 26254 - DNA, 201 bp, Homo sapiens
attcatttctgatgataaaaatactttatgcttatttatgtgaaacttggaaaatagaggaaaagtataaaattgaaactaaaagtcatccataatccttytaagtagctttatcatttaatgttttagtatatttccttcctgtttttttttttttccttaattctgggtgtatgcaaaggattttgtaaccctttacat

SEQ ID NO: 26255 - DNA, 201 bp, Homo sapiens
tgcccagggagggttagatacctgggaggatagagcagaggccctccttctccccgacccctcgcctctgcaggctggtggggaggggggcaggggagtcsagttaccctctctccacgctttcttcttgtgtatgtgtgcgtgtacgtgcgtgtgtgtgttgtgtgtgtgtgtcttgggggatggagaacccctctcagg

SEQ ID NO: 26256 - DNA, 201 bp, Homo sapiens
gttgtatttttaaaatagagccgatcccagtttctgatctccgtgttgccctcacgggtgtgaggaaggctgctctctcctggagcaatggcaatggcacygcctcctgccgggttcttcttgaaagcattggaagccatgaggagttgactcaagactcaagacttcaggtcaatatctcgggcctgaagccaggggttc

SEQ ID NO: 26257 - DNA, 201 bp, Homo sapiens
aaactgtgttcttgaaaaaattatcacgcccattttagagatgaggcacagagaggtggagggacttgcccagatccaggtatgtggctctcctgtaatckcgcttctattgctttgtgatcagcagcaacttagtagctttcaaagcttcaattttcttgtgtgccaaatggggctaataaataccttagaggattgtga

SEQ ID NO: 26258 - DNA, 201 bp, Homo sapiens
tcttttaaaacccgctcccagcactgaaccccagtcattcttaatgaaggtgactgcatatatcttgttccattaatgcatgttgtatttttaaaatagarccgatcccagtttctgatctccgtgttgccctcacgggtgtgaggaaggctgctctctcctggagcaatggcaatggcactgcctcctgccgggttcttc

SEQ ID NO: 26259 - DNA, 201 bp, Homo sapiens
acagagtctgaagttcaggaaatacagcaagagccttcctcagggatgaaacatgtgatcttatggtctgactagcctcaagccagctgagctcattgccrtgcaacttggtagttaatgattgctagtaagaagtttaaaaggatcatcccctcaaagaatgtcagagttggaaaagaccttagggacattaggctagga

SEQ ID NO: 26260 - DNA, 201 bp, Homo sapiens
agatgtgtgccacctctcctgggtaattttaaaattttttttttgtagagatgggggtctcactatgttgccacagctggcctccaagtcctgggctcaarcgatcctcccgtcttggcctcccaaagtgctaagattataggtgcaagccacctctcctggcttgcttctttcccgtaaattgaggtgtgttattccact

SEQ ID NO: 26261 - DNA, 201 bp, Homo sapiens
tttttgtatttttactacaggcagggtttcaccatattggtcgggctggtctcgaactcctgacctcaagtgatccacctgccttgcccttccaaagtgcwgggattacaggcgtgagccactgtgcctggtcttatatttcttttctatttttctaccctgatcaaccttttcttttctatctctctcactgtttctacg

SEQ ID NO: 26262 - DNA, 201 bp, Homo sapiens
agtctacgaagaggggtgcctcaggcccatggtaaattttatgtaagtgttggttgtatataagatgatgaagtccgggcgcggtggctcatgcctgtaaatcctagcactttgggaggccgaggcaggcagatcacctgaggtcaggagttcgagaccagcctggccaacatggagaaaccccgtctctactaaaaatac

SEQ ID NO: 26263 - DNA, 201 bp, Homo sapiens
ttgcagtgagccaagatcacgccattgcactccagcctgggcggcaagagcaagactccgtccctaaaataaataaataaataaataaataaataaataawtaaataaataaaataaaataaataaaaaaagaggttaaggtttatacgcaggccatttctaatagatgttatggaagccccaggttttggggcatcaggg

SEQ ID NO: 26264 - DNA, 201 bp, Homo sapiens
tactaaaaatacaaaaattagccgggcgtgttggcatgtgcctgtaatcccagctactggggaggctgaggcaggagaatcgcttgaacccaggaggcggwggttgcagtgagccaagatcacgccattgcactccagcctgggcggcaagagcaagactccgtccctaaaataaataaataaataaataaataaataaat

SEQ ID NO: 26265 - DNA, 201 bp, Homo sapiens
aaccaattagttacaaagtagggtctagaaatcagatttcctgaatcatattttagtgttttgtgaataatagtactctgaccccctcttgccaaattatrccctgggttttgttgttttgggaagattgtttactgtcatttctagagtatgaatgagtctttctaattgcatattttttctttccctttctatcatgaa

SEQ ID NO: 26266 - DNA, 201 bp, Homo sapiens
ccaccatgcccggctaatttttttgtagtttttagtacaaatggggtttcaccatgttggctaggctggtctcgagctcctgacctcaggtgatctgcctkccttggcctcccaaagtggtgggattacaggtgtgagccactgtcccaggccagatggaccattttaaagattaggtaactgagctctaggggtcaagag

SEQ ID NO: 26267 - DNA, 201 bp, Homo sapiens
cgcaatctctgctcactgcaagctccgcctcccgggttcacgccattctcctgcctcagcctcccgagtagctgggactacaggtgcctgccaccacgccyggctaattttttgtattttttttttttttagtagagatgggttttcaccatgttagccaggttggtctcgatctcctgacgtcgtgatccgcccacctcg

SEQ ID NO: 26268 - DNA, 201 bp, Homo sapiens
ggggacctagttatgagtcctgtttcttttttttttctttttttattttgagactgagtctcgctttgtctcccaggctggagtgcagtggcgcaatctckgctcactgcaagctccgcctcccgggttcacgccattctcctgcctcagcctcccgagtagctgggactacaggtgcctgccaccacgcccggctaattt

SEQ ID NO: 26269 - DNA, 201 bp, Homo sapiens
gtgttcccctttactgtgaccagtggcttcataggggacctagttatgagtcctgtttcttttttttttctttttttattttgagactgagtctcgctttrtctcccaggctggagtgcagtggcgcaatctctgctcactgcaagctccgcctcccgggttcacgccattctcctgcctcagcctcccgagtagctggga

SEQ ID NO: 26270 - DNA, 201 bp, Homo sapiens
atgagcttggtcatttaaaaaaatttattttttcctagttaggtaacagtggtataacaacattaaaagaaatgtagaaactagagaaaggaaaaaaaaaagccctttatcccccccatcacaaaactattataatttcaaaatagttacaagtacaatgtattccaagtggcttcttatttaagataattatattcacag

SEQ ID NO: 26271 - DNA, 201 bp, Homo sapiens
ccccatatcacttcttattatctcataatattcttaccttttgcagtgacagccccaaagtgtgtgtgtgtgtgtgtgtgtgtgtgtgtgtgtgtgtgtgtgtttggggtggggatcataataatcctgcaggtggggtttagctctggtgaaaagagcacagatcctttgatttgggtttgaatcccagcacttcctctt

SEQ ID NO: 26272 - DNA, 201 bp, Homo sapiens
agaaacaaaagtgtaggctgggtgcagtggctcacgcctgtaatcttagcactttgggaagccgaggtggggagatcacttgagcccagaagttcaagatyggcttgggcaacatagtgagactccgtctctattaaaaaaaaaaaaacaagtctaacatcaggtagacttcagggctgtgaaagaagtgacatagggtaa

SEQ ID NO: 26273 - DNA, 201 bp, Homo sapiens
gtttgtgtttgctaaacatatctttagctgcgtaagagaaagaaggaaaatagtaaagatgaacagtactgttttctacttgaagttctagttggcccccmctcccttccatgtaggaaccttagcttgctttccacaccctcccaccactggactcacaaaggcccctgatgagtgcctccggtaagacagggggaaatt

SEQ ID NO: 26274 - DNA, 201 bp, Homo sapiens
tgaaggaggctcctctagtgaaagaaaaaggcatccagtgttaatagtatttcttcccagttgcatggggcttgcatattagagataaaggaaacatcttwgctactactgagccataagtggtctcacctttcttgaaacataaggccgtcttggtttgttgttctgttttgtgcttttcacagaggcatggacactgaa

SEQ ID NO: 26275 - DNA, 201 bp, Homo sapiens
actccaaacagaggatgtcggtatagacaatccctaggatcttgtcccctttatgactgatcacacagttccactgcttgcccttgaggctttggtgtccrcgcatgcctattcagtctgacccacaagaggccaggccagctctgttccaggtgctgaaaatcccattaaaactccactcactagcctgttccctggggg

SEQ ID NO: 26276 - DNA, 201 bp, Homo sapiens
ggtctgtaaaatcccaaacccaggtagataaaaccaagaagtgacagggctggaagggatcttaggaattagttcataaagaacttcaggctcagagaagrcatgtgagttgcctaaggtcacacagcaaatctgaagcaaatcagggctagaaacccatagacgatggtcatgagcactggttttgagtcatccatttga

SEQ ID NO: 26277 - DNA, 201 bp, Homo sapiens
tgactgatcacacagttccactgcttgcccttgaggctttggtgtccacgcatgcctattcagtctgacccacaagaggccaggccagctctgttccaggygctgaaaatcccattaaaactccactcactagcctgttccctgggggtgctgaatcagcatttaatggggaaggccacgagctaggctctggtgggtagg

SEQ ID NO: 26278 - DNA, 201 bp, Homo sapiens
gactgatcacacagttccactgcttgcccttgaggctttggtgtccacgcatgcctattcagtctgacccacaagaggccaggccagctctgttccaggtsctgaaaatcccattaaaactccactcactagcctgttccctgggggtgctgaatcagcatttaatggggaaggccacgagctaggctctggtgggtagga

SEQ ID NO: 26279 - DNA, 201 bp, Homo sapiens
cttggtgactgttcagtggtaggcaaatgtcagaacccagtatgcaaatgtggaagtggacagatttgagtcagttatctcagctggtgttatgaaatacrgaaatttttggcgttggtggtggagggcgttggcataggaggcgtgaatgctctttgtttcttgctgttatgggagtatctcttgattgccccatcatct

SEQ ID NO: 26280 - DNA, 201 bp, Homo sapiens
atttttctctagatagcaatttacactctcattatagtgtgtgagaatgcctgtttctttacagcttcatccacaatgaacattataataatgaacacccygcccccctccttttgtaacttgaataggcaaatgaaaaagaagcaaactgtgctaggcctttcttggattgctgtaaagaaacaccacctgagactgttt

SEQ ID NO: 26281 - DNA, 201 bp, Homo sapiens
tgtaatcgtagctacttgggaggtggagacaggagaatttcttgaaccgggtgggggaagttgcagtgggctgagattgtgccactgcactccagcctggrcaacagagtgagactctgtgtcaaaaaaaaaaaaaaaaaaaggttccattcaagatgtcaagccccacgggactgagggtaacatgagggtaacagacag

SEQ ID NO: 26282 - DNA, 201 bp, Homo sapiens
tggtgctcattgaattgagccacagccccaaggtcatgttttcaaggttggcatttgggaggccttgtcagaaggtcttataccatattccagtcacccaragtgctgcccgccatgcctgttcgttcagcaggatttccctgagcacctgctctgtgccaagccctatgctaagcaccaagggagtaaatatggagggca

SEQ ID NO: 26283 - DNA, 201 bp, Homo sapiens
gcagcaagctgactccaactgtgggttcgcagaggaatacgaagtatgttgctgtaaatactgtttttaattgtgtcaggttccaacccaagctgggatcygaggggagttggtggatgggtggcaggtagctgaaagaacactcgagggactgtaggcagttgggacatggctttattctctctcctacagagtcagcag

SEQ ID NO: 26284 - DNA, 201 bp, Homo sapiens
tgttctttttcttttgttttacagagctgagtttggtgaaacttcaggaggttttagctagtggcgatccaaagacattaaatattgctttgtgggtacgwctccaccttgcgtcttacttggtgactgttcagtggtaggcaaatgtcagaacccagtatgcaaatgtggaagtggacagatttgagtcagttatctcag

SEQ ID NO: 26285 - DNA, 201 bp, Homo sapiens
ttttgttttacagagctgagtttggtgaaacttcaggaggttttagctagtggcgatccaaagacattaaatattgctttgtgggtacgtctccaccttgygtcttacttggtgactgttcagtggtaggcaaatgtcagaacccagtatgcaaatgtggaagtggacagatttgagtcagttatctcagctggtgttatg

SEQ ID NO: 26286 - DNA, 201 bp, Homo sapiens
gtggccccgtttccttctagaagttgagttccctgggcttgtgagaacccttgtacatctgcctccattaaactcacatttggagatctcgtaaatgaacscagtgcagtccgggggcagagtgaaggctcagactgcagccggacatggctcagttaccctaggtgggttagcagctgagcaggtactggtctcaaaacc

SEQ ID NO: 26287 - DNA, 201 bp, Homo sapiens
ggccccatatcacttcttattatctcataatattcttaccttttgcagtgacagccccaaagtgtgtgtgtgtgtgtgtgtgtgtgtgtgtgtgtgtgtgtgtgtttggggtggggatcataataatcctgcaggtggggtttagctctggtgaaaagagcacagatcctttgatttgggtttgaatcccagcacttcctc

SEQ ID NO: 26288 - DNA, 201 bp, Homo sapiens
cctggccccatatcacttcttattatctcataatattcttaccttttgcagtgacagccccaaagtgtgtgtgtgtgtgtgtgtgtgtgtgtgtgtgtgtgtgtgtgtttggggtggggatcataataatcctgcaggtggggtttagctctggtgaaaagagcacagatcctttgatttgggtttgaatcccagcacttc

SEQ ID NO: 26289 - DNA, 201 bp, Homo sapiens
tacctggccccatatcacttcttattatctcataatattcttaccttttgcagtgacagccccaaagtgtgtgtgtgtgtgtgtgtgtgtgtgtgtgtgtgtgtgtgtgtttggggtggggatcataataatcctgcaggtggggtttagctctggtgaaaagagcacagatcctttgatttgggtttgaatcccagcact

SEQ ID NO: 26290 - DNA, 201 bp, Homo sapiens
gctgtgtgaccctgctatctgcacagggacttgagcctctcagaatctgttactgcatctggaaaatggaaatctggaaatgtcactgcatctgtagcaayaaccaggccattttgttactaggtttaagtgagggaaggcatgtaaggcactcagtccagatcatggcacttagtaggcctgagcacatttgctcccacc

SEQ ID NO: 26291 - DNA, 201 bp, Homo sapiens
taagattataggtgcaagccacctctcctggcttgcttctttcccgtaaattgaggtgtgttattccactgcttaaaagcctacatggcttcatatcgctsttagtataaacccaaacagtggtctgcaagactctgaaccttagatcaggatgatcagacccctccctcccctccaccctccgacctcatcctggctacc

SEQ ID NO: 26292 - DNA, 201 bp, Homo sapiens
taaaaagtcatggagaaggttttctgtgtgcagctaagagaggaggtggcagacatttatttatttatttatttatttatttatttatttatttatttatwgagacgaagtctcactctgttgcctgggctggagtgctgtggcacgatctcggctcactgcaacctccatctcccgggttcaagcgattctcctgcctca

SEQ ID NO: 26293 - DNA, 201 bp, Homo sapiens
ggagcaggctgaggtcacccagcaaggtattagagaagacaagatgggaacctgggtcaccggcctgggcctcatattttcaaagtgctatttttttttttcccgtgttttcactttgatcttacttttaatgatagggacgtatcactgtgtcttctcaaaatggtgggtgtgaatggaatttttcaaagttgaatcaat

SEQ ID NO: 26294 - DNA, 201 bp, Homo sapiens
tgaaaggctaaataaagagaactttttattttttccatgttaatacatggatgatattaaccatgatgtttaatagctacagaatactgcatgaaatggakgtactataattcatttagcctttttcgtatttagagatttaagcagtagccaatttttcaccattacaagtggtgcaaggaccaatatcttcatgaatac

SEQ ID NO: 26295 - DNA, 201 bp, Homo sapiens
tcaggattaatttccagatatctttctggtattagacacataccacttgcctaataacgttccaaaaggaattcattgtttacattgctattagaacataygagattgcctgtttcattatgtccgtcccagcactgggtattatcattaaaaaaaaaagattttaaatttatttattgagttatttacttgagacagagt

SEQ ID NO: 26296 - DNA, 201 bp, Homo sapiens
caatttttgcttttgttgctgtgctttttgtgtggtatccaagcaaccattgtaaatactatgtcaagaagctcttccccaatgtgtttttttttttttttaaacaaattttacagtgtacagctttaggtctaatgtttaaggcttgaatctattcagagtttatttttgtgtctggtgtaagatagaggtccagtttta

SEQ ID NO: 26297 - DNA, 201 bp, Homo sapiens
cgtctcagcctcccaaagtgctgggattacagggtgaaccactgcgcggcccattaggtgctcagtaatttgttgaatgaattgaagacatgggacttgarttaggcttttattattattattattttttgagacggagtctcactctgtcacccagtctgggagtgcagtggcgtgatcttggcgcactgcaacctccgc

SEQ ID NO: 26298 - DNA, 201 bp, Homo sapiens
tccagtgtgccacacgctttcttgccactaggtccttgcatgtgatggagtaactcttgtacctctgtctccctaaatagacggggttctccaaggacatygtgccacagggcctggtaacccagtaggtgctcagtaatttatttatttatttattttttttgagacagagtctagctctgtcgcccaggctggagtaga

SEQ ID NO: 26299 - DNA, 201 bp, Homo sapiens
tgtcctcatctgtatgatggggataacaagaatacctactttataggattgctgtggaggattaaatggatctgcatgacaaatgcttagcatgaaaaaawccctcaacagatattggctgctattttattatcttattgtgctgagacactggcataatttacaattcaaaaattaaatttttttaatcttatactgtag

SEQ ID NO: 26300 - DNA, 201 bp, Homo sapiens
tcggcctcccaaagtgctgagattacaggcgtgagccactgtgccaggccccattttttgttttttggttaactccctgttcattaaaaaaaaaaaatctrtatctatagatagatagatatagatataatctttgttatcaatttgtataagctctttggaaattagtccttcgattgtcatttgtattgcaaacacatt

SEQ ID NO: 26301 - DNA, 201 bp, Homo sapiens
gtttcttaagtctgggggacaggcactgagcagaggccgtggtggggaacaggagcctgtcttcatggctcttactggccactgggcaagactcagatagyaccaaccaaccagtcacagttgtgatgtaggatgtgactgtgaatgacatccctgctgcccgcttcagagaaagggctgccacttgccagagaaggaatg

SEQ ID NO: 26302 - DNA, 201 bp, Homo sapiens
tgtgtgtttcccttctaatataatgccactgatgatattataattaataggtaacattatgcatgacaggcactgtgtgctaagggttttaatgcattatytcatttggccatttcagaaataccaagaggtaggtgctgttcttgtttatttgtttgttttttttttttgatagggagtcccactctgtcacccaggctg

SEQ ID NO: 26303 - DNA, 201 bp, Homo sapiens
tggagtgcagtggcatgatcttggctcactgcaacctctgcctcctgggttcaagtgattctcctgcctctgcctcccaagtagctgggattacaggcacrcacaccatgcccagctaatttttgtaattttagtagagacggtgtttctccatgttggccaggctggtctcgaactcctgacctcaagtgatctgcctgc

SEQ ID NO: 26304 - DNA, 201 bp, Homo sapiens
tctaaactaacaaggtttacacatgtgacaaacatccaggttgccagggctcaaaagagggttcacatcgactcccttctcattcactgagtcctttttcrggagctttggccgagtttgtgctgcgtctgggcatctaggtgtcgagttcttccctagtgttttcagcctcggcttcctcctctgtaaaatgggagtaac

SEQ ID NO: 26305 - DNA, 201 bp, Homo sapiens
taaataaataaataaataaataaataaaataaaataaataaaaaaagaggttaaggtttatacgcaggccatttctaatagatgttatggaagccccaggktttggggcatcagggttggaaaggaagccaaaaatgggtgtgtccaaaggacagatgcattgagaatgggttgtaaaatttcagccattgtgtagattaa

SEQ ID NO: 26306 - DNA, 201 bp, Homo sapiens
agatgttttgagtttatcctccaataggcaatgaagttgacaaggttttatgaaggaataaccaagtccctggagtcctgtggctgttgccacagtaatgygtcctgctgtaaacaggacaggtgtgtcctgttgagaatgtgagcgggctcttccagcctcctggtccctcctgactctgccacgcccctcacctcactg

SEQ ID NO: 26307 - DNA, 201 bp, Homo sapiens
ggatgtgcacacaacctatcaagaatacttcactttgtgaggcccaaaaacagctcctagcacagtgtagagcagacttggtcagaacttcaatccttgayttttttttttttttaacccgaatttcatgaggtttttctgagacatccactggactgtcatataccgtgtgctgggctctcattttatccttacaattat

SEQ ID NO: 26308 - DNA, 201 bp, Homo sapiens
gactcaatatagggtgggatagggcggtgggtaaaagccgttacaattttgtccaaatggtatgggctgatttacttattagggaggtacaaatggcttcrtgttataaagtgtcaagatccttatttggataaggcaaccagagtgtagacgagagagtaagagtaagaaaacaaggagaaaaatgagtgtcttaaggat

SEQ ID NO: 26309 - DNA, 201 bp, Homo sapiens
ctttcctttcagaacagaacaatccatatgcatgtatactccaaggcaaccccttgacttttctgggaaatttactttcttgggaataacctaagttattkctgaataaaatgaatcttaagagcatggctctacatcaggaactctttcctttctttccacttccaggtgacttgctcatagattttacagaacaaactg

SEQ ID NO: 26310 - DNA, 201 bp, Homo sapiens
aaaagtgaaaaggaatagccgaaattggtattaatagcattttacttaacttagtatattaaaagtattatttcaacatgtaatttctgtgaagtattaatgagttattttatgtcttcttttgtactaagtctttgatatctagtctgtattgtgtgcttgtagcacatctgaatgcaaactggtcacctctcaggggct

SEQ ID NO: 26311 - DNA, 201 bp, Homo sapiens
tctttctggtattagacacataccacttgcctaataacgttccaaaaggaattcattgtttacattgctattagaacatatgagattgcctgtttcattaygtccgtcccagcactgggtattatcattaaaaaaaaaagattttaaatttatttattgagttatttacttgagacagagttttgcttgtctcccaggctg

SEQ ID NO: 26312 - DNA, 201 bp, Homo sapiens
aaaaagtgaaaaggaatagccgaaattggtattaatagcattttacttaacttagtatattaaaagtattatttcaacatgtaatttctgtgaagtattaatgagttattttatgtcttcttttgtactaagtctttgatatctagtctgtattgtgtgcttgtagcacatctgaatgcaaactggtcacctctcaggggc

SEQ ID NO: 26313 - DNA, 201 bp, Homo sapiens
caccttggctcctcaaagtgttgggattacaggcgtgagccaccgtgcccagccaatattttaaatttaatgtttacatttgcacacatgccaattgggcwtcatggtggctgcctcacaccactttttgtccgtgtgtgagactcacatagaggctgttttctgtgatccttttttaaaaaataattacatttttttaat

SEQ ID NO: 26314 - DNA, 201 bp, Homo sapiens
aaaaaagtgaaaaggaatagccgaaattggtattaatagcattttacttaacttagtatattaaaagtattatttcaacatgtaatttctgtgaagtattaatgagttattttatgtcttcttttgtactaagtctttgatatctagtctgtattgtgtgcttgtagcacatctgaatgcaaactggtcacctctcagggg

SEQ ID NO: 26315 - DNA, 201 bp, Homo sapiens
tggtaggaaacaaaggctcctcccagtggcttctctgtaaggagaatccacttaaaattaaaaaaaaaattaattttggagtagatagtacgtaaacatgrcacaattttttttgttttttggacaaggtgtttgcagtgaaagcatttcccttttttgtcccctacctgcccatttcctctccctggaggtgacgtttgt

SEQ ID NO: 26316 - DNA, 201 bp, Homo sapiens
gccaatattttaaatttaatgtttacatttgcacacatgccaattgggcttcatggtggctgcctcacaccactttttgtccgtgtgtgagactcacatakaggctgttttctgtgatccttttttaaaaaataattacatttttttaatgctcagggaaaatgtcaaataattgtttatgttttgtactgaaatctgcac

SEQ ID NO: 26317 - DNA, 201 bp, Homo sapiens
gatacacaaatatatgtgtgagtatacatatatttaatacatatatatttaatatttaatacacacacacacacacacacatatatatatatatatatatwtttttttttttttttttttttttgagacagtcttaccctgtcacccaggctggagtgcagtggcatgatcttggctcactgcaacctccatctcctgggt

SEQ ID NO: 26318 - DNA, 201 bp, Homo sapiens
ataggttatcaagatccaggggagagaagaacttacttaaagtcacaaaaccaattagttacaaagtagggtctagaaatcagatttcctgaatcatattktagtgttttgtgaataatagtactctgaccccctcttgccaaattataccctgggttttgttgttttgggaagattgtttactgtcatttctagagtatg

SEQ ID NO: 26319 - DNA, 201 bp, Homo sapiens
ttttaaacatatacatatagatacacaaatatatgtgtgagtatacatatatttaatacatatatatttaatatttaatacacacacacacacacacacayatatatatatatatatatttttttttttttttttttttttttgagacagtcttaccctgtcacccaggctggagtgcagtggcatgatcttggctcactg

SEQ ID NO: 26320 - DNA, 201 bp, Homo sapiens
cctctgctcatgcttcgttgagcaaaacttagtcacattgcaacatctagctccatgggagctgggaaatgtggtctttgtttccaacaggtatgcacacacagggctaaaaatctgggtgggtatgatgaagggaaaatgggggaatggattttgggggtcaagactggtctctctctgctgtccctccctgaacagagg

SEQ ID NO: 26321 - DNA, 201 bp, Homo sapiens
aaaaaaaaaaaaaaaaaaaaaaaaaaaaaagcaagctcatacctccagcctgggttttgagagcctgtctgaaaaaaacaaaacaaaaccctcaagtaaayaacctaatgtagcacgttaaggaactagaaaaataagaacaaactaatcttcaaattagtaaaaggaacaaaataataaaggtcaaagctgaaataaatg

SEQ ID NO: 26322 - DNA, 201 bp, Homo sapiens
ttataccctgggttttgttgttttgggaagattgtttactgtcatttctagagtatgaatgagtctttctaattgcatattttttctttccctttctatcrtgaagacctaaaaagtgagtaatctctttattttttttaataacttgtacttttctattgaatatggacttcactgaatgtaaaaaatcctgataagttt

SEQ ID NO: 26323 - DNA, 201 bp, Homo sapiens
aaaactctgtgattggaaagtcacttctggaaactagacatatagagcagacctcactcttacatttctttttgaagtgcaataattttttttttttttttaacaatatagggcccagtcctgtgtttgacattaaagctgtttccatcagtccaaccaatgtgatcttaacttggaaaagtaatgacacagctgcttctg

SEQ ID NO: 26324 - DNA, 201 bp, Homo sapiens
taaaactctgtgattggaaagtcacttctggaaactagacatatagagcagacctcactcttacatttctttttgaagtgcaataattttttttttttttttaacaatatagggcccagtcctgtgtttgacattaaagctgtttccatcagtccaaccaatgtgatcttaacttggaaaagtaatgacacagctgcttct

SEQ ID NO: 26325 - DNA, 201 bp, Homo sapiens
ataaaactctgtgattggaaagtcacttctggaaactagacatatagagcagacctcactcttacatttctttttgaagtgcaataattttttttttttttttaacaatatagggcccagtcctgtgtttgacattaaagctgtttccatcagtccaaccaatgtgatcttaacttggaaaagtaatgacacagctgcttc

SEQ ID NO: 26326 - DNA, 201 bp, Homo sapiens
gagctcttagatgaggatattgatgtccagagaagacagggagcaggctgaggtcacccagcaaggtattagagaagacaagatgggaacctgggtcacckgcctgggcctcatattttcaaagtgctatttttttttttcccgtgttttcactttgatcttacttttaatgatagggacgtatcactgtgtcttctcaaa

SEQ ID NO: 26327 - DNA, 201 bp, Homo sapiens
cccagaagaagcatcttcaaaatccacattcagcagttcattttgataatggatatttcagggaatcagtgcatttttgagctggaccagactttcaagayagctgaaacccctcagagctcttagatgaggatattgatgtccagagaagacagggagcaggctgaggtcacccagcaaggtattagagaagacaagatg

SEQ ID NO: 26328 - DNA, 201 bp, Homo sapiens
aaaaataaactttcacatcatgttacccctggatacatttttgtggccatgcatctgcacgaatattcaatccctgctacaggcaagacactgagtgggaygttgcagggctaccaaggtgaggaggtcccaacccctgtcctcaaggagttgatgtaacacctacccaggattaatttcatttctctcagaggtcattaa

SEQ ID NO: 26329 - DNA, 201 bp, Homo sapiens
aatagaactggtaagcaaataggcttttctgttaaaccatcatgtttcttaaaggaaatcagtataattaataaacataatgtttccaaatattgtttttsttttaattatctaagaaaaaactttaaaaattttcataacactaatgcttatttattatatgaaatacagacaagtaagtagaaaaaacttacatggaaa

SEQ ID NO: 26330 - DNA, 201 bp, Homo sapiens
tgagattacaggcatgaggcactgcacctggcccaaatcttctcagttctaaatggctgtgataaaaactacattgacaatttttttttttttttttttttggagatggagtctcgctctggtgcccaggctgaagtgcaatggcgcaatcttggctcactgcaagctccgcctcctgggttcacgccattctcctgcctc

SEQ ID NO: 26331 - DNA, 201 bp, Homo sapiens
atcctcttggaaaaccccacgcttatcaggaaaaggagatggaagtgaaaaaataaaaatatatataaaaaaaggaaaacctagtgttagcaccccttatscagcaggccccccacctggacccccacctgtattcacattcctcccacacttacagtcagtggcttcattaatctctaaggttccatgttctgctcccca

SEQ ID NO: 26332 - DNA, 201 bp, Homo sapiens
ctcatagagcttttttcttcttttttgtatatccaggatttctttagcggtcttttgtaattatagtaaaagcactgaggttagatttatgggttttttttgaggaggatagactgaatccctttcccgcctcaaggctatagtgggtcggcacagtttgtgtttgctaaacatatctttagctgcgtaagagaaagaagg

SEQ ID NO: 26333 - DNA, 201 bp, Homo sapiens
gtatatgggaataagtggggtgctggatcttgtgggcaggctatgggatctgggaaaggggttagcacctgggcctggagggacctggaatctaggggggscatacatctaagctaaatgtggctgtggcttgcaaactcagaggcctttcgggcagcctggtgaaatgataaatgggcagttgctgtttattctcagtcc

SEQ ID NO: 26334 - DNA, 201 bp, Homo sapiens
ggtgctctcattttatttttagagctatattttagctctaacgtgattgttgggtgaacacttgcagaatgaaatatgactgacacctaccagctgtctayacattcctggttatatcttaggaaggcagtgtgtgctagcaccttgggaagagaatgttgagttcaaatcctagttttgccccttgcaccaataccttga

SEQ ID NO: 26335 - DNA, 201 bp, Homo sapiens
tttcctgaatcatattttagtgttttgtgaataatagtactctgaccccctcttgccaaattataccctgggttttgttgttttgggaagattgtttactrtcatttctagagtatgaatgagtctttctaattgcatattttttctttccctttctatcatgaagacctaaaaagtgagtaatctctttattttttttaa

SEQ ID NO: 26336 - DNA, 201 bp, Homo sapiens
tttcttcaacttcacaccttagtttctttacttgtaaattgggttgatagtgggctgctgtcagaattaaggacatcgttttgtcaaggattttgcatacrggaagtcatggtgacagctgttgttactgttgtcctgaggagtggggacaggagaggaggaaaacaggctggtccaggtgtctttccttaaaggaggctc

SEQ ID NO: 26337 - DNA, 201 bp, Homo sapiens
ccagcttggccaacatggtgaaacaccatctgtactaaaaataccaaaaaaattagccaggtgtggtggcatgcacctgtaatcccagctacttgggaggytgaggcaggagaatcgcttgagcctgagaggtggaggctgcagtgagccgagatcactccattgcactccagcctgggcaacaagagtgaaactccatct

SEQ ID NO: 26338 - DNA, 201 bp, Homo sapiens
gcccattcagagaagctctgaaccctgcaaaagctcccacgtggaggccagtgagctggttataatccagagactgtcagtttttcctagtacatatttgracctgagcctttgtttctgcaaagagtctggtactgactcacacagtgtcagcagcccccttccatcccctggcacacccctccctcattcctactgagc

SEQ ID NO: 26339 - DNA, 201 bp, Homo sapiens
gggtatgcgtgctttcagttttgatacatactgccaaattaccttccagaaagtttttcttaaataccaatgcagagttgagtcaacagtgcaggagtgtrcagatgcctcaccaacttgccagttccggatctgatatgttttttggtttattgcattcatttatcagaaaagctttctcaaaaacaaagtatgaaataa

SEQ ID NO: 26340 - DNA, 201 bp, Homo sapiens
ggaaaattttagaagttttaggtgtaaatgcagctggtaagatccttatgacttagtttcttttttttcttcttttcttttctttctttctttcttttttyttttttttttttttttaagacagagtctcactctgttgcccaggctggagtgcagtggcgcgatctcagctcactgcaacctccgtctccccagttcaag

SEQ ID NO: 26341 - DNA, 201 bp, Homo sapiens
tggggaaaattttagaagttttaggtgtaaatgcagctggtaagatccttatgacttagtttcttttttttcttcttttcttttctttctttctttctttytttttttttttttttttttaagacagagtctcactctgttgcccaggctggagtgcagtggcgcgatctcagctcactgcaacctccgtctccccagttc

SEQ ID NO: 26342 - DNA, 201 bp, Homo sapiens
tgtaagtacatgtaggattttcatgtagaggagttggggaaaattttagaagttttaggtgtaaatgcagctggtaagatccttatgacttagtttctttyttttcttcttttcttttctttctttctttctttttttttttttttttttttttaagacagagtctcactctgttgcccaggctggagtgcagtggcgcga

SEQ ID NO: 26343 - DNA, 201 bp, Homo sapiens
tttgttcaaagccaaatgttgctacttctgaagacgagtgcaccttatgggtatagccagctataatgtttatcaaacatatactttttttttttttttttgagatggagtttttgctctgtcacccaggctggagtgcagtggcatgatctcagctcactgcaacctccacctcccaggttcaagtgatttctcctgcct

SEQ ID NO: 26344 - DNA, 201 bp, Homo sapiens
gtggatctcaaactttagcatccatcagcatcaccaggagggtggttctaccctcagagtttctaattcggaattgcgtttctgccagtttctgggtgatyctactgctgtggcaccagggtgcacacttggagtggtactgtccccaggatagtgggagcccttcaggcatcatttcttttattgttctttaattcatgg

SEQ ID NO: 26345 - DNA, 201 bp, Homo sapiens
tccctcttgcttctttctgttcatcagcttcattctcagagcagctccctctgcacacttaaggagcccagctgctcccgtttcacaccctgcagctgccycaccagccagctgccccaccaaccagggtctggtccagggaaacgtgtcttgagtggggtctgattagcaaagtctgcttcacagagctgtccctggaaa

SEQ ID NO: 26346 - DNA, 201 bp, Homo sapiens
cctgggaggcgggggttgcagtgagccgacatcgcgccactgcactccagcctgggccacagagcaagatttcatctcaaaaaaaaaaaaaaaaaaaaaaagaaaaagaaaaaaagaaatgcaggtaggtgcttctagctactgctgtgggatagcaaggtagttaccaaactgataagggtagcatcttacttactgctg

SEQ ID NO: 26347 - DNA, 201 bp, Homo sapiens
atttatttatttttattttttatttttttgaaacggagtttcactgtgtcacccagccacccaggctggagtgcaatggtacaatcttggctcactgcaamctccgcctcccgggttcaaaggattctcctgcctcagcctcctgagtagctgggattacaggcacccgccaccacacttggctaatttttgtatttttag

SEQ ID NO: 26348 - DNA, 201 bp, Homo sapiens
gcagaagcaaatatgagaatccagctgtttcttactaagcagacattaaagagatttgcaaatatctaaaataatgctatctctctcacttttttttttttgtattggaaacatcattttccatacaatgtcatttatgttaacaggtgacagatttatttatttttattttttatttttttgaaacggagtttcactgtg

SEQ ID NO: 26349 - DNA, 201 bp, Homo sapiens
gattccagggcatatgcacatggcctcccttcccctcaaaatttacaaaagcaaatccaattaaattgtgcaggcattctaggaagtcaagtttatgtgcyttttttctttttcaaggatgctttgaaaatagaggcagtgccatgaagcagcattggtatctgttgatgggtgtgtgcattggcataactctctgctgtt

SEQ ID NO: 26350 - DNA, 201 bp, Homo sapiens
aagccattctcctgcctcaccctttgagcctccttaattttttatttatttattttttttttgtagagacagggtctcattatgttgtccagcctgatatkgctatttttttttttttaatggcgatgtagtaatcttgctttgttgcccaggctgttctggaactcctggcttcaggtgtgtgccactgtgcctggccca

SEQ ID NO: 26351 - DNA, 201 bp, Homo sapiens
ttatttggttagaaatatggcatcaggagcggccacttgctgttaggagtaattgataacagttacattaataggattccagggcatatgcacatggcctyccttcccctcaaaatttacaaaagcaaatccaattaaattgtgcaggcattctaggaagtcaagtttatgtgccttttttctttttcaaggatgctttga

SEQ ID NO: 26352 - DNA, 201 bp, Homo sapiens; identical to SEQ ID NO: 5405

SEQ ID NO: 26353 - DNA, 201 bp, Homo sapiens
ggttttcacatatatgggcagtgtcccaacaggctgctggggggtggccgtttgtgatggcctcaccagtctttcccagagagggaagtgcacatttttargctacttttgctctgactgatacacttggctgcctaacaaaaagccagagaagaactaagatttttagcatcattcaaaatgcttgccattccttttgct

SEQ ID NO: 26354 - DNA, 201 bp, Homo sapiens
tgtaagggagagtggttgaggtcaagatctgggttctggttcttgtgcctcctctctggctgtgtgtccttcaacaagctgcttactgtctctgggcctcygtgccctctgcaactgggttgttggtctatttaaatacttggagaaaaaagctgggcatggtggctcatgcctgtaatcccagcactttgggaagccaag

SEQ ID NO: 26355 - DNA, 201 bp, Homo sapiens
ccagggaggttgagactgcaatgagctgtgattgcgccactgcactccagtttgggtgatgcagtgagatcccatctctaaataaaaaaaaaataaataawgcccctagcatggtgcctggcacatggtaggccctcaaaagatgaccctccaaagtggccaggactcaccatgcattcagggaatatggattcttttggt

SEQ ID NO: 26356 - DNA, 201 bp, Homo sapiens; identical to SEQ ID NO: 5392

SEQ ID NO: 26357 - DNA, 201 bp, Homo sapiens
gttctgggaagcctctgtggaagggaggttttgttaagtgaactcccctggtaaacggagtgattggcccccaattagcttgctgttcggattaactgtartacatcacactttcgaaagtgaagatatgcctattttttcccctctaggtctataaagtagatttttgccattagtaaaatttaaagtgattgggggcta

SEQ ID NO: 26358 - DNA, 201 bp, Homo sapiens; identical to SEQ ID NO: 5393

SEQ ID NO: 26359 - DNA, 201 bp, Homo sapiens
ttccccaatcctgcttcctggaggtagccaatgtttatagtttggtgtacatctttataagactctttatgtacatctgtaaacacacacacacacacacrcacacacagtactttgaaaaaattggatgctgttttttttttgagatggagtcttgctctgttgcccaggctggagtgcagtggtgccatctcagctcac

SEQ ID NO: 26360 - DNA, 201 bp, Homo sapiens
atgcaggagcctgtgctagcagttgaccattaacatgggaacgccacctcccagcgggcactgctgccgcatacttgcgaggttgctgaagcttgtagttyagagcaggaccatcccactagatgtgcaatgtgagcctcaggtataatttaaagttttctagaagccacactgaaaaaaaagtgaaaaggaatagccgaa

SEQ ID NO: 26361 - DNA, 201 bp, Homo sapiens
atacaatcatttcagtagatgcagaaaaaacatttgaccaaaaaatattgttaactgtgctttcttttctgaacttaagaacttgcttttccaaaaccttmccagaatccctgtatgaatcaacaaaatttagttcttaacacatttctccttctttaaaatggtgacattagctgggcatgatggtgtgtgcctttaatc

SEQ ID NO: 26362 - DNA, 201 bp, Homo sapiens
ttccctgcgggccttggccattcctgtcctggcctttactggcagtctctattctaaaatgtgggcatcccacatgaggtccagcttctcctgagatcccyggaggtgcagctgctgtgatggtgaccttgtttagcagatgctccctgcagtccaaactcccacccatcgtcctgccctttgatccatttcccatgaact

SEQ ID NO: 26363 - DNA, 201 bp, Homo sapiens
ccttccccaatcctgcttcctggaggtagccaatgtttatagtttggtgtacatctttataagactctttatgtacatctgtaaacacacacacacacacrcgcacacacagtactttgaaaaaattggatgctgttttttttttgagatggagtcttgctctgttgcccaggctggagtgcagtggtgccatctcagctc

SEQ ID NO: 26364 - DNA, 201 bp, Homo sapiens
gtttagagcaggaccatcccactagatgtgcaatgtgagcctcaggtataatttaaagttttctagaagccacactgaaaaaaaagtgaaaaggaatagcygaaattggtattaatagcattttacttaacttagtatattaaaagtattatttcaacatgtaatttctgtgaagtattaatgagttattttatgtcttct

SEQ ID NO: 26365 - DNA, 201 bp, Homo sapiens
cattcagagaagctctgaaccctgcaaaagctcccacgtggaggccagtgagctggttataatccagagactgtcagtttttcctagtacatatttggacytgagcctttgtttctgcaaagagtctggtactgactcacacagtgtcagcagcccccttccatcccctggcacacccctccctcattcctactgagcatt

SEQ ID NO: 26366 - DNA, 201 bp, Homo sapiens; identical to SEQ ID NO: 5396

SEQ ID NO: 26367 - DNA, 201 bp, Homo sapiens
taagtctgcagaactgaccccctggagagtcaccaccttggtcacagacagcagagggaggaatcaggaagtctctgctgtagttgcgggatccaggggtstatgttctgagctgtgatcctgggatcaggaagctgcagccaccgctgaggttttggttctagagccaggcagcgtgagctccagtcattgcatccacac

SEQ ID NO: 26368 - DNA, 201 bp, Homo sapiens
acatgctttccttgcactggcacattgtatgctcacaatagccctgtgatgtggttggaagtagccttattttatagataggaagccaaggctgagagagktgctagacaggtatcacagctggaaagtggcagaggtgagattaagcctctggtatttctcacctggagcctgcgcttgtaactctctttccagtgtgga

SEQ ID NO: 26369 - DNA, 201 bp, Homo sapiens
taagccattctcctgcctcaccctttgagcctccttaattttttatttatttattttttttttgtagagacagggtctcattatgttgtccagcctgatattgctatttttttttttttaatggcgatgtagtaatcttgctttgttgcccaggctgttctggaactcctggcttcaggtgtgtgccactgtgcctggccc

SEQ ID NO: 26370 - DNA, 201 bp, Homo sapiens
ggagaagaaatctctctgccatcactttcttatgattctccttctgtgtacctttcttagctggtcacccttctgcagatgtcctgaaatacacgtatgasgatttcaaaaagggagcctcagatacttatgtgacatacctcataagaacagaagaaaagggacgttctcagagcttgtctgaagttttgaaatatgaaa

SEQ ID NO: 26371 - DNA, 201 bp, Homo sapiens
gacacaggatgcatgatgtagtaatggtgactgttggctgaccacacgccaagcttcgtgtgacatgctttccttgcactggcacattgtatgctcacaayagccctgtgatgtggttggaagtagccttattttatagataggaagccaaggctgagagaggtgctagacaggtatcacagctggaaagtggcagaggtg

SEQ ID NO: 26372 - DNA, 201 bp, Homo sapiens
agctaaagatggattcagtgttttttttttctttttctttttttttttttgaggcggagtcttgctctgtttcccaggctggagtgcaatggtgcgatctyggctcactgcaacctctgccgcccagattcaagcaattttcctgcctcagcctcccaggtagctgggatgacaggagcccaccaccacgcttggctaatt

SEQ ID NO: 26373 - DNA, 201 bp, Homo sapiens
gctataggaattgagactaagttggagctgggtgatcagggaaggttttaaggaagagatctgggacaaatagctaaagatggattcagtgttttttttttctttttctttttttttttttgaggcggagtcttgctctgtttcccaggctggagtgcaatggtgcgatctcggctcactgcaacctctgccgcccagatt

SEQ ID NO: 26374 - DNA, 201 bp, Homo sapiens
agcattatttatttatttatttagttagttagttagttcttgagatggagtctcactctgtcacccacgctggagtgcagtggcatgatctcagctcactrcaacctctgcctcctgggttcaggtgattttcctgcctcagcctcctgagtagctgggattacaggggcccgctaccacgcccagctaatttttgtattt

SEQ ID NO: 26375 - DNA, 201 bp, Homo sapiens
aaattgaggtgtgttattccactgcttaaaagcctacatggcttcatatcgctgttagtataaacccaaacagtggtctgcaagactctgaaccttagatyaggatgatcagacccctccctcccctccaccctccgacctcatcctggctacccactccctgttcacagactacagtcacctggctctagtacaacagac

SEQ ID NO: 26376 - DNA, 201 bp, Homo sapiens
tgttttcttatatatattttacatgacaaaattatatttaaaacatattaaactttaaaaaaccatagtttataatttataagccatgtagcatatttctrtttttgagacaggatcttactctgtcacccaggctggagtgcagtggctcgatcatggctcactgcagccttgacctcctgggctcaagtaatcctcctg

SEQ ID NO: 26377 - DNA, 201 bp, Homo sapiens
tggtctgcaagactctgaaccttagatcaggatgatcagacccctccctcccctccaccctccgacctcatcctggctacccactccctgttcacagactrcagtcacctggctctagtacaacagacacttgaacctaccccgcccctctccctcagggcctggtactatcctcctcgctccttcttatcactcaggccc

SEQ ID NO: 26378 - DNA, 201 bp, Homo sapiens
ccctctccactgtgactgtttcctgggaaactagtcaggggctggttttataggaattatccagtcgtattattattattattattattattattattattattattattattgagactgagtctcgctgtgtcgcccaggctggagtgcggtggtgccatcttggctcactgcaacctccgcctcccaggttcaagcaat

SEQ ID NO: 26379 - DNA, 201 bp, Homo sapiens
cccctctccactgtgactgtttcctgggaaactagtcaggggctggttttataggaattatccagtcgtattattattattattattattattattattattattattattattgagactgagtctcgctgtgtcgcccaggctggagtgcggtggtgccatcttggctcactgcaacctccgcctcccaggttcaagcaa

SEQ ID NO: 26380 - DNA, 201 bp, Homo sapiens
aatgagaagacaattactgttgtgcatcaaccatggtgtaacatcacaggcttacgtccagcgacttcatatgtattctccatcactccaggaataggcartgagacttggggagatcccagagtcataaaagtcatcacaggtaagatgactggctcccagggatgatgacaaaccatttcttattatggtgtattctag

SEQ ID NO: 26381 - DNA, 201 bp, Homo sapiens
tcccctctccactgtgactgtttcctgggaaactagtcaggggctggttttataggaattatccagtcgtattattattattattattattattattattattattattattattgagactgagtctcgctgtgtcgcccaggctggagtgcggtggtgccatcttggctcactgcaacctccgcctcccaggttcaagca

SEQ ID NO: 26382 - DNA, 201 bp, Homo sapiens; identical to SEQ ID NO: 5406

SEQ ID NO: 26383 - DNA, 201 bp, Homo sapiens
tcagggacctctttttgctctttgttatcccacagggcttgtgtggctggcttcaccaacattaccttccaccctcaaaacaaggggctcattgatggggytgagagctatgtgtccttcagtcgctactcagatgctgtttccttgccccaggatccaggtagggagaagacaacagtcctggcactggttcagtggcat

SEQ ID NO: 26384 - DNA, 201 bp, Homo sapiens
ctaggagagattcctagaaatgagttcactgagaatatgagcttaagagaaagtgaggatttaaagccagatctgtctgccttcaaatccagcgctctttmtactgatgtgagttctcctgtcttttttacctatcagaattctagaactctcccagagaaaccaggcagatactgctccacaccggtgagctgcttctca

SEQ ID NO: 26385 - DNA, 201 bp, Homo sapiens
atgccactctgactctgtgaacttgtcactttataaagaggaaattcaagcttggaggggccttctggcatgacgtttattgaattgtggggcacaagatrcttccctgcttgttccattttcctttctcttgtttattctcctgccttatttatttattttttcttttgagacagagtcttgctctgttgcccaggctgg

SEQ ID NO: 26386 - DNA, 201 bp, Homo sapiens
cccactggctctgtttggttcctctgggctcacacacagggagctacgtatgtctctctcatttcctttggtatgttctctgggttaaatgtccccagctrtctgatctgttccctgcgggccttggccattcctgtcctggcctttactggcagtctctattctaaaatgtgggcatcccacatgaggtccagcttctcc

SEQ ID NO: 26387 - DNA, 201 bp, Homo sapiens
aatgttacgtgggttgtaaatgtaattgttaatattatttaaaaatttttgaaaagtgatttttagtggtggccttatcatatctacatattattactccmccattttgggatgtttaggtcgaatcctggttttttcttcttttgctgttgtaagtcatgtatattggcaattagcctaggagagattcctagaaatgag

SEQ ID NO: 26388 - DNA, 201 bp, Homo sapiens
aagtctctcaaattatgagctttattttaaatcctccaatctgttcggtgactatctataaataatttttgatggaacttgctgtcatttttcctgattgrcacattttgaccatgaccatctggaagtttttgctagctctgttttctgcaaggaatctatgttttattagtctcctgaagttggcttccttgtcatgtt

SEQ ID NO: 26389 - DNA, 201 bp, Homo sapiens
catggtttcttggatagtattacatagggtgaagctaattttatttcagtaaaaaatatgcaggtcaatttaaataaaaaaatagataatagtataaatgkcttgtggctacagtaaaaatgatgatggtacttgaatgtccaaattaatttaagtgatatatgtgttcatagataccatttcattttaacgtggttctgc

SEQ ID NO: 26390 - DNA, 201 bp, Homo sapiens
ctgatatttcgttgaaagtcattgtcttactcatccttgtataagataagtcacacaatgagtggtatcagggttgcagggtttccccctgtgaggacacratgggatgaaccgtgtgtgggatggtctgttaaagaaaaacaagaagccatgtgttggaaacaacctaagtattgagcggtggaggattgctgaaattgt

SEQ ID NO: 26391 - DNA, 201 bp, Homo sapiens
agggtttttctgtgtggctcaggctggacttgaattcctgagcccaagtcatccttccgcttcagccaattgagtagctgggattacaggtgcactgtccstcccagcaagttgggtctttaaataaagagtggggtttggtgagcagggtgggtgcactgttctaggaggtgggcaggacagaggtcagtggtggtccct

SEQ ID NO: 26392 - DNA, 201 bp, Homo sapiens
ggggtttcaccatgttgtccaggatggtctcgatctcttgacctcatgatctacctgcctcagcctcccaaagtgctgggattacaggtgtgagctaccaygcctggccattttttttttttttttttttttgagacagagtctcactctgtcacccaggctggagtgcagtggcatgatcttggctcactgcaacctccg

SEQ ID NO: 26393 - DNA, 201 bp, Homo sapiens
gaatacagagtagagaagggtcaccttgtcatgttggtattggaagatactgcccagatgaggagcttcgcctgcaacagttagggaggtgttttgcgaayatttgaattaaatacatggtaaagatgttagtttgtaatatgtttttagtatatttttctccatctattagatttaaaaaacagattagaaattaaatgt

SEQ ID NO: 26394 - DNA, 201 bp, Homo sapiens
ggtcacagcccatgtggcaagaccccccatgatgccttgcacaaggtcagcctcctgggcccagagcaggtgagggaagggcagtggatatgtcgggaggrtggagtgggcaggtggtgaataactggcactcgggttatcttttcttgaggttaggattgctctccagttttataggtgaggaagctgagctcaagtggt

SEQ ID NO: 26395 - DNA, 201 bp, Homo sapiens
tgactttggacatgttccttaactttctttatcttggtcttctcatctctgtaaaattgggatcataatggcaccaacttatagttttttttttttttttwtttcttttgagtcaggatctcaccctgttgcccagactggagtgcagtggtgtgatcttggctcagcccttgggctcaaacgatccccccacctcagcct

SEQ ID NO: 26396 - DNA, 201 bp, Homo sapiens
aaagcaaggcagatacaaagatcatcctgttggcagatacagacagggagggacagagaggttaattaagcaagctacctgcccgcagttacatggccagmagcagtggcactgaacgacttccttcaggcggtctgagtccaggtctcagctcttagccatcactccatggttctgtgctgagacaagggatgtagaaag

SEQ ID NO: 26397 - DNA, 201 bp, Homo sapiens
aaaaaaaaaaaaaaaaaaagaaaacaggaagtagggaggggcaaggaggcatctggtgcagtgatctgactagtttcagttctttgttactccctgaaggycctttcctgagaaaggaactcagataaaacaaatacaagtttcaggctttaatagcagaagggtaaatttctatgtttattcaaaaacaacttgtctatg

SEQ ID NO: 26398 - DNA, 201 bp, Homo sapiens
tgaacattagagcatgcagtttgctgagatgtcttgtacttagaaaatccaatttataaaaaacctcaaatagaacagtaaatttagggaattttttttttctgatgataaaattagataactctgttgcatggattctgtaaaacacagctccctcctgttacgccatgaattgggttcaatttacaacacccctttagg

SEQ ID NO: 26399 - DNA, 201 bp, Homo sapiens
tcaaccaatttgtggagagtccattttgcaaagccttagcacagtgccaagcacaagctacacacccgggatgctgctgaatgcagatgagagcatgccarctctgctgaagttgggggctgggggcagtggatggctgtgagtggtgtgaagccccgggccacagtgaagaccctggaatggctgagagactgggattcc

SEQ ID NO: 26400 - DNA, 201 bp, Homo sapiens
tttcaccattacaagtggtgcaaggaccaatatcttcatgaatacagcattttctgtaaagcagaaattctttcttcaggattaatttccagatatctttytggtattagacacataccacttgcctaataacgttccaaaaggaattcattgtttacattgctattagaacatatgagattgcctgtttcattatgtccg

SEQ ID NO: 26401 - DNA, 201 bp, Homo sapiens
cattttgaaaacgaggcagtgtcagctcccacagaaggtctaattttaaacatgcaaataattttcagttccacttttccttcttcctgttagagggaagytgtcccctgttgccatttctgaaacttgggcggacaatgtcgttattgtgttacaaacgatttgcgtctccagggcaggagttgggtgatatttttctgg

SEQ ID NO: 26402 - DNA, 201 bp, Homo sapiens
atgtttgttcacagagccattcaaagtgcagtggatacattataaattgtacaattatttgtaattaaaaaaagaacaacagcaaaaaacccaaagtgcartggatgcaaagaccaatggattttcatgtaacagaatatgaaaagttcaccgacacagtttcacattccacgatgcagagaagtttttaataactgccat

SEQ ID NO: 26403 - DNA, 201 bp, Homo sapiens
tacgtagtgtgacctctagtcagcaaatggccacttggctgtattttaaatttaggtacactttgctgcttggggtccatcttgaggggattgcctttttyaggttcatgtttgttcacagagccattcaaagtgcagtggatacattataaattgtacaattatttgtaattaaaaaaagaacaacagcaaaaaacccaa

SEQ ID NO: 26404 - DNA, 201 bp, Homo sapiens
cttttccattaaagtgtggatggtgtactgtaaacaaagactagctctcttgagctgccacgtttctataacttatagaaacagaagctgttttttttttctaaagatccaaactcatgttgccacacaaacaacaaaataaaccagtgtgttccaaaaacaagcatttgctctacccacacgcacagttggaaagatgca

SEQ ID NO: 26405 - DNA, 201 bp, Homo sapiens
caatggcgtgatctcagctcactgcaacctctgcctcccgggttcaagcaattctcctgcctcagcctcccgagtagctagaacacaggtgcccgccaccacatccggctaattttttgtatttttagtagaggtggggtttcatcatgttggccaggctggtctggaactcctgacctcaggtgatccacctgccttggc

SEQ ID NO: 26406 - DNA, 201 bp, Homo sapiens
caaaaataaacataaaaataaacactttatgtacacaatctcacatcactttcacagtcttggaaggcagatatttctgttatcctcattttacagctgaygcctatctaaggcttgtataaaagtcagtcactgtccaggctcacacagccaatgctggagggctgtgtggcacccagagagcacagttgctgcttggaa

SEQ ID NO: 26407 - DNA, 201 bp, Homo sapiens
ttaaatttaggtctgtcttgttctgcagtccatataccatataactttgccaaatacaacactatggtgtgtgtgtgtgtgtgtgtgtgtgtgtgtgtgtgtatgcacatgtgtggcctttattgaacactgtggtgtgtgtgtatgcacgtgtgtggcctttattgacttattgaattgatcctgaatcttccctactcc

SEQ ID NO: 26408 - DNA, 201 bp, Homo sapiens
tccgtgagtccacgtgtgcccttgtctctgcttgctgtgcctttctctttcctccacgttgctaaattccgtccatttttcaaggctcagttcagatcatycttctttgctttatcattttacatactgtgtatggtttggcctcttggtctgctgctctctgtgtctgttgtatggagcgcttttctatctggtattacg

SEQ ID NO: 26409 - DNA, 201 bp, Homo sapiens
ccatgtccctacaaaggacctgaactcatccttttatggctgcatagtattccatggtgaatgtgtgccacatttttcttagtccagtctatcattgatgkgcatttcggttggttccaagtctttgctattgtgaatagtgctgcaataaacatacatgtgcatgtgtctttatagcagcatgatttataatcctttggg

SEQ ID NO: 26410 - DNA, 201 bp, Homo sapiens
cctggccagcatggcgaaacaccatctctactagaaatacaaaatttagccgggcatggtggtgtgtgcctgtaatcccagctactaggggagctgaggcwggaggatcgcttgaacctgggaggtggaggttgcagtgagccgagattgtgccactgcactgcagcctgggcaacagagcgagactctgtctcaaaaata

SEQ ID NO: 26411 - DNA, 201 bp, Homo sapiens
gtcagtactagacttagcattgttatgttattttgtccagaggagggtgaggtagtacaatcagagacggggaaactgaggtggtgctgcttctggctcakcctgacacttgcagttctaaggttattatttcatctcttaagttgggcaagtttgtgtgtatgcttttgagatgacaataatatttataaaacataattc

SEQ ID NO: 26412 - DNA, 201 bp, Homo sapiens
agctgctcaggaggctgaggcgggagaattgtttgaacctggcaggtggaggtgcagtgagcagagatcatgccactgcactctggcctgggcaacagagygagactctgtctccaaaaaaaaaaaaaaaaaaaaaaaaaaaaaaaaatcttcagtgcagggcctgtctgctctccagggaaggctgcagtattgtcaggt

SEQ ID NO: 26413 - DNA, 201 bp, Homo sapiens
attggaagccatgaggagttgactcaagactcaagacttcaggtcaatatctcgggcctgaagccaggggttcaatacaacatcaacccgtatcttctacmatcaaataagacaaagggagaccccttgggcacagaaggtggcttgggtgagttacaaagggtaccttccgtctcccttactggttcttactttcagtaa

SEQ ID NO: 26414 - DNA, 201 bp, Homo sapiens
ttaatagagatggggtttcaccgtgttagccaggatggtcttgatctcctgaccttgtcatccgcatgcctcggcctcccaaagtgctgggattacaggcrtgagccaccgcgcccggcccggaatacccttaaaatatagccagaaagggctgaggatgggtaagaacccaggatatagagtcttcccataaaagggagg

SEQ ID NO: 26415 - DNA, 201 bp, Homo sapiens
aaagtccactggctttcgtctctctctgccgtgacacatatcggaatctactgtatatatatatatatatatatatatatatatatatatatatatatatrcactaagctctcaaaaacagtcattcctatgaattgaggtgtacaaagtttgaatttgtatcaaagatgtaattattatttttaaaaccttttcactata

SEQ ID NO: 26416 - DNA, 201 bp, Homo sapiens
actcctctgctcacctctaaccaaagagccacctaattgttctgcatggtgaccattgcctgttagattcttggtgaatagattcctagcctcatcttttkttatttttatttttttaataaatggtagaatgaggatgcaggaaacttggaaaagcagagtcaaagttcaactagcacaggagcagaaggtaaattctgt

SEQ ID NO: 26417 - DNA, 201 bp, Homo sapiens
cacatcagtaagatggggaatgacaacccttatgggactgcagtgaggcttagccaagttggtgctgtggaaggccctactggattccaaagcatgatacrgatgatgaatactttatgtggctgaggtgcttccagcaggcacgtgggaagcatccatgtaagattggggtcatgcaaaatggggtgggatcacatcgcg

SEQ ID NO: 26418 - DNA, 201 bp, Homo sapiens
ttggggtcatgcaaaatggggtgggatcacatcgcgggatgaagcacttggatgcaaaggcctgtgtggtccagcctgagtctggctcaacacacagggtyggatcctggctgcgctccttactgctgtatgtacagatttggctcagagggaatgcaggattggcaacatgcatctagtctttcttgtggtctcctggtg

SEQ ID NO: 26419 - DNA, 201 bp, Homo sapiens
tgtgatggtaggtggtacccacaatgatggcccttcaggggatttgaagattgtgaaggaggaccaagaggagctgtttggaccacctgtgatccaaggcrggaactaggaagacacctaccggaagtctttgtggatcttttgggattggattggattagcagatacagagcgtttgacctatagtaaccagctgactgt

SEQ ID NO: 26420 - DNA, 201 bp, Homo sapiens
gtgctctgtgcacctgggatagagcaggagcaagacacatcattcctgccctcacagggttatggtctcctaggtgacaaggtagtgcacacttccatagstcttactctgggacaagtactgtgccaaatgcttcctcccagccgcctgatgaggtagctactgttagttatcaagtctgatttacaggtgaggcaaaga

SEQ ID NO: 26421 - DNA, 201 bp, Homo sapiens
tcctggccagaccacggtgttcccgacaccactgacctgctcatcaacttccggtacctcgttcgtgactacatgaagcagagtcctcccgaatcgccgaytctggtgcattgcaggtacgcagatggcacgtcacgtgtgacagatttcaaatgtcattatatatttatgagcactttacaaaagcaaagcctaagaggg

SEQ ID NO: 26422 - DNA, 201 bp, Homo sapiens
agctgtttggaccacctgtgatccaaggcgggaactaggaagacacctaccggaagtctttgtggatcttttgggattggattggattagcagatacagarcgtttgacctatagtaaccagctgactgttcagcaaacgcttcacttcctaaaaggcttcttctttccaaggcaaactggggcatgtgaggaacaggaac

SEQ ID NO: 26423 - DNA, 201 bp, Homo sapiens
ttaaaggatacctctattccccaggtcctttattgattcatcttatttttatttgtataataaatcattagaatagtgcctggtgctctattgcactcacktgcatatactgtataaagctttgtacatattacttgtttagtcctcacagcagccctaggaggtaggtactattattttgctcattttgcaggcaagaaa

SEQ ID NO: 26424 - DNA, 201 bp, Homo sapiens
ggtcatcccatttccatctgaaaggcccccttgttcatgaagcctctcatggtccttccccctaccccagccaggtatactttctctcctcttggaattaycctataggaagaacatggtggcttgacctgggttccagtctcacccatctgtttacctggggagtgatcttgagtgggtcaatttatgttctcagtgcct

SEQ ID NO: 26425 - DNA, 201 bp, Homo sapiens
ttttgcacattcattgttgtattagagtttgtttttttgtcttaccttgttttaataaattataatcttatgggagatgacactgtcttttctttgtttcrtatataaaaagtgttttgctgatatacgtagaatcaagttggtctggagttactctggataagggatgaaatcagggagctcttgtgttcaaaggggcct

SEQ ID NO: 26426 - DNA, 201 bp, Homo sapiens
tttctcctcattttttagcttccatttttacttcctttagtattgagaaagtaccaggctcacttcaaagagttgacttcaaagctcccaccagctcagamatacttgccactgaagcctgtaggaattggcatcaatggaagaccctgtggcggttgcatttaagattttttttgggacttctatttttataattctttt

SEQ ID NO: 26427 - DNA, 201 bp, Homo sapiens
attttttagcttccatttttacttcctttagtattgagaaagtaccaggctcacttcaaagagttgacttcaaagctcccaccagctcagacatacttgcsactgaagcctgtaggaattggcatcaatggaagaccctgtggcggttgcatttaagattttttttgggacttctatttttataattcttttaaatggtaa

SEQ ID NO: 26428 - DNA, 201 bp, Homo sapiens
aaaccccgtctctactaaaatacaaaagaattagctgggtgtagtggtgcatgcctataatcccagctactcaggagacagaggcaggagaatcgcttgamtccgggaggaggaggttgcagtgagccgagattgtgctatagcactccattctgggcgacaagagcgaaactctgtctcaaaacaaaacaaaacaaaact

SEQ ID NO: 26429 - DNA, 201 bp, Homo sapiens
gaagcctgtaggaattggcatcaatggaagaccctgtggcggttgcatttaagattttttttgggacttctatttttataattcttttaaatggtaaaggrggagggttacaaaatatctgcgcctttaagatatcaaacataagccagtgaagttccaaaaaaaaaaaaaaagatgtcttagagaaatgaaaaggatttt

SEQ ID NO: 26430 - DNA, 201 bp, Homo sapiens
gaacaactcttttttctttttctttttctttttttgtttttgagatggagtttcgctcttgttgtacaggctggagtgcaatggcgccatctcagctcacygcaacctccacctccccagttcaagtgattctcctgcctcagcctcccgagtagctgggattacaggcacgggccactatgcccggctaattttgtattt

SEQ ID NO: 26431 - DNA, 201 bp, Homo sapiens
agaccagagatctcatgggtttgtgtttcttcattgatacttttaaggggagcaacttaatcagtgggaaaccagatctcaaaggatgggacagataaacscagggtacagagaagagcttgggggagtgtcaagcttatttgcccaaaagggctgaccctaccttaccgccattaatacatgtccttcatgcatccctgg

SEQ ID NO: 26432 - DNA, 201 bp, Homo sapiens
aagttattctggtttgcagactgggagacaggtttaatgacacagtcatgtcagagagaggggaagaggagaatacgtagggggtctgttttgatgtgtawgtacatgtaggattttcatgtagaggagttggggaaaattttagaagttttaggtgtaaatgcagctggtaagatccttatgacttagtttctttttttt

SEQ ID NO: 26433 - DNA, 201 bp, Homo sapiens
ttcaatacaacatcaacccgtatcttctaccatcaaataagacaaagggagaccccttgggcacagaaggtggcttgggtgagttacaaagggtaccttcygtctcccttactggttcttactttcagtaactaaatgttctaaaaaataaattgctcttccatgtgtatggagatttagaatttataaagggcttttcct

SEQ ID NO: 26434 - DNA, 201 bp, Homo sapiens
gagttactgagtatcaagtggtggggctggaacccggagtctaactctagaccactgtggtgcagtgatgttcataacagctatccacagtcaccgagctrggaatttattggttctgcattacttaataaaacaaaaagacgcatgactgacctgatttagaactctttgcatgagagacatgtgctgtgaagaatcatc

SEQ ID NO: 26435 - DNA, 201 bp, Homo sapiens
atgtaaatgatgagttaatgggtgcagcacaccaacatggcacatgtatacatatgtaacaaacctgcacgttgtgcacatgtaccctagaacttaaagtrtaataaaaacatatatatatatataaaagaaatgggacagattccttgaaacacacatgaaatgagttacgcttttgagattctccttgaagaagcttct

SEQ ID NO: 26436 - DNA, 201 bp, Homo sapiens
aggaaatgcatactttgatagaaaatggacaaaaaagttgtattggtagaattaaatgaactaatgcatgtcaagcactgagcactttgactcaatagtamtaataataataataacacaatgtatcattatgatagtgttatatctctttagcaatcttgatagttgacttgtataattcacagtacagaagcttattct

SEQ ID NO: 26437 - DNA, 201 bp, Homo sapiens
ttctaggtcacacagctaatggatggagcaggtctttaatcccagatctgggttccaagaccagtccttttctctttacgctgctctgtccctgctatctktatgtcagaaaaccactgagcttccttctagatgtcagggtttggcaaaaaagttatcatgtgcttctgcgtcatgcagcgttttctgagaatggggaga

SEQ ID NO: 26438 - DNA, 201 bp, Homo sapiens
gaggattgcttggcccaacagttgcagactagcaccagcctgggagaccctgtctcaaaaaaaaatttttttttatagaaacagtttaaattattaaattrtttctaggcctacaggagaaacttctgggaaatcctagagagtaatgttcattattgttgttttaaaattttgaaataattgttttttggaaaggttgaa

SEQ ID NO: 26439 - DNA, 201 bp, Homo sapiens
ccaggctggtctcgaactcctgacctcaggtgatccacccgtctcagcctcccaaagtgctgggattgcgggctgggattgcgggcatgagccaccatgcycaacaacagatttattataagcaaaagctctttggggtcctcaataattttaagagcataaaggagaccaaaaagtttaagatgtgctggtcaagacaga

SEQ ID NO: 26440 - DNA, 201 bp, Homo sapiens
aatagaggcagtgccatgaagcagcattggtatctgttgatgggtgtgtgcattggcataactctctgctgtttatatcacaggcctaaacattaggcatrtgctggcttgaagtctgagactatcctaaggaaataatctgaaatgcaaccaaaggcttattcagaaagacgagtctcagcattatttataatagaggaa

SEQ ID NO: 26441 - DNA, 201 bp, Homo sapiens
ggggtctcctagattctttcaaggtatttctgggtattgttttcataatactactaacatgttatttggcttctttactctcattgtatcatgagtgtacrgtggagtcttgcagattctatatgatttgggatgacactgtcactcttacagctaatggaatgtatgctttcatattgtttaaaaaactttatctttttt

SEQ ID NO: 26442 - DNA, 201 bp, Homo sapiens
tgttggccaggctggtgtcgaactcctgacctcaagtgatctgatctgcctgcctcagcctcccaaagtgctgggattacaggcatgagccagtgtgcctrgcttcctgcagtttttttattgattggatgaatgtttgtatatcccatgagccagatgaggcacactgtccatgcacatagcaagatggtaacacttaca

SEQ ID NO: 26443 - DNA, 201 bp, Homo sapiens
gtgtgatcttggttcactgcaaactctgcctcctgggttcaagtgattctcctgcctcagcttcccgagtagctgggatcacaggtggctgccaccatgcscaattaatttttgtatttttggtagagacggggtttcaccatgttggccaggctggtgtcgaactcctgacctcaagtgatctgatctgcctgcctcagc

SEQ ID NO: 26444 - DNA, 201 bp, Homo sapiens
aaacctggagagctttgtcacttgctgaaatccaagctgccctgtgaatttatccccaaacactgctccttttgagaaacttgtacaagctgccttaattyagtcaattcaaatgggttgatgggggctgttcccaaggcccaggacaggcaggggtttgtgacctgcagccctggaactgcctttgggtttcatggtctc

SEQ ID NO: 26445 - DNA, 201 bp, Homo sapiens
tgaagggactaattctaggtcacacagctaatggatggagcaggtctttaatcccagatctgggttccaagaccagtccttttctctttacgctgctctgyccctgctatctttatgtcagaaaaccactgagcttccttctagatgtcagggtttggcaaaaaagttatcatgtgcttctgcgtcatgcagcgttttctg

SEQ ID NO: 26446 - DNA, 201 bp, Homo sapiens
gctgaagggctagaggaggacagggtgtttctggagcccagtgagagctggggcagtggtggacacagctgtgtcaggacaggaggcccagagcaggaggygatggaggaaggcactgactcctttctcctgtggcccttcaggggcctgcccattggctcatagtggaacccggtcacagcccatgtggcaagacccccc

SEQ ID NO: 26447 - DNA, 201 bp, Homo sapiens
gtgtggacagatgatgctggtcagcaggcaggaaaacgatctgccaggcgctgggggtggggcagaggattgttcttcctgaccttggtatgaaaaccgtrtggagttcttagtgaggaaaatcactcttagcccaaattcctgcgaaggccgatgggattgtttttaagatttgttggattgctggatttgttgaaggga

SEQ ID NO: 26448 - DNA, 201 bp, Homo sapiens
ttgaggttaggattgctctccagttttataggtgaggaagctgagctcaagtggttttcctgtggcccacctgggtgtcatagcagagtgagccctggaayccaggcctgcctcgtcctgacttctgtgatctcgggcgatcacatagatcgcagtgttcgctcttgcatcatgtgtgtttgacaacttttctgggtgccc

SEQ ID NO: 26449 - DNA, 201 bp, Homo sapiens
tataagaaggaggaagggcagaaggttgtgccccacccttaaaggacacttcctagaagtcacccagtacctctgctcatgcttcgttgagcaaaacttaktcacattgcaacatctagctccatgggagctgggaaatgtggtctttgtttccaacaggtatgcacacacagggctaaaaatctgggtgggtatgatgaa

SEQ ID NO: 26450 - DNA, 201 bp, Homo sapiens
gggttaaacagcccatgagtgatgcagtgaccagagctttctctgtgcccactgaggcatgtgagtaatgcagacacacgcctgtcttctcactgcagccyatgctgtgtactcagacagagaaggagggtgaggtatttgcctgatggttgacaaactttctggaaagggccagattgccaatattttaagctttgcagg

SEQ ID NO: 26451 - DNA, 201 bp, Homo sapiens
agggtgaggtatttgcctgatggttgacaaactttctggaaagggccagattgccaatattttaagctttgcaggtggtatagagtctgttgcaagcattygactctgccattgtagtgtgcaagcagtcacagaagatacagaaggaatgagtgggaccattcccactagatgttatttaccatggcaggtggatttggt

SEQ ID NO: 26452 - DNA, 201 bp, Homo sapiens
aaatacatggtaaagatgttagtttgtaatatgtttttagtatatttttctccatctattagatttaaaaaacagattagaaattaaatgttaaaaatatrtttgaaataaacttgaagtattaaaagaagcctaaattaaacttcttttgagacttaatctgtataattattttcttgatgtgtttttgggaagttttcc

SEQ ID NO: 26453 - DNA, 201 bp, Homo sapiens
ctccgtctgtgtcaccctcctgctcctcctccacctggctagttcctgttggccacttttggaaattcatgccagtccagtccaccctgagtacatcctckttctgtgtcactgagctcactatgctgggttttatctatgtctccctcgcaactagatcattcacgtcttgaagttaggcatcatgcgttcttcatttct

SEQ ID NO: 26454 - DNA, 201 bp, Homo sapiens
aaggtaatgcatttacatgttacataaaattcatatcatacagaaaggcagaaggaaaacagggagaattacttgttcccttttctctcttcccctcccarttcctttaacaggaagaatgtctcactagtcatgtgatctacagcaaatcctttaacctcttcaaacccgcatctcttatatgttacaggacagtaataa

SEQ ID NO: 26455 - DNA, 201 bp, Homo sapiens
aagctacacacccgggatgctgctgaatgcagatgagagcatgccagctctgctgaagttgggggctgggggcagtggatggctgtgagtggtgtgaagcyccgggccacagtgaagaccctggaatggctgagagactgggattccaggagaccgaggtttgaggggaggcttttcattgtttgattagctctttttttc

SEQ ID NO: 26456 - DNA, 201 bp, Homo sapiens
ttttagatagtacaaaagaaaataacttcacaaatttgtaattagcatttgcagcttgggtcattaagtttagtattagggggcaggatttggtgtcagckgtgaactaatgcctgaggaaaaggtgtaacacctttatttcatagatgacatcaactccagatacacaagggaaaagcacaggaaggaatccttttttgt

SEQ ID NO: 26457 - DNA, 201 bp, Homo sapiens
ggaattggatcaccctggaacctagctggggctaggatggttgttgcatgtgattttcagcaggactctaagggatctccaaagctggttggctggctagygaggttgggcgagggaataactcatttgcttaacttttcatatgtaacaactgggttttgggtttcacaagagacaaggtaggcaggcaggctcaggtgg

SEQ ID NO: 26458 - DNA, 201 bp, Homo sapiens
ccgacctttccccttcctggcatttccataggggctgaggcagagcagctgaaggggcattcccatttcacagatggggaactgagggagagaagtgaaakagcggagcacccagcccgtgccatgggagctgagccagcgggcacgtcctcttagcctctggagcctgttggggtttgaacccgcaggggaagcggtcta

SEQ ID NO: 26459 - DNA, 201 bp, Homo sapiens
tgagcctcccgagtagctgggactacagctgtgtaccactatgtctggctaattttttgtatttttagtagagatggggttttgccatgttgcccatgctrgtcttgaactcccggcctcaagagatcctcttgtctccaaatcgcttcgcagaagtgctgggattacaggtatgagccaccatgcccagccaagttagtt

SEQ ID NO: 26460 - DNA, 201 bp, Homo sapiens
agcaaggacctggggatggaccttctctggccagctacagggtatagagctggtgggaaatgcaggagcctgtgctagcagttgaccattaacatgggaaygccacctcccagcgggcactgctgccgcatacttgcgaggttgctgaagcttgtagtttagagcaggaccatcccactagatgtgcaatgtgagcctcag

SEQ ID NO: 26461 - DNA, 201 bp, Homo sapiens
gcatttctttaccttttactcttttactatttattagttaggattaggttcagccacgaataacaccaccaaaaacaacaacaacaaaacccaagtatccrtggcttaaacaagacaggggtttatttctctctcctgtaacagaagcccagtgctaggcaggatggggatgatagaggttatccaaggctcagttgtatg

SEQ ID NO: 26462 - DNA, 201 bp, Homo sapiens
cagagtcattggaagggccgctgtattagtttgccagggctgctgtaataagatcaaggtcttgggggttaggacttcaacatatgaatttgggggtggcrgagcacaagtcagctcataacagctggggaggaggctttaggcctggccctgagaaattactcccagactaaggctgcagaactgaccccctagagagtc

SEQ ID NO: 26463 - DNA, 201 bp, Homo sapiens
aagaaaaaattttaattaattgtgcaatcatgatgaaaatttatattttctgtaatttttttctagcctcatctgtgggcgatttaacttagttgaaattrtaatacattatttgtatattgtttatgtgctgttatcctttaagtattttcttgtgttgctacattgcccttttgttgctacattgctacatttaaagaa

SEQ ID NO: 26464 - DNA, 201 bp, Homo sapiens
gagggtgggctccttaccctcttgttgaatcaggagaataggctgtaatagaaataaaagcgtttttaaaatgaatgctgataggctgggtgcagtggctyacagctgtaatcccagcactttggaaggccatggtgggcagaccacctgaggtcaggagtttgagaccagcctggccaacatggcgaaacccatctctac

SEQ ID NO: 26465 - DNA, 201 bp, Homo sapiens
gaggaggctttaggcctggccctgagaaattactcccagactaaggctgcagaactgaccccctagagagtcaccaccttggtcatagacagcaagcagaragggaggaatcaggaagtccctgctgtagttgctggatccagcggtgaatgttctgagctgtgatcctgggatcaggaagctgcagccactgccacagtg

SEQ ID NO: 26466 - DNA, 201 bp, Homo sapiens
agggaagccggcctgttctcatcttgctgtgcctgatgccttgtgcttggggcactgttcactgtgctgcctgctggcctgcttgtctctgccttttggaygggagataggccaccccacagtgccacacctgccttcagggaagcttttgggtgttccttgtctggcttctgggttcagtgggagggcccacccagcctg

SEQ ID NO: 26467 - DNA, 201 bp, Homo sapiens
tttcctgaaagcacacaaagcaaagcacggctctgcagtgtgacccaccgtgtgctgtgtggacagatgatgctggtcagcaggcaggaaaacgatctgcyaggcgctgggggtggggcagaggattgttcttcctgaccttggtatgaaaaccgtgtggagttcttagtgaggaaaatcactcttagcccaaattcctgc

SEQ ID NO: 26468 - DNA, 201 bp, Homo sapiens
ccacctcggcctctgaaagtgctgggattataggcatgagccaccatgccctgcctcaagcatctattttgtgcaagagcttgcagaagttctttcctgcyacagccgtggttggccacattgctcccccatgaatatgtggaaactgacacttcaggagaattggtggctcacccatggcattcagctagtgggttatgg

SEQ ID NO: 26469 - DNA, 201 bp, Homo sapiens
tgtcatttttcctgattggcacattttgaccatgaccatctggaagtttttgctagctctgttttctgcaaggaatctatgttttattagtctcctgaagytggcttccttgtcatgttctactcttctaccaataaatacggatttcttgattaaaaaaacgtcaaataggttatcaagatccaggggagagaagaactt

SEQ ID NO: 26470 - DNA, 201 bp, Homo sapiens
gggggttgcagtgagccgacatcgcgccactgcactccagcctgggccacagagcaagatttcatctcaaaaaaaaaaaaaaaaaaaaaaagaaaaagaawaaaagaaatgcaggtaggtgcttctagctactgctgtgggatagcaaggtagttaccaaactgataagggtagcatcttacttactgctgaaaaattcag

SEQ ID NO: 26471 - DNA, 201 bp, Homo sapiens
taaaaataaaaaactggagagaaaagagccaaagaaatgggagtcacgggcaccctgacaaaactcctggagctcctcagagcactattttaggggggaamacctgccataaaggtttgctctgttacattgtgaaagagagggaaaggagagcacagagagatgacagaagagaagagaatgagagaaaagagcatagaa

SEQ ID NO: 26472 - DNA, 201 bp, Homo sapiens
gatttagaatttataaagggcttttcctccacattttagtttgatcccccacctgcatgaggaaggaaggaaacgtgttctgattttacaggggaacacaytggggctgagaacagcaataggaattgaaactttttagagtctggcacccaggaaagttagaggcccctttagctttctatctaacagctgtgtcaaccc

SEQ ID NO: 26473 - DNA, 201 bp, Homo sapiens
acagagcaagattctgtctcaaaaaaaaaaaaaaaaaaaaaaaaaaaaaaaaagcaagctcatacctccagcctgggttttgagagcctgtctgaaaaaaacaaaacaaaaccctcaagtaaacaacctaatgtagcacgttaaggaactagaaaaataagaacaaactaatcttcaaattagtaaaaggaacaaaataat

SEQ ID NO: 26474 - DNA, 201 bp, Homo sapiens; identical to SEQ ID NO: 5395

SEQ ID NO: 26475 - DNA, 201 bp, Homo sapiens
gttcagagatctctaggggtctcctagattctttcaaggtatttctgggtattgttttcataatactactaacatgttatttggcttctttactctcattktatcatgagtgtacagtggagtcttgcagattctatatgatttgggatgacactgtcactcttacagctaatggaatgtatgctttcatattgtttaaaa

SEQ ID NO: 26476 - DNA, 201 bp, Homo sapiens
agtaggggcgacagggcccctggagcataggactgagaagagcattgagagggagaggatttccaggtctggtggtgggtgagctagcatgctgctgccarttttgcagcaaggacctggggatggaccttctctggccagctacagggtatagagctggtgggaaatgcaggagcctgtgctagcagttgaccattaaca

SEQ ID NO: 26477 - DNA, 201 bp, Homo sapiens
ccttccttaaggacctgaaggtctcttctcctaagggctaggttggttcagaaagtgagaagggctggaccttttgtggggagaggatacagcagggtccraacagctgggctgacaccgggcagcagcccagcagcagtcggagctgcagggtcagctcaccatgggctgaacttgggcattgcctgtttaggcagagtc

SEQ ID NO: 26478 - DNA, 201 bp, Homo sapiens
tgaaggtctcttctcctaagggctaggttggttcagaaagtgagaagggctggaccttttgtggggagaggatacagcagggtccgaacagctgggctgayaccgggcagcagcccagcagcagtcggagctgcagggtcagctcaccatgggctgaacttgggcattgcctgtttaggcagagtctgcccgagcctttcc

SEQ ID NO: 26479 - DNA, 201 bp, Homo sapiens
tgcaggccaagtcaagtgaccaaagctaaaggggaaggaagggctggctggacttagcagtgaccacagacagagttgaagccttcacggttggcgttggycttgttcactgctgtgtgccaagctgctgacagcatctggctatcgcaggttcgtaataagtgtttgctgagtgaatgaaagaatattggtgttggggat

SEQ ID NO: 26480 - DNA, 201 bp, Homo sapiens
tatcccacagggcttgtgtggctggcttcaccaacattaccttccaccctcaaaacaaggggctcattgatggggctgagagctatgtgtccttcagtcgytactcagatgctgtttccttgccccaggatccaggtagggagaagacaacagtcctggcactggttcagtggcattttgctccacgtgtccatagaaggc

SEQ ID NO: 26481 - DNA, 201 bp, Homo sapiens
aatttgaaacagctgcttttatccaggtgtatacacggtgtatacatacacagatatgtatgaaatgtggaactctatacccgtatgtatggagttcctcmtaagagtctttttgagaaaatagttccattgctaaaaatacccaatggaaacttctggcctgggatttccaagttcaccctcggctgtgcatctcaaagt

SEQ ID NO: 26482 - DNA, 201 bp, Homo sapiens
gcacaggtgcccagccttctggaataaagacaggaactaagcattaaaaatagcacgccattcatttgcttgtgccgagccgccaagtgccccctcctgcyggcgacaggtccggatgtgggccagttctcagcccagggaaaatgaacagtgtcttctccatggtgcccagaacagtctgagtcagtggaatgtgctggc

SEQ ID NO: 26483 - DNA, 201 bp, Homo sapiens
gacaaaagcctcttctcacctttagagaaattaagtcttattggtagaaaatattttagagaggttctggtctaagcctctcattttgcagatgagaaacyacccaaggcccaagatggatggatttatcaaagccggttggtgctggaacttggatttaatttcaggtcttttattattactatggaacaaatcttaact

SEQ ID NO: 26484 - DNA, 201 bp, Homo sapiens
tactgaaacagattgtagaactttgtaaactggctgcctttctactcctctgctcacctctaaccaaagagccacctaattgttctgcatggtgaccattrcctgttagattcttggtgaatagattcctagcctcatcttttgttatttttatttttttaataaatggtagaatgaggatgcaggaaacttggaaaagca

SEQ ID NO: 26485 - DNA, 201 bp, Homo sapiens
tttttcattcctggactaaaacattaagttctttttaaattcagcattttctagttcttgggttctttctctccatttatttccttgtacttgacaaggartattggcccatgttctgagggaaatgcttttaaaactaggctgggggtattgcccttgtaagggtaatttgggattattggcccctttttgtgaatgtct

SEQ ID NO: 26486 - DNA, 201 bp, Homo sapiens
tcttattgggaagcctttaggctgagactcaggtcagtactagacttagcattgttatgttattttgtccagaggagggtgaggtagtacaatcagagacrgggaaactgaggtggtgctgcttctggctcagcctgacacttgcagttctaaggttattatttcatctcttaagttgggcaagtttgtgtgtatgctttt

SEQ ID NO: 26487 - DNA, 201 bp, Homo sapiens
gacgggaaaactcggctttgtactaggtctgtctgtctcagtaagggaaaaggccagagtctgtgttcttaacccctctgtctcacaactatttatttcarttctataattctggaatgaaagtgagcagagggagacggggagtcacactctctgtgtccagacacatgggctgagtgaattccacagctaagtatgact

SEQ ID NO: 26488 - DNA, 201 bp, Homo sapiens
tttgtatcaggctatcgtcctgtaccgatttagaactctatgaatatgtgctgtgtttttgagtctagcagggaatgttctagatgcctgggtacattgcrtgctctggggtgagcttggtggttgttgtggaaagagtgaaattcaactcctgtgttggtcaaaagagagattttcttttttctgctataattatataaa

SEQ ID NO: 26489 - DNA, 201 bp, Homo sapiens
ttatcatagctacagaagggtggctgaccagcggagaaaaggaacacttaatatctatggtatagtttctgtactactgctggatttggttttacccaaamtgttactgagaagtgtttttgaggcatgttttcaacagaacatattgcaaagttgctttcctcaaaggggtgaatgttccttgaccaggatgagagcaga

SEQ ID NO: 26490 - DNA, 201 bp, Homo sapiens
agcaatttatcctcacccagacttgtacattttaaagactatcaattatcatagctacagaagggtggctgaccagcggagaaaaggaacacttaatatcyatggtatagtttctgtactactgctggatttggttttacccaaactgttactgagaagtgtttttgaggcatgttttcaacagaacatattgcaaagttg

SEQ ID NO: 26491 - DNA, 201 bp, Homo sapiens
actcataaaactggtattttccagtctttgtttctaagaaggtctgaccatctttaaaataagctaatgaaacaaactcatcaaacattaatgatgtgacrtatcataatgctgcttaaatgttaatacagcaatttatcctcacccagacttgtacattttaaagactatcaattatcatagctacagaagggtggctga

SEQ ID NO: 26492 - DNA, 201 bp, Homo sapiens
caggctggtcttgaactcctgacctcaagtgatccacccgccttggcctcctaaagtgttgggattacccacgtgagccactgcgcctggtcgtcttttarcccacatctgttggtggcttactgtgtgctatggtgagggatactatggtgagtaggggcgacagggcccctggagcataggactgagaagagcattgag

SEQ ID NO: 26493 - DNA, 201 bp, Homo sapiens
gggcaccttatataacatcaccatctctccagaagtggaccacgtctggggggaccccaactccactgcacagtacacacgtaagtctcttaggatgcccytctaaggaacagcctctctaactgtctcttggaggaggcactggttaaatgatggccagtgtgcttctgggatccaggttgactctgaaactgctgaagt

SEQ ID NO: 26494 - DNA, 201 bp, Homo sapiens
agaagtatatttttaatctagttgtttactttctttgcatagcccctgttccagtttctgacttccgagtgacagtggtcagcacgacggagatcggcttrgcatggagcagccatgatgcagaatcatttcagatgcatatcacacaggagggagctggcaattctcgggtagaaataaccaccaaccaaagtattatca

SEQ ID NO: 26495 - DNA, 201 bp, Homo sapiens; identical to SEQ ID NO: 5407

SEQ ID NO: 26496 - DNA, 201 bp, Homo sapiens
gagttcctcataagagtctttttgagaaaatagttccattgctaaaaatacccaatggaaacttctggcctgggatttccaagttcaccctcggctgtgcrtctcaaagtccacacagcctcaccaaaatagcccttctgggtacttttttctgtgtgttcttggaggaggccatcgtgcctccagctccctaaggcggaa

SEQ ID NO: 26497 - DNA, 201 bp, Homo sapiens
tgggtgcccttggtctccagcttccagtgggccagtctggcgagagaccctagctggagatgaggggaggtagccttggcctctctccttgcccttcctcrctgctgctaccccaggattcttgcccatcccttactggttttccttaaccccaccctcacccttgaaaacagactctttaaaactctcctcactcaccct

SEQ ID NO: 26498 - DNA, 201 bp, Homo sapiens
atgtttactgtctggcctattacagaagacgtttgctgacccctgatttagggcattcatgaggcttgatgagatgttgaaaatcagctgtctcctcccgycactctcttctgattgtgggtaggctctggtgcaccagctctccagtgatctcctatctgatgctcagagttctttttccattgcatggatgtcaaataa

SEQ ID NO: 26499 - DNA, 201 bp, Homo sapiens
gtgtagaccaaccagggtgaatgagtgtatgactggaaatgcaaagacgggcaggatcaagggacagtttagagcaggggtgtccaatcttttggtttccytgggccacactggaagaagaattgtcttgggccccacataaaatacaccaacactaacaatagctgatgagctaaaaaaaaaaaaatcacaaaaaatctc

SEQ ID NO: 26500 - DNA, 201 bp, Homo sapiens
aatgttttaagaaagtttatgaatttgtgttggtctgcattcaaagccatggtgggctgcatgcgggccatgggttggccaagcttggtttagaggcggaygcagtacgggagagttttcccttctcttctgatgtaactccatgtcttggtggcggtgttctagatgtaggcatctttaggcaggggagtgtgcgtggaa

SEQ ID NO: 26501 - DNA, 201 bp, Homo sapiens
atgggcatctcagatgctgtgagtctgagggcagatgcccatcagtccaggacagttcctggggacaaaagcctcttctcacctttagagaaattaagtcwtattggtagaaaatattttagagaggttctggtctaagcctctcattttgcagatgagaaaccacccaaggcccaagatggatggatttatcaaagccgg

SEQ ID NO: 26502 - DNA, 201 bp, Homo sapiens
gtagaaaatattttagagaggttctggtctaagcctctcattttgcagatgagaaaccacccaaggcccaagatggatggatttatcaaagccggttggtrctggaacttggatttaatttcaggtcttttattattactatggaacaaatcttaactttttcaagtgcataccatgtgcccggctatgtgctggatgtag

SEQ ID NO: 26503 - DNA, 201 bp, Homo sapiens
gctacttgggaggctgaggcaggagaatggcgtgaacccaggaggcggagcttgcagtgagctgagatcatgccactgcactccagcctgggcgacagagygagactccatctcaaaaaaaaaaccaaaaaaaacagtgcttgttgttcttttgttgttattgttaaaggatcattatctcattatcaacaacattggcag

SEQ ID NO: 26504 - DNA, 201 bp, Homo sapiens
cgcgctgtcatccccggactccgctccagcaccttctacaacatcacagtgtgtcctgtcctaggtgacatcgagggcacgccgggcttcctccaagtgcrcacccgtgagttcatgcctggctctcaccaccctttcctgctgtcctgctccgtgccaggcccagacacaggatgcatgatgtagtaatggtgactgttg

SEQ ID NO: 26505 - DNA, 201 bp, Homo sapiens
atcttgagtgggtcaatttatgttctcagtgccttacaaaatggggcagaggatacctaacccccaggagctggtgtggctggggtaccttacacagggcctgactgtagtagcttctctccaagcattggtgtcttacctcttctgtttctctaatggtgttttgcacattcattgttgtattagagtttgtttttttgt

SEQ ID NO: 26506 - DNA, 201 bp, Homo sapiens
catatacagaacattccatccaacagctgtagaatacacacttttcaactgcacctggaacattctccaggtagatcatatgttagaccacaaaacaagtsttaacagatttaagaagtgtgaaatcatatcaagtatcttttctgatgatggcatcaaactagaaataaataacaggaggaacttaagaaaattcacaga

SEQ ID NO: 26507 - DNA, 201 bp, Homo sapiens
cagagtggaccactgatgtcatagctgcaggtttggctgaattgggatggtgcagaaagccgtgttaaccatttctttttctctgaggcctggaggaggakccttgtgactggaaccacagttgggactggcagtggtttttcctgctggcaaggaaaaaaaaaaagagaaaagaaagagttcgacttatcagcacaaaga

SEQ ID NO: 26508 - DNA, 201 bp, Homo sapiens
cgttccgcaccttctaccatgtctccttttccagcctcattccctgagatgtagccggagttccagttcagccaacctgcccgttgttttctctcctggarctgggtgtttgagcctcctgcatggagtgttcttccttcccagctaaagtcctggtcatcccatttccatctgaaaggcccccttgttcatgaagcctct

SEQ ID NO: 26509 - DNA, 201 bp, Homo sapiens
ggggcccgctaccacgcccagctaatttttgtattttgagcatgttggccaggctggtcttgaactcctgaccttgtgatccccctgcctcggcctcccaragtgctgggattacaggtgtgagccactgtgcctggccttatttatttatttttgagacagggtctcactctatcacccaggctggagtgcagtggtgca

SEQ ID NO: 26510 - DNA, 201 bp, Homo sapiens
ggtactctccatgtggccagaaatggcagtttctgaggggctcatgttgtaggtgatgatacaaagaagagaaagagagggatcagtttttccaagtgtgsatttcatttcagtgtaaatattttgtgaggtggggcatccctgtctcctggagaaatatatttttaatctaattgtttactttctttgcatagcccctag

SEQ ID NO: 26511 - DNA, 201 bp, Homo sapiens; identical to SEQ ID NO: 5400

SEQ ID NO: 26512 - DNA, 201 bp, Homo sapiens
gccgaaaggaaggtctgctattaaggtgacattcactctcactttttacaacactttctctcttctccacctcccatcttcctgcctatcatagaagttcygtcagcatatcgttatgtttctctccagcaggttagcagtattgctgtccttatctctagaattatcctttttttcaccattacatgctgtcagcccaat

SEQ ID NO: 26513 - DNA, 201 bp, Homo sapiens
tcactgtaacctccatctcctgggttcaagagattatcctgcctcagcatcctgagtagctgggactacaggcatgcactgccacacccagctaatttttktatttttagtagagatggggtttcaccatgttggccaggctggtctcaaactcctgacctcaggtgatccgcccgcctcagcctcccaaagtgctgggat

SEQ ID NO: 26514 - DNA, 201 bp, Homo sapiens
gtttcaccatgttggccaggctggtctcaaactcctgacctcaggtgatccgcccgcctcagcctcccaaagtgctgggattacaggcgtgagccgccgcrcccggcctcatctgatattttttaaagaccactttgacctctctttgggagatgaacttaagtgggcaaaagtggaagcagcactcttgggcaaaagaga

SEQ ID NO: 26515 - DNA, 201 bp, Homo sapiens
tgctatgagagcatagtgtgggagcagtaaactttgcctgaaggagtttaatgatgtcttcacccagggtatagagcttgaatagaatcttaaaagatgakgggagtttgtctctggagaaagggtggaacagtattcaggaagaaggaactgaatgtttaaaagcatggcaatgtagaagagcctgtcatgtcacacggg

SEQ ID NO: 26516 - DNA, 201 bp, Homo sapiens
gtttctagagtttttataatgagcaccttatgaggcccagcactccccagctagctgtgaacatctctctccttctttagactgagttccaagcaggcatrcacatgtctaagtcatccatgaagcttcactctgtctggcacactgctttcttcatactggatgttgaagagatgtttgggaaccccagataacaaatct

SEQ ID NO: 26517 - DNA, 201 bp, Homo sapiens
aaggttcaaaataatctcctttgactccatgtctcacacctagggcacactgattcaaggagtgggctcctatggccttgggcagctctgcccctggagckctgcaggatatagcccccgaggttgctcttatgggctggcattcagtgcctgtggcttttccaggtacacatgcaacctgtcagtggatttacctttatg

SEQ ID NO: 26518 - DNA, 201 bp, Homo sapiens
ttagtctctccactctccatgtcctcatctgtaaaatggaattaatgttagtgcctgccttagagtttttgtgtaaagactaaatgtgtaaagactaaatsagctaaagtatgtgaatgagctcagtgcaatgagaatttaatagctgtgggctattattcagtttcttccccctacttctttgtaagatcctagagggca

SEQ ID NO: 26519 - DNA, 201 bp, Homo sapiens
ttgggcagctctgcccctggagctctgcaggatatagcccccgaggttgctcttatgggctggcattcagtgcctgtggcttttccaggtacacatgcaasctgtcagtggatttacctttatgaggtctggaggacagtgtccctcctctcacagctccactaggcattgtctcattgaggactctgtggggtagggggg

SEQ ID NO: 26520 - DNA, 201 bp, Homo sapiens
ctgcaggatatagcccccgaggttgctcttatgggctggcattcagtgcctgtggcttttccaggtacacatgcaacctgtcagtggatttacctttatgrggtctggaggacagtgtccctcctctcacagctccactaggcattgtctcattgaggactctgtggggtaggggggctccaaccccactttttccctctg

SEQ ID NO: 26521 - DNA, 201 bp, Homo sapiens
cttacccagtagctaggactacaggcgtgcaccaccatgcctggcaatttttttttttttttttttttttaaagatgaggacttgctatgttacccactgkggtcttgaattcctggcccgaagcaatcctcccaccttggtctcccaaagcactgggattataggcatgagccactccacctggccttaaccacatttta

SEQ ID NO: 26522 - DNA, 201 bp, Homo sapiens
aggggggctccaaccccactttttccctctgcactaggttcttcatgagatctccgtccctgtagcagacttctacctggacatccaggcatttctatacrtcctctgaaatctatgtggaggctctcaaactgttgccttctgtgcacctgcaggctcaacaccacatggaaggtgccaaggcttggggcttgcaccctc

SEQ ID NO: 26523 - DNA, 201 bp, Homo sapiens
acaggaatcatatcatattcatgtcctcattacagtaagcatcgacacagagtagctgctcaagtggtaaatgaatgaataaaaataaatgaacaaatgartccctgtgtgaggaatgaatgaacaaatgaatgcctatagactcaaagctcatctattgtccattaagttctttttccttctggggccaaagacgccgtg

SEQ ID NO: 26524 - DNA, 201 bp, Homo sapiens
tgcacctgcaggctcaacaccacatggaaggtgccaaggcttggggcttgcaccctctgaagcaatagcccaagatgtaccttcatcccttttagccatgrgtggagctggagcagctgggacatagggtgccatgtcccaaggctgcacagagcagggggcagcgggtggtaggttcttgcccatgaaaccatttttctc

SEQ ID NO: 26525 - DNA, 201 bp, Homo sapiens
ttttatgctcttcttcccttttaaatataagttcctatttcagaccatctctttcttcatgcatatgcatgtacacttttagaaacatctgggtcacctcwtgaatgctttgctgtttagaaatttctcccaccagagagtgtaaattagttcaaccattgtggaagacagtgttgtgattcctcaaggatctagaactag

SEQ ID NO: 26526 - DNA, 201 bp, Homo sapiens
cactcataggtgggaattgaacaatgagaacacatggacacaggaaggggaacatcatatactggggcctttcaggggatgggggcctgggggagggatarcattaggagaaatagctaatgtaagtgacgagttgatgggtgcagcaagccaacaatgcacatgtatacctatgtaacagacctgcacaatgtgcacatg

SEQ ID NO: 26527 - DNA, 201 bp, Homo sapiens
ttctttcagtaaatatttctgatatttactgtggccattaaatgtgcctaacactgtattgggtgtttggagtacaaagacagaaaagtatggtgccttgccttttgcaagctcactgtttattcggagaatcgaacatggtaaaagacaatggagatagtgtaaggctttaaaaagggcatgggacagaaaatgcaattg

SEQ ID NO: 26528 - DNA, 201 bp, Homo sapiens
gacagaaaatgcaattggaataaaaaataagagagccaaatatgccagagagtagttaagagagaatacacaaaaagagaatatataggttttgggaaataaagttttcccaggttacagaaacaacaagtggaacattctggatagaggaaataacacagataaaggaaaggaggaatgtgaaagtggattatgttcaag

SEQ ID NO: 26529 - DNA, 201 bp, Homo sapiens
atctaatattaaagtatttaggacttactgagtgcttaccacgtgccaagggctgttctcagcaccttacgtgaaatcactcaggcctcactaaacaggarcatccattaaaaagacagacagacttgtcccaaactcaggtgcgtggccagctctgagaagcatttccacatttgttggcagacaagtgcaaagggaaga

SEQ ID NO: 26530 - DNA, 201 bp, Homo sapiens
gatcttatttcccaagcacacccagcccctgatgaccctgtgcctactcatgcgtgcttcatttccctttcccccacccccacccccaccccagcttggcragctcccagtcatccttcaaatcttagcctaactaaattgtcttctttaaagcctctcctgcctctgccactaggcggaattaggaacttctccccctct

SEQ ID NO: 26531 - DNA, 201 bp, Homo sapiens
gttggatgcaagaacagagagagtgaacaagagggtagggagtccgggctgtgggtttgagcataattgactctcccctcctcattcctagcacacacacrtgcatacacacacacatgcatctcattggaagctatatggttagcttagtcaggagaagataaatgaaacagagagttgaggggcaaaaagtattgggaa

SEQ ID NO: 26532 - DNA, 201 bp, Homo sapiens
tctttgaagcatcaggaaaagcatctaatattaaagtatttaggacttactgagtgcttaccacgtgccaagggctgttctcagcaccttacgtgaaatcrctcaggcctcactaaacaggaacatccattaaaaagacagacagacttgtcccaaactcaggtgcgtggccagctctgagaagcatttccacatttgttg

SEQ ID NO: 26533 - DNA, 201 bp, Homo sapiens
atattgctgtgttagcccagtggatcattgcctgacttctactagattccataaacgtttgatgaatacatgatggatggatgaaggaataagagtgctaygtcagcagtagcaccagcatgattcagagagatagggaagcccaaatcaggcaagagtatattatgctcacacatcctattgaaggtagaacttggaaac

SEQ ID NO: 26534 - DNA, 201 bp, Homo sapiens
tcagccctcagctgcagcatctcagtaatgagagcttgcacaagctacttaactgttttccagcttagctttcctcactgtaaaatgggaatatgatgggmaaaggccagcatattcttaaaataaataagagagtgtatttaaatgctcagccttgtatatctgaagtattccatgaaagttatgtatctttattgttaa

SEQ ID NO: 26535 - DNA, 201 bp, Homo sapiens
ggcaattgtttgtgatggctcagagaaagagagagagactgagacagagacagagacagagaaagagagaagaatgtgcatcactgaagggaagaccctcyggggacctttacttccatacttggctctattactccaaagaccgcactgcattgaaatttgattgtttacatgtctgttgcctcgctagattgcaagctc

SEQ ID NO: 26536 - DNA, 201 bp, Homo sapiens
gcatgtgttcttcccacctggctagtgtctggaagcaatttaggatccggttaggagcctgactgattttagagagaactgggttcagccctcagctgcarcatctcagtaatgagagcttgcacaagctacttaactgttttccagcttagctttcctcactgtaaaatgggaatatgatgggaaaaggccagcatattc

SEQ ID NO: 26537 - DNA, 201 bp, Homo sapiens
ctttaatgccatttcatggcccaggaaactgaagctgaggcatagtggcccaaagtcacacaattaggagatgctttaatgaaggctggtctgacttagarcatgtgttcttcccacctggctagtgtctggaagcaatttaggatccggttaggagcctgactgattttagagagaactgggttcagccctcagctgcag

SEQ ID NO: 26538 - DNA, 201 bp, Homo sapiens
ccgtgttgggctaagaccaagaattattaaagccctttctttagccaaagcctattatgctgtctgggacttcaataaatggtcaaatcatgtttgctaaycttcctggtttgccaggagcccacctgcctcccacactcactgccaggtcatctcctgctacatgatggacaaggaaagaaaagagagatttgccaagaa

SEQ ID NO: 26539 - DNA, 201 bp, Homo sapiens
aaaaaggactgtattggcatcactgattcttcacttattatcgtatacctccaagtgataaatatttttaatttctgatttatgttaacaattgactttgytgtggcaactgtaatattctggagtctccattgccacttagtgtggttgacccctttgaaaggtgcacagtgactcaagtgacaaaaattaccttaatta

SEQ ID NO: 26540 - DNA, 201 bp, Homo sapiens
tctggctctactgctatttagctgcgagaccttgggcaaattacttaatatttcaaagcttcggtttcttcatttgtaagatgagaataattgtacctagytcatgttgtggctttaatgtcagtttttaaaaagaaaatatataaagtgctgcacaaagttctagtacatagcaggagctaaataaacaacagctgttgt

SEQ ID NO: 26541 - DNA, 201 bp, Homo sapiens
ccgcggtcttcttccttactcacagttgacatggctatggttacatttcccccagtgtgatagttttccatcagaagacaagccagctgccacctcccaamaagccctttaagtaaaggtgacaaaacactgcttctctccaggtgtttgcacctctctctgggacaggccctatgtggcctgtgcctctggaagaggcag

SEQ ID NO: 26542 - DNA, 201 bp, Homo sapiens
tcagtagatgggaaagttgtaggtcagtcttgagaagcagtagccaaaaaagggcttttcacaggaagtcatcaagaggttgaaagtgagcaaagtcaacrtgaatgaggttgcagagtacaagtaatacagggcaagagatcgaggtatgtgggaagcccacttttctatggtacagaggtagggcatgactagatactt

SEQ ID NO: 26543 - DNA, 201 bp, Homo sapiens
ctttacactctatttcagtagtctgattacttttccatctcccccaataagacaaggagctctgttaaatcaggggccatatccatcatgttcaccatcaytgtcccagggaacgcgtgatgcatgacacataatacgtgcttagcaatttttattttttaatgaaagaatgcaccagaggttaccagaatacaggggaag

SEQ ID NO: 26544 - DNA, 201 bp, Homo sapiens
tgctgagggccgaggatttgtatataatatgagcttcacccccttgctcactggcttgcacagaatgaagaataatagcctttttgaaatgtcacagtccyaaaacatgaacttggaaaaatcgatttaatgtatttaaaagtgagaacgcaaaataaggtgatatttatgggataaaggagtttggggcttctgagctct

SEQ ID NO: 26545 - DNA, 201 bp, Homo sapiens
tcgggccttcaaataaacacatgtaaaaactgacagtcaggccttctcttcctgctgccaagtagaaataaacgaagatgaaagattcctgtgtaaattayaggacccaaagcaagccattagaaattattccttattctcttaaactctagacatgttagatgaagtgaaatctcgaatccagagaaagatttcaggggt

SEQ ID NO: 26546 - DNA, 201 bp, Homo sapiens
gccataaaaaattatattcgggactcacctttatagctaagaaaaccatttcaagttaggggtgtgtgtgtgtgtgtgtgtgtgtgtgtgtgtgtgtgtakgtgtgtgtgtgtgtgcgcatgtgcacacgcctgccagtgtgtgtatgtgtgtattattttttcttctctccccttatttctgcccagtactatagaacta

SEQ ID NO: 26547 - DNA, 201 bp, Homo sapiens
atactccctggagttgtgtagtgtagctcctccaccacagcacacacggtccccgagtatttaagtaaattaaatatcaatccaaaagttggactgggatrtgtcatgtaaaacgatcaaacagaagcctacccattgaattaaactggctggctctagcaagctgaataaagccactgttgcagatgcttattcagcata

SEQ ID NO: 26548 - DNA, 201 bp, Homo sapiens
ccataaaaaattatattcgggactcacctttatagctaagaaaaccatttcaagttaggggtgtgtgtgtgtgtgtgtgtgtgtgtgtgtgtgtgtgtatgtgtgtgtgtgtgtgcgcatgtgcacacgcctgccagtgtgtgtatgtgtgtattattttttcttctctccccttatttctgcccagtactatagaactat

SEQ ID NO: 26549 - DNA, 201 bp, Homo sapiens
agttctatgaatgttaataatactccctggagttgtgtagtgtagctcctccaccacagcacacacggtccccgagtatttaagtaaattaaatatcaatmcaaaagttggactgggatatgtcatgtaaaacgatcaaacagaagcctacccattgaattaaactggctggctctagcaagctgaataaagccactgttg

SEQ ID NO: 26550 - DNA, 201 bp, Homo sapiens
gactgattgaatgaataaatacatgaatatctatgaagctaatacagaaatcatcaccatgtattactgactttcctgtctatttcaatgaggttcgtgcaaaaaaaaaaaaaaaaaaaaagtggccactgcctttgagaagtggtatggtggtgcaggaataataatgggtttattgctcttggccttgtcagagcccta

SEQ ID NO: 26551 - DNA, 201 bp, Homo sapiens
accattttagcgcacaaaagcctataaatcaatgcccccatgttgtgcgaatgtaaatctcatcaattttacatcattaacaccgtgaaaaagctaccacwgtttgagcaattttcctctgctagctaaatatgtcctcttaataaaacaaaaattaatgggtcctaattattttgctagcaaatatgtccttctctgcca

SEQ ID NO: 26552 - DNA, 201 bp, Homo sapiens
tcaaaatagctagaagagaagaattgtaatgttccaaacacaaagataaatatttgaggtgatatatattccagtttccctgatttgatcattacacattwtatatatgtgtcaaaatatcacatgtaccctcaaaatatgtaaagctatgacatatcaataaaaaatacaaagaaaatcacaaagttgtgacatgaaccg

SEQ ID NO: 26553 - DNA, 201 bp, Homo sapiens
ttgtaatgttccaaacacaaagataaatatttgaggtgatatatattccagtttccctgatttgatcattacacattatatatatgtgtcaaaatatcacwtgtaccctcaaaatatgtaaagctatgacatatcaataaaaaatacaaagaaaatcacaaagttgtgacatgaaccgtggtttgtctggcttcaaagctc

SEQ ID NO: 26554 - DNA, 201 bp, Homo sapiens
aaatattgtaggaagattttgagaggcttcattacattctatttaattctcctgctctaggactatgtttctcttccctgctacactgtgaactccttgakggcagcaccattcctttaagcctgcatgccttactctgtcacagcgtgggtgatttctaaatgtacagttcatagacactaggaagggagggagggagat

SEQ ID NO: 26555 - DNA, 201 bp, Homo sapiens
aaattttaccttatttgcttcagattttttttttctttaataagtaaaatattataggccgggcgcagtggctcacgtctgtaatcccagccttttgggargctgaggcaggcagattgcttgagcccaggagtttgagaccagcctgagcaacatagtaaaatgccacttcaacaaaatacaaaacaattagctgggcat

SEQ ID NO: 26556 - DNA, 201 bp, Homo sapiens
tgaagtggaaggctcgcttgagcctgggaggtggaggttgcagtgaaccgagatcatgccactgccctccagcctgggtgacagagggagactcttatttcaacaaaaccaaaacacacacacacacacacacacacacacacacacacacacacacaaaagaaaaaaaatcctgcctccacttctttccctagtcattct

SEQ ID NO: 26557 - DNA, 201 bp, Homo sapiens
gaagtggaaggctcgcttgagcctgggaggtggaggttgcagtgaaccgagatcatgccactgccctccagcctgggtgacagagggagactcttatttcaacaaaaccaaaacacacacacacacacacacacacacacacacacacacacacacaaaagaaaaaaaatcctgcctccacttctttccctagtcattctc

SEQ ID NO: 26558 - DNA, 201 bp, Homo sapiens
aagtggaaggctcgcttgagcctgggaggtggaggttgcagtgaaccgagatcatgccactgccctccagcctgggtgacagagggagactcttatttcaacaaaaccaaaacacacacacacacacacacacacacacacacacacacacacacaaaagaaaaaaaatcctgcctccacttctttccctagtcattctct

SEQ ID NO: 26559 - DNA, 201 bp, Homo sapiens
ctgtagacacacttaagtttcagaagagcatagtagtgcaggattttttttttctgttataccaatgaatgaatgaatgcttgcttgctgcctactatgtrccaggaagaaagggggtgtcattgataaagccacaaaaaccctatagcaaggtggtctcatttagtggctttgcagaagcagcaatggctcctgaagaca

SEQ ID NO: 26560 - DNA, 201 bp, Homo sapiens
gtggaaggctcgcttgagcctgggaggtggaggttgcagtgaaccgagatcatgccactgccctccagcctgggtgacagagggagactcttatttcaacaaaaccaaaacacacacacacacacacacacacacacacacacacacacacacaaaagaaaaaaaatcctgcctccacttctttccctagtcattctctgt

SEQ ID NO: 26561 - DNA, 201 bp, Homo sapiens
caagtggaactgccagattccaatgtgctatgaaaatgggcagcagaccaacaaaatctgtcctcatcaaaaattcagaaaaataaaattaaaaatgtaargctgcacattcaaaggaatccagcctgacccccttgtatttttatgtatgcaaaatgtatttttttgcacctgcaagcacagtccctataagccaactat

SEQ ID NO: 26562 - DNA, 201 bp, Homo sapiens
ggtaggaagaaatggatgtacaagcaaaaacaaagcttaatggagaagctgaggaagcaaagaaaaatgacaagtgagaggggacttgaaggattaatgartttatctagtggagaaagaatgagggatctttctgttagattgtccaaaacttggaggtgtgaaagattatggggcaattatcctgtatggctgtggcta

SEQ ID NO: 26563 - DNA, 201 bp, Homo sapiens
ttttttttttaaatctagaccagtgtttttattttgtgttctgtggaatcttaggtctgtggaggtgccttagggtctgcgtaggtgtgagagatcagggragagcctgagtaactggttaccatgacccccactcccatttcaaaataactgtgctttttttagatttggggatttccaagttacgtaaattgcagaaga

SEQ ID NO: 26564 - DNA, 201 bp, Homo sapiens
tcccccatacatataaggaaactgaggctctgggaagctgagatgacatcctttaagttcatgctattgaatacatgcccaagtcagaaatcaaacccagrtgatgccaaatctaagtcttccttgatattttagatccaaactgagagctaatctgatagaccagctgatgtcaactcttagagtttatctatacaagtc

SEQ ID NO: 26565 - DNA, 201 bp, Homo sapiens
cctcagcactaaatagcatataagcacttttgcagggcttaatgtatacttgttgaaaaatgtacattatttttcattgactttaaattggacaaatgctyattgaaaagaataaagtgaattggtgttggagagagcattaaaaagagagagagaaagagaagagccaataaaaacatgtggtttctaaatgtagatcca

SEQ ID NO: 26566 - DNA, 201 bp, Homo sapiens
tgacagtcctcaaaacctggagcacacagaagcattagtgctgccttggcctttaggagttctgtgatctccaagtatggaagagacatttgctgcctgcrtcataaccatagtcctccatatttccagctcctgcaattaatagccatgcaactatatctgattataacctaagtgacatacatcacttccaggccaaag

SEQ ID NO: 26567 - DNA, 201 bp, Homo sapiens
gaaaagcctgagagaagctatatttattttcaataaagttgtaaagaataatcaaaatgggaaattttttcccaccttaggttggaggtttatcaactctrtgaagtcacactcaacagcttattaaaaaagaaataaagttcctgctggatgcggtggctcatgcctgtaatcccagcactttgggaggctgaggcgggc

SEQ ID NO: 26568 - DNA, 201 bp, Homo sapiens
gtattggtcctggcgtttcaatctctgaccttcagtcccttcatgaataaactcaggattgatgtttaagattccaactgtctttgattgtgctgataaaktctacttgaagacatggggcaatcttgaggctcagtgaacaagaatttgcatgatactctaagtttctaaagcgaatgtgataatgcaattgtaggatta

SEQ ID NO: 26569 - DNA, 201 bp, Homo sapiens
gacaagcaaaaggtacttggaaggtgaaattgacaagatggacttgtttttgggggataagaatgagggagactgaatgggctcaaggagggttagtgacrgtgcaggcattaaattcgaatatgaaagaaaaaaccatcttattaaacagcattttgattgtagcaaaaattagcataaataagaagaaaattactagta

SEQ ID NO: 26570 - DNA, 201 bp, Homo sapiens
ttgagaagcagtagccaaaaaagggcttttcacaggaagtcatcaagaggttgaaagtgagcaaagtcaacgtgaatgaggttgcagagtacaagtaatayagggcaagagatcgaggtatgtgggaagcccacttttctatggtacagaggtagggcatgactagatactttaagactcagttaagtctcagaaaccaga

SEQ ID NO: 26571 - DNA, 201 bp, Homo sapiens
attgggcctctgtccatgttacccaaagtaggaagagagagccttcaggtgaacaaaggcaaagggacaaaccaacaaggcagtgtaaagacacaaagggygcttgcctcactcagtgggcccccttcactgtgaaaggatagcactgaatttctgaatgacatctgcatcagatggaatcctgtcctgtggccttgctgt

SEQ ID NO: 26572 - DNA, 201 bp, Homo sapiens
tcaacattatcagctattactgctatgattactattattctcatctttatccttattgttgtcaccattgccatatttattttgatgggaagcattattcyttctcatatttgcaataacttttctgagcacttttatgtcacttatttaacaaattacatataggctactgtccctaatacatcaagtcctaaattctca

SEQ ID NO: 26573 - DNA, 201 bp, Homo sapiens
aatcaaccctattatcctcagtttactgattttgaaactgaggcttggagagatcaagtattttgtcttataaacaccataagcacaaggattgtgtttgyttttccttgtctgtgtaccctcagcactcaacagtttctagctcttatgaggtccccagtagatatgtattgattgagtaaatggtggaaccagtgagtt

SEQ ID NO: 26574 - DNA, 201 bp, Homo sapiens
ctgattgggcagtcaactgtttcccaaggtcggaatcccaatctcttaggtaatttaatctggaagggggttttgctgtagggaaccgcccacatggttgrggatggacaagatgatttaatagacctcttcctgccataattgctaatcttccttgtggaaacccccttctcatgctgcattaaagactccattaatttg

SEQ ID NO: 26575 - DNA, 201 bp, Homo sapiens
aaggctttcctactctatcagcaccatttgcctggacaacctgtatatactagccaacgctctcagttcttagaccaccagttaaggcaggtacaggtctrcacatctggctcacttcattcctctgcctggaactttgtctgccttttctttaccatcaattcaaatacagaactgactttaaagcccattttaatccaa

SEQ ID NO: 26576 - DNA, 201 bp, Homo sapiens
tggaaggctcgcttgagcctgggaggtggaggttgcagtgaaccgagatcatgccactgccctccagcctgggtgacagagggagactcttatttcaacaaaaccaaaacacacacacacacacacacacacacacacacacacacacacacaaaagaaaaaaaatcctgcctccacttctttccctagtcattctctgtt

SEQ ID NO: 26577 - DNA, 201 bp, Homo sapiens
taatactctttaatcaggcatccaaaggctttcctactctatcagcaccatttgcctggacaacctgtatatactagccaacgctctcagttcttagaccmccagttaaggcaggtacaggtctacacatctggctcacttcattcctctgcctggaactttgtctgccttttctttaccatcaattcaaatacagaactg

SEQ ID NO: 26578 - DNA, 201 bp, Homo sapiens
aaggctcgcttgagcctgggaggtggaggttgcagtgaaccgagatcatgccactgccctccagcctgggtgacagagggagactcttatttcaacaaaaccaaaacacacacacacacacacacacacacacacacacacacacacacaaaagaaaaaaaatcctgcctccacttctttccctagtcattctctgttgct

SEQ ID NO: 26579 - DNA, 201 bp, Homo sapiens
gcttgagcctgggaggtggaggttgcagtgaaccgagatcatgccactgccctccagcctgggtgacagagggagactcttatttcaacaaaaccaaaacacacacacacacacacacacacacacacacacacacacacacaaaagaaaaaaaatcctgcctccacttctttccctagtcattctctgttgctccttatc

SEQ ID NO: 26580 - DNA, 201 bp, Homo sapiens
agtacatagcaggagctaaataaacaacagctgttgttaatagttaaaatgctgcatttcatcatgtggtttcggtcaagtttttgaactttctttctttctttttttttttttgagatggagtctctctctgtcacctagactggagtgcagtggcactattttgccttatagcaacctctacctcctgggttcaagcga

SEQ ID NO: 26581 - DNA, 201 bp, Homo sapiens
gttgagttaggcatcattatccctatttagagatgaaacagaaatgcacaaggctcagttgccttgtccagggtcacaaagcttgggaagaagcagaggtygtcttccaaaccaagactgtctagacccaaacctgggctgctcctgcttctttctggtttcattcaagcagtaggactatatactttagtgttcttacaa

SEQ ID NO: 26582 - DNA, 201 bp, Homo sapiens
tgagcctgggaggtggaggttgcagtgaaccgagatcatgccactgccctccagcctgggtgacagagggagactcttatttcaacaaaaccaaaacacacacacacacacacacacacacacacacacacacacacacaaaagaaaaaaaatcctgcctccacttctttccctagtcattctctgttgctccttatctat

SEQ ID NO: 26583 - DNA, 201 bp, Homo sapiens
tctgacaataaaaatgattttagaagactaaaaagaggttgggaaaggaagaaagaaaaagaggctgataaaggattttccctgggatatagtcacttttyatttgctgtttgttttttccaatctcttgccatgtaactgaaagaactgaaaatggggagactgattgggcagtcaactgtttcccaaggtcggaatccc

SEQ ID NO: 26584 - DNA, 201 bp, Homo sapiens
agcctgggaggtggaggttgcagtgaaccgagatcatgccactgccctccagcctgggtgacagagggagactcttatttcaacaaaaccaaaacacacacacacacacacacacacacacacacacacacacacacaaaagaaaaaaaatcctgcctccacttctttccctagtcattctctgttgctccttatctattt

SEQ ID NO: 26585 - DNA, 201 bp, Homo sapiens
ctgattactaattaccacttcttgagggtatgactgtttacttaacctttctcagcctgtttcctcacttctaaacactgatatatatatatatatatatatatttttttttttaaccacttttgagtgacaggatctgacttgctttttgaagggctcactcttgtttttaggttgaagatcacttattgggaagggaat

SEQ ID NO: 26586 - DNA, 201 bp, Homo sapiens
atagtgccacaataaacatacgtgtgcatgtgtctttatagcagcatgatttataatcctttgggtatatacccagtaatgggatggctgggtcaaatggyatttctagttctagatccttgaggaatcgccacactgtcttccacgatggttgaaccagtttacagtcccaccaacagttttgttcttatttctccacat

SEQ ID NO: 26587 - DNA, 201 bp, Homo sapiens
gattactaattaccacttcttgagggtatgactgtttacttaacctttctcagcctgtttcctcacttctaaacactgatatatatatatatatatatatwtttttttttttaaccacttttgagtgacaggatctgacttgctttttgaagggctcactcttgtttttaggttgaagatcacttattgggaagggaatgc

SEQ ID NO: 26588 - DNA, 201 bp, Homo sapiens
attactaattaccacttcttgagggtatgactgtttacttaacctttctcagcctgtttcctcacttctaaacactgatatatatatatatatatatatatttttttttttaaccacttttgagtgacaggatctgacttgctttttgaagggctcactcttgtttttaggttgaagatcacttattgggaagggaatgca

SEQ ID NO: 26589 - DNA, 201 bp, Homo sapiens
tgcaaatagaaaatactgaagatgcaaatggctcagaccaaagaggaagtggtggaggggctgagaagcatcagattctgcctagattttaaagatagagyctatggagcttagcaggagtttggatttggcatatgagagaacagtgattgagaatgtctccaagggcttggggctgagaaactgggaaggatggagttg

SEQ ID NO: 26590 - DNA, 201 bp, Homo sapiens
aaatgctagtttctggccagtttctcctaaatggttactttgggcaaataaaaataaaaagtaacacatgaaaagaaccagggacaataatctataaagcaaaaaaaaaaaaatgacatttaactactggccattttaggatagaacatttctgttatttaaatatgaagcagagggtaatgttgcagttaggagatgtct

SEQ ID NO: 26591 - DNA, 201 bp, Homo sapiens
acaccaaggtggtggggaacaagggggcctgtagtgagtcagcatggggaagcagccaggtcctacagggggctctgcaggccctggcaagtattttggtytttatcctaagagccatgggaagcttttgctgtgttttaagtactagaaagatgtatcagatttgccaggttttcttctcaatctcttcatcctgtggtg

SEQ ID NO: 26592 - DNA, 201 bp, Homo sapiens
tgattctctcactagataggttaaaagatcaatggataaatagatagctagatagtaagtagctatattaggtgtgctcatagctactggggtttcattgyttctatgtccttttggtgaacagtgctaggagtatgtattttaattcaagtttgtattgacatttctaattcaaatttaacattgcagagttatttctta

SEQ ID NO: 26593 - DNA, 201 bp, Homo sapiens
aaggcatgttgtcagaccattataaaaccactgctggctgggtcctgcaatgggggtgtgagctaagctgtgacagttcctgggaaaggaacaactaatgrgtgcttccaatctggaatctttcagtgaaaacccttggttgactcatttgaaaagtagtcaacatatccactatcgttagtatcataagatgtgttcgta

SEQ ID NO: 26594 - DNA, 201 bp, Homo sapiens
gtgcttttataaaaccctgaggaagagaagacctagggatgatatgtgttagttgcctccagttattttacaggctgtttcatgattaaggggaagagcayggtagtataatgagagagtgaacatctgggctaaatataagaaaaacatttcagataatctgagctgattttcaggggaaaggacaaccttatcgagtag

SEQ ID NO: 26595 - DNA, 201 bp, Homo sapiens
ttgatcgaaagaaagaggagctgatgaagcaaaccttcttaggagacagaagtacaccttgttacccagacatgatttctaaggtcacttcttgacaaacrtgttcaattttcagataccttcttagttttctataaacacacaggactgcaaggccattcccaaaaggctccttttttaagttctgaacagcatggtcaa

SEQ ID NO: 26596 - DNA, 201 bp, Homo sapiens
tgcagttttactggtggtagacctgaagctcagagtgcttaattgctggcccaaagttacacagtggtagttgatagagcctggtccttatgcttttttcwgtttataaaagtattatatatttattgtagaaaatttataaaatgtagaaaagtcataaagaaaaaaactgcaaattatgtgaaatctcaccacttagat

SEQ ID NO: 26597 - DNA, 201 bp, Homo sapiens
tgaagacactccttgcaggagctatttgtatcaaaatgatgatactgtaattaggcacagcactgctatgatgattctttgtgaacctctcaagtgctttrcagtgatggccagaggtggagaagcaatcatagttctggttacagtaaaggaacgtggtgtcatagaaagcaagggactgggtcaaagtgagaagagata

SEQ ID NO: 26598 - DNA, 201 bp, Homo sapiens
tcggccaggcctggcataggaaaccctggcatgtgacacagatgctaatcggtcactgaaggtaaaagggaaggcattcagggatggatagaatgaaacasagaagggaggaacagggaaacaatgactacgtcagcttacaatgaaatgctaattgtctggccctgatattggagcccaagatgctatataccaaagatg

SEQ ID NO: 26599 - DNA, 201 bp, Homo sapiens
agacatactttggccatttctgcatgttccttaaaagcatcccacagtgaattcatgggaaaacaaggagcacattgagcaatctagaaaccattgaatgyggggagggattgaagagacagagaactctgctttgtatgtgagttaagagttactctaaccttttagagagcagttgctggaggaggggtcttatatcaa

SEQ ID NO: 26600 - DNA, 201 bp, Homo sapiens
atagatttgggtaaaagaaatgtcgctatcaggtgaccttaagcatgtctttttttttttttgtaatgccacatatggtcataccgtgttagccttttttwaaattattattatactttaagttctagggtacatgtgcacaacgtgcaagtttgttacatatgtatacatgtgccaagttggtgtgctgcacccattaac

SEQ ID NO: 26601 - DNA, 201 bp, Homo sapiens
catgtctttttttttttttgtaatgccacatatggtcataccgtgttagccttttttaaaattattattatactttaagttctagggtacatgtgcacaaygtgcaagtttgttacatatgtatacatgtgccaagttggtgtgctgcacccattaactcgtcatttacattaggtatatctcctaatgctatccctcccc

SEQ ID NO: 26602 - DNA, 201 bp, Homo sapiens
tgaaatgagagaaataagagcaatatcatggcttctaaagccatactgattgaatggaaaggctatcttttattctgagattttccttctggagtgtttatgtgtgtgtgtgtgtgtgtgtgtgtgtgtgttgaaatgcctctttttagatgaaatgactgtgatagtagataatattttaaaaactattcttgattagta

SEQ ID NO: 26603 - DNA, 201 bp, Homo sapiens
gtgcccgccaccacgtctggctaatatttttgtatttttagtaaagacagggtttcaccatgttagccaggatggtctcgatctcctgaccttgtgatccrcccaccttggcctcccaaagtgctgggattacaggtgtgagccactgcgcccggcttgttttgtttttctaaggtgaaacagaaagtgtgctcccttcct

SEQ ID NO: 26604 - DNA, 201 bp, Homo sapiens
caccacgtctggctaatatttttgtatttttagtaaagacagggtttcaccatgttagccaggatggtctcgatctcctgaccttgtgatccacccacctrggcctcccaaagtgctgggattacaggtgtgagccactgcgcccggcttgttttgtttttctaaggtgaaacagaaagtgtgctcccttcctcttaggct

SEQ ID NO: 26605 - DNA, 201 bp, Homo sapiens
agtgcatatgaatgtgctttgtaaataatgaaataaggcggggcgcggtggctcacacctgtaatcccagcactttgagaggccgaggcgggtgggtcacraggttaggagatcgagaacatcctggctaacatggtgaaaccccatctctactaaaaatacaaaaagttagccaggcgtggtggcagccgtctgtagtcc

SEQ ID NO: 26606 - DNA, 201 bp, Homo sapiens
aataatatccttccaatggattgcacaacaccattaaccttggagtggttgttagttaatatggttttctacctctcttctaaattgacccgttttggcakctggcaatgtaagccctacattcatgataactgacagctttcagtttatgaatcagctcccagtgccctacctccccactcacctccaagtatatagttt

SEQ ID NO: 26607 - DNA, 201 bp, Homo sapiens
aggaggtggagcttgcagtgagctgagatcgcgccactgcactccagcctgggcaatggagtgagactctgtgtcaaaaaaaaaaaaaaaaaaaaaaaaarggaaataatatatacatgtaatattaccagtaattatgttttagtttttatatcataatcattattgtctttatccagcccctttctctaaccacctaat

SEQ ID NO: 26608 - DNA, 201 bp, Homo sapiens
gattcaaattcttgggtaactatattttttaaagcctcatgaatgcttttaaagtacactcgtgtagtattaccacactagactgtgaactccttgagtckggccattcttaatcatatttgtacaagcaatagtacctggttcttgtgtatactctctgcatgttcactgaatgaaacaacattgaacagtattctttct

SEQ ID NO: 26609 - DNA, 201 bp, Homo sapiens
attctttaaatcatctctagactacctgtaatacctagtacaatgtaaaggctttataaatagttgctgtattatatttttatttgcattattgttattgttttttactttttctaaagtttttggtctacatttggttgaatcctcagatgtggtacctgtgattacagagggctgactgtacacaataaaatcttaact

SEQ ID NO: 26610 - DNA, 201 bp, Homo sapiens
ctgagagtcagggtgggaatattcatgaattcaccttggaattatctgtggaacttactaaaatagggattttcatgtcctgaccataatcattatgattyaaattcttgggtaactatattttttaaagcctcatgaatgcttttaaagtacactcgtgtagtattaccacactagactgtgaactccttgagtcgggcc

SEQ ID NO: 26611 - DNA, 201 bp, Homo sapiens
ttgggaggccgaggcgggcggatcacgaggtcaggagatcaagaccatcccggctaaaaacggtgaaaccccgtctctactaaaaatacaaaaaattagcygggcgtagtggcgggcgcctgtagtcccagctacttgggaggctgaggcaggagaatggcgtgaacccgggaggcggagcttgcagtgagccgagatccc

SEQ ID NO: 26612 - DNA, 201 bp, Homo sapiens
aggctgaggcaggagaatcacttgaacctgggaggcggaggttgcagtgagccgagactgcgccattacactccagcctgggcaacaagagcgaaactccaaaaaaaaaaaaaaaaaaaaaaggaaggaaggaaagaaagagaaagagaaagaaagaagaaaagaagagttgtgtttgtcatttaagtgtctgggatgtgt

SEQ ID NO: 26613 - DNA, 201 bp, Homo sapiens
agtgctagcaggtgcttgtacacacaggcagaaattggtgtagataaaacaagagttcctttcctggctggagggtgtgccccagccctgatgttgtaacmatggctgtgttgtctggactgtgtcatgacagatctgaaaacagtgtctgaacagtagtacatagaagtaggttacagccggctctaagagtaacaggct

SEQ ID NO: 26614 - DNA, 201 bp, Homo sapiens
cataaggacatcacggacttttatgtgttagatacttttaataatccatagtgtttaatgggaatatcattattcttatttggcagacattgaaactgagktttcaaaggtagaagttatacatgtagggcatttagagcctagagcaaaatttaagttcttgactcctgaacacctaacccgacctcactacaaatgcat

SEQ ID NO: 26615 - DNA, 201 bp, Homo sapiens
gacaagtgtcatgatagaggtgagcacagggtactgtggaagcccagagaaggaccagtggtgctgacaggagcaagaagccatccaacagaggtgatagygaactgagtctccaagagcaaatcagggttagacagcacagaagcagggggatggctttccaggcagatgggccagcagagacaagagacagcaggttgg

SEQ ID NO: 26616 - DNA, 201 bp, Homo sapiens
tgctgtataaaccctatcactgccttcatgaaaccatgggagcagtttttgcataaagaccaagattttgtttgtatatgtttgccaattcactttttatwaatttctgtttaacttcataacagtgatgattctgaatgttctcttgccttgatttgcagcactcaaaaagagtgaatgaaatgtgcagctcagagtgtc

SEQ ID NO: 26617 - DNA, 201 bp, Homo sapiens
ttaaggatctagaagaaacagtgtgcaaaggatgagtcaagaaagagggagaaccaagatagtcgtagaagcatacaaggggtgactcttctaagaaggasggggcagtaaagtgtccagttgcatgcagagactaaagagtgagatggaagaaagaactattggagtaaataattccttgatgactttaccttcctgaga

SEQ ID NO: 26618 - DNA, 201 bp, Homo sapiens
cctaaactctgtgaccttcgacttcatcatctggaaaatggaaatggtttgcttgttgtgaagagtggggataaagtttacagaacatctggcatgaagcrcttgctcagttcagagttaactttattgtcctcacttcatgtagatatgcttgagctcctggttgatgtgtcttagcaaaatattatcttaataattatt

SEQ ID NO: 26619 - DNA, 201 bp, Homo sapiens
aatcttcaaaccattcgatacaggattgctttcctctgagccaagtaggaaagtgttaaggatgtggtgcaccctcccctaccgcactggcactcctgacytgccagaggtatgctcacccagacagccacaaatgataccaagtagtatttctcacacttaaggagatcccttttaaagattagaaaagacacccggcat

SEQ ID NO: 26620 - DNA, 201 bp, Homo sapiens
aagacagcagcctacagggttccccatgatccattatgaaattcaaaatggttgattcttagggcatccaaattgggatggaagaagtcaaattatcattrtttgcagatgatatgatcttctatttggaaaaacctaacaactccacaaaaaaactgttagaactgataaaccagtaaagttgcaggatacaaaatcaac

SEQ ID NO: 26621 - DNA, 201 bp, Homo sapiens
tccagcacttgatcttggactgctcagcctccagaaccatgagaaataaatgtctgttgtttaagccatgcagtctatggtattttattatagtggtctgygctgataagacatctccttagatgtttaagtatctaatgcacagaagtgaatactcagcttgatataagaaatatgttggagttgacccctccaagacag

SEQ ID NO: 26622 - DNA, 201 bp, Homo sapiens
gatgccaaatctaagtcttccttgatattttagatccaaactgagagctaatctgatagaccagctgatgtcaactcttagagtttatctatacaagtcctttttttttttttttttttaaatctagaccagtgtttttattttgtgttctgtggaatcttaggtctgtggaggtgccttagggtctgcgtaggtgtgaga

SEQ ID NO: 26623 - DNA, 201 bp, Homo sapiens
acagaaccactgagagtcagggtgggaatattcatgaattcaccttggaattatctgtggaacttactaaaatagggattttcatgtcctgaccataatcwttatgattcaaattcttgggtaactatattttttaaagcctcatgaatgcttttaaagtacactcgtgtagtattaccacactagactgtgaactccttg

SEQ ID NO: 26624 - DNA, 201 bp, Homo sapiens
atgccaaatctaagtcttccttgatattttagatccaaactgagagctaatctgatagaccagctgatgtcaactcttagagtttatctatacaagtcctttttttttttttttttttaaatctagaccagtgtttttattttgtgttctgtggaatcttaggtctgtggaggtgccttagggtctgcgtaggtgtgagag

SEQ ID NO: 26625 - DNA, 201 bp, Homo sapiens
atgacttcatttccctgtgcctccgtttcctccttctctgaatgtgttgcagttctttcctccaaggttgttgtgaagtttaaataaaacaatttatgagmatgggacaggcatgctcatttctcaggtagcattcagcttttcacatctccttcctaattctagcccccattatggatcgtatgtttgtgtctccccaat

SEQ ID NO: 26626 - DNA, 201 bp, Homo sapiens
atttcatatgaaataaaaaatctgctggcattttttaaagaatactactccaggccgggcacagtagctcacacctgtaatcccagcactttgtgaagctraggtgggcagaccacttgaggtcaggagtttgagaccatcctggtcaacatggtgaaacctcatctctactaaaaatacaaaaattagccaggagaggtg

SEQ ID NO: 26627 - DNA, 201 bp, Homo sapiens
tctgtgtaatctagttttcttttttcaatgctttgtcatcctgagtaggaaaaacacctgggtttagtattggtcctggcgtttcaatctctgaccttcastcccttcatgaataaactcaggattgatgtttaagattccaactgtctttgattgtgctgataaagtctacttgaagacatggggcaatcttgaggctca

SEQ ID NO: 26628 - DNA, 201 bp, Homo sapiens
acatgtcacttcctctggaaacctttttttactctcccaggaaaagttgatgggtgtgtgtgtgtgtgtgtgtgtgtgtgtgtgtgtgtgtgagagagagwgagagagagagagaagatgcagggagggagggaggaagagagagagttaagccaggatatggatggaggtggggggcattccaggtagagagaacagcaa

SEQ ID NO: 26629 - DNA, 201 bp, Homo sapiens
caggaaggacttctggaggaggctgtgataccaagaggattgatacccaggaaagaacataggtgacctcattcatcaagctcgtgcttcatcacaagacsttactgacttcatccctaaaaactctccaatagaagtgagcaagagagcgaatcttcatcagacggacagatagcagcatctaaatatagagtttgctat

SEQ ID NO: 26630 - DNA, 201 bp, Homo sapiens
gccagtaatggaagggccttactctctggcaaatagacatctcaagctgacattccaaatgacctcaaatggatgtgcatcatggaagacctcctagcaamccagatttctggttagagaatgttgtagagctggacttccactatttagcaaggctaactaaggtttggtaaagtgatggatcgatgaacaagatgctgg

SEQ ID NO: 26631 - DNA, 201 bp, Homo sapiens
atgtcacttcctctggaaacctttttttactctcccaggaaaagttgatgggtgtgtgtgtgtgtgtgtgtgtgtgtgtgtgtgtgtgtgagagagagagwgagagagagagaagatgcagggagggagggaggaagagagagagttaagccaggatatggatggaggtggggggcattccaggtagagagaacagcaaat

SEQ ID NO: 26632 - DNA, 201 bp, Homo sapiens
ttatttctgcccagtactatagaactatttccagtcattgtacatggattgttgttcacttatatttcttcctagagctttaactgacagtgaagtgcagrtgccctggaggaagggattaactagggcttaatctgaagctcctcttaggatgcaggaaggacttctggaggaggctgtgataccaagaggattgatacc

SEQ ID NO: 26633 - DNA, 201 bp, Homo sapiens
gtcacttcctctggaaacctttttttactctcccaggaaaagttgatgggtgtgtgtgtgtgtgtgtgtgtgtgtgtgtgtgtgtgtgagagagagagagwgagagagagaagatgcagggagggagggaggaagagagagagttaagccaggatatggatggaggtggggggcattccaggtagagagaacagcaaatgc

SEQ ID NO: 26634 - DNA, 201 bp, Homo sapiens
tgtttattatatgtatatattctcattattttatgtgcaaagagggtttcttatgtggtactctttagggagataatatgcaaagagatcttctatttcatttttactaacactactgcagtttgctaaatcatcaccatcaaaccatactttaatttaatctactttattgccttccaaagcatttcctatgagcaagat

SEQ ID NO: 26635 - DNA, 201 bp, Homo sapiens
tagtacatagcaggagctaaataaacaacagctgttgttaatagttaaaatgctgcatttcatcatgtggtttcggtcaagtttttgaactttctttctttctttttttttttttgagatggagtctctctctgtcacctagactggagtgcagtggcactattttgccttatagcaacctctacctcctgggttcaagcg

SEQ ID NO: 26636 - DNA, 201 bp, Homo sapiens
taaacaacagctgttgttaatagttaaaatgctgcatttcatcatgtggtttcggtcaagtttttgaactttctttctttctttttttttttttgagatgragtctctctctgtcacctagactggagtgcagtggcactattttgccttatagcaacctctacctcctgggttcaagcgattcttgtgcctcaacctcct

SEQ ID NO: 26637 - DNA, 201 bp, Homo sapiens
gagagaattggagagcgactagggaggaaacagaagtcaaagccaggaatcatccagttttttccatgtaggtacaaattagaagatctgtgactgtcttygactctcattttgctgtctgctggacaatgtttgcagagtgccgggatgaagtaactaagatctctattcaggataaatgctagttctgctttgtactga

SEQ ID NO: 26638 - DNA, 201 bp, Homo sapiens
atataatgtagacagtagtgtagcctctttcagtataatatccttaaaacatgaccacaggatggttgctggaagccttcagaagagtttaagcttatctsaagccatcataatatcatgtgaactttgtttctgaaagaatatagattgggttctcccattagcaatgtatgtggcaattgtttgtgatggctcagagaa

SEQ ID NO: 26639 - DNA, 201 bp, Homo sapiens
gccttcaggtgaacaaaggcaaagggacaaaccaacaaggcagtgtaaagacacaaagggtgcttgcctcactcagtgggcccccttcactgtgaaaggayagcactgaatttctgaatgacatctgcatcagatggaatcctgtcctgtggccttgctgtgctacggtaaactcaatgcagaggtacaagagttttctta

SEQ ID NO: 26640 - DNA, 201 bp, Homo sapiens
ccaagcatttgaaaacaacatatggaatgccataccctccatataatgtcatgctatcaccaagtttctttctgttcagttttctattgtattatataaasaagttcatccatttattcattttgttttttaaaatgtatcaattcaatataatttccttctgtgtgctgaccactaggccatctaggtactagaaaatca

SEQ ID NO: 26641 - DNA, 201 bp, Homo sapiens
agtaggacatggaagaatgggcttccgtacttttctgtcatcagacatttggacgaaggattgtacttatttacatttccaagggcagtagaaagtctacrggcagaaggcatggagggacaagttggcactttgttacactgcataatagggtgcctccaaggaaagaagttccttcccactggaagaatacaaacataa

SEQ ID NO: 26642 - DNA, 201 bp, Homo sapiens
tggatgggtgatcaccctgctctgtcttacaggtgcagcccagctgcccaggatggctggcaaacacgcaacagttttgccgggggactttgagttgcctkgggtaggaaaagttttagctctggttgttctcttttgattaggcttagcctcttggaatctgatcagtattagtttacattatctgagcactcggtgctg

SEQ ID NO: 26643 - DNA, 201 bp, Homo sapiens
tttaaaaatacatttgttattttttatttggaaaaaaggtcatattcactcctcatcagctaatacgactttgtcagtgcctggtacctgttattatgtgyattagccaaagggaagcaagttgtgaactttagaaaggcaaatttcactgcatctcctggttctggtggtagtgaggctgcctttggatgggtgatcacc

SEQ ID NO: 26644 - DNA, 201 bp, Homo sapiens
cgtggctttccattgcactcagaaccaaacctgccctccttaccttgcctcacaaagcagcacacgagggagccctgcctccctcctgacttccacctctmacccccttccccttgcttgctctgctgtgatcatactagctcctttctgttttataaacaggccaaacacattccctcctggcatgactgcccttttctt

SEQ ID NO: 26645 - DNA, 201 bp, Homo sapiens
gagtcagacaggcacatttgaaagcagctccccttcttcctggctgtctgacttggacaactgatgcctctctttgagtttcttttctgctcatgggcacyattcctgacttatgatgggtgcccaataatgtggcatagtcactactgtgcagagttagatgtaaggtcttttacaacagcttttctggccttgaatttg

SEQ ID NO: 26646 - DNA, 201 bp, Homo sapiens
agggagatcaagggaaaaatcgcatttggggaggaactacatttattacttaagggtgaactgggaggcgagacaaccaaaaaatctcaagaccagggaawgggaaggtgacaggtacagaggtgacctggcagacaggataaggggagctcttgttcttgacagaggaaatggtacagaaaaattcacagatgtgaagac

SEQ ID NO: 26647 - DNA, 201 bp, Homo sapiens
tgaaagggagatcaagggaaaaatcgcatttggggaggaactacatttattacttaagggtgaactgggaggcgagacaaccaaaaaatctcaagaccagkgaaagggaaggtgacaggtacagaggtgacctggcagacaggataaggggagctcttgttcttgacagaggaaatggtacagaaaaattcacagatgtga

SEQ ID NO: 26648 - DNA, 201 bp, Homo sapiens
ctatttcttaagaaactgttcaatatgaactaaagagaaaggggcatttggtaaagcctgagaattgatagattgtgaaagggagatcaagggaaaaatcrcatttggggaggaactacatttattacttaagggtgaactgggaggcgagacaaccaaaaaatctcaagaccagggaaagggaaggtgacaggtacagag

SEQ ID NO: 26649 - DNA, 201 bp, Homo sapiens
tgtcataaaaatgtacagttgaccctccatatctacaggttcctcatctacaggtttggcattctcaggttcaaccaaccatggattgaaagtattttttwaaaaaaaacaataaaaataacaaaacaacaataaaataatacagatttaaagaacaataaaatagattcactatttacatagaatttatgtcatattcat

SEQ ID NO: 26650 - DNA, 201 bp, Homo sapiens
gcacccagctgatttctctctatttcttaagaaactgttcaatatgaactaaagagaaaggggcatttggtaaagcctgagaattgatagattgtgaaagrgagatcaagggaaaaatcgcatttggggaggaactacatttattacttaagggtgaactgggaggcgagacaaccaaaaaatctcaagaccagggaaagg

SEQ ID NO: 26651 - DNA, 201 bp, Homo sapiens
ctgtcataaaaatgtacagttgaccctccatatctacaggttcctcatctacaggtttggcattctcaggttcaaccaaccatggattgaaagtatttttwaaaaaaaaacaataaaaataacaaaacaacaataaaataatacagatttaaagaacaataaaatagattcactatttacatagaatttatgtcatattca

SEQ ID NO: 26652 - DNA, 201 bp, Homo sapiens
tataacttcctaagggatacatctacctgttaaggttgtcagacaactcagtcggtgacaagattttagttgtgtttagaaaaagttgttttgtatatcartttctatggtgtaacatttgtgtttctatttcagtttaattatttgtctttattctattatttttaaatgtttatttacttatttatttatttgaggcag

SEQ ID NO: 26653 - DNA, 201 bp, Homo sapiens
caaagtcaagtgctgaaattggagtcagtataatacggtggccaaagggagagcctctgcctgagttgatacctggacattgctactccttagctgtgtgycctttaacacattacctttgtataccttcgtttcatcatctgtaaaattaatgcatttggttgcactttttaagctgtattaatctcctttctgactgta

SEQ ID NO: 26654 - DNA, 201 bp, Homo sapiens
agtaacatgtgaatacttctatacattttttggattctatttaatagattgagactttgcaaagtcaagtgctgaaattggagtcagtataatacggtggycaaagggagagcctctgcctgagttgatacctggacattgctactccttagctgtgtgccctttaacacattacctttgtataccttcgtttcatcatct

SEQ ID NO: 26655 - DNA, 201 bp, Homo sapiens
gtattgtttcactcagtacctagcacagtgcatgactgctcaaccaatatgttttgaatgcaggaagaaaactaagcctaataagtaggagtgttcgttayatgctttttgttgttgtcgttgttgttgttgttttgagacagtctcgctctgtcacccaggctgaagtgcagtggcacgatctcgctcactgcaacctcc

SEQ ID NO: 26656 - DNA, 201 bp, Homo sapiens
tgctctccaatggtgctttgttactttacagacattctactgtccccatctccatcttcccagtcccacatgcagattgcttgagtcacgttgatcttctrgctatttcccgaacatgccagttcctctcagaagtcagggtttagaaatgctcttccacataatggaattacattttctctaccctcctcacctggatga

SEQ ID NO: 26657 - DNA, 201 bp, Homo sapiens
ctattataatcatccccatttttcataagaaaccaaggccaaagaattagcttgctcaggtcacacagagaggaaatagctcgatttagccattccacaaygtatacatatatcaaaacatcatgttgtacaccataaatatatacaatgtttactttcatttaaaaaatacattttgaaaaaggtcacacattgaagaga

SEQ ID NO: 26658 - DNA, 201 bp, Homo sapiens
atatgtgggccacctatcttgccctatagccttcagtcatctatctcaagggtcagtgaacctttttctgcaaagattcagatagtaaatatttttgaccyggcaggatatatggtctctgttgcaactactcaactcagctgttgtagctcaaaagtagccatagaaaatacacaagtgagtgtgttccaataaaacttt

SEQ ID NO: 26659 - DNA, 201 bp, Homo sapiens
aggaaaatcagacccataaaggtttcctttggtcaaataagtttgggcagctctgcatgctttatgtctctaggagattctcaatgcacagttaaaggctytggaagtcctgctagaaacaagtatgtttgacatttaaaaatttggctttggtcttttgtagacatgaaaatgctccctgttcttataggcacctattaa

SEQ ID NO: 26660 - DNA, 201 bp, Homo sapiens
gcgaccagaataagggaagcacagcatggtgtgtgagagcccactgaagtgcgctggcattttctgaatcaacagacctctcagcgcttttgctcttgctrtgcctttctctatcccaccttatagctcactaaaatactttgggtggtctagccccacaagaaatatttaatacttgttgcctgctatgctgctgtagat

SEQ ID NO: 26661 - DNA, 201 bp, Homo sapiens
cactgaaacgtgcttcatgatagttatggatctccactctggcttgtttggcatggagatgctaggttaaatggatttttccaaaacctgcaatctaatgytttcagcagagtgttcaaaccttttatgtgttcggtgctagcgaccagaataagggaagcacagcatggtgtgtgagagcccactgaagtgcgctggcat

SEQ ID NO: 26662 - DNA, 201 bp, Homo sapiens
ggtatgcatttctctaatcagtgtgatatctctggataaattgctaaactcgtaaagtcaaagaacaatccacaatttacttttgccgtcagccattcaarttaccaagatggaaacttaactagaagtgttttttcccccaaatgtggcatcctgggatctgtgtcaaaggttaggaagaaaagttaaaacaaaacaaaa

SEQ ID NO: 26663 - DNA, 201 bp, Homo sapiens
tttggggagttatgaaatgcaggatagaagagtttgcccctgacttgtaaacatggggtgttttgcctttcattttaagataggaaagaaatacatttttwaaaattaactcccaaatcaaaagatgaaagtggaatgaactatttctggatagggagaggtttggagtgtcatttaacatactgactgtctctcagcaaa

SEQ ID NO: 26664 - DNA, 201 bp, Homo sapiens
ttgatttgattcaccaggctcctctcttctcctgcatttcaggcctctggagacaggtatgccacacaacaggaattttctggagttgaatctagtctcarggtggaagaattttcagaatgacccaatattttctgcgacttggtgtttctaggatctttgtgagctaggaccctaagcaaggagcaactgactgtgtac

SEQ ID NO: 26665 - DNA, 201 bp, Homo sapiens
gtggaaagaaccatctactttgcacttattgggagtttatggacaggcaggtacctctcataaactttgttcattcagccacttgaaataagccacgtggrttatgtgccacgcaaaatttcagtaatgggttttgggagtgtttagatagcaacaacttcatagactgaaccttttggtttttttttctttctctccaac

SEQ ID NO: 26666 - DNA, 201 bp, Homo sapiens
ttctaagagccgagtaggggagtcgcggggagtaagccggagttaaccgtggtctgcgtgctctcaggggcacgggtctctcctgaggactgacggaaacktgacacgtgccagccttctccctcccaacttgccgaactttgcctgggaaacctcagtcaaaacaggagccgccgaacctgcactggcggctgggagcga

SEQ ID NO: 26667 - DNA, 201 bp, Homo sapiens
atgcttttatacttatctgattatttagcaccttatggtaggaccgtgctgtgctactaatcatgtcaaaatatggcctttttggtggtaagttcctttcrgcacttttttttttttttaagagagagctttcacccttctcactggtgtttagagactgtttttgcatggcgtctgggaaagctggtctgcaaagcaaga

SEQ ID NO: 26668 - DNA, 201 bp, Homo sapiens
aactgctgacttgggctctctggacctacatattctcaattgagatgaaagggtttggatgggtgatcactaagatccctgctcactgtgtgattttatgyatactgtgatgctttcatatcttcatatctctgcagtaatgcttaatgactatagttgggagttgcaggcactctctcagaagccttcccagacctaagc

SEQ ID NO: 26669 - DNA, 201 bp, Homo sapiens
aagctaatttctcctctctaggaagtaggtaactatgccccagagagttaacaatgtaagtaaatcgatacatctattgtgattatttttctttatgaatraggcagaaaatatattgcctaagctccttcttagaagaatctgaatcaaagctgatgggatttgcatatcagactccagataatctaggaatcaggtaga

SEQ ID NO: 26670 - DNA, 201 bp, Homo sapiens
agcctagttgcagctatggctagagccaagagctccatcaactgtttccacaccacagctttgccttctcagtgctggctttgttagtaagtaggttctcyccaagcagtggcactgatggccaccagcgatccaggctcaaatcctactagttcagcaaccctagcaggagatagggctttttcccaatggatccacaga

SEQ ID NO: 26671 - DNA, 201 bp, Homo sapiens
gacaaaagtctagcttattctggcttcagtctgcaagagagttttctggctcacataaccaagtccaggtgtagcctagttgcagctatggctagagccargagctccatcaactgtttccacaccacagctttgccttctcagtgctggctttgttagtaagtaggttctccccaagcagtggcactgatggccaccagc

SEQ ID NO: 26672 - DNA, 201 bp, Homo sapiens
ttcataattaacccattttaagcaaggatccattgcatatagcagtctcctgttaaccatgtagtggctacagtcaagtgtaatgaatttttctttcagtwtttttttctcaagaaattccttcttccttgttttttgaatttgaaaaacacaaaaaaagcataaaagagaaaaaaagtcatttatacttctacccagtgg

SEQ ID NO: 26673 - DNA, 201 bp, Homo sapiens
gtaaatcccaaatccactacttttccagctggctgatcttgaacaaaggacaacccctctcagcttcgatttccctatcagttaactatagataataatarcaatgatccaaaaggcttatgatgaggctcaaatgagaaaatgcatcaaagttcttagcatggtgattggcaagaagaaaacatttagtcaacattatca

SEQ ID NO: 26674 - DNA, 201 bp, Homo sapiens
aaactgttaggatataaaaaagttgttcacaataaaaacaacagaaaattcattggctatacatcttttgaatgtgtgtgtctctttgggttttcattagygtctagcaatatactttgagaaattaaatttgaacagaagcttcagcagaatatgaaaacttctagtgttcataattaacccattttaagcaaggatcca

SEQ ID NO: 26675 - DNA, 201 bp, Homo sapiens
aactacaagctcagatgcttacaagggccaggtgtttgtgggtgaaacagtgtgggtggggaccaggtaaaccgctgttaaggttcatctgatggttgcartaacagaatactggactcatgtaggtctttggctttttcaagaaaagctagacatcttgttttcgtgtgaaatccctctgtttaaaaatttggcactaaa

SEQ ID NO: 26676 - DNA, 201 bp, Homo sapiens
gggaaagtcactttccttctctttgagttcctgctttacactaggctccattctcagccctgggcacaaaccaaataaaaaaagttccatgcacaactgamcttttgttctattaggcaaaggcagacaatcaatgaatgaatttgcgaaatgtcagatggtggtaacttccaggaggaaattgaagcaggaaaaacaaag

SEQ ID NO: 26677 - DNA, 201 bp, Homo sapiens
gatggaggaaaggggctttcctaaagaagctcacagtgtaacatagtgcaacattgcctgggataagatatgacagtagagcctcgcctagcttagtgtartatatgtagtataacatgatatagtaggaattcagatacatgaacaggacgtgccaagtacaccactgggaataaaaaacaggcgaggttgctattcagt

SEQ ID NO: 26678 - DNA, 201 bp, Homo sapiens
tgtgtgtgtatcaggtacggtataatttaatgatccttcaggtgtctcctgttataagaactacaagctcagatgcttacaagggccaggtgtttgtgggygaaacagtgtgggtggggaccaggtaaaccgctgttaaggttcatctgatggttgcaataacagaatactggactcatgtaggtctttggctttttcaag

SEQ ID NO: 26679 - DNA, 201 bp, Homo sapiens
ggaaatacagaaaaatcacagcccacaggattcggatcctttctatcctgttggctgcatttcagctaaatttgacagaaaggcatgtgtttggacactgrcatctttgcatacaagctgtgggcactgggtctctgagatctgtcaaatggagattgcggtgctggtggcaatgatgatgcaatgatgaagatgatggtg

SEQ ID NO: 26680 - DNA, 201 bp, Homo sapiens
cacctgtaagcccagctactcaggaggctgaagcaggagaatcgcttgaacctgggatgcagaggttgcagggagccgagttcacaccactgcactccagsctgggtgacagagtgagactctgtcttaaaaaaaaaaaaaagaaagaaagaaagaaaaagaaaaaggcatggtaagatggtaaggcagactttactcaga

SEQ ID NO: 26681 - DNA, 201 bp, Homo sapiens
aacatgaagtagggagaatgaatggaaacacgatgtgctagcttgcaggtctcagcagcgcttgtgtaaacattacagctctggcattcttcagttccctstctcagtccctgtagcctgacagaacaacccactcattctgtagaggagcagactttgcttagagaggagacgtgggcatacaatattgtaaagtcacca

SEQ ID NO: 26682 - DNA, 201 bp, Homo sapiens
tgcacctgtaagcccagctactcaggaggctgaagcaggagaatcgcttgaacctgggatgcagaggttgcagggagccgagttcacaccactgcactccagcctgggtgacagagtgagactctgtcttaaaaaaaaaaaaaagaaagaaagaaagaaaaagaaaaaggcatggtaagatggtaaggcagactttactca

SEQ ID NO: 26683 - DNA, 201 bp, Homo sapiens
aacctatcctgacttgaagtgacatgaggctactgagaatctttattgatccccgtgagtaggaatagtcacccatttgttccagaagcattcatgagttwcattacggggtgtcacctcaaacccgggtagggctattacaaataaaagataaatgtggtgtagtatatgctgccttttctaaaatccaaaataaagtct

SEQ ID NO: 26684 - DNA, 201 bp, Homo sapiens
taccaaaaatgtgaaaaaattagccaggtgtggtggcatgcacctgtaagcccagctactcaggaggctgaagcaggagaatcgcttgaacctgggatgcrgaggttgcagggagccgagttcacaccactgcactccagcctgggtgacagagtgagactctgtcttaaaaaaaaaaaaaagaaagaaagaaagaaaaag

SEQ ID NO: 26685 - DNA, 201 bp, Homo sapiens
ggaaggccgaggcagttggatcacttggggtcaagagttcgagatcagcctggcaaacatggtgaaatcttgtctctaccaaaaatgtgaaaaaattagcyaggtgtggtggcatgcacctgtaagcccagctactcaggaggctgaagcaggagaatcgcttgaacctgggatgcagaggttgcagggagccgagttcac

SEQ ID NO: 26686 - DNA, 201 bp, Homo sapiens
tttatcaaacttatagactgattaaaagataatgccatcattaggacattgagcctgagtctttctatctgtaaatgtagtaactctttccatttatttagttcttatttaatgtctttcaatacagtttataattttcttcaaagggcatgcactctttttagattgagttttaggtggtttatatttttgtaattgcca

SEQ ID NO: 26687 - DNA, 201 bp, Homo sapiens
catggtggctcacacctgtaatcccagcactttggaaggccgaggcagttggatcacttggggtcaagagttcgagatcagcctggcaaacatggtgaaaycttgtctctaccaaaaatgtgaaaaaattagccaggtgtggtggcatgcacctgtaagcccagctactcaggaggctgaagcaggagaatcgcttgaacc

SEQ ID NO: 26688 - DNA, 201 bp, Homo sapiens
atactgttgagatttgatttgagttttatcaaacttatagactgattaaaagataatgccatcattaggacattgagcctgagtctttctatctgtaaatrtagtaactctttccatttatttagttcttatttaatgtctttcaatacagtttataattttcttcaaagggcatgcactctttttagattgagttttagg

SEQ ID NO: 26689 - DNA, 201 bp, Homo sapiens
ggaatgaactccttctctgaagcctttttataagaacgctaatcccctctatgagtgttctacccttatcacttaatcacctcccggtactatcactctgrcaatgaagattcaacacatgcatttgaggggacacattcggccaccatcaaggggctaattatttttctgatttgtatgtatcctggatagctgagattg

SEQ ID NO: 26690 - DNA, 201 bp, Homo sapiens
caaagcccctgcacctccctgaatctcagtttctttatttataaagcaggttaatagtaagtacctgacaggtctgctaccaggattatttgcaatgtgtwtgtgaatatgccttgcccttgtgtgcctacctgtcaccctcttttctctccctccatctcttatgtgtcacatttattaaacacttattatgtgccaaac

SEQ ID NO: 26691 - DNA, 201 bp, Homo sapiens
agaagggcagaaaggggaatgaactccttctctgaagcctttttataagaacgctaatcccctctatgagtgttctacccttatcacttaatcacctcccrgtactatcactctggcaatgaagattcaacacatgcatttgaggggacacattcggccaccatcaaggggctaattatttttctgatttgtatgtatcct

SEQ ID NO: 26692 - DNA, 201 bp, Homo sapiens
ggactcagagacctgcattccaatcctgcacctgccaagcttctagctgggaaaccttctcaaagcccctgcacctccctgaatctcagtttctttatttrtaaagcaggttaatagtaagtacctgacaggtctgctaccaggattatttgcaatgtgtttgtgaatatgccttgcccttgtgtgcctacctgtcaccct

SEQ ID NO: 26693 - DNA, 201 bp, Homo sapiens
aaaatgaaagacttaggttatttctaaactctcatctagttctggattttattttttgagtgactactaagggagagaccccaagttaagggctggggtcrtgttgtggggatcacatgagattatggatggcataaaaatgtgtaaatcttattcacctttcttttgacagagagtaacaacagtcagttatgaaggaac

SEQ ID NO: 26694 - DNA, 201 bp, Homo sapiens
ctgtgctcttctcacctaaaggaagaaggaataaaaccagaaggagagagtctcctccgctttgacagtcctttcagtactttcctttaggaggtcacttyttagtccgtttgtgctgctgtaacaaaatgcctgagactgggtaatttataaaaaacaaatttgttttctcacagttctggatcctgggaagtccaggat

SEQ ID NO: 26695 - DNA, 201 bp, Homo sapiens
atgtcatgaagatattctcctttgttgtcttctaaaagctttattgttttgtttgcctttcaaatttaggttctctaatccatgtggagtgtgtgcatatrgtgtgtgtgtgtgtgtgtgtgtgtgtgtgtgtgtgttgtgtgaggtaggcatttattctaattttctttcatatggaaaaatgattttcctggaacttag

SEQ ID NO: 26696 - DNA, 201 bp, Homo sapiens
accagtattgctactgtcagcagctttattgtaaagaaattccaactctgggaactggcagcactgcatccattgactctggggagattcttccagccacrgcacaaaatacagctttctcttttctaccaagccgtatcgaactctttgccttgatctaaggacctgggatctccactccttcaagtgttctaggcagca

SEQ ID NO: 26697 - DNA, 201 bp, Homo sapiens
atagttgggaaaagaggaactcttttcttctaggccacttgtttctcctctagcagggaaagatctttgcaggtgttgcagagacagcaggagttatcaargagaacaggtttcctgcaaacatcctcagtgatttgcattgtactaagcaaacacaaaccacctcacttattcatattaattgagcagttttaaaattta

SEQ ID NO: 26698 - DNA, 201 bp, Homo sapiens
ctatttctgaccctctacggagaacatagaagagctgtcctgttttcctatgatatgtaatatgtatttttttaatcctctgggtagtgcctgcagtaatyttctgtgcacacatcctgctgtggaagatttgacagtaagaactgcctcatgaggccaacccaaaaaggaacagcagatataaacatgtcgccattcttg

SEQ ID NO: 26699 - DNA, 201 bp, Homo sapiens
cctggtaacctttctctgatcatacgtccccttctcttggcagacatagtcactatcctaaatttgataattcttttgaatatatttttccagaacaaacytaaacaattccactgaattctcttcactttctagctcattactgtatatataataaaaagaaatggtattttgtccaataattttcctgaaataaaggac

SEQ ID NO: 26700 - DNA, 201 bp, Homo sapiens
gggttgcattgtgctaccccccagtcctcattcatatgttgaagtcctaactccctgtacctcagaatgtgaccttatttggaaatagaacattgcaaatktaatgagttaagacgaggtcatagtgacttcactatgactggtgtcctcataaataggtgaaatttggacacacagatagacacacagggagaacatcat

SEQ ID NO: 26701 - DNA, 201 bp, Homo sapiens
tcccaggaaacactaatgtcccctaagatcattatgaatatttcaaaaggaagaaggctcagagggaaaaataagttccatgttcaaaaatgtttggaagrtattgaattatatatcctgttcttagtaagatgtggtatttactgatatgttaaaggttcagagattttctgcactaaagtcatttaactcatgaagaat

SEQ ID NO: 26702 - DNA, 201 bp, Homo sapiens
atcatttcaccttactgagcttccacttctttatcactaagaagagaaacatggtcttctttcttatggaattgttttgtagattaaatgagctaacatgrataaagcacctgtggcatgggttgcattgtgctaccccccagtcctcattcatatgttgaagtcctaactccctgtacctcagaatgtgaccttatttgg

SEQ ID NO: 26703 - DNA, 201 bp, Homo sapiens
ttgtggtggtgaaggcgggctgtttaacttatggtataaaaataaggggatgggtcctcccaaatagttgtaagtagttcagcatgaacccaaatcggccmtcttgaccacctgtagtgagtcttgcaaattaccaaccccatgcatctgctccgagcttcatattgatttacaattttctttgttggtcagtctctgcat

SEQ ID NO: 26704 - DNA, 201 bp, Homo sapiens
tgctagctgtagaatgtaaaggttgagtatcccttatctaaaatacttgggactagcagtgtttcgggtttcagatgtttttggattttggaatatttgcrtatacataggagatattttgtgactggcacccaagtctaaacatgaaatttatgtttcatataataacttacacacatagcctgaggataatattatacc

SEQ ID NO: 26705 - DNA, 201 bp, Homo sapiens
gacatataaccaatctgcaatgccagtgggggagtctcataaacagaaaggaaaatataaataaaattctgctgaatagaagagatgacagctaaaatgaygaaaattttgtggtggtgaaggcgggctgtttaacttatggtataaaaataaggggatgggtcctcccaaatagttgtaagtagttcagcatgaacccaa

SEQ ID NO: 26706 - DNA, 201 bp, Homo sapiens
tagctgtttcctgccaggcaagaggatgcttgcagaagtaaccaagcataattccaatccagggacttcataagggcagtgatcataccttgttcattttwaatataaaagataaattagatatttaattgggaaatcccatgaaatttcagacttacaaatcaaacaattaagaactccatagccccctgcaaggaatga

SEQ ID NO: 26707 - DNA, 201 bp, Homo sapiens
gaggtaagaggatcacgtgaggccaggagtacaagaccagcctggggaacatagtaagacccccatcactacaaaaaataaaaaaaattagccaagtgtgrggtcacacgcctgtagtcccagatactcagggggctgatgccagagaatcacttgagcctgggaggttgaggctgcgatgaaccaagattgtgccactgc

SEQ ID NO: 26708 - DNA, 201 bp, Homo sapiens
gaaccttgctttcatcatctgcaaaacggacaatattacctaccttgtgggtcttggagcaattttatggagaaaatcatatgattgggtgctttggcacrtagcaggatttcaagagaatgatctcttagtaatagacagcatggaattctgttcaagaaagtggatggcatttggaattggaagaccaggattgaatcc

SEQ ID NO: 26709 - DNA, 201 bp, Homo sapiens
gaagtgtataagcataaaacatatattctttgatttccagttttgatttctttaaagtggagtaaggatcttaaagcacttggaaagtaaccaaaatgtcrcgtccttctgagtccgtgtgctctgttgggggagtcatggagagtagcattttgttttaacaagttacccttttaaaattatttttaaatattgaacttg

SEQ ID NO: 26710 - DNA, 201 bp, Homo sapiens
gctcaaatctcaagaggccaccgttgagctacccagcccatatgacaggaatcctttccttcttgttttggttaagtttcctggcaagcattgcttaatargatttgttttagcatttaaatttcccctctcctgccaagacacaggaggtgttttgacacatggtatcattttggtgatctcttaacctctttttttcct

SEQ ID NO: 26711 - DNA, 201 bp, Homo sapiens
aatacccccatcctaatatacagcctcttgtttgacccttgcagcagtcccatgaagtacctcttattatgccacactatggatggtgtagctttgctttrgaaagggtcaataacttaaaattacacacctataatataacaaagtctgcatttgaacccaggtctgtctatgtggtaataaactgctatgctataatgc

SEQ ID NO: 26712 - DNA, 201 bp, Homo sapiens
tggcaaaggaattgatttggccgctcaaatctcaagaggccaccgttgagctacccagcccatatgacaggaatcctttccttcttgttttggttaagttycctggcaagcattgcttaataggatttgttttagcatttaaatttcccctctcctgccaagacacaggaggtgttttgacacatggtatcattttggtga

SEQ ID NO: 26713 - DNA, 201 bp, Homo sapiens
ctggtgggaggtgattgaattgtggggggcgggtctttcatgagctgttctcttgatagtgaatgagtctcatgagatatgatggttttaaaaacgggggyttccctgcacaagccatcttgttggctgccatgtgagatgtgccttccaccttccatcatgactgtgaggcctccccagtcaggtggaactataagtgca

SEQ ID NO: 26714 - DNA, 201 bp, Homo sapiens
ctcagggttctttgagtatagcaccccacgtggtctttaccagttggtcaaatgtggcaagcgagatgaaaactcatgccatcccaacgctggcacagagkttggactcaagatctgccgctagccattctccttacaggtaggcttttctctttgcctctaattcctgggatctgacccagaaaactcacagacctaccc

SEQ ID NO: 26715 - DNA, 201 bp, Homo sapiens
attagctggagtgcagctgtccaggttgcttaagtgaaggaagatgacttgattgtagttcaatgccttagctgtcactgaactgcattcctaaatatgayccttattgccctgctaacccctctataaacagcactgcagtgaaagcataaaacattaaaaacatcccctggttgactgctattgccttttgaattagca

SEQ ID NO: 26716 - DNA, 201 bp, Homo sapiens
gcttccaggagcctgggtacgacacacatctgcaccaccctagtggtaaaatgaaacaatatctgagagcacttcagagccaaatgcaatattaacactaygtccctggagttatttatttatttatttatgaagaacaaggaaagcccctcctttactaccacagtaaatctccagtagcttgtcaattccttctcagac

SEQ ID NO: 26717 - DNA, 201 bp, Homo sapiens
ctagtaaatgatacagcaaggattcagaccaggtttctgtgactccacaacctgtgtgttctgctgcatggcttccaggagcctgggtacgacacacatcygcaccaccctagtggtaaaatgaaacaatatctgagagcacttcagagccaaatgcaatattaacactacgtccctggagttatttatttatttatttat

SEQ ID NO: 26718 - DNA, 201 bp, Homo sapiens
ctgagtgcctcctttatgccaggcactgcgtggggcaccggggacacaatgaggagtgacatacaacccctgctctcaagaagcacatcacgtcgacactrttttctcgtttgccagatgggaaaatgcaagaatcctaaattttatttaccatctcctctatgctacattcagggcttgatgctttgtggacattgtctc

SEQ ID NO: 26719 - DNA, 201 bp, Homo sapiens
aaggtactttggtatgaactggaagagataggcaagggtgtcagggtcagggaaggaaggatggtatttacagagaaatgatgctgtttaggtggctctamagagatgagacagttcaccaggaagaggagagggaagggtattcctgacagagggaacaatatatgctaagcaggggtcaagctgccgagggttcacact

SEQ ID NO: 26720 - DNA, 201 bp, Homo sapiens
ttagagctcaaaagtgtgttagagaacgtaagtttcatgaggcaggaggaaccatctctcttgctcatttttgtattcccgttgtctagcagaatatcctkcaggtagtagttgcatagtaaatatatgttgaataaatgactgattgaatgaataaatacatgaatatctatgaagctaatacagaaatcatcaccatgt

SEQ ID NO: 26721 - DNA, 201 bp, Homo sapiens
tgtcccctgctgcttggttccccatcttcttgcccctaccattcaccaccaatttgtcttttctcgttctttgcctgaactaccttcctctccattaattktatgtccatatccaatgcactcttcaagatctatgtgtaattcatcatccctttgccccaaagcattttccttacacagaataggtggctttttaaataa

SEQ ID NO: 26722 - DNA, 201 bp, Homo sapiens
gatgcaggaaggacttctggaggaggctgtgataccaagaggattgatacccaggaaagaacataggtgacctcattcatcaagctcgtgcttcatcacargaccttactgacttcatccctaaaaactctccaatagaagtgagcaagagagcgaatcttcatcagacggacagatagcagcatctaaatatagagtttg

SEQ ID NO: 26723 - DNA, 201 bp, Homo sapiens
acacagagccagactatataattttgcccctagctcctcccaaatcgcatgtccttctcacatttcaaaactaatcatgccttcccagcagtctcccaaastttcttaactccaacattcacccaaaattccaagtccaaagtctcatctgagaaaagacaagtccttctgcctgtgagcctgtaaaatcaaaacaagtta

SEQ ID NO: 26724 - DNA, 201 bp, Homo sapiens
aggactatgtttctcttccctgctacactgtgaactccttgatggcagcaccattcctttaagcctgcatgccttactctgtcacagcgtgggtgatttckaaatgtacagttcatagacactaggaagggagggagggagatgttaatgagttggttttattttcaaacccaagcctgctagaagttgcttataaccctt

SEQ ID NO: 26725 - DNA, 201 bp, Homo sapiens
ggaaaaggtttggtgattgagggattgagagaaggccagtgttcttggaatatagtgagagtggtgaaagatgagtctctagacttagggccctggggctyggggcagggggatgcccagcattctgacttttattctaaatattgtaggaagattttgagaggcttcattacattctatttaattctcctgctctaggac

SEQ ID NO: 26726 - DNA, 201 bp, Homo sapiens
cagcctggaagaagttcccctctctctttttggcctgtcaaagtcctcctgctcctctgagacatagctcagatagcactgccatagagctcctcctcagmatccctctccttccatggaattaagccttgtgattctcagtgtactgttttcactccagatgaagctcttattcctttcttctgttcattaggattccgc

SEQ ID NO: 26727 - DNA, 201 bp, Homo sapiens
tccagcttacatgtcacttcctctggaaacctttttttactctcccaggaaaagttgatgggtgtgtgtgtgtgtgtgtgtgtgtgtgtgtgtgtgtgtgwgagagagagagagagagagagaagatgcagggagggagggaggaagagagagagttaagccaggatatggatggaggtggggggcattccaggtagagag

SEQ ID NO: 26728 - DNA, 201 bp, Homo sapiens
ttgttctgtgagtggccagggaggggggtgacagcttcagggggctcttaccaaagagagccacagagtatgaatgtcttgcttgagaccacagggtaaaycagtggcatctttgagatgggatcccagcttcttctgattggggtgaattcttctgtcagcaagaacaagggctgagaagttagacaggtctggggtgct

SEQ ID NO: 26729 - DNA, 201 bp, Homo sapiens
tttaaaaaaagaatttcaccgtttccccaatggctttcaaaccaggtaggatggagcattctaggtgatttattttgatgatttcagtaataaaacccaakggaaaaattggttcatagtgaatacagccacttttcaataaatgcagctaaaggcccaagaatgaatctgaaatggagacgagatctgccatttaaatca

SEQ ID NO: 26730 - DNA, 201 bp, Homo sapiens
gctttttcacctcccgtgtcctcttcctgtcttgtctttcctttttctctcctttgaaacacctaatcacctcctctcctcctccagagtccagcttacaygtcacttcctctggaaacctttttttactctcccaggaaaagttgatgggtgtgtgtgtgtgtgtgtgtgtgtgtgtgtgtgtgtgtgagagagagagag

SEQ ID NO: 26731 - DNA, 201 bp, Homo sapiens
ttcttttgttgctctaatcccagggctggtagcaccttcctgctcttgctaatccttggatcacttcctctttccctgacttttcaacttctccaacaccrttgtaaaggttccttacattaaattctgtgaatagctggcaagtgctcagtttgcctgactggcccttgacagatcatctgtgtttaaatcctagctccg

SEQ ID NO: 26732 - DNA, 201 bp, Homo sapiens
accgtctgttccaatgctactcttgtttaaatagtacttttccttatgacatgtaaagcaatttcaattcaatagctaatcattgtctcaggtgcacaaaygtgtttctagtatgtatttttttaaaaaaagaatttcaccgtttccccaatggctttcaaaccaggtaggatggagcattctaggtgatttattttgatg

SEQ ID NO: 26733 - DNA, 201 bp, Homo sapiens
ggttccttacattaaattctgtgaatagctggcaagtgctcagtttgcctgactggcccttgacagatcatctgtgtttaaatcctagctccgcaagctasttaacctgtgaagcctctgtattcactcataaaattgggattttagaattagaattatgtatgtatggaacctaatagagggcttggcacatagaaggta

SEQ ID NO: 26734 - DNA, 201 bp, Homo sapiens
ggtctttggctgggggaaaggggaaggtgcagtttaggggtcacagggcagactcagtgaggatccccccttctccttttctgtgtcctctcacctaaggytggccttaccatttccaaagcaagtttgcaaacaaagttgttcttggattctgtagaaaagcaggagtgaagatttacagcttggtaggaggattcacac

SEQ ID NO: 26735 - DNA, 201 bp, Homo sapiens
cattaaaactattggagaaaagcaagttagaaggtctttggctgggggaaaggggaaggtgcagtttaggggtcacagggcagactcagtgaggatccccscttctccttttctgtgtcctctcacctaaggctggccttaccatttccaaagcaagtttgcaaacaaagttgttcttggattctgtagaaaagcaggagt

SEQ ID NO: 26736 - DNA, 201 bp, Homo sapiens
gattgactcaaggtcacagagctggtcatggggttgcagttgggcctcggacttctgacttcaacgcccatcatcttgacttttcatgctgctgaatcttyggtagtaacagttttattccccaaacatcttcatttccctgcagatgatccgtgatttccctgtagtcagaattgttcttgtaccagaagatttagaaga

SEQ ID NO: 26737 - DNA, 201 bp, Homo sapiens
actgttactagccaaaacagtctgcattaaaactattggagaaaagcaagttagaaggtctttggctgggggaaaggggaaggtgcagtttaggggtcacmgggcagactcagtgaggatccccccttctccttttctgtgtcctctcacctaaggctggccttaccatttccaaagcaagtttgcaaacaaagttgttct

SEQ ID NO: 26738 - DNA, 201 bp, Homo sapiens
ctgcttggtaccagactgtatactttccaagtgcatttgtgttacttactccttaaaaccatcctgttaagtcctgatcactctcctcatttaacagccarggaaacttggactcagagaggtgagaatgattgactcaaggtcacagagctggtcatggggttgcagttgggcctcggacttctgacttcaacgcccatc

SEQ ID NO: 26739 - DNA, 201 bp, Homo sapiens
tggcatttgagcagcggacagagataaagatgcccacacacatgatggtagctattagctgtagtgagtagcatttgccacaaatcaggagccttacacayagatttatgtgggcaagtaggtttgggcatcaccactatgggaaaagaatgcaccaagtgctatgaccatgccaatgaaagagcaaaagaaaggttactt

SEQ ID NO: 26740 - DNA, 201 bp, Homo sapiens
gagatagggtcagacatttggcatttgagcagcggacagagataaagatgcccacacacatgatggtagctattagctgtagtgagtagcatttgccacamatcaggagccttacacatagatttatgtgggcaagtaggtttgggcatcaccactatgggaaaagaatgcaccaagtgctatgaccatgccaatgaaaga

SEQ ID NO: 26741 - DNA, 201 bp, Homo sapiens
tatacaaatatcatatgtatttcaaacatatattatttatttttctgattacagagttcacttatgtgcattatggaatattttgaaaatacagaaaaatrtaaggaagaaaactgaaataatccacaatcccacaaagacaatcagtgtcaatatttttgtgtataatttacaagttctttttgtggttttacatatata

SEQ ID NO: 26742 - DNA, 201 bp, Homo sapiens
ttgcctctcactgtttgctccttcgccacctttcccttagccagaaagacaaatacaaggataactcaattagtgtatgttaagcagcttccagaaagtcstaagacttccacaaatttcccataagaagagaaactgcccagtggcctgttactctaggttccacctggtttcatttttctcaggtttaggtctgcacag

SEQ ID NO: 26743 - DNA, 201 bp, Homo sapiens
aaggagtttggggcttctgagctcttcagagtttgtttaggattttgaaccttagggaaaaagggatgcccctcaactgtaacccatacattacaaagttkgggatcccaggcattccagtgagatagcattctcactgagcaataccaatgtattcaggtattactgagacaaattgccattgaatgaagaggttatatc

SEQ ID NO: 26744 - DNA, 201 bp, Homo sapiens
taaaggagtatctttatgatcacatatatttttaaatagttattttgtgtgtttcgtattcataatataataatgtaatggctcttcattattctccagawaagatccaaaacttttctcataatatacaaagtttttctgcatatgccttctatgcatccctccagcaacatctctgcctaaccaccccccttccccatc

SEQ ID NO: 26745 - DNA, 201 bp, Homo sapiens
cttcacacattcagttctttctgcctaaaatgccctttcttccttattttctggagacttcccatctatccttggagcctcaattcaaggtcacccccttygtcaagccttctttgatgcccttcgcccattcctgccccaagcctatgtgacacactgggcacacttttaatataaagcttgttgtattatattgtgatt

SEQ ID NO: 26746 - DNA, 201 bp, Homo sapiens
tcttctgcccagagctggtttctttactgtcctgtaatttctgaatgcagtctcacatctcttcctttatgtcctctgcttttcaccctccctctccttaytctgcaatagacaatattggaagaggatgttgaagatcctgtgtaccaggtaatttctgaaactagtcggggttttagattcaagagtgactagacctgt

SEQ ID NO: 26747 - DNA, 201 bp, Homo sapiens
atgttacatgtagcagaccagtagcccaagaagatacctgtttaatcacactttggtcaatattgggtattatcttttctgtttttttcattctggtggcmaaaatggtatctcatttcatatatgttatatgaatcaatttaatatttccaatagcattttgggttcccatatcattctttgtattatacaaaaagagaa

SEQ ID NO: 26748 - DNA, 201 bp, Homo sapiens
gttgccaggggctgggaggagtagggaatgggaagttgtttaatggtagcatgagtttgggaagacaaaaattttctggagataaatggcagtgatagttrcagaacaatgtgaatgtgcttaatgccacattactgaatacttaaaaatggttcaaatggtaatgataaattgtatgttatgtatattttactataacag

SEQ ID NO: 26749 - DNA, 201 bp, Homo sapiens
tccagataaaatccaaaacttttctgcacaggaatgagtttttaaatatctggaatgatataaaggagtatctttatgatcacatatatttttaaatagtwattttgtgtgtttcgtattcataatataataatgtaatggctcttcattattctccagataagatccaaaacttttctcataatatacaaagtttttctg

SEQ ID NO: 26750 - DNA, 201 bp, Homo sapiens
acattttaagtctcagcacttagaaagtgcttggcagagaggagccagagatatctggcaatgaagatttgcaggcatagtgtgatgataaagtaattctrtcacttttcgtgttttctggagaatttagccccatggctttaggaccatgtttttcagtaagcttcaccccctgccaattaaatatgagcaacttctttc

SEQ ID NO: 26751 - DNA, 201 bp, Homo sapiens
tgtttgagacatcgttgtgcctgcccagttatgttttgtgatggcatttgtctgacactctatatgaagtaagggacataactgtaatacatatgcagctytttgacagccagaagcccaggaaggactataaattttgcttttgatgtttatttgaaacacaaatactttggaggcagtctattttgttccctaaaaatt

SEQ ID NO: 26752 - DNA, 201 bp, Homo sapiens
aataaatgtccttatctcgttcctgattgcttctagcttacatttaagttatgtttaagtttttactaaagatagttttctggctgggcatggtggctcaygcctatagtctcagctctttgggaggctaaggtgggtggatcgcttgaacttatgagtttgagaccagcctgggcaacatggtgaaaccccatctttaca

SEQ ID NO: 26753 - DNA, 201 bp, Homo sapiens
aaaaaaatgcaaagaatggccaggcatggcggcgcatgccagtagtcccagctacttaggaggctgagttgggaggatggcttgagcccatgaattggagyttgcagtgtgccaaaatcacaccactgcactccagcctgtgcaatagagccagaccttgtcacaaaacaaaacaaaacaaaacataccttgttagttccc

SEQ ID NO: 26754 - DNA, 201 bp, Homo sapiens
atgcaaagaatggccaggcatggcggcgcatgccagtagtcccagctacttaggaggctgagttgggaggatggcttgagcccatgaattggagtttgcastgtgccaaaatcacaccactgcactccagcctgtgcaatagagccagaccttgtcacaaaacaaaacaaaacaaaacataccttgttagttcccctttat

SEQ ID NO: 26755 - DNA, 201 bp, Homo sapiens
cacaattgctaattcaccttatatttgttgtttgcttattatgtgaaatactttacgtacattttaatctaatcagcacaattccaacgaagtctttattrtgatttcccccatacatataaggaaactgaggctctgggaagctgagatgacatcctttaagttcatgctattgaatacatgcccaagtcagaaatcaaa

SEQ ID NO: 26756 - DNA, 201 bp, Homo sapiens
tcccgccactgcactccagcctgggcgacagagcgagactccatctcaaaaaaaaaaaaaaagaaaggaaataaggtatgaattacagtaatctattctaycatttttataaatgaacatgaaagtattttctgctctttctttaggggaactcatgaactgaagggttcaaagttttatcatctacattttcacgatatc

SEQ ID NO: 26757 - DNA, 201 bp, Homo sapiens
actgggtacaacacaaaaagtcattttctattaaatataatgacctcgtttctgcagtgacttgtggcaaaacatgctgtttcatttccattcaagcgcaytcatttacctgctttctataataattttacaccatgagctaaaatgttaaaaccattggttacattactaaacacccacaatggttattaggattcttca

SEQ ID NO: 26758 - DNA, 201 bp, Homo sapiens
ggaatgaatgaatcaattaattacagccttatacttccccacatgttgctataatgttctttttaatctaatcctcacaacaaacctgggtcattaatagmccttgtggtctaagaacaatgttcaaaggctttaacttggcttccaagatgcttcatgatttgtctgccctttgagtgcatcgctctagccatgccctct

SEQ ID NO: 26759 - DNA, 201 bp, Homo sapiens
ttttatagctctgcaagtcattgctatccttctggatagaacatcttgatccccaccgctcccacactcactaatttttatctagtcagttcctactaatytagtcacttcagacctccatgcttaccctggctatgcctttactattgcataaacacaatattcacttattcactccgtgaatcattactgaactctgcc

SEQ ID NO: 26760 - DNA, 201 bp, Homo sapiens
gaccttagaacacgtatatagtagacactcaataaatatcaaataaaggaatgaatgaatcaattaattacagccttatacttccccacatgttgctatartgttctttttaatctaatcctcacaacaaacctgggtcattaatagaccttgtggtctaagaacaatgttcaaaggctttaacttggcttccaagatgct

SEQ ID NO: 26761 - DNA, 201 bp, Homo sapiens
tgagaaggtgttttcggggtcagccatgacatctcagcctccatcaatggtgccttcagaatttctctttgggaaaggcctaggggtctagttgcagtgawctagttggaaggaccagtatactaatcttgaactagatattactgaaaaaccatcacttgttcatatcaaagaatgactggggagagaacaggcctgatg

SEQ ID NO: 26762 - DNA, 201 bp, Homo sapiens
gaaaacacatccagttgtctccaaaaactgccagtgcagctaattaaacaaagaggctcattgccatcaccactgtcaccaccccctgaccccctcccccmgccattcaggtttttttcatgtgtgtgtgtgtgtgtgtgtgtgtgtgtgtgtgtgtgtgtgtttaagacagaacccctgtcacctgttactaaagaactt

SEQ ID NO: 26763 - DNA, 201 bp, Homo sapiens
gcaaaacagaaagccttctaatttgcgtcctgaaggatgtgtgggagaaggaatgagtgttctaggtgggaggaggagcacatgtcagaccctgagatggyctcttctttcataaccccctgtgcttctctcctccattgattgtgtctctgggtctgtgtttccataaaacagccagcttatgacaataggaacaggaat

SEQ ID NO: 26764 - DNA, 201 bp, Homo sapiens
aatttcaccgtcaggtgttataaagccttatgctattagttaggaaaacacatccagttgtctccaaaaactgccagtgcagctaattaaacaaagaggcwcattgccatcaccactgtcaccaccccctgaccccctccccccgccattcaggtttttttcatgtgtgtgtgtgtgtgtgtgtgtgtgtgtgtgtgtgtg

SEQ ID NO: 26765 - DNA, 201 bp, Homo sapiens
tcatgggttgtttactgaaaggacaatggatgaaacatccaggttacatagctctgtgcccagggttcttgctggccctctcagatccctctcagtcactwacctctgccaaacacccaagcttaccttgcagccttcaaggtggtgctctgaaacagtatcccacaaatggggacatcgatggacaccacagatctttga

SEQ ID NO: 26766 - DNA, 201 bp, Homo sapiens
ggcatttgcacccactgctgtctgtgccttacagtgtacttctctccccttctcccttggtgactccttatttcttgtgaattagcccgaacgttttctcytcccggcatcctgccccagtgaggctaacttgccctgattacgtgatcccccagcccaggctctgcatctccatctctctgagaacttgccatgccctat

SEQ ID NO: 26767 - DNA, 201 bp, Homo sapiens
aaataacaatataacatttattaagcactttctgtattctggacacgatgctaagcaagtcacgtgtaatttcatataattctcataacagttctataagktggaaacagttattcccattatacaggtgagaaaggaaagtcacaaaaagcataggtgtttagcccaggtgtacattgcttgtgagtgaaaggccagcgt

SEQ ID NO: 26768 - DNA, 201 bp, Homo sapiens
tgctactgatctgataggaggtagagctcaggcggtactgctcactcacctcatgctatgcagcctggtttctaacaggccacagattggtacctggccayggtccgggggttggggacctctgttttagaagacatacttcaattagaggacacttaaaggaaatgtataataagcaatatattgtcatctcttggattt

SEQ ID NO: 26769 - DNA, 201 bp, Homo sapiens
ctagtcggggttttagattcaagagtgactagacctgtgccagagccattttgtcagaaacctgaagaatccactgactgcaaaacctggagagagaccargattatttctgagggtgagggctgccagcccctccaggagcaaatttccataaaaactaacagaagtttggccggcatcggtatcttgggatttggagat

SEQ ID NO: 26770 - DNA, 201 bp, Homo sapiens
aaccatctcctttggaggaatcaaaatctttgatgagaagacaggggtaagtaaagcaatcacatggcattgtgaaattttatccattgacagatgtaccsttaaaagcctctactctctgggcaggaatatacaacaagcataaaaacacataaagcaactgacaaacttgatcaactctgatcatccatcaaagcaggt

SEQ ID NO: 26771 - DNA, 201 bp, Homo sapiens
agaaattattccttattctcttaaactctagacatgttagatgaagtgaaatctcgaatccagagaaagatttcaggggtggaggacccaagaaacacaaytgcttttgctgttgttaacagtgcgggtggaggtgggagtggctctaaggattttgacttttttgtgttttttctaccttgatggcccaccagcctcttc

SEQ ID NO: 26772 - DNA, 201 bp, Homo sapiens
acctctgcagttttccttatgaaaggcaggaatgtacaaggtacattttatttcaataatttagttgtgtctttaaggtgttttctcttgtgcctgcttckttaatgctcgctgtgatttgtatcttaatttccaaatgcttgttttacctttcttctttttcacctctgacctttcctttctggctgctcctgtaatagt

SEQ ID NO: 26773 - DNA, 201 bp, Homo sapiens
acggtttcaaatacaagtcacataggggcatatttcatcacaaaatgagtttctaggcaggcgatttatgaaatgtaactagagtattcacaattcaaatragggatgtaagtagtgaaaaataaagttgtttttttcattttatttttattggattgtgtcactgcacatacagcttgtcaaatggtgcccattccagaa

SEQ ID NO: 26774 - DNA, 201 bp, Homo sapiens
taatagaatcccaccccccatcccccatttctttgtaccttttaaaatgtggttactagaacatttaaaattctatctgtagcttgccttttttctttctkttttttggacaatgctgctttagatcacccagctgggccctgggcagcacagtccactaggacctagactcgcctcccactcactgcaccttctgcctct

SEQ ID NO: 26775 - DNA, 201 bp, Homo sapiens
aggcatgcccccccacccccctcccccgccagaccactgtttgttcattctcacactgctattaagactgggtaatttataaagaaggaggtttcattgaytcacagtttcacatgattggggaggcctcaggaaacttaaaattgtggcagaaggctaagaagaagcaagtaccgtcttcccaaggtggcaggaaagaga

SEQ ID NO: 26776 - DNA, 201 bp, Homo sapiens
gtcaccctgcacttcccctctcagggcacctggcacaccatgttgttattgctcaggcatgcccccccacccccctcccccgccagaccactgtttgttcrttctcacactgctattaagactgggtaatttataaagaaggaggtttcattgattcacagtttcacatgattggggaggcctcaggaaacttaaaattgt

SEQ ID NO: 26777 - DNA, 201 bp, Homo sapiens
ggtggcattggttgatggtatcggacatacctttgggaccagagagaattttcaaatgaaaacacttaagtaaaaaccatgttcttcctttcaacagggcrttgttgctggcgctcgttccaaaggagaacacaaacagaaaatctttttaaccatctcctttggaggaatcaaaatctttgatgagaagacaggggtaag

SEQ ID NO: 26778 - DNA, 201 bp, Homo sapiens
ttagcctggaactgggctcactgagtactagaattattgccttatatggtgatgtgttatttctggtgctgagaaggctcagagccaacagggtatcactstctgaccaggggacctttttccactccacaaggtgccagatttttaaccttggacatacctctgtgatgcaaagacggaggtgacgagcagccacctgcc

SEQ ID NO: 26779 - DNA, 201 bp, Homo sapiens
tctcaggcattagcctggaactgggctcactgagtactagaattattgccttatatggtgatgtgttatttctggtgctgagaaggctcagagccaacagrgtatcactgtctgaccaggggacctttttccactccacaaggtgccagatttttaaccttggacatacctctgtgatgcaaagacggaggtgacgagcag

SEQ ID NO: 26780 - DNA, 201 bp, Homo sapiens
gatgcaaacctgagcactacaaatacttgttcctatattgacttcccctgtagagtgagtcctgagagcagggctgtgagttttgtttccccatggcctaktactgccaggcaagtcatagagccccagtaaatattgagtgggtgaataagagaaataaatcacctgtcattagacgcttccataaatgtatatataaat

SEQ ID NO: 26781 - DNA, 201 bp, Homo sapiens
agaagggagaatgtgatccggattttgcaagctgaggttgggctatgtttcttcctttgaaagtgagctgtgagggggaaatacagatagccaaagctgcyctgctatgtgcctggctggtagcagagactcagtaaatattattgaaggggtgaaaaattcatgaaaaagtgagagaaaccacattcagttaactagaaa

SEQ ID NO: 26782 - DNA, 201 bp, Homo sapiens
gacttgctgagactcaggaagaagggagaatgtgatccggattttgcaagctgaggttgggctatgtttcttcctttgaaagtgagctgtgagggggaaayacagatagccaaagctgctctgctatgtgcctggctggtagcagagactcagtaaatattattgaaggggtgaaaaattcatgaaaaagtgagagaaacc

SEQ ID NO: 26783 - DNA, 201 bp, Homo sapiens
gcttttttagtttgaagtctttgctttcagcagaaaagcaaaaagtcctgggttgctgacacatgaaaacattaaacattaacaatgtgatgagtgcagcyattttaaattttagagcatatactcctagggatataacagaattgggaagtggtgtgatttgaaaactgttactagccaaaacagtctgcattaaaacta

SEQ ID NO: 26784 - DNA, 201 bp, Homo sapiens
caatgtattcaggtattactgagacaaattgccattgaatgaagaggttatatctccagaaagatctgcagaggctcgatgcaatcactgctgaaatactraccagcagacctctgcagttttccttatgaaaggcaggaatgtacaaggtacattttatttcaataatttagttgtgtctttaaggtgttttctcttgtg

SEQ ID NO: 26785 - DNA, 201 bp, Homo sapiens
ggaagcaagaattgattctggctgcattcaagatgttgcctttgggatcctgaggtatagtaatgacccatcaggattacggtttatctagagatgatgaraaacagaaatgtgtatccccataccatactgtgtgtaaagcagggcccagcagcaccagctttctttgtagtcacatgattacctttttgtctttacagg

SEQ ID NO: 26786 - DNA, 201 bp, Homo sapiens
tgctctctgaaccctgctctctgaattcctttctttacacatcccctcagtggccagaatatgggctttgagtgaaagagggctgctggtggatttcagtrttgactctttcaagctgtgtgacttggacaaactaactagtcattctgatccttaatttgcttggctatttataaaggggaagtatgatatatgcctctg

SEQ ID NO: 26787 - DNA, 201 bp, Homo sapiens
attatttttcttttttctatgctatgccattaactatgagttcctcacctggtacacttggcacaaggtaggtaatcagtaaatgtttgttgaattaattrttatataatgtgggggagaattatttgcacaaggagaaagaaaatttaaaaaaatctcccctaagagttggctcttgagattcttattatgtggcattca

SEQ ID NO: 26788 - DNA, 201 bp, Homo sapiens
ttcctcacctggtacacttggcacaaggtaggtaatcagtaaatgtttgttgaattaattgttatataatgtgggggagaattatttgcacaaggagaaaraaaatttaaaaaaatctcccctaagagttggctcttgagattcttattatgtggcattcaaaattcctacaattcagacagctacttctccttttgtgat

SEQ ID NO: 26789 - DNA, 201 bp, Homo sapiens
ccatatcccttattaacagtgatacagaagcatgtgctaaagacattgaatgtcattctgaagcagtgatggatagtcatgagagctgaaatcaggttggwcttatgaaaggtagcttgatgcttgatagcaggtgggaatcgtgcaacttgctaaggtctcttttagcccttgcttcttgaggctctgcaagacttgttt

SEQ ID NO: 26790 - DNA, 201 bp, Homo sapiens
cccttgcttcttgaggctctgcaagacttgtttctgctgtcttagccagtgcccagtggcttttggtcaggttgaggctgtgattaaatactagaagatayatgatatatatgtttgtaggaaaaaaaaccgttttcatagggagaagactaatgtacaggcattttaaatattactctcagtttattttcatattttata

SEQ ID NO: 26791 - DNA, 201 bp, Homo sapiens
actttgttgaccatagtagcttctaataaataccttcctggttggagttcaaaatcgtggaaaatgaaactgctgagtacatgtgtgaaggtgcctatcgyggactttagcacgtcataggtgatcaagagatgctagtcaaatcaagaattgtcaacatggtaattttgttaagggctaagtgatgattacagagttctt

SEQ ID NO: 26792 - DNA, 201 bp, Homo sapiens
ttttctcttcagcttcctcacttctcttagccttcatagaattgaatagagttagggctctaaatcaggatttggtttaaggaaatactgtgtcttgtttsatctatccacaccactaaaattctttccatatccactatcaggatatttctcttccttatcagtcatgtgttcactggaactgcacttttaatgtccttt

SEQ ID NO: 26793 - DNA, 201 bp, Homo sapiens
gagaggagctgacctatgagctgagtttgccagggcccagtgagttcaagaccctgaggagccatagtagaaaacaaagctctcaggaagatggggatgcrgagcagaaacatacaggcttcgtttgtatgtcagatgtggctggtgggatactcaatatttcttttgctgaatttaatttttcttcaagttcctttgctt

SEQ ID NO: 26794 - DNA, 201 bp, Homo sapiens
caaaattttctcttcagcttcctcacttctcttagccttcatagaattgaatagagttagggctctaaatcaggatttggtttaaggaaatactgtgtctkgtttgatctatccacaccactaaaattctttccatatccactatcaggatatttctcttccttatcagtcatgtgttcactggaactgcacttttaatgt

SEQ ID NO: 26795 - DNA, 201 bp, Homo sapiens
ggcatgtggatatagtagtgaacaatgcaggcaagacaataaataaggacacaaataagtgaaaaagttaatttcagaaagtagtaaatacagtggagccygtgaaagagggtgacatgatagggattgactgtggggagtgactgtagcttgggtggtcaggcaaggcacctgagaggagctgacctatgagctgagttt

SEQ ID NO: 26796 - DNA, 201 bp, Homo sapiens
cactcattgctagatactaatctgggtgctgaggatatattaacaaaaagccctattacccccgccttcttggggccataacctagctggagaaacagacmagaaaaatccataattacaatcccatggggcaagggctgtgatcagtaagccctcctatgttataggagcccagaaaaagttatcccagcttgaaagtct

SEQ ID NO: 26797 - DNA, 201 bp, Homo sapiens
ttatctgcctatatattcaacaaatatttgtttagcaacactcattgctagatactaatctgggtgctgaggatatattaacaaaaagccctattaccccygccttcttggggccataacctagctggagaaacagacaagaaaaatccataattacaatcccatggggcaagggctgtgatcagtaagccctcctatgtt

SEQ ID NO: 26798 - DNA, 201 bp, Homo sapiens
ctaacttgccctgattacgtgatcccccagcccaggctctgcatctccatctctctgagaacttgccatgccctattacagttgcccatgcacctggctgwctcctgcaggtcgtgtgtctctggagggtagggactgctactggtcacatgtgttttctatgccctgtgcctttctggcatgcaacccacagcaagcttt

SEQ ID NO: 26799 - DNA, 201 bp, Homo sapiens
ctttactccttttattaattcatctatccatgcatttatctgcctatatattcaacaaatatttgtttagcaacactcattgctagatactaatctgggtrctgaggatatattaacaaaaagccctattacccccgccttcttggggccataacctagctggagaaacagacaagaaaaatccataattacaatcccatg

SEQ ID NO: 26800 - DNA, 201 bp, Homo sapiens
tgtttccactttagactgccaactaatatgaatttcctcaaaactctttgtattctagaaccccagaagtactaaggattaaataaataatgtcttcatcrgtttatttcttctgaggaactacagctatattacctagcttacactattagtgtttcattcatttactgttcaacaaacatttattgagtacccgtgatg

SEQ ID NO: 26801 - DNA, 201 bp, Homo sapiens
tggaactttgtctgccttttctttaccatcaattcaaatacagaactgactttaaagcccattttaatccaaccttccatggcacctttggaacctactcyaccccaaagggaagtgcctttgcttctaactcactgtctataataaccattgaaaattgcatacgtgctagtttatgtatagataatgctcttgcatcag

SEQ ID NO: 26802 - DNA, 201 bp, Homo sapiens
tcacaagtccctgagtagaagtcagacccagtaccatgccaggggtaagaaggatagagtgcctcctgtggtgagcagatgtggatgggctgtggggtcasaccatctgggttcaaatcctgactgtgctgctgaccagcagtgttcacagtgcccatctctggaaatggcaccactcatagtatctgcctcatggcgatg

SEQ ID NO: 26803 - DNA, 201 bp, Homo sapiens
atcagagactgaagttgagcctttgcaaatgtgcaaaactgagaattgaggcagaagtcattattaactcacacatttaacaggatgtttgcctttcaacmaagggtgactaattaatgtaacagttgattatgtagctcccttaatttgttactggttttcaaataccaaagtaattacatcactaaaagaggacagttg

SEQ ID NO: 26804 - DNA, 201 bp, Homo sapiens
ggacacacagatagacacacagggagaacatcatgagaacttcatgtgaagataatagcagagatcaggataatgtgtctacaagccagaagatgccaagrttgccagctacccatcagaagctaggggagaggcatgaaacagtgtcgctcccagtctttagaagggcccaaccctgccggcaacttgatcttgaacttc

SEQ ID NO: 26805 - DNA, 201 bp, Homo sapiens
atgattacagcagtttctcctcctgctcacaaagttatagattgcaaatagattttgtgtaatttgccaatcctggtcgattttaatggctgccttgagcrctatggagaggattctgaaattatgtcctggcgatgagtgagaacagttaacacttaggtatattttctttcagtatttttctcctgcacactactgtgt

SEQ ID NO: 26806 - DNA, 201 bp, Homo sapiens
tgcgggcatgtcaccactggggaccaccactctagtaaagcacgggaattaagatttgccaatgaatggctgtgaaccggagtgtgctttgctgttcagaycttttaacctcagcttatcaactttaatatgttgtcctggtgtcttgattttttggttcatctgttttaatgcgatgaaatgtaaaaatagagcttagtt

SEQ ID NO: 26807 - DNA, 201 bp, Homo sapiens
tttaatgcgatgaaatgtaaaaatagagcttagttttgtcccctcacaatgactttaggggtttttagctgataaccaacccttcttctgtaaaggattcraattttaaacagctaaaaatacatttttctaatatctgtcatcaagtgattagtgcaactatttagttctggtcatctttcctattcttggtagatttat

SEQ ID NO: 26808 - DNA, 201 bp, Homo sapiens
cttcagcttcttggaattataaatgatttaataaaccctgtggggagttggaatggctttggtttagaaccaactcttatatttaattgttttcccactcyccgctctcatagcacagcagcatgggggagcgtgggatacccatggaaaagacagagagcccagctgtcaagttggggtttggttcttgttattttccct

SEQ ID NO: 26809 - DNA, 201 bp, Homo sapiens
gaggtagaacctgggcacctgtatgtttcaggtactcgggctgcgaagtgctggaggcatctttctccagaggctgcccttgggagggattatgataccayagacagtatgaagtcttcttcggcataagacaggttcagatctgaatctcatagcttagagaaaacacttcctctctcaacttcagcttccttgtcttta

SEQ ID NO: 26810 - DNA, 201 bp, Homo sapiens
atgtgctgagtgcttactatgtgccaggtactgagctgagtgatgcttttggcatttcctcccttctctgtcacactctatggagaagtaggtctggttcrtgctaagaccaacatgtattatcaattctagctggttgggatacaccaaaatagacatggatcactgacttcatggagcttacattcagtcagtgggagc

SEQ ID NO: 26811 - DNA, 201 bp, Homo sapiens
ggggtggctgcaggctccagagggctggggtttgtcagtgtgtaagaacaaattgggagggtgggagtggtcatcataaagtagctaactattattgagtscttgctactctccaggtactgatttaagccccttatacatagtgactcatttaatccacacagctattatcattaaatgcgggagataaattgaggcaca

SEQ ID NO: 26812 - DNA, 201 bp, Homo sapiens
caacaacaattatctggaaagctgtgaaaaccttctaagatagtgcttgatgtcttctaattttaatcattcagtacccatgtcagggttgcagaagctcmgaagtaattggcagcaattggcagagggaagagttcctcttaaaactgatgaataacctctttatttcctgtggcacactagttttgctatgacccacat

SEQ ID NO: 26813 - DNA, 201 bp, Homo sapiens
atcacctatcttggcctcagtttcttcatctttaaagtgggataataatacattttctatatggattattgggaggatgtaaaagagataatgcatgcacyttatccaccatagatacatacaaagaaaatgctaggcattaagtttttaatcaggctgcagttagcatggcagaatgtcacaggtcctaacagagcacac

SEQ ID NO: 26814 - DNA, 201 bp, Homo sapiens
gaccaaagttgtggaccaaagcattcccattgccacacaaagcaccctcttcttttaaaaataaaatagatgtgctacgcttctggaaagctccactttcytgaatgatgttaattcccctcagtttcttggtccctcccctctcctggttttctaacaaatgaccacattgatcatacatctgaatagcacttgcctttg

SEQ ID NO: 26815 - DNA, 201 bp, Homo sapiens
agtttcttcatctttaaagtgggataataatacattttctatatggattattgggaggatgtaaaagagataatgcatgcaccttatccaccatagatacwtacaaagaaaatgctaggcattaagtttttaatcaggctgcagttagcatggcagaatgtcacaggtcctaacagagcacacttttggagactggatgtg

SEQ ID NO: 26816 - DNA, 201 bp, Homo sapiens
acaaagacactcctatcaatgggggaatcccaagagatttggaagctctatgccaggaacaagggacaaaaatcaaatttcttaaaattatgccacagtgrttacgttaaccaggatgaagggaaataattgagctccagaccttccccaaagggagatgctgttcagaggaacacagaaactttgatatgacccatcctg

SEQ ID NO: 26817 - DNA, 201 bp, Homo sapiens
cagtcccaactctccttccgattgcagagagaggttgctctggaaagtcatatggaagggccctacagatgacctcagacaaacaccctctcaacacccamgtctagaacccttcagaattttctggagctgcctccttctgccctggcatttgcacccactgctgtctgtgccttacagtgtacttctctccccttctcc

SEQ ID NO: 26818 - DNA, 201 bp, Homo sapiens
gaaaagatacacagagtggcaagatcttgggtgggtgggccacagtagcctcttctgtccctaggtgtccttgatatgttaaccatccaagaagctcctgkaacctcattgtcctgagtttttttaatacaagagatttgtttgtttgtttttgttttaatgtaggcccactgattaaatcttttgaccacatgattgaac

SEQ ID NO: 26819 - DNA, 201 bp, Homo sapiens
cccttttgttttcctagacatttcaggaataaaaagaacataaggtgtgcatagggttgagagagaaaagggacaatggagccatatcagagagcacggaygttggactcagagacctgcattccaatcctgcacctgccaagcttctagctgggaaaccttctcaaagcccctgcacctccctgaatctcagtttcttta

SEQ ID NO: 26820 - DNA, 201 bp, Homo sapiens
ttccaactctgggaactggcagcactgcatccattgactctggggagattcttccagccacagcacaaaatacagctttctcttttctaccaagccgtatygaactctttgccttgatctaaggacctgggatctccactccttcaagtgttctaggcagcagtgagggagccaggaccctgcagagcaagccacctgcag

SEQ ID NO: 26821 - DNA, 201 bp, Homo sapiens
tccttctgagtccgtgtgctctgttgggggagtcatggagagtagcattttgttttaacaagttacccttttaaaattatttttaaatattgaacttgaayttcatttttcatagaaataacttcctttatttctgtactcatgtttccctgacttacaacatacctaactaattatatactatcccaactagtacaatta

SEQ ID NO: 26822 - DNA, 201 bp, Homo sapiens
aaagcaaatgcaagtttattaacctgtttatcctacacaacatgggagtgctcaaagatgactgactcaaaggggtggttagaacttgggtgtatgtatawaacatcttaacaaagaacaataaaattttagaatagtgacaagataagggaaaaggactgattttctagggcagcaaatcacagaaagttaaatatatag

SEQ ID NO: 26823 - DNA, 201 bp, Homo sapiens
gcagttggcattgtggaagcagctggcagtgttggagacatctaggcaatttgtttgcaggagatacaaccatggccaccaagtaggggctaatgcccagytcttgtcctagagcaggcctgtgtgctggggaaggcaattcagcaaaccccaagagtggagaccatggccaagaggggtttattatttcagtttagggaa

SEQ ID NO: 26824 - DNA, 201 bp, Homo sapiens
tgtcctatcaggtaatgcactgattaaggaggtccaaacatggatggcatccttcccccttcaatgcaattatttttcatcacagagactaaaatatatcrggagtagaggatggttgtaataagatttttgacacaagaaagttttctatgaaaaatagatacactaaccataccaagaaatatagaaataagagtgcta

SEQ ID NO: 26825 - DNA, 201 bp, Homo sapiens
tgtgacccaacttgcaaatatagaggtgtatatgtatctatgggtatgtttttgttttgtgggttttttttttttttttttttggaagagacaaattgcaraccatcctggaacattctggaattaatgaacatgatgcatcaatagccttgctaaatcaagacataacaaagaattgagctgctgatgacactgaagaaa

SEQ ID NO: 26826 - DNA, 201 bp, Homo sapiens
catccttcccccttcaatgcaattatttttcatcacagagactaaaatatatcgggagtagaggatggttgtaataagatttttgacacaagaaagttttmtatgaaaaatagatacactaaccataccaagaaatatagaaataagagtgctaacttatcggactttctatttttcatttcaagggtgttttagttgttt

SEQ ID NO: 26827 - DNA, 201 bp, Homo sapiens
tttcatcacagagactaaaatatatcgggagtagaggatggttgtaataagatttttgacacaagaaagttttctatgaaaaatagatacactaaccataycaagaaatatagaaataagagtgctaacttatcggactttctatttttcatttcaagggtgttttagttgttttattttgtggtggttttgaaagattgc

SEQ ID NO: 26828 - DNA, 201 bp, Homo sapiens
tcactaatattggggtaacaatagctgtgacttatccttaaggacttaaaggaaaagcacgacagcttgaggtgtgtttcactttcatcttgccccatgaygtatgcatcaattcacaggcctgtggcctaggaagtctttatggggtgtgtgtgctggggggctgtcacgacagaggtcattccctattggtgcctcagc

SEQ ID NO: 26829 - DNA, 201 bp, Homo sapiens
tccttaaggacttaaaggaaaagcacgacagcttgaggtgtgtttcactttcatcttgccccatgacgtatgcatcaattcacaggcctgtggcctaggargtctttatggggtgtgtgtgctggggggctgtcacgacagaggtcattccctattggtgcctcagcacaccatgtgcccattccaaatcatctgatctca

SEQ ID NO: 26830 - DNA, 201 bp, Homo sapiens
ctggggggctgtcacgacagaggtcattccctattggtgcctcagcacaccatgtgcccattccaaatcatctgatctcatagaaagttcacagttttctrtttccaaaattattgtctccaaacaaagaatgaaaacttctcccagcaggttttgtttggtgaaaaagggtttcagagactggcaaggaaaaaattcctt

SEQ ID NO: 26831 - DNA, 201 bp, Homo sapiens
aaggtatgaaaaccatgtacaataatatatggtttctctataaatccaataataccacattttgttctttcaaacaaataatgctgtgctttcccacatayacctccatgtccctcataccaccacacatataatctatgaactctgagatagtaagaagagcatgagctttaattccagaaagatgtaagttcaaatcct

SEQ ID NO: 26832 - DNA, 201 bp, Homo sapiens
gtcttctgagctgtgacccaacttgcaaatatagaggtgtatatgtatctatgggtatgtttttgttttgtgggttttttttttttttttttttggaagaracaaattgcagaccatcctggaacattctggaattaatgaacatgatgcatcaatagccttgctaaatcaagacataacaaagaattgagctgctgatga

SEQ ID NO: 26833 - DNA, 201 bp, Homo sapiens
gttgtattatcattattctgttcctagcacggtgtctgagtttaatagcacctggtattattcaatgcacatttattagagaatgaatgaatgaaatctgwgtctgcctgtttcttttctttttctctgcacattaaatgcttgtctgctcttatagctggaggaaaatctgacataaaaattggcttgctggaatgtttc

SEQ ID NO: 26834 - DNA, 201 bp, Homo sapiens
tacctttgctatatattctggttgggatctagtgcttgaaaataagaaacatagaaaacagagttgggttttgtccctcttataaatctagacttttaaakatctattttgagttacctagtttgagaagcagttttgccgcaaagcctctcattccctttgctgtataaaccctatcactgccttcatgaaaccatggga

SEQ ID NO: 26835 - DNA, 201 bp, Homo sapiens
tcaaaatatgtaaagctatgacatatcaataaaaaatacaaagaaaatcacaaagttgtgacatgaaccgtggtttgtctggcttcaaagctcatgtttaygttcacttcagaaatctttttttagtaaagagaaatagcatgtttgggtttgttaacagcaaatccaaaatagaaaatgagaaattatgtttgtttgtta

SEQ ID NO: 26836 - DNA, 201 bp, Homo sapiens
catgagcagcggggaggggattgctgcatccaaagaggacctctctctccttgtggggtgtctgtctgtctctctttctcctctcctccctccttgcgggrtctctctctccttgtgggtctttgtgggggatctctctttttgtgggagtctctctctctctctctctttcagtgactcaatcagcgctgagacaaactg

SEQ ID NO: 26837 - DNA, 201 bp, Homo sapiens
catgtccctcataccaccacacatataatctatgaactctgagatagtaagaagagcatgagctttaattccagaaagatgtaagttcaaatcctggctgygaaaaatgccatctggatgacgctagtcatgtctccatggtctcagatttctcacctatataatgagaagtaaaagtagcccctctgaaaagatgacatg

SEQ ID NO: 26838 - DNA, 201 bp, Homo sapiens
tggctgcgaaaaatgccatctggatgacgctagtcatgtctccatggtctcagatttctcacctatataatgagaagtaaaagtagcccctctgaaaagaygacatgataatatgaatataaaggatttagtaatttatccaggtaaaatattaaaaaattatatttactaaaataataaactagtgaacagctgttgcct

SEQ ID NO: 26839 - DNA, 201 bp, Homo sapiens
gtgtcttctgagctgtgacccaacttgcaaatatagaggtgtatatgtatctatgggtatgtttttgttttgtgggttttttttttttttttttttggaaragacaaattgcagaccatcctggaacattctggaattaatgaacatgatgcatcaatagccttgctaaatcaagacataacaaagaattgagctgctgat

SEQ ID NO: 26840 - DNA, 201 bp, Homo sapiens
tcagtatagcaaaagtttgctgaattatttgtgtgccagtcctgaattcagactttgggatttaaaggtaaataagacacagggcttgccttctaaaaccrccttttaagagggaaggtaaacctgtgtatatttataacaataaaaatgcaaaaataaaattaatgcaagcaatacatactaggatatgttttaatctga

SEQ ID NO: 26841 - DNA, 201 bp, Homo sapiens
aggaatcttcctctgcagttctgagtgtcttctgagctgtgacccaacttgcaaatatagaggtgtatatgtatctatgggtatgtttttgttttgtgggktttttttttttttttttttggaagagacaaattgcagaccatcctggaacattctggaattaatgaacatgatgcatcaatagccttgctaaatcaagac

SEQ ID NO: 26842 - DNA, 201 bp, Homo sapiens
tcttgtttgaggggcagcaaaaagcaggtggcttaactctgttaattatcctgagacctatgatagtgactaatgctgcaactgcaagggactcaactggrtctcatgaggaggaggaaaaatgctagcaaaagattcattggaggttaaataacatcccatatacagtaatgagggcctgagcaaatgcagatacctgtg

SEQ ID NO: 26843 - DNA, 201 bp, Homo sapiens
ggcttaactctgttaattatcctgagacctatgatagtgactaatgctgcaactgcaagggactcaactggatctcatgaggaggaggaaaaatgctagcraaagattcattggaggttaaataacatcccatatacagtaatgagggcctgagcaaatgcagatacctgtggttaaagaaaatcacagttcctacacaac

SEQ ID NO: 26844 - DNA, 201 bp, Homo sapiens
ttttcagcaccggcacttgttagctgatacagtcatatgtttgtttggtttttaaaaagtagtttagaagcatagtatatatttaatgaatatatactatyagctaaacactgttctaactatggggtggatttattgctatagattcagccctaaaggagtgtgcagttatgttagagtaattatggccactgtcataaa

SEQ ID NO: 26845 - DNA, 201 bp, Homo sapiens
gtggtttaactcaagcaatatttcttgatgggttaatgaatatcatatgttatactttagcttaatacaacatcatcaattattcaattatttttattgaytgacctcttccagattatttgatagtagatttttcactattcagaaagttaaatgctgagcagtcaggaatcttcctctgcagttctgagtgtcttctga

SEQ ID NO: 26846 - DNA, 201 bp, Homo sapiens
aactaccaaatctgtggtgactggttacatggcagcaggaaactaatacaaatgctttatattagtttatattagttattaataatagcagttacctgatmgggttattttatggaaaaaattaaaaacaaaaaaaactaaagcactcaatacaattattgacacctaaaaaatagtatcttttatttttatcaccatact

SEQ ID NO: 26847 - DNA, 201 bp, Homo sapiens
aatgttaaggagattaaaatgcaagcgattcctttgtgcctactgtggtagatgcaacagatgtgattcaaccatatgcaggaagcttgtttttttttttyttttttaaagttttgaatggaaaacatgggactagagacagagacagatttagattcaagctttgtctctgttctcacttaaccagggacactgagtaag

SEQ ID NO: 26848 - DNA, 201 bp, Homo sapiens
ttcaccatgttggtcaggctggtctcgaactcctgaacttgtgatccacctgcctcagcctcccaaagtgctgggattacagggtgagccaccacgccagrcctcccaacctgctttctaagcgaatccacactaaactgctcagcatgccaagatgagaagcgtgtccccaacagtttttggacacagtctgtggagctt

SEQ ID NO: 26849 - DNA, 201 bp, Homo sapiens
ctgccacaataacaatgatcaaaggatactgatctaaaattgcccttgaaatttttccagtcggtttattgcatttagaatagtggctctggggaatgacraatggagactgtctacaaacagttctctttaaatatgttttgaaatgcttagcgagaaagggttttggctcttttataatgaaaagcaggtttaaacatt

SEQ ID NO: 26850 - DNA, 201 bp, Homo sapiens
ataaggaaatcagaaagacccatatgtgctaatcgaccacgtgttatgatcacctccttgagaaatgcaggcaccccatgtgtatttacctacttcccccrtgacccttcccctctggaaaagttgctttgtctctttttctctttgcccaaggaaagacctttatgaccccttagcccagagttaaaagatgaaaggcag

SEQ ID NO: 26851 - DNA, 201 bp, Homo sapiens
ttcgatgtccagactccactctaagcccaacagatattgagtctatagcaacgtgatcaattctaggccctatttgctaatgaggctgatggtctattttktgccctggttggtaggctttagatttgatagaatgaaacctgggtgttttatactaaggtcataatgtctcaattagaaagacactgataaggaagggac

SEQ ID NO: 26852 - DNA, 201 bp, Homo sapiens
ggaagtggaaaggtcttattgttttgaggacagatggagaggcctcttgctgaaacagtgtggaatgtgaaaggccggctataggtctggaagataggcaygtgggaccacactccccattgcctaaatcagctagatattgtttatttatatatccatggtcatatgccatttgccaggccccattctaggcacaggaga

SEQ ID NO: 26853 - DNA, 201 bp, Homo sapiens
aaggagctcttagtctacttgaggataattacaaactagcaatagcagtgtaaagttctaagtgcaaggcagggtgttttggaagggcaacaaaggaatcrgagggggagtacctcacataaaatcatttagctagtaagggctggacccaggaattgaacccagttttttctgactccaaagccagttttccccatgata

SEQ ID NO: 26854 - DNA, 201 bp, Homo sapiens
gtgtaaagttctaagtgcaaggcagggtgttttggaagggcaacaaaggaatcggagggggagtacctcacataaaatcatttagctagtaagggctggayccaggaattgaacccagttttttctgactccaaagccagttttccccatgatatcacactgtccagcctgcagaagcaaggtgtcaggaaggagagaggc

SEQ ID NO: 26855 - DNA, 201 bp, Homo sapiens
aaaataaaatagatgtgctacgcttctggaaagctccactttcctgaatgatgttaattcccctcagtttcttggtccctcccctctcctggttttctaamaaatgaccacattgatcatacatctgaatagcacttgcctttggtttctgaagaactgaaggaggagaggcattttggcggcaaaaggaagttatgaaag

SEQ ID NO: 26856 - DNA, 201 bp, Homo sapiens
tcctgaattgttcttgaaatgcaatttaatcctcatatcaagcaaaatctaatgctgtatttgccagtaaaatagtcatttgcattttttattgacaatamaaattgtgtttaatcaggcagtcagcatgttagcatttccaaatgattgaagacccatttttgttcaactatgtcccattttgggtcaaatgtattttgc

SEQ ID NO: 26857 - DNA, 201 bp, Homo sapiens
tagatgtgctacgcttctggaaagctccactttcctgaatgatgttaattcccctcagtttcttggtccctcccctctcctggttttctaacaaatgaccrcattgatcatacatctgaatagcacttgcctttggtttctgaagaactgaaggaggagaggcattttggcggcaaaaggaagttatgaaagagccctaca

SEQ ID NO: 26858 - DNA, 201 bp, Homo sapiens
atgacaatgggtctcgtgtatgtatgttttctccatgtgagtctatagaaagacagtatgtgaacctgtactgtagtgaatcaggtccagattccctggcrttgtgaacaaggcccagcctggctcaccctctctgggtgtatccattacaagagctttctccccatttctccctaagcatgctggccactaaactggcag

SEQ ID NO: 26859 - DNA, 201 bp, Homo sapiens
atgattggtaaatagatttacagaaaaaaaatcttattgggccataaaaaattatattcgggactcacctttatagctaagaaaaccatttcaagttaggkgtgtgtgtgtgtgtgtgtgtgtgtgtgtgtgtgtgtgtatgtgtgtgtgtgtgtgcgcatgtgcacacgcctgccagtgtgtgtatgtgtgtattatttt

SEQ ID NO: 26860 - DNA, 201 bp, Homo sapiens
agtggacatttgaatgacaacaaggggcctgataggtaaagatctgggtggaagtctatgtgggccaaaagactggctgtgctcaagggtcacaagggcartgagcttaatgggcttgaccaacagcaagagtgtgtcctggacttctgtaaaagacagagtttccaaaccaaaactggggacatgaagtcaaaagaagta

SEQ ID NO: 26861 - DNA, 201 bp, Homo sapiens
aataaagttgtaaagaataatcaaaatgggaaattttttcccaccttaggttggaggtttatcaactctatgaagtcacactcaacagcttattaaaaaakaaataaagttcctgctggatgcggtggctcatgcctgtaatcccagcactttgggaggctgaggcgggcagatcacaaggtcaggagatcgagaccatcc

SEQ ID NO: 26862 - DNA, 201 bp, Homo sapiens
atcaaaatgggaaattttttcccaccttaggttggaggtttatcaactctatgaagtcacactcaacagcttattaaaaaagaaataaagttcctgctggrtgcggtggctcatgcctgtaatcccagcactttgggaggctgaggcgggcagatcacaaggtcaggagatcgagaccatcctggctaacacggtgaaacc

SEQ ID NO: 26863 - DNA, 201 bp, Homo sapiens
ggaggctgaggcgggcagatcacaaggtcaggagatcgagaccatcctggctaacacggtgaaaccccgtccctattaaaaatacaaaaaattagccaagygtggcggtggacacctgtggtcccagctattcgggaggctgagggaggagaatggcatgaacccgggaggcggagcttgcagtgagctgagattgcacca

SEQ ID NO: 26864 - DNA, 201 bp, Homo sapiens
gtgtctgttcatatcctttgcccactttttgatggggagcatgtgttataacttctctaaggctctgtttccctggttgtacaatggatatgctaataatrcctgctattagaagactgataaaaggaccacaggttatgatggataggaagtcttatgtgaaatctgcaagtagtactaatgttaattatggttatggtt

SEQ ID NO: 26865 - DNA, 201 bp, Homo sapiens
taggcagggcaagtattattattcttactgcataaagtgaggaagctgaagattgcagatgagaaatgtttgggccgtgagaaatgttttgccccatttgrggcaggactttgccactgccctgctgaccccaaatcctctcctagtttgtataagcatatttgttgacagcttcacctccccagaagtgccttccctggc

SEQ ID NO: 26866 - DNA, 201 bp, Homo sapiens
ttagaagactgataaaaggaccacaggttatgatggataggaagtcttatgtgaaatctgcaagtagtactaatgttaattatggttatggttgttaccawccaggtctccatttcaaacctcaccccaccaagccctcctgggaattgttttacattgcatgatgaaacgatgcagctgaatgattttagctcagagcat

SEQ ID NO: 26867 - DNA, 201 bp, Homo sapiens
cctttggtagttatgaaagattgtagaatttctgagtcaaataaccgagcactagatgttgcatacataaaagttcttatgatttaggtgtaggaagggtyccagactcactgctaatgctggagcctgaagaagaaacagtggcttttcagtcacccctgttggttctggcttattcctcatcacctttactctgagatg

SEQ ID NO: 26868 - DNA, 201 bp, Homo sapiens
tccaggtctccatttcaaacctcaccccaccaagccctcctgggaattgttttacattgcatgatgaaacgatgcagctgaatgattttagctcagagcayactctctatgggtatgttccactagtgtccttggaaagatcctcctggctttccagacagattatagcaagatgaccaccagccaaatgaacccctcaaa

SEQ ID NO: 26869 - DNA, 201 bp, Homo sapiens
attgcccaacaatgtcagttaaaccaaatccttttatttggttctctgtttattcatcctatgcaatcagagtgtcattttaatttcttcttggattagtygtgtttaccaacagcactggaaatacattccagccttcagaaagaaaacgacaagagctataacaaggtattagaggttgtgtaaacttgtcttacttga

SEQ ID NO: 26870 - DNA, 201 bp, Homo sapiens
cagcacacatttattatctgacagtttccatgggtcaggggtctcggcccagctttgcagggtcctctgctcaggggtctctcaatgctgcctttctttcmggattctgggctgtgttcattttgtggagcttgggatcctcttccaagtgcatatggttgctggcagaatttagttcttgtggttgcaggactgaggtcc

SEQ ID NO: 26871 - DNA, 201 bp, Homo sapiens
aatacaaataaaagagagtttatcagttgattcagatgagcaggggtatgccatgtaaatttcaaggaattatgcactaaattacaggacccatttggggrcttaaatattattctccactacacaaaactggcatggattttattttaactgaaatggcacacagtggcaggcaattatttttgttattgtatttcctat

SEQ ID NO: 26872 - DNA, 201 bp, Homo sapiens
tcctccgtgagcattacaggccttttcctgccacacagtcttagcctggcctccatattcatcatggtgaacttggctgggccttacttccccacttataygcattgagactgcttgtacttggcctggtttcctttactgagagagaatgggagtccaaggctgggggtctattttggtttccctttcccccaaatacct

SEQ ID NO: 26873 - DNA, 201 bp, Homo sapiens
gtggggtggggggattggtaggtgtgatcagatcttagagtttaaatgcaagttcaataatttattcttcagattgatgggtcagtggatatccctgaatragacagtgtcaccatcagaactatgaattagggtgaacagttttatcaggaaaataaaaaatgactattggctttagtgcattctgtggccctgtggttc

SEQ ID NO: 26874 - DNA, 201 bp, Homo sapiens
ttttttcctaagtcagtaagaaggaagtgagcagtaacattacagtaacagacatgtcctgagtgggaactgcatgtcaggctttgatatacaccttctcrcatccgatcttcattcaagagtgaactcttccttatccctattttacagaggagggagcaaaggcttaaaaaaggtaagtaacttagcctttcggactta

SEQ ID NO: 26875 - DNA, 201 bp, Homo sapiens
tagctgttcttacagttaaattgttattgttcttatcgttagcagacagtttctttgctagcatttgtggatacagagagtcaaaaaaaatacaatatagyatttactttttaggtgcttacttgttcagacttattcctaatttacaatgttaagttcagtgatggagcaaggggcagcagtggtatagaaaaaggagga

SEQ ID NO: 26876 - DNA, 201 bp, Homo sapiens
tcttcaaagagtttgaagaagttgattaagatactaagccatttaagcactgtgatagagataataggtatttcaggaggaaactaagagtgatcccatcscttctgaaagataatttattttcttaggcagttctttcaatatcgttatctgtgccatcctgagaaggccagttttgtaggtcatgaaactaagcaaaat

SEQ ID NO: 26877 - DNA, 201 bp, Homo sapiens
tggcactcaacagccatgggtaagtgaattttactgcagcagcaattctggcatcaagcagaggagctggagaaattatttctgaagtcctctctaatctyaagcttctagactgagtttgcttacatgagaagttgagatttttgtttggggtcaaaatacatagataccacctgggacctattgctgcttatttctctg

SEQ ID NO: 26878 - DNA, 201 bp, Homo sapiens
aggaaactaagagtgatcccatcccttctgaaagataatttattttcttaggcagttctttcaatatcgttatctgtgccatcctgagaaggccagttttrtaggtcatgaaactaagcaaaatcacccaggaggtaagaccctgcaggtgattggatggaaaactcaccataatatcaggacatgaagtccctggatggc

SEQ ID NO: 26879 - DNA, 201 bp, Homo sapiens
tattcagatagaaaagtcacagtcctgccctcaaacatttcaaatcatgtcagaattactcctaaatgaaacaatctctctcgtcttcaaagagtggcagmccggagcatttgggaggagaaaatggggacagaaacctctgggggaaattttagctctgttctctccagtacagcagctacagcagtagtagcactacta

SEQ ID NO: 26880 - DNA, 201 bp, Homo sapiens
aaaggagttactttaattgactacctgttgtgctaaaggtaccctgctggaagccatatgtgcacttacccttatagcaattccagagaggcacattcacyccaccttataggtaaggaggccgaaaggatcagataaggtaagtaaccttcctaaggctacacagctaataaactgaagaataaaatctaagtccacata

SEQ ID NO: 26881 - DNA, 201 bp, Homo sapiens
aactcagatggaagcaaggaaataggtaatagaaaaaatcatgcaatgagatcctattggttgtttggtgtgagttacagatttggatccgagcttcctartggtcaaaggaaaaaaagacaacaacacatttttaagattcaaggtgtttataaaaaacaaattggcctagggaatcacagaaggtatgtacttcatttg

SEQ ID NO: 26882 - DNA, 201 bp, Homo sapiens
cattcactccaccttataggtaaggaggccgaaaggatcagataaggtaagtaaccttcctaaggctacacagctaataaactgaagaataaaatctaagwccacatactagatttttaaaggccatgatttgtcactgagtagcaacttaagtggtcccaacacacccatgcaaaccacagtattaatgtgtagaaagca

SEQ ID NO: 26883 - DNA, 201 bp, Homo sapiens
caggcatttggaaattgctctctctgctctgaatcctgcatactctccacacaaccagaatttgacaggccttcaatggaatattaaggcaccaggttctyttggcttttgatgcctttgtattaggaagtgaccctgccttccactaaggtgctcaagccaaaacccagagttacacttgttcttcccttttcctgtctc

SEQ ID NO: 26884 - DNA, 201 bp, Homo sapiens
gaggcctcaggaaacttaaaattgtggcagaaggctaagaagaagcaagtaccgtcttcccaaggtggcaggaaagagagaaacccaggggtaaactgccrtttataaaaccatgagatctcatgagaactcactcactatcatgagaacagcatgggggataaccacccccatgatccaatcacttcctaccaggtccct

SEQ ID NO: 26885 - DNA, 201 bp, Homo sapiens
tatagaaaaactgccacggaagaggcagcgatttgttcatgtttgcagctgctgactctgacccaaatctgccctcccccaatcctcagctgctggtaccmatgcatccttttgggagctggaccatgagctctgccaggaagaaggtgcccatctcaatggttccccgcttcaatccccaagcaagctgtttccagagaa

SEQ ID NO: 26886 - DNA, 201 bp, Homo sapiens
cctcccaaagtgctgggattacaggtgtgagccactgcgcccggcttgttttgtttttctaaggtgaaacagaaagtgtgctcccttcctcttaggctagrtagggcaacaaaaatagcaattgctattgggttacaatttatcaactcattgtgactattctggatggctcttgcttatactggtttaaaaaaacttgag

SEQ ID NO: 26887 - DNA, 201 bp, Homo sapiens
gtgaacacacattgggtgagagctctaagttaggggttctgcactgcctatgacctcagactcactgagtaaatccaattctcctgcttcctccttctttkcaattggtccctcaggcttccatgggcaatgtgtccagagcttacgggcattcttttgtaatccaaattatacaaacactcctcctttgcccttctgtgc

SEQ ID NO: 26888 - DNA, 201 bp, Homo sapiens
agaaaataacaagcaagcaaaagaaagagaaaatggtgaaatattgaaatgttcctgggttggttgaactacttcattttatggtaaagcaacagggtccraaagaggttacctgcctgtagggtgatgctacccaaactttgttgtgcagttctgatgttttcttcttcctctccttaattcttcacctaaggagaaaaa

SEQ ID NO: 26889 - DNA, 201 bp, Homo sapiens
ttcacctaaggagaaaaagatggaggtagaaagaaaacgtgattattatggcaaacttcctctggggcctggtggagccagcattttgtatgactgtagtytgagatgaactgtagggaaagtgttttttggatcattctttttctagatctgcccagggcccaaaggccaggactctgtccaccctgaccctatctctag

SEQ ID NO: 26890 - DNA, 201 bp, Homo sapiens
aaaaagatggaggtagaaagaaaacgtgattattatggcaaacttcctctggggcctggtggagccagcattttgtatgactgtagtttgagatgaactgyagggaaagtgttttttggatcattctttttctagatctgcccagggcccaaaggccaggactctgtccaccctgaccctatctctagatctacactatct

SEQ ID NO: 26891 - DNA, 201 bp, Homo sapiens
ttttggatcattctttttctagatctgcccagggcccaaaggccaggactctgtccaccctgaccctatctctagatctacactatctattttggtggccrtgagtgacatgtggctgttgagcaccagatgtatggctagatgaaattgagatgtgtagtacatgcaaaatacatgcagatttcaatgccttagtactga

SEQ ID NO: 26892 - DNA, 201 bp, Homo sapiens
ttgtatgttgaaatgataatagttaagataggttaaagaaaatacattaatagaatcccaccccccatcccccatttctttgtaccttttaaaatgtggtyactagaacatttaaaattctatctgtagcttgccttttttctttcttttttttggacaatgctgctttagatcacccagctgggccctgggcagcacagt

SEQ ID NO: 26893 - DNA, 201 bp, Homo sapiens
taagcagacattcattttatcttagtgtttgggcatgtgacttgaatagctattttttttttgaagacacttgaagccagctgttgtgactttgtgtgaakccaactggaaattggcatttacttctctttcattctcaagctctttgtccctttttggtgccagtcagaggtatgggcatgcttttgattgggtcagcca

SEQ ID NO: 26894 - DNA, 201 bp, Homo sapiens
tcctaacactgcgtgctcagtatatctctggtaaattctgtatgagccagatatatagactcatcttacaaacgcacaggctgtggttagcaaagttcacygtagtctttcattaagcagacattcattttatcttagtgtttgggcatgtgacttgaatagctattttttttttgaagacacttgaagccagctgttgtg

SEQ ID NO: 26895 - DNA, 201 bp, Homo sapiens
ttcctcagtatctttgggggattggttccaggatttctgtagatactgaaatccacagatgcccaagtccctgatataaagtgttgcagtatttacacacracttatgcacatcttaccatattctttaaatcatctctagactacctgtaatacctagtacaatgtaaaggctttataaatagttgctgtattatatttt

SEQ ID NO: 26896 - DNA, 201 bp, Homo sapiens
cgggttcaagtgattctcctgcctcagcctgctgagtagctgggattacaggcgcgtgccactgggcccggctaatttttgtatttttagtagagatgggktttcaccatgttggtcaggctggtctcgaactcctgaacttgtgatccacctgcctcagcctcccaaagtgctgggattacagggtgagccaccacgcca

SEQ ID NO: 26897 - DNA, 201 bp, Homo sapiens
aaatctgccaaaagaaaacaaacaaacaaacaaaaacatcaacagcatgttatgttaatgtgcgattccatttaggcttttggaattttgaaaatagctcraagaccccgttatgaccttgacagaggccaggttggaaatttctgaatccaatgattctttagctcccctctaagtctgacagtctaagattccataata

SEQ ID NO: 26898 - DNA, 201 bp, Homo sapiens
ccactgggcccggctaatttttgtatttttagtagagatggggtttcaccatgttggtcaggctggtctcgaactcctgaacttgtgatccacctgcctcrgcctcccaaagtgctgggattacagggtgagccaccacgccaggcctcccaacctgctttctaagcgaatccacactaaactgctcagcatgccaagatg

SEQ ID NO: 26899 - DNA, 201 bp, Homo sapiens
gtgtgtgtgtgtgtgtgtgtgtttaagacagaacccctgtcacctgttactaaagaactttgaatgaatttctgtgggtcacggactgtagaccaggaagyagggattaggcagtgaggggaggcaggatttatcttcggctcacaaacactttgccaaactgtccccagaccagagagtctgcttcttttataacccaga

SEQ ID NO: 26900 - DNA, 201 bp, Homo sapiens
tcactgagcttctcaagaagctctggattcccagccacagcttcagccagtgtacctcagtcagtgcttacaaaaggacagagattgcagggagaacctartttgaaaacgaaaagaagaaaacagaattaacaccaaagcaaaacagaatcccagtgctggatgcattcaaaagcaattctgccaccactgcaaagaaaa

SEQ ID NO: 26901 - DNA, 201 bp, Homo sapiens
tgaggtagtgattcggttttcacccacatatgcttgttgagccactgttgtgttccatacactatattaggcactgagaataagcctgtgagtaagcctgmtatggtgcctgccagttaaggagctcttagtctacttgaggataattacaaactagcaatagcagtgtaaagttctaagtgcaaggcagggtgttttgga

SEQ ID NO: 26902 - DNA, 201 bp, Homo sapiens
cagagatcacagcacttatgcattgtgggtttaattagacaccgggaaaaatgcagtgaatgtattgactaggactcatttacctttatgtagggcctttytcccgtcccaaaccatgctaggcagggtggaaagagagagagaataaagagttcctgccagcaggtggtttctagtctcatcagggaagatagaacaacc

SEQ ID NO: 26903 - DNA, 201 bp, Homo sapiens
tatccttcaggtagtagttgcatagtaaatatatgttgaataaatgactgattgaatgaataaatacatgaatatctatgaagctaatacagaaatcatcmccatgtattactgactttcctgtctatttcaatgaggttcgtgcaaaaaaaaaaaaaaaaaaaaagtggccactgcctttgagaagtggtatggtggtgc

SEQ ID NO: 26904 - DNA, 201 bp, Homo sapiens
gcgagagcgcctttctccgcctgggagctggacgggggcgagcccgggggcgagccctcctgcgagctggatgctccagtgcagctcctagccagccggcrgggaccggggcgagaatccgcgccgtcgtttcttcctccttcctgctcccttcctgctggccggttaaatacactttaacagtgttgatagttttgaata

SEQ ID NO: 26905 - DNA, 201 bp, Homo sapiens
aagcagttgaggatgaatctcaacttcccagaaccttgctttcatcatctgcaaaacggacaatattacctaccttgtgggtcttggagcaattttatggrgaaaatcatatgattgggtgctttggcacatagcaggatttcaagagaatgatctcttagtaatagacagcatggaattctgttcaagaaagtggatggc

SEQ ID NO: 26906 - DNA, 201 bp, Homo sapiens
tttttggtctacatttggttgaatcctcagatgtggtacctgtgattacagagggctgactgtacacaataaaatcttaactttgtgtagccctttggaayttagttttgacatataacattttttatttgatgtttccacaacactgaagtaagtatatccatcatcccagtttgcaggtaaataaatggagacacaagg

SEQ ID NO: 26907 - DNA, 201 bp, Homo sapiens
agttgcacagccagggacagagagaagggttgggacctggaaatcagagtggcagaacaagcactaaatgaatgttctattgttatgatttgtggttctgsaactgggcagaagcctgtatcctgggacagaatggcaggtcatagcaggaccagccattacaaaatgggctgctgcaccttatgaaaatttaggtaggga

SEQ ID NO: 26908 - DNA, 201 bp, Homo sapiens
ctgaaatgttttatgcattatttttgagtttcatcatttttcagcagaacattttatttttaagaattatatgacagaaaatttttaaatgactgttctaycttattgtcctttgcaagtgtgcttttggttatttttaaaaatcatagcagtagacattattctttaaaatattaatggaaatgttacatccccaaacca

SEQ ID NO: 26909 - DNA, 201 bp, Homo sapiens
gacagaaaatttttaaatgactgttctatcttattgtcctttgcaagtgtgcttttggttatttttaaaaatcatagcagtagacattattctttaaaatrttaatggaaatgttacatccccaaaccatccaataatgatggctctagcaacacaatgcttattaatattaatactggtgttaatgagagcagctaacat

SEQ ID NO: 26910 - DNA, 201 bp, Homo sapiens
atcagtgtgtttaaagcatatggtttaggctttccacactttgctataaacatagtagtgttcataaatgctgttagaatgaataaaaacccaagctagaracactcagtgcagtaatgcaacttccctgaagaatcaccatccctcatggccctcccatcccctcagtttattcttccatctatttcttatttactcaat

SEQ ID NO: 26911 - DNA, 201 bp, Homo sapiens
gcatagtgtttaaagatcaagtctttggagtctgcaaaacctagatttgagttccagttctgtcactccctagtttttgaaacttgaacaagtgactcaaygatttgaaccacaattttctcatttgtagactgcagataatagtgcatctcttcataacattaagtggataatggacatgaaacaagtggcacagtgccc

SEQ ID NO: 26912 - DNA, 201 bp, Homo sapiens
tcgtggagaagacagggctgatggaggaaaatgcctgtacacatttctctcatggcaccccttttcccagtagcatgataaatcctggaagtcctgatggratattttaatcacagcttgcagtccttcagatcccaaccattgacagttgattcactccttttcatgcctgctgcctgtctccagttatggtagctctta

SEQ ID NO: 26913 - DNA, 201 bp, Homo sapiens
taagcatcatgcaaaagaacgtgtagttgtttcatcctggtgtgcctctacctcactttaggagatcttctaaagtttctttctttgggccaagaagacaytcagttttgggtggcccttaggaattcactctgctaatcgtggagaagacagggctgatggaggaaaatgcctgtacacatttctctcatggcacccctt

SEQ ID NO: 26914 - DNA, 201 bp, Homo sapiens
gagttcaagaccagcctgaccaacatggtgaaaccccgtctctactaaagatacaaaaattagccaggtgtggtggtgcatgcctgtaatcccagctattygggaggctgaggcatgagaatcacttgaacccaggaggtggagattgtagtgagccgagtttgggccattgcactccagcctgggcaacaagagcaaaat

SEQ ID NO: 26915 - DNA, 201 bp, Homo sapiens
gagacgtggacaaatctgccaaaagaaaacaaacaaacaaacaaaaacatcaacagcatgttatgttaatgtgcgattccatttaggcttttggaattttraaaatagctcaaagaccccgttatgaccttgacagaggccaggttggaaatttctgaatccaatgattctttagctcccctctaagtctgacagtctaag

SEQ ID NO: 26916 - DNA, 201 bp, Homo sapiens
ccaaaaactgccagtgcagctaattaaacaaagaggctcattgccatcaccactgtcaccaccccctgaccccctccccccgccattcaggtttttttcakgtgtgtgtgtgtgtgtgtgtgtgtgtgtgtgtgtgtgtgtgtttaagacagaacccctgtcacctgttactaaagaactttgaatgaatttctgtgggtc

SEQ ID NO: 26917 - DNA, 201 bp, Homo sapiens
actgcactctagcctgggcgacagagtgagactccatctcaaaaaaaaaaaaaaaaaaaaaggcagaaggaactggcaagtggtaacctagaagtaggacwtggaagaatgggcttccgtacttttctgtcatcagacatttggacgaaggattgtacttatttacatttccaagggcagtagaaagtctacgggcagaag

SEQ ID NO: 26918 - DNA, 201 bp, Homo sapiens
gtatcttagagacattaatttaagcatcatgcaaaagaacgtgtagttgtttcatcctggtgtgcctctacctcactttaggagatcttctaaagtttctktctttgggccaagaagacactcagttttgggtggcccttaggaattcactctgctaatcgtggagaagacagggctgatggaggaaaatgcctgtacaca

SEQ ID NO: 26919 - DNA, 201 bp, Homo sapiens
ttgagttttactgtcttagcactcaacaacattcactgactactatgtgctaaacactgctctaggtgcaaggaatatagcactgaacaaactccaaatcyctgctttcatggagcttatgtttcagtggaggcaaatagacaataaataaaattaataaggaaatctggaactaaatgtgataagggcgacagaagaata

SEQ ID NO: 26920 - DNA, 201 bp, Homo sapiens
ttctgatgtgtttatgttaaattgtcaattcagtaatcattgtttggacacctattatgtgctagagtgtattggtgataaaatataacatgtgttgaacrtgtactgtgtgccaggcactgttctaatgacttcacaggatgaacttagttaatccatgcagtgaccctataggatagggtcattattgtttccaatgta

SEQ ID NO: 26921 - DNA, 201 bp, Homo sapiens
cagctacagcatggaaccaatccccaaataagatcttccagcagcatctctccctcaggctgtctctattcccatctaacaaaggagaagacagaaatccytaaaatacgctgacttcattaggatccccagagactatcagtcctagatgcaacctgctcccagtaaccaggagcttactcagaaaaggccttcctgctt

SEQ ID NO: 26922 - DNA, 201 bp, Homo sapiens
tgcacctgtgctgcagcatgtggattgccaccaaatcacttcagattccatcagcagctactttgagagagatgtacttacatttactagaagtggctttkggcacttgaatttcaatacatctgatttgatcgaaagaaagaggagctgatgaagcaaaccttcttaggagacagaagtacaccttgttacccagacatg

SEQ ID NO: 26923 - DNA, 201 bp, Homo sapiens
gactttttccctctttgtagtgtggggagagtaattaaacttgcctgtctatgaaaagcctggtagagtggatagtacacggattttgtggtccgagagayctcacttgaatcatggcctctccacttcactgaactgctcagaacctcatctgcacactgaagatattattacctgtgtcttcaaactgttatggggttt

SEQ ID NO: 26924 - DNA, 201 bp, Homo sapiens
ctttccacccagcctctatttttagattctataactgctccttcctcctgtccctcaggccttggagtggtaacagctcccccagggttactagccctgcmatactacaccatcccctgcagcttccccataactctgcccacgcctttgcagacggtccctttatgaaacctaaggttactcagctggaggatgccatct

SEQ ID NO: 26925 - DNA, 201 bp, Homo sapiens
  misc_feature (1)...(201): n = A,T,C or G, or insertion/deletion polymorphism (see Tables 1-2)
acacataacttcaatgtacgaaataggaaaagatggtgggggagggggtttcttagctggtagcccctccttactacccgcttctttctaatctttagganctcttatgatagaccttgagataactgtaaagaaccaccctaggtttacccacagcacagttaaagacttcaagttagttctagtccccaagaactaaca

SEQ ID NO: 26926 - DNA, 201 bp, Homo sapiens
aattgaggtgctgaatacaaggtcagaacctctgattctaaatctagtgttcttcaatgcctgaacaggcttcctatataagcaagatttcagctttccayatggtcattttccaagttcattcattcaaaaactactgttaaccatccaatccttgtcaagtatcgttatttttaaatgatgagtctccaggaaatgtta

SEQ ID NO: 26927 - DNA, 201 bp, Homo sapiens
  misc_feature (1)...(201): n = A,T,C or G, or insertion/deletion polymorphism (see Tables 1-2)
tcaagagccttatgctttatactgtggactccaatgtaattacactctcttgttgactagatgtaagaagcttgagttgattacccaaggcttgttccctncatttctgtttctctctcatttgacaggtaccatatccatttgttctattatcttctaagtttgaattggaaaaataaggtaaatcagagcagtctttct

SEQ ID NO: 26928 - DNA, 201 bp, Homo sapiens
atgaataaatggatagataccatccatgccatttatgaagtccttgctacatgccaagctcttgacttcccttaactcacctaaccccaacagcaacccartgaggtgggagccattctgtttcccatgttatcctgcagaaacagtcactgagtagcccagtcactcacccaaagctgcacagactggggagtgacacca

SEQ ID NO: 26929 - DNA, 201 bp, Homo sapiens
actgtgattatacgtagccacatccttaatcacaggacatagattttagttgaaccccagtgttaggaaactaacactgaagcaattttccttatttaaggtgtgtgtgtgtgtgtgtgtgcgtgtgtgtgtgtgtgtgtgttgtaacttctctttaacaaaatatgcttcgttgtcactttggtgattgctaattgatta

SEQ ID NO: 26930 - DNA, 201 bp, Homo sapiens
ctgtgattatacgtagccacatccttaatcacaggacatagattttagttgaaccccagtgttaggaaactaacactgaagcaattttccttatttaaggtgtgtgtgtgtgtgtgtgtgcgtgtgtgtgtgtgtgtgtgttgtaacttctctttaacaaaatatgcttcgttgtcactttggtgattgctaattgattaa

SEQ ID NO: 26931 - DNA, 201 bp, Homo sapiens
aggcaggagaattgcttaaacccaggaagcggaggtttcagtaagccgagatcatgccactgcactccagcctgggcgatagagtgagactccgtctcaaaaaaaaaaaaaaaaaaaatatatatatatatatatatatatacatatagagagagagagagagagagagagagattcttagatggttggcatagtagtaaa

SEQ ID NO: 26932 - DNA, 201 bp, Homo sapiens
ttttctttgagagcccagtggccagcctttaccccaagccctctgatttatgaccctccctgatctcagatacctgcctgaatccagaacattctcagttytctccccttacccagttctcttcttcccttgccttcctcatcccagcttatcaagggatcatctttttgttgttggttgagggagccaaaagtctaagga

SEQ ID NO: 26933 - DNA, 201 bp, Homo sapiens
ttttgttaccagttttccaggactggccctcacttcctgtaggcccccgtaaagctgaccaggattctgtcccgtgtttatggagatgaaaaagacgggtytttttttttttttttttttcccaaggggcctaagtgaggcagagataaaacaaattgaccttctattgtcctagtgcataattgtgtctatctgaccact

SEQ ID NO: 26934 - DNA, 201 bp, Homo sapiens
agctgggggcaggcacatgcggctggacagaaaggaggggtacagaggagcctcgaagattttaatgagatcacatcactttgggacagaaccacctacaygaggactgggaaacacaaagagcagaaaatgccagaggcccatgggactctgagggaggagatgcctgttataattttagccaaggaacagggctgtcta

SEQ ID NO: 26935 - DNA, 201 bp, Homo sapiens
ggcaggagaattgcttaaacccaggaagcggaggtttcagtaagccgagatcatgccactgcactccagcctgggcgatagagtgagactccgtctcaaaaaaaaaaaaaaaaaaaatatatatatatatatatatatatacatatagagagagagagagagagagagagagattcttagatggttggcatagtagtaaat

SEQ ID NO: 26936 - DNA, 201 bp, Homo sapiens
ctctttgaccctacaaccaggtgacctagtttatcatccaaactgggcactcttgaaagtgaaaaagggtttgctattaacaattatgtcagggcaatagkcataaatatcagctgtgttaggcaaaccaggatttagggtcatcctacccaaagctggtgactgctcttcctgctgggccaaactgcctctgagaccaga

SEQ ID NO: 26937 - DNA, 201 bp, Homo sapiens
tacaacaaagaaaaattcaaggatagtaatcgagtctaattccattcacagaaaaacggaattcttgctttggctattcacatgaagttggttgcagtccygggaacagcacagccacaatgaacttgtacatgctctgtaaaaatgctcagcctggtacccttgttgtggcacttctcacactctgaattgaattagtgt

SEQ ID NO: 26938 - DNA, 201 bp, Homo sapiens
gtaggtacctattcaaatgtccccaggaagactattggtgggccctgccatgaggtcagatagtgagagtgtatgtacacgtgtgtgtgtgtgtgtgtgtrtgtgtaaacaaaagtgtatgttggagaggagatagcaccccttcttttcatccagcaatatttttcaaacctctaacatgtcccaggcatcctaacagat

SEQ ID NO: 26939 - DNA, 201 bp, Homo sapiens
cagcattttgggcaaaggcattcaacaagtctctaggaagttccaaactttctcacattttcctgtcttcttctgagcccttcatactgtttcaacctctrcctgttacccagttccaaagttgcttccacatttttgggtatcttttcagcaacacctcactctactggtaacaattttactgtattagtccattttcat

SEQ ID NO: 26940 - DNA, 201 bp, Homo sapiens
aggagacagggaagtgaactggagtatgtgatacaacggatggactggctcctgggggcttttgaatctaatgggccaggtttggatcctgattcagccattatttctaagctttagactcctgggcaaattacttgacctgtcagagtcagagtttcttcatctttataactgagtgtaaaataatacttactttgcaac

SEQ ID NO: 26941 - DNA, 201 bp, Homo sapiens
ttagacttgaacttacatggtttctttcgatagctgccattttgggagcatttgccctttgctgattgattcttactgcaagctgatgaggtagatgttaytgccttcattttacagaggaggagatggaaactcaaaactacagtgtttgagtcactggtttccaacacctagtaggtctctggaaatgtgtgttgctca

SEQ ID NO: 26942 - DNA, 201 bp, Homo sapiens
agagctagggcacgttttgaaataatgtttgttgctgaggcttcagagtgagcaagaggaggagtttgtgagagggagcagtatgctgtgaagaagagagwtttagggtcatggagtaggagagtgataaagtaatgtggggtaaacaagagggataagaagaaaaccagaaggggaaacgagctgtgagaatagaaagct

SEQ ID NO: 26943 - DNA, 201 bp, Homo sapiens
aaagaagaggccatgcagagctagggcacgttttgaaataatgtttgttgctgaggcttcagagtgagcaagaggaggagtttgtgagagggagcagtatkctgtgaagaagagagatttagggtcatggagtaggagagtgataaagtaatgtggggtaaacaagagggataagaagaaaaccagaaggggaaacgagct

SEQ ID NO: 26944 - DNA, 201 bp, Homo sapiens
ccagagccaagataatgacaacaagaatggtaaatagaggctgtgtttgggggtgcataggacaaggttccacccatgtctcctgtttaaaataagggggsagttgaggcatgcattgtcagttacttttgtggtgtgaaagagaatatctttgaaatgtccttctaaaagaataacctaaaaaggaggcaggcagagctg

SEQ ID NO: 26945 - DNA, 201 bp, Homo sapiens
gctttctgggctggccaaggccagagccagctccctcagcttttggggaggtgtggatggagaggcgtcggtgggaaccggggctgcacaccgtgcttgcrggccagcgcgagttctgggtgggcgtgggctccgcggaccccacacttggagcggccggccggccccaccggccccaggcagtgaggggcttagcacctg

SEQ ID NO: 26946 - DNA, 201 bp, Homo sapiens
ggcagtgaggggcttagcacctgggccagcagctgctgtgctcaatttctcgccgggccttagctgccttccctcagggcagggctcgggacctgcagccygccatgcctgagcctcccccgacctccgtgggctcttgtgcggcggagcctccccaatgagcgcagccccctgctccatggcgcctagtcccatcgacca

SEQ ID NO: 26947 - DNA, 201 bp, Homo sapiens
gcagtgaggggcttagcacctgggccagcagctgctgtgctcaatttctcgccgggccttagctgccttccctcagggcagggctcgggacctgcagcccrccatgcctgagcctcccccgacctccgtgggctcttgtgcggcggagcctccccaatgagcgcagccccctgctccatggcgcctagtcccatcgaccac

SEQ ID NO: 26948 - DNA, 201 bp, Homo sapiens
gctcgggacctgcagcccgccatgcctgagcctcccccgacctccgtgggctcttgtgcggcggagcctccccaatgagcgcagccccctgctccatggcrcctagtcccatcgaccacccaagggctcaggagtgcgggcgcacggtgcgggactggcaggcagctccacctgtggccctggtgcaggatccactgggtg

SEQ ID NO: 26949 - DNA, 201 bp, Homo sapiens
cgggacctgcagcccgccatgcctgagcctcccccgacctccgtgggctcttgtgcggcggagcctccccaatgagcgcagccccctgctccatggcgccwagtcccatcgaccacccaagggctcaggagtgcgggcgcacggtgcgggactggcaggcagctccacctgtggccctggtgcaggatccactgggtgaag

SEQ ID NO: 26950 - DNA, 201 bp, Homo sapiens
agctcagggtttgtgaatgcaccaattgacactctgtatctagctactctggtggggacttggagaacctttatgtggacactctgtatctagctaatctrgtggggacgtggagaacctttgtgtctagctcagggattgtaaatgcaccaatcagcgccctgtcaaaacagaccactggactctaccaatcagcaggat

SEQ ID NO: 26951 - DNA, 201 bp, Homo sapiens
ctctgtatctagctaatctagtggggacgtggagaacctttgtgtctagctcagggattgtaaatgcaccaatcagcgccctgtcaaaacagaccactggrctctaccaatcagcaggatgtgggtggggccagataagacaataaaagcaggctgcccgagccagcagtggcaacccgctcgggtccccttctgagctgt

SEQ ID NO: 26952 - DNA, 201 bp, Homo sapiens
gaacaaactccggacaggccacctttaagaactgtaacactcactgccagggtccgcgtcttcattcttgaagtcagtgagaccaagaacccaccaatttyggacacaagagcacttattagtatgatcatccttgaattgctttcctgcaaataatattcctgtcttagatagggagttgttgcttattgcttttatttt

SEQ ID NO: 26953 - DNA, 201 bp, Homo sapiens
ttttaagctgtgggacagcatctaaagggcataaagttgtaaaattcaatgaatatgtgacattttgtttacttagtacttttctccttttctttagaaaraaacaaccaattttctttttctggaggattttctttaccaaacctgaattgtgtggttggtttggagctaccattcagttccacaatcaactgatctggg

SEQ ID NO: 26954 - DNA, 201 bp, Homo sapiens
accttgtcagctgggaatctaattgatcaaatttgctttttggaatcagtctggagtagaaggtgtgaagggcagatgaaaattgacaagaaataagtcarggatgtgtgtttacgggtgtaggagagaaataattagaaccagagccaagataatgacaacaagaatggtaaatagaggctgtgtttgggggtgcatagg

SEQ ID NO: 26955 - DNA, 201 bp, Homo sapiens
atgttaggataataggataaaggccaataggagttcatcatatatgcagtgggtgtggaaacatcatatttgaggcagggccacaggaactaccatggtgygtttcccttagttgaacccacatgggtacaaagcagtcccgtgttactgttccccagggatcttggattgtgctgagtagaggaattgagctgtggtggt

SEQ ID NO: 26956 - DNA, 201 bp, Homo sapiens
aagtatttttttttaaatcaaaacaggaaaggctggatggatggatgtagagacaatttatcaatattttagaatagcagtccctaatctttttgacaccrgagaccagtttcatggaaaacagtttttccactcaccctgagtgagtccttgtgacacagcagacacccagcatggggcaacaaggggatgtggcaagaa

SEQ ID NO: 26957 - DNA, 201 bp, Homo sapiens
ttgagttggacccagaaggatgttaggataataggataaaggccaataggagttcatcatatatgcagtgggtgtggaaacatcatatttgaggcagggcsacaggaactaccatggtgtgtttcccttagttgaacccacatgggtacaaagcagtcccgtgttactgttccccagggatcttggattgtgctgagtaga

SEQ ID NO: 26958 - DNA, 201 bp, Homo sapiens
ataaattacatagagctttaaaataaaactacgatgtggttgttaactgttagattccaaagaaccttgaatgatacaatgagatacttgtcttatattcygtgggtctacagaagcaatgggaagtatttttttttaaatcaaaacaggaaaggctggatggatggatgtagagacaatttatcaatattttagaatagc

SEQ ID NO: 26959 - DNA, 201 bp, Homo sapiens
tagtatgctccttccttccctctctccctacctctctttctccttccctccatttatccatccttcatttcttttgttgagttggacccagaaggatgttwggataataggataaaggccaataggagttcatcatatatgcagtgggtgtggaaacatcatatttgaggcagggccacaggaactaccatggtgtgtttc

SEQ ID NO: 26960 - DNA, 201 bp, Homo sapiens
gctgcagggagcagagtgtacagtgaaggaacttttgagctgacatggagggaatgataatagaagatcctgtggagaaaagactcaaaggatacataggratcagccaggtgagaagggttggaaggaagttccaggcagaggaaatggtctcccacaaaggcaaaaaggtgagaaggaacaaggttcattttgagaact

SEQ ID NO: 26961 - DNA, 201 bp, Homo sapiens
tggggaacaatttagttataattactatggaaatagctattggtcacaaattgtacccatgtactatgcattagtatgctccttccttccctctctccctrcctctctttctccttccctccatttatccatccttcatttcttttgttgagttggacccagaaggatgttaggataataggataaaggccaataggagtt

SEQ ID NO: 26962 - DNA, 201 bp, Homo sapiens
gcccaggctggcctgggactcctgagctcaagcgatccttctgcctcaacttcccaagtagttgggaccacaggtgtgccccaccaggcctagcttatccyttgcttatttttaaagagcatccttacgagatagagcgttctgtgggaaacctgggtaaattgcttagtgaacattcattagatcctctgagcctcacaa

SEQ ID NO: 26963 - DNA, 201 bp, Homo sapiens
attttttgaggtgtgccctttgaggatgctatattcattgcagtggctatagtgacaaagaactcaggtaaactggtgctctcaagaggttaagatagacmatgagcaaacacattattaatagaatttacatggaataagtaatatataataaatagtttgaaatgatacagtaactggtatgaggacacaaggaggcaa

SEQ ID NO: 26964 - DNA, 201 bp, Homo sapiens
aaagtgaataaagttaccccagaaaaagttccttgccatattgtagacacttaataaatagggtctctatagctgctatacctgtacttacaataacagtrgtgggaggagtttatagtcttccaacataggaaaaccaaggcccagaaggtttaaggtgtttcttaaagatcatataataggtggccgggcgcggtggct

SEQ ID NO: 26965 - DNA, 201 bp, Homo sapiens
gcctcacctgttttctctctcctgttctgtttgaagtcatatttcttttgcgatagtcagagccactatttcctctgccttatagattcataatgtagacwcagcactggtttaggactggacaataggcttcgtcacttactaagagggaatttaagcttttgtctacagttttccgatctttaaattggggtggtaata

SEQ ID NO: 26966 - DNA, 201 bp, Homo sapiens
ctgccacgacccctgagaatgttctagatggaaagacaggtggggatctccaatgctgatgacatggaggcctttcaccctcagtggttagagggcacagrttaggaaatggggaacaaaagcaaaacaggtggacatggaggctgtgtttctgttgttgatggaagaccatatttttatacatgatcttggcaaagtgtg

SEQ ID NO: 26967 - DNA, 201 bp, Homo sapiens
cttcaagatgccttaccctaaacaggcgtctttccttggtgactcatgcagaggaagtggctggattccaaatatgtgtatagaaaaactgccacggaagrggcagcgatttgttcatgtttgcagctgctgactctgacccaaatctgccctcccccaatcctcagctgctggtaccaatgcatccttttgggagctgga

SEQ ID NO: 26968 - DNA, 201 bp, Homo sapiens
cactccccagcaccccctccccccacgcccagctagtcgcctccccagcccgcccctcttccttctctctgctccagactcgacgctctgacttggatgcagagagctcagtttttttttctaccaaggaaactttaaatctctgtggttcggctcataaagcaggcacacaagagggtgtcaaccgccgagagaacccag

SEQ ID NO: 26969 - DNA, 201 bp, Homo sapiens
tcctggctattttttcctttgctgtgacatctctccatttgtgatttcctctgatttgctctgcattcagcctgagcctgtgctactcttgcttgatttcrgctccctccaatatttcttgttaccatttggatgccatctggaccgcagtggtaacccctccaagagaggcacagcagcaaagaaagatgactgactctg

SEQ ID NO: 26970 - DNA, 201 bp, Homo sapiens
actccccagcaccccctccccccacgcccagctagtcgcctccccagcccgcccctcttccttctctctgctccagactcgacgctctgacttggatgcagagagctcagtttttttttctaccaaggaaactttaaatctctgtggttcggctcataaagcaggcacacaagagggtgtcaaccgccgagagaacccaga

SEQ ID NO: 26971 - DNA, 201 bp, Homo sapiens
tcagcctggtacccttgttgtggcacttctcacactctgaattgaattagtgttctccagtttccctaactttgctgttacaactcagagaatggacaccrtctaagtgctcacaggataggcatagtgtctggttcataatgggcattcgggaaatgtttattccttatttaaattaatgccttgataatcaaatccaag

SEQ ID NO: 26972 - DNA, 201 bp, Homo sapiens
tcttcttgggaacggtgctgctatcaagtaggaattcaattctacacatcgagttggcaattaaatctcttcctaaagcagatttagaagatgatttttartagtttttattttttaatggtttgcttgaggtctgaataggcatatctgaaacatttaatcatgttcattgtattcaacgataaaatctgaataaaaatt

SEQ ID NO: 26973 - DNA, 201 bp, Homo sapiens
taacccatttatgcctagtgttcctttattggaatgctaagcttgtgggcgttatttatatcctactgctcaaggtcatcaccaaagtctcatttttcacaaaaaacaatttgcaacctctggcataaatgggttaagacacacaaaaagtataaataacaatataataaaaagttttgtacctaccactcagctaatgaa

SEQ ID NO: 26974 - DNA, 201 bp, Homo sapiens
catttatgcctagtgttcctttattggaatgctaagcttgtgggcgttatttatatcctactgctcaaggtcatcaccaaagtctcatttttcacaaaaarcaatttgcaacctctggcataaatgggttaagacacacaaaaagtataaataacaatataataaaaagttttgtacctaccactcagctaatgaaataaa

SEQ ID NO: 26975 - DNA, 201 bp, Homo sapiens
tgtcatgaagatattctcctttgttgtcttctaaaagctttattgttttgtttgcctttcaaatttaggttctctaatccatgtggagtgtgtgcatataktgtgtgtgtgtgtgtgtgtgtgtgtgtgtgtgtgttgtgtgaggtaggcatttattctaattttctttcatatggaaaaatgattttcctggaacttaga

SEQ ID NO: 26976 - DNA, 201 bp, Homo sapiens
gtcagccatgaatcaacttcttccaaactcctattaatgttgatatttagacttcctttcatgaatcacaaatgttcttaatggcatctagaatgatgaatttttttttttttttttttttttttgagacagagtcttgctgtgtcgcctgggctggagtgcagtggcgcgatctcagctcactgcaagctctacctcccg

SEQ ID NO: 26977 - DNA, 201 bp, Homo sapiens
gacttcctttcatgaatcacaaatgttcttaatggcatctagaatgatgaatttttttttttttttttttttttttgagacagagtcttgctgtgtcgccygggctggagtgcagtggcgcgatctcagctcactgcaagctctacctcccgagttcaagccattctcctgcctcagcctctcgagtatttgggagtacag

SEQ ID NO: 26978 - DNA, 201 bp, Homo sapiens
ggacatttagatgtaatgaaggaagccagcgggtgaatatctaggtaaatccacactctagcagtggtaatcttacatttgtcaagtatttcatatatgtacaaacacacacacacacacacacacacacacacacacacacacttcagatatcttcctcttccatcttcacaacagtcctaccagatagacaggatggcc

SEQ ID NO: 26979 - DNA, 201 bp, Homo sapiens
aggaccttcaagatgccttaccctaaacaggcgtctttccttggtgactcatgcagaggaagtggctggattccaaatatgtgtatagaaaaactgccacrgaagaggcagcgatttgttcatgtttgcagctgctgactctgacccaaatctgccctcccccaatcctcagctgctggtaccaatgcatccttttgggag

SEQ ID NO: 26980 - DNA, 201 bp, Homo sapiens
cataaggcaaaggggaagcaggcaccttctgggaccttgctggcaccccccataatacagtcctctcccactaggtccttcccttgacacaattcgagatragatttgggtgggaatacagagccaaaccctatcacagtacttaaggaataaagccatttgttatcggatataacagaaacccagagggagtggtcccaa

SEQ ID NO: 26981 - DNA, 201 bp, Homo sapiens
taataggaagagagaggcttacagggttgattcactttgagccctagataatgcactagtgatacttattgggcagctaagaaaatcacaatatgactttktaatgcgttaatggaagtgcaaagtttatttgtactgggcactggaatctgcatctcctctgggtaccacacttgaggatttagtgagcattgtggataa

SEQ ID NO: 26982 - DNA, 201 bp, Homo sapiens
acattcctcttttctaattacccttggtaacatttcgccaccccgatctcactggtttatgtcattttcaaaatcctggtaaataactttaactccttacyggagtctgtgcttcaaaataaatactggaatttaaaattctatttttaaaaagatgtaatttttaattattttataaacatacactatctgcagtaggct

SEQ ID NO: 26983 - DNA, 201 bp, Homo sapiens
gattttaagttaaatgagatgaaaaatgtcaaaggacctaaggaataagctcaaattcttacttcttatagaacaatggtgtagttagctagctcaagccyaaaagatacttttccttcactattccccacattcctctatcatacgtttaccatatgtctcagcagacatttactgagagcctactgggtgttaggcact

SEQ ID NO: 26984 - DNA, 201 bp, Homo sapiens
ccaccctggctcttgagcagttctcagggaaacagttgaaaccttaacggagctacacacagagtggctggaacatgaaggaggggagtcaactctttgtsctttgcaggcattgagggtagtggtggaggatggctgggatggagcagtgtcttaaagaagaaatggagagtgctaggcagcagagacaagggccaaact

SEQ ID NO: 26985 - DNA, 201 bp, Homo sapiens
ttttctcctctgcaacatggggccaactgagttcttacctgaaagacttgtcttgaggattgcatgagaatgtatgtaagacacaaatgtttagaacagcrcctggcacataggaagcacccagtccatgttagctcacattattaataatagatgtcttgtttggccaccagaaagagctgggtttgaacctggtcactt

SEQ ID NO: 26986 - DNA, 201 bp, Homo sapiens
attaattattttattgtttttattattagtaatacttcatccaaagagtccatttttaaaaatgttgttagatatgcttaagtaaatgactataatatttyttttaaagcttcgcataagagcaggctacccagaagccttgtacttggcaagcagaaatgaatctaaactgttttccgaatttaccaagtgcttgcctga

SEQ ID NO: 26987 - DNA, 201 bp, Homo sapiens
ttaaaaatgttgttagatatgcttaagtaaatgactataatatttcttttaaagcttcgcataagagcaggctacccagaagccttgtacttggcaagcaraaatgaatctaaactgttttccgaatttaccaagtgcttgcctgaacagacaaggagcctggggggatttcttgtgggagtgatgagctgtgaatcccaa

SEQ ID NO: 26988 - DNA, 201 bp, Homo sapiens
ttgttagatatgcttaagtaaatgactataatatttcttttaaagcttcgcataagagcaggctacccagaagccttgtacttggcaagcagaaatgaatytaaactgttttccgaatttaccaagtgcttgcctgaacagacaaggagcctggggggatttcttgtgggagtgatgagctgtgaatcccaatataagatg

SEQ ID NO: 26989 - DNA, 201 bp, Homo sapiens
aaattctgctgccacaaatgatttataaggtcaaatgcctggaaagattgcatccggccaagggatggacattttagaagatcagtggtctagaactacgrcgatgaccatcgtgaaatccagaggcccactgtgccaggaggctggttttgtagtgagtggtcctaatggcttaaaaggatttgggaagatggaataaga

SEQ ID NO: 26990 - DNA, 201 bp, Homo sapiens
ctacccagaagccttgtacttggcaagcagaaatgaatctaaactgttttccgaatttaccaagtgcttgcctgaacagacaaggagcctggggggatttyttgtgggagtgatgagctgtgaatcccaatataagatgtgtgtaaaaaaaaaaaaaaaaaaaaaaagcctgttctaagagagaaaagaagtttctgagtg

SEQ ID NO: 26991 - DNA, 201 bp, Homo sapiens
tcctgtgcaggggagtttgagtttgtagtggtttgctgggtgaaacagtgaggaggcttttccatgttgctgctttgctcattactttccaagtgtgattkaatttttacgtttttgtgagatggttccaataaatacattcacaaatccggaaacaacaacaaaaagacatcctttgtcagggcatccattctcatttat

SEQ ID NO: 26992 - DNA, 201 bp, Homo sapiens
ccaaattctgttcagtcctagcatcagctgctgtacactctcaggtattctgcaggagctcttgggccatgacagacccttatggttgttttctgttgtgtttttttttttttttccccttccctttgcaattgtctgccaacaaatgttggcttctcagagctggccatgtacccgagtttggggcaagcctgcctgtct

SEQ ID NO: 26993 - DNA, 201 bp, Homo sapiens
tctcatttaaatacaagcagtgggggcctctttgagcaccactgcctggaagagcagctctacatcattaaatagggtgtgtagacctctttcctaatccsccccaaaccccatgtgcccatttgctgcatgagtctgaatattgaatttcaagatttctaaatgaggttgaaggtctgtttgacatctgctgatgactct

SEQ ID NO: 26994 - DNA, 201 bp, Homo sapiens
ttgcttttagttaaaacctttaaaatatggtattttgcatatcattttcacctatcttttattctccaggaggtggcgatgggggtgggaattgctatcctttttttttaaagcacctaatagctaccacacactatcttaggtgcattatatatgtgattgtatatttttttcatttattttataatacagatagaagaa

SEQ ID NO: 26995 - DNA, 201 bp, Homo sapiens
gattcagtttggctgtgtccccacccaaatctcatcttgaattgtaactcccacaattcccatgtgtcatgggaggaacctggtgggaggtgattgaattrtggggggcgggtctttcatgagctgttctcttgatagtgaatgagtctcatgagatatgatggttttaaaaacgggggtttccctgcacaagccatcttg

SEQ ID NO: 26996 - DNA, 201 bp, Homo sapiens
agtcttgggtgtgtctttatcagcagcatgaaaacggactaatacaatacagaaggatattctataacattggttaatgctgaaactaaaatgtcataaargaccactgagggaagctgagaatacccccatcctaatatacagcctcttgtttgacccttgcagcagtcccatgaagtacctcttattatgccacactat

SEQ ID NO: 26997 - DNA, 201 bp, Homo sapiens
ccagagttccttagctgatagtatgttaacccaacagagaaatcttcctgctaatagcacttatcagagaagattggaacctgtagtttgtcaggtactcaaaaaaaaaaaaaaaatttaaagtctgaaataataaaaaaaaaccctgcctttctttaaattttatttcaactggaaatataaatgtacatccagttatag

SEQ ID NO: 26998 - DNA, 201 bp, Homo sapiens
cagagttccttagctgatagtatgttaacccaacagagaaatcttcctgctaatagcacttatcagagaagattggaacctgtagtttgtcaggtactcaaaaaaaaaaaaaaaatttaaagtctgaaataataaaaaaaaaccctgcctttctttaaattttatttcaactggaaatataaatgtacatccagttataga

SEQ ID NO: 26999 - DNA, 201 bp, Homo sapiens
gacatttagatgtaatgaaggaagccagcgggtgaatatctaggtaaatccacactctagcagtggtaatcttacatttgtcaagtatttcatatatgtacaaacacacacacacacacacacacacacacacacacacacacttcagatatcttcctcttccatcttcacaacagtcctaccagatagacaggatggcca

SEQ ID NO: 27000 - DNA, 201 bp, Homo sapiens
ttgggaaatcccatgaaatttcagacttacaaatcaaacaattaagaactccatagccccctgcaaggaatgaaattattgtaatttttccttcttggtgaaaaaaaaaatgtactctctaattgctgggaactctgttaataagaatcaaatcctctttatctaaaccatatctaaaaggtgaaatgctatttgggccct

SEQ ID NO: 27001 - DNA, 201 bp, Homo sapiens
acatttagatgtaatgaaggaagccagcgggtgaatatctaggtaaatccacactctagcagtggtaatcttacatttgtcaagtatttcatatatgtacaaacacacacacacacacacacacacacacacacacacacacttcagatatcttcctcttccatcttcacaacagtcctaccagatagacaggatggccat

SEQ ID NO: 27002 - DNA, 201 bp, Homo sapiens
catttagatgtaatgaaggaagccagcgggtgaatatctaggtaaatccacactctagcagtggtaatcttacatttgtcaagtatttcatatatgtacaaacacacacacacacacacacacacacacacacacacacacttcagatatcttcctcttccatcttcacaacagtcctaccagatagacaggatggccatt

SEQ ID NO: 27003 - DNA, 201 bp, Homo sapiens
cacatcctgctgtggaagatttgacagtaagaactgcctcatgaggccaacccaaaaaggaacagcagatataaacatgtcgccattcttgtcattttgaaacaacattatttaaagtgtcccagatagttgggaaaagaggaactcttttcttctaggccacttgtttctcctctagcagggaaagatctttgcaggtgt

SEQ ID NO: 27004 - DNA, 201 bp, Homo sapiens
atttagatgtaatgaaggaagccagcgggtgaatatctaggtaaatccacactctagcagtggtaatcttacatttgtcaagtatttcatatatgtacaamcacacacacacacacacacacacacacacacacacacacttcagatatcttcctcttccatcttcacaacagtcctaccagatagacaggatggccattc

SEQ ID NO: 27005 - DNA, 201 bp, Homo sapiens
ttagatgtaatgaaggaagccagcgggtgaatatctaggtaaatccacactctagcagtggtaatcttacatttgtcaagtatttcatatatgtacaaacacacacacacacacacacacacacacacacacacacacttcagatatcttcctcttccatcttcacaacagtcctaccagatagacaggatggccattcgt

SEQ ID NO: 27006 - DNA, 201 bp, Homo sapiens
tagatgtaatgaaggaagccagcgggtgaatatctaggtaaatccacactctagcagtggtaatcttacatttgtcaagtatttcatatatgtacaaacacacacacacacacacacacacacacacacacacacacttcagatatcttcctcttccatcttcacaacagtcctaccagatagacaggatggccattcgta

SEQ ID NO: 27007 - DNA, 201 bp, Homo sapiens
agatgtaatgaaggaagccagcgggtgaatatctaggtaaatccacactctagcagtggtaatcttacatttgtcaagtatttcatatatgtacaaacacacacacacacacacacacacacacacacacacacacttcagatatcttcctcttccatcttcacaacagtcctaccagatagacaggatggccattcgtat

SEQ ID NO: 27008 - DNA, 201 bp, Homo sapiens
gatgtaatgaaggaagccagcgggtgaatatctaggtaaatccacactctagcagtggtaatcttacatttgtcaagtatttcatatatgtacaaacacacacacacacacacacacacacacacacacacacacttcagatatcttcctcttccatcttcacaacagtcctaccagatagacaggatggccattcgtatc

SEQ ID NO: 27009 - DNA, 201 bp, Homo sapiens
tgtaatgaaggaagccagcgggtgaatatctaggtaaatccacactctagcagtggtaatcttacatttgtcaagtatttcatatatgtacaaacacacacacacacacacacacacacacacacacacacacttcagatatcttcctcttccatcttcacaacagtcctaccagatagacaggatggccattcgtatccc

SEQ ID NO: 27010 - DNA, 201 bp, Homo sapiens
tattaggtatcatcaggcattaaaaatgttttgattttaaaacacttaatgaggattcccagataaattaaaacatctccatctgctgtcttgcctggtargtgatattttaccattgcacaatcatctccaaatctaattccaccaggaagacttctaatcgcagcttaattttagagcaatgttctacttggcaatcaa

SEQ ID NO: 27011 - DNA, 201 bp, Homo sapiens
atgaaggaagccagcgggtgaatatctaggtaaatccacactctagcagtggtaatcttacatttgtcaagtatttcatatatgtacaaacacacacacacacacacacacacacacacacacacacacttcagatatcttcctcttccatcttcacaacagtcctaccagatagacaggatggccattcgtatccccatt

SEQ ID NO: 27012 - DNA, 201 bp, Homo sapiens
atattaatttattcatcctcataacaacaccatgagagagatactattatcatacttatgttacatgtagcagaccagtagcccaagaagatacctgtttmatcacactttggtcaatattgggtattatcttttctgtttttttcattctggtggcaaaaatggtatctcatttcatatatgttatatgaatcaatttaa

SEQ ID NO: 27013 - DNA, 201 bp, Homo sapiens
ttccacttctggtccaaagggaaaaaaagttctatagactttgtgaaattgtaactgatcttttctctctttgctttggcttctaggaatctcatagccawacatatagcctatcttctacagccatatcaatgtttttgatgtcttattcttgcttctgccctcatcttcatttctaattttttgtgtctctttgctcca

SEQ ID NO: 27014 - DNA, 201 bp, Homo sapiens
cacctggctccactttgcctgttagacaaatttaagcccaactcacaggtctggaataccctcagctggttaactagtgcatctccctatatttaggcaakgaattcatgcacatctttctagactggtgtgtgtatagcatatgtttagagagctgctaagaagaagaagctgactttttatagctgttgtctagttatg

SEQ ID NO: 27015 - DNA, 201 bp, Homo sapiens
acttggcaaataatgggccctcaataaataatagctgttttattgtaggattatatgagaaaagggggaaagaaagaacacaaatgtgtgttatagtatgkgtttagtgtgtgtttgttctgttgtagctgctgaaaccttcatgctttgtttaaaaaaaaaaggcatatctgttttctctgctttgtggtttagtgtttt

SEQ ID NO: 27016 - DNA, 201 bp, Homo sapiens
caggacatagattttagttgaaccccagtgttaggaaactaacactgaagcaattttccttatttaaggtgtgtgtgtgtgtgtgtgtgcgtgtgtgtgtrtgtgtgtgttgtaacttctctttaacaaaatatgcttcgttgtcactttggtgattgctaattgattaaacacacctggctccactttgcctgttagaca

SEQ ID NO: 27017 - DNA, 201 bp, Homo sapiens
cttagttgtagccttagattcaccagatcaagtactttcatttgggccatttcctttttaaaaaataggtagcttatatataaataaaacaaaacagatayctttggattaaggtgggaatttcctcatattgaagctttactataattttatgtggcttttatattagactttctggttaagattaactagattgtcatg

SEQ ID NO: 27018 - DNA, 201 bp, Homo sapiens
caattcgaagatccatttctaatagctttttcttaatatttttcaaaagtggaaattggtgaaatgtttactttttaatagaactctcagatataactatyagatagtcacaagaaaggactattatcaaagagaatactgtatatttgtttaatttaaatgagatcgagtgagacactatatgtgaagcagtagctaagg

SEQ ID NO: 27019 - DNA, 201 bp, Homo sapiens
tgtaccagtggttgtcaaactccggctggacccgaatcactgggagggcttgataaagccttcatttctgagtctcatctcaaagtgtcagattcagtaartctagggtaggacccaagactctgcatttaaaacaggttcccaggtgatgccagtcttgctggtccagagaccctactttaagaaccactggactcttaa

SEQ ID NO: 27020 - DNA, 201 bp, Homo sapiens
aggactataaattttgcttttgatgtttatttgaaacacaaatactttggaggcagtctattttgttccctaaaaattaatgtaaaccttgttttctatgsatcatggtctaagaataatagaaagaaagtaagtgggtgaaagaacatgtcttgggagactgctgtgtggaaaaagaaaaaagaggtcgcagagcccagt

SEQ ID NO: 27021 - DNA, 201 bp, Homo sapiens
cagtggtcactcccctgggcaatggcagagccagggttgcaacccaggaatggctccctggctggagctccttccactcagtagatcccaaacaacttatrttcttaggattcacctcattaacatctcagggtgtttgcttcctcttccttacaatgaagacttctgaaaagagcccatgttttagaattagataaactg

SEQ ID NO: 27022 - DNA, 201 bp, Homo sapiens
aatccattcattccttcttccccactggcccccgtccccgaaggtagttcaggctaccttcatctctcatctggatcatcctagcaccctcctaaatggtyttcaggttttcactgctgtccatctccaagccattctcagcactgctcactaatgcggagatttaatcagatcacactcctgcataaaacccttcagtga

SEQ ID NO: 27023 - DNA, 201 bp, Homo sapiens
gacagtagtgattacagcccaccctgtggatgattggtaggaagggtgaggcacgtactgaacaggtacaactaccaaacaaaaatcagcctagatggcayttcctccaggaagccttcctagacccagccaaacacagataatcaggccctccgcggggctacttggatactgacctctagtacagtagctctcacagtg

SEQ ID NO: 27024 - DNA, 201 bp, Homo sapiens
cttttcaaagggatcccaggctgtattgtcagacgttcacctagcaagctgttcttttcagtagatcgacttttgtaattctcgtgaccaaatgccaagcsttctttgcccaaaacctcttaatcctttgatcttgtctcagtcacaggaaatgattgtctgctacctcctgccatacatgatttagggaggattaccggg

SEQ ID NO: 27025 - DNA, 201 bp, Homo sapiens
tctctataacttcctaagggatacatctacctgttaaggttgtcagacaactcagtcggtgacaagattttagttgtgtttagaaaaagttgttttgtatrtcagtttctatggtgtaacatttgtgtttctatttcagtttaattatttgtctttattctattatttttaaatgtttatttacttatttatttatttgag

SEQ ID NO: 27026 - DNA, 201 bp, Homo sapiens
acatcctgctgtggaagatttgacagtaagaactgcctcatgaggccaacccaaaaaggaacagcagatataaacatgtcgccattcttgtcattttgaaacaacattatttaaagtgtcccagatagttgggaaaagaggaactcttttcttctaggccacttgtttctcctctagcagggaaagatctttgcaggtgtt

SEQ ID NO: 27027 - DNA, 201 bp, Homo sapiens
catcctgctgtggaagatttgacagtaagaactgcctcatgaggccaacccaaaaaggaacagcagatataaacatgtcgccattcttgtcattttgaaacaacattatttaaagtgtcccagatagttgggaaaagaggaactcttttcttctaggccacttgtttctcctctagcagggaaagatctttgcaggtgttg

SEQ ID NO: 27028 - DNA, 201 bp, Homo sapiens
gtagagagagagttgcgctattttgcccaggctggtctcaaactcctgccctcaaatgatcctcttgccttggcttcccaaagtgctgagattacaggtgygaatcactgcacccagctgatttctctctatttcttaagaaactgttcaatatgaactaaagagaaaggggcatttggtaaagcctgagaattgatagat

SEQ ID NO: 27029 - DNA, 201 bp, Homo sapiens
atttatggattaggaatcaaatattaaatatttacttcagcttcttggaattataaatgatttaataaaccctgtggggagttggaatggctttggtttaraaccaactcttatatttaattgttttcccactctccgctctcatagcacagcagcatgggggagcgtgggatacccatggaaaagacagagagcccagct

SEQ ID NO: 27030 - DNA, 201 bp, Homo sapiens
gggtctttgggagataattagctttagatgacatcatgaaagtagagtattcatgatgggattagtggctttgtaagaagaggaaaggaggccagggctttctctctctctctctctctctctctctctttctcagtgcatgcacaaaaagagatcttctgagcacacagtgagacagtggcaatctgcaagccaggaagg

SEQ ID NO: 27031 - DNA, 201 bp, Homo sapiens
ctcaaagagatgccaaactcttctttgactgttttgcctaatgattggagttgatgtgatttcagttcagttcagtaggcctggttcaaatgtggcctctrccacagaaagctgtgtgaccttggggaagtcatttaatcagcttccttaatggtacaatgggaataacaatgcgaaatgacgagagtggttcgtggtatt

SEQ ID NO: 27032 - DNA, 201 bp, Homo sapiens
gaaggaagccagcgggtgaatatctaggtaaatccacactctagcagtggtaatcttacatttgtcaagtatttcatatatgtacaaacacacacacacacacacacacacacacacacacacacacttcagatatcttcctcttccatcttcacaacagtcctaccagatagacaggatggccattcgtatccccatttt

SEQ ID NO: 27033 - DNA, 201 bp, Homo sapiens
ggtctttgggagataattagctttagatgacatcatgaaagtagagtattcatgatgggattagtggctttgtaagaagaggaaaggaggccagggctttctctctctctctctctctctctctctctttctcagtgcatgcacaaaaagagatcttctgagcacacagtgagacagtggcaatctgcaagccaggaaggg

SEQ ID NO: 27034 - DNA, 201 bp, Homo sapiens
aacttgcccaaggccacagcagaagatggcagagctagagtgtgaacgcaggctggttgtcttcagagttagctcttttaaccatgcttccatgctctacrgtagaaaccaactccttctgactgaaagagctggcacagggaggcctgagaactgcccaggccctgcttgcatgcagtgatgggggaaggtatatggaga

SEQ ID NO: 27035 - DNA, 201 bp, Homo sapiens
agagaattcagtagttgaatgatggcagaactctctctttgcttccgtttttattttttctttttcagctttaagaggaggggcttgaactaacgccatcytgtgctaactctctctttctcccttcaaaaactaggtcacgttttgctgtgaccttggtggtctctattgtcttcacaggttaggagacagtttgacatt

SEQ ID NO: 27036 - DNA, 201 bp, Homo sapiens
tatttggccattaatggtctttagagcgcagcctggagtgggaggccatttacgactccagtggactctgtgggctctgcttcagtgtcataaaaaatgckaattgccttcctccttcggatcctgactcctgacagaggcatttgattttgttgaagcttctgcaaggtgactcccattctgggacctcaacattggcag

SEQ ID NO: 27037 - DNA, 201 bp, Homo sapiens
ttcatatctcagctgcctccttcttactgtgtgacctttggtgagaatctctcttccctgagccccagtttcctctgctgtaacatgggcatactaatgcytgcgtccctactgctttgaagaatttatgagatcatggatgtgagaaatacaaacaagttttatggaaatctagaaaattcactttgctgagtattaatt

SEQ ID NO: 27038 - DNA, 201 bp, Homo sapiens
gccccaccaaaatgtatggactagaactgggataagaaaatgatttcccaaaggaaaatcagagtgggaaatgcaggtttataacagttgaataatctgayctgtatctttgaagccttcttgggtctcccagttttcttcttgggaaagccagtttgttgggcaggggttgggggtgaggggagctggattttctgtcct

SEQ ID NO: 27039 - DNA, 201 bp, Homo sapiens
aaatttccatgtacaaatgggatcacatcaagctaaaaagcttctgcacagcacaggaaagtaaagacataacccacagaatgagataaaatatttgcaawctaccaccctgaaaagggattaaatataaggagctcaaacaactccataggaaaaaatctagtaagctgatcaaaaattggacaaagatttgaatggaca

SEQ ID NO: 27040 - DNA, 201 bp, Homo sapiens
ttggcctcagtttcttcatctttaaagtgggataataatacattttctatatggattattgggaggatgtaaaagagataatgcatgcaccttatccaccrtagatacatacaaagaaaatgctaggcattaagtttttaatcaggctgcagttagcatggcagaatgtcacaggtcctaacagagcacacttttggagac

SEQ ID NO: 27041 - DNA, 201 bp, Homo sapiens
ctgttttagaacatactgctcaaagggcatggtcagctagctttccaggggcatctgcagagaaggttcattcagaagcatttccttctgtgcgaatcccwaattctaacataacaaaaagaatgtggtgcatacagcttattctcttttgtagttctttaaggaaaggataaacttgaagctagttcaggacctgaaagt

SEQ ID NO: 27042 - DNA, 201 bp, Homo sapiens
ggaaggcaattcagcaaaccccaagagtggagaccatggccaagaggggtttattatttcagtttagggaaacaaggttttggcaaggaagtcatcctgargactcttgatcccaggtctgattgtcagtgaaggaaactcatgtaggacagctgagcccacatcacagctttctaaaaacaacttaaatgccaaccctaa

SEQ ID NO: 27043 - DNA, 201 bp, Homo sapiens
tctccatgtttgtaggggtattttttgttgttgttttttccacttgtaaatctctcaagcttttaggaaaagtaactctggcaaaggaattgatttggcckctcaaatctcaagaggccaccgttgagctacccagcccatatgacaggaatcctttccttcttgttttggttaagtttcctggcaagcattgcttaatag

SEQ ID NO: 27044 - DNA, 201 bp, Homo sapiens
ttgagatctcttatatttcagacaaccacaaaagctgtttttgtacctggagactagaggctaaggtaactgtgttgctgttggaaagcaagtggttttcraagctctctgccttcagcagtttgtctttgcaacacaacgcccgttgggtctgatgttggtctgatagaagaaggggaacgtacttcaacctgtgttaag

SEQ ID NO: 27045 - DNA, 201 bp, Homo sapiens
ggctcaagcagtctgcctgcctcagcctcccaaattgttggcattacagtcatgagccacctcacctggcctgttttgtttttttaacaatatagaagagytggatattagttgtcatgctagaggagatgcattgtttgggattcatagaagataaagtatatgataaaatgagttaagacaatttcatacccaggtttg

SEQ ID NO: 27046 - DNA, 201 bp, Homo sapiens
ggactcaagatctgccgctagccattctccttacaggtaggcttttctctttgcctctaattcctgggatctgacccagaaaactcacagacctacccacytctcagaagctaggtggatttgctttatgctactagctaggtggcagctgcgagaaatgtcaccctgcaggatgcaacagccatcatgggtagcaaacaa

SEQ ID NO: 27047 - DNA, 201 bp, Homo sapiens
atattagttgtcatgctagaggagatgcattgtttgggattcatagaagataaagtatatgataaaatgagttaagacaatttcatacccaggtttggctmaacctgtataaacttgagaaatgattgttatggagcctgcttctgacatatttattggtttcttggagaagcagtgagttgtccactttacctgacacag

SEQ ID NO: 27048 - DNA, 201 bp, Homo sapiens
gcctcaccatgttgcccaggctggtctcgaactccggggctcaagcagtcacctgtctccatctcccaaagtgctacgattacaggcatgagtcactgcamccggcctcctgatttatttctttgttcatcaatataagcaccagctacgggcagttcctgaaatgcttgcctgaatcagatccctatgctgaagtgaaaa

SEQ ID NO: 27049 - DNA, 201 bp, Homo sapiens
tcctttgttcattctagttatttcatttatccattcatgagatgtttattgagcacctactatttgtcaggcactgttttgaatgttggggattcaacackaaaaagaaaaaaaatagtagtcttttgccttctacgttatggacataaagaatgctgtatgccattttttttaatgtttaaggacttgacaagatactta

SEQ ID NO: 27050 - DNA, 201 bp, Homo sapiens
gagtcatccttcatattaacactgcatttttacctaaaaaaatgcaactttccagcaacatgaaattgctgtctccctcttctctctctctcctctctctstgtgtgtgtgtgtgtgtgtgtgtgtgtgtgtgtgtgtgtgtgtgtttattcctctgcctttaaaaagaccagaagaatgcacagatggattagggcaaca

SEQ ID NO: 27051 - DNA, 201 bp, Homo sapiens
ttcaattatttttattgattgacctcttccagattatttgatagtagatttttcactattcagaaagttaaatgctgagcagtcaggaatcttcctctgcrgttctgagtgtcttctgagctgtgacccaacttgcaaatatagaggtgtatatgtatctatgggtatgtttttgttttgtgggttttttttttttttttt

SEQ ID NO: 27052 - DNA, 201 bp, Homo sapiens
ttcagagtgagcaagaggaggagtttgtgagagggagcagtatgctgtgaagaagagagatttagggtcatggagtaggagagtgataaagtaatgtgggrtaaacaagagggataagaagaaaaccagaaggggaaacgagctgtgagaatagaaagctgagctcacttccaaaaggtctgtctttgtctgaagcacaca

SEQ ID NO: 27053 - DNA, 201 bp, Homo sapiens
tgttatactttagcttaatacaacatcatcaattattcaattatttttattgattgacctcttccagattatttgatagtagatttttcactattcagaargttaaatgctgagcagtcaggaatcttcctctgcagttctgagtgtcttctgagctgtgacccaacttgcaaatatagaggtgtatatgtatctatgggt

SEQ ID NO: 27054 - DNA, 201 bp, Homo sapiens
attctacagcttaatgttgcatgggcctcaggtttgtgaacattttaaaatttcttttccctattcgaaaaatctggtgtgaagagcatgttctgccattmcacacacacacacacacacacacgcacacgcacacagtaccagaagatagtgaggaatgaggctgtactgtgtgaggaagagggccatttcaggagcaag

SEQ ID NO: 27055 - DNA, 201 bp, Homo sapiens
taccagttttccaggactggccctcacttcctgtaggcccccgtaaagctgaccaggattctgtcccgtgtttatggagatgaaaaagacgggtttttttytttttttttttttcccaaggggcctaagtgaggcagagataaaacaaattgaccttctattgtcctagtgcataattgtgtctatctgaccactagtgtg

SEQ ID NO: 27056 - DNA, 201 bp, Homo sapiens
ctgcatctaatcccatgtgccaaagagagatgaaatgcaagagagagtcaatgatgcatctgaaagagtcagacagacctggattcaaatccttactctcycacttcttaactggatggagttgggccagttacggagtgctctcaactgtaggagaaggtacatattcaaaaagaaacaaaaaccaaaacaaacaaaaac

SEQ ID NO: 27057 - DNA, 201 bp, Homo sapiens
atctccagtagcttgtcaattccttctcagacaggctgattagctggagtgcagctgtccaggttgcttaagtgaaggaagatgacttgattgtagttcartgccttagctgtcactgaactgcattcctaaatatgatccttattgccctgctaacccctctataaacagcactgcagtgaaagcataaaacattaaaaa

SEQ ID NO: 27058 - DNA, 201 bp, Homo sapiens
tatggtacagaggtagggcatgactagatactttaagactcagttaagtctcagaaaccagacccacagaaccctacctcctgacttcctactggcctggyctggatggaatttgcatcctgtgatccaggtatgacccaggaatgagagacagaattgagcataggacagtgataagatccttcagtgggtctactcata

SEQ ID NO: 27059 - DNA, 201 bp, Homo sapiens
gaagtgcaagagacaaaagaagaagagcaattgtgggaagggtaaaaggctttaacttttgagaatttgtcttttaaaggaagaaagcctttctcaggaaygttcatctgtatcttctttgcctccaactggggcacatgaccaaccctagctaaatgggaagcaggattccagtatttcactttctagtctctatagaag

SEQ ID NO: 27060 - DNA, 201 bp, Homo sapiens
gtccatagtttgtcttggatagatagaatgttgacagtataacccatatatgattagacaatacaggttgagtatcccttatctgaaatgcttgggaccaraagtgtttcaaattttagagtttttcagatgttggaatattcgtattatatttacttaccagctgagcatcctaaatccaaaaatccaaaatgtgaaatg

SEQ ID NO: 27061 - DNA, 201 bp, Homo sapiens
ttgttcactgctcttttgtggctgatttttgggatgagtgatgagtgtagagtgttttatatgaactttcaagataaatattcatctctaaagaattgtattatttatttatttatttatttatttatttatttatttatttttattttttgagactctcactcttatctcccaggctggagtgccatggcacgatctctg

SEQ ID NO: 27062 - DNA, 201 bp, Homo sapiens
ttttgggatgagtgatgagtgtagagtgttttatatgaactttcaagataaatattcatctctaaagaattgtattatttatttatttatttatttatttwtttatttatttatttttattttttgagactctcactcttatctcccaggctggagtgccatggcacgatctctgtttgctgcaacctccaccttctgggt

SEQ ID NO: 27063 - DNA, 201 bp, Homo sapiens
tttgggatgagtgatgagtgtagagtgttttatatgaactttcaagataaatattcatctctaaagaattgtattatttatttatttatttatttatttatttatttatttatttttattttttgagactctcactcttatctcccaggctggagtgccatggcacgatctctgtttgctgcaacctccaccttctgggtt

SEQ ID NO: 27064 - DNA, 201 bp, Homo sapiens
gaaaggaactttaggcattttgtgttaccatggaatctcttgcagcacatcctagcatctgttcatacctctgggagtgcatgcgtcatgaaatatgacarttgtctgtgtccgtgtctctgcagttatatcaaacttccttacgacaggaaccatgctcgattcatctttctatccctggaagctcatggaaggcaatac

SEQ ID NO: 27065 - DNA, 201 bp, Homo sapiens
ttgggatgagtgatgagtgtagagtgttttatatgaactttcaagataaatattcatctctaaagaattgtattatttatttatttatttatttatttatttatttatttatttttattttttgagactctcactcttatctcccaggctggagtgccatggcacgatctctgtttgctgcaacctccaccttctgggttc

SEQ ID NO: 27066 - DNA, 201 bp, Homo sapiens
agcacatcctagcatctgttcatacctctgggagtgcatgcgtcatgaaatatgacagttgtctgtgtccgtgtctctgcagttatatcaaacttccttamgacaggaaccatgctcgattcatctttctatccctggaagctcatggaaggcaatacacaaaatattcgttgaatgaaggaatgcataaacagtcaaaca

SEQ ID NO: 27067 - DNA, 201 bp, Homo sapiens
ggaagctgggcaatttcattattcattcacttgaaataatcctgggactgctttcagtggcatggttccttcagcaaataaagataagccaaatccctggrcactcaaaagaaggggaagattctctaaattaattccaggctgaaataattcagcagtatttgtaatattctgtgcataaattggcaatttgctggagag

SEQ ID NO: 27068 - DNA, 201 bp, Homo sapiens
gggatgagtgatgagtgtagagtgttttatatgaactttcaagataaatattcatctctaaagaattgtattatttatttatttatttatttatttatttatttatttatttttattttttgagactctcactcttatctcccaggctggagtgccatggcacgatctctgtttgctgcaacctccaccttctgggttcaa

SEQ ID NO: 27069 - DNA, 201 bp, Homo sapiens
ctgacaaaaatgcttatctattcttaagatgttttgtttattcttttgtttaccttactgccaaaatatttagcctcatcattgataataaaatagtcaatttttttcatttatgcaacaaaggtttactgttaaaacataaagcattttttggtttgtttgtttattttaatttgtcacaggtaaacttagcatgcctgt

SEQ ID NO: 27070 - DNA, 201 bp, Homo sapiens
aatctttcaggttagcatgatttttaagccccttgatctgcctaccatctgcctcccttgtttcataactgtactccagccatcccagctgtcgacagggmcttacagggagcctgttctctctcagctctgaatctttgcctgtaatacatgcccccgttttcctgggttgggtgcccttctcagtgaccaaatcatcta

SEQ ID NO: 27071 - DNA, 201 bp, Homo sapiens
tctgcccttgtttgcctgatttgggagaaagttgttacagctggtgaacaagcaaacagcattgtttgttaccctggggcactcacttggttgaatgttgrgacctggctggcaggttccaaccttaggcagttgttaacctgcaatgatcaaactgttggtctggcagctaaaccacacctgatggggaaaatttaccca

SEQ ID NO: 27072 - DNA, 201 bp, Homo sapiens
gagggggcaggtagggggctgtacaagcactccttctgttaaacacaataggcatacacacacacgtgcacacacatttttctttcttctagagaactttdtttgctgttaactgaacacttggcctatcagccccgttatgtgttgttaaaatttaaccaccactgagcatcattaagaggtcacagaaccagtcagaag

SEQ ID NO: 27073 - DNA, 201 bp, Homo sapiens
attttcatggaaataaactcagtgcatttacagtctccttgaaatagtcctgaggtttattgttattatcaatggaatcaaatagactcagggccctgacytcatctagacttcttcagggtaagctacgagttgctaatgcaggacttagattatagggactgggtttactgtagctgaaatttcatccacctgctacag

SEQ ID NO: 27074 - DNA, 201 bp, Homo sapiens
tgagtgatgagtgtagagtgttttatatgaactttcaagataaatattcatctctaaagaattgtattatttatttatttatttatttatttatttatttwtttatttttattttttgagactctcactcttatctcccaggctggagtgccatggcacgatctctgtttgctgcaacctccaccttctgggttcaagcga

SEQ ID NO: 27075 - DNA, 201 bp, Homo sapiens
attggaaggcagttttctgtgctaggcaataggaatgtctctaaagaaactaagactgcccttaaagattttataatgtgatagaggaaggaagataactrttatagcttttaatatgtttgctggtctctgcctagactggagtacctcctcgcgtaggtacaccagtattttacttttatatattttattcctcaataa

SEQ ID NO: 27076 - DNA, 201 bp, Homo sapiens
tatttttgttatcaagcttgtttctatggggggagttaggtatctaaattttctgtatctcggaaagtatagggctagtgacctgccagatacatttcatytggggaacaatttagttataattactatggaaatagctattggtcacaaattgtacccatgtactatgcattagtatgctccttccttccctctctccct

SEQ ID NO: 27077 - DNA, 201 bp, Homo sapiens
tgcagcctcgaactcccaggctcatgggatcctcttacctcagcctcccagagtagctgagactacaggtgcatgccaccatgcccagctaatttttggatttttttttttttctagagacgtagtctcactctgttgctcaggctggtctcaaactcctggactcaaatgatcctctcacctcggcctcccaaagtgctg

SEQ ID NO: 27078 - DNA, 201 bp, Homo sapiens
tctgcctagactggagtacctcctcgcgtaggtacaccagtattttacttttatatattttattcctcaataattataacctgaatacatacaaagatatygaaacattagtgacataaataattatactaccagacatagacagattggcgtacagcatcctgccaactgaggtgaggaattaacatttgtgttttcatg

SEQ ID NO: 27079 - DNA, 201 bp, Homo sapiens
aatgacctgggatcatagtatgcatggctaacatttgtaagcaggaagttgggagaaggaaaacagcaaaaagtaaaataaaaattgggaagattaagatrggctgaataatgaaatgaaaacgggtcagaactggcttttctttctcttcttgatttctccttgtcttgtccttggaggaagctgaattcatctttatag

SEQ ID NO: 27080 - DNA, 201 bp, Homo sapiens
aaaatatcatactattataagataatctactgtacatattgtgtatgtaggcactctgaaagcaaaatggcatttttaaaaagctcttcagcctcgatagaaaaaaaaacaggagcttagatgtattttcttgaaggcaaggtctgtgaaaatccttttatggagcttgtgtgccaaaacatgctgtgtaaagtcagccag

SEQ ID NO: 27081 - DNA, 201 bp, Homo sapiens
aaaggtaaataagacacagggcttgccttctaaaaccaccttttaagagggaaggtaaacctgtgtatatttataacaataaaaatgcaaaaataaaattmatgcaagcaatacatactaggatatgttttaatctgaaaacaatagattatcatagcagcataatagaagaggaaatatctgggcagaagtctgcatgga

SEQ ID NO: 27082 - DNA, 201 bp, Homo sapiens
agaacttaaactatttgtgggaaaagattatttagatcaagaagttagaaggacagcaatggaatgcttgtcgtacagatgtatttaggagaaggaggacrgctaggaatttgggttttcttaaagcagatttccaccttagaatgacctgggatcatagtatgcatggctaacatttgtaagcaggaagttgggagaagg

SEQ ID NO: 27083 - DNA, 201 bp, Homo sapiens
ttttttttttttctctgtttgtcttttaaatctgtttctcattttccctttctttctctctttctctccctcaccccaataaaagtagatatcagattcayatgcacatatagatgatggttttcctacactgctaaaacattggacctaaattggataactagagatagttaagtgcaactcttttatttcactttatga

SEQ ID NO: 27084 - DNA, 201 bp, Homo sapiens
ctggctgtgtgaggtattaattaagcttctattcagctacagaaaaagcatggccactgggagcaaggtggaagaacttaaactatttgtgggaaaagatyatttagatcaagaagttagaaggacagcaatggaatgcttgtcgtacagatgtatttaggagaaggaggacagctaggaatttgggttttcttaaagcag

SEQ ID NO: 27085 - DNA, 201 bp, Homo sapiens
cctccctggcctgaaggtggggcctcaccagggacctgcccccttttgcccaggaacctgtctccctcctgctgccgttcatggcacccaggctgtaggtrccaaggggccccctgcaggccagcactgagctgctctcagccccatttcggcttccctcttatcctcatcagtgctcaaagtccagaagggggctgaggt

SEQ ID NO: 27086 - DNA, 201 bp, Homo sapiens
tttcagatgtacaaagctccatcagtgggattaggcagtgagtggaaagagcactagagcattctagggagaggacttgcaaaggcagaacaagtcatggygtgttcccatcaaagtgtaagtaggaccataaggttgaggctgggtgtggtggctcatgcctgtaatctcagcactttagaaggccaaggcgggtggatg

SEQ ID NO: 27087 - DNA, 201 bp, Homo sapiens
cccatgtgccaagcagggaggtagaccttaaagattacagaggttaacatgactcaattgcttctcttagttgttttatgtttcatggattctataataargaactgtgagttgctatgctcattaatgctatatccttgcaacaaaatagatcatgaagaagtaacagatgcctctgttgcagcctcttcttttttcata

SEQ ID NO: 27088 - DNA, 201 bp, Homo sapiens
cttactgcagcctcagcctccctggctgaagtggtcctcccaagtcagcctcccaggtaactaggattacagatgtatggcaccatgcctggctaatttawttattttattttattttattttattttattttattttattttattttattttattttattttattttgtggagacagggtctcactgtgttgcccaggct

SEQ ID NO: 27089 - DNA, 201 bp, Homo sapiens
ttaattagttgatgtttttagtatacctcccatgtgccaagcagggaggtagaccttaaagattacagaggttaacatgactcaattgcttctcttagttrttttatgtttcatggattctataataaggaactgtgagttgctatgctcattaatgctatatccttgcaacaaaatagatcatgaagaagtaacagatgc

SEQ ID NO: 27090 - DNA, 201 bp, Homo sapiens
attacttattcaaagatagtgacggaagtgctaacggtaaagaataaaagatgttgtatgtgtagtgcatgcatgtgtgtgtttgtgtgcttgtgtgtgtrtattttgggtgggtgtcttaatctattggggctgctatgacaaaatgccataaactgagtagctaataaacaacttaagtccaggatccaggtgctgaca

SEQ ID NO: 27091 - DNA, 201 bp, Homo sapiens
tcatgctcttggagattcaagcttattgaagcattaattagttgatgtttttagtatacctcccatgtgccaagcagggaggtagaccttaaagattacakaggttaacatgactcaattgcttctcttagttgttttatgtttcatggattctataataaggaactgtgagttgctatgctcattaatgctatatccttg

SEQ ID NO: 27092 - DNA, 201 bp, Homo sapiens
ccccacccccaccccagcttggcgagctcccagtcatccttcaaatcttagcctaactaaattgtcttctttaaagcctctcctgcctctgccactaggcrgaattaggaacttctccccctctgccactttgccccttgaatatattgtgtttcaatgactttaacatttttttctcacattataatatctctgcaatca

SEQ ID NO: 27093 - DNA, 201 bp, Homo sapiens
agaatgcacagatggattagggcaacattgctccagaagcatcttatatagttattttcatctgatagcatcaagacacatttgtggggtcgtgagctgtmttgtagtcttcttgttttccagaatatatctgcatgtagtagatgttcagtaaatgttggttgttaaataaaataatgaatccacaacatatggggctca

SEQ ID NO: 27094 - DNA, 201 bp, Homo sapiens
tcctgcctcatgtccaccatggatcttatttcccaagcacacccagcccctgatgaccctgtgcctactcatgcgtgcttcatttccctttcccccacccmcacccccaccccagcttggcgagctcccagtcatccttcaaatcttagcctaactaaattgtcttctttaaagcctctcctgcctctgccactaggcgga

SEQ ID NO: 27095 - DNA, 201 bp, Homo sapiens
agcgtgtgggtttctgagacccagtcataattgcaatgaccttcatctcctgtttgggccctgccattttggggagaaagcgactttactccttgtcttgktcactttcagcttcttgcataggagcttccttgggcctggcacgatgcagaaatctactgagctgacagttttcaggaggccccaagtatgttctggcct

SEQ ID NO: 27096 - DNA, 201 bp, Homo sapiens
tgttgtccatcaacagatgaatggataaagaaaatgttacatttacataatggagtactattccgtcataaaaaaggatgagactcttgtcatttgcaacmacatggatggaactggagatcattaggttaagtgaaataagccaggcacagaaagacaaacattgcatgttcttacttatttgtgggatctaaaaatcaa

SEQ ID NO: 27097 - DNA, 201 bp, Homo sapiens
aaaaaaaaaaaagaaagatctctgtattgaaaactgtaaaacactgatgaaagaaattgaagaggacactaaaaatggaaaaatattccatgttcataggktggaagaatcaatattattaaaatgtccatactacccaaaacagtctccagattcaatacaatccttatcaaaataccaataacgttcctcatagaaata

SEQ ID NO: 27098 - DNA, 201 bp, Homo sapiens
ttgttataggtgatctagagatgatttaaagtatacaggaggatatgcacaggttagatgcaaatactatgccattttatgtcagggacttgagcatcctyttgttttggtatccacaagggtcctggaactaatcccccttagataccaagtgatgactgtataatcattcaggcaaaattgaagttaatttattgctca

SEQ ID NO: 27099 - DNA, 201 bp, Homo sapiens
atagttaaacatgaaagaaattggtgttttgtagttggtgccactgagaaggtataggagtaatgctcctaagtaaattgcagaaagtttagaattattgwataatagtaataaatactaacaatgatttacgttttttgagcacatgttgtgtgttagtctctcttttaaggactccacatggcttaatctaattattgt

SEQ ID NO: 27100 - DNA, 201 bp, Homo sapiens
atgatttaaagtatacaggaggatatgcacaggttagatgcaaatactatgccattttatgtcagggacttgagcatccttttgttttggtatccacaagsgtcctggaactaatcccccttagataccaagtgatgactgtataatcattcaggcaaaattgaagttaatttattgctcatttgacagtactgagtaggt

SEQ ID NO: 27101 - DNA, 201 bp, Homo sapiens
ctctcaggtatttcttcgtagcagcatgacaaattcacatgctaatagtgaactatctgaaaaagaaacaaagaaaacaatcccatttacaatagctaccaaaaaaaaaaaaaaaaaggaagaaggtgaagatctctacaatgaaaaccataaatcagtgataaaagaaattgaagaaaccacttatattttatagtacta

SEQ ID NO: 27102 - DNA, 201 bp, Homo sapiens
gagctgtgcccttaggggttttagaaacatcctacagtctcttccatagcaacctactacatcagttaagtgaagttcacaattcatgaaaatacaaaatrtaggagcttatattagtctgttctcacgctgctataaagaactaaatgagagtgggtgatttatgaagaaaacaggtttaactgactcacaggtccacag

SEQ ID NO: 27103 - DNA, 201 bp, Homo sapiens
ctggaactaaatgtgataagggcgacagaagaataaagtagggaagaggaaaaactagtgaattaggttgcaatttaaaatagcatgcttagaggacattttgtgtgtgtgtgtgtgtgtgtgtgtgtgtgtgtgtgtgtgtgtttattgaggtttaacaaaaaagctagttaccactaccacttctgcttaaagcctatt

SEQ ID NO: 27104 - DNA, 201 bp, Homo sapiens
ggaagcgaccaccagcgctgcttatgtctcatggtgtaggcagtgccgggattcatctgcctccaatgaatttctctggagacccaagtgaggaaaggaaygattaaggaataaacttccagtgcattgaaaccttcctggcctagcaggcaaacatgatgtatagaatgggagtcctggaagtcagaagtgggttggatg

SEQ ID NO: 27105 - DNA, 201 bp, Homo sapiens
ggtatgactacatagatctccctcacgtgcaagttcagtcaatataccaaggggtacattggaccatttccggtaaaggaaaaagtttctgcaggatagcygaatggtgcaaattggccttcatttatttctgtgtgtttcctcaatcccattgtttgtttttctttatcaaactcttctgttacatggcacaagcttccg

SEQ ID NO: 27106 - DNA, 201 bp, Homo sapiens
tggaactaaatgtgataagggcgacagaagaataaagtagggaagaggaaaaactagtgaattaggttgcaatttaaaatagcatgcttagaggacattttgtgtgtgtgtgtgtgtgtgtgtgtgtgtgtgtgtgtgtgtgtttattgaggtttaacaaaaaagctagttaccactaccacttctgcttaaagcctatta

SEQ ID NO: 27107 - DNA, 201 bp, Homo sapiens
ttggttatcctcatgtgtagtgtagggataataatgctggcattttagtattggtatgtctagacgtatatggatgatgatgtatggaaatttcttaatayttcagctgtttttcccaaatacctagcacagtgtatgaccactgtagatgatcagtggaggtgtgcaagaaagccattatttaatgtgtttgttttattc

SEQ ID NO: 27108 - DNA, 201 bp, Homo sapiens
ggaactaaatgtgataagggcgacagaagaataaagtagggaagaggaaaaactagtgaattaggttgcaatttaaaatagcatgcttagaggacattttgtgtgtgtgtgtgtgtgtgtgtgtgtgtgtgtgtgtgtgtgtttattgaggtttaacaaaaaagctagttaccactaccacttctgcttaaagcctattat

SEQ ID NO: 27109 - DNA, 201 bp, Homo sapiens
ggatttaggaaatgctcagcaaatagtaatatattgttccttaatgatttaatatcaccagttaataaatatgtgtcatcagtatgcataaagacattacrtctaagcttagtgtggttggaggattgcattgtgccctagacagataaaattttaaaatgaatcacagtttaattcaaataatcagagtcaaaagacaag

SEQ ID NO: 27110 - DNA, 201 bp, Homo sapiens
aactaaatgtgataagggcgacagaagaataaagtagggaagaggaaaaactagtgaattaggttgcaatttaaaatagcatgcttagaggacattttgtgtgtgtgtgtgtgtgtgtgtgtgtgtgtgtgtgtgtgtgtttattgaggtttaacaaaaaagctagttaccactaccacttctgcttaaagcctattattt

SEQ ID NO: 27111 - DNA, 201 bp, Homo sapiens
ggcgacagaagaataaagtagggaagaggaaaaactagtgaattaggttgcaatttaaaatagcatgcttagaggacattttgtgtgtgtgtgtgtgtgtgtgtgtgtgtgtgtgtgtgtgtgtttattgaggtttaacaaaaaagctagttaccactaccacttctgcttaaagcctattatttctctccattgccttca

SEQ ID NO: 27112 - DNA, 201 bp, Homo sapiens
gattggtaaatagatttacagaaaaaaaatcttattgggccataaaaaattatattcgggactcacctttatagctaagaaaaccatttcaagttaggggtgtgtgtgtgtgtgtgtgtgtgtgtgtgtgtgtgtgtatgtgtgtgtgtgtgtgcgcatgtgcacacgcctgccagtgtgtgtatgtgtgtattatttttt

SEQ ID NO: 27113 - DNA, 201 bp, Homo sapiens
cgacagaagaataaagtagggaagaggaaaaactagtgaattaggttgcaatttaaaatagcatgcttagaggacattttgtgtgtgtgtgtgtgtgtgtgtgtgtgtgtgtgtgtgtgtgtttattgaggtttaacaaaaaagctagttaccactaccacttctgcttaaagcctattatttctctccattgccttcata

SEQ ID NO: 27114 - DNA, 201 bp, Homo sapiens
gggactcacctttatagctaagaaaaccatttcaagttaggggtgtgtgtgtgtgtgtgtgtgtgtgtgtgtgtgtgtgtatgtgtgtgtgtgtgtgcgcrtgtgcacacgcctgccagtgtgtgtatgtgtgtattattttttcttctctccccttatttctgcccagtactatagaactatttccagtcattgtacatg

SEQ ID NO: 27115 - DNA, 201 bp, Homo sapiens
acagaagaataaagtagggaagaggaaaaactagtgaattaggttgcaatttaaaatagcatgcttagaggacattttgtgtgtgtgtgtgtgtgtgtgtgtgtgtgtgtgtgtgtgtgtttattgaggtttaacaaaaaagctagttaccactaccacttctgcttaaagcctattatttctctccattgccttcataaa

SEQ ID NO: 27116 - DNA, 201 bp, Homo sapiens
ctttatagctaagaaaaccatttcaagttaggggtgtgtgtgtgtgtgtgtgtgtgtgtgtgtgtgtgtgtatgtgtgtgtgtgtgtgcgcatgtgcacaygcctgccagtgtgtgtatgtgtgtattattttttcttctctccccttatttctgcccagtactatagaactatttccagtcattgtacatggattgttgt

SEQ ID NO: 27117 - DNA, 201 bp, Homo sapiens
gaataaattgagttgaaaagataatgaaagttggtggaagacaaaactgaaaagtgctatgtattagtcaggtttctctagagatacagaaccaataggakgtgtgtgtgtgtgtgtgtgtgtgtgtgtgtgtgtatggaaaaaaatatatatatatggaaaatatgtatacatggaaaaatatttattataaggaattgg

SEQ ID NO: 27118 - DNA, 201 bp, Homo sapiens
gtttgaaagacatttagatgataattccaaaggccctcttatctccaaatccatcagaagctacctataatttcagtgcaatgagtgctgggcataggtgrccattcagtgagtgagtaccccaacctttgggaagataagacaggctattctaatccagctgtacccatatagagcaattatcattttcactctggctcc

SEQ ID NO: 27119 - DNA, 201 bp, Homo sapiens
ttccaaagaaccttgaatgatacaatgagatacttgtcttatattctgtgggtctacagaagcaatgggaagtatttttttttaaatcaaaacaggaaagkctggatggatggatgtagagacaatttatcaatattttagaatagcagtccctaatctttttgacaccagagaccagtttcatggaaaacagtttttcca

SEQ ID NO: 27120 - DNA, 201 bp, Homo sapiens
gaggagaaaatggggacagaaacctctgggggaaattttagctctgttctctccagtacagcagctacagcagtagtagcactactactatttagatgtamatttaaattaaaaatacagttattcagttgtgcttgccacattttaactgcttaaaatttacatgtggccaatggctaccatatcagcacagaatatttc

SEQ ID NO: 27121 - DNA, 201 bp, Homo sapiens
tccctgaaatctgtgaatatgatgagtgatcacgttatgttacagggcaaagtttaccttaaaatagggagactatccaggtggtcttaatctaatcacgyaagtccttcaaagcagaaatgtctctgtccgatgatataagaggacgtcagagacattcaaagcaagagaaagattcaatgtgctgttgctggtttgaag

SEQ ID NO: 27122 - DNA, 201 bp, Homo sapiens
cctgaaatctgtgaatatgatgagtgatcacgttatgttacagggcaaagtttaccttaaaatagggagactatccaggtggtcttaatctaatcacgcargtccttcaaagcagaaatgtctctgtccgatgatataagaggacgtcagagacattcaaagcaagagaaagattcaatgtgctgttgctggtttgaagat

SEQ ID NO: 27123 - DNA, 201 bp, Homo sapiens
aagtgggatcccaacttggaagcgtggcacttggttttcctttttagtcttagcagtggatgccagagtctttccggttttcctactcagctttatttttwaaaacagtttccctttctcaggacagcctacacagttctactaataacatatcatgcaatgaaaaccttcaaggagggaaaggaaggtgactgaagttcc

SEQ ID NO: 27124 - DNA, 201 bp, Homo sapiens
ggaatgtagtagatgctcaataagtttctgcttaattgaattgaattaaatgtgttcagtctgctgtggttcattaagttaatttgggtaaaaagattagsgtaaattgttttccatagacaatattgaaattctttgtgatcagtgaacttgaaaatcattttttattgtgattctttattttgtaatctagatttggga

SEQ ID NO: 27125 - DNA, 201 bp, Homo sapiens
tgaacacccagagtttgataggtactgtatttgatagagggtgtacagacatgaaagagacggtctcatgaagctcagagtggaatggaagaagtagataygtagcagatgaaaaaccagtaagtaacaatacagtatagttatatctgtattagaaatataaatgtattaactatggatacccagaagaagaaattccca

SEQ ID NO: 27126 - DNA, 201 bp, Homo sapiens
ctggaatgtagtagatgctcaataagtttctgcttaattgaattgaattaaatgtgttcagtctgctgtggttcattaagttaatttgggtaaaaagattrgggtaaattgttttccatagacaatattgaaattctttgtgatcagtgaacttgaaaatcattttttattgtgattctttattttgtaatctagatttgg

SEQ ID NO: 27127 - DNA, 201 bp, Homo sapiens
acccagaagaagaaattcccagccttgtcttggagagtgagaaggtattcagtgtactgtagctcaagtattttgaagatacttatgctcaatctaatttkgggaaagaatgttctctaatattttgtatatgtgggcttcgcttttataattttttaattttacattttagatatagaaatcaggaatgcttggttgatg

SEQ ID NO: 27128 - DNA, 201 bp, Homo sapiens
caggttttcttctcaatctcttcatcctgtggtgtgactgtcagaggagaggccagcataagtggatgaggaaggactgaggatactgcggtaatccaggyaggaaatgatagctgtgtgacctggcatctgctggtggagatggagaggagtggacaagcaaaaggtacttggaaggtgaaattgacaagatggacttgt

SEQ ID NO: 27129 - DNA, 201 bp, Homo sapiens
acaggcaaattcaactcttccaacaatgaaagtaacaatgtgtttccttttgcttggaagcagaaatataattttgggacaattcaaatggccatatagtyctacagatggccaccagaatgttgaaaaagtctcacttgcaaaccagtaaaatcattctgatgttttattgttgctttttaattataaataattcaagca

SEQ ID NO: 27130 - DNA, 201 bp, Homo sapiens
cctagaatactgccaggcatagaacagattctcaaacaatatttgttgaatgaattcatgaattgagtctatacttttaaaatcttgtcagggtgaagtartatatttcaattccactaaggcttaggatacaaatgtttcctggattgattgattgattatttgatcactgtcacccatgctggagtgcagtggtgcaat

SEQ ID NO: 27131 - DNA, 201 bp, Homo sapiens
gcttatgacccattgatctggtacatacctcccatttactagagggttaaacttgaggtacacaggggtacagtgggtgccttgtgtttacacagtagctsgaattcaggcctcctgatacccagtataatgaaaaggctctttataaggactttaaacataccataagcacccagatgaatatataagcctttacagagt

SEQ ID NO: 27132 - DNA, 201 bp, Homo sapiens
gttttgggagtgtttagatagcaacaacttcatagactgaaccttttggtttttttttctttctctccaactcagaggttaaaaattaacctgaaaaatcmatgctgcaatatgaatgcgctgtatgtttcttgcatggacttgcagacactctgtaacggtgtttccagtctccagcagttcatattggaaggtgagctt

SEQ ID NO: 27133 - DNA, 201 bp, Homo sapiens
cacatccaggtcacgctgatgcaagaggtaggttcccatggtcttgggcagcccttcccctgtggctttgcagggtacagcctccctcccagctgctttcatgggcaggcatggagtgtctgaggcttttccaggctcatggtacaagctatcagtggatctaccattcctgggtctagaggacagtggccctattctcac

SEQ ID NO: 27134 - DNA, 201 bp, Homo sapiens
cgtacaccgtgagcttcttgagagcagggactgtggctgctatcctcaaaaaagctgtattgagcagaactgaagtcagataggcctggttgtgatgtatkctgtgtctttggtggcatgggtgggtggtgaaaggtggaatttgtgattacatttcagtaccaattcttcagcaccgttctctgacactactgaattgtg

SEQ ID NO: 27135 - DNA, 201 bp, Homo sapiens
cactaactccggctaggctgggcaatagagcaagactccgtctttaaaaaacaaacaaacaagcaaacaaaaaactcttagagtaagagcaagctagtgcygataaagctgctcaagaaagtcatcaagaacccaagattcctctgcctttctgctacctcgtctttaatgtgtagtgtttgttctttatgagctcaaagt

SEQ ID NO: 27136 - DNA, 201 bp, Homo sapiens
aaaagctgtattgagcagaactgaagtcagataggcctggttgtgatgtatgctgtgtctttggtggcatgggtgggtggtgaaaggtggaatttgtgatyacatttcagtaccaattcttcagcaccgttctctgacactactgaattgtgtccttcaattcagttcaattcagtctagtccaattcagtccaatctgac

SEQ ID NO: 27137 - DNA, 201 bp, Homo sapiens
accctccctctccttactctgcaatagacaatattggaagaggatgttgaagatcctgtgtaccaggtaatttctgaaactagtcggggttttagattcargagtgactagacctgtgccagagccattttgtcagaaacctgaagaatccactgactgcaaaacctggagagagaccaagattatttctgagggtgaggg

SEQ ID NO: 27138 - DNA, 201 bp, Homo sapiens
aacagagcattgcagaacagggtaagaagtctggactttactccaacttccataaaatgaatgaaattggccatgtgaccttgaacaatccctttctagcmtcagtctccatttttttaaatctattgggcatgggtaagaagccctgcctcatgtacatttcagagattgtttaaatatcaaatctggagactttctggt

SEQ ID NO: 27139 - DNA, 201 bp, Homo sapiens
aactagattacagtctccttaaggacatggacctggcttgcctcaacccacagtgacaatcttatttagagccaaaactggcaacctctcatttgataatracaagttttacttatagggaaactaaagggaatgtttgaaaatgacatcatcttggatatccagggtatacctataacttttcccgtactttataggacc

SEQ ID NO: 27140 - DNA, 201 bp, Homo sapiens
ctggtctaggaagcaagtccattactagtgtacttggggatgacctctcattacccctaggatctacgggatgggaaagaaacagccacgcaaagagcaargcgaagagagtttcaacagataagacagcaagtagacagaacagatgccttggagcagaagacggtgtgggatgtttgaggaacagaaaggaaggccatg

SEQ ID NO: 27141 - DNA, 201 bp, Homo sapiens
ccctctttccttctcctctaactttaggacaatggtggtaaacaaaacaggcaaagttcctgcctctaagaggcttacattccagccagaatcaatcaatmaataaacagatgaacaaatgagcagatcattacagatgtgcgggacatcagtaggggaagtgagagagaactcctggtctaggaagcaagtccattacta

SEQ ID NO: 27142 - DNA, 201 bp, Homo sapiens
cagtgactgcattatacttaatagatcccactgcattgcaattaccttttggtatacctgcttccctgactactaagggcaaacagcaaatctgactcatrtctaagaccccagtgcctagcatggggcttgcctaagtacatgcttaatgaatcatggaattttatagggaaagaagaccagagagagaaagtggattgg

SEQ ID NO: 27143 - DNA, 201 bp, Homo sapiens
cctgtcggagatgaggatgctgagaaactgagccgttaagtgagttgctttaccttaaattgttacatggcaaagctgggatttgaacctaggtgtgaagytttttcttgggtttaatctcctccctctttccttctcctctaactttaggacaatggtggtaaacaaaacaggcaaagttcctgcctctaagaggcttac

SEQ ID NO: 27144 - DNA, 201 bp, Homo sapiens
agtaggagttaccatacgtaaagcttaaaacaatgcttatcgtatggaaagtgctgtttatgtttgtaattatgtcatcgacattattcttattaatagcrccttcctcacagggttgttgtgtggactaaatcaatttatatttgtaaagtacttacaataaaccctaacatgtcgtaaggtacaagcatttgctattgt

SEQ ID NO: 27145 - DNA, 201 bp, Homo sapiens
gagaaggaaggtaaagagagaataagaaagcatgaggttgggtgcggtggctcactcctgtcatcccagcactttgggtgggtgaggtgggcagatctctygagcccaggagttcgagaccagcctgggcaacacggcaaaacctcatctctactaaaaatgcaaaaattagccaggtgtggtggtgtgtgcctatagtcc

SEQ ID NO: 27146 - DNA, 201 bp, Homo sapiens
ggatttaggtttttcagggaaaactctgtctttccaggaagcagagaaggggaatggagaaggaaggtaaagagagaataagaaagcatgaggttgggtgyggtggctcactcctgtcatcccagcactttgggtgggtgaggtgggcagatctcttgagcccaggagttcgagaccagcctgggcaacacggcaaaacct

SEQ ID NO: 27147 - DNA, 201 bp, Homo sapiens
attttctgattcaaccctttgtgtaataaaatatggtgactaaaacagtttcctttttactgctcttgctcagccttataagagagattgaaattttgtarcaccatttatgccaatttttttaaactctccagcataaagcatatcagcaaattaatatttcctgactacaagatgagattgacctcataggtataagtt

SEQ ID NO: 27148 - DNA, 201 bp, Homo sapiens
taatgggaccattcttttattcagaggaagggtcctgggatgcatctttcaattattagagcattgggatgtttggattctgtctggtcttgctctgtctktgtttatgacagtatacttgcaagctaatttctcctctctaggaagtaggtaactatgccccagagagttaacaatgtaagtaaatcgatacatctattg

SEQ ID NO: 27149 - DNA, 201 bp, Homo sapiens
cgcatcctactttccattgctggtctattatgatccctgcaccagctctgccaagtaggctagccactgacattcttgcacagattcatcagtggaagccyggacaggttaaagataggtggctagataatgagtcattgcaaatcagaatagcaagtcttctgagcaaagggaaagcagagaaaaagaggctcagggagc

SEQ ID NO: 27150 - DNA, 201 bp, Homo sapiens
tatgagaatttcgatatatttccttgcctcagagactcagtgttcttatctaccaaaaaagatgattgaacataattagaggtcagagtagtttatgtatyggaaagttgatcccacttgcccaagcctctcggaggtaataccgaataccacacacccctccctgctctgagatcttcctgccttccaggattcccctag

SEQ ID NO: 27151 - DNA, 201 bp, Homo sapiens
attttcaacattttcaaaagcctaagagaggtaagaagtaaaaacctcaggctgtggtatagagacaggtggctgcagttggaatctgagctcctcttcckacctatgagaatttcgatatatttccttgcctcagagactcagtgttcttatctaccaaaaaagatgattgaacataattagaggtcagagtagtttatg

SEQ ID NO: 27152 - DNA, 201 bp, Homo sapiens
gagctattttcaacattttcaaaagcctaagagaggtaagaagtaaaaacctcaggctgtggtatagagacaggtggctgcagttggaatctgagctcctyttcctacctatgagaatttcgatatatttccttgcctcagagactcagtgttcttatctaccaaaaaagatgattgaacataattagaggtcagagtagt

SEQ ID NO: 27153 - DNA, 201 bp, Homo sapiens
tgtttgcagtttttgggtaaagagataaggaaacatgtaatccattccttcaattaggttgtgtaatagattgtcatgggcattttcaagataagtgttcratgatagtgttgtgaagtgcatcgatcagctgcttctcagaagtctcattgattatcaggtctgtgtaaagcagacaggctgctagaatcttacctttgg

SEQ ID NO: 27154 - DNA, 201 bp, Homo sapiens
ttatatttgttggatcgctacactcctggagttcagtgggtgagagcataactggttgagttggggagaagccatccttgactaggcagtgtttgaaatgsatcatgaaaaagcgtctatgggacttttatgggcacaggagtgagtgtgtatctctgtgtgtgtgttgctgtgtggtgccaggcactgaaagcacaccca

SEQ ID NO: 27155 - DNA, 201 bp, Homo sapiens
cggttctgcttctggaatctcgtactcggggagggagtttgttccggcattgtggcacacaggaaaggtctcaacttggagtctttgagatacagtgtcckggtacttcctagctgtcagacactggaaaacttacctcactctctggaaaaaaagaccaaaaacaaaaaaccagaaacattattatgaatttggaatttc

SEQ ID NO: 27156 - DNA, 201 bp, Homo sapiens
ctttgtcagccccaagggaagtgcagtgtcagagcagtagccacctgccccagatttttaggcagttctgtattcatttacctattccaggagcccatagyacatttacatctttggtatatacactttccagaatcatacgcaaattgctgtgtagactgtggtactttatagtaagatactgtgcttttttatactgta

SEQ ID NO: 27157 - DNA, 201 bp, Homo sapiens
gcaagggtgttgactaaggcaatgtcaagtggagtccaacaggcctgaattggaatttctactccccacccttacccctcctccaagctatgagaccttargcaaatgaccgaacttttttttgagattctgttgctgatttctcaactgagggaaaataactctgcctatggcatcattataaagattaagtgagaaaat

SEQ ID NO: 27158 - DNA, 201 bp, Homo sapiens
atcatgaactgcgtatactgcttctgcttgtttttgccgaaacctctataaccttcgcctcgattcatcagggtgactgtgggagccttttcatttgggargctgctgggagtctaagctagcaccgtttgaactaattgtgtacaatttagcattccccaagcactgacagtcctcattcaaaccaagtgtgaaagtttt

SEQ ID NO: 27159 - DNA, 201 bp, Homo sapiens
tgagtggtggtggtggtgcgggggatgctgcattcctctgtgcatttcatcttagatgcatttgatgtgggcaataaagacgtgtggaagtggttgacttktgcatactggggaaaggtgggaataggcattttcctgaagacagagtagactctggagacagcagatcttcctgatattcacctgaacaggctggagctt

SEQ ID NO: 27160 - DNA, 201 bp, Homo sapiens
aggcacagttgttcctgggagggaactccatcttaacagaattacacacgagcacagatgtatcagtgtacagtgccatcatgaactgcgtatactgcttstgcttgtttttgccgaaacctctataaccttcgcctcgattcatcagggtgactgtgggagccttttcatttgggaggctgctgggagtctaagctagca

SEQ ID NO: 27161 - DNA, 201 bp, Homo sapiens
atctcatctttagatcagaagtcctttgtaccaaaaccacttgtaagtctgaagtattcctaaatctgcactttagaggattaaattactggagcccctcrgtcaacagtgtagctcatcacctgtcgagaaccccagcagagtccaactctgagtgcatggagttgcctcttggtactgcctttgggatgatctctgagt

SEQ ID NO: 27162 - DNA, 201 bp, Homo sapiens
tccaggagcatccagataaacaagactgtctgggtctctgccctgggacagtgcatatcctatcggggtagcacatgacaggcataataacaacagcaatrttgactggcttctgatatttggaggcaccaagccaaggtattccatgcatgctgtgaaatcctcccaaagcttaatgctgactatagtgttaccccattt

SEQ ID NO: 27163 - DNA, 201 bp, Homo sapiens
aggcagtatagctgacattaatagctgggtttttcaggtaaagagactaaaattcaggtaagttatgggactttacctctggcaaataagtacttatctayggacttgaaatctcatctttagatcagaagtcctttgtaccaaaaccacttgtaagtctgaagtattcctaaatctgcactttagaggattaaattactg

SEQ ID NO: 27164 - DNA, 201 bp, Homo sapiens
atgaagctgagattcattgctcagcccagttaagccgttttgtagcgtagtgaaagaccacagcagctgccactgaatagctttaagttccaacctcactmacctcttccgttttctagctctctgaccttggacaggtttcttctctcgatctcagggttttcgtttttaaatgatgacgataatatccacataagccat

SEQ ID NO: 27165 - DNA, 201 bp, Homo sapiens
cagggacccaggaagagtgagtcactaccccatgaggatcaaaagtctgtctccctactccataccagtcagtggtccagacaccatggtatatgataagyttttccaggtgtgctccaacgttttgttcaagatggaaaattaattttctaccctgaggcaccactgtttttggaggtgtctgtggcacagaactttgag

SEQ ID NO: 27166 - DNA, 201 bp, Homo sapiens
tgtcatatcactatttaatgaatgaatacttagtctttgtgtttgttgaaagaatgaatgtttaaaaattctgccttcacatcaaaatctctttgaggaaycttcaagtaaaatgtgtagaaggcttgtaagctctgacctacgaagtcaagttgaagctgaaatattaactaccatgtaggatcctcctccgtcttctca

SEQ ID NO: 27167 - DNA, 201 bp, Homo sapiens
ttcatctgtacaacggggatgataaatgtactgggtgctttagagattaaattaaacacagttagcatctggtactgggcctgacactaaataccagtttytgcttttcagctaccttatgaatatttggcaaccatttattttttatagctcaagggtcacctttaacatgaagacttgccttctaaactctgataaaac

SEQ ID NO: 27168 - DNA, 201 bp, Homo sapiens
gagaaataaaagaaccaaaaccacgtgtagagggctagacaagggaggcatttccagtggagctaagtgacatggctcagactttgtgtagttggttagartcaggcagaaggtagttggctgcaggttagatactgagaacatcatgaaggttctcgtagaggggagaagaggcattctagttggcttcattgagggaaa

SEQ ID NO: 27169 - DNA, 201 bp, Homo sapiens
aaagtgggctgtgttgaattactcagggtcacaggacgagttattacaaacaggatgaagaaagccccaccctttttagaaagtcaggagctattgggatkacttgcctgggacttactttcagtgagggaaatgaatgttcagtgggctttagaatgagaggtggaaggttttttgttccattgccagttgggaaggaaa

SEQ ID NO: 27170 - DNA, 201 bp, Homo sapiens
cagaatacagtgggcattttacaaaagcaaggttaaagagaagtgcttagaaatcactaccagtgcctgatggtttgggatggaaaatatcctaattcaarcatgaaggagagttgaaagagaagaacaatgaaacaaaagtgggctgtgttgaattactcagggtcacaggacgagttattacaaacaggatgaagaaag

SEQ ID NO: 27171 - DNA, 201 bp, Homo sapiens
ggtttggagagagcaactgaggttgagaaagggaaatgtcccagggaaggagttaggaaaaagctgaggaggctgcagaacgtcacactgggacctggtgktctctgggactcagaagtatctgggatgttgctgtcatccaggtcagtgagacagtgcacaggactctcaaaagactggggataagggctagcctgtaaa

SEQ ID NO: 27172 - DNA, 201 bp, Homo sapiens
gctaaatcaagacataacaaagaattgagctgctgatgacactgaagaaaggtttcaaagacacagatgatcaagcccacataattagaattactgtttaratatgcaaaaaaaccggaaaggcaacactggaaagggagaatgggttgcaaaactagcgccaatataaagtacgagtaatggccaataaaagcatatcta

SEQ ID NO: 27173 - DNA, 201 bp, Homo sapiens
ccaaagttattacactttccgctgttactagttagcatatataaaatgggcatgtggatgagaatgagcctcttgtccctccatctgtctataaacaaagyctcaggatgctgtgttggttgcattctcgtgtctgattgctgtggccagcaatggctgtggctgtgtttcatgctttcctgagtactgattggagatgcg

SEQ ID NO: 27174 - DNA, 201 bp, Homo sapiens
catgttgtggctttaatgtcagtttttaaaaagaaaatatataaagtgctgcacaaagttctagtacatagcaggagctaaataaacaacagctgttgttmatagttaaaatgctgcatttcatcatgtggtttcggtcaagtttttgaactttctttctttctttttttttttttgagatggagtctctctctgtcacct

SEQ ID NO: 27175 - DNA, 201 bp, Homo sapiens
agcttcggtttcttcatttgtaagatgagaataattgtacctagttcatgttgtggctttaatgtcagtttttaaaaagaaaatatataaagtgctgcacraagttctagtacatagcaggagctaaataaacaacagctgttgttaatagttaaaatgctgcatttcatcatgtggtttcggtcaagtttttgaactttc

SEQ ID NO: 27176 - DNA, 201 bp, Homo sapiens
tcaaagcttcggtttcttcatttgtaagatgagaataattgtacctagttcatgttgtggctttaatgtcagtttttaaaaagaaaatatataaagtgctkcacaaagttctagtacatagcaggagctaaataaacaacagctgttgttaatagttaaaatgctgcatttcatcatgtggtttcggtcaagtttttgaac

SEQ ID NO: 27177 - DNA, 201 bp, Homo sapiens
cctgggctattggcaatgtggccatttgagaaatcaaatctatttataaatatctgtgccaattgcaatgctttactgccatagaaatgaagtagtttgtrcttctcatttcttgcccaggaataaatgtgtctatgtcaggatggccacttgatggtgagattctgcagacataattattgaggtaaagaggaggctaca

SEQ ID NO: 27178 - DNA, 201 bp, Homo sapiens
cctttttgtgtctttgtgtctgtctgccatgtgtgaataatggaacttactgacttggggtgaggagaagaagaacatattcaaaggggatgtaaaaccaygtgctctcctgagtagtccgtggatttggaattagatgaatctggcactaaaatctggctctactgctatttagctgcgagaccttgggcaaattactta

SEQ ID NO: 27179 - DNA, 201 bp, Homo sapiens
gccagcctttaccccaagccctctgatttatgaccctccctgatctcagatacctgcctgaatccagaacattctcagttctctccccttacccagttctsttcttcccttgccttcctcatcccagcttatcaagggatcatctttttgttgttggttgagggagccaaaagtctaaggaaaggagactttgattctgtg

SEQ ID NO: 27180 - DNA, 201 bp, Homo sapiens
gcatgggctagtaggaagaaccctgggctattggcaatgtggccatttgagaaatcaaatctatttataaatatctgtgccaattgcaatgctttactgcyatagaaatgaagtagtttgtgcttctcatttcttgcccaggaataaatgtgtctatgtcaggatggccacttgatggtgagattctgcagacataattat

SEQ ID NO: 27181 - DNA, 201 bp, Homo sapiens
tgtgacgtgagtcttttcccttcccccagcctcaggttcctgttggaaaaattttagtctctcctctatgcagttcccagaggttttttctttaaaaccaygttcacaagaccagtggcctgggggtgcccatggtgcatatctctgattgcaagctgctgaccttcacaggcaagaccttgaccttgggatctaggcccc

SEQ ID NO: 27182 - DNA, 201 bp, Homo sapiens
aggggctcaaactaaatcattaggatactggccattatttgccaagcacctactacatgcctatgcacggtgctaaaaatttaagtaatgtaaaataattkaattacataatctcacttaatcctcacagtagctctggaggtgtcatttcccatatagataaagtgtatgtaaccagcacatgggctgcacaccccataa

SEQ ID NO: 27183 - DNA, 201 bp, Homo sapiens
gatcagagcaacttttcaggatgatgtgccagcatgggctagtaggaagaaccctgggctattggcaatgtggccatttgagaaatcaaatctatttataratatctgtgccaattgcaatgctttactgccatagaaatgaagtagtttgtgcttctcatttcttgcccaggaataaatgtgtctatgtcaggatggcca

SEQ ID NO: 27184 - DNA, 201 bp, Homo sapiens
cttttaattcaatttccaagtggactccttaacaaggtaacaaagacactcaccagagccttcagtgtgtggagtggatgtggagtcacatgctgtgacgygagtcttttcccttcccccagcctcaggttcctgttggaaaaattttagtctctcctctatgcagttcccagaggttttttctttaaaaccacgttcaca

SEQ ID NO: 27185 - DNA, 201 bp, Homo sapiens
ggagtagtagacagaaaaggagtcaaacaggtatgtgttcaaatcctagctacaccacgtaaaagctggtgggatctaaggccaatacttcaaattctttktatcagtgtcctcatttttaaaaagaacaaaaaatgaggataaaaattgtgtctgcattataaatcacttgaagatgaaatgacttggtacatatttaac

SEQ ID NO: 27186 - DNA, 201 bp, Homo sapiens
tgcacctctctctgggacaggccctatgtggcctgtgcctctggaagaggcagtcctgctgcccttgctgaagtctctgtgtgggttttttaaggtaaacrctagttgatcttcctttttaaaataaattattaattagaaattttactttaataagagaagttattaaaagctgcaggaaccctattcttttaattcaat

SEQ ID NO: 27187 - DNA, 201 bp, Homo sapiens
agcatatggtttgttactacacagctttgaacctactagggtggtcaattcttgttggtagatgatattggtaagtaaaggagtagtagacagaaaaggartcaaacaggtatgtgttcaaatcctagctacaccacgtaaaagctggtgggatctaaggccaatacttcaaattctttgtatcagtgtcctcatttttaa

SEQ ID NO: 27188 - DNA, 201 bp, Homo sapiens
ttgcacctctctctgggacaggccctatgtggcctgtgcctctggaagaggcagtcctgctgcccttgctgaagtctctgtgtgggttttttaaggtaaayactagttgatcttcctttttaaaataaattattaattagaaattttactttaataagagaagttattaaaagctgcaggaaccctattcttttaattcaa

SEQ ID NO: 27189 - DNA, 201 bp, Homo sapiens
tttttggtgccagtcagaggtatgggcatgcttttgattgggtcagccagtcaggaacttgtaattattgcttctctccctgagtagcgcccagcaaagtkgatctaaatacagagggagctcattccattcagcagtcggggccaagtgggagcaggatatgcttttcctgatctcctgtcactaaacatttaccatgaa

SEQ ID NO: 27190 - DNA, 201 bp, Homo sapiens
agatactactttatttttattttttaatttgattctaggaccctgagtctgtatgtaatgtttcagtgagcaaaatagttatgtttggctccaatgaaagwttgatagaagcgattttcagatgtgaaatcaaaacagagtgaaaaaatgtcacgtttaaataaaatgcagtacttggaggcatcatgtggtctcataata

SEQ ID NO: 27191 - DNA, 201 bp, Homo sapiens
actgtgatggtgcagtcctttcaaaacaaacatgcaaaatgtgaaaccacaacgtaacaagcccatgtctttacccatctcttttatcctcaatccagagrctgaggaatccgatgaaaattttttttttttttttttttgcaaattaccgggtaaacaaaaagttgaaagtttaatactgcatttattatattgagtcaa

SEQ ID NO: 27192 - DNA, 201 bp, Homo sapiens
ctgaggccatgacattgatagtgatgacctttgagagactgggattccttggtcccatgctcatgtactgcagcttgtgcagcttggactcatttggcccktccataggctgaacttcttaggactgcttggtaccagactgtatactttccaagtgcatttgtgttacttactccttaaaaccatcctgttaagtcctga

SEQ ID NO: 27193 - DNA, 201 bp, Homo sapiens
atttctgatgttttaagccactcaattcatggttccttattactgcagccctagcaaactaatatacacctgtcacttaattttatttctttacctttctyccaccacataactccttcttgtttcctttaaatatattcaaatcagcatgctgcaggacataaactgtgcagacataaacctaggtgtataacacatcct

SEQ ID NO: 27194 - DNA, 201 bp, Homo sapiens
taaagccacaaaaaccctatagcaaggtggtctcatttagtggctttgcagaagcagcaatggctcctgaagacacagaccttgctatcacttagctgtgyggccctgagagaatcacctaagctctctgaattaaatgtatgtaatgcatcaagcccaatggttctctcacagtgaatgctgcctcaattctctcatctg

SEQ ID NO: 27195 - DNA, 201 bp, Homo sapiens
caggtttttgtctgttttgttcctgctgaatccacagttgttagaacaatcttggcgtgtgtttttgcatgaattttgaaacatagggtacacatcaaatsgtaaatagggccctcacataattggtgaagtctagaaaagtggacttccccagggaagtgatatttaagctgagactaggaataaattggttaagggtgg

SEQ ID NO: 27196 - DNA, 201 bp, Homo sapiens
tggcacataatatgtgctcagtaaatcaatgttgagtgaatgctttctggcagcttaaggacactaatagatgcaaccagactgtcttcaggctaaagggmaacagaaccatatctctgaaaaggcttaagatggtaagggagagacaggagtatagtcaccagtaatttcagaccagtgaggggacagtatacagaaaga

SEQ ID NO: 27197 - DNA, 201 bp, Homo sapiens
tcattgcttgctaccctactttccctctcacagactaaattgcatgtttcatgcaagagaattgagaccatgttgattttacccatcatgcctagaatagygcctggcacataatatgtgctcagtaaatcaatgttgagtgaatgctttctggcagcttaaggacactaatagatgcaaccagactgtcttcaggctaaa

SEQ ID NO: 27198 - DNA, 201 bp, Homo sapiens
gggaggttctccttactaagcattcttccctatccctctccctccttttctccctgcctccctcctcttctcctccaaagcctttctaacaagctcttagytccctaaattgcagaacaaagccagcttcctgctaacccctttggaattcaattacagacatactcaaatgtgttccctgctccagcaccctcagcacta

SEQ ID NO: 27199 - DNA, 201 bp, Homo sapiens
ttaacttatgtataaaagggaggtaaaaaataagcccagtggtgttaggtcactgccttttttaatagaatcatagactgtttccatattacaaatcttaycaatgaggtagtgggggctaggaatttgtgtggagctggaaatagaacccaaatcttttgactgccaagtgcagccctgtctggtagagggagataccat

SEQ ID NO: 27200 - DNA, 201 bp, Homo sapiens
agcaatgtatttccactgaagttgatgctcacattcccatctagaaaagataaacagccttggagcaaggaaacatgctcatacccatccagttttttctgtttttttttttttttttaactaatgggtatttcctaatgactaattattttcctttctggttaaactggatggaggcaccgtatacaaataagtttcctt

SEQ ID NO: 27201 - DNA, 201 bp, Homo sapiens
aggaccttcatttggccacagctgagctttgttcctacaaactgcatcgtttgaaaagcacattatattttcaagacttttttctgtctgaatggagtttrttgcaatacttagaaatatcctagggagattatttattttctgaactgatgagagagcatgtcagattgttggaccagattccatgagagaagccatttg

SEQ ID NO: 27202 - DNA, 201 bp, Homo sapiens
agcttcaactccgtttttgagcaaagagagaaccatgagccccaaactggggtaaatggcaccaatttgttcagtaagaagaacaaatgggaagagacagygaggaggcacatgcgacctgagattttaacttatgtataaaagggaggtaaaaaataagcccagtggtgttaggtcactgccttttttaatagaatcata

SEQ ID NO: 27203 - DNA, 201 bp, Homo sapiens
aaattgtcaattcagtaatcattgtttggacacctattatgtgctagagtgtattggtgataaaatataacatgtgttgaacatgtactgtgtgccaggcmctgttctaatgacttcacaggatgaacttagttaatccatgcagtgaccctataggatagggtcattattgtttccaatgtatagttgaagcacaaaggg

SEQ ID NO: 27204 - DNA, 201 bp, Homo sapiens
catcttttcttgtgattaggtaaagggcattattgacagcagcaagcacaacttatagtagaggaacagtgttcactggaagcttttatccctgcaaatasccagtttgcaacgtgaagaacagacttcccccaattcatttaactgtctttgcagcagcggaagagcatatttttaagcagaaaaatcagtgtgtttaaa

SEQ ID NO: 27205 - DNA, 201 bp, Homo sapiens
agtataagcaaactcctttcctgtcattttcagtgatcaaacgagaggaaattctgatgtgtttatgttaaattgtcaattcagtaatcattgtttggacmcctattatgtgctagagtgtattggtgataaaatataacatgtgttgaacatgtactgtgtgccaggcactgttctaatgacttcacaggatgaacttag

SEQ ID NO: 27206 - DNA, 201 bp, Homo sapiens
cctttgcctgtgaaatttcattatgttcctattacagtagaccaggtaggttgagagagggactggtgtgtgtgtgagggggagagggaggatacaaataytgggaccagaggagagaaacaattgagagccattgaattaaacaatagggagagggcgaagtattatgaactaggcattacacacattggtttctctcac

SEQ ID NO: 27207 - DNA, 201 bp, Homo sapiens
acatatgaaaatcaatagtgtttttccgtgctaatacggtttgcctgtgtctccacccaaatcttatcttgaattgtagttcccgtaatccccatgtgttmggggagggatctggtgggaggtaattgaatcatggggatggttacccccatgcagtactctcatgatagtgagtgagttctcatgagatggttttataag

SEQ ID NO: 27208 - DNA, 201 bp, Homo sapiens
tctcaacaaattaggtatggaagaaatatacctcaacacaataaaggccatataagaaggacccgcaactaatataataataaatgaggaaaagttgaaaktgtttccccaagatttggaacaagacaagaatgcccactttcaccacttctgttcagcatagtgctagaagtcccagccagagcaattagtgaagagaaa

SEQ ID NO: 27209 - DNA, 201 bp, Homo sapiens
atttgacaaaatgtaacatctctttataataaaagctctcaacaaattaggtatggaagaaatatacctcaacacaataaaggccatataagaaggacccrcaactaatataataataaatgaggaaaagttgaaagtgtttccccaagatttggaacaagacaagaatgcccactttcaccacttctgttcagcatagtg

SEQ ID NO: 27210 - DNA, 201 bp, Homo sapiens
tggcaggatttcattcttttttatggctgaatagtattacattgtgtatataccacattttctttatttatttatccttgatggacacttaggttgtctcygtatcttggctattataaatgtattgctataaacatgggtgtgtggatatctcttcaacatactgatttcatttcctttgcatataattccagtggtgag

SEQ ID NO: 27211 - DNA, 201 bp, Homo sapiens
ttcaaaacaaacatgcaaaatgtgaaaccacaacgtaacaagcccatgtctttacccatctcttttatcctcaatccagagactgaggaatccgatgaaawttttttttttttttttttttgcaaattaccgggtaaacaaaaagttgaaagtttaatactgcatttattatattgagtcaacgtgccctatgcatatttt

SEQ ID NO: 27212 - DNA, 201 bp, Homo sapiens
ccggaaaaccctagccttctgggcacaattgcttacttcctgctagactacgagccacttagcagcgaggactctgccatactttccatctctagggcccrgctctggtatccactttgttgatctcatcctttacttctttttccctctcctctgtgtcccatactagtatctccactgttctttgatgaaagtgcttgg

SEQ ID NO: 27213 - DNA, 201 bp, Homo sapiens
gctaactactcattaaaaagacttactcccctccagcacttcttatagccctcccatccttacttttcttcataacacttaccaatacctgacacattgtrtacttgatagacttgattgatttattgtccaccaaccttcactagaacataagctgtgtcctcagaactgaacaatgtatggtaaacagctggcagtctg

SEQ ID NO: 27214 - DNA, 201 bp, Homo sapiens
atacacacaaactccttttggcgaattaaacatgatgcacagtgaacatgaaatgacttgccctcctgagctatcaatcttgtcattagtgatggcttgtwtgagtagtattgacatgggcttatccaaattggattctgcaaagagtcattttaattttgcacaaatgtaagaagataaagtagtctgatgggcagtttg

SEQ ID NO: 27215 - DNA, 201 bp, Homo sapiens
ttacatctgtaattgcagtttcttctttcaatactacctaatgctctttatttttttgtctgaaagctttacttgtttttcttaggctaggagggatgccrtttctcagtgttctgtggtgtcctctgttccctcacagtgcttatctctctgcattttaattgtgtgttaaaggggggcctctctcctaactagactgga

SEQ ID NO: 27216 - DNA, 201 bp, Homo sapiens
aagatgttgtatgtgtagtgcatgcatgtgtgtgtttgtgtgcttgtgtgtgtgtattttgggtgggtgtcttaatctattggggctgctatgacaaaatrccataaactgagtagctaataaacaacttaagtccaggatccaggtgctgacagattaggtgtctggtgaaggcctgctgtgtagtttaaagatagtgcc

SEQ ID NO: 27217 - DNA, 201 bp, Homo sapiens
aattgagtgtagggaattgaggcacagttggcccacctgctccccatttaatgggatttggaaatgtgttctgggagagatctgttccggcctctgcctcygtgctctgcagttgggaacgattctatgtcacgggtgtccctcactcacatgcctctctctcatctctcagctctagaaccacagaggagaatgtagcta

SEQ ID NO: 27218 - DNA, 201 bp, Homo sapiens
tttcattttgcctgattttgaactttatataagtggaatcacattgtaacttcttctcgtgactttgattatcattgtattttcaagatttcttgatatcratacagtttattagtagtattcccttctaagagtgtatatatttattttctaatctagtaatagaggatgtttggctaatatccagtttttttgctatta

SEQ ID NO: 27219 - DNA, 201 bp, Homo sapiens
gctacctaaggcctttccttcatagcatcctgataccccttccccaggtaacttctaacctgaattttgtgttatttccttaaggtctttctctctctctmtatatatatatacatatatatatatccctaaacaatttattatttcttttcattttgcctgattttgaactttatataagtggaatcacattgtaacttc

SEQ ID NO: 27220 - DNA, 201 bp, Homo sapiens
aagctacctaaggcctttccttcatagcatcctgataccccttccccaggtaacttctaacctgaattttgtgttatttccttaaggtctttctctctctmtatatatatatatacatatatatatatccctaaacaatttattatttcttttcattttgcctgattttgaactttatataagtggaatcacattgtaact

SEQ ID NO: 27221 - DNA, 201 bp, Homo sapiens
cccctgtgaccttattacttggagatgtttgcccccagaaggtctcctctcttctccaggtgagtttgcttgcaaatctttgcccataaccagaaggatcmagattttactagacctttagcattcaatccctcccaatgttagtgaagcaaatcagccaaattgtcctagtaatacagattttacatatcatgtaccaag

SEQ ID NO: 27222 - DNA, 201 bp, Homo sapiens
ttaggctaagatcaaagtacttgatgtggcctacagggtgctggggggccaagcacctgtctgcttccctgtgtcgcctccctactctctcctccccagcrtgcctgggcttctcaaaagtcctctgactcctcctttccccacactcctagtacacataactactgtactcccgggatctgctctaggtactttgcaaag

SEQ ID NO: 27223 - DNA, 201 bp, Homo sapiens
ttgtggtccgagagacctcacttgaatcatggcctctccacttcactgaactgctcagaacctcatctgcacactgaagatattattacctgtgtcttcaractgttatggggtttaatgttgtattatgtatttggttggaatatagcagtccttccttttaaaatattagggccctttagactctttaattttcccagt

SEQ ID NO: 27224 - DNA, 201 bp, Homo sapiens
ggtcattgtcacccagcctcccaacatcactcccctgcactgacataggggtcccctacctgggttccccgcttagtccttcagtccccatttcaacccaytctgcagaaccaagccacaagcaatccttttaaaatatacatggagcatgttcatgattctcttccacttaaagctttttggtggcttcatttgctctta

SEQ ID NO: 27225 - DNA, 201 bp, Homo sapiens
tttccttgtgtcagctgcggtcattgtcacccagcctcccaacatcactcccctgcactgacataggggtcccctacctgggttccccgcttagtccttcwgtccccatttcaacccattctgcagaaccaagccacaagcaatccttttaaaatatacatggagcatgttcatgattctcttccacttaaagctttttgg

SEQ ID NO: 27226 - DNA, 201 bp, Homo sapiens
aaagaatttgtaaaatatccagatttgcctacaaagaccccaaatctgttgatggccaaaaaccaaactgatgagtcagttgaagatcttacctgctggcstctcctaccctcacccctgtttttccttcatctgtgcatggctgtgatcattttcatttgtgtacaaatgttggagtttactgcaagggtacttaaccta

SEQ ID NO: 27227 - DNA, 201 bp, Homo sapiens
gtcagtcagaaaggaccatcagtgataggatccaggtccactttcctccaaaccccatgtatgccctaaaaggaaaccacatcattcataaaattagaacrtgaaaataaaaaaggaaaaggaaataaaagaagaaaacgttaaggaaaatcaaagtggcatagcaaaatcatgctgggttctggaggctgtctttgcaga

SEQ ID NO: 27228 - DNA, 201 bp, Homo sapiens
aatagcaggagctctatgtgccatttaagatctcgtttctgtttcagaaaaggttaacccgatgtgattatcgttgcctaagagaaagggagagaaactartaggaactgagcacctgctaggggcctcacaagacatgacaatccagcaaagtaggttttagtctttgcatttgacagatcgggatcccgaggcttacag

SEQ ID NO: 27229 - DNA, 201 bp, Homo sapiens
gatgaagcatttaaattgggcaaacagaacacccgctccttccacccgctgtgtagagatggacttaatgagcctgtgtcttgttgagattaaaggaactraaaattccccccaaacattcaatgcagagataatactgatgggggggggggtgttagggggataaatgaacaggaggaaagattttgaaacatcaaataa

SEQ ID NO: 27230 - DNA, 201 bp, Homo sapiens
cagaaaggaagcaagctccaccccatcaactggatccctttgggactgatccagacccacatacatcaaagatgggttatgcttgttgtttataaaagagmtgtgcaccccgccaaacttgggaaatgacctaaaatctgtgatgaagcatttaaattgggcaaacagaacacccgctccttccacccgctgtgtagagat

SEQ ID NO: 27231 - DNA, 201 bp, Homo sapiens
tttagctggatctctccctctatcaatctgtgagtcttgagggcaagcacagggtatgatttatcttactttccatcaagtttaagatacagaaagggccsgggacatgaagaatgagtgaatactattcctttattacttcatcaatgttgtgtctttaaatagctgtaccttttcctacggttggatcaaagggaaacc

SEQ ID NO: 27232 - DNA, 201 bp, Homo sapiens
tgactgggctgtttcaagggagaatgagagagtgggaggggaaatagtgagagcttgagtagagtcagggaagtgaaaaatcccaaaaagctggaggtggrcactgggagaaggggaagtggtagcaggttgatccatgtgaaacccatctgggtaactggcatttatcaaacttaggctcctaccctccaaagagtctgg

SEQ ID NO: 27233 - DNA, 201 bp, Homo sapiens
ggggaaaattggagaggcttagtatatttcctctcttttagaactagcatgaaataccagtttctcattgcttacagtatacgggatttagcaagacacastagaaggtgtcaggatgttagggtcagatcatctacttctgcccgtataaatgtctgtgcaacctctagcaagacacaatctctttctgagactttttcc

SEQ ID NO: 27234 - DNA, 201 bp, Homo sapiens
tgttggctgaaacaaacagtaaattcctctggcagctctgagttttcttaggcaggcactttaagggagactagggccatcctagggacgtggctttgatmtcttagaaactcagtgttagtggggccaggctcactggctcacgcctgtaatcccgacactttgggaggctgaggcagttggaccacctgaggtcaggag

SEQ ID NO: 27235 - DNA, 201 bp, Homo sapiens
aggttaaaatttcctgataagtaaaacggactcataaacaggaaagacaatagcactatttaaatgggaaaatccatagctatcatgatatggagtaatgycattttgctgttttggtcttgaaggaggaaggcatgaacatatttgcacatattgtccttggctaaagctggtcctgcaaagagcaggacacatttggac

SEQ ID NO: 27236 - DNA, 201 bp, Homo sapiens
ctgagtgtgtgcacacctggctgggctgtgacagtgcccaggctcaccccactttgcttcaagatgggagcaggtgccaatagcaggaagaagccaggccrtgggagcaggtatttccaagccttcctgggcctccaagagggcagggatgcctgggtccacagctgtggtttgggcggctgcagctgcacccaggaggga

SEQ ID NO: 27237 - DNA, 201 bp, Homo sapiens
caggaacctgtctccctcctgctgccgttcatggcacccaggctgtaggtgccaaggggccccctgcaggccagcactgagctgctctcagccccatttcrgcttccctcttatcctcatcagtgctcaaagtccagaagggggctgaggtgtcaggggcctgacatgtcaacagtgccctgagtgtgtgcacacctggct

SEQ ID NO: 27238 - DNA, 201 bp, Homo sapiens
ctcagagagaagtgggtgccaattggtccatggttggccatgggtgggcccagaagaggcactacaagttcccactctggttcgtgggactggcagccccrcccccatccttcagcccctccctggcctgaaggtggggcctcaccagggacctgcccccttttgcccaggaacctgtctccctcctgctgccgttcatgg

SEQ ID NO: 27239 - DNA, 201 bp, Homo sapiens
ttgtaggccaatgcatggatatatatgtgtgtatcactcatatttcttacctgccatttttatattcatggtggaaaggcaaaatttgaaaaaggaaaatrttcattaagaatataaaacacttgggcctatagggaaaaatgtttttctgacttttaaatttccactttttagataatcccttgaatgtatatcttgata

SEQ ID NO: 27240 - DNA, 201 bp, Homo sapiens
taattataggaaaatagacattacaagaatgttagttgttttttctgcatcataaaacgtcctctataaccactttgtaggccaatgcatggatatatatrtgtgtatcactcatatttcttacctgccatttttatattcatggtggaaaggcaaaatttgaaaaaggaaaatgttcattaagaatataaaacacttggg

SEQ ID NO: 27241 - DNA, 201 bp, Homo sapiens
aaggtccttcaggctttaaaatttatattccatgggctgttggtcctcagttctggtctggactgatccaagcttttttccacagttgttcctgcaggacygcacgtatcacactgtgttctgggtgggggtatccctgtggctcctcctctttaattctagagctccttgagtgctggttctctatgttcccctaaaacc

SEQ ID NO: 27242 - DNA, 201 bp, Homo sapiens
tttgttttaaatttccaggtcaccacagctgtgcatatagccgctacttattcccagatctctccttgctgccctgccagagctatgaccaaaattagggygatggctctattttgaaggcctgagtttaaagttataaaaaaagtcaggggacagcagccattcccaagatttatgctgaagcagcacagaagtttaatg

SEQ ID NO: 27243 - DNA, 201 bp, Homo sapiens
ctacagccttgattggagaggctgtcagaaagtcattctttacaaggaccacacatatgaattcagaaagatacaggaaaaaagacataaccaaagctgamactgaatagcagggcctcagggaagaaatgagatgggatgcaagaccatctaccaagtgccaggaatgatgcatctattatttcatttagtcctcccaca

SEQ ID NO: 27244 - DNA, 201 bp, Homo sapiens
ccaagttccatccataccagactatttgggacagcccagcttttctggaagagagccatgtttgttttccagagagtcaaatcaagaggtcactaaaagaktctgctgggtgttcaaaacgaagcactttccttaacaagcatgaataaactaagggagtttcttggaaactcatgtcataaattgggtgccagacacaag

SEQ ID NO: 27245 - DNA, 201 bp, Homo sapiens
tggtctaagattcatgcaatcattcgacaaatatttaggaactcctactatgtgccgggtatgttttcctattctcatcaggaataagagaaaaataatartgcctccctcatagggttgctgtgaggagggttgggtgagcaatgcatctggatcactgagcataagagctggcacatgataactgctcaaaatattagc

SEQ ID NO: 27246 - DNA, 201 bp, Homo sapiens
gcagagactggtctcgctcatgtttttattcctagcagagagcagacccttggacagaacagatgctctataagcatgtgataaatgaacagacacatgtrgccactttacttatagcccattaacataaagtgttcatgtgcaaactactctcaaggttgatctcgttatgtctcctgtgtcacaaagccccttttgtaa

SEQ ID NO: 27247 - DNA, 201 bp, Homo sapiens
aagttgctccatctctttagatctcagttttgtcatctgtgagtgggcatagctatagtgcctgtagcatagggttattctaaggtgaaaatgaaataacrcccatgaagtactgagtttatagcaaggagtcaatagatgtaaatgattgctgtaataatggttactgtgtgcctcacgaaagattgtttactctccttc

SEQ ID NO: 27248 - DNA, 201 bp, Homo sapiens
atgctcggcagttccccgtcagtttcaggctctccataatcaggcccctcactccctcttcattctcttctgtttgtattctaaaatttcacattttatcmtctcaggttaaatacccccagtgctgtccacaaggactttctgtgatgatgggaatgttctatcatctacgacagaacttctatgtatcagtgctatcca

SEQ ID NO: 27249 - DNA, 201 bp, Homo sapiens
aaggctggagttaggcaggatctgggtttgagtcttaactttctgatgcgtgatttcaggcaagttgctccatctctttagatctcagttttgtcatctgygagtgggcatagctatagtgcctgtagcatagggttattctaaggtgaaaatgaaataacacccatgaagtactgagtttatagcaaggagtcaatagat

SEQ ID NO: 27250 - DNA, 201 bp, Homo sapiens
taatggtaagaaaaagtggagagcagtggctttatagctcaccagttagaaaaattgatctgttattagctaagtcccctccccaacatcaatcttgtctmctgatatcctctatgtccttttctggcttgagctaatggtgtctcctccagaaaacttccatgattcttcctttcccatccttgtcttcattcacccagc

SEQ ID NO: 27251 - DNA, 201 bp, Homo sapiens
atgagcctgaatttagaatattttgttccattagaacactcacttctcttgaacacgtggcctgtgagggctggagaggggctcagggtatgggtgtgtcracctttccttcctctgctggacaattccatttcttcccatatccgccatccaaggcccacccatccttcaggtctggctcaaacggctcctctcctggag

SEQ ID NO: 27252 - DNA, 201 bp, Homo sapiens
agttgctgcctgggcagggtaatgctgagggactcaagctttgactcaccttccagctttagtctgatcctcagcttcgcttggcacttttcttaccctakgcccccgggatggggcataagtaggctcactcagcaagctgattgcatggcgcaccatcgacctcacatctgagatcacctttgtcagcatgcagtgtct

SEQ ID NO: 27253 - DNA, 201 bp, Homo sapiens
aacagtgtctgaacagtagtacatagaagtaggttacagccggctctaagagtaacaggctctgaatttccaagatgagcctgaatttagaatattttgtyccattagaacactcacttctcttgaacacgtggcctgtgagggctggagaggggctcagggtatgggtgtgtcaacctttccttcctctgctggacaatt

SEQ ID NO: 27254 - DNA, 201 bp, Homo sapiens
cataaatgtatatataaatatgagttgtatgtattcacatagttccattaaaaacttactaaatattactcttttatatcccagtgtctgaatagtaatgygcacagatcagacattgaattggtattggctgaacggctacctggcacataaaaagtacattgaaatgataaattaacagaacacccatggccatatgcc

SEQ ID NO: 27255 - DNA, 201 bp, Homo sapiens
gccctgcctcaaggagcttacattttaatgaaggagataggacaataataaatagctaaaagagtaatgaatggtgggaaatgtagagaacagtactgtgrggatgagtaggaagaagctagcctggttagaggttcaggatagtgacgtgcagggtaacatcctagggtgagaaggaactgctgcatggagcagagaaaa

SEQ ID NO: 27256 - DNA, 201 bp, Homo sapiens
ctcatgggatcctcttacctcagcctcccagagtagctgagactacaggtgcatgccaccatgcccagctaatttttggatttttttttttttctagagaygtagtctcactctgttgctcaggctggtctcaaactcctggactcaaatgatcctctcacctcggcctcccaaagtgctgggattataggcatgagccac

SEQ ID NO: 27257 - DNA, 201 bp, Homo sapiens
gtctcatcatctcaagactctcctcctgtcatttcctaacctctctctcaaccgaatgccatgaagtccaggttgttttggggcagctgtcatcagccccrtcttgtgagtacactagatgggcaacacgttcactcagttctcctcacatcattccccataaagttccagcctgaaatacacagtctccctgaaatatac

SEQ ID NO: 27258 - DNA, 201 bp, Homo sapiens
ccaatgaactgacatcttcatttctttctttcattctttttaatttattttgagacagggtcttgttctgtcacacccaagctggagtggacagtgtcacragcacagctcgctgcagcctcgaactcccaggctcatgggatcctcttacctcagcctcccagagtagctgagactacaggtgcatgccaccatgcccag

SEQ ID NO: 27259 - DNA, 201 bp, Homo sapiens
gagtgaccaagctcatctatgtcctgttcagtgaggcaggattaattgagaacacacttggatgttgcagcacaaccaccatagaggtttctaaactatgrttttcgtatgtctcttgttacagatcagaaacagtgtgtagaccagtaccagtctgcagactgcagaatgtgtattcaggatgttcttgccttctcaccc

SEQ ID NO: 27260 - DNA, 201 bp, Homo sapiens
ccaagctcatctatgtcctgttcagtgaggcaggattaattgagaacacacttggatgttgcagcacaaccaccatagaggtttctaaactatgattttcrtatgtctcttgttacagatcagaaacagtgtgtagaccagtaccagtctgcagactgcagaatgtgtattcaggatgttcttgccttctcacccccataa

SEQ ID NO: 27261 - DNA, 201 bp, Homo sapiens
agatcacagataataaaagtagagcatgggcaatttgggaggcagataaacttatagagatgagatctctttataccactcctccctgttttgcacttgtractgcaatgcatgattctcttttatttcccattaaatacaaatgctttccaatggtgcctttgagggggcaggtagggggctgtacaagcactccttctg

SEQ ID NO: 27262 - DNA, 201 bp, Homo sapiens
tatatcataataccttctgacaaaaatgcttatctattcttaagatgttttgtttattcttttgtttaccttactgccaaaatatttagcctcatcattgrtaataaaatagtcaatttttttcatttatgcaacaaaggtttactgttaaaacataaagcattttttggtttgtttgtttattttaatttgtcacaggta

SEQ ID NO: 27263 - DNA, 201 bp, Homo sapiens
atctatatcataataccttctgacaaaaatgcttatctattcttaagatgttttgtttattcttttgtttaccttactgccaaaatatttagcctcatcaytgataataaaatagtcaatttttttcatttatgcaacaaaggtttactgttaaaacataaagcattttttggtttgtttgtttattttaatttgtcacag

SEQ ID NO: 27264 - DNA, 201 bp, Homo sapiens
taaaataatttcagatagtgataagtactgtgtagtttttaaaaattcggggtaatgtgatagggagtgactgggagggatagcaaaattagatgggatgrgacagggatggtgtctctgataaggggacacttaagctgagagttgaattctagaagaagacatgaatgaaaaaattagagggaagggtgttgcaggtgg

SEQ ID NO: 27265 - DNA, 201 bp, Homo sapiens
tcagccttcctgctcaaaagggtgggctttagctacactcccggaccaaacagagcccctactactggcttcatgtgaaatattttctagaaaatactgamgcacaggccattttcagaccaattacacctttgtccctagaggtgctacccaggtattttataaaagatttctaaatgattgtagtgtgcagccaggggt

SEQ ID NO: 27266 - DNA, 201 bp, Homo sapiens
ttcctccccttacccccacagtggtatgttcctcttgcctgtgtttgccactgttgccattctatttaattttgttagtccttcatgtttctgtctccaayattcacttagaattgtattgtaattgattgaatgtatatttgtcatcatttctaaaacgtggttttcttaggcttggaaactgtttcttttcatctttgt

SEQ ID NO: 27267 - DNA, 201 bp, Homo sapiens
aaatagcctcaaattcctcacctataaaatggagataataatacctattttataggatttctaaaaggattagtggggtagcctatcagtaacaataatgrccaatttttatttagcatttaattgacaaatgtgaaaaacaagacatggaatggttaagtgacttgctgaacccactcaggtggtaagtgacagagctgg

SEQ ID NO: 27268 - DNA, 201 bp, Homo sapiens
gatacaaagctggtaagtagcagagctgggattaggccctgcatctgtctgccccgaagcctaccctcttagccacaatgctacactcactggagatatcyaagtcctgcagtaaatgcattgcctcctgtgtttctgtttagcgtcttctgtgagccggtgagatggaggtggagctgcagaatgggactgggcaggtgc

SEQ ID NO: 27269 - DNA, 201 bp, Homo sapiens
aaaagaggttgggaaaggaagaaagaaaaagaggctgataaaggattttccctgggatatagtcactttttatttgctgtttgttttttccaatctcttgycatgtaactgaaagaactgaaaatggggagactgattgggcagtcaactgtttcccaaggtcggaatcccaatctcttaggtaatttaatctggaagggg

SEQ ID NO: 27270 - DNA, 201 bp, Homo sapiens
ctttatttgttgtcactttctacacatagctgaaattagagaaagtagaggcagagaaattcacctgaaatgccatatctgacaataaaaatgattttagragactaaaaagaggttgggaaaggaagaaagaaaaagaggctgataaaggattttccctgggatatagtcactttttatttgctgtttgttttttccaat

SEQ ID NO: 27271 - DNA, 201 bp, Homo sapiens
caattctcagtcccatctgcaggagcctcattcatatagttcagggatttacctgccagactagatttgacttctaaaaactatttagaaaattaggagawtgcaaatctgcaagaaattaccagagaagtgtggcctcaatatttaaattaaaaatgccagcaactctaaagcctgagatctgaatctttcatgatgtct

SEQ ID NO: 27272 - DNA, 201 bp, Homo sapiens
accacctcttctggtgggcttcagtgatacaacccactttattccagccacgtctgtccttctcagggttctttcaatttgtcgatgagtagaaggttgcrtaaaatgtattaaagcttgtgtataatgtgttaaatctcaacctttggtcttattgatgatcttaatgcataggtaacccattttcccctcatttttctt

SEQ ID NO: 27273 - DNA, 201 bp, Homo sapiens
acccacacatttgcgaatgaagagatctgaaacccaaagagaagcgagccatgagatctccctataaagtatttgcaaaatcctagacttgaacattgctmtggacagatttgagtcattttctgatgctcacaaacaggaagcagggagtgtcctcttctttttcctattttttaattttgcatttcttttctctacaat

SEQ ID NO: 27274 - DNA, 201 bp, Homo sapiens
agggttgggacctggaaatcagagtggcagaacaagcactaaatgaatgttctattgttatgatttgtggttctggaactgggcagaagcctgtatcctgkgacagaatggcaggtcatagcaggaccagccattacaaaatgggctgctgcaccttatgaaaatttaggtagggactttcagccttcctgctcaaaaggg

SEQ ID NO: 27275 - DNA, 201 bp, Homo sapiens
tccatcagttgcacagccagggacagagagaagggttgggacctggaaatcagagtggcagaacaagcactaaatgaatgttctattgttatgatttgtgrttctggaactgggcagaagcctgtatcctgggacagaatggcaggtcatagcaggaccagccattacaaaatgggctgctgcaccttatgaaaatttagg

SEQ ID NO: 27276 - DNA, 201 bp, Homo sapiens
gttcatacctctgggagtgcatgcgtcatgaaatatgacagttgtctgtgtccgtgtctctgcagttatatcaaacttccttacgacaggaaccatgctcrattcatctttctatccctggaagctcatggaaggcaatacacaaaatattcgttgaatgaaggaatgcataaacagtcaaacagctctttattaaatacc

SEQ ID NO: 27277 - DNA, 201 bp, Homo sapiens
catctgttcatacctctgggagtgcatgcgtcatgaaatatgacagttgtctgtgtccgtgtctctgcagttatatcaaacttccttacgacaggaaccaygctcgattcatctttctatccctggaagctcatggaaggcaatacacaaaatattcgttgaatgaaggaatgcataaacagtcaaacagctctttattaa

SEQ ID NO: 27278 - DNA, 201 bp, Homo sapiens
ggaatctcttgcagcacatcctagcatctgttcatacctctgggagtgcatgcgtcatgaaatatgacagttgtctgtgtccgtgtctctgcagttatatsaaacttccttacgacaggaaccatgctcgattcatctttctatccctggaagctcatggaaggcaatacacaaaatattcgttgaatgaaggaatgcata

SEQ ID NO: 27279 - DNA, 201 bp, Homo sapiens
attttgttgaaaagaaccattaagcaagataatgctgtatcttttccattaataaaactagttgaagatggcagtttttcagtaggctgtacattttgatragtccttttatctttgaacagttttctgtctctttatccatctgttcattcatccagtcactcatgaaacatttattaagcatctactgtgtgacaggca

SEQ ID NO: 27280 - DNA, 201 bp, Homo sapiens
tcacagaaggtatgtacttcatttgaagtatgtgtgtgttttagaattttatgtgcaatatgaagttttagtactactttaaaaagcagaaactttacctsctggtatcttttagatcccatctttttggggggacaataaccataaaaaattgacagtccagtcaattgacaaaatagaaatgacaaaaattgacaaaat

SEQ ID NO: 27281 - DNA, 201 bp, Homo sapiens
gaggcctctggtagggcatgagtgaagctgatgagtgaagtttatttcccatctcccacatttcaggattgctgaagtctagccatcttcctccaccagasgtcacagtcctgtagaaggaccctttccacccagcctctatttttagattctataactgctccttcctcctgtccctcaggccttggagtggtaacagct

SEQ ID NO: 27282 - DNA, 201 bp, Homo sapiens
gttgggacctggctggcaggttccaaccttaggcagttgttaacctgcaatgatcaaactgttggtctggcagctaaaccacacctgatggggaaaatttwcccagtttacctttattctaacaaatgttcatagcaaacctgcctgtgagctgtagtattaatttcactctgggtcgttgattcttactttgtaacttcc

SEQ ID NO: 27283 - DNA, 201 bp, Homo sapiens
tttgaacgcaagcccttgatcttcttcttcatgaaggttggatatctttctactacatctttgcaaaatgctgagagaggtaaatcatagtctataggtgrcttggagttcacaccgtatccagtgtgtaatactgaatctgcccttgtttgcctgatttgggagaaagttgttacagctggtgaacaagcaaacagcatt

SEQ ID NO: 27284 - DNA, 201 bp, Homo sapiens
ggtcccttaggcatgaactaacccacacatttgcgaatgaagagatctgaaacccaaagagaagcgagccatgagatctccctataaagtatttgcaaaakcctagacttgaacattgctctggacagatttgagtcattttctgatgctcacaaacaggaagcagggagtgtcctcttctttttcctattttttaatttt

SEQ ID NO: 27285 - DNA, 201 bp, Homo sapiens
tccgtttggcaaatggaaaaactggcatcagaatggtgaaataacttacccaaagtcgtggtgttaatgagtagcagattttgaacgcaagcccttgatcwtcttcttcatgaaggttggatatctttctactacatctttgcaaaatgctgagagaggtaaatcatagtctataggtggcttggagttcacaccgtatcc

SEQ ID NO: 27286 - DNA, 201 bp, Homo sapiens
gtgcagagtaaaataaaaagctcgaggtgttaaataatattacattattggttatattgtcccatctcctgtacagtctttctatgtcctctaagcagaawtaagaaagccttttatgatgtccctacttcatcttctgcttgctgtatcctagcacatgatcatctgtgtcatactgagttgactcacactcccatcaga

SEQ ID NO: 27287 - DNA, 201 bp, Homo sapiens
ttacaccctgtcttgaatttcaaagaactcctgatcccaatccttatgtgagtgaattttgttttattattagcttgttgcagggaataaatcaatagtgraagctgttcatacatttagatacctagatattgctaatatatcatgatgttactaggtctgtagaccagacagatggatgacgaggaaggagttatgtca

SEQ ID NO: 27288 - DNA, 201 bp, Homo sapiens
gacttgctctgtgtgacctcaaggaatggaaccaagactaattgatagaagttttaggaggtggtttctgtttatcagtaagaaggcttttctatcagtcrgcagttaaatggactgccttctgtgtgagggagttcaccgtcgctgggggtattcaagcaacaaccatctgatgagatattgttgaagaaagtcaagtag

SEQ ID NO: 27289 - DNA, 201 bp, Homo sapiens
aagggaaagcagtgtgcatgattggtggcattggttgatggtatcggacatacctttgggaccagagagaattttcaaatgaaaacacttaagtaaaaacyatgttcttcctttcaacagggcgttgttgctggcgctcgttccaaaggagaacacaaacagaaaatctttttaaccatctcctttggaggaatcaaaatc

SEQ ID NO: 27290 - DNA, 201 bp, Homo sapiens
aacaccaaggagatgtgagccgcattgagtagagaaatatggaagtgcgaagggaaagcagtgtgcatgattggtggcattggttgatggtatcggacatrcctttgggaccagagagaattttcaaatgaaaacacttaagtaaaaaccatgttcttcctttcaacagggcgttgttgctggcgctcgttccaaaggaga

SEQ ID NO: 27291 - DNA, 201 bp, Homo sapiens
ggtgcctgttactgcatcctccaaagtggatacatgctgtatcctcaaaacagaagggcagaaaggggaatgaactccttctctgaagcctttttataagmacgctaatcccctctatgagtgttctacccttatcacttaatcacctcccggtactatcactctggcaatgaagattcaacacatgcatttgaggggaca

SEQ ID NO: 27292 - DNA, 201 bp, Homo sapiens
atccttctttacctacagccatattctaccagggaattctttggtagctacttgacaccagcaagcaaagggggccttagtatctaatcagcactactatrtgctaggaattaattgctatttgatattccaggaaatctgttagctaggagctgttaggactgttttggaaatggagacactgaaacttctctccctgac

SEQ ID NO: 27293 - DNA, 201 bp, Homo sapiens
aatcaaaggctacctcctctgtgaagcccttctggattcactttagacaaacccacgtcttagttactgctgtaacatgttattagtgtgctttatgtctmcccactggacctagccctgtaagagcctagaggccaatgccatttcacctttgtattcccattgttggcatgcaatataaacacattgtactcattatga

SEQ ID NO: 27294 - DNA, 201 bp, Homo sapiens
tgttgggtgagagtgtgttggtttgctattgatcttcccaacagcacacggtaaatctcactggttcatcctcagataaggtgagtctctcaactgagacrggaagagggagggtgaaagctttatcatacccagtacaatttagagacttaattagcagcctcaaccccagagcatttgcttatgcttatatacaaacaa

SEQ ID NO: 27295 - DNA, 201 bp, Homo sapiens
aacgtttgttgagaatgaatggataaatgaatgagcctcagatcaaccaacattgggaggtaaggattcatcctcattaagaggaaactgactcaagcaarttgaagtatcttggtcaggggctcagtctgtgactagcagtgtgggatttcaaatctctctgattctcagccacttccctatgtctcctcccttgctgtt

SEQ ID NO: 27296 - DNA, 201 bp, Homo sapiens
aacctatgaagatgttattcttatatggaaaaagagactcggcagataccattaatataaggaccttgatatgaagatcttggattatcaaggtggaccartcgaaccatctgaatctctaaaagctgagaacctttccccggctgcaaagaaccagagagttggcagcgtgagaaggacttaccattgttggctttgtag

SEQ ID NO: 27297 - DNA, 201 bp, Homo sapiens
cttatttaacactacagtccaacccccaagccctgccacttttattcccctcacctttctctacttttatttttttcataggactcataccttctaacttyctgtatacttgctggttttatatttattgtttatagtctgcccttagattgttagttctttgaggcagggatttttttgtttgtctgtttgctaacataa

SEQ ID NO: 27298 - DNA, 201 bp, Homo sapiens
gctctttcctaatctcaatttctttcattccacccttaaccagcagctcactctctgtaatatacactaccaccttatttaacactacagtccaacccccragccctgccacttttattcccctcacctttctctacttttatttttttcataggactcataccttctaactttctgtatacttgctggttttatatttat

SEQ ID NO: 27299 - DNA, 201 bp, Homo sapiens
ataagtaattaaagaagaatcatagagccggcgtatgcacatctttaaagctctgaaacatactgccaagcagccttccagagaagttgcaccaaatcacrcttccaccaataacaaaacacctataatggctgacaggtaccaacctttataaatgtgccttgcactgttctggtcactttacatatattaatttattca

SEQ ID NO: 27300 - DNA, 201 bp, Homo sapiens
tcttgttcttgttgagttgtaagaatactttatatattctggatattaaccccttataatatatgatttgcaaatattttttcttaccacttattactctkttgatcatgtcctttgatgcatagatgttttaaattttgatatagtgtgatttacgcatttttacttttgttgtttgtgcttttggtatcatatccaaaa

SEQ ID NO: 27301 - DNA, 201 bp, Homo sapiens
tagatacgtcataaaagtagaattgtgattggcttatttcaattagcatgatgttctcaaggttcatgcatgtgttagaatttccttcctttaaaaggctraatcatatttcactgtatatatttatcacacttggtttatccattcatctgtcagtggatattggggttgcttctgccttttggctattgtgaataatgc

SEQ ID NO: 27302 - DNA, 201 bp, Homo sapiens
tatgtacatttttaacatgctttacaaatatcctacgtgtacatccttactgatctgacatatttttatttttatgacaaatttttaattgtgatatgaartacatgtaaaatttatcatcttaaccatttttaagtgtatgttgttcaatagtgttggctattcacattgttgtgcaaccaatctccagaactttttcat

SEQ ID NO: 27303 - DNA, 201 bp, Homo sapiens
aaagaaggatctctaagaccaaggtttcagcaactttgattgaaaggaaaccatgtactttggtttctctgataaatgttgataaaagactacattgatamgattttccaaatgtcagctattatatcttgcggtgaaaccacttggatggagctcctgtaacatcagccgttaagttattatggtggaaaatcagattgc

SEQ ID NO: 27304 - DNA, 201 bp, Homo sapiens
tccccaaagatagcaccttatggattgtccttctctttttcatttgtcatgtaaagtcaccatcagcagccccaagtggaaatgctcctggaacatgtatrttggctttttccatccttctttacctacagccatattctaccagggaattctttggtagctacttgacaccagcaagcaaagggggccttagtatctaat

SEQ ID NO: 27305 - DNA, 201 bp, Homo sapiens
ttcattatcagtgatccaagatgggttttgtgtttctgtataacctattgcttcttctagagagcatgtcatagcatgggggagtatgtacatttttaacwtgctttacaaatatcctacgtgtacatccttactgatctgacatatttttatttttatgacaaatttttaattgtgatatgaagtacatgtaaaatttat

SEQ ID NO: 27306 - DNA, 201 bp, Homo sapiens
gctcctgaagacacagaccttgctatcacttagctgtgtggccctgagagaatcacctaagctctctgaattaaatgtatgtaatgcatcaagcccaatgkttctctcacagtgaatgctgcctcaattctctcatctgcatttattccttcaacaaacatttgcatgcctagtagacctgcctctaggctaagtaataag

SEQ ID NO: 27307 - DNA, 201 bp, Homo sapiens
ttcccaggattgtgatattgactaaattatacgatgggtaagagaacctctagcataggcacccaaggaaatgtttgactctctggtttccagtttccagwggtgacttactaggtcaggtggctaatgtcaggcacagagtccataacaggacctatatccacttcttttgactccctaaccagagctgtctcctgggcc

SEQ ID NO: 27308 - DNA, 201 bp, Homo sapiens
tcattcaataaaggctgtagacacacttaagtttcagaagagcatagtagtgcaggattttttttttctgttataccaatgaatgaatgaatgcttgcttrctgcctactatgtgccaggaagaaagggggtgtcattgataaagccacaaaaaccctatagcaaggtggtctcatttagtggctttgcagaagcagcaat

SEQ ID NO: 27309 - DNA, 201 bp, Homo sapiens
tcattggtcattttttaaaaatctgtttcccaaaaaggggctcttaaagaagagaggattgtagtagaaggattcctaccttgagaatcagaaagatcacygtttgactttcagttctatgacttattagcccctttaggttctaggaggacatttgatcccctggccttatgtttcctcatctgtagaatgagggaggta

SEQ ID NO: 27310 - DNA, 201 bp, Homo sapiens
ctattaccactcctaggaagatatatatttactgaaacacagggagagcagaattgataagaaagtctccctttctcaccacacaaaatatagctactacyagagatgcaaatgaaggatgataagggagtggggagcaatgccctgacctctctctcctacccactgatctcctgcctctgccttgcattggtggaacac

SEQ ID NO: 27311 - DNA, 201 bp, Homo sapiens
agggtagtccaatgatgagctttcttctcccaagttcaaatctgagtgattaatagacaagagttggacaggaagaattccaaactctagctttctgactrataaatgctggcctggaggatgtgacttggatacacagccacagtgagctttcttgaatgagatgagctattccacttggcttgcaggggtgttggacaa

SEQ ID NO: 27312 - DNA, 201 bp, Homo sapiens
agcatacaaaaataacacttttctcagattctgatgtccatatattgtttcttttaaaaagttataaaatattgaaaaaataaatggtttagcaagaagtmtacaaatatcatatgtatttcaaacatatattatttatttttctgattacagagttcacttatgtgcattatggaatattttgaaaatacagaaaaatgt

SEQ ID NO: 27313 - DNA, 201 bp, Homo sapiens
caggtttacaatttttgagtgtatcacattttattccattttattttcattttgcaactcctgcaaaaataaaagcaaaaaattatcaaattgttttgtcmcccacattttatgaattttgccatcttgttatttttgaataaataatatatatttttgccatatggtaagagatgttaagataaaagttgattttattca

SEQ ID NO: 27314 - DNA, 201 bp, Homo sapiens
atgtggaaatattttggtaggcccaggtttacaatttttgagtgtatcacattttattccattttattttcattttgcaactcctgcaaaaataaaagcamaaaattatcaaattgttttgtcacccacattttatgaattttgccatcttgttatttttgaataaataatatatatttttgccatatggtaagagatgtt

SEQ ID NO: 27315 - DNA, 201 bp, Homo sapiens
aactcaagagcaaatgtgaagattaaatgagaaattgcgtgtgaaacccttggcacagtaactgtactaaaaactcaataacagtgaccatatgggtgatkttccttaaacgtgtggtctttctcttgcccatcttgaagcagagggtcagtggtgttttcagtaacatagtctgggattcatggtgacctaaaatgcatg

SEQ ID NO: 27316 - DNA, 201 bp, Homo sapiens
aaggccaaggcgggtggatggcttgagctcaggagtttgagaccagccagggcaacatggtgaaaccccatctctaccaaaaatacaaaaattagctgggrgtggtggcatgcacctggaattccagatacttgcgggactaaggtgggaagattgcttgaggctagaaggccgaggctgcagtgaactcttgtttatgcc

SEQ ID NO: 27317 - DNA, 201 bp, Homo sapiens
ttttgattagttaagtgagtgaacattcaaatatttctctatacaatgtgttagaaacactaggacaagcattaccctaaaacaccaaggagatgtgagcygcattgagtagagaaatatggaagtgcgaagggaaagcagtgtgcatgattggtggcattggttgatggtatcggacatacctttgggaccagagagaat

SEQ ID NO: 27318 - DNA, 201 bp, Homo sapiens
ctctacccccagtggtgactttgggcaaaacagagaaaggcatttattcctcaacacactctatcaccatcagctggaaaagtgttgtcaccatgcacatstatagttctatgaatgttaataatactccctggagttgtgtagtgtagctcctccaccacagcacacacggtccccgagtatttaagtaaattaaatatc

SEQ ID NO: 27319 - DNA, 201 bp, Homo sapiens
atgaagttctctgagattctgaagcagtaaaaggagctaatacaaattcaagaaataattttatgtgaaacatctagactcaaggttgtcctatttctctktttccaaaatgtagtaacatattttatttgcactgattggcagtgtttgaataatacctaatccctaagtttttatctgggcaatgggagtatatggtct

SEQ ID NO: 27320 - DNA, 201 bp, Homo sapiens
gtgatttttatcctgcccagaaccacacagaaagactacatggagctacttcctgccacacgtcttcttgctttacacaggctaacacatgcatatgcctrtgaagttctctgagattctgaagcagtaaaaggagctaatacaaattcaagaaataattttatgtgaaacatctagactcaaggttgtcctatttctctt

SEQ ID NO: 27321 - DNA, 201 bp, Homo sapiens
aggcaataggaatgtctctaaagaaactaagactgcccttaaagattttataatgtgatagaggaaggaagataactattatagcttttaatatgtttgcyggtctctgcctagactggagtacctcctcgcgtaggtacaccagtattttacttttatatattttattcctcaataattataacctgaatacatacaaag

SEQ ID NO: 27322 - DNA, 201 bp, Homo sapiens
caggcagctcacagatgtgccctggaagcaggataaagcagaatcattctacagcttaatgttgcatgggcctcaggtttgtgaacattttaaaatttctyttccctattcgaaaaatctggtgtgaagagcatgttctgccattacacacacacacacacacacacacgcacacgcacacagtaccagaagatagtgagg

SEQ ID NO: 27323 - DNA, 201 bp, Homo sapiens
gcttcctggaacaaagagccgatggcatcagcaggcagctcacagatgtgccctggaagcaggataaagcagaatcattctacagcttaatgttgcatggvcctcaggtttgtgaacattttaaaatttcttttccctattcgaaaaatctggtgtgaagagcatgttctgccattacacacacacacacacacacacacg

SEQ ID NO: 27324 - DNA, 201 bp, Homo sapiens
aatccaaagtcttactgttaacctcaaagtggagaaagtagagagctggatacatcttaagaaaacagggttagactgactatcatgctgattccactgctgagagtcctgtaagggagctggctgtggttccccaccatgggaattagatggcttcctggaacaaagagccgatggcatcagcaggcagctcacagatgt

SEQ ID NO: 27325 - DNA, 201 bp, Homo sapiens
gtgggtgtagttgaagacacttaatttcatctttcttgactttctggtggaagggctggtaccaggcattttaacctttgtacctcagttttctctctctyttttttttttttttttgaggctgagtcttgctctgtcacccaggctggagtgcagtggcatgatcttggctcactgcagtctccacctcctgggttcaag

SEQ ID NO: 27326 - DNA, 201 bp, Homo sapiens
caagtggctccctctgtccagtgccaccactgtcctgctgctgacgtgtcccttcgctcatgcacaagaccatgtggccagacagccttaactcacaggcygaggagagccagcctgcagggaacccctaggaaaagtgagtgggacctgcaggctcctaaacatgatacccaattaccctgtgctgccttttttcttttg

SEQ ID NO: 27327 - DNA, 201 bp, Homo sapiens
gaaataatcacatttgcgagtgcagaagcctcacaaggagaaatgtgtaaaggaaaatgcatgcaagaatatgagtacttaactgcatgagtgaaaaaggwcatcattaggaggggagtccagcagttcaccaaagtgcctggaaatggagatgaagtcaacctttgatgcttgtatttagaatctgttgaaagagtggag

SEQ ID NO: 27328 - DNA, 201 bp, Homo sapiens
tcccctaccgcactggcactcctgacctgccagaggtatgctcacccagacagccacaaatgataccaagtagtatttctcacacttaaggagatcccttytaaagattagaaaagacacccggcatggtggcttatgcctgtaatgccagcacttcgggaggccgaggcaggcagatcacttgaggttaggagttcgaga

SEQ ID NO: 27329 - DNA, 201 bp, Homo sapiens
aatgatttgcctaaggccacacaactaatgaatattatagatggaacttgaatcccatcaggtcttctgattcaaattccatattcttttcatcctgatcracttctggaagaaggttacagtcttacttaagagcgccacatagggccaaaaccttctttgtctgtaataagtctgtgagcatgggagatattgaagact

SEQ ID NO: 27330 - DNA, 201 bp, Homo sapiens
catcatgaaagtagagtattcatgatgggattagtggctttgtaagaagaggaaaggaggccagggctttctctctctctctctctctctctctctctttstcagtgcatgcacaaaaagagatcttctgagcacacagtgagacagtggcaatctgcaagccaggaagggggccctcaccaacaaccaaatcttccagca

SEQ ID NO: 27331 - DNA, 201 bp, Homo sapiens
agaaatacctgcacagttctgagtaagtagggatgacatctgttgataagctaaagccatatcacaccatagtaagaggaaacagacggactcaatccccrcaggtggaagcttcagggccaatctcaaacagcagtgctgttttagcaataaaggaaagtatcttcaattacttcacttttttccccctaccctcccatc

SEQ ID NO: 27332 - DNA, 201 bp, Homo sapiens
agcccagctgcccaggatggctggcaaacacgcaacagttttgccgggggactttgagttgccttgggtaggaaaagttttagctctggttgttctctttwgattaggcttagcctcttggaatctgatcagtattagtttacattatctgagcactcggtgctgcctctgagcaccacgcctgtcattcttggattattg

SEQ ID NO: 27333 - DNA, 201 bp, Homo sapiens
gacatacttttgtcaaaggtagtcaatctttccaaaaacaaatacaagaaatattaaatgggcagaaagtaatcagcacaatttaggtagcttccaagagygtcttgttataatgtgacataggaaaccatttgcccttatacttcatgccaaagagctggggctgggagaagaaagcaaggaaaccagcacagaaatggg

SEQ ID NO: 27334 - DNA, 201 bp, Homo sapiens
aaaacctattttttcttttgtttgcagaaaggcgacaaaaaaagttgtttaggagataattggctgttacatattaaattaattaaatgctaagccatgtkggggaatgaactacaaaatgcggcaatttgaggtctggggatgaaagaaggggaaagatcatccaaccgaaactttctctttttatggctgtattgcagt

SEQ ID NO: 27335 - DNA, 201 bp, Homo sapiens
tgttgaccatccccaaaattacttaccttaagcccaaatcttgtgatacattctttctaacaccctctttcagagatgcctcattgctcctccctctgcgstgaggaataacccaacatgttcaactacagatgtgtccctggtggtctttgcagcagatcattggcaggagaacactaagctaggcctgcatgacttagt

SEQ ID NO: 27336 - DNA, 201 bp, Homo sapiens
attttcagttggataaattagtttccaaaattagaatagagcaaattgtagggtgagatcaaggcagcctgacttcttggggcatccaaaaagaagaatgrgctgagaacatctatccaggaaacattaatatgcgtgcttgaagcccagcacaggcaaaaggaaatatttttccccagtagttgtacttaactatttttg

SEQ ID NO: 27337 - DNA, 201 bp, Homo sapiens
ggaaagaccctggacacaccacaagagaatgctccattaaggatctagaagaaacagtgtgcaaaggatgagtcaagaaagagggagaaccaagatagtcrtagaagcatacaaggggtgactcttctaagaaggagggggcagtaaagtgtccagttgcatgcagagactaaagagtgagatggaagaaagaactattgg

SEQ ID NO: 27338 - DNA, 201 bp, Homo sapiens
cactgagagaaataaatgaggtgatgcttgcaaaatatttagcacaaatcctggcccttgcaagtgttctgtaaatatgagtaaagataataataagagaytgttgaagagtgggtttctctataacttcctaagggatacatctacctgttaaggttgtcagacaactcagtcggtgacaagattttagttgtgtttaga

SEQ ID NO: 27339 - DNA, 201 bp, Homo sapiens
gtcactgttgtaaaagattagaaaaagcactggcccctggaccctgttttcagttctcatgtctctagacttactagctgtgtgaccatgggcaaattatytaacttctctgtgcttaatttcacccttgcaaaagagataaagcatctgccttacaaggctgttgtgatgagataaaaagacaatgtacttgaaaatacc

SEQ ID NO: 27340 - DNA, 201 bp, Homo sapiens; identical to SEQ ID NO: 5482

SEQ ID NO: 27341 - DNA, 201 bp, Homo sapiens
tataaatcactggactgtttgtacgtgaaacagaagaggctaagcttcctttttttacacttatgagacaaaaagtgcagtgtttggttcgtatgtttagsacatgattttcataaagaatctatatatttttgccctacagagaattgttatacaggtcaagtgtgttttcctgatgttcctatgcagttacagtatgtt

SEQ ID NO: 27342 - DNA, 201 bp, Homo sapiens
catggtatatagtaaatattacctgtaagtgaagtggttgtattatcattattctgttcctagcacggtgtctgagtttaatagcacctggtattattcartgcacatttattagagaatgaatgaatgaaatctgtgtctgcctgtttcttttctttttctctgcacattaaatgcttgtctgctcttatagctggagga

SEQ ID NO: 27343 - DNA, 201 bp, Homo sapiens
aattctatttccttatcataatgacattttttttgaaaatctgataagtacgtttgatagcttgtcatttaattcatttaacatctttagcagctgttttkttttttttttttttctctgaaggggtggtagttgtaatcttcagggaaaatttttcttttttgcacatcgccaatgttgaaagcaaaacaaatggttaaa

SEQ ID NO: 27344 - DNA, 201 bp, Homo sapiens
cctctttcagtataatatccttaaaacatgaccacaggatggttgctggaagccttcagaagagtttaagcttatctcaagccatcataatatcatgtgarctttgtttctgaaagaatatagattgggttctcccattagcaatgtatgtggcaattgtttgtgatggctcagagaaagagagagagactgagacagaga

SEQ ID NO: 27345 - DNA, 201 bp, Homo sapiens
cctgcagatcatgccaccaaccccaacctcatgtatattttcaagaaaatattgactgacttttagaaaaactgagcatcaaaacatggagttacaacctragttctaaaataggtataagggatggataggaagaagagtgggaaggagaaagggtggggtgggtggaatgatgaggcagactcctagaacagtccagcc

SEQ ID NO: 27346 - DNA, 201 bp, Homo sapiens
tcttgagtaagaactttaactctctgcatctaagtttcttatctgtgacatggaaatgaaactattaaacccttgtggttgttctgcagagaaatgacagyagcattttgaagctatctcactacagtgatgggagcagggttagtgggatagacgaaatgagattattatttttcttttttttcttttacaaatgaggaa

SEQ ID NO: 27347 - DNA, 201 bp, Homo sapiens
cataggaagcaaaacagaaagccttctaatttgcgtcctgaaggatgtgtgggagaaggaatgagtgttctaggtgggaggaggagcacatgtcagacccygagatggcctcttctttcataaccccctgtgcttctctcctccattgattgtgtctctgggtctgtgtttccataaaacagccagcttatgacaatagga

SEQ ID NO: 27348 - DNA, 201 bp, Homo sapiens
taagtggaaaagcagaatggaagtcagaattttcaattgtgtgtgtgtgtgtatgtgtgtgtgtttggagatgagtagaaacattatttattggagggaawtatcccaaatattaaatatgtatatctctataccttttttttatattaagcatgcattttgttttcatccttgtatttaaatttttcaaattttccacaa

SEQ ID NO: 27349 - DNA, 201 bp, Homo sapiens
catggatggtaacacaaacacagtcaatatcaagttatattggtttgagttaaggtgtccactgatgacctttgcctggatatagattgtgtaggaaatamagggtgtgggacattccaagtgttagagcatccagaaaagttaacttttccagatgagttaaaccgaatcttcatttattgggagcaaggtccagggcca

SEQ ID NO: 27350 - DNA, 201 bp, Homo sapiens
tctcgtctagttctggattttattttttgagtgactactaagggagagaccctttgcctgagtttatcattaggaagaggtttctaaattattgtagacgrcatctgcttagataaaattatgtgtcccctctttggacttcactttccccagtggtaaaatgaaagacttaggttatttctaaactctcatctagttctg

SEQ ID NO: 27351 - DNA, 201 bp, Homo sapiens
gctggctgtggcacagggaagcctccgatgggtaaatgtggaaaatgaagaccagagaggtggagccacttgcttaaagacatgacatgtgagagtcagarctggaccccaaacctttgtcctttgccagatctttaaactgatcaaatatgacctttttatgaacctcagagaccccttactctgggatttagataaatt

SEQ ID NO: 27352 - DNA, 201 bp, Homo sapiens
ggtgggaggtcagctttgtattaaactactcaccctaacaacatcttgagtggcaggtgccatcaattccacttttttattatggaaactatggccagacyggggccaacttaccccttcctcatagcaggcacagtgcctcaggcccctactgtatttttgaggtcccacaaatagattttcacttcttttaaactcaga

SEQ ID NO: 27353 - DNA, 201 bp, Homo sapiens
aaagttgagtgtcacatgtgtaagagcaagcagttccaggctgaggctgtggacaaagctggggcttgaaggactctttgtgtatctgagcgtggtgctgrctgtggcacagggaagcctccgatgggtaaatgtggaaaatgaagaccagagaggtggagccacttgcttaaagacatgacatgtgagagtcagaactgg

SEQ ID NO: 27354 - DNA, 201 bp, Homo sapiens
ccttcttcattttattataaggataacaaaatgagataatgaatgaaataaataaattacatagagctttaaaataaaactacgatgtggttgttaactgwtagattccaaagaaccttgaatgatacaatgagatacttgtcttatattctgtgggtctacagaagcaatgggaagtatttttttttaaatcaaaacagg

SEQ ID NO: 27355 - DNA, 201 bp, Homo sapiens
ccagatgaggagcaatgtacaactgcaaaccttggtggcagtggtacagtgatatatgctgaccaaatgcactgaagagtgccaactcaattattatttcratgtccagactccactctaagcccaacagatattgagtctatagcaacgtgatcaattctaggccctatttgctaatgaggctgatggtctattttgtgc

SEQ ID NO: 27356 - DNA, 201 bp, Homo sapiens
tcagcctcatctccggctgaccccccacaaccacagaaaaccacttttttttttaactttaagttttggatacatgtgcagaacatgtggatctgttacayaggtacacatgtgccatggtggtttgctgcacctactaacccgtcctctaagttctctccccttgcccaccaccttcctagccaaatgcagaaaactgaa

SEQ ID NO: 27357 - DNA, 201 bp, Homo sapiens
ggctttacctacaaatctgaatgacgccaaaggatattaagaattgactgaagttggatttctcttaggacttggcctatcattcccaaggtgttaactgyctggactgccaatattcccatagtcatacattttcactggcctatgttcagggtcatattgttgattctccacgtatgcataaatgtcaccaagaggaga

SEQ ID NO: 27358 - DNA, 201 bp, Homo sapiens
aaataacaatgaccaatgttgattaagctcttactgtttgccaatcactcactgtcttgtatgctatttgtcatttctttaatactgggagcacccattartatctatacttaactgcttaggacactgtggcagacatgtaaaggaacttaccaacgattatacaactaaggaggtaggtcagagagctggggcttgaac

SEQ ID NO: 27359 - DNA, 201 bp, Homo sapiens
tccacttcctggttcatagatggcaccttctcactgtaacctcacacggtggaaggggtgagggacttctctgaggtctttcctgtaagaacatgaatccyatcaccttccaaaggctgcacctccaaattccatcatcctagggattaggtttcaatgtatgaatttctgtgtgtttgcaggaagagggggcataaacat

SEQ ID NO: 27360 - DNA, 201 bp, Homo sapiens
tccctttctttgtgtgtgtgtgtgtgttttgtgttttttttttctgagacaatgtcttgatatgttgcccaggctggcctgggactcctgagctcaagcgwtccttctgcctcaacttcccaagtagttgggaccacaggtgtgccccaccaggcctagcttatcccttgcttatttttaaagagcatccttacgagatag

SEQ ID NO: 27361 - DNA, 201 bp, Homo sapiens
ggaagttcctcaaaaactagaaatagagctacaatatgatctagcaatcccactgctgggtatatacccaaaagaaaggaaatcagtatatcaaagagatrtctgcactctcatgtttgttgcagcactgttgacaataactaagatctgtgagcaaccttatttgttgtccatcaacagatgaatggataaagaaaatgt

SEQ ID NO: 27362 - DNA, 201 bp, Homo sapiens
caggaagtagtcaataaatgattttgttgaatgagcaaatacgtatatacaatggtgagaaccaatgtccccctaaggggtaggtagggtgtctttctaayggcatggtttacccaggagctgcactttcttattctaggccaggacagagagacttcattcaggtccttttctgcatctaatcccatgtgccaaagagag

SEQ ID NO: 27363 - DNA, 201 bp, Homo sapiens
gagcccagctgtcaagttggggtttggttcttgttattttcccttctgtgtttcccgatatgtgttttggagtgggcatttatccaataccataagagtaraacccatgccctttggtgctctggacctcagtcctaccgtgtagtgcaatgacctgaagcatctgtcaaaaaacaaaaacaaaagcacaggtgccccaaa

SEQ ID NO: 27364 - DNA, 201 bp, Homo sapiens
taaaattgtggcagaaggctaagaagaagcaagtaccgtcttcccaaggtggcaggaaagagagaaacccaggggtaaactgccatttataaaaccatgasatctcatgagaactcactcactatcatgagaacagcatgggggataaccacccccatgatccaatcacttcctaccaggtccctccctcaacacatgggg

SEQ ID NO: 27365 - DNA, 201 bp, Homo sapiens
caagagatggagagcaagatgaaagtcggggtctttctataacctaatttatcaagtgacatcccattactttttgccatattccatttattacaaataarcatacttgcttacaagtaagtcactaagtccagcccacactcagtgaggagactaccaaaggcatgaatattattagacagggatcacttggggccattt

SEQ ID NO: 27366 - DNA, 201 bp, Homo sapiens
ctcagttcctcacatgctgttggactgggggtctcagttcttcttaggctgtttgccggaggcttcccttggttccctgtcatgtggcctcctgatagggyggctcacaaatatggcagctggcttccatcagagcaagctaatgagagggcaagagatggagagcaagatgaaagtcggggtctttctataacctaattt

SEQ ID NO: 27367 - DNA, 201 bp, Homo sapiens
ctcacactgctattaagactgggtaatttataaagaaggaggtttcattgattcacagtttcacatgattggggaggcctcaggaaacttaaaattgtggyagaaggctaagaagaagcaagtaccgtcttcccaaggtggcaggaaagagagaaacccaggggtaaactgccatttataaaaccatgagatctcatgaga

SEQ ID NO: 27368 - DNA, 201 bp, Homo sapiens
tctgatgagaaaataaaatctcattgaggttgagggagggtgggaggcaggcaaaaaataaataaataagaaaacttcatattagactagtgtttctcaartgttgatgtacctgtaaatcacctggagatcttcctaacatgcagattttgactcaatagatctggaatggtaccggagacttcatttctaataagctcc

SEQ ID NO: 27369 - DNA, 201 bp, Homo sapiens
ctctgaccttgccatttggaaatactccggactacaggagacagaaaccctattcaaatgaacttagatacaaatggcattgactgtaaaatttacaaacrcatagtccatgtctgtctctccttgctagttgatcttcacaaaagcagactaggcactttcaaatggtggcactcagtatcaacaatgacttccattgtc

SEQ ID NO: 27370 - DNA, 201 bp, Homo sapiens
ctggaccaatcaaagtcttccctgggatttttttttttttttttttttgagttgcagctgggaaatttcagtcagcatcttgctggagacaaagtgagagwtgctgtgtgcgatttgtagatggctctgaccttgccatttggaaatactccggactacaggagacagaaaccctattcaaatgaacttagatacaaatgg

SEQ ID NO: 27371 - DNA, 201 bp, Homo sapiens
atattcattgcttagcaacaaaagaaataacctagacagttactggagccaaccaacatgatgagtggagtgtttttaggaggttagccatggtacatacrcatctttgtgtaaaacagtgatttatttgaattcttagtgtatcatcctgaatttgcccttgttttaaagccaagaaatatacaccaaacaagaagccct

SEQ ID NO: 27372 - DNA, 201 bp, Homo sapiens
aagtggctggattccaaatatgtgtatagaaaaactgccacggaagaggcagcgatttgttcatgtttgcagctgctgactctgacccaaatctgccctcycccaatcctcagctgctggtaccaatgcatccttttgggagctggaccatgagctctgccaggaagaaggtgcccatctcaatggttccccgcttcaatc

SEQ ID NO: 27373 - DNA, 201 bp, Homo sapiens
tgtcctctgcctctctctgtctggcagactcctgcaactccaggtgatgcctttatcccatcttcatctcagacccttccagcgagtgcagatgtgtttarttctgtacctttcggcactgctgctgtaccctcaggtaagccctcttccaccagcttcccttcctttggccttcactcattaagagagagaaagagttta

SEQ ID NO: 27374 - DNA, 201 bp, Homo sapiens
gatgtagccaattaaaagctttccaggtggtgcaacagtgcattcacagtggtgagccccctccaggttagcattttctaagtgctgtcccctgtcatcaygcttattgtgtggtactgtcatcttcatataggtactttcttaaacatttctatatttgtgtatgctgagatttaatagagtatctcctactgcataatt

SEQ ID NO: 27375 - DNA, 201 bp, Homo sapiens
cccacccacagaggttctgatttacttggttgggatgtagccaattaaaagctttccaggtggtgcaacagtgcattcacagtggtgagccccctccaggytagcattttctaagtgctgtcccctgtcatcacgcttattgtgtggtactgtcatcttcatataggtactttcttaaacatttctatatttgtgtatgct

SEQ ID NO: 27376 - DNA, 201 bp, Homo sapiens
aactatgcttggattttctatggagacagcatataacctgcaaataagtttctcatcaatctttaagtacttacttctttttctctctaattggctggatytgtcattataatatttagtgataataaatgtccttatctcgttcctgattgcttctagcttacatttaagttatgtttaagtttttactaaagatagttt

SEQ ID NO: 27377 - DNA, 201 bp, Homo sapiens
ctgtttatgcatcttagcctgtcataagccatcattgtatttatcttgccatttacttgtttctttcaatcagctggagtgaagggctcaaccggcaacayacaggaaggaaagactagagagaggatttagggagaattaggtggtatatccatgccctttctactcaacctgtggtccatggaccagcaggcttagcat

SEQ ID NO: 27378 - DNA, 201 bp, Homo sapiens
gtaaatagtgaaatatgtaaaaacatcagttataatatgtaaacaagtagatgtataaacatccagttataataatagcacctgctctgtaccaagcaccrcattaggtactttatacacagtggttcatttagtcctcacaccaaagcacacttttatccctttggtaaggtggagaaaccaaagttcagaaaagttaag

SEQ ID NO: 27379 - DNA, 201 bp, Homo sapiens
atgcctagcaaaagtgtagaactcggagaaatccctagtaaatgcttgttggataaatgaaatcatttgcgggtgatttctttaatgctggaaagaagtcragcaattacttagtcgaattcatttgtgaaacaaggaaaccaagattcagagagaaagagtgtctgtgagctcatgaaatggacctgaggttacagatct

SEQ ID NO: 27380 - DNA, 201 bp, Homo sapiens
tggtcgtatcattaattattttattgtttttattattagtaatacttcatccaaagagtccatttttaaaaatgttgttagatatgcttaagtaaatgacyataatatttcttttaaagcttcgcataagagcaggctacccagaagccttgtacttggcaagcagaaatgaatctaaactgttttccgaatttaccaagt

SEQ ID NO: 27381 - DNA, 201 bp, Homo sapiens
ctttcggaggctgaggcaggcagaacacttgaagtcaggaattcgagaccagcctggccaacacagtgaaaccccgtctctactaaaaatacaaaaattartcaggcatggtggcacgcacctgtaatcccagctactcgggaggctgaggcaggagaatcgcttgaacctgggaggcagaggttacggtgagccaagatg

SEQ ID NO: 27382 - DNA, 201 bp, Homo sapiens
agggaatagcaatagttcgtgttactcaaacactctgtggaggaaacggggatgagtacagggcgttcagtctccaaaagcaaataaacacagtaagcctkcctcccctcacctggctggtatggagtagggttaaaatgaggaacggtatcatggctaaaaaggccaatgaggaaggtgcccctttagaatccgtgtgtt

SEQ ID NO: 27383 - DNA, 201 bp, Homo sapiens
gtcagatgtgtgagaggaaagatcaatacgtacagagagagaattcaaatattcaactgattccactggaaataggaagaggaatcctaagatttgacttsaatataagcagattcctgaggtttctttgggatacattcatggcagccaggcacttaagatgtctctttttctgtggtctctgtgtagctccaaccccag

SEQ ID NO: 27384 - DNA, 201 bp, Homo sapiens
tgtttattgaatacctcctatgtgccaggattcagaatctggttctaccagttgccatgagcaaattagcaaacttcactttccttacctgtcaaattagrataacctctacctcaaagatgttttatgaggattagagatattgtctgtaaagtttctaacagtgtttgacacatgaaaggcgctcaataacgtgccctc

SEQ ID NO: 27385 - DNA, 201 bp, Homo sapiens
ggactgggaacctggagatcagatttattactgaccagttttgtgccttttggcaaagcactttatttctatgagccttggtttcctcatctgtgtaagcratgggttattaaaaggattcaatggtatatgtgctcaaacattatagaactcccagaatttgaagtatcttttatcctcattattagcacatgttaagtg

SEQ ID NO: 27386 - DNA, 201 bp, Homo sapiens
ttcccttctgtgtttcccgatatgtgttttggagtgggcatttatccaataccataagagtaaaacccatgccctttggtgctctggacctcagtcctacsgtgtagtgcaatgacctgaagcatctgtcaaaaaacaaaaacaaaagcacaggtgccccaaaattcagaaaggtagaaccagaggtagaacctgggcacc

SEQ ID NO: 27387 - DNA, 201 bp, Homo sapiens
atataagacactcgtctggatttttaaaagaggaaactgaaatttgtgggaggcaacttgctcagggcccacagctgaacaagtggtgaagcatcagcctytgacttagaacattgtctaccacactagcctctatcttattttcagtaagataatttgcgggctatttagtatctctgctttataagaatgacaggttgg

SEQ ID NO: 27388 - DNA, 201 bp, Homo sapiens
agctgccttcatattttctcccaggagaattttggctccaagaatcaaggctttaatgggattcagaagtcagtgatcacagggcagatgcctcaggtttraagtcacatcaaaccgagtgtgaaccttctgtaactcgcagctgtgctaacttttggaggtttcttgaaaaattctagtcagtttgggttaaagaatggt

SEQ ID NO: 27389 - DNA, 201 bp, Homo sapiens
aatgtaagcaatattgggcatacaatcagaagacctgagtttgagtttgcatgtctctaattatttgtgactttggtcaagttaatattttctgagccttsgttatcctcatgtgtagtgtagggataataatgctggcattttagtattggtatgtctagacgtatatggatgatgatgtatggaaatttcttaatactt

SEQ ID NO: 27390 - DNA, 201 bp, Homo sapiens
ggactcagtgtaatggagtgaacttaggtgaatcttttgatcttttgagcctcagtttgttcatctgcaaagtgaaggagttgatccatttgatctctagrgtccttcctggtcctgacaggctctattgaatatagaatatagaacctacaatgggttctattcagtctcaggttgttttgttaccagttttccaggact

SEQ ID NO: 27391 - DNA, 201 bp, Homo sapiens
acggggatgagtacagggcgttcagtctccaaaagcaaataaacacagtaagcctgcctcccctcacctggctggtatggagtagggttaaaatgaggaayggtatcatggctaaaaaggccaatgaggaaggtgcccctttagaatccgtgtgttggggagcagatgtgatgagcacctgaggtcagactctgccctggg

SEQ ID NO: 27392 - DNA, 201 bp, Homo sapiens
taatctgcatattaaatgaataaacttttatttatttttgtagctaaaaataatcttacgcattgtagagtttgatctccccaccccagtggattttcttsgggcctccttgggttgtacaccactgggtttacagcatccgtttcaagcgcctcactggcaggatctgaattcaggcccattgcattctggcctatctct

SEQ ID NO: 27393 - DNA, 201 bp, Homo sapiens
gacttgcctcttgttgctacccagccatgatgagctgtttgagttcccaggattgattacgtcttctctctgtttcatgctatcatccacagcttttcttyttaaggtgactaacatttacttgtcttcctgaactcagttcaaggatctcctcttcttggaagtcttccgtctgcatcccccctgttaactctgccttgc

SEQ ID NO: 27394 - DNA, 201 bp, Homo sapiens
tctgtacctttcggcactgctgctgtaccctcaggtaagccctcttccaccagcttcccttcctttggccttcactcattaagagagagaaagagtttacrgagccagccaccgaatgatgataaaacactgctgttctctcctgtgactcttcaggtgacattgagaagctatttagaggaggaggtggtgttggggtcc

SEQ ID NO: 27395 - DNA, 201 bp, Homo sapiens
cttgtcttcctgaactcagttcaaggatctcctcttcttggaagtcttccgtctgcatcccccctgttaactctgccttgctccaccctgtagcatctccmggttgaggcagtgcctatcctctgcattcctgagaatcctatgatttctctcataccaactgttagcatgccatgcaatcactgtctctttttccctccc

SEQ ID NO: 27396 - DNA, 201 bp, Homo sapiens
gacttctaccacaccatcgaccaactcacgtgagtgcccctcacttaagacataaaacccaatgagagccgtaactcatgtctggaggcggggtttctggrgtcaaataactcatctcacttgcattaatcaggcttctttgtttatattattattactagtaatactactatgagctgccaatttagataccactgataa

SEQ ID NO: 27397 - DNA, 201 bp, Homo sapiens
aaattagaggtgagaattttagaaggttggatgtaactggggtcccaagtattgaaaacactaatggaattattttaggtttatgcacttgtttttttctsataccctaggagtttatgtaatgaattttcatggtgctatagatacttaatgaaactatgtgatccattagttaaatgaaatgttgctgagtatgccatg

SEQ ID NO: 27398 - DNA, 201 bp, Homo sapiens
ttgcatatcaacacatatatacattcatacctatacatttatatacagatgcatgcatattttataaatcctgagtttactttgaaacctacaattttcartctatcactttagcattctttcctgctttcctttccctattttaacatctcttgtcccataggagaagcttggctcccaacaatatctgcatttactcct

SEQ ID NO: 27399 - DNA, 201 bp, Homo sapiens
tagcactacattatgtttttaaactgaaatttgcagtggcgttagtgttatcacacaaggctcatatcaggttgggaggggttttgttttcctaattctgstgaaattcacatgacataaaattaaccattttaaagtggtatttattatagtcatgatgttgtgcaaccctcacttctgtctggttccaaaatattttca

SEQ ID NO: 27400 - DNA, 201 bp, Homo sapiens
gggatttgtctatttaggatatttcatataagtgaaatcatacagtatgcaacatattttgtctaacttacttgccttgctgttttcagggttcatccacrttgcagtgtgtatcagtactacatttcctttatacaattgagtaatattccattgcaccaatattttgtttttccattcacccactaatggaaatctggg

SEQ ID NO: 27401 - DNA, 201 bp, Homo sapiens
tattccattgcaccaatattttgtttttccattcacccactaatggaaatctgggagggctttgagtgaagttggagagacgagtgtcttgtaacttgccytgtgctgtgctatttactagctatgtggctttggacaagcgcctaagctggcttgtgcctcagtttcctcgtttgtttcatgtagataattatattggat

SEQ ID NO: 27402 - DNA, 201 bp, Homo sapiens
tgatggtggtttcctttcattattgatgtagggatgtacttcagaaattcacaagtaatgcttgtaacacttgaacataatcatattttgttgaacaaacrtctttgaagatagaaataaggagagatgctatattgtgatttataaggttgaagaagagaaaatggcccaaatccaatccagttttatacaactgatttt

SEQ ID NO: 27403 - DNA, 201 bp, Homo sapiens
ttgctccaactttcttgtttatttagtttatcctattatggaaaatggcttttataaggcttttggtaagttgcctaaaattctgtttttttttcataacrtggggtaaatacaactaacaatgccacatcgtgaagatgagctgttaggctaagatatgtctcccatatttgtgattcgttttctcccctttcttgttac

SEQ ID NO: 27404 - DNA, 201 bp, Homo sapiens
aatgagagccgtaactcatgtctggaggcggggtttctggagtcaaataactcatctcacttgcattaatcaggcttctttgtttatattattattactastaatactactatgagctgccaatttagataccactgataacatacaaaccttcttcatatgttccatgtttatttttagacttataataatgcttaatga

SEQ ID NO: 27405 - DNA, 201 bp, Homo sapiens
ccaccactgtcctgctgctgacgtgtcccttcgctcatgcacaagaccatgtggccagacagccttaactcacaggccgaggagagccagcctgcagggamcccctaggaaaagtgagtgggacctgcaggctcctaaacatgatacccaattaccctgtgctgccttttttcttttgaatattgtactttggtctggagc

SEQ ID NO: 27406 - DNA, 201 bp, Homo sapiens
aggctgaggcaggcagaacacttgaagtcaggaattcgagaccagcctggccaacacagtgaaaccccgtctctactaaaaatacaaaaattagtcaggcwtggtggcacgcacctgtaatcccagctactcgggaggctgaggcaggagaatcgcttgaacctgggaggcagaggttacggtgagccaagatggcttcat

SEQ ID NO: 27407 - DNA, 201 bp, Homo sapiens
tgtttataattgtgaaacagtgataaacaattattattctctatacatttgtctgggccaaggcacatgtatattaaaatgagagagaagggctgggcgtrgtggctcacgcctgtaatccctgcactttcggaggctgaggcaggcagaacacttgaagtcaggaattcgagaccagcctggccaacacagtgaaacccc

SEQ ID NO: 27408 - DNA, 201 bp, Homo sapiens
tgttggcattacagtcatgagccacctcacctggcctgttttgtttttttaacaatatagaagagctggatattagttgtcatgctagaggagatgcattrtttgggattcatagaagataaagtatatgataaaatgagttaagacaatttcatacccaggtttggctcaacctgtataaacttgagaaatgattgttat

SEQ ID NO: 27409 - DNA, 201 bp, Homo sapiens
agtcacaagaaaggactattatcaaagagaatactgtatatttgtttaatttaaatgagatcgagtgagacactatatgtgaagcagtagctaagggcatrgtatatagtaaatattacctgtaagtgaagtggttgtattatcattattctgttcctagcacggtgtctgagtttaatagcacctggtattattcaatgc

SEQ ID NO: 27410 - DNA, 201 bp, Homo sapiens
cccaaattgttggcattacagtcatgagccacctcacctggcctgttttgtttttttaacaatatagaagagctggatattagttgtcatgctagaggagwtgcattgtttgggattcatagaagataaagtatatgataaaatgagttaagacaatttcatacccaggtttggctcaacctgtataaacttgagaaatga

SEQ ID NO: 27411 - DNA, 201 bp, Homo sapiens
ttggggtcattattctttttgaactgaaactggcatttgaggtcagtcgttttctattaaaccattctacatctgtgggatgaactaagaattggctgcayaattcgaagatccatttctaatagctttttcttaatatttttcaaaagtggaaattggtgaaatgtttactttttaatagaactctcagatataactatc

SEQ ID NO: 27412 - DNA, 201 bp, Homo sapiens
caggggaggtggcattgggcctagatcataaaagttgattagaagtttattaaacaaaaggaattcatgagtgaatcatctgagacactccatgtattgakatgcaaggaatcatagtgttttggaggaatgatgagaaattcaggatgctggagctcagggttcatataggggagcagtagaaatgagacaggcatggga

SEQ ID NO: 27413 - DNA, 201 bp, Homo sapiens
tcagaaattcacaagtaatgcttgtaacacttgaacataatcatattttgttgaacaaacgtctttgaagatagaaataaggagagatgctatattgtgakttataaggttgaagaagagaaaatggcccaaatccaatccagttttatacaactgattttaaaaaaattcttgaaaatgtgtaaaatccatatatttcag

SEQ ID NO: 27414 - DNA, 201 bp, Homo sapiens
aacaaacgtctttgaagatagaaataaggagagatgctatattgtgatttataaggttgaagaagagaaaatggcccaaatccaatccagttttatacaaytgattttaaaaaaattcttgaaaatgtgtaaaatccatatatttcagctactttctgaatttatagattaggcacctactgtgtccaagaccaacatgat

SEQ ID NO: 27415 - DNA, 201 bp, Homo sapiens
gcccaaatccaatccagttttatacaactgattttaaaaaaattcttgaaaatgtgtaaaatccatatatttcagctactttctgaatttatagattaggyacctactgtgtccaagaccaacatgataccatttcctacaattcatcctgagacagcaaaattaacttgtatcaatttcctcctttgtaaaggggagata

SEQ ID NO: 27416 - DNA, 201 bp, Homo sapiens
ccatttcctacaattcatcctgagacagcaaaattaacttgtatcaatttcctcctttgtaaaggggagataatacagactttcggtcacataccggccakgtggccttgagcaagtggcacaggaatttatgtgcctaatatttattaaatgcttaccaggaggcatgccagacactcttccaatcacattacgtgtgtg

SEQ ID NO: 27417 - DNA, 201 bp, Homo sapiens
atgtggccttgagcaagtggcacaggaatttatgtgcctaatatttattaaatgcttaccaggaggcatgccagacactcttccaatcacattacgtgtgygatcatacttaattgccacaacagctcccccagtgggcactattatccccattgtacagatgaagaaactgaggcaaagacaaggttgagtaacttcctc

SEQ ID NO: 27418 - DNA, 201 bp, Homo sapiens
tttgttatttgtttgtgtttttccttaaaattaagacctctgtaactgaaatggataatgcatgaggaagcctacatagaaaagaatgctggctcaatctyataagttctcaaggggttgctaaaggggctttcttttgtgttcaaatgagtcagctgaaaaggactgcctttttattaaattgttactacaagtccacat

SEQ ID NO: 27419 - DNA, 201 bp, Homo sapiens
tatttgctgcaatgaaatggtaaatattattaataaattttattatgtttatacatgaccaaattttgtgactctgccatctcccattgaacgttgtcttrgagacgagggtctggaaagggtgtgggtgctggtgacaaggtatagatagatggtataaaagtgacaggataaattctcattttctgtgtatggtttcat

SEQ ID NO: 27420 - DNA, 201 bp, Homo sapiens
agtgagacactatatgtgaagcagtagctaagggcatggtatatagtaaatattacctgtaagtgaagtggttgtattatcattattctgttcctagcacrgtgtctgagtttaatagcacctggtattattcaatgcacatttattagagaatgaatgaatgaaatctgtgtctgcctgtttcttttctttttctctgca

SEQ ID NO: 27421 - DNA, 201 bp, Homo sapiens
acatttattagagaatgaatgaatgaaatctgtgtctgcctgtttcttttctttttctctgcacattaaatgcttgtctgctcttatagctggaggaaaakctgacataaaaattggcttgctggaatgtttcttggccccatttgtcaccttatccttggagcccatttgtatgtcaactccatgccccctctgatgcct

SEQ ID NO: 27422 - DNA, 201 bp, Homo sapiens
taagaaacatagaaaacagagttgggttttgtccctcttataaatctagacttttaaagatctattttgagttacctagtttgagaagcagttttgccgcwaagcctctcattccctttgctgtataaaccctatcactgccttcatgaaaccatgggagcagtttttgcataaagaccaagattttgtttgtatatgttt

SEQ ID NO: 27423 - DNA, 201 bp, Homo sapiens
ttataaatctagacttttaaagatctattttgagttacctagtttgagaagcagttttgccgcaaagcctctcattccctttgctgtataaaccctatcamtgccttcatgaaaccatgggagcagtttttgcataaagaccaagattttgtttgtatatgtttgccaattcactttttataaatttctgtttaacttcat

SEQ ID NO: 27424 - DNA, 201 bp, Homo sapiens
cttttttcaaataatgggggcatccccaggtgtcagcatctggctgtaaatcacaattttcaacactttttaaaaacctaactgtaaggcagcaaggcagrtgttccctttcactccacagcaaggagatttatgattgctctgaacttcacggcataaacagatgctccttagtacctcctccctccactattggacatt

SEQ ID NO: 27425 - DNA, 201 bp, Homo sapiens
tctgctattcatacagtgtgtagctgcatcaaatctttccctcatggagttgcaatttctcctatacaaattaaagagatagcaatcacactcaccccagwggcttgtggaaaggatcaccttcacaaaaatgtaagctgcacagggtaagaatttttttttttggtgactgttttgttctttgttttgtctccacacact

SEQ ID NO: 27426 - DNA, 201 bp, Homo sapiens
aaaaaggaggagcaaaggaatgtcttacatggtggcagacaagagggcttgtgttcaggggaactcccctttataaaaccatcagatctcatgagacttaytcactaccatgagaacggtgtggggaaaaccacccccatgattcatttatctccacatggggattattacaattcaaggtgagatttgggtggggacaca

SEQ ID NO: 27427 - DNA, 201 bp, Homo sapiens
taacaaagaattgagctgctgatgacactgaagaaaggtttcaaagacacagatgatcaagcccacataattagaattactgtttagatatgcaaaaaaamcggaaaggcaacactggaaagggagaatgggttgcaaaactagcgccaatataaagtacgagtaatggccaataaaagcatatctaccaatgactttgta

SEQ ID NO: 27428 - DNA, 201 bp, Homo sapiens
cacacagctcactgccaaaaaatgggctgtcttagaatcacatgcaagtcaaaataagtacctcccagctccagaggagggctggactgtaatcttcggtraagtaattttctccctttgaaagcttagcctggccacttcacagttatcaagattcaagtgccaaggggcagatgccagctttgcagacatagccactat

SEQ ID NO: 27429 - DNA, 201 bp, Homo sapiens
aatgaaactattaaacccttgtggttgttctgcagagaaatgacagcagcattttgaagctatctcactacagtgatgggagcagggttagtgggatagaygaaatgagattattatttttcttttttttcttttacaaatgaggaaagggagcctcacaaaagttttcctttccagagttgcttggggagtgattggaga

SEQ ID NO: 27430 - DNA, 201 bp, Homo sapiens
ttcaggaatccaaacttatcaagtctgtggagacacctagagaaacaggacaaatttaatcttgccaccttcagattgagctttgtccccacgtgggactrcttagcaatcatgatgacagagtgtactttgttccatcatcctgcctagcccactatgtcattagaacagcaacagccattataaggccgtgttgccctt

SEQ ID NO: 27431 - DNA, 201 bp, Homo sapiens
gaaaccataacgtttagcgccagggattaagtagaagactgacttcaccttgtggtcttcattatttttaccatcaccatcatcatgtttattgccattgwattatggtcacaagaaagatgcattcacatggatggtaacacaaacacagtcaatatcaagttatattggtttgagttaaggtgtccactgatgaccttt

SEQ ID NO: 27432 - DNA, 201 bp, Homo sapiens
tttcataccattagaatcttagcaaattagaacgggaagagatcatagaaatcctgtaataccaccccttaatatattgggtgagaaaaatgggatatttygctgctggtcacagcaggcctattttgcaaggtaggcagggcaagtattattattcttactgcataaagtgaggaagctgaagattgcagatgagaaatg

SEQ ID NO: 27433 - DNA, 201 bp, Homo sapiens
tttggacacctattatgtgctagagtgtattggtgataaaatataacatgtgttgaacatgtactgtgtgccaggcactgttctaatgacttcacaggatraacttagttaatccatgcagtgaccctataggatagggtcattattgtttccaatgtatagttgaagcacaaagggattaaagtaagtctcttaaagcca

SEQ ID NO: 27434 - DNA, 201 bp, Homo sapiens
cgactaggccctgtagaattttcagtggtgcaagcattgtttcttgttgtcttcttgaaaatatttacttctttttgcaaatgaagattcaggcaaaatcyggggcgctgacggggggtgtggcgggggggcaccaggatacaagggtctgtgcaccacttgctaaattttgtgtgttgatttagtcaacaactgctcatt

SEQ ID NO: 27435 - DNA, 201 bp, Homo sapiens
agccagaggtcattaccgtttttattaggtgattatattataaatatgagttgggcctcaatcataagcagatcctttatgtgtgtttctgaacatgcagsctccaaagtgctaaattccaaattggaatattgattgtctgatgcctgagttacagctttcctgaaatcttgaattaggcctcaggtcccatgtgtcttt

SEQ ID NO: 27436 - DNA, 201 bp, Homo sapiens
atataacatattacctgatggatttctagtgttcaagggaaaagaaagctgaaacctcagatgctttgggaagacgaatcttaagagagtgagagaggaaragagagagagaaaaaaaaggaggtagggagggaagggaagaaaaggaaagaaaggaagaaacaaaacacagagtcaggggccttaggtctgatttctact

SEQ ID NO: 27437 - DNA, 201 bp, Homo sapiens
accttctgacaaaaatgcttatctattcttaagatgttttgtttattcttttgtttaccttactgccaaaatatttagcctcatcattgataataaaatartcaatttttttcatttatgcaacaaaggtttactgttaaaacataaagcattttttggtttgtttgtttattttaatttgtcacaggtaaacttagcatg

SEQ ID NO: 27438 - DNA, 201 bp, Homo sapiens
tccttttgtttgaatataaagaaaaagaaggctgccagcatttaagatacttcatgttatacgagctcacttgtaacttgtcacagtcccatgaggtagakgttattccctccactttacaaatgaaggaactggggtgcagataggtgagatgctcgcctaagttcatatcggaagttaggaggatttctggggtctttc

SEQ ID NO: 27439 - DNA, 201 bp, Homo sapiens
gagattctgactctagtcatccacgctgtagttaaagaactgtgagctgggagggtggcgcaggggagggggccttctgatatttatgtctcgtctttccytgaaaaaatattgtgtttctactttgctgcttttattcattcccaacctattactgttcataaaatgcataaggtttactttgactccaagtttattttt

SEQ ID NO: 27440 - DNA, 201 bp, Homo sapiens
taatctcagcactttgggaggccgaggtgggcggatcacaaggtcaggaaattgagaccatcctggctgacacagtgaaaccctgtctgtactaaaaaatrtaaaaaattagccgggcgtggtggtgggcacctgtagtcccagctacacgggaggctgaggcaggagaatggtgtgaacctgggaggccaagcttgcagt

SEQ ID NO: 27441 - DNA, 201 bp, Homo sapiens
tgaggcaggagaatggtgtgaacctgggaggccaagcttgcagtgagccgacatcgcgccactgcactctagcctgggcgacagagtgagactccatctcaaaaaaaaaaaaaaaaaaaaaggcagaaggaactggcaagtggtaacctagaagtaggacatggaagaatgggcttccgtacttttctgtcatcagacatt

SEQ ID NO: 27442 - DNA, 201 bp, Homo sapiens; identical to SEQ ID NO: 5480

SEQ ID NO: 27443 - DNA, 201 bp, Homo sapiens
atttcgattctgtggacaagaagtggtgctcaggtatcttcatttttaacagggtcctagatgaatttgatgtgggcatacctagaccacatttgagaaayacttctttatgccaatagactccttatcagtggcctgccttttcttttcttttttttttttttttaagatggagtctcactctgtcacccaggctagagt

SEQ ID NO: 27444 - DNA, 201 bp, Homo sapiens
tttcatattagtgctatacccagggatcatcaattaaccacaatgacagtgacaaaaagctgccttcatattttctcccaggagaattttggctccaagartcaaggctttaatgggattcagaagtcagtgatcacagggcagatgcctcaggtttgaagtcacatcaaaccgagtgtgaaccttctgtaactcgcagct

SEQ ID NO: 27445 - DNA, 201 bp, Homo sapiens
tcataatgctagcttagtgcctgggacatgagaggcatttgggaaaggttatagagaatgaaataaacaaaatggagatgacttagctactgttatgtttyagagcatcgttggcaacctcggcactatggacatgttgggccagataattctttgtttcagaggctgtcccattgtaggatgtttagcagcaacgctggc

SEQ ID NO: 27446 - DNA, 201 bp, Homo sapiens
agtctgtaaactctctgcaggctgagagttggcatttctcatttttatgttcccagcacatagcacagtgcccagcatctagcagttgttgaacatttatraaaaattattgtgcagctggaaagaaaatcagtccttatagggccctactgtgtgccaggcactgttattcaatctgaaagctgaaagggaaggaagagc

SEQ ID NO: 27447 - DNA, 201 bp, Homo sapiens
actttccccagtggtaaaatgaaagacttaggttatttctaaactctcatctagttctggattttattttttgagtgactactaagggagagaccccaagwtaagggctggggtcgtgttgtggggatcacatgagattatggatggcataaaaatgtgtaaatcttattcacctttcttttgacagagagtaacaacagt

SEQ ID NO: 27448 - DNA, 201 bp, Homo sapiens
tcaggattaattgcttgccccagcctattccaaggggaaaaaaaaggatattacagcatcgaacagatttacactctgtaggcaaaagcctgctataaatrggtgtggacatatacaaaattatgagtactgatgttttcatttctgtatcccccatcttgcccaccagtccatgcagcagacctttttggaattccagca

SEQ ID NO: 27449 - DNA, 201 bp, Homo sapiens
gctatttataaaggggaagtatgatatatgcctctgttttgagaaataaacgagaccatgcatttagcaatgacaggacttgcctgggtgcttgctgttcygctgtggtctgagaagaaaggcccgaaggagatgtgcttcctgactacaaggggcacatcgtctggttgggattgtaggcaggaaactcgggatagcaca

SEQ ID NO: 27450 - DNA, 201 bp, Homo sapiens
gtcattgcgaggctcacccgggatggatctgtttccaggctcactcaaggggccgttggtggacctcagttcctcacatgctgttggactgggggtctcakttcttcttaggctgtttgccggaggcttcccttggttccctgtcatgtggcctcctgatagggtggctcacaaatatggcagctggcttccatcagagca

SEQ ID NO: 27451 - DNA, 201 bp, Homo sapiens
aaaattgaactgccgttattaaaatgcttttattaaatctttttttcctttggtagttatgaaagattgtagaatttctgagtcaaataaccgagcactaratgttgcatacataaaagttcttatgatttaggtgtaggaagggtcccagactcactgctaatgctggagcctgaagaagaaacagtggcttttcagtca

SEQ ID NO: 27452 - DNA, 201 bp, Homo sapiens
tcagcccagttaagccgttttgtagcgtagtgaaagaccacagcagctgccactgaatagctttaagttccaacctcactaacctcttccgttttctagcyctctgaccttggacaggtttcttctctcgatctcagggttttcgtttttaaatgatgacgataatatccacataagccatgtttctaaactgcctactaa

SEQ ID NO: 27453 - DNA, 201 bp, Homo sapiens
tacatacaattattgagaagctggtggtcctttcccttatcgtccttttgacagaaacatagcttttcaacatctcacagagtagggcttatcctctttgwagctttattaacccttccaagcaaagatgaatacttgcatctttccgccccagtgtgcgtggtatttatacctgttttagttttgctcacatgtgtgtgt

SEQ ID NO: 27454 - DNA, 201 bp, Homo sapiens
atataaacaagttcatccatttattcattttgttttttaaaatgtatcaattcaatataatttccttctgtgtgctgaccactaggccatctaggtactaraaaatcaaagatgaataagacagtttcccatatgaggaactagagtctctacaaggccataggctatagtagaaaagagggaaggtaatagtcattgtgc

SEQ ID NO: 27455 - DNA, 201 bp, Homo sapiens
caccttctttacaaggcagcagggaactagcgagtgcacacagaggaggtagcttttgatctgattctcgaaggctgagtaggaacttgcctggcttatgraggtatatcaagattgtggaggtgttaggtattctatctaccagagtattttaagctgtgggacagcatctaaagggcataaagttgtaaaattcaatga

SEQ ID NO: 27456 - DNA, 201 bp, Homo sapiens
ggggagggggtgttttgtgttaagaaacagacatccagagaaggaccaagggaattagggagggcttcaaggaccttcaagatgccttaccctaaacaggygtctttccttggtgactcatgcagaggaagtggctggattccaaatatgtgtatagaaaaactgccacggaagaggcagcgatttgttcatgtttgcagc

SEQ ID NO: 27457 - DNA, 201 bp, Homo sapiens
atataggtagataaggagtgacaatttatgaaggcagtatggttttatggaaacagtgtgatatttggaatcagatacacttgggttctagatctggattyaccataggagtgggacccgggacttgatactttatcacttctgtgcctgtgtttccaccactacaaaatgggaataatcatacttaccttcccagattgt

SEQ ID NO: 27458 - DNA, 201 bp, Homo sapiens
accatctatgccttcaggtagccctcaggctcattgaagggcaagatataggtagataaggagtgacaatttatgaaggcagtatggttttatggaaacaktgtgatatttggaatcagatacacttgggttctagatctggatttaccataggagtgggacccgggacttgatactttatcacttctgtgcctgtgtttc

SEQ ID NO: 27459 - DNA, 201 bp, Homo sapiens
cttctaacacattacagtattatggtatctaatagtgttgtgtatccaatatccattttctcactccatcctcagaataacctgagtaagaggcagagctratagtagtgaagctcagagctcagtgacctgctcaagtggaggatagtgtttctgttgtggaaagagagctgcccatctaatttgaaagtggttgagaag

SEQ ID NO: 27460 - DNA, 201 bp, Homo sapiens
aaacaatttgatacttcatttaaacactggtaaatggctcatggaaatacaaagaaaaaaagatttaatgatgatcagataagaaattctctgttcacagratgaatcctgtgtgaaatgttatgaattaacctgaatcatttattcattgaacatgtattgagcatccaccatatgtagggcttatcttaaggtgacttg

SEQ ID NO: 27461 - DNA, 201 bp, Homo sapiens
ttggaagtgaagtgcagggaagtcacagtctctacccagtggcttcattgcaaagtaaaagcaaaaatcaaagaagactgaaatgggcaggctccagcatmtacaggatacatgtggcttatttggaggtcaaaacaaacattacttgagcatctgctctgtgcagggcatcaaaggtacaaacaggataaagcatccacc

SEQ ID NO: 27462 - DNA, 201 bp, Homo sapiens
aggttggcctcaaactcctgagcccaagtgatcctcctacctcagcttcccaaagtttgggattgcagatgcgagccaccaaaccctgctctggttatgamagctttaggaaagaaaagataattctgcccaggatgttaaacaaagattatttataagagatgttgtttgaactgggccttaaggtgggattttgagagg

SEQ ID NO: 27463 - DNA, 201 bp, Homo sapiens
ccgagatcccgccactgcactccagcctgggcgacagagcgagactccgtctcaaaaaaaaaaaaaaaaaaaaaaaaagaatcggagcaaagcttgaagckgcattgctgagatgggtgaatccttcctgaaaggacagagctgctggaggaaggcagataaaaagcagtgaattccaagtgggatcccaacttggaagcg

SEQ ID NO: 27464 - DNA, 201 bp, Homo sapiens
aagcaatgtatttccactgaagttgatgctcacattcccatctagaaaagataaacagccttggagcaaggaaacatgctcatacccatccagttttttctgtttttttttttttttttaactaatgggtatttcctaatgactaattattttcctttctggttaaactggatggaggcaccgtatacaaataagtttcct

SEQ ID NO: 27465 - DNA, 201 bp, Homo sapiens
gcaatgtatttccactgaagttgatgctcacattcccatctagaaaagataaacagccttggagcaaggaaacatgctcatacccatccagttttttctgtttttttttttttttttaactaatgggtatttcctaatgactaattattttcctttctggttaaactggatggaggcaccgtatacaaataagtttccttg

SEQ ID NO: 27466 - DNA, 201 bp, Homo sapiens
caatgtatttccactgaagttgatgctcacattcccatctagaaaagataaacagccttggagcaaggaaacatgctcatacccatccagttttttctgtytttttttttttttttaactaatgggtatttcctaatgactaattattttcctttctggttaaactggatggaggcaccgtatacaaataagtttccttgc

SEQ ID NO: 27467 - DNA, 201 bp, Homo sapiens
tttgaattgattaaataaacattccttttatgaatttggaagagggtctaaaagactagcatagcttcaccaaataatatcaaatattgctaacgtgctaragaaggattaccaaagaagaacatttcaagtccagcaagatttgggagagcacctgtgtgctgtccacctcattcccatcagctgctgggctgttactgt

SEQ ID NO: 27468 - DNA, 201 bp, Homo sapiens
atggttccaccttacttcccacgttatttaaccctactcacctgcctcacactccaaagttccctcctcacacctagcctccatactttcattcaagctgkttcccacccaccacagaatgtcctccctcttgactgtaataaaatatgttgagtgcttacactgtgccagccatcagggtggacacttcatatatatgat

SEQ ID NO: 27469 - DNA, 201 bp, Homo sapiens
tcctgccctgctctgctctagtaggtacctattcaaatgtccccaggaagactattggtgggccctgccatgaggtcagatagtgagagtgtatgtacacrtgtgtgtgtgtgtgtgtgtgtgtgtaaacaaaagtgtatgttggagaggagatagcaccccttcttttcatccagcaatatttttcaaacctctaacatg

SEQ ID NO: 27470 - DNA, 201 bp, Homo sapiens
ttcttttagccatacttaacaaacattgtcctgagatagaatcctgaatttctagagtcttggagttaacagcaacattaaaaagaggttatttggtttcrcctctcctccaatgcaagaatctctcaagagtatttttgataggtgtggatgaacattgctgaatattgggcttgagctcacatacctacaatgacagac

SEQ ID NO: 27471 - DNA, 201 bp, Homo sapiens
cccctgataaacccatcagatcttgtgagacttattcactatcatgagaacagaatgggaaagaccagcccccatgattcaattacctccccgtgtgtccytcccacaacatgtgggaattctgggagatacaatgcaagttgagatttgggtggggacacagccaaaccagatcaatttccttctaggtactcccacagc

SEQ ID NO: 27472 - DNA, 201 bp, Homo sapiens
aatagttgaagagaatcaaatcactggaaaagttgtagatccagttgagacaagtggtccaccggcagtctttcagcctcagtttaaacattcaaagctgygataggcttagcacttatctttgtaggtgaattatacctgaccattataataatattcataatagtaactgacactgtcacttacgggcttctactatat

SEQ ID NO: 27473 - DNA, 201 bp, Homo sapiens
atctgattataacctaagtgacatacatcacttccaggccaaagtgcataagcattggatgcaaccctccagctccttcttctcctgtctggataactatraggctttgggtggtaatgtagaagcatccatcagctcgggctcagtatgactctgtgcatgagtggccctgccagcccagatggtacctgtagcttgaat

SEQ ID NO: 27474 - DNA, 201 bp, Homo sapiens
ctcagaggagccaagtagagcttggtcaaggacagaatctttgtcaacagcgcatcctactttccattgctggtctattatgatccctgcaccagctctgycaagtaggctagccactgacattcttgcacagattcatcagtggaagcccggacaggttaaagataggtggctagataatgagtcattgcaaatcagaat

SEQ ID NO: 27475 - DNA, 201 bp, Homo sapiens
cccattcccggaggagggcagagagcagtcagccgcagctgcaccagctgaagctgccgggaggggacagctcctctgggcactgcgcagttgtgcaaacygagggatggtgctatggttcattggcaagatgcgcctcacagagaaaaggctgtaacctcaccactgaggacagatggcacaagacactgctgcccactg

SEQ ID NO: 27476 - DNA, 201 bp, Homo sapiens
agctggatggctctagcgattgtcattctaccctttatcctgggctaaaagcttcttcctgggaacttggagttgcagaacggcagggctatgcagctagraagggttgaagagatcttctaaccttatccccttcattttacagatgagcaaactgagtcccagagaggacatgtgactcacccaaggtcacaaagggga

SEQ ID NO: 27477 - DNA, 201 bp, Homo sapiens
atcttctaaccttatccccttcattttacagatgagcaaactgagtcccagagaggacatgtgactcacccaaggtcacaaaggggaaagaaagaacagcrctgactgtgtttaaaagtgcttaacacagcagctcatggctgtgtttctggccctgaacccaagcgcagtccaaatgggtatttaataatcctcagaaca

SEQ ID NO: 27478 - DNA, 201 bp, Homo sapiens
cctagattctgctagtctctgctatctccacaaacctcccgagctctacctccctggcgatgacttgaaaattaattaagtgatgcttcagagtaacatakctattgctgaaacattagaaccttttgttgatgcttaagttttcagtactaagtgtcattttgtcataactatattgtgaaggcaactacatgggaccat

SEQ ID NO: 27479 - DNA, 201 bp, Homo sapiens
tttgattgctgtgggtggcatctgaactctaaactaccatctccctgagacagaaaatggcatctccaccacctcttctggtgggcttcagtgatacaacycactttattccagccacgtctgtccttctcagggttctttcaatttgtcgatgagtagaaggttgcataaaatgtattaaagcttgtgtataatgtgtta

SEQ ID NO: 27480 - DNA, 201 bp, Homo sapiens
tcactgaaaatcttgtttttttaatagcaatatatttatgtatgtgctttatcttaatatataaccaaagacatttcatgattataattccaatattaatyagtacttacaataaaccaggcatacacttgcatgtcaatgaaacttcctcaaagcccaggtcagcctcctgctacctgagcaggtcagttctctttgagc

SEQ ID NO: 27481 - DNA, 201 bp, Homo sapiens
actgaaaatcttgtttttttaatagcaatatatttatgtatgtgctttatcttaatatataaccaaagacatttcatgattataattccaatattaattastacttacaataaaccaggcatacacttgcatgtcaatgaaacttcctcaaagcccaggtcagcctcctgctacctgagcaggtcagttctctttgagcct

SEQ ID NO: 27482 - DNA, 201 bp, Homo sapiens
aagagtattcaagcaatggatcaatggttctataaggtattcctatatcgtgaaggggattgccctagtggacattagaattattcatctactctccaatwccatttgtcaccatgttcattatataggccagtatttatctcaatatcttgctcccagtatctcagctaccatgtcaggtaccccagtggccccattcct

SEQ ID NO: 27483 - DNA, 201 bp, Homo sapiens
gaccctgggcaagttaattaaaccttctgtgccttggtttcctcctcttggaaacaaggcgagtaacagcacctcacgtttgttgcgataattaaatgagktaatatatgaatgcacatagaatggtgtctggttcatacagaggaagttccatctaagcattagctataattattattgtccttagtgacctctgcctgg

SEQ ID NO: 27484 - DNA, 201 bp, Homo sapiens
agagtgggaaggagaaagggtggggtgggtggaatgatgaggcagactcctagaacagtccagccttgctggtgttaaaaactgggggaaggtccaagagyaggagctgctttgactgagcatctgctctgtgaagactacaatgcatcttcagcctcttctccaggtgacttcatcccttccctaaactaatatcaccca

SEQ ID NO: 27485 - DNA, 201 bp, Homo sapiens
ccccatgattcatttatctccacatggggattattacaattcaaggtgagatttgggtggggacacagccaaaccatatcactgggtcagtcacagcactrctctgggccctctttcaaacctgtaccagattagggacttggaagacctgggttttagtcttgctgcttaaccagccacattggaagctatggacaagcc

SEQ ID NO: 27486 - DNA, 201 bp, Homo sapiens
ctccacctgcagacccagcacccccttcttattacaaatatttgcaatacctcctttcacaccttgaaatgaatttcatagataatgtagtctagctacayaatttttcaaaatgaatataattctctaactgtagtataaggcagaaagaaaagaaagagaacttgtaataaaaatatatgtatttaaataaggaaatac

SEQ ID NO: 27487 - DNA, 201 bp, Homo sapiens
ttctagccacccctagggggcagtagcactcccactgagaaccactgggccatatcaaagtaaaccagaaaacaagacagagttgccggattcttcatctrttggtagatttaagccactacattattatgccatgggcgaggcaagctaagcaagcttcacgtttgaaatttcagctccagggcctcttcacccctcttg

SEQ ID NO: 27488 - DNA, 201 bp, Homo sapiens
actttagaaacttttagcaactacagaaatgtgattactagcattctagtttttgcttacagatcatctcctcagagaggatttccctgaccacttctctrggatataggctctatgacagcaaggactttgtcttgttcatcttggcatccccagtccctggcacacagtctggcacttagttggtgcttgatacatttc

SEQ ID NO: 27489 - DNA, 201 bp, Homo sapiens
tacctgagtccatgcatccttctttcccaggacaccagggaaacacctgactctcctttttcattctcccaggttacgttgcaatgggcgctgtcctcccrtccttctggggtcagcagcccctcgtccaacagcagatggtcatgggtgcccagccaccagtcgctcaggtgatgccgggggctcagcccatcgcatggg

SEQ ID NO: 27490 - DNA, 201 bp, Homo sapiens
ttctaaagattaagacacctgcataaataaactcctgcttatgctttccattgatttcattaggtaagtctgagcagtatacctgccagaactggcaactyagcttgtgttctcaacctttagtaagcaaaaatccacttcaaatacaattcaggatctaattaagctaatatttattaaacatctactacccttcagggt

SEQ ID NO: 27491 - DNA, 201 bp, Homo sapiens
ctaatatttattaaacatctactacccttcagggtgtttgcatatagctttaaacccactttcaatacagtttgttccatagtcatctcctgaaacaaaamagatttcattgcaaatttttttccaaaaacttgctgttttattttgaacaaaattagaaccagtctttatatcctctgacccatcagtatccccttaaga

SEQ ID NO: 27492 - DNA, 201 bp, Homo sapiens
accatcatcattatcatcatcattatcatcatcacatatatccaattaatgcacgctccccactctcttggattttatacatttagctttcatgtataagrccattggttgggaggttttgctttgtactttgtcttcagataattaattttcaatatgtgtcacaacagctttggaagggaaaaaaagaaaaaagcctgc

SEQ ID NO: 27493 - DNA, 201 bp, Homo sapiens
cctaactagactggacatttctggaaggctgcgggaggggctgctttttacctatgggtccttacataataggcgacatataaaaagtattgtaaatgtgygttgaaataatggataaacagaattttcctccagaaaaaatgagacttgttattgaagggccggtgctcatgtatttcataaacaagtcaagtcagttgg

SEQ ID NO: 27494 - DNA, 201 bp, Homo sapiens
aatggagtctcattcataatactcttgacacttcttctgatcctttttccatcttgtcatgcttgtgtcttgttggatggaacaaagtcagccaggtataygttttcttccttctttgatttggaaatgcagtcattttgggggttcacatctaatgtttttctttcatgtaaagggattataggtattcatgttttgcat

SEQ ID NO: 27495 - DNA, 201 bp, Homo sapiens
ctctctgtgtgtgtgtgtgtgtgtgtgtgtgtgtgtgtgtgtgtgtgtgtgtttattcctctgcctttaaaaagaccagaagaatgcacagatggattagkgcaacattgctccagaagcatcttatatagttattttcatctgatagcatcaagacacatttgtggggtcgtgagctgtattgtagtcttcttgttttcc

SEQ ID NO: 27496 - DNA, 201 bp, Homo sapiens
aaaaaatgcaactttccagcaacatgaaattgctgtctccctcttctctctctctcctctctctgtgtgtgtgtgtgtgtgtgtgtgtgtgtgtgtgtgtktgtgtgtgtttattcctctgcctttaaaaagaccagaagaatgcacagatggattagggcaacattgctccagaagcatcttatatagttattttcatct

SEQ ID NO: 27497 - DNA, 201 bp, Homo sapiens
gctttgttacatgactagggaagtttgggctgacttctgctgtttgaaattatccttaaagtgtacctgaatgagtctgatctggtttattaaaaatcackaagacattgtggagcctgatctaaactaaacttatctaggagagacaaatgaatgataggaattgtgatcagagtcatccttcatattaacactgcattt

SEQ ID NO: 27498 - DNA, 201 bp, Homo sapiens
cctctcagaagtcagggtttagaaatgctcttccacataatggaattacattttctctaccctcctcacctggatgaatttagtgcttctttcaagacccrccaaaaatatttctcctgttttctcaaactcttttggtcagaattaattcttcccttttttgttctaactgcatttcctcaaatttaatttattggttta

SEQ ID NO: 27499 - DNA, 201 bp, Homo sapiens
tgttcatcaatataagcaccagctacgggcagttcctgaaatgcttgcctgaatcagatccctatgctgaagtgaaaaaaccaaaaattattttaatgaaycactggcagtaatgactttgcaatatatctcagtgatctggcattactctaaatgctcatttagctgtcataacacccctatgagttaggtcctattata

SEQ ID NO: 27500 - DNA, 201 bp, Homo sapiens
gagatggagcctcaccatgttgcccaggctggtctcgaactccggggctcaagcagtcacctgtctccatctcccaaagtgctacgattacaggcatgagycactgcacccggcctcctgatttatttctttgttcatcaatataagcaccagctacgggcagttcctgaaatgcttgcctgaatcagatccctatgctga

SEQ ID NO: 27501 - DNA, 201 bp, Homo sapiens
gtggtagttttctggcccagatctatttcttttgattttcattttttgagaaggggtctcactgtatcacccaggctgtaatacgatcatggctcactgcygcctctacttccctgggctcaaactgggactacaggtgcatgccaccatgcccagctaatttttatattttttttttgtagagatggagcctcaccatgt

SEQ ID NO: 27502 - DNA, 201 bp, Homo sapiens
acaagtgagtgtgttccaataaaactttacctagaaaaacagcaattgcccatccagatttggcccaccggtggtagttttctggcccagatctatttctyttgattttcattttttgagaaggggtctcactgtatcacccaggctgtaatacgatcatggctcactgctgcctctacttccctgggctcaaactgggac

SEQ ID NO: 27503 - DNA, 201 bp, Homo sapiens
tagctcaaaagtagccatagaaaatacacaagtgagtgtgttccaataaaactttacctagaaaaacagcaattgcccatccagatttggcccaccggtgrtagttttctggcccagatctatttcttttgattttcattttttgagaaggggtctcactgtatcacccaggctgtaatacgatcatggctcactgctgcc

SEQ ID NO: 27504 - DNA, 201 bp, Homo sapiens
ggagctatgcaaacaagacttgcagaccacttgtcagaaagattaccagggcgattcacaaattgcatagggagatggacaggagagctctggatgtcccytccaaacctaagactctgtattctccaagttgggagtctttctggtagattctcatccttgcctgcccccttctcccttttcgtttagtgaaacttcttt

SEQ ID NO: 27505 - DNA, 201 bp, Homo sapiens
atgattacagagtctggcaagtccaaaacctgcagcttaggccagcagccttgaaactcaggagagccaacagtgcggatgaattctaaaggcggtctctyggactgttctctcttgtttgattctctcttgtttggggctgctggtctatttgttctgttcaggccttcatcttatttgaggaagctcacccacaaataa

SEQ ID NO: 27506 - DNA, 201 bp, Homo sapiens
attctgcgagaagcccaatggcagagacgacctataaacctttgttaaatgatgcccactccctgtccccatctgatgctcctaagggagggagcctggcytgatactttcacaattagagcaggttcccatgggcttgtccctggggccattctcaggcacccttagccagcttgcagttgaagtctggttgctttgttc

SEQ ID NO: 27507 - DNA, 201 bp, Homo sapiens
cacccagatgaatatataagcctttacagagtactgttgaatgaggattgtttcaagtaggtttagtataggaaaataaccgttaagatcaccattacccrataggatggtgaacattatttgttgaagctcagataatgaaggcatgaaggtgaattataaaagattttcaaattactaattatcaatctcagtttactt

SEQ ID NO: 27508 - DNA, 201 bp, Homo sapiens
aaggtttctggtgaggataaaatgatatactctaggtaatgtgcttacacagtggctggcacatcagtggatctcagtcaatcagagtgagaggtgacagkgtgctggcagccctcacagcccttgctcgctctgggcgcctccttggccttggcgcccactctggccacacttgaggagcccttcagcccgctgatgcac

SEQ ID NO: 27509 - DNA, 201 bp, Homo sapiens
tgggcgcctccttggccttggcgcccactctggccacacttgaggagcccttcagcccgctgatgcactgtgggagccgctttctgggctggccaaggccrgagccagctccctcagcttttggggaggtgtggatggagaggcgtcggtgggaaccggggctgcacaccgtgcttgcgggccagcgcgagttctgggtgg

SEQ ID NO: 27510 - DNA, 201 bp, Homo sapiens
gggccagcgcgagttctgggtgggcgtgggctccgcggaccccacacttggagcggccggccggccccaccggccccaggcagtgaggggcttagcacctrggccagcagctgctgtgctcaatttctcgccgggccttagctgccttccctcagggcagggctcgggacctgcagcccgccatgcctgagcctcccccga

SEQ ID NO: 27511 - DNA, 201 bp, Homo sapiens
ctcttaatgtttgggaaatgctgtgaatacagcagacgagatcagttttttgttctaaaagagtttaaattgagagtctaacagctcaaaaaaagaaagaraaaaaaaatcaaaagagttttctctctctgtttttgaaggaccctttgtttcatacacacacatacactccaatcctgggtatttgaataaaaacccaaa

SEQ ID NO: 27512 - DNA, 201 bp, Homo sapiens
tgttgcaactactcaactcagctgttgtagctcaaaagtagccatagaaaatacacaagtgagtgtgttccaataaaactttacctagaaaaacagcaatygcccatccagatttggcccaccggtggtagttttctggcccagatctatttcttttgattttcattttttgagaaggggtctcactgtatcacccaggct

SEQ ID NO: 27513 - DNA, 201 bp, Homo sapiens
caagaggcggagcttgccgtgagcagagatcgcgccactgccctccagcctgggcgacagagcgagactctgtctcgaaaaaaaaaaataataattaattaaaaaaaaaaaagaaagaagccgtatttttttcctaagtcagtaagaaggaagtgagcagtaacattacagtaacagacatgtcctgagtgggaactgcat

SEQ ID NO: 27514 - DNA, 201 bp, Homo sapiens
tctacggtgaatggcctcaactttgttctttcactgcaccatatatgataaaggttaacagagaaacccgctcatataaacaattacagcataatgctacrttgagaactactagtctagtgaccaaagcaggaaaggataatgagcaagtttttgaatcaaggttctagattatagatacacatgtagatctacctatat

SEQ ID NO: 27515 - DNA, 201 bp, Homo sapiens
gctctgccagtctgctggggctcaatttacttaataagagataagctcttgggcctgaagataaggctgggcttttaaggggctgctattaggcgcctcattttttttttaagggcttgtaagtgttccatagctatttctcctgaattgcagtgtttgttagtacttcagcttggcccagccagtggtctcagcttttat

SEQ ID NO: 27516 - DNA, 201 bp, Homo sapiens
catactgctcaaagggcatggtcagctagctttccaggggcatctgcagagaaggttcattcagaagcatttccttctgtgcgaatccctaattctaacayaacaaaaagaatgtggtgcatacagcttattctcttttgtagttctttaaggaaaggataaacttgaagctagttcaggacctgaaagtaacctattttg

SEQ ID NO: 27517 - DNA, 201 bp, Homo sapiens
attgaagacccatttttgttcaactatgtcccattttgggtcaaatgtattttgctttttttaatgatcggggcacgtaaagttgctctttaacactgtgycttaaaaaaaaaatgtccagatctcacatagctgtattttcctgtctccagaagaaagccaggaaactcttaaattcttaaattcacacacttaacagat

SEQ ID NO: 27518 - DNA, 201 bp, Homo sapiens
cagcagagtgttcaaaccttttatgtgttcggtgctagcgaccagaataagggaagcacagcatggtgtgtgagagcccactgaagtgcgctggcattttytgaatcaacagacctctcagcgcttttgctcttgctgtgcctttctctatcccaccttatagctcactaaaatactttgggtggtctagccccacaagaa

SEQ ID NO: 27519 - DNA, 201 bp, Homo sapiens
acatctattcacttacacacaaaaaaaagattatttatagaacaaataaatgactggacactgggaaatcacatgcgtctggcacggggatgagatggtgaccatggcacagccctcaccctcagaaatttatgtatagcccccttagatgctcacaatgggcagatggggcaactgaagttcagagagcaaagcgactgt

SEQ ID NO: 27520 - DNA, 201 bp, Homo sapiens
cgtaaagtcaaagaacaatccacaatttacttttgccgtcagccattcaaattaccaagatggaaacttaactagaagtgttttttcccccaaatgtggcrtcctgggatctgtgtcaaaggttaggaagaaaagttaaaacaaaacaaaataaccaaaacaaaacaaaaaaacagcttaccaaagggattcagacgatct

SEQ ID NO: 27521 - DNA, 201 bp, Homo sapiens
catctattcacttacacacaaaaaaaagattatttatagaacaaataaatgactggacactgggaaatcacatgcgtctggcacggggatgagatggtgaccatggcacagccctcaccctcagaaatttatgtatagcccccttagatgctcacaatgggcagatggggcaactgaagttcagagagcaaagcgactgtc

SEQ ID NO: 27522 - DNA, 201 bp, Homo sapiens
caagacataacaaagaattgagctgctgatgacactgaagaaaggtttcaaagacacagatgatcaagcccacataattagaattactgtttagatatgcaaaaaaaccggaaaggcaacactggaaagggagaatgggttgcaaaactagcgccaatataaagtacgagtaatggccaataaaagcatatctaccaatga

SEQ ID NO: 27523 - DNA, 201 bp, Homo sapiens
cacatctgcctcccatacatggcagtgactgtgtggacgtgcactctcttttctgacttagctcctttcctcagagcccagcactgggccaggcaagtaayaggtttgggtaaatgttcgtggaatgggaactgatcaaatcagagtgtgtccctaggaagtatggtgaaaggtctggaagaaaaaaatagataatctctc

SEQ ID NO: 27524 - DNA, 201 bp, Homo sapiens
atctattcacttacacacaaaaaaaagattatttatagaacaaataaatgactggacactgggaaatcacatgcgtctggcacggggatgagatggtgaccatggcacagccctcaccctcagaaatttatgtatagcccccttagatgctcacaatgggcagatggggcaactgaagttcagagagcaaagcgactgtct

SEQ ID NO: 27525 - DNA, 201 bp, Homo sapiens
catgtcatcagtaggctactcaggatgcctcatcactcggggtagactaatagaagtcttttgtacattaagaaaaagttgatcatgaattcctgtctctrccctgtggagagccagtgggaggttcagctgtgtagggacacatctgcctcccatacatggcagtgactgtgtggacgtgcactctcttttctgacttag

SEQ ID NO: 27526 - DNA, 201 bp, Homo sapiens
ctattcacttacacacaaaaaaaagattatttatagaacaaataaatgactggacactgggaaatcacatgcgtctggcacggggatgagatggtgaccatggcacagccctcaccctcagaaatttatgtatagcccccttagatgctcacaatgggcagatggggcaactgaagttcagagagcaaagcgactgtctga

SEQ ID NO: 27527 - DNA, 201 bp, Homo sapiens
atggctctccctctgtgctcgagggcactcacataaggccccatgttctagttattcatatacatgttgtcacctccctaagatggtaagtgtcccaagcwcactgacagtatctctttcactttataattctctctgccgcctatgggccttgctcaaagggtgcactcgatagtgttgactgaatgaatgagcaaatgt

SEQ ID NO: 27528 - DNA, 201 bp, Homo sapiens
tgcgctgtatgtttcttgcatggacttgcagacactctgtaacggtgtttccagtctccagcagttcatattggaaggtgagctttcacatggacaagccytttgcgttgccaagtagtagtgatattacaagtttgaaagacatttagatgataattccaaaggccctcttatctccaaatccatcagaagctacctata

SEQ ID NO: 27529 - DNA, 201 bp, Homo sapiens
tgccagagaatcacttgagcctgggaggttgaggctgcgatgaaccaagattgtgccactgcactccaatccaggcaacagagtgcaaacctgtctcaaaaaataaataaataaataaataatagtgctctgtgtatgaaaacactgaacagcactgtgggtttgtgtacccctagattcctgtgttgaagccctaagccc

SEQ ID NO: 27530 - DNA, 201 bp, Homo sapiens
gccagagaatcacttgagcctgggaggttgaggctgcgatgaaccaagattgtgccactgcactccaatccaggcaacagagtgcaaacctgtctcaaaaaataaataaataaataaataatagtgctctgtgtatgaaaacactgaacagcactgtgggtttgtgtacccctagattcctgtgttgaagccctaagcccc

SEQ ID NO: 27531 - DNA, 201 bp, Homo sapiens
ccagagaatcacttgagcctgggaggttgaggctgcgatgaaccaagattgtgccactgcactccaatccaggcaacagagtgcaaacctgtctcaaaaaataaataaataaataaataatagtgctctgtgtatgaaaacactgaacagcactgtgggtttgtgtacccctagattcctgtgttgaagccctaagccccc

SEQ ID NO: 27532 - DNA, 201 bp, Homo sapiens
cagagaatcacttgagcctgggaggttgaggctgcgatgaaccaagattgtgccactgcactccaatccaggcaacagagtgcaaacctgtctcaaaaaataaataaataaataaataatagtgctctgtgtatgaaaacactgaacagcactgtgggtttgtgtacccctagattcctgtgttgaagccctaagccccca

SEQ ID NO: 27533 - DNA, 201 bp, Homo sapiens
atgattgctctttgtatgacttgtgtaatgtgtctagatgggcacaagctatgattgcttctctctccccagcattactagatggtaatgcagtggatttktgtgagaattctctcaaataaacaggccaggatacgtgagataatttagggcccacacttgagagacctccgtggaactgtgtaagatgttactattaac

SEQ ID NO: 27534 - DNA, 201 bp, Homo sapiens
gtttagaattttgactctatgtgggctctttaggttgttaatgacaaaagtctagcttattctggcttcagtctgcaagagagttttctggctcacataamcaagtccaggtgtagcctagttgcagctatggctagagccaagagctccatcaactgtttccacaccacagctttgccttctcagtgctggctttgttag

SEQ ID NO: 27535 - DNA, 201 bp, Homo sapiens
ctgttgagtatttgaaatgtagctagtgagactgagaaactgaaaaattttctacatttaattttatttaattttactttaaatggccccgtgtaggtaayggctattatactggacagcatgggcttatatcattctggttcaaagaatagagtgaacgtaggctgggattttgttttccatactgacatatccataaaa

SEQ ID NO: 27536 - DNA, 201 bp, Homo sapiens
tagggagaattaggtggtatatccatgccctttctactcaacctgtggtccatggaccagcaggcttagcatcacctggcaaggagttagaaatgcaaaaaaaaaaatctcagaactctcctgagacctacagaatcagaagctaaactttagcagatcactagtcattcataaacgtattaacattccagaacccttgag

SEQ ID NO: 27537 - DNA, 201 bp, Homo sapiens
agtttattctgtcaatacattatttttcattaaaaactctcattattcccatatctctttaaaaacagtttctaaatgtcctttttatagttccttaatakttttttacatgcctgtatcataatatacccttctctttgtatattaaagtcattgttaatttttttttaacataatgctttgatgcgtatcttaacactt

SEQ ID NO: 27538 - DNA, 201 bp, Homo sapiens
tttttatgattccttccatctctaagattctgtgatttcaagtgtattcagatactggatttgaagtgacctttacacgcccatgtataaaaagtctgatrgctggatgcgaaggcttgggagtcgaaagagtagtcagggtggcagatgtagacttgaacatcctctgccaagaggtgagagttgatgccactgggttgg

SEQ ID NO: 27539 - DNA, 201 bp, Homo sapiens
taatcttgccaagtcttaattttctcatctgtgaaacgggaataaagatatcatctattttatctgctattttgattaataaaacagatattgcattaagyatttagcacattgtcacataaaaatgtttttaaaattagctattatgattatttttctattttttgctagacgtgttttactttgtgaagtttattctgt

SEQ ID NO: 27540 - DNA, 201 bp, Homo sapiens
acatagggttttgtgattaaatgagattatatgtatagggtacttagaataatccttagagatcttcaacataggaagcattcaacaaatgataatggtgwtatatataatattttataacaaagaaacttgtgccttggggtccttattgtaggaattggtgttgattttataatcccataatgtgtgaacatgatctat

SEQ ID NO: 27541 - DNA, 201 bp, Homo sapiens
gctagtataaaactgttaggatataaaaaagttgttcacaataaaaacaacagaaaattcattggctatacatcttttgaatgtgtgtgtctctttgggtkttcattagcgtctagcaatatactttgagaaattaaatttgaacagaagcttcagcagaatatgaaaacttctagtgttcataattaacccattttaagc

SEQ ID NO: 27542 - DNA, 201 bp, Homo sapiens
ctcaacagagttttcaaaatgacaggcacaggcttccacatttgggctcagtcccaactctccttccgattgcagagagaggttgctctggaaagtcatakggaagggccctacagatgacctcagacaaacaccctctcaacacccacgtctagaacccttcagaattttctggagctgcctccttctgccctggcattt

SEQ ID NO: 27543 - DNA, 201 bp, Homo sapiens
caacttagtagttactgtggaattgagtgaatgtcataaatatttatttatctttttcatagctagtataaaactgttaggatataaaaaagttgttcacmataaaaacaacagaaaattcattggctatacatcttttgaatgtgtgtgtctctttgggttttcattagcgtctagcaatatactttgagaaattaaatt

SEQ ID NO: 27544 - DNA, 201 bp, Homo sapiens
ggcggatcacgaggtcaggagatcgagaccatcctggctaacatggtgagaccccgtctctactaaaagtacaaaaaattagctgggcgtggtggcaggcrcttgtagtcccagctactcgggaggctgaggcaggagaatggcatgaacctgggaggaaaaggtgtcagtgagccgagatcgcaccactgcactccagcc

SEQ ID NO: 27545 - DNA, 201 bp, Homo sapiens
atttgacagtaagaactgcctcatgaggccaacccaaaaaggaacagcagatataaacatgtcgccattcttgtcattttgaaacaacattatttaaagtrtcccagatagttgggaaaagaggaactcttttcttctaggccacttgtttctcctctagcagggaaagatctttgcaggtgttgcagagacagcaggagt

SEQ ID NO: 27546 - DNA, 201 bp, Homo sapiens
ttcccacaagacccaggaagagacagggaagcacaaataaacaaataataatgtggtggctaagtacaaccaaagagatatttgtcgaagtaaaaaataaratatagggatgaattttgccagagtaagagtaagggagggttagtatctaagtattttgagggtgccttgggattttctggtgagtctttcatgcattaa

SEQ ID NO: 27547 - DNA, 201 bp, Homo sapiens
ggaacagaagtgtatgagattcttagtaagcgtctaacataggtttttgattgaaacagaaatcaagtagccttcctggcattcctgttcggagtagagcyagcatcagatagtgagaaagaagagtgggggtcaatccaaagcagtggtgagcctaacagaccttctcctgtacttcacctacagagctgttcagaggac

SEQ ID NO: 27548 - DNA, 201 bp, Homo sapiens
aggcaaacaatgaagggagacacttgctgtttgggattagctcctcatttctcctaccgtatcccatccatcctggcccttgcagaaaattgagagtgackcagctggcggtggactctgtattggcaaggcaagctgtgtgagtgttgggtgcccagggagtagggcagcagcagtgggaccatgcagtcccttttctgc

SEQ ID NO: 27549 - DNA, 201 bp, Homo sapiens
agtcaggtggaactataagtgcaataaacctctttcaattgtaaattgcccagtcttgggtgtgtctttatcagcagcatgaaaacggactaatacaatayagaaggatattctataacattggttaatgctgaaactaaaatgtcataaaggaccactgagggaagctgagaatacccccatcctaatatacagcctctt

SEQ ID NO: 27550 - DNA, 201 bp, Homo sapiens
ttggggactggactagcattgctttctttaaaaaataaaggtcatacagcataggctcaatctaagtttgacacctgcctctgcctgcctttccaaggtaygtgtctctttcttaggcctcttgagcaccggattctgttaaacaccatacttcattatgtcttcaattgttctgttccacatctattgatctaggttcct

SEQ ID NO: 27551 - DNA, 201 bp, Homo sapiens
gatgataatcctccacttaccttatatggaatagtgattctgcccagatactggactgagtagtttccgtaacttattactagtgtccttttccatggccrtgcgctttagagttcttgagtgaaataagagaaaaggcaaagactgctttggtttgcagagtcatgggagcttttattatggcttcagtgcctggatgtc

SEQ ID NO: 27552 - DNA, 201 bp, Homo sapiens
ggcagctaatccaactggagatggaaaccctttcaggagttccaatgccagtccttcagtggctcaaccctgaaacctcaacagagttttcaaaatgacakgcacaggcttccacatttgggctcagtcccaactctccttccgattgcagagagaggttgctctggaaagtcatatggaagggccctacagatgacctca

SEQ ID NO: 27553 - DNA, 201 bp, Homo sapiens
gatttagtaaccattatatgaatatgctacaattttaaaactccattctataacatctgggtttgaagttctatgctatgaccattttttttttttttgcrtatatcttggtgtacataagcttgcaattatggaggatggaattgctgggtcagaggaagtatgtatatttagctttaagtagggtatctatattttcag

SEQ ID NO: 27554 - DNA, 201 bp, Homo sapiens
aagcagagaaaaagaggctcagggagcacagaacagaggcagctaatccaactggagatggaaaccctttcaggagttccaatgccagtccttcagtggckcaaccctgaaacctcaacagagttttcaaaatgacaggcacaggcttccacatttgggctcagtcccaactctccttccgattgcagagagaggttgctc

SEQ ID NO: 27555 - DNA, 201 bp, Homo sapiens
tgtcattgttatctaggaacaaagctagtagaagactatcttaggccagatgatttcagaggccccttaaaattacttcagaaaatctttaccccccatcygcaagtcttgaaacctctccatcagagctctgcttttttagtttgaagtctttgctttcagcagaaaagcaaaaagtcctgggttgctgacacatgaaaa

SEQ ID NO: 27556 - DNA, 201 bp, Homo sapiens
gaccttggacaagaatattaacccctctgagtctaagtttccttatttgtaaaattagaattataatattatcctacagggttgtactgaagattagataytatataaataaaaggccaactacactggcaccaagtagacagtaaataaaggtaagatattattttgaaaagcctgagagaagctatatttattttcaat

SEQ ID NO: 27557 - DNA, 201 bp, Homo sapiens
catggatccatcctctcttttcttccttgcctccttcccttcttcccgtctgtgtacctgttcatctgtcctttttttccatctgttcatccctttctttktgtgtgtgtgtgtgttttgtgttttttttttctgagacaatgtcttgatatgttgcccaggctggcctgggactcctgagctcaagcgatccttctgcct

SEQ ID NO: 27558 - DNA, 201 bp, Homo sapiens
cagtcctggaggctggaaggtccaagatcaaggctccagcagattcagtgtctgtgagaatccacttcctggttcatagatggcaccttctcactgtaacytcacacggtggaaggggtgagggacttctctgaggtctttcctgtaagaacatgaatcccatcaccttccaaaggctgcacctccaaattccatcatcct

SEQ ID NO: 27559 - DNA, 201 bp, Homo sapiens
ttctcatccttgcctgcccccttctcccttttcgtttagtgaaacttctttctgatcaatgtccatttctataacccactcttccaggatcttgaaaccaccccccccccccatctaaatatggcttctgaaacctatgcgtgttagttttaatgaaaaagcatatccagatgcaggcccgttttcaaaaacccaagtcta

SEQ ID NO: 27560 - DNA, 201 bp, Homo sapiens
agcaaatgctgtaactcctttccccttctctcacatgtttcgttgtgttttctggaatgaaaatatatacagtactagtttaggttgatatgaaaaaggaygtctcatataaaacaagattaaggaaaagaaaagacaaccacttggttaacctgataccactctgatattttctgtgtgctgtctgtgggttcatgtgag

SEQ ID NO: 27561 - DNA, 201 bp, Homo sapiens
cagtcatcccttatgacatcagtactggtgataaaatttcaaattcctcttcttccctgagcaaatgctgtaactcctttccccttctctcacatgtttcrttgtgttttctggaatgaaaatatatacagtactagtttaggttgatatgaaaaaggacgtctcatataaaacaagattaaggaaaagaaaagacaacca

SEQ ID NO: 27562 - DNA, 201 bp, Homo sapiens
tgtggagtgtgaataacaggtgctggggcctgggggccagagtctggctgctgacacactactctggcatttcggatagaccacagttatttggctgcccratgggcaaattttggctggtagcccagttctagcttgacttttcaggcatatcttaggtcagtgaatgttattcccactttcaaatgaggagccacaggc

SEQ ID NO: 27563 - DNA, 201 bp, Homo sapiens
agtagggaatggagctaatgagagggtgatcgaccagggtagccgctagtcactttgttcaagaggccgaggtttttgaaagacatctctgggtttcctayggagagagaagggatctgcaaaggagggtacagttctcttctggttagacaccctgtggagtgtgaataacaggtgctggggcctgggggccagagtctg

SEQ ID NO: 27564 - DNA, 201 bp, Homo sapiens
tttgtctttgcaacacaacgcccgttgggtctgatgttggtctgatagaagaaggggaacgtacttcaacctgtgttaaggaaaagattgctttgaacaargcactgcctgtgttggctctaataatctggtaagatctacggtgaatggcctcaactttgttctttcactgcaccatatatgataaaggttaacagagaa

SEQ ID NO: 27565 - DNA, 201 bp, Homo sapiens
gccaagaagtggtgtgtgtgtgtgtgtgtggtggttggcaggaggtggggaagaacaactcctatcattctaagtcagctacacagagtttgatgtctgatttttttttcttttcattttcacattctaagcttggggaatttgatgacttaaatggctgcctcagtttcccagtgtgctcaggcttcaggaatccaaact

SEQ ID NO: 27566 - DNA, 201 bp, Homo sapiens
agttgaatttatcaatcttttatggttagcactttttatgtcttgtttcagaaagccttttttttcccactctgatgtcatgaagatattctcctttgttrtcttctaaaagctttattgttttgtttgcctttcaaatttaggttctctaatccatgtggagtgtgtgcatatagtgtgtgtgtgtgtgtgtgtgtgtgt

SEQ ID NO: 27567 - DNA, 201 bp, Homo sapiens
tataatgatggcatgtggtggtgcttgtcttgaattgcaggccatgttattctgagcagtattatatgtctactcacgaaagttctaggtataagccacayccattcaaatatactcaggttaaaccagtagtgctagtaatctaattgtggacaaagtcaaagatgggccaaccatatgctgaatctgagctatggcatg

SEQ ID NO: 27568 - DNA, 201 bp, Homo sapiens
catattcttaacctctgtgctggcacttaggtgcaaaccatttaatattaacagctaagtagaatgtagtgaatatctggccgttcttatgaaggagatgrgaagtagttgatttaagttaatacatgtcatcagtaggctactcaggatgcctcatcactcggggtagactaatagaagtcttttgtacattaagaaaaa

SEQ ID NO: 27569 - DNA, 201 bp, Homo sapiens
tagattcaacagatacgaaagggggtgtagtctagattcaacagacagggaaggggatgtggtctggattcaacagacaggcaaagaaggtgtggcctagrttcagcagacaggaaacggggtgtggtccagattcaacagacaggaaagggagtgtggcctagattcaacagaaagggaaagagggtgtggcctagactc

SEQ ID NO: 27570 - DNA, 201 bp, Homo sapiens
tgacctgaatcagattattgtagtttgctctggcctgaaacacctgtggtacacaaagggctttcacccacattcttgtggagggtactagcttctttagyaccaagaccctcctgttaacagggtgcctggatgtggggcagcaggatttctgtgactccctttacctctattcatataatgggctcttaattctttttg

SEQ ID NO: 27571 - DNA, 201 bp, Homo sapiens
gaactttgtggtgtgaatgatcataaacatagaaaaacgctgcacagagggtaaggaagagatgctgtacaatcctagtccctggtgatggtgtagcagtrcctataatgatggcatgtggtggtgcttgtcttgaattgcaggccatgttattctgagcagtattatatgtctactcacgaaagttctaggtataagcca

SEQ ID NO: 27572 - DNA, 201 bp, Homo sapiens
tgccaggttaaggatttgtggctttatcctatgggaagccacagatagatttttaaacagaggacagggttggcacgggagtagcatgatcaggtatgcayttcaagatgatgtgccagctgcagaggggagaagaatgaatctgagaagggcaagaacggatgcagcgtaaccactaatctgctttctctcccatctaat

SEQ ID NO: 27573 - DNA, 201 bp, Homo sapiens
tcttaaaatcattaacaataactacttatccaaatctgtcctattaaaacagtcgattcactagagctatctacttccattataggaaaaattataaatamaactgctttcatccaaagaggaaattttaaaattgtaatgctatgtaattactcagtaccctgacatgaaatgcattgaaagtttatgaggttccattcc

SEQ ID NO: 27574 - DNA, 201 bp, Homo sapiens
ctttacagaggtagaaagggaggctcaaagacttcaagagatttgcctaaggtcacatatctgggacttggtggagccacagtttgaattcccagggcaartccgtgagacggtgatgctcatggcttttctttgtcagacaccagataacagtggtatagtttggatctgtgtccctgcccaaatctcatgttgaactgt

SEQ ID NO: 27575 - DNA, 201 bp, Homo sapiens
cgagcagatcatgaggtcaggagttcgagaccagcctggccagcatggtgaaaccccgtctctactaaaaatacaaaacattagccgggcatggtgaggcrtgcctgtaatcccagctactcgggaggctgaggcaggaaaatcgcttgaaccctggaggcggaggttgcagtgagccgagatggcgctactgcactctag

SEQ ID NO: 27576 - DNA, 201 bp, Homo sapiens
gtccacggttctgcttctggaatctcgtactcggggagggagtttgttccggcattgtggcacacaggaaaggtctcaacttggagtctttgagatacagygtcctggtacttcctagctgtcagacactggaaaacttacctcactctctggaaaaaaagaccaaaaacaaaaaaccagaaacattattatgaatttgga

SEQ ID NO: 27577 - DNA, 201 bp, Homo sapiens
gtcactacataggtaataagaaagaaatagtattttgcctaataattatactggaataaaggacatttatgaactacttagggaaaggaaatatagctgtyccttttaactccggtgtctggaatgtagtagatgctcaataagtttctgcttaattgaattgaattaaatgtgttcagtctgctgtggttcattaagtta

SEQ ID NO: 27578 - DNA, 201 bp, Homo sapiens
tggaacctgtaaaacctgattcacatgaagatccattggcccactaataaataatgttttatagcacactctgctttttatatccctataatccttatctkccagagaagtgagaataaataagcacacctcacactgatcgattggggatggtgcttgtgtcaaagtggtggagagctggacacaacatgtgggtttttg

SEQ ID NO: 27579 - DNA, 201 bp, Homo sapiens
tttgcacactttacaaataatatgcctctgtggggtaaatgctgacgcgtgcatttcaggttttggccttagttggatattcataagggtccctctttgckgattatgtcagcacaacctctttattgaattatggattgggtatttaatcaaggcctgtgccttattattagccatgtaacattccattgtttcaatgga

SEQ ID NO: 27580 - DNA, 201 bp, Homo sapiens
ttgcagcagtttcaagccaagttttgcctctgctcacttgagcccagagctgtgaaggtttcttctggccacatccccttgttgccccatgctgggtgtcrgctgtgtcacaaggactcactcagtcacattcttatctgcctcgtattataaaatatgcaattatatattgtgtgtaggtatagtcaagggggccacaaa

SEQ ID NO: 27581 - DNA, 201 bp, Homo sapiens
tcagcaggggtctttgttctgctgcaattaagggctcctcgctaatccttctgcttcccagatgctcttggagccagctgtatttttagcacatctctttkataagcttcactctgaagacttcctattattcatttcaaaacttgacaactcctatcactttgtccctcattgcattctgatacacaaagaaagaatgca

SEQ ID NO: 27582 - DNA, 201 bp, Homo sapiens
gatttggatccgagcttcctagtggtcaaaggaaaaaaagacaacaacacatttttaagattcaaggtgtttataaaaaacaaattggcctagggaatcamagaaggtatgtacttcatttgaagtatgtgtgtgttttagaattttatgtgcaatatgaagttttagtactactttaaaaagcagaaactttacctcctg

SEQ ID NO: 27583 - DNA, 201 bp, Homo sapiens
cacctgccccagatttttaggcagttctgtattcatttacctattccaggagcccatagcacatttacatctttggtatatacactttccagaatcatacrcaaattgctgtgtagactgtggtactttatagtaagatactgtgcttttttatactgtaccttgttacatagatgatgtgaggagatttataaagatgtc

SEQ ID NO: 27584 - DNA, 201 bp, Homo sapiens
aaagtctaccatcactgtttttgtttttttctttttttacagtagagggggaagtgcccctgtagtgaactattttgagtcaatgaaaacaaaagaagagwtttctacattgagacatgcttttaatttcttattattcccaaactgtgctttttctttattttcttatccttttctgtcctgtcctttcattcttccttt

SEQ ID NO: 27585 - DNA, 201 bp, Homo sapiens
gttggcaagtttcttaacctctttttagccccagttttaaagtgtagataagaacatttatataaaagtgtcatgtattttcaaattcttaccttggaaaygtcaaagaacaagatagcaaatgcaggaggactttgtcagccccaagggaagtgcagtgtcagagcagtagccacctgccccagatttttaggcagttct

SEQ ID NO: 27586 - DNA, 201 bp, Homo sapiens
cttgcttattttcattaggtctcactatattttctcaggatactttattcctcccattgagccatttaatttttttttcctgcctttttctgtcgattacwcacactgaaccactatcacatgtcatgatgactcaagatgaaaatttccaattccaagtagaaatagtcaattctttaaagtggataggtgatctaaatt

SEQ ID NO: 27587 - DNA, 201 bp, Homo sapiens
aaatccttctatatacagtacatgccttctggaaatggggacaggacagcacaatatacaaactatatgtttagtaaaataaggagctcccaacttccatrtatgcacatgtagtgccagctttagagagccaggactgcatcctactcatcttagtgtctccagaacctagtgcaccttagcacctaagggcttttgggg

SEQ ID NO: 27588 - DNA, 201 bp, Homo sapiens
ggaaggattcaaatccttctatatacagtacatgccttctggaaatggggacaggacagcacaatatacaaactatatgtttagtaaaataaggagctccsaacttccatatatgcacatgtagtgccagctttagagagccaggactgcatcctactcatcttagtgtctccagaacctagtgcaccttagcacctaagg

SEQ ID NO: 27589 - DNA, 201 bp, Homo sapiens
ttagttctacgatcccccttaccatccctattaatttaattttcttcagatatgtagaacattaatatgcttccaaatgtggaaattatgcaaaaagctgyattctgaggagtatcaccctctgccataacccttttaccctggcacccagtcacatcaccacccagttctccctatgaaaaacaacttccatgttatctg

SEQ ID NO: 27590 - DNA, 201 bp, Homo sapiens
tgccgtcccttacatgactgatacctctgttagactgagcttcttggaggacaggaaacaacccttgactatgtactcttggccagcatggttacatggtaaatgtctgttaacatgaatgagctagtatttgtatctggcccatagcagattcttactaaatatttgctgcaatgaaatggtaaatattattaataaatt

SEQ ID NO: 27591 - DNA, 201 bp, Homo sapiens
tctctattgtcttcacaggttaggagacagtttgacattttgtttactccaaatcctactggcgcggggaaaacagtcaccaccacaaacacaatttgctrcagaaagcaactttatgtcttgtgagcacacatgggactttatcataattcactttagatgggaataataaaatattttcttttctgagtattttgcaag

SEQ ID NO: 27592 - DNA, 201 bp, Homo sapiens
aactatcagatagtcacaagaaaggactattatcaaagagaatactgtatatttgtttaatttaaatgagatcgagtgagacactatatgtgaagcagtasctaagggcatggtatatagtaaatattacctgtaagtgaagtggttgtattatcattattctgttcctagcacggtgtctgagtttaatagcacctggta

SEQ ID NO: 27593 - DNA, 201 bp, Homo sapiens
gcttctaagcactttacacatattaacttatttaatcttcagataaccctaggatgtggatacttgtattctcatttgtattagctagataaggaaactgkggcacaggaagatttggtaactggcctgagattacatagcaagtaagggatggaactaggatttaaacctagccattcttgttccagggtctgtcctaac

SEQ ID NO: 27594 - DNA, 201 bp, Homo sapiens
ttgcaggcatagtgtgatgataaagtaattctatcacttttcgtgttttctggagaatttagccccatggctttaggaccatgtttttcagtaagcttcaccccctgccaattaaatatgagcaacttctttctctctgtgtgtgtgtgttttctccctgtagtttctgctctctctcccttgttttctcagctgcatggg

SEQ ID NO: 27595 - DNA, 201 bp, Homo sapiens
cgcctatagtctcagctctttgggaggctaaggtgggtggatcgcttgaacttatgagtttgagaccagcctgggcaacatggtgaaaccccatctttacaaaaaaaaatgcaaagaatggccaggcatggcggcgcatgccagtagtcccagctacttaggaggctgagttgggaggatggcttgagcccatgaattgga

SEQ ID NO: 27596 - DNA, 201 bp, Homo sapiens
tttgagaccagcctgggcaacatggtgaaaccccatctttacaaaaaaaaatgcaaagaatggccaggcatggcggcgcatgccagtagtcccagctactyaggaggctgagttgggaggatggcttgagcccatgaattggagtttgcagtgtgccaaaatcacaccactgcactccagcctgtgcaatagagccagacc

SEQ ID NO: 27597 - DNA, 201 bp, Homo sapiens
aaaaaaaaatgcaaagaatggccaggcatggcggcgcatgccagtagtcccagctacttaggaggctgagttgggaggatggcttgagcccatgaattggrgtttgcagtgtgccaaaatcacaccactgcactccagcctgtgcaatagagccagaccttgtcacaaaacaaaacaaaacaaaacataccttgttagttc

SEQ ID NO: 27598 - DNA, 201 bp, Homo sapiens
gctgagttgggaggatggcttgagcccatgaattggagtttgcagtgtgccaaaatcacaccactgcactccagcctgtgcaatagagccagaccttgtcmcaaaacaaaacaaaacaaaacataccttgttagttcccctttatgtattattttctaggaagtgtttttaaattctaaatttgcatgttgaattttatca

SEQ ID NO: 27599 - DNA, 201 bp, Homo sapiens
aaattttttaagatgatctattttagtaacgtgcctggtacacagtaaagatgcaacaaattttagctctaactattgaagtagtatagtgagttaatgtsgaaagcatagcaaagaatcaagtcaggaccaagacccaggtttctttctcaagtcactgattaatggaacaatttttggtaatgaataaaacaaaatggg

SEQ ID NO: 27600 - DNA, 201 bp, Homo sapiens
ttttgtgcagactgcgatttcaccttggatagctctcttaccctatgcacttgctcttggcgactcctgttcatccttcaaaactcagtcaccgttttttktttttgttttttttttttttgagaagaaggcttgctctgtcacccaggctggagtgcagtggtgtgatctcagctcactgcaatgtctgcctcccaggtt

SEQ ID NO: 27601 - DNA, 201 bp, Homo sapiens
gaatcaaggctttaatgggattcagaagtcagtgatcacagggcagatgcctcaggtttgaagtcacatcaaaccgagtgtgaaccttctgtaactcgcarctgtgctaacttttggaggtttcttgaaaaattctagtcagtttgggttaaagaatggtttcagtaatgtcacactcagggtcatgactgctcaactggt

SEQ ID NO: 27602 - DNA, 201 bp, Homo sapiens
ttctcaactgagggaaaataactctgcctatggcatcattataaagattaagtgagaaaattttttaagatgatctattttagtaacgtgcctggtacacrgtaaagatgcaacaaattttagctctaactattgaagtagtatagtgagttaatgtggaaagcatagcaaagaatcaagtcaggaccaagacccaggttt

SEQ ID NO: 27603 - DNA, 201 bp, Homo sapiens
gcagactgcgatttcaccttggatagctctcttaccctatgcacttgctcttggcgactcctgttcatccttcaaaactcagtcaccgttttttgtttttkttttttttttttttgagaagaaggcttgctctgtcacccaggctggagtgcagtggtgtgatctcagctcactgcaatgtctgcctcccaggttcaagcg

SEQ ID NO: 27604 - DNA, 201 bp, Homo sapiens
aactttgattgaaaggaaaccatgtactttggtttctctgataaatgttgataaaagactacattgatacgattttccaaatgtcagctattatatcttgyggtgaaaccacttggatggagctcctgtaacatcagccgttaagttattatggtggaaaatcagattgcaaggggtaggaaaagaggaaagaagaggaaa

SEQ ID NO: 27605 - DNA, 201 bp, Homo sapiens
tcttgggccatgacagacccttatggttgttttctgttgtgtttttttttttttttccccttccctttgcaattgtctgccaacaaatgttggcttctcaragctggccatgtacccgagtttggggcaagcctgcctgtctttttaatggatgctcctgtttacctccttggaaggcctgtgaccatccatcctgtcctc

SEQ ID NO: 27606 - DNA, 201 bp, Homo sapiens
tggctcagtcaggatggttcttcctcttgaagaaagccttctaccaatgctaaaagtgggatgagagataggctgatcctattctctagacagaggggttsatgcgttgtatctggtgggctacagtcaaggatggccataattccatcagaactcaggtggtgatcaggggagacattgggtgagattaaggaaaatgag

SEQ ID NO: 27607 - DNA, 201 bp, Homo sapiens
gtgcctcaggtgcccagcactgccccataacaccaaattctgttcagtcctagcatcagctgctgtacactctcaggtattctgcaggagctcttgggccrtgacagacccttatggttgttttctgttgtgtttttttttttttttccccttccctttgcaattgtctgccaacaaatgttggcttctcagagctggcca

SEQ ID NO: 27608 - DNA, 201 bp, Homo sapiens
aacacctatttgcaagttcctctctcattagcttgtatttaccatcactcatgattcacagtactttttattgttatgtcagcaaacaactcaccagatakatacgtgtgcaccatttcactttatgctgtcatgaatcctgtgaggcagtatagctgacattaatagctgggtttttcaggtaaagagactaaaattcag

SEQ ID NO: 27609 - DNA, 201 bp, Homo sapiens
ctgataaaggggaacaagattatgtcttttgcagggacatggatggagctggaagctgttatcctcggcaaactaacacaggaacagaaaaccaaataccrcatgttttcacttataagtgggagctgaacaattagaacacatggacacagggaggggaacaacacacactggggcctgttgggggatcagggggaggga

SEQ ID NO: 27610 - DNA, 201 bp, Homo sapiens
tccaacgttttgttcaagatggaaaattaattttctaccctgaggcaccactgtttttggaggtgtctgtggcacagaactttgagtacagcccattgaargatgagttgtagaacactgttaaactttctatttgcaaggagggaaaggggagcggggatatagttgagccatcaacagaggaggagaacatggtcttgg

SEQ ID NO: 27611 - DNA, 201 bp, Homo sapiens
aaaaatgttgttgctgaaaatagaaaagtactggctgataaaggggaacaagattatgtcttttgcagggacatggatggagctggaagctgttatcctcrgcaaactaacacaggaacagaaaaccaaataccgcatgttttcacttataagtgggagctgaacaattagaacacatggacacagggaggggaacaacac

SEQ ID NO: 27612 - DNA, 201 bp, Homo sapiens
agcttttccaggtgtgctccaacgttttgttcaagatggaaaattaattttctaccctgaggcaccactgtttttggaggtgtctgtggcacagaactttragtacagcccattgaaggatgagttgtagaacactgttaaactttctatttgcaaggagggaaaggggagcggggatatagttgagccatcaacagagga

SEQ ID NO: 27613 - DNA, 201 bp, Homo sapiens
ttattaagttcattgtcttatgtgggcatggctcatagtgcctgaaagcaattacagtagtttcatcaaagttcacttatcacaaatcatcataataagtrtaataataatgaaaacgcttgaagcattgtgagaattaccaaagtaggacagagacacaaagtgagcacctgctgttggaaaatgatggtgatagacttg

SEQ ID NO: 27614 - DNA, 201 bp, Homo sapiens
tccctactccataccagtcagtggtccagacaccatggtatatgataagcttttccaggtgtgctccaacgttttgttcaagatggaaaattaattttctrccctgaggcaccactgtttttggaggtgtctgtggcacagaactttgagtacagcccattgaaggatgagttgtagaacactgttaaactttctatttgc

SEQ ID NO: 27615 - DNA, 201 bp, Homo sapiens
agacttgtgactcttcctttcacttgaacacatagaagccattgtggggttattaattggcctatttcaatattgctgtgtctcagtgaattgggaggccrgaggaaggggaaagtagacgggggaactgccagtcagtggagcagttagaaaacatacagcatttatttattaagttcattgtcttatgtgggcatggct

SEQ ID NO: 27616 - DNA, 201 bp, Homo sapiens
aattgtttccatacttattcagcctgaactttgaaaaatgttgttgctgaaaatagaaaagtactggctgataaaggggaacaagattatgtcttttgcarggacatggatggagctggaagctgttatcctcggcaaactaacacaggaacagaaaaccaaataccgcatgttttcacttataagtgggagctgaacaat

SEQ ID NO: 27617 - DNA, 201 bp, Homo sapiens
tgaaaataaagtttgaattcttatgcatgtttggagaatcttccaattttgggaatctgcaccccgacccactcaacccctggcccagagagtcaggagtrcaaattgtttccatacttattcagcctgaactttgaaaaatgttgttgctgaaaatagaaaagtactggctgataaaggggaacaagattatgtcttttg

SEQ ID NO: 27618 - DNA, 201 bp, Homo sapiens
tcaaaatcgatactttgttgaccatagtagcttctaataaataccttcctggttggagttcaaaatcgtggaaaatgaaactgctgagtacatgtgtgaaggtgcctatcgcggactttagcacgtcataggtgatcaagagatgctagtcaaatcaagaattgtcaacatggtaattttgttaagggctaagtgatgatt

SEQ ID NO: 27619 - DNA, 201 bp, Homo sapiens
cccttgcctcttaaagaggaaacttgcataagacaatttttttttaagcagttaagcccatggcttagattaaaaaaaaaaaaaaaaatttggctgagcgyggtggctcacacatgtaatcccagctctttgggaggccaaggcgggcagatcacctgaggtcaggagctcgagaccagcctggccaacatggtgagaccc

SEQ ID NO: 27620 - DNA, 201 bp, Homo sapiens
ataaggttgaggctgggtgtggtggctcatgcctgtaatctcagcactttagaaggccaaggcgggtggatggcttgagctcaggagtttgagaccagccwgggcaacatggtgaaaccccatctctaccaaaaatacaaaaattagctgggggtggtggcatgcacctggaattccagatacttgcgggactaaggtggg

SEQ ID NO: 27621 - DNA, 201 bp, Homo sapiens
ggggttttattcactgataaatgtccagcttctagaataaggcctgggcatgatactcaataggatggggtaaataaattgccatagtgcaaaatgtggattttttctctatacatacaagatccacatcaaaattcagttactgtgctactttgactatttgttttattaccttggctagaacgtaagttcctcactggc

SEQ ID NO: 27622 - DNA, 201 bp, Homo sapiens
acaataaaaataacaaaacaacaataaaataatacagatttaaagaacaataaaatagattcactatttacatagaatttatgtcatattcattgttatargtgatctagagatgatttaaagtatacaggaggatatgcacaggttagatgcaaatactatgccattttatgtcagggacttgagcatccttttgttttg

SEQ ID NO: 27623 - DNA, 201 bp, Homo sapiens
taaaataatacagatttaaagaacaataaaatagattcactatttacatagaatttatgtcatattcattgttataggtgatctagagatgatttaaagtrtacaggaggatatgcacaggttagatgcaaatactatgccattttatgtcagggacttgagcatccttttgttttggtatccacaagggtcctggaacta

SEQ ID NO: 27624 - DNA, 201 bp, Homo sapiens
gactcaggaaacttacagtcatggcagaaggagaagggaaacaagcacatcttaccatggcagagcaggagggagagagaaagtgaaggaggacatatcayacactttcaaatggtcaaatcttgtgaagaactcgctatcatgagaacagcaagggtgaaatctgcccccatgatctgatcagctcccaccaggcccctc

SEQ ID NO: 27625 - DNA, 201 bp, Homo sapiens
actactcttaaccactgtgctgcttgtgtgaccctaagagcagcgattatatttgtggtattagctcgtgccatgctgctgttattacggtatggccctckgttcaatttcacatccatcctattcttatctttctcaaccctgggagatgaataggggtaggtattatcatctacatactgtgattaggattttgggact

SEQ ID NO: 27626 - DNA, 201 bp, Homo sapiens
tagcttgatttagccattccacaatgtatacatatttcaaaacatcatgttgtacactgtaaatatatataactttgatctgtcaattaaaatgaattttwaaaaattaaaaaagaaatgttctagaattagattgcaatggtggttgtacaaccttatgagtatactaagaaacactgaattgcacactttaaaatgatg

SEQ ID NO: 27627 - DNA, 201 bp, Homo sapiens
cacagagccagactatataattttgcccctagctcctcccaaatcgcatgtccttctcacatttcaaaactaatcatgccttcccagcagtctcccaaactttcttaactccaacattcacccaaaattccaagtccaaagtctcatctgagaaaagacaagtccttctgcctgtgagcctgtaaaatcaaaacaagttag

SEQ ID NO: 27628 - DNA, 201 bp, Homo sapiens
cactactcttaaccactgtgctgcttgtgtgaccctaagagcagcgattatatttgtggtattagctcgtgccatgctgctgttattacggtatggccctytgttcaatttcacatccatcctattcttatctttctcaaccctgggagatgaataggggtaggtattatcatctacatactgtgattaggattttgggac

SEQ ID NO: 27629 - DNA, 201 bp, Homo sapiens
acagagccagactatataattttgcccctagctcctcccaaatcgcatgtccttctcacatttcaaaactaatcatgccttcccagcagtctcccaaactttcttaactccaacattcacccaaaattccaagtccaaagtctcatctgagaaaagacaagtccttctgcctgtgagcctgtaaaatcaaaacaagttagt

SEQ ID NO: 27630 - DNA, 201 bp, Homo sapiens
tcatttacccaaaggcatacatctagtaagtggaagggctgggatttgtatagatgcagtgctcatattttagccccatcactcttttttttttttttccrcttttgagatggagtctcacttgctctgtcacccgggctggagtgtagtgctgctctctcagctcactgcagcctctgccttgtggattcaagtgattct

SEQ ID NO: 27631 - DNA, 201 bp, Homo sapiens
tcatggatgagtaacctgaggcctaggaaggttgagtcatttacccaaaggcatacatctagtaagtggaagggctgggatttgtatagatgcagtgctcmtattttagccccatcactcttttttttttttttccgcttttgagatggagtctcacttgctctgtcacccgggctggagtgtagtgctgctctctcagct

SEQ ID NO: 27632 - DNA, 201 bp, Homo sapiens
tttgtgtcatgtcattgactcttaacaggcagtctagttctcaggggttaaggtaccaggctttgaattcaaattgactcatgtttgatttgtggctctaygtttcactgctggatgtggaatccggatgtgtagcttaagttggacaaatgaagccttggttttatcatctgttaaatggatttgccaagagatcccctc

SEQ ID NO: 27633 - DNA, 201 bp, Homo sapiens
agattgcagtactataataagaaagaaaaatggccaaatcagagtaaggatgttgctgatggtgatggtgatggttatggtaacagcagttcacccttgaytgaacccttacagtgctcctttcactgttctcaatgctttccttgtgttaactcaattaatccactttcatggatgagtaacctgaggcctaggaaggtt

SEQ ID NO: 27634 - DNA, 201 bp, Homo sapiens
atgtaagccctacattcatgataactgacagctttcagtttatgaatcagctcccagtgccctacctccccactcacctccaagtatatagtttctctttmctttctcagtttgcagaggaagccgtaccactcacctggcagcaggtttatttttttatttttattttttttgagacagaggctcgctctgtcgcccagg

SEQ ID NO: 27635 - DNA, 201 bp, Homo sapiens
gtgacagtcctcaaaacctggagcacacagaagcattagtgctgccttggcctttaggagttctgtgatctccaagtatggaagagacatttgctgcctgyatcataaccatagtcctccatatttccagctcctgcaattaatagccatgcaactatatctgattataacctaagtgacatacatcacttccaggccaaa

SEQ ID NO: 27636 - DNA, 201 bp, Homo sapiens
gaacactgtctcaggtgcccagcactgccccataacaccaaattctgttcagtccttcctatcacaggataaccctgtgaactaagaatcactgttatacscattttgcagataaggaaatggaggtatagacaggttaagtaacttggctaaggccatatcactaataactgctggatccaggatttgaaccagagtctg

SEQ ID NO: 27637 - DNA, 201 bp, Homo sapiens
atttgaacactgtctcaggtgcccagcactgccccataacaccaaattctgttcagtccttcctatcacaggataaccctgtgaactaagaatcactgttrtacccattttgcagataaggaaatggaggtatagacaggttaagtaacttggctaaggccatatcactaataactgctggatccaggatttgaaccagag

SEQ ID NO: 27638 - DNA, 201 bp, Homo sapiens
tgaccaggtctgttgtcaaggagcagtaatattttgaaaggaatctttttttctgagcagtaggtctcaacagtggacttaaaatactcagtaaaccatgstgtaaacagatgttctgttattcaggcttcattgttccatttttagagtacaggcagagtagatttcgtataattcttaagggccctagaattttcacaa

SEQ ID NO: 27639 - DNA, 201 bp, Homo sapiens
ttcccagatattgagctaggacaaacattgatttgaacactgtctcaggtgcccagcactgccccataacaccaaattctgttcagtccttcctatcacargataaccctgtgaactaagaatcactgttatacccattttgcagataaggaaatggaggtatagacaggttaagtaacttggctaaggccatatcactaa

SEQ ID NO: 27640 - DNA, 201 bp, Homo sapiens
tcttgttcccagatattgagctaggacaaacattgatttgaacactgtctcaggtgcccagcactgccccataacaccaaattctgttcagtccttcctakcacaggataaccctgtgaactaagaatcactgttatacccattttgcagataaggaaatggaggtatagacaggttaagtaacttggctaaggccatatc

SEQ ID NO: 27641 - DNA, 201 bp, Homo sapiens
  misc_feature (1)...(201): n = A,T,C or G, or insertion/deletion polymorphism (see Tables 1-2)
ttttcttgggctgttttcttccgtatacattttataatcatctttcaaggtttcacaagaatactgttgagatttgatttgagttttatcaaacttatagnctgattaaaagataatgccatcattaggacattgagcctgagtctttctatctgtaaatgtagtaactctttccatttatttagttcttatttaatgtct

SEQ ID NO: 27642 - DNA, 201 bp, Homo sapiens
gacttttaacttggtacaggaggaatggaagtggcagccacaaataatggctatcctgggctctcctagaacccactcgccccagctggcctcttctgccygcggctctgctccttctgagcccactctgaggctgcagcccaggctgcctgtgccccacactccctctggagctgacagtccagccggggctcagggcct

SEQ ID NO: 27643 - DNA, 201 bp, Homo sapiens
ggcctgctcctcccatgcccatcctggcttctctgcaccatgcggggcacacagtaggtgctcactggggactgaaggaaacgcacaccactgagggctgmtgaggggttaaggaaccgaaactttgtttagattttcttctgtattttccatatcagtgccttgagtttaaactttttttttggtctttatcttcacgaa

SEQ ID NO: 27644 - DNA, 201 bp, Homo sapiens
tctgagacccccacgttgtctgcactgctgccaaacaggccaggaaatgtgtgtcttctgtgtgctaggatgatttagtgagcacatctcatgggaatgcrtccgtcagctctaggtttggtcagtaaaaccaatggcagtgcgctcttggctgatgttgccattacagagggtgttgagaaaaggagtccctgggggtgc

SEQ ID NO: 27645 - DNA, 201 bp, Homo sapiens
acttgatctcaaagccacggtcggtaggaacaaaaaggtgggttttctagcaggctggaaatggccagcaggggagcaagccgcggctgcctgggagtgtygggtggtcaggtcaggctgtagatgtatcctgtagactcaaggccgcttctcaggagtccagagtcccataaaccaccatgagtgccctcctgggatcct

SEQ ID NO: 27646 - DNA, 201 bp, Homo sapiens
tgaaatgtcattgcattaagtgtgtgatgatgccaaggacagtaatatctgaactaattcgtactcttacctgtttaaagtgactgtacagcctttggtgyagctccaaaagctgcttgacttgataagttttggaataattataacctgtgtttatatggaagcagtttagaaaacaacggaagtggttttcaaaaccat

SEQ ID NO: 27647 - DNA, 201 bp, Homo sapiens
agctgctcagctacctggtggccctgctgcggcaggggagcagagggcgtcgccaagcaaagccaggctcaaggaggtacctcactcttaaaccctgtgcytgaaacccgtgtctttagcatggatgtggcaatcactatcagtttctgaatcacctaagcagttcacctgaaatgtcattgcattaagtgtgtgatgatg

SEQ ID NO: 27648 - DNA, 201 bp, Homo sapiens
catccaggttggtccgcgcagaacccacatggcccgttttctcctttaaccttgttctgccgcccttcctgccgtgcccacccccatctcatgctctgtgrggttctctttataacatccatgtataaatgataccagctgtctcttagcactttcacatctggtgtttacgtaggcattgcatatggagtcaaatctcat

SEQ ID NO: 27649 - DNA, 201 bp, Homo sapiens; identical to SEQ ID NO: 5503

SEQ ID NO: 27650 - DNA, 201 bp, Homo sapiens
agaaactagatcactcactcattctgctcagaaactcattgattttactctgaagcacccacgaatgacagattcccaggaggggcagagaaggctgagcrgcaccacgtggggctggccgcgggttgtgggcatgagcacgcctggagaggccatggggctggtgacaagctctggccagaagaccccaaggtctgatcc

SEQ ID NO: 27651 - DNA, 201 bp, Homo sapiens; identical to SEQ ID NO: 5504

SEQ ID NO: 27652 - DNA, 201 bp, Homo sapiens; identical to SEQ ID NO: 5507

SEQ ID NO: 27653 - DNA, 201 bp, Homo sapiens
cggctgtggcgaagcggaatgcagccagcggcgccggcccggcagggagtcgctagggggcgggcgcgggcttggagccctcttaggcgctcccgtggggrcccaacgtcaggcggccggttagctcagttggttagagcgtggtgctaataacgccaaggtcgcgggttcgatccccgtacgggccaggctaactttttt

SEQ ID NO: 27654 - DNA, 201 bp, Homo sapiens
tgtaatttagaaaaaatgtcaataatggttttatgacgagactgaaattgcagacatgttcataagcacaatgcttcttttctctttcttgtctttctgtrcgtaagcaactagaagccatttgtgtcaaggtaacgtctggagaaacaaaaggtcaggaaaggccaatgcccctaccgaccacaatccagccccaaactg

SEQ ID NO: 27655 - DNA, 201 bp, Homo sapiens
acttgtgaggtggaggttgcagtgagccgagatcatgccattgcactccagcctgggcaacaagagtgaaactccatctcaaaaaaaaaaaaaaaaaaaawatatatatatatatatatatatatatatatatatatgtatacacacacacacatatagtagtaaaaaaacacatagcatgacatgtaccatcttaaccat

SEQ ID NO: 27656 - DNA, 201 bp, Homo sapiens
tattaattctaatatttgtgtgtgtgtgtgtgtgtgtatgtgtgtgtgtaatctttaggcatttctacatataagatcatatctgcaaatagagataaccttttttttttttttttttttttgagacgaagttttgctctgtcacccaggctggagtgtaatggcgtaatatcagctcactgcaacctccatctcctgggt

SEQ ID NO: 27657 - DNA, 201 bp, Homo sapiens
ctttcatgagacttcgctgtacatgccagctgagatttaacatttgaaaacaagacaggtcctggcttttattctggctctagccagaacctatcaactargcacttaaaaaattatatatataaattttttttttgagacgggagtcgcactttgtcacccaggctggagtgcagtggcacaatctcggctcactgcaac

SEQ ID NO: 27658 - DNA, 201 bp, Homo sapiens
ccctgggcccacttgcggggaagtcttggaggtgaaaatccaggtctggaatgaatgcattccacagatgcatatggagagctactgcatgcccagcaccrttcctaggctgggagcaaaacggtgagacacaaaccccaacccgctggagacagtgaccagccactagatgactgccatgtttttagtgaggcattcagg

SEQ ID NO: 27659 - DNA, 201 bp, Homo sapiens
ctacattttgaagccagagcaagtggatgaatttctcactcggttcgtttctagggtggtcaggtgtgctcagctgaacaaaagccggttgtataaggttsatgccattttatgtcaggatccggcaagggctccacctgtttttgaaaattctacagtggaaacagctactagttctgacctaaataagaagcagctcaa

SEQ ID NO: 27660 - DNA, 201 bp, Homo sapiens
ctgtccaggagctcacccatgccctacatggcccccacccagggcttgtttgtttcttggcctgctcctcccatgcccatcctggcttctctgcaccatgyggggcacacagtaggtgctcactggggactgaaggaaacgcacaccactgagggctgctgaggggttaaggaaccgaaactttgtttagattttcttctg

SEQ ID NO: 27661 - DNA, 201 bp, Homo sapiens
acttggcctagctggttttgggtggtgagtgcagtgagtgggccatgacacagtacacgccatgttcacctgtttcccaaaatgtttaggtttttcccctycagtaaatgtgactgtctctccccgttctgaagaaagccatacaacgacggtttctggtggcaatgggagcgtgttccaggcgggcccgcagcttcaggc

SEQ ID NO: 27662 - DNA, 201 bp, Homo sapiens
tctcggctcactacagcctcgaactcccaggctcaaatgatcctcacacctcagcctcccgagtagctggggctacatgtatgcaccatcatgcctggctratttaaaaatgttttgtagagacagggtcccgctatgttacccaggctggccctgaactcctggcctcaagcagtcctcccgcctcagcatcccaaagca

SEQ ID NO: 27663 - DNA, 201 bp, Homo sapiens
ctcagtgaggatctttattctgtcctgtgtgacatttttgttgatgctccactgtttgagggtcacaccagaaggttgagtccaaagagggccagttggtsgtcccaaataagtgattctcaaccgagggcagttttgccccacagggggcacttggcaatgtcttcattgtcaggactcgggatcactactggcatctag

SEQ ID NO: 27664 - DNA, 201 bp, Homo sapiens
actgcagagaaaatgaacccgtgacacctacccatgttaatgtggataaaattcacgaagcaaaatgaagtaaagaaacccagaaaagccctttcaagttscaggagatgatatcatttatataaagtttaaaaacatttcagaactgaactatatatttttagaaatatctgcatatgccacataaatttttaaaatcat

SEQ ID NO: 27665 - DNA, 201 bp, Homo sapiens; identical to SEQ ID NO: 5499

SEQ ID NO: 27666 - DNA, 201 bp, Homo sapiens; identical to SEQ ID NO: 5500

SEQ ID NO: 27667 - DNA, 201 bp, Homo sapiens
tgcctggtgagacgtggaaggagccagtgtccgcagccgtctcaggacgtcagagagctcggtggcctgtctccagcagcatgctctccagatgcagcctrctgtcgctctccacatagggctggtgcagccacatggacaggtagctcagggtgaggtcgggatccccggtgtgggcaagctccttggccaccgtgcgct

SEQ ID NO: 27668 - DNA, 201 bp, Homo sapiens
gaacacagatgttcaattacatctttgagaccctgctttcttctttttttttttttttgagatggagtcttgctctgtcgccaggctggagtgcagtggcrcgatctcagttcactgcaacctctacctcccgggttcaagtcgttctcctgcctcagcctcccgagtagctgggactacaggcacgagccaccacgccca

SEQ ID NO: 27669 - DNA, 201 bp, Homo sapiens
gatctcagttcactgcaacctctacctcccgggttcaagtcgttctcctgcctcagcctcccgagtagctgggactacaggcacgagccaccacgcccagytaagtttttgtatttttagtagagatggggtttcaccatgttagccaagatggtctcgatcgcttgaccttgtgatccaccgccttggccacccaaagtg

SEQ ID NO: 27670 - DNA, 201 bp, Homo sapiens
attgttgagatggcatctcacagtaggtgaggaactttgtagatttaattctatgaagtcgtttaattcttgcatgtgaatgtgcttctgggggtgtgtgstgtttgggtgaagtttattctcttggcccatttcttttcaggttgctgagtcattaggaatcacagaattcctacggaagaaagaaatacacccagacaa

SEQ ID NO: 27671 - DNA, 201 bp, Homo sapiens
tgattcttctgcctcagccttcaggtgtgcaccatcacacctggccaatttttgtaattttagtagagacagggtttcaccgtgttgtctaggctggtctmaaactcctgacctcaggtgatccacccgcctcggcctcccaaagtgctgggattacaggcatgagccaccgggcacgcctggcctttattttatttttct

SEQ ID NO: 27672 - DNA, 201 bp, Homo sapiens
cagctagagggagctagcagcgagaagagggaacgtgaggtgggcatggctgaagtgggtgccaggtgactgtgcacggtgaattagcgtggtttggcttyttctgttcacaccaggaagaggaggtagcggtttgcctattccttcctattctagctgattgggtcttctcttcacaggctgcggaggagggactggcct

SEQ ID NO: 27673 - DNA, 201 bp, Homo sapiens
taatgggtacagtttctttctgagctgatgaaactgtgttggaattagatagtggttatggttacacaatttcgcgaatattttgtatccactgaattatrtactttcaaaggatgaattttatggtattttaaatctatccagtaaaataatttaaaagtttaaaaagtcatggatacgtaatgaattaggaacaaaatt

SEQ ID NO: 27674 - DNA, 201 bp, Homo sapiens
ctagaatggtcagtctgtagacgttgaagagacattgccatctgaaccagaaaatggagctcttttgcgatcagagagataccaaggacctagaagacgcrcatgctcagagacccttgcagagtcccgcacagctgtcctccagcagagaagagctgctcagctacctggtggccctgctgcggcaggggagcagagggc

SEQ ID NO: 27675 - DNA, 201 bp, Homo sapiens
cctcggcctcccaaagtgatgggattataggtgtgagctaccgtgcccagctcatagttgttttggaaagagccaggccatttggaatcgttttccttttscaggacagctgaagtgagcctgctggtcacacaccgtgcctggtgtgggggccgctgcctgggtagctgggtgtctcgggcaggtgcccgtttactccct

SEQ ID NO: 27676 - DNA, 201 bp, Homo sapiens
cccacaagctggctttctgtccacccctgcattgtcaggggccgtttcgcctaccccaggctcaagctgggaacccagagccattcttgactttctccttmactcactcctccccatgtcctgtggtcgctaagcctggagggctatgctctcccctcatctccctcccctgccacccacatccctctccttacctgagtc

SEQ ID NO: 27677 - DNA, 201 bp, Homo sapiens; identical to SEQ ID NO: 5502

SEQ ID NO: 27678 - DNA, 201 bp, Homo sapiens
ccaagcactgtttaggtgctggtaaaatagagcccactgctcctggagttcgctctagcggtgggaggccgacgattagcagcgggaataagcgatggagsggggtcgggccgggaaccgcagggatcctgggtgcgggttgcgattgcaaatgggggcatcgggtaaacctcgctgagtaagtgacatttaagcagcgac

SEQ ID NO: 27679 - DNA, 201 bp, Homo sapiens
gccagtggaagcaccctccgggggtgcacggaggaaaggacgctcagcctgacctccctggggctgtccatgccagcggatccatgtgagggaggggcccrctcctgcttggtgacagagtcagcacgcggtggcctgcaggtaatgtttctgtctgggtatgtgtctttttatttggccgttctcggattgctataaaga

SEQ ID NO: 27680 - DNA, 201 bp, Homo sapiens; identical to SEQ ID NO: 5506

SEQ ID NO: 27681 - DNA, 201 bp, Homo sapiens
agcacagtggcctgatcttggctcactgcaacctccgcctccccagttcaagtgattctcctgcctcagcctcgcaagtagctgggattacaggcgcccascaccacgcctggctaatttttgtatttttggtagagacagggtttcaccatgttggccaggctggtcttgaactcctgacctcaggtgatctgcctgcct

SEQ ID NO: 27682 - DNA, 201 bp, Homo sapiens; identical to SEQ ID NO: 5508

SEQ ID NO: 27683 - DNA, 201 bp, Homo sapiens; identical to SEQ ID NO: 5509

SEQ ID NO: 27684 - DNA, 201 bp, Homo sapiens
gcctggccaacatggtgaaaccccatctctactaaaaatacacacacacacacacacacacacacacacacacacacacacaaagtaaccggacaaggcgygtgcctgtagtcccagctacttgggaggctgaggcaggagaatcgcttgaacccaggaagcagaggttgcagtgagctgagattgcaccactggactcca

SEQ ID NO: 27685 - DNA, 201 bp, Homo sapiens; identical to SEQ ID NO: 5510

SEQ ID NO: 27686 - DNA, 201 bp, Homo sapiens; identical to SEQ ID NO: 5511

SEQ ID NO: 27687 - DNA, 201 bp, Homo sapiens
cccgtctctactaaaaatacaaaaattagccaggtgtggtggcaagcgcctgtaatcagggctactcaggaggctgaggcaggagaattgcttgaacctgrgaggcagaggttgcactgagctgagatagcgccactgcattccagcctggaccacagagcgagacttcatcttaaaaaaaaattagctggtcatggtggc

SEQ ID NO: 27688 - DNA, 201 bp, Homo sapiens; identical to SEQ ID NO: 5512

SEQ ID NO: 27689 - DNA, 201 bp, Homo sapiens; identical to SEQ ID NO: 5513

SEQ ID NO: 27690 - DNA, 201 bp, Homo sapiens
gcgattctcatgcctcagcctcctgagtagctgggactacaggagtgcatcaccacgcccagctcatttttgtatttttagtagagatggggtttcaccaygttggccaggttggtctcgaactcctgacctcaagtaatcggcctgccttggcctcccaaagtgctgggattacaagtgtgagccaccaagcccagctta

SEQ ID NO: 27691 - DNA, 201 bp, Homo sapiens
taaaaagaaaataagctagtcattctgggcagcattttattgatagaagggggaaaaagtcatttctacttgcatgattttttaaattaaattaaattaawttaatttaattatttttgagaccaagtcttactctgtagcccaagctggagtgcagtggcgcgatcttggctcactgcaacctctgccgcctgggctcaa

SEQ ID NO: 27692 - DNA, 201 bp, Homo sapiens; identical to SEQ ID NO: 5514

SEQ ID NO: 27693 - DNA, 201 bp, Homo sapiens
agaaaactgctcgcccgcgcccgccctgcagctgcacgtgggtcgccctaagcctgggttcggagctgatggcgcaggtcccaggtgccctctagcggctkacgtcagtcacggcgccccggccccggcgcgccccgtccactctgcccactcgggacgcgtggcttgaagtcccgggaatgccacggttgcacccacaag

SEQ ID NO: 27694 - DNA, 201 bp, Homo sapiens
tgcttcttttctctttcttgtctttctgtacgtaagcaactagaagccatttgtgtcaaggtaacgtctggagaaacaaaaggtcaggaaaggccaatgcycctaccgaccacaatccagccccaaactgcaagaaagagccagctgccccgggggaattcctgcctggtggggctccatatcgccagccctcagctgctc

SEQ ID NO: 27695 - DNA, 201 bp, Homo sapiens; identical to SEQ ID NO: 5517

SEQ ID NO: 27696 - DNA, 201 bp, Homo sapiens
ctctgcctttcatgtctgagcagagcccacaagctggctttctgtccacccctgcattgtcaggggccgtttcgcctaccccaggctcaagctgggaaccsagagccattcttgactttctccttcactcactcctccccatgtcctgtggtcgctaagcctggagggctatgctctcccctcatctccctcccctgccac

SEQ ID NO: 27697 - DNA, 201 bp, Homo sapiens; identical to SEQ ID NO: 5605

SEQ ID NO: 27698 - DNA, 201 bp, Homo sapiens
ttgagggtctttctccattgtctctcggcttccaggattgctactgagaagccagaagcctttcttttttttttttttttttttttttgagacggagtctygctctgtcgcccaggctggagtgcagtggcatgatctcggctcactgcaagctctgcctcccaggttcacgccattctcctgcctcagcctcccgagtag

SEQ ID NO: 27699 - DNA, 201 bp, Homo sapiens
tctagattcagtaatgcacagagagatcagtaaaattagaagggagtagttgatggctttgcgaattgctaaggtagaagggagctgttactcaagatgcrtgttcaatttaaaatgaatgtattctttggacctggacataagagttctattgactttttgccactattttatatttagggctgtcatacttgggtgaat

SEQ ID NO: 27700 - DNA, 201 bp, Homo sapiens
acagaaactgtgaggatgctggtactgggaaaaaggatctgcacagcctctagaggcctcccagcaaatgcggggagccatgcccccagggtctacacacwctcgttcatcaacatcacaactggaattcgggatttgtgaagtttagagctgaacagactgttacagattatgagtcaacacgtatattttctctttcaa

SEQ ID NO: 27701 - DNA, 201 bp, Homo sapiens
aaatgtcatcatttgacagagctactatgaggaaaaatatttttatttttaaaaaagttttattgatcgattgatttgagatggggtcttgctctgtcacytaggctggagtgcagtggcttgatcatggctcactgcagcctcgaactcccgggctcaatggatcctccaggttcagtcgatcctccgggctcaattgat

SEQ ID NO: 27702 - DNA, 201 bp, Homo sapiens
catgatctcggctcactgcaagctctgcctcccaggttcacgccattctcctgcctcagcctcccgagtagctgggactacaggcgcccgccaccacgccyggctaattttttttttttttgtatttttagtagagatggggtttcaccgtgttagccaggatggtctcgatctcctgaccttatgatctgcccgtctcgg

SEQ ID NO: 27703 - DNA, 201 bp, Homo sapiens
tttagtagagattaggtctcgagctactgggctcaggcaattctcctgcctcagtgtctcatagaactgggattataggtgtaagccactgtgctcggcctttttttttttttaattgaatttttttttatttttttgatacgtagtttcactctttttgcccaggctggagtgcaatggcgcaatcttgactcaccgcaa

SEQ ID NO: 27704 - DNA, 201 bp, Homo sapiens
acaaaggaccggagatgctgagcatggacagaggctgcccaaggaccagggcagggcggcagtcttgtgccgcggcctggtcaacgcagatgttgcctgcscggcagcacattcgggaggacagctgtgcctagaggagaggggcctcagctgagccaggatggtgagggcagcacaggcaggtggcaggggctcctgggc

SEQ ID NO: 27705 - DNA, 201 bp, Homo sapiens
cagaataggtagtaagtgttaaaggatggggtgtcctggagtcagagccgggcaggtcccagcggccccttcctagctctgtgctggggcaagtgccctayctcactccgctccagtttcatcaccagtggaatggagatgagaatagtttctacctctggcttggtaagaggattaaatgggtcagtgcatgtaaagtta

SEQ ID NO: 27706 - DNA, 201 bp, Homo sapiens
tagggaagagtggaaagggactttgttctgcagagacatacaggttatggtgtgtgcagggactgtgatggaaagctgatggatgcacaaacaaaacgtgrcctgtctacacaatggaaggctgttcagcaataaaaaggaacgaagtactgatttgtgctacaacatggaggaaccttgagaacattaggctaagtgaaa

SEQ ID NO: 27707 - DNA, 201 bp, Homo sapiens
ctctctagctaagatgactgcaacactgaaggaaatgttattagatttctaagcattttaataattataaggaattggtttgtgacccaggtgaacatctyagtttgtcccctggtttttcttagctgccctcaaacccatggatttgttcagtacttgcatgcatagaaagcatctctttgttgggattatttgtactta

SEQ ID NO: 27708 - DNA, 201 bp, Homo sapiens
cgagagtgggatcaagtgccaggcacagtgcaggctgtgtgagtactcagtgaatggttccctgtgtgctaatggggcacacacctgtgagggtgtggtcrggcctctgttggtacagggatgacagtgtggtttgacaaaaaacaaacagtagaaagggtgaaaaatcaattattgtcttagccaaaaaattcttgttgt

SEQ ID NO: 27709 - DNA, 201 bp, Homo sapiens
caattgtggaggcagcagtggggcaggggggatggttcgttgttgggcagagaaaccttcagtggagtcaggaaagaggtaaagagtagggtaaatgcctytgtgcataactgtctacattttggtcatggtgaggcctcagggatgaggacaccagtggtgtccaccagccctggggagtgtggtggtgggagaaccttt

SEQ ID NO: 27710 - DNA, 201 bp, Homo sapiens
gctgtctgtgaggcagcctttgtgctggggctgtgctgtcgccgctgcttcctgggccaggggacaagcctcccatcatgttccttatcaggggaacccargccgtcctgctggtgcttttgtgggagggcagtttgcacactgcccaggcccttctgtcctttgacttctggctttcggtggctttgctggccctgccaa

SEQ ID NO: 27711 - DNA, 201 bp, Homo sapiens
aaaacaccattttatagctagaatttgttagccagaacacactccttacatatcaacgtggtctataaagggaattaaaatttttttaggtaatcaatgasgtttttggaaatcatctctaccgaaattaagaaattatattaatttgtttatgattttagaatcctgcaatacttagaccttaaaagttggagcttcagt

SEQ ID NO: 27712 - DNA, 201 bp, Homo sapiens
tagcggtggggacttgccttgagtgcgctccaggtggtccctggggactcggtcctggcacccctgccctcctggattgcatcccacagccctgctggccrccccgccccagcctccctgctgtgacaggggcaggggctgcggtgaccctgcagcacaggcgcggctccctcggatcccttggatctcaccggtgcatct

SEQ ID NO: 27713 - DNA, 201 bp, Homo sapiens
gatcgccaagagaaattgattgacaggaaaggcagaggaagagattatgggctcccttgctggaattcctctggttcgctctatttagaggacatctccaraacaaacccaccaaaggcagtaatcagatacgatgctgttgatagagttgtccataaaagatccacgatgtcaaaacacccttggttcgtcctaacgatc

SEQ ID NO: 27714 - DNA, 201 bp, Homo sapiens
ttagttactgaggtgccagagggacctagtgagattctggtgtgcgaagaaaccccgcaaataactatctgtttgcctatgtgggtgggccctgggggtgscctctagggttgggtgtgctgctgtgtgcagggagtgtgggaacaggcacagcacaagttggccgaggtctggtggggaagcagtggcacggaggcagct

SEQ ID NO: 27715 - DNA, 201 bp, Homo sapiens
tggggcttgtttcatgtttctttcaagaaggctgggtgctgagttggaatgaatatagtatctatctcctagacacagtcaaccaggtaagtgaagggackccaccatatcttctgtgtctataggcaagagaatgtatctctataaactgttctactcagggacctcagaatgctaccaggagcagtattgacttacact

SEQ ID NO: 27716 - DNA, 201 bp, Homo sapiens
ggatggactaggacagatccgatgacttagtgtccaagttcaattgcaaatgcagcctcatttctttctttgaagtagaaaatcaaagttcatagattagrtgaaagaatagtcattgtacaaaagtaattatagtgtgtgtacttttctttatctacaggagctgtaaaattgacaagcttggcatgtggaaatcagcac

SEQ ID NO: 27717 - DNA, 201 bp, Homo sapiens
ggcttgtttcatgtttctttcaagaaggctgggtgctgagttggaatgaatatagtatctatctcctagacacagtcaaccaggtaagtgaagggacgccrccatatcttctgtgtctataggcaagagaatgtatctctataaactgttctactcagggacctcagaatgctaccaggagcagtattgacttacacttta

SEQ ID NO: 27718 - DNA, 201 bp, Homo sapiens
gcactaggggcaggacgtggcctctctgcctcctgcggggcccacactggctgctgcatgctgccactaacatgtccccagttccggaagtctcctgtcckttctcttgtcacccaactcctgccttccctgaaagtcccttcccgcttccagcccgccggggtcagcttggtcagcgtccattccagccccaacgaccag

SEQ ID NO: 27719 - DNA, 201 bp, Homo sapiens
ggcctccacgaccctggactgggtgtggctctgcctggcagtattcagagggagatgaatgttaggctgtgattgctcatgtcgctttatttagggacacyctagaattatctggagaaagggtttgaaggccagctgtcgtccagaactaagatctgaagtggttttgtctatgctttctttctttaacacattcttcct

SEQ ID NO: 27720 - DNA, 201 bp, Homo sapiens
ggtgacagagcaagacttcatttgaaaaaaagaaaagaaagggttttcttctttggtgtgtgtcagcagaacatgaagttcatcttctcctcattgaagtyttatgaattattatcagccgtacctggtaacactggtttggcagaaagaaaactggcccggggtggggggcagaactagactcgactcttctagcctggt

SEQ ID NO: 27721 - DNA, 201 bp, Homo sapiens
tggtcctttcacaagcgcacacgtgcacatttgtgtttggatggtcatcttgttactagaaatgcagaggtgtggacctgagctagaaccttccctcaagrcagagagtctacacttgtaactgctctgacagcagggcttttgcttgtctcctccttccaggtgagcatcacggactatgtggtgtttgaccagtgcagc

SEQ ID NO: 27722 - DNA, 201 bp, Homo sapiens
ttttgccatgactaggcattgaaaggattgtaatgctttgttctgtagcccccaggtttccctagatgacaaataaacattccttttcctgcgtgaagatmgtctgtggaaaccttggccatggcatcgatatcagagcctgttacattcagagagttctgcccgttgtactatctcctcaatgccattccgacaaagatc

SEQ ID NO: 27723 - DNA, 201 bp, Homo sapiens
gttatggtgtgtgcagggactgtgatggaaagctgatggatgcacaaacaaaacgtggcctgtctacacaatggaaggctgttcagcaataaaaaggaacraagtactgatttgtgctacaacatggaggaaccttgagaacattaggctaagtgaaagcaaccagacacaaaataccacatattatatgattcaatttta

SEQ ID NO: 27724 - DNA, 201 bp, Homo sapiens
aagaggtttattcttcattcaccaaatatcctttatttaaaattttttttcttgagccaaaaatatgtgtgcaagttagtctcttactaatcatatagaaycgtgccttattttgaatgttcttattctgaattagaaggtggaagcaggagcacctgtcacagctccctggaatcgacaccctgctccgaatttcctggg

SEQ ID NO: 27725 - DNA, 201 bp, Homo sapiens
gctgtaattttcacactggctttataggcagcctcactttaaagccaacatttaaagaaaagctttaagatctcaacttgaaaagataatttagtgccagyggtatgaagtgtctagtggaggcactctatgctttgtgatcagtttctctcctttttaaaaaatctgtcattcctaaaactcgtatccctgtgtctggat

SEQ ID NO: 27726 - DNA, 201 bp, Homo sapiens
gcagaactagactcgactcttctagcctggttctgcctttaaccaagagtctcttatcggccggagcctggtttgttttcctgtaaaatggggtgggggtrgaagaagcatcgacttaggggaatcaccaaggtgccttgagtttgttcattttataagggatattctgaaaggtatttttgcaccctttcctcagttaca

SEQ ID NO: 27727 - DNA, 201 bp, Homo sapiens
gctctctgtgggttttgaaggtgactagacagatggaactttgtgcagggttctgcttggaaaacgagattgggaaaaccagctcttccctaactaggagygattgtataccttttccatgtagccccagctcacagcatttatcctttttttttcttgtgtatatttttatcccttgttcatagcttcggagatttgatg

SEQ ID NO: 27728 - DNA, 201 bp, Homo sapiens
agtgatgggattacaggcatgagccaccgcgcccagcctaaattttgttcaattttgatcaatttgaatttcaatacttacaagtagctggtggctgcctrttggacagggagctctaggcaagatctgccattaagttatgtaatcttcagcaagtcgcttcacagcagagtcctcccctccagtctccagtgtacactt

SEQ ID NO: 27729 - DNA, 201 bp, Homo sapiens
agagaggatggcgaatggatcaaagtgggctgtggtcttgtgttgagggtactgtagctggaactgctctggccttgtgccctgtggtgtcgtgttgcagraaagatgagtccactgcagtgggaagctcactggcccttgggcttggggacaggagacaggtactcacatgcctgttctcactctgcggtctactggcct

SEQ ID NO: 27730 - DNA, 201 bp, Homo sapiens
tctcttaagagtgttcccggccatcctgggtcatcagtgtgtctttcaaaagctgccacccacttgaaccatatctcttgcacagtaatttaactcagacycaaacttccttccctggcacctgctgatccgctccagggccacgtctcttctcccagccacgcctgccgggagaccctggatgtccgcagtccagacaca

SEQ ID NO: 27731 - DNA, 201 bp, Homo sapiens
ggacccccggcgcccgccaccatgcccggctaattttttgtatttttagtagagacggggtttcactgtgttagccaggatggtcttgatctcctgacctygtgatccgcccgccttggcctcccaaagtgctgggattacaggcgtgagtcaccgtgcccatcctagttttgctggtttctatgaatttagaatcattca

SEQ ID NO: 27732 - DNA, 201 bp, Homo sapiens
ggcgcccgccaccatgcccggctaattttttgtatttttagtagagacggggtttcactgtgttagccaggatggtcttgatctcctgaccttgtgatccrcccgccttggcctcccaaagtgctgggattacaggcgtgagtcaccgtgcccatcctagttttgctggtttctatgaatttagaatcattcagttcttta

SEQ ID NO: 27733 - DNA, 201 bp, Homo sapiens
ccatgcccggctaattttttgtatttttagtagagacggggtttcactgtgttagccaggatggtcttgatctcctgaccttgtgatccgcccgccttggsctcccaaagtgctgggattacaggcgtgagtcaccgtgcccatcctagttttgctggtttctatgaatttagaatcattcagttctttagctggctggtg

SEQ ID NO: 27734 - DNA, 201 bp, Homo sapiens
cacataggaaaaggtctgaaggaattttcacatgattacttaactctaggtagggattaagattgggatgggctgagggaggaagagtgaaagggaattaygtatttttttaactttactgaggaattactagaaatttttggtacatattacacgcataaacacagcaacacaaagatttgttttgagctttggctgcca

SEQ ID NO: 27735 - DNA, 201 bp, Homo sapiens
tcataaaacaccattttatagctagaatttgttagccagaacacactccttacatatcaacgtggtctataaagggaattaaaatttttttaggtaatcartgaggtttttggaaatcatctctaccgaaattaagaaattatattaatttgtttatgattttagaatcctgcaatacttagaccttaaaagttggagctt

SEQ ID NO: 27736 - DNA, 201 bp, Homo sapiens
agtggtaaaaccagactcttctttcttagtgagagatggtctggagatgtctggatgctcagagcgtgtccacgtgcagcaagcggagaagctgccagggrccacagtttctgagacgaggctcagaggctcttccatggccagctccgtggccagcgagccaaggagcaggagcagctcgctcaactccaccgacagcgg

SEQ ID NO: 27737 - DNA, 201 bp, Homo sapiens
acgatcattgtttcaaagctgaatttgatatataatatcctccttggaccctatccaaagggatttagttactgaggtgccagagggacctagtgagattytggtgtgcgaagaaaccccgcaaataactatctgtttgcctatgtgggtgggccctgggggtggcctctagggttgggtgtgctgctgtgtgcagggagt

SEQ ID NO: 27738 - DNA, 201 bp, Homo sapiens; identical to SEQ ID NO: 5616

SEQ ID NO: 27739 - DNA, 201 bp, Homo sapiens; identical to SEQ ID NO: 5594

SEQ ID NO: 27740 - DNA, 201 bp, Homo sapiens; identical to SEQ ID NO: 5593

SEQ ID NO: 27741 - DNA, 201 bp, Homo sapiens
atggtttataattgcatttttgtgttctacatgatttaagagactaaaatgcttttttaaaattagtctaaaagctagtagtattgtaatgttggtttgtraatccacattttcttttcttttcttttttttttttttttagatggtgtcttgctctgtcacccaggctggagtacagtggtgtgatatgggctcactgca

SEQ ID NO: 27742 - DNA, 201 bp, Homo sapiens; identical to SEQ ID NO: 5590

SEQ ID NO: 27743 - DNA, 201 bp, Homo sapiens
tgtttcaaaactgtgtcttgccctgtctcctactaactgtcgatgtgaggtatgaattatggctgcgcacttacagccacgtgtgctttccacagtctacrctggcttctgtcagtgctagcagtgtgacgctttgtcagtgctcaccatgtgcaggtatcccacaaagcactttagaggtttaactcttttacttctcta

SEQ ID NO: 27744 - DNA, 201 bp, Homo sapiens
tttgagacaaaacgccataagtctggcttttttttcttctttctttcttttttttttttttttctgagacagggtctcactctgtcacccaggatggagcrcagtggcgcaatcatggctcattgctgcctcgacctccccaagctcaagtgatccacctgcctcagcttcctgagtcactgggactacaggcatgtgcca

SEQ ID NO: 27745 - DNA, 201 bp, Homo sapiens; identical to SEQ ID NO: 5608

SEQ ID NO: 27746 - DNA, 201 bp, Homo sapiens
ctctcttaagagtgttcccggccatcctgggtcatcagtgtgtctttcaaaagctgccacccacttgaaccatatctcttgcacagtaatttaactcagasccaaacttccttccctggcacctgctgatccgctccagggccacgtctcttctcccagccacgcctgccgggagaccctggatgtccgcagtccagacac

SEQ ID NO: 27747 - DNA, 201 bp, Homo sapiens
cacgcccagctaatttttttgtatttttttagtggacacggggtttcactgtggtagccaggatggtcttgatctcctgacctcatgatccgcccgcctcrgcctcccaaaatgctgggattacaggtgagagccactacgcccggctttgcttgttttttcttaaggttgtgttggccacgtcggcacctacgccagtgg

SEQ ID NO: 27748 - DNA, 201 bp, Homo sapiens
tagtggacacggggtttcactgtggtagccaggatggtcttgatctcctgacctcatgatccgcccgcctcagcctcccaaaatgctgggattacaggtgmgagccactacgcccggctttgcttgttttttcttaaggttgtgttggccacgtcggcacctacgccagtggggacacttttgccttgaagcagcctggtt

SEQ ID NO: 27749 - DNA, 201 bp, Homo sapiens
aaaaaagtgaggaaatgataaaggcaaaatgcagtccagtggttccatctggggcacaagggggcaggaagtgttaggagcacaggagaacattggttggrtgactgatgatttctttcctaagtttggggatgggttcccaggtgtacctttccttgctaggcttcataactgcatggatatatgtacatatacacagtg

SEQ ID NO: 27750 - DNA, 201 bp, Homo sapiens
ccggcagcgtgtcgtgtttcacaggcaggtgcccggggccagtgggcttaaggccccttggggttcccagggctcctgtggacgatgtcggggggctctcraagaagccgaccccactgggctccaatctctcaaagcaagaactgagggcaaagccaggagtgtgtcccagggagggaaggggctggacacctgggctct

SEQ ID NO: 27751 - DNA, 201 bp, Homo sapiens
tggacctctcccagctaggtacggccacctcgtgagtacacctgccggtgccctgactgccctaaaccggcatcacaacgtgatgtcggacaaaactgccyggcctgtgtccaacctgtgagagttctgagggggtgtttataagctgctgaatttcaggagctcagttggccactctttcagactagacaggctctgggt

SEQ ID NO: 27752 - DNA, 201 bp, Homo sapiens; identical to SEQ ID NO: 5596

SEQ ID NO: 27753 - DNA, 201 bp, Homo sapiens
tgttttgctacactccgtgggctgtcatctgataccagtgacaactgtgcaagggtggtacctcccgattctgcacccagtgtggggcgtcctccacctgyccctctccagcagcaccaccagctaatggagctgcacaccttttattccccggttgaaagtcaaaataacccatcaaaattaaaaacttctcatccaaaa

SEQ ID NO: 27754 - DNA, 201 bp, Homo sapiens
cagaacccgcagacacggctgtgggtgtggagcacaggatctccattggggaaactggcggtttctttaaaaatgaaacaggccgggcgcagtggctcacrcctgtaatcccagcactttgggaggccgagacggatcacctgaggtcaggagttcaagaccagcttggccaacatggcaaaaccctgtctctactaaaaa

SEQ ID NO: 27755 - DNA, 201 bp, Homo sapiens
atcatggtaggaaataatttctgcttaaaccaagatgataacagattatcatcagagacagatttagaaactttaaacaaagctgtttagtttcagtttcyccttgtcttaagagcagagcttttgctctttttaaaataaactccctgccttaccctcccgactcctcacccccagactctagaccaggccctgtcctgt

SEQ ID NO: 27756 - DNA, 201 bp, Homo sapiens
ttacccagtaggtataattaacttcattttataggtagagaaatggagacaggggaccgtctgggacagatgtcacagtcaccctcagagactggaccacycagtggcagcatgactggcagctttcggaaacaaatgttatgtttgcagcagtccatcagttatttaaaattagccaaaaacatagactctccttctaca

SEQ ID NO: 27757 - DNA, 201 bp, Homo sapiens
gaacaaagaaagacaaataggtggtgcccaggggggaaccatgtggcctggtgggagttttgggagaggggccgtgtggcagcacattggtgtgtgacgcrggtgcctgtggagggaacacagtgctggtggggacagagtgcaggcggtggcctcagttgggccctctcatgggcagcagtgtagggttgaccagaaacc

SEQ ID NO: 27758 - DNA, 201 bp, Homo sapiens
atttggactctcacacatgcatttttatgctttgagctgttaccgttgtttagttttgtgttttttgttttttttttttttttttttttgacaggccacarttgctggtttggaaggatccggtgatattgtgtctgtttcgtgcacagaaaatgaaatatttttcttgaaaggagataggaacattataagaatttcaag

SEQ ID NO: 27759 - DNA, 201 bp, Homo sapiens
agtggtgcaggtctctaaggtgtgtatttgggcttcactgggaggtttctctcggggagaaacctggcttgagtgggattgagtctcaagagtgtgagggmaacaggaacaagtccatcctgagtccaagatggccttgggccatctggtgttcagcagatactcattgaggggttgggtgtgtgaacagagggatggcct

SEQ ID NO: 27760 - DNA, 201 bp, Homo sapiens
tcagtgcatgtaaagttaagcacggtgcctgccgctgtacatttcagtaaaggggagcccctgctgtcatctgtgctagcctgcgttctcgccctctagtyccttctgatatgtctctgacttctcatgactttagtttctccttctctacctccatttctcttccctgcacttttttcttcctctcttattgggattcag

SEQ ID NO: 27761 - DNA, 201 bp, Homo sapiens
agttcttacagggcacatgtgggggaatagggaagagtggaaagggactttgttctgcagagacatacaggttatggtgtgtgcagggactgtgatggaargctgatggatgcacaaacaaaacgtggcctgtctacacaatggaaggctgttcagcaataaaaaggaacgaagtactgatttgtgctacaacatggagga

SEQ ID NO: 27762 - DNA, 201 bp, Homo sapiens
gaagtactgatttgtgctacaacatggaggaaccttgagaacattaggctaagtgaaagcaaccagacacaaaataccacatattatatgattcaattttratgaaatctccagaataggcgaactgtagacagagaggagatcagtggttgcccagggctgagagaagaagcgtgtagaggggtgattgctaaagggtag

SEQ ID NO: 27763 - DNA, 201 bp, Homo sapiens
tgtttcttagactttgcccattgtaaaattgtcttttgttgttgttttgagatgaagtcttgctgtgttgatcaggctggtctcaaattcctgggttcaakcgatcttcccaccccagcctcccaagtagctgagactatagccacgtgccactgcacccagcttttaaaattgtctttttattattgagttataagagct

SEQ ID NO: 27764 - DNA, 201 bp, Homo sapiens
ccatgaagtggaggtaacattcatgtctaatgtttggggattgcaggaaaaaaaaatggaagtaactatgatgcctacttcatgtttgttttttttttctytctttttggtgaggatttaatgggtttgtgtgctaagaacagtttgtattaagtacagacggttttcaacttacagagtttcaacttactattttttgac

SEQ ID NO: 27765 - DNA, 201 bp, Homo sapiens
acatgggactctattctgtctgtggttagggggcttttatggaccaagatacagcttttgtatctaagagaaatgtttacaaatacttgtgttttaatcartattcaatatattaaagttttcatttaaaacgtaactaatttaagcctctgtgctcattttaaaataatcaaaatggttcatacacatacagccctttct

SEQ ID NO: 27766 - DNA, 201 bp, Homo sapiens
ttattgactcacagttacgcatggctgcggaggcctcaggaaacttacagtcatggtggaaggcacctcttcacagggctcactgtcacaagaacaggagkggggaaaccatgcccatgattcagttatctctacctggtccctcctacgacatgtggggattatgggaactacaattcaagatgaaatttgggtgaggac

SEQ ID NO: 27767 - DNA, 201 bp, Homo sapiens
caggctggtctcgaactcccgaccccaggtgatccacctgcctcggcctcccaaagtgctgggattacgggtgtgagccactgcatccggccggaagttgyttttatttttttactatttttaatttttttaaagaggtttatttggcccacaattctgtagctggaaagtccaagattgggcagctgcatctggtgggga

SEQ ID NO: 27768 - DNA, 201 bp, Homo sapiens
gtaacaaaacttatagagctttagtaattaagggagtgtggtattagcacaagaaaagatacatagatcactggaacagattagagaagtcagaagaccarcatgtatatggatacttgagtaattgcaaaggtgatacgacaaagtctttttcagtaaatgatgtgggacagctggatatgaatgggaagaaaaatgaaa

SEQ ID NO: 27769 - DNA, 201 bp, Homo sapiens
ctaaaactatggtttttaaagatatacacgcatgtggtaaagctatgaatcaaagcaagagaatatttcatctcaatgttaggagagtggttttggtgggrtggggtatgtagtcaggcagaggcacacaagagcttcaaaggtgctgttaatggtccctttcccaagctagatggggattccatgggtgctcatttttta

SEQ ID NO: 27770 - DNA, 201 bp, Homo sapiens; identical to SEQ ID NO: 5621

SEQ ID NO: 27771 - DNA, 201 bp, Homo sapiens
acaggagaattgcttgaacctgggagatggaggttgcagtgagccaagatcacaccactgcactccagcctgggtgacagagtgagactccatcttaaaaraaagaaagaaagaaaaaaagagaacattttagtatttaaaacttactacaacactttgaaagcagatatttttttcctaagtgtttacaggagcaggcac

SEQ ID NO: 27772 - DNA, 201 bp, Homo sapiens
aggagtagagagatggaggcgctcaggggccttggattccttttgtgcctactcgcttttttcttaggttattttctctcttaagagtgttcccggccatyctgggtcatcagtgtgtctttcaaaagctgccacccacttgaaccatatctcttgcacagtaatttaactcagacccaaacttccttccctggcacctgc

SEQ ID NO: 27773 - DNA, 201 bp, Homo sapiens
acctgggagatggaggttgcagtgagccaagatcacaccactgcactccagcctgggtgacagagtgagactccatcttaaaaaaaagaaagaaagaaaaraagagaacattttagtatttaaaacttactacaacactttgaaagcagatatttttttcctaagtgtttacaggagcaggcacatgcctgtttttcaaag

SEQ ID NO: 27774 - DNA, 201 bp, Homo sapiens; identical to SEQ ID NO: 5602

SEQ ID NO: 27775 - DNA, 201 bp, Homo sapiens
acctgaggtcaggagttcaagaccagcttggccaacatggcaaaaccctgtctctactaaaaatacaaaaattagctggacgtggtggcaggtgcctgtartcccagctacttgggaggctgaggcaggagaatggcgtgaacccgggaggcggagcttgcagtgagccgagatcccgccactgcactccagcctgggcga

SEQ ID NO: 27776 - DNA, 201 bp, Homo sapiens
gagttcaagaccagcttggccaacatggcaaaaccctgtctctactaaaaatacaaaaattagctggacgtggtggcaggtgcctgtaatcccagctactygggaggctgaggcaggagaatggcgtgaacccgggaggcggagcttgcagtgagccgagatcccgccactgcactccagcctgggcgacagagcgagact

SEQ ID NO: 27777 - DNA, 201 bp, Homo sapiens
tgggagacttagttttgtttttttttgtttttttgagatggggcctcgctctgttgcccaggctggagtgcagtggcaccatcacaggtcactgcaacctygacttcctgggcccaaccgatctcagcctcccgagtagctgggactacaggtgtgtgccaccacacccaactaatttctgtgtattttgtagagacagga

SEQ ID NO: 27778 - DNA, 201 bp, Homo sapiens
ttgagatggggcctcgctctgttgcccaggctggagtgcagtggcaccatcacaggtcactgcaacctcgacttcctgggcccaaccgatctcagcctccygagtagctgggactacaggtgtgtgccaccacacccaactaatttctgtgtattttgtagagacaggatctcactatgctgcccaaactggtcttgaact

SEQ ID NO: 27779 - DNA, 201 bp, Homo sapiens
gcagctgagagatgaattttacattttgtttaatttttattttattttattttattttttgagacagagtcttgctctgtatcccaggctagagtgcagtrgtgcagtctctggtcactgcaacctccacctcctgggttcaaacgattctcctgccttagcctcccgaatagctgggattacaggtgtgcaccaccacac

SEQ ID NO: 27780 - DNA, 201 bp, Homo sapiens
gtggctcatgcctataatcccagcactttgggaggccaaagtgggaggatcacttgaacccaggagttcaaaatcagcctaggcagcgtagtgagaccccrtctctacaggtaattttttaaattagccaggtgtgttggcgtgcacctgtggtcccagctactccagctactcaggaggctgaggtgggaggatcacttg

SEQ ID NO: 27781 - DNA, 201 bp, Homo sapiens
tacatattacacgcataaacacagcaacacaaagatttgttttgagctttggctgccagttattagtggtttaaccccagagatgaattaaatatttatgytgttgttgttgtcattttcatcatgagagctggctgggtcttagaatcatttggtacaatccccactttttatagataaagaaattctaagattcctgct

SEQ ID NO: 27782 - DNA, 201 bp, Homo sapiens
tgtagagttgttttaaatattaaagtgtacaaaaaaaaaatttaaatgggccgggtgtggtggctcatgcctataatcccagcactttgggaggtcgaggsgggtagattgcttgagctcaggagttcaagaccagcctgggtattattgtgaaatcccatctctatgaaaaatacaaaagttagccaggtgtggtggcat

SEQ ID NO: 27783 - DNA, 201 bp, Homo sapiens
ggatttaatgggtttgtgtgctaagaacagtttgtattaagtacagacggttttcaacttacagagtttcaacttactattttttgactttaagattgagygaaaacgataccattcagtagaaactgtatttccagtaaccatacaaccattctgtttttcactttcaatatggtattaaataaattacatgagatatgc

SEQ ID NO: 27784 - DNA, 201 bp, Homo sapiens
aaattttagatcacctactactttttttttgtttttttagtagagattaggtctcgagctactgggctcaggcaattctcctgcctcagtgtctcatagarctgggattataggtgtaagccactgtgctcggcctttttttttttttaattgaatttttttttatttttttgatacgtagtttcactctttttgcccagg

SEQ ID NO: 27785 - DNA, 201 bp, Homo sapiens
aggtgacagggatcctggccctttgagcccctgactctctaacttcctcccttcctcatcccactccaggtagctgggaagccaagaaattttatggtgtrtttttatttggaggttcggtgtggaagtaagacttgccatggtgagcagggctggattgagaagagttgggcaccattttctttgaagtagttaacttct

SEQ ID NO: 27786 - DNA, 201 bp, Homo sapiens
gctctaagcgttacatttgcaaaggtgttagaacaggagaaaatgtcatccagggactccagggagtctttgtagggagacagcagcacgcgtctcagaasgtttgtagtagaggggtgtccacagatagcaggggttgggagaagggttgacttggcgtcttgctgacccgttttaccgtctcgtgttaatgatatcctc

SEQ ID NO: 27787 - DNA, 201 bp, Homo sapiens
tgaactcctgacctcaggtgatctgcccaccttggcctcccaaaatgctgggattacaggcataagccactgcacccggcccatcttttaataagagctcrgcatattcatacttgattgatcagcattttcgtcattagaaatgaggtggggtttttttgtttttgtttttttgtgttttcatttcaaagattaaaaacc

SEQ ID NO: 27788 - DNA, 201 bp, Homo sapiens
cttcctctttaggaattctgttttaatgagctctctgctgtgggtgaacagtctactccctgactctaaaaggaaagtccattcattctttcatgctgctsttaggccattgttagtgaactggagctggtgtttcctgaacgatgttctcctgagctggaagacctcccatatctgcatggaatcatttgcttgcttttt

SEQ ID NO: 27789 - DNA, 201 bp, Homo sapiens
gaagagggagcaccagtcatctgtctccacacctagacatcaattgtactggcaggatctgtctgatctaactattttggaactcggaagtctactgaggyttacacattcttgctgggatggcaaactgtggttaattttggtcagtttcaactcttagcacagtagcagctatgcactccccaaccccagttctgtgga

SEQ ID NO: 27790 - DNA, 201 bp, Homo sapiens
ctaaaaaaacaaacttcagagaggagagaaatgcctcctcatatacaagggacccccaataagattataagcagatttctcatcaaaaactttggaggggycaggtgcagtggctcacatccataatcccagcactttgggaggctgaggcaggtggatctcttgaggccaggagtttgagaccagcctggccaacatggc

SEQ ID NO: 27791 - DNA, 201 bp, Homo sapiens
tgtcattttcatcatgagagctggctgggtcttagaatcatttggtacaatccccactttttatagataaagaaattctaagattcctgcttcaaggcacrtatctctgattgcctaaccattgtgcttacttcttgtgagaggaggtaggccctctgtgcagtctgtggatttcaaggatatggaatacagatgcgtggt

SEQ ID NO: 27792 - DNA, 201 bp, Homo sapiens
gataaaccaactagatttaacagacatttatagaacactctacccaataacaatagcatacattttctcaaatgtagatgggatgttttccaggatagacyatatgttaagccacaaattagtgtcaatagattttaaaagatatacaaagtatgttcttattgcaaccacaacaggataaagttagaaatcagtaacaga

SEQ ID NO: 27793 - DNA, 201 bp, Homo sapiens
cctgagatctaacacttacagtggtttgatcagaaattgcaccatgcttgccaagcaacttttggactaaaagttgctgcccacgtatatcaggggaagaatatatatatatatatatatagtacctatcttagcatctgatttgtatgaccattacttcaatgtaaaataataaattggctttccagcttaaacttcaat

SEQ ID NO: 27794 - DNA, 201 bp, Homo sapiens
aaagtatctctgtttgcagatgacatgatcttgtatgtagaaaccctaaagattccacaaaaaattgtttgaactaatacatgaaactgacatagtagcarcatacaaagtcaatgcacaaaaatcagttgcatttctaaacaccaacaatgaataatatgaaaaagaaattaagaggaaaattccacttaaaatggcatt

SEQ ID NO: 27795 - DNA, 201 bp, Homo sapiens
ctgagatctaacacttacagtggtttgatcagaaattgcaccatgcttgccaagcaacttttggactaaaagttgctgcccacgtatatcaggggaagaatatatatatatatatatatagtacctatcttagcatctgatttgtatgaccattacttcaatgtaaaataataaattggctttccagcttaaacttcaatt

SEQ ID NO: 27796 - DNA, 201 bp, Homo sapiens
gaattttggaaaacgtttagcctttatctctgaagataccacttttcattaccctctcttttcatttcctgctgaaacccctttttttgtttgttttttgytttgttttgttttgttttagacagagtttcactcttgttgcccaggctggagtgcaatggtgtgatcttggctcaccgcaacctctgcctcccacattca

SEQ ID NO: 27797 - DNA, 201 bp, Homo sapiens
tgaggcaagagaatcgcttgaacctgggaggcagaggttgcagtgagccgagattgtgccattgcactccagcctgggtaacagagtgagactccttctcwaaataaataaataaataagatgtggaaaaaggtaaaacagcgtatgaaggctgggtgtggtggcttacgcctgtaatcccagcattttgagaggcagatc

SEQ ID NO: 27798 - DNA, 201 bp, Homo sapiens
gaggcaggagaaatgcttgaacctgggtgacagaggttgtagtgagctgagattgcaccattgcactccagcctgggcaacaagagcaaaactccatctcaaaaaaaaaaaaaaaaacaaaaaacaatcctactatatgctatatataagagactcacggccaggtgcagtggctcaagcctgtaatcccagcagtttggg

SEQ ID NO: 27799 - DNA, 201 bp, Homo sapiens
gtaaacaaatgaccaataagcatatgaaaaatgaccatcactaattattagggcatgcatgtcaaaactataccccacacccattaggatggctactgtcaaaaaaaagaaaaaaaggaaataacaagggttggtaaggatgtgagaaatgggaaccctggtgcattgttcacaggaatgagatgatgcagccaatactag

SEQ ID NO: 27800 - DNA, 201 bp, Homo sapiens
gagggcgtgagcagcttctgtccggaaggcgagcagtggaagtgtgacattgtcaggtactggcgggccagagactcctttcacatcgtgcttgtcctacycttcgttcttgtccacttgacaccacaaggcaccatgaggccgttcctgggaggcagcacctgcagcctccatggctataggctaagcttgaatctctgc

SEQ ID NO: 27801 - DNA, 201 bp, Homo sapiens
tcataaagacggaaagtagaatggtagttgccaggggctggggggagggatgaatggggaattattgtttaatagagtttcagttttacaagattaaataktcgtggagatggataatggtgatgattgaagagcattatgaatgtattgaataccactgaaatgtatactttaaaaagggatactggtaattttacgtta

SEQ ID NO: 27802 - DNA, 201 bp, Homo sapiens
agtttgagatcagcctgggcaacgtagaaaggccccgtctatatttttaattaattaattaattaaagtttttttttaaagcactcatcataaaagaatayagcaaaataccaaaaaaggaaaaataagccaataaccaagtcaaaatgaggtgtggagttctgactgtgtgtctttggggcttcttcccatcttcctggc

SEQ ID NO: 27803 - DNA, 201 bp, Homo sapiens
ttaccatgttggtcaggctggtcttgaactcctgaccttagatgatctgcctgcctcggccttccaaagtgctgggattacaggcgtgagccaccacgccyagccaagaattcagcaattattagctgcatgactttcagtccctctgatccaagactgacctagtacaaatattctctagtagtagttctcaagctttgt

SEQ ID NO: 27804 - DNA, 201 bp, Homo sapiens
tttcactatttcatctgcctccctgtctagatcataagctacttgggagtaagaactgttttgttttttgtattctttccactcctccatggcattcactrcaacataaatcatagaggtcagaacatactgaagtgcattttgagttaaaatgctcaaaagtgatcttagtgacacgtgtttactttccctgtttattta

SEQ ID NO: 27805 - DNA, 201 bp, Homo sapiens
gcagtgctcagggagactgcagcatcctggagccctgccagccaggagggactgttcccattgcgggcagaatctgttacttgcaatcagaagaacttcarctaatacttgttttttgcctgtagattcaattgaccttgggaatgttgcttaaactcgcctttcactttcattttcctatcagtaaagtgaagggtcata

SEQ ID NO: 27806 - DNA, 201 bp, Homo sapiens
gacctctccctctgggctgcactcatccagaaggtgcttccccgagcctgtctgtagagtcagccacagagcagggcgatgagctatcagagaccagggtrtgtgccactgggtccagcttctgctcttcttgtctcacagcaatatttgagtcctggtgctagccatggcgcagtcgttgggctggtatcagtgacaagg

SEQ ID NO: 27807 - DNA, 201 bp, Homo sapiens
ttttgaactcctgggctccagcaatcctgccaccttggcctcccaaagtgctggattccaggcatgagcaactgcacctggcacccctcctgttttctgtytgctctggctgaaggcctccttttccttttcttttttttttttttttttgagttggtgtttttgcccttgttgcccaggctggagtgcagtggcgcaatc

SEQ ID NO: 27808 - DNA, 201 bp, Homo sapiens
aatgaggttggtgagttcaaaaaacagaaaacaaaacaaaacaaacaagcaaacaaaaaaaccagtgtgctggaatgaaatagacagaaaaggactagtgygtgagtaggtgatcagacaactagaacctaataggccaagataagaagttggaccgagggcagtggctcacgcctgtaatcccagcacttcaggaggcca

SEQ ID NO: 27809 - DNA, 201 bp, Homo sapiens
gagtgcagtggcgcaatctgggctcactacagcctccgccccccgggttcaagcgattctcctgcctcagcctcccacgtagctgggattacaggcacccrccaccacgcccggctaattttgtatttttggtagaaatggggtttcaccatgttggccaggctggtttcgaactcctgacctcaggtgatccacctgcct

SEQ ID NO: 27810 - DNA, 201 bp, Homo sapiens
tctcctgcctcagcctcccacgtagctgggattacaggcacccgccaccacgcccggctaattttgtatttttggtagaaatggggtttcaccatgttggycaggctggtttcgaactcctgacctcaggtgatccacctgccttggcctcccaaagtgctgggattacaggcattagccactgtgcccagcctggaggct

SEQ ID NO: 27811 - DNA, 201 bp, Homo sapiens
aggctttcttcagatgttggcagtcccctggttggaagagtgaggcccagcaaggctgactggaagccctgagcacatgcatggagcctgtgggccccgcrggtctctgacagcaatctggctgggctgctgggtggggagtcgttgcttttagccttccagggcccgctgagtccttgccatgcatcccccactttccag

SEQ ID NO: 27812 - DNA, 201 bp, Homo sapiens
atcatataatatgtggccttttttatctgacatctttcactttgtatcatgtttcggagttcatccacgttgtaggtgtatcagttcttaattcctttttrtgactacatcacagctctgttgtatggataggccacattggtttatcatttcaccagtggatggacatttggattgtttctgcttattggctactgtgaa

SEQ ID NO: 27813 - DNA, 201 bp, Homo sapiens
ctttatatttttccttttaagttacaacccgcataacataaaatttcagccttctacagtgtgcagctcagtggctttagcatcagttagcagcagttagyaccatccaattccagagggttcccatcactccaaaacagagagaacacccttacccattagcagtcacttcctgttctcacagaaccagcccctccgccc

SEQ ID NO: 27814 - DNA, 201 bp, Homo sapiens
ctcgatgacaaacatgacccctttctgcaggaagcttcctgtggctgtgccagagcagcaaggacctgtgcagcgtcagcgcccagagcgcacagtcgcgrccctccacggtgcagctgcctcccgaagccgagatgcgcgcctatgccgcctgccaggatgcgctgtgggcgctggacagcctcggccaggtgttcatca

SEQ ID NO: 27815 - DNA, 201 bp, Homo sapiens
ccagggagaaataaacaggtgagtactcatgatcttaacacgtgttaacttcttggcacattcctcatggatttttaaaattagaaatcctcatctgcttrgaaagtttatgctcagagaaagccgggcacgactttctctgcccaggctcatgcctgtaatcccagtactttggaaggccaaggcgggctgatcacgagg

SEQ ID NO: 27816 - DNA, 201 bp, Homo sapiens
ttgcagacaggtaaccgcgggccacgcttagaggcctgccagctctgccgtcactgcctctgctgcaccctgctttgctagtaacatgcttaccacaatcrctatgattaagaggctaaatccattcgaattaagacacttctgggaagagagtatttgccatttggcatgtattagcagtttcctgcattgacacaaact

SEQ ID NO: 27817 - DNA, 201 bp, Homo sapiens
gttttttgttctttctttctttcttctaattttagtactgggaaatttggtgcttgttttataccaggactctgtaagcaaagtgatctaaccttgtatgygtcacggcccgggctccggctatggaaggctgatgtccacgggactgttcaagccacgtttatcttaaaagatgcttttgccgggggagtcaagcctttt

SEQ ID NO: 27818 - DNA, 201 bp, Homo sapiens
atagacttatgttttataagcttccacttctatgactaaggagttggcctactggaacattcacttttttcattccactgttgtgtattacttttacttgraaaagaagctattatcattcctacttccttgaaaggttagtaggagtgatgccaagcacttctgaatcctaactgtggacaagtcagtgatttcaatgga

SEQ ID NO: 27819 - DNA, 201 bp, Homo sapiens
cgcctgccgggagaccctggatgtccgcagtccagacacactgggcactctgcctatgggtgctgacccccctgttctcctccttattttcagcgaaaggmaagctttagaacccgtctgcataacgctcggggatcagcagactctctgggccctggacatccatgggaacctgtggttcagaactggcattatttccaa

SEQ ID NO: 27820 - DNA, 201 bp, Homo sapiens
attacagcatttcaaataaaaatggtgttttgtgaaaaaagcagctggctcagctcatagctgcaacagttgcacaagtggtttccttgagagaaccactragtgtatttcagtgtgcagcagaagggagaatacaaaagtacctatcctctggccaggtgtggtggctcacacccgtaatcccagcactttgggaggcca

SEQ ID NO: 27821 - DNA, 201 bp, Homo sapiens
tttttttttgagacatggtcttactcctctcacccaggctggtgcacagtggtgcaatcacggctcactgcagctttgacttcccaggttcaggtgattcycccaccttggcctcccgagtagctgggactatgggtgcacaccaccatgcccagctgatttttttgtatttttatagagacagggcttcgccatgttgca

SEQ ID NO: 27822 - DNA, 201 bp, Homo sapiens
gcagtatttctgaaataattgatgaaacttttcatatatatattggatttcatatatatgaaatatacatatatttcatatatatataatgtatatatatwtatattttttgagacagagtctcactgtgttgcccaggctggagtgcagtggtgcgatcttggctcactgcaacccttgcctctgggttcaagtgattct

SEQ ID NO: 27823 - DNA, 201 bp, Homo sapiens
agtatttctgaaataattgatgaaacttttcatatatatattggatttcatatatatgaaatatacatatatttcatatatatataatgtatatatatatwtattttttgagacagagtctcactgtgttgcccaggctggagtgcagtggtgcgatcttggctcactgcaacccttgcctctgggttcaagtgattctcc

SEQ ID NO: 27824 - DNA, 201 bp, Homo sapiens
tatttctgaaataattgatgaaacttttcatatatatattggatttcatatatatgaaatatacatatatttcatatatatataatgtatatatatatatwttttttgagacagagtctcactgtgttgcccaggctggagtgcagtggtgcgatcttggctcactgcaacccttgcctctgggttcaagtgattctcctg

SEQ ID NO: 27825 - DNA, 201 bp, Homo sapiens; identical to SEQ ID NO: 5601

SEQ ID NO: 27826 - DNA, 201 bp, Homo sapiens
catggatggacacccattagcacagatggccctaaacaggagtgtggagcatgcagcactgagggaaccatggactccatgcagagatcaggaaggcagcrtgcagagtggaccaacagctaagccttgaagctgacgaggacttccccatatggaaggagggggagggcgtctccagcaaagagggcagtgtctgcctag

SEQ ID NO: 27827 - DNA, 201 bp, Homo sapiens
ctgtaacctgaactcctgggctcaaatgatccttctgtctcagcctcccaagtagcggggaccataggcacgtgccaacatgcctggctaataaaaaaaawttttttgtagagacatgatctcacaatgttgcccaggctggtcttgtaaagtatcattttatgttaatagcattttatatatttaatatcatttaatttc

SEQ ID NO: 27828 - DNA, 201 bp, Homo sapiens
gcgccaccatgcctggctaatttttgtatttttagtagaggcatggtttcaccatgttggccaggctagtctcaaactcttgacctcagatgatctgccgycttggcctcccaaagtgctgagattgcaggcatgatgcatccagcctgaatacaatgttatgtgatgcgtgactgtatctgccactcatggttgttgtaa

SEQ ID NO: 27829 - DNA, 201 bp, Homo sapiens
ttgaaaaaaaaaatttggttttgacatttaggtccaattttctgccgagaaatgatgtatgttttttgtatgtaaacacaaaattaaacttgttctttttkttgttgttgttgttgttgttgttgttgagaaagagtctcgctctgtcacccaggctggagtgcagtggcatgatctcggcttactgcaacctccacctcc

SEQ ID NO: 27830 - DNA, 201 bp, Homo sapiens
tgaagtataactaagctgttttgttatacacaggcatctctcatttgtaaataatttgtaaattgaagcgagaaatgctgtattcttagtatttttttactttttttttttttttttttgagacaggtttcactctgtcgtgcaggctggagtgcagtggcatgatctcagctcactgcaacctccacctcccaggctcaa

SEQ ID NO: 27831 - DNA, 201 bp, Homo sapiens
cccaggctcaaatgattctcccacctcagcctcccaagtagctgggactatgggcgtgcaccaccacaccctgctaaattttgagactccgtctcaaaaawaaataaataaataaatataaaaagaaagctatggcaaattattttactgattttaatatatgagcttcttgaagaacaaaaactatttcttagagtcttt

SEQ ID NO: 27832 - DNA, 201 bp, Homo sapiens
ctcccaagtagctgggacccccggcgcccgccaccatgcccggctaattttttgtatttttagtagagacggggtttcactgtgttagccaggatggtctygatctcctgaccttgtgatccgcccgccttggcctcccaaagtgctgggattacaggcgtgagtcaccgtgcccatcctagttttgctggtttctatgaa

SEQ ID NO: 27833 - DNA, 201 bp, Homo sapiens
ccaaaaaaggaaaaataagccaataaccaagtcaaaatgaggtgtggagttctgactgtgtgtctttggggcttcttcccatcttcctggcaggtctgagygtggatcgcccttgtgccagagccgtaaaggtggactgtccctacccgctgtcccagatcacagcccggaacaatgtggtgtgggcgctgacagagcaga

SEQ ID NO: 27834 - DNA, 201 bp, Homo sapiens
atattaatatactaactcttcataaaaataatacgtgtttctctttctcattgttgctttaaagcaaccgaactaacgaagacgggcctatggatatgttrgatatattccaattatttggcttcctctttaggaattctgttttaatgagctctctgctgtgggtgaacagtctactccctgactctaaaaggaaagtcc

SEQ ID NO: 27835 - DNA, 201 bp, Homo sapiens
taatgagctctctgctgtgggtgaacagtctactccctgactctaaaaggaaagtccattcattctttcatgctgctgttaggccattgttagtgaactgsagctggtgtttcctgaacgatgttctcctgagctggaagacctcccatatctgcatggaatcatttgcttgctttttctttctttctttctttttttttt

SEQ ID NO: 27836 - DNA, 201 bp, Homo sapiens
ccgcccgcctcagcctcccaaaatgctggcattataggcgtgagccaccggcctcaggagcatgttttaatcactgctgtgagtcgtcagctggggatgartcttcaggttgaagctcttgcacagctggctctctcctagctgtgtaagaacctctggcctgggtgcacagccatgctggcttcataggccatatgctgg

SEQ ID NO: 27837 - DNA, 201 bp, Homo sapiens
gaggctgaggcgagcagattgcctgagcccaggagttcaagaccagcctaagcaacatggcaaaaccccgtctgtacaaaaaatacaaaaattagctgggkgcctgtagtcccagctgctcaagaagctgaggtgggaggatcccttgagcccaggaggcagaggctgcagtgagccatgatggctgccacctcactccag

SEQ ID NO: 27838 - DNA, 201 bp, Homo sapiens
aaagcaagaagagggctgggcacagtggctaatgcctataatcccagcactttgggaggccaaggagggcggatcacctgaggtcaggagttcaagaccarcctggccaacatggtgaaaccccgtctttactaaaaatacaaaaattacctgggtgtggtggcacatgcctgtaatcccagctacttggttgggaggctg

SEQ ID NO: 27839 - DNA, 201 bp, Homo sapiens
tggcaggcgttgatgaggccctgcggctggtggtgccgttggggacaggccgtcctggagagtcgggtgaggcggagccagcccctgtggtcgtagtcacygcccgttattctgtgttctgggctttgcggcaacacacaagtttattctcttttctgcatggcagccctccggctgttaaaagacgctctcaaacctccc

SEQ ID NO: 27840 - DNA, 201 bp, Homo sapiens
cctcctgtttgcaaacccacagcgcctctaagcctggggttcctggtggggccctgtgcctgcttaggatttctcctcccagaggcagacaagaagagtgkgttcttcttgtcgcagagctgtaggagcctgcacacacagccactctgcctctcagggtgccacagtcagcgcagagaagcctcaggggtggcctggtct

SEQ ID NO: 27841 - DNA, 201 bp, Homo sapiens
cacagtcagcgcagagaagcctcaggggtggcctggtctatctgttccttgtggagccacctcctccacacagccctggtgaggggtcagggttgtggggstcactcgttattcagcacgtgtttaccatgcacccctgtgcactgtggcaggctcagcagtgacatggtaaacacggcagatctgagccctccgttgtgg

SEQ ID NO: 27842 - DNA, 201 bp, Homo sapiens
tgggctcaagtgatcctcttacctcatcctcctgagtacctgggactacaggtgtgtgtacaaaatacaaaaaacactcccagctgtccagccttaaatamaatcttgtacataagccagatgtgttcaacaagtaacagcaaaactggtcccatgaaactgccccttccacaggggccctgaggcacctctgcaaggcca

SEQ ID NO: 27843 - DNA, 201 bp, Homo sapiens
tttagggaacattgattgaaagcgtgctctgctccccaggaacgttttaggatgcagaaacaaataaatgtgtccccttctcagaaggagagagattttaytgagccttggggaaatgagggctaacagaataagaggaaatgtttttaacatctgtgtcttaaagacttgctttctgctgtagactattgtgtgcgtcta

SEQ ID NO: 27844 - DNA, 201 bp, Homo sapiens
agccagatgtgttcaacaagtaacagcaaaactggtcccatgaaactgccccttccacaggggccctgaggcacctctgcaaggccagggccccacaggcrctgctggaaaactgctggtcttcgggccagtgaggacagagagagagctcagcacagcaggccccgggcagccatacccacctcgtaccacggtcagagt

SEQ ID NO: 27845 - DNA, 201 bp, Homo sapiens
gctggcagatttgctgccacgttggttctgaggtgtgagagggatgagttggagatgattcctaggtctgtggtctatgcagctgggtgagtggacatgcygtggattgacgcagagaatcctggaggcacggggagaaggaggagatggaacagcctgctgtggccccgccatgtcctctccctgcagtggagagctggc

SEQ ID NO: 27846 - DNA, 201 bp, Homo sapiens
ggctgtgggtctgagacctgggggttgggtgaggtggaacatggagttgggtgaacattgggtaaggaggaggagcagaaagtcttagcagaaatgtttgytgtgtctgcattgtttttcccaaacctagcgcaggacagtgagacagcggctctatgccttttcctcagcccgtcctagacactgtttctgccaggagga

SEQ ID NO: 27847 - DNA, 201 bp, Homo sapiens
gcgggtgtacctctcggggagctgtgcgctggcagccactggcatgcagacaggagctcgcctagggagatttgggcaggcttgtgttctgaagaggaaasggcatcaggagagaacaggagttggggggtcagaggagtcggaggccatatggagggacatagcagctgctgcgagaccgggggctgaggcagcttcgac

SEQ ID NO: 27848 - DNA, 201 bp, Homo sapiens
agaggagtcggaggccatatggagggacatagcagctgctgcgagaccgggggctgaggcagcttcgacgggcctgagtctgtagcatggaggctgtgcasagccctcctcatcagcagggccaagggattggaagggctgaaagaggagttgacggcgagtatggagagcttttaggaggagtgtttttgtagaagagaa

SEQ ID NO: 27849 - DNA, 201 bp, Homo sapiens
ccgtgtgggaatgggcaggtgagtgagctggcatctgtggccaggtggctagcgtctgctgaaaggcaaaggctgccttgtgcatttagggcaggcggctyggtgcagacaacacctcgatgacaaacatgacccctttctgcaggaagcttcctgtggctgtgccagagcagcaaggacctgtgcagcgtcagcgcccag

SEQ ID NO: 27850 - DNA, 201 bp, Homo sapiens
tttagtagagacggggtttcactgtgttagccaggatggtcttgatctcctgaccttgtgatccgcccgccttggcctcccaaagtgctgggattacaggygtgagtcaccgtgcccatcctagttttgctggtttctatgaatttagaatcattcagttctttagctggctggtgcctctgtgacaactggtatttaggg

SEQ ID NO: 27851 - DNA, 201 bp, Homo sapiens
ctcctgggctcaagcagtcctccctccttggcctccaaaagtgctgggattacaggtgtgagccaccatgcccagctattcagcagttttagaggcagccmctcccaggaccttgctcagcagggctcctttcccttcctccagggtaagagtccacctggtgttcaggacctcgccttctcatgcccactcagatgcacc

SEQ ID NO: 27852 - DNA, 201 bp, Homo sapiens; identical to SEQ ID NO: 5598

SEQ ID NO: 27853 - DNA, 201 bp, Homo sapiens; identical to SEQ ID NO: 5622

SEQ ID NO: 27854 - DNA, 201 bp, Homo sapiens
tcactgagtgagcaatgctccatacatccaaaagcagagaacacatacatttcttccccaaaggagttttactgcaaaatacttcacattaacggaaaatmcacacacacacacacacacacactgtaaggtctaaatgatgacagaacacctgtgtgtactcaccaccctgcttaaagggtctcagttttgtacttttca

SEQ ID NO: 27855 - DNA, 201 bp, Homo sapiens
ttgaaaggattgtaatgctttgttctgtagcccccaggtttccctagatgacaaataaacattccttttcctgcgtgaagatagtctgtggaaaccttggycatggcatcgatatcagagcctgttacattcagagagttctgcccgttgtactatctcctcaatgccattccgacaaagatccagaagggtttccgctct

SEQ ID NO: 27856 - DNA, 201 bp, Homo sapiens; identical to SEQ ID NO: 5624

SEQ ID NO: 27857 - DNA, 201 bp, Homo sapiens
ttatttatttattttttgcgacagagtttcgctcgtcgcccaggctggagtgcaatggcacgatctcggctcactgcaacctcacctcctgagttcaagcrattctcctgcctcagcctcccgagtatgcatgcccagcgaattttgtatttttagtagatacagggtttctccatgttggtcaggctggtcttgaactcc

SEQ ID NO: 27858 - DNA, 201 bp, Homo sapiens; identical to SEQ ID NO: 5627

SEQ ID NO: 27859 - DNA, 201 bp, Homo sapiens
ttcttttttttttttttttgagacagagtcttgctgtgttgcccaggctggagtgcagtggtacaatctcagctcactgcgagctccacctcccaggttcrcactattctcctgcctcagcctccccagtagctgggactacaggcacccgccaccacgcccagctaatttttttgtatttttttagtggacacggggttt

SEQ ID NO: 27860 - DNA, 201 bp, Homo sapiens; identical to SEQ ID NO: 5629

SEQ ID NO: 27861 - DNA, 201 bp, Homo sapiens
catcaccacgcccagccaatttttttgtatttttagtagagatggagtttcactatgtcggccaggctggtcttgaacttctgacctcaagtgatctgccygcctcagcctcccaaagtgctgggattacaggtgtgagccaccacaccaggccataatttgctctaaatagcagttcaggccaggtgtggtggctcatgc

SEQ ID NO: 27862 - DNA, 201 bp, Homo sapiens
cccgccccagcctccctgctgtgacaggggcaggggctgcggtgaccctgcagcacaggcgcggctccctcggatcccttggatctcaccggtgcatctgrggttctgcgtggaaagtggctcgggcttccaatgccgctctgctttaagctgggaccgctgtccagggtggtgcccagccttctggcatctgccatccaa

SEQ ID NO: 27863 - DNA, 201 bp, Homo sapiens
gaaatcccgtctctattaaaaatacaaaaattaaccgggcatctcaggaggctgaggcaggagaatcacttgaacctgggaggcggaagttgcagagagcygagatcgcaccattgcactccagcctgggtgacagagcaagactccatctcaaaaaacagacagacaaaaaaaagcaacaacaacaaaaagccagaatgg

SEQ ID NO: 27864 - DNA, 201 bp, Homo sapiens
tgtgatacctttttagatgcatattatgtttctaagtaccgtatactgttgtccattggaaatacctgatttaaaagcaaaattaaagctgggcatagtgkttcatgccagtaatcccaacactttgggaggccaaggcagggagatcacttgagcccagaagttcaagaccagccctgggcaacacagggagacctgtct

SEQ ID NO: 27865 - DNA, 201 bp, Homo sapiens
tacacatcctggggtttgtttctgtgagtgaaccccttgcttttctccagccctctccctgctgcatggcctccacgaccctggactgggtgtggctctgcctggcagtattcagagggagatgaatgttaggctgtgattgctcatgtcgctttatttagggacactctagaattatctggagaaagggtttgaaggcca

SEQ ID NO: 27866 - DNA, 201 bp, Homo sapiens
gagtagaatagtgcacttgctctgcaaatgcacttttgaggcaaatctcttgactcccttctagctagactgcagtctcaaagcccttcttgtgtagagcytgcgagctgtcagtggatagcatcaaatcaagcggatggattcttgaaagctaaatgtcatcatttgacagagctactatgaggaaaaatatttttattt

SEQ ID NO: 27867 - DNA, 201 bp, Homo sapiens
gcgcctgacccaagagaccttttaataattacttatttaagtgaaaattttgaatgcaggtgtgctgtctgcccaggagcccgtgtatgactgtgcatggyggctgtcatcaggtggcatgcattgaatggggattattgactgtaaaggagagtcatcaagctgacatggctgctgcctgtgttacttatctggaattaa

SEQ ID NO: 27868 - DNA, 201 bp, Homo sapiens; identical to SEQ ID NO: 5607

SEQ ID NO: 27869 - DNA, 201 bp, Homo sapiens
atgtgatgtatggaaagggggttccatagccaaacaagttaagctaagttcagagggaaggtggtgaatagaaatcccaaacatctgatcccagcacagcyagcggtggggacttgccttgagtgcgctccaggtggtccctggggactcggtcctggcacccctgccctcctggattgcatcccacagccctgctggccg

SEQ ID NO: 27870 - DNA, 201 bp, Homo sapiens
tctttctttgaagtagaaaatcaaagttcatagattagatgaaagaatagtcattgtacaaaagtaattatagtgtgtgtacttttctttatctacaggagctgtaaaattgacaagcttggcatgtggaaatcagcacatctgggcctgtgattccaggggtggagtttacttccgtgtagggactcagcctctcaatcc

SEQ ID NO: 27871 - DNA, 201 bp, Homo sapiens
cactctctgttcacctgggccatccctgcccttcttggcctcctgctggagtccatgctggtatctgctgggctgtccctcagtctggcccacctgacatyctggagacaagtgaccatctcccccgtgagactggcactaggggcaggacgtggcctctctgcctcctgcggggcccacactggctgctgcatgctgcca

SEQ ID NO: 27872 - DNA, 201 bp, Homo sapiens; identical to SEQ ID NO: 5609

SEQ ID NO: 27873 - DNA, 201 bp, Homo sapiens; identical to SEQ ID NO: 5611

SEQ ID NO: 27874 - DNA, 201 bp, Homo sapiens
gcccagacctgcgcccaagctcccagctccatctgtgcccaagctcccagctccatctgtgcccaccccacaggctgtgtgattgacaagtatgtgattgrctcttgtccctgcagtgactgcgtcagatgagctgtgggctgtgggcccgcccggctacctcctccaacggctgacaaagacgttcagccactcgcacgg

SEQ ID NO: 27875 - DNA, 201 bp, Homo sapiens
attacaggcatgaatcaccccgactagcctgacttaatattgttaagctgtccataccacccaaagtaatttataagttaattcaatacaatttctatcamactcccaaggccattttttggcttgggagttttagaatataaaaatttattctaaaattcatatgggatctcaggagaacctgaaaagccccaacaaacc

SEQ ID NO: 27876 - DNA, 201 bp, Homo sapiens
cctcagcctcccaagtagctgggacccccggcgcccgccaccatgcccggctaattttttgtatttttagtagagacggggtttcactgtgttagccaggmtggtcttgatctcctgaccttgtgatccgcccgccttggcctcccaaagtgctgggattacaggcgtgagtcaccgtgcccatcctagttttgctggttt

SEQ ID NO: 27877 - DNA, 201 bp, Homo sapiens
actccgtctcaaaaataaataaataaataaatataaaaagaaagctatggcaaattattttactgattttaatatatgagcttcttgaagaacaaaaactrtttcttagagtcttttgtatgattcttttagttttggtggattttttttttttttttttttgagacggagtctcactgtgttgcccaggctggagtgcag

SEQ ID NO: 27878 - DNA, 201 bp, Homo sapiens
tggacggaacagccaatgcaagggccctggggtgagaacgagctggattaatttgatcagaagagggactggaagttggtcagtccactatgtagaaatasaaaacctacagttcaaagagaccataaatccatgatgcaagaagtttctgtgagaggagcttggaagtctccatagaacctgtagagctaaaatatccct

SEQ ID NO: 27879 - DNA, 201 bp, Homo sapiens
gattaatttgatcagaagagggactggaagttggtcagtccactatgtagaaatagaaaacctacagttcaaagagaccataaatccatgatgcaagaagkttctgtgagaggagcttggaagtctccatagaacctgtagagctaaaatatccctccaggtgtaatcaggtacagagcatctacctggactgttacagcc

SEQ ID NO: 27880 - DNA, 201 bp, Homo sapiens
ttccattctgagctcagcgggcctctgacaggcacccctttcttttataagcagagcctcactgtagaaaataaacagttttcagccaggcgcagtggctyatgcctgtaatcccagcactttgggcactttggaaggccgaggtaggtggataacctgaggtcaggagttcaaggccagcctggccaacatggtgaaact

SEQ ID NO: 27881 - DNA, 201 bp, Homo sapiens
agcagaacatgaagttcatcttctcctcattgaagtcttatgaattattatcagccgtacctggtaacactggtttggcagaaagaaaactggcccggggkggggggcagaactagactcgactcttctagcctggttctgcctttaaccaagagtctcttatcggccggagcctggtttgttttcctgtaaaatggggtg

SEQ ID NO: 27882 - DNA, 201 bp, Homo sapiens
caggcctaaggtcaaggaatacagggttgtaggcgacagttggtctgtctgctcccctgggaatagcctttgagctcatttagacatactttattgacagracacaaggaggcaaggggagagccctggacagggagccagggaccctgagctttggcctgccactgccttgcagtttgacagacctcagatttcatctgg

SEQ ID NO: 27883 - DNA, 201 bp, Homo sapiens
gtgcccacctcccaccacggctaccagagctgtcttcctcaaacccagctcagatggtgttgccctccacgttacatggctccacgctgccactagaatayagctccagtctttggtgtggcacccagggtctcgcagccagacccggcctgctgttccgaggcctcgtgcgttggggactccagccactcctggcctttg

SEQ ID NO: 27884 - DNA, 201 bp, Homo sapiens
cgcaggacctcaccgcgccagcgtgaagttcccgggcatggtcatgaaagcgtggttctgtaagaaatcagagggagaaagggagagaagggggagggagrcaacccaaacgttggagggtatttgttgtaaacttcaaacttttggcaggtttgaaatttttcataactccggggaggagcaagaggggtgaaaagaaac

SEQ ID NO: 27885 - DNA, 201 bp, Homo sapiens
ttattactctcttgagttacggtgttctcaagcccagctgagtccacacagccgatgtggatggactaggacagatccgatgacttagtgtccaagttcarttgcaaatgcagcctcatttctttctttgaagtagaaaatcaaagttcatagattagatgaaagaatagtcattgtacaaaagtaattatagtgtgtgta

SEQ ID NO: 27886 - DNA, 201 bp, Homo sapiens
gggtcctgcctaactctaagggaatgtgagggagccatggagtgcttggggagggctgtggtctctgccaccgcgttcaccacatcctgaccacttcttcmatggaacaggttcacaaacctcattcatccaggcggcctgggtgacactctggggtaaaagtctgcaggaaagccctcagttcaactttgtcatctttca

SEQ ID NO: 27887 - DNA, 201 bp, Homo sapiens
aaccactggcgcctgtgcttccagagctgtgggcagagtgccatggagccagctggagagggaagtgctgtcagggccttggagtggtcagaggatctcayaagaggtggcactggtacaagaaaggcaagtaggagtgtagcaggcaggcaggacagagggtgttctaagcagaggggacatgaagtataggcactgagc

SEQ ID NO: 27888 - DNA, 201 bp, Homo sapiens
aggggaaggagtagagagatggaggcgctcaggggccttggattccttttgtgcctactcgcttttttcttaggttattttctctcttaagagtgttcccrgccatcctgggtcatcagtgtgtctttcaaaagctgccacccacttgaaccatatctcttgcacagtaatttaactcagacccaaacttccttccctggc

SEQ ID NO: 27889 - DNA, 201 bp, Homo sapiens
gtacaatctcagctcactgcgagctccacctcccaggttcgcactattctcctgcctcagcctccccagtagctgggactacaggcacccgccaccacgcycagctaatttttttgtatttttttagtggacacggggtttcactgtggtagccaggatggtcttgatctcctgacctcatgatccgcccgcctcagcctc

SEQ ID NO: 27890 - DNA, 201 bp, Homo sapiens
gcaaactggacgttgagtcagagctcgctttttaaaaatgctgccgccctctgcgcagccctgagcatcacagcgtcatgagtctgtcatgacggtctctrttcagaattgcccaccgtcaggtagttctggtttagtgtctgtgacggcttaggtccaaatatttttctttattttcatgctaatcgaagttgatctctg

SEQ ID NO: 27891 - DNA, 201 bp, Homo sapiens
gcaatgagccaagatcacaccactgcactccagcctgggtgacagagcaagacttcatttgaaaaaaagaaaagaaagggttttcttctttggtgtgtgtyagcagaacatgaagttcatcttctcctcattgaagtcttatgaattattatcagccgtacctggtaacactggtttggcagaaagaaaactggcccgggg

SEQ ID NO: 27892 - DNA, 201 bp, Homo sapiens
ctctgctcactgcaatctctgcctcctgggttcaagcgattctcttgcctcagcctgctgagtagctgggattacagacatgtgcctccacgcctggctatttttttttttccatatttttttagtagaggcagggtttcaccatgttggccaggctggtctcaaactcctggcctcaggtgatccgcccacctcggcctc

SEQ ID NO: 27893 - DNA, 201 bp, Homo sapiens
gacattggatgaatccacgcagggaatgtctgttcattcagcgctggagctttgcgccaagcctctgccctgctccagtactcctcatcgggggatatctrtgaacaaggcagaacagatctctaatctcagggagctgtgtgcagagtagtgaacagataaacatgtcagagggtgcagagccagagagggaggagcagg

SEQ ID NO: 27894 - DNA, 201 bp, Homo sapiens
ctcactccgctccagtttcatcaccagtggaatggagatgagaatagtttctacctctggcttggtaagaggattaaatgggtcagtgcatgtaaagttargcacggtgcctgccgctgtacatttcagtaaaggggagcccctgctgtcatctgtgctagcctgcgttctcgccctctagtcccttctgatatgtctctg

SEQ ID NO: 27895 - DNA, 201 bp, Homo sapiens
tgtttgtctggatttggtatcaaggtaatgctgctggcctcatagaatgcactgggaagtgttttcttcttttctactttttggaagagtttttgaaagawtggttttattttttacaccccatttgttagaattcgtcatcccatccatgaattcatgtagccatgtaggcctgaactttttttgtgggaagtttttttg

SEQ ID NO: 27896 - DNA, 201 bp, Homo sapiens
aacgtggcctgtctacacaatggaaggctgttcagcaataaaaaggaacgaagtactgatttgtgctacaacatggaggaaccttgagaacattaggctargtgaaagcaaccagacacaaaataccacatattatatgattcaattttaatgaaatctccagaataggcgaactgtagacagagaggagatcagtggttg

SEQ ID NO: 27897 - DNA, 201 bp, Homo sapiens
atccatgaattcatgtagccatgtaggcctgaactttttttgtgggaagtttttttgactactggttcaatctctttattcattataggtctattcagaattttttttttttttttctgacatggagtctcgctctgtcacccaggctagaggatgttggcgcgatctcggcccactgcaacctccgtctcctgggttctt

SEQ ID NO: 27898 - DNA, 201 bp, Homo sapiens
agctataatgtttacctgcctaaaagttccatgttgccagtattaaacatacttctttttgccatgactaggcattgaaaggattgtaatgctttgttctrtagcccccaggtttccctagatgacaaataaacattccttttcctgcgtgaagatagtctgtggaaaccttggccatggcatcgatatcagagcctgtta

SEQ ID NO: 27899 - DNA, 201 bp, Homo sapiens
cctccacctcccaggttcaagcaattctcctgcctcagcctcccaagtaactggggttacaggcgtgcaccaccatgcccggctaattttgtttcttgtgttttttttttttttttgagacggagtctcgctctgtcgcccaggctggagtgcagtggcacgatctcagctcactgcagcctccgcctcctgggttcaagc

SEQ ID NO: 27900 - DNA, 201 bp, Homo sapiens
aaaattcccggcagcgtgtcgtgtttcacaggcaggtgcccggggccagtgggcttaaggccccttggggttcccagggctcctgtggacgatgtcggggkgctctcgaagaagccgaccccactgggctccaatctctcaaagcaagaactgagggcaaagccaggagtgtgtcccagggagggaaggggctggacacct

SEQ ID NO: 27901 - DNA, 201 bp, Homo sapiens
tcaagaagctgaggcaggagaatcacttgaacccgggagacggaggttgcagtgagctgagatcacgccactgcaattcagcttgggcgacaaagactccrtctccaaaaaaaaaaaaaaaaaaaagaaaaaaattaaattacatgaataagctttcttccccatgaaaataatgtgtgtcacttcacacttggtctaaca

SEQ ID NO: 27902 - DNA, 201 bp, Homo sapiens
tgttgagcaagctggactttgggatcactcagattcagtacccatttttgccttggacctcttaattttcttctatcacttcctgtttacccttggtgtgrtcaggttgcaaggggcactgatgtcttgagactccctgaaggatatagattatcgcctacattcagtgctcttacacactccgggtttgccacagatatt

SEQ ID NO: 27903 - DNA, 201 bp, Homo sapiens
aatgcaacattcccttcaccatctgctctgcagtatagtccgcagaccagttgcatcacaatcacttgggacactattaaaatgcagattcctggccaggygcggtggctcacgcctataatcccagcactttgggaggctgaggtgggctgatcccttgagatcaggagttcaagaccagcctggccaacatggtgaaac

SEQ ID NO: 27904 - DNA, 201 bp, Homo sapiens
gggctaagaaagctgctggtggggcagggaacagagagaagagttgggactttgagattctaatcgtctaaatctgaatacatttcatcatcctgactctragcggaaaggaactatgaaattcaaagggaagttagcataggcagagcatgcaaaaacctctctcccaaacctaagcattgcttgagagttgtactttgc

SEQ ID NO: 27905 - DNA, 201 bp, Homo sapiens
agaggcagagaaaggtataccttctaaagacatgcagaagtctccagaggatggtatagggcgttaagtctgcaagcaatcagtatttgatgaaagaatasactgaatcagctcctctatcttctaagagggctaagaaagctgctggtggggcagggaacagagagaagagttgggactttgagattctaatcgtctaaa

SEQ ID NO: 27906 - DNA, 201 bp, Homo sapiens
ggaaataaacaaaagaaaactaagatccccaagcccaacagagctcaaaggaaggcagaagaggtggtaggaagtagagggaaggcagccgataggcccaraagctaaggccaaatcctgttcctatgggggtggggggagggagaagcctggggaagtggtttcccaggcccaagataatgaaacatcttcactcctgct

SEQ ID NO: 27907 - DNA, 201 bp, Homo sapiens
cctcaggtgatccgcccatcttggcctcccaaagtggtgggccactgggaccggcctctgtttttataaagggtttccatttctggggaaaagaatgggaytaagagggccagctccataatcaggtcttatatctcttttcaaaagccttaccggcccggcgtggtgactcacgcctgtaatcccagcactttgggaggc

SEQ ID NO: 27908 - DNA, 201 bp, Homo sapiens
aaaacaagtaccccaactgaactaccatcaattaaagtgcaaactgcaggggtatatggtggctggggctgaggccatctaaaggccagaggggaaaaaaygcatatgtataaatcagaggatgggtaccagaaactgtccctcctccaatcagatcacagcagagccaaagatgcaggcaaccagtgaaaattctttgga

SEQ ID NO: 27909 - DNA, 201 bp, Homo sapiens
gccatctaaaggccagaggggaaaaaatgcatatgtataaatcagaggatgggtaccagaaactgtccctcctccaatcagatcacagcagagccaaagaygcaggcaaccagtgaaaattctttggaagactctggggtccaacccccacgattaggggaaacgctacctaagaggctgcgtgaggggaaactgggcctt

SEQ ID NO: 27910 - DNA, 201 bp, Homo sapiens
tataattttgcctataaacgagggaaaaaggaggacctcaggatgttctgaccttacctattgccaggaagagatcattcacgttcatagctgtcttggckgaagtctccatgaacaataagctgttgtcatctgcatatgcctgggcctcctgcaaggagtgggatgtattagtgctcagaatgtagggtgggaacgagt

SEQ ID NO: 27911 - DNA, 201 bp, Homo sapiens
catctaaaggccagaggggaaaaaatgcatatgtataaatcagaggatgggtaccagaaactgtccctcctccaatcagatcacagcagagccaaagatgyaggcaaccagtgaaaattctttggaagactctggggtccaacccccacgattaggggaaacgctacctaagaggctgcgtgaggggaaactgggcctttg

SEQ ID NO: 27912 - DNA, 201 bp, Homo sapiens
gaaacgctacctaagaggctgcgtgaggggaaactgggcctttgaagagttacagagccacagttgacactgcacctccacctccgcccagttagcttacmaggcacctcctgcctggtgcctgagatcttgcctccccattctcacctctacctaggaacaccctccacaaggccaaatcatggataccgcaatgttttc

SEQ ID NO: 27913 - DNA, 201 bp, Homo sapiens
ggatagaaggcagtctgcaagccaaaagggcaggaaggttccaatcctaggtcactgtgacctttcctttctttctttcccaaaactccgggctggaacaaggaacttaaagttctcttttgccttgatggcttctcagagacatcttaaaacacctgatgaaggatatgaagagagactagagatttagaaaggaccaag

SEQ ID NO: 27914 - DNA, 201 bp, Homo sapiens
ccatccagagacacatccacccggatcacagccctgccaccaccactccatgcatagcccttgatggtcacctcccctgattctacagtctctccatcccrgggctctgtgatggcggactggacaggaagttcctgaatggatggagcagagtcaaaatctacagtctcccagtccacagatggagagaagcctttgtaa

SEQ ID NO: 27915 - DNA, 201 bp, Homo sapiens
cccctgcaccacaggaggaagcaacttttttttttttttaagagacaaggtctcacttttgccctggctggagcgcaagtggtataatcatagctcactgmaacctcaaactcctgggctcaagtgatcctcctgcctcagcctctcgagcagccagactataggttcacactatcatgcttggcttccttctcaatattt

SEQ ID NO: 27916 - DNA, 201 bp, Homo sapiens
gagccgtgccccagcccagcgtgcagtgctgatggctcctgttctccactccagaccttttacttctttgacctgagtcatctcagagcgtcggttgccgkcacactgcagagtgactgtgatctcgtacctgggaaagttgtgcaagtcatccagggaaagagacagtgactgacccccaggtgctcctactacgtgtaa

SEQ ID NO: 27917 - DNA, 201 bp, Homo sapiens
tttgggaggccgaggcgggcggatcacgaggtcaggagatcgagaccatcctggctaacacggtgaaaccccgtctctactaaaaatacaaaaaattatcygggcatggtagcgggcgcctgtagtcccagctactcgggaggctgaggcaggagaatggcgtgaacctgggaggcggagcttgcagtgagccgagatcgc

SEQ ID NO: 27918 - DNA, 201 bp, Homo sapiens
ccccatctctactaaaaatacaaaaattagctgggcttggtggtacatgcctgtagtcctagctgcttgggaggctgaggcataagaatcgtttgaaccchggaggcagaggttggagtgagccgagatcacgccattgcactccagcctgggtgacagagtgagactctgtcactaaataaataaataaagcaacataac

SEQ ID NO: 27919 - DNA, 201 bp, Homo sapiens
aaacgctacctaagaggctgcgtgaggggaaactgggcctttgaagagttacagagccacagttgacactgcacctccacctccgcccagttagcttacamggcacctcctgcctggtgcctgagatcttgcctccccattctcacctctacctaggaacaccctccacaaggccaaatcatggataccgcaatgttttca

SEQ ID NO: 27920 - DNA, 201 bp, Homo sapiens; identical to SEQ ID NO: 5682

SEQ ID NO: 27921 - DNA, 201 bp, Homo sapiens
gaggctgcgtgaggggaaactgggcctttgaagagttacagagccacagttgacactgcacctccacctccgcccagttagcttacaaggcacctcctgcytggtgcctgagatcttgcctccccattctcacctctacctaggaacaccctccacaaggccaaatcatggataccgcaatgttttcaaatatgagaaact

SEQ ID NO: 27922 - DNA, 201 bp, Homo sapiens
aggttaatgtctatttgagggaaggcaagcagtaattggcagtagagtattaaacaatcgggaactgagaacacttaaaagtgataatttgttgcaatgarttatctctttaggagcctgtgggaggagagaaaaaaaaaatctatctggtggaaatttacatacctccaaaattgcggctggcatggtggctcacacctg

SEQ ID NO: 27923 - DNA, 201 bp, Homo sapiens
tttccttactccctcctgctctgagctttattctcccccagggcccttaatgtaaatgaactggaaacctccttcctcagttcctgggttcaccactttcwgcatcctggggagaggagaaaagaggctcaagaacagggactgaccaaaagcagaaggggaagggacaggagtcagaagtgttttctgaaaaaatgggga

SEQ ID NO: 27924 - DNA, 201 bp, Homo sapiens
tcttacccctattggaccattggctcattcttgagtctacactttcccctccctcatatactgagaaaaatatcaccttttctttataacagcggttgagragagtgccaggaaactaaaggtattgaggggaattcaaattctgtacccacccccaccctgcctcgttttgtcagctggaaaatgtgctgggtgagaccc

SEQ ID NO: 27925 - DNA, 201 bp, Homo sapiens
ccaaacaccctttcccatcctccgcaagtataaggaggaacgccccctcccccgctacacacacacacacacacacacacacacacacacacacacacacmgcccccatcctctccatctcctcaggcttgggagtagttactgaattggctccctagccccagcaccccccttcctccctccactagccgccttctgcct

SEQ ID NO: 27926 - DNA, 201 bp, Homo sapiens
gttaaaaagtgccatgacggagctgtcaggaggcagcccttgggagccagggctcagtgtgctgttaccgtaggggttgtgtgctgaggggtagggatggmggttatttcttagctcttgtgctagctccatacttgtttgctgctagccaccccctcagttgctacaacactggctcttgttctgctgggactgttcatg

SEQ ID NO: 27927 - DNA, 201 bp, Homo sapiens
gctggggagacaggcacagtaggaactattagacatataagcgagggttgacaagagtaacaacaatagacagttttgttcatgagagaagggaatggggygaaataaggtatgcaaaaaattttctggccaggcacggtggctcatgcctgtaatcccagcactttgggaggctgaggcgggtggatcacctgaggtcag

SEQ ID NO: 27928 - DNA, 201 bp, Homo sapiens
cggcctatctggcaggttctttgcaaagtcctttgcaaagattatttcatttagttctcaaaatgttcttgtgaagtgtttttaaattaatttttggaggkttagatagagtaacttgcccaaagctacacacaaagctaccaaagagcgaaggaaggactcaaacttaggtctgtcagactccgaagctgggctcttaac

SEQ ID NO: 27929 - DNA, 201 bp, Homo sapiens
agtgttgggattaccagcatgagccacagtgcctggcctactgtatcttttctatgtttagatacacaaatatcattatgttacaattgcctacagcgttsagtacagtagcatgctgcataggttggtagcctgggagtaatagactctaccatatggccttggtgtgtagtagactataccatctaggtttgtgtaagt

SEQ ID NO: 27930 - DNA, 201 bp, Homo sapiens
tagtagagatggggtttccccgtgttggttaggttggtctcaaactcctgaccttaggtgacccacccgcctcagcctcccaaagtgttgggattacagcygtgagccagggcgcctgatccggaagtcacctttcattcagagtgcctgaatcagggtaaatagtgcattatactagaaaaaaggatgtgtcttcaggac

SEQ ID NO: 27931 - DNA, 201 bp, Homo sapiens
gtgagttgggactccaagtcacactgcacacttggcttgtgagcatgatgttcaccatggctcagttgcacctattcgtgcagtcaccaccagaagcccargcctccagctcattccacgtctctcagattctggttctcatgcagtcctttctgaccccatttgcactcttccccatctcctgaaaccctttcacagctt

SEQ ID NO: 27932 - DNA, 201 bp, Homo sapiens
tcctgaaaccctttcacagctttctggaacccaggattcatcatcaataaaatcctccaaatgcaacattcccttcaccatctgctctgcagtatagtccrcagaccagttgcatcacaatcacttgggacactattaaaatgcagattcctggccaggcgcggtggctcacgcctataatcccagcactttgggaggctg

SEQ ID NO: 27933 - DNA, 201 bp, Homo sapiens
acatgcaatattaagtacaatttccattttatttttctccagagaatagcctgtcttcagtctttaagaactcagctccttacatgggctttggtgggggwcgtggggcagcaccctgaaagacaaagaaacaaaagagtaaattaaaacccatggatccaagactcccttcccccaaagaacttgaccaccatcctctca

SEQ ID NO: 27934 - DNA, 201 bp, Homo sapiens
cacccggatcacagccctgccaccaccactccatgcatagcccttgatggtcacctcccctgattctacagtctctccatcccggggctctgtgatggcgkactggacaggaagttcctgaatggatggagcagagtcaaaatctacagtctcccagtccacagatggagagaagcctttgtaatcccgccgttgccagtg

SEQ ID NO: 27935 - DNA, 201 bp, Homo sapiens
agcagcggcacggtgagcagaggcccacggctgcagccagcaagagcagctcagcccagggtgtatgtgtgttgagtgtgtgtgtgtgtgtgtgtgtgtgwgagagagagagagagagagagggagagaaggagaggggagagcacgcttggatgtgcttggggagggggctggagagaatgtatatgtgtatatagtggg

SEQ ID NO: 27936 - DNA, 201 bp, Homo sapiens
acctgtatattttcacaaatattcaaataatcaatagcacaagaattgtcaaatttaccaagtttctagtttttgcaatctcataaccgaaacaggcaaasctttacctcagagtaaaggctgtgcactctatcacaaagtcaccctctgcccagaaaagaatcaaaacggcaaacaagagaattctcttctaccagtaac

SEQ ID NO: 27937 - DNA, 201 bp, Homo sapiens
tttctagcaatcttcttgtcccagcctcccaaagtgttgaggttacaggtataggacaccctgaccctccaggatgaaattttaaccatcactcccctggmttccattctccttttaaaatactcaccgcaggtctaaatcggggtgggggtgttcggtccttgcgggcttcacgagatcgattcctgactactttgctgt

SEQ ID NO: 27938 - DNA, 201 bp, Homo sapiens
agtcaccctctgcccagaaaagaatcaaaacggcaaacaagagaattctcttctaccagtaacaaccttaaatacgtggaaattgcctgagaggctccaamgaacagagcctccaaaagggcgaagttgggcgaaggctttaagatactgggatcctcacacagttcgcgccggtgacccacttaccatcgaagacgctcg

SEQ ID NO: 27939 - DNA, 201 bp, Homo sapiens
tgctccaggctctcacttccccacaatcccagagtctgcacccgaacccccaccctcaccacgcaagaagactcaccatcttggaggcacggaccggagasaggagacggtgcctggcagggccctcctatatagcatgagatccctacgcggacaccgggagaatccttaggagacgggcttcaagaacggcaactcact

SEQ ID NO: 27940 - DNA, 201 bp, Homo sapiens
ttgccagacgctggaccacaaggcgcactcgttattagaggccagagagggacagatgcttggtgggaattgtagtgcgaagccaagaggctcccccctcscccccttcccccctgccccaagtgcttagaccgaaggcggcgctgcgccaccgggggacgccctgggctcatttctctgacagtccttctactaggtagg

SEQ ID NO: 27941 - DNA, 201 bp, Homo sapiens
ttactggttttttcaacttactcccttacatttttatgtatttcaaagcatgtgatccaaggggtagaatattaagcctcaatgttactactctacaatamaggaaaatgtgggagttagaatggactgaattctcatggctaaacatatcacttgagctctgggggagtgtaaagacaggaaacaattgcagacacgctt

SEQ ID NO: 27942 - DNA, 201 bp, Homo sapiens; identical to SEQ ID NO: 5684

SEQ ID NO: 27943 - DNA, 201 bp, Homo sapiens
gtttctagcaatcttcttgtcccagcctcccaaagtgttgaggttacaggtataggacaccctgaccctccaggatgaaattttaaccatcactcccctgrcttccattctccttttaaaatactcaccgcaggtctaaatcggggtgggggtgttcggtccttgcgggcttcacgagatcgattcctgactactttgctg

SEQ ID NO: 27944 - DNA, 201 bp, Homo sapiens
ttgaatctgagttttcccagctggggctttttaggtgagccatggttacctaaaaatgttgcccgaaatcagaaccacacacatatcatgaagtgagcatmtcaggattgtgggttgagacttgtagactcagagccagttttaaatatatcctttcaactaagtgtagggtttactagggttaaaagggctgaaaatgtt

SEQ ID NO: 27945 - DNA, 201 bp, Homo sapiens
aggcagatcagagccagtctagaggtcatttagtccagtctctatattttataggtgaggaaaccgagacacatacaattagtcaatttgggctaggcgtsgtggcttacacctgtaatcctagcactttgggagggcgagatgggcagatcacctgaggtcaggagtttgagaccagcctggccaacgtggtgaaaacct

SEQ ID NO: 27946 - DNA, 201 bp, Homo sapiens
gctgaggtgggcggatcacctaaggtcaggaattcaacaccagtctggcgaacatggtgaaaccccgtctctattaaaaacacaaaaattagccaggtgtkgtggctgacacctgtaatctcagctacttgggaggctgaagcaggagaattgcttgaacctgggaggcagaggctgcagtgggtcgagactttgccactg

SEQ ID NO: 27947 - DNA, 201 bp, Homo sapiens
gagtgcagtggctcgatctcggctcactgcaacctccgcctcctgggttcaagcgattctcctgcctcagcctcccgagtagctgggactacaggcgcgcrccaccacgcccaactaatttttgtaattttagtagagacggggtttcaccatgttggccaggatggtctcaatctcttgacctcatgatcctcccgcctt

SEQ ID NO: 27948 - DNA, 201 bp, Homo sapiens
caaaaaaaagggagatggggcaggtttctcttcctttcaacctttttagctcagaagagaagaaatcagatttaacttcccttagaagtgcagctctgccrggtgcagtgactcatgcctgaaatcccagcactttgggaggctgaggtgggcggatcacctaaggtcaggaattcaacaccagtctggcgaacatggtga

SEQ ID NO: 27949 - DNA, 201 bp, Homo sapiens
tagagtgcagtggctcgatctcggctcactgcaacctccgcctcctgggttcaagcgattctcctgcctcagcctcccgagtagctgggactacaggcgcscaccaccacgcccaactaatttttgtaattttagtagagacggggtttcaccatgttggccaggatggtctcaatctcttgacctcatgatcctcccgcc

SEQ ID NO: 27950 - DNA, 201 bp, Homo sapiens
aattctgtggtacagaaatgaaataatacatataagattcaattatttattttctattctcattttttcccacaaaaatactaatttttttttttttttttggtaaaccagtcaagtggtatgatgattattaccttcaaacccgagacaaaaaaaagggagatggggcaggtttctcttcctttcaacctttttagctca

SEQ ID NO: 27951 - DNA, 201 bp, Homo sapiens
ctggagttttctcctgactcctttgaaaatctcctggctgtcattagggtcacagtgttgctgtatttaacttggtgtagaactggggaatgagacaatgratgtcctctgttgacgttttcagagagggctggtttggaaaaaaagaggtcccaggaacagaggaagtgttagagaggaactccacgggccaccttactt

SEQ ID NO: 27952 - DNA, 201 bp, Homo sapiens
agttgggggcttttgggttgtgacacttgaatagtcccttaccacaaatttaattgctccctccttcctgttttcacactggtacccccacagctggtacytccctaaccctctgctctggagttttctcctgactcctttgaaaatctcctggctgtcattagggtcacagtgttgctgtatttaacttggtgtagaact

SEQ ID NO: 27953 - DNA, 201 bp, Homo sapiens
ctgcctggtgtttgttgctgaagcgttaaaaagtgccatgacggagctgtcaggaggcagcccttgggagccagggctcagtgtgctgttaccgtaggggytgtgtgctgaggggtagggatggaggttatttcttagctcttgtgctagctccatacttgtttgctgctagccaccccctcagttgctacaacactggct

SEQ ID NO: 27954 - DNA, 201 bp, Homo sapiens
ctgttgcccaggctggagtgctgtagcgtgatctcggctcagtgcaacctctgcctcccgggttcaagcaattctctgcctcagcctcccaagtagctggrattacaggcgctaaccaccacaaccagctaattttttgtatttttagtagagatgggatttcaccatgttggccaggctggtcttgaactcctgacctcg

SEQ ID NO: 27955 - DNA, 201 bp, Homo sapiens
aagaacagggactgaccaaaagcagaaggggaagggacaggagtcagaagtgttttctgaaaaaatggggaggaacactagggaggaggagaaaagatacrtaagtcgctgtcttgtacctataatacaaagtgaagaaagtttgttttggaaggtaagtcctggggggagttgacccccaagccccagagtagggggtag

SEQ ID NO: 27956 - DNA, 201 bp, Homo sapiens
ccggcccatttatttgtattttttgagatagagtctcgctctgttgcccaggctggagtgctgtagcgtgatctcggctcagtgcaacctctgcctcccgrgttcaagcaattctctgcctcagcctcccaagtagctgggattacaggcgctaaccaccacaaccagctaattttttgtatttttagtagagatgggatt

SEQ ID NO: 27957 - DNA, 201 bp, Homo sapiens
aaaaaaaaaagaaaaaaattaaattacatgaataagctttcttccccatgaaaataatgtgtgtcacttcacacttggtctaacacacaaaatccccaccytatctggcacagatacacttaacatgcaatattaagtacaatttccattttatttttctccagagaatagcctgtcttcagtctttaagaactcagctcc

SEQ ID NO: 27958 - DNA, 201 bp, Homo sapiens
cccccctcccccccttcccccctgccccaagtgcttagaccgaaggcggcgctgcgccaccgggggacgccctgggctcatttctctgacagtccttctaytaggtaggtgtaggattacgaagaggaaggcctgagaggaaacaagcattttgtgaatccctccttccaatatggagaaaatcccacaatgaagtgcatt

SEQ ID NO: 27959 - DNA, 201 bp, Homo sapiens
gcagtgatggtctggagagagacaggatgccccctctcccctccttagcacctggtcttgcccttccagtctctgctctcatgggcacagagtatagcctmagagcatagtccttcatgttccgggaggttacaggtgccacagttgactggggaaggggatgggggcaccctaaggctctgataccccagaagggactag

SEQ ID NO: 27960 - DNA, 201 bp, Homo sapiens
ttcctgggttcaccactttctgcatcctggggagaggagaaaagaggctcaagaacagggactgaccaaaagcagaaggggaagggacaggagtcagaagygttttctgaaaaaatggggaggaacactagggaggaggagaaaagatacgtaagtcgctgtcttgtacctataatacaaagtgaagaaagtttgttttgg

SEQ ID NO: 27961 - DNA, 201 bp, Homo sapiens
  misc_feature (1)...(201): n = A,T,C or G, or insertion/deletion polymorphism (see Tables 1-2)
cacagacaaggctctccaccaactgggttacctagaatggggtgtttggcagatttactggggtaatcatcccctgttccacagacttcatccctcagtgngggagatactggagtcacccttgtctagcactccctctcaccatccccttttaactccccagtagtacatcaatagccctacctggttggccagccaaag

SEQ ID NO: 27962 - DNA, 201 bp, Homo sapiens
gagatcgtgccaccgcactcctgcactccagtctgggtgacagagcaagactctgtctctacaaaaaaaaaaaaaaaaaagaggcaaatggttgtattccmctcaaagaaggcaatcaggtatgcatttatctcagtgagcagagggatgactttgaatgggaggcaggtttaccctaatcagttcccagcttgacttttc

SEQ ID NO: 27963 - DNA, 201 bp, Homo sapiens
caggcagcagtgagggccaatcccagcagtttgggaggccaaggcaagaggactgcttgaggccaggagttctaggccagcctgggcaacacactgagacmctaaaaaaaaaaaaaagtaatttaggccaggtgtggtggctcacgcctgtaatcccagcactttgggaggccaaggtgggtggatcacctgaggtcagga

SEQ ID NO: 27964 - DNA, 201 bp, Homo sapiens
cctcccaggttcaagtgatcctccctgtctcagcctcctgagtagctgggactacaggtgtgtgccaccacacctagtttttgtttttgtttttgtttttktttttgtagtagagacgaagtctcactatgttgctctggctggtctcaaactcctgggctcaagcgatccacccgccttggcttcccaaactgctgggat

SEQ ID NO: 27965 - DNA, 201 bp, Homo sapiens
agtcattattttaaaatggagacatttcatataaaaatttggatttctggtatctcttaaaaatttagaagttttggccacactagatacacattcctgcmtgacaagttctagtggacactgaaagctgctgtccctttaagtgggacatatgttctccacttcatgacagcccccaccattcttttctgcttattatcc

SEQ ID NO: 27966 - DNA, 201 bp, Homo sapiens
aaattctgtggtacagaaatgaaataatacatataagattcaattatttattttctattctcattttttcccacaaaaatactaatttttttttttttttttggtaaaccagtcaagtggtatgatgattattaccttcaaacccgagacaaaaaaaagggagatggggcaggtttctcttcctttcaacctttttagctc

SEQ ID NO: 27967 - DNA, 201 bp, Homo sapiens
agcccaggagttgaaggttgtagtgagctgattacaccactgcactccagcctgggcgacagaacaagacgctatctctggaaaaaaaaaaaaaaaaaaaaggagacataactaaagggtaaagaggaagttagcaaaagaatgagaggtgagaactcaaggtcccaaagtagactagattaatacagaggaacatgacaa

SEQ ID NO: 27968 - DNA, 201 bp, Homo sapiens
gagcccaggagttgaaggttgtagtgagctgattacaccactgcactccagcctgggcgacagaacaagacgctatctctggaaaaaaaaaaaaaaaaaaaaggagacataactaaagggtaaagaggaagttagcaaaagaatgagaggtgagaactcaaggtcccaaagtagactagattaatacagaggaacatgaca

SEQ ID NO: 27969 - DNA, 201 bp, Homo sapiens
cactcttgttgcccaggctggagtgcaatggcacaatcttggctcaccacaacctctgcctcccgggttcaagcaattctcccacctcagtctcccgagtwgctgggattacaggcatgcaccaccacgcctggctaattttgtatttttagtagagacggagtttctccatgttggtcagactagtctaagaagtcctga

SEQ ID NO: 27970 - DNA, 201 bp, Homo sapiens
tctgttaccacgattgttatgttgggagaggaagaaaggcaaatgctttctcagaagcaaaacaaaaacaaaaaaccacaacacccccccttaaaaaaackgaccagaagaaaaaaatgagctgggaaataaacaaaagaaaactaagatccccaagcccaacagagctcaaaggaaggcagaagaggtggtaggaagtag

SEQ ID NO: 27971 - DNA, 201 bp, Homo sapiens
agttttgctttgtcacccaggctggagtgcagttgcgccatttcggctcactggaacctctgcctcctgggttcaagcgattattgtgcttcagcctcccragtagctgagatgacaggtgcgtgccaccatgcctggctatttttttgtactttagtagacacagggtttcaccatgttgcccaggctgctctcgaattc

SEQ ID NO: 27972 - DNA, 201 bp, Homo sapiens
gaaaactaactcagtgatgtttttcaacctttgggtcatggacccctttgagaaacatatagaaatggatcctagaaatatgcacatacggccgggcgcartggctcacgcccgtaatcccagcactttgggaggccaaggtgggtggatcacgaggtcaggagttcaagaccagcctgaccaacatggtgaaaccccgtc

SEQ ID NO: 27973 - DNA, 201 bp, Homo sapiens
ggcaggagaatcacttgaactcaggaggcggagattgctgtgagccaagatcgtgccactgtactccaggctagcgacagagactccgtctcaattaaaaraaaaaaaagaaatatgcacatacatttttgtatactacttcaaatagcacccctctctctaatctgatcagtgggcccaaagatccacagaccataccct

SEQ ID NO: 27974 - DNA, 201 bp, Homo sapiens
agagtcttgctctgttgccaggctggagtgcagtggcaggatctcggctcactgcaacctctgcctcccaggttcaagtgattcttctacctcagcctccygagtagctgggactatagacgcacaccaccacgcccagctaatttttgtatttttagtagagatggggtttcaccatgttggccaggatggtctcaatct

SEQ ID NO: 27975 - DNA, 201 bp, Homo sapiens
cttcccatgtgccttgggtatgagccattcaggtgctacaagtagagcaaacccacagcatcatcctctactgtctatgccttcctgaactgagtgaaatstgagcaaaaatatgttgaaatcacatagctggctctgctctctatcaaagctttgcataattgaggagggagaagacgcaaaggggccagggaaaggtat

SEQ ID NO: 27976 - DNA, 201 bp, Homo sapiens
tgcctgtaaccccagctactcgggaggctgaggcaggagaatcacctgaacctgggaggtggaggttgcagtgagctgagatcacgccactgctctccagyctgggcaacagagagagactccatctcaaaaaaaaaaaaaaaaaaaaaaaagagagattaacaacaataacaaaatagaaaaattagcccggcgcagtgg

SEQ ID NO: 27977 - DNA, 201 bp, Homo sapiens
tgcaaccacacataatcctatttcatttcccttccctcgacctttagactgtggtggactgaagggtttgaagtacactaggagtcaagagcagatccagrggaaattttcccgttgaggtggaagctacaagaaaactaactcagtgatgtttttcaacctttgggtcatggacccctttgagaaacatatagaaatgga

SEQ ID NO: 27978 - DNA, 201 bp, Homo sapiens
ggagaagagaggtggtattgcacttgcttctgtgtttattttttctttttgttcttcataacttctgattaaaaatatatatatatatgtatatatatatwttatgtacacaaggaaagaagctgccagaagtattacaaaatcctatctgcagcttggacactgacacaaaaaaacaaaggtctggaaaagtgtctactt

SEQ ID NO: 27979 - DNA, 201 bp, Homo sapiens
tggagtttactaggactgattcctttattctgacaattttttttttttttttgagatggagtctcactctgtcacccaggctggagagcagtggcccgatsttgatcttggctcactgcagacttagcctcctgggtttaagtgattcttgtgtctcagcctctcaagtagctgagattacaggtatgtaccaccacacct

SEQ ID NO: 27980 - DNA, 201 bp, Homo sapiens
atagccgtcttttattttgcgtagaaaaaaaaaataataatcgccccttggtggcacacgcctgtagtcccagtactcgggaggctgaggcgggaggatcscttaagcccaggagttcgaggttgcactgagccaagatcgcggcactgcactccagcctggacaacagagcaagaccccatctcttaaaaaacaaactgc

SEQ ID NO: 27981 - DNA, 201 bp, Homo sapiens
cctgtggagtttactaggactgattcctttattctgacaattttttttttttttttgagatggagtctcactctgtcacccaggctggagagcagtggccygatcttgatcttggctcactgcagacttagcctcctgggtttaagtgattcttgtgtctcagcctctcaagtagctgagattacaggtatgtaccaccac

SEQ ID NO: 27982 - DNA, 201 bp, Homo sapiens
acccctgccgcccctccctggaggaggcctcgggatccagtccggttttccccggctgtgatctccactttaaacccagggtagacctacctctatctacyctgttgcaactacaactaccctgtttatcttttagggaaagcaaagtcaatcgcttagttctcgtattccaggaatgataacagaaatgcctaaaatagt

SEQ ID NO: 27983 - DNA, 201 bp, Homo sapiens
cagtgctcttacacactccgggtttgccacagatattccagtacaaacactggtgtactgacagtcaagtcaggtcagcagttcttgtctcagatttctgytggggagtgcattccaattaacagaacctccacattctaaaatctctacccgttccttaggctgggtgcagtggctcacacctataatcccagcactttg

SEQ ID NO: 27984 - DNA, 201 bp, Homo sapiens
caatgaatcttgctgctgctcactcttcgggtccacactgcctttatgagctgtaacactcactgtgaaggtctgcagcttcactcctgagccagcaagascacgaacccaccagaaggaagaaactccaaacacatctgaacatcagaaggaacaaactccggacacgctgcctttaagaactgtaacactcactgcgag

SEQ ID NO: 27985 - DNA, 201 bp, Homo sapiens
agacggaggttgcagtgagcggagatcgtgccaccgcactcctgcactccagtctgggtgacagagcaagactctgtctctacaaaaaaaaaaaaaaaaaagaggcaaatggttgtattccactcaaagaaggcaatcaggtatgcatttatctcagtgagcagagggatgactttgaatgggaggcaggtttaccctaat

SEQ ID NO: 27986 - DNA, 201 bp, Homo sapiens
gtccctttccacacggtggaagctttgttctttccctctttacaatgaatcttgctgctgctcactcttcgggtccacactgcctttatgagctgtaacaytcactgtgaaggtctgcagcttcactcctgagccagcaagaccacgaacccaccagaaggaagaaactccaaacacatctgaacatcagaaggaacaaac

SEQ ID NO: 27987 - DNA, 201 bp, Homo sapiens
tgacgatggggaaatggttgccagtggaaggtgaattgaaggccaaatgcaacagggggtgcctactgccaggaggtggtaggaggttacacttaccactsagtgagcggctaggagaagagtgctggctgttgggggtgctcaccgagggccccactggggccccgaggaactccttctccagagatgagtccccgctac

SEQ ID NO: 27988 - DNA, 201 bp, Homo sapiens
tcattaaccagcccgatttcctgagcaagattccaagccgttctgaacttgcttcctcatctctgaaatgacatctgcctagcagagctaacatgaagagycaacaagtacagtagtacccccttatccactggggatatgttctacgacccccagtagatgtttgaaaccacagattgcaccaaaccctatattactgtt

SEQ ID NO: 27989 - DNA, 201 bp, Homo sapiens
gggcaaaatgccttgggtttgtgaaactggatctcttgttattcattaaccagcccgatttcctgagcaagattccaagccgttctgaacttgcttcctcwtctctgaaatgacatctgcctagcagagctaacatgaagagccaacaagtacagtagtacccccttatccactggggatatgttctacgacccccagtag

SEQ ID NO: 27990 - DNA, 201 bp, Homo sapiens
actctctggaactagccacaaaacttgagatagagatcaaaagataaaggagggcagtctggtattgaggggccctttcatttccaaatcattagattcayaattgccctttggtgtttttcaaaatgaatggaaagctcaggctgggtttggtggctcaggcctgtaatctcagctctttgagagggcgaggtgggtgga

SEQ ID NO: 27991 - DNA, 201 bp, Homo sapiens
ggtgtcctctttctattaaacctttcaaaagccaggctactcaaggccttcatgggttttcttgcttttccctgttttttttgtttttgtttttgtttttktttttgagacggagtctcgctgtgttgcccaggctggagtgcagtggcatgagtttggctcccgggttcaagcagttctcctggctcagccttctgagta

SEQ ID NO: 27992 - DNA, 201 bp, Homo sapiens
caagtcatccagggaaagagacagtgactgacccccaggtgctcctactacgtgtaagcgataggtgtctggatccaggttaggtacaggcagatggttcygggtgaagaagatagggttgggtgtgatgtagttttctgtcagcagctcagggggaggctctgcattaaagggccgctggctgttgaccttcagggctgg

SEQ ID NO: 27993 - DNA, 201 bp, Homo sapiens
ctcagagacatcttaaaacacctgatgaaggatatgaagagagactagagatttagaaaggaccaaggtcctctgataatatgagccagttgtaaggtacyttcagtgccggtcattccctctccacaggaacaggtggtatgatacgagggcaccacaggaggcctctgtggtactagcccctattggtacatggattaa

SEQ ID NO: 27994 - DNA, 201 bp, Homo sapiens
atgtctcttttcagagataatggacctgaggaaaacaccaaactagatggtcattaagtctctaaagtagaaacggcctcttagcttgaggactaccccakcataggtattgcatcagagcctacaatgtggatcctccccgcagctggaccaggtcattcatatcagcactaccctttcttagatgcctttgtctgataa

SEQ ID NO: 27995 - DNA, 201 bp, Homo sapiens
tcagttaaatttcacaaacatttccttcatagccatgtacaaagcagtgttgtatgctgggcaccataccttgtgcccccgccagtctggatgcctggtgytgccttctgtgagctcagtggctgggccttgcctaccctacctttatctaggcctgagggcaagagcatcactgcctgacgtccacaggaagcagggctg

SEQ ID NO: 27996 - DNA, 201 bp, Homo sapiens
ttcagttaaatttcacaaacatttccttcatagccatgtacaaagcagtgttgtatgctgggcaccataccttgtgcccccgccagtctggatgcctggtkctgccttctgtgagctcagtggctgggccttgcctaccctacctttatctaggcctgagggcaagagcatcactgcctgacgtccacaggaagcagggct

SEQ ID NO: 27997 - DNA, 201 bp, Homo sapiens
aaaaatatcaccttttctttataacagcggttgaggagagtgccaggaaactaaaggtattgaggggaattcaaattctgtacccacccccaccctgcctygttttgtcagctggaaaatgtgctgggtgagacccttccctttctgaggctacccactccctgcatgacctcctccagccccatacctgctgttgtccca

SEQ ID NO: 27998 - DNA, 201 bp, Homo sapiens
tgtctgcgacaggatgggaaaactgttaggaaaacggcgcaactcacccagcctcagtccctttccggccacaagccgcaccggcagcctccaggaaggcsccgctcggatctcctgtttctccgcaaatcccgccgacccccagagcaaatgaaatgtacactcggtccacccctcagccgtgctccaggctctcacttc

SEQ ID NO: 27999 - DNA, 201 bp, Homo sapiens
acgcctgtaatcccagcactttgggaggccaaggtgggtggatcacctgaggtcaggagttcgagaccagcctgaccaaatggagaaaccccatctctackaagaatacaaaattagccaggggtggtggttcatgcctgtaatcccagctactcaggaggctgaggcaggagaatcgcttgaacccaggaggcggaggtt

SEQ ID NO: 28000 - DNA, 201 bp, Homo sapiens
tggtcattgtaatctctggagacacaaattttcttccctgttcttatttatttattatatttactagagatgagatctcactatgttgtctgggctggagwgcagtggctgttcatgggcacaatcacagcacactacagcctcaaactcttggcctcaagcaatcctccttcctcagcctaatgagtagttgggactaca

SEQ ID NO: 28001 - DNA, 201 bp, Homo sapiens
ataatccaatttggtaagactctcttcttcatgtggagggtctagggcaggggtactccaggaactgagaaatcctggagctgaaatggagttgagagatkatctacaatttcctagtttttaacagaagaaactaagcccagagtcatcaatctcattaacaacagaattaggacatgtagagtccaagttaccattaga

SEQ ID NO: 28002 - DNA, 201 bp, Homo sapiens
aggtataaggagagggaagttagttacatgagacagttttgtatcaaagatcttggaaggagattagctttaaagcaacataactgtcggctgggggcggyggctcacacctgtaatcccagcactctgggaggctgaggcaagcagatcacttgaagtcaggagttcaagatcagcttggccaacgtggcgaaaccccat

SEQ ID NO: 28003 - DNA, 201 bp, Homo sapiens
gtccccaagcccgggagactgctgggggaaaatgggagaggagctaggggagagtagccgagcgccgaaagattcaaatccgaaaggcaccatcgtctgcygaaggtaacccaaaaactagcctttaatctgcacccagtttgcaatctaagcacacgctggacgcccgatgtggcctggcacgtcaggccctagagccaa

SEQ ID NO: 28004 - DNA, 201 bp, Homo sapiens
ggtggctcaggcctgtaatctcagctctttgagagggcgaggtgggtggatcacctgaggtcaggagttcgagaccagcctagccaacgtggtgaaacccsatctctactaaaaatacaaaaaaattagctgggtgtggtggtacacacctataatcccatctactcgggaggctgaggcagaattgcttgaaccggggag

SEQ ID NO: 28005 - DNA, 201 bp, Homo sapiens
ggtaatgcgggtggggaatggggtaggagggatgggtgcttctagaatcagaatcacctttctcccatcttccattctgaactttgtccaccatagagaaygatgcctggggcgaagggcctaaaggaccgaaaccaaatgtctactggccagattattatttctgaagtcagcagaggacaactgtgggtcagactgact

SEQ ID NO: 28006 - DNA, 201 bp, Homo sapiens
tcactgcaagctccgcctcccgggttcacgccattctccagcctcagcctcccaagtagctgggactacaggtgcctgccaccatgcccggctaatttttkttttttttgtatttttagtagagacagggtttcaccattttggccaggatggtctcgatctcctgacctcgtgatccgcccatcttggcctcccaaagtg

SEQ ID NO: 28007 - DNA, 201 bp, Homo sapiens
ctgggaggtggaggttgcagtgagctgagatcacgccactgctctccagtctgggcaacagagagagactccatctcaaaaaaaaaaaaaaaaaaaaaaargagagattaacaacaataacaaaatagaaaaattagcccggcgcagtggcttacgcctgtaatcccagcactttgggaggctgagacgggcagatcacga

SEQ ID NO: 28008 - DNA, 201 bp, Homo sapiens
ccacccggatcacagccctgccaccaccactccatgcatagcccttgatggtcacctcccctgattctacagtctctccatcccggggctctgtgatggcbgactggacaggaagttcctgaatggatggagcagagtcaaaatctacagtctcccagtccacagatggagagaagcctttgtaatcccgccgttgccagt

SEQ ID NO: 28009 - DNA, 201 bp, Homo sapiens
ggcaacagtgtgagacaccgtcttgaaaaaacaaaaaacaaacaaaagtcagggaagggtgactttttttttttttttttttttttttgagactgagtgtygctcagtcgcccaggctagagtgcaatggcgcgatctcagctcactgcaagctccgcctcccgggttcacgccattctccagcctcagcctcccaagtag

SEQ ID NO: 28010 - DNA, 201 bp, Homo sapiens
aaacaggatcaagtctactttcatggggctaaaatatatgtataatgaatctgtttcaggagtcagaaaggctttcttgggcaccaaggattttgaattcyagctcaggggtgaggggactagagtaagatttaggaagtttaacagttcctctctcagccccagaaaccccagtgagggaatctcaaaagtctgggactc

SEQ ID NO: 28011 - DNA, 201 bp, Homo sapiens
gagtgcagtggcacaatctcggctcactgcaacctccacctcccgggttcaagtgattatcctggctcagcctcccaagtagctgggactacaggtgtgcrccaccacgcccagctaatttttgtatttttagtagagacggggtttcaccacattggccaggatggtcttgatctcttgacctcgtgatccgcccgcctc

SEQ ID NO: 28012 - DNA, 201 bp, Homo sapiens
ctcttgcttcccaatggtaaagctattttcttcttttaagattttatttttatctcaggagctactcatctgactgttctcatgacccaagggtctgtctrgattctctggctttaggctgttagtagggaaagctgaagtcctcctgcaaaccataaagcaagattcacggacctactggcaggtccatggggaggtgag

SEQ ID NO: 28013 - DNA, 201 bp, Homo sapiens
acactccagcctgggcaacagtgtgagacaccgtcttgaaaaaacaaaaaacaaacaaaagtcagggaagggtgactttttttttttttttttttttttttgagactgagtgttgctcagtcgcccaggctagagtgcaatggcgcgatctcagctcactgcaagctccgcctcccgggttcacgccattctccagcctca

SEQ ID NO: 28014 - DNA, 201 bp, Homo sapiens
aaaggggggagggggaaggggaggggatttccaggcttcaacactcctgcaagaaaaaaaagtgaataaaattaaacatacgtccattgaagctgcaatcscttttcagagaaggatagaacctcttcatctccttgcttctatgaggacttagctctgagaaggtcccaggcagctgatcctcagtggtaagagttggga

SEQ ID NO: 28015 - DNA, 201 bp, Homo sapiens
cagagtccataactcttctaagaagaggaagcaaatcaaagcctggaattcaaagctttcttcagcagagtcaacagaccaataaagaaagggagtccctytgcctgtggcattgtccacactcacagggtcccacactcttatttgttcctacagagtaaaacgaggctagaaatacctatctttctttttctttggtgt

SEQ ID NO: 28016 - DNA, 201 bp, Homo sapiens
ccactacactccagcctgggcaacagtgtgagacaccgtcttgaaaaaacaaaaaacaaacaaaagtcagggaagggtgactttttttttttttttttttwtttttgagactgagtgttgctcagtcgcccaggctagagtgcaatggcgcgatctcagctcactgcaagctccgcctcccgggttcacgccattctccag

SEQ ID NO: 28017 - DNA, 201 bp, Homo sapiens
tgatcaggttgcaaggggcactgatgtcttgagactccctgaaggatatagattatcgcctacattcagtgctcttacacactccgggtttgccacagatrttccagtacaaacactggtgtactgacagtcaagtcaggtcagcagttcttgtctcagatttctgttggggagtgcattccaattaacagaacctccaca

SEQ ID NO: 28018 - DNA, 201 bp, Homo sapiens
attgcaccactacactccagcctgggcaacagtgtgagacaccgtcttgaaaaaacaaaaaacaaacaaaagtcagggaagggtgactttttttttttttwtttttttttttgagactgagtgttgctcagtcgcccaggctagagtgcaatggcgcgatctcagctcactgcaagctccgcctcccgggttcacgccatt

SEQ ID NO: 28019 - DNA, 201 bp, Homo sapiens
gaagctgaggcaggagaatcgcttgaacccagagggcggaggttgcagtgagctgagattatgccactgtactccagcctgggcaacagagcaagactccrtctctcaaaataaaaaataaataaaagagaagacaggtgacaccataataaaaaaaaaaggacagatgataagctgatcaagtttccttcaggtgacata

SEQ ID NO: 28020 - DNA, 201 bp, Homo sapiens
tacctcagttaaagatgggggtagtattaagaagctgggttcagtcattcaagggattctgtcttggagtatgtggtgtgagggagggtgacaggaaaagkagaagatggaggagagcagcccactcagggttcagtgataagtcctctactgaaggtgtaataaacaagttaaacctgtaaatggttatccccaccctct

SEQ ID NO: 28021 - DNA, 201 bp, Homo sapiens
aagcgattctcctgcctcagcctcccagtagctgggactacaggcgcccaccaccatgcccagctaattttttgtatttttagtagagacgggtttcaccrtgttagccaggatggtctcaatctcctgacctcatgatctgtctgcctcagcctcccaaaggctaggatgacaggcgtgagccaccatgcccagcaaaca

SEQ ID NO: 28022 - DNA, 201 bp, Homo sapiens
acataggagcggccattgcagtcttctatgtccattttaaagagattctgctgaaaaagaaaatagctgctattagaagatagctctgggaagggaggagscttttctttaatattcttgagttagcaagaaacctaaaggagcacttaagcatggtctgatactatcctaaagaagaaaaaccttagccaggcactgtgg

SEQ ID NO: 28023 - DNA, 201 bp, Homo sapiens
tgaggccttgaccctaaaaggatgagtgaacttgttggaaatccatcactggtcccagcttattcggctgaggctgcctcttgaggccagcgacttgctakgtggaggaaaatatatttaaaagtacacttagaaacactgagggcggccgggcgcggtggctcacgcctgtaatcccagcactttgggaggccgaggcgg

SEQ ID NO: 28024 - DNA, 201 bp, Homo sapiens
tcaagtgacccacccaccttggcctcctatagtgctgggataacaggcgtgagccactgcacccagtctgttctgacaatgaagcactttccctacttacmctacaccgatggtcctgataggccaacactgcaccgagacctaatagggtccccatgactctccatccctgggtgctggagttatcaccagagaaggtga

SEQ ID NO: 28025 - DNA, 201 bp, Homo sapiens
tagacaggcaagtcagactttctctcctatcctgaaggcactccttcctggtaggaaaatctcctccatttcccagtctaggctgaaaattcttcgttttygtttacctcctaaactgttcagtagttggtataacatactgcaaggaggacccctccctcttagtagaaaagcaaggcaaaggaagtctgcaaaaacaac

SEQ ID NO: 28026 - DNA, 201 bp, Homo sapiens
gacacatcccccaaagcaaagcaagattagtctgatttgctgtctctgatccttgaccttcctaaatgaaatatgaataaggtatgtgtgggaggatttayacttcttaaactgctgtacaccttccatattttaaaatatgtacatattaacttttgtaattaagaaatgtagtgatggccgggtgtggtggctcacgcc

SEQ ID NO: 28027 - DNA, 201 bp, Homo sapiens
agtaggtgggactacaggtgggcgccaccatgcccagctaatttttgtatttttagtagagacagggtttcaccatgttggctgggacagtcccgatctcytgacctcgtgatccatccacctcagcctcccaaagtgctgggattataggtgtgagccactgcacccggccccagctaatttttgtatttttagtagaga

SEQ ID NO: 28028 - DNA, 201 bp, Homo sapiens
aattcagcttgggcgacaaagactccatctccaaaaaaaaaaaaaaaaaaaagaaaaaaattaaattacatgaataagctttcttccccatgaaaataatrtgtgtcacttcacacttggtctaacacacaaaatccccaccttatctggcacagatacacttaacatgcaatattaagtacaatttccattttatttttc

SEQ ID NO: 28029 - DNA, 201 bp, Homo sapiens
agaccagcctggacaacatagtgaaaccccatctctaccaaaaatacaaaaattaaccaggcatggtggcagacacctgtaatcccagctactcaagaagytgaggcaggagaatcacttgaacccgggagacggaggttgcagtgagctgagatcacgccactgcaattcagcttgggcgacaaagactccatctccaaa

SEQ ID NO: 28030 - DNA, 201 bp, Homo sapiens
cacagagtaaagtatctgttttcctgcccccccacccccacccaattcttgtctggagttgagactccttttgaaggctcatgagaaaacctgaaacatgsgcttaccttcacttcacaaagcaattctctcttacattttgtcagagagattcctagtatcaaccctatttccctaggaagccagggcatggagaaaaaa

SEQ ID NO: 28031 - DNA, 201 bp, Homo sapiens
gttaaaaattttcagtaaccccacttactagatcgtaaagacagaaaatcatacaggaggcaattcagaggaataaaggctctggagtccaattctccacrtttgtttttcagctctacttactagctatgaaccttgagcaagtcactaaatatatgtgtgcattcatttcctcatctgtaaaatgagataatagcctta

SEQ ID NO: 28032 - DNA, 201 bp, Homo sapiens
cctgaggcaagaaatccggaacacaccctcctgagggatccctctccagctttggtcagtgggaagaaaacaaccactcaggactttgggaccatttcccrttcatatcctctcctaaagtcccattttccccattctatcccgtcaaagcctgaggaaaaatgttcactatctatagaaaaagccttatggcttgaatct

SEQ ID NO: 28033 - DNA, 201 bp, Homo sapiens
gcctaatcttttaaaaaaattcagttaaatttcacaaacatttccttcatagccatgtacaaagcagtgttgtatgctgggcaccataccttgtgcccccrccagtctggatgcctggtgctgccttctgtgagctcagtggctgggccttgcctaccctacctttatctaggcctgagggcaagagcatcactgcctgac

SEQ ID NO: 28034 - DNA, 201 bp, Homo sapiens
agtggtttgctttttaaaataatcagccttcgctgggtgtggtggctcatgcctgtaatcccagcactttgggaggcagaggcggatggatcacttgaggycaggagttcaagaccagcctggccaacatggtgagacacccatctctgctaaaaaaaaaaaaaaaaaaaaaaaaaaaatcagctgggtgtggtggcacat

SEQ ID NO: 28035 - DNA, 201 bp, Homo sapiens
ggaagaaaatcgaggttatgtgtctcccagcaagccttgcgccgcgccgactcggaagcaattctggacgatgcagttttccggtatacgcgacgctaggmgtgaaagttgccagacgctggaccacaaggcgcactcgttattagaggccagagagggacagatgcttggtgggaattgtagtgcgaagccaagaggctc

SEQ ID NO: 28036 - DNA, 201 bp, Homo sapiens
gcagtgctgatggctcctgttctccactccagaccttttacttctttgacctgagtcatctcagagcgtcggttgccggcacactgcagagtgactgtgakctcgtacctgggaaagttgtgcaagtcatccagggaaagagacagtgactgacccccaggtgctcctactacgtgtaagcgataggtgtctggatccagg

SEQ ID NO: 28037 - DNA, 201 bp, Homo sapiens
cacatcacagagccgtgccccagcccagcgtgcagtgctgatggctcctgttctccactccagaccttttacttctttgacctgagtcatctcagagcgtyggttgccggcacactgcagagtgactgtgatctcgtacctgggaaagttgtgcaagtcatccagggaaagagacagtgactgacccccaggtgctcctac

SEQ ID NO: 28038 - DNA, 201 bp, Homo sapiens
cagtggctgtaactttcctctggctgcacactcactctgcccagccatttgacatggcgggcacccaccactccaggaaccaccacacgcacagggaagcygtggtcacgtggcagaggctgcccattcatctcatatgccagcaggacctcagcttcagggtccatggcccgagccagagggatggatgctccataggca

SEQ ID NO: 28039 - DNA, 201 bp, Homo sapiens
gagtttctccatgttggtcagactagtctaagaagtcctgacctcaggtgatctgcccgccttggccttccaaagtgctgatattacaggcatgagccacygtgcctggccttcttttcatttttccttagctctttgtcaaaatgagagattcactctaggggtgtgggataagagtcaccactcctaagggcagaaggg

SEQ ID NO: 28040 - DNA, 201 bp, Homo sapiens
atcccgccgttgccagtggctgtaactttcctctggctgcacactcactctgcccagccatttgacatggcgggcacccaccactccaggaaccaccacaygcacagggaagccgtggtcacgtggcagaggctgcccattcatctcatatgccagcaggacctcagcttcagggtccatggcccgagccagagggatgga

SEQ ID NO: 28041 - DNA, 201 bp, Homo sapiens
ctagtgacttcacagacatcatactctatggcatatgtggggaaacatcattattttgtcaccacaattagtgggactggagttaaactggggttaaaaawtttcagtaaccccacttactagatcgtaaagacagaaaatcatacaggaggcaattcagaggaataaaggctctggagtccaattctccacgtttgtttt

SEQ ID NO: 28042 - DNA, 201 bp, Homo sapiens
cagtccacagatggagagaagcctttgtaatcccgccgttgccagtggctgtaactttcctctggctgcacactcactctgcccagccatttgacatggcrggcacccaccactccaggaaccaccacacgcacagggaagccgtggtcacgtggcagaggctgcccattcatctcatatgccagcaggacctcagcttca

SEQ ID NO: 28043 - DNA, 201 bp, Homo sapiens
tacagtctcccagtccacagatggagagaagcctttgtaatcccgccgttgccagtggctgtaactttcctctggctgcacactcactctgcccagccatytgacatggcgggcacccaccactccaggaaccaccacacgcacagggaagccgtggtcacgtggcagaggctgcccattcatctcatatgccagcaggac

SEQ ID NO: 28044 - DNA, 201 bp, Homo sapiens
gaagaaaataaagaagagtaaaaaaaagagaacaccaaatttgggtttgtttgtttatgtgcttgtaataaggaacaggttataaaggtcttgtttctacmgaagaaagaaaattggaaaacagagtggtacttcatttaaagataactcttaagagatatttgtgagaggagagaaaaaagtggagagaaacaacgtatt

SEQ ID NO: 28045 - DNA, 201 bp, Homo sapiens
gatggatgcatcttttctcttgttctttgcgcttctctgtcctccccatgtagactgcagaagagagagaaggctaaggtttatgagtgggagaagaaacratcctatccctcccatgtctcatttcaggacataaggaactaaggaaaagggccaaactaaacactttaaatcactagatatgatacataggagatgata

SEQ ID NO: 28046 - DNA, 201 bp, Homo sapiens
taaagagactttcagttgcattttcactggaaaaaagtcaggacttatttctgagccaagtcctgaaatatgccttacccttaacctactcagaggaaggrgattgcccagaagctacaattcaactaactaactgcactcagtgggcaacaaagacattatattttgtgtttgagacatcaacttctattgactagggca

SEQ ID NO: 28047 - DNA, 201 bp, Homo sapiens
ggtgtgccaccaactccacatccttttcatagccacccgagttcacatcataggggaggtctgagaggctgaagcgcatctgcttttcgcctgtggagaasaggaactcagcagggctgggtttggagaattcctacactctcctcaggattacttctttgtttttttacctgtggggctgggtgtaacattatttactac

SEQ ID NO: 28048 - DNA, 201 bp, Homo sapiens; identical to SEQ ID NO: 5686

SEQ ID NO: 28049 - DNA, 201 bp, Homo sapiens
gaggtatggagtaccaggttgaagagtcccagagaggagatataatgccacagagctaaggtagggccgggggcaggtatcagcatcaaaactgaagaatyagataatgtaaagggtgaggacttaaagcaagaagcttgaagtctcttagtactaagaggagcttcctacccctggggctgctggaagatctaagagaga

SEQ ID NO: 28050 - DNA, 201 bp, Homo sapiens
tatagaaaatttaaaaagtgagaacctacaactctagcagccatgaggtaagaaaataacgggatggggtttgtgtgaggaggtacagggagggctgtttyggtacacaggagcaggcagcctgcttcccaagtttgcagctcccgtctggatgtctgccctggggattcctctgttgcatttctttcttagggctctcaa

SEQ ID NO: 28051 - DNA, 201 bp, Homo sapiens
tcctctggctgcacactcactctgcccagccatttgacatggcgggcacccaccactccaggaaccaccacacgcacagggaagccgtggtcacgtggcaraggctgcccattcatctcatatgccagcaggacctcagcttcagggtccatggcccgagccagagggatggatgctccataggcagtcccagtagggtct

SEQ ID NO: 28052 - DNA, 201 bp, Homo sapiens
aggaaacctagagatgggaataggagcagtcttcaccttgcccctgggccatgggaccattactctctctgccacctacctcaatgccagcagcctgtttrtactagaccagagcagtgcaggtagggctgactcgcaggtgaactcagtgagcccagaatcccaggtttgggagggacagccttttgctgtaatacagaa

SEQ ID NO: 28053 - DNA, 201 bp, Homo sapiens
gatggcggactggacaggaagttcctgaatggatggagcagagtcaaaatctacagtctcccagtccacagatggagagaagcctttgtaatcccgccgtygccagtggctgtaactttcctctggctgcacactcactctgcccagccatttgacatggcgggcacccaccactccaggaaccaccacacgcacagggaa

SEQ ID NO: 28054 - DNA, 201 bp, Homo sapiens
cccggggctctgtgatggcggactggacaggaagttcctgaatggatggagcagagtcaaaatctacagtctcccagtccacagatggagagaagcctttstaatcccgccgttgccagtggctgtaactttcctctggctgcacactcactctgcccagccatttgacatggcgggcacccaccactccaggaaccacca

SEQ ID NO: 28055 - DNA, 201 bp, Homo sapiens
gcagtgaggctaatgggtggggaaaggggtggaggtggctcctttccatgctcatggggagacatagacatggacacgatgccaggcattgctgagaacayctcgcaggttccagattggggccacggtgtctggctgcacattgtaaccatcatccacagccttacaaacaatgttcagttccttttgtccagctggcac

SEQ ID NO: 28056 - DNA, 201 bp, Homo sapiens
ccaccaccactccatgcatagcccttgatggtcacctcccctgattctacagtctctccatcccggggctctgtgatggcggactggacaggaagttcctraatggatggagcagagtcaaaatctacagtctcccagtccacagatggagagaagcctttgtaatcccgccgttgccagtggctgtaactttcctctggc

SEQ ID NO: 28057 - DNA, 201 bp, Homo sapiens
ctggggcgctgttcctctccatccagcttagccacctgccaggttaggcccccatccagagacacatccacccggatcacagccctgccaccaccactccrtgcatagcccttgatggtcacctcccctgattctacagtctctccatcccggggctctgtgatggcggactggacaggaagttcctgaatggatggagca

SEQ ID NO: 28058 - DNA, 201 bp, Homo sapiens
gagctgggaaataaacaaaagaaaactaagatccccaagcccaacagagctcaaaggaaggcagaagaggtggtaggaagtagagggaaggcagccgatasgcccagaagctaaggccaaatcctgttcctatgggggtggggggagggagaagcctggggaagtggtttcccaggcccaagataatgaaacatcttcact

SEQ ID NO: 28059 - DNA, 201 bp, Homo sapiens
gaaaggatttcaatctgtatacaatcaaatcactgaagaaggctaatgcccaacctatcctaccagttgttaaaaaaaaaatatatatatatatatatatrtatatatatatggagagagagagagtgagagagagagagagagggagaaagagggagagagagagaaagcgagcttcaacctaaaaaaaaaaaagtctca

SEQ ID NO: 28060 - DNA, 201 bp, Homo sapiens
gcaaagtacaactctcaagcaatgcttaggtttgggagagaggtttttgcatgctctgcctatgctaacttccctttgaatttcatagttcctttccgctyagagtcaggatgatgaaatgtattcagatttagacgattagaatctcaaagtcccaactcttctctctgttccctgccccaccagcagctttcttagccc

SEQ ID NO: 28061 - DNA, 201 bp, Homo sapiens; identical to SEQ ID NO: 5688

SEQ ID NO: 28062 - DNA, 201 bp, Homo sapiens
tttagacgattagaatctcaaagtcccaactcttctctctgttccctgccccaccagcagctttcttagccctcttagaagatagaggagctgattcagtstattctttcatcaaatactgattgcttgcagacttaacgccctataccatcctctggagacttctgcatgtctttagaaggtatacctttctctgcctct

SEQ ID NO: 28063 - DNA, 201 bp, Homo sapiens; identical to SEQ ID NO: 5689

SEQ ID NO: 28064 - DNA, 201 bp, Homo sapiens
gcctcccaaagtgctgggattacaggcgtgagtcaccacgccgggccggtaaggcttttgaaaagagatataagacctgattatggagctggccctcttartcccattcttttccccagaaatggaaaccctttataaaaacagaggccggtcccagtggcccaccactttgggaggccaagatgggcggatcacctgagg

SEQ ID NO: 28065 - DNA, 201 bp, Homo sapiens
tgaataaggagctacccaggtgaacaaagtatgtgtacatttctgggcaaggttgtagcttctgttcagggacagtgggtaccttttcagagtgtctcctggttctgtggtgttatggctcctttttttaaacttgtgtttctcaagtcaggaattaatagatagtggcccaaagcttttgaccgttcaacatcaactgaa

SEQ ID NO: 28066 - DNA, 201 bp, Homo sapiens
aagcgtgtctgcaattgtttcctgtctttacactcccccagagctcaagtgatatgtttagccatgagaattcagtccattctaactcccacattttcctktattgtagagtagtaacattgaggcttaatattctaccccttggatcacatgctttgaaatacataaaaatgtaagggagtaagttgaaaaaaccagtaa

SEQ ID NO: 28067 - DNA, 201 bp, Homo sapiens
actcgttcccaccctacattctgagcactaatacatcccactccttgcaggaggcccaggcatatgcagatgacaacagcttattgttcatggagacttcmgccaagacagctatgaacgtgaatgatctcttcctggcaataggtaaggtcagaacatcctgaggtcctcctttttccctcgtttataggcaaaattata

SEQ ID NO: 28068 - DNA, 201 bp, Homo sapiens; identical to SEQ ID NO: 5694

SEQ ID NO: 28069 - DNA, 201 bp, Homo sapiens; identical to SEQ ID NO: 5693

SEQ ID NO: 28070 - DNA, 201 bp, Homo sapiens; identical to SEQ ID NO: 5697

SEQ ID NO: 28071 - DNA, 201 bp, Homo sapiens; identical to SEQ ID NO: 5698

SEQ ID NO: 28072 - DNA, 201 bp, Homo sapiens; identical to SEQ ID NO: 5699

SEQ ID NO: 28073 - DNA, 201 bp, Homo sapiens
tagttattgtcttgaaccgctcttggccagctgtgtcccagacttgtagtttgatcttcttcccctctatatccacagtgcggatcttgaaatcaattccratggtggagatgtaagtgttgttgaagttgtcctctgcaaagcgaatgatcagacaagtcttgcccacccccgagtccccgatcagcagcaacttgaaga

SEQ ID NO: 28074 - DNA, 201 bp, Homo sapiens
ggctggactctaactcctgacctcaggtgatccacgtgcctcagcctcccaaagcactgggattacaggagtgagccaccgcgcctggccgtgtgtgcgtgtgtgtgtgtgtgttttaatcctatctaatttttccaacagttttttgcatcctaagagagtttaggagtagaattatcaataaggaatttcatacataga

SEQ ID NO: 28075 - DNA, 201 bp, Homo sapiens
gctggactctaactcctgacctcaggtgatccacgtgcctcagcctcccaaagcactgggattacaggagtgagccaccgcgcctggccgtgtgtgcgtgtgtgtgtgtgtgttttaatcctatctaatttttccaacagttttttgcatcctaagagagtttaggagtagaattatcaataaggaatttcatacatagac

SEQ ID NO: 28076 - DNA, 201 bp, Homo sapiens
aggttttcaccacgttggccaggctggtctcaaactcctgacctcaggtgatctgcccatctcgccctcccaaagtgctaggattacaggtgtaagccacsacgcctagcccaaattgactaattgtatgtgtctcggtttcctcacctataaaatatagagactggactaaatgacctctagactggctctgatctgcct

SEQ ID NO: 28077 - DNA, 201 bp, Homo sapiens
aaggcgggaggatcatgaggtcaagagattgagaccatcctggccaacatggtgaaaccccgtctctactaaaattacaaaaattagttgggcgtggtggygcgcgcctgtagtcccagctactcgggaggctgaggcaggagaatcgcttgaacccaggaggcggaggttgcagtgagccgagatcgagccactgcactc

SEQ ID NO: 28078 - DNA, 201 bp, Homo sapiens
cagtggcaaagtctcgacccactgcagcctctgcctcccaggttcaagcaattctcctgcttcagcctcccaagtagctgagattacaggtgtcagccacmacacctggctaatttttgtgtttttaatagagacggggtttcaccatgttcgccagactggtgttgaattcctgaccttaggtgatccgcccacctcagc

SEQ ID NO: 28079 - DNA, 201 bp, Homo sapiens
ggcgggaggatcatgaggtcaagagattgagaccatcctggccaacatggtgaaaccccgtctctactaaaattacaaaaattagttgggcgtggtggtgsgcgcctgtagtcccagctactcgggaggctgaggcaggagaatcgcttgaacccaggaggcggaggttgcagtgagccgagatcgagccactgcactcta

SEQ ID NO: 28080 - DNA, 201 bp, Homo sapiens
tcaccatgttcgccagactggtgttgaattcctgaccttaggtgatccgcccacctcagcctcccaaagtgctgggatttcaggcatgagtcactgcaccyggcagagctgcacttctaagggaagttaaatctgatttcttctcttctgagctaaaaaggttgaaaggaagagaaacctgccccatctcccttttttttg

SEQ ID NO: 28081 - DNA, 201 bp, Homo sapiens
aagtaaggtggcccgtggagttcctctctaacacttcctctgttcctgggacctctttttttccaaaccagccctctctgaaaacgtcaacagaggacatycattgtctcattccccagttctacaccaagttaaatacagcaacactgtgaccctaatgacagccaggagattttcaaaggagtcaggagaaaactccag

SEQ ID NO: 28082 - DNA, 201 bp, Homo sapiens
tgagctaaaaaggttgaaaggaagagaaacctgccccatctcccttttttttgtctcgggtttgaaggtaataatcatcataccacttgactggtttaccaaaaaaaaaaaaaaaaattagtatttttgtgggaaaaaatgagaatagaaaataaataattgaatcttatatgtattatttcatttctgtaccacagaatt

SEQ ID NO: 28083 - DNA, 201 bp, Homo sapiens
gaggcgggcggatcacgaggtcaagagatcaagaccatcctggccaatgtggtgaaaccccgtctctactaaaaatacaaaaattagctgggcgtggtggygcacacctgtagtcccagctacttgggaggctgagccaggataatcacttgaacccgggaggtggaggttgcagtgagccgagattgtgccactgcactc

SEQ ID NO: 28084 - DNA, 201 bp, Homo sapiens
agttctacaccaagttaaatacagcaacactgtgaccctaatgacagccaggagattttcaaaggagtcaggagaaaactccagagcagagggttagggargtaccagctgtgggggtaccagtgtgaaaacaggaaggagggagcaattaaatttgtggtaagggactattcaagtgtcacaacccaaaagcccccaact

SEQ ID NO: 28085 - DNA, 201 bp, Homo sapiens; identical to SEQ ID NO: 5702

SEQ ID NO: 28086 - DNA, 201 bp, Homo sapiens
tcccaactcttaccactgaggatcagctgcctgggaccttctcagagctaagtcctcatagaagcaaggagatgaagaggttctatccttctctgaaaagsgattgcagcttcaatggacgtatgtttaattttattcacttttttttcttgcaggagtgttgaagcctggaaatcccctccccttccccctccccccttt

SEQ ID NO: 28087 - DNA, 201 bp, Homo sapiens; identical to SEQ ID NO: 5704

SEQ ID NO: 28088 - DNA, 201 bp, Homo sapiens
cccttctgcccttaggagtggtgactcttatcccacacccctagagtgaatctctcattttgacaaagagctaaggaaaaatgaaaagaaggccaggcacrgtggctcatgcctgtaatatcagcactttggaaggccaaggcgggcagatcacctgaggtcaggacttcttagactagtctgaccaacatggagaaactc

SEQ ID NO: 28089 - DNA, 201 bp, Homo sapiens
tatgtcacctgaaggaaacttgatcagcttatcatctgtccttttttttttattatggtgtcacctgtcttctcttttatttattttttattttgagagayggagtcttgctctgttgcccaggctggagtacagtggcataatctcagctcactgcaacctccgccctctgggttcaagcgattctcctgcctcagcttc

SEQ ID NO: 28090 - DNA, 201 bp, Homo sapiens
aaaacaaacgtggagaattggactccagagcctttattcctctgaattgcctcctgtatgattttctgtctttacgatctagtaagtggggttactgaaawtttttaaccccagtttaactccagtcccactaattgtggtgacaaaataatgatgtttccccacatatgccatagagtatgatgtctgtgaagtcactag

SEQ ID NO: 28091 - DNA, 201 bp, Homo sapiens
ggggccctccatccaagggagatcacagaggagccagggagagaattgattctgaggcctattaaaaatattcccaaatggggccgtgtgcggtggcatgygcctgtaatcccagcactttgggaggctgaggcgggtggatcacgaggtcaggagattgagaccatcctggctaacacggtgaaaccccgtctctactaa

SEQ ID NO: 28092 - DNA, 201 bp, Homo sapiens
ataaactcccacttttaaagaagttcatagtttagcagagcagacagacacaatttatatactgtgataatgtgatacatactattatagaaatacagtctttttttttttttttgagacggattcttgctttgctgtccaggctggagtacagtggtgcaatctgtgctcactgcaacctccgcctcccgggctcaagca

SEQ ID NO: 28093 - DNA, 201 bp, Homo sapiens
agatgtaagtgttgttgaagttgtcctctgcaaagcgaatgatcagacaagtcttgcccacccccgagtccccgatcagcagcaacttgaagaggtggtcrtaggctttggccatggcggacaccgggggagccggggaagggatggggctatttatttatttttgagacggaatcgctctgttgtccaggctggagtgca

SEQ ID NO: 28094 - DNA, 201 bp, Homo sapiens; identical to SEQ ID NO: 5690

SEQ ID NO: 28095 - DNA, 201 bp, Homo sapiens
ggcgtgagccaccacacccggccatcactacatttcttaattacaaaagttaatatgtacatattttaaaatatggaaggtgtacagcagtttaagaagtrtaaatcctcccacacataccttattcatatttcatttaggaaggtcaaggatcagagacagcaaatcagactaatcttgctttgctttgggggatgtgtc

SEQ ID NO: 28096 - DNA, 201 bp, Homo sapiens
cccactgcactccagcctgggcaacagaatgagaccctgtctccaaaaaaaaaaaagacaaagattgccaaagcagaggagtggagtaccctcctccccamatatttttaatggtctgctagccttcttagtccctcatagattggagcctattggattttcccttactgtacttcctccttttctgcgtctctaccaata

SEQ ID NO: 28097 - DNA, 201 bp, Homo sapiens; identical to SEQ ID NO: 5691

SEQ ID NO: 28098 - DNA, 201 bp, Homo sapiens; identical to SEQ ID NO: 5692

SEQ ID NO: 28099 - DNA, 201 bp, Homo sapiens
ttccggggtggggaggcaagaaagggtcctcagctcagggagcacttgttggtgttctttatgtcacaagttttcaggtcagtactgggaggcttgttgcygtttcctgatctccggcctcctgacttgagcaagatgtcccgggccagggaactaaaagcctcatccacattcatactggatttagcactagtttcgaaa

SEQ ID NO: 28100 - DNA, 201 bp, Homo sapiens; identical to SEQ ID NO: 5696

SEQ ID NO: 28101 - DNA, 201 bp, Homo sapiens; identical to SEQ ID NO: 5700

SEQ ID NO: 28102 - DNA, 201 bp, Homo sapiens
gagctaaaaaggttgaaaggaagagaaacctgccccatctcccttttttttgtctcgggtttgaaggtaataatcatcataccacttgactggtttaccaaaaaaaaaaaaaaaaattagtatttttgtgggaaaaaatgagaatagaaaataaataattgaatcttatatgtattatttcatttctgtaccacagaattt

SEQ ID NO: 28103 - DNA, 201 bp, Homo sapiens
ttgtcatgttcctctgtattaatctagtctactttgggaccttgagttctcacctctcattcttttgctaacttcctctttaccctttagttatgtctccttttttttttttttttttttccagagatagcgtcttgttctgtcgcccaggctggagtgcagtggtgtaatcagctcactacaaccttcaactcctgggct

SEQ ID NO: 28104 - DNA, 201 bp, Homo sapiens
tgtcatgttcctctgtattaatctagtctactttgggaccttgagttctcacctctcattcttttgctaacttcctctttaccctttagttatgtctccttttttttttttttttttttccagagatagcgtcttgttctgtcgcccaggctggagtgcagtggtgtaatcagctcactacaaccttcaactcctgggctc

SEQ ID NO: 28105 - DNA, 201 bp, Homo sapiens
tcaggacttcttagactagtctgaccaacatggagaaactccgtctctactaaaaatacaaaattagccaggcgtggtggtgcatgcctgtaatcccagcwactcgggagactgaggtgggagaattgcttgaacccgggaggcagaggttgtggtgagccaagattgtgccattgcactccagcctgggcaacaagagtg

SEQ ID NO: 28106 - DNA, 201 bp, Homo sapiens; identical to SEQ ID NO: 5701

SEQ ID NO: 28107 - DNA, 201 bp, Homo sapiens
caggctggactctaactcctgacctcaggtgatccacgtgcctcagcctcccaaagcactgggattacaggagtgagccaccgcgcctggccgtgtgtgcgtgtgtgtgtgtgtgttttaatcctatctaatttttccaacagttttttgcatcctaagagagtttaggagtagaattatcaataaggaatttcatacata

SEQ ID NO: 28108 - DNA, 201 bp, Homo sapiens
aggctggactctaactcctgacctcaggtgatccacgtgcctcagcctcccaaagcactgggattacaggagtgagccaccgcgcctggccgtgtgtgcgtgtgtgtgtgtgtgttttaatcctatctaatttttccaacagttttttgcatcctaagagagtttaggagtagaattatcaataaggaatttcatacatag

SEQ ID NO: 28109 - DNA, 201 bp, Homo sapiens
aaaaagacaaagattgccaaagcagaggagtggagtaccctcctccccacatatttttaatggtctgctagccttcttagtccctcatagattggagcctrttggattttcccttactgtacttcctccttttctgcgtctctaccaatatattttatcactacatttcttttttttttttttttttttttgagacggagt

SEQ ID NO: 28110 - DNA, 201 bp, Homo sapiens
taaggctattatctcattttacagatgaggaaatgaatgcacacatatatttagtgacttgctcaaggttcatagctagtaagtagagctgaaaaacaaaygtggagaattggactccagagcctttattcctctgaattgcctcctgtatgattttctgtctttacgatctagtaagtggggttactgaaaatttttaac

SEQ ID NO: 28111 - DNA, 201 bp, Homo sapiens; identical to SEQ ID NO: 5703

SEQ ID NO: 28112 - DNA, 201 bp, Homo sapiens
ttattaagggttttgtattaagcattgttggatttcacaaaattttaaagttagcaatgcacatgttcatctgctggcatttcactcctattcctcgctayttttcttccttatttcttagagttaaatgagtggacctctcattttgtgacaaaagagacacatttatatcttagggtaggccgtataaaatggccattt

SEQ ID NO: 28113 - DNA, 201 bp, Homo sapiens
tcccatcagatttgaccaactgtacccaacttggccaaattcaaatgagaattccaaattatgagcagccagacctctgaagctgctaaaattcctcatarctgaaaaaaagaaaacaaacaaattatgcgcttggtttctgttgcagcttcctgtcttaaaaacacaattgttctttcattttcttttcttccacactat

SEQ ID NO: 28114 - DNA, 201 bp, Homo sapiens
acaaatttactattcatatttagaaaaatataccgtttttctgaaatcacccttccagttttgttatatggtgtaatcttgagagacatcataatggagayggagtaaagggaacaagcagtctccatcttgatccaactggctgtgtagaaaatgtttaaaatttgtgttcaagatttttacttcttagtataatatgtt

SEQ ID NO: 28115 - DNA, 201 bp, Homo sapiens
gtatatacagcctctaagccaaaaataaaattcaaccctcccaccccctgctcccagcactgaatggacctcctcttggtcaagagccttccaaagttagyctaaaaaacaagtttaggctgttatgggaaggaggtgttggacatgcctctttataccctcctctcttttggaattcaggaataaccaaccatcattaac

SEQ ID NO: 28116 - DNA, 201 bp, Homo sapiens
tttgattcttattaagacctggaaacatgtaacaattcaaaaaaggttgacaattctttttttgaaagaaactatttcttttcttttcttttttttgagayggagtctcactctgtcgcctaagctggagtgcagtggcatgatctcggctcactgcaacctccacctcccaggtataaacgattctcctgcctcagcctc

SEQ ID NO: 28117 - DNA, 201 bp, Homo sapiens
ataaaatctgatttataaaactaggtgaaaatagtttgctcttaagaatacactctgagaaggtttatagtgggaagagagaatatccacaaatggtattyaatataaaaaatagctagagatatggccatactatgctgtagtcaatcagttttgattcatattaagaatgctattcaaatttctaggtccttttcacat

SEQ ID NO: 28118 - DNA, 201 bp, Homo sapiens
gagtgaggatcacttgaggccaggagttcaagaccagcctggacaacatagcaagactttgtctctgcaatttttgtttttaaattagccaggtgtggtgktgtgcacctgtagtcccagctacttagagggctgaggtgggagcatctcttaagcccaggaagctgaggctccagtcagctatgatcatatcactgcact

SEQ ID NO: 28119 - DNA, 201 bp, Homo sapiens
atttttccaaatttgatttgtacttgatttagtaggacttgcttttaaatataaaatctgatttataaaactaggtgaaaatagtttgctcttaagaatayactctgagaaggtttatagtgggaagagagaatatccacaaatggtattcaatataaaaaatagctagagatatggccatactatgctgtagtcaatcag

SEQ ID NO: 28120 - DNA, 201 bp, Homo sapiens
acagagattatttagcactagacatgagtcagaatagccactgatttctttcactctgcgaataaaaccaaactagttaggcaacccatgtgttttagggraaaagcaatgaggtcatgatccatctaatttcttttcttaacatgtaaagtagaataaattatttttccaaatttgatttgtacttgatttagtaggact

SEQ ID NO: 28121 - DNA, 201 bp, Homo sapiens
atctttctaatgggtatgtttgtttttctctgccttactagcacactttcccccccacgaacagtgtgatggcgggtgtagcaaactcctaagttgaagtsttttaggatattttttgactctggtggatttcttccttctaatctcaagaaagaaagaaagaaagagaaagaaagaaagaaagaaggaaggaaagaagga

SEQ ID NO: 28122 - DNA, 201 bp, Homo sapiens
tattttggtcactttgtagttttgcttactgatctttaagactcaacagtgacttattgagggcaaaactgttgtgttctgatccctacccagtcagctayatcactgacttccagaagccaccaaaacattgctatgacttcagctttcaaggggaaaaaagaattagcaaacaatacatattacaaaatagtaaaaaac

SEQ ID NO: 28123 - DNA, 201 bp, Homo sapiens
acttgagaacattcatatctcattaattcccacacatctttatttcaaatgttcagggagtgataaaataaatatttgtgtgaaatcttctttatcaactygattttcctccagactttacagaacagaacaagcatctttcattctaatgagctgtagaaaaaagaatatattaatagaagaacaaaaggttagtaataa

SEQ ID NO: 28124 - DNA, 201 bp, Homo sapiens
gaatctgacaattatgtgtcttggagttgctcttctcgaggagtatctttgtggcgttctctgtatttcctgaatctgaacgttggcctgccttgctagaytggggaagttgtcctggataatatcctgcagagtgttttccaacttggttccattctccccatcactttcaggtacaccaatcagacgtagatttggtct

SEQ ID NO: 28125 - DNA, 201 bp, Homo sapiens
ctttctctctggctgcccttaacattttttccttcatttcacctttggtgaatctgacaattatgtgtcttggagttgctcttctcgaggagtatctttgyggcgttctctgtatttcctgaatctgaacgttggcctgccttgctagactggggaagttgtcctggataatatcctgcagagtgttttccaacttggttc

SEQ ID NO: 28126 - DNA, 201 bp, Homo sapiens
tctccttcacttatgaagcttagtttggctggatatgaaattctgggttgaaaattcttttctttaagaaatttgaatattagcccccactctcttctggsttgtagggtttctgctgagagatccacttttagtctgatgggcttccctttgagggtaacccgacctttctctctggctgcccttaacattttttccttc

SEQ ID NO: 28127 - DNA, 201 bp, Homo sapiens
tgtcacttattactgctttccagaggcaagtgcttataacttttagctctttcttgtatttgccaccaatttctttcttttttttctgtttttttttttttattatttattattatttttttgagacagtcttgctctgtcacctaggctggagtgcagtggtgtgatctcgggtcactgcaacctccacctcccaggttc

SEQ ID NO: 28128 - DNA, 201 bp, Homo sapiens
ttgtcacttattactgctttccagaggcaagtgcttataacttttagctctttcttgtatttgccaccaatttctttcttttttttctgtttttttttttttattatttattattatttttttgagacagtcttgctctgtcacctaggctggagtgcagtggtgtgatctcgggtcactgcaacctccacctcccaggtt

SEQ ID NO: 28129 - DNA, 201 bp, Homo sapiens
accagttcctccttgtacctctggtagaattcggctgtgaatccatctggtcctggactcttttttgttggtaagctattgattattgccacaatttcagmtcctgttattggtctattcagagattcaacttcttccttgtttagtcttgggagagtgtatgtgtccaggaatttatccatttcttctagattttctagt

SEQ ID NO: 28130 - DNA, 201 bp, Homo sapiens
cttgtcacttattactgctttccagaggcaagtgcttataacttttagctctttcttgtatttgccaccaatttctttcttttttttctgtttttttttttttattatttattattatttttttgagacagtcttgctctgtcacctaggctggagtgcagtggtgtgatctcgggtcactgcaacctccacctcccaggt

SEQ ID NO: 28131 - DNA, 201 bp, Homo sapiens
cctcataaaatgagttagggaggattccgtctttttctattgattggaatagtttcagaaggaatggtaccagttcctccttgtacctctggtagaattcrgctgtgaatccatctggtcctggactcttttttgttggtaagctattgattattgccacaatttcagatcctgttattggtctattcagagattcaactt

SEQ ID NO: 28132 - DNA, 201 bp, Homo sapiens
aaatgttggtgtttcagagatatctgtttctgtatctgtctacattgcaaaacagaacccttcttcggggcagggattgtgttatattcatttattatttaatgcaaccctagcacaaatccaagtatttaagatagttgttatgcagtaaatgctagaatgtaaatgattgggtgaggctcttaattaagactttgttca

SEQ ID NO: 28133 - DNA, 201 bp, Homo sapiens
tttctcattttcttgtattagctaatgcaagaaataccacaacagtgatgaataataatgatattagctgggaacctttatttgttcctgattttttttttgtctttttttttattattatactttaagttttagggtacatgtgcacattgtgcaggttagttacatatgtatacatgtgccatgctggtgagctgcacc

SEQ ID NO: 28134 - DNA, 201 bp, Homo sapiens
taaatgttggtgtttcagagatatctgtttctgtatctgtctacattgcaaaacagaacccttcttcggggcagggattgtgttatattcatttattatttaatgcaaccctagcacaaatccaagtatttaagatagttgttatgcagtaaatgctagaatgtaaatgattgggtgaggctcttaattaagactttgttc

SEQ ID NO: 28135 - DNA, 201 bp, Homo sapiens
acaatttttttccattatagtttcttggttttttttttttgtcttttttaaaaaagtttttctttaacctaacattactcttatttttcacataatttttwcattttattttaacattaaaatccctaatccattgctctttttcatctttaaacatggattatgcaggaatattactattttcttgctgaatgaagatct

SEQ ID NO: 28136 - DNA, 201 bp, Homo sapiens
gtaaatgttggtgtttcagagatatctgtttctgtatctgtctacattgcaaaacagaacccttcttcggggcagggattgtgttatattcatttattatttaatgcaaccctagcacaaatccaagtatttaagatagttgttatgcagtaaatgctagaatgtaaatgattgggtgaggctcttaattaagactttgtt

SEQ ID NO: 28137 - DNA, 201 bp, Homo sapiens
ttaaagaagtagactccacaatttttttccattatagtttcttggttttttttttttgtcttttttaaaaaagtttttctttaacctaacattactcttayttttcacataattttttcattttattttaacattaaaatccctaatccattgctctttttcatctttaaacatggattatgcaggaatattactattttc

SEQ ID NO: 28138 - DNA, 201 bp, Homo sapiens
tgtaaatgttggtgtttcagagatatctgtttctgtatctgtctacattgcaaaacagaacccttcttcggggcagggattgtgttatattcatttattatttaatgcaaccctagcacaaatccaagtatttaagatagttgttatgcagtaaatgctagaatgtaaatgattgggtgaggctcttaattaagactttgt

SEQ ID NO: 28139 - DNA, 201 bp, Homo sapiens
taaacagtctagagtctagaccattcttctaaacagctttgtggtagctagagtagctaaccatcaaggctgagggaaggtgttttgttttgtttcatttygtttttttctcaaaaggcaagaaatgccttggatatattaataagctagtggggaaacaagcaataaagggtgtgaggttgaaaatagagagaaaagcct

SEQ ID NO: 28140 - DNA, 201 bp, Homo sapiens
acaagcccttattataacccagatattattttctattgataataactcttccaaccaattgccaatcagcacattttaaaactttaaaactacctatgacygggaaccccctgcttcgggttgtcctgcccttccagattaaaccaatgtaaatcttacatgtactgactgacgtattatgtctctctaaaatgtataaaa

SEQ ID NO: 28141 - DNA, 201 bp, Homo sapiens
tttagttgaatccctaatgagatagcttccattttccattctgacacacaaatactcttttgattgtcaaaatattaatgttatttatctctccttggttyacttccaaggaaactggaatgatggtattctcaagactagagatgcaaatctctctcatttgtcatcccactgagcccgatctgtttttcactgcaaatg

SEQ ID NO: 28142 - DNA, 201 bp, Homo sapiens
cccttactgtgtattttcaaacagcctatcttcaagctcactaaatctctcttctgcttgataaattctgctattaagagattctgaggcattctttagtwtgtcattgcatttttttaactgtagaatttctgcttgattctttttatttatgtcaacctctttgtaaaattcatctaatagtgttctgcattttttctc

SEQ ID NO: 28143 - DNA, 201 bp, Homo sapiens
agatggatgaaaacagtatatttaatcttatttgattttattttactttcagctctgatttcttcaagatgtttttgatacttattctgtcattaattcartaaacttgtattgggtgcctgctatttgtcaggcacttagtaggcaccagggccacaggggtaaataacatatggctcctgtatctgacttgctctcaga

SEQ ID NO: 28144 - DNA, 201 bp, Homo sapiens
ctttataaatacagagattatttagcactagacatgagtcagaatagccactgatttctttcactctgcgaataaaaccaaactagttaggcaacccatgygttttaggggaaaagcaatgaggtcatgatccatctaatttcttttcttaacatgtaaagtagaataaattatttttccaaatttgatttgtacttgatt

SEQ ID NO: 28145 - DNA, 201 bp, Homo sapiens
attcattaggaagcatgaaagaactatttttaacaaatttgctttaaactttgttgttgaaataagttgaaagggcattattgctagaagctagtaggacyagctttataaatacagagattatttagcactagacatgagtcagaatagccactgatttctttcactctgcgaataaaaccaaactagttaggcaaccca

SEQ ID NO: 28146 - DNA, 201 bp, Homo sapiens
taacaataatttcctgtaagaaaaatggccattttgtcagctgttctgatttttttttctatttcagagaaaattctgttttctagcttcaaagtcatttmtattcaaacaaatttgaatttatgataaaccaagggatctggacatttgtcctgattctatagctagtgcctgcaagtggtttcaaaactaagacactgt

SEQ ID NO: 28147 - DNA, 201 bp, Homo sapiens
tgggacctggatgttggtattttaaaaaatatctccaggtagatcttgctgagaaccaatggcagaaccactgaaactgttgttctgaagaagcaaaaaaraattccggatacttgagaacattcatatctcattaattcccacacatctttatttcaaatgttcagggagtgataaaataaatatttgtgtgaaatcttc

SEQ ID NO: 28148 - DNA, 201 bp, Homo sapiens
aaaatggctcattgcacagaaatgctttgttgatttgtatgcaattacccagcaaaacaaatgttttctttaagctttggcaacataacaataatttcctrtaagaaaaatggccattttgtcagctgttctgatttttttttctatttcagagaaaattctgttttctagcttcaaagtcatttatattcaaacaaattt

SEQ ID NO: 28149 - DNA, 201 bp, Homo sapiens
tagaggcaggccacacattactagaagcaggccaaacattactagaggcaggccacacatttggctctgtgctttttctaacaggaatcatttttgattamatcatttacatagtccttagaatgtaccaaatgaatcagcatctctgagggtgggacctggatgttggtattttaaaaaatatctccaggtagatcttgc

SEQ ID NO: 28150 - DNA, 201 bp, Homo sapiens
cacccaagaggctgttcttgtctcacagagctaggagccatttcaagatcctggaaataagtgattttcataagatttttgctagtgtaaattttttttttccctagggaaaggatgatctcctaagtcttcttcatgtatgtactactagctttgctgtaaagtaaggcctttatttcattaatttgagagtagagaata

SEQ ID NO: 28151 - DNA, 201 bp, Homo sapiens
aaaacagcatataaccacaaatatagatcatttaaaattgtctaatgatccaaaccaccatgctgacaaacggtattcagctgagtggcaaagggaaggakaggtgagtcatatgcacatgctcatcgattaaacctcatcccatgcctcatttatacatacacagagctccaaactgttccctttacatgatttaaatca

SEQ ID NO: 28152 - DNA, 201 bp, Homo sapiens
tagataattataaaatttacttatttattacatttggtaatattaaacatgaagacaatattctttgtcttatatatcgtgctatttaatttgtgacatayaccccttatgttaaattaatgttgagagaaaaagcgtggcctgttaagaaataaatttatagatgacattatgtcatatttgtagattggagtttactat

SEQ ID NO: 28153 - DNA, 201 bp, Homo sapiens
tggtattgctttagaattcctcccaaaacatgcctgtgggatgaattaacaggaccttggttatatcacgacctagtcaatggcatgatcccagctgggaytgcctgtgctgttacagcaaatctctacctgtgacccagcatgaaagggaatttggaggccagggaaagtggctttaaattatgaggcttctttttcaac

SEQ ID NO: 28154 - DNA, 201 bp, Homo sapiens
ccctaaaaatcccctgtgctccatggaagatagtatgactattaataacaaatggctgaattgaatagatattaaatttaaatgataaagatgtcttctgsctttgattccttgtggttgataaatggctcaaagtgcaatggaaaatgagggtgaggatgatacagaatgtggtgttatagaagccaagggaagagaacc

SEQ ID NO: 28155 - DNA, 201 bp, Homo sapiens
aataatgaggacatagccagaaggaagtttcaagttgcagatctgagagtgaaacttttttgaggaatgtgccatgagaaatccactataagatggtattrctttagaattcctcccaaaacatgcctgtgggatgaattaacaggaccttggttatatcacgacctagtcaatggcatgatcccagctgggactgcctgt

SEQ ID NO: 28156 - DNA, 201 bp, Homo sapiens
atttgagtaaagtgagtgagaggtgaggaagtagaggcagagagtatagtgaaaggagagaaagcagggtggatttgagattttgtagaatcattggctayggggaaattgaacgcgcacaagagagggagtatttggtagagcaaaaccttagagaagatagaaggggttggaaccaagaagttaggtgtgtatagggcg

SEQ ID NO: 28157 - DNA, 201 bp, Homo sapiens
gtatcaccagcagaggctgaagaacagctaatattgcagaacagcagatgttgctgtctgatccttcctctggaagctttgtcttagaggggcatccccctgtatgaggtgtctgtcggcccctactgggaggtgcctcccagttaggctactcaggggtcagggacccacttgaggaggcagtctttcctttctcagatc

SEQ ID NO: 28158 - DNA, 201 bp, Homo sapiens
gacaacctacagaatgggagaaaatttttgcaatctatgcatcttacaaaggtctaatatccagactctacaaggaacttaaatttacaaaaaaaaaaaaagccattaaaaagtgacccaaggacatgaacagacacttctcgaaagaagatgtttatgcggccaacaaacattttaaaaagttcaacatcgctgatcatt

SEQ ID NO: 28159 - DNA, 201 bp, Homo sapiens
gctataataatcctctaaagagatagcggattatagtttttctttacatttttagttgaatccctaatgagatagcttccattttccattctgacacacamatactcttttgattgtcaaaatattaatgttatttatctctccttggtttacttccaaggaaactggaatgatggtattctcaagactagagatgcaaat

SEQ ID NO: 28160 - DNA, 201 bp, Homo sapiens
aagaaaaccattttttttcctcctaggcctctgggcctgtgatgggaggggctactgtggagacttctgacatgtccgggagacattttccccattgtctrggtgattaacatttggcttctcattacttacgcaagtttctgcagccatcttgaatttctcctcagaaaatgggtttttccttttttatcacatcatcag

SEQ ID NO: 28161 - DNA, 201 bp, Homo sapiens
aacctctcccctcccctttgctcactgtcctggagtggcactggcctctgaagtaattcttttttggtcttgggactagttcaggggaaactgggtgggggaaatccctcctgccctaagtgcagttggactgtacagaatactccaaaggccaatggtagttcagcacagaaagagggaaggcctccaagtcagaaagag

SEQ ID NO: 28162 - DNA, 201 bp, Homo sapiens
taacctctcccctcccctttgctcactgtcctggagtggcactggcctctgaagtaattcttttttggtcttgggactagttcaggggaaactgggtgggggaaatccctcctgccctaagtgcagttggactgtacagaatactccaaaggccaatggtagttcagcacagaaagagggaaggcctccaagtcagaaaga

SEQ ID NO: 28163 - DNA, 201 bp, Homo sapiens
tgtaatgggaaggggaagatgcacattctgttccatctgtctatttggtgctcttggctgcctcacttccacttaagcagtcagttttgtcaatttacacratggggatttgggaccttttcttgtggagttgagtctggtgaaaagattctcaggaccagcccaaacttgggattattcccttctcaggaccatgtaaat

SEQ ID NO: 28164 - DNA, 201 bp, Homo sapiens
gtaacctctcccctcccctttgctcactgtcctggagtggcactggcctctgaagtaattcttttttggtcttgggactagttcaggggaaactgggtgggggaaatccctcctgccctaagtgcagttggactgtacagaatactccaaaggccaatggtagttcagcacagaaagagggaaggcctccaagtcagaaag

SEQ ID NO: 28165 - DNA, 201 bp, Homo sapiens
ttcttaaaatcactacctcatttcctcatgaaccagtaagtactccagtctgataattttgggtggtcaaatttcacttgcaggaaatgaagttgcacttycctctctaggagcaatgctttccaacagcatagggcactgtaatgggaaggggaagatgcacattctgttccatctgtctatttggtgctcttggctgcc

SEQ ID NO: 28166 - DNA, 201 bp, Homo sapiens
cctgtaacctctcccctcccctttgctcactgtcctggagtggcactggcctctgaagtaattcttttttggtcttgggactagttcaggggaaactgggtgggggaaatccctcctgccctaagtgcagttggactgtacagaatactccaaaggccaatggtagttcagcacagaaagagggaaggcctccaagtcaga

SEQ ID NO: 28167 - DNA, 201 bp, Homo sapiens
atccagttcagtgccctgtaacctctcccctcccctttgctcactgtcctggagtggcactggcctctgaagtaattcttttttggtcttgggactagttmaggggaaactgggtgggggaaatccctcctgccctaagtgcagttggactgtacagaatactccaaaggccaatggtagttcagcacagaaagagggaag

SEQ ID NO: 28168 - DNA, 201 bp, Homo sapiens
acctcctctgaatctagaaagtaaaataatacttatatttataagactgaattgcagaatttattattttattctttagtttctggtgaaaatgaaccaakagaagtaaaataatttggtagacaaaatacaaaaagccattgttgattctacatgtaattcattggcacatacttgcttggattagtattggttgaaatt

SEQ ID NO: 28169 - DNA, 201 bp, Homo sapiens
ttaaaatagtaggagagtaaatagtgtttttggtaaaatttataaaaatacaatgatgtagcttttgctaaagaatttttttttctaagagttattttaartaaagataaaaatattatatagataaaactaaatggataaagagagaaattaaaagatgagtgaggagaaaccttgactccagggtggccatgtggttac

SEQ ID NO: 28170 - DNA, 201 bp, Homo sapiens
ccttggttgcaagtgatagaaatttaactcaagccagcttgaggaaaatggagaatttgttgattcttataaccaaaacatgaaaagtagaagtttcatcwgggcctctcagcagaatagaaacccaggactccaatgctcttaagagtctctatctttccccctccccaactttcctgttctcttctcttattcatcttt

SEQ ID NO: 28171 - DNA, 201 bp, Homo sapiens
taagactatatacataagtcttaagactatatacatttttaaagattttatgcttactacttaattgccattgaaatatttatactttcatcatcagtgartgaaagatctctaccaatgttacctatcataataaagaacactttgacaatttgataattggaaaacggcaactaatttgtatttcaaaatttattttta

SEQ ID NO: 28172 - DNA, 201 bp, Homo sapiens
tttcaccatgttggccaggatggtctcgatcttctgacctcatgatccacccgcctcggcctcccaaagtgctgggattacaggcgtgagccactgtgccyggcctgaaacattactttttaatttatatttatttgcatgtcaatttaaagtaatgtgccattcagatcatttttgtgtgtgcctttttttaaagaacat

SEQ ID NO: 28173 - DNA, 201 bp, Homo sapiens
actacaggtgcgtgccaccacgcccggctaattttttttgtattttagtagagacggggtttcaccatgttggccaggatggtctcgatcttctgacctcrtgatccacccgcctcggcctcccaaagtgctgggattacaggcgtgagccactgtgcccggcctgaaacattactttttaatttatatttatttgcatgt

SEQ ID NO: 28174 - DNA, 201 bp, Homo sapiens
caggttacaaaacacattttgccatgtcacgtatttgtctatatttcttatctattggcttccaagctgctaacttcttatttactcagtgcctccccatrgtgccttgtacacatttaggcaccatgttattacagtgtgatggttaagagccagggctttagagactgacaaactgggttggaatacaggctgtgttgt

SEQ ID NO: 28175 - DNA, 201 bp, Homo sapiens
attcaaataaatgttcaattagaggattcctcgatcagatgatcttattgaaatcaggtgaagggaggaactatggtaataagccagttactgcaaaaatrgaatgagattaattgagattttacagacactatgacattggagttgtaagactaaagccctatagggcttttaatggctcaaacctcatagaattttgtc

SEQ ID NO: 28176 - DNA, 201 bp, Homo sapiens
tttgagttttcagagagaaatcacagtatgacagacaaaaggagcagactacactttacagtttcttgcaaattcaaaggttacttaagttggagacaatsagtcttatggtggaaggcattttgtcaacagacggcaagtatacaatttaaaaataattttttctacgttttcttatatttttttcctagatgtttctgt

SEQ ID NO: 28177 - DNA, 201 bp, Homo sapiens
tataattgtcggcacagtgtccgcagaggactgagaggtactgggatcatgagtgtagtggagacattagtgttttagggaggagggacgtggactttggraatatcagtttattcagaatctgttttatgtcatgaattgtgttagaacattcttatgcaatgtctcccataatcttcaaacaaccctaatgttaccttt

SEQ ID NO: 28178 - DNA, 201 bp, Homo sapiens
tcatactgagaagtaggagccaaagaaagatatggaagtgctcaaagatgacttattgggagatatgagtagtgtcagcaatcaaatgaagaaaaaattcraagaaagaaaggttgttatgagtgttacatgataaagataaataacataggatgaaggctaaaaaacagaaatttgaatttaaaagtaaaagtttcccta

SEQ ID NO: 28179 - DNA, 201 bp, Homo sapiens
tatctaagttctagttgtcttttagtgggaggactcttcaggataaagtcatacttcaggaaatagtgatgtgtatgcacattttaaagacttctgagctrtatagacaaattctactctataaaggtcgtaataatccatactcctctagaaatgatttagtggctctggtcttcttaaaattgccaacacgggaaatta

SEQ ID NO: 28180 - DNA, 201 bp, Homo sapiens
gatttcttttcctttctgtgagcttagccataaaaatatgtttgtcttaacttatctaagttctagttgtcttttagtgggaggactcttcaggataaagycatacttcaggaaatagtgatgtgtatgcacattttaaagacttctgagctatatagacaaattctactctataaaggtcgtaataatccatactcctct

SEQ ID NO: 28181 - DNA, 201 bp, Homo sapiens
ttgatgtgttgctggattcggtttgccagtattttattgaggatttttgcatcgatgttcatcagggatattggtctaaaattctctttttttgttgtgtytctgccaggctttggtatcaggatgatgctggcctcataaaatgactgagggaggattccctctttttctattgattggaatagtttcagaaggaatggt

SEQ ID NO: 28182 - DNA, 201 bp, Homo sapiens
tcaacaaacatgggtgacttaaaaatcttcagataactctctctcctgtcaggtaccctattcataaatataaattttacaattataactcatttacttgmattaatctgtgtgtcctcctcttctaaattgtttatttattgaaattttgttccagaatgaattgtgagcagtttattaagcaaaccaagattgtgcata

SEQ ID NO: 28183 - DNA, 201 bp, Homo sapiens
atctgggttactaagagttaaaatagtaggagagtaaatagtgtttttggtaaaatttataaaaatacaatgatgtagcttttgctaaagaatttttttttctaagagttattttaagtaaagataaaaatattatatagataaaactaaatggataaagagagaaattaaaagatgagtgaggagaaaccttgactccag

SEQ ID NO: 28184 - DNA, 201 bp, Homo sapiens
tgggcgacatagcgagactccgtctcaaaaacaaacaacaacaacacaacagcattatgtgctacagaaaaaacttttgtgaaaggaagagtcaattgccrcaggaaacttcatcactgtcttattttaagaaatttccacagcccccacaaccttcagcagccgctaccctgatcagccagcagccatcagcgtggaggc

SEQ ID NO: 28185 - DNA, 201 bp, Homo sapiens
tcaagagccttccaaagttagcctaaaaaacaagtttaggctgttatgggaaggaggtgttggacatgcctctttataccctcctctcttttggaattcargaataaccaaccatcattaacatcaacacagaccttaagtctgataagaaacatttatatccattctctatgaagcctgcgtatctagaggctttatctg

SEQ ID NO: 28186 - DNA, 201 bp, Homo sapiens
gccaaaaataaaattcaaccctcccaccccctgctcccagcactgaatggacctcctcttggtcaagagccttccaaagttagcctaaaaaacaagtttargctgttatgggaaggaggtgttggacatgcctctttataccctcctctcttttggaattcaggaataaccaaccatcattaacatcaacacagaccttaa

SEQ ID NO: 28187 - DNA, 201 bp, Homo sapiens
tgtattgtgtggtgtgaatgtgtcccatccaaattcccatgttgaaatcctaatttctaaggtgatggcagtaggaagtggggccttcgagaggtgattargtcacaaaggtaaagcctttatgaatgggttcagtggctttataatagaggactaagagagattcactgcattttctgccatgtgaagacacagtgagaa

SEQ ID NO: 28188 - DNA, 201 bp, Homo sapiens
tttaggtctcacaaaaataattgataaattttggcttagatgtattgtgtggtgtgaatgtgtcccatccaaattcccatgttgaaatcctaatttctaargtgatggcagtaggaagtggggccttcgagaggtgattaggtcacaaaggtaaagcctttatgaatgggttcagtggctttataatagaggactaagaga

SEQ ID NO: 28189 - DNA, 201 bp, Homo sapiens
tgctaccataggcaatgtccttgaacatgatatgcactcattaaaattttgttaacactagaaagagagatgggggaattgaaataaattataatgttaartaacaaatccatatatgtaatatttataaacctaaatataatgttgatattataacttgacatattataaattacatattttgttatacctatttatatc

SEQ ID NO: 28190 - DNA, 201 bp, Homo sapiens
atatctttactgtgaattgttccctttagtatatttaaactacttttctatgtcacatttaatgctttttcaaaagctctgaatgttaccttttcaaatawgatcatgactcatttttttcttacctctctccttcctttttctctctccctttttttcttttgtatcccactgtgcccgttcttctattgttatctttag

SEQ ID NO: 28191 - DNA, 201 bp, Homo sapiens
agtttccacgagcactggaaaaggcatattttctgtttaagatacaaaagttctcactactctatagatctccatacaatctactttattaaaaatgtaayttaagtcttacaaatccttctttatactttttaccttactagaacttggactgcatgagaattaagctactattatttaaatgtttctgcctgtttgtct

SEQ ID NO: 28192 - DNA, 201 bp, Homo sapiens
aagagcagtattagggtgggagtgtcccgattttccaggtgctgtctgtcatggcttccctttgctaggaaagggaattcccccaccccttgtgcttcctkggtgaggcaatgccctgcccagctctgtgggctgcacccacttgtctggcaagccccagtgagatgaacctggtacctcagttggaaatgcagaaatcac

SEQ ID NO: 28193 - DNA, 201 bp, Homo sapiens
tggtcagtatatattaaaaaattatttttcagagcaatgcttatgttttgtgtagctaattgctataagtccataactaaaaccaagattatagtagctcwatgcatagaagttaaagataagtcagttttgtaacctggcctttggctttctgtttgttgactttttactgaaaaaaatttaaggggtaatgaatacttg

SEQ ID NO: 28194 - DNA, 201 bp, Homo sapiens
tttgtttataagatcatctgttttttaacttaatctgtaagaatcctaagtgtttatgttggaaatattccctgagaaaagatttggttgcattgccactrtacagaattccctaacatctaggatcactttagctccatgggggattaagggtaatataggaaactcacatcagctccctaaccttgagacagactcaaa

SEQ ID NO: 28195 - DNA, 201 bp, Homo sapiens
ctcagttacagtagtttgatttttgtttataagatcatctgttttttaacttaatctgtaagaatcctaagtgtttatgttggaaatattccctgagaaargatttggttgcattgccactatacagaattccctaacatctaggatcactttagctccatgggggattaagggtaatataggaaactcacatcagctccc

SEQ ID NO: 28196 - DNA, 201 bp, Homo sapiens
ttgatgccttttgtgataatcctgtataatttcttaaaatctattttcaagttcacaaatcatccctttcatctgtatctgatatgctgttactcattcartactattttaatatcaaagattaagttagtttagttctaaatacttcttggccattttaagtagccttttttggttaattagaaataatcagttttaaaa

SEQ ID NO: 28197 - DNA, 201 bp, Homo sapiens
gaggcaagaagtctaagattaggtgtcagcagggttggttctatctgagggctgttccatgcctctttctagcttctggtagtttgctggcaatcttgttkgtttggagaagcagcatcacctgatttttgtcttcattcccatgaggcattatccctgtgtgtgtgtctctgtgaccaaacttcccctttttatacgtcc

SEQ ID NO: 28198 - DNA, 201 bp, Homo sapiens
cttaaagaacactattttctatgtaaaaagctgcaaattagcaagcttaatgattttttccagcatactttcatctctttgtatcacagattcactttgcyagagaacaatctagagttgtcttttaaaaaattattctttctaccatcctttaaaatgtagcacagacatttttaagtttattaagtgaaaaatgcctat

SEQ ID NO: 28199 - DNA, 201 bp, Homo sapiens
acatgtttattccttcaggaatctctttgtggctttggtaggtatttagacttatgtattagaattcagtatttaatggtttgcatctttatattttaaaagtatctccaacaaaccgctttttatttttcttttaattttttcaatattgttcatttattgtttgtagacttcttttcatgtttcaaagttaatttttaa

SEQ ID NO: 28200 - DNA, 201 bp, Homo sapiens
ggaagagggtttataatttagttgattttccctgtttttaaactagtgtttttcttcttccctttatggtgattggtttccacagacctagagtctatcamgtttaatttatccagaaattaaactgttgttagggttagagaaggttgttacctggatgcttggaaggaagtatgcggggatggtctttcttaaagtcca

SEQ ID NO: 28201 - DNA, 201 bp, Homo sapiens
gattttttttttttttttaagacggagtctcgctctgtcgcccaggctggagtgcagtggcacgatctcggctcactgcaagctctgcctcctgggttcaygccattctcctgcctcagcctcccgagtagctgggaccacaggtgcccaccaccatgcctggctaattagaagtccattgacatttattagtgagacact

SEQ ID NO: 28202 - DNA, 201 bp, Homo sapiens
acaaaatgtttagccattttgttaatggacttcgggttgtttctagtttgaggctattacaaataaagctgcaacaaatattcatgtacaagtctttgtgytgacacatgcttcttcttttctcttgtttaagtatgtaaggagaggtaagaagtccattgattttttttttttttttaagacggagtctcgctctgtcgc

SEQ ID NO: 28203 - DNA, 201 bp, Homo sapiens
aggtccactccagaccctgtttgcctgggtatcaccagcagaggctgaagaacagctaatattgcagaacagcagatgttgctgtctgatccttcctctgraagctttgtcttagaggggcatccccctgtatgaggtgtctgtcggcccctactgggaggtgcctcccagttaggctactcaggggtcagggacccactt

SEQ ID NO: 28204 - DNA, 201 bp, Homo sapiens
cggaagctgccaaggcttggagtttgcatcctctgaagccaagcttgagctgtaccttggccccttttagccatgattggagtgcctgggatgtagggcaycaagttccaagggtgtacacagcaggagggccctggacctggcccaggaaatcatttttcctccctaggcctcagggcctgggatgggaggggctgctgt

SEQ ID NO: 28205 - DNA, 201 bp, Homo sapiens
tttgttagttttccttctaacagtcaggaccctcaactgcaggtctgttggagtttgctggaggtccactccagaccctgtttgcctgggtatcaccagcrgaggctgaagaacagctaatattgcagaacagcagatgttgctgtctgatccttcctctggaagctttgtcttagaggggcatccccctgtatgaggtgt

SEQ ID NO: 28206 - DNA, 201 bp, Homo sapiens
tttttcctgctctcttcagtgcctctttctgtgatatgaagttaaaaccaggtattgtgagtgctcacctgatttttcattcttacaaaggttttttttgktttttttttgtatgtagatagttgttaaatttggtgttccttcaggagggatgattggtggagacttctatttagctccttgctctacccctcccttata

SEQ ID NO: 28207 - DNA, 201 bp, Homo sapiens
atttttcctgctctcttcagtgcctctttctgtgatatgaagttaaaaccaggtattgtgagtgctcacctgatttttcattcttacaaaggttttttttkgtttttttttgtatgtagatagttgttaaatttggtgttccttcaggagggatgattggtggagacttctatttagctccttgctctacccctcccttat

SEQ ID NO: 28208 - DNA, 201 bp, Homo sapiens
ttctatttgatcaaatcggctactgaagcttgtacatgcgtcacgtagtccttgtgccatgattttcagctccatcaggtcatttaaggacttctctacaytgtctattctctacactgccattcgtctactcttttttcaaggtttttagcttctttgtgataggttcaaacatcctcctttagctcggagaagtttgtt

SEQ ID NO: 28209 - DNA, 201 bp, Homo sapiens
tcatttctttttactcttttttctctaaacttctcttctccctgcatttcattcatttgatcttcaatcactgataccctttcttctatttgatcaaatcrgctactgaagcttgtacatgcgtcacgtagtccttgtgccatgattttcagctccatcaggtcatttaaggacttctctacattgtctattctctacact

SEQ ID NO: 28210 - DNA, 201 bp, Homo sapiens
gtgggtaacctgacctttctctctggctgcccttaacattttttccttcatttcaactttggtgaatctgacaattatgtgtcttggagtttctcttctcraggagtatctttgtggcattctctgtattttctgaatttgaatgttggccttccccgctaggttggggaagttctccggcatgatatcctgaagagtgtt

SEQ ID NO: 28211 - DNA, 201 bp, Homo sapiens
gttacaatgtcaatttgcatagaatttttcttaacaattgtaaattctcttaaatcataattgagcataatttaatacatctttggtcattaggagccaaytcagaatcttgcaaattctcagaatcattctgatgatattaaaaactcttcttaaaggattgttatggactgatagacctcttgcagtctgcaagatcag

SEQ ID NO: 28212 - DNA, 201 bp, Homo sapiens
tttgactgggtatgaaattctgggttgaaaattcttttctttaagaatgttgaatattggcccccactctctactggcttgtagagtttctgccgagagasccgctcactgttagtctaatgggcttccctttgtgggtaacctgacctttctctctggctgcccttaacattttttccttcatttcaactttggtgaatc

SEQ ID NO: 28213 - DNA, 201 bp, Homo sapiens
agttcaagagatttgtgttctatcactgatctttaatagcggggaaaacaggcaagtacgctatagttctgaattactctattccctttctattgacttakgaacttgtctttctgctctttttttttccccctctactggagatagtgctttaaaattctacacaatagcagtgcttctttcagcttctggtagccctag

SEQ ID NO: 28214 - DNA, 201 bp, Homo sapiens
aataagtgtgatgtgttgctgagaagaatgtatattctgttgttttggggtggagggttctgtagatgtctattaggtccgcttggtgcagagctgagttwaattcctggatatccttgttaactttctgtcttgttgatctgtctaatgttcacagtggggtgttaatgtctcccattattattgtgtgggagtctaagt

SEQ ID NO: 28215 - DNA, 201 bp, Homo sapiens
aaagttcaagagatttgtgttctatcactgatctttaatagcggggaaaacaggcaagtacgctatagttctgaattactctattccctttctattgactkaggaacttgtctttctgctctttttttttccccctctactggagatagtgctttaaaattctacacaatagcagtgcttctttcagcttctggtagccct

SEQ ID NO: 28216 - DNA, 201 bp, Homo sapiens
atttgctgaggagtgctttacttccaactatgtggtccattttggaataagtgtgatgtgttgctgagaagaatgtatattctgttgttttggggtggagrgttctgtagatgtctattaggtccgcttggtgcagagctgagttaaattcctggatatccttgttaactttctgtcttgttgatctgtctaatgttcaca

SEQ ID NO: 28217 - DNA, 201 bp, Homo sapiens
tgtattttttgtagtgacggagtttcaccatgttggtcaggctggtctcaaacttcagacctcaggtgatctgtctgcctcggcctcccgaagtggaaacrgccttcttttgaaagaagatgccatctcggactttcagagatagggaggagaagtcttttcaaaatattactgctaattgacaatgcatctagttgccca

SEQ ID NO: 28218 - DNA, 201 bp, Homo sapiens
ttgtgcccattttcaaagggaatgcttccagtttttgcccattcagtatgatattgcctgtgggtttgtcataaatagatcatattattttgagatacatmccatcaatacctagtttattgagagttttcagcatgaagagctgttaaattttgtcaaaggccttttcttcatctattgagataatcatgtggtttttgt

SEQ ID NO: 28219 - DNA, 201 bp, Homo sapiens
ttctcattgcaattatttcctgacagagcaaggcagtttaaaacatgaactcactcttacgtgaagaaggaaagttcttcctttcttctcctttcaaaaarcagatatggatttcaaacaatggcctctggagacactacctgtaacacggatgggcttggtgatgagattttagaaaactagagaggtcaatgtggctga

SEQ ID NO: 28220 - DNA, 201 bp, Homo sapiens
tcacaggcatcagccaacccaaatttgttagtgccttgctcttggactttccagtctttggaactatgagaattacatttctgttgtttataagccactcrgcttagggtattttgttgtagcagcccagatggatgaaaacagtatatttaatcttatttgattttattttactttcagctctgatttcttcaagatgtt

SEQ ID NO: 28221 - DNA, 201 bp, Homo sapiens
cctgaaaagcaagtttaggccatgatgggaaggaggggtgggccagacatgcctcattgtaccctcttcccttttggaattcaggaaaaaaccaaccagarctaacatcaacacagactttaagtctgacaagaaacatttacatctgttgtttctgaagcctgctacctagaggctttatccgcatgatagaaccttggt

SEQ ID NO: 28222 - DNA, 201 bp, Homo sapiens
gtaccttggccatagggggtcccactgagggacagggtggatctcaagcaggcagccatgccacccccacaatggtatgagacaaaataaaaatttggtaracattgctgttgcctctggcaaatcttaggtggaagagggagaatgtaaagcaaaaataaaattctgaggaccccaaccatctgaatggacccttcctct

SEQ ID NO: 28223 - DNA, 201 bp, Homo sapiens
aggaggagcaaaggcatgtcttacatggtggcaagagagcatgtgccagggaactgccctttataaaaccatcagatcttgtgagacttattcactatcayagaacagcatgggaaaacccacccctatgatccaattacttcccagtgggtccctctcacagcatgtggggattatgggagctactattcaagatgagat

SEQ ID NO: 28224 - DNA, 201 bp, Homo sapiens
cttcacactgggagctgcagactggagctgttcctattcggccatcttggtgccaccctctgatgtttatatttcttattggagctttctttaaatatctratgatccttattggcccatttatttatttttatattggtgtcgttttacaccttcatttagggattatcaaaattcaataaactgcacatatttaaaatg

SEQ ID NO: 28225 - DNA, 201 bp, Homo sapiens
accaatttactgcattagtccatttcatactgctgtgaaaaaatacctgagactgggtaatttataaagaaaaagaggtttaatgaactcacagttccacrtggctggggaagcctcacagtcatgatggaagatgcaggaggagcaaaggcatgtcttacatggtggcaagagagcatgtgccagggaactgccctttat

SEQ ID NO: 28226 - DNA, 201 bp, Homo sapiens
gagcctccaagccagccgcgggatataatctcctggtgtgccatttgctaaggctgttggaaaagagcagtattagggtgggagtgtcccgattttccagstgctgtctgtcatggcttccctttgctaggaaagggaattcccccaccccttgtgcttccttggtgaggcaatgccctgcccagctctgtgggctgcacc

SEQ ID NO: 28227 - DNA, 201 bp, Homo sapiens
ttgatcaaatcggctactgaagcttgtacatgcgtcacgtagtccttgtgccatgattttcagctccatcaggtcatttaaggacttctctacattgtctwttctctacactgccattcgtctactcttttttcaaggtttttagcttctttgtgataggttcaaacatcctcctttagctcggagaagtttgttattacc

SEQ ID NO: 28228 - DNA, 201 bp, Homo sapiens
tatttttattttattattttacttaaggttctagggtacatgtgcacaatgtgcaggtttgttacataggaatacgtgcgccatgttgttgtgctgcaccygtcaactcgtcatttacattaggtatatctcctaatgctatccctcccccgcccaccccccggcaggcccgtgtgtgtgatgttccccaccctgtgtccc

SEQ ID NO: 28229 - DNA, 201 bp, Homo sapiens
atatttcttttttatttttattttattattttacttaaggttctagggtacatgtgcacaatgtgcaggtttgttacataggaatacgtgcgccatgttgktgtgctgcacctgtcaactcgtcatttacattaggtatatctcctaatgctatccctcccccgcccaccccccggcaggcccgtgtgtgtgatgttcccc

SEQ ID NO: 28230 - DNA, 201 bp, Homo sapiens
ataatagaggactaagagagattcactgcattttctgccatgtgaagacacagtgagaaagatggtagtttatgaatcagtatatacagcctctaagccamaaataaaattcaaccctcccaccccctgctcccagcactgaatggacctcctcttggtcaagagccttccaaagttagcctaaaaaacaagtttaggctg

SEQ ID NO: 28231 - DNA, 201 bp, Homo sapiens
aagttaggtttctctgtttctctgaacttagaaatatactcattaagcaaaattcattaggaagcatgaaagaactatttttaacaaatttgctttaaacyttgttgttgaaataagttgaaagggcattattgctagaagctagtaggaccagctttataaatacagagattatttagcactagacatgagtcagaatag

SEQ ID NO: 28232 - DNA, 201 bp, Homo sapiens
tttgacaaaaaattatgatccaaattagtggaggtggcgtgtgaaagagaggttggaggtagacaaggctagaggagagtaaacaggatttcaattgtctragctaaactgttcatacatatgagaggtttcatcatacgtgtggtagttaaaagcatggatgagcatgaacttcctaaagacagcatgcatagcaaaagg

SEQ ID NO: 28233 - DNA, 201 bp, Homo sapiens
ctgggtccaagtatcttccacagaaacatacttctctcgctagtttatactctctgtaggcacgtacttggctttcttgctcactgctgaatgctggtgcrtagcaccatgactggcacagagtagatgttcaataagtatttgttgtatctgtgagagaatgtgttaaaataacaaaactcaaacataatagtgcagcga

SEQ ID NO: 28234 - DNA, 201 bp, Homo sapiens
tatacaaaagcactgacctataaaatggcagggttaattaacacagctacatgtagaacactgtgtctaaggacaagcaacaggagatgatactgaaatayagatgaggctttgtttaccatcttaaaaatcagagatttttgtttatgggaattactgaaaagttttaagaagtaaaatttgctaactatgtattttatt

SEQ ID NO: 28235 - DNA, 201 bp, Homo sapiens
tacatacatagagctccaaactgtttcctttatatgatttaaatgattattggctcgtcccaaagtagaaatctgaatggatactatcctgaccttgaacyacatgcagccagtttgagaagttctgggaatcaacgctggatgcgtcctagctctaactaatatttcgtgactccagtcaggaacattatggctgcctca

SEQ ID NO: 28236 - DNA, 201 bp, Homo sapiens
gaaccattttatacatacatagagctccaaactgtttcctttatatgatttaaatgattattggctcgtcccaaagtagaaatctgaatggatactatccygaccttgaactacatgcagccagtttgagaagttctgggaatcaacgctggatgcgtcctagctctaactaatatttcgtgactccagtcaggaacatta

SEQ ID NO: 28237 - DNA, 201 bp, Homo sapiens
gaagaaaggcattaaaactggaggaatattatacaaaagcactgacctataaaatggcagggttaattaacacagctacatgtagaacactgtgtctaagracaagcaacaggagatgatactgaaatacagatgaggctttgtttaccatcttaaaaatcagagatttttgtttatgggaattactgaaaagttttaaga

SEQ ID NO: 28238 - DNA, 201 bp, Homo sapiens
ctaattttttatcgcaagtactggtactatcaagctagaaacctaggaatcatctttgatacttcctcctcctctttcatcccatatattcagtaatcacyaaagatgttagttacaaatattaattaattctcaaaaaaggttttattttttatgaatagatgattctatctaaaatgtttaattttagatcgatatgct

SEQ ID NO: 28239 - DNA, 201 bp, Homo sapiens
gtaaattttttttttccctagggaaaggatgatctcctaagtcttcttcatgtatgtactactagctttgctgtaaagtaaggcctttatttcattaattygagagtagagaataatgtaaaattaaacacaagcattttttcccagttgatttctaacaatcacaaactatattaatttgtttaatactgcaagagcaca

SEQ ID NO: 28240 - DNA, 201 bp, Homo sapiens
caagaggctgttcttgtctcacagagctaggagccatttcaagatcctggaaataagtgattttcataagatttttgctagtgtaaattttttttttcccyagggaaaggatgatctcctaagtcttcttcatgtatgtactactagctttgctgtaaagtaaggcctttatttcattaatttgagagtagagaataatgt

SEQ ID NO: 28241 - DNA, 201 bp, Homo sapiens
ttttagtatttttatgataacgaaaagtaacatttacccaccctttcttatggagtttatatgaataaactccttgggtttatataaatatggaataggarattttggggaaagaacctttattattaacagtgattttatcaagaaaaggtagaagcaatattgcaattagttatttaagaaatagggctaggatttact

SEQ ID NO: 28242 - DNA, 201 bp, Homo sapiens
ttgtttcagctggataccacccaagaggctgttcttgtctcacagagctaggagccatttcaagatcctggaaataagtgattttcataagatttttgctrgtgtaaattttttttttccctagggaaaggatgatctcctaagtcttcttcatgtatgtactactagctttgctgtaaagtaaggcctttatttcattaa

SEQ ID NO: 28243 - DNA, 201 bp, Homo sapiens
ttgtttcatagctttcattcagccgtttcaacttggcttctatgatgatgtaataaaaaccaatttaaaatcaattataattttcaacaagatactgtaawcctattcctagaactgataatgatttgattttttaggattagttatttatctaagatgaatgagcagagttactgtctttgcccaaaggaaaaacaaaag

SEQ ID NO: 28244 - DNA, 201 bp, Homo sapiens
caggaaatcatttttcctccctaggcctcagggcctgggatgggaggggctgctgtgaaggtctctgacatgtcctggagacattttctccatcatcttgrtgattagcatttggcttcttgttacttacgcaaatttctgcagctggcttgaatttgtccccagaaaatgggtttttcttttctactgcaatgtcaggct

SEQ ID NO: 28245 - DNA, 201 bp, Homo sapiens
gagactctagggaagccttggaatgcaaataacttgaaaagagagcctggccaaaaaaagatttttgagccttggtagggttagtgaagcaggtttttagyacaaacacaactcaaagtatgtgtgttattaaaagtagctattttcatggaagtcttttggtactatttgttttggctagagaagtgaaaagctttcttt

SEQ ID NO: 28246 - DNA, 201 bp, Homo sapiens
gaggaaacatcgggagtaaggagggattgtggctaaaccaatgtgacaggatttttactgactgaaggccaggatgatcagatatcgcctggggggttccrggggatgtagaatttgatcaactatcaagatgatcagatatcaagagtgagggattctctccaaacagacttagcaagattctcactacaattaggcagt

SEQ ID NO: 28247 - DNA, 201 bp, Homo sapiens
tgtttgtacttacctagtctacgcagataaaaggaaaataagaattgggataataatctgaagaaatgacatagttgatattgctgccaaactaaaatcasagctggacagtaaagtggtaaaagatttcattaagggactactgcgataggagaaaagagacctcagtgtagtactgggctcaattccgaatatagcttg

SEQ ID NO: 28248 - DNA, 201 bp, Homo sapiens
cagccctgcaaggagtcttatgtaaattttataactcaatcttcatgacaatcttgcaaagtagtcataaatatttcaatatcagagatgaggaataggcwcaaagagtttaaacagctcacaattaatctgctattaatgctaggctaagtggattacaaggtctgctattttgactatgtctagctgcctccctacata

SEQ ID NO: 28249 - DNA, 201 bp, Homo sapiens
cattgtatgttatattaaagcttgtgtctttccaacttggtgctagccctttagctgcctcttcatccttttcttatatgttggggtctttgaaagtgctyagtaaataccacctttctttctccatcttaattgtaaatcattttaaacccgagacagacaagtattgcacgtggagtccaaagtgtcaattttaccact

SEQ ID NO: 28250 - DNA, 201 bp, Homo sapiens
taccttcttttcctttttgtggacattagacactgtttaaggtccatatgacaatgttcgttgagtaaaataaagtatgcaacagtaatttagaaactcakatctatgtaagtttatttaagtttggccatatggtcagatgcctcctgacactacaaatatctttctgttatttaaaattttctataaaactctagcagt

SEQ ID NO: 28251 - DNA, 201 bp, Homo sapiens
acacctgtggagaggtagcttagggtagttacgattctctagggccagacttcctgagtctgaatcctggctctgccacttataaggtgtgtgactttgtrcaagttacttgacctctctgtgctttaatttttacatctttaaagttgggaataatacttatgtcataagattttaggagaattaaatgggttgatatct

SEQ ID NO: 28252 - DNA, 201 bp, Homo sapiens
cacatgctcatcgattaaacctcatcccatgcctcatttatacatacacagagctccaaactgttccctttacatgatttaaatcatcattttatttactsgtcccaaagtagaaatctgaatggacactatcccgaccttgaaccattttatacatacatagagctccaaactgtttcctttatatgatttaaatgatta

SEQ ID NO: 28253 - DNA, 201 bp, Homo sapiens
aaaattgtctaatgatccaaaccaccatgctgacaaacggtattcagctgagtggcaaagggaaggataggtgagtcatatgcacatgctcatcgattaawcctcatcccatgcctcatttatacatacacagagctccaaactgttccctttacatgatttaaatcatcattttatttactcgtcccaaagtagaaatct

SEQ ID NO: 28254 - DNA, 201 bp, Homo sapiens
tcagcattcacgttttccagttgtctacaaaaaaaaaatttaactggtttgttggattcaggatctaaacaagattgcatttggttgctctgtgtgactckttaatttacaattttctgtccgttatttttcacattactgatatttaaaaaatgggggcatttgttgtgtagaatttcccacatcctggattttgctgat

SEQ ID NO: 28255 - DNA, 201 bp, Homo sapiens
tccaaaatgtgtaactctagccttttgcctgagcttcagactcatgtcctactgcccacaggacatacccacctggatgtgacgcacaggtcatgtcagcrtaagtatgagcgtatgttcatgttgaaattgagtgtacttttccccctagagctgctctctgtcctaattttttatcgcaagtactggtactatcaagct

SEQ ID NO: 28256 - DNA, 201 bp, Homo sapiens
ctcaggccccaccttggatccactctatcaaaatctgcatttcaaaaatgatctttccttagcaattgcatacacactacagttggagaaaaactgtcccrcaactttaaaacatcagtctggatgtggaataatatgtgatatctcacttcatcttcacacctctacggtggttatcatctgctctaatttatagatagt

SEQ ID NO: 28257 - DNA, 201 bp, Homo sapiens
attttcataaccttttttgtttctctaagatgttaagggtgccaaacataacattcaaaatggatcctctcttaccctaatgttataaggaaaatcttctrtcgaaacactgcacgttctcactcataggtgggaattgaacaatgagaacacatggacacaggaaggggaacatcacacaccagggcctgttgtggggtc

SEQ ID NO: 28258 - DNA, 201 bp, Homo sapiens
ataagacacgccccctagtgtgccatgtcagtttaccattgctataacaacacccaggagttactgcctctttccagggcaatgaccagatgacccaaaarttactaccacttcccttgaaatttccgcataaaccatcccttaatctgcatgtagttaaaagtgggtataaatatgactgcaaaaccgccgtaagctgct

SEQ ID NO: 28259 - DNA, 201 bp, Homo sapiens
gtctatgttaagagaaggaatggtcagagaaacaagagggggaactaggagaaaatggtattatgaaaaacaaaggagtagaaatttgaaaaaaaaaaaaagtatcagcagtgtgaaaagcattagaaatatccagttagacaaggatgaagaactattccctgggtttcataatatggagataactgatgatctttgcca

SEQ ID NO: 28260 - DNA, 201 bp, Homo sapiens
aatctgaccgagttataagttttctaaaactaactgattagctaagcttagaatatgcttggaaataattcatttaaatattacctcatattaacacctamatattgccacatatcctaccattgttctttttattctaatagtttcttagttatgtagcatgagtagcagagtatttacagtatttatatttaaatatca

SEQ ID NO: 28261 - DNA, 201 bp, Homo sapiens
atattcatgtacaagtctttgtgttgacacatgcttcttcttttctcttgtttaagtatgtaaggagaggtaagaagtccattgattttttttttttttttaagacggagtctcgctctgtcgcccaggctggagtgcagtggcacgatctcggctcactgcaagctctgcctcctgggttcacgccattctcctgcctca

SEQ ID NO: 28262 - DNA, 201 bp, Homo sapiens
tggaaaatttctctttctattcatgggaggagaggaaatctaactggggattgagatgaaaagaagaaaaaaaggattgaatcctcttttaatatctatgrcattattttaaatcacttcagaattccacaagatttatatgtggaaaatgacatctttgctgattgcaatgtggattgcaactgtccatctaaaatatgg

SEQ ID NO: 28263 - DNA, 201 bp, Homo sapiens
ttcacttgcaggaaatgaagttgcactttcctctctaggagcaatgctttccaacagcatagggcactgtaatgggaaggggaagatgcacattctgttcyatctgtctatttggtgctcttggctgcctcacttccacttaagcagtcagttttgtcaatttacacaatggggatttgggaccttttcttgtggagttga

SEQ ID NO: 28264 - DNA, 201 bp, Homo sapiens
atcttggtgccaccctctgatgtttatatttcttattggagctttctttaaatatctgatgatccttattggcccatttatttatttttatattggtgtcrttttacaccttcatttagggattatcaaaattcaataaactgcacatatttaaaatgtataatttgactggttttggccaatgcacacactcctgaaacc

SEQ ID NO: 28265 - DNA, 201 bp, Homo sapiens
tttcacttgcaggaaatgaagttgcactttcctctctaggagcaatgctttccaacagcatagggcactgtaatgggaaggggaagatgcacattctgttycatctgtctatttggtgctcttggctgcctcacttccacttaagcagtcagttttgtcaatttacacaatggggatttgggaccttttcttgtggagttg

SEQ ID NO: 28266 - DNA, 201 bp, Homo sapiens
cctcatgaaccagtaagtactccagtctgataattttgggtggtcaaatttcacttgcaggaaatgaagttgcactttcctctctaggagcaatgctttcyaacagcatagggcactgtaatgggaaggggaagatgcacattctgttccatctgtctatttggtgctcttggctgcctcacttccacttaagcagtcagt

SEQ ID NO: 28267 - DNA, 201 bp, Homo sapiens
acagtttcttgcaaattcaaaggttacttaagttggagacaatcagtcttatggtggaaggcattttgtcaacagacggcaagtatacaatttaaaaatawttttttctacgttttcttatatttttttcctagatgtttctgttggcaataacatgtgcatttgtatccaaaacactgtctggatcttatatgaattcca

SEQ ID NO: 28268 - DNA, 201 bp, Homo sapiens
ctagtttttaaaatacgacagtcctggtaaaattgctcctatctgcatgaagtgatctaatattaatgccatattgcctgttctattgataatttcttgcwttaaagaagttggttttataactgagggtgtgtctacacaggattattgattcaggcaagttagtcctaaatggctttgagagacttaaatggaagacag

SEQ ID NO: 28269 - DNA, 201 bp, Homo sapiens
tctttgaagatcagtggtttcactttaaatgtaaattgagtgggacaaactggccaagcttactgagatatttttgcatacaccttatgtacttcccccarttcctacaagaacaatcaaccaaacaatgaactaaacaaacatgtaaagcaacaaggaaaaaacattttttagtttaatgtttcagcataaatggattga

SEQ ID NO: 28270 - DNA, 201 bp, Homo sapiens
taattcagtggctctctctttaaaacctctactgcattcctcttgccatatgtattggatcccacgttggtagatgagagaatggcaccaaagttgttgcyggaatgaactaaaaaatttgccaggcgctgcgttgcacatgtggcagtgttgcatttccgcttttccacctgatgactggtaacatggaacaaatgtgaa

SEQ ID NO: 28271 - DNA, 201 bp, Homo sapiens
tttttgtatgtggatatatgtgcatgtacactagtttttaaaatacgacagtcctggtaaaattgctcctatctgcatgaagtgatctaatattaatgccrtattgcctgttctattgataatttcttgctttaaagaagttggttttataactgagggtgtgtctacacaggattattgattcaggcaagttagtcctaa

SEQ ID NO: 28272 - DNA, 201 bp, Homo sapiens
gggtagaagtaagacatatcaagatttaaaacataaatagcttggaacaccctgaagagcaacatgggagaaactgagaaaagaattgaaacccatagaayaagatgtctttccaagttgaaggtatggaatttttgtatgtggatatatgtgcatgtacactagtttttaaaatacgacagtcctggtaaaattgctcct

SEQ ID NO: 28273 - DNA, 201 bp, Homo sapiens
agcggatgggtcattattacattaactcatcagtaaatattaacgtagcaaatacacagtgtccttgtgcagttaatggtgtgtcatacacagcagaagtktgaatttgccatctttgtaagacatgagtgaatttccaagaattaagtgtatgttatggtaaggaactgatagaaaagggtaaggataacaacaaatgtg

SEQ ID NO: 28274 - DNA, 201 bp, Homo sapiens
tggacacatgaaagactgagaccttttgtttctgagcatagttctaaacacattatttttattcagaattataaaggcattatttcattgtattctaaccrctaatgtggctaaaagaaaagcagtttttgattttttatatttcattgtttaaaacctctctgtagaagtccttaggatcttttctgtattcctgatata

SEQ ID NO: 28275 - DNA, 201 bp, Homo sapiens
cccctcacacctttctcagctctgacatcaggcagctcagagagcctctgtcattaatttccatccctatagatagaaagtacctcacaggcagcagaagyggatgggtcattattacattaactcatcagtaaatattaacgtagcaaatacacagtgtccttgtgcagttaatggtgtgtcatacacagcagaagtttg

SEQ ID NO: 28276 - DNA, 201 bp, Homo sapiens
aatccacttggtataaaaatatatgctttagttaagtttctctggtttgtttcagtatcaggttaatatagaagaaattactaccttttgatttttttccygcttcatgttctggctttgcccctctaagttccaagagtatatttcttgacaaaactggaattatccattcctgtctgtcagaagttccatcaaagatat

SEQ ID NO: 28277 - DNA, 201 bp, Homo sapiens
aggattgctacgtagttgtttttatccttttgctttcatattgagaaatactcccatcattcttccattttaaaaatactgttctagttttcttgatttaygtccttattttgatggaacatatactgcagtagcttcctgagaatggacacatgaaagactgagaccttttgtttctgagcatagttctaaacacattat

SEQ ID NO: 28278 - DNA, 201 bp, Homo sapiens
agaataactttttataaatctgtttcactcacagaatagctagctagcaatatagaataaatcccccaacagcaaatggctttttaactacttcttttagrtttcatttcttaaaaacattaatttgctcctgattatttctatacatttccatttccacaagatgtaaaagtttttaacatttccagagacatctgagga

SEQ ID NO: 28279 - DNA, 201 bp, Homo sapiens
tctagttaatgctgaatcctggaccaaagcttagctttatgactcatggtctagtgttcatttagacaaaaatacttgcttattacctacattgttatttrttctattttcataaccttttttgtttctctaagatgttaagggtgccaaacataacattcaaaatggatcctctcttaccctaatgttataaggaaaatc

SEQ ID NO: 28280 - DNA, 201 bp, Homo sapiens
tcccaatttccttctctaagcaatctgaacatttatattgtaatacattctccctttagcctttctttgaaataaaccatgaatttaacaccaagtgtgcrtttctctaaataaataaaactttcccagaaataggaaattctttaccttttaatgtttcaatgtcagcaatatcagcaaatgcttctgatagaaagaaag

SEQ ID NO: 28281 - DNA, 201 bp, Homo sapiens
aatggtctgggttcagtggctcactcttataatcccagaattttggaagactgaggcaggaggaaggcttgagcccaggagtttgacaccagcctgggcawcatagggagaccctttccctataaaataaagataaaacaattagctgggtatggtggcaggtgcctgtggtcccagctacttgggaggctgaggtgggag

SEQ ID NO: 28282 - DNA, 201 bp, Homo sapiens
aaaagtaataaaggaaaattatgggtcaaattgagaagattcaaaggtaatatctgttccaagatatgtttagcatatgactgaagcacagtgtgaaatamtttatatgctaaatgctgagtggtattttgataattggttggaaggtcaataatataatttaaaattgttctaaataaaatgttaccttatttgagttag

SEQ ID NO: 28283 - DNA, 201 bp, Homo sapiens
tctaaaatacttacttttcttgaaaaacagtaaaaattggaatttggtccaaacatctcaaaaaaagtaataaaggaaaattatgggtcaaattgagaagrttcaaaggtaatatctgttccaagatatgtttagcatatgactgaagcacagtgtgaaatactttatatgctaaatgctgagtggtattttgataattgg

SEQ ID NO: 28284 - DNA, 201 bp, Homo sapiens
taagacatttatttgtataccaactctatttttttgacagccttttgtttcaatgtgcttttaaaacgatatcggaaatggatgcagaataataacattgsttcctctttgctgattattaggaaagttagagaaatgttttagttttcagctccatagaaatcaaaatattggtgaaacttagggtaaatggaaaatgaa

SEQ ID NO: 28285 - DNA, 201 bp, Homo sapiens
tattatgggaccttagttagtactacatataaaacaatcttttgagaaggtatatgtcctagcaacaaacatcagacacacagaccatatattcacactgragatgaaaagggcactgttaaattatacaggaaatcactagaacataaaacaataactatagagttacattgtcctctaaaggggcaagtaattcagtgg

SEQ ID NO: 28286 - DNA, 201 bp, Homo sapiens
agcagttttatacttttaaatagcctcttagtaccagcaagcacaacaaacaatagactttaaaaaatattttgaccgagtcaggagcaggattttatttmtttgtttttaaaacagcattctgtcatttcagaaatatactgcaaaaaggaattgcttaacaggggtattgacaattactaatttgcttatcaggggtac

SEQ ID NO: 28287 - DNA, 201 bp, Homo sapiens
taactttcatgctttgcttcccttttaaacataagttccaatttcaaaccatatctttgtgaattaataaaactgaatgctcttaagagcacccaagtcasttcttgaaagctttagtttgaaatttcttccaccagataccttaaattatgtctcttaagttcaaagttccactgatctctagtgcaggggcaaaatgct

SEQ ID NO: 28288 - DNA, 201 bp, Homo sapiens
tgaacccgggaggtggatcacttgaacccgggaggtggaggttgcagtgagcactccagcctgagcaataagagtgaaactccatctcaaaaaaaaaaaaatggagaggtaataaatgaaatcaagagggagaaataaggttgctgtggaagaacatatatatactgagagatattaggataaaatactgggaaagacttt

SEQ ID NO: 28289 - DNA, 201 bp, Homo sapiens; identical to SEQ ID NO: 5761

SEQ ID NO: 28290 - DNA, 201 bp, Homo sapiens; identical to SEQ ID NO: 5764

SEQ ID NO: 28291 - DNA, 201 bp, Homo sapiens
taaaattttgaatgttcattatgtgtgactagcttacaactggccttttcaagacaatatgatagttttaaatctttatttttcttttatttacaaacttrtttacttttcaggtgtatgaaatctgaagagaagtcccttggtgtgggattacatacattttgcacaagagtatttggtaaaaatagttattttttccca

SEQ ID NO: 28292 - DNA, 201 bp, Homo sapiens
acttaaacaaaataaatgacatatacatttaatagaagctcactgctgctaacacacaatgaaaccctcatggatacaaagcagttttatacttttaaatwgcctcttagtaccagcaagcacaacaaacaatagactttaaaaaatattttgaccgagtcaggagcaggattttatttctttgtttttaaaacagcattc

SEQ ID NO: 28293 - DNA, 201 bp, Homo sapiens; identical to SEQ ID NO: 5787

SEQ ID NO: 28294 - DNA, 201 bp, Homo sapiens
ggcataacgcagcatgatggcagtttatctgaattaatgctacttccaaagctacctaactcaaagtcagggaaaagcagatattcataagaatctgactsaaagcaaagcatttcatcttctgtccaacattgcagctgctatcaaaaaaagtgtatcatatacataacctctgccagaaatgtctaatttgttaaacaa

SEQ ID NO: 28295 - DNA, 201 bp, Homo sapiens
tcaagagatttcttacagttctaattgatgtaattttaaattagagcttagtttttaaaagaaacatctttttaaaacgtaatttacaaggatcaaaattkttattgatacagtcccttaatattgtccacttttcaagtaatttcgagatttttactttcccaatttccttctctaagcaatctgaacatttatattgta

SEQ ID NO: 28296 - DNA, 201 bp, Homo sapiens
ttaaatgtttcactttcgtaagaaattgaatgaataaacttcagaataaaatcttcgattaatatctgctgtatccatataataacctttgtgttatagartcactctaactatgttttaatctctagcaccagaggttgttgggttactattcataattcttcttgtttaattcctgggaattgtatgctaccataggca

SEQ ID NO: 28297 - DNA, 201 bp, Homo sapiens
aagcacaacaaacaatagactttaaaaaatattttgaccgagtcaggagcaggattttatttctttgtttttaaaacagcattctgtcatttcagaaatayactgcaaaaaggaattgcttaacaggggtattgacaattactaatttgcttatcaggggtacttacaattactaattttctttcttttttttgagacgag

SEQ ID NO: 28298 - DNA, 201 bp, Homo sapiens
aacatatgtgtgcaagtgtgtttttcatataatcactgctcttcctttggttagatactcaatactgggattactgtatcaaattgtagatgtacttttakctctttaaggaatctccatattcttttccagagaggttgtactaatttacattctcactagcattgtgtaagcatttctttttccccacatttacacgaa

SEQ ID NO: 28299 - DNA, 201 bp, Homo sapiens
taatggctgagtagtatcccatagtgggtaaataccatattttctttatccactcattagttgatgggcacttaggttggcttcacacctttgcaactgtkaattgtactgctataaacatatgtgtgcaagtgtgtttttcatataatcactgctcttcctttggttagatactcaatactgggattactgtatcaaatt

SEQ ID NO: 28300 - DNA, 201 bp, Homo sapiens
atttaatagaagctcactgctgctaacacacaatgaaaccctcatggatacaaagcagttttatacttttaaatagcctcttagtaccagcaagcacaacraacaatagactttaaaaaatattttgaccgagtcaggagcaggattttatttctttgtttttaaaacagcattctgtcatttcagaaatatactgcaaaa

SEQ ID NO: 28301 - DNA, 201 bp, Homo sapiens
tatagtggtgaattttaacattttagtgtacctgtcacccaagaagcgtacattatatctgactgatggttctttattcctggccccctctcaccctcccscttctgaatctctaaagtccattatatcactctgtgtgcctttgcataactgatagcttagctcccccttgtaagtgagaacatacagtttttggttttc

SEQ ID NO: 28302 - DNA, 201 bp, Homo sapiens
aaagagtttccagaagtctgtggtcttttaattgaagacacgattaatagaacacaagttgtttcgcaataccctgcataagaatatgactgaggtttgckgaaagccacttaaacaaaataaatgacatatacatttaatagaagctcactgctgctaacacacaatgaaaccctcatggatacaaagcagttttatact

SEQ ID NO: 28303 - DNA, 201 bp, Homo sapiens
gattacagagatgactcatacatccttcacctcagttagtttacaggctggatggggaaataacacttgagcatacataaccaaaaaataaggtagaaccygtgaacttcttctaggtggtctcaaaatcccaaccactaatatcatatcaaatataaaaataagctcactaaacatgttcagtgactgagggaatgtcta

SEQ ID NO: 28304 - DNA, 201 bp, Homo sapiens
tagaccaaaattccatggggaggacgttaagggaccagctataggatgtgggtctacttagtcggcaaaggttttattgaaccatagaagaaaatgttctyagttgtatacggaacaaagaaaataggacaatcccatttggattttggaagaaaaaaaagatgtgctaccagcaatctttcagtgttggaaatatttagt

SEQ ID NO: 28305 - DNA, 201 bp, Homo sapiens
ttcatttattatttaatgcaaccctagcacaaatccaagtatttaagatagttgttatgcagtaaatgctagaatgtaaatgattgggtgaggctcttaaktaagactttgttcatactttttaaaatgattattctcaattttttcctaggaaatcttttgttgattatatttgtgagttattttggaaccaaactgcat

SEQ ID NO: 28306 - DNA, 201 bp, Homo sapiens
gttttaaatctttatttttcttttatttacaaacttatttacttttcaggtgtatgaaatctgaagagaagtcccttggtgtgggattacatacattttgyacaagagtatttggtaaaaatagttattttttcccacatcctatcagaacaatattattattattattttttattacactttaagttttagggtacatgt

SEQ ID NO: 28307 - DNA, 201 bp, Homo sapiens
attaaggtagcttgttctaagaaagtcactcaggactcagtatctaagaactcagtgctctaatgtaccatttattaagggttttgtattaagcattgttkgatttcacaaaattttaaagttagcaatgcacatgttcatctgctggcatttcactcctattcctcgctacttttcttccttatttcttagagttaaatg

SEQ ID NO: 28308 - DNA, 201 bp, Homo sapiens
ctgcctggacatccaggtgtttccacacatcttctgaaatctaggtggaggttcccaaacctcaattcttgacttctgtgccccgtagggtcaataccatrcggaagctgccaaggcttggagtttgcatcctctgaagccaagcttgagctgtaccttggccccttttagccatgattggagtgcctgggatgtagggca

SEQ ID NO: 28309 - DNA, 201 bp, Homo sapiens
aattattttctttatttatatttttttggggtcatttattaaggtagcttgttctaagaaagtcactcaggactcagtatctaagaactcagtgctctaaygtaccatttattaagggttttgtattaagcattgttggatttcacaaaattttaaagttagcaatgcacatgttcatctgctggcatttcactcctattc

SEQ ID NO: 28310 - DNA, 201 bp, Homo sapiens
tgcactgcgctagcaggggtccatgagggccctgcccttacaacaaacctctgcctggacatccaggtgtttccacacatcttctgaaatctaggtggagsttcccaaacctcaattcttgacttctgtgccccgtagggtcaataccatacggaagctgccaaggcttggagtttgcatcctctgaagccaagcttgagc

SEQ ID NO: 28311 - DNA, 201 bp, Homo sapiens
cggtggatctaccattctggggtctggaggacagtggccctcttctcacagctccactaggcagtatcccattggggactctgtgggggcgctccaacccygcatgtcccttctgcactgcgctagcaggggtccatgagggccctgcccttacaacaaacctctgcctggacatccaggtgtttccacacatcttctgaa

SEQ ID NO: 28312 - DNA, 201 bp, Homo sapiens
ctgtggcttttccaggtgcacggtgcaagctgtcggtggatctaccattctggggtctggaggacagtggccctcttctcacagctccactaggcagtatyccattggggactctgtgggggcgctccaaccccgcatgtcccttctgcactgcgctagcaggggtccatgagggccctgcccttacaacaaacctctgcc

SEQ ID NO: 28313 - DNA, 201 bp, Homo sapiens
gttacttcctagatacaataggggtacagacattgggtaaatatacccattccaaatgggagaaattggccaaaacaaaggggctacaggcccaacataartctaaaatccaatgggcagtcattaaaccttaacattccaaaatgatctcctttgactccatgtctcacatacaggtcgtgctgatgcaagaggtgggct

SEQ ID NO: 28314 - DNA, 201 bp, Homo sapiens
gactggcacagagtagatgttcaataagtatttgttgtatctgtgagagaatgtgttaaaataacaaaactcaaacataatagtgcagcgactatgccttratgtgtgtgtgtttgggattcagcacatttgtagaggtaaagcagttggttttttaaaaaattagtgccattcaggatcacttgttaaatggatattgtt

SEQ ID NO: 28315 - DNA, 201 bp, Homo sapiens
attttttaatatttcatgctttggtcaatgccacagtaccctagaattttagtaatgattacagttaaaaattagtgttgtattgctagatgtattagtcyattttcatactgctataaagaaatacccaagactgggcaatttataaataaagagagatttaagggactcatagttccacatggctggggaggcctcaca

SEQ ID NO: 28316 - DNA, 201 bp, Homo sapiens
cgctagtttatactctctgtaggcacgtacttggctttcttgctcactgctgaatgctggtgcgtagcaccatgactggcacagagtagatgttcaataartatttgttgtatctgtgagagaatgtgttaaaataacaaaactcaaacataatagtgcagcgactatgccttgatgtgtgtgtgtttgggattcagcaca

SEQ ID NO: 28317 - DNA, 201 bp, Homo sapiens
agtacattacccattttaggttattcagctcctaaactcgcaaatattgacagggcaacatgtaccacagatgtgtgagattttaaagctattgaagaggytcagtacattgtgtcttaaaaatagtcacatttaagcatccattggattgctgtattatggtatttacaatgatgaggtacaaaagggtctaggtctatg

SEQ ID NO: 28318 - DNA, 201 bp, Homo sapiens
gtaataattataactatttttgacaagtaaattgatatcttgttgccttcctttattatagatgaaaaaacagtttacctcagattactggtcacagtgaycctaactcatatttggttgtaaggtagtacattacccattttaggttattcagctcctaaactcgcaaatattgacagggcaacatgtaccacagatgtg

SEQ ID NO: 28319 - DNA, 201 bp, Homo sapiens
gaatgtggcttaggggttacttaatacagctactcagaggcagaacaaagacaagacagagctgaaggctgacaacttttcagtgaatttgtctagcagcwggagctaccaattattgaaatttataacatttcaggctctctaagagggactttacataatttatctcatttttttatatgctatgtggatatctaatct

SEQ ID NO: 28320 - DNA, 201 bp, Homo sapiens
tttaaagcctagtgagcatgactttaagtttgctcagagtgctttatatttgtcctctgcagtttgggagacacaggggactggtgtccaattcatacttmggaaatttaagaagcctaaaaggcaaaaaggctgtggctggatccacctgccaggaggtgaattgaagagagggctacatttgaaaaggagcttcacccc

SEQ ID NO: 28321 - DNA, 201 bp, Homo sapiens
gctcactgcaacctccgcctcctgggtttaagcgattctcctgccttagcctcctgagtagctgggattacaggcacatgtcaccacccccggctaatttytgtatttttagtagagacagggtttcaccatgttggtcaggctggtctcgaactcctgaccttgtgatctgcctgcctcggcctcccaaagtgctgggat

SEQ ID NO: 28322 - DNA, 201 bp, Homo sapiens
aagatttatatgtggaaaatgacatctttgctgattgcaatgtggattgcaactgtccatctaaaatatgggatcctgtgtgtggaaacaatggcttgtcrtatctgtcagcttgtcttgctggttgtgagacatccattggaacgggaataaacatggtaagacatcctatttgacagaacttttttgagttgcattggt

SEQ ID NO: 28323 - DNA, 201 bp, Homo sapiens
tcactatgagttggacctaaatagttacttatataaggcatattacataaaagtgataacatatttgttcctttggtaagtcattttgtaaataatatttyatttgcatttataggtatttataacttacctccaatatgtattggatatataattggtggtttaattatgaagaagttcaagattactgtcaaacaagct

SEQ ID NO: 28324 - DNA, 201 bp, Homo sapiens
gaagaggttttatgaaaactctcattgccagcatgtgtaacaggttgtagaggtagagaggtgcactagagatcaaagggtagagataaaaataaaagtcrtttctgtagagagagttgtgctgtgtgtcccactttcacttctgttagggggaggtaagctattctttcttctgatttaaagcctagtgagcatgacttt

SEQ ID NO: 28325 - DNA, 201 bp, Homo sapiens
agtgtgtgtatttttttacagatgatctgatcataactcccactgacactcgttgggtcggtgcatggtggtttggctttctgatttgtgcaggagttaaygtgctcactgccattccttttttctttttgcccaacacacttccaaaggaaggactagagactaatgctgacatcattaaaaatgaaaatgaagacaaac

SEQ ID NO: 28326 - DNA, 201 bp, Homo sapiens
gaaaattaactacaaaacctaaggtatttggccagtgctaaacaagagacttagagaaatatggtctcatgtgattctgccccaggaggcatgaattatttgataataggagaggaggatgaaatgtgccacagtaagatttagaataggtgagagataagtccttccttttgtaacatttggaaaggaaattatgcaggg

SEQ ID NO: 28327 - DNA, 201 bp, Homo sapiens
tacaatgaaatcttctgttagaaaattaactacaaaacctaaggtatttggccagtgctaaacaagagacttagagaaatatggtctcatgtgattctgcyccaggaggcatgaattatttgataataggagaggaggatgaaatgtgccacagtaagatttagaataggtgagagataagtccttccttttgtaacattt

SEQ ID NO: 28328 - DNA, 201 bp, Homo sapiens
ttctttggaagcattcttactaaatactagaataaaactgctatcactaccagtattcattttgaggtgaagatcctactcaatgaaaaactagttagttataacaacaataataaaacattagaaaagatgaaaataaatttggattttctcagtgggaaaattaaaaaaacataaaatattttaacaaatactgaaatt

SEQ ID NO: 28329 - DNA, 201 bp, Homo sapiens
gaaggaaggcattttactacagtaatgtcgcttggttatttgaaccctctgtagttacatgtcaaaattcaaattgtgttgcaatatcaaaaattactgtsaattgataagttggttttctttcaagtttgttgaaaacaatcaaaatttttacagaagaatatgttagttattagaatctttcattttgccaatttctga

SEQ ID NO: 28330 - DNA, 201 bp, Homo sapiens
attctttggaagcattcttactaaatactagaataaaactgctatcactaccagtattcattttgaggtgaagatcctactcaatgaaaaactagttagttataacaacaataataaaacattagaaaagatgaaaataaatttggattttctcagtgggaaaattaaaaaaacataaaatattttaacaaatactgaaat

SEQ ID NO: 28331 - DNA, 201 bp, Homo sapiens
atatgtatatttctgctgaagtgtttatcatataatacattttcatttatatttatattggatacagttataaactcagttttgtacagtaactagtacaytttttgtggtcataacatgttattgtaatccaattaatatcacagaaggctttagtatcctatgtcaggtaccgatcatctttttcaatatttttaggta

SEQ ID NO: 28332 - DNA, 201 bp, Homo sapiens
gattctttggaagcattcttactaaatactagaataaaactgctatcactaccagtattcattttgaggtgaagatcctactcaatgaaaaactagttagttataacaacaataataaaacattagaaaagatgaaaataaatttggattttctcagtgggaaaattaaaaaaacataaaatattttaacaaatactgaaa

SEQ ID NO: 28333 - DNA, 201 bp, Homo sapiens
tgattctttggaagcattcttactaaatactagaataaaactgctatcactaccagtattcattttgaggtgaagatcctactcaatgaaaaactagttagttataacaacaataataaaacattagaaaagatgaaaataaatttggattttctcagtgggaaaattaaaaaaacataaaatattttaacaaatactgaa

SEQ ID NO: 28334 - DNA, 201 bp, Homo sapiens
taatataagtacagatattataacacttacatagggattttagatataacaatttagaaacatattaaatagatatttttctagacaattaattatatattaccagattttattataaatctatagaaacatgaatatttttatagttacttaaaaatgtaaaactttcaaaagtgctcatctcccaaggtaccaagttca

SEQ ID NO: 28335 - DNA, 201 bp, Homo sapiens
cagcatgtatatctaaatcgtggttagtccctaaatccttagataagaatatctatttctgcagaatggatttccaaaagtggaatgccagaaacattgtstactgcaatatgcaatcccatcacttctccaccccattccattgtatgtgataaatctttcaaaaaatttttaattaactgtatgcaaaaataagggtat

SEQ ID NO: 28336 - DNA, 201 bp, Homo sapiens
gctaatataagtacagatattataacacttacatagggattttagatataacaatttagaaacatattaaatagatatttttctagacaattaattatatattaccagattttattataaatctatagaaacatgaatatttttatagttacttaaaaatgtaaaactttcaaaagtgctcatctcccaaggtaccaagtt

SEQ ID NO: 28337 - DNA, 201 bp, Homo sapiens
aaatacaggatcatcattacctacatatgtggacttgttgctgtaatcatttaactatgaactatggacatccctctaggtcagcatgtatatctaaatcrtggttagtccctaaatccttagataagaatatctatttctgcagaatggatttccaaaagtggaatgccagaaacattgtgtactgcaatatgcaatccc

SEQ ID NO: 28338 - DNA, 201 bp, Homo sapiens
aaaaagctaatataagtacagatattataacacttacatagggattttagatataacaatttagaaacatattaaatagatatttttctagacaattaattatatattaccagattttattataaatctatagaaacatgaatatttttatagttacttaaaaatgtaaaactttcaaaagtgctcatctcccaaggtacc

SEQ ID NO: 28339 - DNA, 201 bp, Homo sapiens
taaaaaagtcaattttgggcgtatctttttacatttctttctatgctcatgtaaaacatacatgatttatgtaattatacacatatgctcccccacaaccyttagtcacaaatacaggatcatcattacctacatatgtggacttgttgctgtaatcatttaactatgaactatggacatccctctaggtcagcatgtata

SEQ ID NO: 28340 - DNA, 201 bp, Homo sapiens
atatatttttaaaattcaaaagggacttttcttgattaaaagacaatataaatatcatcctaaacatctggtttttcagaaattaaacagaaacataaagsagtaaacaaagctgaattcacaggctctatgtctcaaaatgagcagtggtttctgatatcagcttccaaggaagaataaggtacttctaagtcaagcgac

SEQ ID NO: 28341 - DNA, 201 bp, Homo sapiens
caccaccaccaccacaggcccacagggaatactgccaggccaccactgacgtttacttaaggcacaagagttctttagccagcctgtgtgaatgctgctasgccaggactcacccttcagggcagttagctctcctctggcccaggagggcaggttcagaaatgccatccaagacccaaggcccagaatctggaactgcaa

SEQ ID NO: 28342 - DNA, 201 bp, Homo sapiens
ctgagcttaagcatctcttcaaataactttgtagctaaaagttattcatgatgcttattcaatttattttacccactttactcattatatttcctgcatcytatgtttttcttgatgaatttgatgattactatgtaaattacagatattaatgtaatactgtttatatgatacaattatcttcacttagtctgtcttctt

SEQ ID NO: 28343 - DNA, 201 bp, Homo sapiens
ttaacaaacaccttgctatgacatctgtttctttattcaacaaatactatggtgtattatatgtaaatgtagctgtgataatctctatacatattaaaatraggatgatgtggtccatacaaggttagtaaataaagaactacataattattagtactatatatatgtagtgtgtatatatatgtatatacatatatagtg

SEQ ID NO: 28344 - DNA, 201 bp, Homo sapiens
cctcttgcagtctgcaagatcagttccattttcaaaattaggaaagagcttagcttgttgcaagacatagaaaagaaacttgtgctactgaaactcatctrttaggacagggatgtcaacaaacatgggtgacttaaaaatcttcagataactctctctcctgtcaggtaccctattcataaatataaattttacaattat

SEQ ID NO: 28345 - DNA, 201 bp, Homo sapiens
tgcattcaaaacctttctcgctattttcactacctctgtttttgttgaggttctcattactttgtctgtagtttctctttattattttctcttcagaattytattttctcagtttttaagaaacattcttgcaatataatttttctcaagcattgttttaatcatgtcttctctactatatttatgacacatataagctcc

SEQ ID NO: 28346 - DNA, 201 bp, Homo sapiens
tcttaaaggattgttatggactgatagacctcttgcagtctgcaagatcagttccattttcaaaattaggaaagagcttagcttgttgcaagacatagaawagaaacttgtgctactgaaactcatctattaggacagggatgtcaacaaacatgggtgacttaaaaatcttcagataactctctctcctgtcaggtaccc

SEQ ID NO: 28347 - DNA, 201 bp, Homo sapiens
gaaatctaccttagcttcttttcagggcaatatgttccttgaggttagaaattagttatatttttgtagtcttagtgatttccacaatgatgagtagagtrtcttggcacagttggccttccataaaagtttgttgaatggagatgagatatgctaaatgacaatgagctacttggttaataaatctactttctactattg

SEQ ID NO: 28348 - DNA, 201 bp, Homo sapiens
tgtacgtggaatgggtgaaactcccatcctgcctttgggtatttcctatatagaagattttgccaaatttgaaaattctcctttatatattggtaagtatrgaaatctaccttagcttcttttcagggcaatatgttccttgaggttagaaattagttatatttttgtagtcttagtgatttccacaatgatgagtagagt

SEQ ID NO: 28349 - DNA, 201 bp, Homo sapiens
aggggccatggtcatataactgtgaaatgcctacagaaaacatagaattaatattactgacactttatcgtcaaagcactaatgtcatgtcttttttttttaatgcagagtgtacaaaggaagttaaatcattaatgtgggtgtacgtcctagtaggcaatattgtacgtggaatgggtgaaactcccatcctgcctttgg

SEQ ID NO: 28350 - DNA, 201 bp, Homo sapiens
aatttgaaaaatgtctgtctcagaagaagccaaagaacccccatgggggaaacaaaggaaaacaatgacattaatagtggcctgtgttctcttcctgagckggctattgccaaagactgacccaggtgctagtcggcttcattgtggatatagcaaaaccttcccattctggcacatctccaggaaggtggattgatgctt

SEQ ID NO: 28351 - DNA, 201 bp, Homo sapiens
accatcattgagtcaggaaaccaaaacagtttcaaaaatttgaaaaatgtctgtctcagaagaagccaaagaacccccatgggggaaacaaaggaaaacartgacattaatagtggcctgtgttctcttcctgagcgggctattgccaaagactgacccaggtgctagtcggcttcattgtggatatagcaaaaccttccc

SEQ ID NO: 28352 - DNA, 201 bp, Homo sapiens
ctattaaaaaatacaaaaattagccaagcatggtagcgggcacctgtaatcccagctactcaggaggccgaggctggaggatcgcttaaacccaggtggcrgaggttgcagtgatccaagattgcgccattgcactccagcctgggcaacagagtgagactctgtctcaaaaaaaaaaagagtcaaagacatctatccaag

SEQ ID NO: 28353 - DNA, 201 bp, Homo sapiens
ttatgatggacaaatattttggtttttttaggggtttatgaaacgcatggaggagttattgtacggtttctcagaaactggaggtttcgcttcttttgagyaaactttagagaatgccaagttgaaggcttgttttgttgttattccttccaaagcatttatcttcttaattatgcattattgaatgtcacattttttaaa

SEQ ID NO: 28354 - DNA, 201 bp, Homo sapiens
ttttttttatccttgtggaatcatgcctttccccattctgtttgaaaatctatttaccgtcattttgctgatgctttgggaatgaatagactttgagttaytggatttttagtggataaattaacaaaacatattttctcttttaaagtatttttgaagggatcagagtttctaagcagagtctttccttttcttttattt

SEQ ID NO: 28355 - DNA, 201 bp, Homo sapiens
tcagaagttccatcaaagatatttatttgccactggtgttattctttaaagaacacagaattcaaggaacaatggaatagctgaaggtactgttcttaagyatgatatagtcagaaatctaaggctgtagttatttgacagtatttaattctaattttctcacactttacaaaagttacaaagaaacaggattttaaagtt

SEQ ID NO: 28356 - DNA, 201 bp, Homo sapiens
tttctatagttcatacagaaaatactgacttaagctaataacagtgtgtgtatttttttacagatgatctgatcataactcccactgacactcgttgggtyggtgcatggtggtttggctttctgatttgtgcaggagttaacgtgctcactgccattccttttttctttttgcccaacacacttccaaaggaaggactag

SEQ ID NO: 28357 - DNA, 201 bp, Homo sapiens
tgaaaaagctaatataagtacagatattataacacttacatagggattttagatataacaatttagaaacatattaaatagatatttttctagacaattaattatatattaccagattttattataaatctatagaaacatgaatatttttatagttacttaaaaatgtaaaactttcaaaagtgctcatctcccaaggta

SEQ ID NO: 28358 - DNA, 201 bp, Homo sapiens
gagcatttacaagtagagtagttaagttaaatgtggttatactggattaccataggcttaaatccaatcactggtgtccatttttttctgaatcctagtamtgtttcataataaaagaaaattttagaagtagaaagataaaaatagatgaagaaattaataaatagactatataccatagagggaataagaaagtaaaga

SEQ ID NO: 28359 - DNA, 201 bp, Homo sapiens
tctatttagctccttgctctacccctcccttataaattattgcactattttggacagataggtctgtgtgtgtgtgtgtgtgtgtgtgtgtgtgtgtgtgtccatatttatctctatcatctctacgcataagtagagataggtatatatgtatatgtgtggtactgttctcttatattttctagttggttattgctggtt

SEQ ID NO: 28360 - DNA, 201 bp, Homo sapiens
ttctatttagctccttgctctacccctcccttataaattattgcactattttggacagataggtctgtgtgtgtgtgtgtgtgtgtgtgtgtgtgtgtgtgtccatatttatctctatcatctctacgcataagtagagataggtatatatgtatatgtgtggtactgttctcttatattttctagttggttattgctggt

SEQ ID NO: 28361 - DNA, 201 bp, Homo sapiens
cttctatttagctccttgctctacccctcccttataaattattgcactattttggacagataggtctgtgtgtgtgtgtgtgtgtgtgtgtgtgtgtgtgtgtccatatttatctctatcatctctacgcataagtagagataggtatatatgtatatgtgtggtactgttctcttatattttctagttggttattgctgg

SEQ ID NO: 28362 - DNA, 201 bp, Homo sapiens
acttctatttagctccttgctctacccctcccttataaattattgcactattttggacagataggtctgtgtgtgtgtgtgtgtgtgtgtgtgtgtgtgtgtgtccatatttatctctatcatctctacgcataagtagagataggtatatatgtatatgtgtggtactgttctcttatattttctagttggttattgctg

SEQ ID NO: 28363 - DNA, 201 bp, Homo sapiens
gtgttccttcaggagggatgattggtggagacttctatttagctccttgctctacccctcccttataaattattgcactattttggacagataggtctgtstgtgtgtgtgtgtgtgtgtgtgtgtgtgtgtgtccatatttatctctatcatctctacgcataagtagagataggtatatatgtatatgtgtggtactgt

SEQ ID NO: 28364 - DNA, 201 bp, Homo sapiens
tgctgcctgggcttgggtgaagggtggcacaagcacttccttagcttccctggctggtgtctcagtagggaagtgactcccaagtccattggctctgagcscagctcagcactagaacttgcctaggagttgtagtccttgcaacctagactgcctttcaagtttatttagggagagcacgtttgcccatggtggcgaggc

SEQ ID NO: 28365 - DNA, 201 bp, Homo sapiens
tgtattctgtagccattggataaaatgttctgtaagtatttattaggttcatttggtttataatttggatgaaatccaatgtttctttgtttatttatttwtttttttttttggtctggaagatctgtccaatgctgaaagtgaggtgtgaattcttcagctattattgtattaggctctatctctctctttagctataat

SEQ ID NO: 28366 - DNA, 201 bp, Homo sapiens
tatttgtattctgtagccattggataaaatgttctgtaagtatttattaggttcatttggtttataatttggatgaaatccaatgtttctttgtttatttwtttatttttttttttggtctggaagatctgtccaatgctgaaagtgaggtgtgaattcttcagctattattgtattaggctctatctctctctttagcta

SEQ ID NO: 28367 - DNA, 201 bp, Homo sapiens
ctccagactctggagtcaatgaacattttcagctggagtggcaggggatgtctctgggagttgaatgtttcttaaacaaactttaaaccaaaatgtttgcrctcttattgttttggatcatactcacttttgcatttaagtatcttgcctgaatgttcctgggctttgcagcattgcttccttgcaggcacttagagttgc

SEQ ID NO: 28368 - DNA, 201 bp, Homo sapiens
tggagattcctcacatatcactttcaattctccatctgcaatctgaacttggaattctctaggcctgctgcattgctatttccttggaattttctctcatyattatccttgagaatttgctttttacctgtttcatacattcagttattcattttctgggatgtcatgtctcctgctttcctctttcctcttcacttgttt

SEQ ID NO: 28369 - DNA, 201 bp, Homo sapiens
cagtgtattatttttgtcttggagattcctcacatatcactttcaattctccatctgcaatctgaacttggaattctctaggcctgctgcattgctatttycttggaattttctctcattattatccttgagaatttgctttttacctgtttcatacattcagttattcattttctgggatgtcatgtctcctgctttcct

SEQ ID NO: 28370 - DNA, 201 bp, Homo sapiens
gccttcaggtgttgaagtgaaagaaagagttgcacatttctcactttaaatcaaaagctagaaatcattaagctcagcgaggagggcaagttgaaattcaraataggcccaaagctaagccacttgcaccaaatagccaagctgtgaacacaaggaaaaagtgctatttcaaggaagacacaaatgattagaaagtgaaac

SEQ ID NO: 28371 - DNA, 201 bp, Homo sapiens
atcatttttccaacagcatgtgctcactttgtgtctgggtcatatttgataattattgcaatatttcaaacttttgcattatttttgtatctgttatggcratctgtgattagtgatcattgatattactaatgtaattgttttgatgtgccactaacttatgcccatttaagatggtgatttatttatttatgtatttct

SEQ ID NO: 28372 - DNA, 201 bp, Homo sapiens
attagttttgaatcctggcataccctgctttactgcatttcactttattgcactttgcagatattacatttctcacaaattgaaggtttattgcaaccctrcgttgaagattagaatcatttttccaacagcatgtgctcactttgtgtctgggtcatatttgataattattgcaatatttcaaacttttgcattattttt

SEQ ID NO: 28373 - DNA, 201 bp, Homo sapiens
ctaactaaatgttattctattagttttgaatcctggcataccctgctttactgcatttcactttattgcactttgcagatattacatttctcacaaattgwaggtttattgcaaccctacgttgaagattagaatcatttttccaacagcatgtgctcactttgtgtctgggtcatatttgataattattgcaatatttca

SEQ ID NO: 28374 - DNA, 201 bp, Homo sapiens
gccttgcctctgtatttctaactaaatgttattctattagttttgaatcctggcataccctgctttactgcatttcactttattgcactttgcagatattrcatttctcacaaattgaaggtttattgcaaccctacgttgaagattagaatcatttttccaacagcatgtgctcactttgtgtctgggtcatatttgata

SEQ ID NO: 28375 - DNA, 201 bp, Homo sapiens
ttccccaagttggccaggctggtctggaacccctgggttcaagcaatccgcccacctcggcctctcaaagtgcgggattacaggcatgagccacctggccmagccttgcctctgtatttctaactaaatgttattctattagttttgaatcctggcataccctgctttactgcatttcactttattgcactttgcagatat

SEQ ID NO: 28376 - DNA, 201 bp, Homo sapiens
aataggatatatatggaagttagacttatggaaattagaagaaggggaatgagagatagtttggaattctgtggctatttaggtgactgacataaatgggrgcagaggacataatgaggttagttcttacggattcaaggcagatagtgttggtgaaacagtgagtgtcaaaattaggcgaggtggtgactgggctccctg

SEQ ID NO: 28377 - DNA, 201 bp, Homo sapiens
gatttgttggtgacactgtgtggtcctgggagcagaagtcactgtgtaaacaacactgtgctaacaaaagaggactgttcacatggctggcactagcacarcctcgagaagatgaaaagacggcacacggaatttcctgatttggggccaagatggacaacaatgactatgatattaaccgttggattttatggattttta

SEQ ID NO: 28378 - DNA, 201 bp, Homo sapiens
atagattgatttgcatatgttgaactattcttgcatctctgggataaatcccatttggtcatgatgaatgatcttcttaatgtgttgttgaatttggtttratagtattttgttgaggatttttgcatcagtattcatcagtgatattagcctttagttttccttttttttttttttcttatgtgtctttttctggttttg

SEQ ID NO: 28379 - DNA, 201 bp, Homo sapiens
aatgatcatatggttttattcgtttgttcttttggtatgatgtatcatatagattgatttgcatatgttgaactattcttgcatctctgggataaatcccrtttggtcatgatgaatgatcttcttaatgtgttgttgaatttggtttaatagtattttgttgaggatttttgcatcagtattcatcagtgatattagcct

SEQ ID NO: 28380 - DNA, 201 bp, Homo sapiens
ccccactcagtatgatacttactataggtctctcatatatggcctttattatgttgagccatgttccttttatacccagttttttgagagtttttttttttaccataaagcgatgctgaatcttatcaaatgttttttccacattaattgaaatgatcatatggttttattcgtttgttcttttggtatgatgtatcatat

SEQ ID NO: 28381 - DNA, 201 bp, Homo sapiens
ctgcgcccactgtctggcactccctagtgagataaacccggtacctcagatggaaatgcagaaatcacccgtcttctgcatcgctcacactgggagctgtrgaccggagctgttcctatttggccatcttggctcctccccctcattcttttttttatggctgaatattactccatcctgtatatgtaccacattttcttt

SEQ ID NO: 28382 - DNA, 201 bp, Homo sapiens
atcagtattggcctgcgcccactgtctggcactccctagtgagataaacccggtacctcagatggaaatgcagaaatcacccgtcttctgcatcgctcacrctgggagctgtggaccggagctgttcctatttggccatcttggctcctccccctcattcttttttttatggctgaatattactccatcctgtatatgtac

SEQ ID NO: 28383 - DNA, 201 bp, Homo sapiens
tttgctgaggagagttttacttcccagtatgtggtcaattttggaataggtgtggtgtggtgctgaaaaaaatgtatattctgttgatttggggtggagarttctgtagatgtctattaggttcgcttggtgcagagctgagttcaattcctgggtatccttgttaactttctgtctcattgatctgtctaatgttgacag

SEQ ID NO: 28384 - DNA, 201 bp, Homo sapiens
atttgctgaggagagttttacttcccagtatgtggtcaattttggaataggtgtggtgtggtgctgaaaaaaatgtatattctgttgatttggggtggagrattctgtagatgtctattaggttcgcttggtgcagagctgagttcaattcctgggtatccttgttaactttctgtctcattgatctgtctaatgttgaca

SEQ ID NO: 28385 - DNA, 201 bp, Homo sapiens
agaacatctttatttctgccttcatttcgttatgtacccagtagtcattcaggagcaggttgttcagtttccatgtagttgagcggttttgagtgagattmttaatcctgagttctagtttgattgcactgtggtctgagagatagtttgttataatttctgttcttttacatttgctgaggagagttttacttcccagta

SEQ ID NO: 28386 - DNA, 201 bp, Homo sapiens
gtcttttggtgcctgccctactttacttaacgttatgacctccagttccattcatgttgttgcaaatgaaagggtctcattctttttttttttttttttttattatactttaagttttagggtacatgtgcacattgtgcaggttagttacatatgtatacatgtgccatgctggtgcgctgcacccactaactcgtcatc

SEQ ID NO: 28387 - DNA, 201 bp, Homo sapiens
tgtcttttggtgcctgccctactttacttaacgttatgacctccagttccattcatgttgttgcaaatgaaagggtctcattctttttttttttttttttttattatactttaagttttagggtacatgtgcacattgtgcaggttagttacatatgtatacatgtgccatgctggtgcgctgcacccactaactcgtcat

SEQ ID NO: 28388 - DNA, 201 bp, Homo sapiens; identical to SEQ ID NO: 5778

SEQ ID NO: 28389 - DNA, 201 bp, Homo sapiens
acccagaaatatatgtaagaaaactattaaaataaaaatcaatctaatttcacctcccagagaaacatgactttttttttttttttttttttttttttttkgagacagagtcttgctctgtcaccaggctggagtacagtggcaccatctcggctcactacaacccctgcctcctgggttcaagtgattcccctgcctcgg

SEQ ID NO: 28390 - DNA, 201 bp, Homo sapiens; identical to SEQ ID NO: 5782

SEQ ID NO: 28391 - DNA, 201 bp, Homo sapiens
agcctcctgagtagctgggactacaggtaccatgcctggctaattttttgcatttttagtagagacggggtttcactgtgttagccaggatggtctcgatytcctaacctcgtgacccgcccgcctcggcctctgtttttatttttgttgagacagtctcactcactctgtcgcccaggctggagtgcagtggcgccatct

SEQ ID NO: 28392 - DNA, 201 bp, Homo sapiens
cagtctgaaggctgatttttcttttaatttttaccaaagtaactatgtacaaagtcataaaaataaaaactattacaaaaaagcttacattgacaaaaagktctcccttgtcacttattactgctttccagaggcaagtgcttataacttttagctctttcttgtatttgccaccaatttctttcttttttttctgttttt

SEQ ID NO: 28393 - DNA, 201 bp, Homo sapiens
aatgcaaataacttgaaaagagagcctggccaaaaaaagatttttgagccttggtagggttagtgaagcaggtttttagtacaaacacaactcaaagtatrtgtgttattaaaagtagctattttcatggaagtcttttggtactatttgttttggctagagaagtgaaaagctttcttttaaccatgtgaccattatttt

SEQ ID NO: 28394 - DNA, 201 bp, Homo sapiens
gtgtttgggattcagcacatttgtagaggtaaagcagttggttttttaaaaaattagtgccattcaggatcacttgttaaatggatattgtttaaaggacwtaattaattaatgctggggatactgttaagaaatcattctagaaactagaataaatattgccaaagtgaaacactttggttttgatacaaattattgcct

SEQ ID NO: 28395 - DNA, 201 bp, Homo sapiens
tttataatcttgagtcattgcagaggcattctttatatatagtgggggcaaggtagatattatttactgaattaaaaatgtatggtttgcaaaaaacttaytcgtatatttgtttttttcaaatctttattccacactcttcaaggatctgtccatcagatgggccttcccccattagtttctttattctaaagcttcgtc

SEQ ID NO: 28396 - DNA, 201 bp, Homo sapiens; identical to SEQ ID NO: 5760

SEQ ID NO: 28397 - DNA, 201 bp, Homo sapiens
taataattttaattgcataaaaaaaactatatgggtgcaaaggaagccaattatattgaagtagaattatcaaaatattaaaacaaatttttatatagtartatttgtacttttaatcaacccattaaattaaaaagttactaattttaaagtaattattgtgtcaatgttttgaattgtttgcaacagccatattgtcat

SEQ ID NO: 28398 - DNA, 201 bp, Homo sapiens
tcaaaatgtgatattcactcagaacttcacaatgtgaccttatttgcaaatagagcatttacaagtagagtagttaagttaaatgtggttatactggattrccataggcttaaatccaatcactggtgtccatttttttctgaatcctagtactgtttcataataaaagaaaattttagaagtagaaagataaaaatagat

SEQ ID NO: 28399 - DNA, 201 bp, Homo sapiens
agccagactctcggaggatagctaaaattttctaggagaagaaatgaggttaagcaagtgtgaagaaaattccagtagaaaaagcctaagaaggatgcagygcaatagcctatgtgagaagcaacattcagcttgataatattggctagccaagataaagttggaaaggattaggaatgtgagcctgcagaaatgggcagg

SEQ ID NO: 28400 - DNA, 201 bp, Homo sapiens
tcaaaatgagcagtggtttctgatatcagcttccaaggaagaataaggtacttctaagtcaagcgactaaattcagattcaatgctttaatccaattaatraggtaaaacaccttttacaggatttagtgttcctcaaaatgtgatattcactcagaacttcacaatgtgaccttatttgcaaatagagcatttacaagta

SEQ ID NO: 28401 - DNA, 201 bp, Homo sapiens
gttatggattgcatcaacctcactgtttcctggaactataccaataataggaagtatgattgataaaacctatggaaatttatagtatatatattaggcargcagtaaggataaacagaagccaatggtccaggtgagctgattctccaaggttcaggaaagcttcccaaaataaatggagtctcatttttgtgtggtcct

SEQ ID NO: 28402 - DNA, 201 bp, Homo sapiens
tatacatataagtacatatatacatatttatttacatatgtatataaatgtatatttacatatgtatagctatattacatatgtaaatatacatatgcaayatatattcacatgtatatacacataggtatatatgtttatatacacataggtatatatgtttatatacacatatgtatataaagatgtatatatttatac

SEQ ID NO: 28403 - DNA, 201 bp, Homo sapiens
aaaatataagtaagttaaagggaaaaaattaatagggttaaccagagatattacttaataataaaaggaaaacactataaaaatatagaaaaattatgaasctatgtaaatctatcaacataacctcaaatatacaaaacaaaaatttataaaattataagaataaatctacagaatggaaaatttcaatatacttgtccc

SEQ ID NO: 28404 - DNA, 201 bp, Homo sapiens
tacttatcttttaataatttagaaactttacagtaaaagtaactcatcatttctaaaaataaaatttagaccattagatttatgttttgataaactttgcmgtacaaataaagaaaattgaaatatttccaaataaatcaagtatcttaattcttgttgatagatttttctttccctgtcaattgtagctggcattcctgc

SEQ ID NO: 28405 - DNA, 201 bp, Homo sapiens; identical to SEQ ID NO: 5780

SEQ ID NO: 28406 - DNA, 201 bp, Homo sapiens
caacactctgttgaataggagtggtgagagagggcatccctatcttgtgcccattttcaaagggaatgcttccagtttttgcccattcagtatgatattgsctgtgggtttgtcataaatagatcatattattttgagatacatcccatcaatacctagtttattgagagttttcagcatgaagagctgttaaattttgtc

SEQ ID NO: 28407 - DNA, 201 bp, Homo sapiens
tgtcctctgcaacagggacaatttgacttcctcttttcctaattgaataccctttatttctttctcttccctgattgccctggccagaacttccaacactmtgttgaataggagtggtgagagagggcatccctatcttgtgcccattttcaaagggaatgcttccagtttttgcccattcagtatgatattgcctgtggg

SEQ ID NO: 28408 - DNA, 201 bp, Homo sapiens
gcagatttttagtgtatctagtttctgtgttattaaaaacaattttttttttttgagatggagtgtagctctatcacccaggctggagtgcagtggcgcartttcagctcattgcaacctctgcctcccaggttcaagtgattctcctgcctcagcctcccaggtagctgggattacaggcacccaccaccacacccagct

SEQ ID NO: 28409 - DNA, 201 bp, Homo sapiens
tgtatcctgagattttgctgaagttgcttatcagcttaaggagattttgggctgagatgttggggttttctaaatatacaatcatgtcctctgcaacaggracaatttgacttcctcttttcctaattgaataccctttatttctttctcttccctgattgccctggccagaacttccaacactctgttgaataggagtgg

SEQ ID NO: 28410 - DNA, 201 bp, Homo sapiens
aaagttcttaaaaatttttcataaaggtgatgtgccattagattgcttcttaagtactatatataaatatataaattatatatgcacatatatacatatayatgtctctatatgcacacacacatatgtacatacagccacacagatacatacacacacgcatacatacacacacacacactgagaaaaacaaacggtttc

SEQ ID NO: 28411 - DNA, 201 bp, Homo sapiens
acattgattcttcctatccacgagcatgaaatgttcttccatttctttgtgtcctgttttattttgctgagcagtggtttgtagttctccttgaagaggtmcttcacatcccttgtaagttggattcctaggtattttattctctttgaagcaactgtgaatggagttcactcatgatttgtctctccgtttgtctgttat

SEQ ID NO: 28412 - DNA, 201 bp, Homo sapiens
taccttttatttcccagatcttatgtgaaacctccatagcatctgaccagtgatctgaaatttccaagaagtttatattattactcaaataatttgggttstaaatactctggactaaaaaaattttatcattgaaataaagttggtggttttgatttcaattgtccagctaattgctttgctatatatatatacatatat

SEQ ID NO: 28413 - DNA, 201 bp, Homo sapiens
tgatggggatggcattgaatctataaattacctcaggcagtatggccattttcacaacattgattcttcctatccacgagcatgaaatgttcttccatttstttgtgtcctgttttattttgctgagcagtggtttgtagttctccttgaagaggtccttcacatcccttgtaagttggattcctaggtattttattctct

SEQ ID NO: 28414 - DNA, 201 bp, Homo sapiens
gtggggataaaattaaatcattcttcttcactatgagttggacctaaatagttacttatataaggcatattacataaaagtgataacatatttgttccttyggtaagtcattttgtaaataatattttatttgcatttataggtatttataacttacctccaatatgtattggatatataattggtggtttaattatgaag

SEQ ID NO: 28415 - DNA, 201 bp, Homo sapiens
gaaagtcattggtagcttgatggggatggcattgaatctataaattacctcaggcagtatggccattttcacaacattgattcttcctatccacgagcatraaatgttcttccatttctttgtgtcctgttttattttgctgagcagtggtttgtagttctccttgaagaggtccttcacatcccttgtaagttggattcc

SEQ ID NO: 28416 - DNA, 201 bp, Homo sapiens
tcacttattgggaagggttcagagaggaagagccagtagcagcaagacatgaaatgtaaatacacttgacagcaacaggctcagcaaagtgactctctaaagtaccttgaactgggtgtggtggctcatgcctttaattccagcactttgggatgctgaggagtgaggatcacttgaggccaggagttcaagaccagcctg

SEQ ID NO: 28417 - DNA, 201 bp, Homo sapiens
tttaagtctttaatcccacttgaactgatttttgtataaggtgtaaggaagggatccagtttcagctttctacatatggctagccagttttcccagcaccrtttattaaatagggaatcctttccccatttcttgtttttgtcaggtttgtcaaagatcagatggttgtagatgtgtggtattatttctgagggctctatt

SEQ ID NO: 28418 - DNA, 201 bp, Homo sapiens
ttcctatttctccacatcctctccagcacctgttgtttcctgactttttaatgattgccagtctaactggcatgagatggtatctcattgtggttttgatktgcatttctctgatggccagtgatgatgagcattttttcatgtgtctgttggctgcataaatgtcttcttttgagaagtgtctgttcatatccttcaccc

SEQ ID NO: 28419 - DNA, 201 bp, Homo sapiens
atgtcatgtcttttttttttaatgcagagtgtacaaaggaagttaaatcattaatgtgggtgtacgtcctagtaggcaatattgtacgtggaatgggtgamactcccatcctgcctttgggtatttcctatatagaagattttgccaaatttgaaaattctcctttatatattggtaagtatggaaatctaccttagcttc

SEQ ID NO: 28420 - DNA, 201 bp, Homo sapiens
ttcacttattgggaagggttcagagaggaagagccagtagcagcaagacatgaaatgtaaatacacttgacagcaacaggctcagcaaagtgactctctaaagtaccttgaactgggtgtggtggctcatgcctttaattccagcactttgggatgctgaggagtgaggatcacttgaggccaggagttcaagaccagcct

SEQ ID NO: 28421 - DNA, 201 bp, Homo sapiens
ttgccccactgtcttccacaatggttgaactactttacagtcccaccaacagtgtaaaagtgttcctatttctccacatcctctccagcacctgttgtttmctgactttttaatgattgccagtctaactggcatgagatggtatctcattgtggttttgatgtgcatttctctgatggccagtgatgatgagcatttttt

SEQ ID NO: 28422 - DNA, 201 bp, Homo sapiens
acattgtcctcattactttcttaaaataaactcattttccctgtgtttatacagatatgaatatgaatctacagtttcagtttcaggcaacttgtcctcawacagtttcttgtgtatggaaaatggaacccagattttaagaccaacgcaggatccatcaggttgtctacttcattgtattgatttttgttcagcgaactt

SEQ ID NO: 28423 - DNA, 201 bp, Homo sapiens
ttactctttttggttccagttcaaggattctatgttcctcctaatttaattttttggtccccctagtggttttaggtgtctctgcagccacacacattcgrcttttcctgcaaccacactaacctcagtggttttagcctaacttgggtttttcctgggatctttccactgtttttaaaagtcaatatcccaggctacttg

SEQ ID NO: 28424 - DNA, 201 bp, Homo sapiens
gagaacttgagcctgaatggtagcagtgtgaccaagaacatttactagaagcaggccacacattactagaggcaggccacacattactagaagcaggccamacattactagaggcaggccacacatttggctctgtgctttttctaacaggaatcatttttgattaaatcatttacatagtccttagaatgtaccaaatga

SEQ ID NO: 28425 - DNA, 201 bp, Homo sapiens
ccatcaggttgtctacttcattgtattgatttttgttcagcgaacttataactaaacactttctgctgaggggcttgaatgagatattgattgagttagayaaataaacaaagatatgttctctctccaggaacttccaaaggagttacaatgggcaataagaatagctaataataaagaatgttatttttcttatatttg

SEQ ID NO: 28426 - DNA, 201 bp, Homo sapiens
atatatatatacacgtatatatatacacatatatgtgtgtgtatatgtgtgtgtgtatatatatacgtgtgtgtgtatatatatatatatatatacacacrtatatatatggtcccatttgctcaaaaaaccgattttacagagaacataggttgaattgaaacaaaatgaacaagcaaatttaaactaagaacaaaagta

SEQ ID NO: 28427 - DNA, 201 bp, Homo sapiens
acacgtatatatatatacacgtatatatatacacatatatgtgtgtgtatatgtgtgtgtgtatatatatacgtgtgtgtgtatatatatatatatatatwcacacgtatatatatggtcccatttgctcaaaaaaccgattttacagagaacataggttgaattgaaacaaaatgaacaagcaaatttaaactaagaaca

SEQ ID NO: 28428 - DNA, 201 bp, Homo sapiens
cacgtatatatatatacacacacgtatatatatatacacgtatatatatacacatatatgtgtgtgtatatgtgtgtgtgtatatatatacgtgtgtgtgkatatatatatatatatatacacacgtatatatatggtcccatttgctcaaaaaaccgattttacagagaacataggttgaattgaaacaaaatgaacaag

SEQ ID NO: 28429 - DNA, 201 bp, Homo sapiens
cacatggctggcactagcacagcctcgagaagatgaaaagacggcacacggaatttcctgatttggggccaagatggacaacaatgactatgatattaacygttggattttatggatttttattgaataaatggaatagattttgttaatttgtttattttcctccatgaagatgtttgaaatgtatctgaaaatataaaa

SEQ ID NO: 28430 - DNA, 201 bp, Homo sapiens
gtggtcttcatttccttcagatcccttttgttaaaaaatatcttttaatgtttatatttcttttttatttttattttattattttacttaaggttctaggktacatgtgcacaatgtgcaggtttgttacataggaatacgtgcgccatgttgttgtgctgcacctgtcaactcgtcatttacattaggtatatctcctaa

SEQ ID NO: 28431 - DNA, 201 bp, Homo sapiens
aaacaacttctacaatcatatttttaattttcaagagatcttgctttctgaatcttcttttatagcatcctgcttttgtttcattgatgtaatatccatcsttatctctgaggatgctatttacagctttctcttttctggtttcttttcaaaattctccttctgttgtggtcttcatttccttcagatcccttttgttaa

SEQ ID NO: 28432 - DNA, 201 bp, Homo sapiens
taatctctttaattatttaacttctatgaaatttcctaatctaccaacttttccataaaaaaacaacttctacaatcatatttttaattttcaagagatcktgctttctgaatcttcttttatagcatcctgcttttgtttcattgatgtaatatccatcgttatctctgaggatgctatttacagctttctcttttctgg

SEQ ID NO: 28433 - DNA, 201 bp, Homo sapiens
ccattttctctgctttcctctcccaaaacgcttttattaatcttgtgtttatatatattttcactatttttaatctctttaattatttaacttctatgaartttcctaatctaccaacttttccataaaaaaacaacttctacaatcatatttttaattttcaagagatcttgctttctgaatcttcttttatagcatcct

SEQ ID NO: 28434 - DNA, 201 bp, Homo sapiens
atacaagcaccctccctctaggcctaaggactgttgtggaagaggtgggtgtgtgagattgtaagggctaggtttgaggaagtgaattagttcagatcatycaaaccaaggatgggtacacgatgcctaaacagctggtaaaacaaagttttttgccctctgagctattatgaggcatcttttcatccagcccaaccatga

SEQ ID NO: 28435 - DNA, 201 bp, Homo sapiens
cattcttccattttaaaaatactgttctagttttcttgatttacgtccttattttgatggaacatatactgcagtagcttcctgagaatggacacatgaamgactgagaccttttgtttctgagcatagttctaaacacattatttttattcagaattataaaggcattatttcattgtattctaaccgctaatgtggcta

SEQ ID NO: 28436 - DNA, 201 bp, Homo sapiens
acctttctctccaagttctcccaaatttggaaaccgtgagtattctggttttatgacaatatagttatttgcataagtttagtaagagtcttttgttttawaacaggacaattggagacactgattattttaccaagtctttgactagaataacatatttgcaggtaaatttccagcaaagccaacttaaaaagagcctat

SEQ ID NO: 28437 - DNA, 201 bp, Homo sapiens
gataatatttccttcttatttccaacttcccctctcactgcccattctcatggaaatctttctcctatagcctctgaccttctgcttttctccaaactgaytgctttctaggattgctacgtagttgtttttatccttttgctttcatattgagaaatactcccatcattcttccattttaaaaatactgttctagttttc

SEQ ID NO: 28438 - DNA, 201 bp, Homo sapiens
aacctccgcctcctgggtttaagcgattctcctgccttagcctcctgagtagctgggattacaggcacatgtcaccacccccggctaatttttgtattttyagtagagacagggtttcaccatgttggtcaggctggtctcgaactcctgaccttgtgatctgcctgcctcggcctcccaaagtgctgggattacaggcaa

SEQ ID NO: 28439 - DNA, 201 bp, Homo sapiens
agggtagaagctgaagggctagtagggacaaattctccacttcatatccatttgtggagcatttattagggcttatggtaaaagactgggagcacttcccratgacaaatactagactagagaatttccagttgagggacatttactgccttgttatggaatgttaactgaagctacccctttgctaaaggaaataatggt

SEQ ID NO: 28440 - DNA, 201 bp, Homo sapiens
tagtagagacagggtttcaccatgttgaccaggctggtctcgagctcctgacctcaggtgatccgtctgccttggcctcccagtgtgctgggattacaggrgtgagccactgcgcctgaccaataaaataggtattaataagaaaaagtgatgagtaaagtgccagtgaccagaaatgggctcctgtgtaggctgccagct

SEQ ID NO: 28441 - DNA, 201 bp, Homo sapiens
aaatatcttgtgaaaattggtattgtatctgattgggggatgtttctcctatcaagtactatgaaactgaagtcatgtaaatgtgccctttgaggaatgtkaattggacacactaaatggaaactagtaagattgcctgagcctacacaatgtagggtagaagctgaagggctagtagggacaaattctccacttcatatc

SEQ ID NO: 28442 - DNA, 201 bp, Homo sapiens
taaaatggtctgggggtagaaaagaaaagttcctcaaaccagaacataaaaatgtacaggttgataggattatgaaatttgagatgtctaaacagcctttatgtaaggtaattttaacttcttcacctaaatatcttgtgaaaattggtattgtatctgattgggggatgtttctcctatcaagtactatgaaactgaagt

SEQ ID NO: 28443 - DNA, 201 bp, Homo sapiens
ttaagtgctacatgggcactccaggtgacattactaccacagaatcacagactgatcaaatttgctgtcctcatgggtcttacagatgcttaataaaacaytggggtaattaacaaagaataatgagaaaggcaaaagggagtcagaggactcaccccagagggtgattaaaatatttggacgttttataagaaatgaaat

SEQ ID NO: 28444 - DNA, 201 bp, Homo sapiens
tatcacatggtaaatttggaggttaagtgctacatgggcactccaggtgacattactaccacagaatcacagactgatcaaatttgctgtcctcatgggtyttacagatgcttaataaaacactggggtaattaacaaagaataatgagaaaggcaaaagggagtcagaggactcaccccagagggtgattaaaatatttg

SEQ ID NO: 28445 - DNA, 201 bp, Homo sapiens
tatttgttctcataatttgttgattttgttaggttttctatgtaggtttttcaatgtgcaaatatgacaagttttgtcttttcacttccaaaccttacacmtctgagacttctaaaattctcttatagcataaattaaaacctccaagatttatttaactgtagttgtgatagtgagtattcttgttcttttctaatctta

SEQ ID NO: 28446 - DNA, 201 bp, Homo sapiens
gactcccaagtccattggctctgagcccagctcagcactagaacttgcctaggagttgtagtccttgcaacctagactgcctttcaagtttatttagggaragcacgtttgcccatggtggcgaggcttgctggaactcaagttctaactgtggggctgggtgattactttctggtgatagctagtctaaatgctccctcc

SEQ ID NO: 28447 - DNA, 201 bp, Homo sapiens
tatcacagaacagcatgggaaaacccacccctatgatccaattacttcccagtgggtccctctcacagcatgtggggattatgggagctactattcaagawgagattttggtggggacacagccaaaccatatcacatggtaaatttggaggttaagtgctacatgggcactccaggtgacattactaccacagaatcaca

SEQ ID NO: 28448 - DNA, 201 bp, Homo sapiens
cagtgtttgcttgtctgggaaaatctttatttcttctttatgtttggaggatattttcaccagatataaaggtaaaagtttttttccttcagcactttaartatgtcatgccactctctcttggcctgtaaggtttccaccgaaaagtctgctgccagttgtattggcgctccattgtatgttagtcacttcgtttctctt

SEQ ID NO: 28449 - DNA, 201 bp, Homo sapiens
gccattggataaaatgttctgtaagtatttattaggttcatttggtttataatttggatgaaatccaatgtttctttgtttatttatttatttttttttttggtctggaagatctgtccaatgctgaaagtgaggtgtgaattcttcagctattattgtattaggctctatctctctctttagctataataatatttgctt

SEQ ID NO: 28450 - DNA, 201 bp, Homo sapiens
attcatatttgtattctgtagccattggataaaatgttctgtaagtatttattaggttcatttggtttataatttggatgaaatccaatgtttctttgttkatttatttatttttttttttggtctggaagatctgtccaatgctgaaagtgaggtgtgaattcttcagctattattgtattaggctctatctctctcttt

SEQ ID NO: 28451 - DNA, 201 bp, Homo sapiens
tgagaaatacttgcagcttcaggatgcccattgcttctcaaattttctgcaaagaataatccagcactgaaatcaagagatttcttacagttctaattgaygtaattttaaattagagcttagtttttaaaagaaacatctttttaaaacgtaatttacaaggatcaaaatttttattgatacagtcccttaatattgtcc

SEQ ID NO: 28452 - DNA, 201 bp, Homo sapiens
gtttcaatcctgaatccatcctgactatgtgatcttagataagtcagctcattttctttctttcttttttcgtttcttttctttctttttttttttttttttgagacggagtttcttctgtcgcccaggctggagtgtagtggcatgatcttggctcactgcaacctctgcctcccaggttcaagcgactctcccgtctca

SEQ ID NO: 28453 - DNA, 201 bp, Homo sapiens
acacgtatatatatatacacacacgtatatatatatacacgtatatatatacacatatatgtgtgtgtatatgtgtgtgtgtatatatatacgtgtgtgtrtatatatatatatatatatacacacgtatatatatggtcccatttgctcaaaaaaccgattttacagagaacataggttgaattgaaacaaaatgaacaa

SEQ ID NO: 28454 - DNA, 201 bp, Homo sapiens
ttagttgtatacggaacaaagaaaataggacaatcccatttggattttggaagaaaaaaaagatgtgctaccagcaatctttcagtgttggaaatatttartaagtgtattgaattttttttaactttcttccagttaaaaccttaaaaaacaaaataaaacaaagcaaaagtatctcataatgggtagggtaaagattgt

SEQ ID NO: 28455 - DNA, 201 bp, Homo sapiens
tacacacacacatatatatatgagagagaggagagagagggtcatgtatatatatacacacacgtatatatatatatacacgtatatatatatacacacamgtatatatatatacacgtatatatatacacatatatgtgtgtgtatatgtgtgtgtgtatatatatacgtgtgtgtgtatatatatatatatatatacac

SEQ ID NO: 28456 - DNA, 201 bp, Homo sapiens
taatcttcaagaaaactattcaagatagatattactatccgttttacaaagggagtataagatgccacactctatcaacttaatcacactgtattaaattataaatttatattaaaataatttgttttttcattattcctagagtaaatgtattcaaccaatatgtattgtgcatctgttataggcacataatgggcttaa

SEQ ID NO: 28457 - DNA, 201 bp, Homo sapiens
gccacacatttggctctgtgctttttctaacaggaatcatttttgattaaatcatttacatagtccttagaatgtaccaaatgaatcagcatctctgaggrtgggacctggatgttggtattttaaaaaatatctccaggtagatcttgctgagaaccaatggcagaaccactgaaactgttgttctgaagaagcaaaaaa

SEQ ID NO: 28458 - DNA, 201 bp, Homo sapiens
acacatatatacacatatatatgtacacacacacatatatatatgagagagaggagagagagggtcatgtatatatatacacacacgtatatatatatatacacgtatatatatatacacacacgtatatatatatacacgtatatatatacacatatatgtgtgtgtatatgtgtgtgtgtatatatatacgtgtgtgtg

SEQ ID NO: 28459 - DNA, 201 bp, Homo sapiens
ctaatcttcaagaaaactattcaagatagatattactatccgttttacaaagggagtataagatgccacactctatcaacttaatcacactgtattaaattataaatttatattaaaataatttgttttttcattattcctagagtaaatgtattcaaccaatatgtattgtgcatctgttataggcacataatgggctta

SEQ ID NO: 28460 - DNA, 201 bp, Homo sapiens
tcacatcatcagtctccaaattttcctaactttcatgctttgcttcccttttaaacataagttccaatttcaaaccatatctttgtgaattaataaaactkaatgctcttaagagcacccaagtcacttcttgaaagctttagtttgaaatttcttccaccagataccttaaattatgtctcttaagttcaaagttccact

SEQ ID NO: 28461 - DNA, 201 bp, Homo sapiens
cacacatatatacacatatatatgtacacacacacatatatatatgagagagaggagagagagggtcatgtatatatatacacacacgtatatatatatatacacgtatatatatatacacacacgtatatatatatacacgtatatatatacacatatatgtgtgtgtatatgtgtgtgtgtatatatatacgtgtgtgt

SEQ ID NO: 28462 - DNA, 201 bp, Homo sapiens
ctctgaaaccattatcccatctaaacatacaatttatgggaattccttaatataaatattcattcagcattcacgttttccagttgtctacaaaaaaaaaatttaactggtttgttggattcaggatctaaacaagattgcatttggttgctctgtgtgactctttaatttacaattttctgtccgttatttttcacatta

SEQ ID NO: 28463 - DNA, 201 bp, Homo sapiens
tctaatcttcaagaaaactattcaagatagatattactatccgttttacaaagggagtataagatgccacactctatcaacttaatcacactgtattaaattataaatttatattaaaataatttgttttttcattattcctagagtaaatgtattcaaccaatatgtattgtgcatctgttataggcacataatgggctt

SEQ ID NO: 28464 - DNA, 201 bp, Homo sapiens
cctatggtactacttgaaaataaatattataatttggaagctgaaatatttcagatcagcatttgtgtaaacttttatgtcagtcttggcactctcctctctctctctctttcatatatatatacacacacatatatatgtacacacacatatatatatacacacatatatacacatatatatgtacacacacatatatct

SEQ ID NO: 28465 - DNA, 201 bp, Homo sapiens
ttctaatcttcaagaaaactattcaagatagatattactatccgttttacaaagggagtataagatgccacactctatcaacttaatcacactgtattaaattataaatttatattaaaataatttgttttttcattattcctagagtaaatgtattcaaccaatatgtattgtgcatctgttataggcacataatgggct

SEQ ID NO: 28466 - DNA, 201 bp, Homo sapiens
tcctatggtactacttgaaaataaatattataatttggaagctgaaatatttcagatcagcatttgtgtaaacttttatgtcagtcttggcactctcctctctctctctctttcatatatatatacacacacatatatatgtacacacacatatatatatacacacatatatacacatatatatgtacacacacatatatc

SEQ ID NO: 28467 - DNA, 201 bp, Homo sapiens
tttctaatcttcaagaaaactattcaagatagatattactatccgttttacaaagggagtataagatgccacactctatcaacttaatcacactgtattaaattataaatttatattaaaataatttgttttttcattattcctagagtaaatgtattcaaccaatatgtattgtgcatctgttataggcacataatgggc

SEQ ID NO: 28468 - DNA, 201 bp, Homo sapiens
ttcctatggtactacttgaaaataaatattataatttggaagctgaaatatttcagatcagcatttgtgtaaacttttatgtcagtcttggcactctcctctctctctctctttcatatatatatacacacacatatatatgtacacacacatatatatatacacacatatatacacatatatatgtacacacacatatat

SEQ ID NO: 28469 - DNA, 201 bp, Homo sapiens
cttcctatggtactacttgaaaataaatattataatttggaagctgaaatatttcagatcagcatttgtgtaaacttttatgtcagtcttggcactctcctctctctctctctttcatatatatatacacacacatatatatgtacacacacatatatatatacacacatatatacacatatatatgtacacacacatata

SEQ ID NO: 28470 - DNA, 201 bp, Homo sapiens
tcttcctatggtactacttgaaaataaatattataatttggaagctgaaatatttcagatcagcatttgtgtaaacttttatgtcagtcttggcactctcctctctctctctctttcatatatatatacacacacatatatatgtacacacacatatatatatacacacatatatacacatatatatgtacacacacatat

SEQ ID NO: 28471 - DNA, 201 bp, Homo sapiens
taaatctctgagttgcccacaatcccacaattttttttagctcttcttatatcattataactagttttccatataatatccctctattaaattatctattrtgagttctattttcctatcaggaccttgacaaagatagagactgtcttcattttgtagaaatattaagtaacttgtacaaaaacacacggctagtttaaa

SEQ ID NO: 28472 - DNA, 201 bp, Homo sapiens
tttatggggacatttttattctggattcatgttcgtggaaattgcagtagtccacaagggtgggaatttcatgaccatcattgagtcaggaaaccaaaacagtttcaaaaatttgaaaaatgtctgtctcagaagaagccaaagaacccccatgggggaaacaaaggaaaacaatgacattaatagtggcctgtgttctct

SEQ ID NO: 28473 - DNA, 201 bp, Homo sapiens
aatgaaatagttatagggctaaaaactcaatgtccaggagccagtggatatgcataatctgggactcaaatgcaatggatttatctcattgtgtttacctkgtgtggggagtatttcattatctctatctctaagtagagatagcctaagagtaaatatttaataatctcatgtgaaactgttttttttttaaattttact

SEQ ID NO: 28474 - DNA, 201 bp, Homo sapiens
tgaatttctcctcagaaaatgggtttttccttttttatcacatcatcagtctccaaattttcctaactttcatgctttgcttcccttttaaacataagttycaatttcaaaccatatctttgtgaattaataaaactgaatgctcttaagagcacccaagtcacttcttgaaagctttagtttgaaatttcttccaccaga

SEQ ID NO: 28475 - DNA, 201 bp, Homo sapiens
tggatctaccattctgggatctggaggatggtggccctcttctcacagctccaccaggcagttccccagtggagactctgtgtgggggcttcaaccctacrtttcccttccacactgccctagcagaggttctccatgagggtcctgcctctgcagcatacctctgcctggacatccaggtgtttccatacatcctctgaa

SEQ ID NO: 28476 - DNA, 201 bp, Homo sapiens
ctcatgtccgcacatttcaaaaccaatcatgccttcgcaacagtcccccaaagtcttaactcatttcagtattaacccaaaagtcctaacttaggagccakcaaaaaaaatcaaaagcaagttagttacttcctagatacaatggggatacaggcattgagtaaataaacccattccaaatgtgaaaaattaaccaaaatg

SEQ ID NO: 28477 - DNA, 201 bp, Homo sapiens
aacaggcaatcccaccacctctacctgctcacgccaggagaatccataactgcctagaggcctgagacccctacaagtagtaaggtgaataggcatctatycagcctagcagtaggattgatgtctgtccagcctggaagaggggcactaggtgactccctccccttctgttgtaaatactataattatcagataatttaa

SEQ ID NO: 28478 - DNA, 201 bp, Homo sapiens
tttttttcttttcttttttttttgagacggagtctcactctgtcgctcaagttagagtgcagtggcgcgatcttggctcactgcaacctctgcctcctggktttaagcaattcttctgcctcagcctcctgagaagttgggactacagtctcacaccaccacacccagctaatttttgtatttttagtagagacgggattt

SEQ ID NO: 28479 - DNA, 201 bp, Homo sapiens
atttaagtctttcatcgattttgattgatttttgaatatggcaagaaatatgggtctagtttcactcttctgcttatggaaattccattttccctgcaccrtttattgaagagactgtcttttccccaatgtacattcttggcatctttgtcaaaaatgagttcaccatagatgaatggattttttttcagagttctctat

SEQ ID NO: 28480 - DNA, 201 bp, Homo sapiens
atgctcccgaggagttagctctctaaatgcataaggagatgcaaactaataaaaaaaaaaaaagcaaaaatattcaatcccttggttattgttatctgtarttgctaaatgaatgtacaagaatgctgggttgatccttaaggctggatcaggcccagaggtgggtctgtcccagctcaagccactagactccaagctacc

SEQ ID NO: 28481 - DNA, 201 bp, Homo sapiens
tacaaaagataaaattcattagaatttagagatggattatgctcccgaggagttagctctctaaatgcataaggagatgcaaactaataaaaaaaaaaaaagcaaaaatattcaatcccttggttattgttatctgtaattgctaaatgaatgtacaagaatgctgggttgatccttaaggctggatcaggcccagaggtg

SEQ ID NO: 28482 - DNA, 201 bp, Homo sapiens
tgtggttacctatggtagggagatgcagctgagctacattcaattacaaaagataaaattcattagaatttagagatggattatgctcccgaggagttagytctctaaatgcataaggagatgcaaactaataaaaaaaaaaaaagcaaaaatattcaatcccttggttattgttatctgtaattgctaaatgaatgtaca

SEQ ID NO: 28483 - DNA, 201 bp, Homo sapiens
tgtgtaataaccatattagggtagatggggtatccattccctcaagcatttatcctttgtgttacaagcaattcatttatactcttttagttattttaaartgtacgagtaaattattttccactatagtcactctaatacactatcaaatagtaggtttaattcattctttccattttttcgtacctattaactatctct

SEQ ID NO: 28484 - DNA, 201 bp, Homo sapiens
ggcaaaagttaaacggttcagtcctacaagactgcccccactttagatgtcaatcacaaaatcacaagtccagacaccctgggctgcttttttttttttttaccctgggcttctgactgacaaacgatgcattaaggttgatgcctccattttctagaatggttcacagaactcagggaagaaacacttttcttacattta

SEQ ID NO: 28485 - DNA, 201 bp, Homo sapiens
aaactttacagtaaaagtaactcatcatttctaaaaataaaatttagaccattagatttatgttttgataaactttgccgtacaaataaagaaaattgaartatttccaaataaatcaagtatcttaattcttgttgatagatttttctttccctgtcaattgtagctggcattcctgcacctatatattttggcgcttta

SEQ ID NO: 28486 - DNA, 201 bp, Homo sapiens
cgtcaccttgatttaattactttggccttgcaaatgttaatatctcatatggtaactttgcctcacccacctgccatcttcacttttcctttattctttcwttctcaaacttattttgctgtctgtggatctttatatcttcataagaattttgactgagtttgtgtagattccatagattacttggagaaaatctgacat

SEQ ID NO: 28487 - DNA, 201 bp, Homo sapiens
ttattctgctccacagatttatttgcctgttcccataccagcgtcaccttgatttaattactttggccttgcaaatgttaatatctcatatggtaactttkcctcacccacctgccatcttcacttttcctttattctttctttctcaaacttattttgctgtctgtggatctttatatcttcataagaattttgactgag

SEQ ID NO: 28488 - DNA, 201 bp, Homo sapiens
ttttatggggacatttttattctggattcatgttcgtggaaattgcagtagtccacaagggtgggaatttcatgaccatcattgagtcaggaaaccaaaacagtttcaaaaatttgaaaaatgtctgtctcagaagaagccaaagaacccccatgggggaaacaaaggaaaacaatgacattaatagtggcctgtgttctc

SEQ ID NO: 28489 - DNA, 201 bp, Homo sapiens
aacttttatgctctgtcatctcttgaatgctttgctgcttagaaattttttccaccagataccctaaatcatctctctcaagttcaaaattctctagggcmggggcaaaaagccagcagtctctttgctaaagcatagcaagagtcacctttgctctagttcccaagaagttcctcatctccatctgagaccacctcagcc

SEQ ID NO: 28490 - DNA, 201 bp, Homo sapiens
ctgctaagagacttgtataatcttctggttatacttggtctggagatgactctgatgactcaacatttttatggggacatttttattctggattcatgttygtggaaattgcagtagtccacaagggtgggaatttcatgaccatcattgagtcaggaaaccaaaacagtttcaaaaatttgaaaaatgtctgtctcagaa

SEQ ID NO: 28491 - DNA, 201 bp, Homo sapiens
gtttttcttttctactgcaatgtcaggctgcaagttttccaaacttttatgctctgtcatctcttgaatgctttgctgcttagaaattttttccaccagawaccctaaatcatctctctcaagttcaaaattctctagggcaggggcaaaaagccagcagtctctttgctaaagcatagcaagagtcacctttgctctagt

SEQ ID NO: 28492 - DNA, 201 bp, Homo sapiens
aaagtcttaactcatttcagcattaactcaaaagtccaagtccaaagtcttatcagagataaggcaaatcccttttgtctatgagcctgcaaaatcaaaascaagttacttcctagatacaataggggtacagacattgggtaaatatacccattccaaatgggagaaattggccaaaacaaaggggctacaggcccaaca

SEQ ID NO: 28493 - DNA, 201 bp, Homo sapiens; identical to SEQ ID NO: 5756

SEQ ID NO: 28494 - DNA, 201 bp, Homo sapiens
tttagtggaggaagtcactgcagatgtggaaagagaaagagaactagaatttaagatggaacctgaagatgtgacttaattgctgcaatctcataataaarcttgaataaatgaagactttctgtttatggacaagcaaataatgtggcttcctgtgatggaatctactactgatgaagagcctgtgaaaactgttgaaat

SEQ ID NO: 28495 - DNA, 201 bp, Homo sapiens
aaatcatatcattctgcccctggtccctcccaaatcttatgtcctcacatttcaaaacacaatgtgcccttccaacagtcccccaaagtcttaactcatttcagcattaactcaaaagtccaagtccaaagtcttatcagagataaggcaaatcccttttgtctatgagcctgcaaaatcaaaagcaagttacttcctaga

SEQ ID NO: 28496 - DNA, 201 bp, Homo sapiens
tcaagtcttattatgtaagacacacagtttgtaaggatattgctgttataaatagtgattcttctgatggatctaagtaacataaattgaaaaccttctcraaagaattcactattctacattccactaggaaaaggagaggagggcaaaatctcaacattaacaggaattttgaaaagttgactcaaatcctcttagata

SEQ ID NO: 28497 - DNA, 201 bp, Homo sapiens
aaaatttttacagaagaatatgttagttattagaatctttcattttgccaatttctgagatatataccttacaattttatctagattgaaaaaaggattastaaccgtatctgtttatctcttacagtcacctggtttttgaagctacaagtagattatatcagcctaaaaaaattaaattgggcattgtctattgcagaa

SEQ ID NO: 28498 - DNA, 201 bp, Homo sapiens
ctgctaacacaacatccattgtgtggccacaaatcaggagtaacttggactttcaagtcttattatgtaagacacacagtttgtaaggatattgctgttayaaatagtgattcttctgatggatctaagtaacataaattgaaaaccttctcgaaagaattcactattctacattccactaggaaaaggagaggagggcaa

SEQ ID NO: 28499 - DNA, 201 bp, Homo sapiens
gacttattcactatcatgagaacagtgtgggaataacccacctccatgattcaattacctcccacctggcccctcccgcaatatgtgggggttatgggagygacaattcaagatgagattttggtggggacacagccaaaccatatcactagggattgttatatgctaagggctttttatacattatttcatcctcatatc

SEQ ID NO: 28500 - DNA, 201 bp, Homo sapiens
caccttgttcaggaatagcttgctctaactgcagtatgtctccctgcacttttctttttcttttttttttgttttttgttgtgtgtgtgtgtgtgtgtgtkcgtgtgttatttttgagacagtgtctctctctgtcacccaggctggagtgtggtggtacgatcacagctcacttgcagcctctacctcctgagctaaaga

SEQ ID NO: 28501 - DNA, 201 bp, Homo sapiens
tcttcctcttcttcttctcctcctcttcttcttcctcttcttcttctcctcctccctcctcctcttcttctcctcctcctcctcttcctcctcctcctccttcttcttctccttctcattctccctctccttcttctttcttctttttgagatggagtctcatgctgttgctcaggctcgagtgcagtggcgtgatctcag

SEQ ID NO: 28502 - DNA, 201 bp, Homo sapiens
tttgtggaggtggccgtatcaccttgttcaggaatagcttgctctaactgcagtatgtctccctgcacttttctttttcttttttttttgttttttgttgkgtgtgtgtgtgtgtgtgtgcgtgtgttatttttgagacagtgtctctctctgtcacccaggctggagtgtggtggtacgatcacagctcacttgcagcct

SEQ ID NO: 28503 - DNA, 201 bp, Homo sapiens
ttcttcctcttcttcttctcctcctcttcttcttcctcttcttcttctcctcctccctcctcctcttcttctcctcctcctcctcttcctcctcctcctccttcttcttctccttctcattctccctctccttcttctttcttctttttgagatggagtctcatgctgttgctcaggctcgagtgcagtggcgtgatctca

SEQ ID NO: 28504 - DNA, 201 bp, Homo sapiens
cttcttcctcttcttcttctcctcctcttcttcttcctcttcttcttctcctcctccctcctcctcttcttctcctcctcctcctcttcctcctcctcctccttcttcttctccttctcattctccctctccttcttctttcttctttttgagatggagtctcatgctgttgctcaggctcgagtgcagtggcgtgatctc

SEQ ID NO: 28505 - DNA, 201 bp, Homo sapiens
gacctccacaggctcaggtgatcctctcacttcagcctctccagtggctgaaactacaggcatgtgccactatgcctggctaatttttgtatatatatatwtttttttggtagagacaggatttcaccatattgccctggctggtcctgaactcctgggttcaagcaatgcgcctgcctcagactctcaaaatgttgggat

SEQ ID NO: 28506 - DNA, 201 bp, Homo sapiens; identical to SEQ ID NO: 5784

SEQ ID NO: 28507 - DNA, 201 bp, Homo sapiens
tgtatgtctgttatagctatatgtttatatgtgtcatgtagaagtaatatttcactaccaaattatattaaagacctctaatcacttggctaaaagaaaartaagtgcttttcagactgaaggaagctaccaaagatgccttttaattcatatgaccttagtagttttgggtaagactaatctggtaaatttaatctcaaa

SEQ ID NO: 28508 - DNA, 201 bp, Homo sapiens
ctacaagtgtgcaccacaaagccaagcttttttatttatttatttatttattttgtattatttatagagatggagtgtcacatgttgcccaggctggtctygaacacctagactaaaatgatctgtctgccttagtctcccaaagtgctaggattacaggcatgagccatggtgtctggcctttttaagttaatagttgaa

SEQ ID NO: 28509 - DNA, 201 bp, Homo sapiens
gcctggaatggtaactctctccttcaactttgtttggctcctgtaactttttacttttattttattttttttgaggcagggcctcactctgtcacccaggytggagtgcagtggcacaatctcagttcactgcaccctcaacctcccaggctcaagaaatcctcccctcagccttctgagtagctggaactacaagtgtgc

SEQ ID NO: 28510 - DNA, 201 bp, Homo sapiens
taaataaatcttctttcaactacaccagtctttgtgcctagtaaacaatcctgaacataatttgcattttttctctctttttcttcttcttttggagctckaaagtagagttcagttaatcacaatgctcaagtcataacacattatcatcataggccagtgcaaggattctctcttattttacttcatttatttatttat

SEQ ID NO: 28511 - DNA, 201 bp, Homo sapiens
ttctgttgcagcttcctgtcttaaaaacacaattgttctttcattttcttttcttccacactatttctccttcccccttcactgtctggtaccaaaaaaaatctagagaagccatcaaatgacttgaaccccttaaaacactcagaacaaaggcatcactcaccctttctttctctgtggagtttcaagagtcatgggcag

SEQ ID NO: 28512 - DNA, 201 bp, Homo sapiens
ctaaaactaggaaattgcagagccagttttcaaatttaggtatattaaataaatcttctttcaactacaccagtctttgtgcctagtaaacaatcctgaasataatttgcattttttctctctttttcttcttcttttggagctctaaagtagagttcagttaatcacaatgctcaagtcataacacattatcatcatagg

SEQ ID NO: 28513 - DNA, 201 bp, Homo sapiens
gccatcagctgagctcatcccccgtgcactccacaacgctgaggctctgcacatggctcaccagtgccaggtgctgccagtcagcagtgccgtgctgtttscacagcagcctgcatacgtctatattgcccagcccgtttcacctggcggggtcacacaaaccaccccctggtattgttagcacgtccacataatggcatc

SEQ ID NO: 28514 - DNA, 201 bp, Homo sapiens
acgctgaggctctgcacatggctcaccagtgccaggtgctgccagtcagcagtgccgtgctgtttgcacagcagcctgcatacgtctatattgcccagccygtttcacctggcggggtcacacaaaccaccccctggtattgttagcacgtccacataatggcatctccacagctgtgtcatccagaagaaacccatagcc

SEQ ID NO: 28515 - DNA, 201 bp, Homo sapiens
actgaccaggggctgctgtgaatgctgtttggagaaatcggggctgggggtaggcagggttatgttttgaatttctgagaccagagcttctttctgtggcrttgtaacagctgtgctttgcctcctagagtcttagagagcctccttgtgtctctggtaaccaccgtggtggtgtttgtggcctcgatggtgttaggagaa

SEQ ID NO: 28516 - DNA, 201 bp, Homo sapiens
taaccttgcatgagtttaccttgagatgagattgacagctccctcagcagttcgaggagggaagaattccagggagaaccacttgtcaccagattccaatygccgcctcatcttctcccggagtctctcatgccgctcggggtccaggcccggggtggaacatctcgaactatctttggagctctcactgccactgctggc

SEQ ID NO: 28517 - DNA, 201 bp, Homo sapiens
gctcactgcagcctcagcctcccaggctcaagcgatcctcccacctcagcttcttgagtagctgggaccataggcatataccttttgtactttttgtagcracatggtctcactacattgcccaggctggcctccaactcttaggctcaagtgatcctcctgcctcagcctcccaaagtgttgggattacaggcatgagcc

SEQ ID NO: 28518 - DNA, 201 bp, Homo sapiens
tttcaccctgcccagggctcttcgtggggaaggaaggccccatgatccacagtggttcggtggtgggagctggcctccctcaggtaagatgggctgagagrgtgtgggcctctgggcaggcctagtgggaggtctggttacactgggccaaatccattgggacaccctgacatcacattggaacctggtgccattctggct

SEQ ID NO: 28519 - DNA, 201 bp, Homo sapiens
catccagcgagctacggaacatgtgtgatgagcacatcgcctctgaggagccagccgagaaggaggacctcctgcagcagatgctggaaaggaggtgagarcctggcggggcccccactgcccgcagggctacacagcggtggggtgagcctttggctcagatgttgtgaggtggctcctgagtttcctgggaaagttgga

SEQ ID NO: 28520 - DNA, 201 bp, Homo sapiens
gagacaagcggtcccgtctcacacggcttagtgctttgcccacccctggctggggtggacttaccggctctcaggggaagttggcactgttctcatcacaygcgacagggagagtagatttgacagcaggggcagctttatcaggccgtgaagatgtgtgtgcgttcttgccgcaatgagcatgtggacagatctgttttt

SEQ ID NO: 28521 - DNA, 201 bp, Homo sapiens
ttttaacctcacctttgtcttcctggcaagcctccttgttctcattgaggtgaggtggtttggattcacctgctcgcttaggaggttttagagtcccgcaytccttttccccacctccttccagaatgtcaggaaactgagaatgcagattcctgcagaaagtggcctcttgttcactaaaggtaaaggtttcacctctgg

SEQ ID NO: 28522 - DNA, 201 bp, Homo sapiens
tcttgaactcctgaactcaagtgattcacctgcctcggcctcccaaagtgctgggattacatgcgtcagccactgcacccggcctcagtcttttcttctaygcggcacaaccctggcatgcatagtgcgtacttacacaggttttgttgcagtaggttaacttatgtcccttgaaatgtaattgccaactacactgacaga

SEQ ID NO: 28523 - DNA, 201 bp, Homo sapiens
cttgaactcctgaactcaagtgattcacctgcctcggcctcccaaagtgctgggattacatgcgtcagccactgcacccggcctcagtcttttcttctatrcggcacaaccctggcatgcatagtgcgtacttacacaggttttgttgcagtaggttaacttatgtcccttgaaatgtaattgccaactacactgacagag

SEQ ID NO: 28524 - DNA, 201 bp, Homo sapiens
tcagctgatatgcatattcatgtaaatttttgttgttcttgtcattgtttgagacagagtctcactctgtcgcccaggctggaatgcagtggtacggtctyggatcactgcgacctccacccccgcctctgagttcaagctgttctcctacctcagcctcccaagtagctgggactacatgcatacaccaccatgcctggc

SEQ ID NO: 28525 - DNA, 201 bp, Homo sapiens
tgaggcaggagaatggtgtgaacccgggaggcggagcttgcagtgagctgagattgcgccactgcactccagcctgggcgacagagcgagactccgtctcaaaaaaaaaaaaaaaaagtggaagttgcttttaaaaatactttccatgttagtttgtcttgtgactaacctcatttccatagacactaactacaaaagata

SEQ ID NO: 28526 - DNA, 201 bp, Homo sapiens
gaaagccagaacccagagtgtaggggagtgctggctccacacctccccgcagcgccatgatgttcttcaggcccagctgcttagctttgtgcagatggccygtgatctcctccaggcgctgacggcagcaggtcatgtgcaggatggtctccaggccacagtagttcacggcggtgctggcgatcatcatggaggaggtct

SEQ ID NO: 28527 - DNA, 201 bp, Homo sapiens
ccagctgcttagctttgtgcagatggcccgtgatctcctccaggcgctgacggcagcaggtcatgtgcaggatggtctccaggccacagtagttcacggckgtgctggcgatcatcatggaggaggtctccttgtctgagccagggtcacctgctgggtgccaggtcacgtctatgtagagggggccacctgctgccatcc

SEQ ID NO: 28528 - DNA, 201 bp, Homo sapiens
aactcaagttcggagtggtacagacatgtatccttttcacggttcctggtgttcgtggacttcagtggtcaccaagattctttcttacatagaaatgggtytaacagtaagcatagtattagaagggccgcttattagctattcagctttaatatttctaatgatcactgaaggacacaaaagaaggactttaataagcaa

SEQ ID NO: 28529 - DNA, 201 bp, Homo sapiens
agggctgacagtttgctccccaggcaccaccactcccgcctcccaccttaaccttgcatgagtttaccttgagatgagattgacagctccctcagcagttygaggagggaagaattccagggagaaccacttgtcaccagattccaatcgccgcctcatcttctcccggagtctctcatgccgctcggggtccaggcccgg

SEQ ID NO: 28530 - DNA, 201 bp, Homo sapiens
tggtctcacatctttttctgcacctgcttccctctttgttttccgttgcttcactcaacttagctgtactctctgcctttgttctttggaggggcagtggractgggctggagaagggatctcctccttctgcgcttttctgctgtgcattcacgtactgctggctggtgagcagcctccgtatgtgcagtgggggaggag

SEQ ID NO: 28531 - DNA, 201 bp, Homo sapiens
ttctttaaaaagtgcaagtctggccactttgggaggccaaggcgggcagatcacctaagatcgggagtttgagaccattctgaccagtgtggagaaacccygtctctagtaaaaatacaaaattagccggtaaaaatacaaaattagccgggcgtggtggcgcatgcctgtaatcccagctactcgggcgactgaggcagg

SEQ ID NO: 28532 - DNA, 201 bp, Homo sapiens
tacctcaaaaaaaaaaaagaaaaaaaagtgcaagtcctcccattgcccctcagacctcctgagtcagatcctctggagtggggcccagcagctgtggttcwgcaagccctccaggtgacgctcacgctgctaatgaaggtggccagctctccctcttccgccgcccagattgttgagggtaagccagagaaccaatggatt

SEQ ID NO: 28533 - DNA, 201 bp, Homo sapiens
agccctcgttagctgtttatcccaatcaagctgtgtctggctgtgcactatccaggcctccacattctgtgacaaactaacagggccggctcctgtcactyctgttctcgccagcgggttttaccctgaaggtgactcaggccttctctttgccctagatcgtggggatcatcacacggcacaacctcacctatgaatttc

SEQ ID NO: 28534 - DNA, 201 bp, Homo sapiens
gagctgagcgctgagcatgtgccctgtggaaggacattttagttcagatgccagctggcccaagccctttttggagctaaccttgtccccttggcctccartgtgtgagccctcgttagctgtttatcccaatcaagctgtgtctggctgtgcactatccaggcctccacattctgtgacaaactaacagggccggctcct

SEQ ID NO: 28535 - DNA, 201 bp, Homo sapiens
ttgacacccaggctccctcaccccttctactaaattgtacttacatttgtaatgtgcttgccttcagctgatatgcatattcatgtaaatttttgttgttsttgtcattgtttgagacagagtctcactctgtcgcccaggctggaatgcagtggtacggtcttggatcactgcgacctccacccccgcctctgagttcaa

SEQ ID NO: 28536 - DNA, 201 bp, Homo sapiens
gctggtctcgaactcctgacctcaggtgatactgcttcggtctcccagagtgctgggattacaggtatgagccactatacctggccattttcttctgtttygtaagtatttgttttcttgtacatagttgagaagtttgcaggaattagtataagatactccatattgttctgtcaccttgcactccctcactgaaccctg

SEQ ID NO: 28537 - DNA, 201 bp, Homo sapiens
tacaaaggaatgcatcgggtttgagggagagctggggcagttcagaagagccccccaccccgcccgtggtctgagcagggctggagagccagcacagcttsctcccaggggcctgcgggcactgtcatgaggctggatgacttgccctcctcccccaggctgagagccagcgacatcatggagcccaacctgacctacgtc

SEQ ID NO: 28538 - DNA, 201 bp, Homo sapiens
ctccctcagcagttcgaggagggaagaattccagggagaaccacttgtcaccagattccaatcgccgcctcatcttctcccggagtctctcatgccgctcrgggtccaggcccggggtggaacatctcgaactatctttggagctctcactgccactgctggcactgccctccaagcaggggttgaggctgctgtttcctc

SEQ ID NO: 28539 - DNA, 201 bp, Homo sapiens
tagtgtattttatgtgtggccaaagacaattcttcttccagtgtggtccagggaagccaaaagagtagacacccctgtgtcagtagtctttcttggtctcrcatctttttctgcacctgcttccctctttgttttccgttgcttcactcaacttagctgtactctctgcctttgttctttggaggggcagtgggactgggc

SEQ ID NO: 28540 - DNA, 201 bp, Homo sapiens
gaacatctgttacttgaaacagttcgtgcacaggatggaaggggtgagggcttgactatgcagccagatttctcctgaattcatgctactccaaaaagacmgtgttgtgggttagaacttgatgctggccatgttccaaaaatagccagacccaagttcagtaagggcacgaatttctcagaacaaaagctgccccatctg

SEQ ID NO: 28541 - DNA, 201 bp, Homo sapiens
tgttcgtatgttaccattcagatacctgacaaacacactcttcagttttgggatttggaatttagcttgtggaattagcttttgtcaaaattagcaagctytttgtgtcaacagccagatagtaaatatttaaggctttgtgggccaagaatcagaatggaagctcttatgtagatgtttatgtaactatttacatgtgtg

SEQ ID NO: 28542 - DNA, 201 bp, Homo sapiens
tttaatgcatggggtgggagaggcgaggaagtcaccatcaaaccactttatctacagttagcataagatgtgagaagtgttgacaggaagctgcagcttaratgggatgatcacaactccatggcaacaagatgacacaaatgcagcagagaccccaggggacaggagcctcttgcagtctgtccctaggcccagccctgc

SEQ ID NO: 28543 - DNA, 201 bp, Homo sapiens
tcacgaggaaggtttttgtagccaaggtctcctgacccaggggcgtttctgcactgactgttggtctttcctttttcaccctgcccagggctcttcgtggrgaaggaaggccccatgatccacagtggttcggtggtgggagctggcctccctcaggtaagatgggctgagagggtgtgggcctctgggcaggcctagtgg

SEQ ID NO: 28544 - DNA, 201 bp, Homo sapiens
aaagcaagcttgtccaacccatggcccaacacagattcatataccttttaaaaacatttatgagatttttctgagtttttcttttcttagctcatcagctrtcattagtgtattttatgtgtggccaaagacaattcttcttccagtgtggtccagggaagccaaaagagtagacacccctgtgtcagtagtctttcttgg

SEQ ID NO: 28545 - DNA, 201 bp, Homo sapiens
gtggtacagacatgtatccttttcacggttcctggtgttcgtggacttcagtggtcaccaagattctttcttacatagaaatgggtctaacagtaagcatrgtattagaagggccgcttattagctattcagctttaatatttctaatgatcactgaaggacacaaaagaaggactttaataagcaaagacatatacctat

SEQ ID NO: 28546 - DNA, 201 bp, Homo sapiens
gaggctgaggcaggagaatggcatgaacctgggaggcggagcttgcagtaagccaagatcacgccactgcactccagcctgggtgacagagcaagactccrtctcaaaaacaaacaaacaaaaacatcaatggctgggtgcagtggctcatgcctgtaatctcaggactttgggaggccgaggcaggcagatcacctgagg

SEQ ID NO: 28547 - DNA, 201 bp, Homo sapiens
tcacggaccaccttctttttgtattcctgcaagttcggcacatacccagaaggcaccttgatgtttttactgatgccggggttttctggaaggaagatccrgtgggaacatggtgcagcagtgatcgtgccgatctttgatctgccccctgagctgggggctgagattctgagatcacagaaaacacagaggtcaggggct

SEQ ID NO: 28548 - DNA, 201 bp, Homo sapiens
cccatgcggagctgcctcttcatgccgttggcgtctcaggcagtcagtgacacgtggtctctttgcaggatgtcaccccatacatgaacccttcgcctttyaccgtctcgcccaacacccacgtctcccaagtcttcaacctgttcagaacgatgggcctgcgccacctgcccgtggtgaacgctgtgggagaggtgagcg

SEQ ID NO: 28549 - DNA, 201 bp, Homo sapiens
tgttgcttctctgtaaccacttgaatctctcagatccccattggggcccttgtcttggaggacagcctcttcagtgtccccagttatatgtatatattatwtatatatatatatatatatatatacacacacacactatatatatacacacacacacacacacacacacacacaaacacacattatatatttctgtttgtt

SEQ ID NO: 28550 - DNA, 201 bp, Homo sapiens
tccacaggaaagctcaggacagctgggaaagctgaaggaccagaaccatgtgctgtggggagcagtgcagggtctagcagacatcccttgggtaccaggargaaggagcactggccctgggttcctcctgattccgattcagaatccagggagagggggtatcctgttgcctcacttgggtcatgtgccactccttggctt

SEQ ID NO: 28551 - DNA, 201 bp, Homo sapiens
acctgcccgtggtgaacgctgtgggagaggtgagcgaggccccggccctgcccccacctttgagagaggatcccctagccaggtgctgtttgtgcacccakgcttctcaccagaaacgtaggcatcccaccaggaggggagagtgtggcccaacactagctttgaaccctgctcggcttccgtgcactcgggaccctttcc

SEQ ID NO: 28552 - DNA, 201 bp, Homo sapiens
tgggagaatcgcttgaacccgggagacagaggctgcagtgagccgagatcgcgccattgcactccagcctgggcaatgagagcaaaactgtctcaaaaaamaacaacaaaaaaaaaaaacaaacaaaatcaataaatttgaccacatcaaagtacatattgtatttataaagacaaaaactccaaataacaacaataaaac

SEQ ID NO: 28553 - DNA, 201 bp, Homo sapiens
acttgggtcatgtgccactccttggctttgggggcaggcacgttgattgaaaattctatcaagacaggatgtaggagatggcttgttcccctctggagaawcaagctgctcttcccagattaaaggaaaccacagaagctgcagccaggtcctagggttcaggctcatttgaaccaccagcctgagccactcttttgaacc

SEQ ID NO: 28554 - DNA, 201 bp, Homo sapiens
atcgcttgaacccgggagacagaggctgcagtgagccgagatcgcgccattgcactccagcctgggcaatgagagcaaaactgtctcaaaaaaaaacaacaaaaaaaaaaaacaaacaaaatcaataaatttgaccacatcaaagtacatattgtatttataaagacaaaaactccaaataacaacaataaaacaccataa

SEQ ID NO: 28555 - DNA, 201 bp, Homo sapiens
cagccgagaaggaggacctcctgcagcagatgctggaaaggaggtgagagcctggcggggcccccactgcccgcagggctacacagcggtggggtgagccyttggctcagatgttgtgaggtggctcctgagtttcctgggaaagttggatggggagcgggctgggaacatggatcagaagcgctcccgctgagggtatcc

SEQ ID NO: 28556 - DNA, 201 bp, Homo sapiens
tgatccttcggtcgcagcttgtcaccctgcttgtccgaggagtttgttactctgaaagccagtcggtaagtctctccgaggcagaaatcagccaggccagrcctgacgaagctcgaggggttgggcgctgccggcgggccgtgaacagtgccatagggaaagctgaatgcaaggcgagaagtgcagagtggacttagggga

SEQ ID NO: 28557 - DNA, 201 bp, Homo sapiens
tgtgaacacagcccccatcctcgccactgtcatcacacggcgttctcctgtgtatcttctctcctttccctaaggacgcttgtcaccggatttggggcccrccctaatccagcatgggttcatctgaactcggtcacatctgtagagaccttgtttccagaaaggtcgcattcataggtactagggcttaggacttggcca

SEQ ID NO: 28558 - DNA, 201 bp, Homo sapiens
tacctacaatgacatggccacactcttcttcaacccgcaggagtctgccatcctccagctcttccaccaggatggtgagtgtctgcactgcagcccaatcrtgggtgattggtgtcatctcggacacagccaggcttgcccttcattccaagcaagaccaggacttctttgtaacgcccacccagacaaaagattggtttc

SEQ ID NO: 28559 - DNA, 201 bp, Homo sapiens
attcataggtactagggcttaggacttggccatatcttttggtggggggacacattcaccccccagccactttacttagtgctttctcacttaaacttccwaataagccatttgcatctcatgaatcaggaagaaagggagtgcagacagatcaggggacttgcccagggtgccacagctaggacttggccaaggacttgg

SEQ ID NO: 28560 - DNA, 201 bp, Homo sapiens
gaatatacaagtgccgtgtacaacagtgtggacacttttgaaatacacacaataatttcaggttagtggtttctcccaggggagagaggaaggaaaactgtttttttttttgttttgttttgtttcttaaaatggtactgaatgttttcttttttaaaaatacctggagcatatatggcatgttgttgagatttgttaaag

SEQ ID NO: 28561 - DNA, 201 bp, Homo sapiens
catttgcatctcatgaatcaggaagaaagggagtgcagacagatcaggggacttgcccagggtgccacagctaggacttggccaaggacttggtttgactrgagagctctcactctggagcgcttgctgctgctgcaccacctgcctcagcagcctggagctgggcatattcaggcatcaaggggaggggctctaaggtga

SEQ ID NO: 28562 - DNA, 201 bp, Homo sapiens
cttctctgctgtgtggagctgcttttggacgtttagttgccaatgtcctaaaaaggtactctgtgtgtgtgcgtgtgtgtgcgcatgtgcatgtgtgtgcrcgtgtgcgtgtgtatgcatgtgtgtgcgtgtgcgtgcgttgatgtgtctgtgcccatgcatgcacatatgtgcataggcacaagagtatgagctgtaggt

SEQ ID NO: 28563 - DNA, 201 bp, Homo sapiens; identical to SEQ ID NO: 5807

SEQ ID NO: 28564 - DNA, 201 bp, Homo sapiens
cataggttatatgcaaatatacaccattttatatctgggacttgagcatccctggattttggtatccatcgggatcctggaccctatccctggtgaatackgaggaacaactgtactctttccttgttgcttctctgtaaccacttgaatctctcagatccccattggggcccttgtcttggaggacagcctcttcagtgt

SEQ ID NO: 28565 - DNA, 201 bp, Homo sapiens; identical to SEQ ID NO: 5808

SEQ ID NO: 28566 - DNA, 201 bp, Homo sapiens
tccatcgggatcctggaccctatccctggtgaatactgaggaacaactgtactctttccttgttgcttctctgtaaccacttgaatctctcagatccccaytggggcccttgtcttggaggacagcctcttcagtgtccccagttatatgtatatattatatatatatatatatatatatatatacacacacacactatat

SEQ ID NO: 28567 - DNA, 201 bp, Homo sapiens; identical to SEQ ID NO: 5810

SEQ ID NO: 28568 - DNA, 201 bp, Homo sapiens
cttgttgcttctctgtaaccacttgaatctctcagatccccattggggcccttgtcttggaggacagcctcttcagtgtccccagttatatgtatatattatatatatatatatatatatatatatacacacacacactatatatatacacacacacacacacacacacacacacaaacacacattatatatttctgtttg

SEQ ID NO: 28569 - DNA, 201 bp, Homo sapiens
aatggacaagtaaggccatgattttgctcatgtcctagtttcagaatgtataagctctgaggcctaaggaatgttgttattagggtaggaaacagtaactyacttttcttgggctgaaagaagcaacacacccattcctgagcatgtgtgagaatgtggagcagcccatgggctgggggctgcgggggcagggcaggggac

SEQ ID NO: 28570 - DNA, 201 bp, Homo sapiens
ggcccttgtcttggaggacagcctcttcagtgtccccagttatatgtatatattatatatatatatatatatatatatatacacacacacactatatatayacacacacacacacacacacacacacacaaacacacattatatatttctgtttgttttgtttttttaagacggagtcttactctgttacccaggccggag

SEQ ID NO: 28571 - DNA, 201 bp, Homo sapiens
gtggatcacctgaggccaggagtttgagaccagcctggccaacatggtgaaatcccgactctactaaaaatataaaaattagccaggtttggtggcgggcrcctgtaatcccagctactctggaggctgaggcaggagaatcgcttgaacccggaaggcagaggttgcagtgaaccaagattgtgccatagcactccagcc

SEQ ID NO: 28572 - DNA, 201 bp, Homo sapiens
gggtccaggcccggggtggaacatctcgaactatctttggagctctcactgccactgctggcactgccctccaagcaggggttgaggctgctgtttcctcwggcttcgttcaccatggctgggttcctactgcacagggtggggcagggagcatcagggggcaggcagccacacccccgacacatcaagacacctgagtgg

SEQ ID NO: 28573 - DNA, 201 bp, Homo sapiens
agaagtaaaggaccatttcaggaaccaagttcaggctaccaagtggcctccgggaaagccagaacccagagtgtaggggagtgctggctccacacctcccygcagcgccatgatgttcttcaggcccagctgcttagctttgtgcagatggcccgtgatctcctccaggcgctgacggcagcaggtcatgtgcaggatggt

SEQ ID NO: 28574 - DNA, 201 bp, Homo sapiens
ctgtaacagccctgcaagacacagataacattttatttttttaaaaagttgttagtcccctaaaccaaagagcaacatatactgcagaaataaaaagttartcatagcaaaggagaagtaacagtatctggttttaataatagctcatatattccattggtacatatttacaaagggccaaactcaactaatttatttaaa

SEQ ID NO: 28575 - DNA, 201 bp, Homo sapiens
gaggtgtcctgaagaggagggtggttatttggagactatcagtggaaatgaagagctcagctgatggctgtagatcctcacccacatggtccctcaccccygaaaggttttttttgagggctggttcctatttgataatggctccagatgatttagaagctagccactgatttcagtaaatacttctgcctccttccactc

SEQ ID NO: 28576 - DNA, 201 bp, Homo sapiens
tgcgatctcggctcaccacaacctccacctcccaggttccagtgattctcctgcctcagcctccaaagtagctgggactacaggtgcgcgccaccatgccyggctaattttgtatttttagtagagacagggtttcaccatgttggctagactggtcttgaactcctgacctcaggtgatccacctgccttgacctcccaa

SEQ ID NO: 28577 - DNA, 201 bp, Homo sapiens
aaatccttaagctccatcagtactgctgtgttcgtttgcccatgcgcagtagcctgtggcctccccacccacagaaatccagcatcctcacccgggctggygagcagcgcaaacggagccagtccatgaagtcctacccatccagcgagctacggaacatgtgtgatgagcacatcgcctctgaggagccagccgagaagg

SEQ ID NO: 28578 - DNA, 201 bp, Homo sapiens
tcacttttatatgcactgggtaaccaaaacactcgtgtgactcactttattgtgatatttgctttattgtggtggtctagaaccaaacccatgctatctgyaaggtaggcctatgttggcatttattccctaggcctttatcctgccaaccagagttccccctgtcagtgcaccttgcccagcctcttaagagtccatcat

SEQ ID NO: 28579 - DNA, 201 bp, Homo sapiens
cattttttaaaatataaaaaagcacaccatttgtgctatgagaatttcagacaacacccagaaacaaatatctccttaagcactacctcacggatgttttyccattatgaatgctgacgtacaaataatcctaattttgtttaatcaaaaagggatattatacttttaattctccatcctgctttatttttattttttaat

SEQ ID NO: 28580 - DNA, 201 bp, Homo sapiens
cccagctgcttagctttgtgcagatggcccgtgatctcctccaggcgctgacggcagcaggtcatgtgcaggatggtctccaggccacagtagttcacggyggtgctggcgatcatcatggaggaggtctccttgtctgagccagggtcacctgctgggtgccaggtcacgtctatgtagagggggccacctgctgccatc

SEQ ID NO: 28581 - DNA, 201 bp, Homo sapiens
aaagcacaccatttgtgctatgagaatttcagacaacacccagaaacaaatatctccttaagcactacctcacggatgttttcccattatgaatgctgacktacaaataatcctaattttgtttaatcaaaaagggatattatacttttaattctccatcctgctttatttttattttttaattgcatcttgctcttttgc

SEQ ID NO: 28582 - DNA, 201 bp, Homo sapiens
caaataacaacaataaaacaccataaataaagtgaaaacaagtccacagcctgagagaggttatttactatgcatttaagaggcagataattagtatccasaatacaggaagaggctgggcgcggtggctgacgcctgtaatcccagcactttgggaggccgaggcaggcggatcacttgaggtcaggagttcaagaccag

SEQ ID NO: 28583 - DNA, 201 bp, Homo sapiens
gaaattatttttctttaaaaagtgcaagtctggccactttgggaggccaaggcgggcagatcacctaagatcgggagtttgagaccattctgaccagtgtrgagaaaccccgtctctagtaaaaatacaaaattagccggtaaaaatacaaaattagccgggcgtggtggcgcatgcctgtaatcccagctactcgggcga

SEQ ID NO: 28584 - DNA, 201 bp, Homo sapiens
ttccagctccaggtaaccccagtgcacctgctacctttatcccataccacgaggaagaatccagaaatgtatgaccttcctctgttgagaactaatagatrtgttgggttcatccttccacacccattacctgagcgttgagagatatgggaatctgtagtcgtctttttacctcagagaaagtgcacaccacatgccctg

SEQ ID NO: 28585 - DNA, 201 bp, Homo sapiens
gttctcattgtaaccctaacatgtgagaataaaatgtcttctgtctcctctgtctcctttagccttttgtctccatgctgctttctttctttctttctttytttgagacagagtctcgctgtcacccaggctggagtgcagtggtgccatctcagctcactgcaagctccgcctcccaggttcacgccattctcctgcctc

SEQ ID NO: 28586 - DNA, 201 bp, Homo sapiens
accagagaaaatctaattaatactctcattttctgaatgttcccccctaaaaacaacaaaaaccccactaggagtggaatttgaggcctccccaaccaccyaccaaaaaaggagggtgaaatgaaaggaagaagaaaaactcagcattctttcctctgacaaagagtaaaacgacaaggaatatcggcctgaattctcttc

SEQ ID NO: 28587 - DNA, 201 bp, Homo sapiens
ggtaccttgttcagtctagaggagggttcgtccttctggaaccaagggctcacgtggaaagtggtgaggaggaccttcagtgaaagcattaaccacacccmccgaattacactgggtgtcccttactcggtacatggaatggtagttttgatgagactgggggggtcaactggatcagaaacagctttcctcttgtgccca

SEQ ID NO: 28588 - DNA, 201 bp, Homo sapiens; identical to SEQ ID NO: 5802

SEQ ID NO: 28589 - DNA, 201 bp, Homo sapiens
gcccttgtcttggaggacagcctcttcagtgtccccagttatatgtatatattatatatatatatatatatatatatatacacacacacactatatatatacacacacacacacacacacacacacacaaacacacattatatatttctgtttgttttgtttttttaagacggagtcttactctgttacccaggccggagt

SEQ ID NO: 28590 - DNA, 201 bp, Homo sapiens; identical to SEQ ID NO: 5816

SEQ ID NO: 28591 - DNA, 201 bp, Homo sapiens
cccttgtcttggaggacagcctcttcagtgtccccagttatatgtatatattatatatatatatatatatatatatatacacacacacactatatatatacacacacacacacacacacacacacacaaacacacattatatatttctgtttgttttgtttttttaagacggagtcttactctgttacccaggccggagtg

SEQ ID NO: 28592 - DNA, 201 bp, Homo sapiens; identical to SEQ ID NO: 5817

SEQ ID NO: 28593 - DNA, 201 bp, Homo sapiens
aacttcttaaagcccaatctagagttggtcatacctggggtgtatctactgtaagggtgactagatctctgtacccggatgtagattccggaggtctctgygtagagcagtgggtaccaggaggaagggttgggagagagtaggacatgccactcctgaaccttcttgtcttttgtcacctctcccctagctcttttgttc

SEQ ID NO: 28594 - DNA, 201 bp, Homo sapiens; identical to SEQ ID NO: 5805

SEQ ID NO: 28595 - DNA, 201 bp, Homo sapiens
ccttgtcttggaggacagcctcttcagtgtccccagttatatgtatatattatatatatatatatatatatatatatacacacacacactatatatatacacacacacacacacacacacacacacaaacacacattatatatttctgtttgttttgtttttttaagacggagtcttactctgttacccaggccggagtgc

SEQ ID NO: 28596 - DNA, 201 bp, Homo sapiens
agggcagatcgatcagaggagtcccaggggccccgcccgagggcacctccatctctctgggctgggctgacttccccggtccagggaggcacctcagggarggggctgagagcagcccccgcttcttcattcggctcactgagcacttgtgggggcacgacctcatcttctaaaggcatcttttcttccaaatggtccagc

SEQ ID NO: 28597 - DNA, 201 bp, Homo sapiens
cggccattgctttttgttcgcttgcttttggttttgcaagaagagcggcctctgtctctgatctgcttcaaatcatcattccatcagtgacagaagtggcygttccatcagtggtcgcagccagttcagctcctgcatccatccccaagtgttctgtaagtcccaggggcattttctgccttgtgtttttgtcatttttca

SEQ ID NO: 28598 - DNA, 201 bp, Homo sapiens
cttgtcttggaggacagcctcttcagtgtccccagttatatgtatatattatatatatatatatatatatatatatacacacacacactatatatatacacacacacacacacacacacacacacaaacacacattatatatttctgtttgttttgtttttttaagacggagtcttactctgttacccaggccggagtgca

SEQ ID NO: 28599 - DNA, 201 bp, Homo sapiens
tgtcttggaggacagcctcttcagtgtccccagttatatgtatatattatatatatatatatatatatatatatacacacacacactatatatatacacayacacacacacacacacacacacaaacacacattatatatttctgtttgttttgtttttttaagacggagtcttactctgttacccaggccggagtgcagt

SEQ ID NO: 28600 - DNA, 201 bp, Homo sapiens
cagtggtcgcagccagttcagctcctgcatccatccccaagtgttctgtaagtcccaggggcattttctgccttgtgtttttgtcatttttcaatcagttycattcaatgagaactccctgtgttacctgtgttacggtgacaccttgagaatgggctacttcccctcctagcaacccgcaacaccatcccagacctcagg

SEQ ID NO: 28601 - DNA, 201 bp, Homo sapiens
caagtgatccacccatctcggcctcccaaattgctaggattacaggtgtgtcaccacgcccagcctggtttatatatatatgtttttgtttttgtttttgytttttttttggcaaagtctcactctgttgcccaagctggagtggagtggcaagatctcggctcactgcaaactccacctcctgggttcaagcgattctcc

SEQ ID NO: 28602 - DNA, 201 bp, Homo sapiens
cgcaaggagcaagttactacttcatttcctcttttcccaatttctggacaagaccaaggcaatttgaccaacatttatggggcatcaactctgagagtgcygaaggggcatttgccctcaaagagcttgcagtctagggacgtagacacaagcaattgcacataggcaactcgtgttgtgtgctattataacagttacatg

SEQ ID NO: 28603 - DNA, 201 bp, Homo sapiens
tgctggaacggaaacttcttaaagcccaatctagagttggtcatacctggggtgtatctactgtaagggtgactagatctctgtacccggatgtagattcyggaggtctctgcgtagagcagtgggtaccaggaggaagggttgggagagagtaggacatgccactcctgaaccttcttgtcttttgtcacctctccccta

SEQ ID NO: 28604 - DNA, 201 bp, Homo sapiens
tatgaatattttaatttcccagtgctagtggcagttgcttttttttttttttttttttgagacggagtcttgctctgtcgcccaggctggagtgcagtggygccatctctgctcactgcaagctccgcctcccgggttcacgccattctcctgcctcagcctccggagtagctaggacttacaggcgcctgccaccacgcc

SEQ ID NO: 28605 - DNA, 201 bp, Homo sapiens
aatggctccagatgatttagaagctagccactgatttcagtaaatacttctgcctccttccactcctaaccactaaaaaaggctccctctgcggatctgtktttctagaccatccttggagaaacacaggaggaggaggatgagattcttccaaggaaagactatgaggtgagctcctttgatactgcttgggcaactaaa

SEQ ID NO: 28606 - DNA, 201 bp, Homo sapiens
ctaattttttgtatttttagtagagacggggtttcaccgtgttagccaggatggtctccatctcctgacctcgtgatccacccgccttggcctcccaaagygctgggattacaggcgtgagccaccgcgcctggcctttttttttttttttttttttttttgagacagtctcgctctatcacctaggctggactgcagtgg

SEQ ID NO: 28607 - DNA, 201 bp, Homo sapiens
ggggtttcaccgtgttagccaggatggtctccatctcctgacctcgtgatccacccgccttggcctcccaaagtgctgggattacaggcgtgagccaccgygcctggcctttttttttttttttttttttttttgagacagtctcgctctatcacctaggctggactgcagtggcgcgatctctgctcactgcaacctctg

SEQ ID NO: 28608 - DNA, 201 bp, Homo sapiens
ctgtgtggagctgcttttggacgtttagttgccaatgtcctaaaaaggtactctgtgtgtgtgcgtgtgtgtgcgcatgtgcatgtgtgtgcacgtgtgcrtgtgtatgcatgtgtgtgcgtgtgcgtgcgttgatgtgtctgtgcccatgcatgcacatatgtgcataggcacaagagtatgagctgtaggtcctcccca

SEQ ID NO: 28609 - DNA, 201 bp, Homo sapiens
tgggattacaggcgtgagccaccgcgcctggcctttttttttttttttttttttttttgagacagtctcgctctatcacctaggctggactgcagtggcgygatctctgctcactgcaacctctgcctcctgggttcaagtgattctcctgcctcagcctcccaagtagctgagagtacaggtgcccgccaccacacccag

SEQ ID NO: 28610 - DNA, 201 bp, Homo sapiens
tccaggatccctgcctattcattcacaggtgtgagaaaatgttcatgataaggaagtcagaaaccaccttttgggggctgggggctctttattggataacycgtctctctcctctcctcagagacaagagagactttgtatcagcaggagcggctgctggagttgctgcagctttcggggcgccaatcgggggtaccttgt

SEQ ID NO: 28611 - DNA, 201 bp, Homo sapiens
gcacacatgttgactgaccaggggctgctgtgaatgctgtttggagaaatcggggctgggggtaggcagggttatgttttgaatttctgagaccagagctkctttctgtggcgttgtaacagctgtgctttgcctcctagagtcttagagagcctccttgtgtctctggtaaccaccgtggtggtgtttgtggcctcgatg

SEQ ID NO: 28612 - DNA, 201 bp, Homo sapiens
ccaagcaagaccaggacttctttgtaacgcccacccagacaaaagattggtttctgcctcctgtgttggaaggggaactggtatggggtgtggtcgggccyggtaggtctactgggccttggcaggcatccggtagtgggactcaggttggctcttcccttgcaggtactttcagccccgtcactctggccttgttcttcg

SEQ ID NO: 28613 - DNA, 201 bp, Homo sapiens
ccttgcatgagtttaccttgagatgagattgacagctccctcagcagttcgaggagggaagaattccagggagaaccacttgtcaccagattccaatcgcsgcctcatcttctcccggagtctctcatgccgctcggggtccaggcccggggtggaacatctcgaactatctttggagctctcactgccactgctggcact

SEQ ID NO: 28614 - DNA, 201 bp, Homo sapiens
caaaccactttatctacagttagcataagatgtgagaagtgttgacaggaagctgcagcttagatgggatgatcacaactccatggcaacaagatgacacraatgcagcagagaccccaggggacaggagcctcttgcagtctgtccctaggcccagccctgcttgtcctccctggctgttatcttcggtactgcaaagag

SEQ ID NO: 28615 - DNA, 201 bp, Homo sapiens
tacagttagcataagatgtgagaagtgttgacaggaagctgcagcttagatgggatgatcacaactccatggcaacaagatgacacaaatgcagcagagamcccaggggacaggagcctcttgcagtctgtccctaggcccagccctgcttgtcctccctggctgttatcttcggtactgcaaagagaacacagacatatc

SEQ ID NO: 28616 - DNA, 201 bp, Homo sapiens
aacaagatgacacaaatgcagcagagaccccaggggacaggagcctcttgcagtctgtccctaggcccagccctgcttgtcctccctggctgttatcttcrgtactgcaaagagaacacagacatatctggcttggtgacctggctgtcctggaaaagtcagcttcatgtatgagtgtgcccatcctctgaacttgattac

SEQ ID NO: 28617 - DNA, 201 bp, Homo sapiens
ggaggaccttcagtgaaagcattaaccacaccccccgaattacactgggtgtcccttactcggtacatggaatggtagttttgatgagactgggggggtcractggatcagaaacagctttcctcttgtgcccataacctccacactggactttctgtacttctcatatcaataccctccctaaccccaaatcaaaccgct

SEQ ID NO: 28618 - DNA, 201 bp, Homo sapiens
cccatttccatccccagttcctcttacccggaagctgttacagcccagtccgctctgggctccaatcctgtccatcctgcccccgaagcagctggatctcygcaggctccgaggggcagtgagcagcgccctcagcttgctttttaggagggcagatcgatcagaggagtcccaggggccccgcccgagggcacctccatc

SEQ ID NO: 28619 - DNA, 201 bp, Homo sapiens
ttccagccagagccgcgcctctaccaggctgtgtcttcctcctgaaatgttgctcttcactccgtaccactggtgttccttggttctccacctgcgtaggkatttgcgcattagatgagagaatttcaagcaaaatactttgagttttacaaagatataaaacacctagtaattattgctgcagactttccttttttcttc

SEQ ID NO: 28620 - DNA, 201 bp, Homo sapiens
ggactgcagtggcgcgatctctgctcactgcaacctctgcctcctgggttcaagtgattctcctgcctcagcctcccaagtagctgagagtacaggtgccygccaccacacccagctaatttttgtatttttagtagagctggggtttcaccatgttggccaggatagtcttgatctcttgacctcatgatccgcctgcct

SEQ ID NO: 28621 - DNA, 201 bp, Homo sapiens
tgagagaggatcccctagccaggtgctgtttgtgcacccaggcttctcaccagaaacgtaggcatcccaccaggaggggagagtgtggcccaacactagckttgaaccctgctcggcttccgtgcactcgggaccctttcccctgcctgccagcagatggcaccagcgtcccactggccgtcctttccagccagagccgcg

SEQ ID NO: 28622 - DNA, 201 bp, Homo sapiens
caggtgcccgccaccacacccagctaatttttgtatttttagtagagctggggtttcaccatgttggccaggatagtcttgatctcttgacctcatgatcsgcctgcctcggcctcccaaagtgctgggattacaggcgtgagccaccgtgcccagcccccccccttttttttttaagcattttctcagcagactagctaa

SEQ ID NO: 28623 - DNA, 201 bp, Homo sapiens
ctggggtttcaccatgttggccaggatagtcttgatctcttgacctcatgatccgcctgcctcggcctcccaaagtgctgggattacaggcgtgagccacygtgcccagcccccccccttttttttttaagcattttctcagcagactagctaaggacaatagatggcatgtcctgacacccatggggcactctgggtgtt

SEQ ID NO: 28624 - DNA, 201 bp, Homo sapiens
tcaagtgatcctcctgcctcagcctcccaaagtgttgggattacaggcatgagccattgcacccagtcatctcaggcagtttttaaaaaatttttatatakagagaaaaagtgcactcagcagccagcatgatccaaaggagaagcagctgcaccctctcaagtgatgacggggacacccctcggctgatgaacaagtttc

SEQ ID NO: 28625 - DNA, 201 bp, Homo sapiens
tgcctgctctccacgtggaatttagcttaaaactggttggccaagatgtatttcttcccctctgccaccataaccctgtaaactgaatcattcttttcctrtgtgaacagaaaggtcgaagatatgaggcggtgaagtggatggtggtgtttgccattggagtctgcactggcctggtgaggaggcagggcctggagggat

SEQ ID NO: 28626 - DNA, 201 bp, Homo sapiens
aactggttggccaagatgtatttcttcccctctgccaccataaccctgtaaactgaatcattcttttcctgtgtgaacagaaaggtcgaagatatgaggcrgtgaagtggatggtggtgtttgccattggagtctgcactggcctggtgaggaggcagggcctggagggatggtgggccatagggctggaggggcttacag

SEQ ID NO: 28627 - DNA, 201 bp, Homo sapiens
gatagtcagtcaactagaaaacccttctgttgaatatctttctaaaaagtgccccttcttcctgtctcaggaagagttcattgcacatatttgactctttrtttgataaatttagggtcttacaaaatgttagaatcccattttgacatccattctcattataggtggtttgaaaaatggtaactttctgtgagatgtgcc

SEQ ID NO: 28628 - DNA, 201 bp, Homo sapiens
tctttcctttttcaccctgcccagggctcttcgtggggaaggaaggccccatgatccacagtggttcggtggtgggagctggcctccctcaggtaagatgrgctgagagggtgtgggcctctgggcaggcctagtgggaggtctggttacactgggccaaatccattgggacaccctgacatcacattggaacctggtgcc

SEQ ID NO: 28629 - DNA, 201 bp, Homo sapiens
ttggtgtcatctcggacacagccaggcttgcccttcattccaagcaagaccaggacttctttgtaacgcccacccagacaaaagattggtttctgcctccwgtgttggaaggggaactggtatggggtgtggtcgggcccggtaggtctactgggccttggcaggcatccggtagtgggactcaggttggctcttcccttg

SEQ ID NO: 28630 - DNA, 201 bp, Homo sapiens
tcctctgacaaagagtaaaacgacaaggaatatcggcctgaattctcttcccaagaagaaagaaagcacaccaacgcaggcatttgtcttctgtccatggkgctgaagtttattcactttcaaaccactttcagtaacaggtgaggttctaccttaaaatttaatgcatggggtgggagaggcgaggaagtcaccatcaaa

SEQ ID NO: 28631 - DNA, 201 bp, Homo sapiens
tcaccatcaaaccactttatctacagttagcataagatgtgagaagtgttgacaggaagctgcagcttagatgggatgatcacaactccatggcaacaagrtgacacaaatgcagcagagaccccaggggacaggagcctcttgcagtctgtccctaggcccagccctgcttgtcctccctggctgttatcttcggtactg

SEQ ID NO: 28632 - DNA, 201 bp, Homo sapiens
tttgtatttttagtagagacgaggcttctccatgttggtcaggctggtcttgaactcctggcctcgggtgatccgcccgccttggcctcccaaagtgctgrgattacagacgtgagccactgcgcccagctaattcctacagtcaattttagaatattttcatcacctgagaggaaaccctgcactcattagcagccactg

SEQ ID NO: 28633 - DNA, 201 bp, Homo sapiens
ccaggatagtcttgatctcttgacctcatgatccgcctgcctcggcctcccaaagtgctgggattacaggcgtgagccaccgtgcccagcccccccccttytttttttaagcattttctcagcagactagctaaggacaatagatggcatgtcctgacacccatggggcactctgggtgttggggcagaaacttgagaggg

SEQ ID NO: 28634 - DNA, 201 bp, Homo sapiens
gctgcaggtggtgctgctgctgcggtgagcgtgagacccgcacccccgaggagctggtaagaagccggcggagtcggcctggggagggggcggttgctaarggactgagagaggcgttgccgggggtggggccgggccaatctgggcccgcaggtggcagcgggtggggcctggggaccgcagccagggctctcgaagcgt

SEQ ID NO: 28635 - DNA, 201 bp, Homo sapiens
aagctgtgtctggctgtgcactatccaggcctccacattctgtgacaaactaacagggccggctcctgtcactcctgttctcgccagcgggttttaccctkaaggtgactcaggccttctctttgccctagatcgtggggatcatcacacggcacaacctcacctatgaatttctgcaggcccggctgaggcagcactacc

SEQ ID NO: 28636 - DNA, 201 bp, Homo sapiens
ttcagaagagccccccaccccgcccgtggtctgagcagggctggagagccagcacagcttgctcccaggggcctgcgggcactgtcatgaggctggatgayttgccctcctcccccaggctgagagccagcgacatcatggagcccaacctgacctacgtctacccgcacacccgcatccagtctctggtgagcatcctgc

SEQ ID NO: 28637 - DNA, 201 bp, Homo sapiens
atgcaaggcgagaagtgcagagtggacttaggggaggagtcgccacagccgggtggtgagaagcaacagcggtttattccttcatagttcaaggccagaartacaaaatccgggtgtcaccagggcagcgctccctggctctggtgctgtccttgccccttcctagctcatgggagttgcctgcagaccttggtgctcctg

SEQ ID NO: 28638 - DNA, 201 bp, Homo sapiens
agcatgtgtcgggggatagaagtacaaaggaatgcatcgggtttgagggagagctggggcagttcagaagagccccccaccccgcccgtggtctgagcagrgctggagagccagcacagcttgctcccaggggcctgcgggcactgtcatgaggctggatgacttgccctcctcccccaggctgagagccagcgacatcat

SEQ ID NO: 28639 - DNA, 201 bp, Homo sapiens
cctaataagccatttgcatctcatgaatcaggaagaaagggagtgcagacagatcaggggacttgcccagggtgccacagctaggacttggccaaggactyggtttgactggagagctctcactctggagcgcttgctgctgctgcaccacctgcctcagcagcctggagctgggcatattcaggcatcaaggggaggggc

SEQ ID NO: 28640 - DNA, 201 bp, Homo sapiens
tgtgtgtgcgtgtgcgtgcgttgatgtgtctgtgcccatgcatgcacatatgtgcataggcacaagagtatgagctgtaggtcctccccacagcctatcartgtggttcaaagccatgttctcggtgttttccttcactagctacattggattgggccacatctattcggggacctttgccctgattggtgcagcggcttt

SEQ ID NO: 28641 - DNA, 201 bp, Homo sapiens
caccattttatatctgggacttgagcatccctggattttggtatccatcgggatcctggaccctatccctggtgaatactgaggaacaactgtactctttycttgttgcttctctgtaaccacttgaatctctcagatccccattggggcccttgtcttggaggacagcctcttcagtgtccccagttatatgtatatatt

SEQ ID NO: 28642 - DNA, 201 bp, Homo sapiens
gcttttttctgccgggttaaagggcagcccagcctcagggctgacagtttgctccccaggcaccaccactcccgcctcccaccttaaccttgcatgagttyaccttgagatgagattgacagctccctcagcagttcgaggagggaagaattccagggagaaccacttgtcaccagattccaatcgccgcctcatcttctc

SEQ ID NO: 28643 - DNA, 201 bp, Homo sapiens
gcatttcagataagtgttactcaagctgaagcaactttacctcctacctttgtattttaggaaggcacacctgcctttatgacatagcactcccaactctygtccattgatgtgtggccactttatggcttcagtatcaaaaagcctccaggcattggcttgagggaaggccagagttaaaggcaagaagctttgatcctg

SEQ ID NO: 28644 - DNA, 201 bp, Homo sapiens
tgctacacttggaaataaggctgtgtgacagatctcttgctcttcacaggtgggtctctttgtggacttttttgtgcgactcttcacccaactcaagttcrgagtggtacagacatgtatccttttcacggttcctggtgttcgtggacttcagtggtcaccaagattctttcttacatagaaatgggtctaacagtaagc

SEQ ID NO: 28645 - DNA, 201 bp, Homo sapiens
gactgaggcaggggaattgctggaacccagaaggcggaggttgcaatgagtggagattgtgccattgcactccagcctgggcaacaagagtgaaactctayctcaaaaaaaaaaaagaaaaaaaagtgcaagtcctcccattgcccctcagacctcctgagtcagatcctctggagtggggcccagcagctgtggttctgc

SEQ ID NO: 28646 - DNA, 201 bp, Homo sapiens
gttccccagatggggtctagaaggagaggcagcctggaggactgggtctgctctccaggcattatggaggtgggttttcttttgcagcaaattcaggtgctttttttttttttgtagcaaattgcagcaaaatcaaaggctttttctatttggaaccagagttggggctttcggtcaagtggtgccctggattttcctccc

SEQ ID NO: 28647 - DNA, 201 bp, Homo sapiens
tcatggagcccaacctgacctacgtctacccgcacacccgcatccagtctctggtgagcatcctgcgcaccacggtccaccatgccttcccggtggtcacrgagaaccgcggtaacgagaaggagttcatgaagggcaaccagctcatcagcaacaacatcaagttcaaggtaaagaaaacggcatgagaggaaaggcagg

SEQ ID NO: 28648 - DNA, 201 bp, Homo sapiens
ggcgccaatcgggggtaccttgttcagtctagaggagggttcgtccttctggaaccaagggctcacgtggaaagtggtgaggaggaccttcagtgaaagcrttaaccacaccccccgaattacactgggtgtcccttactcggtacatggaatggtagttttgatgagactgggggggtcaactggatcagaaacagcttt

SEQ ID NO: 28649 - DNA, 201 bp, Homo sapiens
acctcctgcagcagatgctggaaaggaggtgagagcctggcggggcccccactgcccgcagggctacacagcggtggggtgagcctttggctcagatgttktgaggtggctcctgagtttcctgggaaagttggatggggagcgggctgggaacatggatcagaagcgctcccgctgagggtatcccaggcagcatctggt

SEQ ID NO: 28650 - DNA, 201 bp, Homo sapiens
ttaactgtccactttttacaaacaaattgctggaatacagcaaatcacggatcaattctgcacacatgttgactgaccaggggctgctgtgaatgctgttyggagaaatcggggctgggggtaggcagggttatgttttgaatttctgagaccagagcttctttctgtggcgttgtaacagctgtgctttgcctcctagag

SEQ ID NO: 28651 - DNA, 201 bp, Homo sapiens
ctgaagccatctaagggcccccagccgccactcatctcattagcaaacaaaagataccacggctcaaaaaaaaaaaaagacaaagtatgtttgtgtgtgtgtgtgtgtgtgtgtgtgtgtgtgtgtgtgtgtgtgtgtgtattgttggggctcagaaaatgatacctggaaatatggtgctttgatatgctgaactctcca

SEQ ID NO: 28652 - DNA, 201 bp, Homo sapiens
gaagccatctaagggcccccagccgccactcatctcattagcaaacaaaagataccacggctcaaaaaaaaaaaaagacaaagtatgtttgtgtgtgtgtgtgtgtgtgtgtgtgtgtgtgtgtgtgtgtgtgtgtgtattgttggggctcagaaaatgatacctggaaatatggtgctttgatatgctgaactctccacc

SEQ ID NO: 28653 - DNA, 201 bp, Homo sapiens
agtggtgaggaggaccttcagtgaaagcattaaccacaccccccgaattacactgggtgtcccttactcggtacatggaatggtagttttgatgagactgrgggggtcaactggatcagaaacagctttcctcttgtgcccataacctccacactggactttctgtacttctcatatcaataccctccctaaccccaaatc

SEQ ID NO: 28654 - DNA, 201 bp, Homo sapiens
gagatgccagcaacagaaatggacttcgacctccttaagaaagagaaagaaatccacaggaaagctcaggacagctgggaaagctgaaggaccagaaccaygtgctgtggggagcagtgcagggtctagcagacatcccttgggtaccaggaggaaggagcactggccctgggttcctcctgattccgattcagaatccag

SEQ ID NO: 28655 - DNA, 201 bp, Homo sapiens
tggagaagggatctcctccttctgcgcttttctgctgtgcattcacgtactgctggctggtgagcagcctccgtatgtgcagtgggggaggagatgccttyaagaggagcacacctgtactatacttgtgctacacttggaaataaggctgtgtgacagatctcttgctcttcacaggtgggtctctttgtggactttttt

SEQ ID NO: 28656 - DNA, 201 bp, Homo sapiens
ttgtcctttccccaaggatttttaatttgacccatgaaaatttcctctcaagtgaaggaccagagagaaatgagcagagggctaggtacaacttccagggrcacatctcacccattagcctctgccgtgcgggaaagcagccccactcttgcttctgtcttctcttctgtctcttccggttctcatggctgctatggtttt

SEQ ID NO: 28657 - DNA, 201 bp, Homo sapiens; identical to SEQ ID NO: 5880

SEQ ID NO: 28658 - DNA, 201 bp, Homo sapiens
tttgatggtgacttcctcgcctctcccaccccatgcattaaattttaaggtagaacctcacctgttactgaaagtggtttgaaagtgaataaacttcagcmccatggacagaagacaaatgcctgcgttggtgtgctttctttcttcttgggaagagaattcaggccgatattccttgtcgttttactctttgtcagagga

SEQ ID NO: 28659 - DNA, 201 bp, Homo sapiens
cctgggctcaagcaatcctcacaccttggcctcccaaagtgctgggattacaggtgtgagccactgtgcccagccttacgcttgttatcttattttattttttatttattaattattttttgagacagagtcttgctctgctgcccaggctggagtgcagtggcacaacctcggctccctgcaacctctgcctccctggtt

SEQ ID NO: 28660 - DNA, 201 bp, Homo sapiens
cagtaccgaagataacagccagggaggacaagcagggctgggcctagggacagactgcaagaggctcctgtcccctggggtctctgctgcatttgtgtcaycttgttgccatggagttgtgatcatcccatctaagctgcagcttcctgtcaacacttctcacatcttatgctaactgtagataaagtggtttgatggtga

SEQ ID NO: 28661 - DNA, 201 bp, Homo sapiens
ctctttgcagtaccgaagataacagccagggaggacaagcagggctgggcctagggacagactgcaagaggctcctgtcccctggggtctctgctgcattygtgtcatcttgttgccatggagttgtgatcatcccatctaagctgcagcttcctgtcaacacttctcacatcttatgctaactgtagataaagtggtttg

SEQ ID NO: 28662 - DNA, 201 bp, Homo sapiens; identical to SEQ ID NO: 5886

SEQ ID NO: 28663 - DNA, 201 bp, Homo sapiens
gatatgtctgtgttctctttgcagtaccgaagataacagccagggaggacaagcagggctgggcctagggacagactgcaagaggctcctgtcccctgggktctctgctgcatttgtgtcatcttgttgccatggagttgtgatcatcccatctaagctgcagcttcctgtcaacacttctcacatcttatgctaactgta

SEQ ID NO: 28664 - DNA, 201 bp, Homo sapiens
ccctctcaagtttctgccccaacacccagagtgccccatgggtgtcaggacatgccatctattgtccttagctagtctgctgagaaaatgcttaaaaaaaraagggggggggctgggcacggtggctcacgcctgtaatcccagcactttgggaggccgaggcaggcggatcatgaggtcaagagatcaagactatcctgg

SEQ ID NO: 28665 - DNA, 201 bp, Homo sapiens
gtaatcaagttcagaggatgggcacactcatacatgaagctgacttttccaggacagccaggtcaccaagccagatatgtctgtgttctctttgcagtacygaagataacagccagggaggacaagcagggctgggcctagggacagactgcaagaggctcctgtcccctggggtctctgctgcatttgtgtcatcttgtt

SEQ ID NO: 28666 - DNA, 201 bp, Homo sapiens
tttactggcattccagctcctaggtcagaccagagctaatcccatgtacaatgccgtgtccaacgcagacctgatggatttcaaggtagggccaggaaagygggtgcagtctggggccagggggctttctgatgctgtgctcactcctcttgatttcctccaagtcagtgaggtttatccctttccctgtattttcctttt

SEQ ID NO: 28667 - DNA, 201 bp, Homo sapiens
cgccagcatgagctccttctccaccaccaccgtgagcttcctccttttactggcattccagctcctaggtcagaccagagctaatcccatgtacaatgccrtgtccaacgcagacctgatggatttcaaggtagggccaggaaagcgggtgcagtctggggccagggggctttctgatgctgtgctcactcctcttgattt

SEQ ID NO: 28668 - DNA, 201 bp, Homo sapiens
cagtagttaactaaaacagcctctcactccgcctcactcttgcttcctttgaataggaacccccacaaaactttagcgagtgaccttttgccttgggcttygttttctagggaaactgtccccagtcttcagcccttagtgacctccatattaaaccaaagaaacaaaacatcattttcaaagtcagcaacgatcatccct

SEQ ID NO: 28669 - DNA, 201 bp, Homo sapiens; identical to SEQ ID NO: 5882

SEQ ID NO: 28670 - DNA, 201 bp, Homo sapiens
cccatttccatccccagttcctcttacccggaagctgttacagcccagtccgctctgggctccaatcctgtccatcctgcccccgaagcagctggatctcrgcaggctccgaggggcagtgagcagcgccctcagcttgctttttaggagggcagatcgatcagaggagtcccaggggccccgcccgagggcacctccatc

SEQ ID NO: 28671 - DNA, 201 bp, Homo sapiens
gcattttacaaattaaaaaaaatacaatttatatacacagtggaattagctaacatcatacaaacaaacagtgcaaacagaaaaaaggaagctgcgactgyggcaatggccaaggtccgcagagctgtggtgcaatactgcacatcaatactgcagggctggcgaggccaccttgggcctctcgaaaggctttcctgtcac

SEQ ID NO: 28672 - DNA, 201 bp, Homo sapiens
agggcagatcgatcagaggagtcccaggggccccgcccgagggcacctccatctctctgggctgggctgacttccccggtccagggaggcacctcagggayggggctgagagcagcccccgcttcttcattcggctcactgagcacttgtgggggcacgacctcatcttctaaaggcatcttttcttccaaatggtccagc

SEQ ID NO: 28673 - DNA, 201 bp, Homo sapiens
aggcaggcggatcatgaggtcaagagatcaagactatcctggccaacatggtgaaaccccagctctactaaaaatacaaaaattagctgggtgtggtggcrggcacctgtactctcagctacttgggaggctgaggcaggagaatcacttgaacccaggaggcagaggttgcagtgagcagagatcgcgccactgcagtcc

SEQ ID NO: 28674 - DNA, 201 bp, Homo sapiens; identical to SEQ ID NO: 5890

SEQ ID NO: 28675 - DNA, 201 bp, Homo sapiens
ttagctagtctgctgagaaaatgcttaaaaaaaaaagggggggggctgggcacggtggctcacgcctgtaatcccagcactttgggaggccgaggcaggcsgatcatgaggtcaagagatcaagactatcctggccaacatggtgaaaccccagctctactaaaaatacaaaaattagctgggtgtggtggcgggcacctg

SEQ ID NO: 28676 - DNA, 201 bp, Homo sapiens
aacacccagagtgccccatgggtgtcaggacatgccatctattgtccttagctagtctgctgagaaaatgcttaaaaaaaaaagggggggggctgggcacrgtggctcacgcctgtaatcccagcactttgggaggccgaggcaggcggatcatgaggtcaagagatcaagactatcctggccaacatggtgaaaccccag

SEQ ID NO: 28677 - DNA, 201 bp, Homo sapiens
tcctgggctcaagcaatcctcacaccttggcctcccaaagtgctgggattacaggtgtgagccactgtgcccagccttacgcttgttatcttattttattttttatttattaattattttttgagacagagtcttgctctgctgcccaggctggagtgcagtggcacaacctcggctccctgcaacctctgcctccctggt

SEQ ID NO: 28678 - DNA, 201 bp, Homo sapiens
caacactggagggtgggaacacagggagcaggaagtgggaagatccttgctggggaagtcagaaaagtccaagctctgatggttcaaaaccacccccaggrcctctgaccagcaaggtgtccgatgactcccggctttctgagtgagtgggtgactgggaatcttccatgccccggaacagccccagccagctgtgcccgc

SEQ ID NO: 28679 - DNA, 201 bp, Homo sapiens
ggcagccgcagcccactcagctccttggggccggcaggaagtgctggggaattgacattgacctgagcagtgctcaaccaacatctgacaggagctggctttttttttttttttttttttttaaatagagacagagtcttgctctgtcaccaaggctggagtgcagtggcatgatcatagctcactataacctcaaactct

SEQ ID NO: 28680 - DNA, 201 bp, Homo sapiens
ctcctgggctcaagcaatcctcacaccttggcctcccaaagtgctgggattacaggtgtgagccactgtgcccagccttacgcttgttatcttattttattttttatttattaattattttttgagacagagtcttgctctgctgcccaggctggagtgcagtggcacaacctcggctccctgcaacctctgcctccctgg

SEQ ID NO: 28681 - DNA, 201 bp, Homo sapiens
ggcgtggtggcaggcgcctgtaagtcctagctactccggaggctgaggcaggagaatggcgtgaacccgggaggcggagcttgcagtgagcagagatggcrccactgcactccagcctgggcgacagagcaagactccgtctcaaaaaaaaaaaaaaaaaaaagcaactgccactagcactgggaaattaaaatattcata

SEQ ID NO: 28682 - DNA, 201 bp, Homo sapiens
tggcagccgcagcccactcagctccttggggccggcaggaagtgctggggaattgacattgacctgagcagtgctcaaccaacatctgacaggagctggctttttttttttttttttttttttaaatagagacagagtcttgctctgtcaccaaggctggagtgcagtggcatgatcatagctcactataacctcaaactc

SEQ ID NO: 28683 - DNA, 201 bp, Homo sapiens
gctcctgggctcaagcaatcctcacaccttggcctcccaaagtgctgggattacaggtgtgagccactgtgcccagccttacgcttgttatcttattttattttttatttattaattattttttgagacagagtcttgctctgctgcccaggctggagtgcagtggcacaacctcggctccctgcaacctctgcctccctg

SEQ ID NO: 28684 - DNA, 201 bp, Homo sapiens
ccactgcagtccagcctaggtgatagagcgagactgtctcaaaaaaaaaaaaaaaaaaaaaaaaaggccaggcgcggtggctcacgcctgtaatcccagcrctttgggaggccaaggcgggtggatcacgaggtcaggagatggagaccatcctggctaacacggtgaaaccccgtctctactaaaaatacaaaaaattag

SEQ ID NO: 28685 - DNA, 201 bp, Homo sapiens
agctcctgggctcaagcaatcctcacaccttggcctcccaaagtgctgggattacaggtgtgagccactgtgcccagccttacgcttgttatcttattttattttttatttattaattattttttgagacagagtcttgctctgctgcccaggctggagtgcagtggcacaacctcggctccctgcaacctctgcctccct

SEQ ID NO: 28686 - DNA, 201 bp, Homo sapiens
cagaggttgcagtgagcagagatcgcgccactgcagtccagcctaggtgatagagcgagactgtctcaaaaaaaaaaaaaaaaaaaaaaaaaggccaggcrcggtggctcacgcctgtaatcccagcactttgggaggccaaggcgggtggatcacgaggtcaggagatggagaccatcctggctaacacggtgaaacccc

SEQ ID NO: 28687 - DNA, 201 bp, Homo sapiens
ctgggtgtggtggcgggcacctgtactctcagctacttgggaggctgaggcaggagaatcacttgaacccaggaggcagaggttgcagtgagcagagatcrcgccactgcagtccagcctaggtgatagagcgagactgtctcaaaaaaaaaaaaaaaaaaaaaaaaaggccaggcgcggtggctcacgcctgtaatccca

SEQ ID NO: 28688 - DNA, 201 bp, Homo sapiens
tttttgagacagagtcttgctctgctgcccaggctggagtgcagtggcacaacctcggctccctgcaacctctgcctccctggttcaagcaattgtcctgyttcagcctcctgagtagctgggactagaggcgtgtaccaccacacttggctaatctttttgtatttttagtggagacggggtttcactgtgttggccagg

SEQ ID NO: 28689 - DNA, 201 bp, Homo sapiens
gaaataattgccatcgggtgtggatgcaaagggcatgactcaggtcccatattcgtgtctccctgggcctgatacattttgcatacttcacatagctcacrctgctctgagctatttttctcttttcggtagtattgtacccattttccaggtgaggaaactgaggctcgcagactttctaagaatgcactgaggtcatgg

SEQ ID NO: 28690 - DNA, 201 bp, Homo sapiens
agcttagctgaggtccctgtcagaagcttccagatggtcccaggggattgacactgccttgtcccttcctgagggactgtggagactcgtggctgcctctycattcttctcatgatggtagatggaagagggccgtgcagattttaatgtatttatcgttatcaaatctccatattaaccccatgagggggtgtcagtgtt

SEQ ID NO: 28691 - DNA, 201 bp, Homo sapiens
taacctgggttcctgaagggtaaattgcaggagccagaacccaggctgctttctggatcaggcatttgccactgcctgctcctcggtccccatggtgagcrccccctctgctgcacagagctggtatgacagcccctcagcctgctaaatgccttcttagattggctcagcagccctctggggtgggcgtcagctctgcgt

SEQ ID NO: 28692 - DNA, 201 bp, Homo sapiens
tcctctctgcctctgcccacgtgtcctcctgcctggaatgcctgctgtctcttccgtgctcagtgaactcttacctcctggtccagcccagatgtcacccmctccgtgagacttcctgagccttctccagccgaaaggactattcctgcctctgtttccccagagcatgttgttcctgcatcagttacagctcagattgca

SEQ ID NO: 28693 - DNA, 201 bp, Homo sapiens
ggccccgagcacctcagatggcattggcctaagaagcccccatgcttggagtttatccatccagaaactggcatgcactttacgtgggccaggaaactcayaggtctgtgatttgagggagaataaaaggtcagcccttttgcaaacagggcaagcacattctggctctgtccggctgaaaccctgggcagacgtgtgcag

SEQ ID NO: 28694 - DNA, 201 bp, Homo sapiens
agagggttgggaggcagcagagcatgggtgacagtgggagcacacgacttccttggagcctgggcctttgcgggtcccaggtggtcaggcagctggagcaraagtggaaatggcttaagatgctcatagcccagccccggctgtgtctactccaggccaagcctgggctgcagtccttgctatgttccccccagggccctg

SEQ ID NO: 28695 - DNA, 201 bp, Homo sapiens
cctggccattatgaaagaggagggaggtagaggggatccagccacaagtcaggtggatgaaccatttcaggcaccagcactgcccagtagaactttttgtsatgagggatgcgtccagtaccttcactctccaatatgcagccaccagccacacatggccatggagcccttgaagggtggcctgtgcgactgaggaactgc

SEQ ID NO: 28696 - DNA, 201 bp, Homo sapiens
acacatggccatggagcccttgaagggtggcctgtgcgactgaggaactgcattatctagttttctttcattttaattaagttaaatcttagtagccagtygtggctggtggctgccgtgtcgggcattgcagctgtaagcggaggcaagtgcaaatgcagagaccagaagtgggaatgaacttgtatttgaagaaacaaa

SEQ ID NO: 28697 - DNA, 201 bp, Homo sapiens
gcctcttagacctccctcctccctgcccaccccagtcctttgcccgtatcaagaagtggctggagcacgcacgctcctcacccagcctcaccatcctggcygggggcaagtgtgatgactccgtgggctactttgtggagccctgcatcgtggagagcaaggaccctcaggagcccatcatgaaggaggtgactggggtgg

SEQ ID NO: 28698 - DNA, 201 bp, Homo sapiens
tgccgcagggatgccttcccagcctcttagacctccctcctccctgcccaccccagtcctttgcccgtatcaagaagtggctggagcacgcacgctcctcrcccagcctcaccatcctggccgggggcaagtgtgatgactccgtgggctactttgtggagccctgcatcgtggagagcaaggaccctcaggagcccatca

SEQ ID NO: 28699 - DNA, 201 bp, Homo sapiens
ggccctgccacctctcctcatggggccaggaaggcccctcggagtggggttcgaagccacaccacacagactttctctgccctcccttctctggaggcccygagggactgctgcttccttccttccttccacaccaccaacgggtgccccgtctccatcccccacccacccaaggaatggtgctgtcaatttctattgttc

SEQ ID NO: 28700 - DNA, 201 bp, Homo sapiens
ggtgagcgggaccctccgctcagccttcgagtacggtggccagaagtgttccgcctgctcgcgtctctacgtgccgcactcgctgtggccgcagatcaaarggcggctgctggaggagcacagtcggatcaaagtgggcgacgtgagtggcaccgtcacccccgccgcggcccagcggggggctgatgggattgggtccct

SEQ ID NO: 28701 - DNA, 201 bp, Homo sapiens
tgtgggggctgccgcagggatgccttcccagcctcttagacctccctcctccctgcccaccccagtcctttgcccgtatcaagaagtggctggagcacgcrcgctcctcacccagcctcaccatcctggccgggggcaagtgtgatgactccgtgggctactttgtggagccctgcatcgtggagagcaaggaccctcagg

SEQ ID NO: 28702 - DNA, 201 bp, Homo sapiens
ctggcttccccctggagctgggagagaggccggggttagggtgatctgtgtggcagcactgactgggtagtgtgggtttggccgaggttggtcatgaggcyggggttcccgcaaggcactggcctccctgaccgcttgcttccttccggacctctgggttcagggcgggggcggagggatccttgatttccctgataactt

SEQ ID NO: 28703 - DNA, 201 bp, Homo sapiens
ccccacccagggagactttataccccatgatcctgccccaccgttgctgttgtctgccagctgggtctagcatcacagggaagggggggatttatactcayggaaagactactgatcctaccggaaaccaacctgtttactgtactgttgtaaatatcatgccctttatatcctgtatattggcttcttttaaataaagtg

SEQ ID NO: 28704 - DNA, 201 bp, Homo sapiens
gtgggtttggccgaggttggtcatgaggctggggttcccgcaaggcactggcctccctgaccgcttgcttccttccggacctctgggttcagggcgggggyggagggatccttgatttccctgataacttgatgttcttccctccctcgccagccaacaatagaggcttagagatctgtaatttctctgtgagaaagtctg

SEQ ID NO: 28705 - DNA, 201 bp, Homo sapiens
tgaatgtgttcatatagggctccgtgtggctccacatgtaggtctttccatataaacatgtacatatccatttgcacataagcacacacacgcatatgtcrataagtccacccacacgcatgtacatggagaaggcatgcagatccctacatgcttagacatgtgaccatgcatatgcctatatatgcattgattgatgtg

SEQ ID NO: 28706 - DNA, 201 bp, Homo sapiens
ctcctaatagcatttgcatgagtgcatgtacacgtgtgtttgtgaatgtgttcatatagggctccgtgtggctccacatgtaggtctttccatataaacaygtacatatccatttgcacataagcacacacacgcatatgtcgataagtccacccacacgcatgtacatggagaaggcatgcagatccctacatgcttaga

SEQ ID NO: 28707 - DNA, 201 bp, Homo sapiens
gaaagaacttccacttcgtgcaccgctcggccgacgtggagagcgtggtgagcgggaccctccgctcagccttcgagtacggtggccagaagtgttccgcstgctcgcgtctctacgtgccgcactcgctgtggccgcagatcaaagggcggctgctggaggagcacagtcggatcaaagtgggcgacgtgagtggcaccg

SEQ ID NO: 28708 - DNA, 201 bp, Homo sapiens
aaatgcgtgaatggatgaggaatgctgtcctgccaagaaggtcctcatggatcctcagagaggccccaagtcctgtgactgattcatctctgccttcaccygagcagccagtggatggatactcctgttagcccaaaattgttcatgaaccaaaaaaaaaaaaaaaaaaaaagaaagaaagaaagaaaaaagaaagcactg

SEQ ID NO: 28709 - DNA, 201 bp, Homo sapiens
cctgtgactgattcatctctgccttcacccgagcagccagtggatggatactcctgttagcccaaaattgttcatgaaccaaaaaaaaaaaaaaaaaaaaagaaagaaagaaagaaaaaagaaagcactgatgggtgggagtccttaggttatttttagctgcagtcgactcaggctgaactttgaactagtgtctgttct

SEQ ID NO: 28710 - DNA, 201 bp, Homo sapiens
tcttctcatgatggtagatggaagagggccgtgcagattttaatgtatttatcgttatcaaatctccatattaaccccatgagggggtgtcagtgttttakggagggagggaaactggcttcaagacatgtgacttgcccaaggtcacacagctagtgggaggcagagtgggggtggggagtgcagagctaccggctcagg

SEQ ID NO: 28711 - DNA, 201 bp, Homo sapiens
gccaccgacctggcctggcccccttctcatttctgtattgcctgggcacctccgtctgtggactctgcgttagggttttagatgggaggaagcgaggaagkcggtgaccatacccactcttgtccctctccccaggccttgaaggacctgaagggccggatggaagccatcccatgcgtggtgggggatgaggaggtgtgg

SEQ ID NO: 28712 - DNA, 201 bp, Homo sapiens
attggcctaagaagcccccatgcttggagtttatccatccagaaactggcatgcactttacgtgggccaggaaactcataggtctgtgatttgagggagartaaaaggtcagcccttttgcaaacagggcaagcacattctggctctgtccggctgaaaccctgggcagacgtgtgcagggggaggggtgactgaggggga

SEQ ID NO: 28713 - DNA, 201 bp, Homo sapiens
tcagatcccagtacttgcaaccctgacatctggtgcaggaggtgaaatggtgcatgtcctttgtagatcatatctcagtacttgtagccctgacatctccygccacaggaggtgaaatggtgcatggccttcatggatcggatcccagtacttgcagccctgacatgtcccgctgcaggaggtgaaacggtacatggcctt

SEQ ID NO: 28714 - DNA, 201 bp, Homo sapiens
taacctgaccgaaggcccacagccaacagctggccagcatccctcatccctgactcggcctcgtgttgaacctggaaagccagtgtgggctggagcagggstgttgaggctggagctggggctggaggggagatgagctggttgctctgtcaccactgctctgctttgtagggacgtcgtgcaggaggccacaaaggtgct

SEQ ID NO: 28715 - DNA, 201 bp, Homo sapiens
agtacctcggacgaggtgtcttgggcaaggtggagtctgggccctctgtgtcttttcagtttttccctctatagatttctgaagctgcattggctggcccrcagctccttgcaaccctgacatctcctggtgcagaaggtgaaatggtgcctggcctttgtagatcagatcccagtacttgcaaccctgacatctggtgca

SEQ ID NO: 28716 - DNA, 201 bp, Homo sapiens
cgtcttgagaaaatgtcttgaggtccctgaagggccaaatccatcgtggactaactctgtgggtagagctcagatgacctagggagaattaaaccacttamgcttggagtgggaggagagggggtggggtgggggagaatataagatgtaacttaagctaaatgtaatctatttataaagcaagagactctcatctatttt

SEQ ID NO: 28717 - DNA, 201 bp, Homo sapiens
aacttccacttcgtgcaccgctcggccgacgtggagagcgtggtgagcgggaccctccgctcagccttcgagtacggtggccagaagtgttccgcctgctygcgtctctacgtgccgcactcgctgtggccgcagatcaaagggcggctgctggaggagcacagtcggatcaaagtgggcgacgtgagtggcaccgtcacc

SEQ ID NO: 28718 - DNA, 201 bp, Homo sapiens; identical to SEQ ID NO: 5903

SEQ ID NO: 28719 - DNA, 201 bp, Homo sapiens
aagggtgtgggcctgggagctggagtttccgctgctcctgagggacaggaacattggaccaggacaggccactcccttcaacttcgcagtagccctgtaaygaggcgtgccaagcccctccccagaggaggaagctgggctcagagactgggtaacctgaccgaaggcccacagccaacagctggccagcatccctcatcc

SEQ ID NO: 28720 - DNA, 201 bp, Homo sapiens
caaaaggcctgctctgccagccacgggcccctgggctccccgcctatcagcgggcggagcgggcctggaccccattctccacgctctgatgagcagcgggsttaaaggtgggaaggccataaattagtattagctactgtgtcgctggctcccgggtgattagcatttttattgttttgtggtgctgaggttggtcacact

SEQ ID NO: 28721 - DNA, 201 bp, Homo sapiens; identical to SEQ ID NO: 5906

SEQ ID NO: 28722 - DNA, 201 bp, Homo sapiens; identical to SEQ ID NO: 5907

SEQ ID NO: 28723 - DNA, 201 bp, Homo sapiens
gggggacagcaggcgtgtccaggactttcctggaaaaccggctctgagtccagtcctcttcatccttatcctggcacctccctcccgggcaaggacctcaytcttctctcctttcagccttttaaccatggacataaggtggccaagttctgttatgcagacaaggtgagtgagcctgtgtgcctggtgacccggggttag

SEQ ID NO: 28724 - DNA, 201 bp, Homo sapiens; identical to SEQ ID NO: 5908

SEQ ID NO: 28725 - DNA, 201 bp, Homo sapiens
gaggttgttgtgaggctttggtcagacaaagcacagcgtacttcgtccagagttgggcagctgttaagtgctttcagctgctgttagctgctgcttcccayggagggaggaaactgaggccgggagagtgaagtgacctgtctgaagctccctcccactggggaaatgggggagcggtttccagcacgcgtggggaggagg

SEQ ID NO: 28726 - DNA, 201 bp, Homo sapiens
gaacttctcagagccttgaatgctctaatacgcatggcacatcttcaaggacaaggtctgccatgtagtgtttcccacacgcattgggccatggaaccccrtttctgcaaagacccccatggaccaagtgttttgtggagcacattttgggaatgtgctgaggcctagagggagggagagttgcagccagcacgtgaccag

SEQ ID NO: 28727 - DNA, 201 bp, Homo sapiens
aggagaagacgggctgagacgtaggcagggctggaccttgttggcatattaaagttttcccacaaagaaacagtttcatggtcaaggaaatttggcatgtrtggtgttaaagcaaaatggactcctcccgtgcagaacttctcagagccttgaatgctctaatacgcatggcacatcttcaaggacaaggtctgccatgta

SEQ ID NO: 28728 - DNA, 201 bp, Homo sapiens
gccaagttctgttatgcagacaaggtgagtgagcctgtgtgcctggtgacccggggttagggttgctgcccctgctctgccctgccagctgctgatatggygggggcagggggcatcagttgctgtgtccttctttggccatggtgggtaggtgggcagggggtggctgacactgagggagtccctgggtgatgtctttga

SEQ ID NO: 28729 - DNA, 201 bp, Homo sapiens
tatgcagccaccagccacacatggccatggagcccttgaagggtggcctgtgcgactgaggaactgcattatctagttttctttcattttaattaagttawatcttagtagccagtcgtggctggtggctgccgtgtcgggcattgcagctgtaagcggaggcaagtgcaaatgcagagaccagaagtgggaatgaacttg

SEQ ID NO: 28730 - DNA, 201 bp, Homo sapiens
cctcccgtgtggccccagggacccctcccctggccattatgaaagaggagggaggtagaggggatccagccacaagtcaggtggatgaaccatttcaggcmccagcactgcccagtagaactttttgtgatgagggatgcgtccagtaccttcactctccaatatgcagccaccagccacacatggccatggagcccttga

SEQ ID NO: 28731 - DNA, 201 bp, Homo sapiens
cactgggtgtgtgtgcaggtgccagctgacagcagcacctgccacccagctccctggttgtctctgtagctgcctagagcttgccctcacctgtagctccrcaggcgtctgaggctgcatggcagctgggatttttccaggcagcgaggctccggcattctgataagcccctgggtggatactgctgattttcatttccca

SEQ ID NO: 28732 - DNA, 201 bp, Homo sapiens
gcgatctcggctcactgcaagctccgcctcccaggttcatgccattctcctgcctcagcctccccagtagctgggattacaggcatccgccaccacgcccrgctaattttttgtatttttagtagagagagggtttcaccatgttagccaggatggtctcgatctcctgaccttgtgatccgcccgccttggcctcccaaa

SEQ ID NO: 28733 - DNA, 201 bp, Homo sapiens
tcccaggttcatgccattctcctgcctcagcctccccagtagctgggattacaggcatccgccaccacgcccagctaattttttgtatttttagtagagasagggtttcaccatgttagccaggatggtctcgatctcctgaccttgtgatccgcccgccttggcctcccaaagtgctgggatcacaggtgtgagccaccg

SEQ ID NO: 28734 - DNA, 201 bp, Homo sapiens
ggctcagggccctggtccctggtcccgtggagggtctgacgccggggcctctctcctaggagatcttcgggcctgtactgtctgtgtacgtctacccggaygacaagtacaaggagacgctgcagctggttgacagcaccaccagctatggcctcacgggggcagtgttctcccaggataagtgagtggccaggccgcagc

SEQ ID NO: 28735 - DNA, 201 bp, Homo sapiens
ggagggtctgacgccggggcctctctcctaggagatcttcgggcctgtactgtctgtgtacgtctacccggatgacaagtacaaggagacgctgcagctgrttgacagcaccaccagctatggcctcacgggggcagtgttctcccaggataagtgagtggccaggccgcagccctggtgctgtgctccgggtgtcctgtc

SEQ ID NO: 28736 - DNA, 201 bp, Homo sapiens
tggagagcgtggtgagcgggaccctccgctcagccttcgagtacggtggccagaagtgttccgcctgctcgcgtctctacgtgccgcactcgctgtggccrcagatcaaagggcggctgctggaggagcacagtcggatcaaagtgggcgacgtgagtggcaccgtcacccccgccgcggcccagcggggggctgatggga

SEQ ID NO: 28737 - DNA, 201 bp, Homo sapiens
cccaggctgctttctggatcaggcatttgccactgcctgctcctcggtccccatggtgagcaccccctctgctgcacagagctggtatgacagcccctcakcctgctaaatgccttcttagattggctcagcagccctctggggtgggcgtcagctctgcgtgttcctggtgagccgcacgttgctgggaagacagtctag

SEQ ID NO: 28738 - DNA, 201 bp, Homo sapiens
gctactttgtggagccctgcatcgtggagagcaaggaccctcaggagcccatcatgaaggaggtgactggggtgggcagcctggggtccagaggaggacartcccaccggagcacagcacacacacagttctcctggagacattctcccatttcacagatgaggccctaaagggagaccctaaaagggaatgcctccgacc

SEQ ID NO: 28739 - DNA, 201 bp, Homo sapiens; identical to SEQ ID NO: 5925

SEQ ID NO: 28740 - DNA, 201 bp, Homo sapiens
ttgacagcaccaccagctatggcctcacgggggcagtgttctcccaggataagtgagtggccaggccgcagccctggtgctgtgctccgggtgtcctgtcygtgtccccatccccacctcctggacgtggttcccagtaataatgctgcccctaccttctctctgtcccctcccctcagcccagacaggcagccagggctc

SEQ ID NO: 28741 - DNA, 201 bp, Homo sapiens
gacactgaagtgtaaactgaggcccagggactggggagagggtgagccagagcaggggcactgggagggctcagggccctggtccctggtcccgtggaggrtctgacgccggggcctctctcctaggagatcttcgggcctgtactgtctgtgtacgtctacccggatgacaagtacaaggagacgctgcagctggttgac

SEQ ID NO: 28742 - DNA, 201 bp, Homo sapiens
ggctgtgtgttagttctgagcaaatccctcaccaagacccttccctcccaagccctcaaagaaatgaggcaaagcccttccctgcaagaccccttgtggaygtttttgcatctacctgatttttagccccacccagggagactttataccccatgatcctgccccaccgttgctgttgtctgccagctgggtctagcatca

SEQ ID NO: 28743 - DNA, 201 bp, Homo sapiens
ttgaccctggctggggtctgagcatttccagtgccctcagcaaccacgtccactgcagccatcataatggctgacactgatagacttttactgtggggccrgctgtggctgagcacttggctgagatgacgtgggtgttactgttcccattttacagatgagaaactgaggtcaaggcacttgcccaagttggtagtgcag

SEQ ID NO: 28744 - DNA, 201 bp, Homo sapiens
ggagctaggtttggagaggtaggtgggacacagaccctgccccagaggggttcctagtctggtggggctgcccacctgtggatcagccccccctcccattkgaggtttgtttgcttgacccctggggctgttagtggcagtgtctttcctgatgagctgtgccctttctgagttaatcagtggccctctcccttcccccaa

SEQ ID NO: 28745 - DNA, 201 bp, Homo sapiens
cccagaggggttcctagtctggtggggctgcccacctgtggatcagccccccctcccatttgaggtttgtttgcttgacccctggggctgttagtggcagkgtctttcctgatgagctgtgccctttctgagttaatcagtggccctctcccttcccccaagggatggcatggtggtgctctgagcacaagtgagttgcaa

SEQ ID NO: 28746 - DNA, 201 bp, Homo sapiens; identical to SEQ ID NO: 5931

SEQ ID NO: 28747 - DNA, 201 bp, Homo sapiens
gggtctctgggatgttggccagcgctcactctgagcctccgcccgctctgggctgctccgtgctcgtgttggtcccgggccatggatggcgtaggtggtgytttgggcccctgggcaactgggggagccagctcctctggtcatttccccacccccgacccctgtagagtgcggcggaaagaacttccacttcgtgcaccg

SEQ ID NO: 28748 - DNA, 201 bp, Homo sapiens
gttagtggcagtgtctttcctgatgagctgtgccctttctgagttaatcagtggccctctcccttcccccaagggatggcatggtggtgctctgagcacawgtgagttgcaacactgctgtgtgtcctctgtgggtgaagaggggataggaaagggcgcaggaagaggacatgggacagaggggttcctcttctaggctga

SEQ ID NO: 28749 - DNA, 201 bp, Homo sapiens
tggcagcaggctcgctgctggccgctacactgctggtccgttgattccatcatctcctcccttccccttctgcccaggctgttgcatcttttcagagaaawacagaagtgtcttttccgcaggaaccaatgacaagccagggggcccacactacatcctgcgctggacgtcgccgcaggtcatcaaggagacacataagcc

SEQ ID NO: 28750 - DNA, 201 bp, Homo sapiens
gtggtgttccttgtacctttacccagcaagatatgatagggatggtttttttttttctgagacggagtctcgctctgtcgcccaggctggagtgcagtggygcgatctcggctcactgcaagctccgcctcccaggttcatgccattctcctgcctcagcctccccagtagctgggattacaggcatccgccaccacgccc

SEQ ID NO: 28751 - DNA, 201 bp, Homo sapiens
gcatgccccaagcttggcagcaggctcgctgctggccgctacactgctggtccgttgattccatcatctcctcccttccccttctgcccaggctgttgcaycttttcagagaaaaacagaagtgtcttttccgcaggaaccaatgacaagccagggggcccacactacatcctgcgctggacgtcgccgcaggtcatcaag

SEQ ID NO: 28752 - DNA, 201 bp, Homo sapiens
gaattctggctaggaaccaggggtgaaggctagatatgtacctcttatggcaccccaggaccatgccaagtccctgcctctcagtctagtgttctctccaygccacaccctgcctcttagacatcctcgcatcccagcaaggatgcaaggctgggtgcgactggagagaacaatggaggctccccacagactggagactgg

SEQ ID NO: 28753 - DNA, 201 bp, Homo sapiens
ttacctcctcttccaggccccaggctctgccacccccttccccgcagctttgctgggggtgggagtgggtggtggcagcgttagaactgctgagaagggcygttttccaaaaggcctgctctgccagccacgggcccctgggctccccgcctatcagcgggcggagcgggcctggaccccattctccacgctctgatgagc

SEQ ID NO: 28754 - DNA, 201 bp, Homo sapiens
gcttactattacccatgtattgcagagggtattttaaaggatacagatgaacagccagatgcgcagacacatagggcaaagactggaagggtccccggcakgggcaccgccgtccccctggagttcgggctgtgccacccccttggcatgtggacgtgttcaccaatctggaagctctcccgaccctgtccttttaggttt

SEQ ID NO: 28755 - DNA, 201 bp, Homo sapiens
ggtgctgaggttggtcacacttggagcctggggaggaggcgaggccctccagggtggtggcttcgggcggggcctgagctccctctcccaggactctcctyggtttggcctctcaggcctgggcgctgggcttgggggggatccttcgcagaccacagcggggtctgttccctgccaggtacctgcagtgtgcccagcatg

SEQ ID NO: 28756 - DNA, 201 bp, Homo sapiens
agcgtgcttactattacccatgtattgcagagggtattttaaaggatacagatgaacagccagatgcgcagacacatagggcaaagactggaagggtcccyggcatgggcaccgccgtccccctggagttcgggctgtgccacccccttggcatgtggacgtgttcaccaatctggaagctctcccgaccctgtcctttta

SEQ ID NO: 28757 - DNA, 201 bp, Homo sapiens
caggttaagaactcagtcccgtaagactgaccccccaacttcagatgccaatcacaagtactgggaccccaggttacccacaccttgtctgactttgcgaygcattagaagctcccatgatgccctcttgagttttgatacgttgttagaacagctcacggaaccgaggggaagcgtgcttactattacccatgtattgca

SEQ ID NO: 28758 - DNA, 201 bp, Homo sapiens
ttgatggatgctggctgggtgtcctacagtttaacttgatgctcactgcctggggttagtgcagaccccacaggttaagaactcagtcccgtaagactgaycccccaacttcagatgccaatcacaagtactgggaccccaggttacccacaccttgtctgactttgcgacgcattagaagctcccatgatgccctcttga

SEQ ID NO: 28759 - DNA, 201 bp, Homo sapiens
gaagggccggatggaagccatcccatgcgtggtgggggatgaggaggtgtggacgtcggacgtgcagtaccaagtgtcggtatgtccagcgggtgggcagrgctcagcccctcccctgaatatgtgacctctttctctgacagctcgtaagcttataatgtgtgggctctgacttcaaggcctttatagtgcccctcccca

SEQ ID NO: 28760 - DNA, 201 bp, Homo sapiens
tagtgggccagcagccctttgggggggcccgagcctctggtgagtgggtcccccttcccacaggggagctgagttcctggtgggagaccctagatgttacrtctcgaggggcttcagagtaataggaaggataccatttactgagcacttattgtgggccaagcaagtgcactagctcagggtcctttcagcaaactcgtg

SEQ ID NO: 28761 - DNA, 201 bp, Homo sapiens
aggtcagaggatttgagcaaggagttcttgagactcagtgtcctggaatcaggcacctcacccccagggccagccctcccggggctgtgagctgagctcarggcagctctccaagttcatggtccacatcttggacattcctgcccagccagagctctcagccctttgtgccaaggggatctcagctggttcacattctga

SEQ ID NO: 28762 - DNA, 201 bp, Homo sapiens; identical to SEQ ID NO: 5892

SEQ ID NO: 28763 - DNA, 201 bp, Homo sapiens
aatgccaagtatgcggtggagctggaggggcagcagcccatcagcgtgcccccgagcaccaacagcacggtgtaccggggtctggaggtacctgcaggagrcagtgggcgagcaggcggggcagcccaatgccatgggcctgatctcaccgctgcctccttccccagggcttcgtggcggccatctcgccctttaacttca

SEQ ID NO: 28764 - DNA, 201 bp, Homo sapiens
gtcccctagacttggggctggtggctcttgagggcccagtgcctgctcggggacctgaggcctctttgcatggtcaccacaataagtccctgtgtctgcgktggcccaaggagccccttcatttccctgctgtggccagggccagggcttggagcgtgaaccatttgactgaggccggatgtccctgccaccactgtccca

SEQ ID NO: 28765 - DNA, 201 bp, Homo sapiens
cagcgctcactctgagcctccgcccgctctgggctgctccgtgctcgtgttggtcccgggccatggatggcgtaggtggtgctttgggcccctgggcaacygggggagccagctcctctggtcatttccccacccccgacccctgtagagtgcggcggaaagaacttccacttcgtgcaccgctcggccgacgtggagagc

SEQ ID NO: 28766 - DNA, 201 bp, Homo sapiens
gctcagccttcccactccttgacccttcagaggcccagggctgctctctgaatttccccactctcttgtgcttctcaggaattcaccgtcccccagctccrtggccagcagcgactcaggaagtacagatgagatccaggatgagttcgagcgcgaggcggatgtggagcccatggtcagctgatgactgaggccctgcga

SEQ ID NO: 28767 - DNA, 201 bp, Homo sapiens; identical to SEQ ID NO: 5897

SEQ ID NO: 28768 - DNA, 201 bp, Homo sapiens
catcctcatgcatcactgaaacacctcccgggcagggcaacgtggtcctatggaagcccagtgacactgccatgctggccagctatgctgtctaccgcatycttcgggaggctggcctgccccccaacatcatccagtttgtgccagctgatgggcccctatttggggacactgtcaccagctcagagcacctctgtggca

SEQ ID NO: 28769 - DNA, 201 bp, Homo sapiens; identical to SEQ ID NO: 5901

SEQ ID NO: 28770 - DNA, 201 bp, Homo sapiens
ctctgctttgtagggacgtcgtgcaggaggccacaaaggtgctgaggaatgctgccggcaacttctacatcaacgacaagtccactggctcgatagtgggycagcagccctttgggggggcccgagcctctggtgagtgggtcccccttcccacaggggagctgagttcctggtgggagaccctagatgttacgtctcgag

SEQ ID NO: 28771 - DNA, 201 bp, Homo sapiens
acctggcgggggcaccggccctgatggtgagatgtgggcacaggtgggacagcggcagctggttgtcctcctggtcccaacagacagacagaggccacccygagccccttgggtctcagcctagtcatggggagaggcacagaaggtggaggcagcttggggctgtgggtaggctttgggaccagagacccagtttgaatc

SEQ ID NO: 28772 - DNA, 201 bp, Homo sapiens
caggaggtgctagctcaggggcttgagaatcctttccccctcagcccctgggatgggacctggtgagccctccaaatgtttcctggtccctcctggggccyggctcagtgctcgctttgggcacagcgtcagatgtgagaagaggatggacaggaggctgttggctgctcctgacccccggccctctgccttgcagggtaa

SEQ ID NO: 28773 - DNA, 201 bp, Homo sapiens
ctgagcgagatgccctgcaaaaggtaatgggagggtgggaggcacccgagaggtgcagggcatggagcagaggccatccccagcagccctgagatagcgcyccgtgcctgcagccatcacccgcttctacccttgctcccagccttgggtggaagcctgggagggctgtgggtctggagtgtgggaacagctgggaggacc

SEQ ID NO: 28774 - DNA, 201 bp, Homo sapiens
tccacccacacgcatgtacatggagaaggcatgcagatccctacatgcttagacatgtgaccatgcatatgcctatatatgcattgattgatgtgtgtctrtgtttatatgcgagtgcacctgtagtactaacacacgtacacttgtgtgtgtacacacacacacacacacacacacacacacagtgttcatgtctgtcct

SEQ ID NO: 28775 - DNA, 201 bp, Homo sapiens
tccactggctcgatagtgggccagcagccctttgggggggcccgagcctctggtgagtgggtcccccttcccacaggggagctgagttcctggtgggagascctagatgttacgtctcgaggggcttcagagtaataggaaggataccatttactgagcacttattgtgggccaagcaagtgcactagctcagggtccttt

SEQ ID NO: 28776 - DNA, 201 bp, Homo sapiens
cccctccccagaggaggaagctgggctcagagactgggtaacctgaccgaaggcccacagccaacagctggccagcatccctcatccctgactcggcctcstgttgaacctggaaagccagtgtgggctggagcaggggtgttgaggctggagctggggctggaggggagatgagctggttgctctgtcaccactgctctg

SEQ ID NO: 28777 - DNA, 201 bp, Homo sapiens; identical to SEQ ID NO: 5932

SEQ ID NO: 28778 - DNA, 201 bp, Homo sapiens
ttcctccgtggcactggttgcccccatgtctgcctctatgagaaagtggaggtgagcttggagagggaggaagggtgtgggcctgggagctggagtttccsctgctcctgagggacaggaacattggaccaggacaggccactcccttcaacttcgcagtagccctgtaacgaggcgtgccaagcccctccccagaggagg

SEQ ID NO: 28779 - DNA, 201 bp, Homo sapiens
ccaccgacctggcctggcccccttctcatttctgtattgcctgggcacctccgtctgtggactctgcgttagggttttagatgggaggaagcgaggaaggsggtgaccatacccactcttgtccctctccccaggccttgaaggacctgaagggccggatggaagccatcccatgcgtggtgggggatgaggaggtgtgga

SEQ ID NO: 28780 - DNA, 201 bp, Homo sapiens
atgcgagtgcacctgtagtactaacacacgtacacttgtgtgtgtacacacacacacacacacacacacacacacagtgttcatgtctgtccttgtctctkctgtggctcagccagaccctggcttttgcccttggcgtcccctacccctgcccctgtttcaggagttgggcccttcaggtgcaggtgtttcggggtgagt

SEQ ID NO: 28781 - DNA, 201 bp, Homo sapiens; identical to SEQ ID NO: 5936

SEQ ID NO: 28782 - DNA, 201 bp, Homo sapiens
cagctgggctgggtgtgggttctgtgtccttccaggatatgtgtcatttcccatgaggggccggggcaggtggctgggtgggggcacaggctggagtattyttagttctactggttctacactgtgaggtggcaatgggatttgctcagatgccacccaataaaatgcctgttacttaatcacagtggtggatggtctttc

SEQ ID NO: 28783 - DNA, 201 bp, Homo sapiens; identical to SEQ ID NO: 5910

SEQ ID NO: 28784 - DNA, 201 bp, Homo sapiens; identical to SEQ ID NO: 5941

SEQ ID NO: 28785 - DNA, 201 bp, Homo sapiens; identical to SEQ ID NO: 5915

SEQ ID NO: 28786 - DNA, 201 bp, Homo sapiens; identical to SEQ ID NO: 5918

SEQ ID NO: 28787 - DNA, 201 bp, Homo sapiens
gcatcatacttcttggccagcttcttgaccagattcttattcttgagtttttttggcacctcagtgtccacttggggggatatccgtggccttggtctcgycacagtgctgctgttcccccaggacccacacttgggacagggagtggacttaagcctgacggtgcccgagaagcgcttgtccttctgggggtcatagttc

SEQ ID NO: 28788 - DNA, 201 bp, Homo sapiens
acctgaactagaactaagggctttctgaactggcctgtcagtgtccttccatccagccacctgttcctgcccaggcaggagagccactctttgcttcttgyttcttttatctctaataaatagccttagtatttttcagttcagctgcttaacctgaatgttaatacatttttaataaggaaaaaagatctggattgaatt

SEQ ID NO: 28789 - DNA, 201 bp, Homo sapiens
aagtatctcttaagctcactcttttatgtccctgttacactatccaaggccagaccaccattatctcataggtgattccgacactactttcttatatgttyttctctgtttctagtgcctcttcctcccatgtatgttttctacactgcacccaaaatggtcttttaaggaaacacaaataagatggtcatttctctgctt

SEQ ID NO: 28790 - DNA, 201 bp, Homo sapiens
catataagcatcccttgggtgcagcaggttcaaatcctataaacatgaatgttcacttctcattcaggtgtctgatgtccctcaagtgccttactctcctstgctacccactcagtcaccaggtccttttgctgctgtgttccaagtatctcttaagctcactcttttatgtccctgttacactatccaaggccagaccac

SEQ ID NO: 28791 - DNA, 201 bp, Homo sapiens
ctgcactgcagctaggtgacagcaaaaccctgtctcaaaaaaacaccaaacaacataggatactgttatataacagctagttcctatacctgtaatcttaytaattcatttaaaatacatcagtgcgggccgggtgtggtggctcacacttataatcccaacactttggaaggccaaggcgggaggatcacttgaagccac

SEQ ID NO: 28792 - DNA, 201 bp, Homo sapiens
tatgggaaagagcattaaaaataaagaaaaataaaggttattgaaagtattttacatttcagttacggtgactggtggttgatctctggagaacagtcatyacacagccaaacaaatgggggcctccagaaatgtatggtcacgcccacagcatcctcagtgccacccggcattcatttctgctgctttcatcagtattct

SEQ ID NO: 28793 - DNA, 201 bp, Homo sapiens
ttcaggggcctggggatgtgtacttgcactccaagtcgaggagactgaactttttaccaaagacttggtgttctgtagaagtatgagcagatgagtgacargatctggtttatatgttaagaagttctcagctgtaaggtgaatagattggaggtgttggggcaaaggcaggggacccagtgaagacaaggagcgaggctc

SEQ ID NO: 28794 - DNA, 201 bp, Homo sapiens
ctttttttaagtgaccgtaagtgtgaaatttcagtaaaacaattgtttaatcataggcatgactgcaagttgactaaataaaagcatactatttactgaargtgggaggaatccttaatagtgcacgtagtagttttcatagttcacgtacgtcgcaacattcattcctccattttaataaaggaagaggaaactgaccct

SEQ ID NO: 28795 - DNA, 201 bp, Homo sapiens
tgggaatacagatgcctgccactacgcccggctaattttttgtatatttagtagagacaggatttcactgtgttagtcaggatggtctcgatctcctgacytcgtgatccacccgcctcggcctcccaaagtgctgggattacaggcgtgagccacgcgcccggcacagctccatcttttttacttacctctttattggtg

SEQ ID NO: 28796 - DNA, 201 bp, Homo sapiens
atcagttgaacccaggagttcaagaccagcctagccatcatagtgagacaccatctctacaaaaaatttaaaaattagccaggcatagtggcacactcctrtggctgagataggaggatcgcttgaccccaggaggttgaggctgcagcaagctgtgatagtgccactgcactctagcctgggtgaatacagcaagaccct

SEQ ID NO: 28797 - DNA, 201 bp, Homo sapiens
ttctgcctcagcctcccaagtagctgggaatacagatgcctgccactacgcccggctaattttttgtatatttagtagagacaggatttcactgtgttagycaggatggtctcgatctcctgacttcgtgatccacccgcctcggcctcccaaagtgctgggattacaggcgtgagccacgcgcccggcacagctccatct

SEQ ID NO: 28798 - DNA, 201 bp, Homo sapiens
gtctattaaaggaaattcagatttttattagaaaaaaagtgtgtggctctttccataactgtactcttaatttttataaattggccacctaaaagggaacmtttttttgcttcatacaatttacattccttcctactcagatgaatctgacttgcaaacatgtgtgaagatggcttattgactatgaggaaggggctggtg

SEQ ID NO: 28799 - DNA, 201 bp, Homo sapiens
tgtgctattatttagactgggaatcagcaaacttctgtaaagggccagatagtgaacattttaggctttgtgggccacactgtctctgtcgcaactatttmactctcttgttgtagcttagaagcagtcgtaggctgggtgcgatggctcatgcctgtaatcccagcactttgggaggctgaggtgggcggatcacctgag

SEQ ID NO: 28800 - DNA, 201 bp, Homo sapiens
ttaccctgagtgccagttacagtgattcacatctgaaagaacagtactgcaggagagggacagcccagggtggatgggtggggtgggcaggagctggctgscaactccttccctgagctgggcctgcagagccctgaggagtggggcatgctgtcctttttgcctgatttccaaggattctgcttaacgaattacttcgtt

SEQ ID NO: 28801 - DNA, 201 bp, Homo sapiens
aaaaatattttgtcagattattttcagcacaacctgcacatctccttaaatttttttaatgaccagagttaccccttttaaatagaattcttcgtgtttaytacataaaagtaaaattcatactgttgtcttgacacttagtttttattcattttgagatctaagactgaaaagtctacttgtttaaatccccaatcacct

SEQ ID NO: 28802 - DNA, 201 bp, Homo sapiens
attattaattatagactgttcagacaaggttatgcagaattttcttagtttgcactgactaaacctaatctttcaagttaataatgttgctaaaccacctrcatagcagagacactctgctcctacgatttcatatgctttagatacccggacgacactgtttagactacttcatttaaagaccccagagaagtgacgtgc

SEQ ID NO: 28803 - DNA, 201 bp, Homo sapiens
ggcaaaacagaatcagccaaagagctttgccaggtttgggacacccattcatgaccagccagcaagagagacagtgagttcaatctgagaagagtctggtractcccagaataaaccattccttcctggccagccgtggtggttcatgcttgtaatcccagcactttgggaggccaaggcgggtggatctcctgaagtcag

SEQ ID NO: 28804 - DNA, 201 bp, Homo sapiens
caaggctggagtgcagtggtgcaatcttggctaacttcaacctccgcctagattagggaggatctctgacatccattagcattaactagaagtcagacgcrtcagaaggtttctatttaccctcttactcacttcttagcccctttattaagccacctcattttaaactgggcaaaacagaatcagccaaagagctttgcc

SEQ ID NO: 28805 - DNA, 201 bp, Homo sapiens
atgctgattggcgggactccgggtggcggcctgtcgtcacttccggcagccggaggcagcagaggaagccgaggggcggccatcttggctccgtgaggctytgaggtgccggggtgcggcggcggcagcggcggccagcagggcggaggctgaggcagcaagctcgctagagagggagaagcagtcgggcgcaggcgcctc

SEQ ID NO: 28806 - DNA, 201 bp, Homo sapiens
ttgtagtagaaattccattgaagaaacgtttgactctgttcgttttctaactctgttctcctctaacactgggttcaaaagtgtttcaatctagttgttgmctatattctgtaaaacatctagtaaataatttgtaaagaaacttcactggcctttcattaaaagtgttatgaggtaattgctggcacgaaatgtcttctc

SEQ ID NO: 28807 - DNA, 201 bp, Homo sapiens
cttgtactaccagttcctgaaccttttgagagttctataatacaaatcaggattttccaatatctccatagctggcttaggattaatctttcttatatgtrttaagtcattttccttctttttttagtttctgaaagtatatctgttaccacttttattttctttgtcttgtggcttttttccttatgccttatatttttt

SEQ ID NO: 28808 - DNA, 201 bp, Homo sapiens
aatcacaggctttcctcatttgtgtgatttttttattttgttcatgtcttcaagagtggagccctaagaagaaagctgagagctcccagtaaaggggtgaygagtgcctggcttagcctcatagaggccagaggaacgtcggtctttacactgggacattccacacacgcaacacagagttattttctatggacagttgag

SEQ ID NO: 28809 - DNA, 201 bp, Homo sapiens
agggctttgtaaactgcacagcactgcacagttgtgcgatattttgataagagcagtgctctatatacatttctaatgtattcctcatggttatttatatyctggtaattttgaagccctgtccctgttttgtgtttgggaggtggggagggagatagactttctctgcactaaaaatgttatttcaacaagtggttcttt

SEQ ID NO: 28810 - DNA, 201 bp, Homo sapiens
tttctaatgtattcctcatggttatttatatcctggtaattttgaagccctgtccctgttttgtgtttgggaggtggggagggagatagactttctctgcrctaaaaatgttatttcaacaagtggttctttgtgatctgcaacccataatgggccttaaggcttctcaaggtgggcatgaaacatctaaaaattccagtc

SEQ ID NO: 28811 - DNA, 201 bp, Homo sapiens
ttagaacctaaatttataacatcaaatagctttctttgcataagttcccttggagccagtcactcatagtactttccatatgggaaggataacaaaggaamatatggaaattcagcttgcatgtggtagatacctagtaaaatctgataagttaattttgttagtaccaaattcattttaacactaaattaatttttcctg

SEQ ID NO: 28812 - DNA, 201 bp, Homo sapiens
cttgcccagaattgcctttctttttttctttttcccccttattgtggagaacggggtctcgctgtattgcccaggcaggtcccagaattgcctttcaagtrggagacctgccatagactcagagtcccaaaccctctgaccccaaaactcagatttgcaatcattatattgtgctattatttagactgggaatcagcaaac

SEQ ID NO: 28813 - DNA, 201 bp, Homo sapiens
gattgtacaaaattgaaatttgcaaacatcttactgagtttactgtttccttctgggtgttaggcctactgtagaaatcagaaaaatcggaaatattttgytgcttgctttgtgaaactcatgatgtgacatggattaaatttctaaaaagtttatttaattgcctttaaaattagtatgtcaaaaagtttatttatttat

SEQ ID NO: 28814 - DNA, 201 bp, Homo sapiens
ataatcctgcagtgaggatgtcctcttctaacacaaataacttcatccattttaattttctgttttaattgcttagtttttattaaagcctattgaaaackctctttaaaataagagttatataatttaagtatagggaatttaattttaaggcttttcttcagcttaaagattttgttggtgaatttaaatgcctgtagt

SEQ ID NO: 28815 - DNA, 201 bp, Homo sapiens
ggaaaaggatcttgtgttcactgctgcatctccccagaacctacctagaacagtgccttgcagttagtagacattcaggaaatatttgttgaatgaatgartatactcaggaaatgctttgttgtcataatcctgcagtgaggatgtcctcttctaacacaaataacttcatccattttaattttctgttttaattgctta

SEQ ID NO: 28816 - DNA, 201 bp, Homo sapiens
actttttctccacagcacttactgtcctctgatacactatatgtttattcatttattgccccctcccccaactagaatgtaaactctatgaggaaaaggaycttgtgttcactgctgcatctccccagaacctacctagaacagtgccttgcagttagtagacattcaggaaatatttgttgaatgaatgaatatactcag

SEQ ID NO: 28817 - DNA, 201 bp, Homo sapiens
cactttgggaggccaagacgggcagatcacttgaggccaggagttcgagaccagcctggccaacgtggtgaaacccccatctctactaaaaatacaaaaaytagccgggtgtggtgacgcacgcctgtaatcccagctactcaggaggctgaggcacgagaattgcttgaacgttggaggcagaggttgcagtgagccaag

SEQ ID NO: 28818 - DNA, 201 bp, Homo sapiens
ctcatgtttagttgtttttgcttattaaccacttgttttgacattgtgtgcttttctgcaaataggtcattcgcatagaaaatgctgacactttaccgagstgacatttaacttcataattcatcatagttaagtgaattgtgtcgtgtaaacttgacagtatgtaatgccttttaaaagatcattatgcaggctgggcac

SEQ ID NO: 28819 - DNA, 201 bp, Homo sapiens
tccacctgccttggcctcccaaattgctgggattataggtgtgagccacagcacctggcctctttaacagtgttttgttgagtttattaaaacaatttccrggacatatgttttattgttgatgtgtttgccattgtgaaaagttttattaaattggccacccattccaccattgcatctcccccacccgccagcctgctg

SEQ ID NO: 28820 - DNA, 201 bp, Homo sapiens; identical to SEQ ID NO: 5966

SEQ ID NO: 28821 - DNA, 201 bp, Homo sapiens
gagggcagctagccaacacagacatgctgaaggacagtgagggtgacagaggaagtgagctcaggtacaccttgctggactgctgagcacatatggaagtsacactgaacattcagaaattatttttatggaattccatgctttcatagactcttttctgttgttgtggtatttgataaaattccctaaaagcatttttta

SEQ ID NO: 28822 - DNA, 201 bp, Homo sapiens
atttcagaggtccaatactttttgctgtgtgccctaagaaaatacttatttgaaagatggaatacttgctatctaatggaattgtgataggaattattttrtaaatcaaagatttgttttctgtgtcctctgtgtgcacaactctgtgctgggtgctagtaggtgtgtttaaagatgaggaaggagcgacatggtcctacc

SEQ ID NO: 28823 - DNA, 201 bp, Homo sapiens
acatcctgtactttcctacctcccctttggctgtgatcccctctactcaaaacaaacactcttccctatcttcattgcattttgttgaaatcccatggctsttcatagctctcctcagatgcaggcccacccccacccgtgctgtttcctccttgtctcatcctgcctgtcacgttctcctgctcggcgggctccacctct

SEQ ID NO: 28824 - DNA, 201 bp, Homo sapiens
ttggggcctgaccaccacaagtgctcattaagtgccaccagctgttgtgggggtgatgacactgtgcctccagttccactcagtctgtgtactttattatsccacagacacatcctgtactttcctacctcccctttggctgtgatcccctctactcaaaacaaacactcttccctatcttcattgcattttgttgaaatc

SEQ ID NO: 28825 - DNA, 201 bp, Homo sapiens
cctcattcaccgtttgtccttttggtctttctaaaagcccgcttctggtcatatgacctttctgaattaaaaccttcagtgacctccactatttcacctgrccacgtccctgcgaggccctgagtggcgtggtccaggctgccccagcagccccagctctgctgccccatcaaggcagagcactagggtgagtgccaggca

SEQ ID NO: 28826 - DNA, 201 bp, Homo sapiens
gcccccgcacccagccttgcttttccattttgtatagttatcattgcatggatttgaggggaggcaatcaccaggtagccttaggactctatgtcccttgytctaggtctcttccacttgtgccctttttttatgccagtcaccagcaggctatttcaggtcctcattcaccgtttgtccttttggtctttctaaaagccc

SEQ ID NO: 28827 - DNA, 201 bp, Homo sapiens
gtgctgaaggccagcccactttctgctgtaattattctgccttctgatgttattctcgaaaaatggccagattccaggcgtgactaatggttggtgtaaaytaggcatgagaaggtttgattacaccttcaattgtatgattctatcatgatggtataggtttgcagtgagtcttaaaccacatagcactgacacgtagtg

SEQ ID NO: 28828 - DNA, 201 bp, Homo sapiens
gttttatcagctttcctgtgggaacaataaagttaatgacacagggagcataggttagggccagttgttactttggcacaaacacctgtgattcgttttcygagactagttttaaactggtcgtgctgaaggccagcccactttctgctgtaattattctgccttctgatgttattctcgaaaaatggccagattccaggc

SEQ ID NO: 28829 - DNA, 201 bp, Homo sapiens
gagtgcagtggcatgatctcagctcactgcaaactctgcctcccgggttcacaccattctcctgcctcagcctcccgagtagctggcagtacaggtgcccrccaccacacccagctaattttttgtagagacagggtttcaccgtgttagccaggatggtctcgatctcctgaccttgtgatccgcccgtctcggcctccc

SEQ ID NO: 28830 - DNA, 201 bp, Homo sapiens
atggtggcgcgcacctgagtcccagctactcatgaggctgaggcaggagaattgcttcaacctgggaggcggaggttgcagtgagctgagattgcgccacygcactccagctgacagagtgagactccatctcaaaaaaaaaaaaggatttttctaagatttctattttacattaaatagaaggcagttggtttgcatgaa

SEQ ID NO: 28831 - DNA, 201 bp, Homo sapiens
aattttctaatttttaagtatattagaaaatataattgtattgcatgagtagatagaagggaattataggaagtcagaattaatattttcaaaggggctgrgcacagtggctcatgcctgtaattccagcactttgggaaaccaaggcaggaggattgctggaggtcaggagctcaagaccagcctaagcaacagagcgag

SEQ ID NO: 28832 - DNA, 201 bp, Homo sapiens
acctcccacctcaacctcccaaagtgctgggatgacagacatgagcccccgcacccagccttgcttttccattttgtatagttatcattgcatggatttgrggggaggcaatcaccaggtagccttaggactctatgtcccttgttctaggtctcttccacttgtgccctttttttatgccagtcaccagcaggctatttc

SEQ ID NO: 28833 - DNA, 201 bp, Homo sapiens
ttatatagttgagtgttttgcttttcttttttttttttctgagacacggtgtcgctctgtcacccagtctggagtgtagtggcgtgatcagggcttactcragttcccaggcttatgcgatcctcccacctcagcctcctgagtatctggaaccacaggcactgccaccatgctggctaatttttgtattttctgtagaga

SEQ ID NO: 28834 - DNA, 201 bp, Homo sapiens
ttggctctaattcactttgtttcatttctgctgtactgttagtagagacttaaaaatgattgccttcatttgacctgctcccctgtcatcagaactgtgayaactctgtaacaagcattgtgctgcggaggatttaaaagctatgtggtcattagaatgctgaggctggctcagaccgcagttgttggtagttagtgcttt

SEQ ID NO: 28835 - DNA, 201 bp, Homo sapiens
tttggctctaattcactttgtttcatttctgctgtactgttagtagagacttaaaaatgattgccttcatttgacctgctcccctgtcatcagaactgtgwcaactctgtaacaagcattgtgctgcggaggatttaaaagctatgtggtcattagaatgctgaggctggctcagaccgcagttgttggtagttagtgctt

SEQ ID NO: 28836 - DNA, 201 bp, Homo sapiens
gggctgatcacttgaggccaggagttcgagaccagactggccaacatggcaaaaccctatctctactgaaaatatagaaattaactgggcatggtggcgcrcgcctgtgattccagctactcaggagactgaggcacaagaattgcttcaacccgggaggcataggttgcattgagctgagattgcaccactgcactgtga

SEQ ID NO: 28837 - DNA, 201 bp, Homo sapiens
ctccagcctgggcgacagagcgagactccatttcaaaaaaaaaaagtagaaataaggtgagtttctcttatttaaatggccttttacaattacaaaacttwaaaatttttctggtatagtccttatagggactttccttaaagttcacatttgcctttcagtacattattcctatccaaatttaactatctttggtcatca

SEQ ID NO: 28838 - DNA, 201 bp, Homo sapiens
ttaaatagaattcttcgtgtttattacataaaagtaaaattcatactgttgtcttgacacttagtttttattcattttgagatctaagactgaaaagtctrcttgtttaaatccccaatcacctatttttttcttaaaaagtgatttatgtcataccactgtagcaaataatatgttaatgtttgtttcattttcctgaaa

SEQ ID NO: 28839 - DNA, 201 bp, Homo sapiens
aggcgggcggatcacgaggtcaggagatcgagaccatcctggctaacatggtgaaaccccgtctctactaaaaatacaaaaattagctggacatgatggcrggcacctgtagtcccagctactaaggaggctgaggcaggagaatggtgtgaacctgggaggcggagctttcagtgagccaagatggcgccactatactcc

SEQ ID NO: 28840 - DNA, 201 bp, Homo sapiens
tatttaaaagtaaaagaaaattaggaaacgaaaatatatcttaaagacttttaatcattttcaactaaaatattttggataatactgccttatatttaggyagtatatattaaagattttcacatgcatgattgtactgtcgatgaccctgctgtatactactgatctgattatgaagtggttggcagttatttatagtag

SEQ ID NO: 28841 - DNA, 201 bp, Homo sapiens
ggttgatccatgttgccatgggcagtgtgaaggcctcctcctgcagctgcctccttcctctttatacctcaagggattataggaggaaaagttaagaaaarcacttctatagtaattgaccagtaaccctgatttttccggtggaagattaggaaatgtccaggcaccatggctcatgcctataatcccagcactttggga

SEQ ID NO: 28842 - DNA, 201 bp, Homo sapiens
gcgccgctgcactccagcctgggtgatgacagagcgagactccatctcaaaaaaaaaaaaaaaaaaagactagcattgattggccaggcatggtggctcaygcctgtaatcccagcactttgggaggccgaggcaggtggatcacctgaggtcgggaatttgagaccatcctagccaacatggagaaacccagtctctact

SEQ ID NO: 28843 - DNA, 201 bp, Homo sapiens
agttttcatgggattagttggttttttgttttttgttttttttactagtagcagtagaatcttttcaaatatgccttaatataggcgctggggcttgcccrtggtgctcttgatatataaggcccggacattctgccagttttttctcgagcagtgacaccaagaagttaacagccaggtgaatgttatgcacaagctcat

SEQ ID NO: 28844 - DNA, 201 bp, Homo sapiens
tatgtatgtcacattatacacctattggacagcattagagtattcactctgattttctcttggggcaggaattgccccttgtttcagttgctattcccccrttagcaccccgtgtatatcatgagtgccttgaaggtttgacaccacacttttctgtttcttttattccctgctaatgcctaccatatagttgactagccg

SEQ ID NO: 28845 - DNA, 201 bp, Homo sapiens
taatttaacgtattaaatatgtttctttttacattttttaatggagctactagaaaattgaaaattacatatgtatgtcacattatacacctattggacarcattagagtattcactctgattttctcttggggcaggaattgccccttgtttcagttgctattcccccgttagcaccccgtgtatatcatgagtgccttg

SEQ ID NO: 28846 - DNA, 201 bp, Homo sapiens
cattatagttggctgatatgtcaaatatgctttttttttttttttaattgagatggagtcttgctctgtcgcccaggttggagtgcagtggtgcaatctcrgctcactgccaacctctgccgcccgggttcaagcgattgtcgtgcgcagcctcccgagtagctgggattacaggctcccgccaccatgcctggctatttt

SEQ ID NO: 28847 - DNA, 201 bp, Homo sapiens
tttcgtagagatgagatctccctgtattgcccaaggtggtctctaactcctgggctcaagcaggcctcctgtcccagcctcccaaagcactggaattacargtgtgagccaccacactcagtcaaaactattttttaaaatattttattataggaaaatttaaaaaaatagaatgttatttatcaatgcttctcagccaca

SEQ ID NO: 28848 - DNA, 201 bp, Homo sapiens
ttgacctcttgggctcaagcaatccttccgactcagcctcctgagtagctgggactacaggcgtgccccaccacatgcatggctaatttttaattttttcktagagatgagatctccctgtattgcccaaggtggtctctaactcctgggctcaagcaggcctcctgtcccagcctcccaaagcactggaattacaggtgt

SEQ ID NO: 28849 - DNA, 201 bp, Homo sapiens
aagactttatcacttaactctcttaggccattcattaattacacagtaagtagggggaaaaggtacatatcttaatatacagcacctccatggccaggtgyggtggctcacacctgtaatcccagcactttgggaggctgaggtgggcggatcatgaggtcaggagattgagaccatcctggtgaacatggtgaagccccg

SEQ ID NO: 28850 - DNA, 201 bp, Homo sapiens
cagtgcgggccgggtgtggtggctcacacttataatcccaacactttggaaggccaaggcgggaggatcacttgaagccacaaatttaagaccagcctggrtaatatagcgagaccctgtctctacaaaaaaaataaataaagaaaaaataaaatatgtcagtgtgttttgggaacaggttgagagcatagcatgctcata

SEQ ID NO: 28851 - DNA, 201 bp, Homo sapiens
gtgagccaccgcaccccaccaatgtagtgtaaagtttaaaaaattgtataaatggactcatgctatgtgtattctcctattggcttttgctttgcttcctyttttttgtttttttgagacggagtttcgctcttgttacccaggctggagtacagtggcgtgatctcagcactgcagcctctgcctcctggattcaagtga

SEQ ID NO: 28852 - DNA, 201 bp, Homo sapiens
tatattgattgattgaggctgggtcttactttgtagcccaagctgaagtgcagtgtcatgatcatagctcactgtagcctggaacttctgggcttaagcartcctcccgtcttggcctcccaaagccttgggattataggcatgagtcaccacccccagcctgattatacatatttaaaatattgagaatagactgggcac

SEQ ID NO: 28853 - DNA, 201 bp, Homo sapiens
caccagtgatggacatttttggctattgtgactagaacagttttcttttagtattctgtaaaaatactttttattgtgcttaccccaggaatcttatttamattttaagtaattgtatataactgtgataagaatgtcgcttattagatcaagactaagaaaaggcaggccgggtgtggtggctcatacctgtaatcccag

SEQ ID NO: 28854 - DNA, 201 bp, Homo sapiens
gttatttaaaatccagtgtctgcattcacatcagtgtcataaatctgataaattaatacaaataggagatggcaaatgaaatccaagacaggcacttcttatattgattgattgaggctgggtcttactttgtagcccaagctgaagtgcagtgtcatgatcatagctcactgtagcctggaacttctgggcttaagcaat

SEQ ID NO: 28855 - DNA, 201 bp, Homo sapiens
atgcacatagcttaacaagtcaaatatactaaaaagttctaatgacaatcagaagtttcttttcttatccctctttttcctcagcattattactcaaaggmcccaacttttttaagctctttcttctgttactccaatagctttctccaaatttatcattttaaacatcattgacttccacttcccacttccatatctaca

SEQ ID NO: 28856 - DNA, 201 bp, Homo sapiens
agaaattccattgaagaaacgtttgactctgttcgttttctaactctgttctcctctaacactgggttcaaaagtgtttcaatctagttgttgactatatkctgtaaaacatctagtaaataatttgtaaagaaacttcactggcctttcattaaaagtgttatgaggtaattgctggcacgaaatgtcttctcttaggga

SEQ ID NO: 28857 - DNA, 201 bp, Homo sapiens
ctgggtgaatacagcaagaccctgtctccaaaaataaaaatttaaataaaaatgttttaattcagggacaagcagttcttgattttaaagacgtatctgcyttatgttggggctatcagaattccagttgctaattgattaatctgctctgttaggagaacgtttgttgaatacctgccctgccaggctttctgcttacac

SEQ ID NO: 28858 - DNA, 201 bp, Homo sapiens
aagtgattctcctgcctcagcctcccaagtagctgggattacaggcacccgctgccacacccagctaatttttgtatttttagtagagacagggtttcacygtgttagccaggctggtctcgaactcctgacctcaagtgatccacccgcttcagcctcccaaagtgctgaattacaggtgtggccaccgtgcccggcaaa

SEQ ID NO: 28859 - DNA, 201 bp, Homo sapiens
gattatgccggcagtctagtcggttaataaagcccaggagttgcagcgttacggatcggtgctttgagaggccaggttgccgcgcaatggattgtgcaaaygtgtgtgtcagatcactgcagtggtcagtgcttattttagccgaactctgcttttaacttggtcaggcagttcttgagagactgtcacattaataacata

SEQ ID NO: 28860 - DNA, 201 bp, Homo sapiens
tcgaaatttacatcaagctgtcagctttggtttatagggcttctgaaattgagcagctcattcttcattggcaagttgtagccagatattaaagaaaactrgaagaattcagaatctagttcagtcaggaataatcttatcaggtcatttctggaagtcaattctgtgaattaatattttagcagcgttttttgcttctaa

SEQ ID NO: 28861 - DNA, 201 bp, Homo sapiens
acccacagaagctactgactgtgaaattttagctacagcatgatcctgccaaactgaaagaggtaggcattagtaaggaaaaattaagaggggcaaaagcmttgttatgaagtcttgttattatgacagtcttgggaaaagctgtccatagcatgcagtccacaacttctcgtcctggttcgcagtttgaatgtctctggt

SEQ ID NO: 28862 - DNA, 201 bp, Homo sapiens
gtttttatgaaccaaatcaactaaaattgtatagccaaacaaggagtctgccaattttaaccaagttgtccgctctaccatacccaaatcgcaacgagaartgtcatgaactgcacagattcctccatgtttagtaggcatcccagcattccgtgaccgggctaagtataaagcagggagtgcaagttacccacagaagct

SEQ ID NO: 28863 - DNA, 201 bp, Homo sapiens
aaataaaaaaattaatgtaatacagctactatgaacccacaaaaactttaaaaaaattttttaattattaaaaaaatgtaatgctgctactgttttgcttwtgtagattgtgggctagaataggaaataaaactatcatttttaacacttttctggggggaaatattattcgaatttcataacaattagcttgatgacctt

SEQ ID NO: 28864 - DNA, 201 bp, Homo sapiens
ccgaacgctctggaaatagagggcaggccgtagtcacccaggaggcagccaggtcggaccgtttcctccagaagtctgccgtgtcccgctgttcgcgggckggtctgcgaagtacatcgattatgccggcagtctagtcggttaataaagcccaggagttgcagcgttacggatcggtgctttgagaggccaggttgccgc

SEQ ID NO: 28865 - DNA, 201 bp, Homo sapiens
ggcgggactccgggtggcggcctgtcgtcacttccggcagccggaggcagcagaggaagccgaggggcggccatcttggctccgtgaggctctgaggtgcyggggtgcggcggcggcagcggcggccagcagggcggaggctgaggcagcaagctcgctagagagggagaagcagtcgggcgcaggcgcctcctccgcagc

SEQ ID NO: 28866 - DNA, 201 bp, Homo sapiens
ttggatggatcttgaatacaacagtgggacacactgttatttctttgtggtgctcttgataccaatatatttagtcttatcacttggcctaggcaagcacrgaatgcccatgttccagggagctgagtcgggagagggcagaaggaaagatctgtggctttctgctttctctgcttgttttcagtgtccctgccctcagtt

SEQ ID NO: 28867 - DNA, 201 bp, Homo sapiens
caagcatttagagtatgctcctaagccagggtttttatgaaccaaatcaactaaaattgtatagccaaacaaggagtctgccaattttaaccaagttgtcygctctaccatacccaaatcgcaacgagaagtgtcatgaactgcacagattcctccatgtttagtaggcatcccagcattccgtgaccgggctaagtataa

SEQ ID NO: 28868 - DNA, 201 bp, Homo sapiens
ccctctagtggacatttgacaatgtctaaagacatctttggttatcacagctggagaaaggtttggctgaccaggaatgctactaaacattttacagtacrtaggacagccttccacagcaaagaattacccggcctaaaatgtcagtagtgccagcgttgagaaaccctggtatgtacttagccccccatgtactcaaca
